United States Patent Application Publication US 2025/0171800 A1 - sequence listing, part 3

SEQ ID NO: 45513 - DNA, 20 bp, synthetic construct
  misc_feature 1..20: note = chemically synthesized
  source 1..20: mol_type = other DNA
ggcatatattggctcagtca

SEQ ID NO: 45514 - DNA, 20 bp, synthetic construct
  misc_feature 1..20: note = chemically synthesized
  source 1..20: mol_type = other DNA
atatattggctcagtcaaag

SEQ ID NO: 45515 - DNA, 20 bp, synthetic construct
  misc_feature 1..20: note = chemically synthesized
  source 1..20: mol_type = other DNA
tatattggctcagtcaaagt

SEQ ID NO: 45516 - DNA, 20 bp, synthetic construct
  misc_feature 1..20: note = chemically synthesized
  source 1..20: mol_type = other DNA
atattggctcagtcaaagtg

SEQ ID NO: 45517 - DNA, 20 bp, synthetic construct
  misc_feature 1..20: note = chemically synthesized
  source 1..20: mol_type = other DNA
tcagtcaaagtggggaactt

SEQ ID NO: 45518 - DNA, 20 bp, synthetic construct
  misc_feature 1..20: note = chemically synthesized
  source 1..20: mol_type = other DNA
gtcaaagtggggaactttgg

SEQ ID NO: 45519 - DNA, 20 bp, synthetic construct
  misc_feature 1..20: note = chemically synthesized
  source 1..20: mol_type = other DNA
gtggccaaacatacattgct

SEQ ID NO: 45520 - DNA, 20 bp, synthetic construct
  misc_feature 1..20: note = chemically synthesized
  source 1..20: mol_type = other DNA
tggccaaacatacattgcta

SEQ ID NO: 45521 - DNA, 20 bp, synthetic construct
  misc_feature 1..20: note = chemically synthesized
  source 1..20: mol_type = other DNA
tgctaaggctattcctatat

SEQ ID NO: 45522 - DNA, 20 bp, synthetic construct
  misc_feature 1..20: note = chemically synthesized
  source 1..20: mol_type = other DNA
aaggctattcctatatcagc

SEQ ID NO: 45523 - DNA, 20 bp, synthetic construct
  misc_feature 1..20: note = chemically synthesized
  source 1..20: mol_type = other DNA
aaacttatatcctttaattc

SEQ ID NO: 45524 - DNA, 20 bp, synthetic construct
  misc_feature 1..20: note = chemically synthesized
  source 1..20: mol_type = other DNA
ttatatcctttaattccaga

SEQ ID NO: 45525 - DNA, 20 bp, synthetic construct
  misc_feature 1..20: note = chemically synthesized
  source 1..20: mol_type = other DNA
tatatcctttaattccagat

SEQ ID NO: 45526 - DNA, 20 bp, synthetic construct
  misc_feature 1..20: note = chemically synthesized
  source 1..20: mol_type = other DNA
atatcctttaattccagatg

SEQ ID NO: 45527 - DNA, 20 bp, synthetic construct
  misc_feature 1..20: note = chemically synthesized
  source 1..20: mol_type = other DNA
tatcctttaattccagatgg

SEQ ID NO: 45528 - DNA, 20 bp, synthetic construct
  misc_feature 1..20: note = chemically synthesized
  source 1..20: mol_type = other DNA
tttaattccagatgggggca

SEQ ID NO: 45529 - DNA, 20 bp, synthetic construct
  misc_feature 1..20: note = chemically synthesized
  source 1..20: mol_type = other DNA
agatgggggcaaagtatgtc

SEQ ID NO: 45530 - DNA, 20 bp, synthetic construct
  misc_feature 1..20: note = chemically synthesized
  source 1..20: mol_type = other DNA
gatgggggcaaagtatgtcc

SEQ ID NO: 45531 - DNA, 20 bp, synthetic construct
  misc_feature 1..20: note = chemically synthesized
  source 1..20: mol_type = other DNA
atgggggcaaagtatgtcca

SEQ ID NO: 45532 - DNA, 20 bp, synthetic construct
  misc_feature 1..20: note = chemically synthesized
  source 1..20: mol_type = other DNA
tgggggcaaagtatgtccag

SEQ ID NO: 45533 - DNA, 20 bp, synthetic construct
  misc_feature 1..20: note = chemically synthesized
  source 1..20: mol_type = other DNA
ggcaaagtatgtccaggggt

SEQ ID NO: 45534 - DNA, 20 bp, synthetic construct
  misc_feature 1..20: note = chemically synthesized
  source 1..20: mol_type = other DNA
gcaaagtatgtccaggggtg

SEQ ID NO: 45535 - DNA, 20 bp, synthetic construct
  misc_feature 1..20: note = chemically synthesized
  source 1..20: mol_type = other DNA
tgaggaacaattgaaacatt

SEQ ID NO: 45536 - DNA, 20 bp, synthetic construct
  misc_feature 1..20: note = chemically synthesized
  source 1..20: mol_type = other DNA
gaggaacaattgaaacattt

SEQ ID NO: 45537 - DNA, 20 bp, synthetic construct
  misc_feature 1..20: note = chemically synthesized
  source 1..20: mol_type = other DNA
aacaattgaaacatttgggc

SEQ ID NO: 45538 - DNA, 20 bp, synthetic construct
  misc_feature 1..20: note = chemically synthesized
  source 1..20: mol_type = other DNA
caattgaaacatttgggctg

SEQ ID NO: 45539 - DNA, 20 bp, synthetic construct
  misc_feature 1..20: note = chemically synthesized
  source 1..20: mol_type = other DNA
ttgaaacatttgggctggag

SEQ ID NO: 45540 - DNA, 20 bp, synthetic construct
  misc_feature 1..20: note = chemically synthesized
  source 1..20: mol_type = other DNA
tgggctggagtagattttga

SEQ ID NO: 45541 - DNA, 20 bp, synthetic construct
  misc_feature 1..20: note = chemically synthesized
  source 1..20: mol_type = other DNA
ctggagtagattttgaaagt

SEQ ID NO: 45542 - DNA, 20 bp, synthetic construct
  misc_feature 1..20: note = chemically synthesized
  source 1..20: mol_type = other DNA
gcgtgtgtttgtgtgtgtgt

SEQ ID NO: 45543 - DNA, 20 bp, synthetic construct
  misc_feature 1..20: note = chemically synthesized
  source 1..20: mol_type = other DNA
gtgtgtttgtgtgtgtgtga

SEQ ID NO: 45544 - DNA, 20 bp, synthetic construct
  misc_feature 1..20: note = chemically synthesized
  source 1..20: mol_type = other DNA
tgtgtttcttttaacgtttt

SEQ ID NO: 45545 - DNA, 20 bp, synthetic construct
  misc_feature 1..20: note = chemically synthesized
  source 1..20: mol_type = other DNA
cttttaacgttttcagccta

SEQ ID NO: 45546 - DNA, 20 bp, synthetic construct
  misc_feature 1..20: note = chemically synthesized
  source 1..20: mol_type = other DNA
cgttttcagcctacagcata

SEQ ID NO: 45547 - DNA, 20 bp, synthetic construct
  misc_feature 1..20: note = chemically synthesized
  source 1..20: mol_type = other DNA
gttttcagcctacagcatac

SEQ ID NO: 45548 - DNA, 20 bp, synthetic construct
  misc_feature 1..20: note = chemically synthesized
  source 1..20: mol_type = other DNA
ttttcagcctacagcataca

SEQ ID NO: 45549 - DNA, 20 bp, synthetic construct
  misc_feature 1..20: note = chemically synthesized
  source 1..20: mol_type = other DNA
cctacagcatacagggttca

SEQ ID NO: 45550 - DNA, 20 bp, synthetic construct
  misc_feature 1..20: note = chemically synthesized
  source 1..20: mol_type = other DNA
acagcatacagggttcatgg

SEQ ID NO: 45551 - DNA, 20 bp, synthetic construct
  misc_feature 1..20: note = chemically synthesized
  source 1..20: mol_type = other DNA
catacagggttcatggtggc

SEQ ID NO: 45552 - DNA, 20 bp, synthetic construct
  misc_feature 1..20: note = chemically synthesized
  source 1..20: mol_type = other DNA
acagggttcatggtggcaag

SEQ ID NO: 45553 - DNA, 20 bp, synthetic construct
  misc_feature 1..20: note = chemically synthesized
  source 1..20: mol_type = other DNA
catggtggcaagaagataac

SEQ ID NO: 45554 - DNA, 20 bp, synthetic construct
  misc_feature 1..20: note = chemically synthesized
  source 1..20: mol_type = other DNA
agataacaagatttaaatta

SEQ ID NO: 45555 - DNA, 20 bp, synthetic construct
  misc_feature 1..20: note = chemically synthesized
  source 1..20: mol_type = other DNA
aacaagatttaaattatggc

SEQ ID NO: 45556 - DNA, 20 bp, synthetic construct
  misc_feature 1..20: note = chemically synthesized
  source 1..20: mol_type = other DNA
tttaaattatggccagtgac

SEQ ID NO: 45557 - DNA, 20 bp, synthetic construct
  misc_feature 1..20: note = chemically synthesized
  source 1..20: mol_type = other DNA
tggccagtgactagtgctgc

SEQ ID NO: 45558 - DNA, 20 bp, synthetic construct
  misc_feature 1..20: note = chemically synthesized
  source 1..20: mol_type = other DNA
ccagtgactagtgctgcaag

SEQ ID NO: 45559 - DNA, 20 bp, synthetic construct
  misc_feature 1..20: note = chemically synthesized
  source 1..20: mol_type = other DNA
gaacaactacctgcatttaa

SEQ ID NO: 45560 - DNA, 20 bp, synthetic construct
  misc_feature 1..20: note = chemically synthesized
  source 1..20: mol_type = other DNA
aacaactacctgcatttaat

SEQ ID NO: 45561 - DNA, 20 bp, synthetic construct
  misc_feature 1..20: note = chemically synthesized
  source 1..20: mol_type = other DNA
actacctgcatttaatggga

SEQ ID NO: 45562 - DNA, 20 bp, synthetic construct
  misc_feature 1..20: note = chemically synthesized
  source 1..20: mol_type = other DNA
ttaatgggaaagcaaaatct

SEQ ID NO: 45563 - DNA, 20 bp, synthetic construct
  misc_feature 1..20: note = chemically synthesized
  source 1..20: mol_type = other DNA
taatgggaaagcaaaatctc

SEQ ID NO: 45564 - DNA, 20 bp, synthetic construct
  misc_feature 1..20: note = chemically synthesized
  source 1..20: mol_type = other DNA
aaagcaaaatctcaggcttt

SEQ ID NO: 45565 - DNA, 20 bp, synthetic construct
  misc_feature 1..20: note = chemically synthesized
  source 1..20: mol_type = other DNA
aagcaaaatctcaggctttg

SEQ ID NO: 45566 - DNA, 20 bp, synthetic construct
  misc_feature 1..20: note = chemically synthesized
  source 1..20: mol_type = other DNA
agcaaaatctcaggctttga

SEQ ID NO: 45567 - DNA, 20 bp, synthetic construct
  misc_feature 1..20: note = chemically synthesized
  source 1..20: mol_type = other DNA
aaaatctcaggctttgaggg

SEQ ID NO: 45568 - DNA, 20 bp, synthetic construct
  misc_feature 1..20: note = chemically synthesized
  source 1..20: mol_type = other DNA
ggctttgagggaagttaaca

SEQ ID NO: 45569 - DNA, 20 bp, synthetic construct
  misc_feature 1..20: note = chemically synthesized
  source 1..20: mol_type = other DNA
gctttgagggaagttaacat

SEQ ID NO: 45570 - DNA, 20 bp, synthetic construct
  misc_feature 1..20: note = chemically synthesized
  source 1..20: mol_type = other DNA
agttaacataggcttgattc

SEQ ID NO: 45571 - DNA, 20 bp, synthetic construct
  misc_feature 1..20: note = chemically synthesized
  source 1..20: mol_type = other DNA
gttaacataggcttgattct

SEQ ID NO: 45572 - DNA, 20 bp, synthetic construct
  misc_feature 1..20: note = chemically synthesized
  source 1..20: mol_type = other DNA
aacataggcttgattctggg

SEQ ID NO: 45573 - DNA, 20 bp, synthetic construct
  misc_feature 1..20: note = chemically synthesized
  source 1..20: mol_type = other DNA
ataggcttgattctgggtgg

SEQ ID NO: 45574 - DNA, 20 bp, synthetic construct
  misc_feature 1..20: note = chemically synthesized
  source 1..20: mol_type = other DNA
cttgattctgggtggaagct

SEQ ID NO: 45575 - DNA, 20 bp, synthetic construct
  misc_feature 1..20: note = chemically synthesized
  source 1..20: mol_type = other DNA
ctgggtggaagcttggtgtg

SEQ ID NO: 45576 - DNA, 20 bp, synthetic construct
  misc_feature 1..20: note = chemically synthesized
  source 1..20: mol_type = other DNA
aagcttggtgtgtagttatc

SEQ ID NO: 45577 - DNA, 20 bp, synthetic construct
  misc_feature 1..20: note = chemically synthesized
  source 1..20: mol_type = other DNA
gcttggtgtgtagttatctg

SEQ ID NO: 45578 - DNA, 20 bp, synthetic construct
  misc_feature 1..20: note = chemically synthesized
  source 1..20: mol_type = other DNA
cttggtgtgtagttatctgg

SEQ ID NO: 45579 - DNA, 20 bp, synthetic construct
  misc_feature 1..20: note = chemically synthesized
  source 1..20: mol_type = other DNA
gtgtgtagttatctggaggc

SEQ ID NO: 45580 - DNA, 20 bp, synthetic construct
  misc_feature 1..20: note = chemically synthesized
  source 1..20: mol_type = other DNA
tgtgtagttatctggaggcc

SEQ ID NO: 45581 - DNA, 20 bp, synthetic construct
  misc_feature 1..20: note = chemically synthesized
  source 1..20: mol_type = other DNA
tagttatctggaggccaggc

SEQ ID NO: 45582 - DNA, 20 bp, synthetic construct
  misc_feature 1..20: note = chemically synthesized
  source 1..20: mol_type = other DNA
gttatctggaggccaggctg

SEQ ID NO: 45583 - DNA, 20 bp, synthetic construct
  misc_feature 1..20: note = chemically synthesized
  source 1..20: mol_type = other DNA
ggaggccaggctggagctct

SEQ ID NO: 45584 - DNA, 20 bp, synthetic construct
  misc_feature 1..20: note = chemically synthesized
  source 1..20: mol_type = other DNA
ctggagctctcagctcacta

SEQ ID NO: 45585 - DNA, 20 bp, synthetic construct
  misc_feature 1..20: note = chemically synthesized
  source 1..20: mol_type = other DNA
tggagctctcagctcactat

SEQ ID NO: 45586 - DNA, 20 bp, synthetic construct
  misc_feature 1..20: note = chemically synthesized
  source 1..20: mol_type = other DNA
attgtctcctttcatctcaa

SEQ ID NO: 45587 - DNA, 20 bp, synthetic construct
  misc_feature 1..20: note = chemically synthesized
  source 1..20: mol_type = other DNA
cctttcatctcaacagctcc

SEQ ID NO: 45588 - DNA, 20 bp, synthetic construct
  misc_feature 1..20: note = chemically synthesized
  source 1..20: mol_type = other DNA
ctttcatctcaacagctcct

SEQ ID NO: 45589 - DNA, 20 bp, synthetic construct
  misc_feature 1..20: note = chemically synthesized
  source 1..20: mol_type = other DNA
acagctcctgggaaatgtgc

SEQ ID NO: 45590 - DNA, 20 bp, synthetic construct
  misc_feature 1..20: note = chemically synthesized
  source 1..20: mol_type = other DNA
aaatgtgctggtgaccgttt

SEQ ID NO: 45591 - DNA, 20 bp, synthetic construct
  misc_feature 1..20: note = chemically synthesized
  source 1..20: mol_type = other DNA
accgttttggcaatccattt

SEQ ID NO: 45592 - DNA, 20 bp, synthetic construct
  misc_feature 1..20: note = chemically synthesized
  source 1..20: mol_type = other DNA
tttggcaatccatttcggca

SEQ ID NO: 45593 - DNA, 20 bp, synthetic construct
  misc_feature 1..20: note = chemically synthesized
  source 1..20: mol_type = other DNA
tcggcaaagaattcacccct

SEQ ID NO: 45594 - DNA, 20 bp, synthetic construct
  misc_feature 1..20: note = chemically synthesized
  source 1..20: mol_type = other DNA
cggcaaagaattcacccctg

SEQ ID NO: 45595 - DNA, 20 bp, synthetic construct
  misc_feature 1..20: note = chemically synthesized
  source 1..20: mol_type = other DNA
aagaattcacccctgaggtg

SEQ ID NO: 45596 - DNA, 20 bp, synthetic construct
  misc_feature 1..20: note = chemically synthesized
  source 1..20: mol_type = other DNA
agaattcacccctgaggtgc

SEQ ID NO: 45597 - DNA, 20 bp, synthetic construct
  misc_feature 1..20: note = chemically synthesized
  source 1..20: mol_type = other DNA
cccctgaggtgcaggcttcc

SEQ ID NO: 45598 - DNA, 20 bp, synthetic construct
  misc_feature 1..20: note = chemically synthesized
  source 1..20: mol_type = other DNA
ctgaggtgcaggcttcctgg

SEQ ID NO: 45599 - DNA, 20 bp, synthetic construct
  misc_feature 1..20: note = chemically synthesized
  source 1..20: mol_type = other DNA
aggtgcaggcttcctggcag

SEQ ID NO: 45600 - DNA, 20 bp, synthetic construct
  misc_feature 1..20: note = chemically synthesized
  source 1..20: mol_type = other DNA
gcaggcttcctggcagaaga

SEQ ID NO: 45601 - DNA, 20 bp, synthetic construct
  misc_feature 1..20: note = chemically synthesized
  source 1..20: mol_type = other DNA
tcctggcagaagatggtgac

SEQ ID NO: 45602 - DNA, 20 bp, synthetic construct
  misc_feature 1..20: note = chemically synthesized
  source 1..20: mol_type = other DNA
ctggcagaagatggtgactg

SEQ ID NO: 45603 - DNA, 20 bp, synthetic construct
  misc_feature 1..20: note = chemically synthesized
  source 1..20: mol_type = other DNA
gcagaagatggtgactggag

SEQ ID NO: 45604 - DNA, 20 bp, synthetic construct
  misc_feature 1..20: note = chemically synthesized
  source 1..20: mol_type = other DNA
aagatggtgactggagtggc

SEQ ID NO: 45605 - DNA, 20 bp, synthetic construct
  misc_feature 1..20: note = chemically synthesized
  source 1..20: mol_type = other DNA
gtggccagtgccctgtcctc

SEQ ID NO: 45606 - DNA, 20 bp, synthetic construct
  misc_feature 1..20: note = chemically synthesized
  source 1..20: mol_type = other DNA
cctgtcctccagataccact

SEQ ID NO: 45607 - DNA, 20 bp, synthetic construct
  misc_feature 1..20: note = chemically synthesized
  source 1..20: mol_type = other DNA
tgagctcactgcccatgatg

SEQ ID NO: 45608 - DNA, 20 bp, synthetic construct
  misc_feature 1..20: note = chemically synthesized
  source 1..20: mol_type = other DNA
agctcactgcccatgatgca

SEQ ID NO: 45609 - DNA, 20 bp, synthetic construct
  misc_feature 1..20: note = chemically synthesized
  source 1..20: mol_type = other DNA
gcccatgatgcagagctttc

SEQ ID NO: 45610 - DNA, 20 bp, synthetic construct
  misc_feature 1..20: note = chemically synthesized
  source 1..20: mol_type = other DNA
cccatgatgcagagctttca

SEQ ID NO: 45611 - DNA, 20 bp, synthetic construct
  misc_feature 1..20: note = chemically synthesized
  source 1..20: mol_type = other DNA
tgatgcagagctttcaagga

SEQ ID NO: 45612 - DNA, 20 bp, synthetic construct
  misc_feature 1..20: note = chemically synthesized
  source 1..20: mol_type = other DNA
gatgcagagctttcaaggat

SEQ ID NO: 45613 - DNA, 20 bp, synthetic construct
  misc_feature 1..20: note = chemically synthesized
  source 1..20: mol_type = other DNA
aaggataggctttattctgc

SEQ ID NO: 45614 - DNA, 20 bp, synthetic construct
  misc_feature 1..20: note = chemically synthesized
  source 1..20: mol_type = other DNA
aataataaatctattctgct

SEQ ID NO: 45615 - DNA, 20 bp, synthetic construct
  misc_feature 1..20: note = chemically synthesized
  source 1..20: mol_type = other DNA
taataaatctattctgctaa

SEQ ID NO: 45616 - DNA, 20 bp, synthetic construct
  misc_feature 1..20: note = chemically synthesized
  source 1..20: mol_type = other DNA
ttctgctaagagatcacaca

SEQ ID NO: 45617 - DNA, 20 bp, synthetic construct
  misc_feature 1..20: note = chemically synthesized
  source 1..20: mol_type = other DNA
agatcacacatggttgtctt

SEQ ID NO: 45618 - DNA, 20 bp, synthetic construct
  misc_feature 1..20: note = chemically synthesized
  source 1..20: mol_type = other DNA
ttatgtctttttaaatatat

SEQ ID NO: 45619 - DNA, 20 bp, synthetic construct
  misc_feature 1..20: note = chemically synthesized
  source 1..20: mol_type = other DNA
ttttaaatatatgagccaca

SEQ ID NO: 45620 - DNA, 20 bp, synthetic construct
  misc_feature 1..20: note = chemically synthesized
  source 1..20: mol_type = other DNA
tttaaatatatgagccacaa

SEQ ID NO: 45621 - DNA, 20 bp, synthetic construct
  misc_feature 1..20: note = chemically synthesized
  source 1..20: mol_type = other DNA
ttaaatatatgagccacaaa

SEQ ID NO: 45622 - DNA, 20 bp, synthetic construct
  misc_feature 1..20: note = chemically synthesized
  source 1..20: mol_type = other DNA
gccacaaagggttttatgtt

SEQ ID NO: 45623 - DNA, 20 bp, synthetic construct
  misc_feature 1..20: note = chemically synthesized
  source 1..20: mol_type = other DNA
ccacaaagggttttatgttg

SEQ ID NO: 45624 - DNA, 20 bp, synthetic construct
  misc_feature 1..20: note = chemically synthesized
  source 1..20: mol_type = other DNA
cacaaagggttttatgttga

SEQ ID NO: 45625 - DNA, 20 bp, synthetic construct
  misc_feature 1..20: note = chemically synthesized
  source 1..20: mol_type = other DNA
tgtttatgtgtatttataca

SEQ ID NO: 45626 - DNA, 20 bp, synthetic construct
  misc_feature 1..20: note = chemically synthesized
  source 1..20: mol_type = other DNA
ccacacttttttgtttacgt

SEQ ID NO: 45627 - DNA, 20 bp, synthetic construct
  misc_feature 1..20: note = chemically synthesized
  source 1..20: mol_type = other DNA
ttttttgtttacgttagatg

SEQ ID NO: 45628 - DNA, 20 bp, synthetic construct
  misc_feature 1..20: note = chemically synthesized
  source 1..20: mol_type = other DNA
tttttgtttacgttagatgt

SEQ ID NO: 45629 - DNA, 20 bp, synthetic construct
  misc_feature 1..20: note = chemically synthesized
  source 1..20: mol_type = other DNA
cgttagatgtgggttttgat

SEQ ID NO: 45630 - DNA, 20 bp, synthetic construct
  misc_feature 1..20: note = chemically synthesized
  source 1..20: mol_type = other DNA
gggttttgatgagcaaataa

SEQ ID NO: 45631 - DNA, 20 bp, synthetic construct
  misc_feature 1..20: note = chemically synthesized
  source 1..20: mol_type = other DNA
tgatgagcaaataaaagaac

SEQ ID NO: 45632 - DNA, 20 bp, synthetic construct
  misc_feature 1..20: note = chemically synthesized
  source 1..20: mol_type = other DNA
gatgagcaaataaaagaact

SEQ ID NO: 45633 - DNA, 20 bp, synthetic construct
  misc_feature 1..20: note = chemically synthesized
  source 1..20: mol_type = other DNA
aataaaagaactaggcaata

SEQ ID NO: 45634 - DNA, 20 bp, synthetic construct
  misc_feature 1..20: note = chemically synthesized
  source 1..20: mol_type = other DNA
gcaataaagaaacttgtaca

SEQ ID NO: 45635 - DNA, 20 bp, synthetic construct
  misc_feature 1..20: note = chemically synthesized
  source 1..20: mol_type = other DNA
caataaagaaacttgtacat

SEQ ID NO: 45636 - DNA, 20 bp, synthetic construct
  misc_feature 1..20: note = chemically synthesized
  source 1..20: mol_type = other DNA
ataaagaaacttgtacatgg

SEQ ID NO: 45637 - DNA, 20 bp, synthetic construct
  misc_feature 1..20: note = chemically synthesized
  source 1..20: mol_type = other DNA
cttgtacatgggagttctgc

SEQ ID NO: 45638 - DNA, 20 bp, synthetic construct
  misc_feature 1..20: note = chemically synthesized
  source 1..20: mol_type = other DNA
gtacatgggagttctgcaag

SEQ ID NO: 45639 - DNA, 20 bp, synthetic construct
  misc_feature 1..20: note = chemically synthesized
  source 1..20: mol_type = other DNA
tacatgggagttctgcaagt

SEQ ID NO: 45640 - DNA, 20 bp, synthetic construct
  misc_feature 1..20: note = chemically synthesized
  source 1..20: mol_type = other DNA
catgggagttctgcaagtgg

SEQ ID NO: 45641 - DNA, 20 bp, synthetic construct
  misc_feature 1..20: note = chemically synthesized
  source 1..20: mol_type = other DNA
agttctgcaagtgggagtaa

SEQ ID NO: 45642 - DNA, 20 bp, synthetic construct
  misc_feature 1..20: note = chemically synthesized
  source 1..20: mol_type = other DNA
gttctgcaagtgggagtaaa

SEQ ID NO: 45643 - DNA, 20 bp, synthetic construct
  misc_feature 1..20: note = chemically synthesized
  source 1..20: mol_type = other DNA
gcaagtgggagtaaaaggtg

SEQ ID NO: 45644 - DNA, 20 bp, synthetic construct
  misc_feature 1..20: note = chemically synthesized
  source 1..20: mol_type = other DNA
caagtgggagtaaaaggtgc

SEQ ID NO: 45645 - DNA, 20 bp, synthetic construct
  misc_feature 1..20: note = chemically synthesized
  source 1..20: mol_type = other DNA
agtgggagtaaaaggtgcag

SEQ ID NO: 45646 - DNA, 20 bp, synthetic construct
  misc_feature 1..20: note = chemically synthesized
  source 1..20: mol_type = other DNA
taaaaggtgcaggagaaatc

SEQ ID NO: 45647 - DNA, 20 bp, synthetic construct
  misc_feature 1..20: note = chemically synthesized
  source 1..20: mol_type = other DNA
aggtgcaggagaaatctggt

SEQ ID NO: 45648 - DNA, 20 bp, synthetic construct
  misc_feature 1..20: note = chemically synthesized
  source 1..20: mol_type = other DNA
tgcaggagaaatctggttgg

SEQ ID NO: 45649 - DNA, 20 bp, synthetic construct
  misc_feature 1..20: note = chemically synthesized
  source 1..20: mol_type = other DNA
ggagaaatctggttggaaga

SEQ ID NO: 45650 - DNA, 20 bp, synthetic construct
  misc_feature 1..20: note = chemically synthesized
  source 1..20: mol_type = other DNA
ggttggaagaaagacctcta

SEQ ID NO: 45651 - DNA, 20 bp, synthetic construct
  misc_feature 1..20: note = chemically synthesized
  source 1..20: mol_type = other DNA
gttggaagaaagacctctat

SEQ ID NO: 45652 - DNA, 20 bp, synthetic construct
  misc_feature 1..20: note = chemically synthesized
  source 1..20: mol_type = other DNA
gaagaaagacctctatagga

SEQ ID NO: 45653 - DNA, 20 bp, synthetic construct
  misc_feature 1..20: note = chemically synthesized
  source 1..20: mol_type = other DNA
aagaaagacctctataggac

SEQ ID NO: 45654 - DNA, 20 bp, synthetic construct
  misc_feature 1..20: note = chemically synthesized
  source 1..20: mol_type = other DNA
ctctataggacaggactcct

SEQ ID NO: 45655 - DNA, 20 bp, synthetic construct
  misc_feature 1..20: note = chemically synthesized
  source 1..20: mol_type = other DNA
aggacaggactcctcagaaa

SEQ ID NO: 45656 - DNA, 20 bp, synthetic construct
  misc_feature 1..20: note = chemically synthesized
  source 1..20: mol_type = other DNA
ctcctcagaaacagatgttt

SEQ ID NO: 45657 - DNA, 20 bp, synthetic construct
  misc_feature 1..20: note = chemically synthesized
  source 1..20: mol_type = other DNA
ctcagaaacagatgttttgg

SEQ ID NO: 45658 - DNA, 20 bp, synthetic construct
  misc_feature 1..20: note = chemically synthesized
  source 1..20: mol_type = other DNA
cagaaacagatgttttggaa

SEQ ID NO: 45659 - DNA, 20 bp, synthetic construct
  misc_feature 1..20: note = chemically synthesized
  source 1..20: mol_type = other DNA
aacagatgttttggaagaga

SEQ ID NO: 45660 - DNA, 20 bp, synthetic construct
  misc_feature 1..20: note = chemically synthesized
  source 1..20: mol_type = other DNA
acagatgttttggaagagat

SEQ ID NO: 45661 - DNA, 20 bp, synthetic construct
  misc_feature 1..20: note = chemically synthesized
  source 1..20: mol_type = other DNA
cagatgttttggaagagatg

SEQ ID NO: 45662 - DNA, 20 bp, synthetic construct
  misc_feature 1..20: note = chemically synthesized
  source 1..20: mol_type = other DNA
tgttttggaagagatgggga

SEQ ID NO: 45663 - DNA, 20 bp, synthetic construct
  misc_feature 1..20: note = chemically synthesized
  source 1..20: mol_type = other DNA
gttttggaagagatggggaa

SEQ ID NO: 45664 - DNA, 20 bp, synthetic construct
  misc_feature 1..20: note = chemically synthesized
  source 1..20: mol_type = other DNA
ggaagagatggggaaaggtt

SEQ ID NO: 45665 - DNA, 20 bp, synthetic construct
  misc_feature 1..20: note = chemically synthesized
  source 1..20: mol_type = other DNA
agatggggaaaggttcagtg

SEQ ID NO: 45666 - DNA, 20 bp, synthetic construct
  misc_feature 1..20: note = chemically synthesized
  source 1..20: mol_type = other DNA
gatggggaaaggttcagtga

SEQ ID NO: 45667 - DNA, 20 bp, synthetic construct
  misc_feature 1..20: note = chemically synthesized
  source 1..20: mol_type = other DNA
atggggaaaggttcagtgaa

SEQ ID NO: 45668 - DNA, 20 bp, synthetic construct
  misc_feature 1..20: note = chemically synthesized
  source 1..20: mol_type = other DNA
tggggaaaggttcagtgaag

SEQ ID NO: 45669 - DNA, 20 bp, synthetic construct
  misc_feature 1..20: note = chemically synthesized
  source 1..20: mol_type = other DNA
ggggaaaggttcagtgaagg

SEQ ID NO: 45670 - DNA, 20 bp, synthetic construct
  misc_feature 1..20: note = chemically synthesized
  source 1..20: mol_type = other DNA
gggggctgaacccccttccc

SEQ ID NO: 45671 - DNA, 20 bp, synthetic construct
  misc_feature 1..20: note = chemically synthesized
  source 1..20: mol_type = other DNA
gaacccccttccctggattg

SEQ ID NO: 45672 - DNA, 20 bp, synthetic construct
  misc_feature 1..20: note = chemically synthesized
  source 1..20: mol_type = other DNA
cccttccctggattgcagca

SEQ ID NO: 45673 - DNA, 20 bp, synthetic construct
  misc_feature 1..20: note = chemically synthesized
  source 1..20: mol_type = other DNA
ttccctggattgcagcacag

SEQ ID NO: 45674 - DNA, 20 bp, synthetic construct
  misc_feature 1..20: note = chemically synthesized
  source 1..20: mol_type = other DNA
ctggattgcagcacagcagc

SEQ ID NO: 45675 - DNA, 20 bp, synthetic construct
  misc_feature 1..20: note = chemically synthesized
  source 1..20: mol_type = other DNA
tggattgcagcacagcagcg

SEQ ID NO: 45676 - DNA, 20 bp, synthetic construct
  misc_feature 1..20: note = chemically synthesized
  source 1..20: mol_type = other DNA
attgcagcacagcagcgagg

SEQ ID NO: 45677 - DNA, 20 bp, synthetic construct
  misc_feature 1..20: note = chemically synthesized
  source 1..20: mol_type = other DNA
ttgcagcacagcagcgagga

SEQ ID NO: 45678 - DNA, 20 bp, synthetic construct
  misc_feature 1..20: note = chemically synthesized
  source 1..20: mol_type = other DNA
tgcagcacagcagcgaggaa

SEQ ID NO: 45679 - DNA, 20 bp, synthetic construct
  misc_feature 1..20: note = chemically synthesized
  source 1..20: mol_type = other DNA
gcagcacagcagcgaggaag

SEQ ID NO: 45680 - DNA, 20 bp, synthetic construct
  misc_feature 1..20: note = chemically synthesized
  source 1..20: mol_type = other DNA
agcgaggaaggggctcaacg

SEQ ID NO: 45681 - DNA, 20 bp, synthetic construct
  misc_feature 1..20: note = chemically synthesized
  source 1..20: mol_type = other DNA
gaaggggctcaacgaagaaa

SEQ ID NO: 45682 - DNA, 20 bp, synthetic construct
  misc_feature 1..20: note = chemically synthesized
  source 1..20: mol_type = other DNA
caacgaagaaaaagtgttcc

SEQ ID NO: 45683 - DNA, 20 bp, synthetic construct
  misc_feature 1..20: note = chemically synthesized
  source 1..20: mol_type = other DNA
agaaaaagtgttccaagctt

SEQ ID NO: 45684 - DNA, 20 bp, synthetic construct
  misc_feature 1..20: note = chemically synthesized
  source 1..20: mol_type = other DNA
gaaaaagtgttccaagcttt

SEQ ID NO: 45685 - DNA, 20 bp, synthetic construct
  misc_feature 1..20: note = chemically synthesized
  source 1..20: mol_type = other DNA
aaagtgttccaagctttagg

SEQ ID NO: 45686 - DNA, 20 bp, synthetic construct
  misc_feature 1..20: note = chemically synthesized
  source 1..20: mol_type = other DNA
gttccaagctttaggaagtc

SEQ ID NO: 45687 - DNA, 20 bp, synthetic construct
  misc_feature 1..20: note = chemically synthesized
  source 1..20: mol_type = other DNA
ttccaagctttaggaagtca

SEQ ID NO: 45688 - DNA, 20 bp, synthetic construct
  misc_feature 1..20: note = chemically synthesized
  source 1..20: mol_type = other DNA
agctttaggaagtcaaggtt

SEQ ID NO: 45689 - DNA, 20 bp, synthetic construct
  misc_feature 1..20: note = chemically synthesized
  source 1..20: mol_type = other DNA
gctttaggaagtcaaggttt

SEQ ID NO: 45690 - DNA, 20 bp, synthetic construct
  misc_feature 1..20: note = chemically synthesized
  source 1..20: mol_type = other DNA
ttaggaagtcaaggtttagg

SEQ ID NO: 45691 - DNA, 20 bp, synthetic construct
  misc_feature 1..20: note = chemically synthesized
  source 1..20: mol_type = other DNA
taggaagtcaaggtttaggc

SEQ ID NO: 45692 - DNA, 20 bp, synthetic construct
  misc_feature 1..20: note = chemically synthesized
  source 1..20: mol_type = other DNA
aggaagtcaaggtttaggca

SEQ ID NO: 45693 - DNA, 20 bp, synthetic construct
  misc_feature 1..20: note = chemically synthesized
  source 1..20: mol_type = other DNA
agtcaaggtttaggcaggga

SEQ ID NO: 45694 - DNA, 20 bp, synthetic construct
  misc_feature 1..20: note = chemically synthesized
  source 1..20: mol_type = other DNA
ggatagccattctattttat

SEQ ID NO: 45695 - DNA, 20 bp, synthetic construct
  misc_feature 1..20: note = chemically synthesized
  source 1..20: mol_type = other DNA
gatagccattctattttatt

SEQ ID NO: 45696 - DNA, 20 bp, synthetic construct
  misc_feature 1..20: note = chemically synthesized
  source 1..20: mol_type = other DNA
atagccattctattttatta

SEQ ID NO: 45697 - DNA, 20 bp, synthetic construct
  misc_feature 1..20: note = chemically synthesized
  source 1..20: mol_type = other DNA
tagccattctattttattag

SEQ ID NO: 45698 - DNA, 20 bp, synthetic construct
  misc_feature 1..20: note = chemically synthesized
  source 1..20: mol_type = other DNA
aggggcaatactatttccaa

SEQ ID NO: 45699 - DNA, 20 bp, synthetic construct
  misc_feature 1..20: note = chemically synthesized
  source 1..20: mol_type = other DNA
atactatttccaacggcatc

SEQ ID NO: 45700 - DNA, 20 bp, synthetic construct
  misc_feature 1..20: note = chemically synthesized
  source 1..20: mol_type = other DNA
caacggcatctggcttttct

SEQ ID NO: 45701 - DNA, 20 bp, synthetic construct
  misc_feature 1..20: note = chemically synthesized
  source 1..20: mol_type = other DNA
tggcttttctcagcccttgt

SEQ ID NO: 45702 - DNA, 20 bp, synthetic construct
  misc_feature 1..20: note = chemically synthesized
  source 1..20: mol_type = other DNA
ggcttttctcagcccttgtg

SEQ ID NO: 45703 - DNA, 20 bp, synthetic construct
  misc_feature 1..20: note = chemically synthesized
  source 1..20: mol_type = other DNA
tcagcccttgtgaggctcta

SEQ ID NO: 45704 - DNA, 20 bp, synthetic construct
  misc_feature 1..20: note = chemically synthesized
  source 1..20: mol_type = other DNA
cagcccttgtgaggctctac

SEQ ID NO: 45705 - DNA, 20 bp, synthetic construct
  misc_feature 1..20: note = chemically synthesized
  source 1..20: mol_type = other DNA
agcccttgtgaggctctaca

SEQ ID NO: 45706 - DNA, 20 bp, synthetic construct
  misc_feature 1..20: note = chemically synthesized
  source 1..20: mol_type = other DNA
cccttgtgaggctctacagg

SEQ ID NO: 45707 - DNA, 20 bp, synthetic construct
  misc_feature 1..20: note = chemically synthesized
  source 1..20: mol_type = other DNA
ccttgtgaggctctacaggg

SEQ ID NO: 45708 - DNA, 20 bp, synthetic construct
  misc_feature 1..20: note = chemically synthesized
  source 1..20: mol_type = other DNA
tgaggctctacagggaggtt

SEQ ID NO: 45709 - DNA, 20 bp, synthetic construct
  misc_feature 1..20: note = chemically synthesized
  source 1..20: mol_type = other DNA
gaggctctacagggaggttg

SEQ ID NO: 45710 - DNA, 20 bp, synthetic construct
  misc_feature 1..20: note = chemically synthesized
  source 1..20: mol_type = other DNA
ctacagggaggttgaggtgt

SEQ ID NO: 45711 - DNA, 20 bp, synthetic construct
  misc_feature 1..20: note = chemically synthesized
  source 1..20: mol_type = other DNA
acagggaggttgaggtgtta

SEQ ID NO: 45712 - DNA, 20 bp, synthetic construct
  misc_feature 1..20: note = chemically synthesized
  source 1..20: mol_type = other DNA
gaggttgaggtgttagagat

SEQ ID NO: 45713 - DNA, 20 bp, synthetic construct
  misc_feature 1..20: note = chemically synthesized
  source 1..20: mol_type = other DNA
ggttgaggtgttagagatca

SEQ ID NO: 45714 - DNA, 20 bp, synthetic construct
  misc_feature 1..20: note = chemically synthesized
  source 1..20: mol_type = other DNA
tgaggtgttagagatcagag

SEQ ID NO: 45715 - DNA, 20 bp, synthetic construct
  misc_feature 1..20: note = chemically synthesized
  source 1..20: mol_type = other DNA
gaggtgttagagatcagagc

SEQ ID NO: 45716 - DNA, 20 bp, synthetic construct
  misc_feature 1..20: note = chemically synthesized
  source 1..20: mol_type = other DNA
ttagagatcagagcaggaaa

SEQ ID NO: 45717 - DNA, 20 bp, synthetic construct
  misc_feature 1..20: note = chemically synthesized
  source 1..20: mol_type = other DNA
tagagatcagagcaggaaac

SEQ ID NO: 45718 - DNA, 20 bp, synthetic construct
  misc_feature 1..20: note = chemically synthesized
  source 1..20: mol_type = other DNA
gaaacaggtttttctttcca

SEQ ID NO: 45719 - DNA, 20 bp, synthetic construct
  misc_feature 1..20: note = chemically synthesized
  source 1..20: mol_type = other DNA
tttccacggtaactacaatg

SEQ ID NO: 45720 - DNA, 20 bp, synthetic construct
  misc_feature 1..20: note = chemically synthesized
  source 1..20: mol_type = other DNA
gaagtgatccttactttact

SEQ ID NO: 45721 - DNA, 20 bp, synthetic construct
  misc_feature 1..20: note = chemically synthesized
  source 1..20: mol_type = other DNA
aagtgatccttactttacta

SEQ ID NO: 45722 - DNA, 20 bp, synthetic construct
  misc_feature 1..20: note = chemically synthesized
  source 1..20: mol_type = other DNA
actaaggaacttttcatttt

SEQ ID NO: 45723 - DNA, 20 bp, synthetic construct
  misc_feature 1..20: note = chemically synthesized
  source 1..20: mol_type = other DNA
taagtgttgacgcatgccta

SEQ ID NO: 45724 - DNA, 20 bp, synthetic construct
  misc_feature 1..20: note = chemically synthesized
  source 1..20: mol_type = other DNA
agtgttgacgcatgcctaaa

SEQ ID NO: 45725 - DNA, 20 bp, synthetic construct
  misc_feature 1..20: note = chemically synthesized
  source 1..20: mol_type = other DNA
gtgttgacgcatgcctaaag

SEQ ID NO: 45726 - DNA, 20 bp, synthetic construct
  misc_feature 1..20: note = chemically synthesized
  source 1..20: mol_type = other DNA
gaaattaatcccataccctt

SEQ ID NO: 45727 - DNA, 20 bp, synthetic construct
  misc_feature 1..20: note = chemically synthesized
  source 1..20: mol_type = other DNA
atcccatacccttaagtcta

SEQ ID NO: 45728 - DNA, 20 bp, synthetic construct
  misc_feature 1..20: note = chemically synthesized
  source 1..20: mol_type = other DNA
atacccttaagtctacagac

SEQ ID NO: 45729 - DNA, 20 bp, synthetic construct
  misc_feature 1..20: note = chemically synthesized
  source 1..20: mol_type = other DNA
ttaagtctacagactggtca

SEQ ID NO: 45730 - DNA, 20 bp, synthetic construct
  misc_feature 1..20: note = chemically synthesized
  source 1..20: mol_type = other DNA
cagactggtcacagcatttc

SEQ ID NO: 45731 - DNA, 20 bp, synthetic construct
  misc_feature 1..20: note = chemically synthesized
  source 1..20: mol_type = other DNA
agactggtcacagcatttca

SEQ ID NO: 45732 - DNA, 20 bp, synthetic construct
  misc_feature 1..20: note = chemically synthesized
  source 1..20: mol_type = other DNA
actggtcacagcatttcaag

SEQ ID NO: 45733 - DNA, 20 bp, synthetic construct
  misc_feature 1..20: note = chemically synthesized
  source 1..20: mol_type = other DNA
ctggtcacagcatttcaagg

SEQ ID NO: 45734 - DNA, 20 bp, synthetic construct
  misc_feature 1..20: note = chemically synthesized
  source 1..20: mol_type = other DNA
ggtcacagcatttcaaggag

SEQ ID NO: 45735 - DNA, 20 bp, synthetic construct
  misc_feature 1..20: note = chemically synthesized
  source 1..20: mol_type = other DNA
caaggaggagacctcattgt

SEQ ID NO: 45736 - DNA, 20 bp, synthetic construct
  misc_feature 1..20: note = chemically synthesized
  source 1..20: mol_type = other DNA
gagacctcattgtaagcttc

SEQ ID NO: 45737 - DNA, 20 bp, synthetic construct
  misc_feature 1..20: note = chemically synthesized
  source 1..20: mol_type = other DNA
agacctcattgtaagcttct

SEQ ID NO: 45738 - DNA, 20 bp, synthetic construct
  misc_feature 1..20: note = chemically synthesized
  source 1..20: mol_type = other DNA
gacctcattgtaagcttcta

SEQ ID NO: 45739 - DNA, 20 bp, synthetic construct
  misc_feature 1..20: note = chemically synthesized
  source 1..20: mol_type = other DNA
cctcattgtaagcttctagg

SEQ ID NO: 45740 - DNA, 20 bp, synthetic construct
  misc_feature 1..20: note = chemically synthesized
  source 1..20: mol_type = other DNA
ctcattgtaagcttctaggg

SEQ ID NO: 45741 - DNA, 20 bp, synthetic construct
  misc_feature 1..20: note = chemically synthesized
  source 1..20: mol_type = other DNA
attgtaagcttctagggagg

SEQ ID NO: 45742 - DNA, 20 bp, synthetic construct
  misc_feature 1..20: note = chemically synthesized
  source 1..20: mol_type = other DNA
ttgtaagcttctagggaggt

SEQ ID NO: 45743 - DNA, 20 bp, synthetic construct
  misc_feature 1..20: note = chemically synthesized
  source 1..20: mol_type = other DNA
tgtaagcttctagggaggtg

SEQ ID NO: 45744 - DNA, 20 bp, synthetic construct
  misc_feature 1..20: note = chemically synthesized
  source 1..20: mol_type = other DNA
cttctagggaggtggggact

SEQ ID NO: 45745 - DNA, 20 bp, synthetic construct
  misc_feature 1..20: note = chemically synthesized
  source 1..20: mol_type = other DNA
ttctagggaggtggggactt

SEQ ID NO: 45746 - DNA, 20 bp, synthetic construct
  misc_feature 1..20: note = chemically synthesized
  source 1..20: mol_type = other DNA
gggaggtggggacttaggtg

SEQ ID NO: 45747 - DNA, 20 bp, synthetic construct
  misc_feature 1..20: note = chemically synthesized
  source 1..20: mol_type = other DNA
ggaggtggggacttaggtga

SEQ ID NO: 45748 - DNA, 20 bp, synthetic construct
  misc_feature 1..20: note = chemically synthesized
  source 1..20: mol_type = other DNA
gggacttaggtgaaggaaat

SEQ ID NO: 45749 - DNA, 20 bp, synthetic construct
  misc_feature 1..20: note = chemically synthesized
  source 1..20: mol_type = other DNA
cttaggtgaaggaaatgagc

SEQ ID NO: 45750 - DNA, 20 bp, synthetic construct
  misc_feature 1..20: note = chemically synthesized
  source 1..20: mol_type = other DNA
aggtgaaggaaatgagccag

SEQ ID NO: 45751 - DNA, 20 bp, synthetic construct
  misc_feature 1..20: note = chemically synthesized
  source 1..20: mol_type = other DNA
tgaaggaaatgagccagcag

SEQ ID NO: 45752 - DNA, 20 bp, synthetic construct
  misc_feature 1..20: note = chemically synthesized
  source 1..20: mol_type = other DNA
atgagccagcagaagctcac

SEQ ID NO: 45753 - DNA, 20 bp, synthetic construct
  misc_feature 1..20: note = chemically synthesized
  source 1..20: mol_type = other DNA
gccagcagaagctcacaagt

SEQ ID NO: 45754 - DNA, 20 bp, synthetic construct
  misc_feature 1..20: note = chemically synthesized
  source 1..20: mol_type = other DNA
agaagctcacaagtcagcat

SEQ ID NO: 45755 - DNA, 20 bp, synthetic construct
  misc_feature 1..20: note = chemically synthesized
  source 1..20: mol_type = other DNA
agcatcagcgtgtcatgtct

SEQ ID NO: 45756 - DNA, 20 bp, synthetic construct
  misc_feature 1..20: note = chemically synthesized
  source 1..20: mol_type = other DNA
atcagcgtgtcatgtctcag

SEQ ID NO: 45757 - DNA, 20 bp, synthetic construct
  misc_feature 1..20: note = chemically synthesized
  source 1..20: mol_type = other DNA
agcgtgtcatgtctcagcag

SEQ ID NO: 45758 - DNA, 20 bp, synthetic construct
  misc_feature 1..20: note = chemically synthesized
  source 1..20: mol_type = other DNA
gtcatgtctcagcagcagaa

SEQ ID NO: 45759 - DNA, 20 bp, synthetic construct
  misc_feature 1..20: note = chemically synthesized
  source 1..20: mol_type = other DNA
gtctcagcagcagaacagca

SEQ ID NO: 45760 - DNA, 20 bp, synthetic construct
  misc_feature 1..20: note = chemically synthesized
  source 1..20: mol_type = other DNA
cagcagcagaacagcacggt

SEQ ID NO: 45761 - DNA, 20 bp, synthetic construct
  misc_feature 1..20: note = chemically synthesized
  source 1..20: mol_type = other DNA
agcacggtcagatgaaaata

SEQ ID NO: 45762 - DNA, 20 bp, synthetic construct
  misc_feature 1..20: note = chemically synthesized
  source 1..20: mol_type = other DNA
tcagatgaaaatatagtgtg

SEQ ID NO: 45763 - DNA, 20 bp, synthetic construct
  misc_feature 1..20: note = chemically synthesized
  source 1..20: mol_type = other DNA
gaatttgtataacattaatt

SEQ ID NO: 45764 - DNA, 20 bp, synthetic construct
  misc_feature 1..20: note = chemically synthesized
  source 1..20: mol_type = other DNA
tttgtataacattaattgag

SEQ ID NO: 45765 - DNA, 20 bp, synthetic construct
  misc_feature 1..20: note = chemically synthesized
  source 1..20: mol_type = other DNA
ttgtataacattaattgaga

SEQ ID NO: 45766 - DNA, 20 bp, synthetic construct
  misc_feature 1..20: note = chemically synthesized
  source 1..20: mol_type = other DNA
tataacattaattgagaagg

SEQ ID NO: 45767 - DNA, 20 bp, synthetic construct
  misc_feature 1..20: note = chemically synthesized
  source 1..20: mol_type = other DNA
aattgagaaggcagattcac

SEQ ID NO: 45768 - DNA, 20 bp, synthetic construct
  misc_feature 1..20: note = chemically synthesized
  source 1..20: mol_type = other DNA
ttgagaaggcagattcactg

SEQ ID NO: 45769 - DNA, 20 bp, synthetic construct
  misc_feature 1..20: note = chemically synthesized
  source 1..20: mol_type = other DNA
tggagttcttatataattga

SEQ ID NO: 45770 - DNA, 20 bp, synthetic construct
  misc_feature 1..20: note = chemically synthesized
  source 1..20: mol_type = other DNA
gaaagttaatgcacgttaat

SEQ ID NO: 45771 - DNA, 20 bp, synthetic construct
  misc_feature 1..20: note = chemically synthesized
  source 1..20: mol_type = other DNA
gttaatgcacgttaataagc

SEQ ID NO: 45772 - DNA, 20 bp, synthetic construct
  misc_feature 1..20: note = chemically synthesized
  source 1..20: mol_type = other DNA
taatgcacgttaataagcaa

SEQ ID NO: 45773 - DNA, 20 bp, synthetic construct
  misc_feature 1..20: note = chemically synthesized
  source 1..20: mol_type = other DNA
cacgttaataagcaagagtt

SEQ ID NO: 45774 - DNA, 20 bp, synthetic construct
  misc_feature 1..20: note = chemically synthesized
  source 1..20: mol_type = other DNA
aagagtttagtttaatgtga

SEQ ID NO: 45775 - DNA, 20 bp, synthetic construct
  misc_feature 1..20: note = chemically synthesized
  source 1..20: mol_type = other DNA
gaacttaacgcttgtgtctc

SEQ ID NO: 45776 - DNA, 20 bp, synthetic construct
  misc_feature 1..20: note = chemically synthesized
  source 1..20: mol_type = other DNA
ctgaatccccaactcccaat

SEQ ID NO: 45777 - DNA, 20 bp, synthetic construct
  misc_feature 1..20: note = chemically synthesized
  source 1..20: mol_type = other DNA
ctcccaattggctccatttg

SEQ ID NO: 45778 - DNA, 20 bp, synthetic construct
  misc_feature 1..20: note = chemically synthesized
  source 1..20: mol_type = other DNA
tcccaattggctccatttgt

SEQ ID NO: 45779 - DNA, 20 bp, synthetic construct
  misc_feature 1..20: note = chemically synthesized
  source 1..20: mol_type = other DNA
cccaattggctccatttgtg

SEQ ID NO: 45780 - DNA, 20 bp, synthetic construct
  misc_feature 1..20: note = chemically synthesized
  source 1..20: mol_type = other DNA
ccaattggctccatttgtgg

SEQ ID NO: 45781 - DNA, 20 bp, synthetic construct
  misc_feature 1..20: note = chemically synthesized
  source 1..20: mol_type = other DNA
aattggctccatttgtgggg

SEQ ID NO: 45782 - DNA, 20 bp, synthetic construct
  misc_feature 1..20: note = chemically synthesized
  source 1..20: mol_type = other DNA
attggctccatttgtggggg

SEQ ID NO: 45783 - DNA, 20 bp, synthetic construct
  misc_feature 1..20: note = chemically synthesized
  source 1..20: mol_type = other DNA
tccatttgtgggggaggctt

SEQ ID NO: 45784 - DNA, 20 bp, synthetic construct
  misc_feature 1..20: note = chemically synthesized
  source 1..20: mol_type = other DNA
ttgtgggggaggctttggaa

SEQ ID NO: 45785 - DNA, 20 bp, synthetic construct
  misc_feature 1..20: note = chemically synthesized
  source 1..20: mol_type = other DNA
ggaggctttggaaaagtaat

SEQ ID NO: 45786 - DNA, 20 bp, synthetic construct
  misc_feature 1..20: note = chemically synthesized
  source 1..20: mol_type = other DNA
gaggctttggaaaagtaatc

SEQ ID NO: 45787 - DNA, 20 bp, synthetic construct
  misc_feature 1..20: note = chemically synthesized
  source 1..20: mol_type = other DNA
tttggaaaagtaatcaggtt

SEQ ID NO: 45788 - DNA, 20 bp, synthetic construct
  misc_feature 1..20: note = chemically synthesized
  source 1..20: mol_type = other DNA
tggaaaagtaatcaggttta

SEQ ID NO: 45789 - DNA, 20 bp, synthetic construct
  misc_feature 1..20: note = chemically synthesized
  source 1..20: mol_type = other DNA
ggaaaagtaatcaggtttag

SEQ ID NO: 45790 - DNA, 20 bp, synthetic construct
  misc_feature 1..20: note = chemically synthesized
  source 1..20: mol_type = other DNA
aaaagtaatcaggtttagag

SEQ ID NO: 45791 - DNA, 20 bp, synthetic construct
  misc_feature 1..20: note = chemically synthesized
  source 1..20: mol_type = other DNA
tcaggtttagaggagctcat

SEQ ID NO: 45792 - DNA, 20 bp, synthetic construct
  misc_feature 1..20: note = chemically synthesized
  source 1..20: mol_type = other DNA
aggtttagaggagctcatga

SEQ ID NO: 45793 - DNA, 20 bp, synthetic construct
  misc_feature 1..20: note = chemically synthesized
  source 1..20: mol_type = other DNA
tttagaggagctcatgagag

SEQ ID NO: 45794 - DNA, 20 bp, synthetic construct
  misc_feature 1..20: note = chemically synthesized
  source 1..20: mol_type = other DNA
atgagagcagatccccatca

SEQ ID NO: 45795 - DNA, 20 bp, synthetic construct
  misc_feature 1..20: note = chemically synthesized
  source 1..20: mol_type = other DNA
catagaattattttcctcat

SEQ ID NO: 45796 - DNA, 20 bp, synthetic construct
  misc_feature 1..20: note = chemically synthesized
  source 1..20: mol_type = other DNA
agaattattttcctcatcag

SEQ ID NO: 45797 - DNA, 20 bp, synthetic construct
  misc_feature 1..20: note = chemically synthesized
  source 1..20: mol_type = other DNA
attattttcctcatcagaag

SEQ ID NO: 45798 - DNA, 20 bp, synthetic construct
  misc_feature 1..20: note = chemically synthesized
  source 1..20: mol_type = other DNA
tattttcctcatcagaagca

SEQ ID NO: 45799 - DNA, 20 bp, synthetic construct
  misc_feature 1..20: note = chemically synthesized
  source 1..20: mol_type = other DNA
ttttcctcatcagaagcaga

SEQ ID NO: 45800 - DNA, 20 bp, synthetic construct
  misc_feature 1..20: note = chemically synthesized
  source 1..20: mol_type = other DNA
ctcatcagaagcagagagat

SEQ ID NO: 45801 - DNA, 20 bp, synthetic construct
  misc_feature 1..20: note = chemically synthesized
  source 1..20: mol_type = other DNA
ttagccatttctcttccttc

SEQ ID NO: 45802 - DNA, 20 bp, synthetic construct
  misc_feature 1..20: note = chemically synthesized
  source 1..20: mol_type = other DNA
ccatttctcttccttctggt

SEQ ID NO: 45803 - DNA, 20 bp, synthetic construct
  misc_feature 1..20: note = chemically synthesized
  source 1..20: mol_type = other DNA
catttctcttccttctggtg

SEQ ID NO: 45804 - DNA, 20 bp, synthetic construct
  misc_feature 1..20: note = chemically synthesized
  source 1..20: mol_type = other DNA
tcttccttctggtgaggaca

SEQ ID NO: 45805 - DNA, 20 bp, synthetic construct
  misc_feature 1..20: note = chemically synthesized
  source 1..20: mol_type = other DNA
tccttctggtgaggacacag

SEQ ID NO: 45806 - DNA, 20 bp, synthetic construct
  misc_feature 1..20: note = chemically synthesized
  source 1..20: mol_type = other DNA
ccttctggtgaggacacagt

SEQ ID NO: 45807 - DNA, 20 bp, synthetic construct
  misc_feature 1..20: note = chemically synthesized
  source 1..20: mol_type = other DNA
tctggtgaggacacagtggg

SEQ ID NO: 45808 - DNA, 20 bp, synthetic construct
  misc_feature 1..20: note = chemically synthesized
  source 1..20: mol_type = other DNA
gtgaggacacagtgggaagt

SEQ ID NO: 45809 - DNA, 20 bp, synthetic construct
  misc_feature 1..20: note = chemically synthesized
  source 1..20: mol_type = other DNA
gaagtcagccacctgcaacc

SEQ ID NO: 45810 - DNA, 20 bp, synthetic construct
  misc_feature 1..20: note = chemically synthesized
  source 1..20: mol_type = other DNA
aagtcagccacctgcaaccc

SEQ ID NO: 45811 - DNA, 20 bp, synthetic construct
  misc_feature 1..20: note = chemically synthesized
  source 1..20: mol_type = other DNA
tcagccacctgcaacccagg

SEQ ID NO: 45812 - DNA, 20 bp, synthetic construct
  misc_feature 1..20: note = chemically synthesized
  source 1..20: mol_type = other DNA
agccacctgcaacccaggaa

SEQ ID NO: 45813 - DNA, 20 bp, synthetic construct
  misc_feature 1..20: note = chemically synthesized
  source 1..20: mol_type = other DNA
ccacctgcaacccaggaaga

SEQ ID NO: 45814 - DNA, 20 bp, synthetic construct
  misc_feature 1..20: note = chemically synthesized
  source 1..20: mol_type = other DNA
cccaggaagagagccctgac

SEQ ID NO: 45815 - DNA, 20 bp, synthetic construct
  misc_feature 1..20: note = chemically synthesized
  source 1..20: mol_type = other DNA
ccaggaagagagccctgacc

SEQ ID NO: 45816 - DNA, 20 bp, synthetic construct
  misc_feature 1..20: note = chemically synthesized
  source 1..20: mol_type = other DNA
agagagccctgaccaggaac

SEQ ID NO: 45817 - DNA, 20 bp, synthetic construct
  misc_feature 1..20: note = chemically synthesized
  source 1..20: mol_type = other DNA
gagccctgaccaggaaccag

SEQ ID NO: 45818 - DNA, 20 bp, synthetic construct
  misc_feature 1..20: note = chemically synthesized
  source 1..20: mol_type = other DNA
ctgaccaggaaccagcagaa

SEQ ID NO: 45819 - DNA, 20 bp, synthetic construct
  misc_feature 1..20: note = chemically synthesized
  source 1..20: mol_type = other DNA
ccaggaaccagcagaaaagt

SEQ ID NO: 45820 - DNA, 20 bp, synthetic construct
  misc_feature 1..20: note = chemically synthesized
  source 1..20: mol_type = other DNA
gagaaaaaatcctgttgttg

SEQ ID NO: 45821 - DNA, 20 bp, synthetic construct
  misc_feature 1..20: note = chemically synthesized
  source 1..20: mol_type = other DNA
atcctgttgttgaagtcacc

SEQ ID NO: 45822 - DNA, 20 bp, synthetic construct
  misc_feature 1..20: note = chemically synthesized
  source 1..20: mol_type = other DNA
cagtctatgctattttgtta

SEQ ID NO: 45823 - DNA, 20 bp, synthetic construct
  misc_feature 1..20: note = chemically synthesized
  source 1..20: mol_type = other DNA
ttgttatagcaccttgcact

SEQ ID NO: 45824 - DNA, 20 bp, synthetic construct
  misc_feature 1..20: note = chemically synthesized
  source 1..20: mol_type = other DNA
tatagcaccttgcactaagt

SEQ ID NO: 45825 - DNA, 20 bp, synthetic construct
  misc_feature 1..20: note = chemically synthesized
  source 1..20: mol_type = other DNA
atagcaccttgcactaagta

SEQ ID NO: 45826 - DNA, 20 bp, synthetic construct
  misc_feature 1..20: note = chemically synthesized
  source 1..20: mol_type = other DNA
gcaccttgcactaagtaagg

SEQ ID NO: 45827 - DNA, 20 bp, synthetic construct
  misc_feature 1..20: note = chemically synthesized
  source 1..20: mol_type = other DNA
tgcactaagtaaggcagatg

SEQ ID NO: 45828 - DNA, 20 bp, synthetic construct
  misc_feature 1..20: note = chemically synthesized
  source 1..20: mol_type = other DNA
ctaagtaaggcagatgaaga

SEQ ID NO: 45829 - DNA, 20 bp, synthetic construct
  misc_feature 1..20: note = chemically synthesized
  source 1..20: mol_type = other DNA
aagtaaggcagatgaagaaa

SEQ ID NO: 45830 - DNA, 20 bp, synthetic construct
  misc_feature 1..20: note = chemically synthesized
  source 1..20: mol_type = other DNA
atgaagaaagagaaaaaaat

SEQ ID NO: 45831 - DNA, 20 bp, synthetic construct
  misc_feature 1..20: note = chemically synthesized
  source 1..20: mol_type = other DNA
aaagagaaaaaaataagctt

SEQ ID NO: 45832 - DNA, 20 bp, synthetic construct
  misc_feature 1..20: note = chemically synthesized
  source 1..20: mol_type = other DNA
aaaaaataagcttcggtgtt

SEQ ID NO: 45833 - DNA, 20 bp, synthetic construct
  misc_feature 1..20: note = chemically synthesized
  source 1..20: mol_type = other DNA
aaataagcttcggtgttcag

SEQ ID NO: 45834 - DNA, 20 bp, synthetic construct
  misc_feature 1..20: note = chemically synthesized
  source 1..20: mol_type = other DNA
agcttcggtgttcagtggat

SEQ ID NO: 45835 - DNA, 20 bp, synthetic construct
  misc_feature 1..20: note = chemically synthesized
  source 1..20: mol_type = other DNA
attagaaaccatgtttatct

SEQ ID NO: 45836 - DNA, 20 bp, synthetic construct
  misc_feature 1..20: note = chemically synthesized
  source 1..20: mol_type = other DNA
ttagaaaccatgtttatctc

SEQ ID NO: 45837 - DNA, 20 bp, synthetic construct
  misc_feature 1..20: note = chemically synthesized
  source 1..20: mol_type = other DNA
tccacttgtcctctgtgttt

SEQ ID NO: 45838 - DNA, 20 bp, synthetic construct
  misc_feature 1..20: note = chemically synthesized
  source 1..20: mol_type = other DNA
actctactactctcatctgt

SEQ ID NO: 45839 - DNA, 20 bp, synthetic construct
  misc_feature 1..20: note = chemically synthesized
  source 1..20: mol_type = other DNA
tctcatctgtaagatgcaaa

SEQ ID NO: 45840 - DNA, 20 bp, synthetic construct
  misc_feature 1..20: note = chemically synthesized
  source 1..20: mol_type = other DNA
atctgtaagatgcaaatagt

SEQ ID NO: 45841 - DNA, 20 bp, synthetic construct
  misc_feature 1..20: note = chemically synthesized
  source 1..20: mol_type = other DNA
aagatgcaaatagtaagcct

SEQ ID NO: 45842 - DNA, 20 bp, synthetic construct
  misc_feature 1..20: note = chemically synthesized
  source 1..20: mol_type = other DNA
attttttcttcaacgtactt

SEQ ID NO: 45843 - DNA, 20 bp, synthetic construct
  misc_feature 1..20: note = chemically synthesized
  source 1..20: mol_type = other DNA
ttttttcttcaacgtacttt

SEQ ID NO: 45844 - DNA, 20 bp, synthetic construct
  misc_feature 1..20: note = chemically synthesized
  source 1..20: mol_type = other DNA
gcttgtaatgtgtttatata

SEQ ID NO: 45845 - DNA, 20 bp, synthetic construct
  misc_feature 1..20: note = chemically synthesized
  source 1..20: mol_type = other DNA
tttatatacagtgaaatgtc

SEQ ID NO: 45846 - DNA, 20 bp, synthetic construct
  misc_feature 1..20: note = chemically synthesized
  source 1..20: mol_type = other DNA
ctttctttcttttttttcct

SEQ ID NO: 45847 - DNA, 20 bp, synthetic construct
  misc_feature 1..20: note = chemically synthesized
  source 1..20: mol_type = other DNA
ttcttttttttcctcagcct

SEQ ID NO: 45848 - DNA, 20 bp, synthetic construct
  misc_feature 1..20: note = chemically synthesized
  source 1..20: mol_type = other DNA
cttttttttcctcagcctca

SEQ ID NO: 45849 - DNA, 20 bp, synthetic construct
  misc_feature 1..20: note = chemically synthesized
  source 1..20: mol_type = other DNA
ccacatgcccttcctacttt

SEQ ID NO: 45850 - DNA, 20 bp, synthetic construct
  misc_feature 1..20: note = chemically synthesized
  source 1..20: mol_type = other DNA
cacatgcccttcctactttc

SEQ ID NO: 45851 - DNA, 20 bp, synthetic construct
  misc_feature 1..20: note = chemically synthesized
  source 1..20: mol_type = other DNA
ttctccaaacgtcttctgcc

SEQ ID NO: 45852 - DNA, 20 bp, synthetic construct
  misc_feature 1..20: note = chemically synthesized
  source 1..20: mol_type = other DNA
cctggctccatcaaatcata

SEQ ID NO: 45853 - DNA, 20 bp, synthetic construct
  misc_feature 1..20: note = chemically synthesized
  source 1..20: mol_type = other DNA
ctggctccatcaaatcataa

SEQ ID NO: 45854 - DNA, 20 bp, synthetic construct
  misc_feature 1..20: note = chemically synthesized
  source 1..20: mol_type = other DNA
ttctttgtcctttttttttt

SEQ ID NO: 45855 - DNA, 20 bp, synthetic construct
  misc_feature 1..20: note = chemically synthesized
  source 1..20: mol_type = other DNA
ctttttttttttagtaaaac

SEQ ID NO: 45856 - DNA, 20 bp, synthetic construct
  misc_feature 1..20: note = chemically synthesized
  source 1..20: mol_type = other DNA
aacaagtttataaaaaattg

SEQ ID NO: 45857 - DNA, 20 bp, synthetic construct
  misc_feature 1..20: note = chemically synthesized
  source 1..20: mol_type = other DNA
acaagtttataaaaaattga

SEQ ID NO: 45858 - DNA, 20 bp, synthetic construct
  misc_feature 1..20: note = chemically synthesized
  source 1..20: mol_type = other DNA
aaattgaaggaataaatgaa

SEQ ID NO: 45859 - DNA, 20 bp, synthetic construct
  misc_feature 1..20: note = chemically synthesized
  source 1..20: mol_type = other DNA
ataaatgaatggctacttca

SEQ ID NO: 45860 - DNA, 20 bp, synthetic construct
  misc_feature 1..20: note = chemically synthesized
  source 1..20: mol_type = other DNA
taaatgaatggctacttcat

SEQ ID NO: 45861 - DNA, 20 bp, synthetic construct
  misc_feature 1..20: note = chemically synthesized
  source 1..20: mol_type = other DNA
atgaatggctacttcatagg

SEQ ID NO: 45862 - DNA, 20 bp, synthetic construct
  misc_feature 1..20: note = chemically synthesized
  source 1..20: mol_type = other DNA
gaatggctacttcataggca

SEQ ID NO: 45863 - DNA, 20 bp, synthetic construct
  misc_feature 1..20: note = chemically synthesized
  source 1..20: mol_type = other DNA
tggctacttcataggcagag

SEQ ID NO: 45864 - DNA, 20 bp, synthetic construct
  misc_feature 1..20: note = chemically synthesized
  source 1..20: mol_type = other DNA
ttcataggcagagtagacgc

SEQ ID NO: 45865 - DNA, 20 bp, synthetic construct
  misc_feature 1..20: note = chemically synthesized
  source 1..20: mol_type = other DNA
tcataggcagagtagacgca

SEQ ID NO: 45866 - DNA, 20 bp, synthetic construct
  misc_feature 1..20: note = chemically synthesized
  source 1..20: mol_type = other DNA
cataggcagagtagacgcaa

SEQ ID NO: 45867 - DNA, 20 bp, synthetic construct
  misc_feature 1..20: note = chemically synthesized
  source 1..20: mol_type = other DNA
agagtagacgcaagggctac

SEQ ID NO: 45868 - DNA, 20 bp, synthetic construct
  misc_feature 1..20: note = chemically synthesized
  source 1..20: mol_type = other DNA
tttttattgttatttttcaa

SEQ ID NO: 45869 - DNA, 20 bp, synthetic construct
  misc_feature 1..20: note = chemically synthesized
  source 1..20: mol_type = other DNA
ttttcaatagtatgctaaac

SEQ ID NO: 45870 - DNA, 20 bp, synthetic construct
  misc_feature 1..20: note = chemically synthesized
  source 1..20: mol_type = other DNA
tttcaatagtatgctaaaca

SEQ ID NO: 45871 - DNA, 20 bp, synthetic construct
  misc_feature 1..20: note = chemically synthesized
  source 1..20: mol_type = other DNA
ttcaatagtatgctaaacaa

SEQ ID NO: 45872 - DNA, 20 bp, synthetic construct
  misc_feature 1..20: note = chemically synthesized
  source 1..20: mol_type = other DNA
tcaatagtatgctaaacaag

SEQ ID NO: 45873 - DNA, 20 bp, synthetic construct
  misc_feature 1..20: note = chemically synthesized
  source 1..20: mol_type = other DNA
atagtatgctaaacaagggg

SEQ ID NO: 45874 - DNA, 20 bp, synthetic construct
  misc_feature 1..20: note = chemically synthesized
  source 1..20: mol_type = other DNA
ttatttatgctgcccatttt

SEQ ID NO: 45875 - DNA, 20 bp, synthetic construct
  misc_feature 1..20: note = chemically synthesized
  source 1..20: mol_type = other DNA
tgcccatttttagaccataa

SEQ ID NO: 45876 - DNA, 20 bp, synthetic construct
  misc_feature 1..20: note = chemically synthesized
  source 1..20: mol_type = other DNA
ataacttcctgatgttgcca

SEQ ID NO: 45877 - DNA, 20 bp, synthetic construct
  misc_feature 1..20: note = chemically synthesized
  source 1..20: mol_type = other DNA
ttcatttcattttaatttcg

SEQ ID NO: 45878 - DNA, 20 bp, synthetic construct
  misc_feature 1..20: note = chemically synthesized
  source 1..20: mol_type = other DNA
tcatttcattttaatttcga

SEQ ID NO: 45879 - DNA, 20 bp, synthetic construct
  misc_feature 1..20: note = chemically synthesized
  source 1..20: mol_type = other DNA
taatttcgaaggtacatgtg

SEQ ID NO: 45880 - DNA, 20 bp, synthetic construct
  misc_feature 1..20: note = chemically synthesized
  source 1..20: mol_type = other DNA
aatttcgaaggtacatgtgc

SEQ ID NO: 45881 - DNA, 20 bp, synthetic construct
  misc_feature 1..20: note = chemically synthesized
  source 1..20: mol_type = other DNA
aggtacatgtgcaggatgtg

SEQ ID NO: 45882 - DNA, 20 bp, synthetic construct
  misc_feature 1..20: note = chemically synthesized
  source 1..20: mol_type = other DNA
ggtacatgtgcaggatgtgc

SEQ ID NO: 45883 - DNA, 20 bp, synthetic construct
  misc_feature 1..20: note = chemically synthesized
  source 1..20: mol_type = other DNA
ggatgtgcaggcttgttaca

SEQ ID NO: 45884 - DNA, 20 bp, synthetic construct
  misc_feature 1..20: note = chemically synthesized
  source 1..20: mol_type = other DNA
gatgtgcaggcttgttacat

SEQ ID NO: 45885 - DNA, 20 bp, synthetic construct
  misc_feature 1..20: note = chemically synthesized
  source 1..20: mol_type = other DNA
tgggtaaatgtgtgtctttc

SEQ ID NO: 45886 - DNA, 20 bp, synthetic construct
  misc_feature 1..20: note = chemically synthesized
  source 1..20: mol_type = other DNA
tgtgtgtctttctggccttt

SEQ ID NO: 45887 - DNA, 20 bp, synthetic construct
  misc_feature 1..20: note = chemically synthesized
  source 1..20: mol_type = other DNA
ttttagccatctgtatcaat

SEQ ID NO: 45888 - DNA, 20 bp, synthetic construct
  misc_feature 1..20: note = chemically synthesized
  source 1..20: mol_type = other DNA
tagccatctgtatcaatgag

SEQ ID NO: 45889 - DNA, 20 bp, synthetic construct
  misc_feature 1..20: note = chemically synthesized
  source 1..20: mol_type = other DNA
ctgtatcaatgagcagatat

SEQ ID NO: 45890 - DNA, 20 bp, synthetic construct
  misc_feature 1..20: note = chemically synthesized
  source 1..20: mol_type = other DNA
gagcagatataagctttaca

SEQ ID NO: 45891 - DNA, 20 bp, synthetic construct
  misc_feature 1..20: note = chemically synthesized
  source 1..20: mol_type = other DNA
agcagatataagctttacac

SEQ ID NO: 45892 - DNA, 20 bp, synthetic construct
  misc_feature 1..20: note = chemically synthesized
  source 1..20: mol_type = other DNA
aagctttacacaggatcatg

SEQ ID NO: 45893 - DNA, 20 bp, synthetic construct
  misc_feature 1..20: note = chemically synthesized
  source 1..20: mol_type = other DNA
agctttacacaggatcatga

SEQ ID NO: 45894 - DNA, 20 bp, synthetic construct
  misc_feature 1..20: note = chemically synthesized
  source 1..20: mol_type = other DNA
cacaggatcatgaaggatga

SEQ ID NO: 45895 - DNA, 20 bp, synthetic construct
  misc_feature 1..20: note = chemically synthesized
  source 1..20: mol_type = other DNA
aataatttcaatcaacctga

SEQ ID NO: 45896 - DNA, 20 bp, synthetic construct
  misc_feature 1..20: note = chemically synthesized
  source 1..20: mol_type = other DNA
tttcaatcaacctgatagct

SEQ ID NO: 45897 - DNA, 20 bp, synthetic construct
  misc_feature 1..20: note = chemically synthesized
  source 1..20: mol_type = other DNA
ttcaatcaacctgatagctt

SEQ ID NO: 45898 - DNA, 20 bp, synthetic construct
  misc_feature 1..20: note = chemically synthesized
  source 1..20: mol_type = other DNA
tcaatcaacctgatagctta

SEQ ID NO: 45899 - DNA, 20 bp, synthetic construct
  misc_feature 1..20: note = chemically synthesized
  source 1..20: mol_type = other DNA
caatcaacctgatagcttag

SEQ ID NO: 45900 - DNA, 20 bp, synthetic construct
  misc_feature 1..20: note = chemically synthesized
  source 1..20: mol_type = other DNA
ttaggggataaactaatttg

SEQ ID NO: 45901 - DNA, 20 bp, synthetic construct
  misc_feature 1..20: note = chemically synthesized
  source 1..20: mol_type = other DNA
gataaactaatttgaagata

SEQ ID NO: 45902 - DNA, 20 bp, synthetic construct
  misc_feature 1..20: note = chemically synthesized
  source 1..20: mol_type = other DNA
agatacagcttgcctccgat

SEQ ID NO: 45903 - DNA, 20 bp, synthetic construct
  misc_feature 1..20: note = chemically synthesized
  source 1..20: mol_type = other DNA
acagcttgcctccgataagc

SEQ ID NO: 45904 - DNA, 20 bp, synthetic construct
  misc_feature 1..20: note = chemically synthesized
  source 1..20: mol_type = other DNA
cctccgataagccagaattc

SEQ ID NO: 45905 - DNA, 20 bp, synthetic construct
  misc_feature 1..20: note = chemically synthesized
  source 1..20: mol_type = other DNA
tccgataagccagaattcca

SEQ ID NO: 45906 - DNA, 20 bp, synthetic construct
  misc_feature 1..20: note = chemically synthesized
  source 1..20: mol_type = other DNA
agccagaattccagagcttc

SEQ ID NO: 45907 - DNA, 20 bp, synthetic construct
  misc_feature 1..20: note = chemically synthesized
  source 1..20: mol_type = other DNA
gagcttctggcattataatc

SEQ ID NO: 45908 - DNA, 20 bp, synthetic construct
  misc_feature 1..20: note = chemically synthesized
  source 1..20: mol_type = other DNA
ttctggcattataatctagc

SEQ ID NO: 45909 - DNA, 20 bp, synthetic construct
  misc_feature 1..20: note = chemically synthesized
  source 1..20: mol_type = other DNA
tctggcattataatctagca

SEQ ID NO: 45910 - DNA, 20 bp, synthetic construct
  misc_feature 1..20: note = chemically synthesized
  source 1..20: mol_type = other DNA
gcattataatctagcaaggt

SEQ ID NO: 45911 - DNA, 20 bp, synthetic construct
  misc_feature 1..20: note = chemically synthesized
  source 1..20: mol_type = other DNA
attataatctagcaaggtta

SEQ ID NO: 45912 - DNA, 20 bp, synthetic construct
  misc_feature 1..20: note = chemically synthesized
  source 1..20: mol_type = other DNA
tctagcaaggttagagatca

SEQ ID NO: 45913 - DNA, 20 bp, synthetic construct
  misc_feature 1..20: note = chemically synthesized
  source 1..20: mol_type = other DNA
tagagatcatggatcacttt

SEQ ID NO: 45914 - DNA, 20 bp, synthetic construct
  misc_feature 1..20: note = chemically synthesized
  source 1..20: mol_type = other DNA
gagatcatggatcactttca

SEQ ID NO: 45915 - DNA, 20 bp, synthetic construct
  misc_feature 1..20: note = chemically synthesized
  source 1..20: mol_type = other DNA
aacaaaaacaaactaaccaa

SEQ ID NO: 45916 - DNA, 20 bp, synthetic construct
  misc_feature 1..20: note = chemically synthesized
  source 1..20: mol_type = other DNA
caaactaaccaaaagcaaaa

SEQ ID NO: 45917 - DNA, 20 bp, synthetic construct
  misc_feature 1..20: note = chemically synthesized
  source 1..20: mol_type = other DNA
aatacttcctaccctgttaa

SEQ ID NO: 45918 - DNA, 20 bp, synthetic construct
  misc_feature 1..20: note = chemically synthesized
  source 1..20: mol_type = other DNA
ctgttaatggtccaatatgt

SEQ ID NO: 45919 - DNA, 20 bp, synthetic construct
  misc_feature 1..20: note = chemically synthesized
  source 1..20: mol_type = other DNA
atggtccaatatgtcagaaa

SEQ ID NO: 45920 - DNA, 20 bp, synthetic construct
  misc_feature 1..20: note = chemically synthesized
  source 1..20: mol_type = other DNA
tgtcagaaacagcactgtgt

SEQ ID NO: 45921 - DNA, 20 bp, synthetic construct
  misc_feature 1..20: note = chemically synthesized
  source 1..20: mol_type = other DNA
acagcactgtgttagaaata

SEQ ID NO: 45922 - DNA, 20 bp, synthetic construct
  misc_feature 1..20: note = chemically synthesized
  source 1..20: mol_type = other DNA
gttagaaataaagctgtcta

SEQ ID NO: 45923 - DNA, 20 bp, synthetic construct
  misc_feature 1..20: note = chemically synthesized
  source 1..20: mol_type = other DNA
tctaaagtacactaatattc

SEQ ID NO: 45924 - DNA, 20 bp, synthetic construct
  misc_feature 1..20: note = chemically synthesized
  source 1..20: mol_type = other DNA
cactaatattcgagttataa

SEQ ID NO: 45925 - DNA, 20 bp, synthetic construct
  misc_feature 1..20: note = chemically synthesized
  source 1..20: mol_type = other DNA
attcgagttataatagtgtg

SEQ ID NO: 45926 - DNA, 20 bp, synthetic construct
  misc_feature 1..20: note = chemically synthesized
  source 1..20: mol_type = other DNA
tataatagtgtgtggactat

SEQ ID NO: 45927 - DNA, 20 bp, synthetic construct
  misc_feature 1..20: note = chemically synthesized
  source 1..20: mol_type = other DNA
aaaaacaacccttgcctctt

SEQ ID NO: 45928 - DNA, 20 bp, synthetic construct
  misc_feature 1..20: note = chemically synthesized
  source 1..20: mol_type = other DNA
aaacaacccttgcctcttta

SEQ ID NO: 45929 - DNA, 20 bp, synthetic construct
  misc_feature 1..20: note = chemically synthesized
  source 1..20: mol_type = other DNA
tacacgcacatcttatgtct

SEQ ID NO: 45930 - DNA, 20 bp, synthetic construct
  misc_feature 1..20: note = chemically synthesized
  source 1..20: mol_type = other DNA
cacgcacatcttatgtctta

SEQ ID NO: 45931 - DNA, 20 bp, synthetic construct
  misc_feature 1..20: note = chemically synthesized
  source 1..20: mol_type = other DNA
cacatcttatgtcttagagt

SEQ ID NO: 45932 - DNA, 20 bp, synthetic construct
  misc_feature 1..20: note = chemically synthesized
  source 1..20: mol_type = other DNA
gtcttagagtaagattccct

SEQ ID NO: 45933 - DNA, 20 bp, synthetic construct
  misc_feature 1..20: note = chemically synthesized
  source 1..20: mol_type = other DNA
ttagagtaagattccctgag

SEQ ID NO: 45934 - DNA, 20 bp, synthetic construct
  misc_feature 1..20: note = chemically synthesized
  source 1..20: mol_type = other DNA
gattccctgagaagtgaacc

SEQ ID NO: 45935 - DNA, 20 bp, synthetic construct
  misc_feature 1..20: note = chemically synthesized
  source 1..20: mol_type = other DNA
agtgaacctagcatttatac

SEQ ID NO: 45936 - DNA, 20 bp, synthetic construct
  misc_feature 1..20: note = chemically synthesized
  source 1..20: mol_type = other DNA
agataattaattctaatcca

SEQ ID NO: 45937 - DNA, 20 bp, synthetic construct
  misc_feature 1..20: note = chemically synthesized
  source 1..20: mol_type = other DNA
ctaatccacagtacctgcca

SEQ ID NO: 45938 - DNA, 20 bp, synthetic construct
  misc_feature 1..20: note = chemically synthesized
  source 1..20: mol_type = other DNA
attctaccatcatctttact

SEQ ID NO: 45939 - DNA, 20 bp, synthetic construct
  misc_feature 1..20: note = chemically synthesized
  source 1..20: mol_type = other DNA
accatcatctttactgagca

SEQ ID NO: 45940 - DNA, 20 bp, synthetic construct
  misc_feature 1..20: note = chemically synthesized
  source 1..20: mol_type = other DNA
atcatctttactgagcatag

SEQ ID NO: 45941 - DNA, 20 bp, synthetic construct
  misc_feature 1..20: note = chemically synthesized
  source 1..20: mol_type = other DNA
catctttactgagcatagaa

SEQ ID NO: 45942 - DNA, 20 bp, synthetic construct
  misc_feature 1..20: note = chemically synthesized
  source 1..20: mol_type = other DNA
gaagagctacgccaaaaccc

SEQ ID NO: 45943 - DNA, 20 bp, synthetic construct
  misc_feature 1..20: note = chemically synthesized
  source 1..20: mol_type = other DNA
aagagctacgccaaaaccct

SEQ ID NO: 45944 - DNA, 20 bp, synthetic construct
  misc_feature 1..20: note = chemically synthesized
  source 1..20: mol_type = other DNA
acgccaaaaccctgggtcat

SEQ ID NO: 45945 - DNA, 20 bp, synthetic construct
  misc_feature 1..20: note = chemically synthesized
  source 1..20: mol_type = other DNA
caaaaccctgggtcatcagc

SEQ ID NO: 45946 - DNA, 20 bp, synthetic construct
  misc_feature 1..20: note = chemically synthesized
  source 1..20: mol_type = other DNA
agccagcacacacacttatc

SEQ ID NO: 45947 - DNA, 20 bp, synthetic construct
  misc_feature 1..20: note = chemically synthesized
  source 1..20: mol_type = other DNA
cagcacacacacttatccag

SEQ ID NO: 45948 - DNA, 20 bp, synthetic construct
  misc_feature 1..20: note = chemically synthesized
  source 1..20: mol_type = other DNA
agtggtaaatacacatcatc

SEQ ID NO: 45949 - DNA, 20 bp, synthetic construct
  misc_feature 1..20: note = chemically synthesized
  source 1..20: mol_type = other DNA
tatacatacatacctgaata

SEQ ID NO: 45950 - DNA, 20 bp, synthetic construct
  misc_feature 1..20: note = chemically synthesized
  source 1..20: mol_type = other DNA
atggaatcaaatatttttct

SEQ ID NO: 45951 - DNA, 20 bp, synthetic construct
  misc_feature 1..20: note = chemically synthesized
  source 1..20: mol_type = other DNA
aatatttttctaagatgaaa

SEQ ID NO: 45952 - DNA, 20 bp, synthetic construct
  misc_feature 1..20: note = chemically synthesized
  source 1..20: mol_type = other DNA
cagtcatgatttatttcaaa

SEQ ID NO: 45953 - DNA, 20 bp, synthetic construct
  misc_feature 1..20: note = chemically synthesized
  source 1..20: mol_type = other DNA
agtcatgatttatttcaaat

SEQ ID NO: 45954 - DNA, 20 bp, synthetic construct
  misc_feature 1..20: note = chemically synthesized
  source 1..20: mol_type = other DNA
tgatttatttcaaataggta

SEQ ID NO: 45955 - DNA, 20 bp, synthetic construct
  misc_feature 1..20: note = chemically synthesized
  source 1..20: mol_type = other DNA
tatttcaaataggtacggat

SEQ ID NO: 45956 - DNA, 20 bp, synthetic construct
  misc_feature 1..20: note = chemically synthesized
  source 1..20: mol_type = other DNA
ttcaaataggtacggataag

SEQ ID NO: 45957 - DNA, 20 bp, synthetic construct
  misc_feature 1..20: note = chemically synthesized
  source 1..20: mol_type = other DNA
ggtacggataagtagatatt

SEQ ID NO: 45958 - DNA, 20 bp, synthetic construct
  misc_feature 1..20: note = chemically synthesized
  source 1..20: mol_type = other DNA
gtacggataagtagatattg

SEQ ID NO: 45959 - DNA, 20 bp, synthetic construct
  misc_feature 1..20: note = chemically synthesized
  source 1..20: mol_type = other DNA
ggataagtagatattgaggt

SEQ ID NO: 45960 - DNA, 20 bp, synthetic construct
  misc_feature 1..20: note = chemically synthesized
  source 1..20: mol_type = other DNA
gtagatattgaggtaagcat

SEQ ID NO: 45961 - DNA, 20 bp, synthetic construct
  misc_feature 1..20: note = chemically synthesized
  source 1..20: mol_type = other DNA
tagatattgaggtaagcatt

SEQ ID NO: 45962 - DNA, 20 bp, synthetic construct
  misc_feature 1..20: note = chemically synthesized
  source 1..20: mol_type = other DNA
ctattactgcgctgaaactg

SEQ ID NO: 45963 - DNA, 20 bp, synthetic construct
  misc_feature 1..20: note = chemically synthesized
  source 1..20: mol_type = other DNA
gcgctgaaactgtggcttta

SEQ ID NO: 45964 - DNA, 20 bp, synthetic construct
  misc_feature 1..20: note = chemically synthesized
  source 1..20: mol_type = other DNA
attgttttcactgcactatt

SEQ ID NO: 45965 - DNA, 20 bp, synthetic construct
  misc_feature 1..20: note = chemically synthesized
  source 1..20: mol_type = other DNA
cactgcactattgagaaatt

SEQ ID NO: 45966 - DNA, 20 bp, synthetic construct
  misc_feature 1..20: note = chemically synthesized
  source 1..20: mol_type = other DNA
ctgcactattgagaaattaa

SEQ ID NO: 45967 - DNA, 20 bp, synthetic construct
  misc_feature 1..20: note = chemically synthesized
  source 1..20: mol_type = other DNA
attgagaaattaagagataa

SEQ ID NO: 45968 - DNA, 20 bp, synthetic construct
  misc_feature 1..20: note = chemically synthesized
  source 1..20: mol_type = other DNA
aaattaagagataatggcaa

SEQ ID NO: 45969 - DNA, 20 bp, synthetic construct
  misc_feature 1..20: note = chemically synthesized
  source 1..20: mol_type = other DNA
agataatggcaaaagtcaca

SEQ ID NO: 45970 - DNA, 20 bp, synthetic construct
  misc_feature 1..20: note = chemically synthesized
  source 1..20: mol_type = other DNA
ataatggcaaaagtcacaaa

SEQ ID NO: 45971 - DNA, 20 bp, synthetic construct
  misc_feature 1..20: note = chemically synthesized
  source 1..20: mol_type = other DNA
tcacaaagagtatattcaaa

SEQ ID NO: 45972 - DNA, 20 bp, synthetic construct
  misc_feature 1..20: note = chemically synthesized
  source 1..20: mol_type = other DNA
caaagagtatattcaaaaag

SEQ ID NO: 45973 - DNA, 20 bp, synthetic construct
  misc_feature 1..20: note = chemically synthesized
  source 1..20: mol_type = other DNA
agtatattcaaaaagaagta

SEQ ID NO: 45974 - DNA, 20 bp, synthetic construct
  misc_feature 1..20: note = chemically synthesized
  source 1..20: mol_type = other DNA
gaagtatagcactttttcct

SEQ ID NO: 45975 - DNA, 20 bp, synthetic construct
  misc_feature 1..20: note = chemically synthesized
  source 1..20: mol_type = other DNA
tagaaaccactgctaactga

SEQ ID NO: 45976 - DNA, 20 bp, synthetic construct
  misc_feature 1..20: note = chemically synthesized
  source 1..20: mol_type = other DNA
gaaaccactgctaactgaaa

SEQ ID NO: 45977 - DNA, 20 bp, synthetic construct
  misc_feature 1..20: note = chemically synthesized
  source 1..20: mol_type = other DNA
actgctaactgaaagagact

SEQ ID NO: 45978 - DNA, 20 bp, synthetic construct
  misc_feature 1..20: note = chemically synthesized
  source 1..20: mol_type = other DNA
atttgtcccgtcaaaaatcc

SEQ ID NO: 45979 - DNA, 20 bp, synthetic construct
  misc_feature 1..20: note = chemically synthesized
  source 1..20: mol_type = other DNA
tccctgaacttttcaaaaat

SEQ ID NO: 45980 - DNA, 20 bp, synthetic construct
  misc_feature 1..20: note = chemically synthesized
  source 1..20: mol_type = other DNA
tcaaaaattggtacatgctt

SEQ ID NO: 45981 - DNA, 20 bp, synthetic construct
  misc_feature 1..20: note = chemically synthesized
  source 1..20: mol_type = other DNA
catgctttagctttaaacta

SEQ ID NO: 45982 - DNA, 20 bp, synthetic construct
  misc_feature 1..20: note = chemically synthesized
  source 1..20: mol_type = other DNA
atgctttagctttaaactac

SEQ ID NO: 45983 - DNA, 20 bp, synthetic construct
  misc_feature 1..20: note = chemically synthesized
  source 1..20: mol_type = other DNA
ctttaaactacaggcctcac

SEQ ID NO: 45984 - DNA, 20 bp, synthetic construct
  misc_feature 1..20: note = chemically synthesized
  source 1..20: mol_type = other DNA
ttaaactacaggcctcactg

SEQ ID NO: 45985 - DNA, 20 bp, synthetic construct
  misc_feature 1..20: note = chemically synthesized
  source 1..20: mol_type = other DNA
actacaggcctcactggagc

SEQ ID NO: 45986 - DNA, 20 bp, synthetic construct
  misc_feature 1..20: note = chemically synthesized
  source 1..20: mol_type = other DNA
tacaggcctcactggagcta

SEQ ID NO: 45987 - DNA, 20 bp, synthetic construct
  misc_feature 1..20: note = chemically synthesized
  source 1..20: mol_type = other DNA
gcctcactggagctagagac

SEQ ID NO: 45988 - DNA, 20 bp, synthetic construct
  misc_feature 1..20: note = chemically synthesized
  source 1..20: mol_type = other DNA
tcactggagctagagacaag

SEQ ID NO: 45989 - DNA, 20 bp, synthetic construct
  misc_feature 1..20: note = chemically synthesized
  source 1..20: mol_type = other DNA
cactggagctagagacaaga

SEQ ID NO: 45990 - DNA, 20 bp, synthetic construct
  misc_feature 1..20: note = chemically synthesized
  source 1..20: mol_type = other DNA
agagacaagaaggtaaaaaa

SEQ ID NO: 45991 - DNA, 20 bp, synthetic construct
  misc_feature 1..20: note = chemically synthesized
  source 1..20: mol_type = other DNA
aggtaaaaaacggctgacaa

SEQ ID NO: 45992 - DNA, 20 bp, synthetic construct
  misc_feature 1..20: note = chemically synthesized
  source 1..20: mol_type = other DNA
taaaaaacggctgacaaaag

SEQ ID NO: 45993 - DNA, 20 bp, synthetic construct
  misc_feature 1..20: note = chemically synthesized
  source 1..20: mol_type = other DNA
acggctgacaaaagaagtcc

SEQ ID NO: 45994 - DNA, 20 bp, synthetic construct
  misc_feature 1..20: note = chemically synthesized
  source 1..20: mol_type = other DNA
agtcctggtatcctctatga

SEQ ID NO: 45995 - DNA, 20 bp, synthetic construct
  misc_feature 1..20: note = chemically synthesized
  source 1..20: mol_type = other DNA
gtcctggtatcctctatgat

SEQ ID NO: 45996 - DNA, 20 bp, synthetic construct
  misc_feature 1..20: note = chemically synthesized
  source 1..20: mol_type = other DNA
cctggtatcctctatgatgg

SEQ ID NO: 45997 - DNA, 20 bp, synthetic construct
  misc_feature 1..20: note = chemically synthesized
  source 1..20: mol_type = other DNA
ggtatcctctatgatgggag

SEQ ID NO: 45998 - DNA, 20 bp, synthetic construct
  misc_feature 1..20: note = chemically synthesized
  source 1..20: mol_type = other DNA
gtatcctctatgatgggaga

SEQ ID NO: 45999 - DNA, 20 bp, synthetic construct
  misc_feature 1..20: note = chemically synthesized
  source 1..20: mol_type = other DNA
ctatgatgggagaaggaaac

SEQ ID NO: 46000 - DNA, 20 bp, synthetic construct
  misc_feature 1..20: note = chemically synthesized
  source 1..20: mol_type = other DNA
tgggagaaggaaactagcta

SEQ ID NO: 46001 - DNA, 20 bp, synthetic construct
  misc_feature 1..20: note = chemically synthesized
  source 1..20: mol_type = other DNA
gggagaaggaaactagctaa

SEQ ID NO: 46002 - DNA, 20 bp, synthetic construct
  misc_feature 1..20: note = chemically synthesized
  source 1..20: mol_type = other DNA
ggagaaggaaactagctaaa

SEQ ID NO: 46003 - DNA, 20 bp, synthetic construct
  misc_feature 1..20: note = chemically synthesized
  source 1..20: mol_type = other DNA
gaaggaaactagctaaaggg

SEQ ID NO: 46004 - DNA, 20 bp, synthetic construct
  misc_feature 1..20: note = chemically synthesized
  source 1..20: mol_type = other DNA
agctaaagggaagaataaat

SEQ ID NO: 46005 - DNA, 20 bp, synthetic construct
  misc_feature 1..20: note = chemically synthesized
  source 1..20: mol_type = other DNA
ctaaagggaagaataaatta

SEQ ID NO: 46006 - DNA, 20 bp, synthetic construct
  misc_feature 1..20: note = chemically synthesized
  source 1..20: mol_type = other DNA
agaataaattagagaaaaac

SEQ ID NO: 46007 - DNA, 20 bp, synthetic construct
  misc_feature 1..20: note = chemically synthesized
  source 1..20: mol_type = other DNA
aaaaactggaatgactgaat

SEQ ID NO: 46008 - DNA, 20 bp, synthetic construct
  misc_feature 1..20: note = chemically synthesized
  source 1..20: mol_type = other DNA
tggaatgactgaatcggaac

SEQ ID NO: 46009 - DNA, 20 bp, synthetic construct
  misc_feature 1..20: note = chemically synthesized
  source 1..20: mol_type = other DNA
ggaatgactgaatcggaaca

SEQ ID NO: 46010 - DNA, 20 bp, synthetic construct
  misc_feature 1..20: note = chemically synthesized
  source 1..20: mol_type = other DNA
gactgaatcggaacaaggca

SEQ ID NO: 46011 - DNA, 20 bp, synthetic construct
  misc_feature 1..20: note = chemically synthesized
  source 1..20: mol_type = other DNA
actgaatcggaacaaggcaa

SEQ ID NO: 46012 - DNA, 20 bp, synthetic construct
  misc_feature 1..20: note = chemically synthesized
  source 1..20: mol_type = other DNA
gcaaaggctataaaaaaaat

SEQ ID NO: 46013 - DNA, 20 bp, synthetic construct
  misc_feature 1..20: note = chemically synthesized
  source 1..20: mol_type = other DNA
aaggctataaaaaaaattag

SEQ ID NO: 46014 - DNA, 20 bp, synthetic construct
  misc_feature 1..20: note = chemically synthesized
  source 1..20: mol_type = other DNA
aaaaattagcagtatcctct

SEQ ID NO: 46015 - DNA, 20 bp, synthetic construct
  misc_feature 1..20: note = chemically synthesized
  source 1..20: mol_type = other DNA
aaaattagcagtatcctctt

SEQ ID NO: 46016 - DNA, 20 bp, synthetic construct
  misc_feature 1..20: note = chemically synthesized
  source 1..20: mol_type = other DNA
aaattagcagtatcctcttg

SEQ ID NO: 46017 - DNA, 20 bp, synthetic construct
  misc_feature 1..20: note = chemically synthesized
  source 1..20: mol_type = other DNA
aattagcagtatcctcttgg

SEQ ID NO: 46018 - DNA, 20 bp, synthetic construct
  misc_feature 1..20: note = chemically synthesized
  source 1..20: mol_type = other DNA
atgcaaatatctgtctgaaa

SEQ ID NO: 46019 - DNA, 20 bp, synthetic construct
  misc_feature 1..20: note = chemically synthesized
  source 1..20: mol_type = other DNA
tatctgtctgaaacggtccc

SEQ ID NO: 46020 - DNA, 20 bp, synthetic construct
  misc_feature 1..20: note = chemically synthesized
  source 1..20: mol_type = other DNA
ccctggctaaactccaccca

SEQ ID NO: 46021 - DNA, 20 bp, synthetic construct
  misc_feature 1..20: note = chemically synthesized
  source 1..20: mol_type = other DNA
cctggctaaactccacccat

SEQ ID NO: 46022 - DNA, 20 bp, synthetic construct
  misc_feature 1..20: note = chemically synthesized
  source 1..20: mol_type = other DNA
gctaaactccacccatgggt

SEQ ID NO: 46023 - DNA, 20 bp, synthetic construct
  misc_feature 1..20: note = chemically synthesized
  source 1..20: mol_type = other DNA
aactccacccatgggttggc

SEQ ID NO: 46024 - DNA, 20 bp, synthetic construct
  misc_feature 1..20: note = chemically synthesized
  source 1..20: mol_type = other DNA
gccagccttgccttgaccaa

SEQ ID NO: 46025 - DNA, 20 bp, synthetic construct
  misc_feature 1..20: note = chemically synthesized
  source 1..20: mol_type = other DNA
ccttgaccaatagccttgac

SEQ ID NO: 46026 - DNA, 20 bp, synthetic construct
  misc_feature 1..20: note = chemically synthesized
  source 1..20: mol_type = other DNA
cttgaccaatagccttgaca

SEQ ID NO: 46027 - DNA, 20 bp, synthetic construct
  misc_feature 1..20: note = chemically synthesized
  source 1..20: mol_type = other DNA
gacaaggcaaacttgaccaa

SEQ ID NO: 46028 - DNA, 20 bp, synthetic construct
  misc_feature 1..20: note = chemically synthesized
  source 1..20: mol_type = other DNA
gcaaacttgaccaatagtct

SEQ ID NO: 46029 - DNA, 20 bp, synthetic construct
  misc_feature 1..20: note = chemically synthesized
  source 1..20: mol_type = other DNA
aaacttgaccaatagtctta

SEQ ID NO: 46030 - DNA, 20 bp, synthetic construct
  misc_feature 1..20: note = chemically synthesized
  source 1..20: mol_type = other DNA
accaatagtcttagagtatc

SEQ ID NO: 46031 - DNA, 20 bp, synthetic construct
  misc_feature 1..20: note = chemically synthesized
  source 1..20: mol_type = other DNA
atagtcttagagtatccagt

SEQ ID NO: 46032 - DNA, 20 bp, synthetic construct
  misc_feature 1..20: note = chemically synthesized
  source 1..20: mol_type = other DNA
tagtcttagagtatccagtg

SEQ ID NO: 46033 - DNA, 20 bp, synthetic construct
  misc_feature 1..20: note = chemically synthesized
  source 1..20: mol_type = other DNA
cttagagtatccagtgaggc

SEQ ID NO: 46034 - DNA, 20 bp, synthetic construct
  misc_feature 1..20: note = chemically synthesized
  source 1..20: mol_type = other DNA
ttagagtatccagtgaggcc

SEQ ID NO: 46035 - DNA, 20 bp, synthetic construct
  misc_feature 1..20: note = chemically synthesized
  source 1..20: mol_type = other DNA
tagagtatccagtgaggcca

SEQ ID NO: 46036 - DNA, 20 bp, synthetic construct
  misc_feature 1..20: note = chemically synthesized
  source 1..20: mol_type = other DNA
agagtatccagtgaggccag

SEQ ID NO: 46037 - DNA, 20 bp, synthetic construct
  misc_feature 1..20: note = chemically synthesized
  source 1..20: mol_type = other DNA
tatccagtgaggccaggggc

SEQ ID NO: 46038 - DNA, 20 bp, synthetic construct
  misc_feature 1..20: note = chemically synthesized
  source 1..20: mol_type = other DNA
ccagtgaggccaggggccgg

SEQ ID NO: 46039 - DNA, 20 bp, synthetic construct
  misc_feature 1..20: note = chemically synthesized
  source 1..20: mol_type = other DNA
tgaggccaggggccggcggc

SEQ ID NO: 46040 - DNA, 20 bp, synthetic construct
  misc_feature 1..20: note = chemically synthesized
  source 1..20: mol_type = other DNA
gccaggggccggcggctggc

SEQ ID NO: 46041 - DNA, 20 bp, synthetic construct
  misc_feature 1..20: note = chemically synthesized
  source 1..20: mol_type = other DNA
ccaggggccggcggctggct

SEQ ID NO: 46042 - DNA, 20 bp, synthetic construct
  misc_feature 1..20: note = chemically synthesized
  source 1..20: mol_type = other DNA
caggggccggcggctggcta

SEQ ID NO: 46043 - DNA, 20 bp, synthetic construct
  misc_feature 1..20: note = chemically synthesized
  source 1..20: mol_type = other DNA
ccggcggctggctagggatg

SEQ ID NO: 46044 - DNA, 20 bp, synthetic construct
  misc_feature 1..20: note = chemically synthesized
  source 1..20: mol_type = other DNA
tggctagggatgaagaataa

SEQ ID NO: 46045 - DNA, 20 bp, synthetic construct
  misc_feature 1..20: note = chemically synthesized
  source 1..20: mol_type = other DNA
ggctagggatgaagaataaa

SEQ ID NO: 46046 - DNA, 20 bp, synthetic construct
  misc_feature 1..20: note = chemically synthesized
  source 1..20: mol_type = other DNA
tagggatgaagaataaaagg

SEQ ID NO: 46047 - DNA, 20 bp, synthetic construct
  misc_feature 1..20: note = chemically synthesized
  source 1..20: mol_type = other DNA
gaataaaaggaagcaccctt

SEQ ID NO: 46048 - DNA, 20 bp, synthetic construct
  misc_feature 1..20: note = chemically synthesized
  source 1..20: mol_type = other DNA
taaaaggaagcacccttcag

SEQ ID NO: 46049 - DNA, 20 bp, synthetic construct
  misc_feature 1..20: note = chemically synthesized
  source 1..20: mol_type = other DNA
cagttccacacactcgcttc

SEQ ID NO: 46050 - DNA, 20 bp, synthetic construct
  misc_feature 1..20: note = chemically synthesized
  source 1..20: mol_type = other DNA
cactcgcttctggaacgtct

SEQ ID NO: 46051 - DNA, 20 bp, synthetic construct
  misc_feature 1..20: note = chemically synthesized
  source 1..20: mol_type = other DNA
actcgcttctggaacgtctg

SEQ ID NO: 46052 - DNA, 20 bp, synthetic construct
  misc_feature 1..20: note = chemically synthesized
  source 1..20: mol_type = other DNA
gaacgtctgaggttatcaat

SEQ ID NO: 46053 - DNA, 20 bp, synthetic construct
  misc_feature 1..20: note = chemically synthesized
  source 1..20: mol_type = other DNA
tgaggttatcaataagctcc

SEQ ID NO: 46054 - DNA, 20 bp, synthetic construct
  misc_feature 1..20: note = chemically synthesized
  source 1..20: mol_type = other DNA
ttatcaataagctcctagtc

SEQ ID NO: 46055 - DNA, 20 bp, synthetic construct
  misc_feature 1..20: note = chemically synthesized
  source 1..20: mol_type = other DNA
agctcctagtccagacgcca

SEQ ID NO: 46056 - DNA, 20 bp, synthetic construct
  misc_feature 1..20: note = chemically synthesized
  source 1..20: mol_type = other DNA
gctcctagtccagacgccat

SEQ ID NO: 46057 - DNA, 20 bp, synthetic construct
  misc_feature 1..20: note = chemically synthesized
  source 1..20: mol_type = other DNA
agacgccatgggtcatttca

SEQ ID NO: 46058 - DNA, 20 bp, synthetic construct
  misc_feature 1..20: note = chemically synthesized
  source 1..20: mol_type = other DNA
acgccatgggtcatttcaca

SEQ ID NO: 46059 - DNA, 20 bp, synthetic construct
  misc_feature 1..20: note = chemically synthesized
  source 1..20: mol_type = other DNA
cgccatgggtcatttcacag

SEQ ID NO: 46060 - DNA, 20 bp, synthetic construct
  misc_feature 1..20: note = chemically synthesized
  source 1..20: mol_type = other DNA
ccatgggtcatttcacagag

SEQ ID NO: 46061 - DNA, 20 bp, synthetic construct
  misc_feature 1..20: note = chemically synthesized
  source 1..20: mol_type = other DNA
catgggtcatttcacagagg

SEQ ID NO: 46062 - DNA, 20 bp, synthetic construct
  misc_feature 1..20: note = chemically synthesized
  source 1..20: mol_type = other DNA
gtcatttcacagaggaggac

SEQ ID NO: 46063 - DNA, 20 bp, synthetic construct
  misc_feature 1..20: note = chemically synthesized
  source 1..20: mol_type = other DNA
tcatttcacagaggaggaca

SEQ ID NO: 46064 - DNA, 20 bp, synthetic construct
  misc_feature 1..20: note = chemically synthesized
  source 1..20: mol_type = other DNA
gaggacaaggctactatcac

SEQ ID NO: 46065 - DNA, 20 bp, synthetic construct
  misc_feature 1..20: note = chemically synthesized
  source 1..20: mol_type = other DNA
aggctactatcacaagcctg

SEQ ID NO: 46066 - DNA, 20 bp, synthetic construct
  misc_feature 1..20: note = chemically synthesized
  source 1..20: mol_type = other DNA
ggctactatcacaagcctgt

SEQ ID NO: 46067 - DNA, 20 bp, synthetic construct
  misc_feature 1..20: note = chemically synthesized
  source 1..20: mol_type = other DNA
gctactatcacaagcctgtg

SEQ ID NO: 46068 - DNA, 20 bp, synthetic construct
  misc_feature 1..20: note = chemically synthesized
  source 1..20: mol_type = other DNA
ctatcacaagcctgtggggc

SEQ ID NO: 46069 - DNA, 20 bp, synthetic construct
  misc_feature 1..20: note = chemically synthesized
  source 1..20: mol_type = other DNA
tatcacaagcctgtggggca

SEQ ID NO: 46070 - DNA, 20 bp, synthetic construct
  misc_feature 1..20: note = chemically synthesized
  source 1..20: mol_type = other DNA
cctgtggggcaaggtgaatg

SEQ ID NO: 46071 - DNA, 20 bp, synthetic construct
  misc_feature 1..20: note = chemically synthesized
  source 1..20: mol_type = other DNA
gtggggcaaggtgaatgtgg

SEQ ID NO: 46072 - DNA, 20 bp, synthetic construct
  misc_feature 1..20: note = chemically synthesized
  source 1..20: mol_type = other DNA
aaggtgaatgtggaagatgc

SEQ ID NO: 46073 - DNA, 20 bp, synthetic construct
  misc_feature 1..20: note = chemically synthesized
  source 1..20: mol_type = other DNA
ggtgaatgtggaagatgctg

SEQ ID NO: 46074 - DNA, 20 bp, synthetic construct
  misc_feature 1..20: note = chemically synthesized
  source 1..20: mol_type = other DNA
gtgaatgtggaagatgctgg

SEQ ID NO: 46075 - DNA, 20 bp, synthetic construct
  misc_feature 1..20: note = chemically synthesized
  source 1..20: mol_type = other DNA
gaatgtggaagatgctggag

SEQ ID NO: 46076 - DNA, 20 bp, synthetic construct
  misc_feature 1..20: note = chemically synthesized
  source 1..20: mol_type = other DNA
agatgctggaggagaaaccc

SEQ ID NO: 46077 - DNA, 20 bp, synthetic construct
  misc_feature 1..20: note = chemically synthesized
  source 1..20: mol_type = other DNA
gatgctggaggagaaaccct

SEQ ID NO: 46078 - DNA, 20 bp, synthetic construct
  misc_feature 1..20: note = chemically synthesized
  source 1..20: mol_type = other DNA
gctggaggagaaaccctggg

SEQ ID NO: 46079 - DNA, 20 bp, synthetic construct
  misc_feature 1..20: note = chemically synthesized
  source 1..20: mol_type = other DNA
ctggaggagaaaccctggga

SEQ ID NO: 46080 - DNA, 20 bp, synthetic construct
  misc_feature 1..20: note = chemically synthesized
  source 1..20: mol_type = other DNA
gaggagaaaccctgggaagg

SEQ ID NO: 46081 - DNA, 20 bp, synthetic construct
  misc_feature 1..20: note = chemically synthesized
  source 1..20: mol_type = other DNA
aggagaaaccctgggaaggt

SEQ ID NO: 46082 - DNA, 20 bp, synthetic construct
  misc_feature 1..20: note = chemically synthesized
  source 1..20: mol_type = other DNA
aaccctgggaaggtaggctc

SEQ ID NO: 46083 - DNA, 20 bp, synthetic construct
  misc_feature 1..20: note = chemically synthesized
  source 1..20: mol_type = other DNA
ggaaggtaggctctggtgac

SEQ ID NO: 46084 - DNA, 20 bp, synthetic construct
  misc_feature 1..20: note = chemically synthesized
  source 1..20: mol_type = other DNA
gaaggtaggctctggtgacc

SEQ ID NO: 46085 - DNA, 20 bp, synthetic construct
  misc_feature 1..20: note = chemically synthesized
  source 1..20: mol_type = other DNA
taggctctggtgaccaggac

SEQ ID NO: 46086 - DNA, 20 bp, synthetic construct
  misc_feature 1..20: note = chemically synthesized
  source 1..20: mol_type = other DNA
aggctctggtgaccaggaca

SEQ ID NO: 46087 - DNA, 20 bp, synthetic construct
  misc_feature 1..20: note = chemically synthesized
  source 1..20: mol_type = other DNA
ggctctggtgaccaggacaa

SEQ ID NO: 46088 - DNA, 20 bp, synthetic construct
  misc_feature 1..20: note = chemically synthesized
  source 1..20: mol_type = other DNA
ctctggtgaccaggacaagg

SEQ ID NO: 46089 - DNA, 20 bp, synthetic construct
  misc_feature 1..20: note = chemically synthesized
  source 1..20: mol_type = other DNA
tctggtgaccaggacaaggg

SEQ ID NO: 46090 - DNA, 20 bp, synthetic construct
  misc_feature 1..20: note = chemically synthesized
  source 1..20: mol_type = other DNA
ctggtgaccaggacaaggga

SEQ ID NO: 46091 - DNA, 20 bp, synthetic construct
  misc_feature 1..20: note = chemically synthesized
  source 1..20: mol_type = other DNA
gtgaccaggacaagggaggg

SEQ ID NO: 46092 - DNA, 20 bp, synthetic construct
  misc_feature 1..20: note = chemically synthesized
  source 1..20: mol_type = other DNA
tgaccaggacaagggaggga

SEQ ID NO: 46093 - DNA, 20 bp, synthetic construct
  misc_feature 1..20: note = chemically synthesized
  source 1..20: mol_type = other DNA
ccaggacaagggagggaagg

SEQ ID NO: 46094 - DNA, 20 bp, synthetic construct
  misc_feature 1..20: note = chemically synthesized
  source 1..20: mol_type = other DNA
caggacaagggagggaagga

SEQ ID NO: 46095 - DNA, 20 bp, synthetic construct
  misc_feature 1..20: note = chemically synthesized
  source 1..20: mol_type = other DNA
ggaaggaaggaccctgtgcc

SEQ ID NO: 46096 - DNA, 20 bp, synthetic construct
  misc_feature 1..20: note = chemically synthesized
  source 1..20: mol_type = other DNA
aaggaccctgtgcctggcaa

SEQ ID NO: 46097 - DNA, 20 bp, synthetic construct
  misc_feature 1..20: note = chemically synthesized
  source 1..20: mol_type = other DNA
ccctgtgcctggcaaaagtc

SEQ ID NO: 46098 - DNA, 20 bp, synthetic construct
  misc_feature 1..20: note = chemically synthesized
  source 1..20: mol_type = other DNA
cctgtgcctggcaaaagtcc

SEQ ID NO: 46099 - DNA, 20 bp, synthetic construct
  misc_feature 1..20: note = chemically synthesized
  source 1..20: mol_type = other DNA
caaaagtccaggtcgcttct

SEQ ID NO: 46100 - DNA, 20 bp, synthetic construct
  misc_feature 1..20: note = chemically synthesized
  source 1..20: mol_type = other DNA
aaaagtccaggtcgcttctc

SEQ ID NO: 46101 - DNA, 20 bp, synthetic construct
  misc_feature 1..20: note = chemically synthesized
  source 1..20: mol_type = other DNA
aggtcgcttctcaggatttg

SEQ ID NO: 46102 - DNA, 20 bp, synthetic construct
  misc_feature 1..20: note = chemically synthesized
  source 1..20: mol_type = other DNA
aactgttcttgtcaatctca

SEQ ID NO: 46103 - DNA, 20 bp, synthetic construct
  misc_feature 1..20: note = chemically synthesized
  source 1..20: mol_type = other DNA
actgttcttgtcaatctcac

SEQ ID NO: 46104 - DNA, 20 bp, synthetic construct
  misc_feature 1..20: note = chemically synthesized
  source 1..20: mol_type = other DNA
ttgtcaatctcacaggctcc

SEQ ID NO: 46105 - DNA, 20 bp, synthetic construct
  misc_feature 1..20: note = chemically synthesized
  source 1..20: mol_type = other DNA
ggctcctggttgtctaccca

SEQ ID NO: 46106 - DNA, 20 bp, synthetic construct
  misc_feature 1..20: note = chemically synthesized
  source 1..20: mol_type = other DNA
tggttgtctacccatggacc

SEQ ID NO: 46107 - DNA, 20 bp, synthetic construct
  misc_feature 1..20: note = chemically synthesized
  source 1..20: mol_type = other DNA
gttgtctacccatggaccca

SEQ ID NO: 46108 - DNA, 20 bp, synthetic construct
  misc_feature 1..20: note = chemically synthesized
  source 1..20: mol_type = other DNA
ttgtctacccatggacccag

SEQ ID NO: 46109 - DNA, 20 bp, synthetic construct
  misc_feature 1..20: note = chemically synthesized
  source 1..20: mol_type = other DNA
tggacccagaggttctttga

SEQ ID NO: 46110 - DNA, 20 bp, synthetic construct
  misc_feature 1..20: note = chemically synthesized
  source 1..20: mol_type = other DNA
cagaggttctttgacagctt

SEQ ID NO: 46111 - DNA, 20 bp, synthetic construct
  misc_feature 1..20: note = chemically synthesized
  source 1..20: mol_type = other DNA
gtcctctgcctctgccatca

SEQ ID NO: 46112 - DNA, 20 bp, synthetic construct
  misc_feature 1..20: note = chemically synthesized
  source 1..20: mol_type = other DNA
tcctctgcctctgccatcat

SEQ ID NO: 46113 - DNA, 20 bp, synthetic construct
  misc_feature 1..20: note = chemically synthesized
  source 1..20: mol_type = other DNA
tgccatcatgggcaacccca

SEQ ID NO: 46114 - DNA, 20 bp, synthetic construct
  misc_feature 1..20: note = chemically synthesized
  source 1..20: mol_type = other DNA
tcatgggcaaccccaaagtc

SEQ ID NO: 46115 - DNA, 20 bp, synthetic construct
  misc_feature 1..20: note = chemically synthesized
  source 1..20: mol_type = other DNA
catgggcaaccccaaagtca

SEQ ID NO: 46116 - DNA, 20 bp, synthetic construct
  misc_feature 1..20: note = chemically synthesized
  source 1..20: mol_type = other DNA
aaccccaaagtcaaggcaca

SEQ ID NO: 46117 - DNA, 20 bp, synthetic construct
  misc_feature 1..20: note = chemically synthesized
  source 1..20: mol_type = other DNA
ccaaagtcaaggcacatggc

SEQ ID NO: 46118 - DNA, 20 bp, synthetic construct
  misc_feature 1..20: note = chemically synthesized
  source 1..20: mol_type = other DNA
aagtcaaggcacatggcaag

SEQ ID NO: 46119 - DNA, 20 bp, synthetic construct
  misc_feature 1..20: note = chemically synthesized
  source 1..20: mol_type = other DNA
agtcaaggcacatggcaaga

SEQ ID NO: 46120 - DNA, 20 bp, synthetic construct
  misc_feature 1..20: note = chemically synthesized
  source 1..20: mol_type = other DNA
caagaaggtgctgacttcct

SEQ ID NO: 46121 - DNA, 20 bp, synthetic construct
  misc_feature 1..20: note = chemically synthesized
  source 1..20: mol_type = other DNA
aagaaggtgctgacttcctt

SEQ ID NO: 46122 - DNA, 20 bp, synthetic construct
  misc_feature 1..20: note = chemically synthesized
  source 1..20: mol_type = other DNA
gaaggtgctgacttccttgg

SEQ ID NO: 46123 - DNA, 20 bp, synthetic construct
  misc_feature 1..20: note = chemically synthesized
  source 1..20: mol_type = other DNA
cttccttgggagatgccaca

SEQ ID NO: 46124 - DNA, 20 bp, synthetic construct
  misc_feature 1..20: note = chemically synthesized
  source 1..20: mol_type = other DNA
gggagatgccacaaagcacc

SEQ ID NO: 46125 - DNA, 20 bp, synthetic construct
  misc_feature 1..20: note = chemically synthesized
  source 1..20: mol_type = other DNA
caaagcacctggatgatctc

SEQ ID NO: 46126 - DNA, 20 bp, synthetic construct
  misc_feature 1..20: note = chemically synthesized
  source 1..20: mol_type = other DNA
aaagcacctggatgatctca

SEQ ID NO: 46127 - DNA, 20 bp, synthetic construct
  misc_feature 1..20: note = chemically synthesized
  source 1..20: mol_type = other DNA
aagcacctggatgatctcaa

SEQ ID NO: 46128 - DNA, 20 bp, synthetic construct
  misc_feature 1..20: note = chemically synthesized
  source 1..20: mol_type = other DNA
atctcaagggcacctttgcc

SEQ ID NO: 46129 - DNA, 20 bp, synthetic construct
  misc_feature 1..20: note = chemically synthesized
  source 1..20: mol_type = other DNA
aagggcacctttgcccagct

SEQ ID NO: 46130 - DNA, 20 bp, synthetic construct
  misc_feature 1..20: note = chemically synthesized
  source 1..20: mol_type = other DNA
tgagtgaactgcactgtgac

SEQ ID NO: 46131 - DNA, 20 bp, synthetic construct
  misc_feature 1..20: note = chemically synthesized
  source 1..20: mol_type = other DNA
gcactgtgacaagctgcatg

SEQ ID NO: 46132 - DNA, 20 bp, synthetic construct
  misc_feature 1..20: note = chemically synthesized
  source 1..20: mol_type = other DNA
acaagctgcatgtggatcct

SEQ ID NO: 46133 - DNA, 20 bp, synthetic construct
  misc_feature 1..20: note = chemically synthesized
  source 1..20: mol_type = other DNA
atgtggatcctgagaacttc

SEQ ID NO: 46134 - DNA, 20 bp, synthetic construct
  misc_feature 1..20: note = chemically synthesized
  source 1..20: mol_type = other DNA
tgtggatcctgagaacttca

SEQ ID NO: 46135 - DNA, 20 bp, synthetic construct
  misc_feature 1..20: note = chemically synthesized
  source 1..20: mol_type = other DNA
gatcctgagaacttcaaggt

SEQ ID NO: 46136 - DNA, 20 bp, synthetic construct
  misc_feature 1..20: note = chemically synthesized
  source 1..20: mol_type = other DNA
tgagaacttcaaggtgagtc

SEQ ID NO: 46137 - DNA, 20 bp, synthetic construct
  misc_feature 1..20: note = chemically synthesized
  source 1..20: mol_type = other DNA
gagaacttcaaggtgagtcc

SEQ ID NO: 46138 - DNA, 20 bp, synthetic construct
  misc_feature 1..20: note = chemically synthesized
  source 1..20: mol_type = other DNA
gaacttcaaggtgagtccag

SEQ ID NO: 46139 - DNA, 20 bp, synthetic construct
  misc_feature 1..20: note = chemically synthesized
  source 1..20: mol_type = other DNA
ggtgagtccaggagatgttt

SEQ ID NO: 46140 - DNA, 20 bp, synthetic construct
  misc_feature 1..20: note = chemically synthesized
  source 1..20: mol_type = other DNA
tgtttcagccctgttgcctt

SEQ ID NO: 46141 - DNA, 20 bp, synthetic construct
  misc_feature 1..20: note = chemically synthesized
  source 1..20: mol_type = other DNA
gccctgttgcctttagtctc

SEQ ID NO: 46142 - DNA, 20 bp, synthetic construct
  misc_feature 1..20: note = chemically synthesized
  source 1..20: mol_type = other DNA
ccctgttgcctttagtctcg

SEQ ID NO: 46143 - DNA, 20 bp, synthetic construct
  misc_feature 1..20: note = chemically synthesized
  source 1..20: mol_type = other DNA
cctttagtctcgaggcaact

SEQ ID NO: 46144 - DNA, 20 bp, synthetic construct
  misc_feature 1..20: note = chemically synthesized
  source 1..20: mol_type = other DNA
tctcgaggcaacttagacaa

SEQ ID NO: 46145 - DNA, 20 bp, synthetic construct
  misc_feature 1..20: note = chemically synthesized
  source 1..20: mol_type = other DNA
tcgaggcaacttagacaacg

SEQ ID NO: 46146 - DNA, 20 bp, synthetic construct
  misc_feature 1..20: note = chemically synthesized
  source 1..20: mol_type = other DNA
agacaacggagtattgatct

SEQ ID NO: 46147 - DNA, 20 bp, synthetic construct
  misc_feature 1..20: note = chemically synthesized
  source 1..20: mol_type = other DNA
acggagtattgatctgagca

SEQ ID NO: 46148 - DNA, 20 bp, synthetic construct
  misc_feature 1..20: note = chemically synthesized
  source 1..20: mol_type = other DNA
gagtattgatctgagcacag

SEQ ID NO: 46149 - DNA, 20 bp, synthetic construct
  misc_feature 1..20: note = chemically synthesized
  source 1..20: mol_type = other DNA
agtattgatctgagcacagc

SEQ ID NO: 46150 - DNA, 20 bp, synthetic construct
  misc_feature 1..20: note = chemically synthesized
  source 1..20: mol_type = other DNA
gtattgatctgagcacagca

SEQ ID NO: 46151 - DNA, 20 bp, synthetic construct
  misc_feature 1..20: note = chemically synthesized
  source 1..20: mol_type = other DNA
atctgagcacagcagggtgt

SEQ ID NO: 46152 - DNA, 20 bp, synthetic construct
  misc_feature 1..20: note = chemically synthesized
  source 1..20: mol_type = other DNA
agcagggtgtgagctgtttg

SEQ ID NO: 46153 - DNA, 20 bp, synthetic construct
  misc_feature 1..20: note = chemically synthesized
  source 1..20: mol_type = other DNA
tgtgagctgtttgaagatac

SEQ ID NO: 46154 - DNA, 20 bp, synthetic construct
  misc_feature 1..20: note = chemically synthesized
  source 1..20: mol_type = other DNA
gtgagctgtttgaagatact

SEQ ID NO: 46155 - DNA, 20 bp, synthetic construct
  misc_feature 1..20: note = chemically synthesized
  source 1..20: mol_type = other DNA
tgagctgtttgaagatactg

SEQ ID NO: 46156 - DNA, 20 bp, synthetic construct
  misc_feature 1..20: note = chemically synthesized
  source 1..20: mol_type = other DNA
ctgtttgaagatactggggt

SEQ ID NO: 46157 - DNA, 20 bp, synthetic construct
  misc_feature 1..20: note = chemically synthesized
  source 1..20: mol_type = other DNA
tgtttgaagatactggggtt

SEQ ID NO: 46158 - DNA, 20 bp, synthetic construct
  misc_feature 1..20: note = chemically synthesized
  source 1..20: mol_type = other DNA
gtttgaagatactggggttg

SEQ ID NO: 46159 - DNA, 20 bp, synthetic construct
  misc_feature 1..20: note = chemically synthesized
  source 1..20: mol_type = other DNA
tttgaagatactggggttgg

SEQ ID NO: 46160 - DNA, 20 bp, synthetic construct
  misc_feature 1..20: note = chemically synthesized
  source 1..20: mol_type = other DNA
agatactggggttgggggtg

SEQ ID NO: 46161 - DNA, 20 bp, synthetic construct
  misc_feature 1..20: note = chemically synthesized
  source 1..20: mol_type = other DNA
ggttgggggtgaagaaactg

SEQ ID NO: 46162 - DNA, 20 bp, synthetic construct
  misc_feature 1..20: note = chemically synthesized
  source 1..20: mol_type = other DNA
ttgggggtgaagaaactgca

SEQ ID NO: 46163 - DNA, 20 bp, synthetic construct
  misc_feature 1..20: note = chemically synthesized
  source 1..20: mol_type = other DNA
tgggggtgaagaaactgcag

SEQ ID NO: 46164 - DNA, 20 bp, synthetic construct
  misc_feature 1..20: note = chemically synthesized
  source 1..20: mol_type = other DNA
agaaactgcagaggactaac

SEQ ID NO: 46165 - DNA, 20 bp, synthetic construct
  misc_feature 1..20: note = chemically synthesized
  source 1..20: mol_type = other DNA
gaaactgcagaggactaact

SEQ ID NO: 46166 - DNA, 20 bp, synthetic construct
  misc_feature 1..20: note = chemically synthesized
  source 1..20: mol_type = other DNA
tgcagaggactaactgggct

SEQ ID NO: 46167 - DNA, 20 bp, synthetic construct
  misc_feature 1..20: note = chemically synthesized
  source 1..20: mol_type = other DNA
ggactaactgggctgagacc

SEQ ID NO: 46168 - DNA, 20 bp, synthetic construct
  misc_feature 1..20: note = chemically synthesized
  source 1..20: mol_type = other DNA
ctaactgggctgagacccag

SEQ ID NO: 46169 - DNA, 20 bp, synthetic construct
  misc_feature 1..20: note = chemically synthesized
  source 1..20: mol_type = other DNA
gagacccagtggtaatgttt

SEQ ID NO: 46170 - DNA, 20 bp, synthetic construct
  misc_feature 1..20: note = chemically synthesized
  source 1..20: mol_type = other DNA
agacccagtggtaatgtttt

SEQ ID NO: 46171 - DNA, 20 bp, synthetic construct
  misc_feature 1..20: note = chemically synthesized
  source 1..20: mol_type = other DNA
gacccagtggtaatgtttta

SEQ ID NO: 46172 - DNA, 20 bp, synthetic construct
  misc_feature 1..20: note = chemically synthesized
  source 1..20: mol_type = other DNA
gtggtaatgttttagggcct

SEQ ID NO: 46173 - DNA, 20 bp, synthetic construct
  misc_feature 1..20: note = chemically synthesized
  source 1..20: mol_type = other DNA
tggtaatgttttagggccta

SEQ ID NO: 46174 - DNA, 20 bp, synthetic construct
  misc_feature 1..20: note = chemically synthesized
  source 1..20: mol_type = other DNA
gtaatgttttagggcctaag

SEQ ID NO: 46175 - DNA, 20 bp, synthetic construct
  misc_feature 1..20: note = chemically synthesized
  source 1..20: mol_type = other DNA
aaggagtgcctctaaaaatc

SEQ ID NO: 46176 - DNA, 20 bp, synthetic construct
  misc_feature 1..20: note = chemically synthesized
  source 1..20: mol_type = other DNA
agtgcctctaaaaatctaga

SEQ ID NO: 46177 - DNA, 20 bp, synthetic construct
  misc_feature 1..20: note = chemically synthesized
  source 1..20: mol_type = other DNA
agatggacaattttgacttt

SEQ ID NO: 46178 - DNA, 20 bp, synthetic construct
  misc_feature 1..20: note = chemically synthesized
  source 1..20: mol_type = other DNA
gacaattttgactttgagaa

SEQ ID NO: 46179 - DNA, 20 bp, synthetic construct
  misc_feature 1..20: note = chemically synthesized
  source 1..20: mol_type = other DNA
caattttgactttgagaaaa

SEQ ID NO: 46180 - DNA, 20 bp, synthetic construct
  misc_feature 1..20: note = chemically synthesized
  source 1..20: mol_type = other DNA
attttgactttgagaaaaga

SEQ ID NO: 46181 - DNA, 20 bp, synthetic construct
  misc_feature 1..20: note = chemically synthesized
  source 1..20: mol_type = other DNA
ttttgactttgagaaaagag

SEQ ID NO: 46182 - DNA, 20 bp, synthetic construct
  misc_feature 1..20: note = chemically synthesized
  source 1..20: mol_type = other DNA
tgactttgagaaaagagagg

SEQ ID NO: 46183 - DNA, 20 bp, synthetic construct
  misc_feature 1..20: note = chemically synthesized
  source 1..20: mol_type = other DNA
gagaaaagagaggtggaaat

SEQ ID NO: 46184 - DNA, 20 bp, synthetic construct
  misc_feature 1..20: note = chemically synthesized
  source 1..20: mol_type = other DNA
agaaaagagaggtggaaatg

SEQ ID NO: 46185 - DNA, 20 bp, synthetic construct
  misc_feature 1..20: note = chemically synthesized
  source 1..20: mol_type = other DNA
ggaaaatgacttttctttat

SEQ ID NO: 46186 - DNA, 20 bp, synthetic construct
  misc_feature 1..20: note = chemically synthesized
  source 1..20: mol_type = other DNA
gacttttctttattagattc

SEQ ID NO: 46187 - DNA, 20 bp, synthetic construct
  misc_feature 1..20: note = chemically synthesized
  source 1..20: mol_type = other DNA
ttttctttattagattccag

SEQ ID NO: 46188 - DNA, 20 bp, synthetic construct
  misc_feature 1..20: note = chemically synthesized
  source 1..20: mol_type = other DNA
ctttattagattccagtaga

SEQ ID NO: 46189 - DNA, 20 bp, synthetic construct
  misc_feature 1..20: note = chemically synthesized
  source 1..20: mol_type = other DNA
gttgttttaaaacatctatc

SEQ ID NO: 46190 - DNA, 20 bp, synthetic construct
  misc_feature 1..20: note = chemically synthesized
  source 1..20: mol_type = other DNA
tgttttaaaacatctatctg

SEQ ID NO: 46191 - DNA, 20 bp, synthetic construct
  misc_feature 1..20: note = chemically synthesized
  source 1..20: mol_type = other DNA
gttttaaaacatctatctgg

SEQ ID NO: 46192 - DNA, 20 bp, synthetic construct
  misc_feature 1..20: note = chemically synthesized
  source 1..20: mol_type = other DNA
ttaaaacatctatctggagg

SEQ ID NO: 46193 - DNA, 20 bp, synthetic construct
  misc_feature 1..20: note = chemically synthesized
  source 1..20: mol_type = other DNA
taaaacatctatctggaggc

SEQ ID NO: 46194 - DNA, 20 bp, synthetic construct
  misc_feature 1..20: note = chemically synthesized
  source 1..20: mol_type = other DNA
catctatctggaggcaggac

SEQ ID NO: 46195 - DNA, 20 bp, synthetic construct
  misc_feature 1..20: note = chemically synthesized
  source 1..20: mol_type = other DNA
atctggaggcaggacaagta

SEQ ID NO: 46196 - DNA, 20 bp, synthetic construct
  misc_feature 1..20: note = chemically synthesized
  source 1..20: mol_type = other DNA
ggacaagtatggtcgttaaa

SEQ ID NO: 46197 - DNA, 20 bp, synthetic construct
  misc_feature 1..20: note = chemically synthesized
  source 1..20: mol_type = other DNA
gtatggtcgttaaaaagatg

SEQ ID NO: 46198 - DNA, 20 bp, synthetic construct
  misc_feature 1..20: note = chemically synthesized
  source 1..20: mol_type = other DNA
tatggtcgttaaaaagatgc

SEQ ID NO: 46199 - DNA, 20 bp, synthetic construct
  misc_feature 1..20: note = chemically synthesized
  source 1..20: mol_type = other DNA
ggtcgttaaaaagatgcagg

SEQ ID NO: 46200 - DNA, 20 bp, synthetic construct
  misc_feature 1..20: note = chemically synthesized
  source 1..20: mol_type = other DNA
cgttaaaaagatgcaggcag

SEQ ID NO: 46201 - DNA, 20 bp, synthetic construct
  misc_feature 1..20: note = chemically synthesized
  source 1..20: mol_type = other DNA
gttaaaaagatgcaggcaga

SEQ ID NO: 46202 - DNA, 20 bp, synthetic construct
  misc_feature 1..20: note = chemically synthesized
  source 1..20: mol_type = other DNA
tgcaggcagaaggcatatat

SEQ ID NO: 46203 - DNA, 20 bp, synthetic construct
  misc_feature 1..20: note = chemically synthesized
  source 1..20: mol_type = other DNA
gcagaaggcatatattggct

SEQ ID NO: 46204 - DNA, 20 bp, synthetic construct
  misc_feature 1..20: note = chemically synthesized
  source 1..20: mol_type = other DNA
ggcatatattggctcagtca

SEQ ID NO: 46205 - DNA, 20 bp, synthetic construct
  misc_feature 1..20: note = chemically synthesized
  source 1..20: mol_type = other DNA
atatattggctcagtcaaag

SEQ ID NO: 46206 - DNA, 20 bp, synthetic construct
  misc_feature 1..20: note = chemically synthesized
  source 1..20: mol_type = other DNA
tatattggctcagtcaaagt

SEQ ID NO: 46207 - DNA, 20 bp, synthetic construct
  misc_feature 1..20: note = chemically synthesized
  source 1..20: mol_type = other DNA
atattggctcagtcaaagtg

SEQ ID NO: 46208 - DNA, 20 bp, synthetic construct
  misc_feature 1..20: note = chemically synthesized
  source 1..20: mol_type = other DNA
tcagtcaaagtggggaactt

SEQ ID NO: 46209 - DNA, 20 bp, synthetic construct
  misc_feature 1..20: note = chemically synthesized
  source 1..20: mol_type = other DNA
gtcaaagtggggaactttgg

SEQ ID NO: 46210 - DNA, 20 bp, synthetic construct
  misc_feature 1..20: note = chemically synthesized
  source 1..20: mol_type = other DNA
gtggccaaacatacattgct

SEQ ID NO: 46211 - DNA, 20 bp, synthetic construct
  misc_feature 1..20: note = chemically synthesized
  source 1..20: mol_type = other DNA
tggccaaacatacattgcta

SEQ ID NO: 46212 - DNA, 20 bp, synthetic construct
  misc_feature 1..20: note = chemically synthesized
  source 1..20: mol_type = other DNA
tgctaaggctattcctatat

SEQ ID NO: 46213 - DNA, 20 bp, synthetic construct
  misc_feature 1..20: note = chemically synthesized
  source 1..20: mol_type = other DNA
aaggctattcctatatcagc

SEQ ID NO: 46214 - DNA, 20 bp, synthetic construct
  misc_feature 1..20: note = chemically synthesized
  source 1..20: mol_type = other DNA
aaacttatatcctttaattc

SEQ ID NO: 46215 - DNA, 20 bp, synthetic construct
  misc_feature 1..20: note = chemically synthesized
  source 1..20: mol_type = other DNA
ttatatcctttaattccaga

SEQ ID NO: 46216 - DNA, 20 bp, synthetic construct
  misc_feature 1..20: note = chemically synthesized
  source 1..20: mol_type = other DNA
tatatcctttaattccagat

SEQ ID NO: 46217 - DNA, 20 bp, synthetic construct
  misc_feature 1..20: note = chemically synthesized
  source 1..20: mol_type = other DNA
atatcctttaattccagatg

SEQ ID NO: 46218 - DNA, 20 bp, synthetic construct
  misc_feature 1..20: note = chemically synthesized
  source 1..20: mol_type = other DNA
tatcctttaattccagatgg

SEQ ID NO: 46219 - DNA, 20 bp, synthetic construct
  misc_feature 1..20: note = chemically synthesized
  source 1..20: mol_type = other DNA
tttaattccagatgggggca

SEQ ID NO: 46220 - DNA, 20 bp, synthetic construct
  misc_feature 1..20: note = chemically synthesized
  source 1..20: mol_type = other DNA
agatgggggcaaagtatgtc

SEQ ID NO: 46221 - DNA, 20 bp, synthetic construct
  misc_feature 1..20: note = chemically synthesized
  source 1..20: mol_type = other DNA
gatgggggcaaagtatgtcc

SEQ ID NO: 46222 - DNA, 20 bp, synthetic construct
  misc_feature 1..20: note = chemically synthesized
  source 1..20: mol_type = other DNA
atgggggcaaagtatgtcca

SEQ ID NO: 46223 - DNA, 20 bp, synthetic construct
  misc_feature 1..20: note = chemically synthesized
  source 1..20: mol_type = other DNA
tgggggcaaagtatgtccag

SEQ ID NO: 46224 - DNA, 20 bp, synthetic construct
  misc_feature 1..20: note = chemically synthesized
  source 1..20: mol_type = other DNA
ggcaaagtatgtccaggggt

SEQ ID NO: 46225 - DNA, 20 bp, synthetic construct
  misc_feature 1..20: note = chemically synthesized
  source 1..20: mol_type = other DNA
gcaaagtatgtccaggggtg

SEQ ID NO: 46226 - DNA, 20 bp, synthetic construct
  misc_feature 1..20: note = chemically synthesized
  source 1..20: mol_type = other DNA
tgaggaacaattgaaacatt

SEQ ID NO: 46227 - DNA, 20 bp, synthetic construct
  misc_feature 1..20: note = chemically synthesized
  source 1..20: mol_type = other DNA
gaggaacaattgaaacattt

SEQ ID NO: 46228 - DNA, 20 bp, synthetic construct
  misc_feature 1..20: note = chemically synthesized
  source 1..20: mol_type = other DNA
aacaattgaaacatttgggc

SEQ ID NO: 46229 - DNA, 20 bp, synthetic construct
  misc_feature 1..20: note = chemically synthesized
  source 1..20: mol_type = other DNA
caattgaaacatttgggctg

SEQ ID NO: 46230 - DNA, 20 bp, synthetic construct
  misc_feature 1..20: note = chemically synthesized
  source 1..20: mol_type = other DNA
ttgaaacatttgggctggag

SEQ ID NO: 46231 - DNA, 20 bp, synthetic construct
  misc_feature 1..20: note = chemically synthesized
  source 1..20: mol_type = other DNA
tgggctggagtagattttga

SEQ ID NO: 46232 - DNA, 20 bp, synthetic construct
  misc_feature 1..20: note = chemically synthesized
  source 1..20: mol_type = other DNA
ctggagtagattttgaaagt

SEQ ID NO: 46233 - DNA, 20 bp, synthetic construct
  misc_feature 1..20: note = chemically synthesized
  source 1..20: mol_type = other DNA
gcgcgtgtgtgtgtgtgtgt

SEQ ID NO: 46234 - DNA, 20 bp, synthetic construct
  misc_feature 1..20: note = chemically synthesized
  source 1..20: mol_type = other DNA
tgtgtttcttttaacgtctt

SEQ ID NO: 46235 - DNA, 20 bp, synthetic construct
  misc_feature 1..20: note = chemically synthesized
  source 1..20: mol_type = other DNA
cgtcttcagcctacaacata

SEQ ID NO: 46236 - DNA, 20 bp, synthetic construct
  misc_feature 1..20: note = chemically synthesized
  source 1..20: mol_type = other DNA
gtcttcagcctacaacatac

SEQ ID NO: 46237 - DNA, 20 bp, synthetic construct
  misc_feature 1..20: note = chemically synthesized
  source 1..20: mol_type = other DNA
tcttcagcctacaacataca

SEQ ID NO: 46238 - DNA, 20 bp, synthetic construct
  misc_feature 1..20: note = chemically synthesized
  source 1..20: mol_type = other DNA
cctacaacatacagggttca

SEQ ID NO: 46239 - DNA, 20 bp, synthetic construct
  misc_feature 1..20: note = chemically synthesized
  source 1..20: mol_type = other DNA
acaacatacagggttcatgg

SEQ ID NO: 46240 - DNA, 20 bp, synthetic construct
  misc_feature 1..20: note = chemically synthesized
  source 1..20: mol_type = other DNA
catacagggttcatggtggc

SEQ ID NO: 46241 - DNA, 20 bp, synthetic construct
  misc_feature 1..20: note = chemically synthesized
  source 1..20: mol_type = other DNA
acagggttcatggtggcaag

SEQ ID NO: 46242 - DNA, 20 bp, synthetic construct
  misc_feature 1..20: note = chemically synthesized
  source 1..20: mol_type = other DNA
ggttcatggtggcaagaaga

SEQ ID NO: 46243 - DNA, 20 bp, synthetic construct
  misc_feature 1..20: note = chemically synthesized
  source 1..20: mol_type = other DNA
catggtggcaagaagatagc

SEQ ID NO: 46244 - DNA, 20 bp, synthetic construct
  misc_feature 1..20: note = chemically synthesized
  source 1..20: mol_type = other DNA
agatagcaagatttaaatta

SEQ ID NO: 46245 - DNA, 20 bp, synthetic construct
  misc_feature 1..20: note = chemically synthesized
  source 1..20: mol_type = other DNA
agcaagatttaaattatggc

SEQ ID NO: 46246 - DNA, 20 bp, synthetic construct
  misc_feature 1..20: note = chemically synthesized
  source 1..20: mol_type = other DNA
tttaaattatggccagtgac

SEQ ID NO: 46247 - DNA, 20 bp, synthetic construct
  misc_feature 1..20: note = chemically synthesized
  source 1..20: mol_type = other DNA
tggccagtgactagtgcttg

SEQ ID NO: 46248 - DNA, 20 bp, synthetic construct
  misc_feature 1..20: note = chemically synthesized
  source 1..20: mol_type = other DNA
ggccagtgactagtgcttga

SEQ ID NO: 46249 - DNA, 20 bp, synthetic construct
  misc_feature 1..20: note = chemically synthesized
  source 1..20: mol_type = other DNA
gccagtgactagtgcttgaa

SEQ ID NO: 46250 - DNA, 20 bp, synthetic construct
  misc_feature 1..20: note = chemically synthesized
  source 1..20: mol_type = other DNA
ccagtgactagtgcttgaag

SEQ ID NO: 46251 - DNA, 20 bp, synthetic construct
  misc_feature 1..20: note = chemically synthesized
  source 1..20: mol_type = other DNA
gaacaactacctgcatttaa

SEQ ID NO: 46252 - DNA, 20 bp, synthetic construct
  misc_feature 1..20: note = chemically synthesized
  source 1..20: mol_type = other DNA
aacaactacctgcatttaat

SEQ ID NO: 46253 - DNA, 20 bp, synthetic construct
  misc_feature 1..20: note = chemically synthesized
  source 1..20: mol_type = other DNA
aactacctgcatttaatggg

SEQ ID NO: 46254 - DNA, 20 bp, synthetic construct
  misc_feature 1..20: note = chemically synthesized
  source 1..20: mol_type = other DNA
actacctgcatttaatggga

SEQ ID NO: 46255 - DNA, 20 bp, synthetic construct
  misc_feature 1..20: note = chemically synthesized
  source 1..20: mol_type = other DNA
ttaatgggaaggcaaaatct

SEQ ID NO: 46256 - DNA, 20 bp, synthetic construct
  misc_feature 1..20: note = chemically synthesized
  source 1..20: mol_type = other DNA
taatgggaaggcaaaatctc

SEQ ID NO: 46257 - DNA, 20 bp, synthetic construct
  misc_feature 1..20: note = chemically synthesized
  source 1..20: mol_type = other DNA
aaggcaaaatctcaggcttt

SEQ ID NO: 46258 - DNA, 20 bp, synthetic construct
  misc_feature 1..20: note = chemically synthesized
  source 1..20: mol_type = other DNA
aggcaaaatctcaggctttg

SEQ ID NO: 46259 - DNA, 20 bp, synthetic construct
  misc_feature 1..20: note = chemically synthesized
  source 1..20: mol_type = other DNA
ggcaaaatctcaggctttga

SEQ ID NO: 46260 - DNA, 20 bp, synthetic construct
  misc_feature 1..20: note = chemically synthesized
  source 1..20: mol_type = other DNA
aaaatctcaggctttgaggg

SEQ ID NO: 46261 - DNA, 20 bp, synthetic construct
  misc_feature 1..20: note = chemically synthesized
  source 1..20: mol_type = other DNA
ggctttgagggaagttaaca

SEQ ID NO: 46262 - DNA, 20 bp, synthetic construct
  misc_feature 1..20: note = chemically synthesized
  source 1..20: mol_type = other DNA
gctttgagggaagttaacat

SEQ ID NO: 46263 - DNA, 20 bp, synthetic construct
  misc_feature 1..20: note = chemically synthesized
  source 1..20: mol_type = other DNA
agttaacataggcttgattc

SEQ ID NO: 46264 - DNA, 20 bp, synthetic construct
  misc_feature 1..20: note = chemically synthesized
  source 1..20: mol_type = other DNA
gttaacataggcttgattct

SEQ ID NO: 46265 - DNA, 20 bp, synthetic construct
  misc_feature 1..20: note = chemically synthesized
  source 1..20: mol_type = other DNA
aacataggcttgattctggg

SEQ ID NO: 46266 - DNA, 20 bp, synthetic construct
  misc_feature 1..20: note = chemically synthesized
  source 1..20: mol_type = other DNA
ataggcttgattctgggtgg

SEQ ID NO: 46267 - DNA, 20 bp, synthetic construct
  misc_feature 1..20: note = chemically synthesized
  source 1..20: mol_type = other DNA
cttgattctgggtggaagct

SEQ ID NO: 46268 - DNA, 20 bp, synthetic construct
  misc_feature 1..20: note = chemically synthesized
  source 1..20: mol_type = other DNA
ctgggtggaagcttggtgtg

SEQ ID NO: 46269 - DNA, 20 bp, synthetic construct
  misc_feature 1..20: note = chemically synthesized
  source 1..20: mol_type = other DNA
aagcttggtgtgtagttatc

SEQ ID NO: 46270 - DNA, 20 bp, synthetic construct
  misc_feature 1..20: note = chemically synthesized
  source 1..20: mol_type = other DNA
gcttggtgtgtagttatctg

SEQ ID NO: 46271 - DNA, 20 bp, synthetic construct
  misc_feature 1..20: note = chemically synthesized
  source 1..20: mol_type = other DNA
cttggtgtgtagttatctgg

SEQ ID NO: 46272 - DNA, 20 bp, synthetic construct
  misc_feature 1..20: note = chemically synthesized
  source 1..20: mol_type = other DNA
gtgtgtagttatctggaggc

SEQ ID NO: 46273 - DNA, 20 bp, synthetic construct
  misc_feature 1..20: note = chemically synthesized
  source 1..20: mol_type = other DNA
tgtgtagttatctggaggcc

SEQ ID NO: 46274 - DNA, 20 bp, synthetic construct
  misc_feature 1..20: note = chemically synthesized
  source 1..20: mol_type = other DNA
tagttatctggaggccaggc

SEQ ID NO: 46275 - DNA, 20 bp, synthetic construct
  misc_feature 1..20: note = chemically synthesized
  source 1..20: mol_type = other DNA
gttatctggaggccaggctg

SEQ ID NO: 46276 - DNA, 20 bp, synthetic construct
  misc_feature 1..20: note = chemically synthesized
  source 1..20: mol_type = other DNA
ggaggccaggctggagctct

SEQ ID NO: 46277 - DNA, 20 bp, synthetic construct
  misc_feature 1..20: note = chemically synthesized
  source 1..20: mol_type = other DNA
ctggagctctcagctcacta

SEQ ID NO: 46278 - DNA, 20 bp, synthetic construct
  misc_feature 1..20: note = chemically synthesized
  source 1..20: mol_type = other DNA
tggagctctcagctcactat

SEQ ID NO: 46279 - DNA, 20 bp, synthetic construct
  misc_feature 1..20: note = chemically synthesized
  source 1..20: mol_type = other DNA
attgtctcctttcatctcaa

SEQ ID NO: 46280 - DNA, 20 bp, synthetic construct
  misc_feature 1..20: note = chemically synthesized
  source 1..20: mol_type = other DNA
cctttcatctcaacagctcc

SEQ ID NO: 46281 - DNA, 20 bp, synthetic construct
  misc_feature 1..20: note = chemically synthesized
  source 1..20: mol_type = other DNA
ctttcatctcaacagctcct

SEQ ID NO: 46282 - DNA, 20 bp, synthetic construct
  misc_feature 1..20: note = chemically synthesized
  source 1..20: mol_type = other DNA
acagctcctgggaaatgtgc

SEQ ID NO: 46283 - DNA, 20 bp, synthetic construct
  misc_feature 1..20: note = chemically synthesized
  source 1..20: mol_type = other DNA
aaatgtgctggtgaccgttt

SEQ ID NO: 46284 - DNA, 20 bp, synthetic construct
  misc_feature 1..20: note = chemically synthesized
  source 1..20: mol_type = other DNA
accgttttggcaatccattt

SEQ ID NO: 46285 - DNA, 20 bp, synthetic construct
  misc_feature 1..20: note = chemically synthesized
  source 1..20: mol_type = other DNA
tttggcaatccatttcggca

SEQ ID NO: 46286 - DNA, 20 bp, synthetic construct
  misc_feature 1..20: note = chemically synthesized
  source 1..20: mol_type = other DNA
tcggcaaagaattcacccct

SEQ ID NO: 46287 - DNA, 20 bp, synthetic construct
  misc_feature 1..20: note = chemically synthesized
  source 1..20: mol_type = other DNA
cggcaaagaattcacccctg

SEQ ID NO: 46288 - DNA, 20 bp, synthetic construct
  misc_feature 1..20: note = chemically synthesized
  source 1..20: mol_type = other DNA
aagaattcacccctgaggtg

SEQ ID NO: 46289 - DNA, 20 bp, synthetic construct
  misc_feature 1..20: note = chemically synthesized
  source 1..20: mol_type = other DNA
agaattcacccctgaggtgc

SEQ ID NO: 46290 - DNA, 20 bp, synthetic construct
  misc_feature 1..20: note = chemically synthesized
  source 1..20: mol_type = other DNA
cccctgaggtgcaggcttcc

SEQ ID NO: 46291 - DNA, 20 bp, synthetic construct
  misc_feature 1..20: note = chemically synthesized
  source 1..20: mol_type = other DNA
ctgaggtgcaggcttcctgg

SEQ ID NO: 46292 - DNA, 20 bp, synthetic construct
  misc_feature 1..20: note = chemically synthesized
  source 1..20: mol_type = other DNA
aggtgcaggcttcctggcag

SEQ ID NO: 46293 - DNA, 20 bp, synthetic construct
  misc_feature 1..20: note = chemically synthesized
  source 1..20: mol_type = other DNA
gcaggcttcctggcagaaga

SEQ ID NO: 46294 - DNA, 20 bp, synthetic construct
  misc_feature 1..20: note = chemically synthesized
  source 1..20: mol_type = other DNA
ctggcagaagatggtgactg

SEQ ID NO: 46295 - DNA, 20 bp, synthetic construct
  misc_feature 1..20: note = chemically synthesized
  source 1..20: mol_type = other DNA
gcagaagatggtgactgcag

SEQ ID NO: 46296 - DNA, 20 bp, synthetic construct
  misc_feature 1..20: note = chemically synthesized
  source 1..20: mol_type = other DNA
aagatggtgactgcagtggc

SEQ ID NO: 46297 - DNA, 20 bp, synthetic construct
  misc_feature 1..20: note = chemically synthesized
  source 1..20: mol_type = other DNA
gtggccagtgccctgtcctc

SEQ ID NO: 46298 - DNA, 20 bp, synthetic construct
  misc_feature 1..20: note = chemically synthesized
  source 1..20: mol_type = other DNA
cctgtcctccagataccact

SEQ ID NO: 46299 - DNA, 20 bp, synthetic construct
  misc_feature 1..20: note = chemically synthesized
  source 1..20: mol_type = other DNA
tgagctcactgcccatgatt

SEQ ID NO: 46300 - DNA, 20 bp, synthetic construct
  misc_feature 1..20: note = chemically synthesized
  source 1..20: mol_type = other DNA
agctcactgcccatgattca

SEQ ID NO: 46301 - DNA, 20 bp, synthetic construct
  misc_feature 1..20: note = chemically synthesized
  source 1..20: mol_type = other DNA
gcccatgattcagagctttc

SEQ ID NO: 46302 - DNA, 20 bp, synthetic construct
  misc_feature 1..20: note = chemically synthesized
  source 1..20: mol_type = other DNA
cccatgattcagagctttca

SEQ ID NO: 46303 - DNA, 20 bp, synthetic construct
  misc_feature 1..20: note = chemically synthesized
  source 1..20: mol_type = other DNA
tgattcagagctttcaagga

SEQ ID NO: 46304 - DNA, 20 bp, synthetic construct
  misc_feature 1..20: note = chemically synthesized
  source 1..20: mol_type = other DNA
gattcagagctttcaaggat

SEQ ID NO: 46305 - DNA, 20 bp, synthetic construct
  misc_feature 1..20: note = chemically synthesized
  source 1..20: mol_type = other DNA
aaggataggctttattctgc

SEQ ID NO: 46306 - DNA, 20 bp, synthetic construct
  misc_feature 1..20: note = chemically synthesized
  source 1..20: mol_type = other DNA
aataataaatctattctgct

SEQ ID NO: 46307 - DNA, 20 bp, synthetic construct
  misc_feature 1..20: note = chemically synthesized
  source 1..20: mol_type = other DNA
taataaatctattctgctga

SEQ ID NO: 46308 - DNA, 20 bp, synthetic construct
  misc_feature 1..20: note = chemically synthesized
  source 1..20: mol_type = other DNA
agatcacacatgattttctt

SEQ ID NO: 46309 - DNA, 20 bp, synthetic construct
  misc_feature 1..20: note = chemically synthesized
  source 1..20: mol_type = other DNA
ttacatctttttaaatatat

SEQ ID NO: 46310 - DNA, 20 bp, synthetic construct
  misc_feature 1..20: note = chemically synthesized
  source 1..20: mol_type = other DNA
ttttaaatatatgagccaca

SEQ ID NO: 46311 - DNA, 20 bp, synthetic construct
  misc_feature 1..20: note = chemically synthesized
  source 1..20: mol_type = other DNA
tttaaatatatgagccacaa

SEQ ID NO: 46312 - DNA, 20 bp, synthetic construct
  misc_feature 1..20: note = chemically synthesized
  source 1..20: mol_type = other DNA
ttaaatatatgagccacaaa

SEQ ID NO: 46313 - DNA, 20 bp, synthetic construct
  misc_feature 1..20: note = chemically synthesized
  source 1..20: mol_type = other DNA
agccacaaagggtttatatt

SEQ ID NO: 46314 - DNA, 20 bp, synthetic construct
  misc_feature 1..20: note = chemically synthesized
  source 1..20: mol_type = other DNA
gccacaaagggtttatattg

SEQ ID NO: 46315 - DNA, 20 bp, synthetic construct
  misc_feature 1..20: note = chemically synthesized
  source 1..20: mol_type = other DNA
ccacaaagggtttatattga

SEQ ID NO: 46316 - DNA, 20 bp, synthetic construct
  misc_feature 1..20: note = chemically synthesized
  source 1..20: mol_type = other DNA
caaagggtttatattgaggg

SEQ ID NO: 46317 - DNA, 20 bp, synthetic construct
  misc_feature 1..20: note = chemically synthesized
  source 1..20: mol_type = other DNA
tgcatgcctgtttgtgtttg

SEQ ID NO: 46318 - DNA, 20 bp, synthetic construct
  misc_feature 1..20: note = chemically synthesized
  source 1..20: mol_type = other DNA
ctcctcatttatttttatat

SEQ ID NO: 46319 - DNA, 20 bp, synthetic construct
  misc_feature 1..20: note = chemically synthesized
  source 1..20: mol_type = other DNA
tatgagatgtgcattttgat

SEQ ID NO: 46320 - DNA, 20 bp, synthetic construct
  misc_feature 1..20: note = chemically synthesized
  source 1..20: mol_type = other DNA
gcattttgatgagcaaataa

SEQ ID NO: 46321 - DNA, 20 bp, synthetic construct
  misc_feature 1..20: note = chemically synthesized
  source 1..20: mol_type = other DNA
ttttgatgagcaaataaaag

SEQ ID NO: 46322 - DNA, 20 bp, synthetic construct
  misc_feature 1..20: note = chemically synthesized
  source 1..20: mol_type = other DNA
atgagcaaataaaagcagta

SEQ ID NO: 46323 - DNA, 20 bp, synthetic construct
  misc_feature 1..20: note = chemically synthesized
  source 1..20: mol_type = other DNA
gcagtaaagacacttgtaca

SEQ ID NO: 46324 - DNA, 20 bp, synthetic construct
  misc_feature 1..20: note = chemically synthesized
  source 1..20: mol_type = other DNA
cagtaaagacacttgtacac

SEQ ID NO: 46325 - DNA, 20 bp, synthetic construct
  misc_feature 1..20: note = chemically synthesized
  source 1..20: mol_type = other DNA
gtaaagacacttgtacacgg

SEQ ID NO: 46326 - DNA, 20 bp, synthetic construct
  misc_feature 1..20: note = chemically synthesized
  source 1..20: mol_type = other DNA
cttgtacacgggagttctgc

SEQ ID NO: 46327 - DNA, 20 bp, synthetic construct
  misc_feature 1..20: note = chemically synthesized
  source 1..20: mol_type = other DNA
gtacacgggagttctgcaag

SEQ ID NO: 46328 - DNA, 20 bp, synthetic construct
  misc_feature 1..20: note = chemically synthesized
  source 1..20: mol_type = other DNA
tacacgggagttctgcaagt

SEQ ID NO: 46329 - DNA, 20 bp, synthetic construct
  misc_feature 1..20: note = chemically synthesized
  source 1..20: mol_type = other DNA
cacgggagttctgcaagtgg

SEQ ID NO: 46330 - DNA, 20 bp, synthetic construct
  misc_feature 1..20: note = chemically synthesized
  source 1..20: mol_type = other DNA
gttctgcaagtgggagtaaa

SEQ ID NO: 46331 - DNA, 20 bp, synthetic construct
  misc_feature 1..20: note = chemically synthesized
  source 1..20: mol_type = other DNA
gcaagtgggagtaaatggtg

SEQ ID NO: 46332 - DNA, 20 bp, synthetic construct
  misc_feature 1..20: note = chemically synthesized
  source 1..20: mol_type = other DNA
caagtgggagtaaatggtgt

SEQ ID NO: 46333 - DNA, 20 bp, synthetic construct
  misc_feature 1..20: note = chemically synthesized
  source 1..20: mol_type = other DNA
agtgggagtaaatggtgtag

SEQ ID NO: 46334 - DNA, 20 bp, synthetic construct
  misc_feature 1..20: note = chemically synthesized
  source 1..20: mol_type = other DNA
taaatggtgtaggagaaatc

SEQ ID NO: 46335 - DNA, 20 bp, synthetic construct
  misc_feature 1..20: note = chemically synthesized
  source 1..20: mol_type = other DNA
atggtgtaggagaaatccgg

SEQ ID NO: 46336 - DNA, 20 bp, synthetic construct
  misc_feature 1..20: note = chemically synthesized
  source 1..20: mol_type = other DNA
tggtgtaggagaaatccggt

SEQ ID NO: 46337 - DNA, 20 bp, synthetic construct
  misc_feature 1..20: note = chemically synthesized
  source 1..20: mol_type = other DNA
tgtaggagaaatccggtggg

SEQ ID NO: 46338 - DNA, 20 bp, synthetic construct
  misc_feature 1..20: note = chemically synthesized
  source 1..20: mol_type = other DNA
ggagaaatccggtgggaaga

SEQ ID NO: 46339 - DNA, 20 bp, synthetic construct
  misc_feature 1..20: note = chemically synthesized
  source 1..20: mol_type = other DNA
ggtgggaagaaagacctcta

SEQ ID NO: 46340 - DNA, 20 bp, synthetic construct
  misc_feature 1..20: note = chemically synthesized
  source 1..20: mol_type = other DNA
gtgggaagaaagacctctat

SEQ ID NO: 46341 - DNA, 20 bp, synthetic construct
  misc_feature 1..20: note = chemically synthesized
  source 1..20: mol_type = other DNA
gaagaaagacctctatagga

SEQ ID NO: 46342 - DNA, 20 bp, synthetic construct
  misc_feature 1..20: note = chemically synthesized
  source 1..20: mol_type = other DNA
aagaaagacctctataggac

SEQ ID NO: 46343 - DNA, 20 bp, synthetic construct
  misc_feature 1..20: note = chemically synthesized
  source 1..20: mol_type = other DNA
ctctataggacaggacttct

SEQ ID NO: 46344 - DNA, 20 bp, synthetic construct
  misc_feature 1..20: note = chemically synthesized
  source 1..20: mol_type = other DNA
aggacaggacttctcagaaa

SEQ ID NO: 46345 - DNA, 20 bp, synthetic construct
  misc_feature 1..20: note = chemically synthesized
  source 1..20: mol_type = other DNA
cttctcagaaacagatgttt

SEQ ID NO: 46346 - DNA, 20 bp, synthetic construct
  misc_feature 1..20: note = chemically synthesized
  source 1..20: mol_type = other DNA
ctcagaaacagatgttttgg

SEQ ID NO: 46347 - DNA, 20 bp, synthetic construct
  misc_feature 1..20: note = chemically synthesized
  source 1..20: mol_type = other DNA
cagaaacagatgttttggaa

SEQ ID NO: 46348 - DNA, 20 bp, synthetic construct
  misc_feature 1..20: note = chemically synthesized
  source 1..20: mol_type = other DNA
aacagatgttttggaagaga

SEQ ID NO: 46349 - DNA, 20 bp, synthetic construct
  misc_feature 1..20: note = chemically synthesized
  source 1..20: mol_type = other DNA
acagatgttttggaagagat

SEQ ID NO: 46350 - DNA, 20 bp, synthetic construct
  misc_feature 1..20: note = chemically synthesized
  source 1..20: mol_type = other DNA
tgttttggaagagatgggaa

SEQ ID NO: 46351 - DNA, 20 bp, synthetic construct
  misc_feature 1..20: note = chemically synthesized
  source 1..20: mol_type = other DNA
gttttggaagagatgggaaa

SEQ ID NO: 46352 - DNA, 20 bp, synthetic construct
  misc_feature 1..20: note = chemically synthesized
  source 1..20: mol_type = other DNA
ggaagagatgggaaaaggtt

SEQ ID NO: 46353 - DNA, 20 bp, synthetic construct
  misc_feature 1..20: note = chemically synthesized
  source 1..20: mol_type = other DNA
agatgggaaaaggttcagtg

SEQ ID NO: 46354 - DNA, 20 bp, synthetic construct
  misc_feature 1..20: note = chemically synthesized
  source 1..20: mol_type = other DNA
gaaaaggttcagtgaagacc

SEQ ID NO: 46355 - DNA, 20 bp, synthetic construct
  misc_feature 1..20: note = chemically synthesized
  source 1..20: mol_type = other DNA
aaaaggttcagtgaagacct

SEQ ID NO: 46356 - DNA, 20 bp, synthetic construct
  misc_feature 1..20: note = chemically synthesized
  source 1..20: mol_type = other DNA
aaaggttcagtgaagacctg

SEQ ID NO: 46357 - DNA, 20 bp, synthetic construct
  misc_feature 1..20: note = chemically synthesized
  source 1..20: mol_type = other DNA
aaggttcagtgaagacctgg

SEQ ID NO: 46358 - DNA, 20 bp, synthetic construct
  misc_feature 1..20: note = chemically synthesized
  source 1..20: mol_type = other DNA
ttcagtgaagacctgggggc

SEQ ID NO: 46359 - DNA, 20 bp, synthetic construct
  misc_feature 1..20: note = chemically synthesized
  source 1..20: mol_type = other DNA
cctgggggctggattgattg

SEQ ID NO: 46360 - DNA, 20 bp, synthetic construct
  misc_feature 1..20: note = chemically synthesized
  source 1..20: mol_type = other DNA
gggctggattgattgcagct

SEQ ID NO: 46361 - DNA, 20 bp, synthetic construct
  misc_feature 1..20: note = chemically synthesized
  source 1..20: mol_type = other DNA
ctggattgattgcagctgag

SEQ ID NO: 46362 - DNA, 20 bp, synthetic construct
  misc_feature 1..20: note = chemically synthesized
  source 1..20: mol_type = other DNA
attgattgcagctgagtagc

SEQ ID NO: 46363 - DNA, 20 bp, synthetic construct
  misc_feature 1..20: note = chemically synthesized
  source 1..20: mol_type = other DNA
ttgattgcagctgagtagca

SEQ ID NO: 46364 - DNA, 20 bp, synthetic construct
  misc_feature 1..20: note = chemically synthesized
  source 1..20: mol_type = other DNA
ttgcagctgagtagcaagga

SEQ ID NO: 46365 - DNA, 20 bp, synthetic construct
  misc_feature 1..20: note = chemically synthesized
  source 1..20: mol_type = other DNA
gagtagcaaggatggttctt

SEQ ID NO: 46366 - DNA, 20 bp, synthetic construct
  misc_feature 1..20: note = chemically synthesized
  source 1..20: mol_type = other DNA
agtagcaaggatggttctta

SEQ ID NO: 46367 - DNA, 20 bp, synthetic construct
  misc_feature 1..20: note = chemically synthesized
  source 1..20: mol_type = other DNA
agcaaggatggttcttaagg

SEQ ID NO: 46368 - DNA, 20 bp, synthetic construct
  misc_feature 1..20: note = chemically synthesized
  source 1..20: mol_type = other DNA
gcaaggatggttcttaagga

SEQ ID NO: 46369 - DNA, 20 bp, synthetic construct
  misc_feature 1..20: note = chemically synthesized
  source 1..20: mol_type = other DNA
caaggatggttcttaaggaa

SEQ ID NO: 46370 - DNA, 20 bp, synthetic construct
  misc_feature 1..20: note = chemically synthesized
  source 1..20: mol_type = other DNA
gatggttcttaaggaaggga

SEQ ID NO: 46371 - DNA, 20 bp, synthetic construct
  misc_feature 1..20: note = chemically synthesized
  source 1..20: mol_type = other DNA
taaggaagggaaagtgttcc

SEQ ID NO: 46372 - DNA, 20 bp, synthetic construct
  misc_feature 1..20: note = chemically synthesized
  source 1..20: mol_type = other DNA
agggaaagtgttccaagctt

SEQ ID NO: 46373 - DNA, 20 bp, synthetic construct
  misc_feature 1..20: note = chemically synthesized
  source 1..20: mol_type = other DNA
gggaaagtgttccaagcttt

SEQ ID NO: 46374 - DNA, 20 bp, synthetic construct
  misc_feature 1..20: note = chemically synthesized
  source 1..20: mol_type = other DNA
gttccaagctttaggaattc

SEQ ID NO: 46375 - DNA, 20 bp, synthetic construct
  misc_feature 1..20: note = chemically synthesized
  source 1..20: mol_type = other DNA
ttccaagctttaggaattca

SEQ ID NO: 46376 - DNA, 20 bp, synthetic construct
  misc_feature 1..20: note = chemically synthesized
  source 1..20: mol_type = other DNA
agctttaggaattcaaggtt

SEQ ID NO: 46377 - DNA, 20 bp, synthetic construct
  misc_feature 1..20: note = chemically synthesized
  source 1..20: mol_type = other DNA
ttaggaattcaaggtttagt

SEQ ID NO: 46378 - DNA, 20 bp, synthetic construct
  misc_feature 1..20: note = chemically synthesized
  source 1..20: mol_type = other DNA
taggaattcaaggtttagtc

SEQ ID NO: 46379 - DNA, 20 bp, synthetic construct
  misc_feature 1..20: note = chemically synthesized
  source 1..20: mol_type = other DNA
attcaaggtttagtcaggtg

SEQ ID NO: 46380 - DNA, 20 bp, synthetic construct
  misc_feature 1..20: note = chemically synthesized
  source 1..20: mol_type = other DNA
gtgtagcaattctattttat

SEQ ID NO: 46381 - DNA, 20 bp, synthetic construct
  misc_feature 1..20: note = chemically synthesized
  source 1..20: mol_type = other DNA
tgtagcaattctattttatt

SEQ ID NO: 46382 - DNA, 20 bp, synthetic construct
  misc_feature 1..20: note = chemically synthesized
  source 1..20: mol_type = other DNA
tagcaattctattttattag

SEQ ID NO: 46383 - DNA, 20 bp, synthetic construct
  misc_feature 1..20: note = chemically synthesized
  source 1..20: mol_type = other DNA
agcaattctattttattagg

SEQ ID NO: 46384 - DNA, 20 bp, synthetic construct
  misc_feature 1..20: note = chemically synthesized
  source 1..20: mol_type = other DNA
aggaggaatactatttctaa

SEQ ID NO: 46385 - DNA, 20 bp, synthetic construct
  misc_feature 1..20: note = chemically synthesized
  source 1..20: mol_type = other DNA
atactatttctaatggcact

SEQ ID NO: 46386 - DNA, 20 bp, synthetic construct
  misc_feature 1..20: note = chemically synthesized
  source 1..20: mol_type = other DNA
taatggcacttagcttttca

SEQ ID NO: 46387 - DNA, 20 bp, synthetic construct
  misc_feature 1..20: note = chemically synthesized
  source 1..20: mol_type = other DNA
ttagcttttcacagcccttg

SEQ ID NO: 46388 - DNA, 20 bp, synthetic construct
  misc_feature 1..20: note = chemically synthesized
  source 1..20: mol_type = other DNA
cacagcccttgtggatgcct

SEQ ID NO: 46389 - DNA, 20 bp, synthetic construct
  misc_feature 1..20: note = chemically synthesized
  source 1..20: mol_type = other DNA
gcccttgtggatgcctaaga

SEQ ID NO: 46390 - DNA, 20 bp, synthetic construct
  misc_feature 1..20: note = chemically synthesized
  source 1..20: mol_type = other DNA
gaaattaatcccatgccctc

SEQ ID NO: 46391 - DNA, 20 bp, synthetic construct
  misc_feature 1..20: note = chemically synthesized
  source 1..20: mol_type = other DNA
atcccatgccctcaagtgtg

SEQ ID NO: 46392 - DNA, 20 bp, synthetic construct
  misc_feature 1..20: note = chemically synthesized
  source 1..20: mol_type = other DNA
atgccctcaagtgtgcagat

SEQ ID NO: 46393 - DNA, 20 bp, synthetic construct
  misc_feature 1..20: note = chemically synthesized
  source 1..20: mol_type = other DNA
tcaagtgtgcagattggtca

SEQ ID NO: 46394 - DNA, 20 bp, synthetic construct
  misc_feature 1..20: note = chemically synthesized
  source 1..20: mol_type = other DNA
cagattggtcacagcatttc

SEQ ID NO: 46395 - DNA, 20 bp, synthetic construct
  misc_feature 1..20: note = chemically synthesized
  source 1..20: mol_type = other DNA
agattggtcacagcatttca

SEQ ID NO: 46396 - DNA, 20 bp, synthetic construct
  misc_feature 1..20: note = chemically synthesized
  source 1..20: mol_type = other DNA
gattggtcacagcatttcaa

SEQ ID NO: 46397 - DNA, 20 bp, synthetic construct
  misc_feature 1..20: note = chemically synthesized
  source 1..20: mol_type = other DNA
ttggtcacagcatttcaagg

SEQ ID NO: 46398 - DNA, 20 bp, synthetic construct
  misc_feature 1..20: note = chemically synthesized
  source 1..20: mol_type = other DNA
ggtcacagcatttcaaggga

SEQ ID NO: 46399 - DNA, 20 bp, synthetic construct
  misc_feature 1..20: note = chemically synthesized
  source 1..20: mol_type = other DNA
caagggagagacctcattgt

SEQ ID NO: 46400 - DNA, 20 bp, synthetic construct
  misc_feature 1..20: note = chemically synthesized
  source 1..20: mol_type = other DNA
gagacctcattgtaagactc

SEQ ID NO: 46401 - DNA, 20 bp, synthetic construct
  misc_feature 1..20: note = chemically synthesized
  source 1..20: mol_type = other DNA
agacctcattgtaagactct

SEQ ID NO: 46402 - DNA, 20 bp, synthetic construct
  misc_feature 1..20: note = chemically synthesized
  source 1..20: mol_type = other DNA
gacctcattgtaagactctg

SEQ ID NO: 46403 - DNA, 20 bp, synthetic construct
  misc_feature 1..20: note = chemically synthesized
  source 1..20: mol_type = other DNA
acctcattgtaagactctgg

SEQ ID NO: 46404 - DNA, 20 bp, synthetic construct
  misc_feature 1..20: note = chemically synthesized
  source 1..20: mol_type = other DNA
ctcattgtaagactctgggg

SEQ ID NO: 46405 - DNA, 20 bp, synthetic construct
  misc_feature 1..20: note = chemically synthesized
  source 1..20: mol_type = other DNA
tcattgtaagactctggggg

SEQ ID NO: 46406 - DNA, 20 bp, synthetic construct
  misc_feature 1..20: note = chemically synthesized
  source 1..20: mol_type = other DNA
ttgtaagactctgggggagg

SEQ ID NO: 46407 - DNA, 20 bp, synthetic construct
  misc_feature 1..20: note = chemically synthesized
  source 1..20: mol_type = other DNA
tgtaagactctgggggaggt

SEQ ID NO: 46408 - DNA, 20 bp, synthetic construct
  misc_feature 1..20: note = chemically synthesized
  source 1..20: mol_type = other DNA
gtaagactctgggggaggtg

SEQ ID NO: 46409 - DNA, 20 bp, synthetic construct
  misc_feature 1..20: note = chemically synthesized
  source 1..20: mol_type = other DNA
ctctgggggaggtggggact

SEQ ID NO: 46410 - DNA, 20 bp, synthetic construct
  misc_feature 1..20: note = chemically synthesized
  source 1..20: mol_type = other DNA
tctgggggaggtggggactt

SEQ ID NO: 46411 - DNA, 20 bp, synthetic construct
  misc_feature 1..20: note = chemically synthesized
  source 1..20: mol_type = other DNA
ggaggtggggacttaggtgt

SEQ ID NO: 46412 - DNA, 20 bp, synthetic construct
  misc_feature 1..20: note = chemically synthesized
  source 1..20: mol_type = other DNA
cttaggtgtaagaaatgaat

SEQ ID NO: 46413 - DNA, 20 bp, synthetic construct
  misc_feature 1..20: note = chemically synthesized
  source 1..20: mol_type = other DNA
aggtgtaagaaatgaatcag

SEQ ID NO: 46414 - DNA, 20 bp, synthetic construct
  misc_feature 1..20: note = chemically synthesized
  source 1..20: mol_type = other DNA
gtgtaagaaatgaatcagca

SEQ ID NO: 46415 - DNA, 20 bp, synthetic construct
  misc_feature 1..20: note = chemically synthesized
  source 1..20: mol_type = other DNA
tgtaagaaatgaatcagcag

SEQ ID NO: 46416 - DNA, 20 bp, synthetic construct
  misc_feature 1..20: note = chemically synthesized
  source 1..20: mol_type = other DNA
atgaatcagcagaggctcac

SEQ ID NO: 46417 - DNA, 20 bp, synthetic construct
  misc_feature 1..20: note = chemically synthesized
  source 1..20: mol_type = other DNA
atcagcagaggctcacaagt

SEQ ID NO: 46418 - DNA, 20 bp, synthetic construct
  misc_feature 1..20: note = chemically synthesized
  source 1..20: mol_type = other DNA
agaggctcacaagtcagcat

SEQ ID NO: 46419 - DNA, 20 bp, synthetic construct
  misc_feature 1..20: note = chemically synthesized
  source 1..20: mol_type = other DNA
agcatgagcatgttatgtct

SEQ ID NO: 46420 - DNA, 20 bp, synthetic construct
  misc_feature 1..20: note = chemically synthesized
  source 1..20: mol_type = other DNA
agcatgttatgtctgagaaa

SEQ ID NO: 46421 - DNA, 20 bp, synthetic construct
  misc_feature 1..20: note = chemically synthesized
  source 1..20: mol_type = other DNA
gttatgtctgagaaacagac

SEQ ID NO: 46422 - DNA, 20 bp, synthetic construct
  misc_feature 1..20: note = chemically synthesized
  source 1..20: mol_type = other DNA
gagaaacagaccagcactgt

SEQ ID NO: 46423 - DNA, 20 bp, synthetic construct
  misc_feature 1..20: note = chemically synthesized
  source 1..20: mol_type = other DNA
agcactgtgagatcaaaatg

SEQ ID NO: 46424 - DNA, 20 bp, synthetic construct
  misc_feature 1..20: note = chemically synthesized
  source 1..20: mol_type = other DNA
actgtgagatcaaaatgtag

SEQ ID NO: 46425 - DNA, 20 bp, synthetic construct
  misc_feature 1..20: note = chemically synthesized
  source 1..20: mol_type = other DNA
ctgtgagatcaaaatgtagt

SEQ ID NO: 46426 - DNA, 20 bp, synthetic construct
  misc_feature 1..20: note = chemically synthesized
  source 1..20: mol_type = other DNA
tgagatcaaaatgtagtggg

SEQ ID NO: 46427 - DNA, 20 bp, synthetic construct
  misc_feature 1..20: note = chemically synthesized
  source 1..20: mol_type = other DNA
agaatttgtacaacattaat

SEQ ID NO: 46428 - DNA, 20 bp, synthetic construct
  misc_feature 1..20: note = chemically synthesized
  source 1..20: mol_type = other DNA
atttgtacaacattaattgg

SEQ ID NO: 46429 - DNA, 20 bp, synthetic construct
  misc_feature 1..20: note = chemically synthesized
  source 1..20: mol_type = other DNA
tttgtacaacattaattgga

SEQ ID NO: 46430 - DNA, 20 bp, synthetic construct
  misc_feature 1..20: note = chemically synthesized
  source 1..20: mol_type = other DNA
taattggaaggcttacttaa

SEQ ID NO: 46431 - DNA, 20 bp, synthetic construct
  misc_feature 1..20: note = chemically synthesized
  source 1..20: mol_type = other DNA
tacttaatggaatttttgta

SEQ ID NO: 46432 - DNA, 20 bp, synthetic construct
  misc_feature 1..20: note = chemically synthesized
  source 1..20: mol_type = other DNA
taatggaatttttgtatagt

SEQ ID NO: 46433 - DNA, 20 bp, synthetic construct
  misc_feature 1..20: note = chemically synthesized
  source 1..20: mol_type = other DNA
atttttgtatagttggatgt

SEQ ID NO: 46434 - DNA, 20 bp, synthetic construct
  misc_feature 1..20: note = chemically synthesized
  source 1..20: mol_type = other DNA
ggatgttagtgcatctctat

SEQ ID NO: 46435 - DNA, 20 bp, synthetic construct
  misc_feature 1..20: note = chemically synthesized
  source 1..20: mol_type = other DNA
gttagtgcatctctataagt

SEQ ID NO: 46436 - DNA, 20 bp, synthetic construct
  misc_feature 1..20: note = chemically synthesized
  source 1..20: mol_type = other DNA
tagtgcatctctataagtaa

SEQ ID NO: 46437 - DNA, 20 bp, synthetic construct
  misc_feature 1..20: note = chemically synthesized
  source 1..20: mol_type = other DNA
taagtaagagtttaatatga

SEQ ID NO: 46438 - DNA, 20 bp, synthetic construct
  misc_feature 1..20: note = chemically synthesized
  source 1..20: mol_type = other DNA
agtttaatatgatggtgtta

SEQ ID NO: 46439 - DNA, 20 bp, synthetic construct
  misc_feature 1..20: note = chemically synthesized
  source 1..20: mol_type = other DNA
ctcccaactgaccttatctg

SEQ ID NO: 46440 - DNA, 20 bp, synthetic construct
  misc_feature 1..20: note = chemically synthesized
  source 1..20: mol_type = other DNA
tcccaactgaccttatctgt

SEQ ID NO: 46441 - DNA, 20 bp, synthetic construct
  misc_feature 1..20: note = chemically synthesized
  source 1..20: mol_type = other DNA
cccaactgaccttatctgtg

SEQ ID NO: 46442 - DNA, 20 bp, synthetic construct
  misc_feature 1..20: note = chemically synthesized
  source 1..20: mol_type = other DNA
ccaactgaccttatctgtgg

SEQ ID NO: 46443 - DNA, 20 bp, synthetic construct
  misc_feature 1..20: note = chemically synthesized
  source 1..20: mol_type = other DNA
aactgaccttatctgtgggg

SEQ ID NO: 46444 - DNA, 20 bp, synthetic construct
  misc_feature 1..20: note = chemically synthesized
  source 1..20: mol_type = other DNA
actgaccttatctgtggggg

SEQ ID NO: 46445 - DNA, 20 bp, synthetic construct
  misc_feature 1..20: note = chemically synthesized
  source 1..20: mol_type = other DNA
ctgtgggggaggcttttgaa

SEQ ID NO: 46446 - DNA, 20 bp, synthetic construct
  misc_feature 1..20: note = chemically synthesized
  source 1..20: mol_type = other DNA
ggaggcttttgaaaagtaat

SEQ ID NO: 46447 - DNA, 20 bp, synthetic construct
  misc_feature 1..20: note = chemically synthesized
  source 1..20: mol_type = other DNA
gaggcttttgaaaagtaatt

SEQ ID NO: 46448 - DNA, 20 bp, synthetic construct
  misc_feature 1..20: note = chemically synthesized
  source 1..20: mol_type = other DNA
ttttgaaaagtaattaggtt

SEQ ID NO: 46449 - DNA, 20 bp, synthetic construct
  misc_feature 1..20: note = chemically synthesized
  source 1..20: mol_type = other DNA
aaaagtaattaggtttagat

SEQ ID NO: 46450 - DNA, 20 bp, synthetic construct
  misc_feature 1..20: note = chemically synthesized
  source 1..20: mol_type = other DNA
ttaggtttagatgagctcat

SEQ ID NO: 46451 - DNA, 20 bp, synthetic construct
  misc_feature 1..20: note = chemically synthesized
  source 1..20: mol_type = other DNA
aggtttagatgagctcataa

SEQ ID NO: 46452 - DNA, 20 bp, synthetic construct
  misc_feature 1..20: note = chemically synthesized
  source 1..20: mol_type = other DNA
tttagatgagctcataagag

SEQ ID NO: 46453 - DNA, 20 bp, synthetic construct
  misc_feature 1..20: note = chemically synthesized
  source 1..20: mol_type = other DNA
cataaaattattttccttat

SEQ ID NO: 46454 - DNA, 20 bp, synthetic construct
  misc_feature 1..20: note = chemically synthesized
  source 1..20: mol_type = other DNA
aaaattattttccttatcag

SEQ ID NO: 46455 - DNA, 20 bp, synthetic construct
  misc_feature 1..20: note = chemically synthesized
  source 1..20: mol_type = other DNA
attattttccttatcagaag

SEQ ID NO: 46456 - DNA, 20 bp, synthetic construct
  misc_feature 1..20: note = chemically synthesized
  source 1..20: mol_type = other DNA
tattttccttatcagaagca

SEQ ID NO: 46457 - DNA, 20 bp, synthetic construct
  misc_feature 1..20: note = chemically synthesized
  source 1..20: mol_type = other DNA
ttttccttatcagaagcaga

SEQ ID NO: 46458 - DNA, 20 bp, synthetic construct
  misc_feature 1..20: note = chemically synthesized
  source 1..20: mol_type = other DNA
cttatcagaagcagagagac

SEQ ID NO: 46459 - DNA, 20 bp, synthetic construct
  misc_feature 1..20: note = chemically synthesized
  source 1..20: mol_type = other DNA
aagccatttctctttcctcc

SEQ ID NO: 46460 - DNA, 20 bp, synthetic construct
  misc_feature 1..20: note = chemically synthesized
  source 1..20: mol_type = other DNA
catttctctttcctcccggt

SEQ ID NO: 46461 - DNA, 20 bp, synthetic construct
  misc_feature 1..20: note = chemically synthesized
  source 1..20: mol_type = other DNA
atttctctttcctcccggtg

SEQ ID NO: 46462 - DNA, 20 bp, synthetic construct
  misc_feature 1..20: note = chemically synthesized
  source 1..20: mol_type = other DNA
ctttcctcccggtgaggaca

SEQ ID NO: 46463 - DNA, 20 bp, synthetic construct
  misc_feature 1..20: note = chemically synthesized
  source 1..20: mol_type = other DNA
cctcccggtgaggacacagt

SEQ ID NO: 46464 - DNA, 20 bp, synthetic construct
  misc_feature 1..20: note = chemically synthesized
  source 1..20: mol_type = other DNA
cccggtgaggacacagtgag

SEQ ID NO: 46465 - DNA, 20 bp, synthetic construct
  misc_feature 1..20: note = chemically synthesized
  source 1..20: mol_type = other DNA
gaagtccgccatctgcaatc

SEQ ID NO: 46466 - DNA, 20 bp, synthetic construct
  misc_feature 1..20: note = chemically synthesized
  source 1..20: mol_type = other DNA
aagtccgccatctgcaatcc

SEQ ID NO: 46467 - DNA, 20 bp, synthetic construct
  misc_feature 1..20: note = chemically synthesized
  source 1..20: mol_type = other DNA
tccgccatctgcaatccagg

SEQ ID NO: 46468 - DNA, 20 bp, synthetic construct
  misc_feature 1..20: note = chemically synthesized
  source 1..20: mol_type = other DNA
cgccatctgcaatccaggaa

SEQ ID NO: 46469 - DNA, 20 bp, synthetic construct
  misc_feature 1..20: note = chemically synthesized
  source 1..20: mol_type = other DNA
aggaagagaaccctgaccac

SEQ ID NO: 46470 - DNA, 20 bp, synthetic construct
  misc_feature 1..20: note = chemically synthesized
  source 1..20: mol_type = other DNA
agagaaccctgaccacgagt

SEQ ID NO: 46471 - DNA, 20 bp, synthetic construct
  misc_feature 1..20: note = chemically synthesized
  source 1..20: mol_type = other DNA
cctgaccacgagtcagcctt

SEQ ID NO: 46472 - DNA, 20 bp, synthetic construct
  misc_feature 1..20: note = chemically synthesized
  source 1..20: mol_type = other DNA
gagtcagccttcagaaatgt

SEQ ID NO: 46473 - DNA, 20 bp, synthetic construct
  misc_feature 1..20: note = chemically synthesized
  source 1..20: mol_type = other DNA
gagaaaaaactctgttgttg

SEQ ID NO: 46474 - DNA, 20 bp, synthetic construct
  misc_feature 1..20: note = chemically synthesized
  source 1..20: mol_type = other DNA
actctgttgttgaagccacc

SEQ ID NO: 46475 - DNA, 20 bp, synthetic construct
  misc_feature 1..20: note = chemically synthesized
  source 1..20: mol_type = other DNA
cagtcttttgtattttgtta

SEQ ID NO: 46476 - DNA, 20 bp, synthetic construct
  misc_feature 1..20: note = chemically synthesized
  source 1..20: mol_type = other DNA
ttgttatagcaccttgcact

SEQ ID NO: 46477 - DNA, 20 bp, synthetic construct
  misc_feature 1..20: note = chemically synthesized
  source 1..20: mol_type = other DNA
tatagcaccttgcactgagt

SEQ ID NO: 46478 - DNA, 20 bp, synthetic construct
  misc_feature 1..20: note = chemically synthesized
  source 1..20: mol_type = other DNA
atagcaccttgcactgagta

SEQ ID NO: 46479 - DNA, 20 bp, synthetic construct
  misc_feature 1..20: note = chemically synthesized
  source 1..20: mol_type = other DNA
gcaccttgcactgagtaagg

SEQ ID NO: 46480 - DNA, 20 bp, synthetic construct
  misc_feature 1..20: note = chemically synthesized
  source 1..20: mol_type = other DNA
tgcactgagtaaggcagatg

SEQ ID NO: 46481 - DNA, 20 bp, synthetic construct
  misc_feature 1..20: note = chemically synthesized
  source 1..20: mol_type = other DNA
actgagtaaggcagatgaag

SEQ ID NO: 46482 - DNA, 20 bp, synthetic construct
  misc_feature 1..20: note = chemically synthesized
  source 1..20: mol_type = other DNA
ctgagtaaggcagatgaaga

SEQ ID NO: 46483 - DNA, 20 bp, synthetic construct
  misc_feature 1..20: note = chemically synthesized
  source 1..20: mol_type = other DNA
gagtaaggcagatgaagaag

SEQ ID NO: 46484 - DNA, 20 bp, synthetic construct
  misc_feature 1..20: note = chemically synthesized
  source 1..20: mol_type = other DNA
atgaagaaggagaaaaaaat

SEQ ID NO: 46485 - DNA, 20 bp, synthetic construct
  misc_feature 1..20: note = chemically synthesized
  source 1..20: mol_type = other DNA
gaaggagaaaaaaataagct

SEQ ID NO: 46486 - DNA, 20 bp, synthetic construct
  misc_feature 1..20: note = chemically synthesized
  source 1..20: mol_type = other DNA
aaggagaaaaaaataagctt

SEQ ID NO: 46487 - DNA, 20 bp, synthetic construct
  misc_feature 1..20: note = chemically synthesized
  source 1..20: mol_type = other DNA
aaaaaataagcttgggtttt

SEQ ID NO: 46488 - DNA, 20 bp, synthetic construct
  misc_feature 1..20: note = chemically synthesized
  source 1..20: mol_type = other DNA
aaataagcttgggttttgag

SEQ ID NO: 46489 - DNA, 20 bp, synthetic construct
  misc_feature 1..20: note = chemically synthesized
  source 1..20: mol_type = other DNA
cttgggttttgagtggacta

SEQ ID NO: 46490 - DNA, 20 bp, synthetic construct
  misc_feature 1..20: note = chemically synthesized
  source 1..20: mol_type = other DNA
actacagaccatgtttatct

SEQ ID NO: 46491 - DNA, 20 bp, synthetic construct
  misc_feature 1..20: note = chemically synthesized
  source 1..20: mol_type = other DNA
ctacagaccatgtttatctc

SEQ ID NO: 46492 - DNA, 20 bp, synthetic construct
  misc_feature 1..20: note = chemically synthesized
  source 1..20: mol_type = other DNA
atgtttatctcaggtttgca

SEQ ID NO: 46493 - DNA, 20 bp, synthetic construct
  misc_feature 1..20: note = chemically synthesized
  source 1..20: mol_type = other DNA
tcccctcgtcccctatgttt

SEQ ID NO: 46494 - DNA, 20 bp, synthetic construct
  misc_feature 1..20: note = chemically synthesized
  source 1..20: mol_type = other DNA
actctactactctcatctat

SEQ ID NO: 46495 - DNA, 20 bp, synthetic construct
  misc_feature 1..20: note = chemically synthesized
  source 1..20: mol_type = other DNA
atctataagacccaaataat

SEQ ID NO: 46496 - DNA, 20 bp, synthetic construct
  misc_feature 1..20: note = chemically synthesized
  source 1..20: mol_type = other DNA
tacttcaacatgctttactc

SEQ ID NO: 46497 - DNA, 20 bp, synthetic construct
  misc_feature 1..20: note = chemically synthesized
  source 1..20: mol_type = other DNA
ccttgtaatgtctttacata

SEQ ID NO: 46498 - DNA, 20 bp, synthetic construct
  misc_feature 1..20: note = chemically synthesized
  source 1..20: mol_type = other DNA
tttacatacagtgaaatgta

SEQ ID NO: 46499 - DNA, 20 bp, synthetic construct
  misc_feature 1..20: note = chemically synthesized
  source 1..20: mol_type = other DNA
ctttctttcttttttctcct

SEQ ID NO: 46500 - DNA, 20 bp, synthetic construct
  misc_feature 1..20: note = chemically synthesized
  source 1..20: mol_type = other DNA
ttcttttttctcctcagcct

SEQ ID NO: 46501 - DNA, 20 bp, synthetic construct
  misc_feature 1..20: note = chemically synthesized
  source 1..20: mol_type = other DNA
ttctcctcagcctcagaatt

SEQ ID NO: 46502 - DNA, 20 bp, synthetic construct
  misc_feature 1..20: note = chemically synthesized
  source 1..20: mol_type = other DNA
gcacatgcccttccttcttt

SEQ ID NO: 46503 - DNA, 20 bp, synthetic construct
  misc_feature 1..20: note = chemically synthesized
  source 1..20: mol_type = other DNA
cacatgcccttccttctttc

SEQ ID NO: 46504 - DNA, 20 bp, synthetic construct
  misc_feature 1..20: note = chemically synthesized
  source 1..20: mol_type = other DNA
acttctccaacatctctgcc

SEQ ID NO: 46505 - DNA, 20 bp, synthetic construct
  misc_feature 1..20: note = chemically synthesized
  source 1..20: mol_type = other DNA
cctggctccatcatatcata

SEQ ID NO: 46506 - DNA, 20 bp, synthetic construct
  misc_feature 1..20: note = chemically synthesized
  source 1..20: mol_type = other DNA
ctggctccatcatatcataa

SEQ ID NO: 46507 - DNA, 20 bp, synthetic construct
  misc_feature 1..20: note = chemically synthesized
  source 1..20: mol_type = other DNA
taaaggtcccacttcaaatg

SEQ ID NO: 46508 - DNA, 20 bp, synthetic construct
  misc_feature 1..20: note = chemically synthesized
  source 1..20: mol_type = other DNA
aaatgcagtcactaccgttt

SEQ ID NO: 46509 - DNA, 20 bp, synthetic construct
  misc_feature 1..20: note = chemically synthesized
  source 1..20: mol_type = other DNA
ttttgttttttgtttttttt

SEQ ID NO: 46510 - DNA, 20 bp, synthetic construct
  misc_feature 1..20: note = chemically synthesized
  source 1..20: mol_type = other DNA
tttttgttttttttaagtca

SEQ ID NO: 46511 - DNA, 20 bp, synthetic construct
  misc_feature 1..20: note = chemically synthesized
  source 1..20: mol_type = other DNA
taagtcaaagcaaatttctt

SEQ ID NO: 46512 - DNA, 20 bp, synthetic construct
  misc_feature 1..20: note = chemically synthesized
  source 1..20: mol_type = other DNA
agtcaaagcaaatttcttga

SEQ ID NO: 46513 - DNA, 20 bp, synthetic construct
  misc_feature 1..20: note = chemically synthesized
  source 1..20: mol_type = other DNA
tcaaagcaaatttcttgaga

SEQ ID NO: 46514 - DNA, 20 bp, synthetic construct
  misc_feature 1..20: note = chemically synthesized
  source 1..20: mol_type = other DNA
gcaaatttcttgagagagta

SEQ ID NO: 46515 - DNA, 20 bp, synthetic construct
  misc_feature 1..20: note = chemically synthesized
  source 1..20: mol_type = other DNA
ataaacgaatgactactgca

SEQ ID NO: 46516 - DNA, 20 bp, synthetic construct
  misc_feature 1..20: note = chemically synthesized
  source 1..20: mol_type = other DNA
taaacgaatgactactgcat

SEQ ID NO: 46517 - DNA, 20 bp, synthetic construct
  misc_feature 1..20: note = chemically synthesized
  source 1..20: mol_type = other DNA
acgaatgactactgcatagg

SEQ ID NO: 46518 - DNA, 20 bp, synthetic construct
  misc_feature 1..20: note = chemically synthesized
  source 1..20: mol_type = other DNA
gaatgactactgcataggca

SEQ ID NO: 46519 - DNA, 20 bp, synthetic construct
  misc_feature 1..20: note = chemically synthesized
  source 1..20: mol_type = other DNA
tgactactgcataggcagag

SEQ ID NO: 46520 - DNA, 20 bp, synthetic construct
  misc_feature 1..20: note = chemically synthesized
  source 1..20: mol_type = other DNA
tgcataggcagagcagcccc

SEQ ID NO: 46521 - DNA, 20 bp, synthetic construct
  misc_feature 1..20: note = chemically synthesized
  source 1..20: mol_type = other DNA
gcataggcagagcagccccg

SEQ ID NO: 46522 - DNA, 20 bp, synthetic construct
  misc_feature 1..20: note = chemically synthesized
  source 1..20: mol_type = other DNA
cataggcagagcagccccga

SEQ ID NO: 46523 - DNA, 20 bp, synthetic construct
  misc_feature 1..20: note = chemically synthesized
  source 1..20: mol_type = other DNA
agagcagccccgagggccgc

SEQ ID NO: 46524 - DNA, 20 bp, synthetic construct
  misc_feature 1..20: note = chemically synthesized
  source 1..20: mol_type = other DNA
gccgctggttgttcctttta

SEQ ID NO: 46525 - DNA, 20 bp, synthetic construct
  misc_feature 1..20: note = chemically synthesized
  source 1..20: mol_type = other DNA
ttcttgatgatatgttaaac

SEQ ID NO: 46526 - DNA, 20 bp, synthetic construct
  misc_feature 1..20: note = chemically synthesized
  source 1..20: mol_type = other DNA
atgatatgttaaacaagttt

SEQ ID NO: 46527 - DNA, 20 bp, synthetic construct
  misc_feature 1..20: note = chemically synthesized
  source 1..20: mol_type = other DNA
ttatttatgccttctctttt

SEQ ID NO: 46528 - DNA, 20 bp, synthetic construct
  misc_feature 1..20: note = chemically synthesized
  source 1..20: mol_type = other DNA
tatttatgccttctcttttt

SEQ ID NO: 46529 - DNA, 20 bp, synthetic construct
  misc_feature 1..20: note = chemically synthesized
  source 1..20: mol_type = other DNA
ccttctctttttaggccata

SEQ ID NO: 46530 - DNA, 20 bp, synthetic construct
  misc_feature 1..20: note = chemically synthesized
  source 1..20: mol_type = other DNA
cttctctttttaggccatat

SEQ ID NO: 46531 - DNA, 20 bp, synthetic construct
  misc_feature 1..20: note = chemically synthesized
  source 1..20: mol_type = other DNA
ttctctttttaggccatata

SEQ ID NO: 46532 - DNA, 20 bp, synthetic construct
  misc_feature 1..20: note = chemically synthesized
  source 1..20: mol_type = other DNA
gtaactttctgacattgcca

SEQ ID NO: 46533 - DNA, 20 bp, synthetic construct
  misc_feature 1..20: note = chemically synthesized
  source 1..20: mol_type = other DNA
atttactgttaccttaaatt

SEQ ID NO: 46534 - DNA, 20 bp, synthetic construct
  misc_feature 1..20: note = chemically synthesized
  source 1..20: mol_type = other DNA
tttactgttaccttaaattc

SEQ ID NO: 46535 - DNA, 20 bp, synthetic construct
  misc_feature 1..20: note = chemically synthesized
  source 1..20: mol_type = other DNA
ttactgttaccttaaattca

SEQ ID NO: 46536 - DNA, 20 bp, synthetic construct
  misc_feature 1..20: note = chemically synthesized
  source 1..20: mol_type = other DNA
tactgttaccttaaattcag

SEQ ID NO: 46537 - DNA, 20 bp, synthetic construct
  misc_feature 1..20: note = chemically synthesized
  source 1..20: mol_type = other DNA
taaattcaggggtacacgta

SEQ ID NO: 46538 - DNA, 20 bp, synthetic construct
  misc_feature 1..20: note = chemically synthesized
  source 1..20: mol_type = other DNA
aaattcaggggtacacgtac

SEQ ID NO: 46539 - DNA, 20 bp, synthetic construct
  misc_feature 1..20: note = chemically synthesized
  source 1..20: mol_type = other DNA
gggtacacgtacaggatatg

SEQ ID NO: 46540 - DNA, 20 bp, synthetic construct
  misc_feature 1..20: note = chemically synthesized
  source 1..20: mol_type = other DNA
ggtacacgtacaggatatgc

SEQ ID NO: 46541 - DNA, 20 bp, synthetic construct
  misc_feature 1..20: note = chemically synthesized
  source 1..20: mol_type = other DNA
ggatatgcaggtttgtttta

SEQ ID NO: 46542 - DNA, 20 bp, synthetic construct
  misc_feature 1..20: note = chemically synthesized
  source 1..20: mol_type = other DNA
gatatgcaggtttgttttat

SEQ ID NO: 46543 - DNA, 20 bp, synthetic construct
  misc_feature 1..20: note = chemically synthesized
  source 1..20: mol_type = other DNA
caggtttgttttataggtaa

SEQ ID NO: 46544 - DNA, 20 bp, synthetic construct
  misc_feature 1..20: note = chemically synthesized
  source 1..20: mol_type = other DNA
ttataggtaaaagtgtgcca

SEQ ID NO: 46545 - DNA, 20 bp, synthetic construct
  misc_feature 1..20: note = chemically synthesized
  source 1..20: mol_type = other DNA
aaagtgtgccatggttttaa

SEQ ID NO: 46546 - DNA, 20 bp, synthetic construct
  misc_feature 1..20: note = chemically synthesized
  source 1..20: mol_type = other DNA
aagtgtgccatggttttaat

SEQ ID NO: 46547 - DNA, 20 bp, synthetic construct
  misc_feature 1..20: note = chemically synthesized
  source 1..20: mol_type = other DNA
tgggttttttttttcttgta

SEQ ID NO: 46548 - DNA, 20 bp, synthetic construct
  misc_feature 1..20: note = chemically synthesized
  source 1..20: mol_type = other DNA
tttttcttgtaaagttgttt

SEQ ID NO: 46549 - DNA, 20 bp, synthetic construct
  misc_feature 1..20: note = chemically synthesized
  source 1..20: mol_type = other DNA
tttaagtttcttgtttactc

SEQ ID NO: 46550 - DNA, 20 bp, synthetic construct
  misc_feature 1..20: note = chemically synthesized
  source 1..20: mol_type = other DNA
ttcttgtttactctggatat

SEQ ID NO: 46551 - DNA, 20 bp, synthetic construct
  misc_feature 1..20: note = chemically synthesized
  source 1..20: mol_type = other DNA
tcttgtttactctggatatt

SEQ ID NO: 46552 - DNA, 20 bp, synthetic construct
  misc_feature 1..20: note = chemically synthesized
  source 1..20: mol_type = other DNA
tctggatattaggcctttgt

SEQ ID NO: 46553 - DNA, 20 bp, synthetic construct
  misc_feature 1..20: note = chemically synthesized
  source 1..20: mol_type = other DNA
ggatattaggcctttgtcag

SEQ ID NO: 46554 - DNA, 20 bp, synthetic construct
  misc_feature 1..20: note = chemically synthesized
  source 1..20: mol_type = other DNA
ttaggcctttgtcagaagaa

SEQ ID NO: 46555 - DNA, 20 bp, synthetic construct
  misc_feature 1..20: note = chemically synthesized
  source 1..20: mol_type = other DNA
cctttgtcagaagaatagat

SEQ ID NO: 46556 - DNA, 20 bp, synthetic construct
  misc_feature 1..20: note = chemically synthesized
  source 1..20: mol_type = other DNA
aaaatctttttcccattctg

SEQ ID NO: 46557 - DNA, 20 bp, synthetic construct
  misc_feature 1..20: note = chemically synthesized
  source 1..20: mol_type = other DNA
tagattgtctttcgctctga

SEQ ID NO: 46558 - DNA, 20 bp, synthetic construct
  misc_feature 1..20: note = chemically synthesized
  source 1..20: mol_type = other DNA
attgtctttcgctctgatgg

SEQ ID NO: 46559 - DNA, 20 bp, synthetic construct
  misc_feature 1..20: note = chemically synthesized
  source 1..20: mol_type = other DNA
tgatggtagtttcttttgct

SEQ ID NO: 46560 - DNA, 20 bp, synthetic construct
  misc_feature 1..20: note = chemically synthesized
  source 1..20: mol_type = other DNA
tggtagtttcttttgctgag

SEQ ID NO: 46561 - DNA, 20 bp, synthetic construct
  misc_feature 1..20: note = chemically synthesized
  source 1..20: mol_type = other DNA
ggtagtttcttttgctgagc

SEQ ID NO: 46562 - DNA, 20 bp, synthetic construct
  misc_feature 1..20: note = chemically synthesized
  source 1..20: mol_type = other DNA
tagtttcttttgctgagcag

SEQ ID NO: 46563 - DNA, 20 bp, synthetic construct
  misc_feature 1..20: note = chemically synthesized
  source 1..20: mol_type = other DNA
tttgctgagcaggagctctt

SEQ ID NO: 46564 - DNA, 20 bp, synthetic construct
  misc_feature 1..20: note = chemically synthesized
  source 1..20: mol_type = other DNA
caggagctctttagtttaat

SEQ ID NO: 46565 - DNA, 20 bp, synthetic construct
  misc_feature 1..20: note = chemically synthesized
  source 1..20: mol_type = other DNA
ttagtttaattagattccat

SEQ ID NO: 46566 - DNA, 20 bp, synthetic construct
  misc_feature 1..20: note = chemically synthesized
  source 1..20: mol_type = other DNA
gcccgtgtttatatcatgaa

SEQ ID NO: 46567 - DNA, 20 bp, synthetic construct
  misc_feature 1..20: note = chemically synthesized
  source 1..20: mol_type = other DNA
gtattgccttgatttttttc

SEQ ID NO: 46568 - DNA, 20 bp, synthetic construct
  misc_feature 1..20: note = chemically synthesized
  source 1..20: mol_type = other DNA
tattgccttgatttttttct

SEQ ID NO: 46569 - DNA, 20 bp, synthetic construct
  misc_feature 1..20: note = chemically synthesized
  source 1..20: mol_type = other DNA
atttttttctaggcttttta

SEQ ID NO: 46570 - DNA, 20 bp, synthetic construct
  misc_feature 1..20: note = chemically synthesized
  source 1..20: mol_type = other DNA
tttctaggctttttatagtt

SEQ ID NO: 46571 - DNA, 20 bp, synthetic construct
  misc_feature 1..20: note = chemically synthesized
  source 1..20: mol_type = other DNA
ttctaggctttttatagttt

SEQ ID NO: 46572 - DNA, 20 bp, synthetic construct
  misc_feature 1..20: note = chemically synthesized
  source 1..20: mol_type = other DNA
tctaggctttttatagtttg

SEQ ID NO: 46573 - DNA, 20 bp, synthetic construct
  misc_feature 1..20: note = chemically synthesized
  source 1..20: mol_type = other DNA
tagtttggggtttttcattt

SEQ ID NO: 46574 - DNA, 20 bp, synthetic construct
  misc_feature 1..20: note = chemically synthesized
  source 1..20: mol_type = other DNA
atttaagtctctaatccatc

SEQ ID NO: 46575 - DNA, 20 bp, synthetic construct
  misc_feature 1..20: note = chemically synthesized
  source 1..20: mol_type = other DNA
ttaagtctctaatccatctg

SEQ ID NO: 46576 - DNA, 20 bp, synthetic construct
  misc_feature 1..20: note = chemically synthesized
  source 1..20: mol_type = other DNA
aatccatctggagttaattt

SEQ ID NO: 46577 - DNA, 20 bp, synthetic construct
  misc_feature 1..20: note = chemically synthesized
  source 1..20: mol_type = other DNA
atctggagttaattttggat

SEQ ID NO: 46578 - DNA, 20 bp, synthetic construct
  misc_feature 1..20: note = chemically synthesized
  source 1..20: mol_type = other DNA
tctggagttaattttggata

SEQ ID NO: 46579 - DNA, 20 bp, synthetic construct
  misc_feature 1..20: note = chemically synthesized
  source 1..20: mol_type = other DNA
gttaattttggataaggtat

SEQ ID NO: 46580 - DNA, 20 bp, synthetic construct
  misc_feature 1..20: note = chemically synthesized
  source 1..20: mol_type = other DNA
ttaattttggataaggtata

SEQ ID NO: 46581 - DNA, 20 bp, synthetic construct
  misc_feature 1..20: note = chemically synthesized
  source 1..20: mol_type = other DNA
attttggataaggtataagg

SEQ ID NO: 46582 - DNA, 20 bp, synthetic construct
  misc_feature 1..20: note = chemically synthesized
  source 1..20: mol_type = other DNA
ttttggataaggtataagga

SEQ ID NO: 46583 - DNA, 20 bp, synthetic construct
  misc_feature 1..20: note = chemically synthesized
  source 1..20: mol_type = other DNA
ttggataaggtataaggaag

SEQ ID NO: 46584 - DNA, 20 bp, synthetic construct
  misc_feature 1..20: note = chemically synthesized
  source 1..20: mol_type = other DNA
taaggtataaggaaggagtc

SEQ ID NO: 46585 - DNA, 20 bp, synthetic construct
  misc_feature 1..20: note = chemically synthesized
  source 1..20: mol_type = other DNA
aggagtccagtttcattttt

SEQ ID NO: 46586 - DNA, 20 bp, synthetic construct
  misc_feature 1..20: note = chemically synthesized
  source 1..20: mol_type = other DNA
cagtttcatttttcagcata

SEQ ID NO: 46587 - DNA, 20 bp, synthetic construct
  misc_feature 1..20: note = chemically synthesized
  source 1..20: mol_type = other DNA
ttcatttttcagcatatggc

SEQ ID NO: 46588 - DNA, 20 bp, synthetic construct
  misc_feature 1..20: note = chemically synthesized
  source 1..20: mol_type = other DNA
tttttcagcatatggctagc

SEQ ID NO: 46589 - DNA, 20 bp, synthetic construct
  misc_feature 1..20: note = chemically synthesized
  source 1..20: mol_type = other DNA
tccccattgcttgcttttgt

SEQ ID NO: 46590 - DNA, 20 bp, synthetic construct
  misc_feature 1..20: note = chemically synthesized
  source 1..20: mol_type = other DNA
ccccattgcttgcttttgtc

SEQ ID NO: 46591 - DNA, 20 bp, synthetic construct
  misc_feature 1..20: note = chemically synthesized
  source 1..20: mol_type = other DNA
tgcttttgtcaggtttctaa

SEQ ID NO: 46592 - DNA, 20 bp, synthetic construct
  misc_feature 1..20: note = chemically synthesized
  source 1..20: mol_type = other DNA
ttgtcaggtttctaaaagac

SEQ ID NO: 46593 - DNA, 20 bp, synthetic construct
  misc_feature 1..20: note = chemically synthesized
  source 1..20: mol_type = other DNA
caggtttctaaaagaccaga

SEQ ID NO: 46594 - DNA, 20 bp, synthetic construct
  misc_feature 1..20: note = chemically synthesized
  source 1..20: mol_type = other DNA
tctaaaagaccagatggttg

SEQ ID NO: 46595 - DNA, 20 bp, synthetic construct
  misc_feature 1..20: note = chemically synthesized
  source 1..20: mol_type = other DNA
ctaaaagaccagatggttgt

SEQ ID NO: 46596 - DNA, 20 bp, synthetic construct
  misc_feature 1..20: note = chemically synthesized
  source 1..20: mol_type = other DNA
atggttgtaggtacaatatg

SEQ ID NO: 46597 - DNA, 20 bp, synthetic construct
  misc_feature 1..20: note = chemically synthesized
  source 1..20: mol_type = other DNA
gtacaatatgcagtttcttc

SEQ ID NO: 46598 - DNA, 20 bp, synthetic construct
  misc_feature 1..20: note = chemically synthesized
  source 1..20: mol_type = other DNA
tcttattaattcatttcttt

SEQ ID NO: 46599 - DNA, 20 bp, synthetic construct
  misc_feature 1..20: note = chemically synthesized
  source 1..20: mol_type = other DNA
atttcttttagtatgtatgc

SEQ ID NO: 46600 - DNA, 20 bp, synthetic construct
  misc_feature 1..20: note = chemically synthesized
  source 1..20: mol_type = other DNA
ctggtctcctctgctcacta

SEQ ID NO: 46601 - DNA, 20 bp, synthetic construct
  misc_feature 1..20: note = chemically synthesized
  source 1..20: mol_type = other DNA
tctcctctgctcactatagt

SEQ ID NO: 46602 - DNA, 20 bp, synthetic construct
  misc_feature 1..20: note = chemically synthesized
  source 1..20: mol_type = other DNA
ctcctctgctcactatagtg

SEQ ID NO: 46603 - DNA, 20 bp, synthetic construct
  misc_feature 1..20: note = chemically synthesized
  source 1..20: mol_type = other DNA
tcctctgctcactatagtga

SEQ ID NO: 46604 - DNA, 20 bp, synthetic construct
  misc_feature 1..20: note = chemically synthesized
  source 1..20: mol_type = other DNA
cactatagtgagggcaccat

SEQ ID NO: 46605 - DNA, 20 bp, synthetic construct
  misc_feature 1..20: note = chemically synthesized
  source 1..20: mol_type = other DNA
atagtgagggcaccattagc

SEQ ID NO: 46606 - DNA, 20 bp, synthetic construct
  misc_feature 1..20: note = chemically synthesized
  source 1..20: mol_type = other DNA
agtgagggcaccattagcca

SEQ ID NO: 46607 - DNA, 20 bp, synthetic construct
  misc_feature 1..20: note = chemically synthesized
  source 1..20: mol_type = other DNA
agccagagaatctgtctgtc

SEQ ID NO: 46608 - DNA, 20 bp, synthetic construct
  misc_feature 1..20: note = chemically synthesized
  source 1..20: mol_type = other DNA
tctgtctgtctagttcatgt

SEQ ID NO: 46609 - DNA, 20 bp, synthetic construct
  misc_feature 1..20: note = chemically synthesized
  source 1..20: mol_type = other DNA
tctagttcatgtaagattct

SEQ ID NO: 46610 - DNA, 20 bp, synthetic construct
  misc_feature 1..20: note = chemically synthesized
  source 1..20: mol_type = other DNA
catgtaagattctcagaatt

SEQ ID NO: 46611 - DNA, 20 bp, synthetic construct
  misc_feature 1..20: note = chemically synthesized
  source 1..20: mol_type = other DNA
attctcagaattaagaaaaa

SEQ ID NO: 46612 - DNA, 20 bp, synthetic construct
  misc_feature 1..20: note = chemically synthesized
  source 1..20: mol_type = other DNA
tcagaattaagaaaaatgga

SEQ ID NO: 46613 - DNA, 20 bp, synthetic construct
  misc_feature 1..20: note = chemically synthesized
  source 1..20: mol_type = other DNA
ggcatatgaatgaaacttca

SEQ ID NO: 46614 - DNA, 20 bp, synthetic construct
  misc_feature 1..20: note = chemically synthesized
  source 1..20: mol_type = other DNA
gaaacttcatggatgacata

SEQ ID NO: 46615 - DNA, 20 bp, synthetic construct
  misc_feature 1..20: note = chemically synthesized
  source 1..20: mol_type = other DNA
tatttgttgaattaatgcat

SEQ ID NO: 46616 - DNA, 20 bp, synthetic construct
  misc_feature 1..20: note = chemically synthesized
  source 1..20: mol_type = other DNA
aattaatgcataagatgcaa

SEQ ID NO: 46617 - DNA, 20 bp, synthetic construct
  misc_feature 1..20: note = chemically synthesized
  source 1..20: mol_type = other DNA
ttaatgcataagatgcaaca

SEQ ID NO: 46618 - DNA, 20 bp, synthetic construct
  misc_feature 1..20: note = chemically synthesized
  source 1..20: mol_type = other DNA
aatgcataagatgcaacaga

SEQ ID NO: 46619 - DNA, 20 bp, synthetic construct
  misc_feature 1..20: note = chemically synthesized
  source 1..20: mol_type = other DNA
gcataagatgcaacagagag

SEQ ID NO: 46620 - DNA, 20 bp, synthetic construct
  misc_feature 1..20: note = chemically synthesized
  source 1..20: mol_type = other DNA
tgacaactgcaatgataacc

SEQ ID NO: 46621 - DNA, 20 bp, synthetic construct
  misc_feature 1..20: note = chemically synthesized
  source 1..20: mol_type = other DNA
taacctggtattgatgatat

SEQ ID NO: 46622 - DNA, 20 bp, synthetic construct
  misc_feature 1..20: note = chemically synthesized
  source 1..20: mol_type = other DNA
acctggtattgatgatataa

SEQ ID NO: 46623 - DNA, 20 bp, synthetic construct
  misc_feature 1..20: note = chemically synthesized
  source 1..20: mol_type = other DNA
attgatgatataagagtcta

SEQ ID NO: 46624 - DNA, 20 bp, synthetic construct
  misc_feature 1..20: note = chemically synthesized
  source 1..20: mol_type = other DNA
atataagagtctatagatca

SEQ ID NO: 46625 - DNA, 20 bp, synthetic construct
  misc_feature 1..20: note = chemically synthesized
  source 1..20: mol_type = other DNA
taagagtctatagatcacag

SEQ ID NO: 46626 - DNA, 20 bp, synthetic construct
  misc_feature 1..20: note = chemically synthesized
  source 1..20: mol_type = other DNA
gagtctatagatcacagtag

SEQ ID NO: 46627 - DNA, 20 bp, synthetic construct
  misc_feature 1..20: note = chemically synthesized
  source 1..20: mol_type = other DNA
cacagtagaagcaataatca

SEQ ID NO: 46628 - DNA, 20 bp, synthetic construct
  misc_feature 1..20: note = chemically synthesized
  source 1..20: mol_type = other DNA
caataatcatggaaaacaat

SEQ ID NO: 46629 - DNA, 20 bp, synthetic construct
  misc_feature 1..20: note = chemically synthesized
  source 1..20: mol_type = other DNA
tcatggaaaacaattggaaa

SEQ ID NO: 46630 - DNA, 20 bp, synthetic construct
  misc_feature 1..20: note = chemically synthesized
  source 1..20: mol_type = other DNA
catggaaaacaattggaaat

SEQ ID NO: 46631 - DNA, 20 bp, synthetic construct
  misc_feature 1..20: note = chemically synthesized
  source 1..20: mol_type = other DNA
atggaaaacaattggaaatg

SEQ ID NO: 46632 - DNA, 20 bp, synthetic construct
  misc_feature 1..20: note = chemically synthesized
  source 1..20: mol_type = other DNA
aaacaattggaaatggggaa

SEQ ID NO: 46633 - DNA, 20 bp, synthetic construct
  misc_feature 1..20: note = chemically synthesized
  source 1..20: mol_type = other DNA
aatggggaacagccacaaac

SEQ ID NO: 46634 - DNA, 20 bp, synthetic construct
  misc_feature 1..20: note = chemically synthesized
  source 1..20: mol_type = other DNA
gggaacagccacaaacaaga

SEQ ID NO: 46635 - DNA, 20 bp, synthetic construct
  misc_feature 1..20: note = chemically synthesized
  source 1..20: mol_type = other DNA
caagaaagaatcaatacttc

SEQ ID NO: 46636 - DNA, 20 bp, synthetic construct
  misc_feature 1..20: note = chemically synthesized
  source 1..20: mol_type = other DNA
aagaaagaatcaatacttcc

SEQ ID NO: 46637 - DNA, 20 bp, synthetic construct
  misc_feature 1..20: note = chemically synthesized
  source 1..20: mol_type = other DNA
aagaatcaatacttccagga

SEQ ID NO: 46638 - DNA, 20 bp, synthetic construct
  misc_feature 1..20: note = chemically synthesized
  source 1..20: mol_type = other DNA
tacttccaggaaagtgactg

SEQ ID NO: 46639 - DNA, 20 bp, synthetic construct
  misc_feature 1..20: note = chemically synthesized
  source 1..20: mol_type = other DNA
acttccaggaaagtgactgc

SEQ ID NO: 46640 - DNA, 20 bp, synthetic construct
  misc_feature 1..20: note = chemically synthesized
  source 1..20: mol_type = other DNA
tgactgcaggtcacttttcc

SEQ ID NO: 46641 - DNA, 20 bp, synthetic construct
  misc_feature 1..20: note = chemically synthesized
  source 1..20: mol_type = other DNA
actgcaggtcacttttcctg

SEQ ID NO: 46642 - DNA, 20 bp, synthetic construct
  misc_feature 1..20: note = chemically synthesized
  source 1..20: mol_type = other DNA
gcaggtcacttttcctggag

SEQ ID NO: 46643 - DNA, 20 bp, synthetic construct
  misc_feature 1..20: note = chemically synthesized
  source 1..20: mol_type = other DNA
caggtcacttttcctggagc

SEQ ID NO: 46644 - DNA, 20 bp, synthetic construct
  misc_feature 1..20: note = chemically synthesized
  source 1..20: mol_type = other DNA
tcacttttcctggagcgggt

SEQ ID NO: 46645 - DNA, 20 bp, synthetic construct
  misc_feature 1..20: note = chemically synthesized
  source 1..20: mol_type = other DNA
acttttcctggagcgggtga

SEQ ID NO: 46646 - DNA, 20 bp, synthetic construct
  misc_feature 1..20: note = chemically synthesized
  source 1..20: mol_type = other DNA
tcctggagcgggtgagagaa

SEQ ID NO: 46647 - DNA, 20 bp, synthetic construct
  misc_feature 1..20: note = chemically synthesized
  source 1..20: mol_type = other DNA
tggagcgggtgagagaaaag

SEQ ID NO: 46648 - DNA, 20 bp, synthetic construct
  misc_feature 1..20: note = chemically synthesized
  source 1..20: mol_type = other DNA
agcgggtgagagaaaagtgg

SEQ ID NO: 46649 - DNA, 20 bp, synthetic construct
  misc_feature 1..20: note = chemically synthesized
  source 1..20: mol_type = other DNA
ggtgagagaaaagtggaagt

SEQ ID NO: 46650 - DNA, 20 bp, synthetic construct
  misc_feature 1..20: note = chemically synthesized
  source 1..20: mol_type = other DNA
gagagaaaagtggaagttag

SEQ ID NO: 46651 - DNA, 20 bp, synthetic construct
  misc_feature 1..20: note = chemically synthesized
  source 1..20: mol_type = other DNA
agcagtaactgctgaattcc

SEQ ID NO: 46652 - DNA, 20 bp, synthetic construct
  misc_feature 1..20: note = chemically synthesized
  source 1..20: mol_type = other DNA
gtaactgctgaattcctggt

SEQ ID NO: 46653 - DNA, 20 bp, synthetic construct
  misc_feature 1..20: note = chemically synthesized
  source 1..20: mol_type = other DNA
ctgaattcctggttggctga

SEQ ID NO: 46654 - DNA, 20 bp, synthetic construct
  misc_feature 1..20: note = chemically synthesized
  source 1..20: mol_type = other DNA
attcctggttggctgatgga

SEQ ID NO: 46655 - DNA, 20 bp, synthetic construct
  misc_feature 1..20: note = chemically synthesized
  source 1..20: mol_type = other DNA
ctggttggctgatggaaaga

SEQ ID NO: 46656 - DNA, 20 bp, synthetic construct
  misc_feature 1..20: note = chemically synthesized
  source 1..20: mol_type = other DNA
tggttggctgatggaaagat

SEQ ID NO: 46657 - DNA, 20 bp, synthetic construct
  misc_feature 1..20: note = chemically synthesized
  source 1..20: mol_type = other DNA
ggttggctgatggaaagatg

SEQ ID NO: 46658 - DNA, 20 bp, synthetic construct
  misc_feature 1..20: note = chemically synthesized
  source 1..20: mol_type = other DNA
tggctgatggaaagatgggg

SEQ ID NO: 46659 - DNA, 20 bp, synthetic construct
  misc_feature 1..20: note = chemically synthesized
  source 1..20: mol_type = other DNA
aagatggggcagctgttcac

SEQ ID NO: 46660 - DNA, 20 bp, synthetic construct
  misc_feature 1..20: note = chemically synthesized
  source 1..20: mol_type = other DNA
ggcagctgttcactggtacg

SEQ ID NO: 46661 - DNA, 20 bp, synthetic construct
  misc_feature 1..20: note = chemically synthesized
  source 1..20: mol_type = other DNA
gcagctgttcactggtacgc

SEQ ID NO: 46662 - DNA, 20 bp, synthetic construct
  misc_feature 1..20: note = chemically synthesized
  source 1..20: mol_type = other DNA
cagctgttcactggtacgca

SEQ ID NO: 46663 - DNA, 20 bp, synthetic construct
  misc_feature 1..20: note = chemically synthesized
  source 1..20: mol_type = other DNA
ttcactggtacgcagggttt

SEQ ID NO: 46664 - DNA, 20 bp, synthetic construct
  misc_feature 1..20: note = chemically synthesized
  source 1..20: mol_type = other DNA
ggttttagatgtatgtacct

SEQ ID NO: 46665 - DNA, 20 bp, synthetic construct
  misc_feature 1..20: note = chemically synthesized
  source 1..20: mol_type = other DNA
gttttagatgtatgtaccta

SEQ ID NO: 46666 - DNA, 20 bp, synthetic construct
  misc_feature 1..20: note = chemically synthesized
  source 1..20: mol_type = other DNA
atgtatgtacctaaggatat

SEQ ID NO: 46667 - DNA, 20 bp, synthetic construct
  misc_feature 1..20: note = chemically synthesized
  source 1..20: mol_type = other DNA
tgtatgtacctaaggatatg

SEQ ID NO: 46668 - DNA, 20 bp, synthetic construct
  misc_feature 1..20: note = chemically synthesized
  source 1..20: mol_type = other DNA
gtacctaaggatatgaggta

SEQ ID NO: 46669 - DNA, 20 bp, synthetic construct
  misc_feature 1..20: note = chemically synthesized
  source 1..20: mol_type = other DNA
atatgaggtatggcaatgaa

SEQ ID NO: 46670 - DNA, 20 bp, synthetic construct
  misc_feature 1..20: note = chemically synthesized
  source 1..20: mol_type = other DNA
gcaatgaacagaaattcttt

SEQ ID NO: 46671 - DNA, 20 bp, synthetic construct
  misc_feature 1..20: note = chemically synthesized
  source 1..20: mol_type = other DNA
caatgaacagaaattctttt

SEQ ID NO: 46672 - DNA, 20 bp, synthetic construct
  misc_feature 1..20: note = chemically synthesized
  source 1..20: mol_type = other DNA
acagaaattcttttgggaat

SEQ ID NO: 46673 - DNA, 20 bp, synthetic construct
  misc_feature 1..20: note = chemically synthesized
  source 1..20: mol_type = other DNA
attcttttgggaatgagttt

SEQ ID NO: 46674 - DNA, 20 bp, synthetic construct
  misc_feature 1..20: note = chemically synthesized
  source 1..20: mol_type = other DNA
ttcttttgggaatgagtttt

SEQ ID NO: 46675 - DNA, 20 bp, synthetic construct
  misc_feature 1..20: note = chemically synthesized
  source 1..20: mol_type = other DNA
tcttttgggaatgagtttta

SEQ ID NO: 46676 - DNA, 20 bp, synthetic construct
  misc_feature 1..20: note = chemically synthesized
  source 1..20: mol_type = other DNA
aatgagttttagggccatta

SEQ ID NO: 46677 - DNA, 20 bp, synthetic construct
  misc_feature 1..20: note = chemically synthesized
  source 1..20: mol_type = other DNA
atgagttttagggccattaa

SEQ ID NO: 46678 - DNA, 20 bp, synthetic construct
  misc_feature 1..20: note = chemically synthesized
  source 1..20: mol_type = other DNA
ccattaaaggacatgacctg

SEQ ID NO: 46679 - DNA, 20 bp, synthetic construct
  misc_feature 1..20: note = chemically synthesized
  source 1..20: mol_type = other DNA
catgacctgaagtttcctct

SEQ ID NO: 46680 - DNA, 20 bp, synthetic construct
  misc_feature 1..20: note = chemically synthesized
  source 1..20: mol_type = other DNA
atgacctgaagtttcctctg

SEQ ID NO: 46681 - DNA, 20 bp, synthetic construct
  misc_feature 1..20: note = chemically synthesized
  source 1..20: mol_type = other DNA
cctgaagtttcctctgaggc

SEQ ID NO: 46682 - DNA, 20 bp, synthetic construct
  misc_feature 1..20: note = chemically synthesized
  source 1..20: mol_type = other DNA
ataaatgtgtttcctgcata

SEQ ID NO: 46683 - DNA, 20 bp, synthetic construct
  misc_feature 1..20: note = chemically synthesized
  source 1..20: mol_type = other DNA
gtgtttcctgcatatagtca

SEQ ID NO: 46684 - DNA, 20 bp, synthetic construct
  misc_feature 1..20: note = chemically synthesized
  source 1..20: mol_type = other DNA
atcatcgatctctgctctta

SEQ ID NO: 46685 - DNA, 20 bp, synthetic construct
  misc_feature 1..20: note = chemically synthesized
  source 1..20: mol_type = other DNA
tctgctcttaaagataatct

SEQ ID NO: 46686 - DNA, 20 bp, synthetic construct
  misc_feature 1..20: note = chemically synthesized
  source 1..20: mol_type = other DNA
caaactttccccatgttcct

SEQ ID NO: 46687 - DNA, 20 bp, synthetic construct
  misc_feature 1..20: note = chemically synthesized
  source 1..20: mol_type = other DNA
ccccatgttcctaagtaaaa

SEQ ID NO: 46688 - DNA, 20 bp, synthetic construct
  misc_feature 1..20: note = chemically synthesized
  source 1..20: mol_type = other DNA
cccatgttcctaagtaaaac

SEQ ID NO: 46689 - DNA, 20 bp, synthetic construct
  misc_feature 1..20: note = chemically synthesized
  source 1..20: mol_type = other DNA
aactgcctctcaactatatc

SEQ ID NO: 46690 - DNA, 20 bp, synthetic construct
  misc_feature 1..20: note = chemically synthesized
  source 1..20: mol_type = other DNA
tgcctctcaactatatcaag

SEQ ID NO: 46691 - DNA, 20 bp, synthetic construct
  misc_feature 1..20: note = chemically synthesized
  source 1..20: mol_type = other DNA
aaatattgtgtctctaatat

SEQ ID NO: 46692 - DNA, 20 bp, synthetic construct
  misc_feature 1..20: note = chemically synthesized
  source 1..20: mol_type = other DNA
tgtctctaatatcagaaatt

SEQ ID NO: 46693 - DNA, 20 bp, synthetic construct
  misc_feature 1..20: note = chemically synthesized
  source 1..20: mol_type = other DNA
gaaattcagctttaatatat

SEQ ID NO: 46694 - DNA, 20 bp, synthetic construct
  misc_feature 1..20: note = chemically synthesized
  source 1..20: mol_type = other DNA
aaattcagctttaatatatt

SEQ ID NO: 46695 - DNA, 20 bp, synthetic construct
  misc_feature 1..20: note = chemically synthesized
  source 1..20: mol_type = other DNA
gggtttaactctttgaaatt

SEQ ID NO: 46696 - DNA, 20 bp, synthetic construct
  misc_feature 1..20: note = chemically synthesized
  source 1..20: mol_type = other DNA
gtttaactctttgaaattta

SEQ ID NO: 46697 - DNA, 20 bp, synthetic construct
  misc_feature 1..20: note = chemically synthesized
  source 1..20: mol_type = other DNA
gagtctccttgaaatacaca

SEQ ID NO: 46698 - DNA, 20 bp, synthetic construct
  misc_feature 1..20: note = chemically synthesized
  source 1..20: mol_type = other DNA
agtctccttgaaatacacat

SEQ ID NO: 46699 - DNA, 20 bp, synthetic construct
  misc_feature 1..20: note = chemically synthesized
  source 1..20: mol_type = other DNA
gtctccttgaaatacacatg

SEQ ID NO: 46700 - DNA, 20 bp, synthetic construct
  misc_feature 1..20: note = chemically synthesized
  source 1..20: mol_type = other DNA
tctccttgaaatacacatgg

SEQ ID NO: 46701 - DNA, 20 bp, synthetic construct
  misc_feature 1..20: note = chemically synthesized
  source 1..20: mol_type = other DNA
tcctaaactttatttcttgt

SEQ ID NO: 46702 - DNA, 20 bp, synthetic construct
  misc_feature 1..20: note = chemically synthesized
  source 1..20: mol_type = other DNA
cctaaactttatttcttgta

SEQ ID NO: 46703 - DNA, 20 bp, synthetic construct
  misc_feature 1..20: note = chemically synthesized
  source 1..20: mol_type = other DNA
tttcttgtaaggatttatct

SEQ ID NO: 46704 - DNA, 20 bp, synthetic construct
  misc_feature 1..20: note = chemically synthesized
  source 1..20: mol_type = other DNA
ttcttgtaaggatttatctc

SEQ ID NO: 46705 - DNA, 20 bp, synthetic construct
  misc_feature 1..20: note = chemically synthesized
  source 1..20: mol_type = other DNA
tcttgtaaggatttatctca

SEQ ID NO: 46706 - DNA, 20 bp, synthetic construct
  misc_feature 1..20: note = chemically synthesized
  source 1..20: mol_type = other DNA
cttgtaaggatttatctcag

SEQ ID NO: 46707 - DNA, 20 bp, synthetic construct
  misc_feature 1..20: note = chemically synthesized
  source 1..20: mol_type = other DNA
ctcaggggtaacacacaaac

SEQ ID NO: 46708 - DNA, 20 bp, synthetic construct
  misc_feature 1..20: note = chemically synthesized
  source 1..20: mol_type = other DNA
aaccagcatcctgaacctct

SEQ ID NO: 46709 - DNA, 20 bp, synthetic construct
  misc_feature 1..20: note = chemically synthesized
  source 1..20: mol_type = other DNA
catcctgaacctctaagtat

SEQ ID NO: 46710 - DNA, 20 bp, synthetic construct
  misc_feature 1..20: note = chemically synthesized
  source 1..20: mol_type = other DNA
atcctgaacctctaagtatg

SEQ ID NO: 46711 - DNA, 20 bp, synthetic construct
  misc_feature 1..20: note = chemically synthesized
  source 1..20: mol_type = other DNA
tgaacctctaagtatgagga

SEQ ID NO: 46712 - DNA, 20 bp, synthetic construct
  misc_feature 1..20: note = chemically synthesized
  source 1..20: mol_type = other DNA
cctctaagtatgaggacagt

SEQ ID NO: 46713 - DNA, 20 bp, synthetic construct
  misc_feature 1..20: note = chemically synthesized
  source 1..20: mol_type = other DNA
gtatgaggacagtaagcctt

SEQ ID NO: 46714 - DNA, 20 bp, synthetic construct
  misc_feature 1..20: note = chemically synthesized
  source 1..20: mol_type = other DNA
taaactgttcttctctctgc

SEQ ID NO: 46715 - DNA, 20 bp, synthetic construct
  misc_feature 1..20: note = chemically synthesized
  source 1..20: mol_type = other DNA
actgttcttctctctgccgg

SEQ ID NO: 46716 - DNA, 20 bp, synthetic construct
  misc_feature 1..20: note = chemically synthesized
  source 1..20: mol_type = other DNA
gttcttctctctgccggtgg

SEQ ID NO: 46717 - DNA, 20 bp, synthetic construct
  misc_feature 1..20: note = chemically synthesized
  source 1..20: mol_type = other DNA
attcctgaaattgcttgttt

SEQ ID NO: 46718 - DNA, 20 bp, synthetic construct
  misc_feature 1..20: note = chemically synthesized
  source 1..20: mol_type = other DNA
attgcttgtttgagacgcat

SEQ ID NO: 46719 - DNA, 20 bp, synthetic construct
  misc_feature 1..20: note = chemically synthesized
  source 1..20: mol_type = other DNA
tttgagacgcatgagacgtg

SEQ ID NO: 46720 - DNA, 20 bp, synthetic construct
  misc_feature 1..20: note = chemically synthesized
  source 1..20: mol_type = other DNA
gcatgagacgtgcagcacat

SEQ ID NO: 46721 - DNA, 20 bp, synthetic construct
  misc_feature 1..20: note = chemically synthesized
  source 1..20: mol_type = other DNA
tgcagcacatgagacacgtg

SEQ ID NO: 46722 - DNA, 20 bp, synthetic construct
  misc_feature 1..20: note = chemically synthesized
  source 1..20: mol_type = other DNA
agcacatgagacacgtgcag

SEQ ID NO: 46723 - DNA, 20 bp, synthetic construct
  misc_feature 1..20: note = chemically synthesized
  source 1..20: mol_type = other DNA
gagacacgtgcagcagcctg

SEQ ID NO: 46724 - DNA, 20 bp, synthetic construct
  misc_feature 1..20: note = chemically synthesized
  source 1..20: mol_type = other DNA
agcagcctgtggaatattgt

SEQ ID NO: 46725 - DNA, 20 bp, synthetic construct
  misc_feature 1..20: note = chemically synthesized
  source 1..20: mol_type = other DNA
cctgtggaatattgtcagtg

SEQ ID NO: 46726 - DNA, 20 bp, synthetic construct
  misc_feature 1..20: note = chemically synthesized
  source 1..20: mol_type = other DNA
gaagaatgtctttgcctgat

SEQ ID NO: 46727 - DNA, 20 bp, synthetic construct
  misc_feature 1..20: note = chemically synthesized
  source 1..20: mol_type = other DNA
tctttgcctgattagatata

SEQ ID NO: 46728 - DNA, 20 bp, synthetic construct
  misc_feature 1..20: note = chemically synthesized
  source 1..20: mol_type = other DNA
gcctgattagatataaagac

SEQ ID NO: 46729 - DNA, 20 bp, synthetic construct
  misc_feature 1..20: note = chemically synthesized
  source 1..20: mol_type = other DNA
atataaagacaagttaaaca

SEQ ID NO: 46730 - DNA, 20 bp, synthetic construct
  misc_feature 1..20: note = chemically synthesized
  source 1..20: mol_type = other DNA
agacaagttaaacacagcat

SEQ ID NO: 46731 - DNA, 20 bp, synthetic construct
  misc_feature 1..20: note = chemically synthesized
  source 1..20: mol_type = other DNA
ttaaacacagcattagacta

SEQ ID NO: 46732 - DNA, 20 bp, synthetic construct
  misc_feature 1..20: note = chemically synthesized
  source 1..20: mol_type = other DNA
acagcattagactatagatc

SEQ ID NO: 46733 - DNA, 20 bp, synthetic construct
  misc_feature 1..20: note = chemically synthesized
  source 1..20: mol_type = other DNA
actatagatcaagcctgtgc

SEQ ID NO: 46734 - DNA, 20 bp, synthetic construct
  misc_feature 1..20: note = chemically synthesized
  source 1..20: mol_type = other DNA
gacacaaatgacctaatgcc

SEQ ID NO: 46735 - DNA, 20 bp, synthetic construct
  misc_feature 1..20: note = chemically synthesized
  source 1..20: mol_type = other DNA
aaatgacctaatgcccagca

SEQ ID NO: 46736 - DNA, 20 bp, synthetic construct
  misc_feature 1..20: note = chemically synthesized
  source 1..20: mol_type = other DNA
aatgacctaatgcccagcac

SEQ ID NO: 46737 - DNA, 20 bp, synthetic construct
  misc_feature 1..20: note = chemically synthesized
  source 1..20: mol_type = other DNA
ctaatgcccagcacgggcca

SEQ ID NO: 46738 - DNA, 20 bp, synthetic construct
  misc_feature 1..20: note = chemically synthesized
  source 1..20: mol_type = other DNA
ctcctatcctcttgcttgaa

SEQ ID NO: 46739 - DNA, 20 bp, synthetic construct
  misc_feature 1..20: note = chemically synthesized
  source 1..20: mol_type = other DNA
cctatcctcttgcttgaaca

SEQ ID NO: 46740 - DNA, 20 bp, synthetic construct
  misc_feature 1..20: note = chemically synthesized
  source 1..20: mol_type = other DNA
atcctcttgcttgaacagag

SEQ ID NO: 46741 - DNA, 20 bp, synthetic construct
  misc_feature 1..20: note = chemically synthesized
  source 1..20: mol_type = other DNA
cacttctcccccaacactat

SEQ ID NO: 46742 - DNA, 20 bp, synthetic construct
  misc_feature 1..20: note = chemically synthesized
  source 1..20: mol_type = other DNA
cccaacactattagatgttc

SEQ ID NO: 46743 - DNA, 20 bp, synthetic construct
  misc_feature 1..20: note = chemically synthesized
  source 1..20: mol_type = other DNA
gatgttctggcataattttg

SEQ ID NO: 46744 - DNA, 20 bp, synthetic construct
  misc_feature 1..20: note = chemically synthesized
  source 1..20: mol_type = other DNA
ggcataattttgtagatatg

SEQ ID NO: 46745 - DNA, 20 bp, synthetic construct
  misc_feature 1..20: note = chemically synthesized
  source 1..20: mol_type = other DNA
gcataattttgtagatatgt

SEQ ID NO: 46746 - DNA, 20 bp, synthetic construct
  misc_feature 1..20: note = chemically synthesized
  source 1..20: mol_type = other DNA
tagatatgtaggatttgaca

SEQ ID NO: 46747 - DNA, 20 bp, synthetic construct
  misc_feature 1..20: note = chemically synthesized
  source 1..20: mol_type = other DNA
tggactattgttcaatgatt

SEQ ID NO: 46748 - DNA, 20 bp, synthetic construct
  misc_feature 1..20: note = chemically synthesized
  source 1..20: mol_type = other DNA
gactattgttcaatgattca

SEQ ID NO: 46749 - DNA, 20 bp, synthetic construct
  misc_feature 1..20: note = chemically synthesized
  source 1..20: mol_type = other DNA
actattgttcaatgattcag

SEQ ID NO: 46750 - DNA, 20 bp, synthetic construct
  misc_feature 1..20: note = chemically synthesized
  source 1..20: mol_type = other DNA
cagaggaaatctcctttgtt

SEQ ID NO: 46751 - DNA, 20 bp, synthetic construct
  misc_feature 1..20: note = chemically synthesized
  source 1..20: mol_type = other DNA
gaaatctcctttgttcagat

SEQ ID NO: 46752 - DNA, 20 bp, synthetic construct
  misc_feature 1..20: note = chemically synthesized
  source 1..20: mol_type = other DNA
taagtacactgactactaaa

SEQ ID NO: 46753 - DNA, 20 bp, synthetic construct
  misc_feature 1..20: note = chemically synthesized
  source 1..20: mol_type = other DNA
actaaatggattaaaaaaca

SEQ ID NO: 46754 - DNA, 20 bp, synthetic construct
  misc_feature 1..20: note = chemically synthesized
  source 1..20: mol_type = other DNA
aaaaacacagtaataaaacc

SEQ ID NO: 46755 - DNA, 20 bp, synthetic construct
  misc_feature 1..20: note = chemically synthesized
  source 1..20: mol_type = other DNA
cagttttccccttacttccc

SEQ ID NO: 46756 - DNA, 20 bp, synthetic construct
  misc_feature 1..20: note = chemically synthesized
  source 1..20: mol_type = other DNA
ttcttattctgctttcttcc

SEQ ID NO: 46757 - DNA, 20 bp, synthetic construct
  misc_feature 1..20: note = chemically synthesized
  source 1..20: mol_type = other DNA
gctttcttccaagttgatgc

SEQ ID NO: 46758 - DNA, 20 bp, synthetic construct
  misc_feature 1..20: note = chemically synthesized
  source 1..20: mol_type = other DNA
tcttccaagttgatgctgga

SEQ ID NO: 46759 - DNA, 20 bp, synthetic construct
  misc_feature 1..20: note = chemically synthesized
  source 1..20: mol_type = other DNA
ttccaagttgatgctggata

SEQ ID NO: 46760 - DNA, 20 bp, synthetic construct
  misc_feature 1..20: note = chemically synthesized
  source 1..20: mol_type = other DNA
tccaagttgatgctggatag

SEQ ID NO: 46761 - DNA, 20 bp, synthetic construct
  misc_feature 1..20: note = chemically synthesized
  source 1..20: mol_type = other DNA
gtgtttatttctattctaaa

SEQ ID NO: 46762 - DNA, 20 bp, synthetic construct
  misc_feature 1..20: note = chemically synthesized
  source 1..20: mol_type = other DNA
attctaaaaagtgatgaaat

SEQ ID NO: 46763 - DNA, 20 bp, synthetic construct
  misc_feature 1..20: note = chemically synthesized
  source 1..20: mol_type = other DNA
taaaaagtgatgaaattggc

SEQ ID NO: 46764 - DNA, 20 bp, synthetic construct
  misc_feature 1..20: note = chemically synthesized
  source 1..20: mol_type = other DNA
aaaaagtgatgaaattggcc

SEQ ID NO: 46765 - DNA, 20 bp, synthetic construct
  misc_feature 1..20: note = chemically synthesized
  source 1..20: mol_type = other DNA
gtgatgaaattggccgggcg

SEQ ID NO: 46766 - DNA, 20 bp, synthetic construct
  misc_feature 1..20: note = chemically synthesized
  source 1..20: mol_type = other DNA
atgaaattggccgggcgcgg

SEQ ID NO: 46767 - DNA, 20 bp, synthetic construct
  misc_feature 1..20: note = chemically synthesized
  source 1..20: mol_type = other DNA
gtggctcacacctgtaatcc

SEQ ID NO: 46768 - DNA, 20 bp, synthetic construct
  misc_feature 1..20: note = chemically synthesized
  source 1..20: mol_type = other DNA
cacctgtaatcccagcactt

SEQ ID NO: 46769 - DNA, 20 bp, synthetic construct
  misc_feature 1..20: note = chemically synthesized
  source 1..20: mol_type = other DNA
acctgtaatcccagcacttt

SEQ ID NO: 46770 - DNA, 20 bp, synthetic construct
  misc_feature 1..20: note = chemically synthesized
  source 1..20: mol_type = other DNA
ctgtaatcccagcactttgg

SEQ ID NO: 46771 - DNA, 20 bp, synthetic construct
  misc_feature 1..20: note = chemically synthesized
  source 1..20: mol_type = other DNA
tgtaatcccagcactttggg

SEQ ID NO: 46772 - DNA, 20 bp, synthetic construct
  misc_feature 1..20: note = chemically synthesized
  source 1..20: mol_type = other DNA
tcccagcactttgggaggct

SEQ ID NO: 46773 - DNA, 20 bp, synthetic construct
  misc_feature 1..20: note = chemically synthesized
  source 1..20: mol_type = other DNA
cccagcactttgggaggctg

SEQ ID NO: 46774 - DNA, 20 bp, synthetic construct
  misc_feature 1..20: note = chemically synthesized
  source 1..20: mol_type = other DNA
agcactttgggaggctgagg

SEQ ID NO: 46775 - DNA, 20 bp, synthetic construct
  misc_feature 1..20: note = chemically synthesized
  source 1..20: mol_type = other DNA
gcactttgggaggctgaggt

SEQ ID NO: 46776 - DNA, 20 bp, synthetic construct
  misc_feature 1..20: note = chemically synthesized
  source 1..20: mol_type = other DNA
ctttgggaggctgaggtggg

SEQ ID NO: 46777 - DNA, 20 bp, synthetic construct
  misc_feature 1..20: note = chemically synthesized
  source 1..20: mol_type = other DNA
ggctgaggtgggcggatcac

SEQ ID NO: 46778 - DNA, 20 bp, synthetic construct
  misc_feature 1..20: note = chemically synthesized
  source 1..20: mol_type = other DNA
gctgaggtgggcggatcacg

SEQ ID NO: 46779 - DNA, 20 bp, synthetic construct
  misc_feature 1..20: note = chemically synthesized
  source 1..20: mol_type = other DNA
aggtgggcggatcacgaggt

SEQ ID NO: 46780 - DNA, 20 bp, synthetic construct
  misc_feature 1..20: note = chemically synthesized
  source 1..20: mol_type = other DNA
ggtgggcggatcacgaggtc

SEQ ID NO: 46781 - DNA, 20 bp, synthetic construct
  misc_feature 1..20: note = chemically synthesized
  source 1..20: mol_type = other DNA
tgggcggatcacgaggtcag

SEQ ID NO: 46782 - DNA, 20 bp, synthetic construct
  misc_feature 1..20: note = chemically synthesized
  source 1..20: mol_type = other DNA
gatcacgaggtcaggagatc

SEQ ID NO: 46783 - DNA, 20 bp, synthetic construct
  misc_feature 1..20: note = chemically synthesized
  source 1..20: mol_type = other DNA
tcaggagatcaagaccatcc

SEQ ID NO: 46784 - DNA, 20 bp, synthetic construct
  misc_feature 1..20: note = chemically synthesized
  source 1..20: mol_type = other DNA
caagaccatcctggctaaca

SEQ ID NO: 46785 - DNA, 20 bp, synthetic construct
  misc_feature 1..20: note = chemically synthesized
  source 1..20: mol_type = other DNA
ctactaaaaatacaaaaaat

SEQ ID NO: 46786 - DNA, 20 bp, synthetic construct
  misc_feature 1..20: note = chemically synthesized
  source 1..20: mol_type = other DNA
taaaaatacaaaaaattagc

SEQ ID NO: 46787 - DNA, 20 bp, synthetic construct
  misc_feature 1..20: note = chemically synthesized
  source 1..20: mol_type = other DNA
aaaatacaaaaaattagcca

SEQ ID NO: 46788 - DNA, 20 bp, synthetic construct
  misc_feature 1..20: note = chemically synthesized
  source 1..20: mol_type = other DNA
tacaaaaaattagccagaga

SEQ ID NO: 46789 - DNA, 20 bp, synthetic construct
  misc_feature 1..20: note = chemically synthesized
  source 1..20: mol_type = other DNA
aaaaaattagccagagacag

SEQ ID NO: 46790 - DNA, 20 bp, synthetic construct
  misc_feature 1..20: note = chemically synthesized
  source 1..20: mol_type = other DNA
aaattagccagagacagtgg

SEQ ID NO: 46791 - DNA, 20 bp, synthetic construct
  misc_feature 1..20: note = chemically synthesized
  source 1..20: mol_type = other DNA
aattagccagagacagtggc

SEQ ID NO: 46792 - DNA, 20 bp, synthetic construct
  misc_feature 1..20: note = chemically synthesized
  source 1..20: mol_type = other DNA
gagacagtggcgggtgcctg

SEQ ID NO: 46793 - DNA, 20 bp, synthetic construct
  misc_feature 1..20: note = chemically synthesized
  source 1..20: mol_type = other DNA
gtggcgggtgcctgtagtcc

SEQ ID NO: 46794 - DNA, 20 bp, synthetic construct
  misc_feature 1..20: note = chemically synthesized
  source 1..20: mol_type = other DNA
tgcctgtagtcccagctact

SEQ ID NO: 46795 - DNA, 20 bp, synthetic construct
  misc_feature 1..20: note = chemically synthesized
  source 1..20: mol_type = other DNA
gcctgtagtcccagctactc

SEQ ID NO: 46796 - DNA, 20 bp, synthetic construct
  misc_feature 1..20: note = chemically synthesized
  source 1..20: mol_type = other DNA
ctgtagtcccagctactcgg

SEQ ID NO: 46797 - DNA, 20 bp, synthetic construct
  misc_feature 1..20: note = chemically synthesized
  source 1..20: mol_type = other DNA
tgtagtcccagctactcggg

SEQ ID NO: 46798 - DNA, 20 bp, synthetic construct
  misc_feature 1..20: note = chemically synthesized
  source 1..20: mol_type = other DNA
tcccagctactcgggaggct

SEQ ID NO: 46799 - DNA, 20 bp, synthetic construct
  misc_feature 1..20: note = chemically synthesized
  source 1..20: mol_type = other DNA
cccagctactcgggaggctg

SEQ ID NO: 46800 - DNA, 20 bp, synthetic construct
  misc_feature 1..20: note = chemically synthesized
  source 1..20: mol_type = other DNA
agctactcgggaggctgagg

SEQ ID NO: 46801 - DNA, 20 bp, synthetic construct
  misc_feature 1..20: note = chemically synthesized
  source 1..20: mol_type = other DNA
gctactcgggaggctgaggc

SEQ ID NO: 46802 - DNA, 20 bp, synthetic construct
  misc_feature 1..20: note = chemically synthesized
  source 1..20: mol_type = other DNA
tactcgggaggctgaggcag

SEQ ID NO: 46803 - DNA, 20 bp, synthetic construct
  misc_feature 1..20: note = chemically synthesized
  source 1..20: mol_type = other DNA
gggaggctgaggcaggagaa

SEQ ID NO: 46804 - DNA, 20 bp, synthetic construct
  misc_feature 1..20: note = chemically synthesized
  source 1..20: mol_type = other DNA
gcaggagaatggcgtgaacc

SEQ ID NO: 46805 - DNA, 20 bp, synthetic construct
  misc_feature 1..20: note = chemically synthesized
  source 1..20: mol_type = other DNA
caggagaatggcgtgaacct

SEQ ID NO: 46806 - DNA, 20 bp, synthetic construct
  misc_feature 1..20: note = chemically synthesized
  source 1..20: mol_type = other DNA
ggagaatggcgtgaacctgg

SEQ ID NO: 46807 - DNA, 20 bp, synthetic construct
  misc_feature 1..20: note = chemically synthesized
  source 1..20: mol_type = other DNA
gagaatggcgtgaacctggg

SEQ ID NO: 46808 - DNA, 20 bp, synthetic construct
  misc_feature 1..20: note = chemically synthesized
  source 1..20: mol_type = other DNA
aatggcgtgaacctgggagg

SEQ ID NO: 46809 - DNA, 20 bp, synthetic construct
  misc_feature 1..20: note = chemically synthesized
  source 1..20: mol_type = other DNA
tggcgtgaacctgggaggca

SEQ ID NO: 46810 - DNA, 20 bp, synthetic construct
  misc_feature 1..20: note = chemically synthesized
  source 1..20: mol_type = other DNA
aacctgggaggcagagcttg

SEQ ID NO: 46811 - DNA, 20 bp, synthetic construct
  misc_feature 1..20: note = chemically synthesized
  source 1..20: mol_type = other DNA
tgggaggcagagcttgcggt

SEQ ID NO: 46812 - DNA, 20 bp, synthetic construct
  misc_feature 1..20: note = chemically synthesized
  source 1..20: mol_type = other DNA
gaggcagagcttgcggtgag

SEQ ID NO: 46813 - DNA, 20 bp, synthetic construct
  misc_feature 1..20: note = chemically synthesized
  source 1..20: mol_type = other DNA
ggcagagcttgcggtgagca

SEQ ID NO: 46814 - DNA, 20 bp, synthetic construct
  misc_feature 1..20: note = chemically synthesized
  source 1..20: mol_type = other DNA
gatcgcgccactgcacactc

SEQ ID NO: 46815 - DNA, 20 bp, synthetic construct
  misc_feature 1..20: note = chemically synthesized
  source 1..20: mol_type = other DNA
cgccactgcacactccagcc

SEQ ID NO: 46816 - DNA, 20 bp, synthetic construct
  misc_feature 1..20: note = chemically synthesized
  source 1..20: mol_type = other DNA
gccactgcacactccagcct

SEQ ID NO: 46817 - DNA, 20 bp, synthetic construct
  misc_feature 1..20: note = chemically synthesized
  source 1..20: mol_type = other DNA
acactccagcctgggtgaca

SEQ ID NO: 46818 - DNA, 20 bp, synthetic construct
  misc_feature 1..20: note = chemically synthesized
  source 1..20: mol_type = other DNA
tccagcctgggtgacaaagc

SEQ ID NO: 46819 - DNA, 20 bp, synthetic construct
  misc_feature 1..20: note = chemically synthesized
  source 1..20: mol_type = other DNA
tcaaaaaaaaaaaaaaaaaa

SEQ ID NO: 46820 - DNA, 20 bp, synthetic construct
  misc_feature 1..20: note = chemically synthesized
  source 1..20: mol_type = other DNA
aaaaaaaaaaaaaaaagaaa

SEQ ID NO: 46821 - DNA, 20 bp, synthetic construct
  misc_feature 1..20: note = chemically synthesized
  source 1..20: mol_type = other DNA
aaaaaaaaaaaagaaaaaga

SEQ ID NO: 46822 - DNA, 20 bp, synthetic construct
  misc_feature 1..20: note = chemically synthesized
  source 1..20: mol_type = other DNA
aaaaaaaagaaaaagaaaga

SEQ ID NO: 46823 - DNA, 20 bp, synthetic construct
  misc_feature 1..20: note = chemically synthesized
  source 1..20: mol_type = other DNA
aaaagaaaaagaaagaaaga

SEQ ID NO: 46824 - DNA, 20 bp, synthetic construct
  misc_feature 1..20: note = chemically synthesized
  source 1..20: mol_type = other DNA
atgaaattgtgtattcaatg

SEQ ID NO: 46825 - DNA, 20 bp, synthetic construct
  misc_feature 1..20: note = chemically synthesized
  source 1..20: mol_type = other DNA
tgtgtattcaatgtagtctc

SEQ ID NO: 46826 - DNA, 20 bp, synthetic construct
  misc_feature 1..20: note = chemically synthesized
  source 1..20: mol_type = other DNA
tgtattcaatgtagtctcaa

SEQ ID NO: 46827 - DNA, 20 bp, synthetic construct
  misc_feature 1..20: note = chemically synthesized
  source 1..20: mol_type = other DNA
tctcaagagaattgaaaacc

SEQ ID NO: 46828 - DNA, 20 bp, synthetic construct
  misc_feature 1..20: note = chemically synthesized
  source 1..20: mol_type = other DNA
aagagaattgaaaaccaaga

SEQ ID NO: 46829 - DNA, 20 bp, synthetic construct
  misc_feature 1..20: note = chemically synthesized
  source 1..20: mol_type = other DNA
agagaattgaaaaccaagaa

SEQ ID NO: 46830 - DNA, 20 bp, synthetic construct
  misc_feature 1..20: note = chemically synthesized
  source 1..20: mol_type = other DNA
ttgaaaaccaagaaaggctg

SEQ ID NO: 46831 - DNA, 20 bp, synthetic construct
  misc_feature 1..20: note = chemically synthesized
  source 1..20: mol_type = other DNA
gctgtggcttcttccacata

SEQ ID NO: 46832 - DNA, 20 bp, synthetic construct
  misc_feature 1..20: note = chemically synthesized
  source 1..20: mol_type = other DNA
ggcttcttccacataaagcc

SEQ ID NO: 46833 - DNA, 20 bp, synthetic construct
  misc_feature 1..20: note = chemically synthesized
  source 1..20: mol_type = other DNA
cataaagcctggatgaataa

SEQ ID NO: 46834 - DNA, 20 bp, synthetic construct
  misc_feature 1..20: note = chemically synthesized
  source 1..20: mol_type = other DNA
ataaagcctggatgaataac

SEQ ID NO: 46835 - DNA, 20 bp, synthetic construct
  misc_feature 1..20: note = chemically synthesized
  source 1..20: mol_type = other DNA
cattgtcacaactcctgatc

SEQ ID NO: 46836 - DNA, 20 bp, synthetic construct
  misc_feature 1..20: note = chemically synthesized
  source 1..20: mol_type = other DNA
attgtcacaactcctgatcc

SEQ ID NO: 46837 - DNA, 20 bp, synthetic construct
  misc_feature 1..20: note = chemically synthesized
  source 1..20: mol_type = other DNA
actcctgatccaggaattga

SEQ ID NO: 46838 - DNA, 20 bp, synthetic construct
  misc_feature 1..20: note = chemically synthesized
  source 1..20: mol_type = other DNA
tgatccaggaattgatggct

SEQ ID NO: 46839 - DNA, 20 bp, synthetic construct
  misc_feature 1..20: note = chemically synthesized
  source 1..20: mol_type = other DNA
ttcgtaattcttatcctttt

SEQ ID NO: 46840 - DNA, 20 bp, synthetic construct
  misc_feature 1..20: note = chemically synthesized
  source 1..20: mol_type = other DNA
tgtaacttattcctatttgt

SEQ ID NO: 46841 - DNA, 20 bp, synthetic construct
  misc_feature 1..20: note = chemically synthesized
  source 1..20: mol_type = other DNA
tattcctatttgtcagcatt

SEQ ID NO: 46842 - DNA, 20 bp, synthetic construct
  misc_feature 1..20: note = chemically synthesized
  source 1..20: mol_type = other DNA
attcctatttgtcagcattc

SEQ ID NO: 46843 - DNA, 20 bp, synthetic construct
  misc_feature 1..20: note = chemically synthesized
  source 1..20: mol_type = other DNA
tttgtcagcattcaggttat

SEQ ID NO: 46844 - DNA, 20 bp, synthetic construct
  misc_feature 1..20: note = chemically synthesized
  source 1..20: mol_type = other DNA
gtcagcattcaggttattag

SEQ ID NO: 46845 - DNA, 20 bp, synthetic construct
  misc_feature 1..20: note = chemically synthesized
  source 1..20: mol_type = other DNA
ttcaggttattagcggctgc

SEQ ID NO: 46846 - DNA, 20 bp, synthetic construct
  misc_feature 1..20: note = chemically synthesized
  source 1..20: mol_type = other DNA
gttattagcggctgctggcg

SEQ ID NO: 46847 - DNA, 20 bp, synthetic construct
  misc_feature 1..20: note = chemically synthesized
  source 1..20: mol_type = other DNA
cggctgctggcgaagtcctt

SEQ ID NO: 46848 - DNA, 20 bp, synthetic construct
  misc_feature 1..20: note = chemically synthesized
  source 1..20: mol_type = other DNA
ttgagaaataaactgcacac

SEQ ID NO: 46849 - DNA, 20 bp, synthetic construct
  misc_feature 1..20: note = chemically synthesized
  source 1..20: mol_type = other DNA
gaaataaactgcacactgga

SEQ ID NO: 46850 - DNA, 20 bp, synthetic construct
  misc_feature 1..20: note = chemically synthesized
  source 1..20: mol_type = other DNA
ataaactgcacactggatgg

SEQ ID NO: 46851 - DNA, 20 bp, synthetic construct
  misc_feature 1..20: note = chemically synthesized
  source 1..20: mol_type = other DNA
taaactgcacactggatggt

SEQ ID NO: 46852 - DNA, 20 bp, synthetic construct
  misc_feature 1..20: note = chemically synthesized
  source 1..20: mol_type = other DNA
aaactgcacactggatggtg

SEQ ID NO: 46853 - DNA, 20 bp, synthetic construct
  misc_feature 1..20: note = chemically synthesized
  source 1..20: mol_type = other DNA
aactgcacactggatggtgg

SEQ ID NO: 46854 - DNA, 20 bp, synthetic construct
  misc_feature 1..20: note = chemically synthesized
  source 1..20: mol_type = other DNA
tgcacactggatggtggggg

SEQ ID NO: 46855 - DNA, 20 bp, synthetic construct
  misc_feature 1..20: note = chemically synthesized
  source 1..20: mol_type = other DNA
actggatggtgggggtagtg

SEQ ID NO: 46856 - DNA, 20 bp, synthetic construct
  misc_feature 1..20: note = chemically synthesized
  source 1..20: mol_type = other DNA
ctggatggtgggggtagtgt

SEQ ID NO: 46857 - DNA, 20 bp, synthetic construct
  misc_feature 1..20: note = chemically synthesized
  source 1..20: mol_type = other DNA
gtgggggtagtgtaggaaaa

SEQ ID NO: 46858 - DNA, 20 bp, synthetic construct
  misc_feature 1..20: note = chemically synthesized
  source 1..20: mol_type = other DNA
gggggtagtgtaggaaaatg

SEQ ID NO: 46859 - DNA, 20 bp, synthetic construct
  misc_feature 1..20: note = chemically synthesized
  source 1..20: mol_type = other DNA
ggggtagtgtaggaaaatgg

SEQ ID NO: 46860 - DNA, 20 bp, synthetic construct
  misc_feature 1..20: note = chemically synthesized
  source 1..20: mol_type = other DNA
gggtagtgtaggaaaatgga

SEQ ID NO: 46861 - DNA, 20 bp, synthetic construct
  misc_feature 1..20: note = chemically synthesized
  source 1..20: mol_type = other DNA
ggtagtgtaggaaaatggag

SEQ ID NO: 46862 - DNA, 20 bp, synthetic construct
  misc_feature 1..20: note = chemically synthesized
  source 1..20: mol_type = other DNA
agtgtaggaaaatggagggg

SEQ ID NO: 46863 - DNA, 20 bp, synthetic construct
  misc_feature 1..20: note = chemically synthesized
  source 1..20: mol_type = other DNA
gtgtaggaaaatggagggga

SEQ ID NO: 46864 - DNA, 20 bp, synthetic construct
  misc_feature 1..20: note = chemically synthesized
  source 1..20: mol_type = other DNA
taggaaaatggaggggaagg

SEQ ID NO: 46865 - DNA, 20 bp, synthetic construct
  misc_feature 1..20: note = chemically synthesized
  source 1..20: mol_type = other DNA
aaatggaggggaaggaagta

SEQ ID NO: 46866 - DNA, 20 bp, synthetic construct
  misc_feature 1..20: note = chemically synthesized
  source 1..20: mol_type = other DNA
aggaagtaaagtttcaaatt

SEQ ID NO: 46867 - DNA, 20 bp, synthetic construct
  misc_feature 1..20: note = chemically synthesized
  source 1..20: mol_type = other DNA
agtttcaaattaagcctgaa

SEQ ID NO: 46868 - DNA, 20 bp, synthetic construct
  misc_feature 1..20: note = chemically synthesized
  source 1..20: mol_type = other DNA
caaattaagcctgaacagca

SEQ ID NO: 46869 - DNA, 20 bp, synthetic construct
  misc_feature 1..20: note = chemically synthesized
  source 1..20: mol_type = other DNA
ctgaacagcaaagttcccct

SEQ ID NO: 46870 - DNA, 20 bp, synthetic construct
  misc_feature 1..20: note = chemically synthesized
  source 1..20: mol_type = other DNA
aacagcaaagttcccctgag

SEQ ID NO: 46871 - DNA, 20 bp, synthetic construct
  misc_feature 1..20: note = chemically synthesized
  source 1..20: mol_type = other DNA
acagcaaagttcccctgaga

SEQ ID NO: 46872 - DNA, 20 bp, synthetic construct
  misc_feature 1..20: note = chemically synthesized
  source 1..20: mol_type = other DNA
gttcccctgagaaggccacc

SEQ ID NO: 46873 - DNA, 20 bp, synthetic construct
  misc_feature 1..20: note = chemically synthesized
  source 1..20: mol_type = other DNA
gaaggccacctggattctat

SEQ ID NO: 46874 - DNA, 20 bp, synthetic construct
  misc_feature 1..20: note = chemically synthesized
  source 1..20: mol_type = other DNA
ccttgcccaaaccccacccc

SEQ ID NO: 46875 - DNA, 20 bp, synthetic construct
  misc_feature 1..20: note = chemically synthesized
  source 1..20: mol_type = other DNA
ttgcccaaaccccacccctg

SEQ ID NO: 46876 - DNA, 20 bp, synthetic construct
  misc_feature 1..20: note = chemically synthesized
  source 1..20: mol_type = other DNA
cacaacccacccttgaccaa

SEQ ID NO: 46877 - DNA, 20 bp, synthetic construct
  misc_feature 1..20: note = chemically synthesized
  source 1..20: mol_type = other DNA
accaatagattcattttact

SEQ ID NO: 46878 - DNA, 20 bp, synthetic construct
  misc_feature 1..20: note = chemically synthesized
  source 1..20: mol_type = other DNA
ccaatagattcattttactg

SEQ ID NO: 46879 - DNA, 20 bp, synthetic construct
  misc_feature 1..20: note = chemically synthesized
  source 1..20: mol_type = other DNA
caatagattcattttactga

SEQ ID NO: 46880 - DNA, 20 bp, synthetic construct
  misc_feature 1..20: note = chemically synthesized
  source 1..20: mol_type = other DNA
atagattcattttactgagg

SEQ ID NO: 46881 - DNA, 20 bp, synthetic construct
  misc_feature 1..20: note = chemically synthesized
  source 1..20: mol_type = other DNA
tagattcattttactgaggg

SEQ ID NO: 46882 - DNA, 20 bp, synthetic construct
  misc_feature 1..20: note = chemically synthesized
  source 1..20: mol_type = other DNA
tcattttactgagggaggca

SEQ ID NO: 46883 - DNA, 20 bp, synthetic construct
  misc_feature 1..20: note = chemically synthesized
  source 1..20: mol_type = other DNA
cattttactgagggaggcaa

SEQ ID NO: 46884 - DNA, 20 bp, synthetic construct
  misc_feature 1..20: note = chemically synthesized
  source 1..20: mol_type = other DNA
attttactgagggaggcaaa

SEQ ID NO: 46885 - DNA, 20 bp, synthetic construct
  misc_feature 1..20: note = chemically synthesized
  source 1..20: mol_type = other DNA
tactgagggaggcaaagggc

SEQ ID NO: 46886 - DNA, 20 bp, synthetic construct
  misc_feature 1..20: note = chemically synthesized
  source 1..20: mol_type = other DNA
ggaggcaaagggctggtcaa

SEQ ID NO: 46887 - DNA, 20 bp, synthetic construct
  misc_feature 1..20: note = chemically synthesized
  source 1..20: mol_type = other DNA
ggtcaatagattcatttcac

SEQ ID NO: 46888 - DNA, 20 bp, synthetic construct
  misc_feature 1..20: note = chemically synthesized
  source 1..20: mol_type = other DNA
gtcaatagattcatttcact

SEQ ID NO: 46889 - DNA, 20 bp, synthetic construct
  misc_feature 1..20: note = chemically synthesized
  source 1..20: mol_type = other DNA
caatagattcatttcactgg

SEQ ID NO: 46890 - DNA, 20 bp, synthetic construct
  misc_feature 1..20: note = chemically synthesized
  source 1..20: mol_type = other DNA
atagattcatttcactggga

SEQ ID NO: 46891 - DNA, 20 bp, synthetic construct
  misc_feature 1..20: note = chemically synthesized
  source 1..20: mol_type = other DNA
tagattcatttcactgggag

SEQ ID NO: 46892 - DNA, 20 bp, synthetic construct
  misc_feature 1..20: note = chemically synthesized
  source 1..20: mol_type = other DNA
tcatttcactgggagaggca

SEQ ID NO: 46893 - DNA, 20 bp, synthetic construct
  misc_feature 1..20: note = chemically synthesized
  source 1..20: mol_type = other DNA
catttcactgggagaggcaa

SEQ ID NO: 46894 - DNA, 20 bp, synthetic construct
  misc_feature 1..20: note = chemically synthesized
  source 1..20: mol_type = other DNA
atttcactgggagaggcaaa

SEQ ID NO: 46895 - DNA, 20 bp, synthetic construct
  misc_feature 1..20: note = chemically synthesized
  source 1..20: mol_type = other DNA
cactgggagaggcaaagggc

SEQ ID NO: 46896 - DNA, 20 bp, synthetic construct
  misc_feature 1..20: note = chemically synthesized
  source 1..20: mol_type = other DNA
actgggagaggcaaagggct

SEQ ID NO: 46897 - DNA, 20 bp, synthetic construct
  misc_feature 1..20: note = chemically synthesized
  source 1..20: mol_type = other DNA
ctgggagaggcaaagggctg

SEQ ID NO: 46898 - DNA, 20 bp, synthetic construct
  misc_feature 1..20: note = chemically synthesized
  source 1..20: mol_type = other DNA
tgggagaggcaaagggctgg

SEQ ID NO: 46899 - DNA, 20 bp, synthetic construct
  misc_feature 1..20: note = chemically synthesized
  source 1..20: mol_type = other DNA
agaggcaaagggctgggggc

SEQ ID NO: 46900 - DNA, 20 bp, synthetic construct
  misc_feature 1..20: note = chemically synthesized
  source 1..20: mol_type = other DNA
aggcaaagggctgggggcca

SEQ ID NO: 46901 - DNA, 20 bp, synthetic construct
  misc_feature 1..20: note = chemically synthesized
  source 1..20: mol_type = other DNA
gcaaagggctgggggccaga

SEQ ID NO: 46902 - DNA, 20 bp, synthetic construct
  misc_feature 1..20: note = chemically synthesized
  source 1..20: mol_type = other DNA
caaagggctgggggccagag

SEQ ID NO: 46903 - DNA, 20 bp, synthetic construct
  misc_feature 1..20: note = chemically synthesized
  source 1..20: mol_type = other DNA
aagggctgggggccagagag

SEQ ID NO: 46904 - DNA, 20 bp, synthetic construct
  misc_feature 1..20: note = chemically synthesized
  source 1..20: mol_type = other DNA
ggctgggggccagagaggag

SEQ ID NO: 46905 - DNA, 20 bp, synthetic construct
  misc_feature 1..20: note = chemically synthesized
  source 1..20: mol_type = other DNA
ggccagagaggagaagtaaa

SEQ ID NO: 46906 - DNA, 20 bp, synthetic construct
  misc_feature 1..20: note = chemically synthesized
  source 1..20: mol_type = other DNA
gaagtaaaaagccacacatg

SEQ ID NO: 46907 - DNA, 20 bp, synthetic construct
  misc_feature 1..20: note = chemically synthesized
  source 1..20: mol_type = other DNA
gtaaaaagccacacatgaag

SEQ ID NO: 46908 - DNA, 20 bp, synthetic construct
  misc_feature 1..20: note = chemically synthesized
  source 1..20: mol_type = other DNA
ccacacatgaagcagcaatg

SEQ ID NO: 46909 - DNA, 20 bp, synthetic construct
  misc_feature 1..20: note = chemically synthesized
  source 1..20: mol_type = other DNA
cacacatgaagcagcaatgc

SEQ ID NO: 46910 - DNA, 20 bp, synthetic construct
  misc_feature 1..20: note = chemically synthesized
  source 1..20: mol_type = other DNA
cagcaatgcaggcatgcttc

SEQ ID NO: 46911 - DNA, 20 bp, synthetic construct
  misc_feature 1..20: note = chemically synthesized
  source 1..20: mol_type = other DNA
tctggctcatctgtgatcac

SEQ ID NO: 46912 - DNA, 20 bp, synthetic construct
  misc_feature 1..20: note = chemically synthesized
  source 1..20: mol_type = other DNA
ctggctcatctgtgatcacc

SEQ ID NO: 46913 - DNA, 20 bp, synthetic construct
  misc_feature 1..20: note = chemically synthesized
  source 1..20: mol_type = other DNA
tgtgatcaccaggaaactcc

SEQ ID NO: 46914 - DNA, 20 bp, synthetic construct
  misc_feature 1..20: note = chemically synthesized
  source 1..20: mol_type = other DNA
aactcccagatctgacactg

SEQ ID NO: 46915 - DNA, 20 bp, synthetic construct
  misc_feature 1..20: note = chemically synthesized
  source 1..20: mol_type = other DNA
tagtgcatttcactgctgac

SEQ ID NO: 46916 - DNA, 20 bp, synthetic construct
  misc_feature 1..20: note = chemically synthesized
  source 1..20: mol_type = other DNA
tgcatttcactgctgacaag

SEQ ID NO: 46917 - DNA, 20 bp, synthetic construct
  misc_feature 1..20: note = chemically synthesized
  source 1..20: mol_type = other DNA
gcatttcactgctgacaaga

SEQ ID NO: 46918 - DNA, 20 bp, synthetic construct
  misc_feature 1..20: note = chemically synthesized
  source 1..20: mol_type = other DNA
gacaagaaggctgctgccac

SEQ ID NO: 46919 - DNA, 20 bp, synthetic construct
  misc_feature 1..20: note = chemically synthesized
  source 1..20: mol_type = other DNA
gctgctgccaccagcctgtg

SEQ ID NO: 46920 - DNA, 20 bp, synthetic construct
  misc_feature 1..20: note = chemically synthesized
  source 1..20: mol_type = other DNA
ctgccaccagcctgtgaagc

SEQ ID NO: 46921 - DNA, 20 bp, synthetic construct
  misc_feature 1..20: note = chemically synthesized
  source 1..20: mol_type = other DNA
tgccaccagcctgtgaagca

SEQ ID NO: 46922 - DNA, 20 bp, synthetic construct
  misc_feature 1..20: note = chemically synthesized
  source 1..20: mol_type = other DNA
ccagcctgtgaagcaaggtt

SEQ ID NO: 46923 - DNA, 20 bp, synthetic construct
  misc_feature 1..20: note = chemically synthesized
  source 1..20: mol_type = other DNA
cagcctgtgaagcaaggtta

SEQ ID NO: 46924 - DNA, 20 bp, synthetic construct
  misc_feature 1..20: note = chemically synthesized
  source 1..20: mol_type = other DNA
ctgtgaagcaaggttaaggt

SEQ ID NO: 46925 - DNA, 20 bp, synthetic construct
  misc_feature 1..20: note = chemically synthesized
  source 1..20: mol_type = other DNA
tgaagcaaggttaaggtgag

SEQ ID NO: 46926 - DNA, 20 bp, synthetic construct
  misc_feature 1..20: note = chemically synthesized
  source 1..20: mol_type = other DNA
gaagcaaggttaaggtgaga

SEQ ID NO: 46927 - DNA, 20 bp, synthetic construct
  misc_feature 1..20: note = chemically synthesized
  source 1..20: mol_type = other DNA
caaggttaaggtgagaaggc

SEQ ID NO: 46928 - DNA, 20 bp, synthetic construct
  misc_feature 1..20: note = chemically synthesized
  source 1..20: mol_type = other DNA
aggttaaggtgagaaggctg

SEQ ID NO: 46929 - DNA, 20 bp, synthetic construct
  misc_feature 1..20: note = chemically synthesized
  source 1..20: mol_type = other DNA
ggttaaggtgagaaggctgg

SEQ ID NO: 46930 - DNA, 20 bp, synthetic construct
  misc_feature 1..20: note = chemically synthesized
  source 1..20: mol_type = other DNA
aaggtgagaaggctggaggt

SEQ ID NO: 46931 - DNA, 20 bp, synthetic construct
  misc_feature 1..20: note = chemically synthesized
  source 1..20: mol_type = other DNA
gaaggctggaggtgagattc

SEQ ID NO: 46932 - DNA, 20 bp, synthetic construct
  misc_feature 1..20: note = chemically synthesized
  source 1..20: mol_type = other DNA
aaggctggaggtgagattct

SEQ ID NO: 46933 - DNA, 20 bp, synthetic construct
  misc_feature 1..20: note = chemically synthesized
  source 1..20: mol_type = other DNA
gctggaggtgagattctggg

SEQ ID NO: 46934 - DNA, 20 bp, synthetic construct
  misc_feature 1..20: note = chemically synthesized
  source 1..20: mol_type = other DNA
ctggaggtgagattctgggc

SEQ ID NO: 46935 - DNA, 20 bp, synthetic construct
  misc_feature 1..20: note = chemically synthesized
  source 1..20: mol_type = other DNA
gaggtgagattctgggcagg

SEQ ID NO: 46936 - DNA, 20 bp, synthetic construct
  misc_feature 1..20: note = chemically synthesized
  source 1..20: mol_type = other DNA
aggtgagattctgggcaggt

SEQ ID NO: 46937 - DNA, 20 bp, synthetic construct
  misc_feature 1..20: note = chemically synthesized
  source 1..20: mol_type = other DNA
gattctgggcaggtaggtac

SEQ ID NO: 46938 - DNA, 20 bp, synthetic construct
  misc_feature 1..20: note = chemically synthesized
  source 1..20: mol_type = other DNA
tctgggcaggtaggtactgg

SEQ ID NO: 46939 - DNA, 20 bp, synthetic construct
  misc_feature 1..20: note = chemically synthesized
  source 1..20: mol_type = other DNA
ggcaggtaggtactggaagc

SEQ ID NO: 46940 - DNA, 20 bp, synthetic construct
  misc_feature 1..20: note = chemically synthesized
  source 1..20: mol_type = other DNA
gcaggtaggtactggaagcc

SEQ ID NO: 46941 - DNA, 20 bp, synthetic construct
  misc_feature 1..20: note = chemically synthesized
  source 1..20: mol_type = other DNA
taggtactggaagccgggac

SEQ ID NO: 46942 - DNA, 20 bp, synthetic construct
  misc_feature 1..20: note = chemically synthesized
  source 1..20: mol_type = other DNA
aggtactggaagccgggaca

SEQ ID NO: 46943 - DNA, 20 bp, synthetic construct
  misc_feature 1..20: note = chemically synthesized
  source 1..20: mol_type = other DNA
ctggaagccgggacaaggtg

SEQ ID NO: 46944 - DNA, 20 bp, synthetic construct
  misc_feature 1..20: note = chemically synthesized
  source 1..20: mol_type = other DNA
aagccgggacaaggtgcaga

SEQ ID NO: 46945 - DNA, 20 bp, synthetic construct
  misc_feature 1..20: note = chemically synthesized
  source 1..20: mol_type = other DNA
agccgggacaaggtgcagaa

SEQ ID NO: 46946 - DNA, 20 bp, synthetic construct
  misc_feature 1..20: note = chemically synthesized
  source 1..20: mol_type = other DNA
cgggacaaggtgcagaaagg

SEQ ID NO: 46947 - DNA, 20 bp, synthetic construct
  misc_feature 1..20: note = chemically synthesized
  source 1..20: mol_type = other DNA
acaaggtgcagaaaggcaga

SEQ ID NO: 46948 - DNA, 20 bp, synthetic construct
  misc_feature 1..20: note = chemically synthesized
  source 1..20: mol_type = other DNA
aaggcagaaagtgtttctga

SEQ ID NO: 46949 - DNA, 20 bp, synthetic construct
  misc_feature 1..20: note = chemically synthesized
  source 1..20: mol_type = other DNA
ggcagaaagtgtttctgaaa

SEQ ID NO: 46950 - DNA, 20 bp, synthetic construct
  misc_feature 1..20: note = chemically synthesized
  source 1..20: mol_type = other DNA
gcagaaagtgtttctgaaag

SEQ ID NO: 46951 - DNA, 20 bp, synthetic construct
  misc_feature 1..20: note = chemically synthesized
  source 1..20: mol_type = other DNA
cagaaagtgtttctgaaaga

SEQ ID NO: 46952 - DNA, 20 bp, synthetic construct
  misc_feature 1..20: note = chemically synthesized
  source 1..20: mol_type = other DNA
agtgtttctgaaagagggat

SEQ ID NO: 46953 - DNA, 20 bp, synthetic construct
  misc_feature 1..20: note = chemically synthesized
  source 1..20: mol_type = other DNA
gattagcccgttgtcttaca

SEQ ID NO: 46954 - DNA, 20 bp, synthetic construct
  misc_feature 1..20: note = chemically synthesized
  source 1..20: mol_type = other DNA
ctgtgattatgactatccca

SEQ ID NO: 46955 - DNA, 20 bp, synthetic construct
  misc_feature 1..20: note = chemically synthesized
  source 1..20: mol_type = other DNA
atgactatcccacagtctcc

SEQ ID NO: 46956 - DNA, 20 bp, synthetic construct
  misc_feature 1..20: note = chemically synthesized
  source 1..20: mol_type = other DNA
gtctcctggttgtctaccca

SEQ ID NO: 46957 - DNA, 20 bp, synthetic construct
  misc_feature 1..20: note = chemically synthesized
  source 1..20: mol_type = other DNA
tggttgtctacccatggacc

SEQ ID NO: 46958 - DNA, 20 bp, synthetic construct
  misc_feature 1..20: note = chemically synthesized
  source 1..20: mol_type = other DNA
gttgtctacccatggaccta

SEQ ID NO: 46959 - DNA, 20 bp, synthetic construct
  misc_feature 1..20: note = chemically synthesized
  source 1..20: mol_type = other DNA
ttgtctacccatggacctag

SEQ ID NO: 46960 - DNA, 20 bp, synthetic construct
  misc_feature 1..20: note = chemically synthesized
  source 1..20: mol_type = other DNA
tggacctagaggtactttga

SEQ ID NO: 46961 - DNA, 20 bp, synthetic construct
  misc_feature 1..20: note = chemically synthesized
  source 1..20: mol_type = other DNA
tagaggtactttgaaagttt

SEQ ID NO: 46962 - DNA, 20 bp, synthetic construct
  misc_feature 1..20: note = chemically synthesized
  source 1..20: mol_type = other DNA
ctttgaaagttttggatatc

SEQ ID NO: 46963 - DNA, 20 bp, synthetic construct
  misc_feature 1..20: note = chemically synthesized
  source 1..20: mol_type = other DNA
tttgaaagttttggatatct

SEQ ID NO: 46964 - DNA, 20 bp, synthetic construct
  misc_feature 1..20: note = chemically synthesized
  source 1..20: mol_type = other DNA
gggctctgactgtgcaataa

SEQ ID NO: 46965 - DNA, 20 bp, synthetic construct
  misc_feature 1..20: note = chemically synthesized
  source 1..20: mol_type = other DNA
ggctctgactgtgcaataat

SEQ ID NO: 46966 - DNA, 20 bp, synthetic construct
  misc_feature 1..20: note = chemically synthesized
  source 1..20: mol_type = other DNA
tgcaataatgggcaacccca

SEQ ID NO: 46967 - DNA, 20 bp, synthetic construct
  misc_feature 1..20: note = chemically synthesized
  source 1..20: mol_type = other DNA
taatgggcaaccccaaagtc

SEQ ID NO: 46968 - DNA, 20 bp, synthetic construct
  misc_feature 1..20: note = chemically synthesized
  source 1..20: mol_type = other DNA
aatgggcaaccccaaagtca

SEQ ID NO: 46969 - DNA, 20 bp, synthetic construct
  misc_feature 1..20: note = chemically synthesized
  source 1..20: mol_type = other DNA
aaccccaaagtcaaggcaca

SEQ ID NO: 46970 - DNA, 20 bp, synthetic construct
  misc_feature 1..20: note = chemically synthesized
  source 1..20: mol_type = other DNA
ccaaagtcaaggcacatggc

SEQ ID NO: 46971 - DNA, 20 bp, synthetic construct
  misc_feature 1..20: note = chemically synthesized
  source 1..20: mol_type = other DNA
aagtcaaggcacatggcaag

SEQ ID NO: 46972 - DNA, 20 bp, synthetic construct
  misc_feature 1..20: note = chemically synthesized
  source 1..20: mol_type = other DNA
agtcaaggcacatggcaaga

SEQ ID NO: 46973 - DNA, 20 bp, synthetic construct
  misc_feature 1..20: note = chemically synthesized
  source 1..20: mol_type = other DNA
aagaaggtgctgatctcctt

SEQ ID NO: 46974 - DNA, 20 bp, synthetic construct
  misc_feature 1..20: note = chemically synthesized
  source 1..20: mol_type = other DNA
ggtgctgatctccttcggaa

SEQ ID NO: 46975 - DNA, 20 bp, synthetic construct
  misc_feature 1..20: note = chemically synthesized
  source 1..20: mol_type = other DNA
cggaaaagctgttatgctca

SEQ ID NO: 46976 - DNA, 20 bp, synthetic construct
  misc_feature 1..20: note = chemically synthesized
  source 1..20: mol_type = other DNA
tatgctcacggatgacctca

SEQ ID NO: 46977 - DNA, 20 bp, synthetic construct
  misc_feature 1..20: note = chemically synthesized
  source 1..20: mol_type = other DNA
atgctcacggatgacctcaa

SEQ ID NO: 46978 - DNA, 20 bp, synthetic construct
  misc_feature 1..20: note = chemically synthesized
  source 1..20: mol_type = other DNA
aaaggcacctttgctacact

SEQ ID NO: 46979 - DNA, 20 bp, synthetic construct
  misc_feature 1..20: note = chemically synthesized
  source 1..20: mol_type = other DNA
tgagtgacctgcactgtaac

SEQ ID NO: 46980 - DNA, 20 bp, synthetic construct
  misc_feature 1..20: note = chemically synthesized
  source 1..20: mol_type = other DNA
gcactgtaacaagctgcacg

SEQ ID NO: 46981 - DNA, 20 bp, synthetic construct
  misc_feature 1..20: note = chemically synthesized
  source 1..20: mol_type = other DNA
acaagctgcacgtggaccct

SEQ ID NO: 46982 - DNA, 20 bp, synthetic construct
  misc_feature 1..20: note = chemically synthesized
  source 1..20: mol_type = other DNA
cgtggaccctgagaacttcc

SEQ ID NO: 46983 - DNA, 20 bp, synthetic construct
  misc_feature 1..20: note = chemically synthesized
  source 1..20: mol_type = other DNA
gaccctgagaacttcctggt

SEQ ID NO: 46984 - DNA, 20 bp, synthetic construct
  misc_feature 1..20: note = chemically synthesized
  source 1..20: mol_type = other DNA
cctgagaacttcctggtgag

SEQ ID NO: 46985 - DNA, 20 bp, synthetic construct
  misc_feature 1..20: note = chemically synthesized
  source 1..20: mol_type = other DNA
agaacttcctggtgagtagt

SEQ ID NO: 46986 - DNA, 20 bp, synthetic construct
  misc_feature 1..20: note = chemically synthesized
  source 1..20: mol_type = other DNA
cacgctttcttctttaccct

SEQ ID NO: 46987 - DNA, 20 bp, synthetic construct
  misc_feature 1..20: note = chemically synthesized
  source 1..20: mol_type = other DNA
acccttagatatttgcacta

SEQ ID NO: 46988 - DNA, 20 bp, synthetic construct
  misc_feature 1..20: note = chemically synthesized
  source 1..20: mol_type = other DNA
cccttagatatttgcactat

SEQ ID NO: 46989 - DNA, 20 bp, synthetic construct
  misc_feature 1..20: note = chemically synthesized
  source 1..20: mol_type = other DNA
tgcactatgggtacttttga

SEQ ID NO: 46990 - DNA, 20 bp, synthetic construct
  misc_feature 1..20: note = chemically synthesized
  source 1..20: mol_type = other DNA
actatgggtacttttgaaag

SEQ ID NO: 46991 - DNA, 20 bp, synthetic construct
  misc_feature 1..20: note = chemically synthesized
  source 1..20: mol_type = other DNA
tatgggtacttttgaaagca

SEQ ID NO: 46992 - DNA, 20 bp, synthetic construct
  misc_feature 1..20: note = chemically synthesized
  source 1..20: mol_type = other DNA
atgggtacttttgaaagcag

SEQ ID NO: 46993 - DNA, 20 bp, synthetic construct
  misc_feature 1..20: note = chemically synthesized
  source 1..20: mol_type = other DNA
ggtacttttgaaagcagagg

SEQ ID NO: 46994 - DNA, 20 bp, synthetic construct
  misc_feature 1..20: note = chemically synthesized
  source 1..20: mol_type = other DNA
gtggctttctcttgtgttat

SEQ ID NO: 46995 - DNA, 20 bp, synthetic construct
  misc_feature 1..20: note = chemically synthesized
  source 1..20: mol_type = other DNA
ctttctcttgtgttatgagt

SEQ ID NO: 46996 - DNA, 20 bp, synthetic construct
  misc_feature 1..20: note = chemically synthesized
  source 1..20: mol_type = other DNA
cttgtgttatgagtcagcta

SEQ ID NO: 46997 - DNA, 20 bp, synthetic construct
  misc_feature 1..20: note = chemically synthesized
  source 1..20: mol_type = other DNA
ttgtgttatgagtcagctat

SEQ ID NO: 46998 - DNA, 20 bp, synthetic construct
  misc_feature 1..20: note = chemically synthesized
  source 1..20: mol_type = other DNA
agctatgggatatgatattt

SEQ ID NO: 46999 - DNA, 20 bp, synthetic construct
  misc_feature 1..20: note = chemically synthesized
  source 1..20: mol_type = other DNA
tatgggatatgatatttcag

SEQ ID NO: 47000 - DNA, 20 bp, synthetic construct
  misc_feature 1..20: note = chemically synthesized
  source 1..20: mol_type = other DNA
gggatatgatatttcagcag

SEQ ID NO: 47001 - DNA, 20 bp, synthetic construct
  misc_feature 1..20: note = chemically synthesized
  source 1..20: mol_type = other DNA
ggatatgatatttcagcagt

SEQ ID NO: 47002 - DNA, 20 bp, synthetic construct
  misc_feature 1..20: note = chemically synthesized
  source 1..20: mol_type = other DNA
tatttcagcagtgggatttt

SEQ ID NO: 47003 - DNA, 20 bp, synthetic construct
  misc_feature 1..20: note = chemically synthesized
  source 1..20: mol_type = other DNA
tttcagcagtgggattttga

SEQ ID NO: 47004 - DNA, 20 bp, synthetic construct
  misc_feature 1..20: note = chemically synthesized
  source 1..20: mol_type = other DNA
taaataacataactaaaatt

SEQ ID NO: 47005 - DNA, 20 bp, synthetic construct
  misc_feature 1..20: note = chemically synthesized
  source 1..20: mol_type = other DNA
ataacataactaaaatttgg

SEQ ID NO: 47006 - DNA, 20 bp, synthetic construct
  misc_feature 1..20: note = chemically synthesized
  source 1..20: mol_type = other DNA
aacataactaaaatttggta

SEQ ID NO: 47007 - DNA, 20 bp, synthetic construct
  misc_feature 1..20: note = chemically synthesized
  source 1..20: mol_type = other DNA
taactaaaatttggtagagc

SEQ ID NO: 47008 - DNA, 20 bp, synthetic construct
  misc_feature 1..20: note = chemically synthesized
  source 1..20: mol_type = other DNA
aactaaaatttggtagagca

SEQ ID NO: 47009 - DNA, 20 bp, synthetic construct
  misc_feature 1..20: note = chemically synthesized
  source 1..20: mol_type = other DNA
agagcaaggactatgaataa

SEQ ID NO: 47010 - DNA, 20 bp, synthetic construct
  misc_feature 1..20: note = chemically synthesized
  source 1..20: mol_type = other DNA
gcaaggactatgaataatgg

SEQ ID NO: 47011 - DNA, 20 bp, synthetic construct
  misc_feature 1..20: note = chemically synthesized
  source 1..20: mol_type = other DNA
caaggactatgaataatgga

SEQ ID NO: 47012 - DNA, 20 bp, synthetic construct
  misc_feature 1..20: note = chemically synthesized
  source 1..20: mol_type = other DNA
gaaggccacttaccatttga

SEQ ID NO: 47013 - DNA, 20 bp, synthetic construct
  misc_feature 1..20: note = chemically synthesized
  source 1..20: mol_type = other DNA
acacatcttataaaaaattc

SEQ ID NO: 47014 - DNA, 20 bp, synthetic construct
  misc_feature 1..20: note = chemically synthesized
  source 1..20: mol_type = other DNA
attctggccaaaatcaaact

SEQ ID NO: 47015 - DNA, 20 bp, synthetic construct
  misc_feature 1..20: note = chemically synthesized
  source 1..20: mol_type = other DNA
aaaatcaaactgagtgtttt

SEQ ID NO: 47016 - DNA, 20 bp, synthetic construct
  misc_feature 1..20: note = chemically synthesized
  source 1..20: mol_type = other DNA
caaactgagtgtttttggat

SEQ ID NO: 47017 - DNA, 20 bp, synthetic construct
  misc_feature 1..20: note = chemically synthesized
  source 1..20: mol_type = other DNA
aaactgagtgtttttggatg

SEQ ID NO: 47018 - DNA, 20 bp, synthetic construct
  misc_feature 1..20: note = chemically synthesized
  source 1..20: mol_type = other DNA
aactgagtgtttttggatga

SEQ ID NO: 47019 - DNA, 20 bp, synthetic construct
  misc_feature 1..20: note = chemically synthesized
  source 1..20: mol_type = other DNA
agtgtttttggatgagggaa

SEQ ID NO: 47020 - DNA, 20 bp, synthetic construct
  misc_feature 1..20: note = chemically synthesized
  source 1..20: mol_type = other DNA
gtttttggatgagggaacag

SEQ ID NO: 47021 - DNA, 20 bp, synthetic construct
  misc_feature 1..20: note = chemically synthesized
  source 1..20: mol_type = other DNA
tggatgagggaacagaagtt

SEQ ID NO: 47022 - DNA, 20 bp, synthetic construct
  misc_feature 1..20: note = chemically synthesized
  source 1..20: mol_type = other DNA
tgagggaacagaagttgaga

SEQ ID NO: 47023 - DNA, 20 bp, synthetic construct
  misc_feature 1..20: note = chemically synthesized
  source 1..20: mol_type = other DNA
agggaacagaagttgagata

SEQ ID NO: 47024 - DNA, 20 bp, synthetic construct
  misc_feature 1..20: note = chemically synthesized
  source 1..20: mol_type = other DNA
agaaaataacatctttcctt

SEQ ID NO: 47025 - DNA, 20 bp, synthetic construct
  misc_feature 1..20: note = chemically synthesized
  source 1..20: mol_type = other DNA
aataacatctttcctttggt

SEQ ID NO: 47026 - DNA, 20 bp, synthetic construct
  misc_feature 1..20: note = chemically synthesized
  source 1..20: mol_type = other DNA
aaattttctataaaaattaa

SEQ ID NO: 47027 - DNA, 20 bp, synthetic construct
  misc_feature 1..20: note = chemically synthesized
  source 1..20: mol_type = other DNA
ttaatagtcacttttctgca

SEQ ID NO: 47028 - DNA, 20 bp, synthetic construct
  misc_feature 1..20: note = chemically synthesized
  source 1..20: mol_type = other DNA
gtcacttttctgcatagtcc

SEQ ID NO: 47029 - DNA, 20 bp, synthetic construct
  misc_feature 1..20: note = chemically synthesized
  source 1..20: mol_type = other DNA
cacttttctgcatagtcctg

SEQ ID NO: 47030 - DNA, 20 bp, synthetic construct
  misc_feature 1..20: note = chemically synthesized
  source 1..20: mol_type = other DNA
acttttctgcatagtcctgg

SEQ ID NO: 47031 - DNA, 20 bp, synthetic construct
  misc_feature 1..20: note = chemically synthesized
  source 1..20: mol_type = other DNA
ttctgcatagtcctggaggt

SEQ ID NO: 47032 - DNA, 20 bp, synthetic construct
  misc_feature 1..20: note = chemically synthesized
  source 1..20: mol_type = other DNA
atagtcctggaggttagaaa

SEQ ID NO: 47033 - DNA, 20 bp, synthetic construct
  misc_feature 1..20: note = chemically synthesized
  source 1..20: mol_type = other DNA
agaaaaagatcaactgaaca

SEQ ID NO: 47034 - DNA, 20 bp, synthetic construct
  misc_feature 1..20: note = chemically synthesized
  source 1..20: mol_type = other DNA
aaaagatcaactgaacaaag

SEQ ID NO: 47035 - DNA, 20 bp, synthetic construct
  misc_feature 1..20: note = chemically synthesized
  source 1..20: mol_type = other DNA
agatcaactgaacaaagtag

SEQ ID NO: 47036 - DNA, 20 bp, synthetic construct
  misc_feature 1..20: note = chemically synthesized
  source 1..20: mol_type = other DNA
gatcaactgaacaaagtagt

SEQ ID NO: 47037 - DNA, 20 bp, synthetic construct
  misc_feature 1..20: note = chemically synthesized
  source 1..20: mol_type = other DNA
caactgaacaaagtagtggg

SEQ ID NO: 47038 - DNA, 20 bp, synthetic construct
  misc_feature 1..20: note = chemically synthesized
  source 1..20: mol_type = other DNA
agtagtgggaagctgttaaa

SEQ ID NO: 47039 - DNA, 20 bp, synthetic construct
  misc_feature 1..20: note = chemically synthesized
  source 1..20: mol_type = other DNA
tagtgggaagctgttaaaaa

SEQ ID NO: 47040 - DNA, 20 bp, synthetic construct
  misc_feature 1..20: note = chemically synthesized
  source 1..20: mol_type = other DNA
agtgggaagctgttaaaaag

SEQ ID NO: 47041 - DNA, 20 bp, synthetic construct
  misc_feature 1..20: note = chemically synthesized
  source 1..20: mol_type = other DNA
tgtttccctccgaatgatga

SEQ ID NO: 47042 - DNA, 20 bp, synthetic construct
  misc_feature 1..20: note = chemically synthesized
  source 1..20: mol_type = other DNA
atggtatacttttgtacgca

SEQ ID NO: 47043 - DNA, 20 bp, synthetic construct
  misc_feature 1..20: note = chemically synthesized
  source 1..20: mol_type = other DNA
atacttttgtacgcatggta

SEQ ID NO: 47044 - DNA, 20 bp, synthetic construct
  misc_feature 1..20: note = chemically synthesized
  source 1..20: mol_type = other DNA
tacttttgtacgcatggtac

SEQ ID NO: 47045 - DNA, 20 bp, synthetic construct
  misc_feature 1..20: note = chemically synthesized
  source 1..20: mol_type = other DNA
ggtacaggattctttgttat

SEQ ID NO: 47046 - DNA, 20 bp, synthetic construct
  misc_feature 1..20: note = chemically synthesized
  source 1..20: mol_type = other DNA
gattctttgttatgagtgtt

SEQ ID NO: 47047 - DNA, 20 bp, synthetic construct
  misc_feature 1..20: note = chemically synthesized
  source 1..20: mol_type = other DNA
attctttgttatgagtgttt

SEQ ID NO: 47048 - DNA, 20 bp, synthetic construct
  misc_feature 1..20: note = chemically synthesized
  source 1..20: mol_type = other DNA
gtatgtatgtatgtgatgac

SEQ ID NO: 47049 - DNA, 20 bp, synthetic construct
  misc_feature 1..20: note = chemically synthesized
  source 1..20: mol_type = other DNA
tatgtatgtatgtgatgact

SEQ ID NO: 47050 - DNA, 20 bp, synthetic construct
  misc_feature 1..20: note = chemically synthesized
  source 1..20: mol_type = other DNA
atgtatgtatgtgatgactg

SEQ ID NO: 47051 - DNA, 20 bp, synthetic construct
  misc_feature 1..20: note = chemically synthesized
  source 1..20: mol_type = other DNA
ctatccattactgttccttg

SEQ ID NO: 47052 - DNA, 20 bp, synthetic construct
  misc_feature 1..20: note = chemically synthesized
  source 1..20: mol_type = other DNA
actattatcctactttttaa

SEQ ID NO: 47053 - DNA, 20 bp, synthetic construct
  misc_feature 1..20: note = chemically synthesized
  source 1..20: mol_type = other DNA
ctattatcctactttttaaa

SEQ ID NO: 47054 - DNA, 20 bp, synthetic construct
  misc_feature 1..20: note = chemically synthesized
  source 1..20: mol_type = other DNA
tcctactttttaaaaggacg

SEQ ID NO: 47055 - DNA, 20 bp, synthetic construct
  misc_feature 1..20: note = chemically synthesized
  source 1..20: mol_type = other DNA
atgaaacaatcacaatatgt

SEQ ID NO: 47056 - DNA, 20 bp, synthetic construct
  misc_feature 1..20: note = chemically synthesized
  source 1..20: mol_type = other DNA
tgaaacaatcacaatatgtt

SEQ ID NO: 47057 - DNA, 20 bp, synthetic construct
  misc_feature 1..20: note = chemically synthesized
  source 1..20: mol_type = other DNA
gaaacaatcacaatatgttg

SEQ ID NO: 47058 - DNA, 20 bp, synthetic construct
  misc_feature 1..20: note = chemically synthesized
  source 1..20: mol_type = other DNA
acaatcacaatatgttgggg

SEQ ID NO: 47059 - DNA, 20 bp, synthetic construct
  misc_feature 1..20: note = chemically synthesized
  source 1..20: mol_type = other DNA
tcacaatatgttggggtagt

SEQ ID NO: 47060 - DNA, 20 bp, synthetic construct
  misc_feature 1..20: note = chemically synthesized
  source 1..20: mol_type = other DNA
aatatgttggggtagtgagt

SEQ ID NO: 47061 - DNA, 20 bp, synthetic construct
  misc_feature 1..20: note = chemically synthesized
  source 1..20: mol_type = other DNA
gttggggtagtgagttggca

SEQ ID NO: 47062 - DNA, 20 bp, synthetic construct
  misc_feature 1..20: note = chemically synthesized
  source 1..20: mol_type = other DNA
gggtagtgagttggcatagc

SEQ ID NO: 47063 - DNA, 20 bp, synthetic construct
  misc_feature 1..20: note = chemically synthesized
  source 1..20: mol_type = other DNA
agtgagttggcatagcaagt

SEQ ID NO: 47064 - DNA, 20 bp, synthetic construct
  misc_feature 1..20: note = chemically synthesized
  source 1..20: mol_type = other DNA
tgagttggcatagcaagtaa

SEQ ID NO: 47065 - DNA, 20 bp, synthetic construct
  misc_feature 1..20: note = chemically synthesized
  source 1..20: mol_type = other DNA
gttggcatagcaagtaagag

SEQ ID NO: 47066 - DNA, 20 bp, synthetic construct
  misc_feature 1..20: note = chemically synthesized
  source 1..20: mol_type = other DNA
ttggcatagcaagtaagaga

SEQ ID NO: 47067 - DNA, 20 bp, synthetic construct
  misc_feature 1..20: note = chemically synthesized
  source 1..20: mol_type = other DNA
catagcaagtaagagaagga

SEQ ID NO: 47068 - DNA, 20 bp, synthetic construct
  misc_feature 1..20: note = chemically synthesized
  source 1..20: mol_type = other DNA
atagcaagtaagagaaggat

SEQ ID NO: 47069 - DNA, 20 bp, synthetic construct
  misc_feature 1..20: note = chemically synthesized
  source 1..20: mol_type = other DNA
aagagaaggataggacacaa

SEQ ID NO: 47070 - DNA, 20 bp, synthetic construct
  misc_feature 1..20: note = chemically synthesized
  source 1..20: mol_type = other DNA
agagaaggataggacacaat

SEQ ID NO: 47071 - DNA, 20 bp, synthetic construct
  misc_feature 1..20: note = chemically synthesized
  source 1..20: mol_type = other DNA
agaaggataggacacaatgg

SEQ ID NO: 47072 - DNA, 20 bp, synthetic construct
  misc_feature 1..20: note = chemically synthesized
  source 1..20: mol_type = other DNA
gaaggataggacacaatggg

SEQ ID NO: 47073 - DNA, 20 bp, synthetic construct
  misc_feature 1..20: note = chemically synthesized
  source 1..20: mol_type = other DNA
ataggacacaatgggaggtg

SEQ ID NO: 47074 - DNA, 20 bp, synthetic construct
  misc_feature 1..20: note = chemically synthesized
  source 1..20: mol_type = other DNA
taggacacaatgggaggtgc

SEQ ID NO: 47075 - DNA, 20 bp, synthetic construct
  misc_feature 1..20: note = chemically synthesized
  source 1..20: mol_type = other DNA
aggacacaatgggaggtgca

SEQ ID NO: 47076 - DNA, 20 bp, synthetic construct
  misc_feature 1..20: note = chemically synthesized
  source 1..20: mol_type = other DNA
aatgggaggtgcagggctgc

SEQ ID NO: 47077 - DNA, 20 bp, synthetic construct
  misc_feature 1..20: note = chemically synthesized
  source 1..20: mol_type = other DNA
cagggctgccagtcatattg

SEQ ID NO: 47078 - DNA, 20 bp, synthetic construct
  misc_feature 1..20: note = chemically synthesized
  source 1..20: mol_type = other DNA
gtcatattgaagctgatatc

SEQ ID NO: 47079 - DNA, 20 bp, synthetic construct
  misc_feature 1..20: note = chemically synthesized
  source 1..20: mol_type = other DNA
agctgatatctagcccataa

SEQ ID NO: 47080 - DNA, 20 bp, synthetic construct
  misc_feature 1..20: note = chemically synthesized
  source 1..20: mol_type = other DNA
gatatctagcccataatggt

SEQ ID NO: 47081 - DNA, 20 bp, synthetic construct
  misc_feature 1..20: note = chemically synthesized
  source 1..20: mol_type = other DNA
tatctagcccataatggtga

SEQ ID NO: 47082 - DNA, 20 bp, synthetic construct
  misc_feature 1..20: note = chemically synthesized
  source 1..20: mol_type = other DNA
ggtgagagttgctcaaactc

SEQ ID NO: 47083 - DNA, 20 bp, synthetic construct
  misc_feature 1..20: note = chemically synthesized
  source 1..20: mol_type = other DNA
ttgctcaaactctggtgaaa

SEQ ID NO: 47084 - DNA, 20 bp, synthetic construct
  misc_feature 1..20: note = chemically synthesized
  source 1..20: mol_type = other DNA
tgctcaaactctggtgaaaa

SEQ ID NO: 47085 - DNA, 20 bp, synthetic construct
  misc_feature 1..20: note = chemically synthesized
  source 1..20: mol_type = other DNA
actctggtgaaaaaggatgt

SEQ ID NO: 47086 - DNA, 20 bp, synthetic construct
  misc_feature 1..20: note = chemically synthesized
  source 1..20: mol_type = other DNA
gtgttatatctatttactgc

SEQ ID NO: 47087 - DNA, 20 bp, synthetic construct
  misc_feature 1..20: note = chemically synthesized
  source 1..20: mol_type = other DNA
atatctatttactgcaagtc

SEQ ID NO: 47088 - DNA, 20 bp, synthetic construct
  misc_feature 1..20: note = chemically synthesized
  source 1..20: mol_type = other DNA
atttactgcaagtccagctt

SEQ ID NO: 47089 - DNA, 20 bp, synthetic construct
  misc_feature 1..20: note = chemically synthesized
  source 1..20: mol_type = other DNA
tttactgcaagtccagcttg

SEQ ID NO: 47090 - DNA, 20 bp, synthetic construct
  misc_feature 1..20: note = chemically synthesized
  source 1..20: mol_type = other DNA
ttttatcttcactccctccc

SEQ ID NO: 47091 - DNA, 20 bp, synthetic construct
  misc_feature 1..20: note = chemically synthesized
  source 1..20: mol_type = other DNA
ttcactccctccccagctct

SEQ ID NO: 47092 - DNA, 20 bp, synthetic construct
  misc_feature 1..20: note = chemically synthesized
  source 1..20: mol_type = other DNA
tcactccctccccagctctt

SEQ ID NO: 47093 - DNA, 20 bp, synthetic construct
  misc_feature 1..20: note = chemically synthesized
  source 1..20: mol_type = other DNA
caacgtgatattgattgttt

SEQ ID NO: 47094 - DNA, 20 bp, synthetic construct
  misc_feature 1..20: note = chemically synthesized
  source 1..20: mol_type = other DNA
attgttttggcaacccactt

SEQ ID NO: 47095 - DNA, 20 bp, synthetic construct
  misc_feature 1..20: note = chemically synthesized
  source 1..20: mol_type = other DNA
ttttggcaacccacttcagc

SEQ ID NO: 47096 - DNA, 20 bp, synthetic construct
  misc_feature 1..20: note = chemically synthesized
  source 1..20: mol_type = other DNA
tttggcaacccacttcagcg

SEQ ID NO: 47097 - DNA, 20 bp, synthetic construct
  misc_feature 1..20: note = chemically synthesized
  source 1..20: mol_type = other DNA
tcagcgaggattttacccta

SEQ ID NO: 47098 - DNA, 20 bp, synthetic construct
  misc_feature 1..20: note = chemically synthesized
  source 1..20: mol_type = other DNA
aggattttaccctacagata

SEQ ID NO: 47099 - DNA, 20 bp, synthetic construct
  misc_feature 1..20: note = chemically synthesized
  source 1..20: mol_type = other DNA
ggattttaccctacagatac

SEQ ID NO: 47100 - DNA, 20 bp, synthetic construct
  misc_feature 1..20: note = chemically synthesized
  source 1..20: mol_type = other DNA
ccctacagatacaggcttct

SEQ ID NO: 47101 - DNA, 20 bp, synthetic construct
  misc_feature 1..20: note = chemically synthesized
  source 1..20: mol_type = other DNA
tacagatacaggcttcttgg

SEQ ID NO: 47102 - DNA, 20 bp, synthetic construct
  misc_feature 1..20: note = chemically synthesized
  source 1..20: mol_type = other DNA
gcagtaactaacaaatgctg

SEQ ID NO: 47103 - DNA, 20 bp, synthetic construct
  misc_feature 1..20: note = chemically synthesized
  source 1..20: mol_type = other DNA
aaatgctgtggttaatgctg

SEQ ID NO: 47104 - DNA, 20 bp, synthetic construct
  misc_feature 1..20: note = chemically synthesized
  source 1..20: mol_type = other DNA
tggttaatgctgtagcccac

SEQ ID NO: 47105 - DNA, 20 bp, synthetic construct
  misc_feature 1..20: note = chemically synthesized
  source 1..20: mol_type = other DNA
ctgtagcccacaagaccact

SEQ ID NO: 47106 - DNA, 20 bp, synthetic construct
  misc_feature 1..20: note = chemically synthesized
  source 1..20: mol_type = other DNA
gtccactatgtttgtaccta

SEQ ID NO: 47107 - DNA, 20 bp, synthetic construct
  misc_feature 1..20: note = chemically synthesized
  source 1..20: mol_type = other DNA
tcccaaaatctcatctcctt

SEQ ID NO: 47108 - DNA, 20 bp, synthetic construct
  misc_feature 1..20: note = chemically synthesized
  source 1..20: mol_type = other DNA
aaaatctcatctcctttaga

SEQ ID NO: 47109 - DNA, 20 bp, synthetic construct
  misc_feature 1..20: note = chemically synthesized
  source 1..20: mol_type = other DNA
aaatctcatctcctttagat

SEQ ID NO: 47110 - DNA, 20 bp, synthetic construct
  misc_feature 1..20: note = chemically synthesized
  source 1..20: mol_type = other DNA
aatctcatctcctttagatg

SEQ ID NO: 47111 - DNA, 20 bp, synthetic construct
  misc_feature 1..20: note = chemically synthesized
  source 1..20: mol_type = other DNA
atctcatctcctttagatgg

SEQ ID NO: 47112 - DNA, 20 bp, synthetic construct
  misc_feature 1..20: note = chemically synthesized
  source 1..20: mol_type = other DNA
ctcatctcctttagatgggg

SEQ ID NO: 47113 - DNA, 20 bp, synthetic construct
  misc_feature 1..20: note = chemically synthesized
  source 1..20: mol_type = other DNA
tcatctcctttagatggggg

SEQ ID NO: 47114 - DNA, 20 bp, synthetic construct
  misc_feature 1..20: note = chemically synthesized
  source 1..20: mol_type = other DNA
ctcctttagatgggggaggt

SEQ ID NO: 47115 - DNA, 20 bp, synthetic construct
  misc_feature 1..20: note = chemically synthesized
  source 1..20: mol_type = other DNA
tcctttagatgggggaggtt

SEQ ID NO: 47116 - DNA, 20 bp, synthetic construct
  misc_feature 1..20: note = chemically synthesized
  source 1..20: mol_type = other DNA
cctttagatgggggaggttg

SEQ ID NO: 47117 - DNA, 20 bp, synthetic construct
  misc_feature 1..20: note = chemically synthesized
  source 1..20: mol_type = other DNA
tttagatgggggaggttggg

SEQ ID NO: 47118 - DNA, 20 bp, synthetic construct
  misc_feature 1..20: note = chemically synthesized
  source 1..20: mol_type = other DNA
agatgggggaggttggggag

SEQ ID NO: 47119 - DNA, 20 bp, synthetic construct
  misc_feature 1..20: note = chemically synthesized
  source 1..20: mol_type = other DNA
atgggggaggttggggagaa

SEQ ID NO: 47120 - DNA, 20 bp, synthetic construct
  misc_feature 1..20: note = chemically synthesized
  source 1..20: mol_type = other DNA
ggggaggttggggagaagag

SEQ ID NO: 47121 - DNA, 20 bp, synthetic construct
  misc_feature 1..20: note = chemically synthesized
  source 1..20: mol_type = other DNA
cagtatcctgcctgctgatt

SEQ ID NO: 47122 - DNA, 20 bp, synthetic construct
  misc_feature 1..20: note = chemically synthesized
  source 1..20: mol_type = other DNA
cagttcctgcatgataaaaa

SEQ ID NO: 47123 - DNA, 20 bp, synthetic construct
  misc_feature 1..20: note = chemically synthesized
  source 1..20: mol_type = other DNA
tgcatgataaaaatagaata

SEQ ID NO: 47124 - DNA, 20 bp, synthetic construct
  misc_feature 1..20: note = chemically synthesized
  source 1..20: mol_type = other DNA
aataaagaaatatgctctct

SEQ ID NO: 47125 - DNA, 20 bp, synthetic construct
  misc_feature 1..20: note = chemically synthesized
  source 1..20: mol_type = other DNA
ctttatattttaccctgatt

SEQ ID NO: 47126 - DNA, 20 bp, synthetic construct
  misc_feature 1..20: note = chemically synthesized
  source 1..20: mol_type = other DNA
ttttaccctgattcagccaa

SEQ ID NO: 47127 - DNA, 20 bp, synthetic construct
  misc_feature 1..20: note = chemically synthesized
  source 1..20: mol_type = other DNA
tttaccctgattcagccaaa

SEQ ID NO: 47128 - DNA, 20 bp, synthetic construct
  misc_feature 1..20: note = chemically synthesized
  source 1..20: mol_type = other DNA
aaaggacgcactatttctga

SEQ ID NO: 47129 - DNA, 20 bp, synthetic construct
  misc_feature 1..20: note = chemically synthesized
  source 1..20: mol_type = other DNA
gcactatttctgatggaaat

SEQ ID NO: 47130 - DNA, 20 bp, synthetic construct
  misc_feature 1..20: note = chemically synthesized
  source 1..20: mol_type = other DNA
tctgatggaaatgagaatgt

SEQ ID NO: 47131 - DNA, 20 bp, synthetic construct
  misc_feature 1..20: note = chemically synthesized
  source 1..20: mol_type = other DNA
tgatggaaatgagaatgttg

SEQ ID NO: 47132 - DNA, 20 bp, synthetic construct
  misc_feature 1..20: note = chemically synthesized
  source 1..20: mol_type = other DNA
gaaatgagaatgttggagaa

SEQ ID NO: 47133 - DNA, 20 bp, synthetic construct
  misc_feature 1..20: note = chemically synthesized
  source 1..20: mol_type = other DNA
aaatgagaatgttggagaat

SEQ ID NO: 47134 - DNA, 20 bp, synthetic construct
  misc_feature 1..20: note = chemically synthesized
  source 1..20: mol_type = other DNA
atgagaatgttggagaatgg

SEQ ID NO: 47135 - DNA, 20 bp, synthetic construct
  misc_feature 1..20: note = chemically synthesized
  source 1..20: mol_type = other DNA
atgttggagaatgggagttt

SEQ ID NO: 47136 - DNA, 20 bp, synthetic construct
  misc_feature 1..20: note = chemically synthesized
  source 1..20: mol_type = other DNA
tgttggagaatgggagttta

SEQ ID NO: 47137 - DNA, 20 bp, synthetic construct
  misc_feature 1..20: note = chemically synthesized
  source 1..20: mol_type = other DNA
ggagaatgggagtttaagga

SEQ ID NO: 47138 - DNA, 20 bp, synthetic construct
  misc_feature 1..20: note = chemically synthesized
  source 1..20: mol_type = other DNA
agaatgggagtttaaggaca

SEQ ID NO: 47139 - DNA, 20 bp, synthetic construct
  misc_feature 1..20: note = chemically synthesized
  source 1..20: mol_type = other DNA
atgggagtttaaggacagag

SEQ ID NO: 47140 - DNA, 20 bp, synthetic construct
  misc_feature 1..20: note = chemically synthesized
  source 1..20: mol_type = other DNA
atactttcttgcaatcctgc

SEQ ID NO: 47141 - DNA, 20 bp, synthetic construct
  misc_feature 1..20: note = chemically synthesized
  source 1..20: mol_type = other DNA
ttcttgcaatcctgcaagaa

SEQ ID NO: 47142 - DNA, 20 bp, synthetic construct
  misc_feature 1..20: note = chemically synthesized
  source 1..20: mol_type = other DNA
cttgcaatcctgcaagaaaa

SEQ ID NO: 47143 - DNA, 20 bp, synthetic construct
  misc_feature 1..20: note = chemically synthesized
  source 1..20: mol_type = other DNA
tgcaatcctgcaagaaaaga

SEQ ID NO: 47144 - DNA, 20 bp, synthetic construct
  misc_feature 1..20: note = chemically synthesized
  source 1..20: mol_type = other DNA
gcaagaaaagagagaactcg

SEQ ID NO: 47145 - DNA, 20 bp, synthetic construct
  misc_feature 1..20: note = chemically synthesized
  source 1..20: mol_type = other DNA
caagaaaagagagaactcgt

SEQ ID NO: 47146 - DNA, 20 bp, synthetic construct
  misc_feature 1..20: note = chemically synthesized
  source 1..20: mol_type = other DNA
gaaaagagagaactcgtggg

SEQ ID NO: 47147 - DNA, 20 bp, synthetic construct
  misc_feature 1..20: note = chemically synthesized
  source 1..20: mol_type = other DNA
agagaactcgtgggtggatt

SEQ ID NO: 47148 - DNA, 20 bp, synthetic construct
  misc_feature 1..20: note = chemically synthesized
  source 1..20: mol_type = other DNA
gaactcgtgggtggatttag

SEQ ID NO: 47149 - DNA, 20 bp, synthetic construct
  misc_feature 1..20: note = chemically synthesized
  source 1..20: mol_type = other DNA
aactcgtgggtggatttagt

SEQ ID NO: 47150 - DNA, 20 bp, synthetic construct
  misc_feature 1..20: note = chemically synthesized
  source 1..20: mol_type = other DNA
actcgtgggtggatttagtg

SEQ ID NO: 47151 - DNA, 20 bp, synthetic construct
  misc_feature 1..20: note = chemically synthesized
  source 1..20: mol_type = other DNA
cgtgggtggatttagtgggg

SEQ ID NO: 47152 - DNA, 20 bp, synthetic construct
  misc_feature 1..20: note = chemically synthesized
  source 1..20: mol_type = other DNA
tttagtggggtagttactcc

SEQ ID NO: 47153 - DNA, 20 bp, synthetic construct
  misc_feature 1..20: note = chemically synthesized
  source 1..20: mol_type = other DNA
ttagtggggtagttactcct

SEQ ID NO: 47154 - DNA, 20 bp, synthetic construct
  misc_feature 1..20: note = chemically synthesized
  source 1..20: mol_type = other DNA
gtggggtagttactcctagg

SEQ ID NO: 47155 - DNA, 20 bp, synthetic construct
  misc_feature 1..20: note = chemically synthesized
  source 1..20: mol_type = other DNA
tggggtagttactcctagga

SEQ ID NO: 47156 - DNA, 20 bp, synthetic construct
  misc_feature 1..20: note = chemically synthesized
  source 1..20: mol_type = other DNA
ggggtagttactcctaggaa

SEQ ID NO: 47157 - DNA, 20 bp, synthetic construct
  misc_feature 1..20: note = chemically synthesized
  source 1..20: mol_type = other DNA
gggtagttactcctaggaag

SEQ ID NO: 47158 - DNA, 20 bp, synthetic construct
  misc_feature 1..20: note = chemically synthesized
  source 1..20: mol_type = other DNA
taggaaggggaaatcgtctc

SEQ ID NO: 47159 - DNA, 20 bp, synthetic construct
  misc_feature 1..20: note = chemically synthesized
  source 1..20: mol_type = other DNA
ggggaaatcgtctctagaat

SEQ ID NO: 47160 - DNA, 20 bp, synthetic construct
  misc_feature 1..20: note = chemically synthesized
  source 1..20: mol_type = other DNA
agaataagacaatgttttta

SEQ ID NO: 47161 - DNA, 20 bp, synthetic construct
  misc_feature 1..20: note = chemically synthesized
  source 1..20: mol_type = other DNA
taagacaatgtttttacaga

SEQ ID NO: 47162 - DNA, 20 bp, synthetic construct
  misc_feature 1..20: note = chemically synthesized
  source 1..20: mol_type = other DNA
aagacaatgtttttacagaa

SEQ ID NO: 47163 - DNA, 20 bp, synthetic construct
  misc_feature 1..20: note = chemically synthesized
  source 1..20: mol_type = other DNA
agacaatgtttttacagaaa

SEQ ID NO: 47164 - DNA, 20 bp, synthetic construct
  misc_feature 1..20: note = chemically synthesized
  source 1..20: mol_type = other DNA
acaatgtttttacagaaagg

SEQ ID NO: 47165 - DNA, 20 bp, synthetic construct
  misc_feature 1..20: note = chemically synthesized
  source 1..20: mol_type = other DNA
caatgtttttacagaaaggg

SEQ ID NO: 47166 - DNA, 20 bp, synthetic construct
  misc_feature 1..20: note = chemically synthesized
  source 1..20: mol_type = other DNA
tttacagaaagggaggtcaa

SEQ ID NO: 47167 - DNA, 20 bp, synthetic construct
  misc_feature 1..20: note = chemically synthesized
  source 1..20: mol_type = other DNA
tacagaaagggaggtcaatg

SEQ ID NO: 47168 - DNA, 20 bp, synthetic construct
  misc_feature 1..20: note = chemically synthesized
  source 1..20: mol_type = other DNA
acagaaagggaggtcaatgg

SEQ ID NO: 47169 - DNA, 20 bp, synthetic construct
  misc_feature 1..20: note = chemically synthesized
  source 1..20: mol_type = other DNA
aggtcaatggaggtactctt

SEQ ID NO: 47170 - DNA, 20 bp, synthetic construct
  misc_feature 1..20: note = chemically synthesized
  source 1..20: mol_type = other DNA
gtcaatggaggtactctttg

SEQ ID NO: 47171 - DNA, 20 bp, synthetic construct
  misc_feature 1..20: note = chemically synthesized
  source 1..20: mol_type = other DNA
tcaatggaggtactctttgg

SEQ ID NO: 47172 - DNA, 20 bp, synthetic construct
  misc_feature 1..20: note = chemically synthesized
  source 1..20: mol_type = other DNA
gaggtactctttggaggtgt

SEQ ID NO: 47173 - DNA, 20 bp, synthetic construct
  misc_feature 1..20: note = chemically synthesized
  source 1..20: mol_type = other DNA
ggtactctttggaggtgtaa

SEQ ID NO: 47174 - DNA, 20 bp, synthetic construct
  misc_feature 1..20: note = chemically synthesized
  source 1..20: mol_type = other DNA
gtactctttggaggtgtaag

SEQ ID NO: 47175 - DNA, 20 bp, synthetic construct
  misc_feature 1..20: note = chemically synthesized
  source 1..20: mol_type = other DNA
tggaggtgtaagaggattgt

SEQ ID NO: 47176 - DNA, 20 bp, synthetic construct
  misc_feature 1..20: note = chemically synthesized
  source 1..20: mol_type = other DNA
aggtgtaagaggattgttgg

SEQ ID NO: 47177 - DNA, 20 bp, synthetic construct
  misc_feature 1..20: note = chemically synthesized
  source 1..20: mol_type = other DNA
agaggattgttggtagtgtg

SEQ ID NO: 47178 - DNA, 20 bp, synthetic construct
  misc_feature 1..20: note = chemically synthesized
  source 1..20: mol_type = other DNA
aggattgttggtagtgtgta

SEQ ID NO: 47179 - DNA, 20 bp, synthetic construct
  misc_feature 1..20: note = chemically synthesized
  source 1..20: mol_type = other DNA
ggattgttggtagtgtgtag

SEQ ID NO: 47180 - DNA, 20 bp, synthetic construct
  misc_feature 1..20: note = chemically synthesized
  source 1..20: mol_type = other DNA
ggtagtgtgtagaggtatgt

SEQ ID NO: 47181 - DNA, 20 bp, synthetic construct
  misc_feature 1..20: note = chemically synthesized
  source 1..20: mol_type = other DNA
gtagtgtgtagaggtatgtt

SEQ ID NO: 47182 - DNA, 20 bp, synthetic construct
  misc_feature 1..20: note = chemically synthesized
  source 1..20: mol_type = other DNA
aggtatgttaggactcaaat

SEQ ID NO: 47183 - DNA, 20 bp, synthetic construct
  misc_feature 1..20: note = chemically synthesized
  source 1..20: mol_type = other DNA
tatgttaggactcaaattag

SEQ ID NO: 47184 - DNA, 20 bp, synthetic construct
  misc_feature 1..20: note = chemically synthesized
  source 1..20: mol_type = other DNA
ctcaaattagaagttctgta

SEQ ID NO: 47185 - DNA, 20 bp, synthetic construct
  misc_feature 1..20: note = chemically synthesized
  source 1..20: mol_type = other DNA
tcaaattagaagttctgtat

SEQ ID NO: 47186 - DNA, 20 bp, synthetic construct
  misc_feature 1..20: note = chemically synthesized
  source 1..20: mol_type = other DNA
gctattatttgtatgaaact

SEQ ID NO: 47187 - DNA, 20 bp, synthetic construct
  misc_feature 1..20: note = chemically synthesized
  source 1..20: mol_type = other DNA
ctattatttgtatgaaactc

SEQ ID NO: 47188 - DNA, 20 bp, synthetic construct
  misc_feature 1..20: note = chemically synthesized
  source 1..20: mol_type = other DNA
tttgtatgaaactcaggata

SEQ ID NO: 47189 - DNA, 20 bp, synthetic construct
  misc_feature 1..20: note = chemically synthesized
  source 1..20: mol_type = other DNA
aactcaggatatagctcatt

SEQ ID NO: 47190 - DNA, 20 bp, synthetic construct
  misc_feature 1..20: note = chemically synthesized
  source 1..20: mol_type = other DNA
tatagctcatttggtgactg

SEQ ID NO: 47191 - DNA, 20 bp, synthetic construct
  misc_feature 1..20: note = chemically synthesized
  source 1..20: mol_type = other DNA
attttttattatttataatg

SEQ ID NO: 47192 - DNA, 20 bp, synthetic construct
  misc_feature 1..20: note = chemically synthesized
  source 1..20: mol_type = other DNA
ttttattatttataatgaag

SEQ ID NO: 47193 - DNA, 20 bp, synthetic construct
  misc_feature 1..20: note = chemically synthesized
  source 1..20: mol_type = other DNA
tttattatttataatgaagt

SEQ ID NO: 47194 - DNA, 20 bp, synthetic construct
  misc_feature 1..20: note = chemically synthesized
  source 1..20: mol_type = other DNA
ttattatttataatgaagtg

SEQ ID NO: 47195 - DNA, 20 bp, synthetic construct
  misc_feature 1..20: note = chemically synthesized
  source 1..20: mol_type = other DNA
tatttataatgaagtgggga

SEQ ID NO: 47196 - DNA, 20 bp, synthetic construct
  misc_feature 1..20: note = chemically synthesized
  source 1..20: mol_type = other DNA
atttataatgaagtggggat

SEQ ID NO: 47197 - DNA, 20 bp, synthetic construct
  misc_feature 1..20: note = chemically synthesized
  source 1..20: mol_type = other DNA
tttataatgaagtggggatg

SEQ ID NO: 47198 - DNA, 20 bp, synthetic construct
  misc_feature 1..20: note = chemically synthesized
  source 1..20: mol_type = other DNA
gaagtggggatggggcttcc

SEQ ID NO: 47199 - DNA, 20 bp, synthetic construct
  misc_feature 1..20: note = chemically synthesized
  source 1..20: mol_type = other DNA
agtggggatggggcttccta

SEQ ID NO: 47200 - DNA, 20 bp, synthetic construct
  misc_feature 1..20: note = chemically synthesized
  source 1..20: mol_type = other DNA
gggcttcctagagaccaatc

SEQ ID NO: 47201 - DNA, 20 bp, synthetic construct
  misc_feature 1..20: note = chemically synthesized
  source 1..20: mol_type = other DNA
ggcttcctagagaccaatca

SEQ ID NO: 47202 - DNA, 20 bp, synthetic construct
  misc_feature 1..20: note = chemically synthesized
  source 1..20: mol_type = other DNA
gcttcctagagaccaatcaa

SEQ ID NO: 47203 - DNA, 20 bp, synthetic construct
  misc_feature 1..20: note = chemically synthesized
  source 1..20: mol_type = other DNA
ctttctcttaacgtcttcaa

SEQ ID NO: 47204 - DNA, 20 bp, synthetic construct
  misc_feature 1..20: note = chemically synthesized
  source 1..20: mol_type = other DNA
aacgtcttcaatggtattaa

SEQ ID NO: 47205 - DNA, 20 bp, synthetic construct
  misc_feature 1..20: note = chemically synthesized
  source 1..20: mol_type = other DNA
cgtcttcaatggtattaata

SEQ ID NO: 47206 - DNA, 20 bp, synthetic construct
  misc_feature 1..20: note = chemically synthesized
  source 1..20: mol_type = other DNA
attaatagagaattatctct

SEQ ID NO: 47207 - DNA, 20 bp, synthetic construct
  misc_feature 1..20: note = chemically synthesized
  source 1..20: mol_type = other DNA
ttaatagagaattatctcta

SEQ ID NO: 47208 - DNA, 20 bp, synthetic construct
  misc_feature 1..20: note = chemically synthesized
  source 1..20: mol_type = other DNA
tatctctaaggcatgtgaac

SEQ ID NO: 47209 - DNA, 20 bp, synthetic construct
  misc_feature 1..20: note = chemically synthesized
  source 1..20: mol_type = other DNA
ggcatgtgaactggctgtct

SEQ ID NO: 47210 - DNA, 20 bp, synthetic construct
  misc_feature 1..20: note = chemically synthesized
  source 1..20: mol_type = other DNA
aacatatttataattccatt

SEQ ID NO: 47211 - DNA, 20 bp, synthetic construct
  misc_feature 1..20: note = chemically synthesized
  source 1..20: mol_type = other DNA
ccattaagctgtgcatatga

SEQ ID NO: 47212 - DNA, 20 bp, synthetic construct
  misc_feature 1..20: note = chemically synthesized
  source 1..20: mol_type = other DNA
tatcatatgtattttcctta

SEQ ID NO: 47213 - DNA, 20 bp, synthetic construct
  misc_feature 1..20: note = chemically synthesized
  source 1..20: mol_type = other DNA
atcatatgtattttccttaa

SEQ ID NO: 47214 - DNA, 20 bp, synthetic construct
  misc_feature 1..20: note = chemically synthesized
  source 1..20: mol_type = other DNA
tttccttaaaggatttttgt

SEQ ID NO: 47215 - DNA, 20 bp, synthetic construct
  misc_feature 1..20: note = chemically synthesized
  source 1..20: mol_type = other DNA
taattgaattgatacctgta

SEQ ID NO: 47216 - DNA, 20 bp, synthetic construct
  misc_feature 1..20: note = chemically synthesized
  source 1..20: mol_type = other DNA
aaataataaatctctttgtt

SEQ ID NO: 47217 - DNA, 20 bp, synthetic construct
  misc_feature 1..20: note = chemically synthesized
  source 1..20: mol_type = other DNA
ctgtttctataaatatgtac

SEQ ID NO: 47218 - DNA, 20 bp, synthetic construct
  misc_feature 1..20: note = chemically synthesized
  source 1..20: mol_type = other DNA
tgtacaagttttattgtttt

SEQ ID NO: 47219 - DNA, 20 bp, synthetic construct
  misc_feature 1..20: note = chemically synthesized
  source 1..20: mol_type = other DNA
acaagttttattgtttttag

SEQ ID NO: 47220 - DNA, 20 bp, synthetic construct
  misc_feature 1..20: note = chemically synthesized
  source 1..20: mol_type = other DNA
agttttattgtttttagtgg

SEQ ID NO: 47221 - DNA, 20 bp, synthetic construct
  misc_feature 1..20: note = chemically synthesized
  source 1..20: mol_type = other DNA
ttttatgaataaaaaattat

SEQ ID NO: 47222 - DNA, 20 bp, synthetic construct
  misc_feature 1..20: note = chemically synthesized
  source 1..20: mol_type = other DNA
ccactgatttttgtttatgt

SEQ ID NO: 47223 - DNA, 20 bp, synthetic construct
  misc_feature 1..20: note = chemically synthesized
  source 1..20: mol_type = other DNA
tttttgtttatgtgagcaaa

SEQ ID NO: 47224 - DNA, 20 bp, synthetic construct
  misc_feature 1..20: note = chemically synthesized
  source 1..20: mol_type = other DNA
ttgtttatgtgagcaaacag

SEQ ID NO: 47225 - DNA, 20 bp, synthetic construct
  misc_feature 1..20: note = chemically synthesized
  source 1..20: mol_type = other DNA
gtgagcaaacagcagattaa

SEQ ID NO: 47226 - DNA, 20 bp, synthetic construct
  misc_feature 1..20: note = chemically synthesized
  source 1..20: mol_type = other DNA
tgagcaaacagcagattaaa

SEQ ID NO: 47227 - DNA, 20 bp, synthetic construct
  misc_feature 1..20: note = chemically synthesized
  source 1..20: mol_type = other DNA
aaacagcagattaaaaggct

SEQ ID NO: 47228 - DNA, 20 bp, synthetic construct
  misc_feature 1..20: note = chemically synthesized
  source 1..20: mol_type = other DNA
cagattaaaaggctgagatt

SEQ ID NO: 47229 - DNA, 20 bp, synthetic construct
  misc_feature 1..20: note = chemically synthesized
  source 1..20: mol_type = other DNA
agattaaaaggctgagattt

SEQ ID NO: 47230 - DNA, 20 bp, synthetic construct
  misc_feature 1..20: note = chemically synthesized
  source 1..20: mol_type = other DNA
aaaggctgagatttaggaaa

SEQ ID NO: 47231 - DNA, 20 bp, synthetic construct
  misc_feature 1..20: note = chemically synthesized
  source 1..20: mol_type = other DNA
gatttaggaaacagcacgtt

SEQ ID NO: 47232 - DNA, 20 bp, synthetic construct
  misc_feature 1..20: note = chemically synthesized
  source 1..20: mol_type = other DNA
aggaaacagcacgttaagtc

SEQ ID NO: 47233 - DNA, 20 bp, synthetic construct
  misc_feature 1..20: note = chemically synthesized
  source 1..20: mol_type = other DNA
agcacgttaagtcaagttga

SEQ ID NO: 47234 - DNA, 20 bp, synthetic construct
  misc_feature 1..20: note = chemically synthesized
  source 1..20: mol_type = other DNA
cacgttaagtcaagttgata

SEQ ID NO: 47235 - DNA, 20 bp, synthetic construct
  misc_feature 1..20: note = chemically synthesized
  source 1..20: mol_type = other DNA
acgttaagtcaagttgatag

SEQ ID NO: 47236 - DNA, 20 bp, synthetic construct
  misc_feature 1..20: note = chemically synthesized
  source 1..20: mol_type = other DNA
gttaagtcaagttgatagag

SEQ ID NO: 47237 - DNA, 20 bp, synthetic construct
  misc_feature 1..20: note = chemically synthesized
  source 1..20: mol_type = other DNA
caagttgatagaggagaata

SEQ ID NO: 47238 - DNA, 20 bp, synthetic construct
  misc_feature 1..20: note = chemically synthesized
  source 1..20: mol_type = other DNA
aggagaatatggacatttaa

SEQ ID NO: 47239 - DNA, 20 bp, synthetic construct
  misc_feature 1..20: note = chemically synthesized
  source 1..20: mol_type = other DNA
gagaatatggacatttaaaa

SEQ ID NO: 47240 - DNA, 20 bp, synthetic construct
  misc_feature 1..20: note = chemically synthesized
  source 1..20: mol_type = other DNA
agaatatggacatttaaaag

SEQ ID NO: 47241 - DNA, 20 bp, synthetic construct
  misc_feature 1..20: note = chemically synthesized
  source 1..20: mol_type = other DNA
atatggacatttaaaagagg

SEQ ID NO: 47242 - DNA, 20 bp, synthetic construct
  misc_feature 1..20: note = chemically synthesized
  source 1..20: mol_type = other DNA
tatggacatttaaaagaggc

SEQ ID NO: 47243 - DNA, 20 bp, synthetic construct
  misc_feature 1..20: note = chemically synthesized
  source 1..20: mol_type = other DNA
gaggcaggatgatataaaat

SEQ ID NO: 47244 - DNA, 20 bp, synthetic construct
  misc_feature 1..20: note = chemically synthesized
  source 1..20: mol_type = other DNA
aggcaggatgatataaaatt

SEQ ID NO: 47245 - DNA, 20 bp, synthetic construct
  misc_feature 1..20: note = chemically synthesized
  source 1..20: mol_type = other DNA
ggcaggatgatataaaatta

SEQ ID NO: 47246 - DNA, 20 bp, synthetic construct
  misc_feature 1..20: note = chemically synthesized
  source 1..20: mol_type = other DNA
tgatataaaattagggaaac

SEQ ID NO: 47247 - DNA, 20 bp, synthetic construct
  misc_feature 1..20: note = chemically synthesized
  source 1..20: mol_type = other DNA
aaaattagggaaactggatg

SEQ ID NO: 47248 - DNA, 20 bp, synthetic construct
  misc_feature 1..20: note = chemically synthesized
  source 1..20: mol_type = other DNA
aattagggaaactggatgca

SEQ ID NO: 47249 - DNA, 20 bp, synthetic construct
  misc_feature 1..20: note = chemically synthesized
  source 1..20: mol_type = other DNA
gggaaactggatgcagagac

SEQ ID NO: 47250 - DNA, 20 bp, synthetic construct
  misc_feature 1..20: note = chemically synthesized
  source 1..20: mol_type = other DNA
ctggatgcagagaccagatg

SEQ ID NO: 47251 - DNA, 20 bp, synthetic construct
  misc_feature 1..20: note = chemically synthesized
  source 1..20: mol_type = other DNA
atgcagagaccagatgaagt

SEQ ID NO: 47252 - DNA, 20 bp, synthetic construct
  misc_feature 1..20: note = chemically synthesized
  source 1..20: mol_type = other DNA
accagatgaagtaagaaaaa

SEQ ID NO: 47253 - DNA, 20 bp, synthetic construct
  misc_feature 1..20: note = chemically synthesized
  source 1..20: mol_type = other DNA
agaaaaatagctatcgtttt

SEQ ID NO: 47254 - DNA, 20 bp, synthetic construct
  misc_feature 1..20: note = chemically synthesized
  source 1..20: mol_type = other DNA
gttttgagcaaaaatcactg

SEQ ID NO: 47255 - DNA, 20 bp, synthetic construct
  misc_feature 1..20: note = chemically synthesized
  source 1..20: mol_type = other DNA
cactgaagtttcttgcatat

SEQ ID NO: 47256 - DNA, 20 bp, synthetic construct
  misc_feature 1..20: note = chemically synthesized
  source 1..20: mol_type = other DNA
ctgaagtttcttgcatatga

SEQ ID NO: 47257 - DNA, 20 bp, synthetic construct
  misc_feature 1..20: note = chemically synthesized
  source 1..20: mol_type = other DNA
tatgagagtgacataataaa

SEQ ID NO: 47258 - DNA, 20 bp, synthetic construct
  misc_feature 1..20: note = chemically synthesized
  source 1..20: mol_type = other DNA
atgagagtgacataataaat

SEQ ID NO: 47259 - DNA, 20 bp, synthetic construct
  misc_feature 1..20: note = chemically synthesized
  source 1..20: mol_type = other DNA
tgagagtgacataataaata

SEQ ID NO: 47260 - DNA, 20 bp, synthetic construct
  misc_feature 1..20: note = chemically synthesized
  source 1..20: mol_type = other DNA
acataataaatagggaaacg

SEQ ID NO: 47261 - DNA, 20 bp, synthetic construct
  misc_feature 1..20: note = chemically synthesized
  source 1..20: mol_type = other DNA
ttcacatgtatatatatata

SEQ ID NO: 47262 - DNA, 20 bp, synthetic construct
  misc_feature 1..20: note = chemically synthesized
  source 1..20: mol_type = other DNA
tatatatatatagaactgat

SEQ ID NO: 47263 - DNA, 20 bp, synthetic construct
  misc_feature 1..20: note = chemically synthesized
  source 1..20: mol_type = other DNA
tatatagaactgattagaca

SEQ ID NO: 47264 - DNA, 20 bp, synthetic construct
  misc_feature 1..20: note = chemically synthesized
  source 1..20: mol_type = other DNA
tgattagacaaagtctaact

SEQ ID NO: 47265 - DNA, 20 bp, synthetic construct
  misc_feature 1..20: note = chemically synthesized
  source 1..20: mol_type = other DNA
gattagacaaagtctaactt

SEQ ID NO: 47266 - DNA, 20 bp, synthetic construct
  misc_feature 1..20: note = chemically synthesized
  source 1..20: mol_type = other DNA
gacaaagtctaacttgggta

SEQ ID NO: 47267 - DNA, 20 bp, synthetic construct
  misc_feature 1..20: note = chemically synthesized
  source 1..20: mol_type = other DNA
aagtctaacttgggtatagt

SEQ ID NO: 47268 - DNA, 20 bp, synthetic construct
  misc_feature 1..20: note = chemically synthesized
  source 1..20: mol_type = other DNA
gtctaacttgggtatagtca

SEQ ID NO: 47269 - DNA, 20 bp, synthetic construct
  misc_feature 1..20: note = chemically synthesized
  source 1..20: mol_type = other DNA
tctaacttgggtatagtcag

SEQ ID NO: 47270 - DNA, 20 bp, synthetic construct
  misc_feature 1..20: note = chemically synthesized
  source 1..20: mol_type = other DNA
taacttgggtatagtcagag

SEQ ID NO: 47271 - DNA, 20 bp, synthetic construct
  misc_feature 1..20: note = chemically synthesized
  source 1..20: mol_type = other DNA
gagcttgctgtaattatatt

SEQ ID NO: 47272 - DNA, 20 bp, synthetic construct
  misc_feature 1..20: note = chemically synthesized
  source 1..20: mol_type = other DNA
agcttgctgtaattatattg

SEQ ID NO: 47273 - DNA, 20 bp, synthetic construct
  misc_feature 1..20: note = chemically synthesized
  source 1..20: mol_type = other DNA
ctgtaattatattgaggtga

SEQ ID NO: 47274 - DNA, 20 bp, synthetic construct
  misc_feature 1..20: note = chemically synthesized
  source 1..20: mol_type = other DNA
ttatattgaggtgatggata

SEQ ID NO: 47275 - DNA, 20 bp, synthetic construct
  misc_feature 1..20: note = chemically synthesized
  source 1..20: mol_type = other DNA
aggtgatggataaagaactg

SEQ ID NO: 47276 - DNA, 20 bp, synthetic construct
  misc_feature 1..20: note = chemically synthesized
  source 1..20: mol_type = other DNA
ggataaagaactgaagttga

SEQ ID NO: 47277 - DNA, 20 bp, synthetic construct
  misc_feature 1..20: note = chemically synthesized
  source 1..20: mol_type = other DNA
tgaagttgatggaaacaatg

SEQ ID NO: 47278 - DNA, 20 bp, synthetic construct
  misc_feature 1..20: note = chemically synthesized
  source 1..20: mol_type = other DNA
ttgatggaaacaatgaagtt

SEQ ID NO: 47279 - DNA, 20 bp, synthetic construct
  misc_feature 1..20: note = chemically synthesized
  source 1..20: mol_type = other DNA
tgaagttaagaaaaaaaatc

SEQ ID NO: 47280 - DNA, 20 bp, synthetic construct
  misc_feature 1..20: note = chemically synthesized
  source 1..20: mol_type = other DNA
gttaagaaaaaaaatcgagt

SEQ ID NO: 47281 - DNA, 20 bp, synthetic construct
  misc_feature 1..20: note = chemically synthesized
  source 1..20: mol_type = other DNA
taagaaaaaaaatcgagtaa

SEQ ID NO: 47282 - DNA, 20 bp, synthetic construct
  misc_feature 1..20: note = chemically synthesized
  source 1..20: mol_type = other DNA
aatcgagtaagagaccattg

SEQ ID NO: 47283 - DNA, 20 bp, synthetic construct
  misc_feature 1..20: note = chemically synthesized
  source 1..20: mol_type = other DNA
cgagtaagagaccattgtgg

SEQ ID NO: 47284 - DNA, 20 bp, synthetic construct
  misc_feature 1..20: note = chemically synthesized
  source 1..20: mol_type = other DNA
ccattgtggcagtgattgca

SEQ ID NO: 47285 - DNA, 20 bp, synthetic construct
  misc_feature 1..20: note = chemically synthesized
  source 1..20: mol_type = other DNA
tggcagtgattgcacagaac

SEQ ID NO: 47286 - DNA, 20 bp, synthetic construct
  misc_feature 1..20: note = chemically synthesized
  source 1..20: mol_type = other DNA
aactggaaaacattgtgaaa

SEQ ID NO: 47287 - DNA, 20 bp, synthetic construct
  misc_feature 1..20: note = chemically synthesized
  source 1..20: mol_type = other DNA
ctggaaaacattgtgaaaca

SEQ ID NO: 47288 - DNA, 20 bp, synthetic construct
  misc_feature 1..20: note = chemically synthesized
  source 1..20: mol_type = other DNA
ggaaaacattgtgaaacaga

SEQ ID NO: 47289 - DNA, 20 bp, synthetic construct
  misc_feature 1..20: note = chemically synthesized
  source 1..20: mol_type = other DNA
aacattgtgaaacagagagt

SEQ ID NO: 47290 - DNA, 20 bp, synthetic construct
  misc_feature 1..20: note = chemically synthesized
  source 1..20: mol_type = other DNA
cattgtgaaacagagagtca

SEQ ID NO: 47291 - DNA, 20 bp, synthetic construct
  misc_feature 1..20: note = chemically synthesized
  source 1..20: mol_type = other DNA
aaacagagagtcagagatga

SEQ ID NO: 47292 - DNA, 20 bp, synthetic construct
  misc_feature 1..20: note = chemically synthesized
  source 1..20: mol_type = other DNA
aatccctgtctgtgaatgaa

SEQ ID NO: 47293 - DNA, 20 bp, synthetic construct
  misc_feature 1..20: note = chemically synthesized
  source 1..20: mol_type = other DNA
ccctgtctgtgaatgaaaag

SEQ ID NO: 47294 - DNA, 20 bp, synthetic construct
  misc_feature 1..20: note = chemically synthesized
  source 1..20: mol_type = other DNA
cctgtctgtgaatgaaaaga

SEQ ID NO: 47295 - DNA, 20 bp, synthetic construct
  misc_feature 1..20: note = chemically synthesized
  source 1..20: mol_type = other DNA
aaaagaaggaaatttattga

SEQ ID NO: 47296 - DNA, 20 bp, synthetic construct
  misc_feature 1..20: note = chemically synthesized
  source 1..20: mol_type = other DNA
aaggaaatttattgacagaa

SEQ ID NO: 47297 - DNA, 20 bp, synthetic construct
  misc_feature 1..20: note = chemically synthesized
  source 1..20: mol_type = other DNA
acagaacagcaaatgcctac

SEQ ID NO: 47298 - DNA, 20 bp, synthetic construct
  misc_feature 1..20: note = chemically synthesized
  source 1..20: mol_type = other DNA
atgcctacaagccccctgtt

SEQ ID NO: 47299 - DNA, 20 bp, synthetic construct
  misc_feature 1..20: note = chemically synthesized
  source 1..20: mol_type = other DNA
acaagccccctgtttggatc

SEQ ID NO: 47300 - DNA, 20 bp, synthetic construct
  misc_feature 1..20: note = chemically synthesized
  source 1..20: mol_type = other DNA
tttggatctggcaatgaacg

SEQ ID NO: 47301 - DNA, 20 bp, synthetic construct
  misc_feature 1..20: note = chemically synthesized
  source 1..20: mol_type = other DNA
caatgaacgtagccattctg

SEQ ID NO: 47302 - DNA, 20 bp, synthetic construct
  misc_feature 1..20: note = chemically synthesized
  source 1..20: mol_type = other DNA
cacttcaaactcctgtaccc

SEQ ID NO: 47303 - DNA, 20 bp, synthetic construct
  misc_feature 1..20: note = chemically synthesized
  source 1..20: mol_type = other DNA
actcctgtacccaagaccct

SEQ ID NO: 47304 - DNA, 20 bp, synthetic construct
  misc_feature 1..20: note = chemically synthesized
  source 1..20: mol_type = other DNA
ctcctgtacccaagaccctt

SEQ ID NO: 47305 - DNA, 20 bp, synthetic construct
  misc_feature 1..20: note = chemically synthesized
  source 1..20: mol_type = other DNA
ctgtacccaagacccttagg

SEQ ID NO: 47306 - DNA, 20 bp, synthetic construct
  misc_feature 1..20: note = chemically synthesized
  source 1..20: mol_type = other DNA
caagacccttaggaagtatg

SEQ ID NO: 47307 - DNA, 20 bp, synthetic construct
  misc_feature 1..20: note = chemically synthesized
  source 1..20: mol_type = other DNA
ccctcaaacctaaaacctca

SEQ ID NO: 47308 - DNA, 20 bp, synthetic construct
  misc_feature 1..20: note = chemically synthesized
  source 1..20: mol_type = other DNA
caaacctaaaacctcaaaga

SEQ ID NO: 47309 - DNA, 20 bp, synthetic construct
  misc_feature 1..20: note = chemically synthesized
  source 1..20: mol_type = other DNA
aacctaaaacctcaaagaaa

SEQ ID NO: 47310 - DNA, 20 bp, synthetic construct
  misc_feature 1..20: note = chemically synthesized
  source 1..20: mol_type = other DNA
acctaaaacctcaaagaaag

SEQ ID NO: 47311 - DNA, 20 bp, synthetic construct
  misc_feature 1..20: note = chemically synthesized
  source 1..20: mol_type = other DNA
aacctcaaagaaagaggttt

SEQ ID NO: 47312 - DNA, 20 bp, synthetic construct
  misc_feature 1..20: note = chemically synthesized
  source 1..20: mol_type = other DNA
ctcaaagaaagaggttttag

SEQ ID NO: 47313 - DNA, 20 bp, synthetic construct
  misc_feature 1..20: note = chemically synthesized
  source 1..20: mol_type = other DNA
atataataccctttcttctc

SEQ ID NO: 47314 - DNA, 20 bp, synthetic construct
  misc_feature 1..20: note = chemically synthesized
  source 1..20: mol_type = other DNA
atcccaaaacctctttctca

SEQ ID NO: 47315 - DNA, 20 bp, synthetic construct
  misc_feature 1..20: note = chemically synthesized
  source 1..20: mol_type = other DNA
tcctctatgtgtccacccca

SEQ ID NO: 47316 - DNA, 20 bp, synthetic construct
  misc_feature 1..20: note = chemically synthesized
  source 1..20: mol_type = other DNA
ctctatgtgtccaccccaaa

SEQ ID NO: 47317 - DNA, 20 bp, synthetic construct
  misc_feature 1..20: note = chemically synthesized
  source 1..20: mol_type = other DNA
ctcacctcaccatatctctt

SEQ ID NO: 47318 - DNA, 20 bp, synthetic construct
  misc_feature 1..20: note = chemically synthesized
  source 1..20: mol_type = other DNA
acctcaccatatctcttgag

SEQ ID NO: 47319 - DNA, 20 bp, synthetic construct
  misc_feature 1..20: note = chemically synthesized
  source 1..20: mol_type = other DNA
cctcaccatatctcttgagt

SEQ ID NO: 47320 - DNA, 20 bp, synthetic construct
  misc_feature 1..20: note = chemically synthesized
  source 1..20: mol_type = other DNA
tcaccatatctcttgagtgg

SEQ ID NO: 47321 - DNA, 20 bp, synthetic construct
  misc_feature 1..20: note = chemically synthesized
  source 1..20: mol_type = other DNA
atctcttgagtgggagcaca

SEQ ID NO: 47322 - DNA, 20 bp, synthetic construct
  misc_feature 1..20: note = chemically synthesized
  source 1..20: mol_type = other DNA
cttgagtgggagcacataga

SEQ ID NO: 47323 - DNA, 20 bp, synthetic construct
  misc_feature 1..20: note = chemically synthesized
  source 1..20: mol_type = other DNA
ttgagtgggagcacatagat

SEQ ID NO: 47324 - DNA, 20 bp, synthetic construct
  misc_feature 1..20: note = chemically synthesized
  source 1..20: mol_type = other DNA
agtgggagcacatagatagg

SEQ ID NO: 47325 - DNA, 20 bp, synthetic construct
  misc_feature 1..20: note = chemically synthesized
  source 1..20: mol_type = other DNA
taggcggtgctaccatctaa

SEQ ID NO: 47326 - DNA, 20 bp, synthetic construct
  misc_feature 1..20: note = chemically synthesized
  source 1..20: mol_type = other DNA
aattcctttgtcatattttt

SEQ ID NO: 47327 - DNA, 20 bp, synthetic construct
  misc_feature 1..20: note = chemically synthesized
  source 1..20: mol_type = other DNA
gtccccactaataacccaca

SEQ ID NO: 47328 - DNA, 20 bp, synthetic construct
  misc_feature 1..20: note = chemically synthesized
  source 1..20: mol_type = other DNA
cccactaataacccacaaag

SEQ ID NO: 47329 - DNA, 20 bp, synthetic construct
  misc_feature 1..20: note = chemically synthesized
  source 1..20: mol_type = other DNA
ccacaaagcagaataaatac

SEQ ID NO: 47330 - DNA, 20 bp, synthetic construct
  misc_feature 1..20: note = chemically synthesized
  source 1..20: mol_type = other DNA
atcactcaactgctgtcttg

SEQ ID NO: 47331 - DNA, 20 bp, synthetic construct
  misc_feature 1..20: note = chemically synthesized
  source 1..20: mol_type = other DNA
tcttgtagcatacattaatt

SEQ ID NO: 47332 - DNA, 20 bp, synthetic construct
  misc_feature 1..20: note = chemically synthesized
  source 1..20: mol_type = other DNA
gtcactctgtattttaaatg

SEQ ID NO: 47333 - DNA, 20 bp, synthetic construct
  misc_feature 1..20: note = chemically synthesized
  source 1..20: mol_type = other DNA
cactctgtattttaaatgaa

SEQ ID NO: 47334 - DNA, 20 bp, synthetic construct
  misc_feature 1..20: note = chemically synthesized
  source 1..20: mol_type = other DNA
tgtattttaaatgaagagat

SEQ ID NO: 47335 - DNA, 20 bp, synthetic construct
  misc_feature 1..20: note = chemically synthesized
  source 1..20: mol_type = other DNA
gtattttaaatgaagagatg

SEQ ID NO: 47336 - DNA, 20 bp, synthetic construct
  misc_feature 1..20: note = chemically synthesized
  source 1..20: mol_type = other DNA
tattttaaatgaagagatga

SEQ ID NO: 47337 - DNA, 20 bp, synthetic construct
  misc_feature 1..20: note = chemically synthesized
  source 1..20: mol_type = other DNA
cttattgttcatttctcgat

SEQ ID NO: 47338 - DNA, 20 bp, synthetic construct
  misc_feature 1..20: note = chemically synthesized
  source 1..20: mol_type = other DNA
ttattgttcatttctcgatg

SEQ ID NO: 47339 - DNA, 20 bp, synthetic construct
  misc_feature 1..20: note = chemically synthesized
  source 1..20: mol_type = other DNA
attgttcatttctcgatgag

SEQ ID NO: 47340 - DNA, 20 bp, synthetic construct
  misc_feature 1..20: note = chemically synthesized
  source 1..20: mol_type = other DNA
ggagttttcacattcacctt

SEQ ID NO: 47341 - DNA, 20 bp, synthetic construct
  misc_feature 1..20: note = chemically synthesized
  source 1..20: mol_type = other DNA
gttttcacattcacctttag

SEQ ID NO: 47342 - DNA, 20 bp, synthetic construct
  misc_feature 1..20: note = chemically synthesized
  source 1..20: mol_type = other DNA
acctttagtggaaaacacat

SEQ ID NO: 47343 - DNA, 20 bp, synthetic construct
  misc_feature 1..20: note = chemically synthesized
  source 1..20: mol_type = other DNA
acacataagtacacatctta

SEQ ID NO: 47344 - DNA, 20 bp, synthetic construct
  misc_feature 1..20: note = chemically synthesized
  source 1..20: mol_type = other DNA
cacataagtacacatcttac

SEQ ID NO: 47345 - DNA, 20 bp, synthetic construct
  misc_feature 1..20: note = chemically synthesized
  source 1..20: mol_type = other DNA
aaatataccaaactgacatg

SEQ ID NO: 47346 - DNA, 20 bp, synthetic construct
  misc_feature 1..20: note = chemically synthesized
  source 1..20: mol_type = other DNA
agcatgaatgcttgtgcatg

SEQ ID NO: 47347 - DNA, 20 bp, synthetic construct
  misc_feature 1..20: note = chemically synthesized
  source 1..20: mol_type = other DNA
tgtagtcatataaaatcttg

SEQ ID NO: 47348 - DNA, 20 bp, synthetic construct
  misc_feature 1..20: note = chemically synthesized
  source 1..20: mol_type = other DNA
cattctctgatatacacata

SEQ ID NO: 47349 - DNA, 20 bp, synthetic construct
  misc_feature 1..20: note = chemically synthesized
  source 1..20: mol_type = other DNA
caaacattccatgcacacat

SEQ ID NO: 47350 - DNA, 20 bp, synthetic construct
  misc_feature 1..20: note = chemically synthesized
  source 1..20: mol_type = other DNA
cataagaacacacactgtta

SEQ ID NO: 47351 - DNA, 20 bp, synthetic construct
  misc_feature 1..20: note = chemically synthesized
  source 1..20: mol_type = other DNA
actgttacagatgcatactt

SEQ ID NO: 47352 - DNA, 20 bp, synthetic construct
  misc_feature 1..20: note = chemically synthesized
  source 1..20: mol_type = other DNA
gtgcattgacaaaattaccc

SEQ ID NO: 47353 - DNA, 20 bp, synthetic construct
  misc_feature 1..20: note = chemically synthesized
  source 1..20: mol_type = other DNA
caaaattaccccagtcaatc

SEQ ID NO: 47354 - DNA, 20 bp, synthetic construct
  misc_feature 1..20: note = chemically synthesized
  source 1..20: mol_type = other DNA
aaattaccccagtcaatcta

SEQ ID NO: 47355 - DNA, 20 bp, synthetic construct
  misc_feature 1..20: note = chemically synthesized
  source 1..20: mol_type = other DNA
cccagtcaatctagagaatt

SEQ ID NO: 47356 - DNA, 20 bp, synthetic construct
  misc_feature 1..20: note = chemically synthesized
  source 1..20: mol_type = other DNA
atttctgcatttgactctgt

SEQ ID NO: 47357 - DNA, 20 bp, synthetic construct
  misc_feature 1..20: note = chemically synthesized
  source 1..20: mol_type = other DNA
tacatgctgttcatttactc

SEQ ID NO: 47358 - DNA, 20 bp, synthetic construct
  misc_feature 1..20: note = chemically synthesized
  source 1..20: mol_type = other DNA
acatgctgttcatttactct

SEQ ID NO: 47359 - DNA, 20 bp, synthetic construct
  misc_feature 1..20: note = chemically synthesized
  source 1..20: mol_type = other DNA
ctatcttgtactcatacttt

SEQ ID NO: 47360 - DNA, 20 bp, synthetic construct
  misc_feature 1..20: note = chemically synthesized
  source 1..20: mol_type = other DNA
acttatatgttatctcaact

SEQ ID NO: 47361 - DNA, 20 bp, synthetic construct
  misc_feature 1..20: note = chemically synthesized
  source 1..20: mol_type = other DNA
tatatgttatctcaactaag

SEQ ID NO: 47362 - DNA, 20 bp, synthetic construct
  misc_feature 1..20: note = chemically synthesized
  source 1..20: mol_type = other DNA
tatttttttttaattttaac

SEQ ID NO: 47363 - DNA, 20 bp, synthetic construct
  misc_feature 1..20: note = chemically synthesized
  source 1..20: mol_type = other DNA
atttttttttaattttaact

SEQ ID NO: 47364 - DNA, 20 bp, synthetic construct
  misc_feature 1..20: note = chemically synthesized
  source 1..20: mol_type = other DNA
tttaattttaactgggctta

SEQ ID NO: 47365 - DNA, 20 bp, synthetic construct
  misc_feature 1..20: note = chemically synthesized
  source 1..20: mol_type = other DNA
tataaactctgctacaatta

SEQ ID NO: 47366 - DNA, 20 bp, synthetic construct
  misc_feature 1..20: note = chemically synthesized
  source 1..20: mol_type = other DNA
ataaactctgctacaattat

SEQ ID NO: 47367 - DNA, 20 bp, synthetic construct
  misc_feature 1..20: note = chemically synthesized
  source 1..20: mol_type = other DNA
gggctctttcttataatatt

SEQ ID NO: 47368 - DNA, 20 bp, synthetic construct
  misc_feature 1..20: note = chemically synthesized
  source 1..20: mol_type = other DNA
ctaaattttaacctctttta

SEQ ID NO: 47369 - DNA, 20 bp, synthetic construct
  misc_feature 1..20: note = chemically synthesized
  source 1..20: mol_type = other DNA
aattttaacctcttttatgg

SEQ ID NO: 47370 - DNA, 20 bp, synthetic construct
  misc_feature 1..20: note = chemically synthesized
  source 1..20: mol_type = other DNA
ttttaacctcttttatggta

SEQ ID NO: 47371 - DNA, 20 bp, synthetic construct
  misc_feature 1..20: note = chemically synthesized
  source 1..20: mol_type = other DNA
cttgtaaactcttatttccc

SEQ ID NO: 47372 - DNA, 20 bp, synthetic construct
  misc_feature 1..20: note = chemically synthesized
  source 1..20: mol_type = other DNA
actcttatttccctagtatt

SEQ ID NO: 47373 - DNA, 20 bp, synthetic construct
  misc_feature 1..20: note = chemically synthesized
  source 1..20: mol_type = other DNA
tcttatttccctagtatttg

SEQ ID NO: 47374 - DNA, 20 bp, synthetic construct
  misc_feature 1..20: note = chemically synthesized
  source 1..20: mol_type = other DNA
agtatttggagatgaaaaaa

SEQ ID NO: 47375 - DNA, 20 bp, synthetic construct
  misc_feature 1..20: note = chemically synthesized
  source 1..20: mol_type = other DNA
aagattaaattatccaaaat

SEQ ID NO: 47376 - DNA, 20 bp, synthetic construct
  misc_feature 1..20: note = chemically synthesized
  source 1..20: mol_type = other DNA
atctctcttttctacattat

SEQ ID NO: 47377 - DNA, 20 bp, synthetic construct
  misc_feature 1..20: note = chemically synthesized
  source 1..20: mol_type = other DNA
tatgagtattacactatcca

SEQ ID NO: 47378 - DNA, 20 bp, synthetic construct
  misc_feature 1..20: note = chemically synthesized
  source 1..20: mol_type = other DNA
tgagtattacactatccata

SEQ ID NO: 47379 - DNA, 20 bp, synthetic construct
  misc_feature 1..20: note = chemically synthesized
  source 1..20: mol_type = other DNA
gtattacactatccatagag

SEQ ID NO: 47380 - DNA, 20 bp, synthetic construct
  misc_feature 1..20: note = chemically synthesized
  source 1..20: mol_type = other DNA
atccatagagaagtttgttt

SEQ ID NO: 47381 - DNA, 20 bp, synthetic construct
  misc_feature 1..20: note = chemically synthesized
  source 1..20: mol_type = other DNA
gtttgtttgagacctaaact

SEQ ID NO: 47382 - DNA, 20 bp, synthetic construct
  misc_feature 1..20: note = chemically synthesized
  source 1..20: mol_type = other DNA
tttgtttgagacctaaactg

SEQ ID NO: 47383 - DNA, 20 bp, synthetic construct
  misc_feature 1..20: note = chemically synthesized
  source 1..20: mol_type = other DNA
gacctaaactgaggaacctt

SEQ ID NO: 47384 - DNA, 20 bp, synthetic construct
  misc_feature 1..20: note = chemically synthesized
  source 1..20: mol_type = other DNA
aaaatgactatgtgatatct

SEQ ID NO: 47385 - DNA, 20 bp, synthetic construct
  misc_feature 1..20: note = chemically synthesized
  source 1..20: mol_type = other DNA
atgtgatatcttagtattta

SEQ ID NO: 47386 - DNA, 20 bp, synthetic construct
  misc_feature 1..20: note = chemically synthesized
  source 1..20: mol_type = other DNA
tgtgatatcttagtatttat

SEQ ID NO: 47387 - DNA, 20 bp, synthetic construct
  misc_feature 1..20: note = chemically synthesized
  source 1..20: mol_type = other DNA
tcttagtatttataggtcat

SEQ ID NO: 47388 - DNA, 20 bp, synthetic construct
  misc_feature 1..20: note = chemically synthesized
  source 1..20: mol_type = other DNA
cttagtatttataggtcatg

SEQ ID NO: 47389 - DNA, 20 bp, synthetic construct
  misc_feature 1..20: note = chemically synthesized
  source 1..20: mol_type = other DNA
tccttcctctgcctctgcta

SEQ ID NO: 47390 - DNA, 20 bp, synthetic construct
  misc_feature 1..20: note = chemically synthesized
  source 1..20: mol_type = other DNA
tgcctctgctatagtttgat

SEQ ID NO: 47391 - DNA, 20 bp, synthetic construct
  misc_feature 1..20: note = chemically synthesized
  source 1..20: mol_type = other DNA
ctatagtttgattagtcaac

SEQ ID NO: 47392 - DNA, 20 bp, synthetic construct
  misc_feature 1..20: note = chemically synthesized
  source 1..20: mol_type = other DNA
tgtcatgcatttattcacat

SEQ ID NO: 47393 - DNA, 20 bp, synthetic construct
  misc_feature 1..20: note = chemically synthesized
  source 1..20: mol_type = other DNA
tcagaatttcatacactaat

SEQ ID NO: 47394 - DNA, 20 bp, synthetic construct
  misc_feature 1..20: note = chemically synthesized
  source 1..20: mol_type = other DNA
tttcatacactaataagaca

SEQ ID NO: 47395 - DNA, 20 bp, synthetic construct
  misc_feature 1..20: note = chemically synthesized
  source 1..20: mol_type = other DNA
acactaataagacatagtat

SEQ ID NO: 47396 - DNA, 20 bp, synthetic construct
  misc_feature 1..20: note = chemically synthesized
  source 1..20: mol_type = other DNA
ctaataagacatagtatcag

SEQ ID NO: 47397 - DNA, 20 bp, synthetic construct
  misc_feature 1..20: note = chemically synthesized
  source 1..20: mol_type = other DNA
taagacatagtatcagaagt

SEQ ID NO: 47398 - DNA, 20 bp, synthetic construct
  misc_feature 1..20: note = chemically synthesized
  source 1..20: mol_type = other DNA
agtatcagaagtcagtttat

SEQ ID NO: 47399 - DNA, 20 bp, synthetic construct
  misc_feature 1..20: note = chemically synthesized
  source 1..20: mol_type = other DNA
agtcagtttattagttatat

SEQ ID NO: 47400 - DNA, 20 bp, synthetic construct
  misc_feature 1..20: note = chemically synthesized
  source 1..20: mol_type = other DNA
agtttattagttatatcagt

SEQ ID NO: 47401 - DNA, 20 bp, synthetic construct
  misc_feature 1..20: note = chemically synthesized
  source 1..20: mol_type = other DNA
gtttattagttatatcagtt

SEQ ID NO: 47402 - DNA, 20 bp, synthetic construct
  misc_feature 1..20: note = chemically synthesized
  source 1..20: mol_type = other DNA
tttattagttatatcagtta

SEQ ID NO: 47403 - DNA, 20 bp, synthetic construct
  misc_feature 1..20: note = chemically synthesized
  source 1..20: mol_type = other DNA
tatatcagttagggtccatc

SEQ ID NO: 47404 - DNA, 20 bp, synthetic construct
  misc_feature 1..20: note = chemically synthesized
  source 1..20: mol_type = other DNA
atatcagttagggtccatca

SEQ ID NO: 47405 - DNA, 20 bp, synthetic construct
  misc_feature 1..20: note = chemically synthesized
  source 1..20: mol_type = other DNA
cagttagggtccatcaagga

SEQ ID NO: 47406 - DNA, 20 bp, synthetic construct
  misc_feature 1..20: note = chemically synthesized
  source 1..20: mol_type = other DNA
agttagggtccatcaaggaa

SEQ ID NO: 47407 - DNA, 20 bp, synthetic construct
  misc_feature 1..20: note = chemically synthesized
  source 1..20: mol_type = other DNA
aggaaaggacaaaccattat

SEQ ID NO: 47408 - DNA, 20 bp, synthetic construct
  misc_feature 1..20: note = chemically synthesized
  source 1..20: mol_type = other DNA
ccattatcagttactcaacc

SEQ ID NO: 47409 - DNA, 20 bp, synthetic construct
  misc_feature 1..20: note = chemically synthesized
  source 1..20: mol_type = other DNA
actcaacctagaattaaata

SEQ ID NO: 47410 - DNA, 20 bp, synthetic construct
  misc_feature 1..20: note = chemically synthesized
  source 1..20: mol_type = other DNA
gaattaaatacagctcttaa

SEQ ID NO: 47411 - DNA, 20 bp, synthetic construct
  misc_feature 1..20: note = chemically synthesized
  source 1..20: mol_type = other DNA
atagttaattatccttgtat

SEQ ID NO: 47412 - DNA, 20 bp, synthetic construct
  misc_feature 1..20: note = chemically synthesized
  source 1..20: mol_type = other DNA
gttaattatccttgtattgg

SEQ ID NO: 47413 - DNA, 20 bp, synthetic construct
  misc_feature 1..20: note = chemically synthesized
  source 1..20: mol_type = other DNA
taattatccttgtattggaa

SEQ ID NO: 47414 - DNA, 20 bp, synthetic construct
  misc_feature 1..20: note = chemically synthesized
  source 1..20: mol_type = other DNA
aagagctaaaatatcaaata

SEQ ID NO: 47415 - DNA, 20 bp, synthetic construct
  misc_feature 1..20: note = chemically synthesized
  source 1..20: mol_type = other DNA
agagctaaaatatcaaataa

SEQ ID NO: 47416 - DNA, 20 bp, synthetic construct
  misc_feature 1..20: note = chemically synthesized
  source 1..20: mol_type = other DNA
ctaaaatatcaaataaagga

SEQ ID NO: 47417 - DNA, 20 bp, synthetic construct
  misc_feature 1..20: note = chemically synthesized
  source 1..20: mol_type = other DNA
atatcaaataaaggacagtg

SEQ ID NO: 47418 - DNA, 20 bp, synthetic construct
  misc_feature 1..20: note = chemically synthesized
  source 1..20: mol_type = other DNA
taaaggacagtgcagaaatc

SEQ ID NO: 47419 - DNA, 20 bp, synthetic construct
  misc_feature 1..20: note = chemically synthesized
  source 1..20: mol_type = other DNA
cagtgcagaaatctagatgt

SEQ ID NO: 47420 - DNA, 20 bp, synthetic construct
  misc_feature 1..20: note = chemically synthesized
  source 1..20: mol_type = other DNA
aatctagatgttagtaacat

SEQ ID NO: 47421 - DNA, 20 bp, synthetic construct
  misc_feature 1..20: note = chemically synthesized
  source 1..20: mol_type = other DNA
cagaaaacctcttccgccat

SEQ ID NO: 47422 - DNA, 20 bp, synthetic construct
  misc_feature 1..20: note = chemically synthesized
  source 1..20: mol_type = other DNA
agaaaacctcttccgccatt

SEQ ID NO: 47423 - DNA, 20 bp, synthetic construct
  misc_feature 1..20: note = chemically synthesized
  source 1..20: mol_type = other DNA
acctcttccgccattaggcc

SEQ ID NO: 47424 - DNA, 20 bp, synthetic construct
  misc_feature 1..20: note = chemically synthesized
  source 1..20: mol_type = other DNA
tcttccgccattaggcctag

SEQ ID NO: 47425 - DNA, 20 bp, synthetic construct
  misc_feature 1..20: note = chemically synthesized
  source 1..20: mol_type = other DNA
cttccgccattaggcctaga

SEQ ID NO: 47426 - DNA, 20 bp, synthetic construct
  misc_feature 1..20: note = chemically synthesized
  source 1..20: mol_type = other DNA
ttccgccattaggcctagaa

SEQ ID NO: 47427 - DNA, 20 bp, synthetic construct
  misc_feature 1..20: note = chemically synthesized
  source 1..20: mol_type = other DNA
cgccattaggcctagaaggg

SEQ ID NO: 47428 - DNA, 20 bp, synthetic construct
  misc_feature 1..20: note = chemically synthesized
  source 1..20: mol_type = other DNA
cattaggcctagaagggcag

SEQ ID NO: 47429 - DNA, 20 bp, synthetic construct
  misc_feature 1..20: note = chemically synthesized
  source 1..20: mol_type = other DNA
attaggcctagaagggcaga

SEQ ID NO: 47430 - DNA, 20 bp, synthetic construct
  misc_feature 1..20: note = chemically synthesized
  source 1..20: mol_type = other DNA
taggcctagaagggcagaag

SEQ ID NO: 47431 - DNA, 20 bp, synthetic construct
  misc_feature 1..20: note = chemically synthesized
  source 1..20: mol_type = other DNA
ggagaaaatgtttataccac

SEQ ID NO: 47432 - DNA, 20 bp, synthetic construct
  misc_feature 1..20: note = chemically synthesized
  source 1..20: mol_type = other DNA
agaaaatgtttataccacca

SEQ ID NO: 47433 - DNA, 20 bp, synthetic construct
  misc_feature 1..20: note = chemically synthesized
  source 1..20: mol_type = other DNA
atgtttataccaccagagtc

SEQ ID NO: 47434 - DNA, 20 bp, synthetic construct
  misc_feature 1..20: note = chemically synthesized
  source 1..20: mol_type = other DNA
ataccaccagagtccagaac

SEQ ID NO: 47435 - DNA, 20 bp, synthetic construct
  misc_feature 1..20: note = chemically synthesized
  source 1..20: mol_type = other DNA
accaccagagtccagaacca

SEQ ID NO: 47436 - DNA, 20 bp, synthetic construct
  misc_feature 1..20: note = chemically synthesized
  source 1..20: mol_type = other DNA
ccagaaccagagcccataac

SEQ ID NO: 47437 - DNA, 20 bp, synthetic construct
  misc_feature 1..20: note = chemically synthesized
  source 1..20: mol_type = other DNA
agaaccagagcccataacca

SEQ ID NO: 47438 - DNA, 20 bp, synthetic construct
  misc_feature 1..20: note = chemically synthesized
  source 1..20: mol_type = other DNA
gaaccagagcccataaccag

SEQ ID NO: 47439 - DNA, 20 bp, synthetic construct
  misc_feature 1..20: note = chemically synthesized
  source 1..20: mol_type = other DNA
gcccataaccagaggtccac

SEQ ID NO: 47440 - DNA, 20 bp, synthetic construct
  misc_feature 1..20: note = chemically synthesized
  source 1..20: mol_type = other DNA
aaccagaggtccactggatt

SEQ ID NO: 47441 - DNA, 20 bp, synthetic construct
  misc_feature 1..20: note = chemically synthesized
  source 1..20: mol_type = other DNA
agaggtccactggattcagt

SEQ ID NO: 47442 - DNA, 20 bp, synthetic construct
  misc_feature 1..20: note = chemically synthesized
  source 1..20: mol_type = other DNA
gtccactggattcagtgagc

SEQ ID NO: 47443 - DNA, 20 bp, synthetic construct
  misc_feature 1..20: note = chemically synthesized
  source 1..20: mol_type = other DNA
cactggattcagtgagctag

SEQ ID NO: 47444 - DNA, 20 bp, synthetic construct
  misc_feature 1..20: note = chemically synthesized
  source 1..20: mol_type = other DNA
actggattcagtgagctagt

SEQ ID NO: 47445 - DNA, 20 bp, synthetic construct
  misc_feature 1..20: note = chemically synthesized
  source 1..20: mol_type = other DNA
gtgagctagtgggtgctcct

SEQ ID NO: 47446 - DNA, 20 bp, synthetic construct
  misc_feature 1..20: note = chemically synthesized
  source 1..20: mol_type = other DNA
gagctagtgggtgctccttg

SEQ ID NO: 47447 - DNA, 20 bp, synthetic construct
  misc_feature 1..20: note = chemically synthesized
  source 1..20: mol_type = other DNA
gctagtgggtgctccttgga

SEQ ID NO: 47448 - DNA, 20 bp, synthetic construct
  misc_feature 1..20: note = chemically synthesized
  source 1..20: mol_type = other DNA
tagtgggtgctccttggaga

SEQ ID NO: 47449 - DNA, 20 bp, synthetic construct
  misc_feature 1..20: note = chemically synthesized
  source 1..20: mol_type = other DNA
gggtgctccttggagagagc

SEQ ID NO: 47450 - DNA, 20 bp, synthetic construct
  misc_feature 1..20: note = chemically synthesized
  source 1..20: mol_type = other DNA
agagagccagaactgtctaa

SEQ ID NO: 47451 - DNA, 20 bp, synthetic construct
  misc_feature 1..20: note = chemically synthesized
  source 1..20: mol_type = other DNA
gagagccagaactgtctaat

SEQ ID NO: 47452 - DNA, 20 bp, synthetic construct
  misc_feature 1..20: note = chemically synthesized
  source 1..20: mol_type = other DNA
agagccagaactgtctaatg

SEQ ID NO: 47453 - DNA, 20 bp, synthetic construct
  misc_feature 1..20: note = chemically synthesized
  source 1..20: mol_type = other DNA
gagccagaactgtctaatgg

SEQ ID NO: 47454 - DNA, 20 bp, synthetic construct
  misc_feature 1..20: note = chemically synthesized
  source 1..20: mol_type = other DNA
actgtctaatgggggcatca

SEQ ID NO: 47455 - DNA, 20 bp, synthetic construct
  misc_feature 1..20: note = chemically synthesized
  source 1..20: mol_type = other DNA
taatgggggcatcaaagtat

SEQ ID NO: 47456 - DNA, 20 bp, synthetic construct
  misc_feature 1..20: note = chemically synthesized
  source 1..20: mol_type = other DNA
agccataaaaaaccataaaa

SEQ ID NO: 47457 - DNA, 20 bp, synthetic construct
  misc_feature 1..20: note = chemically synthesized
  source 1..20: mol_type = other DNA
ataaaaaagactgtctgctg

SEQ ID NO: 47458 - DNA, 20 bp, synthetic construct
  misc_feature 1..20: note = chemically synthesized
  source 1..20: mol_type = other DNA
taaaaaagactgtctgctgt

SEQ ID NO: 47459 - DNA, 20 bp, synthetic construct
  misc_feature 1..20: note = chemically synthesized
  source 1..20: mol_type = other DNA
aaaaagactgtctgctgtag

SEQ ID NO: 47460 - DNA, 20 bp, synthetic construct
  misc_feature 1..20: note = chemically synthesized
  source 1..20: mol_type = other DNA
tctgctgtaggagatccgtt

SEQ ID NO: 47461 - DNA, 20 bp, synthetic construct
  misc_feature 1..20: note = chemically synthesized
  source 1..20: mol_type = other DNA
tgctgtaggagatccgttca

SEQ ID NO: 47462 - DNA, 20 bp, synthetic construct
  misc_feature 1..20: note = chemically synthesized
  source 1..20: mol_type = other DNA
ctgtaggagatccgttcaga

SEQ ID NO: 47463 - DNA, 20 bp, synthetic construct
  misc_feature 1..20: note = chemically synthesized
  source 1..20: mol_type = other DNA
gtaggagatccgttcagaga

SEQ ID NO: 47464 - DNA, 20 bp, synthetic construct
  misc_feature 1..20: note = chemically synthesized
  source 1..20: mol_type = other DNA
aggagatccgttcagagaga

SEQ ID NO: 47465 - DNA, 20 bp, synthetic construct
  misc_feature 1..20: note = chemically synthesized
  source 1..20: mol_type = other DNA
gagatccgttcagagagaga

SEQ ID NO: 47466 - DNA, 20 bp, synthetic construct
  misc_feature 1..20: note = chemically synthesized
  source 1..20: mol_type = other DNA
gatccgttcagagagagaga

SEQ ID NO: 47467 - DNA, 20 bp, synthetic construct
  misc_feature 1..20: note = chemically synthesized
  source 1..20: mol_type = other DNA
gttcagagagagagagagac

SEQ ID NO: 47468 - DNA, 20 bp, synthetic construct
  misc_feature 1..20: note = chemically synthesized
  source 1..20: mol_type = other DNA
atcttgcttatgctttccct

SEQ ID NO: 47469 - DNA, 20 bp, synthetic construct
  misc_feature 1..20: note = chemically synthesized
  source 1..20: mol_type = other DNA
tgcttatgctttccctcagc

SEQ ID NO: 47470 - DNA, 20 bp, synthetic construct
  misc_feature 1..20: note = chemically synthesized
  source 1..20: mol_type = other DNA
tcagccagtgtttaccattg

SEQ ID NO: 47471 - DNA, 20 bp, synthetic construct
  misc_feature 1..20: note = chemically synthesized
  source 1..20: mol_type = other DNA
cagaatgtacatgcgactga

SEQ ID NO: 47472 - DNA, 20 bp, synthetic construct
  misc_feature 1..20: note = chemically synthesized
  source 1..20: mol_type = other DNA
agaatgtacatgcgactgaa

SEQ ID NO: 47473 - DNA, 20 bp, synthetic construct
  misc_feature 1..20: note = chemically synthesized
  source 1..20: mol_type = other DNA
gaatgtacatgcgactgaaa

SEQ ID NO: 47474 - DNA, 20 bp, synthetic construct
  misc_feature 1..20: note = chemically synthesized
  source 1..20: mol_type = other DNA
gtacatgcgactgaaagggt

SEQ ID NO: 47475 - DNA, 20 bp, synthetic construct
  misc_feature 1..20: note = chemically synthesized
  source 1..20: mol_type = other DNA
tacatgcgactgaaagggtg

SEQ ID NO: 47476 - DNA, 20 bp, synthetic construct
  misc_feature 1..20: note = chemically synthesized
  source 1..20: mol_type = other DNA
actgaaagggtgaggaaacc

SEQ ID NO: 47477 - DNA, 20 bp, synthetic construct
  misc_feature 1..20: note = chemically synthesized
  source 1..20: mol_type = other DNA
ctgaaagggtgaggaaacct

SEQ ID NO: 47478 - DNA, 20 bp, synthetic construct
  misc_feature 1..20: note = chemically synthesized
  source 1..20: mol_type = other DNA
tgaggaaacctgggaaatgt

SEQ ID NO: 47479 - DNA, 20 bp, synthetic construct
  misc_feature 1..20: note = chemically synthesized
  source 1..20: mol_type = other DNA
aaatgtcagttcctcaaata

SEQ ID NO: 47480 - DNA, 20 bp, synthetic construct
  misc_feature 1..20: note = chemically synthesized
  source 1..20: mol_type = other DNA
atgtcagttcctcaaataca

SEQ ID NO: 47481 - DNA, 20 bp, synthetic construct
  misc_feature 1..20: note = chemically synthesized
  source 1..20: mol_type = other DNA
cctcaaatacagagaacact

SEQ ID NO: 47482 - DNA, 20 bp, synthetic construct
  misc_feature 1..20: note = chemically synthesized
  source 1..20: mol_type = other DNA
ctcaaatacagagaacactg

SEQ ID NO: 47483 - DNA, 20 bp, synthetic construct
  misc_feature 1..20: note = chemically synthesized
  source 1..20: mol_type = other DNA
tcaaatacagagaacactga

SEQ ID NO: 47484 - DNA, 20 bp, synthetic construct
  misc_feature 1..20: note = chemically synthesized
  source 1..20: mol_type = other DNA
aatacagagaacactgaggg

SEQ ID NO: 47485 - DNA, 20 bp, synthetic construct
  misc_feature 1..20: note = chemically synthesized
  source 1..20: mol_type = other DNA
atacagagaacactgaggga

SEQ ID NO: 47486 - DNA, 20 bp, synthetic construct
  misc_feature 1..20: note = chemically synthesized
  source 1..20: mol_type = other DNA
gagaacactgagggaaggat

SEQ ID NO: 47487 - DNA, 20 bp, synthetic construct
  misc_feature 1..20: note = chemically synthesized
  source 1..20: mol_type = other DNA
aggatgagaaataaatgtga

SEQ ID NO: 47488 - DNA, 20 bp, synthetic construct
  misc_feature 1..20: note = chemically synthesized
  source 1..20: mol_type = other DNA
atgagaaataaatgtgaaag

SEQ ID NO: 47489 - DNA, 20 bp, synthetic construct
  misc_feature 1..20: note = chemically synthesized
  source 1..20: mol_type = other DNA
aatgtgaaagcagacatgaa

SEQ ID NO: 47490 - DNA, 20 bp, synthetic construct
  misc_feature 1..20: note = chemically synthesized
  source 1..20: mol_type = other DNA
cagacatgaatggtaattga

SEQ ID NO: 47491 - DNA, 20 bp, synthetic construct
  misc_feature 1..20: note = chemically synthesized
  source 1..20: mol_type = other DNA
acatgaatggtaattgacag

SEQ ID NO: 47492 - DNA, 20 bp, synthetic construct
  misc_feature 1..20: note = chemically synthesized
  source 1..20: mol_type = other DNA
catgaatggtaattgacaga

SEQ ID NO: 47493 - DNA, 20 bp, synthetic construct
  misc_feature 1..20: note = chemically synthesized
  source 1..20: mol_type = other DNA
ggtaattgacagaaggaaac

SEQ ID NO: 47494 - DNA, 20 bp, synthetic construct
  misc_feature 1..20: note = chemically synthesized
  source 1..20: mol_type = other DNA
gtaattgacagaaggaaact

SEQ ID NO: 47495 - DNA, 20 bp, synthetic construct
  misc_feature 1..20: note = chemically synthesized
  source 1..20: mol_type = other DNA
gaaggaaactaggatgtgtc

SEQ ID NO: 47496 - DNA, 20 bp, synthetic construct
  misc_feature 1..20: note = chemically synthesized
  source 1..20: mol_type = other DNA
gtccagtaaatgaataatta

SEQ ID NO: 47497 - DNA, 20 bp, synthetic construct
  misc_feature 1..20: note = chemically synthesized
  source 1..20: mol_type = other DNA
aaatgaataattacagtgtg

SEQ ID NO: 47498 - DNA, 20 bp, synthetic construct
  misc_feature 1..20: note = chemically synthesized
  source 1..20: mol_type = other DNA
gcaatgattaatgtattgat

SEQ ID NO: 47499 - DNA, 20 bp, synthetic construct
  misc_feature 1..20: note = chemically synthesized
  source 1..20: mol_type = other DNA
gataagataatatgaaaaca

SEQ ID NO: 47500 - DNA, 20 bp, synthetic construct
  misc_feature 1..20: note = chemically synthesized
  source 1..20: mol_type = other DNA
atgaaaacacagaattcaaa

SEQ ID NO: 47501 - DNA, 20 bp, synthetic construct
  misc_feature 1..20: note = chemically synthesized
  source 1..20: mol_type = other DNA
aaaacacagaattcaaacag

SEQ ID NO: 47502 - DNA, 20 bp, synthetic construct
  misc_feature 1..20: note = chemically synthesized
  source 1..20: mol_type = other DNA
aattcaaacagcagtgaact

SEQ ID NO: 47503 - DNA, 20 bp, synthetic construct
  misc_feature 1..20: note = chemically synthesized
  source 1..20: mol_type = other DNA
aaacagcagtgaactgagat

SEQ ID NO: 47504 - DNA, 20 bp, synthetic construct
  misc_feature 1..20: note = chemically synthesized
  source 1..20: mol_type = other DNA
gtgaactgagattagaattg

SEQ ID NO: 47505 - DNA, 20 bp, synthetic construct
  misc_feature 1..20: note = chemically synthesized
  source 1..20: mol_type = other DNA
gaactgagattagaattgtg

SEQ ID NO: 47506 - DNA, 20 bp, synthetic construct
  misc_feature 1..20: note = chemically synthesized
  source 1..20: mol_type = other DNA
actgagattagaattgtgga

SEQ ID NO: 47507 - DNA, 20 bp, synthetic construct
  misc_feature 1..20: note = chemically synthesized
  source 1..20: mol_type = other DNA
attagaattgtggagagcac

SEQ ID NO: 47508 - DNA, 20 bp, synthetic construct
  misc_feature 1..20: note = chemically synthesized
  source 1..20: mol_type = other DNA
tgtggagagcactggcattt

SEQ ID NO: 47509 - DNA, 20 bp, synthetic construct
  misc_feature 1..20: note = chemically synthesized
  source 1..20: mol_type = other DNA
gcatttaagaatgtcacact

SEQ ID NO: 47510 - DNA, 20 bp, synthetic construct
  misc_feature 1..20: note = chemically synthesized
  source 1..20: mol_type = other DNA
tcacacttagaatgtgtctc

SEQ ID NO: 47511 - DNA, 20 bp, synthetic construct
  misc_feature 1..20: note = chemically synthesized
  source 1..20: mol_type = other DNA
cacacttagaatgtgtctct

SEQ ID NO: 47512 - DNA, 20 bp, synthetic construct
  misc_feature 1..20: note = chemically synthesized
  source 1..20: mol_type = other DNA
attatctgaaaattatgaat

SEQ ID NO: 47513 - DNA, 20 bp, synthetic construct
  misc_feature 1..20: note = chemically synthesized
  source 1..20: mol_type = other DNA
ttatctgaaaattatgaatt

SEQ ID NO: 47514 - DNA, 20 bp, synthetic construct
  misc_feature 1..20: note = chemically synthesized
  source 1..20: mol_type = other DNA
aaaattatgaattaggtaca

SEQ ID NO: 47515 - DNA, 20 bp, synthetic construct
  misc_feature 1..20: note = chemically synthesized
  source 1..20: mol_type = other DNA
gctcaaataatttatttttt

SEQ ID NO: 47516 - DNA, 20 bp, synthetic construct
  misc_feature 1..20: note = chemically synthesized
  source 1..20: mol_type = other DNA
ctcaaataatttattttttc

SEQ ID NO: 47517 - DNA, 20 bp, synthetic construct
  misc_feature 1..20: note = chemically synthesized
  source 1..20: mol_type = other DNA
aataatttattttttcaggt

SEQ ID NO: 47518 - DNA, 20 bp, synthetic construct
  misc_feature 1..20: note = chemically synthesized
  source 1..20: mol_type = other DNA
atttattttttcaggttagc

SEQ ID NO: 47519 - DNA, 20 bp, synthetic construct
  misc_feature 1..20: note = chemically synthesized
  source 1..20: mol_type = other DNA
aactttttttttttttttct

SEQ ID NO: 47520 - DNA, 20 bp, synthetic construct
  misc_feature 1..20: note = chemically synthesized
  source 1..20: mol_type = other DNA
ttttttttttttttctgaga

SEQ ID NO: 47521 - DNA, 20 bp, synthetic construct
  misc_feature 1..20: note = chemically synthesized
  source 1..20: mol_type = other DNA
ttttttttttttctgagata

SEQ ID NO: 47522 - DNA, 20 bp, synthetic construct
  misc_feature 1..20: note = chemically synthesized
  source 1..20: mol_type = other DNA
tctgagatagagcattgcta

SEQ ID NO: 47523 - DNA, 20 bp, synthetic construct
  misc_feature 1..20: note = chemically synthesized
  source 1..20: mol_type = other DNA
agagcattgctatggttgcc

SEQ ID NO: 47524 - DNA, 20 bp, synthetic construct
  misc_feature 1..20: note = chemically synthesized
  source 1..20: mol_type = other DNA
gagcattgctatggttgccc

SEQ ID NO: 47525 - DNA, 20 bp, synthetic construct
  misc_feature 1..20: note = chemically synthesized
  source 1..20: mol_type = other DNA
attgctatggttgcccaggc

SEQ ID NO: 47526 - DNA, 20 bp, synthetic construct
  misc_feature 1..20: note = chemically synthesized
  source 1..20: mol_type = other DNA
tgctatggttgcccaggctg

SEQ ID NO: 47527 - DNA, 20 bp, synthetic construct
  misc_feature 1..20: note = chemically synthesized
  source 1..20: mol_type = other DNA
ttgcccaggctggagtgcaa

SEQ ID NO: 47528 - DNA, 20 bp, synthetic construct
  misc_feature 1..20: note = chemically synthesized
  source 1..20: mol_type = other DNA
tggagtgcaatggcatgatc

SEQ ID NO: 47529 - DNA, 20 bp, synthetic construct
  misc_feature 1..20: note = chemically synthesized
  source 1..20: mol_type = other DNA
ggagtgcaatggcatgatcc

SEQ ID NO: 47530 - DNA, 20 bp, synthetic construct
  misc_feature 1..20: note = chemically synthesized
  source 1..20: mol_type = other DNA
tcactgcaacatctgcctcc

SEQ ID NO: 47531 - DNA, 20 bp, synthetic construct
  misc_feature 1..20: note = chemically synthesized
  source 1..20: mol_type = other DNA
cactgcaacatctgcctccc

SEQ ID NO: 47532 - DNA, 20 bp, synthetic construct
  misc_feature 1..20: note = chemically synthesized
  source 1..20: mol_type = other DNA
aacatctgcctcccaggttc

SEQ ID NO: 47533 - DNA, 20 bp, synthetic construct
  misc_feature 1..20: note = chemically synthesized
  source 1..20: mol_type = other DNA
ttcaagcgattctcctgcct

SEQ ID NO: 47534 - DNA, 20 bp, synthetic construct
  misc_feature 1..20: note = chemically synthesized
  source 1..20: mol_type = other DNA
ttctcctgcctcagcctccc

SEQ ID NO: 47535 - DNA, 20 bp, synthetic construct
  misc_feature 1..20: note = chemically synthesized
  source 1..20: mol_type = other DNA
tcctgcctcagcctcccaag

SEQ ID NO: 47536 - DNA, 20 bp, synthetic construct
  misc_feature 1..20: note = chemically synthesized
  source 1..20: mol_type = other DNA
gcctcagcctcccaagtagc

SEQ ID NO: 47537 - DNA, 20 bp, synthetic construct
  misc_feature 1..20: note = chemically synthesized
  source 1..20: mol_type = other DNA
ctcccaagtagctggcacta

SEQ ID NO: 47538 - DNA, 20 bp, synthetic construct
  misc_feature 1..20: note = chemically synthesized
  source 1..20: mol_type = other DNA
tcccaagtagctggcactac

SEQ ID NO: 47539 - DNA, 20 bp, synthetic construct
  misc_feature 1..20: note = chemically synthesized
  source 1..20: mol_type = other DNA
gcatgtgccaccaccatgcc

SEQ ID NO: 47540 - DNA, 20 bp, synthetic construct
  misc_feature 1..20: note = chemically synthesized
  source 1..20: mol_type = other DNA
cctggctaattttctatttt

SEQ ID NO: 47541 - DNA, 20 bp, synthetic construct
  misc_feature 1..20: note = chemically synthesized
  source 1..20: mol_type = other DNA
ggctaattttctatttttag

SEQ ID NO: 47542 - DNA, 20 bp, synthetic construct
  misc_feature 1..20: note = chemically synthesized
  source 1..20: mol_type = other DNA
aattttctatttttagtaga

SEQ ID NO: 47543 - DNA, 20 bp, synthetic construct
  misc_feature 1..20: note = chemically synthesized
  source 1..20: mol_type = other DNA
attttctatttttagtagat

SEQ ID NO: 47544 - DNA, 20 bp, synthetic construct
  misc_feature 1..20: note = chemically synthesized
  source 1..20: mol_type = other DNA
ttttctatttttagtagata

SEQ ID NO: 47545 - DNA, 20 bp, synthetic construct
  misc_feature 1..20: note = chemically synthesized
  source 1..20: mol_type = other DNA
tttctatttttagtagatag

SEQ ID NO: 47546 - DNA, 20 bp, synthetic construct
  misc_feature 1..20: note = chemically synthesized
  source 1..20: mol_type = other DNA
ttctatttttagtagatagg

SEQ ID NO: 47547 - DNA, 20 bp, synthetic construct
  misc_feature 1..20: note = chemically synthesized
  source 1..20: mol_type = other DNA
gatagggggtttcaccatgt

SEQ ID NO: 47548 - DNA, 20 bp, synthetic construct
  misc_feature 1..20: note = chemically synthesized
  source 1..20: mol_type = other DNA
gggggtttcaccatgttggt

SEQ ID NO: 47549 - DNA, 20 bp, synthetic construct
  misc_feature 1..20: note = chemically synthesized
  source 1..20: mol_type = other DNA
ggggtttcaccatgttggtc

SEQ ID NO: 47550 - DNA, 20 bp, synthetic construct
  misc_feature 1..20: note = chemically synthesized
  source 1..20: mol_type = other DNA
tgatctcgaactcctaacat

SEQ ID NO: 47551 - DNA, 20 bp, synthetic construct
  misc_feature 1..20: note = chemically synthesized
  source 1..20: mol_type = other DNA
gatctcgaactcctaacatc

SEQ ID NO: 47552 - DNA, 20 bp, synthetic construct
  misc_feature 1..20: note = chemically synthesized
  source 1..20: mol_type = other DNA
atcaggtgatccaccctcct

SEQ ID NO: 47553 - DNA, 20 bp, synthetic construct
  misc_feature 1..20: note = chemically synthesized
  source 1..20: mol_type = other DNA
ccaccctcctcggcctctga

SEQ ID NO: 47554 - DNA, 20 bp, synthetic construct
  misc_feature 1..20: note = chemically synthesized
  source 1..20: mol_type = other DNA
tcctcggcctctgaaagtgc

SEQ ID NO: 47555 - DNA, 20 bp, synthetic construct
  misc_feature 1..20: note = chemically synthesized
  source 1..20: mol_type = other DNA
cctcggcctctgaaagtgct

SEQ ID NO: 47556 - DNA, 20 bp, synthetic construct
  misc_feature 1..20: note = chemically synthesized
  source 1..20: mol_type = other DNA
ctctgaaagtgctgggatca

SEQ ID NO: 47557 - DNA, 20 bp, synthetic construct
  misc_feature 1..20: note = chemically synthesized
  source 1..20: mol_type = other DNA
tctgaaagtgctgggatcac

SEQ ID NO: 47558 - DNA, 20 bp, synthetic construct
  misc_feature 1..20: note = chemically synthesized
  source 1..20: mol_type = other DNA
agtgctgggatcacaggcgt

SEQ ID NO: 47559 - DNA, 20 bp, synthetic construct
  misc_feature 1..20: note = chemically synthesized
  source 1..20: mol_type = other DNA
caggcgtgagccaccacacc

SEQ ID NO: 47560 - DNA, 20 bp, synthetic construct
  misc_feature 1..20: note = chemically synthesized
  source 1..20: mol_type = other DNA
gtgagccaccacacccagcc

SEQ ID NO: 47561 - DNA, 20 bp, synthetic construct
  misc_feature 1..20: note = chemically synthesized
  source 1..20: mol_type = other DNA
agccaagaatgtgaattttg

SEQ ID NO: 47562 - DNA, 20 bp, synthetic construct
  misc_feature 1..20: note = chemically synthesized
  source 1..20: mol_type = other DNA
caagaatgtgaattttgtag

SEQ ID NO: 47563 - DNA, 20 bp, synthetic construct
  misc_feature 1..20: note = chemically synthesized
  source 1..20: mol_type = other DNA
aagaatgtgaattttgtaga

SEQ ID NO: 47564 - DNA, 20 bp, synthetic construct
  misc_feature 1..20: note = chemically synthesized
  source 1..20: mol_type = other DNA
aacccatatttctctgaccc

SEQ ID NO: 47565 - DNA, 20 bp, synthetic construct
  misc_feature 1..20: note = chemically synthesized
  source 1..20: mol_type = other DNA
cccatatttctctgacccta

SEQ ID NO: 47566 - DNA, 20 bp, synthetic construct
  misc_feature 1..20: note = chemically synthesized
  source 1..20: mol_type = other DNA
ttctctgaccctagagtcct

SEQ ID NO: 47567 - DNA, 20 bp, synthetic construct
  misc_feature 1..20: note = chemically synthesized
  source 1..20: mol_type = other DNA
agtatacctcccataccatg

SEQ ID NO: 47568 - DNA, 20 bp, synthetic construct
  misc_feature 1..20: note = chemically synthesized
  source 1..20: mol_type = other DNA
ctaccttttcctttttgttt

SEQ ID NO: 47569 - DNA, 20 bp, synthetic construct
  misc_feature 1..20: note = chemically synthesized
  source 1..20: mol_type = other DNA
cttttcactgtgtcaaaatc

SEQ ID NO: 47570 - DNA, 20 bp, synthetic construct
  misc_feature 1..20: note = chemically synthesized
  source 1..20: mol_type = other DNA
cctacctgctctgaaaccaa

SEQ ID NO: 47571 - DNA, 20 bp, synthetic construct
  misc_feature 1..20: note = chemically synthesized
  source 1..20: mol_type = other DNA
cctgctctgaaaccaacagc

SEQ ID NO: 47572 - DNA, 20 bp, synthetic construct
  misc_feature 1..20: note = chemically synthesized
  source 1..20: mol_type = other DNA
acttccattctaacccacat

SEQ ID NO: 47573 - DNA, 20 bp, synthetic construct
  misc_feature 1..20: note = chemically synthesized
  source 1..20: mol_type = other DNA
cactaattaaaatcgatact

SEQ ID NO: 47574 - DNA, 20 bp, synthetic construct
  misc_feature 1..20: note = chemically synthesized
  source 1..20: mol_type = other DNA
atactgagttctaaaatcat

SEQ ID NO: 47575 - DNA, 20 bp, synthetic construct
  misc_feature 1..20: note = chemically synthesized
  source 1..20: mol_type = other DNA
tactgagttctaaaatcatc

SEQ ID NO: 47576 - DNA, 20 bp, synthetic construct
  misc_feature 1..20: note = chemically synthesized
  source 1..20: mol_type = other DNA
actgagttctaaaatcatcg

SEQ ID NO: 47577 - DNA, 20 bp, synthetic construct
  misc_feature 1..20: note = chemically synthesized
  source 1..20: mol_type = other DNA
tctaaaatcatcggggattt

SEQ ID NO: 47578 - DNA, 20 bp, synthetic construct
  misc_feature 1..20: note = chemically synthesized
  source 1..20: mol_type = other DNA
ctaaaatcatcggggatttt

SEQ ID NO: 47579 - DNA, 20 bp, synthetic construct
  misc_feature 1..20: note = chemically synthesized
  source 1..20: mol_type = other DNA
taaaatcatcggggattttg

SEQ ID NO: 47580 - DNA, 20 bp, synthetic construct
  misc_feature 1..20: note = chemically synthesized
  source 1..20: mol_type = other DNA
gtcttacttcatacttcctt

SEQ ID NO: 47581 - DNA, 20 bp, synthetic construct
  misc_feature 1..20: note = chemically synthesized
  source 1..20: mol_type = other DNA
tgagatttcacattaaatgt

SEQ ID NO: 47582 - DNA, 20 bp, synthetic construct
  misc_feature 1..20: note = chemically synthesized
  source 1..20: mol_type = other DNA
ttaaatgttggtgttcatta

SEQ ID NO: 47583 - DNA, 20 bp, synthetic construct
  misc_feature 1..20: note = chemically synthesized
  source 1..20: mol_type = other DNA
taaatgttggtgttcattaa

SEQ ID NO: 47584 - DNA, 20 bp, synthetic construct
  misc_feature 1..20: note = chemically synthesized
  source 1..20: mol_type = other DNA
ctttgtattcatcacactct

SEQ ID NO: 47585 - DNA, 20 bp, synthetic construct
  misc_feature 1..20: note = chemically synthesized
  source 1..20: mol_type = other DNA
tcatcacactcttggattca

SEQ ID NO: 47586 - DNA, 20 bp, synthetic construct
  misc_feature 1..20: note = chemically synthesized
  source 1..20: mol_type = other DNA
tatatctaaactcttaaata

SEQ ID NO: 47587 - DNA, 20 bp, synthetic construct
  misc_feature 1..20: note = chemically synthesized
  source 1..20: mol_type = other DNA
taacctctgacctccaacct

SEQ ID NO: 47588 - DNA, 20 bp, synthetic construct
  misc_feature 1..20: note = chemically synthesized
  source 1..20: mol_type = other DNA
ccatatatcaaacaatgtac

SEQ ID NO: 47589 - DNA, 20 bp, synthetic construct
  misc_feature 1..20: note = chemically synthesized
  source 1..20: mol_type = other DNA
catatatcaaacaatgtact

SEQ ID NO: 47590 - DNA, 20 bp, synthetic construct
  misc_feature 1..20: note = chemically synthesized
  source 1..20: mol_type = other DNA
atgtactgggcttatttata

SEQ ID NO: 47591 - DNA, 20 bp, synthetic construct
  misc_feature 1..20: note = chemically synthesized
  source 1..20: mol_type = other DNA
ttatttatatagatgtccta

SEQ ID NO: 47592 - DNA, 20 bp, synthetic construct
  misc_feature 1..20: note = chemically synthesized
  source 1..20: mol_type = other DNA
tatttatatagatgtcctat

SEQ ID NO: 47593 - DNA, 20 bp, synthetic construct
  misc_feature 1..20: note = chemically synthesized
  source 1..20: mol_type = other DNA
tagatgtcctataggcacct

SEQ ID NO: 47594 - DNA, 20 bp, synthetic construct
  misc_feature 1..20: note = chemically synthesized
  source 1..20: mol_type = other DNA
tcctataggcacctcagact

SEQ ID NO: 47595 - DNA, 20 bp, synthetic construct
  misc_feature 1..20: note = chemically synthesized
  source 1..20: mol_type = other DNA
taggcacctcagactcagca

SEQ ID NO: 47596 - DNA, 20 bp, synthetic construct
  misc_feature 1..20: note = chemically synthesized
  source 1..20: mol_type = other DNA
aggcacctcagactcagcat

SEQ ID NO: 47597 - DNA, 20 bp, synthetic construct
  misc_feature 1..20: note = chemically synthesized
  source 1..20: mol_type = other DNA
tactaaaactgtttctcttc

SEQ ID NO: 47598 - DNA, 20 bp, synthetic construct
  misc_feature 1..20: note = chemically synthesized
  source 1..20: mol_type = other DNA
tcttccagtgttttccattt

SEQ ID NO: 47599 - DNA, 20 bp, synthetic construct
  misc_feature 1..20: note = chemically synthesized
  source 1..20: mol_type = other DNA
gtgttttccattttagtcat

SEQ ID NO: 47600 - DNA, 20 bp, synthetic construct
  misc_feature 1..20: note = chemically synthesized
  source 1..20: mol_type = other DNA
tttccattttagtcattaga

SEQ ID NO: 47601 - DNA, 20 bp, synthetic construct
  misc_feature 1..20: note = chemically synthesized
  source 1..20: mol_type = other DNA
tagctacttgcccattcacc

SEQ ID NO: 47602 - DNA, 20 bp, synthetic construct
  misc_feature 1..20: note = chemically synthesized
  source 1..20: mol_type = other DNA
agctacttgcccattcacca

SEQ ID NO: 47603 - DNA, 20 bp, synthetic construct
  misc_feature 1..20: note = chemically synthesized
  source 1..20: mol_type = other DNA
ttgcccattcaccaaggtca

SEQ ID NO: 47604 - DNA, 20 bp, synthetic construct
  misc_feature 1..20: note = chemically synthesized
  source 1..20: mol_type = other DNA
atttccctacctctaatcaa

SEQ ID NO: 47605 - DNA, 20 bp, synthetic construct
  misc_feature 1..20: note = chemically synthesized
  source 1..20: mol_type = other DNA
taatcaccactcttactgcc

SEQ ID NO: 47606 - DNA, 20 bp, synthetic construct
  misc_feature 1..20: note = chemically synthesized
  source 1..20: mol_type = other DNA
caccactcttactgcccagt

SEQ ID NO: 47607 - DNA, 20 bp, synthetic construct
  misc_feature 1..20: note = chemically synthesized
  source 1..20: mol_type = other DNA
accactcttactgcccagtc

SEQ ID NO: 47608 - DNA, 20 bp, synthetic construct
  misc_feature 1..20: note = chemically synthesized
  source 1..20: mol_type = other DNA
gtcctcattgtttcctgaac

SEQ ID NO: 47609 - DNA, 20 bp, synthetic construct
  misc_feature 1..20: note = chemically synthesized
  source 1..20: mol_type = other DNA
cctcattgtttcctgaacaa

SEQ ID NO: 47610 - DNA, 20 bp, synthetic construct
  misc_feature 1..20: note = chemically synthesized
  source 1..20: mol_type = other DNA
cattgtttcctgaacaagag

SEQ ID NO: 47611 - DNA, 20 bp, synthetic construct
  misc_feature 1..20: note = chemically synthesized
  source 1..20: mol_type = other DNA
gatgctattctttccacttt

SEQ ID NO: 47612 - DNA, 20 bp, synthetic construct
  misc_feature 1..20: note = chemically synthesized
  source 1..20: mol_type = other DNA
tccacttttagaccttatcc

SEQ ID NO: 47613 - DNA, 20 bp, synthetic construct
  misc_feature 1..20: note = chemically synthesized
  source 1..20: mol_type = other DNA
cttttagaccttatcctggc

SEQ ID NO: 47614 - DNA, 20 bp, synthetic construct
  misc_feature 1..20: note = chemically synthesized
  source 1..20: mol_type = other DNA
gaccttatcctggctggatg

SEQ ID NO: 47615 - DNA, 20 bp, synthetic construct
  misc_feature 1..20: note = chemically synthesized
  source 1..20: mol_type = other DNA
cttatcctggctggatgcgg

SEQ ID NO: 47616 - DNA, 20 bp, synthetic construct
  misc_feature 1..20: note = chemically synthesized
  source 1..20: mol_type = other DNA
cctggctggatgcggtggct

SEQ ID NO: 47617 - DNA, 20 bp, synthetic construct
  misc_feature 1..20: note = chemically synthesized
  source 1..20: mol_type = other DNA
ctggctggatgcggtggctc

SEQ ID NO: 47618 - DNA, 20 bp, synthetic construct
  misc_feature 1..20: note = chemically synthesized
  source 1..20: mol_type = other DNA
gtggctcaggcttgtaaacc

SEQ ID NO: 47619 - DNA, 20 bp, synthetic construct
  misc_feature 1..20: note = chemically synthesized
  source 1..20: mol_type = other DNA
ggcttgtaaacccagcactt

SEQ ID NO: 47620 - DNA, 20 bp, synthetic construct
  misc_feature 1..20: note = chemically synthesized
  source 1..20: mol_type = other DNA
gcttgtaaacccagcacttt

SEQ ID NO: 47621 - DNA, 20 bp, synthetic construct
  misc_feature 1..20: note = chemically synthesized
  source 1..20: mol_type = other DNA
ttgtaaacccagcactttgg

SEQ ID NO: 47622 - DNA, 20 bp, synthetic construct
  misc_feature 1..20: note = chemically synthesized
  source 1..20: mol_type = other DNA
tgtaaacccagcactttggg

SEQ ID NO: 47623 - DNA, 20 bp, synthetic construct
  misc_feature 1..20: note = chemically synthesized
  source 1..20: mol_type = other DNA
acccagcactttgggaggcc

SEQ ID NO: 47624 - DNA, 20 bp, synthetic construct
  misc_feature 1..20: note = chemically synthesized
  source 1..20: mol_type = other DNA
cccagcactttgggaggcca

SEQ ID NO: 47625 - DNA, 20 bp, synthetic construct
  misc_feature 1..20: note = chemically synthesized
  source 1..20: mol_type = other DNA
agcactttgggaggccaagg

SEQ ID NO: 47626 - DNA, 20 bp, synthetic construct
  misc_feature 1..20: note = chemically synthesized
  source 1..20: mol_type = other DNA
gcactttgggaggccaaggc

SEQ ID NO: 47627 - DNA, 20 bp, synthetic construct
  misc_feature 1..20: note = chemically synthesized
  source 1..20: mol_type = other DNA
ctttgggaggccaaggcagg

SEQ ID NO: 47628 - DNA, 20 bp, synthetic construct
  misc_feature 1..20: note = chemically synthesized
  source 1..20: mol_type = other DNA
ccaaggcaggcagatcactt

SEQ ID NO: 47629 - DNA, 20 bp, synthetic construct
  misc_feature 1..20: note = chemically synthesized
  source 1..20: mol_type = other DNA
caaggcaggcagatcacttg

SEQ ID NO: 47630 - DNA, 20 bp, synthetic construct
  misc_feature 1..20: note = chemically synthesized
  source 1..20: mol_type = other DNA
gcaggcagatcacttgaggt

SEQ ID NO: 47631 - DNA, 20 bp, synthetic construct
  misc_feature 1..20: note = chemically synthesized
  source 1..20: mol_type = other DNA
caggcagatcacttgaggtc

SEQ ID NO: 47632 - DNA, 20 bp, synthetic construct
  misc_feature 1..20: note = chemically synthesized
  source 1..20: mol_type = other DNA
ggcagatcacttgaggtcag

SEQ ID NO: 47633 - DNA, 20 bp, synthetic construct
  misc_feature 1..20: note = chemically synthesized
  source 1..20: mol_type = other DNA
tcacttgaggtcaggagttc

SEQ ID NO: 47634 - DNA, 20 bp, synthetic construct
  misc_feature 1..20: note = chemically synthesized
  source 1..20: mol_type = other DNA
tgaggtcaggagttcaagac

SEQ ID NO: 47635 - DNA, 20 bp, synthetic construct
  misc_feature 1..20: note = chemically synthesized
  source 1..20: mol_type = other DNA
caagaccagcctgaccaaca

SEQ ID NO: 47636 - DNA, 20 bp, synthetic construct
  misc_feature 1..20: note = chemically synthesized
  source 1..20: mol_type = other DNA
ctctactaaaaatacaaaat

SEQ ID NO: 47637 - DNA, 20 bp, synthetic construct
  misc_feature 1..20: note = chemically synthesized
  source 1..20: mol_type = other DNA
actaaaaatacaaaatcagc

SEQ ID NO: 47638 - DNA, 20 bp, synthetic construct
  misc_feature 1..20: note = chemically synthesized
  source 1..20: mol_type = other DNA
ctaaaaatacaaaatcagcc

SEQ ID NO: 47639 - DNA, 20 bp, synthetic construct
  misc_feature 1..20: note = chemically synthesized
  source 1..20: mol_type = other DNA
tacaaaatcagccgggcgtg

SEQ ID NO: 47640 - DNA, 20 bp, synthetic construct
  misc_feature 1..20: note = chemically synthesized
  source 1..20: mol_type = other DNA
gggcgtgtggtgcatgcctg

SEQ ID NO: 47641 - DNA, 20 bp, synthetic construct
  misc_feature 1..20: note = chemically synthesized
  source 1..20: mol_type = other DNA
gtggtgcatgcctgcagtcc

SEQ ID NO: 47642 - DNA, 20 bp, synthetic construct
  misc_feature 1..20: note = chemically synthesized
  source 1..20: mol_type = other DNA
tgcctgcagtcccagctatt

SEQ ID NO: 47643 - DNA, 20 bp, synthetic construct
  misc_feature 1..20: note = chemically synthesized
  source 1..20: mol_type = other DNA
gcctgcagtcccagctattc

SEQ ID NO: 47644 - DNA, 20 bp, synthetic construct
  misc_feature 1..20: note = chemically synthesized
  source 1..20: mol_type = other DNA
tgcagtcccagctattcagg

SEQ ID NO: 47645 - DNA, 20 bp, synthetic construct
  misc_feature 1..20: note = chemically synthesized
  source 1..20: mol_type = other DNA
tcccagctattcaggtggct

SEQ ID NO: 47646 - DNA, 20 bp, synthetic construct
  misc_feature 1..20: note = chemically synthesized
  source 1..20: mol_type = other DNA
cccagctattcaggtggctg

SEQ ID NO: 47647 - DNA, 20 bp, synthetic construct
  misc_feature 1..20: note = chemically synthesized
  source 1..20: mol_type = other DNA
agctattcaggtggctgagg

SEQ ID NO: 47648 - DNA, 20 bp, synthetic construct
  misc_feature 1..20: note = chemically synthesized
  source 1..20: mol_type = other DNA
gctattcaggtggctgaggc

SEQ ID NO: 47649 - DNA, 20 bp, synthetic construct
  misc_feature 1..20: note = chemically synthesized
  source 1..20: mol_type = other DNA
tattcaggtggctgaggcag

SEQ ID NO: 47650 - DNA, 20 bp, synthetic construct
  misc_feature 1..20: note = chemically synthesized
  source 1..20: mol_type = other DNA
gcaggagaattgcttgaacc

SEQ ID NO: 47651 - DNA, 20 bp, synthetic construct
  misc_feature 1..20: note = chemically synthesized
  source 1..20: mol_type = other DNA
caggagaattgcttgaaccc

SEQ ID NO: 47652 - DNA, 20 bp, synthetic construct
  misc_feature 1..20: note = chemically synthesized
  source 1..20: mol_type = other DNA
ggagaattgcttgaacccag

SEQ ID NO: 47653 - DNA, 20 bp, synthetic construct
  misc_feature 1..20: note = chemically synthesized
  source 1..20: mol_type = other DNA
gagaattgcttgaacccagg

SEQ ID NO: 47654 - DNA, 20 bp, synthetic construct
  misc_feature 1..20: note = chemically synthesized
  source 1..20: mol_type = other DNA
aattgcttgaacccaggagg

SEQ ID NO: 47655 - DNA, 20 bp, synthetic construct
  misc_feature 1..20: note = chemically synthesized
  source 1..20: mol_type = other DNA
ttgcttgaacccaggaggca

SEQ ID NO: 47656 - DNA, 20 bp, synthetic construct
  misc_feature 1..20: note = chemically synthesized
  source 1..20: mol_type = other DNA
tgcttgaacccaggaggcag

SEQ ID NO: 47657 - DNA, 20 bp, synthetic construct
  misc_feature 1..20: note = chemically synthesized
  source 1..20: mol_type = other DNA
aacccaggaggcagaggttg

SEQ ID NO: 47658 - DNA, 20 bp, synthetic construct
  misc_feature 1..20: note = chemically synthesized
  source 1..20: mol_type = other DNA
caggaggcagaggttgcggt

SEQ ID NO: 47659 - DNA, 20 bp, synthetic construct
  misc_feature 1..20: note = chemically synthesized
  source 1..20: mol_type = other DNA
ggcagaggttgcggtgagcc

SEQ ID NO: 47660 - DNA, 20 bp, synthetic construct
  misc_feature 1..20: note = chemically synthesized
  source 1..20: mol_type = other DNA
tagattgcaccattgcactc

SEQ ID NO: 47661 - DNA, 20 bp, synthetic construct
  misc_feature 1..20: note = chemically synthesized
  source 1..20: mol_type = other DNA
tgcaccattgcactctagct

SEQ ID NO: 47662 - DNA, 20 bp, synthetic construct
  misc_feature 1..20: note = chemically synthesized
  source 1..20: mol_type = other DNA
gcaccattgcactctagctt

SEQ ID NO: 47663 - DNA, 20 bp, synthetic construct
  misc_feature 1..20: note = chemically synthesized
  source 1..20: mol_type = other DNA
ttgcactctagcttgggcaa

SEQ ID NO: 47664 - DNA, 20 bp, synthetic construct
  misc_feature 1..20: note = chemically synthesized
  source 1..20: mol_type = other DNA
tgcactctagcttgggcaat

SEQ ID NO: 47665 - DNA, 20 bp, synthetic construct
  misc_feature 1..20: note = chemically synthesized
  source 1..20: mol_type = other DNA
gcactctagcttgggcaata

SEQ ID NO: 47666 - DNA, 20 bp, synthetic construct
  misc_feature 1..20: note = chemically synthesized
  source 1..20: mol_type = other DNA
atagggatgaaactccatct

SEQ ID NO: 47667 - DNA, 20 bp, synthetic construct
  misc_feature 1..20: note = chemically synthesized
  source 1..20: mol_type = other DNA
gggatgaaactccatctcag

SEQ ID NO: 47668 - DNA, 20 bp, synthetic construct
  misc_feature 1..20: note = chemically synthesized
  source 1..20: mol_type = other DNA
gatgaaactccatctcagaa

SEQ ID NO: 47669 - DNA, 20 bp, synthetic construct
  misc_feature 1..20: note = chemically synthesized
  source 1..20: mol_type = other DNA
aactccatctcagaagagaa

SEQ ID NO: 47670 - DNA, 20 bp, synthetic construct
  misc_feature 1..20: note = chemically synthesized
  source 1..20: mol_type = other DNA
ctcagaagagaaaagaaaaa

SEQ ID NO: 47671 - DNA, 20 bp, synthetic construct
  misc_feature 1..20: note = chemically synthesized
  source 1..20: mol_type = other DNA
tcctctcaatgcaatccata

SEQ ID NO: 47672 - DNA, 20 bp, synthetic construct
  misc_feature 1..20: note = chemically synthesized
  source 1..20: mol_type = other DNA
atatagaataaacatgtaac

SEQ ID NO: 47673 - DNA, 20 bp, synthetic construct
  misc_feature 1..20: note = chemically synthesized
  source 1..20: mol_type = other DNA
cccaatgtgtaaaatcattt

SEQ ID NO: 47674 - DNA, 20 bp, synthetic construct
  misc_feature 1..20: note = chemically synthesized
  source 1..20: mol_type = other DNA
ccaatgtgtaaaatcatttc

SEQ ID NO: 47675 - DNA, 20 bp, synthetic construct
  misc_feature 1..20: note = chemically synthesized
  source 1..20: mol_type = other DNA
atgtgtaaaatcatttcagg

SEQ ID NO: 47676 - DNA, 20 bp, synthetic construct
  misc_feature 1..20: note = chemically synthesized
  source 1..20: mol_type = other DNA
taaaatcatttcaggtagaa

SEQ ID NO: 47677 - DNA, 20 bp, synthetic construct
  misc_feature 1..20: note = chemically synthesized
  source 1..20: mol_type = other DNA
tttcaggtagaacagaatta

SEQ ID NO: 47678 - DNA, 20 bp, synthetic construct
  misc_feature 1..20: note = chemically synthesized
  source 1..20: mol_type = other DNA
tagaacagaattaaagtgaa

SEQ ID NO: 47679 - DNA, 20 bp, synthetic construct
  misc_feature 1..20: note = chemically synthesized
  source 1..20: mol_type = other DNA
cagaattaaagtgaaaagcc

SEQ ID NO: 47680 - DNA, 20 bp, synthetic construct
  misc_feature 1..20: note = chemically synthesized
  source 1..20: mol_type = other DNA
aaagtgaaaagccaagtctt

SEQ ID NO: 47681 - DNA, 20 bp, synthetic construct
  misc_feature 1..20: note = chemically synthesized
  source 1..20: mol_type = other DNA
agccaagtctttggaattaa

SEQ ID NO: 47682 - DNA, 20 bp, synthetic construct
  misc_feature 1..20: note = chemically synthesized
  source 1..20: mol_type = other DNA
gtctttggaattaacagaca

SEQ ID NO: 47683 - DNA, 20 bp, synthetic construct
  misc_feature 1..20: note = chemically synthesized
  source 1..20: mol_type = other DNA
aacagacaaagatcaaataa

SEQ ID NO: 47684 - DNA, 20 bp, synthetic construct
  misc_feature 1..20: note = chemically synthesized
  source 1..20: mol_type = other DNA
agatcaaataacagtcctca

SEQ ID NO: 47685 - DNA, 20 bp, synthetic construct
  misc_feature 1..20: note = chemically synthesized
  source 1..20: mol_type = other DNA
ataacagtcctcatggcctt

SEQ ID NO: 47686 - DNA, 20 bp, synthetic construct
  misc_feature 1..20: note = chemically synthesized
  source 1..20: mol_type = other DNA
aatttacctaacattttttt

SEQ ID NO: 47687 - DNA, 20 bp, synthetic construct
  misc_feature 1..20: note = chemically synthesized
  source 1..20: mol_type = other DNA
caattttcttatatatgaat

SEQ ID NO: 47688 - DNA, 20 bp, synthetic construct
  misc_feature 1..20: note = chemically synthesized
  source 1..20: mol_type = other DNA
ctccctcacaaacacattct

SEQ ID NO: 47689 - DNA, 20 bp, synthetic construct
  misc_feature 1..20: note = chemically synthesized
  source 1..20: mol_type = other DNA
caaacacattctaagatttt

SEQ ID NO: 47690 - DNA, 20 bp, synthetic construct
  misc_feature 1..20: note = chemically synthesized
  source 1..20: mol_type = other DNA
aaacacattctaagatttta

SEQ ID NO: 47691 - DNA, 20 bp, synthetic construct
  misc_feature 1..20: note = chemically synthesized
  source 1..20: mol_type = other DNA
acacattctaagattttaag

SEQ ID NO: 47692 - DNA, 20 bp, synthetic construct
  misc_feature 1..20: note = chemically synthesized
  source 1..20: mol_type = other DNA
attttaaggagatattgatg

SEQ ID NO: 47693 - DNA, 20 bp, synthetic construct
  misc_feature 1..20: note = chemically synthesized
  source 1..20: mol_type = other DNA
acatcatctgtcatttttaa

SEQ ID NO: 47694 - DNA, 20 bp, synthetic construct
  misc_feature 1..20: note = chemically synthesized
  source 1..20: mol_type = other DNA
catcatctgtcatttttaac

SEQ ID NO: 47695 - DNA, 20 bp, synthetic construct
  misc_feature 1..20: note = chemically synthesized
  source 1..20: mol_type = other DNA
catctgtcatttttaacagg

SEQ ID NO: 47696 - DNA, 20 bp, synthetic construct
  misc_feature 1..20: note = chemically synthesized
  source 1..20: mol_type = other DNA
ctgtcatttttaacaggtag

SEQ ID NO: 47697 - DNA, 20 bp, synthetic construct
  misc_feature 1..20: note = chemically synthesized
  source 1..20: mol_type = other DNA
tcatttttaacaggtagtgg

SEQ ID NO: 47698 - DNA, 20 bp, synthetic construct
  misc_feature 1..20: note = chemically synthesized
  source 1..20: mol_type = other DNA
ggtagtggtagtgattcaca

SEQ ID NO: 47699 - DNA, 20 bp, synthetic construct
  misc_feature 1..20: note = chemically synthesized
  source 1..20: mol_type = other DNA
tccattctgtattcttgacc

SEQ ID NO: 47700 - DNA, 20 bp, synthetic construct
  misc_feature 1..20: note = chemically synthesized
  source 1..20: mol_type = other DNA
gacctggttgtattctttct

SEQ ID NO: 47701 - DNA, 20 bp, synthetic construct
  misc_feature 1..20: note = chemically synthesized
  source 1..20: mol_type = other DNA
gttgtattctttctgagctc

SEQ ID NO: 47702 - DNA, 20 bp, synthetic construct
  misc_feature 1..20: note = chemically synthesized
  source 1..20: mol_type = other DNA
agctccagatccacatatct

SEQ ID NO: 47703 - DNA, 20 bp, synthetic construct
  misc_feature 1..20: note = chemically synthesized
  source 1..20: mol_type = other DNA
tacatctttttgcattttac

SEQ ID NO: 47704 - DNA, 20 bp, synthetic construct
  misc_feature 1..20: note = chemically synthesized
  source 1..20: mol_type = other DNA
catctttttgcattttacaa

SEQ ID NO: 47705 - DNA, 20 bp, synthetic construct
  misc_feature 1..20: note = chemically synthesized
  source 1..20: mol_type = other DNA
gcatacaatacaatgtatcc

SEQ ID NO: 47706 - DNA, 20 bp, synthetic construct
  misc_feature 1..20: note = chemically synthesized
  source 1..20: mol_type = other DNA
taccactaaactcacaaatg

SEQ ID NO: 47707 - DNA, 20 bp, synthetic construct
  misc_feature 1..20: note = chemically synthesized
  source 1..20: mol_type = other DNA
cacgactgacatcaccgtca

SEQ ID NO: 47708 - DNA, 20 bp, synthetic construct
  misc_feature 1..20: note = chemically synthesized
  source 1..20: mol_type = other DNA
tgacatcaccgtcatggtcc

SEQ ID NO: 47709 - DNA, 20 bp, synthetic construct
  misc_feature 1..20: note = chemically synthesized
  source 1..20: mol_type = other DNA
tcatggtccaagtctgataa

SEQ ID NO: 47710 - DNA, 20 bp, synthetic construct
  misc_feature 1..20: note = chemically synthesized
  source 1..20: mol_type = other DNA
tccaagtctgataatagaaa

SEQ ID NO: 47711 - DNA, 20 bp, synthetic construct
  misc_feature 1..20: note = chemically synthesized
  source 1..20: mol_type = other DNA
cactttcttccctactgcaa

SEQ ID NO: 47712 - DNA, 20 bp, synthetic construct
  misc_feature 1..20: note = chemically synthesized
  source 1..20: mol_type = other DNA
tttcttccctactgcaacag

SEQ ID NO: 47713 - DNA, 20 bp, synthetic construct
  misc_feature 1..20: note = chemically synthesized
  source 1..20: mol_type = other DNA
tccctactgcaacagaagcc

SEQ ID NO: 47714 - DNA, 20 bp, synthetic construct
  misc_feature 1..20: note = chemically synthesized
  source 1..20: mol_type = other DNA
ctaaaatacatttcttcact

SEQ ID NO: 47715 - DNA, 20 bp, synthetic construct
  misc_feature 1..20: note = chemically synthesized
  source 1..20: mol_type = other DNA
aatacatttcttcactaagt

SEQ ID NO: 47716 - DNA, 20 bp, synthetic construct
  misc_feature 1..20: note = chemically synthesized
  source 1..20: mol_type = other DNA
taagtgagaataatctttta

SEQ ID NO: 47717 - DNA, 20 bp, synthetic construct
  misc_feature 1..20: note = chemically synthesized
  source 1..20: mol_type = other DNA
aattattcaatatctttcgt

SEQ ID NO: 47718 - DNA, 20 bp, synthetic construct
  misc_feature 1..20: note = chemically synthesized
  source 1..20: mol_type = other DNA
caatatctttcgttggcttc

SEQ ID NO: 47719 - DNA, 20 bp, synthetic construct
  misc_feature 1..20: note = chemically synthesized
  source 1..20: mol_type = other DNA
aatatctttcgttggcttcc

SEQ ID NO: 47720 - DNA, 20 bp, synthetic construct
  misc_feature 1..20: note = chemically synthesized
  source 1..20: mol_type = other DNA
tttcgttggcttccaggtta

SEQ ID NO: 47721 - DNA, 20 bp, synthetic construct
  misc_feature 1..20: note = chemically synthesized
  source 1..20: mol_type = other DNA
cagaaaaataacttgtaaca

SEQ ID NO: 47722 - DNA, 20 bp, synthetic construct
  misc_feature 1..20: note = chemically synthesized
  source 1..20: mol_type = other DNA
ataacttgtaacaaagttta

SEQ ID NO: 47723 - DNA, 20 bp, synthetic construct
  misc_feature 1..20: note = chemically synthesized
  source 1..20: mol_type = other DNA
taacttgtaacaaagtttaa

SEQ ID NO: 47724 - DNA, 20 bp, synthetic construct
  misc_feature 1..20: note = chemically synthesized
  source 1..20: mol_type = other DNA
caaagtttaaaggtcattca

SEQ ID NO: 47725 - DNA, 20 bp, synthetic construct
  misc_feature 1..20: note = chemically synthesized
  source 1..20: mol_type = other DNA
ataacatttccccttgtgat

SEQ ID NO: 47726 - DNA, 20 bp, synthetic construct
  misc_feature 1..20: note = chemically synthesized
  source 1..20: mol_type = other DNA
tccccttgtgatcagaatct

SEQ ID NO: 47727 - DNA, 20 bp, synthetic construct
  misc_feature 1..20: note = chemically synthesized
  source 1..20: mol_type = other DNA
ccccttgtgatcagaatctc

SEQ ID NO: 47728 - DNA, 20 bp, synthetic construct
  misc_feature 1..20: note = chemically synthesized
  source 1..20: mol_type = other DNA
catctttctatatacaaata

SEQ ID NO: 47729 - DNA, 20 bp, synthetic construct
  misc_feature 1..20: note = chemically synthesized
  source 1..20: mol_type = other DNA
tatatacaaataaagtcata

SEQ ID NO: 47730 - DNA, 20 bp, synthetic construct
  misc_feature 1..20: note = chemically synthesized
  source 1..20: mol_type = other DNA
atatagtttgaactcacctc

SEQ ID NO: 47731 - DNA, 20 bp, synthetic construct
  misc_feature 1..20: note = chemically synthesized
  source 1..20: mol_type = other DNA
catttgtatcgctacgtgtt

SEQ ID NO: 47732 - DNA, 20 bp, synthetic construct
  misc_feature 1..20: note = chemically synthesized
  source 1..20: mol_type = other DNA
ttgtatcgctacgtgttaag

SEQ ID NO: 47733 - DNA, 20 bp, synthetic construct
  misc_feature 1..20: note = chemically synthesized
  source 1..20: mol_type = other DNA
tatcgctacgtgttaagcag

SEQ ID NO: 47734 - DNA, 20 bp, synthetic construct
  misc_feature 1..20: note = chemically synthesized
  source 1..20: mol_type = other DNA
taatttatcaattctactgt

SEQ ID NO: 47735 - DNA, 20 bp, synthetic construct
  misc_feature 1..20: note = chemically synthesized
  source 1..20: mol_type = other DNA
ttatcaattctactgttggt

SEQ ID NO: 47736 - DNA, 20 bp, synthetic construct
  misc_feature 1..20: note = chemically synthesized
  source 1..20: mol_type = other DNA
tctactgttggtaagcattt

SEQ ID NO: 47737 - DNA, 20 bp, synthetic construct
  misc_feature 1..20: note = chemically synthesized
  source 1..20: mol_type = other DNA
actgttggtaagcatttaag

SEQ ID NO: 47738 - DNA, 20 bp, synthetic construct
  misc_feature 1..20: note = chemically synthesized
  source 1..20: mol_type = other DNA
gtaagcatttaagtggctac

SEQ ID NO: 47739 - DNA, 20 bp, synthetic construct
  misc_feature 1..20: note = chemically synthesized
  source 1..20: mol_type = other DNA
atttaagtggctaccggttt

SEQ ID NO: 47740 - DNA, 20 bp, synthetic construct
  misc_feature 1..20: note = chemically synthesized
  source 1..20: mol_type = other DNA
tttaagtggctaccggtttg

SEQ ID NO: 47741 - DNA, 20 bp, synthetic construct
  misc_feature 1..20: note = chemically synthesized
  source 1..20: mol_type = other DNA
tttatgattattgctgtcat

SEQ ID NO: 47742 - DNA, 20 bp, synthetic construct
  misc_feature 1..20: note = chemically synthesized
  source 1..20: mol_type = other DNA
agcatttctatacatgtctt

SEQ ID NO: 47743 - DNA, 20 bp, synthetic construct
  misc_feature 1..20: note = chemically synthesized
  source 1..20: mol_type = other DNA
atatctaaaaatgtaattgc

SEQ ID NO: 47744 - DNA, 20 bp, synthetic construct
  misc_feature 1..20: note = chemically synthesized
  source 1..20: mol_type = other DNA
tatctaaaaatgtaattgct

SEQ ID NO: 47745 - DNA, 20 bp, synthetic construct
  misc_feature 1..20: note = chemically synthesized
  source 1..20: mol_type = other DNA
aaaatgtaattgctaggtaa

SEQ ID NO: 47746 - DNA, 20 bp, synthetic construct
  misc_feature 1..20: note = chemically synthesized
  source 1..20: mol_type = other DNA
tgctaggtaatagacttatc

SEQ ID NO: 47747 - DNA, 20 bp, synthetic construct
  misc_feature 1..20: note = chemically synthesized
  source 1..20: mol_type = other DNA
taatagacttatcaagcatc

SEQ ID NO: 47748 - DNA, 20 bp, synthetic construct
  misc_feature 1..20: note = chemically synthesized
  source 1..20: mol_type = other DNA
tatcaagcatccagcatttg

SEQ ID NO: 47749 - DNA, 20 bp, synthetic construct
  misc_feature 1..20: note = chemically synthesized
  source 1..20: mol_type = other DNA
agcatttgtggatactatta

SEQ ID NO: 47750 - DNA, 20 bp, synthetic construct
  misc_feature 1..20: note = chemically synthesized
  source 1..20: mol_type = other DNA
gcatttgtggatactattaa

SEQ ID NO: 47751 - DNA, 20 bp, synthetic construct
  misc_feature 1..20: note = chemically synthesized
  source 1..20: mol_type = other DNA
atactattaaaggttttcca

SEQ ID NO: 47752 - DNA, 20 bp, synthetic construct
  misc_feature 1..20: note = chemically synthesized
  source 1..20: mol_type = other DNA
tactattaaaggttttccaa

SEQ ID NO: 47753 - DNA, 20 bp, synthetic construct
  misc_feature 1..20: note = chemically synthesized
  source 1..20: mol_type = other DNA
actattaaaggttttccaaa

SEQ ID NO: 47754 - DNA, 20 bp, synthetic construct
  misc_feature 1..20: note = chemically synthesized
  source 1..20: mol_type = other DNA
ctattaaaggttttccaaag

SEQ ID NO: 47755 - DNA, 20 bp, synthetic construct
  misc_feature 1..20: note = chemically synthesized
  source 1..20: mol_type = other DNA
aaaggggttatactattgta

SEQ ID NO: 47756 - DNA, 20 bp, synthetic construct
  misc_feature 1..20: note = chemically synthesized
  source 1..20: mol_type = other DNA
ctattgtacagtgtcaccaa

SEQ ID NO: 47757 - DNA, 20 bp, synthetic construct
  misc_feature 1..20: note = chemically synthesized
  source 1..20: mol_type = other DNA
attgtacagtgtcaccaaca

SEQ ID NO: 47758 - DNA, 20 bp, synthetic construct
  misc_feature 1..20: note = chemically synthesized
  source 1..20: mol_type = other DNA
cagtgtcaccaacagagttt

SEQ ID NO: 47759 - DNA, 20 bp, synthetic construct
  misc_feature 1..20: note = chemically synthesized
  source 1..20: mol_type = other DNA
accaccaaaatttgaactgt

SEQ ID NO: 47760 - DNA, 20 bp, synthetic construct
  misc_feature 1..20: note = chemically synthesized
  source 1..20: mol_type = other DNA
tttccttcaatccttccttt

SEQ ID NO: 47761 - DNA, 20 bp, synthetic construct
  misc_feature 1..20: note = chemically synthesized
  source 1..20: mol_type = other DNA
cttccttttggatatgctca

SEQ ID NO: 47762 - DNA, 20 bp, synthetic construct
  misc_feature 1..20: note = chemically synthesized
  source 1..20: mol_type = other DNA
ttccttttggatatgctcat

SEQ ID NO: 47763 - DNA, 20 bp, synthetic construct
  misc_feature 1..20: note = chemically synthesized
  source 1..20: mol_type = other DNA
tgtgtatttgtctgccattg

SEQ ID NO: 47764 - DNA, 20 bp, synthetic construct
  misc_feature 1..20: note = chemically synthesized
  source 1..20: mol_type = other DNA
attgtggcattatttgaatt

SEQ ID NO: 47765 - DNA, 20 bp, synthetic construct
  misc_feature 1..20: note = chemically synthesized
  source 1..20: mol_type = other DNA
ggcattatttgaattcagaa

SEQ ID NO: 47766 - DNA, 20 bp, synthetic construct
  misc_feature 1..20: note = chemically synthesized
  source 1..20: mol_type = other DNA
cattatttgaattcagaaaa

SEQ ID NO: 47767 - DNA, 20 bp, synthetic construct
  misc_feature 1..20: note = chemically synthesized
  source 1..20: mol_type = other DNA
agaaaagagtgaaaaactac

SEQ ID NO: 47768 - DNA, 20 bp, synthetic construct
  misc_feature 1..20: note = chemically synthesized
  source 1..20: mol_type = other DNA
gaaaagagtgaaaaactact

SEQ ID NO: 47769 - DNA, 20 bp, synthetic construct
  misc_feature 1..20: note = chemically synthesized
  source 1..20: mol_type = other DNA
actactgggatcttcattcc

SEQ ID NO: 47770 - DNA, 20 bp, synthetic construct
  misc_feature 1..20: note = chemically synthesized
  source 1..20: mol_type = other DNA
ctactgggatcttcattcct

SEQ ID NO: 47771 - DNA, 20 bp, synthetic construct
  misc_feature 1..20: note = chemically synthesized
  source 1..20: mol_type = other DNA
ctaattccacattttttttt

SEQ ID NO: 47772 - DNA, 20 bp, synthetic construct
  misc_feature 1..20: note = chemically synthesized
  source 1..20: mol_type = other DNA
tctgtaaaaatgttctgtac

SEQ ID NO: 47773 - DNA, 20 bp, synthetic construct
  misc_feature 1..20: note = chemically synthesized
  source 1..20: mol_type = other DNA
gttctgtactagcatattcc

SEQ ID NO: 47774 - DNA, 20 bp, synthetic construct
  misc_feature 1..20: note = chemically synthesized
  source 1..20: mol_type = other DNA
ttctgtactagcatattccc

SEQ ID NO: 47775 - DNA, 20 bp, synthetic construct
  misc_feature 1..20: note = chemically synthesized
  source 1..20: mol_type = other DNA
gaacttcgttaaatttaatc

SEQ ID NO: 47776 - DNA, 20 bp, synthetic construct
  misc_feature 1..20: note = chemically synthesized
  source 1..20: mol_type = other DNA
aaatttaatctggctgaata

SEQ ID NO: 47777 - DNA, 20 bp, synthetic construct
  misc_feature 1..20: note = chemically synthesized
  source 1..20: mol_type = other DNA
ttcactttgcattctttctt

SEQ ID NO: 47778 - DNA, 20 bp, synthetic construct
  misc_feature 1..20: note = chemically synthesized
  source 1..20: mol_type = other DNA
aaccttaaaattcatgtttc

SEQ ID NO: 47779 - DNA, 20 bp, synthetic construct
  misc_feature 1..20: note = chemically synthesized
  source 1..20: mol_type = other DNA
ccagaacctatttcaataac

SEQ ID NO: 47780 - DNA, 20 bp, synthetic construct
  misc_feature 1..20: note = chemically synthesized
  source 1..20: mol_type = other DNA
ttttttaaatattcttttaa

SEQ ID NO: 47781 - DNA, 20 bp, synthetic construct
  misc_feature 1..20: note = chemically synthesized
  source 1..20: mol_type = other DNA
atttcaatataataaaaaat

SEQ ID NO: 47782 - DNA, 20 bp, synthetic construct
  misc_feature 1..20: note = chemically synthesized
  source 1..20: mol_type = other DNA
ttcaatataataaaaaatta

SEQ ID NO: 47783 - DNA, 20 bp, synthetic construct
  misc_feature 1..20: note = chemically synthesized
  source 1..20: mol_type = other DNA
aaaaaattagagttttatta

SEQ ID NO: 47784 - DNA, 20 bp, synthetic construct
  misc_feature 1..20: note = chemically synthesized
  source 1..20: mol_type = other DNA
aaaaattagagttttattat

SEQ ID NO: 47785 - DNA, 20 bp, synthetic construct
  misc_feature 1..20: note = chemically synthesized
  source 1..20: mol_type = other DNA
aattagagttttattatagg

SEQ ID NO: 47786 - DNA, 20 bp, synthetic construct
  misc_feature 1..20: note = chemically synthesized
  source 1..20: mol_type = other DNA
ttataggaagaatttaccaa

SEQ ID NO: 47787 - DNA, 20 bp, synthetic construct
  misc_feature 1..20: note = chemically synthesized
  source 1..20: mol_type = other DNA
taggaagaatttaccaaaag

SEQ ID NO: 47788 - DNA, 20 bp, synthetic construct
  misc_feature 1..20: note = chemically synthesized
  source 1..20: mol_type = other DNA
aggaagaatttaccaaaaga

SEQ ID NO: 47789 - DNA, 20 bp, synthetic construct
  misc_feature 1..20: note = chemically synthesized
  source 1..20: mol_type = other DNA
gaagaatttaccaaaagaag

SEQ ID NO: 47790 - DNA, 20 bp, synthetic construct
  misc_feature 1..20: note = chemically synthesized
  source 1..20: mol_type = other DNA
aagaatttaccaaaagaagg

SEQ ID NO: 47791 - DNA, 20 bp, synthetic construct
  misc_feature 1..20: note = chemically synthesized
  source 1..20: mol_type = other DNA
aatttaccaaaagaaggagg

SEQ ID NO: 47792 - DNA, 20 bp, synthetic construct
  misc_feature 1..20: note = chemically synthesized
  source 1..20: mol_type = other DNA
taccaaaagaaggaggaagc

SEQ ID NO: 47793 - DNA, 20 bp, synthetic construct
  misc_feature 1..20: note = chemically synthesized
  source 1..20: mol_type = other DNA
aaaagaaggaggaagcaagc

SEQ ID NO: 47794 - DNA, 20 bp, synthetic construct
  misc_feature 1..20: note = chemically synthesized
  source 1..20: mol_type = other DNA
aagcaagcaagtttaaactg

SEQ ID NO: 47795 - DNA, 20 bp, synthetic construct
  misc_feature 1..20: note = chemically synthesized
  source 1..20: mol_type = other DNA
gcaagtttaaactgcagcaa

SEQ ID NO: 47796 - DNA, 20 bp, synthetic construct
  misc_feature 1..20: note = chemically synthesized
  source 1..20: mol_type = other DNA
ccaacctctcaaaattccct

SEQ ID NO: 47797 - DNA, 20 bp, synthetic construct
  misc_feature 1..20: note = chemically synthesized
  source 1..20: mol_type = other DNA
aacctctcaaaattcccttg

SEQ ID NO: 47798 - DNA, 20 bp, synthetic construct
  misc_feature 1..20: note = chemically synthesized
  source 1..20: mol_type = other DNA
cccttggagacaaaaatctc

SEQ ID NO: 47799 - DNA, 20 bp, synthetic construct
  misc_feature 1..20: note = chemically synthesized
  source 1..20: mol_type = other DNA
cttggagacaaaaatctcta

SEQ ID NO: 47800 - DNA, 20 bp, synthetic construct
  misc_feature 1..20: note = chemically synthesized
  source 1..20: mol_type = other DNA
ttggagacaaaaatctctag

SEQ ID NO: 47801 - DNA, 20 bp, synthetic construct
  misc_feature 1..20: note = chemically synthesized
  source 1..20: mol_type = other DNA
gacaaaaatctctagaggca

SEQ ID NO: 47802 - DNA, 20 bp, synthetic construct
  misc_feature 1..20: note = chemically synthesized
  source 1..20: mol_type = other DNA
aaaaatctctagaggcaaag

SEQ ID NO: 47803 - DNA, 20 bp, synthetic construct
  misc_feature 1..20: note = chemically synthesized
  source 1..20: mol_type = other DNA
gcaaagaagaactttatatt

SEQ ID NO: 47804 - DNA, 20 bp, synthetic construct
  misc_feature 1..20: note = chemically synthesized
  source 1..20: mol_type = other DNA
cttgttaaaacatctgcttt

SEQ ID NO: 47805 - DNA, 20 bp, synthetic construct
  misc_feature 1..20: note = chemically synthesized
  source 1..20: mol_type = other DNA
taaaacatctgcttttagat

SEQ ID NO: 47806 - DNA, 20 bp, synthetic construct
  misc_feature 1..20: note = chemically synthesized
  source 1..20: mol_type = other DNA
tgcttttagataagttttct

SEQ ID NO: 47807 - DNA, 20 bp, synthetic construct
  misc_feature 1..20: note = chemically synthesized
  source 1..20: mol_type = other DNA
agataagttttcttagtata

SEQ ID NO: 47808 - DNA, 20 bp, synthetic construct
  misc_feature 1..20: note = chemically synthesized
  source 1..20: mol_type = other DNA
gttttcttagtataaagtga

SEQ ID NO: 47809 - DNA, 20 bp, synthetic construct
  misc_feature 1..20: note = chemically synthesized
  source 1..20: mol_type = other DNA
ataaagtgacagaaacaaat

SEQ ID NO: 47810 - DNA, 20 bp, synthetic construct
  misc_feature 1..20: note = chemically synthesized
  source 1..20: mol_type = other DNA
aaacaaataagttaaactct

SEQ ID NO: 47811 - DNA, 20 bp, synthetic construct
  misc_feature 1..20: note = chemically synthesized
  source 1..20: mol_type = other DNA
taagatacattccactatat

SEQ ID NO: 47812 - DNA, 20 bp, synthetic construct
  misc_feature 1..20: note = chemically synthesized
  source 1..20: mol_type = other DNA
cacttctgcaaaaatgaaac

SEQ ID NO: 47813 - DNA, 20 bp, synthetic construct
  misc_feature 1..20: note = chemically synthesized
  source 1..20: mol_type = other DNA
acttctgcaaaaatgaaact

SEQ ID NO: 47814 - DNA, 20 bp, synthetic construct
  misc_feature 1..20: note = chemically synthesized
  source 1..20: mol_type = other DNA
ttctgcaaaaatgaaactag

SEQ ID NO: 47815 - DNA, 20 bp, synthetic construct
  misc_feature 1..20: note = chemically synthesized
  source 1..20: mol_type = other DNA
tctgcaaaaatgaaactagg

SEQ ID NO: 47816 - DNA, 20 bp, synthetic construct
  misc_feature 1..20: note = chemically synthesized
  source 1..20: mol_type = other DNA
tgaaactaggaggatatttt

SEQ ID NO: 47817 - DNA, 20 bp, synthetic construct
  misc_feature 1..20: note = chemically synthesized
  source 1..20: mol_type = other DNA
tttttagaaacaactgctga

SEQ ID NO: 47818 - DNA, 20 bp, synthetic construct
  misc_feature 1..20: note = chemically synthesized
  source 1..20: mol_type = other DNA
tttagaaacaactgctgaaa

SEQ ID NO: 47819 - DNA, 20 bp, synthetic construct
  misc_feature 1..20: note = chemically synthesized
  source 1..20: mol_type = other DNA
aacaactgctgaaagagatg

SEQ ID NO: 47820 - DNA, 20 bp, synthetic construct
  misc_feature 1..20: note = chemically synthesized
  source 1..20: mol_type = other DNA
aactgctgaaagagatgcgg

SEQ ID NO: 47821 - DNA, 20 bp, synthetic construct
  misc_feature 1..20: note = chemically synthesized
  source 1..20: mol_type = other DNA
actgctgaaagagatgcggt

SEQ ID NO: 47822 - DNA, 20 bp, synthetic construct
  misc_feature 1..20: note = chemically synthesized
  source 1..20: mol_type = other DNA
ctgctgaaagagatgcggtg

SEQ ID NO: 47823 - DNA, 20 bp, synthetic construct
  misc_feature 1..20: note = chemically synthesized
  source 1..20: mol_type = other DNA
gctgaaagagatgcggtggg

SEQ ID NO: 47824 - DNA, 20 bp, synthetic construct
  misc_feature 1..20: note = chemically synthesized
  source 1..20: mol_type = other DNA
agatgcggtggggagatatg

SEQ ID NO: 47825 - DNA, 20 bp, synthetic construct
  misc_feature 1..20: note = chemically synthesized
  source 1..20: mol_type = other DNA
atgcggtggggagatatgta

SEQ ID NO: 47826 - DNA, 20 bp, synthetic construct
  misc_feature 1..20: note = chemically synthesized
  source 1..20: mol_type = other DNA
tgcggtggggagatatgtag

SEQ ID NO: 47827 - DNA, 20 bp, synthetic construct
  misc_feature 1..20: note = chemically synthesized
  source 1..20: mol_type = other DNA
cggtggggagatatgtagag

SEQ ID NO: 47828 - DNA, 20 bp, synthetic construct
  misc_feature 1..20: note = chemically synthesized
  source 1..20: mol_type = other DNA
gggagatatgtagaggagaa

SEQ ID NO: 47829 - DNA, 20 bp, synthetic construct
  misc_feature 1..20: note = chemically synthesized
  source 1..20: mol_type = other DNA
ggagatatgtagaggagaac

SEQ ID NO: 47830 - DNA, 20 bp, synthetic construct
  misc_feature 1..20: note = chemically synthesized
  source 1..20: mol_type = other DNA
gagatatgtagaggagaaca

SEQ ID NO: 47831 - DNA, 20 bp, synthetic construct
  misc_feature 1..20: note = chemically synthesized
  source 1..20: mol_type = other DNA
tagaggagaacagggtttct

SEQ ID NO: 47832 - DNA, 20 bp, synthetic construct
  misc_feature 1..20: note = chemically synthesized
  source 1..20: mol_type = other DNA
gagaacagggtttctgagtc

SEQ ID NO: 47833 - DNA, 20 bp, synthetic construct
  misc_feature 1..20: note = chemically synthesized
  source 1..20: mol_type = other DNA
ctgagtcaagacacacatga

SEQ ID NO: 47834 - DNA, 20 bp, synthetic construct
  misc_feature 1..20: note = chemically synthesized
  source 1..20: mol_type = other DNA
tcaagacacacatgacagaa

SEQ ID NO: 47835 - DNA, 20 bp, synthetic construct
  misc_feature 1..20: note = chemically synthesized
  source 1..20: mol_type = other DNA
catgacagaacagccaatct

SEQ ID NO: 47836 - DNA, 20 bp, synthetic construct
  misc_feature 1..20: note = chemically synthesized
  source 1..20: mol_type = other DNA
atgacagaacagccaatctc

SEQ ID NO: 47837 - DNA, 20 bp, synthetic construct
  misc_feature 1..20: note = chemically synthesized
  source 1..20: mol_type = other DNA
tgacagaacagccaatctca

SEQ ID NO: 47838 - DNA, 20 bp, synthetic construct
  misc_feature 1..20: note = chemically synthesized
  source 1..20: mol_type = other DNA
agaacagccaatctcagggc

SEQ ID NO: 47839 - DNA, 20 bp, synthetic construct
  misc_feature 1..20: note = chemically synthesized
  source 1..20: mol_type = other DNA
agccaatctcagggcaagtt

SEQ ID NO: 47840 - DNA, 20 bp, synthetic construct
  misc_feature 1..20: note = chemically synthesized
  source 1..20: mol_type = other DNA
gccaatctcagggcaagtta

SEQ ID NO: 47841 - DNA, 20 bp, synthetic construct
  misc_feature 1..20: note = chemically synthesized
  source 1..20: mol_type = other DNA
ccaatctcagggcaagttaa

SEQ ID NO: 47842 - DNA, 20 bp, synthetic construct
  misc_feature 1..20: note = chemically synthesized
  source 1..20: mol_type = other DNA
ctcagggcaagttaagggaa

SEQ ID NO: 47843 - DNA, 20 bp, synthetic construct
  misc_feature 1..20: note = chemically synthesized
  source 1..20: mol_type = other DNA
agggcaagttaagggaatag

SEQ ID NO: 47844 - DNA, 20 bp, synthetic construct
  misc_feature 1..20: note = chemically synthesized
  source 1..20: mol_type = other DNA
gttaagggaatagtggaatg

SEQ ID NO: 47845 - DNA, 20 bp, synthetic construct
  misc_feature 1..20: note = chemically synthesized
  source 1..20: mol_type = other DNA
ttaagggaatagtggaatga

SEQ ID NO: 47846 - DNA, 20 bp, synthetic construct
  misc_feature 1..20: note = chemically synthesized
  source 1..20: mol_type = other DNA
tcttaaaccaacctgctcac

SEQ ID NO: 47847 - DNA, 20 bp, synthetic construct
  misc_feature 1..20: note = chemically synthesized
  source 1..20: mol_type = other DNA
ttaaaccaacctgctcactg

SEQ ID NO: 47848 - DNA, 20 bp, synthetic construct
  misc_feature 1..20: note = chemically synthesized
  source 1..20: mol_type = other DNA
aaccaacctgctcactggag

SEQ ID NO: 47849 - DNA, 20 bp, synthetic construct
  misc_feature 1..20: note = chemically synthesized
  source 1..20: mol_type = other DNA
accaacctgctcactggagc

SEQ ID NO: 47850 - DNA, 20 bp, synthetic construct
  misc_feature 1..20: note = chemically synthesized
  source 1..20: mol_type = other DNA
ccaacctgctcactggagca

SEQ ID NO: 47851 - DNA, 20 bp, synthetic construct
  misc_feature 1..20: note = chemically synthesized
  source 1..20: mol_type = other DNA
aacctgctcactggagcagg

SEQ ID NO: 47852 - DNA, 20 bp, synthetic construct
  misc_feature 1..20: note = chemically synthesized
  source 1..20: mol_type = other DNA
acctgctcactggagcaggg

SEQ ID NO: 47853 - DNA, 20 bp, synthetic construct
  misc_feature 1..20: note = chemically synthesized
  source 1..20: mol_type = other DNA
gctcactggagcagggagga

SEQ ID NO: 47854 - DNA, 20 bp, synthetic construct
  misc_feature 1..20: note = chemically synthesized
  source 1..20: mol_type = other DNA
ctcactggagcagggaggac

SEQ ID NO: 47855 - DNA, 20 bp, synthetic construct
  misc_feature 1..20: note = chemically synthesized
  source 1..20: mol_type = other DNA
tggagcagggaggacaggac

SEQ ID NO: 47856 - DNA, 20 bp, synthetic construct
  misc_feature 1..20: note = chemically synthesized
  source 1..20: mol_type = other DNA
ggaggacaggaccagcataa

SEQ ID NO: 47857 - DNA, 20 bp, synthetic construct
  misc_feature 1..20: note = chemically synthesized
  source 1..20: mol_type = other DNA
gaggacaggaccagcataaa

SEQ ID NO: 47858 - DNA, 20 bp, synthetic construct
  misc_feature 1..20: note = chemically synthesized
  source 1..20: mol_type = other DNA
gacaggaccagcataaaagg

SEQ ID NO: 47859 - DNA, 20 bp, synthetic construct
  misc_feature 1..20: note = chemically synthesized
  source 1..20: mol_type = other DNA
acaggaccagcataaaaggc

SEQ ID NO: 47860 - DNA, 20 bp, synthetic construct
  misc_feature 1..20: note = chemically synthesized
  source 1..20: mol_type = other DNA
caggaccagcataaaaggca

SEQ ID NO: 47861 - DNA, 20 bp, synthetic construct
  misc_feature 1..20: note = chemically synthesized
  source 1..20: mol_type = other DNA
gaccagcataaaaggcaggg

SEQ ID NO: 47862 - DNA, 20 bp, synthetic construct
  misc_feature 1..20: note = chemically synthesized
  source 1..20: mol_type = other DNA
ccagcataaaaggcagggca

SEQ ID NO: 47863 - DNA, 20 bp, synthetic construct
  misc_feature 1..20: note = chemically synthesized
  source 1..20: mol_type = other DNA
tacactttcttctgacataa

SEQ ID NO: 47864 - DNA, 20 bp, synthetic construct
  misc_feature 1..20: note = chemically synthesized
  source 1..20: mol_type = other DNA
tctgacataacagtgttcac

SEQ ID NO: 47865 - DNA, 20 bp, synthetic construct
  misc_feature 1..20: note = chemically synthesized
  source 1..20: mol_type = other DNA
tgttcactagcaacctcaaa

SEQ ID NO: 47866 - DNA, 20 bp, synthetic construct
  misc_feature 1..20: note = chemically synthesized
  source 1..20: mol_type = other DNA
gcaacctcaaacagacacca

SEQ ID NO: 47867 - DNA, 20 bp, synthetic construct
  misc_feature 1..20: note = chemically synthesized
  source 1..20: mol_type = other DNA
ccatggtgcatctgactcct

SEQ ID NO: 47868 - DNA, 20 bp, synthetic construct
  misc_feature 1..20: note = chemically synthesized
  source 1..20: mol_type = other DNA
catggtgcatctgactcctg

SEQ ID NO: 47869 - DNA, 20 bp, synthetic construct
  misc_feature 1..20: note = chemically synthesized
  source 1..20: mol_type = other DNA
tggtgcatctgactcctgag

SEQ ID NO: 47870 - DNA, 20 bp, synthetic construct
  misc_feature 1..20: note = chemically synthesized
  source 1..20: mol_type = other DNA
tgcatctgactcctgaggag

SEQ ID NO: 47871 - DNA, 20 bp, synthetic construct
  misc_feature 1..20: note = chemically synthesized
  source 1..20: mol_type = other DNA
agactgctgtcaatgccctg

SEQ ID NO: 47872 - DNA, 20 bp, synthetic construct
  misc_feature 1..20: note = chemically synthesized
  source 1..20: mol_type = other DNA
gactgctgtcaatgccctgt

SEQ ID NO: 47873 - DNA, 20 bp, synthetic construct
  misc_feature 1..20: note = chemically synthesized
  source 1..20: mol_type = other DNA
actgctgtcaatgccctgtg

SEQ ID NO: 47874 - DNA, 20 bp, synthetic construct
  misc_feature 1..20: note = chemically synthesized
  source 1..20: mol_type = other DNA
tgtcaatgccctgtggggca

SEQ ID NO: 47875 - DNA, 20 bp, synthetic construct
  misc_feature 1..20: note = chemically synthesized
  source 1..20: mol_type = other DNA
cctgtggggcaaagtgaacg

SEQ ID NO: 47876 - DNA, 20 bp, synthetic construct
  misc_feature 1..20: note = chemically synthesized
  source 1..20: mol_type = other DNA
gggcaaagtgaacgtggatg

SEQ ID NO: 47877 - DNA, 20 bp, synthetic construct
  misc_feature 1..20: note = chemically synthesized
  source 1..20: mol_type = other DNA
aaagtgaacgtggatgcagt

SEQ ID NO: 47878 - DNA, 20 bp, synthetic construct
  misc_feature 1..20: note = chemically synthesized
  source 1..20: mol_type = other DNA
gtgaacgtggatgcagttgg

SEQ ID NO: 47879 - DNA, 20 bp, synthetic construct
  misc_feature 1..20: note = chemically synthesized
  source 1..20: mol_type = other DNA
acgtggatgcagttggtggt

SEQ ID NO: 47880 - DNA, 20 bp, synthetic construct
  misc_feature 1..20: note = chemically synthesized
  source 1..20: mol_type = other DNA
cgtggatgcagttggtggtg

SEQ ID NO: 47881 - DNA, 20 bp, synthetic construct
  misc_feature 1..20: note = chemically synthesized
  source 1..20: mol_type = other DNA
tgcagttggtggtgaggccc

SEQ ID NO: 47882 - DNA, 20 bp, synthetic construct
  misc_feature 1..20: note = chemically synthesized
  source 1..20: mol_type = other DNA
gcagttggtggtgaggccct

SEQ ID NO: 47883 - DNA, 20 bp, synthetic construct
  misc_feature 1..20: note = chemically synthesized
  source 1..20: mol_type = other DNA
gttggtggtgaggccctggg

SEQ ID NO: 47884 - DNA, 20 bp, synthetic construct
  misc_feature 1..20: note = chemically synthesized
  source 1..20: mol_type = other DNA
ttggtggtgaggccctgggc

SEQ ID NO: 47885 - DNA, 20 bp, synthetic construct
  misc_feature 1..20: note = chemically synthesized
  source 1..20: mol_type = other DNA
tggtgaggccctgggcaggt

SEQ ID NO: 47886 - DNA, 20 bp, synthetic construct
  misc_feature 1..20: note = chemically synthesized
  source 1..20: mol_type = other DNA
gccctgggcaggttggtatc

SEQ ID NO: 47887 - DNA, 20 bp, synthetic construct
  misc_feature 1..20: note = chemically synthesized
  source 1..20: mol_type = other DNA
ccctgggcaggttggtatca

SEQ ID NO: 47888 - DNA, 20 bp, synthetic construct
  misc_feature 1..20: note = chemically synthesized
  source 1..20: mol_type = other DNA
caggttggtatcaaggttat

SEQ ID NO: 47889 - DNA, 20 bp, synthetic construct
  misc_feature 1..20: note = chemically synthesized
  source 1..20: mol_type = other DNA
ggttggtatcaaggttataa

SEQ ID NO: 47890 - DNA, 20 bp, synthetic construct
  misc_feature 1..20: note = chemically synthesized
  source 1..20: mol_type = other DNA
ttggtatcaaggttataaga

SEQ ID NO: 47891 - DNA, 20 bp, synthetic construct
  misc_feature 1..20: note = chemically synthesized
  source 1..20: mol_type = other DNA
tggtatcaaggttataagag

SEQ ID NO: 47892 - DNA, 20 bp, synthetic construct
  misc_feature 1..20: note = chemically synthesized
  source 1..20: mol_type = other DNA
caaggttataagagaggctc

SEQ ID NO: 47893 - DNA, 20 bp, synthetic construct
  misc_feature 1..20: note = chemically synthesized
  source 1..20: mol_type = other DNA
aaggttataagagaggctca

SEQ ID NO: 47894 - DNA, 20 bp, synthetic construct
  misc_feature 1..20: note = chemically synthesized
  source 1..20: mol_type = other DNA
ggttataagagaggctcaag

SEQ ID NO: 47895 - DNA, 20 bp, synthetic construct
  misc_feature 1..20: note = chemically synthesized
  source 1..20: mol_type = other DNA
gttataagagaggctcaagg

SEQ ID NO: 47896 - DNA, 20 bp, synthetic construct
  misc_feature 1..20: note = chemically synthesized
  source 1..20: mol_type = other DNA
gagaggctcaaggaggcaaa

SEQ ID NO: 47897 - DNA, 20 bp, synthetic construct
  misc_feature 1..20: note = chemically synthesized
  source 1..20: mol_type = other DNA
tcaaggaggcaaatggaaac

SEQ ID NO: 47898 - DNA, 20 bp, synthetic construct
  misc_feature 1..20: note = chemically synthesized
  source 1..20: mol_type = other DNA
caaggaggcaaatggaaact

SEQ ID NO: 47899 - DNA, 20 bp, synthetic construct
  misc_feature 1..20: note = chemically synthesized
  source 1..20: mol_type = other DNA
aaatggaaactgggcatgtg

SEQ ID NO: 47900 - DNA, 20 bp, synthetic construct
  misc_feature 1..20: note = chemically synthesized
  source 1..20: mol_type = other DNA
ggaaactgggcatgtgtaga

SEQ ID NO: 47901 - DNA, 20 bp, synthetic construct
  misc_feature 1..20: note = chemically synthesized
  source 1..20: mol_type = other DNA
aaactgggcatgtgtagaca

SEQ ID NO: 47902 - DNA, 20 bp, synthetic construct
  misc_feature 1..20: note = chemically synthesized
  source 1..20: mol_type = other DNA
ctgggcatgtgtagacagag

SEQ ID NO: 47903 - DNA, 20 bp, synthetic construct
  misc_feature 1..20: note = chemically synthesized
  source 1..20: mol_type = other DNA
gtgtagacagagaagactct

SEQ ID NO: 47904 - DNA, 20 bp, synthetic construct
  misc_feature 1..20: note = chemically synthesized
  source 1..20: mol_type = other DNA
tgtagacagagaagactctt

SEQ ID NO: 47905 - DNA, 20 bp, synthetic construct
  misc_feature 1..20: note = chemically synthesized
  source 1..20: mol_type = other DNA
gaagactcttgggtttctga

SEQ ID NO: 47906 - DNA, 20 bp, synthetic construct
  misc_feature 1..20: note = chemically synthesized
  source 1..20: mol_type = other DNA
aagactcttgggtttctgat

SEQ ID NO: 47907 - DNA, 20 bp, synthetic construct
  misc_feature 1..20: note = chemically synthesized
  source 1..20: mol_type = other DNA
ggcactgactctctgtccct

SEQ ID NO: 47908 - DNA, 20 bp, synthetic construct
  misc_feature 1..20: note = chemically synthesized
  source 1..20: mol_type = other DNA
gcactgactctctgtccctt

SEQ ID NO: 47909 - DNA, 20 bp, synthetic construct
  misc_feature 1..20: note = chemically synthesized
  source 1..20: mol_type = other DNA
ttgggctgttttcctaccct

SEQ ID NO: 47910 - DNA, 20 bp, synthetic construct
  misc_feature 1..20: note = chemically synthesized
  source 1..20: mol_type = other DNA
ttttcctaccctcagattac

SEQ ID NO: 47911 - DNA, 20 bp, synthetic construct
  misc_feature 1..20: note = chemically synthesized
  source 1..20: mol_type = other DNA
tcctaccctcagattactgg

SEQ ID NO: 47912 - DNA, 20 bp, synthetic construct
  misc_feature 1..20: note = chemically synthesized
  source 1..20: mol_type = other DNA
gattactggtggtctaccct

SEQ ID NO: 47913 - DNA, 20 bp, synthetic construct
  misc_feature 1..20: note = chemically synthesized
  source 1..20: mol_type = other DNA
tggtggtctacccttggacc

SEQ ID NO: 47914 - DNA, 20 bp, synthetic construct
  misc_feature 1..20: note = chemically synthesized
  source 1..20: mol_type = other DNA
gtggtctacccttggaccca

SEQ ID NO: 47915 - DNA, 20 bp, synthetic construct
  misc_feature 1..20: note = chemically synthesized
  source 1..20: mol_type = other DNA
tggtctacccttggacccag

SEQ ID NO: 47916 - DNA, 20 bp, synthetic construct
  misc_feature 1..20: note = chemically synthesized
  source 1..20: mol_type = other DNA
cttggacccagaggttcttt

SEQ ID NO: 47917 - DNA, 20 bp, synthetic construct
  misc_feature 1..20: note = chemically synthesized
  source 1..20: mol_type = other DNA
cagaggttctttgagtcctt

SEQ ID NO: 47918 - DNA, 20 bp, synthetic construct
  misc_feature 1..20: note = chemically synthesized
  source 1..20: mol_type = other DNA
agaggttctttgagtccttt

SEQ ID NO: 47919 - DNA, 20 bp, synthetic construct
  misc_feature 1..20: note = chemically synthesized
  source 1..20: mol_type = other DNA
gaggttctttgagtcctttg

SEQ ID NO: 47920 - DNA, 20 bp, synthetic construct
  misc_feature 1..20: note = chemically synthesized
  source 1..20: mol_type = other DNA
gtcctctcctgatgctgtta

SEQ ID NO: 47921 - DNA, 20 bp, synthetic construct
  misc_feature 1..20: note = chemically synthesized
  source 1..20: mol_type = other DNA
tcctctcctgatgctgttat

SEQ ID NO: 47922 - DNA, 20 bp, synthetic construct
  misc_feature 1..20: note = chemically synthesized
  source 1..20: mol_type = other DNA
atgctgttatgggcaaccct

SEQ ID NO: 47923 - DNA, 20 bp, synthetic construct
  misc_feature 1..20: note = chemically synthesized
  source 1..20: mol_type = other DNA
tgctgttatgggcaacccta

SEQ ID NO: 47924 - DNA, 20 bp, synthetic construct
  misc_feature 1..20: note = chemically synthesized
  source 1..20: mol_type = other DNA
ttatgggcaaccctaaggtg

SEQ ID NO: 47925 - DNA, 20 bp, synthetic construct
  misc_feature 1..20: note = chemically synthesized
  source 1..20: mol_type = other DNA
tatgggcaaccctaaggtga

SEQ ID NO: 47926 - DNA, 20 bp, synthetic construct
  misc_feature 1..20: note = chemically synthesized
  source 1..20: mol_type = other DNA
aaccctaaggtgaaggctca

SEQ ID NO: 47927 - DNA, 20 bp, synthetic construct
  misc_feature 1..20: note = chemically synthesized
  source 1..20: mol_type = other DNA
ctaaggtgaaggctcatggc

SEQ ID NO: 47928 - DNA, 20 bp, synthetic construct
  misc_feature 1..20: note = chemically synthesized
  source 1..20: mol_type = other DNA
aggtgaaggctcatggcaag

SEQ ID NO: 47929 - DNA, 20 bp, synthetic construct
  misc_feature 1..20: note = chemically synthesized
  source 1..20: mol_type = other DNA
ggtgaaggctcatggcaaga

SEQ ID NO: 47930 - DNA, 20 bp, synthetic construct
  misc_feature 1..20: note = chemically synthesized
  source 1..20: mol_type = other DNA
ggctcatggcaagaaggtgc

SEQ ID NO: 47931 - DNA, 20 bp, synthetic construct
  misc_feature 1..20: note = chemically synthesized
  source 1..20: mol_type = other DNA
gctcatggcaagaaggtgct

SEQ ID NO: 47932 - DNA, 20 bp, synthetic construct
  misc_feature 1..20: note = chemically synthesized
  source 1..20: mol_type = other DNA
aagaaggtgctaggtgcctt

SEQ ID NO: 47933 - DNA, 20 bp, synthetic construct
  misc_feature 1..20: note = chemically synthesized
  source 1..20: mol_type = other DNA
gtgctaggtgcctttagtga

SEQ ID NO: 47934 - DNA, 20 bp, synthetic construct
  misc_feature 1..20: note = chemically synthesized
  source 1..20: mol_type = other DNA
aggtgcctttagtgatggcc

SEQ ID NO: 47935 - DNA, 20 bp, synthetic construct
  misc_feature 1..20: note = chemically synthesized
  source 1..20: mol_type = other DNA
tagtgatggcctggctcacc

SEQ ID NO: 47936 - DNA, 20 bp, synthetic construct
  misc_feature 1..20: note = chemically synthesized
  source 1..20: mol_type = other DNA
tggctcacctggacaacctc

SEQ ID NO: 47937 - DNA, 20 bp, synthetic construct
  misc_feature 1..20: note = chemically synthesized
  source 1..20: mol_type = other DNA
ggctcacctggacaacctca

SEQ ID NO: 47938 - DNA, 20 bp, synthetic construct
  misc_feature 1..20: note = chemically synthesized
  source 1..20: mol_type = other DNA
gctcacctggacaacctcaa

SEQ ID NO: 47939 - DNA, 20 bp, synthetic construct
  misc_feature 1..20: note = chemically synthesized
  source 1..20: mol_type = other DNA
acctcaagggcactttttct

SEQ ID NO: 47940 - DNA, 20 bp, synthetic construct
  misc_feature 1..20: note = chemically synthesized
  source 1..20: mol_type = other DNA
aagggcactttttctcagct

SEQ ID NO: 47941 - DNA, 20 bp, synthetic construct
  misc_feature 1..20: note = chemically synthesized
  source 1..20: mol_type = other DNA
gcactttttctcagctgagt

SEQ ID NO: 47942 - DNA, 20 bp, synthetic construct
  misc_feature 1..20: note = chemically synthesized
  source 1..20: mol_type = other DNA
tgagtgagctgcactgtgac

SEQ ID NO: 47943 - DNA, 20 bp, synthetic construct
  misc_feature 1..20: note = chemically synthesized
  source 1..20: mol_type = other DNA
gcactgtgacaagctgcacg

SEQ ID NO: 47944 - DNA, 20 bp, synthetic construct
  misc_feature 1..20: note = chemically synthesized
  source 1..20: mol_type = other DNA
acaagctgcacgtggatcct

SEQ ID NO: 47945 - DNA, 20 bp, synthetic construct
  misc_feature 1..20: note = chemically synthesized
  source 1..20: mol_type = other DNA
cacgtggatcctgagaactt

SEQ ID NO: 47946 - DNA, 20 bp, synthetic construct
  misc_feature 1..20: note = chemically synthesized
  source 1..20: mol_type = other DNA
acgtggatcctgagaacttc

SEQ ID NO: 47947 - DNA, 20 bp, synthetic construct
  misc_feature 1..20: note = chemically synthesized
  source 1..20: mol_type = other DNA
cgtggatcctgagaacttca

SEQ ID NO: 47948 - DNA, 20 bp, synthetic construct
  misc_feature 1..20: note = chemically synthesized
  source 1..20: mol_type = other DNA
gatcctgagaacttcagggt

SEQ ID NO: 47949 - DNA, 20 bp, synthetic construct
  misc_feature 1..20: note = chemically synthesized
  source 1..20: mol_type = other DNA
tgagaacttcagggtgagtc

SEQ ID NO: 47950 - DNA, 20 bp, synthetic construct
  misc_feature 1..20: note = chemically synthesized
  source 1..20: mol_type = other DNA
gagaacttcagggtgagtcc

SEQ ID NO: 47951 - DNA, 20 bp, synthetic construct
  misc_feature 1..20: note = chemically synthesized
  source 1..20: mol_type = other DNA
gaacttcagggtgagtccag

SEQ ID NO: 47952 - DNA, 20 bp, synthetic construct
  misc_feature 1..20: note = chemically synthesized
  source 1..20: mol_type = other DNA
tactttctaatcttacattt

SEQ ID NO: 47953 - DNA, 20 bp, synthetic construct
  misc_feature 1..20: note = chemically synthesized
  source 1..20: mol_type = other DNA
acaactcaaattatgcatac

SEQ ID NO: 47954 - DNA, 20 bp, synthetic construct
  misc_feature 1..20: note = chemically synthesized
  source 1..20: mol_type = other DNA
tcacctgctaattctgcact

SEQ ID NO: 47955 - DNA, 20 bp, synthetic construct
  misc_feature 1..20: note = chemically synthesized
  source 1..20: mol_type = other DNA
aatccttttgtctctccaca

SEQ ID NO: 47956 - DNA, 20 bp, synthetic construct
  misc_feature 1..20: note = chemically synthesized
  source 1..20: mol_type = other DNA
atccttttgtctctccacat

SEQ ID NO: 47957 - DNA, 20 bp, synthetic construct
  misc_feature 1..20: note = chemically synthesized
  source 1..20: mol_type = other DNA
tttgtctctccacatgggta

SEQ ID NO: 47958 - DNA, 20 bp, synthetic construct
  misc_feature 1..20: note = chemically synthesized
  source 1..20: mol_type = other DNA
ttgtctctccacatgggtat

SEQ ID NO: 47959 - DNA, 20 bp, synthetic construct
  misc_feature 1..20: note = chemically synthesized
  source 1..20: mol_type = other DNA
gtctctccacatgggtatgg

SEQ ID NO: 47960 - DNA, 20 bp, synthetic construct
  misc_feature 1..20: note = chemically synthesized
  source 1..20: mol_type = other DNA
ctctccacatgggtatggga

SEQ ID NO: 47961 - DNA, 20 bp, synthetic construct
  misc_feature 1..20: note = chemically synthesized
  source 1..20: mol_type = other DNA
tctccacatgggtatgggag

SEQ ID NO: 47962 - DNA, 20 bp, synthetic construct
  misc_feature 1..20: note = chemically synthesized
  source 1..20: mol_type = other DNA
atgggagaggctccaactca

SEQ ID NO: 47963 - DNA, 20 bp, synthetic construct
  misc_feature 1..20: note = chemically synthesized
  source 1..20: mol_type = other DNA
agaggctccaactcaaagat

SEQ ID NO: 47964 - DNA, 20 bp, synthetic construct
  misc_feature 1..20: note = chemically synthesized
  source 1..20: mol_type = other DNA
aggctccaactcaaagatga

SEQ ID NO: 47965 - DNA, 20 bp, synthetic construct
  misc_feature 1..20: note = chemically synthesized
  source 1..20: mol_type = other DNA
ggctccaactcaaagatgag

SEQ ID NO: 47966 - DNA, 20 bp, synthetic construct
  misc_feature 1..20: note = chemically synthesized
  source 1..20: mol_type = other DNA
caactcaaagatgagaggca

SEQ ID NO: 47967 - DNA, 20 bp, synthetic construct
  misc_feature 1..20: note = chemically synthesized
  source 1..20: mol_type = other DNA
agaggcatagaatactgttt

SEQ ID NO: 47968 - DNA, 20 bp, synthetic construct
  misc_feature 1..20: note = chemically synthesized
  source 1..20: mol_type = other DNA
aggcatagaatactgtttta

SEQ ID NO: 47969 - DNA, 20 bp, synthetic construct
  misc_feature 1..20: note = chemically synthesized
  source 1..20: mol_type = other DNA
ggcatagaatactgttttag

SEQ ID NO: 47970 - DNA, 20 bp, synthetic construct
  misc_feature 1..20: note = chemically synthesized
  source 1..20: mol_type = other DNA
gctataaatcattttacaat

SEQ ID NO: 47971 - DNA, 20 bp, synthetic construct
  misc_feature 1..20: note = chemically synthesized
  source 1..20: mol_type = other DNA
ctataaatcattttacaata

SEQ ID NO: 47972 - DNA, 20 bp, synthetic construct
  misc_feature 1..20: note = chemically synthesized
  source 1..20: mol_type = other DNA
attttacaataaggaataat

SEQ ID NO: 47973 - DNA, 20 bp, synthetic construct
  misc_feature 1..20: note = chemically synthesized
  source 1..20: mol_type = other DNA
ttggaattttataaattctg

SEQ ID NO: 47974 - DNA, 20 bp, synthetic construct
  misc_feature 1..20: note = chemically synthesized
  source 1..20: mol_type = other DNA
tttataaattctgtagtaaa

SEQ ID NO: 47975 - DNA, 20 bp, synthetic construct
  misc_feature 1..20: note = chemically synthesized
  source 1..20: mol_type = other DNA
aaattctgtagtaaatggaa

SEQ ID NO: 47976 - DNA, 20 bp, synthetic construct
  misc_feature 1..20: note = chemically synthesized
  source 1..20: mol_type = other DNA
tctgtagtaaatggaatgga

SEQ ID NO: 47977 - DNA, 20 bp, synthetic construct
  misc_feature 1..20: note = chemically synthesized
  source 1..20: mol_type = other DNA
ctgtagtaaatggaatggaa

SEQ ID NO: 47978 - DNA, 20 bp, synthetic construct
  misc_feature 1..20: note = chemically synthesized
  source 1..20: mol_type = other DNA
agtaaatggaatggaaagga

SEQ ID NO: 47979 - DNA, 20 bp, synthetic construct
  misc_feature 1..20: note = chemically synthesized
  source 1..20: mol_type = other DNA
aagtgaatatttgattatga

SEQ ID NO: 47980 - DNA, 20 bp, synthetic construct
  misc_feature 1..20: note = chemically synthesized
  source 1..20: mol_type = other DNA
aatatttgattatgaaagac

SEQ ID NO: 47981 - DNA, 20 bp, synthetic construct
  misc_feature 1..20: note = chemically synthesized
  source 1..20: mol_type = other DNA
atatttgattatgaaagact

SEQ ID NO: 47982 - DNA, 20 bp, synthetic construct
  misc_feature 1..20: note = chemically synthesized
  source 1..20: mol_type = other DNA
tttgattatgaaagactagg

SEQ ID NO: 47983 - DNA, 20 bp, synthetic construct
  misc_feature 1..20: note = chemically synthesized
  source 1..20: mol_type = other DNA
gaaagactaggcagttacac

SEQ ID NO: 47984 - DNA, 20 bp, synthetic construct
  misc_feature 1..20: note = chemically synthesized
  source 1..20: mol_type = other DNA
aagactaggcagttacactg

SEQ ID NO: 47985 - DNA, 20 bp, synthetic construct
  misc_feature 1..20: note = chemically synthesized
  source 1..20: mol_type = other DNA
agactaggcagttacactgg

SEQ ID NO: 47986 - DNA, 20 bp, synthetic construct
  misc_feature 1..20: note = chemically synthesized
  source 1..20: mol_type = other DNA
ctaggcagttacactggagg

SEQ ID NO: 47987 - DNA, 20 bp, synthetic construct
  misc_feature 1..20: note = chemically synthesized
  source 1..20: mol_type = other DNA
taggcagttacactggaggt

SEQ ID NO: 47988 - DNA, 20 bp, synthetic construct
  misc_feature 1..20: note = chemically synthesized
  source 1..20: mol_type = other DNA
aggcagttacactggaggtg

SEQ ID NO: 47989 - DNA, 20 bp, synthetic construct
  misc_feature 1..20: note = chemically synthesized
  source 1..20: mol_type = other DNA
cagttacactggaggtgggg

SEQ ID NO: 47990 - DNA, 20 bp, synthetic construct
  misc_feature 1..20: note = chemically synthesized
  source 1..20: mol_type = other DNA
ttacactggaggtggggcag

SEQ ID NO: 47991 - DNA, 20 bp, synthetic construct
  misc_feature 1..20: note = chemically synthesized
  source 1..20: mol_type = other DNA
ggtggggcagaagtcgttgc

SEQ ID NO: 47992 - DNA, 20 bp, synthetic construct
  misc_feature 1..20: note = chemically synthesized
  source 1..20: mol_type = other DNA
gtggggcagaagtcgttgct

SEQ ID NO: 47993 - DNA, 20 bp, synthetic construct
  misc_feature 1..20: note = chemically synthesized
  source 1..20: mol_type = other DNA
ggggcagaagtcgttgctag

SEQ ID NO: 47994 - DNA, 20 bp, synthetic construct
  misc_feature 1..20: note = chemically synthesized
  source 1..20: mol_type = other DNA
cagaagtcgttgctaggaga

SEQ ID NO: 47995 - DNA, 20 bp, synthetic construct
  misc_feature 1..20: note = chemically synthesized
  source 1..20: mol_type = other DNA
tgtatctattaatctgttta

SEQ ID NO: 47996 - DNA, 20 bp, synthetic construct
  misc_feature 1..20: note = chemically synthesized
  source 1..20: mol_type = other DNA
atacaaaattaaaactaatt

SEQ ID NO: 47997 - DNA, 20 bp, synthetic construct
  misc_feature 1..20: note = chemically synthesized
  source 1..20: mol_type = other DNA
atttggaattaatttgtata

SEQ ID NO: 47998 - DNA, 20 bp, synthetic construct
  misc_feature 1..20: note = chemically synthesized
  source 1..20: mol_type = other DNA
aatttgtatatagtattata

SEQ ID NO: 47999 - DNA, 20 bp, synthetic construct
  misc_feature 1..20: note = chemically synthesized
  source 1..20: mol_type = other DNA
atagtattatacagcatata

SEQ ID NO: 48000 - DNA, 20 bp, synthetic construct
  misc_feature 1..20: note = chemically synthesized
  source 1..20: mol_type = other DNA
atagcatatatgtacatata

SEQ ID NO: 48001 - DNA, 20 bp, synthetic construct
  misc_feature 1..20: note = chemically synthesized
  source 1..20: mol_type = other DNA
tacatatatagactacatgc

SEQ ID NO: 48002 - DNA, 20 bp, synthetic construct
  misc_feature 1..20: note = chemically synthesized
  source 1..20: mol_type = other DNA
atatagactacatgctagtt

SEQ ID NO: 48003 - DNA, 20 bp, synthetic construct
  misc_feature 1..20: note = chemically synthesized
  source 1..20: mol_type = other DNA
ctacatgctagttaagtaca

SEQ ID NO: 48004 - DNA, 20 bp, synthetic construct
  misc_feature 1..20: note = chemically synthesized
  source 1..20: mol_type = other DNA
acatgctagttaagtacata

SEQ ID NO: 48005 - DNA, 20 bp, synthetic construct
  misc_feature 1..20: note = chemically synthesized
  source 1..20: mol_type = other DNA
catgctagttaagtacatag

SEQ ID NO: 48006 - DNA, 20 bp, synthetic construct
  misc_feature 1..20: note = chemically synthesized
  source 1..20: mol_type = other DNA
acatagaggatgtgtgtgta

SEQ ID NO: 48007 - DNA, 20 bp, synthetic construct
  misc_feature 1..20: note = chemically synthesized
  source 1..20: mol_type = other DNA
tatgtacttatttatgctga

SEQ ID NO: 48008 - DNA, 20 bp, synthetic construct
  misc_feature 1..20: note = chemically synthesized
  source 1..20: mol_type = other DNA
atgtacttatttatgctgat

SEQ ID NO: 48009 - DNA, 20 bp, synthetic construct
  misc_feature 1..20: note = chemically synthesized
  source 1..20: mol_type = other DNA
ttatgctgatgggaataacc

SEQ ID NO: 48010 - DNA, 20 bp, synthetic construct
  misc_feature 1..20: note = chemically synthesized
  source 1..20: mol_type = other DNA
tatgctgatgggaataacct

SEQ ID NO: 48011 - DNA, 20 bp, synthetic construct
  misc_feature 1..20: note = chemically synthesized
  source 1..20: mol_type = other DNA
atgctgatgggaataacctg

SEQ ID NO: 48012 - DNA, 20 bp, synthetic construct
  misc_feature 1..20: note = chemically synthesized
  source 1..20: mol_type = other DNA
gatgggaataacctggggat

SEQ ID NO: 48013 - DNA, 20 bp, synthetic construct
  misc_feature 1..20: note = chemically synthesized
  source 1..20: mol_type = other DNA
cctggggatcagttttgtct

SEQ ID NO: 48014 - DNA, 20 bp, synthetic construct
  misc_feature 1..20: note = chemically synthesized
  source 1..20: mol_type = other DNA
gatcagttttgtctaagatt

SEQ ID NO: 48015 - DNA, 20 bp, synthetic construct
  misc_feature 1..20: note = chemically synthesized
  source 1..20: mol_type = other DNA
atcagttttgtctaagattt

SEQ ID NO: 48016 - DNA, 20 bp, synthetic construct
  misc_feature 1..20: note = chemically synthesized
  source 1..20: mol_type = other DNA
agttttgtctaagatttggg

SEQ ID NO: 48017 - DNA, 20 bp, synthetic construct
  misc_feature 1..20: note = chemically synthesized
  source 1..20: mol_type = other DNA
aagatttgggcagaaaaaaa

SEQ ID NO: 48018 - DNA, 20 bp, synthetic construct
  misc_feature 1..20: note = chemically synthesized
  source 1..20: mol_type = other DNA
agatttgggcagaaaaaaat

SEQ ID NO: 48019 - DNA, 20 bp, synthetic construct
  misc_feature 1..20: note = chemically synthesized
  source 1..20: mol_type = other DNA
gggcagaaaaaaatgggtgt

SEQ ID NO: 48020 - DNA, 20 bp, synthetic construct
  misc_feature 1..20: note = chemically synthesized
  source 1..20: mol_type = other DNA
gaaaaaaatgggtgttggct

SEQ ID NO: 48021 - DNA, 20 bp, synthetic construct
  misc_feature 1..20: note = chemically synthesized
  source 1..20: mol_type = other DNA
tgggtgttggctcagtttct

SEQ ID NO: 48022 - DNA, 20 bp, synthetic construct
  misc_feature 1..20: note = chemically synthesized
  source 1..20: mol_type = other DNA
gtgttggctcagtttctcag

SEQ ID NO: 48023 - DNA, 20 bp, synthetic construct
  misc_feature 1..20: note = chemically synthesized
  source 1..20: mol_type = other DNA
tggctcagtttctcagaagc

SEQ ID NO: 48024 - DNA, 20 bp, synthetic construct
  misc_feature 1..20: note = chemically synthesized
  source 1..20: mol_type = other DNA
atctgcctacctcttctccg

SEQ ID NO: 48025 - DNA, 20 bp, synthetic construct
  misc_feature 1..20: note = chemically synthesized
  source 1..20: mol_type = other DNA
tacctcttctccgcagctct

SEQ ID NO: 48026 - DNA, 20 bp, synthetic construct
  misc_feature 1..20: note = chemically synthesized
  source 1..20: mol_type = other DNA
acctcttctccgcagctctt

SEQ ID NO: 48027 - DNA, 20 bp, synthetic construct
  misc_feature 1..20: note = chemically synthesized
  source 1..20: mol_type = other DNA
gcagctcttgggcaatgtgc

SEQ ID NO: 48028 - DNA, 20 bp, synthetic construct
  misc_feature 1..20: note = chemically synthesized
  source 1..20: mol_type = other DNA
caatgtgctggtgtgtgtgc

SEQ ID NO: 48029 - DNA, 20 bp, synthetic construct
  misc_feature 1..20: note = chemically synthesized
  source 1..20: mol_type = other DNA
tgtgtgctggcccgcaactt

SEQ ID NO: 48030 - DNA, 20 bp, synthetic construct
  misc_feature 1..20: note = chemically synthesized
  source 1..20: mol_type = other DNA
tgctggcccgcaactttggc

SEQ ID NO: 48031 - DNA, 20 bp, synthetic construct
  misc_feature 1..20: note = chemically synthesized
  source 1..20: mol_type = other DNA
gctggcccgcaactttggca

SEQ ID NO: 48032 - DNA, 20 bp, synthetic construct
  misc_feature 1..20: note = chemically synthesized
  source 1..20: mol_type = other DNA
aggaattcaccccacaaatg

SEQ ID NO: 48033 - DNA, 20 bp, synthetic construct
  misc_feature 1..20: note = chemically synthesized
  source 1..20: mol_type = other DNA
ggaattcaccccacaaatgc

SEQ ID NO: 48034 - DNA, 20 bp, synthetic construct
  misc_feature 1..20: note = chemically synthesized
  source 1..20: mol_type = other DNA
cacaaatgcaggctgcctat

SEQ ID NO: 48035 - DNA, 20 bp, synthetic construct
  misc_feature 1..20: note = chemically synthesized
  source 1..20: mol_type = other DNA
aaatgcaggctgcctatcag

SEQ ID NO: 48036 - DNA, 20 bp, synthetic construct
  misc_feature 1..20: note = chemically synthesized
  source 1..20: mol_type = other DNA
aatgcaggctgcctatcaga

SEQ ID NO: 48037 - DNA, 20 bp, synthetic construct
  misc_feature 1..20: note = chemically synthesized
  source 1..20: mol_type = other DNA
gcaggctgcctatcagaagg

SEQ ID NO: 48038 - DNA, 20 bp, synthetic construct
  misc_feature 1..20: note = chemically synthesized
  source 1..20: mol_type = other DNA
ggctgcctatcagaaggtgg

SEQ ID NO: 48039 - DNA, 20 bp, synthetic construct
  misc_feature 1..20: note = chemically synthesized
  source 1..20: mol_type = other DNA
gcctatcagaaggtggtggc

SEQ ID NO: 48040 - DNA, 20 bp, synthetic construct
  misc_feature 1..20: note = chemically synthesized
  source 1..20: mol_type = other DNA
tcagaaggtggtggctggtg

SEQ ID NO: 48041 - DNA, 20 bp, synthetic construct
  misc_feature 1..20: note = chemically synthesized
  source 1..20: mol_type = other DNA
ggctggtgtggctaatgccc

SEQ ID NO: 48042 - DNA, 20 bp, synthetic construct
  misc_feature 1..20: note = chemically synthesized
  source 1..20: mol_type = other DNA
tggctaatgccctggctcac

SEQ ID NO: 48043 - DNA, 20 bp, synthetic construct
  misc_feature 1..20: note = chemically synthesized
  source 1..20: mol_type = other DNA
cctggctcacaagtaccatt

SEQ ID NO: 48044 - DNA, 20 bp, synthetic construct
  misc_feature 1..20: note = chemically synthesized
  source 1..20: mol_type = other DNA
cacaagtaccattgagatcc

SEQ ID NO: 48045 - DNA, 20 bp, synthetic construct
  misc_feature 1..20: note = chemically synthesized
  source 1..20: mol_type = other DNA
gactgtttcctgataaccat

SEQ ID NO: 48046 - DNA, 20 bp, synthetic construct
  misc_feature 1..20: note = chemically synthesized
  source 1..20: mol_type = other DNA
tgtttcctgataaccataag

SEQ ID NO: 48047 - DNA, 20 bp, synthetic construct
  misc_feature 1..20: note = chemically synthesized
  source 1..20: mol_type = other DNA
ataagaagaccctatttccc

SEQ ID NO: 48048 - DNA, 20 bp, synthetic construct
  misc_feature 1..20: note = chemically synthesized
  source 1..20: mol_type = other DNA
tagattctattttctgaact

SEQ ID NO: 48049 - DNA, 20 bp, synthetic construct
  misc_feature 1..20: note = chemically synthesized
  source 1..20: mol_type = other DNA
agattctattttctgaactt

SEQ ID NO: 48050 - DNA, 20 bp, synthetic construct
  misc_feature 1..20: note = chemically synthesized
  source 1..20: mol_type = other DNA
gggaacacaatgcctacttc

SEQ ID NO: 48051 - DNA, 20 bp, synthetic construct
  misc_feature 1..20: note = chemically synthesized
  source 1..20: mol_type = other DNA
ggaacacaatgcctacttca

SEQ ID NO: 48052 - DNA, 20 bp, synthetic construct
  misc_feature 1..20: note = chemically synthesized
  source 1..20: mol_type = other DNA
gaacacaatgcctacttcaa

SEQ ID NO: 48053 - DNA, 20 bp, synthetic construct
  misc_feature 1..20: note = chemically synthesized
  source 1..20: mol_type = other DNA
caatgcctacttcaagggta

SEQ ID NO: 48054 - DNA, 20 bp, synthetic construct
  misc_feature 1..20: note = chemically synthesized
  source 1..20: mol_type = other DNA
ggtatggcttctgcctaata

SEQ ID NO: 48055 - DNA, 20 bp, synthetic construct
  misc_feature 1..20: note = chemically synthesized
  source 1..20: mol_type = other DNA
tctgcctaataaagaatgtt

SEQ ID NO: 48056 - DNA, 20 bp, synthetic construct
  misc_feature 1..20: note = chemically synthesized
  source 1..20: mol_type = other DNA
acttatttcatttttttgtc

SEQ ID NO: 48057 - DNA, 20 bp, synthetic construct
  misc_feature 1..20: note = chemically synthesized
  source 1..20: mol_type = other DNA
cttatttcatttttttgtcc

SEQ ID NO: 48058 - DNA, 20 bp, synthetic construct
  misc_feature 1..20: note = chemically synthesized
  source 1..20: mol_type = other DNA
atttttttgtccaggtgtgt

SEQ ID NO: 48059 - DNA, 20 bp, synthetic construct
  misc_feature 1..20: note = chemically synthesized
  source 1..20: mol_type = other DNA
tttttgtccaggtgtgtaag

SEQ ID NO: 48060 - DNA, 20 bp, synthetic construct
  misc_feature 1..20: note = chemically synthesized
  source 1..20: mol_type = other DNA
ttttgtccaggtgtgtaaga

SEQ ID NO: 48061 - DNA, 20 bp, synthetic construct
  misc_feature 1..20: note = chemically synthesized
  source 1..20: mol_type = other DNA
aggtgtgtaagaaggttcct

SEQ ID NO: 48062 - DNA, 20 bp, synthetic construct
  misc_feature 1..20: note = chemically synthesized
  source 1..20: mol_type = other DNA
ggtgtgtaagaaggttcctg

SEQ ID NO: 48063 - DNA, 20 bp, synthetic construct
  misc_feature 1..20: note = chemically synthesized
  source 1..20: mol_type = other DNA
agaaggttcctgaggctcta

SEQ ID NO: 48064 - DNA, 20 bp, synthetic construct
  misc_feature 1..20: note = chemically synthesized
  source 1..20: mol_type = other DNA
ggttcctgaggctctacaga

SEQ ID NO: 48065 - DNA, 20 bp, synthetic construct
  misc_feature 1..20: note = chemically synthesized
  source 1..20: mol_type = other DNA
gttcctgaggctctacagat

SEQ ID NO: 48066 - DNA, 20 bp, synthetic construct
  misc_feature 1..20: note = chemically synthesized
  source 1..20: mol_type = other DNA
ttcctgaggctctacagata

SEQ ID NO: 48067 - DNA, 20 bp, synthetic construct
  misc_feature 1..20: note = chemically synthesized
  source 1..20: mol_type = other DNA
cctgaggctctacagatagg

SEQ ID NO: 48068 - DNA, 20 bp, synthetic construct
  misc_feature 1..20: note = chemically synthesized
  source 1..20: mol_type = other DNA
gagcacttgtttattttaca

SEQ ID NO: 48069 - DNA, 20 bp, synthetic construct
  misc_feature 1..20: note = chemically synthesized
  source 1..20: mol_type = other DNA
gcacttgtttattttacaaa

SEQ ID NO: 48070 - DNA, 20 bp, synthetic construct
  misc_feature 1..20: note = chemically synthesized
  source 1..20: mol_type = other DNA
tttattttacaaagagtaca

SEQ ID NO: 48071 - DNA, 20 bp, synthetic construct
  misc_feature 1..20: note = chemically synthesized
  source 1..20: mol_type = other DNA
ttattttacaaagagtacat

SEQ ID NO: 48072 - DNA, 20 bp, synthetic construct
  misc_feature 1..20: note = chemically synthesized
  source 1..20: mol_type = other DNA
ttacaaagagtacatgggaa

SEQ ID NO: 48073 - DNA, 20 bp, synthetic construct
  misc_feature 1..20: note = chemically synthesized
  source 1..20: mol_type = other DNA
acaaagagtacatgggaaaa

SEQ ID NO: 48074 - DNA, 20 bp, synthetic construct
  misc_feature 1..20: note = chemically synthesized
  source 1..20: mol_type = other DNA
gagtacatgggaaaagagaa

SEQ ID NO: 48075 - DNA, 20 bp, synthetic construct
  misc_feature 1..20: note = chemically synthesized
  source 1..20: mol_type = other DNA
acatgggaaaagagaaaagc

SEQ ID NO: 48076 - DNA, 20 bp, synthetic construct
  misc_feature 1..20: note = chemically synthesized
  source 1..20: mol_type = other DNA
catgggaaaagagaaaagca

SEQ ID NO: 48077 - DNA, 20 bp, synthetic construct
  misc_feature 1..20: note = chemically synthesized
  source 1..20: mol_type = other DNA
atgggaaaagagaaaagcaa

SEQ ID NO: 48078 - DNA, 20 bp, synthetic construct
  misc_feature 1..20: note = chemically synthesized
  source 1..20: mol_type = other DNA
gaaaagcaagggaaccgtac

SEQ ID NO: 48079 - DNA, 20 bp, synthetic construct
  misc_feature 1..20: note = chemically synthesized
  source 1..20: mol_type = other DNA
aaaagcaagggaaccgtaca

SEQ ID NO: 48080 - DNA, 20 bp, synthetic construct
  misc_feature 1..20: note = chemically synthesized
  source 1..20: mol_type = other DNA
ggaaccgtacaaggcattaa

SEQ ID NO: 48081 - DNA, 20 bp, synthetic construct
  misc_feature 1..20: note = chemically synthesized
  source 1..20: mol_type = other DNA
gaaccgtacaaggcattaat

SEQ ID NO: 48082 - DNA, 20 bp, synthetic construct
  misc_feature 1..20: note = chemically synthesized
  source 1..20: mol_type = other DNA
gggtgacacttctacctcca

SEQ ID NO: 48083 - DNA, 20 bp, synthetic construct
  misc_feature 1..20: note = chemically synthesized
  source 1..20: mol_type = other DNA
gtgacacttctacctccaaa

SEQ ID NO: 48084 - DNA, 20 bp, synthetic construct
  misc_feature 1..20: note = chemically synthesized
  source 1..20: mol_type = other DNA
acacttctacctccaaagag

SEQ ID NO: 48085 - DNA, 20 bp, synthetic construct
  misc_feature 1..20: note = chemically synthesized
  source 1..20: mol_type = other DNA
tccaaagagcagaaattatc

SEQ ID NO: 48086 - DNA, 20 bp, synthetic construct
  misc_feature 1..20: note = chemically synthesized
  source 1..20: mol_type = other DNA
tatcaagaactcttgataca

SEQ ID NO: 48087 - DNA, 20 bp, synthetic construct
  misc_feature 1..20: note = chemically synthesized
  source 1..20: mol_type = other DNA
tcttgatacaaagataatac

SEQ ID NO: 48088 - DNA, 20 bp, synthetic construct
  misc_feature 1..20: note = chemically synthesized
  source 1..20: mol_type = other DNA
caaagataatactggcactg

SEQ ID NO: 48089 - DNA, 20 bp, synthetic construct
  misc_feature 1..20: note = chemically synthesized
  source 1..20: mol_type = other DNA
aagataatactggcactgca

SEQ ID NO: 48090 - DNA, 20 bp, synthetic construct
  misc_feature 1..20: note = chemically synthesized
  source 1..20: mol_type = other DNA
agataatactggcactgcag

SEQ ID NO: 48091 - DNA, 20 bp, synthetic construct
  misc_feature 1..20: note = chemically synthesized
  source 1..20: mol_type = other DNA
tactggcactgcagaggttc

SEQ ID NO: 48092 - DNA, 20 bp, synthetic construct
  misc_feature 1..20: note = chemically synthesized
  source 1..20: mol_type = other DNA
actggcactgcagaggttct

SEQ ID NO: 48093 - DNA, 20 bp, synthetic construct
  misc_feature 1..20: note = chemically synthesized
  source 1..20: mol_type = other DNA
ctggcactgcagaggttcta

SEQ ID NO: 48094 - DNA, 20 bp, synthetic construct
  misc_feature 1..20: note = chemically synthesized
  source 1..20: mol_type = other DNA
gcactgcagaggttctaggg

SEQ ID NO: 48095 - DNA, 20 bp, synthetic construct
  misc_feature 1..20: note = chemically synthesized
  source 1..20: mol_type = other DNA
ctagggaagacctcaaccct

SEQ ID NO: 48096 - DNA, 20 bp, synthetic construct
  misc_feature 1..20: note = chemically synthesized
  source 1..20: mol_type = other DNA
aagacctcaaccctaagaca

SEQ ID NO: 48097 - DNA, 20 bp, synthetic construct
  misc_feature 1..20: note = chemically synthesized
  source 1..20: mol_type = other DNA
caaccctaagacatagcctc

SEQ ID NO: 48098 - DNA, 20 bp, synthetic construct
  misc_feature 1..20: note = chemically synthesized
  source 1..20: mol_type = other DNA
aaccctaagacatagcctca

SEQ ID NO: 48099 - DNA, 20 bp, synthetic construct
  misc_feature 1..20: note = chemically synthesized
  source 1..20: mol_type = other DNA
accctaagacatagcctcaa

SEQ ID NO: 48100 - DNA, 20 bp, synthetic construct
  misc_feature 1..20: note = chemically synthesized
  source 1..20: mol_type = other DNA
attaaactccaacaattact

SEQ ID NO: 48101 - DNA, 20 bp, synthetic construct
  misc_feature 1..20: note = chemically synthesized
  source 1..20: mol_type = other DNA
gaaaataatgtgctcaatta

SEQ ID NO: 48102 - DNA, 20 bp, synthetic construct
  misc_feature 1..20: note = chemically synthesized
  source 1..20: mol_type = other DNA
aaaataatgtgctcaattaa

SEQ ID NO: 48103 - DNA, 20 bp, synthetic construct
  misc_feature 1..20: note = chemically synthesized
  source 1..20: mol_type = other DNA
taaaggcataatgattactc

SEQ ID NO: 48104 - DNA, 20 bp, synthetic construct
  misc_feature 1..20: note = chemically synthesized
  source 1..20: mol_type = other DNA
cttcctttgcctgcacattg

SEQ ID NO: 48105 - DNA, 20 bp, synthetic construct
  misc_feature 1..20: note = chemically synthesized
  source 1..20: mol_type = other DNA
ccataatactataccccatc

SEQ ID NO: 48106 - DNA, 20 bp, synthetic construct
  misc_feature 1..20: note = chemically synthesized
  source 1..20: mol_type = other DNA
ccatcaagtgttcctgctcc

SEQ ID NO: 48107 - DNA, 20 bp, synthetic construct
  misc_feature 1..20: note = chemically synthesized
  source 1..20: mol_type = other DNA
agtgttcctgctccaagaaa

SEQ ID NO: 48108 - DNA, 20 bp, synthetic construct
  misc_feature 1..20: note = chemically synthesized
  source 1..20: mol_type = other DNA
cttcctcctcttacttgccc

SEQ ID NO: 48109 - DNA, 20 bp, synthetic construct
  misc_feature 1..20: note = chemically synthesized
  source 1..20: mol_type = other DNA
tgccccagaacatctctgta

SEQ ID NO: 48110 - DNA, 20 bp, synthetic construct
  misc_feature 1..20: note = chemically synthesized
  source 1..20: mol_type = other DNA
cctcttatcttcccatattt

SEQ ID NO: 48111 - DNA, 20 bp, synthetic construct
  misc_feature 1..20: note = chemically synthesized
  source 1..20: mol_type = other DNA
tatcttcccatatttcagtc

SEQ ID NO: 48112 - DNA, 20 bp, synthetic construct
  misc_feature 1..20: note = chemically synthesized
  source 1..20: mol_type = other DNA
cttgtgacctctcttgaccc

SEQ ID NO: 48113 - DNA, 20 bp, synthetic construct
  misc_feature 1..20: note = chemically synthesized
  source 1..20: mol_type = other DNA
acacacactccgtgctttat

SEQ ID NO: 48114 - DNA, 20 bp, synthetic construct
  misc_feature 1..20: note = chemically synthesized
  source 1..20: mol_type = other DNA
cctcatattaaattcatcaa

SEQ ID NO: 48115 - DNA, 20 bp, synthetic construct
  misc_feature 1..20: note = chemically synthesized
  source 1..20: mol_type = other DNA
ctcatattaaattcatcaat

SEQ ID NO: 48116 - DNA, 20 bp, synthetic construct
  misc_feature 1..20: note = chemically synthesized
  source 1..20: mol_type = other DNA
atattaaattcatcaatggg

SEQ ID NO: 48117 - DNA, 20 bp, synthetic construct
  misc_feature 1..20: note = chemically synthesized
  source 1..20: mol_type = other DNA
taaattcatcaatgggcaga

SEQ ID NO: 48118 - DNA, 20 bp, synthetic construct
  misc_feature 1..20: note = chemically synthesized
  source 1..20: mol_type = other DNA
cagaaagaaaatatttattc

SEQ ID NO: 48119 - DNA, 20 bp, synthetic construct
  misc_feature 1..20: note = chemically synthesized
  source 1..20: mol_type = other DNA
aaaatatttattcaagaaaa

SEQ ID NO: 48120 - DNA, 20 bp, synthetic construct
  misc_feature 1..20: note = chemically synthesized
  source 1..20: mol_type = other DNA
cagtgaatgaatgaacgaat

SEQ ID NO: 48121 - DNA, 20 bp, synthetic construct
  misc_feature 1..20: note = chemically synthesized
  source 1..20: mol_type = other DNA
gaatgaacgaatgagtaaat

SEQ ID NO: 48122 - DNA, 20 bp, synthetic construct
  misc_feature 1..20: note = chemically synthesized
  source 1..20: mol_type = other DNA
aatgagtaaatgagtaaatg

SEQ ID NO: 48123 - DNA, 20 bp, synthetic construct
  misc_feature 1..20: note = chemically synthesized
  source 1..20: mol_type = other DNA
atgagtaaatgagtaaatga

SEQ ID NO: 48124 - DNA, 20 bp, synthetic construct
  misc_feature 1..20: note = chemically synthesized
  source 1..20: mol_type = other DNA
ggaatgattattccttgctt

SEQ ID NO: 48125 - DNA, 20 bp, synthetic construct
  misc_feature 1..20: note = chemically synthesized
  source 1..20: mol_type = other DNA
attccttgctttagaacttc

SEQ ID NO: 48126 - DNA, 20 bp, synthetic construct
  misc_feature 1..20: note = chemically synthesized
  source 1..20: mol_type = other DNA
tgctttagaacttctggaat

SEQ ID NO: 48127 - DNA, 20 bp, synthetic construct
  misc_feature 1..20: note = chemically synthesized
  source 1..20: mol_type = other DNA
ctttagaacttctggaatta

SEQ ID NO: 48128 - DNA, 20 bp, synthetic construct
  misc_feature 1..20: note = chemically synthesized
  source 1..20: mol_type = other DNA
tttagaacttctggaattag

SEQ ID NO: 48129 - DNA, 20 bp, synthetic construct
  misc_feature 1..20: note = chemically synthesized
  source 1..20: mol_type = other DNA
atattaataataccatcgca

SEQ ID NO: 48130 - DNA, 20 bp, synthetic construct
  misc_feature 1..20: note = chemically synthesized
  source 1..20: mol_type = other DNA
tgttaatgctacaacataca

SEQ ID NO: 48131 - DNA, 20 bp, synthetic construct
  misc_feature 1..20: note = chemically synthesized
  source 1..20: mol_type = other DNA
ttaatgctacaacatacaaa

SEQ ID NO: 48132 - DNA, 20 bp, synthetic construct
  misc_feature 1..20: note = chemically synthesized
  source 1..20: mol_type = other DNA
taatgctacaacatacaaag

SEQ ID NO: 48133 - DNA, 20 bp, synthetic construct
  misc_feature 1..20: note = chemically synthesized
  source 1..20: mol_type = other DNA
tgctacaacatacaaagagg

SEQ ID NO: 48134 - DNA, 20 bp, synthetic construct
  misc_feature 1..20: note = chemically synthesized
  source 1..20: mol_type = other DNA
acatacaaagaggaagcatg

SEQ ID NO: 48135 - DNA, 20 bp, synthetic construct
  misc_feature 1..20: note = chemically synthesized
  source 1..20: mol_type = other DNA
gcatgcagtaaacaaccgaa

SEQ ID NO: 48136 - DNA, 20 bp, synthetic construct
  misc_feature 1..20: note = chemically synthesized
  source 1..20: mol_type = other DNA
agttatttcctttctgatca

SEQ ID NO: 48137 - DNA, 20 bp, synthetic construct
  misc_feature 1..20: note = chemically synthesized
  source 1..20: mol_type = other DNA
gttatttcctttctgatcat

SEQ ID NO: 48138 - DNA, 20 bp, synthetic construct
  misc_feature 1..20: note = chemically synthesized
  source 1..20: mol_type = other DNA
tatttcctttctgatcatag

SEQ ID NO: 48139 - DNA, 20 bp, synthetic construct
  misc_feature 1..20: note = chemically synthesized
  source 1..20: mol_type = other DNA
ggagtaatatttttttcctt

SEQ ID NO: 48140 - DNA, 20 bp, synthetic construct
  misc_feature 1..20: note = chemically synthesized
  source 1..20: mol_type = other DNA
cttgagcaccatttttgcca

SEQ ID NO: 48141 - DNA, 20 bp, synthetic construct
  misc_feature 1..20: note = chemically synthesized
  source 1..20: mol_type = other DNA
ttgagcaccatttttgccat

SEQ ID NO: 48142 - DNA, 20 bp, synthetic construct
  misc_feature 1..20: note = chemically synthesized
  source 1..20: mol_type = other DNA
atttttgccataggtaaaat

SEQ ID NO: 48143 - DNA, 20 bp, synthetic construct
  misc_feature 1..20: note = chemically synthesized
  source 1..20: mol_type = other DNA
tttgccataggtaaaattag

SEQ ID NO: 48144 - DNA, 20 bp, synthetic construct
  misc_feature 1..20: note = chemically synthesized
  source 1..20: mol_type = other DNA
ttgccataggtaaaattaga

SEQ ID NO: 48145 - DNA, 20 bp, synthetic construct
  misc_feature 1..20: note = chemically synthesized
  source 1..20: mol_type = other DNA
ggtaaaattagaaggatttt

SEQ ID NO: 48146 - DNA, 20 bp, synthetic construct
  misc_feature 1..20: note = chemically synthesized
  source 1..20: mol_type = other DNA
aaggatttttagaactttct

SEQ ID NO: 48147 - DNA, 20 bp, synthetic construct
  misc_feature 1..20: note = chemically synthesized
  source 1..20: mol_type = other DNA
aacttacttgaatacctaaa

SEQ ID NO: 48148 - DNA, 20 bp, synthetic construct
  misc_feature 1..20: note = chemically synthesized
  source 1..20: mol_type = other DNA
tgttgtttccttgtgtttga

SEQ ID NO: 48149 - DNA, 20 bp, synthetic construct
  misc_feature 1..20: note = chemically synthesized
  source 1..20: mol_type = other DNA
tgtgtttgaaagtgctttca

SEQ ID NO: 48150 - DNA, 20 bp, synthetic construct
  misc_feature 1..20: note = chemically synthesized
  source 1..20: mol_type = other DNA
agtaactctgtctgtactgc

SEQ ID NO: 48151 - DNA, 20 bp, synthetic construct
  misc_feature 1..20: note = chemically synthesized
  source 1..20: mol_type = other DNA
aatatactgacaatgtgtta

SEQ ID NO: 48152 - DNA, 20 bp, synthetic construct
  misc_feature 1..20: note = chemically synthesized
  source 1..20: mol_type = other DNA
tcacaacattttgaattgac

SEQ ID NO: 48153 - DNA, 20 bp, synthetic construct
  misc_feature 1..20: note = chemically synthesized
  source 1..20: mol_type = other DNA
caacattttgaattgactgg

SEQ ID NO: 48154 - DNA, 20 bp, synthetic construct
  misc_feature 1..20: note = chemically synthesized
  source 1..20: mol_type = other DNA
cattttgaattgactggcag

SEQ ID NO: 48155 - DNA, 20 bp, synthetic construct
  misc_feature 1..20: note = chemically synthesized
  source 1..20: mol_type = other DNA
tttgaattgactggcagcag

SEQ ID NO: 48156 - DNA, 20 bp, synthetic construct
  misc_feature 1..20: note = chemically synthesized
  source 1..20: mol_type = other DNA
tatatccatgtgttttcctt

SEQ ID NO: 48157 - DNA, 20 bp, synthetic construct
  misc_feature 1..20: note = chemically synthesized
  source 1..20: mol_type = other DNA
tttccttaagtcattataca

SEQ ID NO: 48158 - DNA, 20 bp, synthetic construct
  misc_feature 1..20: note = chemically synthesized
  source 1..20: mol_type = other DNA
ccttaagtcattatacatag

SEQ ID NO: 48159 - DNA, 20 bp, synthetic construct
  misc_feature 1..20: note = chemically synthesized
  source 1..20: mol_type = other DNA
cttaagtcattatacatagt

SEQ ID NO: 48160 - DNA, 20 bp, synthetic construct
  misc_feature 1..20: note = chemically synthesized
  source 1..20: mol_type = other DNA
cattatacatagtaggcact

SEQ ID NO: 48161 - DNA, 20 bp, synthetic construct
  misc_feature 1..20: note = chemically synthesized
  source 1..20: mol_type = other DNA
agaactctttatatctgaat

SEQ ID NO: 48162 - DNA, 20 bp, synthetic construct
  misc_feature 1..20: note = chemically synthesized
  source 1..20: mol_type = other DNA
ttatatctgaataagatatt

SEQ ID NO: 48163 - DNA, 20 bp, synthetic construct
  misc_feature 1..20: note = chemically synthesized
  source 1..20: mol_type = other DNA
tatatctgaataagatattt

SEQ ID NO: 48164 - DNA, 20 bp, synthetic construct
  misc_feature 1..20: note = chemically synthesized
  source 1..20: mol_type = other DNA
ataagatatttaggaaccac

SEQ ID NO: 48165 - DNA, 20 bp, synthetic construct
  misc_feature 1..20: note = chemically synthesized
  source 1..20: mol_type = other DNA
ggaaccactggtttacatat

SEQ ID NO: 48166 - DNA, 20 bp, synthetic construct
  misc_feature 1..20: note = chemically synthesized
  source 1..20: mol_type = other DNA
accactggtttacatatcag

SEQ ID NO: 48167 - DNA, 20 bp, synthetic construct
  misc_feature 1..20: note = chemically synthesized
  source 1..20: mol_type = other DNA
actggtttacatatcagaag

SEQ ID NO: 48168 - DNA, 20 bp, synthetic construct
  misc_feature 1..20: note = chemically synthesized
  source 1..20: mol_type = other DNA
tggtttacatatcagaagca

SEQ ID NO: 48169 - DNA, 20 bp, synthetic construct
  misc_feature 1..20: note = chemically synthesized
  source 1..20: mol_type = other DNA
atatcagaagcagagctact

SEQ ID NO: 48170 - DNA, 20 bp, synthetic construct
  misc_feature 1..20: note = chemically synthesized
  source 1..20: mol_type = other DNA
tatcagaagcagagctactc

SEQ ID NO: 48171 - DNA, 20 bp, synthetic construct
  misc_feature 1..20: note = chemically synthesized
  source 1..20: mol_type = other DNA
atcagaagcagagctactca

SEQ ID NO: 48172 - DNA, 20 bp, synthetic construct
  misc_feature 1..20: note = chemically synthesized
  source 1..20: mol_type = other DNA
cagagctactcagggcattt

SEQ ID NO: 48173 - DNA, 20 bp, synthetic construct
  misc_feature 1..20: note = chemically synthesized
  source 1..20: mol_type = other DNA
agagctactcagggcatttt

SEQ ID NO: 48174 - DNA, 20 bp, synthetic construct
  misc_feature 1..20: note = chemically synthesized
  source 1..20: mol_type = other DNA
gagctactcagggcattttg

SEQ ID NO: 48175 - DNA, 20 bp, synthetic construct
  misc_feature 1..20: note = chemically synthesized
  source 1..20: mol_type = other DNA
ctactcagggcattttgggg

SEQ ID NO: 48176 - DNA, 20 bp, synthetic construct
  misc_feature 1..20: note = chemically synthesized
  source 1..20: mol_type = other DNA
aagatcactttcacattcct

SEQ ID NO: 48177 - DNA, 20 bp, synthetic construct
  misc_feature 1..20: note = chemically synthesized
  source 1..20: mol_type = other DNA
cactttcacattcctgagca

SEQ ID NO: 48178 - DNA, 20 bp, synthetic construct
  misc_feature 1..20: note = chemically synthesized
  source 1..20: mol_type = other DNA
actttcacattcctgagcat

SEQ ID NO: 48179 - DNA, 20 bp, synthetic construct
  misc_feature 1..20: note = chemically synthesized
  source 1..20: mol_type = other DNA
ctttcacattcctgagcata

SEQ ID NO: 48180 - DNA, 20 bp, synthetic construct
  misc_feature 1..20: note = chemically synthesized
  source 1..20: mol_type = other DNA
tcacattcctgagcataggg

SEQ ID NO: 48181 - DNA, 20 bp, synthetic construct
  misc_feature 1..20: note = chemically synthesized
  source 1..20: mol_type = other DNA
gagcatagggaagttctcat

SEQ ID NO: 48182 - DNA, 20 bp, synthetic construct
  misc_feature 1..20: note = chemically synthesized
  source 1..20: mol_type = other DNA
gcatagggaagttctcataa

SEQ ID NO: 48183 - DNA, 20 bp, synthetic construct
  misc_feature 1..20: note = chemically synthesized
  source 1..20: mol_type = other DNA
agggaagttctcataagagt

SEQ ID NO: 48184 - DNA, 20 bp, synthetic construct
  misc_feature 1..20: note = chemically synthesized
  source 1..20: mol_type = other DNA
tcataagagtaagatattaa

SEQ ID NO: 48185 - DNA, 20 bp, synthetic construct
  misc_feature 1..20: note = chemically synthesized
  source 1..20: mol_type = other DNA
cataagagtaagatattaaa

SEQ ID NO: 48186 - DNA, 20 bp, synthetic construct
  misc_feature 1..20: note = chemically synthesized
  source 1..20: mol_type = other DNA
taagagtaagatattaaaag

SEQ ID NO: 48187 - DNA, 20 bp, synthetic construct
  misc_feature 1..20: note = chemically synthesized
  source 1..20: mol_type = other DNA
attaaaaggagatacttgtg

SEQ ID NO: 48188 - DNA, 20 bp, synthetic construct
  misc_feature 1..20: note = chemically synthesized
  source 1..20: mol_type = other DNA
gatacttgtgtggtattcga

SEQ ID NO: 48189 - DNA, 20 bp, synthetic construct
  misc_feature 1..20: note = chemically synthesized
  source 1..20: mol_type = other DNA
cttgtgtggtattcgaaaga

SEQ ID NO: 48190 - DNA, 20 bp, synthetic construct
  misc_feature 1..20: note = chemically synthesized
  source 1..20: mol_type = other DNA
tgtggtattcgaaagacagt

SEQ ID NO: 48191 - DNA, 20 bp, synthetic construct
  misc_feature 1..20: note = chemically synthesized
  source 1..20: mol_type = other DNA
tggtattcgaaagacagtaa

SEQ ID NO: 48192 - DNA, 20 bp, synthetic construct
  misc_feature 1..20: note = chemically synthesized
  source 1..20: mol_type = other DNA
gtattcgaaagacagtaaga

SEQ ID NO: 48193 - DNA, 20 bp, synthetic construct
  misc_feature 1..20: note = chemically synthesized
  source 1..20: mol_type = other DNA
aaagacagtaagagagattg

SEQ ID NO: 48194 - DNA, 20 bp, synthetic construct
  misc_feature 1..20: note = chemically synthesized
  source 1..20: mol_type = other DNA
tgtagaccttatgatcttga

SEQ ID NO: 48195 - DNA, 20 bp, synthetic construct
  misc_feature 1..20: note = chemically synthesized
  source 1..20: mol_type = other DNA
gtagaccttatgatcttgat

SEQ ID NO: 48196 - DNA, 20 bp, synthetic construct
  misc_feature 1..20: note = chemically synthesized
  source 1..20: mol_type = other DNA
tagaccttatgatcttgata

SEQ ID NO: 48197 - DNA, 20 bp, synthetic construct
  misc_feature 1..20: note = chemically synthesized
  source 1..20: mol_type = other DNA
aactacattcctttctccaa

SEQ ID NO: 48198 - DNA, 20 bp, synthetic construct
  misc_feature 1..20: note = chemically synthesized
  source 1..20: mol_type = other DNA
ttctccaaaagtcaaaaaaa

SEQ ID NO: 48199 - DNA, 20 bp, synthetic construct
  misc_feature 1..20: note = chemically synthesized
  source 1..20: mol_type = other DNA
ctccaaaagtcaaaaaaaaa

SEQ ID NO: 48200 - DNA, 20 bp, synthetic construct
  misc_feature 1..20: note = chemically synthesized
  source 1..20: mol_type = other DNA
tcaaaaaaaaagagcaaata

SEQ ID NO: 48201 - DNA, 20 bp, synthetic construct
  misc_feature 1..20: note = chemically synthesized
  source 1..20: mol_type = other DNA
accttctattcctacaccat

SEQ ID NO: 48202 - DNA, 20 bp, synthetic construct
  misc_feature 1..20: note = chemically synthesized
  source 1..20: mol_type = other DNA
ttctattcctacaccattag

SEQ ID NO: 48203 - DNA, 20 bp, synthetic construct
  misc_feature 1..20: note = chemically synthesized
  source 1..20: mol_type = other DNA
tattcctacaccattagaag

SEQ ID NO: 48204 - DNA, 20 bp, synthetic construct
  misc_feature 1..20: note = chemically synthesized
  source 1..20: mol_type = other DNA
cctacaccattagaagtagt

SEQ ID NO: 48205 - DNA, 20 bp, synthetic construct
  misc_feature 1..20: note = chemically synthesized
  source 1..20: mol_type = other DNA
caccattagaagtagtcagt

SEQ ID NO: 48206 - DNA, 20 bp, synthetic construct
  misc_feature 1..20: note = chemically synthesized
  source 1..20: mol_type = other DNA
ttagaagtagtcagtgagtc

SEQ ID NO: 48207 - DNA, 20 bp, synthetic construct
  misc_feature 1..20: note = chemically synthesized
  source 1..20: mol_type = other DNA
tagaagtagtcagtgagtct

SEQ ID NO: 48208 - DNA, 20 bp, synthetic construct
  misc_feature 1..20: note = chemically synthesized
  source 1..20: mol_type = other DNA
agtagtcagtgagtctaggc

SEQ ID NO: 48209 - DNA, 20 bp, synthetic construct
  misc_feature 1..20: note = chemically synthesized
  source 1..20: mol_type = other DNA
agtgagtctaggcaagatgt

SEQ ID NO: 48210 - DNA, 20 bp, synthetic construct
  misc_feature 1..20: note = chemically synthesized
  source 1..20: mol_type = other DNA
ggccctaaaaatccaaatac

SEQ ID NO: 48211 - DNA, 20 bp, synthetic construct
  misc_feature 1..20: note = chemically synthesized
  source 1..20: mol_type = other DNA
ccctaaaaatccaaatacca

SEQ ID NO: 48212 - DNA, 20 bp, synthetic construct
  misc_feature 1..20: note = chemically synthesized
  source 1..20: mol_type = other DNA
ccaaataccagagaattcat

SEQ ID NO: 48213 - DNA, 20 bp, synthetic construct
  misc_feature 1..20: note = chemically synthesized
  source 1..20: mol_type = other DNA
gaattcatgagaacatcacc

SEQ ID NO: 48214 - DNA, 20 bp, synthetic construct
  misc_feature 1..20: note = chemically synthesized
  source 1..20: mol_type = other DNA
tcatgagaacatcacctgga

SEQ ID NO: 48215 - DNA, 20 bp, synthetic construct
  misc_feature 1..20: note = chemically synthesized
  source 1..20: mol_type = other DNA
catgagaacatcacctggat

SEQ ID NO: 48216 - DNA, 20 bp, synthetic construct
  misc_feature 1..20: note = chemically synthesized
  source 1..20: mol_type = other DNA
acctggatgggacatgtgcc

SEQ ID NO: 48217 - DNA, 20 bp, synthetic construct
  misc_feature 1..20: note = chemically synthesized
  source 1..20: mol_type = other DNA
cacacacaattactatatgc

SEQ ID NO: 48218 - DNA, 20 bp, synthetic construct
  misc_feature 1..20: note = chemically synthesized
  source 1..20: mol_type = other DNA
acacacaattactatatgct

SEQ ID NO: 48219 - DNA, 20 bp, synthetic construct
  misc_feature 1..20: note = chemically synthesized
  source 1..20: mol_type = other DNA
gcattgctatcttcatattg

SEQ ID NO: 48220 - DNA, 20 bp, synthetic construct
  misc_feature 1..20: note = chemically synthesized
  source 1..20: mol_type = other DNA
gctatcttcatattgaagat

SEQ ID NO: 48221 - DNA, 20 bp, synthetic construct
  misc_feature 1..20: note = chemically synthesized
  source 1..20: mol_type = other DNA
ctatcttcatattgaagatg

SEQ ID NO: 48222 - DNA, 20 bp, synthetic construct
  misc_feature 1..20: note = chemically synthesized
  source 1..20: mol_type = other DNA
atcttcatattgaagatgag

SEQ ID NO: 48223 - DNA, 20 bp, synthetic construct
  misc_feature 1..20: note = chemically synthesized
  source 1..20: mol_type = other DNA
tcttcatattgaagatgagg

SEQ ID NO: 48224 - DNA, 20 bp, synthetic construct
  misc_feature 1..20: note = chemically synthesized
  source 1..20: mol_type = other DNA
atattgaagatgaggaggtc

SEQ ID NO: 48225 - DNA, 20 bp, synthetic construct
  misc_feature 1..20: note = chemically synthesized
  source 1..20: mol_type = other DNA
attgaagatgaggaggtcaa

SEQ ID NO: 48226 - DNA, 20 bp, synthetic construct
  misc_feature 1..20: note = chemically synthesized
  source 1..20: mol_type = other DNA
aggaggtcaagagatgaaaa

SEQ ID NO: 48227 - DNA, 20 bp, synthetic construct
  misc_feature 1..20: note = chemically synthesized
  source 1..20: mol_type = other DNA
tcaagagatgaaaaaagact

SEQ ID NO: 48228 - DNA, 20 bp, synthetic construct
  misc_feature 1..20: note = chemically synthesized
  source 1..20: mol_type = other DNA
gttatattaaaattatttgt

SEQ ID NO: 48229 - DNA, 20 bp, synthetic construct
  misc_feature 1..20: note = chemically synthesized
  source 1..20: mol_type = other DNA
tatattaaaattatttgtta

SEQ ID NO: 48230 - DNA, 20 bp, synthetic construct
  misc_feature 1..20: note = chemically synthesized
  source 1..20: mol_type = other DNA
attaaaattatttgttagag

SEQ ID NO: 48231 - DNA, 20 bp, synthetic construct
  misc_feature 1..20: note = chemically synthesized
  source 1..20: mol_type = other DNA
taaaattatttgttagagta

SEQ ID NO: 48232 - DNA, 20 bp, synthetic construct
  misc_feature 1..20: note = chemically synthesized
  source 1..20: mol_type = other DNA
tgttagagtagagcttttgt

SEQ ID NO: 48233 - DNA, 20 bp, synthetic construct
  misc_feature 1..20: note = chemically synthesized
  source 1..20: mol_type = other DNA
ttagagtagagcttttgtaa

SEQ ID NO: 48234 - DNA, 20 bp, synthetic construct
  misc_feature 1..20: note = chemically synthesized
  source 1..20: mol_type = other DNA
gtagagcttttgtaagagtc

SEQ ID NO: 48235 - DNA, 20 bp, synthetic construct
  misc_feature 1..20: note = chemically synthesized
  source 1..20: mol_type = other DNA
tagagcttttgtaagagtct

SEQ ID NO: 48236 - DNA, 20 bp, synthetic construct
  misc_feature 1..20: note = chemically synthesized
  source 1..20: mol_type = other DNA
gagcttttgtaagagtctag

SEQ ID NO: 48237 - DNA, 20 bp, synthetic construct
  misc_feature 1..20: note = chemically synthesized
  source 1..20: mol_type = other DNA
tttgtaagagtctaggagtg

SEQ ID NO: 48238 - DNA, 20 bp, synthetic construct
  misc_feature 1..20: note = chemically synthesized
  source 1..20: mol_type = other DNA
ttgtaagagtctaggagtgt

SEQ ID NO: 48239 - DNA, 20 bp, synthetic construct
  misc_feature 1..20: note = chemically synthesized
  source 1..20: mol_type = other DNA
gtaagagtctaggagtgtgg

SEQ ID NO: 48240 - DNA, 20 bp, synthetic construct
  misc_feature 1..20: note = chemically synthesized
  source 1..20: mol_type = other DNA
gagctaaatgatgatacaca

SEQ ID NO: 48241 - DNA, 20 bp, synthetic construct
  misc_feature 1..20: note = chemically synthesized
  source 1..20: mol_type = other DNA
atacacatggacacaaaaaa

SEQ ID NO: 48242 - DNA, 20 bp, synthetic construct
  misc_feature 1..20: note = chemically synthesized
  source 1..20: mol_type = other DNA
ggacacaaaaaatagatcaa

SEQ ID NO: 48243 - DNA, 20 bp, synthetic construct
  misc_feature 1..20: note = chemically synthesized
  source 1..20: mol_type = other DNA
aaaatagatcaacagacacc

SEQ ID NO: 48244 - DNA, 20 bp, synthetic construct
  misc_feature 1..20: note = chemically synthesized
  source 1..20: mol_type = other DNA
aaatagatcaacagacaccc

SEQ ID NO: 48245 - DNA, 20 bp, synthetic construct
  misc_feature 1..20: note = chemically synthesized
  source 1..20: mol_type = other DNA
acagacacccaggcctactt

SEQ ID NO: 48246 - DNA, 20 bp, synthetic construct
  misc_feature 1..20: note = chemically synthesized
  source 1..20: mol_type = other DNA
cagacacccaggcctacttg

SEQ ID NO: 48247 - DNA, 20 bp, synthetic construct
  misc_feature 1..20: note = chemically synthesized
  source 1..20: mol_type = other DNA
agacacccaggcctacttga

SEQ ID NO: 48248 - DNA, 20 bp, synthetic construct
  misc_feature 1..20: note = chemically synthesized
  source 1..20: mol_type = other DNA
cccaggcctacttgagggtt

SEQ ID NO: 48249 - DNA, 20 bp, synthetic construct
  misc_feature 1..20: note = chemically synthesized
  source 1..20: mol_type = other DNA
ccaggcctacttgagggttg

SEQ ID NO: 48250 - DNA, 20 bp, synthetic construct
  misc_feature 1..20: note = chemically synthesized
  source 1..20: mol_type = other DNA
caggcctacttgagggttga

SEQ ID NO: 48251 - DNA, 20 bp, synthetic construct
  misc_feature 1..20: note = chemically synthesized
  source 1..20: mol_type = other DNA
gcctacttgagggttgaggg

SEQ ID NO: 48252 - DNA, 20 bp, synthetic construct
  misc_feature 1..20: note = chemically synthesized
  source 1..20: mol_type = other DNA
cctacttgagggttgagggt

SEQ ID NO: 48253 - DNA, 20 bp, synthetic construct
  misc_feature 1..20: note = chemically synthesized
  source 1..20: mol_type = other DNA
acttgagggttgagggtggg

SEQ ID NO: 48254 - DNA, 20 bp, synthetic construct
  misc_feature 1..20: note = chemically synthesized
  source 1..20: mol_type = other DNA
ttgagggttgagggtgggaa

SEQ ID NO: 48255 - DNA, 20 bp, synthetic construct
  misc_feature 1..20: note = chemically synthesized
  source 1..20: mol_type = other DNA
tgagggttgagggtgggaag

SEQ ID NO: 48256 - DNA, 20 bp, synthetic construct
  misc_feature 1..20: note = chemically synthesized
  source 1..20: mol_type = other DNA
gagggttgagggtgggaaga

SEQ ID NO: 48257 - DNA, 20 bp, synthetic construct
  misc_feature 1..20: note = chemically synthesized
  source 1..20: mol_type = other DNA
gggttgagggtgggaagagg

SEQ ID NO: 48258 - DNA, 20 bp, synthetic construct
  misc_feature 1..20: note = chemically synthesized
  source 1..20: mol_type = other DNA
ggaagagggagacgatgaaa

SEQ ID NO: 48259 - DNA, 20 bp, synthetic construct
  misc_feature 1..20: note = chemically synthesized
  source 1..20: mol_type = other DNA
gacgatgaaaaagaacctat

SEQ ID NO: 48260 - DNA, 20 bp, synthetic construct
  misc_feature 1..20: note = chemically synthesized
  source 1..20: mol_type = other DNA
acgatgaaaaagaacctatt

SEQ ID NO: 48261 - DNA, 20 bp, synthetic construct
  misc_feature 1..20: note = chemically synthesized
  source 1..20: mol_type = other DNA
aaaagaacctattgggtatt

SEQ ID NO: 48262 - DNA, 20 bp, synthetic construct
  misc_feature 1..20: note = chemically synthesized
  source 1..20: mol_type = other DNA
tgggtattaagttcatcact

SEQ ID NO: 48263 - DNA, 20 bp, synthetic construct
  misc_feature 1..20: note = chemically synthesized
  source 1..20: mol_type = other DNA
gatgaaataatctgtacatc

SEQ ID NO: 48264 - DNA, 20 bp, synthetic construct
  misc_feature 1..20: note = chemically synthesized
  source 1..20: mol_type = other DNA
ataatctgtacatcaagacc

SEQ ID NO: 48265 - DNA, 20 bp, synthetic construct
  misc_feature 1..20: note = chemically synthesized
  source 1..20: mol_type = other DNA
tacccccaaatttaaaatga

SEQ ID NO: 48266 - DNA, 20 bp, synthetic construct
  misc_feature 1..20: note = chemically synthesized
  source 1..20: mol_type = other DNA
ttaaaatgaaagttaaaaca

SEQ ID NO: 48267 - DNA, 20 bp, synthetic construct
  misc_feature 1..20: note = chemically synthesized
  source 1..20: mol_type = other DNA
atgaaagttaaaacaaagta

SEQ ID NO: 48268 - DNA, 20 bp, synthetic construct
  misc_feature 1..20: note = chemically synthesized
  source 1..20: mol_type = other DNA
tgaaagttaaaacaaagtat

SEQ ID NO: 48269 - DNA, 20 bp, synthetic construct
  misc_feature 1..20: note = chemically synthesized
  source 1..20: mol_type = other DNA
gttaaaacaaagtataggaa

SEQ ID NO: 48270 - DNA, 20 bp, synthetic construct
  misc_feature 1..20: note = chemically synthesized
  source 1..20: mol_type = other DNA
aggaatggaattaattcctc

SEQ ID NO: 48271 - DNA, 20 bp, synthetic construct
  misc_feature 1..20: note = chemically synthesized
  source 1..20: mol_type = other DNA
ggaattaattcctcaagatt

SEQ ID NO: 48272 - DNA, 20 bp, synthetic construct
  misc_feature 1..20: note = chemically synthesized
  source 1..20: mol_type = other DNA
ttatttgataatttatcaaa

SEQ ID NO: 48273 - DNA, 20 bp, synthetic construct
  misc_feature 1..20: note = chemically synthesized
  source 1..20: mol_type = other DNA
ttgtttttcttttctcacta

SEQ ID NO: 48274 - DNA, 20 bp, synthetic construct
  misc_feature 1..20: note = chemically synthesized
  source 1..20: mol_type = other DNA
gttgctttataaactatgtt

SEQ ID NO: 48275 - DNA, 20 bp, synthetic construct
  misc_feature 1..20: note = chemically synthesized
  source 1..20: mol_type = other DNA
tgttcagtatgtctgaatga

SEQ ID NO: 48276 - DNA, 20 bp, synthetic construct
  misc_feature 1..20: note = chemically synthesized
  source 1..20: mol_type = other DNA
gttcagtatgtctgaatgaa

SEQ ID NO: 48277 - DNA, 20 bp, synthetic construct
  misc_feature 1..20: note = chemically synthesized
  source 1..20: mol_type = other DNA
ttcagtatgtctgaatgaaa

SEQ ID NO: 48278 - DNA, 20 bp, synthetic construct
  misc_feature 1..20: note = chemically synthesized
  source 1..20: mol_type = other DNA
aagggtgtgtgtgtgtgtga

SEQ ID NO: 48279 - DNA, 20 bp, synthetic construct
  misc_feature 1..20: note = chemically synthesized
  source 1..20: mol_type = other DNA
gggtgtgtgtgtgtgtgaaa

SEQ ID NO: 48280 - DNA, 20 bp, synthetic construct
  misc_feature 1..20: note = chemically synthesized
  source 1..20: mol_type = other DNA
gtgtgtgtgtgtgtgaaaga

SEQ ID NO: 48281 - DNA, 20 bp, synthetic construct
  misc_feature 1..20: note = chemically synthesized
  source 1..20: mol_type = other DNA
tgtgtgtgtgtgtgaaagag

SEQ ID NO: 48282 - DNA, 20 bp, synthetic construct
  misc_feature 1..20: note = chemically synthesized
  source 1..20: mol_type = other DNA
gtgtgtgtgtgtgaaagaga

SEQ ID NO: 48283 - DNA, 20 bp, synthetic construct
  misc_feature 1..20: note = chemically synthesized
  source 1..20: mol_type = other DNA
gtgtgtgtgtgaaagagagg

SEQ ID NO: 48284 - DNA, 20 bp, synthetic construct
  misc_feature 1..20: note = chemically synthesized
  source 1..20: mol_type = other DNA
gtgtgtgtgaaagagaggga

SEQ ID NO: 48285 - DNA, 20 bp, synthetic construct
  misc_feature 1..20: note = chemically synthesized
  source 1..20: mol_type = other DNA
gtgtgtgaaagagagggaga

SEQ ID NO: 48286 - DNA, 20 bp, synthetic construct
  misc_feature 1..20: note = chemically synthesized
  source 1..20: mol_type = other DNA
tgtgtgaaagagagggagag

SEQ ID NO: 48287 - DNA, 20 bp, synthetic construct
  misc_feature 1..20: note = chemically synthesized
  source 1..20: mol_type = other DNA
gtgaaagagagggagagagg

SEQ ID NO: 48288 - DNA, 20 bp, synthetic construct
  misc_feature 1..20: note = chemically synthesized
  source 1..20: mol_type = other DNA
tgaaagagagggagagagga

SEQ ID NO: 48289 - DNA, 20 bp, synthetic construct
  misc_feature 1..20: note = chemically synthesized
  source 1..20: mol_type = other DNA
gaaagagagggagagaggaa

SEQ ID NO: 48290 - DNA, 20 bp, synthetic construct
  misc_feature 1..20: note = chemically synthesized
  source 1..20: mol_type = other DNA
agagagggagagaggaaggg

SEQ ID NO: 48291 - DNA, 20 bp, synthetic construct
  misc_feature 1..20: note = chemically synthesized
  source 1..20: mol_type = other DNA
agagggagagaggaagggaa

SEQ ID NO: 48292 - DNA, 20 bp, synthetic construct
  misc_feature 1..20: note = chemically synthesized
  source 1..20: mol_type = other DNA
agggagagaggaagggaaga

SEQ ID NO: 48293 - DNA, 20 bp, synthetic construct
  misc_feature 1..20: note = chemically synthesized
  source 1..20: mol_type = other DNA
gggagagaggaagggaagag

SEQ ID NO: 48294 - DNA, 20 bp, synthetic construct
  misc_feature 1..20: note = chemically synthesized
  source 1..20: mol_type = other DNA
ggacgtaataatgtgaattt

SEQ ID NO: 48295 - DNA, 20 bp, synthetic construct
  misc_feature 1..20: note = chemically synthesized
  source 1..20: mol_type = other DNA
tcaataaaataatttaatgt

SEQ ID NO: 48296 - DNA, 20 bp, synthetic construct
  misc_feature 1..20: note = chemically synthesized
  source 1..20: mol_type = other DNA
caataaaataatttaatgtc

SEQ ID NO: 48297 - DNA, 20 bp, synthetic construct
  misc_feature 1..20: note = chemically synthesized
  source 1..20: mol_type = other DNA
ataaaataatttaatgtcag

SEQ ID NO: 48298 - DNA, 20 bp, synthetic construct
  misc_feature 1..20: note = chemically synthesized
  source 1..20: mol_type = other DNA
aatttaatgtcaggagaatt

SEQ ID NO: 48299 - DNA, 20 bp, synthetic construct
  misc_feature 1..20: note = chemically synthesized
  source 1..20: mol_type = other DNA
gtcaggagaattaagcctaa

SEQ ID NO: 48300 - DNA, 20 bp, synthetic construct
  misc_feature 1..20: note = chemically synthesized
  source 1..20: mol_type = other DNA
tcctaaatcatccatctctt

SEQ ID NO: 48301 - DNA, 20 bp, synthetic construct
  misc_feature 1..20: note = chemically synthesized
  source 1..20: mol_type = other DNA
atcatccatctcttgagctt

SEQ ID NO: 48302 - DNA, 20 bp, synthetic construct
  misc_feature 1..20: note = chemically synthesized
  source 1..20: mol_type = other DNA
catccatctcttgagcttca

SEQ ID NO: 48303 - DNA, 20 bp, synthetic construct
  misc_feature 1..20: note = chemically synthesized
  source 1..20: mol_type = other DNA
ccatctcttgagcttcagag

SEQ ID NO: 48304 - DNA, 20 bp, synthetic construct
  misc_feature 1..20: note = chemically synthesized
  source 1..20: mol_type = other DNA
ttaatgcctacatgtttgta

SEQ ID NO: 48305 - DNA, 20 bp, synthetic construct
  misc_feature 1..20: note = chemically synthesized
  source 1..20: mol_type = other DNA
taatgcctacatgtttgtaa

SEQ ID NO: 48306 - DNA, 20 bp, synthetic construct
  misc_feature 1..20: note = chemically synthesized
  source 1..20: mol_type = other DNA
aatgcctacatgtttgtaaa

SEQ ID NO: 48307 - DNA, 20 bp, synthetic construct
  misc_feature 1..20: note = chemically synthesized
  source 1..20: mol_type = other DNA
acatgtttgtaaagggtgtt

SEQ ID NO: 48308 - DNA, 20 bp, synthetic construct
  misc_feature 1..20: note = chemically synthesized
  source 1..20: mol_type = other DNA
tgtaaagggtgttcagactg

SEQ ID NO: 48309 - DNA, 20 bp, synthetic construct
  misc_feature 1..20: note = chemically synthesized
  source 1..20: mol_type = other DNA
agggtgttcagactgaagcc

SEQ ID NO: 48310 - DNA, 20 bp, synthetic construct
  misc_feature 1..20: note = chemically synthesized
  source 1..20: mol_type = other DNA
aagccaagattctacctcta

SEQ ID NO: 48311 - DNA, 20 bp, synthetic construct
  misc_feature 1..20: note = chemically synthesized
  source 1..20: mol_type = other DNA
gccaagattctacctctaaa

SEQ ID NO: 48312 - DNA, 20 bp, synthetic construct
  misc_feature 1..20: note = chemically synthesized
  source 1..20: mol_type = other DNA
tgcaatctcaaatttatctg

SEQ ID NO: 48313 - DNA, 20 bp, synthetic construct
  misc_feature 1..20: note = chemically synthesized
  source 1..20: mol_type = other DNA
ctctccataaattgacacca

SEQ ID NO: 48314 - DNA, 20 bp, synthetic construct
  misc_feature 1..20: note = chemically synthesized
  source 1..20: mol_type = other DNA
gacaccatggcccacttaat

SEQ ID NO: 48315 - DNA, 20 bp, synthetic construct
  misc_feature 1..20: note = chemically synthesized
  source 1..20: mol_type = other DNA
acaccatggcccacttaatg

SEQ ID NO: 48316 - DNA, 20 bp, synthetic construct
  misc_feature 1..20: note = chemically synthesized
  source 1..20: mol_type = other DNA
cacttaatgaggttaaaaaa

SEQ ID NO: 48317 - DNA, 20 bp, synthetic construct
  misc_feature 1..20: note = chemically synthesized
  source 1..20: mol_type = other DNA
ctaattctgaatgaaaatct

SEQ ID NO: 48318 - DNA, 20 bp, synthetic construct
  misc_feature 1..20: note = chemically synthesized
  source 1..20: mol_type = other DNA
tctgaatgaaaatctgagcc

SEQ ID NO: 48319 - DNA, 20 bp, synthetic construct
  misc_feature 1..20: note = chemically synthesized
  source 1..20: mol_type = other DNA
gaatgaaaatctgagcccag

SEQ ID NO: 48320 - DNA, 20 bp, synthetic construct
  misc_feature 1..20: note = chemically synthesized
  source 1..20: mol_type = other DNA
atgaaaatctgagcccagtg

SEQ ID NO: 48321 - DNA, 20 bp, synthetic construct
  misc_feature 1..20: note = chemically synthesized
  source 1..20: mol_type = other DNA
tgaaaatctgagcccagtgg

SEQ ID NO: 48322 - DNA, 20 bp, synthetic construct
  misc_feature 1..20: note = chemically synthesized
  source 1..20: mol_type = other DNA
tggaggaaatattaatgaac

SEQ ID NO: 48323 - DNA, 20 bp, synthetic construct
  misc_feature 1..20: note = chemically synthesized
  source 1..20: mol_type = other DNA
ggaggaaatattaatgaaca

SEQ ID NO: 48324 - DNA, 20 bp, synthetic construct
  misc_feature 1..20: note = chemically synthesized
  source 1..20: mol_type = other DNA
aaatattaatgaacaaggtg

SEQ ID NO: 48325 - DNA, 20 bp, synthetic construct
  misc_feature 1..20: note = chemically synthesized
  source 1..20: mol_type = other DNA
taataattatgcatatactt

SEQ ID NO: 48326 - DNA, 20 bp, synthetic construct
  misc_feature 1..20: note = chemically synthesized
  source 1..20: mol_type = other DNA
attatgcatatactttagca

SEQ ID NO: 48327 - DNA, 20 bp, synthetic construct
  misc_feature 1..20: note = chemically synthesized
  source 1..20: mol_type = other DNA
atgttgactttattgctttt

SEQ ID NO: 48328 - DNA, 20 bp, synthetic construct
  misc_feature 1..20: note = chemically synthesized
  source 1..20: mol_type = other DNA
tgactttattgctttttggt

SEQ ID NO: 48329 - DNA, 20 bp, synthetic construct
  misc_feature 1..20: note = chemically synthesized
  source 1..20: mol_type = other DNA
gtaagaaatacaacttttta

SEQ ID NO: 48330 - DNA, 20 bp, synthetic construct
  misc_feature 1..20: note = chemically synthesized
  source 1..20: mol_type = other DNA
caaactattttgtgtgtgtg

SEQ ID NO: 48331 - DNA, 20 bp, synthetic construct
  misc_feature 1..20: note = chemically synthesized
  source 1..20: mol_type = other DNA
gtgtgtgcggtttgtttcta

SEQ ID NO: 48332 - DNA, 20 bp, synthetic construct
  misc_feature 1..20: note = chemically synthesized
  source 1..20: mol_type = other DNA
tgtgtgcggtttgtttctat

SEQ ID NO: 48333 - DNA, 20 bp, synthetic construct
  misc_feature 1..20: note = chemically synthesized
  source 1..20: mol_type = other DNA
cggtttgtttctatgggttc

SEQ ID NO: 48334 - DNA, 20 bp, synthetic construct
  misc_feature 1..20: note = chemically synthesized
  source 1..20: mol_type = other DNA
tctatgggttctggttttct

SEQ ID NO: 48335 - DNA, 20 bp, synthetic construct
  misc_feature 1..20: note = chemically synthesized
  source 1..20: mol_type = other DNA
tatgggttctggttttcttg

SEQ ID NO: 48336 - DNA, 20 bp, synthetic construct
  misc_feature 1..20: note = chemically synthesized
  source 1..20: mol_type = other DNA
cattttaattaattaattct

SEQ ID NO: 48337 - DNA, 20 bp, synthetic construct
  misc_feature 1..20: note = chemically synthesized
  source 1..20: mol_type = other DNA
ttttaattaattaattctga

SEQ ID NO: 48338 - DNA, 20 bp, synthetic construct
  misc_feature 1..20: note = chemically synthesized
  source 1..20: mol_type = other DNA
aattaattctgagagctgct

SEQ ID NO: 48339 - DNA, 20 bp, synthetic construct
  misc_feature 1..20: note = chemically synthesized
  source 1..20: mol_type = other DNA
gctgctgagttgtgtttact

SEQ ID NO: 48340 - DNA, 20 bp, synthetic construct
  misc_feature 1..20: note = chemically synthesized
  source 1..20: mol_type = other DNA
tgctgagttgtgtttactga

SEQ ID NO: 48341 - DNA, 20 bp, synthetic construct
  misc_feature 1..20: note = chemically synthesized
  source 1..20: mol_type = other DNA
ctgagagattgtgtatctgc

SEQ ID NO: 48342 - DNA, 20 bp, synthetic construct
  misc_feature 1..20: note = chemically synthesized
  source 1..20: mol_type = other DNA
gagagattgtgtatctgcga

SEQ ID NO: 48343 - DNA, 20 bp, synthetic construct
  misc_feature 1..20: note = chemically synthesized
  source 1..20: mol_type = other DNA
agattgtgtatctgcgagag

SEQ ID NO: 48344 - DNA, 20 bp, synthetic construct
  misc_feature 1..20: note = chemically synthesized
  source 1..20: mol_type = other DNA
gtatctgcgagagaagtctg

SEQ ID NO: 48345 - DNA, 20 bp, synthetic construct
  misc_feature 1..20: note = chemically synthesized
  source 1..20: mol_type = other DNA
ctgcgagagaagtctgtagc

SEQ ID NO: 48346 - DNA, 20 bp, synthetic construct
  misc_feature 1..20: note = chemically synthesized
  source 1..20: mol_type = other DNA
cgagagaagtctgtagcaag

SEQ ID NO: 48347 - DNA, 20 bp, synthetic construct
  misc_feature 1..20: note = chemically synthesized
  source 1..20: mol_type = other DNA
agaagtctgtagcaagtagc

SEQ ID NO: 48348 - DNA, 20 bp, synthetic construct
  misc_feature 1..20: note = chemically synthesized
  source 1..20: mol_type = other DNA
tagctagactgtgcttgacc

SEQ ID NO: 48349 - DNA, 20 bp, synthetic construct
  misc_feature 1..20: note = chemically synthesized
  source 1..20: mol_type = other DNA
agctagactgtgcttgacct

SEQ ID NO: 48350 - DNA, 20 bp, synthetic construct
  misc_feature 1..20: note = chemically synthesized
  source 1..20: mol_type = other DNA
gcttgacctaggaacatata

SEQ ID NO: 48351 - DNA, 20 bp, synthetic construct
  misc_feature 1..20: note = chemically synthesized
  source 1..20: mol_type = other DNA
tgacctaggaacatatacag

SEQ ID NO: 48352 - DNA, 20 bp, synthetic construct
  misc_feature 1..20: note = chemically synthesized
  source 1..20: mol_type = other DNA
gattgctaaaatgtctcact

SEQ ID NO: 48353 - DNA, 20 bp, synthetic construct
  misc_feature 1..20: note = chemically synthesized
  source 1..20: mol_type = other DNA
attgctaaaatgtctcactt

SEQ ID NO: 48354 - DNA, 20 bp, synthetic construct
  misc_feature 1..20: note = chemically synthesized
  source 1..20: mol_type = other DNA
ttgctaaaatgtctcacttg

SEQ ID NO: 48355 - DNA, 20 bp, synthetic construct
  misc_feature 1..20: note = chemically synthesized
  source 1..20: mol_type = other DNA
atgtctcacttggggaattt

SEQ ID NO: 48356 - DNA, 20 bp, synthetic construct
  misc_feature 1..20: note = chemically synthesized
  source 1..20: mol_type = other DNA
ttggggaattttagactaaa

SEQ ID NO: 48357 - DNA, 20 bp, synthetic construct
  misc_feature 1..20: note = chemically synthesized
  source 1..20: mol_type = other DNA
gggaattttagactaaacag

SEQ ID NO: 48358 - DNA, 20 bp, synthetic construct
  misc_feature 1..20: note = chemically synthesized
  source 1..20: mol_type = other DNA
gaattttagactaaacagta

SEQ ID NO: 48359 - DNA, 20 bp, synthetic construct
  misc_feature 1..20: note = chemically synthesized
  source 1..20: mol_type = other DNA
gagcatgtataaaaatactc

SEQ ID NO: 48360 - DNA, 20 bp, synthetic construct
  misc_feature 1..20: note = chemically synthesized
  source 1..20: mol_type = other DNA
tgtataaaaatactctagtc

SEQ ID NO: 48361 - DNA, 20 bp, synthetic construct
  misc_feature 1..20: note = chemically synthesized
  source 1..20: mol_type = other DNA
atgataaaaccacactccca

SEQ ID NO: 48362 - DNA, 20 bp, synthetic construct
  misc_feature 1..20: note = chemically synthesized
  source 1..20: mol_type = other DNA
aaaaccacactcccatagat

SEQ ID NO: 48363 - DNA, 20 bp, synthetic construct
  misc_feature 1..20: note = chemically synthesized
  source 1..20: mol_type = other DNA
gatgagtgtcatgattttca

SEQ ID NO: 48364 - DNA, 20 bp, synthetic construct
  misc_feature 1..20: note = chemically synthesized
  source 1..20: mol_type = other DNA
tgagtgtcatgattttcatg

SEQ ID NO: 48365 - DNA, 20 bp, synthetic construct
  misc_feature 1..20: note = chemically synthesized
  source 1..20: mol_type = other DNA
gagtgtcatgattttcatgg

SEQ ID NO: 48366 - DNA, 20 bp, synthetic construct
  misc_feature 1..20: note = chemically synthesized
  source 1..20: mol_type = other DNA
tgtcatgattttcatggagg

SEQ ID NO: 48367 - DNA, 20 bp, synthetic construct
  misc_feature 1..20: note = chemically synthesized
  source 1..20: mol_type = other DNA
gaagttaatattcatcctct

SEQ ID NO: 48368 - DNA, 20 bp, synthetic construct
  misc_feature 1..20: note = chemically synthesized
  source 1..20: mol_type = other DNA
attcatcctctaagtatacc

SEQ ID NO: 48369 - DNA, 20 bp, synthetic construct
  misc_feature 1..20: note = chemically synthesized
  source 1..20: mol_type = other DNA
tcctctaagtatacccagac

SEQ ID NO: 48370 - DNA, 20 bp, synthetic construct
  misc_feature 1..20: note = chemically synthesized
  source 1..20: mol_type = other DNA
cctctaagtatacccagact

SEQ ID NO: 48371 - DNA, 20 bp, synthetic construct
  misc_feature 1..20: note = chemically synthesized
  source 1..20: mol_type = other DNA
ctctaagtatacccagacta

SEQ ID NO: 48372 - DNA, 20 bp, synthetic construct
  misc_feature 1..20: note = chemically synthesized
  source 1..20: mol_type = other DNA
gccattctgatataaaacat

SEQ ID NO: 48373 - DNA, 20 bp, synthetic construct
  misc_feature 1..20: note = chemically synthesized
  source 1..20: mol_type = other DNA
ccattctgatataaaacatt

SEQ ID NO: 48374 - DNA, 20 bp, synthetic construct
  misc_feature 1..20: note = chemically synthesized
  source 1..20: mol_type = other DNA
gatataaaacattaggactt

SEQ ID NO: 48375 - DNA, 20 bp, synthetic construct
  misc_feature 1..20: note = chemically synthesized
  source 1..20: mol_type = other DNA
taaaacattaggacttaaga

SEQ ID NO: 48376 - DNA, 20 bp, synthetic construct
  misc_feature 1..20: note = chemically synthesized
  source 1..20: mol_type = other DNA
taggacttaagaaagattaa

SEQ ID NO: 48377 - DNA, 20 bp, synthetic construct
  misc_feature 1..20: note = chemically synthesized
  source 1..20: mol_type = other DNA
cttaagaaagattaatagac

SEQ ID NO: 48378 - DNA, 20 bp, synthetic construct
  misc_feature 1..20: note = chemically synthesized
  source 1..20: mol_type = other DNA
taagaaagattaatagactg

SEQ ID NO: 48379 - DNA, 20 bp, synthetic construct
  misc_feature 1..20: note = chemically synthesized
  source 1..20: mol_type = other DNA
aagattaatagactggagta

SEQ ID NO: 48380 - DNA, 20 bp, synthetic construct
  misc_feature 1..20: note = chemically synthesized
  source 1..20: mol_type = other DNA
agattaatagactggagtaa

SEQ ID NO: 48381 - DNA, 20 bp, synthetic construct
  misc_feature 1..20: note = chemically synthesized
  source 1..20: mol_type = other DNA
atagactggagtaaaggaaa

SEQ ID NO: 48382 - DNA, 20 bp, synthetic construct
  misc_feature 1..20: note = chemically synthesized
  source 1..20: mol_type = other DNA
tctctcgctgtctctttttt

SEQ ID NO: 48383 - DNA, 20 bp, synthetic construct
  misc_feature 1..20: note = chemically synthesized
  source 1..20: mol_type = other DNA
ctctcgctgtctcttttttg

SEQ ID NO: 48384 - DNA, 20 bp, synthetic construct
  misc_feature 1..20: note = chemically synthesized
  source 1..20: mol_type = other DNA
gtgtgtgtgtgtgtgtgttg

SEQ ID NO: 48385 - DNA, 20 bp, synthetic construct
  misc_feature 1..20: note = chemically synthesized
  source 1..20: mol_type = other DNA
gtgtgtgtgtgtgttgtggt

SEQ ID NO: 48386 - DNA, 20 bp, synthetic construct
  misc_feature 1..20: note = chemically synthesized
  source 1..20: mol_type = other DNA
tgtgtgtgtgttgtggtcag

SEQ ID NO: 48387 - DNA, 20 bp, synthetic construct
  misc_feature 1..20: note = chemically synthesized
  source 1..20: mol_type = other DNA
gtgtgtgtgttgtggtcagt

SEQ ID NO: 48388 - DNA, 20 bp, synthetic construct
  misc_feature 1..20: note = chemically synthesized
  source 1..20: mol_type = other DNA
tgtgtgtgttgtggtcagtg

SEQ ID NO: 48389 - DNA, 20 bp, synthetic construct
  misc_feature 1..20: note = chemically synthesized
  source 1..20: mol_type = other DNA
tgtgttgtggtcagtggggc

SEQ ID NO: 48390 - DNA, 20 bp, synthetic construct
  misc_feature 1..20: note = chemically synthesized
  source 1..20: mol_type = other DNA
ggtcagtggggctggaataa

SEQ ID NO: 48391 - DNA, 20 bp, synthetic construct
  misc_feature 1..20: note = chemically synthesized
  source 1..20: mol_type = other DNA
cagtggggctggaataaaag

SEQ ID NO: 48392 - DNA, 20 bp, synthetic construct
  misc_feature 1..20: note = chemically synthesized
  source 1..20: mol_type = other DNA
gggctggaataaaagtagaa

SEQ ID NO: 48393 - DNA, 20 bp, synthetic construct
  misc_feature 1..20: note = chemically synthesized
  source 1..20: mol_type = other DNA
gaatagacctgcacctgctg

SEQ ID NO: 48394 - DNA, 20 bp, synthetic construct
  misc_feature 1..20: note = chemically synthesized
  source 1..20: mol_type = other DNA
cctgctgtggcatccattca

SEQ ID NO: 48395 - DNA, 20 bp, synthetic construct
  misc_feature 1..20: note = chemically synthesized
  source 1..20: mol_type = other DNA
tgctgtggcatccattcaca

SEQ ID NO: 48396 - DNA, 20 bp, synthetic construct
  misc_feature 1..20: note = chemically synthesized
  source 1..20: mol_type = other DNA
tgtggcatccattcacagag

SEQ ID NO: 48397 - DNA, 20 bp, synthetic construct
  misc_feature 1..20: note = chemically synthesized
  source 1..20: mol_type = other DNA
ggcatccattcacagagtag

SEQ ID NO: 48398 - DNA, 20 bp, synthetic construct
  misc_feature 1..20: note = chemically synthesized
  source 1..20: mol_type = other DNA
tccattcacagagtagaagc

SEQ ID NO: 48399 - DNA, 20 bp, synthetic construct
  misc_feature 1..20: note = chemically synthesized
  source 1..20: mol_type = other DNA
gagtagaagcaagctcacaa

SEQ ID NO: 48400 - DNA, 20 bp, synthetic construct
  misc_feature 1..20: note = chemically synthesized
  source 1..20: mol_type = other DNA
gaagcaagctcacaatagtg

SEQ ID NO: 48401 - DNA, 20 bp, synthetic construct
  misc_feature 1..20: note = chemically synthesized
  source 1..20: mol_type = other DNA
gctcacaatagtgaagatgt

SEQ ID NO: 48402 - DNA, 20 bp, synthetic construct
  misc_feature 1..20: note = chemically synthesized
  source 1..20: mol_type = other DNA
acaatagtgaagatgtcagt

SEQ ID NO: 48403 - DNA, 20 bp, synthetic construct
  misc_feature 1..20: note = chemically synthesized
  source 1..20: mol_type = other DNA
aagatgtcagtaagcttgaa

SEQ ID NO: 48404 - DNA, 20 bp, synthetic construct
  misc_feature 1..20: note = chemically synthesized
  source 1..20: mol_type = other DNA
agtaagcttgaatagttttt

SEQ ID NO: 48405 - DNA, 20 bp, synthetic construct
  misc_feature 1..20: note = chemically synthesized
  source 1..20: mol_type = other DNA
gtaagcttgaatagtttttc

SEQ ID NO: 48406 - DNA, 20 bp, synthetic construct
  misc_feature 1..20: note = chemically synthesized
  source 1..20: mol_type = other DNA
aggaactttgaatgctgatt

SEQ ID NO: 48407 - DNA, 20 bp, synthetic construct
  misc_feature 1..20: note = chemically synthesized
  source 1..20: mol_type = other DNA
gctgatttagatttgaaact

SEQ ID NO: 48408 - DNA, 20 bp, synthetic construct
  misc_feature 1..20: note = chemically synthesized
  source 1..20: mol_type = other DNA
ctgatttagatttgaaactg

SEQ ID NO: 48409 - DNA, 20 bp, synthetic construct
  misc_feature 1..20: note = chemically synthesized
  source 1..20: mol_type = other DNA
cttcttgaaacttatttgcc

SEQ ID NO: 48410 - DNA, 20 bp, synthetic construct
  misc_feature 1..20: note = chemically synthesized
  source 1..20: mol_type = other DNA
acttatttgcctggtatgcc

SEQ ID NO: 48411 - DNA, 20 bp, synthetic construct
  misc_feature 1..20: note = chemically synthesized
  source 1..20: mol_type = other DNA
cttatttgcctggtatgcct

SEQ ID NO: 48412 - DNA, 20 bp, synthetic construct
  misc_feature 1..20: note = chemically synthesized
  source 1..20: mol_type = other DNA
tggtatgcctgggcttttga

SEQ ID NO: 48413 - DNA, 20 bp, synthetic construct
  misc_feature 1..20: note = chemically synthesized
  source 1..20: mol_type = other DNA
gcctgggcttttgatggtct

SEQ ID NO: 48414 - DNA, 20 bp, synthetic construct
  misc_feature 1..20: note = chemically synthesized
  source 1..20: mol_type = other DNA
ggcttttgatggtcttagta

SEQ ID NO: 48415 - DNA, 20 bp, synthetic construct
  misc_feature 1..20: note = chemically synthesized
  source 1..20: mol_type = other DNA
gatggtcttagtatagcttg

SEQ ID NO: 48416 - DNA, 20 bp, synthetic construct
  misc_feature 1..20: note = chemically synthesized
  source 1..20: mol_type = other DNA
agcttgcagccttgtccctg

SEQ ID NO: 48417 - DNA, 20 bp, synthetic construct
  misc_feature 1..20: note = chemically synthesized
  source 1..20: mol_type = other DNA
gcttgcagccttgtccctgc

SEQ ID NO: 48418 - DNA, 20 bp, synthetic construct
  misc_feature 1..20: note = chemically synthesized
  source 1..20: mol_type = other DNA
cttgcagccttgtccctgca

SEQ ID NO: 48419 - DNA, 20 bp, synthetic construct
  misc_feature 1..20: note = chemically synthesized
  source 1..20: mol_type = other DNA
cttgtccctgcagggtatta

SEQ ID NO: 48420 - DNA, 20 bp, synthetic construct
  misc_feature 1..20: note = chemically synthesized
  source 1..20: mol_type = other DNA
ttgtccctgcagggtattat

SEQ ID NO: 48421 - DNA, 20 bp, synthetic construct
  misc_feature 1..20: note = chemically synthesized
  source 1..20: mol_type = other DNA
ctgcagggtattatgggtaa

SEQ ID NO: 48422 - DNA, 20 bp, synthetic construct
  misc_feature 1..20: note = chemically synthesized
  source 1..20: mol_type = other DNA
agggtattatgggtaataga

SEQ ID NO: 48423 - DNA, 20 bp, synthetic construct
  misc_feature 1..20: note = chemically synthesized
  source 1..20: mol_type = other DNA
attatgggtaatagaaagaa

SEQ ID NO: 48424 - DNA, 20 bp, synthetic construct
  misc_feature 1..20: note = chemically synthesized
  source 1..20: mol_type = other DNA
gaaaagtctgcgttacactc

SEQ ID NO: 48425 - DNA, 20 bp, synthetic construct
  misc_feature 1..20: note = chemically synthesized
  source 1..20: mol_type = other DNA
cgttacactctagtcacact

SEQ ID NO: 48426 - DNA, 20 bp, synthetic construct
  misc_feature 1..20: note = chemically synthesized
  source 1..20: mol_type = other DNA
tcacactaagtaactaccat

SEQ ID NO: 48427 - DNA, 20 bp, synthetic construct
  misc_feature 1..20: note = chemically synthesized
  source 1..20: mol_type = other DNA
ctaagtaactaccattggaa

SEQ ID NO: 48428 - DNA, 20 bp, synthetic construct
  misc_feature 1..20: note = chemically synthesized
  source 1..20: mol_type = other DNA
gaaaagcaacccctgccttg

SEQ ID NO: 48429 - DNA, 20 bp, synthetic construct
  misc_feature 1..20: note = chemically synthesized
  source 1..20: mol_type = other DNA
agcaacccctgccttgaagc

SEQ ID NO: 48430 - DNA, 20 bp, synthetic construct
  misc_feature 1..20: note = chemically synthesized
  source 1..20: mol_type = other DNA
gcaacccctgccttgaagcc

SEQ ID NO: 48431 - DNA, 20 bp, synthetic construct
  misc_feature 1..20: note = chemically synthesized
  source 1..20: mol_type = other DNA
ctgccttgaagccaggatga

SEQ ID NO: 48432 - DNA, 20 bp, synthetic construct
  misc_feature 1..20: note = chemically synthesized
  source 1..20: mol_type = other DNA
agccaggatgatggtatctg

SEQ ID NO: 48433 - DNA, 20 bp, synthetic construct
  misc_feature 1..20: note = chemically synthesized
  source 1..20: mol_type = other DNA
caggatgatggtatctgcag

SEQ ID NO: 48434 - DNA, 20 bp, synthetic construct
  misc_feature 1..20: note = chemically synthesized
  source 1..20: mol_type = other DNA
tctgcagcagttgccaacac

SEQ ID NO: 48435 - DNA, 20 bp, synthetic construct
  misc_feature 1..20: note = chemically synthesized
  source 1..20: mol_type = other DNA
tgcagcagttgccaacacaa

SEQ ID NO: 48436 - DNA, 20 bp, synthetic construct
  misc_feature 1..20: note = chemically synthesized
  source 1..20: mol_type = other DNA
agcagttgccaacacaagag

SEQ ID NO: 48437 - DNA, 20 bp, synthetic construct
  misc_feature 1..20: note = chemically synthesized
  source 1..20: mol_type = other DNA
gcagttgccaacacaagaga

SEQ ID NO: 48438 - DNA, 20 bp, synthetic construct
  misc_feature 1..20: note = chemically synthesized
  source 1..20: mol_type = other DNA
caacacaagagaaggatcca

SEQ ID NO: 48439 - DNA, 20 bp, synthetic construct
  misc_feature 1..20: note = chemically synthesized
  source 1..20: mol_type = other DNA
ccatagttcatcatttaaaa

SEQ ID NO: 48440 - DNA, 20 bp, synthetic construct
  misc_feature 1..20: note = chemically synthesized
  source 1..20: mol_type = other DNA
atttaaaaaagaaaacaaaa

SEQ ID NO: 48441 - DNA, 20 bp, synthetic construct
  misc_feature 1..20: note = chemically synthesized
  source 1..20: mol_type = other DNA
aaaagaaaacaaaatagaaa

SEQ ID NO: 48442 - DNA, 20 bp, synthetic construct
  misc_feature 1..20: note = chemically synthesized
  source 1..20: mol_type = other DNA
aaagaaaacaaaatagaaaa

SEQ ID NO: 48443 - DNA, 20 bp, synthetic construct
  misc_feature 1..20: note = chemically synthesized
  source 1..20: mol_type = other DNA
gaaaaaggaaaactatttct

SEQ ID NO: 48444 - DNA, 20 bp, synthetic construct
  misc_feature 1..20: note = chemically synthesized
  source 1..20: mol_type = other DNA
ggaaaactatttctgagcat

SEQ ID NO: 48445 - DNA, 20 bp, synthetic construct
  misc_feature 1..20: note = chemically synthesized
  source 1..20: mol_type = other DNA
aaactatttctgagcataag

SEQ ID NO: 48446 - DNA, 20 bp, synthetic construct
  misc_feature 1..20: note = chemically synthesized
  source 1..20: mol_type = other DNA
tttctgagcataagaagttg

SEQ ID NO: 48447 - DNA, 20 bp, synthetic construct
  misc_feature 1..20: note = chemically synthesized
  source 1..20: mol_type = other DNA
ttctgagcataagaagttgt

SEQ ID NO: 48448 - DNA, 20 bp, synthetic construct
  misc_feature 1..20: note = chemically synthesized
  source 1..20: mol_type = other DNA
tctgagcataagaagttgta

SEQ ID NO: 48449 - DNA, 20 bp, synthetic construct
  misc_feature 1..20: note = chemically synthesized
  source 1..20: mol_type = other DNA
agcataagaagttgtagggt

SEQ ID NO: 48450 - DNA, 20 bp, synthetic construct
  misc_feature 1..20: note = chemically synthesized
  source 1..20: mol_type = other DNA
aagttgtagggtaagtcttt

SEQ ID NO: 48451 - DNA, 20 bp, synthetic construct
  misc_feature 1..20: note = chemically synthesized
  source 1..20: mol_type = other DNA
ttgtagggtaagtctttaag

SEQ ID NO: 48452 - DNA, 20 bp, synthetic construct
  misc_feature 1..20: note = chemically synthesized
  source 1..20: mol_type = other DNA
tgtagggtaagtctttaaga

SEQ ID NO: 48453 - DNA, 20 bp, synthetic construct
  misc_feature 1..20: note = chemically synthesized
  source 1..20: mol_type = other DNA
aggtgacaatttctgccaat

SEQ ID NO: 48454 - DNA, 20 bp, synthetic construct
  misc_feature 1..20: note = chemically synthesized
  source 1..20: mol_type = other DNA
ggtgacaatttctgccaatc

SEQ ID NO: 48455 - DNA, 20 bp, synthetic construct
  misc_feature 1..20: note = chemically synthesized
  source 1..20: mol_type = other DNA
ttctgccaatcaggatttca

SEQ ID NO: 48456 - DNA, 20 bp, synthetic construct
  misc_feature 1..20: note = chemically synthesized
  source 1..20: mol_type = other DNA
agctcttgctttgacaattt

SEQ ID NO: 48457 - DNA, 20 bp, synthetic construct
  misc_feature 1..20: note = chemically synthesized
  source 1..20: mol_type = other DNA
ctttgacaattttggtcttt

SEQ ID NO: 48458 - DNA, 20 bp, synthetic construct
  misc_feature 1..20: note = chemically synthesized
  source 1..20: mol_type = other DNA
acctatattataatttcata

SEQ ID NO: 48459 - DNA, 20 bp, synthetic construct
  misc_feature 1..20: note = chemically synthesized
  source 1..20: mol_type = other DNA
tctgtgcattttctttgacc

SEQ ID NO: 48460 - DNA, 20 bp, synthetic construct
  misc_feature 1..20: note = chemically synthesized
  source 1..20: mol_type = other DNA
ctgtgcattttctttgaccc

SEQ ID NO: 48461 - DNA, 20 bp, synthetic construct
  misc_feature 1..20: note = chemically synthesized
  source 1..20: mol_type = other DNA
ttgacccaggatatttgcaa

SEQ ID NO: 48462 - DNA, 20 bp, synthetic construct
  misc_feature 1..20: note = chemically synthesized
  source 1..20: mol_type = other DNA
aagacatattcaaacttccg

SEQ ID NO: 48463 - DNA, 20 bp, synthetic construct
  misc_feature 1..20: note = chemically synthesized
  source 1..20: mol_type = other DNA
catatacatgcctcttatat

SEQ ID NO: 48464 - DNA, 20 bp, synthetic construct
  misc_feature 1..20: note = chemically synthesized
  source 1..20: mol_type = other DNA
atatacatgcctcttatatc

SEQ ID NO: 48465 - DNA, 20 bp, synthetic construct
  misc_feature 1..20: note = chemically synthesized
  source 1..20: mol_type = other DNA
tatacatgcctcttatatca

SEQ ID NO: 48466 - DNA, 20 bp, synthetic construct
  misc_feature 1..20: note = chemically synthesized
  source 1..20: mol_type = other DNA
cttatatcagggatgtgaaa

SEQ ID NO: 48467 - DNA, 20 bp, synthetic construct
  misc_feature 1..20: note = chemically synthesized
  source 1..20: mol_type = other DNA
ttatatcagggatgtgaaac

SEQ ID NO: 48468 - DNA, 20 bp, synthetic construct
  misc_feature 1..20: note = chemically synthesized
  source 1..20: mol_type = other DNA
tatatcagggatgtgaaaca

SEQ ID NO: 48469 - DNA, 20 bp, synthetic construct
  misc_feature 1..20: note = chemically synthesized
  source 1..20: mol_type = other DNA
aatctaaaacaatgctaatg

SEQ ID NO: 48470 - DNA, 20 bp, synthetic construct
  misc_feature 1..20: note = chemically synthesized
  source 1..20: mol_type = other DNA
atctaaaacaatgctaatgc

SEQ ID NO: 48471 - DNA, 20 bp, synthetic construct
  misc_feature 1..20: note = chemically synthesized
  source 1..20: mol_type = other DNA
aaataaaatccaaaatctaa

SEQ ID NO: 48472 - DNA, 20 bp, synthetic construct
  misc_feature 1..20: note = chemically synthesized
  source 1..20: mol_type = other DNA
aaatccaaaatctaacagcc

SEQ ID NO: 48473 - DNA, 20 bp, synthetic construct
  misc_feature 1..20: note = chemically synthesized
  source 1..20: mol_type = other DNA
ttaacatttaaaatatttta

SEQ ID NO: 48474 - DNA, 20 bp, synthetic construct
  misc_feature 1..20: note = chemically synthesized
  source 1..20: mol_type = other DNA
attttaaagacgtcttttcc

SEQ ID NO: 48475 - DNA, 20 bp, synthetic construct
  misc_feature 1..20: note = chemically synthesized
  source 1..20: mol_type = other DNA
ttttaaagacgtcttttccc

SEQ ID NO: 48476 - DNA, 20 bp, synthetic construct
  misc_feature 1..20: note = chemically synthesized
  source 1..20: mol_type = other DNA
caacatgtgaaatcttttct

SEQ ID NO: 48477 - DNA, 20 bp, synthetic construct
  misc_feature 1..20: note = chemically synthesized
  source 1..20: mol_type = other DNA
aacatgtgaaatcttttctc

SEQ ID NO: 48478 - DNA, 20 bp, synthetic construct
  misc_feature 1..20: note = chemically synthesized
  source 1..20: mol_type = other DNA
acatgtgaaatcttttctca

SEQ ID NO: 48479 - DNA, 20 bp, synthetic construct
  misc_feature 1..20: note = chemically synthesized
  source 1..20: mol_type = other DNA
ctcagggatacacgtgtgcc

SEQ ID NO: 48480 - DNA, 20 bp, synthetic construct
  misc_feature 1..20: note = chemically synthesized
  source 1..20: mol_type = other DNA
tgcctagatcctcattgctt

SEQ ID NO: 48481 - DNA, 20 bp, synthetic construct
  misc_feature 1..20: note = chemically synthesized
  source 1..20: mol_type = other DNA
ctcattgctttagtttttta

SEQ ID NO: 48482 - DNA, 20 bp, synthetic construct
  misc_feature 1..20: note = chemically synthesized
  source 1..20: mol_type = other DNA
cattgctttagttttttaca

SEQ ID NO: 48483 - DNA, 20 bp, synthetic construct
  misc_feature 1..20: note = chemically synthesized
  source 1..20: mol_type = other DNA
attgctttagttttttacag

SEQ ID NO: 48484 - DNA, 20 bp, synthetic construct
  misc_feature 1..20: note = chemically synthesized
  source 1..20: mol_type = other DNA
tacagaggaatgaatataaa

SEQ ID NO: 48485 - DNA, 20 bp, synthetic construct
  misc_feature 1..20: note = chemically synthesized
  source 1..20: mol_type = other DNA
cttacctctataatcataca

SEQ ID NO: 48486 - DNA, 20 bp, synthetic construct
  misc_feature 1..20: note = chemically synthesized
  source 1..20: mol_type = other DNA
ttacctctataatcatacat

SEQ ID NO: 48487 - DNA, 20 bp, synthetic construct
  misc_feature 1..20: note = chemically synthesized
  source 1..20: mol_type = other DNA
ataggcataattttttaacc

SEQ ID NO: 48488 - DNA, 20 bp, synthetic construct
  misc_feature 1..20: note = chemically synthesized
  source 1..20: mol_type = other DNA
taggcataattttttaacct

SEQ ID NO: 48489 - DNA, 20 bp, synthetic construct
  misc_feature 1..20: note = chemically synthesized
  source 1..20: mol_type = other DNA
taattttttaacctaggctc

SEQ ID NO: 48490 - DNA, 20 bp, synthetic construct
  misc_feature 1..20: note = chemically synthesized
  source 1..20: mol_type = other DNA
tttttaacctaggctccaga

SEQ ID NO: 48491 - DNA, 20 bp, synthetic construct
  misc_feature 1..20: note = chemically synthesized
  source 1..20: mol_type = other DNA
acctaggctccagatagcca

SEQ ID NO: 48492 - DNA, 20 bp, synthetic construct
  misc_feature 1..20: note = chemically synthesized
  source 1..20: mol_type = other DNA
taggctccagatagccatag

SEQ ID NO: 48493 - DNA, 20 bp, synthetic construct
  misc_feature 1..20: note = chemically synthesized
  source 1..20: mol_type = other DNA
caaacactttctgcgtgtgt

SEQ ID NO: 48494 - DNA, 20 bp, synthetic construct
  misc_feature 1..20: note = chemically synthesized
  source 1..20: mol_type = other DNA
tctgcgtgtgtgagaataat

SEQ ID NO: 48495 - DNA, 20 bp, synthetic construct
  misc_feature 1..20: note = chemically synthesized
  source 1..20: mol_type = other DNA
tgcgtgtgtgagaataatca

SEQ ID NO: 48496 - DNA, 20 bp, synthetic construct
  misc_feature 1..20: note = chemically synthesized
  source 1..20: mol_type = other DNA
tgtgtgagaataatcagagt

SEQ ID NO: 48497 - DNA, 20 bp, synthetic construct
  misc_feature 1..20: note = chemically synthesized
  source 1..20: mol_type = other DNA
tcagagtgagattttttcac

SEQ ID NO: 48498 - DNA, 20 bp, synthetic construct
  misc_feature 1..20: note = chemically synthesized
  source 1..20: mol_type = other DNA
ttttttcacaagtacctgat

SEQ ID NO: 48499 - DNA, 20 bp, synthetic construct
  misc_feature 1..20: note = chemically synthesized
  source 1..20: mol_type = other DNA
tttttcacaagtacctgatg

SEQ ID NO: 48500 - DNA, 20 bp, synthetic construct
  misc_feature 1..20: note = chemically synthesized
  source 1..20: mol_type = other DNA
ttttcacaagtacctgatga

SEQ ID NO: 48501 - DNA, 20 bp, synthetic construct
  misc_feature 1..20: note = chemically synthesized
  source 1..20: mol_type = other DNA
acaagtacctgatgagggtt

SEQ ID NO: 48502 - DNA, 20 bp, synthetic construct
  misc_feature 1..20: note = chemically synthesized
  source 1..20: mol_type = other DNA
gtacctgatgagggttgaga

SEQ ID NO: 48503 - DNA, 20 bp, synthetic construct
  misc_feature 1..20: note = chemically synthesized
  source 1..20: mol_type = other DNA
tacctgatgagggttgagac

SEQ ID NO: 48504 - DNA, 20 bp, synthetic construct
  misc_feature 1..20: note = chemically synthesized
  source 1..20: mol_type = other DNA
ctgatgagggttgagacagg

SEQ ID NO: 48505 - DNA, 20 bp, synthetic construct
  misc_feature 1..20: note = chemically synthesized
  source 1..20: mol_type = other DNA
agggttgagacaggtagaaa

SEQ ID NO: 48506 - DNA, 20 bp, synthetic construct
  misc_feature 1..20: note = chemically synthesized
  source 1..20: mol_type = other DNA
ttgagacaggtagaaaaagt

SEQ ID NO: 48507 - DNA, 20 bp, synthetic construct
  misc_feature 1..20: note = chemically synthesized
  source 1..20: mol_type = other DNA
gagacaggtagaaaaagtga

SEQ ID NO: 48508 - DNA, 20 bp, synthetic construct
  misc_feature 1..20: note = chemically synthesized
  source 1..20: mol_type = other DNA
gtgagagatctctatttatt

SEQ ID NO: 48509 - DNA, 20 bp, synthetic construct
  misc_feature 1..20: note = chemically synthesized
  source 1..20: mol_type = other DNA
ctctatttatttagcaataa

SEQ ID NO: 48510 - DNA, 20 bp, synthetic construct
  misc_feature 1..20: note = chemically synthesized
  source 1..20: mol_type = other DNA
ctatttatttagcaataata

SEQ ID NO: 48511 - DNA, 20 bp, synthetic construct
  misc_feature 1..20: note = chemically synthesized
  source 1..20: mol_type = other DNA
ttatttagcaataatagaga

SEQ ID NO: 48512 - DNA, 20 bp, synthetic construct
  misc_feature 1..20: note = chemically synthesized
  source 1..20: mol_type = other DNA
caataatagagaaagcattt

SEQ ID NO: 48513 - DNA, 20 bp, synthetic construct
  misc_feature 1..20: note = chemically synthesized
  source 1..20: mol_type = other DNA
ataatagagaaagcatttaa

SEQ ID NO: 48514 - DNA, 20 bp, synthetic construct
  misc_feature 1..20: note = chemically synthesized
  source 1..20: mol_type = other DNA
agaaagcatttaagagaata

SEQ ID NO: 48515 - DNA, 20 bp, synthetic construct
  misc_feature 1..20: note = chemically synthesized
  source 1..20: mol_type = other DNA
catttaagagaataaagcaa

SEQ ID NO: 48516 - DNA, 20 bp, synthetic construct
  misc_feature 1..20: note = chemically synthesized
  source 1..20: mol_type = other DNA
gagaataaagcaatggaaat

SEQ ID NO: 48517 - DNA, 20 bp, synthetic construct
  misc_feature 1..20: note = chemically synthesized
  source 1..20: mol_type = other DNA
gtaaatttccttctgataac

SEQ ID NO: 48518 - DNA, 20 bp, synthetic construct
  misc_feature 1..20: note = chemically synthesized
  source 1..20: mol_type = other DNA
ttccttctgataactagaaa

SEQ ID NO: 48519 - DNA, 20 bp, synthetic construct
  misc_feature 1..20: note = chemically synthesized
  source 1..20: mol_type = other DNA
ccttctgataactagaaata

SEQ ID NO: 48520 - DNA, 20 bp, synthetic construct
  misc_feature 1..20: note = chemically synthesized
  source 1..20: mol_type = other DNA
cttctgataactagaaatag

SEQ ID NO: 48521 - DNA, 20 bp, synthetic construct
  misc_feature 1..20: note = chemically synthesized
  source 1..20: mol_type = other DNA
ataactagaaatagaggatc

SEQ ID NO: 48522 - DNA, 20 bp, synthetic construct
  misc_feature 1..20: note = chemically synthesized
  source 1..20: mol_type = other DNA
atagaggatccagtttcttt

SEQ ID NO: 48523 - DNA, 20 bp, synthetic construct
  misc_feature 1..20: note = chemically synthesized
  source 1..20: mol_type = other DNA
tattttattttgtgtaatcg

SEQ ID NO: 48524 - DNA, 20 bp, synthetic construct
  misc_feature 1..20: note = chemically synthesized
  source 1..20: mol_type = other DNA
attttgtgtaatcgtagttt

SEQ ID NO: 48525 - DNA, 20 bp, synthetic construct
  misc_feature 1..20: note = chemically synthesized
  source 1..20: mol_type = other DNA
tttgtgtaatcgtagtttca

SEQ ID NO: 48526 - DNA, 20 bp, synthetic construct
  misc_feature 1..20: note = chemically synthesized
  source 1..20: mol_type = other DNA
taatcgtagtttcagagtgt

SEQ ID NO: 48527 - DNA, 20 bp, synthetic construct
  misc_feature 1..20: note = chemically synthesized
  source 1..20: mol_type = other DNA
atcgtagtttcagagtgtta

SEQ ID NO: 48528 - DNA, 20 bp, synthetic construct
  misc_feature 1..20: note = chemically synthesized
  source 1..20: mol_type = other DNA
tttcagagtgttagagctga

SEQ ID NO: 48529 - DNA, 20 bp, synthetic construct
  misc_feature 1..20: note = chemically synthesized
  source 1..20: mol_type = other DNA
ttcagagtgttagagctgaa

SEQ ID NO: 48530 - DNA, 20 bp, synthetic construct
  misc_feature 1..20: note = chemically synthesized
  source 1..20: mol_type = other DNA
agagtgttagagctgaaagg

SEQ ID NO: 48531 - DNA, 20 bp, synthetic construct
  misc_feature 1..20: note = chemically synthesized
  source 1..20: mol_type = other DNA
gtgttagagctgaaaggaag

SEQ ID NO: 48532 - DNA, 20 bp, synthetic construct
  misc_feature 1..20: note = chemically synthesized
  source 1..20: mol_type = other DNA
ttagagctgaaaggaagaag

SEQ ID NO: 48533 - DNA, 20 bp, synthetic construct
  misc_feature 1..20: note = chemically synthesized
  source 1..20: mol_type = other DNA
tagagctgaaaggaagaagt

SEQ ID NO: 48534 - DNA, 20 bp, synthetic construct
  misc_feature 1..20: note = chemically synthesized
  source 1..20: mol_type = other DNA
gagctgaaaggaagaagtag

SEQ ID NO: 48535 - DNA, 20 bp, synthetic construct
  misc_feature 1..20: note = chemically synthesized
  source 1..20: mol_type = other DNA
agaagtaggagaaacatgca

SEQ ID NO: 48536 - DNA, 20 bp, synthetic construct
  misc_feature 1..20: note = chemically synthesized
  source 1..20: mol_type = other DNA
aggagaaacatgcaaagtaa

SEQ ID NO: 48537 - DNA, 20 bp, synthetic construct
  misc_feature 1..20: note = chemically synthesized
  source 1..20: mol_type = other DNA
ctttccttactaaaccgaca

SEQ ID NO: 48538 - DNA, 20 bp, synthetic construct
  misc_feature 1..20: note = chemically synthesized
  source 1..20: mol_type = other DNA
tttccttactaaaccgacat

SEQ ID NO: 48539 - DNA, 20 bp, synthetic construct
  misc_feature 1..20: note = chemically synthesized
  source 1..20: mol_type = other DNA
actaaaccgacatgggtttc

SEQ ID NO: 48540 - DNA, 20 bp, synthetic construct
  misc_feature 1..20: note = chemically synthesized
  source 1..20: mol_type = other DNA
ctaaaccgacatgggtttcc

SEQ ID NO: 48541 - DNA, 20 bp, synthetic construct
  misc_feature 1..20: note = chemically synthesized
  source 1..20: mol_type = other DNA
aaccgacatgggtttccagg

SEQ ID NO: 48542 - DNA, 20 bp, synthetic construct
  misc_feature 1..20: note = chemically synthesized
  source 1..20: mol_type = other DNA
accgacatgggtttccaggt

SEQ ID NO: 48543 - DNA, 20 bp, synthetic construct
  misc_feature 1..20: note = chemically synthesized
  source 1..20: mol_type = other DNA
ccgacatgggtttccaggta

SEQ ID NO: 48544 - DNA, 20 bp, synthetic construct
  misc_feature 1..20: note = chemically synthesized
  source 1..20: mol_type = other DNA
cgacatgggtttccaggtag

SEQ ID NO: 48545 - DNA, 20 bp, synthetic construct
  misc_feature 1..20: note = chemically synthesized
  source 1..20: mol_type = other DNA
catgggtttccaggtagggg

SEQ ID NO: 48546 - DNA, 20 bp, synthetic construct
  misc_feature 1..20: note = chemically synthesized
  source 1..20: mol_type = other DNA
atgggtttccaggtaggggc

SEQ ID NO: 48547 - DNA, 20 bp, synthetic construct
  misc_feature 1..20: note = chemically synthesized
  source 1..20: mol_type = other DNA
ttccaggtaggggcaggatt

SEQ ID NO: 48548 - DNA, 20 bp, synthetic construct
  misc_feature 1..20: note = chemically synthesized
  source 1..20: mol_type = other DNA
tccaggtaggggcaggattc

SEQ ID NO: 48549 - DNA, 20 bp, synthetic construct
  misc_feature 1..20: note = chemically synthesized
  source 1..20: mol_type = other DNA
gcaggattcaggatgactga

SEQ ID NO: 48550 - DNA, 20 bp, synthetic construct
  misc_feature 1..20: note = chemically synthesized
  source 1..20: mol_type = other DNA
caggattcaggatgactgac

SEQ ID NO: 48551 - DNA, 20 bp, synthetic construct
  misc_feature 1..20: note = chemically synthesized
  source 1..20: mol_type = other DNA
aggattcaggatgactgaca

SEQ ID NO: 48552 - DNA, 20 bp, synthetic construct
  misc_feature 1..20: note = chemically synthesized
  source 1..20: mol_type = other DNA
aggatgactgacagggccct

SEQ ID NO: 48553 - DNA, 20 bp, synthetic construct
  misc_feature 1..20: note = chemically synthesized
  source 1..20: mol_type = other DNA
ggatgactgacagggccctt

SEQ ID NO: 48554 - DNA, 20 bp, synthetic construct
  misc_feature 1..20: note = chemically synthesized
  source 1..20: mol_type = other DNA
gatgactgacagggccctta

SEQ ID NO: 48555 - DNA, 20 bp, synthetic construct
  misc_feature 1..20: note = chemically synthesized
  source 1..20: mol_type = other DNA
cagggcccttagggaacact

SEQ ID NO: 48556 - DNA, 20 bp, synthetic construct
  misc_feature 1..20: note = chemically synthesized
  source 1..20: mol_type = other DNA
gttttaattacatcttttaa

SEQ ID NO: 48557 - DNA, 20 bp, synthetic construct
  misc_feature 1..20: note = chemically synthesized
  source 1..20: mol_type = other DNA
ttaattacatcttttaatag

SEQ ID NO: 48558 - DNA, 20 bp, synthetic construct
  misc_feature 1..20: note = chemically synthesized
  source 1..20: mol_type = other DNA
taattacatcttttaatagc

SEQ ID NO: 48559 - DNA, 20 bp, synthetic construct
  misc_feature 1..20: note = chemically synthesized
  source 1..20: mol_type = other DNA
ttacatcttttaatagcagg

SEQ ID NO: 48560 - DNA, 20 bp, synthetic construct
  misc_feature 1..20: note = chemically synthesized
  source 1..20: mol_type = other DNA
catcttttaatagcaggaag

SEQ ID NO: 48561 - DNA, 20 bp, synthetic construct
  misc_feature 1..20: note = chemically synthesized
  source 1..20: mol_type = other DNA
agcagaactctgcacttcaa

SEQ ID NO: 48562 - DNA, 20 bp, synthetic construct
  misc_feature 1..20: note = chemically synthesized
  source 1..20: mol_type = other DNA
tcaaaagtttttcctcacct

SEQ ID NO: 48563 - DNA, 20 bp, synthetic construct
  misc_feature 1..20: note = chemically synthesized
  source 1..20: mol_type = other DNA
caaaagtttttcctcacctg

SEQ ID NO: 48564 - DNA, 20 bp, synthetic construct
  misc_feature 1..20: note = chemically synthesized
  source 1..20: mol_type = other DNA
aaagtttttcctcacctgag

SEQ ID NO: 48565 - DNA, 20 bp, synthetic construct
  misc_feature 1..20: note = chemically synthesized
  source 1..20: mol_type = other DNA
cctcacctgaggagttaatt

SEQ ID NO: 48566 - DNA, 20 bp, synthetic construct
  misc_feature 1..20: note = chemically synthesized
  source 1..20: mol_type = other DNA
ctgaggagttaatttagtac

SEQ ID NO: 48567 - DNA, 20 bp, synthetic construct
  misc_feature 1..20: note = chemically synthesized
  source 1..20: mol_type = other DNA
tgaggagttaatttagtaca

SEQ ID NO: 48568 - DNA, 20 bp, synthetic construct
  misc_feature 1..20: note = chemically synthesized
  source 1..20: mol_type = other DNA
gaggagttaatttagtacaa

SEQ ID NO: 48569 - DNA, 20 bp, synthetic construct
  misc_feature 1..20: note = chemically synthesized
  source 1..20: mol_type = other DNA
aggagttaatttagtacaag

SEQ ID NO: 48570 - DNA, 20 bp, synthetic construct
  misc_feature 1..20: note = chemically synthesized
  source 1..20: mol_type = other DNA
taatttagtacaaggggaaa

SEQ ID NO: 48571 - DNA, 20 bp, synthetic construct
  misc_feature 1..20: note = chemically synthesized
  source 1..20: mol_type = other DNA
tagtacaaggggaaaaagta

SEQ ID NO: 48572 - DNA, 20 bp, synthetic construct
  misc_feature 1..20: note = chemically synthesized
  source 1..20: mol_type = other DNA
agtacaaggggaaaaagtac

SEQ ID NO: 48573 - DNA, 20 bp, synthetic construct
  misc_feature 1..20: note = chemically synthesized
  source 1..20: mol_type = other DNA
gtacaaggggaaaaagtaca

SEQ ID NO: 48574 - DNA, 20 bp, synthetic construct
  misc_feature 1..20: note = chemically synthesized
  source 1..20: mol_type = other DNA
tacaaggggaaaaagtacag

SEQ ID NO: 48575 - DNA, 20 bp, synthetic construct
  misc_feature 1..20: note = chemically synthesized
  source 1..20: mol_type = other DNA
acaaggggaaaaagtacagg

SEQ ID NO: 48576 - DNA, 20 bp, synthetic construct
  misc_feature 1..20: note = chemically synthesized
  source 1..20: mol_type = other DNA
ggggaaaaagtacaggggga

SEQ ID NO: 48577 - DNA, 20 bp, synthetic construct
  misc_feature 1..20: note = chemically synthesized
  source 1..20: mol_type = other DNA
gggaaaaagtacagggggat

SEQ ID NO: 48578 - DNA, 20 bp, synthetic construct
  misc_feature 1..20: note = chemically synthesized
  source 1..20: mol_type = other DNA
gaaaaagtacagggggatgg

SEQ ID NO: 48579 - DNA, 20 bp, synthetic construct
  misc_feature 1..20: note = chemically synthesized
  source 1..20: mol_type = other DNA
aagtacagggggatgggaga

SEQ ID NO: 48580 - DNA, 20 bp, synthetic construct
  misc_feature 1..20: note = chemically synthesized
  source 1..20: mol_type = other DNA
agtacagggggatgggagaa

SEQ ID NO: 48581 - DNA, 20 bp, synthetic construct
  misc_feature 1..20: note = chemically synthesized
  source 1..20: mol_type = other DNA
tgggagaaaggcgatcacgt

SEQ ID NO: 48582 - DNA, 20 bp, synthetic construct
  misc_feature 1..20: note = chemically synthesized
  source 1..20: mol_type = other DNA
gggagaaaggcgatcacgtt

SEQ ID NO: 48583 - DNA, 20 bp, synthetic construct
  misc_feature 1..20: note = chemically synthesized
  source 1..20: mol_type = other DNA
agaaaggcgatcacgttggg

SEQ ID NO: 48584 - DNA, 20 bp, synthetic construct
  misc_feature 1..20: note = chemically synthesized
  source 1..20: mol_type = other DNA
gcgatcacgttgggaagcta

SEQ ID NO: 48585 - DNA, 20 bp, synthetic construct
  misc_feature 1..20: note = chemically synthesized
  source 1..20: mol_type = other DNA
gatcacgttgggaagctata

SEQ ID NO: 48586 - DNA, 20 bp, synthetic construct
  misc_feature 1..20: note = chemically synthesized
  source 1..20: mol_type = other DNA
acgttgggaagctatagaga

SEQ ID NO: 48587 - DNA, 20 bp, synthetic construct
  misc_feature 1..20: note = chemically synthesized
  source 1..20: mol_type = other DNA
ttgggaagctatagagaaag

SEQ ID NO: 48588 - DNA, 20 bp, synthetic construct
  misc_feature 1..20: note = chemically synthesized
  source 1..20: mol_type = other DNA
gggaagctatagagaaagaa

SEQ ID NO: 48589 - DNA, 20 bp, synthetic construct
  misc_feature 1..20: note = chemically synthesized
  source 1..20: mol_type = other DNA
agagaaagaagagtaaattt

SEQ ID NO: 48590 - DNA, 20 bp, synthetic construct
  misc_feature 1..20: note = chemically synthesized
  source 1..20: mol_type = other DNA
aagaagagtaaattttagta

SEQ ID NO: 48591 - DNA, 20 bp, synthetic construct
  misc_feature 1..20: note = chemically synthesized
  source 1..20: mol_type = other DNA
agaagagtaaattttagtaa

SEQ ID NO: 48592 - DNA, 20 bp, synthetic construct
  misc_feature 1..20: note = chemically synthesized
  source 1..20: mol_type = other DNA
aagagtaaattttagtaaag

SEQ ID NO: 48593 - DNA, 20 bp, synthetic construct
  misc_feature 1..20: note = chemically synthesized
  source 1..20: mol_type = other DNA
agagtaaattttagtaaagg

SEQ ID NO: 48594 - DNA, 20 bp, synthetic construct
  misc_feature 1..20: note = chemically synthesized
  source 1..20: mol_type = other DNA
gtttaaacaaacaaaatata

SEQ ID NO: 48595 - DNA, 20 bp, synthetic construct
  misc_feature 1..20: note = chemically synthesized
  source 1..20: mol_type = other DNA
ttaaacaaacaaaatataaa

SEQ ID NO: 48596 - DNA, 20 bp, synthetic construct
  misc_feature 1..20: note = chemically synthesized
  source 1..20: mol_type = other DNA
aaacaaaatataaagagaaa

SEQ ID NO: 48597 - DNA, 20 bp, synthetic construct
  misc_feature 1..20: note = chemically synthesized
  source 1..20: mol_type = other DNA
aacaaaatataaagagaaat

SEQ ID NO: 48598 - DNA, 20 bp, synthetic construct
  misc_feature 1..20: note = chemically synthesized
  source 1..20: mol_type = other DNA
gagaaataggaacttgaatc

SEQ ID NO: 48599 - DNA, 20 bp, synthetic construct
  misc_feature 1..20: note = chemically synthesized
  source 1..20: mol_type = other DNA
agaaataggaacttgaatca

SEQ ID NO: 48600 - DNA, 20 bp, synthetic construct
  misc_feature 1..20: note = chemically synthesized
  source 1..20: mol_type = other DNA
aaggaaatgattttaaaacg

SEQ ID NO: 48601 - DNA, 20 bp, synthetic construct
  misc_feature 1..20: note = chemically synthesized
  source 1..20: mol_type = other DNA
attttaaaacgcagtattct

SEQ ID NO: 48602 - DNA, 20 bp, synthetic construct
  misc_feature 1..20: note = chemically synthesized
  source 1..20: mol_type = other DNA
ttaaaacgcagtattcttag

SEQ ID NO: 48603 - DNA, 20 bp, synthetic construct
  misc_feature 1..20: note = chemically synthesized
  source 1..20: mol_type = other DNA
acgcagtattcttagtggac

SEQ ID NO: 48604 - DNA, 20 bp, synthetic construct
  misc_feature 1..20: note = chemically synthesized
  source 1..20: mol_type = other DNA
gcagtattcttagtggacta

SEQ ID NO: 48605 - DNA, 20 bp, synthetic construct
  misc_feature 1..20: note = chemically synthesized
  source 1..20: mol_type = other DNA
cagtattcttagtggactag

SEQ ID NO: 48606 - DNA, 20 bp, synthetic construct
  misc_feature 1..20: note = chemically synthesized
  source 1..20: mol_type = other DNA
ctagaggaaaaaaataatct

SEQ ID NO: 48607 - DNA, 20 bp, synthetic construct
  misc_feature 1..20: note = chemically synthesized
  source 1..20: mol_type = other DNA
ggaaaaaaataatctgagcc

SEQ ID NO: 48608 - DNA, 20 bp, synthetic construct
  misc_feature 1..20: note = chemically synthesized
  source 1..20: mol_type = other DNA
aaaaaataatctgagccaag

SEQ ID NO: 48609 - DNA, 20 bp, synthetic construct
  misc_feature 1..20: note = chemically synthesized
  source 1..20: mol_type = other DNA
aaataatctgagccaagtag

SEQ ID NO: 48610 - DNA, 20 bp, synthetic construct
  misc_feature 1..20: note = chemically synthesized
  source 1..20: mol_type = other DNA
ccctcctacccctactttct

SEQ ID NO: 48611 - DNA, 20 bp, synthetic construct
  misc_feature 1..20: note = chemically synthesized
  source 1..20: mol_type = other DNA
tacccctactttctaagtca

SEQ ID NO: 48612 - DNA, 20 bp, synthetic construct
  misc_feature 1..20: note = chemically synthesized
  source 1..20: mol_type = other DNA
cccctactttctaagtcaca

SEQ ID NO: 48613 - DNA, 20 bp, synthetic construct
  misc_feature 1..20: note = chemically synthesized
  source 1..20: mol_type = other DNA
ccctactttctaagtcacag

SEQ ID NO: 48614 - DNA, 20 bp, synthetic construct
  misc_feature 1..20: note = chemically synthesized
  source 1..20: mol_type = other DNA
acagaggctttttgttcccc

SEQ ID NO: 48615 - DNA, 20 bp, synthetic construct
  misc_feature 1..20: note = chemically synthesized
  source 1..20: mol_type = other DNA
tgttcccccagacactcttg

SEQ ID NO: 48616 - DNA, 20 bp, synthetic construct
  misc_feature 1..20: note = chemically synthesized
  source 1..20: mol_type = other DNA
ccccagacactcttgcagat

SEQ ID NO: 48617 - DNA, 20 bp, synthetic construct
  misc_feature 1..20: note = chemically synthesized
  source 1..20: mol_type = other DNA
gacactcttgcagattagtc

SEQ ID NO: 48618 - DNA, 20 bp, synthetic construct
  misc_feature 1..20: note = chemically synthesized
  source 1..20: mol_type = other DNA
acactcttgcagattagtcc

SEQ ID NO: 48619 - DNA, 20 bp, synthetic construct
  misc_feature 1..20: note = chemically synthesized
  source 1..20: mol_type = other DNA
ctcttgcagattagtccagg

SEQ ID NO: 48620 - DNA, 20 bp, synthetic construct
  misc_feature 1..20: note = chemically synthesized
  source 1..20: mol_type = other DNA
cagattagtccaggcagaaa

SEQ ID NO: 48621 - DNA, 20 bp, synthetic construct
  misc_feature 1..20: note = chemically synthesized
  source 1..20: mol_type = other DNA
ttagtccaggcagaaacagt

SEQ ID NO: 48622 - DNA, 20 bp, synthetic construct
  misc_feature 1..20: note = chemically synthesized
  source 1..20: mol_type = other DNA
cagaaacagttagatgtccc

SEQ ID NO: 48623 - DNA, 20 bp, synthetic construct
  misc_feature 1..20: note = chemically synthesized
  source 1..20: mol_type = other DNA
accactgattaccccattga

SEQ ID NO: 48624 - DNA, 20 bp, synthetic construct
  misc_feature 1..20: note = chemically synthesized
  source 1..20: mol_type = other DNA
ccccattgatagtcacactt

SEQ ID NO: 48625 - DNA, 20 bp, synthetic construct
  misc_feature 1..20: note = chemically synthesized
  source 1..20: mol_type = other DNA
cccattgatagtcacacttt

SEQ ID NO: 48626 - DNA, 20 bp, synthetic construct
  misc_feature 1..20: note = chemically synthesized
  source 1..20: mol_type = other DNA
atagtcacactttgggttgt

SEQ ID NO: 48627 - DNA, 20 bp, synthetic construct
  misc_feature 1..20: note = chemically synthesized
  source 1..20: mol_type = other DNA
tttgtatttttgactgcatt

SEQ ID NO: 48628 - DNA, 20 bp, synthetic construct
  misc_feature 1..20: note = chemically synthesized
  source 1..20: mol_type = other DNA
tgtatttttgactgcattaa

SEQ ID NO: 48629 - DNA, 20 bp, synthetic construct
  misc_feature 1..20: note = chemically synthesized
  source 1..20: mol_type = other DNA
gtatttttgactgcattaag

SEQ ID NO: 48630 - DNA, 20 bp, synthetic construct
  misc_feature 1..20: note = chemically synthesized
  source 1..20: mol_type = other DNA
tgactgcattaagaggtctc

SEQ ID NO: 48631 - DNA, 20 bp, synthetic construct
  misc_feature 1..20: note = chemically synthesized
  source 1..20: mol_type = other DNA
cttgtttcccaaaacctaat

SEQ ID NO: 48632 - DNA, 20 bp, synthetic construct
  misc_feature 1..20: note = chemically synthesized
  source 1..20: mol_type = other DNA
cctaataagtaactaatgca

SEQ ID NO: 48633 - DNA, 20 bp, synthetic construct
  misc_feature 1..20: note = chemically synthesized
  source 1..20: mol_type = other DNA
taataagtaactaatgcaca

SEQ ID NO: 48634 - DNA, 20 bp, synthetic construct
  misc_feature 1..20: note = chemically synthesized
  source 1..20: mol_type = other DNA
atttgtatttattctatttt

SEQ ID NO: 48635 - DNA, 20 bp, synthetic construct
  misc_feature 1..20: note = chemically synthesized
  source 1..20: mol_type = other DNA
tatttttagacataatttat

SEQ ID NO: 48636 - DNA, 20 bp, synthetic construct
  misc_feature 1..20: note = chemically synthesized
  source 1..20: mol_type = other DNA
cataatttattagcatgcat

SEQ ID NO: 48637 - DNA, 20 bp, synthetic construct
  misc_feature 1..20: note = chemically synthesized
  source 1..20: mol_type = other DNA
ttagcatgcatgagcaaatt

SEQ ID NO: 48638 - DNA, 20 bp, synthetic construct
  misc_feature 1..20: note = chemically synthesized
  source 1..20: mol_type = other DNA
tatattttttcttttcttac

SEQ ID NO: 48639 - DNA, 20 bp, synthetic construct
  misc_feature 1..20: note = chemically synthesized
  source 1..20: mol_type = other DNA
attttttcttttcttaccag

SEQ ID NO: 48640 - DNA, 20 bp, synthetic construct
  misc_feature 1..20: note = chemically synthesized
  source 1..20: mol_type = other DNA
ttttttcttttcttaccaga

SEQ ID NO: 48641 - DNA, 20 bp, synthetic construct
  misc_feature 1..20: note = chemically synthesized
  source 1..20: mol_type = other DNA
cagaaggttttaatccaaat

SEQ ID NO: 48642 - DNA, 20 bp, synthetic construct
  misc_feature 1..20: note = chemically synthesized
  source 1..20: mol_type = other DNA
agaaggttttaatccaaata

SEQ ID NO: 48643 - DNA, 20 bp, synthetic construct
  misc_feature 1..20: note = chemically synthesized
  source 1..20: mol_type = other DNA
aaggttttaatccaaataag

SEQ ID NO: 48644 - DNA, 20 bp, synthetic construct
  misc_feature 1..20: note = chemically synthesized
  source 1..20: mol_type = other DNA
gttttaatccaaataaggag

SEQ ID NO: 48645 - DNA, 20 bp, synthetic construct
  misc_feature 1..20: note = chemically synthesized
  source 1..20: mol_type = other DNA
aaataaggagaagatatgct

SEQ ID NO: 48646 - DNA, 20 bp, synthetic construct
  misc_feature 1..20: note = chemically synthesized
  source 1..20: mol_type = other DNA
gagaagatatgcttagaacc

SEQ ID NO: 48647 - DNA, 20 bp, synthetic construct
  misc_feature 1..20: note = chemically synthesized
  source 1..20: mol_type = other DNA
agaagatatgcttagaaccg

SEQ ID NO: 48648 - DNA, 20 bp, synthetic construct
  misc_feature 1..20: note = chemically synthesized
  source 1..20: mol_type = other DNA
agatatgcttagaaccgagg

SEQ ID NO: 48649 - DNA, 20 bp, synthetic construct
  misc_feature 1..20: note = chemically synthesized
  source 1..20: mol_type = other DNA
atatgcttagaaccgaggta

SEQ ID NO: 48650 - DNA, 20 bp, synthetic construct
  misc_feature 1..20: note = chemically synthesized
  source 1..20: mol_type = other DNA
tttcatccattctgtcctgt

SEQ ID NO: 48651 - DNA, 20 bp, synthetic construct
  misc_feature 1..20: note = chemically synthesized
  source 1..20: mol_type = other DNA
tgtaagtattttgcatattc

SEQ ID NO: 48652 - DNA, 20 bp, synthetic construct
  misc_feature 1..20: note = chemically synthesized
  source 1..20: mol_type = other DNA
taagtattttgcatattctg

SEQ ID NO: 48653 - DNA, 20 bp, synthetic construct
  misc_feature 1..20: note = chemically synthesized
  source 1..20: mol_type = other DNA
ttttgcatattctggagacg

SEQ ID NO: 48654 - DNA, 20 bp, synthetic construct
  misc_feature 1..20: note = chemically synthesized
  source 1..20: mol_type = other DNA
tttgcatattctggagacgc

SEQ ID NO: 48655 - DNA, 20 bp, synthetic construct
  misc_feature 1..20: note = chemically synthesized
  source 1..20: mol_type = other DNA
gcatattctggagacgcagg

SEQ ID NO: 48656 - DNA, 20 bp, synthetic construct
  misc_feature 1..20: note = chemically synthesized
  source 1..20: mol_type = other DNA
atattctggagacgcaggaa

SEQ ID NO: 48657 - DNA, 20 bp, synthetic construct
  misc_feature 1..20: note = chemically synthesized
  source 1..20: mol_type = other DNA
agatccatctacatatccca

SEQ ID NO: 48658 - DNA, 20 bp, synthetic construct
  misc_feature 1..20: note = chemically synthesized
  source 1..20: mol_type = other DNA
catatcccaaagctgaatta

SEQ ID NO: 48659 - DNA, 20 bp, synthetic construct
  misc_feature 1..20: note = chemically synthesized
  source 1..20: mol_type = other DNA
atcccaaagctgaattatgg

SEQ ID NO: 48660 - DNA, 20 bp, synthetic construct
  misc_feature 1..20: note = chemically synthesized
  source 1..20: mol_type = other DNA
agacaaaactcttccacttt

SEQ ID NO: 48661 - DNA, 20 bp, synthetic construct
  misc_feature 1..20: note = chemically synthesized
  source 1..20: mol_type = other DNA
caacttcttatttgtgtaat

SEQ ID NO: 48662 - DNA, 20 bp, synthetic construct
  misc_feature 1..20: note = chemically synthesized
  source 1..20: mol_type = other DNA
tatttgtgtaataagaaaat

SEQ ID NO: 48663 - DNA, 20 bp, synthetic construct
  misc_feature 1..20: note = chemically synthesized
  source 1..20: mol_type = other DNA
atttgtgtaataagaaaatt

SEQ ID NO: 48664 - DNA, 20 bp, synthetic construct
  misc_feature 1..20: note = chemically synthesized
  source 1..20: mol_type = other DNA
cgatcttcaatatgcttacc

SEQ ID NO: 48665 - DNA, 20 bp, synthetic construct
  misc_feature 1..20: note = chemically synthesized
  source 1..20: mol_type = other DNA
attacgtaaatacacttgca

SEQ ID NO: 48666 - DNA, 20 bp, synthetic construct
  misc_feature 1..20: note = chemically synthesized
  source 1..20: mol_type = other DNA
ttacgtaaatacacttgcaa

SEQ ID NO: 48667 - DNA, 20 bp, synthetic construct
  misc_feature 1..20: note = chemically synthesized
  source 1..20: mol_type = other DNA
acgtaaatacacttgcaaag

SEQ ID NO: 48668 - DNA, 20 bp, synthetic construct
  misc_feature 1..20: note = chemically synthesized
  source 1..20: mol_type = other DNA
cgtaaatacacttgcaaagg

SEQ ID NO: 48669 - DNA, 20 bp, synthetic construct
  misc_feature 1..20: note = chemically synthesized
  source 1..20: mol_type = other DNA
cttgcaaaggaggatgtttt

SEQ ID NO: 48670 - DNA, 20 bp, synthetic construct
  misc_feature 1..20: note = chemically synthesized
  source 1..20: mol_type = other DNA
gcaaaggaggatgtttttag

SEQ ID NO: 48671 - DNA, 20 bp, synthetic construct
  misc_feature 1..20: note = chemically synthesized
  source 1..20: mol_type = other DNA
ttagtagcaatttgtactga

SEQ ID NO: 48672 - DNA, 20 bp, synthetic construct
  misc_feature 1..20: note = chemically synthesized
  source 1..20: mol_type = other DNA
agcaatttgtactgatggta

SEQ ID NO: 48673 - DNA, 20 bp, synthetic construct
  misc_feature 1..20: note = chemically synthesized
  source 1..20: mol_type = other DNA
gcaatttgtactgatggtat

SEQ ID NO: 48674 - DNA, 20 bp, synthetic construct
  misc_feature 1..20: note = chemically synthesized
  source 1..20: mol_type = other DNA
caatttgtactgatggtatg

SEQ ID NO: 48675 - DNA, 20 bp, synthetic construct
  misc_feature 1..20: note = chemically synthesized
  source 1..20: mol_type = other DNA
tgtactgatggtatggggcc

SEQ ID NO: 48676 - DNA, 20 bp, synthetic construct
  misc_feature 1..20: note = chemically synthesized
  source 1..20: mol_type = other DNA
tactgatggtatggggccaa

SEQ ID NO: 48677 - DNA, 20 bp, synthetic construct
  misc_feature 1..20: note = chemically synthesized
  source 1..20: mol_type = other DNA
tggggccaagagatatatct

SEQ ID NO: 48678 - DNA, 20 bp, synthetic construct
  misc_feature 1..20: note = chemically synthesized
  source 1..20: mol_type = other DNA
gggccaagagatatatctta

SEQ ID NO: 48679 - DNA, 20 bp, synthetic construct
  misc_feature 1..20: note = chemically synthesized
  source 1..20: mol_type = other DNA
ggccaagagatatatcttag

SEQ ID NO: 48680 - DNA, 20 bp, synthetic construct
  misc_feature 1..20: note = chemically synthesized
  source 1..20: mol_type = other DNA
gccaagagatatatcttaga

SEQ ID NO: 48681 - DNA, 20 bp, synthetic construct
  misc_feature 1..20: note = chemically synthesized
  source 1..20: mol_type = other DNA
caagagatatatcttagagg

SEQ ID NO: 48682 - DNA, 20 bp, synthetic construct
  misc_feature 1..20: note = chemically synthesized
  source 1..20: mol_type = other DNA
aagagatatatcttagaggg

SEQ ID NO: 48683 - DNA, 20 bp, synthetic construct
  misc_feature 1..20: note = chemically synthesized
  source 1..20: mol_type = other DNA
agagatatatcttagaggga

SEQ ID NO: 48684 - DNA, 20 bp, synthetic construct
  misc_feature 1..20: note = chemically synthesized
  source 1..20: mol_type = other DNA
tatatcttagagggagggct

SEQ ID NO: 48685 - DNA, 20 bp, synthetic construct
  misc_feature 1..20: note = chemically synthesized
  source 1..20: mol_type = other DNA
atatcttagagggagggctg

SEQ ID NO: 48686 - DNA, 20 bp, synthetic construct
  misc_feature 1..20: note = chemically synthesized
  source 1..20: mol_type = other DNA
tatcttagagggagggctga

SEQ ID NO: 48687 - DNA, 20 bp, synthetic construct
  misc_feature 1..20: note = chemically synthesized
  source 1..20: mol_type = other DNA
gagggagggctgagggtttg

SEQ ID NO: 48688 - DNA, 20 bp, synthetic construct
  misc_feature 1..20: note = chemically synthesized
  source 1..20: mol_type = other DNA
gggtttgaagtccaactcct

SEQ ID NO: 48689 - DNA, 20 bp, synthetic construct
  misc_feature 1..20: note = chemically synthesized
  source 1..20: mol_type = other DNA
ttgaagtccaactcctaagc

SEQ ID NO: 48690 - DNA, 20 bp, synthetic construct
  misc_feature 1..20: note = chemically synthesized
  source 1..20: mol_type = other DNA
tccaactcctaagccagtgc

SEQ ID NO: 48691 - DNA, 20 bp, synthetic construct
  misc_feature 1..20: note = chemically synthesized
  source 1..20: mol_type = other DNA
aactcctaagccagtgccag

SEQ ID NO: 48692 - DNA, 20 bp, synthetic construct
  misc_feature 1..20: note = chemically synthesized
  source 1..20: mol_type = other DNA
ctcctaagccagtgccagaa

SEQ ID NO: 48693 - DNA, 20 bp, synthetic construct
  misc_feature 1..20: note = chemically synthesized
  source 1..20: mol_type = other DNA
aagccagtgccagaagagcc

SEQ ID NO: 48694 - DNA, 20 bp, synthetic construct
  misc_feature 1..20: note = chemically synthesized
  source 1..20: mol_type = other DNA
agccagtgccagaagagcca

SEQ ID NO: 48695 - DNA, 20 bp, synthetic construct
  misc_feature 1..20: note = chemically synthesized
  source 1..20: mol_type = other DNA
agtgccagaagagccaagga

SEQ ID NO: 48696 - DNA, 20 bp, synthetic construct
  misc_feature 1..20: note = chemically synthesized
  source 1..20: mol_type = other DNA
gtgccagaagagccaaggac

SEQ ID NO: 48697 - DNA, 20 bp, synthetic construct
  misc_feature 1..20: note = chemically synthesized
  source 1..20: mol_type = other DNA
agaagagccaaggacaggta

SEQ ID NO: 48698 - DNA, 20 bp, synthetic construct
  misc_feature 1..20: note = chemically synthesized
  source 1..20: mol_type = other DNA
caggtacggctgtcatcact

SEQ ID NO: 48699 - DNA, 20 bp, synthetic construct
  misc_feature 1..20: note = chemically synthesized
  source 1..20: mol_type = other DNA
atcacttagacctcaccctg

SEQ ID NO: 48700 - DNA, 20 bp, synthetic construct
  misc_feature 1..20: note = chemically synthesized
  source 1..20: mol_type = other DNA
cacttagacctcaccctgtg

SEQ ID NO: 48701 - DNA, 20 bp, synthetic construct
  misc_feature 1..20: note = chemically synthesized
  source 1..20: mol_type = other DNA
caccctgtggagccacaccc

SEQ ID NO: 48702 - DNA, 20 bp, synthetic construct
  misc_feature 1..20: note = chemically synthesized
  source 1..20: mol_type = other DNA
accctgtggagccacaccct

SEQ ID NO: 48703 - DNA, 20 bp, synthetic construct
  misc_feature 1..20: note = chemically synthesized
  source 1..20: mol_type = other DNA
ccctgtggagccacacccta

SEQ ID NO: 48704 - DNA, 20 bp, synthetic construct
  misc_feature 1..20: note = chemically synthesized
  source 1..20: mol_type = other DNA
gtggagccacaccctagggt

SEQ ID NO: 48705 - DNA, 20 bp, synthetic construct
  misc_feature 1..20: note = chemically synthesized
  source 1..20: mol_type = other DNA
agggttggccaatctactcc

SEQ ID NO: 48706 - DNA, 20 bp, synthetic construct
  misc_feature 1..20: note = chemically synthesized
  source 1..20: mol_type = other DNA
gggttggccaatctactccc

SEQ ID NO: 48707 - DNA, 20 bp, synthetic construct
  misc_feature 1..20: note = chemically synthesized
  source 1..20: mol_type = other DNA
gttggccaatctactcccag

SEQ ID NO: 48708 - DNA, 20 bp, synthetic construct
  misc_feature 1..20: note = chemically synthesized
  source 1..20: mol_type = other DNA
ggccaatctactcccaggag

SEQ ID NO: 48709 - DNA, 20 bp, synthetic construct
  misc_feature 1..20: note = chemically synthesized
  source 1..20: mol_type = other DNA
gccaatctactcccaggagc

SEQ ID NO: 48710 - DNA, 20 bp, synthetic construct
  misc_feature 1..20: note = chemically synthesized
  source 1..20: mol_type = other DNA
ccaatctactcccaggagca

SEQ ID NO: 48711 - DNA, 20 bp, synthetic construct
  misc_feature 1..20: note = chemically synthesized
  source 1..20: mol_type = other DNA
aatctactcccaggagcagg

SEQ ID NO: 48712 - DNA, 20 bp, synthetic construct
  misc_feature 1..20: note = chemically synthesized
  source 1..20: mol_type = other DNA
atctactcccaggagcaggg

SEQ ID NO: 48713 - DNA, 20 bp, synthetic construct
  misc_feature 1..20: note = chemically synthesized
  source 1..20: mol_type = other DNA
tctactcccaggagcaggga

SEQ ID NO: 48714 - DNA, 20 bp, synthetic construct
  misc_feature 1..20: note = chemically synthesized
  source 1..20: mol_type = other DNA
actcccaggagcagggaggg

SEQ ID NO: 48715 - DNA, 20 bp, synthetic construct
  misc_feature 1..20: note = chemically synthesized
  source 1..20: mol_type = other DNA
ctcccaggagcagggagggc

SEQ ID NO: 48716 - DNA, 20 bp, synthetic construct
  misc_feature 1..20: note = chemically synthesized
  source 1..20: mol_type = other DNA
cccaggagcagggagggcag

SEQ ID NO: 48717 - DNA, 20 bp, synthetic construct
  misc_feature 1..20: note = chemically synthesized
  source 1..20: mol_type = other DNA
ggagcagggagggcaggagc

SEQ ID NO: 48718 - DNA, 20 bp, synthetic construct
  misc_feature 1..20: note = chemically synthesized
  source 1..20: mol_type = other DNA
gagcagggagggcaggagcc

SEQ ID NO: 48719 - DNA, 20 bp, synthetic construct
  misc_feature 1..20: note = chemically synthesized
  source 1..20: mol_type = other DNA
agcagggagggcaggagcca

SEQ ID NO: 48720 - DNA, 20 bp, synthetic construct
  misc_feature 1..20: note = chemically synthesized
  source 1..20: mol_type = other DNA
gggagggcaggagccagggc

SEQ ID NO: 48721 - DNA, 20 bp, synthetic construct
  misc_feature 1..20: note = chemically synthesized
  source 1..20: mol_type = other DNA
ggagggcaggagccagggct

SEQ ID NO: 48722 - DNA, 20 bp, synthetic construct
  misc_feature 1..20: note = chemically synthesized
  source 1..20: mol_type = other DNA
ggagccagggctgggcataa

SEQ ID NO: 48723 - DNA, 20 bp, synthetic construct
  misc_feature 1..20: note = chemically synthesized
  source 1..20: mol_type = other DNA
ccagggctgggcataaaagt

SEQ ID NO: 48724 - DNA, 20 bp, synthetic construct
  misc_feature 1..20: note = chemically synthesized
  source 1..20: mol_type = other DNA
cagggctgggcataaaagtc

SEQ ID NO: 48725 - DNA, 20 bp, synthetic construct
  misc_feature 1..20: note = chemically synthesized
  source 1..20: mol_type = other DNA
agggctgggcataaaagtca

SEQ ID NO: 48726 - DNA, 20 bp, synthetic construct
  misc_feature 1..20: note = chemically synthesized
  source 1..20: mol_type = other DNA
gctgggcataaaagtcaggg

SEQ ID NO: 48727 - DNA, 20 bp, synthetic construct
  misc_feature 1..20: note = chemically synthesized
  source 1..20: mol_type = other DNA
tgggcataaaagtcagggca

SEQ ID NO: 48728 - DNA, 20 bp, synthetic construct
  misc_feature 1..20: note = chemically synthesized
  source 1..20: mol_type = other DNA
tctgacacaactgtgttcac

SEQ ID NO: 48729 - DNA, 20 bp, synthetic construct
  misc_feature 1..20: note = chemically synthesized
  source 1..20: mol_type = other DNA
tgttcactagcaacctcaaa

SEQ ID NO: 48730 - DNA, 20 bp, synthetic construct
  misc_feature 1..20: note = chemically synthesized
  source 1..20: mol_type = other DNA
gcaacctcaaacagacacca

SEQ ID NO: 48731 - DNA, 20 bp, synthetic construct
  misc_feature 1..20: note = chemically synthesized
  source 1..20: mol_type = other DNA
ccatggtgcatctgactcct

SEQ ID NO: 48732 - DNA, 20 bp, synthetic construct
  misc_feature 1..20: note = chemically synthesized
  source 1..20: mol_type = other DNA
catggtgcatctgactcctg

SEQ ID NO: 48733 - DNA, 20 bp, synthetic construct
  misc_feature 1..20: note = chemically synthesized
  source 1..20: mol_type = other DNA
tggtgcatctgactcctgag

SEQ ID NO: 48734 - DNA, 20 bp, synthetic construct
  misc_feature 1..20: note = chemically synthesized
  source 1..20: mol_type = other DNA
tgcatctgactcctgaggag

SEQ ID NO: 48735 - DNA, 20 bp, synthetic construct
  misc_feature 1..20: note = chemically synthesized
  source 1..20: mol_type = other DNA
agtctgccgttactgccctg

SEQ ID NO: 48736 - DNA, 20 bp, synthetic construct
  misc_feature 1..20: note = chemically synthesized
  source 1..20: mol_type = other DNA
gtctgccgttactgccctgt

SEQ ID NO: 48737 - DNA, 20 bp, synthetic construct
  misc_feature 1..20: note = chemically synthesized
  source 1..20: mol_type = other DNA
tctgccgttactgccctgtg

SEQ ID NO: 48738 - DNA, 20 bp, synthetic construct
  misc_feature 1..20: note = chemically synthesized
  source 1..20: mol_type = other DNA
ccgttactgccctgtggggc

SEQ ID NO: 48739 - DNA, 20 bp, synthetic construct
  misc_feature 1..20: note = chemically synthesized
  source 1..20: mol_type = other DNA
cgttactgccctgtggggca

SEQ ID NO: 48740 - DNA, 20 bp, synthetic construct
  misc_feature 1..20: note = chemically synthesized
  source 1..20: mol_type = other DNA
cctgtggggcaaggtgaacg

SEQ ID NO: 48741 - DNA, 20 bp, synthetic construct
  misc_feature 1..20: note = chemically synthesized
  source 1..20: mol_type = other DNA
gggcaaggtgaacgtggatg

SEQ ID NO: 48742 - DNA, 20 bp, synthetic construct
  misc_feature 1..20: note = chemically synthesized
  source 1..20: mol_type = other DNA
aaggtgaacgtggatgaagt

SEQ ID NO: 48743 - DNA, 20 bp, synthetic construct
  misc_feature 1..20: note = chemically synthesized
  source 1..20: mol_type = other DNA
gtgaacgtggatgaagttgg

SEQ ID NO: 48744 - DNA, 20 bp, synthetic construct
  misc_feature 1..20: note = chemically synthesized
  source 1..20: mol_type = other DNA
acgtggatgaagttggtggt

SEQ ID NO: 48745 - DNA, 20 bp, synthetic construct
  misc_feature 1..20: note = chemically synthesized
  source 1..20: mol_type = other DNA
cgtggatgaagttggtggtg

SEQ ID NO: 48746 - DNA, 20 bp, synthetic construct
  misc_feature 1..20: note = chemically synthesized
  source 1..20: mol_type = other DNA
tgaagttggtggtgaggccc

SEQ ID NO: 48747 - DNA, 20 bp, synthetic construct
  misc_feature 1..20: note = chemically synthesized
  source 1..20: mol_type = other DNA
gaagttggtggtgaggccct

SEQ ID NO: 48748 - DNA, 20 bp, synthetic construct
  misc_feature 1..20: note = chemically synthesized
  source 1..20: mol_type = other DNA
gttggtggtgaggccctggg

SEQ ID NO: 48749 - DNA, 20 bp, synthetic construct
  misc_feature 1..20: note = chemically synthesized
  source 1..20: mol_type = other DNA
ttggtggtgaggccctgggc

SEQ ID NO: 48750 - DNA, 20 bp, synthetic construct
  misc_feature 1..20: note = chemically synthesized
  source 1..20: mol_type = other DNA
tggtgaggccctgggcaggt

SEQ ID NO: 48751 - DNA, 20 bp, synthetic construct
  misc_feature 1..20: note = chemically synthesized
  source 1..20: mol_type = other DNA
gccctgggcaggttggtatc

SEQ ID NO: 48752 - DNA, 20 bp, synthetic construct
  misc_feature 1..20: note = chemically synthesized
  source 1..20: mol_type = other DNA
ccctgggcaggttggtatca

SEQ ID NO: 48753 - DNA, 20 bp, synthetic construct
  misc_feature 1..20: note = chemically synthesized
  source 1..20: mol_type = other DNA
caggttggtatcaaggttac

SEQ ID NO: 48754 - DNA, 20 bp, synthetic construct
  misc_feature 1..20: note = chemically synthesized
  source 1..20: mol_type = other DNA
ttggtatcaaggttacaaga

SEQ ID NO: 48755 - DNA, 20 bp, synthetic construct
  misc_feature 1..20: note = chemically synthesized
  source 1..20: mol_type = other DNA
tggtatcaaggttacaagac

SEQ ID NO: 48756 - DNA, 20 bp, synthetic construct
  misc_feature 1..20: note = chemically synthesized
  source 1..20: mol_type = other DNA
caaggttacaagacaggttt

SEQ ID NO: 48757 - DNA, 20 bp, synthetic construct
  misc_feature 1..20: note = chemically synthesized
  source 1..20: mol_type = other DNA
aaggttacaagacaggttta

SEQ ID NO: 48758 - DNA, 20 bp, synthetic construct
  misc_feature 1..20: note = chemically synthesized
  source 1..20: mol_type = other DNA
ggttacaagacaggtttaag

SEQ ID NO: 48759 - DNA, 20 bp, synthetic construct
  misc_feature 1..20: note = chemically synthesized
  source 1..20: mol_type = other DNA
gacaggtttaaggagaccaa

SEQ ID NO: 48760 - DNA, 20 bp, synthetic construct
  misc_feature 1..20: note = chemically synthesized
  source 1..20: mol_type = other DNA
ttaaggagaccaatagaaac

SEQ ID NO: 48761 - DNA, 20 bp, synthetic construct
  misc_feature 1..20: note = chemically synthesized
  source 1..20: mol_type = other DNA
taaggagaccaatagaaact

SEQ ID NO: 48762 - DNA, 20 bp, synthetic construct
  misc_feature 1..20: note = chemically synthesized
  source 1..20: mol_type = other DNA
accaatagaaactgggcatg

SEQ ID NO: 48763 - DNA, 20 bp, synthetic construct
  misc_feature 1..20: note = chemically synthesized
  source 1..20: mol_type = other DNA
caatagaaactgggcatgtg

SEQ ID NO: 48764 - DNA, 20 bp, synthetic construct
  misc_feature 1..20: note = chemically synthesized
  source 1..20: mol_type = other DNA
agaaactgggcatgtggaga

SEQ ID NO: 48765 - DNA, 20 bp, synthetic construct
  misc_feature 1..20: note = chemically synthesized
  source 1..20: mol_type = other DNA
aaactgggcatgtggagaca

SEQ ID NO: 48766 - DNA, 20 bp, synthetic construct
  misc_feature 1..20: note = chemically synthesized
  source 1..20: mol_type = other DNA
ctgggcatgtggagacagag

SEQ ID NO: 48767 - DNA, 20 bp, synthetic construct
  misc_feature 1..20: note = chemically synthesized
  source 1..20: mol_type = other DNA
gtggagacagagaagactct

SEQ ID NO: 48768 - DNA, 20 bp, synthetic construct
  misc_feature 1..20: note = chemically synthesized
  source 1..20: mol_type = other DNA
tggagacagagaagactctt

SEQ ID NO: 48769 - DNA, 20 bp, synthetic construct
  misc_feature 1..20: note = chemically synthesized
  source 1..20: mol_type = other DNA
gaagactcttgggtttctga

SEQ ID NO: 48770 - DNA, 20 bp, synthetic construct
  misc_feature 1..20: note = chemically synthesized
  source 1..20: mol_type = other DNA
aagactcttgggtttctgat

SEQ ID NO: 48771 - DNA, 20 bp, synthetic construct
  misc_feature 1..20: note = chemically synthesized
  source 1..20: mol_type = other DNA
cactgactctctctgcctat

SEQ ID NO: 48772 - DNA, 20 bp, synthetic construct
  misc_feature 1..20: note = chemically synthesized
  source 1..20: mol_type = other DNA
ttggtctattttcccaccct

SEQ ID NO: 48773 - DNA, 20 bp, synthetic construct
  misc_feature 1..20: note = chemically synthesized
  source 1..20: mol_type = other DNA
tggtctattttcccaccctt

SEQ ID NO: 48774 - DNA, 20 bp, synthetic construct
  misc_feature 1..20: note = chemically synthesized
  source 1..20: mol_type = other DNA
ttttcccacccttaggctgc

SEQ ID NO: 48775 - DNA, 20 bp, synthetic construct
  misc_feature 1..20: note = chemically synthesized
  source 1..20: mol_type = other DNA
tcccacccttaggctgctgg

SEQ ID NO: 48776 - DNA, 20 bp, synthetic construct
  misc_feature 1..20: note = chemically synthesized
  source 1..20: mol_type = other DNA
ggctgctggtggtctaccct

SEQ ID NO: 48777 - DNA, 20 bp, synthetic construct
  misc_feature 1..20: note = chemically synthesized
  source 1..20: mol_type = other DNA
tggtggtctacccttggacc

SEQ ID NO: 48778 - DNA, 20 bp, synthetic construct
  misc_feature 1..20: note = chemically synthesized
  source 1..20: mol_type = other DNA
gtggtctacccttggaccca

SEQ ID NO: 48779 - DNA, 20 bp, synthetic construct
  misc_feature 1..20: note = chemically synthesized
  source 1..20: mol_type = other DNA
tggtctacccttggacccag

SEQ ID NO: 48780 - DNA, 20 bp, synthetic construct
  misc_feature 1..20: note = chemically synthesized
  source 1..20: mol_type = other DNA
cttggacccagaggttcttt

SEQ ID NO: 48781 - DNA, 20 bp, synthetic construct
  misc_feature 1..20: note = chemically synthesized
  source 1..20: mol_type = other DNA
cagaggttctttgagtcctt

SEQ ID NO: 48782 - DNA, 20 bp, synthetic construct
  misc_feature 1..20: note = chemically synthesized
  source 1..20: mol_type = other DNA
agaggttctttgagtccttt

SEQ ID NO: 48783 - DNA, 20 bp, synthetic construct
  misc_feature 1..20: note = chemically synthesized
  source 1..20: mol_type = other DNA
gaggttctttgagtcctttg

SEQ ID NO: 48784 - DNA, 20 bp, synthetic construct
  misc_feature 1..20: note = chemically synthesized
  source 1..20: mol_type = other DNA
gtccactcctgatgctgtta

SEQ ID NO: 48785 - DNA, 20 bp, synthetic construct
  misc_feature 1..20: note = chemically synthesized
  source 1..20: mol_type = other DNA
tccactcctgatgctgttat

SEQ ID NO: 48786 - DNA, 20 bp, synthetic construct
  misc_feature 1..20: note = chemically synthesized
  source 1..20: mol_type = other DNA
atgctgttatgggcaaccct

SEQ ID NO: 48787 - DNA, 20 bp, synthetic construct
  misc_feature 1..20: note = chemically synthesized
  source 1..20: mol_type = other DNA
tgctgttatgggcaacccta

SEQ ID NO: 48788 - DNA, 20 bp, synthetic construct
  misc_feature 1..20: note = chemically synthesized
  source 1..20: mol_type = other DNA
ttatgggcaaccctaaggtg

SEQ ID NO: 48789 - DNA, 20 bp, synthetic construct
  misc_feature 1..20: note = chemically synthesized
  source 1..20: mol_type = other DNA
tatgggcaaccctaaggtga

SEQ ID NO: 48790 - DNA, 20 bp, synthetic construct
  misc_feature 1..20: note = chemically synthesized
  source 1..20: mol_type = other DNA
aaccctaaggtgaaggctca

SEQ ID NO: 48791 - DNA, 20 bp, synthetic construct
  misc_feature 1..20: note = chemically synthesized
  source 1..20: mol_type = other DNA
ctaaggtgaaggctcatggc

SEQ ID NO: 48792 - DNA, 20 bp, synthetic construct
  misc_feature 1..20: note = chemically synthesized
  source 1..20: mol_type = other DNA
ggtgaaggctcatggcaaga

SEQ ID NO: 48793 - DNA, 20 bp, synthetic construct
  misc_feature 1..20: note = chemically synthesized
  source 1..20: mol_type = other DNA
gctcatggcaagaaagtgct

SEQ ID NO: 48794 - DNA, 20 bp, synthetic construct
  misc_feature 1..20: note = chemically synthesized
  source 1..20: mol_type = other DNA
aagaaagtgctcggtgcctt

SEQ ID NO: 48795 - DNA, 20 bp, synthetic construct
  misc_feature 1..20: note = chemically synthesized
  source 1..20: mol_type = other DNA
gtgctcggtgcctttagtga

SEQ ID NO: 48796 - DNA, 20 bp, synthetic construct
  misc_feature 1..20: note = chemically synthesized
  source 1..20: mol_type = other DNA
cggtgcctttagtgatggcc

SEQ ID NO: 48797 - DNA, 20 bp, synthetic construct
  misc_feature 1..20: note = chemically synthesized
  source 1..20: mol_type = other DNA
tagtgatggcctggctcacc

SEQ ID NO: 48798 - DNA, 20 bp, synthetic construct
  misc_feature 1..20: note = chemically synthesized
  source 1..20: mol_type = other DNA
tggctcacctggacaacctc

SEQ ID NO: 48799 - DNA, 20 bp, synthetic construct
  misc_feature 1..20: note = chemically synthesized
  source 1..20: mol_type = other DNA
ggctcacctggacaacctca

SEQ ID NO: 48800 - DNA, 20 bp, synthetic construct
  misc_feature 1..20: note = chemically synthesized
  source 1..20: mol_type = other DNA
gctcacctggacaacctcaa

SEQ ID NO: 48801 - DNA, 20 bp, synthetic construct
  misc_feature 1..20: note = chemically synthesized
  source 1..20: mol_type = other DNA
aagggcacctttgccacact

SEQ ID NO: 48802 - DNA, 20 bp, synthetic construct
  misc_feature 1..20: note = chemically synthesized
  source 1..20: mol_type = other DNA
gcacctttgccacactgagt

SEQ ID NO: 48803 - DNA, 20 bp, synthetic construct
  misc_feature 1..20: note = chemically synthesized
  source 1..20: mol_type = other DNA
tgagtgagctgcactgtgac

SEQ ID NO: 48804 - DNA, 20 bp, synthetic construct
  misc_feature 1..20: note = chemically synthesized
  source 1..20: mol_type = other DNA
gcactgtgacaagctgcacg

SEQ ID NO: 48805 - DNA, 20 bp, synthetic construct
  misc_feature 1..20: note = chemically synthesized
  source 1..20: mol_type = other DNA
acaagctgcacgtggatcct

SEQ ID NO: 48806 - DNA, 20 bp, synthetic construct
  misc_feature 1..20: note = chemically synthesized
  source 1..20: mol_type = other DNA
cacgtggatcctgagaactt

SEQ ID NO: 48807 - DNA, 20 bp, synthetic construct
  misc_feature 1..20: note = chemically synthesized
  source 1..20: mol_type = other DNA
acgtggatcctgagaacttc

SEQ ID NO: 48808 - DNA, 20 bp, synthetic construct
  misc_feature 1..20: note = chemically synthesized
  source 1..20: mol_type = other DNA
cgtggatcctgagaacttca

SEQ ID NO: 48809 - DNA, 20 bp, synthetic construct
  misc_feature 1..20: note = chemically synthesized
  source 1..20: mol_type = other DNA
gatcctgagaacttcagggt

SEQ ID NO: 48810 - DNA, 20 bp, synthetic construct
  misc_feature 1..20: note = chemically synthesized
  source 1..20: mol_type = other DNA
agaacttcagggtgagtcta

SEQ ID NO: 48811 - DNA, 20 bp, synthetic construct
  misc_feature 1..20: note = chemically synthesized
  source 1..20: mol_type = other DNA
gaacttcagggtgagtctat

SEQ ID NO: 48812 - DNA, 20 bp, synthetic construct
  misc_feature 1..20: note = chemically synthesized
  source 1..20: mol_type = other DNA
ttctttccccttcttttcta

SEQ ID NO: 48813 - DNA, 20 bp, synthetic construct
  misc_feature 1..20: note = chemically synthesized
  source 1..20: mol_type = other DNA
tccccttcttttctatggtt

SEQ ID NO: 48814 - DNA, 20 bp, synthetic construct
  misc_feature 1..20: note = chemically synthesized
  source 1..20: mol_type = other DNA
ctatggttaagttcatgtca

SEQ ID NO: 48815 - DNA, 20 bp, synthetic construct
  misc_feature 1..20: note = chemically synthesized
  source 1..20: mol_type = other DNA
tatggttaagttcatgtcat

SEQ ID NO: 48816 - DNA, 20 bp, synthetic construct
  misc_feature 1..20: note = chemically synthesized
  source 1..20: mol_type = other DNA
ggttaagttcatgtcatagg

SEQ ID NO: 48817 - DNA, 20 bp, synthetic construct
  misc_feature 1..20: note = chemically synthesized
  source 1..20: mol_type = other DNA
gttaagttcatgtcatagga

SEQ ID NO: 48818 - DNA, 20 bp, synthetic construct
  misc_feature 1..20: note = chemically synthesized
  source 1..20: mol_type = other DNA
ttaagttcatgtcataggaa

SEQ ID NO: 48819 - DNA, 20 bp, synthetic construct
  misc_feature 1..20: note = chemically synthesized
  source 1..20: mol_type = other DNA
taagttcatgtcataggaag

SEQ ID NO: 48820 - DNA, 20 bp, synthetic construct
  misc_feature 1..20: note = chemically synthesized
  source 1..20: mol_type = other DNA
tcatgtcataggaaggggat

SEQ ID NO: 48821 - DNA, 20 bp, synthetic construct
  misc_feature 1..20: note = chemically synthesized
  source 1..20: mol_type = other DNA
cataggaaggggataagtaa

SEQ ID NO: 48822 - DNA, 20 bp, synthetic construct
  misc_feature 1..20: note = chemically synthesized
  source 1..20: mol_type = other DNA
ataggaaggggataagtaac

SEQ ID NO: 48823 - DNA, 20 bp, synthetic construct
  misc_feature 1..20: note = chemically synthesized
  source 1..20: mol_type = other DNA
taggaaggggataagtaaca

SEQ ID NO: 48824 - DNA, 20 bp, synthetic construct
  misc_feature 1..20: note = chemically synthesized
  source 1..20: mol_type = other DNA
aggggataagtaacagggta

SEQ ID NO: 48825 - DNA, 20 bp, synthetic construct
  misc_feature 1..20: note = chemically synthesized
  source 1..20: mol_type = other DNA
ataagtaacagggtacagtt

SEQ ID NO: 48826 - DNA, 20 bp, synthetic construct
  misc_feature 1..20: note = chemically synthesized
  source 1..20: mol_type = other DNA
taacagggtacagtttagaa

SEQ ID NO: 48827 - DNA, 20 bp, synthetic construct
  misc_feature 1..20: note = chemically synthesized
  source 1..20: mol_type = other DNA
aacagggtacagtttagaat

SEQ ID NO: 48828 - DNA, 20 bp, synthetic construct
  misc_feature 1..20: note = chemically synthesized
  source 1..20: mol_type = other DNA
gtacagtttagaatgggaaa

SEQ ID NO: 48829 - DNA, 20 bp, synthetic construct
  misc_feature 1..20: note = chemically synthesized
  source 1..20: mol_type = other DNA
aaacagacgaatgattgcat

SEQ ID NO: 48830 - DNA, 20 bp, synthetic construct
  misc_feature 1..20: note = chemically synthesized
  source 1..20: mol_type = other DNA
gacgaatgattgcatcagtg

SEQ ID NO: 48831 - DNA, 20 bp, synthetic construct
  misc_feature 1..20: note = chemically synthesized
  source 1..20: mol_type = other DNA
gaatgattgcatcagtgtgg

SEQ ID NO: 48832 - DNA, 20 bp, synthetic construct
  misc_feature 1..20: note = chemically synthesized
  source 1..20: mol_type = other DNA
ttgcatcagtgtggaagtct

SEQ ID NO: 48833 - DNA, 20 bp, synthetic construct
  misc_feature 1..20: note = chemically synthesized
  source 1..20: mol_type = other DNA
tgcatcagtgtggaagtctc

SEQ ID NO: 48834 - DNA, 20 bp, synthetic construct
  misc_feature 1..20: note = chemically synthesized
  source 1..20: mol_type = other DNA
tggaagtctcaggatcgttt

SEQ ID NO: 48835 - DNA, 20 bp, synthetic construct
  misc_feature 1..20: note = chemically synthesized
  source 1..20: mol_type = other DNA
cttaacattgtgtataacaa

SEQ ID NO: 48836 - DNA, 20 bp, synthetic construct
  misc_feature 1..20: note = chemically synthesized
  source 1..20: mol_type = other DNA
ttaacattgtgtataacaaa

SEQ ID NO: 48837 - DNA, 20 bp, synthetic construct
  misc_feature 1..20: note = chemically synthesized
  source 1..20: mol_type = other DNA
taacaaaaggaaatatctct

SEQ ID NO: 48838 - DNA, 20 bp, synthetic construct
  misc_feature 1..20: note = chemically synthesized
  source 1..20: mol_type = other DNA
aaatatctctgagatacatt

SEQ ID NO: 48839 - DNA, 20 bp, synthetic construct
  misc_feature 1..20: note = chemically synthesized
  source 1..20: mol_type = other DNA
acttaaaaaaaaactttaca

SEQ ID NO: 48840 - DNA, 20 bp, synthetic construct
  misc_feature 1..20: note = chemically synthesized
  source 1..20: mol_type = other DNA
aaaactttacacagtctgcc

SEQ ID NO: 48841 - DNA, 20 bp, synthetic construct
  misc_feature 1..20: note = chemically synthesized
  source 1..20: mol_type = other DNA
ctgcctagtacattactatt

SEQ ID NO: 48842 - DNA, 20 bp, synthetic construct
  misc_feature 1..20: note = chemically synthesized
  source 1..20: mol_type = other DNA
ataatcattatacatattta

SEQ ID NO: 48843 - DNA, 20 bp, synthetic construct
  misc_feature 1..20: note = chemically synthesized
  source 1..20: mol_type = other DNA
taatcattatacatatttat

SEQ ID NO: 48844 - DNA, 20 bp, synthetic construct
  misc_feature 1..20: note = chemically synthesized
  source 1..20: mol_type = other DNA
ttatacatatttatgggtta

SEQ ID NO: 48845 - DNA, 20 bp, synthetic construct
  misc_feature 1..20: note = chemically synthesized
  source 1..20: mol_type = other DNA
tgtacacatattgaccaaat

SEQ ID NO: 48846 - DNA, 20 bp, synthetic construct
  misc_feature 1..20: note = chemically synthesized
  source 1..20: mol_type = other DNA
gtacacatattgaccaaatc

SEQ ID NO: 48847 - DNA, 20 bp, synthetic construct
  misc_feature 1..20: note = chemically synthesized
  source 1..20: mol_type = other DNA
tacacatattgaccaaatca

SEQ ID NO: 48848 - DNA, 20 bp, synthetic construct
  misc_feature 1..20: note = chemically synthesized
  source 1..20: mol_type = other DNA
tttccctaatctctttcttt

SEQ ID NO: 48849 - DNA, 20 bp, synthetic construct
  misc_feature 1..20: note = chemically synthesized
  source 1..20: mol_type = other DNA
ttccctaatctctttctttc

SEQ ID NO: 48850 - DNA, 20 bp, synthetic construct
  misc_feature 1..20: note = chemically synthesized
  source 1..20: mol_type = other DNA
tccctaatctctttctttca

SEQ ID NO: 48851 - DNA, 20 bp, synthetic construct
  misc_feature 1..20: note = chemically synthesized
  source 1..20: mol_type = other DNA
tgcctctttgcaccattcta

SEQ ID NO: 48852 - DNA, 20 bp, synthetic construct
  misc_feature 1..20: note = chemically synthesized
  source 1..20: mol_type = other DNA
tgcaccattctaaagaataa

SEQ ID NO: 48853 - DNA, 20 bp, synthetic construct
  misc_feature 1..20: note = chemically synthesized
  source 1..20: mol_type = other DNA
agaataacagtgataatttc

SEQ ID NO: 48854 - DNA, 20 bp, synthetic construct
  misc_feature 1..20: note = chemically synthesized
  source 1..20: mol_type = other DNA
gaataacagtgataatttct

SEQ ID NO: 48855 - DNA, 20 bp, synthetic construct
  misc_feature 1..20: note = chemically synthesized
  source 1..20: mol_type = other DNA
acagtgataatttctgggtt

SEQ ID NO: 48856 - DNA, 20 bp, synthetic construct
  misc_feature 1..20: note = chemically synthesized
  source 1..20: mol_type = other DNA
cagtgataatttctgggtta

SEQ ID NO: 48857 - DNA, 20 bp, synthetic construct
  misc_feature 1..20: note = chemically synthesized
  source 1..20: mol_type = other DNA
taatttctgggttaaggcaa

SEQ ID NO: 48858 - DNA, 20 bp, synthetic construct
  misc_feature 1..20: note = chemically synthesized
  source 1..20: mol_type = other DNA
atataaattgtaactgatgt

SEQ ID NO: 48859 - DNA, 20 bp, synthetic construct
  misc_feature 1..20: note = chemically synthesized
  source 1..20: mol_type = other DNA
ataaattgtaactgatgtaa

SEQ ID NO: 48860 - DNA, 20 bp, synthetic construct
  misc_feature 1..20: note = chemically synthesized
  source 1..20: mol_type = other DNA
taaattgtaactgatgtaag

SEQ ID NO: 48861 - DNA, 20 bp, synthetic construct
  misc_feature 1..20: note = chemically synthesized
  source 1..20: mol_type = other DNA
aagaggtttcatattgctaa

SEQ ID NO: 48862 - DNA, 20 bp, synthetic construct
  misc_feature 1..20: note = chemically synthesized
  source 1..20: mol_type = other DNA
aggtttcatattgctaatag

SEQ ID NO: 48863 - DNA, 20 bp, synthetic construct
  misc_feature 1..20: note = chemically synthesized
  source 1..20: mol_type = other DNA
tgctaatagcagctacaatc

SEQ ID NO: 48864 - DNA, 20 bp, synthetic construct
  misc_feature 1..20: note = chemically synthesized
  source 1..20: mol_type = other DNA
accattctgcttttatttta

SEQ ID NO: 48865 - DNA, 20 bp, synthetic construct
  misc_feature 1..20: note = chemically synthesized
  source 1..20: mol_type = other DNA
ttctgcttttattttatggt

SEQ ID NO: 48866 - DNA, 20 bp, synthetic construct
  misc_feature 1..20: note = chemically synthesized
  source 1..20: mol_type = other DNA
tctgcttttattttatggtt

SEQ ID NO: 48867 - DNA, 20 bp, synthetic construct
  misc_feature 1..20: note = chemically synthesized
  source 1..20: mol_type = other DNA
ttttattttatggttgggat

SEQ ID NO: 48868 - DNA, 20 bp, synthetic construct
  misc_feature 1..20: note = chemically synthesized
  source 1..20: mol_type = other DNA
tttattttatggttgggata

SEQ ID NO: 48869 - DNA, 20 bp, synthetic construct
  misc_feature 1..20: note = chemically synthesized
  source 1..20: mol_type = other DNA
ttttatggttgggataaggc

SEQ ID NO: 48870 - DNA, 20 bp, synthetic construct
  misc_feature 1..20: note = chemically synthesized
  source 1..20: mol_type = other DNA
ggataaggctggattattct

SEQ ID NO: 48871 - DNA, 20 bp, synthetic construct
  misc_feature 1..20: note = chemically synthesized
  source 1..20: mol_type = other DNA
ggctggattattctgagtcc

SEQ ID NO: 48872 - DNA, 20 bp, synthetic construct
  misc_feature 1..20: note = chemically synthesized
  source 1..20: mol_type = other DNA
ggattattctgagtccaagc

SEQ ID NO: 48873 - DNA, 20 bp, synthetic construct
  misc_feature 1..20: note = chemically synthesized
  source 1..20: mol_type = other DNA
gattattctgagtccaagct

SEQ ID NO: 48874 - DNA, 20 bp, synthetic construct
  misc_feature 1..20: note = chemically synthesized
  source 1..20: mol_type = other DNA
tacctcttatcttcctccca

SEQ ID NO: 48875 - DNA, 20 bp, synthetic construct
  misc_feature 1..20: note = chemically synthesized
  source 1..20: mol_type = other DNA
tatcttcctcccacagctcc

SEQ ID NO: 48876 - DNA, 20 bp, synthetic construct
  misc_feature 1..20: note = chemically synthesized
  source 1..20: mol_type = other DNA
atcttcctcccacagctcct

SEQ ID NO: 48877 - DNA, 20 bp, synthetic construct
  misc_feature 1..20: note = chemically synthesized
  source 1..20: mol_type = other DNA
acagctcctgggcaacgtgc

SEQ ID NO: 48878 - DNA, 20 bp, synthetic construct
  misc_feature 1..20: note = chemically synthesized
  source 1..20: mol_type = other DNA
caacgtgctggtctgtgtgc

SEQ ID NO: 48879 - DNA, 20 bp, synthetic construct
  misc_feature 1..20: note = chemically synthesized
  source 1..20: mol_type = other DNA
tgtgtgctggcccatcactt

SEQ ID NO: 48880 - DNA, 20 bp, synthetic construct
  misc_feature 1..20: note = chemically synthesized
  source 1..20: mol_type = other DNA
gctggcccatcactttggca

SEQ ID NO: 48881 - DNA, 20 bp, synthetic construct
  misc_feature 1..20: note = chemically synthesized
  source 1..20: mol_type = other DNA
tggcaaagaattcaccccac

SEQ ID NO: 48882 - DNA, 20 bp, synthetic construct
  misc_feature 1..20: note = chemically synthesized
  source 1..20: mol_type = other DNA
aagaattcaccccaccagtg

SEQ ID NO: 48883 - DNA, 20 bp, synthetic construct
  misc_feature 1..20: note = chemically synthesized
  source 1..20: mol_type = other DNA
agaattcaccccaccagtgc

SEQ ID NO: 48884 - DNA, 20 bp, synthetic construct
  misc_feature 1..20: note = chemically synthesized
  source 1..20: mol_type = other DNA
caccagtgcaggctgcctat

SEQ ID NO: 48885 - DNA, 20 bp, synthetic construct
  misc_feature 1..20: note = chemically synthesized
  source 1..20: mol_type = other DNA
agtgcaggctgcctatcaga

SEQ ID NO: 48886 - DNA, 20 bp, synthetic construct
  misc_feature 1..20: note = chemically synthesized
  source 1..20: mol_type = other DNA
gcaggctgcctatcagaaag

SEQ ID NO: 48887 - DNA, 20 bp, synthetic construct
  misc_feature 1..20: note = chemically synthesized
  source 1..20: mol_type = other DNA
ggctgcctatcagaaagtgg

SEQ ID NO: 48888 - DNA, 20 bp, synthetic construct
  misc_feature 1..20: note = chemically synthesized
  source 1..20: mol_type = other DNA
gcctatcagaaagtggtggc

SEQ ID NO: 48889 - DNA, 20 bp, synthetic construct
  misc_feature 1..20: note = chemically synthesized
  source 1..20: mol_type = other DNA
tcagaaagtggtggctggtg

SEQ ID NO: 48890 - DNA, 20 bp, synthetic construct
  misc_feature 1..20: note = chemically synthesized
  source 1..20: mol_type = other DNA
ggctggtgtggctaatgccc

SEQ ID NO: 48891 - DNA, 20 bp, synthetic construct
  misc_feature 1..20: note = chemically synthesized
  source 1..20: mol_type = other DNA
tggctaatgccctggcccac

SEQ ID NO: 48892 - DNA, 20 bp, synthetic construct
  misc_feature 1..20: note = chemically synthesized
  source 1..20: mol_type = other DNA
cctggcccacaagtatcact

SEQ ID NO: 48893 - DNA, 20 bp, synthetic construct
  misc_feature 1..20: note = chemically synthesized
  source 1..20: mol_type = other DNA
ttgctgtccaatttctatta

SEQ ID NO: 48894 - DNA, 20 bp, synthetic construct
  misc_feature 1..20: note = chemically synthesized
  source 1..20: mol_type = other DNA
tgctgtccaatttctattaa

SEQ ID NO: 48895 - DNA, 20 bp, synthetic construct
  misc_feature 1..20: note = chemically synthesized
  source 1..20: mol_type = other DNA
taaaggttcctttgttccct

SEQ ID NO: 48896 - DNA, 20 bp, synthetic construct
  misc_feature 1..20: note = chemically synthesized
  source 1..20: mol_type = other DNA
cctaagtccaactactaaac

SEQ ID NO: 48897 - DNA, 20 bp, synthetic construct
  misc_feature 1..20: note = chemically synthesized
  source 1..20: mol_type = other DNA
ctaagtccaactactaaact

SEQ ID NO: 48898 - DNA, 20 bp, synthetic construct
  misc_feature 1..20: note = chemically synthesized
  source 1..20: mol_type = other DNA
taagtccaactactaaactg

SEQ ID NO: 48899 - DNA, 20 bp, synthetic construct
  misc_feature 1..20: note = chemically synthesized
  source 1..20: mol_type = other DNA
aagtccaactactaaactgg

SEQ ID NO: 48900 - DNA, 20 bp, synthetic construct
  misc_feature 1..20: note = chemically synthesized
  source 1..20: mol_type = other DNA
ctaaactgggggatattatg

SEQ ID NO: 48901 - DNA, 20 bp, synthetic construct
  misc_feature 1..20: note = chemically synthesized
  source 1..20: mol_type = other DNA
taaactgggggatattatga

SEQ ID NO: 48902 - DNA, 20 bp, synthetic construct
  misc_feature 1..20: note = chemically synthesized
  source 1..20: mol_type = other DNA
aaactgggggatattatgaa

SEQ ID NO: 48903 - DNA, 20 bp, synthetic construct
  misc_feature 1..20: note = chemically synthesized
  source 1..20: mol_type = other DNA
gggatattatgaagggcctt

SEQ ID NO: 48904 - DNA, 20 bp, synthetic construct
  misc_feature 1..20: note = chemically synthesized
  source 1..20: mol_type = other DNA
tatgaagggccttgagcatc

SEQ ID NO: 48905 - DNA, 20 bp, synthetic construct
  misc_feature 1..20: note = chemically synthesized
  source 1..20: mol_type = other DNA
tttctgaatattttactaaa

SEQ ID NO: 48906 - DNA, 20 bp, synthetic construct
  misc_feature 1..20: note = chemically synthesized
  source 1..20: mol_type = other DNA
ttctgaatattttactaaaa

SEQ ID NO: 48907 - DNA, 20 bp, synthetic construct
  misc_feature 1..20: note = chemically synthesized
  source 1..20: mol_type = other DNA
tctgaatattttactaaaaa

SEQ ID NO: 48908 - DNA, 20 bp, synthetic construct
  misc_feature 1..20: note = chemically synthesized
  source 1..20: mol_type = other DNA
attttactaaaaagggaatg

SEQ ID NO: 48909 - DNA, 20 bp, synthetic construct
  misc_feature 1..20: note = chemically synthesized
  source 1..20: mol_type = other DNA
ttttactaaaaagggaatgt

SEQ ID NO: 48910 - DNA, 20 bp, synthetic construct
  misc_feature 1..20: note = chemically synthesized
  source 1..20: mol_type = other DNA
ttactaaaaagggaatgtgg

SEQ ID NO: 48911 - DNA, 20 bp, synthetic construct
  misc_feature 1..20: note = chemically synthesized
  source 1..20: mol_type = other DNA
tactaaaaagggaatgtggg

SEQ ID NO: 48912 - DNA, 20 bp, synthetic construct
  misc_feature 1..20: note = chemically synthesized
  source 1..20: mol_type = other DNA
aaaaagggaatgtgggaggt

SEQ ID NO: 48913 - DNA, 20 bp, synthetic construct
  misc_feature 1..20: note = chemically synthesized
  source 1..20: mol_type = other DNA
gtcagtgcatttaaaacata

SEQ ID NO: 48914 - DNA, 20 bp, synthetic construct
  misc_feature 1..20: note = chemically synthesized
  source 1..20: mol_type = other DNA
atttaaaacataaagaaatg

SEQ ID NO: 48915 - DNA, 20 bp, synthetic construct
  misc_feature 1..20: note = chemically synthesized
  source 1..20: mol_type = other DNA
ttaaaacataaagaaatgaa

SEQ ID NO: 48916 - DNA, 20 bp, synthetic construct
  misc_feature 1..20: note = chemically synthesized
  source 1..20: mol_type = other DNA
aacataaagaaatgaagagc

SEQ ID NO: 48917 - DNA, 20 bp, synthetic construct
  misc_feature 1..20: note = chemically synthesized
  source 1..20: mol_type = other DNA
tgaagagctagttcaaacct

SEQ ID NO: 48918 - DNA, 20 bp, synthetic construct
  misc_feature 1..20: note = chemically synthesized
  source 1..20: mol_type = other DNA
gaagagctagttcaaacctt

SEQ ID NO: 48919 - DNA, 20 bp, synthetic construct
  misc_feature 1..20: note = chemically synthesized
  source 1..20: mol_type = other DNA
ctatatcttaaactccatga

SEQ ID NO: 48920 - DNA, 20 bp, synthetic construct
  misc_feature 1..20: note = chemically synthesized
  source 1..20: mol_type = other DNA
tatcttaaactccatgaaag

SEQ ID NO: 48921 - DNA, 20 bp, synthetic construct
  misc_feature 1..20: note = chemically synthesized
  source 1..20: mol_type = other DNA
atcttaaactccatgaaaga

SEQ ID NO: 48922 - DNA, 20 bp, synthetic construct
  misc_feature 1..20: note = chemically synthesized
  source 1..20: mol_type = other DNA
taaactccatgaaagaaggt

SEQ ID NO: 48923 - DNA, 20 bp, synthetic construct
  misc_feature 1..20: note = chemically synthesized
  source 1..20: mol_type = other DNA
aaactccatgaaagaaggtg

SEQ ID NO: 48924 - DNA, 20 bp, synthetic construct
  misc_feature 1..20: note = chemically synthesized
  source 1..20: mol_type = other DNA
aaagaaggtgaggctgcaaa

SEQ ID NO: 48925 - DNA, 20 bp, synthetic construct
  misc_feature 1..20: note = chemically synthesized
  source 1..20: mol_type = other DNA
tgcaaacagctaatgcacat

SEQ ID NO: 48926 - DNA, 20 bp, synthetic construct
  misc_feature 1..20: note = chemically synthesized
  source 1..20: mol_type = other DNA
cagctaatgcacattggcaa

SEQ ID NO: 48927 - DNA, 20 bp, synthetic construct
  misc_feature 1..20: note = chemically synthesized
  source 1..20: mol_type = other DNA
catatgccttattcatccct

SEQ ID NO: 48928 - DNA, 20 bp, synthetic construct
  misc_feature 1..20: note = chemically synthesized
  source 1..20: mol_type = other DNA
gccttattcatccctcagaa

SEQ ID NO: 48929 - DNA, 20 bp, synthetic construct
  misc_feature 1..20: note = chemically synthesized
  source 1..20: mol_type = other DNA
ccttattcatccctcagaaa

SEQ ID NO: 48930 - DNA, 20 bp, synthetic construct
  misc_feature 1..20: note = chemically synthesized
  source 1..20: mol_type = other DNA
catccctcagaaaaggattc

SEQ ID NO: 48931 - DNA, 20 bp, synthetic construct
  misc_feature 1..20: note = chemically synthesized
  source 1..20: mol_type = other DNA
ccctcagaaaaggattcaag

SEQ ID NO: 48932 - DNA, 20 bp, synthetic construct
  misc_feature 1..20: note = chemically synthesized
  source 1..20: mol_type = other DNA
ctcagaaaaggattcaagta

SEQ ID NO: 48933 - DNA, 20 bp, synthetic construct
  misc_feature 1..20: note = chemically synthesized
  source 1..20: mol_type = other DNA
tcagaaaaggattcaagtag

SEQ ID NO: 48934 - DNA, 20 bp, synthetic construct
  misc_feature 1..20: note = chemically synthesized
  source 1..20: mol_type = other DNA
attcaagtagaggcttgatt

SEQ ID NO: 48935 - DNA, 20 bp, synthetic construct
  misc_feature 1..20: note = chemically synthesized
  source 1..20: mol_type = other DNA
tcaagtagaggcttgatttg

SEQ ID NO: 48936 - DNA, 20 bp, synthetic construct
  misc_feature 1..20: note = chemically synthesized
  source 1..20: mol_type = other DNA
caagtagaggcttgatttgg

SEQ ID NO: 48937 - DNA, 20 bp, synthetic construct
  misc_feature 1..20: note = chemically synthesized
  source 1..20: mol_type = other DNA
gaggcttgatttggaggtta

SEQ ID NO: 48938 - DNA, 20 bp, synthetic construct
  misc_feature 1..20: note = chemically synthesized
  source 1..20: mol_type = other DNA
ttttacattacttattgttt

SEQ ID NO: 48939 - DNA, 20 bp, synthetic construct
  misc_feature 1..20: note = chemically synthesized
  source 1..20: mol_type = other DNA
tttgcttatcctgcatctct

SEQ ID NO: 48940 - DNA, 20 bp, synthetic construct
  misc_feature 1..20: note = chemically synthesized
  source 1..20: mol_type = other DNA
ctctcagccttgactccact

SEQ ID NO: 48941 - DNA, 20 bp, synthetic construct
  misc_feature 1..20: note = chemically synthesized
  source 1..20: mol_type = other DNA
ctccactcagttctcttgct

SEQ ID NO: 48942 - DNA, 20 bp, synthetic construct
  misc_feature 1..20: note = chemically synthesized
  source 1..20: mol_type = other DNA
ccactcagttctcttgctta

SEQ ID NO: 48943 - DNA, 20 bp, synthetic construct
  misc_feature 1..20: note = chemically synthesized
  source 1..20: mol_type = other DNA
gagataccacctttcccctg

SEQ ID NO: 48944 - DNA, 20 bp, synthetic construct
  misc_feature 1..20: note = chemically synthesized
  source 1..20: mol_type = other DNA
agtgttccttccatgtttta

SEQ ID NO: 48945 - DNA, 20 bp, synthetic construct
  misc_feature 1..20: note = chemically synthesized
  source 1..20: mol_type = other DNA
ttccttccatgttttacggc

SEQ ID NO: 48946 - DNA, 20 bp, synthetic construct
  misc_feature 1..20: note = chemically synthesized
  source 1..20: mol_type = other DNA
ttccatgttttacggcgaga

SEQ ID NO: 48947 - DNA, 20 bp, synthetic construct
  misc_feature 1..20: note = chemically synthesized
  source 1..20: mol_type = other DNA
cgagatggtttctcctcgcc

SEQ ID NO: 48948 - DNA, 20 bp, synthetic construct
  misc_feature 1..20: note = chemically synthesized
  source 1..20: mol_type = other DNA
tttctcctcgcctggccact

SEQ ID NO: 48949 - DNA, 20 bp, synthetic construct
  misc_feature 1..20: note = chemically synthesized
  source 1..20: mol_type = other DNA
ctcgcctggccactcagcct

SEQ ID NO: 48950 - DNA, 20 bp, synthetic construct
  misc_feature 1..20: note = chemically synthesized
  source 1..20: mol_type = other DNA
tagttgtctctgttgtctta

SEQ ID NO: 48951 - DNA, 20 bp, synthetic construct
  misc_feature 1..20: note = chemically synthesized
  source 1..20: mol_type = other DNA
gttgtctctgttgtcttata

SEQ ID NO: 48952 - DNA, 20 bp, synthetic construct
  misc_feature 1..20: note = chemically synthesized
  source 1..20: mol_type = other DNA
ttgtctctgttgtcttatag

SEQ ID NO: 48953 - DNA, 20 bp, synthetic construct
  misc_feature 1..20: note = chemically synthesized
  source 1..20: mol_type = other DNA
gtcttatagaggtctacttg

SEQ ID NO: 48954 - DNA, 20 bp, synthetic construct
  misc_feature 1..20: note = chemically synthesized
  source 1..20: mol_type = other DNA
ttatagaggtctacttgaag

SEQ ID NO: 48955 - DNA, 20 bp, synthetic construct
  misc_feature 1..20: note = chemically synthesized
  source 1..20: mol_type = other DNA
tatagaggtctacttgaaga

SEQ ID NO: 48956 - DNA, 20 bp, synthetic construct
  misc_feature 1..20: note = chemically synthesized
  source 1..20: mol_type = other DNA
tctacttgaagaaggaaaaa

SEQ ID NO: 48957 - DNA, 20 bp, synthetic construct
  misc_feature 1..20: note = chemically synthesized
  source 1..20: mol_type = other DNA
ctacttgaagaaggaaaaac

SEQ ID NO: 48958 - DNA, 20 bp, synthetic construct
  misc_feature 1..20: note = chemically synthesized
  source 1..20: mol_type = other DNA
tacttgaagaaggaaaaaca

SEQ ID NO: 48959 - DNA, 20 bp, synthetic construct
  misc_feature 1..20: note = chemically synthesized
  source 1..20: mol_type = other DNA
acttgaagaaggaaaaacag

SEQ ID NO: 48960 - DNA, 20 bp, synthetic construct
  misc_feature 1..20: note = chemically synthesized
  source 1..20: mol_type = other DNA
agaaggaaaaacaggggtca

SEQ ID NO: 48961 - DNA, 20 bp, synthetic construct
  misc_feature 1..20: note = chemically synthesized
  source 1..20: mol_type = other DNA
tcatggtttgactgtcctgt

SEQ ID NO: 48962 - DNA, 20 bp, synthetic construct
  misc_feature 1..20: note = chemically synthesized
  source 1..20: mol_type = other DNA
ttccctgcctcccccactca

SEQ ID NO: 48963 - DNA, 20 bp, synthetic construct
  misc_feature 1..20: note = chemically synthesized
  source 1..20: mol_type = other DNA
ctcccccactcacagtgacc

SEQ ID NO: 48964 - DNA, 20 bp, synthetic construct
  misc_feature 1..20: note = chemically synthesized
  source 1..20: mol_type = other DNA
tcacagtgacccggaatctg

SEQ ID NO: 48965 - DNA, 20 bp, synthetic construct
  misc_feature 1..20: note = chemically synthesized
  source 1..20: mol_type = other DNA
tgacccggaatctgcagtgc

SEQ ID NO: 48966 - DNA, 20 bp, synthetic construct
  misc_feature 1..20: note = chemically synthesized
  source 1..20: mol_type = other DNA
aatctgcagtgctagtctcc

SEQ ID NO: 48967 - DNA, 20 bp, synthetic construct
  misc_feature 1..20: note = chemically synthesized
  source 1..20: mol_type = other DNA
ccggaactatcactctttca

SEQ ID NO: 48968 - DNA, 20 bp, synthetic construct
  misc_feature 1..20: note = chemically synthesized
  source 1..20: mol_type = other DNA
cactctttcacagtctgctt

SEQ ID NO: 48969 - DNA, 20 bp, synthetic construct
  misc_feature 1..20: note = chemically synthesized
  source 1..20: mol_type = other DNA
tctttcacagtctgctttgg

SEQ ID NO: 48970 - DNA, 20 bp, synthetic construct
  misc_feature 1..20: note = chemically synthesized
  source 1..20: mol_type = other DNA
ctttcacagtctgctttgga

SEQ ID NO: 48971 - DNA, 20 bp, synthetic construct
  misc_feature 1..20: note = chemically synthesized
  source 1..20: mol_type = other DNA
acagtctgctttggaaggac

SEQ ID NO: 48972 - DNA, 20 bp, synthetic construct
  misc_feature 1..20: note = chemically synthesized
  source 1..20: mol_type = other DNA
cagtctgctttggaaggact

SEQ ID NO: 48973 - DNA, 20 bp, synthetic construct
  misc_feature 1..20: note = chemically synthesized
  source 1..20: mol_type = other DNA
tgctttggaaggactgggct

SEQ ID NO: 48974 - DNA, 20 bp, synthetic construct
  misc_feature 1..20: note = chemically synthesized
  source 1..20: mol_type = other DNA
aggactgggcttagtatgaa

SEQ ID NO: 48975 - DNA, 20 bp, synthetic construct
  misc_feature 1..20: note = chemically synthesized
  source 1..20: mol_type = other DNA
ctgggcttagtatgaaaagt

SEQ ID NO: 48976 - DNA, 20 bp, synthetic construct
  misc_feature 1..20: note = chemically synthesized
  source 1..20: mol_type = other DNA
tgggcttagtatgaaaagtt

SEQ ID NO: 48977 - DNA, 20 bp, synthetic construct
  misc_feature 1..20: note = chemically synthesized
  source 1..20: mol_type = other DNA
tagtatgaaaagttaggact

SEQ ID NO: 48978 - DNA, 20 bp, synthetic construct
  misc_feature 1..20: note = chemically synthesized
  source 1..20: mol_type = other DNA
tatgaaaagttaggactgag

SEQ ID NO: 48979 - DNA, 20 bp, synthetic construct
  misc_feature 1..20: note = chemically synthesized
  source 1..20: mol_type = other DNA
taggactgagaagaatttga

SEQ ID NO: 48980 - DNA, 20 bp, synthetic construct
  misc_feature 1..20: note = chemically synthesized
  source 1..20: mol_type = other DNA
aggactgagaagaatttgaa

SEQ ID NO: 48981 - DNA, 20 bp, synthetic construct
  misc_feature 1..20: note = chemically synthesized
  source 1..20: mol_type = other DNA
actgagaagaatttgaaagg

SEQ ID NO: 48982 - DNA, 20 bp, synthetic construct
  misc_feature 1..20: note = chemically synthesized
  source 1..20: mol_type = other DNA
atttgaaaggcggctttttg

SEQ ID NO: 48983 - DNA, 20 bp, synthetic construct
  misc_feature 1..20: note = chemically synthesized
  source 1..20: mol_type = other DNA
actgtcttattaccctgtca

SEQ ID NO: 48984 - DNA, 20 bp, synthetic construct
  misc_feature 1..20: note = chemically synthesized
  source 1..20: mol_type = other DNA
ctgtcttattaccctgtcat

SEQ ID NO: 48985 - DNA, 20 bp, synthetic construct
  misc_feature 1..20: note = chemically synthesized
  source 1..20: mol_type = other DNA
tgtcataggcccaccccaaa

SEQ ID NO: 48986 - DNA, 20 bp, synthetic construct
  misc_feature 1..20: note = chemically synthesized
  source 1..20: mol_type = other DNA
cataggcccaccccaaatgg

SEQ ID NO: 48987 - DNA, 20 bp, synthetic construct
  misc_feature 1..20: note = chemically synthesized
  source 1..20: mol_type = other DNA
atggaagtcccattcttcct

SEQ ID NO: 48988 - DNA, 20 bp, synthetic construct
  misc_feature 1..20: note = chemically synthesized
  source 1..20: mol_type = other DNA
tggaagtcccattcttcctc

SEQ ID NO: 48989 - DNA, 20 bp, synthetic construct
  misc_feature 1..20: note = chemically synthesized
  source 1..20: mol_type = other DNA
cattcttcctcaggatgttt

SEQ ID NO: 48990 - DNA, 20 bp, synthetic construct
  misc_feature 1..20: note = chemically synthesized
  source 1..20: mol_type = other DNA
ttcctcaggatgtttaagat

SEQ ID NO: 48991 - DNA, 20 bp, synthetic construct
  misc_feature 1..20: note = chemically synthesized
  source 1..20: mol_type = other DNA
ggatgtttaagattagcatt

SEQ ID NO: 48992 - DNA, 20 bp, synthetic construct
  misc_feature 1..20: note = chemically synthesized
  source 1..20: mol_type = other DNA
gatgtttaagattagcattc

SEQ ID NO: 48993 - DNA, 20 bp, synthetic construct
  misc_feature 1..20: note = chemically synthesized
  source 1..20: mol_type = other DNA
gtttaagattagcattcagg

SEQ ID NO: 48994 - DNA, 20 bp, synthetic construct
  misc_feature 1..20: note = chemically synthesized
  source 1..20: mol_type = other DNA
ttaagattagcattcaggaa

SEQ ID NO: 48995 - DNA, 20 bp, synthetic construct
  misc_feature 1..20: note = chemically synthesized
  source 1..20: mol_type = other DNA
attagcattcaggaagagat

SEQ ID NO: 48996 - DNA, 20 bp, synthetic construct
  misc_feature 1..20: note = chemically synthesized
  source 1..20: mol_type = other DNA
tagcattcaggaagagatca

SEQ ID NO: 48997 - DNA, 20 bp, synthetic construct
  misc_feature 1..20: note = chemically synthesized
  source 1..20: mol_type = other DNA
agcattcaggaagagatcag

SEQ ID NO: 48998 - DNA, 20 bp, synthetic construct
  misc_feature 1..20: note = chemically synthesized
  source 1..20: mol_type = other DNA
ggaagagatcagaggtctgc

SEQ ID NO: 48999 - DNA, 20 bp, synthetic construct
  misc_feature 1..20: note = chemically synthesized
  source 1..20: mol_type = other DNA
ctcccttatcatgtccctta

SEQ ID NO: 49000 - DNA, 20 bp, synthetic construct
  misc_feature 1..20: note = chemically synthesized
  source 1..20: mol_type = other DNA
catgtcccttatggtgcttc

SEQ ID NO: 49001 - DNA, 20 bp, synthetic construct
  misc_feature 1..20: note = chemically synthesized
  source 1..20: mol_type = other DNA
ttatggtgcttctggctctg

SEQ ID NO: 49002 - DNA, 20 bp, synthetic construct
  misc_feature 1..20: note = chemically synthesized
  source 1..20: mol_type = other DNA
gcttctggctctgcagttat

SEQ ID NO: 49003 - DNA, 20 bp, synthetic construct
  misc_feature 1..20: note = chemically synthesized
  source 1..20: mol_type = other DNA
tggctctgcagttattagca

SEQ ID NO: 49004 - DNA, 20 bp, synthetic construct
  misc_feature 1..20: note = chemically synthesized
  source 1..20: mol_type = other DNA
catttttcttattcaatacc

SEQ ID NO: 49005 - DNA, 20 bp, synthetic construct
  misc_feature 1..20: note = chemically synthesized
  source 1..20: mol_type = other DNA
atttttcttattcaatacct

SEQ ID NO: 49006 - DNA, 20 bp, synthetic construct
  misc_feature 1..20: note = chemically synthesized
  source 1..20: mol_type = other DNA
tttcttattcaatacctagg

SEQ ID NO: 49007 - DNA, 20 bp, synthetic construct
  misc_feature 1..20: note = chemically synthesized
  source 1..20: mol_type = other DNA
ttcttattcaatacctaggt

SEQ ID NO: 49008 - DNA, 20 bp, synthetic construct
  misc_feature 1..20: note = chemically synthesized
  source 1..20: mol_type = other DNA
ttattcaatacctaggtagg

SEQ ID NO: 49009 - DNA, 20 bp, synthetic construct
  misc_feature 1..20: note = chemically synthesized
  source 1..20: mol_type = other DNA
atacctaggtaggtagatgc

SEQ ID NO: 49010 - DNA, 20 bp, synthetic construct
  misc_feature 1..20: note = chemically synthesized
  source 1..20: mol_type = other DNA
ggtaggtagatgctagattc

SEQ ID NO: 49011 - DNA, 20 bp, synthetic construct
  misc_feature 1..20: note = chemically synthesized
  source 1..20: mol_type = other DNA
agattctggaaataaaatat

SEQ ID NO: 49012 - DNA, 20 bp, synthetic construct
  misc_feature 1..20: note = chemically synthesized
  source 1..20: mol_type = other DNA
ggaaataaaatatgagtctc

SEQ ID NO: 49013 - DNA, 20 bp, synthetic construct
  misc_feature 1..20: note = chemically synthesized
  source 1..20: mol_type = other DNA
aataaaatatgagtctcaag

SEQ ID NO: 49014 - DNA, 20 bp, synthetic construct
  misc_feature 1..20: note = chemically synthesized
  source 1..20: mol_type = other DNA
gtggtccttgtcctctctcc

SEQ ID NO: 49015 - DNA, 20 bp, synthetic construct
  misc_feature 1..20: note = chemically synthesized
  source 1..20: mol_type = other DNA
tcccagtcaaattctgaatc

SEQ ID NO: 49016 - DNA, 20 bp, synthetic construct
  misc_feature 1..20: note = chemically synthesized
  source 1..20: mol_type = other DNA
agtcaaattctgaatctagt

SEQ ID NO: 49017 - DNA, 20 bp, synthetic construct
  misc_feature 1..20: note = chemically synthesized
  source 1..20: mol_type = other DNA
aaattctgaatctagttggc

SEQ ID NO: 49018 - DNA, 20 bp, synthetic construct
  misc_feature 1..20: note = chemically synthesized
  source 1..20: mol_type = other DNA
gttggcaagattctgaaatc

SEQ ID NO: 49019 - DNA, 20 bp, synthetic construct
  misc_feature 1..20: note = chemically synthesized
  source 1..20: mol_type = other DNA
ttggcaagattctgaaatca

SEQ ID NO: 49020 - DNA, 20 bp, synthetic construct
  misc_feature 1..20: note = chemically synthesized
  source 1..20: mol_type = other DNA
ctgaaatcaaggcatataat

SEQ ID NO: 49021 - DNA, 20 bp, synthetic construct
  misc_feature 1..20: note = chemically synthesized
  source 1..20: mol_type = other DNA
caaggcatataatcagtaat

SEQ ID NO: 49022 - DNA, 20 bp, synthetic construct
  misc_feature 1..20: note = chemically synthesized
  source 1..20: mol_type = other DNA
taatcagtaataagtgatga

SEQ ID NO: 49023 - DNA, 20 bp, synthetic construct
  misc_feature 1..20: note = chemically synthesized
  source 1..20: mol_type = other DNA
tcagtaataagtgatgatag

SEQ ID NO: 49024 - DNA, 20 bp, synthetic construct
  misc_feature 1..20: note = chemically synthesized
  source 1..20: mol_type = other DNA
cagtaataagtgatgataga

SEQ ID NO: 49025 - DNA, 20 bp, synthetic construct
  misc_feature 1..20: note = chemically synthesized
  source 1..20: mol_type = other DNA
agtaataagtgatgatagaa

SEQ ID NO: 49026 - DNA, 20 bp, synthetic construct
  misc_feature 1..20: note = chemically synthesized
  source 1..20: mol_type = other DNA
agtgatgatagaagggtata

SEQ ID NO: 49027 - DNA, 20 bp, synthetic construct
  misc_feature 1..20: note = chemically synthesized
  source 1..20: mol_type = other DNA
gatgatagaagggtatatag

SEQ ID NO: 49028 - DNA, 20 bp, synthetic construct
  misc_feature 1..20: note = chemically synthesized
  source 1..20: mol_type = other DNA
atagaagaattttattatat

SEQ ID NO: 49029 - DNA, 20 bp, synthetic construct
  misc_feature 1..20: note = chemically synthesized
  source 1..20: mol_type = other DNA
agaagaattttattatatga

SEQ ID NO: 49030 - DNA, 20 bp, synthetic construct
  misc_feature 1..20: note = chemically synthesized
  source 1..20: mol_type = other DNA
gaagaattttattatatgag

SEQ ID NO: 49031 - DNA, 20 bp, synthetic construct
  misc_feature 1..20: note = chemically synthesized
  source 1..20: mol_type = other DNA
aagaattttattatatgaga

SEQ ID NO: 49032 - DNA, 20 bp, synthetic construct
  misc_feature 1..20: note = chemically synthesized
  source 1..20: mol_type = other DNA
ccctcaaaatgaaatgaaat

SEQ ID NO: 49033 - DNA, 20 bp, synthetic construct
  misc_feature 1..20: note = chemically synthesized
  source 1..20: mol_type = other DNA
taaacaaaaataaatttgaa

SEQ ID NO: 49034 - DNA, 20 bp, synthetic construct
  misc_feature 1..20: note = chemically synthesized
  source 1..20: mol_type = other DNA
aaacaaaaataaatttgaat

SEQ ID NO: 49035 - DNA, 20 bp, synthetic construct
  misc_feature 1..20: note = chemically synthesized
  source 1..20: mol_type = other DNA
aaataaatttgaatgggtta

SEQ ID NO: 49036 - DNA, 20 bp, synthetic construct
  misc_feature 1..20: note = chemically synthesized
  source 1..20: mol_type = other DNA
atgggttaaagaattaaact

SEQ ID NO: 49037 - DNA, 20 bp, synthetic construct
  misc_feature 1..20: note = chemically synthesized
  source 1..20: mol_type = other DNA
taaaaccataaaaattttta

SEQ ID NO: 49038 - DNA, 20 bp, synthetic construct
  misc_feature 1..20: note = chemically synthesized
  source 1..20: mol_type = other DNA
aaaatttttaaagaaatcaa

SEQ ID NO: 49039 - DNA, 20 bp, synthetic construct
  misc_feature 1..20: note = chemically synthesized
  source 1..20: mol_type = other DNA
atttttaaagaaatcaaaag

SEQ ID NO: 49040 - DNA, 20 bp, synthetic construct
  misc_feature 1..20: note = chemically synthesized
  source 1..20: mol_type = other DNA
aaattctaatattcacgttg

SEQ ID NO: 49041 - DNA, 20 bp, synthetic construct
  misc_feature 1..20: note = chemically synthesized
  source 1..20: mol_type = other DNA
ccgttttttgaatttgatat

SEQ ID NO: 49042 - DNA, 20 bp, synthetic construct
  misc_feature 1..20: note = chemically synthesized
  source 1..20: mol_type = other DNA
ttttttgaatttgatatgag

SEQ ID NO: 49043 - DNA, 20 bp, synthetic construct
  misc_feature 1..20: note = chemically synthesized
  source 1..20: mol_type = other DNA
tgaatttgatatgagaagca

SEQ ID NO: 49044 - DNA, 20 bp, synthetic construct
  misc_feature 1..20: note = chemically synthesized
  source 1..20: mol_type = other DNA
gaatttgatatgagaagcaa

SEQ ID NO: 49045 - DNA, 20 bp, synthetic construct
  misc_feature 1..20: note = chemically synthesized
  source 1..20: mol_type = other DNA
atgagaagcaaaggcaacaa

SEQ ID NO: 49046 - DNA, 20 bp, synthetic construct
  misc_feature 1..20: note = chemically synthesized
  source 1..20: mol_type = other DNA
tgagaagcaaaggcaacaaa

SEQ ID NO: 49047 - DNA, 20 bp, synthetic construct
  misc_feature 1..20: note = chemically synthesized
  source 1..20: mol_type = other DNA
aggcaacaaaaggaaaaata

SEQ ID NO: 49048 - DNA, 20 bp, synthetic construct
  misc_feature 1..20: note = chemically synthesized
  source 1..20: mol_type = other DNA
caacaaaaggaaaaataaag

SEQ ID NO: 49049 - DNA, 20 bp, synthetic construct
  misc_feature 1..20: note = chemically synthesized
  source 1..20: mol_type = other DNA
aaaaggaaaaataaagaagt

SEQ ID NO: 49050 - DNA, 20 bp, synthetic construct
  misc_feature 1..20: note = chemically synthesized
  source 1..20: mol_type = other DNA
aaaggaaaaataaagaagtg

SEQ ID NO: 49051 - DNA, 20 bp, synthetic construct
  misc_feature 1..20: note = chemically synthesized
  source 1..20: mol_type = other DNA
acaaaacaatgaacaaatga

SEQ ID NO: 49052 - DNA, 20 bp, synthetic construct
  misc_feature 1..20: note = chemically synthesized
  source 1..20: mol_type = other DNA
caaaacaatgaacaaatgaa

SEQ ID NO: 49053 - DNA, 20 bp, synthetic construct
  misc_feature 1..20: note = chemically synthesized
  source 1..20: mol_type = other DNA
atgaaaggtgaaccatgaaa

SEQ ID NO: 49054 - DNA, 20 bp, synthetic construct
  misc_feature 1..20: note = chemically synthesized
  source 1..20: mol_type = other DNA
caaatatttcttaaatattt

SEQ ID NO: 49055 - DNA, 20 bp, synthetic construct
  misc_feature 1..20: note = chemically synthesized
  source 1..20: mol_type = other DNA
ggttaatatccaaaatatat

SEQ ID NO: 49056 - DNA, 20 bp, synthetic construct
  misc_feature 1..20: note = chemically synthesized
  source 1..20: mol_type = other DNA
tccaaaatatataagaaaca

SEQ ID NO: 49057 - DNA, 20 bp, synthetic construct
  misc_feature 1..20: note = chemically synthesized
  source 1..20: mol_type = other DNA
aacaaacaaaaaattaaaaa

SEQ ID NO: 49058 - DNA, 20 bp, synthetic construct
  misc_feature 1..20: note = chemically synthesized
  source 1..20: mol_type = other DNA
acaaacaaaaaattaaaaat

SEQ ID NO: 49059 - DNA, 20 bp, synthetic construct
  misc_feature 1..20: note = chemically synthesized
  source 1..20: mol_type = other DNA
aggaaaataaaaaaattaaa

SEQ ID NO: 49060 - DNA, 20 bp, synthetic construct
  misc_feature 1..20: note = chemically synthesized
  source 1..20: mol_type = other DNA
aaaataaaaaaattaaaaag

SEQ ID NO: 49061 - DNA, 20 bp, synthetic construct
  misc_feature 1..20: note = chemically synthesized
  source 1..20: mol_type = other DNA
gaagaaaatcctgccattta

SEQ ID NO: 49062 - DNA, 20 bp, synthetic construct
  misc_feature 1..20: note = chemically synthesized
  source 1..20: mol_type = other DNA
gaaaatcctgccatttatgg

SEQ ID NO: 49063 - DNA, 20 bp, synthetic construct
  misc_feature 1..20: note = chemically synthesized
  source 1..20: mol_type = other DNA
tatggcagaattgatgaacc

SEQ ID NO: 49064 - DNA, 20 bp, synthetic construct
  misc_feature 1..20: note = chemically synthesized
  source 1..20: mol_type = other DNA
tggcagaattgatgaacctg

SEQ ID NO: 49065 - DNA, 20 bp, synthetic construct
  misc_feature 1..20: note = chemically synthesized
  source 1..20: mol_type = other DNA
ggcagaattgatgaacctgg

SEQ ID NO: 49066 - DNA, 20 bp, synthetic construct
  misc_feature 1..20: note = chemically synthesized
  source 1..20: mol_type = other DNA
aacctggaggatgtaaaact

SEQ ID NO: 49067 - DNA, 20 bp, synthetic construct
  misc_feature 1..20: note = chemically synthesized
  source 1..20: mol_type = other DNA
gatgtaaaactaagaaaaat

SEQ ID NO: 49068 - DNA, 20 bp, synthetic construct
  misc_feature 1..20: note = chemically synthesized
  source 1..20: mol_type = other DNA
aaaaataagcctgacacaaa

SEQ ID NO: 49069 - DNA, 20 bp, synthetic construct
  misc_feature 1..20: note = chemically synthesized
  source 1..20: mol_type = other DNA
ctcatatgtgaaacataaaa

SEQ ID NO: 49070 - DNA, 20 bp, synthetic construct
  misc_feature 1..20: note = chemically synthesized
  source 1..20: mol_type = other DNA
acataaaaaagtcactctca

SEQ ID NO: 49071 - DNA, 20 bp, synthetic construct
  misc_feature 1..20: note = chemically synthesized
  source 1..20: mol_type = other DNA
aaaagtcactctcatggaaa

SEQ ID NO: 49072 - DNA, 20 bp, synthetic construct
  misc_feature 1..20: note = chemically synthesized
  source 1..20: mol_type = other DNA
gtcactctcatggaaacaga

SEQ ID NO: 49073 - DNA, 20 bp, synthetic construct
  misc_feature 1..20: note = chemically synthesized
  source 1..20: mol_type = other DNA
actctcatggaaacagacag

SEQ ID NO: 49074 - DNA, 20 bp, synthetic construct
  misc_feature 1..20: note = chemically synthesized
  source 1..20: mol_type = other DNA
tctcatggaaacagacagta

SEQ ID NO: 49075 - DNA, 20 bp, synthetic construct
  misc_feature 1..20: note = chemically synthesized
  source 1..20: mol_type = other DNA
ctcatggaaacagacagtag

SEQ ID NO: 49076 - DNA, 20 bp, synthetic construct
  misc_feature 1..20: note = chemically synthesized
  source 1..20: mol_type = other DNA
ggaaacagacagtagaggta

SEQ ID NO: 49077 - DNA, 20 bp, synthetic construct
  misc_feature 1..20: note = chemically synthesized
  source 1..20: mol_type = other DNA
gacagtagaggtatggtttc

SEQ ID NO: 49078 - DNA, 20 bp, synthetic construct
  misc_feature 1..20: note = chemically synthesized
  source 1..20: mol_type = other DNA
acagtagaggtatggtttcc

SEQ ID NO: 49079 - DNA, 20 bp, synthetic construct
  misc_feature 1..20: note = chemically synthesized
  source 1..20: mol_type = other DNA
cagtagaggtatggtttcca

SEQ ID NO: 49080 - DNA, 20 bp, synthetic construct
  misc_feature 1..20: note = chemically synthesized
  source 1..20: mol_type = other DNA
agtagaggtatggtttccag

SEQ ID NO: 49081 - DNA, 20 bp, synthetic construct
  misc_feature 1..20: note = chemically synthesized
  source 1..20: mol_type = other DNA
gaggtatggtttccaggggt

SEQ ID NO: 49082 - DNA, 20 bp, synthetic construct
  misc_feature 1..20: note = chemically synthesized
  source 1..20: mol_type = other DNA
aggtatggtttccaggggtt

SEQ ID NO: 49083 - DNA, 20 bp, synthetic construct
  misc_feature 1..20: note = chemically synthesized
  source 1..20: mol_type = other DNA
ggtatggtttccaggggttg

SEQ ID NO: 49084 - DNA, 20 bp, synthetic construct
  misc_feature 1..20: note = chemically synthesized
  source 1..20: mol_type = other DNA
gtatggtttccaggggttgg

SEQ ID NO: 49085 - DNA, 20 bp, synthetic construct
  misc_feature 1..20: note = chemically synthesized
  source 1..20: mol_type = other DNA
tggtttccaggggttggggg

SEQ ID NO: 49086 - DNA, 20 bp, synthetic construct
  misc_feature 1..20: note = chemically synthesized
  source 1..20: mol_type = other DNA
ggtttccaggggttgggggt

SEQ ID NO: 49087 - DNA, 20 bp, synthetic construct
  misc_feature 1..20: note = chemically synthesized
  source 1..20: mol_type = other DNA
tttccaggggttgggggtgg

SEQ ID NO: 49088 - DNA, 20 bp, synthetic construct
  misc_feature 1..20: note = chemically synthesized
  source 1..20: mol_type = other DNA
ggggttgggggtgggagaat

SEQ ID NO: 49089 - DNA, 20 bp, synthetic construct
  misc_feature 1..20: note = chemically synthesized
  source 1..20: mol_type = other DNA
gggttgggggtgggagaatc

SEQ ID NO: 49090 - DNA, 20 bp, synthetic construct
  misc_feature 1..20: note = chemically synthesized
  source 1..20: mol_type = other DNA
aatcaggaaactattactca

SEQ ID NO: 49091 - DNA, 20 bp, synthetic construct
  misc_feature 1..20: note = chemically synthesized
  source 1..20: mol_type = other DNA
atcaggaaactattactcaa

SEQ ID NO: 49092 - DNA, 20 bp, synthetic construct
  misc_feature 1..20: note = chemically synthesized
  source 1..20: mol_type = other DNA
tcaggaaactattactcaaa

SEQ ID NO: 49093 - DNA, 20 bp, synthetic construct
  misc_feature 1..20: note = chemically synthesized
  source 1..20: mol_type = other DNA
actcaaagggtataaaattt

SEQ ID NO: 49094 - DNA, 20 bp, synthetic construct
  misc_feature 1..20: note = chemically synthesized
  source 1..20: mol_type = other DNA
ggtataaaatttcagttatg

SEQ ID NO: 49095 - DNA, 20 bp, synthetic construct
  misc_feature 1..20: note = chemically synthesized
  source 1..20: mol_type = other DNA
gtataaaatttcagttatgt

SEQ ID NO: 49096 - DNA, 20 bp, synthetic construct
  misc_feature 1..20: note = chemically synthesized
  source 1..20: mol_type = other DNA
tatgtgggatgaataaattc

SEQ ID NO: 49097 - DNA, 20 bp, synthetic construct
  misc_feature 1..20: note = chemically synthesized
  source 1..20: mol_type = other DNA
aattctagatatctaatgta

SEQ ID NO: 49098 - DNA, 20 bp, synthetic construct
  misc_feature 1..20: note = chemically synthesized
  source 1..20: mol_type = other DNA
aatgtacagcatcgtgactg

SEQ ID NO: 49099 - DNA, 20 bp, synthetic construct
  misc_feature 1..20: note = chemically synthesized
  source 1..20: mol_type = other DNA
actgtagttaattgtactgt

SEQ ID NO: 49100 - DNA, 20 bp, synthetic construct
  misc_feature 1..20: note = chemically synthesized
  source 1..20: mol_type = other DNA
aagtatatttaaaatttgca

SEQ ID NO: 49101 - DNA, 20 bp, synthetic construct
  misc_feature 1..20: note = chemically synthesized
  source 1..20: mol_type = other DNA
gtatatttaaaatttgcaaa

SEQ ID NO: 49102 - DNA, 20 bp, synthetic construct
  misc_feature 1..20: note = chemically synthesized
  source 1..20: mol_type = other DNA
atatttaaaatttgcaaaga

SEQ ID NO: 49103 - DNA, 20 bp, synthetic construct
  misc_feature 1..20: note = chemically synthesized
  source 1..20: mol_type = other DNA
tttaaaatttgcaaagagag

SEQ ID NO: 49104 - DNA, 20 bp, synthetic construct
  misc_feature 1..20: note = chemically synthesized
  source 1..20: mol_type = other DNA
agtagatttttttttttttt

SEQ ID NO: 49105 - DNA, 20 bp, synthetic construct
  misc_feature 1..20: note = chemically synthesized
  source 1..20: mol_type = other DNA
gatttttttttttttttaga

SEQ ID NO: 49106 - DNA, 20 bp, synthetic construct
  misc_feature 1..20: note = chemically synthesized
  source 1..20: mol_type = other DNA
tttttttttttttttagatg

SEQ ID NO: 49107 - DNA, 20 bp, synthetic construct
  misc_feature 1..20: note = chemically synthesized
  source 1..20: mol_type = other DNA
ggagttttgctcttgttgtc

SEQ ID NO: 49108 - DNA, 20 bp, synthetic construct
  misc_feature 1..20: note = chemically synthesized
  source 1..20: mol_type = other DNA
gagttttgctcttgttgtcc

SEQ ID NO: 49109 - DNA, 20 bp, synthetic construct
  misc_feature 1..20: note = chemically synthesized
  source 1..20: mol_type = other DNA
tttgctcttgttgtccaggc

SEQ ID NO: 49110 - DNA, 20 bp, synthetic construct
  misc_feature 1..20: note = chemically synthesized
  source 1..20: mol_type = other DNA
tgctcttgttgtccaggctg

SEQ ID NO: 49111 - DNA, 20 bp, synthetic construct
  misc_feature 1..20: note = chemically synthesized
  source 1..20: mol_type = other DNA
ttgtccaggctggagtgcaa

SEQ ID NO: 49112 - DNA, 20 bp, synthetic construct
  misc_feature 1..20: note = chemically synthesized
  source 1..20: mol_type = other DNA
ccaggctggagtgcaatggc

SEQ ID NO: 49113 - DNA, 20 bp, synthetic construct
  misc_feature 1..20: note = chemically synthesized
  source 1..20: mol_type = other DNA
ggagtgcaatggcaagatct

SEQ ID NO: 49114 - DNA, 20 bp, synthetic construct
  misc_feature 1..20: note = chemically synthesized
  source 1..20: mol_type = other DNA
tcactgcaacctccgcctcc

SEQ ID NO: 49115 - DNA, 20 bp, synthetic construct
  misc_feature 1..20: note = chemically synthesized
  source 1..20: mol_type = other DNA
cactgcaacctccgcctcct

SEQ ID NO: 49116 - DNA, 20 bp, synthetic construct
  misc_feature 1..20: note = chemically synthesized
  source 1..20: mol_type = other DNA
aacctccgcctcctgggttc

SEQ ID NO: 49117 - DNA, 20 bp, synthetic construct
  misc_feature 1..20: note = chemically synthesized
  source 1..20: mol_type = other DNA
ttcaagcaaatctcctgcct

SEQ ID NO: 49118 - DNA, 20 bp, synthetic construct
  misc_feature 1..20: note = chemically synthesized
  source 1..20: mol_type = other DNA
atctcctgcctcagcctccc

SEQ ID NO: 49119 - DNA, 20 bp, synthetic construct
  misc_feature 1..20: note = chemically synthesized
  source 1..20: mol_type = other DNA
tcctgcctcagcctcccgag

SEQ ID NO: 49120 - DNA, 20 bp, synthetic construct
  misc_feature 1..20: note = chemically synthesized
  source 1..20: mol_type = other DNA
gcctcagcctcccgagtagc

SEQ ID NO: 49121 - DNA, 20 bp, synthetic construct
  misc_feature 1..20: note = chemically synthesized
  source 1..20: mol_type = other DNA
cctcagcctcccgagtagct

SEQ ID NO: 49122 - DNA, 20 bp, synthetic construct
  misc_feature 1..20: note = chemically synthesized
  source 1..20: mol_type = other DNA
ctcccgagtagctgggatta

SEQ ID NO: 49123 - DNA, 20 bp, synthetic construct
  misc_feature 1..20: note = chemically synthesized
  source 1..20: mol_type = other DNA
tcccgagtagctgggattac

SEQ ID NO: 49124 - DNA, 20 bp, synthetic construct
  misc_feature 1..20: note = chemically synthesized
  source 1..20: mol_type = other DNA
caggcatgcgacaccatgcc

SEQ ID NO: 49125 - DNA, 20 bp, synthetic construct
  misc_feature 1..20: note = chemically synthesized
  source 1..20: mol_type = other DNA
cccagctaattttgtatttt

SEQ ID NO: 49126 - DNA, 20 bp, synthetic construct
  misc_feature 1..20: note = chemically synthesized
  source 1..20: mol_type = other DNA
agctaattttgtatttttag

SEQ ID NO: 49127 - DNA, 20 bp, synthetic construct
  misc_feature 1..20: note = chemically synthesized
  source 1..20: mol_type = other DNA
ctaattttgtatttttagta

SEQ ID NO: 49128 - DNA, 20 bp, synthetic construct
  misc_feature 1..20: note = chemically synthesized
  source 1..20: mol_type = other DNA
ttttgtatttttagtagaga

SEQ ID NO: 49129 - DNA, 20 bp, synthetic construct
  misc_feature 1..20: note = chemically synthesized
  source 1..20: mol_type = other DNA
tttgtatttttagtagagac

SEQ ID NO: 49130 - DNA, 20 bp, synthetic construct
  misc_feature 1..20: note = chemically synthesized
  source 1..20: mol_type = other DNA
ttgtatttttagtagagacg

SEQ ID NO: 49131 - DNA, 20 bp, synthetic construct
  misc_feature 1..20: note = chemically synthesized
  source 1..20: mol_type = other DNA
gagacggggtttctccatgt

SEQ ID NO: 49132 - DNA, 20 bp, synthetic construct
  misc_feature 1..20: note = chemically synthesized
  source 1..20: mol_type = other DNA
cggggtttctccatgttggt

SEQ ID NO: 49133 - DNA, 20 bp, synthetic construct
  misc_feature 1..20: note = chemically synthesized
  source 1..20: mol_type = other DNA
ggggtttctccatgttggtc

SEQ ID NO: 49134 - DNA, 20 bp, synthetic construct
  misc_feature 1..20: note = chemically synthesized
  source 1..20: mol_type = other DNA
tcaggctgatccgcctgcct

SEQ ID NO: 49135 - DNA, 20 bp, synthetic construct
  misc_feature 1..20: note = chemically synthesized
  source 1..20: mol_type = other DNA
ccgcctgcctcggccaccca

SEQ ID NO: 49136 - DNA, 20 bp, synthetic construct
  misc_feature 1..20: note = chemically synthesized
  source 1..20: mol_type = other DNA
cgcctgcctcggccacccaa

SEQ ID NO: 49137 - DNA, 20 bp, synthetic construct
  misc_feature 1..20: note = chemically synthesized
  source 1..20: mol_type = other DNA
gcctgcctcggccacccaaa

SEQ ID NO: 49138 - DNA, 20 bp, synthetic construct
  misc_feature 1..20: note = chemically synthesized
  source 1..20: mol_type = other DNA
gcctcggccacccaaagggc

SEQ ID NO: 49139 - DNA, 20 bp, synthetic construct
  misc_feature 1..20: note = chemically synthesized
  source 1..20: mol_type = other DNA
cctcggccacccaaagggct

SEQ ID NO: 49140 - DNA, 20 bp, synthetic construct
  misc_feature 1..20: note = chemically synthesized
  source 1..20: mol_type = other DNA
cacccaaagggctgggatta

SEQ ID NO: 49141 - DNA, 20 bp, synthetic construct
  misc_feature 1..20: note = chemically synthesized
  source 1..20: mol_type = other DNA
acccaaagggctgggattac

SEQ ID NO: 49142 - DNA, 20 bp, synthetic construct
  misc_feature 1..20: note = chemically synthesized
  source 1..20: mol_type = other DNA
agggctgggattacaggcgt

SEQ ID NO: 49143 - DNA, 20 bp, synthetic construct
  misc_feature 1..20: note = chemically synthesized
  source 1..20: mol_type = other DNA
ggattacaggcgtgagccac

SEQ ID NO: 49144 - DNA, 20 bp, synthetic construct
  misc_feature 1..20: note = chemically synthesized
  source 1..20: mol_type = other DNA
gattacaggcgtgagccacc

SEQ ID NO: 49145 - DNA, 20 bp, synthetic construct
  misc_feature 1..20: note = chemically synthesized
  source 1..20: mol_type = other DNA
caggcgtgagccaccgggcc

SEQ ID NO: 49146 - DNA, 20 bp, synthetic construct
  misc_feature 1..20: note = chemically synthesized
  source 1..20: mol_type = other DNA
gtgagccaccgggcctggcc

SEQ ID NO: 49147 - DNA, 20 bp, synthetic construct
  misc_feature 1..20: note = chemically synthesized
  source 1..20: mol_type = other DNA
gagccaccgggcctggccga

SEQ ID NO: 49148 - DNA, 20 bp, synthetic construct
  misc_feature 1..20: note = chemically synthesized
  source 1..20: mol_type = other DNA
ccaccgggcctggccgagag

SEQ ID NO: 49149 - DNA, 20 bp, synthetic construct
  misc_feature 1..20: note = chemically synthesized
  source 1..20: mol_type = other DNA
tggccgagagtagatcttaa

SEQ ID NO: 49150 - DNA, 20 bp, synthetic construct
  misc_feature 1..20: note = chemically synthesized
  source 1..20: mol_type = other DNA
atcttaaaagcatttaccac

SEQ ID NO: 49151 - DNA, 20 bp, synthetic construct
  misc_feature 1..20: note = chemically synthesized
  source 1..20: mol_type = other DNA
aaagcatttaccacaagaaa

SEQ ID NO: 49152 - DNA, 20 bp, synthetic construct
  misc_feature 1..20: note = chemically synthesized
  source 1..20: mol_type = other DNA
aagcatttaccacaagaaaa

SEQ ID NO: 49153 - DNA, 20 bp, synthetic construct
  misc_feature 1..20: note = chemically synthesized
  source 1..20: mol_type = other DNA
caagaaaaaggtaactatgt

SEQ ID NO: 49154 - DNA, 20 bp, synthetic construct
  misc_feature 1..20: note = chemically synthesized
  source 1..20: mol_type = other DNA
aaggtaactatgtgagataa

SEQ ID NO: 49155 - DNA, 20 bp, synthetic construct
  misc_feature 1..20: note = chemically synthesized
  source 1..20: mol_type = other DNA
aggtaactatgtgagataat

SEQ ID NO: 49156 - DNA, 20 bp, synthetic construct
  misc_feature 1..20: note = chemically synthesized
  source 1..20: mol_type = other DNA
gagataatgggtatgttaat

SEQ ID NO: 49157 - DNA, 20 bp, synthetic construct
  misc_feature 1..20: note = chemically synthesized
  source 1..20: mol_type = other DNA
tatgttaattagcttgattg

SEQ ID NO: 49158 - DNA, 20 bp, synthetic construct
  misc_feature 1..20: note = chemically synthesized
  source 1..20: mol_type = other DNA
gattgtggtaatcatttcac

SEQ ID NO: 49159 - DNA, 20 bp, synthetic construct
  misc_feature 1..20: note = chemically synthesized
  source 1..20: mol_type = other DNA
attgtggtaatcatttcaca

SEQ ID NO: 49160 - DNA, 20 bp, synthetic construct
  misc_feature 1..20: note = chemically synthesized
  source 1..20: mol_type = other DNA
ttgtgaatgatacctcaata

SEQ ID NO: 49161 - DNA, 20 bp, synthetic construct
  misc_feature 1..20: note = chemically synthesized
  source 1..20: mol_type = other DNA
atgatacctcaataaagttg

SEQ ID NO: 49162 - DNA, 20 bp, synthetic construct
  misc_feature 1..20: note = chemically synthesized
  source 1..20: mol_type = other DNA
aaagttgaagaataataaaa

SEQ ID NO: 49163 - DNA, 20 bp, synthetic construct
  misc_feature 1..20: note = chemically synthesized
  source 1..20: mol_type = other DNA
tgaagaataataaaaaagaa

SEQ ID NO: 49164 - DNA, 20 bp, synthetic construct
  misc_feature 1..20: note = chemically synthesized
  source 1..20: mol_type = other DNA
aaaaaatgcatcttgatgat

SEQ ID NO: 49165 - DNA, 20 bp, synthetic construct
  misc_feature 1..20: note = chemically synthesized
  source 1..20: mol_type = other DNA
gaattgcattcttgattttt

SEQ ID NO: 49166 - DNA, 20 bp, synthetic construct
  misc_feature 1..20: note = chemically synthesized
  source 1..20: mol_type = other DNA
caaaacaatacaataaattt

SEQ ID NO: 49167 - DNA, 20 bp, synthetic construct
  misc_feature 1..20: note = chemically synthesized
  source 1..20: mol_type = other DNA
aattatatatatatatattt

SEQ ID NO: 49168 - DNA, 20 bp, synthetic construct
  misc_feature 1..20: note = chemically synthesized
  source 1..20: mol_type = other DNA
tatattttagatattttgta

SEQ ID NO: 49169 - DNA, 20 bp, synthetic construct
  misc_feature 1..20: note = chemically synthesized
  source 1..20: mol_type = other DNA
ttttgtatagttttactccc

SEQ ID NO: 49170 - DNA, 20 bp, synthetic construct
  misc_feature 1..20: note = chemically synthesized
  source 1..20: mol_type = other DNA
gttttactccctagattttc

SEQ ID NO: 49171 - DNA, 20 bp, synthetic construct
  misc_feature 1..20: note = chemically synthesized
  source 1..20: mol_type = other DNA
tttctagtgttattattaaa

SEQ ID NO: 49172 - DNA, 20 bp, synthetic construct
  misc_feature 1..20: note = chemically synthesized
  source 1..20: mol_type = other DNA
agtgttattattaaatagtg

SEQ ID NO: 49173 - DNA, 20 bp, synthetic construct
  misc_feature 1..20: note = chemically synthesized
  source 1..20: mol_type = other DNA
tcatttctaacattctctct

SEQ ID NO: 49174 - DNA, 20 bp, synthetic construct
  misc_feature 1..20: note = chemically synthesized
  source 1..20: mol_type = other DNA
ttaatattatctctttctgc

SEQ ID NO: 49175 - DNA, 20 bp, synthetic construct
  misc_feature 1..20: note = chemically synthesized
  source 1..20: mol_type = other DNA
tggaaatacattgttacttt

SEQ ID NO: 49176 - DNA, 20 bp, synthetic construct
  misc_feature 1..20: note = chemically synthesized
  source 1..20: mol_type = other DNA
acttttggtttatctaaaaa

SEQ ID NO: 49177 - DNA, 20 bp, synthetic construct
  misc_feature 1..20: note = chemically synthesized
  source 1..20: mol_type = other DNA
aattaataccactcatgtgt

SEQ ID NO: 49178 - DNA, 20 bp, synthetic construct
  misc_feature 1..20: note = chemically synthesized
  source 1..20: mol_type = other DNA
aataccactcatgtgtaagt

SEQ ID NO: 49179 - DNA, 20 bp, synthetic construct
  misc_feature 1..20: note = chemically synthesized
  source 1..20: mol_type = other DNA
ccactcatgtgtaagtaaga

SEQ ID NO: 49180 - DNA, 20 bp, synthetic construct
  misc_feature 1..20: note = chemically synthesized
  source 1..20: mol_type = other DNA
ctcatgtgtaagtaagatag

SEQ ID NO: 49181 - DNA, 20 bp, synthetic construct
  misc_feature 1..20: note = chemically synthesized
  source 1..20: mol_type = other DNA
aagtaagatagtggaataaa

SEQ ID NO: 49182 - DNA, 20 bp, synthetic construct
  misc_feature 1..20: note = chemically synthesized
  source 1..20: mol_type = other DNA
taatgtgatatataaaaata

SEQ ID NO: 49183 - DNA, 20 bp, synthetic construct
  misc_feature 1..20: note = chemically synthesized
  source 1..20: mol_type = other DNA
aaaaatatagcttttaaatt

SEQ ID NO: 49184 - DNA, 20 bp, synthetic construct
  misc_feature 1..20: note = chemically synthesized
  source 1..20: mol_type = other DNA
tatagcttttaaatttagct

SEQ ID NO: 49185 - DNA, 20 bp, synthetic construct
  misc_feature 1..20: note = chemically synthesized
  source 1..20: mol_type = other DNA
gcttggaaataaaaaacaaa

SEQ ID NO: 49186 - DNA, 20 bp, synthetic construct
  misc_feature 1..20: note = chemically synthesized
  source 1..20: mol_type = other DNA
gaacaactatactttttgaa

SEQ ID NO: 49187 - DNA, 20 bp, synthetic construct
  misc_feature 1..20: note = chemically synthesized
  source 1..20: mol_type = other DNA
acaactatactttttgaaaa

SEQ ID NO: 49188 - DNA, 20 bp, synthetic construct
  misc_feature 1..20: note = chemically synthesized
  source 1..20: mol_type = other DNA
tatactttttgaaaagagta

SEQ ID NO: 49189 - DNA, 20 bp, synthetic construct
  misc_feature 1..20: note = chemically synthesized
  source 1..20: mol_type = other DNA
accacaatcgattacacaat

SEQ ID NO: 49190 - DNA, 20 bp, synthetic construct
  misc_feature 1..20: note = chemically synthesized
  source 1..20: mol_type = other DNA
ccacaatcgattacacaatt

SEQ ID NO: 49191 - DNA, 20 bp, synthetic construct
  misc_feature 1..20: note = chemically synthesized
  source 1..20: mol_type = other DNA
cgattacacaattaggtgtg

SEQ ID NO: 49192 - DNA, 20 bp, synthetic construct
  misc_feature 1..20: note = chemically synthesized
  source 1..20: mol_type = other DNA
gattacacaattaggtgtga

SEQ ID NO: 49193 - DNA, 20 bp, synthetic construct
  misc_feature 1..20: note = chemically synthesized
  source 1..20: mol_type = other DNA
ttaggtgtgaaggtaaaatt

SEQ ID NO: 49194 - DNA, 20 bp, synthetic construct
  misc_feature 1..20: note = chemically synthesized
  source 1..20: mol_type = other DNA
aaattcagtcacgaaaaaac

SEQ ID NO: 49195 - DNA, 20 bp, synthetic construct
  misc_feature 1..20: note = chemically synthesized
  source 1..20: mol_type = other DNA
aaaaaactagaataaaaata

SEQ ID NO: 49196 - DNA, 20 bp, synthetic construct
  misc_feature 1..20: note = chemically synthesized
  source 1..20: mol_type = other DNA
aaaaactagaataaaaatat

SEQ ID NO: 49197 - DNA, 20 bp, synthetic construct
  misc_feature 1..20: note = chemically synthesized
  source 1..20: mol_type = other DNA
aactagaataaaaatatggg

SEQ ID NO: 49198 - DNA, 20 bp, synthetic construct
  misc_feature 1..20: note = chemically synthesized
  source 1..20: mol_type = other DNA
ggaagacatgtatataatct

SEQ ID NO: 49199 - DNA, 20 bp, synthetic construct
  misc_feature 1..20: note = chemically synthesized
  source 1..20: mol_type = other DNA
aagacatgtatataatctta

SEQ ID NO: 49200 - DNA, 20 bp, synthetic construct
  misc_feature 1..20: note = chemically synthesized
  source 1..20: mol_type = other DNA
gttatttaattatcaaccca

SEQ ID NO: 49201 - DNA, 20 bp, synthetic construct
  misc_feature 1..20: note = chemically synthesized
  source 1..20: mol_type = other DNA
atttaattatcaacccaaag

SEQ ID NO: 49202 - DNA, 20 bp, synthetic construct
  misc_feature 1..20: note = chemically synthesized
  source 1..20: mol_type = other DNA
aacccaaagtagaaactatc

SEQ ID NO: 49203 - DNA, 20 bp, synthetic construct
  misc_feature 1..20: note = chemically synthesized
  source 1..20: mol_type = other DNA
acccaaagtagaaactatca

SEQ ID NO: 49204 - DNA, 20 bp, synthetic construct
  misc_feature 1..20: note = chemically synthesized
  source 1..20: mol_type = other DNA
cccaaagtagaaactatcaa

SEQ ID NO: 49205 - DNA, 20 bp, synthetic construct
  misc_feature 1..20: note = chemically synthesized
  source 1..20: mol_type = other DNA
caaagtagaaactatcaagg

SEQ ID NO: 49206 - DNA, 20 bp, synthetic construct
  misc_feature 1..20: note = chemically synthesized
  source 1..20: mol_type = other DNA
tatcaagggagaaataaatt

SEQ ID NO: 49207 - DNA, 20 bp, synthetic construct
  misc_feature 1..20: note = chemically synthesized
  source 1..20: mol_type = other DNA
ataaattcagtcaacaataa

SEQ ID NO: 49208 - DNA, 20 bp, synthetic construct
  misc_feature 1..20: note = chemically synthesized
  source 1..20: mol_type = other DNA
agtcaacaataaaagcattt

SEQ ID NO: 49209 - DNA, 20 bp, synthetic construct
  misc_feature 1..20: note = chemically synthesized
  source 1..20: mol_type = other DNA
caacaataaaagcatttaag

SEQ ID NO: 49210 - DNA, 20 bp, synthetic construct
  misc_feature 1..20: note = chemically synthesized
  source 1..20: mol_type = other DNA
aagcatttaagaagttattc

SEQ ID NO: 49211 - DNA, 20 bp, synthetic construct
  misc_feature 1..20: note = chemically synthesized
  source 1..20: mol_type = other DNA
agcatttaagaagttattct

SEQ ID NO: 49212 - DNA, 20 bp, synthetic construct
  misc_feature 1..20: note = chemically synthesized
  source 1..20: mol_type = other DNA
tttaagaagttattctaggc

SEQ ID NO: 49213 - DNA, 20 bp, synthetic construct
  misc_feature 1..20: note = chemically synthesized
  source 1..20: mol_type = other DNA
ttaagaagttattctaggct

SEQ ID NO: 49214 - DNA, 20 bp, synthetic construct
  misc_feature 1..20: note = chemically synthesized
  source 1..20: mol_type = other DNA
aagaagttattctaggctgg

SEQ ID NO: 49215 - DNA, 20 bp, synthetic construct
  misc_feature 1..20: note = chemically synthesized
  source 1..20: mol_type = other DNA
aagttattctaggctgggag

SEQ ID NO: 49216 - DNA, 20 bp, synthetic construct
  misc_feature 1..20: note = chemically synthesized
  source 1..20: mol_type = other DNA
ttattctaggctgggagcgg

SEQ ID NO: 49217 - DNA, 20 bp, synthetic construct
  misc_feature 1..20: note = chemically synthesized
  source 1..20: mol_type = other DNA
gtggctcacacctgcaattg

SEQ ID NO: 49218 - DNA, 20 bp, synthetic construct
  misc_feature 1..20: note = chemically synthesized
  source 1..20: mol_type = other DNA
cacctgcaattgcagcactt

SEQ ID NO: 49219 - DNA, 20 bp, synthetic construct
  misc_feature 1..20: note = chemically synthesized
  source 1..20: mol_type = other DNA
acctgcaattgcagcacttt

SEQ ID NO: 49220 - DNA, 20 bp, synthetic construct
  misc_feature 1..20: note = chemically synthesized
  source 1..20: mol_type = other DNA
ctgcaattgcagcactttgg

SEQ ID NO: 49221 - DNA, 20 bp, synthetic construct
  misc_feature 1..20: note = chemically synthesized
  source 1..20: mol_type = other DNA
tgcaattgcagcactttggg

SEQ ID NO: 49222 - DNA, 20 bp, synthetic construct
  misc_feature 1..20: note = chemically synthesized
  source 1..20: mol_type = other DNA
ttgcagcactttgggaggcc

SEQ ID NO: 49223 - DNA, 20 bp, synthetic construct
  misc_feature 1..20: note = chemically synthesized
  source 1..20: mol_type = other DNA
agcactttgggaggcctaga

SEQ ID NO: 49224 - DNA, 20 bp, synthetic construct
  misc_feature 1..20: note = chemically synthesized
  source 1..20: mol_type = other DNA
gcactttgggaggcctagac

SEQ ID NO: 49225 - DNA, 20 bp, synthetic construct
  misc_feature 1..20: note = chemically synthesized
  source 1..20: mol_type = other DNA
ctttgggaggcctagacagg

SEQ ID NO: 49226 - DNA, 20 bp, synthetic construct
  misc_feature 1..20: note = chemically synthesized
  source 1..20: mol_type = other DNA
agacaggcggatcacgacgt

SEQ ID NO: 49227 - DNA, 20 bp, synthetic construct
  misc_feature 1..20: note = chemically synthesized
  source 1..20: mol_type = other DNA
gacaggcggatcacgacgtc

SEQ ID NO: 49228 - DNA, 20 bp, synthetic construct
  misc_feature 1..20: note = chemically synthesized
  source 1..20: mol_type = other DNA
caggcggatcacgacgtcag

SEQ ID NO: 49229 - DNA, 20 bp, synthetic construct
  misc_feature 1..20: note = chemically synthesized
  source 1..20: mol_type = other DNA
gatcacgacgtcaggagttc

SEQ ID NO: 49230 - DNA, 20 bp, synthetic construct
  misc_feature 1..20: note = chemically synthesized
  source 1..20: mol_type = other DNA
cgacgtcaggagttcaagat

SEQ ID NO: 49231 - DNA, 20 bp, synthetic construct
  misc_feature 1..20: note = chemically synthesized
  source 1..20: mol_type = other DNA
tcaggagttcaagatcagcc

SEQ ID NO: 49232 - DNA, 20 bp, synthetic construct
  misc_feature 1..20: note = chemically synthesized
  source 1..20: mol_type = other DNA
caagatcagcctggccaaca

SEQ ID NO: 49233 - DNA, 20 bp, synthetic construct
  misc_feature 1..20: note = chemically synthesized
  source 1..20: mol_type = other DNA
ctactaaaaatataaaaact

SEQ ID NO: 49234 - DNA, 20 bp, synthetic construct
  misc_feature 1..20: note = chemically synthesized
  source 1..20: mol_type = other DNA
aaaaatataaaaacttagcc

SEQ ID NO: 49235 - DNA, 20 bp, synthetic construct
  misc_feature 1..20: note = chemically synthesized
  source 1..20: mol_type = other DNA
tataaaaacttagcctggcg

SEQ ID NO: 49236 - DNA, 20 bp, synthetic construct
  misc_feature 1..20: note = chemically synthesized
  source 1..20: mol_type = other DNA
aaaaacttagcctggcgtgg

SEQ ID NO: 49237 - DNA, 20 bp, synthetic construct
  misc_feature 1..20: note = chemically synthesized
  source 1..20: mol_type = other DNA
aacttagcctggcgtggtgg

SEQ ID NO: 49238 - DNA, 20 bp, synthetic construct
  misc_feature 1..20: note = chemically synthesized
  source 1..20: mol_type = other DNA
acttagcctggcgtggtggc

SEQ ID NO: 49239 - DNA, 20 bp, synthetic construct
  misc_feature 1..20: note = chemically synthesized
  source 1..20: mol_type = other DNA
gtggcaggcatgtgtaatcc

SEQ ID NO: 49240 - DNA, 20 bp, synthetic construct
  misc_feature 1..20: note = chemically synthesized
  source 1..20: mol_type = other DNA
catgtgtaatcccagcaatt

SEQ ID NO: 49241 - DNA, 20 bp, synthetic construct
  misc_feature 1..20: note = chemically synthesized
  source 1..20: mol_type = other DNA
atgtgtaatcccagcaattt

SEQ ID NO: 49242 - DNA, 20 bp, synthetic construct
  misc_feature 1..20: note = chemically synthesized
  source 1..20: mol_type = other DNA
gtgtaatcccagcaatttgg

SEQ ID NO: 49243 - DNA, 20 bp, synthetic construct
  misc_feature 1..20: note = chemically synthesized
  source 1..20: mol_type = other DNA
tgtaatcccagcaatttggg

SEQ ID NO: 49244 - DNA, 20 bp, synthetic construct
  misc_feature 1..20: note = chemically synthesized
  source 1..20: mol_type = other DNA
tcccagcaatttgggaggct

SEQ ID NO: 49245 - DNA, 20 bp, synthetic construct
  misc_feature 1..20: note = chemically synthesized
  source 1..20: mol_type = other DNA
cccagcaatttgggaggctg

SEQ ID NO: 49246 - DNA, 20 bp, synthetic construct
  misc_feature 1..20: note = chemically synthesized
  source 1..20: mol_type = other DNA
agcaatttgggaggctgagg

SEQ ID NO: 49247 - DNA, 20 bp, synthetic construct
  misc_feature 1..20: note = chemically synthesized
  source 1..20: mol_type = other DNA
gcaatttgggaggctgaggc

SEQ ID NO: 49248 - DNA, 20 bp, synthetic construct
  misc_feature 1..20: note = chemically synthesized
  source 1..20: mol_type = other DNA
aatttgggaggctgaggcag

SEQ ID NO: 49249 - DNA, 20 bp, synthetic construct
  misc_feature 1..20: note = chemically synthesized
  source 1..20: mol_type = other DNA
gcaggagaatcgcttgatcc

SEQ ID NO: 49250 - DNA, 20 bp, synthetic construct
  misc_feature 1..20: note = chemically synthesized
  source 1..20: mol_type = other DNA
caggagaatcgcttgatcct

SEQ ID NO: 49251 - DNA, 20 bp, synthetic construct
  misc_feature 1..20: note = chemically synthesized
  source 1..20: mol_type = other DNA
ggagaatcgcttgatcctgg

SEQ ID NO: 49252 - DNA, 20 bp, synthetic construct
  misc_feature 1..20: note = chemically synthesized
  source 1..20: mol_type = other DNA
gagaatcgcttgatcctggg

SEQ ID NO: 49253 - DNA, 20 bp, synthetic construct
  misc_feature 1..20: note = chemically synthesized
  source 1..20: mol_type = other DNA
aatcgcttgatcctgggagg

SEQ ID NO: 49254 - DNA, 20 bp, synthetic construct
  misc_feature 1..20: note = chemically synthesized
  source 1..20: mol_type = other DNA
tcgcttgatcctgggaggca

SEQ ID NO: 49255 - DNA, 20 bp, synthetic construct
  misc_feature 1..20: note = chemically synthesized
  source 1..20: mol_type = other DNA
cgcttgatcctgggaggcag

SEQ ID NO: 49256 - DNA, 20 bp, synthetic construct
  misc_feature 1..20: note = chemically synthesized
  source 1..20: mol_type = other DNA
atcctgggaggcagaggttg

SEQ ID NO: 49257 - DNA, 20 bp, synthetic construct
  misc_feature 1..20: note = chemically synthesized
  source 1..20: mol_type = other DNA
tgggaggcagaggttgcagt

SEQ ID NO: 49258 - DNA, 20 bp, synthetic construct
  misc_feature 1..20: note = chemically synthesized
  source 1..20: mol_type = other DNA
ggcagaggttgcagtgagcc

SEQ ID NO: 49259 - DNA, 20 bp, synthetic construct
  misc_feature 1..20: note = chemically synthesized
  source 1..20: mol_type = other DNA
aagattgtgccactgcattc

SEQ ID NO: 49260 - DNA, 20 bp, synthetic construct
  misc_feature 1..20: note = chemically synthesized
  source 1..20: mol_type = other DNA
tgtgccactgcattccagcc

SEQ ID NO: 49261 - DNA, 20 bp, synthetic construct
  misc_feature 1..20: note = chemically synthesized
  source 1..20: mol_type = other DNA
gtgccactgcattccagccc

SEQ ID NO: 49262 - DNA, 20 bp, synthetic construct
  misc_feature 1..20: note = chemically synthesized
  source 1..20: mol_type = other DNA
ctgcattccagcccaggtga

SEQ ID NO: 49263 - DNA, 20 bp, synthetic construct
  misc_feature 1..20: note = chemically synthesized
  source 1..20: mol_type = other DNA
tccagcccaggtgacagcat

SEQ ID NO: 49264 - DNA, 20 bp, synthetic construct
  misc_feature 1..20: note = chemically synthesized
  source 1..20: mol_type = other DNA
agactccgtcacaaaaaaaa

SEQ ID NO: 49265 - DNA, 20 bp, synthetic construct
  misc_feature 1..20: note = chemically synthesized
  source 1..20: mol_type = other DNA
caaaaaaaaaagaaaaaaaa

SEQ ID NO: 49266 - DNA, 20 bp, synthetic construct
  misc_feature 1..20: note = chemically synthesized
  source 1..20: mol_type = other DNA
aaaaaaaaaagaaaaaaaaa

SEQ ID NO: 49267 - DNA, 20 bp, synthetic construct
  misc_feature 1..20: note = chemically synthesized
  source 1..20: mol_type = other DNA
aaaaaaaaagaaaaaaaaaa

SEQ ID NO: 49268 - DNA, 20 bp, synthetic construct
  misc_feature 1..20: note = chemically synthesized
  source 1..20: mol_type = other DNA
aaaaaaaagaaaaaaaaaag

SEQ ID NO: 49269 - DNA, 20 bp, synthetic construct
  misc_feature 1..20: note = chemically synthesized
  source 1..20: mol_type = other DNA
aaaaaaagaaaaaaaaaagg

SEQ ID NO: 49270 - DNA, 20 bp, synthetic construct
  misc_feature 1..20: note = chemically synthesized
  source 1..20: mol_type = other DNA
aaaaaagaaaaaaaaaaggg

SEQ ID NO: 49271 - DNA, 20 bp, synthetic construct
  misc_feature 1..20: note = chemically synthesized
  source 1..20: mol_type = other DNA
aaaaagaaaaaaaaaagggg

SEQ ID NO: 49272 - DNA, 20 bp, synthetic construct
  misc_feature 1..20: note = chemically synthesized
  source 1..20: mol_type = other DNA
aaaagaaaaaaaaaaggggg

SEQ ID NO: 49273 - DNA, 20 bp, synthetic construct
  misc_feature 1..20: note = chemically synthesized
  source 1..20: mol_type = other DNA
aaagaaaaaaaaaagggggg

SEQ ID NO: 49274 - DNA, 20 bp, synthetic construct
  misc_feature 1..20: note = chemically synthesized
  source 1..20: mol_type = other DNA
aagaaaaaaaaaaggggggg

SEQ ID NO: 49275 - DNA, 20 bp, synthetic construct
  misc_feature 1..20: note = chemically synthesized
  source 1..20: mol_type = other DNA
gaaaaaaaaaaggggggggg

SEQ ID NO: 49276 - DNA, 20 bp, synthetic construct
  misc_feature 1..20: note = chemically synthesized
  source 1..20: mol_type = other DNA
aaaaaaaaggggggggggag

SEQ ID NO: 49277 - DNA, 20 bp, synthetic construct
  misc_feature 1..20: note = chemically synthesized
  source 1..20: mol_type = other DNA
aaaaaggggggggggagcgg

SEQ ID NO: 49278 - DNA, 20 bp, synthetic construct
  misc_feature 1..20: note = chemically synthesized
  source 1..20: mol_type = other DNA
aaaggggggggggagcggtg

SEQ ID NO: 49279 - DNA, 20 bp, synthetic construct
  misc_feature 1..20: note = chemically synthesized
  source 1..20: mol_type = other DNA
ggggggggagcggtggagcc

SEQ ID NO: 49280 - DNA, 20 bp, synthetic construct
  misc_feature 1..20: note = chemically synthesized
  source 1..20: mol_type = other DNA
gtggagccaagatgaccgaa

SEQ ID NO: 49281 - DNA, 20 bp, synthetic construct
  misc_feature 1..20: note = chemically synthesized
  source 1..20: mol_type = other DNA
tggagccaagatgaccgaat

SEQ ID NO: 49282 - DNA, 20 bp, synthetic construct
  misc_feature 1..20: note = chemically synthesized
  source 1..20: mol_type = other DNA
ccaagatgaccgaataggaa

SEQ ID NO: 49283 - DNA, 20 bp, synthetic construct
  misc_feature 1..20: note = chemically synthesized
  source 1..20: mol_type = other DNA
tgaccgaataggaacagctc

SEQ ID NO: 49284 - DNA, 20 bp, synthetic construct
  misc_feature 1..20: note = chemically synthesized
  source 1..20: mol_type = other DNA
ataggaacagctccagtcta

SEQ ID NO: 49285 - DNA, 20 bp, synthetic construct
  misc_feature 1..20: note = chemically synthesized
  source 1..20: mol_type = other DNA
cagtctatagctcccatcgt

SEQ ID NO: 49286 - DNA, 20 bp, synthetic construct
  misc_feature 1..20: note = chemically synthesized
  source 1..20: mol_type = other DNA
agctcccatcgtgagtgacg

SEQ ID NO: 49287 - DNA, 20 bp, synthetic construct
  misc_feature 1..20: note = chemically synthesized
  source 1..20: mol_type = other DNA
tcccatcgtgagtgacgcag

SEQ ID NO: 49288 - DNA, 20 bp, synthetic construct
  misc_feature 1..20: note = chemically synthesized
  source 1..20: mol_type = other DNA
atcgtgagtgacgcagaaga

SEQ ID NO: 49289 - DNA, 20 bp, synthetic construct
  misc_feature 1..20: note = chemically synthesized
  source 1..20: mol_type = other DNA
tcgtgagtgacgcagaagac

SEQ ID NO: 49290 - DNA, 20 bp, synthetic construct
  misc_feature 1..20: note = chemically synthesized
  source 1..20: mol_type = other DNA
tgatttctgcatttccaact

SEQ ID NO: 49291 - DNA, 20 bp, synthetic construct
  misc_feature 1..20: note = chemically synthesized
  source 1..20: mol_type = other DNA
gatttctgcatttccaactg

SEQ ID NO: 49292 - DNA, 20 bp, synthetic construct
  misc_feature 1..20: note = chemically synthesized
  source 1..20: mol_type = other DNA
tgcatttccaactgaggtac

SEQ ID NO: 49293 - DNA, 20 bp, synthetic construct
  misc_feature 1..20: note = chemically synthesized
  source 1..20: mol_type = other DNA
gcatttccaactgaggtacc

SEQ ID NO: 49294 - DNA, 20 bp, synthetic construct
  misc_feature 1..20: note = chemically synthesized
  source 1..20: mol_type = other DNA
gaggtaccaggttcatctca

SEQ ID NO: 49295 - DNA, 20 bp, synthetic construct
  misc_feature 1..20: note = chemically synthesized
  source 1..20: mol_type = other DNA
aggtaccaggttcatctcac

SEQ ID NO: 49296 - DNA, 20 bp, synthetic construct
  misc_feature 1..20: note = chemically synthesized
  source 1..20: mol_type = other DNA
ggtaccaggttcatctcaca

SEQ ID NO: 49297 - DNA, 20 bp, synthetic construct
  misc_feature 1..20: note = chemically synthesized
  source 1..20: mol_type = other DNA
accaggttcatctcacaggg

SEQ ID NO: 49298 - DNA, 20 bp, synthetic construct
  misc_feature 1..20: note = chemically synthesized
  source 1..20: mol_type = other DNA
ttcatctcacagggaagtgc

SEQ ID NO: 49299 - DNA, 20 bp, synthetic construct
  misc_feature 1..20: note = chemically synthesized
  source 1..20: mol_type = other DNA
tcatctcacagggaagtgcc

SEQ ID NO: 49300 - DNA, 20 bp, synthetic construct
  misc_feature 1..20: note = chemically synthesized
  source 1..20: mol_type = other DNA
tctcacagggaagtgccagg

SEQ ID NO: 49301 - DNA, 20 bp, synthetic construct
  misc_feature 1..20: note = chemically synthesized
  source 1..20: mol_type = other DNA
cacagggaagtgccaggcag

SEQ ID NO: 49302 - DNA, 20 bp, synthetic construct
  misc_feature 1..20: note = chemically synthesized
  source 1..20: mol_type = other DNA
acagggaagtgccaggcagt

SEQ ID NO: 49303 - DNA, 20 bp, synthetic construct
  misc_feature 1..20: note = chemically synthesized
  source 1..20: mol_type = other DNA
gaagtgccaggcagtgggtg

SEQ ID NO: 49304 - DNA, 20 bp, synthetic construct
  misc_feature 1..20: note = chemically synthesized
  source 1..20: mol_type = other DNA
aagtgccaggcagtgggtgc

SEQ ID NO: 49305 - DNA, 20 bp, synthetic construct
  misc_feature 1..20: note = chemically synthesized
  source 1..20: mol_type = other DNA
gccaggcagtgggtgcagga

SEQ ID NO: 49306 - DNA, 20 bp, synthetic construct
  misc_feature 1..20: note = chemically synthesized
  source 1..20: mol_type = other DNA
aggcagtgggtgcaggacag

SEQ ID NO: 49307 - DNA, 20 bp, synthetic construct
  misc_feature 1..20: note = chemically synthesized
  source 1..20: mol_type = other DNA
ggcagtgggtgcaggacagt

SEQ ID NO: 49308 - DNA, 20 bp, synthetic construct
  misc_feature 1..20: note = chemically synthesized
  source 1..20: mol_type = other DNA
tgggtgcaggacagtaggtg

SEQ ID NO: 49309 - DNA, 20 bp, synthetic construct
  misc_feature 1..20: note = chemically synthesized
  source 1..20: mol_type = other DNA
aggtgcagtgcactgtgcat

SEQ ID NO: 49310 - DNA, 20 bp, synthetic construct
  misc_feature 1..20: note = chemically synthesized
  source 1..20: mol_type = other DNA
agtgcactgtgcatgagcca

SEQ ID NO: 49311 - DNA, 20 bp, synthetic construct
  misc_feature 1..20: note = chemically synthesized
  source 1..20: mol_type = other DNA
gcactgtgcatgagccaaag

SEQ ID NO: 49312 - DNA, 20 bp, synthetic construct
  misc_feature 1..20: note = chemically synthesized
  source 1..20: mol_type = other DNA
cactgtgcatgagccaaagc

SEQ ID NO: 49313 - DNA, 20 bp, synthetic construct
  misc_feature 1..20: note = chemically synthesized
  source 1..20: mol_type = other DNA
actgtgcatgagccaaagca

SEQ ID NO: 49314 - DNA, 20 bp, synthetic construct
  misc_feature 1..20: note = chemically synthesized
  source 1..20: mol_type = other DNA
tgcatgagccaaagcagggc

SEQ ID NO: 49315 - DNA, 20 bp, synthetic construct
  misc_feature 1..20: note = chemically synthesized
  source 1..20: mol_type = other DNA
gcatgagccaaagcagggcg

SEQ ID NO: 49316 - DNA, 20 bp, synthetic construct
  misc_feature 1..20: note = chemically synthesized
  source 1..20: mol_type = other DNA
gggcgaggcatcacctcacc

SEQ ID NO: 49317 - DNA, 20 bp, synthetic construct
  misc_feature 1..20: note = chemically synthesized
  source 1..20: mol_type = other DNA
ggcgaggcatcacctcaccc

SEQ ID NO: 49318 - DNA, 20 bp, synthetic construct
  misc_feature 1..20: note = chemically synthesized
  source 1..20: mol_type = other DNA
gaggcatcacctcacccggg

SEQ ID NO: 49319 - DNA, 20 bp, synthetic construct
  misc_feature 1..20: note = chemically synthesized
  source 1..20: mol_type = other DNA
tcacctcacccgggaagcac

SEQ ID NO: 49320 - DNA, 20 bp, synthetic construct
  misc_feature 1..20: note = chemically synthesized
  source 1..20: mol_type = other DNA
cacctcacccgggaagcaca

SEQ ID NO: 49321 - DNA, 20 bp, synthetic construct
  misc_feature 1..20: note = chemically synthesized
  source 1..20: mol_type = other DNA
acctcacccgggaagcacaa

SEQ ID NO: 49322 - DNA, 20 bp, synthetic construct
  misc_feature 1..20: note = chemically synthesized
  source 1..20: mol_type = other DNA
cctcacccgggaagcacaag

SEQ ID NO: 49323 - DNA, 20 bp, synthetic construct
  misc_feature 1..20: note = chemically synthesized
  source 1..20: mol_type = other DNA
acccgggaagcacaaggggt

SEQ ID NO: 49324 - DNA, 20 bp, synthetic construct
  misc_feature 1..20: note = chemically synthesized
  source 1..20: mol_type = other DNA
cccgggaagcacaaggggtc

SEQ ID NO: 49325 - DNA, 20 bp, synthetic construct
  misc_feature 1..20: note = chemically synthesized
  source 1..20: mol_type = other DNA
ccgggaagcacaaggggtca

SEQ ID NO: 49326 - DNA, 20 bp, synthetic construct
  misc_feature 1..20: note = chemically synthesized
  source 1..20: mol_type = other DNA
ggtcagggaattccctttcc

SEQ ID NO: 49327 - DNA, 20 bp, synthetic construct
  misc_feature 1..20: note = chemically synthesized
  source 1..20: mol_type = other DNA
ggaattccctttcctagtca

SEQ ID NO: 49328 - DNA, 20 bp, synthetic construct
  misc_feature 1..20: note = chemically synthesized
  source 1..20: mol_type = other DNA
tccctttcctagtcaaagaa

SEQ ID NO: 49329 - DNA, 20 bp, synthetic construct
  misc_feature 1..20: note = chemically synthesized
  source 1..20: mol_type = other DNA
ccctttcctagtcaaagaaa

SEQ ID NO: 49330 - DNA, 20 bp, synthetic construct
  misc_feature 1..20: note = chemically synthesized
  source 1..20: mol_type = other DNA
cctttcctagtcaaagaaaa

SEQ ID NO: 49331 - DNA, 20 bp, synthetic construct
  misc_feature 1..20: note = chemically synthesized
  source 1..20: mol_type = other DNA
ctagtcaaagaaaagggtga

SEQ ID NO: 49332 - DNA, 20 bp, synthetic construct
  misc_feature 1..20: note = chemically synthesized
  source 1..20: mol_type = other DNA
tcaaagaaaagggtgacaga

SEQ ID NO: 49333 - DNA, 20 bp, synthetic construct
  misc_feature 1..20: note = chemically synthesized
  source 1..20: mol_type = other DNA
aaagggtgacagatggcacc

SEQ ID NO: 49334 - DNA, 20 bp, synthetic construct
  misc_feature 1..20: note = chemically synthesized
  source 1..20: mol_type = other DNA
acagatggcacctggaaaat

SEQ ID NO: 49335 - DNA, 20 bp, synthetic construct
  misc_feature 1..20: note = chemically synthesized
  source 1..20: mol_type = other DNA
cagatggcacctggaaaatc

SEQ ID NO: 49336 - DNA, 20 bp, synthetic construct
  misc_feature 1..20: note = chemically synthesized
  source 1..20: mol_type = other DNA
taatactgcgctcttccaac

SEQ ID NO: 49337 - DNA, 20 bp, synthetic construct
  misc_feature 1..20: note = chemically synthesized
  source 1..20: mol_type = other DNA
cttccaacaagcttaacaaa

SEQ ID NO: 49338 - DNA, 20 bp, synthetic construct
  misc_feature 1..20: note = chemically synthesized
  source 1..20: mol_type = other DNA
aagcttaacaaatggcacac

SEQ ID NO: 49339 - DNA, 20 bp, synthetic construct
  misc_feature 1..20: note = chemically synthesized
  source 1..20: mol_type = other DNA
agcttaacaaatggcacacc

SEQ ID NO: 49340 - DNA, 20 bp, synthetic construct
  misc_feature 1..20: note = chemically synthesized
  source 1..20: mol_type = other DNA
cttaacaaatggcacaccag

SEQ ID NO: 49341 - DNA, 20 bp, synthetic construct
  misc_feature 1..20: note = chemically synthesized
  source 1..20: mol_type = other DNA
aggagattatatcccatgcc

SEQ ID NO: 49342 - DNA, 20 bp, synthetic construct
  misc_feature 1..20: note = chemically synthesized
  source 1..20: mol_type = other DNA
attatatcccatgcctggct

SEQ ID NO: 49343 - DNA, 20 bp, synthetic construct
  misc_feature 1..20: note = chemically synthesized
  source 1..20: mol_type = other DNA
tatatcccatgcctggctca

SEQ ID NO: 49344 - DNA, 20 bp, synthetic construct
  misc_feature 1..20: note = chemically synthesized
  source 1..20: mol_type = other DNA
atatcccatgcctggctcag

SEQ ID NO: 49345 - DNA, 20 bp, synthetic construct
  misc_feature 1..20: note = chemically synthesized
  source 1..20: mol_type = other DNA
tatcccatgcctggctcaga

SEQ ID NO: 49346 - DNA, 20 bp, synthetic construct
  misc_feature 1..20: note = chemically synthesized
  source 1..20: mol_type = other DNA
ctcagagggtcctacgccca

SEQ ID NO: 49347 - DNA, 20 bp, synthetic construct
  misc_feature 1..20: note = chemically synthesized
  source 1..20: mol_type = other DNA
cagagggtcctacgcccatg

SEQ ID NO: 49348 - DNA, 20 bp, synthetic construct
  misc_feature 1..20: note = chemically synthesized
  source 1..20: mol_type = other DNA
catggagcctcgctcattgc

SEQ ID NO: 49349 - DNA, 20 bp, synthetic construct
  misc_feature 1..20: note = chemically synthesized
  source 1..20: mol_type = other DNA
agcctcgctcattgctagca

SEQ ID NO: 49350 - DNA, 20 bp, synthetic construct
  misc_feature 1..20: note = chemically synthesized
  source 1..20: mol_type = other DNA
ctcgctcattgctagcacag

SEQ ID NO: 49351 - DNA, 20 bp, synthetic construct
  misc_feature 1..20: note = chemically synthesized
  source 1..20: mol_type = other DNA
cattgctagcacagcagtct

SEQ ID NO: 49352 - DNA, 20 bp, synthetic construct
  misc_feature 1..20: note = chemically synthesized
  source 1..20: mol_type = other DNA
attgctagcacagcagtctg

SEQ ID NO: 49353 - DNA, 20 bp, synthetic construct
  misc_feature 1..20: note = chemically synthesized
  source 1..20: mol_type = other DNA
gcagtctgaggtcaaactgc

SEQ ID NO: 49354 - DNA, 20 bp, synthetic construct
  misc_feature 1..20: note = chemically synthesized
  source 1..20: mol_type = other DNA
cagtctgaggtcaaactgca

SEQ ID NO: 49355 - DNA, 20 bp, synthetic construct
  misc_feature 1..20: note = chemically synthesized
  source 1..20: mol_type = other DNA
tctgaggtcaaactgcaagg

SEQ ID NO: 49356 - DNA, 20 bp, synthetic construct
  misc_feature 1..20: note = chemically synthesized
  source 1..20: mol_type = other DNA
gaggtcaaactgcaaggtgg

SEQ ID NO: 49357 - DNA, 20 bp, synthetic construct
  misc_feature 1..20: note = chemically synthesized
  source 1..20: mol_type = other DNA
tcaaactgcaaggtggcagt

SEQ ID NO: 49358 - DNA, 20 bp, synthetic construct
  misc_feature 1..20: note = chemically synthesized
  source 1..20: mol_type = other DNA
caaactgcaaggtggcagtg

SEQ ID NO: 49359 - DNA, 20 bp, synthetic construct
  misc_feature 1..20: note = chemically synthesized
  source 1..20: mol_type = other DNA
ctgcaaggtggcagtgaggc

SEQ ID NO: 49360 - DNA, 20 bp, synthetic construct
  misc_feature 1..20: note = chemically synthesized
  source 1..20: mol_type = other DNA
tgcaaggtggcagtgaggct

SEQ ID NO: 49361 - DNA, 20 bp, synthetic construct
  misc_feature 1..20: note = chemically synthesized
  source 1..20: mol_type = other DNA
gcaaggtggcagtgaggctg

SEQ ID NO: 49362 - DNA, 20 bp, synthetic construct
  misc_feature 1..20: note = chemically synthesized
  source 1..20: mol_type = other DNA
caaggtggcagtgaggctgg

SEQ ID NO: 49363 - DNA, 20 bp, synthetic construct
  misc_feature 1..20: note = chemically synthesized
  source 1..20: mol_type = other DNA
aggtggcagtgaggctgggg

SEQ ID NO: 49364 - DNA, 20 bp, synthetic construct
  misc_feature 1..20: note = chemically synthesized
  source 1..20: mol_type = other DNA
ggtggcagtgaggctggggg

SEQ ID NO: 49365 - DNA, 20 bp, synthetic construct
  misc_feature 1..20: note = chemically synthesized
  source 1..20: mol_type = other DNA
gtggcagtgaggctggggga

SEQ ID NO: 49366 - DNA, 20 bp, synthetic construct
  misc_feature 1..20: note = chemically synthesized
  source 1..20: mol_type = other DNA
tggcagtgaggctgggggag

SEQ ID NO: 49367 - DNA, 20 bp, synthetic construct
  misc_feature 1..20: note = chemically synthesized
  source 1..20: mol_type = other DNA
gaggggtgcccaccattgtc

SEQ ID NO: 49368 - DNA, 20 bp, synthetic construct
  misc_feature 1..20: note = chemically synthesized
  source 1..20: mol_type = other DNA
aggggtgcccaccattgtcc

SEQ ID NO: 49369 - DNA, 20 bp, synthetic construct
  misc_feature 1..20: note = chemically synthesized
  source 1..20: mol_type = other DNA
gcccaccattgtccaggctt

SEQ ID NO: 49370 - DNA, 20 bp, synthetic construct
  misc_feature 1..20: note = chemically synthesized
  source 1..20: mol_type = other DNA
caccattgtccaggcttgag

SEQ ID NO: 49371 - DNA, 20 bp, synthetic construct
  misc_feature 1..20: note = chemically synthesized
  source 1..20: mol_type = other DNA
accattgtccaggcttgagc

SEQ ID NO: 49372 - DNA, 20 bp, synthetic construct
  misc_feature 1..20: note = chemically synthesized
  source 1..20: mol_type = other DNA
caggcttgagcaggtaaaca

SEQ ID NO: 49373 - DNA, 20 bp, synthetic construct
  misc_feature 1..20: note = chemically synthesized
  source 1..20: mol_type = other DNA
agcaggtaaacaaagccgcc

SEQ ID NO: 49374 - DNA, 20 bp, synthetic construct
  misc_feature 1..20: note = chemically synthesized
  source 1..20: mol_type = other DNA
aggtaaacaaagccgcctgg

SEQ ID NO: 49375 - DNA, 20 bp, synthetic construct
  misc_feature 1..20: note = chemically synthesized
  source 1..20: mol_type = other DNA
agccgcctggaagctcgaac

SEQ ID NO: 49376 - DNA, 20 bp, synthetic construct
  misc_feature 1..20: note = chemically synthesized
  source 1..20: mol_type = other DNA
gccgcctggaagctcgaact

SEQ ID NO: 49377 - DNA, 20 bp, synthetic construct
  misc_feature 1..20: note = chemically synthesized
  source 1..20: mol_type = other DNA
gcctggaagctcgaactggg

SEQ ID NO: 49378 - DNA, 20 bp, synthetic construct
  misc_feature 1..20: note = chemically synthesized
  source 1..20: mol_type = other DNA
ctggaagctcgaactgggtg

SEQ ID NO: 49379 - DNA, 20 bp, synthetic construct
  misc_feature 1..20: note = chemically synthesized
  source 1..20: mol_type = other DNA
gaactgggtggagcccacca

SEQ ID NO: 49380 - DNA, 20 bp, synthetic construct
  misc_feature 1..20: note = chemically synthesized
  source 1..20: mol_type = other DNA
ggtggagcccaccacagctc

SEQ ID NO: 49381 - DNA, 20 bp, synthetic construct
  misc_feature 1..20: note = chemically synthesized
  source 1..20: mol_type = other DNA
gtggagcccaccacagctca

SEQ ID NO: 49382 - DNA, 20 bp, synthetic construct
  misc_feature 1..20: note = chemically synthesized
  source 1..20: mol_type = other DNA
ggagcccaccacagctcaag

SEQ ID NO: 49383 - DNA, 20 bp, synthetic construct
  misc_feature 1..20: note = chemically synthesized
  source 1..20: mol_type = other DNA
gagcccaccacagctcaagg

SEQ ID NO: 49384 - DNA, 20 bp, synthetic construct
  misc_feature 1..20: note = chemically synthesized
  source 1..20: mol_type = other DNA
aggaggcctgcctgcctctg

SEQ ID NO: 49385 - DNA, 20 bp, synthetic construct
  misc_feature 1..20: note = chemically synthesized
  source 1..20: mol_type = other DNA
ggaggcctgcctgcctctgt

SEQ ID NO: 49386 - DNA, 20 bp, synthetic construct
  misc_feature 1..20: note = chemically synthesized
  source 1..20: mol_type = other DNA
gcctctgtaggctccacctc

SEQ ID NO: 49387 - DNA, 20 bp, synthetic construct
  misc_feature 1..20: note = chemically synthesized
  source 1..20: mol_type = other DNA
cctctgtaggctccacctct

SEQ ID NO: 49388 - DNA, 20 bp, synthetic construct
  misc_feature 1..20: note = chemically synthesized
  source 1..20: mol_type = other DNA
ctctgtaggctccacctcta

SEQ ID NO: 49389 - DNA, 20 bp, synthetic construct
  misc_feature 1..20: note = chemically synthesized
  source 1..20: mol_type = other DNA
tctgtaggctccacctctag

SEQ ID NO: 49390 - DNA, 20 bp, synthetic construct
  misc_feature 1..20: note = chemically synthesized
  source 1..20: mol_type = other DNA
gtaggctccacctctagggg

SEQ ID NO: 49391 - DNA, 20 bp, synthetic construct
  misc_feature 1..20: note = chemically synthesized
  source 1..20: mol_type = other DNA
taggctccacctctaggggc

SEQ ID NO: 49392 - DNA, 20 bp, synthetic construct
  misc_feature 1..20: note = chemically synthesized
  source 1..20: mol_type = other DNA
aggctccacctctaggggca

SEQ ID NO: 49393 - DNA, 20 bp, synthetic construct
  misc_feature 1..20: note = chemically synthesized
  source 1..20: mol_type = other DNA
ccacctctaggggcagggca

SEQ ID NO: 49394 - DNA, 20 bp, synthetic construct
  misc_feature 1..20: note = chemically synthesized
  source 1..20: mol_type = other DNA
ggcagggcacagacaaacaa

SEQ ID NO: 49395 - DNA, 20 bp, synthetic construct
  misc_feature 1..20: note = chemically synthesized
  source 1..20: mol_type = other DNA
acagacaaacaaaagacaac

SEQ ID NO: 49396 - DNA, 20 bp, synthetic construct
  misc_feature 1..20: note = chemically synthesized
  source 1..20: mol_type = other DNA
aaagacaacaagaacctctg

SEQ ID NO: 49397 - DNA, 20 bp, synthetic construct
  misc_feature 1..20: note = chemically synthesized
  source 1..20: mol_type = other DNA
acttaaatgtccctgtctga

SEQ ID NO: 49398 - DNA, 20 bp, synthetic construct
  misc_feature 1..20: note = chemically synthesized
  source 1..20: mol_type = other DNA
gtccctgtctgacagctttg

SEQ ID NO: 49399 - DNA, 20 bp, synthetic construct
  misc_feature 1..20: note = chemically synthesized
  source 1..20: mol_type = other DNA
ccctgtctgacagctttgaa

SEQ ID NO: 49400 - DNA, 20 bp, synthetic construct
  misc_feature 1..20: note = chemically synthesized
  source 1..20: mol_type = other DNA
ctgtctgacagctttgaaga

SEQ ID NO: 49401 - DNA, 20 bp, synthetic construct
  misc_feature 1..20: note = chemically synthesized
  source 1..20: mol_type = other DNA
tctgacagctttgaagagag

SEQ ID NO: 49402 - DNA, 20 bp, synthetic construct
  misc_feature 1..20: note = chemically synthesized
  source 1..20: mol_type = other DNA
gacagctttgaagagagtag

SEQ ID NO: 49403 - DNA, 20 bp, synthetic construct
  misc_feature 1..20: note = chemically synthesized
  source 1..20: mol_type = other DNA
gaagagagtagtggttctcc

SEQ ID NO: 49404 - DNA, 20 bp, synthetic construct
  misc_feature 1..20: note = chemically synthesized
  source 1..20: mol_type = other DNA
gtagtggttctcccagcaca

SEQ ID NO: 49405 - DNA, 20 bp, synthetic construct
  misc_feature 1..20: note = chemically synthesized
  source 1..20: mol_type = other DNA
gttctcccagcacatagctt

SEQ ID NO: 49406 - DNA, 20 bp, synthetic construct
  misc_feature 1..20: note = chemically synthesized
  source 1..20: mol_type = other DNA
cagcacatagcttcagatct

SEQ ID NO: 49407 - DNA, 20 bp, synthetic construct
  misc_feature 1..20: note = chemically synthesized
  source 1..20: mol_type = other DNA
catagcttcagatctgagaa

SEQ ID NO: 49408 - DNA, 20 bp, synthetic construct
  misc_feature 1..20: note = chemically synthesized
  source 1..20: mol_type = other DNA
atagcttcagatctgagaac

SEQ ID NO: 49409 - DNA, 20 bp, synthetic construct
  misc_feature 1..20: note = chemically synthesized
  source 1..20: mol_type = other DNA
gcttcagatctgagaacagg

SEQ ID NO: 49410 - DNA, 20 bp, synthetic construct
  misc_feature 1..20: note = chemically synthesized
  source 1..20: mol_type = other DNA
aacaggcagactgcctcctc

SEQ ID NO: 49411 - DNA, 20 bp, synthetic construct
  misc_feature 1..20: note = chemically synthesized
  source 1..20: mol_type = other DNA
aggcagactgcctcctcaag

SEQ ID NO: 49412 - DNA, 20 bp, synthetic construct
  misc_feature 1..20: note = chemically synthesized
  source 1..20: mol_type = other DNA
ggcagactgcctcctcaagt

SEQ ID NO: 49413 - DNA, 20 bp, synthetic construct
  misc_feature 1..20: note = chemically synthesized
  source 1..20: mol_type = other DNA
caagtgggtccctgaccccc

SEQ ID NO: 49414 - DNA, 20 bp, synthetic construct
  misc_feature 1..20: note = chemically synthesized
  source 1..20: mol_type = other DNA
gtgggtccctgacccccgag

SEQ ID NO: 49415 - DNA, 20 bp, synthetic construct
  misc_feature 1..20: note = chemically synthesized
  source 1..20: mol_type = other DNA
tgacccccgagtagcctaac

SEQ ID NO: 49416 - DNA, 20 bp, synthetic construct
  misc_feature 1..20: note = chemically synthesized
  source 1..20: mol_type = other DNA
gacccccgagtagcctaact

SEQ ID NO: 49417 - DNA, 20 bp, synthetic construct
  misc_feature 1..20: note = chemically synthesized
  source 1..20: mol_type = other DNA
cccccgagtagcctaactgg

SEQ ID NO: 49418 - DNA, 20 bp, synthetic construct
  misc_feature 1..20: note = chemically synthesized
  source 1..20: mol_type = other DNA
ccccgagtagcctaactggg

SEQ ID NO: 49419 - DNA, 20 bp, synthetic construct
  misc_feature 1..20: note = chemically synthesized
  source 1..20: mol_type = other DNA
cctaactgggaggcatcccc

SEQ ID NO: 49420 - DNA, 20 bp, synthetic construct
  misc_feature 1..20: note = chemically synthesized
  source 1..20: mol_type = other DNA
aactgggaggcatcccccag

SEQ ID NO: 49421 - DNA, 20 bp, synthetic construct
  misc_feature 1..20: note = chemically synthesized
  source 1..20: mol_type = other DNA
actgggaggcatcccccagt

SEQ ID NO: 49422 - DNA, 20 bp, synthetic construct
  misc_feature 1..20: note = chemically synthesized
  source 1..20: mol_type = other DNA
ctgggaggcatcccccagta

SEQ ID NO: 49423 - DNA, 20 bp, synthetic construct
  misc_feature 1..20: note = chemically synthesized
  source 1..20: mol_type = other DNA
tgggaggcatcccccagtag

SEQ ID NO: 49424 - DNA, 20 bp, synthetic construct
  misc_feature 1..20: note = chemically synthesized
  source 1..20: mol_type = other DNA
gaggcatcccccagtagggg

SEQ ID NO: 49425 - DNA, 20 bp, synthetic construct
  misc_feature 1..20: note = chemically synthesized
  source 1..20: mol_type = other DNA
gggcagactgacacctcaca

SEQ ID NO: 49426 - DNA, 20 bp, synthetic construct
  misc_feature 1..20: note = chemically synthesized
  source 1..20: mol_type = other DNA
agactgacacctcacatggc

SEQ ID NO: 49427 - DNA, 20 bp, synthetic construct
  misc_feature 1..20: note = chemically synthesized
  source 1..20: mol_type = other DNA
cacatggctggtactcctct

SEQ ID NO: 49428 - DNA, 20 bp, synthetic construct
  misc_feature 1..20: note = chemically synthesized
  source 1..20: mol_type = other DNA
ctcctctaagacaaaacttc

SEQ ID NO: 49429 - DNA, 20 bp, synthetic construct
  misc_feature 1..20: note = chemically synthesized
  source 1..20: mol_type = other DNA
cctctaagacaaaacttcca

SEQ ID NO: 49430 - DNA, 20 bp, synthetic construct
  misc_feature 1..20: note = chemically synthesized
  source 1..20: mol_type = other DNA
ctctaagacaaaacttccag

SEQ ID NO: 49431 - DNA, 20 bp, synthetic construct
  misc_feature 1..20: note = chemically synthesized
  source 1..20: mol_type = other DNA
aaaacttccagaggaatgat

SEQ ID NO: 49432 - DNA, 20 bp, synthetic construct
  misc_feature 1..20: note = chemically synthesized
  source 1..20: mol_type = other DNA
aaacttccagaggaatgatc

SEQ ID NO: 49433 - DNA, 20 bp, synthetic construct
  misc_feature 1..20: note = chemically synthesized
  source 1..20: mol_type = other DNA
cttccagaggaatgatcagg

SEQ ID NO: 49434 - DNA, 20 bp, synthetic construct
  misc_feature 1..20: note = chemically synthesized
  source 1..20: mol_type = other DNA
ccagaggaatgatcaggcag

SEQ ID NO: 49435 - DNA, 20 bp, synthetic construct
  misc_feature 1..20: note = chemically synthesized
  source 1..20: mol_type = other DNA
tgatcaggcagcagcatttg

SEQ ID NO: 49436 - DNA, 20 bp, synthetic construct
  misc_feature 1..20: note = chemically synthesized
  source 1..20: mol_type = other DNA
caccaatatccactgttctg

SEQ ID NO: 49437 - DNA, 20 bp, synthetic construct
  misc_feature 1..20: note = chemically synthesized
  source 1..20: mol_type = other DNA
cagccaccgctgttgatacc

SEQ ID NO: 49438 - DNA, 20 bp, synthetic construct
  misc_feature 1..20: note = chemically synthesized
  source 1..20: mol_type = other DNA
agccaccgctgttgataccc

SEQ ID NO: 49439 - DNA, 20 bp, synthetic construct
  misc_feature 1..20: note = chemically synthesized
  source 1..20: mol_type = other DNA
gctgttgatacccaggaaaa

SEQ ID NO: 49440 - DNA, 20 bp, synthetic construct
  misc_feature 1..20: note = chemically synthesized
  source 1..20: mol_type = other DNA
atacccaggaaaacagcttc

SEQ ID NO: 49441 - DNA, 20 bp, synthetic construct
  misc_feature 1..20: note = chemically synthesized
  source 1..20: mol_type = other DNA
acccaggaaaacagcttctg

SEQ ID NO: 49442 - DNA, 20 bp, synthetic construct
  misc_feature 1..20: note = chemically synthesized
  source 1..20: mol_type = other DNA
caggaaaacagcttctggag

SEQ ID NO: 49443 - DNA, 20 bp, synthetic construct
  misc_feature 1..20: note = chemically synthesized
  source 1..20: mol_type = other DNA
cagcttctggagtggacctc

SEQ ID NO: 49444 - DNA, 20 bp, synthetic construct
  misc_feature 1..20: note = chemically synthesized
  source 1..20: mol_type = other DNA
ggacctccagtaaactccaa

SEQ ID NO: 49445 - DNA, 20 bp, synthetic construct
  misc_feature 1..20: note = chemically synthesized
  source 1..20: mol_type = other DNA
agtaaactccaacagacctg

SEQ ID NO: 49446 - DNA, 20 bp, synthetic construct
  misc_feature 1..20: note = chemically synthesized
  source 1..20: mol_type = other DNA
actccaacagacctgcagct

SEQ ID NO: 49447 - DNA, 20 bp, synthetic construct
  misc_feature 1..20: note = chemically synthesized
  source 1..20: mol_type = other DNA
ctccaacagacctgcagctg

SEQ ID NO: 49448 - DNA, 20 bp, synthetic construct
  misc_feature 1..20: note = chemically synthesized
  source 1..20: mol_type = other DNA
tccaacagacctgcagctga

SEQ ID NO: 49449 - DNA, 20 bp, synthetic construct
  misc_feature 1..20: note = chemically synthesized
  source 1..20: mol_type = other DNA
cagctgagggtcctgactgt

SEQ ID NO: 49450 - DNA, 20 bp, synthetic construct
  misc_feature 1..20: note = chemically synthesized
  source 1..20: mol_type = other DNA
ctgagggtcctgactgttag

SEQ ID NO: 49451 - DNA, 20 bp, synthetic construct
  misc_feature 1..20: note = chemically synthesized
  source 1..20: mol_type = other DNA
tgagggtcctgactgttaga

SEQ ID NO: 49452 - DNA, 20 bp, synthetic construct
  misc_feature 1..20: note = chemically synthesized
  source 1..20: mol_type = other DNA
ttagaaggaaaactaacaaa

SEQ ID NO: 49453 - DNA, 20 bp, synthetic construct
  misc_feature 1..20: note = chemically synthesized
  source 1..20: mol_type = other DNA
aaggaaaactaacaaacaga

SEQ ID NO: 49454 - DNA, 20 bp, synthetic construct
  misc_feature 1..20: note = chemically synthesized
  source 1..20: mol_type = other DNA
aggaaaactaacaaacagaa

SEQ ID NO: 49455 - DNA, 20 bp, synthetic construct
  misc_feature 1..20: note = chemically synthesized
  source 1..20: mol_type = other DNA
tctgtacatcgccatcatca

SEQ ID NO: 49456 - DNA, 20 bp, synthetic construct
  misc_feature 1..20: note = chemically synthesized
  source 1..20: mol_type = other DNA
atcgccatcatcaaagacca

SEQ ID NO: 49457 - DNA, 20 bp, synthetic construct
  misc_feature 1..20: note = chemically synthesized
  source 1..20: mol_type = other DNA
tcgccatcatcaaagaccaa

SEQ ID NO: 49458 - DNA, 20 bp, synthetic construct
  misc_feature 1..20: note = chemically synthesized
  source 1..20: mol_type = other DNA
ccatcatcaaagaccaaagg

SEQ ID NO: 49459 - DNA, 20 bp, synthetic construct
  misc_feature 1..20: note = chemically synthesized
  source 1..20: mol_type = other DNA
caaaggtagataaaaccata

SEQ ID NO: 49460 - DNA, 20 bp, synthetic construct
  misc_feature 1..20: note = chemically synthesized
  source 1..20: mol_type = other DNA
ggtagataaaaccataaaga

SEQ ID NO: 49461 - DNA, 20 bp, synthetic construct
  misc_feature 1..20: note = chemically synthesized
  source 1..20: mol_type = other DNA
gtagataaaaccataaagat

SEQ ID NO: 49462 - DNA, 20 bp, synthetic construct
  misc_feature 1..20: note = chemically synthesized
  source 1..20: mol_type = other DNA
tagataaaaccataaagatg

SEQ ID NO: 49463 - DNA, 20 bp, synthetic construct
  misc_feature 1..20: note = chemically synthesized
  source 1..20: mol_type = other DNA
aaaccataaagatggggaaa

SEQ ID NO: 49464 - DNA, 20 bp, synthetic construct
  misc_feature 1..20: note = chemically synthesized
  source 1..20: mol_type = other DNA
ccataaagatggggaaaaag

SEQ ID NO: 49465 - DNA, 20 bp, synthetic construct
  misc_feature 1..20: note = chemically synthesized
  source 1..20: mol_type = other DNA
ataaagatggggaaaaagca

SEQ ID NO: 49466 - DNA, 20 bp, synthetic construct
  misc_feature 1..20: note = chemically synthesized
  source 1..20: mol_type = other DNA
aagatggggaaaaagcagag

SEQ ID NO: 49467 - DNA, 20 bp, synthetic construct
  misc_feature 1..20: note = chemically synthesized
  source 1..20: mol_type = other DNA
aaaaagcagagcagaaaaac

SEQ ID NO: 49468 - DNA, 20 bp, synthetic construct
  misc_feature 1..20: note = chemically synthesized
  source 1..20: mol_type = other DNA
aaactggacactctaaaaat

SEQ ID NO: 49469 - DNA, 20 bp, synthetic construct
  misc_feature 1..20: note = chemically synthesized
  source 1..20: mol_type = other DNA
actggacactctaaaaatga

SEQ ID NO: 49470 - DNA, 20 bp, synthetic construct
  misc_feature 1..20: note = chemically synthesized
  source 1..20: mol_type = other DNA
agagtgcctctcctcctcca

SEQ ID NO: 49471 - DNA, 20 bp, synthetic construct
  misc_feature 1..20: note = chemically synthesized
  source 1..20: mol_type = other DNA
tctcctcctccaaagtaacg

SEQ ID NO: 49472 - DNA, 20 bp, synthetic construct
  misc_feature 1..20: note = chemically synthesized
  source 1..20: mol_type = other DNA
aaagtaacgcagctcctcac

SEQ ID NO: 49473 - DNA, 20 bp, synthetic construct
  misc_feature 1..20: note = chemically synthesized
  source 1..20: mol_type = other DNA
acgcagctcctcaccagcaa

SEQ ID NO: 49474 - DNA, 20 bp, synthetic construct
  misc_feature 1..20: note = chemically synthesized
  source 1..20: mol_type = other DNA
tcctcaccagcaatggaaca

SEQ ID NO: 49475 - DNA, 20 bp, synthetic construct
  misc_feature 1..20: note = chemically synthesized
  source 1..20: mol_type = other DNA
caccagcaatggaacaaagc

SEQ ID NO: 49476 - DNA, 20 bp, synthetic construct
  misc_feature 1..20: note = chemically synthesized
  source 1..20: mol_type = other DNA
accagcaatggaacaaagct

SEQ ID NO: 49477 - DNA, 20 bp, synthetic construct
  misc_feature 1..20: note = chemically synthesized
  source 1..20: mol_type = other DNA
agcaatggaacaaagctggg

SEQ ID NO: 49478 - DNA, 20 bp, synthetic construct
  misc_feature 1..20: note = chemically synthesized
  source 1..20: mol_type = other DNA
caatggaacaaagctgggca

SEQ ID NO: 49479 - DNA, 20 bp, synthetic construct
  misc_feature 1..20: note = chemically synthesized
  source 1..20: mol_type = other DNA
gggcagagaatgactttgac

SEQ ID NO: 49480 - DNA, 20 bp, synthetic construct
  misc_feature 1..20: note = chemically synthesized
  source 1..20: mol_type = other DNA
gagaatgactttgacgagtt

SEQ ID NO: 49481 - DNA, 20 bp, synthetic construct
  misc_feature 1..20: note = chemically synthesized
  source 1..20: mol_type = other DNA
gaatgactttgacgagttga

SEQ ID NO: 49482 - DNA, 20 bp, synthetic construct
  misc_feature 1..20: note = chemically synthesized
  source 1..20: mol_type = other DNA
atgactttgacgagttgaga

SEQ ID NO: 49483 - DNA, 20 bp, synthetic construct
  misc_feature 1..20: note = chemically synthesized
  source 1..20: mol_type = other DNA
tgactttgacgagttgagag

SEQ ID NO: 49484 - DNA, 20 bp, synthetic construct
  misc_feature 1..20: note = chemically synthesized
  source 1..20: mol_type = other DNA
ctttgacgagttgagagagg

SEQ ID NO: 49485 - DNA, 20 bp, synthetic construct
  misc_feature 1..20: note = chemically synthesized
  source 1..20: mol_type = other DNA
tttgacgagttgagagagga

SEQ ID NO: 49486 - DNA, 20 bp, synthetic construct
  misc_feature 1..20: note = chemically synthesized
  source 1..20: mol_type = other DNA
gagttgagagaggaaggctt

SEQ ID NO: 49487 - DNA, 20 bp, synthetic construct
  misc_feature 1..20: note = chemically synthesized
  source 1..20: mol_type = other DNA
ttgagagaggaaggcttcag

SEQ ID NO: 49488 - DNA, 20 bp, synthetic construct
  misc_feature 1..20: note = chemically synthesized
  source 1..20: mol_type = other DNA
tcagaagatcaaactactcc

SEQ ID NO: 49489 - DNA, 20 bp, synthetic construct
  misc_feature 1..20: note = chemically synthesized
  source 1..20: mol_type = other DNA
gatcaaactactccaagcta

SEQ ID NO: 49490 - DNA, 20 bp, synthetic construct
  misc_feature 1..20: note = chemically synthesized
  source 1..20: mol_type = other DNA
atcaaactactccaagctaa

SEQ ID NO: 49491 - DNA, 20 bp, synthetic construct
  misc_feature 1..20: note = chemically synthesized
  source 1..20: mol_type = other DNA
caaactactccaagctaaag

SEQ ID NO: 49492 - DNA, 20 bp, synthetic construct
  misc_feature 1..20: note = chemically synthesized
  source 1..20: mol_type = other DNA
aaactactccaagctaaagg

SEQ ID NO: 49493 - DNA, 20 bp, synthetic construct
  misc_feature 1..20: note = chemically synthesized
  source 1..20: mol_type = other DNA
ctactccaagctaaaggagg

SEQ ID NO: 49494 - DNA, 20 bp, synthetic construct
  misc_feature 1..20: note = chemically synthesized
  source 1..20: mol_type = other DNA
aaggaggaagttcgaacaaa

SEQ ID NO: 49495 - DNA, 20 bp, synthetic construct
  misc_feature 1..20: note = chemically synthesized
  source 1..20: mol_type = other DNA
ggaagttcgaacaaacggca

SEQ ID NO: 49496 - DNA, 20 bp, synthetic construct
  misc_feature 1..20: note = chemically synthesized
  source 1..20: mol_type = other DNA
agttcgaacaaacggcaaag

SEQ ID NO: 49497 - DNA, 20 bp, synthetic construct
  misc_feature 1..20: note = chemically synthesized
  source 1..20: mol_type = other DNA
aaaaaactttgaaaaaaaat

SEQ ID NO: 49498 - DNA, 20 bp, synthetic construct
  misc_feature 1..20: note = chemically synthesized
  source 1..20: mol_type = other DNA
ttgaaaaaaaattagatgaa

SEQ ID NO: 49499 - DNA, 20 bp, synthetic construct
  misc_feature 1..20: note = chemically synthesized
  source 1..20: mol_type = other DNA
aaattagatgaatggataac

SEQ ID NO: 49500 - DNA, 20 bp, synthetic construct
  misc_feature 1..20: note = chemically synthesized
  source 1..20: mol_type = other DNA
taactagaataaccaatgca

SEQ ID NO: 49501 - DNA, 20 bp, synthetic construct
  misc_feature 1..20: note = chemically synthesized
  source 1..20: mol_type = other DNA
ctagaataaccaatgcacag

SEQ ID NO: 49502 - DNA, 20 bp, synthetic construct
  misc_feature 1..20: note = chemically synthesized
  source 1..20: mol_type = other DNA
ccaatgcacagaagtcctta

SEQ ID NO: 49503 - DNA, 20 bp, synthetic construct
  misc_feature 1..20: note = chemically synthesized
  source 1..20: mol_type = other DNA
caatgcacagaagtccttaa

SEQ ID NO: 49504 - DNA, 20 bp, synthetic construct
  misc_feature 1..20: note = chemically synthesized
  source 1..20: mol_type = other DNA
gaagtccttaaaggacctga

SEQ ID NO: 49505 - DNA, 20 bp, synthetic construct
  misc_feature 1..20: note = chemically synthesized
  source 1..20: mol_type = other DNA
agtccttaaaggacctgatg

SEQ ID NO: 49506 - DNA, 20 bp, synthetic construct
  misc_feature 1..20: note = chemically synthesized
  source 1..20: mol_type = other DNA
acctgatggagctgaaaacc

SEQ ID NO: 49507 - DNA, 20 bp, synthetic construct
  misc_feature 1..20: note = chemically synthesized
  source 1..20: mol_type = other DNA
cctgatggagctgaaaacca

SEQ ID NO: 49508 - DNA, 20 bp, synthetic construct
  misc_feature 1..20: note = chemically synthesized
  source 1..20: mol_type = other DNA
gatggagctgaaaaccaagg

SEQ ID NO: 49509 - DNA, 20 bp, synthetic construct
  misc_feature 1..20: note = chemically synthesized
  source 1..20: mol_type = other DNA
atggagctgaaaaccaaggc

SEQ ID NO: 49510 - DNA, 20 bp, synthetic construct
  misc_feature 1..20: note = chemically synthesized
  source 1..20: mol_type = other DNA
ggagctgaaaaccaaggcag

SEQ ID NO: 49511 - DNA, 20 bp, synthetic construct
  misc_feature 1..20: note = chemically synthesized
  source 1..20: mol_type = other DNA
gaactacgtgacaaatacac

SEQ ID NO: 49512 - DNA, 20 bp, synthetic construct
  misc_feature 1..20: note = chemically synthesized
  source 1..20: mol_type = other DNA
cgtgacaaatacacaagcct

SEQ ID NO: 49513 - DNA, 20 bp, synthetic construct
  misc_feature 1..20: note = chemically synthesized
  source 1..20: mol_type = other DNA
cacaagcctcagtaaccgat

SEQ ID NO: 49514 - DNA, 20 bp, synthetic construct
  misc_feature 1..20: note = chemically synthesized
  source 1..20: mol_type = other DNA
cagtaaccgatgagatcaac

SEQ ID NO: 49515 - DNA, 20 bp, synthetic construct
  misc_feature 1..20: note = chemically synthesized
  source 1..20: mol_type = other DNA
taaccgatgagatcaactgg

SEQ ID NO: 49516 - DNA, 20 bp, synthetic construct
  misc_feature 1..20: note = chemically synthesized
  source 1..20: mol_type = other DNA
cgatgagatcaactggaaga

SEQ ID NO: 49517 - DNA, 20 bp, synthetic construct
  misc_feature 1..20: note = chemically synthesized
  source 1..20: mol_type = other DNA
gatgagatcaactggaagaa

SEQ ID NO: 49518 - DNA, 20 bp, synthetic construct
  misc_feature 1..20: note = chemically synthesized
  source 1..20: mol_type = other DNA
atgagatcaactggaagaaa

SEQ ID NO: 49519 - DNA, 20 bp, synthetic construct
  misc_feature 1..20: note = chemically synthesized
  source 1..20: mol_type = other DNA
agaaagggtatcaatgacga

SEQ ID NO: 49520 - DNA, 20 bp, synthetic construct
  misc_feature 1..20: note = chemically synthesized
  source 1..20: mol_type = other DNA
aagatgaaatgaatgaaatg

SEQ ID NO: 49521 - DNA, 20 bp, synthetic construct
  misc_feature 1..20: note = chemically synthesized
  source 1..20: mol_type = other DNA
aatgaatgaaatgaagcatg

SEQ ID NO: 49522 - DNA, 20 bp, synthetic construct
  misc_feature 1..20: note = chemically synthesized
  source 1..20: mol_type = other DNA
tgaatgaaatgaagcatgaa

SEQ ID NO: 49523 - DNA, 20 bp, synthetic construct
  misc_feature 1..20: note = chemically synthesized
  source 1..20: mol_type = other DNA
atgaaatgaagcatgaagag

SEQ ID NO: 49524 - DNA, 20 bp, synthetic construct
  misc_feature 1..20: note = chemically synthesized
  source 1..20: mol_type = other DNA
atgaagcatgaagagaagtt

SEQ ID NO: 49525 - DNA, 20 bp, synthetic construct
  misc_feature 1..20: note = chemically synthesized
  source 1..20: mol_type = other DNA
gaagcatgaagagaagttta

SEQ ID NO: 49526 - DNA, 20 bp, synthetic construct
  misc_feature 1..20: note = chemically synthesized
  source 1..20: mol_type = other DNA
gaagagaagtttagagaaaa

SEQ ID NO: 49527 - DNA, 20 bp, synthetic construct
  misc_feature 1..20: note = chemically synthesized
  source 1..20: mol_type = other DNA
tttagagaaaaaagaataaa

SEQ ID NO: 49528 - DNA, 20 bp, synthetic construct
  misc_feature 1..20: note = chemically synthesized
  source 1..20: mol_type = other DNA
agaataaaaagaaacgaaca

SEQ ID NO: 49529 - DNA, 20 bp, synthetic construct
  misc_feature 1..20: note = chemically synthesized
  source 1..20: mol_type = other DNA
aagaaacgaacaaagcctcc

SEQ ID NO: 49530 - DNA, 20 bp, synthetic construct
  misc_feature 1..20: note = chemically synthesized
  source 1..20: mol_type = other DNA
aacaaagcctccaagaaata

SEQ ID NO: 49531 - DNA, 20 bp, synthetic construct
  misc_feature 1..20: note = chemically synthesized
  source 1..20: mol_type = other DNA
acaaagcctccaagaaatat

SEQ ID NO: 49532 - DNA, 20 bp, synthetic construct
  misc_feature 1..20: note = chemically synthesized
  source 1..20: mol_type = other DNA
gaaatatgggactatgtgaa

SEQ ID NO: 49533 - DNA, 20 bp, synthetic construct
  misc_feature 1..20: note = chemically synthesized
  source 1..20: mol_type = other DNA
agaccaaatctacatctaat

SEQ ID NO: 49534 - DNA, 20 bp, synthetic construct
  misc_feature 1..20: note = chemically synthesized
  source 1..20: mol_type = other DNA
aaatctacatctaattggtg

SEQ ID NO: 49535 - DNA, 20 bp, synthetic construct
  misc_feature 1..20: note = chemically synthesized
  source 1..20: mol_type = other DNA
catctaattggtgtagctga

SEQ ID NO: 49536 - DNA, 20 bp, synthetic construct
  misc_feature 1..20: note = chemically synthesized
  source 1..20: mol_type = other DNA
attggtgtagctgaaagtga

SEQ ID NO: 49537 - DNA, 20 bp, synthetic construct
  misc_feature 1..20: note = chemically synthesized
  source 1..20: mol_type = other DNA
ttggtgtagctgaaagtgat

SEQ ID NO: 49538 - DNA, 20 bp, synthetic construct
  misc_feature 1..20: note = chemically synthesized
  source 1..20: mol_type = other DNA
tggtgtagctgaaagtgatg

SEQ ID NO: 49539 - DNA, 20 bp, synthetic construct
  misc_feature 1..20: note = chemically synthesized
  source 1..20: mol_type = other DNA
gtgtagctgaaagtgatggg

SEQ ID NO: 49540 - DNA, 20 bp, synthetic construct
  misc_feature 1..20: note = chemically synthesized
  source 1..20: mol_type = other DNA
gctgaaagtgatggggagaa

SEQ ID NO: 49541 - DNA, 20 bp, synthetic construct
  misc_feature 1..20: note = chemically synthesized
  source 1..20: mol_type = other DNA
gtgatggggagaatggaacc

SEQ ID NO: 49542 - DNA, 20 bp, synthetic construct
  misc_feature 1..20: note = chemically synthesized
  source 1..20: mol_type = other DNA
tggggagaatggaaccaagt

SEQ ID NO: 49543 - DNA, 20 bp, synthetic construct
  misc_feature 1..20: note = chemically synthesized
  source 1..20: mol_type = other DNA
ccaagttggaaaacactctg

SEQ ID NO: 49544 - DNA, 20 bp, synthetic construct
  misc_feature 1..20: note = chemically synthesized
  source 1..20: mol_type = other DNA
caagttggaaaacactctgc

SEQ ID NO: 49545 - DNA, 20 bp, synthetic construct
  misc_feature 1..20: note = chemically synthesized
  source 1..20: mol_type = other DNA
acactctgcaggatattatc

SEQ ID NO: 49546 - DNA, 20 bp, synthetic construct
  misc_feature 1..20: note = chemically synthesized
  source 1..20: mol_type = other DNA
cactctgcaggatattatcc

SEQ ID NO: 49547 - DNA, 20 bp, synthetic construct
  misc_feature 1..20: note = chemically synthesized
  source 1..20: mol_type = other DNA
ctctgcaggatattatccag

SEQ ID NO: 49548 - DNA, 20 bp, synthetic construct
  misc_feature 1..20: note = chemically synthesized
  source 1..20: mol_type = other DNA
ccaggagaacttccccaatc

SEQ ID NO: 49549 - DNA, 20 bp, synthetic construct
  misc_feature 1..20: note = chemically synthesized
  source 1..20: mol_type = other DNA
gagaacttccccaatctagc

SEQ ID NO: 49550 - DNA, 20 bp, synthetic construct
  misc_feature 1..20: note = chemically synthesized
  source 1..20: mol_type = other DNA
agaacttccccaatctagca

SEQ ID NO: 49551 - DNA, 20 bp, synthetic construct
  misc_feature 1..20: note = chemically synthesized
  source 1..20: mol_type = other DNA
cttccccaatctagcaaggc

SEQ ID NO: 49552 - DNA, 20 bp, synthetic construct
  misc_feature 1..20: note = chemically synthesized
  source 1..20: mol_type = other DNA
ggcaagcccaaattcacatt

SEQ ID NO: 49553 - DNA, 20 bp, synthetic construct
  misc_feature 1..20: note = chemically synthesized
  source 1..20: mol_type = other DNA
gcaagcccaaattcacattc

SEQ ID NO: 49554 - DNA, 20 bp, synthetic construct
  misc_feature 1..20: note = chemically synthesized
  source 1..20: mol_type = other DNA
aaattcacattcaggaaata

SEQ ID NO: 49555 - DNA, 20 bp, synthetic construct
  misc_feature 1..20: note = chemically synthesized
  source 1..20: mol_type = other DNA
attcacattcaggaaataca

SEQ ID NO: 49556 - DNA, 20 bp, synthetic construct
  misc_feature 1..20: note = chemically synthesized
  source 1..20: mol_type = other DNA
gaaatacagagaacgccaca

SEQ ID NO: 49557 - DNA, 20 bp, synthetic construct
  misc_feature 1..20: note = chemically synthesized
  source 1..20: mol_type = other DNA
gaacgccacaaagatactcc

SEQ ID NO: 49558 - DNA, 20 bp, synthetic construct
  misc_feature 1..20: note = chemically synthesized
  source 1..20: mol_type = other DNA
acgccacaaagatactccta

SEQ ID NO: 49559 - DNA, 20 bp, synthetic construct
  misc_feature 1..20: note = chemically synthesized
  source 1..20: mol_type = other DNA
acaaagatactcctagagaa

SEQ ID NO: 49560 - DNA, 20 bp, synthetic construct
  misc_feature 1..20: note = chemically synthesized
  source 1..20: mol_type = other DNA
tcctagagaaaagcaactcc

SEQ ID NO: 49561 - DNA, 20 bp, synthetic construct
  misc_feature 1..20: note = chemically synthesized
  source 1..20: mol_type = other DNA
actccaagacacataactgt

SEQ ID NO: 49562 - DNA, 20 bp, synthetic construct
  misc_feature 1..20: note = chemically synthesized
  source 1..20: mol_type = other DNA
cataactgtcagattcacca

SEQ ID NO: 49563 - DNA, 20 bp, synthetic construct
  misc_feature 1..20: note = chemically synthesized
  source 1..20: mol_type = other DNA
gattcaccaaagttgaaatg

SEQ ID NO: 49564 - DNA, 20 bp, synthetic construct
  misc_feature 1..20: note = chemically synthesized
  source 1..20: mol_type = other DNA
attcaccaaagttgaaatga

SEQ ID NO: 49565 - DNA, 20 bp, synthetic construct
  misc_feature 1..20: note = chemically synthesized
  source 1..20: mol_type = other DNA
gaaatgaaggaaaaaatgtt

SEQ ID NO: 49566 - DNA, 20 bp, synthetic construct
  misc_feature 1..20: note = chemically synthesized
  source 1..20: mol_type = other DNA
aaatgaaggaaaaaatgtta

SEQ ID NO: 49567 - DNA, 20 bp, synthetic construct
  misc_feature 1..20: note = chemically synthesized
  source 1..20: mol_type = other DNA
aatgaaggaaaaaatgttaa

SEQ ID NO: 49568 - DNA, 20 bp, synthetic construct
  misc_feature 1..20: note = chemically synthesized
  source 1..20: mol_type = other DNA
gaaggaaaaaatgttaaggg

SEQ ID NO: 49569 - DNA, 20 bp, synthetic construct
  misc_feature 1..20: note = chemically synthesized
  source 1..20: mol_type = other DNA
gaaaaaatgttaagggcagc

SEQ ID NO: 49570 - DNA, 20 bp, synthetic construct
  misc_feature 1..20: note = chemically synthesized
  source 1..20: mol_type = other DNA
aaaaatgttaagggcagcca

SEQ ID NO: 49571 - DNA, 20 bp, synthetic construct
  misc_feature 1..20: note = chemically synthesized
  source 1..20: mol_type = other DNA
aaatgttaagggcagccaga

SEQ ID NO: 49572 - DNA, 20 bp, synthetic construct
  misc_feature 1..20: note = chemically synthesized
  source 1..20: mol_type = other DNA
gttaagggcagccagagaga

SEQ ID NO: 49573 - DNA, 20 bp, synthetic construct
  misc_feature 1..20: note = chemically synthesized
  source 1..20: mol_type = other DNA
ttaagggcagccagagagaa

SEQ ID NO: 49574 - DNA, 20 bp, synthetic construct
  misc_feature 1..20: note = chemically synthesized
  source 1..20: mol_type = other DNA
gggcagccagagagaaaggt

SEQ ID NO: 49575 - DNA, 20 bp, synthetic construct
  misc_feature 1..20: note = chemically synthesized
  source 1..20: mol_type = other DNA
ggcagccagagagaaaggtc

SEQ ID NO: 49576 - DNA, 20 bp, synthetic construct
  misc_feature 1..20: note = chemically synthesized
  source 1..20: mol_type = other DNA
gaaaggtcgggttacccaca

SEQ ID NO: 49577 - DNA, 20 bp, synthetic construct
  misc_feature 1..20: note = chemically synthesized
  source 1..20: mol_type = other DNA
aaaggtcgggttacccacaa

SEQ ID NO: 49578 - DNA, 20 bp, synthetic construct
  misc_feature 1..20: note = chemically synthesized
  source 1..20: mol_type = other DNA
aaggtcgggttacccacaaa

SEQ ID NO: 49579 - DNA, 20 bp, synthetic construct
  misc_feature 1..20: note = chemically synthesized
  source 1..20: mol_type = other DNA
gtcgggttacccacaaaggg

SEQ ID NO: 49580 - DNA, 20 bp, synthetic construct
  misc_feature 1..20: note = chemically synthesized
  source 1..20: mol_type = other DNA
acccacaaagggaagcccat

SEQ ID NO: 49581 - DNA, 20 bp, synthetic construct
  misc_feature 1..20: note = chemically synthesized
  source 1..20: mol_type = other DNA
agggaagcccatcagactaa

SEQ ID NO: 49582 - DNA, 20 bp, synthetic construct
  misc_feature 1..20: note = chemically synthesized
  source 1..20: mol_type = other DNA
cagactaacagctgatctat

SEQ ID NO: 49583 - DNA, 20 bp, synthetic construct
  misc_feature 1..20: note = chemically synthesized
  source 1..20: mol_type = other DNA
actaacagctgatctatcgg

SEQ ID NO: 49584 - DNA, 20 bp, synthetic construct
  misc_feature 1..20: note = chemically synthesized
  source 1..20: mol_type = other DNA
tctatcggcagaaactctac

SEQ ID NO: 49585 - DNA, 20 bp, synthetic construct
  misc_feature 1..20: note = chemically synthesized
  source 1..20: mol_type = other DNA
tcggcagaaactctacaagc

SEQ ID NO: 49586 - DNA, 20 bp, synthetic construct
  misc_feature 1..20: note = chemically synthesized
  source 1..20: mol_type = other DNA
gcagaaactctacaagccag

SEQ ID NO: 49587 - DNA, 20 bp, synthetic construct
  misc_feature 1..20: note = chemically synthesized
  source 1..20: mol_type = other DNA
aaactctacaagccagaaga

SEQ ID NO: 49588 - DNA, 20 bp, synthetic construct
  misc_feature 1..20: note = chemically synthesized
  source 1..20: mol_type = other DNA
ctctacaagccagaagaaag

SEQ ID NO: 49589 - DNA, 20 bp, synthetic construct
  misc_feature 1..20: note = chemically synthesized
  source 1..20: mol_type = other DNA
tctacaagccagaagaaagt

SEQ ID NO: 49590 - DNA, 20 bp, synthetic construct
  misc_feature 1..20: note = chemically synthesized
  source 1..20: mol_type = other DNA
ctacaagccagaagaaagtg

SEQ ID NO: 49591 - DNA, 20 bp, synthetic construct
  misc_feature 1..20: note = chemically synthesized
  source 1..20: mol_type = other DNA
tacaagccagaagaaagtgg

SEQ ID NO: 49592 - DNA, 20 bp, synthetic construct
  misc_feature 1..20: note = chemically synthesized
  source 1..20: mol_type = other DNA
gccaatattcaacattgtta

SEQ ID NO: 49593 - DNA, 20 bp, synthetic construct
  misc_feature 1..20: note = chemically synthesized
  source 1..20: mol_type = other DNA
tattcaacattgttaaagaa

SEQ ID NO: 49594 - DNA, 20 bp, synthetic construct
  misc_feature 1..20: note = chemically synthesized
  source 1..20: mol_type = other DNA
aaagaaaagaattttcaacc

SEQ ID NO: 49595 - DNA, 20 bp, synthetic construct
  misc_feature 1..20: note = chemically synthesized
  source 1..20: mol_type = other DNA
tcaacccagaatttcatatc

SEQ ID NO: 49596 - DNA, 20 bp, synthetic construct
  misc_feature 1..20: note = chemically synthesized
  source 1..20: mol_type = other DNA
atttcatatccagccaaact

SEQ ID NO: 49597 - DNA, 20 bp, synthetic construct
  misc_feature 1..20: note = chemically synthesized
  source 1..20: mol_type = other DNA
ccagccaaactaagcttcat

SEQ ID NO: 49598 - DNA, 20 bp, synthetic construct
  misc_feature 1..20: note = chemically synthesized
  source 1..20: mol_type = other DNA
caaactaagcttcataagtg

SEQ ID NO: 49599 - DNA, 20 bp, synthetic construct
  misc_feature 1..20: note = chemically synthesized
  source 1..20: mol_type = other DNA
aaactaagcttcataagtga

SEQ ID NO: 49600 - DNA, 20 bp, synthetic construct
  misc_feature 1..20: note = chemically synthesized
  source 1..20: mol_type = other DNA
actaagcttcataagtgaag

SEQ ID NO: 49601 - DNA, 20 bp, synthetic construct
  misc_feature 1..20: note = chemically synthesized
  source 1..20: mol_type = other DNA
aggagaaataaaatccttta

SEQ ID NO: 49602 - DNA, 20 bp, synthetic construct
  misc_feature 1..20: note = chemically synthesized
  source 1..20: mol_type = other DNA
aaataaaatcctttacagac

SEQ ID NO: 49603 - DNA, 20 bp, synthetic construct
  misc_feature 1..20: note = chemically synthesized
  source 1..20: mol_type = other DNA
tttacagacaagcaaatgct

SEQ ID NO: 49604 - DNA, 20 bp, synthetic construct
  misc_feature 1..20: note = chemically synthesized
  source 1..20: mol_type = other DNA
tacagacaagcaaatgctga

SEQ ID NO: 49605 - DNA, 20 bp, synthetic construct
  misc_feature 1..20: note = chemically synthesized
  source 1..20: mol_type = other DNA
ctgagagattttgtcaccac

SEQ ID NO: 49606 - DNA, 20 bp, synthetic construct
  misc_feature 1..20: note = chemically synthesized
  source 1..20: mol_type = other DNA
tgagagattttgtcaccacc

SEQ ID NO: 49607 - DNA, 20 bp, synthetic construct
  misc_feature 1..20: note = chemically synthesized
  source 1..20: mol_type = other DNA
caccaccaggcctgccctac

SEQ ID NO: 49608 - DNA, 20 bp, synthetic construct
  misc_feature 1..20: note = chemically synthesized
  source 1..20: mol_type = other DNA
ccaccaggcctgccctacaa

SEQ ID NO: 49609 - DNA, 20 bp, synthetic construct
  misc_feature 1..20: note = chemically synthesized
  source 1..20: mol_type = other DNA
ctgccctacaagagctcctg

SEQ ID NO: 49610 - DNA, 20 bp, synthetic construct
  misc_feature 1..20: note = chemically synthesized
  source 1..20: mol_type = other DNA
tgccctacaagagctcctga

SEQ ID NO: 49611 - DNA, 20 bp, synthetic construct
  misc_feature 1..20: note = chemically synthesized
  source 1..20: mol_type = other DNA
cctacaagagctcctgaagg

SEQ ID NO: 49612 - DNA, 20 bp, synthetic construct
  misc_feature 1..20: note = chemically synthesized
  source 1..20: mol_type = other DNA
cctgaaggaagcactaaaca

SEQ ID NO: 49613 - DNA, 20 bp, synthetic construct
  misc_feature 1..20: note = chemically synthesized
  source 1..20: mol_type = other DNA
aaggaagcactaaacatgga

SEQ ID NO: 49614 - DNA, 20 bp, synthetic construct
  misc_feature 1..20: note = chemically synthesized
  source 1..20: mol_type = other DNA
aggaagcactaaacatggaa

SEQ ID NO: 49615 - DNA, 20 bp, synthetic construct
  misc_feature 1..20: note = chemically synthesized
  source 1..20: mol_type = other DNA
taaacatggaaaggaacaac

SEQ ID NO: 49616 - DNA, 20 bp, synthetic construct
  misc_feature 1..20: note = chemically synthesized
  source 1..20: mol_type = other DNA
tggaaaggaacaactagtat

SEQ ID NO: 49617 - DNA, 20 bp, synthetic construct
  misc_feature 1..20: note = chemically synthesized
  source 1..20: mol_type = other DNA
caaaaacatgccaaattgta

SEQ ID NO: 49618 - DNA, 20 bp, synthetic construct
  misc_feature 1..20: note = chemically synthesized
  source 1..20: mol_type = other DNA
gccaaattgtaaagaccatc

SEQ ID NO: 49619 - DNA, 20 bp, synthetic construct
  misc_feature 1..20: note = chemically synthesized
  source 1..20: mol_type = other DNA
ccaaattgtaaagaccatca

SEQ ID NO: 49620 - DNA, 20 bp, synthetic construct
  misc_feature 1..20: note = chemically synthesized
  source 1..20: mol_type = other DNA
attgtaaagaccatcaaggc

SEQ ID NO: 49621 - DNA, 20 bp, synthetic construct
  misc_feature 1..20: note = chemically synthesized
  source 1..20: mol_type = other DNA
ttgtaaagaccatcaaggct

SEQ ID NO: 49622 - DNA, 20 bp, synthetic construct
  misc_feature 1..20: note = chemically synthesized
  source 1..20: mol_type = other DNA
taaagaccatcaaggctagg

SEQ ID NO: 49623 - DNA, 20 bp, synthetic construct
  misc_feature 1..20: note = chemically synthesized
  source 1..20: mol_type = other DNA
taggaagaaactgcatcaac

SEQ ID NO: 49624 - DNA, 20 bp, synthetic construct
  misc_feature 1..20: note = chemically synthesized
  source 1..20: mol_type = other DNA
gcatcaacgagcaaaataac

SEQ ID NO: 49625 - DNA, 20 bp, synthetic construct
  misc_feature 1..20: note = chemically synthesized
  source 1..20: mol_type = other DNA
accagctaacatcataatga

SEQ ID NO: 49626 - DNA, 20 bp, synthetic construct
  misc_feature 1..20: note = chemically synthesized
  source 1..20: mol_type = other DNA
ccagctaacatcataatgac

SEQ ID NO: 49627 - DNA, 20 bp, synthetic construct
  misc_feature 1..20: note = chemically synthesized
  source 1..20: mol_type = other DNA
atactcaccttaaatgtaaa

SEQ ID NO: 49628 - DNA, 20 bp, synthetic construct
  misc_feature 1..20: note = chemically synthesized
  source 1..20: mol_type = other DNA
tactcaccttaaatgtaaat

SEQ ID NO: 49629 - DNA, 20 bp, synthetic construct
  misc_feature 1..20: note = chemically synthesized
  source 1..20: mol_type = other DNA
aggctaaatgctccaattaa

SEQ ID NO: 49630 - DNA, 20 bp, synthetic construct
  misc_feature 1..20: note = chemically synthesized
  source 1..20: mol_type = other DNA
aatgctccaattaaaagaca

SEQ ID NO: 49631 - DNA, 20 bp, synthetic construct
  misc_feature 1..20: note = chemically synthesized
  source 1..20: mol_type = other DNA
tccaattaaaagacacagac

SEQ ID NO: 49632 - DNA, 20 bp, synthetic construct
  misc_feature 1..20: note = chemically synthesized
  source 1..20: mol_type = other DNA
aaagacacagactggcaaat

SEQ ID NO: 49633 - DNA, 20 bp, synthetic construct
  misc_feature 1..20: note = chemically synthesized
  source 1..20: mol_type = other DNA
cacagactggcaaattggat

SEQ ID NO: 49634 - DNA, 20 bp, synthetic construct
  misc_feature 1..20: note = chemically synthesized
  source 1..20: mol_type = other DNA
acagactggcaaattggata

SEQ ID NO: 49635 - DNA, 20 bp, synthetic construct
  misc_feature 1..20: note = chemically synthesized
  source 1..20: mol_type = other DNA
agactggcaaattggataag

SEQ ID NO: 49636 - DNA, 20 bp, synthetic construct
  misc_feature 1..20: note = chemically synthesized
  source 1..20: mol_type = other DNA
ggcaaattggataaggagtc

SEQ ID NO: 49637 - DNA, 20 bp, synthetic construct
  misc_feature 1..20: note = chemically synthesized
  source 1..20: mol_type = other DNA
acccatctgtgttctgtatt

SEQ ID NO: 49638 - DNA, 20 bp, synthetic construct
  misc_feature 1..20: note = chemically synthesized
  source 1..20: mol_type = other DNA
cccatctgtgttctgtattc

SEQ ID NO: 49639 - DNA, 20 bp, synthetic construct
  misc_feature 1..20: note = chemically synthesized
  source 1..20: mol_type = other DNA
caggaaacccatctcacgtg

SEQ ID NO: 49640 - DNA, 20 bp, synthetic construct
  misc_feature 1..20: note = chemically synthesized
  source 1..20: mol_type = other DNA
ggaaacccatctcacgtgca

SEQ ID NO: 49641 - DNA, 20 bp, synthetic construct
  misc_feature 1..20: note = chemically synthesized
  source 1..20: mol_type = other DNA
ctcacgtgcagagacacaca

SEQ ID NO: 49642 - DNA, 20 bp, synthetic construct
  misc_feature 1..20: note = chemically synthesized
  source 1..20: mol_type = other DNA
tcacgtgcagagacacacat

SEQ ID NO: 49643 - DNA, 20 bp, synthetic construct
  misc_feature 1..20: note = chemically synthesized
  source 1..20: mol_type = other DNA
cacacataggctcgaaataa

SEQ ID NO: 49644 - DNA, 20 bp, synthetic construct
  misc_feature 1..20: note = chemically synthesized
  source 1..20: mol_type = other DNA
acacataggctcgaaataaa

SEQ ID NO: 49645 - DNA, 20 bp, synthetic construct
  misc_feature 1..20: note = chemically synthesized
  source 1..20: mol_type = other DNA
ataggctcgaaataaaagga

SEQ ID NO: 49646 - DNA, 20 bp, synthetic construct
  misc_feature 1..20: note = chemically synthesized
  source 1..20: mol_type = other DNA
aggctcgaaataaaaggatg

SEQ ID NO: 49647 - DNA, 20 bp, synthetic construct
  misc_feature 1..20: note = chemically synthesized
  source 1..20: mol_type = other DNA
ggctcgaaataaaaggatgg

SEQ ID NO: 49648 - DNA, 20 bp, synthetic construct
  misc_feature 1..20: note = chemically synthesized
  source 1..20: mol_type = other DNA
aggatggaggaatatctacc

SEQ ID NO: 49649 - DNA, 20 bp, synthetic construct
  misc_feature 1..20: note = chemically synthesized
  source 1..20: mol_type = other DNA
aggaatatctaccaagcaaa

SEQ ID NO: 49650 - DNA, 20 bp, synthetic construct
  misc_feature 1..20: note = chemically synthesized
  source 1..20: mol_type = other DNA
aagcaaatggaaaacaaaaa

SEQ ID NO: 49651 - DNA, 20 bp, synthetic construct
  misc_feature 1..20: note = chemically synthesized
  source 1..20: mol_type = other DNA
agcaaatggaaaacaaaaaa

SEQ ID NO: 49652 - DNA, 20 bp, synthetic construct
  misc_feature 1..20: note = chemically synthesized
  source 1..20: mol_type = other DNA
aaatggaaaacaaaaaaagg

SEQ ID NO: 49653 - DNA, 20 bp, synthetic construct
  misc_feature 1..20: note = chemically synthesized
  source 1..20: mol_type = other DNA
aatggaaaacaaaaaaaggc

SEQ ID NO: 49654 - DNA, 20 bp, synthetic construct
  misc_feature 1..20: note = chemically synthesized
  source 1..20: mol_type = other DNA
atggaaaacaaaaaaaggca

SEQ ID NO: 49655 - DNA, 20 bp, synthetic construct
  misc_feature 1..20: note = chemically synthesized
  source 1..20: mol_type = other DNA
tggaaaacaaaaaaaggcag

SEQ ID NO: 49656 - DNA, 20 bp, synthetic construct
  misc_feature 1..20: note = chemically synthesized
  source 1..20: mol_type = other DNA
aaaggcaggggttgcaatcc

SEQ ID NO: 49657 - DNA, 20 bp, synthetic construct
  misc_feature 1..20: note = chemically synthesized
  source 1..20: mol_type = other DNA
aatcctagtctctgataaaa

SEQ ID NO: 49658 - DNA, 20 bp, synthetic construct
  misc_feature 1..20: note = chemically synthesized
  source 1..20: mol_type = other DNA
aaacagattttaaaccaaca

SEQ ID NO: 49659 - DNA, 20 bp, synthetic construct
  misc_feature 1..20: note = chemically synthesized
  source 1..20: mol_type = other DNA
tttaaaccaacaaagatcaa

SEQ ID NO: 49660 - DNA, 20 bp, synthetic construct
  misc_feature 1..20: note = chemically synthesized
  source 1..20: mol_type = other DNA
taaaccaacaaagatcaaaa

SEQ ID NO: 49661 - DNA, 20 bp, synthetic construct
  misc_feature 1..20: note = chemically synthesized
  source 1..20: mol_type = other DNA
aacaaagatcaaaagagaca

SEQ ID NO: 49662 - DNA, 20 bp, synthetic construct
  misc_feature 1..20: note = chemically synthesized
  source 1..20: mol_type = other DNA
aaagatcaaaagagacaaag

SEQ ID NO: 49663 - DNA, 20 bp, synthetic construct
  misc_feature 1..20: note = chemically synthesized
  source 1..20: mol_type = other DNA
aagatcaaaagagacaaaga

SEQ ID NO: 49664 - DNA, 20 bp, synthetic construct
  misc_feature 1..20: note = chemically synthesized
  source 1..20: mol_type = other DNA
caaagaaggccattacataa

SEQ ID NO: 49665 - DNA, 20 bp, synthetic construct
  misc_feature 1..20: note = chemically synthesized
  source 1..20: mol_type = other DNA
aaggccattacataatggca

SEQ ID NO: 49666 - DNA, 20 bp, synthetic construct
  misc_feature 1..20: note = chemically synthesized
  source 1..20: mol_type = other DNA
aggccattacataatggcaa

SEQ ID NO: 49667 - DNA, 20 bp, synthetic construct
  misc_feature 1..20: note = chemically synthesized
  source 1..20: mol_type = other DNA
ggccattacataatggcaaa

SEQ ID NO: 49668 - DNA, 20 bp, synthetic construct
  misc_feature 1..20: note = chemically synthesized
  source 1..20: mol_type = other DNA
aatggcaaagggatctattc

SEQ ID NO: 49669 - DNA, 20 bp, synthetic construct
  misc_feature 1..20: note = chemically synthesized
  source 1..20: mol_type = other DNA
ggcaaagggatctattcaag

SEQ ID NO: 49670 - DNA, 20 bp, synthetic construct
  misc_feature 1..20: note = chemically synthesized
  source 1..20: mol_type = other DNA
aaagggatctattcaagaag

SEQ ID NO: 49671 - DNA, 20 bp, synthetic construct
  misc_feature 1..20: note = chemically synthesized
  source 1..20: mol_type = other DNA
aaatatatatgcacccaata

SEQ ID NO: 49672 - DNA, 20 bp, synthetic construct
  misc_feature 1..20: note = chemically synthesized
  source 1..20: mol_type = other DNA
aatatatatgcacccaatac

SEQ ID NO: 49673 - DNA, 20 bp, synthetic construct
  misc_feature 1..20: note = chemically synthesized
  source 1..20: mol_type = other DNA
tatatatgcacccaatacag

SEQ ID NO: 49674 - DNA, 20 bp, synthetic construct
  misc_feature 1..20: note = chemically synthesized
  source 1..20: mol_type = other DNA
gcacccaatacaggagcacc

SEQ ID NO: 49675 - DNA, 20 bp, synthetic construct
  misc_feature 1..20: note = chemically synthesized
  source 1..20: mol_type = other DNA
agcacccagattcataaaac

SEQ ID NO: 49676 - DNA, 20 bp, synthetic construct
  misc_feature 1..20: note = chemically synthesized
  source 1..20: mol_type = other DNA
agattcataaaacaagtcct

SEQ ID NO: 49677 - DNA, 20 bp, synthetic construct
  misc_feature 1..20: note = chemically synthesized
  source 1..20: mol_type = other DNA
caagtcctgagtgacctaca

SEQ ID NO: 49678 - DNA, 20 bp, synthetic construct
  misc_feature 1..20: note = chemically synthesized
  source 1..20: mol_type = other DNA
agtcctgagtgacctacaaa

SEQ ID NO: 49679 - DNA, 20 bp, synthetic construct
  misc_feature 1..20: note = chemically synthesized
  source 1..20: mol_type = other DNA
gagtgacctacaaagagact

SEQ ID NO: 49680 - DNA, 20 bp, synthetic construct
  misc_feature 1..20: note = chemically synthesized
  source 1..20: mol_type = other DNA
agatgcccacacaataataa

SEQ ID NO: 49681 - DNA, 20 bp, synthetic construct
  misc_feature 1..20: note = chemically synthesized
  source 1..20: mol_type = other DNA
gatgcccacacaataataat

SEQ ID NO: 49682 - DNA, 20 bp, synthetic construct
  misc_feature 1..20: note = chemically synthesized
  source 1..20: mol_type = other DNA
tgcccacacaataataatgg

SEQ ID NO: 49683 - DNA, 20 bp, synthetic construct
  misc_feature 1..20: note = chemically synthesized
  source 1..20: mol_type = other DNA
taacaccccactgtcaacat

SEQ ID NO: 49684 - DNA, 20 bp, synthetic construct
  misc_feature 1..20: note = chemically synthesized
  source 1..20: mol_type = other DNA
accccactgtcaacattaga

SEQ ID NO: 49685 - DNA, 20 bp, synthetic construct
  misc_feature 1..20: note = chemically synthesized
  source 1..20: mol_type = other DNA
tcaacattagacagatcaac

SEQ ID NO: 49686 - DNA, 20 bp, synthetic construct
  misc_feature 1..20: note = chemically synthesized
  source 1..20: mol_type = other DNA
cattagacagatcaacgaga

SEQ ID NO: 49687 - DNA, 20 bp, synthetic construct
  misc_feature 1..20: note = chemically synthesized
  source 1..20: mol_type = other DNA
agacagatcaacgagacaga

SEQ ID NO: 49688 - DNA, 20 bp, synthetic construct
  misc_feature 1..20: note = chemically synthesized
  source 1..20: mol_type = other DNA
caacgagacagaaagttaac

SEQ ID NO: 49689 - DNA, 20 bp, synthetic construct
  misc_feature 1..20: note = chemically synthesized
  source 1..20: mol_type = other DNA
aacgagacagaaagttaaca

SEQ ID NO: 49690 - DNA, 20 bp, synthetic construct
  misc_feature 1..20: note = chemically synthesized
  source 1..20: mol_type = other DNA
agaaagttaacaaggatatc

SEQ ID NO: 49691 - DNA, 20 bp, synthetic construct
  misc_feature 1..20: note = chemically synthesized
  source 1..20: mol_type = other DNA
gaaagttaacaaggatatcc

SEQ ID NO: 49692 - DNA, 20 bp, synthetic construct
  misc_feature 1..20: note = chemically synthesized
  source 1..20: mol_type = other DNA
taacaaggatatccaggaat

SEQ ID NO: 49693 - DNA, 20 bp, synthetic construct
  misc_feature 1..20: note = chemically synthesized
  source 1..20: mol_type = other DNA
ggatatccaggaattggact

SEQ ID NO: 49694 - DNA, 20 bp, synthetic construct
  misc_feature 1..20: note = chemically synthesized
  source 1..20: mol_type = other DNA
attggactcagctctgcacc

SEQ ID NO: 49695 - DNA, 20 bp, synthetic construct
  misc_feature 1..20: note = chemically synthesized
  source 1..20: mol_type = other DNA
ggactcagctctgcaccaag

SEQ ID NO: 49696 - DNA, 20 bp, synthetic construct
  misc_feature 1..20: note = chemically synthesized
  source 1..20: mol_type = other DNA
tctgcaccaagcagacctaa

SEQ ID NO: 49697 - DNA, 20 bp, synthetic construct
  misc_feature 1..20: note = chemically synthesized
  source 1..20: mol_type = other DNA
gcagacctaatagacatcta

SEQ ID NO: 49698 - DNA, 20 bp, synthetic construct
  misc_feature 1..20: note = chemically synthesized
  source 1..20: mol_type = other DNA
aactctccaccccaaatcaa

SEQ ID NO: 49699 - DNA, 20 bp, synthetic construct
  misc_feature 1..20: note = chemically synthesized
  source 1..20: mol_type = other DNA
aacagaatatacattctttt

SEQ ID NO: 49700 - DNA, 20 bp, synthetic construct
  misc_feature 1..20: note = chemically synthesized
  source 1..20: mol_type = other DNA
ctattccaaaactgaccaca

SEQ ID NO: 49701 - DNA, 20 bp, synthetic construct
  misc_feature 1..20: note = chemically synthesized
  source 1..20: mol_type = other DNA
tccaaaactgaccacatagt

SEQ ID NO: 49702 - DNA, 20 bp, synthetic construct
  misc_feature 1..20: note = chemically synthesized
  source 1..20: mol_type = other DNA
aaaactgaccacatagttgg

SEQ ID NO: 49703 - DNA, 20 bp, synthetic construct
  misc_feature 1..20: note = chemically synthesized
  source 1..20: mol_type = other DNA
tgaccacatagttggaagta

SEQ ID NO: 49704 - DNA, 20 bp, synthetic construct
  misc_feature 1..20: note = chemically synthesized
  source 1..20: mol_type = other DNA
gttggaagtaaagctctcct

SEQ ID NO: 49705 - DNA, 20 bp, synthetic construct
  misc_feature 1..20: note = chemically synthesized
  source 1..20: mol_type = other DNA
gctctcctcagcaaatgtaa

SEQ ID NO: 49706 - DNA, 20 bp, synthetic construct
  misc_feature 1..20: note = chemically synthesized
  source 1..20: mol_type = other DNA
cctcagcaaatgtaaaagaa

SEQ ID NO: 49707 - DNA, 20 bp, synthetic construct
  misc_feature 1..20: note = chemically synthesized
  source 1..20: mol_type = other DNA
aactataacaaactgtctct

SEQ ID NO: 49708 - DNA, 20 bp, synthetic construct
  misc_feature 1..20: note = chemically synthesized
  source 1..20: mol_type = other DNA
acaaactgtctctcagacca

SEQ ID NO: 49709 - DNA, 20 bp, synthetic construct
  misc_feature 1..20: note = chemically synthesized
  source 1..20: mol_type = other DNA
agaccacagtgcaatcaaac

SEQ ID NO: 49710 - DNA, 20 bp, synthetic construct
  misc_feature 1..20: note = chemically synthesized
  source 1..20: mol_type = other DNA
agtgcaatcaaactagaact

SEQ ID NO: 49711 - DNA, 20 bp, synthetic construct
  misc_feature 1..20: note = chemically synthesized
  source 1..20: mol_type = other DNA
gtgcaatcaaactagaactc

SEQ ID NO: 49712 - DNA, 20 bp, synthetic construct
  misc_feature 1..20: note = chemically synthesized
  source 1..20: mol_type = other DNA
tcaaactagaactcaggatt

SEQ ID NO: 49713 - DNA, 20 bp, synthetic construct
  misc_feature 1..20: note = chemically synthesized
  source 1..20: mol_type = other DNA
gaaactcactcaaaaccact

SEQ ID NO: 49714 - DNA, 20 bp, synthetic construct
  misc_feature 1..20: note = chemically synthesized
  source 1..20: mol_type = other DNA
ctcaaaaccactcagctaca

SEQ ID NO: 49715 - DNA, 20 bp, synthetic construct
  misc_feature 1..20: note = chemically synthesized
  source 1..20: mol_type = other DNA
tcagctacatggaaactgaa

SEQ ID NO: 49716 - DNA, 20 bp, synthetic construct
  misc_feature 1..20: note = chemically synthesized
  source 1..20: mol_type = other DNA
gcctgctcctgaatgactac

SEQ ID NO: 49717 - DNA, 20 bp, synthetic construct
  misc_feature 1..20: note = chemically synthesized
  source 1..20: mol_type = other DNA
cctgctcctgaatgactact

SEQ ID NO: 49718 - DNA, 20 bp, synthetic construct
  misc_feature 1..20: note = chemically synthesized
  source 1..20: mol_type = other DNA
actgggtacataacaaaatg

SEQ ID NO: 49719 - DNA, 20 bp, synthetic construct
  misc_feature 1..20: note = chemically synthesized
  source 1..20: mol_type = other DNA
ctgggtacataacaaaatga

SEQ ID NO: 49720 - DNA, 20 bp, synthetic construct
  misc_feature 1..20: note = chemically synthesized
  source 1..20: mol_type = other DNA
ggtacataacaaaatgaagg

SEQ ID NO: 49721 - DNA, 20 bp, synthetic construct
  misc_feature 1..20: note = chemically synthesized
  source 1..20: mol_type = other DNA
acaaaatgaaggcagaaata

SEQ ID NO: 49722 - DNA, 20 bp, synthetic construct
  misc_feature 1..20: note = chemically synthesized
  source 1..20: mol_type = other DNA
agatgttctttgaaaccaac

SEQ ID NO: 49723 - DNA, 20 bp, synthetic construct
  misc_feature 1..20: note = chemically synthesized
  source 1..20: mol_type = other DNA
ctttgaaaccaacgagaaca

SEQ ID NO: 49724 - DNA, 20 bp, synthetic construct
  misc_feature 1..20: note = chemically synthesized
  source 1..20: mol_type = other DNA
agaacaaagacacaacacac

SEQ ID NO: 49725 - DNA, 20 bp, synthetic construct
  misc_feature 1..20: note = chemically synthesized
  source 1..20: mol_type = other DNA
cacaacacaccagaatctct

SEQ ID NO: 49726 - DNA, 20 bp, synthetic construct
  misc_feature 1..20: note = chemically synthesized
  source 1..20: mol_type = other DNA
gaatctctgagacacattca

SEQ ID NO: 49727 - DNA, 20 bp, synthetic construct
  misc_feature 1..20: note = chemically synthesized
  source 1..20: mol_type = other DNA
tctctgagacacattcaaag

SEQ ID NO: 49728 - DNA, 20 bp, synthetic construct
  misc_feature 1..20: note = chemically synthesized
  source 1..20: mol_type = other DNA
gacacattcaaagcagtgtg

SEQ ID NO: 49729 - DNA, 20 bp, synthetic construct
  misc_feature 1..20: note = chemically synthesized
  source 1..20: mol_type = other DNA
cacattcaaagcagtgtgta

SEQ ID NO: 49730 - DNA, 20 bp, synthetic construct
  misc_feature 1..20: note = chemically synthesized
  source 1..20: mol_type = other DNA
acattcaaagcagtgtgtag

SEQ ID NO: 49731 - DNA, 20 bp, synthetic construct
  misc_feature 1..20: note = chemically synthesized
  source 1..20: mol_type = other DNA
cattcaaagcagtgtgtaga

SEQ ID NO: 49732 - DNA, 20 bp, synthetic construct
  misc_feature 1..20: note = chemically synthesized
  source 1..20: mol_type = other DNA
agtgtgtagagggaaattta

SEQ ID NO: 49733 - DNA, 20 bp, synthetic construct
  misc_feature 1..20: note = chemically synthesized
  source 1..20: mol_type = other DNA
ttatagcactaaatgcccac

SEQ ID NO: 49734 - DNA, 20 bp, synthetic construct
  misc_feature 1..20: note = chemically synthesized
  source 1..20: mol_type = other DNA
tatagcactaaatgcccaca

SEQ ID NO: 49735 - DNA, 20 bp, synthetic construct
  misc_feature 1..20: note = chemically synthesized
  source 1..20: mol_type = other DNA
atagcactaaatgcccacaa

SEQ ID NO: 49736 - DNA, 20 bp, synthetic construct
  misc_feature 1..20: note = chemically synthesized
  source 1..20: mol_type = other DNA
cactaaatgcccacaaggga

SEQ ID NO: 49737 - DNA, 20 bp, synthetic construct
  misc_feature 1..20: note = chemically synthesized
  source 1..20: mol_type = other DNA
taaatgcccacaagggaaag

SEQ ID NO: 49738 - DNA, 20 bp, synthetic construct
  misc_feature 1..20: note = chemically synthesized
  source 1..20: mol_type = other DNA
aaatgcccacaagggaaagc

SEQ ID NO: 49739 - DNA, 20 bp, synthetic construct
  misc_feature 1..20: note = chemically synthesized
  source 1..20: mol_type = other DNA
gcccacaagggaaagcagga

SEQ ID NO: 49740 - DNA, 20 bp, synthetic construct
  misc_feature 1..20: note = chemically synthesized
  source 1..20: mol_type = other DNA
taacatcacaattaaaaaac

SEQ ID NO: 49741 - DNA, 20 bp, synthetic construct
  misc_feature 1..20: note = chemically synthesized
  source 1..20: mol_type = other DNA
acatcacaattaaaaaacta

SEQ ID NO: 49742 - DNA, 20 bp, synthetic construct
  misc_feature 1..20: note = chemically synthesized
  source 1..20: mol_type = other DNA
tcacaattaaaaaactagag

SEQ ID NO: 49743 - DNA, 20 bp, synthetic construct
  misc_feature 1..20: note = chemically synthesized
  source 1..20: mol_type = other DNA
caattaaaaaactagagaag

SEQ ID NO: 49744 - DNA, 20 bp, synthetic construct
  misc_feature 1..20: note = chemically synthesized
  source 1..20: mol_type = other DNA
aattaaaaaactagagaagc

SEQ ID NO: 49745 - DNA, 20 bp, synthetic construct
  misc_feature 1..20: note = chemically synthesized
  source 1..20: mol_type = other DNA
ttaaaaaactagagaagcag

SEQ ID NO: 49746 - DNA, 20 bp, synthetic construct
  misc_feature 1..20: note = chemically synthesized
  source 1..20: mol_type = other DNA
gcaggagcaaacacattcaa

SEQ ID NO: 49747 - DNA, 20 bp, synthetic construct
  misc_feature 1..20: note = chemically synthesized
  source 1..20: mol_type = other DNA
caaacacattcaaaagctaa

SEQ ID NO: 49748 - DNA, 20 bp, synthetic construct
  misc_feature 1..20: note = chemically synthesized
  source 1..20: mol_type = other DNA
acacattcaaaagctaacag

SEQ ID NO: 49749 - DNA, 20 bp, synthetic construct
  misc_feature 1..20: note = chemically synthesized
  source 1..20: mol_type = other DNA
ttcaaaagctaacagaagac

SEQ ID NO: 49750 - DNA, 20 bp, synthetic construct
  misc_feature 1..20: note = chemically synthesized
  source 1..20: mol_type = other DNA
acagaagacaagaaataact

SEQ ID NO: 49751 - DNA, 20 bp, synthetic construct
  misc_feature 1..20: note = chemically synthesized
  source 1..20: mol_type = other DNA
agacaagaaataactaagat

SEQ ID NO: 49752 - DNA, 20 bp, synthetic construct
  misc_feature 1..20: note = chemically synthesized
  source 1..20: mol_type = other DNA
acaagaaataactaagatca

SEQ ID NO: 49753 - DNA, 20 bp, synthetic construct
  misc_feature 1..20: note = chemically synthesized
  source 1..20: mol_type = other DNA
agaaataactaagatcagag

SEQ ID NO: 49754 - DNA, 20 bp, synthetic construct
  misc_feature 1..20: note = chemically synthesized
  source 1..20: mol_type = other DNA
aataactaagatcagagcag

SEQ ID NO: 49755 - DNA, 20 bp, synthetic construct
  misc_feature 1..20: note = chemically synthesized
  source 1..20: mol_type = other DNA
ctaagatcagagcagaagtg

SEQ ID NO: 49756 - DNA, 20 bp, synthetic construct
  misc_feature 1..20: note = chemically synthesized
  source 1..20: mol_type = other DNA
taagatcagagcagaagtga

SEQ ID NO: 49757 - DNA, 20 bp, synthetic construct
  misc_feature 1..20: note = chemically synthesized
  source 1..20: mol_type = other DNA
cagagcagaagtgaaggaca

SEQ ID NO: 49758 - DNA, 20 bp, synthetic construct
  misc_feature 1..20: note = chemically synthesized
  source 1..20: mol_type = other DNA
gagcagaagtgaaggacata

SEQ ID NO: 49759 - DNA, 20 bp, synthetic construct
  misc_feature 1..20: note = chemically synthesized
  source 1..20: mol_type = other DNA
ttcaaaaaaatcaatgaatc

SEQ ID NO: 49760 - DNA, 20 bp, synthetic construct
  misc_feature 1..20: note = chemically synthesized
  source 1..20: mol_type = other DNA
aaaaaaatcaatgaatccag

SEQ ID NO: 49761 - DNA, 20 bp, synthetic construct
  misc_feature 1..20: note = chemically synthesized
  source 1..20: mol_type = other DNA
ccagaagctgtttttttgaa

SEQ ID NO: 49762 - DNA, 20 bp, synthetic construct
  misc_feature 1..20: note = chemically synthesized
  source 1..20: mol_type = other DNA
gaaaagatcaacaaaattga

SEQ ID NO: 49763 - DNA, 20 bp, synthetic construct
  misc_feature 1..20: note = chemically synthesized
  source 1..20: mol_type = other DNA
caacaaaattgatagactgc

SEQ ID NO: 49764 - DNA, 20 bp, synthetic construct
  misc_feature 1..20: note = chemically synthesized
  source 1..20: mol_type = other DNA
aaaattgatagactgctagc

SEQ ID NO: 49765 - DNA, 20 bp, synthetic construct
  misc_feature 1..20: note = chemically synthesized
  source 1..20: mol_type = other DNA
gactgctagcaagactaata

SEQ ID NO: 49766 - DNA, 20 bp, synthetic construct
  misc_feature 1..20: note = chemically synthesized
  source 1..20: mol_type = other DNA
tgctagcaagactaataaag

SEQ ID NO: 49767 - DNA, 20 bp, synthetic construct
  misc_feature 1..20: note = chemically synthesized
  source 1..20: mol_type = other DNA
gcaagactaataaagaagaa

SEQ ID NO: 49768 - DNA, 20 bp, synthetic construct
  misc_feature 1..20: note = chemically synthesized
  source 1..20: mol_type = other DNA
aagactaataaagaagaaaa

SEQ ID NO: 49769 - DNA, 20 bp, synthetic construct
  misc_feature 1..20: note = chemically synthesized
  source 1..20: mol_type = other DNA
gactaataaagaagaaaaga

SEQ ID NO: 49770 - DNA, 20 bp, synthetic construct
  misc_feature 1..20: note = chemically synthesized
  source 1..20: mol_type = other DNA
taataaagaagaaaagagag

SEQ ID NO: 49771 - DNA, 20 bp, synthetic construct
  misc_feature 1..20: note = chemically synthesized
  source 1..20: mol_type = other DNA
gaaaagagagaagaatcaaa

SEQ ID NO: 49772 - DNA, 20 bp, synthetic construct
  misc_feature 1..20: note = chemically synthesized
  source 1..20: mol_type = other DNA
agacgcaataaaaaatgaca

SEQ ID NO: 49773 - DNA, 20 bp, synthetic construct
  misc_feature 1..20: note = chemically synthesized
  source 1..20: mol_type = other DNA
gacgcaataaaaaatgacac

SEQ ID NO: 49774 - DNA, 20 bp, synthetic construct
  misc_feature 1..20: note = chemically synthesized
  source 1..20: mol_type = other DNA
acgcaataaaaaatgacacg

SEQ ID NO: 49775 - DNA, 20 bp, synthetic construct
  misc_feature 1..20: note = chemically synthesized
  source 1..20: mol_type = other DNA
gggtatcaccactgatccca

SEQ ID NO: 49776 - DNA, 20 bp, synthetic construct
  misc_feature 1..20: note = chemically synthesized
  source 1..20: mol_type = other DNA
acagaaatacaaactaccgt

SEQ ID NO: 49777 - DNA, 20 bp, synthetic construct
  misc_feature 1..20: note = chemically synthesized
  source 1..20: mol_type = other DNA
agaaatacaaactaccgtca

SEQ ID NO: 49778 - DNA, 20 bp, synthetic construct
  misc_feature 1..20: note = chemically synthesized
  source 1..20: mol_type = other DNA
acacctctacgcaaataaac

SEQ ID NO: 49779 - DNA, 20 bp, synthetic construct
  misc_feature 1..20: note = chemically synthesized
  source 1..20: mol_type = other DNA
cgcaaataaactagaaaatc

SEQ ID NO: 49780 - DNA, 20 bp, synthetic construct
  misc_feature 1..20: note = chemically synthesized
  source 1..20: mol_type = other DNA
aaataaactagaaaatctag

SEQ ID NO: 49781 - DNA, 20 bp, synthetic construct
  misc_feature 1..20: note = chemically synthesized
  source 1..20: mol_type = other DNA
actagaaaatctagaagaaa

SEQ ID NO: 49782 - DNA, 20 bp, synthetic construct
  misc_feature 1..20: note = chemically synthesized
  source 1..20: mol_type = other DNA
ctcgacacatacactctgcc

SEQ ID NO: 49783 - DNA, 20 bp, synthetic construct
  misc_feature 1..20: note = chemically synthesized
  source 1..20: mol_type = other DNA
acactctgccaagactaaac

SEQ ID NO: 49784 - DNA, 20 bp, synthetic construct
  misc_feature 1..20: note = chemically synthesized
  source 1..20: mol_type = other DNA
cactctgccaagactaaacc

SEQ ID NO: 49785 - DNA, 20 bp, synthetic construct
  misc_feature 1..20: note = chemically synthesized
  source 1..20: mol_type = other DNA
tctgccaagactaaaccagg

SEQ ID NO: 49786 - DNA, 20 bp, synthetic construct
  misc_feature 1..20: note = chemically synthesized
  source 1..20: mol_type = other DNA
gccaagactaaaccaggaag

SEQ ID NO: 49787 - DNA, 20 bp, synthetic construct
  misc_feature 1..20: note = chemically synthesized
  source 1..20: mol_type = other DNA
gaagaagttgtatctctgaa

SEQ ID NO: 49788 - DNA, 20 bp, synthetic construct
  misc_feature 1..20: note = chemically synthesized
  source 1..20: mol_type = other DNA
atctctgaatagaccaataa

SEQ ID NO: 49789 - DNA, 20 bp, synthetic construct
  misc_feature 1..20: note = chemically synthesized
  source 1..20: mol_type = other DNA
tctctgaatagaccaataac

SEQ ID NO: 49790 - DNA, 20 bp, synthetic construct
  misc_feature 1..20: note = chemically synthesized
  source 1..20: mol_type = other DNA
caataacaggctctgaaatt

SEQ ID NO: 49791 - DNA, 20 bp, synthetic construct
  misc_feature 1..20: note = chemically synthesized
  source 1..20: mol_type = other DNA
aataacaggctctgaaattg

SEQ ID NO: 49792 - DNA, 20 bp, synthetic construct
  misc_feature 1..20: note = chemically synthesized
  source 1..20: mol_type = other DNA
gaaattgaggcaataattaa

SEQ ID NO: 49793 - DNA, 20 bp, synthetic construct
  misc_feature 1..20: note = chemically synthesized
  source 1..20: mol_type = other DNA
aatagcttatcaaccaaaaa

SEQ ID NO: 49794 - DNA, 20 bp, synthetic construct
  misc_feature 1..20: note = chemically synthesized
  source 1..20: mol_type = other DNA
cttatcaaccaaaaaaagtc

SEQ ID NO: 49795 - DNA, 20 bp, synthetic construct
  misc_feature 1..20: note = chemically synthesized
  source 1..20: mol_type = other DNA
ttatcaaccaaaaaaagtcc

SEQ ID NO: 49796 - DNA, 20 bp, synthetic construct
  misc_feature 1..20: note = chemically synthesized
  source 1..20: mol_type = other DNA
aaccaaaaaaagtccgggac

SEQ ID NO: 49797 - DNA, 20 bp, synthetic construct
  misc_feature 1..20: note = chemically synthesized
  source 1..20: mol_type = other DNA
caaaaaaagtccgggaccag

SEQ ID NO: 49798 - DNA, 20 bp, synthetic construct
  misc_feature 1..20: note = chemically synthesized
  source 1..20: mol_type = other DNA
aaaaaaagtccgggaccagt

SEQ ID NO: 49799 - DNA, 20 bp, synthetic construct
  misc_feature 1..20: note = chemically synthesized
  source 1..20: mol_type = other DNA
tccgggaccagtaggattca

SEQ ID NO: 49800 - DNA, 20 bp, synthetic construct
  misc_feature 1..20: note = chemically synthesized
  source 1..20: mol_type = other DNA
gattcatagccgaattctac

SEQ ID NO: 49801 - DNA, 20 bp, synthetic construct
  misc_feature 1..20: note = chemically synthesized
  source 1..20: mol_type = other DNA
ttcatagccgaattctacca

SEQ ID NO: 49802 - DNA, 20 bp, synthetic construct
  misc_feature 1..20: note = chemically synthesized
  source 1..20: mol_type = other DNA
tcatagccgaattctaccag

SEQ ID NO: 49803 - DNA, 20 bp, synthetic construct
  misc_feature 1..20: note = chemically synthesized
  source 1..20: mol_type = other DNA
ccgaattctaccagaggtac

SEQ ID NO: 49804 - DNA, 20 bp, synthetic construct
  misc_feature 1..20: note = chemically synthesized
  source 1..20: mol_type = other DNA
cgaattctaccagaggtaca

SEQ ID NO: 49805 - DNA, 20 bp, synthetic construct
  misc_feature 1..20: note = chemically synthesized
  source 1..20: mol_type = other DNA
aattctaccagaggtacaag

SEQ ID NO: 49806 - DNA, 20 bp, synthetic construct
  misc_feature 1..20: note = chemically synthesized
  source 1..20: mol_type = other DNA
attctaccagaggtacaagg

SEQ ID NO: 49807 - DNA, 20 bp, synthetic construct
  misc_feature 1..20: note = chemically synthesized
  source 1..20: mol_type = other DNA
tctaccagaggtacaaggag

SEQ ID NO: 49808 - DNA, 20 bp, synthetic construct
  misc_feature 1..20: note = chemically synthesized
  source 1..20: mol_type = other DNA
ccagaggtacaaggaggagc

SEQ ID NO: 49809 - DNA, 20 bp, synthetic construct
  misc_feature 1..20: note = chemically synthesized
  source 1..20: mol_type = other DNA
tctgaaactattccaatcaa

SEQ ID NO: 49810 - DNA, 20 bp, synthetic construct
  misc_feature 1..20: note = chemically synthesized
  source 1..20: mol_type = other DNA
actattccaatcaatagaaa

SEQ ID NO: 49811 - DNA, 20 bp, synthetic construct
  misc_feature 1..20: note = chemically synthesized
  source 1..20: mol_type = other DNA
tattccaatcaatagaaaaa

SEQ ID NO: 49812 - DNA, 20 bp, synthetic construct
  misc_feature 1..20: note = chemically synthesized
  source 1..20: mol_type = other DNA
attccaatcaatagaaaaag

SEQ ID NO: 49813 - DNA, 20 bp, synthetic construct
  misc_feature 1..20: note = chemically synthesized
  source 1..20: mol_type = other DNA
ttccaatcaatagaaaaaga

SEQ ID NO: 49814 - DNA, 20 bp, synthetic construct
  misc_feature 1..20: note = chemically synthesized
  source 1..20: mol_type = other DNA
tcctccctaactcattttat

SEQ ID NO: 49815 - DNA, 20 bp, synthetic construct
  misc_feature 1..20: note = chemically synthesized
  source 1..20: mol_type = other DNA
cctccctaactcattttatg

SEQ ID NO: 49816 - DNA, 20 bp, synthetic construct
  misc_feature 1..20: note = chemically synthesized
  source 1..20: mol_type = other DNA
cctaactcattttatgaggc

SEQ ID NO: 49817 - DNA, 20 bp, synthetic construct
  misc_feature 1..20: note = chemically synthesized
  source 1..20: mol_type = other DNA
ccagcatcatcctgatacca

SEQ ID NO: 49818 - DNA, 20 bp, synthetic construct
  misc_feature 1..20: note = chemically synthesized
  source 1..20: mol_type = other DNA
atcctgataccaaagcctga

SEQ ID NO: 49819 - DNA, 20 bp, synthetic construct
  misc_feature 1..20: note = chemically synthesized
  source 1..20: mol_type = other DNA
cctgataccaaagcctgaca

SEQ ID NO: 49820 - DNA, 20 bp, synthetic construct
  misc_feature 1..20: note = chemically synthesized
  source 1..20: mol_type = other DNA
tgacagagacacaacaaaaa

SEQ ID NO: 49821 - DNA, 20 bp, synthetic construct
  misc_feature 1..20: note = chemically synthesized
  source 1..20: mol_type = other DNA
acagagacacaacaaaaaaa

SEQ ID NO: 49822 - DNA, 20 bp, synthetic construct
  misc_feature 1..20: note = chemically synthesized
  source 1..20: mol_type = other DNA
aaaaatcctcaataaaatac

SEQ ID NO: 49823 - DNA, 20 bp, synthetic construct
  misc_feature 1..20: note = chemically synthesized
  source 1..20: mol_type = other DNA
caaactgatccaccatgatc

SEQ ID NO: 49824 - DNA, 20 bp, synthetic construct
  misc_feature 1..20: note = chemically synthesized
  source 1..20: mol_type = other DNA
actgatccaccatgatcaag

SEQ ID NO: 49825 - DNA, 20 bp, synthetic construct
  misc_feature 1..20: note = chemically synthesized
  source 1..20: mol_type = other DNA
ctgatccaccatgatcaagt

SEQ ID NO: 49826 - DNA, 20 bp, synthetic construct
  misc_feature 1..20: note = chemically synthesized
  source 1..20: mol_type = other DNA
gggcttcatccctgccatgc

SEQ ID NO: 49827 - DNA, 20 bp, synthetic construct
  misc_feature 1..20: note = chemically synthesized
  source 1..20: mol_type = other DNA
ggcttcatccctgccatgca

SEQ ID NO: 49828 - DNA, 20 bp, synthetic construct
  misc_feature 1..20: note = chemically synthesized
  source 1..20: mol_type = other DNA
tcatccctgccatgcaaggc

SEQ ID NO: 49829 - DNA, 20 bp, synthetic construct
  misc_feature 1..20: note = chemically synthesized
  source 1..20: mol_type = other DNA
gaaaatcaataaacataatc

SEQ ID NO: 49830 - DNA, 20 bp, synthetic construct
  misc_feature 1..20: note = chemically synthesized
  source 1..20: mol_type = other DNA
aacataatccagcatataaa

SEQ ID NO: 49831 - DNA, 20 bp, synthetic construct
  misc_feature 1..20: note = chemically synthesized
  source 1..20: mol_type = other DNA
ccagcatataaacagaacca

SEQ ID NO: 49832 - DNA, 20 bp, synthetic construct
  misc_feature 1..20: note = chemically synthesized
  source 1..20: mol_type = other DNA
aaaccatatgattatctcaa

SEQ ID NO: 49833 - DNA, 20 bp, synthetic construct
  misc_feature 1..20: note = chemically synthesized
  source 1..20: mol_type = other DNA
tatgattatctcaatagatg

SEQ ID NO: 49834 - DNA, 20 bp, synthetic construct
  misc_feature 1..20: note = chemically synthesized
  source 1..20: mol_type = other DNA
ttatctcaatagatgcagaa

SEQ ID NO: 49835 - DNA, 20 bp, synthetic construct
  misc_feature 1..20: note = chemically synthesized
  source 1..20: mol_type = other DNA
tatctcaatagatgcagaaa

SEQ ID NO: 49836 - DNA, 20 bp, synthetic construct
  misc_feature 1..20: note = chemically synthesized
  source 1..20: mol_type = other DNA
gctaaaaactctcaataaat

SEQ ID NO: 49837 - DNA, 20 bp, synthetic construct
  misc_feature 1..20: note = chemically synthesized
  source 1..20: mol_type = other DNA
ctaaaaactctcaataaatt

SEQ ID NO: 49838 - DNA, 20 bp, synthetic construct
  misc_feature 1..20: note = chemically synthesized
  source 1..20: mol_type = other DNA
ctcaataaattaggtattga

SEQ ID NO: 49839 - DNA, 20 bp, synthetic construct
  misc_feature 1..20: note = chemically synthesized
  source 1..20: mol_type = other DNA
tcaataaattaggtattgat

SEQ ID NO: 49840 - DNA, 20 bp, synthetic construct
  misc_feature 1..20: note = chemically synthesized
  source 1..20: mol_type = other DNA
gggacatatctcaaaataat

SEQ ID NO: 49841 - DNA, 20 bp, synthetic construct
  misc_feature 1..20: note = chemically synthesized
  source 1..20: mol_type = other DNA
gacatatctcaaaataataa

SEQ ID NO: 49842 - DNA, 20 bp, synthetic construct
  misc_feature 1..20: note = chemically synthesized
  source 1..20: mol_type = other DNA
agctatctatgacaaaccca

SEQ ID NO: 49843 - DNA, 20 bp, synthetic construct
  misc_feature 1..20: note = chemically synthesized
  source 1..20: mol_type = other DNA
cccacagccaatatcatact

SEQ ID NO: 49844 - DNA, 20 bp, synthetic construct
  misc_feature 1..20: note = chemically synthesized
  source 1..20: mol_type = other DNA
acagccaatatcatactgag

SEQ ID NO: 49845 - DNA, 20 bp, synthetic construct
  misc_feature 1..20: note = chemically synthesized
  source 1..20: mol_type = other DNA
catactgagtggacaaaaac

SEQ ID NO: 49846 - DNA, 20 bp, synthetic construct
  misc_feature 1..20: note = chemically synthesized
  source 1..20: mol_type = other DNA
actgagtggacaaaaactgg

SEQ ID NO: 49847 - DNA, 20 bp, synthetic construct
  misc_feature 1..20: note = chemically synthesized
  source 1..20: mol_type = other DNA
gaagcattccctttgaaaac

SEQ ID NO: 49848 - DNA, 20 bp, synthetic construct
  misc_feature 1..20: note = chemically synthesized
  source 1..20: mol_type = other DNA
ttccctttgaaaactggcac

SEQ ID NO: 49849 - DNA, 20 bp, synthetic construct
  misc_feature 1..20: note = chemically synthesized
  source 1..20: mol_type = other DNA
tccctttgaaaactggcaca

SEQ ID NO: 49850 - DNA, 20 bp, synthetic construct
  misc_feature 1..20: note = chemically synthesized
  source 1..20: mol_type = other DNA
ctttgaaaactggcacaagg

SEQ ID NO: 49851 - DNA, 20 bp, synthetic construct
  misc_feature 1..20: note = chemically synthesized
  source 1..20: mol_type = other DNA
tttgaaaactggcacaaggc

SEQ ID NO: 49852 - DNA, 20 bp, synthetic construct
  misc_feature 1..20: note = chemically synthesized
  source 1..20: mol_type = other DNA
ttgaaaactggcacaaggca

SEQ ID NO: 49853 - DNA, 20 bp, synthetic construct
  misc_feature 1..20: note = chemically synthesized
  source 1..20: mol_type = other DNA
ctcaccactcctattcaaca

SEQ ID NO: 49854 - DNA, 20 bp, synthetic construct
  misc_feature 1..20: note = chemically synthesized
  source 1..20: mol_type = other DNA
cctattcaacatagtgttgt

SEQ ID NO: 49855 - DNA, 20 bp, synthetic construct
  misc_feature 1..20: note = chemically synthesized
  source 1..20: mol_type = other DNA
caacatagtgttgtaagttc

SEQ ID NO: 49856 - DNA, 20 bp, synthetic construct
  misc_feature 1..20: note = chemically synthesized
  source 1..20: mol_type = other DNA
atagtgttgtaagttctggc

SEQ ID NO: 49857 - DNA, 20 bp, synthetic construct
  misc_feature 1..20: note = chemically synthesized
  source 1..20: mol_type = other DNA
tagtgttgtaagttctggcc

SEQ ID NO: 49858 - DNA, 20 bp, synthetic construct
  misc_feature 1..20: note = chemically synthesized
  source 1..20: mol_type = other DNA
agtgttgtaagttctggcca

SEQ ID NO: 49859 - DNA, 20 bp, synthetic construct
  misc_feature 1..20: note = chemically synthesized
  source 1..20: mol_type = other DNA
taagttctggccagggcaat

SEQ ID NO: 49860 - DNA, 20 bp, synthetic construct
  misc_feature 1..20: note = chemically synthesized
  source 1..20: mol_type = other DNA
aagttctggccagggcaatc

SEQ ID NO: 49861 - DNA, 20 bp, synthetic construct
  misc_feature 1..20: note = chemically synthesized
  source 1..20: mol_type = other DNA
ttctggccagggcaatcagg

SEQ ID NO: 49862 - DNA, 20 bp, synthetic construct
  misc_feature 1..20: note = chemically synthesized
  source 1..20: mol_type = other DNA
tctggccagggcaatcaggc

SEQ ID NO: 49863 - DNA, 20 bp, synthetic construct
  misc_feature 1..20: note = chemically synthesized
  source 1..20: mol_type = other DNA
tggccagggcaatcaggcag

SEQ ID NO: 49864 - DNA, 20 bp, synthetic construct
  misc_feature 1..20: note = chemically synthesized
  source 1..20: mol_type = other DNA
ccagggcaatcaggcaggag

SEQ ID NO: 49865 - DNA, 20 bp, synthetic construct
  misc_feature 1..20: note = chemically synthesized
  source 1..20: mol_type = other DNA
cagggcaatcaggcaggaga

SEQ ID NO: 49866 - DNA, 20 bp, synthetic construct
  misc_feature 1..20: note = chemically synthesized
  source 1..20: mol_type = other DNA
tcaggcaggagaaggaaata

SEQ ID NO: 49867 - DNA, 20 bp, synthetic construct
  misc_feature 1..20: note = chemically synthesized
  source 1..20: mol_type = other DNA
caggcaggagaaggaaataa

SEQ ID NO: 49868 - DNA, 20 bp, synthetic construct
  misc_feature 1..20: note = chemically synthesized
  source 1..20: mol_type = other DNA
aggcaggagaaggaaataaa

SEQ ID NO: 49869 - DNA, 20 bp, synthetic construct
  misc_feature 1..20: note = chemically synthesized
  source 1..20: mol_type = other DNA
ggaaataaagggcattcaat

SEQ ID NO: 49870 - DNA, 20 bp, synthetic construct
  misc_feature 1..20: note = chemically synthesized
  source 1..20: mol_type = other DNA
gaaataaagggcattcaatt

SEQ ID NO: 49871 - DNA, 20 bp, synthetic construct
  misc_feature 1..20: note = chemically synthesized
  source 1..20: mol_type = other DNA
aaagggcattcaattaggaa

SEQ ID NO: 49872 - DNA, 20 bp, synthetic construct
  misc_feature 1..20: note = chemically synthesized
  source 1..20: mol_type = other DNA
agggcattcaattaggaaaa

SEQ ID NO: 49873 - DNA, 20 bp, synthetic construct
  misc_feature 1..20: note = chemically synthesized
  source 1..20: mol_type = other DNA
gggcattcaattaggaaaag

SEQ ID NO: 49874 - DNA, 20 bp, synthetic construct
  misc_feature 1..20: note = chemically synthesized
  source 1..20: mol_type = other DNA
cattcaattaggaaaagagg

SEQ ID NO: 49875 - DNA, 20 bp, synthetic construct
  misc_feature 1..20: note = chemically synthesized
  source 1..20: mol_type = other DNA
agtgaaattgtccctgtttg

SEQ ID NO: 49876 - DNA, 20 bp, synthetic construct
  misc_feature 1..20: note = chemically synthesized
  source 1..20: mol_type = other DNA
agatgacatgattgtatatc

SEQ ID NO: 49877 - DNA, 20 bp, synthetic construct
  misc_feature 1..20: note = chemically synthesized
  source 1..20: mol_type = other DNA
tctagaaaaccccattgtct

SEQ ID NO: 49878 - DNA, 20 bp, synthetic construct
  misc_feature 1..20: note = chemically synthesized
  source 1..20: mol_type = other DNA
tctcagcccaaaatctcctt

SEQ ID NO: 49879 - DNA, 20 bp, synthetic construct
  misc_feature 1..20: note = chemically synthesized
  source 1..20: mol_type = other DNA
caaaatctccttaagctgat

SEQ ID NO: 49880 - DNA, 20 bp, synthetic construct
  misc_feature 1..20: note = chemically synthesized
  source 1..20: mol_type = other DNA
cttaagctgataagcaactt

SEQ ID NO: 49881 - DNA, 20 bp, synthetic construct
  misc_feature 1..20: note = chemically synthesized
  source 1..20: mol_type = other DNA
gctgataagcaacttcagca

SEQ ID NO: 49882 - DNA, 20 bp, synthetic construct
  misc_feature 1..20: note = chemically synthesized
  source 1..20: mol_type = other DNA
aagcaacttcagcaaagtct

SEQ ID NO: 49883 - DNA, 20 bp, synthetic construct
  misc_feature 1..20: note = chemically synthesized
  source 1..20: mol_type = other DNA
agcaacttcagcaaagtctc

SEQ ID NO: 49884 - DNA, 20 bp, synthetic construct
  misc_feature 1..20: note = chemically synthesized
  source 1..20: mol_type = other DNA
aaagtctcaggatataaaat

SEQ ID NO: 49885 - DNA, 20 bp, synthetic construct
  misc_feature 1..20: note = chemically synthesized
  source 1..20: mol_type = other DNA
aatcagtgtgcaaaaatcac

SEQ ID NO: 49886 - DNA, 20 bp, synthetic construct
  misc_feature 1..20: note = chemically synthesized
  source 1..20: mol_type = other DNA
gtattcctatgcaccaataa

SEQ ID NO: 49887 - DNA, 20 bp, synthetic construct
  misc_feature 1..20: note = chemically synthesized
  source 1..20: mol_type = other DNA
atgcaccaataacagacaaa

SEQ ID NO: 49888 - DNA, 20 bp, synthetic construct
  misc_feature 1..20: note = chemically synthesized
  source 1..20: mol_type = other DNA
gcaccaataacagacaaaca

SEQ ID NO: 49889 - DNA, 20 bp, synthetic construct
  misc_feature 1..20: note = chemically synthesized
  source 1..20: mol_type = other DNA
accaataacagacaaacaga

SEQ ID NO: 49890 - DNA, 20 bp, synthetic construct
  misc_feature 1..20: note = chemically synthesized
  source 1..20: mol_type = other DNA
caaacagagagccaaatcat

SEQ ID NO: 49891 - DNA, 20 bp, synthetic construct
  misc_feature 1..20: note = chemically synthesized
  source 1..20: mol_type = other DNA
tcccattcacaattgcttca

SEQ ID NO: 49892 - DNA, 20 bp, synthetic construct
  misc_feature 1..20: note = chemically synthesized
  source 1..20: mol_type = other DNA
ccattcacaattgcttcaaa

SEQ ID NO: 49893 - DNA, 20 bp, synthetic construct
  misc_feature 1..20: note = chemically synthesized
  source 1..20: mol_type = other DNA
ttcaaagagaataaaatacc

SEQ ID NO: 49894 - DNA, 20 bp, synthetic construct
  misc_feature 1..20: note = chemically synthesized
  source 1..20: mol_type = other DNA
tcaaagagaataaaatacct

SEQ ID NO: 49895 - DNA, 20 bp, synthetic construct
  misc_feature 1..20: note = chemically synthesized
  source 1..20: mol_type = other DNA
tacctaggaatccaacttac

SEQ ID NO: 49896 - DNA, 20 bp, synthetic construct
  misc_feature 1..20: note = chemically synthesized
  source 1..20: mol_type = other DNA
acctaggaatccaacttaca

SEQ ID NO: 49897 - DNA, 20 bp, synthetic construct
  misc_feature 1..20: note = chemically synthesized
  source 1..20: mol_type = other DNA
cctaggaatccaacttacaa

SEQ ID NO: 49898 - DNA, 20 bp, synthetic construct
  misc_feature 1..20: note = chemically synthesized
  source 1..20: mol_type = other DNA
tccaacttacaagggatgtg

SEQ ID NO: 49899 - DNA, 20 bp, synthetic construct
  misc_feature 1..20: note = chemically synthesized
  source 1..20: mol_type = other DNA
ccaacttacaagggatgtga

SEQ ID NO: 49900 - DNA, 20 bp, synthetic construct
  misc_feature 1..20: note = chemically synthesized
  source 1..20: mol_type = other DNA
gggatgtgaaggacctcttc

SEQ ID NO: 49901 - DNA, 20 bp, synthetic construct
  misc_feature 1..20: note = chemically synthesized
  source 1..20: mol_type = other DNA
ggatgtgaaggacctcttca

SEQ ID NO: 49902 - DNA, 20 bp, synthetic construct
  misc_feature 1..20: note = chemically synthesized
  source 1..20: mol_type = other DNA
atgtgaaggacctcttcaag

SEQ ID NO: 49903 - DNA, 20 bp, synthetic construct
  misc_feature 1..20: note = chemically synthesized
  source 1..20: mol_type = other DNA
accactgctcaatgaaataa

SEQ ID NO: 49904 - DNA, 20 bp, synthetic construct
  misc_feature 1..20: note = chemically synthesized
  source 1..20: mol_type = other DNA
cactgctcaatgaaataaaa

SEQ ID NO: 49905 - DNA, 20 bp, synthetic construct
  misc_feature 1..20: note = chemically synthesized
  source 1..20: mol_type = other DNA
actgctcaatgaaataaaag

SEQ ID NO: 49906 - DNA, 20 bp, synthetic construct
  misc_feature 1..20: note = chemically synthesized
  source 1..20: mol_type = other DNA
taaaagaggatacaaacaaa

SEQ ID NO: 49907 - DNA, 20 bp, synthetic construct
  misc_feature 1..20: note = chemically synthesized
  source 1..20: mol_type = other DNA
aagaggatacaaacaaatgg

SEQ ID NO: 49908 - DNA, 20 bp, synthetic construct
  misc_feature 1..20: note = chemically synthesized
  source 1..20: mol_type = other DNA
ggaagaacattccatgctca

SEQ ID NO: 49909 - DNA, 20 bp, synthetic construct
  misc_feature 1..20: note = chemically synthesized
  source 1..20: mol_type = other DNA
gaagaacattccatgctcat

SEQ ID NO: 49910 - DNA, 20 bp, synthetic construct
  misc_feature 1..20: note = chemically synthesized
  source 1..20: mol_type = other DNA
gaacattccatgctcatggg

SEQ ID NO: 49911 - DNA, 20 bp, synthetic construct
  misc_feature 1..20: note = chemically synthesized
  source 1..20: mol_type = other DNA
aacattccatgctcatgggt

SEQ ID NO: 49912 - DNA, 20 bp, synthetic construct
  misc_feature 1..20: note = chemically synthesized
  source 1..20: mol_type = other DNA
attccatgctcatgggtagg

SEQ ID NO: 49913 - DNA, 20 bp, synthetic construct
  misc_feature 1..20: note = chemically synthesized
  source 1..20: mol_type = other DNA
aagaatcaatatcgtgaaaa

SEQ ID NO: 49914 - DNA, 20 bp, synthetic construct
  misc_feature 1..20: note = chemically synthesized
  source 1..20: mol_type = other DNA
tgaaaatggtcatactgccc

SEQ ID NO: 49915 - DNA, 20 bp, synthetic construct
  misc_feature 1..20: note = chemically synthesized
  source 1..20: mol_type = other DNA
gaaaatggtcatactgccca

SEQ ID NO: 49916 - DNA, 20 bp, synthetic construct
  misc_feature 1..20: note = chemically synthesized
  source 1..20: mol_type = other DNA
atactgcccaaggtaattta

SEQ ID NO: 49917 - DNA, 20 bp, synthetic construct
  misc_feature 1..20: note = chemically synthesized
  source 1..20: mol_type = other DNA
gattcaatgccatccccatc

SEQ ID NO: 49918 - DNA, 20 bp, synthetic construct
  misc_feature 1..20: note = chemically synthesized
  source 1..20: mol_type = other DNA
gctaccaatgactttcttca

SEQ ID NO: 49919 - DNA, 20 bp, synthetic construct
  misc_feature 1..20: note = chemically synthesized
  source 1..20: mol_type = other DNA
aatgactttcttcacagaac

SEQ ID NO: 49920 - DNA, 20 bp, synthetic construct
  misc_feature 1..20: note = chemically synthesized
  source 1..20: mol_type = other DNA
aactggaaaaaactacttta

SEQ ID NO: 49921 - DNA, 20 bp, synthetic construct
  misc_feature 1..20: note = chemically synthesized
  source 1..20: mol_type = other DNA
aaactactttaaagttcata

SEQ ID NO: 49922 - DNA, 20 bp, synthetic construct
  misc_feature 1..20: note = chemically synthesized
  source 1..20: mol_type = other DNA
aagttcatatggaaccaaaa

SEQ ID NO: 49923 - DNA, 20 bp, synthetic construct
  misc_feature 1..20: note = chemically synthesized
  source 1..20: mol_type = other DNA
gttcatatggaaccaaaaaa

SEQ ID NO: 49924 - DNA, 20 bp, synthetic construct
  misc_feature 1..20: note = chemically synthesized
  source 1..20: mol_type = other DNA
aaaaaagagcccacatcacc

SEQ ID NO: 49925 - DNA, 20 bp, synthetic construct
  misc_feature 1..20: note = chemically synthesized
  source 1..20: mol_type = other DNA
aaaaagagcccacatcacca

SEQ ID NO: 49926 - DNA, 20 bp, synthetic construct
  misc_feature 1..20: note = chemically synthesized
  source 1..20: mol_type = other DNA
cacatcaccaaggcaatcct

SEQ ID NO: 49927 - DNA, 20 bp, synthetic construct
  misc_feature 1..20: note = chemically synthesized
  source 1..20: mol_type = other DNA
ccaaggcaatcctaagccaa

SEQ ID NO: 49928 - DNA, 20 bp, synthetic construct
  misc_feature 1..20: note = chemically synthesized
  source 1..20: mol_type = other DNA
aatcctaagccaaaagaaca

SEQ ID NO: 49929 - DNA, 20 bp, synthetic construct
  misc_feature 1..20: note = chemically synthesized
  source 1..20: mol_type = other DNA
ctaagccaaaagaacaaagc

SEQ ID NO: 49930 - DNA, 20 bp, synthetic construct
  misc_feature 1..20: note = chemically synthesized
  source 1..20: mol_type = other DNA
aagccaaaagaacaaagctg

SEQ ID NO: 49931 - DNA, 20 bp, synthetic construct
  misc_feature 1..20: note = chemically synthesized
  source 1..20: mol_type = other DNA
agccaaaagaacaaagctgg

SEQ ID NO: 49932 - DNA, 20 bp, synthetic construct
  misc_feature 1..20: note = chemically synthesized
  source 1..20: mol_type = other DNA
caaactatactacaatgcta

SEQ ID NO: 49933 - DNA, 20 bp, synthetic construct
  misc_feature 1..20: note = chemically synthesized
  source 1..20: mol_type = other DNA
caatgctacggtaaccaaaa

SEQ ID NO: 49934 - DNA, 20 bp, synthetic construct
  misc_feature 1..20: note = chemically synthesized
  source 1..20: mol_type = other DNA
ctacggtaaccaaaacagca

SEQ ID NO: 49935 - DNA, 20 bp, synthetic construct
  misc_feature 1..20: note = chemically synthesized
  source 1..20: mol_type = other DNA
taaccaaaacagcatggtac

SEQ ID NO: 49936 - DNA, 20 bp, synthetic construct
  misc_feature 1..20: note = chemically synthesized
  source 1..20: mol_type = other DNA
gcatggtactggtaccaaaa

SEQ ID NO: 49937 - DNA, 20 bp, synthetic construct
  misc_feature 1..20: note = chemically synthesized
  source 1..20: mol_type = other DNA
atggtactggtaccaaaaca

SEQ ID NO: 49938 - DNA, 20 bp, synthetic construct
  misc_feature 1..20: note = chemically synthesized
  source 1..20: mol_type = other DNA
ctggtaccaaaacagagatc

SEQ ID NO: 49939 - DNA, 20 bp, synthetic construct
  misc_feature 1..20: note = chemically synthesized
  source 1..20: mol_type = other DNA
aaaacagagatctagaccaa

SEQ ID NO: 49940 - DNA, 20 bp, synthetic construct
  misc_feature 1..20: note = chemically synthesized
  source 1..20: mol_type = other DNA
agagatctagaccaatggaa

SEQ ID NO: 49941 - DNA, 20 bp, synthetic construct
  misc_feature 1..20: note = chemically synthesized
  source 1..20: mol_type = other DNA
tctagaccaatggaacagaa

SEQ ID NO: 49942 - DNA, 20 bp, synthetic construct
  misc_feature 1..20: note = chemically synthesized
  source 1..20: mol_type = other DNA
tagaccaatggaacagaaca

SEQ ID NO: 49943 - DNA, 20 bp, synthetic construct
  misc_feature 1..20: note = chemically synthesized
  source 1..20: mol_type = other DNA
atggaacagaacagagccct

SEQ ID NO: 49944 - DNA, 20 bp, synthetic construct
  misc_feature 1..20: note = chemically synthesized
  source 1..20: mol_type = other DNA
atctgatctttgacaaacct

SEQ ID NO: 49945 - DNA, 20 bp, synthetic construct
  misc_feature 1..20: note = chemically synthesized
  source 1..20: mol_type = other DNA
ctgatctttgacaaacctga

SEQ ID NO: 49946 - DNA, 20 bp, synthetic construct
  misc_feature 1..20: note = chemically synthesized
  source 1..20: mol_type = other DNA
ttgacaaacctgagagaaac

SEQ ID NO: 49947 - DNA, 20 bp, synthetic construct
  misc_feature 1..20: note = chemically synthesized
  source 1..20: mol_type = other DNA
aacctgagagaaacaagcaa

SEQ ID NO: 49948 - DNA, 20 bp, synthetic construct
  misc_feature 1..20: note = chemically synthesized
  source 1..20: mol_type = other DNA
acctgagagaaacaagcaat

SEQ ID NO: 49949 - DNA, 20 bp, synthetic construct
  misc_feature 1..20: note = chemically synthesized
  source 1..20: mol_type = other DNA
cctgagagaaacaagcaatg

SEQ ID NO: 49950 - DNA, 20 bp, synthetic construct
  misc_feature 1..20: note = chemically synthesized
  source 1..20: mol_type = other DNA
agagaaacaagcaatgggga

SEQ ID NO: 49951 - DNA, 20 bp, synthetic construct
  misc_feature 1..20: note = chemically synthesized
  source 1..20: mol_type = other DNA
gagaaacaagcaatggggaa

SEQ ID NO: 49952 - DNA, 20 bp, synthetic construct
  misc_feature 1..20: note = chemically synthesized
  source 1..20: mol_type = other DNA
aggattccctatttaataaa

SEQ ID NO: 49953 - DNA, 20 bp, synthetic construct
  misc_feature 1..20: note = chemically synthesized
  source 1..20: mol_type = other DNA
ccctatttaataaatggtgc

SEQ ID NO: 49954 - DNA, 20 bp, synthetic construct
  misc_feature 1..20: note = chemically synthesized
  source 1..20: mol_type = other DNA
cctatttaataaatggtgct

SEQ ID NO: 49955 - DNA, 20 bp, synthetic construct
  misc_feature 1..20: note = chemically synthesized
  source 1..20: mol_type = other DNA
ataaatggtgctgggaaaac

SEQ ID NO: 49956 - DNA, 20 bp, synthetic construct
  misc_feature 1..20: note = chemically synthesized
  source 1..20: mol_type = other DNA
atggtgctgggaaaactggc

SEQ ID NO: 49957 - DNA, 20 bp, synthetic construct
  misc_feature 1..20: note = chemically synthesized
  source 1..20: mol_type = other DNA
gaaaactggctagccatatg

SEQ ID NO: 49958 - DNA, 20 bp, synthetic construct
  misc_feature 1..20: note = chemically synthesized
  source 1..20: mol_type = other DNA
actggctagccatatgtaga

SEQ ID NO: 49959 - DNA, 20 bp, synthetic construct
  misc_feature 1..20: note = chemically synthesized
  source 1..20: mol_type = other DNA
catatgtagaaagctgaaac

SEQ ID NO: 49960 - DNA, 20 bp, synthetic construct
  misc_feature 1..20: note = chemically synthesized
  source 1..20: mol_type = other DNA
ccttatacaaaaattaattc

SEQ ID NO: 49961 - DNA, 20 bp, synthetic construct
  misc_feature 1..20: note = chemically synthesized
  source 1..20: mol_type = other DNA
atacaaaaattaattcaaga

SEQ ID NO: 49962 - DNA, 20 bp, synthetic construct
  misc_feature 1..20: note = chemically synthesized
  source 1..20: mol_type = other DNA
aattaattcaagatggatta

SEQ ID NO: 49963 - DNA, 20 bp, synthetic construct
  misc_feature 1..20: note = chemically synthesized
  source 1..20: mol_type = other DNA
tggattaaagacttacatgt

SEQ ID NO: 49964 - DNA, 20 bp, synthetic construct
  misc_feature 1..20: note = chemically synthesized
  source 1..20: mol_type = other DNA
acctaaaaccataaaaaccc

SEQ ID NO: 49965 - DNA, 20 bp, synthetic construct
  misc_feature 1..20: note = chemically synthesized
  source 1..20: mol_type = other DNA
aaaaaccctagaaaaaaacc

SEQ ID NO: 49966 - DNA, 20 bp, synthetic construct
  misc_feature 1..20: note = chemically synthesized
  source 1..20: mol_type = other DNA
aaaaccctagaaaaaaacct

SEQ ID NO: 49967 - DNA, 20 bp, synthetic construct
  misc_feature 1..20: note = chemically synthesized
  source 1..20: mol_type = other DNA
aaaacctaggcaataccatt

SEQ ID NO: 49968 - DNA, 20 bp, synthetic construct
  misc_feature 1..20: note = chemically synthesized
  source 1..20: mol_type = other DNA
aaacctaggcaataccattc

SEQ ID NO: 49969 - DNA, 20 bp, synthetic construct
  misc_feature 1..20: note = chemically synthesized
  source 1..20: mol_type = other DNA
aggcaataccattcaggaca

SEQ ID NO: 49970 - DNA, 20 bp, synthetic construct
  misc_feature 1..20: note = chemically synthesized
  source 1..20: mol_type = other DNA
ggcaataccattcaggacat

SEQ ID NO: 49971 - DNA, 20 bp, synthetic construct
  misc_feature 1..20: note = chemically synthesized
  source 1..20: mol_type = other DNA
taccattcaggacataggca

SEQ ID NO: 49972 - DNA, 20 bp, synthetic construct
  misc_feature 1..20: note = chemically synthesized
  source 1..20: mol_type = other DNA
accattcaggacataggcat

SEQ ID NO: 49973 - DNA, 20 bp, synthetic construct
  misc_feature 1..20: note = chemically synthesized
  source 1..20: mol_type = other DNA
ttcaggacataggcatgggc

SEQ ID NO: 49974 - DNA, 20 bp, synthetic construct
  misc_feature 1..20: note = chemically synthesized
  source 1..20: mol_type = other DNA
tcaggacataggcatgggca

SEQ ID NO: 49975 - DNA, 20 bp, synthetic construct
  misc_feature 1..20: note = chemically synthesized
  source 1..20: mol_type = other DNA
cttcatgtctaaaacaccaa

SEQ ID NO: 49976 - DNA, 20 bp, synthetic construct
  misc_feature 1..20: note = chemically synthesized
  source 1..20: mol_type = other DNA
gtctaaaacaccaaaagcaa

SEQ ID NO: 49977 - DNA, 20 bp, synthetic construct
  misc_feature 1..20: note = chemically synthesized
  source 1..20: mol_type = other DNA
accaaaagcaatggcaacaa

SEQ ID NO: 49978 - DNA, 20 bp, synthetic construct
  misc_feature 1..20: note = chemically synthesized
  source 1..20: mol_type = other DNA
aatggcaacaaaagacaaaa

SEQ ID NO: 49979 - DNA, 20 bp, synthetic construct
  misc_feature 1..20: note = chemically synthesized
  source 1..20: mol_type = other DNA
caaaagacaaaatggacaaa

SEQ ID NO: 49980 - DNA, 20 bp, synthetic construct
  misc_feature 1..20: note = chemically synthesized
  source 1..20: mol_type = other DNA
aaaagacaaaatggacaaac

SEQ ID NO: 49981 - DNA, 20 bp, synthetic construct
  misc_feature 1..20: note = chemically synthesized
  source 1..20: mol_type = other DNA
aacgggatctaattaaacta

SEQ ID NO: 49982 - DNA, 20 bp, synthetic construct
  misc_feature 1..20: note = chemically synthesized
  source 1..20: mol_type = other DNA
cgggatctaattaaactaaa

SEQ ID NO: 49983 - DNA, 20 bp, synthetic construct
  misc_feature 1..20: note = chemically synthesized
  source 1..20: mol_type = other DNA
taaactaaagagcttctgca

SEQ ID NO: 49984 - DNA, 20 bp, synthetic construct
  misc_feature 1..20: note = chemically synthesized
  source 1..20: mol_type = other DNA
aaagagcttctgcacagcta

SEQ ID NO: 49985 - DNA, 20 bp, synthetic construct
  misc_feature 1..20: note = chemically synthesized
  source 1..20: mol_type = other DNA
acagctaaagaaactaccat

SEQ ID NO: 49986 - DNA, 20 bp, synthetic construct
  misc_feature 1..20: note = chemically synthesized
  source 1..20: mol_type = other DNA
agctaaagaaactaccatca

SEQ ID NO: 49987 - DNA, 20 bp, synthetic construct
  misc_feature 1..20: note = chemically synthesized
  source 1..20: mol_type = other DNA
gaaactaccatcagagtgaa

SEQ ID NO: 49988 - DNA, 20 bp, synthetic construct
  misc_feature 1..20: note = chemically synthesized
  source 1..20: mol_type = other DNA
aaactaccatcagagtgaac

SEQ ID NO: 49989 - DNA, 20 bp, synthetic construct
  misc_feature 1..20: note = chemically synthesized
  source 1..20: mol_type = other DNA
tgaacaggcaacctacaaaa

SEQ ID NO: 49990 - DNA, 20 bp, synthetic construct
  misc_feature 1..20: note = chemically synthesized
  source 1..20: mol_type = other DNA
gaacaggcaacctacaaaat

SEQ ID NO: 49991 - DNA, 20 bp, synthetic construct
  misc_feature 1..20: note = chemically synthesized
  source 1..20: mol_type = other DNA
acaggcaacctacaaaatgg

SEQ ID NO: 49992 - DNA, 20 bp, synthetic construct
  misc_feature 1..20: note = chemically synthesized
  source 1..20: mol_type = other DNA
tgcaatctactcatctgaca

SEQ ID NO: 49993 - DNA, 20 bp, synthetic construct
  misc_feature 1..20: note = chemically synthesized
  source 1..20: mol_type = other DNA
gcaatctactcatctgacaa

SEQ ID NO: 49994 - DNA, 20 bp, synthetic construct
  misc_feature 1..20: note = chemically synthesized
  source 1..20: mol_type = other DNA
caatctactcatctgacaaa

SEQ ID NO: 49995 - DNA, 20 bp, synthetic construct
  misc_feature 1..20: note = chemically synthesized
  source 1..20: mol_type = other DNA
tctgacaaagggctaatatc

SEQ ID NO: 49996 - DNA, 20 bp, synthetic construct
  misc_feature 1..20: note = chemically synthesized
  source 1..20: mol_type = other DNA
atgaactcaaacaaatttac

SEQ ID NO: 49997 - DNA, 20 bp, synthetic construct
  misc_feature 1..20: note = chemically synthesized
  source 1..20: mol_type = other DNA
aaacaaacaaccccatcaaa

SEQ ID NO: 49998 - DNA, 20 bp, synthetic construct
  misc_feature 1..20: note = chemically synthesized
  source 1..20: mol_type = other DNA
caaacaaccccatcaaaaag

SEQ ID NO: 49999 - DNA, 20 bp, synthetic construct
  misc_feature 1..20: note = chemically synthesized
  source 1..20: mol_type = other DNA
aaacaaccccatcaaaaagt

SEQ ID NO: 50000 - DNA, 20 bp, synthetic construct
  misc_feature 1..20: note = chemically synthesized
  source 1..20: mol_type = other DNA
accccatcaaaaagtgggca

SEQ ID NO: 50001 - DNA, 20 bp, synthetic construct
  misc_feature 1..20: note = chemically synthesized
  source 1..20: mol_type = other DNA
ccccatcaaaaagtgggcaa

SEQ ID NO: 50002 - DNA, 20 bp, synthetic construct
  misc_feature 1..20: note = chemically synthesized
  source 1..20: mol_type = other DNA
aagtgggcaaaggatatgaa

SEQ ID NO: 50003 - DNA, 20 bp, synthetic construct
  misc_feature 1..20: note = chemically synthesized
  source 1..20: mol_type = other DNA
tatgaacagacacttcgcaa

SEQ ID NO: 50004 - DNA, 20 bp, synthetic construct
  misc_feature 1..20: note = chemically synthesized
  source 1..20: mol_type = other DNA
gaacagacacttcgcaaaag

SEQ ID NO: 50005 - DNA, 20 bp, synthetic construct
  misc_feature 1..20: note = chemically synthesized
  source 1..20: mol_type = other DNA
gaaaaaatgctcatcatcac

SEQ ID NO: 50006 - DNA, 20 bp, synthetic construct
  misc_feature 1..20: note = chemically synthesized
  source 1..20: mol_type = other DNA
tgctcatcatcactagccat

SEQ ID NO: 50007 - DNA, 20 bp, synthetic construct
  misc_feature 1..20: note = chemically synthesized
  source 1..20: mol_type = other DNA
ctcatcatcactagccatca

SEQ ID NO: 50008 - DNA, 20 bp, synthetic construct
  misc_feature 1..20: note = chemically synthesized
  source 1..20: mol_type = other DNA
atgcaaatcaaaaccacaat

SEQ ID NO: 50009 - DNA, 20 bp, synthetic construct
  misc_feature 1..20: note = chemically synthesized
  source 1..20: mol_type = other DNA
aatgagataccatctcacac

SEQ ID NO: 50010 - DNA, 20 bp, synthetic construct
  misc_feature 1..20: note = chemically synthesized
  source 1..20: mol_type = other DNA
agataccatctcacaccagt

SEQ ID NO: 50011 - DNA, 20 bp, synthetic construct
  misc_feature 1..20: note = chemically synthesized
  source 1..20: mol_type = other DNA
ccatctcacaccagttagaa

SEQ ID NO: 50012 - DNA, 20 bp, synthetic construct
  misc_feature 1..20: note = chemically synthesized
  source 1..20: mol_type = other DNA
ttagaatggcgatcattaaa

SEQ ID NO: 50013 - DNA, 20 bp, synthetic construct
  misc_feature 1..20: note = chemically synthesized
  source 1..20: mol_type = other DNA
aatggcgatcattaaaaagt

SEQ ID NO: 50014 - DNA, 20 bp, synthetic construct
  misc_feature 1..20: note = chemically synthesized
  source 1..20: mol_type = other DNA
atggcgatcattaaaaagtc

SEQ ID NO: 50015 - DNA, 20 bp, synthetic construct
  misc_feature 1..20: note = chemically synthesized
  source 1..20: mol_type = other DNA
attaaaaagtcaggaaacaa

SEQ ID NO: 50016 - DNA, 20 bp, synthetic construct
  misc_feature 1..20: note = chemically synthesized
  source 1..20: mol_type = other DNA
ttaaaaagtcaggaaacaac

SEQ ID NO: 50017 - DNA, 20 bp, synthetic construct
  misc_feature 1..20: note = chemically synthesized
  source 1..20: mol_type = other DNA
agtcaggaaacaacaggtgc

SEQ ID NO: 50018 - DNA, 20 bp, synthetic construct
  misc_feature 1..20: note = chemically synthesized
  source 1..20: mol_type = other DNA
tcaggaaacaacaggtgctg

SEQ ID NO: 50019 - DNA, 20 bp, synthetic construct
  misc_feature 1..20: note = chemically synthesized
  source 1..20: mol_type = other DNA
aggaaacaacaggtgctgga

SEQ ID NO: 50020 - DNA, 20 bp, synthetic construct
  misc_feature 1..20: note = chemically synthesized
  source 1..20: mol_type = other DNA
ggaaacaacaggtgctggag

SEQ ID NO: 50021 - DNA, 20 bp, synthetic construct
  misc_feature 1..20: note = chemically synthesized
  source 1..20: mol_type = other DNA
aacaggtgctggagaggatg

SEQ ID NO: 50022 - DNA, 20 bp, synthetic construct
  misc_feature 1..20: note = chemically synthesized
  source 1..20: mol_type = other DNA
caggtgctggagaggatgtg

SEQ ID NO: 50023 - DNA, 20 bp, synthetic construct
  misc_feature 1..20: note = chemically synthesized
  source 1..20: mol_type = other DNA
ctggagaggatgtggagaaa

SEQ ID NO: 50024 - DNA, 20 bp, synthetic construct
  misc_feature 1..20: note = chemically synthesized
  source 1..20: mol_type = other DNA
tggagaggatgtggagaaac

SEQ ID NO: 50025 - DNA, 20 bp, synthetic construct
  misc_feature 1..20: note = chemically synthesized
  source 1..20: mol_type = other DNA
aggaacaacttttacactgt

SEQ ID NO: 50026 - DNA, 20 bp, synthetic construct
  misc_feature 1..20: note = chemically synthesized
  source 1..20: mol_type = other DNA
aacaacttttacactgttgg

SEQ ID NO: 50027 - DNA, 20 bp, synthetic construct
  misc_feature 1..20: note = chemically synthesized
  source 1..20: mol_type = other DNA
acaacttttacactgttggt

SEQ ID NO: 50028 - DNA, 20 bp, synthetic construct
  misc_feature 1..20: note = chemically synthesized
  source 1..20: mol_type = other DNA
ctgttggtgggactgtaaac

SEQ ID NO: 50029 - DNA, 20 bp, synthetic construct
  misc_feature 1..20: note = chemically synthesized
  source 1..20: mol_type = other DNA
gtaaactagttcaaccattg

SEQ ID NO: 50030 - DNA, 20 bp, synthetic construct
  misc_feature 1..20: note = chemically synthesized
  source 1..20: mol_type = other DNA
aactagttcaaccattgcgg

SEQ ID NO: 50031 - DNA, 20 bp, synthetic construct
  misc_feature 1..20: note = chemically synthesized
  source 1..20: mol_type = other DNA
agttcaaccattgcggaagt

SEQ ID NO: 50032 - DNA, 20 bp, synthetic construct
  misc_feature 1..20: note = chemically synthesized
  source 1..20: mol_type = other DNA
aaccattgcggaagtcagtg

SEQ ID NO: 50033 - DNA, 20 bp, synthetic construct
  misc_feature 1..20: note = chemically synthesized
  source 1..20: mol_type = other DNA
aagtcagtgtggcaattcct

SEQ ID NO: 50034 - DNA, 20 bp, synthetic construct
  misc_feature 1..20: note = chemically synthesized
  source 1..20: mol_type = other DNA
agtcagtgtggcaattcctc

SEQ ID NO: 50035 - DNA, 20 bp, synthetic construct
  misc_feature 1..20: note = chemically synthesized
  source 1..20: mol_type = other DNA
gtggcaattcctcaggaatc

SEQ ID NO: 50036 - DNA, 20 bp, synthetic construct
  misc_feature 1..20: note = chemically synthesized
  source 1..20: mol_type = other DNA
attcctcaggaatctagaac

SEQ ID NO: 50037 - DNA, 20 bp, synthetic construct
  misc_feature 1..20: note = chemically synthesized
  source 1..20: mol_type = other DNA
actagaaataccatttgacc

SEQ ID NO: 50038 - DNA, 20 bp, synthetic construct
  misc_feature 1..20: note = chemically synthesized
  source 1..20: mol_type = other DNA
tgacccagccatcccattac

SEQ ID NO: 50039 - DNA, 20 bp, synthetic construct
  misc_feature 1..20: note = chemically synthesized
  source 1..20: mol_type = other DNA
gacccagccatcccattact

SEQ ID NO: 50040 - DNA, 20 bp, synthetic construct
  misc_feature 1..20: note = chemically synthesized
  source 1..20: mol_type = other DNA
cattactgggtacataccca

SEQ ID NO: 50041 - DNA, 20 bp, synthetic construct
  misc_feature 1..20: note = chemically synthesized
  source 1..20: mol_type = other DNA
attactgggtacatacccaa

SEQ ID NO: 50042 - DNA, 20 bp, synthetic construct
  misc_feature 1..20: note = chemically synthesized
  source 1..20: mol_type = other DNA
ttataaatcatgctgctata

SEQ ID NO: 50043 - DNA, 20 bp, synthetic construct
  misc_feature 1..20: note = chemically synthesized
  source 1..20: mol_type = other DNA
atgcacacgtatgtttattg

SEQ ID NO: 50044 - DNA, 20 bp, synthetic construct
  misc_feature 1..20: note = chemically synthesized
  source 1..20: mol_type = other DNA
tattgcagcactattcacaa

SEQ ID NO: 50045 - DNA, 20 bp, synthetic construct
  misc_feature 1..20: note = chemically synthesized
  source 1..20: mol_type = other DNA
cagcactattcacaatagca

SEQ ID NO: 50046 - DNA, 20 bp, synthetic construct
  misc_feature 1..20: note = chemically synthesized
  source 1..20: mol_type = other DNA
tattcacaatagcaaagact

SEQ ID NO: 50047 - DNA, 20 bp, synthetic construct
  misc_feature 1..20: note = chemically synthesized
  source 1..20: mol_type = other DNA
acccaaatgtccaacaacga

SEQ ID NO: 50048 - DNA, 20 bp, synthetic construct
  misc_feature 1..20: note = chemically synthesized
  source 1..20: mol_type = other DNA
aatgtccaacaacgatagac

SEQ ID NO: 50049 - DNA, 20 bp, synthetic construct
  misc_feature 1..20: note = chemically synthesized
  source 1..20: mol_type = other DNA
caacaacgatagactggatt

SEQ ID NO: 50050 - DNA, 20 bp, synthetic construct
  misc_feature 1..20: note = chemically synthesized
  source 1..20: mol_type = other DNA
tagactggattaagaaaatg

SEQ ID NO: 50051 - DNA, 20 bp, synthetic construct
  misc_feature 1..20: note = chemically synthesized
  source 1..20: mol_type = other DNA
aatgtggcacatatacacca

SEQ ID NO: 50052 - DNA, 20 bp, synthetic construct
  misc_feature 1..20: note = chemically synthesized
  source 1..20: mol_type = other DNA
atacaccatggaatactatg

SEQ ID NO: 50053 - DNA, 20 bp, synthetic construct
  misc_feature 1..20: note = chemically synthesized
  source 1..20: mol_type = other DNA
atgcagccataaaaaatgat

SEQ ID NO: 50054 - DNA, 20 bp, synthetic construct
  misc_feature 1..20: note = chemically synthesized
  source 1..20: mol_type = other DNA
tgatgagttcatgtcctttg

SEQ ID NO: 50055 - DNA, 20 bp, synthetic construct
  misc_feature 1..20: note = chemically synthesized
  source 1..20: mol_type = other DNA
gatgagttcatgtcctttgt

SEQ ID NO: 50056 - DNA, 20 bp, synthetic construct
  misc_feature 1..20: note = chemically synthesized
  source 1..20: mol_type = other DNA
atgagttcatgtcctttgta

SEQ ID NO: 50057 - DNA, 20 bp, synthetic construct
  misc_feature 1..20: note = chemically synthesized
  source 1..20: mol_type = other DNA
tcatgtcctttgtagggaca

SEQ ID NO: 50058 - DNA, 20 bp, synthetic construct
  misc_feature 1..20: note = chemically synthesized
  source 1..20: mol_type = other DNA
cctttgtagggacatggatg

SEQ ID NO: 50059 - DNA, 20 bp, synthetic construct
  misc_feature 1..20: note = chemically synthesized
  source 1..20: mol_type = other DNA
tgtagggacatggatgaagc

SEQ ID NO: 50060 - DNA, 20 bp, synthetic construct
  misc_feature 1..20: note = chemically synthesized
  source 1..20: mol_type = other DNA
aagctggaaactatcattct

SEQ ID NO: 50061 - DNA, 20 bp, synthetic construct
  misc_feature 1..20: note = chemically synthesized
  source 1..20: mol_type = other DNA
cattctcagcaaactatcac

SEQ ID NO: 50062 - DNA, 20 bp, synthetic construct
  misc_feature 1..20: note = chemically synthesized
  source 1..20: mol_type = other DNA
attctcagcaaactatcaca

SEQ ID NO: 50063 - DNA, 20 bp, synthetic construct
  misc_feature 1..20: note = chemically synthesized
  source 1..20: mol_type = other DNA
tctcagcaaactatcacaag

SEQ ID NO: 50064 - DNA, 20 bp, synthetic construct
  misc_feature 1..20: note = chemically synthesized
  source 1..20: mol_type = other DNA
acaccgcatgttctcactca

SEQ ID NO: 50065 - DNA, 20 bp, synthetic construct
  misc_feature 1..20: note = chemically synthesized
  source 1..20: mol_type = other DNA
caccgcatgttctcactcat

SEQ ID NO: 50066 - DNA, 20 bp, synthetic construct
  misc_feature 1..20: note = chemically synthesized
  source 1..20: mol_type = other DNA
cgcatgttctcactcatagg

SEQ ID NO: 50067 - DNA, 20 bp, synthetic construct
  misc_feature 1..20: note = chemically synthesized
  source 1..20: mol_type = other DNA
gcatgttctcactcataggt

SEQ ID NO: 50068 - DNA, 20 bp, synthetic construct
  misc_feature 1..20: note = chemically synthesized
  source 1..20: mol_type = other DNA
ataggtgggaattgaacaat

SEQ ID NO: 50069 - DNA, 20 bp, synthetic construct
  misc_feature 1..20: note = chemically synthesized
  source 1..20: mol_type = other DNA
aattgaacaatgagaacaca

SEQ ID NO: 50070 - DNA, 20 bp, synthetic construct
  misc_feature 1..20: note = chemically synthesized
  source 1..20: mol_type = other DNA
tgagaacacatggacacatg

SEQ ID NO: 50071 - DNA, 20 bp, synthetic construct
  misc_feature 1..20: note = chemically synthesized
  source 1..20: mol_type = other DNA
agaacacatggacacatgaa

SEQ ID NO: 50072 - DNA, 20 bp, synthetic construct
  misc_feature 1..20: note = chemically synthesized
  source 1..20: mol_type = other DNA
gaacacatggacacatgaag

SEQ ID NO: 50073 - DNA, 20 bp, synthetic construct
  misc_feature 1..20: note = chemically synthesized
  source 1..20: mol_type = other DNA
tgaagaggaacatcacactc

SEQ ID NO: 50074 - DNA, 20 bp, synthetic construct
  misc_feature 1..20: note = chemically synthesized
  source 1..20: mol_type = other DNA
gaagaggaacatcacactct

SEQ ID NO: 50075 - DNA, 20 bp, synthetic construct
  misc_feature 1..20: note = chemically synthesized
  source 1..20: mol_type = other DNA
aagaggaacatcacactctg

SEQ ID NO: 50076 - DNA, 20 bp, synthetic construct
  misc_feature 1..20: note = chemically synthesized
  source 1..20: mol_type = other DNA
tcacactctggggactgtta

SEQ ID NO: 50077 - DNA, 20 bp, synthetic construct
  misc_feature 1..20: note = chemically synthesized
  source 1..20: mol_type = other DNA
cacactctggggactgttat

SEQ ID NO: 50078 - DNA, 20 bp, synthetic construct
  misc_feature 1..20: note = chemically synthesized
  source 1..20: mol_type = other DNA
acactctggggactgttatg

SEQ ID NO: 50079 - DNA, 20 bp, synthetic construct
  misc_feature 1..20: note = chemically synthesized
  source 1..20: mol_type = other DNA
ctctggggactgttatgggg

SEQ ID NO: 50080 - DNA, 20 bp, synthetic construct
  misc_feature 1..20: note = chemically synthesized
  source 1..20: mol_type = other DNA
tctggggactgttatggggt

SEQ ID NO: 50081 - DNA, 20 bp, synthetic construct
  misc_feature 1..20: note = chemically synthesized
  source 1..20: mol_type = other DNA
ctggggactgttatggggtg

SEQ ID NO: 50082 - DNA, 20 bp, synthetic construct
  misc_feature 1..20: note = chemically synthesized
  source 1..20: mol_type = other DNA
tggggactgttatggggtgg

SEQ ID NO: 50083 - DNA, 20 bp, synthetic construct
  misc_feature 1..20: note = chemically synthesized
  source 1..20: mol_type = other DNA
ggggactgttatggggtggg

SEQ ID NO: 50084 - DNA, 20 bp, synthetic construct
  misc_feature 1..20: note = chemically synthesized
  source 1..20: mol_type = other DNA
gactgttatggggtgggggg

SEQ ID NO: 50085 - DNA, 20 bp, synthetic construct
  misc_feature 1..20: note = chemically synthesized
  source 1..20: mol_type = other DNA
actgttatggggtggggggc

SEQ ID NO: 50086 - DNA, 20 bp, synthetic construct
  misc_feature 1..20: note = chemically synthesized
  source 1..20: mol_type = other DNA
ctgttatggggtggggggca

SEQ ID NO: 50087 - DNA, 20 bp, synthetic construct
  misc_feature 1..20: note = chemically synthesized
  source 1..20: mol_type = other DNA
tgttatggggtggggggcag

SEQ ID NO: 50088 - DNA, 20 bp, synthetic construct
  misc_feature 1..20: note = chemically synthesized
  source 1..20: mol_type = other DNA
tatggggtggggggcagggg

SEQ ID NO: 50089 - DNA, 20 bp, synthetic construct
  misc_feature 1..20: note = chemically synthesized
  source 1..20: mol_type = other DNA
atggggtggggggcaggggc

SEQ ID NO: 50090 - DNA, 20 bp, synthetic construct
  misc_feature 1..20: note = chemically synthesized
  source 1..20: mol_type = other DNA
tggggtggggggcaggggca

SEQ ID NO: 50091 - DNA, 20 bp, synthetic construct
  misc_feature 1..20: note = chemically synthesized
  source 1..20: mol_type = other DNA
gtggggggcaggggcaggga

SEQ ID NO: 50092 - DNA, 20 bp, synthetic construct
  misc_feature 1..20: note = chemically synthesized
  source 1..20: mol_type = other DNA
ggcaggggcagggatagcac

SEQ ID NO: 50093 - DNA, 20 bp, synthetic construct
  misc_feature 1..20: note = chemically synthesized
  source 1..20: mol_type = other DNA
gcaggggcagggatagcact

SEQ ID NO: 50094 - DNA, 20 bp, synthetic construct
  misc_feature 1..20: note = chemically synthesized
  source 1..20: mol_type = other DNA
aggggcagggatagcactag

SEQ ID NO: 50095 - DNA, 20 bp, synthetic construct
  misc_feature 1..20: note = chemically synthesized
  source 1..20: mol_type = other DNA
tatacctaatgctaaatgac

SEQ ID NO: 50096 - DNA, 20 bp, synthetic construct
  misc_feature 1..20: note = chemically synthesized
  source 1..20: mol_type = other DNA
aatgctaaatgacgagttaa

SEQ ID NO: 50097 - DNA, 20 bp, synthetic construct
  misc_feature 1..20: note = chemically synthesized
  source 1..20: mol_type = other DNA
atgctaaatgacgagttaat

SEQ ID NO: 50098 - DNA, 20 bp, synthetic construct
  misc_feature 1..20: note = chemically synthesized
  source 1..20: mol_type = other DNA
aaatgacgagttaatgggtg

SEQ ID NO: 50099 - DNA, 20 bp, synthetic construct
  misc_feature 1..20: note = chemically synthesized
  source 1..20: mol_type = other DNA
atgggtgcagcacaccaaca

SEQ ID NO: 50100 - DNA, 20 bp, synthetic construct
  misc_feature 1..20: note = chemically synthesized
  source 1..20: mol_type = other DNA
cacatgtaccctaaaacttg

SEQ ID NO: 50101 - DNA, 20 bp, synthetic construct
  misc_feature 1..20: note = chemically synthesized
  source 1..20: mol_type = other DNA
tgaagtataataataaaaaa

SEQ ID NO: 50102 - DNA, 20 bp, synthetic construct
  misc_feature 1..20: note = chemically synthesized
  source 1..20: mol_type = other DNA
aaactgatctcacacatccg

SEQ ID NO: 50103 - DNA, 20 bp, synthetic construct
  misc_feature 1..20: note = chemically synthesized
  source 1..20: mol_type = other DNA
actgatctcacacatccgta

SEQ ID NO: 50104 - DNA, 20 bp, synthetic construct
  misc_feature 1..20: note = chemically synthesized
  source 1..20: mol_type = other DNA
acatccgtagagccattatc

SEQ ID NO: 50105 - DNA, 20 bp, synthetic construct
  misc_feature 1..20: note = chemically synthesized
  source 1..20: mol_type = other DNA
tcaagtctttctctttgaaa

SEQ ID NO: 50106 - DNA, 20 bp, synthetic construct
  misc_feature 1..20: note = chemically synthesized
  source 1..20: mol_type = other DNA
gtctttctctttgaaataga

SEQ ID NO: 50107 - DNA, 20 bp, synthetic construct
  misc_feature 1..20: note = chemically synthesized
  source 1..20: mol_type = other DNA
ctttgaaatagacagaaatt

SEQ ID NO: 50108 - DNA, 20 bp, synthetic construct
  misc_feature 1..20: note = chemically synthesized
  source 1..20: mol_type = other DNA
acagaaatttagtgttttct

SEQ ID NO: 50109 - DNA, 20 bp, synthetic construct
  misc_feature 1..20: note = chemically synthesized
  source 1..20: mol_type = other DNA
aaatttagtgttttctcagt

SEQ ID NO: 50110 - DNA, 20 bp, synthetic construct
  misc_feature 1..20: note = chemically synthesized
  source 1..20: mol_type = other DNA
tcagttaacattccttcaac

SEQ ID NO: 50111 - DNA, 20 bp, synthetic construct
  misc_feature 1..20: note = chemically synthesized
  source 1..20: mol_type = other DNA
taacattccttcaactagat

SEQ ID NO: 50112 - DNA, 20 bp, synthetic construct
  misc_feature 1..20: note = chemically synthesized
  source 1..20: mol_type = other DNA
gattagttgtgacaaaattt

SEQ ID NO: 50113 - DNA, 20 bp, synthetic construct
  misc_feature 1..20: note = chemically synthesized
  source 1..20: mol_type = other DNA
attagttgtgacaaaatttc

SEQ ID NO: 50114 - DNA, 20 bp, synthetic construct
  misc_feature 1..20: note = chemically synthesized
  source 1..20: mol_type = other DNA
gccttgctcaactctaacct

SEQ ID NO: 50115 - DNA, 20 bp, synthetic construct
  misc_feature 1..20: note = chemically synthesized
  source 1..20: mol_type = other DNA
cagtctctccatatatttct

SEQ ID NO: 50116 - DNA, 20 bp, synthetic construct
  misc_feature 1..20: note = chemically synthesized
  source 1..20: mol_type = other DNA
gtctctccatatatttctga

SEQ ID NO: 50117 - DNA, 20 bp, synthetic construct
  misc_feature 1..20: note = chemically synthesized
  source 1..20: mol_type = other DNA
cttccttcttatttgtttat

SEQ ID NO: 50118 - DNA, 20 bp, synthetic construct
  misc_feature 1..20: note = chemically synthesized
  source 1..20: mol_type = other DNA
cttatttgtttataagaatt

SEQ ID NO: 50119 - DNA, 20 bp, synthetic construct
  misc_feature 1..20: note = chemically synthesized
  source 1..20: mol_type = other DNA
gtttataagaatttagtaaa

SEQ ID NO: 50120 - DNA, 20 bp, synthetic construct
  misc_feature 1..20: note = chemically synthesized
  source 1..20: mol_type = other DNA
atttagtaaatggcaatatt

SEQ ID NO: 50121 - DNA, 20 bp, synthetic construct
  misc_feature 1..20: note = chemically synthesized
  source 1..20: mol_type = other DNA
tagtaaatggcaatattgag

SEQ ID NO: 50122 - DNA, 20 bp, synthetic construct
  misc_feature 1..20: note = chemically synthesized
  source 1..20: mol_type = other DNA
taaatggcaatattgagaag

SEQ ID NO: 50123 - DNA, 20 bp, synthetic construct
  misc_feature 1..20: note = chemically synthesized
  source 1..20: mol_type = other DNA
tattgagaagtagaaaattt

SEQ ID NO: 50124 - DNA, 20 bp, synthetic construct
  misc_feature 1..20: note = chemically synthesized
  source 1..20: mol_type = other DNA
ttgagaagtagaaaattttg

SEQ ID NO: 50125 - DNA, 20 bp, synthetic construct
  misc_feature 1..20: note = chemically synthesized
  source 1..20: mol_type = other DNA
gagacttgtttttcatgaac

SEQ ID NO: 50126 - DNA, 20 bp, synthetic construct
  misc_feature 1..20: note = chemically synthesized
  source 1..20: mol_type = other DNA
catgaaccagaacaatctca

SEQ ID NO: 50127 - DNA, 20 bp, synthetic construct
  misc_feature 1..20: note = chemically synthesized
  source 1..20: mol_type = other DNA
gaaccagaacaatctcaaag

SEQ ID NO: 50128 - DNA, 20 bp, synthetic construct
  misc_feature 1..20: note = chemically synthesized
  source 1..20: mol_type = other DNA
ctcaaagcagcaatactaaa

SEQ ID NO: 50129 - DNA, 20 bp, synthetic construct
  misc_feature 1..20: note = chemically synthesized
  source 1..20: mol_type = other DNA
tcaaagcagcaatactaaac

SEQ ID NO: 50130 - DNA, 20 bp, synthetic construct
  misc_feature 1..20: note = chemically synthesized
  source 1..20: mol_type = other DNA
aaagcagcaatactaaacag

SEQ ID NO: 50131 - DNA, 20 bp, synthetic construct
  misc_feature 1..20: note = chemically synthesized
  source 1..20: mol_type = other DNA
agcaatactaaacaggagcc

SEQ ID NO: 50132 - DNA, 20 bp, synthetic construct
  misc_feature 1..20: note = chemically synthesized
  source 1..20: mol_type = other DNA
tactaaacaggagccaagcc

SEQ ID NO: 50133 - DNA, 20 bp, synthetic construct
  misc_feature 1..20: note = chemically synthesized
  source 1..20: mol_type = other DNA
caggagccaagcctagaata

SEQ ID NO: 50134 - DNA, 20 bp, synthetic construct
  misc_feature 1..20: note = chemically synthesized
  source 1..20: mol_type = other DNA
ctagaataaagttgaatttc

SEQ ID NO: 50135 - DNA, 20 bp, synthetic construct
  misc_feature 1..20: note = chemically synthesized
  source 1..20: mol_type = other DNA
gttgaatttctggaatcaac

SEQ ID NO: 50136 - DNA, 20 bp, synthetic construct
  misc_feature 1..20: note = chemically synthesized
  source 1..20: mol_type = other DNA
aatttctggaatcaacaagc

SEQ ID NO: 50137 - DNA, 20 bp, synthetic construct
  misc_feature 1..20: note = chemically synthesized
  source 1..20: mol_type = other DNA
atttctggaatcaacaagct

SEQ ID NO: 50138 - DNA, 20 bp, synthetic construct
  misc_feature 1..20: note = chemically synthesized
  source 1..20: mol_type = other DNA
tttctggaatcaacaagcta

SEQ ID NO: 50139 - DNA, 20 bp, synthetic construct
  misc_feature 1..20: note = chemically synthesized
  source 1..20: mol_type = other DNA
ttctggaatcaacaagctag

SEQ ID NO: 50140 - DNA, 20 bp, synthetic construct
  misc_feature 1..20: note = chemically synthesized
  source 1..20: mol_type = other DNA
ggaatcaacaagctagggga

SEQ ID NO: 50141 - DNA, 20 bp, synthetic construct
  misc_feature 1..20: note = chemically synthesized
  source 1..20: mol_type = other DNA
ctaggggaaagtctcccatt

SEQ ID NO: 50142 - DNA, 20 bp, synthetic construct
  misc_feature 1..20: note = chemically synthesized
  source 1..20: mol_type = other DNA
taagtcaaatatttgacaac

SEQ ID NO: 50143 - DNA, 20 bp, synthetic construct
  misc_feature 1..20: note = chemically synthesized
  source 1..20: mol_type = other DNA
aagtcaaatatttgacaact

SEQ ID NO: 50144 - DNA, 20 bp, synthetic construct
  misc_feature 1..20: note = chemically synthesized
  source 1..20: mol_type = other DNA
gtcaaatatttgacaactgg

SEQ ID NO: 50145 - DNA, 20 bp, synthetic construct
  misc_feature 1..20: note = chemically synthesized
  source 1..20: mol_type = other DNA
tcaaatatttgacaactggg

SEQ ID NO: 50146 - DNA, 20 bp, synthetic construct
  misc_feature 1..20: note = chemically synthesized
  source 1..20: mol_type = other DNA
tatttgacaactgggaggtc

SEQ ID NO: 50147 - DNA, 20 bp, synthetic construct
  misc_feature 1..20: note = chemically synthesized
  source 1..20: mol_type = other DNA
tgacaactgggaggtcaagt

SEQ ID NO: 50148 - DNA, 20 bp, synthetic construct
  misc_feature 1..20: note = chemically synthesized
  source 1..20: mol_type = other DNA
acaactgggaggtcaagtca

SEQ ID NO: 50149 - DNA, 20 bp, synthetic construct
  misc_feature 1..20: note = chemically synthesized
  source 1..20: mol_type = other DNA
caactgggaggtcaagtcag

SEQ ID NO: 50150 - DNA, 20 bp, synthetic construct
  misc_feature 1..20: note = chemically synthesized
  source 1..20: mol_type = other DNA
tcagaggtgaaaaatgatta

SEQ ID NO: 50151 - DNA, 20 bp, synthetic construct
  misc_feature 1..20: note = chemically synthesized
  source 1..20: mol_type = other DNA
gaaaaatgattaaagataac

SEQ ID NO: 50152 - DNA, 20 bp, synthetic construct
  misc_feature 1..20: note = chemically synthesized
  source 1..20: mol_type = other DNA
aaaatgattaaagataacaa

SEQ ID NO: 50153 - DNA, 20 bp, synthetic construct
  misc_feature 1..20: note = chemically synthesized
  source 1..20: mol_type = other DNA
aaatgattaaagataacaag

SEQ ID NO: 50154 - DNA, 20 bp, synthetic construct
  misc_feature 1..20: note = chemically synthesized
  source 1..20: mol_type = other DNA
taacaagaggtctgaaaaca

SEQ ID NO: 50155 - DNA, 20 bp, synthetic construct
  misc_feature 1..20: note = chemically synthesized
  source 1..20: mol_type = other DNA
aagtgaccaattaaaataaa

SEQ ID NO: 50156 - DNA, 20 bp, synthetic construct
  misc_feature 1..20: note = chemically synthesized
  source 1..20: mol_type = other DNA
gaccaattaaaataaaaaga

SEQ ID NO: 50157 - DNA, 20 bp, synthetic construct
  misc_feature 1..20: note = chemically synthesized
  source 1..20: mol_type = other DNA
ccaattaaaataaaaagaaa

SEQ ID NO: 50158 - DNA, 20 bp, synthetic construct
  misc_feature 1..20: note = chemically synthesized
  source 1..20: mol_type = other DNA
taaaataaaaagaaagagcc

SEQ ID NO: 50159 - DNA, 20 bp, synthetic construct
  misc_feature 1..20: note = chemically synthesized
  source 1..20: mol_type = other DNA
ataaaaagaaagagccaagc

SEQ ID NO: 50160 - DNA, 20 bp, synthetic construct
  misc_feature 1..20: note = chemically synthesized
  source 1..20: mol_type = other DNA
taaaaagaaagagccaagct

SEQ ID NO: 50161 - DNA, 20 bp, synthetic construct
  misc_feature 1..20: note = chemically synthesized
  source 1..20: mol_type = other DNA
agaaagagccaagctgggca

SEQ ID NO: 50162 - DNA, 20 bp, synthetic construct
  misc_feature 1..20: note = chemically synthesized
  source 1..20: mol_type = other DNA
aagagccaagctgggcacag

SEQ ID NO: 50163 - DNA, 20 bp, synthetic construct
  misc_feature 1..20: note = chemically synthesized
  source 1..20: mol_type = other DNA
ggcacagtggcttgcatctg

SEQ ID NO: 50164 - DNA, 20 bp, synthetic construct
  misc_feature 1..20: note = chemically synthesized
  source 1..20: mol_type = other DNA
gtggcttgcatctgtagtcc

SEQ ID NO: 50165 - DNA, 20 bp, synthetic construct
  misc_feature 1..20: note = chemically synthesized
  source 1..20: mol_type = other DNA
catctgtagtcccagtaacc

SEQ ID NO: 50166 - DNA, 20 bp, synthetic construct
  misc_feature 1..20: note = chemically synthesized
  source 1..20: mol_type = other DNA
atctgtagtcccagtaaccc

SEQ ID NO: 50167 - DNA, 20 bp, synthetic construct
  misc_feature 1..20: note = chemically synthesized
  source 1..20: mol_type = other DNA
ctgtagtcccagtaacccag

SEQ ID NO: 50168 - DNA, 20 bp, synthetic construct
  misc_feature 1..20: note = chemically synthesized
  source 1..20: mol_type = other DNA
tgtagtcccagtaacccagg

SEQ ID NO: 50169 - DNA, 20 bp, synthetic construct
  misc_feature 1..20: note = chemically synthesized
  source 1..20: mol_type = other DNA
cccagtaacccaggaggctg

SEQ ID NO: 50170 - DNA, 20 bp, synthetic construct
  misc_feature 1..20: note = chemically synthesized
  source 1..20: mol_type = other DNA
aacccaggaggctgaagtga

SEQ ID NO: 50171 - DNA, 20 bp, synthetic construct
  misc_feature 1..20: note = chemically synthesized
  source 1..20: mol_type = other DNA
acccaggaggctgaagtgat

SEQ ID NO: 50172 - DNA, 20 bp, synthetic construct
  misc_feature 1..20: note = chemically synthesized
  source 1..20: mol_type = other DNA
ctgaagtgataggatcactt

SEQ ID NO: 50173 - DNA, 20 bp, synthetic construct
  misc_feature 1..20: note = chemically synthesized
  source 1..20: mol_type = other DNA
gtgataggatcacttgagcc

SEQ ID NO: 50174 - DNA, 20 bp, synthetic construct
  misc_feature 1..20: note = chemically synthesized
  source 1..20: mol_type = other DNA
tgataggatcacttgagccc

SEQ ID NO: 50175 - DNA, 20 bp, synthetic construct
  misc_feature 1..20: note = chemically synthesized
  source 1..20: mol_type = other DNA
atcacttgagcccaggattt

SEQ ID NO: 50176 - DNA, 20 bp, synthetic construct
  misc_feature 1..20: note = chemically synthesized
  source 1..20: mol_type = other DNA
tcacttgagcccaggatttc

SEQ ID NO: 50177 - DNA, 20 bp, synthetic construct
  misc_feature 1..20: note = chemically synthesized
  source 1..20: mol_type = other DNA
cacttgagcccaggatttca

SEQ ID NO: 50178 - DNA, 20 bp, synthetic construct
  misc_feature 1..20: note = chemically synthesized
  source 1..20: mol_type = other DNA
agcccaggatttcagggttg

SEQ ID NO: 50179 - DNA, 20 bp, synthetic construct
  misc_feature 1..20: note = chemically synthesized
  source 1..20: mol_type = other DNA
caggatttcagggttgcagt

SEQ ID NO: 50180 - DNA, 20 bp, synthetic construct
  misc_feature 1..20: note = chemically synthesized
  source 1..20: mol_type = other DNA
ataatgacaccactgctctc

SEQ ID NO: 50181 - DNA, 20 bp, synthetic construct
  misc_feature 1..20: note = chemically synthesized
  source 1..20: mol_type = other DNA
acaccactgctctctagcct

SEQ ID NO: 50182 - DNA, 20 bp, synthetic construct
  misc_feature 1..20: note = chemically synthesized
  source 1..20: mol_type = other DNA
gctctctagccttggtgact

SEQ ID NO: 50183 - DNA, 20 bp, synthetic construct
  misc_feature 1..20: note = chemically synthesized
  source 1..20: mol_type = other DNA
gtgactgagatcctgtctct

SEQ ID NO: 50184 - DNA, 20 bp, synthetic construct
  misc_feature 1..20: note = chemically synthesized
  source 1..20: mol_type = other DNA
tgactgagatcctgtctctg

SEQ ID NO: 50185 - DNA, 20 bp, synthetic construct
  misc_feature 1..20: note = chemically synthesized
  source 1..20: mol_type = other DNA
ctgaggaaaaacaaacaaac

SEQ ID NO: 50186 - DNA, 20 bp, synthetic construct
  misc_feature 1..20: note = chemically synthesized
  source 1..20: mol_type = other DNA
aaaacaaacaaacaaacaca

SEQ ID NO: 50187 - DNA, 20 bp, synthetic construct
  misc_feature 1..20: note = chemically synthesized
  source 1..20: mol_type = other DNA
caaacaaacacacagatatt

SEQ ID NO: 50188 - DNA, 20 bp, synthetic construct
  misc_feature 1..20: note = chemically synthesized
  source 1..20: mol_type = other DNA
acacacagatattaagaaca

SEQ ID NO: 50189 - DNA, 20 bp, synthetic construct
  misc_feature 1..20: note = chemically synthesized
  source 1..20: mol_type = other DNA
cacagatattaagaacatag

SEQ ID NO: 50190 - DNA, 20 bp, synthetic construct
  misc_feature 1..20: note = chemically synthesized
  source 1..20: mol_type = other DNA
agaacatagaagttttgtta

SEQ ID NO: 50191 - DNA, 20 bp, synthetic construct
  misc_feature 1..20: note = chemically synthesized
  source 1..20: mol_type = other DNA
ggtgatgatattctccaaca

SEQ ID NO: 50192 - DNA, 20 bp, synthetic construct
  misc_feature 1..20: note = chemically synthesized
  source 1..20: mol_type = other DNA
gtgatgatattctccaacac

SEQ ID NO: 50193 - DNA, 20 bp, synthetic construct
  misc_feature 1..20: note = chemically synthesized
  source 1..20: mol_type = other DNA
acacaggtctgaaccccttg

SEQ ID NO: 50194 - DNA, 20 bp, synthetic construct
  misc_feature 1..20: note = chemically synthesized
  source 1..20: mol_type = other DNA
ctgaaccccttgcagtgcct

SEQ ID NO: 50195 - DNA, 20 bp, synthetic construct
  misc_feature 1..20: note = chemically synthesized
  source 1..20: mol_type = other DNA
tgaaccccttgcagtgcctc

SEQ ID NO: 50196 - DNA, 20 bp, synthetic construct
  misc_feature 1..20: note = chemically synthesized
  source 1..20: mol_type = other DNA
gaaccccttgcagtgcctcg

SEQ ID NO: 50197 - DNA, 20 bp, synthetic construct
  misc_feature 1..20: note = chemically synthesized
  source 1..20: mol_type = other DNA
gtgcctcggggctgtttctc

SEQ ID NO: 50198 - DNA, 20 bp, synthetic construct
  misc_feature 1..20: note = chemically synthesized
  source 1..20: mol_type = other DNA
cctcggggctgtttctccag

SEQ ID NO: 50199 - DNA, 20 bp, synthetic construct
  misc_feature 1..20: note = chemically synthesized
  source 1..20: mol_type = other DNA
ctgtttctccagtggattct

SEQ ID NO: 50200 - DNA, 20 bp, synthetic construct
  misc_feature 1..20: note = chemically synthesized
  source 1..20: mol_type = other DNA
tgtttctccagtggattctt

SEQ ID NO: 50201 - DNA, 20 bp, synthetic construct
  misc_feature 1..20: note = chemically synthesized
  source 1..20: mol_type = other DNA
catcttctcaactttgtgaa

SEQ ID NO: 50202 - DNA, 20 bp, synthetic construct
  misc_feature 1..20: note = chemically synthesized
  source 1..20: mol_type = other DNA
tgtgaaaagatattcatcca

SEQ ID NO: 50203 - DNA, 20 bp, synthetic construct
  misc_feature 1..20: note = chemically synthesized
  source 1..20: mol_type = other DNA
gtgaaaagatattcatccaa

SEQ ID NO: 50204 - DNA, 20 bp, synthetic construct
  misc_feature 1..20: note = chemically synthesized
  source 1..20: mol_type = other DNA
aaggtctcacctgtcttatt

SEQ ID NO: 50205 - DNA, 20 bp, synthetic construct
  misc_feature 1..20: note = chemically synthesized
  source 1..20: mol_type = other DNA
ggtctcacctgtcttattca

SEQ ID NO: 50206 - DNA, 20 bp, synthetic construct
  misc_feature 1..20: note = chemically synthesized
  source 1..20: mol_type = other DNA
cacctgtcttattcagagct

SEQ ID NO: 50207 - DNA, 20 bp, synthetic construct
  misc_feature 1..20: note = chemically synthesized
  source 1..20: mol_type = other DNA
cttattcagagcttggattt

SEQ ID NO: 50208 - DNA, 20 bp, synthetic construct
  misc_feature 1..20: note = chemically synthesized
  source 1..20: mol_type = other DNA
tcagagcttggattttggac

SEQ ID NO: 50209 - DNA, 20 bp, synthetic construct
  misc_feature 1..20: note = chemically synthesized
  source 1..20: mol_type = other DNA
gactagctttttctatttct

SEQ ID NO: 50210 - DNA, 20 bp, synthetic construct
  misc_feature 1..20: note = chemically synthesized
  source 1..20: mol_type = other DNA
actagctttttctatttctt

SEQ ID NO: 50211 - DNA, 20 bp, synthetic construct
  misc_feature 1..20: note = chemically synthesized
  source 1..20: mol_type = other DNA
ttctatttcttgggattctc

SEQ ID NO: 50212 - DNA, 20 bp, synthetic construct
  misc_feature 1..20: note = chemically synthesized
  source 1..20: mol_type = other DNA
ctatttcttgggattctcta

SEQ ID NO: 50213 - DNA, 20 bp, synthetic construct
  misc_feature 1..20: note = chemically synthesized
  source 1..20: mol_type = other DNA
attctctagagccatatatt

SEQ ID NO: 50214 - DNA, 20 bp, synthetic construct
  misc_feature 1..20: note = chemically synthesized
  source 1..20: mol_type = other DNA
ccatatattcagatataaca

SEQ ID NO: 50215 - DNA, 20 bp, synthetic construct
  misc_feature 1..20: note = chemically synthesized
  source 1..20: mol_type = other DNA
tataacacagatataaccaa

SEQ ID NO: 50216 - DNA, 20 bp, synthetic construct
  misc_feature 1..20: note = chemically synthesized
  source 1..20: mol_type = other DNA
aacacagatataaccaaaag

SEQ ID NO: 50217 - DNA, 20 bp, synthetic construct
  misc_feature 1..20: note = chemically synthesized
  source 1..20: mol_type = other DNA
agatataaccaaaagaagca

SEQ ID NO: 50218 - DNA, 20 bp, synthetic construct
  misc_feature 1..20: note = chemically synthesized
  source 1..20: mol_type = other DNA
gatataaccaaaagaagcaa

SEQ ID NO: 50219 - DNA, 20 bp, synthetic construct
  misc_feature 1..20: note = chemically synthesized
  source 1..20: mol_type = other DNA
tataaccaaaagaagcaaag

SEQ ID NO: 50220 - DNA, 20 bp, synthetic construct
  misc_feature 1..20: note = chemically synthesized
  source 1..20: mol_type = other DNA
ataaccaaaagaagcaaagg

SEQ ID NO: 50221 - DNA, 20 bp, synthetic construct
  misc_feature 1..20: note = chemically synthesized
  source 1..20: mol_type = other DNA
aagaagcaaaggaggcatca

SEQ ID NO: 50222 - DNA, 20 bp, synthetic construct
  misc_feature 1..20: note = chemically synthesized
  source 1..20: mol_type = other DNA
aagcaaaggaggcatcacag

SEQ ID NO: 50223 - DNA, 20 bp, synthetic construct
  misc_feature 1..20: note = chemically synthesized
  source 1..20: mol_type = other DNA
agcaaaggaggcatcacaga

SEQ ID NO: 50224 - DNA, 20 bp, synthetic construct
  misc_feature 1..20: note = chemically synthesized
  source 1..20: mol_type = other DNA
gcaaaggaggcatcacagaa

SEQ ID NO: 50225 - DNA, 20 bp, synthetic construct
  misc_feature 1..20: note = chemically synthesized
  source 1..20: mol_type = other DNA
caaaggaggcatcacagaag

SEQ ID NO: 50226 - DNA, 20 bp, synthetic construct
  misc_feature 1..20: note = chemically synthesized
  source 1..20: mol_type = other DNA
acagaaggggctttgtattc

SEQ ID NO: 50227 - DNA, 20 bp, synthetic construct
  misc_feature 1..20: note = chemically synthesized
  source 1..20: mol_type = other DNA
cagaaggggctttgtattct

SEQ ID NO: 50228 - DNA, 20 bp, synthetic construct
  misc_feature 1..20: note = chemically synthesized
  source 1..20: mol_type = other DNA
agaaggggctttgtattctg

SEQ ID NO: 50229 - DNA, 20 bp, synthetic construct
  misc_feature 1..20: note = chemically synthesized
  source 1..20: mol_type = other DNA
aaggggctttgtattctggg

SEQ ID NO: 50230 - DNA, 20 bp, synthetic construct
  misc_feature 1..20: note = chemically synthesized
  source 1..20: mol_type = other DNA
aggggctttgtattctgggg

SEQ ID NO: 50231 - DNA, 20 bp, synthetic construct
  misc_feature 1..20: note = chemically synthesized
  source 1..20: mol_type = other DNA
ggggctttgtattctgggga

SEQ ID NO: 50232 - DNA, 20 bp, synthetic construct
  misc_feature 1..20: note = chemically synthesized
  source 1..20: mol_type = other DNA
gggctttgtattctggggag

SEQ ID NO: 50233 - DNA, 20 bp, synthetic construct
  misc_feature 1..20: note = chemically synthesized
  source 1..20: mol_type = other DNA
ggctttgtattctggggagg

SEQ ID NO: 50234 - DNA, 20 bp, synthetic construct
  misc_feature 1..20: note = chemically synthesized
  source 1..20: mol_type = other DNA
gtattctggggagggggaca

SEQ ID NO: 50235 - DNA, 20 bp, synthetic construct
  misc_feature 1..20: note = chemically synthesized
  source 1..20: mol_type = other DNA
attctggggagggggacata

SEQ ID NO: 50236 - DNA, 20 bp, synthetic construct
  misc_feature 1..20: note = chemically synthesized
  source 1..20: mol_type = other DNA
ggggagggggacatagagtt

SEQ ID NO: 50237 - DNA, 20 bp, synthetic construct
  misc_feature 1..20: note = chemically synthesized
  source 1..20: mol_type = other DNA
ggagggggacatagagttga

SEQ ID NO: 50238 - DNA, 20 bp, synthetic construct
  misc_feature 1..20: note = chemically synthesized
  source 1..20: mol_type = other DNA
acatagagttgagagaaata

SEQ ID NO: 50239 - DNA, 20 bp, synthetic construct
  misc_feature 1..20: note = chemically synthesized
  source 1..20: mol_type = other DNA
catagagttgagagaaatac

SEQ ID NO: 50240 - DNA, 20 bp, synthetic construct
  misc_feature 1..20: note = chemically synthesized
  source 1..20: mol_type = other DNA
gagagaaatacaggaattta

SEQ ID NO: 50241 - DNA, 20 bp, synthetic construct
  misc_feature 1..20: note = chemically synthesized
  source 1..20: mol_type = other DNA
agagaaatacaggaatttat

SEQ ID NO: 50242 - DNA, 20 bp, synthetic construct
  misc_feature 1..20: note = chemically synthesized
  source 1..20: mol_type = other DNA
aatttataggactctactca

SEQ ID NO: 50243 - DNA, 20 bp, synthetic construct
  misc_feature 1..20: note = chemically synthesized
  source 1..20: mol_type = other DNA
tttataggactctactcaaa

SEQ ID NO: 50244 - DNA, 20 bp, synthetic construct
  misc_feature 1..20: note = chemically synthesized
  source 1..20: mol_type = other DNA
actcaaagagccctcaaata

SEQ ID NO: 50245 - DNA, 20 bp, synthetic construct
  misc_feature 1..20: note = chemically synthesized
  source 1..20: mol_type = other DNA
aagagccctcaaataaagta

SEQ ID NO: 50246 - DNA, 20 bp, synthetic construct
  misc_feature 1..20: note = chemically synthesized
  source 1..20: mol_type = other DNA
gccctcaaataaagtacggc

SEQ ID NO: 50247 - DNA, 20 bp, synthetic construct
  misc_feature 1..20: note = chemically synthesized
  source 1..20: mol_type = other DNA
acggctagtcttctttgcct

SEQ ID NO: 50248 - DNA, 20 bp, synthetic construct
  misc_feature 1..20: note = chemically synthesized
  source 1..20: mol_type = other DNA
tcttctttgcctaagacaat

SEQ ID NO: 50249 - DNA, 20 bp, synthetic construct
  misc_feature 1..20: note = chemically synthesized
  source 1..20: mol_type = other DNA
tctttgcctaagacaatgag

SEQ ID NO: 50250 - DNA, 20 bp, synthetic construct
  misc_feature 1..20: note = chemically synthesized
  source 1..20: mol_type = other DNA
gcctaagacaatgagcagtc

SEQ ID NO: 50251 - DNA, 20 bp, synthetic construct
  misc_feature 1..20: note = chemically synthesized
  source 1..20: mol_type = other DNA
cctaagacaatgagcagtcc

SEQ ID NO: 50252 - DNA, 20 bp, synthetic construct
  misc_feature 1..20: note = chemically synthesized
  source 1..20: mol_type = other DNA
aagacaatgagcagtccagg

SEQ ID NO: 50253 - DNA, 20 bp, synthetic construct
  misc_feature 1..20: note = chemically synthesized
  source 1..20: mol_type = other DNA
aggaagttatccatttcttt

SEQ ID NO: 50254 - DNA, 20 bp, synthetic construct
  misc_feature 1..20: note = chemically synthesized
  source 1..20: mol_type = other DNA
tccatttcttttagattttc

SEQ ID NO: 50255 - DNA, 20 bp, synthetic construct
  misc_feature 1..20: note = chemically synthesized
  source 1..20: mol_type = other DNA
gattttctagtttatgtaca

SEQ ID NO: 50256 - DNA, 20 bp, synthetic construct
  misc_feature 1..20: note = chemically synthesized
  source 1..20: mol_type = other DNA
ttttctagtttatgtacata

SEQ ID NO: 50257 - DNA, 20 bp, synthetic construct
  misc_feature 1..20: note = chemically synthesized
  source 1..20: mol_type = other DNA
tatgtacatagagatgttca

SEQ ID NO: 50258 - DNA, 20 bp, synthetic construct
  misc_feature 1..20: note = chemically synthesized
  source 1..20: mol_type = other DNA
gtacatagagatgttcatag

SEQ ID NO: 50259 - DNA, 20 bp, synthetic construct
  misc_feature 1..20: note = chemically synthesized
  source 1..20: mol_type = other DNA
gatgattatttgtatttctg

SEQ ID NO: 50260 - DNA, 20 bp, synthetic construct
  misc_feature 1..20: note = chemically synthesized
  source 1..20: mol_type = other DNA
atgattatttgtatttctgt

SEQ ID NO: 50261 - DNA, 20 bp, synthetic construct
  misc_feature 1..20: note = chemically synthesized
  source 1..20: mol_type = other DNA
tgattatttgtatttctgtg

SEQ ID NO: 50262 - DNA, 20 bp, synthetic construct
  misc_feature 1..20: note = chemically synthesized
  source 1..20: mol_type = other DNA
tatttgtatttctgtggggt

SEQ ID NO: 50263 - DNA, 20 bp, synthetic construct
  misc_feature 1..20: note = chemically synthesized
  source 1..20: mol_type = other DNA
catttctaactgtgcttatt

SEQ ID NO: 50264 - DNA, 20 bp, synthetic construct
  misc_feature 1..20: note = chemically synthesized
  source 1..20: mol_type = other DNA
ttctctcttgtcttctttat

SEQ ID NO: 50265 - DNA, 20 bp, synthetic construct
  misc_feature 1..20: note = chemically synthesized
  source 1..20: mol_type = other DNA
tcttgtcttctttattagtc

SEQ ID NO: 50266 - DNA, 20 bp, synthetic construct
  misc_feature 1..20: note = chemically synthesized
  source 1..20: mol_type = other DNA
gtcttctttattagtctagc

SEQ ID NO: 50267 - DNA, 20 bp, synthetic construct
  misc_feature 1..20: note = chemically synthesized
  source 1..20: mol_type = other DNA
tattaattttttcacaaaac

SEQ ID NO: 50268 - DNA, 20 bp, synthetic construct
  misc_feature 1..20: note = chemically synthesized
  source 1..20: mol_type = other DNA
tttttcacaaaaccagctct

SEQ ID NO: 50269 - DNA, 20 bp, synthetic construct
  misc_feature 1..20: note = chemically synthesized
  source 1..20: mol_type = other DNA
ggactcattaatcttttgaa

SEQ ID NO: 50270 - DNA, 20 bp, synthetic construct
  misc_feature 1..20: note = chemically synthesized
  source 1..20: mol_type = other DNA
ttttgtgttttaatatcctt

SEQ ID NO: 50271 - DNA, 20 bp, synthetic construct
  misc_feature 1..20: note = chemically synthesized
  source 1..20: mol_type = other DNA
gtgttttaatatccttcagt

SEQ ID NO: 50272 - DNA, 20 bp, synthetic construct
  misc_feature 1..20: note = chemically synthesized
  source 1..20: mol_type = other DNA
gtttatttcttgtcttctgc

SEQ ID NO: 50273 - DNA, 20 bp, synthetic construct
  misc_feature 1..20: note = chemically synthesized
  source 1..20: mol_type = other DNA
ttcttgtcttctgctagatt

SEQ ID NO: 50274 - DNA, 20 bp, synthetic construct
  misc_feature 1..20: note = chemically synthesized
  source 1..20: mol_type = other DNA
tcttgtcttctgctagattt

SEQ ID NO: 50275 - DNA, 20 bp, synthetic construct
  misc_feature 1..20: note = chemically synthesized
  source 1..20: mol_type = other DNA
cttgtcttctgctagattta

SEQ ID NO: 50276 - DNA, 20 bp, synthetic construct
  misc_feature 1..20: note = chemically synthesized
  source 1..20: mol_type = other DNA
tcttctgctagatttagggt

SEQ ID NO: 50277 - DNA, 20 bp, synthetic construct
  misc_feature 1..20: note = chemically synthesized
  source 1..20: mol_type = other DNA
atttagggttggtttgctct

SEQ ID NO: 50278 - DNA, 20 bp, synthetic construct
  misc_feature 1..20: note = chemically synthesized
  source 1..20: mol_type = other DNA
ttggtttgctcttggttctc

SEQ ID NO: 50279 - DNA, 20 bp, synthetic construct
  misc_feature 1..20: note = chemically synthesized
  source 1..20: mol_type = other DNA
tcttggttctctggttcttt

SEQ ID NO: 50280 - DNA, 20 bp, synthetic construct
  misc_feature 1..20: note = chemically synthesized
  source 1..20: mol_type = other DNA
ggttcttttagttgtgacat

SEQ ID NO: 50281 - DNA, 20 bp, synthetic construct
  misc_feature 1..20: note = chemically synthesized
  source 1..20: mol_type = other DNA
gttcttttagttgtgacatt

SEQ ID NO: 50282 - DNA, 20 bp, synthetic construct
  misc_feature 1..20: note = chemically synthesized
  source 1..20: mol_type = other DNA
tgacattaggttgttaattt

SEQ ID NO: 50283 - DNA, 20 bp, synthetic construct
  misc_feature 1..20: note = chemically synthesized
  source 1..20: mol_type = other DNA
gacattaggttgttaatttg

SEQ ID NO: 50284 - DNA, 20 bp, synthetic construct
  misc_feature 1..20: note = chemically synthesized
  source 1..20: mol_type = other DNA
acattaggttgttaatttga

SEQ ID NO: 50285 - DNA, 20 bp, synthetic construct
  misc_feature 1..20: note = chemically synthesized
  source 1..20: mol_type = other DNA
gttgttaatttgagggcttt

SEQ ID NO: 50286 - DNA, 20 bp, synthetic construct
  misc_feature 1..20: note = chemically synthesized
  source 1..20: mol_type = other DNA
ggctttaagactttttgatg

SEQ ID NO: 50287 - DNA, 20 bp, synthetic construct
  misc_feature 1..20: note = chemically synthesized
  source 1..20: mol_type = other DNA
gctttaagactttttgatgt

SEQ ID NO: 50288 - DNA, 20 bp, synthetic construct
  misc_feature 1..20: note = chemically synthesized
  source 1..20: mol_type = other DNA
gactttttgatgtgggcatt

SEQ ID NO: 50289 - DNA, 20 bp, synthetic construct
  misc_feature 1..20: note = chemically synthesized
  source 1..20: mol_type = other DNA
tttctctcttaacactgtct

SEQ ID NO: 50290 - DNA, 20 bp, synthetic construct
  misc_feature 1..20: note = chemically synthesized
  source 1..20: mol_type = other DNA
acactgtctaagctgtgtcc

SEQ ID NO: 50291 - DNA, 20 bp, synthetic construct
  misc_feature 1..20: note = chemically synthesized
  source 1..20: mol_type = other DNA
actgtctaagctgtgtccca

SEQ ID NO: 50292 - DNA, 20 bp, synthetic construct
  misc_feature 1..20: note = chemically synthesized
  source 1..20: mol_type = other DNA
aagctgtgtcccagagattc

SEQ ID NO: 50293 - DNA, 20 bp, synthetic construct
  misc_feature 1..20: note = chemically synthesized
  source 1..20: mol_type = other DNA
tattgtatctttgttctcat

SEQ ID NO: 50294 - DNA, 20 bp, synthetic construct
  misc_feature 1..20: note = chemically synthesized
  source 1..20: mol_type = other DNA
ctttgttctcattagtttca

SEQ ID NO: 50295 - DNA, 20 bp, synthetic construct
  misc_feature 1..20: note = chemically synthesized
  source 1..20: mol_type = other DNA
gaactattttatttttgcct

SEQ ID NO: 50296 - DNA, 20 bp, synthetic construct
  misc_feature 1..20: note = chemically synthesized
  source 1..20: mol_type = other DNA
ttatttacccaaaattcatt

SEQ ID NO: 50297 - DNA, 20 bp, synthetic construct
  misc_feature 1..20: note = chemically synthesized
  source 1..20: mol_type = other DNA
tatttacccaaaattcattc

SEQ ID NO: 50298 - DNA, 20 bp, synthetic construct
  misc_feature 1..20: note = chemically synthesized
  source 1..20: mol_type = other DNA
tttacccaaaattcattcag

SEQ ID NO: 50299 - DNA, 20 bp, synthetic construct
  misc_feature 1..20: note = chemically synthesized
  source 1..20: mol_type = other DNA
acccaaaattcattcaggag

SEQ ID NO: 50300 - DNA, 20 bp, synthetic construct
  misc_feature 1..20: note = chemically synthesized
  source 1..20: mol_type = other DNA
cccaaaattcattcaggagc

SEQ ID NO: 50301 - DNA, 20 bp, synthetic construct
  misc_feature 1..20: note = chemically synthesized
  source 1..20: mol_type = other DNA
ttaatttccatgtaattgca

SEQ ID NO: 50302 - DNA, 20 bp, synthetic construct
  misc_feature 1..20: note = chemically synthesized
  source 1..20: mol_type = other DNA
ccatgtaattgcatagtttt

SEQ ID NO: 50303 - DNA, 20 bp, synthetic construct
  misc_feature 1..20: note = chemically synthesized
  source 1..20: mol_type = other DNA
catagttttcagctattcat

SEQ ID NO: 50304 - DNA, 20 bp, synthetic construct
  misc_feature 1..20: note = chemically synthesized
  source 1..20: mol_type = other DNA
aatctatttttattcctctg

SEQ ID NO: 50305 - DNA, 20 bp, synthetic construct
  misc_feature 1..20: note = chemically synthesized
  source 1..20: mol_type = other DNA
tttttattcctctgtggtct

SEQ ID NO: 50306 - DNA, 20 bp, synthetic construct
  misc_feature 1..20: note = chemically synthesized
  source 1..20: mol_type = other DNA
tttattcctctgtggtctga

SEQ ID NO: 50307 - DNA, 20 bp, synthetic construct
  misc_feature 1..20: note = chemically synthesized
  source 1..20: mol_type = other DNA
attttttttttgcatttgct

SEQ ID NO: 50308 - DNA, 20 bp, synthetic construct
  misc_feature 1..20: note = chemically synthesized
  source 1..20: mol_type = other DNA
ttttttttttgcatttgctg

SEQ ID NO: 50309 - DNA, 20 bp, synthetic construct
  misc_feature 1..20: note = chemically synthesized
  source 1..20: mol_type = other DNA
gcatttgctgaggattgttt

SEQ ID NO: 50310 - DNA, 20 bp, synthetic construct
  misc_feature 1..20: note = chemically synthesized
  source 1..20: mol_type = other DNA
catttgctgaggattgtttt

SEQ ID NO: 50311 - DNA, 20 bp, synthetic construct
  misc_feature 1..20: note = chemically synthesized
  source 1..20: mol_type = other DNA
ggattgttttaggtcctccc

SEQ ID NO: 50312 - DNA, 20 bp, synthetic construct
  misc_feature 1..20: note = chemically synthesized
  source 1..20: mol_type = other DNA
gattgttttaggtcctccca

SEQ ID NO: 50313 - DNA, 20 bp, synthetic construct
  misc_feature 1..20: note = chemically synthesized
  source 1..20: mol_type = other DNA
aggtcctcccaaggctgaac

SEQ ID NO: 50314 - DNA, 20 bp, synthetic construct
  misc_feature 1..20: note = chemically synthesized
  source 1..20: mol_type = other DNA
ggtcctcccaaggctgaacc

SEQ ID NO: 50315 - DNA, 20 bp, synthetic construct
  misc_feature 1..20: note = chemically synthesized
  source 1..20: mol_type = other DNA
cctcccaaggctgaaccagg

SEQ ID NO: 50316 - DNA, 20 bp, synthetic construct
  misc_feature 1..20: note = chemically synthesized
  source 1..20: mol_type = other DNA
aggaagaaatcaatttcctg

SEQ ID NO: 50317 - DNA, 20 bp, synthetic construct
  misc_feature 1..20: note = chemically synthesized
  source 1..20: mol_type = other DNA
gaagaaatcaatttcctgaa

SEQ ID NO: 50318 - DNA, 20 bp, synthetic construct
  misc_feature 1..20: note = chemically synthesized
  source 1..20: mol_type = other DNA
ttcctgaagagatccatgat

SEQ ID NO: 50319 - DNA, 20 bp, synthetic construct
  misc_feature 1..20: note = chemically synthesized
  source 1..20: mol_type = other DNA
gatgagctctgaaaatgatt

SEQ ID NO: 50320 - DNA, 20 bp, synthetic construct
  misc_feature 1..20: note = chemically synthesized
  source 1..20: mol_type = other DNA
gaaaatgattcagtaataaa

SEQ ID NO: 50321 - DNA, 20 bp, synthetic construct
  misc_feature 1..20: note = chemically synthesized
  source 1..20: mol_type = other DNA
aatagcctatcaaacaaaaa

SEQ ID NO: 50322 - DNA, 20 bp, synthetic construct
  misc_feature 1..20: note = chemically synthesized
  source 1..20: mol_type = other DNA
ctatcaaacaaaaaaagccc

SEQ ID NO: 50323 - DNA, 20 bp, synthetic construct
  misc_feature 1..20: note = chemically synthesized
  source 1..20: mol_type = other DNA
gattcacaaccaaattctat

SEQ ID NO: 50324 - DNA, 20 bp, synthetic construct
  misc_feature 1..20: note = chemically synthesized
  source 1..20: mol_type = other DNA
caaattctatcagatgcaca

SEQ ID NO: 50325 - DNA, 20 bp, synthetic construct
  misc_feature 1..20: note = chemically synthesized
  source 1..20: mol_type = other DNA
attctatcagatgcacaaag

SEQ ID NO: 50326 - DNA, 20 bp, synthetic construct
  misc_feature 1..20: note = chemically synthesized
  source 1..20: mol_type = other DNA
tctatcagatgcacaaagaa

SEQ ID NO: 50327 - DNA, 20 bp, synthetic construct
  misc_feature 1..20: note = chemically synthesized
  source 1..20: mol_type = other DNA
tcagatgcacaaagaagagt

SEQ ID NO: 50328 - DNA, 20 bp, synthetic construct
  misc_feature 1..20: note = chemically synthesized
  source 1..20: mol_type = other DNA
agttggaaaaattcctactg

SEQ ID NO: 50329 - DNA, 20 bp, synthetic construct
  misc_feature 1..20: note = chemically synthesized
  source 1..20: mol_type = other DNA
tgaagctactccaaaaaatt

SEQ ID NO: 50330 - DNA, 20 bp, synthetic construct
  misc_feature 1..20: note = chemically synthesized
  source 1..20: mol_type = other DNA
gaagctactccaaaaaattg

SEQ ID NO: 50331 - DNA, 20 bp, synthetic construct
  misc_feature 1..20: note = chemically synthesized
  source 1..20: mol_type = other DNA
aagctactccaaaaaattga

SEQ ID NO: 50332 - DNA, 20 bp, synthetic construct
  misc_feature 1..20: note = chemically synthesized
  source 1..20: mol_type = other DNA
agctactccaaaaaattgag

SEQ ID NO: 50333 - DNA, 20 bp, synthetic construct
  misc_feature 1..20: note = chemically synthesized
  source 1..20: mol_type = other DNA
gctactccaaaaaattgagg

SEQ ID NO: 50334 - DNA, 20 bp, synthetic construct
  misc_feature 1..20: note = chemically synthesized
  source 1..20: mol_type = other DNA
tactccaaaaaattgagggg

SEQ ID NO: 50335 - DNA, 20 bp, synthetic construct
  misc_feature 1..20: note = chemically synthesized
  source 1..20: mol_type = other DNA
actccaaaaaattgaggggg

SEQ ID NO: 50336 - DNA, 20 bp, synthetic construct
  misc_feature 1..20: note = chemically synthesized
  source 1..20: mol_type = other DNA
ctccaaaaaattgaggggga

SEQ ID NO: 50337 - DNA, 20 bp, synthetic construct
  misc_feature 1..20: note = chemically synthesized
  source 1..20: mol_type = other DNA
gagggggagggattcaacct

SEQ ID NO: 50338 - DNA, 20 bp, synthetic construct
  misc_feature 1..20: note = chemically synthesized
  source 1..20: mol_type = other DNA
tcaacctcagctcattttat

SEQ ID NO: 50339 - DNA, 20 bp, synthetic construct
  misc_feature 1..20: note = chemically synthesized
  source 1..20: mol_type = other DNA
caacctcagctcattttatg

SEQ ID NO: 50340 - DNA, 20 bp, synthetic construct
  misc_feature 1..20: note = chemically synthesized
  source 1..20: mol_type = other DNA
ctcagctcattttatgaggc

SEQ ID NO: 50341 - DNA, 20 bp, synthetic construct
  misc_feature 1..20: note = chemically synthesized
  source 1..20: mol_type = other DNA
atcctgataccaaaacctga

SEQ ID NO: 50342 - DNA, 20 bp, synthetic construct
  misc_feature 1..20: note = chemically synthesized
  source 1..20: mol_type = other DNA
tagacacacaacaacaaaaa

SEQ ID NO: 50343 - DNA, 20 bp, synthetic construct
  misc_feature 1..20: note = chemically synthesized
  source 1..20: mol_type = other DNA
acaacaaaaaaagaaaactt

SEQ ID NO: 50344 - DNA, 20 bp, synthetic construct
  misc_feature 1..20: note = chemically synthesized
  source 1..20: mol_type = other DNA
caacaaaaaaagaaaacttc

SEQ ID NO: 50345 - DNA, 20 bp, synthetic construct
  misc_feature 1..20: note = chemically synthesized
  source 1..20: mol_type = other DNA
gaacattgatgcaaaaatac

SEQ ID NO: 50346 - DNA, 20 bp, synthetic construct
  misc_feature 1..20: note = chemically synthesized
  source 1..20: mol_type = other DNA
attgatgcaaaaatactagc

SEQ ID NO: 50347 - DNA, 20 bp, synthetic construct
  misc_feature 1..20: note = chemically synthesized
  source 1..20: mol_type = other DNA
aaatactagcaagccaaatc

SEQ ID NO: 50348 - DNA, 20 bp, synthetic construct
  misc_feature 1..20: note = chemically synthesized
  source 1..20: mol_type = other DNA
aaatccagcaacacatcaca

SEQ ID NO: 50349 - DNA, 20 bp, synthetic construct
  misc_feature 1..20: note = chemically synthesized
  source 1..20: mol_type = other DNA
aaagctaatccacctcaatc

SEQ ID NO: 50350 - DNA, 20 bp, synthetic construct
  misc_feature 1..20: note = chemically synthesized
  source 1..20: mol_type = other DNA
gctaatccacctcaatcaag

SEQ ID NO: 50351 - DNA, 20 bp, synthetic construct
  misc_feature 1..20: note = chemically synthesized
  source 1..20: mol_type = other DNA
ctaatccacctcaatcaagt

SEQ ID NO: 50352 - DNA, 20 bp, synthetic construct
  misc_feature 1..20: note = chemically synthesized
  source 1..20: mol_type = other DNA
atcaagtaggctttatccct

SEQ ID NO: 50353 - DNA, 20 bp, synthetic construct
  misc_feature 1..20: note = chemically synthesized
  source 1..20: mol_type = other DNA
aagtaggctttatccctgag

SEQ ID NO: 50354 - DNA, 20 bp, synthetic construct
  misc_feature 1..20: note = chemically synthesized
  source 1..20: mol_type = other DNA
aggctttatccctgagaagc

SEQ ID NO: 50355 - DNA, 20 bp, synthetic construct
  misc_feature 1..20: note = chemically synthesized
  source 1..20: mol_type = other DNA
ttatccctgagaagcaagat

SEQ ID NO: 50356 - DNA, 20 bp, synthetic construct
  misc_feature 1..20: note = chemically synthesized
  source 1..20: mol_type = other DNA
cctgagaagcaagattggtt

SEQ ID NO: 50357 - DNA, 20 bp, synthetic construct
  misc_feature 1..20: note = chemically synthesized
  source 1..20: mol_type = other DNA
aatgtgattcatcatatata

SEQ ID NO: 50358 - DNA, 20 bp, synthetic construct
  misc_feature 1..20: note = chemically synthesized
  source 1..20: mol_type = other DNA
catatatacagcactaaaaa

SEQ ID NO: 50359 - DNA, 20 bp, synthetic construct
  misc_feature 1..20: note = chemically synthesized
  source 1..20: mol_type = other DNA
catttcaatatgtgcaaaaa

SEQ ID NO: 50360 - DNA, 20 bp, synthetic construct
  misc_feature 1..20: note = chemically synthesized
  source 1..20: mol_type = other DNA
gttaaaacctctcaacaaac

SEQ ID NO: 50361 - DNA, 20 bp, synthetic construct
  misc_feature 1..20: note = chemically synthesized
  source 1..20: mol_type = other DNA
tctcaacaaactagctattt

SEQ ID NO: 50362 - DNA, 20 bp, synthetic construct
  misc_feature 1..20: note = chemically synthesized
  source 1..20: mol_type = other DNA
ctcaacaaactagctattta

SEQ ID NO: 50363 - DNA, 20 bp, synthetic construct
  misc_feature 1..20: note = chemically synthesized
  source 1..20: mol_type = other DNA
acatgacctcaaaataatat

SEQ ID NO: 50364 - DNA, 20 bp, synthetic construct
  misc_feature 1..20: note = chemically synthesized
  source 1..20: mol_type = other DNA
agccatctatgacaaaccca

SEQ ID NO: 50365 - DNA, 20 bp, synthetic construct
  misc_feature 1..20: note = chemically synthesized
  source 1..20: mol_type = other DNA
aacccacagccaacatcata

SEQ ID NO: 50366 - DNA, 20 bp, synthetic construct
  misc_feature 1..20: note = chemically synthesized
  source 1..20: mol_type = other DNA
acagccaacatcatacagaa

SEQ ID NO: 50367 - DNA, 20 bp, synthetic construct
  misc_feature 1..20: note = chemically synthesized
  source 1..20: mol_type = other DNA
cagccaacatcatacagaat

SEQ ID NO: 50368 - DNA, 20 bp, synthetic construct
  misc_feature 1..20: note = chemically synthesized
  source 1..20: mol_type = other DNA
catacagaatgggcaaaacc

SEQ ID NO: 50369 - DNA, 20 bp, synthetic construct
  misc_feature 1..20: note = chemically synthesized
  source 1..20: mol_type = other DNA
acagaatgggcaaaacctgg

SEQ ID NO: 50370 - DNA, 20 bp, synthetic construct
  misc_feature 1..20: note = chemically synthesized
  source 1..20: mol_type = other DNA
gaagcattcttcttgaaaac

SEQ ID NO: 50371 - DNA, 20 bp, synthetic construct
  misc_feature 1..20: note = chemically synthesized
  source 1..20: mol_type = other DNA
ttcttcttgaaaactggcac

SEQ ID NO: 50372 - DNA, 20 bp, synthetic construct
  misc_feature 1..20: note = chemically synthesized
  source 1..20: mol_type = other DNA
cttgaaaactggcacaagac

SEQ ID NO: 50373 - DNA, 20 bp, synthetic construct
  misc_feature 1..20: note = chemically synthesized
  source 1..20: mol_type = other DNA
ttgaaaactggcacaagaca

SEQ ID NO: 50374 - DNA, 20 bp, synthetic construct
  misc_feature 1..20: note = chemically synthesized
  source 1..20: mol_type = other DNA
cctctctcaccactgctatt

SEQ ID NO: 50375 - DNA, 20 bp, synthetic construct
  misc_feature 1..20: note = chemically synthesized
  source 1..20: mol_type = other DNA
ctcaccactgctattcagta

SEQ ID NO: 50376 - DNA, 20 bp, synthetic construct
  misc_feature 1..20: note = chemically synthesized
  source 1..20: mol_type = other DNA
actgctattcagtatagtac

SEQ ID NO: 50377 - DNA, 20 bp, synthetic construct
  misc_feature 1..20: note = chemically synthesized
  source 1..20: mol_type = other DNA
gctattcagtatagtactgg

SEQ ID NO: 50378 - DNA, 20 bp, synthetic construct
  misc_feature 1..20: note = chemically synthesized
  source 1..20: mol_type = other DNA
cagtatagtactggcagtcc

SEQ ID NO: 50379 - DNA, 20 bp, synthetic construct
  misc_feature 1..20: note = chemically synthesized
  source 1..20: mol_type = other DNA
atagtactggcagtcctggc

SEQ ID NO: 50380 - DNA, 20 bp, synthetic construct
  misc_feature 1..20: note = chemically synthesized
  source 1..20: mol_type = other DNA
agtactggcagtcctggcca

SEQ ID NO: 50381 - DNA, 20 bp, synthetic construct
  misc_feature 1..20: note = chemically synthesized
  source 1..20: mol_type = other DNA
gcagtcctggccagagcaat

SEQ ID NO: 50382 - DNA, 20 bp, synthetic construct
  misc_feature 1..20: note = chemically synthesized
  source 1..20: mol_type = other DNA
cagtcctggccagagcaatc

SEQ ID NO: 50383 - DNA, 20 bp, synthetic construct
  misc_feature 1..20: note = chemically synthesized
  source 1..20: mol_type = other DNA
cctggccagagcaatcaggc

SEQ ID NO: 50384 - DNA, 20 bp, synthetic construct
  misc_feature 1..20: note = chemically synthesized
  source 1..20: mol_type = other DNA
tggccagagcaatcaggcaa

SEQ ID NO: 50385 - DNA, 20 bp, synthetic construct
  misc_feature 1..20: note = chemically synthesized
  source 1..20: mol_type = other DNA
ccagagcaatcaggcaagag

SEQ ID NO: 50386 - DNA, 20 bp, synthetic construct
  misc_feature 1..20: note = chemically synthesized
  source 1..20: mol_type = other DNA
cagagcaatcaggcaagaga

SEQ ID NO: 50387 - DNA, 20 bp, synthetic construct
  misc_feature 1..20: note = chemically synthesized
  source 1..20: mol_type = other DNA
agagcaatcaggcaagagaa

SEQ ID NO: 50388 - DNA, 20 bp, synthetic construct
  misc_feature 1..20: note = chemically synthesized
  source 1..20: mol_type = other DNA
tcaggcaagagaagggaata

SEQ ID NO: 50389 - DNA, 20 bp, synthetic construct
  misc_feature 1..20: note = chemically synthesized
  source 1..20: mol_type = other DNA
caggcaagagaagggaataa

SEQ ID NO: 50390 - DNA, 20 bp, synthetic construct
  misc_feature 1..20: note = chemically synthesized
  source 1..20: mol_type = other DNA
aggcaagagaagggaataaa

SEQ ID NO: 50391 - DNA, 20 bp, synthetic construct
  misc_feature 1..20: note = chemically synthesized
  source 1..20: mol_type = other DNA
gggaataaagggcatccaaa

SEQ ID NO: 50392 - DNA, 20 bp, synthetic construct
  misc_feature 1..20: note = chemically synthesized
  source 1..20: mol_type = other DNA
ggaataaagggcatccaaat

SEQ ID NO: 50393 - DNA, 20 bp, synthetic construct
  misc_feature 1..20: note = chemically synthesized
  source 1..20: mol_type = other DNA
ataaagggcatccaaatagg

SEQ ID NO: 50394 - DNA, 20 bp, synthetic construct
  misc_feature 1..20: note = chemically synthesized
  source 1..20: mol_type = other DNA
aaagggcatccaaataggaa

SEQ ID NO: 50395 - DNA, 20 bp, synthetic construct
  misc_feature 1..20: note = chemically synthesized
  source 1..20: mol_type = other DNA
agggcatccaaataggaaga

SEQ ID NO: 50396 - DNA, 20 bp, synthetic construct
  misc_feature 1..20: note = chemically synthesized
  source 1..20: mol_type = other DNA
catccaaataggaagagaga

SEQ ID NO: 50397 - DNA, 20 bp, synthetic construct
  misc_feature 1..20: note = chemically synthesized
  source 1..20: mol_type = other DNA
aataggaagagagaaagtca

SEQ ID NO: 50398 - DNA, 20 bp, synthetic construct
  misc_feature 1..20: note = chemically synthesized
  source 1..20: mol_type = other DNA
gtatccctgttttctgtatc

SEQ ID NO: 50399 - DNA, 20 bp, synthetic construct
  misc_feature 1..20: note = chemically synthesized
  source 1..20: mol_type = other DNA
tctgtatctagaaaacacca

SEQ ID NO: 50400 - DNA, 20 bp, synthetic construct
  misc_feature 1..20: note = chemically synthesized
  source 1..20: mol_type = other DNA
atctagaaaacaccatagtc

SEQ ID NO: 50401 - DNA, 20 bp, synthetic construct
  misc_feature 1..20: note = chemically synthesized
  source 1..20: mol_type = other DNA
tctagaaaacaccatagtca

SEQ ID NO: 50402 - DNA, 20 bp, synthetic construct
  misc_feature 1..20: note = chemically synthesized
  source 1..20: mol_type = other DNA
acaccatagtcaaggcccaa

SEQ ID NO: 50403 - DNA, 20 bp, synthetic construct
  misc_feature 1..20: note = chemically synthesized
  source 1..20: mol_type = other DNA
tcaaggcccaaaagctcctt

SEQ ID NO: 50404 - DNA, 20 bp, synthetic construct
  misc_feature 1..20: note = chemically synthesized
  source 1..20: mol_type = other DNA
gctccttcagctgataactt

SEQ ID NO: 50405 - DNA, 20 bp, synthetic construct
  misc_feature 1..20: note = chemically synthesized
  source 1..20: mol_type = other DNA
ttcagctgataacttcagca

SEQ ID NO: 50406 - DNA, 20 bp, synthetic construct
  misc_feature 1..20: note = chemically synthesized
  source 1..20: mol_type = other DNA
tgataacttcagcaaagttt

SEQ ID NO: 50407 - DNA, 20 bp, synthetic construct
  misc_feature 1..20: note = chemically synthesized
  source 1..20: mol_type = other DNA
gataacttcagcaaagtttc

SEQ ID NO: 50408 - DNA, 20 bp, synthetic construct
  misc_feature 1..20: note = chemically synthesized
  source 1..20: mol_type = other DNA
aatcaatgtacaaaaatcac

SEQ ID NO: 50409 - DNA, 20 bp, synthetic construct
  misc_feature 1..20: note = chemically synthesized
  source 1..20: mol_type = other DNA
gcattcccatacatcaacaa

SEQ ID NO: 50410 - DNA, 20 bp, synthetic construct
  misc_feature 1..20: note = chemically synthesized
  source 1..20: mol_type = other DNA
cccatacatcaacaatagcc

SEQ ID NO: 50411 - DNA, 20 bp, synthetic construct
  misc_feature 1..20: note = chemically synthesized
  source 1..20: mol_type = other DNA
acatcaacaatagccaagcc

SEQ ID NO: 50412 - DNA, 20 bp, synthetic construct
  misc_feature 1..20: note = chemically synthesized
  source 1..20: mol_type = other DNA
atcaacaatagccaagccta

SEQ ID NO: 50413 - DNA, 20 bp, synthetic construct
  misc_feature 1..20: note = chemically synthesized
  source 1..20: mol_type = other DNA
agccaagcctagagccaaat

SEQ ID NO: 50414 - DNA, 20 bp, synthetic construct
  misc_feature 1..20: note = chemically synthesized
  source 1..20: mol_type = other DNA
gccaagcctagagccaaatc

SEQ ID NO: 50415 - DNA, 20 bp, synthetic construct
  misc_feature 1..20: note = chemically synthesized
  source 1..20: mol_type = other DNA
aagcctagagccaaatcagg

SEQ ID NO: 50416 - DNA, 20 bp, synthetic construct
  misc_feature 1..20: note = chemically synthesized
  source 1..20: mol_type = other DNA
ccatttaccgttgccacaaa

SEQ ID NO: 50417 - DNA, 20 bp, synthetic construct
  misc_feature 1..20: note = chemically synthesized
  source 1..20: mol_type = other DNA
acaaaaagaataaaatacct

SEQ ID NO: 50418 - DNA, 20 bp, synthetic construct
  misc_feature 1..20: note = chemically synthesized
  source 1..20: mol_type = other DNA
caaaaagaataaaataccta

SEQ ID NO: 50419 - DNA, 20 bp, synthetic construct
  misc_feature 1..20: note = chemically synthesized
  source 1..20: mol_type = other DNA
acctaaggatatatctaacc

SEQ ID NO: 50420 - DNA, 20 bp, synthetic construct
  misc_feature 1..20: note = chemically synthesized
  source 1..20: mol_type = other DNA
taaggatatatctaaccaag

SEQ ID NO: 50421 - DNA, 20 bp, synthetic construct
  misc_feature 1..20: note = chemically synthesized
  source 1..20: mol_type = other DNA
atatctaaccaagcagttga

SEQ ID NO: 50422 - DNA, 20 bp, synthetic construct
  misc_feature 1..20: note = chemically synthesized
  source 1..20: mol_type = other DNA
agttgaaagatctctacaat

SEQ ID NO: 50423 - DNA, 20 bp, synthetic construct
  misc_feature 1..20: note = chemically synthesized
  source 1..20: mol_type = other DNA
gatttacaaaacactgctca

SEQ ID NO: 50424 - DNA, 20 bp, synthetic construct
  misc_feature 1..20: note = chemically synthesized
  source 1..20: mol_type = other DNA
aaaacactgctcaaagaaat

SEQ ID NO: 50425 - DNA, 20 bp, synthetic construct
  misc_feature 1..20: note = chemically synthesized
  source 1..20: mol_type = other DNA
aacactgctcaaagaaatca

SEQ ID NO: 50426 - DNA, 20 bp, synthetic construct
  misc_feature 1..20: note = chemically synthesized
  source 1..20: mol_type = other DNA
ctcaaagaaatcagagctga

SEQ ID NO: 50427 - DNA, 20 bp, synthetic construct
  misc_feature 1..20: note = chemically synthesized
  source 1..20: mol_type = other DNA
tcagagctgatagaaacaaa

SEQ ID NO: 50428 - DNA, 20 bp, synthetic construct
  misc_feature 1..20: note = chemically synthesized
  source 1..20: mol_type = other DNA
ggaaaaactttccatgctca

SEQ ID NO: 50429 - DNA, 20 bp, synthetic construct
  misc_feature 1..20: note = chemically synthesized
  source 1..20: mol_type = other DNA
tttccatgctcatggataaa

SEQ ID NO: 50430 - DNA, 20 bp, synthetic construct
  misc_feature 1..20: note = chemically synthesized
  source 1..20: mol_type = other DNA
gttaaaatgtccatactgcc

SEQ ID NO: 50431 - DNA, 20 bp, synthetic construct
  misc_feature 1..20: note = chemically synthesized
  source 1..20: mol_type = other DNA
taaaatgtccatactgccta

SEQ ID NO: 50432 - DNA, 20 bp, synthetic construct
  misc_feature 1..20: note = chemically synthesized
  source 1..20: mol_type = other DNA
atactgcctagagcaattta

SEQ ID NO: 50433 - DNA, 20 bp, synthetic construct
  misc_feature 1..20: note = chemically synthesized
  source 1..20: mol_type = other DNA
tagagcaatttacagtttca

SEQ ID NO: 50434 - DNA, 20 bp, synthetic construct
  misc_feature 1..20: note = chemically synthesized
  source 1..20: mol_type = other DNA
actaccaatgacattcttca

SEQ ID NO: 50435 - DNA, 20 bp, synthetic construct
  misc_feature 1..20: note = chemically synthesized
  source 1..20: mol_type = other DNA
aatgacattcttcacagaac

SEQ ID NO: 50436 - DNA, 20 bp, synthetic construct
  misc_feature 1..20: note = chemically synthesized
  source 1..20: mol_type = other DNA
aactagaaaaatacacttta

SEQ ID NO: 50437 - DNA, 20 bp, synthetic construct
  misc_feature 1..20: note = chemically synthesized
  source 1..20: mol_type = other DNA
aatacactttaaagttcata

SEQ ID NO: 50438 - DNA, 20 bp, synthetic construct
  misc_feature 1..20: note = chemically synthesized
  source 1..20: mol_type = other DNA
atatggaacaacaacaaaaa

SEQ ID NO: 50439 - DNA, 20 bp, synthetic construct
  misc_feature 1..20: note = chemically synthesized
  source 1..20: mol_type = other DNA
aacaacaaaaaaagtccaaa

SEQ ID NO: 50440 - DNA, 20 bp, synthetic construct
  misc_feature 1..20: note = chemically synthesized
  source 1..20: mol_type = other DNA
caaaaaaagtccaaatagcc

SEQ ID NO: 50441 - DNA, 20 bp, synthetic construct
  misc_feature 1..20: note = chemically synthesized
  source 1..20: mol_type = other DNA
aaaaaaagtccaaatagcct

SEQ ID NO: 50442 - DNA, 20 bp, synthetic construct
  misc_feature 1..20: note = chemically synthesized
  source 1..20: mol_type = other DNA
ctaggaaatcctaatactca

SEQ ID NO: 50443 - DNA, 20 bp, synthetic construct
  misc_feature 1..20: note = chemically synthesized
  source 1..20: mol_type = other DNA
taggaaatcctaatactcac

SEQ ID NO: 50444 - DNA, 20 bp, synthetic construct
  misc_feature 1..20: note = chemically synthesized
  source 1..20: mol_type = other DNA
gaaatcctaatactcacagg

SEQ ID NO: 50445 - DNA, 20 bp, synthetic construct
  misc_feature 1..20: note = chemically synthesized
  source 1..20: mol_type = other DNA
aaatcctaatactcacaggt

SEQ ID NO: 50446 - DNA, 20 bp, synthetic construct
  misc_feature 1..20: note = chemically synthesized
  source 1..20: mol_type = other DNA
acaggtgggaattgaaaaat

SEQ ID NO: 50447 - DNA, 20 bp, synthetic construct
  misc_feature 1..20: note = chemically synthesized
  source 1..20: mol_type = other DNA
aattgaaaaatgagaacact

SEQ ID NO: 50448 - DNA, 20 bp, synthetic construct
  misc_feature 1..20: note = chemically synthesized
  source 1..20: mol_type = other DNA
aaaatgagaacacttggaca

SEQ ID NO: 50449 - DNA, 20 bp, synthetic construct
  misc_feature 1..20: note = chemically synthesized
  source 1..20: mol_type = other DNA
aaatgagaacacttggacac

SEQ ID NO: 50450 - DNA, 20 bp, synthetic construct
  misc_feature 1..20: note = chemically synthesized
  source 1..20: mol_type = other DNA
aatgagaacacttggacaca

SEQ ID NO: 50451 - DNA, 20 bp, synthetic construct
  misc_feature 1..20: note = chemically synthesized
  source 1..20: mol_type = other DNA
gagaacacttggacacaggg

SEQ ID NO: 50452 - DNA, 20 bp, synthetic construct
  misc_feature 1..20: note = chemically synthesized
  source 1..20: mol_type = other DNA
agaacacttggacacagggt

SEQ ID NO: 50453 - DNA, 20 bp, synthetic construct
  misc_feature 1..20: note = chemically synthesized
  source 1..20: mol_type = other DNA
gaacacttggacacagggtg

SEQ ID NO: 50454 - DNA, 20 bp, synthetic construct
  misc_feature 1..20: note = chemically synthesized
  source 1..20: mol_type = other DNA
gggtggggaacatcacacac

SEQ ID NO: 50455 - DNA, 20 bp, synthetic construct
  misc_feature 1..20: note = chemically synthesized
  source 1..20: mol_type = other DNA
ggtggggaacatcacacacc

SEQ ID NO: 50456 - DNA, 20 bp, synthetic construct
  misc_feature 1..20: note = chemically synthesized
  source 1..20: mol_type = other DNA
gtggggaacatcacacaccg

SEQ ID NO: 50457 - DNA, 20 bp, synthetic construct
  misc_feature 1..20: note = chemically synthesized
  source 1..20: mol_type = other DNA
tcacacaccggggcctgtcg

SEQ ID NO: 50458 - DNA, 20 bp, synthetic construct
  misc_feature 1..20: note = chemically synthesized
  source 1..20: mol_type = other DNA
cacacaccggggcctgtcgt

SEQ ID NO: 50459 - DNA, 20 bp, synthetic construct
  misc_feature 1..20: note = chemically synthesized
  source 1..20: mol_type = other DNA
acacaccggggcctgtcgtg

SEQ ID NO: 50460 - DNA, 20 bp, synthetic construct
  misc_feature 1..20: note = chemically synthesized
  source 1..20: mol_type = other DNA
caccggggcctgtcgtgggg

SEQ ID NO: 50461 - DNA, 20 bp, synthetic construct
  misc_feature 1..20: note = chemically synthesized
  source 1..20: mol_type = other DNA
cggggcctgtcgtggggtgg

SEQ ID NO: 50462 - DNA, 20 bp, synthetic construct
  misc_feature 1..20: note = chemically synthesized
  source 1..20: mol_type = other DNA
ggggcctgtcgtggggtggt

SEQ ID NO: 50463 - DNA, 20 bp, synthetic construct
  misc_feature 1..20: note = chemically synthesized
  source 1..20: mol_type = other DNA
ggcctgtcgtggggtggtag

SEQ ID NO: 50464 - DNA, 20 bp, synthetic construct
  misc_feature 1..20: note = chemically synthesized
  source 1..20: mol_type = other DNA
cctgtcgtggggtggtagga

SEQ ID NO: 50465 - DNA, 20 bp, synthetic construct
  misc_feature 1..20: note = chemically synthesized
  source 1..20: mol_type = other DNA
tgtcgtggggtggtaggaga

SEQ ID NO: 50466 - DNA, 20 bp, synthetic construct
  misc_feature 1..20: note = chemically synthesized
  source 1..20: mol_type = other DNA
gtcgtggggtggtaggagag

SEQ ID NO: 50467 - DNA, 20 bp, synthetic construct
  misc_feature 1..20: note = chemically synthesized
  source 1..20: mol_type = other DNA
cgtggggtggtaggagagag

SEQ ID NO: 50468 - DNA, 20 bp, synthetic construct
  misc_feature 1..20: note = chemically synthesized
  source 1..20: mol_type = other DNA
gtggggtggtaggagagagg

SEQ ID NO: 50469 - DNA, 20 bp, synthetic construct
  misc_feature 1..20: note = chemically synthesized
  source 1..20: mol_type = other DNA
tggggtggtaggagagagga

SEQ ID NO: 50470 - DNA, 20 bp, synthetic construct
  misc_feature 1..20: note = chemically synthesized
  source 1..20: mol_type = other DNA
ggagagaggagggataacat

SEQ ID NO: 50471 - DNA, 20 bp, synthetic construct
  misc_feature 1..20: note = chemically synthesized
  source 1..20: mol_type = other DNA
gagagaggagggataacatt

SEQ ID NO: 50472 - DNA, 20 bp, synthetic construct
  misc_feature 1..20: note = chemically synthesized
  source 1..20: mol_type = other DNA
gagaggagggataacattag

SEQ ID NO: 50473 - DNA, 20 bp, synthetic construct
  misc_feature 1..20: note = chemically synthesized
  source 1..20: mol_type = other DNA
atatatctaatgtaaatgac

SEQ ID NO: 50474 - DNA, 20 bp, synthetic construct
  misc_feature 1..20: note = chemically synthesized
  source 1..20: mol_type = other DNA
taatgtaaatgacgagttaa

SEQ ID NO: 50475 - DNA, 20 bp, synthetic construct
  misc_feature 1..20: note = chemically synthesized
  source 1..20: mol_type = other DNA
aatgtaaatgacgagttaac

SEQ ID NO: 50476 - DNA, 20 bp, synthetic construct
  misc_feature 1..20: note = chemically synthesized
  source 1..20: mol_type = other DNA
aaatgacgagttaacgggtg

SEQ ID NO: 50477 - DNA, 20 bp, synthetic construct
  misc_feature 1..20: note = chemically synthesized
  source 1..20: mol_type = other DNA
acgggtgcagcacaccaata

SEQ ID NO: 50478 - DNA, 20 bp, synthetic construct
  misc_feature 1..20: note = chemically synthesized
  source 1..20: mol_type = other DNA
tacatatgtaacaaactgca

SEQ ID NO: 50479 - DNA, 20 bp, synthetic construct
  misc_feature 1..20: note = chemically synthesized
  source 1..20: mol_type = other DNA
acatatgtaacaaactgcac

SEQ ID NO: 50480 - DNA, 20 bp, synthetic construct
  misc_feature 1..20: note = chemically synthesized
  source 1..20: mol_type = other DNA
aacaaactgcacaggtaccg

SEQ ID NO: 50481 - DNA, 20 bp, synthetic construct
  misc_feature 1..20: note = chemically synthesized
  source 1..20: mol_type = other DNA
tgcacaggtaccgtagaact

SEQ ID NO: 50482 - DNA, 20 bp, synthetic construct
  misc_feature 1..20: note = chemically synthesized
  source 1..20: mol_type = other DNA
cacaggtaccgtagaactta

SEQ ID NO: 50483 - DNA, 20 bp, synthetic construct
  misc_feature 1..20: note = chemically synthesized
  source 1..20: mol_type = other DNA
ttagagtacaaaaaaaaaaa

SEQ ID NO: 50484 - DNA, 20 bp, synthetic construct
  misc_feature 1..20: note = chemically synthesized
  source 1..20: mol_type = other DNA
agagtacaaaaaaaaaaaaa

SEQ ID NO: 50485 - DNA, 20 bp, synthetic construct
  misc_feature 1..20: note = chemically synthesized
  source 1..20: mol_type = other DNA
caaaaaaaaaaaaagagaaa

SEQ ID NO: 50486 - DNA, 20 bp, synthetic construct
  misc_feature 1..20: note = chemically synthesized
  source 1..20: mol_type = other DNA
aaaaaaagagaaaaagaaaa

SEQ ID NO: 50487 - DNA, 20 bp, synthetic construct
  misc_feature 1..20: note = chemically synthesized
  source 1..20: mol_type = other DNA
aaagagaaaaagaaaaaagc

SEQ ID NO: 50488 - DNA, 20 bp, synthetic construct
  misc_feature 1..20: note = chemically synthesized
  source 1..20: mol_type = other DNA
agagaaaaagaaaaaagctg

SEQ ID NO: 50489 - DNA, 20 bp, synthetic construct
  misc_feature 1..20: note = chemically synthesized
  source 1..20: mol_type = other DNA
cctaacttcaaaccatacca

SEQ ID NO: 50490 - DNA, 20 bp, synthetic construct
  misc_feature 1..20: note = chemically synthesized
  source 1..20: mol_type = other DNA
ctaacttcaaaccataccac

SEQ ID NO: 50491 - DNA, 20 bp, synthetic construct
  misc_feature 1..20: note = chemically synthesized
  source 1..20: mol_type = other DNA
taacttcaaaccataccaca

SEQ ID NO: 50492 - DNA, 20 bp, synthetic construct
  misc_feature 1..20: note = chemically synthesized
  source 1..20: mol_type = other DNA
caaaccataccacagggcta

SEQ ID NO: 50493 - DNA, 20 bp, synthetic construct
  misc_feature 1..20: note = chemically synthesized
  source 1..20: mol_type = other DNA
cagggctacagtaaccaaaa

SEQ ID NO: 50494 - DNA, 20 bp, synthetic construct
  misc_feature 1..20: note = chemically synthesized
  source 1..20: mol_type = other DNA
ctacagtaaccaaaacagtg

SEQ ID NO: 50495 - DNA, 20 bp, synthetic construct
  misc_feature 1..20: note = chemically synthesized
  source 1..20: mol_type = other DNA
aaaacagtgtggtactgtta

SEQ ID NO: 50496 - DNA, 20 bp, synthetic construct
  misc_feature 1..20: note = chemically synthesized
  source 1..20: mol_type = other DNA
agtgtggtactgttacagaa

SEQ ID NO: 50497 - DNA, 20 bp, synthetic construct
  misc_feature 1..20: note = chemically synthesized
  source 1..20: mol_type = other DNA
actgttacagaaaagacaca

SEQ ID NO: 50498 - DNA, 20 bp, synthetic construct
  misc_feature 1..20: note = chemically synthesized
  source 1..20: mol_type = other DNA
agaaaagacacacagacaaa

SEQ ID NO: 50499 - DNA, 20 bp, synthetic construct
  misc_feature 1..20: note = chemically synthesized
  source 1..20: mol_type = other DNA
agacacacagacaaatggaa

SEQ ID NO: 50500 - DNA, 20 bp, synthetic construct
  misc_feature 1..20: note = chemically synthesized
  source 1..20: mol_type = other DNA
cacagacaaatggaacagaa

SEQ ID NO: 50501 - DNA, 20 bp, synthetic construct
  misc_feature 1..20: note = chemically synthesized
  source 1..20: mol_type = other DNA
cagacaaatggaacagaata

SEQ ID NO: 50502 - DNA, 20 bp, synthetic construct
  misc_feature 1..20: note = chemically synthesized
  source 1..20: mol_type = other DNA
gacaaatggaacagaataga

SEQ ID NO: 50503 - DNA, 20 bp, synthetic construct
  misc_feature 1..20: note = chemically synthesized
  source 1..20: mol_type = other DNA
atggaacagaatagagagcc

SEQ ID NO: 50504 - DNA, 20 bp, synthetic construct
  misc_feature 1..20: note = chemically synthesized
  source 1..20: mol_type = other DNA
agaatagagagcccagaaat

SEQ ID NO: 50505 - DNA, 20 bp, synthetic construct
  misc_feature 1..20: note = chemically synthesized
  source 1..20: mol_type = other DNA
caaccatctgatctttgaca

SEQ ID NO: 50506 - DNA, 20 bp, synthetic construct
  misc_feature 1..20: note = chemically synthesized
  source 1..20: mol_type = other DNA
ttgacaaagctgataaaaac

SEQ ID NO: 50507 - DNA, 20 bp, synthetic construct
  misc_feature 1..20: note = chemically synthesized
  source 1..20: mol_type = other DNA
agctgataaaaacaagcaat

SEQ ID NO: 50508 - DNA, 20 bp, synthetic construct
  misc_feature 1..20: note = chemically synthesized
  source 1..20: mol_type = other DNA
gctgataaaaacaagcaatg

SEQ ID NO: 50509 - DNA, 20 bp, synthetic construct
  misc_feature 1..20: note = chemically synthesized
  source 1..20: mol_type = other DNA
taaaaacaagcaatgaggaa

SEQ ID NO: 50510 - DNA, 20 bp, synthetic construct
  misc_feature 1..20: note = chemically synthesized
  source 1..20: mol_type = other DNA
gaaaagacaccctattcaac

SEQ ID NO: 50511 - DNA, 20 bp, synthetic construct
  misc_feature 1..20: note = chemically synthesized
  source 1..20: mol_type = other DNA
aagacaccctattcaacaag

SEQ ID NO: 50512 - DNA, 20 bp, synthetic construct
  misc_feature 1..20: note = chemically synthesized
  source 1..20: mol_type = other DNA
ccctattcaacaagtggtgt

SEQ ID NO: 50513 - DNA, 20 bp, synthetic construct
  misc_feature 1..20: note = chemically synthesized
  source 1..20: mol_type = other DNA
cctattcaacaagtggtgtt

SEQ ID NO: 50514 - DNA, 20 bp, synthetic construct
  misc_feature 1..20: note = chemically synthesized
  source 1..20: mol_type = other DNA
gataactgactaaccgtatg

SEQ ID NO: 50515 - DNA, 20 bp, synthetic construct
  misc_feature 1..20: note = chemically synthesized
  source 1..20: mol_type = other DNA
aactgactaaccgtatgtag

SEQ ID NO: 50516 - DNA, 20 bp, synthetic construct
  misc_feature 1..20: note = chemically synthesized
  source 1..20: mol_type = other DNA
cgtatgtagaagattgaaac

SEQ ID NO: 50517 - DNA, 20 bp, synthetic construct
  misc_feature 1..20: note = chemically synthesized
  source 1..20: mol_type = other DNA
tcatatacacaaataaactc

SEQ ID NO: 50518 - DNA, 20 bp, synthetic construct
  misc_feature 1..20: note = chemically synthesized
  source 1..20: mol_type = other DNA
atacacaaataaactcaaga

SEQ ID NO: 50519 - DNA, 20 bp, synthetic construct
  misc_feature 1..20: note = chemically synthesized
  source 1..20: mol_type = other DNA
caaataaactcaagatggat

SEQ ID NO: 50520 - DNA, 20 bp, synthetic construct
  misc_feature 1..20: note = chemically synthesized
  source 1..20: mol_type = other DNA
aataaactcaagatggatta

SEQ ID NO: 50521 - DNA, 20 bp, synthetic construct
  misc_feature 1..20: note = chemically synthesized
  source 1..20: mol_type = other DNA
caaactataaaaatgcttga

SEQ ID NO: 50522 - DNA, 20 bp, synthetic construct
  misc_feature 1..20: note = chemically synthesized
  source 1..20: mol_type = other DNA
aaaaatgcttgaaagcaacc

SEQ ID NO: 50523 - DNA, 20 bp, synthetic construct
  misc_feature 1..20: note = chemically synthesized
  source 1..20: mol_type = other DNA
aaaatgcttgaaagcaacct

SEQ ID NO: 50524 - DNA, 20 bp, synthetic construct
  misc_feature 1..20: note = chemically synthesized
  source 1..20: mol_type = other DNA
caacctaggcaataccattc

SEQ ID NO: 50525 - DNA, 20 bp, synthetic construct
  misc_feature 1..20: note = chemically synthesized
  source 1..20: mol_type = other DNA
ggcaataccattccggacat

SEQ ID NO: 50526 - DNA, 20 bp, synthetic construct
  misc_feature 1..20: note = chemically synthesized
  source 1..20: mol_type = other DNA
aataccattccggacataag

SEQ ID NO: 50527 - DNA, 20 bp, synthetic construct
  misc_feature 1..20: note = chemically synthesized
  source 1..20: mol_type = other DNA
ataccattccggacataagc

SEQ ID NO: 50528 - DNA, 20 bp, synthetic construct
  misc_feature 1..20: note = chemically synthesized
  source 1..20: mol_type = other DNA
taccattccggacataagca

SEQ ID NO: 50529 - DNA, 20 bp, synthetic construct
  misc_feature 1..20: note = chemically synthesized
  source 1..20: mol_type = other DNA
accattccggacataagcag

SEQ ID NO: 50530 - DNA, 20 bp, synthetic construct
  misc_feature 1..20: note = chemically synthesized
  source 1..20: mol_type = other DNA
tccggacataagcaggggca

SEQ ID NO: 50531 - DNA, 20 bp, synthetic construct
  misc_feature 1..20: note = chemically synthesized
  source 1..20: mol_type = other DNA
ggggcaaagatttcatgaca

SEQ ID NO: 50532 - DNA, 20 bp, synthetic construct
  misc_feature 1..20: note = chemically synthesized
  source 1..20: mol_type = other DNA
tttcatgacaaagatgccaa

SEQ ID NO: 50533 - DNA, 20 bp, synthetic construct
  misc_feature 1..20: note = chemically synthesized
  source 1..20: mol_type = other DNA
aaagatgccaacagtcattg

SEQ ID NO: 50534 - DNA, 20 bp, synthetic construct
  misc_feature 1..20: note = chemically synthesized
  source 1..20: mol_type = other DNA
gccaacagtcattgcagcaa

SEQ ID NO: 50535 - DNA, 20 bp, synthetic construct
  misc_feature 1..20: note = chemically synthesized
  source 1..20: mol_type = other DNA
caaaagcaaaaattgacaaa

SEQ ID NO: 50536 - DNA, 20 bp, synthetic construct
  misc_feature 1..20: note = chemically synthesized
  source 1..20: mol_type = other DNA
aaaagcaaaaattgacaaat

SEQ ID NO: 50537 - DNA, 20 bp, synthetic construct
  misc_feature 1..20: note = chemically synthesized
  source 1..20: mol_type = other DNA
aataggatctaattaaaata

SEQ ID NO: 50538 - DNA, 20 bp, synthetic construct
  misc_feature 1..20: note = chemically synthesized
  source 1..20: mol_type = other DNA
attaaaataaagtttctgca

SEQ ID NO: 50539 - DNA, 20 bp, synthetic construct
  misc_feature 1..20: note = chemically synthesized
  source 1..20: mol_type = other DNA
ataaagtttctgcacagcaa

SEQ ID NO: 50540 - DNA, 20 bp, synthetic construct
  misc_feature 1..20: note = chemically synthesized
  source 1..20: mol_type = other DNA
agcaaaagaaactatcaact

SEQ ID NO: 50541 - DNA, 20 bp, synthetic construct
  misc_feature 1..20: note = chemically synthesized
  source 1..20: mol_type = other DNA
tcaactgagtaaacaaccta

SEQ ID NO: 50542 - DNA, 20 bp, synthetic construct
  misc_feature 1..20: note = chemically synthesized
  source 1..20: mol_type = other DNA
tgagtaaacaacctatagaa

SEQ ID NO: 50543 - DNA, 20 bp, synthetic construct
  misc_feature 1..20: note = chemically synthesized
  source 1..20: mol_type = other DNA
gagtaaacaacctatagaat

SEQ ID NO: 50544 - DNA, 20 bp, synthetic construct
  misc_feature 1..20: note = chemically synthesized
  source 1..20: mol_type = other DNA
gtaaacaacctatagaatgg

SEQ ID NO: 50545 - DNA, 20 bp, synthetic construct
  misc_feature 1..20: note = chemically synthesized
  source 1..20: mol_type = other DNA
tgcaaactatgcatccaaca

SEQ ID NO: 50546 - DNA, 20 bp, synthetic construct
  misc_feature 1..20: note = chemically synthesized
  source 1..20: mol_type = other DNA
gcaaactatgcatccaacaa

SEQ ID NO: 50547 - DNA, 20 bp, synthetic construct
  misc_feature 1..20: note = chemically synthesized
  source 1..20: mol_type = other DNA
tccaacaaaggcctaatatt

SEQ ID NO: 50548 - DNA, 20 bp, synthetic construct
  misc_feature 1..20: note = chemically synthesized
  source 1..20: mol_type = other DNA
gcctaatattcagaatctat

SEQ ID NO: 50549 - DNA, 20 bp, synthetic construct
  misc_feature 1..20: note = chemically synthesized
  source 1..20: mol_type = other DNA
cctaatattcagaatctata

SEQ ID NO: 50550 - DNA, 20 bp, synthetic construct
  misc_feature 1..20: note = chemically synthesized
  source 1..20: mol_type = other DNA
aggaacttaaatgaatctac

SEQ ID NO: 50551 - DNA, 20 bp, synthetic construct
  misc_feature 1..20: note = chemically synthesized
  source 1..20: mol_type = other DNA
acaaacaatgccacaaaaaa

SEQ ID NO: 50552 - DNA, 20 bp, synthetic construct
  misc_feature 1..20: note = chemically synthesized
  source 1..20: mol_type = other DNA
caaacaatgccacaaaaaat

SEQ ID NO: 50553 - DNA, 20 bp, synthetic construct
  misc_feature 1..20: note = chemically synthesized
  source 1..20: mol_type = other DNA
aatgccacaaaaaatgggta

SEQ ID NO: 50554 - DNA, 20 bp, synthetic construct
  misc_feature 1..20: note = chemically synthesized
  source 1..20: mol_type = other DNA
atgccacaaaaaatgggtaa

SEQ ID NO: 50555 - DNA, 20 bp, synthetic construct
  misc_feature 1..20: note = chemically synthesized
  source 1..20: mol_type = other DNA
aaatgggtaaaggacatgaa

SEQ ID NO: 50556 - DNA, 20 bp, synthetic construct
  misc_feature 1..20: note = chemically synthesized
  source 1..20: mol_type = other DNA
gggtaaaggacatgaacaga

SEQ ID NO: 50557 - DNA, 20 bp, synthetic construct
  misc_feature 1..20: note = chemically synthesized
  source 1..20: mol_type = other DNA
catgaacagacagtattcaa

SEQ ID NO: 50558 - DNA, 20 bp, synthetic construct
  misc_feature 1..20: note = chemically synthesized
  source 1..20: mol_type = other DNA
gaacagacagtattcaaaag

SEQ ID NO: 50559 - DNA, 20 bp, synthetic construct
  misc_feature 1..20: note = chemically synthesized
  source 1..20: mol_type = other DNA
ttcaaaagaagacatacatg

SEQ ID NO: 50560 - DNA, 20 bp, synthetic construct
  misc_feature 1..20: note = chemically synthesized
  source 1..20: mol_type = other DNA
aagacatacatgtggccacc

SEQ ID NO: 50561 - DNA, 20 bp, synthetic construct
  misc_feature 1..20: note = chemically synthesized
  source 1..20: mol_type = other DNA
ggccaccaagcatatgaaaa

SEQ ID NO: 50562 - DNA, 20 bp, synthetic construct
  misc_feature 1..20: note = chemically synthesized
  source 1..20: mol_type = other DNA
ccaagcatatgaaaaaagct

SEQ ID NO: 50563 - DNA, 20 bp, synthetic construct
  misc_feature 1..20: note = chemically synthesized
  source 1..20: mol_type = other DNA
agctcagtgtcactgatcat

SEQ ID NO: 50564 - DNA, 20 bp, synthetic construct
  misc_feature 1..20: note = chemically synthesized
  source 1..20: mol_type = other DNA
ctcagtgtcactgatcatta

SEQ ID NO: 50565 - DNA, 20 bp, synthetic construct
  misc_feature 1..20: note = chemically synthesized
  source 1..20: mol_type = other DNA
atgccaatcaaacccaaaat

SEQ ID NO: 50566 - DNA, 20 bp, synthetic construct
  misc_feature 1..20: note = chemically synthesized
  source 1..20: mol_type = other DNA
ttaaaatatctataattaaa

SEQ ID NO: 50567 - DNA, 20 bp, synthetic construct
  misc_feature 1..20: note = chemically synthesized
  source 1..20: mol_type = other DNA
attaaatagtcaaaaaataa

SEQ ID NO: 50568 - DNA, 20 bp, synthetic construct
  misc_feature 1..20: note = chemically synthesized
  source 1..20: mol_type = other DNA
tagtcaaaaaataacagatg

SEQ ID NO: 50569 - DNA, 20 bp, synthetic construct
  misc_feature 1..20: note = chemically synthesized
  source 1..20: mol_type = other DNA
agtcaaaaaataacagatgt

SEQ ID NO: 50570 - DNA, 20 bp, synthetic construct
  misc_feature 1..20: note = chemically synthesized
  source 1..20: mol_type = other DNA
aaaaaataacagatgtgggt

SEQ ID NO: 50571 - DNA, 20 bp, synthetic construct
  misc_feature 1..20: note = chemically synthesized
  source 1..20: mol_type = other DNA
aaaaataacagatgtgggta

SEQ ID NO: 50572 - DNA, 20 bp, synthetic construct
  misc_feature 1..20: note = chemically synthesized
  source 1..20: mol_type = other DNA
aacagatgtgggtaaggttg

SEQ ID NO: 50573 - DNA, 20 bp, synthetic construct
  misc_feature 1..20: note = chemically synthesized
  source 1..20: mol_type = other DNA
cagatgtgggtaaggttgtg

SEQ ID NO: 50574 - DNA, 20 bp, synthetic construct
  misc_feature 1..20: note = chemically synthesized
  source 1..20: mol_type = other DNA
gtgggtaaggttgtggagaa

SEQ ID NO: 50575 - DNA, 20 bp, synthetic construct
  misc_feature 1..20: note = chemically synthesized
  source 1..20: mol_type = other DNA
tgggtaaggttgtggagaaa

SEQ ID NO: 50576 - DNA, 20 bp, synthetic construct
  misc_feature 1..20: note = chemically synthesized
  source 1..20: mol_type = other DNA
gggtaaggttgtggagaaaa

SEQ ID NO: 50577 - DNA, 20 bp, synthetic construct
  misc_feature 1..20: note = chemically synthesized
  source 1..20: mol_type = other DNA
agggaatgtttatacaccat

SEQ ID NO: 50578 - DNA, 20 bp, synthetic construct
  misc_feature 1..20: note = chemically synthesized
  source 1..20: mol_type = other DNA
gaatgtttatacaccattgg

SEQ ID NO: 50579 - DNA, 20 bp, synthetic construct
  misc_feature 1..20: note = chemically synthesized
  source 1..20: mol_type = other DNA
ccattggtggcaatataaat

SEQ ID NO: 50580 - DNA, 20 bp, synthetic construct
  misc_feature 1..20: note = chemically synthesized
  source 1..20: mol_type = other DNA
ataaattagttcgaccattg

SEQ ID NO: 50581 - DNA, 20 bp, synthetic construct
  misc_feature 1..20: note = chemically synthesized
  source 1..20: mol_type = other DNA
attagttcgaccattgtaga

SEQ ID NO: 50582 - DNA, 20 bp, synthetic construct
  misc_feature 1..20: note = chemically synthesized
  source 1..20: mol_type = other DNA
agttcgaccattgtagacag

SEQ ID NO: 50583 - DNA, 20 bp, synthetic construct
  misc_feature 1..20: note = chemically synthesized
  source 1..20: mol_type = other DNA
gaccattgtagacagcagtg

SEQ ID NO: 50584 - DNA, 20 bp, synthetic construct
  misc_feature 1..20: note = chemically synthesized
  source 1..20: mol_type = other DNA
agcagtgtggcaattcccta

SEQ ID NO: 50585 - DNA, 20 bp, synthetic construct
  misc_feature 1..20: note = chemically synthesized
  source 1..20: mol_type = other DNA
attccctaaagacctaaaaa

SEQ ID NO: 50586 - DNA, 20 bp, synthetic construct
  misc_feature 1..20: note = chemically synthesized
  source 1..20: mol_type = other DNA
aacccaacaatcctattatt

SEQ ID NO: 50587 - DNA, 20 bp, synthetic construct
  misc_feature 1..20: note = chemically synthesized
  source 1..20: mol_type = other DNA
tattattgagtatataccta

SEQ ID NO: 50588 - DNA, 20 bp, synthetic construct
  misc_feature 1..20: note = chemically synthesized
  source 1..20: mol_type = other DNA
attattgagtatatacctaa

SEQ ID NO: 50589 - DNA, 20 bp, synthetic construct
  misc_feature 1..20: note = chemically synthesized
  source 1..20: mol_type = other DNA
aaataaaccattctatcaca

SEQ ID NO: 50590 - DNA, 20 bp, synthetic construct
  misc_feature 1..20: note = chemically synthesized
  source 1..20: mol_type = other DNA
atgcacacctgtgtccattg

SEQ ID NO: 50591 - DNA, 20 bp, synthetic construct
  misc_feature 1..20: note = chemically synthesized
  source 1..20: mol_type = other DNA
ccattgcagcataatcacaa

SEQ ID NO: 50592 - DNA, 20 bp, synthetic construct
  misc_feature 1..20: note = chemically synthesized
  source 1..20: mol_type = other DNA
gcagcataatcacaatagca

SEQ ID NO: 50593 - DNA, 20 bp, synthetic construct
  misc_feature 1..20: note = chemically synthesized
  source 1..20: mol_type = other DNA
taatcacaatagcaaagaca

SEQ ID NO: 50594 - DNA, 20 bp, synthetic construct
  misc_feature 1..20: note = chemically synthesized
  source 1..20: mol_type = other DNA
aaagacatagaatcaacctg

SEQ ID NO: 50595 - DNA, 20 bp, synthetic construct
  misc_feature 1..20: note = chemically synthesized
  source 1..20: mol_type = other DNA
aagacatagaatcaacctga

SEQ ID NO: 50596 - DNA, 20 bp, synthetic construct
  misc_feature 1..20: note = chemically synthesized
  source 1..20: mol_type = other DNA
gaatcaacctgaaggcccat

SEQ ID NO: 50597 - DNA, 20 bp, synthetic construct
  misc_feature 1..20: note = chemically synthesized
  source 1..20: mol_type = other DNA
tcaacctgaaggcccattag

SEQ ID NO: 50598 - DNA, 20 bp, synthetic construct
  misc_feature 1..20: note = chemically synthesized
  source 1..20: mol_type = other DNA
ccattagtggtataccgata

SEQ ID NO: 50599 - DNA, 20 bp, synthetic construct
  misc_feature 1..20: note = chemically synthesized
  source 1..20: mol_type = other DNA
gaacatgtacatatacacca

SEQ ID NO: 50600 - DNA, 20 bp, synthetic construct
  misc_feature 1..20: note = chemically synthesized
  source 1..20: mol_type = other DNA
atacaccatggaatactatg

SEQ ID NO: 50601 - DNA, 20 bp, synthetic construct
  misc_feature 1..20: note = chemically synthesized
  source 1..20: mol_type = other DNA
aatactatgtggccataaaa

SEQ ID NO: 50602 - DNA, 20 bp, synthetic construct
  misc_feature 1..20: note = chemically synthesized
  source 1..20: mol_type = other DNA
atgtggccataaaaaagaat

SEQ ID NO: 50603 - DNA, 20 bp, synthetic construct
  misc_feature 1..20: note = chemically synthesized
  source 1..20: mol_type = other DNA
gaatgagatcatgtcctttg

SEQ ID NO: 50604 - DNA, 20 bp, synthetic construct
  misc_feature 1..20: note = chemically synthesized
  source 1..20: mol_type = other DNA
aatgagatcatgtcctttgc

SEQ ID NO: 50605 - DNA, 20 bp, synthetic construct
  misc_feature 1..20: note = chemically synthesized
  source 1..20: mol_type = other DNA
tcatgtcctttgcaggaaca

SEQ ID NO: 50606 - DNA, 20 bp, synthetic construct
  misc_feature 1..20: note = chemically synthesized
  source 1..20: mol_type = other DNA
gtcctttgcaggaacatgga

SEQ ID NO: 50607 - DNA, 20 bp, synthetic construct
  misc_feature 1..20: note = chemically synthesized
  source 1..20: mol_type = other DNA
cctttgcaggaacatggatg

SEQ ID NO: 50608 - DNA, 20 bp, synthetic construct
  misc_feature 1..20: note = chemically synthesized
  source 1..20: mol_type = other DNA
tgcaggaacatggatggagc

SEQ ID NO: 50609 - DNA, 20 bp, synthetic construct
  misc_feature 1..20: note = chemically synthesized
  source 1..20: mol_type = other DNA
tatccttaacaaactaatgt

SEQ ID NO: 50610 - DNA, 20 bp, synthetic construct
  misc_feature 1..20: note = chemically synthesized
  source 1..20: mol_type = other DNA
ttaacaaactaatgtaagaa

SEQ ID NO: 50611 - DNA, 20 bp, synthetic construct
  misc_feature 1..20: note = chemically synthesized
  source 1..20: mol_type = other DNA
tactacatattatcacttac

SEQ ID NO: 50612 - DNA, 20 bp, synthetic construct
  misc_feature 1..20: note = chemically synthesized
  source 1..20: mol_type = other DNA
tacatattatcacttacaag

SEQ ID NO: 50613 - DNA, 20 bp, synthetic construct
  misc_feature 1..20: note = chemically synthesized
  source 1..20: mol_type = other DNA
acatattatcacttacaagt

SEQ ID NO: 50614 - DNA, 20 bp, synthetic construct
  misc_feature 1..20: note = chemically synthesized
  source 1..20: mol_type = other DNA
acaagtaggaactaaatgat

SEQ ID NO: 50615 - DNA, 20 bp, synthetic construct
  misc_feature 1..20: note = chemically synthesized
  source 1..20: mol_type = other DNA
gagaaaacatgcacacataa

SEQ ID NO: 50616 - DNA, 20 bp, synthetic construct
  misc_feature 1..20: note = chemically synthesized
  source 1..20: mol_type = other DNA
agaaaacatgcacacataac

SEQ ID NO: 50617 - DNA, 20 bp, synthetic construct
  misc_feature 1..20: note = chemically synthesized
  source 1..20: mol_type = other DNA
tgcacacataacgggaacaa

SEQ ID NO: 50618 - DNA, 20 bp, synthetic construct
  misc_feature 1..20: note = chemically synthesized
  source 1..20: mol_type = other DNA
aacgggaacaaaagacactg

SEQ ID NO: 50619 - DNA, 20 bp, synthetic construct
  misc_feature 1..20: note = chemically synthesized
  source 1..20: mol_type = other DNA
aaagacactgcagcctaatt

SEQ ID NO: 50620 - DNA, 20 bp, synthetic construct
  misc_feature 1..20: note = chemically synthesized
  source 1..20: mol_type = other DNA
cactgcagcctaattgagtt

SEQ ID NO: 50621 - DNA, 20 bp, synthetic construct
  misc_feature 1..20: note = chemically synthesized
  source 1..20: mol_type = other DNA
ctgcagcctaattgagtttg

SEQ ID NO: 50622 - DNA, 20 bp, synthetic construct
  misc_feature 1..20: note = chemically synthesized
  source 1..20: mol_type = other DNA
tgcagcctaattgagtttgg

SEQ ID NO: 50623 - DNA, 20 bp, synthetic construct
  misc_feature 1..20: note = chemically synthesized
  source 1..20: mol_type = other DNA
gcagcctaattgagtttgga

SEQ ID NO: 50624 - DNA, 20 bp, synthetic construct
  misc_feature 1..20: note = chemically synthesized
  source 1..20: mol_type = other DNA
gcctaattgagtttggaggg

SEQ ID NO: 50625 - DNA, 20 bp, synthetic construct
  misc_feature 1..20: note = chemically synthesized
  source 1..20: mol_type = other DNA
cctaattgagtttggagggt

SEQ ID NO: 50626 - DNA, 20 bp, synthetic construct
  misc_feature 1..20: note = chemically synthesized
  source 1..20: mol_type = other DNA
ttgagtttggagggtgggaa

SEQ ID NO: 50627 - DNA, 20 bp, synthetic construct
  misc_feature 1..20: note = chemically synthesized
  source 1..20: mol_type = other DNA
tgagtttggagggtgggaac

SEQ ID NO: 50628 - DNA, 20 bp, synthetic construct
  misc_feature 1..20: note = chemically synthesized
  source 1..20: mol_type = other DNA
gagtttggagggtgggaacg

SEQ ID NO: 50629 - DNA, 20 bp, synthetic construct
  misc_feature 1..20: note = chemically synthesized
  source 1..20: mol_type = other DNA
gtttggagggtgggaacggg

SEQ ID NO: 50630 - DNA, 20 bp, synthetic construct
  misc_feature 1..20: note = chemically synthesized
  source 1..20: mol_type = other DNA
tggagggtgggaacggggag

SEQ ID NO: 50631 - DNA, 20 bp, synthetic construct
  misc_feature 1..20: note = chemically synthesized
  source 1..20: mol_type = other DNA
gagggtgggaacggggagaa

SEQ ID NO: 50632 - DNA, 20 bp, synthetic construct
  misc_feature 1..20: note = chemically synthesized
  source 1..20: mol_type = other DNA
ggtgggaacggggagaagag

SEQ ID NO: 50633 - DNA, 20 bp, synthetic construct
  misc_feature 1..20: note = chemically synthesized
  source 1..20: mol_type = other DNA
aacggggagaagagcagaaa

SEQ ID NO: 50634 - DNA, 20 bp, synthetic construct
  misc_feature 1..20: note = chemically synthesized
  source 1..20: mol_type = other DNA
gagcagaaaaagtaactatt

SEQ ID NO: 50635 - DNA, 20 bp, synthetic construct
  misc_feature 1..20: note = chemically synthesized
  source 1..20: mol_type = other DNA
aaaaagtaactattgagtac

SEQ ID NO: 50636 - DNA, 20 bp, synthetic construct
  misc_feature 1..20: note = chemically synthesized
  source 1..20: mol_type = other DNA
aaaagtaactattgagtact

SEQ ID NO: 50637 - DNA, 20 bp, synthetic construct
  misc_feature 1..20: note = chemically synthesized
  source 1..20: mol_type = other DNA
aagtaactattgagtactgg

SEQ ID NO: 50638 - DNA, 20 bp, synthetic construct
  misc_feature 1..20: note = chemically synthesized
  source 1..20: mol_type = other DNA
acaaacccatgacatgtgtt

SEQ ID NO: 50639 - DNA, 20 bp, synthetic construct
  misc_feature 1..20: note = chemically synthesized
  source 1..20: mol_type = other DNA
gctatgtaacaaaccatcgt

SEQ ID NO: 50640 - DNA, 20 bp, synthetic construct
  misc_feature 1..20: note = chemically synthesized
  source 1..20: mol_type = other DNA
aacaaaccatcgtgagtctt

SEQ ID NO: 50641 - DNA, 20 bp, synthetic construct
  misc_feature 1..20: note = chemically synthesized
  source 1..20: mol_type = other DNA
aaaccatcgtgagtctttag

SEQ ID NO: 50642 - DNA, 20 bp, synthetic construct
  misc_feature 1..20: note = chemically synthesized
  source 1..20: mol_type = other DNA
ttgctcctctttccacctat

SEQ ID NO: 50643 - DNA, 20 bp, synthetic construct
  misc_feature 1..20: note = chemically synthesized
  source 1..20: mol_type = other DNA
attagtcacatatcttttta

SEQ ID NO: 50644 - DNA, 20 bp, synthetic construct
  misc_feature 1..20: note = chemically synthesized
  source 1..20: mol_type = other DNA
tatctttttatagttataat

SEQ ID NO: 50645 - DNA, 20 bp, synthetic construct
  misc_feature 1..20: note = chemically synthesized
  source 1..20: mol_type = other DNA
gttataatcagcttgttttt

SEQ ID NO: 50646 - DNA, 20 bp, synthetic construct
  misc_feature 1..20: note = chemically synthesized
  source 1..20: mol_type = other DNA
ttgttttatgcgcattatga

SEQ ID NO: 50647 - DNA, 20 bp, synthetic construct
  misc_feature 1..20: note = chemically synthesized
  source 1..20: mol_type = other DNA
gtaatttgattttatgcaac

SEQ ID NO: 50648 - DNA, 20 bp, synthetic construct
  misc_feature 1..20: note = chemically synthesized
  source 1..20: mol_type = other DNA
gcatttattgtgttcctata

SEQ ID NO: 50649 - DNA, 20 bp, synthetic construct
  misc_feature 1..20: note = chemically synthesized
  source 1..20: mol_type = other DNA
tataaaaactgtatatatgt

SEQ ID NO: 50650 - DNA, 20 bp, synthetic construct
  misc_feature 1..20: note = chemically synthesized
  source 1..20: mol_type = other DNA
taaaaactgtatatatgttg

SEQ ID NO: 50651 - DNA, 20 bp, synthetic construct
  misc_feature 1..20: note = chemically synthesized
  source 1..20: mol_type = other DNA
aaaaactgtatatatgttgg

SEQ ID NO: 50652 - DNA, 20 bp, synthetic construct
  misc_feature 1..20: note = chemically synthesized
  source 1..20: mol_type = other DNA
ttttgccctcaaaataatgt

SEQ ID NO: 50653 - DNA, 20 bp, synthetic construct
  misc_feature 1..20: note = chemically synthesized
  source 1..20: mol_type = other DNA
tcaaaataatgtgagcaatt

SEQ ID NO: 50654 - DNA, 20 bp, synthetic construct
  misc_feature 1..20: note = chemically synthesized
  source 1..20: mol_type = other DNA
atgtgagcaatttagtccta

SEQ ID NO: 50655 - DNA, 20 bp, synthetic construct
  misc_feature 1..20: note = chemically synthesized
  source 1..20: mol_type = other DNA
cctatggctcctatttgtta

SEQ ID NO: 50656 - DNA, 20 bp, synthetic construct
  misc_feature 1..20: note = chemically synthesized
  source 1..20: mol_type = other DNA
tcctatttgttaaagacatt

SEQ ID NO: 50657 - DNA, 20 bp, synthetic construct
  misc_feature 1..20: note = chemically synthesized
  source 1..20: mol_type = other DNA
attgttaatttctttctttc

SEQ ID NO: 50658 - DNA, 20 bp, synthetic construct
  misc_feature 1..20: note = chemically synthesized
  source 1..20: mol_type = other DNA
tctcttttttttttttttga

SEQ ID NO: 50659 - DNA, 20 bp, synthetic construct
  misc_feature 1..20: note = chemically synthesized
  source 1..20: mol_type = other DNA
ctcttttttttttttttgac

SEQ ID NO: 50660 - DNA, 20 bp, synthetic construct
  misc_feature 1..20: note = chemically synthesized
  source 1..20: mol_type = other DNA
tcttttttttttttttgaca

SEQ ID NO: 50661 - DNA, 20 bp, synthetic construct
  misc_feature 1..20: note = chemically synthesized
  source 1..20: mol_type = other DNA
cagggtctcgctgtgttgcc

SEQ ID NO: 50662 - DNA, 20 bp, synthetic construct
  misc_feature 1..20: note = chemically synthesized
  source 1..20: mol_type = other DNA
agggtctcgctgtgttgccc

SEQ ID NO: 50663 - DNA, 20 bp, synthetic construct
  misc_feature 1..20: note = chemically synthesized
  source 1..20: mol_type = other DNA
tctcgctgtgttgcccaggt

SEQ ID NO: 50664 - DNA, 20 bp, synthetic construct
  misc_feature 1..20: note = chemically synthesized
  source 1..20: mol_type = other DNA
tcgctgtgttgcccaggttg

SEQ ID NO: 50665 - DNA, 20 bp, synthetic construct
  misc_feature 1..20: note = chemically synthesized
  source 1..20: mol_type = other DNA
gtgttgcccaggttggagtg

SEQ ID NO: 50666 - DNA, 20 bp, synthetic construct
  misc_feature 1..20: note = chemically synthesized
  source 1..20: mol_type = other DNA
ttgcccaggttggagtgcag

SEQ ID NO: 50667 - DNA, 20 bp, synthetic construct
  misc_feature 1..20: note = chemically synthesized
  source 1..20: mol_type = other DNA
cactgcaatctccccctcct

SEQ ID NO: 50668 - DNA, 20 bp, synthetic construct
  misc_feature 1..20: note = chemically synthesized
  source 1..20: mol_type = other DNA
aatctccccctccttggctc

SEQ ID NO: 50669 - DNA, 20 bp, synthetic construct
  misc_feature 1..20: note = chemically synthesized
  source 1..20: mol_type = other DNA
ctcaagatatccttccacct

SEQ ID NO: 50670 - DNA, 20 bp, synthetic construct
  misc_feature 1..20: note = chemically synthesized
  source 1..20: mol_type = other DNA
tccttccacctcagcctccc

SEQ ID NO: 50671 - DNA, 20 bp, synthetic construct
  misc_feature 1..20: note = chemically synthesized
  source 1..20: mol_type = other DNA
ttccacctcagcctcccaag

SEQ ID NO: 50672 - DNA, 20 bp, synthetic construct
  misc_feature 1..20: note = chemically synthesized
  source 1..20: mol_type = other DNA
acctcagcctcccaagtagc

SEQ ID NO: 50673 - DNA, 20 bp, synthetic construct
  misc_feature 1..20: note = chemically synthesized
  source 1..20: mol_type = other DNA
cctcagcctcccaagtagct

SEQ ID NO: 50674 - DNA, 20 bp, synthetic construct
  misc_feature 1..20: note = chemically synthesized
  source 1..20: mol_type = other DNA
ctcccaagtagctgggacta

SEQ ID NO: 50675 - DNA, 20 bp, synthetic construct
  misc_feature 1..20: note = chemically synthesized
  source 1..20: mol_type = other DNA
tcccaagtagctgggactac

SEQ ID NO: 50676 - DNA, 20 bp, synthetic construct
  misc_feature 1..20: note = chemically synthesized
  source 1..20: mol_type = other DNA
caggcacgtaacaccatatt

SEQ ID NO: 50677 - DNA, 20 bp, synthetic construct
  misc_feature 1..20: note = chemically synthesized
  source 1..20: mol_type = other DNA
ctactttttaaaattttttg

SEQ ID NO: 50678 - DNA, 20 bp, synthetic construct
  misc_feature 1..20: note = chemically synthesized
  source 1..20: mol_type = other DNA
actttttaaaattttttgta

SEQ ID NO: 50679 - DNA, 20 bp, synthetic construct
  misc_feature 1..20: note = chemically synthesized
  source 1..20: mol_type = other DNA
tttttaaaattttttgtaga

SEQ ID NO: 50680 - DNA, 20 bp, synthetic construct
  misc_feature 1..20: note = chemically synthesized
  source 1..20: mol_type = other DNA
ttttaaaattttttgtagag

SEQ ID NO: 50681 - DNA, 20 bp, synthetic construct
  misc_feature 1..20: note = chemically synthesized
  source 1..20: mol_type = other DNA
tttaaaattttttgtagaga

SEQ ID NO: 50682 - DNA, 20 bp, synthetic construct
  misc_feature 1..20: note = chemically synthesized
  source 1..20: mol_type = other DNA
ttaaaattttttgtagagag

SEQ ID NO: 50683 - DNA, 20 bp, synthetic construct
  misc_feature 1..20: note = chemically synthesized
  source 1..20: mol_type = other DNA
ggggtttctccatgttgccc

SEQ ID NO: 50684 - DNA, 20 bp, synthetic construct
  misc_feature 1..20: note = chemically synthesized
  source 1..20: mol_type = other DNA
tttctccatgttgcccaagc

SEQ ID NO: 50685 - DNA, 20 bp, synthetic construct
  misc_feature 1..20: note = chemically synthesized
  source 1..20: mol_type = other DNA
caagctggtctccaactcct

SEQ ID NO: 50686 - DNA, 20 bp, synthetic construct
  misc_feature 1..20: note = chemically synthesized
  source 1..20: mol_type = other DNA
agctcaaatcgttctccctc

SEQ ID NO: 50687 - DNA, 20 bp, synthetic construct
  misc_feature 1..20: note = chemically synthesized
  source 1..20: mol_type = other DNA
aatcgttctccctccggcct

SEQ ID NO: 50688 - DNA, 20 bp, synthetic construct
  misc_feature 1..20: note = chemically synthesized
  source 1..20: mol_type = other DNA
tccggcctcggctgtgatta

SEQ ID NO: 50689 - DNA, 20 bp, synthetic construct
  misc_feature 1..20: note = chemically synthesized
  source 1..20: mol_type = other DNA
ccggcctcggctgtgattac

SEQ ID NO: 50690 - DNA, 20 bp, synthetic construct
  misc_feature 1..20: note = chemically synthesized
  source 1..20: mol_type = other DNA
tcggctgtgattacaggtgt

SEQ ID NO: 50691 - DNA, 20 bp, synthetic construct
  misc_feature 1..20: note = chemically synthesized
  source 1..20: mol_type = other DNA
caggtgtgagccactgtgct

SEQ ID NO: 50692 - DNA, 20 bp, synthetic construct
  misc_feature 1..20: note = chemically synthesized
  source 1..20: mol_type = other DNA
gtgagccactgtgcttggcc

SEQ ID NO: 50693 - DNA, 20 bp, synthetic construct
  misc_feature 1..20: note = chemically synthesized
  source 1..20: mol_type = other DNA
ctgttattttctaatccttc

SEQ ID NO: 50694 - DNA, 20 bp, synthetic construct
  misc_feature 1..20: note = chemically synthesized
  source 1..20: mol_type = other DNA
tgttattttctaatccttcg

SEQ ID NO: 50695 - DNA, 20 bp, synthetic construct
  misc_feature 1..20: note = chemically synthesized
  source 1..20: mol_type = other DNA
tctaatccttcgaggaactc

SEQ ID NO: 50696 - DNA, 20 bp, synthetic construct
  misc_feature 1..20: note = chemically synthesized
  source 1..20: mol_type = other DNA
tatcttgaaaactaattcaa

SEQ ID NO: 50697 - DNA, 20 bp, synthetic construct
  misc_feature 1..20: note = chemically synthesized
  source 1..20: mol_type = other DNA
atcttgaaaactaattcaaa

SEQ ID NO: 50698 - DNA, 20 bp, synthetic construct
  misc_feature 1..20: note = chemically synthesized
  source 1..20: mol_type = other DNA
ctaattcaaaaggtactaac

SEQ ID NO: 50699 - DNA, 20 bp, synthetic construct
  misc_feature 1..20: note = chemically synthesized
  source 1..20: mol_type = other DNA
tcaaaaggtactaacgagat

SEQ ID NO: 50700 - DNA, 20 bp, synthetic construct
  misc_feature 1..20: note = chemically synthesized
  source 1..20: mol_type = other DNA
caaaaggtactaacgagatt

SEQ ID NO: 50701 - DNA, 20 bp, synthetic construct
  misc_feature 1..20: note = chemically synthesized
  source 1..20: mol_type = other DNA
aaggtactaacgagattagg

SEQ ID NO: 50702 - DNA, 20 bp, synthetic construct
  misc_feature 1..20: note = chemically synthesized
  source 1..20: mol_type = other DNA
acgagattaggaagtgcccc

SEQ ID NO: 50703 - DNA, 20 bp, synthetic construct
  misc_feature 1..20: note = chemically synthesized
  source 1..20: mol_type = other DNA
gagattaggaagtgccccga

SEQ ID NO: 50704 - DNA, 20 bp, synthetic construct
  misc_feature 1..20: note = chemically synthesized
  source 1..20: mol_type = other DNA
gattaggaagtgccccgaga

SEQ ID NO: 50705 - DNA, 20 bp, synthetic construct
  misc_feature 1..20: note = chemically synthesized
  source 1..20: mol_type = other DNA
aagtgccccgagagagtgca

SEQ ID NO: 50706 - DNA, 20 bp, synthetic construct
  misc_feature 1..20: note = chemically synthesized
  source 1..20: mol_type = other DNA
gtgccccgagagagtgcata

SEQ ID NO: 50707 - DNA, 20 bp, synthetic construct
  misc_feature 1..20: note = chemically synthesized
  source 1..20: mol_type = other DNA
tgccccgagagagtgcatag

SEQ ID NO: 50708 - DNA, 20 bp, synthetic construct
  misc_feature 1..20: note = chemically synthesized
  source 1..20: mol_type = other DNA
ccccgagagagtgcatagag

SEQ ID NO: 50709 - DNA, 20 bp, synthetic construct
  misc_feature 1..20: note = chemically synthesized
  source 1..20: mol_type = other DNA
ccgagagagtgcatagagga

SEQ ID NO: 50710 - DNA, 20 bp, synthetic construct
  misc_feature 1..20: note = chemically synthesized
  source 1..20: mol_type = other DNA
cgagagagtgcatagaggag

SEQ ID NO: 50711 - DNA, 20 bp, synthetic construct
  misc_feature 1..20: note = chemically synthesized
  source 1..20: mol_type = other DNA
gagagagtgcatagaggaga

SEQ ID NO: 50712 - DNA, 20 bp, synthetic construct
  misc_feature 1..20: note = chemically synthesized
  source 1..20: mol_type = other DNA
agagtgcatagaggagaggg

SEQ ID NO: 50713 - DNA, 20 bp, synthetic construct
  misc_feature 1..20: note = chemically synthesized
  source 1..20: mol_type = other DNA
gtgcatagaggagagggtag

SEQ ID NO: 50714 - DNA, 20 bp, synthetic construct
  misc_feature 1..20: note = chemically synthesized
  source 1..20: mol_type = other DNA
tagaggagagggtagaagta

SEQ ID NO: 50715 - DNA, 20 bp, synthetic construct
  misc_feature 1..20: note = chemically synthesized
  source 1..20: mol_type = other DNA
ggagagggtagaagtaaagc

SEQ ID NO: 50716 - DNA, 20 bp, synthetic construct
  misc_feature 1..20: note = chemically synthesized
  source 1..20: mol_type = other DNA
gagagggtagaagtaaagct

SEQ ID NO: 50717 - DNA, 20 bp, synthetic construct
  misc_feature 1..20: note = chemically synthesized
  source 1..20: mol_type = other DNA
taaagctgggtttgctttgt

SEQ ID NO: 50718 - DNA, 20 bp, synthetic construct
  misc_feature 1..20: note = chemically synthesized
  source 1..20: mol_type = other DNA
ctgggtttgctttgttagtg

SEQ ID NO: 50719 - DNA, 20 bp, synthetic construct
  misc_feature 1..20: note = chemically synthesized
  source 1..20: mol_type = other DNA
tgggtttgctttgttagtga

SEQ ID NO: 50720 - DNA, 20 bp, synthetic construct
  misc_feature 1..20: note = chemically synthesized
  source 1..20: mol_type = other DNA
agtgaaggaataaaatgcat

SEQ ID NO: 50721 - DNA, 20 bp, synthetic construct
  misc_feature 1..20: note = chemically synthesized
  source 1..20: mol_type = other DNA
tgaaggaataaaatgcatca

SEQ ID NO: 50722 - DNA, 20 bp, synthetic construct
  misc_feature 1..20: note = chemically synthesized
  source 1..20: mol_type = other DNA
gaaggaataaaatgcatcag

SEQ ID NO: 50723 - DNA, 20 bp, synthetic construct
  misc_feature 1..20: note = chemically synthesized
  source 1..20: mol_type = other DNA
aaggaataaaatgcatcaga

SEQ ID NO: 50724 - DNA, 20 bp, synthetic construct
  misc_feature 1..20: note = chemically synthesized
  source 1..20: mol_type = other DNA
catcagagggccgaccttct

SEQ ID NO: 50725 - DNA, 20 bp, synthetic construct
  misc_feature 1..20: note = chemically synthesized
  source 1..20: mol_type = other DNA
ccgaccttctcagcctctga

SEQ ID NO: 50726 - DNA, 20 bp, synthetic construct
  misc_feature 1..20: note = chemically synthesized
  source 1..20: mol_type = other DNA
cgaccttctcagcctctgat

SEQ ID NO: 50727 - DNA, 20 bp, synthetic construct
  misc_feature 1..20: note = chemically synthesized
  source 1..20: mol_type = other DNA
ctcagcctctgataggccct

SEQ ID NO: 50728 - DNA, 20 bp, synthetic construct
  misc_feature 1..20: note = chemically synthesized
  source 1..20: mol_type = other DNA
gcctctgataggccctgagc

SEQ ID NO: 50729 - DNA, 20 bp, synthetic construct
  misc_feature 1..20: note = chemically synthesized
  source 1..20: mol_type = other DNA
cctctgataggccctgagct

SEQ ID NO: 50730 - DNA, 20 bp, synthetic construct
  misc_feature 1..20: note = chemically synthesized
  source 1..20: mol_type = other DNA
tctgataggccctgagctgg

SEQ ID NO: 50731 - DNA, 20 bp, synthetic construct
  misc_feature 1..20: note = chemically synthesized
  source 1..20: mol_type = other DNA
gccctgagctgggagctgct

SEQ ID NO: 50732 - DNA, 20 bp, synthetic construct
  misc_feature 1..20: note = chemically synthesized
  source 1..20: mol_type = other DNA
ggagctgctaagccatcctg

SEQ ID NO: 50733 - DNA, 20 bp, synthetic construct
  misc_feature 1..20: note = chemically synthesized
  source 1..20: mol_type = other DNA
agctgctaagccatcctgca

SEQ ID NO: 50734 - DNA, 20 bp, synthetic construct
  misc_feature 1..20: note = chemically synthesized
  source 1..20: mol_type = other DNA
gctaagccatcctgcagagc

SEQ ID NO: 50735 - DNA, 20 bp, synthetic construct
  misc_feature 1..20: note = chemically synthesized
  source 1..20: mol_type = other DNA
aagccatcctgcagagcaag

SEQ ID NO: 50736 - DNA, 20 bp, synthetic construct
  misc_feature 1..20: note = chemically synthesized
  source 1..20: mol_type = other DNA
agccatcctgcagagcaagt

SEQ ID NO: 50737 - DNA, 20 bp, synthetic construct
  misc_feature 1..20: note = chemically synthesized
  source 1..20: mol_type = other DNA
ccatcctgcagagcaagtgg

SEQ ID NO: 50738 - DNA, 20 bp, synthetic construct
  misc_feature 1..20: note = chemically synthesized
  source 1..20: mol_type = other DNA
tgcagagcaagtgggagaaa

SEQ ID NO: 50739 - DNA, 20 bp, synthetic construct
  misc_feature 1..20: note = chemically synthesized
  source 1..20: mol_type = other DNA
cagagcaagtgggagaaaca

SEQ ID NO: 50740 - DNA, 20 bp, synthetic construct
  misc_feature 1..20: note = chemically synthesized
  source 1..20: mol_type = other DNA
agagcaagtgggagaaacag

SEQ ID NO: 50741 - DNA, 20 bp, synthetic construct
  misc_feature 1..20: note = chemically synthesized
  source 1..20: mol_type = other DNA
gagcaagtgggagaaacaga

SEQ ID NO: 50742 - DNA, 20 bp, synthetic construct
  misc_feature 1..20: note = chemically synthesized
  source 1..20: mol_type = other DNA
gtgggagaaacagagggcat

SEQ ID NO: 50743 - DNA, 20 bp, synthetic construct
  misc_feature 1..20: note = chemically synthesized
  source 1..20: mol_type = other DNA
tgggagaaacagagggcatt

SEQ ID NO: 50744 - DNA, 20 bp, synthetic construct
  misc_feature 1..20: note = chemically synthesized
  source 1..20: mol_type = other DNA
agaaacagagggcattaggt

SEQ ID NO: 50745 - DNA, 20 bp, synthetic construct
  misc_feature 1..20: note = chemically synthesized
  source 1..20: mol_type = other DNA
agagggcattaggtcagact

SEQ ID NO: 50746 - DNA, 20 bp, synthetic construct
  misc_feature 1..20: note = chemically synthesized
  source 1..20: mol_type = other DNA
gggcattaggtcagacttgg

SEQ ID NO: 50747 - DNA, 20 bp, synthetic construct
  misc_feature 1..20: note = chemically synthesized
  source 1..20: mol_type = other DNA
ccccatccacttgctcattc

SEQ ID NO: 50748 - DNA, 20 bp, synthetic construct
  misc_feature 1..20: note = chemically synthesized
  source 1..20: mol_type = other DNA
atccacttgctcattctgga

SEQ ID NO: 50749 - DNA, 20 bp, synthetic construct
  misc_feature 1..20: note = chemically synthesized
  source 1..20: mol_type = other DNA
cacttgctcattctggatgg

SEQ ID NO: 50750 - DNA, 20 bp, synthetic construct
  misc_feature 1..20: note = chemically synthesized
  source 1..20: mol_type = other DNA
acttgctcattctggatggc

SEQ ID NO: 50751 - DNA, 20 bp, synthetic construct
  misc_feature 1..20: note = chemically synthesized
  source 1..20: mol_type = other DNA
ctcattctggatggcaggat

SEQ ID NO: 50752 - DNA, 20 bp, synthetic construct
  misc_feature 1..20: note = chemically synthesized
  source 1..20: mol_type = other DNA
tcattctggatggcaggatt

SEQ ID NO: 50753 - DNA, 20 bp, synthetic construct
  misc_feature 1..20: note = chemically synthesized
  source 1..20: mol_type = other DNA
tttatatttccctaccatat

SEQ ID NO: 50754 - DNA, 20 bp, synthetic construct
  misc_feature 1..20: note = chemically synthesized
  source 1..20: mol_type = other DNA
catattagcttgtgcactta

SEQ ID NO: 50755 - DNA, 20 bp, synthetic construct
  misc_feature 1..20: note = chemically synthesized
  source 1..20: mol_type = other DNA
atattagcttgtgcacttaa

SEQ ID NO: 50756 - DNA, 20 bp, synthetic construct
  misc_feature 1..20: note = chemically synthesized
  source 1..20: mol_type = other DNA
ttagcttgtgcacttaaagg

SEQ ID NO: 50757 - DNA, 20 bp, synthetic construct
  misc_feature 1..20: note = chemically synthesized
  source 1..20: mol_type = other DNA
ttgtgcacttaaaggaagtt

SEQ ID NO: 50758 - DNA, 20 bp, synthetic construct
  misc_feature 1..20: note = chemically synthesized
  source 1..20: mol_type = other DNA
gcacttaaaggaagtttaga

SEQ ID NO: 50759 - DNA, 20 bp, synthetic construct
  misc_feature 1..20: note = chemically synthesized
  source 1..20: mol_type = other DNA
tttagatagccttgactcca

SEQ ID NO: 50760 - DNA, 20 bp, synthetic construct
  misc_feature 1..20: note = chemically synthesized
  source 1..20: mol_type = other DNA
ttagatagccttgactccat

SEQ ID NO: 50761 - DNA, 20 bp, synthetic construct
  misc_feature 1..20: note = chemically synthesized
  source 1..20: mol_type = other DNA
tagatagccttgactccatg

SEQ ID NO: 50762 - DNA, 20 bp, synthetic construct
  misc_feature 1..20: note = chemically synthesized
  source 1..20: mol_type = other DNA
agccttgactccatggggaa

SEQ ID NO: 50763 - DNA, 20 bp, synthetic construct
  misc_feature 1..20: note = chemically synthesized
  source 1..20: mol_type = other DNA
gccttgactccatggggaaa

SEQ ID NO: 50764 - DNA, 20 bp, synthetic construct
  misc_feature 1..20: note = chemically synthesized
  source 1..20: mol_type = other DNA
actccatggggaaaaggaaa

SEQ ID NO: 50765 - DNA, 20 bp, synthetic construct
  misc_feature 1..20: note = chemically synthesized
  source 1..20: mol_type = other DNA
ggaaaaggaaaaagtacatt

SEQ ID NO: 50766 - DNA, 20 bp, synthetic construct
  misc_feature 1..20: note = chemically synthesized
  source 1..20: mol_type = other DNA
aaaggaaaaagtacatttag

SEQ ID NO: 50767 - DNA, 20 bp, synthetic construct
  misc_feature 1..20: note = chemically synthesized
  source 1..20: mol_type = other DNA
aaggaaaaagtacatttagt

SEQ ID NO: 50768 - DNA, 20 bp, synthetic construct
  misc_feature 1..20: note = chemically synthesized
  source 1..20: mol_type = other DNA
aggaaaaagtacatttagtg

SEQ ID NO: 50769 - DNA, 20 bp, synthetic construct
  misc_feature 1..20: note = chemically synthesized
  source 1..20: mol_type = other DNA
aaagtacatttagtggggtg

SEQ ID NO: 50770 - DNA, 20 bp, synthetic construct
  misc_feature 1..20: note = chemically synthesized
  source 1..20: mol_type = other DNA
aagtacatttagtggggtgt

SEQ ID NO: 50771 - DNA, 20 bp, synthetic construct
  misc_feature 1..20: note = chemically synthesized
  source 1..20: mol_type = other DNA
ttagtggggtgtgggactgt

SEQ ID NO: 50772 - DNA, 20 bp, synthetic construct
  misc_feature 1..20: note = chemically synthesized
  source 1..20: mol_type = other DNA
gtgtgggactgttggattat

SEQ ID NO: 50773 - DNA, 20 bp, synthetic construct
  misc_feature 1..20: note = chemically synthesized
  source 1..20: mol_type = other DNA
gcatttctctcattctgttc

SEQ ID NO: 50774 - DNA, 20 bp, synthetic construct
  misc_feature 1..20: note = chemically synthesized
  source 1..20: mol_type = other DNA
tctctcattctgttccagtt

SEQ ID NO: 50775 - DNA, 20 bp, synthetic construct
  misc_feature 1..20: note = chemically synthesized
  source 1..20: mol_type = other DNA
ctctcattctgttccagttg

SEQ ID NO: 50776 - DNA, 20 bp, synthetic construct
  misc_feature 1..20: note = chemically synthesized
  source 1..20: mol_type = other DNA
cattctgttccagttgaggc

SEQ ID NO: 50777 - DNA, 20 bp, synthetic construct
  misc_feature 1..20: note = chemically synthesized
  source 1..20: mol_type = other DNA
gaggccagcttgcttcccac

SEQ ID NO: 50778 - DNA, 20 bp, synthetic construct
  misc_feature 1..20: note = chemically synthesized
  source 1..20: mol_type = other DNA
gccagcttgcttcccactag

SEQ ID NO: 50779 - DNA, 20 bp, synthetic construct
  misc_feature 1..20: note = chemically synthesized
  source 1..20: mol_type = other DNA
tgttctctttatacaattcc

SEQ ID NO: 50780 - DNA, 20 bp, synthetic construct
  misc_feature 1..20: note = chemically synthesized
  source 1..20: mol_type = other DNA
tctttatacaattcctagtc

SEQ ID NO: 50781 - DNA, 20 bp, synthetic construct
  misc_feature 1..20: note = chemically synthesized
  source 1..20: mol_type = other DNA
ttatacaattcctagtcaag

SEQ ID NO: 50782 - DNA, 20 bp, synthetic construct
  misc_feature 1..20: note = chemically synthesized
  source 1..20: mol_type = other DNA
tatacaattcctagtcaagt

SEQ ID NO: 50783 - DNA, 20 bp, synthetic construct
  misc_feature 1..20: note = chemically synthesized
  source 1..20: mol_type = other DNA
atacaattcctagtcaagta

SEQ ID NO: 50784 - DNA, 20 bp, synthetic construct
  misc_feature 1..20: note = chemically synthesized
  source 1..20: mol_type = other DNA
tacaattcctagtcaagtag

SEQ ID NO: 50785 - DNA, 20 bp, synthetic construct
  misc_feature 1..20: note = chemically synthesized
  source 1..20: mol_type = other DNA
cctagtcaagtaggggcaaa

SEQ ID NO: 50786 - DNA, 20 bp, synthetic construct
  misc_feature 1..20: note = chemically synthesized
  source 1..20: mol_type = other DNA
ttcatttattattgtttttc

SEQ ID NO: 50787 - DNA, 20 bp, synthetic construct
  misc_feature 1..20: note = chemically synthesized
  source 1..20: mol_type = other DNA
tcatttattattgtttttct

SEQ ID NO: 50788 - DNA, 20 bp, synthetic construct
  misc_feature 1..20: note = chemically synthesized
  source 1..20: mol_type = other DNA
attattgtttttctgggatg

SEQ ID NO: 50789 - DNA, 20 bp, synthetic construct
  misc_feature 1..20: note = chemically synthesized
  source 1..20: mol_type = other DNA
ttgtttttctgggatgtagc

SEQ ID NO: 50790 - DNA, 20 bp, synthetic construct
  misc_feature 1..20: note = chemically synthesized
  source 1..20: mol_type = other DNA
tgtttttctgggatgtagcc

SEQ ID NO: 50791 - DNA, 20 bp, synthetic construct
  misc_feature 1..20: note = chemically synthesized
  source 1..20: mol_type = other DNA
tttttctgggatgtagccag

SEQ ID NO: 50792 - DNA, 20 bp, synthetic construct
  misc_feature 1..20: note = chemically synthesized
  source 1..20: mol_type = other DNA
caggagcaatttaaacttgc

SEQ ID NO: 50793 - DNA, 20 bp, synthetic construct
  misc_feature 1..20: note = chemically synthesized
  source 1..20: mol_type = other DNA
ggagcaatttaaacttgctg

SEQ ID NO: 50794 - DNA, 20 bp, synthetic construct
  misc_feature 1..20: note = chemically synthesized
  source 1..20: mol_type = other DNA
caatttcttcaactacaaat

SEQ ID NO: 50795 - DNA, 20 bp, synthetic construct
  misc_feature 1..20: note = chemically synthesized
  source 1..20: mol_type = other DNA
acaaatgagaataataataa

SEQ ID NO: 50796 - DNA, 20 bp, synthetic construct
  misc_feature 1..20: note = chemically synthesized
  source 1..20: mol_type = other DNA
caaatgagaataataataac

SEQ ID NO: 50797 - DNA, 20 bp, synthetic construct
  misc_feature 1..20: note = chemically synthesized
  source 1..20: mol_type = other DNA
acgaactaattgtaataata

SEQ ID NO: 50798 - DNA, 20 bp, synthetic construct
  misc_feature 1..20: note = chemically synthesized
  source 1..20: mol_type = other DNA
gaactaaatgtaaatataca

SEQ ID NO: 50799 - DNA, 20 bp, synthetic construct
  misc_feature 1..20: note = chemically synthesized
  source 1..20: mol_type = other DNA
aactaaatgtaaatatacaa

SEQ ID NO: 50800 - DNA, 20 bp, synthetic construct
  misc_feature 1..20: note = chemically synthesized
  source 1..20: mol_type = other DNA
caaaggataaattcaaaatc

SEQ ID NO: 50801 - DNA, 20 bp, synthetic construct
  misc_feature 1..20: note = chemically synthesized
  source 1..20: mol_type = other DNA
aaaggataaattcaaaatct

SEQ ID NO: 50802 - DNA, 20 bp, synthetic construct
  misc_feature 1..20: note = chemically synthesized
  source 1..20: mol_type = other DNA
attcaaaatctgggcacatg

SEQ ID NO: 50803 - DNA, 20 bp, synthetic construct
  misc_feature 1..20: note = chemically synthesized
  source 1..20: mol_type = other DNA
ttcaaaatctgggcacatgc

SEQ ID NO: 50804 - DNA, 20 bp, synthetic construct
  misc_feature 1..20: note = chemically synthesized
  source 1..20: mol_type = other DNA
gggcacatgcaggctgctat

SEQ ID NO: 50805 - DNA, 20 bp, synthetic construct
  misc_feature 1..20: note = chemically synthesized
  source 1..20: mol_type = other DNA
gcacatgcaggctgctataa

SEQ ID NO: 50806 - DNA, 20 bp, synthetic construct
  misc_feature 1..20: note = chemically synthesized
  source 1..20: mol_type = other DNA
agaaaacatctatgatatta

SEQ ID NO: 50807 - DNA, 20 bp, synthetic construct
  misc_feature 1..20: note = chemically synthesized
  source 1..20: mol_type = other DNA
gaaaacatctatgatattat

SEQ ID NO: 50808 - DNA, 20 bp, synthetic construct
  misc_feature 1..20: note = chemically synthesized
  source 1..20: mol_type = other DNA
gaccaaatgacattaaatta

SEQ ID NO: 50809 - DNA, 20 bp, synthetic construct
  misc_feature 1..20: note = chemically synthesized
  source 1..20: mol_type = other DNA
caaatgacattaaattatag

SEQ ID NO: 50810 - DNA, 20 bp, synthetic construct
  misc_feature 1..20: note = chemically synthesized
  source 1..20: mol_type = other DNA
aaatgacattaaattatagt

SEQ ID NO: 50811 - DNA, 20 bp, synthetic construct
  misc_feature 1..20: note = chemically synthesized
  source 1..20: mol_type = other DNA
aatgacattaaattatagtg

SEQ ID NO: 50812 - DNA, 20 bp, synthetic construct
  misc_feature 1..20: note = chemically synthesized
  source 1..20: mol_type = other DNA
tgacattaaattatagtggg

SEQ ID NO: 50813 - DNA, 20 bp, synthetic construct
  misc_feature 1..20: note = chemically synthesized
  source 1..20: mol_type = other DNA
gacattaaattatagtgggg

SEQ ID NO: 50814 - DNA, 20 bp, synthetic construct
  misc_feature 1..20: note = chemically synthesized
  source 1..20: mol_type = other DNA
aattatagtggggaggtaaa

SEQ ID NO: 50815 - DNA, 20 bp, synthetic construct
  misc_feature 1..20: note = chemically synthesized
  source 1..20: mol_type = other DNA
attatagtggggaggtaaac

SEQ ID NO: 50816 - DNA, 20 bp, synthetic construct
  misc_feature 1..20: note = chemically synthesized
  source 1..20: mol_type = other DNA
tagtggggaggtaaacaggt

SEQ ID NO: 50817 - DNA, 20 bp, synthetic construct
  misc_feature 1..20: note = chemically synthesized
  source 1..20: mol_type = other DNA
tggggaggtaaacaggttgg

SEQ ID NO: 50818 - DNA, 20 bp, synthetic construct
  misc_feature 1..20: note = chemically synthesized
  source 1..20: mol_type = other DNA
caggttggcagtgtatttta

SEQ ID NO: 50819 - DNA, 20 bp, synthetic construct
  misc_feature 1..20: note = chemically synthesized
  source 1..20: mol_type = other DNA
catatgcatattttatgacc

SEQ ID NO: 50820 - DNA, 20 bp, synthetic construct
  misc_feature 1..20: note = chemically synthesized
  source 1..20: mol_type = other DNA
ttttatgacctagcaattta

SEQ ID NO: 50821 - DNA, 20 bp, synthetic construct
  misc_feature 1..20: note = chemically synthesized
  source 1..20: mol_type = other DNA
atatatatacaaaaatatat

SEQ ID NO: 50822 - DNA, 20 bp, synthetic construct
  misc_feature 1..20: note = chemically synthesized
  source 1..20: mol_type = other DNA
aaaatatataagaatcttca

SEQ ID NO: 50823 - DNA, 20 bp, synthetic construct
  misc_feature 1..20: note = chemically synthesized
  source 1..20: mol_type = other DNA
atatataagaatcttcatag

SEQ ID NO: 50824 - DNA, 20 bp, synthetic construct
  misc_feature 1..20: note = chemically synthesized
  source 1..20: mol_type = other DNA
catagcagcaatttatatta

SEQ ID NO: 50825 - DNA, 20 bp, synthetic construct
  misc_feature 1..20: note = chemically synthesized
  source 1..20: mol_type = other DNA
gcaatttatattatagccaa

SEQ ID NO: 50826 - DNA, 20 bp, synthetic construct
  misc_feature 1..20: note = chemically synthesized
  source 1..20: mol_type = other DNA
tttatattatagccaaaagc

SEQ ID NO: 50827 - DNA, 20 bp, synthetic construct
  misc_feature 1..20: note = chemically synthesized
  source 1..20: mol_type = other DNA
atattatagccaaaagctag

SEQ ID NO: 50828 - DNA, 20 bp, synthetic construct
  misc_feature 1..20: note = chemically synthesized
  source 1..20: mol_type = other DNA
tattatagccaaaagctaga

SEQ ID NO: 50829 - DNA, 20 bp, synthetic construct
  misc_feature 1..20: note = chemically synthesized
  source 1..20: mol_type = other DNA
actcaaatatctatcaactg

SEQ ID NO: 50830 - DNA, 20 bp, synthetic construct
  misc_feature 1..20: note = chemically synthesized
  source 1..20: mol_type = other DNA
tcaaatatctatcaactgtg

SEQ ID NO: 50831 - DNA, 20 bp, synthetic construct
  misc_feature 1..20: note = chemically synthesized
  source 1..20: mol_type = other DNA
tggagtcaataaatatattg

SEQ ID NO: 50832 - DNA, 20 bp, synthetic construct
  misc_feature 1..20: note = chemically synthesized
  source 1..20: mol_type = other DNA
attgtggtatatacataaaa

SEQ ID NO: 50833 - DNA, 20 bp, synthetic construct
  misc_feature 1..20: note = chemically synthesized
  source 1..20: mol_type = other DNA
acataaaatagaatgacatt

SEQ ID NO: 50834 - DNA, 20 bp, synthetic construct
  misc_feature 1..20: note = chemically synthesized
  source 1..20: mol_type = other DNA
cagaaatgaaaaatcaacta

SEQ ID NO: 50835 - DNA, 20 bp, synthetic construct
  misc_feature 1..20: note = chemically synthesized
  source 1..20: mol_type = other DNA
aatcaactacagtcatacac

SEQ ID NO: 50836 - DNA, 20 bp, synthetic construct
  misc_feature 1..20: note = chemically synthesized
  source 1..20: mol_type = other DNA
cacaaacataatattgaata

SEQ ID NO: 50837 - DNA, 20 bp, synthetic construct
  misc_feature 1..20: note = chemically synthesized
  source 1..20: mol_type = other DNA
aacataatattgaataaagt

SEQ ID NO: 50838 - DNA, 20 bp, synthetic construct
  misc_feature 1..20: note = chemically synthesized
  source 1..20: mol_type = other DNA
tattgaataaagtcagacat

SEQ ID NO: 50839 - DNA, 20 bp, synthetic construct
  misc_feature 1..20: note = chemically synthesized
  source 1..20: mol_type = other DNA
aaagtcagacataagcaaca

SEQ ID NO: 50840 - DNA, 20 bp, synthetic construct
  misc_feature 1..20: note = chemically synthesized
  source 1..20: mol_type = other DNA
tgtatacacacttttaaaaa

SEQ ID NO: 50841 - DNA, 20 bp, synthetic construct
  misc_feature 1..20: note = chemically synthesized
  source 1..20: mol_type = other DNA
gtatacacacttttaaaaaa

SEQ ID NO: 50842 - DNA, 20 bp, synthetic construct
  misc_feature 1..20: note = chemically synthesized
  source 1..20: mol_type = other DNA
tatacacacttttaaaaaaa

SEQ ID NO: 50843 - DNA, 20 bp, synthetic construct
  misc_feature 1..20: note = chemically synthesized
  source 1..20: mol_type = other DNA
acttttaaaaaaagggacat

SEQ ID NO: 50844 - DNA, 20 bp, synthetic construct
  misc_feature 1..20: note = chemically synthesized
  source 1..20: mol_type = other DNA
gtgataaaaatgaattatat

SEQ ID NO: 50845 - DNA, 20 bp, synthetic construct
  misc_feature 1..20: note = chemically synthesized
  source 1..20: mol_type = other DNA
tgataaaaatgaattatatc

SEQ ID NO: 50846 - DNA, 20 bp, synthetic construct
  misc_feature 1..20: note = chemically synthesized
  source 1..20: mol_type = other DNA
atcaggataattattaactt

SEQ ID NO: 50847 - DNA, 20 bp, synthetic construct
  misc_feature 1..20: note = chemically synthesized
  source 1..20: mol_type = other DNA
caggataattattaactttg

SEQ ID NO: 50848 - DNA, 20 bp, synthetic construct
  misc_feature 1..20: note = chemically synthesized
  source 1..20: mol_type = other DNA
ttattaactttggagacaat

SEQ ID NO: 50849 - DNA, 20 bp, synthetic construct
  misc_feature 1..20: note = chemically synthesized
  source 1..20: mol_type = other DNA
ttaactttggagacaattag

SEQ ID NO: 50850 - DNA, 20 bp, synthetic construct
  misc_feature 1..20: note = chemically synthesized
  source 1..20: mol_type = other DNA
agacaattagtggaatgata

SEQ ID NO: 50851 - DNA, 20 bp, synthetic construct
  misc_feature 1..20: note = chemically synthesized
  source 1..20: mol_type = other DNA
acaattagtggaatgataaa

SEQ ID NO: 50852 - DNA, 20 bp, synthetic construct
  misc_feature 1..20: note = chemically synthesized
  source 1..20: mol_type = other DNA
ttagtggaatgataaagagt

SEQ ID NO: 50853 - DNA, 20 bp, synthetic construct
  misc_feature 1..20: note = chemically synthesized
  source 1..20: mol_type = other DNA
tctttaatttcctatcttat

SEQ ID NO: 50854 - DNA, 20 bp, synthetic construct
  misc_feature 1..20: note = chemically synthesized
  source 1..20: mol_type = other DNA
ctatcttattagttgttaca

SEQ ID NO: 50855 - DNA, 20 bp, synthetic construct
  misc_feature 1..20: note = chemically synthesized
  source 1..20: mol_type = other DNA
tatcttattagttgttacat

SEQ ID NO: 50856 - DNA, 20 bp, synthetic construct
  misc_feature 1..20: note = chemically synthesized
  source 1..20: mol_type = other DNA
tgggtgtgttcaccttccaa

SEQ ID NO: 50857 - DNA, 20 bp, synthetic construct
  misc_feature 1..20: note = chemically synthesized
  source 1..20: mol_type = other DNA
tcaccttccaaaagttaatt

SEQ ID NO: 50858 - DNA, 20 bp, synthetic construct
  misc_feature 1..20: note = chemically synthesized
  source 1..20: mol_type = other DNA
attaaaataaaaactaaatt

SEQ ID NO: 50859 - DNA, 20 bp, synthetic construct
  misc_feature 1..20: note = chemically synthesized
  source 1..20: mol_type = other DNA
taaatttagaaactaaacaa

SEQ ID NO: 50860 - DNA, 20 bp, synthetic construct
  misc_feature 1..20: note = chemically synthesized
  source 1..20: mol_type = other DNA
agaaactaaacaatggaaaa

SEQ ID NO: 50861 - DNA, 20 bp, synthetic construct
  misc_feature 1..20: note = chemically synthesized
  source 1..20: mol_type = other DNA
actaaacaatggaaaaaagt

SEQ ID NO: 50862 - DNA, 20 bp, synthetic construct
  misc_feature 1..20: note = chemically synthesized
  source 1..20: mol_type = other DNA
agaccatttctttgcatttc

SEQ ID NO: 50863 - DNA, 20 bp, synthetic construct
  misc_feature 1..20: note = chemically synthesized
  source 1..20: mol_type = other DNA
ccatttctttgcatttcaag

SEQ ID NO: 50864 - DNA, 20 bp, synthetic construct
  misc_feature 1..20: note = chemically synthesized
  source 1..20: mol_type = other DNA
tcaagaagtgcatactaact

SEQ ID NO: 50865 - DNA, 20 bp, synthetic construct
  misc_feature 1..20: note = chemically synthesized
  source 1..20: mol_type = other DNA
tgagatattacattcttaaa

SEQ ID NO: 50866 - DNA, 20 bp, synthetic construct
  misc_feature 1..20: note = chemically synthesized
  source 1..20: mol_type = other DNA
attacattcttaaatggctt

SEQ ID NO: 50867 - DNA, 20 bp, synthetic construct
  misc_feature 1..20: note = chemically synthesized
  source 1..20: mol_type = other DNA
cttaaatggctttagtcaat

SEQ ID NO: 50868 - DNA, 20 bp, synthetic construct
  misc_feature 1..20: note = chemically synthesized
  source 1..20: mol_type = other DNA
ttaaatggctttagtcaatt

SEQ ID NO: 50869 - DNA, 20 bp, synthetic construct
  misc_feature 1..20: note = chemically synthesized
  source 1..20: mol_type = other DNA
taaacatttgcttctaaatc

SEQ ID NO: 50870 - DNA, 20 bp, synthetic construct
  misc_feature 1..20: note = chemically synthesized
  source 1..20: mol_type = other DNA
aaacatttgcttctaaatct

SEQ ID NO: 50871 - DNA, 20 bp, synthetic construct
  misc_feature 1..20: note = chemically synthesized
  source 1..20: mol_type = other DNA
catttgcttctaaatctagg

SEQ ID NO: 50872 - DNA, 20 bp, synthetic construct
  misc_feature 1..20: note = chemically synthesized
  source 1..20: mol_type = other DNA
tagactgtcttaacttcctg

SEQ ID NO: 50873 - DNA, 20 bp, synthetic construct
  misc_feature 1..20: note = chemically synthesized
  source 1..20: mol_type = other DNA
actgtcttaacttcctgaag

SEQ ID NO: 50874 - DNA, 20 bp, synthetic construct
  misc_feature 1..20: note = chemically synthesized
  source 1..20: mol_type = other DNA
tgtcttaacttcctgaagaa

SEQ ID NO: 50875 - DNA, 20 bp, synthetic construct
  misc_feature 1..20: note = chemically synthesized
  source 1..20: mol_type = other DNA
gtcttaacttcctgaagaag

SEQ ID NO: 50876 - DNA, 20 bp, synthetic construct
  misc_feature 1..20: note = chemically synthesized
  source 1..20: mol_type = other DNA
tcttaacttcctgaagaaga

SEQ ID NO: 50877 - DNA, 20 bp, synthetic construct
  misc_feature 1..20: note = chemically synthesized
  source 1..20: mol_type = other DNA
taacttcctgaagaagaggg

SEQ ID NO: 50878 - DNA, 20 bp, synthetic construct
  misc_feature 1..20: note = chemically synthesized
  source 1..20: mol_type = other DNA
gagggaagaaataatgaaaa

SEQ ID NO: 50879 - DNA, 20 bp, synthetic construct
  misc_feature 1..20: note = chemically synthesized
  source 1..20: mol_type = other DNA
agggaagaaataatgaaaaa

SEQ ID NO: 50880 - DNA, 20 bp, synthetic construct
  misc_feature 1..20: note = chemically synthesized
  source 1..20: mol_type = other DNA
taatgaaaaaaggaaaataa

SEQ ID NO: 50881 - DNA, 20 bp, synthetic construct
  misc_feature 1..20: note = chemically synthesized
  source 1..20: mol_type = other DNA
aggaaaataacagaaatacc

SEQ ID NO: 50882 - DNA, 20 bp, synthetic construct
  misc_feature 1..20: note = chemically synthesized
  source 1..20: mol_type = other DNA
gaaaataacagaaataccta

SEQ ID NO: 50883 - DNA, 20 bp, synthetic construct
  misc_feature 1..20: note = chemically synthesized
  source 1..20: mol_type = other DNA
aaaataacagaaatacctag

SEQ ID NO: 50884 - DNA, 20 bp, synthetic construct
  misc_feature 1..20: note = chemically synthesized
  source 1..20: mol_type = other DNA
aataacagaaatacctagag

SEQ ID NO: 50885 - DNA, 20 bp, synthetic construct
  misc_feature 1..20: note = chemically synthesized
  source 1..20: mol_type = other DNA
ataacagaaatacctagagg

SEQ ID NO: 50886 - DNA, 20 bp, synthetic construct
  misc_feature 1..20: note = chemically synthesized
  source 1..20: mol_type = other DNA
taacagaaatacctagagga

SEQ ID NO: 50887 - DNA, 20 bp, synthetic construct
  misc_feature 1..20: note = chemically synthesized
  source 1..20: mol_type = other DNA
acctagaggagggaaataaa

SEQ ID NO: 50888 - DNA, 20 bp, synthetic construct
  misc_feature 1..20: note = chemically synthesized
  source 1..20: mol_type = other DNA
gaggagggaaataaaaagcc

SEQ ID NO: 50889 - DNA, 20 bp, synthetic construct
  misc_feature 1..20: note = chemically synthesized
  source 1..20: mol_type = other DNA
aggagggaaataaaaagcct

SEQ ID NO: 50890 - DNA, 20 bp, synthetic construct
  misc_feature 1..20: note = chemically synthesized
  source 1..20: mol_type = other DNA
gggaaataaaaagcctagga

SEQ ID NO: 50891 - DNA, 20 bp, synthetic construct
  misc_feature 1..20: note = chemically synthesized
  source 1..20: mol_type = other DNA
gcctaggaaagcaacatgaa

SEQ ID NO: 50892 - DNA, 20 bp, synthetic construct
  misc_feature 1..20: note = chemically synthesized
  source 1..20: mol_type = other DNA
aggaaagcaacatgaaaaga

SEQ ID NO: 50893 - DNA, 20 bp, synthetic construct
  misc_feature 1..20: note = chemically synthesized
  source 1..20: mol_type = other DNA
catgaaaagatggtgctctc

SEQ ID NO: 50894 - DNA, 20 bp, synthetic construct
  misc_feature 1..20: note = chemically synthesized
  source 1..20: mol_type = other DNA
tggtacatcctgtgcttcct

SEQ ID NO: 50895 - DNA, 20 bp, synthetic construct
  misc_feature 1..20: note = chemically synthesized
  source 1..20: mol_type = other DNA
gtcttttacacacactgtct

SEQ ID NO: 50896 - DNA, 20 bp, synthetic construct
  misc_feature 1..20: note = chemically synthesized
  source 1..20: mol_type = other DNA
tcttttacacacactgtctt

SEQ ID NO: 50897 - DNA, 20 bp, synthetic construct
  misc_feature 1..20: note = chemically synthesized
  source 1..20: mol_type = other DNA
ttacacacactgtcttggga

SEQ ID NO: 50898 - DNA, 20 bp, synthetic construct
  misc_feature 1..20: note = chemically synthesized
  source 1..20: mol_type = other DNA
tacacacactgtcttgggat

SEQ ID NO: 50899 - DNA, 20 bp, synthetic construct
  misc_feature 1..20: note = chemically synthesized
  source 1..20: mol_type = other DNA
actgtcttgggatgggcatt

SEQ ID NO: 50900 - DNA, 20 bp, synthetic construct
  misc_feature 1..20: note = chemically synthesized
  source 1..20: mol_type = other DNA
ctgtcttgggatgggcatta

SEQ ID NO: 50901 - DNA, 20 bp, synthetic construct
  misc_feature 1..20: note = chemically synthesized
  source 1..20: mol_type = other DNA
ggatgggcattaaggtgttg

SEQ ID NO: 50902 - DNA, 20 bp, synthetic construct
  misc_feature 1..20: note = chemically synthesized
  source 1..20: mol_type = other DNA
attaaggtgttgtagctact

SEQ ID NO: 50903 - DNA, 20 bp, synthetic construct
  misc_feature 1..20: note = chemically synthesized
  source 1..20: mol_type = other DNA
aggtgttgtagctactcagc

SEQ ID NO: 50904 - DNA, 20 bp, synthetic construct
  misc_feature 1..20: note = chemically synthesized
  source 1..20: mol_type = other DNA
gttgtagctactcagctagt

SEQ ID NO: 50905 - DNA, 20 bp, synthetic construct
  misc_feature 1..20: note = chemically synthesized
  source 1..20: mol_type = other DNA
gtagctactcagctagtaag

SEQ ID NO: 50906 - DNA, 20 bp, synthetic construct
  misc_feature 1..20: note = chemically synthesized
  source 1..20: mol_type = other DNA
tactcagctagtaagtagct

SEQ ID NO: 50907 - DNA, 20 bp, synthetic construct
  misc_feature 1..20: note = chemically synthesized
  source 1..20: mol_type = other DNA
agctagtaagtagctgagct

SEQ ID NO: 50908 - DNA, 20 bp, synthetic construct
  misc_feature 1..20: note = chemically synthesized
  source 1..20: mol_type = other DNA
ctaagattctttcaattcca

SEQ ID NO: 50909 - DNA, 20 bp, synthetic construct
  misc_feature 1..20: note = chemically synthesized
  source 1..20: mol_type = other DNA
gattctttcaattccaaagt

SEQ ID NO: 50910 - DNA, 20 bp, synthetic construct
  misc_feature 1..20: note = chemically synthesized
  source 1..20: mol_type = other DNA
tctttcaattccaaagtcag

SEQ ID NO: 50911 - DNA, 20 bp, synthetic construct
  misc_feature 1..20: note = chemically synthesized
  source 1..20: mol_type = other DNA
tcagcagtgtcttcactaca

SEQ ID NO: 50912 - DNA, 20 bp, synthetic construct
  misc_feature 1..20: note = chemically synthesized
  source 1..20: mol_type = other DNA
tcactacatggtactatgtc

SEQ ID NO: 50913 - DNA, 20 bp, synthetic construct
  misc_feature 1..20: note = chemically synthesized
  source 1..20: mol_type = other DNA
tacatggtactatgtcaaga

SEQ ID NO: 50914 - DNA, 20 bp, synthetic construct
  misc_feature 1..20: note = chemically synthesized
  source 1..20: mol_type = other DNA
catggtactatgtcaagaaa

SEQ ID NO: 50915 - DNA, 20 bp, synthetic construct
  misc_feature 1..20: note = chemically synthesized
  source 1..20: mol_type = other DNA
gaaagagaaactccactaaa

SEQ ID NO: 50916 - DNA, 20 bp, synthetic construct
  misc_feature 1..20: note = chemically synthesized
  source 1..20: mol_type = other DNA
agaacttcattgctctctgt

SEQ ID NO: 50917 - DNA, 20 bp, synthetic construct
  misc_feature 1..20: note = chemically synthesized
  source 1..20: mol_type = other DNA
gaacttcattgctctctgtt

SEQ ID NO: 50918 - DNA, 20 bp, synthetic construct
  misc_feature 1..20: note = chemically synthesized
  source 1..20: mol_type = other DNA
aacttcattgctctctgtta

SEQ ID NO: 50919 - DNA, 20 bp, synthetic construct
  misc_feature 1..20: note = chemically synthesized
  source 1..20: mol_type = other DNA
ttagggatacattaacattt

SEQ ID NO: 50920 - DNA, 20 bp, synthetic construct
  misc_feature 1..20: note = chemically synthesized
  source 1..20: mol_type = other DNA
tagggatacattaacatttt

SEQ ID NO: 50921 - DNA, 20 bp, synthetic construct
  misc_feature 1..20: note = chemically synthesized
  source 1..20: mol_type = other DNA
atgaaaaaaaaatgttacaa

SEQ ID NO: 50922 - DNA, 20 bp, synthetic construct
  misc_feature 1..20: note = chemically synthesized
  source 1..20: mol_type = other DNA
aaaaatgttacaatagctta

SEQ ID NO: 50923 - DNA, 20 bp, synthetic construct
  misc_feature 1..20: note = chemically synthesized
  source 1..20: mol_type = other DNA
aaaatgttacaatagcttac

SEQ ID NO: 50924 - DNA, 20 bp, synthetic construct
  misc_feature 1..20: note = chemically synthesized
  source 1..20: mol_type = other DNA
acctccacttatatgaccta

SEQ ID NO: 50925 - DNA, 20 bp, synthetic construct
  misc_feature 1..20: note = chemically synthesized
  source 1..20: mol_type = other DNA
acctatggacctcttaaact

SEQ ID NO: 50926 - DNA, 20 bp, synthetic construct
  misc_feature 1..20: note = chemically synthesized
  source 1..20: mol_type = other DNA
atggacctcttaaactcagc

SEQ ID NO: 50927 - DNA, 20 bp, synthetic construct
  misc_feature 1..20: note = chemically synthesized
  source 1..20: mol_type = other DNA
cttaaactcagcgagttgaa

SEQ ID NO: 50928 - DNA, 20 bp, synthetic construct
  misc_feature 1..20: note = chemically synthesized
  source 1..20: mol_type = other DNA
aactcagcgagttgaaaaga

SEQ ID NO: 50929 - DNA, 20 bp, synthetic construct
  misc_feature 1..20: note = chemically synthesized
  source 1..20: mol_type = other DNA
aaattatcctccacttcttt

SEQ ID NO: 50930 - DNA, 20 bp, synthetic construct
  misc_feature 1..20: note = chemically synthesized
  source 1..20: mol_type = other DNA
atgcttccaaacttgatgaa

SEQ ID NO: 50931 - DNA, 20 bp, synthetic construct
  misc_feature 1..20: note = chemically synthesized
  source 1..20: mol_type = other DNA
aacttgatgaatggttcact

SEQ ID NO: 50932 - DNA, 20 bp, synthetic construct
  misc_feature 1..20: note = chemically synthesized
  source 1..20: mol_type = other DNA
aatggttcactcagatttcc

SEQ ID NO: 50933 - DNA, 20 bp, synthetic construct
  misc_feature 1..20: note = chemically synthesized
  source 1..20: mol_type = other DNA
aataatcaatttctcacaac

SEQ ID NO: 50934 - DNA, 20 bp, synthetic construct
  misc_feature 1..20: note = chemically synthesized
  source 1..20: mol_type = other DNA
attattatcataaatactga

SEQ ID NO: 50935 - DNA, 20 bp, synthetic construct
  misc_feature 1..20: note = chemically synthesized
  source 1..20: mol_type = other DNA
cataaatactgatagctttt

SEQ ID NO: 50936 - DNA, 20 bp, synthetic construct
  misc_feature 1..20: note = chemically synthesized
  source 1..20: mol_type = other DNA
aaatactgatagcttttgag

SEQ ID NO: 50937 - DNA, 20 bp, synthetic construct
  misc_feature 1..20: note = chemically synthesized
  source 1..20: mol_type = other DNA
tactgatagcttttgagtgg

SEQ ID NO: 50938 - DNA, 20 bp, synthetic construct
  misc_feature 1..20: note = chemically synthesized
  source 1..20: mol_type = other DNA
gcttttgagtggcagataat

SEQ ID NO: 50939 - DNA, 20 bp, synthetic construct
  misc_feature 1..20: note = chemically synthesized
  source 1..20: mol_type = other DNA
caatatttttaaaaattgtg

SEQ ID NO: 50940 - DNA, 20 bp, synthetic construct
  misc_feature 1..20: note = chemically synthesized
  source 1..20: mol_type = other DNA
tttttaaaaattgtgcagct

SEQ ID NO: 50941 - DNA, 20 bp, synthetic construct
  misc_feature 1..20: note = chemically synthesized
  source 1..20: mol_type = other DNA
aaattgtgcagctaagtgtt

SEQ ID NO: 50942 - DNA, 20 bp, synthetic construct
  misc_feature 1..20: note = chemically synthesized
  source 1..20: mol_type = other DNA
gagctaaaaattatatacct

SEQ ID NO: 50943 - DNA, 20 bp, synthetic construct
  misc_feature 1..20: note = chemically synthesized
  source 1..20: mol_type = other DNA
acctaagaaatgacaaaacc

SEQ ID NO: 50944 - DNA, 20 bp, synthetic construct
  misc_feature 1..20: note = chemically synthesized
  source 1..20: mol_type = other DNA
acaaaaccaagatttgaaac

SEQ ID NO: 50945 - DNA, 20 bp, synthetic construct
  misc_feature 1..20: note = chemically synthesized
  source 1..20: mol_type = other DNA
tgaaaccagttctcactgac

SEQ ID NO: 50946 - DNA, 20 bp, synthetic construct
  misc_feature 1..20: note = chemically synthesized
  source 1..20: mol_type = other DNA
aaccagttctcactgaccag

SEQ ID NO: 50947 - DNA, 20 bp, synthetic construct
  misc_feature 1..20: note = chemically synthesized
  source 1..20: mol_type = other DNA
tgaccagaagatcattcttt

SEQ ID NO: 50948 - DNA, 20 bp, synthetic construct
  misc_feature 1..20: note = chemically synthesized
  source 1..20: mol_type = other DNA
agaagatcattctttcagct

SEQ ID NO: 50949 - DNA, 20 bp, synthetic construct
  misc_feature 1..20: note = chemically synthesized
  source 1..20: mol_type = other DNA
gaagatcattctttcagcta

SEQ ID NO: 50950 - DNA, 20 bp, synthetic construct
  misc_feature 1..20: note = chemically synthesized
  source 1..20: mol_type = other DNA
agatcattctttcagctaag

SEQ ID NO: 50951 - DNA, 20 bp, synthetic construct
  misc_feature 1..20: note = chemically synthesized
  source 1..20: mol_type = other DNA
ctaattactgcgttccttca

SEQ ID NO: 50952 - DNA, 20 bp, synthetic construct
  misc_feature 1..20: note = chemically synthesized
  source 1..20: mol_type = other DNA
atagtttttttttttcctct

SEQ ID NO: 50953 - DNA, 20 bp, synthetic construct
  misc_feature 1..20: note = chemically synthesized
  source 1..20: mol_type = other DNA
tagtttttttttttcctctc

SEQ ID NO: 50954 - DNA, 20 bp, synthetic construct
  misc_feature 1..20: note = chemically synthesized
  source 1..20: mol_type = other DNA
ccctgaaatatgcattttct

SEQ ID NO: 50955 - DNA, 20 bp, synthetic construct
  misc_feature 1..20: note = chemically synthesized
  source 1..20: mol_type = other DNA
gcccttcaataacttctaac

SEQ ID NO: 50956 - DNA, 20 bp, synthetic construct
  misc_feature 1..20: note = chemically synthesized
  source 1..20: mol_type = other DNA
cctatttgtgtcttgcaaca

SEQ ID NO: 50957 - DNA, 20 bp, synthetic construct
  misc_feature 1..20: note = chemically synthesized
  source 1..20: mol_type = other DNA
ctatttgtgtcttgcaacat

SEQ ID NO: 50958 - DNA, 20 bp, synthetic construct
  misc_feature 1..20: note = chemically synthesized
  source 1..20: mol_type = other DNA
tgtcttgcaacatgggataa

SEQ ID NO: 50959 - DNA, 20 bp, synthetic construct
  misc_feature 1..20: note = chemically synthesized
  source 1..20: mol_type = other DNA
gtcttgcaacatgggataat

SEQ ID NO: 50960 - DNA, 20 bp, synthetic construct
  misc_feature 1..20: note = chemically synthesized
  source 1..20: mol_type = other DNA
caacatgggataataggttc

SEQ ID NO: 50961 - DNA, 20 bp, synthetic construct
  misc_feature 1..20: note = chemically synthesized
  source 1..20: mol_type = other DNA
gggataataggttctggcat

SEQ ID NO: 50962 - DNA, 20 bp, synthetic construct
  misc_feature 1..20: note = chemically synthesized
  source 1..20: mol_type = other DNA
taataggttctggcatgaga

SEQ ID NO: 50963 - DNA, 20 bp, synthetic construct
  misc_feature 1..20: note = chemically synthesized
  source 1..20: mol_type = other DNA
ggttctggcatgagacagcc

SEQ ID NO: 50964 - DNA, 20 bp, synthetic construct
  misc_feature 1..20: note = chemically synthesized
  source 1..20: mol_type = other DNA
gttctggcatgagacagccc

SEQ ID NO: 50965 - DNA, 20 bp, synthetic construct
  misc_feature 1..20: note = chemically synthesized
  source 1..20: mol_type = other DNA
gacagcccgggctctactct

SEQ ID NO: 50966 - DNA, 20 bp, synthetic construct
  misc_feature 1..20: note = chemically synthesized
  source 1..20: mol_type = other DNA
acagcccgggctctactctc

SEQ ID NO: 50967 - DNA, 20 bp, synthetic construct
  misc_feature 1..20: note = chemically synthesized
  source 1..20: mol_type = other DNA
ggctctactctcaggtccat

SEQ ID NO: 50968 - DNA, 20 bp, synthetic construct
  misc_feature 1..20: note = chemically synthesized
  source 1..20: mol_type = other DNA
ctctcaggtccataagttaa

SEQ ID NO: 50969 - DNA, 20 bp, synthetic construct
  misc_feature 1..20: note = chemically synthesized
  source 1..20: mol_type = other DNA
taagttaatagctttgtttt

SEQ ID NO: 50970 - DNA, 20 bp, synthetic construct
  misc_feature 1..20: note = chemically synthesized
  source 1..20: mol_type = other DNA
aagttaatagctttgttttg

SEQ ID NO: 50971 - DNA, 20 bp, synthetic construct
  misc_feature 1..20: note = chemically synthesized
  source 1..20: mol_type = other DNA
aatagctttgttttgaggat

SEQ ID NO: 50972 - DNA, 20 bp, synthetic construct
  misc_feature 1..20: note = chemically synthesized
  source 1..20: mol_type = other DNA
acattcctcaataataaatt

SEQ ID NO: 50973 - DNA, 20 bp, synthetic construct
  misc_feature 1..20: note = chemically synthesized
  source 1..20: mol_type = other DNA
attcctcaataataaattaa

SEQ ID NO: 50974 - DNA, 20 bp, synthetic construct
  misc_feature 1..20: note = chemically synthesized
  source 1..20: mol_type = other DNA
taataaattaagagctataa

SEQ ID NO: 50975 - DNA, 20 bp, synthetic construct
  misc_feature 1..20: note = chemically synthesized
  source 1..20: mol_type = other DNA
tctactttataaatttctta

SEQ ID NO: 50976 - DNA, 20 bp, synthetic construct
  misc_feature 1..20: note = chemically synthesized
  source 1..20: mol_type = other DNA
ctttataaatttcttatagt

SEQ ID NO: 50977 - DNA, 20 bp, synthetic construct
  misc_feature 1..20: note = chemically synthesized
  source 1..20: mol_type = other DNA
cgaaaaatgacaaaccaaat

SEQ ID NO: 50978 - DNA, 20 bp, synthetic construct
  misc_feature 1..20: note = chemically synthesized
  source 1..20: mol_type = other DNA
tgacaaaccaaataagttcc

SEQ ID NO: 50979 - DNA, 20 bp, synthetic construct
  misc_feature 1..20: note = chemically synthesized
  source 1..20: mol_type = other DNA
actttttatcatgatgatca

SEQ ID NO: 50980 - DNA, 20 bp, synthetic construct
  misc_feature 1..20: note = chemically synthesized
  source 1..20: mol_type = other DNA
ataatttttttcttcaccta

SEQ ID NO: 50981 - DNA, 20 bp, synthetic construct
  misc_feature 1..20: note = chemically synthesized
  source 1..20: mol_type = other DNA
tttttcttcacctatagcca

SEQ ID NO: 50982 - DNA, 20 bp, synthetic construct
  misc_feature 1..20: note = chemically synthesized
  source 1..20: mol_type = other DNA
tcttcacctatagccacagt

SEQ ID NO: 50983 - DNA, 20 bp, synthetic construct
  misc_feature 1..20: note = chemically synthesized
  source 1..20: mol_type = other DNA
tagccacagtcagcttctca

SEQ ID NO: 50984 - DNA, 20 bp, synthetic construct
  misc_feature 1..20: note = chemically synthesized
  source 1..20: mol_type = other DNA
ctcacctttttatgatctaa

SEQ ID NO: 50985 - DNA, 20 bp, synthetic construct
  misc_feature 1..20: note = chemically synthesized
  source 1..20: mol_type = other DNA
ctccacgctgacgtttacca

SEQ ID NO: 50986 - DNA, 20 bp, synthetic construct
  misc_feature 1..20: note = chemically synthesized
  source 1..20: mol_type = other DNA
ctgacgtttaccacagaacc

SEQ ID NO: 50987 - DNA, 20 bp, synthetic construct
  misc_feature 1..20: note = chemically synthesized
  source 1..20: mol_type = other DNA
tttaccacagaacctggaca

SEQ ID NO: 50988 - DNA, 20 bp, synthetic construct
  misc_feature 1..20: note = chemically synthesized
  source 1..20: mol_type = other DNA
ttaccacagaacctggacat

SEQ ID NO: 50989 - DNA, 20 bp, synthetic construct
  misc_feature 1..20: note = chemically synthesized
  source 1..20: mol_type = other DNA
aataaataaaataaataaaa

SEQ ID NO: 50990 - DNA, 20 bp, synthetic construct
  misc_feature 1..20: note = chemically synthesized
  source 1..20: mol_type = other DNA
aacagaaaaaaaacgataca

SEQ ID NO: 50991 - DNA, 20 bp, synthetic construct
  misc_feature 1..20: note = chemically synthesized
  source 1..20: mol_type = other DNA
acagaaaaaaaacgatacaa

SEQ ID NO: 50992 - DNA, 20 bp, synthetic construct
  misc_feature 1..20: note = chemically synthesized
  source 1..20: mol_type = other DNA
cagaaaaaaaacgatacaaa

SEQ ID NO: 50993 - DNA, 20 bp, synthetic construct
  misc_feature 1..20: note = chemically synthesized
  source 1..20: mol_type = other DNA
aaaacgatacaaagggtatg

SEQ ID NO: 50994 - DNA, 20 bp, synthetic construct
  misc_feature 1..20: note = chemically synthesized
  source 1..20: mol_type = other DNA
aaacgatacaaagggtatga

SEQ ID NO: 50995 - DNA, 20 bp, synthetic construct
  misc_feature 1..20: note = chemically synthesized
  source 1..20: mol_type = other DNA
tacaaagggtatgaaggatt

SEQ ID NO: 50996 - DNA, 20 bp, synthetic construct
  misc_feature 1..20: note = chemically synthesized
  source 1..20: mol_type = other DNA
agtgaatatgttatatgcta

SEQ ID NO: 50997 - DNA, 20 bp, synthetic construct
  misc_feature 1..20: note = chemically synthesized
  source 1..20: mol_type = other DNA
tatgttatatgctacggcac

SEQ ID NO: 50998 - DNA, 20 bp, synthetic construct
  misc_feature 1..20: note = chemically synthesized
  source 1..20: mol_type = other DNA
gttatatgctacggcaccag

SEQ ID NO: 50999 - DNA, 20 bp, synthetic construct
  misc_feature 1..20: note = chemically synthesized
  source 1..20: mol_type = other DNA
tacggcaccagtggtctttc

SEQ ID NO: 51000 - DNA, 20 bp, synthetic construct
  misc_feature 1..20: note = chemically synthesized
  source 1..20: mol_type = other DNA
acggcaccagtggtctttct

SEQ ID NO: 51001 - DNA, 20 bp, synthetic construct
  misc_feature 1..20: note = chemically synthesized
  source 1..20: mol_type = other DNA
attgtacacttgccccattc

SEQ ID NO: 51002 - DNA, 20 bp, synthetic construct
  misc_feature 1..20: note = chemically synthesized
  source 1..20: mol_type = other DNA
ttgtacacttgccccattct

SEQ ID NO: 51003 - DNA, 20 bp, synthetic construct
  misc_feature 1..20: note = chemically synthesized
  source 1..20: mol_type = other DNA
cttgccccattctaggacaa

SEQ ID NO: 51004 - DNA, 20 bp, synthetic construct
  misc_feature 1..20: note = chemically synthesized
  source 1..20: mol_type = other DNA
ggacaatggttccttctgat

SEQ ID NO: 51005 - DNA, 20 bp, synthetic construct
  misc_feature 1..20: note = chemically synthesized
  source 1..20: mol_type = other DNA
ttctgattagttaccttttc

SEQ ID NO: 51006 - DNA, 20 bp, synthetic construct
  misc_feature 1..20: note = chemically synthesized
  source 1..20: mol_type = other DNA
ttagttaccttttccagtct

SEQ ID NO: 51007 - DNA, 20 bp, synthetic construct
  misc_feature 1..20: note = chemically synthesized
  source 1..20: mol_type = other DNA
agttaccttttccagtctga

SEQ ID NO: 51008 - DNA, 20 bp, synthetic construct
  misc_feature 1..20: note = chemically synthesized
  source 1..20: mol_type = other DNA
tccagtctgagagacatgcc

SEQ ID NO: 51009 - DNA, 20 bp, synthetic construct
  misc_feature 1..20: note = chemically synthesized
  source 1..20: mol_type = other DNA
ctggctcacacctgatttgt

SEQ ID NO: 51010 - DNA, 20 bp, synthetic construct
  misc_feature 1..20: note = chemically synthesized
  source 1..20: mol_type = other DNA
tggctcacacctgatttgta

SEQ ID NO: 51011 - DNA, 20 bp, synthetic construct
  misc_feature 1..20: note = chemically synthesized
  source 1..20: mol_type = other DNA
acacctgatttgtaaggcaa

SEQ ID NO: 51012 - DNA, 20 bp, synthetic construct
  misc_feature 1..20: note = chemically synthesized
  source 1..20: mol_type = other DNA
acctgatttgtaaggcaatg

SEQ ID NO: 51013 - DNA, 20 bp, synthetic construct
  misc_feature 1..20: note = chemically synthesized
  source 1..20: mol_type = other DNA
gatttgtaaggcaatggaga

SEQ ID NO: 51014 - DNA, 20 bp, synthetic construct
  misc_feature 1..20: note = chemically synthesized
  source 1..20: mol_type = other DNA
tttgtaaggcaatggagatg

SEQ ID NO: 51015 - DNA, 20 bp, synthetic construct
  misc_feature 1..20: note = chemically synthesized
  source 1..20: mol_type = other DNA
ggagacactcttatatccaa

SEQ ID NO: 51016 - DNA, 20 bp, synthetic construct
  misc_feature 1..20: note = chemically synthesized
  source 1..20: mol_type = other DNA
ctcttatatccaaaagtaca

SEQ ID NO: 51017 - DNA, 20 bp, synthetic construct
  misc_feature 1..20: note = chemically synthesized
  source 1..20: mol_type = other DNA
tatccaaaagtacatagctc

SEQ ID NO: 51018 - DNA, 20 bp, synthetic construct
  misc_feature 1..20: note = chemically synthesized
  source 1..20: mol_type = other DNA
ccaaaagtacatagctccgg

SEQ ID NO: 51019 - DNA, 20 bp, synthetic construct
  misc_feature 1..20: note = chemically synthesized
  source 1..20: mol_type = other DNA
agtacatagctccggtagct

SEQ ID NO: 51020 - DNA, 20 bp, synthetic construct
  misc_feature 1..20: note = chemically synthesized
  source 1..20: mol_type = other DNA
taataaacctttgtcacctc

SEQ ID NO: 51021 - DNA, 20 bp, synthetic construct
  misc_feature 1..20: note = chemically synthesized
  source 1..20: mol_type = other DNA
ataaacctttgtcacctcta

SEQ ID NO: 51022 - DNA, 20 bp, synthetic construct
  misc_feature 1..20: note = chemically synthesized
  source 1..20: mol_type = other DNA
tagagaattctaaaaatcca

SEQ ID NO: 51023 - DNA, 20 bp, synthetic construct
  misc_feature 1..20: note = chemically synthesized
  source 1..20: mol_type = other DNA
attctaaaaatccacagatt

SEQ ID NO: 51024 - DNA, 20 bp, synthetic construct
  misc_feature 1..20: note = chemically synthesized
  source 1..20: mol_type = other DNA
atccacagatttagaaattc

SEQ ID NO: 51025 - DNA, 20 bp, synthetic construct
  misc_feature 1..20: note = chemically synthesized
  source 1..20: mol_type = other DNA
tccacagatttagaaattct

SEQ ID NO: 51026 - DNA, 20 bp, synthetic construct
  misc_feature 1..20: note = chemically synthesized
  source 1..20: mol_type = other DNA
tttagaaattctaggaatcc

SEQ ID NO: 51027 - DNA, 20 bp, synthetic construct
  misc_feature 1..20: note = chemically synthesized
  source 1..20: mol_type = other DNA
aatccaagaaattacaattt

SEQ ID NO: 51028 - DNA, 20 bp, synthetic construct
  misc_feature 1..20: note = chemically synthesized
  source 1..20: mol_type = other DNA
ataacaataaccaataaaca

SEQ ID NO: 51029 - DNA, 20 bp, synthetic construct
  misc_feature 1..20: note = chemically synthesized
  source 1..20: mol_type = other DNA
cattttatttacataaataa

SEQ ID NO: 51030 - DNA, 20 bp, synthetic construct
  misc_feature 1..20: note = chemically synthesized
  source 1..20: mol_type = other DNA
ttatttacataaataaaaga

SEQ ID NO: 51031 - DNA, 20 bp, synthetic construct
  misc_feature 1..20: note = chemically synthesized
  source 1..20: mol_type = other DNA
tatttacataaataaaagat

SEQ ID NO: 51032 - DNA, 20 bp, synthetic construct
  misc_feature 1..20: note = chemically synthesized
  source 1..20: mol_type = other DNA
tgtcacacaatttaaaaatc

SEQ ID NO: 51033 - DNA, 20 bp, synthetic construct
  misc_feature 1..20: note = chemically synthesized
  source 1..20: mol_type = other DNA
gtcacacaatttaaaaatct

SEQ ID NO: 51034 - DNA, 20 bp, synthetic construct
  misc_feature 1..20: note = chemically synthesized
  source 1..20: mol_type = other DNA
tcacacaatttaaaaatcta

SEQ ID NO: 51035 - DNA, 20 bp, synthetic construct
  misc_feature 1..20: note = chemically synthesized
  source 1..20: mol_type = other DNA
atttaaaaatctagggtcga

SEQ ID NO: 51036 - DNA, 20 bp, synthetic construct
  misc_feature 1..20: note = chemically synthesized
  source 1..20: mol_type = other DNA
aaatctagggtcgaaagcca

SEQ ID NO: 51037 - DNA, 20 bp, synthetic construct
  misc_feature 1..20: note = chemically synthesized
  source 1..20: mol_type = other DNA
tagggtcgaaagccacagca

SEQ ID NO: 51038 - DNA, 20 bp, synthetic construct
  misc_feature 1..20: note = chemically synthesized
  source 1..20: mol_type = other DNA
agggtcgaaagccacagcaa

SEQ ID NO: 51039 - DNA, 20 bp, synthetic construct
  misc_feature 1..20: note = chemically synthesized
  source 1..20: mol_type = other DNA
ccacagcaaaggcaacctcc

SEQ ID NO: 51040 - DNA, 20 bp, synthetic construct
  misc_feature 1..20: note = chemically synthesized
  source 1..20: mol_type = other DNA
ctcctggcactatatcacaa

SEQ ID NO: 51041 - DNA, 20 bp, synthetic construct
  misc_feature 1..20: note = chemically synthesized
  source 1..20: mol_type = other DNA
cacaatagatgacacctgca

SEQ ID NO: 51042 - DNA, 20 bp, synthetic construct
  misc_feature 1..20: note = chemically synthesized
  source 1..20: mol_type = other DNA
caatagatgacacctgcata

SEQ ID NO: 51043 - DNA, 20 bp, synthetic construct
  misc_feature 1..20: note = chemically synthesized
  source 1..20: mol_type = other DNA
agatgacacctgcatagaga

SEQ ID NO: 51044 - DNA, 20 bp, synthetic construct
  misc_feature 1..20: note = chemically synthesized
  source 1..20: mol_type = other DNA
acacctgcatagagaaagca

SEQ ID NO: 51045 - DNA, 20 bp, synthetic construct
  misc_feature 1..20: note = chemically synthesized
  source 1..20: mol_type = other DNA
cctgcatagagaaagcaaag

SEQ ID NO: 51046 - DNA, 20 bp, synthetic construct
  misc_feature 1..20: note = chemically synthesized
  source 1..20: mol_type = other DNA
agaaagcaaagtggtcatgt

SEQ ID NO: 51047 - DNA, 20 bp, synthetic construct
  misc_feature 1..20: note = chemically synthesized
  source 1..20: mol_type = other DNA
attgcctcaaataatccctg

SEQ ID NO: 51048 - DNA, 20 bp, synthetic construct
  misc_feature 1..20: note = chemically synthesized
  source 1..20: mol_type = other DNA
ttgcctcaaataatccctgt

SEQ ID NO: 51049 - DNA, 20 bp, synthetic construct
  misc_feature 1..20: note = chemically synthesized
  source 1..20: mol_type = other DNA
tgcctcaaataatccctgtg

SEQ ID NO: 51050 - DNA, 20 bp, synthetic construct
  misc_feature 1..20: note = chemically synthesized
  source 1..20: mol_type = other DNA
tctactcttttgtattccat

SEQ ID NO: 51051 - DNA, 20 bp, synthetic construct
  misc_feature 1..20: note = chemically synthesized
  source 1..20: mol_type = other DNA
tattccatcagcttttttcc

SEQ ID NO: 51052 - DNA, 20 bp, synthetic construct
  misc_feature 1..20: note = chemically synthesized
  source 1..20: mol_type = other DNA
ttcccagtaacaacacatcc

SEQ ID NO: 51053 - DNA, 20 bp, synthetic construct
  misc_feature 1..20: note = chemically synthesized
  source 1..20: mol_type = other DNA
cctagcaataatatcctgac

SEQ ID NO: 51054 - DNA, 20 bp, synthetic construct
  misc_feature 1..20: note = chemically synthesized
  source 1..20: mol_type = other DNA
aaaaaaaaaactcccctcct

SEQ ID NO: 51055 - DNA, 20 bp, synthetic construct
  misc_feature 1..20: note = chemically synthesized
  source 1..20: mol_type = other DNA
aaaactcccctcctaagata

SEQ ID NO: 51056 - DNA, 20 bp, synthetic construct
  misc_feature 1..20: note = chemically synthesized
  source 1..20: mol_type = other DNA
cctaagatacagtatctttg

SEQ ID NO: 51057 - DNA, 20 bp, synthetic construct
  misc_feature 1..20: note = chemically synthesized
  source 1..20: mol_type = other DNA
tatctttgtggttgcatccc

SEQ ID NO: 51058 - DNA, 20 bp, synthetic construct
  misc_feature 1..20: note = chemically synthesized
  source 1..20: mol_type = other DNA
atccccagccatccctcatt

SEQ ID NO: 51059 - DNA, 20 bp, synthetic construct
  misc_feature 1..20: note = chemically synthesized
  source 1..20: mol_type = other DNA
cagccatccctcatttggtt

SEQ ID NO: 51060 - DNA, 20 bp, synthetic construct
  misc_feature 1..20: note = chemically synthesized
  source 1..20: mol_type = other DNA
agccatccctcatttggttg

SEQ ID NO: 51061 - DNA, 20 bp, synthetic construct
  misc_feature 1..20: note = chemically synthesized
  source 1..20: mol_type = other DNA
atccctcatttggttgaggt

SEQ ID NO: 51062 - DNA, 20 bp, synthetic construct
  misc_feature 1..20: note = chemically synthesized
  source 1..20: mol_type = other DNA
ggttgaggttggaatttcaa

SEQ ID NO: 51063 - DNA, 20 bp, synthetic construct
  misc_feature 1..20: note = chemically synthesized
  source 1..20: mol_type = other DNA
gttgaggttggaatttcaat

SEQ ID NO: 51064 - DNA, 20 bp, synthetic construct
  misc_feature 1..20: note = chemically synthesized
  source 1..20: mol_type = other DNA
gaggttggaatttcaatggg

SEQ ID NO: 51065 - DNA, 20 bp, synthetic construct
  misc_feature 1..20: note = chemically synthesized
  source 1..20: mol_type = other DNA
aggttggaatttcaatgggt

SEQ ID NO: 51066 - DNA, 20 bp, synthetic construct
  misc_feature 1..20: note = chemically synthesized
  source 1..20: mol_type = other DNA
ttccctaaacaaacttgcca

SEQ ID NO: 51067 - DNA, 20 bp, synthetic construct
  misc_feature 1..20: note = chemically synthesized
  source 1..20: mol_type = other DNA
aaacttgccatggtaaaatc

SEQ ID NO: 51068 - DNA, 20 bp, synthetic construct
  misc_feature 1..20: note = chemically synthesized
  source 1..20: mol_type = other DNA
aacttgccatggtaaaatca

SEQ ID NO: 51069 - DNA, 20 bp, synthetic construct
  misc_feature 1..20: note = chemically synthesized
  source 1..20: mol_type = other DNA
tgccatggtaaaatcaaggc

SEQ ID NO: 51070 - DNA, 20 bp, synthetic construct
  misc_feature 1..20: note = chemically synthesized
  source 1..20: mol_type = other DNA
gctagcattactgttcacac

SEQ ID NO: 51071 - DNA, 20 bp, synthetic construct
  misc_feature 1..20: note = chemically synthesized
  source 1..20: mol_type = other DNA
ctagcattactgttcacaca

SEQ ID NO: 51072 - DNA, 20 bp, synthetic construct
  misc_feature 1..20: note = chemically synthesized
  source 1..20: mol_type = other DNA
ttcacacaaggcactgtgct

SEQ ID NO: 51073 - DNA, 20 bp, synthetic construct
  misc_feature 1..20: note = chemically synthesized
  source 1..20: mol_type = other DNA
tgctaagatccccatcctta

SEQ ID NO: 51074 - DNA, 20 bp, synthetic construct
  misc_feature 1..20: note = chemically synthesized
  source 1..20: mol_type = other DNA
gatccccatccttatagcaa

SEQ ID NO: 51075 - DNA, 20 bp, synthetic construct
  misc_feature 1..20: note = chemically synthesized
  source 1..20: mol_type = other DNA
atccccatccttatagcaat

SEQ ID NO: 51076 - DNA, 20 bp, synthetic construct
  misc_feature 1..20: note = chemically synthesized
  source 1..20: mol_type = other DNA
ccccatccttatagcaatgg

SEQ ID NO: 51077 - DNA, 20 bp, synthetic construct
  misc_feature 1..20: note = chemically synthesized
  source 1..20: mol_type = other DNA
cccatccttatagcaatggg

SEQ ID NO: 51078 - DNA, 20 bp, synthetic construct
  misc_feature 1..20: note = chemically synthesized
  source 1..20: mol_type = other DNA
ccatccttatagcaatggga

SEQ ID NO: 51079 - DNA, 20 bp, synthetic construct
  misc_feature 1..20: note = chemically synthesized
  source 1..20: mol_type = other DNA
tatagcaatgggagggctca

SEQ ID NO: 51080 - DNA, 20 bp, synthetic construct
  misc_feature 1..20: note = chemically synthesized
  source 1..20: mol_type = other DNA
atagcaatgggagggctcat

SEQ ID NO: 51081 - DNA, 20 bp, synthetic construct
  misc_feature 1..20: note = chemically synthesized
  source 1..20: mol_type = other DNA
caatgggagggctcataggc

SEQ ID NO: 51082 - DNA, 20 bp, synthetic construct
  misc_feature 1..20: note = chemically synthesized
  source 1..20: mol_type = other DNA
cataggcaagtcatgtcatg

SEQ ID NO: 51083 - DNA, 20 bp, synthetic construct
  misc_feature 1..20: note = chemically synthesized
  source 1..20: mol_type = other DNA
taggcaagtcatgtcatgca

SEQ ID NO: 51084 - DNA, 20 bp, synthetic construct
  misc_feature 1..20: note = chemically synthesized
  source 1..20: mol_type = other DNA
aggcaagtcatgtcatgcag

SEQ ID NO: 51085 - DNA, 20 bp, synthetic construct
  misc_feature 1..20: note = chemically synthesized
  source 1..20: mol_type = other DNA
tcatcatcccttcttgtctt

SEQ ID NO: 51086 - DNA, 20 bp, synthetic construct
  misc_feature 1..20: note = chemically synthesized
  source 1..20: mol_type = other DNA
catcatcccttcttgtcttt

SEQ ID NO: 51087 - DNA, 20 bp, synthetic construct
  misc_feature 1..20: note = chemically synthesized
  source 1..20: mol_type = other DNA
atcatcccttcttgtctttg

SEQ ID NO: 51088 - DNA, 20 bp, synthetic construct
  misc_feature 1..20: note = chemically synthesized
  source 1..20: mol_type = other DNA
ccttcttgtctttggggact

SEQ ID NO: 51089 - DNA, 20 bp, synthetic construct
  misc_feature 1..20: note = chemically synthesized
  source 1..20: mol_type = other DNA
cttcttgtctttggggactt

SEQ ID NO: 51090 - DNA, 20 bp, synthetic construct
  misc_feature 1..20: note = chemically synthesized
  source 1..20: mol_type = other DNA
tttggggacttgggtctctc

SEQ ID NO: 51091 - DNA, 20 bp, synthetic construct
  misc_feature 1..20: note = chemically synthesized
  source 1..20: mol_type = other DNA
cttgggtctctccggttgta

SEQ ID NO: 51092 - DNA, 20 bp, synthetic construct
  misc_feature 1..20: note = chemically synthesized
  source 1..20: mol_type = other DNA
ttgggtctctccggttgtat

SEQ ID NO: 51093 - DNA, 20 bp, synthetic construct
  misc_feature 1..20: note = chemically synthesized
  source 1..20: mol_type = other DNA
gggtctctccggttgtatag

SEQ ID NO: 51094 - DNA, 20 bp, synthetic construct
  misc_feature 1..20: note = chemically synthesized
  source 1..20: mol_type = other DNA
ggttgtataggagatttcgc

SEQ ID NO: 51095 - DNA, 20 bp, synthetic construct
  misc_feature 1..20: note = chemically synthesized
  source 1..20: mol_type = other DNA
gttgtataggagatttcgcc

SEQ ID NO: 51096 - DNA, 20 bp, synthetic construct
  misc_feature 1..20: note = chemically synthesized
  source 1..20: mol_type = other DNA
gcatttgaatccttcactgc

SEQ ID NO: 51097 - DNA, 20 bp, synthetic construct
  misc_feature 1..20: note = chemically synthesized
  source 1..20: mol_type = other DNA
tccttcactgctagtcatcc

SEQ ID NO: 51098 - DNA, 20 bp, synthetic construct
  misc_feature 1..20: note = chemically synthesized
  source 1..20: mol_type = other DNA
gctagtcatcctggactctg

SEQ ID NO: 51099 - DNA, 20 bp, synthetic construct
  misc_feature 1..20: note = chemically synthesized
  source 1..20: mol_type = other DNA
atccatctctcctatgttct

SEQ ID NO: 51100 - DNA, 20 bp, synthetic construct
  misc_feature 1..20: note = chemically synthesized
  source 1..20: mol_type = other DNA
tccatctctcctatgttctg

SEQ ID NO: 51101 - DNA, 20 bp, synthetic construct
  misc_feature 1..20: note = chemically synthesized
  source 1..20: mol_type = other DNA
tctctcctatgttctgaggt

SEQ ID NO: 51102 - DNA, 20 bp, synthetic construct
  misc_feature 1..20: note = chemically synthesized
  source 1..20: mol_type = other DNA
agaatgacctctctcttaac

SEQ ID NO: 51103 - DNA, 20 bp, synthetic construct
  misc_feature 1..20: note = chemically synthesized
  source 1..20: mol_type = other DNA
ctctctcttaaccagttgtc

SEQ ID NO: 51104 - DNA, 20 bp, synthetic construct
  misc_feature 1..20: note = chemically synthesized
  source 1..20: mol_type = other DNA
tctctcttaaccagttgtct

SEQ ID NO: 51105 - DNA, 20 bp, synthetic construct
  misc_feature 1..20: note = chemically synthesized
  source 1..20: mol_type = other DNA
cttaaccagttgtctgggcc

SEQ ID NO: 51106 - DNA, 20 bp, synthetic construct
  misc_feature 1..20: note = chemically synthesized
  source 1..20: mol_type = other DNA
ttaaccagttgtctgggccc

SEQ ID NO: 51107 - DNA, 20 bp, synthetic construct
  misc_feature 1..20: note = chemically synthesized
  source 1..20: mol_type = other DNA
cccaggctccattattgata

SEQ ID NO: 51108 - DNA, 20 bp, synthetic construct
  misc_feature 1..20: note = chemically synthesized
  source 1..20: mol_type = other DNA
atagtcatgatctcctctgt

SEQ ID NO: 51109 - DNA, 20 bp, synthetic construct
  misc_feature 1..20: note = chemically synthesized
  source 1..20: mol_type = other DNA
tagtcatgatctcctctgtt

SEQ ID NO: 51110 - DNA, 20 bp, synthetic construct
  misc_feature 1..20: note = chemically synthesized
  source 1..20: mol_type = other DNA
agtcatgatctcctctgttg

SEQ ID NO: 51111 - DNA, 20 bp, synthetic construct
  misc_feature 1..20: note = chemically synthesized
  source 1..20: mol_type = other DNA
gatctcctctgttggggatg

SEQ ID NO: 51112 - DNA, 20 bp, synthetic construct
  misc_feature 1..20: note = chemically synthesized
  source 1..20: mol_type = other DNA
ctcctctgttggggatgaag

SEQ ID NO: 51113 - DNA, 20 bp, synthetic construct
  misc_feature 1..20: note = chemically synthesized
  source 1..20: mol_type = other DNA
tcctctgttggggatgaagt

SEQ ID NO: 51114 - DNA, 20 bp, synthetic construct
  misc_feature 1..20: note = chemically synthesized
  source 1..20: mol_type = other DNA
gggatgaagtaggcaaattt

SEQ ID NO: 51115 - DNA, 20 bp, synthetic construct
  misc_feature 1..20: note = chemically synthesized
  source 1..20: mol_type = other DNA
ggatgaagtaggcaaatttg

SEQ ID NO: 51116 - DNA, 20 bp, synthetic construct
  misc_feature 1..20: note = chemically synthesized
  source 1..20: mol_type = other DNA
tctcacattcttttcttgaa

SEQ ID NO: 51117 - DNA, 20 bp, synthetic construct
  misc_feature 1..20: note = chemically synthesized
  source 1..20: mol_type = other DNA
acattcttttcttgaacaga

SEQ ID NO: 51118 - DNA, 20 bp, synthetic construct
  misc_feature 1..20: note = chemically synthesized
  source 1..20: mol_type = other DNA
tcttttcttgaacagaaaga

SEQ ID NO: 51119 - DNA, 20 bp, synthetic construct
  misc_feature 1..20: note = chemically synthesized
  source 1..20: mol_type = other DNA
cttgaacagaaagatagaac

SEQ ID NO: 51120 - DNA, 20 bp, synthetic construct
  misc_feature 1..20: note = chemically synthesized
  source 1..20: mol_type = other DNA
aagatagaactggaaattaa

SEQ ID NO: 51121 - DNA, 20 bp, synthetic construct
  misc_feature 1..20: note = chemically synthesized
  source 1..20: mol_type = other DNA
atagaactggaaattaatag

SEQ ID NO: 51122 - DNA, 20 bp, synthetic construct
  misc_feature 1..20: note = chemically synthesized
  source 1..20: mol_type = other DNA
agtatataaattcaaaattt

SEQ ID NO: 51123 - DNA, 20 bp, synthetic construct
  misc_feature 1..20: note = chemically synthesized
  source 1..20: mol_type = other DNA
tagctttaataacatttaat

SEQ ID NO: 51124 - DNA, 20 bp, synthetic construct
  misc_feature 1..20: note = chemically synthesized
  source 1..20: mol_type = other DNA
taatcagacataaataatta

SEQ ID NO: 51125 - DNA, 20 bp, synthetic construct
  misc_feature 1..20: note = chemically synthesized
  source 1..20: mol_type = other DNA
gaatttcaataaataaattt

SEQ ID NO: 51126 - DNA, 20 bp, synthetic construct
  misc_feature 1..20: note = chemically synthesized
  source 1..20: mol_type = other DNA
ataaattttagttctaatat

SEQ ID NO: 51127 - DNA, 20 bp, synthetic construct
  misc_feature 1..20: note = chemically synthesized
  source 1..20: mol_type = other DNA
taatattcatactttttctg

SEQ ID NO: 51128 - DNA, 20 bp, synthetic construct
  misc_feature 1..20: note = chemically synthesized
  source 1..20: mol_type = other DNA
aatattcatactttttctga

SEQ ID NO: 51129 - DNA, 20 bp, synthetic construct
  misc_feature 1..20: note = chemically synthesized
  source 1..20: mol_type = other DNA
aaggctttactaatttgata

SEQ ID NO: 51130 - DNA, 20 bp, synthetic construct
  misc_feature 1..20: note = chemically synthesized
  source 1..20: mol_type = other DNA
actattcttattccactgtg

SEQ ID NO: 51131 - DNA, 20 bp, synthetic construct
  misc_feature 1..20: note = chemically synthesized
  source 1..20: mol_type = other DNA
ttattccactgtgtggtgat

SEQ ID NO: 51132 - DNA, 20 bp, synthetic construct
  misc_feature 1..20: note = chemically synthesized
  source 1..20: mol_type = other DNA
tccactgtgtggtgatgaga

SEQ ID NO: 51133 - DNA, 20 bp, synthetic construct
  misc_feature 1..20: note = chemically synthesized
  source 1..20: mol_type = other DNA
ctgtgtggtgatgagaaagt

SEQ ID NO: 51134 - DNA, 20 bp, synthetic construct
  misc_feature 1..20: note = chemically synthesized
  source 1..20: mol_type = other DNA
gtgtggtgatgagaaagtga

SEQ ID NO: 51135 - DNA, 20 bp, synthetic construct
  misc_feature 1..20: note = chemically synthesized
  source 1..20: mol_type = other DNA
tgagaaagtgagagatgttc

SEQ ID NO: 51136 - DNA, 20 bp, synthetic construct
  misc_feature 1..20: note = chemically synthesized
  source 1..20: mol_type = other DNA
agaaagtgagagatgttctg

SEQ ID NO: 51137 - DNA, 20 bp, synthetic construct
  misc_feature 1..20: note = chemically synthesized
  source 1..20: mol_type = other DNA
agtgagagatgttctggaga

SEQ ID NO: 51138 - DNA, 20 bp, synthetic construct
  misc_feature 1..20: note = chemically synthesized
  source 1..20: mol_type = other DNA
tgttctggagatggtgatta

SEQ ID NO: 51139 - DNA, 20 bp, synthetic construct
  misc_feature 1..20: note = chemically synthesized
  source 1..20: mol_type = other DNA
ctggagatggtgattataga

SEQ ID NO: 51140 - DNA, 20 bp, synthetic construct
  misc_feature 1..20: note = chemically synthesized
  source 1..20: mol_type = other DNA
gattatagatagcttccctg

SEQ ID NO: 51141 - DNA, 20 bp, synthetic construct
  misc_feature 1..20: note = chemically synthesized
  source 1..20: mol_type = other DNA
agatagcttccctgaagcca

SEQ ID NO: 51142 - DNA, 20 bp, synthetic construct
  misc_feature 1..20: note = chemically synthesized
  source 1..20: mol_type = other DNA
ctgaagccatagtaaccccc

SEQ ID NO: 51143 - DNA, 20 bp, synthetic construct
  misc_feature 1..20: note = chemically synthesized
  source 1..20: mol_type = other DNA
gaagccatagtaaccccctg

SEQ ID NO: 51144 - DNA, 20 bp, synthetic construct
  misc_feature 1..20: note = chemically synthesized
  source 1..20: mol_type = other DNA
gtaaccccctggagaaaaat

SEQ ID NO: 51145 - DNA, 20 bp, synthetic construct
  misc_feature 1..20: note = chemically synthesized
  source 1..20: mol_type = other DNA
ccctggagaaaaattggacc

SEQ ID NO: 51146 - DNA, 20 bp, synthetic construct
  misc_feature 1..20: note = chemically synthesized
  source 1..20: mol_type = other DNA
ctggagaaaaattggacctg

SEQ ID NO: 51147 - DNA, 20 bp, synthetic construct
  misc_feature 1..20: note = chemically synthesized
  source 1..20: mol_type = other DNA
gaaaaattggacctggagtc

SEQ ID NO: 51148 - DNA, 20 bp, synthetic construct
  misc_feature 1..20: note = chemically synthesized
  source 1..20: mol_type = other DNA
aaattggacctggagtctag

SEQ ID NO: 51149 - DNA, 20 bp, synthetic construct
  misc_feature 1..20: note = chemically synthesized
  source 1..20: mol_type = other DNA
ggacctggagtctagcagcc

SEQ ID NO: 51150 - DNA, 20 bp, synthetic construct
  misc_feature 1..20: note = chemically synthesized
  source 1..20: mol_type = other DNA
gacctggagtctagcagcct

SEQ ID NO: 51151 - DNA, 20 bp, synthetic construct
  misc_feature 1..20: note = chemically synthesized
  source 1..20: mol_type = other DNA
ggagtctagcagcctaggta

SEQ ID NO: 51152 - DNA, 20 bp, synthetic construct
  misc_feature 1..20: note = chemically synthesized
  source 1..20: mol_type = other DNA
gagtctagcagcctaggtat

SEQ ID NO: 51153 - DNA, 20 bp, synthetic construct
  misc_feature 1..20: note = chemically synthesized
  source 1..20: mol_type = other DNA
ggtatgggtactcgatttct

SEQ ID NO: 51154 - DNA, 20 bp, synthetic construct
  misc_feature 1..20: note = chemically synthesized
  source 1..20: mol_type = other DNA
tgggtactcgatttcttaga

SEQ ID NO: 51155 - DNA, 20 bp, synthetic construct
  misc_feature 1..20: note = chemically synthesized
  source 1..20: mol_type = other DNA
atttcctttatcttaaaaat

SEQ ID NO: 51156 - DNA, 20 bp, synthetic construct
  misc_feature 1..20: note = chemically synthesized
  source 1..20: mol_type = other DNA
tttcctttatcttaaaaata

SEQ ID NO: 51157 - DNA, 20 bp, synthetic construct
  misc_feature 1..20: note = chemically synthesized
  source 1..20: mol_type = other DNA
ttcctttatcttaaaaataa

SEQ ID NO: 51158 - DNA, 20 bp, synthetic construct
  misc_feature 1..20: note = chemically synthesized
  source 1..20: mol_type = other DNA
tcttaaaaataagggtattg

SEQ ID NO: 51159 - DNA, 20 bp, synthetic construct
  misc_feature 1..20: note = chemically synthesized
  source 1..20: mol_type = other DNA
taaaaataagggtattgaag

SEQ ID NO: 51160 - DNA, 20 bp, synthetic construct
  misc_feature 1..20: note = chemically synthesized
  source 1..20: mol_type = other DNA
agggtattgaagtagaattc

SEQ ID NO: 51161 - DNA, 20 bp, synthetic construct
  misc_feature 1..20: note = chemically synthesized
  source 1..20: mol_type = other DNA
aagtagaattctagaatttt

SEQ ID NO: 51162 - DNA, 20 bp, synthetic construct
  misc_feature 1..20: note = chemically synthesized
  source 1..20: mol_type = other DNA
gtagaattctagaattttca

SEQ ID NO: 51163 - DNA, 20 bp, synthetic construct
  misc_feature 1..20: note = chemically synthesized
  source 1..20: mol_type = other DNA
tagaattctagaattttcag

SEQ ID NO: 51164 - DNA, 20 bp, synthetic construct
  misc_feature 1..20: note = chemically synthesized
  source 1..20: mol_type = other DNA
acaacttaaaatatgtgtaa

SEQ ID NO: 51165 - DNA, 20 bp, synthetic construct
  misc_feature 1..20: note = chemically synthesized
  source 1..20: mol_type = other DNA
ctgttcattttaatatattt

SEQ ID NO: 51166 - DNA, 20 bp, synthetic construct
  misc_feature 1..20: note = chemically synthesized
  source 1..20: mol_type = other DNA
tgttcattttaatatattta

SEQ ID NO: 51167 - DNA, 20 bp, synthetic construct
  misc_feature 1..20: note = chemically synthesized
  source 1..20: mol_type = other DNA
ttaaggatgaattttttaaa

SEQ ID NO: 51168 - DNA, 20 bp, synthetic construct
  misc_feature 1..20: note = chemically synthesized
  source 1..20: mol_type = other DNA
aaaagttgatttcataaaaa

SEQ ID NO: 51169 - DNA, 20 bp, synthetic construct
  misc_feature 1..20: note = chemically synthesized
  source 1..20: mol_type = other DNA
aaagttgatttcataaaaac

SEQ ID NO: 51170 - DNA, 20 bp, synthetic construct
  misc_feature 1..20: note = chemically synthesized
  source 1..20: mol_type = other DNA
tgatttcataaaaacgggaa

SEQ ID NO: 51171 - DNA, 20 bp, synthetic construct
  misc_feature 1..20: note = chemically synthesized
  source 1..20: mol_type = other DNA
ttcataaaaacgggaataga

SEQ ID NO: 51172 - DNA, 20 bp, synthetic construct
  misc_feature 1..20: note = chemically synthesized
  source 1..20: mol_type = other DNA
taaaaacgggaatagaaaga

SEQ ID NO: 51173 - DNA, 20 bp, synthetic construct
  misc_feature 1..20: note = chemically synthesized
  source 1..20: mol_type = other DNA
ggaatagaaagatggttcca

SEQ ID NO: 51174 - DNA, 20 bp, synthetic construct
  misc_feature 1..20: note = chemically synthesized
  source 1..20: mol_type = other DNA
gaatagaaagatggttccat

SEQ ID NO: 51175 - DNA, 20 bp, synthetic construct
  misc_feature 1..20: note = chemically synthesized
  source 1..20: mol_type = other DNA
gatggttccataggctgact

SEQ ID NO: 51176 - DNA, 20 bp, synthetic construct
  misc_feature 1..20: note = chemically synthesized
  source 1..20: mol_type = other DNA
tggttccataggctgactga

SEQ ID NO: 51177 - DNA, 20 bp, synthetic construct
  misc_feature 1..20: note = chemically synthesized
  source 1..20: mol_type = other DNA
ccataggctgactgagagtg

SEQ ID NO: 51178 - DNA, 20 bp, synthetic construct
  misc_feature 1..20: note = chemically synthesized
  source 1..20: mol_type = other DNA
ataggctgactgagagtgta

SEQ ID NO: 51179 - DNA, 20 bp, synthetic construct
  misc_feature 1..20: note = chemically synthesized
  source 1..20: mol_type = other DNA
taggctgactgagagtgtag

SEQ ID NO: 51180 - DNA, 20 bp, synthetic construct
  misc_feature 1..20: note = chemically synthesized
  source 1..20: mol_type = other DNA
ggctgactgagagtgtagag

SEQ ID NO: 51181 - DNA, 20 bp, synthetic construct
  misc_feature 1..20: note = chemically synthesized
  source 1..20: mol_type = other DNA
gctgactgagagtgtagagg

SEQ ID NO: 51182 - DNA, 20 bp, synthetic construct
  misc_feature 1..20: note = chemically synthesized
  source 1..20: mol_type = other DNA
ctgactgagagtgtagagga

SEQ ID NO: 51183 - DNA, 20 bp, synthetic construct
  misc_feature 1..20: note = chemically synthesized
  source 1..20: mol_type = other DNA
ctgagagtgtagaggaggga

SEQ ID NO: 51184 - DNA, 20 bp, synthetic construct
  misc_feature 1..20: note = chemically synthesized
  source 1..20: mol_type = other DNA
tgagagtgtagaggagggat

SEQ ID NO: 51185 - DNA, 20 bp, synthetic construct
  misc_feature 1..20: note = chemically synthesized
  source 1..20: mol_type = other DNA
gagtgtagaggagggatggg

SEQ ID NO: 51186 - DNA, 20 bp, synthetic construct
  misc_feature 1..20: note = chemically synthesized
  source 1..20: mol_type = other DNA
agtgtagaggagggatggga

SEQ ID NO: 51187 - DNA, 20 bp, synthetic construct
  misc_feature 1..20: note = chemically synthesized
  source 1..20: mol_type = other DNA
gtgtagaggagggatgggaa

SEQ ID NO: 51188 - DNA, 20 bp, synthetic construct
  misc_feature 1..20: note = chemically synthesized
  source 1..20: mol_type = other DNA
agaggagggatgggaaggga

SEQ ID NO: 51189 - DNA, 20 bp, synthetic construct
  misc_feature 1..20: note = chemically synthesized
  source 1..20: mol_type = other DNA
ggagggatgggaagggaaag

SEQ ID NO: 51190 - DNA, 20 bp, synthetic construct
  misc_feature 1..20: note = chemically synthesized
  source 1..20: mol_type = other DNA
aagggaaagaagttgatctt

SEQ ID NO: 51191 - DNA, 20 bp, synthetic construct
  misc_feature 1..20: note = chemically synthesized
  source 1..20: mol_type = other DNA
gaaagaagttgatcttcagt

SEQ ID NO: 51192 - DNA, 20 bp, synthetic construct
  misc_feature 1..20: note = chemically synthesized
  source 1..20: mol_type = other DNA
aagttgatcttcagttagac

SEQ ID NO: 51193 - DNA, 20 bp, synthetic construct
  misc_feature 1..20: note = chemically synthesized
  source 1..20: mol_type = other DNA
gttgatcttcagttagacta

SEQ ID NO: 51194 - DNA, 20 bp, synthetic construct
  misc_feature 1..20: note = chemically synthesized
  source 1..20: mol_type = other DNA
ttgatcttcagttagactag

SEQ ID NO: 51195 - DNA, 20 bp, synthetic construct
  misc_feature 1..20: note = chemically synthesized
  source 1..20: mol_type = other DNA
ttcagttagactagaggaat

SEQ ID NO: 51196 - DNA, 20 bp, synthetic construct
  misc_feature 1..20: note = chemically synthesized
  source 1..20: mol_type = other DNA
tagactagaggaataagttt

SEQ ID NO: 51197 - DNA, 20 bp, synthetic construct
  misc_feature 1..20: note = chemically synthesized
  source 1..20: mol_type = other DNA
tagtgatctctcacactgca

SEQ ID NO: 51198 - DNA, 20 bp, synthetic construct
  misc_feature 1..20: note = chemically synthesized
  source 1..20: mol_type = other DNA
ctcacactgcatagtgaaca

SEQ ID NO: 51199 - DNA, 20 bp, synthetic construct
  misc_feature 1..20: note = chemically synthesized
  source 1..20: mol_type = other DNA
ttatgttctcaccacaaaaa

SEQ ID NO: 51200 - DNA, 20 bp, synthetic construct
  misc_feature 1..20: note = chemically synthesized
  source 1..20: mol_type = other DNA
gttctcaccacaaaaaaagt

SEQ ID NO: 51201 - DNA, 20 bp, synthetic construct
  misc_feature 1..20: note = chemically synthesized
  source 1..20: mol_type = other DNA
ctcaccacaaaaaaagttgg

SEQ ID NO: 51202 - DNA, 20 bp, synthetic construct
  misc_feature 1..20: note = chemically synthesized
  source 1..20: mol_type = other DNA
tcaccacaaaaaaagttgga

SEQ ID NO: 51203 - DNA, 20 bp, synthetic construct
  misc_feature 1..20: note = chemically synthesized
  source 1..20: mol_type = other DNA
aaggtgattcatatgctaat

SEQ ID NO: 51204 - DNA, 20 bp, synthetic construct
  misc_feature 1..20: note = chemically synthesized
  source 1..20: mol_type = other DNA
tcatatgctaattagcttga

SEQ ID NO: 51205 - DNA, 20 bp, synthetic construct
  misc_feature 1..20: note = chemically synthesized
  source 1..20: mol_type = other DNA
ctctctctacaatgtatata

SEQ ID NO: 51206 - DNA, 20 bp, synthetic construct
  misc_feature 1..20: note = chemically synthesized
  source 1..20: mol_type = other DNA
tatatgcacttattatttgc

SEQ ID NO: 51207 - DNA, 20 bp, synthetic construct
  misc_feature 1..20: note = chemically synthesized
  source 1..20: mol_type = other DNA
atatgcacttattatttgcc

SEQ ID NO: 51208 - DNA, 20 bp, synthetic construct
  misc_feature 1..20: note = chemically synthesized
  source 1..20: mol_type = other DNA
cctccttttacttttctgct

SEQ ID NO: 51209 - DNA, 20 bp, synthetic construct
  misc_feature 1..20: note = chemically synthesized
  source 1..20: mol_type = other DNA
cttggttttcttctttcatt

SEQ ID NO: 51210 - DNA, 20 bp, synthetic construct
  misc_feature 1..20: note = chemically synthesized
  source 1..20: mol_type = other DNA
ttctttcattcagtgtttac

SEQ ID NO: 51211 - DNA, 20 bp, synthetic construct
  misc_feature 1..20: note = chemically synthesized
  source 1..20: mol_type = other DNA
cagtgtttaccagtttctta

SEQ ID NO: 51212 - DNA, 20 bp, synthetic construct
  misc_feature 1..20: note = chemically synthesized
  source 1..20: mol_type = other DNA
cttatagttaattttatttt

SEQ ID NO: 51213 - DNA, 20 bp, synthetic construct
  misc_feature 1..20: note = chemically synthesized
  source 1..20: mol_type = other DNA
aagctgtctcacattttctg

SEQ ID NO: 51214 - DNA, 20 bp, synthetic construct
  misc_feature 1..20: note = chemically synthesized
  source 1..20: mol_type = other DNA
gtctcacattttctgaagaa

SEQ ID NO: 51215 - DNA, 20 bp, synthetic construct
  misc_feature 1..20: note = chemically synthesized
  source 1..20: mol_type = other DNA
tctcacattttctgaagaaa

SEQ ID NO: 51216 - DNA, 20 bp, synthetic construct
  misc_feature 1..20: note = chemically synthesized
  source 1..20: mol_type = other DNA
ctcacattttctgaagaaaa

SEQ ID NO: 51217 - DNA, 20 bp, synthetic construct
  misc_feature 1..20: note = chemically synthesized
  source 1..20: mol_type = other DNA
gaagaaaagggaacatatta

SEQ ID NO: 51218 - DNA, 20 bp, synthetic construct
  misc_feature 1..20: note = chemically synthesized
  source 1..20: mol_type = other DNA
acaaatacactatcttgcat

SEQ ID NO: 51219 - DNA, 20 bp, synthetic construct
  misc_feature 1..20: note = chemically synthesized
  source 1..20: mol_type = other DNA
gcatgagatgatttatgtca

SEQ ID NO: 51220 - DNA, 20 bp, synthetic construct
  misc_feature 1..20: note = chemically synthesized
  source 1..20: mol_type = other DNA
tcttataaaaacttctcaaa

SEQ ID NO: 51221 - DNA, 20 bp, synthetic construct
  misc_feature 1..20: note = chemically synthesized
  source 1..20: mol_type = other DNA
ataaaaacttctcaaatggt

SEQ ID NO: 51222 - DNA, 20 bp, synthetic construct
  misc_feature 1..20: note = chemically synthesized
  source 1..20: mol_type = other DNA
aaacttctcaaatggttaga

SEQ ID NO: 51223 - DNA, 20 bp, synthetic construct
  misc_feature 1..20: note = chemically synthesized
  source 1..20: mol_type = other DNA
ctcaaatggttagatggcta

SEQ ID NO: 51224 - DNA, 20 bp, synthetic construct
  misc_feature 1..20: note = chemically synthesized
  source 1..20: mol_type = other DNA
gttagatggctacagttgaa

SEQ ID NO: 51225 - DNA, 20 bp, synthetic construct
  misc_feature 1..20: note = chemically synthesized
  source 1..20: mol_type = other DNA
gatggctacagttgaacaga

SEQ ID NO: 51226 - DNA, 20 bp, synthetic construct
  misc_feature 1..20: note = chemically synthesized
  source 1..20: mol_type = other DNA
atattttttataatgcttct

SEQ ID NO: 51227 - DNA, 20 bp, synthetic construct
  misc_feature 1..20: note = chemically synthesized
  source 1..20: mol_type = other DNA
tattttttataatgcttcta

SEQ ID NO: 51228 - DNA, 20 bp, synthetic construct
  misc_feature 1..20: note = chemically synthesized
  source 1..20: mol_type = other DNA
tttataatgcttctaaggta

SEQ ID NO: 51229 - DNA, 20 bp, synthetic construct
  misc_feature 1..20: note = chemically synthesized
  source 1..20: mol_type = other DNA
ctaatttttaaaaaatattt

SEQ ID NO: 51230 - DNA, 20 bp, synthetic construct
  misc_feature 1..20: note = chemically synthesized
  source 1..20: mol_type = other DNA
aaaaaatattttagtaatga

SEQ ID NO: 51231 - DNA, 20 bp, synthetic construct
  misc_feature 1..20: note = chemically synthesized
  source 1..20: mol_type = other DNA
aaaaatattttagtaatgat

SEQ ID NO: 51232 - DNA, 20 bp, synthetic construct
  misc_feature 1..20: note = chemically synthesized
  source 1..20: mol_type = other DNA
aatgatgggaatattattta

SEQ ID NO: 51233 - DNA, 20 bp, synthetic construct
  misc_feature 1..20: note = chemically synthesized
  source 1..20: mol_type = other DNA
atataatgaaatatgtaata

SEQ ID NO: 51234 - DNA, 20 bp, synthetic construct
  misc_feature 1..20: note = chemically synthesized
  source 1..20: mol_type = other DNA
atgaaatatgtaataaagtc

SEQ ID NO: 51235 - DNA, 20 bp, synthetic construct
  misc_feature 1..20: note = chemically synthesized
  source 1..20: mol_type = other DNA
tataatatataataaatata

SEQ ID NO: 51236 - DNA, 20 bp, synthetic construct
  misc_feature 1..20: note = chemically synthesized
  source 1..20: mol_type = other DNA
tgtatctatatatgtttata

SEQ ID NO: 51237 - DNA, 20 bp, synthetic construct
  misc_feature 1..20: note = chemically synthesized
  source 1..20: mol_type = other DNA
tataaagtcattcctctaat

SEQ ID NO: 51238 - DNA, 20 bp, synthetic construct
  misc_feature 1..20: note = chemically synthesized
  source 1..20: mol_type = other DNA
ataaagtcattcctctaatt

SEQ ID NO: 51239 - DNA, 20 bp, synthetic construct
  misc_feature 1..20: note = chemically synthesized
  source 1..20: mol_type = other DNA
ctaattaggtcataaccatt

SEQ ID NO: 51240 - DNA, 20 bp, synthetic construct
  misc_feature 1..20: note = chemically synthesized
  source 1..20: mol_type = other DNA
taattaggtcataaccattc

SEQ ID NO: 51241 - DNA, 20 bp, synthetic construct
  misc_feature 1..20: note = chemically synthesized
  source 1..20: mol_type = other DNA
tcataaccattcaggtaaac

SEQ ID NO: 51242 - DNA, 20 bp, synthetic construct
  misc_feature 1..20: note = chemically synthesized
  source 1..20: mol_type = other DNA
ttcaggtaaactggaaattt

SEQ ID NO: 51243 - DNA, 20 bp, synthetic construct
  misc_feature 1..20: note = chemically synthesized
  source 1..20: mol_type = other DNA
ctggaaatttaagcctactt

SEQ ID NO: 51244 - DNA, 20 bp, synthetic construct
  misc_feature 1..20: note = chemically synthesized
  source 1..20: mol_type = other DNA
tggaaatttaagcctacttc

SEQ ID NO: 51245 - DNA, 20 bp, synthetic construct
  misc_feature 1..20: note = chemically synthesized
  source 1..20: mol_type = other DNA
ttaagcctacttcaggtttg

SEQ ID NO: 51246 - DNA, 20 bp, synthetic construct
  misc_feature 1..20: note = chemically synthesized
  source 1..20: mol_type = other DNA
tacttcaggtttgtggtaaa

SEQ ID NO: 51247 - DNA, 20 bp, synthetic construct
  misc_feature 1..20: note = chemically synthesized
  source 1..20: mol_type = other DNA
taaatagattctctctgaac

SEQ ID NO: 51248 - DNA, 20 bp, synthetic construct
  misc_feature 1..20: note = chemically synthesized
  source 1..20: mol_type = other DNA
tctctctgaactagcatatt

SEQ ID NO: 51249 - DNA, 20 bp, synthetic construct
  misc_feature 1..20: note = chemically synthesized
  source 1..20: mol_type = other DNA
gcatattcagaatcattaaa

SEQ ID NO: 51250 - DNA, 20 bp, synthetic construct
  misc_feature 1..20: note = chemically synthesized
  source 1..20: mol_type = other DNA
attcagaatcattaaacagt

SEQ ID NO: 51251 - DNA, 20 bp, synthetic construct
  misc_feature 1..20: note = chemically synthesized
  source 1..20: mol_type = other DNA
tcattaaacagtcagttctt

SEQ ID NO: 51252 - DNA, 20 bp, synthetic construct
  misc_feature 1..20: note = chemically synthesized
  source 1..20: mol_type = other DNA
aaacagtcagttctttggac

SEQ ID NO: 51253 - DNA, 20 bp, synthetic construct
  misc_feature 1..20: note = chemically synthesized
  source 1..20: mol_type = other DNA
agttctttggacaagtctta

SEQ ID NO: 51254 - DNA, 20 bp, synthetic construct
  misc_feature 1..20: note = chemically synthesized
  source 1..20: mol_type = other DNA
atagaatgttcttacctctt

SEQ ID NO: 51255 - DNA, 20 bp, synthetic construct
  misc_feature 1..20: note = chemically synthesized
  source 1..20: mol_type = other DNA
cttacctcttcagccatccc

SEQ ID NO: 51256 - DNA, 20 bp, synthetic construct
  misc_feature 1..20: note = chemically synthesized
  source 1..20: mol_type = other DNA
tcagccatcccaagactctt

SEQ ID NO: 51257 - DNA, 20 bp, synthetic construct
  misc_feature 1..20: note = chemically synthesized
  source 1..20: mol_type = other DNA
cagccatcccaagactcttg

SEQ ID NO: 51258 - DNA, 20 bp, synthetic construct
  misc_feature 1..20: note = chemically synthesized
  source 1..20: mol_type = other DNA
agccatcccaagactcttga

SEQ ID NO: 51259 - DNA, 20 bp, synthetic construct
  misc_feature 1..20: note = chemically synthesized
  source 1..20: mol_type = other DNA
gcctgacctcgcttacacta

SEQ ID NO: 51260 - DNA, 20 bp, synthetic construct
  misc_feature 1..20: note = chemically synthesized
  source 1..20: mol_type = other DNA
tgacctcgcttacactaaag

SEQ ID NO: 51261 - DNA, 20 bp, synthetic construct
  misc_feature 1..20: note = chemically synthesized
  source 1..20: mol_type = other DNA
atctgccttatgcatcactg

SEQ ID NO: 51262 - DNA, 20 bp, synthetic construct
  misc_feature 1..20: note = chemically synthesized
  source 1..20: mol_type = other DNA
tgccttatgcatcactgaag

SEQ ID NO: 51263 - DNA, 20 bp, synthetic construct
  misc_feature 1..20: note = chemically synthesized
  source 1..20: mol_type = other DNA
gccttatgcatcactgaagt

SEQ ID NO: 51264 - DNA, 20 bp, synthetic construct
  misc_feature 1..20: note = chemically synthesized
  source 1..20: mol_type = other DNA
ccttatgcatcactgaagta

SEQ ID NO: 51265 - DNA, 20 bp, synthetic construct
  misc_feature 1..20: note = chemically synthesized
  source 1..20: mol_type = other DNA
ttatgcatcactgaagtagg

SEQ ID NO: 51266 - DNA, 20 bp, synthetic construct
  misc_feature 1..20: note = chemically synthesized
  source 1..20: mol_type = other DNA
tatgcatcactgaagtaggg

SEQ ID NO: 51267 - DNA, 20 bp, synthetic construct
  misc_feature 1..20: note = chemically synthesized
  source 1..20: mol_type = other DNA
atgcatcactgaagtaggga

SEQ ID NO: 51268 - DNA, 20 bp, synthetic construct
  misc_feature 1..20: note = chemically synthesized
  source 1..20: mol_type = other DNA
catcactgaagtagggaggg

SEQ ID NO: 51269 - DNA, 20 bp, synthetic construct
  misc_feature 1..20: note = chemically synthesized
  source 1..20: mol_type = other DNA
actgaagtagggagggaaga

SEQ ID NO: 51270 - DNA, 20 bp, synthetic construct
  misc_feature 1..20: note = chemically synthesized
  source 1..20: mol_type = other DNA
gatgaactacttctgacccc

SEQ ID NO: 51271 - DNA, 20 bp, synthetic construct
  misc_feature 1..20: note = chemically synthesized
  source 1..20: mol_type = other DNA
gaactacttctgacccctag

SEQ ID NO: 51272 - DNA, 20 bp, synthetic construct
  misc_feature 1..20: note = chemically synthesized
  source 1..20: mol_type = other DNA
ttctgacccctagtggtgtc

SEQ ID NO: 51273 - DNA, 20 bp, synthetic construct
  misc_feature 1..20: note = chemically synthesized
  source 1..20: mol_type = other DNA
acccctagtggtgtccagaa

SEQ ID NO: 51274 - DNA, 20 bp, synthetic construct
  misc_feature 1..20: note = chemically synthesized
  source 1..20: mol_type = other DNA
gtgtccagaaaagaccatta

SEQ ID NO: 51275 - DNA, 20 bp, synthetic construct
  misc_feature 1..20: note = chemically synthesized
  source 1..20: mol_type = other DNA
tgtccagaaaagaccattaa

SEQ ID NO: 51276 - DNA, 20 bp, synthetic construct
  misc_feature 1..20: note = chemically synthesized
  source 1..20: mol_type = other DNA
cattaaaggaatgaccttta

SEQ ID NO: 51277 - DNA, 20 bp, synthetic construct
  misc_feature 1..20: note = chemically synthesized
  source 1..20: mol_type = other DNA
attaaaggaatgacctttaa

SEQ ID NO: 51278 - DNA, 20 bp, synthetic construct
  misc_feature 1..20: note = chemically synthesized
  source 1..20: mol_type = other DNA
aaggaatgacctttaaagga

SEQ ID NO: 51279 - DNA, 20 bp, synthetic construct
  misc_feature 1..20: note = chemically synthesized
  source 1..20: mol_type = other DNA
ggacatacaattttttgtcc

SEQ ID NO: 51280 - DNA, 20 bp, synthetic construct
  misc_feature 1..20: note = chemically synthesized
  source 1..20: mol_type = other DNA
gacatacaattttttgtcca

SEQ ID NO: 51281 - DNA, 20 bp, synthetic construct
  misc_feature 1..20: note = chemically synthesized
  source 1..20: mol_type = other DNA
atacaattttttgtccaagg

SEQ ID NO: 51282 - DNA, 20 bp, synthetic construct
  misc_feature 1..20: note = chemically synthesized
  source 1..20: mol_type = other DNA
tacaattttttgtccaaggc

SEQ ID NO: 51283 - DNA, 20 bp, synthetic construct
  misc_feature 1..20: note = chemically synthesized
  source 1..20: mol_type = other DNA
tgtccaaggcaggacatgtg

SEQ ID NO: 51284 - DNA, 20 bp, synthetic construct
  misc_feature 1..20: note = chemically synthesized
  source 1..20: mol_type = other DNA
gtccaaggcaggacatgtgt

SEQ ID NO: 51285 - DNA, 20 bp, synthetic construct
  misc_feature 1..20: note = chemically synthesized
  source 1..20: mol_type = other DNA
ggacatgtgtgggtgtcttt

SEQ ID NO: 51286 - DNA, 20 bp, synthetic construct
  misc_feature 1..20: note = chemically synthesized
  source 1..20: mol_type = other DNA
tctttcagtaattatgttct

SEQ ID NO: 51287 - DNA, 20 bp, synthetic construct
  misc_feature 1..20: note = chemically synthesized
  source 1..20: mol_type = other DNA
cagtaattatgttctaagaa

SEQ ID NO: 51288 - DNA, 20 bp, synthetic construct
  misc_feature 1..20: note = chemically synthesized
  source 1..20: mol_type = other DNA
cagcaaaaactccactgcct

SEQ ID NO: 51289 - DNA, 20 bp, synthetic construct
  misc_feature 1..20: note = chemically synthesized
  source 1..20: mol_type = other DNA
aactccactgccttggcaaa

SEQ ID NO: 51290 - DNA, 20 bp, synthetic construct
  misc_feature 1..20: note = chemically synthesized
  source 1..20: mol_type = other DNA
actccactgccttggcaaat

SEQ ID NO: 51291 - DNA, 20 bp, synthetic construct
  misc_feature 1..20: note = chemically synthesized
  source 1..20: mol_type = other DNA
cttggcaaataggaatgttt

SEQ ID NO: 51292 - DNA, 20 bp, synthetic construct
  misc_feature 1..20: note = chemically synthesized
  source 1..20: mol_type = other DNA
ataggaatgttttagttcta

SEQ ID NO: 51293 - DNA, 20 bp, synthetic construct
  misc_feature 1..20: note = chemically synthesized
  source 1..20: mol_type = other DNA
tttagttctatagaattata

SEQ ID NO: 51294 - DNA, 20 bp, synthetic construct
  misc_feature 1..20: note = chemically synthesized
  source 1..20: mol_type = other DNA
agttctatagaattataaag

SEQ ID NO: 51295 - DNA, 20 bp, synthetic construct
  misc_feature 1..20: note = chemically synthesized
  source 1..20: mol_type = other DNA
atatactttctctatgtctt

SEQ ID NO: 51296 - DNA, 20 bp, synthetic construct
  misc_feature 1..20: note = chemically synthesized
  source 1..20: mol_type = other DNA
gtctttggaacaatgactat

SEQ ID NO: 51297 - DNA, 20 bp, synthetic construct
  misc_feature 1..20: note = chemically synthesized
  source 1..20: mol_type = other DNA
ttggtcattaccctatttta

SEQ ID NO: 51298 - DNA, 20 bp, synthetic construct
  misc_feature 1..20: note = chemically synthesized
  source 1..20: mol_type = other DNA
tcattaccctattttaaagt

SEQ ID NO: 51299 - DNA, 20 bp, synthetic construct
  misc_feature 1..20: note = chemically synthesized
  source 1..20: mol_type = other DNA
taccctattttaaagtaagc

SEQ ID NO: 51300 - DNA, 20 bp, synthetic construct
  misc_feature 1..20: note = chemically synthesized
  source 1..20: mol_type = other DNA
aaagtaagcaagtaatcaca

SEQ ID NO: 51301 - DNA, 20 bp, synthetic construct
  misc_feature 1..20: note = chemically synthesized
  source 1..20: mol_type = other DNA
aagtaagcaagtaatcacac

SEQ ID NO: 51302 - DNA, 20 bp, synthetic construct
  misc_feature 1..20: note = chemically synthesized
  source 1..20: mol_type = other DNA
agtaagcaagtaatcacaca

SEQ ID NO: 51303 - DNA, 20 bp, synthetic construct
  misc_feature 1..20: note = chemically synthesized
  source 1..20: mol_type = other DNA
acacagggaattattctgaa

SEQ ID NO: 51304 - DNA, 20 bp, synthetic construct
  misc_feature 1..20: note = chemically synthesized
  source 1..20: mol_type = other DNA
agggaattattctgaaaaga

SEQ ID NO: 51305 - DNA, 20 bp, synthetic construct
  misc_feature 1..20: note = chemically synthesized
  source 1..20: mol_type = other DNA
acagaaaaaaaaaaaaaacc

SEQ ID NO: 51306 - DNA, 20 bp, synthetic construct
  misc_feature 1..20: note = chemically synthesized
  source 1..20: mol_type = other DNA
agaaaaaaaaaaaaaaccaa

SEQ ID NO: 51307 - DNA, 20 bp, synthetic construct
  misc_feature 1..20: note = chemically synthesized
  source 1..20: mol_type = other DNA
ccaagagatttctgcatatg

SEQ ID NO: 51308 - DNA, 20 bp, synthetic construct
  misc_feature 1..20: note = chemically synthesized
  source 1..20: mol_type = other DNA
caagagatttctgcatatgt

SEQ ID NO: 51309 - DNA, 20 bp, synthetic construct
  misc_feature 1..20: note = chemically synthesized
  source 1..20: mol_type = other DNA
agatttctgcatatgtaggt

SEQ ID NO: 51310 - DNA, 20 bp, synthetic construct
  misc_feature 1..20: note = chemically synthesized
  source 1..20: mol_type = other DNA
atatgtaggtcagttttaat

SEQ ID NO: 51311 - DNA, 20 bp, synthetic construct
  misc_feature 1..20: note = chemically synthesized
  source 1..20: mol_type = other DNA
atgtaggtcagttttaatca

SEQ ID NO: 51312 - DNA, 20 bp, synthetic construct
  misc_feature 1..20: note = chemically synthesized
  source 1..20: mol_type = other DNA
tgtaggtcagttttaatcag

SEQ ID NO: 51313 - DNA, 20 bp, synthetic construct
  misc_feature 1..20: note = chemically synthesized
  source 1..20: mol_type = other DNA
gtaggtcagttttaatcaga

SEQ ID NO: 51314 - DNA, 20 bp, synthetic construct
  misc_feature 1..20: note = chemically synthesized
  source 1..20: mol_type = other DNA
cagttttaatcagagggcat

SEQ ID NO: 51315 - DNA, 20 bp, synthetic construct
  misc_feature 1..20: note = chemically synthesized
  source 1..20: mol_type = other DNA
ttaatcagagggcatcagaa

SEQ ID NO: 51316 - DNA, 20 bp, synthetic construct
  misc_feature 1..20: note = chemically synthesized
  source 1..20: mol_type = other DNA
gcatcagaaaagactcctga

SEQ ID NO: 51317 - DNA, 20 bp, synthetic construct
  misc_feature 1..20: note = chemically synthesized
  source 1..20: mol_type = other DNA
agactcctgaaagaatgacc

SEQ ID NO: 51318 - DNA, 20 bp, synthetic construct
  misc_feature 1..20: note = chemically synthesized
  source 1..20: mol_type = other DNA
tgacctggttattataatca

SEQ ID NO: 51319 - DNA, 20 bp, synthetic construct
  misc_feature 1..20: note = chemically synthesized
  source 1..20: mol_type = other DNA
taatcacagatttgctttcc

SEQ ID NO: 51320 - DNA, 20 bp, synthetic construct
  misc_feature 1..20: note = chemically synthesized
  source 1..20: mol_type = other DNA
tgctttccaagtcaacattc

SEQ ID NO: 51321 - DNA, 20 bp, synthetic construct
  misc_feature 1..20: note = chemically synthesized
  source 1..20: mol_type = other DNA
ttccaagtcaacattccaga

SEQ ID NO: 51322 - DNA, 20 bp, synthetic construct
  misc_feature 1..20: note = chemically synthesized
  source 1..20: mol_type = other DNA
tcaacattccagacagtgct

SEQ ID NO: 51323 - DNA, 20 bp, synthetic construct
  misc_feature 1..20: note = chemically synthesized
  source 1..20: mol_type = other DNA
aacattccagacagtgctca

SEQ ID NO: 51324 - DNA, 20 bp, synthetic construct
  misc_feature 1..20: note = chemically synthesized
  source 1..20: mol_type = other DNA
acattccagacagtgctcag

SEQ ID NO: 51325 - DNA, 20 bp, synthetic construct
  misc_feature 1..20: note = chemically synthesized
  source 1..20: mol_type = other DNA
cattccagacagtgctcaga

SEQ ID NO: 51326 - DNA, 20 bp, synthetic construct
  misc_feature 1..20: note = chemically synthesized
  source 1..20: mol_type = other DNA
attccagacagtgctcagag

SEQ ID NO: 51327 - DNA, 20 bp, synthetic construct
  misc_feature 1..20: note = chemically synthesized
  source 1..20: mol_type = other DNA
cgaaaacccttttatttctc

SEQ ID NO: 51328 - DNA, 20 bp, synthetic construct
  misc_feature 1..20: note = chemically synthesized
  source 1..20: mol_type = other DNA
cttctctatttattttatta

SEQ ID NO: 51329 - DNA, 20 bp, synthetic construct
  misc_feature 1..20: note = chemically synthesized
  source 1..20: mol_type = other DNA
ttctctatttattttattat

SEQ ID NO: 51330 - DNA, 20 bp, synthetic construct
  misc_feature 1..20: note = chemically synthesized
  source 1..20: mol_type = other DNA
ttttattataggcattgttc

SEQ ID NO: 51331 - DNA, 20 bp, synthetic construct
  misc_feature 1..20: note = chemically synthesized
  source 1..20: mol_type = other DNA
ataggcattgttctggttgc

SEQ ID NO: 51332 - DNA, 20 bp, synthetic construct
  misc_feature 1..20: note = chemically synthesized
  source 1..20: mol_type = other DNA
taggcattgttctggttgct

SEQ ID NO: 51333 - DNA, 20 bp, synthetic construct
  misc_feature 1..20: note = chemically synthesized
  source 1..20: mol_type = other DNA
tgttctggttgctgggaact

SEQ ID NO: 51334 - DNA, 20 bp, synthetic construct
  misc_feature 1..20: note = chemically synthesized
  source 1..20: mol_type = other DNA
ggttgctgggaactcagact

SEQ ID NO: 51335 - DNA, 20 bp, synthetic construct
  misc_feature 1..20: note = chemically synthesized
  source 1..20: mol_type = other DNA
agataccatacactgactct

SEQ ID NO: 51336 - DNA, 20 bp, synthetic construct
  misc_feature 1..20: note = chemically synthesized
  source 1..20: mol_type = other DNA
accatacactgactctcaga

SEQ ID NO: 51337 - DNA, 20 bp, synthetic construct
  misc_feature 1..20: note = chemically synthesized
  source 1..20: mol_type = other DNA
cataacacaacatgatgtct

SEQ ID NO: 51338 - DNA, 20 bp, synthetic construct
  misc_feature 1..20: note = chemically synthesized
  source 1..20: mol_type = other DNA
atctttttgttttttaaata

SEQ ID NO: 51339 - DNA, 20 bp, synthetic construct
  misc_feature 1..20: note = chemically synthesized
  source 1..20: mol_type = other DNA
tctttttgttttttaaatac

SEQ ID NO: 51340 - DNA, 20 bp, synthetic construct
  misc_feature 1..20: note = chemically synthesized
  source 1..20: mol_type = other DNA
ttttgttttttaaatacagg

SEQ ID NO: 51341 - DNA, 20 bp, synthetic construct
  misc_feature 1..20: note = chemically synthesized
  source 1..20: mol_type = other DNA
ttgttttttaaatacaggtg

SEQ ID NO: 51342 - DNA, 20 bp, synthetic construct
  misc_feature 1..20: note = chemically synthesized
  source 1..20: mol_type = other DNA
ttaaatacaggtggagcatc

SEQ ID NO: 51343 - DNA, 20 bp, synthetic construct
  misc_feature 1..20: note = chemically synthesized
  source 1..20: mol_type = other DNA
ctccaacatgtattttgctc

SEQ ID NO: 51344 - DNA, 20 bp, synthetic construct
  misc_feature 1..20: note = chemically synthesized
  source 1..20: mol_type = other DNA
ttttgctctggtaatcccaa

SEQ ID NO: 51345 - DNA, 20 bp, synthetic construct
  misc_feature 1..20: note = chemically synthesized
  source 1..20: mol_type = other DNA
tttgctctggtaatcccaaa

SEQ ID NO: 51346 - DNA, 20 bp, synthetic construct
  misc_feature 1..20: note = chemically synthesized
  source 1..20: mol_type = other DNA
tggtaatcccaaaaggctga

SEQ ID NO: 51347 - DNA, 20 bp, synthetic construct
  misc_feature 1..20: note = chemically synthesized
  source 1..20: mol_type = other DNA
caaaaggctgatagtctcta

SEQ ID NO: 51348 - DNA, 20 bp, synthetic construct
  misc_feature 1..20: note = chemically synthesized
  source 1..20: mol_type = other DNA
aaggctgatagtctctatgg

SEQ ID NO: 51349 - DNA, 20 bp, synthetic construct
  misc_feature 1..20: note = chemically synthesized
  source 1..20: mol_type = other DNA
tagtctctatggtggcaaca

SEQ ID NO: 51350 - DNA, 20 bp, synthetic construct
  misc_feature 1..20: note = chemically synthesized
  source 1..20: mol_type = other DNA
ggataatactgttccccatc

SEQ ID NO: 51351 - DNA, 20 bp, synthetic construct
  misc_feature 1..20: note = chemically synthesized
  source 1..20: mol_type = other DNA
aatactgttccccatctaga

SEQ ID NO: 51352 - DNA, 20 bp, synthetic construct
  misc_feature 1..20: note = chemically synthesized
  source 1..20: mol_type = other DNA
ggtctcatttcttctgtatc

SEQ ID NO: 51353 - DNA, 20 bp, synthetic construct
  misc_feature 1..20: note = chemically synthesized
  source 1..20: mol_type = other DNA
tttcttctgtatctagtctg

SEQ ID NO: 51354 - DNA, 20 bp, synthetic construct
  misc_feature 1..20: note = chemically synthesized
  source 1..20: mol_type = other DNA
cttctgtatctagtctgaag

SEQ ID NO: 51355 - DNA, 20 bp, synthetic construct
  misc_feature 1..20: note = chemically synthesized
  source 1..20: mol_type = other DNA
gtctgaagaagcctgaatga

SEQ ID NO: 51356 - DNA, 20 bp, synthetic construct
  misc_feature 1..20: note = chemically synthesized
  source 1..20: mol_type = other DNA
tgaagaagcctgaatgaaag

SEQ ID NO: 51357 - DNA, 20 bp, synthetic construct
  misc_feature 1..20: note = chemically synthesized
  source 1..20: mol_type = other DNA
ctgaatgaaagtagattttt

SEQ ID NO: 51358 - DNA, 20 bp, synthetic construct
  misc_feature 1..20: note = chemically synthesized
  source 1..20: mol_type = other DNA
aagtagatttttaagctttg

SEQ ID NO: 51359 - DNA, 20 bp, synthetic construct
  misc_feature 1..20: note = chemically synthesized
  source 1..20: mol_type = other DNA
agatttttaagctttgtagc

SEQ ID NO: 51360 - DNA, 20 bp, synthetic construct
  misc_feature 1..20: note = chemically synthesized
  source 1..20: mol_type = other DNA
taagctttgtagctagtctg

SEQ ID NO: 51361 - DNA, 20 bp, synthetic construct
  misc_feature 1..20: note = chemically synthesized
  source 1..20: mol_type = other DNA
tagctagtctgaagcctttg

SEQ ID NO: 51362 - DNA, 20 bp, synthetic construct
  misc_feature 1..20: note = chemically synthesized
  source 1..20: mol_type = other DNA
tagtctgaagcctttgtagt

SEQ ID NO: 51363 - DNA, 20 bp, synthetic construct
  misc_feature 1..20: note = chemically synthesized
  source 1..20: mol_type = other DNA
aagcctttgtagtcagtctg

SEQ ID NO: 51364 - DNA, 20 bp, synthetic construct
  misc_feature 1..20: note = chemically synthesized
  source 1..20: mol_type = other DNA
tgaagaaacctgcatgaaaa

SEQ ID NO: 51365 - DNA, 20 bp, synthetic construct
  misc_feature 1..20: note = chemically synthesized
  source 1..20: mol_type = other DNA
aatagattttttttttcctt

SEQ ID NO: 51366 - DNA, 20 bp, synthetic construct
  misc_feature 1..20: note = chemically synthesized
  source 1..20: mol_type = other DNA
atagattttttttttccttt

SEQ ID NO: 51367 - DNA, 20 bp, synthetic construct
  misc_feature 1..20: note = chemically synthesized
  source 1..20: mol_type = other DNA
attttttttttcctttggga

SEQ ID NO: 51368 - DNA, 20 bp, synthetic construct
  misc_feature 1..20: note = chemically synthesized
  source 1..20: mol_type = other DNA
tttttttttcctttgggaca

SEQ ID NO: 51369 - DNA, 20 bp, synthetic construct
  misc_feature 1..20: note = chemically synthesized
  source 1..20: mol_type = other DNA
cagagtcttgctctgtcgcc

SEQ ID NO: 51370 - DNA, 20 bp, synthetic construct
  misc_feature 1..20: note = chemically synthesized
  source 1..20: mol_type = other DNA
tcttgctctgtcgcccagac

SEQ ID NO: 51371 - DNA, 20 bp, synthetic construct
  misc_feature 1..20: note = chemically synthesized
  source 1..20: mol_type = other DNA
ttgctctgtcgcccagactg

SEQ ID NO: 51372 - DNA, 20 bp, synthetic construct
  misc_feature 1..20: note = chemically synthesized
  source 1..20: mol_type = other DNA
tcgcccagactggagtgcaa

SEQ ID NO: 51373 - DNA, 20 bp, synthetic construct
  misc_feature 1..20: note = chemically synthesized
  source 1..20: mol_type = other DNA
ggagtgcaatggcgcgatct

SEQ ID NO: 51374 - DNA, 20 bp, synthetic construct
  misc_feature 1..20: note = chemically synthesized
  source 1..20: mol_type = other DNA
tcactgcaacttccacctcc

SEQ ID NO: 51375 - DNA, 20 bp, synthetic construct
  misc_feature 1..20: note = chemically synthesized
  source 1..20: mol_type = other DNA
cactgcaacttccacctccc

SEQ ID NO: 51376 - DNA, 20 bp, synthetic construct
  misc_feature 1..20: note = chemically synthesized
  source 1..20: mol_type = other DNA
aacttccacctcccaggatc

SEQ ID NO: 51377 - DNA, 20 bp, synthetic construct
  misc_feature 1..20: note = chemically synthesized
  source 1..20: mol_type = other DNA
atcaagcaattctcctgcct

SEQ ID NO: 51378 - DNA, 20 bp, synthetic construct
  misc_feature 1..20: note = chemically synthesized
  source 1..20: mol_type = other DNA
ttctcctgcctcagtctccc

SEQ ID NO: 51379 - DNA, 20 bp, synthetic construct
  misc_feature 1..20: note = chemically synthesized
  source 1..20: mol_type = other DNA
gcctcagtctcccaagtaac

SEQ ID NO: 51380 - DNA, 20 bp, synthetic construct
  misc_feature 1..20: note = chemically synthesized
  source 1..20: mol_type = other DNA
cctcagtctcccaagtaact

SEQ ID NO: 51381 - DNA, 20 bp, synthetic construct
  misc_feature 1..20: note = chemically synthesized
  source 1..20: mol_type = other DNA
ctcccaagtaactgggatta

SEQ ID NO: 51382 - DNA, 20 bp, synthetic construct
  misc_feature 1..20: note = chemically synthesized
  source 1..20: mol_type = other DNA
tcccaagtaactgggattac

SEQ ID NO: 51383 - DNA, 20 bp, synthetic construct
  misc_feature 1..20: note = chemically synthesized
  source 1..20: mol_type = other DNA
ccaagtaactgggattacag

SEQ ID NO: 51384 - DNA, 20 bp, synthetic construct
  misc_feature 1..20: note = chemically synthesized
  source 1..20: mol_type = other DNA
caggagcacactgccatgcc

SEQ ID NO: 51385 - DNA, 20 bp, synthetic construct
  misc_feature 1..20: note = chemically synthesized
  source 1..20: mol_type = other DNA
agctaattatttttgtgttt

SEQ ID NO: 51386 - DNA, 20 bp, synthetic construct
  misc_feature 1..20: note = chemically synthesized
  source 1..20: mol_type = other DNA
taattatttttgtgttttag

SEQ ID NO: 51387 - DNA, 20 bp, synthetic construct
  misc_feature 1..20: note = chemically synthesized
  source 1..20: mol_type = other DNA
attatttttgtgttttagta

SEQ ID NO: 51388 - DNA, 20 bp, synthetic construct
  misc_feature 1..20: note = chemically synthesized
  source 1..20: mol_type = other DNA
tttttgtgttttagtagaga

SEQ ID NO: 51389 - DNA, 20 bp, synthetic construct
  misc_feature 1..20: note = chemically synthesized
  source 1..20: mol_type = other DNA
ttttgtgttttagtagagac

SEQ ID NO: 51390 - DNA, 20 bp, synthetic construct
  misc_feature 1..20: note = chemically synthesized
  source 1..20: mol_type = other DNA
tttgtgttttagtagagaca

SEQ ID NO: 51391 - DNA, 20 bp, synthetic construct
  misc_feature 1..20: note = chemically synthesized
  source 1..20: mol_type = other DNA
cagggtttcaccattttgcc

SEQ ID NO: 51392 - DNA, 20 bp, synthetic construct
  misc_feature 1..20: note = chemically synthesized
  source 1..20: mol_type = other DNA
agggtttcaccattttgccc

SEQ ID NO: 51393 - DNA, 20 bp, synthetic construct
  misc_feature 1..20: note = chemically synthesized
  source 1..20: mol_type = other DNA
tttcaccattttgcccaggt

SEQ ID NO: 51394 - DNA, 20 bp, synthetic construct
  misc_feature 1..20: note = chemically synthesized
  source 1..20: mol_type = other DNA
caggttggtctccaactcct

SEQ ID NO: 51395 - DNA, 20 bp, synthetic construct
  misc_feature 1..20: note = chemically synthesized
  source 1..20: mol_type = other DNA
tggtctccaactcctgagct

SEQ ID NO: 51396 - DNA, 20 bp, synthetic construct
  misc_feature 1..20: note = chemically synthesized
  source 1..20: mol_type = other DNA
ctcagccaatccacctgcct

SEQ ID NO: 51397 - DNA, 20 bp, synthetic construct
  misc_feature 1..20: note = chemically synthesized
  source 1..20: mol_type = other DNA
ccacctgcctcggcctccca

SEQ ID NO: 51398 - DNA, 20 bp, synthetic construct
  misc_feature 1..20: note = chemically synthesized
  source 1..20: mol_type = other DNA
gcctcggcctcccaaagtgc

SEQ ID NO: 51399 - DNA, 20 bp, synthetic construct
  misc_feature 1..20: note = chemically synthesized
  source 1..20: mol_type = other DNA
cctcggcctcccaaagtgct

SEQ ID NO: 51400 - DNA, 20 bp, synthetic construct
  misc_feature 1..20: note = chemically synthesized
  source 1..20: mol_type = other DNA
ctcccaaagtgctaggatta

SEQ ID NO: 51401 - DNA, 20 bp, synthetic construct
  misc_feature 1..20: note = chemically synthesized
  source 1..20: mol_type = other DNA
tcccaaagtgctaggattac

SEQ ID NO: 51402 - DNA, 20 bp, synthetic construct
  misc_feature 1..20: note = chemically synthesized
  source 1..20: mol_type = other DNA
agtgctaggattacaggcgt

SEQ ID NO: 51403 - DNA, 20 bp, synthetic construct
  misc_feature 1..20: note = chemically synthesized
  source 1..20: mol_type = other DNA
gattacaggcgtgagccacc

SEQ ID NO: 51404 - DNA, 20 bp, synthetic construct
  misc_feature 1..20: note = chemically synthesized
  source 1..20: mol_type = other DNA
caggcgtgagccaccaagcc

SEQ ID NO: 51405 - DNA, 20 bp, synthetic construct
  misc_feature 1..20: note = chemically synthesized
  source 1..20: mol_type = other DNA
gagccaccaagcctggctga

SEQ ID NO: 51406 - DNA, 20 bp, synthetic construct
  misc_feature 1..20: note = chemically synthesized
  source 1..20: mol_type = other DNA
ccaccaagcctggctgaaag

SEQ ID NO: 51407 - DNA, 20 bp, synthetic construct
  misc_feature 1..20: note = chemically synthesized
  source 1..20: mol_type = other DNA
ttaacacatacctacattca

SEQ ID NO: 51408 - DNA, 20 bp, synthetic construct
  misc_feature 1..20: note = chemically synthesized
  source 1..20: mol_type = other DNA
aaatcttttgtgatcaatcc

SEQ ID NO: 51409 - DNA, 20 bp, synthetic construct
  misc_feature 1..20: note = chemically synthesized
  source 1..20: mol_type = other DNA
agatccttgacgatatgtct

SEQ ID NO: 51410 - DNA, 20 bp, synthetic construct
  misc_feature 1..20: note = chemically synthesized
  source 1..20: mol_type = other DNA
ccttgacgatatgtctgagt

SEQ ID NO: 51411 - DNA, 20 bp, synthetic construct
  misc_feature 1..20: note = chemically synthesized
  source 1..20: mol_type = other DNA
cttgacgatatgtctgagtc

SEQ ID NO: 51412 - DNA, 20 bp, synthetic construct
  misc_feature 1..20: note = chemically synthesized
  source 1..20: mol_type = other DNA
acgatatgtctgagtcaggc

SEQ ID NO: 51413 - DNA, 20 bp, synthetic construct
  misc_feature 1..20: note = chemically synthesized
  source 1..20: mol_type = other DNA
gtctgagtcaggctggaaat

SEQ ID NO: 51414 - DNA, 20 bp, synthetic construct
  misc_feature 1..20: note = chemically synthesized
  source 1..20: mol_type = other DNA
ctgagtcaggctggaaatga

SEQ ID NO: 51415 - DNA, 20 bp, synthetic construct
  misc_feature 1..20: note = chemically synthesized
  source 1..20: mol_type = other DNA
agagaaatcatgtttgaaat

SEQ ID NO: 51416 - DNA, 20 bp, synthetic construct
  misc_feature 1..20: note = chemically synthesized
  source 1..20: mol_type = other DNA
agaaatcatgtttgaaattg

SEQ ID NO: 51417 - DNA, 20 bp, synthetic construct
  misc_feature 1..20: note = chemically synthesized
  source 1..20: mol_type = other DNA
gaaattggagtgttgtattc

SEQ ID NO: 51418 - DNA, 20 bp, synthetic construct
  misc_feature 1..20: note = chemically synthesized
  source 1..20: mol_type = other DNA
aaattggagtgttgtattca

SEQ ID NO: 51419 - DNA, 20 bp, synthetic construct
  misc_feature 1..20: note = chemically synthesized
  source 1..20: mol_type = other DNA
tggagtgttgtattcaaggt

SEQ ID NO: 51420 - DNA, 20 bp, synthetic construct
  misc_feature 1..20: note = chemically synthesized
  source 1..20: mol_type = other DNA
gtgttgtattcaaggtcagc

SEQ ID NO: 51421 - DNA, 20 bp, synthetic construct
  misc_feature 1..20: note = chemically synthesized
  source 1..20: mol_type = other DNA
ttcaaggtcagcaagatccc

SEQ ID NO: 51422 - DNA, 20 bp, synthetic construct
  misc_feature 1..20: note = chemically synthesized
  source 1..20: mol_type = other DNA
caaggtcagcaagatccctg

SEQ ID NO: 51423 - DNA, 20 bp, synthetic construct
  misc_feature 1..20: note = chemically synthesized
  source 1..20: mol_type = other DNA
ggtcagcaagatccctggag

SEQ ID NO: 51424 - DNA, 20 bp, synthetic construct
  misc_feature 1..20: note = chemically synthesized
  source 1..20: mol_type = other DNA
ttttataaaccattcaaact

SEQ ID NO: 51425 - DNA, 20 bp, synthetic construct
  misc_feature 1..20: note = chemically synthesized
  source 1..20: mol_type = other DNA
ttggtatatgatgactcaat

SEQ ID NO: 51426 - DNA, 20 bp, synthetic construct
  misc_feature 1..20: note = chemically synthesized
  source 1..20: mol_type = other DNA
gtatatgatgactcaattgg

SEQ ID NO: 51427 - DNA, 20 bp, synthetic construct
  misc_feature 1..20: note = chemically synthesized
  source 1..20: mol_type = other DNA
gatgactcaattggtggcca

SEQ ID NO: 51428 - DNA, 20 bp, synthetic construct
  misc_feature 1..20: note = chemically synthesized
  source 1..20: mol_type = other DNA
atgactcaattggtggccaa

SEQ ID NO: 51429 - DNA, 20 bp, synthetic construct
  misc_feature 1..20: note = chemically synthesized
  source 1..20: mol_type = other DNA
ctcaattggtggccaaaggt

SEQ ID NO: 51430 - DNA, 20 bp, synthetic construct
  misc_feature 1..20: note = chemically synthesized
  source 1..20: mol_type = other DNA
ttggtggccaaaggtcagaa

SEQ ID NO: 51431 - DNA, 20 bp, synthetic construct
  misc_feature 1..20: note = chemically synthesized
  source 1..20: mol_type = other DNA
gccaaaggtcagaaaagact

SEQ ID NO: 51432 - DNA, 20 bp, synthetic construct
  misc_feature 1..20: note = chemically synthesized
  source 1..20: mol_type = other DNA
cagaaaagactaagtgtaca

SEQ ID NO: 51433 - DNA, 20 bp, synthetic construct
  misc_feature 1..20: note = chemically synthesized
  source 1..20: mol_type = other DNA
tgattttacacacactttga

SEQ ID NO: 51434 - DNA, 20 bp, synthetic construct
  misc_feature 1..20: note = chemically synthesized
  source 1..20: mol_type = other DNA
gattttacacacactttgat

SEQ ID NO: 51435 - DNA, 20 bp, synthetic construct
  misc_feature 1..20: note = chemically synthesized
  source 1..20: mol_type = other DNA
ttttacacacactttgatag

SEQ ID NO: 51436 - DNA, 20 bp, synthetic construct
  misc_feature 1..20: note = chemically synthesized
  source 1..20: mol_type = other DNA
tttatatctctgtgattgtc

SEQ ID NO: 51437 - DNA, 20 bp, synthetic construct
  misc_feature 1..20: note = chemically synthesized
  source 1..20: mol_type = other DNA
attgtctagctcttatttca

SEQ ID NO: 51438 - DNA, 20 bp, synthetic construct
  misc_feature 1..20: note = chemically synthesized
  source 1..20: mol_type = other DNA
ttaattaaaaattatttgat

SEQ ID NO: 51439 - DNA, 20 bp, synthetic construct
  misc_feature 1..20: note = chemically synthesized
  source 1..20: mol_type = other DNA
cccttatttttcatattctt

SEQ ID NO: 51440 - DNA, 20 bp, synthetic construct
  misc_feature 1..20: note = chemically synthesized
  source 1..20: mol_type = other DNA
tcatattcttgagcaaaaaa

SEQ ID NO: 51441 - DNA, 20 bp, synthetic construct
  misc_feature 1..20: note = chemically synthesized
  source 1..20: mol_type = other DNA
tcttgagcaaaaaacagata

SEQ ID NO: 51442 - DNA, 20 bp, synthetic construct
  misc_feature 1..20: note = chemically synthesized
  source 1..20: mol_type = other DNA
atatggttcctaatcttcta

SEQ ID NO: 51443 - DNA, 20 bp, synthetic construct
  misc_feature 1..20: note = chemically synthesized
  source 1..20: mol_type = other DNA
acagcctctaatgaatctaa

SEQ ID NO: 51444 - DNA, 20 bp, synthetic construct
  misc_feature 1..20: note = chemically synthesized
  source 1..20: mol_type = other DNA
taatgaatctaatggaaatt

SEQ ID NO: 51445 - DNA, 20 bp, synthetic construct
  misc_feature 1..20: note = chemically synthesized
  source 1..20: mol_type = other DNA
atggaaattcagtgtataat

SEQ ID NO: 51446 - DNA, 20 bp, synthetic construct
  misc_feature 1..20: note = chemically synthesized
  source 1..20: mol_type = other DNA
gaaattcagtgtataataag

SEQ ID NO: 51447 - DNA, 20 bp, synthetic construct
  misc_feature 1..20: note = chemically synthesized
  source 1..20: mol_type = other DNA
taagtggtataaatataaac

SEQ ID NO: 51448 - DNA, 20 bp, synthetic construct
  misc_feature 1..20: note = chemically synthesized
  source 1..20: mol_type = other DNA
ataaactagtatactgtgat

SEQ ID NO: 51449 - DNA, 20 bp, synthetic construct
  misc_feature 1..20: note = chemically synthesized
  source 1..20: mol_type = other DNA
aaactagtatactgtgatga

SEQ ID NO: 51450 - DNA, 20 bp, synthetic construct
  misc_feature 1..20: note = chemically synthesized
  source 1..20: mol_type = other DNA
tagtatactgtgatgagagt

SEQ ID NO: 51451 - DNA, 20 bp, synthetic construct
  misc_feature 1..20: note = chemically synthesized
  source 1..20: mol_type = other DNA
atactgtgatgagagtaagt

SEQ ID NO: 51452 - DNA, 20 bp, synthetic construct
  misc_feature 1..20: note = chemically synthesized
  source 1..20: mol_type = other DNA
gtgatgagagtaagttagtt

SEQ ID NO: 51453 - DNA, 20 bp, synthetic construct
  misc_feature 1..20: note = chemically synthesized
  source 1..20: mol_type = other DNA
tgatgagagtaagttagtta

SEQ ID NO: 51454 - DNA, 20 bp, synthetic construct
  misc_feature 1..20: note = chemically synthesized
  source 1..20: mol_type = other DNA
gatgagagtaagttagttaa

SEQ ID NO: 51455 - DNA, 20 bp, synthetic construct
  misc_feature 1..20: note = chemically synthesized
  source 1..20: mol_type = other DNA
atgagagtaagttagttaag

SEQ ID NO: 51456 - DNA, 20 bp, synthetic construct
  misc_feature 1..20: note = chemically synthesized
  source 1..20: mol_type = other DNA
tgagagtaagttagttaagg

SEQ ID NO: 51457 - DNA, 20 bp, synthetic construct
  misc_feature 1..20: note = chemically synthesized
  source 1..20: mol_type = other DNA
taagttagttaagggggttg

SEQ ID NO: 51458 - DNA, 20 bp, synthetic construct
  misc_feature 1..20: note = chemically synthesized
  source 1..20: mol_type = other DNA
gttaagggggttgaagaaat

SEQ ID NO: 51459 - DNA, 20 bp, synthetic construct
  misc_feature 1..20: note = chemically synthesized
  source 1..20: mol_type = other DNA
gttgaagaaatgagataatc

SEQ ID NO: 51460 - DNA, 20 bp, synthetic construct
  misc_feature 1..20: note = chemically synthesized
  source 1..20: mol_type = other DNA
ttgaagaaatgagataatct

SEQ ID NO: 51461 - DNA, 20 bp, synthetic construct
  misc_feature 1..20: note = chemically synthesized
  source 1..20: mol_type = other DNA
aagaaatgagataatctagg

SEQ ID NO: 51462 - DNA, 20 bp, synthetic construct
  misc_feature 1..20: note = chemically synthesized
  source 1..20: mol_type = other DNA
agaaatgagataatctaggt

SEQ ID NO: 51463 - DNA, 20 bp, synthetic construct
  misc_feature 1..20: note = chemically synthesized
  source 1..20: mol_type = other DNA
gaaatgagataatctaggtg

SEQ ID NO: 51464 - DNA, 20 bp, synthetic construct
  misc_feature 1..20: note = chemically synthesized
  source 1..20: mol_type = other DNA
aatgagataatctaggtggg

SEQ ID NO: 51465 - DNA, 20 bp, synthetic construct
  misc_feature 1..20: note = chemically synthesized
  source 1..20: mol_type = other DNA
gagataatctaggtggggag

SEQ ID NO: 51466 - DNA, 20 bp, synthetic construct
  misc_feature 1..20: note = chemically synthesized
  source 1..20: mol_type = other DNA
atctaggtggggagcagtat

SEQ ID NO: 51467 - DNA, 20 bp, synthetic construct
  misc_feature 1..20: note = chemically synthesized
  source 1..20: mol_type = other DNA
agtattagaaaaatccccct

SEQ ID NO: 51468 - DNA, 20 bp, synthetic construct
  misc_feature 1..20: note = chemically synthesized
  source 1..20: mol_type = other DNA
gtattagaaaaatccccctg

SEQ ID NO: 51469 - DNA, 20 bp, synthetic construct
  misc_feature 1..20: note = chemically synthesized
  source 1..20: mol_type = other DNA
ttagaaaaatccccctgagg

SEQ ID NO: 51470 - DNA, 20 bp, synthetic construct
  misc_feature 1..20: note = chemically synthesized
  source 1..20: mol_type = other DNA
aagtaatcattttaactcaa

SEQ ID NO: 51471 - DNA, 20 bp, synthetic construct
  misc_feature 1..20: note = chemically synthesized
  source 1..20: mol_type = other DNA
cattttaactcaaaagttaa

SEQ ID NO: 51472 - DNA, 20 bp, synthetic construct
  misc_feature 1..20: note = chemically synthesized
  source 1..20: mol_type = other DNA
aactcaaaagttaatggtga

SEQ ID NO: 51473 - DNA, 20 bp, synthetic construct
  misc_feature 1..20: note = chemically synthesized
  source 1..20: mol_type = other DNA
actcaaaagttaatggtgaa

SEQ ID NO: 51474 - DNA, 20 bp, synthetic construct
  misc_feature 1..20: note = chemically synthesized
  source 1..20: mol_type = other DNA
ggaattgctgtgcaaatact

SEQ ID NO: 51475 - DNA, 20 bp, synthetic construct
  misc_feature 1..20: note = chemically synthesized
  source 1..20: mol_type = other DNA
gaattgctgtgcaaatactt

SEQ ID NO: 51476 - DNA, 20 bp, synthetic construct
  misc_feature 1..20: note = chemically synthesized
  source 1..20: mol_type = other DNA
aattgctgtgcaaatacttg

SEQ ID NO: 51477 - DNA, 20 bp, synthetic construct
  misc_feature 1..20: note = chemically synthesized
  source 1..20: mol_type = other DNA
tgctgtgcaaatacttgggg

SEQ ID NO: 51478 - DNA, 20 bp, synthetic construct
  misc_feature 1..20: note = chemically synthesized
  source 1..20: mol_type = other DNA
aatacttggggtagataatt

SEQ ID NO: 51479 - DNA, 20 bp, synthetic construct
  misc_feature 1..20: note = chemically synthesized
  source 1..20: mol_type = other DNA
tacttggggtagataattcg

SEQ ID NO: 51480 - DNA, 20 bp, synthetic construct
  misc_feature 1..20: note = chemically synthesized
  source 1..20: mol_type = other DNA
ggggtagataattcggagca

SEQ ID NO: 51481 - DNA, 20 bp, synthetic construct
  misc_feature 1..20: note = chemically synthesized
  source 1..20: mol_type = other DNA
ggtagataattcggagcaca

SEQ ID NO: 51482 - DNA, 20 bp, synthetic construct
  misc_feature 1..20: note = chemically synthesized
  source 1..20: mol_type = other DNA
agataattcggagcacagag

SEQ ID NO: 51483 - DNA, 20 bp, synthetic construct
  misc_feature 1..20: note = chemically synthesized
  source 1..20: mol_type = other DNA
tcggagcacagagaagacca

SEQ ID NO: 51484 - DNA, 20 bp, synthetic construct
  misc_feature 1..20: note = chemically synthesized
  source 1..20: mol_type = other DNA
cggagcacagagaagaccat

SEQ ID NO: 51485 - DNA, 20 bp, synthetic construct
  misc_feature 1..20: note = chemically synthesized
  source 1..20: mol_type = other DNA
cacagagaagaccatgggca

SEQ ID NO: 51486 - DNA, 20 bp, synthetic construct
  misc_feature 1..20: note = chemically synthesized
  source 1..20: mol_type = other DNA
agaccatgggcaaagatcct

SEQ ID NO: 51487 - DNA, 20 bp, synthetic construct
  misc_feature 1..20: note = chemically synthesized
  source 1..20: mol_type = other DNA
tcctgagacatgcatgtact

SEQ ID NO: 51488 - DNA, 20 bp, synthetic construct
  misc_feature 1..20: note = chemically synthesized
  source 1..20: mol_type = other DNA
gcatgtacttagcttgtttt

SEQ ID NO: 51489 - DNA, 20 bp, synthetic construct
  misc_feature 1..20: note = chemically synthesized
  source 1..20: mol_type = other DNA
catgtacttagcttgttttg

SEQ ID NO: 51490 - DNA, 20 bp, synthetic construct
  misc_feature 1..20: note = chemically synthesized
  source 1..20: mol_type = other DNA
gtacttagcttgttttgagg

SEQ ID NO: 51491 - DNA, 20 bp, synthetic construct
  misc_feature 1..20: note = chemically synthesized
  source 1..20: mol_type = other DNA
agcttgttttgaggaagata

SEQ ID NO: 51492 - DNA, 20 bp, synthetic construct
  misc_feature 1..20: note = chemically synthesized
  source 1..20: mol_type = other DNA
gataaagatacctaaatatt

SEQ ID NO: 51493 - DNA, 20 bp, synthetic construct
  misc_feature 1..20: note = chemically synthesized
  source 1..20: mol_type = other DNA
ataaagatacctaaatatta

SEQ ID NO: 51494 - DNA, 20 bp, synthetic construct
  misc_feature 1..20: note = chemically synthesized
  source 1..20: mol_type = other DNA
aaagatacctaaatattaag

SEQ ID NO: 51495 - DNA, 20 bp, synthetic construct
  misc_feature 1..20: note = chemically synthesized
  source 1..20: mol_type = other DNA
tacctaaatattaaggagtg

SEQ ID NO: 51496 - DNA, 20 bp, synthetic construct
  misc_feature 1..20: note = chemically synthesized
  source 1..20: mol_type = other DNA
acctaaatattaaggagtgt

SEQ ID NO: 51497 - DNA, 20 bp, synthetic construct
  misc_feature 1..20: note = chemically synthesized
  source 1..20: mol_type = other DNA
taaatattaaggagtgtagg

SEQ ID NO: 51498 - DNA, 20 bp, synthetic construct
  misc_feature 1..20: note = chemically synthesized
  source 1..20: mol_type = other DNA
atattaaggagtgtaggcag

SEQ ID NO: 51499 - DNA, 20 bp, synthetic construct
  misc_feature 1..20: note = chemically synthesized
  source 1..20: mol_type = other DNA
ttaaggagtgtaggcagtag

SEQ ID NO: 51500 - DNA, 20 bp, synthetic construct
  misc_feature 1..20: note = chemically synthesized
  source 1..20: mol_type = other DNA
gtgtaggcagtagtggtcta

SEQ ID NO: 51501 - DNA, 20 bp, synthetic construct
  misc_feature 1..20: note = chemically synthesized
  source 1..20: mol_type = other DNA
gtagtggtctaaagatgtaa

SEQ ID NO: 51502 - DNA, 20 bp, synthetic construct
  misc_feature 1..20: note = chemically synthesized
  source 1..20: mol_type = other DNA
gtggtctaaagatgtaatag

SEQ ID NO: 51503 - DNA, 20 bp, synthetic construct
  misc_feature 1..20: note = chemically synthesized
  source 1..20: mol_type = other DNA
ggtctaaagatgtaatagaa

SEQ ID NO: 51504 - DNA, 20 bp, synthetic construct
  misc_feature 1..20: note = chemically synthesized
  source 1..20: mol_type = other DNA
gtctaaagatgtaatagaag

SEQ ID NO: 51505 - DNA, 20 bp, synthetic construct
  misc_feature 1..20: note = chemically synthesized
  source 1..20: mol_type = other DNA
taaagatgtaatagaagagg

SEQ ID NO: 51506 - DNA, 20 bp, synthetic construct
  misc_feature 1..20: note = chemically synthesized
  source 1..20: mol_type = other DNA
aaagatgtaatagaagaggc

SEQ ID NO: 51507 - DNA, 20 bp, synthetic construct
  misc_feature 1..20: note = chemically synthesized
  source 1..20: mol_type = other DNA
atgtaatagaagaggcaggt

SEQ ID NO: 51508 - DNA, 20 bp, synthetic construct
  misc_feature 1..20: note = chemically synthesized
  source 1..20: mol_type = other DNA
gcaggtgagccacgttatac

SEQ ID NO: 51509 - DNA, 20 bp, synthetic construct
  misc_feature 1..20: note = chemically synthesized
  source 1..20: mol_type = other DNA
caggtgagccacgttataca

SEQ ID NO: 51510 - DNA, 20 bp, synthetic construct
  misc_feature 1..20: note = chemically synthesized
  source 1..20: mol_type = other DNA
aaggctttttgactatgata

SEQ ID NO: 51511 - DNA, 20 bp, synthetic construct
  misc_feature 1..20: note = chemically synthesized
  source 1..20: mol_type = other DNA
gaatttgtattttacattac

SEQ ID NO: 51512 - DNA, 20 bp, synthetic construct
  misc_feature 1..20: note = chemically synthesized
  source 1..20: mol_type = other DNA
gtattttacattacgagcaa

SEQ ID NO: 51513 - DNA, 20 bp, synthetic construct
  misc_feature 1..20: note = chemically synthesized
  source 1..20: mol_type = other DNA
tattttacattacgagcaat

SEQ ID NO: 51514 - DNA, 20 bp, synthetic construct
  misc_feature 1..20: note = chemically synthesized
  source 1..20: mol_type = other DNA
ttacattacgagcaatgggt

SEQ ID NO: 51515 - DNA, 20 bp, synthetic construct
  misc_feature 1..20: note = chemically synthesized
  source 1..20: mol_type = other DNA
caatgggtaagtgaccatca

SEQ ID NO: 51516 - DNA, 20 bp, synthetic construct
  misc_feature 1..20: note = chemically synthesized
  source 1..20: mol_type = other DNA
atgggtaagtgaccatcaaa

SEQ ID NO: 51517 - DNA, 20 bp, synthetic construct
  misc_feature 1..20: note = chemically synthesized
  source 1..20: mol_type = other DNA
atcaaagagttttttcaaca

SEQ ID NO: 51518 - DNA, 20 bp, synthetic construct
  misc_feature 1..20: note = chemically synthesized
  source 1..20: mol_type = other DNA
tcaaagagttttttcaacaa

SEQ ID NO: 51519 - DNA, 20 bp, synthetic construct
  misc_feature 1..20: note = chemically synthesized
  source 1..20: mol_type = other DNA
caacaaaggtttgtgtgatt

SEQ ID NO: 51520 - DNA, 20 bp, synthetic construct
  misc_feature 1..20: note = chemically synthesized
  source 1..20: mol_type = other DNA
caaaggtttgtgtgatttag

SEQ ID NO: 51521 - DNA, 20 bp, synthetic construct
  misc_feature 1..20: note = chemically synthesized
  source 1..20: mol_type = other DNA
tgtgatttagtagatgtttg

SEQ ID NO: 51522 - DNA, 20 bp, synthetic construct
  misc_feature 1..20: note = chemically synthesized
  source 1..20: mol_type = other DNA
tttagtagatgtttgtagaa

SEQ ID NO: 51523 - DNA, 20 bp, synthetic construct
  misc_feature 1..20: note = chemically synthesized
  source 1..20: mol_type = other DNA
atgtttgtagaaaagcaatt

SEQ ID NO: 51524 - DNA, 20 bp, synthetic construct
  misc_feature 1..20: note = chemically synthesized
  source 1..20: mol_type = other DNA
gaaaagcaatttggtttccc

SEQ ID NO: 51525 - DNA, 20 bp, synthetic construct
  misc_feature 1..20: note = chemically synthesized
  source 1..20: mol_type = other DNA
aaagcaatttggtttccctg

SEQ ID NO: 51526 - DNA, 20 bp, synthetic construct
  misc_feature 1..20: note = chemically synthesized
  source 1..20: mol_type = other DNA
cctggagataatacattttt

SEQ ID NO: 51527 - DNA, 20 bp, synthetic construct
  misc_feature 1..20: note = chemically synthesized
  source 1..20: mol_type = other DNA
tggagataatacatttttta

SEQ ID NO: 51528 - DNA, 20 bp, synthetic construct
  misc_feature 1..20: note = chemically synthesized
  source 1..20: mol_type = other DNA
ggagataatacattttttag

SEQ ID NO: 51529 - DNA, 20 bp, synthetic construct
  misc_feature 1..20: note = chemically synthesized
  source 1..20: mol_type = other DNA
tacattttttagaggacaaa

SEQ ID NO: 51530 - DNA, 20 bp, synthetic construct
  misc_feature 1..20: note = chemically synthesized
  source 1..20: mol_type = other DNA
aaacagataaatcatgatat

SEQ ID NO: 51531 - DNA, 20 bp, synthetic construct
  misc_feature 1..20: note = chemically synthesized
  source 1..20: mol_type = other DNA
agataaatcatgatattagc

SEQ ID NO: 51532 - DNA, 20 bp, synthetic construct
  misc_feature 1..20: note = chemically synthesized
  source 1..20: mol_type = other DNA
attaatttaataaattatca

SEQ ID NO: 51533 - DNA, 20 bp, synthetic construct
  misc_feature 1..20: note = chemically synthesized
  source 1..20: mol_type = other DNA
aatttaataaattatcatag

SEQ ID NO: 51534 - DNA, 20 bp, synthetic construct
  misc_feature 1..20: note = chemically synthesized
  source 1..20: mol_type = other DNA
taataaattatcatagtagc

SEQ ID NO: 51535 - DNA, 20 bp, synthetic construct
  misc_feature 1..20: note = chemically synthesized
  source 1..20: mol_type = other DNA
aataaattatcatagtagcc

SEQ ID NO: 51536 - DNA, 20 bp, synthetic construct
  misc_feature 1..20: note = chemically synthesized
  source 1..20: mol_type = other DNA
ataaattatcatagtagcca

SEQ ID NO: 51537 - DNA, 20 bp, synthetic construct
  misc_feature 1..20: note = chemically synthesized
  source 1..20: mol_type = other DNA
aaacaatgatattataaacc

SEQ ID NO: 51538 - DNA, 20 bp, synthetic construct
  misc_feature 1..20: note = chemically synthesized
  source 1..20: mol_type = other DNA
aatgatattataaaccaaga

SEQ ID NO: 51539 - DNA, 20 bp, synthetic construct
  misc_feature 1..20: note = chemically synthesized
  source 1..20: mol_type = other DNA
atgatattataaaccaagac

SEQ ID NO: 51540 - DNA, 20 bp, synthetic construct
  misc_feature 1..20: note = chemically synthesized
  source 1..20: mol_type = other DNA
ccaagacgggcaatgtgtaa

SEQ ID NO: 51541 - DNA, 20 bp, synthetic construct
  misc_feature 1..20: note = chemically synthesized
  source 1..20: mol_type = other DNA
agacgggcaatgtgtaaaag

SEQ ID NO: 51542 - DNA, 20 bp, synthetic construct
  misc_feature 1..20: note = chemically synthesized
  source 1..20: mol_type = other DNA
gacgggcaatgtgtaaaagt

SEQ ID NO: 51543 - DNA, 20 bp, synthetic construct
  misc_feature 1..20: note = chemically synthesized
  source 1..20: mol_type = other DNA
tgtgtaaaagtgggcctatc

SEQ ID NO: 51544 - DNA, 20 bp, synthetic construct
  misc_feature 1..20: note = chemically synthesized
  source 1..20: mol_type = other DNA
gtgtaaaagtgggcctatct

SEQ ID NO: 51545 - DNA, 20 bp, synthetic construct
  misc_feature 1..20: note = chemically synthesized
  source 1..20: mol_type = other DNA
gcctatctgggatgtgtttc

SEQ ID NO: 51546 - DNA, 20 bp, synthetic construct
  misc_feature 1..20: note = chemically synthesized
  source 1..20: mol_type = other DNA
tatctgggatgtgtttctgg

SEQ ID NO: 51547 - DNA, 20 bp, synthetic construct
  misc_feature 1..20: note = chemically synthesized
  source 1..20: mol_type = other DNA
ggatgtgtttctggtagaaa

SEQ ID NO: 51548 - DNA, 20 bp, synthetic construct
  misc_feature 1..20: note = chemically synthesized
  source 1..20: mol_type = other DNA
tgtgtttctggtagaaatgg

SEQ ID NO: 51549 - DNA, 20 bp, synthetic construct
  misc_feature 1..20: note = chemically synthesized
  source 1..20: mol_type = other DNA
gaaatggtagaaattgatga

SEQ ID NO: 51550 - DNA, 20 bp, synthetic construct
  misc_feature 1..20: note = chemically synthesized
  source 1..20: mol_type = other DNA
gaaattgatgaaagatttga

SEQ ID NO: 51551 - DNA, 20 bp, synthetic construct
  misc_feature 1..20: note = chemically synthesized
  source 1..20: mol_type = other DNA
aattgatgaaagatttgatg

SEQ ID NO: 51552 - DNA, 20 bp, synthetic construct
  misc_feature 1..20: note = chemically synthesized
  source 1..20: mol_type = other DNA
ttgatgaaagatttgatgga

SEQ ID NO: 51553 - DNA, 20 bp, synthetic construct
  misc_feature 1..20: note = chemically synthesized
  source 1..20: mol_type = other DNA
gatgaaagatttgatggaga

SEQ ID NO: 51554 - DNA, 20 bp, synthetic construct
  misc_feature 1..20: note = chemically synthesized
  source 1..20: mol_type = other DNA
atgaaagatttgatggagag

SEQ ID NO: 51555 - DNA, 20 bp, synthetic construct
  misc_feature 1..20: note = chemically synthesized
  source 1..20: mol_type = other DNA
aagatttgatggagagagga

SEQ ID NO: 51556 - DNA, 20 bp, synthetic construct
  misc_feature 1..20: note = chemically synthesized
  source 1..20: mol_type = other DNA
agatttgatggagagaggaa

SEQ ID NO: 51557 - DNA, 20 bp, synthetic construct
  misc_feature 1..20: note = chemically synthesized
  source 1..20: mol_type = other DNA
gatttgatggagagaggaaa

SEQ ID NO: 51558 - DNA, 20 bp, synthetic construct
  misc_feature 1..20: note = chemically synthesized
  source 1..20: mol_type = other DNA
ttgatggagagaggaaaggg

SEQ ID NO: 51559 - DNA, 20 bp, synthetic construct
  misc_feature 1..20: note = chemically synthesized
  source 1..20: mol_type = other DNA
tgatggagagaggaaaggga

SEQ ID NO: 51560 - DNA, 20 bp, synthetic construct
  misc_feature 1..20: note = chemically synthesized
  source 1..20: mol_type = other DNA
ggagagaggaaagggaagga

SEQ ID NO: 51561 - DNA, 20 bp, synthetic construct
  misc_feature 1..20: note = chemically synthesized
  source 1..20: mol_type = other DNA
agagaggaaagggaaggaaa

SEQ ID NO: 51562 - DNA, 20 bp, synthetic construct
  misc_feature 1..20: note = chemically synthesized
  source 1..20: mol_type = other DNA
agaggaaagggaaggaaaga

SEQ ID NO: 51563 - DNA, 20 bp, synthetic construct
  misc_feature 1..20: note = chemically synthesized
  source 1..20: mol_type = other DNA
aaaaattttaaaaatgactc

SEQ ID NO: 51564 - DNA, 20 bp, synthetic construct
  misc_feature 1..20: note = chemically synthesized
  source 1..20: mol_type = other DNA
gtcttatgcaattgtgttat

SEQ ID NO: 51565 - DNA, 20 bp, synthetic construct
  misc_feature 1..20: note = chemically synthesized
  source 1..20: mol_type = other DNA
ttatgcaattgtgttattgg

SEQ ID NO: 51566 - DNA, 20 bp, synthetic construct
  misc_feature 1..20: note = chemically synthesized
  source 1..20: mol_type = other DNA
atgcaattgtgttattggtg

SEQ ID NO: 51567 - DNA, 20 bp, synthetic construct
  misc_feature 1..20: note = chemically synthesized
  source 1..20: mol_type = other DNA
gtggagtcactttataatat

SEQ ID NO: 51568 - DNA, 20 bp, synthetic construct
  misc_feature 1..20: note = chemically synthesized
  source 1..20: mol_type = other DNA
tggagtcactttataatatt

SEQ ID NO: 51569 - DNA, 20 bp, synthetic construct
  misc_feature 1..20: note = chemically synthesized
  source 1..20: mol_type = other DNA
gagtcactttataatattag

SEQ ID NO: 51570 - DNA, 20 bp, synthetic construct
  misc_feature 1..20: note = chemically synthesized
  source 1..20: mol_type = other DNA
actttataatattaggagaa

SEQ ID NO: 51571 - DNA, 20 bp, synthetic construct
  misc_feature 1..20: note = chemically synthesized
  source 1..20: mol_type = other DNA
ctttataatattaggagaaa

SEQ ID NO: 51572 - DNA, 20 bp, synthetic construct
  misc_feature 1..20: note = chemically synthesized
  source 1..20: mol_type = other DNA
tttataatattaggagaaaa

SEQ ID NO: 51573 - DNA, 20 bp, synthetic construct
  misc_feature 1..20: note = chemically synthesized
  source 1..20: mol_type = other DNA
taatattaggagaaaaggga

SEQ ID NO: 51574 - DNA, 20 bp, synthetic construct
  misc_feature 1..20: note = chemically synthesized
  source 1..20: mol_type = other DNA
aggagaaaagggacagaaaa

SEQ ID NO: 51575 - DNA, 20 bp, synthetic construct
  misc_feature 1..20: note = chemically synthesized
  source 1..20: mol_type = other DNA
aagggacagaaaatagattt

SEQ ID NO: 51576 - DNA, 20 bp, synthetic construct
  misc_feature 1..20: note = chemically synthesized
  source 1..20: mol_type = other DNA
agggacagaaaatagatttt

SEQ ID NO: 51577 - DNA, 20 bp, synthetic construct
  misc_feature 1..20: note = chemically synthesized
  source 1..20: mol_type = other DNA
gggacagaaaatagattttg

SEQ ID NO: 51578 - DNA, 20 bp, synthetic construct
  misc_feature 1..20: note = chemically synthesized
  source 1..20: mol_type = other DNA
ggacagaaaatagattttgg

SEQ ID NO: 51579 - DNA, 20 bp, synthetic construct
  misc_feature 1..20: note = chemically synthesized
  source 1..20: mol_type = other DNA
gacagaaaatagattttggg

SEQ ID NO: 51580 - DNA, 20 bp, synthetic construct
  misc_feature 1..20: note = chemically synthesized
  source 1..20: mol_type = other DNA
tagattttggggggaaaatc

SEQ ID NO: 51581 - DNA, 20 bp, synthetic construct
  misc_feature 1..20: note = chemically synthesized
  source 1..20: mol_type = other DNA
gggaaaatcaagtactttat

SEQ ID NO: 51582 - DNA, 20 bp, synthetic construct
  misc_feature 1..20: note = chemically synthesized
  source 1..20: mol_type = other DNA
attggcatcattcttatttt

SEQ ID NO: 51583 - DNA, 20 bp, synthetic construct
  misc_feature 1..20: note = chemically synthesized
  source 1..20: mol_type = other DNA
ttattttaagattaaacact

SEQ ID NO: 51584 - DNA, 20 bp, synthetic construct
  misc_feature 1..20: note = chemically synthesized
  source 1..20: mol_type = other DNA
actcagatgaatatattaaa

SEQ ID NO: 51585 - DNA, 20 bp, synthetic construct
  misc_feature 1..20: note = chemically synthesized
  source 1..20: mol_type = other DNA
agatgaatatattaaatagc

SEQ ID NO: 51586 - DNA, 20 bp, synthetic construct
  misc_feature 1..20: note = chemically synthesized
  source 1..20: mol_type = other DNA
ccagttgtattcatgaattt

SEQ ID NO: 51587 - DNA, 20 bp, synthetic construct
  misc_feature 1..20: note = chemically synthesized
  source 1..20: mol_type = other DNA
tattcatgaatttgagctct

SEQ ID NO: 51588 - DNA, 20 bp, synthetic construct
  misc_feature 1..20: note = chemically synthesized
  source 1..20: mol_type = other DNA
attcatgaatttgagctctc

SEQ ID NO: 51589 - DNA, 20 bp, synthetic construct
  misc_feature 1..20: note = chemically synthesized
  source 1..20: mol_type = other DNA
tcatgaatttgagctctcag

SEQ ID NO: 51590 - DNA, 20 bp, synthetic construct
  misc_feature 1..20: note = chemically synthesized
  source 1..20: mol_type = other DNA
tgaatttgagctctcaggag

SEQ ID NO: 51591 - DNA, 20 bp, synthetic construct
  misc_feature 1..20: note = chemically synthesized
  source 1..20: mol_type = other DNA
tttgagctctcaggagtggt

SEQ ID NO: 51592 - DNA, 20 bp, synthetic construct
  misc_feature 1..20: note = chemically synthesized
  source 1..20: mol_type = other DNA
ttgagctctcaggagtggtc

SEQ ID NO: 51593 - DNA, 20 bp, synthetic construct
  misc_feature 1..20: note = chemically synthesized
  source 1..20: mol_type = other DNA
tctcaggagtggtcaggaat

SEQ ID NO: 51594 - DNA, 20 bp, synthetic construct
  misc_feature 1..20: note = chemically synthesized
  source 1..20: mol_type = other DNA
tcaggagtggtcaggaatca

SEQ ID NO: 51595 - DNA, 20 bp, synthetic construct
  misc_feature 1..20: note = chemically synthesized
  source 1..20: mol_type = other DNA
caggagtggtcaggaatcag

SEQ ID NO: 51596 - DNA, 20 bp, synthetic construct
  misc_feature 1..20: note = chemically synthesized
  source 1..20: mol_type = other DNA
ggaatcagaggtgcaaatgt

SEQ ID NO: 51597 - DNA, 20 bp, synthetic construct
  misc_feature 1..20: note = chemically synthesized
  source 1..20: mol_type = other DNA
aaatgttagtttcaaataat

SEQ ID NO: 51598 - DNA, 20 bp, synthetic construct
  misc_feature 1..20: note = chemically synthesized
  source 1..20: mol_type = other DNA
tagtttcaaataataagaaa

SEQ ID NO: 51599 - DNA, 20 bp, synthetic construct
  misc_feature 1..20: note = chemically synthesized
  source 1..20: mol_type = other DNA
ataataagaaaaagttgaca

SEQ ID NO: 51600 - DNA, 20 bp, synthetic construct
  misc_feature 1..20: note = chemically synthesized
  source 1..20: mol_type = other DNA
gttgacatagtctgcacatt

SEQ ID NO: 51601 - DNA, 20 bp, synthetic construct
  misc_feature 1..20: note = chemically synthesized
  source 1..20: mol_type = other DNA
ttgacatagtctgcacatta

SEQ ID NO: 51602 - DNA, 20 bp, synthetic construct
  misc_feature 1..20: note = chemically synthesized
  source 1..20: mol_type = other DNA
agtctgcacattaaggaact

SEQ ID NO: 51603 - DNA, 20 bp, synthetic construct
  misc_feature 1..20: note = chemically synthesized
  source 1..20: mol_type = other DNA
acattaaggaactgagaatt

SEQ ID NO: 51604 - DNA, 20 bp, synthetic construct
  misc_feature 1..20: note = chemically synthesized
  source 1..20: mol_type = other DNA
actgagaatttagtttgtaa

SEQ ID NO: 51605 - DNA, 20 bp, synthetic construct
  misc_feature 1..20: note = chemically synthesized
  source 1..20: mol_type = other DNA
tgagaatttagtttgtaaca

SEQ ID NO: 51606 - DNA, 20 bp, synthetic construct
  misc_feature 1..20: note = chemically synthesized
  source 1..20: mol_type = other DNA
ttagtttgtaacagagatat

SEQ ID NO: 51607 - DNA, 20 bp, synthetic construct
  misc_feature 1..20: note = chemically synthesized
  source 1..20: mol_type = other DNA
agagatattagttaaatatt

SEQ ID NO: 51608 - DNA, 20 bp, synthetic construct
  misc_feature 1..20: note = chemically synthesized
  source 1..20: mol_type = other DNA
taaatatttagtttaaatat

SEQ ID NO: 51609 - DNA, 20 bp, synthetic construct
  misc_feature 1..20: note = chemically synthesized
  source 1..20: mol_type = other DNA
ttaaatattagttaaatatt

SEQ ID NO: 51610 - DNA, 20 bp, synthetic construct
  misc_feature 1..20: note = chemically synthesized
  source 1..20: mol_type = other DNA
gctaataaatacaaaattat

SEQ ID NO: 51611 - DNA, 20 bp, synthetic construct
  misc_feature 1..20: note = chemically synthesized
  source 1..20: mol_type = other DNA
gaaacatgataccaaaataa

SEQ ID NO: 51612 - DNA, 20 bp, synthetic construct
  misc_feature 1..20: note = chemically synthesized
  source 1..20: mol_type = other DNA
ataccaaaataatagatata

SEQ ID NO: 51613 - DNA, 20 bp, synthetic construct
  misc_feature 1..20: note = chemically synthesized
  source 1..20: mol_type = other DNA
tatatggataaatttgtctt

SEQ ID NO: 51614 - DNA, 20 bp, synthetic construct
  misc_feature 1..20: note = chemically synthesized
  source 1..20: mol_type = other DNA
gtcttaagaaacttcttgaa

SEQ ID NO: 51615 - DNA, 20 bp, synthetic construct
  misc_feature 1..20: note = chemically synthesized
  source 1..20: mol_type = other DNA
cttcttgaaaagtgattgtt

SEQ ID NO: 51616 - DNA, 20 bp, synthetic construct
  misc_feature 1..20: note = chemically synthesized
  source 1..20: mol_type = other DNA
aaaagtgattgttgagttgc

SEQ ID NO: 51617 - DNA, 20 bp, synthetic construct
  misc_feature 1..20: note = chemically synthesized
  source 1..20: mol_type = other DNA
agttgcaagatcgttttaaa

SEQ ID NO: 51618 - DNA, 20 bp, synthetic construct
  misc_feature 1..20: note = chemically synthesized
  source 1..20: mol_type = other DNA
gttgcaagatcgttttaaaa

SEQ ID NO: 51619 - DNA, 20 bp, synthetic construct
  misc_feature 1..20: note = chemically synthesized
  source 1..20: mol_type = other DNA
ttgcaagatcgttttaaaaa

SEQ ID NO: 51620 - DNA, 20 bp, synthetic construct
  misc_feature 1..20: note = chemically synthesized
  source 1..20: mol_type = other DNA
caagatcgttttaaaaaggg

SEQ ID NO: 51621 - DNA, 20 bp, synthetic construct
  misc_feature 1..20: note = chemically synthesized
  source 1..20: mol_type = other DNA
aagatcgttttaaaaagggt

SEQ ID NO: 51622 - DNA, 20 bp, synthetic construct
  misc_feature 1..20: note = chemically synthesized
  source 1..20: mol_type = other DNA
atcgttttaaaaagggtagg

SEQ ID NO: 51623 - DNA, 20 bp, synthetic construct
  misc_feature 1..20: note = chemically synthesized
  source 1..20: mol_type = other DNA
aaaaagggtaggaagaaatt

SEQ ID NO: 51624 - DNA, 20 bp, synthetic construct
  misc_feature 1..20: note = chemically synthesized
  source 1..20: mol_type = other DNA
aaaagggtaggaagaaattg

SEQ ID NO: 51625 - DNA, 20 bp, synthetic construct
  misc_feature 1..20: note = chemically synthesized
  source 1..20: mol_type = other DNA
ggtaggaagaaattgaggaa

SEQ ID NO: 51626 - DNA, 20 bp, synthetic construct
  misc_feature 1..20: note = chemically synthesized
  source 1..20: mol_type = other DNA
ggaaaagatgatgaataatt

SEQ ID NO: 51627 - DNA, 20 bp, synthetic construct
  misc_feature 1..20: note = chemically synthesized
  source 1..20: mol_type = other DNA
gaaaagatgatgaataattt

SEQ ID NO: 51628 - DNA, 20 bp, synthetic construct
  misc_feature 1..20: note = chemically synthesized
  source 1..20: mol_type = other DNA
aagatgatgaataatttagg

SEQ ID NO: 51629 - DNA, 20 bp, synthetic construct
  misc_feature 1..20: note = chemically synthesized
  source 1..20: mol_type = other DNA
tgatgaataatttaggcaga

SEQ ID NO: 51630 - DNA, 20 bp, synthetic construct
  misc_feature 1..20: note = chemically synthesized
  source 1..20: mol_type = other DNA
ttaggcagatagaacatttc

SEQ ID NO: 51631 - DNA, 20 bp, synthetic construct
  misc_feature 1..20: note = chemically synthesized
  source 1..20: mol_type = other DNA
tttcgagaaaaattttacga

SEQ ID NO: 51632 - DNA, 20 bp, synthetic construct
  misc_feature 1..20: note = chemically synthesized
  source 1..20: mol_type = other DNA
cgagaaaaattttacgaaag

SEQ ID NO: 51633 - DNA, 20 bp, synthetic construct
  misc_feature 1..20: note = chemically synthesized
  source 1..20: mol_type = other DNA
agaaaaattttacgaaagaa

SEQ ID NO: 51634 - DNA, 20 bp, synthetic construct
  misc_feature 1..20: note = chemically synthesized
  source 1..20: mol_type = other DNA
gaaagaagagaaattcgatt

SEQ ID NO: 51635 - DNA, 20 bp, synthetic construct
  misc_feature 1..20: note = chemically synthesized
  source 1..20: mol_type = other DNA
aagaagagaaattcgattta

SEQ ID NO: 51636 - DNA, 20 bp, synthetic construct
  misc_feature 1..20: note = chemically synthesized
  source 1..20: mol_type = other DNA
aattcgatttagagaaatga

SEQ ID NO: 51637 - DNA, 20 bp, synthetic construct
  misc_feature 1..20: note = chemically synthesized
  source 1..20: mol_type = other DNA
tcgatttagagaaatgaaag

SEQ ID NO: 51638 - DNA, 20 bp, synthetic construct
  misc_feature 1..20: note = chemically synthesized
  source 1..20: mol_type = other DNA
gaaagaagatacgtattcaa

SEQ ID NO: 51639 - DNA, 20 bp, synthetic construct
  misc_feature 1..20: note = chemically synthesized
  source 1..20: mol_type = other DNA
aagactgaaaaatcctctgc

SEQ ID NO: 51640 - DNA, 20 bp, synthetic construct
  misc_feature 1..20: note = chemically synthesized
  source 1..20: mol_type = other DNA
aaaatcctctgcaagaaacg

SEQ ID NO: 51641 - DNA, 20 bp, synthetic construct
  misc_feature 1..20: note = chemically synthesized
  source 1..20: mol_type = other DNA
gcaagaaacgaagaaacttc

SEQ ID NO: 51642 - DNA, 20 bp, synthetic construct
  misc_feature 1..20: note = chemically synthesized
  source 1..20: mol_type = other DNA
aagaaacttcaagcattcta

SEQ ID NO: 51643 - DNA, 20 bp, synthetic construct
  misc_feature 1..20: note = chemically synthesized
  source 1..20: mol_type = other DNA
gaaacttcaagcattctatg

SEQ ID NO: 51644 - DNA, 20 bp, synthetic construct
  misc_feature 1..20: note = chemically synthesized
  source 1..20: mol_type = other DNA
caagcattctatggagaaaa

SEQ ID NO: 51645 - DNA, 20 bp, synthetic construct
  misc_feature 1..20: note = chemically synthesized
  source 1..20: mol_type = other DNA
ggagaaaaaagtattaaaaa

SEQ ID NO: 51646 - DNA, 20 bp, synthetic construct
  misc_feature 1..20: note = chemically synthesized
  source 1..20: mol_type = other DNA
aaaaaagtattaaaaatagt

SEQ ID NO: 51647 - DNA, 20 bp, synthetic construct
  misc_feature 1..20: note = chemically synthesized
  source 1..20: mol_type = other DNA
agtattaaaaatagtgagct

SEQ ID NO: 51648 - DNA, 20 bp, synthetic construct
  misc_feature 1..20: note = chemically synthesized
  source 1..20: mol_type = other DNA
gagctaagttattcaatgct

SEQ ID NO: 51649 - DNA, 20 bp, synthetic construct
  misc_feature 1..20: note = chemically synthesized
  source 1..20: mol_type = other DNA
ctaagttattcaatgctgag

SEQ ID NO: 51650 - DNA, 20 bp, synthetic construct
  misc_feature 1..20: note = chemically synthesized
  source 1..20: mol_type = other DNA
taagttattcaatgctgaga

SEQ ID NO: 51651 - DNA, 20 bp, synthetic construct
  misc_feature 1..20: note = chemically synthesized
  source 1..20: mol_type = other DNA
agttattcaatgctgagaag

SEQ ID NO: 51652 - DNA, 20 bp, synthetic construct
  misc_feature 1..20: note = chemically synthesized
  source 1..20: mol_type = other DNA
attcaatgctgagaaggagt

SEQ ID NO: 51653 - DNA, 20 bp, synthetic construct
  misc_feature 1..20: note = chemically synthesized
  source 1..20: mol_type = other DNA
ttcaatgctgagaaggagtc

SEQ ID NO: 51654 - DNA, 20 bp, synthetic construct
  misc_feature 1..20: note = chemically synthesized
  source 1..20: mol_type = other DNA
tcaatgctgagaaggagtca

SEQ ID NO: 51655 - DNA, 20 bp, synthetic construct
  misc_feature 1..20: note = chemically synthesized
  source 1..20: mol_type = other DNA
tgctgagaaggagtcagggc

SEQ ID NO: 51656 - DNA, 20 bp, synthetic construct
  misc_feature 1..20: note = chemically synthesized
  source 1..20: mol_type = other DNA
agtcagggcaagaaaaacaa

SEQ ID NO: 51657 - DNA, 20 bp, synthetic construct
  misc_feature 1..20: note = chemically synthesized
  source 1..20: mol_type = other DNA
agggcaagaaaaacaatggt

SEQ ID NO: 51658 - DNA, 20 bp, synthetic construct
  misc_feature 1..20: note = chemically synthesized
  source 1..20: mol_type = other DNA
aaaaacaatggttagactgc

SEQ ID NO: 51659 - DNA, 20 bp, synthetic construct
  misc_feature 1..20: note = chemically synthesized
  source 1..20: mol_type = other DNA
aacaatggttagactgctag

SEQ ID NO: 51660 - DNA, 20 bp, synthetic construct
  misc_feature 1..20: note = chemically synthesized
  source 1..20: mol_type = other DNA
gttagactgctagaagacgt

SEQ ID NO: 51661 - DNA, 20 bp, synthetic construct
  misc_feature 1..20: note = chemically synthesized
  source 1..20: mol_type = other DNA
actgctagaagacgtcagtg

SEQ ID NO: 51662 - DNA, 20 bp, synthetic construct
  misc_feature 1..20: note = chemically synthesized
  source 1..20: mol_type = other DNA
tagaagacgtcagtgtagta

SEQ ID NO: 51663 - DNA, 20 bp, synthetic construct
  misc_feature 1..20: note = chemically synthesized
  source 1..20: mol_type = other DNA
gaagacgtcagtgtagtata

SEQ ID NO: 51664 - DNA, 20 bp, synthetic construct
  misc_feature 1..20: note = chemically synthesized
  source 1..20: mol_type = other DNA
agacgtcagtgtagtataga

SEQ ID NO: 51665 - DNA, 20 bp, synthetic construct
  misc_feature 1..20: note = chemically synthesized
  source 1..20: mol_type = other DNA
tgtagtatagagagtacatt

SEQ ID NO: 51666 - DNA, 20 bp, synthetic construct
  misc_feature 1..20: note = chemically synthesized
  source 1..20: mol_type = other DNA
agtatagagagtacattgag

SEQ ID NO: 51667 - DNA, 20 bp, synthetic construct
  misc_feature 1..20: note = chemically synthesized
  source 1..20: mol_type = other DNA
tagagagtacattgagaaga

SEQ ID NO: 51668 - DNA, 20 bp, synthetic construct
  misc_feature 1..20: note = chemically synthesized
  source 1..20: mol_type = other DNA
tacattgagaagaaagtctg

SEQ ID NO: 51669 - DNA, 20 bp, synthetic construct
  misc_feature 1..20: note = chemically synthesized
  source 1..20: mol_type = other DNA
agtctgtggaactgtgttgt

SEQ ID NO: 51670 - DNA, 20 bp, synthetic construct
  misc_feature 1..20: note = chemically synthesized
  source 1..20: mol_type = other DNA
gtctgtggaactgtgttgtg

SEQ ID NO: 51671 - DNA, 20 bp, synthetic construct
  misc_feature 1..20: note = chemically synthesized
  source 1..20: mol_type = other DNA
aactgtgttgtgaggctaat

SEQ ID NO: 51672 - DNA, 20 bp, synthetic construct
  misc_feature 1..20: note = chemically synthesized
  source 1..20: mol_type = other DNA
gttgtgaggctaataagaca

SEQ ID NO: 51673 - DNA, 20 bp, synthetic construct
  misc_feature 1..20: note = chemically synthesized
  source 1..20: mol_type = other DNA
gctaataagacaaagctgaa

SEQ ID NO: 51674 - DNA, 20 bp, synthetic construct
  misc_feature 1..20: note = chemically synthesized
  source 1..20: mol_type = other DNA
aataagacaaagctgaaaag

SEQ ID NO: 51675 - DNA, 20 bp, synthetic construct
  misc_feature 1..20: note = chemically synthesized
  source 1..20: mol_type = other DNA
ataagacaaagctgaaaagt

SEQ ID NO: 51676 - DNA, 20 bp, synthetic construct
  misc_feature 1..20: note = chemically synthesized
  source 1..20: mol_type = other DNA
aagctgaaaagtaggacata

SEQ ID NO: 51677 - DNA, 20 bp, synthetic construct
  misc_feature 1..20: note = chemically synthesized
  source 1..20: mol_type = other DNA
agctgaaaagtaggacataa

SEQ ID NO: 51678 - DNA, 20 bp, synthetic construct
  misc_feature 1..20: note = chemically synthesized
  source 1..20: mol_type = other DNA
gctgaaaagtaggacataaa

SEQ ID NO: 51679 - DNA, 20 bp, synthetic construct
  misc_feature 1..20: note = chemically synthesized
  source 1..20: mol_type = other DNA
gaaaagtaggacataaaggg

SEQ ID NO: 51680 - DNA, 20 bp, synthetic construct
  misc_feature 1..20: note = chemically synthesized
  source 1..20: mol_type = other DNA
taaagggcagcccaaatctg

SEQ ID NO: 51681 - DNA, 20 bp, synthetic construct
  misc_feature 1..20: note = chemically synthesized
  source 1..20: mol_type = other DNA
gaagttactttaacatctcg

SEQ ID NO: 51682 - DNA, 20 bp, synthetic construct
  misc_feature 1..20: note = chemically synthesized
  source 1..20: mol_type = other DNA
agttactcaatcaaacatga

SEQ ID NO: 51683 - DNA, 20 bp, synthetic construct
  misc_feature 1..20: note = chemically synthesized
  source 1..20: mol_type = other DNA
ctcaatcaaacatgaaagta

SEQ ID NO: 51684 - DNA, 20 bp, synthetic construct
  misc_feature 1..20: note = chemically synthesized
  source 1..20: mol_type = other DNA
tgaacatctgtttacattat

SEQ ID NO: 51685 - DNA, 20 bp, synthetic construct
  misc_feature 1..20: note = chemically synthesized
  source 1..20: mol_type = other DNA
aacatctgtttacattatta

SEQ ID NO: 51686 - DNA, 20 bp, synthetic construct
  misc_feature 1..20: note = chemically synthesized
  source 1..20: mol_type = other DNA
aaaaaacttatgatgattct

SEQ ID NO: 51687 - DNA, 20 bp, synthetic construct
  misc_feature 1..20: note = chemically synthesized
  source 1..20: mol_type = other DNA
aaaaacttatgatgattctc

SEQ ID NO: 51688 - DNA, 20 bp, synthetic construct
  misc_feature 1..20: note = chemically synthesized
  source 1..20: mol_type = other DNA
cttatgatgattctcaggtc

SEQ ID NO: 51689 - DNA, 20 bp, synthetic construct
  misc_feature 1..20: note = chemically synthesized
  source 1..20: mol_type = other DNA
attctcaggtctggaactta

SEQ ID NO: 51690 - DNA, 20 bp, synthetic construct
  misc_feature 1..20: note = chemically synthesized
  source 1..20: mol_type = other DNA
ctcaggtctggaacttaaag

SEQ ID NO: 51691 - DNA, 20 bp, synthetic construct
  misc_feature 1..20: note = chemically synthesized
  source 1..20: mol_type = other DNA
tcaggtctggaacttaaagc

SEQ ID NO: 51692 - DNA, 20 bp, synthetic construct
  misc_feature 1..20: note = chemically synthesized
  source 1..20: mol_type = other DNA
taaagcaggcaaacaatgta

SEQ ID NO: 51693 - DNA, 20 bp, synthetic construct
  misc_feature 1..20: note = chemically synthesized
  source 1..20: mol_type = other DNA
agcaggcaaacaatgtaaag

SEQ ID NO: 51694 - DNA, 20 bp, synthetic construct
  misc_feature 1..20: note = chemically synthesized
  source 1..20: mol_type = other DNA
aggcaaacaatgtaaagaag

SEQ ID NO: 51695 - DNA, 20 bp, synthetic construct
  misc_feature 1..20: note = chemically synthesized
  source 1..20: mol_type = other DNA
ccaattgattctgctaccat

SEQ ID NO: 51696 - DNA, 20 bp, synthetic construct
  misc_feature 1..20: note = chemically synthesized
  source 1..20: mol_type = other DNA
caattgattctgctaccatg

SEQ ID NO: 51697 - DNA, 20 bp, synthetic construct
  misc_feature 1..20: note = chemically synthesized
  source 1..20: mol_type = other DNA
catgaggcttttgaaattat

SEQ ID NO: 51698 - DNA, 20 bp, synthetic construct
  misc_feature 1..20: note = chemically synthesized
  source 1..20: mol_type = other DNA
aattataagcttgcttgttt

SEQ ID NO: 51699 - DNA, 20 bp, synthetic construct
  misc_feature 1..20: note = chemically synthesized
  source 1..20: mol_type = other DNA
taagcttgcttgtttgagcc

SEQ ID NO: 51700 - DNA, 20 bp, synthetic construct
  misc_feature 1..20: note = chemically synthesized
  source 1..20: mol_type = other DNA
gagcctggctttgtgatctg

SEQ ID NO: 51701 - DNA, 20 bp, synthetic construct
  misc_feature 1..20: note = chemically synthesized
  source 1..20: mol_type = other DNA
ctttgtgatctgtagaactg

SEQ ID NO: 51702 - DNA, 20 bp, synthetic construct
  misc_feature 1..20: note = chemically synthesized
  source 1..20: mol_type = other DNA
tttgtgatctgtagaactgc

SEQ ID NO: 51703 - DNA, 20 bp, synthetic construct
  misc_feature 1..20: note = chemically synthesized
  source 1..20: mol_type = other DNA
tctgtagaactgcaggttct

SEQ ID NO: 51704 - DNA, 20 bp, synthetic construct
  misc_feature 1..20: note = chemically synthesized
  source 1..20: mol_type = other DNA
tagaactgcaggttctaaga

SEQ ID NO: 51705 - DNA, 20 bp, synthetic construct
  misc_feature 1..20: note = chemically synthesized
  source 1..20: mol_type = other DNA
tctaagaaagaaaacacaat

SEQ ID NO: 51706 - DNA, 20 bp, synthetic construct
  misc_feature 1..20: note = chemically synthesized
  source 1..20: mol_type = other DNA
ataaatgtatattgaataaa

SEQ ID NO: 51707 - DNA, 20 bp, synthetic construct
  misc_feature 1..20: note = chemically synthesized
  source 1..20: mol_type = other DNA
atattgaataaatagttaat

SEQ ID NO: 51708 - DNA, 20 bp, synthetic construct
  misc_feature 1..20: note = chemically synthesized
  source 1..20: mol_type = other DNA
gctcattaactgaataaata

SEQ ID NO: 51709 - DNA, 20 bp, synthetic construct
  misc_feature 1..20: note = chemically synthesized
  source 1..20: mol_type = other DNA
ctcattaactgaataaataa

SEQ ID NO: 51710 - DNA, 20 bp, synthetic construct
  misc_feature 1..20: note = chemically synthesized
  source 1..20: mol_type = other DNA
taactgaataaataaaggaa

SEQ ID NO: 51711 - DNA, 20 bp, synthetic construct
  misc_feature 1..20: note = chemically synthesized
  source 1..20: mol_type = other DNA
aactgaataaataaaggaat

SEQ ID NO: 51712 - DNA, 20 bp, synthetic construct
  misc_feature 1..20: note = chemically synthesized
  source 1..20: mol_type = other DNA
tgaataaataaaggaatggg

SEQ ID NO: 51713 - DNA, 20 bp, synthetic construct
  misc_feature 1..20: note = chemically synthesized
  source 1..20: mol_type = other DNA
ataaaggaatgggaagcact

SEQ ID NO: 51714 - DNA, 20 bp, synthetic construct
  misc_feature 1..20: note = chemically synthesized
  source 1..20: mol_type = other DNA
gaagcactgagctgctatca

SEQ ID NO: 51715 - DNA, 20 bp, synthetic construct
  misc_feature 1..20: note = chemically synthesized
  source 1..20: mol_type = other DNA
aagcactgagctgctatcaa

SEQ ID NO: 51716 - DNA, 20 bp, synthetic construct
  misc_feature 1..20: note = chemically synthesized
  source 1..20: mol_type = other DNA
ctgagctgctatcaaaggct

SEQ ID NO: 51717 - DNA, 20 bp, synthetic construct
  misc_feature 1..20: note = chemically synthesized
  source 1..20: mol_type = other DNA
atctaattctctacatcaca

SEQ ID NO: 51718 - DNA, 20 bp, synthetic construct
  misc_feature 1..20: note = chemically synthesized
  source 1..20: mol_type = other DNA
tctaattctctacatcacaa

SEQ ID NO: 51719 - DNA, 20 bp, synthetic construct
  misc_feature 1..20: note = chemically synthesized
  source 1..20: mol_type = other DNA
tacatcacaaaggcacaaat

SEQ ID NO: 51720 - DNA, 20 bp, synthetic construct
  misc_feature 1..20: note = chemically synthesized
  source 1..20: mol_type = other DNA
acaaatgagttgaacatctc

SEQ ID NO: 51721 - DNA, 20 bp, synthetic construct
  misc_feature 1..20: note = chemically synthesized
  source 1..20: mol_type = other DNA
aaatgagttgaacatctcaa

SEQ ID NO: 51722 - DNA, 20 bp, synthetic construct
  misc_feature 1..20: note = chemically synthesized
  source 1..20: mol_type = other DNA
aatgagttgaacatctcaag

SEQ ID NO: 51723 - DNA, 20 bp, synthetic construct
  misc_feature 1..20: note = chemically synthesized
  source 1..20: mol_type = other DNA
agttgaacatctcaagaggc

SEQ ID NO: 51724 - DNA, 20 bp, synthetic construct
  misc_feature 1..20: note = chemically synthesized
  source 1..20: mol_type = other DNA
ttgaacatctcaagaggcca

SEQ ID NO: 51725 - DNA, 20 bp, synthetic construct
  misc_feature 1..20: note = chemically synthesized
  source 1..20: mol_type = other DNA
atctcaagaggccagagctc

SEQ ID NO: 51726 - DNA, 20 bp, synthetic construct
  misc_feature 1..20: note = chemically synthesized
  source 1..20: mol_type = other DNA
caagaggccagagctccagt

SEQ ID NO: 51727 - DNA, 20 bp, synthetic construct
  misc_feature 1..20: note = chemically synthesized
  source 1..20: mol_type = other DNA
cagtgagaaatcatttaccc

SEQ ID NO: 51728 - DNA, 20 bp, synthetic construct
  misc_feature 1..20: note = chemically synthesized
  source 1..20: mol_type = other DNA
agtgagaaatcatttaccca

SEQ ID NO: 51729 - DNA, 20 bp, synthetic construct
  misc_feature 1..20: note = chemically synthesized
  source 1..20: mol_type = other DNA
ctgtctgcttatcaccaatg

SEQ ID NO: 51730 - DNA, 20 bp, synthetic construct
  misc_feature 1..20: note = chemically synthesized
  source 1..20: mol_type = other DNA
gcttatcaccaatgaagaaa

SEQ ID NO: 51731 - DNA, 20 bp, synthetic construct
  misc_feature 1..20: note = chemically synthesized
  source 1..20: mol_type = other DNA
aatgaagaaaaagtaattgc

SEQ ID NO: 51732 - DNA, 20 bp, synthetic construct
  misc_feature 1..20: note = chemically synthesized
  source 1..20: mol_type = other DNA
taattgctggctacgtcatc

SEQ ID NO: 51733 - DNA, 20 bp, synthetic construct
  misc_feature 1..20: note = chemically synthesized
  source 1..20: mol_type = other DNA
attgctggctacgtcatctg

SEQ ID NO: 51734 - DNA, 20 bp, synthetic construct
  misc_feature 1..20: note = chemically synthesized
  source 1..20: mol_type = other DNA
ttgctggctacgtcatctgg

SEQ ID NO: 51735 - DNA, 20 bp, synthetic construct
  misc_feature 1..20: note = chemically synthesized
  source 1..20: mol_type = other DNA
tgctggctacgtcatctgga

SEQ ID NO: 51736 - DNA, 20 bp, synthetic construct
  misc_feature 1..20: note = chemically synthesized
  source 1..20: mol_type = other DNA
gctggctacgtcatctggag

SEQ ID NO: 51737 - DNA, 20 bp, synthetic construct
  misc_feature 1..20: note = chemically synthesized
  source 1..20: mol_type = other DNA
ctggctacgtcatctggagg

SEQ ID NO: 51738 - DNA, 20 bp, synthetic construct
  misc_feature 1..20: note = chemically synthesized
  source 1..20: mol_type = other DNA
ggctacgtcatctggagggg

SEQ ID NO: 51739 - DNA, 20 bp, synthetic construct
  misc_feature 1..20: note = chemically synthesized
  source 1..20: mol_type = other DNA
tcatctggagggggagaaaa

SEQ ID NO: 51740 - DNA, 20 bp, synthetic construct
  misc_feature 1..20: note = chemically synthesized
  source 1..20: mol_type = other DNA
catctggagggggagaaaac

SEQ ID NO: 51741 - DNA, 20 bp, synthetic construct
  misc_feature 1..20: note = chemically synthesized
  source 1..20: mol_type = other DNA
tctggagggggagaaaacag

SEQ ID NO: 51742 - DNA, 20 bp, synthetic construct
  misc_feature 1..20: note = chemically synthesized
  source 1..20: mol_type = other DNA
acaggagtatcttcattaaa

SEQ ID NO: 51743 - DNA, 20 bp, synthetic construct
  misc_feature 1..20: note = chemically synthesized
  source 1..20: mol_type = other DNA
tatcttcattaaatagtatt

SEQ ID NO: 51744 - DNA, 20 bp, synthetic construct
  misc_feature 1..20: note = chemically synthesized
  source 1..20: mol_type = other DNA
tcttcattaaatagtatttg

SEQ ID NO: 51745 - DNA, 20 bp, synthetic construct
  misc_feature 1..20: note = chemically synthesized
  source 1..20: mol_type = other DNA
atttggagaaaaaatatact

SEQ ID NO: 51746 - DNA, 20 bp, synthetic construct
  misc_feature 1..20: note = chemically synthesized
  source 1..20: mol_type = other DNA
ttggagaaaaaatatacttg

SEQ ID NO: 51747 - DNA, 20 bp, synthetic construct
  misc_feature 1..20: note = chemically synthesized
  source 1..20: mol_type = other DNA
agaaaaaatatacttggaga

SEQ ID NO: 51748 - DNA, 20 bp, synthetic construct
  misc_feature 1..20: note = chemically synthesized
  source 1..20: mol_type = other DNA
tacttggagacggcacaaaa

SEQ ID NO: 51749 - DNA, 20 bp, synthetic construct
  misc_feature 1..20: note = chemically synthesized
  source 1..20: mol_type = other DNA
cggcacaaaatggaaaatga

SEQ ID NO: 51750 - DNA, 20 bp, synthetic construct
  misc_feature 1..20: note = chemically synthesized
  source 1..20: mol_type = other DNA
caaaatggaaaatgacggaa

SEQ ID NO: 51751 - DNA, 20 bp, synthetic construct
  misc_feature 1..20: note = chemically synthesized
  source 1..20: mol_type = other DNA
acggaaaagtgactatttaa

SEQ ID NO: 51752 - DNA, 20 bp, synthetic construct
  misc_feature 1..20: note = chemically synthesized
  source 1..20: mol_type = other DNA
taatagacttatgatattta

SEQ ID NO: 51753 - DNA, 20 bp, synthetic construct
  misc_feature 1..20: note = chemically synthesized
  source 1..20: mol_type = other DNA
cttatgatatttaaagccca

SEQ ID NO: 51754 - DNA, 20 bp, synthetic construct
  misc_feature 1..20: note = chemically synthesized
  source 1..20: mol_type = other DNA
acttcgaatgtttaatgaat

SEQ ID NO: 51755 - DNA, 20 bp, synthetic construct
  misc_feature 1..20: note = chemically synthesized
  source 1..20: mol_type = other DNA
ttcgaatgtttaatgaattg

SEQ ID NO: 51756 - DNA, 20 bp, synthetic construct
  misc_feature 1..20: note = chemically synthesized
  source 1..20: mol_type = other DNA
cgaatgtttaatgaattgga

SEQ ID NO: 51757 - DNA, 20 bp, synthetic construct
  misc_feature 1..20: note = chemically synthesized
  source 1..20: mol_type = other DNA
atgtttaatgaattggagag

SEQ ID NO: 51758 - DNA, 20 bp, synthetic construct
  misc_feature 1..20: note = chemically synthesized
  source 1..20: mol_type = other DNA
agagaagaaaataatttttc

SEQ ID NO: 51759 - DNA, 20 bp, synthetic construct
  misc_feature 1..20: note = chemically synthesized
  source 1..20: mol_type = other DNA
aaataatttttcaagaacct

SEQ ID NO: 51760 - DNA, 20 bp, synthetic construct
  misc_feature 1..20: note = chemically synthesized
  source 1..20: mol_type = other DNA
caagaacctcggctctttac

SEQ ID NO: 51761 - DNA, 20 bp, synthetic construct
  misc_feature 1..20: note = chemically synthesized
  source 1..20: mol_type = other DNA
aaaatttttaccactatcct

SEQ ID NO: 51762 - DNA, 20 bp, synthetic construct
  misc_feature 1..20: note = chemically synthesized
  source 1..20: mol_type = other DNA
aaatttttaccactatcctt

SEQ ID NO: 51763 - DNA, 20 bp, synthetic construct
  misc_feature 1..20: note = chemically synthesized
  source 1..20: mol_type = other DNA
ctatccttgggaaaatgtct

SEQ ID NO: 51764 - DNA, 20 bp, synthetic construct
  misc_feature 1..20: note = chemically synthesized
  source 1..20: mol_type = other DNA
gcaacgtatttttttaaaac

SEQ ID NO: 51765 - DNA, 20 bp, synthetic construct
  misc_feature 1..20: note = chemically synthesized
  source 1..20: mol_type = other DNA
tccttatttgtttttgctta

SEQ ID NO: 51766 - DNA, 20 bp, synthetic construct
  misc_feature 1..20: note = chemically synthesized
  source 1..20: mol_type = other DNA
tgtttttgcttatggcttct

SEQ ID NO: 51767 - DNA, 20 bp, synthetic construct
  misc_feature 1..20: note = chemically synthesized
  source 1..20: mol_type = other DNA
gtttttgcttatggcttcta

SEQ ID NO: 51768 - DNA, 20 bp, synthetic construct
  misc_feature 1..20: note = chemically synthesized
  source 1..20: mol_type = other DNA
tctaaggatatgttcacatc

SEQ ID NO: 51769 - DNA, 20 bp, synthetic construct
  misc_feature 1..20: note = chemically synthesized
  source 1..20: mol_type = other DNA
aggatatgttcacatccaga

SEQ ID NO: 51770 - DNA, 20 bp, synthetic construct
  misc_feature 1..20: note = chemically synthesized
  source 1..20: mol_type = other DNA
tgacttttaaatgacatcaa

SEQ ID NO: 51771 - DNA, 20 bp, synthetic construct
  misc_feature 1..20: note = chemically synthesized
  source 1..20: mol_type = other DNA
cttttaaatgacatcaaaag

SEQ ID NO: 51772 - DNA, 20 bp, synthetic construct
  misc_feature 1..20: note = chemically synthesized
  source 1..20: mol_type = other DNA
aaaagaagaccattttctca

SEQ ID NO: 51773 - DNA, 20 bp, synthetic construct
  misc_feature 1..20: note = chemically synthesized
  source 1..20: mol_type = other DNA
aaagaagaccattttctcaa

SEQ ID NO: 51774 - DNA, 20 bp, synthetic construct
  misc_feature 1..20: note = chemically synthesized
  source 1..20: mol_type = other DNA
gaccattttctcaaaggcaa

SEQ ID NO: 51775 - DNA, 20 bp, synthetic construct
  misc_feature 1..20: note = chemically synthesized
  source 1..20: mol_type = other DNA
gcaatggatactatgtctca

SEQ ID NO: 51776 - DNA, 20 bp, synthetic construct
  misc_feature 1..20: note = chemically synthesized
  source 1..20: mol_type = other DNA
gatactatgtctcaaagaaa

SEQ ID NO: 51777 - DNA, 20 bp, synthetic construct
  misc_feature 1..20: note = chemically synthesized
  source 1..20: mol_type = other DNA
ctcaaagaaacagaatttct

SEQ ID NO: 51778 - DNA, 20 bp, synthetic construct
  misc_feature 1..20: note = chemically synthesized
  source 1..20: mol_type = other DNA
atttctcagctgtttttttt

SEQ ID NO: 51779 - DNA, 20 bp, synthetic construct
  misc_feature 1..20: note = chemically synthesized
  source 1..20: mol_type = other DNA
ctcagctgttttttttaagt

SEQ ID NO: 51780 - DNA, 20 bp, synthetic construct
  misc_feature 1..20: note = chemically synthesized
  source 1..20: mol_type = other DNA
gctgttttttttaagtcagt

SEQ ID NO: 51781 - DNA, 20 bp, synthetic construct
  misc_feature 1..20: note = chemically synthesized
  source 1..20: mol_type = other DNA
ttttttaagtcagtaagttt

SEQ ID NO: 51782 - DNA, 20 bp, synthetic construct
  misc_feature 1..20: note = chemically synthesized
  source 1..20: mol_type = other DNA
tttttaagtcagtaagtttt

SEQ ID NO: 51783 - DNA, 20 bp, synthetic construct
  misc_feature 1..20: note = chemically synthesized
  source 1..20: mol_type = other DNA
ttttaagtcagtaagtttta

SEQ ID NO: 51784 - DNA, 20 bp, synthetic construct
  misc_feature 1..20: note = chemically synthesized
  source 1..20: mol_type = other DNA
tttagggtatttcatttact

SEQ ID NO: 51785 - DNA, 20 bp, synthetic construct
  misc_feature 1..20: note = chemically synthesized
  source 1..20: mol_type = other DNA
cttagaaatttcattgtatt

SEQ ID NO: 51786 - DNA, 20 bp, synthetic construct
  misc_feature 1..20: note = chemically synthesized
  source 1..20: mol_type = other DNA
ttagaaatttcattgtattc

SEQ ID NO: 51787 - DNA, 20 bp, synthetic construct
  misc_feature 1..20: note = chemically synthesized
  source 1..20: mol_type = other DNA
aaatactctcacatgtttct

SEQ ID NO: 51788 - DNA, 20 bp, synthetic construct
  misc_feature 1..20: note = chemically synthesized
  source 1..20: mol_type = other DNA
tctcacatgtttctcagttc

SEQ ID NO: 51789 - DNA, 20 bp, synthetic construct
  misc_feature 1..20: note = chemically synthesized
  source 1..20: mol_type = other DNA
cagttccagaatgattactt

SEQ ID NO: 51790 - DNA, 20 bp, synthetic construct
  misc_feature 1..20: note = chemically synthesized
  source 1..20: mol_type = other DNA
tccagaatgattacttcagt

SEQ ID NO: 51791 - DNA, 20 bp, synthetic construct
  misc_feature 1..20: note = chemically synthesized
  source 1..20: mol_type = other DNA
atgattacttcagtaagccc

SEQ ID NO: 51792 - DNA, 20 bp, synthetic construct
  misc_feature 1..20: note = chemically synthesized
  source 1..20: mol_type = other DNA
acttcagtaagccctagcac

SEQ ID NO: 51793 - DNA, 20 bp, synthetic construct
  misc_feature 1..20: note = chemically synthesized
  source 1..20: mol_type = other DNA
aattcttcctttcttctcac

SEQ ID NO: 51794 - DNA, 20 bp, synthetic construct
  misc_feature 1..20: note = chemically synthesized
  source 1..20: mol_type = other DNA
tttcttctcactggattttc

SEQ ID NO: 51795 - DNA, 20 bp, synthetic construct
  misc_feature 1..20: note = chemically synthesized
  source 1..20: mol_type = other DNA
tctcactggattttctggca

SEQ ID NO: 51796 - DNA, 20 bp, synthetic construct
  misc_feature 1..20: note = chemically synthesized
  source 1..20: mol_type = other DNA
tcactggattttctggcatg

SEQ ID NO: 51797 - DNA, 20 bp, synthetic construct
  misc_feature 1..20: note = chemically synthesized
  source 1..20: mol_type = other DNA
ctggattttctggcatggag

SEQ ID NO: 51798 - DNA, 20 bp, synthetic construct
  misc_feature 1..20: note = chemically synthesized
  source 1..20: mol_type = other DNA
gcatggagcagcaatacccc

SEQ ID NO: 51799 - DNA, 20 bp, synthetic construct
  misc_feature 1..20: note = chemically synthesized
  source 1..20: mol_type = other DNA
cttctcctcaatctatgcca

SEQ ID NO: 51800 - DNA, 20 bp, synthetic construct
  misc_feature 1..20: note = chemically synthesized
  source 1..20: mol_type = other DNA
aatctatgccatggtgcttt

SEQ ID NO: 51801 - DNA, 20 bp, synthetic construct
  misc_feature 1..20: note = chemically synthesized
  source 1..20: mol_type = other DNA
atctatgccatggtgctttt

SEQ ID NO: 51802 - DNA, 20 bp, synthetic construct
  misc_feature 1..20: note = chemically synthesized
  source 1..20: mol_type = other DNA
ggtgcttttgggcaattgca

SEQ ID NO: 51803 - DNA, 20 bp, synthetic construct
  misc_feature 1..20: note = chemically synthesized
  source 1..20: mol_type = other DNA
gcatggttctccatgtgata

SEQ ID NO: 51804 - DNA, 20 bp, synthetic construct
  misc_feature 1..20: note = chemically synthesized
  source 1..20: mol_type = other DNA
ttctccatgtgatatggact

SEQ ID NO: 51805 - DNA, 20 bp, synthetic construct
  misc_feature 1..20: note = chemically synthesized
  source 1..20: mol_type = other DNA
catgtgatatggactgagcc

SEQ ID NO: 51806 - DNA, 20 bp, synthetic construct
  misc_feature 1..20: note = chemically synthesized
  source 1..20: mol_type = other DNA
ggactgagccaagcctgcac

SEQ ID NO: 51807 - DNA, 20 bp, synthetic construct
  misc_feature 1..20: note = chemically synthesized
  source 1..20: mol_type = other DNA
gttttacttcctgtccatgc

SEQ ID NO: 51808 - DNA, 20 bp, synthetic construct
  misc_feature 1..20: note = chemically synthesized
  source 1..20: mol_type = other DNA
ggccctcactgacctgtgca

SEQ ID NO: 51809 - DNA, 20 bp, synthetic construct
  misc_feature 1..20: note = chemically synthesized
  source 1..20: mol_type = other DNA
gccctcactgacctgtgcat

SEQ ID NO: 51810 - DNA, 20 bp, synthetic construct
  misc_feature 1..20: note = chemically synthesized
  source 1..20: mol_type = other DNA
ccctcactgacctgtgcatg

SEQ ID NO: 51811 - DNA, 20 bp, synthetic construct
  misc_feature 1..20: note = chemically synthesized
  source 1..20: mol_type = other DNA
ggggctgtccactgtgtaca

SEQ ID NO: 51812 - DNA, 20 bp, synthetic construct
  misc_feature 1..20: note = chemically synthesized
  source 1..20: mol_type = other DNA
gtccactgtgtacacagtgc

SEQ ID NO: 51813 - DNA, 20 bp, synthetic construct
  misc_feature 1..20: note = chemically synthesized
  source 1..20: mol_type = other DNA
tccactgtgtacacagtgct

SEQ ID NO: 51814 - DNA, 20 bp, synthetic construct
  misc_feature 1..20: note = chemically synthesized
  source 1..20: mol_type = other DNA
ccactgtgtacacagtgctg

SEQ ID NO: 51815 - DNA, 20 bp, synthetic construct
  misc_feature 1..20: note = chemically synthesized
  source 1..20: mol_type = other DNA
acacagtgctggggatcctg

SEQ ID NO: 51816 - DNA, 20 bp, synthetic construct
  misc_feature 1..20: note = chemically synthesized
  source 1..20: mol_type = other DNA
cacagtgctggggatcctgt

SEQ ID NO: 51817 - DNA, 20 bp, synthetic construct
  misc_feature 1..20: note = chemically synthesized
  source 1..20: mol_type = other DNA
acagtgctggggatcctgtg

SEQ ID NO: 51818 - DNA, 20 bp, synthetic construct
  misc_feature 1..20: note = chemically synthesized
  source 1..20: mol_type = other DNA
cagtgctggggatcctgtgg

SEQ ID NO: 51819 - DNA, 20 bp, synthetic construct
  misc_feature 1..20: note = chemically synthesized
  source 1..20: mol_type = other DNA
gatcctgtgggggatcattc

SEQ ID NO: 51820 - DNA, 20 bp, synthetic construct
  misc_feature 1..20: note = chemically synthesized
  source 1..20: mol_type = other DNA
tcctgtgggggatcattcga

SEQ ID NO: 51821 - DNA, 20 bp, synthetic construct
  misc_feature 1..20: note = chemically synthesized
  source 1..20: mol_type = other DNA
tgggggatcattcgagagat

SEQ ID NO: 51822 - DNA, 20 bp, synthetic construct
  misc_feature 1..20: note = chemically synthesized
  source 1..20: mol_type = other DNA
gatcattcgagagatcagct

SEQ ID NO: 51823 - DNA, 20 bp, synthetic construct
  misc_feature 1..20: note = chemically synthesized
  source 1..20: mol_type = other DNA
gcttggattcctgcattgcc

SEQ ID NO: 51824 - DNA, 20 bp, synthetic construct
  misc_feature 1..20: note = chemically synthesized
  source 1..20: mol_type = other DNA
gcccagtcctatttcatcca

SEQ ID NO: 51825 - DNA, 20 bp, synthetic construct
  misc_feature 1..20: note = chemically synthesized
  source 1..20: mol_type = other DNA
catccatggtctgtccttca

SEQ ID NO: 51826 - DNA, 20 bp, synthetic construct
  misc_feature 1..20: note = chemically synthesized
  source 1..20: mol_type = other DNA
tccatggtctgtccttcatg

SEQ ID NO: 51827 - DNA, 20 bp, synthetic construct
  misc_feature 1..20: note = chemically synthesized
  source 1..20: mol_type = other DNA
gtcctctgtcctcctcacta

SEQ ID NO: 51828 - DNA, 20 bp, synthetic construct
  misc_feature 1..20: note = chemically synthesized
  source 1..20: mol_type = other DNA
tcctcactatggcctttgac

SEQ ID NO: 51829 - DNA, 20 bp, synthetic construct
  misc_feature 1..20: note = chemically synthesized
  source 1..20: mol_type = other DNA
tcctccatcctgactaattc

SEQ ID NO: 51830 - DNA, 20 bp, synthetic construct
  misc_feature 1..20: note = chemically synthesized
  source 1..20: mol_type = other DNA
aattccagaattatcaaaat

SEQ ID NO: 51831 - DNA, 20 bp, synthetic construct
  misc_feature 1..20: note = chemically synthesized
  source 1..20: mol_type = other DNA
attccagaattatcaaaatt

SEQ ID NO: 51832 - DNA, 20 bp, synthetic construct
  misc_feature 1..20: note = chemically synthesized
  source 1..20: mol_type = other DNA
caaaattgggctcactataa

SEQ ID NO: 51833 - DNA, 20 bp, synthetic construct
  misc_feature 1..20: note = chemically synthesized
  source 1..20: mol_type = other DNA
aaaattgggctcactataat

SEQ ID NO: 51834 - DNA, 20 bp, synthetic construct
  misc_feature 1..20: note = chemically synthesized
  source 1..20: mol_type = other DNA
attgggctcactataatagg

SEQ ID NO: 51835 - DNA, 20 bp, synthetic construct
  misc_feature 1..20: note = chemically synthesized
  source 1..20: mol_type = other DNA
ttgggctcactataataggt

SEQ ID NO: 51836 - DNA, 20 bp, synthetic construct
  misc_feature 1..20: note = chemically synthesized
  source 1..20: mol_type = other DNA
gggctcactataataggtag

SEQ ID NO: 51837 - DNA, 20 bp, synthetic construct
  misc_feature 1..20: note = chemically synthesized
  source 1..20: mol_type = other DNA
ctcactctttctgcctgcac

SEQ ID NO: 51838 - DNA, 20 bp, synthetic construct
  misc_feature 1..20: note = chemically synthesized
  source 1..20: mol_type = other DNA
tcactctttctgcctgcacc

SEQ ID NO: 51839 - DNA, 20 bp, synthetic construct
  misc_feature 1..20: note = chemically synthesized
  source 1..20: mol_type = other DNA
gcaccaggatcttctccgct

SEQ ID NO: 51840 - DNA, 20 bp, synthetic construct
  misc_feature 1..20: note = chemically synthesized
  source 1..20: mol_type = other DNA
tcttctccgcttagcctgtt

SEQ ID NO: 51841 - DNA, 20 bp, synthetic construct
  misc_feature 1..20: note = chemically synthesized
  source 1..20: mol_type = other DNA
tgttcagacatccgattcaa

SEQ ID NO: 51842 - DNA, 20 bp, synthetic construct
  misc_feature 1..20: note = chemically synthesized
  source 1..20: mol_type = other DNA
tagttactatgccctgatgc

SEQ ID NO: 51843 - DNA, 20 bp, synthetic construct
  misc_feature 1..20: note = chemically synthesized
  source 1..20: mol_type = other DNA
ggttatttgcatactgttgt

SEQ ID NO: 51844 - DNA, 20 bp, synthetic construct
  misc_feature 1..20: note = chemically synthesized
  source 1..20: mol_type = other DNA
tctcctacatcctgattctt

SEQ ID NO: 51845 - DNA, 20 bp, synthetic construct
  misc_feature 1..20: note = chemically synthesized
  source 1..20: mol_type = other DNA
ctacatcctgattcttaagt

SEQ ID NO: 51846 - DNA, 20 bp, synthetic construct
  misc_feature 1..20: note = chemically synthesized
  source 1..20: mol_type = other DNA
cctgattcttaagtcagtcc

SEQ ID NO: 51847 - DNA, 20 bp, synthetic construct
  misc_feature 1..20: note = chemically synthesized
  source 1..20: mol_type = other DNA
gattcttaagtcagtcctgg

SEQ ID NO: 51848 - DNA, 20 bp, synthetic construct
  misc_feature 1..20: note = chemically synthesized
  source 1..20: mol_type = other DNA
cagtcctggcagttgcctct

SEQ ID NO: 51849 - DNA, 20 bp, synthetic construct
  misc_feature 1..20: note = chemically synthesized
  source 1..20: mol_type = other DNA
agtcctggcagttgcctctc

SEQ ID NO: 51850 - DNA, 20 bp, synthetic construct
  misc_feature 1..20: note = chemically synthesized
  source 1..20: mol_type = other DNA
cctggcagttgcctctcagg

SEQ ID NO: 51851 - DNA, 20 bp, synthetic construct
  misc_feature 1..20: note = chemically synthesized
  source 1..20: mol_type = other DNA
tggcagttgcctctcaggaa

SEQ ID NO: 51852 - DNA, 20 bp, synthetic construct
  misc_feature 1..20: note = chemically synthesized
  source 1..20: mol_type = other DNA
gcagttgcctctcaggaaga

SEQ ID NO: 51853 - DNA, 20 bp, synthetic construct
  misc_feature 1..20: note = chemically synthesized
  source 1..20: mol_type = other DNA
cagttgcctctcaggaagag

SEQ ID NO: 51854 - DNA, 20 bp, synthetic construct
  misc_feature 1..20: note = chemically synthesized
  source 1..20: mol_type = other DNA
aagagaggcataaattattt

SEQ ID NO: 51855 - DNA, 20 bp, synthetic construct
  misc_feature 1..20: note = chemically synthesized
  source 1..20: mol_type = other DNA
gtgttctacatccctatcat

SEQ ID NO: 51856 - DNA, 20 bp, synthetic construct
  misc_feature 1..20: note = chemically synthesized
  source 1..20: mol_type = other DNA
ccctatcattagcctcacaa

SEQ ID NO: 51857 - DNA, 20 bp, synthetic construct
  misc_feature 1..20: note = chemically synthesized
  source 1..20: mol_type = other DNA
ctcacaatggtgcaccgttt

SEQ ID NO: 51858 - DNA, 20 bp, synthetic construct
  misc_feature 1..20: note = chemically synthesized
  source 1..20: mol_type = other DNA
caatggtgcaccgttttggc

SEQ ID NO: 51859 - DNA, 20 bp, synthetic construct
  misc_feature 1..20: note = chemically synthesized
  source 1..20: mol_type = other DNA
tggcaagcacctttcccccg

SEQ ID NO: 51860 - DNA, 20 bp, synthetic construct
  misc_feature 1..20: note = chemically synthesized
  source 1..20: mol_type = other DNA
cccgtggcccacgttctcat

SEQ ID NO: 51861 - DNA, 20 bp, synthetic construct
  misc_feature 1..20: note = chemically synthesized
  source 1..20: mol_type = other DNA
ttaatgaatcccatcatcta

SEQ ID NO: 51862 - DNA, 20 bp, synthetic construct
  misc_feature 1..20: note = chemically synthesized
  source 1..20: mol_type = other DNA
atcccatcatctacagtgtc

SEQ ID NO: 51863 - DNA, 20 bp, synthetic construct
  misc_feature 1..20: note = chemically synthesized
  source 1..20: mol_type = other DNA
tctacagtgtcaagacccaa

SEQ ID NO: 51864 - DNA, 20 bp, synthetic construct
  misc_feature 1..20: note = chemically synthesized
  source 1..20: mol_type = other DNA
aagacccaacagattcatac

SEQ ID NO: 51865 - DNA, 20 bp, synthetic construct
  misc_feature 1..20: note = chemically synthesized
  source 1..20: mol_type = other DNA
cagattcataccagaatgct

SEQ ID NO: 51866 - DNA, 20 bp, synthetic construct
  misc_feature 1..20: note = chemically synthesized
  source 1..20: mol_type = other DNA
cttagactcttttctctgaa

SEQ ID NO: 51867 - DNA, 20 bp, synthetic construct
  misc_feature 1..20: note = chemically synthesized
  source 1..20: mol_type = other DNA
cttttctctgaaaagatatt

SEQ ID NO: 51868 - DNA, 20 bp, synthetic construct
  misc_feature 1..20: note = chemically synthesized
  source 1..20: mol_type = other DNA
tttctctgaaaagatattga

SEQ ID NO: 51869 - DNA, 20 bp, synthetic construct
  misc_feature 1..20: note = chemically synthesized
  source 1..20: mol_type = other DNA
aaaagatattgagagatatt

SEQ ID NO: 51870 - DNA, 20 bp, synthetic construct
  misc_feature 1..20: note = chemically synthesized
  source 1..20: mol_type = other DNA
gagatgtattgcctaaaaaa

SEQ ID NO: 51871 - DNA, 20 bp, synthetic construct
  misc_feature 1..20: note = chemically synthesized
  source 1..20: mol_type = other DNA
tgtattgcctaaaaaaaaga

SEQ ID NO: 51872 - DNA, 20 bp, synthetic construct
  misc_feature 1..20: note = chemically synthesized
  source 1..20: mol_type = other DNA
tgcctaaaaaaaagaaagaa

SEQ ID NO: 51873 - DNA, 20 bp, synthetic construct
  misc_feature 1..20: note = chemically synthesized
  source 1..20: mol_type = other DNA
ctaaaaaaaagaaagaaaag

SEQ ID NO: 51874 - DNA, 20 bp, synthetic construct
  misc_feature 1..20: note = chemically synthesized
  source 1..20: mol_type = other DNA
caacaataataaacaaaaat

SEQ ID NO: 51875 - DNA, 20 bp, synthetic construct
  misc_feature 1..20: note = chemically synthesized
  source 1..20: mol_type = other DNA
caaaaatcagtgccataaaa

SEQ ID NO: 51876 - DNA, 20 bp, synthetic construct
  misc_feature 1..20: note = chemically synthesized
  source 1..20: mol_type = other DNA
agaaaaaattattaaaattg

SEQ ID NO: 51877 - DNA, 20 bp, synthetic construct
  misc_feature 1..20: note = chemically synthesized
  source 1..20: mol_type = other DNA
taaaattgtagatttactct

SEQ ID NO: 51878 - DNA, 20 bp, synthetic construct
  misc_feature 1..20: note = chemically synthesized
  source 1..20: mol_type = other DNA
ccttaaaaaatatttaaata

SEQ ID NO: 51879 - DNA, 20 bp, synthetic construct
  misc_feature 1..20: note = chemically synthesized
  source 1..20: mol_type = other DNA
aaaaaatatttaaatatagt

SEQ ID NO: 51880 - DNA, 20 bp, synthetic construct
  misc_feature 1..20: note = chemically synthesized
  source 1..20: mol_type = other DNA
aaaatatttaaatatagtca

SEQ ID NO: 51881 - DNA, 20 bp, synthetic construct
  misc_feature 1..20: note = chemically synthesized
  source 1..20: mol_type = other DNA
tagtcagagaatcaacaaac

SEQ ID NO: 51882 - DNA, 20 bp, synthetic construct
  misc_feature 1..20: note = chemically synthesized
  source 1..20: mol_type = other DNA
acaaacaagttccattgtgt

SEQ ID NO: 51883 - DNA, 20 bp, synthetic construct
  misc_feature 1..20: note = chemically synthesized
  source 1..20: mol_type = other DNA
caagttccattgtgtcagcc

SEQ ID NO: 51884 - DNA, 20 bp, synthetic construct
  misc_feature 1..20: note = chemically synthesized
  source 1..20: mol_type = other DNA
tgtgtcagcctggacacatg

SEQ ID NO: 51885 - DNA, 20 bp, synthetic construct
  misc_feature 1..20: note = chemically synthesized
  source 1..20: mol_type = other DNA
gtgtcagcctggacacatgt

SEQ ID NO: 51886 - DNA, 20 bp, synthetic construct
  misc_feature 1..20: note = chemically synthesized
  source 1..20: mol_type = other DNA
acacatgtaggtcactctat

SEQ ID NO: 51887 - DNA, 20 bp, synthetic construct
  misc_feature 1..20: note = chemically synthesized
  source 1..20: mol_type = other DNA
ctatcagtctgaccatattt

SEQ ID NO: 51888 - DNA, 20 bp, synthetic construct
  misc_feature 1..20: note = chemically synthesized
  source 1..20: mol_type = other DNA
cagtctgaccatatttaaga

SEQ ID NO: 51889 - DNA, 20 bp, synthetic construct
  misc_feature 1..20: note = chemically synthesized
  source 1..20: mol_type = other DNA
gtctgaccatatttaagaaa

SEQ ID NO: 51890 - DNA, 20 bp, synthetic construct
  misc_feature 1..20: note = chemically synthesized
  source 1..20: mol_type = other DNA
tctgaccatatttaagaaag

SEQ ID NO: 51891 - DNA, 20 bp, synthetic construct
  misc_feature 1..20: note = chemically synthesized
  source 1..20: mol_type = other DNA
tttgcctgaaatgtactttt

SEQ ID NO: 51892 - DNA, 20 bp, synthetic construct
  misc_feature 1..20: note = chemically synthesized
  source 1..20: mol_type = other DNA
atttcctttgctgtaaaaca

SEQ ID NO: 51893 - DNA, 20 bp, synthetic construct
  misc_feature 1..20: note = chemically synthesized
  source 1..20: mol_type = other DNA
cctttgctgtaaaacaaagc

SEQ ID NO: 51894 - DNA, 20 bp, synthetic construct
  misc_feature 1..20: note = chemically synthesized
  source 1..20: mol_type = other DNA
acaaagctggattaaaaacc

SEQ ID NO: 51895 - DNA, 20 bp, synthetic construct
  misc_feature 1..20: note = chemically synthesized
  source 1..20: mol_type = other DNA
caaagctggattaaaaacct

SEQ ID NO: 51896 - DNA, 20 bp, synthetic construct
  misc_feature 1..20: note = chemically synthesized
  source 1..20: mol_type = other DNA
gattaaaaacctaggttttc

SEQ ID NO: 51897 - DNA, 20 bp, synthetic construct
  misc_feature 1..20: note = chemically synthesized
  source 1..20: mol_type = other DNA
acctaggttttcaagtttca

SEQ ID NO: 51898 - DNA, 20 bp, synthetic construct
  misc_feature 1..20: note = chemically synthesized
  source 1..20: mol_type = other DNA
taggttttcaagtttcaaag

SEQ ID NO: 51899 - DNA, 20 bp, synthetic construct
  misc_feature 1..20: note = chemically synthesized
  source 1..20: mol_type = other DNA
gtttcaaagtagaaaacttg

SEQ ID NO: 51900 - DNA, 20 bp, synthetic construct
  misc_feature 1..20: note = chemically synthesized
  source 1..20: mol_type = other DNA
tgaagtttctttcattctct

SEQ ID NO: 51901 - DNA, 20 bp, synthetic construct
  misc_feature 1..20: note = chemically synthesized
  source 1..20: mol_type = other DNA
gaagtttctttcattctctg

SEQ ID NO: 51902 - DNA, 20 bp, synthetic construct
  misc_feature 1..20: note = chemically synthesized
  source 1..20: mol_type = other DNA
tacttaattaaccttcaaaa

SEQ ID NO: 51903 - DNA, 20 bp, synthetic construct
  misc_feature 1..20: note = chemically synthesized
  source 1..20: mol_type = other DNA
cttaattaaccttcaaaatg

SEQ ID NO: 51904 - DNA, 20 bp, synthetic construct
  misc_feature 1..20: note = chemically synthesized
  source 1..20: mol_type = other DNA
aaccttcaaaatggagacta

SEQ ID NO: 51905 - DNA, 20 bp, synthetic construct
  misc_feature 1..20: note = chemically synthesized
  source 1..20: mol_type = other DNA
tggagactatagccaactca

SEQ ID NO: 51906 - DNA, 20 bp, synthetic construct
  misc_feature 1..20: note = chemically synthesized
  source 1..20: mol_type = other DNA
ggagactatagccaactcac

SEQ ID NO: 51907 - DNA, 20 bp, synthetic construct
  misc_feature 1..20: note = chemically synthesized
  source 1..20: mol_type = other DNA
ggaatgttgtgatatctgta

SEQ ID NO: 51908 - DNA, 20 bp, synthetic construct
  misc_feature 1..20: note = chemically synthesized
  source 1..20: mol_type = other DNA
gttgtgatatctgtatggac

SEQ ID NO: 51909 - DNA, 20 bp, synthetic construct
  misc_feature 1..20: note = chemically synthesized
  source 1..20: mol_type = other DNA
tgtatggaccagaattgtcc

SEQ ID NO: 51910 - DNA, 20 bp, synthetic construct
  misc_feature 1..20: note = chemically synthesized
  source 1..20: mol_type = other DNA
gtatggaccagaattgtcca

SEQ ID NO: 51911 - DNA, 20 bp, synthetic construct
  misc_feature 1..20: note = chemically synthesized
  source 1..20: mol_type = other DNA
tatggaccagaattgtccaa

SEQ ID NO: 51912 - DNA, 20 bp, synthetic construct
  misc_feature 1..20: note = chemically synthesized
  source 1..20: mol_type = other DNA
agggaacttttctaaactga

SEQ ID NO: 51913 - DNA, 20 bp, synthetic construct
  misc_feature 1..20: note = chemically synthesized
  source 1..20: mol_type = other DNA
ttctataaaataccataaaa

SEQ ID NO: 51914 - DNA, 20 bp, synthetic construct
  misc_feature 1..20: note = chemically synthesized
  source 1..20: mol_type = other DNA
aaaataccataaaatggcta

SEQ ID NO: 51915 - DNA, 20 bp, synthetic construct
  misc_feature 1..20: note = chemically synthesized
  source 1..20: mol_type = other DNA
ataccataaaatggctaaag

SEQ ID NO: 51916 - DNA, 20 bp, synthetic construct
  misc_feature 1..20: note = chemically synthesized
  source 1..20: mol_type = other DNA
aatggctaaagtggaatata

SEQ ID NO: 51917 - DNA, 20 bp, synthetic construct
  misc_feature 1..20: note = chemically synthesized
  source 1..20: mol_type = other DNA
ctcctgtgcgcttgaaatga

SEQ ID NO: 51918 - DNA, 20 bp, synthetic construct
  misc_feature 1..20: note = chemically synthesized
  source 1..20: mol_type = other DNA
ctgtgcgcttgaaatgatgg

SEQ ID NO: 51919 - DNA, 20 bp, synthetic construct
  misc_feature 1..20: note = chemically synthesized
  source 1..20: mol_type = other DNA
aacaactgcatttacaattt

SEQ ID NO: 51920 - DNA, 20 bp, synthetic construct
  misc_feature 1..20: note = chemically synthesized
  source 1..20: mol_type = other DNA
tttacaatttcagttacttt

SEQ ID NO: 51921 - DNA, 20 bp, synthetic construct
  misc_feature 1..20: note = chemically synthesized
  source 1..20: mol_type = other DNA
aatgtttaatgtccttgtat

SEQ ID NO: 51922 - DNA, 20 bp, synthetic construct
  misc_feature 1..20: note = chemically synthesized
  source 1..20: mol_type = other DNA
tttaatgtccttgtattgga

SEQ ID NO: 51923 - DNA, 20 bp, synthetic construct
  misc_feature 1..20: note = chemically synthesized
  source 1..20: mol_type = other DNA
tgtccttgtattggacagtt

SEQ ID NO: 51924 - DNA, 20 bp, synthetic construct
  misc_feature 1..20: note = chemically synthesized
  source 1..20: mol_type = other DNA
ttgtattggacagttcagtt

SEQ ID NO: 51925 - DNA, 20 bp, synthetic construct
  misc_feature 1..20: note = chemically synthesized
  source 1..20: mol_type = other DNA
tattggacagttcagttcag

SEQ ID NO: 51926 - DNA, 20 bp, synthetic construct
  misc_feature 1..20: note = chemically synthesized
  source 1..20: mol_type = other DNA
cagttcagcagccactatat

SEQ ID NO: 51927 - DNA, 20 bp, synthetic construct
  misc_feature 1..20: note = chemically synthesized
  source 1..20: mol_type = other DNA
tcagcagccactatattgga

SEQ ID NO: 51928 - DNA, 20 bp, synthetic construct
  misc_feature 1..20: note = chemically synthesized
  source 1..20: mol_type = other DNA
cagcagccactatattggac

SEQ ID NO: 51929 - DNA, 20 bp, synthetic construct
  misc_feature 1..20: note = chemically synthesized
  source 1..20: mol_type = other DNA
agcagccactatattggaca

SEQ ID NO: 51930 - DNA, 20 bp, synthetic construct
  misc_feature 1..20: note = chemically synthesized
  source 1..20: mol_type = other DNA
agccactatattggacaggg

SEQ ID NO: 51931 - DNA, 20 bp, synthetic construct
  misc_feature 1..20: note = chemically synthesized
  source 1..20: mol_type = other DNA
tatattggacagggaagcta

SEQ ID NO: 51932 - DNA, 20 bp, synthetic construct
  misc_feature 1..20: note = chemically synthesized
  source 1..20: mol_type = other DNA
cagggaagctacagttcata

SEQ ID NO: 51933 - DNA, 20 bp, synthetic construct
  misc_feature 1..20: note = chemically synthesized
  source 1..20: mol_type = other DNA
gggaagctacagttcataaa

SEQ ID NO: 51934 - DNA, 20 bp, synthetic construct
  misc_feature 1..20: note = chemically synthesized
  source 1..20: mol_type = other DNA
ggaagctacagttcataaag

SEQ ID NO: 51935 - DNA, 20 bp, synthetic construct
  misc_feature 1..20: note = chemically synthesized
  source 1..20: mol_type = other DNA
cagttcataaagaggacaca

SEQ ID NO: 51936 - DNA, 20 bp, synthetic construct
  misc_feature 1..20: note = chemically synthesized
  source 1..20: mol_type = other DNA
gacacaaagaaatatgactt

SEQ ID NO: 51937 - DNA, 20 bp, synthetic construct
  misc_feature 1..20: note = chemically synthesized
  source 1..20: mol_type = other DNA
ctaccatgtctaatttaaat

SEQ ID NO: 51938 - DNA, 20 bp, synthetic construct
  misc_feature 1..20: note = chemically synthesized
  source 1..20: mol_type = other DNA
aaattagaatccttattttt

SEQ ID NO: 51939 - DNA, 20 bp, synthetic construct
  misc_feature 1..20: note = chemically synthesized
  source 1..20: mol_type = other DNA
tattttttagattttatatg

SEQ ID NO: 51940 - DNA, 20 bp, synthetic construct
  misc_feature 1..20: note = chemically synthesized
  source 1..20: mol_type = other DNA
tatgtggactccactgctac

SEQ ID NO: 51941 - DNA, 20 bp, synthetic construct
  misc_feature 1..20: note = chemically synthesized
  source 1..20: mol_type = other DNA
atgtggactccactgctaca

SEQ ID NO: 51942 - DNA, 20 bp, synthetic construct
  misc_feature 1..20: note = chemically synthesized
  source 1..20: mol_type = other DNA
ggactccactgctacaaggc

SEQ ID NO: 51943 - DNA, 20 bp, synthetic construct
  misc_feature 1..20: note = chemically synthesized
  source 1..20: mol_type = other DNA
ctccactgctacaaggctgg

SEQ ID NO: 51944 - DNA, 20 bp, synthetic construct
  misc_feature 1..20: note = chemically synthesized
  source 1..20: mol_type = other DNA
cactgctacaaggctggaag

SEQ ID NO: 51945 - DNA, 20 bp, synthetic construct
  misc_feature 1..20: note = chemically synthesized
  source 1..20: mol_type = other DNA
gctggaagcagattttgctc

SEQ ID NO: 51946 - DNA, 20 bp, synthetic construct
  misc_feature 1..20: note = chemically synthesized
  source 1..20: mol_type = other DNA
gatcttttgcttttatatct

SEQ ID NO: 51947 - DNA, 20 bp, synthetic construct
  misc_feature 1..20: note = chemically synthesized
  source 1..20: mol_type = other DNA
cttttgcttttatatctaag

SEQ ID NO: 51948 - DNA, 20 bp, synthetic construct
  misc_feature 1..20: note = chemically synthesized
  source 1..20: mol_type = other DNA
ttttgcttttatatctaagt

SEQ ID NO: 51949 - DNA, 20 bp, synthetic construct
  misc_feature 1..20: note = chemically synthesized
  source 1..20: mol_type = other DNA
tttgcttttatatctaagtg

SEQ ID NO: 51950 - DNA, 20 bp, synthetic construct
  misc_feature 1..20: note = chemically synthesized
  source 1..20: mol_type = other DNA
ttgcttttatatctaagtgg

SEQ ID NO: 51951 - DNA, 20 bp, synthetic construct
  misc_feature 1..20: note = chemically synthesized
  source 1..20: mol_type = other DNA
taagtgggggatcttctgaa

SEQ ID NO: 51952 - DNA, 20 bp, synthetic construct
  misc_feature 1..20: note = chemically synthesized
  source 1..20: mol_type = other DNA
gggggatcttctgaacagat

SEQ ID NO: 51953 - DNA, 20 bp, synthetic construct
  misc_feature 1..20: note = chemically synthesized
  source 1..20: mol_type = other DNA
gtccgctaccgacttattct

SEQ ID NO: 51954 - DNA, 20 bp, synthetic construct
  misc_feature 1..20: note = chemically synthesized
  source 1..20: mol_type = other DNA
ccgacttattctgagtttaa

SEQ ID NO: 51955 - DNA, 20 bp, synthetic construct
  misc_feature 1..20: note = chemically synthesized
  source 1..20: mol_type = other DNA
attctgagtttaaaagaaaa

SEQ ID NO: 51956 - DNA, 20 bp, synthetic construct
  misc_feature 1..20: note = chemically synthesized
  source 1..20: mol_type = other DNA
gtttaaaagaaaaaagataa

SEQ ID NO: 51957 - DNA, 20 bp, synthetic construct
  misc_feature 1..20: note = chemically synthesized
  source 1..20: mol_type = other DNA
aaaaaagataaaagaacata

SEQ ID NO: 51958 - DNA, 20 bp, synthetic construct
  misc_feature 1..20: note = chemically synthesized
  source 1..20: mol_type = other DNA
aaagataaaagaacataaag

SEQ ID NO: 51959 - DNA, 20 bp, synthetic construct
  misc_feature 1..20: note = chemically synthesized
  source 1..20: mol_type = other DNA
acataaagcggttcttttct

SEQ ID NO: 51960 - DNA, 20 bp, synthetic construct
  misc_feature 1..20: note = chemically synthesized
  source 1..20: mol_type = other DNA
aaagcggttcttttctaagt

SEQ ID NO: 51961 - DNA, 20 bp, synthetic construct
  misc_feature 1..20: note = chemically synthesized
  source 1..20: mol_type = other DNA
cggttcttttctaagtaagc

SEQ ID NO: 51962 - DNA, 20 bp, synthetic construct
  misc_feature 1..20: note = chemically synthesized
  source 1..20: mol_type = other DNA
cttttctaagtaagctagtg

SEQ ID NO: 51963 - DNA, 20 bp, synthetic construct
  misc_feature 1..20: note = chemically synthesized
  source 1..20: mol_type = other DNA
taagctagtgcagctttcca

SEQ ID NO: 51964 - DNA, 20 bp, synthetic construct
  misc_feature 1..20: note = chemically synthesized
  source 1..20: mol_type = other DNA
gctagtgcagctttccaaag

SEQ ID NO: 51965 - DNA, 20 bp, synthetic construct
  misc_feature 1..20: note = chemically synthesized
  source 1..20: mol_type = other DNA
ctagtgcagctttccaaaga

SEQ ID NO: 51966 - DNA, 20 bp, synthetic construct
  misc_feature 1..20: note = chemically synthesized
  source 1..20: mol_type = other DNA
tgcagctttccaaagaagga

SEQ ID NO: 51967 - DNA, 20 bp, synthetic construct
  misc_feature 1..20: note = chemically synthesized
  source 1..20: mol_type = other DNA
gctttccaaagaaggaaaga

SEQ ID NO: 51968 - DNA, 20 bp, synthetic construct
  misc_feature 1..20: note = chemically synthesized
  source 1..20: mol_type = other DNA
ctttccaaagaaggaaagaa

SEQ ID NO: 51969 - DNA, 20 bp, synthetic construct
  misc_feature 1..20: note = chemically synthesized
  source 1..20: mol_type = other DNA
tccaaagaaggaaagaaagg

SEQ ID NO: 51970 - DNA, 20 bp, synthetic construct
  misc_feature 1..20: note = chemically synthesized
  source 1..20: mol_type = other DNA
ccaaagaaggaaagaaagga

SEQ ID NO: 51971 - DNA, 20 bp, synthetic construct
  misc_feature 1..20: note = chemically synthesized
  source 1..20: mol_type = other DNA
aggaaagaaaggaaggaaat

SEQ ID NO: 51972 - DNA, 20 bp, synthetic construct
  misc_feature 1..20: note = chemically synthesized
  source 1..20: mol_type = other DNA
ggaaagaaaggaaggaaatc

SEQ ID NO: 51973 - DNA, 20 bp, synthetic construct
  misc_feature 1..20: note = chemically synthesized
  source 1..20: mol_type = other DNA
atcaggtacaaaactatgca

SEQ ID NO: 51974 - DNA, 20 bp, synthetic construct
  misc_feature 1..20: note = chemically synthesized
  source 1..20: mol_type = other DNA
caaaactatgcatggataac

SEQ ID NO: 51975 - DNA, 20 bp, synthetic construct
  misc_feature 1..20: note = chemically synthesized
  source 1..20: mol_type = other DNA
ttaatcttcctatattctat

SEQ ID NO: 51976 - DNA, 20 bp, synthetic construct
  misc_feature 1..20: note = chemically synthesized
  source 1..20: mol_type = other DNA
taatcttcctatattctatt

SEQ ID NO: 51977 - DNA, 20 bp, synthetic construct
  misc_feature 1..20: note = chemically synthesized
  source 1..20: mol_type = other DNA
ctatattctattaggtatct

SEQ ID NO: 51978 - DNA, 20 bp, synthetic construct
  misc_feature 1..20: note = chemically synthesized
  source 1..20: mol_type = other DNA
tattctattaggtatctaag

SEQ ID NO: 51979 - DNA, 20 bp, synthetic construct
  misc_feature 1..20: note = chemically synthesized
  source 1..20: mol_type = other DNA
attctattaggtatctaaga

SEQ ID NO: 51980 - DNA, 20 bp, synthetic construct
  misc_feature 1..20: note = chemically synthesized
  source 1..20: mol_type = other DNA
tattaggtatctaagaaggt

SEQ ID NO: 51981 - DNA, 20 bp, synthetic construct
  misc_feature 1..20: note = chemically synthesized
  source 1..20: mol_type = other DNA
aagaaggtaagtgttaaaat

SEQ ID NO: 51982 - DNA, 20 bp, synthetic construct
  misc_feature 1..20: note = chemically synthesized
  source 1..20: mol_type = other DNA
aattggacaaattaatgcat

SEQ ID NO: 51983 - DNA, 20 bp, synthetic construct
  misc_feature 1..20: note = chemically synthesized
  source 1..20: mol_type = other DNA
ttggacaaattaatgcataa

SEQ ID NO: 51984 - DNA, 20 bp, synthetic construct
  misc_feature 1..20: note = chemically synthesized
  source 1..20: mol_type = other DNA
aagagtcattttacaccaaa

SEQ ID NO: 51985 - DNA, 20 bp, synthetic construct
  misc_feature 1..20: note = chemically synthesized
  source 1..20: mol_type = other DNA
caaatatttatttttatttt

SEQ ID NO: 51986 - DNA, 20 bp, synthetic construct
  misc_feature 1..20: note = chemically synthesized
  source 1..20: mol_type = other DNA
tagatatcaactaaaacaac

SEQ ID NO: 51987 - DNA, 20 bp, synthetic construct
  misc_feature 1..20: note = chemically synthesized
  source 1..20: mol_type = other DNA
gccttcctttcctttcactt

SEQ ID NO: 51988 - DNA, 20 bp, synthetic construct
  misc_feature 1..20: note = chemically synthesized
  source 1..20: mol_type = other DNA
ttggacttcattcaataaca

SEQ ID NO: 51989 - DNA, 20 bp, synthetic construct
  misc_feature 1..20: note = chemically synthesized
  source 1..20: mol_type = other DNA
ctctgtctacttatttgact

SEQ ID NO: 51990 - DNA, 20 bp, synthetic construct
  misc_feature 1..20: note = chemically synthesized
  source 1..20: mol_type = other DNA
ctgtctacttatttgactca

SEQ ID NO: 51991 - DNA, 20 bp, synthetic construct
  misc_feature 1..20: note = chemically synthesized
  source 1..20: mol_type = other DNA
tgtctacttatttgactcag

SEQ ID NO: 51992 - DNA, 20 bp, synthetic construct
  misc_feature 1..20: note = chemically synthesized
  source 1..20: mol_type = other DNA
gtctacttatttgactcaga

SEQ ID NO: 51993 - DNA, 20 bp, synthetic construct
  misc_feature 1..20: note = chemically synthesized
  source 1..20: mol_type = other DNA
ctcagagggaaacaaaaata

SEQ ID NO: 51994 - DNA, 20 bp, synthetic construct
  misc_feature 1..20: note = chemically synthesized
  source 1..20: mol_type = other DNA
tcagagggaaacaaaaatac

SEQ ID NO: 51995 - DNA, 20 bp, synthetic construct
  misc_feature 1..20: note = chemically synthesized
  source 1..20: mol_type = other DNA
ggaaacaaaaatacaggctt

SEQ ID NO: 51996 - DNA, 20 bp, synthetic construct
  misc_feature 1..20: note = chemically synthesized
  source 1..20: mol_type = other DNA
atacaggctttggtttctaa

SEQ ID NO: 51997 - DNA, 20 bp, synthetic construct
  misc_feature 1..20: note = chemically synthesized
  source 1..20: mol_type = other DNA
gctttggtttctaatagctt

SEQ ID NO: 51998 - DNA, 20 bp, synthetic construct
  misc_feature 1..20: note = chemically synthesized
  source 1..20: mol_type = other DNA
ttctaatagcttaagcctca

SEQ ID NO: 51999 - DNA, 20 bp, synthetic construct
  misc_feature 1..20: note = chemically synthesized
  source 1..20: mol_type = other DNA
aatagcttaagcctcaaagt

SEQ ID NO: 52000 - DNA, 20 bp, synthetic construct
  misc_feature 1..20: note = chemically synthesized
  source 1..20: mol_type = other DNA
atagcttaagcctcaaagtg

SEQ ID NO: 52001 - DNA, 20 bp, synthetic construct
  misc_feature 1..20: note = chemically synthesized
  source 1..20: mol_type = other DNA
caaagtgaggaaattgtttc

SEQ ID NO: 52002 - DNA, 20 bp, synthetic construct
  misc_feature 1..20: note = chemically synthesized
  source 1..20: mol_type = other DNA
gtgaggaaattgtttctgga

SEQ ID NO: 52003 - DNA, 20 bp, synthetic construct
  misc_feature 1..20: note = chemically synthesized
  source 1..20: mol_type = other DNA
gaggaaattgtttctggaca

SEQ ID NO: 52004 - DNA, 20 bp, synthetic construct
  misc_feature 1..20: note = chemically synthesized
  source 1..20: mol_type = other DNA
aattgtttctggacagagta

SEQ ID NO: 52005 - DNA, 20 bp, synthetic construct
  misc_feature 1..20: note = chemically synthesized
  source 1..20: mol_type = other DNA
tctggacagagtaaagtatc

SEQ ID NO: 52006 - DNA, 20 bp, synthetic construct
  misc_feature 1..20: note = chemically synthesized
  source 1..20: mol_type = other DNA
gacagagtaaagtatctggt

SEQ ID NO: 52007 - DNA, 20 bp, synthetic construct
  misc_feature 1..20: note = chemically synthesized
  source 1..20: mol_type = other DNA
gagtaaagtatctggttaga

SEQ ID NO: 52008 - DNA, 20 bp, synthetic construct
  misc_feature 1..20: note = chemically synthesized
  source 1..20: mol_type = other DNA
aagtatctggttagaaagat

SEQ ID NO: 52009 - DNA, 20 bp, synthetic construct
  misc_feature 1..20: note = chemically synthesized
  source 1..20: mol_type = other DNA
gataagtgtaaaattattcc

SEQ ID NO: 52010 - DNA, 20 bp, synthetic construct
  misc_feature 1..20: note = chemically synthesized
  source 1..20: mol_type = other DNA
ttattcctagaacaataaat

SEQ ID NO: 52011 - DNA, 20 bp, synthetic construct
  misc_feature 1..20: note = chemically synthesized
  source 1..20: mol_type = other DNA
tattcctagaacaataaatt

SEQ ID NO: 52012 - DNA, 20 bp, synthetic construct
  misc_feature 1..20: note = chemically synthesized
  source 1..20: mol_type = other DNA
gaacaataaattaggtcttc

SEQ ID NO: 52013 - DNA, 20 bp, synthetic construct
  misc_feature 1..20: note = chemically synthesized
  source 1..20: mol_type = other DNA
aacaataaattaggtcttct

SEQ ID NO: 52014 - DNA, 20 bp, synthetic construct
  misc_feature 1..20: note = chemically synthesized
  source 1..20: mol_type = other DNA
aaattaggtcttctgggtta

SEQ ID NO: 52015 - DNA, 20 bp, synthetic construct
  misc_feature 1..20: note = chemically synthesized
  source 1..20: mol_type = other DNA
ggtcttctgggttacagtat

SEQ ID NO: 52016 - DNA, 20 bp, synthetic construct
  misc_feature 1..20: note = chemically synthesized
  source 1..20: mol_type = other DNA
gtcttctgggttacagtata

SEQ ID NO: 52017 - DNA, 20 bp, synthetic construct
  misc_feature 1..20: note = chemically synthesized
  source 1..20: mol_type = other DNA
tacagtataaggttaatttg

SEQ ID NO: 52018 - DNA, 20 bp, synthetic construct
  misc_feature 1..20: note = chemically synthesized
  source 1..20: mol_type = other DNA
acagtataaggttaatttga

SEQ ID NO: 52019 - DNA, 20 bp, synthetic construct
  misc_feature 1..20: note = chemically synthesized
  source 1..20: mol_type = other DNA
taaggttaatttgaaggata

SEQ ID NO: 52020 - DNA, 20 bp, synthetic construct
  misc_feature 1..20: note = chemically synthesized
  source 1..20: mol_type = other DNA
aaggttaatttgaaggataa

SEQ ID NO: 52021 - DNA, 20 bp, synthetic construct
  misc_feature 1..20: note = chemically synthesized
  source 1..20: mol_type = other DNA
ggttaatttgaaggataaag

SEQ ID NO: 52022 - DNA, 20 bp, synthetic construct
  misc_feature 1..20: note = chemically synthesized
  source 1..20: mol_type = other DNA
gagtgaatttcctgatgtca

SEQ ID NO: 52023 - DNA, 20 bp, synthetic construct
  misc_feature 1..20: note = chemically synthesized
  source 1..20: mol_type = other DNA
gtgaatttcctgatgtcaaa

SEQ ID NO: 52024 - DNA, 20 bp, synthetic construct
  misc_feature 1..20: note = chemically synthesized
  source 1..20: mol_type = other DNA
tgaatttcctgatgtcaaag

SEQ ID NO: 52025 - DNA, 20 bp, synthetic construct
  misc_feature 1..20: note = chemically synthesized
  source 1..20: mol_type = other DNA
tcctgatgtcaaagaggatc

SEQ ID NO: 52026 - DNA, 20 bp, synthetic construct
  misc_feature 1..20: note = chemically synthesized
  source 1..20: mol_type = other DNA
agaggatctagtgcatcttc

SEQ ID NO: 52027 - DNA, 20 bp, synthetic construct
  misc_feature 1..20: note = chemically synthesized
  source 1..20: mol_type = other DNA
atctagtgcatcttctggta

SEQ ID NO: 52028 - DNA, 20 bp, synthetic construct
  misc_feature 1..20: note = chemically synthesized
  source 1..20: mol_type = other DNA
gcatcttctggtatagctat

SEQ ID NO: 52029 - DNA, 20 bp, synthetic construct
  misc_feature 1..20: note = chemically synthesized
  source 1..20: mol_type = other DNA
tcttctggtatagctatcag

SEQ ID NO: 52030 - DNA, 20 bp, synthetic construct
  misc_feature 1..20: note = chemically synthesized
  source 1..20: mol_type = other DNA
ctatcagaagtgaaaactgt

SEQ ID NO: 52031 - DNA, 20 bp, synthetic construct
  misc_feature 1..20: note = chemically synthesized
  source 1..20: mol_type = other DNA
tatcagaagtgaaaactgtg

SEQ ID NO: 52032 - DNA, 20 bp, synthetic construct
  misc_feature 1..20: note = chemically synthesized
  source 1..20: mol_type = other DNA
cagaagtgaaaactgtgagg

SEQ ID NO: 52033 - DNA, 20 bp, synthetic construct
  misc_feature 1..20: note = chemically synthesized
  source 1..20: mol_type = other DNA
agaagtgaaaactgtgaggt

SEQ ID NO: 52034 - DNA, 20 bp, synthetic construct
  misc_feature 1..20: note = chemically synthesized
  source 1..20: mol_type = other DNA
gaaaactgtgaggtaggttc

SEQ ID NO: 52035 - DNA, 20 bp, synthetic construct
  misc_feature 1..20: note = chemically synthesized
  source 1..20: mol_type = other DNA
aaactgtgaggtaggttcta

SEQ ID NO: 52036 - DNA, 20 bp, synthetic construct
  misc_feature 1..20: note = chemically synthesized
  source 1..20: mol_type = other DNA
aactgtgaggtaggttctag

SEQ ID NO: 52037 - DNA, 20 bp, synthetic construct
  misc_feature 1..20: note = chemically synthesized
  source 1..20: mol_type = other DNA
actgtgaggtaggttctaga

SEQ ID NO: 52038 - DNA, 20 bp, synthetic construct
  misc_feature 1..20: note = chemically synthesized
  source 1..20: mol_type = other DNA
ctgtgaggtaggttctagag

SEQ ID NO: 52039 - DNA, 20 bp, synthetic construct
  misc_feature 1..20: note = chemically synthesized
  source 1..20: mol_type = other DNA
tattttttactatataatca

SEQ ID NO: 52040 - DNA, 20 bp, synthetic construct
  misc_feature 1..20: note = chemically synthesized
  source 1..20: mol_type = other DNA
tttttactatataatcatag

SEQ ID NO: 52041 - DNA, 20 bp, synthetic construct
  misc_feature 1..20: note = chemically synthesized
  source 1..20: mol_type = other DNA
atataatcatagtagctgcc

SEQ ID NO: 52042 - DNA, 20 bp, synthetic construct
  misc_feature 1..20: note = chemically synthesized
  source 1..20: mol_type = other DNA
tataatcatagtagctgccg

SEQ ID NO: 52043 - DNA, 20 bp, synthetic construct
  misc_feature 1..20: note = chemically synthesized
  source 1..20: mol_type = other DNA
aatcatagtagctgccgagg

SEQ ID NO: 52044 - DNA, 20 bp, synthetic construct
  misc_feature 1..20: note = chemically synthesized
  source 1..20: mol_type = other DNA
atcatagtagctgccgaggc

SEQ ID NO: 52045 - DNA, 20 bp, synthetic construct
  misc_feature 1..20: note = chemically synthesized
  source 1..20: mol_type = other DNA
atagtagctgccgaggcggg

SEQ ID NO: 52046 - DNA, 20 bp, synthetic construct
  misc_feature 1..20: note = chemically synthesized
  source 1..20: mol_type = other DNA
tgccgaggcgggcggatcat

SEQ ID NO: 52047 - DNA, 20 bp, synthetic construct
  misc_feature 1..20: note = chemically synthesized
  source 1..20: mol_type = other DNA
gccgaggcgggcggatcatg

SEQ ID NO: 52048 - DNA, 20 bp, synthetic construct
  misc_feature 1..20: note = chemically synthesized
  source 1..20: mol_type = other DNA
aggcgggcggatcatgaggt

SEQ ID NO: 52049 - DNA, 20 bp, synthetic construct
  misc_feature 1..20: note = chemically synthesized
  source 1..20: mol_type = other DNA
ggcgggcggatcatgaggtc

SEQ ID NO: 52050 - DNA, 20 bp, synthetic construct
  misc_feature 1..20: note = chemically synthesized
  source 1..20: mol_type = other DNA
cgggcggatcatgaggtcag

SEQ ID NO: 52051 - DNA, 20 bp, synthetic construct
  misc_feature 1..20: note = chemically synthesized
  source 1..20: mol_type = other DNA
gatcatgaggtcaggagatc

SEQ ID NO: 52052 - DNA, 20 bp, synthetic construct
  misc_feature 1..20: note = chemically synthesized
  source 1..20: mol_type = other DNA
tcaggagatcgagaccatcc

SEQ ID NO: 52053 - DNA, 20 bp, synthetic construct
  misc_feature 1..20: note = chemically synthesized
  source 1..20: mol_type = other DNA
gagatcgagaccatcctggc

SEQ ID NO: 52054 - DNA, 20 bp, synthetic construct
  misc_feature 1..20: note = chemically synthesized
  source 1..20: mol_type = other DNA
gagaccatcctggccagcaa

SEQ ID NO: 52055 - DNA, 20 bp, synthetic construct
  misc_feature 1..20: note = chemically synthesized
  source 1..20: mol_type = other DNA
cgtctctactaaaaaaacac

SEQ ID NO: 52056 - DNA, 20 bp, synthetic construct
  misc_feature 1..20: note = chemically synthesized
  source 1..20: mol_type = other DNA
tctactaaaaaaacacaaga

SEQ ID NO: 52057 - DNA, 20 bp, synthetic construct
  misc_feature 1..20: note = chemically synthesized
  source 1..20: mol_type = other DNA
aaaaaacacaagaaagtatc

SEQ ID NO: 52058 - DNA, 20 bp, synthetic construct
  misc_feature 1..20: note = chemically synthesized
  source 1..20: mol_type = other DNA
aaaaacacaagaaagtatcc

SEQ ID NO: 52059 - DNA, 20 bp, synthetic construct
  misc_feature 1..20: note = chemically synthesized
  source 1..20: mol_type = other DNA
cacaagaaagtatccaggcg

SEQ ID NO: 52060 - DNA, 20 bp, synthetic construct
  misc_feature 1..20: note = chemically synthesized
  source 1..20: mol_type = other DNA
aagaaagtatccaggcgtgg

SEQ ID NO: 52061 - DNA, 20 bp, synthetic construct
  misc_feature 1..20: note = chemically synthesized
  source 1..20: mol_type = other DNA
aaagtatccaggcgtggtgg

SEQ ID NO: 52062 - DNA, 20 bp, synthetic construct
  misc_feature 1..20: note = chemically synthesized
  source 1..20: mol_type = other DNA
aagtatccaggcgtggtggc

SEQ ID NO: 52063 - DNA, 20 bp, synthetic construct
  misc_feature 1..20: note = chemically synthesized
  source 1..20: mol_type = other DNA
ggcgtggtggcgggcacctg

SEQ ID NO: 52064 - DNA, 20 bp, synthetic construct
  misc_feature 1..20: note = chemically synthesized
  source 1..20: mol_type = other DNA
gtggcgggcacctgtagtcc

SEQ ID NO: 52065 - DNA, 20 bp, synthetic construct
  misc_feature 1..20: note = chemically synthesized
  source 1..20: mol_type = other DNA
tggcgggcacctgtagtccc

SEQ ID NO: 52066 - DNA, 20 bp, synthetic construct
  misc_feature 1..20: note = chemically synthesized
  source 1..20: mol_type = other DNA
cacctgtagtcccaggtact

SEQ ID NO: 52067 - DNA, 20 bp, synthetic construct
  misc_feature 1..20: note = chemically synthesized
  source 1..20: mol_type = other DNA
acctgtagtcccaggtactc

SEQ ID NO: 52068 - DNA, 20 bp, synthetic construct
  misc_feature 1..20: note = chemically synthesized
  source 1..20: mol_type = other DNA
ctgtagtcccaggtactcgg

SEQ ID NO: 52069 - DNA, 20 bp, synthetic construct
  misc_feature 1..20: note = chemically synthesized
  source 1..20: mol_type = other DNA
tgtagtcccaggtactcggg

SEQ ID NO: 52070 - DNA, 20 bp, synthetic construct
  misc_feature 1..20: note = chemically synthesized
  source 1..20: mol_type = other DNA
tcccaggtactcgggaggct

SEQ ID NO: 52071 - DNA, 20 bp, synthetic construct
  misc_feature 1..20: note = chemically synthesized
  source 1..20: mol_type = other DNA
aggtactcgggaggctgaga

SEQ ID NO: 52072 - DNA, 20 bp, synthetic construct
  misc_feature 1..20: note = chemically synthesized
  source 1..20: mol_type = other DNA
ggtactcgggaggctgagac

SEQ ID NO: 52073 - DNA, 20 bp, synthetic construct
  misc_feature 1..20: note = chemically synthesized
  source 1..20: mol_type = other DNA
tactcgggaggctgagacag

SEQ ID NO: 52074 - DNA, 20 bp, synthetic construct
  misc_feature 1..20: note = chemically synthesized
  source 1..20: mol_type = other DNA
gggaggctgagacaggagaa

SEQ ID NO: 52075 - DNA, 20 bp, synthetic construct
  misc_feature 1..20: note = chemically synthesized
  source 1..20: mol_type = other DNA
acaggagaatggcgtgaacc

SEQ ID NO: 52076 - DNA, 20 bp, synthetic construct
  misc_feature 1..20: note = chemically synthesized
  source 1..20: mol_type = other DNA
caggagaatggcgtgaaccc

SEQ ID NO: 52077 - DNA, 20 bp, synthetic construct
  misc_feature 1..20: note = chemically synthesized
  source 1..20: mol_type = other DNA
ggagaatggcgtgaacccgg

SEQ ID NO: 52078 - DNA, 20 bp, synthetic construct
  misc_feature 1..20: note = chemically synthesized
  source 1..20: mol_type = other DNA
gagaatggcgtgaacccggg

SEQ ID NO: 52079 - DNA, 20 bp, synthetic construct
  misc_feature 1..20: note = chemically synthesized
  source 1..20: mol_type = other DNA
aatggcgtgaacccgggagg

SEQ ID NO: 52080 - DNA, 20 bp, synthetic construct
  misc_feature 1..20: note = chemically synthesized
  source 1..20: mol_type = other DNA
tggcgtgaacccgggaggtg

SEQ ID NO: 52081 - DNA, 20 bp, synthetic construct
  misc_feature 1..20: note = chemically synthesized
  source 1..20: mol_type = other DNA
aacccgggaggtggagcttg

SEQ ID NO: 52082 - DNA, 20 bp, synthetic construct
  misc_feature 1..20: note = chemically synthesized
  source 1..20: mol_type = other DNA
cgggaggtggagcttgcagt

SEQ ID NO: 52083 - DNA, 20 bp, synthetic construct
  misc_feature 1..20: note = chemically synthesized
  source 1..20: mol_type = other DNA
ggtggagcttgcagtgagtc

SEQ ID NO: 52084 - DNA, 20 bp, synthetic construct
  misc_feature 1..20: note = chemically synthesized
  source 1..20: mol_type = other DNA
gagatcacgccactgcactc

SEQ ID NO: 52085 - DNA, 20 bp, synthetic construct
  misc_feature 1..20: note = chemically synthesized
  source 1..20: mol_type = other DNA
cacgccactgcactccagcc

SEQ ID NO: 52086 - DNA, 20 bp, synthetic construct
  misc_feature 1..20: note = chemically synthesized
  source 1..20: mol_type = other DNA
acgccactgcactccagcct

SEQ ID NO: 52087 - DNA, 20 bp, synthetic construct
  misc_feature 1..20: note = chemically synthesized
  source 1..20: mol_type = other DNA
ctgcactccagcctgggcga

SEQ ID NO: 52088 - DNA, 20 bp, synthetic construct
  misc_feature 1..20: note = chemically synthesized
  source 1..20: mol_type = other DNA
gcactccagcctgggcgaca

SEQ ID NO: 52089 - DNA, 20 bp, synthetic construct
  misc_feature 1..20: note = chemically synthesized
  source 1..20: mol_type = other DNA
actccagcctgggcgacaga

SEQ ID NO: 52090 - DNA, 20 bp, synthetic construct
  misc_feature 1..20: note = chemically synthesized
  source 1..20: mol_type = other DNA
tccagcctgggcgacagaga

SEQ ID NO: 52091 - DNA, 20 bp, synthetic construct
  misc_feature 1..20: note = chemically synthesized
  source 1..20: mol_type = other DNA
gtctcaaaaaaaaaaaaaaa

SEQ ID NO: 52092 - DNA, 20 bp, synthetic construct
  misc_feature 1..20: note = chemically synthesized
  source 1..20: mol_type = other DNA
ctcaaaaaaaaaaaaaaaaa

SEQ ID NO: 52093 - DNA, 20 bp, synthetic construct
  misc_feature 1..20: note = chemically synthesized
  source 1..20: mol_type = other DNA
aaaaaaaaaagagaaaaaaa

SEQ ID NO: 52094 - DNA, 20 bp, synthetic construct
  misc_feature 1..20: note = chemically synthesized
  source 1..20: mol_type = other DNA
aaaaagagaaaaaaaaagaa

SEQ ID NO: 52095 - DNA, 20 bp, synthetic construct
  misc_feature 1..20: note = chemically synthesized
  source 1..20: mol_type = other DNA
agaaaagttgatatgaatgt

SEQ ID NO: 52096 - DNA, 20 bp, synthetic construct
  misc_feature 1..20: note = chemically synthesized
  source 1..20: mol_type = other DNA
gaaaagttgatatgaatgtc

SEQ ID NO: 52097 - DNA, 20 bp, synthetic construct
  misc_feature 1..20: note = chemically synthesized
  source 1..20: mol_type = other DNA
aagttgatatgaatgtcagg

SEQ ID NO: 52098 - DNA, 20 bp, synthetic construct
  misc_feature 1..20: note = chemically synthesized
  source 1..20: mol_type = other DNA
ttgatatgaatgtcaggtgg

SEQ ID NO: 52099 - DNA, 20 bp, synthetic construct
  misc_feature 1..20: note = chemically synthesized
  source 1..20: mol_type = other DNA
gtcaggtggtagtactgctc

SEQ ID NO: 52100 - DNA, 20 bp, synthetic construct
  misc_feature 1..20: note = chemically synthesized
  source 1..20: mol_type = other DNA
tcaggtggtagtactgctcc

SEQ ID NO: 52101 - DNA, 20 bp, synthetic construct
  misc_feature 1..20: note = chemically synthesized
  source 1..20: mol_type = other DNA
aatgataataaatgtctgca

SEQ ID NO: 52102 - DNA, 20 bp, synthetic construct
  misc_feature 1..20: note = chemically synthesized
  source 1..20: mol_type = other DNA
aatgtctgcatggtccctcc

SEQ ID NO: 52103 - DNA, 20 bp, synthetic construct
  misc_feature 1..20: note = chemically synthesized
  source 1..20: mol_type = other DNA
catggtccctcctggccgac

SEQ ID NO: 52104 - DNA, 20 bp, synthetic construct
  misc_feature 1..20: note = chemically synthesized
  source 1..20: mol_type = other DNA
cctcctggccgactggaatg

SEQ ID NO: 52105 - DNA, 20 bp, synthetic construct
  misc_feature 1..20: note = chemically synthesized
  source 1..20: mol_type = other DNA
tggaatgtggccaatctgac

SEQ ID NO: 52106 - DNA, 20 bp, synthetic construct
  misc_feature 1..20: note = chemically synthesized
  source 1..20: mol_type = other DNA
ctgacaagattcctatgccc

SEQ ID NO: 52107 - DNA, 20 bp, synthetic construct
  misc_feature 1..20: note = chemically synthesized
  source 1..20: mol_type = other DNA
tgccccagttttataatgaa

SEQ ID NO: 52108 - DNA, 20 bp, synthetic construct
  misc_feature 1..20: note = chemically synthesized
  source 1..20: mol_type = other DNA
ccccagttttataatgaaaa

SEQ ID NO: 52109 - DNA, 20 bp, synthetic construct
  misc_feature 1..20: note = chemically synthesized
  source 1..20: mol_type = other DNA
cagttttataatgaaaagag

SEQ ID NO: 52110 - DNA, 20 bp, synthetic construct
  misc_feature 1..20: note = chemically synthesized
  source 1..20: mol_type = other DNA
tttataatgaaaagagaagt

SEQ ID NO: 52111 - DNA, 20 bp, synthetic construct
  misc_feature 1..20: note = chemically synthesized
  source 1..20: mol_type = other DNA
gaagttagctgctgaatctg

SEQ ID NO: 52112 - DNA, 20 bp, synthetic construct
  misc_feature 1..20: note = chemically synthesized
  source 1..20: mol_type = other DNA
agttagctgctgaatctgta

SEQ ID NO: 52113 - DNA, 20 bp, synthetic construct
  misc_feature 1..20: note = chemically synthesized
  source 1..20: mol_type = other DNA
gttagctgctgaatctgtag

SEQ ID NO: 52114 - DNA, 20 bp, synthetic construct
  misc_feature 1..20: note = chemically synthesized
  source 1..20: mol_type = other DNA
gaggtcatgtgaatgtctca

SEQ ID NO: 52115 - DNA, 20 bp, synthetic construct
  misc_feature 1..20: note = chemically synthesized
  source 1..20: mol_type = other DNA
atgtctcatagatttctcaa

SEQ ID NO: 52116 - DNA, 20 bp, synthetic construct
  misc_feature 1..20: note = chemically synthesized
  source 1..20: mol_type = other DNA
catagatttctcaatggcca

SEQ ID NO: 52117 - DNA, 20 bp, synthetic construct
  misc_feature 1..20: note = chemically synthesized
  source 1..20: mol_type = other DNA
agatttctcaatggccaaag

SEQ ID NO: 52118 - DNA, 20 bp, synthetic construct
  misc_feature 1..20: note = chemically synthesized
  source 1..20: mol_type = other DNA
gcttccttctaatgctttga

SEQ ID NO: 52119 - DNA, 20 bp, synthetic construct
  misc_feature 1..20: note = chemically synthesized
  source 1..20: mol_type = other DNA
ctaatgctttgaaagtgaat

SEQ ID NO: 52120 - DNA, 20 bp, synthetic construct
  misc_feature 1..20: note = chemically synthesized
  source 1..20: mol_type = other DNA
gcatccaccctcccatacgc

SEQ ID NO: 52121 - DNA, 20 bp, synthetic construct
  misc_feature 1..20: note = chemically synthesized
  source 1..20: mol_type = other DNA
atccaccctcccatacgccg

SEQ ID NO: 52122 - DNA, 20 bp, synthetic construct
  misc_feature 1..20: note = chemically synthesized
  source 1..20: mol_type = other DNA
ccaccctcccatacgccgga

SEQ ID NO: 52123 - DNA, 20 bp, synthetic construct
  misc_feature 1..20: note = chemically synthesized
  source 1..20: mol_type = other DNA
ccggagagctgacacaacac

SEQ ID NO: 52124 - DNA, 20 bp, synthetic construct
  misc_feature 1..20: note = chemically synthesized
  source 1..20: mol_type = other DNA
cggagagctgacacaacact

SEQ ID NO: 52125 - DNA, 20 bp, synthetic construct
  misc_feature 1..20: note = chemically synthesized
  source 1..20: mol_type = other DNA
ggagagctgacacaacactg

SEQ ID NO: 52126 - DNA, 20 bp, synthetic construct
  misc_feature 1..20: note = chemically synthesized
  source 1..20: mol_type = other DNA
gagctgacacaacactgggg

SEQ ID NO: 52127 - DNA, 20 bp, synthetic construct
  misc_feature 1..20: note = chemically synthesized
  source 1..20: mol_type = other DNA
ctgacacaacactggggaag

SEQ ID NO: 52128 - DNA, 20 bp, synthetic construct
  misc_feature 1..20: note = chemically synthesized
  source 1..20: mol_type = other DNA
gacacaacactggggaagca

SEQ ID NO: 52129 - DNA, 20 bp, synthetic construct
  misc_feature 1..20: note = chemically synthesized
  source 1..20: mol_type = other DNA
actgacaatatgttttccac

SEQ ID NO: 52130 - DNA, 20 bp, synthetic construct
  misc_feature 1..20: note = chemically synthesized
  source 1..20: mol_type = other DNA
tgttttccaccagccactca

SEQ ID NO: 52131 - DNA, 20 bp, synthetic construct
  misc_feature 1..20: note = chemically synthesized
  source 1..20: mol_type = other DNA
gttttccaccagccactcat

SEQ ID NO: 52132 - DNA, 20 bp, synthetic construct
  misc_feature 1..20: note = chemically synthesized
  source 1..20: mol_type = other DNA
ttttccaccagccactcata

SEQ ID NO: 52133 - DNA, 20 bp, synthetic construct
  misc_feature 1..20: note = chemically synthesized
  source 1..20: mol_type = other DNA
tccaccagccactcataggg

SEQ ID NO: 52134 - DNA, 20 bp, synthetic construct
  misc_feature 1..20: note = chemically synthesized
  source 1..20: mol_type = other DNA
agccactcatagggaagcat

SEQ ID NO: 52135 - DNA, 20 bp, synthetic construct
  misc_feature 1..20: note = chemically synthesized
  source 1..20: mol_type = other DNA
attacatgtctgacacaact

SEQ ID NO: 52136 - DNA, 20 bp, synthetic construct
  misc_feature 1..20: note = chemically synthesized
  source 1..20: mol_type = other DNA
gtctgacacaactgagttgt

SEQ ID NO: 52137 - DNA, 20 bp, synthetic construct
  misc_feature 1..20: note = chemically synthesized
  source 1..20: mol_type = other DNA
cacaactgagttgttggttt

SEQ ID NO: 52138 - DNA, 20 bp, synthetic construct
  misc_feature 1..20: note = chemically synthesized
  source 1..20: mol_type = other DNA
caactgagttgttggtttga

SEQ ID NO: 52139 - DNA, 20 bp, synthetic construct
  misc_feature 1..20: note = chemically synthesized
  source 1..20: mol_type = other DNA
ggtttgagagttatgtttaa

SEQ ID NO: 52140 - DNA, 20 bp, synthetic construct
  misc_feature 1..20: note = chemically synthesized
  source 1..20: mol_type = other DNA
gtttgagagttatgtttaac

SEQ ID NO: 52141 - DNA, 20 bp, synthetic construct
  misc_feature 1..20: note = chemically synthesized
  source 1..20: mol_type = other DNA
tttgagagttatgtttaaca

SEQ ID NO: 52142 - DNA, 20 bp, synthetic construct
  misc_feature 1..20: note = chemically synthesized
  source 1..20: mol_type = other DNA
tgagagttatgtttaacagg

SEQ ID NO: 52143 - DNA, 20 bp, synthetic construct
  misc_feature 1..20: note = chemically synthesized
  source 1..20: mol_type = other DNA
agagttatgtttaacaggga

SEQ ID NO: 52144 - DNA, 20 bp, synthetic construct
  misc_feature 1..20: note = chemically synthesized
  source 1..20: mol_type = other DNA
gttatgtttaacagggagag

SEQ ID NO: 52145 - DNA, 20 bp, synthetic construct
  misc_feature 1..20: note = chemically synthesized
  source 1..20: mol_type = other DNA
ttatgtttaacagggagagt

SEQ ID NO: 52146 - DNA, 20 bp, synthetic construct
  misc_feature 1..20: note = chemically synthesized
  source 1..20: mol_type = other DNA
tgtttaacagggagagtagg

SEQ ID NO: 52147 - DNA, 20 bp, synthetic construct
  misc_feature 1..20: note = chemically synthesized
  source 1..20: mol_type = other DNA
gtttaacagggagagtagga

SEQ ID NO: 52148 - DNA, 20 bp, synthetic construct
  misc_feature 1..20: note = chemically synthesized
  source 1..20: mol_type = other DNA
agagtaggaaggctcatctg

SEQ ID NO: 52149 - DNA, 20 bp, synthetic construct
  misc_feature 1..20: note = chemically synthesized
  source 1..20: mol_type = other DNA
atctgaagacttcatactat

SEQ ID NO: 52150 - DNA, 20 bp, synthetic construct
  misc_feature 1..20: note = chemically synthesized
  source 1..20: mol_type = other DNA
tactatgagtgtttgtgctt

SEQ ID NO: 52151 - DNA, 20 bp, synthetic construct
  misc_feature 1..20: note = chemically synthesized
  source 1..20: mol_type = other DNA
tgagtgtttgtgcttcagat

SEQ ID NO: 52152 - DNA, 20 bp, synthetic construct
  misc_feature 1..20: note = chemically synthesized
  source 1..20: mol_type = other DNA
gagtgtttgtgcttcagatt

SEQ ID NO: 52153 - DNA, 20 bp, synthetic construct
  misc_feature 1..20: note = chemically synthesized
  source 1..20: mol_type = other DNA
gcttcagattaggcaaccta

SEQ ID NO: 52154 - DNA, 20 bp, synthetic construct
  misc_feature 1..20: note = chemically synthesized
  source 1..20: mol_type = other DNA
ctatagaatgtgaaccaaaa

SEQ ID NO: 52155 - DNA, 20 bp, synthetic construct
  misc_feature 1..20: note = chemically synthesized
  source 1..20: mol_type = other DNA
accaaaatagtttgaaataa

SEQ ID NO: 52156 - DNA, 20 bp, synthetic construct
  misc_feature 1..20: note = chemically synthesized
  source 1..20: mol_type = other DNA
aaataatggccgtgacaaaa

SEQ ID NO: 52157 - DNA, 20 bp, synthetic construct
  misc_feature 1..20: note = chemically synthesized
  source 1..20: mol_type = other DNA
acagttaataaaaaatacct

SEQ ID NO: 52158 - DNA, 20 bp, synthetic construct
  misc_feature 1..20: note = chemically synthesized
  source 1..20: mol_type = other DNA
agttaataaaaaatacctaa

SEQ ID NO: 52159 - DNA, 20 bp, synthetic construct
  misc_feature 1..20: note = chemically synthesized
  source 1..20: mol_type = other DNA
aaaatacctaagagtatcct

SEQ ID NO: 52160 - DNA, 20 bp, synthetic construct
  misc_feature 1..20: note = chemically synthesized
  source 1..20: mol_type = other DNA
tcagaaatcattgcttattt

SEQ ID NO: 52161 - DNA, 20 bp, synthetic construct
  misc_feature 1..20: note = chemically synthesized
  source 1..20: mol_type = other DNA
agaaatcattgcttatttta

SEQ ID NO: 52162 - DNA, 20 bp, synthetic construct
  misc_feature 1..20: note = chemically synthesized
  source 1..20: mol_type = other DNA
tataattgtactatgatgat

SEQ ID NO: 52163 - DNA, 20 bp, synthetic construct
  misc_feature 1..20: note = chemically synthesized
  source 1..20: mol_type = other DNA
ctatgatgataagatttatg

SEQ ID NO: 52164 - DNA, 20 bp, synthetic construct
  misc_feature 1..20: note = chemically synthesized
  source 1..20: mol_type = other DNA
ataagatttatgaagaactt

SEQ ID NO: 52165 - DNA, 20 bp, synthetic construct
  misc_feature 1..20: note = chemically synthesized
  source 1..20: mol_type = other DNA
acttcagaatctttacaatt

SEQ ID NO: 52166 - DNA, 20 bp, synthetic construct
  misc_feature 1..20: note = chemically synthesized
  source 1..20: mol_type = other DNA
gaatctttacaattcagcca

SEQ ID NO: 52167 - DNA, 20 bp, synthetic construct
  misc_feature 1..20: note = chemically synthesized
  source 1..20: mol_type = other DNA
aatctttacaattcagccaa

SEQ ID NO: 52168 - DNA, 20 bp, synthetic construct
  misc_feature 1..20: note = chemically synthesized
  source 1..20: mol_type = other DNA
atctttacaattcagccaaa

SEQ ID NO: 52169 - DNA, 20 bp, synthetic construct
  misc_feature 1..20: note = chemically synthesized
  source 1..20: mol_type = other DNA
ctttacaattcagccaaagg

SEQ ID NO: 52170 - DNA, 20 bp, synthetic construct
  misc_feature 1..20: note = chemically synthesized
  source 1..20: mol_type = other DNA
tttacaattcagccaaaggg

SEQ ID NO: 52171 - DNA, 20 bp, synthetic construct
  misc_feature 1..20: note = chemically synthesized
  source 1..20: mol_type = other DNA
tcagccaaagggaggaaaat

SEQ ID NO: 52172 - DNA, 20 bp, synthetic construct
  misc_feature 1..20: note = chemically synthesized
  source 1..20: mol_type = other DNA
tcagtaaaaaaaaaaaaaaa

SEQ ID NO: 52173 - DNA, 20 bp, synthetic construct
  misc_feature 1..20: note = chemically synthesized
  source 1..20: mol_type = other DNA
aaaaaaaaaaaagccaatga

SEQ ID NO: 52174 - DNA, 20 bp, synthetic construct
  misc_feature 1..20: note = chemically synthesized
  source 1..20: mol_type = other DNA
agtaaactttatatgattac

SEQ ID NO: 52175 - DNA, 20 bp, synthetic construct
  misc_feature 1..20: note = chemically synthesized
  source 1..20: mol_type = other DNA
gtaaactttatatgattact

SEQ ID NO: 52176 - DNA, 20 bp, synthetic construct
  misc_feature 1..20: note = chemically synthesized
  source 1..20: mol_type = other DNA
tatgattactgggctttata

SEQ ID NO: 52177 - DNA, 20 bp, synthetic construct
  misc_feature 1..20: note = chemically synthesized
  source 1..20: mol_type = other DNA
attactgggctttatacaga

SEQ ID NO: 52178 - DNA, 20 bp, synthetic construct
  misc_feature 1..20: note = chemically synthesized
  source 1..20: mol_type = other DNA
gggctttatacagaaagaaa

SEQ ID NO: 52179 - DNA, 20 bp, synthetic construct
  misc_feature 1..20: note = chemically synthesized
  source 1..20: mol_type = other DNA
ggctttatacagaaagaaac

SEQ ID NO: 52180 - DNA, 20 bp, synthetic construct
  misc_feature 1..20: note = chemically synthesized
  source 1..20: mol_type = other DNA
tatacagaaagaaacaggtt

SEQ ID NO: 52181 - DNA, 20 bp, synthetic construct
  misc_feature 1..20: note = chemically synthesized
  source 1..20: mol_type = other DNA
aagaaacaggtttagaacat

SEQ ID NO: 52182 - DNA, 20 bp, synthetic construct
  misc_feature 1..20: note = chemically synthesized
  source 1..20: mol_type = other DNA
aaacaggtttagaacattag

SEQ ID NO: 52183 - DNA, 20 bp, synthetic construct
  misc_feature 1..20: note = chemically synthesized
  source 1..20: mol_type = other DNA
ggtttagaacattagtagtt

SEQ ID NO: 52184 - DNA, 20 bp, synthetic construct
  misc_feature 1..20: note = chemically synthesized
  source 1..20: mol_type = other DNA
tttagattgtttgttttgca

SEQ ID NO: 52185 - DNA, 20 bp, synthetic construct
  misc_feature 1..20: note = chemically synthesized
  source 1..20: mol_type = other DNA
ttagattgtttgttttgcaa

SEQ ID NO: 52186 - DNA, 20 bp, synthetic construct
  misc_feature 1..20: note = chemically synthesized
  source 1..20: mol_type = other DNA
gttttgcaaaggcctctatc

SEQ ID NO: 52187 - DNA, 20 bp, synthetic construct
  misc_feature 1..20: note = chemically synthesized
  source 1..20: mol_type = other DNA
ttgcaaaggcctctatctgg

SEQ ID NO: 52188 - DNA, 20 bp, synthetic construct
  misc_feature 1..20: note = chemically synthesized
  source 1..20: mol_type = other DNA
aaaataactaaacctctcct

SEQ ID NO: 52189 - DNA, 20 bp, synthetic construct
  misc_feature 1..20: note = chemically synthesized
  source 1..20: mol_type = other DNA
aaataactaaacctctcctg

SEQ ID NO: 52190 - DNA, 20 bp, synthetic construct
  misc_feature 1..20: note = chemically synthesized
  source 1..20: mol_type = other DNA
taactaaacctctcctgagg

SEQ ID NO: 52191 - DNA, 20 bp, synthetic construct
  misc_feature 1..20: note = chemically synthesized
  source 1..20: mol_type = other DNA
aaacctctcctgaggaagaa

SEQ ID NO: 52192 - DNA, 20 bp, synthetic construct
  misc_feature 1..20: note = chemically synthesized
  source 1..20: mol_type = other DNA
aacctctcctgaggaagaaa

SEQ ID NO: 52193 - DNA, 20 bp, synthetic construct
  misc_feature 1..20: note = chemically synthesized
  source 1..20: mol_type = other DNA
tgaggaagaaaaggcaattt

SEQ ID NO: 52194 - DNA, 20 bp, synthetic construct
  misc_feature 1..20: note = chemically synthesized
  source 1..20: mol_type = other DNA
aggaagaaaaggcaatttca

SEQ ID NO: 52195 - DNA, 20 bp, synthetic construct
  misc_feature 1..20: note = chemically synthesized
  source 1..20: mol_type = other DNA
aaaggcaatttcagagacat

SEQ ID NO: 52196 - DNA, 20 bp, synthetic construct
  misc_feature 1..20: note = chemically synthesized
  source 1..20: mol_type = other DNA
caatttcagagacatcagcc

SEQ ID NO: 52197 - DNA, 20 bp, synthetic construct
  misc_feature 1..20: note = chemically synthesized
  source 1..20: mol_type = other DNA
aatttcagagacatcagccc

SEQ ID NO: 52198 - DNA, 20 bp, synthetic construct
  misc_feature 1..20: note = chemically synthesized
  source 1..20: mol_type = other DNA
gacatcagcccaggtcctga

SEQ ID NO: 52199 - DNA, 20 bp, synthetic construct
  misc_feature 1..20: note = chemically synthesized
  source 1..20: mol_type = other DNA
acatcagcccaggtcctgaa

SEQ ID NO: 52200 - DNA, 20 bp, synthetic construct
  misc_feature 1..20: note = chemically synthesized
  source 1..20: mol_type = other DNA
tcagcccaggtcctgaaagg

SEQ ID NO: 52201 - DNA, 20 bp, synthetic construct
  misc_feature 1..20: note = chemically synthesized
  source 1..20: mol_type = other DNA
agcccaggtcctgaaaggaa

SEQ ID NO: 52202 - DNA, 20 bp, synthetic construct
  misc_feature 1..20: note = chemically synthesized
  source 1..20: mol_type = other DNA
ccaggtcctgaaaggaagag

SEQ ID NO: 52203 - DNA, 20 bp, synthetic construct
  misc_feature 1..20: note = chemically synthesized
  source 1..20: mol_type = other DNA
gtcctgaaaggaagagcaga

SEQ ID NO: 52204 - DNA, 20 bp, synthetic construct
  misc_feature 1..20: note = chemically synthesized
  source 1..20: mol_type = other DNA
cctgaaaggaagagcagatg

SEQ ID NO: 52205 - DNA, 20 bp, synthetic construct
  misc_feature 1..20: note = chemically synthesized
  source 1..20: mol_type = other DNA
aagagcagatggagacatca

SEQ ID NO: 52206 - DNA, 20 bp, synthetic construct
  misc_feature 1..20: note = chemically synthesized
  source 1..20: mol_type = other DNA
agagcagatggagacatcac

SEQ ID NO: 52207 - DNA, 20 bp, synthetic construct
  misc_feature 1..20: note = chemically synthesized
  source 1..20: mol_type = other DNA
aaaacactgtctgttttgaa

SEQ ID NO: 52208 - DNA, 20 bp, synthetic construct
  misc_feature 1..20: note = chemically synthesized
  source 1..20: mol_type = other DNA
gtctgttttgaaaagctaca

SEQ ID NO: 52209 - DNA, 20 bp, synthetic construct
  misc_feature 1..20: note = chemically synthesized
  source 1..20: mol_type = other DNA
tgttttgaaaagctacatag

SEQ ID NO: 52210 - DNA, 20 bp, synthetic construct
  misc_feature 1..20: note = chemically synthesized
  source 1..20: mol_type = other DNA
ttgaaaagctacatagtagc

SEQ ID NO: 52211 - DNA, 20 bp, synthetic construct
  misc_feature 1..20: note = chemically synthesized
  source 1..20: mol_type = other DNA
tgaaaagctacatagtagcc

SEQ ID NO: 52212 - DNA, 20 bp, synthetic construct
  misc_feature 1..20: note = chemically synthesized
  source 1..20: mol_type = other DNA
aaagctacatagtagccagg

SEQ ID NO: 52213 - DNA, 20 bp, synthetic construct
  misc_feature 1..20: note = chemically synthesized
  source 1..20: mol_type = other DNA
agctacatagtagccaggtg

SEQ ID NO: 52214 - DNA, 20 bp, synthetic construct
  misc_feature 1..20: note = chemically synthesized
  source 1..20: mol_type = other DNA
atttttccatatatctcaaa

SEQ ID NO: 52215 - DNA, 20 bp, synthetic construct
  misc_feature 1..20: note = chemically synthesized
  source 1..20: mol_type = other DNA
ttccatatatctcaaaaagc

SEQ ID NO: 52216 - DNA, 20 bp, synthetic construct
  misc_feature 1..20: note = chemically synthesized
  source 1..20: mol_type = other DNA
atctcaaaaagccagcttct

SEQ ID NO: 52217 - DNA, 20 bp, synthetic construct
  misc_feature 1..20: note = chemically synthesized
  source 1..20: mol_type = other DNA
tctcaaaaagccagcttcta

SEQ ID NO: 52218 - DNA, 20 bp, synthetic construct
  misc_feature 1..20: note = chemically synthesized
  source 1..20: mol_type = other DNA
gaaacttgttttccatgaat

SEQ ID NO: 52219 - DNA, 20 bp, synthetic construct
  misc_feature 1..20: note = chemically synthesized
  source 1..20: mol_type = other DNA
aaacttgttttccatgaatt

SEQ ID NO: 52220 - DNA, 20 bp, synthetic construct
  misc_feature 1..20: note = chemically synthesized
  source 1..20: mol_type = other DNA
ttccatgaattaggcaacaa

SEQ ID NO: 52221 - DNA, 20 bp, synthetic construct
  misc_feature 1..20: note = chemically synthesized
  source 1..20: mol_type = other DNA
agctgaaactgttgttgatg

SEQ ID NO: 52222 - DNA, 20 bp, synthetic construct
  misc_feature 1..20: note = chemically synthesized
  source 1..20: mol_type = other DNA
tgaaactgttgttgatgtgg

SEQ ID NO: 52223 - DNA, 20 bp, synthetic construct
  misc_feature 1..20: note = chemically synthesized
  source 1..20: mol_type = other DNA
gttgttgatgtggtagcctg

SEQ ID NO: 52224 - DNA, 20 bp, synthetic construct
  misc_feature 1..20: note = chemically synthesized
  source 1..20: mol_type = other DNA
tgttgatgtggtagcctgca

SEQ ID NO: 52225 - DNA, 20 bp, synthetic construct
  misc_feature 1..20: note = chemically synthesized
  source 1..20: mol_type = other DNA
gatgtggtagcctgcagagc

SEQ ID NO: 52226 - DNA, 20 bp, synthetic construct
  misc_feature 1..20: note = chemically synthesized
  source 1..20: mol_type = other DNA
tggtagcctgcagagccagt

SEQ ID NO: 52227 - DNA, 20 bp, synthetic construct
  misc_feature 1..20: note = chemically synthesized
  source 1..20: mol_type = other DNA
tagcctgcagagccagtgag

SEQ ID NO: 52228 - DNA, 20 bp, synthetic construct
  misc_feature 1..20: note = chemically synthesized
  source 1..20: mol_type = other DNA
cctgcagagccagtgagaag

SEQ ID NO: 52229 - DNA, 20 bp, synthetic construct
  misc_feature 1..20: note = chemically synthesized
  source 1..20: mol_type = other DNA
agccagtgagaagcagttat

SEQ ID NO: 52230 - DNA, 20 bp, synthetic construct
  misc_feature 1..20: note = chemically synthesized
  source 1..20: mol_type = other DNA
cagttatcagattcctttgt

SEQ ID NO: 52231 - DNA, 20 bp, synthetic construct
  misc_feature 1..20: note = chemically synthesized
  source 1..20: mol_type = other DNA
agttatcagattcctttgta

SEQ ID NO: 52232 - DNA, 20 bp, synthetic construct
  misc_feature 1..20: note = chemically synthesized
  source 1..20: mol_type = other DNA
gattcctttgtaaggcctgc

SEQ ID NO: 52233 - DNA, 20 bp, synthetic construct
  misc_feature 1..20: note = chemically synthesized
  source 1..20: mol_type = other DNA
attcctttgtaaggcctgca

SEQ ID NO: 52234 - DNA, 20 bp, synthetic construct
  misc_feature 1..20: note = chemically synthesized
  source 1..20: mol_type = other DNA
aggcctgcaaggctactatc

SEQ ID NO: 52235 - DNA, 20 bp, synthetic construct
  misc_feature 1..20: note = chemically synthesized
  source 1..20: mol_type = other DNA
ggctactatccagcgtcact

SEQ ID NO: 52236 - DNA, 20 bp, synthetic construct
  misc_feature 1..20: note = chemically synthesized
  source 1..20: mol_type = other DNA
actgagaaacgttacgaaaa

SEQ ID NO: 52237 - DNA, 20 bp, synthetic construct
  misc_feature 1..20: note = chemically synthesized
  source 1..20: mol_type = other DNA
aaacgttacgaaaacagcca

SEQ ID NO: 52238 - DNA, 20 bp, synthetic construct
  misc_feature 1..20: note = chemically synthesized
  source 1..20: mol_type = other DNA
gaaaacagccacagtgatgt

SEQ ID NO: 52239 - DNA, 20 bp, synthetic construct
  misc_feature 1..20: note = chemically synthesized
  source 1..20: mol_type = other DNA
aaaacagccacagtgatgtt

SEQ ID NO: 52240 - DNA, 20 bp, synthetic construct
  misc_feature 1..20: note = chemically synthesized
  source 1..20: mol_type = other DNA
aaacagccacagtgatgtta

SEQ ID NO: 52241 - DNA, 20 bp, synthetic construct
  misc_feature 1..20: note = chemically synthesized
  source 1..20: mol_type = other DNA
acagtgatgttagggaaaca

SEQ ID NO: 52242 - DNA, 20 bp, synthetic construct
  misc_feature 1..20: note = chemically synthesized
  source 1..20: mol_type = other DNA
ttttgcctttttttttttaa

SEQ ID NO: 52243 - DNA, 20 bp, synthetic construct
  misc_feature 1..20: note = chemically synthesized
  source 1..20: mol_type = other DNA
tttgcctttttttttttaat

SEQ ID NO: 52244 - DNA, 20 bp, synthetic construct
  misc_feature 1..20: note = chemically synthesized
  source 1..20: mol_type = other DNA
gcctttttttttttaatagg

SEQ ID NO: 52245 - DNA, 20 bp, synthetic construct
  misc_feature 1..20: note = chemically synthesized
  source 1..20: mol_type = other DNA
tgtaactgctgccttaaatg

SEQ ID NO: 52246 - DNA, 20 bp, synthetic construct
  misc_feature 1..20: note = chemically synthesized
  source 1..20: mol_type = other DNA
tgctgccttaaatgaagtca

SEQ ID NO: 52247 - DNA, 20 bp, synthetic construct
  misc_feature 1..20: note = chemically synthesized
  source 1..20: mol_type = other DNA
gaagtcacggttattataat

SEQ ID NO: 52248 - DNA, 20 bp, synthetic construct
  misc_feature 1..20: note = chemically synthesized
  source 1..20: mol_type = other DNA
aagtcacggttattataata

SEQ ID NO: 52249 - DNA, 20 bp, synthetic construct
  misc_feature 1..20: note = chemically synthesized
  source 1..20: mol_type = other DNA
gtcacggttattataataag

SEQ ID NO: 52250 - DNA, 20 bp, synthetic construct
  misc_feature 1..20: note = chemically synthesized
  source 1..20: mol_type = other DNA
gagaaaacaaaaatattgcc

SEQ ID NO: 52251 - DNA, 20 bp, synthetic construct
  misc_feature 1..20: note = chemically synthesized
  source 1..20: mol_type = other DNA
acaaaaatattgccgagaac

SEQ ID NO: 52252 - DNA, 20 bp, synthetic construct
  misc_feature 1..20: note = chemically synthesized
  source 1..20: mol_type = other DNA
caaaaatattgccgagaaca

SEQ ID NO: 52253 - DNA, 20 bp, synthetic construct
  misc_feature 1..20: note = chemically synthesized
  source 1..20: mol_type = other DNA
tgccgagaacaaggtgacaa

SEQ ID NO: 52254 - DNA, 20 bp, synthetic construct
  misc_feature 1..20: note = chemically synthesized
  source 1..20: mol_type = other DNA
gagaacaaggtgacaaaagt

SEQ ID NO: 52255 - DNA, 20 bp, synthetic construct
  misc_feature 1..20: note = chemically synthesized
  source 1..20: mol_type = other DNA
aaggtgacaaaagtaagatt

SEQ ID NO: 52256 - DNA, 20 bp, synthetic construct
  misc_feature 1..20: note = chemically synthesized
  source 1..20: mol_type = other DNA
aaaagtaagattcagaaaat

SEQ ID NO: 52257 - DNA, 20 bp, synthetic construct
  misc_feature 1..20: note = chemically synthesized
  source 1..20: mol_type = other DNA
gtaagattcagaaaatcaga

SEQ ID NO: 52258 - DNA, 20 bp, synthetic construct
  misc_feature 1..20: note = chemically synthesized
  source 1..20: mol_type = other DNA
attcagaaaatcagaaagtc

SEQ ID NO: 52259 - DNA, 20 bp, synthetic construct
  misc_feature 1..20: note = chemically synthesized
  source 1..20: mol_type = other DNA
catttaactcttacaccgaa

SEQ ID NO: 52260 - DNA, 20 bp, synthetic construct
  misc_feature 1..20: note = chemically synthesized
  source 1..20: mol_type = other DNA
aactcttacaccgaaaagct

SEQ ID NO: 52261 - DNA, 20 bp, synthetic construct
  misc_feature 1..20: note = chemically synthesized
  source 1..20: mol_type = other DNA
actcttacaccgaaaagcta

SEQ ID NO: 52262 - DNA, 20 bp, synthetic construct
  misc_feature 1..20: note = chemically synthesized
  source 1..20: mol_type = other DNA
tacaccgaaaagctaaggtc

SEQ ID NO: 52263 - DNA, 20 bp, synthetic construct
  misc_feature 1..20: note = chemically synthesized
  source 1..20: mol_type = other DNA
accgaaaagctaaggtccag

SEQ ID NO: 52264 - DNA, 20 bp, synthetic construct
  misc_feature 1..20: note = chemically synthesized
  source 1..20: mol_type = other DNA
ccgaaaagctaaggtccagt

SEQ ID NO: 52265 - DNA, 20 bp, synthetic construct
  misc_feature 1..20: note = chemically synthesized
  source 1..20: mol_type = other DNA
gaaaagctaaggtccagtgg

SEQ ID NO: 52266 - DNA, 20 bp, synthetic construct
  misc_feature 1..20: note = chemically synthesized
  source 1..20: mol_type = other DNA
taaggtccagtgggagaaat

SEQ ID NO: 52267 - DNA, 20 bp, synthetic construct
  misc_feature 1..20: note = chemically synthesized
  source 1..20: mol_type = other DNA
tgggagaaatcagtgattct

SEQ ID NO: 52268 - DNA, 20 bp, synthetic construct
  misc_feature 1..20: note = chemically synthesized
  source 1..20: mol_type = other DNA
gagaaatcagtgattcttag

SEQ ID NO: 52269 - DNA, 20 bp, synthetic construct
  misc_feature 1..20: note = chemically synthesized
  source 1..20: mol_type = other DNA
aatcagtgattcttagaagt

SEQ ID NO: 52270 - DNA, 20 bp, synthetic construct
  misc_feature 1..20: note = chemically synthesized
  source 1..20: mol_type = other DNA
tcagtgattcttagaagtga

SEQ ID NO: 52271 - DNA, 20 bp, synthetic construct
  misc_feature 1..20: note = chemically synthesized
  source 1..20: mol_type = other DNA
cagtgattcttagaagtgag

SEQ ID NO: 52272 - DNA, 20 bp, synthetic construct
  misc_feature 1..20: note = chemically synthesized
  source 1..20: mol_type = other DNA
agaagtgagaggacatgatt

SEQ ID NO: 52273 - DNA, 20 bp, synthetic construct
  misc_feature 1..20: note = chemically synthesized
  source 1..20: mol_type = other DNA
gaagtgagaggacatgattc

SEQ ID NO: 52274 - DNA, 20 bp, synthetic construct
  misc_feature 1..20: note = chemically synthesized
  source 1..20: mol_type = other DNA
gagaggacatgattcaggat

SEQ ID NO: 52275 - DNA, 20 bp, synthetic construct
  misc_feature 1..20: note = chemically synthesized
  source 1..20: mol_type = other DNA
caggattagaaatgtgtttt

SEQ ID NO: 52276 - DNA, 20 bp, synthetic construct
  misc_feature 1..20: note = chemically synthesized
  source 1..20: mol_type = other DNA
atctgctaataataaatcca

SEQ ID NO: 52277 - DNA, 20 bp, synthetic construct
  misc_feature 1..20: note = chemically synthesized
  source 1..20: mol_type = other DNA
tctgctaataataaatccac

SEQ ID NO: 52278 - DNA, 20 bp, synthetic construct
  misc_feature 1..20: note = chemically synthesized
  source 1..20: mol_type = other DNA
gctaataataaatccacagg

SEQ ID NO: 52279 - DNA, 20 bp, synthetic construct
  misc_feature 1..20: note = chemically synthesized
  source 1..20: mol_type = other DNA
ggcagatgttcactgtacac

SEQ ID NO: 52280 - DNA, 20 bp, synthetic construct
  misc_feature 1..20: note = chemically synthesized
  source 1..20: mol_type = other DNA
agatgttcactgtacaccag

SEQ ID NO: 52281 - DNA, 20 bp, synthetic construct
  misc_feature 1..20: note = chemically synthesized
  source 1..20: mol_type = other DNA
ccagcagtcttcaatgtttt

SEQ ID NO: 52282 - DNA, 20 bp, synthetic construct
  misc_feature 1..20: note = chemically synthesized
  source 1..20: mol_type = other DNA
gtcttcaatgtttttggtac

SEQ ID NO: 52283 - DNA, 20 bp, synthetic construct
  misc_feature 1..20: note = chemically synthesized
  source 1..20: mol_type = other DNA
tcttcaatgtttttggtacc

SEQ ID NO: 52284 - DNA, 20 bp, synthetic construct
  misc_feature 1..20: note = chemically synthesized
  source 1..20: mol_type = other DNA
cttcaatgtttttggtacca

SEQ ID NO: 52285 - DNA, 20 bp, synthetic construct
  misc_feature 1..20: note = chemically synthesized
  source 1..20: mol_type = other DNA
ggtaccagggactgcttttg

SEQ ID NO: 52286 - DNA, 20 bp, synthetic construct
  misc_feature 1..20: note = chemically synthesized
  source 1..20: mol_type = other DNA
accagggactgcttttgtgg

SEQ ID NO: 52287 - DNA, 20 bp, synthetic construct
  misc_feature 1..20: note = chemically synthesized
  source 1..20: mol_type = other DNA
ggactgcttttgtggaagac

SEQ ID NO: 52288 - DNA, 20 bp, synthetic construct
  misc_feature 1..20: note = chemically synthesized
  source 1..20: mol_type = other DNA
gactgcttttgtggaagaca

SEQ ID NO: 52289 - DNA, 20 bp, synthetic construct
  misc_feature 1..20: note = chemically synthesized
  source 1..20: mol_type = other DNA
cttttgtggaagacaaggtg

SEQ ID NO: 52290 - DNA, 20 bp, synthetic construct
  misc_feature 1..20: note = chemically synthesized
  source 1..20: mol_type = other DNA
ttttgtggaagacaaggtgc

SEQ ID NO: 52291 - DNA, 20 bp, synthetic construct
  misc_feature 1..20: note = chemically synthesized
  source 1..20: mol_type = other DNA
ttgtggaagacaaggtgcag

SEQ ID NO: 52292 - DNA, 20 bp, synthetic construct
  misc_feature 1..20: note = chemically synthesized
  source 1..20: mol_type = other DNA
tgtggaagacaaggtgcagg

SEQ ID NO: 52293 - DNA, 20 bp, synthetic construct
  misc_feature 1..20: note = chemically synthesized
  source 1..20: mol_type = other DNA
gtggaagacaaggtgcagga

SEQ ID NO: 52294 - DNA, 20 bp, synthetic construct
  misc_feature 1..20: note = chemically synthesized
  source 1..20: mol_type = other DNA
agacaaggtgcaggagggca

SEQ ID NO: 52295 - DNA, 20 bp, synthetic construct
  misc_feature 1..20: note = chemically synthesized
  source 1..20: mol_type = other DNA
ggtgcaggagggcatggttt

SEQ ID NO: 52296 - DNA, 20 bp, synthetic construct
  misc_feature 1..20: note = chemically synthesized
  source 1..20: mol_type = other DNA
gtgcaggagggcatggtttc

SEQ ID NO: 52297 - DNA, 20 bp, synthetic construct
  misc_feature 1..20: note = chemically synthesized
  source 1..20: mol_type = other DNA
aggatgaaactgttccacct

SEQ ID NO: 52298 - DNA, 20 bp, synthetic construct
  misc_feature 1..20: note = chemically synthesized
  source 1..20: mol_type = other DNA
gatgaaactgttccacctca

SEQ ID NO: 52299 - DNA, 20 bp, synthetic construct
  misc_feature 1..20: note = chemically synthesized
  source 1..20: mol_type = other DNA
actgttccacctcagagcat

SEQ ID NO: 52300 - DNA, 20 bp, synthetic construct
  misc_feature 1..20: note = chemically synthesized
  source 1..20: mol_type = other DNA
ctgttccacctcagagcatt

SEQ ID NO: 52301 - DNA, 20 bp, synthetic construct
  misc_feature 1..20: note = chemically synthesized
  source 1..20: mol_type = other DNA
cacctcagagcattaggcat

SEQ ID NO: 52302 - DNA, 20 bp, synthetic construct
  misc_feature 1..20: note = chemically synthesized
  source 1..20: mol_type = other DNA
attaggcattagattctcat

SEQ ID NO: 52303 - DNA, 20 bp, synthetic construct
  misc_feature 1..20: note = chemically synthesized
  source 1..20: mol_type = other DNA
aggcattagattctcataag

SEQ ID NO: 52304 - DNA, 20 bp, synthetic construct
  misc_feature 1..20: note = chemically synthesized
  source 1..20: mol_type = other DNA
tctcataagaagccgcaacc

SEQ ID NO: 52305 - DNA, 20 bp, synthetic construct
  misc_feature 1..20: note = chemically synthesized
  source 1..20: mol_type = other DNA
gatcccttgcatgcctctat

SEQ ID NO: 52306 - DNA, 20 bp, synthetic construct
  misc_feature 1..20: note = chemically synthesized
  source 1..20: mol_type = other DNA
tgccgccactgccgatgtga

SEQ ID NO: 52307 - DNA, 20 bp, synthetic construct
  misc_feature 1..20: note = chemically synthesized
  source 1..20: mol_type = other DNA
gccgccactgccgatgtgac

SEQ ID NO: 52308 - DNA, 20 bp, synthetic construct
  misc_feature 1..20: note = chemically synthesized
  source 1..20: mol_type = other DNA
cgccactgccgatgtgacag

SEQ ID NO: 52309 - DNA, 20 bp, synthetic construct
  misc_feature 1..20: note = chemically synthesized
  source 1..20: mol_type = other DNA
gccactgccgatgtgacagg

SEQ ID NO: 52310 - DNA, 20 bp, synthetic construct
  misc_feature 1..20: note = chemically synthesized
  source 1..20: mol_type = other DNA
cactgccgatgtgacaggag

SEQ ID NO: 52311 - DNA, 20 bp, synthetic construct
  misc_feature 1..20: note = chemically synthesized
  source 1..20: mol_type = other DNA
actgccgatgtgacaggagg

SEQ ID NO: 52312 - DNA, 20 bp, synthetic construct
  misc_feature 1..20: note = chemically synthesized
  source 1..20: mol_type = other DNA
tgccgatgtgacaggaggag

SEQ ID NO: 52313 - DNA, 20 bp, synthetic construct
  misc_feature 1..20: note = chemically synthesized
  source 1..20: mol_type = other DNA
atgtgacaggaggaggagct

SEQ ID NO: 52314 - DNA, 20 bp, synthetic construct
  misc_feature 1..20: note = chemically synthesized
  source 1..20: mol_type = other DNA
tgtgacaggaggaggagctc

SEQ ID NO: 52315 - DNA, 20 bp, synthetic construct
  misc_feature 1..20: note = chemically synthesized
  source 1..20: mol_type = other DNA
gacaggaggaggagctcagg

SEQ ID NO: 52316 - DNA, 20 bp, synthetic construct
  misc_feature 1..20: note = chemically synthesized
  source 1..20: mol_type = other DNA
cttgctcatccccctgctgt

SEQ ID NO: 52317 - DNA, 20 bp, synthetic construct
  misc_feature 1..20: note = chemically synthesized
  source 1..20: mol_type = other DNA
tcatccccctgctgtgagac

SEQ ID NO: 52318 - DNA, 20 bp, synthetic construct
  misc_feature 1..20: note = chemically synthesized
  source 1..20: mol_type = other DNA
catccccctgctgtgagacc

SEQ ID NO: 52319 - DNA, 20 bp, synthetic construct
  misc_feature 1..20: note = chemically synthesized
  source 1..20: mol_type = other DNA
ctgctgtgagaccaggttcc

SEQ ID NO: 52320 - DNA, 20 bp, synthetic construct
  misc_feature 1..20: note = chemically synthesized
  source 1..20: mol_type = other DNA
ctgtgagaccaggttcctag

SEQ ID NO: 52321 - DNA, 20 bp, synthetic construct
  misc_feature 1..20: note = chemically synthesized
  source 1..20: mol_type = other DNA
tgtgagaccaggttcctagc

SEQ ID NO: 52322 - DNA, 20 bp, synthetic construct
  misc_feature 1..20: note = chemically synthesized
  source 1..20: mol_type = other DNA
accaggttcctagcaggcca

SEQ ID NO: 52323 - DNA, 20 bp, synthetic construct
  misc_feature 1..20: note = chemically synthesized
  source 1..20: mol_type = other DNA
gttcctagcaggccacggac

SEQ ID NO: 52324 - DNA, 20 bp, synthetic construct
  misc_feature 1..20: note = chemically synthesized
  source 1..20: mol_type = other DNA
agcaggccacggaccagtac

SEQ ID NO: 52325 - DNA, 20 bp, synthetic construct
  misc_feature 1..20: note = chemically synthesized
  source 1..20: mol_type = other DNA
ggccacggaccagtactggt

SEQ ID NO: 52326 - DNA, 20 bp, synthetic construct
  misc_feature 1..20: note = chemically synthesized
  source 1..20: mol_type = other DNA
cacggaccagtactggtaag

SEQ ID NO: 52327 - DNA, 20 bp, synthetic construct
  misc_feature 1..20: note = chemically synthesized
  source 1..20: mol_type = other DNA
gaccagtactggtaagtggc

SEQ ID NO: 52328 - DNA, 20 bp, synthetic construct
  misc_feature 1..20: note = chemically synthesized
  source 1..20: mol_type = other DNA
accagtactggtaagtggcc

SEQ ID NO: 52329 - DNA, 20 bp, synthetic construct
  misc_feature 1..20: note = chemically synthesized
  source 1..20: mol_type = other DNA
actatacctccctattttcc

SEQ ID NO: 52330 - DNA, 20 bp, synthetic construct
  misc_feature 1..20: note = chemically synthesized
  source 1..20: mol_type = other DNA
ctatacctccctattttcct

SEQ ID NO: 52331 - DNA, 20 bp, synthetic construct
  misc_feature 1..20: note = chemically synthesized
  source 1..20: mol_type = other DNA
atcaaaatcgtattgttaaa

SEQ ID NO: 52332 - DNA, 20 bp, synthetic construct
  misc_feature 1..20: note = chemically synthesized
  source 1..20: mol_type = other DNA
tcgtattgttaaacagactt

SEQ ID NO: 52333 - DNA, 20 bp, synthetic construct
  misc_feature 1..20: note = chemically synthesized
  source 1..20: mol_type = other DNA
gtattgttaaacagacttaa

SEQ ID NO: 52334 - DNA, 20 bp, synthetic construct
  misc_feature 1..20: note = chemically synthesized
  source 1..20: mol_type = other DNA
acttaagagatgttctactt

SEQ ID NO: 52335 - DNA, 20 bp, synthetic construct
  misc_feature 1..20: note = chemically synthesized
  source 1..20: mol_type = other DNA
cttaagagatgttctacttg

SEQ ID NO: 52336 - DNA, 20 bp, synthetic construct
  misc_feature 1..20: note = chemically synthesized
  source 1..20: mol_type = other DNA
gaggttgtgtctccattccc

SEQ ID NO: 52337 - DNA, 20 bp, synthetic construct
  misc_feature 1..20: note = chemically synthesized
  source 1..20: mol_type = other DNA
aggttgtgtctccattccct

SEQ ID NO: 52338 - DNA, 20 bp, synthetic construct
  misc_feature 1..20: note = chemically synthesized
  source 1..20: mol_type = other DNA
atatttgttaccattacttg

SEQ ID NO: 52339 - DNA, 20 bp, synthetic construct
  misc_feature 1..20: note = chemically synthesized
  source 1..20: mol_type = other DNA
tttgttaccattacttgcag

SEQ ID NO: 52340 - DNA, 20 bp, synthetic construct
  misc_feature 1..20: note = chemically synthesized
  source 1..20: mol_type = other DNA
tacttgcagaagataattgc

SEQ ID NO: 52341 - DNA, 20 bp, synthetic construct
  misc_feature 1..20: note = chemically synthesized
  source 1..20: mol_type = other DNA
cttgcagaagataattgcta

SEQ ID NO: 52342 - DNA, 20 bp, synthetic construct
  misc_feature 1..20: note = chemically synthesized
  source 1..20: mol_type = other DNA
gcagaagataattgctagag

SEQ ID NO: 52343 - DNA, 20 bp, synthetic construct
  misc_feature 1..20: note = chemically synthesized
  source 1..20: mol_type = other DNA
ataattgctagagtagtgaa

SEQ ID NO: 52344 - DNA, 20 bp, synthetic construct
  misc_feature 1..20: note = chemically synthesized
  source 1..20: mol_type = other DNA
aattgctagagtagtgaata

SEQ ID NO: 52345 - DNA, 20 bp, synthetic construct
  misc_feature 1..20: note = chemically synthesized
  source 1..20: mol_type = other DNA
attgctagagtagtgaatag

SEQ ID NO: 52346 - DNA, 20 bp, synthetic construct
  misc_feature 1..20: note = chemically synthesized
  source 1..20: mol_type = other DNA
gagtagtgaatagaggcctc

SEQ ID NO: 52347 - DNA, 20 bp, synthetic construct
  misc_feature 1..20: note = chemically synthesized
  source 1..20: mol_type = other DNA
tgaatagaggcctccagatg

SEQ ID NO: 52348 - DNA, 20 bp, synthetic construct
  misc_feature 1..20: note = chemically synthesized
  source 1..20: mol_type = other DNA
gaatagaggcctccagatga

SEQ ID NO: 52349 - DNA, 20 bp, synthetic construct
  misc_feature 1..20: note = chemically synthesized
  source 1..20: mol_type = other DNA
ccagatgaaggaaataaaaa

SEQ ID NO: 52350 - DNA, 20 bp, synthetic construct
  misc_feature 1..20: note = chemically synthesized
  source 1..20: mol_type = other DNA
ataaaaatagtccattttcc

SEQ ID NO: 52351 - DNA, 20 bp, synthetic construct
  misc_feature 1..20: note = chemically synthesized
  source 1..20: mol_type = other DNA
aaaatagtccattttcccag

SEQ ID NO: 52352 - DNA, 20 bp, synthetic construct
  misc_feature 1..20: note = chemically synthesized
  source 1..20: mol_type = other DNA
attttcccagaagtctcttg

SEQ ID NO: 52353 - DNA, 20 bp, synthetic construct
  misc_feature 1..20: note = chemically synthesized
  source 1..20: mol_type = other DNA
cttaaaaattaatgccaacc

SEQ ID NO: 52354 - DNA, 20 bp, synthetic construct
  misc_feature 1..20: note = chemically synthesized
  source 1..20: mol_type = other DNA
aaattaatgccaacctagcc

SEQ ID NO: 52355 - DNA, 20 bp, synthetic construct
  misc_feature 1..20: note = chemically synthesized
  source 1..20: mol_type = other DNA
cctagccaagaacacccctg

SEQ ID NO: 52356 - DNA, 20 bp, synthetic construct
  misc_feature 1..20: note = chemically synthesized
  source 1..20: mol_type = other DNA
agccaagaacacccctgcag

SEQ ID NO: 52357 - DNA, 20 bp, synthetic construct
  misc_feature 1..20: note = chemically synthesized
  source 1..20: mol_type = other DNA
gccaagaacacccctgcagt

SEQ ID NO: 52358 - DNA, 20 bp, synthetic construct
  misc_feature 1..20: note = chemically synthesized
  source 1..20: mol_type = other DNA
caagaacacccctgcagtag

SEQ ID NO: 52359 - DNA, 20 bp, synthetic construct
  misc_feature 1..20: note = chemically synthesized
  source 1..20: mol_type = other DNA
cagtaggagtcgatgtccta

SEQ ID NO: 52360 - DNA, 20 bp, synthetic construct
  misc_feature 1..20: note = chemically synthesized
  source 1..20: mol_type = other DNA
tcgatgtcctaaagcttttc

SEQ ID NO: 52361 - DNA, 20 bp, synthetic construct
  misc_feature 1..20: note = chemically synthesized
  source 1..20: mol_type = other DNA
tcctaaagcttttccagtaa

SEQ ID NO: 52362 - DNA, 20 bp, synthetic construct
  misc_feature 1..20: note = chemically synthesized
  source 1..20: mol_type = other DNA
aagcttttccagtaaaagtg

SEQ ID NO: 52363 - DNA, 20 bp, synthetic construct
  misc_feature 1..20: note = chemically synthesized
  source 1..20: mol_type = other DNA
aagtgtggtttctgcccctg

SEQ ID NO: 52364 - DNA, 20 bp, synthetic construct
  misc_feature 1..20: note = chemically synthesized
  source 1..20: mol_type = other DNA
ggtttctgcccctgcagtct

SEQ ID NO: 52365 - DNA, 20 bp, synthetic construct
  misc_feature 1..20: note = chemically synthesized
  source 1..20: mol_type = other DNA
gcagtcttggcaccatgtaa

SEQ ID NO: 52366 - DNA, 20 bp, synthetic construct
  misc_feature 1..20: note = chemically synthesized
  source 1..20: mol_type = other DNA
tggcaccatgtaatggcaca

SEQ ID NO: 52367 - DNA, 20 bp, synthetic construct
  misc_feature 1..20: note = chemically synthesized
  source 1..20: mol_type = other DNA
gtaatggcacatagaaaatg

SEQ ID NO: 52368 - DNA, 20 bp, synthetic construct
  misc_feature 1..20: note = chemically synthesized
  source 1..20: mol_type = other DNA
taatggcacatagaaaatgc

SEQ ID NO: 52369 - DNA, 20 bp, synthetic construct
  misc_feature 1..20: note = chemically synthesized
  source 1..20: mol_type = other DNA
acatagaaaatgcaggcttt

SEQ ID NO: 52370 - DNA, 20 bp, synthetic construct
  misc_feature 1..20: note = chemically synthesized
  source 1..20: mol_type = other DNA
catagaaaatgcaggctttc

SEQ ID NO: 52371 - DNA, 20 bp, synthetic construct
  misc_feature 1..20: note = chemically synthesized
  source 1..20: mol_type = other DNA
aaatgcaggctttcaggttg

SEQ ID NO: 52372 - DNA, 20 bp, synthetic construct
  misc_feature 1..20: note = chemically synthesized
  source 1..20: mol_type = other DNA
gcaggctttcaggttgcagc

SEQ ID NO: 52373 - DNA, 20 bp, synthetic construct
  misc_feature 1..20: note = chemically synthesized
  source 1..20: mol_type = other DNA
ttcaggttgcagccagaact

SEQ ID NO: 52374 - DNA, 20 bp, synthetic construct
  misc_feature 1..20: note = chemically synthesized
  source 1..20: mol_type = other DNA
tcaggttgcagccagaactg

SEQ ID NO: 52375 - DNA, 20 bp, synthetic construct
  misc_feature 1..20: note = chemically synthesized
  source 1..20: mol_type = other DNA
gccagaactgaggaatcaat

SEQ ID NO: 52376 - DNA, 20 bp, synthetic construct
  misc_feature 1..20: note = chemically synthesized
  source 1..20: mol_type = other DNA
ctgaggaatcaatcggtgtt

SEQ ID NO: 52377 - DNA, 20 bp, synthetic construct
  misc_feature 1..20: note = chemically synthesized
  source 1..20: mol_type = other DNA
tcaatcggtgtttagctttt

SEQ ID NO: 52378 - DNA, 20 bp, synthetic construct
  misc_feature 1..20: note = chemically synthesized
  source 1..20: mol_type = other DNA
gtgtttagcttttgagatgc

SEQ ID NO: 52379 - DNA, 20 bp, synthetic construct
  misc_feature 1..20: note = chemically synthesized
  source 1..20: mol_type = other DNA
gctggtaatgttctctttct

SEQ ID NO: 52380 - DNA, 20 bp, synthetic construct
  misc_feature 1..20: note = chemically synthesized
  source 1..20: mol_type = other DNA
aatgttctctttcttggtct

SEQ ID NO: 52381 - DNA, 20 bp, synthetic construct
  misc_feature 1..20: note = chemically synthesized
  source 1..20: mol_type = other DNA
ttggtctgagtgtttgttaa

SEQ ID NO: 52382 - DNA, 20 bp, synthetic construct
  misc_feature 1..20: note = chemically synthesized
  source 1..20: mol_type = other DNA
gaataataaaatataaattt

SEQ ID NO: 52383 - DNA, 20 bp, synthetic construct
  misc_feature 1..20: note = chemically synthesized
  source 1..20: mol_type = other DNA
aatataaatttaagaaatat

SEQ ID NO: 52384 - DNA, 20 bp, synthetic construct
  misc_feature 1..20: note = chemically synthesized
  source 1..20: mol_type = other DNA
aatttaagaaatatgagtga

SEQ ID NO: 52385 - DNA, 20 bp, synthetic construct
  misc_feature 1..20: note = chemically synthesized
  source 1..20: mol_type = other DNA
tgtcaatttacatataaacc

SEQ ID NO: 52386 - DNA, 20 bp, synthetic construct
  misc_feature 1..20: note = chemically synthesized
  source 1..20: mol_type = other DNA
caatttacatataaacctgg

SEQ ID NO: 52387 - DNA, 20 bp, synthetic construct
  misc_feature 1..20: note = chemically synthesized
  source 1..20: mol_type = other DNA
ctactttctctaatccacta

SEQ ID NO: 52388 - DNA, 20 bp, synthetic construct
  misc_feature 1..20: note = chemically synthesized
  source 1..20: mol_type = other DNA
tctctaatccactaaagcta

SEQ ID NO: 52389 - DNA, 20 bp, synthetic construct
  misc_feature 1..20: note = chemically synthesized
  source 1..20: mol_type = other DNA
actaaagctatagatgtaca

SEQ ID NO: 52390 - DNA, 20 bp, synthetic construct
  misc_feature 1..20: note = chemically synthesized
  source 1..20: mol_type = other DNA
taaagctatagatgtacaca

SEQ ID NO: 52391 - DNA, 20 bp, synthetic construct
  misc_feature 1..20: note = chemically synthesized
  source 1..20: mol_type = other DNA
atgtacacagagacactgtg

SEQ ID NO: 52392 - DNA, 20 bp, synthetic construct
  misc_feature 1..20: note = chemically synthesized
  source 1..20: mol_type = other DNA
cagagacactgtgaagaaaa

SEQ ID NO: 52393 - DNA, 20 bp, synthetic construct
  misc_feature 1..20: note = chemically synthesized
  source 1..20: mol_type = other DNA
atatgtatgaacaaattgat

SEQ ID NO: 52394 - DNA, 20 bp, synthetic construct
  misc_feature 1..20: note = chemically synthesized
  source 1..20: mol_type = other DNA
aaatatgattttttaaaaaa

SEQ ID NO: 52395 - DNA, 20 bp, synthetic construct
  misc_feature 1..20: note = chemically synthesized
  source 1..20: mol_type = other DNA
tgattttttaaaaaacagaa

SEQ ID NO: 52396 - DNA, 20 bp, synthetic construct
  misc_feature 1..20: note = chemically synthesized
  source 1..20: mol_type = other DNA
gattttttaaaaaacagaac

SEQ ID NO: 52397 - DNA, 20 bp, synthetic construct
  misc_feature 1..20: note = chemically synthesized
  source 1..20: mol_type = other DNA
atctgaaatctatatgtcta

SEQ ID NO: 52398 - DNA, 20 bp, synthetic construct
  misc_feature 1..20: note = chemically synthesized
  source 1..20: mol_type = other DNA
aaatctatatgtctacagaa

SEQ ID NO: 52399 - DNA, 20 bp, synthetic construct
  misc_feature 1..20: note = chemically synthesized
  source 1..20: mol_type = other DNA
aatctatatgtctacagaaa

SEQ ID NO: 52400 - DNA, 20 bp, synthetic construct
  misc_feature 1..20: note = chemically synthesized
  source 1..20: mol_type = other DNA
ctacagaaaaggataccaat

SEQ ID NO: 52401 - DNA, 20 bp, synthetic construct
  misc_feature 1..20: note = chemically synthesized
  source 1..20: mol_type = other DNA
gagaaaaaacgttatctgca

SEQ ID NO: 52402 - DNA, 20 bp, synthetic construct
  misc_feature 1..20: note = chemically synthesized
  source 1..20: mol_type = other DNA
gaaaaaacgttatctgcaaa

SEQ ID NO: 52403 - DNA, 20 bp, synthetic construct
  misc_feature 1..20: note = chemically synthesized
  source 1..20: mol_type = other DNA
tatctgcaaagagcattttc

SEQ ID NO: 52404 - DNA, 20 bp, synthetic construct
  misc_feature 1..20: note = chemically synthesized
  source 1..20: mol_type = other DNA
gagcattttctggaaaaaca

SEQ ID NO: 52405 - DNA, 20 bp, synthetic construct
  misc_feature 1..20: note = chemically synthesized
  source 1..20: mol_type = other DNA
aaacacagaaattacttata

SEQ ID NO: 52406 - DNA, 20 bp, synthetic construct
  misc_feature 1..20: note = chemically synthesized
  source 1..20: mol_type = other DNA
attacttataaagcattcgt

SEQ ID NO: 52407 - DNA, 20 bp, synthetic construct
  misc_feature 1..20: note = chemically synthesized
  source 1..20: mol_type = other DNA
ttacttataaagcattcgtg

SEQ ID NO: 52408 - DNA, 20 bp, synthetic construct
  misc_feature 1..20: note = chemically synthesized
  source 1..20: mol_type = other DNA
tacttataaagcattcgtga

SEQ ID NO: 52409 - DNA, 20 bp, synthetic construct
  misc_feature 1..20: note = chemically synthesized
  source 1..20: mol_type = other DNA
acttataaagcattcgtgag

SEQ ID NO: 52410 - DNA, 20 bp, synthetic construct
  misc_feature 1..20: note = chemically synthesized
  source 1..20: mol_type = other DNA
tataaagcattcgtgagggg

SEQ ID NO: 52411 - DNA, 20 bp, synthetic construct
  misc_feature 1..20: note = chemically synthesized
  source 1..20: mol_type = other DNA
ataaagcattcgtgaggggt

SEQ ID NO: 52412 - DNA, 20 bp, synthetic construct
  misc_feature 1..20: note = chemically synthesized
  source 1..20: mol_type = other DNA
taaagcattcgtgaggggta

SEQ ID NO: 52413 - DNA, 20 bp, synthetic construct
  misc_feature 1..20: note = chemically synthesized
  source 1..20: mol_type = other DNA
gtgaggggtagggctaaaaa

SEQ ID NO: 52414 - DNA, 20 bp, synthetic construct
  misc_feature 1..20: note = chemically synthesized
  source 1..20: mol_type = other DNA
aggggtagggctaaaaatgg

SEQ ID NO: 52415 - DNA, 20 bp, synthetic construct
  misc_feature 1..20: note = chemically synthesized
  source 1..20: mol_type = other DNA
tagggctaaaaatggtagaa

SEQ ID NO: 52416 - DNA, 20 bp, synthetic construct
  misc_feature 1..20: note = chemically synthesized
  source 1..20: mol_type = other DNA
agggctaaaaatggtagaaa

SEQ ID NO: 52417 - DNA, 20 bp, synthetic construct
  misc_feature 1..20: note = chemically synthesized
  source 1..20: mol_type = other DNA
gaaaaggtgaatacctgttt

SEQ ID NO: 52418 - DNA, 20 bp, synthetic construct
  misc_feature 1..20: note = chemically synthesized
  source 1..20: mol_type = other DNA
aaaaggtgaatacctgttta

SEQ ID NO: 52419 - DNA, 20 bp, synthetic construct
  misc_feature 1..20: note = chemically synthesized
  source 1..20: mol_type = other DNA
acctgtttaaggttgcctaa

SEQ ID NO: 52420 - DNA, 20 bp, synthetic construct
  misc_feature 1..20: note = chemically synthesized
  source 1..20: mol_type = other DNA
gtttaaggttgcctaaaaga

SEQ ID NO: 52421 - DNA, 20 bp, synthetic construct
  misc_feature 1..20: note = chemically synthesized
  source 1..20: mol_type = other DNA
aaggttgcctaaaagatagc

SEQ ID NO: 52422 - DNA, 20 bp, synthetic construct
  misc_feature 1..20: note = chemically synthesized
  source 1..20: mol_type = other DNA
aggttgcctaaaagatagcc

SEQ ID NO: 52423 - DNA, 20 bp, synthetic construct
  misc_feature 1..20: note = chemically synthesized
  source 1..20: mol_type = other DNA
gccaggtactcatttctctt

SEQ ID NO: 52424 - DNA, 20 bp, synthetic construct
  misc_feature 1..20: note = chemically synthesized
  source 1..20: mol_type = other DNA
tactcatttctctttagttc

SEQ ID NO: 52425 - DNA, 20 bp, synthetic construct
  misc_feature 1..20: note = chemically synthesized
  source 1..20: mol_type = other DNA
tttagttctggcaaaatgat

SEQ ID NO: 52426 - DNA, 20 bp, synthetic construct
  misc_feature 1..20: note = chemically synthesized
  source 1..20: mol_type = other DNA
ggcaaaatgattagtgtctg

SEQ ID NO: 52427 - DNA, 20 bp, synthetic construct
  misc_feature 1..20: note = chemically synthesized
  source 1..20: mol_type = other DNA
taaccaaatcaatgatgatc

SEQ ID NO: 52428 - DNA, 20 bp, synthetic construct
  misc_feature 1..20: note = chemically synthesized
  source 1..20: mol_type = other DNA
atcaatgatgatccagacac

SEQ ID NO: 52429 - DNA, 20 bp, synthetic construct
  misc_feature 1..20: note = chemically synthesized
  source 1..20: mol_type = other DNA
tcaatgatgatccagacact

SEQ ID NO: 52430 - DNA, 20 bp, synthetic construct
  misc_feature 1..20: note = chemically synthesized
  source 1..20: mol_type = other DNA
gatccagacactgggaaatt

SEQ ID NO: 52431 - DNA, 20 bp, synthetic construct
  misc_feature 1..20: note = chemically synthesized
  source 1..20: mol_type = other DNA
acactgggaaattcagtgca

SEQ ID NO: 52432 - DNA, 20 bp, synthetic construct
  misc_feature 1..20: note = chemically synthesized
  source 1..20: mol_type = other DNA
cactgggaaattcagtgcaa

SEQ ID NO: 52433 - DNA, 20 bp, synthetic construct
  misc_feature 1..20: note = chemically synthesized
  source 1..20: mol_type = other DNA
aaattcagtgcaaaggatgc

SEQ ID NO: 52434 - DNA, 20 bp, synthetic construct
  misc_feature 1..20: note = chemically synthesized
  source 1..20: mol_type = other DNA
aattcagtgcaaaggatgcc

SEQ ID NO: 52435 - DNA, 20 bp, synthetic construct
  misc_feature 1..20: note = chemically synthesized
  source 1..20: mol_type = other DNA
gtgcaaaggatgccaggact

SEQ ID NO: 52436 - DNA, 20 bp, synthetic construct
  misc_feature 1..20: note = chemically synthesized
  source 1..20: mol_type = other DNA
tgcaaaggatgccaggacta

SEQ ID NO: 52437 - DNA, 20 bp, synthetic construct
  misc_feature 1..20: note = chemically synthesized
  source 1..20: mol_type = other DNA
ctaaggtgtaatatatgaaa

SEQ ID NO: 52438 - DNA, 20 bp, synthetic construct
  misc_feature 1..20: note = chemically synthesized
  source 1..20: mol_type = other DNA
aaggtgtaatatatgaaaca

SEQ ID NO: 52439 - DNA, 20 bp, synthetic construct
  misc_feature 1..20: note = chemically synthesized
  source 1..20: mol_type = other DNA
ggtgtaatatatgaaacaga

SEQ ID NO: 52440 - DNA, 20 bp, synthetic construct
  misc_feature 1..20: note = chemically synthesized
  source 1..20: mol_type = other DNA
gaaacagagagattatgcaa

SEQ ID NO: 52441 - DNA, 20 bp, synthetic construct
  misc_feature 1..20: note = chemically synthesized
  source 1..20: mol_type = other DNA
gaatgatgataaactgtctc

SEQ ID NO: 52442 - DNA, 20 bp, synthetic construct
  misc_feature 1..20: note = chemically synthesized
  source 1..20: mol_type = other DNA
atgatgataaactgtctcaa

SEQ ID NO: 52443 - DNA, 20 bp, synthetic construct
  misc_feature 1..20: note = chemically synthesized
  source 1..20: mol_type = other DNA
tgataaactgtctcaagaga

SEQ ID NO: 52444 - DNA, 20 bp, synthetic construct
  misc_feature 1..20: note = chemically synthesized
  source 1..20: mol_type = other DNA
gataaactgtctcaagagaa

SEQ ID NO: 52445 - DNA, 20 bp, synthetic construct
  misc_feature 1..20: note = chemically synthesized
  source 1..20: mol_type = other DNA
gtctcaagagaaaggactaa

SEQ ID NO: 52446 - DNA, 20 bp, synthetic construct
  misc_feature 1..20: note = chemically synthesized
  source 1..20: mol_type = other DNA
gagaaaggactaatagatat

SEQ ID NO: 52447 - DNA, 20 bp, synthetic construct
  misc_feature 1..20: note = chemically synthesized
  source 1..20: mol_type = other DNA
actaatagatattggcattt

SEQ ID NO: 52448 - DNA, 20 bp, synthetic construct
  misc_feature 1..20: note = chemically synthesized
  source 1..20: mol_type = other DNA
gcatttgagtattcgcttac

SEQ ID NO: 52449 - DNA, 20 bp, synthetic construct
  misc_feature 1..20: note = chemically synthesized
  source 1..20: mol_type = other DNA
tgagtattcgcttactggat

SEQ ID NO: 52450 - DNA, 20 bp, synthetic construct
  misc_feature 1..20: note = chemically synthesized
  source 1..20: mol_type = other DNA
tattcgcttactggattagc

SEQ ID NO: 52451 - DNA, 20 bp, synthetic construct
  misc_feature 1..20: note = chemically synthesized
  source 1..20: mol_type = other DNA
attcgcttactggattagct

SEQ ID NO: 52452 - DNA, 20 bp, synthetic construct
  misc_feature 1..20: note = chemically synthesized
  source 1..20: mol_type = other DNA
tagctaggcttctttctgat

SEQ ID NO: 52453 - DNA, 20 bp, synthetic construct
  misc_feature 1..20: note = chemically synthesized
  source 1..20: mol_type = other DNA
ttctttctgatcagccttca

SEQ ID NO: 52454 - DNA, 20 bp, synthetic construct
  misc_feature 1..20: note = chemically synthesized
  source 1..20: mol_type = other DNA
tgatcagccttcaaagtaac

SEQ ID NO: 52455 - DNA, 20 bp, synthetic construct
  misc_feature 1..20: note = chemically synthesized
  source 1..20: mol_type = other DNA
cagccttcaaagtaactggc

SEQ ID NO: 52456 - DNA, 20 bp, synthetic construct
  misc_feature 1..20: note = chemically synthesized
  source 1..20: mol_type = other DNA
aactaattgtaccgtgttca

SEQ ID NO: 52457 - DNA, 20 bp, synthetic construct
  misc_feature 1..20: note = chemically synthesized
  source 1..20: mol_type = other DNA
ttttattattattatacttt

SEQ ID NO: 52458 - DNA, 20 bp, synthetic construct
  misc_feature 1..20: note = chemically synthesized
  source 1..20: mol_type = other DNA
tattattatactttaagttt

SEQ ID NO: 52459 - DNA, 20 bp, synthetic construct
  misc_feature 1..20: note = chemically synthesized
  source 1..20: mol_type = other DNA
attattatactttaagtttt

SEQ ID NO: 52460 - DNA, 20 bp, synthetic construct
  misc_feature 1..20: note = chemically synthesized
  source 1..20: mol_type = other DNA
ttattatactttaagtttta

SEQ ID NO: 52461 - DNA, 20 bp, synthetic construct
  misc_feature 1..20: note = chemically synthesized
  source 1..20: mol_type = other DNA
gggtacatgtgcacaatgtg

SEQ ID NO: 52462 - DNA, 20 bp, synthetic construct
  misc_feature 1..20: note = chemically synthesized
  source 1..20: mol_type = other DNA
ggtacatgtgcacaatgtgc

SEQ ID NO: 52463 - DNA, 20 bp, synthetic construct
  misc_feature 1..20: note = chemically synthesized
  source 1..20: mol_type = other DNA
catgtgcacaatgtgcaggt

SEQ ID NO: 52464 - DNA, 20 bp, synthetic construct
  misc_feature 1..20: note = chemically synthesized
  source 1..20: mol_type = other DNA
tatgtatacatgtgccatgc

SEQ ID NO: 52465 - DNA, 20 bp, synthetic construct
  misc_feature 1..20: note = chemically synthesized
  source 1..20: mol_type = other DNA
tcacccattaactcatcatt

SEQ ID NO: 52466 - DNA, 20 bp, synthetic construct
  misc_feature 1..20: note = chemically synthesized
  source 1..20: mol_type = other DNA
attaactcatcatttagcat

SEQ ID NO: 52467 - DNA, 20 bp, synthetic construct
  misc_feature 1..20: note = chemically synthesized
  source 1..20: mol_type = other DNA
ttaactcatcatttagcatt

SEQ ID NO: 52468 - DNA, 20 bp, synthetic construct
  misc_feature 1..20: note = chemically synthesized
  source 1..20: mol_type = other DNA
tccctccccccaccccacaa

SEQ ID NO: 52469 - DNA, 20 bp, synthetic construct
  misc_feature 1..20: note = chemically synthesized
  source 1..20: mol_type = other DNA
ccccaccccacaacagtccc

SEQ ID NO: 52470 - DNA, 20 bp, synthetic construct
  misc_feature 1..20: note = chemically synthesized
  source 1..20: mol_type = other DNA
ccaccccacaacagtcccca

SEQ ID NO: 52471 - DNA, 20 bp, synthetic construct
  misc_feature 1..20: note = chemically synthesized
  source 1..20: mol_type = other DNA
attgttcaattcccacctat

SEQ ID NO: 52472 - DNA, 20 bp, synthetic construct
  misc_feature 1..20: note = chemically synthesized
  source 1..20: mol_type = other DNA
ttcaattcccacctatgagt

SEQ ID NO: 52473 - DNA, 20 bp, synthetic construct
  misc_feature 1..20: note = chemically synthesized
  source 1..20: mol_type = other DNA
cacctatgagtgagaacatg

SEQ ID NO: 52474 - DNA, 20 bp, synthetic construct
  misc_feature 1..20: note = chemically synthesized
  source 1..20: mol_type = other DNA
gagtgagaacatgcagtgtt

SEQ ID NO: 52475 - DNA, 20 bp, synthetic construct
  misc_feature 1..20: note = chemically synthesized
  source 1..20: mol_type = other DNA
ttggtttttcgtccttgcga

SEQ ID NO: 52476 - DNA, 20 bp, synthetic construct
  misc_feature 1..20: note = chemically synthesized
  source 1..20: mol_type = other DNA
cgtccttgcgatagtttact

SEQ ID NO: 52477 - DNA, 20 bp, synthetic construct
  misc_feature 1..20: note = chemically synthesized
  source 1..20: mol_type = other DNA
atttcatccatgtccctaca

SEQ ID NO: 52478 - DNA, 20 bp, synthetic construct
  misc_feature 1..20: note = chemically synthesized
  source 1..20: mol_type = other DNA
tttcatccatgtccctacaa

SEQ ID NO: 52479 - DNA, 20 bp, synthetic construct
  misc_feature 1..20: note = chemically synthesized
  source 1..20: mol_type = other DNA
catgaactcatcctttttta

SEQ ID NO: 52480 - DNA, 20 bp, synthetic construct
  misc_feature 1..20: note = chemically synthesized
  source 1..20: mol_type = other DNA
catccttttttatggctgca

SEQ ID NO: 52481 - DNA, 20 bp, synthetic construct
  misc_feature 1..20: note = chemically synthesized
  source 1..20: mol_type = other DNA
tatggctgcatagtattcca

SEQ ID NO: 52482 - DNA, 20 bp, synthetic construct
  misc_feature 1..20: note = chemically synthesized
  source 1..20: mol_type = other DNA
tgtgccacattttcttaatc

SEQ ID NO: 52483 - DNA, 20 bp, synthetic construct
  misc_feature 1..20: note = chemically synthesized
  source 1..20: mol_type = other DNA
ttaatccagtctatcattgt

SEQ ID NO: 52484 - DNA, 20 bp, synthetic construct
  misc_feature 1..20: note = chemically synthesized
  source 1..20: mol_type = other DNA
gtctatcattgttggacatt

SEQ ID NO: 52485 - DNA, 20 bp, synthetic construct
  misc_feature 1..20: note = chemically synthesized
  source 1..20: mol_type = other DNA
tctatcattgttggacattt

SEQ ID NO: 52486 - DNA, 20 bp, synthetic construct
  misc_feature 1..20: note = chemically synthesized
  source 1..20: mol_type = other DNA
tcattgttggacatttgggt

SEQ ID NO: 52487 - DNA, 20 bp, synthetic construct
  misc_feature 1..20: note = chemically synthesized
  source 1..20: mol_type = other DNA
tggacatttgggttggttcc

SEQ ID NO: 52488 - DNA, 20 bp, synthetic construct
  misc_feature 1..20: note = chemically synthesized
  source 1..20: mol_type = other DNA
caagtctttgctattgtgaa

SEQ ID NO: 52489 - DNA, 20 bp, synthetic construct
  misc_feature 1..20: note = chemically synthesized
  source 1..20: mol_type = other DNA
aaattgcatttacaaacctt

SEQ ID NO: 52490 - DNA, 20 bp, synthetic construct
  misc_feature 1..20: note = chemically synthesized
  source 1..20: mol_type = other DNA
tgcatttacaaacctttagc

SEQ ID NO: 52491 - DNA, 20 bp, synthetic construct
  misc_feature 1..20: note = chemically synthesized
  source 1..20: mol_type = other DNA
aaacctttagctagacatga

SEQ ID NO: 52492 - DNA, 20 bp, synthetic construct
  misc_feature 1..20: note = chemically synthesized
  source 1..20: mol_type = other DNA
agctagacatgaaagttctc

SEQ ID NO: 52493 - DNA, 20 bp, synthetic construct
  misc_feature 1..20: note = chemically synthesized
  source 1..20: mol_type = other DNA
ttctccagttccatatttca

SEQ ID NO: 52494 - DNA, 20 bp, synthetic construct
  misc_feature 1..20: note = chemically synthesized
  source 1..20: mol_type = other DNA
ccagttccatatttcatggt

SEQ ID NO: 52495 - DNA, 20 bp, synthetic construct
  misc_feature 1..20: note = chemically synthesized
  source 1..20: mol_type = other DNA
cagttccatatttcatggtg

SEQ ID NO: 52496 - DNA, 20 bp, synthetic construct
  misc_feature 1..20: note = chemically synthesized
  source 1..20: mol_type = other DNA
atatttcatggtgaggaaca

SEQ ID NO: 52497 - DNA, 20 bp, synthetic construct
  misc_feature 1..20: note = chemically synthesized
  source 1..20: mol_type = other DNA
atggtgaggaacaaagaata

SEQ ID NO: 52498 - DNA, 20 bp, synthetic construct
  misc_feature 1..20: note = chemically synthesized
  source 1..20: mol_type = other DNA
gtgaggaacaaagaatatgg

SEQ ID NO: 52499 - DNA, 20 bp, synthetic construct
  misc_feature 1..20: note = chemically synthesized
  source 1..20: mol_type = other DNA
tgaggaacaaagaatatggt

SEQ ID NO: 52500 - DNA, 20 bp, synthetic construct
  misc_feature 1..20: note = chemically synthesized
  source 1..20: mol_type = other DNA
gaggaacaaagaatatggtg

SEQ ID NO: 52501 - DNA, 20 bp, synthetic construct
  misc_feature 1..20: note = chemically synthesized
  source 1..20: mol_type = other DNA
ttgttcctcaccatgaaata

SEQ ID NO: 52502 - DNA, 20 bp, synthetic construct
  misc_feature 1..20: note = chemically synthesized
  source 1..20: mol_type = other DNA
ctcaccatgaaatatggaac

SEQ ID NO: 52503 - DNA, 20 bp, synthetic construct
  misc_feature 1..20: note = chemically synthesized
  source 1..20: mol_type = other DNA
caccatgaaatatggaactg

SEQ ID NO: 52504 - DNA, 20 bp, synthetic construct
  misc_feature 1..20: note = chemically synthesized
  source 1..20: mol_type = other DNA
aactggagaactttcatgtc

SEQ ID NO: 52505 - DNA, 20 bp, synthetic construct
  misc_feature 1..20: note = chemically synthesized
  source 1..20: mol_type = other DNA
agaactttcatgtctagcta

SEQ ID NO: 52506 - DNA, 20 bp, synthetic construct
  misc_feature 1..20: note = chemically synthesized
  source 1..20: mol_type = other DNA
gaactttcatgtctagctaa

SEQ ID NO: 52507 - DNA, 20 bp, synthetic construct
  misc_feature 1..20: note = chemically synthesized
  source 1..20: mol_type = other DNA
aggtttgtaaatgcaccaat

SEQ ID NO: 52508 - DNA, 20 bp, synthetic construct
  misc_feature 1..20: note = chemically synthesized
  source 1..20: mol_type = other DNA
cagcaatctgtgtctaactc

SEQ ID NO: 52509 - DNA, 20 bp, synthetic construct
  misc_feature 1..20: note = chemically synthesized
  source 1..20: mol_type = other DNA
agcaatctgtgtctaactca

SEQ ID NO: 52510 - DNA, 20 bp, synthetic construct
  misc_feature 1..20: note = chemically synthesized
  source 1..20: mol_type = other DNA
aggtttgtaaatgcaccaat

SEQ ID NO: 52511 - DNA, 20 bp, synthetic construct
  misc_feature 1..20: note = chemically synthesized
  source 1..20: mol_type = other DNA
accaatcagtgctctgtgtc

SEQ ID NO: 52512 - DNA, 20 bp, synthetic construct
  misc_feature 1..20: note = chemically synthesized
  source 1..20: mol_type = other DNA
tgctctgtgtctagctaatc

SEQ ID NO: 52513 - DNA, 20 bp, synthetic construct
  misc_feature 1..20: note = chemically synthesized
  source 1..20: mol_type = other DNA
tctgtgtctagctaatctag

SEQ ID NO: 52514 - DNA, 20 bp, synthetic construct
  misc_feature 1..20: note = chemically synthesized
  source 1..20: mol_type = other DNA
ctgtgtctagctaatctagt

SEQ ID NO: 52515 - DNA, 20 bp, synthetic construct
  misc_feature 1..20: note = chemically synthesized
  source 1..20: mol_type = other DNA
tgtgtctagctaatctagtg

SEQ ID NO: 52516 - DNA, 20 bp, synthetic construct
  misc_feature 1..20: note = chemically synthesized
  source 1..20: mol_type = other DNA
tagctaatctagtggggact

SEQ ID NO: 52517 - DNA, 20 bp, synthetic construct
  misc_feature 1..20: note = chemically synthesized
  source 1..20: mol_type = other DNA
gctaatctagtggggacttg

SEQ ID NO: 52518 - DNA, 20 bp, synthetic construct
  misc_feature 1..20: note = chemically synthesized
  source 1..20: mol_type = other DNA
acttggagaacttttgtgtc

SEQ ID NO: 52519 - DNA, 20 bp, synthetic construct
  misc_feature 1..20: note = chemically synthesized
  source 1..20: mol_type = other DNA
agaacttttgtgtctagcta

SEQ ID NO: 52520 - DNA, 20 bp, synthetic construct
  misc_feature 1..20: note = chemically synthesized
  source 1..20: mol_type = other DNA
gaacttttgtgtctagctaa

SEQ ID NO: 52521 - DNA, 20 bp, synthetic construct
  misc_feature 1..20: note = chemically synthesized
  source 1..20: mol_type = other DNA
aggattgtaaatgcactaat

SEQ ID NO: 52522 - DNA, 20 bp, synthetic construct
  misc_feature 1..20: note = chemically synthesized
  source 1..20: mol_type = other DNA
actaatcagcactctgtgtc

SEQ ID NO: 52523 - DNA, 20 bp, synthetic construct
  misc_feature 1..20: note = chemically synthesized
  source 1..20: mol_type = other DNA
cagcactctgtgtctagctc

SEQ ID NO: 52524 - DNA, 20 bp, synthetic construct
  misc_feature 1..20: note = chemically synthesized
  source 1..20: mol_type = other DNA
agcactctgtgtctagctca

SEQ ID NO: 52525 - DNA, 20 bp, synthetic construct
  misc_feature 1..20: note = chemically synthesized
  source 1..20: mol_type = other DNA
aggtttgtaaatgcaccaat

SEQ ID NO: 52526 - DNA, 20 bp, synthetic construct
  misc_feature 1..20: note = chemically synthesized
  source 1..20: mol_type = other DNA
caatcagcactctgccaaaa

SEQ ID NO: 52527 - DNA, 20 bp, synthetic construct
  misc_feature 1..20: note = chemically synthesized
  source 1..20: mol_type = other DNA
ctctgccaaaacggaccaac

SEQ ID NO: 52528 - DNA, 20 bp, synthetic construct
  misc_feature 1..20: note = chemically synthesized
  source 1..20: mol_type = other DNA
ccaaccagctctctgtaaaa

SEQ ID NO: 52529 - DNA, 20 bp, synthetic construct
  misc_feature 1..20: note = chemically synthesized
  source 1..20: mol_type = other DNA
caaccagctctctgtaaaat

SEQ ID NO: 52530 - DNA, 20 bp, synthetic construct
  misc_feature 1..20: note = chemically synthesized
  source 1..20: mol_type = other DNA
tctctgtaaaatgggccaat

SEQ ID NO: 52531 - DNA, 20 bp, synthetic construct
  misc_feature 1..20: note = chemically synthesized
  source 1..20: mol_type = other DNA
ccaatcagctctctgtaaaa

SEQ ID NO: 52532 - DNA, 20 bp, synthetic construct
  misc_feature 1..20: note = chemically synthesized
  source 1..20: mol_type = other DNA
tctctgtaaaatggaccaat

SEQ ID NO: 52533 - DNA, 20 bp, synthetic construct
  misc_feature 1..20: note = chemically synthesized
  source 1..20: mol_type = other DNA
ctgtaaaatggaccaatcag

SEQ ID NO: 52534 - DNA, 20 bp, synthetic construct
  misc_feature 1..20: note = chemically synthesized
  source 1..20: mol_type = other DNA
tgtaaaatggaccaatcagc

SEQ ID NO: 52535 - DNA, 20 bp, synthetic construct
  misc_feature 1..20: note = chemically synthesized
  source 1..20: mol_type = other DNA
atggaccaatcagcaggatg

SEQ ID NO: 52536 - DNA, 20 bp, synthetic construct
  misc_feature 1..20: note = chemically synthesized
  source 1..20: mol_type = other DNA
tggaccaatcagcaggatgt

SEQ ID NO: 52537 - DNA, 20 bp, synthetic construct
  misc_feature 1..20: note = chemically synthesized
  source 1..20: mol_type = other DNA
accaatcagcaggatgtggg

SEQ ID NO: 52538 - DNA, 20 bp, synthetic construct
  misc_feature 1..20: note = chemically synthesized
  source 1..20: mol_type = other DNA
ccaatcagcaggatgtgggt

SEQ ID NO: 52539 - DNA, 20 bp, synthetic construct
  misc_feature 1..20: note = chemically synthesized
  source 1..20: mol_type = other DNA
caatcagcaggatgtgggtg

SEQ ID NO: 52540 - DNA, 20 bp, synthetic construct
  misc_feature 1..20: note = chemically synthesized
  source 1..20: mol_type = other DNA
cagcaggatgtgggtggggt

SEQ ID NO: 52541 - DNA, 20 bp, synthetic construct
  misc_feature 1..20: note = chemically synthesized
  source 1..20: mol_type = other DNA
ggatgtgggtggggtcagat

SEQ ID NO: 52542 - DNA, 20 bp, synthetic construct
  misc_feature 1..20: note = chemically synthesized
  source 1..20: mol_type = other DNA
gatgtgggtggggtcagata

SEQ ID NO: 52543 - DNA, 20 bp, synthetic construct
  misc_feature 1..20: note = chemically synthesized
  source 1..20: mol_type = other DNA
tggggtcagataaggaaata

SEQ ID NO: 52544 - DNA, 20 bp, synthetic construct
  misc_feature 1..20: note = chemically synthesized
  source 1..20: mol_type = other DNA
ggggtcagataaggaaataa

SEQ ID NO: 52545 - DNA, 20 bp, synthetic construct
  misc_feature 1..20: note = chemically synthesized
  source 1..20: mol_type = other DNA
gtcagataaggaaataaagg

SEQ ID NO: 52546 - DNA, 20 bp, synthetic construct
  misc_feature 1..20: note = chemically synthesized
  source 1..20: mol_type = other DNA
tcagataaggaaataaaggc

SEQ ID NO: 52547 - DNA, 20 bp, synthetic construct
  misc_feature 1..20: note = chemically synthesized
  source 1..20: mol_type = other DNA
aggaaataaaggcaggctgc

SEQ ID NO: 52548 - DNA, 20 bp, synthetic construct
  misc_feature 1..20: note = chemically synthesized
  source 1..20: mol_type = other DNA
gaaataaaggcaggctgccg

SEQ ID NO: 52549 - DNA, 20 bp, synthetic construct
  misc_feature 1..20: note = chemically synthesized
  source 1..20: mol_type = other DNA
taaaggcaggctgccggagc

SEQ ID NO: 52550 - DNA, 20 bp, synthetic construct
  misc_feature 1..20: note = chemically synthesized
  source 1..20: mol_type = other DNA
gccagctgtgacaactgact

SEQ ID NO: 52551 - DNA, 20 bp, synthetic construct
  misc_feature 1..20: note = chemically synthesized
  source 1..20: mol_type = other DNA
ccagctgtgacaactgactt

SEQ ID NO: 52552 - DNA, 20 bp, synthetic construct
  misc_feature 1..20: note = chemically synthesized
  source 1..20: mol_type = other DNA
ttgggttccctaccatgctg

SEQ ID NO: 52553 - DNA, 20 bp, synthetic construct
  misc_feature 1..20: note = chemically synthesized
  source 1..20: mol_type = other DNA
ggttccctaccatgctgtgg

SEQ ID NO: 52554 - DNA, 20 bp, synthetic construct
  misc_feature 1..20: note = chemically synthesized
  source 1..20: mol_type = other DNA
tcttactgctgctcactctt

SEQ ID NO: 52555 - DNA, 20 bp, synthetic construct
  misc_feature 1..20: note = chemically synthesized
  source 1..20: mol_type = other DNA
tggatccgcgctgcctttat

SEQ ID NO: 52556 - DNA, 20 bp, synthetic construct
  misc_feature 1..20: note = chemically synthesized
  source 1..20: mol_type = other DNA
gagctgtaacactcactgcg

SEQ ID NO: 52557 - DNA, 20 bp, synthetic construct
  misc_feature 1..20: note = chemically synthesized
  source 1..20: mol_type = other DNA
agctgtaacactcactgcga

SEQ ID NO: 52558 - DNA, 20 bp, synthetic construct
  misc_feature 1..20: note = chemically synthesized
  source 1..20: mol_type = other DNA
acactcactgcgaaggtctg

SEQ ID NO: 52559 - DNA, 20 bp, synthetic construct
  misc_feature 1..20: note = chemically synthesized
  source 1..20: mol_type = other DNA
ggtctgcggcttcacttctg

SEQ ID NO: 52560 - DNA, 20 bp, synthetic construct
  misc_feature 1..20: note = chemically synthesized
  source 1..20: mol_type = other DNA
tgcggcttcacttctgaagc

SEQ ID NO: 52561 - DNA, 20 bp, synthetic construct
  misc_feature 1..20: note = chemically synthesized
  source 1..20: mol_type = other DNA
gcttcacttctgaagccagc

SEQ ID NO: 52562 - DNA, 20 bp, synthetic construct
  misc_feature 1..20: note = chemically synthesized
  source 1..20: mol_type = other DNA
agccagcaagaccacgaacc

SEQ ID NO: 52563 - DNA, 20 bp, synthetic construct
  misc_feature 1..20: note = chemically synthesized
  source 1..20: mol_type = other DNA
gcaagaccacgaacccagca

SEQ ID NO: 52564 - DNA, 20 bp, synthetic construct
  misc_feature 1..20: note = chemically synthesized
  source 1..20: mol_type = other DNA
caagaccacgaacccagcat

SEQ ID NO: 52565 - DNA, 20 bp, synthetic construct
  misc_feature 1..20: note = chemically synthesized
  source 1..20: mol_type = other DNA
aagaccacgaacccagcatg

SEQ ID NO: 52566 - DNA, 20 bp, synthetic construct
  misc_feature 1..20: note = chemically synthesized
  source 1..20: mol_type = other DNA
agaccacgaacccagcatgg

SEQ ID NO: 52567 - DNA, 20 bp, synthetic construct
  misc_feature 1..20: note = chemically synthesized
  source 1..20: mol_type = other DNA
gcatgggggatgaacaaccc

SEQ ID NO: 52568 - DNA, 20 bp, synthetic construct
  misc_feature 1..20: note = chemically synthesized
  source 1..20: mol_type = other DNA
gggggatgaacaacccaaga

SEQ ID NO: 52569 - DNA, 20 bp, synthetic construct
  misc_feature 1..20: note = chemically synthesized
  source 1..20: mol_type = other DNA
ggggatgaacaacccaagac

SEQ ID NO: 52570 - DNA, 20 bp, synthetic construct
  misc_feature 1..20: note = chemically synthesized
  source 1..20: mol_type = other DNA
ggatgaacaacccaagacag

SEQ ID NO: 52571 - DNA, 20 bp, synthetic construct
  misc_feature 1..20: note = chemically synthesized
  source 1..20: mol_type = other DNA
gatgaacaacccaagacagg

SEQ ID NO: 52572 - DNA, 20 bp, synthetic construct
  misc_feature 1..20: note = chemically synthesized
  source 1..20: mol_type = other DNA
caacccaagacaggaggaat

SEQ ID NO: 52573 - DNA, 20 bp, synthetic construct
  misc_feature 1..20: note = chemically synthesized
  source 1..20: mol_type = other DNA
actccatacgctccgccttt

SEQ ID NO: 52574 - DNA, 20 bp, synthetic construct
  misc_feature 1..20: note = chemically synthesized
  source 1..20: mol_type = other DNA
tccatacgctccgcctttaa

SEQ ID NO: 52575 - DNA, 20 bp, synthetic construct
  misc_feature 1..20: note = chemically synthesized
  source 1..20: mol_type = other DNA
aagagctgtaacactccccg

SEQ ID NO: 52576 - DNA, 20 bp, synthetic construct
  misc_feature 1..20: note = chemically synthesized
  source 1..20: mol_type = other DNA
agagctgtaacactccccgt

SEQ ID NO: 52577 - DNA, 20 bp, synthetic construct
  misc_feature 1..20: note = chemically synthesized
  source 1..20: mol_type = other DNA
gagctgtaacactccccgtg

SEQ ID NO: 52578 - DNA, 20 bp, synthetic construct
  misc_feature 1..20: note = chemically synthesized
  source 1..20: mol_type = other DNA
agctgtaacactccccgtgg

SEQ ID NO: 52579 - DNA, 20 bp, synthetic construct
  misc_feature 1..20: note = chemically synthesized
  source 1..20: mol_type = other DNA
acactccccgtgggggtctg

SEQ ID NO: 52580 - DNA, 20 bp, synthetic construct
  misc_feature 1..20: note = chemically synthesized
  source 1..20: mol_type = other DNA
ggggtctgcagcttcactcc

SEQ ID NO: 52581 - DNA, 20 bp, synthetic construct
  misc_feature 1..20: note = chemically synthesized
  source 1..20: mol_type = other DNA
ggtctgcagcttcactcctg

SEQ ID NO: 52582 - DNA, 20 bp, synthetic construct
  misc_feature 1..20: note = chemically synthesized
  source 1..20: mol_type = other DNA
tgcagcttcactcctggagc

SEQ ID NO: 52583 - DNA, 20 bp, synthetic construct
  misc_feature 1..20: note = chemically synthesized
  source 1..20: mol_type = other DNA
gcttcactcctggagccagc

SEQ ID NO: 52584 - DNA, 20 bp, synthetic construct
  misc_feature 1..20: note = chemically synthesized
  source 1..20: mol_type = other DNA
cagcaagaccgtgaacacac

SEQ ID NO: 52585 - DNA, 20 bp, synthetic construct
  misc_feature 1..20: note = chemically synthesized
  source 1..20: mol_type = other DNA
caagaccgtgaacacaccag

SEQ ID NO: 52586 - DNA, 20 bp, synthetic construct
  misc_feature 1..20: note = chemically synthesized
  source 1..20: mol_type = other DNA
aagaccgtgaacacaccaga

SEQ ID NO: 52587 - DNA, 20 bp, synthetic construct
  misc_feature 1..20: note = chemically synthesized
  source 1..20: mol_type = other DNA
accgtgaacacaccagaagg

SEQ ID NO: 52588 - DNA, 20 bp, synthetic construct
  misc_feature 1..20: note = chemically synthesized
  source 1..20: mol_type = other DNA
acaccagaaggaagaaactc

SEQ ID NO: 52589 - DNA, 20 bp, synthetic construct
  misc_feature 1..20: note = chemically synthesized
  source 1..20: mol_type = other DNA
agaaactctggacacatctg

SEQ ID NO: 52590 - DNA, 20 bp, synthetic construct
  misc_feature 1..20: note = chemically synthesized
  source 1..20: mol_type = other DNA
acatctgaagtaacaaactt

SEQ ID NO: 52591 - DNA, 20 bp, synthetic construct
  misc_feature 1..20: note = chemically synthesized
  source 1..20: mol_type = other DNA
cctttgaacacaccatcttt

SEQ ID NO: 52592 - DNA, 20 bp, synthetic construct
  misc_feature 1..20: note = chemically synthesized
  source 1..20: mol_type = other DNA
agaattgtaacactcaccac

SEQ ID NO: 52593 - DNA, 20 bp, synthetic construct
  misc_feature 1..20: note = chemically synthesized
  source 1..20: mol_type = other DNA
gaattgtaacactcaccacg

SEQ ID NO: 52594 - DNA, 20 bp, synthetic construct
  misc_feature 1..20: note = chemically synthesized
  source 1..20: mol_type = other DNA
aattgtaacactcaccacga

SEQ ID NO: 52595 - DNA, 20 bp, synthetic construct
  misc_feature 1..20: note = chemically synthesized
  source 1..20: mol_type = other DNA
acactcaccacgagggttcg

SEQ ID NO: 52596 - DNA, 20 bp, synthetic construct
  misc_feature 1..20: note = chemically synthesized
  source 1..20: mol_type = other DNA
ggttcgcggcttcattcttt

SEQ ID NO: 52597 - DNA, 20 bp, synthetic construct
  misc_feature 1..20: note = chemically synthesized
  source 1..20: mol_type = other DNA
cgcggcttcattctttaagt

SEQ ID NO: 52598 - DNA, 20 bp, synthetic construct
  misc_feature 1..20: note = chemically synthesized
  source 1..20: mol_type = other DNA
gcttcattctttaagtcagc

SEQ ID NO: 52599 - DNA, 20 bp, synthetic construct
  misc_feature 1..20: note = chemically synthesized
  source 1..20: mol_type = other DNA
ttctttaagtcagcgagacc

SEQ ID NO: 52600 - DNA, 20 bp, synthetic construct
  misc_feature 1..20: note = chemically synthesized
  source 1..20: mol_type = other DNA
gaccaagaacccaccaattc

SEQ ID NO: 52601 - DNA, 20 bp, synthetic construct
  misc_feature 1..20: note = chemically synthesized
  source 1..20: mol_type = other DNA
gaacccaccaattccggaca

SEQ ID NO: 52602 - DNA, 20 bp, synthetic construct
  misc_feature 1..20: note = chemically synthesized
  source 1..20: mol_type = other DNA
cccaccaattccggacacag

SEQ ID NO: 52603 - DNA, 20 bp, synthetic construct
  misc_feature 1..20: note = chemically synthesized
  source 1..20: mol_type = other DNA
ccaccaattccggacacaga

SEQ ID NO: 52604 - DNA, 20 bp, synthetic construct
  misc_feature 1..20: note = chemically synthesized
  source 1..20: mol_type = other DNA
caattccggacacagaagga

SEQ ID NO: 52605 - DNA, 20 bp, synthetic construct
  misc_feature 1..20: note = chemically synthesized
  source 1..20: mol_type = other DNA
cggacacagaaggatggaca

SEQ ID NO: 52606 - DNA, 20 bp, synthetic construct
  misc_feature 1..20: note = chemically synthesized
  source 1..20: mol_type = other DNA
gaaggatggacaaagattat

SEQ ID NO: 52607 - DNA, 20 bp, synthetic construct
  misc_feature 1..20: note = chemically synthesized
  source 1..20: mol_type = other DNA
aaggatggacaaagattatc

SEQ ID NO: 52608 - DNA, 20 bp, synthetic construct
  misc_feature 1..20: note = chemically synthesized
  source 1..20: mol_type = other DNA
agattatcaggaatgcaatt

SEQ ID NO: 52609 - DNA, 20 bp, synthetic construct
  misc_feature 1..20: note = chemically synthesized
  source 1..20: mol_type = other DNA
caacacaaaaattacatacc

SEQ ID NO: 52610 - DNA, 20 bp, synthetic construct
  misc_feature 1..20: note = chemically synthesized
  source 1..20: mol_type = other DNA
acctagaatcaattttaata

SEQ ID NO: 52611 - DNA, 20 bp, synthetic construct
  misc_feature 1..20: note = chemically synthesized
  source 1..20: mol_type = other DNA
tttaataaagaaaacttatt

SEQ ID NO: 52612 - DNA, 20 bp, synthetic construct
  misc_feature 1..20: note = chemically synthesized
  source 1..20: mol_type = other DNA
taataaagaaaacttatttg

SEQ ID NO: 52613 - DNA, 20 bp, synthetic construct
  misc_feature 1..20: note = chemically synthesized
  source 1..20: mol_type = other DNA
aagaaaacttatttggagca

SEQ ID NO: 52614 - DNA, 20 bp, synthetic construct
  misc_feature 1..20: note = chemically synthesized
  source 1..20: mol_type = other DNA
tatttggagcacagcttatt

SEQ ID NO: 52615 - DNA, 20 bp, synthetic construct
  misc_feature 1..20: note = chemically synthesized
  source 1..20: mol_type = other DNA
atttggagcacagcttattc

SEQ ID NO: 52616 - DNA, 20 bp, synthetic construct
  misc_feature 1..20: note = chemically synthesized
  source 1..20: mol_type = other DNA
tttggagcacagcttattca

SEQ ID NO: 52617 - DNA, 20 bp, synthetic construct
  misc_feature 1..20: note = chemically synthesized
  source 1..20: mol_type = other DNA
ggagcacagcttattcaggg

SEQ ID NO: 52618 - DNA, 20 bp, synthetic construct
  misc_feature 1..20: note = chemically synthesized
  source 1..20: mol_type = other DNA
ttattcagggcagaaaataa

SEQ ID NO: 52619 - DNA, 20 bp, synthetic construct
  misc_feature 1..20: note = chemically synthesized
  source 1..20: mol_type = other DNA
aaaataaaagctaataataa

SEQ ID NO: 52620 - DNA, 20 bp, synthetic construct
  misc_feature 1..20: note = chemically synthesized
  source 1..20: mol_type = other DNA
aataaaagctaataataaaa

SEQ ID NO: 52621 - DNA, 20 bp, synthetic construct
  misc_feature 1..20: note = chemically synthesized
  source 1..20: mol_type = other DNA
ataaaagctaataataaaag

SEQ ID NO: 52622 - DNA, 20 bp, synthetic construct
  misc_feature 1..20: note = chemically synthesized
  source 1..20: mol_type = other DNA
aattaaataaccactcattt

SEQ ID NO: 52623 - DNA, 20 bp, synthetic construct
  misc_feature 1..20: note = chemically synthesized
  source 1..20: mol_type = other DNA
ttagatccttgatatttgaa

SEQ ID NO: 52624 - DNA, 20 bp, synthetic construct
  misc_feature 1..20: note = chemically synthesized
  source 1..20: mol_type = other DNA
tccttgatatttgaacagaa

SEQ ID NO: 52625 - DNA, 20 bp, synthetic construct
  misc_feature 1..20: note = chemically synthesized
  source 1..20: mol_type = other DNA
gaacagaatagtataaaaaa

SEQ ID NO: 52626 - DNA, 20 bp, synthetic construct
  misc_feature 1..20: note = chemically synthesized
  source 1..20: mol_type = other DNA
acagaatagtataaaaaata

SEQ ID NO: 52627 - DNA, 20 bp, synthetic construct
  misc_feature 1..20: note = chemically synthesized
  source 1..20: mol_type = other DNA
cagaatagtataaaaaatag

SEQ ID NO: 52628 - DNA, 20 bp, synthetic construct
  misc_feature 1..20: note = chemically synthesized
  source 1..20: mol_type = other DNA
agaatagtataaaaaataga

SEQ ID NO: 52629 - DNA, 20 bp, synthetic construct
  misc_feature 1..20: note = chemically synthesized
  source 1..20: mol_type = other DNA
aaaatagagggcatgataaa

SEQ ID NO: 52630 - DNA, 20 bp, synthetic construct
  misc_feature 1..20: note = chemically synthesized
  source 1..20: mol_type = other DNA
ggcatgataaatagtaaata

SEQ ID NO: 52631 - DNA, 20 bp, synthetic construct
  misc_feature 1..20: note = chemically synthesized
  source 1..20: mol_type = other DNA
agtaaataaagcaaaaatat

SEQ ID NO: 52632 - DNA, 20 bp, synthetic construct
  misc_feature 1..20: note = chemically synthesized
  source 1..20: mol_type = other DNA
taaataaagcaaaaatatga

SEQ ID NO: 52633 - DNA, 20 bp, synthetic construct
  misc_feature 1..20: note = chemically synthesized
  source 1..20: mol_type = other DNA
aaagcaaaaatatgagagat

SEQ ID NO: 52634 - DNA, 20 bp, synthetic construct
  misc_feature 1..20: note = chemically synthesized
  source 1..20: mol_type = other DNA
aaaatatgagagatgagatg

SEQ ID NO: 52635 - DNA, 20 bp, synthetic construct
  misc_feature 1..20: note = chemically synthesized
  source 1..20: mol_type = other DNA
atatgagagatgagatgaag

SEQ ID NO: 52636 - DNA, 20 bp, synthetic construct
  misc_feature 1..20: note = chemically synthesized
  source 1..20: mol_type = other DNA
gatgagatgaagtagccaat

SEQ ID NO: 52637 - DNA, 20 bp, synthetic construct
  misc_feature 1..20: note = chemically synthesized
  source 1..20: mol_type = other DNA
atgagatgaagtagccaata

SEQ ID NO: 52638 - DNA, 20 bp, synthetic construct
  misc_feature 1..20: note = chemically synthesized
  source 1..20: mol_type = other DNA
tgagatgaagtagccaataa

SEQ ID NO: 52639 - DNA, 20 bp, synthetic construct
  misc_feature 1..20: note = chemically synthesized
  source 1..20: mol_type = other DNA
gagatgaagtagccaataag

SEQ ID NO: 52640 - DNA, 20 bp, synthetic construct
  misc_feature 1..20: note = chemically synthesized
  source 1..20: mol_type = other DNA
agatgaagtagccaataagg

SEQ ID NO: 52641 - DNA, 20 bp, synthetic construct
  misc_feature 1..20: note = chemically synthesized
  source 1..20: mol_type = other DNA
gaagtagccaataaggggga

SEQ ID NO: 52642 - DNA, 20 bp, synthetic construct
  misc_feature 1..20: note = chemically synthesized
  source 1..20: mol_type = other DNA
aagtagccaataagggggac

SEQ ID NO: 52643 - DNA, 20 bp, synthetic construct
  misc_feature 1..20: note = chemically synthesized
  source 1..20: mol_type = other DNA
tagccaataagggggacagg

SEQ ID NO: 52644 - DNA, 20 bp, synthetic construct
  misc_feature 1..20: note = chemically synthesized
  source 1..20: mol_type = other DNA
ccaataagggggacaggaag

SEQ ID NO: 52645 - DNA, 20 bp, synthetic construct
  misc_feature 1..20: note = chemically synthesized
  source 1..20: mol_type = other DNA
gggggacaggaagtagattt

SEQ ID NO: 52646 - DNA, 20 bp, synthetic construct
  misc_feature 1..20: note = chemically synthesized
  source 1..20: mol_type = other DNA
gggacaggaagtagatttaa

SEQ ID NO: 52647 - DNA, 20 bp, synthetic construct
  misc_feature 1..20: note = chemically synthesized
  source 1..20: mol_type = other DNA
aggaagtagatttaagagtg

SEQ ID NO: 52648 - DNA, 20 bp, synthetic construct
  misc_feature 1..20: note = chemically synthesized
  source 1..20: mol_type = other DNA
gatttaagagtgcagaaaaa

SEQ ID NO: 52649 - DNA, 20 bp, synthetic construct
  misc_feature 1..20: note = chemically synthesized
  source 1..20: mol_type = other DNA
atttaagagtgcagaaaaaa

SEQ ID NO: 52650 - DNA, 20 bp, synthetic construct
  misc_feature 1..20: note = chemically synthesized
  source 1..20: mol_type = other DNA
gagtgcagaaaaaaaggaca

SEQ ID NO: 52651 - DNA, 20 bp, synthetic construct
  misc_feature 1..20: note = chemically synthesized
  source 1..20: mol_type = other DNA
agtgcagaaaaaaaggacaa

SEQ ID NO: 52652 - DNA, 20 bp, synthetic construct
  misc_feature 1..20: note = chemically synthesized
  source 1..20: mol_type = other DNA
aaaggacaaaggaataaata

SEQ ID NO: 52653 - DNA, 20 bp, synthetic construct
  misc_feature 1..20: note = chemically synthesized
  source 1..20: mol_type = other DNA
aaggacaaaggaataaatat

SEQ ID NO: 52654 - DNA, 20 bp, synthetic construct
  misc_feature 1..20: note = chemically synthesized
  source 1..20: mol_type = other DNA
aggacaaaggaataaatatg

SEQ ID NO: 52655 - DNA, 20 bp, synthetic construct
  misc_feature 1..20: note = chemically synthesized
  source 1..20: mol_type = other DNA
ggacaaaggaataaatatgg

SEQ ID NO: 52656 - DNA, 20 bp, synthetic construct
  misc_feature 1..20: note = chemically synthesized
  source 1..20: mol_type = other DNA
gacaaaggaataaatatggg

SEQ ID NO: 52657 - DNA, 20 bp, synthetic construct
  misc_feature 1..20: note = chemically synthesized
  source 1..20: mol_type = other DNA
aggaataaatatggggggca

SEQ ID NO: 52658 - DNA, 20 bp, synthetic construct
  misc_feature 1..20: note = chemically synthesized
  source 1..20: mol_type = other DNA
gaataaatatggggggcatg

SEQ ID NO: 52659 - DNA, 20 bp, synthetic construct
  misc_feature 1..20: note = chemically synthesized
  source 1..20: mol_type = other DNA
aataaatatggggggcatgg

SEQ ID NO: 52660 - DNA, 20 bp, synthetic construct
  misc_feature 1..20: note = chemically synthesized
  source 1..20: mol_type = other DNA
ggggggcatggaggaaaaaa

SEQ ID NO: 52661 - DNA, 20 bp, synthetic construct
  misc_feature 1..20: note = chemically synthesized
  source 1..20: mol_type = other DNA
gggggcatggaggaaaaaat

SEQ ID NO: 52662 - DNA, 20 bp, synthetic construct
  misc_feature 1..20: note = chemically synthesized
  source 1..20: mol_type = other DNA
ggggcatggaggaaaaaata

SEQ ID NO: 52663 - DNA, 20 bp, synthetic construct
  misc_feature 1..20: note = chemically synthesized
  source 1..20: mol_type = other DNA
atggaggaaaaaatagggtg

SEQ ID NO: 52664 - DNA, 20 bp, synthetic construct
  misc_feature 1..20: note = chemically synthesized
  source 1..20: mol_type = other DNA
aggaaaaaatagggtgaagt

SEQ ID NO: 52665 - DNA, 20 bp, synthetic construct
  misc_feature 1..20: note = chemically synthesized
  source 1..20: mol_type = other DNA
ggaaaaaatagggtgaagtc

SEQ ID NO: 52666 - DNA, 20 bp, synthetic construct
  misc_feature 1..20: note = chemically synthesized
  source 1..20: mol_type = other DNA
aggaactccaaaatcttaac

SEQ ID NO: 52667 - DNA, 20 bp, synthetic construct
  misc_feature 1..20: note = chemically synthesized
  source 1..20: mol_type = other DNA
gaactccaaaatcttaactg

SEQ ID NO: 52668 - DNA, 20 bp, synthetic construct
  misc_feature 1..20: note = chemically synthesized
  source 1..20: mol_type = other DNA
ccaaaatcttaactggagtt

SEQ ID NO: 52669 - DNA, 20 bp, synthetic construct
  misc_feature 1..20: note = chemically synthesized
  source 1..20: mol_type = other DNA
caaaatcttaactggagttc

SEQ ID NO: 52670 - DNA, 20 bp, synthetic construct
  misc_feature 1..20: note = chemically synthesized
  source 1..20: mol_type = other DNA
aaatcttaactggagttcag

SEQ ID NO: 52671 - DNA, 20 bp, synthetic construct
  misc_feature 1..20: note = chemically synthesized
  source 1..20: mol_type = other DNA
atcttaactggagttcagga

SEQ ID NO: 52672 - DNA, 20 bp, synthetic construct
  misc_feature 1..20: note = chemically synthesized
  source 1..20: mol_type = other DNA
cttaactggagttcaggaga

SEQ ID NO: 52673 - DNA, 20 bp, synthetic construct
  misc_feature 1..20: note = chemically synthesized
  source 1..20: mol_type = other DNA
agttcaggagagagtgaaaa

SEQ ID NO: 52674 - DNA, 20 bp, synthetic construct
  misc_feature 1..20: note = chemically synthesized
  source 1..20: mol_type = other DNA
gagagtgaaaatagaacatg

SEQ ID NO: 52675 - DNA, 20 bp, synthetic construct
  misc_feature 1..20: note = chemically synthesized
  source 1..20: mol_type = other DNA
agtgaaaatagaacatgtag

SEQ ID NO: 52676 - DNA, 20 bp, synthetic construct
  misc_feature 1..20: note = chemically synthesized
  source 1..20: mol_type = other DNA
gtgaaaatagaacatgtaga

SEQ ID NO: 52677 - DNA, 20 bp, synthetic construct
  misc_feature 1..20: note = chemically synthesized
  source 1..20: mol_type = other DNA
aacatgtagaaggaacttac

SEQ ID NO: 52678 - DNA, 20 bp, synthetic construct
  misc_feature 1..20: note = chemically synthesized
  source 1..20: mol_type = other DNA
catgtagaaggaacttacta

SEQ ID NO: 52679 - DNA, 20 bp, synthetic construct
  misc_feature 1..20: note = chemically synthesized
  source 1..20: mol_type = other DNA
aacttactagagatcaatac

SEQ ID NO: 52680 - DNA, 20 bp, synthetic construct
  misc_feature 1..20: note = chemically synthesized
  source 1..20: mol_type = other DNA
caagacaattttctgaacaa

SEQ ID NO: 52681 - DNA, 20 bp, synthetic construct
  misc_feature 1..20: note = chemically synthesized
  source 1..20: mol_type = other DNA
attttctgaacaaaagaaca

SEQ ID NO: 52682 - DNA, 20 bp, synthetic construct
  misc_feature 1..20: note = chemically synthesized
  source 1..20: mol_type = other DNA
ttctgaacaaaagaacacag

SEQ ID NO: 52683 - DNA, 20 bp, synthetic construct
  misc_feature 1..20: note = chemically synthesized
  source 1..20: mol_type = other DNA
agaacacagcagttgaaatt

SEQ ID NO: 52684 - DNA, 20 bp, synthetic construct
  misc_feature 1..20: note = chemically synthesized
  source 1..20: mol_type = other DNA
aacacagcagttgaaattga

SEQ ID NO: 52685 - DNA, 20 bp, synthetic construct
  misc_feature 1..20: note = chemically synthesized
  source 1..20: mol_type = other DNA
gagagtatccacaaaatacc

SEQ ID NO: 52686 - DNA, 20 bp, synthetic construct
  misc_feature 1..20: note = chemically synthesized
  source 1..20: mol_type = other DNA
taaaataaaataaaaattca

SEQ ID NO: 52687 - DNA, 20 bp, synthetic construct
  misc_feature 1..20: note = chemically synthesized
  source 1..20: mol_type = other DNA
ataaaataaaaattcatggt

SEQ ID NO: 52688 - DNA, 20 bp, synthetic construct
  misc_feature 1..20: note = chemically synthesized
  source 1..20: mol_type = other DNA
ataaaaattcatggtaagtt

SEQ ID NO: 52689 - DNA, 20 bp, synthetic construct
  misc_feature 1..20: note = chemically synthesized
  source 1..20: mol_type = other DNA
aaaaattcatggtaagttaa

SEQ ID NO: 52690 - DNA, 20 bp, synthetic construct
  misc_feature 1..20: note = chemically synthesized
  source 1..20: mol_type = other DNA
gttaagagaatgaaaaaaac

SEQ ID NO: 52691 - DNA, 20 bp, synthetic construct
  misc_feature 1..20: note = chemically synthesized
  source 1..20: mol_type = other DNA
agaatgaaaaaaacaagcca

SEQ ID NO: 52692 - DNA, 20 bp, synthetic construct
  misc_feature 1..20: note = chemically synthesized
  source 1..20: mol_type = other DNA
aatgaaaaaaacaagccaca

SEQ ID NO: 52693 - DNA, 20 bp, synthetic construct
  misc_feature 1..20: note = chemically synthesized
  source 1..20: mol_type = other DNA
gcaaaacatattatctgata

SEQ ID NO: 52694 - DNA, 20 bp, synthetic construct
  misc_feature 1..20: note = chemically synthesized
  source 1..20: mol_type = other DNA
caaaacatattatctgataa

SEQ ID NO: 52695 - DNA, 20 bp, synthetic construct
  misc_feature 1..20: note = chemically synthesized
  source 1..20: mol_type = other DNA
acttgtatacatattataca

SEQ ID NO: 52696 - DNA, 20 bp, synthetic construct
  misc_feature 1..20: note = chemically synthesized
  source 1..20: mol_type = other DNA
aaacaaacaatccaattgca

SEQ ID NO: 52697 - DNA, 20 bp, synthetic construct
  misc_feature 1..20: note = chemically synthesized
  source 1..20: mol_type = other DNA
caaacaatccaattgcaaag

SEQ ID NO: 52698 - DNA, 20 bp, synthetic construct
  misc_feature 1..20: note = chemically synthesized
  source 1..20: mol_type = other DNA
aaacaatccaattgcaaagt

SEQ ID NO: 52699 - DNA, 20 bp, synthetic construct
  misc_feature 1..20: note = chemically synthesized
  source 1..20: mol_type = other DNA
tccaattgcaaagtgggcaa

SEQ ID NO: 52700 - DNA, 20 bp, synthetic construct
  misc_feature 1..20: note = chemically synthesized
  source 1..20: mol_type = other DNA
aagtgggcaaaagatctgaa

SEQ ID NO: 52701 - DNA, 20 bp, synthetic construct
  misc_feature 1..20: note = chemically synthesized
  source 1..20: mol_type = other DNA
tctgaacagacactttacca

SEQ ID NO: 52702 - DNA, 20 bp, synthetic construct
  misc_feature 1..20: note = chemically synthesized
  source 1..20: mol_type = other DNA
gaacagacactttaccaaag

SEQ ID NO: 52703 - DNA, 20 bp, synthetic construct
  misc_feature 1..20: note = chemically synthesized
  source 1..20: mol_type = other DNA
actttaccaaagaagatata

SEQ ID NO: 52704 - DNA, 20 bp, synthetic construct
  misc_feature 1..20: note = chemically synthesized
  source 1..20: mol_type = other DNA
gaagatatatagattgcaat

SEQ ID NO: 52705 - DNA, 20 bp, synthetic construct
  misc_feature 1..20: note = chemically synthesized
  source 1..20: mol_type = other DNA
taagcacatgaaaatatact

SEQ ID NO: 52706 - DNA, 20 bp, synthetic construct
  misc_feature 1..20: note = chemically synthesized
  source 1..20: mol_type = other DNA
actcagtaacacatgtcatt

SEQ ID NO: 52707 - DNA, 20 bp, synthetic construct
  misc_feature 1..20: note = chemically synthesized
  source 1..20: mol_type = other DNA
aagaaactgcacattaaaac

SEQ ID NO: 52708 - DNA, 20 bp, synthetic construct
  misc_feature 1..20: note = chemically synthesized
  source 1..20: mol_type = other DNA
aaactgcacattaaaacaag

SEQ ID NO: 52709 - DNA, 20 bp, synthetic construct
  misc_feature 1..20: note = chemically synthesized
  source 1..20: mol_type = other DNA
accaaccactacacacatat

SEQ ID NO: 52710 - DNA, 20 bp, synthetic construct
  misc_feature 1..20: note = chemically synthesized
  source 1..20: mol_type = other DNA
aaccactacacacatattag

SEQ ID NO: 52711 - DNA, 20 bp, synthetic construct
  misc_feature 1..20: note = chemically synthesized
  source 1..20: mol_type = other DNA
accactacacacatattaga

SEQ ID NO: 52712 - DNA, 20 bp, synthetic construct
  misc_feature 1..20: note = chemically synthesized
  source 1..20: mol_type = other DNA
tactgacatccaccaaacac

SEQ ID NO: 52713 - DNA, 20 bp, synthetic construct
  misc_feature 1..20: note = chemically synthesized
  source 1..20: mol_type = other DNA
tccaccaaacactggcaacg

SEQ ID NO: 52714 - DNA, 20 bp, synthetic construct
  misc_feature 1..20: note = chemically synthesized
  source 1..20: mol_type = other DNA
accaaacactggcaacgaag

SEQ ID NO: 52715 - DNA, 20 bp, synthetic construct
  misc_feature 1..20: note = chemically synthesized
  source 1..20: mol_type = other DNA
caaacactggcaacgaagtg

SEQ ID NO: 52716 - DNA, 20 bp, synthetic construct
  misc_feature 1..20: note = chemically synthesized
  source 1..20: mol_type = other DNA
ctggcaacgaagtggagcaa

SEQ ID NO: 52717 - DNA, 20 bp, synthetic construct
  misc_feature 1..20: note = chemically synthesized
  source 1..20: mol_type = other DNA
taactctcacttattgcttg

SEQ ID NO: 52718 - DNA, 20 bp, synthetic construct
  misc_feature 1..20: note = chemically synthesized
  source 1..20: mol_type = other DNA
aactctcacttattgcttgt

SEQ ID NO: 52719 - DNA, 20 bp, synthetic construct
  misc_feature 1..20: note = chemically synthesized
  source 1..20: mol_type = other DNA
actctcacttattgcttgta

SEQ ID NO: 52720 - DNA, 20 bp, synthetic construct
  misc_feature 1..20: note = chemically synthesized
  source 1..20: mol_type = other DNA
cacttattgcttgtagggat

SEQ ID NO: 52721 - DNA, 20 bp, synthetic construct
  misc_feature 1..20: note = chemically synthesized
  source 1..20: mol_type = other DNA
ttgcttgtagggatgagaaa

SEQ ID NO: 52722 - DNA, 20 bp, synthetic construct
  misc_feature 1..20: note = chemically synthesized
  source 1..20: mol_type = other DNA
tgtagggatgagaaatagtg

SEQ ID NO: 52723 - DNA, 20 bp, synthetic construct
  misc_feature 1..20: note = chemically synthesized
  source 1..20: mol_type = other DNA
gagaaatagtgcagccaaat

SEQ ID NO: 52724 - DNA, 20 bp, synthetic construct
  misc_feature 1..20: note = chemically synthesized
  source 1..20: mol_type = other DNA
aaatagtgcagccaaattgg

SEQ ID NO: 52725 - DNA, 20 bp, synthetic construct
  misc_feature 1..20: note = chemically synthesized
  source 1..20: mol_type = other DNA
agtgcagccaaattggaaga

SEQ ID NO: 52726 - DNA, 20 bp, synthetic construct
  misc_feature 1..20: note = chemically synthesized
  source 1..20: mol_type = other DNA
ccaaattggaagacagttta

SEQ ID NO: 52727 - DNA, 20 bp, synthetic construct
  misc_feature 1..20: note = chemically synthesized
  source 1..20: mol_type = other DNA
tttacagtttcttacaaaac

SEQ ID NO: 52728 - DNA, 20 bp, synthetic construct
  misc_feature 1..20: note = chemically synthesized
  source 1..20: mol_type = other DNA
tcctatgtatttacccaaat

SEQ ID NO: 52729 - DNA, 20 bp, synthetic construct
  misc_feature 1..20: note = chemically synthesized
  source 1..20: mol_type = other DNA
caaaaatttatgtccacaca

SEQ ID NO: 52730 - DNA, 20 bp, synthetic construct
  misc_feature 1..20: note = chemically synthesized
  source 1..20: mol_type = other DNA
cacacagacatgaactaacc

SEQ ID NO: 52731 - DNA, 20 bp, synthetic construct
  misc_feature 1..20: note = chemically synthesized
  source 1..20: mol_type = other DNA
acacagacatgaactaacca

SEQ ID NO: 52732 - DNA, 20 bp, synthetic construct
  misc_feature 1..20: note = chemically synthesized
  source 1..20: mol_type = other DNA
catgaactaaccaaggttta

SEQ ID NO: 52733 - DNA, 20 bp, synthetic construct
  misc_feature 1..20: note = chemically synthesized
  source 1..20: mol_type = other DNA
atgaactaaccaaggtttat

SEQ ID NO: 52734 - DNA, 20 bp, synthetic construct
  misc_feature 1..20: note = chemically synthesized
  source 1..20: mol_type = other DNA
actttactcataattgccaa

SEQ ID NO: 52735 - DNA, 20 bp, synthetic construct
  misc_feature 1..20: note = chemically synthesized
  source 1..20: mol_type = other DNA
tcataattgccaaaagttga

SEQ ID NO: 52736 - DNA, 20 bp, synthetic construct
  misc_feature 1..20: note = chemically synthesized
  source 1..20: mol_type = other DNA
gccaaaagttgaaagtaacc

SEQ ID NO: 52737 - DNA, 20 bp, synthetic construct
  misc_feature 1..20: note = chemically synthesized
  source 1..20: mol_type = other DNA
ttgaaagtaaccaagatgaa

SEQ ID NO: 52738 - DNA, 20 bp, synthetic construct
  misc_feature 1..20: note = chemically synthesized
  source 1..20: mol_type = other DNA
caagatgaatggataaactg

SEQ ID NO: 52739 - DNA, 20 bp, synthetic construct
  misc_feature 1..20: note = chemically synthesized
  source 1..20: mol_type = other DNA
gataaactgtggaacatcca

SEQ ID NO: 52740 - DNA, 20 bp, synthetic construct
  misc_feature 1..20: note = chemically synthesized
  source 1..20: mol_type = other DNA
ataaactgtggaacatccat

SEQ ID NO: 52741 - DNA, 20 bp, synthetic construct
  misc_feature 1..20: note = chemically synthesized
  source 1..20: mol_type = other DNA
actgtggaacatccatagga

SEQ ID NO: 52742 - DNA, 20 bp, synthetic construct
  misc_feature 1..20: note = chemically synthesized
  source 1..20: mol_type = other DNA
ccataggatagaatattatt

SEQ ID NO: 52743 - DNA, 20 bp, synthetic construct
  misc_feature 1..20: note = chemically synthesized
  source 1..20: mol_type = other DNA
attattcagtgatataaata

SEQ ID NO: 52744 - DNA, 20 bp, synthetic construct
  misc_feature 1..20: note = chemically synthesized
  source 1..20: mol_type = other DNA
ttattcagtgatataaataa

SEQ ID NO: 52745 - DNA, 20 bp, synthetic construct
  misc_feature 1..20: note = chemically synthesized
  source 1..20: mol_type = other DNA
gatataaataaaggtctatc

SEQ ID NO: 52746 - DNA, 20 bp, synthetic construct
  misc_feature 1..20: note = chemically synthesized
  source 1..20: mol_type = other DNA
aaggtctatcaagctgtgaa

SEQ ID NO: 52747 - DNA, 20 bp, synthetic construct
  misc_feature 1..20: note = chemically synthesized
  source 1..20: mol_type = other DNA
tcaagctgtgaaaagacata

SEQ ID NO: 52748 - DNA, 20 bp, synthetic construct
  misc_feature 1..20: note = chemically synthesized
  source 1..20: mol_type = other DNA
aagctgtgaaaagacataaa

SEQ ID NO: 52749 - DNA, 20 bp, synthetic construct
  misc_feature 1..20: note = chemically synthesized
  source 1..20: mol_type = other DNA
taattcattttctttaatta

SEQ ID NO: 52750 - DNA, 20 bp, synthetic construct
  misc_feature 1..20: note = chemically synthesized
  source 1..20: mol_type = other DNA
acctattttatcttgctgtt

SEQ ID NO: 52751 - DNA, 20 bp, synthetic construct
  misc_feature 1..20: note = chemically synthesized
  source 1..20: mol_type = other DNA
ttgagaaacttccattccta

SEQ ID NO: 52752 - DNA, 20 bp, synthetic construct
  misc_feature 1..20: note = chemically synthesized
  source 1..20: mol_type = other DNA
tattattcctcaaacaaata

SEQ ID NO: 52753 - DNA, 20 bp, synthetic construct
  misc_feature 1..20: note = chemically synthesized
  source 1..20: mol_type = other DNA
caaatatagatattcaataa

SEQ ID NO: 52754 - DNA, 20 bp, synthetic construct
  misc_feature 1..20: note = chemically synthesized
  source 1..20: mol_type = other DNA
gatattcaataatagacaaa

SEQ ID NO: 52755 - DNA, 20 bp, synthetic construct
  misc_feature 1..20: note = chemically synthesized
  source 1..20: mol_type = other DNA
taatagacaaatagtgaata

SEQ ID NO: 52756 - DNA, 20 bp, synthetic construct
  misc_feature 1..20: note = chemically synthesized
  source 1..20: mol_type = other DNA
gacaaatagtgaataaagta

SEQ ID NO: 52757 - DNA, 20 bp, synthetic construct
  misc_feature 1..20: note = chemically synthesized
  source 1..20: mol_type = other DNA
gtatggtacattctttgact

SEQ ID NO: 52758 - DNA, 20 bp, synthetic construct
  misc_feature 1..20: note = chemically synthesized
  source 1..20: mol_type = other DNA
tacattctttgacttagttt

SEQ ID NO: 52759 - DNA, 20 bp, synthetic construct
  misc_feature 1..20: note = chemically synthesized
  source 1..20: mol_type = other DNA
ttctttgacttagtttcaga

SEQ ID NO: 52760 - DNA, 20 bp, synthetic construct
  misc_feature 1..20: note = chemically synthesized
  source 1..20: mol_type = other DNA
agtttcagacagctattgca

SEQ ID NO: 52761 - DNA, 20 bp, synthetic construct
  misc_feature 1..20: note = chemically synthesized
  source 1..20: mol_type = other DNA
agctattgcatagaatgaaa

SEQ ID NO: 52762 - DNA, 20 bp, synthetic construct
  misc_feature 1..20: note = chemically synthesized
  source 1..20: mol_type = other DNA
aatagattaatatttaataa

SEQ ID NO: 52763 - DNA, 20 bp, synthetic construct
  misc_feature 1..20: note = chemically synthesized
  source 1..20: mol_type = other DNA
atagattaatatttaataac

SEQ ID NO: 52764 - DNA, 20 bp, synthetic construct
  misc_feature 1..20: note = chemically synthesized
  source 1..20: mol_type = other DNA
tgttatgatttattaaaaat

SEQ ID NO: 52765 - DNA, 20 bp, synthetic construct
  misc_feature 1..20: note = chemically synthesized
  source 1..20: mol_type = other DNA
aaaaataagatgataaataa

SEQ ID NO: 52766 - DNA, 20 bp, synthetic construct
  misc_feature 1..20: note = chemically synthesized
  source 1..20: mol_type = other DNA
aagatgataaataaaagatt

SEQ ID NO: 52767 - DNA, 20 bp, synthetic construct
  misc_feature 1..20: note = chemically synthesized
  source 1..20: mol_type = other DNA
aaagatttagtatcttccca

SEQ ID NO: 52768 - DNA, 20 bp, synthetic construct
  misc_feature 1..20: note = chemically synthesized
  source 1..20: mol_type = other DNA
agatttagtatcttcccatg

SEQ ID NO: 52769 - DNA, 20 bp, synthetic construct
  misc_feature 1..20: note = chemically synthesized
  source 1..20: mol_type = other DNA
tcccatggagataacacact

SEQ ID NO: 52770 - DNA, 20 bp, synthetic construct
  misc_feature 1..20: note = chemically synthesized
  source 1..20: mol_type = other DNA
ggagataacacacttagata

SEQ ID NO: 52771 - DNA, 20 bp, synthetic construct
  misc_feature 1..20: note = chemically synthesized
  source 1..20: mol_type = other DNA
gagataacacacttagatac

SEQ ID NO: 52772 - DNA, 20 bp, synthetic construct
  misc_feature 1..20: note = chemically synthesized
  source 1..20: mol_type = other DNA
atacaggtttcatgtcactt

SEQ ID NO: 52773 - DNA, 20 bp, synthetic construct
  misc_feature 1..20: note = chemically synthesized
  source 1..20: mol_type = other DNA
tttcatgtcactttggacat

SEQ ID NO: 52774 - DNA, 20 bp, synthetic construct
  misc_feature 1..20: note = chemically synthesized
  source 1..20: mol_type = other DNA
tgtcactttggacatgagta

SEQ ID NO: 52775 - DNA, 20 bp, synthetic construct
  misc_feature 1..20: note = chemically synthesized
  source 1..20: mol_type = other DNA
tcactttggacatgagtaaa

SEQ ID NO: 52776 - DNA, 20 bp, synthetic construct
  misc_feature 1..20: note = chemically synthesized
  source 1..20: mol_type = other DNA
cactttggacatgagtaaag

SEQ ID NO: 52777 - DNA, 20 bp, synthetic construct
  misc_feature 1..20: note = chemically synthesized
  source 1..20: mol_type = other DNA
ctttggacatgagtaaagag

SEQ ID NO: 52778 - DNA, 20 bp, synthetic construct
  misc_feature 1..20: note = chemically synthesized
  source 1..20: mol_type = other DNA
tcccaaatcttgatcacatt

SEQ ID NO: 52779 - DNA, 20 bp, synthetic construct
  misc_feature 1..20: note = chemically synthesized
  source 1..20: mol_type = other DNA
cttgatcacattgagtatca

SEQ ID NO: 52780 - DNA, 20 bp, synthetic construct
  misc_feature 1..20: note = chemically synthesized
  source 1..20: mol_type = other DNA
ttgatcacattgagtatcaa

SEQ ID NO: 52781 - DNA, 20 bp, synthetic construct
  misc_feature 1..20: note = chemically synthesized
  source 1..20: mol_type = other DNA
atcacattgagtatcaaagg

SEQ ID NO: 52782 - DNA, 20 bp, synthetic construct
  misc_feature 1..20: note = chemically synthesized
  source 1..20: mol_type = other DNA
tcacattgagtatcaaagga

SEQ ID NO: 52783 - DNA, 20 bp, synthetic construct
  misc_feature 1..20: note = chemically synthesized
  source 1..20: mol_type = other DNA
cattgagtatcaaaggaagg

SEQ ID NO: 52784 - DNA, 20 bp, synthetic construct
  misc_feature 1..20: note = chemically synthesized
  source 1..20: mol_type = other DNA
tgagtatcaaaggaaggaag

SEQ ID NO: 52785 - DNA, 20 bp, synthetic construct
  misc_feature 1..20: note = chemically synthesized
  source 1..20: mol_type = other DNA
gaagaagaaaaaattattaa

SEQ ID NO: 52786 - DNA, 20 bp, synthetic construct
  misc_feature 1..20: note = chemically synthesized
  source 1..20: mol_type = other DNA
gaagaaaaaattattaatgg

SEQ ID NO: 52787 - DNA, 20 bp, synthetic construct
  misc_feature 1..20: note = chemically synthesized
  source 1..20: mol_type = other DNA
cattaaatatcatttattat

SEQ ID NO: 52788 - DNA, 20 bp, synthetic construct
  misc_feature 1..20: note = chemically synthesized
  source 1..20: mol_type = other DNA
tttattattggatgtgttat

SEQ ID NO: 52789 - DNA, 20 bp, synthetic construct
  misc_feature 1..20: note = chemically synthesized
  source 1..20: mol_type = other DNA
atgtgttattggcattgtat

SEQ ID NO: 52790 - DNA, 20 bp, synthetic construct
  misc_feature 1..20: note = chemically synthesized
  source 1..20: mol_type = other DNA
actgctgtaaaaaaatacct

SEQ ID NO: 52791 - DNA, 20 bp, synthetic construct
  misc_feature 1..20: note = chemically synthesized
  source 1..20: mol_type = other DNA
tgtaaaaaaatacctgagac

SEQ ID NO: 52792 - DNA, 20 bp, synthetic construct
  misc_feature 1..20: note = chemically synthesized
  source 1..20: mol_type = other DNA
gtaaaaaaatacctgagact

SEQ ID NO: 52793 - DNA, 20 bp, synthetic construct
  misc_feature 1..20: note = chemically synthesized
  source 1..20: mol_type = other DNA
ctgagactgggtaatttata

SEQ ID NO: 52794 - DNA, 20 bp, synthetic construct
  misc_feature 1..20: note = chemically synthesized
  source 1..20: mol_type = other DNA
actgggtaatttataaagaa

SEQ ID NO: 52795 - DNA, 20 bp, synthetic construct
  misc_feature 1..20: note = chemically synthesized
  source 1..20: mol_type = other DNA
tgggtaatttataaagaaca

SEQ ID NO: 52796 - DNA, 20 bp, synthetic construct
  misc_feature 1..20: note = chemically synthesized
  source 1..20: mol_type = other DNA
gggtaatttataaagaacag

SEQ ID NO: 52797 - DNA, 20 bp, synthetic construct
  misc_feature 1..20: note = chemically synthesized
  source 1..20: mol_type = other DNA
ataaagaacagaggtttaat

SEQ ID NO: 52798 - DNA, 20 bp, synthetic construct
  misc_feature 1..20: note = chemically synthesized
  source 1..20: mol_type = other DNA
acagaggtttaattggctca

SEQ ID NO: 52799 - DNA, 20 bp, synthetic construct
  misc_feature 1..20: note = chemically synthesized
  source 1..20: mol_type = other DNA
ttaattggctcaaagttctt

SEQ ID NO: 52800 - DNA, 20 bp, synthetic construct
  misc_feature 1..20: note = chemically synthesized
  source 1..20: mol_type = other DNA
taattggctcaaagttcttc

SEQ ID NO: 52801 - DNA, 20 bp, synthetic construct
  misc_feature 1..20: note = chemically synthesized
  source 1..20: mol_type = other DNA
caaagttcttcaggctgtac

SEQ ID NO: 52802 - DNA, 20 bp, synthetic construct
  misc_feature 1..20: note = chemically synthesized
  source 1..20: mol_type = other DNA
agttcttcaggctgtacaag

SEQ ID NO: 52803 - DNA, 20 bp, synthetic construct
  misc_feature 1..20: note = chemically synthesized
  source 1..20: mol_type = other DNA
ttcaggctgtacaagaagca

SEQ ID NO: 52804 - DNA, 20 bp, synthetic construct
  misc_feature 1..20: note = chemically synthesized
  source 1..20: mol_type = other DNA
aggctgtacaagaagcatgg

SEQ ID NO: 52805 - DNA, 20 bp, synthetic construct
  misc_feature 1..20: note = chemically synthesized
  source 1..20: mol_type = other DNA
gaagcatggcagcatctgct

SEQ ID NO: 52806 - DNA, 20 bp, synthetic construct
  misc_feature 1..20: note = chemically synthesized
  source 1..20: mol_type = other DNA
ggcagcatctgctcagcttc

SEQ ID NO: 52807 - DNA, 20 bp, synthetic construct
  misc_feature 1..20: note = chemically synthesized
  source 1..20: mol_type = other DNA
gcagcatctgctcagcttct

SEQ ID NO: 52808 - DNA, 20 bp, synthetic construct
  misc_feature 1..20: note = chemically synthesized
  source 1..20: mol_type = other DNA
cagcatctgctcagcttcta

SEQ ID NO: 52809 - DNA, 20 bp, synthetic construct
  misc_feature 1..20: note = chemically synthesized
  source 1..20: mol_type = other DNA
gcatctgctcagcttctagg

SEQ ID NO: 52810 - DNA, 20 bp, synthetic construct
  misc_feature 1..20: note = chemically synthesized
  source 1..20: mol_type = other DNA
tcagcttctagggagacctc

SEQ ID NO: 52811 - DNA, 20 bp, synthetic construct
  misc_feature 1..20: note = chemically synthesized
  source 1..20: mol_type = other DNA
cctcaagaaacttacaatca

SEQ ID NO: 52812 - DNA, 20 bp, synthetic construct
  misc_feature 1..20: note = chemically synthesized
  source 1..20: mol_type = other DNA
caagaaacttacaatcatgg

SEQ ID NO: 52813 - DNA, 20 bp, synthetic construct
  misc_feature 1..20: note = chemically synthesized
  source 1..20: mol_type = other DNA
gaaacttacaatcatggcag

SEQ ID NO: 52814 - DNA, 20 bp, synthetic construct
  misc_feature 1..20: note = chemically synthesized
  source 1..20: mol_type = other DNA
tacaatcatggcagaagaca

SEQ ID NO: 52815 - DNA, 20 bp, synthetic construct
  misc_feature 1..20: note = chemically synthesized
  source 1..20: mol_type = other DNA
aatcatggcagaagacaaag

SEQ ID NO: 52816 - DNA, 20 bp, synthetic construct
  misc_feature 1..20: note = chemically synthesized
  source 1..20: mol_type = other DNA
atcatggcagaagacaaagc

SEQ ID NO: 52817 - DNA, 20 bp, synthetic construct
  misc_feature 1..20: note = chemically synthesized
  source 1..20: mol_type = other DNA
catggcagaagacaaagcag

SEQ ID NO: 52818 - DNA, 20 bp, synthetic construct
  misc_feature 1..20: note = chemically synthesized
  source 1..20: mol_type = other DNA
gcagaagacaaagcaggagc

SEQ ID NO: 52819 - DNA, 20 bp, synthetic construct
  misc_feature 1..20: note = chemically synthesized
  source 1..20: mol_type = other DNA
caggagcaagtatcttcaca

SEQ ID NO: 52820 - DNA, 20 bp, synthetic construct
  misc_feature 1..20: note = chemically synthesized
  source 1..20: mol_type = other DNA
agcaagtatcttcacatggc

SEQ ID NO: 52821 - DNA, 20 bp, synthetic construct
  misc_feature 1..20: note = chemically synthesized
  source 1..20: mol_type = other DNA
gcaagtatcttcacatggcc

SEQ ID NO: 52822 - DNA, 20 bp, synthetic construct
  misc_feature 1..20: note = chemically synthesized
  source 1..20: mol_type = other DNA
gtatcttcacatggccagga

SEQ ID NO: 52823 - DNA, 20 bp, synthetic construct
  misc_feature 1..20: note = chemically synthesized
  source 1..20: mol_type = other DNA
tatcttcacatggccaggac

SEQ ID NO: 52824 - DNA, 20 bp, synthetic construct
  misc_feature 1..20: note = chemically synthesized
  source 1..20: mol_type = other DNA
atcttcacatggccaggaca

SEQ ID NO: 52825 - DNA, 20 bp, synthetic construct
  misc_feature 1..20: note = chemically synthesized
  source 1..20: mol_type = other DNA
cttcacatggccaggacagg

SEQ ID NO: 52826 - DNA, 20 bp, synthetic construct
  misc_feature 1..20: note = chemically synthesized
  source 1..20: mol_type = other DNA
cacatggccaggacagggag

SEQ ID NO: 52827 - DNA, 20 bp, synthetic construct
  misc_feature 1..20: note = chemically synthesized
  source 1..20: mol_type = other DNA
atggccaggacagggagaag

SEQ ID NO: 52828 - DNA, 20 bp, synthetic construct
  misc_feature 1..20: note = chemically synthesized
  source 1..20: mol_type = other DNA
tggccaggacagggagaagc

SEQ ID NO: 52829 - DNA, 20 bp, synthetic construct
  misc_feature 1..20: note = chemically synthesized
  source 1..20: mol_type = other DNA
ggccaggacagggagaagca

SEQ ID NO: 52830 - DNA, 20 bp, synthetic construct
  misc_feature 1..20: note = chemically synthesized
  source 1..20: mol_type = other DNA
caggacagggagaagcaggg

SEQ ID NO: 52831 - DNA, 20 bp, synthetic construct
  misc_feature 1..20: note = chemically synthesized
  source 1..20: mol_type = other DNA
aggacagggagaagcagggt

SEQ ID NO: 52832 - DNA, 20 bp, synthetic construct
  misc_feature 1..20: note = chemically synthesized
  source 1..20: mol_type = other DNA
gacagggagaagcagggtag

SEQ ID NO: 52833 - DNA, 20 bp, synthetic construct
  misc_feature 1..20: note = chemically synthesized
  source 1..20: mol_type = other DNA
acagggagaagcagggtagg

SEQ ID NO: 52834 - DNA, 20 bp, synthetic construct
  misc_feature 1..20: note = chemically synthesized
  source 1..20: mol_type = other DNA
gctacacactttcaaacaac

SEQ ID NO: 52835 - DNA, 20 bp, synthetic construct
  misc_feature 1..20: note = chemically synthesized
  source 1..20: mol_type = other DNA
tttcaaacaaccagcctctt

SEQ ID NO: 52836 - DNA, 20 bp, synthetic construct
  misc_feature 1..20: note = chemically synthesized
  source 1..20: mol_type = other DNA
cctcttgagaactcactata

SEQ ID NO: 52837 - DNA, 20 bp, synthetic construct
  misc_feature 1..20: note = chemically synthesized
  source 1..20: mol_type = other DNA
agaactcactatacagtacc

SEQ ID NO: 52838 - DNA, 20 bp, synthetic construct
  misc_feature 1..20: note = chemically synthesized
  source 1..20: mol_type = other DNA
gaactcactatacagtacca

SEQ ID NO: 52839 - DNA, 20 bp, synthetic construct
  misc_feature 1..20: note = chemically synthesized
  source 1..20: mol_type = other DNA
aactcactatacagtaccaa

SEQ ID NO: 52840 - DNA, 20 bp, synthetic construct
  misc_feature 1..20: note = chemically synthesized
  source 1..20: mol_type = other DNA
actcactatacagtaccaag

SEQ ID NO: 52841 - DNA, 20 bp, synthetic construct
  misc_feature 1..20: note = chemically synthesized
  source 1..20: mol_type = other DNA
ctcactatacagtaccaagg

SEQ ID NO: 52842 - DNA, 20 bp, synthetic construct
  misc_feature 1..20: note = chemically synthesized
  source 1..20: mol_type = other DNA
ctatacagtaccaaggggga

SEQ ID NO: 52843 - DNA, 20 bp, synthetic construct
  misc_feature 1..20: note = chemically synthesized
  source 1..20: mol_type = other DNA
gatggtactaaatcgctgat

SEQ ID NO: 52844 - DNA, 20 bp, synthetic construct
  misc_feature 1..20: note = chemically synthesized
  source 1..20: mol_type = other DNA
atgattgaattacctcccac

SEQ ID NO: 52845 - DNA, 20 bp, synthetic construct
  misc_feature 1..20: note = chemically synthesized
  source 1..20: mol_type = other DNA
tgattgaattacctcccaca

SEQ ID NO: 52846 - DNA, 20 bp, synthetic construct
  misc_feature 1..20: note = chemically synthesized
  source 1..20: mol_type = other DNA
caaggccccacctccaacgc

SEQ ID NO: 52847 - DNA, 20 bp, synthetic construct
  misc_feature 1..20: note = chemically synthesized
  source 1..20: mol_type = other DNA
ttataatttaacatgatatt

SEQ ID NO: 52848 - DNA, 20 bp, synthetic construct
  misc_feature 1..20: note = chemically synthesized
  source 1..20: mol_type = other DNA
tataatttaacatgatattt

SEQ ID NO: 52849 - DNA, 20 bp, synthetic construct
  misc_feature 1..20: note = chemically synthesized
  source 1..20: mol_type = other DNA
aatttaacatgatatttggg

SEQ ID NO: 52850 - DNA, 20 bp, synthetic construct
  misc_feature 1..20: note = chemically synthesized
  source 1..20: mol_type = other DNA
atgatatttgggtggtgaca

SEQ ID NO: 52851 - DNA, 20 bp, synthetic construct
  misc_feature 1..20: note = chemically synthesized
  source 1..20: mol_type = other DNA
aaaccatatccttccacctc

SEQ ID NO: 52852 - DNA, 20 bp, synthetic construct
  misc_feature 1..20: note = chemically synthesized
  source 1..20: mol_type = other DNA
atacaatcattacttcccaa

SEQ ID NO: 52853 - DNA, 20 bp, synthetic construct
  misc_feature 1..20: note = chemically synthesized
  source 1..20: mol_type = other DNA
tacttcccaacagtcctaca

SEQ ID NO: 52854 - DNA, 20 bp, synthetic construct
  misc_feature 1..20: note = chemically synthesized
  source 1..20: mol_type = other DNA
tacaaagtcttaactcattc

SEQ ID NO: 52855 - DNA, 20 bp, synthetic construct
  misc_feature 1..20: note = chemically synthesized
  source 1..20: mol_type = other DNA
tcattccagcattaactcaa

SEQ ID NO: 52856 - DNA, 20 bp, synthetic construct
  misc_feature 1..20: note = chemically synthesized
  source 1..20: mol_type = other DNA
agcattaactcaaaagtcca

SEQ ID NO: 52857 - DNA, 20 bp, synthetic construct
  misc_feature 1..20: note = chemically synthesized
  source 1..20: mol_type = other DNA
actcaaaagtccaaagtcca

SEQ ID NO: 52858 - DNA, 20 bp, synthetic construct
  misc_feature 1..20: note = chemically synthesized
  source 1..20: mol_type = other DNA
caaagtccaaagtcttatcc

SEQ ID NO: 52859 - DNA, 20 bp, synthetic construct
  misc_feature 1..20: note = chemically synthesized
  source 1..20: mol_type = other DNA
tccaaagtcttatccaagac

SEQ ID NO: 52860 - DNA, 20 bp, synthetic construct
  misc_feature 1..20: note = chemically synthesized
  source 1..20: mol_type = other DNA
ccaaagtcttatccaagaca

SEQ ID NO: 52861 - DNA, 20 bp, synthetic construct
  misc_feature 1..20: note = chemically synthesized
  source 1..20: mol_type = other DNA
agtcttatccaagacaaggc

SEQ ID NO: 52862 - DNA, 20 bp, synthetic construct
  misc_feature 1..20: note = chemically synthesized
  source 1..20: mol_type = other DNA
ggcaagtcccttcaacctat

SEQ ID NO: 52863 - DNA, 20 bp, synthetic construct
  misc_feature 1..20: note = chemically synthesized
  source 1..20: mol_type = other DNA
gagcctgtaaaatcaaaaac

SEQ ID NO: 52864 - DNA, 20 bp, synthetic construct
  misc_feature 1..20: note = chemically synthesized
  source 1..20: mol_type = other DNA
ctgtaaaatcaaaaacaagt

SEQ ID NO: 52865 - DNA, 20 bp, synthetic construct
  misc_feature 1..20: note = chemically synthesized
  source 1..20: mol_type = other DNA
aaaacaagttagttacttcc

SEQ ID NO: 52866 - DNA, 20 bp, synthetic construct
  misc_feature 1..20: note = chemically synthesized
  source 1..20: mol_type = other DNA
tagttacttccaagacataa

SEQ ID NO: 52867 - DNA, 20 bp, synthetic construct
  misc_feature 1..20: note = chemically synthesized
  source 1..20: mol_type = other DNA
gttacttccaagacataatg

SEQ ID NO: 52868 - DNA, 20 bp, synthetic construct
  misc_feature 1..20: note = chemically synthesized
  source 1..20: mol_type = other DNA
ttacttccaagacataatgg

SEQ ID NO: 52869 - DNA, 20 bp, synthetic construct
  misc_feature 1..20: note = chemically synthesized
  source 1..20: mol_type = other DNA
ccaagacataatggaggtac

SEQ ID NO: 52870 - DNA, 20 bp, synthetic construct
  misc_feature 1..20: note = chemically synthesized
  source 1..20: mol_type = other DNA
cataatggaggtactggcat

SEQ ID NO: 52871 - DNA, 20 bp, synthetic construct
  misc_feature 1..20: note = chemically synthesized
  source 1..20: mol_type = other DNA
ataatggaggtactggcatt

SEQ ID NO: 52872 - DNA, 20 bp, synthetic construct
  misc_feature 1..20: note = chemically synthesized
  source 1..20: mol_type = other DNA
ggtacaaattcccattccaa

SEQ ID NO: 52873 - DNA, 20 bp, synthetic construct
  misc_feature 1..20: note = chemically synthesized
  source 1..20: mol_type = other DNA
tacaaattcccattccaaaa

SEQ ID NO: 52874 - DNA, 20 bp, synthetic construct
  misc_feature 1..20: note = chemically synthesized
  source 1..20: mol_type = other DNA
caaattcccattccaaaaga

SEQ ID NO: 52875 - DNA, 20 bp, synthetic construct
  misc_feature 1..20: note = chemically synthesized
  source 1..20: mol_type = other DNA
aaaagagagaaatgcaccaa

SEQ ID NO: 52876 - DNA, 20 bp, synthetic construct
  misc_feature 1..20: note = chemically synthesized
  source 1..20: mol_type = other DNA
gagagaaatgcaccaaaaga

SEQ ID NO: 52877 - DNA, 20 bp, synthetic construct
  misc_feature 1..20: note = chemically synthesized
  source 1..20: mol_type = other DNA
agagaaatgcaccaaaagaa

SEQ ID NO: 52878 - DNA, 20 bp, synthetic construct
  misc_feature 1..20: note = chemically synthesized
  source 1..20: mol_type = other DNA
gagaaatgcaccaaaagaaa

SEQ ID NO: 52879 - DNA, 20 bp, synthetic construct
  misc_feature 1..20: note = chemically synthesized
  source 1..20: mol_type = other DNA
agaaatgcaccaaaagaaag

SEQ ID NO: 52880 - DNA, 20 bp, synthetic construct
  misc_feature 1..20: note = chemically synthesized
  source 1..20: mol_type = other DNA
gcaccaaaagaaaggggcta

SEQ ID NO: 52881 - DNA, 20 bp, synthetic construct
  misc_feature 1..20: note = chemically synthesized
  source 1..20: mol_type = other DNA
aggggctaaagatcccacac

SEQ ID NO: 52882 - DNA, 20 bp, synthetic construct
  misc_feature 1..20: note = chemically synthesized
  source 1..20: mol_type = other DNA
ggctaaagatcccacacgag

SEQ ID NO: 52883 - DNA, 20 bp, synthetic construct
  misc_feature 1..20: note = chemically synthesized
  source 1..20: mol_type = other DNA
tcccacacgagtagaaaacc

SEQ ID NO: 52884 - DNA, 20 bp, synthetic construct
  misc_feature 1..20: note = chemically synthesized
  source 1..20: mol_type = other DNA
cacacgagtagaaaacccag

SEQ ID NO: 52885 - DNA, 20 bp, synthetic construct
  misc_feature 1..20: note = chemically synthesized
  source 1..20: mol_type = other DNA
acacgagtagaaaacccagc

SEQ ID NO: 52886 - DNA, 20 bp, synthetic construct
  misc_feature 1..20: note = chemically synthesized
  source 1..20: mol_type = other DNA
cacgagtagaaaacccagca

SEQ ID NO: 52887 - DNA, 20 bp, synthetic construct
  misc_feature 1..20: note = chemically synthesized
  source 1..20: mol_type = other DNA
gagtagaaaacccagcaggg

SEQ ID NO: 52888 - DNA, 20 bp, synthetic construct
  misc_feature 1..20: note = chemically synthesized
  source 1..20: mol_type = other DNA
gcagtcattacaccttgata

SEQ ID NO: 52889 - DNA, 20 bp, synthetic construct
  misc_feature 1..20: note = chemically synthesized
  source 1..20: mol_type = other DNA
cattacaccttgatatggtt

SEQ ID NO: 52890 - DNA, 20 bp, synthetic construct
  misc_feature 1..20: note = chemically synthesized
  source 1..20: mol_type = other DNA
tacaccttgatatggtttgg

SEQ ID NO: 52891 - DNA, 20 bp, synthetic construct
  misc_feature 1..20: note = chemically synthesized
  source 1..20: mol_type = other DNA
cacccaaatttcttcttgaa

SEQ ID NO: 52892 - DNA, 20 bp, synthetic construct
  misc_feature 1..20: note = chemically synthesized
  source 1..20: mol_type = other DNA
ccaaatttcttcttgaatag

SEQ ID NO: 52893 - DNA, 20 bp, synthetic construct
  misc_feature 1..20: note = chemically synthesized
  source 1..20: mol_type = other DNA
caaatttcttcttgaatagt

SEQ ID NO: 52894 - DNA, 20 bp, synthetic construct
  misc_feature 1..20: note = chemically synthesized
  source 1..20: mol_type = other DNA
cccataatccctgcctgtca

SEQ ID NO: 52895 - DNA, 20 bp, synthetic construct
  misc_feature 1..20: note = chemically synthesized
  source 1..20: mol_type = other DNA
ataatccctgcctgtcatgg

SEQ ID NO: 52896 - DNA, 20 bp, synthetic construct
  misc_feature 1..20: note = chemically synthesized
  source 1..20: mol_type = other DNA
taatccctgcctgtcatgga

SEQ ID NO: 52897 - DNA, 20 bp, synthetic construct
  misc_feature 1..20: note = chemically synthesized
  source 1..20: mol_type = other DNA
ctgtcatggaaggaacacac

SEQ ID NO: 52898 - DNA, 20 bp, synthetic construct
  misc_feature 1..20: note = chemically synthesized
  source 1..20: mol_type = other DNA
tgtcatggaaggaacacact

SEQ ID NO: 52899 - DNA, 20 bp, synthetic construct
  misc_feature 1..20: note = chemically synthesized
  source 1..20: mol_type = other DNA
actgggatgtaattgaatca

SEQ ID NO: 52900 - DNA, 20 bp, synthetic construct
  misc_feature 1..20: note = chemically synthesized
  source 1..20: mol_type = other DNA
ctgggatgtaattgaatcat

SEQ ID NO: 52901 - DNA, 20 bp, synthetic construct
  misc_feature 1..20: note = chemically synthesized
  source 1..20: mol_type = other DNA
tgggatgtaattgaatcatg

SEQ ID NO: 52902 - DNA, 20 bp, synthetic construct
  misc_feature 1..20: note = chemically synthesized
  source 1..20: mol_type = other DNA
gggatgtaattgaatcatgg

SEQ ID NO: 52903 - DNA, 20 bp, synthetic construct
  misc_feature 1..20: note = chemically synthesized
  source 1..20: mol_type = other DNA
atgtaattgaatcatggggg

SEQ ID NO: 52904 - DNA, 20 bp, synthetic construct
  misc_feature 1..20: note = chemically synthesized
  source 1..20: mol_type = other DNA
tgtaattgaatcatgggggt

SEQ ID NO: 52905 - DNA, 20 bp, synthetic construct
  misc_feature 1..20: note = chemically synthesized
  source 1..20: mol_type = other DNA
ttcacatgctgttctcatga

SEQ ID NO: 52906 - DNA, 20 bp, synthetic construct
  misc_feature 1..20: note = chemically synthesized
  source 1..20: mol_type = other DNA
catgctgttctcatgatagt

SEQ ID NO: 52907 - DNA, 20 bp, synthetic construct
  misc_feature 1..20: note = chemically synthesized
  source 1..20: mol_type = other DNA
ctgttctcatgatagtgagt

SEQ ID NO: 52908 - DNA, 20 bp, synthetic construct
  misc_feature 1..20: note = chemically synthesized
  source 1..20: mol_type = other DNA
tgatagtgagtaagtctcac

SEQ ID NO: 52909 - DNA, 20 bp, synthetic construct
  misc_feature 1..20: note = chemically synthesized
  source 1..20: mol_type = other DNA
gtaagtctcacaagatctga

SEQ ID NO: 52910 - DNA, 20 bp, synthetic construct
  misc_feature 1..20: note = chemically synthesized
  source 1..20: mol_type = other DNA
caagatctgatggttttata

SEQ ID NO: 52911 - DNA, 20 bp, synthetic construct
  misc_feature 1..20: note = chemically synthesized
  source 1..20: mol_type = other DNA
aagatctgatggttttataa

SEQ ID NO: 52912 - DNA, 20 bp, synthetic construct
  misc_feature 1..20: note = chemically synthesized
  source 1..20: mol_type = other DNA
agatctgatggttttataaa

SEQ ID NO: 52913 - DNA, 20 bp, synthetic construct
  misc_feature 1..20: note = chemically synthesized
  source 1..20: mol_type = other DNA
tctcttgcctgccaccatgt

SEQ ID NO: 52914 - DNA, 20 bp, synthetic construct
  misc_feature 1..20: note = chemically synthesized
  source 1..20: mol_type = other DNA
tcaccttccaccatgattgt

SEQ ID NO: 52915 - DNA, 20 bp, synthetic construct
  misc_feature 1..20: note = chemically synthesized
  source 1..20: mol_type = other DNA
caccttccaccatgattgta

SEQ ID NO: 52916 - DNA, 20 bp, synthetic construct
  misc_feature 1..20: note = chemically synthesized
  source 1..20: mol_type = other DNA
ccatgattgtaaggcctccc

SEQ ID NO: 52917 - DNA, 20 bp, synthetic construct
  misc_feature 1..20: note = chemically synthesized
  source 1..20: mol_type = other DNA
gtaaggcctccccagcaatg

SEQ ID NO: 52918 - DNA, 20 bp, synthetic construct
  misc_feature 1..20: note = chemically synthesized
  source 1..20: mol_type = other DNA
ccccagcaatgtggatctat

SEQ ID NO: 52919 - DNA, 20 bp, synthetic construct
  misc_feature 1..20: note = chemically synthesized
  source 1..20: mol_type = other DNA
ctttttctttataaattacc

SEQ ID NO: 52920 - DNA, 20 bp, synthetic construct
  misc_feature 1..20: note = chemically synthesized
  source 1..20: mol_type = other DNA
ctttataaattacccagtct

SEQ ID NO: 52921 - DNA, 20 bp, synthetic construct
  misc_feature 1..20: note = chemically synthesized
  source 1..20: mol_type = other DNA
tttataaattacccagtctc

SEQ ID NO: 52922 - DNA, 20 bp, synthetic construct
  misc_feature 1..20: note = chemically synthesized
  source 1..20: mol_type = other DNA
cagtctcgggtatttcttca

SEQ ID NO: 52923 - DNA, 20 bp, synthetic construct
  misc_feature 1..20: note = chemically synthesized
  source 1..20: mol_type = other DNA
tctcgggtatttcttcatag

SEQ ID NO: 52924 - DNA, 20 bp, synthetic construct
  misc_feature 1..20: note = chemically synthesized
  source 1..20: mol_type = other DNA
ttcttcatagcagtttaaaa

SEQ ID NO: 52925 - DNA, 20 bp, synthetic construct
  misc_feature 1..20: note = chemically synthesized
  source 1..20: mol_type = other DNA
tttgaccccatgtctcatat

SEQ ID NO: 52926 - DNA, 20 bp, synthetic construct
  misc_feature 1..20: note = chemically synthesized
  source 1..20: mol_type = other DNA
ttgaccccatgtctcatatc

SEQ ID NO: 52927 - DNA, 20 bp, synthetic construct
  misc_feature 1..20: note = chemically synthesized
  source 1..20: mol_type = other DNA
tgaccccatgtctcatatca

SEQ ID NO: 52928 - DNA, 20 bp, synthetic construct
  misc_feature 1..20: note = chemically synthesized
  source 1..20: mol_type = other DNA
tatcagggacacactgatgc

SEQ ID NO: 52929 - DNA, 20 bp, synthetic construct
  misc_feature 1..20: note = chemically synthesized
  source 1..20: mol_type = other DNA
tcagggacacactgatgcaa

SEQ ID NO: 52930 - DNA, 20 bp, synthetic construct
  misc_feature 1..20: note = chemically synthesized
  source 1..20: mol_type = other DNA
cagggacacactgatgcaag

SEQ ID NO: 52931 - DNA, 20 bp, synthetic construct
  misc_feature 1..20: note = chemically synthesized
  source 1..20: mol_type = other DNA
ggacacactgatgcaagagg

SEQ ID NO: 52932 - DNA, 20 bp, synthetic construct
  misc_feature 1..20: note = chemically synthesized
  source 1..20: mol_type = other DNA
gacacactgatgcaagaggt

SEQ ID NO: 52933 - DNA, 20 bp, synthetic construct
  misc_feature 1..20: note = chemically synthesized
  source 1..20: mol_type = other DNA
gatgcaagaggtgggctccc

SEQ ID NO: 52934 - DNA, 20 bp, synthetic construct
  misc_feature 1..20: note = chemically synthesized
  source 1..20: mol_type = other DNA
atgcaagaggtgggctccca

SEQ ID NO: 52935 - DNA, 20 bp, synthetic construct
  misc_feature 1..20: note = chemically synthesized
  source 1..20: mol_type = other DNA
gaggtgggctcccaaggcct

SEQ ID NO: 52936 - DNA, 20 bp, synthetic construct
  misc_feature 1..20: note = chemically synthesized
  source 1..20: mol_type = other DNA
aggtgggctcccaaggcctt

SEQ ID NO: 52937 - DNA, 20 bp, synthetic construct
  misc_feature 1..20: note = chemically synthesized
  source 1..20: mol_type = other DNA
tgggctcccaaggccttggg

SEQ ID NO: 52938 - DNA, 20 bp, synthetic construct
  misc_feature 1..20: note = chemically synthesized
  source 1..20: mol_type = other DNA
tccacccctattgctttgca

SEQ ID NO: 52939 - DNA, 20 bp, synthetic construct
  misc_feature 1..20: note = chemically synthesized
  source 1..20: mol_type = other DNA
ccctattgctttgcacagtt

SEQ ID NO: 52940 - DNA, 20 bp, synthetic construct
  misc_feature 1..20: note = chemically synthesized
  source 1..20: mol_type = other DNA
tagcccctgctgctgctctt

SEQ ID NO: 52941 - DNA, 20 bp, synthetic construct
  misc_feature 1..20: note = chemically synthesized
  source 1..20: mol_type = other DNA
gcccctgctgctgctcttaa

SEQ ID NO: 52942 - DNA, 20 bp, synthetic construct
  misc_feature 1..20: note = chemically synthesized
  source 1..20: mol_type = other DNA
tgctcttaagagattgtatt

SEQ ID NO: 52943 - DNA, 20 bp, synthetic construct
  misc_feature 1..20: note = chemically synthesized
  source 1..20: mol_type = other DNA
gagattgtattgagtgtttg

SEQ ID NO: 52944 - DNA, 20 bp, synthetic construct
  misc_feature 1..20: note = chemically synthesized
  source 1..20: mol_type = other DNA
ttgagtgtttgcagcttttc

SEQ ID NO: 52945 - DNA, 20 bp, synthetic construct
  misc_feature 1..20: note = chemically synthesized
  source 1..20: mol_type = other DNA
tgagtgtttgcagcttttct

SEQ ID NO: 52946 - DNA, 20 bp, synthetic construct
  misc_feature 1..20: note = chemically synthesized
  source 1..20: mol_type = other DNA
ttgcagcttttctaggtgca

SEQ ID NO: 52947 - DNA, 20 bp, synthetic construct
  misc_feature 1..20: note = chemically synthesized
  source 1..20: mol_type = other DNA
aggtgcacggtgcaaactgt

SEQ ID NO: 52948 - DNA, 20 bp, synthetic construct
  misc_feature 1..20: note = chemically synthesized
  source 1..20: mol_type = other DNA
tgcacggtgcaaactgtcag

SEQ ID NO: 52949 - DNA, 20 bp, synthetic construct
  misc_feature 1..20: note = chemically synthesized
  source 1..20: mol_type = other DNA
tgtcagtggatctaccattc

SEQ ID NO: 52950 - DNA, 20 bp, synthetic construct
  misc_feature 1..20: note = chemically synthesized
  source 1..20: mol_type = other DNA
gtcagtggatctaccattct

SEQ ID NO: 52951 - DNA, 20 bp, synthetic construct
  misc_feature 1..20: note = chemically synthesized
  source 1..20: mol_type = other DNA
tcagtggatctaccattctg

SEQ ID NO: 52952 - DNA, 20 bp, synthetic construct
  misc_feature 1..20: note = chemically synthesized
  source 1..20: mol_type = other DNA
ggatctaccattctggggtc

SEQ ID NO: 52953 - DNA, 20 bp, synthetic construct
  misc_feature 1..20: note = chemically synthesized
  source 1..20: mol_type = other DNA
atctaccattctggggtctg

SEQ ID NO: 52954 - DNA, 20 bp, synthetic construct
  misc_feature 1..20: note = chemically synthesized
  source 1..20: mol_type = other DNA
tctaccattctggggtctgg

SEQ ID NO: 52955 - DNA, 20 bp, synthetic construct
  misc_feature 1..20: note = chemically synthesized
  source 1..20: mol_type = other DNA
ccattctggggtctggagga

SEQ ID NO: 52956 - DNA, 20 bp, synthetic construct
  misc_feature 1..20: note = chemically synthesized
  source 1..20: mol_type = other DNA
ttctggggtctggaggacgg

SEQ ID NO: 52957 - DNA, 20 bp, synthetic construct
  misc_feature 1..20: note = chemically synthesized
  source 1..20: mol_type = other DNA
ggacggtggcccttttctca

SEQ ID NO: 52958 - DNA, 20 bp, synthetic construct
  misc_feature 1..20: note = chemically synthesized
  source 1..20: mol_type = other DNA
cccttttctcatagctctgc

SEQ ID NO: 52959 - DNA, 20 bp, synthetic construct
  misc_feature 1..20: note = chemically synthesized
  source 1..20: mol_type = other DNA
ccttttctcatagctctgct

SEQ ID NO: 52960 - DNA, 20 bp, synthetic construct
  misc_feature 1..20: note = chemically synthesized
  source 1..20: mol_type = other DNA
tttctcatagctctgctagg

SEQ ID NO: 52961 - DNA, 20 bp, synthetic construct
  misc_feature 1..20: note = chemically synthesized
  source 1..20: mol_type = other DNA
agctctgctaggcagtgccc

SEQ ID NO: 52962 - DNA, 20 bp, synthetic construct
  misc_feature 1..20: note = chemically synthesized
  source 1..20: mol_type = other DNA
tctgctaggcagtgccccag

SEQ ID NO: 52963 - DNA, 20 bp, synthetic construct
  misc_feature 1..20: note = chemically synthesized
  source 1..20: mol_type = other DNA
tgctaggcagtgccccagtg

SEQ ID NO: 52964 - DNA, 20 bp, synthetic construct
  misc_feature 1..20: note = chemically synthesized
  source 1..20: mol_type = other DNA
tgccccagtggagactctgt

SEQ ID NO: 52965 - DNA, 20 bp, synthetic construct
  misc_feature 1..20: note = chemically synthesized
  source 1..20: mol_type = other DNA
gccccagtggagactctgtg

SEQ ID NO: 52966 - DNA, 20 bp, synthetic construct
  misc_feature 1..20: note = chemically synthesized
  source 1..20: mol_type = other DNA
ccccagtggagactctgtga

SEQ ID NO: 52967 - DNA, 20 bp, synthetic construct
  misc_feature 1..20: note = chemically synthesized
  source 1..20: mol_type = other DNA
cccagtggagactctgtgag

SEQ ID NO: 52968 - DNA, 20 bp, synthetic construct
  misc_feature 1..20: note = chemically synthesized
  source 1..20: mol_type = other DNA
ccagtggagactctgtgagg

SEQ ID NO: 52969 - DNA, 20 bp, synthetic construct
  misc_feature 1..20: note = chemically synthesized
  source 1..20: mol_type = other DNA
tttcctccacattgccctat

SEQ ID NO: 52970 - DNA, 20 bp, synthetic construct
  misc_feature 1..20: note = chemically synthesized
  source 1..20: mol_type = other DNA
tcctccacattgccctatta

SEQ ID NO: 52971 - DNA, 20 bp, synthetic construct
  misc_feature 1..20: note = chemically synthesized
  source 1..20: mol_type = other DNA
cctccacattgccctattag

SEQ ID NO: 52972 - DNA, 20 bp, synthetic construct
  misc_feature 1..20: note = chemically synthesized
  source 1..20: mol_type = other DNA
ccctattagaggttcttcat

SEQ ID NO: 52973 - DNA, 20 bp, synthetic construct
  misc_feature 1..20: note = chemically synthesized
  source 1..20: mol_type = other DNA
cctattagaggttcttcatg

SEQ ID NO: 52974 - DNA, 20 bp, synthetic construct
  misc_feature 1..20: note = chemically synthesized
  source 1..20: mol_type = other DNA
ctattagaggttcttcatga

SEQ ID NO: 52975 - DNA, 20 bp, synthetic construct
  misc_feature 1..20: note = chemically synthesized
  source 1..20: mol_type = other DNA
tcatgagggttctgcccctg

SEQ ID NO: 52976 - DNA, 20 bp, synthetic construct
  misc_feature 1..20: note = chemically synthesized
  source 1..20: mol_type = other DNA
catgagggttctgcccctgc

SEQ ID NO: 52977 - DNA, 20 bp, synthetic construct
  misc_feature 1..20: note = chemically synthesized
  source 1..20: mol_type = other DNA
tgagggttctgcccctgcag

SEQ ID NO: 52978 - DNA, 20 bp, synthetic construct
  misc_feature 1..20: note = chemically synthesized
  source 1..20: mol_type = other DNA
gagggttctgcccctgcagg

SEQ ID NO: 52979 - DNA, 20 bp, synthetic construct
  misc_feature 1..20: note = chemically synthesized
  source 1..20: mol_type = other DNA
gaggcttctgcctgaacact

SEQ ID NO: 52980 - DNA, 20 bp, synthetic construct
  misc_feature 1..20: note = chemically synthesized
  source 1..20: mol_type = other DNA
aggcttctgcctgaacactc

SEQ ID NO: 52981 - DNA, 20 bp, synthetic construct
  misc_feature 1..20: note = chemically synthesized
  source 1..20: mol_type = other DNA
tctacacatcctctgaaatc

SEQ ID NO: 52982 - DNA, 20 bp, synthetic construct
  misc_feature 1..20: note = chemically synthesized
  source 1..20: mol_type = other DNA
ctacacatcctctgaaatct

SEQ ID NO: 52983 - DNA, 20 bp, synthetic construct
  misc_feature 1..20: note = chemically synthesized
  source 1..20: mol_type = other DNA
cacatcctctgaaatctagg

SEQ ID NO: 52984 - DNA, 20 bp, synthetic construct
  misc_feature 1..20: note = chemically synthesized
  source 1..20: mol_type = other DNA
catcctctgaaatctaggtg

SEQ ID NO: 52985 - DNA, 20 bp, synthetic construct
  misc_feature 1..20: note = chemically synthesized
  source 1..20: mol_type = other DNA
atcctctgaaatctaggtgg

SEQ ID NO: 52986 - DNA, 20 bp, synthetic construct
  misc_feature 1..20: note = chemically synthesized
  source 1..20: mol_type = other DNA
aaatctaggtggaggcttac

SEQ ID NO: 52987 - DNA, 20 bp, synthetic construct
  misc_feature 1..20: note = chemically synthesized
  source 1..20: mol_type = other DNA
ttttgacctttgcacactcc

SEQ ID NO: 52988 - DNA, 20 bp, synthetic construct
  misc_feature 1..20: note = chemically synthesized
  source 1..20: mol_type = other DNA
ctcccagatttatcaccatg

SEQ ID NO: 52989 - DNA, 20 bp, synthetic construct
  misc_feature 1..20: note = chemically synthesized
  source 1..20: mol_type = other DNA
ccagatttatcaccatgtgg

SEQ ID NO: 52990 - DNA, 20 bp, synthetic construct
  misc_feature 1..20: note = chemically synthesized
  source 1..20: mol_type = other DNA
atcaccatgtggaagcctcc

SEQ ID NO: 52991 - DNA, 20 bp, synthetic construct
  misc_feature 1..20: note = chemically synthesized
  source 1..20: mol_type = other DNA
tcaccatgtggaagcctcca

SEQ ID NO: 52992 - DNA, 20 bp, synthetic construct
  misc_feature 1..20: note = chemically synthesized
  source 1..20: mol_type = other DNA
cttatgtcttgcaccctctg

SEQ ID NO: 52993 - DNA, 20 bp, synthetic construct
  misc_feature 1..20: note = chemically synthesized
  source 1..20: mol_type = other DNA
atgtcttgcaccctctgaag

SEQ ID NO: 52994 - DNA, 20 bp, synthetic construct
  misc_feature 1..20: note = chemically synthesized
  source 1..20: mol_type = other DNA
tcttgcaccctctgaagcag

SEQ ID NO: 52995 - DNA, 20 bp, synthetic construct
  misc_feature 1..20: note = chemically synthesized
  source 1..20: mol_type = other DNA
accctctgaagcagtggcct

SEQ ID NO: 52996 - DNA, 20 bp, synthetic construct
  misc_feature 1..20: note = chemically synthesized
  source 1..20: mol_type = other DNA
gcagtggccttagctgttct

SEQ ID NO: 52997 - DNA, 20 bp, synthetic construct
  misc_feature 1..20: note = chemically synthesized
  source 1..20: mol_type = other DNA
cagtggccttagctgttctt

SEQ ID NO: 52998 - DNA, 20 bp, synthetic construct
  misc_feature 1..20: note = chemically synthesized
  source 1..20: mol_type = other DNA
agctgttcttgggccccttt

SEQ ID NO: 52999 - DNA, 20 bp, synthetic construct
  misc_feature 1..20: note = chemically synthesized
  source 1..20: mol_type = other DNA
tcttgggcccctttgagcca

SEQ ID NO: 53000 - DNA, 20 bp, synthetic construct
  misc_feature 1..20: note = chemically synthesized
  source 1..20: mol_type = other DNA
gggcccctttgagccacagc

SEQ ID NO: 53001 - DNA, 20 bp, synthetic construct
  misc_feature 1..20: note = chemically synthesized
  source 1..20: mol_type = other DNA
ctttgagccacagctggtgc

SEQ ID NO: 53002 - DNA, 20 bp, synthetic construct
  misc_feature 1..20: note = chemically synthesized
  source 1..20: mol_type = other DNA
ttgagccacagctggtgctg

SEQ ID NO: 53003 - DNA, 20 bp, synthetic construct
  misc_feature 1..20: note = chemically synthesized
  source 1..20: mol_type = other DNA
agccacagctggtgctggag

SEQ ID NO: 53004 - DNA, 20 bp, synthetic construct
  misc_feature 1..20: note = chemically synthesized
  source 1..20: mol_type = other DNA
acagctggtgctggagcagc

SEQ ID NO: 53005 - DNA, 20 bp, synthetic construct
  misc_feature 1..20: note = chemically synthesized
  source 1..20: mol_type = other DNA
cagctggtgctggagcagcc

SEQ ID NO: 53006 - DNA, 20 bp, synthetic construct
  misc_feature 1..20: note = chemically synthesized
  source 1..20: mol_type = other DNA
tgctggagcagccaggatgc

SEQ ID NO: 53007 - DNA, 20 bp, synthetic construct
  misc_feature 1..20: note = chemically synthesized
  source 1..20: mol_type = other DNA
gctggagcagccaggatgca

SEQ ID NO: 53008 - DNA, 20 bp, synthetic construct
  misc_feature 1..20: note = chemically synthesized
  source 1..20: mol_type = other DNA
agcagccaggatgcaaggaa

SEQ ID NO: 53009 - DNA, 20 bp, synthetic construct
  misc_feature 1..20: note = chemically synthesized
  source 1..20: mol_type = other DNA
atgcaaggaacagtgtcctg

SEQ ID NO: 53010 - DNA, 20 bp, synthetic construct
  misc_feature 1..20: note = chemically synthesized
  source 1..20: mol_type = other DNA
acagtgtcctgaagctgctc

SEQ ID NO: 53011 - DNA, 20 bp, synthetic construct
  misc_feature 1..20: note = chemically synthesized
  source 1..20: mol_type = other DNA
cagtgtcctgaagctgctca

SEQ ID NO: 53012 - DNA, 20 bp, synthetic construct
  misc_feature 1..20: note = chemically synthesized
  source 1..20: mol_type = other DNA
tgtcctgaagctgctcaagg

SEQ ID NO: 53013 - DNA, 20 bp, synthetic construct
  misc_feature 1..20: note = chemically synthesized
  source 1..20: mol_type = other DNA
cctgaagctgctcaaggcag

SEQ ID NO: 53014 - DNA, 20 bp, synthetic construct
  misc_feature 1..20: note = chemically synthesized
  source 1..20: mol_type = other DNA
ctgaagctgctcaaggcagc

SEQ ID NO: 53015 - DNA, 20 bp, synthetic construct
  misc_feature 1..20: note = chemically synthesized
  source 1..20: mol_type = other DNA
tgaagctgctcaaggcagca

SEQ ID NO: 53016 - DNA, 20 bp, synthetic construct
  misc_feature 1..20: note = chemically synthesized
  source 1..20: mol_type = other DNA
atctcacccacaaaatcatt

SEQ ID NO: 53017 - DNA, 20 bp, synthetic construct
  misc_feature 1..20: note = chemically synthesized
  source 1..20: mol_type = other DNA
acaaaatcattcagtactcc

SEQ ID NO: 53018 - DNA, 20 bp, synthetic construct
  misc_feature 1..20: note = chemically synthesized
  source 1..20: mol_type = other DNA
caaaatcattcagtactcct

SEQ ID NO: 53019 - DNA, 20 bp, synthetic construct
  misc_feature 1..20: note = chemically synthesized
  source 1..20: mol_type = other DNA
attcagtactcctaggccac

SEQ ID NO: 53020 - DNA, 20 bp, synthetic construct
  misc_feature 1..20: note = chemically synthesized
  source 1..20: mol_type = other DNA
ttcagtactcctaggccacc

SEQ ID NO: 53021 - DNA, 20 bp, synthetic construct
  misc_feature 1..20: note = chemically synthesized
  source 1..20: mol_type = other DNA
ggccaccaggcctgtgatgt

SEQ ID NO: 53022 - DNA, 20 bp, synthetic construct
  misc_feature 1..20: note = chemically synthesized
  source 1..20: mol_type = other DNA
gccaccaggcctgtgatgtg

SEQ ID NO: 53023 - DNA, 20 bp, synthetic construct
  misc_feature 1..20: note = chemically synthesized
  source 1..20: mol_type = other DNA
ccaccaggcctgtgatgtga

SEQ ID NO: 53024 - DNA, 20 bp, synthetic construct
  misc_feature 1..20: note = chemically synthesized
  source 1..20: mol_type = other DNA
caccaggcctgtgatgtgag

SEQ ID NO: 53025 - DNA, 20 bp, synthetic construct
  misc_feature 1..20: note = chemically synthesized
  source 1..20: mol_type = other DNA
gtgatgtgaggggctgctac

SEQ ID NO: 53026 - DNA, 20 bp, synthetic construct
  misc_feature 1..20: note = chemically synthesized
  source 1..20: mol_type = other DNA
tgatgtgaggggctgctaca

SEQ ID NO: 53027 - DNA, 20 bp, synthetic construct
  misc_feature 1..20: note = chemically synthesized
  source 1..20: mol_type = other DNA
gatgtgaggggctgctacaa

SEQ ID NO: 53028 - DNA, 20 bp, synthetic construct
  misc_feature 1..20: note = chemically synthesized
  source 1..20: mol_type = other DNA
agggtctctgaaatgtcttt

SEQ ID NO: 53029 - DNA, 20 bp, synthetic construct
  misc_feature 1..20: note = chemically synthesized
  source 1..20: mol_type = other DNA
gggtctctgaaatgtctttg

SEQ ID NO: 53030 - DNA, 20 bp, synthetic construct
  misc_feature 1..20: note = chemically synthesized
  source 1..20: mol_type = other DNA
aggcattctcccctttattt

SEQ ID NO: 53031 - DNA, 20 bp, synthetic construct
  misc_feature 1..20: note = chemically synthesized
  source 1..20: mol_type = other DNA
ctcccctttattttggctat

SEQ ID NO: 53032 - DNA, 20 bp, synthetic construct
  misc_feature 1..20: note = chemically synthesized
  source 1..20: mol_type = other DNA
ttattttggctattagaact

SEQ ID NO: 53033 - DNA, 20 bp, synthetic construct
  misc_feature 1..20: note = chemically synthesized
  source 1..20: mol_type = other DNA
ttcatttatgcaaatttcta

SEQ ID NO: 53034 - DNA, 20 bp, synthetic construct
  misc_feature 1..20: note = chemically synthesized
  source 1..20: mol_type = other DNA
tgaattgctcctttgaaaat

SEQ ID NO: 53035 - DNA, 20 bp, synthetic construct
  misc_feature 1..20: note = chemically synthesized
  source 1..20: mol_type = other DNA
agcttctgttttctaccaca

SEQ ID NO: 53036 - DNA, 20 bp, synthetic construct
  misc_feature 1..20: note = chemically synthesized
  source 1..20: mol_type = other DNA
ctgttttctaccacatggcc

SEQ ID NO: 53037 - DNA, 20 bp, synthetic construct
  misc_feature 1..20: note = chemically synthesized
  source 1..20: mol_type = other DNA
ttttctaccacatggccgag

SEQ ID NO: 53038 - DNA, 20 bp, synthetic construct
  misc_feature 1..20: note = chemically synthesized
  source 1..20: mol_type = other DNA
tctgcttcccttttaaatat

SEQ ID NO: 53039 - DNA, 20 bp, synthetic construct
  misc_feature 1..20: note = chemically synthesized
  source 1..20: mol_type = other DNA
atttctttgctcacacatat

SEQ ID NO: 53040 - DNA, 20 bp, synthetic construct
  misc_feature 1..20: note = chemically synthesized
  source 1..20: mol_type = other DNA
tttgctcacacatatgagca

SEQ ID NO: 53041 - DNA, 20 bp, synthetic construct
  misc_feature 1..20: note = chemically synthesized
  source 1..20: mol_type = other DNA
ttgctcacacatatgagcat

SEQ ID NO: 53042 - DNA, 20 bp, synthetic construct
  misc_feature 1..20: note = chemically synthesized
  source 1..20: mol_type = other DNA
cacatatgagcataggttgt

SEQ ID NO: 53043 - DNA, 20 bp, synthetic construct
  misc_feature 1..20: note = chemically synthesized
  source 1..20: mol_type = other DNA
atatgagcataggttgttag

SEQ ID NO: 53044 - DNA, 20 bp, synthetic construct
  misc_feature 1..20: note = chemically synthesized
  source 1..20: mol_type = other DNA
tgagcataggttgttagaag

SEQ ID NO: 53045 - DNA, 20 bp, synthetic construct
  misc_feature 1..20: note = chemically synthesized
  source 1..20: mol_type = other DNA
cataggttgttagaagcagc

SEQ ID NO: 53046 - DNA, 20 bp, synthetic construct
  misc_feature 1..20: note = chemically synthesized
  source 1..20: mol_type = other DNA
ataggttgttagaagcagcc

SEQ ID NO: 53047 - DNA, 20 bp, synthetic construct
  misc_feature 1..20: note = chemically synthesized
  source 1..20: mol_type = other DNA
atcttgaacaccttgctgct

SEQ ID NO: 53048 - DNA, 20 bp, synthetic construct
  misc_feature 1..20: note = chemically synthesized
  source 1..20: mol_type = other DNA
ttatcaacttcgaatttcca

SEQ ID NO: 53049 - DNA, 20 bp, synthetic construct
  misc_feature 1..20: note = chemically synthesized
  source 1..20: mol_type = other DNA
cgaatttccacagattctct

SEQ ID NO: 53050 - DNA, 20 bp, synthetic construct
  misc_feature 1..20: note = chemically synthesized
  source 1..20: mol_type = other DNA
gaatttccacagattctcta

SEQ ID NO: 53051 - DNA, 20 bp, synthetic construct
  misc_feature 1..20: note = chemically synthesized
  source 1..20: mol_type = other DNA
tttccacagattctctaagg

SEQ ID NO: 53052 - DNA, 20 bp, synthetic construct
  misc_feature 1..20: note = chemically synthesized
  source 1..20: mol_type = other DNA
tccacagattctctaaggta

SEQ ID NO: 53053 - DNA, 20 bp, synthetic construct
  misc_feature 1..20: note = chemically synthesized
  source 1..20: mol_type = other DNA
ccacagattctctaaggtag

SEQ ID NO: 53054 - DNA, 20 bp, synthetic construct
  misc_feature 1..20: note = chemically synthesized
  source 1..20: mol_type = other DNA
gattctctaaggtagaggca

SEQ ID NO: 53055 - DNA, 20 bp, synthetic construct
  misc_feature 1..20: note = chemically synthesized
  source 1..20: mol_type = other DNA
tctaaggtagaggcacagtg

SEQ ID NO: 53056 - DNA, 20 bp, synthetic construct
  misc_feature 1..20: note = chemically synthesized
  source 1..20: mol_type = other DNA
tctttgctaatgtataacaa

SEQ ID NO: 53057 - DNA, 20 bp, synthetic construct
  misc_feature 1..20: note = chemically synthesized
  source 1..20: mol_type = other DNA
aacaaaagtgacctttgctc

SEQ ID NO: 53058 - DNA, 20 bp, synthetic construct
  misc_feature 1..20: note = chemically synthesized
  source 1..20: mol_type = other DNA
caataaattcatttccatct

SEQ ID NO: 53059 - DNA, 20 bp, synthetic construct
  misc_feature 1..20: note = chemically synthesized
  source 1..20: mol_type = other DNA
atttccatctgagaccacct

SEQ ID NO: 53060 - DNA, 20 bp, synthetic construct
  misc_feature 1..20: note = chemically synthesized
  source 1..20: mol_type = other DNA
catctgagaccacctcagcc

SEQ ID NO: 53061 - DNA, 20 bp, synthetic construct
  misc_feature 1..20: note = chemically synthesized
  source 1..20: mol_type = other DNA
ttcattgtccatatcactat

SEQ ID NO: 53062 - DNA, 20 bp, synthetic construct
  misc_feature 1..20: note = chemically synthesized
  source 1..20: mol_type = other DNA
ccatatcactatcagaattt

SEQ ID NO: 53063 - DNA, 20 bp, synthetic construct
  misc_feature 1..20: note = chemically synthesized
  source 1..20: mol_type = other DNA
tttggtcacaaccattccac

SEQ ID NO: 53064 - DNA, 20 bp, synthetic construct
  misc_feature 1..20: note = chemically synthesized
  source 1..20: mol_type = other DNA
acaaccattccacaagtctc

SEQ ID NO: 53065 - DNA, 20 bp, synthetic construct
  misc_feature 1..20: note = chemically synthesized
  source 1..20: mol_type = other DNA
ccattccacaagtctctaga

SEQ ID NO: 53066 - DNA, 20 bp, synthetic construct
  misc_feature 1..20: note = chemically synthesized
  source 1..20: mol_type = other DNA
tcatctccctgtcttcttct

SEQ ID NO: 53067 - DNA, 20 bp, synthetic construct
  misc_feature 1..20: note = chemically synthesized
  source 1..20: mol_type = other DNA
ctgcctgttatccaatgcca

SEQ ID NO: 53068 - DNA, 20 bp, synthetic construct
  misc_feature 1..20: note = chemically synthesized
  source 1..20: mol_type = other DNA
cacattttcatgtatcttta

SEQ ID NO: 53069 - DNA, 20 bp, synthetic construct
  misc_feature 1..20: note = chemically synthesized
  source 1..20: mol_type = other DNA
attttcatgtatctttatag

SEQ ID NO: 53070 - DNA, 20 bp, synthetic construct
  misc_feature 1..20: note = chemically synthesized
  source 1..20: mol_type = other DNA
ttatagcagtaccccacttt

SEQ ID NO: 53071 - DNA, 20 bp, synthetic construct
  misc_feature 1..20: note = chemically synthesized
  source 1..20: mol_type = other DNA
ttggtaccaattttctgtac

SEQ ID NO: 53072 - DNA, 20 bp, synthetic construct
  misc_feature 1..20: note = chemically synthesized
  source 1..20: mol_type = other DNA
gtccattctcatcttgctat

SEQ ID NO: 53073 - DNA, 20 bp, synthetic construct
  misc_feature 1..20: note = chemically synthesized
  source 1..20: mol_type = other DNA
tccattctcatcttgctata

SEQ ID NO: 53074 - DNA, 20 bp, synthetic construct
  misc_feature 1..20: note = chemically synthesized
  source 1..20: mol_type = other DNA
cttgctataaggaaatacct

SEQ ID NO: 53075 - DNA, 20 bp, synthetic construct
  misc_feature 1..20: note = chemically synthesized
  source 1..20: mol_type = other DNA
tataaggaaatacctgagac

SEQ ID NO: 53076 - DNA, 20 bp, synthetic construct
  misc_feature 1..20: note = chemically synthesized
  source 1..20: mol_type = other DNA
ataaggaaatacctgagact

SEQ ID NO: 53077 - DNA, 20 bp, synthetic construct
  misc_feature 1..20: note = chemically synthesized
  source 1..20: mol_type = other DNA
aatacctgagactgggtaaa

SEQ ID NO: 53078 - DNA, 20 bp, synthetic construct
  misc_feature 1..20: note = chemically synthesized
  source 1..20: mol_type = other DNA
ctgagactgggtaaatggtg

SEQ ID NO: 53079 - DNA, 20 bp, synthetic construct
  misc_feature 1..20: note = chemically synthesized
  source 1..20: mol_type = other DNA
actgggtaaatggtgaagaa

SEQ ID NO: 53080 - DNA, 20 bp, synthetic construct
  misc_feature 1..20: note = chemically synthesized
  source 1..20: mol_type = other DNA
tgggtaaatggtgaagaaca

SEQ ID NO: 53081 - DNA, 20 bp, synthetic construct
  misc_feature 1..20: note = chemically synthesized
  source 1..20: mol_type = other DNA
gtgaagaacagagatttaat

SEQ ID NO: 53082 - DNA, 20 bp, synthetic construct
  misc_feature 1..20: note = chemically synthesized
  source 1..20: mol_type = other DNA
acagagatttaattggctca

SEQ ID NO: 53083 - DNA, 20 bp, synthetic construct
  misc_feature 1..20: note = chemically synthesized
  source 1..20: mol_type = other DNA
ttaattggctcacagttcta

SEQ ID NO: 53084 - DNA, 20 bp, synthetic construct
  misc_feature 1..20: note = chemically synthesized
  source 1..20: mol_type = other DNA
taattggctcacagttctaa

SEQ ID NO: 53085 - DNA, 20 bp, synthetic construct
  misc_feature 1..20: note = chemically synthesized
  source 1..20: mol_type = other DNA
tcacagttctaaaggctgta

SEQ ID NO: 53086 - DNA, 20 bp, synthetic construct
  misc_feature 1..20: note = chemically synthesized
  source 1..20: mol_type = other DNA
cacagttctaaaggctgtac

SEQ ID NO: 53087 - DNA, 20 bp, synthetic construct
  misc_feature 1..20: note = chemically synthesized
  source 1..20: mol_type = other DNA
agttctaaaggctgtacagg

SEQ ID NO: 53088 - DNA, 20 bp, synthetic construct
  misc_feature 1..20: note = chemically synthesized
  source 1..20: mol_type = other DNA
taaaggctgtacaggaagca

SEQ ID NO: 53089 - DNA, 20 bp, synthetic construct
  misc_feature 1..20: note = chemically synthesized
  source 1..20: mol_type = other DNA
gaagcatggcaacgtctgct

SEQ ID NO: 53090 - DNA, 20 bp, synthetic construct
  misc_feature 1..20: note = chemically synthesized
  source 1..20: mol_type = other DNA
ggcaacgtctgctcagcttc

SEQ ID NO: 53091 - DNA, 20 bp, synthetic construct
  misc_feature 1..20: note = chemically synthesized
  source 1..20: mol_type = other DNA
gcaacgtctgctcagcttct

SEQ ID NO: 53092 - DNA, 20 bp, synthetic construct
  misc_feature 1..20: note = chemically synthesized
  source 1..20: mol_type = other DNA
caacgtctgctcagcttcta

SEQ ID NO: 53093 - DNA, 20 bp, synthetic construct
  misc_feature 1..20: note = chemically synthesized
  source 1..20: mol_type = other DNA
acgtctgctcagcttctagg

SEQ ID NO: 53094 - DNA, 20 bp, synthetic construct
  misc_feature 1..20: note = chemically synthesized
  source 1..20: mol_type = other DNA
cgtctgctcagcttctaggg

SEQ ID NO: 53095 - DNA, 20 bp, synthetic construct
  misc_feature 1..20: note = chemically synthesized
  source 1..20: mol_type = other DNA
ctcagcttctagggaggttt

SEQ ID NO: 53096 - DNA, 20 bp, synthetic construct
  misc_feature 1..20: note = chemically synthesized
  source 1..20: mol_type = other DNA
tcagcttctagggaggtttc

SEQ ID NO: 53097 - DNA, 20 bp, synthetic construct
  misc_feature 1..20: note = chemically synthesized
  source 1..20: mol_type = other DNA
tttcaggaaacttataatca

SEQ ID NO: 53098 - DNA, 20 bp, synthetic construct
  misc_feature 1..20: note = chemically synthesized
  source 1..20: mol_type = other DNA
caggaaacttataatcatgg

SEQ ID NO: 53099 - DNA, 20 bp, synthetic construct
  misc_feature 1..20: note = chemically synthesized
  source 1..20: mol_type = other DNA
ggaaacttataatcatggca

SEQ ID NO: 53100 - DNA, 20 bp, synthetic construct
  misc_feature 1..20: note = chemically synthesized
  source 1..20: mol_type = other DNA
aaacttataatcatggcaga

SEQ ID NO: 53101 - DNA, 20 bp, synthetic construct
  misc_feature 1..20: note = chemically synthesized
  source 1..20: mol_type = other DNA
aatcatggcagagagaaaaa

SEQ ID NO: 53102 - DNA, 20 bp, synthetic construct
  misc_feature 1..20: note = chemically synthesized
  source 1..20: mol_type = other DNA
atcatggcagagagaaaaac

SEQ ID NO: 53103 - DNA, 20 bp, synthetic construct
  misc_feature 1..20: note = chemically synthesized
  source 1..20: mol_type = other DNA
catggcagagagaaaaacag

SEQ ID NO: 53104 - DNA, 20 bp, synthetic construct
  misc_feature 1..20: note = chemically synthesized
  source 1..20: mol_type = other DNA
caggagcatgtgtcttcaca

SEQ ID NO: 53105 - DNA, 20 bp, synthetic construct
  misc_feature 1..20: note = chemically synthesized
  source 1..20: mol_type = other DNA
agcatgtgtcttcacatggc

SEQ ID NO: 53106 - DNA, 20 bp, synthetic construct
  misc_feature 1..20: note = chemically synthesized
  source 1..20: mol_type = other DNA
catgtgtcttcacatggctg

SEQ ID NO: 53107 - DNA, 20 bp, synthetic construct
  misc_feature 1..20: note = chemically synthesized
  source 1..20: mol_type = other DNA
gtgtcttcacatggctggag

SEQ ID NO: 53108 - DNA, 20 bp, synthetic construct
  misc_feature 1..20: note = chemically synthesized
  source 1..20: mol_type = other DNA
tgtcttcacatggctggagc

SEQ ID NO: 53109 - DNA, 20 bp, synthetic construct
  misc_feature 1..20: note = chemically synthesized
  source 1..20: mol_type = other DNA
cttcacatggctggagcagg

SEQ ID NO: 53110 - DNA, 20 bp, synthetic construct
  misc_feature 1..20: note = chemically synthesized
  source 1..20: mol_type = other DNA
cacatggctggagcaggaag

SEQ ID NO: 53111 - DNA, 20 bp, synthetic construct
  misc_feature 1..20: note = chemically synthesized
  source 1..20: mol_type = other DNA
catggctggagcaggaagaa

SEQ ID NO: 53112 - DNA, 20 bp, synthetic construct
  misc_feature 1..20: note = chemically synthesized
  source 1..20: mol_type = other DNA
atggctggagcaggaagaag

SEQ ID NO: 53113 - DNA, 20 bp, synthetic construct
  misc_feature 1..20: note = chemically synthesized
  source 1..20: mol_type = other DNA
gctggagcaggaagaagagg

SEQ ID NO: 53114 - DNA, 20 bp, synthetic construct
  misc_feature 1..20: note = chemically synthesized
  source 1..20: mol_type = other DNA
ctggagcaggaagaagaggc

SEQ ID NO: 53115 - DNA, 20 bp, synthetic construct
  misc_feature 1..20: note = chemically synthesized
  source 1..20: mol_type = other DNA
tggagcaggaagaagaggca

SEQ ID NO: 53116 - DNA, 20 bp, synthetic construct
  misc_feature 1..20: note = chemically synthesized
  source 1..20: mol_type = other DNA
gagcaggaagaagaggcagg

SEQ ID NO: 53117 - DNA, 20 bp, synthetic construct
  misc_feature 1..20: note = chemically synthesized
  source 1..20: mol_type = other DNA
agcaggaagaagaggcaggg

SEQ ID NO: 53118 - DNA, 20 bp, synthetic construct
  misc_feature 1..20: note = chemically synthesized
  source 1..20: mol_type = other DNA
aggaagaagaggcagggagg

SEQ ID NO: 53119 - DNA, 20 bp, synthetic construct
  misc_feature 1..20: note = chemically synthesized
  source 1..20: mol_type = other DNA
agtaaacaaccatatctcat

SEQ ID NO: 53120 - DNA, 20 bp, synthetic construct
  misc_feature 1..20: note = chemically synthesized
  source 1..20: mol_type = other DNA
tcacccactatacgtaccaa

SEQ ID NO: 53121 - DNA, 20 bp, synthetic construct
  misc_feature 1..20: note = chemically synthesized
  source 1..20: mol_type = other DNA
cacccactatacgtaccaaa

SEQ ID NO: 53122 - DNA, 20 bp, synthetic construct
  misc_feature 1..20: note = chemically synthesized
  source 1..20: mol_type = other DNA
acccactatacgtaccaaaa

SEQ ID NO: 53123 - DNA, 20 bp, synthetic construct
  misc_feature 1..20: note = chemically synthesized
  source 1..20: mol_type = other DNA
taccaaaagggactgatatt

SEQ ID NO: 53124 - DNA, 20 bp, synthetic construct
  misc_feature 1..20: note = chemically synthesized
  source 1..20: mol_type = other DNA
atgatccaatcacttcccac

SEQ ID NO: 53125 - DNA, 20 bp, synthetic construct
  misc_feature 1..20: note = chemically synthesized
  source 1..20: mol_type = other DNA
tgatccaatcacttcccacc

SEQ ID NO: 53126 - DNA, 20 bp, synthetic construct
  misc_feature 1..20: note = chemically synthesized
  source 1..20: mol_type = other DNA
ccaggccccatcttcaacac

SEQ ID NO: 53127 - DNA, 20 bp, synthetic construct
  misc_feature 1..20: note = chemically synthesized
  source 1..20: mol_type = other DNA
caggccccatcttcaacact

SEQ ID NO: 53128 - DNA, 20 bp, synthetic construct
  misc_feature 1..20: note = chemically synthesized
  source 1..20: mol_type = other DNA
aggccccatcttcaacactg

SEQ ID NO: 53129 - DNA, 20 bp, synthetic construct
  misc_feature 1..20: note = chemically synthesized
  source 1..20: mol_type = other DNA
atcttcaacactggggatta

SEQ ID NO: 53130 - DNA, 20 bp, synthetic construct
  misc_feature 1..20: note = chemically synthesized
  source 1..20: mol_type = other DNA
tggggattacagctgaacat

SEQ ID NO: 53131 - DNA, 20 bp, synthetic construct
  misc_feature 1..20: note = chemically synthesized
  source 1..20: mol_type = other DNA
attacagctgaacatgagat

SEQ ID NO: 53132 - DNA, 20 bp, synthetic construct
  misc_feature 1..20: note = chemically synthesized
  source 1..20: mol_type = other DNA
ttacagctgaacatgagatt

SEQ ID NO: 53133 - DNA, 20 bp, synthetic construct
  misc_feature 1..20: note = chemically synthesized
  source 1..20: mol_type = other DNA
tacagctgaacatgagatta

SEQ ID NO: 53134 - DNA, 20 bp, synthetic construct
  misc_feature 1..20: note = chemically synthesized
  source 1..20: mol_type = other DNA
agctgaacatgagattaggg

SEQ ID NO: 53135 - DNA, 20 bp, synthetic construct
  misc_feature 1..20: note = chemically synthesized
  source 1..20: mol_type = other DNA
ctgaacatgagattagggtg

SEQ ID NO: 53136 - DNA, 20 bp, synthetic construct
  misc_feature 1..20: note = chemically synthesized
  source 1..20: mol_type = other DNA
atgagattagggtggagaca

SEQ ID NO: 53137 - DNA, 20 bp, synthetic construct
  misc_feature 1..20: note = chemically synthesized
  source 1..20: mol_type = other DNA
gacacagatccaaaccatat

SEQ ID NO: 53138 - DNA, 20 bp, synthetic construct
  misc_feature 1..20: note = chemically synthesized
  source 1..20: mol_type = other DNA
acacagatccaaaccatatc

SEQ ID NO: 53139 - DNA, 20 bp, synthetic construct
  misc_feature 1..20: note = chemically synthesized
  source 1..20: mol_type = other DNA
caacaaaatacataaaatgt

SEQ ID NO: 53140 - DNA, 20 bp, synthetic construct
  misc_feature 1..20: note = chemically synthesized
  source 1..20: mol_type = other DNA
aaactttgtttctttaatac

SEQ ID NO: 53141 - DNA, 20 bp, synthetic construct
  misc_feature 1..20: note = chemically synthesized
  source 1..20: mol_type = other DNA
ctttgtttctttaatacaag

SEQ ID NO: 53142 - DNA, 20 bp, synthetic construct
  misc_feature 1..20: note = chemically synthesized
  source 1..20: mol_type = other DNA
tttaatacaagcagtcgtat

SEQ ID NO: 53143 - DNA, 20 bp, synthetic construct
  misc_feature 1..20: note = chemically synthesized
  source 1..20: mol_type = other DNA
agtcgtattggcttctatac

SEQ ID NO: 53144 - DNA, 20 bp, synthetic construct
  misc_feature 1..20: note = chemically synthesized
  source 1..20: mol_type = other DNA
acacacatattatgatgtat

SEQ ID NO: 53145 - DNA, 20 bp, synthetic construct
  misc_feature 1..20: note = chemically synthesized
  source 1..20: mol_type = other DNA
cacatattatgatgtattag

SEQ ID NO: 53146 - DNA, 20 bp, synthetic construct
  misc_feature 1..20: note = chemically synthesized
  source 1..20: mol_type = other DNA
acatattatgatgtattaga

SEQ ID NO: 53147 - DNA, 20 bp, synthetic construct
  misc_feature 1..20: note = chemically synthesized
  source 1..20: mol_type = other DNA
tattatgatgtattagaagg

SEQ ID NO: 53148 - DNA, 20 bp, synthetic construct
  misc_feature 1..20: note = chemically synthesized
  source 1..20: mol_type = other DNA
gaaggaagataaatgtcatc

SEQ ID NO: 53149 - DNA, 20 bp, synthetic construct
  misc_feature 1..20: note = chemically synthesized
  source 1..20: mol_type = other DNA
aaatgtcatcaagccttatt

SEQ ID NO: 53150 - DNA, 20 bp, synthetic construct
  misc_feature 1..20: note = chemically synthesized
  source 1..20: mol_type = other DNA
aatgtcatcaagccttatta

SEQ ID NO: 53151 - DNA, 20 bp, synthetic construct
  misc_feature 1..20: note = chemically synthesized
  source 1..20: mol_type = other DNA
gtcatcaagccttattaagg

SEQ ID NO: 53152 - DNA, 20 bp, synthetic construct
  misc_feature 1..20: note = chemically synthesized
  source 1..20: mol_type = other DNA
tcatcaagccttattaaggc

SEQ ID NO: 53153 - DNA, 20 bp, synthetic construct
  misc_feature 1..20: note = chemically synthesized
  source 1..20: mol_type = other DNA
agccttattaaggcaggtcc

SEQ ID NO: 53154 - DNA, 20 bp, synthetic construct
  misc_feature 1..20: note = chemically synthesized
  source 1..20: mol_type = other DNA
tcctggtgtatccttcctta

SEQ ID NO: 53155 - DNA, 20 bp, synthetic construct
  misc_feature 1..20: note = chemically synthesized
  source 1..20: mol_type = other DNA
gtgtatccttccttaaagaa

SEQ ID NO: 53156 - DNA, 20 bp, synthetic construct
  misc_feature 1..20: note = chemically synthesized
  source 1..20: mol_type = other DNA
agtatctaataaccttacgt

SEQ ID NO: 53157 - DNA, 20 bp, synthetic construct
  misc_feature 1..20: note = chemically synthesized
  source 1..20: mol_type = other DNA
aaccttacgttagctaaacg

SEQ ID NO: 53158 - DNA, 20 bp, synthetic construct
  misc_feature 1..20: note = chemically synthesized
  source 1..20: mol_type = other DNA
ccttacgttagctaaacgaa

SEQ ID NO: 53159 - DNA, 20 bp, synthetic construct
  misc_feature 1..20: note = chemically synthesized
  source 1..20: mol_type = other DNA
taaacgaagagataatatat

SEQ ID NO: 53160 - DNA, 20 bp, synthetic construct
  misc_feature 1..20: note = chemically synthesized
  source 1..20: mol_type = other DNA
aatatattagtaattcttcc

SEQ ID NO: 53161 - DNA, 20 bp, synthetic construct
  misc_feature 1..20: note = chemically synthesized
  source 1..20: mol_type = other DNA
ttagtaattcttcccagata

SEQ ID NO: 53162 - DNA, 20 bp, synthetic construct
  misc_feature 1..20: note = chemically synthesized
  source 1..20: mol_type = other DNA
ccagataaagatcatctcta

SEQ ID NO: 53163 - DNA, 20 bp, synthetic construct
  misc_feature 1..20: note = chemically synthesized
  source 1..20: mol_type = other DNA
agtaattcacaaactccacc

SEQ ID NO: 53164 - DNA, 20 bp, synthetic construct
  misc_feature 1..20: note = chemically synthesized
  source 1..20: mol_type = other DNA
attcacaaactccacctgga

SEQ ID NO: 53165 - DNA, 20 bp, synthetic construct
  misc_feature 1..20: note = chemically synthesized
  source 1..20: mol_type = other DNA
cacaaactccacctggaaag

SEQ ID NO: 53166 - DNA, 20 bp, synthetic construct
  misc_feature 1..20: note = chemically synthesized
  source 1..20: mol_type = other DNA
caaactccacctggaaagaa

SEQ ID NO: 53167 - DNA, 20 bp, synthetic construct
  misc_feature 1..20: note = chemically synthesized
  source 1..20: mol_type = other DNA
actccacctggaaagaagag

SEQ ID NO: 53168 - DNA, 20 bp, synthetic construct
  misc_feature 1..20: note = chemically synthesized
  source 1..20: mol_type = other DNA
aagaagagtggctattgctc

SEQ ID NO: 53169 - DNA, 20 bp, synthetic construct
  misc_feature 1..20: note = chemically synthesized
  source 1..20: mol_type = other DNA
gctcaagctattcttcaatg

SEQ ID NO: 53170 - DNA, 20 bp, synthetic construct
  misc_feature 1..20: note = chemically synthesized
  source 1..20: mol_type = other DNA
caagctattcttcaatgtgg

SEQ ID NO: 53171 - DNA, 20 bp, synthetic construct
  misc_feature 1..20: note = chemically synthesized
  source 1..20: mol_type = other DNA
aagctattcttcaatgtggc

SEQ ID NO: 53172 - DNA, 20 bp, synthetic construct
  misc_feature 1..20: note = chemically synthesized
  source 1..20: mol_type = other DNA
agctattcttcaatgtggca

SEQ ID NO: 53173 - DNA, 20 bp, synthetic construct
  misc_feature 1..20: note = chemically synthesized
  source 1..20: mol_type = other DNA
gctattcttcaatgtggcag

SEQ ID NO: 53174 - DNA, 20 bp, synthetic construct
  misc_feature 1..20: note = chemically synthesized
  source 1..20: mol_type = other DNA
caggggaaaaatctttgaaa

SEQ ID NO: 53175 - DNA, 20 bp, synthetic construct
  misc_feature 1..20: note = chemically synthesized
  source 1..20: mol_type = other DNA
aaaatctttgaaaaagctac

SEQ ID NO: 53176 - DNA, 20 bp, synthetic construct
  misc_feature 1..20: note = chemically synthesized
  source 1..20: mol_type = other DNA
aaatattgattccaaccact

SEQ ID NO: 53177 - DNA, 20 bp, synthetic construct
  misc_feature 1..20: note = chemically synthesized
  source 1..20: mol_type = other DNA
ccaaccactgagaaactcta

SEQ ID NO: 53178 - DNA, 20 bp, synthetic construct
  misc_feature 1..20: note = chemically synthesized
  source 1..20: mol_type = other DNA
accactgagaaactctacag

SEQ ID NO: 53179 - DNA, 20 bp, synthetic construct
  misc_feature 1..20: note = chemically synthesized
  source 1..20: mol_type = other DNA
ccactgagaaactctacagc

SEQ ID NO: 53180 - DNA, 20 bp, synthetic construct
  misc_feature 1..20: note = chemically synthesized
  source 1..20: mol_type = other DNA
cactgagaaactctacagca

SEQ ID NO: 53181 - DNA, 20 bp, synthetic construct
  misc_feature 1..20: note = chemically synthesized
  source 1..20: mol_type = other DNA
agcagggatgtccaatcttt

SEQ ID NO: 53182 - DNA, 20 bp, synthetic construct
  misc_feature 1..20: note = chemically synthesized
  source 1..20: mol_type = other DNA
gtccaatcttttggcttccc

SEQ ID NO: 53183 - DNA, 20 bp, synthetic construct
  misc_feature 1..20: note = chemically synthesized
  source 1..20: mol_type = other DNA
tccaatcttttggcttccct

SEQ ID NO: 53184 - DNA, 20 bp, synthetic construct
  misc_feature 1..20: note = chemically synthesized
  source 1..20: mol_type = other DNA
aaatatactaacactaatga

SEQ ID NO: 53185 - DNA, 20 bp, synthetic construct
  misc_feature 1..20: note = chemically synthesized
  source 1..20: mol_type = other DNA
taacactaatgacagctcat

SEQ ID NO: 53186 - DNA, 20 bp, synthetic construct
  misc_feature 1..20: note = chemically synthesized
  source 1..20: mol_type = other DNA
ataaaatctcataatgtttt

SEQ ID NO: 53187 - DNA, 20 bp, synthetic construct
  misc_feature 1..20: note = chemically synthesized
  source 1..20: mol_type = other DNA
aatctcataatgttttaaga

SEQ ID NO: 53188 - DNA, 20 bp, synthetic construct
  misc_feature 1..20: note = chemically synthesized
  source 1..20: mol_type = other DNA
atgttttaagaaagttgtgt

SEQ ID NO: 53189 - DNA, 20 bp, synthetic construct
  misc_feature 1..20: note = chemically synthesized
  source 1..20: mol_type = other DNA
tttaagaaagttgtgttgga

SEQ ID NO: 53190 - DNA, 20 bp, synthetic construct
  misc_feature 1..20: note = chemically synthesized
  source 1..20: mol_type = other DNA
gttgtgttggatagcattca

SEQ ID NO: 53191 - DNA, 20 bp, synthetic construct
  misc_feature 1..20: note = chemically synthesized
  source 1..20: mol_type = other DNA
gatagcattcaaagccatct

SEQ ID NO: 53192 - DNA, 20 bp, synthetic construct
  misc_feature 1..20: note = chemically synthesized
  source 1..20: mol_type = other DNA
atagcattcaaagccatctt

SEQ ID NO: 53193 - DNA, 20 bp, synthetic construct
  misc_feature 1..20: note = chemically synthesized
  source 1..20: mol_type = other DNA
aagccatcttgggatgcatg

SEQ ID NO: 53194 - DNA, 20 bp, synthetic construct
  misc_feature 1..20: note = chemically synthesized
  source 1..20: mol_type = other DNA
cttgggatgcatgcagccca

SEQ ID NO: 53195 - DNA, 20 bp, synthetic construct
  misc_feature 1..20: note = chemically synthesized
  source 1..20: mol_type = other DNA
ttgggatgcatgcagcccac

SEQ ID NO: 53196 - DNA, 20 bp, synthetic construct
  misc_feature 1..20: note = chemically synthesized
  source 1..20: mol_type = other DNA
tgcatgcagcccacgggcca

SEQ ID NO: 53197 - DNA, 20 bp, synthetic construct
  misc_feature 1..20: note = chemically synthesized
  source 1..20: mol_type = other DNA
gcatgcagcccacgggccac

SEQ ID NO: 53198 - DNA, 20 bp, synthetic construct
  misc_feature 1..20: note = chemically synthesized
  source 1..20: mol_type = other DNA
gcagcccacgggccacaggt

SEQ ID NO: 53199 - DNA, 20 bp, synthetic construct
  misc_feature 1..20: note = chemically synthesized
  source 1..20: mol_type = other DNA
ccacgggccacaggttggac

SEQ ID NO: 53200 - DNA, 20 bp, synthetic construct
  misc_feature 1..20: note = chemically synthesized
  source 1..20: mol_type = other DNA
ggttggacaagcttgctcta

SEQ ID NO: 53201 - DNA, 20 bp, synthetic construct
  misc_feature 1..20: note = chemically synthesized
  source 1..20: mol_type = other DNA
ttgctctacagcctacaaac

SEQ ID NO: 53202 - DNA, 20 bp, synthetic construct
  misc_feature 1..20: note = chemically synthesized
  source 1..20: mol_type = other DNA
tgctctacagcctacaaaca

SEQ ID NO: 53203 - DNA, 20 bp, synthetic construct
  misc_feature 1..20: note = chemically synthesized
  source 1..20: mol_type = other DNA
tctacagcctacaaacaagg

SEQ ID NO: 53204 - DNA, 20 bp, synthetic construct
  misc_feature 1..20: note = chemically synthesized
  source 1..20: mol_type = other DNA
aatatttctgttctcttttc

SEQ ID NO: 53205 - DNA, 20 bp, synthetic construct
  misc_feature 1..20: note = chemically synthesized
  source 1..20: mol_type = other DNA
tcttttctggcaccaactcc

SEQ ID NO: 53206 - DNA, 20 bp, synthetic construct
  misc_feature 1..20: note = chemically synthesized
  source 1..20: mol_type = other DNA
gcaccaactcccagctttac

SEQ ID NO: 53207 - DNA, 20 bp, synthetic construct
  misc_feature 1..20: note = chemically synthesized
  source 1..20: mol_type = other DNA
gctttactagcaccaactcc

SEQ ID NO: 53208 - DNA, 20 bp, synthetic construct
  misc_feature 1..20: note = chemically synthesized
  source 1..20: mol_type = other DNA
agctttactaacttacaaat

SEQ ID NO: 53209 - DNA, 20 bp, synthetic construct
  misc_feature 1..20: note = chemically synthesized
  source 1..20: mol_type = other DNA
tttactaacttacaaatgag

SEQ ID NO: 53210 - DNA, 20 bp, synthetic construct
  misc_feature 1..20: note = chemically synthesized
  source 1..20: mol_type = other DNA
acttacaaatgagaagaaac

SEQ ID NO: 53211 - DNA, 20 bp, synthetic construct
  misc_feature 1..20: note = chemically synthesized
  source 1..20: mol_type = other DNA
cttacaaatgagaagaaacc

SEQ ID NO: 53212 - DNA, 20 bp, synthetic construct
  misc_feature 1..20: note = chemically synthesized
  source 1..20: mol_type = other DNA
tatgccaaattacttgttcg

SEQ ID NO: 53213 - DNA, 20 bp, synthetic construct
  misc_feature 1..20: note = chemically synthesized
  source 1..20: mol_type = other DNA
ccaaattacttgttcgaaga

SEQ ID NO: 53214 - DNA, 20 bp, synthetic construct
  misc_feature 1..20: note = chemically synthesized
  source 1..20: mol_type = other DNA
caaattacttgttcgaagaa

SEQ ID NO: 53215 - DNA, 20 bp, synthetic construct
  misc_feature 1..20: note = chemically synthesized
  source 1..20: mol_type = other DNA
tgttcgaagaaaggatcatc

SEQ ID NO: 53216 - DNA, 20 bp, synthetic construct
  misc_feature 1..20: note = chemically synthesized
  source 1..20: mol_type = other DNA
atcatctggaattcttttct

SEQ ID NO: 53217 - DNA, 20 bp, synthetic construct
  misc_feature 1..20: note = chemically synthesized
  source 1..20: mol_type = other DNA
ttcttggatttcctccactc

SEQ ID NO: 53218 - DNA, 20 bp, synthetic construct
  misc_feature 1..20: note = chemically synthesized
  source 1..20: mol_type = other DNA
tttcctccactcaagtccca

SEQ ID NO: 53219 - DNA, 20 bp, synthetic construct
  misc_feature 1..20: note = chemically synthesized
  source 1..20: mol_type = other DNA
ctccactcaagtcccatagt

SEQ ID NO: 53220 - DNA, 20 bp, synthetic construct
  misc_feature 1..20: note = chemically synthesized
  source 1..20: mol_type = other DNA
tcaagtcccatagtaagata

SEQ ID NO: 53221 - DNA, 20 bp, synthetic construct
  misc_feature 1..20: note = chemically synthesized
  source 1..20: mol_type = other DNA
caagtcccatagtaagataa

SEQ ID NO: 53222 - DNA, 20 bp, synthetic construct
  misc_feature 1..20: note = chemically synthesized
  source 1..20: mol_type = other DNA
attgtatctttttcattttt

SEQ ID NO: 53223 - DNA, 20 bp, synthetic construct
  misc_feature 1..20: note = chemically synthesized
  source 1..20: mol_type = other DNA
tctttttcattttttggctg

SEQ ID NO: 53224 - DNA, 20 bp, synthetic construct
  misc_feature 1..20: note = chemically synthesized
  source 1..20: mol_type = other DNA
tcattttttggctgaagcac

SEQ ID NO: 53225 - DNA, 20 bp, synthetic construct
  misc_feature 1..20: note = chemically synthesized
  source 1..20: mol_type = other DNA
ttggctgaagcactagcatc

SEQ ID NO: 53226 - DNA, 20 bp, synthetic construct
  misc_feature 1..20: note = chemically synthesized
  source 1..20: mol_type = other DNA
tggctgaagcactagcatcc

SEQ ID NO: 53227 - DNA, 20 bp, synthetic construct
  misc_feature 1..20: note = chemically synthesized
  source 1..20: mol_type = other DNA
ccaggacactaatttaccta

SEQ ID NO: 53228 - DNA, 20 bp, synthetic construct
  misc_feature 1..20: note = chemically synthesized
  source 1..20: mol_type = other DNA
ttacctatagaacaattatc

SEQ ID NO: 53229 - DNA, 20 bp, synthetic construct
  misc_feature 1..20: note = chemically synthesized
  source 1..20: mol_type = other DNA
aacaattatctagactcaat

SEQ ID NO: 53230 - DNA, 20 bp, synthetic construct
  misc_feature 1..20: note = chemically synthesized
  source 1..20: mol_type = other DNA
aattatctagactcaattag

SEQ ID NO: 53231 - DNA, 20 bp, synthetic construct
  misc_feature 1..20: note = chemically synthesized
  source 1..20: mol_type = other DNA
tagaagtatcttacatattg

SEQ ID NO: 53232 - DNA, 20 bp, synthetic construct
  misc_feature 1..20: note = chemically synthesized
  source 1..20: mol_type = other DNA
aagtatcttacatattgaag

SEQ ID NO: 53233 - DNA, 20 bp, synthetic construct
  misc_feature 1..20: note = chemically synthesized
  source 1..20: mol_type = other DNA
gtatcttacatattgaagca

SEQ ID NO: 53234 - DNA, 20 bp, synthetic construct
  misc_feature 1..20: note = chemically synthesized
  source 1..20: mol_type = other DNA
cttacatattgaagcagagt

SEQ ID NO: 53235 - DNA, 20 bp, synthetic construct
  misc_feature 1..20: note = chemically synthesized
  source 1..20: mol_type = other DNA
tacatattgaagcagagtta

SEQ ID NO: 53236 - DNA, 20 bp, synthetic construct
  misc_feature 1..20: note = chemically synthesized
  source 1..20: mol_type = other DNA
agagttagagctaaaatctc

SEQ ID NO: 53237 - DNA, 20 bp, synthetic construct
  misc_feature 1..20: note = chemically synthesized
  source 1..20: mol_type = other DNA
aatccaacatccttaattta

SEQ ID NO: 53238 - DNA, 20 bp, synthetic construct
  misc_feature 1..20: note = chemically synthesized
  source 1..20: mol_type = other DNA
ttaatttacagatactaaat

SEQ ID NO: 53239 - DNA, 20 bp, synthetic construct
  misc_feature 1..20: note = chemically synthesized
  source 1..20: mol_type = other DNA
atttacagatactaaatcag

SEQ ID NO: 53240 - DNA, 20 bp, synthetic construct
  misc_feature 1..20: note = chemically synthesized
  source 1..20: mol_type = other DNA
agatactaaatcagtagcca

SEQ ID NO: 53241 - DNA, 20 bp, synthetic construct
  misc_feature 1..20: note = chemically synthesized
  source 1..20: mol_type = other DNA
agccatttttactgctattt

SEQ ID NO: 53242 - DNA, 20 bp, synthetic construct
  misc_feature 1..20: note = chemically synthesized
  source 1..20: mol_type = other DNA
tttactgctattttggttaa

SEQ ID NO: 53243 - DNA, 20 bp, synthetic construct
  misc_feature 1..20: note = chemically synthesized
  source 1..20: mol_type = other DNA
ttactgctattttggttaac

SEQ ID NO: 53244 - DNA, 20 bp, synthetic construct
  misc_feature 1..20: note = chemically synthesized
  source 1..20: mol_type = other DNA
tactgctattttggttaaca

SEQ ID NO: 53245 - DNA, 20 bp, synthetic construct
  misc_feature 1..20: note = chemically synthesized
  source 1..20: mol_type = other DNA
atccatttccttgaaatcca

SEQ ID NO: 53246 - DNA, 20 bp, synthetic construct
  misc_feature 1..20: note = chemically synthesized
  source 1..20: mol_type = other DNA
tccatagaaatttaaaaact

SEQ ID NO: 53247 - DNA, 20 bp, synthetic construct
  misc_feature 1..20: note = chemically synthesized
  source 1..20: mol_type = other DNA
ttaaaaactgagtcttttaa

SEQ ID NO: 53248 - DNA, 20 bp, synthetic construct
  misc_feature 1..20: note = chemically synthesized
  source 1..20: mol_type = other DNA
taacagcacaatctgctcta

SEQ ID NO: 53249 - DNA, 20 bp, synthetic construct
  misc_feature 1..20: note = chemically synthesized
  source 1..20: mol_type = other DNA
cacaatctgctctaaagtga

SEQ ID NO: 53250 - DNA, 20 bp, synthetic construct
  misc_feature 1..20: note = chemically synthesized
  source 1..20: mol_type = other DNA
tttctgacatgaacttatgt

SEQ ID NO: 53251 - DNA, 20 bp, synthetic construct
  misc_feature 1..20: note = chemically synthesized
  source 1..20: mol_type = other DNA
atgttccctgcaaaaatatc

SEQ ID NO: 53252 - DNA, 20 bp, synthetic construct
  misc_feature 1..20: note = chemically synthesized
  source 1..20: mol_type = other DNA
tgttccctgcaaaaatatct

SEQ ID NO: 53253 - DNA, 20 bp, synthetic construct
  misc_feature 1..20: note = chemically synthesized
  source 1..20: mol_type = other DNA
gcaaaaatatctaggtatat

SEQ ID NO: 53254 - DNA, 20 bp, synthetic construct
  misc_feature 1..20: note = chemically synthesized
  source 1..20: mol_type = other DNA
aggtatattagataatcata

SEQ ID NO: 53255 - DNA, 20 bp, synthetic construct
  misc_feature 1..20: note = chemically synthesized
  source 1..20: mol_type = other DNA
catatagatatatgattatt

SEQ ID NO: 53256 - DNA, 20 bp, synthetic construct
  misc_feature 1..20: note = chemically synthesized
  source 1..20: mol_type = other DNA
atatagatatatgattatta

SEQ ID NO: 53257 - DNA, 20 bp, synthetic construct
  misc_feature 1..20: note = chemically synthesized
  source 1..20: mol_type = other DNA
tatagatatatgattattaa

SEQ ID NO: 53258 - DNA, 20 bp, synthetic construct
  misc_feature 1..20: note = chemically synthesized
  source 1..20: mol_type = other DNA
atgattattaagggcatacc

SEQ ID NO: 53259 - DNA, 20 bp, synthetic construct
  misc_feature 1..20: note = chemically synthesized
  source 1..20: mol_type = other DNA
tatataacattcataaaaat

SEQ ID NO: 53260 - DNA, 20 bp, synthetic construct
  misc_feature 1..20: note = chemically synthesized
  source 1..20: mol_type = other DNA
attggaaaattatttttcta

SEQ ID NO: 53261 - DNA, 20 bp, synthetic construct
  misc_feature 1..20: note = chemically synthesized
  source 1..20: mol_type = other DNA
aattatttttctaaagcatg

SEQ ID NO: 53262 - DNA, 20 bp, synthetic construct
  misc_feature 1..20: note = chemically synthesized
  source 1..20: mol_type = other DNA
tttctaaagcatgtggctca

SEQ ID NO: 53263 - DNA, 20 bp, synthetic construct
  misc_feature 1..20: note = chemically synthesized
  source 1..20: mol_type = other DNA
agcatgtggctcaaagactg

SEQ ID NO: 53264 - DNA, 20 bp, synthetic construct
  misc_feature 1..20: note = chemically synthesized
  source 1..20: mol_type = other DNA
caaagactgtagacttctat

SEQ ID NO: 53265 - DNA, 20 bp, synthetic construct
  misc_feature 1..20: note = chemically synthesized
  source 1..20: mol_type = other DNA
taactattatttcatctgca

SEQ ID NO: 53266 - DNA, 20 bp, synthetic construct
  misc_feature 1..20: note = chemically synthesized
  source 1..20: mol_type = other DNA
atctgcatagaatattgctg

SEQ ID NO: 53267 - DNA, 20 bp, synthetic construct
  misc_feature 1..20: note = chemically synthesized
  source 1..20: mol_type = other DNA
tctgcatagaatattgctga

SEQ ID NO: 53268 - DNA, 20 bp, synthetic construct
  misc_feature 1..20: note = chemically synthesized
  source 1..20: mol_type = other DNA
attgctgaaggtgtgtttta

SEQ ID NO: 53269 - DNA, 20 bp, synthetic construct
  misc_feature 1..20: note = chemically synthesized
  source 1..20: mol_type = other DNA
gctgaaggtgtgttttaaag

SEQ ID NO: 53270 - DNA, 20 bp, synthetic construct
  misc_feature 1..20: note = chemically synthesized
  source 1..20: mol_type = other DNA
tgtgttttaaagtagtaaca

SEQ ID NO: 53271 - DNA, 20 bp, synthetic construct
  misc_feature 1..20: note = chemically synthesized
  source 1..20: mol_type = other DNA
gtaacatggtacttgtatca

SEQ ID NO: 53272 - DNA, 20 bp, synthetic construct
  misc_feature 1..20: note = chemically synthesized
  source 1..20: mol_type = other DNA
acatggtacttgtatcacag

SEQ ID NO: 53273 - DNA, 20 bp, synthetic construct
  misc_feature 1..20: note = chemically synthesized
  source 1..20: mol_type = other DNA
tacttgtatcacagcagccg

SEQ ID NO: 53274 - DNA, 20 bp, synthetic construct
  misc_feature 1..20: note = chemically synthesized
  source 1..20: mol_type = other DNA
gtatcacagcagccgtagtt

SEQ ID NO: 53275 - DNA, 20 bp, synthetic construct
  misc_feature 1..20: note = chemically synthesized
  source 1..20: mol_type = other DNA
ctcttgcatattatatttat

SEQ ID NO: 53276 - DNA, 20 bp, synthetic construct
  misc_feature 1..20: note = chemically synthesized
  source 1..20: mol_type = other DNA
tgctcaaaaaaaaattcttc

SEQ ID NO: 53277 - DNA, 20 bp, synthetic construct
  misc_feature 1..20: note = chemically synthesized
  source 1..20: mol_type = other DNA
aaaaaaaattcttcaagttt

SEQ ID NO: 53278 - DNA, 20 bp, synthetic construct
  misc_feature 1..20: note = chemically synthesized
  source 1..20: mol_type = other DNA
aaaaaattcttcaagtttta

SEQ ID NO: 53279 - DNA, 20 bp, synthetic construct
  misc_feature 1..20: note = chemically synthesized
  source 1..20: mol_type = other DNA
tcttcaagttttagagtccc

SEQ ID NO: 53280 - DNA, 20 bp, synthetic construct
  misc_feature 1..20: note = chemically synthesized
  source 1..20: mol_type = other DNA
agatttaaaaacattataat

SEQ ID NO: 53281 - DNA, 20 bp, synthetic construct
  misc_feature 1..20: note = chemically synthesized
  source 1..20: mol_type = other DNA
aaaacattataataagttat

SEQ ID NO: 53282 - DNA, 20 bp, synthetic construct
  misc_feature 1..20: note = chemically synthesized
  source 1..20: mol_type = other DNA
acattataataagttatcag

SEQ ID NO: 53283 - DNA, 20 bp, synthetic construct
  misc_feature 1..20: note = chemically synthesized
  source 1..20: mol_type = other DNA
attataataagttatcagca

SEQ ID NO: 53284 - DNA, 20 bp, synthetic construct
  misc_feature 1..20: note = chemically synthesized
  source 1..20: mol_type = other DNA
tatcagcagagtatacctct

SEQ ID NO: 53285 - DNA, 20 bp, synthetic construct
  misc_feature 1..20: note = chemically synthesized
  source 1..20: mol_type = other DNA
tttgttcttcctgtcactat

SEQ ID NO: 53286 - DNA, 20 bp, synthetic construct
  misc_feature 1..20: note = chemically synthesized
  source 1..20: mol_type = other DNA
ttgttcttcctgtcactatc

SEQ ID NO: 53287 - DNA, 20 bp, synthetic construct
  misc_feature 1..20: note = chemically synthesized
  source 1..20: mol_type = other DNA
ttcttcctgtcactatcagg

SEQ ID NO: 53288 - DNA, 20 bp, synthetic construct
  misc_feature 1..20: note = chemically synthesized
  source 1..20: mol_type = other DNA
tcctgtcactatcaggtagt

SEQ ID NO: 53289 - DNA, 20 bp, synthetic construct
  misc_feature 1..20: note = chemically synthesized
  source 1..20: mol_type = other DNA
cactatcaggtagtcagatg

SEQ ID NO: 53290 - DNA, 20 bp, synthetic construct
  misc_feature 1..20: note = chemically synthesized
  source 1..20: mol_type = other DNA
attcctttaatttcttttcc

SEQ ID NO: 53291 - DNA, 20 bp, synthetic construct
  misc_feature 1..20: note = chemically synthesized
  source 1..20: mol_type = other DNA
ttcctttaatttcttttcca

SEQ ID NO: 53292 - DNA, 20 bp, synthetic construct
  misc_feature 1..20: note = chemically synthesized
  source 1..20: mol_type = other DNA
tttaatttcttttccaagga

SEQ ID NO: 53293 - DNA, 20 bp, synthetic construct
  misc_feature 1..20: note = chemically synthesized
  source 1..20: mol_type = other DNA
ttaatttcttttccaaggat

SEQ ID NO: 53294 - DNA, 20 bp, synthetic construct
  misc_feature 1..20: note = chemically synthesized
  source 1..20: mol_type = other DNA
atttcttttccaaggatagg

SEQ ID NO: 53295 - DNA, 20 bp, synthetic construct
  misc_feature 1..20: note = chemically synthesized
  source 1..20: mol_type = other DNA
tttcttttccaaggataggt

SEQ ID NO: 53296 - DNA, 20 bp, synthetic construct
  misc_feature 1..20: note = chemically synthesized
  source 1..20: mol_type = other DNA
cttttccaaggataggtggg

SEQ ID NO: 53297 - DNA, 20 bp, synthetic construct
  misc_feature 1..20: note = chemically synthesized
  source 1..20: mol_type = other DNA
ccaaggataggtgggaagat

SEQ ID NO: 53298 - DNA, 20 bp, synthetic construct
  misc_feature 1..20: note = chemically synthesized
  source 1..20: mol_type = other DNA
cctttctttaatgtctaaaa

SEQ ID NO: 53299 - DNA, 20 bp, synthetic construct
  misc_feature 1..20: note = chemically synthesized
  source 1..20: mol_type = other DNA
tctttaatgtctaaaaaagc

SEQ ID NO: 53300 - DNA, 20 bp, synthetic construct
  misc_feature 1..20: note = chemically synthesized
  source 1..20: mol_type = other DNA
ctttaatgtctaaaaaagca

SEQ ID NO: 53301 - DNA, 20 bp, synthetic construct
  misc_feature 1..20: note = chemically synthesized
  source 1..20: mol_type = other DNA
atgtctaaaaaagcaaggtg

SEQ ID NO: 53302 - DNA, 20 bp, synthetic construct
  misc_feature 1..20: note = chemically synthesized
  source 1..20: mol_type = other DNA
catccaatttaccctcacta

SEQ ID NO: 53303 - DNA, 20 bp, synthetic construct
  misc_feature 1..20: note = chemically synthesized
  source 1..20: mol_type = other DNA
tttaccctcactatggtttc

SEQ ID NO: 53304 - DNA, 20 bp, synthetic construct
  misc_feature 1..20: note = chemically synthesized
  source 1..20: mol_type = other DNA
atggtttcaagacctttgaa

SEQ ID NO: 53305 - DNA, 20 bp, synthetic construct
  misc_feature 1..20: note = chemically synthesized
  source 1..20: mol_type = other DNA
tttcaagacctttgaatgga

SEQ ID NO: 53306 - DNA, 20 bp, synthetic construct
  misc_feature 1..20: note = chemically synthesized
  source 1..20: mol_type = other DNA
ttcttatatctcccaccata

SEQ ID NO: 53307 - DNA, 20 bp, synthetic construct
  misc_feature 1..20: note = chemically synthesized
  source 1..20: mol_type = other DNA
taataaaatatgacctctct

SEQ ID NO: 53308 - DNA, 20 bp, synthetic construct
  misc_feature 1..20: note = chemically synthesized
  source 1..20: mol_type = other DNA
aaaatatgacctctcttagc

SEQ ID NO: 53309 - DNA, 20 bp, synthetic construct
  misc_feature 1..20: note = chemically synthesized
  source 1..20: mol_type = other DNA
tatgacctctcttagccagt

SEQ ID NO: 53310 - DNA, 20 bp, synthetic construct
  misc_feature 1..20: note = chemically synthesized
  source 1..20: mol_type = other DNA
tctcttagccagtgagaact

SEQ ID NO: 53311 - DNA, 20 bp, synthetic construct
  misc_feature 1..20: note = chemically synthesized
  source 1..20: mol_type = other DNA
ccagtgagaactaagatgcc

SEQ ID NO: 53312 - DNA, 20 bp, synthetic construct
  misc_feature 1..20: note = chemically synthesized
  source 1..20: mol_type = other DNA
aagatgcctagatgactgat

SEQ ID NO: 53313 - DNA, 20 bp, synthetic construct
  misc_feature 1..20: note = chemically synthesized
  source 1..20: mol_type = other DNA
gatgcctagatgactgattg

SEQ ID NO: 53314 - DNA, 20 bp, synthetic construct
  misc_feature 1..20: note = chemically synthesized
  source 1..20: mol_type = other DNA
atgcctagatgactgattgg

SEQ ID NO: 53315 - DNA, 20 bp, synthetic construct
  misc_feature 1..20: note = chemically synthesized
  source 1..20: mol_type = other DNA
agatgactgattggaggacc

SEQ ID NO: 53316 - DNA, 20 bp, synthetic construct
  misc_feature 1..20: note = chemically synthesized
  source 1..20: mol_type = other DNA
gatgactgattggaggacct

SEQ ID NO: 53317 - DNA, 20 bp, synthetic construct
  misc_feature 1..20: note = chemically synthesized
  source 1..20: mol_type = other DNA
ggaggacctgggcacttgcc

SEQ ID NO: 53318 - DNA, 20 bp, synthetic construct
  misc_feature 1..20: note = chemically synthesized
  source 1..20: mol_type = other DNA
cacttgcctagcatccaatc

SEQ ID NO: 53319 - DNA, 20 bp, synthetic construct
  misc_feature 1..20: note = chemically synthesized
  source 1..20: mol_type = other DNA
agcatccaatcaagatcatc

SEQ ID NO: 53320 - DNA, 20 bp, synthetic construct
  misc_feature 1..20: note = chemically synthesized
  source 1..20: mol_type = other DNA
tccaatcaagatcatccagt

SEQ ID NO: 53321 - DNA, 20 bp, synthetic construct
  misc_feature 1..20: note = chemically synthesized
  source 1..20: mol_type = other DNA
ccaatcaagatcatccagtc

SEQ ID NO: 53322 - DNA, 20 bp, synthetic construct
  misc_feature 1..20: note = chemically synthesized
  source 1..20: mol_type = other DNA
caatcaagatcatccagtca

SEQ ID NO: 53323 - DNA, 20 bp, synthetic construct
  misc_feature 1..20: note = chemically synthesized
  source 1..20: mol_type = other DNA
caagatcatccagtcagggt

SEQ ID NO: 53324 - DNA, 20 bp, synthetic construct
  misc_feature 1..20: note = chemically synthesized
  source 1..20: mol_type = other DNA
gatgtcaaacatcatattta

SEQ ID NO: 53325 - DNA, 20 bp, synthetic construct
  misc_feature 1..20: note = chemically synthesized
  source 1..20: mol_type = other DNA
atgtcaaacatcatatttat

SEQ ID NO: 53326 - DNA, 20 bp, synthetic construct
  misc_feature 1..20: note = chemically synthesized
  source 1..20: mol_type = other DNA
tgtcaaacatcatatttata

SEQ ID NO: 53327 - DNA, 20 bp, synthetic construct
  misc_feature 1..20: note = chemically synthesized
  source 1..20: mol_type = other DNA
caaacatcatatttataggg

SEQ ID NO: 53328 - DNA, 20 bp, synthetic construct
  misc_feature 1..20: note = chemically synthesized
  source 1..20: mol_type = other DNA
ttttactatttttttttact

SEQ ID NO: 53329 - DNA, 20 bp, synthetic construct
  misc_feature 1..20: note = chemically synthesized
  source 1..20: mol_type = other DNA
tttactaagttttactacta

SEQ ID NO: 53330 - DNA, 20 bp, synthetic construct
  misc_feature 1..20: note = chemically synthesized
  source 1..20: mol_type = other DNA
ttactaagttttactactat

SEQ ID NO: 53331 - DNA, 20 bp, synthetic construct
  misc_feature 1..20: note = chemically synthesized
  source 1..20: mol_type = other DNA
tttactactataggtgaaaa

SEQ ID NO: 53332 - DNA, 20 bp, synthetic construct
  misc_feature 1..20: note = chemically synthesized
  source 1..20: mol_type = other DNA
ctataggtgaaaaaagcttc

SEQ ID NO: 53333 - DNA, 20 bp, synthetic construct
  misc_feature 1..20: note = chemically synthesized
  source 1..20: mol_type = other DNA
tataggtgaaaaaagcttct

SEQ ID NO: 53334 - DNA, 20 bp, synthetic construct
  misc_feature 1..20: note = chemically synthesized
  source 1..20: mol_type = other DNA
ataggtgaaaaaagcttcta

SEQ ID NO: 53335 - DNA, 20 bp, synthetic construct
  misc_feature 1..20: note = chemically synthesized
  source 1..20: mol_type = other DNA
agggattctttgaaaaatat

SEQ ID NO: 53336 - DNA, 20 bp, synthetic construct
  misc_feature 1..20: note = chemically synthesized
  source 1..20: mol_type = other DNA
tgaaaaatatcagaaaatca

SEQ ID NO: 53337 - DNA, 20 bp, synthetic construct
  misc_feature 1..20: note = chemically synthesized
  source 1..20: mol_type = other DNA
atcagaaaatcacagatata

SEQ ID NO: 53338 - DNA, 20 bp, synthetic construct
  misc_feature 1..20: note = chemically synthesized
  source 1..20: mol_type = other DNA
agaaaatcacagatatatgg

SEQ ID NO: 53339 - DNA, 20 bp, synthetic construct
  misc_feature 1..20: note = chemically synthesized
  source 1..20: mol_type = other DNA
gaaaatcacagatatatgga

SEQ ID NO: 53340 - DNA, 20 bp, synthetic construct
  misc_feature 1..20: note = chemically synthesized
  source 1..20: mol_type = other DNA
atatatggaaggctccactt

SEQ ID NO: 53341 - DNA, 20 bp, synthetic construct
  misc_feature 1..20: note = chemically synthesized
  source 1..20: mol_type = other DNA
atatggaaggctccacttga

SEQ ID NO: 53342 - DNA, 20 bp, synthetic construct
  misc_feature 1..20: note = chemically synthesized
  source 1..20: mol_type = other DNA
aaggctccacttgagagaat

SEQ ID NO: 53343 - DNA, 20 bp, synthetic construct
  misc_feature 1..20: note = chemically synthesized
  source 1..20: mol_type = other DNA
aggctccacttgagagaata

SEQ ID NO: 53344 - DNA, 20 bp, synthetic construct
  misc_feature 1..20: note = chemically synthesized
  source 1..20: mol_type = other DNA
aacatctctctccataaatc

SEQ ID NO: 53345 - DNA, 20 bp, synthetic construct
  misc_feature 1..20: note = chemically synthesized
  source 1..20: mol_type = other DNA
tctccataaatctggcttat

SEQ ID NO: 53346 - DNA, 20 bp, synthetic construct
  misc_feature 1..20: note = chemically synthesized
  source 1..20: mol_type = other DNA
aaatctggcttatcagtgtg

SEQ ID NO: 53347 - DNA, 20 bp, synthetic construct
  misc_feature 1..20: note = chemically synthesized
  source 1..20: mol_type = other DNA
ctggcttatcagtgtgaagc

SEQ ID NO: 53348 - DNA, 20 bp, synthetic construct
  misc_feature 1..20: note = chemically synthesized
  source 1..20: mol_type = other DNA
ttttaattccatgaatatca

SEQ ID NO: 53349 - DNA, 20 bp, synthetic construct
  misc_feature 1..20: note = chemically synthesized
  source 1..20: mol_type = other DNA
ttcatctgtattcctcatta

SEQ ID NO: 53350 - DNA, 20 bp, synthetic construct
  misc_feature 1..20: note = chemically synthesized
  source 1..20: mol_type = other DNA
tcctcattaaagtatccttc

SEQ ID NO: 53351 - DNA, 20 bp, synthetic construct
  misc_feature 1..20: note = chemically synthesized
  source 1..20: mol_type = other DNA
ctcattaaagtatccttcaa

SEQ ID NO: 53352 - DNA, 20 bp, synthetic construct
  misc_feature 1..20: note = chemically synthesized
  source 1..20: mol_type = other DNA
taaagtatccttcaagagaa

SEQ ID NO: 53353 - DNA, 20 bp, synthetic construct
  misc_feature 1..20: note = chemically synthesized
  source 1..20: mol_type = other DNA
aaagtatccttcaagagaat

SEQ ID NO: 53354 - DNA, 20 bp, synthetic construct
  misc_feature 1..20: note = chemically synthesized
  source 1..20: mol_type = other DNA
tcaagagaatgggatatcta

SEQ ID NO: 53355 - DNA, 20 bp, synthetic construct
  misc_feature 1..20: note = chemically synthesized
  source 1..20: mol_type = other DNA
agagaatgggatatctacag

SEQ ID NO: 53356 - DNA, 20 bp, synthetic construct
  misc_feature 1..20: note = chemically synthesized
  source 1..20: mol_type = other DNA
cagtagctaatataatttct

SEQ ID NO: 53357 - DNA, 20 bp, synthetic construct
  misc_feature 1..20: note = chemically synthesized
  source 1..20: mol_type = other DNA
aatataatttcttggccctt

SEQ ID NO: 53358 - DNA, 20 bp, synthetic construct
  misc_feature 1..20: note = chemically synthesized
  source 1..20: mol_type = other DNA
gacccatttaccatgtgacc

SEQ ID NO: 53359 - DNA, 20 bp, synthetic construct
  misc_feature 1..20: note = chemically synthesized
  source 1..20: mol_type = other DNA
tttaccatgtgaccaagaaa

SEQ ID NO: 53360 - DNA, 20 bp, synthetic construct
  misc_feature 1..20: note = chemically synthesized
  source 1..20: mol_type = other DNA
accatgtgaccaagaaaaag

SEQ ID NO: 53361 - DNA, 20 bp, synthetic construct
  misc_feature 1..20: note = chemically synthesized
  source 1..20: mol_type = other DNA
ccatgtgaccaagaaaaagc

SEQ ID NO: 53362 - DNA, 20 bp, synthetic construct
  misc_feature 1..20: note = chemically synthesized
  source 1..20: mol_type = other DNA
catgtgaccaagaaaaagca

SEQ ID NO: 53363 - DNA, 20 bp, synthetic construct
  misc_feature 1..20: note = chemically synthesized
  source 1..20: mol_type = other DNA
tgaccaagaaaaagcaggga

SEQ ID NO: 53364 - DNA, 20 bp, synthetic construct
  misc_feature 1..20: note = chemically synthesized
  source 1..20: mol_type = other DNA
agaaaaagcagggaaagcaa

SEQ ID NO: 53365 - DNA, 20 bp, synthetic construct
  misc_feature 1..20: note = chemically synthesized
  source 1..20: mol_type = other DNA
caatagaaccttaaaaatta

SEQ ID NO: 53366 - DNA, 20 bp, synthetic construct
  misc_feature 1..20: note = chemically synthesized
  source 1..20: mol_type = other DNA
aatagaaccttaaaaattaa

SEQ ID NO: 53367 - DNA, 20 bp, synthetic construct
  misc_feature 1..20: note = chemically synthesized
  source 1..20: mol_type = other DNA
atagaaccttaaaaattaaa

SEQ ID NO: 53368 - DNA, 20 bp, synthetic construct
  misc_feature 1..20: note = chemically synthesized
  source 1..20: mol_type = other DNA
aaattaaagggaaataaaat

SEQ ID NO: 53369 - DNA, 20 bp, synthetic construct
  misc_feature 1..20: note = chemically synthesized
  source 1..20: mol_type = other DNA
attaaagggaaataaaatga

SEQ ID NO: 53370 - DNA, 20 bp, synthetic construct
  misc_feature 1..20: note = chemically synthesized
  source 1..20: mol_type = other DNA
aaaatgagagaattaacttt

SEQ ID NO: 53371 - DNA, 20 bp, synthetic construct
  misc_feature 1..20: note = chemically synthesized
  source 1..20: mol_type = other DNA
aaatgagagaattaactttt

SEQ ID NO: 53372 - DNA, 20 bp, synthetic construct
  misc_feature 1..20: note = chemically synthesized
  source 1..20: mol_type = other DNA
ttaacttttaggtgccatct

SEQ ID NO: 53373 - DNA, 20 bp, synthetic construct
  misc_feature 1..20: note = chemically synthesized
  source 1..20: mol_type = other DNA
ggtgccatctaagatgtgta

SEQ ID NO: 53374 - DNA, 20 bp, synthetic construct
  misc_feature 1..20: note = chemically synthesized
  source 1..20: mol_type = other DNA
ttgcaacctatatttgccaa

SEQ ID NO: 53375 - DNA, 20 bp, synthetic construct
  misc_feature 1..20: note = chemically synthesized
  source 1..20: mol_type = other DNA
tatatttgccaatggctcat

SEQ ID NO: 53376 - DNA, 20 bp, synthetic construct
  misc_feature 1..20: note = chemically synthesized
  source 1..20: mol_type = other DNA
tcattggaaacaatatatga

SEQ ID NO: 53377 - DNA, 20 bp, synthetic construct
  misc_feature 1..20: note = chemically synthesized
  source 1..20: mol_type = other DNA
cattggaaacaatatatgac

SEQ ID NO: 53378 - DNA, 20 bp, synthetic construct
  misc_feature 1..20: note = chemically synthesized
  source 1..20: mol_type = other DNA
attggaaacaatatatgaca

SEQ ID NO: 53379 - DNA, 20 bp, synthetic construct
  misc_feature 1..20: note = chemically synthesized
  source 1..20: mol_type = other DNA
acaatatatgacagggacaa

SEQ ID NO: 53380 - DNA, 20 bp, synthetic construct
  misc_feature 1..20: note = chemically synthesized
  source 1..20: mol_type = other DNA
tatgacagggacaaaagacc

SEQ ID NO: 53381 - DNA, 20 bp, synthetic construct
  misc_feature 1..20: note = chemically synthesized
  source 1..20: mol_type = other DNA
ggacaaaagacctggacatg

SEQ ID NO: 53382 - DNA, 20 bp, synthetic construct
  misc_feature 1..20: note = chemically synthesized
  source 1..20: mol_type = other DNA
tgtagatgtatgtattaact

SEQ ID NO: 53383 - DNA, 20 bp, synthetic construct
  misc_feature 1..20: note = chemically synthesized
  source 1..20: mol_type = other DNA
gtagatgtatgtattaactt

SEQ ID NO: 53384 - DNA, 20 bp, synthetic construct
  misc_feature 1..20: note = chemically synthesized
  source 1..20: mol_type = other DNA
gtatgtattaacttaggtgt

SEQ ID NO: 53385 - DNA, 20 bp, synthetic construct
  misc_feature 1..20: note = chemically synthesized
  source 1..20: mol_type = other DNA
atgtattaacttaggtgtca

SEQ ID NO: 53386 - DNA, 20 bp, synthetic construct
  misc_feature 1..20: note = chemically synthesized
  source 1..20: mol_type = other DNA
gtattaacttaggtgtcaga

SEQ ID NO: 53387 - DNA, 20 bp, synthetic construct
  misc_feature 1..20: note = chemically synthesized
  source 1..20: mol_type = other DNA
ttaacttaggtgtcagagag

SEQ ID NO: 53388 - DNA, 20 bp, synthetic construct
  misc_feature 1..20: note = chemically synthesized
  source 1..20: mol_type = other DNA
acttaggtgtcagagagtgg

SEQ ID NO: 53389 - DNA, 20 bp, synthetic construct
  misc_feature 1..20: note = chemically synthesized
  source 1..20: mol_type = other DNA
gtgtcagagagtggtggctg

SEQ ID NO: 53390 - DNA, 20 bp, synthetic construct
  misc_feature 1..20: note = chemically synthesized
  source 1..20: mol_type = other DNA
aaatgcacaaattataatga

SEQ ID NO: 53391 - DNA, 20 bp, synthetic construct
  misc_feature 1..20: note = chemically synthesized
  source 1..20: mol_type = other DNA
atgcacaaattataatgaaa

SEQ ID NO: 53392 - DNA, 20 bp, synthetic construct
  misc_feature 1..20: note = chemically synthesized
  source 1..20: mol_type = other DNA
aattataatgaaagagaatg

SEQ ID NO: 53393 - DNA, 20 bp, synthetic construct
  misc_feature 1..20: note = chemically synthesized
  source 1..20: mol_type = other DNA
atgcagtatgtttctccctg

SEQ ID NO: 53394 - DNA, 20 bp, synthetic construct
  misc_feature 1..20: note = chemically synthesized
  source 1..20: mol_type = other DNA
tctccctgtggactatgtac

SEQ ID NO: 53395 - DNA, 20 bp, synthetic construct
  misc_feature 1..20: note = chemically synthesized
  source 1..20: mol_type = other DNA
ccctgtggactatgtaccag

SEQ ID NO: 53396 - DNA, 20 bp, synthetic construct
  misc_feature 1..20: note = chemically synthesized
  source 1..20: mol_type = other DNA
tgtggactatgtaccagaag

SEQ ID NO: 53397 - DNA, 20 bp, synthetic construct
  misc_feature 1..20: note = chemically synthesized
  source 1..20: mol_type = other DNA
ctctgtgtcatctccttcca

SEQ ID NO: 53398 - DNA, 20 bp, synthetic construct
  misc_feature 1..20: note = chemically synthesized
  source 1..20: mol_type = other DNA
tctgtgtcatctccttccat

SEQ ID NO: 53399 - DNA, 20 bp, synthetic construct
  misc_feature 1..20: note = chemically synthesized
  source 1..20: mol_type = other DNA
tgtgtcatctccttccatgg

SEQ ID NO: 53400 - DNA, 20 bp, synthetic construct
  misc_feature 1..20: note = chemically synthesized
  source 1..20: mol_type = other DNA
gtgtcatctccttccatggg

SEQ ID NO: 53401 - DNA, 20 bp, synthetic construct
  misc_feature 1..20: note = chemically synthesized
  source 1..20: mol_type = other DNA
gtcatctccttccatgggag

SEQ ID NO: 53402 - DNA, 20 bp, synthetic construct
  misc_feature 1..20: note = chemically synthesized
  source 1..20: mol_type = other DNA
ggagtaaaattcgtcctctt

SEQ ID NO: 53403 - DNA, 20 bp, synthetic construct
  misc_feature 1..20: note = chemically synthesized
  source 1..20: mol_type = other DNA
tcctcttaagctgaaaacct

SEQ ID NO: 53404 - DNA, 20 bp, synthetic construct
  misc_feature 1..20: note = chemically synthesized
  source 1..20: mol_type = other DNA
cctcttaagctgaaaacctt

SEQ ID NO: 53405 - DNA, 20 bp, synthetic construct
  misc_feature 1..20: note = chemically synthesized
  source 1..20: mol_type = other DNA
aagctgaaaaccttgggccc

SEQ ID NO: 53406 - DNA, 20 bp, synthetic construct
  misc_feature 1..20: note = chemically synthesized
  source 1..20: mol_type = other DNA
gggcccaagacatgctttaa

SEQ ID NO: 53407 - DNA, 20 bp, synthetic construct
  misc_feature 1..20: note = chemically synthesized
  source 1..20: mol_type = other DNA
cccaagacatgctttaaaag

SEQ ID NO: 53408 - DNA, 20 bp, synthetic construct
  misc_feature 1..20: note = chemically synthesized
  source 1..20: mol_type = other DNA
tgctttaaaagaagtataaa

SEQ ID NO: 53409 - DNA, 20 bp, synthetic construct
  misc_feature 1..20: note = chemically synthesized
  source 1..20: mol_type = other DNA
aaaagaagtataaatagttc

SEQ ID NO: 53410 - DNA, 20 bp, synthetic construct
  misc_feature 1..20: note = chemically synthesized
  source 1..20: mol_type = other DNA
ctcaacctgctaaatatctt

SEQ ID NO: 53411 - DNA, 20 bp, synthetic construct
  misc_feature 1..20: note = chemically synthesized
  source 1..20: mol_type = other DNA
tcaacctgctaaatatcttc

SEQ ID NO: 53412 - DNA, 20 bp, synthetic construct
  misc_feature 1..20: note = chemically synthesized
  source 1..20: mol_type = other DNA
gctaaatatcttcaggattc

SEQ ID NO: 53413 - DNA, 20 bp, synthetic construct
  misc_feature 1..20: note = chemically synthesized
  source 1..20: mol_type = other DNA
ttcaggattctagaaaatgc

SEQ ID NO: 53414 - DNA, 20 bp, synthetic construct
  misc_feature 1..20: note = chemically synthesized
  source 1..20: mol_type = other DNA
ggattctagaaaatgcaagt

SEQ ID NO: 53415 - DNA, 20 bp, synthetic construct
  misc_feature 1..20: note = chemically synthesized
  source 1..20: mol_type = other DNA
aaaatgcaagtaagtaaact

SEQ ID NO: 53416 - DNA, 20 bp, synthetic construct
  misc_feature 1..20: note = chemically synthesized
  source 1..20: mol_type = other DNA
ttatgctcaatgaaaacttg

SEQ ID NO: 53417 - DNA, 20 bp, synthetic construct
  misc_feature 1..20: note = chemically synthesized
  source 1..20: mol_type = other DNA
aaacttgtagaaaataacac

SEQ ID NO: 53418 - DNA, 20 bp, synthetic construct
  misc_feature 1..20: note = chemically synthesized
  source 1..20: mol_type = other DNA
aaataacaccagaaaaaaaa

SEQ ID NO: 53419 - DNA, 20 bp, synthetic construct
  misc_feature 1..20: note = chemically synthesized
  source 1..20: mol_type = other DNA
aataacaccagaaaaaaaaa

SEQ ID NO: 53420 - DNA, 20 bp, synthetic construct
  misc_feature 1..20: note = chemically synthesized
  source 1..20: mol_type = other DNA
acaccagaaaaaaaaaaggc

SEQ ID NO: 53421 - DNA, 20 bp, synthetic construct
  misc_feature 1..20: note = chemically synthesized
  source 1..20: mol_type = other DNA
aaaaaaaaggcaagaaactg

SEQ ID NO: 53422 - DNA, 20 bp, synthetic construct
  misc_feature 1..20: note = chemically synthesized
  source 1..20: mol_type = other DNA
aaaaaggcaagaaactgcag

SEQ ID NO: 53423 - DNA, 20 bp, synthetic construct
  misc_feature 1..20: note = chemically synthesized
  source 1..20: mol_type = other DNA
aaggcaagaaactgcagaag

SEQ ID NO: 53424 - DNA, 20 bp, synthetic construct
  misc_feature 1..20: note = chemically synthesized
  source 1..20: mol_type = other DNA
tttccttgatttttgaccca

SEQ ID NO: 53425 - DNA, 20 bp, synthetic construct
  misc_feature 1..20: note = chemically synthesized
  source 1..20: mol_type = other DNA
atttttgacccatggaatac

SEQ ID NO: 53426 - DNA, 20 bp, synthetic construct
  misc_feature 1..20: note = chemically synthesized
  source 1..20: mol_type = other DNA
gacccatggaatactagact

SEQ ID NO: 53427 - DNA, 20 bp, synthetic construct
  misc_feature 1..20: note = chemically synthesized
  source 1..20: mol_type = other DNA
tggaatactagacttggctt

SEQ ID NO: 53428 - DNA, 20 bp, synthetic construct
  misc_feature 1..20: note = chemically synthesized
  source 1..20: mol_type = other DNA
atactagacttggctttagc

SEQ ID NO: 53429 - DNA, 20 bp, synthetic construct
  misc_feature 1..20: note = chemically synthesized
  source 1..20: mol_type = other DNA
actagacttggctttagctg

SEQ ID NO: 53430 - DNA, 20 bp, synthetic construct
  misc_feature 1..20: note = chemically synthesized
  source 1..20: mol_type = other DNA
ctggagttgatttgcaattg

SEQ ID NO: 53431 - DNA, 20 bp, synthetic construct
  misc_feature 1..20: note = chemically synthesized
  source 1..20: mol_type = other DNA
attttttgtgttcttgtatt

SEQ ID NO: 53432 - DNA, 20 bp, synthetic construct
  misc_feature 1..20: note = chemically synthesized
  source 1..20: mol_type = other DNA
tttgtgttcttgtattaagt

SEQ ID NO: 53433 - DNA, 20 bp, synthetic construct
  misc_feature 1..20: note = chemically synthesized
  source 1..20: mol_type = other DNA
ttaagtaagtcattttcaaa

SEQ ID NO: 53434 - DNA, 20 bp, synthetic construct
  misc_feature 1..20: note = chemically synthesized
  source 1..20: mol_type = other DNA
cattttcaaaaagaatattt

SEQ ID NO: 53435 - DNA, 20 bp, synthetic construct
  misc_feature 1..20: note = chemically synthesized
  source 1..20: mol_type = other DNA
agaatattttagttttctct

SEQ ID NO: 53436 - DNA, 20 bp, synthetic construct
  misc_feature 1..20: note = chemically synthesized
  source 1..20: mol_type = other DNA
tgctcattttctttgatatg

SEQ ID NO: 53437 - DNA, 20 bp, synthetic construct
  misc_feature 1..20: note = chemically synthesized
  source 1..20: mol_type = other DNA
gcagatttgaatgttgtaca

SEQ ID NO: 53438 - DNA, 20 bp, synthetic construct
  misc_feature 1..20: note = chemically synthesized
  source 1..20: mol_type = other DNA
gattcaatgaatttatattc

SEQ ID NO: 53439 - DNA, 20 bp, synthetic construct
  misc_feature 1..20: note = chemically synthesized
  source 1..20: mol_type = other DNA
tcaatgaatttatattctag

SEQ ID NO: 53440 - DNA, 20 bp, synthetic construct
  misc_feature 1..20: note = chemically synthesized
  source 1..20: mol_type = other DNA
tatattctagtagttaaaac

SEQ ID NO: 53441 - DNA, 20 bp, synthetic construct
  misc_feature 1..20: note = chemically synthesized
  source 1..20: mol_type = other DNA
atattctagtagttaaaaca

SEQ ID NO: 53442 - DNA, 20 bp, synthetic construct
  misc_feature 1..20: note = chemically synthesized
  source 1..20: mol_type = other DNA
ctagtagttaaaacaaggct

SEQ ID NO: 53443 - DNA, 20 bp, synthetic construct
  misc_feature 1..20: note = chemically synthesized
  source 1..20: mol_type = other DNA
ggctcagtaataaaaaattt

SEQ ID NO: 53444 - DNA, 20 bp, synthetic construct
  misc_feature 1..20: note = chemically synthesized
  source 1..20: mol_type = other DNA
tcagtaataaaaaattttag

SEQ ID NO: 53445 - DNA, 20 bp, synthetic construct
  misc_feature 1..20: note = chemically synthesized
  source 1..20: mol_type = other DNA
tgtgtgtgtgcatcgttctg

SEQ ID NO: 53446 - DNA, 20 bp, synthetic construct
  misc_feature 1..20: note = chemically synthesized
  source 1..20: mol_type = other DNA
gtttattgactattactcat

SEQ ID NO: 53447 - DNA, 20 bp, synthetic construct
  misc_feature 1..20: note = chemically synthesized
  source 1..20: mol_type = other DNA
tttattgactattactcatc

SEQ ID NO: 53448 - DNA, 20 bp, synthetic construct
  misc_feature 1..20: note = chemically synthesized
  source 1..20: mol_type = other DNA
gactattactcatcaggtaa

SEQ ID NO: 53449 - DNA, 20 bp, synthetic construct
  misc_feature 1..20: note = chemically synthesized
  source 1..20: mol_type = other DNA
ttactcatcaggtaatagtc

SEQ ID NO: 53450 - DNA, 20 bp, synthetic construct
  misc_feature 1..20: note = chemically synthesized
  source 1..20: mol_type = other DNA
tactcatcaggtaatagtct

SEQ ID NO: 53451 - DNA, 20 bp, synthetic construct
  misc_feature 1..20: note = chemically synthesized
  source 1..20: mol_type = other DNA
atcaggtaatagtctaggca

SEQ ID NO: 53452 - DNA, 20 bp, synthetic construct
  misc_feature 1..20: note = chemically synthesized
  source 1..20: mol_type = other DNA
taatagtctaggcacagatt

SEQ ID NO: 53453 - DNA, 20 bp, synthetic construct
  misc_feature 1..20: note = chemically synthesized
  source 1..20: mol_type = other DNA
tagtctaggcacagattaag

SEQ ID NO: 53454 - DNA, 20 bp, synthetic construct
  misc_feature 1..20: note = chemically synthesized
  source 1..20: mol_type = other DNA
ctaggcacagattaagaagc

SEQ ID NO: 53455 - DNA, 20 bp, synthetic construct
  misc_feature 1..20: note = chemically synthesized
  source 1..20: mol_type = other DNA
actctcttccctatgtaaca

SEQ ID NO: 53456 - DNA, 20 bp, synthetic construct
  misc_feature 1..20: note = chemically synthesized
  source 1..20: mol_type = other DNA
atgtaacaaagatattatac

SEQ ID NO: 53457 - DNA, 20 bp, synthetic construct
  misc_feature 1..20: note = chemically synthesized
  source 1..20: mol_type = other DNA
caaagatattatactggtga

SEQ ID NO: 53458 - DNA, 20 bp, synthetic construct
  misc_feature 1..20: note = chemically synthesized
  source 1..20: mol_type = other DNA
aaagatattatactggtgat

SEQ ID NO: 53459 - DNA, 20 bp, synthetic construct
  misc_feature 1..20: note = chemically synthesized
  source 1..20: mol_type = other DNA
aagatattatactggtgatg

SEQ ID NO: 53460 - DNA, 20 bp, synthetic construct
  misc_feature 1..20: note = chemically synthesized
  source 1..20: mol_type = other DNA
gaactatttgcaccttataa

SEQ ID NO: 53461 - DNA, 20 bp, synthetic construct
  misc_feature 1..20: note = chemically synthesized
  source 1..20: mol_type = other DNA
caccttataaaagtaaatga

SEQ ID NO: 53462 - DNA, 20 bp, synthetic construct
  misc_feature 1..20: note = chemically synthesized
  source 1..20: mol_type = other DNA
ataaaagtaaatgacagata

SEQ ID NO: 53463 - DNA, 20 bp, synthetic construct
  misc_feature 1..20: note = chemically synthesized
  source 1..20: mol_type = other DNA
taaaagtaaatgacagatac

SEQ ID NO: 53464 - DNA, 20 bp, synthetic construct
  misc_feature 1..20: note = chemically synthesized
  source 1..20: mol_type = other DNA
aaaagtaaatgacagataca

SEQ ID NO: 53465 - DNA, 20 bp, synthetic construct
  misc_feature 1..20: note = chemically synthesized
  source 1..20: mol_type = other DNA
taaatgacagatacagggtg

SEQ ID NO: 53466 - DNA, 20 bp, synthetic construct
  misc_feature 1..20: note = chemically synthesized
  source 1..20: mol_type = other DNA
accaattgataccatgtgcc

SEQ ID NO: 53467 - DNA, 20 bp, synthetic construct
  misc_feature 1..20: note = chemically synthesized
  source 1..20: mol_type = other DNA
tgataccatgtgcccagtat

SEQ ID NO: 53468 - DNA, 20 bp, synthetic construct
  misc_feature 1..20: note = chemically synthesized
  source 1..20: mol_type = other DNA
attaaaaaaaaatttattcc

SEQ ID NO: 53469 - DNA, 20 bp, synthetic construct
  misc_feature 1..20: note = chemically synthesized
  source 1..20: mol_type = other DNA
aaatttattcctagtattta

SEQ ID NO: 53470 - DNA, 20 bp, synthetic construct
  misc_feature 1..20: note = chemically synthesized
  source 1..20: mol_type = other DNA
actctaaatcaattcaatct

SEQ ID NO: 53471 - DNA, 20 bp, synthetic construct
  misc_feature 1..20: note = chemically synthesized
  source 1..20: mol_type = other DNA
tcaattcaatctcagtttga

SEQ ID NO: 53472 - DNA, 20 bp, synthetic construct
  misc_feature 1..20: note = chemically synthesized
  source 1..20: mol_type = other DNA
atctcagtttgatggataat

SEQ ID NO: 53473 - DNA, 20 bp, synthetic construct
  misc_feature 1..20: note = chemically synthesized
  source 1..20: mol_type = other DNA
tttgatggataataagcctg

SEQ ID NO: 53474 - DNA, 20 bp, synthetic construct
  misc_feature 1..20: note = chemically synthesized
  source 1..20: mol_type = other DNA
taataagcctgaagtcctga

SEQ ID NO: 53475 - DNA, 20 bp, synthetic construct
  misc_feature 1..20: note = chemically synthesized
  source 1..20: mol_type = other DNA
cctgaaagttaaacttattc

SEQ ID NO: 53476 - DNA, 20 bp, synthetic construct
  misc_feature 1..20: note = chemically synthesized
  source 1..20: mol_type = other DNA
attccagttgacaataattt

SEQ ID NO: 53477 - DNA, 20 bp, synthetic construct
  misc_feature 1..20: note = chemically synthesized
  source 1..20: mol_type = other DNA
cttaattgctacaattttgt

SEQ ID NO: 53478 - DNA, 20 bp, synthetic construct
  misc_feature 1..20: note = chemically synthesized
  source 1..20: mol_type = other DNA
gtcctgatgtcatctattgt

SEQ ID NO: 53479 - DNA, 20 bp, synthetic construct
  misc_feature 1..20: note = chemically synthesized
  source 1..20: mol_type = other DNA
tcctgatgtcatctattgtt

SEQ ID NO: 53480 - DNA, 20 bp, synthetic construct
  misc_feature 1..20: note = chemically synthesized
  source 1..20: mol_type = other DNA
gatgtcatctattgttggga

SEQ ID NO: 53481 - DNA, 20 bp, synthetic construct
  misc_feature 1..20: note = chemically synthesized
  source 1..20: mol_type = other DNA
tgtcatctattgttgggata

SEQ ID NO: 53482 - DNA, 20 bp, synthetic construct
  misc_feature 1..20: note = chemically synthesized
  source 1..20: mol_type = other DNA
agagatataaatgacttatg

SEQ ID NO: 53483 - DNA, 20 bp, synthetic construct
  misc_feature 1..20: note = chemically synthesized
  source 1..20: mol_type = other DNA
acttatgtagctaccttcct

SEQ ID NO: 53484 - DNA, 20 bp, synthetic construct
  misc_feature 1..20: note = chemically synthesized
  source 1..20: mol_type = other DNA
ccttcctaagacactgactt

SEQ ID NO: 53485 - DNA, 20 bp, synthetic construct
  misc_feature 1..20: note = chemically synthesized
  source 1..20: mol_type = other DNA
ctaagacactgacttcagaa

SEQ ID NO: 53486 - DNA, 20 bp, synthetic construct
  misc_feature 1..20: note = chemically synthesized
  source 1..20: mol_type = other DNA
tttaaatttatgcttattgt

SEQ ID NO: 53487 - DNA, 20 bp, synthetic construct
  misc_feature 1..20: note = chemically synthesized
  source 1..20: mol_type = other DNA
ttaaatttatgcttattgtt

SEQ ID NO: 53488 - DNA, 20 bp, synthetic construct
  misc_feature 1..20: note = chemically synthesized
  source 1..20: mol_type = other DNA
cttattgttaggtattttac

SEQ ID NO: 53489 - DNA, 20 bp, synthetic construct
  misc_feature 1..20: note = chemically synthesized
  source 1..20: mol_type = other DNA
ttgttaggtattttacaagc

SEQ ID NO: 53490 - DNA, 20 bp, synthetic construct
  misc_feature 1..20: note = chemically synthesized
  source 1..20: mol_type = other DNA
gttaggtattttacaagcaa

SEQ ID NO: 53491 - DNA, 20 bp, synthetic construct
  misc_feature 1..20: note = chemically synthesized
  source 1..20: mol_type = other DNA
ttttacaagcaagagaacta

SEQ ID NO: 53492 - DNA, 20 bp, synthetic construct
  misc_feature 1..20: note = chemically synthesized
  source 1..20: mol_type = other DNA
tttaaattaaatgacgtgtc

SEQ ID NO: 53493 - DNA, 20 bp, synthetic construct
  misc_feature 1..20: note = chemically synthesized
  source 1..20: mol_type = other DNA
ttaaattaaatgacgtgtcc

SEQ ID NO: 53494 - DNA, 20 bp, synthetic construct
  misc_feature 1..20: note = chemically synthesized
  source 1..20: mol_type = other DNA
taaattaaatgacgtgtcca

SEQ ID NO: 53495 - DNA, 20 bp, synthetic construct
  misc_feature 1..20: note = chemically synthesized
  source 1..20: mol_type = other DNA
aaatgacgtgtccagggtca

SEQ ID NO: 53496 - DNA, 20 bp, synthetic construct
  misc_feature 1..20: note = chemically synthesized
  source 1..20: mol_type = other DNA
atgacgtgtccagggtcata

SEQ ID NO: 53497 - DNA, 20 bp, synthetic construct
  misc_feature 1..20: note = chemically synthesized
  source 1..20: mol_type = other DNA
cgtgtccagggtcatagagt

SEQ ID NO: 53498 - DNA, 20 bp, synthetic construct
  misc_feature 1..20: note = chemically synthesized
  source 1..20: mol_type = other DNA
cagggtcatagagtcagaat

SEQ ID NO: 53499 - DNA, 20 bp, synthetic construct
  misc_feature 1..20: note = chemically synthesized
  source 1..20: mol_type = other DNA
catagagtcagaataagatt

SEQ ID NO: 53500 - DNA, 20 bp, synthetic construct
  misc_feature 1..20: note = chemically synthesized
  source 1..20: mol_type = other DNA
gagtcagaataagatttagc

SEQ ID NO: 53501 - DNA, 20 bp, synthetic construct
  misc_feature 1..20: note = chemically synthesized
  source 1..20: mol_type = other DNA
aatacaactatatatgtcct

SEQ ID NO: 53502 - DNA, 20 bp, synthetic construct
  misc_feature 1..20: note = chemically synthesized
  source 1..20: mol_type = other DNA
tacaactatatatgtcctta

SEQ ID NO: 53503 - DNA, 20 bp, synthetic construct
  misc_feature 1..20: note = chemically synthesized
  source 1..20: mol_type = other DNA
accacactatctttgctccg

SEQ ID NO: 53504 - DNA, 20 bp, synthetic construct
  misc_feature 1..20: note = chemically synthesized
  source 1..20: mol_type = other DNA
ccgtggatacattcatgatt

SEQ ID NO: 53505 - DNA, 20 bp, synthetic construct
  misc_feature 1..20: note = chemically synthesized
  source 1..20: mol_type = other DNA
ggatacattcatgattcagt

SEQ ID NO: 53506 - DNA, 20 bp, synthetic construct
  misc_feature 1..20: note = chemically synthesized
  source 1..20: mol_type = other DNA
attcagtcagaatatgctgt

SEQ ID NO: 53507 - DNA, 20 bp, synthetic construct
  misc_feature 1..20: note = chemically synthesized
  source 1..20: mol_type = other DNA
atatgctgtcagaaatatcc

SEQ ID NO: 53508 - DNA, 20 bp, synthetic construct
  misc_feature 1..20: note = chemically synthesized
  source 1..20: mol_type = other DNA
atatcctagaataatgctac

SEQ ID NO: 53509 - DNA, 20 bp, synthetic construct
  misc_feature 1..20: note = chemically synthesized
  source 1..20: mol_type = other DNA
tatcctagaataatgctaca

SEQ ID NO: 53510 - DNA, 20 bp, synthetic construct
  misc_feature 1..20: note = chemically synthesized
  source 1..20: mol_type = other DNA
gaataatgctacaaggaacc

SEQ ID NO: 53511 - DNA, 20 bp, synthetic construct
  misc_feature 1..20: note = chemically synthesized
  source 1..20: mol_type = other DNA
aataatgctacaaggaaccc

SEQ ID NO: 53512 - DNA, 20 bp, synthetic construct
  misc_feature 1..20: note = chemically synthesized
  source 1..20: mol_type = other DNA
aggaacccaggcctataatt

SEQ ID NO: 53513 - DNA, 20 bp, synthetic construct
  misc_feature 1..20: note = chemically synthesized
  source 1..20: mol_type = other DNA
ggaacccaggcctataattt

SEQ ID NO: 53514 - DNA, 20 bp, synthetic construct
  misc_feature 1..20: note = chemically synthesized
  source 1..20: mol_type = other DNA
catcacatatgacaatgttt

SEQ ID NO: 53515 - DNA, 20 bp, synthetic construct
  misc_feature 1..20: note = chemically synthesized
  source 1..20: mol_type = other DNA
atcacatatgacaatgtttt

SEQ ID NO: 53516 - DNA, 20 bp, synthetic construct
  misc_feature 1..20: note = chemically synthesized
  source 1..20: mol_type = other DNA
aaacaaatatttaaaaacca

SEQ ID NO: 53517 - DNA, 20 bp, synthetic construct
  misc_feature 1..20: note = chemically synthesized
  source 1..20: mol_type = other DNA
aacaaatatttaaaaaccat

SEQ ID NO: 53518 - DNA, 20 bp, synthetic construct
  misc_feature 1..20: note = chemically synthesized
  source 1..20: mol_type = other DNA
aaaaaccataggtatcacaa

SEQ ID NO: 53519 - DNA, 20 bp, synthetic construct
  misc_feature 1..20: note = chemically synthesized
  source 1..20: mol_type = other DNA
taggtatcacaaaagatcac

SEQ ID NO: 53520 - DNA, 20 bp, synthetic construct
  misc_feature 1..20: note = chemically synthesized
  source 1..20: mol_type = other DNA
agatcaccagaaaaaattta

SEQ ID NO: 53521 - DNA, 20 bp, synthetic construct
  misc_feature 1..20: note = chemically synthesized
  source 1..20: mol_type = other DNA
gatcaccagaaaaaatttaa

SEQ ID NO: 53522 - DNA, 20 bp, synthetic construct
  misc_feature 1..20: note = chemically synthesized
  source 1..20: mol_type = other DNA
accagaaaaaatttaaaggc

SEQ ID NO: 53523 - DNA, 20 bp, synthetic construct
  misc_feature 1..20: note = chemically synthesized
  source 1..20: mol_type = other DNA
tcctgtatttttttttcact

SEQ ID NO: 53524 - DNA, 20 bp, synthetic construct
  misc_feature 1..20: note = chemically synthesized
  source 1..20: mol_type = other DNA
ccatccctaatgtcctgatg

SEQ ID NO: 53525 - DNA, 20 bp, synthetic construct
  misc_feature 1..20: note = chemically synthesized
  source 1..20: mol_type = other DNA
ctaatgtcctgatgaagccc

SEQ ID NO: 53526 - DNA, 20 bp, synthetic construct
  misc_feature 1..20: note = chemically synthesized
  source 1..20: mol_type = other DNA
ctacgcttcactcacatgca

SEQ ID NO: 53527 - DNA, 20 bp, synthetic construct
  misc_feature 1..20: note = chemically synthesized
  source 1..20: mol_type = other DNA
ttcactcacatgcatggctc

SEQ ID NO: 53528 - DNA, 20 bp, synthetic construct
  misc_feature 1..20: note = chemically synthesized
  source 1..20: mol_type = other DNA
tcacatgcatggctctggcc

SEQ ID NO: 53529 - DNA, 20 bp, synthetic construct
  misc_feature 1..20: note = chemically synthesized
  source 1..20: mol_type = other DNA
gctctggcctagaactgtgt

SEQ ID NO: 53530 - DNA, 20 bp, synthetic construct
  misc_feature 1..20: note = chemically synthesized
  source 1..20: mol_type = other DNA
ctctggcctagaactgtgtc

SEQ ID NO: 53531 - DNA, 20 bp, synthetic construct
  misc_feature 1..20: note = chemically synthesized
  source 1..20: mol_type = other DNA
tcctttctctgaaacatcaa

SEQ ID NO: 53532 - DNA, 20 bp, synthetic construct
  misc_feature 1..20: note = chemically synthesized
  source 1..20: mol_type = other DNA
ttaaaatattctaacaatgt

SEQ ID NO: 53533 - DNA, 20 bp, synthetic construct
  misc_feature 1..20: note = chemically synthesized
  source 1..20: mol_type = other DNA
aatgtgagatatatattaaa

SEQ ID NO: 53534 - DNA, 20 bp, synthetic construct
  misc_feature 1..20: note = chemically synthesized
  source 1..20: mol_type = other DNA
atattaaatagtaaaacaat

SEQ ID NO: 53535 - DNA, 20 bp, synthetic construct
  misc_feature 1..20: note = chemically synthesized
  source 1..20: mol_type = other DNA
acaattagtttatgtaaata

SEQ ID NO: 53536 - DNA, 20 bp, synthetic construct
  misc_feature 1..20: note = chemically synthesized
  source 1..20: mol_type = other DNA
attagtttatgtaaataaag

SEQ ID NO: 53537 - DNA, 20 bp, synthetic construct
  misc_feature 1..20: note = chemically synthesized
  source 1..20: mol_type = other DNA
atgtaaataaagtagatcca

SEQ ID NO: 53538 - DNA, 20 bp, synthetic construct
  misc_feature 1..20: note = chemically synthesized
  source 1..20: mol_type = other DNA
gtaaataaagtagatccaca

SEQ ID NO: 53539 - DNA, 20 bp, synthetic construct
  misc_feature 1..20: note = chemically synthesized
  source 1..20: mol_type = other DNA
attttatcttaatattttta

SEQ ID NO: 53540 - DNA, 20 bp, synthetic construct
  misc_feature 1..20: note = chemically synthesized
  source 1..20: mol_type = other DNA
aagaacctcattccaactta

SEQ ID NO: 53541 - DNA, 20 bp, synthetic construct
  misc_feature 1..20: note = chemically synthesized
  source 1..20: mol_type = other DNA
acctcattccaacttaaagc

SEQ ID NO: 53542 - DNA, 20 bp, synthetic construct
  misc_feature 1..20: note = chemically synthesized
  source 1..20: mol_type = other DNA
cctcattccaacttaaagca

SEQ ID NO: 53543 - DNA, 20 bp, synthetic construct
  misc_feature 1..20: note = chemically synthesized
  source 1..20: mol_type = other DNA
ctcattccaacttaaagcaa

SEQ ID NO: 53544 - DNA, 20 bp, synthetic construct
  misc_feature 1..20: note = chemically synthesized
  source 1..20: mol_type = other DNA
taaagcaagggtaaattgct

SEQ ID NO: 53545 - DNA, 20 bp, synthetic construct
  misc_feature 1..20: note = chemically synthesized
  source 1..20: mol_type = other DNA
gggtaaattgctcagctgtg

SEQ ID NO: 53546 - DNA, 20 bp, synthetic construct
  misc_feature 1..20: note = chemically synthesized
  source 1..20: mol_type = other DNA
ggtaaattgctcagctgtgt

SEQ ID NO: 53547 - DNA, 20 bp, synthetic construct
  misc_feature 1..20: note = chemically synthesized
  source 1..20: mol_type = other DNA
ctaaactgtaactcaaaaaa

SEQ ID NO: 53548 - DNA, 20 bp, synthetic construct
  misc_feature 1..20: note = chemically synthesized
  source 1..20: mol_type = other DNA
taaactgtaactcaaaaaat

SEQ ID NO: 53549 - DNA, 20 bp, synthetic construct
  misc_feature 1..20: note = chemically synthesized
  source 1..20: mol_type = other DNA
atttccatcatataaaattt

SEQ ID NO: 53550 - DNA, 20 bp, synthetic construct
  misc_feature 1..20: note = chemically synthesized
  source 1..20: mol_type = other DNA
catcatataaaatttgagac

SEQ ID NO: 53551 - DNA, 20 bp, synthetic construct
  misc_feature 1..20: note = chemically synthesized
  source 1..20: mol_type = other DNA
aaatttgagaccagaatatt

SEQ ID NO: 53552 - DNA, 20 bp, synthetic construct
  misc_feature 1..20: note = chemically synthesized
  source 1..20: mol_type = other DNA
agaccagaatatttagcact

SEQ ID NO: 53553 - DNA, 20 bp, synthetic construct
  misc_feature 1..20: note = chemically synthesized
  source 1..20: mol_type = other DNA
ttagcacttagcaaaaacaa

SEQ ID NO: 53554 - DNA, 20 bp, synthetic construct
  misc_feature 1..20: note = chemically synthesized
  source 1..20: mol_type = other DNA
acttagcaaaaacaaaagta

SEQ ID NO: 53555 - DNA, 20 bp, synthetic construct
  misc_feature 1..20: note = chemically synthesized
  source 1..20: mol_type = other DNA
cttagcaaaaacaaaagtaa

SEQ ID NO: 53556 - DNA, 20 bp, synthetic construct
  misc_feature 1..20: note = chemically synthesized
  source 1..20: mol_type = other DNA
agcaaaaacaaaagtaaagg

SEQ ID NO: 53557 - DNA, 20 bp, synthetic construct
  misc_feature 1..20: note = chemically synthesized
  source 1..20: mol_type = other DNA
aaaaacaaaagtaaaggtag

SEQ ID NO: 53558 - DNA, 20 bp, synthetic construct
  misc_feature 1..20: note = chemically synthesized
  source 1..20: mol_type = other DNA
agactatgctatacaatgat

SEQ ID NO: 53559 - DNA, 20 bp, synthetic construct
  misc_feature 1..20: note = chemically synthesized
  source 1..20: mol_type = other DNA
atcagtatattgaactgtaa

SEQ ID NO: 53560 - DNA, 20 bp, synthetic construct
  misc_feature 1..20: note = chemically synthesized
  source 1..20: mol_type = other DNA
tattgaactgtaatggaatc

SEQ ID NO: 53561 - DNA, 20 bp, synthetic construct
  misc_feature 1..20: note = chemically synthesized
  source 1..20: mol_type = other DNA
ttgaactgtaatggaatcaa

SEQ ID NO: 53562 - DNA, 20 bp, synthetic construct
  misc_feature 1..20: note = chemically synthesized
  source 1..20: mol_type = other DNA
actgtaatggaatcaagaga

SEQ ID NO: 53563 - DNA, 20 bp, synthetic construct
  misc_feature 1..20: note = chemically synthesized
  source 1..20: mol_type = other DNA
ctgtaatggaatcaagagat

SEQ ID NO: 53564 - DNA, 20 bp, synthetic construct
  misc_feature 1..20: note = chemically synthesized
  source 1..20: mol_type = other DNA
tgtaatggaatcaagagatg

SEQ ID NO: 53565 - DNA, 20 bp, synthetic construct
  misc_feature 1..20: note = chemically synthesized
  source 1..20: mol_type = other DNA
gtaatggaatcaagagatgg

SEQ ID NO: 53566 - DNA, 20 bp, synthetic construct
  misc_feature 1..20: note = chemically synthesized
  source 1..20: mol_type = other DNA
aatggaatcaagagatgggg

SEQ ID NO: 53567 - DNA, 20 bp, synthetic construct
  misc_feature 1..20: note = chemically synthesized
  source 1..20: mol_type = other DNA
ggaatcaagagatgggggag

SEQ ID NO: 53568 - DNA, 20 bp, synthetic construct
  misc_feature 1..20: note = chemically synthesized
  source 1..20: mol_type = other DNA
tgggggagcagtcatttctt

SEQ ID NO: 53569 - DNA, 20 bp, synthetic construct
  misc_feature 1..20: note = chemically synthesized
  source 1..20: mol_type = other DNA
cctgtgccacctcaaaaaac

SEQ ID NO: 53570 - DNA, 20 bp, synthetic construct
  misc_feature 1..20: note = chemically synthesized
  source 1..20: mol_type = other DNA
acctcaaaaaacaagaactt

SEQ ID NO: 53571 - DNA, 20 bp, synthetic construct
  misc_feature 1..20: note = chemically synthesized
  source 1..20: mol_type = other DNA
caaaaaacaagaactttagc

SEQ ID NO: 53572 - DNA, 20 bp, synthetic construct
  misc_feature 1..20: note = chemically synthesized
  source 1..20: mol_type = other DNA
actttagccagcttttactt

SEQ ID NO: 53573 - DNA, 20 bp, synthetic construct
  misc_feature 1..20: note = chemically synthesized
  source 1..20: mol_type = other DNA
tagccagcttttacttgaga

SEQ ID NO: 53574 - DNA, 20 bp, synthetic construct
  misc_feature 1..20: note = chemically synthesized
  source 1..20: mol_type = other DNA
agccagcttttacttgagaa

SEQ ID NO: 53575 - DNA, 20 bp, synthetic construct
  misc_feature 1..20: note = chemically synthesized
  source 1..20: mol_type = other DNA
gccagcttttacttgagaaa

SEQ ID NO: 53576 - DNA, 20 bp, synthetic construct
  misc_feature 1..20: note = chemically synthesized
  source 1..20: mol_type = other DNA
tttacttgagaaagggaact

SEQ ID NO: 53577 - DNA, 20 bp, synthetic construct
  misc_feature 1..20: note = chemically synthesized
  source 1..20: mol_type = other DNA
tacttgagaaagggaactta

SEQ ID NO: 53578 - DNA, 20 bp, synthetic construct
  misc_feature 1..20: note = chemically synthesized
  source 1..20: mol_type = other DNA
cttgagaaagggaacttaga

SEQ ID NO: 53579 - DNA, 20 bp, synthetic construct
  misc_feature 1..20: note = chemically synthesized
  source 1..20: mol_type = other DNA
gaaagggaacttagagagta

SEQ ID NO: 53580 - DNA, 20 bp, synthetic construct
  misc_feature 1..20: note = chemically synthesized
  source 1..20: mol_type = other DNA
agggaacttagagagtatag

SEQ ID NO: 53581 - DNA, 20 bp, synthetic construct
  misc_feature 1..20: note = chemically synthesized
  source 1..20: mol_type = other DNA
tatctatctatctatctttc

SEQ ID NO: 53582 - DNA, 20 bp, synthetic construct
  misc_feature 1..20: note = chemically synthesized
  source 1..20: mol_type = other DNA
tatctatctatctttctagc

SEQ ID NO: 53583 - DNA, 20 bp, synthetic construct
  misc_feature 1..20: note = chemically synthesized
  source 1..20: mol_type = other DNA
tatctatctttctagctagc

SEQ ID NO: 53584 - DNA, 20 bp, synthetic construct
  misc_feature 1..20: note = chemically synthesized
  source 1..20: mol_type = other DNA
tatctttctagctagctagc

SEQ ID NO: 53585 - DNA, 20 bp, synthetic construct
  misc_feature 1..20: note = chemically synthesized
  source 1..20: mol_type = other DNA
tttctagctagctagctagc

SEQ ID NO: 53586 - DNA, 20 bp, synthetic construct
  misc_feature 1..20: note = chemically synthesized
  source 1..20: mol_type = other DNA
tagctagctagctagctagc

SEQ ID NO: 53587 - DNA, 20 bp, synthetic construct
  misc_feature 1..20: note = chemically synthesized
  source 1..20: mol_type = other DNA
tagctagctagctagctagc

SEQ ID NO: 53588 - DNA, 20 bp, synthetic construct
  misc_feature 1..20: note = chemically synthesized
  source 1..20: mol_type = other DNA
tctgtatatgtcacctaccc

SEQ ID NO: 53589 - DNA, 20 bp, synthetic construct
  misc_feature 1..20: note = chemically synthesized
  source 1..20: mol_type = other DNA
ttgcttctatccacattttt

SEQ ID NO: 53590 - DNA, 20 bp, synthetic construct
  misc_feature 1..20: note = chemically synthesized
  source 1..20: mol_type = other DNA
ctatccacattttttagaac

SEQ ID NO: 53591 - DNA, 20 bp, synthetic construct
  misc_feature 1..20: note = chemically synthesized
  source 1..20: mol_type = other DNA
cattttttagaactagtaat

SEQ ID NO: 53592 - DNA, 20 bp, synthetic construct
  misc_feature 1..20: note = chemically synthesized
  source 1..20: mol_type = other DNA
aactagtaattagtaataac

SEQ ID NO: 53593 - DNA, 20 bp, synthetic construct
  misc_feature 1..20: note = chemically synthesized
  source 1..20: mol_type = other DNA
taataacaagtaatatattg

SEQ ID NO: 53594 - DNA, 20 bp, synthetic construct
  misc_feature 1..20: note = chemically synthesized
  source 1..20: mol_type = other DNA
agtaatatattgaagtaata

SEQ ID NO: 53595 - DNA, 20 bp, synthetic construct
  misc_feature 1..20: note = chemically synthesized
  source 1..20: mol_type = other DNA
cattaaattacttgctgctg

SEQ ID NO: 53596 - DNA, 20 bp, synthetic construct
  misc_feature 1..20: note = chemically synthesized
  source 1..20: mol_type = other DNA
taaattacttgctgctgtgg

SEQ ID NO: 53597 - DNA, 20 bp, synthetic construct
  misc_feature 1..20: note = chemically synthesized
  source 1..20: mol_type = other DNA
cttgctgctgtggtggtact

SEQ ID NO: 53598 - DNA, 20 bp, synthetic construct
  misc_feature 1..20: note = chemically synthesized
  source 1..20: mol_type = other DNA
attaattattgtctcaattt

SEQ ID NO: 53599 - DNA, 20 bp, synthetic construct
  misc_feature 1..20: note = chemically synthesized
  source 1..20: mol_type = other DNA
taattattgtctcaatttca

SEQ ID NO: 53600 - DNA, 20 bp, synthetic construct
  misc_feature 1..20: note = chemically synthesized
  source 1..20: mol_type = other DNA
gagcctattatttgtctatt

SEQ ID NO: 53601 - DNA, 20 bp, synthetic construct
  misc_feature 1..20: note = chemically synthesized
  source 1..20: mol_type = other DNA
gcctattatttgtctattaa

SEQ ID NO: 53602 - DNA, 20 bp, synthetic construct
  misc_feature 1..20: note = chemically synthesized
  source 1..20: mol_type = other DNA
taagagattcaatttctccc

SEQ ID NO: 53603 - DNA, 20 bp, synthetic construct
  misc_feature 1..20: note = chemically synthesized
  source 1..20: mol_type = other DNA
gattcaatttctccctggtt

SEQ ID NO: 53604 - DNA, 20 bp, synthetic construct
  misc_feature 1..20: note = chemically synthesized
  source 1..20: mol_type = other DNA
atttctccctggtttagtct

SEQ ID NO: 53605 - DNA, 20 bp, synthetic construct
  misc_feature 1..20: note = chemically synthesized
  source 1..20: mol_type = other DNA
tttctccctggtttagtctt

SEQ ID NO: 53606 - DNA, 20 bp, synthetic construct
  misc_feature 1..20: note = chemically synthesized
  source 1..20: mol_type = other DNA
tctccctggtttagtcttgg

SEQ ID NO: 53607 - DNA, 20 bp, synthetic construct
  misc_feature 1..20: note = chemically synthesized
  source 1..20: mol_type = other DNA
ctccctggtttagtcttggg

SEQ ID NO: 53608 - DNA, 20 bp, synthetic construct
  misc_feature 1..20: note = chemically synthesized
  source 1..20: mol_type = other DNA
tccctggtttagtcttggga

SEQ ID NO: 53609 - DNA, 20 bp, synthetic construct
  misc_feature 1..20: note = chemically synthesized
  source 1..20: mol_type = other DNA
cttgggagggtgtatgtgtc

SEQ ID NO: 53610 - DNA, 20 bp, synthetic construct
  misc_feature 1..20: note = chemically synthesized
  source 1..20: mol_type = other DNA
ttgggagggtgtatgtgtcg

SEQ ID NO: 53611 - DNA, 20 bp, synthetic construct
  misc_feature 1..20: note = chemically synthesized
  source 1..20: mol_type = other DNA
aggaatttatccatttctac

SEQ ID NO: 53612 - DNA, 20 bp, synthetic construct
  misc_feature 1..20: note = chemically synthesized
  source 1..20: mol_type = other DNA
tccatttctactagattttc

SEQ ID NO: 53613 - DNA, 20 bp, synthetic construct
  misc_feature 1..20: note = chemically synthesized
  source 1..20: mol_type = other DNA
gattttctagtttatttgcg

SEQ ID NO: 53614 - DNA, 20 bp, synthetic construct
  misc_feature 1..20: note = chemically synthesized
  source 1..20: mol_type = other DNA
ttttctagtttatttgcgta

SEQ ID NO: 53615 - DNA, 20 bp, synthetic construct
  misc_feature 1..20: note = chemically synthesized
  source 1..20: mol_type = other DNA
tttctagtttatttgcgtag

SEQ ID NO: 53616 - DNA, 20 bp, synthetic construct
  misc_feature 1..20: note = chemically synthesized
  source 1..20: mol_type = other DNA
tatttgcgtagaggtgttta

SEQ ID NO: 53617 - DNA, 20 bp, synthetic construct
  misc_feature 1..20: note = chemically synthesized
  source 1..20: mol_type = other DNA
gtgtttatagtattctctga

SEQ ID NO: 53618 - DNA, 20 bp, synthetic construct
  misc_feature 1..20: note = chemically synthesized
  source 1..20: mol_type = other DNA
tttatagtattctctgatgg

SEQ ID NO: 53619 - DNA, 20 bp, synthetic construct
  misc_feature 1..20: note = chemically synthesized
  source 1..20: mol_type = other DNA
gatggtagtttgtatgtctg

SEQ ID NO: 53620 - DNA, 20 bp, synthetic construct
  misc_feature 1..20: note = chemically synthesized
  source 1..20: mol_type = other DNA
atggtagtttgtatgtctgt

SEQ ID NO: 53621 - DNA, 20 bp, synthetic construct
  misc_feature 1..20: note = chemically synthesized
  source 1..20: mol_type = other DNA
agtttgtatgtctgtgggat

SEQ ID NO: 53622 - DNA, 20 bp, synthetic construct
  misc_feature 1..20: note = chemically synthesized
  source 1..20: mol_type = other DNA
ttgtatgtctgtgggattgg

SEQ ID NO: 53623 - DNA, 20 bp, synthetic construct
  misc_feature 1..20: note = chemically synthesized
  source 1..20: mol_type = other DNA
atttcttattgcatctattt

SEQ ID NO: 53624 - DNA, 20 bp, synthetic construct
  misc_feature 1..20: note = chemically synthesized
  source 1..20: mol_type = other DNA
ttctctcttttcttctttat

SEQ ID NO: 53625 - DNA, 20 bp, synthetic construct
  misc_feature 1..20: note = chemically synthesized
  source 1..20: mol_type = other DNA
ttcttctttattagtcttgc

SEQ ID NO: 53626 - DNA, 20 bp, synthetic construct
  misc_feature 1..20: note = chemically synthesized
  source 1..20: mol_type = other DNA
ttctttattagtcttgctag

SEQ ID NO: 53627 - DNA, 20 bp, synthetic construct
  misc_feature 1..20: note = chemically synthesized
  source 1..20: mol_type = other DNA
tgttgatcttttcaaaaaac

SEQ ID NO: 53628 - DNA, 20 bp, synthetic construct
  misc_feature 1..20: note = chemically synthesized
  source 1..20: mol_type = other DNA
cttttcaaaaaaccagctcc

SEQ ID NO: 53629 - DNA, 20 bp, synthetic construct
  misc_feature 1..20: note = chemically synthesized
  source 1..20: mol_type = other DNA
ctggattcattgattttttt

SEQ ID NO: 53630 - DNA, 20 bp, synthetic construct
  misc_feature 1..20: note = chemically synthesized
  source 1..20: mol_type = other DNA
tggattcattgattttttta

SEQ ID NO: 53631 - DNA, 20 bp, synthetic construct
  misc_feature 1..20: note = chemically synthesized
  source 1..20: mol_type = other DNA
ggattcattgatttttttaa

SEQ ID NO: 53632 - DNA, 20 bp, synthetic construct
  misc_feature 1..20: note = chemically synthesized
  source 1..20: mol_type = other DNA
acttatttcttgccttccgc

SEQ ID NO: 53633 - DNA, 20 bp, synthetic construct
  misc_feature 1..20: note = chemically synthesized
  source 1..20: mol_type = other DNA
tgccttccgctagcttttga

SEQ ID NO: 53634 - DNA, 20 bp, synthetic construct
  misc_feature 1..20: note = chemically synthesized
  source 1..20: mol_type = other DNA
agtgtttgctcttgcttctc

SEQ ID NO: 53635 - DNA, 20 bp, synthetic construct
  misc_feature 1..20: note = chemically synthesized
  source 1..20: mol_type = other DNA
agttcttttaattgtgatgt

SEQ ID NO: 53636 - DNA, 20 bp, synthetic construct
  misc_feature 1..20: note = chemically synthesized
  source 1..20: mol_type = other DNA
gttcttttaattgtgatgtt

SEQ ID NO: 53637 - DNA, 20 bp, synthetic construct
  misc_feature 1..20: note = chemically synthesized
  source 1..20: mol_type = other DNA
ttcttttaattgtgatgtta

SEQ ID NO: 53638 - DNA, 20 bp, synthetic construct
  misc_feature 1..20: note = chemically synthesized
  source 1..20: mol_type = other DNA
tgatgttagggtgtcaattt

SEQ ID NO: 53639 - DNA, 20 bp, synthetic construct
  misc_feature 1..20: note = chemically synthesized
  source 1..20: mol_type = other DNA
atctttcctgctttcttttg

SEQ ID NO: 53640 - DNA, 20 bp, synthetic construct
  misc_feature 1..20: note = chemically synthesized
  source 1..20: mol_type = other DNA
tctttcctgctttcttttgt

SEQ ID NO: 53641 - DNA, 20 bp, synthetic construct
  misc_feature 1..20: note = chemically synthesized
  source 1..20: mol_type = other DNA
tgctttcttttgtgggcatt

SEQ ID NO: 53642 - DNA, 20 bp, synthetic construct
  misc_feature 1..20: note = chemically synthesized
  source 1..20: mol_type = other DNA
acactgctttaaatgtgtcc

SEQ ID NO: 53643 - DNA, 20 bp, synthetic construct
  misc_feature 1..20: note = chemically synthesized
  source 1..20: mol_type = other DNA
actgctttaaatgtgtccca

SEQ ID NO: 53644 - DNA, 20 bp, synthetic construct
  misc_feature 1..20: note = chemically synthesized
  source 1..20: mol_type = other DNA
tgttgtatctttattctcgt

SEQ ID NO: 53645 - DNA, 20 bp, synthetic construct
  misc_feature 1..20: note = chemically synthesized
  source 1..20: mol_type = other DNA
ctttattctcgttggtttca

SEQ ID NO: 53646 - DNA, 20 bp, synthetic construct
  misc_feature 1..20: note = chemically synthesized
  source 1..20: mol_type = other DNA
ccttcattttgttatgtacc

SEQ ID NO: 53647 - DNA, 20 bp, synthetic construct
  misc_feature 1..20: note = chemically synthesized
  source 1..20: mol_type = other DNA
tcattttgttatgtacccag

SEQ ID NO: 53648 - DNA, 20 bp, synthetic construct
  misc_feature 1..20: note = chemically synthesized
  source 1..20: mol_type = other DNA
ttatgtacccagtagtcatt

SEQ ID NO: 53649 - DNA, 20 bp, synthetic construct
  misc_feature 1..20: note = chemically synthesized
  source 1..20: mol_type = other DNA
tatgtacccagtagtcattc

SEQ ID NO: 53650 - DNA, 20 bp, synthetic construct
  misc_feature 1..20: note = chemically synthesized
  source 1..20: mol_type = other DNA
tgtacccagtagtcattcag

SEQ ID NO: 53651 - DNA, 20 bp, synthetic construct
  misc_feature 1..20: note = chemically synthesized
  source 1..20: mol_type = other DNA
acccagtagtcattcaggag

SEQ ID NO: 53652 - DNA, 20 bp, synthetic construct
  misc_feature 1..20: note = chemically synthesized
  source 1..20: mol_type = other DNA
cccagtagtcattcaggagc

SEQ ID NO: 53653 - DNA, 20 bp, synthetic construct
  misc_feature 1..20: note = chemically synthesized
  source 1..20: mol_type = other DNA
tcattcaggagcaggctgtt

SEQ ID NO: 53654 - DNA, 20 bp, synthetic construct
  misc_feature 1..20: note = chemically synthesized
  source 1..20: mol_type = other DNA
caggctgttcagtttccatg

SEQ ID NO: 53655 - DNA, 20 bp, synthetic construct
  misc_feature 1..20: note = chemically synthesized
  source 1..20: mol_type = other DNA
tgttcagtttccatgtagtt

SEQ ID NO: 53656 - DNA, 20 bp, synthetic construct
  misc_feature 1..20: note = chemically synthesized
  source 1..20: mol_type = other DNA
tcagtttccatgtagttgag

SEQ ID NO: 53657 - DNA, 20 bp, synthetic construct
  misc_feature 1..20: note = chemically synthesized
  source 1..20: mol_type = other DNA
ccatgtagttgagtggtttt

SEQ ID NO: 53658 - DNA, 20 bp, synthetic construct
  misc_feature 1..20: note = chemically synthesized
  source 1..20: mol_type = other DNA
gtagttgagtggttttgagt

SEQ ID NO: 53659 - DNA, 20 bp, synthetic construct
  misc_feature 1..20: note = chemically synthesized
  source 1..20: mol_type = other DNA
tgagtgagtttcttaatcct

SEQ ID NO: 53660 - DNA, 20 bp, synthetic construct
  misc_feature 1..20: note = chemically synthesized
  source 1..20: mol_type = other DNA
agtttcttaatcctgagttc

SEQ ID NO: 53661 - DNA, 20 bp, synthetic construct
  misc_feature 1..20: note = chemically synthesized
  source 1..20: mol_type = other DNA
gttctagtttgattgcactg

SEQ ID NO: 53662 - DNA, 20 bp, synthetic construct
  misc_feature 1..20: note = chemically synthesized
  source 1..20: mol_type = other DNA
gtttgattgcactgtggtct

SEQ ID NO: 53663 - DNA, 20 bp, synthetic construct
  misc_feature 1..20: note = chemically synthesized
  source 1..20: mol_type = other DNA
ttgattgcactgtggtctga

SEQ ID NO: 53664 - DNA, 20 bp, synthetic construct
  misc_feature 1..20: note = chemically synthesized
  source 1..20: mol_type = other DNA
ttgcactgtggtctgagaga

SEQ ID NO: 53665 - DNA, 20 bp, synthetic construct
  misc_feature 1..20: note = chemically synthesized
  source 1..20: mol_type = other DNA
tctgttcttttacgtttgct

SEQ ID NO: 53666 - DNA, 20 bp, synthetic construct
  misc_feature 1..20: note = chemically synthesized
  source 1..20: mol_type = other DNA
ctgttcttttacgtttgctg

SEQ ID NO: 53667 - DNA, 20 bp, synthetic construct
  misc_feature 1..20: note = chemically synthesized
  source 1..20: mol_type = other DNA
gttcttttacgtttgctgag

SEQ ID NO: 53668 - DNA, 20 bp, synthetic construct
  misc_feature 1..20: note = chemically synthesized
  source 1..20: mol_type = other DNA
gtgcttcacttccaactatg

SEQ ID NO: 53669 - DNA, 20 bp, synthetic construct
  misc_feature 1..20: note = chemically synthesized
  source 1..20: mol_type = other DNA
cttccaactatgtggtcaac

SEQ ID NO: 53670 - DNA, 20 bp, synthetic construct
  misc_feature 1..20: note = chemically synthesized
  source 1..20: mol_type = other DNA
aactatgtggtcaactggaa

SEQ ID NO: 53671 - DNA, 20 bp, synthetic construct
  misc_feature 1..20: note = chemically synthesized
  source 1..20: mol_type = other DNA
actatgtggtcaactggaat

SEQ ID NO: 53672 - DNA, 20 bp, synthetic construct
  misc_feature 1..20: note = chemically synthesized
  source 1..20: mol_type = other DNA
gtggtcaactggaataggtg

SEQ ID NO: 53673 - DNA, 20 bp, synthetic construct
  misc_feature 1..20: note = chemically synthesized
  source 1..20: mol_type = other DNA
caactggaataggtgtggtg

SEQ ID NO: 53674 - DNA, 20 bp, synthetic construct
  misc_feature 1..20: note = chemically synthesized
  source 1..20: mol_type = other DNA
aataggtgtggtgtggtgct

SEQ ID NO: 53675 - DNA, 20 bp, synthetic construct
  misc_feature 1..20: note = chemically synthesized
  source 1..20: mol_type = other DNA
aggtgtggtgtggtgctgag

SEQ ID NO: 53676 - DNA, 20 bp, synthetic construct
  misc_feature 1..20: note = chemically synthesized
  source 1..20: mol_type = other DNA
gaatgtatattctattgatt

SEQ ID NO: 53677 - DNA, 20 bp, synthetic construct
  misc_feature 1..20: note = chemically synthesized
  source 1..20: mol_type = other DNA
aatgtatattctattgattt

SEQ ID NO: 53678 - DNA, 20 bp, synthetic construct
  misc_feature 1..20: note = chemically synthesized
  source 1..20: mol_type = other DNA
tatattctattgatttggga

SEQ ID NO: 53679 - DNA, 20 bp, synthetic construct
  misc_feature 1..20: note = chemically synthesized
  source 1..20: mol_type = other DNA
tattctattgatttgggatg

SEQ ID NO: 53680 - DNA, 20 bp, synthetic construct
  misc_feature 1..20: note = chemically synthesized
  source 1..20: mol_type = other DNA
ttctattgatttgggatgga

SEQ ID NO: 53681 - DNA, 20 bp, synthetic construct
  misc_feature 1..20: note = chemically synthesized
  source 1..20: mol_type = other DNA
atttgggatggagagttctg

SEQ ID NO: 53682 - DNA, 20 bp, synthetic construct
  misc_feature 1..20: note = chemically synthesized
  source 1..20: mol_type = other DNA
agagttctgtagatgtctat

SEQ ID NO: 53683 - DNA, 20 bp, synthetic construct
  misc_feature 1..20: note = chemically synthesized
  source 1..20: mol_type = other DNA
gagttctgtagatgtctatt

SEQ ID NO: 53684 - DNA, 20 bp, synthetic construct
  misc_feature 1..20: note = chemically synthesized
  source 1..20: mol_type = other DNA
agatgtctattaggtctgct

SEQ ID NO: 53685 - DNA, 20 bp, synthetic construct
  misc_feature 1..20: note = chemically synthesized
  source 1..20: mol_type = other DNA
tctattaggtctgcttggtg

SEQ ID NO: 53686 - DNA, 20 bp, synthetic construct
  misc_feature 1..20: note = chemically synthesized
  source 1..20: mol_type = other DNA
tattaggtctgcttggtgca

SEQ ID NO: 53687 - DNA, 20 bp, synthetic construct
  misc_feature 1..20: note = chemically synthesized
  source 1..20: mol_type = other DNA
gcagagctgaattcaattcc

SEQ ID NO: 53688 - DNA, 20 bp, synthetic construct
  misc_feature 1..20: note = chemically synthesized
  source 1..20: mol_type = other DNA
gttgatctgtctaatgttga

SEQ ID NO: 53689 - DNA, 20 bp, synthetic construct
  misc_feature 1..20: note = chemically synthesized
  source 1..20: mol_type = other DNA
gatctgtctaatgttgacag

SEQ ID NO: 53690 - DNA, 20 bp, synthetic construct
  misc_feature 1..20: note = chemically synthesized
  source 1..20: mol_type = other DNA
atctgtctaatgttgacagt

SEQ ID NO: 53691 - DNA, 20 bp, synthetic construct
  misc_feature 1..20: note = chemically synthesized
  source 1..20: mol_type = other DNA
tctgtctaatgttgacagtg

SEQ ID NO: 53692 - DNA, 20 bp, synthetic construct
  misc_feature 1..20: note = chemically synthesized
  source 1..20: mol_type = other DNA
atgttgacagtggggtgtta

SEQ ID NO: 53693 - DNA, 20 bp, synthetic construct
  misc_feature 1..20: note = chemically synthesized
  source 1..20: mol_type = other DNA
agtctcccattattattgtg

SEQ ID NO: 53694 - DNA, 20 bp, synthetic construct
  misc_feature 1..20: note = chemically synthesized
  source 1..20: mol_type = other DNA
gtctcccattattattgtgt

SEQ ID NO: 53695 - DNA, 20 bp, synthetic construct
  misc_feature 1..20: note = chemically synthesized
  source 1..20: mol_type = other DNA
ctcccattattattgtgtgg

SEQ ID NO: 53696 - DNA, 20 bp, synthetic construct
  misc_feature 1..20: note = chemically synthesized
  source 1..20: mol_type = other DNA
ttattattgtgtgggagtct

SEQ ID NO: 53697 - DNA, 20 bp, synthetic construct
  misc_feature 1..20: note = chemically synthesized
  source 1..20: mol_type = other DNA
tgggagtctaagtctctttg

SEQ ID NO: 53698 - DNA, 20 bp, synthetic construct
  misc_feature 1..20: note = chemically synthesized
  source 1..20: mol_type = other DNA
gggagtctaagtctctttgt

SEQ ID NO: 53699 - DNA, 20 bp, synthetic construct
  misc_feature 1..20: note = chemically synthesized
  source 1..20: mol_type = other DNA
aagtctctttgtaggtctct

SEQ ID NO: 53700 - DNA, 20 bp, synthetic construct
  misc_feature 1..20: note = chemically synthesized
  source 1..20: mol_type = other DNA
agtctctttgtaggtctcta

SEQ ID NO: 53701 - DNA, 20 bp, synthetic construct
  misc_feature 1..20: note = chemically synthesized
  source 1..20: mol_type = other DNA
aaggacttgctttatgaatc

SEQ ID NO: 53702 - DNA, 20 bp, synthetic construct
  misc_feature 1..20: note = chemically synthesized
  source 1..20: mol_type = other DNA
aggacttgctttatgaatct

SEQ ID NO: 53703 - DNA, 20 bp, synthetic construct
  misc_feature 1..20: note = chemically synthesized
  source 1..20: mol_type = other DNA
gaatctgggtgctgctgtat

SEQ ID NO: 53704 - DNA, 20 bp, synthetic construct
  misc_feature 1..20: note = chemically synthesized
  source 1..20: mol_type = other DNA
aatctgggtgctgctgtatt

SEQ ID NO: 53705 - DNA, 20 bp, synthetic construct
  misc_feature 1..20: note = chemically synthesized
  source 1..20: mol_type = other DNA
gtattgggtgcatatatatt

SEQ ID NO: 53706 - DNA, 20 bp, synthetic construct
  misc_feature 1..20: note = chemically synthesized
  source 1..20: mol_type = other DNA
tattgggtgcatatatattt

SEQ ID NO: 53707 - DNA, 20 bp, synthetic construct
  misc_feature 1..20: note = chemically synthesized
  source 1..20: mol_type = other DNA
gggtgcatatatatttagga

SEQ ID NO: 53708 - DNA, 20 bp, synthetic construct
  misc_feature 1..20: note = chemically synthesized
  source 1..20: mol_type = other DNA
gcatatatatttaggatagt

SEQ ID NO: 53709 - DNA, 20 bp, synthetic construct
  misc_feature 1..20: note = chemically synthesized
  source 1..20: mol_type = other DNA
tgttgaattgatccctttac

SEQ ID NO: 53710 - DNA, 20 bp, synthetic construct
  misc_feature 1..20: note = chemically synthesized
  source 1..20: mol_type = other DNA
atccctttaccagtatgtaa

SEQ ID NO: 53711 - DNA, 20 bp, synthetic construct
  misc_feature 1..20: note = chemically synthesized
  source 1..20: mol_type = other DNA
ttgtctcttttgatctttgt

SEQ ID NO: 53712 - DNA, 20 bp, synthetic construct
  misc_feature 1..20: note = chemically synthesized
  source 1..20: mol_type = other DNA
ttttgatctttgttggttta

SEQ ID NO: 53713 - DNA, 20 bp, synthetic construct
  misc_feature 1..20: note = chemically synthesized
  source 1..20: mol_type = other DNA
tggtttaaagtctgttttat

SEQ ID NO: 53714 - DNA, 20 bp, synthetic construct
  misc_feature 1..20: note = chemically synthesized
  source 1..20: mol_type = other DNA
gtttaaagtctgttttatca

SEQ ID NO: 53715 - DNA, 20 bp, synthetic construct
  misc_feature 1..20: note = chemically synthesized
  source 1..20: mol_type = other DNA
agtctgttttatcagagact

SEQ ID NO: 53716 - DNA, 20 bp, synthetic construct
  misc_feature 1..20: note = chemically synthesized
  source 1..20: mol_type = other DNA
ttttttgttttccatttgct

SEQ ID NO: 53717 - DNA, 20 bp, synthetic construct
  misc_feature 1..20: note = chemically synthesized
  source 1..20: mol_type = other DNA
tttgttttccatttgcttgg

SEQ ID NO: 53718 - DNA, 20 bp, synthetic construct
  misc_feature 1..20: note = chemically synthesized
  source 1..20: mol_type = other DNA
ttcctccatccctttatttt

SEQ ID NO: 53719 - DNA, 20 bp, synthetic construct
  misc_feature 1..20: note = chemically synthesized
  source 1..20: mol_type = other DNA
ctatgtgtgtctctccacat

SEQ ID NO: 53720 - DNA, 20 bp, synthetic construct
  misc_feature 1..20: note = chemically synthesized
  source 1..20: mol_type = other DNA
tgtgtctctccacatgagat

SEQ ID NO: 53721 - DNA, 20 bp, synthetic construct
  misc_feature 1..20: note = chemically synthesized
  source 1..20: mol_type = other DNA
tgagattggtttcctgaata

SEQ ID NO: 53722 - DNA, 20 bp, synthetic construct
  misc_feature 1..20: note = chemically synthesized
  source 1..20: mol_type = other DNA
tcctgaatacagcacactga

SEQ ID NO: 53723 - DNA, 20 bp, synthetic construct
  misc_feature 1..20: note = chemically synthesized
  source 1..20: mol_type = other DNA
cctgaatacagcacactgat

SEQ ID NO: 53724 - DNA, 20 bp, synthetic construct
  misc_feature 1..20: note = chemically synthesized
  source 1..20: mol_type = other DNA
tgactctttatccaatttgc

SEQ ID NO: 53725 - DNA, 20 bp, synthetic construct
  misc_feature 1..20: note = chemically synthesized
  source 1..20: mol_type = other DNA
gccagtctgtgtcttttaat

SEQ ID NO: 53726 - DNA, 20 bp, synthetic construct
  misc_feature 1..20: note = chemically synthesized
  source 1..20: mol_type = other DNA
cagtctgtgtcttttaattg

SEQ ID NO: 53727 - DNA, 20 bp, synthetic construct
  misc_feature 1..20: note = chemically synthesized
  source 1..20: mol_type = other DNA
tgtcttttaattggagcatt

SEQ ID NO: 53728 - DNA, 20 bp, synthetic construct
  misc_feature 1..20: note = chemically synthesized
  source 1..20: mol_type = other DNA
catttagctcatttacattt

SEQ ID NO: 53729 - DNA, 20 bp, synthetic construct
  misc_feature 1..20: note = chemically synthesized
  source 1..20: mol_type = other DNA
atttagctcatttacattta

SEQ ID NO: 53730 - DNA, 20 bp, synthetic construct
  misc_feature 1..20: note = chemically synthesized
  source 1..20: mol_type = other DNA
taaggttaatattgttatgt

SEQ ID NO: 53731 - DNA, 20 bp, synthetic construct
  misc_feature 1..20: note = chemically synthesized
  source 1..20: mol_type = other DNA
tgatcctgtcattatgatgt

SEQ ID NO: 53732 - DNA, 20 bp, synthetic construct
  misc_feature 1..20: note = chemically synthesized
  source 1..20: mol_type = other DNA
cctgtcattatgatgttagc

SEQ ID NO: 53733 - DNA, 20 bp, synthetic construct
  misc_feature 1..20: note = chemically synthesized
  source 1..20: mol_type = other DNA
tagctggttattttgcttgc

SEQ ID NO: 53734 - DNA, 20 bp, synthetic construct
  misc_feature 1..20: note = chemically synthesized
  source 1..20: mol_type = other DNA
attttgcttgctagttgatg

SEQ ID NO: 53735 - DNA, 20 bp, synthetic construct
  misc_feature 1..20: note = chemically synthesized
  source 1..20: mol_type = other DNA
tagttgatgcagtttctccc

SEQ ID NO: 53736 - DNA, 20 bp, synthetic construct
  misc_feature 1..20: note = chemically synthesized
  source 1..20: mol_type = other DNA
cagtttctccctagccttga

SEQ ID NO: 53737 - DNA, 20 bp, synthetic construct
  misc_feature 1..20: note = chemically synthesized
  source 1..20: mol_type = other DNA
ccttgatggtctttacaatt

SEQ ID NO: 53738 - DNA, 20 bp, synthetic construct
  misc_feature 1..20: note = chemically synthesized
  source 1..20: mol_type = other DNA
tacaatttggcatgtttttg

SEQ ID NO: 53739 - DNA, 20 bp, synthetic construct
  misc_feature 1..20: note = chemically synthesized
  source 1..20: mol_type = other DNA
aatttggcatgtttttgcag

SEQ ID NO: 53740 - DNA, 20 bp, synthetic construct
  misc_feature 1..20: note = chemically synthesized
  source 1..20: mol_type = other DNA
tggcatgtttttgcagtggc

SEQ ID NO: 53741 - DNA, 20 bp, synthetic construct
  misc_feature 1..20: note = chemically synthesized
  source 1..20: mol_type = other DNA
gtttttgcagtggctggtac

SEQ ID NO: 53742 - DNA, 20 bp, synthetic construct
  misc_feature 1..20: note = chemically synthesized
  source 1..20: mol_type = other DNA
tccatgtttactgcttcctt

SEQ ID NO: 53743 - DNA, 20 bp, synthetic construct
  misc_feature 1..20: note = chemically synthesized
  source 1..20: mol_type = other DNA
ccatgtttactgcttccttc

SEQ ID NO: 53744 - DNA, 20 bp, synthetic construct
  misc_feature 1..20: note = chemically synthesized
  source 1..20: mol_type = other DNA
atgtttactgcttccttcag

SEQ ID NO: 53745 - DNA, 20 bp, synthetic construct
  misc_feature 1..20: note = chemically synthesized
  source 1..20: mol_type = other DNA
gcttccttcaggagctcttt

SEQ ID NO: 53746 - DNA, 20 bp, synthetic construct
  misc_feature 1..20: note = chemically synthesized
  source 1..20: mol_type = other DNA
cttccttcaggagctctttt

SEQ ID NO: 53747 - DNA, 20 bp, synthetic construct
  misc_feature 1..20: note = chemically synthesized
  source 1..20: mol_type = other DNA
ttccttcaggagctctttta

SEQ ID NO: 53748 - DNA, 20 bp, synthetic construct
  misc_feature 1..20: note = chemically synthesized
  source 1..20: mol_type = other DNA
cttcaggagctcttttaggg

SEQ ID NO: 53749 - DNA, 20 bp, synthetic construct
  misc_feature 1..20: note = chemically synthesized
  source 1..20: mol_type = other DNA
ttcaggagctcttttagggc

SEQ ID NO: 53750 - DNA, 20 bp, synthetic construct
  misc_feature 1..20: note = chemically synthesized
  source 1..20: mol_type = other DNA
gagctcttttagggcaggcc

SEQ ID NO: 53751 - DNA, 20 bp, synthetic construct
  misc_feature 1..20: note = chemically synthesized
  source 1..20: mol_type = other DNA
ctcttttagggcaggcctgg

SEQ ID NO: 53752 - DNA, 20 bp, synthetic construct
  misc_feature 1..20: note = chemically synthesized
  source 1..20: mol_type = other DNA
aggcctggtggtgacaaaat

SEQ ID NO: 53753 - DNA, 20 bp, synthetic construct
  misc_feature 1..20: note = chemically synthesized
  source 1..20: mol_type = other DNA
tcagcaattgcttgtctgta

SEQ ID NO: 53754 - DNA, 20 bp, synthetic construct
  misc_feature 1..20: note = chemically synthesized
  source 1..20: mol_type = other DNA
ttatttctccttcacttatg

SEQ ID NO: 53755 - DNA, 20 bp, synthetic construct
  misc_feature 1..20: note = chemically synthesized
  source 1..20: mol_type = other DNA
tgaagcttaccaaccaaaaa

SEQ ID NO: 53756 - DNA, 20 bp, synthetic construct
  misc_feature 1..20: note = chemically synthesized
  source 1..20: mol_type = other DNA
cttaccaaccaaaaaaagtc

SEQ ID NO: 53757 - DNA, 20 bp, synthetic construct
  misc_feature 1..20: note = chemically synthesized
  source 1..20: mol_type = other DNA
ttaccaaccaaaaaaagtcc

SEQ ID NO: 53758 - DNA, 20 bp, synthetic construct
  misc_feature 1..20: note = chemically synthesized
  source 1..20: mol_type = other DNA
aaccaaaaaaagtccaggac

SEQ ID NO: 53759 - DNA, 20 bp, synthetic construct
  misc_feature 1..20: note = chemically synthesized
  source 1..20: mol_type = other DNA
aaaaaaagtccaggaccaga

SEQ ID NO: 53760 - DNA, 20 bp, synthetic construct
  misc_feature 1..20: note = chemically synthesized
  source 1..20: mol_type = other DNA
tccaggaccagatggattca

SEQ ID NO: 53761 - DNA, 20 bp, synthetic construct
  misc_feature 1..20: note = chemically synthesized
  source 1..20: mol_type = other DNA
gattcacagccgaattctac

SEQ ID NO: 53762 - DNA, 20 bp, synthetic construct
  misc_feature 1..20: note = chemically synthesized
  source 1..20: mol_type = other DNA
ttcacagccgaattctacca

SEQ ID NO: 53763 - DNA, 20 bp, synthetic construct
  misc_feature 1..20: note = chemically synthesized
  source 1..20: mol_type = other DNA
tcacagccgaattctaccag

SEQ ID NO: 53764 - DNA, 20 bp, synthetic construct
  misc_feature 1..20: note = chemically synthesized
  source 1..20: mol_type = other DNA
ccgaattctaccagaggtac

SEQ ID NO: 53765 - DNA, 20 bp, synthetic construct
  misc_feature 1..20: note = chemically synthesized
  source 1..20: mol_type = other DNA
cgaattctaccagaggtaca

SEQ ID NO: 53766 - DNA, 20 bp, synthetic construct
  misc_feature 1..20: note = chemically synthesized
  source 1..20: mol_type = other DNA
aattctaccagaggtacaag

SEQ ID NO: 53767 - DNA, 20 bp, synthetic construct
  misc_feature 1..20: note = chemically synthesized
  source 1..20: mol_type = other DNA
attctaccagaggtacaagg

SEQ ID NO: 53768 - DNA, 20 bp, synthetic construct
  misc_feature 1..20: note = chemically synthesized
  source 1..20: mol_type = other DNA
tctaccagaggtacaaggag

SEQ ID NO: 53769 - DNA, 20 bp, synthetic construct
  misc_feature 1..20: note = chemically synthesized
  source 1..20: mol_type = other DNA
ccagaggtacaaggaggagc

SEQ ID NO: 53770 - DNA, 20 bp, synthetic construct
  misc_feature 1..20: note = chemically synthesized
  source 1..20: mol_type = other DNA
tctgaaactattccaatcaa

SEQ ID NO: 53771 - DNA, 20 bp, synthetic construct
  misc_feature 1..20: note = chemically synthesized
  source 1..20: mol_type = other DNA
actattccaatcaatagaaa

SEQ ID NO: 53772 - DNA, 20 bp, synthetic construct
  misc_feature 1..20: note = chemically synthesized
  source 1..20: mol_type = other DNA
tattccaatcaatagaaaaa

SEQ ID NO: 53773 - DNA, 20 bp, synthetic construct
  misc_feature 1..20: note = chemically synthesized
  source 1..20: mol_type = other DNA
attccaatcaatagaaaaag

SEQ ID NO: 53774 - DNA, 20 bp, synthetic construct
  misc_feature 1..20: note = chemically synthesized
  source 1..20: mol_type = other DNA
ttccaatcaatagaaaaaga

SEQ ID NO: 53775 - DNA, 20 bp, synthetic construct
  misc_feature 1..20: note = chemically synthesized
  source 1..20: mol_type = other DNA
tcctccctaactcattttat

SEQ ID NO: 53776 - DNA, 20 bp, synthetic construct
  misc_feature 1..20: note = chemically synthesized
  source 1..20: mol_type = other DNA
cctccctaactcattttatg

SEQ ID NO: 53777 - DNA, 20 bp, synthetic construct
  misc_feature 1..20: note = chemically synthesized
  source 1..20: mol_type = other DNA
cctaactcattttatgaggc

SEQ ID NO: 53778 - DNA, 20 bp, synthetic construct
  misc_feature 1..20: note = chemically synthesized
  source 1..20: mol_type = other DNA
ccagcatcatcttgatacca

SEQ ID NO: 53779 - DNA, 20 bp, synthetic construct
  misc_feature 1..20: note = chemically synthesized
  source 1..20: mol_type = other DNA
atcatcttgataccaaagcc

SEQ ID NO: 53780 - DNA, 20 bp, synthetic construct
  misc_feature 1..20: note = chemically synthesized
  source 1..20: mol_type = other DNA
atcttgataccaaagcctag

SEQ ID NO: 53781 - DNA, 20 bp, synthetic construct
  misc_feature 1..20: note = chemically synthesized
  source 1..20: mol_type = other DNA
tagcagacacacaacaaaaa

SEQ ID NO: 53782 - DNA, 20 bp, synthetic construct
  misc_feature 1..20: note = chemically synthesized
  source 1..20: mol_type = other DNA
gcagacacacaacaaaaaaa

SEQ ID NO: 53783 - DNA, 20 bp, synthetic construct
  misc_feature 1..20: note = chemically synthesized
  source 1..20: mol_type = other DNA
aacatcgatgcaaaaatcct

SEQ ID NO: 53784 - DNA, 20 bp, synthetic construct
  misc_feature 1..20: note = chemically synthesized
  source 1..20: mol_type = other DNA
aaaaatcctcagtaaaatac

SEQ ID NO: 53785 - DNA, 20 bp, synthetic construct
  misc_feature 1..20: note = chemically synthesized
  source 1..20: mol_type = other DNA
aaatactggcaaaccaaatc

SEQ ID NO: 53786 - DNA, 20 bp, synthetic construct
  misc_feature 1..20: note = chemically synthesized
  source 1..20: mol_type = other DNA
aatactggcaaaccaaatcc

SEQ ID NO: 53787 - DNA, 20 bp, synthetic construct
  misc_feature 1..20: note = chemically synthesized
  source 1..20: mol_type = other DNA
tactggcaaaccaaatccag

SEQ ID NO: 53788 - DNA, 20 bp, synthetic construct
  misc_feature 1..20: note = chemically synthesized
  source 1..20: mol_type = other DNA
aaatccaggagcacatcaaa

SEQ ID NO: 53789 - DNA, 20 bp, synthetic construct
  misc_feature 1..20: note = chemically synthesized
  source 1..20: mol_type = other DNA
aaagcttatccaccatgatc

SEQ ID NO: 53790 - DNA, 20 bp, synthetic construct
  misc_feature 1..20: note = chemically synthesized
  source 1..20: mol_type = other DNA
gcttatccaccatgatcaag

SEQ ID NO: 53791 - DNA, 20 bp, synthetic construct
  misc_feature 1..20: note = chemically synthesized
  source 1..20: mol_type = other DNA
cttatccaccatgatcaagt

SEQ ID NO: 53792 - DNA, 20 bp, synthetic construct
  misc_feature 1..20: note = chemically synthesized
  source 1..20: mol_type = other DNA
gatcaagtgggcttcatccc

SEQ ID NO: 53793 - DNA, 20 bp, synthetic construct
  misc_feature 1..20: note = chemically synthesized
  source 1..20: mol_type = other DNA
atcaagtgggcttcatccct

SEQ ID NO: 53794 - DNA, 20 bp, synthetic construct
  misc_feature 1..20: note = chemically synthesized
  source 1..20: mol_type = other DNA
tgggcttcatccctgggatg

SEQ ID NO: 53795 - DNA, 20 bp, synthetic construct
  misc_feature 1..20: note = chemically synthesized
  source 1..20: mol_type = other DNA
gggcttcatccctgggatgc

SEQ ID NO: 53796 - DNA, 20 bp, synthetic construct
  misc_feature 1..20: note = chemically synthesized
  source 1..20: mol_type = other DNA
ggcttcatccctgggatgca

SEQ ID NO: 53797 - DNA, 20 bp, synthetic construct
  misc_feature 1..20: note = chemically synthesized
  source 1..20: mol_type = other DNA
tcatccctgggatgcagggc

SEQ ID NO: 53798 - DNA, 20 bp, synthetic construct
  misc_feature 1..20: note = chemically synthesized
  source 1..20: mol_type = other DNA
gcaaatcaataaacataatc

SEQ ID NO: 53799 - DNA, 20 bp, synthetic construct
  misc_feature 1..20: note = chemically synthesized
  source 1..20: mol_type = other DNA
aacataatccagcatataaa

SEQ ID NO: 53800 - DNA, 20 bp, synthetic construct
  misc_feature 1..20: note = chemically synthesized
  source 1..20: mol_type = other DNA
ccagcatataaacagaacca

SEQ ID NO: 53801 - DNA, 20 bp, synthetic construct
  misc_feature 1..20: note = chemically synthesized
  source 1..20: mol_type = other DNA
aaaccacatgattatctcaa

SEQ ID NO: 53802 - DNA, 20 bp, synthetic construct
  misc_feature 1..20: note = chemically synthesized
  source 1..20: mol_type = other DNA
catgattatctcaatagatg

SEQ ID NO: 53803 - DNA, 20 bp, synthetic construct
  misc_feature 1..20: note = chemically synthesized
  source 1..20: mol_type = other DNA
ttatctcaatagatgcagaa

SEQ ID NO: 53804 - DNA, 20 bp, synthetic construct
  misc_feature 1..20: note = chemically synthesized
  source 1..20: mol_type = other DNA
tatctcaatagatgcagaaa

SEQ ID NO: 53805 - DNA, 20 bp, synthetic construct
  misc_feature 1..20: note = chemically synthesized
  source 1..20: mol_type = other DNA
actaaaaactctcaataaat

SEQ ID NO: 53806 - DNA, 20 bp, synthetic construct
  misc_feature 1..20: note = chemically synthesized
  source 1..20: mol_type = other DNA
ctaaaaactctcaataaatt

SEQ ID NO: 53807 - DNA, 20 bp, synthetic construct
  misc_feature 1..20: note = chemically synthesized
  source 1..20: mol_type = other DNA
ctcaataaattaggtatcga

SEQ ID NO: 53808 - DNA, 20 bp, synthetic construct
  misc_feature 1..20: note = chemically synthesized
  source 1..20: mol_type = other DNA
tcaataaattaggtatcgat

SEQ ID NO: 53809 - DNA, 20 bp, synthetic construct
  misc_feature 1..20: note = chemically synthesized
  source 1..20: mol_type = other DNA
gggacatatctcaaaataat

SEQ ID NO: 53810 - DNA, 20 bp, synthetic construct
  misc_feature 1..20: note = chemically synthesized
  source 1..20: mol_type = other DNA
gacatatctcaaaataataa

SEQ ID NO: 53811 - DNA, 20 bp, synthetic construct
  misc_feature 1..20: note = chemically synthesized
  source 1..20: mol_type = other DNA
agctatctatgacaaaccca

SEQ ID NO: 53812 - DNA, 20 bp, synthetic construct
  misc_feature 1..20: note = chemically synthesized
  source 1..20: mol_type = other DNA
acagccaatatcatactgaa

SEQ ID NO: 53813 - DNA, 20 bp, synthetic construct
  misc_feature 1..20: note = chemically synthesized
  source 1..20: mol_type = other DNA
catactgaatggacaaaaac

SEQ ID NO: 53814 - DNA, 20 bp, synthetic construct
  misc_feature 1..20: note = chemically synthesized
  source 1..20: mol_type = other DNA
actgaatggacaaaaactgg

SEQ ID NO: 53815 - DNA, 20 bp, synthetic construct
  misc_feature 1..20: note = chemically synthesized
  source 1..20: mol_type = other DNA
gaagcattccctttgaaaac

SEQ ID NO: 53816 - DNA, 20 bp, synthetic construct
  misc_feature 1..20: note = chemically synthesized
  source 1..20: mol_type = other DNA
ttccctttgaaaactggcac

SEQ ID NO: 53817 - DNA, 20 bp, synthetic construct
  misc_feature 1..20: note = chemically synthesized
  source 1..20: mol_type = other DNA
ctttgaaaactggcacaaga

SEQ ID NO: 53818 - DNA, 20 bp, synthetic construct
  misc_feature 1..20: note = chemically synthesized
  source 1..20: mol_type = other DNA
tttgaaaactggcacaagac

SEQ ID NO: 53819 - DNA, 20 bp, synthetic construct
  misc_feature 1..20: note = chemically synthesized
  source 1..20: mol_type = other DNA
ttgaaaactggcacaagaca

SEQ ID NO: 53820 - DNA, 20 bp, synthetic construct
  misc_feature 1..20: note = chemically synthesized
  source 1..20: mol_type = other DNA
ctcaccactcctattcaaca

SEQ ID NO: 53821 - DNA, 20 bp, synthetic construct
  misc_feature 1..20: note = chemically synthesized
  source 1..20: mol_type = other DNA
actcctattcaacatagtgt

SEQ ID NO: 53822 - DNA, 20 bp, synthetic construct
  misc_feature 1..20: note = chemically synthesized
  source 1..20: mol_type = other DNA
cctattcaacatagtgttgg

SEQ ID NO: 53823 - DNA, 20 bp, synthetic construct
  misc_feature 1..20: note = chemically synthesized
  source 1..20: mol_type = other DNA
caacatagtgttggaagttc

SEQ ID NO: 53824 - DNA, 20 bp, synthetic construct
  misc_feature 1..20: note = chemically synthesized
  source 1..20: mol_type = other DNA
atagtgttggaagttctggc

SEQ ID NO: 53825 - DNA, 20 bp, synthetic construct
  misc_feature 1..20: note = chemically synthesized
  source 1..20: mol_type = other DNA
tagtgttggaagttctggcc

SEQ ID NO: 53826 - DNA, 20 bp, synthetic construct
  misc_feature 1..20: note = chemically synthesized
  source 1..20: mol_type = other DNA
agtgttggaagttctggcca

SEQ ID NO: 53827 - DNA, 20 bp, synthetic construct
  misc_feature 1..20: note = chemically synthesized
  source 1..20: mol_type = other DNA
gaagttctggccagggcaat

SEQ ID NO: 53828 - DNA, 20 bp, synthetic construct
  misc_feature 1..20: note = chemically synthesized
  source 1..20: mol_type = other DNA
aagttctggccagggcaatc

SEQ ID NO: 53829 - DNA, 20 bp, synthetic construct
  misc_feature 1..20: note = chemically synthesized
  source 1..20: mol_type = other DNA
tctggccagggcaatcaggc

SEQ ID NO: 53830 - DNA, 20 bp, synthetic construct
  misc_feature 1..20: note = chemically synthesized
  source 1..20: mol_type = other DNA
tggccagggcaatcaggcaa

SEQ ID NO: 53831 - DNA, 20 bp, synthetic construct
  misc_feature 1..20: note = chemically synthesized
  source 1..20: mol_type = other DNA
cagggcaatcaggcaagaga

SEQ ID NO: 53832 - DNA, 20 bp, synthetic construct
  misc_feature 1..20: note = chemically synthesized
  source 1..20: mol_type = other DNA
tcaggcaagagaaagaaata

SEQ ID NO: 53833 - DNA, 20 bp, synthetic construct
  misc_feature 1..20: note = chemically synthesized
  source 1..20: mol_type = other DNA
caggcaagagaaagaaataa

SEQ ID NO: 53834 - DNA, 20 bp, synthetic construct
  misc_feature 1..20: note = chemically synthesized
  source 1..20: mol_type = other DNA
aggcaagagaaagaaataaa

SEQ ID NO: 53835 - DNA, 20 bp, synthetic construct
  misc_feature 1..20: note = chemically synthesized
  source 1..20: mol_type = other DNA
agaaataaagggcattcaat

SEQ ID NO: 53836 - DNA, 20 bp, synthetic construct
  misc_feature 1..20: note = chemically synthesized
  source 1..20: mol_type = other DNA
gaaataaagggcattcaatt

SEQ ID NO: 53837 - DNA, 20 bp, synthetic construct
  misc_feature 1..20: note = chemically synthesized
  source 1..20: mol_type = other DNA
aaagggcattcaattaggaa

SEQ ID NO: 53838 - DNA, 20 bp, synthetic construct
  misc_feature 1..20: note = chemically synthesized
  source 1..20: mol_type = other DNA
agggcattcaattaggaaaa

SEQ ID NO: 53839 - DNA, 20 bp, synthetic construct
  misc_feature 1..20: note = chemically synthesized
  source 1..20: mol_type = other DNA
gggcattcaattaggaaaag

SEQ ID NO: 53840 - DNA, 20 bp, synthetic construct
  misc_feature 1..20: note = chemically synthesized
  source 1..20: mol_type = other DNA
cattcaattaggaaaagagg

SEQ ID NO: 53841 - DNA, 20 bp, synthetic construct
  misc_feature 1..20: note = chemically synthesized
  source 1..20: mol_type = other DNA
agtgaaattgtccctgtttg

SEQ ID NO: 53842 - DNA, 20 bp, synthetic construct
  misc_feature 1..20: note = chemically synthesized
  source 1..20: mol_type = other DNA
agatgacgtgattgtatatc

SEQ ID NO: 53843 - DNA, 20 bp, synthetic construct
  misc_feature 1..20: note = chemically synthesized
  source 1..20: mol_type = other DNA
tctagaaaaccccatcgtct

SEQ ID NO: 53844 - DNA, 20 bp, synthetic construct
  misc_feature 1..20: note = chemically synthesized
  source 1..20: mol_type = other DNA
tctcagcccaaaatctcctt

SEQ ID NO: 53845 - DNA, 20 bp, synthetic construct
  misc_feature 1..20: note = chemically synthesized
  source 1..20: mol_type = other DNA
caaaatctccttaagctgat

SEQ ID NO: 53846 - DNA, 20 bp, synthetic construct
  misc_feature 1..20: note = chemically synthesized
  source 1..20: mol_type = other DNA
cttaagctgataagcaactt

SEQ ID NO: 53847 - DNA, 20 bp, synthetic construct
  misc_feature 1..20: note = chemically synthesized
  source 1..20: mol_type = other DNA
gctgataagcaacttcagaa

SEQ ID NO: 53848 - DNA, 20 bp, synthetic construct
  misc_feature 1..20: note = chemically synthesized
  source 1..20: mol_type = other DNA
aagcaacttcagaaaagtct

SEQ ID NO: 53849 - DNA, 20 bp, synthetic construct
  misc_feature 1..20: note = chemically synthesized
  source 1..20: mol_type = other DNA
aatcaatgtgcaaaaatcac

SEQ ID NO: 53850 - DNA, 20 bp, synthetic construct
  misc_feature 1..20: note = chemically synthesized
  source 1..20: mol_type = other DNA
gcattcctatacaccaataa

SEQ ID NO: 53851 - DNA, 20 bp, synthetic construct
  misc_feature 1..20: note = chemically synthesized
  source 1..20: mol_type = other DNA
atacaccaataacagacaaa

SEQ ID NO: 53852 - DNA, 20 bp, synthetic construct
  misc_feature 1..20: note = chemically synthesized
  source 1..20: mol_type = other DNA
acaccaataacagacaaaca

SEQ ID NO: 53853 - DNA, 20 bp, synthetic construct
  misc_feature 1..20: note = chemically synthesized
  source 1..20: mol_type = other DNA
accaataacagacaaacaga

SEQ ID NO: 53854 - DNA, 20 bp, synthetic construct
  misc_feature 1..20: note = chemically synthesized
  source 1..20: mol_type = other DNA
caaacagagagccaaatcat

SEQ ID NO: 53855 - DNA, 20 bp, synthetic construct
  misc_feature 1..20: note = chemically synthesized
  source 1..20: mol_type = other DNA
tcccattcacaattgcctca

SEQ ID NO: 53856 - DNA, 20 bp, synthetic construct
  misc_feature 1..20: note = chemically synthesized
  source 1..20: mol_type = other DNA
ccattcacaattgcctcaaa

SEQ ID NO: 53857 - DNA, 20 bp, synthetic construct
  misc_feature 1..20: note = chemically synthesized
  source 1..20: mol_type = other DNA
ctcaaagagaataaaatacc

SEQ ID NO: 53858 - DNA, 20 bp, synthetic construct
  misc_feature 1..20: note = chemically synthesized
  source 1..20: mol_type = other DNA
tcaaagagaataaaatacct

SEQ ID NO: 53859 - DNA, 20 bp, synthetic construct
  misc_feature 1..20: note = chemically synthesized
  source 1..20: mol_type = other DNA
tacctaggaatccaacttac

SEQ ID NO: 53860 - DNA, 20 bp, synthetic construct
  misc_feature 1..20: note = chemically synthesized
  source 1..20: mol_type = other DNA
acctaggaatccaacttaca

SEQ ID NO: 53861 - DNA, 20 bp, synthetic construct
  misc_feature 1..20: note = chemically synthesized
  source 1..20: mol_type = other DNA
cctaggaatccaacttacaa

SEQ ID NO: 53862 - DNA, 20 bp, synthetic construct
  misc_feature 1..20: note = chemically synthesized
  source 1..20: mol_type = other DNA
tccaacttacaagggatgtg

SEQ ID NO: 53863 - DNA, 20 bp, synthetic construct
  misc_feature 1..20: note = chemically synthesized
  source 1..20: mol_type = other DNA
ccaacttacaagggatgtga

SEQ ID NO: 53864 - DNA, 20 bp, synthetic construct
  misc_feature 1..20: note = chemically synthesized
  source 1..20: mol_type = other DNA
gggatgtgaaggacctcttc

SEQ ID NO: 53865 - DNA, 20 bp, synthetic construct
  misc_feature 1..20: note = chemically synthesized
  source 1..20: mol_type = other DNA
ggatgtgaaggacctcttca

SEQ ID NO: 53866 - DNA, 20 bp, synthetic construct
  misc_feature 1..20: note = chemically synthesized
  source 1..20: mol_type = other DNA
atgtgaaggacctcttcaag

SEQ ID NO: 53867 - DNA, 20 bp, synthetic construct
  misc_feature 1..20: note = chemically synthesized
  source 1..20: mol_type = other DNA
aacactgctcaacgaaataa

SEQ ID NO: 53868 - DNA, 20 bp, synthetic construct
  misc_feature 1..20: note = chemically synthesized
  source 1..20: mol_type = other DNA
cactgctcaacgaaataaaa

SEQ ID NO: 53869 - DNA, 20 bp, synthetic construct
  misc_feature 1..20: note = chemically synthesized
  source 1..20: mol_type = other DNA
actgctcaacgaaataaaag

SEQ ID NO: 53870 - DNA, 20 bp, synthetic construct
  misc_feature 1..20: note = chemically synthesized
  source 1..20: mol_type = other DNA
taaaagaggatacaaacaaa

SEQ ID NO: 53871 - DNA, 20 bp, synthetic construct
  misc_feature 1..20: note = chemically synthesized
  source 1..20: mol_type = other DNA
aagaggatacaaacaaatgg

SEQ ID NO: 53872 - DNA, 20 bp, synthetic construct
  misc_feature 1..20: note = chemically synthesized
  source 1..20: mol_type = other DNA
ggaagaacattccatgctca

SEQ ID NO: 53873 - DNA, 20 bp, synthetic construct
  misc_feature 1..20: note = chemically synthesized
  source 1..20: mol_type = other DNA
gaacattccatgctcatgga

SEQ ID NO: 53874 - DNA, 20 bp, synthetic construct
  misc_feature 1..20: note = chemically synthesized
  source 1..20: mol_type = other DNA
aacattccatgctcatggat

SEQ ID NO: 53875 - DNA, 20 bp, synthetic construct
  misc_feature 1..20: note = chemically synthesized
  source 1..20: mol_type = other DNA
attccatgctcatggatagg

SEQ ID NO: 53876 - DNA, 20 bp, synthetic construct
  misc_feature 1..20: note = chemically synthesized
  source 1..20: mol_type = other DNA
aagaatcaatatcgtgaaaa

SEQ ID NO: 53877 - DNA, 20 bp, synthetic construct
  misc_feature 1..20: note = chemically synthesized
  source 1..20: mol_type = other DNA
tgaaaatggccttactgccc

SEQ ID NO: 53878 - DNA, 20 bp, synthetic construct
  misc_feature 1..20: note = chemically synthesized
  source 1..20: mol_type = other DNA
gaaaatggccttactgccca

SEQ ID NO: 53879 - DNA, 20 bp, synthetic construct
  misc_feature 1..20: note = chemically synthesized
  source 1..20: mol_type = other DNA
ttactgcccaaggtaattta

SEQ ID NO: 53880 - DNA, 20 bp, synthetic construct
  misc_feature 1..20: note = chemically synthesized
  source 1..20: mol_type = other DNA
gattcaatgccatccccatc

SEQ ID NO: 53881 - DNA, 20 bp, synthetic construct
  misc_feature 1..20: note = chemically synthesized
  source 1..20: mol_type = other DNA
gctaccaatgactttcttca

SEQ ID NO: 53882 - DNA, 20 bp, synthetic construct
  misc_feature 1..20: note = chemically synthesized
  source 1..20: mol_type = other DNA
aatgactttcttcacagaat

SEQ ID NO: 53883 - DNA, 20 bp, synthetic construct
  misc_feature 1..20: note = chemically synthesized
  source 1..20: mol_type = other DNA
aattggaaaaaactacttta

SEQ ID NO: 53884 - DNA, 20 bp, synthetic construct
  misc_feature 1..20: note = chemically synthesized
  source 1..20: mol_type = other DNA
aaactactttaaagttcata

SEQ ID NO: 53885 - DNA, 20 bp, synthetic construct
  misc_feature 1..20: note = chemically synthesized
  source 1..20: mol_type = other DNA
aagttcatatggaaccaaaa

SEQ ID NO: 53886 - DNA, 20 bp, synthetic construct
  misc_feature 1..20: note = chemically synthesized
  source 1..20: mol_type = other DNA
gttcatatggaaccaaaaaa

SEQ ID NO: 53887 - DNA, 20 bp, synthetic construct
  misc_feature 1..20: note = chemically synthesized
  source 1..20: mol_type = other DNA
aaaaaagagcccgcattgac

SEQ ID NO: 53888 - DNA, 20 bp, synthetic construct
  misc_feature 1..20: note = chemically synthesized
  source 1..20: mol_type = other DNA
cgcattgacaagtcaatcct

SEQ ID NO: 53889 - DNA, 20 bp, synthetic construct
  misc_feature 1..20: note = chemically synthesized
  source 1..20: mol_type = other DNA
acaagtcaatcctaagccaa

SEQ ID NO: 53890 - DNA, 20 bp, synthetic construct
  misc_feature 1..20: note = chemically synthesized
  source 1..20: mol_type = other DNA
aatcctaagccaaaagaaca

SEQ ID NO: 53891 - DNA, 20 bp, synthetic construct
  misc_feature 1..20: note = chemically synthesized
  source 1..20: mol_type = other DNA
ctaagccaaaagaacaaagc

SEQ ID NO: 53892 - DNA, 20 bp, synthetic construct
  misc_feature 1..20: note = chemically synthesized
  source 1..20: mol_type = other DNA
aagccaaaagaacaaagcta

SEQ ID NO: 53893 - DNA, 20 bp, synthetic construct
  misc_feature 1..20: note = chemically synthesized
  source 1..20: mol_type = other DNA
agccaaaagaacaaagctag

SEQ ID NO: 53894 - DNA, 20 bp, synthetic construct
  misc_feature 1..20: note = chemically synthesized
  source 1..20: mol_type = other DNA
ctgacttcaaactatactac

SEQ ID NO: 53895 - DNA, 20 bp, synthetic construct
  misc_feature 1..20: note = chemically synthesized
  source 1..20: mol_type = other DNA
tgacttcaaactatactaca

SEQ ID NO: 53896 - DNA, 20 bp, synthetic construct
  misc_feature 1..20: note = chemically synthesized
  source 1..20: mol_type = other DNA
tcaaactatactacaaggta

SEQ ID NO: 53897 - DNA, 20 bp, synthetic construct
  misc_feature 1..20: note = chemically synthesized
  source 1..20: mol_type = other DNA
gtacagtaaccaaaacaaca

SEQ ID NO: 53898 - DNA, 20 bp, synthetic construct
  misc_feature 1..20: note = chemically synthesized
  source 1..20: mol_type = other DNA
taaccaaaacaacatggtac

SEQ ID NO: 53899 - DNA, 20 bp, synthetic construct
  misc_feature 1..20: note = chemically synthesized
  source 1..20: mol_type = other DNA
acatggtactggtaccaaaa

SEQ ID NO: 53900 - DNA, 20 bp, synthetic construct
  misc_feature 1..20: note = chemically synthesized
  source 1..20: mol_type = other DNA
atggtactggtaccaaaaca

SEQ ID NO: 53901 - DNA, 20 bp, synthetic construct
  misc_feature 1..20: note = chemically synthesized
  source 1..20: mol_type = other DNA
ctggtaccaaaacagagatg

SEQ ID NO: 53902 - DNA, 20 bp, synthetic construct
  misc_feature 1..20: note = chemically synthesized
  source 1..20: mol_type = other DNA
aaaacagagatgtagaccaa

SEQ ID NO: 53903 - DNA, 20 bp, synthetic construct
  misc_feature 1..20: note = chemically synthesized
  source 1..20: mol_type = other DNA
aacagagatgtagaccaatg

SEQ ID NO: 53904 - DNA, 20 bp, synthetic construct
  misc_feature 1..20: note = chemically synthesized
  source 1..20: mol_type = other DNA
agagatgtagaccaatggag

SEQ ID NO: 53905 - DNA, 20 bp, synthetic construct
  misc_feature 1..20: note = chemically synthesized
  source 1..20: mol_type = other DNA
tgtagaccaatggagcagaa

SEQ ID NO: 53906 - DNA, 20 bp, synthetic construct
  misc_feature 1..20: note = chemically synthesized
  source 1..20: mol_type = other DNA
tagaccaatggagcagaaca

SEQ ID NO: 53907 - DNA, 20 bp, synthetic construct
  misc_feature 1..20: note = chemically synthesized
  source 1..20: mol_type = other DNA
atggagcagaacagagctct

SEQ ID NO: 53908 - DNA, 20 bp, synthetic construct
  misc_feature 1..20: note = chemically synthesized
  source 1..20: mol_type = other DNA
ttgacaaacctgacaaaaac

SEQ ID NO: 53909 - DNA, 20 bp, synthetic construct
  misc_feature 1..20: note = chemically synthesized
  source 1..20: mol_type = other DNA
aacctgacaaaaacaagcaa

SEQ ID NO: 53910 - DNA, 20 bp, synthetic construct
  misc_feature 1..20: note = chemically synthesized
  source 1..20: mol_type = other DNA
acctgacaaaaacaagcaat

SEQ ID NO: 53911 - DNA, 20 bp, synthetic construct
  misc_feature 1..20: note = chemically synthesized
  source 1..20: mol_type = other DNA
cctgacaaaaacaagcaatg

SEQ ID NO: 53912 - DNA, 20 bp, synthetic construct
  misc_feature 1..20: note = chemically synthesized
  source 1..20: mol_type = other DNA
acaaaaacaagcaatgggga

SEQ ID NO: 53913 - DNA, 20 bp, synthetic construct
  misc_feature 1..20: note = chemically synthesized
  source 1..20: mol_type = other DNA
caaaaacaagcaatggggaa

SEQ ID NO: 53914 - DNA, 20 bp, synthetic construct
  misc_feature 1..20: note = chemically synthesized
  source 1..20: mol_type = other DNA
ccctatttaataaatgatgc

SEQ ID NO: 53915 - DNA, 20 bp, synthetic construct
  misc_feature 1..20: note = chemically synthesized
  source 1..20: mol_type = other DNA
cctatttaataaatgatgct

SEQ ID NO: 53916 - DNA, 20 bp, synthetic construct
  misc_feature 1..20: note = chemically synthesized
  source 1..20: mol_type = other DNA
ataaatgatgctgggaaaac

SEQ ID NO: 53917 - DNA, 20 bp, synthetic construct
  misc_feature 1..20: note = chemically synthesized
  source 1..20: mol_type = other DNA
atgatgctgggaaaactggc

SEQ ID NO: 53918 - DNA, 20 bp, synthetic construct
  misc_feature 1..20: note = chemically synthesized
  source 1..20: mol_type = other DNA
gaaaactggctagccatatg

SEQ ID NO: 53919 - DNA, 20 bp, synthetic construct
  misc_feature 1..20: note = chemically synthesized
  source 1..20: mol_type = other DNA
actggctagccatatgtaga

SEQ ID NO: 53920 - DNA, 20 bp, synthetic construct
  misc_feature 1..20: note = chemically synthesized
  source 1..20: mol_type = other DNA
catatgtagaaagctgaaac

SEQ ID NO: 53921 - DNA, 20 bp, synthetic construct
  misc_feature 1..20: note = chemically synthesized
  source 1..20: mol_type = other DNA
ccttatacaaaaattatttc

SEQ ID NO: 53922 - DNA, 20 bp, synthetic construct
  misc_feature 1..20: note = chemically synthesized
  source 1..20: mol_type = other DNA
atacaaaaattatttcaaga

SEQ ID NO: 53923 - DNA, 20 bp, synthetic construct
  misc_feature 1..20: note = chemically synthesized
  source 1..20: mol_type = other DNA
aattatttcaagatggatta

SEQ ID NO: 53924 - DNA, 20 bp, synthetic construct
  misc_feature 1..20: note = chemically synthesized
  source 1..20: mol_type = other DNA
tggattaaagacttacatgt

SEQ ID NO: 53925 - DNA, 20 bp, synthetic construct
  misc_feature 1..20: note = chemically synthesized
  source 1..20: mol_type = other DNA
acctaaaaccataaaaacct

SEQ ID NO: 53926 - DNA, 20 bp, synthetic construct
  misc_feature 1..20: note = chemically synthesized
  source 1..20: mol_type = other DNA
taaaaccataaaaaccttag

SEQ ID NO: 53927 - DNA, 20 bp, synthetic construct
  misc_feature 1..20: note = chemically synthesized
  source 1..20: mol_type = other DNA
aaaaccttagaagaaaacct

SEQ ID NO: 53928 - DNA, 20 bp, synthetic construct
  misc_feature 1..20: note = chemically synthesized
  source 1..20: mol_type = other DNA
aaaacctaagcaataccatt

SEQ ID NO: 53929 - DNA, 20 bp, synthetic construct
  misc_feature 1..20: note = chemically synthesized
  source 1..20: mol_type = other DNA
aaacctaagcaataccattc

SEQ ID NO: 53930 - DNA, 20 bp, synthetic construct
  misc_feature 1..20: note = chemically synthesized
  source 1..20: mol_type = other DNA
aagcaataccattcaggaca

SEQ ID NO: 53931 - DNA, 20 bp, synthetic construct
  misc_feature 1..20: note = chemically synthesized
  source 1..20: mol_type = other DNA
agcaataccattcaggacat

SEQ ID NO: 53932 - DNA, 20 bp, synthetic construct
  misc_feature 1..20: note = chemically synthesized
  source 1..20: mol_type = other DNA
taccattcaggacataggca

SEQ ID NO: 53933 - DNA, 20 bp, synthetic construct
  misc_feature 1..20: note = chemically synthesized
  source 1..20: mol_type = other DNA
accattcaggacataggcat

SEQ ID NO: 53934 - DNA, 20 bp, synthetic construct
  misc_feature 1..20: note = chemically synthesized
  source 1..20: mol_type = other DNA
ttcaggacataggcatgggc

SEQ ID NO: 53935 - DNA, 20 bp, synthetic construct
  misc_feature 1..20: note = chemically synthesized
  source 1..20: mol_type = other DNA
tcaggacataggcatgggca

SEQ ID NO: 53936 - DNA, 20 bp, synthetic construct
  misc_feature 1..20: note = chemically synthesized
  source 1..20: mol_type = other DNA
cttcatgtctaaaacaccaa

SEQ ID NO: 53937 - DNA, 20 bp, synthetic construct
  misc_feature 1..20: note = chemically synthesized
  source 1..20: mol_type = other DNA
gtctaaaacaccaaaagcaa

SEQ ID NO: 53938 - DNA, 20 bp, synthetic construct
  misc_feature 1..20: note = chemically synthesized
  source 1..20: mol_type = other DNA
accaaaagcaatggcaacaa

SEQ ID NO: 53939 - DNA, 20 bp, synthetic construct
  misc_feature 1..20: note = chemically synthesized
  source 1..20: mol_type = other DNA
aatggcaacaaaagacaaaa

SEQ ID NO: 53940 - DNA, 20 bp, synthetic construct
  misc_feature 1..20: note = chemically synthesized
  source 1..20: mol_type = other DNA
caaaagacaaaatggacaaa

SEQ ID NO: 53941 - DNA, 20 bp, synthetic construct
  misc_feature 1..20: note = chemically synthesized
  source 1..20: mol_type = other DNA
aaaagacaaaatggacaaat

SEQ ID NO: 53942 - DNA, 20 bp, synthetic construct
  misc_feature 1..20: note = chemically synthesized
  source 1..20: mol_type = other DNA
aatgggatctaattaaacta

SEQ ID NO: 53943 - DNA, 20 bp, synthetic construct
  misc_feature 1..20: note = chemically synthesized
  source 1..20: mol_type = other DNA
tgggatctaattaaactaaa

SEQ ID NO: 53944 - DNA, 20 bp, synthetic construct
  misc_feature 1..20: note = chemically synthesized
  source 1..20: mol_type = other DNA
taaactaaagagcttctgca

SEQ ID NO: 53945 - DNA, 20 bp, synthetic construct
  misc_feature 1..20: note = chemically synthesized
  source 1..20: mol_type = other DNA
aaagagcttctgcacagcaa

SEQ ID NO: 53946 - DNA, 20 bp, synthetic construct
  misc_feature 1..20: note = chemically synthesized
  source 1..20: mol_type = other DNA
acagcaaaagaaactaccat

SEQ ID NO: 53947 - DNA, 20 bp, synthetic construct
  misc_feature 1..20: note = chemically synthesized
  source 1..20: mol_type = other DNA
agcaaaagaaactaccatca

SEQ ID NO: 53948 - DNA, 20 bp, synthetic construct
  misc_feature 1..20: note = chemically synthesized
  source 1..20: mol_type = other DNA
gaaactaccatcagagtgaa

SEQ ID NO: 53949 - DNA, 20 bp, synthetic construct
  misc_feature 1..20: note = chemically synthesized
  source 1..20: mol_type = other DNA
aaactaccatcagagtgaac

SEQ ID NO: 53950 - DNA, 20 bp, synthetic construct
  misc_feature 1..20: note = chemically synthesized
  source 1..20: mol_type = other DNA
tgaacaggcaacctacacaa

SEQ ID NO: 53951 - DNA, 20 bp, synthetic construct
  misc_feature 1..20: note = chemically synthesized
  source 1..20: mol_type = other DNA
gaacaggcaacctacacaat

SEQ ID NO: 53952 - DNA, 20 bp, synthetic construct
  misc_feature 1..20: note = chemically synthesized
  source 1..20: mol_type = other DNA
acaggcaacctacacaatgg

SEQ ID NO: 53953 - DNA, 20 bp, synthetic construct
  misc_feature 1..20: note = chemically synthesized
  source 1..20: mol_type = other DNA
tgcaatctactcatctgaca

SEQ ID NO: 53954 - DNA, 20 bp, synthetic construct
  misc_feature 1..20: note = chemically synthesized
  source 1..20: mol_type = other DNA
gcaatctactcatctgacaa

SEQ ID NO: 53955 - DNA, 20 bp, synthetic construct
  misc_feature 1..20: note = chemically synthesized
  source 1..20: mol_type = other DNA
caatctactcatctgacaaa

SEQ ID NO: 53956 - DNA, 20 bp, synthetic construct
  misc_feature 1..20: note = chemically synthesized
  source 1..20: mol_type = other DNA
tctgacaaagggctaatatc

SEQ ID NO: 53957 - DNA, 20 bp, synthetic construct
  misc_feature 1..20: note = chemically synthesized
  source 1..20: mol_type = other DNA
atgaactcaaacaaatttac

SEQ ID NO: 53958 - DNA, 20 bp, synthetic construct
  misc_feature 1..20: note = chemically synthesized
  source 1..20: mol_type = other DNA
aaacaaacaactgcatcaac

SEQ ID NO: 53959 - DNA, 20 bp, synthetic construct
  misc_feature 1..20: note = chemically synthesized
  source 1..20: mol_type = other DNA
aacaaacaactgcatcaaca

SEQ ID NO: 53960 - DNA, 20 bp, synthetic construct
  misc_feature 1..20: note = chemically synthesized
  source 1..20: mol_type = other DNA
acaaacaactgcatcaacaa

SEQ ID NO: 53961 - DNA, 20 bp, synthetic construct
  misc_feature 1..20: note = chemically synthesized
  source 1..20: mol_type = other DNA
caaacaactgcatcaacaag

SEQ ID NO: 53962 - DNA, 20 bp, synthetic construct
  misc_feature 1..20: note = chemically synthesized
  source 1..20: mol_type = other DNA
aaacaactgcatcaacaagg

SEQ ID NO: 53963 - DNA, 20 bp, synthetic construct
  misc_feature 1..20: note = chemically synthesized
  source 1..20: mol_type = other DNA
actgcatcaacaagggggtg

SEQ ID NO: 53964 - DNA, 20 bp, synthetic construct
  misc_feature 1..20: note = chemically synthesized
  source 1..20: mol_type = other DNA
ctgcatcaacaagggggtga

SEQ ID NO: 53965 - DNA, 20 bp, synthetic construct
  misc_feature 1..20: note = chemically synthesized
  source 1..20: mol_type = other DNA
aagggggtgaaggatatgaa

SEQ ID NO: 53966 - DNA, 20 bp, synthetic construct
  misc_feature 1..20: note = chemically synthesized
  source 1..20: mol_type = other DNA
tatgaacagacacttctcaa

SEQ ID NO: 53967 - DNA, 20 bp, synthetic construct
  misc_feature 1..20: note = chemically synthesized
  source 1..20: mol_type = other DNA
gaacagacacttctcaaaag

SEQ ID NO: 53968 - DNA, 20 bp, synthetic construct
  misc_feature 1..20: note = chemically synthesized
  source 1..20: mol_type = other DNA
ctcaaaagaagacatttatg

SEQ ID NO: 53969 - DNA, 20 bp, synthetic construct
  misc_feature 1..20: note = chemically synthesized
  source 1..20: mol_type = other DNA
gaaaaaatgctcatcatcac

SEQ ID NO: 53970 - DNA, 20 bp, synthetic construct
  misc_feature 1..20: note = chemically synthesized
  source 1..20: mol_type = other DNA
tgctcatcatcactggccat

SEQ ID NO: 53971 - DNA, 20 bp, synthetic construct
  misc_feature 1..20: note = chemically synthesized
  source 1..20: mol_type = other DNA
ctcatcatcactggccatca

SEQ ID NO: 53972 - DNA, 20 bp, synthetic construct
  misc_feature 1..20: note = chemically synthesized
  source 1..20: mol_type = other DNA
atgcaaatcaaaaccacaat

SEQ ID NO: 53973 - DNA, 20 bp, synthetic construct
  misc_feature 1..20: note = chemically synthesized
  source 1..20: mol_type = other DNA
aatgagatatcatctcacac

SEQ ID NO: 53974 - DNA, 20 bp, synthetic construct
  misc_feature 1..20: note = chemically synthesized
  source 1..20: mol_type = other DNA
agatatcatctcacaccagt

SEQ ID NO: 53975 - DNA, 20 bp, synthetic construct
  misc_feature 1..20: note = chemically synthesized
  source 1..20: mol_type = other DNA
tcatctcacaccagttagaa

SEQ ID NO: 53976 - DNA, 20 bp, synthetic construct
  misc_feature 1..20: note = chemically synthesized
  source 1..20: mol_type = other DNA
ttagaatggtgatcattaaa

SEQ ID NO: 53977 - DNA, 20 bp, synthetic construct
  misc_feature 1..20: note = chemically synthesized
  source 1..20: mol_type = other DNA
aatggtgatcattaaaaagt

SEQ ID NO: 53978 - DNA, 20 bp, synthetic construct
  misc_feature 1..20: note = chemically synthesized
  source 1..20: mol_type = other DNA
atggtgatcattaaaaagtc

SEQ ID NO: 53979 - DNA, 20 bp, synthetic construct
  misc_feature 1..20: note = chemically synthesized
  source 1..20: mol_type = other DNA
attaaaaagtcaggaaacca

SEQ ID NO: 53980 - DNA, 20 bp, synthetic construct
  misc_feature 1..20: note = chemically synthesized
  source 1..20: mol_type = other DNA
ttaaaaagtcaggaaaccac

SEQ ID NO: 53981 - DNA, 20 bp, synthetic construct
  misc_feature 1..20: note = chemically synthesized
  source 1..20: mol_type = other DNA
agtcaggaaaccacaggtgc

SEQ ID NO: 53982 - DNA, 20 bp, synthetic construct
  misc_feature 1..20: note = chemically synthesized
  source 1..20: mol_type = other DNA
tcaggaaaccacaggtgctg

SEQ ID NO: 53983 - DNA, 20 bp, synthetic construct
  misc_feature 1..20: note = chemically synthesized
  source 1..20: mol_type = other DNA
aggaaaccacaggtgctgga

SEQ ID NO: 53984 - DNA, 20 bp, synthetic construct
  misc_feature 1..20: note = chemically synthesized
  source 1..20: mol_type = other DNA
ggaaaccacaggtgctggag

SEQ ID NO: 53985 - DNA, 20 bp, synthetic construct
  misc_feature 1..20: note = chemically synthesized
  source 1..20: mol_type = other DNA
cacaggtgctggagaggatg

SEQ ID NO: 53986 - DNA, 20 bp, synthetic construct
  misc_feature 1..20: note = chemically synthesized
  source 1..20: mol_type = other DNA
caggtgctggagaggatgtg

SEQ ID NO: 53987 - DNA, 20 bp, synthetic construct
  misc_feature 1..20: note = chemically synthesized
  source 1..20: mol_type = other DNA
ctggagaggatgtggagaaa

SEQ ID NO: 53988 - DNA, 20 bp, synthetic construct
  misc_feature 1..20: note = chemically synthesized
  source 1..20: mol_type = other DNA
tggagaggatgtggagaaat

SEQ ID NO: 53989 - DNA, 20 bp, synthetic construct
  misc_feature 1..20: note = chemically synthesized
  source 1..20: mol_type = other DNA
taggaacacttttacactgt

SEQ ID NO: 53990 - DNA, 20 bp, synthetic construct
  misc_feature 1..20: note = chemically synthesized
  source 1..20: mol_type = other DNA
gaacacttttacactgttgg

SEQ ID NO: 53991 - DNA, 20 bp, synthetic construct
  misc_feature 1..20: note = chemically synthesized
  source 1..20: mol_type = other DNA
aacacttttacactgttggt

SEQ ID NO: 53992 - DNA, 20 bp, synthetic construct
  misc_feature 1..20: note = chemically synthesized
  source 1..20: mol_type = other DNA
ctgttggtgggactataaac

SEQ ID NO: 53993 - DNA, 20 bp, synthetic construct
  misc_feature 1..20: note = chemically synthesized
  source 1..20: mol_type = other DNA
ataaactagttcaaccattg

SEQ ID NO: 53994 - DNA, 20 bp, synthetic construct
  misc_feature 1..20: note = chemically synthesized
  source 1..20: mol_type = other DNA
aactagttcaaccattgtgg

SEQ ID NO: 53995 - DNA, 20 bp, synthetic construct
  misc_feature 1..20: note = chemically synthesized
  source 1..20: mol_type = other DNA
agttcaaccattgtggaagt

SEQ ID NO: 53996 - DNA, 20 bp, synthetic construct
  misc_feature 1..20: note = chemically synthesized
  source 1..20: mol_type = other DNA
aaccattgtggaagtcagtg

SEQ ID NO: 53997 - DNA, 20 bp, synthetic construct
  misc_feature 1..20: note = chemically synthesized
  source 1..20: mol_type = other DNA
aagtcagtgtggcaattcct

SEQ ID NO: 53998 - DNA, 20 bp, synthetic construct
  misc_feature 1..20: note = chemically synthesized
  source 1..20: mol_type = other DNA
agtcagtgtggcaattcctc

SEQ ID NO: 53999 - DNA, 20 bp, synthetic construct
  misc_feature 1..20: note = chemically synthesized
  source 1..20: mol_type = other DNA
gtcagtgtggcaattcctca

SEQ ID NO: 54000 - DNA, 20 bp, synthetic construct
  misc_feature 1..20: note = chemically synthesized
  source 1..20: mol_type = other DNA
gtggcaattcctcagggatc

SEQ ID NO: 54001 - DNA, 20 bp, synthetic construct
  misc_feature 1..20: note = chemically synthesized
  source 1..20: mol_type = other DNA
attcctcagggatctagaac

SEQ ID NO: 54002 - DNA, 20 bp, synthetic construct
  misc_feature 1..20: note = chemically synthesized
  source 1..20: mol_type = other DNA
actagaaataccatttgacc

SEQ ID NO: 54003 - DNA, 20 bp, synthetic construct
  misc_feature 1..20: note = chemically synthesized
  source 1..20: mol_type = other DNA
tgacccagccatcctattac

SEQ ID NO: 54004 - DNA, 20 bp, synthetic construct
  misc_feature 1..20: note = chemically synthesized
  source 1..20: mol_type = other DNA
gacccagccatcctattact

SEQ ID NO: 54005 - DNA, 20 bp, synthetic construct
  misc_feature 1..20: note = chemically synthesized
  source 1..20: mol_type = other DNA
tattactgggtatataccca

SEQ ID NO: 54006 - DNA, 20 bp, synthetic construct
  misc_feature 1..20: note = chemically synthesized
  source 1..20: mol_type = other DNA
attactgggtatatacccaa

SEQ ID NO: 54007 - DNA, 20 bp, synthetic construct
  misc_feature 1..20: note = chemically synthesized
  source 1..20: mol_type = other DNA
atgtaaatcatgctgctata

SEQ ID NO: 54008 - DNA, 20 bp, synthetic construct
  misc_feature 1..20: note = chemically synthesized
  source 1..20: mol_type = other DNA
atgcacacgtatgtttattg

SEQ ID NO: 54009 - DNA, 20 bp, synthetic construct
  misc_feature 1..20: note = chemically synthesized
  source 1..20: mol_type = other DNA
tattgtggcactattcacaa

SEQ ID NO: 54010 - DNA, 20 bp, synthetic construct
  misc_feature 1..20: note = chemically synthesized
  source 1..20: mol_type = other DNA
tggcactattcacaatagca

SEQ ID NO: 54011 - DNA, 20 bp, synthetic construct
  misc_feature 1..20: note = chemically synthesized
  source 1..20: mol_type = other DNA
tattcacaatagcaaagact

SEQ ID NO: 54012 - DNA, 20 bp, synthetic construct
  misc_feature 1..20: note = chemically synthesized
  source 1..20: mol_type = other DNA
acccaaatgtccaacaatga

SEQ ID NO: 54013 - DNA, 20 bp, synthetic construct
  misc_feature 1..20: note = chemically synthesized
  source 1..20: mol_type = other DNA
aatgtccaacaatgatagac

SEQ ID NO: 54014 - DNA, 20 bp, synthetic construct
  misc_feature 1..20: note = chemically synthesized
  source 1..20: mol_type = other DNA
caacaatgatagactggatt

SEQ ID NO: 54015 - DNA, 20 bp, synthetic construct
  misc_feature 1..20: note = chemically synthesized
  source 1..20: mol_type = other DNA
tagactggattaagaaaatg

SEQ ID NO: 54016 - DNA, 20 bp, synthetic construct
  misc_feature 1..20: note = chemically synthesized
  source 1..20: mol_type = other DNA
aatgtggcacatatacatca

SEQ ID NO: 54017 - DNA, 20 bp, synthetic construct
  misc_feature 1..20: note = chemically synthesized
  source 1..20: mol_type = other DNA
atacatcatggaatactatg

SEQ ID NO: 54018 - DNA, 20 bp, synthetic construct
  misc_feature 1..20: note = chemically synthesized
  source 1..20: mol_type = other DNA
atgcagccataaaaaatgat

SEQ ID NO: 54019 - DNA, 20 bp, synthetic construct
  misc_feature 1..20: note = chemically synthesized
  source 1..20: mol_type = other DNA
tgatgagttcatgtcctttg

SEQ ID NO: 54020 - DNA, 20 bp, synthetic construct
  misc_feature 1..20: note = chemically synthesized
  source 1..20: mol_type = other DNA
gatgagttcatgtcctttgt

SEQ ID NO: 54021 - DNA, 20 bp, synthetic construct
  misc_feature 1..20: note = chemically synthesized
  source 1..20: mol_type = other DNA
atgagttcatgtcctttgta

SEQ ID NO: 54022 - DNA, 20 bp, synthetic construct
  misc_feature 1..20: note = chemically synthesized
  source 1..20: mol_type = other DNA
tcatgtcctttgtagggaca

SEQ ID NO: 54023 - DNA, 20 bp, synthetic construct
  misc_feature 1..20: note = chemically synthesized
  source 1..20: mol_type = other DNA
tgtagggacatggatgaaac

SEQ ID NO: 54024 - DNA, 20 bp, synthetic construct
  misc_feature 1..20: note = chemically synthesized
  source 1..20: mol_type = other DNA
aaactggaaaccatcattct

SEQ ID NO: 54025 - DNA, 20 bp, synthetic construct
  misc_feature 1..20: note = chemically synthesized
  source 1..20: mol_type = other DNA
ggaaaccatcattctgagca

SEQ ID NO: 54026 - DNA, 20 bp, synthetic construct
  misc_feature 1..20: note = chemically synthesized
  source 1..20: mol_type = other DNA
cattctgagcaaagtatcgc

SEQ ID NO: 54027 - DNA, 20 bp, synthetic construct
  misc_feature 1..20: note = chemically synthesized
  source 1..20: mol_type = other DNA
attctgagcaaagtatcgca

SEQ ID NO: 54028 - DNA, 20 bp, synthetic construct
  misc_feature 1..20: note = chemically synthesized
  source 1..20: mol_type = other DNA
acaccacatattctcactca

SEQ ID NO: 54029 - DNA, 20 bp, synthetic construct
  misc_feature 1..20: note = chemically synthesized
  source 1..20: mol_type = other DNA
caccacatattctcactcat

SEQ ID NO: 54030 - DNA, 20 bp, synthetic construct
  misc_feature 1..20: note = chemically synthesized
  source 1..20: mol_type = other DNA
cacatattctcactcatagg

SEQ ID NO: 54031 - DNA, 20 bp, synthetic construct
  misc_feature 1..20: note = chemically synthesized
  source 1..20: mol_type = other DNA
acatattctcactcataggt

SEQ ID NO: 54032 - DNA, 20 bp, synthetic construct
  misc_feature 1..20: note = chemically synthesized
  source 1..20: mol_type = other DNA
atattctcactcataggtgg

SEQ ID NO: 54033 - DNA, 20 bp, synthetic construct
  misc_feature 1..20: note = chemically synthesized
  source 1..20: mol_type = other DNA
ataggtgggagttgaacaat

SEQ ID NO: 54034 - DNA, 20 bp, synthetic construct
  misc_feature 1..20: note = chemically synthesized
  source 1..20: mol_type = other DNA
agttgaacaatgagaacatt

SEQ ID NO: 54035 - DNA, 20 bp, synthetic construct
  misc_feature 1..20: note = chemically synthesized
  source 1..20: mol_type = other DNA
acaatgagaacatttggaca

SEQ ID NO: 54036 - DNA, 20 bp, synthetic construct
  misc_feature 1..20: note = chemically synthesized
  source 1..20: mol_type = other DNA
tgagaacatttggacacagt

SEQ ID NO: 54037 - DNA, 20 bp, synthetic construct
  misc_feature 1..20: note = chemically synthesized
  source 1..20: mol_type = other DNA
gagaacatttggacacagtg

SEQ ID NO: 54038 - DNA, 20 bp, synthetic construct
  misc_feature 1..20: note = chemically synthesized
  source 1..20: mol_type = other DNA
agaacatttggacacagtga

SEQ ID NO: 54039 - DNA, 20 bp, synthetic construct
  misc_feature 1..20: note = chemically synthesized
  source 1..20: mol_type = other DNA
gaacatttggacacagtgag

SEQ ID NO: 54040 - DNA, 20 bp, synthetic construct
  misc_feature 1..20: note = chemically synthesized
  source 1..20: mol_type = other DNA
gtgaggggaacatcacacac

SEQ ID NO: 54041 - DNA, 20 bp, synthetic construct
  misc_feature 1..20: note = chemically synthesized
  source 1..20: mol_type = other DNA
tgaggggaacatcacacacc

SEQ ID NO: 54042 - DNA, 20 bp, synthetic construct
  misc_feature 1..20: note = chemically synthesized
  source 1..20: mol_type = other DNA
gaggggaacatcacacaccg

SEQ ID NO: 54043 - DNA, 20 bp, synthetic construct
  misc_feature 1..20: note = chemically synthesized
  source 1..20: mol_type = other DNA
tcacacaccggggcctgttg

SEQ ID NO: 54044 - DNA, 20 bp, synthetic construct
  misc_feature 1..20: note = chemically synthesized
  source 1..20: mol_type = other DNA
cacacaccggggcctgttgt

SEQ ID NO: 54045 - DNA, 20 bp, synthetic construct
  misc_feature 1..20: note = chemically synthesized
  source 1..20: mol_type = other DNA
acacaccggggcctgttgtg

SEQ ID NO: 54046 - DNA, 20 bp, synthetic construct
  misc_feature 1..20: note = chemically synthesized
  source 1..20: mol_type = other DNA
caccggggcctgttgtgggg

SEQ ID NO: 54047 - DNA, 20 bp, synthetic construct
  misc_feature 1..20: note = chemically synthesized
  source 1..20: mol_type = other DNA
accggggcctgttgtggggt

SEQ ID NO: 54048 - DNA, 20 bp, synthetic construct
  misc_feature 1..20: note = chemically synthesized
  source 1..20: mol_type = other DNA
ccggggcctgttgtggggtg

SEQ ID NO: 54049 - DNA, 20 bp, synthetic construct
  misc_feature 1..20: note = chemically synthesized
  source 1..20: mol_type = other DNA
cggggcctgttgtggggtgg

SEQ ID NO: 54050 - DNA, 20 bp, synthetic construct
  misc_feature 1..20: note = chemically synthesized
  source 1..20: mol_type = other DNA
gcctgttgtggggtgggggc

SEQ ID NO: 54051 - DNA, 20 bp, synthetic construct
  misc_feature 1..20: note = chemically synthesized
  source 1..20: mol_type = other DNA
cctgttgtggggtgggggcc

SEQ ID NO: 54052 - DNA, 20 bp, synthetic construct
  misc_feature 1..20: note = chemically synthesized
  source 1..20: mol_type = other DNA
ctgttgtggggtgggggccg

SEQ ID NO: 54053 - DNA, 20 bp, synthetic construct
  misc_feature 1..20: note = chemically synthesized
  source 1..20: mol_type = other DNA
tgttgtggggtgggggccgg

SEQ ID NO: 54054 - DNA, 20 bp, synthetic construct
  misc_feature 1..20: note = chemically synthesized
  source 1..20: mol_type = other DNA
gttgtggggtgggggccggg

SEQ ID NO: 54055 - DNA, 20 bp, synthetic construct
  misc_feature 1..20: note = chemically synthesized
  source 1..20: mol_type = other DNA
tgtggggtgggggccggggg

SEQ ID NO: 54056 - DNA, 20 bp, synthetic construct
  misc_feature 1..20: note = chemically synthesized
  source 1..20: mol_type = other DNA
gtggggtgggggccgggggg

SEQ ID NO: 54057 - DNA, 20 bp, synthetic construct
  misc_feature 1..20: note = chemically synthesized
  source 1..20: mol_type = other DNA
tggggtgggggccgggggga

SEQ ID NO: 54058 - DNA, 20 bp, synthetic construct
  misc_feature 1..20: note = chemically synthesized
  source 1..20: mol_type = other DNA
gtgggggccggggggaggga

SEQ ID NO: 54059 - DNA, 20 bp, synthetic construct
  misc_feature 1..20: note = chemically synthesized
  source 1..20: mol_type = other DNA
gccggggggagggatagcat

SEQ ID NO: 54060 - DNA, 20 bp, synthetic construct
  misc_feature 1..20: note = chemically synthesized
  source 1..20: mol_type = other DNA
ccggggggagggatagcatt

SEQ ID NO: 54061 - DNA, 20 bp, synthetic construct
  misc_feature 1..20: note = chemically synthesized
  source 1..20: mol_type = other DNA
ggggggagggatagcattag

SEQ ID NO: 54062 - DNA, 20 bp, synthetic construct
  misc_feature 1..20: note = chemically synthesized
  source 1..20: mol_type = other DNA
atatacctaatgtaaatgac

SEQ ID NO: 54063 - DNA, 20 bp, synthetic construct
  misc_feature 1..20: note = chemically synthesized
  source 1..20: mol_type = other DNA
taatgtaaatgacgagttaa

SEQ ID NO: 54064 - DNA, 20 bp, synthetic construct
  misc_feature 1..20: note = chemically synthesized
  source 1..20: mol_type = other DNA
aatgtaaatgacgagttaat

SEQ ID NO: 54065 - DNA, 20 bp, synthetic construct
  misc_feature 1..20: note = chemically synthesized
  source 1..20: mol_type = other DNA
aaatgacgagttaatgggtg

SEQ ID NO: 54066 - DNA, 20 bp, synthetic construct
  misc_feature 1..20: note = chemically synthesized
  source 1..20: mol_type = other DNA
atgggtgcagcacaccaaca

SEQ ID NO: 54067 - DNA, 20 bp, synthetic construct
  misc_feature 1..20: note = chemically synthesized
  source 1..20: mol_type = other DNA
catgttgtgcacatgtaccc

SEQ ID NO: 54068 - DNA, 20 bp, synthetic construct
  misc_feature 1..20: note = chemically synthesized
  source 1..20: mol_type = other DNA
cacatgtaccctagaactta

SEQ ID NO: 54069 - DNA, 20 bp, synthetic construct
  misc_feature 1..20: note = chemically synthesized
  source 1..20: mol_type = other DNA
tgtattgtctcattttcaat

SEQ ID NO: 54070 - DNA, 20 bp, synthetic construct
  misc_feature 1..20: note = chemically synthesized
  source 1..20: mol_type = other DNA
tcattttcaatcagtgactg

SEQ ID NO: 54071 - DNA, 20 bp, synthetic construct
  misc_feature 1..20: note = chemically synthesized
  source 1..20: mol_type = other DNA
ttttcaatcagtgactgaag

SEQ ID NO: 54072 - DNA, 20 bp, synthetic construct
  misc_feature 1..20: note = chemically synthesized
  source 1..20: mol_type = other DNA
caatcagtgactgaagtgga

SEQ ID NO: 54073 - DNA, 20 bp, synthetic construct
  misc_feature 1..20: note = chemically synthesized
  source 1..20: mol_type = other DNA
ttttattctttaccacctat

SEQ ID NO: 54074 - DNA, 20 bp, synthetic construct
  misc_feature 1..20: note = chemically synthesized
  source 1..20: mol_type = other DNA
tttattctttaccacctatg

SEQ ID NO: 54075 - DNA, 20 bp, synthetic construct
  misc_feature 1..20: note = chemically synthesized
  source 1..20: mol_type = other DNA
aggcatatactttttttttt

SEQ ID NO: 54076 - DNA, 20 bp, synthetic construct
  misc_feature 1..20: note = chemically synthesized
  source 1..20: mol_type = other DNA
gcatatacttttttttttga

SEQ ID NO: 54077 - DNA, 20 bp, synthetic construct
  misc_feature 1..20: note = chemically synthesized
  source 1..20: mol_type = other DNA
catatacttttttttttgag

SEQ ID NO: 54078 - DNA, 20 bp, synthetic construct
  misc_feature 1..20: note = chemically synthesized
  source 1..20: mol_type = other DNA
atatacttttttttttgaga

SEQ ID NO: 54079 - DNA, 20 bp, synthetic construct
  misc_feature 1..20: note = chemically synthesized
  source 1..20: mol_type = other DNA
atacttttttttttgagagg

SEQ ID NO: 54080 - DNA, 20 bp, synthetic construct
  misc_feature 1..20: note = chemically synthesized
  source 1..20: mol_type = other DNA
gggagtctcgctctgtcacc

SEQ ID NO: 54081 - DNA, 20 bp, synthetic construct
  misc_feature 1..20: note = chemically synthesized
  source 1..20: mol_type = other DNA
ggagtctcgctctgtcacct

SEQ ID NO: 54082 - DNA, 20 bp, synthetic construct
  misc_feature 1..20: note = chemically synthesized
  source 1..20: mol_type = other DNA
tctcgctctgtcacctaggc

SEQ ID NO: 54083 - DNA, 20 bp, synthetic construct
  misc_feature 1..20: note = chemically synthesized
  source 1..20: mol_type = other DNA
tcgctctgtcacctaggctg

SEQ ID NO: 54084 - DNA, 20 bp, synthetic construct
  misc_feature 1..20: note = chemically synthesized
  source 1..20: mol_type = other DNA
ctgtcacctaggctggagtg

SEQ ID NO: 54085 - DNA, 20 bp, synthetic construct
  misc_feature 1..20: note = chemically synthesized
  source 1..20: mol_type = other DNA
tcactgaaacttctgcctcc

SEQ ID NO: 54086 - DNA, 20 bp, synthetic construct
  misc_feature 1..20: note = chemically synthesized
  source 1..20: mol_type = other DNA
cactgaaacttctgcctccc

SEQ ID NO: 54087 - DNA, 20 bp, synthetic construct
  misc_feature 1..20: note = chemically synthesized
  source 1..20: mol_type = other DNA
aacttctgcctcccaggttc

SEQ ID NO: 54088 - DNA, 20 bp, synthetic construct
  misc_feature 1..20: note = chemically synthesized
  source 1..20: mol_type = other DNA
ttcaagcgattctcctgcct

SEQ ID NO: 54089 - DNA, 20 bp, synthetic construct
  misc_feature 1..20: note = chemically synthesized
  source 1..20: mol_type = other DNA
ttctcctgcctcagcctctt

SEQ ID NO: 54090 - DNA, 20 bp, synthetic construct
  misc_feature 1..20: note = chemically synthesized
  source 1..20: mol_type = other DNA
tcctgcctcagcctcttgag

SEQ ID NO: 54091 - DNA, 20 bp, synthetic construct
  misc_feature 1..20: note = chemically synthesized
  source 1..20: mol_type = other DNA
gcctcagcctcttgagtagc

SEQ ID NO: 54092 - DNA, 20 bp, synthetic construct
  misc_feature 1..20: note = chemically synthesized
  source 1..20: mol_type = other DNA
cctcagcctcttgagtagct

SEQ ID NO: 54093 - DNA, 20 bp, synthetic construct
  misc_feature 1..20: note = chemically synthesized
  source 1..20: mol_type = other DNA
ctcttgagtagctgggatta

SEQ ID NO: 54094 - DNA, 20 bp, synthetic construct
  misc_feature 1..20: note = chemically synthesized
  source 1..20: mol_type = other DNA
tcttgagtagctgggattaa

SEQ ID NO: 54095 - DNA, 20 bp, synthetic construct
  misc_feature 1..20: note = chemically synthesized
  source 1..20: mol_type = other DNA
aaggtgcacaccactatgcc

SEQ ID NO: 54096 - DNA, 20 bp, synthetic construct
  misc_feature 1..20: note = chemically synthesized
  source 1..20: mol_type = other DNA
ccagctaatttttgtatttt

SEQ ID NO: 54097 - DNA, 20 bp, synthetic construct
  misc_feature 1..20: note = chemically synthesized
  source 1..20: mol_type = other DNA
gctaatttttgtatttttag

SEQ ID NO: 54098 - DNA, 20 bp, synthetic construct
  misc_feature 1..20: note = chemically synthesized
  source 1..20: mol_type = other DNA
taatttttgtatttttagta

SEQ ID NO: 54099 - DNA, 20 bp, synthetic construct
  misc_feature 1..20: note = chemically synthesized
  source 1..20: mol_type = other DNA
ttttgtatttttagtagaga

SEQ ID NO: 54100 - DNA, 20 bp, synthetic construct
  misc_feature 1..20: note = chemically synthesized
  source 1..20: mol_type = other DNA
tttgtatttttagtagagac

SEQ ID NO: 54101 - DNA, 20 bp, synthetic construct
  misc_feature 1..20: note = chemically synthesized
  source 1..20: mol_type = other DNA
ttgtatttttagtagagacg

SEQ ID NO: 54102 - DNA, 20 bp, synthetic construct
  misc_feature 1..20: note = chemically synthesized
  source 1..20: mol_type = other DNA
gagacggggtttcattgttt

SEQ ID NO: 54103 - DNA, 20 bp, synthetic construct
  misc_feature 1..20: note = chemically synthesized
  source 1..20: mol_type = other DNA
ggggtttcattgttttggtc

SEQ ID NO: 54104 - DNA, 20 bp, synthetic construct
  misc_feature 1..20: note = chemically synthesized
  source 1..20: mol_type = other DNA
tttcattgttttggtcaagc

SEQ ID NO: 54105 - DNA, 20 bp, synthetic construct
  misc_feature 1..20: note = chemically synthesized
  source 1..20: mol_type = other DNA
ttgttttggtcaagctggtc

SEQ ID NO: 54106 - DNA, 20 bp, synthetic construct
  misc_feature 1..20: note = chemically synthesized
  source 1..20: mol_type = other DNA
accttgtgatctacccgcct

SEQ ID NO: 54107 - DNA, 20 bp, synthetic construct
  misc_feature 1..20: note = chemically synthesized
  source 1..20: mol_type = other DNA
ctacccgcctcagcctctca

SEQ ID NO: 54108 - DNA, 20 bp, synthetic construct
  misc_feature 1..20: note = chemically synthesized
  source 1..20: mol_type = other DNA
gcctcagcctctcaaagtgc

SEQ ID NO: 54109 - DNA, 20 bp, synthetic construct
  misc_feature 1..20: note = chemically synthesized
  source 1..20: mol_type = other DNA
cctcagcctctcaaagtgct

SEQ ID NO: 54110 - DNA, 20 bp, synthetic construct
  misc_feature 1..20: note = chemically synthesized
  source 1..20: mol_type = other DNA
ctctcaaagtgctgggatta

SEQ ID NO: 54111 - DNA, 20 bp, synthetic construct
  misc_feature 1..20: note = chemically synthesized
  source 1..20: mol_type = other DNA
tctcaaagtgctgggattac

SEQ ID NO: 54112 - DNA, 20 bp, synthetic construct
  misc_feature 1..20: note = chemically synthesized
  source 1..20: mol_type = other DNA
agtgctgggattacaggtgt

SEQ ID NO: 54113 - DNA, 20 bp, synthetic construct
  misc_feature 1..20: note = chemically synthesized
  source 1..20: mol_type = other DNA
acaggtgtgagccaccgtgc

SEQ ID NO: 54114 - DNA, 20 bp, synthetic construct
  misc_feature 1..20: note = chemically synthesized
  source 1..20: mol_type = other DNA
caggtgtgagccaccgtgcc

SEQ ID NO: 54115 - DNA, 20 bp, synthetic construct
  misc_feature 1..20: note = chemically synthesized
  source 1..20: mol_type = other DNA
tgtgagccaccgtgccaggc

SEQ ID NO: 54116 - DNA, 20 bp, synthetic construct
  misc_feature 1..20: note = chemically synthesized
  source 1..20: mol_type = other DNA
caccgtgccaggctggcata

SEQ ID NO: 54117 - DNA, 20 bp, synthetic construct
  misc_feature 1..20: note = chemically synthesized
  source 1..20: mol_type = other DNA
ggcatatagatttaaaaacc

SEQ ID NO: 54118 - DNA, 20 bp, synthetic construct
  misc_feature 1..20: note = chemically synthesized
  source 1..20: mol_type = other DNA
tctgccattgcaaatatcta

SEQ ID NO: 54119 - DNA, 20 bp, synthetic construct
  misc_feature 1..20: note = chemically synthesized
  source 1..20: mol_type = other DNA
atgttttatcctatattttt

SEQ ID NO: 54120 - DNA, 20 bp, synthetic construct
  misc_feature 1..20: note = chemically synthesized
  source 1..20: mol_type = other DNA
tatcctatatttttgagaaa

SEQ ID NO: 54121 - DNA, 20 bp, synthetic construct
  misc_feature 1..20: note = chemically synthesized
  source 1..20: mol_type = other DNA
tttttgagaaatagattaat

SEQ ID NO: 54122 - DNA, 20 bp, synthetic construct
  misc_feature 1..20: note = chemically synthesized
  source 1..20: mol_type = other DNA
ttgagaaatagattaattgg

SEQ ID NO: 54123 - DNA, 20 bp, synthetic construct
  misc_feature 1..20: note = chemically synthesized
  source 1..20: mol_type = other DNA
aatttgctgtatgtcttcaa

SEQ ID NO: 54124 - DNA, 20 bp, synthetic construct
  misc_feature 1..20: note = chemically synthesized
  source 1..20: mol_type = other DNA
tgctgtatgtcttcaatggc

SEQ ID NO: 54125 - DNA, 20 bp, synthetic construct
  misc_feature 1..20: note = chemically synthesized
  source 1..20: mol_type = other DNA
tgtcttcaatggctagcata

SEQ ID NO: 54126 - DNA, 20 bp, synthetic construct
  misc_feature 1..20: note = chemically synthesized
  source 1..20: mol_type = other DNA
ctagcatatggcttaacaat

SEQ ID NO: 54127 - DNA, 20 bp, synthetic construct
  misc_feature 1..20: note = chemically synthesized
  source 1..20: mol_type = other DNA
atatggcttaacaataagtt

SEQ ID NO: 54128 - DNA, 20 bp, synthetic construct
  misc_feature 1..20: note = chemically synthesized
  source 1..20: mol_type = other DNA
tatggcttaacaataagtta

SEQ ID NO: 54129 - DNA, 20 bp, synthetic construct
  misc_feature 1..20: note = chemically synthesized
  source 1..20: mol_type = other DNA
taagttaaggccaatcaatg

SEQ ID NO: 54130 - DNA, 20 bp, synthetic construct
  misc_feature 1..20: note = chemically synthesized
  source 1..20: mol_type = other DNA
gttaaggccaatcaatgtgg

SEQ ID NO: 54131 - DNA, 20 bp, synthetic construct
  misc_feature 1..20: note = chemically synthesized
  source 1..20: mol_type = other DNA
aaggccaatcaatgtggaag

SEQ ID NO: 54132 - DNA, 20 bp, synthetic construct
  misc_feature 1..20: note = chemically synthesized
  source 1..20: mol_type = other DNA
aggccaatcaatgtggaaga

SEQ ID NO: 54133 - DNA, 20 bp, synthetic construct
  misc_feature 1..20: note = chemically synthesized
  source 1..20: mol_type = other DNA
ttgcttgaaatctattttgt

SEQ ID NO: 54134 - DNA, 20 bp, synthetic construct
  misc_feature 1..20: note = chemically synthesized
  source 1..20: mol_type = other DNA
taattccctcccatttctgt

SEQ ID NO: 54135 - DNA, 20 bp, synthetic construct
  misc_feature 1..20: note = chemically synthesized
  source 1..20: mol_type = other DNA
ttccctcccatttctgtaag

SEQ ID NO: 54136 - DNA, 20 bp, synthetic construct
  misc_feature 1..20: note = chemically synthesized
  source 1..20: mol_type = other DNA
tcataactctctattttcct

SEQ ID NO: 54137 - DNA, 20 bp, synthetic construct
  misc_feature 1..20: note = chemically synthesized
  source 1..20: mol_type = other DNA
cataactctctattttcctt

SEQ ID NO: 54138 - DNA, 20 bp, synthetic construct
  misc_feature 1..20: note = chemically synthesized
  source 1..20: mol_type = other DNA
ataactctctattttcctta

SEQ ID NO: 54139 - DNA, 20 bp, synthetic construct
  misc_feature 1..20: note = chemically synthesized
  source 1..20: mol_type = other DNA
attttccttagggatatgat

SEQ ID NO: 54140 - DNA, 20 bp, synthetic construct
  misc_feature 1..20: note = chemically synthesized
  source 1..20: mol_type = other DNA
ttgatgctgcgttttatatc

SEQ ID NO: 54141 - DNA, 20 bp, synthetic construct
  misc_feature 1..20: note = chemically synthesized
  source 1..20: mol_type = other DNA
tatatctagttttaccttga

SEQ ID NO: 54142 - DNA, 20 bp, synthetic construct
  misc_feature 1..20: note = chemically synthesized
  source 1..20: mol_type = other DNA
atatctagttttaccttgat

SEQ ID NO: 54143 - DNA, 20 bp, synthetic construct
  misc_feature 1..20: note = chemically synthesized
  source 1..20: mol_type = other DNA
tctagttttaccttgatagg

SEQ ID NO: 54144 - DNA, 20 bp, synthetic construct
  misc_feature 1..20: note = chemically synthesized
  source 1..20: mol_type = other DNA
tttaccttgataggcagcat

SEQ ID NO: 54145 - DNA, 20 bp, synthetic construct
  misc_feature 1..20: note = chemically synthesized
  source 1..20: mol_type = other DNA
ccttgataggcagcattgga

SEQ ID NO: 54146 - DNA, 20 bp, synthetic construct
  misc_feature 1..20: note = chemically synthesized
  source 1..20: mol_type = other DNA
tgataggcagcattggatgg

SEQ ID NO: 54147 - DNA, 20 bp, synthetic construct
  misc_feature 1..20: note = chemically synthesized
  source 1..20: mol_type = other DNA
ggcagcattggatggtagta

SEQ ID NO: 54148 - DNA, 20 bp, synthetic construct
  misc_feature 1..20: note = chemically synthesized
  source 1..20: mol_type = other DNA
ttggatggtagtaaagatca

SEQ ID NO: 54149 - DNA, 20 bp, synthetic construct
  misc_feature 1..20: note = chemically synthesized
  source 1..20: mol_type = other DNA
gtagtaaagatcaaagcttt

SEQ ID NO: 54150 - DNA, 20 bp, synthetic construct
  misc_feature 1..20: note = chemically synthesized
  source 1..20: mol_type = other DNA
atcctgccttactttaaatc

SEQ ID NO: 54151 - DNA, 20 bp, synthetic construct
  misc_feature 1..20: note = chemically synthesized
  source 1..20: mol_type = other DNA
ctgccttactttaaatccag

SEQ ID NO: 54152 - DNA, 20 bp, synthetic construct
  misc_feature 1..20: note = chemically synthesized
  source 1..20: mol_type = other DNA
tgccttactttaaatccagt

SEQ ID NO: 54153 - DNA, 20 bp, synthetic construct
  misc_feature 1..20: note = chemically synthesized
  source 1..20: mol_type = other DNA
gccttactttaaatccagta

SEQ ID NO: 54154 - DNA, 20 bp, synthetic construct
  misc_feature 1..20: note = chemically synthesized
  source 1..20: mol_type = other DNA
actttaaatccagtagggcc

SEQ ID NO: 54155 - DNA, 20 bp, synthetic construct
  misc_feature 1..20: note = chemically synthesized
  source 1..20: mol_type = other DNA
ctttaaatccagtagggcct

SEQ ID NO: 54156 - DNA, 20 bp, synthetic construct
  misc_feature 1..20: note = chemically synthesized
  source 1..20: mol_type = other DNA
tttaaatccagtagggccta

SEQ ID NO: 54157 - DNA, 20 bp, synthetic construct
  misc_feature 1..20: note = chemically synthesized
  source 1..20: mol_type = other DNA
aatccagtagggcctagggt

SEQ ID NO: 54158 - DNA, 20 bp, synthetic construct
  misc_feature 1..20: note = chemically synthesized
  source 1..20: mol_type = other DNA
tccagtagggcctagggtaa

SEQ ID NO: 54159 - DNA, 20 bp, synthetic construct
  misc_feature 1..20: note = chemically synthesized
  source 1..20: mol_type = other DNA
ccagtagggcctagggtaag

SEQ ID NO: 54160 - DNA, 20 bp, synthetic construct
  misc_feature 1..20: note = chemically synthesized
  source 1..20: mol_type = other DNA
ggcctagggtaagaggctga

SEQ ID NO: 54161 - DNA, 20 bp, synthetic construct
  misc_feature 1..20: note = chemically synthesized
  source 1..20: mol_type = other DNA
ggtaagaggctgaaagtctg

SEQ ID NO: 54162 - DNA, 20 bp, synthetic construct
  misc_feature 1..20: note = chemically synthesized
  source 1..20: mol_type = other DNA
gtaagaggctgaaagtctgt

SEQ ID NO: 54163 - DNA, 20 bp, synthetic construct
  misc_feature 1..20: note = chemically synthesized
  source 1..20: mol_type = other DNA
gtgggttttttttacatctg

SEQ ID NO: 54164 - DNA, 20 bp, synthetic construct
  misc_feature 1..20: note = chemically synthesized
  source 1..20: mol_type = other DNA
ttttacatctgtagaaataa

SEQ ID NO: 54165 - DNA, 20 bp, synthetic construct
  misc_feature 1..20: note = chemically synthesized
  source 1..20: mol_type = other DNA
aaataatagtatttatataa

SEQ ID NO: 54166 - DNA, 20 bp, synthetic construct
  misc_feature 1..20: note = chemically synthesized
  source 1..20: mol_type = other DNA
atttatataatggttattta

SEQ ID NO: 54167 - DNA, 20 bp, synthetic construct
  misc_feature 1..20: note = chemically synthesized
  source 1..20: mol_type = other DNA
tttatataatggttatttaa

SEQ ID NO: 54168 - DNA, 20 bp, synthetic construct
  misc_feature 1..20: note = chemically synthesized
  source 1..20: mol_type = other DNA
ttatataatggttatttaaa

SEQ ID NO: 54169 - DNA, 20 bp, synthetic construct
  misc_feature 1..20: note = chemically synthesized
  source 1..20: mol_type = other DNA
ttatttaaagggcttttcaa

SEQ ID NO: 54170 - DNA, 20 bp, synthetic construct
  misc_feature 1..20: note = chemically synthesized
  source 1..20: mol_type = other DNA
tatttaaagggcttttcaat

SEQ ID NO: 54171 - DNA, 20 bp, synthetic construct
  misc_feature 1..20: note = chemically synthesized
  source 1..20: mol_type = other DNA
cttttcaataggttattgtg

SEQ ID NO: 54172 - DNA, 20 bp, synthetic construct
  misc_feature 1..20: note = chemically synthesized
  source 1..20: mol_type = other DNA
ggttattgtgaagatttaat

SEQ ID NO: 54173 - DNA, 20 bp, synthetic construct
  misc_feature 1..20: note = chemically synthesized
  source 1..20: mol_type = other DNA
ttaataagttaatatttgta

SEQ ID NO: 54174 - DNA, 20 bp, synthetic construct
  misc_feature 1..20: note = chemically synthesized
  source 1..20: mol_type = other DNA
ataagttaatatttgtaaag

SEQ ID NO: 54175 - DNA, 20 bp, synthetic construct
  misc_feature 1..20: note = chemically synthesized
  source 1..20: mol_type = other DNA
aaagtagtatgacacatatt

SEQ ID NO: 54176 - DNA, 20 bp, synthetic construct
  misc_feature 1..20: note = chemically synthesized
  source 1..20: mol_type = other DNA
gtagtatgacacatattaag

SEQ ID NO: 54177 - DNA, 20 bp, synthetic construct
  misc_feature 1..20: note = chemically synthesized
  source 1..20: mol_type = other DNA
ataatatctactaatttttt

SEQ ID NO: 54178 - DNA, 20 bp, synthetic construct
  misc_feature 1..20: note = chemically synthesized
  source 1..20: mol_type = other DNA
taatatctactaatttttta

SEQ ID NO: 54179 - DNA, 20 bp, synthetic construct
  misc_feature 1..20: note = chemically synthesized
  source 1..20: mol_type = other DNA
ggtacaaaaaattaattatt

SEQ ID NO: 54180 - DNA, 20 bp, synthetic construct
  misc_feature 1..20: note = chemically synthesized
  source 1..20: mol_type = other DNA
acaaaaaattaattatttgg

SEQ ID NO: 54181 - DNA, 20 bp, synthetic construct
  misc_feature 1..20: note = chemically synthesized
  source 1..20: mol_type = other DNA
caaaaaattaattatttggt

SEQ ID NO: 54182 - DNA, 20 bp, synthetic construct
  misc_feature 1..20: note = chemically synthesized
  source 1..20: mol_type = other DNA
tttggtaggacttatatatt

SEQ ID NO: 54183 - DNA, 20 bp, synthetic construct
  misc_feature 1..20: note = chemically synthesized
  source 1..20: mol_type = other DNA
cccattttactctcctttcc

SEQ ID NO: 54184 - DNA, 20 bp, synthetic construct
  misc_feature 1..20: note = chemically synthesized
  source 1..20: mol_type = other DNA
cattttactctcctttccca

SEQ ID NO: 54185 - DNA, 20 bp, synthetic construct
  misc_feature 1..20: note = chemically synthesized
  source 1..20: mol_type = other DNA
tttactctcctttcccagag

SEQ ID NO: 54186 - DNA, 20 bp, synthetic construct
  misc_feature 1..20: note = chemically synthesized
  source 1..20: mol_type = other DNA
tttcccagagaagaaaacat

SEQ ID NO: 54187 - DNA, 20 bp, synthetic construct
  misc_feature 1..20: note = chemically synthesized
  source 1..20: mol_type = other DNA
ccagagaagaaaacattgga

SEQ ID NO: 54188 - DNA, 20 bp, synthetic construct
  misc_feature 1..20: note = chemically synthesized
  source 1..20: mol_type = other DNA
ggaaagaaaacaaatctgat

SEQ ID NO: 54189 - DNA, 20 bp, synthetic construct
  misc_feature 1..20: note = chemically synthesized
  source 1..20: mol_type = other DNA
aaatctgatgagacctcatt

SEQ ID NO: 54190 - DNA, 20 bp, synthetic construct
  misc_feature 1..20: note = chemically synthesized
  source 1..20: mol_type = other DNA
gatgagacctcattcagcct

SEQ ID NO: 54191 - DNA, 20 bp, synthetic construct
  misc_feature 1..20: note = chemically synthesized
  source 1..20: mol_type = other DNA
atgagacctcattcagccta

SEQ ID NO: 54192 - DNA, 20 bp, synthetic construct
  misc_feature 1..20: note = chemically synthesized
  source 1..20: mol_type = other DNA
agacctcattcagcctaagg

SEQ ID NO: 54193 - DNA, 20 bp, synthetic construct
  misc_feature 1..20: note = chemically synthesized
  source 1..20: mol_type = other DNA
tttctaaatcctcaactttg

SEQ ID NO: 54194 - DNA, 20 bp, synthetic construct
  misc_feature 1..20: note = chemically synthesized
  source 1..20: mol_type = other DNA
actttgtagtctttcactaa

SEQ ID NO: 54195 - DNA, 20 bp, synthetic construct
  misc_feature 1..20: note = chemically synthesized
  source 1..20: mol_type = other DNA
tagtctttcactaatggcac

SEQ ID NO: 54196 - DNA, 20 bp, synthetic construct
  misc_feature 1..20: note = chemically synthesized
  source 1..20: mol_type = other DNA
agtctttcactaatggcact

SEQ ID NO: 54197 - DNA, 20 bp, synthetic construct
  misc_feature 1..20: note = chemically synthesized
  source 1..20: mol_type = other DNA
ttcactaatggcactaggcc

SEQ ID NO: 54198 - DNA, 20 bp, synthetic construct
  misc_feature 1..20: note = chemically synthesized
  source 1..20: mol_type = other DNA
cctggaataaactgtacata

SEQ ID NO: 54199 - DNA, 20 bp, synthetic construct
  misc_feature 1..20: note = chemically synthesized
  source 1..20: mol_type = other DNA
ttcgcaatcacactaattcc

SEQ ID NO: 54200 - DNA, 20 bp, synthetic construct
  misc_feature 1..20: note = chemically synthesized
  source 1..20: mol_type = other DNA
tcgcaatcacactaattccc

SEQ ID NO: 54201 - DNA, 20 bp, synthetic construct
  misc_feature 1..20: note = chemically synthesized
  source 1..20: mol_type = other DNA
acactaattcccaggatgtg

SEQ ID NO: 54202 - DNA, 20 bp, synthetic construct
  misc_feature 1..20: note = chemically synthesized
  source 1..20: mol_type = other DNA
ggatgtgtggtatgtcctga

SEQ ID NO: 54203 - DNA, 20 bp, synthetic construct
  misc_feature 1..20: note = chemically synthesized
  source 1..20: mol_type = other DNA
gatgtgtggtatgtcctgat

SEQ ID NO: 54204 - DNA, 20 bp, synthetic construct
  misc_feature 1..20: note = chemically synthesized
  source 1..20: mol_type = other DNA
gtatgtcctgatgggaatcc

SEQ ID NO: 54205 - DNA, 20 bp, synthetic construct
  misc_feature 1..20: note = chemically synthesized
  source 1..20: mol_type = other DNA
tatgtcctgatgggaatccc

SEQ ID NO: 54206 - DNA, 20 bp, synthetic construct
  misc_feature 1..20: note = chemically synthesized
  source 1..20: mol_type = other DNA
atgtcctgatgggaatccca

SEQ ID NO: 54207 - DNA, 20 bp, synthetic construct
  misc_feature 1..20: note = chemically synthesized
  source 1..20: mol_type = other DNA
cctgatgggaatcccagggc

SEQ ID NO: 54208 - DNA, 20 bp, synthetic construct
  misc_feature 1..20: note = chemically synthesized
  source 1..20: mol_type = other DNA
gatgggaatcccagggctgg

SEQ ID NO: 54209 - DNA, 20 bp, synthetic construct
  misc_feature 1..20: note = chemically synthesized
  source 1..20: mol_type = other DNA
atgggaatcccagggctgga

SEQ ID NO: 54210 - DNA, 20 bp, synthetic construct
  misc_feature 1..20: note = chemically synthesized
  source 1..20: mol_type = other DNA
ggctggaaggcttgcatacc

SEQ ID NO: 54211 - DNA, 20 bp, synthetic construct
  misc_feature 1..20: note = chemically synthesized
  source 1..20: mol_type = other DNA
tttttcttttatgtacattg

SEQ ID NO: 54212 - DNA, 20 bp, synthetic construct
  misc_feature 1..20: note = chemically synthesized
  source 1..20: mol_type = other DNA
tatgtacattgtggctgttg

SEQ ID NO: 54213 - DNA, 20 bp, synthetic construct
  misc_feature 1..20: note = chemically synthesized
  source 1..20: mol_type = other DNA
atgtacattgtggctgttgc

SEQ ID NO: 54214 - DNA, 20 bp, synthetic construct
  misc_feature 1..20: note = chemically synthesized
  source 1..20: mol_type = other DNA
tgatcttcctgatcatgact

SEQ ID NO: 54215 - DNA, 20 bp, synthetic construct
  misc_feature 1..20: note = chemically synthesized
  source 1..20: mol_type = other DNA
ttcctgatcatgactgagcg

SEQ ID NO: 54216 - DNA, 20 bp, synthetic construct
  misc_feature 1..20: note = chemically synthesized
  source 1..20: mol_type = other DNA
tgactgagcgcagtctccat

SEQ ID NO: 54217 - DNA, 20 bp, synthetic construct
  misc_feature 1..20: note = chemically synthesized
  source 1..20: mol_type = other DNA
gtatctcttcctatccatgc

SEQ ID NO: 54218 - DNA, 20 bp, synthetic construct
  misc_feature 1..20: note = chemically synthesized
  source 1..20: mol_type = other DNA
cttcctatccatgctggcct

SEQ ID NO: 54219 - DNA, 20 bp, synthetic construct
  misc_feature 1..20: note = chemically synthesized
  source 1..20: mol_type = other DNA
cttcctgctcgccactgctg

SEQ ID NO: 54220 - DNA, 20 bp, synthetic construct
  misc_feature 1..20: note = chemically synthesized
  source 1..20: mol_type = other DNA
tcgccactgctgcagcccct

SEQ ID NO: 54221 - DNA, 20 bp, synthetic construct
  misc_feature 1..20: note = chemically synthesized
  source 1..20: mol_type = other DNA
cgccactgctgcagccccta

SEQ ID NO: 54222 - DNA, 20 bp, synthetic construct
  misc_feature 1..20: note = chemically synthesized
  source 1..20: mol_type = other DNA
tgctgcagcccctaaggtgc

SEQ ID NO: 54223 - DNA, 20 bp, synthetic construct
  misc_feature 1..20: note = chemically synthesized
  source 1..20: mol_type = other DNA
ctaaggtgctggctatcctc

SEQ ID NO: 54224 - DNA, 20 bp, synthetic construct
  misc_feature 1..20: note = chemically synthesized
  source 1..20: mol_type = other DNA
tatcctctggttccactcca

SEQ ID NO: 54225 - DNA, 20 bp, synthetic construct
  misc_feature 1..20: note = chemically synthesized
  source 1..20: mol_type = other DNA
cactccatggacatatcctt

SEQ ID NO: 54226 - DNA, 20 bp, synthetic construct
  misc_feature 1..20: note = chemically synthesized
  source 1..20: mol_type = other DNA
tccatggacatatcctttgg

SEQ ID NO: 54227 - DNA, 20 bp, synthetic construct
  misc_feature 1..20: note = chemically synthesized
  source 1..20: mol_type = other DNA
cctttggtagttgtgtgtct

SEQ ID NO: 54228 - DNA, 20 bp, synthetic construct
  misc_feature 1..20: note = chemically synthesized
  source 1..20: mol_type = other DNA
cttcatacatttcatctttg

SEQ ID NO: 54229 - DNA, 20 bp, synthetic construct
  misc_feature 1..20: note = chemically synthesized
  source 1..20: mol_type = other DNA
catacatttcatctttgtgg

SEQ ID NO: 54230 - DNA, 20 bp, synthetic construct
  misc_feature 1..20: note = chemically synthesized
  source 1..20: mol_type = other DNA
ggcagaatctgctattctcc

SEQ ID NO: 54231 - DNA, 20 bp, synthetic construct
  misc_feature 1..20: note = chemically synthesized
  source 1..20: mol_type = other DNA
atctgctattctcctggcaa

SEQ ID NO: 54232 - DNA, 20 bp, synthetic construct
  misc_feature 1..20: note = chemically synthesized
  source 1..20: mol_type = other DNA
aatggcatttgaccgctatg

SEQ ID NO: 54233 - DNA, 20 bp, synthetic construct
  misc_feature 1..20: note = chemically synthesized
  source 1..20: mol_type = other DNA
gtggccatctgttacccact

SEQ ID NO: 54234 - DNA, 20 bp, synthetic construct
  misc_feature 1..20: note = chemically synthesized
  source 1..20: mol_type = other DNA
atacaccattttaacctcat

SEQ ID NO: 54235 - DNA, 20 bp, synthetic construct
  misc_feature 1..20: note = chemically synthesized
  source 1..20: mol_type = other DNA
attttaacctcatcagccgt

SEQ ID NO: 54236 - DNA, 20 bp, synthetic construct
  misc_feature 1..20: note = chemically synthesized
  source 1..20: mol_type = other DNA
ttttaacctcatcagccgtc

SEQ ID NO: 54237 - DNA, 20 bp, synthetic construct
  misc_feature 1..20: note = chemically synthesized
  source 1..20: mol_type = other DNA
taacctcatcagccgtcagg

SEQ ID NO: 54238 - DNA, 20 bp, synthetic construct
  misc_feature 1..20: note = chemically synthesized
  source 1..20: mol_type = other DNA
tcatcagccgtcaggaagat

SEQ ID NO: 54239 - DNA, 20 bp, synthetic construct
  misc_feature 1..20: note = chemically synthesized
  source 1..20: mol_type = other DNA
agccgtcaggaagattggca

SEQ ID NO: 54240 - DNA, 20 bp, synthetic construct
  misc_feature 1..20: note = chemically synthesized
  source 1..20: mol_type = other DNA
cgtcaggaagattggcatag

SEQ ID NO: 54241 - DNA, 20 bp, synthetic construct
  misc_feature 1..20: note = chemically synthesized
  source 1..20: mol_type = other DNA
gaagattggcatagcagctg

SEQ ID NO: 54242 - DNA, 20 bp, synthetic construct
  misc_feature 1..20: note = chemically synthesized
  source 1..20: mol_type = other DNA
attggcatagcagctgtggt

SEQ ID NO: 54243 - DNA, 20 bp, synthetic construct
  misc_feature 1..20: note = chemically synthesized
  source 1..20: mol_type = other DNA
ttggcatagcagctgtggtc

SEQ ID NO: 54244 - DNA, 20 bp, synthetic construct
  misc_feature 1..20: note = chemically synthesized
  source 1..20: mol_type = other DNA
ggcatagcagctgtggtcag

SEQ ID NO: 54245 - DNA, 20 bp, synthetic construct
  misc_feature 1..20: note = chemically synthesized
  source 1..20: mol_type = other DNA
ctgctgtccgttcatcttcc

SEQ ID NO: 54246 - DNA, 20 bp, synthetic construct
  misc_feature 1..20: note = chemically synthesized
  source 1..20: mol_type = other DNA
gtataccgacttacatattg

SEQ ID NO: 54247 - DNA, 20 bp, synthetic construct
  misc_feature 1..20: note = chemically synthesized
  source 1..20: mol_type = other DNA
tataccgacttacatattgt

SEQ ID NO: 54248 - DNA, 20 bp, synthetic construct
  misc_feature 1..20: note = chemically synthesized
  source 1..20: mol_type = other DNA
taccgacttacatattgtgg

SEQ ID NO: 54249 - DNA, 20 bp, synthetic construct
  misc_feature 1..20: note = chemically synthesized
  source 1..20: mol_type = other DNA
tcattcctcattcctactgt

SEQ ID NO: 54250 - DNA, 20 bp, synthetic construct
  misc_feature 1..20: note = chemically synthesized
  source 1..20: mol_type = other DNA
tcctactgtgagcacattgc

SEQ ID NO: 54251 - DNA, 20 bp, synthetic construct
  misc_feature 1..20: note = chemically synthesized
  source 1..20: mol_type = other DNA
ctgtgagcacattgccagat

SEQ ID NO: 54252 - DNA, 20 bp, synthetic construct
  misc_feature 1..20: note = chemically synthesized
  source 1..20: mol_type = other DNA
cacattgccagattggcttg

SEQ ID NO: 54253 - DNA, 20 bp, synthetic construct
  misc_feature 1..20: note = chemically synthesized
  source 1..20: mol_type = other DNA
atcaatgtcaatatcattta

SEQ ID NO: 54254 - DNA, 20 bp, synthetic construct
  misc_feature 1..20: note = chemically synthesized
  source 1..20: mol_type = other DNA
tatcatttatggcctcactg

SEQ ID NO: 54255 - DNA, 20 bp, synthetic construct
  misc_feature 1..20: note = chemically synthesized
  source 1..20: mol_type = other DNA
cactgtggccctactctcta

SEQ ID NO: 54256 - DNA, 20 bp, synthetic construct
  misc_feature 1..20: note = chemically synthesized
  source 1..20: mol_type = other DNA
actgtggccctactctctac

SEQ ID NO: 54257 - DNA, 20 bp, synthetic construct
  misc_feature 1..20: note = chemically synthesized
  source 1..20: mol_type = other DNA
ggccctactctctacaggac

SEQ ID NO: 54258 - DNA, 20 bp, synthetic construct
  misc_feature 1..20: note = chemically synthesized
  source 1..20: mol_type = other DNA
actctctacaggactggata

SEQ ID NO: 54259 - DNA, 20 bp, synthetic construct
  misc_feature 1..20: note = chemically synthesized
  source 1..20: mol_type = other DNA
ctacacaatgatccttcact

SEQ ID NO: 54260 - DNA, 20 bp, synthetic construct
  misc_feature 1..20: note = chemically synthesized
  source 1..20: mol_type = other DNA
tgatccttcactcagtgttt

SEQ ID NO: 54261 - DNA, 20 bp, synthetic construct
  misc_feature 1..20: note = chemically synthesized
  source 1..20: mol_type = other DNA
cagtgtttcagatatcttcc

SEQ ID NO: 54262 - DNA, 20 bp, synthetic construct
  misc_feature 1..20: note = chemically synthesized
  source 1..20: mol_type = other DNA
agtgtttcagatatcttcct

SEQ ID NO: 54263 - DNA, 20 bp, synthetic construct
  misc_feature 1..20: note = chemically synthesized
  source 1..20: mol_type = other DNA
cagatatcttcctgggctgc

SEQ ID NO: 54264 - DNA, 20 bp, synthetic construct
  misc_feature 1..20: note = chemically synthesized
  source 1..20: mol_type = other DNA
agatatcttcctgggctgcc

SEQ ID NO: 54265 - DNA, 20 bp, synthetic construct
  misc_feature 1..20: note = chemically synthesized
  source 1..20: mol_type = other DNA
cttcctgggctgccaggttc

SEQ ID NO: 54266 - DNA, 20 bp, synthetic construct
  misc_feature 1..20: note = chemically synthesized
  source 1..20: mol_type = other DNA
ttcctgggctgccaggttca

SEQ ID NO: 54267 - DNA, 20 bp, synthetic construct
  misc_feature 1..20: note = chemically synthesized
  source 1..20: mol_type = other DNA
gctgccaggttcaaggccct

SEQ ID NO: 54268 - DNA, 20 bp, synthetic construct
  misc_feature 1..20: note = chemically synthesized
  source 1..20: mol_type = other DNA
ttcaaggcccttagtacgtg

SEQ ID NO: 54269 - DNA, 20 bp, synthetic construct
  misc_feature 1..20: note = chemically synthesized
  source 1..20: mol_type = other DNA
catatttatgttctataccc

SEQ ID NO: 54270 - DNA, 20 bp, synthetic construct
  misc_feature 1..20: note = chemically synthesized
  source 1..20: mol_type = other DNA
tcatttcttgcccatcgctt

SEQ ID NO: 54271 - DNA, 20 bp, synthetic construct
  misc_feature 1..20: note = chemically synthesized
  source 1..20: mol_type = other DNA
atttcttgcccatcgctttg

SEQ ID NO: 54272 - DNA, 20 bp, synthetic construct
  misc_feature 1..20: note = chemically synthesized
  source 1..20: mol_type = other DNA
tttcttgcccatcgctttgg

SEQ ID NO: 54273 - DNA, 20 bp, synthetic construct
  misc_feature 1..20: note = chemically synthesized
  source 1..20: mol_type = other DNA
ccctcaccacattcacatcc

SEQ ID NO: 54274 - DNA, 20 bp, synthetic construct
  misc_feature 1..20: note = chemically synthesized
  source 1..20: mol_type = other DNA
tcaccacattcacatcctag

SEQ ID NO: 54275 - DNA, 20 bp, synthetic construct
  misc_feature 1..20: note = chemically synthesized
  source 1..20: mol_type = other DNA
caccacattcacatcctagt

SEQ ID NO: 54276 - DNA, 20 bp, synthetic construct
  misc_feature 1..20: note = chemically synthesized
  source 1..20: mol_type = other DNA
cacattcacatcctagtggg

SEQ ID NO: 54277 - DNA, 20 bp, synthetic construct
  misc_feature 1..20: note = chemically synthesized
  source 1..20: mol_type = other DNA
agtgggcagtctctatgtgt

SEQ ID NO: 54278 - DNA, 20 bp, synthetic construct
  misc_feature 1..20: note = chemically synthesized
  source 1..20: mol_type = other DNA
atgctaaaccccatcattta

SEQ ID NO: 54279 - DNA, 20 bp, synthetic construct
  misc_feature 1..20: note = chemically synthesized
  source 1..20: mol_type = other DNA
tgctaaaccccatcatttat

SEQ ID NO: 54280 - DNA, 20 bp, synthetic construct
  misc_feature 1..20: note = chemically synthesized
  source 1..20: mol_type = other DNA
gctaaaccccatcatttatg

SEQ ID NO: 54281 - DNA, 20 bp, synthetic construct
  misc_feature 1..20: note = chemically synthesized
  source 1..20: mol_type = other DNA
accccatcatttatggggtg

SEQ ID NO: 54282 - DNA, 20 bp, synthetic construct
  misc_feature 1..20: note = chemically synthesized
  source 1..20: mol_type = other DNA
ggtgaagaccaaacaaatta

SEQ ID NO: 54283 - DNA, 20 bp, synthetic construct
  misc_feature 1..20: note = chemically synthesized
  source 1..20: mol_type = other DNA
gaccaaacaaattaaagatc

SEQ ID NO: 54284 - DNA, 20 bp, synthetic construct
  misc_feature 1..20: note = chemically synthesized
  source 1..20: mol_type = other DNA
attttgcttttctctcctat

SEQ ID NO: 54285 - DNA, 20 bp, synthetic construct
  misc_feature 1..20: note = chemically synthesized
  source 1..20: mol_type = other DNA
tcctatcagtgtatgctgtt

SEQ ID NO: 54286 - DNA, 20 bp, synthetic construct
  misc_feature 1..20: note = chemically synthesized
  source 1..20: mol_type = other DNA
tgtatgctgttaagattaaa

SEQ ID NO: 54287 - DNA, 20 bp, synthetic construct
  misc_feature 1..20: note = chemically synthesized
  source 1..20: mol_type = other DNA
taagattaaaaagtctgttt

SEQ ID NO: 54288 - DNA, 20 bp, synthetic construct
  misc_feature 1..20: note = chemically synthesized
  source 1..20: mol_type = other DNA
aagattaaaaagtctgtttt

SEQ ID NO: 54289 - DNA, 20 bp, synthetic construct
  misc_feature 1..20: note = chemically synthesized
  source 1..20: mol_type = other DNA
agattaaaaagtctgtttta

SEQ ID NO: 54290 - DNA, 20 bp, synthetic construct
  misc_feature 1..20: note = chemically synthesized
  source 1..20: mol_type = other DNA
aaaaagtctgttttagggaa

SEQ ID NO: 54291 - DNA, 20 bp, synthetic construct
  misc_feature 1..20: note = chemically synthesized
  source 1..20: mol_type = other DNA
aatagaataaatacaatcca

SEQ ID NO: 54292 - DNA, 20 bp, synthetic construct
  misc_feature 1..20: note = chemically synthesized
  source 1..20: mol_type = other DNA
ctcaaacacacttaaaatga

SEQ ID NO: 54293 - DNA, 20 bp, synthetic construct
  misc_feature 1..20: note = chemically synthesized
  source 1..20: mol_type = other DNA
taaaatgatggtgtctatca

SEQ ID NO: 54294 - DNA, 20 bp, synthetic construct
  misc_feature 1..20: note = chemically synthesized
  source 1..20: mol_type = other DNA
ggtgtctatcaaagtgtcca

SEQ ID NO: 54295 - DNA, 20 bp, synthetic construct
  misc_feature 1..20: note = chemically synthesized
  source 1..20: mol_type = other DNA
agtgtccacggaattttgct

SEQ ID NO: 54296 - DNA, 20 bp, synthetic construct
  misc_feature 1..20: note = chemically synthesized
  source 1..20: mol_type = other DNA
gtgtccacggaattttgcta

SEQ ID NO: 54297 - DNA, 20 bp, synthetic construct
  misc_feature 1..20: note = chemically synthesized
  source 1..20: mol_type = other DNA
gaattttgctaaggcactca

SEQ ID NO: 54298 - DNA, 20 bp, synthetic construct
  misc_feature 1..20: note = chemically synthesized
  source 1..20: mol_type = other DNA
gctaaggcactcaaagatca

SEQ ID NO: 54299 - DNA, 20 bp, synthetic construct
  misc_feature 1..20: note = chemically synthesized
  source 1..20: mol_type = other DNA
ctaaggcactcaaagatcaa

SEQ ID NO: 54300 - DNA, 20 bp, synthetic construct
  misc_feature 1..20: note = chemically synthesized
  source 1..20: mol_type = other DNA
aatgaaattctccatttttt

SEQ ID NO: 54301 - DNA, 20 bp, synthetic construct
  misc_feature 1..20: note = chemically synthesized
  source 1..20: mol_type = other DNA
ttttaacttaaaaatatata

SEQ ID NO: 54302 - DNA, 20 bp, synthetic construct
  misc_feature 1..20: note = chemically synthesized
  source 1..20: mol_type = other DNA
aaaaatatataaagataatc

SEQ ID NO: 54303 - DNA, 20 bp, synthetic construct
  misc_feature 1..20: note = chemically synthesized
  source 1..20: mol_type = other DNA
tatataaagataatcgagaa

SEQ ID NO: 54304 - DNA, 20 bp, synthetic construct
  misc_feature 1..20: note = chemically synthesized
  source 1..20: mol_type = other DNA
tataaagataatcgagaaaa

SEQ ID NO: 54305 - DNA, 20 bp, synthetic construct
  misc_feature 1..20: note = chemically synthesized
  source 1..20: mol_type = other DNA
gagaaaagagaaatatattt

SEQ ID NO: 54306 - DNA, 20 bp, synthetic construct
  misc_feature 1..20: note = chemically synthesized
  source 1..20: mol_type = other DNA
agaaaagagaaatatatttt

SEQ ID NO: 54307 - DNA, 20 bp, synthetic construct
  misc_feature 1..20: note = chemically synthesized
  source 1..20: mol_type = other DNA
gaaaagagaaatatatttta

SEQ ID NO: 54308 - DNA, 20 bp, synthetic construct
  misc_feature 1..20: note = chemically synthesized
  source 1..20: mol_type = other DNA
atatattttagggtttaatc

SEQ ID NO: 54309 - DNA, 20 bp, synthetic construct
  misc_feature 1..20: note = chemically synthesized
  source 1..20: mol_type = other DNA
ccagattgacttttcctacg

SEQ ID NO: 54310 - DNA, 20 bp, synthetic construct
  misc_feature 1..20: note = chemically synthesized
  source 1..20: mol_type = other DNA
agattgacttttcctacgta

SEQ ID NO: 54311 - DNA, 20 bp, synthetic construct
  misc_feature 1..20: note = chemically synthesized
  source 1..20: mol_type = other DNA
tgacttttcctacgtagagc

SEQ ID NO: 54312 - DNA, 20 bp, synthetic construct
  misc_feature 1..20: note = chemically synthesized
  source 1..20: mol_type = other DNA
gacttttcctacgtagagct

SEQ ID NO: 54313 - DNA, 20 bp, synthetic construct
  misc_feature 1..20: note = chemically synthesized
  source 1..20: mol_type = other DNA
ttttcctacgtagagctagg

SEQ ID NO: 54314 - DNA, 20 bp, synthetic construct
  misc_feature 1..20: note = chemically synthesized
  source 1..20: mol_type = other DNA
tcctacgtagagctaggaag

SEQ ID NO: 54315 - DNA, 20 bp, synthetic construct
  misc_feature 1..20: note = chemically synthesized
  source 1..20: mol_type = other DNA
cctacgtagagctaggaagt

SEQ ID NO: 54316 - DNA, 20 bp, synthetic construct
  misc_feature 1..20: note = chemically synthesized
  source 1..20: mol_type = other DNA
ctacgtagagctaggaagtg

SEQ ID NO: 54317 - DNA, 20 bp, synthetic construct
  misc_feature 1..20: note = chemically synthesized
  source 1..20: mol_type = other DNA
gagctaggaagtggggtttt

SEQ ID NO: 54318 - DNA, 20 bp, synthetic construct
  misc_feature 1..20: note = chemically synthesized
  source 1..20: mol_type = other DNA
taggaagtggggttttgagt

SEQ ID NO: 54319 - DNA, 20 bp, synthetic construct
  misc_feature 1..20: note = chemically synthesized
  source 1..20: mol_type = other DNA
tggggttttgagtcagtcac

SEQ ID NO: 54320 - DNA, 20 bp, synthetic construct
  misc_feature 1..20: note = chemically synthesized
  source 1..20: mol_type = other DNA
ggggttttgagtcagtcact

SEQ ID NO: 54321 - DNA, 20 bp, synthetic construct
  misc_feature 1..20: note = chemically synthesized
  source 1..20: mol_type = other DNA
gtcagtcactgggcttttta

SEQ ID NO: 54322 - DNA, 20 bp, synthetic construct
  misc_feature 1..20: note = chemically synthesized
  source 1..20: mol_type = other DNA
gtcactgggctttttatagt

SEQ ID NO: 54323 - DNA, 20 bp, synthetic construct
  misc_feature 1..20: note = chemically synthesized
  source 1..20: mol_type = other DNA
aacactcccgctgtactctg

SEQ ID NO: 54324 - DNA, 20 bp, synthetic construct
  misc_feature 1..20: note = chemically synthesized
  source 1..20: mol_type = other DNA
cactcccgctgtactctgca

SEQ ID NO: 54325 - DNA, 20 bp, synthetic construct
  misc_feature 1..20: note = chemically synthesized
  source 1..20: mol_type = other DNA
agacttgaaccaataacatg

SEQ ID NO: 54326 - DNA, 20 bp, synthetic construct
  misc_feature 1..20: note = chemically synthesized
  source 1..20: mol_type = other DNA
tttgtcaacacctgttactt

SEQ ID NO: 54327 - DNA, 20 bp, synthetic construct
  misc_feature 1..20: note = chemically synthesized
  source 1..20: mol_type = other DNA
ttaagttaaaatgttatccc

SEQ ID NO: 54328 - DNA, 20 bp, synthetic construct
  misc_feature 1..20: note = chemically synthesized
  source 1..20: mol_type = other DNA
taactcactgacatctcaca

SEQ ID NO: 54329 - DNA, 20 bp, synthetic construct
  misc_feature 1..20: note = chemically synthesized
  source 1..20: mol_type = other DNA
atctcacaaagtctcttgta

SEQ ID NO: 54330 - DNA, 20 bp, synthetic construct
  misc_feature 1..20: note = chemically synthesized
  source 1..20: mol_type = other DNA
acaaagtctcttgtatggaa

SEQ ID NO: 54331 - DNA, 20 bp, synthetic construct
  misc_feature 1..20: note = chemically synthesized
  source 1..20: mol_type = other DNA
ataatacatatgtattcaac

SEQ ID NO: 54332 - DNA, 20 bp, synthetic construct
  misc_feature 1..20: note = chemically synthesized
  source 1..20: mol_type = other DNA
tgtattcaacaagtgaataa

SEQ ID NO: 54333 - DNA, 20 bp, synthetic construct
  misc_feature 1..20: note = chemically synthesized
  source 1..20: mol_type = other DNA
aagtgaataatagtgaatta

SEQ ID NO: 54334 - DNA, 20 bp, synthetic construct
  misc_feature 1..20: note = chemically synthesized
  source 1..20: mol_type = other DNA
aatattaaattaacaaatat

SEQ ID NO: 54335 - DNA, 20 bp, synthetic construct
  misc_feature 1..20: note = chemically synthesized
  source 1..20: mol_type = other DNA
ttaacaaatatgagattgcc

SEQ ID NO: 54336 - DNA, 20 bp, synthetic construct
  misc_feature 1..20: note = chemically synthesized
  source 1..20: mol_type = other DNA
ctgatacacatttcccccta

SEQ ID NO: 54337 - DNA, 20 bp, synthetic construct
  misc_feature 1..20: note = chemically synthesized
  source 1..20: mol_type = other DNA
atacacatttccccctatag

SEQ ID NO: 54338 - DNA, 20 bp, synthetic construct
  misc_feature 1..20: note = chemically synthesized
  source 1..20: mol_type = other DNA
acacatttccccctatagtg

SEQ ID NO: 54339 - DNA, 20 bp, synthetic construct
  misc_feature 1..20: note = chemically synthesized
  source 1..20: mol_type = other DNA
tccccctatagtggagattt

SEQ ID NO: 54340 - DNA, 20 bp, synthetic construct
  misc_feature 1..20: note = chemically synthesized
  source 1..20: mol_type = other DNA
atagtggagattttagaccc

SEQ ID NO: 54341 - DNA, 20 bp, synthetic construct
  misc_feature 1..20: note = chemically synthesized
  source 1..20: mol_type = other DNA
ttttagacccaagtcatcaa

SEQ ID NO: 54342 - DNA, 20 bp, synthetic construct
  misc_feature 1..20: note = chemically synthesized
  source 1..20: mol_type = other DNA
ttagacccaagtcatcaatg

SEQ ID NO: 54343 - DNA, 20 bp, synthetic construct
  misc_feature 1..20: note = chemically synthesized
  source 1..20: mol_type = other DNA
aagtcatcaatggagcatca

SEQ ID NO: 54344 - DNA, 20 bp, synthetic construct
  misc_feature 1..20: note = chemically synthesized
  source 1..20: mol_type = other DNA
atggagcatcatggcatcaa

SEQ ID NO: 54345 - DNA, 20 bp, synthetic construct
  misc_feature 1..20: note = chemically synthesized
  source 1..20: mol_type = other DNA
catcaacagaaacatcactg

SEQ ID NO: 54346 - DNA, 20 bp, synthetic construct
  misc_feature 1..20: note = chemically synthesized
  source 1..20: mol_type = other DNA
caacagaaacatcactgaag

SEQ ID NO: 54347 - DNA, 20 bp, synthetic construct
  misc_feature 1..20: note = chemically synthesized
  source 1..20: mol_type = other DNA
tgattgaaaatttctatacc

SEQ ID NO: 54348 - DNA, 20 bp, synthetic construct
  misc_feature 1..20: note = chemically synthesized
  source 1..20: mol_type = other DNA
gattgaaaatttctatacct

SEQ ID NO: 54349 - DNA, 20 bp, synthetic construct
  misc_feature 1..20: note = chemically synthesized
  source 1..20: mol_type = other DNA
taaaataaacattttttaaa

SEQ ID NO: 54350 - DNA, 20 bp, synthetic construct
  misc_feature 1..20: note = chemically synthesized
  source 1..20: mol_type = other DNA
ataaacattttttaaaaagc

SEQ ID NO: 54351 - DNA, 20 bp, synthetic construct
  misc_feature 1..20: note = chemically synthesized
  source 1..20: mol_type = other DNA
aaacattttttaaaaagcta

SEQ ID NO: 54352 - DNA, 20 bp, synthetic construct
  misc_feature 1..20: note = chemically synthesized
  source 1..20: mol_type = other DNA
cattttttaaaaagctagag

SEQ ID NO: 54353 - DNA, 20 bp, synthetic construct
  misc_feature 1..20: note = chemically synthesized
  source 1..20: mol_type = other DNA
ttaaaaagctagagaagatt

SEQ ID NO: 54354 - DNA, 20 bp, synthetic construct
  misc_feature 1..20: note = chemically synthesized
  source 1..20: mol_type = other DNA
taaaaagctagagaagatta

SEQ ID NO: 54355 - DNA, 20 bp, synthetic construct
  misc_feature 1..20: note = chemically synthesized
  source 1..20: mol_type = other DNA
aaaagctagagaagattaag

SEQ ID NO: 54356 - DNA, 20 bp, synthetic construct
  misc_feature 1..20: note = chemically synthesized
  source 1..20: mol_type = other DNA
gattaaggagaatattttcc

SEQ ID NO: 54357 - DNA, 20 bp, synthetic construct
  misc_feature 1..20: note = chemically synthesized
  source 1..20: mol_type = other DNA
tccaagaaacttaaataaaa

SEQ ID NO: 54358 - DNA, 20 bp, synthetic construct
  misc_feature 1..20: note = chemically synthesized
  source 1..20: mol_type = other DNA
aataaaaaagaatgtaatcc

SEQ ID NO: 54359 - DNA, 20 bp, synthetic construct
  misc_feature 1..20: note = chemically synthesized
  source 1..20: mol_type = other DNA
aaagaatgtaatcccagcaa

SEQ ID NO: 54360 - DNA, 20 bp, synthetic construct
  misc_feature 1..20: note = chemically synthesized
  source 1..20: mol_type = other DNA
attatctatgatattatcta

SEQ ID NO: 54361 - DNA, 20 bp, synthetic construct
  misc_feature 1..20: note = chemically synthesized
  source 1..20: mol_type = other DNA
ttacaatctctccttcttaa

SEQ ID NO: 54362 - DNA, 20 bp, synthetic construct
  misc_feature 1..20: note = chemically synthesized
  source 1..20: mol_type = other DNA
atctctccttcttaaaagcc

SEQ ID NO: 54363 - DNA, 20 bp, synthetic construct
  misc_feature 1..20: note = chemically synthesized
  source 1..20: mol_type = other DNA
aaagcctagaacaatgccat

SEQ ID NO: 54364 - DNA, 20 bp, synthetic construct
  misc_feature 1..20: note = chemically synthesized
  source 1..20: mol_type = other DNA
aatgaccttatttacaccta

SEQ ID NO: 54365 - DNA, 20 bp, synthetic construct
  misc_feature 1..20: note = chemically synthesized
  source 1..20: mol_type = other DNA
accttatttacacctaaaga

SEQ ID NO: 54366 - DNA, 20 bp, synthetic construct
  misc_feature 1..20: note = chemically synthesized
  source 1..20: mol_type = other DNA
aaagacaaaaaaaaaacttt

SEQ ID NO: 54367 - DNA, 20 bp, synthetic construct
  misc_feature 1..20: note = chemically synthesized
  source 1..20: mol_type = other DNA
aaaaaaactttgagaaatct

SEQ ID NO: 54368 - DNA, 20 bp, synthetic construct
  misc_feature 1..20: note = chemically synthesized
  source 1..20: mol_type = other DNA
aaaaaactttgagaaatctg

SEQ ID NO: 54369 - DNA, 20 bp, synthetic construct
  misc_feature 1..20: note = chemically synthesized
  source 1..20: mol_type = other DNA
acttgaaatctactcatgct

SEQ ID NO: 54370 - DNA, 20 bp, synthetic construct
  misc_feature 1..20: note = chemically synthesized
  source 1..20: mol_type = other DNA
actcatgcttggcttatgct

SEQ ID NO: 54371 - DNA, 20 bp, synthetic construct
  misc_feature 1..20: note = chemically synthesized
  source 1..20: mol_type = other DNA
agctttttctgtgattttta

SEQ ID NO: 54372 - DNA, 20 bp, synthetic construct
  misc_feature 1..20: note = chemically synthesized
  source 1..20: mol_type = other DNA
tttatacatgtattaacact

SEQ ID NO: 54373 - DNA, 20 bp, synthetic construct
  misc_feature 1..20: note = chemically synthesized
  source 1..20: mol_type = other DNA
aatttatctacatttatatg

SEQ ID NO: 54374 - DNA, 20 bp, synthetic construct
  misc_feature 1..20: note = chemically synthesized
  source 1..20: mol_type = other DNA
acacacacgtttgtgcacca

SEQ ID NO: 54375 - DNA, 20 bp, synthetic construct
  misc_feature 1..20: note = chemically synthesized
  source 1..20: mol_type = other DNA
acgtttgtgcaccaaagaat

SEQ ID NO: 54376 - DNA, 20 bp, synthetic construct
  misc_feature 1..20: note = chemically synthesized
  source 1..20: mol_type = other DNA
ttgtgcaccaaagaataaga

SEQ ID NO: 54377 - DNA, 20 bp, synthetic construct
  misc_feature 1..20: note = chemically synthesized
  source 1..20: mol_type = other DNA
gcaccaaagaataagaaagt

SEQ ID NO: 54378 - DNA, 20 bp, synthetic construct
  misc_feature 1..20: note = chemically synthesized
  source 1..20: mol_type = other DNA
aagaataagaaagttagaaa

SEQ ID NO: 54379 - DNA, 20 bp, synthetic construct
  misc_feature 1..20: note = chemically synthesized
  source 1..20: mol_type = other DNA
agttagaaatagacttccta

SEQ ID NO: 54380 - DNA, 20 bp, synthetic construct
  misc_feature 1..20: note = chemically synthesized
  source 1..20: mol_type = other DNA
tcctacagtatttccattat

SEQ ID NO: 54381 - DNA, 20 bp, synthetic construct
  misc_feature 1..20: note = chemically synthesized
  source 1..20: mol_type = other DNA
cctacagtatttccattatt

SEQ ID NO: 54382 - DNA, 20 bp, synthetic construct
  misc_feature 1..20: note = chemically synthesized
  source 1..20: mol_type = other DNA
acagtatttccattattggg

SEQ ID NO: 54383 - DNA, 20 bp, synthetic construct
  misc_feature 1..20: note = chemically synthesized
  source 1..20: mol_type = other DNA
cagtatttccattattggga

SEQ ID NO: 54384 - DNA, 20 bp, synthetic construct
  misc_feature 1..20: note = chemically synthesized
  source 1..20: mol_type = other DNA
agtatttccattattgggaa

SEQ ID NO: 54385 - DNA, 20 bp, synthetic construct
  misc_feature 1..20: note = chemically synthesized
  source 1..20: mol_type = other DNA
tatttccattattgggaagg

SEQ ID NO: 54386 - DNA, 20 bp, synthetic construct
  misc_feature 1..20: note = chemically synthesized
  source 1..20: mol_type = other DNA
tctaattaatttgtttctgc

SEQ ID NO: 54387 - DNA, 20 bp, synthetic construct
  misc_feature 1..20: note = chemically synthesized
  source 1..20: mol_type = other DNA
tagtactacactaaatattt

SEQ ID NO: 54388 - DNA, 20 bp, synthetic construct
  misc_feature 1..20: note = chemically synthesized
  source 1..20: mol_type = other DNA
ttcaaaatatttgcatttct

SEQ ID NO: 54389 - DNA, 20 bp, synthetic construct
  misc_feature 1..20: note = chemically synthesized
  source 1..20: mol_type = other DNA
tacatctgttaaacttcata

SEQ ID NO: 54390 - DNA, 20 bp, synthetic construct
  misc_feature 1..20: note = chemically synthesized
  source 1..20: mol_type = other DNA
ttctactctacacaatgttt

SEQ ID NO: 54391 - DNA, 20 bp, synthetic construct
  misc_feature 1..20: note = chemically synthesized
  source 1..20: mol_type = other DNA
tctaatgtgaaatttacact

SEQ ID NO: 54392 - DNA, 20 bp, synthetic construct
  misc_feature 1..20: note = chemically synthesized
  source 1..20: mol_type = other DNA
agcgttgcatttctccataa

SEQ ID NO: 54393 - DNA, 20 bp, synthetic construct
  misc_feature 1..20: note = chemically synthesized
  source 1..20: mol_type = other DNA
ccataaaagtaataatatga

SEQ ID NO: 54394 - DNA, 20 bp, synthetic construct
  misc_feature 1..20: note = chemically synthesized
  source 1..20: mol_type = other DNA
gtaataatatgatggaaaat

SEQ ID NO: 54395 - DNA, 20 bp, synthetic construct
  misc_feature 1..20: note = chemically synthesized
  source 1..20: mol_type = other DNA
taataatatgatggaaaatg

SEQ ID NO: 54396 - DNA, 20 bp, synthetic construct
  misc_feature 1..20: note = chemically synthesized
  source 1..20: mol_type = other DNA
aataatatgatggaaaatga

SEQ ID NO: 54397 - DNA, 20 bp, synthetic construct
  misc_feature 1..20: note = chemically synthesized
  source 1..20: mol_type = other DNA
tatgatggaaaatgagggaa

SEQ ID NO: 54398 - DNA, 20 bp, synthetic construct
  misc_feature 1..20: note = chemically synthesized
  source 1..20: mol_type = other DNA
atggaaaatgagggaataga

SEQ ID NO: 54399 - DNA, 20 bp, synthetic construct
  misc_feature 1..20: note = chemically synthesized
  source 1..20: mol_type = other DNA
atgagggaatagatagattg

SEQ ID NO: 54400 - DNA, 20 bp, synthetic construct
  misc_feature 1..20: note = chemically synthesized
  source 1..20: mol_type = other DNA
gatagattgcagtatgatga

SEQ ID NO: 54401 - DNA, 20 bp, synthetic construct
  misc_feature 1..20: note = chemically synthesized
  source 1..20: mol_type = other DNA
tagattgcagtatgatgaca

SEQ ID NO: 54402 - DNA, 20 bp, synthetic construct
  misc_feature 1..20: note = chemically synthesized
  source 1..20: mol_type = other DNA
agattgcagtatgatgacag

SEQ ID NO: 54403 - DNA, 20 bp, synthetic construct
  misc_feature 1..20: note = chemically synthesized
  source 1..20: mol_type = other DNA
atgacagaggatttgactga

SEQ ID NO: 54404 - DNA, 20 bp, synthetic construct
  misc_feature 1..20: note = chemically synthesized
  source 1..20: mol_type = other DNA
tgacagaggatttgactgaa

SEQ ID NO: 54405 - DNA, 20 bp, synthetic construct
  misc_feature 1..20: note = chemically synthesized
  source 1..20: mol_type = other DNA
cagaggatttgactgaaagg

SEQ ID NO: 54406 - DNA, 20 bp, synthetic construct
  misc_feature 1..20: note = chemically synthesized
  source 1..20: mol_type = other DNA
agaggatttgactgaaaggt

SEQ ID NO: 54407 - DNA, 20 bp, synthetic construct
  misc_feature 1..20: note = chemically synthesized
  source 1..20: mol_type = other DNA
ggatttgactgaaaggtagg

SEQ ID NO: 54408 - DNA, 20 bp, synthetic construct
  misc_feature 1..20: note = chemically synthesized
  source 1..20: mol_type = other DNA
agattttgtatacttgattt

SEQ ID NO: 54409 - DNA, 20 bp, synthetic construct
  misc_feature 1..20: note = chemically synthesized
  source 1..20: mol_type = other DNA
ttttgtatacttgattttag

SEQ ID NO: 54410 - DNA, 20 bp, synthetic construct
  misc_feature 1..20: note = chemically synthesized
  source 1..20: mol_type = other DNA
tgtatacttgattttagcag

SEQ ID NO: 54411 - DNA, 20 bp, synthetic construct
  misc_feature 1..20: note = chemically synthesized
  source 1..20: mol_type = other DNA
gtatacttgattttagcagt

SEQ ID NO: 54412 - DNA, 20 bp, synthetic construct
  misc_feature 1..20: note = chemically synthesized
  source 1..20: mol_type = other DNA
tatacttgattttagcagtg

SEQ ID NO: 54413 - DNA, 20 bp, synthetic construct
  misc_feature 1..20: note = chemically synthesized
  source 1..20: mol_type = other DNA
tacttgattttagcagtggg

SEQ ID NO: 54414 - DNA, 20 bp, synthetic construct
  misc_feature 1..20: note = chemically synthesized
  source 1..20: mol_type = other DNA
gattttagcagtggggagct

SEQ ID NO: 54415 - DNA, 20 bp, synthetic construct
  misc_feature 1..20: note = chemically synthesized
  source 1..20: mol_type = other DNA
atgcaacatgatatcttaaa

SEQ ID NO: 54416 - DNA, 20 bp, synthetic construct
  misc_feature 1..20: note = chemically synthesized
  source 1..20: mol_type = other DNA
tgcaacatgatatcttaaat

SEQ ID NO: 54417 - DNA, 20 bp, synthetic construct
  misc_feature 1..20: note = chemically synthesized
  source 1..20: mol_type = other DNA
tataatcatatatacatata

SEQ ID NO: 54418 - DNA, 20 bp, synthetic construct
  misc_feature 1..20: note = chemically synthesized
  source 1..20: mol_type = other DNA
tatatacatatatagctaca

SEQ ID NO: 54419 - DNA, 20 bp, synthetic construct
  misc_feature 1..20: note = chemically synthesized
  source 1..20: mol_type = other DNA
acatatacatgtcattttga

SEQ ID NO: 54420 - DNA, 20 bp, synthetic construct
  misc_feature 1..20: note = chemically synthesized
  source 1..20: mol_type = other DNA
tgtcattttgacagttaaaa

SEQ ID NO: 54421 - DNA, 20 bp, synthetic construct
  misc_feature 1..20: note = chemically synthesized
  source 1..20: mol_type = other DNA
cattttgacagttaaaatgg

SEQ ID NO: 54422 - DNA, 20 bp, synthetic construct
  misc_feature 1..20: note = chemically synthesized
  source 1..20: mol_type = other DNA
tttgacagttaaaatggtag

SEQ ID NO: 54423 - DNA, 20 bp, synthetic construct
  misc_feature 1..20: note = chemically synthesized
  source 1..20: mol_type = other DNA
acaatctctaaataaacttt

SEQ ID NO: 54424 - DNA, 20 bp, synthetic construct
  misc_feature 1..20: note = chemically synthesized
  source 1..20: mol_type = other DNA
ctctaaataaactttcagtt

SEQ ID NO: 54425 - DNA, 20 bp, synthetic construct
  misc_feature 1..20: note = chemically synthesized
  source 1..20: mol_type = other DNA
taaactttcagttgagcact

SEQ ID NO: 54426 - DNA, 20 bp, synthetic construct
  misc_feature 1..20: note = chemically synthesized
  source 1..20: mol_type = other DNA
gttgagcactcagattctga

SEQ ID NO: 54427 - DNA, 20 bp, synthetic construct
  misc_feature 1..20: note = chemically synthesized
  source 1..20: mol_type = other DNA
ttgagcactcagattctgaa

SEQ ID NO: 54428 - DNA, 20 bp, synthetic construct
  misc_feature 1..20: note = chemically synthesized
  source 1..20: mol_type = other DNA
actcagattctgaaaggatt

SEQ ID NO: 54429 - DNA, 20 bp, synthetic construct
  misc_feature 1..20: note = chemically synthesized
  source 1..20: mol_type = other DNA
ctcagattctgaaaggattt

SEQ ID NO: 54430 - DNA, 20 bp, synthetic construct
  misc_feature 1..20: note = chemically synthesized
  source 1..20: mol_type = other DNA
ttctgaaaggatttaggaaa

SEQ ID NO: 54431 - DNA, 20 bp, synthetic construct
  misc_feature 1..20: note = chemically synthesized
  source 1..20: mol_type = other DNA
aggaaatggctgttgctatg

SEQ ID NO: 54432 - DNA, 20 bp, synthetic construct
  misc_feature 1..20: note = chemically synthesized
  source 1..20: mol_type = other DNA
ctgctgaatttaacattact

SEQ ID NO: 54433 - DNA, 20 bp, synthetic construct
  misc_feature 1..20: note = chemically synthesized
  source 1..20: mol_type = other DNA
acattactgagccattgccc

SEQ ID NO: 54434 - DNA, 20 bp, synthetic construct
  misc_feature 1..20: note = chemically synthesized
  source 1..20: mol_type = other DNA
tgagccattgccctggacat

SEQ ID NO: 54435 - DNA, 20 bp, synthetic construct
  misc_feature 1..20: note = chemically synthesized
  source 1..20: mol_type = other DNA
gccattgccctggacatgag

SEQ ID NO: 54436 - DNA, 20 bp, synthetic construct
  misc_feature 1..20: note = chemically synthesized
  source 1..20: mol_type = other DNA
attgccctggacatgagaag

SEQ ID NO: 54437 - DNA, 20 bp, synthetic construct
  misc_feature 1..20: note = chemically synthesized
  source 1..20: mol_type = other DNA
tgttctactgtctccttaac

SEQ ID NO: 54438 - DNA, 20 bp, synthetic construct
  misc_feature 1..20: note = chemically synthesized
  source 1..20: mol_type = other DNA
ctccttaaccagtaatcctt

SEQ ID NO: 54439 - DNA, 20 bp, synthetic construct
  misc_feature 1..20: note = chemically synthesized
  source 1..20: mol_type = other DNA
cttaaccagtaatccttcag

SEQ ID NO: 54440 - DNA, 20 bp, synthetic construct
  misc_feature 1..20: note = chemically synthesized
  source 1..20: mol_type = other DNA
ttaaccagtaatccttcagc

SEQ ID NO: 54441 - DNA, 20 bp, synthetic construct
  misc_feature 1..20: note = chemically synthesized
  source 1..20: mol_type = other DNA
accagtaatccttcagcagg

SEQ ID NO: 54442 - DNA, 20 bp, synthetic construct
  misc_feature 1..20: note = chemically synthesized
  source 1..20: mol_type = other DNA
ccagtaatccttcagcagga

SEQ ID NO: 54443 - DNA, 20 bp, synthetic construct
  misc_feature 1..20: note = chemically synthesized
  source 1..20: mol_type = other DNA
cagtaatccttcagcaggaa

SEQ ID NO: 54444 - DNA, 20 bp, synthetic construct
  misc_feature 1..20: note = chemically synthesized
  source 1..20: mol_type = other DNA
aatccttcagcaggaaggga

SEQ ID NO: 54445 - DNA, 20 bp, synthetic construct
  misc_feature 1..20: note = chemically synthesized
  source 1..20: mol_type = other DNA
atccttcagcaggaagggaa

SEQ ID NO: 54446 - DNA, 20 bp, synthetic construct
  misc_feature 1..20: note = chemically synthesized
  source 1..20: mol_type = other DNA
tccttcagcaggaagggaaa

SEQ ID NO: 54447 - DNA, 20 bp, synthetic construct
  misc_feature 1..20: note = chemically synthesized
  source 1..20: mol_type = other DNA
tcagcaggaagggaaaggga

SEQ ID NO: 54448 - DNA, 20 bp, synthetic construct
  misc_feature 1..20: note = chemically synthesized
  source 1..20: mol_type = other DNA
cagcaggaagggaaagggaa

SEQ ID NO: 54449 - DNA, 20 bp, synthetic construct
  misc_feature 1..20: note = chemically synthesized
  source 1..20: mol_type = other DNA
agcaggaagggaaagggaaa

SEQ ID NO: 54450 - DNA, 20 bp, synthetic construct
  misc_feature 1..20: note = chemically synthesized
  source 1..20: mol_type = other DNA
ggaagggaaagggaaaggga

SEQ ID NO: 54451 - DNA, 20 bp, synthetic construct
  misc_feature 1..20: note = chemically synthesized
  source 1..20: mol_type = other DNA
gaagggaaagggaaagggaa

SEQ ID NO: 54452 - DNA, 20 bp, synthetic construct
  misc_feature 1..20: note = chemically synthesized
  source 1..20: mol_type = other DNA
aagggaaagggaaagggaaa

SEQ ID NO: 54453 - DNA, 20 bp, synthetic construct
  misc_feature 1..20: note = chemically synthesized
  source 1..20: mol_type = other DNA
gaaagggaaagggaaaggga

SEQ ID NO: 54454 - DNA, 20 bp, synthetic construct
  misc_feature 1..20: note = chemically synthesized
  source 1..20: mol_type = other DNA
aaagggaaagggaaagggaa

SEQ ID NO: 54455 - DNA, 20 bp, synthetic construct
  misc_feature 1..20: note = chemically synthesized
  source 1..20: mol_type = other DNA
aagggaaagggaaagggaaa

SEQ ID NO: 54456 - DNA, 20 bp, synthetic construct
  misc_feature 1..20: note = chemically synthesized
  source 1..20: mol_type = other DNA
gaaagggaaagggaaaggga

SEQ ID NO: 54457 - DNA, 20 bp, synthetic construct
  misc_feature 1..20: note = chemically synthesized
  source 1..20: mol_type = other DNA
aaagggaaagggaaagggaa

SEQ ID NO: 54458 - DNA, 20 bp, synthetic construct
  misc_feature 1..20: note = chemically synthesized
  source 1..20: mol_type = other DNA
aagggaaagggaaagggaaa

SEQ ID NO: 54459 - DNA, 20 bp, synthetic construct
  misc_feature 1..20: note = chemically synthesized
  source 1..20: mol_type = other DNA
gaaagggaaagggaaaggga

SEQ ID NO: 54460 - DNA, 20 bp, synthetic construct
  misc_feature 1..20: note = chemically synthesized
  source 1..20: mol_type = other DNA
aaagggaaagggaaagggaa

SEQ ID NO: 54461 - DNA, 20 bp, synthetic construct
  misc_feature 1..20: note = chemically synthesized
  source 1..20: mol_type = other DNA
aagggaaagggaaagggaaa

SEQ ID NO: 54462 - DNA, 20 bp, synthetic construct
  misc_feature 1..20: note = chemically synthesized
  source 1..20: mol_type = other DNA
gggaaagggaaagggaaagg

SEQ ID NO: 54463 - DNA, 20 bp, synthetic construct
  misc_feature 1..20: note = chemically synthesized
  source 1..20: mol_type = other DNA
ggaaagggaaagggaaaggg

SEQ ID NO: 54464 - DNA, 20 bp, synthetic construct
  misc_feature 1..20: note = chemically synthesized
  source 1..20: mol_type = other DNA
gaaagggaaagggaaaggga

SEQ ID NO: 54465 - DNA, 20 bp, synthetic construct
  misc_feature 1..20: note = chemically synthesized
  source 1..20: mol_type = other DNA
agggaaagggaaagggaggg

SEQ ID NO: 54466 - DNA, 20 bp, synthetic construct
  misc_feature 1..20: note = chemically synthesized
  source 1..20: mol_type = other DNA
gggaaagggaaagggaggga

SEQ ID NO: 54467 - DNA, 20 bp, synthetic construct
  misc_feature 1..20: note = chemically synthesized
  source 1..20: mol_type = other DNA
ggaaagggaaagggagggaa

SEQ ID NO: 54468 - DNA, 20 bp, synthetic construct
  misc_feature 1..20: note = chemically synthesized
  source 1..20: mol_type = other DNA
agggaaagggagggaaggga

SEQ ID NO: 54469 - DNA, 20 bp, synthetic construct
  misc_feature 1..20: note = chemically synthesized
  source 1..20: mol_type = other DNA
gggaaagggagggaagggaa

SEQ ID NO: 54470 - DNA, 20 bp, synthetic construct
  misc_feature 1..20: note = chemically synthesized
  source 1..20: mol_type = other DNA
aagggagggaagggaaagga

SEQ ID NO: 54471 - DNA, 20 bp, synthetic construct
  misc_feature 1..20: note = chemically synthesized
  source 1..20: mol_type = other DNA
agggagggaagggaaaggaa

SEQ ID NO: 54472 - DNA, 20 bp, synthetic construct
  misc_feature 1..20: note = chemically synthesized
  source 1..20: mol_type = other DNA
gggagggaagggaaaggaaa

SEQ ID NO: 54473 - DNA, 20 bp, synthetic construct
  misc_feature 1..20: note = chemically synthesized
  source 1..20: mol_type = other DNA
agggaagggaaaggaaaggg

SEQ ID NO: 54474 - DNA, 20 bp, synthetic construct
  misc_feature 1..20: note = chemically synthesized
  source 1..20: mol_type = other DNA
gggaagggaaaggaaaggga

SEQ ID NO: 54475 - DNA, 20 bp, synthetic construct
  misc_feature 1..20: note = chemically synthesized
  source 1..20: mol_type = other DNA
ggaagggaaaggaaagggaa

SEQ ID NO: 54476 - DNA, 20 bp, synthetic construct
  misc_feature 1..20: note = chemically synthesized
  source 1..20: mol_type = other DNA
agggaaaggaaagggaaggg

SEQ ID NO: 54477 - DNA, 20 bp, synthetic construct
  misc_feature 1..20: note = chemically synthesized
  source 1..20: mol_type = other DNA
gggaaaggaaagggaaggga

SEQ ID NO: 54478 - DNA, 20 bp, synthetic construct
  misc_feature 1..20: note = chemically synthesized
  source 1..20: mol_type = other DNA
aaggaaagggaagggaagga

SEQ ID NO: 54479 - DNA, 20 bp, synthetic construct
  misc_feature 1..20: note = chemically synthesized
  source 1..20: mol_type = other DNA
aggaaagggaagggaaggaa

SEQ ID NO: 54480 - DNA, 20 bp, synthetic construct
  misc_feature 1..20: note = chemically synthesized
  source 1..20: mol_type = other DNA
aagggaagggaaggaaagga

SEQ ID NO: 54481 - DNA, 20 bp, synthetic construct
  misc_feature 1..20: note = chemically synthesized
  source 1..20: mol_type = other DNA
agggaagggaaggaaaggaa

SEQ ID NO: 54482 - DNA, 20 bp, synthetic construct
  misc_feature 1..20: note = chemically synthesized
  source 1..20: mol_type = other DNA
gggaaggaaaggaaaggaaa

SEQ ID NO: 54483 - DNA, 20 bp, synthetic construct
  misc_feature 1..20: note = chemically synthesized
  source 1..20: mol_type = other DNA
ggaaggaaaggaaaggaaaa

SEQ ID NO: 54484 - DNA, 20 bp, synthetic construct
  misc_feature 1..20: note = chemically synthesized
  source 1..20: mol_type = other DNA
ggaaaggaaaggaaaaagga

SEQ ID NO: 54485 - DNA, 20 bp, synthetic construct
  misc_feature 1..20: note = chemically synthesized
  source 1..20: mol_type = other DNA
gaaaggaaaggaaaaaggaa

SEQ ID NO: 54486 - DNA, 20 bp, synthetic construct
  misc_feature 1..20: note = chemically synthesized
  source 1..20: mol_type = other DNA
ggaaaggaaaaaggaaagga

SEQ ID NO: 54487 - DNA, 20 bp, synthetic construct
  misc_feature 1..20: note = chemically synthesized
  source 1..20: mol_type = other DNA
gaaaggaaaaaggaaaggaa

SEQ ID NO: 54488 - DNA, 20 bp, synthetic construct
  misc_feature 1..20: note = chemically synthesized
  source 1..20: mol_type = other DNA
ggaaaaaggaaaggaaagga

SEQ ID NO: 54489 - DNA, 20 bp, synthetic construct
  misc_feature 1..20: note = chemically synthesized
  source 1..20: mol_type = other DNA
gaaaaaggaaaggaaaggaa

SEQ ID NO: 54490 - DNA, 20 bp, synthetic construct
  misc_feature 1..20: note = chemically synthesized
  source 1..20: mol_type = other DNA
aaggaaaggaaaggaaagga

SEQ ID NO: 54491 - DNA, 20 bp, synthetic construct
  misc_feature 1..20: note = chemically synthesized
  source 1..20: mol_type = other DNA
aggaaaggaaaggaaaggaa

SEQ ID NO: 54492 - DNA, 20 bp, synthetic construct
  misc_feature 1..20: note = chemically synthesized
  source 1..20: mol_type = other DNA
aaggaaaggaaaggaaagga

SEQ ID NO: 54493 - DNA, 20 bp, synthetic construct
  misc_feature 1..20: note = chemically synthesized
  source 1..20: mol_type = other DNA
aggaaaggaaaggaaaggaa

SEQ ID NO: 54494 - DNA, 20 bp, synthetic construct
  misc_feature 1..20: note = chemically synthesized
  source 1..20: mol_type = other DNA
aaggaaaggaaaggaaagga

SEQ ID NO: 54495 - DNA, 20 bp, synthetic construct
  misc_feature 1..20: note = chemically synthesized
  source 1..20: mol_type = other DNA
aggaaaggaaaggaaaggaa

SEQ ID NO: 54496 - DNA, 20 bp, synthetic construct
  misc_feature 1..20: note = chemically synthesized
  source 1..20: mol_type = other DNA
aaggaaaggaaaggaaagga

SEQ ID NO: 54497 - DNA, 20 bp, synthetic construct
  misc_feature 1..20: note = chemically synthesized
  source 1..20: mol_type = other DNA
aggaaaggaaaggaaaggaa

SEQ ID NO: 54498 - DNA, 20 bp, synthetic construct
  misc_feature 1..20: note = chemically synthesized
  source 1..20: mol_type = other DNA
aaggaaaggaaaggaaagga

SEQ ID NO: 54499 - DNA, 20 bp, synthetic construct
  misc_feature 1..20: note = chemically synthesized
  source 1..20: mol_type = other DNA
aggaaaggaaaggaaaggaa

SEQ ID NO: 54500 - DNA, 20 bp, synthetic construct
  misc_feature 1..20: note = chemically synthesized
  source 1..20: mol_type = other DNA
aggaaaggaaaggtccaaaa

SEQ ID NO: 54501 - DNA, 20 bp, synthetic construct
  misc_feature 1..20: note = chemically synthesized
  source 1..20: mol_type = other DNA
ggaaaggaaaggtccaaaaa

SEQ ID NO: 54502 - DNA, 20 bp, synthetic construct
  misc_feature 1..20: note = chemically synthesized
  source 1..20: mol_type = other DNA
gaaaggaaaggtccaaaaaa

SEQ ID NO: 54503 - DNA, 20 bp, synthetic construct
  misc_feature 1..20: note = chemically synthesized
  source 1..20: mol_type = other DNA
aggaaaggtccaaaaaaggg

SEQ ID NO: 54504 - DNA, 20 bp, synthetic construct
  misc_feature 1..20: note = chemically synthesized
  source 1..20: mol_type = other DNA
gcagaaaccaaacaatttta

SEQ ID NO: 54505 - DNA, 20 bp, synthetic construct
  misc_feature 1..20: note = chemically synthesized
  source 1..20: mol_type = other DNA
gaaaccaaacaattttaaag

SEQ ID NO: 54506 - DNA, 20 bp, synthetic construct
  misc_feature 1..20: note = chemically synthesized
  source 1..20: mol_type = other DNA
aaaccaaacaattttaaagc

SEQ ID NO: 54507 - DNA, 20 bp, synthetic construct
  misc_feature 1..20: note = chemically synthesized
  source 1..20: mol_type = other DNA
aaccaaacaattttaaagca

SEQ ID NO: 54508 - DNA, 20 bp, synthetic construct
  misc_feature 1..20: note = chemically synthesized
  source 1..20: mol_type = other DNA
ccaaacaattttaaagcagg

SEQ ID NO: 54509 - DNA, 20 bp, synthetic construct
  misc_feature 1..20: note = chemically synthesized
  source 1..20: mol_type = other DNA
aattttaaagcagggagttt

SEQ ID NO: 54510 - DNA, 20 bp, synthetic construct
  misc_feature 1..20: note = chemically synthesized
  source 1..20: mol_type = other DNA
tttaaagcagggagttttgg

SEQ ID NO: 54511 - DNA, 20 bp, synthetic construct
  misc_feature 1..20: note = chemically synthesized
  source 1..20: mol_type = other DNA
cagggagttttggaagcact

SEQ ID NO: 54512 - DNA, 20 bp, synthetic construct
  misc_feature 1..20: note = chemically synthesized
  source 1..20: mol_type = other DNA
gcacttagctaaaactgata

SEQ ID NO: 54513 - DNA, 20 bp, synthetic construct
  misc_feature 1..20: note = chemically synthesized
  source 1..20: mol_type = other DNA
ctaaaactgatatggtgttc

SEQ ID NO: 54514 - DNA, 20 bp, synthetic construct
  misc_feature 1..20: note = chemically synthesized
  source 1..20: mol_type = other DNA
aactgatatggtgttctaga

SEQ ID NO: 54515 - DNA, 20 bp, synthetic construct
  misc_feature 1..20: note = chemically synthesized
  source 1..20: mol_type = other DNA
tatggtgttctagacagaat

SEQ ID NO: 54516 - DNA, 20 bp, synthetic construct
  misc_feature 1..20: note = chemically synthesized
  source 1..20: mol_type = other DNA
ttagcaaaaacaaaaaacaa

SEQ ID NO: 54517 - DNA, 20 bp, synthetic construct
  misc_feature 1..20: note = chemically synthesized
  source 1..20: mol_type = other DNA
tagcaaaaacaaaaaacaaa

SEQ ID NO: 54518 - DNA, 20 bp, synthetic construct
  misc_feature 1..20: note = chemically synthesized
  source 1..20: mol_type = other DNA
aaaacaaaaaacaaaaggta

SEQ ID NO: 54519 - DNA, 20 bp, synthetic construct
  misc_feature 1..20: note = chemically synthesized
  source 1..20: mol_type = other DNA
aaacaaaaaacaaaaggtac

SEQ ID NO: 54520 - DNA, 20 bp, synthetic construct
  misc_feature 1..20: note = chemically synthesized
  source 1..20: mol_type = other DNA
aacaaaaaacaaaaggtaca

SEQ ID NO: 54521 - DNA, 20 bp, synthetic construct
  misc_feature 1..20: note = chemically synthesized
  source 1..20: mol_type = other DNA
aacaaaaggtacagggtgct

SEQ ID NO: 54522 - DNA, 20 bp, synthetic construct
  misc_feature 1..20: note = chemically synthesized
  source 1..20: mol_type = other DNA
cagggtgctaagtgattgat

SEQ ID NO: 54523 - DNA, 20 bp, synthetic construct
  misc_feature 1..20: note = chemically synthesized
  source 1..20: mol_type = other DNA
agggtgctaagtgattgata

SEQ ID NO: 54524 - DNA, 20 bp, synthetic construct
  misc_feature 1..20: note = chemically synthesized
  source 1..20: mol_type = other DNA
tgctaagtgattgataaggt

SEQ ID NO: 54525 - DNA, 20 bp, synthetic construct
  misc_feature 1..20: note = chemically synthesized
  source 1..20: mol_type = other DNA
agtgattgataaggtgagaa

SEQ ID NO: 54526 - DNA, 20 bp, synthetic construct
  misc_feature 1..20: note = chemically synthesized
  source 1..20: mol_type = other DNA
gtgagaatagtatttcaaat

SEQ ID NO: 54527 - DNA, 20 bp, synthetic construct
  misc_feature 1..20: note = chemically synthesized
  source 1..20: mol_type = other DNA
gaatagtatttcaaatgagc

SEQ ID NO: 54528 - DNA, 20 bp, synthetic construct
  misc_feature 1..20: note = chemically synthesized
  source 1..20: mol_type = other DNA
atagtatttcaaatgagcaa

SEQ ID NO: 54529 - DNA, 20 bp, synthetic construct
  misc_feature 1..20: note = chemically synthesized
  source 1..20: mol_type = other DNA
ttcaaatgagcaagagatcc

SEQ ID NO: 54530 - DNA, 20 bp, synthetic construct
  misc_feature 1..20: note = chemically synthesized
  source 1..20: mol_type = other DNA
atgagcaagagatccaagac

SEQ ID NO: 54531 - DNA, 20 bp, synthetic construct
  misc_feature 1..20: note = chemically synthesized
  source 1..20: mol_type = other DNA
atccaagaccagtaccacta

SEQ ID NO: 54532 - DNA, 20 bp, synthetic construct
  misc_feature 1..20: note = chemically synthesized
  source 1..20: mol_type = other DNA
cagactattgttttataact

SEQ ID NO: 54533 - DNA, 20 bp, synthetic construct
  misc_feature 1..20: note = chemically synthesized
  source 1..20: mol_type = other DNA
agactattgttttataactg

SEQ ID NO: 54534 - DNA, 20 bp, synthetic construct
  misc_feature 1..20: note = chemically synthesized
  source 1..20: mol_type = other DNA
ttgttttataactgaggtct

SEQ ID NO: 54535 - DNA, 20 bp, synthetic construct
  misc_feature 1..20: note = chemically synthesized
  source 1..20: mol_type = other DNA
ggtcttagttaatatcaatc

SEQ ID NO: 54536 - DNA, 20 bp, synthetic construct
  misc_feature 1..20: note = chemically synthesized
  source 1..20: mol_type = other DNA
atcaagcaaaattttgattt

SEQ ID NO: 54537 - DNA, 20 bp, synthetic construct
  misc_feature 1..20: note = chemically synthesized
  source 1..20: mol_type = other DNA
tcaagcaaaattttgatttc

SEQ ID NO: 54538 - DNA, 20 bp, synthetic construct
  misc_feature 1..20: note = chemically synthesized
  source 1..20: mol_type = other DNA
caagcaaaattttgatttcg

SEQ ID NO: 54539 - DNA, 20 bp, synthetic construct
  misc_feature 1..20: note = chemically synthesized
  source 1..20: mol_type = other DNA
aagcaaaattttgatttcgg

SEQ ID NO: 54540 - DNA, 20 bp, synthetic construct
  misc_feature 1..20: note = chemically synthesized
  source 1..20: mol_type = other DNA
agcaaaattttgatttcggg

SEQ ID NO: 54541 - DNA, 20 bp, synthetic construct
  misc_feature 1..20: note = chemically synthesized
  source 1..20: mol_type = other DNA
caaaattttgatttcggggg

SEQ ID NO: 54542 - DNA, 20 bp, synthetic construct
  misc_feature 1..20: note = chemically synthesized
  source 1..20: mol_type = other DNA
ttgatttcggggggagaaaa

SEQ ID NO: 54543 - DNA, 20 bp, synthetic construct
  misc_feature 1..20: note = chemically synthesized
  source 1..20: mol_type = other DNA
aaaaagaccaaattgtaatc

SEQ ID NO: 54544 - DNA, 20 bp, synthetic construct
  misc_feature 1..20: note = chemically synthesized
  source 1..20: mol_type = other DNA
aaaagaccaaattgtaatct

SEQ ID NO: 54545 - DNA, 20 bp, synthetic construct
  misc_feature 1..20: note = chemically synthesized
  source 1..20: mol_type = other DNA
aaagaccaaattgtaatctg

SEQ ID NO: 54546 - DNA, 20 bp, synthetic construct
  misc_feature 1..20: note = chemically synthesized
  source 1..20: mol_type = other DNA
tgtatatgatatgatcattt

SEQ ID NO: 54547 - DNA, 20 bp, synthetic construct
  misc_feature 1..20: note = chemically synthesized
  source 1..20: mol_type = other DNA
tgatatgatcatttaagtat

SEQ ID NO: 54548 - DNA, 20 bp, synthetic construct
  misc_feature 1..20: note = chemically synthesized
  source 1..20: mol_type = other DNA
tttaagtataagtcacctga

SEQ ID NO: 54549 - DNA, 20 bp, synthetic construct
  misc_feature 1..20: note = chemically synthesized
  source 1..20: mol_type = other DNA
ataagtcacctgaaagtaaa

SEQ ID NO: 54550 - DNA, 20 bp, synthetic construct
  misc_feature 1..20: note = chemically synthesized
  source 1..20: mol_type = other DNA
aagtcacctgaaagtaaaaa

SEQ ID NO: 54551 - DNA, 20 bp, synthetic construct
  misc_feature 1..20: note = chemically synthesized
  source 1..20: mol_type = other DNA
gaaagtaaaaagagttatat

SEQ ID NO: 54552 - DNA, 20 bp, synthetic construct
  misc_feature 1..20: note = chemically synthesized
  source 1..20: mol_type = other DNA
aaagtaaaaagagttatata

SEQ ID NO: 54553 - DNA, 20 bp, synthetic construct
  misc_feature 1..20: note = chemically synthesized
  source 1..20: mol_type = other DNA
ataatgttttatgcaactgc

SEQ ID NO: 54554 - DNA, 20 bp, synthetic construct
  misc_feature 1..20: note = chemically synthesized
  source 1..20: mol_type = other DNA
tatgcaactgcaagaaccaa

SEQ ID NO: 54555 - DNA, 20 bp, synthetic construct
  misc_feature 1..20: note = chemically synthesized
  source 1..20: mol_type = other DNA
atgcaactgcaagaaccaat

SEQ ID NO: 54556 - DNA, 20 bp, synthetic construct
  misc_feature 1..20: note = chemically synthesized
  source 1..20: mol_type = other DNA
tgcaagaaccaataggaaaa

SEQ ID NO: 54557 - DNA, 20 bp, synthetic construct
  misc_feature 1..20: note = chemically synthesized
  source 1..20: mol_type = other DNA
gaaccaataggaaaatagaa

SEQ ID NO: 54558 - DNA, 20 bp, synthetic construct
  misc_feature 1..20: note = chemically synthesized
  source 1..20: mol_type = other DNA
aaccaataggaaaatagaat

SEQ ID NO: 54559 - DNA, 20 bp, synthetic construct
  misc_feature 1..20: note = chemically synthesized
  source 1..20: mol_type = other DNA
tgtcacattcaaaatgatga

SEQ ID NO: 54560 - DNA, 20 bp, synthetic construct
  misc_feature 1..20: note = chemically synthesized
  source 1..20: mol_type = other DNA
tcacattcaaaatgatgata

SEQ ID NO: 54561 - DNA, 20 bp, synthetic construct
  misc_feature 1..20: note = chemically synthesized
  source 1..20: mol_type = other DNA
cacattcaaaatgatgatag

SEQ ID NO: 54562 - DNA, 20 bp, synthetic construct
  misc_feature 1..20: note = chemically synthesized
  source 1..20: mol_type = other DNA
ttcaaaatgatgatagaggc

SEQ ID NO: 54563 - DNA, 20 bp, synthetic construct
  misc_feature 1..20: note = chemically synthesized
  source 1..20: mol_type = other DNA
atgatgatagaggccagacg

SEQ ID NO: 54564 - DNA, 20 bp, synthetic construct
  misc_feature 1..20: note = chemically synthesized
  source 1..20: mol_type = other DNA
atgatagaggccagacgtgg

SEQ ID NO: 54565 - DNA, 20 bp, synthetic construct
  misc_feature 1..20: note = chemically synthesized
  source 1..20: mol_type = other DNA
gtggcgcacacctgtaatcc

SEQ ID NO: 54566 - DNA, 20 bp, synthetic construct
  misc_feature 1..20: note = chemically synthesized
  source 1..20: mol_type = other DNA
cacctgtaatcccagctaca

SEQ ID NO: 54567 - DNA, 20 bp, synthetic construct
  misc_feature 1..20: note = chemically synthesized
  source 1..20: mol_type = other DNA
acctgtaatcccagctacat

SEQ ID NO: 54568 - DNA, 20 bp, synthetic construct
  misc_feature 1..20: note = chemically synthesized
  source 1..20: mol_type = other DNA
ctgtaatcccagctacatgg

SEQ ID NO: 54569 - DNA, 20 bp, synthetic construct
  misc_feature 1..20: note = chemically synthesized
  source 1..20: mol_type = other DNA
tgtaatcccagctacatggg

SEQ ID NO: 54570 - DNA, 20 bp, synthetic construct
  misc_feature 1..20: note = chemically synthesized
  source 1..20: mol_type = other DNA
tcccagctacatgggaggct

SEQ ID NO: 54571 - DNA, 20 bp, synthetic construct
  misc_feature 1..20: note = chemically synthesized
  source 1..20: mol_type = other DNA
cccagctacatgggaggctg

SEQ ID NO: 54572 - DNA, 20 bp, synthetic construct
  misc_feature 1..20: note = chemically synthesized
  source 1..20: mol_type = other DNA
agctacatgggaggctgagg

SEQ ID NO: 54573 - DNA, 20 bp, synthetic construct
  misc_feature 1..20: note = chemically synthesized
  source 1..20: mol_type = other DNA
gctacatgggaggctgaggc

SEQ ID NO: 54574 - DNA, 20 bp, synthetic construct
  misc_feature 1..20: note = chemically synthesized
  source 1..20: mol_type = other DNA
tacatgggaggctgaggcag

SEQ ID NO: 54575 - DNA, 20 bp, synthetic construct
  misc_feature 1..20: note = chemically synthesized
  source 1..20: mol_type = other DNA
caggagaatgatttgaattc

SEQ ID NO: 54576 - DNA, 20 bp, synthetic construct
  misc_feature 1..20: note = chemically synthesized
  source 1..20: mol_type = other DNA
ggagaatgatttgaattctg

SEQ ID NO: 54577 - DNA, 20 bp, synthetic construct
  misc_feature 1..20: note = chemically synthesized
  source 1..20: mol_type = other DNA
gagaatgatttgaattctgg

SEQ ID NO: 54578 - DNA, 20 bp, synthetic construct
  misc_feature 1..20: note = chemically synthesized
  source 1..20: mol_type = other DNA
aatgatttgaattctggagg

SEQ ID NO: 54579 - DNA, 20 bp, synthetic construct
  misc_feature 1..20: note = chemically synthesized
  source 1..20: mol_type = other DNA
tgatttgaattctggaggcg

SEQ ID NO: 54580 - DNA, 20 bp, synthetic construct
  misc_feature 1..20: note = chemically synthesized
  source 1..20: mol_type = other DNA
gatttgaattctggaggcgg

SEQ ID NO: 54581 - DNA, 20 bp, synthetic construct
  misc_feature 1..20: note = chemically synthesized
  source 1..20: mol_type = other DNA
aattctggaggcggaggttg

SEQ ID NO: 54582 - DNA, 20 bp, synthetic construct
  misc_feature 1..20: note = chemically synthesized
  source 1..20: mol_type = other DNA
ctggaggcggaggttgcagt

SEQ ID NO: 54583 - DNA, 20 bp, synthetic construct
  misc_feature 1..20: note = chemically synthesized
  source 1..20: mol_type = other DNA
ggcggaggttgcagtgagcc

SEQ ID NO: 54584 - DNA, 20 bp, synthetic construct
  misc_feature 1..20: note = chemically synthesized
  source 1..20: mol_type = other DNA
gagatcgcgtcacctcactc

SEQ ID NO: 54585 - DNA, 20 bp, synthetic construct
  misc_feature 1..20: note = chemically synthesized
  source 1..20: mol_type = other DNA
cgcgtcacctcactctagcc

SEQ ID NO: 54586 - DNA, 20 bp, synthetic construct
  misc_feature 1..20: note = chemically synthesized
  source 1..20: mol_type = other DNA
cctcactctagcctggacca

SEQ ID NO: 54587 - DNA, 20 bp, synthetic construct
  misc_feature 1..20: note = chemically synthesized
  source 1..20: mol_type = other DNA
tcactctagcctggaccaca

SEQ ID NO: 54588 - DNA, 20 bp, synthetic construct
  misc_feature 1..20: note = chemically synthesized
  source 1..20: mol_type = other DNA
actctagcctggaccacaga

SEQ ID NO: 54589 - DNA, 20 bp, synthetic construct
  misc_feature 1..20: note = chemically synthesized
  source 1..20: mol_type = other DNA
tctagcctggaccacagaga

SEQ ID NO: 54590 - DNA, 20 bp, synthetic construct
  misc_feature 1..20: note = chemically synthesized
  source 1..20: mol_type = other DNA
atacgtaaaacaaaaacaaa

SEQ ID NO: 54591 - DNA, 20 bp, synthetic construct
  misc_feature 1..20: note = chemically synthesized
  source 1..20: mol_type = other DNA
aataaaacccaaaatgataa

SEQ ID NO: 54592 - DNA, 20 bp, synthetic construct
  misc_feature 1..20: note = chemically synthesized
  source 1..20: mol_type = other DNA
gtttattgtaacaattctct

SEQ ID NO: 54593 - DNA, 20 bp, synthetic construct
  misc_feature 1..20: note = chemically synthesized
  source 1..20: mol_type = other DNA
tttccatttttattgtgata

SEQ ID NO: 54594 - DNA, 20 bp, synthetic construct
  misc_feature 1..20: note = chemically synthesized
  source 1..20: mol_type = other DNA
accgtatatcatatataata

SEQ ID NO: 54595 - DNA, 20 bp, synthetic construct
  misc_feature 1..20: note = chemically synthesized
  source 1..20: mol_type = other DNA
tcaccatattaaccattttt

SEQ ID NO: 54596 - DNA, 20 bp, synthetic construct
  misc_feature 1..20: note = chemically synthesized
  source 1..20: mol_type = other DNA
catttttaagtataattatg

SEQ ID NO: 54597 - DNA, 20 bp, synthetic construct
  misc_feature 1..20: note = chemically synthesized
  source 1..20: mol_type = other DNA
ccaaaactttttcatcatcc

SEQ ID NO: 54598 - DNA, 20 bp, synthetic construct
  misc_feature 1..20: note = chemically synthesized
  source 1..20: mol_type = other DNA
aaactttttcatcatccaag

SEQ ID NO: 54599 - DNA, 20 bp, synthetic construct
  misc_feature 1..20: note = chemically synthesized
  source 1..20: mol_type = other DNA
agcagaaatgctatacttgt

SEQ ID NO: 54600 - DNA, 20 bp, synthetic construct
  misc_feature 1..20: note = chemically synthesized
  source 1..20: mol_type = other DNA
gcagaaatgctatacttgtt

SEQ ID NO: 54601 - DNA, 20 bp, synthetic construct
  misc_feature 1..20: note = chemically synthesized
  source 1..20: mol_type = other DNA
gaaatgctatacttgttagg

SEQ ID NO: 54602 - DNA, 20 bp, synthetic construct
  misc_feature 1..20: note = chemically synthesized
  source 1..20: mol_type = other DNA
cttgttaggcagtaactccc

SEQ ID NO: 54603 - DNA, 20 bp, synthetic construct
  misc_feature 1..20: note = chemically synthesized
  source 1..20: mol_type = other DNA
gcagtaactccccagtccca

SEQ ID NO: 54604 - DNA, 20 bp, synthetic construct
  misc_feature 1..20: note = chemically synthesized
  source 1..20: mol_type = other DNA
tactatatgtttctctaaat

SEQ ID NO: 54605 - DNA, 20 bp, synthetic construct
  misc_feature 1..20: note = chemically synthesized
  source 1..20: mol_type = other DNA
ttctctaaatcagtctattt

SEQ ID NO: 54606 - DNA, 20 bp, synthetic construct
  misc_feature 1..20: note = chemically synthesized
  source 1..20: mol_type = other DNA
ttttagataattcatataaa

SEQ ID NO: 54607 - DNA, 20 bp, synthetic construct
  misc_feature 1..20: note = chemically synthesized
  source 1..20: mol_type = other DNA
aatatttgttgttttgtgtc

SEQ ID NO: 54608 - DNA, 20 bp, synthetic construct
  misc_feature 1..20: note = chemically synthesized
  source 1..20: mol_type = other DNA
tggcttattttacccaacat

SEQ ID NO: 54609 - DNA, 20 bp, synthetic construct
  misc_feature 1..20: note = chemically synthesized
  source 1..20: mol_type = other DNA
ggcttattttacccaacata

SEQ ID NO: 54610 - DNA, 20 bp, synthetic construct
  misc_feature 1..20: note = chemically synthesized
  source 1..20: mol_type = other DNA
ttacccaacataaggtttca

SEQ ID NO: 54611 - DNA, 20 bp, synthetic construct
  misc_feature 1..20: note = chemically synthesized
  source 1..20: mol_type = other DNA
catccatgccataacatgta

SEQ ID NO: 54612 - DNA, 20 bp, synthetic construct
  misc_feature 1..20: note = chemically synthesized
  source 1..20: mol_type = other DNA
ccatgccataacatgtatag

SEQ ID NO: 54613 - DNA, 20 bp, synthetic construct
  misc_feature 1..20: note = chemically synthesized
  source 1..20: mol_type = other DNA
gccataacatgtatagtggt

SEQ ID NO: 54614 - DNA, 20 bp, synthetic construct
  misc_feature 1..20: note = chemically synthesized
  source 1..20: mol_type = other DNA
tgcttaatgttgtccattca

SEQ ID NO: 54615 - DNA, 20 bp, synthetic construct
  misc_feature 1..20: note = chemically synthesized
  source 1..20: mol_type = other DNA
gttgtccattcatagattct

SEQ ID NO: 54616 - DNA, 20 bp, synthetic construct
  misc_feature 1..20: note = chemically synthesized
  source 1..20: mol_type = other DNA
ttcttggaaactgaaacttt

SEQ ID NO: 54617 - DNA, 20 bp, synthetic construct
  misc_feature 1..20: note = chemically synthesized
  source 1..20: mol_type = other DNA
ggaaactgaaactttaagcc

SEQ ID NO: 54618 - DNA, 20 bp, synthetic construct
  misc_feature 1..20: note = chemically synthesized
  source 1..20: mol_type = other DNA
ccattttttttctcatctaa

SEQ ID NO: 54619 - DNA, 20 bp, synthetic construct
  misc_feature 1..20: note = chemically synthesized
  source 1..20: mol_type = other DNA
tttttctcatctaacagtgt

SEQ ID NO: 54620 - DNA, 20 bp, synthetic construct
  misc_feature 1..20: note = chemically synthesized
  source 1..20: mol_type = other DNA
tctaacagtgttggctaaaa

SEQ ID NO: 54621 - DNA, 20 bp, synthetic construct
  misc_feature 1..20: note = chemically synthesized
  source 1..20: mol_type = other DNA
tggctaaaacagtgttattt

SEQ ID NO: 54622 - DNA, 20 bp, synthetic construct
  misc_feature 1..20: note = chemically synthesized
  source 1..20: mol_type = other DNA
ggctaaaacagtgttatttg

SEQ ID NO: 54623 - DNA, 20 bp, synthetic construct
  misc_feature 1..20: note = chemically synthesized
  source 1..20: mol_type = other DNA
gttttacatcatttcactta

SEQ ID NO: 54624 - DNA, 20 bp, synthetic construct
  misc_feature 1..20: note = chemically synthesized
  source 1..20: mol_type = other DNA
acctattcatgacattaaat

SEQ ID NO: 54625 - DNA, 20 bp, synthetic construct
  misc_feature 1..20: note = chemically synthesized
  source 1..20: mol_type = other DNA
cctattcatgacattaaata

SEQ ID NO: 54626 - DNA, 20 bp, synthetic construct
  misc_feature 1..20: note = chemically synthesized
  source 1..20: mol_type = other DNA
tcatctgtttatgtacattc

SEQ ID NO: 54627 - DNA, 20 bp, synthetic construct
  misc_feature 1..20: note = chemically synthesized
  source 1..20: mol_type = other DNA
ttctggttgtttccaccttt

SEQ ID NO: 54628 - DNA, 20 bp, synthetic construct
  misc_feature 1..20: note = chemically synthesized
  source 1..20: mol_type = other DNA
taatgctacaatgaacattt

SEQ ID NO: 54629 - DNA, 20 bp, synthetic construct
  misc_feature 1..20: note = chemically synthesized
  source 1..20: mol_type = other DNA
tacaatgaacatttcagtac

SEQ ID NO: 54630 - DNA, 20 bp, synthetic construct
  misc_feature 1..20: note = chemically synthesized
  source 1..20: mol_type = other DNA
atatatttttaatatatacc

SEQ ID NO: 54631 - DNA, 20 bp, synthetic construct
  misc_feature 1..20: note = chemically synthesized
  source 1..20: mol_type = other DNA
tatatttttaatatatacct

SEQ ID NO: 54632 - DNA, 20 bp, synthetic construct
  misc_feature 1..20: note = chemically synthesized
  source 1..20: mol_type = other DNA
tatttttaatatatacctag

SEQ ID NO: 54633 - DNA, 20 bp, synthetic construct
  misc_feature 1..20: note = chemically synthesized
  source 1..20: mol_type = other DNA
tttttaatatatacctagga

SEQ ID NO: 54634 - DNA, 20 bp, synthetic construct
  misc_feature 1..20: note = chemically synthesized
  source 1..20: mol_type = other DNA
ttttaatatatacctaggag

SEQ ID NO: 54635 - DNA, 20 bp, synthetic construct
  misc_feature 1..20: note = chemically synthesized
  source 1..20: mol_type = other DNA
tatacctaggagaggaattt

SEQ ID NO: 54636 - DNA, 20 bp, synthetic construct
  misc_feature 1..20: note = chemically synthesized
  source 1..20: mol_type = other DNA
atacctaggagaggaatttt

SEQ ID NO: 54637 - DNA, 20 bp, synthetic construct
  misc_feature 1..20: note = chemically synthesized
  source 1..20: mol_type = other DNA
tacctaggagaggaattttg

SEQ ID NO: 54638 - DNA, 20 bp, synthetic construct
  misc_feature 1..20: note = chemically synthesized
  source 1..20: mol_type = other DNA
ttttggggtcatatgttatt

SEQ ID NO: 54639 - DNA, 20 bp, synthetic construct
  misc_feature 1..20: note = chemically synthesized
  source 1..20: mol_type = other DNA
tcatatgttattcagtgcct

SEQ ID NO: 54640 - DNA, 20 bp, synthetic construct
  misc_feature 1..20: note = chemically synthesized
  source 1..20: mol_type = other DNA
attcagtgcctaagtttttg

SEQ ID NO: 54641 - DNA, 20 bp, synthetic construct
  misc_feature 1..20: note = chemically synthesized
  source 1..20: mol_type = other DNA
aactgtcaaaatattttcta

SEQ ID NO: 54642 - DNA, 20 bp, synthetic construct
  misc_feature 1..20: note = chemically synthesized
  source 1..20: mol_type = other DNA
tgtcaaaatattttctacag

SEQ ID NO: 54643 - DNA, 20 bp, synthetic construct
  misc_feature 1..20: note = chemically synthesized
  source 1..20: mol_type = other DNA
gttgcaccacttaacatttt

SEQ ID NO: 54644 - DNA, 20 bp, synthetic construct
  misc_feature 1..20: note = chemically synthesized
  source 1..20: mol_type = other DNA
gcaccacttaacatttttag

SEQ ID NO: 54645 - DNA, 20 bp, synthetic construct
  misc_feature 1..20: note = chemically synthesized
  source 1..20: mol_type = other DNA
catttttagcagcaatatat

SEQ ID NO: 54646 - DNA, 20 bp, synthetic construct
  misc_feature 1..20: note = chemically synthesized
  source 1..20: mol_type = other DNA
atttttagcagcaatatatg

SEQ ID NO: 54647 - DNA, 20 bp, synthetic construct
  misc_feature 1..20: note = chemically synthesized
  source 1..20: mol_type = other DNA
catttgttttgtttctctta

SEQ ID NO: 54648 - DNA, 20 bp, synthetic construct
  misc_feature 1..20: note = chemically synthesized
  source 1..20: mol_type = other DNA
gttttgtttctcttaaagta

SEQ ID NO: 54649 - DNA, 20 bp, synthetic construct
  misc_feature 1..20: note = chemically synthesized
  source 1..20: mol_type = other DNA
ctcttaaagtatagacattc

SEQ ID NO: 54650 - DNA, 20 bp, synthetic construct
  misc_feature 1..20: note = chemically synthesized
  source 1..20: mol_type = other DNA
taaagtatagacattctagt

SEQ ID NO: 54651 - DNA, 20 bp, synthetic construct
  misc_feature 1..20: note = chemically synthesized
  source 1..20: mol_type = other DNA
tagacattctagtaagtttg

SEQ ID NO: 54652 - DNA, 20 bp, synthetic construct
  misc_feature 1..20: note = chemically synthesized
  source 1..20: mol_type = other DNA
acattctagtaagtttgaag

SEQ ID NO: 54653 - DNA, 20 bp, synthetic construct
  misc_feature 1..20: note = chemically synthesized
  source 1..20: mol_type = other DNA
tttgaagtagtgtcttattg

SEQ ID NO: 54654 - DNA, 20 bp, synthetic construct
  misc_feature 1..20: note = chemically synthesized
  source 1..20: mol_type = other DNA
gtagtgtcttattgtggttt

SEQ ID NO: 54655 - DNA, 20 bp, synthetic construct
  misc_feature 1..20: note = chemically synthesized
  source 1..20: mol_type = other DNA
tcatttgtatatcttctttc

SEQ ID NO: 54656 - DNA, 20 bp, synthetic construct
  misc_feature 1..20: note = chemically synthesized
  source 1..20: mol_type = other DNA
catttgcatatttttaaatt

SEQ ID NO: 54657 - DNA, 20 bp, synthetic construct
  misc_feature 1..20: note = chemically synthesized
  source 1..20: mol_type = other DNA
ttgtttgtctttttgttttt

SEQ ID NO: 54658 - DNA, 20 bp, synthetic construct
  misc_feature 1..20: note = chemically synthesized
  source 1..20: mol_type = other DNA
gtctttttgtttttgagttg

SEQ ID NO: 54659 - DNA, 20 bp, synthetic construct
  misc_feature 1..20: note = chemically synthesized
  source 1..20: mol_type = other DNA
tctttttgtttttgagttgt

SEQ ID NO: 54660 - DNA, 20 bp, synthetic construct
  misc_feature 1..20: note = chemically synthesized
  source 1..20: mol_type = other DNA
taggactttttcatacattc

SEQ ID NO: 54661 - DNA, 20 bp, synthetic construct
  misc_feature 1..20: note = chemically synthesized
  source 1..20: mol_type = other DNA
tatgaaatacataatttgca

SEQ ID NO: 54662 - DNA, 20 bp, synthetic construct
  misc_feature 1..20: note = chemically synthesized
  source 1..20: mol_type = other DNA
aaagatgttctctcatctta

SEQ ID NO: 54663 - DNA, 20 bp, synthetic construct
  misc_feature 1..20: note = chemically synthesized
  source 1..20: mol_type = other DNA
aagatgttctctcatcttat

SEQ ID NO: 54664 - DNA, 20 bp, synthetic construct
  misc_feature 1..20: note = chemically synthesized
  source 1..20: mol_type = other DNA
gttgtctttttactttctta

SEQ ID NO: 54665 - DNA, 20 bp, synthetic construct
  misc_feature 1..20: note = chemically synthesized
  source 1..20: mol_type = other DNA
atactttttgtgtcatatct

SEQ ID NO: 54666 - DNA, 20 bp, synthetic construct
  misc_feature 1..20: note = chemically synthesized
  source 1..20: mol_type = other DNA
aagaatctattgtaaaatca

SEQ ID NO: 54667 - DNA, 20 bp, synthetic construct
  misc_feature 1..20: note = chemically synthesized
  source 1..20: mol_type = other DNA
ttgtaaaatcaaagttcatg

SEQ ID NO: 54668 - DNA, 20 bp, synthetic construct
  misc_feature 1..20: note = chemically synthesized
  source 1..20: mol_type = other DNA
atttacccatgcttccttcc

SEQ ID NO: 54669 - DNA, 20 bp, synthetic construct
  misc_feature 1..20: note = chemically synthesized
  source 1..20: mol_type = other DNA
tttacccatgcttccttccg

SEQ ID NO: 54670 - DNA, 20 bp, synthetic construct
  misc_feature 1..20: note = chemically synthesized
  source 1..20: mol_type = other DNA
ttacccatgcttccttccga

SEQ ID NO: 54671 - DNA, 20 bp, synthetic construct
  misc_feature 1..20: note = chemically synthesized
  source 1..20: mol_type = other DNA
gcttccttccgagggtgtta

SEQ ID NO: 54672 - DNA, 20 bp, synthetic construct
  misc_feature 1..20: note = chemically synthesized
  source 1..20: mol_type = other DNA
ttccgagggtgttatggctt

SEQ ID NO: 54673 - DNA, 20 bp, synthetic construct
  misc_feature 1..20: note = chemically synthesized
  source 1..20: mol_type = other DNA
gttatggctttagttcaatt

SEQ ID NO: 54674 - DNA, 20 bp, synthetic construct
  misc_feature 1..20: note = chemically synthesized
  source 1..20: mol_type = other DNA
ttatggctttagttcaattt

SEQ ID NO: 54675 - DNA, 20 bp, synthetic construct
  misc_feature 1..20: note = chemically synthesized
  source 1..20: mol_type = other DNA
tacacaatttttatgcatgc

SEQ ID NO: 54676 - DNA, 20 bp, synthetic construct
  misc_feature 1..20: note = chemically synthesized
  source 1..20: mol_type = other DNA
ggcttttaatccttatttga

SEQ ID NO: 54677 - DNA, 20 bp, synthetic construct
  misc_feature 1..20: note = chemically synthesized
  source 1..20: mol_type = other DNA
tccttatttgaaagaataca

SEQ ID NO: 54678 - DNA, 20 bp, synthetic construct
  misc_feature 1..20: note = chemically synthesized
  source 1..20: mol_type = other DNA
tatttgaaagaatacaaagt

SEQ ID NO: 54679 - DNA, 20 bp, synthetic construct
  misc_feature 1..20: note = chemically synthesized
  source 1..20: mol_type = other DNA
ttagcatgacaacaaaaata

SEQ ID NO: 54680 - DNA, 20 bp, synthetic construct
  misc_feature 1..20: note = chemically synthesized
  source 1..20: mol_type = other DNA
agcttgaccaattgaatatg

SEQ ID NO: 54681 - DNA, 20 bp, synthetic construct
  misc_feature 1..20: note = chemically synthesized
  source 1..20: mol_type = other DNA
tatgaagttgtatataaaaa

SEQ ID NO: 54682 - DNA, 20 bp, synthetic construct
  misc_feature 1..20: note = chemically synthesized
  source 1..20: mol_type = other DNA
gttgtatataaaaacagaat

SEQ ID NO: 54683 - DNA, 20 bp, synthetic construct
  misc_feature 1..20: note = chemically synthesized
  source 1..20: mol_type = other DNA
atataaaaacagaataagaa

SEQ ID NO: 54684 - DNA, 20 bp, synthetic construct
  misc_feature 1..20: note = chemically synthesized
  source 1..20: mol_type = other DNA
taaaaacagaataagaacgg

SEQ ID NO: 54685 - DNA, 20 bp, synthetic construct
  misc_feature 1..20: note = chemically synthesized
  source 1..20: mol_type = other DNA
agaacggcagtatgtgcatg

SEQ ID NO: 54686 - DNA, 20 bp, synthetic construct
  misc_feature 1..20: note = chemically synthesized
  source 1..20: mol_type = other DNA
cagtatgtgcatgtggcaaa

SEQ ID NO: 54687 - DNA, 20 bp, synthetic construct
  misc_feature 1..20: note = chemically synthesized
  source 1..20: mol_type = other DNA
agtatgtgcatgtggcaaaa

SEQ ID NO: 54688 - DNA, 20 bp, synthetic construct
  misc_feature 1..20: note = chemically synthesized
  source 1..20: mol_type = other DNA
tgcatgtggcaaaaaggaca

SEQ ID NO: 54689 - DNA, 20 bp, synthetic construct
  misc_feature 1..20: note = chemically synthesized
  source 1..20: mol_type = other DNA
aaaggacacagatcaaacaa

SEQ ID NO: 54690 - DNA, 20 bp, synthetic construct
  misc_feature 1..20: note = chemically synthesized
  source 1..20: mol_type = other DNA
acagatcaaacaacagaaaa

SEQ ID NO: 54691 - DNA, 20 bp, synthetic construct
  misc_feature 1..20: note = chemically synthesized
  source 1..20: mol_type = other DNA
tcaaacaacagaaaacagtc

SEQ ID NO: 54692 - DNA, 20 bp, synthetic construct
  misc_feature 1..20: note = chemically synthesized
  source 1..20: mol_type = other DNA
aacagaaaacagtctagaat

SEQ ID NO: 54693 - DNA, 20 bp, synthetic construct
  misc_feature 1..20: note = chemically synthesized
  source 1..20: mol_type = other DNA
atgtaatccctcatcatgct

SEQ ID NO: 54694 - DNA, 20 bp, synthetic construct
  misc_feature 1..20: note = chemically synthesized
  source 1..20: mol_type = other DNA
gtaatccctcatcatgcttg

SEQ ID NO: 54695 - DNA, 20 bp, synthetic construct
  misc_feature 1..20: note = chemically synthesized
  source 1..20: mol_type = other DNA
ccaacccttgatcttatact

SEQ ID NO: 54696 - DNA, 20 bp, synthetic construct
  misc_feature 1..20: note = chemically synthesized
  source 1..20: mol_type = other DNA
cttgatcttatacttggtat

SEQ ID NO: 54697 - DNA, 20 bp, synthetic construct
  misc_feature 1..20: note = chemically synthesized
  source 1..20: mol_type = other DNA
gaaaaattgtttatatgttt

SEQ ID NO: 54698 - DNA, 20 bp, synthetic construct
  misc_feature 1..20: note = chemically synthesized
  source 1..20: mol_type = other DNA
ttatatgtttgagaatactt

SEQ ID NO: 54699 - DNA, 20 bp, synthetic construct
  misc_feature 1..20: note = chemically synthesized
  source 1..20: mol_type = other DNA
aagtaaaattctaattaccc

SEQ ID NO: 54700 - DNA, 20 bp, synthetic construct
  misc_feature 1..20: note = chemically synthesized
  source 1..20: mol_type = other DNA
caagtcccccaaacaaattt

SEQ ID NO: 54701 - DNA, 20 bp, synthetic construct
  misc_feature 1..20: note = chemically synthesized
  source 1..20: mol_type = other DNA
aagtcccccaaacaaatttc

SEQ ID NO: 54702 - DNA, 20 bp, synthetic construct
  misc_feature 1..20: note = chemically synthesized
  source 1..20: mol_type = other DNA
tcccccaaacaaatttcagg

SEQ ID NO: 54703 - DNA, 20 bp, synthetic construct
  misc_feature 1..20: note = chemically synthesized
  source 1..20: mol_type = other DNA
aacaaatttcaggtggaatc

SEQ ID NO: 54704 - DNA, 20 bp, synthetic construct
  misc_feature 1..20: note = chemically synthesized
  source 1..20: mol_type = other DNA
tacaccactatccctatctg

SEQ ID NO: 54705 - DNA, 20 bp, synthetic construct
  misc_feature 1..20: note = chemically synthesized
  source 1..20: mol_type = other DNA
cctatctgcagttccgtctc

SEQ ID NO: 54706 - DNA, 20 bp, synthetic construct
  misc_feature 1..20: note = chemically synthesized
  source 1..20: mol_type = other DNA
tgcagttccgtctctagctc

SEQ ID NO: 54707 - DNA, 20 bp, synthetic construct
  misc_feature 1..20: note = chemically synthesized
  source 1..20: mol_type = other DNA
tccactttttactttgtata

SEQ ID NO: 54708 - DNA, 20 bp, synthetic construct
  misc_feature 1..20: note = chemically synthesized
  source 1..20: mol_type = other DNA
tttttactttgtatatggaa

SEQ ID NO: 54709 - DNA, 20 bp, synthetic construct
  misc_feature 1..20: note = chemically synthesized
  source 1..20: mol_type = other DNA
tgtatatggaatagcttctt

SEQ ID NO: 54710 - DNA, 20 bp, synthetic construct
  misc_feature 1..20: note = chemically synthesized
  source 1..20: mol_type = other DNA
aatagcttcttaagaatgaa

SEQ ID NO: 54711 - DNA, 20 bp, synthetic construct
  misc_feature 1..20: note = chemically synthesized
  source 1..20: mol_type = other DNA
atgttaacctgactacataa

SEQ ID NO: 54712 - DNA, 20 bp, synthetic construct
  misc_feature 1..20: note = chemically synthesized
  source 1..20: mol_type = other DNA
tgtgtatgaaaaaattaatg

SEQ ID NO: 54713 - DNA, 20 bp, synthetic construct
  misc_feature 1..20: note = chemically synthesized
  source 1..20: mol_type = other DNA
atgaaaaaattaatgaagat

SEQ ID NO: 54714 - DNA, 20 bp, synthetic construct
  misc_feature 1..20: note = chemically synthesized
  source 1..20: mol_type = other DNA
aaattaatgaagataagatg

SEQ ID NO: 54715 - DNA, 20 bp, synthetic construct
  misc_feature 1..20: note = chemically synthesized
  source 1..20: mol_type = other DNA
aattaatgaagataagatgc

SEQ ID NO: 54716 - DNA, 20 bp, synthetic construct
  misc_feature 1..20: note = chemically synthesized
  source 1..20: mol_type = other DNA
attaatgaagataagatgcg

SEQ ID NO: 54717 - DNA, 20 bp, synthetic construct
  misc_feature 1..20: note = chemically synthesized
  source 1..20: mol_type = other DNA
ttaatgaagataagatgcgg

SEQ ID NO: 54718 - DNA, 20 bp, synthetic construct
  misc_feature 1..20: note = chemically synthesized
  source 1..20: mol_type = other DNA
atgaagataagatgcggggg

SEQ ID NO: 54719 - DNA, 20 bp, synthetic construct
  misc_feature 1..20: note = chemically synthesized
  source 1..20: mol_type = other DNA
aagatgcgggggaagtatat

SEQ ID NO: 54720 - DNA, 20 bp, synthetic construct
  misc_feature 1..20: note = chemically synthesized
  source 1..20: mol_type = other DNA
gtaactattttatgtttatt

SEQ ID NO: 54721 - DNA, 20 bp, synthetic construct
  misc_feature 1..20: note = chemically synthesized
  source 1..20: mol_type = other DNA
taactattttatgtttattt

SEQ ID NO: 54722 - DNA, 20 bp, synthetic construct
  misc_feature 1..20: note = chemically synthesized
  source 1..20: mol_type = other DNA
tttgggttttgcattgacat

SEQ ID NO: 54723 - DNA, 20 bp, synthetic construct
  misc_feature 1..20: note = chemically synthesized
  source 1..20: mol_type = other DNA
gttcttatgtatactctctc

SEQ ID NO: 54724 - DNA, 20 bp, synthetic construct
  misc_feature 1..20: note = chemically synthesized
  source 1..20: mol_type = other DNA
actctctccagcatgcttct

SEQ ID NO: 54725 - DNA, 20 bp, synthetic construct
  misc_feature 1..20: note = chemically synthesized
  source 1..20: mol_type = other DNA
ctctctccagcatgcttctc

SEQ ID NO: 54726 - DNA, 20 bp, synthetic construct
  misc_feature 1..20: note = chemically synthesized
  source 1..20: mol_type = other DNA
ctttctctctaatacacccg

SEQ ID NO: 54727 - DNA, 20 bp, synthetic construct
  misc_feature 1..20: note = chemically synthesized
  source 1..20: mol_type = other DNA
tctaatacacccgaagtttc

SEQ ID NO: 54728 - DNA, 20 bp, synthetic construct
  misc_feature 1..20: note = chemically synthesized
  source 1..20: mol_type = other DNA
ctaatacacccgaagtttct

SEQ ID NO: 54729 - DNA, 20 bp, synthetic construct
  misc_feature 1..20: note = chemically synthesized
  source 1..20: mol_type = other DNA
tttctgggaataattattct

SEQ ID NO: 54730 - DNA, 20 bp, synthetic construct
  misc_feature 1..20: note = chemically synthesized
  source 1..20: mol_type = other DNA
ttcttggttaattgcttctt

SEQ ID NO: 54731 - DNA, 20 bp, synthetic construct
  misc_feature 1..20: note = chemically synthesized
  source 1..20: mol_type = other DNA
tcttggttaattgcttcttg

SEQ ID NO: 54732 - DNA, 20 bp, synthetic construct
  misc_feature 1..20: note = chemically synthesized
  source 1..20: mol_type = other DNA
cttggttaattgcttcttga

SEQ ID NO: 54733 - DNA, 20 bp, synthetic construct
  misc_feature 1..20: note = chemically synthesized
  source 1..20: mol_type = other DNA
cattctgtctctatgtcctc

SEQ ID NO: 54734 - DNA, 20 bp, synthetic construct
  misc_feature 1..20: note = chemically synthesized
  source 1..20: mol_type = other DNA
tctatgtcctccagtcaact

SEQ ID NO: 54735 - DNA, 20 bp, synthetic construct
  misc_feature 1..20: note = chemically synthesized
  source 1..20: mol_type = other DNA
cagtcaactaagcacatata

SEQ ID NO: 54736 - DNA, 20 bp, synthetic construct
  misc_feature 1..20: note = chemically synthesized
  source 1..20: mol_type = other DNA
agtcaactaagcacatatac

SEQ ID NO: 54737 - DNA, 20 bp, synthetic construct
  misc_feature 1..20: note = chemically synthesized
  source 1..20: mol_type = other DNA
gtcaactaagcacatataca

SEQ ID NO: 54738 - DNA, 20 bp, synthetic construct
  misc_feature 1..20: note = chemically synthesized
  source 1..20: mol_type = other DNA
caactaagcacatatacagg

SEQ ID NO: 54739 - DNA, 20 bp, synthetic construct
  misc_feature 1..20: note = chemically synthesized
  source 1..20: mol_type = other DNA
aactaagcacatatacaggg

SEQ ID NO: 54740 - DNA, 20 bp, synthetic construct
  misc_feature 1..20: note = chemically synthesized
  source 1..20: mol_type = other DNA
taagcacatatacagggagg

SEQ ID NO: 54741 - DNA, 20 bp, synthetic construct
  misc_feature 1..20: note = chemically synthesized
  source 1..20: mol_type = other DNA
ggaggtagtaactatgtcca

SEQ ID NO: 54742 - DNA, 20 bp, synthetic construct
  misc_feature 1..20: note = chemically synthesized
  source 1..20: mol_type = other DNA
tagtaactatgtccacagcc

SEQ ID NO: 54743 - DNA, 20 bp, synthetic construct
  misc_feature 1..20: note = chemically synthesized
  source 1..20: mol_type = other DNA
tatgtccacagcccagttga

SEQ ID NO: 54744 - DNA, 20 bp, synthetic construct
  misc_feature 1..20: note = chemically synthesized
  source 1..20: mol_type = other DNA
acagcccagttgaaagtaaa

SEQ ID NO: 54745 - DNA, 20 bp, synthetic construct
  misc_feature 1..20: note = chemically synthesized
  source 1..20: mol_type = other DNA
tgaaagtaaacagtaacaaa

SEQ ID NO: 54746 - DNA, 20 bp, synthetic construct
  misc_feature 1..20: note = chemically synthesized
  source 1..20: mol_type = other DNA
acagtaacaaatagtatgca

SEQ ID NO: 54747 - DNA, 20 bp, synthetic construct
  misc_feature 1..20: note = chemically synthesized
  source 1..20: mol_type = other DNA
atagtatgcatggattgatg

SEQ ID NO: 54748 - DNA, 20 bp, synthetic construct
  misc_feature 1..20: note = chemically synthesized
  source 1..20: mol_type = other DNA
gtatgcatggattgatgtgg

SEQ ID NO: 54749 - DNA, 20 bp, synthetic construct
  misc_feature 1..20: note = chemically synthesized
  source 1..20: mol_type = other DNA
tggattgatgtggtagctct

SEQ ID NO: 54750 - DNA, 20 bp, synthetic construct
  misc_feature 1..20: note = chemically synthesized
  source 1..20: mol_type = other DNA
tggtagctctcagttccacc

SEQ ID NO: 54751 - DNA, 20 bp, synthetic construct
  misc_feature 1..20: note = chemically synthesized
  source 1..20: mol_type = other DNA
ggtagctctcagttccacct

SEQ ID NO: 54752 - DNA, 20 bp, synthetic construct
  misc_feature 1..20: note = chemically synthesized
  source 1..20: mol_type = other DNA
gctctcagttccacctaggt

SEQ ID NO: 54753 - DNA, 20 bp, synthetic construct
  misc_feature 1..20: note = chemically synthesized
  source 1..20: mol_type = other DNA
ttccacctaggtaagtatct

SEQ ID NO: 54754 - DNA, 20 bp, synthetic construct
  misc_feature 1..20: note = chemically synthesized
  source 1..20: mol_type = other DNA
tccacctaggtaagtatctg

SEQ ID NO: 54755 - DNA, 20 bp, synthetic construct
  misc_feature 1..20: note = chemically synthesized
  source 1..20: mol_type = other DNA
ctaggtaagtatctgaggtc

SEQ ID NO: 54756 - DNA, 20 bp, synthetic construct
  misc_feature 1..20: note = chemically synthesized
  source 1..20: mol_type = other DNA
taggtaagtatctgaggtct

SEQ ID NO: 54757 - DNA, 20 bp, synthetic construct
  misc_feature 1..20: note = chemically synthesized
  source 1..20: mol_type = other DNA
ctgaggtctaggatcaacta

SEQ ID NO: 54758 - DNA, 20 bp, synthetic construct
  misc_feature 1..20: note = chemically synthesized
  source 1..20: mol_type = other DNA
tcaactatagttatgcctaa

SEQ ID NO: 54759 - DNA, 20 bp, synthetic construct
  misc_feature 1..20: note = chemically synthesized
  source 1..20: mol_type = other DNA
tgcctaatggtataatgtgc

SEQ ID NO: 54760 - DNA, 20 bp, synthetic construct
  misc_feature 1..20: note = chemically synthesized
  source 1..20: mol_type = other DNA
tataatgtgctggcttgcac

SEQ ID NO: 54761 - DNA, 20 bp, synthetic construct
  misc_feature 1..20: note = chemically synthesized
  source 1..20: mol_type = other DNA
tgtgctggcttgcaccagct

SEQ ID NO: 54762 - DNA, 20 bp, synthetic construct
  misc_feature 1..20: note = chemically synthesized
  source 1..20: mol_type = other DNA
gtgctggcttgcaccagctt

SEQ ID NO: 54763 - DNA, 20 bp, synthetic construct
  misc_feature 1..20: note = chemically synthesized
  source 1..20: mol_type = other DNA
tggcttgcaccagcttagga

SEQ ID NO: 54764 - DNA, 20 bp, synthetic construct
  misc_feature 1..20: note = chemically synthesized
  source 1..20: mol_type = other DNA
aaagctgattatgctcatct

SEQ ID NO: 54765 - DNA, 20 bp, synthetic construct
  misc_feature 1..20: note = chemically synthesized
  source 1..20: mol_type = other DNA
catctcagctctgcatttaa

SEQ ID NO: 54766 - DNA, 20 bp, synthetic construct
  misc_feature 1..20: note = chemically synthesized
  source 1..20: mol_type = other DNA
tgcatttaatagcatctctt

SEQ ID NO: 54767 - DNA, 20 bp, synthetic construct
  misc_feature 1..20: note = chemically synthesized
  source 1..20: mol_type = other DNA
atttaatagcatctctttgg

SEQ ID NO: 54768 - DNA, 20 bp, synthetic construct
  misc_feature 1..20: note = chemically synthesized
  source 1..20: mol_type = other DNA
tggtagtctgaaattgatca

SEQ ID NO: 54769 - DNA, 20 bp, synthetic construct
  misc_feature 1..20: note = chemically synthesized
  source 1..20: mol_type = other DNA
tagtctgaaattgatcatgg

SEQ ID NO: 54770 - DNA, 20 bp, synthetic construct
  misc_feature 1..20: note = chemically synthesized
  source 1..20: mol_type = other DNA
agtctgaaattgatcatggt

SEQ ID NO: 54771 - DNA, 20 bp, synthetic construct
  misc_feature 1..20: note = chemically synthesized
  source 1..20: mol_type = other DNA
tctgaaattgatcatggtag

SEQ ID NO: 54772 - DNA, 20 bp, synthetic construct
  misc_feature 1..20: note = chemically synthesized
  source 1..20: mol_type = other DNA
gtcattaaaacacaaaaaat

SEQ ID NO: 54773 - DNA, 20 bp, synthetic construct
  misc_feature 1..20: note = chemically synthesized
  source 1..20: mol_type = other DNA
aaacacaaaaaatcggtaac

SEQ ID NO: 54774 - DNA, 20 bp, synthetic construct
  misc_feature 1..20: note = chemically synthesized
  source 1..20: mol_type = other DNA
aatcggtaactggtaaaaat

SEQ ID NO: 54775 - DNA, 20 bp, synthetic construct
  misc_feature 1..20: note = chemically synthesized
  source 1..20: mol_type = other DNA
atcggtaactggtaaaaatc

SEQ ID NO: 54776 - DNA, 20 bp, synthetic construct
  misc_feature 1..20: note = chemically synthesized
  source 1..20: mol_type = other DNA
tcggtaactggtaaaaatca

SEQ ID NO: 54777 - DNA, 20 bp, synthetic construct
  misc_feature 1..20: note = chemically synthesized
  source 1..20: mol_type = other DNA
aaaatcagggcatttttatt

SEQ ID NO: 54778 - DNA, 20 bp, synthetic construct
  misc_feature 1..20: note = chemically synthesized
  source 1..20: mol_type = other DNA
cccactgattatgcctaacg

SEQ ID NO: 54779 - DNA, 20 bp, synthetic construct
  misc_feature 1..20: note = chemically synthesized
  source 1..20: mol_type = other DNA
cactgattatgcctaacgaa

SEQ ID NO: 54780 - DNA, 20 bp, synthetic construct
  misc_feature 1..20: note = chemically synthesized
  source 1..20: mol_type = other DNA
ttatgcctaacgaagagccc

SEQ ID NO: 54781 - DNA, 20 bp, synthetic construct
  misc_feature 1..20: note = chemically synthesized
  source 1..20: mol_type = other DNA
cgaagagccctggcccaaca

SEQ ID NO: 54782 - DNA, 20 bp, synthetic construct
  misc_feature 1..20: note = chemically synthesized
  source 1..20: mol_type = other DNA
gaagagccctggcccaacac

SEQ ID NO: 54783 - DNA, 20 bp, synthetic construct
  misc_feature 1..20: note = chemically synthesized
  source 1..20: mol_type = other DNA
gagccctggcccaacacggg

SEQ ID NO: 54784 - DNA, 20 bp, synthetic construct
  misc_feature 1..20: note = chemically synthesized
  source 1..20: mol_type = other DNA
ccctggcccaacacgggaag

SEQ ID NO: 54785 - DNA, 20 bp, synthetic construct
  misc_feature 1..20: note = chemically synthesized
  source 1..20: mol_type = other DNA
ctggcccaacacgggaagaa

SEQ ID NO: 54786 - DNA, 20 bp, synthetic construct
  misc_feature 1..20: note = chemically synthesized
  source 1..20: mol_type = other DNA
ccaacacgggaagaagagtt

SEQ ID NO: 54787 - DNA, 20 bp, synthetic construct
  misc_feature 1..20: note = chemically synthesized
  source 1..20: mol_type = other DNA
cgggaagaagagttcagcct

SEQ ID NO: 54788 - DNA, 20 bp, synthetic construct
  misc_feature 1..20: note = chemically synthesized
  source 1..20: mol_type = other DNA
ttggtcacattcttatttct

SEQ ID NO: 54789 - DNA, 20 bp, synthetic construct
  misc_feature 1..20: note = chemically synthesized
  source 1..20: mol_type = other DNA
cccatcctgaattccatttc

SEQ ID NO: 54790 - DNA, 20 bp, synthetic construct
  misc_feature 1..20: note = chemically synthesized
  source 1..20: mol_type = other DNA
ggcctccaacgttaatacct

SEQ ID NO: 54791 - DNA, 20 bp, synthetic construct
  misc_feature 1..20: note = chemically synthesized
  source 1..20: mol_type = other DNA
gcctccaacgttaataccta

SEQ ID NO: 54792 - DNA, 20 bp, synthetic construct
  misc_feature 1..20: note = chemically synthesized
  source 1..20: mol_type = other DNA
taatacctaaggctctgctg

SEQ ID NO: 54793 - DNA, 20 bp, synthetic construct
  misc_feature 1..20: note = chemically synthesized
  source 1..20: mol_type = other DNA
cctaaggctctgctgcagat

SEQ ID NO: 54794 - DNA, 20 bp, synthetic construct
  misc_feature 1..20: note = chemically synthesized
  source 1..20: mol_type = other DNA
aaggctctgctgcagataag

SEQ ID NO: 54795 - DNA, 20 bp, synthetic construct
  misc_feature 1..20: note = chemically synthesized
  source 1..20: mol_type = other DNA
gctgcagataagtggaactt

SEQ ID NO: 54796 - DNA, 20 bp, synthetic construct
  misc_feature 1..20: note = chemically synthesized
  source 1..20: mol_type = other DNA
agtgttaataaacttgttcc

SEQ ID NO: 54797 - DNA, 20 bp, synthetic construct
  misc_feature 1..20: note = chemically synthesized
  source 1..20: mol_type = other DNA
gttcccagataaatatctct

SEQ ID NO: 54798 - DNA, 20 bp, synthetic construct
  misc_feature 1..20: note = chemically synthesized
  source 1..20: mol_type = other DNA
atatctctaagcctgtaccc

SEQ ID NO: 54799 - DNA, 20 bp, synthetic construct
  misc_feature 1..20: note = chemically synthesized
  source 1..20: mol_type = other DNA
caccatcacatgtgacttgt

SEQ ID NO: 54800 - DNA, 20 bp, synthetic construct
  misc_feature 1..20: note = chemically synthesized
  source 1..20: mol_type = other DNA
tctgatcttgctccctgacc

SEQ ID NO: 54801 - DNA, 20 bp, synthetic construct
  misc_feature 1..20: note = chemically synthesized
  source 1..20: mol_type = other DNA
cttgctccctgacccggttc

SEQ ID NO: 54802 - DNA, 20 bp, synthetic construct
  misc_feature 1..20: note = chemically synthesized
  source 1..20: mol_type = other DNA
gctccctgacccggttccag

SEQ ID NO: 54803 - DNA, 20 bp, synthetic construct
  misc_feature 1..20: note = chemically synthesized
  source 1..20: mol_type = other DNA
ccctgacccggttccagcag

SEQ ID NO: 54804 - DNA, 20 bp, synthetic construct
  misc_feature 1..20: note = chemically synthesized
  source 1..20: mol_type = other DNA
actgacccttctgcaaaata

SEQ ID NO: 54805 - DNA, 20 bp, synthetic construct
  misc_feature 1..20: note = chemically synthesized
  source 1..20: mol_type = other DNA
tgacccttctgcaaaataca

SEQ ID NO: 54806 - DNA, 20 bp, synthetic construct
  misc_feature 1..20: note = chemically synthesized
  source 1..20: mol_type = other DNA
gacccttctgcaaaatacag

SEQ ID NO: 54807 - DNA, 20 bp, synthetic construct
  misc_feature 1..20: note = chemically synthesized
  source 1..20: mol_type = other DNA
cccttctgcaaaatacagag

SEQ ID NO: 54808 - DNA, 20 bp, synthetic construct
  misc_feature 1..20: note = chemically synthesized
  source 1..20: mol_type = other DNA
agaggagcttttctaatcta

SEQ ID NO: 54809 - DNA, 20 bp, synthetic construct
  misc_feature 1..20: note = chemically synthesized
  source 1..20: mol_type = other DNA
gagcttttctaatctatgga

SEQ ID NO: 54810 - DNA, 20 bp, synthetic construct
  misc_feature 1..20: note = chemically synthesized
  source 1..20: mol_type = other DNA
cttttctaatctatggatag

SEQ ID NO: 54811 - DNA, 20 bp, synthetic construct
  misc_feature 1..20: note = chemically synthesized
  source 1..20: mol_type = other DNA
ttttctaatctatggatagc

SEQ ID NO: 54812 - DNA, 20 bp, synthetic construct
  misc_feature 1..20: note = chemically synthesized
  source 1..20: mol_type = other DNA
tctaatctatggatagcagg

SEQ ID NO: 54813 - DNA, 20 bp, synthetic construct
  misc_feature 1..20: note = chemically synthesized
  source 1..20: mol_type = other DNA
taatctatggatagcaggtg

SEQ ID NO: 54814 - DNA, 20 bp, synthetic construct
  misc_feature 1..20: note = chemically synthesized
  source 1..20: mol_type = other DNA
ctatggatagcaggtggaga

SEQ ID NO: 54815 - DNA, 20 bp, synthetic construct
  misc_feature 1..20: note = chemically synthesized
  source 1..20: mol_type = other DNA
atggatagcaggtggagaaa

SEQ ID NO: 54816 - DNA, 20 bp, synthetic construct
  misc_feature 1..20: note = chemically synthesized
  source 1..20: mol_type = other DNA
caggtggagaaagagtgaac

SEQ ID NO: 54817 - DNA, 20 bp, synthetic construct
  misc_feature 1..20: note = chemically synthesized
  source 1..20: mol_type = other DNA
tggagaaagagtgaactggt

SEQ ID NO: 54818 - DNA, 20 bp, synthetic construct
  misc_feature 1..20: note = chemically synthesized
  source 1..20: mol_type = other DNA
aagagtgaactggtaagtta

SEQ ID NO: 54819 - DNA, 20 bp, synthetic construct
  misc_feature 1..20: note = chemically synthesized
  source 1..20: mol_type = other DNA
tggtaagttaaagaaaaaaa

SEQ ID NO: 54820 - DNA, 20 bp, synthetic construct
  misc_feature 1..20: note = chemically synthesized
  source 1..20: mol_type = other DNA
aaatggaaaatactttattc

SEQ ID NO: 54821 - DNA, 20 bp, synthetic construct
  misc_feature 1..20: note = chemically synthesized
  source 1..20: mol_type = other DNA
aatggaaaatactttattct

SEQ ID NO: 54822 - DNA, 20 bp, synthetic construct
  misc_feature 1..20: note = chemically synthesized
  source 1..20: mol_type = other DNA
tggaaaatactttattctag

SEQ ID NO: 54823 - DNA, 20 bp, synthetic construct
  misc_feature 1..20: note = chemically synthesized
  source 1..20: mol_type = other DNA
aaatactattattgtcttta

SEQ ID NO: 54824 - DNA, 20 bp, synthetic construct
  misc_feature 1..20: note = chemically synthesized
  source 1..20: mol_type = other DNA
ttgtctttatagcaaatatc

SEQ ID NO: 54825 - DNA, 20 bp, synthetic construct
  misc_feature 1..20: note = chemically synthesized
  source 1..20: mol_type = other DNA
tgtctttatagcaaatatct

SEQ ID NO: 54826 - DNA, 20 bp, synthetic construct
  misc_feature 1..20: note = chemically synthesized
  source 1..20: mol_type = other DNA
tatagcaaatatctgggtct

SEQ ID NO: 54827 - DNA, 20 bp, synthetic construct
  misc_feature 1..20: note = chemically synthesized
  source 1..20: mol_type = other DNA
atcaactttaatataatccc

SEQ ID NO: 54828 - DNA, 20 bp, synthetic construct
  misc_feature 1..20: note = chemically synthesized
  source 1..20: mol_type = other DNA
attacacgtcaattaaatgt

SEQ ID NO: 54829 - DNA, 20 bp, synthetic construct
  misc_feature 1..20: note = chemically synthesized
  source 1..20: mol_type = other DNA
gaaccatcaatactctttat

SEQ ID NO: 54830 - DNA, 20 bp, synthetic construct
  misc_feature 1..20: note = chemically synthesized
  source 1..20: mol_type = other DNA
ttattagtgttatattactt

SEQ ID NO: 54831 - DNA, 20 bp, synthetic construct
  misc_feature 1..20: note = chemically synthesized
  source 1..20: mol_type = other DNA
actctctttataaacactac

SEQ ID NO: 54832 - DNA, 20 bp, synthetic construct
  misc_feature 1..20: note = chemically synthesized
  source 1..20: mol_type = other DNA
tctttataaacactacaagt

SEQ ID NO: 54833 - DNA, 20 bp, synthetic construct
  misc_feature 1..20: note = chemically synthesized
  source 1..20: mol_type = other DNA
ttataaacactacaagttag

SEQ ID NO: 54834 - DNA, 20 bp, synthetic construct
  misc_feature 1..20: note = chemically synthesized
  source 1..20: mol_type = other DNA
ctacaagttagcagtttctt

SEQ ID NO: 54835 - DNA, 20 bp, synthetic construct
  misc_feature 1..20: note = chemically synthesized
  source 1..20: mol_type = other DNA
ttaactgtttttcactgcca

SEQ ID NO: 54836 - DNA, 20 bp, synthetic construct
  misc_feature 1..20: note = chemically synthesized
  source 1..20: mol_type = other DNA
tgccatagatgacccaactt

SEQ ID NO: 54837 - DNA, 20 bp, synthetic construct
  misc_feature 1..20: note = chemically synthesized
  source 1..20: mol_type = other DNA
atttctattaatgccttatc

SEQ ID NO: 54838 - DNA, 20 bp, synthetic construct
  misc_feature 1..20: note = chemically synthesized
  source 1..20: mol_type = other DNA
ttaatgccttatctggcata

SEQ ID NO: 54839 - DNA, 20 bp, synthetic construct
  misc_feature 1..20: note = chemically synthesized
  source 1..20: mol_type = other DNA
taatgccttatctggcatat

SEQ ID NO: 54840 - DNA, 20 bp, synthetic construct
  misc_feature 1..20: note = chemically synthesized
  source 1..20: mol_type = other DNA
atctggcatataggctatgt

SEQ ID NO: 54841 - DNA, 20 bp, synthetic construct
  misc_feature 1..20: note = chemically synthesized
  source 1..20: mol_type = other DNA
tacttttctgcatgacccat

SEQ ID NO: 54842 - DNA, 20 bp, synthetic construct
  misc_feature 1..20: note = chemically synthesized
  source 1..20: mol_type = other DNA
acttttctgcatgacccatt

SEQ ID NO: 54843 - DNA, 20 bp, synthetic construct
  misc_feature 1..20: note = chemically synthesized
  source 1..20: mol_type = other DNA
ggtttctcttccactcactg

SEQ ID NO: 54844 - DNA, 20 bp, synthetic construct
  misc_feature 1..20: note = chemically synthesized
  source 1..20: mol_type = other DNA
gcttacctgtgcccttgttt

SEQ ID NO: 54845 - DNA, 20 bp, synthetic construct
  misc_feature 1..20: note = chemically synthesized
  source 1..20: mol_type = other DNA
aattttttatccctttttct

SEQ ID NO: 54846 - DNA, 20 bp, synthetic construct
  misc_feature 1..20: note = chemically synthesized
  source 1..20: mol_type = other DNA
attttttatccctttttctg

SEQ ID NO: 54847 - DNA, 20 bp, synthetic construct
  misc_feature 1..20: note = chemically synthesized
  source 1..20: mol_type = other DNA
ctttttctgaggaaatgtct

SEQ ID NO: 54848 - DNA, 20 bp, synthetic construct
  misc_feature 1..20: note = chemically synthesized
  source 1..20: mol_type = other DNA
aatgtcttagatatgactgt

SEQ ID NO: 54849 - DNA, 20 bp, synthetic construct
  misc_feature 1..20: note = chemically synthesized
  source 1..20: mol_type = other DNA
cttagatatgactgttagct

SEQ ID NO: 54850 - DNA, 20 bp, synthetic construct
  misc_feature 1..20: note = chemically synthesized
  source 1..20: mol_type = other DNA
gaacttgatgtgcaataact

SEQ ID NO: 54851 - DNA, 20 bp, synthetic construct
  misc_feature 1..20: note = chemically synthesized
  source 1..20: mol_type = other DNA
cttgatgtgcaataactgag

SEQ ID NO: 54852 - DNA, 20 bp, synthetic construct
  misc_feature 1..20: note = chemically synthesized
  source 1..20: mol_type = other DNA
gagtagaaacttatatattc

SEQ ID NO: 54853 - DNA, 20 bp, synthetic construct
  misc_feature 1..20: note = chemically synthesized
  source 1..20: mol_type = other DNA
catgtgcttctcaatatctt

SEQ ID NO: 54854 - DNA, 20 bp, synthetic construct
  misc_feature 1..20: note = chemically synthesized
  source 1..20: mol_type = other DNA
tgtgcttctcaatatcttca

SEQ ID NO: 54855 - DNA, 20 bp, synthetic construct
  misc_feature 1..20: note = chemically synthesized
  source 1..20: mol_type = other DNA
gtgcttctcaatatcttcag

SEQ ID NO: 54856 - DNA, 20 bp, synthetic construct
  misc_feature 1..20: note = chemically synthesized
  source 1..20: mol_type = other DNA
cttctcaatatcttcagagg

SEQ ID NO: 54857 - DNA, 20 bp, synthetic construct
  misc_feature 1..20: note = chemically synthesized
  source 1..20: mol_type = other DNA
cctacaacattcactctcgt

SEQ ID NO: 54858 - DNA, 20 bp, synthetic construct
  misc_feature 1..20: note = chemically synthesized
  source 1..20: mol_type = other DNA
attcactctcgttggcatcc

SEQ ID NO: 54859 - DNA, 20 bp, synthetic construct
  misc_feature 1..20: note = chemically synthesized
  source 1..20: mol_type = other DNA
ttcactctcgttggcatccc

SEQ ID NO: 54860 - DNA, 20 bp, synthetic construct
  misc_feature 1..20: note = chemically synthesized
  source 1..20: mol_type = other DNA
tctcgttggcatcccgggac

SEQ ID NO: 54861 - DNA, 20 bp, synthetic construct
  misc_feature 1..20: note = chemically synthesized
  source 1..20: mol_type = other DNA
tcgttggcatcccgggactg

SEQ ID NO: 54862 - DNA, 20 bp, synthetic construct
  misc_feature 1..20: note = chemically synthesized
  source 1..20: mol_type = other DNA
cgttggcatcccgggactgg

SEQ ID NO: 54863 - DNA, 20 bp, synthetic construct
  misc_feature 1..20: note = chemically synthesized
  source 1..20: mol_type = other DNA
tggcatcccgggactggagg

SEQ ID NO: 54864 - DNA, 20 bp, synthetic construct
  misc_feature 1..20: note = chemically synthesized
  source 1..20: mol_type = other DNA
actggaggcagaacattatg

SEQ ID NO: 54865 - DNA, 20 bp, synthetic construct
  misc_feature 1..20: note = chemically synthesized
  source 1..20: mol_type = other DNA
gatatacaccatcatctttc

SEQ ID NO: 54866 - DNA, 20 bp, synthetic construct
  misc_feature 1..20: note = chemically synthesized
  source 1..20: mol_type = other DNA
atatacaccatcatctttcc

SEQ ID NO: 54867 - DNA, 20 bp, synthetic construct
  misc_feature 1..20: note = chemically synthesized
  source 1..20: mol_type = other DNA
accatcatctttccgggaaa

SEQ ID NO: 54868 - DNA, 20 bp, synthetic construct
  misc_feature 1..20: note = chemically synthesized
  source 1..20: mol_type = other DNA
ccaacccatgtactattttc

SEQ ID NO: 54869 - DNA, 20 bp, synthetic construct
  misc_feature 1..20: note = chemically synthesized
  source 1..20: mol_type = other DNA
gtactattttctggccatgc

SEQ ID NO: 54870 - DNA, 20 bp, synthetic construct
  misc_feature 1..20: note = chemically synthesized
  source 1..20: mol_type = other DNA
atgccggcctttgttgaact

SEQ ID NO: 54871 - DNA, 20 bp, synthetic construct
  misc_feature 1..20: note = chemically synthesized
  source 1..20: mol_type = other DNA
tccaccatgcccactgtgtt

SEQ ID NO: 54872 - DNA, 20 bp, synthetic construct
  misc_feature 1..20: note = chemically synthesized
  source 1..20: mol_type = other DNA
gtgttaagcatattcctctt

SEQ ID NO: 54873 - DNA, 20 bp, synthetic construct
  misc_feature 1..20: note = chemically synthesized
  source 1..20: mol_type = other DNA
ctctttggcattaacgatgt

SEQ ID NO: 54874 - DNA, 20 bp, synthetic construct
  misc_feature 1..20: note = chemically synthesized
  source 1..20: mol_type = other DNA
ggcattaacgatgtcagttt

SEQ ID NO: 54875 - DNA, 20 bp, synthetic construct
  misc_feature 1..20: note = chemically synthesized
  source 1..20: mol_type = other DNA
attaacgatgtcagttttgg

SEQ ID NO: 54876 - DNA, 20 bp, synthetic construct
  misc_feature 1..20: note = chemically synthesized
  source 1..20: mol_type = other DNA
gttttggtggttgcctgctc

SEQ ID NO: 54877 - DNA, 20 bp, synthetic construct
  misc_feature 1..20: note = chemically synthesized
  source 1..20: mol_type = other DNA
tatgcactctttcactctta

SEQ ID NO: 54878 - DNA, 20 bp, synthetic construct
  misc_feature 1..20: note = chemically synthesized
  source 1..20: mol_type = other DNA
tgcactctttcactcttatg

SEQ ID NO: 54879 - DNA, 20 bp, synthetic construct
  misc_feature 1..20: note = chemically synthesized
  source 1..20: mol_type = other DNA
ctctttcactcttatggagt

SEQ ID NO: 54880 - DNA, 20 bp, synthetic construct
  misc_feature 1..20: note = chemically synthesized
  source 1..20: mol_type = other DNA
tctttcactcttatggagtc

SEQ ID NO: 54881 - DNA, 20 bp, synthetic construct
  misc_feature 1..20: note = chemically synthesized
  source 1..20: mol_type = other DNA
tatggagtcaggtgtccttc

SEQ ID NO: 54882 - DNA, 20 bp, synthetic construct
  misc_feature 1..20: note = chemically synthesized
  source 1..20: mol_type = other DNA
aggtgtccttctggcaatgt

SEQ ID NO: 54883 - DNA, 20 bp, synthetic construct
  misc_feature 1..20: note = chemically synthesized
  source 1..20: mol_type = other DNA
tgtccttctggcaatgtcag

SEQ ID NO: 54884 - DNA, 20 bp, synthetic construct
  misc_feature 1..20: note = chemically synthesized
  source 1..20: mol_type = other DNA
aatgtcagtggaccgctttg

SEQ ID NO: 54885 - DNA, 20 bp, synthetic construct
  misc_feature 1..20: note = chemically synthesized
  source 1..20: mol_type = other DNA
gaccgctttgtggccatcta

SEQ ID NO: 54886 - DNA, 20 bp, synthetic construct
  misc_feature 1..20: note = chemically synthesized
  source 1..20: mol_type = other DNA
ctgacaattgcctgcatttc

SEQ ID NO: 54887 - DNA, 20 bp, synthetic construct
  misc_feature 1..20: note = chemically synthesized
  source 1..20: mol_type = other DNA
tgacaattgcctgcatttct

SEQ ID NO: 54888 - DNA, 20 bp, synthetic construct
  misc_feature 1..20: note = chemically synthesized
  source 1..20: mol_type = other DNA
aattgcctgcatttctggga

SEQ ID NO: 54889 - DNA, 20 bp, synthetic construct
  misc_feature 1..20: note = chemically synthesized
  source 1..20: mol_type = other DNA
attgcctgcatttctgggac

SEQ ID NO: 54890 - DNA, 20 bp, synthetic construct
  misc_feature 1..20: note = chemically synthesized
  source 1..20: mol_type = other DNA
ggtgccgccattgccttgcg

SEQ ID NO: 54891 - DNA, 20 bp, synthetic construct
  misc_feature 1..20: note = chemically synthesized
  source 1..20: mol_type = other DNA
ctcccactgctctttctcct

SEQ ID NO: 54892 - DNA, 20 bp, synthetic construct
  misc_feature 1..20: note = chemically synthesized
  source 1..20: mol_type = other DNA
tcccactgctctttctcctg

SEQ ID NO: 54893 - DNA, 20 bp, synthetic construct
  misc_feature 1..20: note = chemically synthesized
  source 1..20: mol_type = other DNA
ctgaggcgtctgcctttctg

SEQ ID NO: 54894 - DNA, 20 bp, synthetic construct
  misc_feature 1..20: note = chemically synthesized
  source 1..20: mol_type = other DNA
acactcttattgcctccact

SEQ ID NO: 54895 - DNA, 20 bp, synthetic construct
  misc_feature 1..20: note = chemically synthesized
  source 1..20: mol_type = other DNA
gatctgatcaaattgccctg

SEQ ID NO: 54896 - DNA, 20 bp, synthetic construct
  misc_feature 1..20: note = chemically synthesized
  source 1..20: mol_type = other DNA
tctgatcaaattgccctgtg

SEQ ID NO: 54897 - DNA, 20 bp, synthetic construct
  misc_feature 1..20: note = chemically synthesized
  source 1..20: mol_type = other DNA
tgtggagacacacgtcccaa

SEQ ID NO: 54898 - DNA, 20 bp, synthetic construct
  misc_feature 1..20: note = chemically synthesized
  source 1..20: mol_type = other DNA
cacacgtcccaatagcatcc

SEQ ID NO: 54899 - DNA, 20 bp, synthetic construct
  misc_feature 1..20: note = chemically synthesized
  source 1..20: mol_type = other DNA
tttgtcattaccttcacatt

SEQ ID NO: 54900 - DNA, 20 bp, synthetic construct
  misc_feature 1..20: note = chemically synthesized
  source 1..20: mol_type = other DNA
cattaccttcacatttggac

SEQ ID NO: 54901 - DNA, 20 bp, synthetic construct
  misc_feature 1..20: note = chemically synthesized
  source 1..20: mol_type = other DNA
actggacttattgttcattg

SEQ ID NO: 54902 - DNA, 20 bp, synthetic construct
  misc_feature 1..20: note = chemically synthesized
  source 1..20: mol_type = other DNA
ttatgtgctgattcttcata

SEQ ID NO: 54903 - DNA, 20 bp, synthetic construct
  misc_feature 1..20: note = chemically synthesized
  source 1..20: mol_type = other DNA
gctgattcttcatacagtac

SEQ ID NO: 54904 - DNA, 20 bp, synthetic construct
  misc_feature 1..20: note = chemically synthesized
  source 1..20: mol_type = other DNA
tcttcatacagtactggaaa

SEQ ID NO: 54905 - DNA, 20 bp, synthetic construct
  misc_feature 1..20: note = chemically synthesized
  source 1..20: mol_type = other DNA
acagtactggaaatagcttc

SEQ ID NO: 54906 - DNA, 20 bp, synthetic construct
  misc_feature 1..20: note = chemically synthesized
  source 1..20: mol_type = other DNA
agtactggaaatagcttctg

SEQ ID NO: 54907 - DNA, 20 bp, synthetic construct
  misc_feature 1..20: note = chemically synthesized
  source 1..20: mol_type = other DNA
actggaaatagcttctggag

SEQ ID NO: 54908 - DNA, 20 bp, synthetic construct
  misc_feature 1..20: note = chemically synthesized
  source 1..20: mol_type = other DNA
ctggaaatagcttctggagc

SEQ ID NO: 54909 - DNA, 20 bp, synthetic construct
  misc_feature 1..20: note = chemically synthesized
  source 1..20: mol_type = other DNA
tggaaatagcttctggagca

SEQ ID NO: 54910 - DNA, 20 bp, synthetic construct
  misc_feature 1..20: note = chemically synthesized
  source 1..20: mol_type = other DNA
aaatagcttctggagcaggg

SEQ ID NO: 54911 - DNA, 20 bp, synthetic construct
  misc_feature 1..20: note = chemically synthesized
  source 1..20: mol_type = other DNA
tagcttctggagcagggcgg

SEQ ID NO: 54912 - DNA, 20 bp, synthetic construct
  misc_feature 1..20: note = chemically synthesized
  source 1..20: mol_type = other DNA
cttctggagcagggcggtgg

SEQ ID NO: 54913 - DNA, 20 bp, synthetic construct
  misc_feature 1..20: note = chemically synthesized
  source 1..20: mol_type = other DNA
ttctggagcagggcggtggc

SEQ ID NO: 54914 - DNA, 20 bp, synthetic construct
  misc_feature 1..20: note = chemically synthesized
  source 1..20: mol_type = other DNA
gtgtactatgtgcccatgat

SEQ ID NO: 54915 - DNA, 20 bp, synthetic construct
  misc_feature 1..20: note = chemically synthesized
  source 1..20: mol_type = other DNA
ctctccctgatgcaccgctt

SEQ ID NO: 54916 - DNA, 20 bp, synthetic construct
  misc_feature 1..20: note = chemically synthesized
  source 1..20: mol_type = other DNA
ccctgatgcaccgctttgga

SEQ ID NO: 54917 - DNA, 20 bp, synthetic construct
  misc_feature 1..20: note = chemically synthesized
  source 1..20: mol_type = other DNA
ggcatttacctccacttttc

SEQ ID NO: 54918 - DNA, 20 bp, synthetic construct
  misc_feature 1..20: note = chemically synthesized
  source 1..20: mol_type = other DNA
tccacttttccagactgtca

SEQ ID NO: 54919 - DNA, 20 bp, synthetic construct
  misc_feature 1..20: note = chemically synthesized
  source 1..20: mol_type = other DNA
ttacctcttttttcctcctg

SEQ ID NO: 54920 - DNA, 20 bp, synthetic construct
  misc_feature 1..20: note = chemically synthesized
  source 1..20: mol_type = other DNA
gtggtcaaccccattgtcta

SEQ ID NO: 54921 - DNA, 20 bp, synthetic construct
  misc_feature 1..20: note = chemically synthesized
  source 1..20: mol_type = other DNA
tgtctatagtatcaaaatca

SEQ ID NO: 54922 - DNA, 20 bp, synthetic construct
  misc_feature 1..20: note = chemically synthesized
  source 1..20: mol_type = other DNA
aaaatcaaagaaattcgcaa

SEQ ID NO: 54923 - DNA, 20 bp, synthetic construct
  misc_feature 1..20: note = chemically synthesized
  source 1..20: mol_type = other DNA
agcgttgttcttacactatc

SEQ ID NO: 54924 - DNA, 20 bp, synthetic construct
  misc_feature 1..20: note = chemically synthesized
  source 1..20: mol_type = other DNA
gcgttgttcttacactatcc

SEQ ID NO: 54925 - DNA, 20 bp, synthetic construct
  misc_feature 1..20: note = chemically synthesized
  source 1..20: mol_type = other DNA
ttgttcttacactatccagg

SEQ ID NO: 54926 - DNA, 20 bp, synthetic construct
  misc_feature 1..20: note = chemically synthesized
  source 1..20: mol_type = other DNA
gttcttacactatccaggaa

SEQ ID NO: 54927 - DNA, 20 bp, synthetic construct
  misc_feature 1..20: note = chemically synthesized
  source 1..20: mol_type = other DNA
ttcttacactatccaggaag

SEQ ID NO: 54928 - DNA, 20 bp, synthetic construct
  misc_feature 1..20: note = chemically synthesized
  source 1..20: mol_type = other DNA
tcttacactatccaggaaga

SEQ ID NO: 54929 - DNA, 20 bp, synthetic construct
  misc_feature 1..20: note = chemically synthesized
  source 1..20: mol_type = other DNA
cttacactatccaggaagag

SEQ ID NO: 54930 - DNA, 20 bp, synthetic construct
  misc_feature 1..20: note = chemically synthesized
  source 1..20: mol_type = other DNA
cactatccaggaagaggggt

SEQ ID NO: 54931 - DNA, 20 bp, synthetic construct
  misc_feature 1..20: note = chemically synthesized
  source 1..20: mol_type = other DNA
ggaagaggggtgagttctaa

SEQ ID NO: 54932 - DNA, 20 bp, synthetic construct
  misc_feature 1..20: note = chemically synthesized
  source 1..20: mol_type = other DNA
aagaggggtgagttctaatg

SEQ ID NO: 54933 - DNA, 20 bp, synthetic construct
  misc_feature 1..20: note = chemically synthesized
  source 1..20: mol_type = other DNA
gtgagttctaatggagactg

SEQ ID NO: 54934 - DNA, 20 bp, synthetic construct
  misc_feature 1..20: note = chemically synthesized
  source 1..20: mol_type = other DNA
ggagactgaagataccctga

SEQ ID NO: 54935 - DNA, 20 bp, synthetic construct
  misc_feature 1..20: note = chemically synthesized
  source 1..20: mol_type = other DNA
ctgaagataccctgacagca

SEQ ID NO: 54936 - DNA, 20 bp, synthetic construct
  misc_feature 1..20: note = chemically synthesized
  source 1..20: mol_type = other DNA
tgaagataccctgacagcac

SEQ ID NO: 54937 - DNA, 20 bp, synthetic construct
  misc_feature 1..20: note = chemically synthesized
  source 1..20: mol_type = other DNA
accctgacagcacaggcact

SEQ ID NO: 54938 - DNA, 20 bp, synthetic construct
  misc_feature 1..20: note = chemically synthesized
  source 1..20: mol_type = other DNA
gacagcacaggcacttagat

SEQ ID NO: 54939 - DNA, 20 bp, synthetic construct
  misc_feature 1..20: note = chemically synthesized
  source 1..20: mol_type = other DNA
acagcacaggcacttagatc

SEQ ID NO: 54940 - DNA, 20 bp, synthetic construct
  misc_feature 1..20: note = chemically synthesized
  source 1..20: mol_type = other DNA
aggctttattacctgaatat

SEQ ID NO: 54941 - DNA, 20 bp, synthetic construct
  misc_feature 1..20: note = chemically synthesized
  source 1..20: mol_type = other DNA
tgcaaatatgaaaaattcca

SEQ ID NO: 54942 - DNA, 20 bp, synthetic construct
  misc_feature 1..20: note = chemically synthesized
  source 1..20: mol_type = other DNA
gcttattattgcttgttaat

SEQ ID NO: 54943 - DNA, 20 bp, synthetic construct
  misc_feature 1..20: note = chemically synthesized
  source 1..20: mol_type = other DNA
taatgagctttaacattttg

SEQ ID NO: 54944 - DNA, 20 bp, synthetic construct
  misc_feature 1..20: note = chemically synthesized
  source 1..20: mol_type = other DNA
gctttaacattttgtagatg

SEQ ID NO: 54945 - DNA, 20 bp, synthetic construct
  misc_feature 1..20: note = chemically synthesized
  source 1..20: mol_type = other DNA
ttgtagatgaagaaaaaaaa

SEQ ID NO: 54946 - DNA, 20 bp, synthetic construct
  misc_feature 1..20: note = chemically synthesized
  source 1..20: mol_type = other DNA
acagttttatatatttccct

SEQ ID NO: 54947 - DNA, 20 bp, synthetic construct
  misc_feature 1..20: note = chemically synthesized
  source 1..20: mol_type = other DNA
tttatatatttccctgagaa

SEQ ID NO: 54948 - DNA, 20 bp, synthetic construct
  misc_feature 1..20: note = chemically synthesized
  source 1..20: mol_type = other DNA
ttatatatttccctgagaat

SEQ ID NO: 54949 - DNA, 20 bp, synthetic construct
  misc_feature 1..20: note = chemically synthesized
  source 1..20: mol_type = other DNA
atttccctgagaataggaaa

SEQ ID NO: 54950 - DNA, 20 bp, synthetic construct
  misc_feature 1..20: note = chemically synthesized
  source 1..20: mol_type = other DNA
attactctgaaataaaattg

SEQ ID NO: 54951 - DNA, 20 bp, synthetic construct
  misc_feature 1..20: note = chemically synthesized
  source 1..20: mol_type = other DNA
ttactctgaaataaaattgt

SEQ ID NO: 54952 - DNA, 20 bp, synthetic construct
  misc_feature 1..20: note = chemically synthesized
  source 1..20: mol_type = other DNA
actctgaaataaaattgtgg

SEQ ID NO: 54953 - DNA, 20 bp, synthetic construct
  misc_feature 1..20: note = chemically synthesized
  source 1..20: mol_type = other DNA
ctctgaaataaaattgtggg

SEQ ID NO: 54954 - DNA, 20 bp, synthetic construct
  misc_feature 1..20: note = chemically synthesized
  source 1..20: mol_type = other DNA
ctgaaataaaattgtgggag

SEQ ID NO: 54955 - DNA, 20 bp, synthetic construct
  misc_feature 1..20: note = chemically synthesized
  source 1..20: mol_type = other DNA
tgaaataaaattgtgggagg

SEQ ID NO: 54956 - DNA, 20 bp, synthetic construct
  misc_feature 1..20: note = chemically synthesized
  source 1..20: mol_type = other DNA
taaaattgtgggaggaggca

SEQ ID NO: 54957 - DNA, 20 bp, synthetic construct
  misc_feature 1..20: note = chemically synthesized
  source 1..20: mol_type = other DNA
gtgggaggaggcatagaaca

SEQ ID NO: 54958 - DNA, 20 bp, synthetic construct
  misc_feature 1..20: note = chemically synthesized
  source 1..20: mol_type = other DNA
tgggaggaggcatagaacac

SEQ ID NO: 54959 - DNA, 20 bp, synthetic construct
  misc_feature 1..20: note = chemically synthesized
  source 1..20: mol_type = other DNA
atagaacacaggctttgtcc

SEQ ID NO: 54960 - DNA, 20 bp, synthetic construct
  misc_feature 1..20: note = chemically synthesized
  source 1..20: mol_type = other DNA
gaatccttgaatactcaatt

SEQ ID NO: 54961 - DNA, 20 bp, synthetic construct
  misc_feature 1..20: note = chemically synthesized
  source 1..20: mol_type = other DNA
atactcaattcagtgacatt

SEQ ID NO: 54962 - DNA, 20 bp, synthetic construct
  misc_feature 1..20: note = chemically synthesized
  source 1..20: mol_type = other DNA
aattcagtgacatttggttc

SEQ ID NO: 54963 - DNA, 20 bp, synthetic construct
  misc_feature 1..20: note = chemically synthesized
  source 1..20: mol_type = other DNA
attcagtgacatttggttct

SEQ ID NO: 54964 - DNA, 20 bp, synthetic construct
  misc_feature 1..20: note = chemically synthesized
  source 1..20: mol_type = other DNA
catttggttctgggaatatg

SEQ ID NO: 54965 - DNA, 20 bp, synthetic construct
  misc_feature 1..20: note = chemically synthesized
  source 1..20: mol_type = other DNA
tggttctgggaatatgtaga

SEQ ID NO: 54966 - DNA, 20 bp, synthetic construct
  misc_feature 1..20: note = chemically synthesized
  source 1..20: mol_type = other DNA
gttctgggaatatgtagaaa

SEQ ID NO: 54967 - DNA, 20 bp, synthetic construct
  misc_feature 1..20: note = chemically synthesized
  source 1..20: mol_type = other DNA
ggaatatgtagaaagagtct

SEQ ID NO: 54968 - DNA, 20 bp, synthetic construct
  misc_feature 1..20: note = chemically synthesized
  source 1..20: mol_type = other DNA
gaatatgtagaaagagtctt

SEQ ID NO: 54969 - DNA, 20 bp, synthetic construct
  misc_feature 1..20: note = chemically synthesized
  source 1..20: mol_type = other DNA
aatatgtagaaagagtcttg

SEQ ID NO: 54970 - DNA, 20 bp, synthetic construct
  misc_feature 1..20: note = chemically synthesized
  source 1..20: mol_type = other DNA
tatgtagaaagagtcttggg

SEQ ID NO: 54971 - DNA, 20 bp, synthetic construct
  misc_feature 1..20: note = chemically synthesized
  source 1..20: mol_type = other DNA
atgtagaaagagtcttgggg

SEQ ID NO: 54972 - DNA, 20 bp, synthetic construct
  misc_feature 1..20: note = chemically synthesized
  source 1..20: mol_type = other DNA
aaagagtcttggggaggttt

SEQ ID NO: 54973 - DNA, 20 bp, synthetic construct
  misc_feature 1..20: note = chemically synthesized
  source 1..20: mol_type = other DNA
cttggggaggtttaagtttc

SEQ ID NO: 54974 - DNA, 20 bp, synthetic construct
  misc_feature 1..20: note = chemically synthesized
  source 1..20: mol_type = other DNA
gtttctggttatattaaaat

SEQ ID NO: 54975 - DNA, 20 bp, synthetic construct
  misc_feature 1..20: note = chemically synthesized
  source 1..20: mol_type = other DNA
attagtgatacatacttgtg

SEQ ID NO: 54976 - DNA, 20 bp, synthetic construct
  misc_feature 1..20: note = chemically synthesized
  source 1..20: mol_type = other DNA
ttagtgatacatacttgtga

SEQ ID NO: 54977 - DNA, 20 bp, synthetic construct
  misc_feature 1..20: note = chemically synthesized
  source 1..20: mol_type = other DNA
tacttgtgaaggaaaataat

SEQ ID NO: 54978 - DNA, 20 bp, synthetic construct
  misc_feature 1..20: note = chemically synthesized
  source 1..20: mol_type = other DNA
acttgtgaaggaaaataatc

SEQ ID NO: 54979 - DNA, 20 bp, synthetic construct
  misc_feature 1..20: note = chemically synthesized
  source 1..20: mol_type = other DNA
ggaaaataatcaggacacaa

SEQ ID NO: 54980 - DNA, 20 bp, synthetic construct
  misc_feature 1..20: note = chemically synthesized
  source 1..20: mol_type = other DNA
aaaataatcaggacacaaaa

SEQ ID NO: 54981 - DNA, 20 bp, synthetic construct
  misc_feature 1..20: note = chemically synthesized
  source 1..20: mol_type = other DNA
attgtattattttgtttgta

SEQ ID NO: 54982 - DNA, 20 bp, synthetic construct
  misc_feature 1..20: note = chemically synthesized
  source 1..20: mol_type = other DNA
ttattttgtttgtatagttt

SEQ ID NO: 54983 - DNA, 20 bp, synthetic construct
  misc_feature 1..20: note = chemically synthesized
  source 1..20: mol_type = other DNA
ctaatttaatgtcaaaaaat

SEQ ID NO: 54984 - DNA, 20 bp, synthetic construct
  misc_feature 1..20: note = chemically synthesized
  source 1..20: mol_type = other DNA
agaaccctgcttacctctga

SEQ ID NO: 54985 - DNA, 20 bp, synthetic construct
  misc_feature 1..20: note = chemically synthesized
  source 1..20: mol_type = other DNA
gcttacctctgatggatata

SEQ ID NO: 54986 - DNA, 20 bp, synthetic construct
  misc_feature 1..20: note = chemically synthesized
  source 1..20: mol_type = other DNA
acctctgatggatataaaga

SEQ ID NO: 54987 - DNA, 20 bp, synthetic construct
  misc_feature 1..20: note = chemically synthesized
  source 1..20: mol_type = other DNA
tctgatggatataaagatgg

SEQ ID NO: 54988 - DNA, 20 bp, synthetic construct
  misc_feature 1..20: note = chemically synthesized
  source 1..20: mol_type = other DNA
tggatataaagatggaagaa

SEQ ID NO: 54989 - DNA, 20 bp, synthetic construct
  misc_feature 1..20: note = chemically synthesized
  source 1..20: mol_type = other DNA
ggatataaagatggaagaat

SEQ ID NO: 54990 - DNA, 20 bp, synthetic construct
  misc_feature 1..20: note = chemically synthesized
  source 1..20: mol_type = other DNA
gatataaagatggaagaatg

SEQ ID NO: 54991 - DNA, 20 bp, synthetic construct
  misc_feature 1..20: note = chemically synthesized
  source 1..20: mol_type = other DNA
tataaagatggaagaatggg

SEQ ID NO: 54992 - DNA, 20 bp, synthetic construct
  misc_feature 1..20: note = chemically synthesized
  source 1..20: mol_type = other DNA
taaagatggaagaatgggga

SEQ ID NO: 54993 - DNA, 20 bp, synthetic construct
  misc_feature 1..20: note = chemically synthesized
  source 1..20: mol_type = other DNA
ggaagaatggggagagacat

SEQ ID NO: 54994 - DNA, 20 bp, synthetic construct
  misc_feature 1..20: note = chemically synthesized
  source 1..20: mol_type = other DNA
gaagaatggggagagacatg

SEQ ID NO: 54995 - DNA, 20 bp, synthetic construct
  misc_feature 1..20: note = chemically synthesized
  source 1..20: mol_type = other DNA
gagagacatgaggcaatttc

SEQ ID NO: 54996 - DNA, 20 bp, synthetic construct
  misc_feature 1..20: note = chemically synthesized
  source 1..20: mol_type = other DNA
agagacatgaggcaatttct

SEQ ID NO: 54997 - DNA, 20 bp, synthetic construct
  misc_feature 1..20: note = chemically synthesized
  source 1..20: mol_type = other DNA
gagacatgaggcaatttctg

SEQ ID NO: 54998 - DNA, 20 bp, synthetic construct
  misc_feature 1..20: note = chemically synthesized
  source 1..20: mol_type = other DNA
gacatgaggcaatttctggg

SEQ ID NO: 54999 - DNA, 20 bp, synthetic construct
  misc_feature 1..20: note = chemically synthesized
  source 1..20: mol_type = other DNA
tgaggcaatttctggggaga

SEQ ID NO: 55000 - DNA, 20 bp, synthetic construct
  misc_feature 1..20: note = chemically synthesized
  source 1..20: mol_type = other DNA
atggaaatattttgttgtgt

SEQ ID NO: 55001 - DNA, 20 bp, synthetic construct
  misc_feature 1..20: note = chemically synthesized
  source 1..20: mol_type = other DNA
tggaaatattttgttgtgtt

SEQ ID NO: 55002 - DNA, 20 bp, synthetic construct
  misc_feature 1..20: note = chemically synthesized
  source 1..20: mol_type = other DNA
ggaaatattttgttgtgtta

SEQ ID NO: 55003 - DNA, 20 bp, synthetic construct
  misc_feature 1..20: note = chemically synthesized
  source 1..20: mol_type = other DNA
attttgttgtgttagggatg

SEQ ID NO: 55004 - DNA, 20 bp, synthetic construct
  misc_feature 1..20: note = chemically synthesized
  source 1..20: mol_type = other DNA
gttttgtcaatttgtcaaaa

SEQ ID NO: 55005 - DNA, 20 bp, synthetic construct
  misc_feature 1..20: note = chemically synthesized
  source 1..20: mol_type = other DNA
gtcaatttgtcaaaacggta

SEQ ID NO: 55006 - DNA, 20 bp, synthetic construct
  misc_feature 1..20: note = chemically synthesized
  source 1..20: mol_type = other DNA
tttgtcaaaacggtacagct

SEQ ID NO: 55007 - DNA, 20 bp, synthetic construct
  misc_feature 1..20: note = chemically synthesized
  source 1..20: mol_type = other DNA
agctaagatttgcacatttc

SEQ ID NO: 55008 - DNA, 20 bp, synthetic construct
  misc_feature 1..20: note = chemically synthesized
  source 1..20: mol_type = other DNA
gctaagatttgcacatttct

SEQ ID NO: 55009 - DNA, 20 bp, synthetic construct
  misc_feature 1..20: note = chemically synthesized
  source 1..20: mol_type = other DNA
tgaatgataataataacaaa

SEQ ID NO: 55010 - DNA, 20 bp, synthetic construct
  misc_feature 1..20: note = chemically synthesized
  source 1..20: mol_type = other DNA
gaatgataataataacaaaa

SEQ ID NO: 55011 - DNA, 20 bp, synthetic construct
  misc_feature 1..20: note = chemically synthesized
  source 1..20: mol_type = other DNA
aataataacaaaaaggaaaa

SEQ ID NO: 55012 - DNA, 20 bp, synthetic construct
  misc_feature 1..20: note = chemically synthesized
  source 1..20: mol_type = other DNA
ggaaaatagtaataataata

SEQ ID NO: 55013 - DNA, 20 bp, synthetic construct
  misc_feature 1..20: note = chemically synthesized
  source 1..20: mol_type = other DNA
gtaataataatacagatgat

SEQ ID NO: 55014 - DNA, 20 bp, synthetic construct
  misc_feature 1..20: note = chemically synthesized
  source 1..20: mol_type = other DNA
atacagatgattagatttca

SEQ ID NO: 55015 - DNA, 20 bp, synthetic construct
  misc_feature 1..20: note = chemically synthesized
  source 1..20: mol_type = other DNA
ttagatttcatagtgaatac

SEQ ID NO: 55016 - DNA, 20 bp, synthetic construct
  misc_feature 1..20: note = chemically synthesized
  source 1..20: mol_type = other DNA
tttcatagtgaatacaagtg

SEQ ID NO: 55017 - DNA, 20 bp, synthetic construct
  misc_feature 1..20: note = chemically synthesized
  source 1..20: mol_type = other DNA
aatacaagtgtggaaaatac

SEQ ID NO: 55018 - DNA, 20 bp, synthetic construct
  misc_feature 1..20: note = chemically synthesized
  source 1..20: mol_type = other DNA
aagtgtggaaaatacaagaa

SEQ ID NO: 55019 - DNA, 20 bp, synthetic construct
  misc_feature 1..20: note = chemically synthesized
  source 1..20: mol_type = other DNA
tgtaatgttgataattgttg

SEQ ID NO: 55020 - DNA, 20 bp, synthetic construct
  misc_feature 1..20: note = chemically synthesized
  source 1..20: mol_type = other DNA
taattgttgaagttgtgtca

SEQ ID NO: 55021 - DNA, 20 bp, synthetic construct
  misc_feature 1..20: note = chemically synthesized
  source 1..20: mol_type = other DNA
aattgttgaagttgtgtcat

SEQ ID NO: 55022 - DNA, 20 bp, synthetic construct
  misc_feature 1..20: note = chemically synthesized
  source 1..20: mol_type = other DNA
gaagttgtgtcatgggtgcc

SEQ ID NO: 55023 - DNA, 20 bp, synthetic construct
  misc_feature 1..20: note = chemically synthesized
  source 1..20: mol_type = other DNA
aatattctgtttactttgtg

SEQ ID NO: 55024 - DNA, 20 bp, synthetic construct
  misc_feature 1..20: note = chemically synthesized
  source 1..20: mol_type = other DNA
tttacaatttctgtaataaa

SEQ ID NO: 55025 - DNA, 20 bp, synthetic construct
  misc_feature 1..20: note = chemically synthesized
  source 1..20: mol_type = other DNA
attcttaaaaaaattatact

SEQ ID NO: 55026 - DNA, 20 bp, synthetic construct
  misc_feature 1..20: note = chemically synthesized
  source 1..20: mol_type = other DNA
ttaattgaatatgcaccatg

SEQ ID NO: 55027 - DNA, 20 bp, synthetic construct
  misc_feature 1..20: note = chemically synthesized
  source 1..20: mol_type = other DNA
attgaatatgcaccatgaag

SEQ ID NO: 55028 - DNA, 20 bp, synthetic construct
  misc_feature 1..20: note = chemically synthesized
  source 1..20: mol_type = other DNA
tgaatatgcaccatgaagca

SEQ ID NO: 55029 - DNA, 20 bp, synthetic construct
  misc_feature 1..20: note = chemically synthesized
  source 1..20: mol_type = other DNA
aagcagagataacttttaac

SEQ ID NO: 55030 - DNA, 20 bp, synthetic construct
  misc_feature 1..20: note = chemically synthesized
  source 1..20: mol_type = other DNA
agagataacttttaactggt

SEQ ID NO: 55031 - DNA, 20 bp, synthetic construct
  misc_feature 1..20: note = chemically synthesized
  source 1..20: mol_type = other DNA
gagataacttttaactggtc

SEQ ID NO: 55032 - DNA, 20 bp, synthetic construct
  misc_feature 1..20: note = chemically synthesized
  source 1..20: mol_type = other DNA
gataacttttaactggtcag

SEQ ID NO: 55033 - DNA, 20 bp, synthetic construct
  misc_feature 1..20: note = chemically synthesized
  source 1..20: mol_type = other DNA
ataacttttaactggtcagg

SEQ ID NO: 55034 - DNA, 20 bp, synthetic construct
  misc_feature 1..20: note = chemically synthesized
  source 1..20: mol_type = other DNA
ctggtcaggaggaaactgtt

SEQ ID NO: 55035 - DNA, 20 bp, synthetic construct
  misc_feature 1..20: note = chemically synthesized
  source 1..20: mol_type = other DNA
aggaggaaactgtttggctt

SEQ ID NO: 55036 - DNA, 20 bp, synthetic construct
  misc_feature 1..20: note = chemically synthesized
  source 1..20: mol_type = other DNA
ggaaactgtttggctttaga

SEQ ID NO: 55037 - DNA, 20 bp, synthetic construct
  misc_feature 1..20: note = chemically synthesized
  source 1..20: mol_type = other DNA
aaagctattttatttttaat

SEQ ID NO: 55038 - DNA, 20 bp, synthetic construct
  misc_feature 1..20: note = chemically synthesized
  source 1..20: mol_type = other DNA
atttttaatgagttcaatac

SEQ ID NO: 55039 - DNA, 20 bp, synthetic construct
  misc_feature 1..20: note = chemically synthesized
  source 1..20: mol_type = other DNA
ttaatgagttcaatactaga

SEQ ID NO: 55040 - DNA, 20 bp, synthetic construct
  misc_feature 1..20: note = chemically synthesized
  source 1..20: mol_type = other DNA
actacttgaaaatactgttt

SEQ ID NO: 55041 - DNA, 20 bp, synthetic construct
  misc_feature 1..20: note = chemically synthesized
  source 1..20: mol_type = other DNA
acttgaaaatactgttttag

SEQ ID NO: 55042 - DNA, 20 bp, synthetic construct
  misc_feature 1..20: note = chemically synthesized
  source 1..20: mol_type = other DNA
agaagaaaataactaaaaaa

SEQ ID NO: 55043 - DNA, 20 bp, synthetic construct
  misc_feature 1..20: note = chemically synthesized
  source 1..20: mol_type = other DNA
aaataactaaaaaacagaaa

SEQ ID NO: 55044 - DNA, 20 bp, synthetic construct
  misc_feature 1..20: note = chemically synthesized
  source 1..20: mol_type = other DNA
aactaaaaaacagaaaaagc

SEQ ID NO: 55045 - DNA, 20 bp, synthetic construct
  misc_feature 1..20: note = chemically synthesized
  source 1..20: mol_type = other DNA
actaaaaaacagaaaaagca

SEQ ID NO: 55046 - DNA, 20 bp, synthetic construct
  misc_feature 1..20: note = chemically synthesized
  source 1..20: mol_type = other DNA
agcaaggcctactcctgcaa

SEQ ID NO: 55047 - DNA, 20 bp, synthetic construct
  misc_feature 1..20: note = chemically synthesized
  source 1..20: mol_type = other DNA
cctactcctgcaatagtctt

SEQ ID NO: 55048 - DNA, 20 bp, synthetic construct
  misc_feature 1..20: note = chemically synthesized
  source 1..20: mol_type = other DNA
ctttggtgacatcaatcact

SEQ ID NO: 55049 - DNA, 20 bp, synthetic construct
  misc_feature 1..20: note = chemically synthesized
  source 1..20: mol_type = other DNA
tggtgacatcaatcactcgg

SEQ ID NO: 55050 - DNA, 20 bp, synthetic construct
  misc_feature 1..20: note = chemically synthesized
  source 1..20: mol_type = other DNA
tgacatcaatcactcggtag

SEQ ID NO: 55051 - DNA, 20 bp, synthetic construct
  misc_feature 1..20: note = chemically synthesized
  source 1..20: mol_type = other DNA
tcaatcactcggtagtagac

SEQ ID NO: 55052 - DNA, 20 bp, synthetic construct
  misc_feature 1..20: note = chemically synthesized
  source 1..20: mol_type = other DNA
acaagcttctgacaaacaaa

SEQ ID NO: 55053 - DNA, 20 bp, synthetic construct
  misc_feature 1..20: note = chemically synthesized
  source 1..20: mol_type = other DNA
caagcttctgacaaacaaaa

SEQ ID NO: 55054 - DNA, 20 bp, synthetic construct
  misc_feature 1..20: note = chemically synthesized
  source 1..20: mol_type = other DNA
gcttctgacaaacaaaaagg

SEQ ID NO: 55055 - DNA, 20 bp, synthetic construct
  misc_feature 1..20: note = chemically synthesized
  source 1..20: mol_type = other DNA
cttctgacaaacaaaaaggt

SEQ ID NO: 55056 - DNA, 20 bp, synthetic construct
  misc_feature 1..20: note = chemically synthesized
  source 1..20: mol_type = other DNA
ttctgacaaacaaaaaggta

SEQ ID NO: 55057 - DNA, 20 bp, synthetic construct
  misc_feature 1..20: note = chemically synthesized
  source 1..20: mol_type = other DNA
ctgacaaacaaaaaggtagg

SEQ ID NO: 55058 - DNA, 20 bp, synthetic construct
  misc_feature 1..20: note = chemically synthesized
  source 1..20: mol_type = other DNA
tgacaaacaaaaaggtaggg

SEQ ID NO: 55059 - DNA, 20 bp, synthetic construct
  misc_feature 1..20: note = chemically synthesized
  source 1..20: mol_type = other DNA
aacaaaaaggtagggaggac

SEQ ID NO: 55060 - DNA, 20 bp, synthetic construct
  misc_feature 1..20: note = chemically synthesized
  source 1..20: mol_type = other DNA
aaaaaggtagggaggaccag

SEQ ID NO: 55061 - DNA, 20 bp, synthetic construct
  misc_feature 1..20: note = chemically synthesized
  source 1..20: mol_type = other DNA
agggaggaccagaagaattc

SEQ ID NO: 55062 - DNA, 20 bp, synthetic construct
  misc_feature 1..20: note = chemically synthesized
  source 1..20: mol_type = other DNA
aagaattctagaaaatccct

SEQ ID NO: 55063 - DNA, 20 bp, synthetic construct
  misc_feature 1..20: note = chemically synthesized
  source 1..20: mol_type = other DNA
attctagaaaatccctcaga

SEQ ID NO: 55064 - DNA, 20 bp, synthetic construct
  misc_feature 1..20: note = chemically synthesized
  source 1..20: mol_type = other DNA
ttctagaaaatccctcagac

SEQ ID NO: 55065 - DNA, 20 bp, synthetic construct
  misc_feature 1..20: note = chemically synthesized
  source 1..20: mol_type = other DNA
tctagaaaatccctcagaca

SEQ ID NO: 55066 - DNA, 20 bp, synthetic construct
  misc_feature 1..20: note = chemically synthesized
  source 1..20: mol_type = other DNA
aatccctcagacagggattg

SEQ ID NO: 55067 - DNA, 20 bp, synthetic construct
  misc_feature 1..20: note = chemically synthesized
  source 1..20: mol_type = other DNA
tccctcagacagggattgca

SEQ ID NO: 55068 - DNA, 20 bp, synthetic construct
  misc_feature 1..20: note = chemically synthesized
  source 1..20: mol_type = other DNA
gcccaactttttgttttctt

SEQ ID NO: 55069 - DNA, 20 bp, synthetic construct
  misc_feature 1..20: note = chemically synthesized
  source 1..20: mol_type = other DNA
ttttgaatttccatgaacca

SEQ ID NO: 55070 - DNA, 20 bp, synthetic construct
  misc_feature 1..20: note = chemically synthesized
  source 1..20: mol_type = other DNA
gaatatcctattaaaccaca

SEQ ID NO: 55071 - DNA, 20 bp, synthetic construct
  misc_feature 1..20: note = chemically synthesized
  source 1..20: mol_type = other DNA
ctattaaaccacacagtctt

SEQ ID NO: 55072 - DNA, 20 bp, synthetic construct
  misc_feature 1..20: note = chemically synthesized
  source 1..20: mol_type = other DNA
acacagtcttgagtgattat

SEQ ID NO: 55073 - DNA, 20 bp, synthetic construct
  misc_feature 1..20: note = chemically synthesized
  source 1..20: mol_type = other DNA
tgagtgattatcagccaacc

SEQ ID NO: 55074 - DNA, 20 bp, synthetic construct
  misc_feature 1..20: note = chemically synthesized
  source 1..20: mol_type = other DNA
tcagccaaccaagtaactaa

SEQ ID NO: 55075 - DNA, 20 bp, synthetic construct
  misc_feature 1..20: note = chemically synthesized
  source 1..20: mol_type = other DNA
gccaaccaagtaactaatag

SEQ ID NO: 55076 - DNA, 20 bp, synthetic construct
  misc_feature 1..20: note = chemically synthesized
  source 1..20: mol_type = other DNA
ccaaccaagtaactaataga

SEQ ID NO: 55077 - DNA, 20 bp, synthetic construct
  misc_feature 1..20: note = chemically synthesized
  source 1..20: mol_type = other DNA
caagtaactaatagaaggtt

SEQ ID NO: 55078 - DNA, 20 bp, synthetic construct
  misc_feature 1..20: note = chemically synthesized
  source 1..20: mol_type = other DNA
gtcaaataaaaatatgtatc

SEQ ID NO: 55079 - DNA, 20 bp, synthetic construct
  misc_feature 1..20: note = chemically synthesized
  source 1..20: mol_type = other DNA
aaaaatatgtatcaagtaat

SEQ ID NO: 55080 - DNA, 20 bp, synthetic construct
  misc_feature 1..20: note = chemically synthesized
  source 1..20: mol_type = other DNA
aatatgtatcaagtaatgag

SEQ ID NO: 55081 - DNA, 20 bp, synthetic construct
  misc_feature 1..20: note = chemically synthesized
  source 1..20: mol_type = other DNA
ttttcctcgaaattaattta

SEQ ID NO: 55082 - DNA, 20 bp, synthetic construct
  misc_feature 1..20: note = chemically synthesized
  source 1..20: mol_type = other DNA
aatgtatgaaacacctttga

SEQ ID NO: 55083 - DNA, 20 bp, synthetic construct
  misc_feature 1..20: note = chemically synthesized
  source 1..20: mol_type = other DNA
acctttgaaagtgttcaatg

SEQ ID NO: 55084 - DNA, 20 bp, synthetic construct
  misc_feature 1..20: note = chemically synthesized
  source 1..20: mol_type = other DNA
tgaaagtgttcaatgtagtg

SEQ ID NO: 55085 - DNA, 20 bp, synthetic construct
  misc_feature 1..20: note = chemically synthesized
  source 1..20: mol_type = other DNA
gtgaagtcataaaaacaaca

SEQ ID NO: 55086 - DNA, 20 bp, synthetic construct
  misc_feature 1..20: note = chemically synthesized
  source 1..20: mol_type = other DNA
tgaagtcataaaaacaacat

SEQ ID NO: 55087 - DNA, 20 bp, synthetic construct
  misc_feature 1..20: note = chemically synthesized
  source 1..20: mol_type = other DNA
aaaaaaaattctcaaaattt

SEQ ID NO: 55088 - DNA, 20 bp, synthetic construct
  misc_feature 1..20: note = chemically synthesized
  source 1..20: mol_type = other DNA
aaaaaattctcaaaatttca

SEQ ID NO: 55089 - DNA, 20 bp, synthetic construct
  misc_feature 1..20: note = chemically synthesized
  source 1..20: mol_type = other DNA
ctcaaaatttcagagtaatt

SEQ ID NO: 55090 - DNA, 20 bp, synthetic construct
  misc_feature 1..20: note = chemically synthesized
  source 1..20: mol_type = other DNA
aaaatttcagagtaatttag

SEQ ID NO: 55091 - DNA, 20 bp, synthetic construct
  misc_feature 1..20: note = chemically synthesized
  source 1..20: mol_type = other DNA
ccttccttaacaataattat

SEQ ID NO: 55092 - DNA, 20 bp, synthetic construct
  misc_feature 1..20: note = chemically synthesized
  source 1..20: mol_type = other DNA
attattggtaacctccatta

SEQ ID NO: 55093 - DNA, 20 bp, synthetic construct
  misc_feature 1..20: note = chemically synthesized
  source 1..20: mol_type = other DNA
gtcctgtattactattctta

SEQ ID NO: 55094 - DNA, 20 bp, synthetic construct
  misc_feature 1..20: note = chemically synthesized
  source 1..20: mol_type = other DNA
atggtatacatgaaaaaact

SEQ ID NO: 55095 - DNA, 20 bp, synthetic construct
  misc_feature 1..20: note = chemically synthesized
  source 1..20: mol_type = other DNA
ggtatacatgaaaaaactaa

SEQ ID NO: 55096 - DNA, 20 bp, synthetic construct
  misc_feature 1..20: note = chemically synthesized
  source 1..20: mol_type = other DNA
ataatttttgtaactttatc

SEQ ID NO: 55097 - DNA, 20 bp, synthetic construct
  misc_feature 1..20: note = chemically synthesized
  source 1..20: mol_type = other DNA
actttatcaagttcacacaa

SEQ ID NO: 55098 - DNA, 20 bp, synthetic construct
  misc_feature 1..20: note = chemically synthesized
  source 1..20: mol_type = other DNA
aatggaaaacttgtacaccc

SEQ ID NO: 55099 - DNA, 20 bp, synthetic construct
  misc_feature 1..20: note = chemically synthesized
  source 1..20: mol_type = other DNA
tggaaaacttgtacacccaa

SEQ ID NO: 55100 - DNA, 20 bp, synthetic construct
  misc_feature 1..20: note = chemically synthesized
  source 1..20: mol_type = other DNA
aacttgtacacccaagagcc

SEQ ID NO: 55101 - DNA, 20 bp, synthetic construct
  misc_feature 1..20: note = chemically synthesized
  source 1..20: mol_type = other DNA
acacccaagagccaagtcct

SEQ ID NO: 55102 - DNA, 20 bp, synthetic construct
  misc_feature 1..20: note = chemically synthesized
  source 1..20: mol_type = other DNA
gtgatgttatacacttgaac

SEQ ID NO: 55103 - DNA, 20 bp, synthetic construct
  misc_feature 1..20: note = chemically synthesized
  source 1..20: mol_type = other DNA
acacttgaaccagatgtacc

SEQ ID NO: 55104 - DNA, 20 bp, synthetic construct
  misc_feature 1..20: note = chemically synthesized
  source 1..20: mol_type = other DNA
cacttgaaccagatgtacct

SEQ ID NO: 55105 - DNA, 20 bp, synthetic construct
  misc_feature 1..20: note = chemically synthesized
  source 1..20: mol_type = other DNA
atgtacctaggttgaaatct

SEQ ID NO: 55106 - DNA, 20 bp, synthetic construct
  misc_feature 1..20: note = chemically synthesized
  source 1..20: mol_type = other DNA
aatcttagctatcttgctat

SEQ ID NO: 55107 - DNA, 20 bp, synthetic construct
  misc_feature 1..20: note = chemically synthesized
  source 1..20: mol_type = other DNA
tatcttgctattagtaattg

SEQ ID NO: 55108 - DNA, 20 bp, synthetic construct
  misc_feature 1..20: note = chemically synthesized
  source 1..20: mol_type = other DNA
atcttgctattagtaattgt

SEQ ID NO: 55109 - DNA, 20 bp, synthetic construct
  misc_feature 1..20: note = chemically synthesized
  source 1..20: mol_type = other DNA
tagtaattgtgggatcttgc

SEQ ID NO: 55110 - DNA, 20 bp, synthetic construct
  misc_feature 1..20: note = chemically synthesized
  source 1..20: mol_type = other DNA
taattgtgggatcttgctag

SEQ ID NO: 55111 - DNA, 20 bp, synthetic construct
  misc_feature 1..20: note = chemically synthesized
  source 1..20: mol_type = other DNA
ttattcatttataaatgaat

SEQ ID NO: 55112 - DNA, 20 bp, synthetic construct
  misc_feature 1..20: note = chemically synthesized
  source 1..20: mol_type = other DNA
atgaataagaaaataaaatc

SEQ ID NO: 55113 - DNA, 20 bp, synthetic construct
  misc_feature 1..20: note = chemically synthesized
  source 1..20: mol_type = other DNA
atccagcttttatgatcttg

SEQ ID NO: 55114 - DNA, 20 bp, synthetic construct
  misc_feature 1..20: note = chemically synthesized
  source 1..20: mol_type = other DNA
atcttgaagattaaatgaaa

SEQ ID NO: 55115 - DNA, 20 bp, synthetic construct
  misc_feature 1..20: note = chemically synthesized
  source 1..20: mol_type = other DNA
taaatgaaatggtgcacatt

SEQ ID NO: 55116 - DNA, 20 bp, synthetic construct
  misc_feature 1..20: note = chemically synthesized
  source 1..20: mol_type = other DNA
aatggtgcacattaagcaat

SEQ ID NO: 55117 - DNA, 20 bp, synthetic construct
  misc_feature 1..20: note = chemically synthesized
  source 1..20: mol_type = other DNA
tgcacattaagcaattagca

SEQ ID NO: 55118 - DNA, 20 bp, synthetic construct
  misc_feature 1..20: note = chemically synthesized
  source 1..20: mol_type = other DNA
taagcaattagcaaagttcc

SEQ ID NO: 55119 - DNA, 20 bp, synthetic construct
  misc_feature 1..20: note = chemically synthesized
  source 1..20: mol_type = other DNA
cctagtaaaatttgctcaat

SEQ ID NO: 55120 - DNA, 20 bp, synthetic construct
  misc_feature 1..20: note = chemically synthesized
  source 1..20: mol_type = other DNA
ataagtaattatattttatt

SEQ ID NO: 55121 - DNA, 20 bp, synthetic construct
  misc_feature 1..20: note = chemically synthesized
  source 1..20: mol_type = other DNA
gactacaatacgtgaataca

SEQ ID NO: 55122 - DNA, 20 bp, synthetic construct
  misc_feature 1..20: note = chemically synthesized
  source 1..20: mol_type = other DNA
tcaaatttcacaattcctga

SEQ ID NO: 55123 - DNA, 20 bp, synthetic construct
  misc_feature 1..20: note = chemically synthesized
  source 1..20: mol_type = other DNA
taaatgctaattttaaactc

SEQ ID NO: 55124 - DNA, 20 bp, synthetic construct
  misc_feature 1..20: note = chemically synthesized
  source 1..20: mol_type = other DNA
actcaagtacataaaaatta

SEQ ID NO: 55125 - DNA, 20 bp, synthetic construct
  misc_feature 1..20: note = chemically synthesized
  source 1..20: mol_type = other DNA
gtcacaaatttctctgtcac

SEQ ID NO: 55126 - DNA, 20 bp, synthetic construct
  misc_feature 1..20: note = chemically synthesized
  source 1..20: mol_type = other DNA
aatttctctgtcacgagcta

SEQ ID NO: 55127 - DNA, 20 bp, synthetic construct
  misc_feature 1..20: note = chemically synthesized
  source 1..20: mol_type = other DNA
gagctatagtgtaccatact

SEQ ID NO: 55128 - DNA, 20 bp, synthetic construct
  misc_feature 1..20: note = chemically synthesized
  source 1..20: mol_type = other DNA
accatactaagtgatttata

SEQ ID NO: 55129 - DNA, 20 bp, synthetic construct
  misc_feature 1..20: note = chemically synthesized
  source 1..20: mol_type = other DNA
actaagtgatttatatagat

SEQ ID NO: 55130 - DNA, 20 bp, synthetic construct
  misc_feature 1..20: note = chemically synthesized
  source 1..20: mol_type = other DNA
agattagttcatttaatcca

SEQ ID NO: 55131 - DNA, 20 bp, synthetic construct
  misc_feature 1..20: note = chemically synthesized
  source 1..20: mol_type = other DNA
atccacggaacaaatatatg

SEQ ID NO: 55132 - DNA, 20 bp, synthetic construct
  misc_feature 1..20: note = chemically synthesized
  source 1..20: mol_type = other DNA
caaatatatgaagaaattat

SEQ ID NO: 55133 - DNA, 20 bp, synthetic construct
  misc_feature 1..20: note = chemically synthesized
  source 1..20: mol_type = other DNA
ttgtctacatgttacaaatg

SEQ ID NO: 55134 - DNA, 20 bp, synthetic construct
  misc_feature 1..20: note = chemically synthesized
  source 1..20: mol_type = other DNA
acatgttacaaatgtagaaa

SEQ ID NO: 55135 - DNA, 20 bp, synthetic construct
  misc_feature 1..20: note = chemically synthesized
  source 1..20: mol_type = other DNA
caaatgtagaaacagaaaca

SEQ ID NO: 55136 - DNA, 20 bp, synthetic construct
  misc_feature 1..20: note = chemically synthesized
  source 1..20: mol_type = other DNA
aatgtagaaacagaaacata

SEQ ID NO: 55137 - DNA, 20 bp, synthetic construct
  misc_feature 1..20: note = chemically synthesized
  source 1..20: mol_type = other DNA
gtagaaacagaaacatagag

SEQ ID NO: 55138 - DNA, 20 bp, synthetic construct
  misc_feature 1..20: note = chemically synthesized
  source 1..20: mol_type = other DNA
aacagaaacatagagaagtc

SEQ ID NO: 55139 - DNA, 20 bp, synthetic construct
  misc_feature 1..20: note = chemically synthesized
  source 1..20: mol_type = other DNA
aagtcaagtcatcatgcccc

SEQ ID NO: 55140 - DNA, 20 bp, synthetic construct
  misc_feature 1..20: note = chemically synthesized
  source 1..20: mol_type = other DNA
agtcatcatgccccaagtca

SEQ ID NO: 55141 - DNA, 20 bp, synthetic construct
  misc_feature 1..20: note = chemically synthesized
  source 1..20: mol_type = other DNA
tcatcatgccccaagtcaaa

SEQ ID NO: 55142 - DNA, 20 bp, synthetic construct
  misc_feature 1..20: note = chemically synthesized
  source 1..20: mol_type = other DNA
ccccaagtcaaagagttaat

SEQ ID NO: 55143 - DNA, 20 bp, synthetic construct
  misc_feature 1..20: note = chemically synthesized
  source 1..20: mol_type = other DNA
caagtcaaagagttaataag

SEQ ID NO: 55144 - DNA, 20 bp, synthetic construct
  misc_feature 1..20: note = chemically synthesized
  source 1..20: mol_type = other DNA
gtcaaagagttaataagtgg

SEQ ID NO: 55145 - DNA, 20 bp, synthetic construct
  misc_feature 1..20: note = chemically synthesized
  source 1..20: mol_type = other DNA
gcagaatcacaactcaaaac

SEQ ID NO: 55146 - DNA, 20 bp, synthetic construct
  misc_feature 1..20: note = chemically synthesized
  source 1..20: mol_type = other DNA
caactaaaaacctgattctt

SEQ ID NO: 55147 - DNA, 20 bp, synthetic construct
  misc_feature 1..20: note = chemically synthesized
  source 1..20: mol_type = other DNA
tctttagcccaccatattat

SEQ ID NO: 55148 - DNA, 20 bp, synthetic construct
  misc_feature 1..20: note = chemically synthesized
  source 1..20: mol_type = other DNA
ttagcccaccatattatcag

SEQ ID NO: 55149 - DNA, 20 bp, synthetic construct
  misc_feature 1..20: note = chemically synthesized
  source 1..20: mol_type = other DNA
tggtcccataacttaaaatt

SEQ ID NO: 55150 - DNA, 20 bp, synthetic construct
  misc_feature 1..20: note = chemically synthesized
  source 1..20: mol_type = other DNA
ttcagatttgactttaaaat

SEQ ID NO: 55151 - DNA, 20 bp, synthetic construct
  misc_feature 1..20: note = chemically synthesized
  source 1..20: mol_type = other DNA
gactttaaaattggaatctg

SEQ ID NO: 55152 - DNA, 20 bp, synthetic construct
  misc_feature 1..20: note = chemically synthesized
  source 1..20: mol_type = other DNA
attggaatctgaagaacacc

SEQ ID NO: 55153 - DNA, 20 bp, synthetic construct
  misc_feature 1..20: note = chemically synthesized
  source 1..20: mol_type = other DNA
tgtaaaccattttctccttt

SEQ ID NO: 55154 - DNA, 20 bp, synthetic construct
  misc_feature 1..20: note = chemically synthesized
  source 1..20: mol_type = other DNA
ttttctcctttgagattcat

SEQ ID NO: 55155 - DNA, 20 bp, synthetic construct
  misc_feature 1..20: note = chemically synthesized
  source 1..20: mol_type = other DNA
tttctcctttgagattcatg

SEQ ID NO: 55156 - DNA, 20 bp, synthetic construct
  misc_feature 1..20: note = chemically synthesized
  source 1..20: mol_type = other DNA
acctctgtttcctctaatta

SEQ ID NO: 55157 - DNA, 20 bp, synthetic construct
  misc_feature 1..20: note = chemically synthesized
  source 1..20: mol_type = other DNA
tcatatattaataatgtata

SEQ ID NO: 55158 - DNA, 20 bp, synthetic construct
  misc_feature 1..20: note = chemically synthesized
  source 1..20: mol_type = other DNA
catatattaataatgtataa

SEQ ID NO: 55159 - DNA, 20 bp, synthetic construct
  misc_feature 1..20: note = chemically synthesized
  source 1..20: mol_type = other DNA
taatgtataaaggttttctc

SEQ ID NO: 55160 - DNA, 20 bp, synthetic construct
  misc_feature 1..20: note = chemically synthesized
  source 1..20: mol_type = other DNA
atgtataaaggttttctcaa

SEQ ID NO: 55161 - DNA, 20 bp, synthetic construct
  misc_feature 1..20: note = chemically synthesized
  source 1..20: mol_type = other DNA
tgtataaaggttttctcaag

SEQ ID NO: 55162 - DNA, 20 bp, synthetic construct
  misc_feature 1..20: note = chemically synthesized
  source 1..20: mol_type = other DNA
tctcaagaggatctttataa

SEQ ID NO: 55163 - DNA, 20 bp, synthetic construct
  misc_feature 1..20: note = chemically synthesized
  source 1..20: mol_type = other DNA
ctcaagaggatctttataaa

SEQ ID NO: 55164 - DNA, 20 bp, synthetic construct
  misc_feature 1..20: note = chemically synthesized
  source 1..20: mol_type = other DNA
tcaagaggatctttataaaa

SEQ ID NO: 55165 - DNA, 20 bp, synthetic construct
  misc_feature 1..20: note = chemically synthesized
  source 1..20: mol_type = other DNA
caagaggatctttataaaag

SEQ ID NO: 55166 - DNA, 20 bp, synthetic construct
  misc_feature 1..20: note = chemically synthesized
  source 1..20: mol_type = other DNA
taaaaggggccttcccacat

SEQ ID NO: 55167 - DNA, 20 bp, synthetic construct
  misc_feature 1..20: note = chemically synthesized
  source 1..20: mol_type = other DNA
cccacattagtttaactgct

SEQ ID NO: 55168 - DNA, 20 bp, synthetic construct
  misc_feature 1..20: note = chemically synthesized
  source 1..20: mol_type = other DNA
ccacattagtttaactgctt

SEQ ID NO: 55169 - DNA, 20 bp, synthetic construct
  misc_feature 1..20: note = chemically synthesized
  source 1..20: mol_type = other DNA
acttcctcaaccaacacttt

SEQ ID NO: 55170 - DNA, 20 bp, synthetic construct
  misc_feature 1..20: note = chemically synthesized
  source 1..20: mol_type = other DNA
cacttttagaactatcatct

SEQ ID NO: 55171 - DNA, 20 bp, synthetic construct
  misc_feature 1..20: note = chemically synthesized
  source 1..20: mol_type = other DNA
actatcatctaagattacat

SEQ ID NO: 55172 - DNA, 20 bp, synthetic construct
  misc_feature 1..20: note = chemically synthesized
  source 1..20: mol_type = other DNA
acaataaataaatacttttt

SEQ ID NO: 55173 - DNA, 20 bp, synthetic construct
  misc_feature 1..20: note = chemically synthesized
  source 1..20: mol_type = other DNA
taaataaatactttttaagc

SEQ ID NO: 55174 - DNA, 20 bp, synthetic construct
  misc_feature 1..20: note = chemically synthesized
  source 1..20: mol_type = other DNA
tattacatattattcattct

SEQ ID NO: 55175 - DNA, 20 bp, synthetic construct
  misc_feature 1..20: note = chemically synthesized
  source 1..20: mol_type = other DNA
catattattcattctaagtg

SEQ ID NO: 55176 - DNA, 20 bp, synthetic construct
  misc_feature 1..20: note = chemically synthesized
  source 1..20: mol_type = other DNA
attcattctaagtgtagtcc

SEQ ID NO: 55177 - DNA, 20 bp, synthetic construct
  misc_feature 1..20: note = chemically synthesized
  source 1..20: mol_type = other DNA
tctaagtgtagtcctagata

SEQ ID NO: 55178 - DNA, 20 bp, synthetic construct
  misc_feature 1..20: note = chemically synthesized
  source 1..20: mol_type = other DNA
aagtgtagtcctagatatag

SEQ ID NO: 55179 - DNA, 20 bp, synthetic construct
  misc_feature 1..20: note = chemically synthesized
  source 1..20: mol_type = other DNA
gtgtagtcctagatatagta

SEQ ID NO: 55180 - DNA, 20 bp, synthetic construct
  misc_feature 1..20: note = chemically synthesized
  source 1..20: mol_type = other DNA
atatagtagagtactacgcc

SEQ ID NO: 55181 - DNA, 20 bp, synthetic construct
  misc_feature 1..20: note = chemically synthesized
  source 1..20: mol_type = other DNA
agagtactacgccaagacat

SEQ ID NO: 55182 - DNA, 20 bp, synthetic construct
  misc_feature 1..20: note = chemically synthesized
  source 1..20: mol_type = other DNA
gagtactacgccaagacatc

SEQ ID NO: 55183 - DNA, 20 bp, synthetic construct
  misc_feature 1..20: note = chemically synthesized
  source 1..20: mol_type = other DNA
ctacgccaagacatcaggtc

SEQ ID NO: 55184 - DNA, 20 bp, synthetic construct
  misc_feature 1..20: note = chemically synthesized
  source 1..20: mol_type = other DNA
tacgccaagacatcaggtca

SEQ ID NO: 55185 - DNA, 20 bp, synthetic construct
  misc_feature 1..20: note = chemically synthesized
  source 1..20: mol_type = other DNA
gacatcaggtcaaggacaaa

SEQ ID NO: 55186 - DNA, 20 bp, synthetic construct
  misc_feature 1..20: note = chemically synthesized
  source 1..20: mol_type = other DNA
ggacaaaaagatgatcctaa

SEQ ID NO: 55187 - DNA, 20 bp, synthetic construct
  misc_feature 1..20: note = chemically synthesized
  source 1..20: mol_type = other DNA
caaaaagatgatcctaaaag

SEQ ID NO: 55188 - DNA, 20 bp, synthetic construct
  misc_feature 1..20: note = chemically synthesized
  source 1..20: mol_type = other DNA
aaagatgatcctaaaagcag

SEQ ID NO: 55189 - DNA, 20 bp, synthetic construct
  misc_feature 1..20: note = chemically synthesized
  source 1..20: mol_type = other DNA
agatgatcctaaaagcagaa

SEQ ID NO: 55190 - DNA, 20 bp, synthetic construct
  misc_feature 1..20: note = chemically synthesized
  source 1..20: mol_type = other DNA
atcctaaaagcagaagagat

SEQ ID NO: 55191 - DNA, 20 bp, synthetic construct
  misc_feature 1..20: note = chemically synthesized
  source 1..20: mol_type = other DNA
cagaagagatgagaaacaaa

SEQ ID NO: 55192 - DNA, 20 bp, synthetic construct
  misc_feature 1..20: note = chemically synthesized
  source 1..20: mol_type = other DNA
tgagaaacaaatagcatata

SEQ ID NO: 55193 - DNA, 20 bp, synthetic construct
  misc_feature 1..20: note = chemically synthesized
  source 1..20: mol_type = other DNA
gagaaacaaatagcatataa

SEQ ID NO: 55194 - DNA, 20 bp, synthetic construct
  misc_feature 1..20: note = chemically synthesized
  source 1..20: mol_type = other DNA
gaaacaaatagcatataaag

SEQ ID NO: 55195 - DNA, 20 bp, synthetic construct
  misc_feature 1..20: note = chemically synthesized
  source 1..20: mol_type = other DNA
tgtgacaacaaacatctcaa

SEQ ID NO: 55196 - DNA, 20 bp, synthetic construct
  misc_feature 1..20: note = chemically synthesized
  source 1..20: mol_type = other DNA
acatctcaatagaaatcaca

SEQ ID NO: 55197 - DNA, 20 bp, synthetic construct
  misc_feature 1..20: note = chemically synthesized
  source 1..20: mol_type = other DNA
caatagaaatcacacagtcc

SEQ ID NO: 55198 - DNA, 20 bp, synthetic construct
  misc_feature 1..20: note = chemically synthesized
  source 1..20: mol_type = other DNA
atagaaatcacacagtccaa

SEQ ID NO: 55199 - DNA, 20 bp, synthetic construct
  misc_feature 1..20: note = chemically synthesized
  source 1..20: mol_type = other DNA
agaaatcacacagtccaaga

SEQ ID NO: 55200 - DNA, 20 bp, synthetic construct
  misc_feature 1..20: note = chemically synthesized
  source 1..20: mol_type = other DNA
aaatcacacagtccaagaga

SEQ ID NO: 55201 - DNA, 20 bp, synthetic construct
  misc_feature 1..20: note = chemically synthesized
  source 1..20: mol_type = other DNA
agagtcgaatgaaattttca

SEQ ID NO: 55202 - DNA, 20 bp, synthetic construct
  misc_feature 1..20: note = chemically synthesized
  source 1..20: mol_type = other DNA
aatgaaattttcaaagcgct

SEQ ID NO: 55203 - DNA, 20 bp, synthetic construct
  misc_feature 1..20: note = chemically synthesized
  source 1..20: mol_type = other DNA
atgaaattttcaaagcgctc

SEQ ID NO: 55204 - DNA, 20 bp, synthetic construct
  misc_feature 1..20: note = chemically synthesized
  source 1..20: mol_type = other DNA
tgaaattttcaaagcgctca

SEQ ID NO: 55205 - DNA, 20 bp, synthetic construct
  misc_feature 1..20: note = chemically synthesized
  source 1..20: mol_type = other DNA
ttcaaagcgctcagggataa

SEQ ID NO: 55206 - DNA, 20 bp, synthetic construct
  misc_feature 1..20: note = chemically synthesized
  source 1..20: mol_type = other DNA
ataaaagaaaactgatattc

SEQ ID NO: 55207 - DNA, 20 bp, synthetic construct
  misc_feature 1..20: note = chemically synthesized
  source 1..20: mol_type = other DNA
tgatattcaagaatatttta

SEQ ID NO: 55208 - DNA, 20 bp, synthetic construct
  misc_feature 1..20: note = chemically synthesized
  source 1..20: mol_type = other DNA
gatattcaagaatattttat

SEQ ID NO: 55209 - DNA, 20 bp, synthetic construct
  misc_feature 1..20: note = chemically synthesized
  source 1..20: mol_type = other DNA
atattcaagaatattttata

SEQ ID NO: 55210 - DNA, 20 bp, synthetic construct
  misc_feature 1..20: note = chemically synthesized
  source 1..20: mol_type = other DNA
taaaactgttattcaaatat

SEQ ID NO: 55211 - DNA, 20 bp, synthetic construct
  misc_feature 1..20: note = chemically synthesized
  source 1..20: mol_type = other DNA
tcaaatataagcaatatata

SEQ ID NO: 55212 - DNA, 20 bp, synthetic construct
  misc_feature 1..20: note = chemically synthesized
  source 1..20: mol_type = other DNA
gcaatatataaagtctttcc

SEQ ID NO: 55213 - DNA, 20 bp, synthetic construct
  misc_feature 1..20: note = chemically synthesized
  source 1..20: mol_type = other DNA
agtctttcccagacaaacaa

SEQ ID NO: 55214 - DNA, 20 bp, synthetic construct
  misc_feature 1..20: note = chemically synthesized
  source 1..20: mol_type = other DNA
ttcccagacaaacaaaagtt

SEQ ID NO: 55215 - DNA, 20 bp, synthetic construct
  misc_feature 1..20: note = chemically synthesized
  source 1..20: mol_type = other DNA
cccagacaaacaaaagttga

SEQ ID NO: 55216 - DNA, 20 bp, synthetic construct
  misc_feature 1..20: note = chemically synthesized
  source 1..20: mol_type = other DNA
ttgagagaattcaccaacac

SEQ ID NO: 55217 - DNA, 20 bp, synthetic construct
  misc_feature 1..20: note = chemically synthesized
  source 1..20: mol_type = other DNA
ccatcttgcaaaaaatgcta

SEQ ID NO: 55218 - DNA, 20 bp, synthetic construct
  misc_feature 1..20: note = chemically synthesized
  source 1..20: mol_type = other DNA
catcttgcaaaaaatgctaa

SEQ ID NO: 55219 - DNA, 20 bp, synthetic construct
  misc_feature 1..20: note = chemically synthesized
  source 1..20: mol_type = other DNA
atcttgcaaaaaatgctaaa

SEQ ID NO: 55220 - DNA, 20 bp, synthetic construct
  misc_feature 1..20: note = chemically synthesized
  source 1..20: mol_type = other DNA
cttgcaaaaaatgctaaagg

SEQ ID NO: 55221 - DNA, 20 bp, synthetic construct
  misc_feature 1..20: note = chemically synthesized
  source 1..20: mol_type = other DNA
aagggagttatgcaatctga

SEQ ID NO: 55222 - DNA, 20 bp, synthetic construct
  misc_feature 1..20: note = chemically synthesized
  source 1..20: mol_type = other DNA
ttatgcaatctgaaagaaaa

SEQ ID NO: 55223 - DNA, 20 bp, synthetic construct
  misc_feature 1..20: note = chemically synthesized
  source 1..20: mol_type = other DNA
aaaaagacattaacatgcaa

SEQ ID NO: 55224 - DNA, 20 bp, synthetic construct
  misc_feature 1..20: note = chemically synthesized
  source 1..20: mol_type = other DNA
atgcaaaagaaaacttttca

SEQ ID NO: 55225 - DNA, 20 bp, synthetic construct
  misc_feature 1..20: note = chemically synthesized
  source 1..20: mol_type = other DNA
tttcaaagtatgaaacccac

SEQ ID NO: 55226 - DNA, 20 bp, synthetic construct
  misc_feature 1..20: note = chemically synthesized
  source 1..20: mol_type = other DNA
tgaaacccactggtaaaatt

SEQ ID NO: 55227 - DNA, 20 bp, synthetic construct
  misc_feature 1..20: note = chemically synthesized
  source 1..20: mol_type = other DNA
cactggtaaaattaagtaca

SEQ ID NO: 55228 - DNA, 20 bp, synthetic construct
  misc_feature 1..20: note = chemically synthesized
  source 1..20: mol_type = other DNA
attaagtacatagacaaacc

SEQ ID NO: 55229 - DNA, 20 bp, synthetic construct
  misc_feature 1..20: note = chemically synthesized
  source 1..20: mol_type = other DNA
taccccattactgtattttt

SEQ ID NO: 55230 - DNA, 20 bp, synthetic construct
  misc_feature 1..20: note = chemically synthesized
  source 1..20: mol_type = other DNA
tttttggtgtgcaatccaca

SEQ ID NO: 55231 - DNA, 20 bp, synthetic construct
  misc_feature 1..20: note = chemically synthesized
  source 1..20: mol_type = other DNA
gtgcaatccacacagaactc

SEQ ID NO: 55232 - DNA, 20 bp, synthetic construct
  misc_feature 1..20: note = chemically synthesized
  source 1..20: mol_type = other DNA
aaaaacaaatctttcaaaaa

SEQ ID NO: 55233 - DNA, 20 bp, synthetic construct
  misc_feature 1..20: note = chemically synthesized
  source 1..20: mol_type = other DNA
aaatctttcaaaaacagtaa

SEQ ID NO: 55234 - DNA, 20 bp, synthetic construct
  misc_feature 1..20: note = chemically synthesized
  source 1..20: mol_type = other DNA
ttcaaaaacagtaatagcta

SEQ ID NO: 55235 - DNA, 20 bp, synthetic construct
  misc_feature 1..20: note = chemically synthesized
  source 1..20: mol_type = other DNA
aatagctatagcaacctttt

SEQ ID NO: 55236 - DNA, 20 bp, synthetic construct
  misc_feature 1..20: note = chemically synthesized
  source 1..20: mol_type = other DNA
tatagcaaccttttaagatg

SEQ ID NO: 55237 - DNA, 20 bp, synthetic construct
  misc_feature 1..20: note = chemically synthesized
  source 1..20: mol_type = other DNA
atagcaaccttttaagatgt

SEQ ID NO: 55238 - DNA, 20 bp, synthetic construct
  misc_feature 1..20: note = chemically synthesized
  source 1..20: mol_type = other DNA
taatataaaatatgtaaaat

SEQ ID NO: 55239 - DNA, 20 bp, synthetic construct
  misc_feature 1..20: note = chemically synthesized
  source 1..20: mol_type = other DNA
aaatatgtaaaatgagacaa

SEQ ID NO: 55240 - DNA, 20 bp, synthetic construct
  misc_feature 1..20: note = chemically synthesized
  source 1..20: mol_type = other DNA
atgagacaaaagtcaaaatg

SEQ ID NO: 55241 - DNA, 20 bp, synthetic construct
  misc_feature 1..20: note = chemically synthesized
  source 1..20: mol_type = other DNA
tgagacaaaagtcaaaatgt

SEQ ID NO: 55242 - DNA, 20 bp, synthetic construct
  misc_feature 1..20: note = chemically synthesized
  source 1..20: mol_type = other DNA
gagacaaaagtcaaaatgtg

SEQ ID NO: 55243 - DNA, 20 bp, synthetic construct
  misc_feature 1..20: note = chemically synthesized
  source 1..20: mol_type = other DNA
agacaaaagtcaaaatgtgg

SEQ ID NO: 55244 - DNA, 20 bp, synthetic construct
  misc_feature 1..20: note = chemically synthesized
  source 1..20: mol_type = other DNA
caaaagtcaaaatgtggggg

SEQ ID NO: 55245 - DNA, 20 bp, synthetic construct
  misc_feature 1..20: note = chemically synthesized
  source 1..20: mol_type = other DNA
aaagtcaaaatgtgggggtg

SEQ ID NO: 55246 - DNA, 20 bp, synthetic construct
  misc_feature 1..20: note = chemically synthesized
  source 1..20: mol_type = other DNA
gtcaaaatgtgggggtggag

SEQ ID NO: 55247 - DNA, 20 bp, synthetic construct
  misc_feature 1..20: note = chemically synthesized
  source 1..20: mol_type = other DNA
caaaatgtgggggtggagtg

SEQ ID NO: 55248 - DNA, 20 bp, synthetic construct
  misc_feature 1..20: note = chemically synthesized
  source 1..20: mol_type = other DNA
gtgggggtggagtggagtta

SEQ ID NO: 55249 - DNA, 20 bp, synthetic construct
  misc_feature 1..20: note = chemically synthesized
  source 1..20: mol_type = other DNA
ggtggagtggagttaaagtg

SEQ ID NO: 55250 - DNA, 20 bp, synthetic construct
  misc_feature 1..20: note = chemically synthesized
  source 1..20: mol_type = other DNA
tattcctttatttgcgatct

SEQ ID NO: 55251 - DNA, 20 bp, synthetic construct
  misc_feature 1..20: note = chemically synthesized
  source 1..20: mol_type = other DNA
aaataacttgctatatttat

SEQ ID NO: 55252 - DNA, 20 bp, synthetic construct
  misc_feature 1..20: note = chemically synthesized
  source 1..20: mol_type = other DNA
atttataagatgtttcttgt

SEQ ID NO: 55253 - DNA, 20 bp, synthetic construct
  misc_feature 1..20: note = chemically synthesized
  source 1..20: mol_type = other DNA
gatgtttcttgtaagcccca

SEQ ID NO: 55254 - DNA, 20 bp, synthetic construct
  misc_feature 1..20: note = chemically synthesized
  source 1..20: mol_type = other DNA
tgtaagccccatggtaacca

SEQ ID NO: 55255 - DNA, 20 bp, synthetic construct
  misc_feature 1..20: note = chemically synthesized
  source 1..20: mol_type = other DNA
cacagcacaaaaatctataa

SEQ ID NO: 55256 - DNA, 20 bp, synthetic construct
  misc_feature 1..20: note = chemically synthesized
  source 1..20: mol_type = other DNA
atagatttactaaaaataaa

SEQ ID NO: 55257 - DNA, 20 bp, synthetic construct
  misc_feature 1..20: note = chemically synthesized
  source 1..20: mol_type = other DNA
aacaaattaaaatatgctac

SEQ ID NO: 55258 - DNA, 20 bp, synthetic construct
  misc_feature 1..20: note = chemically synthesized
  source 1..20: mol_type = other DNA
caaattaaaatatgctacca

SEQ ID NO: 55259 - DNA, 20 bp, synthetic construct
  misc_feature 1..20: note = chemically synthesized
  source 1..20: mol_type = other DNA
gagataatcacataaccatg

SEQ ID NO: 55260 - DNA, 20 bp, synthetic construct
  misc_feature 1..20: note = chemically synthesized
  source 1..20: mol_type = other DNA
agataatcacataaccatga

SEQ ID NO: 55261 - DNA, 20 bp, synthetic construct
  misc_feature 1..20: note = chemically synthesized
  source 1..20: mol_type = other DNA
cataaccatgaaggaaaaaa

SEQ ID NO: 55262 - DNA, 20 bp, synthetic construct
  misc_feature 1..20: note = chemically synthesized
  source 1..20: mol_type = other DNA
ataaccatgaaggaaaaaaa

SEQ ID NO: 55263 - DNA, 20 bp, synthetic construct
  misc_feature 1..20: note = chemically synthesized
  source 1..20: mol_type = other DNA
accatgaaggaaaaaaaagg

SEQ ID NO: 55264 - DNA, 20 bp, synthetic construct
  misc_feature 1..20: note = chemically synthesized
  source 1..20: mol_type = other DNA
catgaaggaaaaaaaaggaa

SEQ ID NO: 55265 - DNA, 20 bp, synthetic construct
  misc_feature 1..20: note = chemically synthesized
  source 1..20: mol_type = other DNA
tgaaggaaaaaaaaggaaga

SEQ ID NO: 55266 - DNA, 20 bp, synthetic construct
  misc_feature 1..20: note = chemically synthesized
  source 1..20: mol_type = other DNA
gaaggaaaaaaaaggaagag

SEQ ID NO: 55267 - DNA, 20 bp, synthetic construct
  misc_feature 1..20: note = chemically synthesized
  source 1..20: mol_type = other DNA
aggaaaaaaaaggaagagag

SEQ ID NO: 55268 - DNA, 20 bp, synthetic construct
  misc_feature 1..20: note = chemically synthesized
  source 1..20: mol_type = other DNA
ggaagagaggagtctccata

SEQ ID NO: 55269 - DNA, 20 bp, synthetic construct
  misc_feature 1..20: note = chemically synthesized
  source 1..20: mol_type = other DNA
gtctccatacagccaaaaat

SEQ ID NO: 55270 - DNA, 20 bp, synthetic construct
  misc_feature 1..20: note = chemically synthesized
  source 1..20: mol_type = other DNA
aaaaaaaaaaaaaaaaaaaa

SEQ ID NO: 55271 - DNA, 20 bp, synthetic construct
  misc_feature 1..20: note = chemically synthesized
  source 1..20: mol_type = other DNA
aaaaaaaaaaaaaaaaaaaa

SEQ ID NO: 55272 - DNA, 20 bp, synthetic construct
  misc_feature 1..20: note = chemically synthesized
  source 1..20: mol_type = other DNA
aaaaaaaggaaatccttact

SEQ ID NO: 55273 - DNA, 20 bp, synthetic construct
  misc_feature 1..20: note = chemically synthesized
  source 1..20: mol_type = other DNA
ccttacttagtaactacact

SEQ ID NO: 55274 - DNA, 20 bp, synthetic construct
  misc_feature 1..20: note = chemically synthesized
  source 1..20: mol_type = other DNA
gtaactacactgagtgtaaa

SEQ ID NO: 55275 - DNA, 20 bp, synthetic construct
  misc_feature 1..20: note = chemically synthesized
  source 1..20: mol_type = other DNA
acactgagtgtaaatagtct

SEQ ID NO: 55276 - DNA, 20 bp, synthetic construct
  misc_feature 1..20: note = chemically synthesized
  source 1..20: mol_type = other DNA
agtctcagttccccaattaa

SEQ ID NO: 55277 - DNA, 20 bp, synthetic construct
  misc_feature 1..20: note = chemically synthesized
  source 1..20: mol_type = other DNA
agttccccaattaaaagtaa

SEQ ID NO: 55278 - DNA, 20 bp, synthetic construct
  misc_feature 1..20: note = chemically synthesized
  source 1..20: mol_type = other DNA
cccaattaaaagtaatagaa

SEQ ID NO: 55279 - DNA, 20 bp, synthetic construct
  misc_feature 1..20: note = chemically synthesized
  source 1..20: mol_type = other DNA
aaaagtaatagaatggtaaa

SEQ ID NO: 55280 - DNA, 20 bp, synthetic construct
  misc_feature 1..20: note = chemically synthesized
  source 1..20: mol_type = other DNA
aatagaatggtaaatggata

SEQ ID NO: 55281 - DNA, 20 bp, synthetic construct
  misc_feature 1..20: note = chemically synthesized
  source 1..20: mol_type = other DNA
tccaactttatgcgatcttc

SEQ ID NO: 55282 - DNA, 20 bp, synthetic construct
  misc_feature 1..20: note = chemically synthesized
  source 1..20: mol_type = other DNA
agaaacccacttcacctata

SEQ ID NO: 55283 - DNA, 20 bp, synthetic construct
  misc_feature 1..20: note = chemically synthesized
  source 1..20: mol_type = other DNA
gaaacccacttcacctataa

SEQ ID NO: 55284 - DNA, 20 bp, synthetic construct
  misc_feature 1..20: note = chemically synthesized
  source 1..20: mol_type = other DNA
ataaaggcacacataaatga

SEQ ID NO: 55285 - DNA, 20 bp, synthetic construct
  misc_feature 1..20: note = chemically synthesized
  source 1..20: mol_type = other DNA
ggcacacataaatgaaagtg

SEQ ID NO: 55286 - DNA, 20 bp, synthetic construct
  misc_feature 1..20: note = chemically synthesized
  source 1..20: mol_type = other DNA
gcacacataaatgaaagtga

SEQ ID NO: 55287 - DNA, 20 bp, synthetic construct
  misc_feature 1..20: note = chemically synthesized
  source 1..20: mol_type = other DNA
cacacataaatgaaagtgaa

SEQ ID NO: 55288 - DNA, 20 bp, synthetic construct
  misc_feature 1..20: note = chemically synthesized
  source 1..20: mol_type = other DNA
cataaatgaaagtgaagggt

SEQ ID NO: 55289 - DNA, 20 bp, synthetic construct
  misc_feature 1..20: note = chemically synthesized
  source 1..20: mol_type = other DNA
tggaaaaaaattccatgaac

SEQ ID NO: 55290 - DNA, 20 bp, synthetic construct
  misc_feature 1..20: note = chemically synthesized
  source 1..20: mol_type = other DNA
aaattccatgaactggaaac

SEQ ID NO: 55291 - DNA, 20 bp, synthetic construct
  misc_feature 1..20: note = chemically synthesized
  source 1..20: mol_type = other DNA
tccatgaactggaaaccaga

SEQ ID NO: 55292 - DNA, 20 bp, synthetic construct
  misc_feature 1..20: note = chemically synthesized
  source 1..20: mol_type = other DNA
catgaactggaaaccagaaa

SEQ ID NO: 55293 - DNA, 20 bp, synthetic construct
  misc_feature 1..20: note = chemically synthesized
  source 1..20: mol_type = other DNA
gaactggaaaccagaaagag

SEQ ID NO: 55294 - DNA, 20 bp, synthetic construct
  misc_feature 1..20: note = chemically synthesized
  source 1..20: mol_type = other DNA
ctggaaaccagaaagagcag

SEQ ID NO: 55295 - DNA, 20 bp, synthetic construct
  misc_feature 1..20: note = chemically synthesized
  source 1..20: mol_type = other DNA
agtagtaattgtacttaaat

SEQ ID NO: 55296 - DNA, 20 bp, synthetic construct
  misc_feature 1..20: note = chemically synthesized
  source 1..20: mol_type = other DNA
tgtacttaaatcagataaaa

SEQ ID NO: 55297 - DNA, 20 bp, synthetic construct
  misc_feature 1..20: note = chemically synthesized
  source 1..20: mol_type = other DNA
actacaaatttaaaaactgt

SEQ ID NO: 55298 - DNA, 20 bp, synthetic construct
  misc_feature 1..20: note = chemically synthesized
  source 1..20: mol_type = other DNA
aaatttaaaaactgtaagaa

SEQ ID NO: 55299 - DNA, 20 bp, synthetic construct
  misc_feature 1..20: note = chemically synthesized
  source 1..20: mol_type = other DNA
taaaaactgtaagaaaagat

SEQ ID NO: 55300 - DNA, 20 bp, synthetic construct
  misc_feature 1..20: note = chemically synthesized
  source 1..20: mol_type = other DNA
aaaaactgtaagaaaagata

SEQ ID NO: 55301 - DNA, 20 bp, synthetic construct
  misc_feature 1..20: note = chemically synthesized
  source 1..20: mol_type = other DNA
aaactgtaagaaaagataag

SEQ ID NO: 55302 - DNA, 20 bp, synthetic construct
  misc_feature 1..20: note = chemically synthesized
  source 1..20: mol_type = other DNA
aactgtaagaaaagataagg

SEQ ID NO: 55303 - DNA, 20 bp, synthetic construct
  misc_feature 1..20: note = chemically synthesized
  source 1..20: mol_type = other DNA
actgtaagaaaagataagga

SEQ ID NO: 55304 - DNA, 20 bp, synthetic construct
  misc_feature 1..20: note = chemically synthesized
  source 1..20: mol_type = other DNA
agggtcactgtataataata

SEQ ID NO: 55305 - DNA, 20 bp, synthetic construct
  misc_feature 1..20: note = chemically synthesized
  source 1..20: mol_type = other DNA
gggtcactgtataataataa

SEQ ID NO: 55306 - DNA, 20 bp, synthetic construct
  misc_feature 1..20: note = chemically synthesized
  source 1..20: mol_type = other DNA
ggtcactgtataataataaa

SEQ ID NO: 55307 - DNA, 20 bp, synthetic construct
  misc_feature 1..20: note = chemically synthesized
  source 1..20: mol_type = other DNA
gtcactgtataataataaag

SEQ ID NO: 55308 - DNA, 20 bp, synthetic construct
  misc_feature 1..20: note = chemically synthesized
  source 1..20: mol_type = other DNA
taataataaaggggtcaatt

SEQ ID NO: 55309 - DNA, 20 bp, synthetic construct
  misc_feature 1..20: note = chemically synthesized
  source 1..20: mol_type = other DNA
aataaaggggtcaattcagc

SEQ ID NO: 55310 - DNA, 20 bp, synthetic construct
  misc_feature 1..20: note = chemically synthesized
  source 1..20: mol_type = other DNA
taaaggggtcaattcagcaa

SEQ ID NO: 55311 - DNA, 20 bp, synthetic construct
  misc_feature 1..20: note = chemically synthesized
  source 1..20: mol_type = other DNA
aaaggggtcaattcagcaag

SEQ ID NO: 55312 - DNA, 20 bp, synthetic construct
  misc_feature 1..20: note = chemically synthesized
  source 1..20: mol_type = other DNA
tattgatgtatccaacatca

SEQ ID NO: 55313 - DNA, 20 bp, synthetic construct
  misc_feature 1..20: note = chemically synthesized
  source 1..20: mol_type = other DNA
tatccaacatcaaagttccc

SEQ ID NO: 55314 - DNA, 20 bp, synthetic construct
  misc_feature 1..20: note = chemically synthesized
  source 1..20: mol_type = other DNA
atcaaagttcccaagtatat

SEQ ID NO: 55315 - DNA, 20 bp, synthetic construct
  misc_feature 1..20: note = chemically synthesized
  source 1..20: mol_type = other DNA
tcaaagttcccaagtatata

SEQ ID NO: 55316 - DNA, 20 bp, synthetic construct
  misc_feature 1..20: note = chemically synthesized
  source 1..20: mol_type = other DNA
gtatataaggaaaacattaa

SEQ ID NO: 55317 - DNA, 20 bp, synthetic construct
  misc_feature 1..20: note = chemically synthesized
  source 1..20: mol_type = other DNA
ggaaaacattaatagtccta

SEQ ID NO: 55318 - DNA, 20 bp, synthetic construct
  misc_feature 1..20: note = chemically synthesized
  source 1..20: mol_type = other DNA
gaaaacattaatagtcctaa

SEQ ID NO: 55319 - DNA, 20 bp, synthetic construct
  misc_feature 1..20: note = chemically synthesized
  source 1..20: mol_type = other DNA
aaaacattaatagtcctaaa

SEQ ID NO: 55320 - DNA, 20 bp, synthetic construct
  misc_feature 1..20: note = chemically synthesized
  source 1..20: mol_type = other DNA
cattaatagtcctaaagggc

SEQ ID NO: 55321 - DNA, 20 bp, synthetic construct
  misc_feature 1..20: note = chemically synthesized
  source 1..20: mol_type = other DNA
aatagtcctaaagggcgaga

SEQ ID NO: 55322 - DNA, 20 bp, synthetic construct
  misc_feature 1..20: note = chemically synthesized
  source 1..20: mol_type = other DNA
gacagactgcaatacaataa

SEQ ID NO: 55323 - DNA, 20 bp, synthetic construct
  misc_feature 1..20: note = chemically synthesized
  source 1..20: mol_type = other DNA
agactgcaatacaataatag

SEQ ID NO: 55324 - DNA, 20 bp, synthetic construct
  misc_feature 1..20: note = chemically synthesized
  source 1..20: mol_type = other DNA
gactgcaatacaataatagt

SEQ ID NO: 55325 - DNA, 20 bp, synthetic construct
  misc_feature 1..20: note = chemically synthesized
  source 1..20: mol_type = other DNA
actgcaatacaataatagta

SEQ ID NO: 55326 - DNA, 20 bp, synthetic construct
  misc_feature 1..20: note = chemically synthesized
  source 1..20: mol_type = other DNA
gtagggaactttaaacactt

SEQ ID NO: 55327 - DNA, 20 bp, synthetic construct
  misc_feature 1..20: note = chemically synthesized
  source 1..20: mol_type = other DNA
aactttaaacacttcagtct

SEQ ID NO: 55328 - DNA, 20 bp, synthetic construct
  misc_feature 1..20: note = chemically synthesized
  source 1..20: mol_type = other DNA
acttcagtctcagtaatgaa

SEQ ID NO: 55329 - DNA, 20 bp, synthetic construct
  misc_feature 1..20: note = chemically synthesized
  source 1..20: mol_type = other DNA
agtctcagtaatgaacagat

SEQ ID NO: 55330 - DNA, 20 bp, synthetic construct
  misc_feature 1..20: note = chemically synthesized
  source 1..20: mol_type = other DNA
tcagtaatgaacagatcggc

SEQ ID NO: 55331 - DNA, 20 bp, synthetic construct
  misc_feature 1..20: note = chemically synthesized
  source 1..20: mol_type = other DNA
aaatcaacaaatgaacaaca

SEQ ID NO: 55332 - DNA, 20 bp, synthetic construct
  misc_feature 1..20: note = chemically synthesized
  source 1..20: mol_type = other DNA
aatgtacccactatatctaa

SEQ ID NO: 55333 - DNA, 20 bp, synthetic construct
  misc_feature 1..20: note = chemically synthesized
  source 1..20: mol_type = other DNA
atagacccaactgacattaa

SEQ ID NO: 55334 - DNA, 20 bp, synthetic construct
  misc_feature 1..20: note = chemically synthesized
  source 1..20: mol_type = other DNA
aacttgtcccccaactgctg

SEQ ID NO: 55335 - DNA, 20 bp, synthetic construct
  misc_feature 1..20: note = chemically synthesized
  source 1..20: mol_type = other DNA
ttgtcccccaactgctgaag

SEQ ID NO: 55336 - DNA, 20 bp, synthetic construct
  misc_feature 1..20: note = chemically synthesized
  source 1..20: mol_type = other DNA
gaagaagatacatttcttta

SEQ ID NO: 55337 - DNA, 20 bp, synthetic construct
  misc_feature 1..20: note = chemically synthesized
  source 1..20: mol_type = other DNA
gaagatacatttctttaaag

SEQ ID NO: 55338 - DNA, 20 bp, synthetic construct
  misc_feature 1..20: note = chemically synthesized
  source 1..20: mol_type = other DNA
tgtacaacattttcctaaat

SEQ ID NO: 55339 - DNA, 20 bp, synthetic construct
  misc_feature 1..20: note = chemically synthesized
  source 1..20: mol_type = other DNA
gtacaacattttcctaaata

SEQ ID NO: 55340 - DNA, 20 bp, synthetic construct
  misc_feature 1..20: note = chemically synthesized
  source 1..20: mol_type = other DNA
tcctaaataaggccatatgt

SEQ ID NO: 55341 - DNA, 20 bp, synthetic construct
  misc_feature 1..20: note = chemically synthesized
  source 1..20: mol_type = other DNA
cctaaataaggccatatgtt

SEQ ID NO: 55342 - DNA, 20 bp, synthetic construct
  misc_feature 1..20: note = chemically synthesized
  source 1..20: mol_type = other DNA
aaggccatatgttaggccac

SEQ ID NO: 55343 - DNA, 20 bp, synthetic construct
  misc_feature 1..20: note = chemically synthesized
  source 1..20: mol_type = other DNA
aggccatatgttaggccaca

SEQ ID NO: 55344 - DNA, 20 bp, synthetic construct
  misc_feature 1..20: note = chemically synthesized
  source 1..20: mol_type = other DNA
catatgttaggccacaaggt

SEQ ID NO: 55345 - DNA, 20 bp, synthetic construct
  misc_feature 1..20: note = chemically synthesized
  source 1..20: mol_type = other DNA
gtaagtttgtacaaattttt

SEQ ID NO: 55346 - DNA, 20 bp, synthetic construct
  misc_feature 1..20: note = chemically synthesized
  source 1..20: mol_type = other DNA
agtttgtacaaatttttcag

SEQ ID NO: 55347 - DNA, 20 bp, synthetic construct
  misc_feature 1..20: note = chemically synthesized
  source 1..20: mol_type = other DNA
ttgtacaaatttttcagaag

SEQ ID NO: 55348 - DNA, 20 bp, synthetic construct
  misc_feature 1..20: note = chemically synthesized
  source 1..20: mol_type = other DNA
tcagaagtagaaattttatc

SEQ ID NO: 55349 - DNA, 20 bp, synthetic construct
  misc_feature 1..20: note = chemically synthesized
  source 1..20: mol_type = other DNA
tcaagtatattttctgacca

SEQ ID NO: 55350 - DNA, 20 bp, synthetic construct
  misc_feature 1..20: note = chemically synthesized
  source 1..20: mol_type = other DNA
agtatattttctgaccacag

SEQ ID NO: 55351 - DNA, 20 bp, synthetic construct
  misc_feature 1..20: note = chemically synthesized
  source 1..20: mol_type = other DNA
tgaccacagtggaataaaac

SEQ ID NO: 55352 - DNA, 20 bp, synthetic construct
  misc_feature 1..20: note = chemically synthesized
  source 1..20: mol_type = other DNA
taaaactagaaatgaataac

SEQ ID NO: 55353 - DNA, 20 bp, synthetic construct
  misc_feature 1..20: note = chemically synthesized
  source 1..20: mol_type = other DNA
aactagaaatgaataacaag

SEQ ID NO: 55354 - DNA, 20 bp, synthetic construct
  misc_feature 1..20: note = chemically synthesized
  source 1..20: mol_type = other DNA
atgaataacaagaagatcat

SEQ ID NO: 55355 - DNA, 20 bp, synthetic construct
  misc_feature 1..20: note = chemically synthesized
  source 1..20: mol_type = other DNA
aagaagatcatcagaaaata

SEQ ID NO: 55356 - DNA, 20 bp, synthetic construct
  misc_feature 1..20: note = chemically synthesized
  source 1..20: mol_type = other DNA
tcagaaaatatagaaacata

SEQ ID NO: 55357 - DNA, 20 bp, synthetic construct
  misc_feature 1..20: note = chemically synthesized
  source 1..20: mol_type = other DNA
agaaacatatggaaatcaaa

SEQ ID NO: 55358 - DNA, 20 bp, synthetic construct
  misc_feature 1..20: note = chemically synthesized
  source 1..20: mol_type = other DNA
aacagtatgctcctgaatgt

SEQ ID NO: 55359 - DNA, 20 bp, synthetic construct
  misc_feature 1..20: note = chemically synthesized
  source 1..20: mol_type = other DNA
acagtatgctcctgaatgtc

SEQ ID NO: 55360 - DNA, 20 bp, synthetic construct
  misc_feature 1..20: note = chemically synthesized
  source 1..20: mol_type = other DNA
ctcctgaatgtcaggcctct

SEQ ID NO: 55361 - DNA, 20 bp, synthetic construct
  misc_feature 1..20: note = chemically synthesized
  source 1..20: mol_type = other DNA
aatgtcaggcctctgagccc

SEQ ID NO: 55362 - DNA, 20 bp, synthetic construct
  misc_feature 1..20: note = chemically synthesized
  source 1..20: mol_type = other DNA
caggcctctgagcccaagct

SEQ ID NO: 55363 - DNA, 20 bp, synthetic construct
  misc_feature 1..20: note = chemically synthesized
  source 1..20: mol_type = other DNA
gtgacctgcatatacacata

SEQ ID NO: 55364 - DNA, 20 bp, synthetic construct
  misc_feature 1..20: note = chemically synthesized
  source 1..20: mol_type = other DNA
cctgcatatacacatacaga

SEQ ID NO: 55365 - DNA, 20 bp, synthetic construct
  misc_feature 1..20: note = chemically synthesized
  source 1..20: mol_type = other DNA
catatacacatacagatggc

SEQ ID NO: 55366 - DNA, 20 bp, synthetic construct
  misc_feature 1..20: note = chemically synthesized
  source 1..20: mol_type = other DNA
ctgatgacattccaccacaa

SEQ ID NO: 55367 - DNA, 20 bp, synthetic construct
  misc_feature 1..20: note = chemically synthesized
  source 1..20: mol_type = other DNA
atgacattccaccacaaaag

SEQ ID NO: 55368 - DNA, 20 bp, synthetic construct
  misc_feature 1..20: note = chemically synthesized
  source 1..20: mol_type = other DNA
caccacaaaagaagtgaaaa

SEQ ID NO: 55369 - DNA, 20 bp, synthetic construct
  misc_feature 1..20: note = chemically synthesized
  source 1..20: mol_type = other DNA
tcttgtgaaattccttctcc

SEQ ID NO: 55370 - DNA, 20 bp, synthetic construct
  misc_feature 1..20: note = chemically synthesized
  source 1..20: mol_type = other DNA
ttccttctcctggctcatcc

SEQ ID NO: 55371 - DNA, 20 bp, synthetic construct
  misc_feature 1..20: note = chemically synthesized
  source 1..20: mol_type = other DNA
cctggctcatcctggctcaa

SEQ ID NO: 55372 - DNA, 20 bp, synthetic construct
  misc_feature 1..20: note = chemically synthesized
  source 1..20: mol_type = other DNA
ggctcaaaagctcccctact

SEQ ID NO: 55373 - DNA, 20 bp, synthetic construct
  misc_feature 1..20: note = chemically synthesized
  source 1..20: mol_type = other DNA
tgacccccactcctgcccgc

SEQ ID NO: 55374 - DNA, 20 bp, synthetic construct
  misc_feature 1..20: note = chemically synthesized
  source 1..20: mol_type = other DNA
acccccactcctgcccgcca

SEQ ID NO: 55375 - DNA, 20 bp, synthetic construct
  misc_feature 1..20: note = chemically synthesized
  source 1..20: mol_type = other DNA
cctacccaaatcttataaaa

SEQ ID NO: 55376 - DNA, 20 bp, synthetic construct
  misc_feature 1..20: note = chemically synthesized
  source 1..20: mol_type = other DNA
ccctttgctgactctctttt

SEQ ID NO: 55377 - DNA, 20 bp, synthetic construct
  misc_feature 1..20: note = chemically synthesized
  source 1..20: mol_type = other DNA
gctgactctctttttggact

SEQ ID NO: 55378 - DNA, 20 bp, synthetic construct
  misc_feature 1..20: note = chemically synthesized
  source 1..20: mol_type = other DNA
ggactcagcctgcctgcacc

SEQ ID NO: 55379 - DNA, 20 bp, synthetic construct
  misc_feature 1..20: note = chemically synthesized
  source 1..20: mol_type = other DNA
gactcagcctgcctgcaccc

SEQ ID NO: 55380 - DNA, 20 bp, synthetic construct
  misc_feature 1..20: note = chemically synthesized
  source 1..20: mol_type = other DNA
ctgcacccaggtgaaataaa

SEQ ID NO: 55381 - DNA, 20 bp, synthetic construct
  misc_feature 1..20: note = chemically synthesized
  source 1..20: mol_type = other DNA
acagccttgttgcttacaca

SEQ ID NO: 55382 - DNA, 20 bp, synthetic construct
  misc_feature 1..20: note = chemically synthesized
  source 1..20: mol_type = other DNA
ttgcttacacaaagcctgtt

SEQ ID NO: 55383 - DNA, 20 bp, synthetic construct
  misc_feature 1..20: note = chemically synthesized
  source 1..20: mol_type = other DNA
cttacacaaagcctgtttgg

SEQ ID NO: 55384 - DNA, 20 bp, synthetic construct
  misc_feature 1..20: note = chemically synthesized
  source 1..20: mol_type = other DNA
tgtttggtagtctcttcata

SEQ ID NO: 55385 - DNA, 20 bp, synthetic construct
  misc_feature 1..20: note = chemically synthesized
  source 1..20: mol_type = other DNA
atatggacgcgcatgaaatt

SEQ ID NO: 55386 - DNA, 20 bp, synthetic construct
  misc_feature 1..20: note = chemically synthesized
  source 1..20: mol_type = other DNA
tgaaatttggtgccgtgact

SEQ ID NO: 55387 - DNA, 20 bp, synthetic construct
  misc_feature 1..20: note = chemically synthesized
  source 1..20: mol_type = other DNA
tttggtgccgtgactcagat

SEQ ID NO: 55388 - DNA, 20 bp, synthetic construct
  misc_feature 1..20: note = chemically synthesized
  source 1..20: mol_type = other DNA
ttggtgccgtgactcagatt

SEQ ID NO: 55389 - DNA, 20 bp, synthetic construct
  misc_feature 1..20: note = chemically synthesized
  source 1..20: mol_type = other DNA
tggtgccgtgactcagattg

SEQ ID NO: 55390 - DNA, 20 bp, synthetic construct
  misc_feature 1..20: note = chemically synthesized
  source 1..20: mol_type = other DNA
ggtgccgtgactcagattgg

SEQ ID NO: 55391 - DNA, 20 bp, synthetic construct
  misc_feature 1..20: note = chemically synthesized
  source 1..20: mol_type = other DNA
tcagattgggggacctccct

SEQ ID NO: 55392 - DNA, 20 bp, synthetic construct
  misc_feature 1..20: note = chemically synthesized
  source 1..20: mol_type = other DNA
cagattgggggacctccctt

SEQ ID NO: 55393 - DNA, 20 bp, synthetic construct
  misc_feature 1..20: note = chemically synthesized
  source 1..20: mol_type = other DNA
gattgggggacctcccttgg

SEQ ID NO: 55394 - DNA, 20 bp, synthetic construct
  misc_feature 1..20: note = chemically synthesized
  source 1..20: mol_type = other DNA
cctcctgctctttgctccgt

SEQ ID NO: 55395 - DNA, 20 bp, synthetic construct
  misc_feature 1..20: note = chemically synthesized
  source 1..20: mol_type = other DNA
ctgctctttgctccgtgaga

SEQ ID NO: 55396 - DNA, 20 bp, synthetic construct
  misc_feature 1..20: note = chemically synthesized
  source 1..20: mol_type = other DNA
gaaagatccacctacgacct

SEQ ID NO: 55397 - DNA, 20 bp, synthetic construct
  misc_feature 1..20: note = chemically synthesized
  source 1..20: mol_type = other DNA
aaagatccacctacgacctc

SEQ ID NO: 55398 - DNA, 20 bp, synthetic construct
  misc_feature 1..20: note = chemically synthesized
  source 1..20: mol_type = other DNA
cctcaggtcctcaaactgac

SEQ ID NO: 55399 - DNA, 20 bp, synthetic construct
  misc_feature 1..20: note = chemically synthesized
  source 1..20: mol_type = other DNA
gtcctcaaactgaccagccc

SEQ ID NO: 55400 - DNA, 20 bp, synthetic construct
  misc_feature 1..20: note = chemically synthesized
  source 1..20: mol_type = other DNA
catttcaccaatttcaaatc

SEQ ID NO: 55401 - DNA, 20 bp, synthetic construct
  misc_feature 1..20: note = chemically synthesized
  source 1..20: mol_type = other DNA
tcaccaatttcaaatccggt

SEQ ID NO: 55402 - DNA, 20 bp, synthetic construct
  misc_feature 1..20: note = chemically synthesized
  source 1..20: mol_type = other DNA
ccaatttcaaatccggtaag

SEQ ID NO: 55403 - DNA, 20 bp, synthetic construct
  misc_feature 1..20: note = chemically synthesized
  source 1..20: mol_type = other DNA
cttctttctcctttcaatct

SEQ ID NO: 55404 - DNA, 20 bp, synthetic construct
  misc_feature 1..20: note = chemically synthesized
  source 1..20: mol_type = other DNA
tttcaattcctttcattttc

SEQ ID NO: 55405 - DNA, 20 bp, synthetic construct
  misc_feature 1..20: note = chemically synthesized
  source 1..20: mol_type = other DNA
caattcctttcattttccag

SEQ ID NO: 55406 - DNA, 20 bp, synthetic construct
  misc_feature 1..20: note = chemically synthesized
  source 1..20: mol_type = other DNA
attcctttcattttccagta

SEQ ID NO: 55407 - DNA, 20 bp, synthetic construct
  misc_feature 1..20: note = chemically synthesized
  source 1..20: mol_type = other DNA
ttcattttccagtagagaca

SEQ ID NO: 55408 - DNA, 20 bp, synthetic construct
  misc_feature 1..20: note = chemically synthesized
  source 1..20: mol_type = other DNA
tcattttccagtagagacaa

SEQ ID NO: 55409 - DNA, 20 bp, synthetic construct
  misc_feature 1..20: note = chemically synthesized
  source 1..20: mol_type = other DNA
attttccagtagagacaaag

SEQ ID NO: 55410 - DNA, 20 bp, synthetic construct
  misc_feature 1..20: note = chemically synthesized
  source 1..20: mol_type = other DNA
aaggagacatgttttatccg

SEQ ID NO: 55411 - DNA, 20 bp, synthetic construct
  misc_feature 1..20: note = chemically synthesized
  source 1..20: mol_type = other DNA
tatccgtggacccaaaactc

SEQ ID NO: 55412 - DNA, 20 bp, synthetic construct
  misc_feature 1..20: note = chemically synthesized
  source 1..20: mol_type = other DNA
tggacccaaaactccggtgc

SEQ ID NO: 55413 - DNA, 20 bp, synthetic construct
  misc_feature 1..20: note = chemically synthesized
  source 1..20: mol_type = other DNA
caaaactccggtgccagtca

SEQ ID NO: 55414 - DNA, 20 bp, synthetic construct
  misc_feature 1..20: note = chemically synthesized
  source 1..20: mol_type = other DNA
ctccggtgccagtcacggac

SEQ ID NO: 55415 - DNA, 20 bp, synthetic construct
  misc_feature 1..20: note = chemically synthesized
  source 1..20: mol_type = other DNA
tccggtgccagtcacggact

SEQ ID NO: 55416 - DNA, 20 bp, synthetic construct
  misc_feature 1..20: note = chemically synthesized
  source 1..20: mol_type = other DNA
ggtgccagtcacggactggg

SEQ ID NO: 55417 - DNA, 20 bp, synthetic construct
  misc_feature 1..20: note = chemically synthesized
  source 1..20: mol_type = other DNA
gtgccagtcacggactggga

SEQ ID NO: 55418 - DNA, 20 bp, synthetic construct
  misc_feature 1..20: note = chemically synthesized
  source 1..20: mol_type = other DNA
ccagtcacggactgggaagg

SEQ ID NO: 55419 - DNA, 20 bp, synthetic construct
  misc_feature 1..20: note = chemically synthesized
  source 1..20: mol_type = other DNA
ctgggaaggcagccttccct

SEQ ID NO: 55420 - DNA, 20 bp, synthetic construct
  misc_feature 1..20: note = chemically synthesized
  source 1..20: mol_type = other DNA
cccttggtgtttaatcattg

SEQ ID NO: 55421 - DNA, 20 bp, synthetic construct
  misc_feature 1..20: note = chemically synthesized
  source 1..20: mol_type = other DNA
ccttggtgtttaatcattgc

SEQ ID NO: 55422 - DNA, 20 bp, synthetic construct
  misc_feature 1..20: note = chemically synthesized
  source 1..20: mol_type = other DNA
cttggtgtttaatcattgca

SEQ ID NO: 55423 - DNA, 20 bp, synthetic construct
  misc_feature 1..20: note = chemically synthesized
  source 1..20: mol_type = other DNA
ctgattattaaaccatgttt

SEQ ID NO: 55424 - DNA, 20 bp, synthetic construct
  misc_feature 1..20: note = chemically synthesized
  source 1..20: mol_type = other DNA
gattattaaaccatgtttca

SEQ ID NO: 55425 - DNA, 20 bp, synthetic construct
  misc_feature 1..20: note = chemically synthesized
  source 1..20: mol_type = other DNA
attattaaaccatgtttcag

SEQ ID NO: 55426 - DNA, 20 bp, synthetic construct
  misc_feature 1..20: note = chemically synthesized
  source 1..20: mol_type = other DNA
aaaccatgtttcagaggtgt

SEQ ID NO: 55427 - DNA, 20 bp, synthetic construct
  misc_feature 1..20: note = chemically synthesized
  source 1..20: mol_type = other DNA
ttcagaggtgtcagaccacg

SEQ ID NO: 55428 - DNA, 20 bp, synthetic construct
  misc_feature 1..20: note = chemically synthesized
  source 1..20: mol_type = other DNA
tcagaggtgtcagaccacgc

SEQ ID NO: 55429 - DNA, 20 bp, synthetic construct
  misc_feature 1..20: note = chemically synthesized
  source 1..20: mol_type = other DNA
cagaggtgtcagaccacgca

SEQ ID NO: 55430 - DNA, 20 bp, synthetic construct
  misc_feature 1..20: note = chemically synthesized
  source 1..20: mol_type = other DNA
ccacgcagggatgcctgcct

SEQ ID NO: 55431 - DNA, 20 bp, synthetic construct
  misc_feature 1..20: note = chemically synthesized
  source 1..20: mol_type = other DNA
ctgccttggtccttcaccct

SEQ ID NO: 55432 - DNA, 20 bp, synthetic construct
  misc_feature 1..20: note = chemically synthesized
  source 1..20: mol_type = other DNA
ccttggtccttcacccttag

SEQ ID NO: 55433 - DNA, 20 bp, synthetic construct
  misc_feature 1..20: note = chemically synthesized
  source 1..20: mol_type = other DNA
agcggcaaatcccacttttc

SEQ ID NO: 55434 - DNA, 20 bp, synthetic construct
  misc_feature 1..20: note = chemically synthesized
  source 1..20: mol_type = other DNA
cggcaaatcccacttttctg

SEQ ID NO: 55435 - DNA, 20 bp, synthetic construct
  misc_feature 1..20: note = chemically synthesized
  source 1..20: mol_type = other DNA
ggcaaatcccacttttctgg

SEQ ID NO: 55436 - DNA, 20 bp, synthetic construct
  misc_feature 1..20: note = chemically synthesized
  source 1..20: mol_type = other DNA
gcaaatcccacttttctgga

SEQ ID NO: 55437 - DNA, 20 bp, synthetic construct
  misc_feature 1..20: note = chemically synthesized
  source 1..20: mol_type = other DNA
caaatcccacttttctggag

SEQ ID NO: 55438 - DNA, 20 bp, synthetic construct
  misc_feature 1..20: note = chemically synthesized
  source 1..20: mol_type = other DNA
aaatcccacttttctggagg

SEQ ID NO: 55439 - DNA, 20 bp, synthetic construct
  misc_feature 1..20: note = chemically synthesized
  source 1..20: mol_type = other DNA
aatcccacttttctggaggg

SEQ ID NO: 55440 - DNA, 20 bp, synthetic construct
  misc_feature 1..20: note = chemically synthesized
  source 1..20: mol_type = other DNA
ccacttttctggaggggggt

SEQ ID NO: 55441 - DNA, 20 bp, synthetic construct
  misc_feature 1..20: note = chemically synthesized
  source 1..20: mol_type = other DNA
ctgccccttcactgcttttc

SEQ ID NO: 55442 - DNA, 20 bp, synthetic construct
  misc_feature 1..20: note = chemically synthesized
  source 1..20: mol_type = other DNA
tgccccttcactgcttttct

SEQ ID NO: 55443 - DNA, 20 bp, synthetic construct
  misc_feature 1..20: note = chemically synthesized
  source 1..20: mol_type = other DNA
gccccttcactgcttttctg

SEQ ID NO: 55444 - DNA, 20 bp, synthetic construct
  misc_feature 1..20: note = chemically synthesized
  source 1..20: mol_type = other DNA
ccccttcactgcttttctgg

SEQ ID NO: 55445 - DNA, 20 bp, synthetic construct
  misc_feature 1..20: note = chemically synthesized
  source 1..20: mol_type = other DNA
ttcactgcttttctgggggc

SEQ ID NO: 55446 - DNA, 20 bp, synthetic construct
  misc_feature 1..20: note = chemically synthesized
  source 1..20: mol_type = other DNA
tgtgccccaacctcttatct

SEQ ID NO: 55447 - DNA, 20 bp, synthetic construct
  misc_feature 1..20: note = chemically synthesized
  source 1..20: mol_type = other DNA
caaccccttgcccatttttc

SEQ ID NO: 55448 - DNA, 20 bp, synthetic construct
  misc_feature 1..20: note = chemically synthesized
  source 1..20: mol_type = other DNA
cccttgcccatttttctggt

SEQ ID NO: 55449 - DNA, 20 bp, synthetic construct
  misc_feature 1..20: note = chemically synthesized
  source 1..20: mol_type = other DNA
tgcccatttttctggtgagt

SEQ ID NO: 55450 - DNA, 20 bp, synthetic construct
  misc_feature 1..20: note = chemically synthesized
  source 1..20: mol_type = other DNA
tctgtactctttcttttctc

SEQ ID NO: 55451 - DNA, 20 bp, synthetic construct
  misc_feature 1..20: note = chemically synthesized
  source 1..20: mol_type = other DNA
ctgtactctttcttttctct

SEQ ID NO: 55452 - DNA, 20 bp, synthetic construct
  misc_feature 1..20: note = chemically synthesized
  source 1..20: mol_type = other DNA
tctgggcttgcctccttcac

SEQ ID NO: 55453 - DNA, 20 bp, synthetic construct
  misc_feature 1..20: note = chemically synthesized
  source 1..20: mol_type = other DNA
ctgggcttgcctccttcact

SEQ ID NO: 55454 - DNA, 20 bp, synthetic construct
  misc_feature 1..20: note = chemically synthesized
  source 1..20: mol_type = other DNA
tgggcttgcctccttcacta

SEQ ID NO: 55455 - DNA, 20 bp, synthetic construct
  misc_feature 1..20: note = chemically synthesized
  source 1..20: mol_type = other DNA
gggcttgcctccttcactag

SEQ ID NO: 55456 - DNA, 20 bp, synthetic construct
  misc_feature 1..20: note = chemically synthesized
  source 1..20: mol_type = other DNA
ctccattcctccctctccct

SEQ ID NO: 55457 - DNA, 20 bp, synthetic construct
  misc_feature 1..20: note = chemically synthesized
  source 1..20: mol_type = other DNA
ctcccttagcctgtgctctc

SEQ ID NO: 55458 - DNA, 20 bp, synthetic construct
  misc_feature 1..20: note = chemically synthesized
  source 1..20: mol_type = other DNA
aatgccttattttcttctgc

SEQ ID NO: 55459 - DNA, 20 bp, synthetic construct
  misc_feature 1..20: note = chemically synthesized
  source 1..20: mol_type = other DNA
atgccttattttcttctgca

SEQ ID NO: 55460 - DNA, 20 bp, synthetic construct
  misc_feature 1..20: note = chemically synthesized
  source 1..20: mol_type = other DNA
tgactccaatacaaactcga

SEQ ID NO: 55461 - DNA, 20 bp, synthetic construct
  misc_feature 1..20: note = chemically synthesized
  source 1..20: mol_type = other DNA
ctccaatacaaactcgacag

SEQ ID NO: 55462 - DNA, 20 bp, synthetic construct
  misc_feature 1..20: note = chemically synthesized
  source 1..20: mol_type = other DNA
aactcgacagtggttccaaa

SEQ ID NO: 55463 - DNA, 20 bp, synthetic construct
  misc_feature 1..20: note = chemically synthesized
  source 1..20: mol_type = other DNA
cgacagtggttccaaatagc

SEQ ID NO: 55464 - DNA, 20 bp, synthetic construct
  misc_feature 1..20: note = chemically synthesized
  source 1..20: mol_type = other DNA
ggttccaaatagccagaaaa

SEQ ID NO: 55465 - DNA, 20 bp, synthetic construct
  misc_feature 1..20: note = chemically synthesized
  source 1..20: mol_type = other DNA
tttcaatttttccattcttc

SEQ ID NO: 55466 - DNA, 20 bp, synthetic construct
  misc_feature 1..20: note = chemically synthesized
  source 1..20: mol_type = other DNA
aaataatttttgtcgtaaaa

SEQ ID NO: 55467 - DNA, 20 bp, synthetic construct
  misc_feature 1..20: note = chemically synthesized
  source 1..20: mol_type = other DNA
aataatttttgtcgtaaaac

SEQ ID NO: 55468 - DNA, 20 bp, synthetic construct
  misc_feature 1..20: note = chemically synthesized
  source 1..20: mol_type = other DNA
tttgtcgtaaaacaggcaaa

SEQ ID NO: 55469 - DNA, 20 bp, synthetic construct
  misc_feature 1..20: note = chemically synthesized
  source 1..20: mol_type = other DNA
gtaaaacaggcaaacagtct

SEQ ID NO: 55470 - DNA, 20 bp, synthetic construct
  misc_feature 1..20: note = chemically synthesized
  source 1..20: mol_type = other DNA
taaaacaggcaaacagtctg

SEQ ID NO: 55471 - DNA, 20 bp, synthetic construct
  misc_feature 1..20: note = chemically synthesized
  source 1..20: mol_type = other DNA
agtctgaggtgcctgacgtc

SEQ ID NO: 55472 - DNA, 20 bp, synthetic construct
  misc_feature 1..20: note = chemically synthesized
  source 1..20: mol_type = other DNA
gtctgaggtgcctgacgtcc

SEQ ID NO: 55473 - DNA, 20 bp, synthetic construct
  misc_feature 1..20: note = chemically synthesized
  source 1..20: mol_type = other DNA
ccaggcattcttttacacat

SEQ ID NO: 55474 - DNA, 20 bp, synthetic construct
  misc_feature 1..20: note = chemically synthesized
  source 1..20: mol_type = other DNA
tttacacattggtccctccc

SEQ ID NO: 55475 - DNA, 20 bp, synthetic construct
  misc_feature 1..20: note = chemically synthesized
  source 1..20: mol_type = other DNA
ttccctcccgcctgtcccct

SEQ ID NO: 55476 - DNA, 20 bp, synthetic construct
  misc_feature 1..20: note = chemically synthesized
  source 1..20: mol_type = other DNA
gtcccctcagtcccaactcc

SEQ ID NO: 55477 - DNA, 20 bp, synthetic construct
  misc_feature 1..20: note = chemically synthesized
  source 1..20: mol_type = other DNA
tcccaactccaagcgtcgct

SEQ ID NO: 55478 - DNA, 20 bp, synthetic construct
  misc_feature 1..20: note = chemically synthesized
  source 1..20: mol_type = other DNA
tttctaatcttccttttcta

SEQ ID NO: 55479 - DNA, 20 bp, synthetic construct
  misc_feature 1..20: note = chemically synthesized
  source 1..20: mol_type = other DNA
ctgacgtctcccctcctccc

SEQ ID NO: 55480 - DNA, 20 bp, synthetic construct
  misc_feature 1..20: note = chemically synthesized
  source 1..20: mol_type = other DNA
tgacgtctcccctcctcccc

SEQ ID NO: 55481 - DNA, 20 bp, synthetic construct
  misc_feature 1..20: note = chemically synthesized
  source 1..20: mol_type = other DNA
ctccccaggctgctccttgc

SEQ ID NO: 55482 - DNA, 20 bp, synthetic construct
  misc_feature 1..20: note = chemically synthesized
  source 1..20: mol_type = other DNA
tccccaggctgctccttgcc

SEQ ID NO: 55483 - DNA, 20 bp, synthetic construct
  misc_feature 1..20: note = chemically synthesized
  source 1..20: mol_type = other DNA
aggctgctccttgccaggcc

SEQ ID NO: 55484 - DNA, 20 bp, synthetic construct
  misc_feature 1..20: note = chemically synthesized
  source 1..20: mol_type = other DNA
tgctccttgccaggccgagc

SEQ ID NO: 55485 - DNA, 20 bp, synthetic construct
  misc_feature 1..20: note = chemically synthesized
  source 1..20: mol_type = other DNA
gctccttgccaggccgagct

SEQ ID NO: 55486 - DNA, 20 bp, synthetic construct
  misc_feature 1..20: note = chemically synthesized
  source 1..20: mol_type = other DNA
gctaggtcccaaatcttcct

SEQ ID NO: 55487 - DNA, 20 bp, synthetic construct
  misc_feature 1..20: note = chemically synthesized
  source 1..20: mol_type = other DNA
tcccaaatcttcctcagcct

SEQ ID NO: 55488 - DNA, 20 bp, synthetic construct
  misc_feature 1..20: note = chemically synthesized
  source 1..20: mol_type = other DNA
tcacctcccctcctcacacc

SEQ ID NO: 55489 - DNA, 20 bp, synthetic construct
  misc_feature 1..20: note = chemically synthesized
  source 1..20: mol_type = other DNA
tcccctcctcacacccggtc

SEQ ID NO: 55490 - DNA, 20 bp, synthetic construct
  misc_feature 1..20: note = chemically synthesized
  source 1..20: mol_type = other DNA
ctcacacccggtccggttta

SEQ ID NO: 55491 - DNA, 20 bp, synthetic construct
  misc_feature 1..20: note = chemically synthesized
  source 1..20: mol_type = other DNA
ttacagtttcattccgtgac

SEQ ID NO: 55492 - DNA, 20 bp, synthetic construct
  misc_feature 1..20: note = chemically synthesized
  source 1..20: mol_type = other DNA
ctagccctccccaacctgcc

SEQ ID NO: 55493 - DNA, 20 bp, synthetic construct
  misc_feature 1..20: note = chemically synthesized
  source 1..20: mol_type = other DNA
ctgcccagcaatttcctatt

SEQ ID NO: 55494 - DNA, 20 bp, synthetic construct
  misc_feature 1..20: note = chemically synthesized
  source 1..20: mol_type = other DNA
cccagcaatttcctattaag

SEQ ID NO: 55495 - DNA, 20 bp, synthetic construct
  misc_feature 1..20: note = chemically synthesized
  source 1..20: mol_type = other DNA
ccagcaatttcctattaaga

SEQ ID NO: 55496 - DNA, 20 bp, synthetic construct
  misc_feature 1..20: note = chemically synthesized
  source 1..20: mol_type = other DNA
gcaatttcctattaagaagg

SEQ ID NO: 55497 - DNA, 20 bp, synthetic construct
  misc_feature 1..20: note = chemically synthesized
  source 1..20: mol_type = other DNA
tcctattaagaaggtggctg

SEQ ID NO: 55498 - DNA, 20 bp, synthetic construct
  misc_feature 1..20: note = chemically synthesized
  source 1..20: mol_type = other DNA
taagaaggtggctgaagcta

SEQ ID NO: 55499 - DNA, 20 bp, synthetic construct
  misc_feature 1..20: note = chemically synthesized
  source 1..20: mol_type = other DNA
aagaaggtggctgaagctaa

SEQ ID NO: 55500 - DNA, 20 bp, synthetic construct
  misc_feature 1..20: note = chemically synthesized
  source 1..20: mol_type = other DNA
ggtggctgaagctaaaggcg

SEQ ID NO: 55501 - DNA, 20 bp, synthetic construct
  misc_feature 1..20: note = chemically synthesized
  source 1..20: mol_type = other DNA
ctgaagctaaaggcgtagtc

SEQ ID NO: 55502 - DNA, 20 bp, synthetic construct
  misc_feature 1..20: note = chemically synthesized
  source 1..20: mol_type = other DNA
tgaagctaaaggcgtagtca

SEQ ID NO: 55503 - DNA, 20 bp, synthetic construct
  misc_feature 1..20: note = chemically synthesized
  source 1..20: mol_type = other DNA
ttatccgacctctcccgaat

SEQ ID NO: 55504 - DNA, 20 bp, synthetic construct
  misc_feature 1..20: note = chemically synthesized
  source 1..20: mol_type = other DNA
atccgacctctcccgaatca

SEQ ID NO: 55505 - DNA, 20 bp, synthetic construct
  misc_feature 1..20: note = chemically synthesized
  source 1..20: mol_type = other DNA
ctctcccgaatcagagcgtt

SEQ ID NO: 55506 - DNA, 20 bp, synthetic construct
  misc_feature 1..20: note = chemically synthesized
  source 1..20: mol_type = other DNA
tctcccgaatcagagcgttt

SEQ ID NO: 55507 - DNA, 20 bp, synthetic construct
  misc_feature 1..20: note = chemically synthesized
  source 1..20: mol_type = other DNA
ttcatcaaatatgaaaaacc

SEQ ID NO: 55508 - DNA, 20 bp, synthetic construct
  misc_feature 1..20: note = chemically synthesized
  source 1..20: mol_type = other DNA
caaatatgaaaaacccagcc

SEQ ID NO: 55509 - DNA, 20 bp, synthetic construct
  misc_feature 1..20: note = chemically synthesized
  source 1..20: mol_type = other DNA
gaaaaacccagcccagttca

SEQ ID NO: 55510 - DNA, 20 bp, synthetic construct
  misc_feature 1..20: note = chemically synthesized
  source 1..20: mol_type = other DNA
agcccagttcatggctcgtt

SEQ ID NO: 55511 - DNA, 20 bp, synthetic construct
  misc_feature 1..20: note = chemically synthesized
  source 1..20: mol_type = other DNA
ccagttcatggctcgttcgg

SEQ ID NO: 55512 - DNA, 20 bp, synthetic construct
  misc_feature 1..20: note = chemically synthesized
  source 1..20: mol_type = other DNA
gctcgttcggcagcaaccct

SEQ ID NO: 55513 - DNA, 20 bp, synthetic construct
  misc_feature 1..20: note = chemically synthesized
  source 1..20: mol_type = other DNA
agcaaccctgagacgcttta

SEQ ID NO: 55514 - DNA, 20 bp, synthetic construct
  misc_feature 1..20: note = chemically synthesized
  source 1..20: mol_type = other DNA
cctgagacgctttacagccc

SEQ ID NO: 55515 - DNA, 20 bp, synthetic construct
  misc_feature 1..20: note = chemically synthesized
  source 1..20: mol_type = other DNA
tttacagccctagaccctaa

SEQ ID NO: 55516 - DNA, 20 bp, synthetic construct
  misc_feature 1..20: note = chemically synthesized
  source 1..20: mol_type = other DNA
ttacagccctagaccctaaa

SEQ ID NO: 55517 - DNA, 20 bp, synthetic construct
  misc_feature 1..20: note = chemically synthesized
  source 1..20: mol_type = other DNA
cctagaccctaaaaggacaa

SEQ ID NO: 55518 - DNA, 20 bp, synthetic construct
  misc_feature 1..20: note = chemically synthesized
  source 1..20: mol_type = other DNA
ctagaccctaaaaggacaaa

SEQ ID NO: 55519 - DNA, 20 bp, synthetic construct
  misc_feature 1..20: note = chemically synthesized
  source 1..20: mol_type = other DNA
aaactccaaaaattaaattc

SEQ ID NO: 55520 - DNA, 20 bp, synthetic construct
  misc_feature 1..20: note = chemically synthesized
  source 1..20: mol_type = other DNA
ctggacctcaaaccccacaa

SEQ ID NO: 55521 - DNA, 20 bp, synthetic construct
  misc_feature 1..20: note = chemically synthesized
  source 1..20: mol_type = other DNA
tggacctcaaaccccacaac

SEQ ID NO: 55522 - DNA, 20 bp, synthetic construct
  misc_feature 1..20: note = chemically synthesized
  source 1..20: mol_type = other DNA
actcaattaacctcaccttc

SEQ ID NO: 55523 - DNA, 20 bp, synthetic construct
  misc_feature 1..20: note = chemically synthesized
  source 1..20: mol_type = other DNA
ctcaattaacctcaccttca

SEQ ID NO: 55524 - DNA, 20 bp, synthetic construct
  misc_feature 1..20: note = chemically synthesized
  source 1..20: mol_type = other DNA
accttcaaggtgtacaataa

SEQ ID NO: 55525 - DNA, 20 bp, synthetic construct
  misc_feature 1..20: note = chemically synthesized
  source 1..20: mol_type = other DNA
cttcaaggtgtacaataata

SEQ ID NO: 55526 - DNA, 20 bp, synthetic construct
  misc_feature 1..20: note = chemically synthesized
  source 1..20: mol_type = other DNA
caaggtgtacaataatagag

SEQ ID NO: 55527 - DNA, 20 bp, synthetic construct
  misc_feature 1..20: note = chemically synthesized
  source 1..20: mol_type = other DNA
aggtgtacaataatagagta

SEQ ID NO: 55528 - DNA, 20 bp, synthetic construct
  misc_feature 1..20: note = chemically synthesized
  source 1..20: mol_type = other DNA
ggtgtacaataatagagtag

SEQ ID NO: 55529 - DNA, 20 bp, synthetic construct
  misc_feature 1..20: note = chemically synthesized
  source 1..20: mol_type = other DNA
gtacaataatagagtagagg

SEQ ID NO: 55530 - DNA, 20 bp, synthetic construct
  misc_feature 1..20: note = chemically synthesized
  source 1..20: mol_type = other DNA
ataatagagtagaggcagcc

SEQ ID NO: 55531 - DNA, 20 bp, synthetic construct
  misc_feature 1..20: note = chemically synthesized
  source 1..20: mol_type = other DNA
atagagtagaggcagccaag

SEQ ID NO: 55532 - DNA, 20 bp, synthetic construct
  misc_feature 1..20: note = chemically synthesized
  source 1..20: mol_type = other DNA
ccaagtagcaacatattttt

SEQ ID NO: 55533 - DNA, 20 bp, synthetic construct
  misc_feature 1..20: note = chemically synthesized
  source 1..20: mol_type = other DNA
caattccttgcctccactgt

SEQ ID NO: 55534 - DNA, 20 bp, synthetic construct
  misc_feature 1..20: note = chemically synthesized
  source 1..20: mol_type = other DNA
ctccactgtgagacaaaccc

SEQ ID NO: 55535 - DNA, 20 bp, synthetic construct
  misc_feature 1..20: note = chemically synthesized
  source 1..20: mol_type = other DNA
acaaaccccagccacatctc

SEQ ID NO: 55536 - DNA, 20 bp, synthetic construct
  misc_feature 1..20: note = chemically synthesized
  source 1..20: mol_type = other DNA
cagccacatctccagcacac

SEQ ID NO: 55537 - DNA, 20 bp, synthetic construct
  misc_feature 1..20: note = chemically synthesized
  source 1..20: mol_type = other DNA
acttccaaatgcctaaaccg

SEQ ID NO: 55538 - DNA, 20 bp, synthetic construct
  misc_feature 1..20: note = chemically synthesized
  source 1..20: mol_type = other DNA
tccaaatgcctaaaccgcag

SEQ ID NO: 55539 - DNA, 20 bp, synthetic construct
  misc_feature 1..20: note = chemically synthesized
  source 1..20: mol_type = other DNA
aatgcctaaaccgcagtggc

SEQ ID NO: 55540 - DNA, 20 bp, synthetic construct
  misc_feature 1..20: note = chemically synthesized
  source 1..20: mol_type = other DNA
atgcctaaaccgcagtggcc

SEQ ID NO: 55541 - DNA, 20 bp, synthetic construct
  misc_feature 1..20: note = chemically synthesized
  source 1..20: mol_type = other DNA
gcagtggccaggcgttcctc

SEQ ID NO: 55542 - DNA, 20 bp, synthetic construct
  misc_feature 1..20: note = chemically synthesized
  source 1..20: mol_type = other DNA
tcctccggaaccacctcccc

SEQ ID NO: 55543 - DNA, 20 bp, synthetic construct
  misc_feature 1..20: note = chemically synthesized
  source 1..20: mol_type = other DNA
cctccggaaccacctccccc

SEQ ID NO: 55544 - DNA, 20 bp, synthetic construct
  misc_feature 1..20: note = chemically synthesized
  source 1..20: mol_type = other DNA
tccggaaccacctcccccag

SEQ ID NO: 55545 - DNA, 20 bp, synthetic construct
  misc_feature 1..20: note = chemically synthesized
  source 1..20: mol_type = other DNA
ctcccccaggagcttgctac

SEQ ID NO: 55546 - DNA, 20 bp, synthetic construct
  misc_feature 1..20: note = chemically synthesized
  source 1..20: mol_type = other DNA
caggagcttgctacaagtgc

SEQ ID NO: 55547 - DNA, 20 bp, synthetic construct
  misc_feature 1..20: note = chemically synthesized
  source 1..20: mol_type = other DNA
tgctacaagtgccagaaatc

SEQ ID NO: 55548 - DNA, 20 bp, synthetic construct
  misc_feature 1..20: note = chemically synthesized
  source 1..20: mol_type = other DNA
agtgccagaaatctggccac

SEQ ID NO: 55549 - DNA, 20 bp, synthetic construct
  misc_feature 1..20: note = chemically synthesized
  source 1..20: mol_type = other DNA
gtgccagaaatctggccacc

SEQ ID NO: 55550 - DNA, 20 bp, synthetic construct
  misc_feature 1..20: note = chemically synthesized
  source 1..20: mol_type = other DNA
agaaatctggccaccaggcc

SEQ ID NO: 55551 - DNA, 20 bp, synthetic construct
  misc_feature 1..20: note = chemically synthesized
  source 1..20: mol_type = other DNA
gaaatctggccaccaggcca

SEQ ID NO: 55552 - DNA, 20 bp, synthetic construct
  misc_feature 1..20: note = chemically synthesized
  source 1..20: mol_type = other DNA
accaggccaaggaatgcccg

SEQ ID NO: 55553 - DNA, 20 bp, synthetic construct
  misc_feature 1..20: note = chemically synthesized
  source 1..20: mol_type = other DNA
gccaaggaatgcccgcagcc

SEQ ID NO: 55554 - DNA, 20 bp, synthetic construct
  misc_feature 1..20: note = chemically synthesized
  source 1..20: mol_type = other DNA
ccaaggaatgcccgcagccc

SEQ ID NO: 55555 - DNA, 20 bp, synthetic construct
  misc_feature 1..20: note = chemically synthesized
  source 1..20: mol_type = other DNA
cgcagcccaggattcctcct

SEQ ID NO: 55556 - DNA, 20 bp, synthetic construct
  misc_feature 1..20: note = chemically synthesized
  source 1..20: mol_type = other DNA
taagccgtgtcccatctgtg

SEQ ID NO: 55557 - DNA, 20 bp, synthetic construct
  misc_feature 1..20: note = chemically synthesized
  source 1..20: mol_type = other DNA
aagccgtgtcccatctgtgc

SEQ ID NO: 55558 - DNA, 20 bp, synthetic construct
  misc_feature 1..20: note = chemically synthesized
  source 1..20: mol_type = other DNA
ccatctgtgcaggaccccac

SEQ ID NO: 55559 - DNA, 20 bp, synthetic construct
  misc_feature 1..20: note = chemically synthesized
  source 1..20: mol_type = other DNA
tgcaggaccccactagaaat

SEQ ID NO: 55560 - DNA, 20 bp, synthetic construct
  misc_feature 1..20: note = chemically synthesized
  source 1..20: mol_type = other DNA
atcggactgttcaactcacc

SEQ ID NO: 55561 - DNA, 20 bp, synthetic construct
  misc_feature 1..20: note = chemically synthesized
  source 1..20: mol_type = other DNA
ggactgttcaactcacctgg

SEQ ID NO: 55562 - DNA, 20 bp, synthetic construct
  misc_feature 1..20: note = chemically synthesized
  source 1..20: mol_type = other DNA
actcacctggcagccactcc

SEQ ID NO: 55563 - DNA, 20 bp, synthetic construct
  misc_feature 1..20: note = chemically synthesized
  source 1..20: mol_type = other DNA
tcacctggcagccactccta

SEQ ID NO: 55564 - DNA, 20 bp, synthetic construct
  misc_feature 1..20: note = chemically synthesized
  source 1..20: mol_type = other DNA
gcagccactcctagagcccc

SEQ ID NO: 55565 - DNA, 20 bp, synthetic construct
  misc_feature 1..20: note = chemically synthesized
  source 1..20: mol_type = other DNA
tcctagagcccctggaactc

SEQ ID NO: 55566 - DNA, 20 bp, synthetic construct
  misc_feature 1..20: note = chemically synthesized
  source 1..20: mol_type = other DNA
agcccctggaactctggccc

SEQ ID NO: 55567 - DNA, 20 bp, synthetic construct
  misc_feature 1..20: note = chemically synthesized
  source 1..20: mol_type = other DNA
gcccctggaactctggccca

SEQ ID NO: 55568 - DNA, 20 bp, synthetic construct
  misc_feature 1..20: note = chemically synthesized
  source 1..20: mol_type = other DNA
ctccctgactgactccttcc

SEQ ID NO: 55569 - DNA, 20 bp, synthetic construct
  misc_feature 1..20: note = chemically synthesized
  source 1..20: mol_type = other DNA
gactccttcccagatcttct

SEQ ID NO: 55570 - DNA, 20 bp, synthetic construct
  misc_feature 1..20: note = chemically synthesized
  source 1..20: mol_type = other DNA
cccagatcttctcggctttg

SEQ ID NO: 55571 - DNA, 20 bp, synthetic construct
  misc_feature 1..20: note = chemically synthesized
  source 1..20: mol_type = other DNA
tcttctcggctttgcagctg

SEQ ID NO: 55572 - DNA, 20 bp, synthetic construct
  misc_feature 1..20: note = chemically synthesized
  source 1..20: mol_type = other DNA
ctgccactgcctgatcgcct

SEQ ID NO: 55573 - DNA, 20 bp, synthetic construct
  misc_feature 1..20: note = chemically synthesized
  source 1..20: mol_type = other DNA
ccactgcctgatcgcctcgg

SEQ ID NO: 55574 - DNA, 20 bp, synthetic construct
  misc_feature 1..20: note = chemically synthesized
  source 1..20: mol_type = other DNA
tgatcgcctcggaagccctg

SEQ ID NO: 55575 - DNA, 20 bp, synthetic construct
  misc_feature 1..20: note = chemically synthesized
  source 1..20: mol_type = other DNA
ggaagccctgtagaccatca

SEQ ID NO: 55576 - DNA, 20 bp, synthetic construct
  misc_feature 1..20: note = chemically synthesized
  source 1..20: mol_type = other DNA
tgtagaccatcacagacacc

SEQ ID NO: 55577 - DNA, 20 bp, synthetic construct
  misc_feature 1..20: note = chemically synthesized
  source 1..20: mol_type = other DNA
ccatcacagacaccgagctt

SEQ ID NO: 55578 - DNA, 20 bp, synthetic construct
  misc_feature 1..20: note = chemically synthesized
  source 1..20: mol_type = other DNA
catcacagacaccgagcttt

SEQ ID NO: 55579 - DNA, 20 bp, synthetic construct
  misc_feature 1..20: note = chemically synthesized
  source 1..20: mol_type = other DNA
cgagctttaggtaattctca

SEQ ID NO: 55580 - DNA, 20 bp, synthetic construct
  misc_feature 1..20: note = chemically synthesized
  source 1..20: mol_type = other DNA
gctttaggtaattctcacag

SEQ ID NO: 55581 - DNA, 20 bp, synthetic construct
  misc_feature 1..20: note = chemically synthesized
  source 1..20: mol_type = other DNA
tttaggtaattctcacagtg

SEQ ID NO: 55582 - DNA, 20 bp, synthetic construct
  misc_feature 1..20: note = chemically synthesized
  source 1..20: mol_type = other DNA
ttaggtaattctcacagtgg

SEQ ID NO: 55583 - DNA, 20 bp, synthetic construct
  misc_feature 1..20: note = chemically synthesized
  source 1..20: mol_type = other DNA
taggtaattctcacagtgga

SEQ ID NO: 55584 - DNA, 20 bp, synthetic construct
  misc_feature 1..20: note = chemically synthesized
  source 1..20: mol_type = other DNA
taattctcacagtggagggt

SEQ ID NO: 55585 - DNA, 20 bp, synthetic construct
  misc_feature 1..20: note = chemically synthesized
  source 1..20: mol_type = other DNA
aagtctgtacccttcttaat

SEQ ID NO: 55586 - DNA, 20 bp, synthetic construct
  misc_feature 1..20: note = chemically synthesized
  source 1..20: mol_type = other DNA
tgtacccttcttaatcagta

SEQ ID NO: 55587 - DNA, 20 bp, synthetic construct
  misc_feature 1..20: note = chemically synthesized
  source 1..20: mol_type = other DNA
tacccttcttaatcagtatg

SEQ ID NO: 55588 - DNA, 20 bp, synthetic construct
  misc_feature 1..20: note = chemically synthesized
  source 1..20: mol_type = other DNA
acccttcttaatcagtatgg

SEQ ID NO: 55589 - DNA, 20 bp, synthetic construct
  misc_feature 1..20: note = chemically synthesized
  source 1..20: mol_type = other DNA
tccacattaccttcttttca

SEQ ID NO: 55590 - DNA, 20 bp, synthetic construct
  misc_feature 1..20: note = chemically synthesized
  source 1..20: mol_type = other DNA
ccacattaccttcttttcaa

SEQ ID NO: 55591 - DNA, 20 bp, synthetic construct
  misc_feature 1..20: note = chemically synthesized
  source 1..20: mol_type = other DNA
ccttgcctccataactgttg

SEQ ID NO: 55592 - DNA, 20 bp, synthetic construct
  misc_feature 1..20: note = chemically synthesized
  source 1..20: mol_type = other DNA
cttgcctccataactgttgt

SEQ ID NO: 55593 - DNA, 20 bp, synthetic construct
  misc_feature 1..20: note = chemically synthesized
  source 1..20: mol_type = other DNA
ataactgttgtaggtattga

SEQ ID NO: 55594 - DNA, 20 bp, synthetic construct
  misc_feature 1..20: note = chemically synthesized
  source 1..20: mol_type = other DNA
ctgttgtaggtattgatggc

SEQ ID NO: 55595 - DNA, 20 bp, synthetic construct
  misc_feature 1..20: note = chemically synthesized
  source 1..20: mol_type = other DNA
tgttgtaggtattgatggcc

SEQ ID NO: 55596 - DNA, 20 bp, synthetic construct
  misc_feature 1..20: note = chemically synthesized
  source 1..20: mol_type = other DNA
ctcttaaaattccccaactc

SEQ ID NO: 55597 - DNA, 20 bp, synthetic construct
  misc_feature 1..20: note = chemically synthesized
  source 1..20: mol_type = other DNA
ccccaactctggtgctaacc

SEQ ID NO: 55598 - DNA, 20 bp, synthetic construct
  misc_feature 1..20: note = chemically synthesized
  source 1..20: mol_type = other DNA
aaccgagacgatactctttt

SEQ ID NO: 55599 - DNA, 20 bp, synthetic construct
  misc_feature 1..20: note = chemically synthesized
  source 1..20: mol_type = other DNA
ttttcattatccccacctgc

SEQ ID NO: 55600 - DNA, 20 bp, synthetic construct
  misc_feature 1..20: note = chemically synthesized
  source 1..20: mol_type = other DNA
ccacctgccagttcccttat

SEQ ID NO: 55601 - DNA, 20 bp, synthetic construct
  misc_feature 1..20: note = chemically synthesized
  source 1..20: mol_type = other DNA
cacctgccagttcccttatt

SEQ ID NO: 55602 - DNA, 20 bp, synthetic construct
  misc_feature 1..20: note = chemically synthesized
  source 1..20: mol_type = other DNA
gccagttcccttattaggcc

SEQ ID NO: 55603 - DNA, 20 bp, synthetic construct
  misc_feature 1..20: note = chemically synthesized
  source 1..20: mol_type = other DNA
tctgcttccctgactattcc

SEQ ID NO: 55604 - DNA, 20 bp, synthetic construct
  misc_feature 1..20: note = chemically synthesized
  source 1..20: mol_type = other DNA
ctgcttccctgactattcct

SEQ ID NO: 55605 - DNA, 20 bp, synthetic construct
  misc_feature 1..20: note = chemically synthesized
  source 1..20: mol_type = other DNA
ccctgactattcctgggcta

SEQ ID NO: 55606 - DNA, 20 bp, synthetic construct
  misc_feature 1..20: note = chemically synthesized
  source 1..20: mol_type = other DNA
ctcattgccatgttttcccc

SEQ ID NO: 55607 - DNA, 20 bp, synthetic construct
  misc_feature 1..20: note = chemically synthesized
  source 1..20: mol_type = other DNA
ccatgttttcccccagttca

SEQ ID NO: 55608 - DNA, 20 bp, synthetic construct
  misc_feature 1..20: note = chemically synthesized
  source 1..20: mol_type = other DNA
atctccccaccttaatccac

SEQ ID NO: 55609 - DNA, 20 bp, synthetic construct
  misc_feature 1..20: note = chemically synthesized
  source 1..20: mol_type = other DNA
ccaccttaatccacaagtat

SEQ ID NO: 55610 - DNA, 20 bp, synthetic construct
  misc_feature 1..20: note = chemically synthesized
  source 1..20: mol_type = other DNA
actcttaccccgctcaatgc

SEQ ID NO: 55611 - DNA, 20 bp, synthetic construct
  misc_feature 1..20: note = chemically synthesized
  source 1..20: mol_type = other DNA
aatgccagtatcccatccca

SEQ ID NO: 55612 - DNA, 20 bp, synthetic construct
  misc_feature 1..20: note = chemically synthesized
  source 1..20: mol_type = other DNA
catcccacagcatgctttga

SEQ ID NO: 55613 - DNA, 20 bp, synthetic construct
  misc_feature 1..20: note = chemically synthesized
  source 1..20: mol_type = other DNA
atcccacagcatgctttgaa

SEQ ID NO: 55614 - DNA, 20 bp, synthetic construct
  misc_feature 1..20: note = chemically synthesized
  source 1..20: mol_type = other DNA
agcatgctttgaaaggatta

SEQ ID NO: 55615 - DNA, 20 bp, synthetic construct
  misc_feature 1..20: note = chemically synthesized
  source 1..20: mol_type = other DNA
ctgttattacttgcctgtta

SEQ ID NO: 55616 - DNA, 20 bp, synthetic construct
  misc_feature 1..20: note = chemically synthesized
  source 1..20: mol_type = other DNA
attacttgcctgttacagca

SEQ ID NO: 55617 - DNA, 20 bp, synthetic construct
  misc_feature 1..20: note = chemically synthesized
  source 1..20: mol_type = other DNA
tgttacagcatggcctttta

SEQ ID NO: 55618 - DNA, 20 bp, synthetic construct
  misc_feature 1..20: note = chemically synthesized
  source 1..20: mol_type = other DNA
cattttacctgtcctaaaac

SEQ ID NO: 55619 - DNA, 20 bp, synthetic construct
  misc_feature 1..20: note = chemically synthesized
  source 1..20: mol_type = other DNA
tacctgtcctaaaaccagac

SEQ ID NO: 55620 - DNA, 20 bp, synthetic construct
  misc_feature 1..20: note = chemically synthesized
  source 1..20: mol_type = other DNA
ctaaaaccagacaagcctta

SEQ ID NO: 55621 - DNA, 20 bp, synthetic construct
  misc_feature 1..20: note = chemically synthesized
  source 1..20: mol_type = other DNA
taaaaccagacaagccttac

SEQ ID NO: 55622 - DNA, 20 bp, synthetic construct
  misc_feature 1..20: note = chemically synthesized
  source 1..20: mol_type = other DNA
accagacaagccttacaggt

SEQ ID NO: 55623 - DNA, 20 bp, synthetic construct
  misc_feature 1..20: note = chemically synthesized
  source 1..20: mol_type = other DNA
acaagccttacaggttagtt

SEQ ID NO: 55624 - DNA, 20 bp, synthetic construct
  misc_feature 1..20: note = chemically synthesized
  source 1..20: mol_type = other DNA
tgttttgcctatccacccca

SEQ ID NO: 55625 - DNA, 20 bp, synthetic construct
  misc_feature 1..20: note = chemically synthesized
  source 1..20: mol_type = other DNA
tataacccattattctgttc

SEQ ID NO: 55626 - DNA, 20 bp, synthetic construct
  misc_feature 1..20: note = chemically synthesized
  source 1..20: mol_type = other DNA
ttcctttgcacccttcattc

SEQ ID NO: 55627 - DNA, 20 bp, synthetic construct
  misc_feature 1..20: note = chemically synthesized
  source 1..20: mol_type = other DNA
agcctctcttcgctttcact

SEQ ID NO: 55628 - DNA, 20 bp, synthetic construct
  misc_feature 1..20: note = chemically synthesized
  source 1..20: mol_type = other DNA
ggactgacactgacacccat

SEQ ID NO: 55629 - DNA, 20 bp, synthetic construct
  misc_feature 1..20: note = chemically synthesized
  source 1..20: mol_type = other DNA
gactgacactgacacccatt

SEQ ID NO: 55630 - DNA, 20 bp, synthetic construct
  misc_feature 1..20: note = chemically synthesized
  source 1..20: mol_type = other DNA
acactgacacccattaggct

SEQ ID NO: 55631 - DNA, 20 bp, synthetic construct
  misc_feature 1..20: note = chemically synthesized
  source 1..20: mol_type = other DNA
attaggctcagcaaattacc

SEQ ID NO: 55632 - DNA, 20 bp, synthetic construct
  misc_feature 1..20: note = chemically synthesized
  source 1..20: mol_type = other DNA
ttaggctcagcaaattacct

SEQ ID NO: 55633 - DNA, 20 bp, synthetic construct
  misc_feature 1..20: note = chemically synthesized
  source 1..20: mol_type = other DNA
tacctgggctgtactgctgc

SEQ ID NO: 55634 - DNA, 20 bp, synthetic construct
  misc_feature 1..20: note = chemically synthesized
  source 1..20: mol_type = other DNA
acctgggctgtactgctgca

SEQ ID NO: 55635 - DNA, 20 bp, synthetic construct
  misc_feature 1..20: note = chemically synthesized
  source 1..20: mol_type = other DNA
tgtactgctgcaaggcttca

SEQ ID NO: 55636 - DNA, 20 bp, synthetic construct
  misc_feature 1..20: note = chemically synthesized
  source 1..20: mol_type = other DNA
ctgctgcaaggcttcacaga

SEQ ID NO: 55637 - DNA, 20 bp, synthetic construct
  misc_feature 1..20: note = chemically synthesized
  source 1..20: mol_type = other DNA
acagacagaccccattactt

SEQ ID NO: 55638 - DNA, 20 bp, synthetic construct
  misc_feature 1..20: note = chemically synthesized
  source 1..20: mol_type = other DNA
cagaccccattacttcagtc

SEQ ID NO: 55639 - DNA, 20 bp, synthetic construct
  misc_feature 1..20: note = chemically synthesized
  source 1..20: mol_type = other DNA
tcctcatgtgttacctatct

SEQ ID NO: 55640 - DNA, 20 bp, synthetic construct
  misc_feature 1..20: note = chemically synthesized
  source 1..20: mol_type = other DNA
acaacaactcctttccttcc

SEQ ID NO: 55641 - DNA, 20 bp, synthetic construct
  misc_feature 1..20: note = chemically synthesized
  source 1..20: mol_type = other DNA
caacaactcctttccttcct

SEQ ID NO: 55642 - DNA, 20 bp, synthetic construct
  misc_feature 1..20: note = chemically synthesized
  source 1..20: mol_type = other DNA
actcctttccttcctaggca

SEQ ID NO: 55643 - DNA, 20 bp, synthetic construct
  misc_feature 1..20: note = chemically synthesized
  source 1..20: mol_type = other DNA
ctttccttcctaggcatagt

SEQ ID NO: 55644 - DNA, 20 bp, synthetic construct
  misc_feature 1..20: note = chemically synthesized
  source 1..20: mol_type = other DNA
cttcctaggcatagttagtg

SEQ ID NO: 55645 - DNA, 20 bp, synthetic construct
  misc_feature 1..20: note = chemically synthesized
  source 1..20: mol_type = other DNA
ctaggcatagttagtgcggt

SEQ ID NO: 55646 - DNA, 20 bp, synthetic construct
  misc_feature 1..20: note = chemically synthesized
  source 1..20: mol_type = other DNA
tgcggtcagaattcttacac

SEQ ID NO: 55647 - DNA, 20 bp, synthetic construct
  misc_feature 1..20: note = chemically synthesized
  source 1..20: mol_type = other DNA
cagaattcttacacaagatc

SEQ ID NO: 55648 - DNA, 20 bp, synthetic construct
  misc_feature 1..20: note = chemically synthesized
  source 1..20: mol_type = other DNA
agaattcttacacaagatcc

SEQ ID NO: 55649 - DNA, 20 bp, synthetic construct
  misc_feature 1..20: note = chemically synthesized
  source 1..20: mol_type = other DNA
agatccaggactgcaccctg

SEQ ID NO: 55650 - DNA, 20 bp, synthetic construct
  misc_feature 1..20: note = chemically synthesized
  source 1..20: mol_type = other DNA
ataacttgaccttactgttt

SEQ ID NO: 55651 - DNA, 20 bp, synthetic construct
  misc_feature 1..20: note = chemically synthesized
  source 1..20: mol_type = other DNA
ttgaccttactgttttagcc

SEQ ID NO: 55652 - DNA, 20 bp, synthetic construct
  misc_feature 1..20: note = chemically synthesized
  source 1..20: mol_type = other DNA
tactgttttagcctagccct

SEQ ID NO: 55653 - DNA, 20 bp, synthetic construct
  misc_feature 1..20: note = chemically synthesized
  source 1..20: mol_type = other DNA
actgttttagcctagccctc

SEQ ID NO: 55654 - DNA, 20 bp, synthetic construct
  misc_feature 1..20: note = chemically synthesized
  source 1..20: mol_type = other DNA
ctagccctcaggtctgcatg

SEQ ID NO: 55655 - DNA, 20 bp, synthetic construct
  misc_feature 1..20: note = chemically synthesized
  source 1..20: mol_type = other DNA
gccctcaggtctgcatgcag

SEQ ID NO: 55656 - DNA, 20 bp, synthetic construct
  misc_feature 1..20: note = chemically synthesized
  source 1..20: mol_type = other DNA
tgccgctgctttaatacttt

SEQ ID NO: 55657 - DNA, 20 bp, synthetic construct
  misc_feature 1..20: note = chemically synthesized
  source 1..20: mol_type = other DNA
ccgctgctttaatactttta

SEQ ID NO: 55658 - DNA, 20 bp, synthetic construct
  misc_feature 1..20: note = chemically synthesized
  source 1..20: mol_type = other DNA
cgctgctttaatacttttag

SEQ ID NO: 55659 - DNA, 20 bp, synthetic construct
  misc_feature 1..20: note = chemically synthesized
  source 1..20: mol_type = other DNA
taaaaatcacaaactatgct

SEQ ID NO: 55660 - DNA, 20 bp, synthetic construct
  misc_feature 1..20: note = chemically synthesized
  source 1..20: mol_type = other DNA
tgcatatactttctgatccc

SEQ ID NO: 55661 - DNA, 20 bp, synthetic construct
  misc_feature 1..20: note = chemically synthesized
  source 1..20: mol_type = other DNA
tttctgatccccggctcctt

SEQ ID NO: 55662 - DNA, 20 bp, synthetic construct
  misc_feature 1..20: note = chemically synthesized
  source 1..20: mol_type = other DNA
agctgtactcactctttgtt

SEQ ID NO: 55663 - DNA, 20 bp, synthetic construct
  misc_feature 1..20: note = chemically synthesized
  source 1..20: mol_type = other DNA
ttaagtcccacaattaccat

SEQ ID NO: 55664 - DNA, 20 bp, synthetic construct
  misc_feature 1..20: note = chemically synthesized
  source 1..20: mol_type = other DNA
cccacaattaccattggtcc

SEQ ID NO: 55665 - DNA, 20 bp, synthetic construct
  misc_feature 1..20: note = chemically synthesized
  source 1..20: mol_type = other DNA
aattaccattggtcctggcc

SEQ ID NO: 55666 - DNA, 20 bp, synthetic construct
  misc_feature 1..20: note = chemically synthesized
  source 1..20: mol_type = other DNA
tcctggcccggacttcaatc

SEQ ID NO: 55667 - DNA, 20 bp, synthetic construct
  misc_feature 1..20: note = chemically synthesized
  source 1..20: mol_type = other DNA
gatcacacttgatttattga

SEQ ID NO: 55668 - DNA, 20 bp, synthetic construct
  misc_feature 1..20: note = chemically synthesized
  source 1..20: mol_type = other DNA
tttattgatggccgttccac

SEQ ID NO: 55669 - DNA, 20 bp, synthetic construct
  misc_feature 1..20: note = chemically synthesized
  source 1..20: mol_type = other DNA
ttattgatggccgttccacc

SEQ ID NO: 55670 - DNA, 20 bp, synthetic construct
  misc_feature 1..20: note = chemically synthesized
  source 1..20: mol_type = other DNA
ggccgttccaccaggcctaa

SEQ ID NO: 55671 - DNA, 20 bp, synthetic construct
  misc_feature 1..20: note = chemically synthesized
  source 1..20: mol_type = other DNA
caggcctaatagccacacac

SEQ ID NO: 55672 - DNA, 20 bp, synthetic construct
  misc_feature 1..20: note = chemically synthesized
  source 1..20: mol_type = other DNA
ctaatagccacacaccagca

SEQ ID NO: 55673 - DNA, 20 bp, synthetic construct
  misc_feature 1..20: note = chemically synthesized
  source 1..20: mol_type = other DNA
taatagccacacaccagcaa

SEQ ID NO: 55674 - DNA, 20 bp, synthetic construct
  misc_feature 1..20: note = chemically synthesized
  source 1..20: mol_type = other DNA
tagccacacaccagcaaagg

SEQ ID NO: 55675 - DNA, 20 bp, synthetic construct
  misc_feature 1..20: note = chemically synthesized
  source 1..20: mol_type = other DNA
agccacacaccagcaaaggc

SEQ ID NO: 55676 - DNA, 20 bp, synthetic construct
  misc_feature 1..20: note = chemically synthesized
  source 1..20: mol_type = other DNA
agcaaaggcaggctatgcta

SEQ ID NO: 55677 - DNA, 20 bp, synthetic construct
  misc_feature 1..20: note = chemically synthesized
  source 1..20: mol_type = other DNA
tatgctatagtacaaaccac

SEQ ID NO: 55678 - DNA, 20 bp, synthetic construct
  misc_feature 1..20: note = chemically synthesized
  source 1..20: mol_type = other DNA
ctctcatttcctttccatcg

SEQ ID NO: 55679 - DNA, 20 bp, synthetic construct
  misc_feature 1..20: note = chemically synthesized
  source 1..20: mol_type = other DNA
atcgtagaaatctatcctca

SEQ ID NO: 55680 - DNA, 20 bp, synthetic construct
  misc_feature 1..20: note = chemically synthesized
  source 1..20: mol_type = other DNA
tcctcaaagaaataacttct

SEQ ID NO: 55681 - DNA, 20 bp, synthetic construct
  misc_feature 1..20: note = chemically synthesized
  source 1..20: mol_type = other DNA
tctgctattctgctactcct

SEQ ID NO: 55682 - DNA, 20 bp, synthetic construct
  misc_feature 1..20: note = chemically synthesized
  source 1..20: mol_type = other DNA
ctgctattctgctactcctc

SEQ ID NO: 55683 - DNA, 20 bp, synthetic construct
  misc_feature 1..20: note = chemically synthesized
  source 1..20: mol_type = other DNA
tgctattctgctactcctca

SEQ ID NO: 55684 - DNA, 20 bp, synthetic construct
  misc_feature 1..20: note = chemically synthesized
  source 1..20: mol_type = other DNA
gctactcctcagggattatt

SEQ ID NO: 55685 - DNA, 20 bp, synthetic construct
  misc_feature 1..20: note = chemically synthesized
  source 1..20: mol_type = other DNA
ctactcctcagggattattc

SEQ ID NO: 55686 - DNA, 20 bp, synthetic construct
  misc_feature 1..20: note = chemically synthesized
  source 1..20: mol_type = other DNA
ccctcccttccctacacatc

SEQ ID NO: 55687 - DNA, 20 bp, synthetic construct
  misc_feature 1..20: note = chemically synthesized
  source 1..20: mol_type = other DNA
cttccctacacatcaagctc

SEQ ID NO: 55688 - DNA, 20 bp, synthetic construct
  misc_feature 1..20: note = chemically synthesized
  source 1..20: mol_type = other DNA
ttccctacacatcaagctcg

SEQ ID NO: 55689 - DNA, 20 bp, synthetic construct
  misc_feature 1..20: note = chemically synthesized
  source 1..20: mol_type = other DNA
ctcgaggatttgcccccacc

SEQ ID NO: 55690 - DNA, 20 bp, synthetic construct
  misc_feature 1..20: note = chemically synthesized
  source 1..20: mol_type = other DNA
tcgaggatttgcccccaccc

SEQ ID NO: 55691 - DNA, 20 bp, synthetic construct
  misc_feature 1..20: note = chemically synthesized
  source 1..20: mol_type = other DNA
gatttgcccccacccaggac

SEQ ID NO: 55692 - DNA, 20 bp, synthetic construct
  misc_feature 1..20: note = chemically synthesized
  source 1..20: mol_type = other DNA
cccacccaggactggcaaat

SEQ ID NO: 55693 - DNA, 20 bp, synthetic construct
  misc_feature 1..20: note = chemically synthesized
  source 1..20: mol_type = other DNA
agatttactcaacatgccct

SEQ ID NO: 55694 - DNA, 20 bp, synthetic construct
  misc_feature 1..20: note = chemically synthesized
  source 1..20: mol_type = other DNA
ttactcaacatgccctgagt

SEQ ID NO: 55695 - DNA, 20 bp, synthetic construct
  misc_feature 1..20: note = chemically synthesized
  source 1..20: mol_type = other DNA
cagataactaaaatacctct

SEQ ID NO: 55696 - DNA, 20 bp, synthetic construct
  misc_feature 1..20: note = chemically synthesized
  source 1..20: mol_type = other DNA
aactaaaatacctcttagtc

SEQ ID NO: 55697 - DNA, 20 bp, synthetic construct
  misc_feature 1..20: note = chemically synthesized
  source 1..20: mol_type = other DNA
actaaaatacctcttagtct

SEQ ID NO: 55698 - DNA, 20 bp, synthetic construct
  misc_feature 1..20: note = chemically synthesized
  source 1..20: mol_type = other DNA
aaaatacctcttagtctagg

SEQ ID NO: 55699 - DNA, 20 bp, synthetic construct
  misc_feature 1..20: note = chemically synthesized
  source 1..20: mol_type = other DNA
gtctaggtagacactttcac

SEQ ID NO: 55700 - DNA, 20 bp, synthetic construct
  misc_feature 1..20: note = chemically synthesized
  source 1..20: mol_type = other DNA
ggtagacactttcactggat

SEQ ID NO: 55701 - DNA, 20 bp, synthetic construct
  misc_feature 1..20: note = chemically synthesized
  source 1..20: mol_type = other DNA
agacactttcactggataag

SEQ ID NO: 55702 - DNA, 20 bp, synthetic construct
  misc_feature 1..20: note = chemically synthesized
  source 1..20: mol_type = other DNA
acactttcactggataagta

SEQ ID NO: 55703 - DNA, 20 bp, synthetic construct
  misc_feature 1..20: note = chemically synthesized
  source 1..20: mol_type = other DNA
cactttcactggataagtag

SEQ ID NO: 55704 - DNA, 20 bp, synthetic construct
  misc_feature 1..20: note = chemically synthesized
  source 1..20: mol_type = other DNA
ataagtagaggtctttccta

SEQ ID NO: 55705 - DNA, 20 bp, synthetic construct
  misc_feature 1..20: note = chemically synthesized
  source 1..20: mol_type = other DNA
taagtagaggtctttcctac

SEQ ID NO: 55706 - DNA, 20 bp, synthetic construct
  misc_feature 1..20: note = chemically synthesized
  source 1..20: mol_type = other DNA
aagtagaggtctttcctaca

SEQ ID NO: 55707 - DNA, 20 bp, synthetic construct
  misc_feature 1..20: note = chemically synthesized
  source 1..20: mol_type = other DNA
aggtctttcctacagggtct

SEQ ID NO: 55708 - DNA, 20 bp, synthetic construct
  misc_feature 1..20: note = chemically synthesized
  source 1..20: mol_type = other DNA
tctttcctacagggtctgag

SEQ ID NO: 55709 - DNA, 20 bp, synthetic construct
  misc_feature 1..20: note = chemically synthesized
  source 1..20: mol_type = other DNA
ctttcctacagggtctgaga

SEQ ID NO: 55710 - DNA, 20 bp, synthetic construct
  misc_feature 1..20: note = chemically synthesized
  source 1..20: mol_type = other DNA
agggtctgagaaggccaccg

SEQ ID NO: 55711 - DNA, 20 bp, synthetic construct
  misc_feature 1..20: note = chemically synthesized
  source 1..20: mol_type = other DNA
agtcatttcttcccttctgt

SEQ ID NO: 55712 - DNA, 20 bp, synthetic construct
  misc_feature 1..20: note = chemically synthesized
  source 1..20: mol_type = other DNA
ttctgtcagacataattcct

SEQ ID NO: 55713 - DNA, 20 bp, synthetic construct
  misc_feature 1..20: note = chemically synthesized
  source 1..20: mol_type = other DNA
tcagacataattcctcagtt

SEQ ID NO: 55714 - DNA, 20 bp, synthetic construct
  misc_feature 1..20: note = chemically synthesized
  source 1..20: mol_type = other DNA
ttagccttcctacctctata

SEQ ID NO: 55715 - DNA, 20 bp, synthetic construct
  misc_feature 1..20: note = chemically synthesized
  source 1..20: mol_type = other DNA
acctctatacagtctgataa

SEQ ID NO: 55716 - DNA, 20 bp, synthetic construct
  misc_feature 1..20: note = chemically synthesized
  source 1..20: mol_type = other DNA
tatacagtctgataacagac

SEQ ID NO: 55717 - DNA, 20 bp, synthetic construct
  misc_feature 1..20: note = chemically synthesized
  source 1..20: mol_type = other DNA
gataacagaccagcctttat

SEQ ID NO: 55718 - DNA, 20 bp, synthetic construct
  misc_feature 1..20: note = chemically synthesized
  source 1..20: mol_type = other DNA
ccagcctttattagtcaaat

SEQ ID NO: 55719 - DNA, 20 bp, synthetic construct
  misc_feature 1..20: note = chemically synthesized
  source 1..20: mol_type = other DNA
ctttattagtcaaatcagcc

SEQ ID NO: 55720 - DNA, 20 bp, synthetic construct
  misc_feature 1..20: note = chemically synthesized
  source 1..20: mol_type = other DNA
tattagtcaaatcagccaag

SEQ ID NO: 55721 - DNA, 20 bp, synthetic construct
  misc_feature 1..20: note = chemically synthesized
  source 1..20: mol_type = other DNA
aaatcagccaagcagttttt

SEQ ID NO: 55722 - DNA, 20 bp, synthetic construct
  misc_feature 1..20: note = chemically synthesized
  source 1..20: mol_type = other DNA
aatcagccaagcagtttttc

SEQ ID NO: 55723 - DNA, 20 bp, synthetic construct
  misc_feature 1..20: note = chemically synthesized
  source 1..20: mol_type = other DNA
caagcagtttttcaggctct

SEQ ID NO: 55724 - DNA, 20 bp, synthetic construct
  misc_feature 1..20: note = chemically synthesized
  source 1..20: mol_type = other DNA
tttttcaggctcttagtatt

SEQ ID NO: 55725 - DNA, 20 bp, synthetic construct
  misc_feature 1..20: note = chemically synthesized
  source 1..20: mol_type = other DNA
taaaacctttatatccctta

SEQ ID NO: 55726 - DNA, 20 bp, synthetic construct
  misc_feature 1..20: note = chemically synthesized
  source 1..20: mol_type = other DNA
cccttacggtcctccgtctt

SEQ ID NO: 55727 - DNA, 20 bp, synthetic construct
  misc_feature 1..20: note = chemically synthesized
  source 1..20: mol_type = other DNA
ccttacggtcctccgtcttc

SEQ ID NO: 55728 - DNA, 20 bp, synthetic construct
  misc_feature 1..20: note = chemically synthesized
  source 1..20: mol_type = other DNA
cggtcctccgtcttcaggaa

SEQ ID NO: 55729 - DNA, 20 bp, synthetic construct
  misc_feature 1..20: note = chemically synthesized
  source 1..20: mol_type = other DNA
tcctccgtcttcaggaaaag

SEQ ID NO: 55730 - DNA, 20 bp, synthetic construct
  misc_feature 1..20: note = chemically synthesized
  source 1..20: mol_type = other DNA
cgtcttcaggaaaagtagaa

SEQ ID NO: 55731 - DNA, 20 bp, synthetic construct
  misc_feature 1..20: note = chemically synthesized
  source 1..20: mol_type = other DNA
ttttaaaaacacacctcacc

SEQ ID NO: 55732 - DNA, 20 bp, synthetic construct
  misc_feature 1..20: note = chemically synthesized
  source 1..20: mol_type = other DNA
aaaacacacctcaccaagct

SEQ ID NO: 55733 - DNA, 20 bp, synthetic construct
  misc_feature 1..20: note = chemically synthesized
  source 1..20: mol_type = other DNA
agctcagccaccaacttaaa

SEQ ID NO: 55734 - DNA, 20 bp, synthetic construct
  misc_feature 1..20: note = chemically synthesized
  source 1..20: mol_type = other DNA
gctcagccaccaacttaaaa

SEQ ID NO: 55735 - DNA, 20 bp, synthetic construct
  misc_feature 1..20: note = chemically synthesized
  source 1..20: mol_type = other DNA
gccaccaacttaaaaaggac

SEQ ID NO: 55736 - DNA, 20 bp, synthetic construct
  misc_feature 1..20: note = chemically synthesized
  source 1..20: mol_type = other DNA
cttttaccacttttctttct

SEQ ID NO: 55737 - DNA, 20 bp, synthetic construct
  misc_feature 1..20: note = chemically synthesized
  source 1..20: mol_type = other DNA
ttaccacttttctttctcag

SEQ ID NO: 55738 - DNA, 20 bp, synthetic construct
  misc_feature 1..20: note = chemically synthesized
  source 1..20: mol_type = other DNA
cacttttctttctcagaagt

SEQ ID NO: 55739 - DNA, 20 bp, synthetic construct
  misc_feature 1..20: note = chemically synthesized
  source 1..20: mol_type = other DNA
tcagaagtcagacctgtcct

SEQ ID NO: 55740 - DNA, 20 bp, synthetic construct
  misc_feature 1..20: note = chemically synthesized
  source 1..20: mol_type = other DNA
gacctgtcctcagaatgcta

SEQ ID NO: 55741 - DNA, 20 bp, synthetic construct
  misc_feature 1..20: note = chemically synthesized
  source 1..20: mol_type = other DNA
acctgtcctcagaatgctac

SEQ ID NO: 55742 - DNA, 20 bp, synthetic construct
  misc_feature 1..20: note = chemically synthesized
  source 1..20: mol_type = other DNA
cctgtcctcagaatgctaca

SEQ ID NO: 55743 - DNA, 20 bp, synthetic construct
  misc_feature 1..20: note = chemically synthesized
  source 1..20: mol_type = other DNA
cctcagaatgctacagggta

SEQ ID NO: 55744 - DNA, 20 bp, synthetic construct
  misc_feature 1..20: note = chemically synthesized
  source 1..20: mol_type = other DNA
ctacagggtacagcccattt

SEQ ID NO: 55745 - DNA, 20 bp, synthetic construct
  misc_feature 1..20: note = chemically synthesized
  source 1..20: mol_type = other DNA
agcccatttgagctcctgta

SEQ ID NO: 55746 - DNA, 20 bp, synthetic construct
  misc_feature 1..20: note = chemically synthesized
  source 1..20: mol_type = other DNA
gtatagatttgcctttttat

SEQ ID NO: 55747 - DNA, 20 bp, synthetic construct
  misc_feature 1..20: note = chemically synthesized
  source 1..20: mol_type = other DNA
tatagatttgcctttttatt

SEQ ID NO: 55748 - DNA, 20 bp, synthetic construct
  misc_feature 1..20: note = chemically synthesized
  source 1..20: mol_type = other DNA
tttgcctttttattaggccc

SEQ ID NO: 55749 - DNA, 20 bp, synthetic construct
  misc_feature 1..20: note = chemically synthesized
  source 1..20: mol_type = other DNA
attaggccccagtctaattc

SEQ ID NO: 55750 - DNA, 20 bp, synthetic construct
  misc_feature 1..20: note = chemically synthesized
  source 1..20: mol_type = other DNA
cccagtctaattccagacac

SEQ ID NO: 55751 - DNA, 20 bp, synthetic construct
  misc_feature 1..20: note = chemically synthesized
  source 1..20: mol_type = other DNA
ttccagacaccagaccaact

SEQ ID NO: 55752 - DNA, 20 bp, synthetic construct
  misc_feature 1..20: note = chemically synthesized
  source 1..20: mol_type = other DNA
catccctgctatcttctgtc

SEQ ID NO: 55753 - DNA, 20 bp, synthetic construct
  misc_feature 1..20: note = chemically synthesized
  source 1..20: mol_type = other DNA
cctgctcttgtttacactgc

SEQ ID NO: 55754 - DNA, 20 bp, synthetic construct
  misc_feature 1..20: note = chemically synthesized
  source 1..20: mol_type = other DNA
ccggtttacactgtttttcc

SEQ ID NO: 55755 - DNA, 20 bp, synthetic construct
  misc_feature 1..20: note = chemically synthesized
  source 1..20: mol_type = other DNA
actgtttttccaagccatca

SEQ ID NO: 55756 - DNA, 20 bp, synthetic construct
  misc_feature 1..20: note = chemically synthesized
  source 1..20: mol_type = other DNA
ccatcacagctgatatctcc

SEQ ID NO: 55757 - DNA, 20 bp, synthetic construct
  misc_feature 1..20: note = chemically synthesized
  source 1..20: mol_type = other DNA
actgccactcttaactcttg

SEQ ID NO: 55758 - DNA, 20 bp, synthetic construct
  misc_feature 1..20: note = chemically synthesized
  source 1..20: mol_type = other DNA
agtaaataaataatctttgc

SEQ ID NO: 55759 - DNA, 20 bp, synthetic construct
  misc_feature 1..20: note = chemically synthesized
  source 1..20: mol_type = other DNA
aaataaataatctttgctgg

SEQ ID NO: 55760 - DNA, 20 bp, synthetic construct
  misc_feature 1..20: note = chemically synthesized
  source 1..20: mol_type = other DNA
aataaataatctttgctggc

SEQ ID NO: 55761 - DNA, 20 bp, synthetic construct
  misc_feature 1..20: note = chemically synthesized
  source 1..20: mol_type = other DNA
aggactatgttgaatctcct

SEQ ID NO: 55762 - DNA, 20 bp, synthetic construct
  misc_feature 1..20: note = chemically synthesized
  source 1..20: mol_type = other DNA
ggactatgttgaatctcctt

SEQ ID NO: 55763 - DNA, 20 bp, synthetic construct
  misc_feature 1..20: note = chemically synthesized
  source 1..20: mol_type = other DNA
ctccttaggcactctttaat

SEQ ID NO: 55764 - DNA, 20 bp, synthetic construct
  misc_feature 1..20: note = chemically synthesized
  source 1..20: mol_type = other DNA
cactctttaatcagatgtcc

SEQ ID NO: 55765 - DNA, 20 bp, synthetic construct
  misc_feature 1..20: note = chemically synthesized
  source 1..20: mol_type = other DNA
actctttaatcagatgtcct

SEQ ID NO: 55766 - DNA, 20 bp, synthetic construct
  misc_feature 1..20: note = chemically synthesized
  source 1..20: mol_type = other DNA
tcctaggtcctcccacttct

SEQ ID NO: 55767 - DNA, 20 bp, synthetic construct
  misc_feature 1..20: note = chemically synthesized
  source 1..20: mol_type = other DNA
tctccttctcttattccatt

SEQ ID NO: 55768 - DNA, 20 bp, synthetic construct
  misc_feature 1..20: note = chemically synthesized
  source 1..20: mol_type = other DNA
aatccatacaaaaccgtatc

SEQ ID NO: 55769 - DNA, 20 bp, synthetic construct
  misc_feature 1..20: note = chemically synthesized
  source 1..20: mol_type = other DNA
atccatacaaaaccgtatcc

SEQ ID NO: 55770 - DNA, 20 bp, synthetic construct
  misc_feature 1..20: note = chemically synthesized
  source 1..20: mol_type = other DNA
cttaccacaaaatcttcctt

SEQ ID NO: 55771 - DNA, 20 bp, synthetic construct
  misc_feature 1..20: note = chemically synthesized
  source 1..20: mol_type = other DNA
cagcttaatctctcccactc

SEQ ID NO: 55772 - DNA, 20 bp, synthetic construct
  misc_feature 1..20: note = chemically synthesized
  source 1..20: mol_type = other DNA
agcttaatctctcccactct

SEQ ID NO: 55773 - DNA, 20 bp, synthetic construct
  misc_feature 1..20: note = chemically synthesized
  source 1..20: mol_type = other DNA
gccgcccctaatcccgctcg

SEQ ID NO: 55774 - DNA, 20 bp, synthetic construct
  misc_feature 1..20: note = chemically synthesized
  source 1..20: mol_type = other DNA
gcccctaatcccgctcgaag

SEQ ID NO: 55775 - DNA, 20 bp, synthetic construct
  misc_feature 1..20: note = chemically synthesized
  source 1..20: mol_type = other DNA
atcccgctcgaagcagccct

SEQ ID NO: 55776 - DNA, 20 bp, synthetic construct
  misc_feature 1..20: note = chemically synthesized
  source 1..20: mol_type = other DNA
tttatttttcttattaatat

SEQ ID NO: 55777 - DNA, 20 bp, synthetic construct
  misc_feature 1..20: note = chemically synthesized
  source 1..20: mol_type = other DNA
atttttcttattaatataag

SEQ ID NO: 55778 - DNA, 20 bp, synthetic construct
  misc_feature 1..20: note = chemically synthesized
  source 1..20: mol_type = other DNA
ttcttattaatataagaaga

SEQ ID NO: 55779 - DNA, 20 bp, synthetic construct
  misc_feature 1..20: note = chemically synthesized
  source 1..20: mol_type = other DNA
tcttattaatataagaagac

SEQ ID NO: 55780 - DNA, 20 bp, synthetic construct
  misc_feature 1..20: note = chemically synthesized
  source 1..20: mol_type = other DNA
atataagaagacaggaatgt

SEQ ID NO: 55781 - DNA, 20 bp, synthetic construct
  misc_feature 1..20: note = chemically synthesized
  source 1..20: mol_type = other DNA
tataagaagacaggaatgtc

SEQ ID NO: 55782 - DNA, 20 bp, synthetic construct
  misc_feature 1..20: note = chemically synthesized
  source 1..20: mol_type = other DNA
gacaggaatgtcaggcctct

SEQ ID NO: 55783 - DNA, 20 bp, synthetic construct
  misc_feature 1..20: note = chemically synthesized
  source 1..20: mol_type = other DNA
aatgtcaggcctctgagccc

SEQ ID NO: 55784 - DNA, 20 bp, synthetic construct
  misc_feature 1..20: note = chemically synthesized
  source 1..20: mol_type = other DNA
caggcctctgagcccaagct

SEQ ID NO: 55785 - DNA, 20 bp, synthetic construct
  misc_feature 1..20: note = chemically synthesized
  source 1..20: mol_type = other DNA
atcatgtcccctgtgacctg

SEQ ID NO: 55786 - DNA, 20 bp, synthetic construct
  misc_feature 1..20: note = chemically synthesized
  source 1..20: mol_type = other DNA
tcatgtcccctgtgacctgc

SEQ ID NO: 55787 - DNA, 20 bp, synthetic construct
  misc_feature 1..20: note = chemically synthesized
  source 1..20: mol_type = other DNA
gtgacctgcaggtacacata

SEQ ID NO: 55788 - DNA, 20 bp, synthetic construct
  misc_feature 1..20: note = chemically synthesized
  source 1..20: mol_type = other DNA
cctgcaggtacacatacaga

SEQ ID NO: 55789 - DNA, 20 bp, synthetic construct
  misc_feature 1..20: note = chemically synthesized
  source 1..20: mol_type = other DNA
caggtacacatacagatggc

SEQ ID NO: 55790 - DNA, 20 bp, synthetic construct
  misc_feature 1..20: note = chemically synthesized
  source 1..20: mol_type = other DNA
ctgatgacattccaccacaa

SEQ ID NO: 55791 - DNA, 20 bp, synthetic construct
  misc_feature 1..20: note = chemically synthesized
  source 1..20: mol_type = other DNA
atgacattccaccacaaaag

SEQ ID NO: 55792 - DNA, 20 bp, synthetic construct
  misc_feature 1..20: note = chemically synthesized
  source 1..20: mol_type = other DNA
caccacaaaagaagtgaaaa

SEQ ID NO: 55793 - DNA, 20 bp, synthetic construct
  misc_feature 1..20: note = chemically synthesized
  source 1..20: mol_type = other DNA
ctgatgacattgtcttgtga

SEQ ID NO: 55794 - DNA, 20 bp, synthetic construct
  misc_feature 1..20: note = chemically synthesized
  source 1..20: mol_type = other DNA
tcttgtgaaagtccttctcc

SEQ ID NO: 55795 - DNA, 20 bp, synthetic construct
  misc_feature 1..20: note = chemically synthesized
  source 1..20: mol_type = other DNA
gtccttctcctggctcatcc

SEQ ID NO: 55796 - DNA, 20 bp, synthetic construct
  misc_feature 1..20: note = chemically synthesized
  source 1..20: mol_type = other DNA
cctggctcatcctggctcaa

SEQ ID NO: 55797 - DNA, 20 bp, synthetic construct
  misc_feature 1..20: note = chemically synthesized
  source 1..20: mol_type = other DNA
ggctcaaaagctcccctact

SEQ ID NO: 55798 - DNA, 20 bp, synthetic construct
  misc_feature 1..20: note = chemically synthesized
  source 1..20: mol_type = other DNA
gaccccccactcctgcccgc

SEQ ID NO: 55799 - DNA, 20 bp, synthetic construct
  misc_feature 1..20: note = chemically synthesized
  source 1..20: mol_type = other DNA
ccccccactcctgcccgcca

SEQ ID NO: 55800 - DNA, 20 bp, synthetic construct
  misc_feature 1..20: note = chemically synthesized
  source 1..20: mol_type = other DNA
cctacccaaatcttataaaa

SEQ ID NO: 55801 - DNA, 20 bp, synthetic construct
  misc_feature 1..20: note = chemically synthesized
  source 1..20: mol_type = other DNA
ccctttgctgactctctttt

SEQ ID NO: 55802 - DNA, 20 bp, synthetic construct
  misc_feature 1..20: note = chemically synthesized
  source 1..20: mol_type = other DNA
gctgactctcttttcggact

SEQ ID NO: 55803 - DNA, 20 bp, synthetic construct
  misc_feature 1..20: note = chemically synthesized
  source 1..20: mol_type = other DNA
ggactcagcccgcctgcacc

SEQ ID NO: 55804 - DNA, 20 bp, synthetic construct
  misc_feature 1..20: note = chemically synthesized
  source 1..20: mol_type = other DNA
gactcagcccgcctgcaccc

SEQ ID NO: 55805 - DNA, 20 bp, synthetic construct
  misc_feature 1..20: note = chemically synthesized
  source 1..20: mol_type = other DNA
gcctgcacccaggtgataaa

SEQ ID NO: 55806 - DNA, 20 bp, synthetic construct
  misc_feature 1..20: note = chemically synthesized
  source 1..20: mol_type = other DNA
aaagctttattgctcacaca

SEQ ID NO: 55807 - DNA, 20 bp, synthetic construct
  misc_feature 1..20: note = chemically synthesized
  source 1..20: mol_type = other DNA
ttgctcacacaaagcctgtt

SEQ ID NO: 55808 - DNA, 20 bp, synthetic construct
  misc_feature 1..20: note = chemically synthesized
  source 1..20: mol_type = other DNA
ctcacacaaagcctgtttgg

SEQ ID NO: 55809 - DNA, 20 bp, synthetic construct
  misc_feature 1..20: note = chemically synthesized
  source 1..20: mol_type = other DNA
cctgtttggtagtctcctca

SEQ ID NO: 55810 - DNA, 20 bp, synthetic construct
  misc_feature 1..20: note = chemically synthesized
  source 1..20: mol_type = other DNA
ctgtttggtagtctcctcac

SEQ ID NO: 55811 - DNA, 20 bp, synthetic construct
  misc_feature 1..20: note = chemically synthesized
  source 1..20: mol_type = other DNA
tgtttggtagtctcctcaca

SEQ ID NO: 55812 - DNA, 20 bp, synthetic construct
  misc_feature 1..20: note = chemically synthesized
  source 1..20: mol_type = other DNA
catgaaactgaataaccaat

SEQ ID NO: 55813 - DNA, 20 bp, synthetic construct
  misc_feature 1..20: note = chemically synthesized
  source 1..20: mol_type = other DNA
gaataaccaatgagtcacta

SEQ ID NO: 55814 - DNA, 20 bp, synthetic construct
  misc_feature 1..20: note = chemically synthesized
  source 1..20: mol_type = other DNA
aatgagtcactaaagaaatt

SEQ ID NO: 55815 - DNA, 20 bp, synthetic construct
  misc_feature 1..20: note = chemically synthesized
  source 1..20: mol_type = other DNA
gagtcactaaagaaattaag

SEQ ID NO: 55816 - DNA, 20 bp, synthetic construct
  misc_feature 1..20: note = chemically synthesized
  source 1..20: mol_type = other DNA
agtcactaaagaaattaaga

SEQ ID NO: 55817 - DNA, 20 bp, synthetic construct
  misc_feature 1..20: note = chemically synthesized
  source 1..20: mol_type = other DNA
attttaaaacttcttgaaac

SEQ ID NO: 55818 - DNA, 20 bp, synthetic construct
  misc_feature 1..20: note = chemically synthesized
  source 1..20: mol_type = other DNA
cttcttgaaacaagtgaaaa

SEQ ID NO: 55819 - DNA, 20 bp, synthetic construct
  misc_feature 1..20: note = chemically synthesized
  source 1..20: mol_type = other DNA
atacaacataccaaaaccta

SEQ ID NO: 55820 - DNA, 20 bp, synthetic construct
  misc_feature 1..20: note = chemically synthesized
  source 1..20: mol_type = other DNA
tacaacataccaaaacctac

SEQ ID NO: 55821 - DNA, 20 bp, synthetic construct
  misc_feature 1..20: note = chemically synthesized
  source 1..20: mol_type = other DNA
ataccaaaacctacaggata

SEQ ID NO: 55822 - DNA, 20 bp, synthetic construct
  misc_feature 1..20: note = chemically synthesized
  source 1..20: mol_type = other DNA
aaacctacaggatatggcaa

SEQ ID NO: 55823 - DNA, 20 bp, synthetic construct
  misc_feature 1..20: note = chemically synthesized
  source 1..20: mol_type = other DNA
cctacaggatatggcaaaag

SEQ ID NO: 55824 - DNA, 20 bp, synthetic construct
  misc_feature 1..20: note = chemically synthesized
  source 1..20: mol_type = other DNA
gatatggcaaaagcagtact

SEQ ID NO: 55825 - DNA, 20 bp, synthetic construct
  misc_feature 1..20: note = chemically synthesized
  source 1..20: mol_type = other DNA
tatggcaaaagcagtactta

SEQ ID NO: 55826 - DNA, 20 bp, synthetic construct
  misc_feature 1..20: note = chemically synthesized
  source 1..20: mol_type = other DNA
atggcaaaagcagtacttag

SEQ ID NO: 55827 - DNA, 20 bp, synthetic construct
  misc_feature 1..20: note = chemically synthesized
  source 1..20: mol_type = other DNA
tggcaaaagcagtacttaga

SEQ ID NO: 55828 - DNA, 20 bp, synthetic construct
  misc_feature 1..20: note = chemically synthesized
  source 1..20: mol_type = other DNA
caaaagcagtacttagaggg

SEQ ID NO: 55829 - DNA, 20 bp, synthetic construct
  misc_feature 1..20: note = chemically synthesized
  source 1..20: mol_type = other DNA
agtacttagagggaagttca

SEQ ID NO: 55830 - DNA, 20 bp, synthetic construct
  misc_feature 1..20: note = chemically synthesized
  source 1..20: mol_type = other DNA
ataaacacctatatccaaaa

SEQ ID NO: 55831 - DNA, 20 bp, synthetic construct
  misc_feature 1..20: note = chemically synthesized
  source 1..20: mol_type = other DNA
aacacctatatccaaaaaag

SEQ ID NO: 55832 - DNA, 20 bp, synthetic construct
  misc_feature 1..20: note = chemically synthesized
  source 1..20: mol_type = other DNA
cctatatccaaaaaagtaga

SEQ ID NO: 55833 - DNA, 20 bp, synthetic construct
  misc_feature 1..20: note = chemically synthesized
  source 1..20: mol_type = other DNA
ctatatccaaaaaagtagaa

SEQ ID NO: 55834 - DNA, 20 bp, synthetic construct
  misc_feature 1..20: note = chemically synthesized
  source 1..20: mol_type = other DNA
aaagtagaaaggcttcaact

SEQ ID NO: 55835 - DNA, 20 bp, synthetic construct
  misc_feature 1..20: note = chemically synthesized
  source 1..20: mol_type = other DNA
gcaaccaaacaatgtacctc

SEQ ID NO: 55836 - DNA, 20 bp, synthetic construct
  misc_feature 1..20: note = chemically synthesized
  source 1..20: mol_type = other DNA
caaccaaacaatgtacctca

SEQ ID NO: 55837 - DNA, 20 bp, synthetic construct
  misc_feature 1..20: note = chemically synthesized
  source 1..20: mol_type = other DNA
aacaatgtacctcaaggaaa

SEQ ID NO: 55838 - DNA, 20 bp, synthetic construct
  misc_feature 1..20: note = chemically synthesized
  source 1..20: mol_type = other DNA
acaatgtacctcaaggaaat

SEQ ID NO: 55839 - DNA, 20 bp, synthetic construct
  misc_feature 1..20: note = chemically synthesized
  source 1..20: mol_type = other DNA
tgtacctcaaggaaatagga

SEQ ID NO: 55840 - DNA, 20 bp, synthetic construct
  misc_feature 1..20: note = chemically synthesized
  source 1..20: mol_type = other DNA
cctcaaggaaataggaaagc

SEQ ID NO: 55841 - DNA, 20 bp, synthetic construct
  misc_feature 1..20: note = chemically synthesized
  source 1..20: mol_type = other DNA
caaaccaaatgcaaaattaa

SEQ ID NO: 55842 - DNA, 20 bp, synthetic construct
  misc_feature 1..20: note = chemically synthesized
  source 1..20: mol_type = other DNA
accaaatgcaaaattaatag

SEQ ID NO: 55843 - DNA, 20 bp, synthetic construct
  misc_feature 1..20: note = chemically synthesized
  source 1..20: mol_type = other DNA
ccaaatgcaaaattaataga

SEQ ID NO: 55844 - DNA, 20 bp, synthetic construct
  misc_feature 1..20: note = chemically synthesized
  source 1..20: mol_type = other DNA
caaatgcaaaattaatagaa

SEQ ID NO: 55845 - DNA, 20 bp, synthetic construct
  misc_feature 1..20: note = chemically synthesized
  source 1..20: mol_type = other DNA
aaatgcaaaattaatagaag

SEQ ID NO: 55846 - DNA, 20 bp, synthetic construct
  misc_feature 1..20: note = chemically synthesized
  source 1..20: mol_type = other DNA
atgcaaaattaatagaaggg

SEQ ID NO: 55847 - DNA, 20 bp, synthetic construct
  misc_feature 1..20: note = chemically synthesized
  source 1..20: mol_type = other DNA
attaatagaaggggagaaat

SEQ ID NO: 55848 - DNA, 20 bp, synthetic construct
  misc_feature 1..20: note = chemically synthesized
  source 1..20: mol_type = other DNA
atagaaggggagaaataaga

SEQ ID NO: 55849 - DNA, 20 bp, synthetic construct
  misc_feature 1..20: note = chemically synthesized
  source 1..20: mol_type = other DNA
aggggagaaataagaaagat

SEQ ID NO: 55850 - DNA, 20 bp, synthetic construct
  misc_feature 1..20: note = chemically synthesized
  source 1..20: mol_type = other DNA
gggagaaataagaaagatca

SEQ ID NO: 55851 - DNA, 20 bp, synthetic construct
  misc_feature 1..20: note = chemically synthesized
  source 1..20: mol_type = other DNA
agaaataagaaagatcagag

SEQ ID NO: 55852 - DNA, 20 bp, synthetic construct
  misc_feature 1..20: note = chemically synthesized
  source 1..20: mol_type = other DNA
gagaagaaacaaatgaaatt

SEQ ID NO: 55853 - DNA, 20 bp, synthetic construct
  misc_feature 1..20: note = chemically synthesized
  source 1..20: mol_type = other DNA
gaaattgagaccaaaaaata

SEQ ID NO: 55854 - DNA, 20 bp, synthetic construct
  misc_feature 1..20: note = chemically synthesized
  source 1..20: mol_type = other DNA
agaaaatcattaaaaacaaa

SEQ ID NO: 55855 - DNA, 20 bp, synthetic construct
  misc_feature 1..20: note = chemically synthesized
  source 1..20: mol_type = other DNA
aaaacaaacagttgctttct

SEQ ID NO: 55856 - DNA, 20 bp, synthetic construct
  misc_feature 1..20: note = chemically synthesized
  source 1..20: mol_type = other DNA
caaacagttgctttcttgga

SEQ ID NO: 55857 - DNA, 20 bp, synthetic construct
  misc_feature 1..20: note = chemically synthesized
  source 1..20: mol_type = other DNA
aaacagttgctttcttggaa

SEQ ID NO: 55858 - DNA, 20 bp, synthetic construct
  misc_feature 1..20: note = chemically synthesized
  source 1..20: mol_type = other DNA
aacaaaatcaacaaaacttt

SEQ ID NO: 55859 - DNA, 20 bp, synthetic construct
  misc_feature 1..20: note = chemically synthesized
  source 1..20: mol_type = other DNA
tcaacaaaactttaagaaaa

SEQ ID NO: 55860 - DNA, 20 bp, synthetic construct
  misc_feature 1..20: note = chemically synthesized
  source 1..20: mol_type = other DNA
aacaaaactttaagaaaaaa

SEQ ID NO: 55861 - DNA, 20 bp, synthetic construct
  misc_feature 1..20: note = chemically synthesized
  source 1..20: mol_type = other DNA
aaaaaagagtcaaataaaat

SEQ ID NO: 55862 - DNA, 20 bp, synthetic construct
  misc_feature 1..20: note = chemically synthesized
  source 1..20: mol_type = other DNA
aataaaattagaaaatgaaa

SEQ ID NO: 55863 - DNA, 20 bp, synthetic construct
  misc_feature 1..20: note = chemically synthesized
  source 1..20: mol_type = other DNA
taaaattagaaaatgaaaaa

SEQ ID NO: 55864 - DNA, 20 bp, synthetic construct
  misc_feature 1..20: note = chemically synthesized
  source 1..20: mol_type = other DNA
aaaattagaaaatgaaaaag

SEQ ID NO: 55865 - DNA, 20 bp, synthetic construct
  misc_feature 1..20: note = chemically synthesized
  source 1..20: mol_type = other DNA
aaaaagaggatataacaatt

SEQ ID NO: 55866 - DNA, 20 bp, synthetic construct
  misc_feature 1..20: note = chemically synthesized
  source 1..20: mol_type = other DNA
ggatataacaattgagacct

SEQ ID NO: 55867 - DNA, 20 bp, synthetic construct
  misc_feature 1..20: note = chemically synthesized
  source 1..20: mol_type = other DNA
attgagacctcagcaacaca

SEQ ID NO: 55868 - DNA, 20 bp, synthetic construct
  misc_feature 1..20: note = chemically synthesized
  source 1..20: mol_type = other DNA
tcagcaacacaaagactcat

SEQ ID NO: 55869 - DNA, 20 bp, synthetic construct
  misc_feature 1..20: note = chemically synthesized
  source 1..20: mol_type = other DNA
acaactgtattccaacaaat

SEQ ID NO: 55870 - DNA, 20 bp, synthetic construct
  misc_feature 1..20: note = chemically synthesized
  source 1..20: mol_type = other DNA
ttccaacaaattggaaaatc

SEQ ID NO: 55871 - DNA, 20 bp, synthetic construct
  misc_feature 1..20: note = chemically synthesized
  source 1..20: mol_type = other DNA
attggaaaatctagaataaa

SEQ ID NO: 55872 - DNA, 20 bp, synthetic construct
  misc_feature 1..20: note = chemically synthesized
  source 1..20: mol_type = other DNA
agaataaatggataaattcc

SEQ ID NO: 55873 - DNA, 20 bp, synthetic construct
  misc_feature 1..20: note = chemically synthesized
  source 1..20: mol_type = other DNA
gataaattcctggacacata

SEQ ID NO: 55874 - DNA, 20 bp, synthetic construct
  misc_feature 1..20: note = chemically synthesized
  source 1..20: mol_type = other DNA
attcctggacacatacagcc

SEQ ID NO: 55875 - DNA, 20 bp, synthetic construct
  misc_feature 1..20: note = chemically synthesized
  source 1..20: mol_type = other DNA
ctggacacatacagcctagc

SEQ ID NO: 55876 - DNA, 20 bp, synthetic construct
  misc_feature 1..20: note = chemically synthesized
  source 1..20: mol_type = other DNA
catacagcctagcaagactg

SEQ ID NO: 55877 - DNA, 20 bp, synthetic construct
  misc_feature 1..20: note = chemically synthesized
  source 1..20: mol_type = other DNA
cctagcaagactgaagcatg

SEQ ID NO: 55878 - DNA, 20 bp, synthetic construct
  misc_feature 1..20: note = chemically synthesized
  source 1..20: mol_type = other DNA
aagactgaagcatgtagaaa

SEQ ID NO: 55879 - DNA, 20 bp, synthetic construct
  misc_feature 1..20: note = chemically synthesized
  source 1..20: mol_type = other DNA
gtagaaacagaaaacctcaa

SEQ ID NO: 55880 - DNA, 20 bp, synthetic construct
  misc_feature 1..20: note = chemically synthesized
  source 1..20: mol_type = other DNA
atagaacaataatgaataac

SEQ ID NO: 55881 - DNA, 20 bp, synthetic construct
  misc_feature 1..20: note = chemically synthesized
  source 1..20: mol_type = other DNA
aataatgaataacaagatta

SEQ ID NO: 55882 - DNA, 20 bp, synthetic construct
  misc_feature 1..20: note = chemically synthesized
  source 1..20: mol_type = other DNA
aagattaaagttgtaatata

SEQ ID NO: 55883 - DNA, 20 bp, synthetic construct
  misc_feature 1..20: note = chemically synthesized
  source 1..20: mol_type = other DNA
taatataaagtttcctatta

SEQ ID NO: 55884 - DNA, 20 bp, synthetic construct
  misc_feature 1..20: note = chemically synthesized
  source 1..20: mol_type = other DNA
taaagtttcctattaaagaa

SEQ ID NO: 55885 - DNA, 20 bp, synthetic construct
  misc_feature 1..20: note = chemically synthesized
  source 1..20: mol_type = other DNA
tttcctattaaagaaaagcc

SEQ ID NO: 55886 - DNA, 20 bp, synthetic construct
  misc_feature 1..20: note = chemically synthesized
  source 1..20: mol_type = other DNA
ttcctattaaagaaaagccc

SEQ ID NO: 55887 - DNA, 20 bp, synthetic construct
  misc_feature 1..20: note = chemically synthesized
  source 1..20: mol_type = other DNA
aagaaaagcccaggactcga

SEQ ID NO: 55888 - DNA, 20 bp, synthetic construct
  misc_feature 1..20: note = chemically synthesized
  source 1..20: mol_type = other DNA
agaaaagcccaggactcgat

SEQ ID NO: 55889 - DNA, 20 bp, synthetic construct
  misc_feature 1..20: note = chemically synthesized
  source 1..20: mol_type = other DNA
gatgggctaccaaacatttc

SEQ ID NO: 55890 - DNA, 20 bp, synthetic construct
  misc_feature 1..20: note = chemically synthesized
  source 1..20: mol_type = other DNA
gggctaccaaacatttcaag

SEQ ID NO: 55891 - DNA, 20 bp, synthetic construct
  misc_feature 1..20: note = chemically synthesized
  source 1..20: mol_type = other DNA
acaaacaaataaaaactgaa

SEQ ID NO: 55892 - DNA, 20 bp, synthetic construct
  misc_feature 1..20: note = chemically synthesized
  source 1..20: mol_type = other DNA
aacaaataaaaactgaaaag

SEQ ID NO: 55893 - DNA, 20 bp, synthetic construct
  misc_feature 1..20: note = chemically synthesized
  source 1..20: mol_type = other DNA
acaaataaaaactgaaaaga

SEQ ID NO: 55894 - DNA, 20 bp, synthetic construct
  misc_feature 1..20: note = chemically synthesized
  source 1..20: mol_type = other DNA
caaataaaaactgaaaagaa

SEQ ID NO: 55895 - DNA, 20 bp, synthetic construct
  misc_feature 1..20: note = chemically synthesized
  source 1..20: mol_type = other DNA
tacttctaaacttattctat

SEQ ID NO: 55896 - DNA, 20 bp, synthetic construct
  misc_feature 1..20: note = chemically synthesized
  source 1..20: mol_type = other DNA
acttctaaacttattctatg

SEQ ID NO: 55897 - DNA, 20 bp, synthetic construct
  misc_feature 1..20: note = chemically synthesized
  source 1..20: mol_type = other DNA
ctaaacttattctatgaggc

SEQ ID NO: 55898 - DNA, 20 bp, synthetic construct
  misc_feature 1..20: note = chemically synthesized
  source 1..20: mol_type = other DNA
ttactctaatatacccaaac

SEQ ID NO: 55899 - DNA, 20 bp, synthetic construct
  misc_feature 1..20: note = chemically synthesized
  source 1..20: mol_type = other DNA
ctaatatacccaaaccagac

SEQ ID NO: 55900 - DNA, 20 bp, synthetic construct
  misc_feature 1..20: note = chemically synthesized
  source 1..20: mol_type = other DNA
taatatacccaaaccagacc

SEQ ID NO: 55901 - DNA, 20 bp, synthetic construct
  misc_feature 1..20: note = chemically synthesized
  source 1..20: mol_type = other DNA
acaacaacaaatgcacctca

SEQ ID NO: 55902 - DNA, 20 bp, synthetic construct
  misc_feature 1..20: note = chemically synthesized
  source 1..20: mol_type = other DNA
caacaacaaatgcacctcaa

SEQ ID NO: 55903 - DNA, 20 bp, synthetic construct
  misc_feature 1..20: note = chemically synthesized
  source 1..20: mol_type = other DNA
acaacaaatgcacctcaaag

SEQ ID NO: 55904 - DNA, 20 bp, synthetic construct
  misc_feature 1..20: note = chemically synthesized
  source 1..20: mol_type = other DNA
caacaaatgcacctcaaagg

SEQ ID NO: 55905 - DNA, 20 bp, synthetic construct
  misc_feature 1..20: note = chemically synthesized
  source 1..20: mol_type = other DNA
aatgcacctcaaaggaggta

SEQ ID NO: 55906 - DNA, 20 bp, synthetic construct
  misc_feature 1..20: note = chemically synthesized
  source 1..20: mol_type = other DNA
gcacctcaaaggaggtacag

SEQ ID NO: 55907 - DNA, 20 bp, synthetic construct
  misc_feature 1..20: note = chemically synthesized
  source 1..20: mol_type = other DNA
cacctcaaaggaggtacagt

SEQ ID NO: 55908 - DNA, 20 bp, synthetic construct
  misc_feature 1..20: note = chemically synthesized
  source 1..20: mol_type = other DNA
tcaaaataataaaaaccata

SEQ ID NO: 55909 - DNA, 20 bp, synthetic construct
  misc_feature 1..20: note = chemically synthesized
  source 1..20: mol_type = other DNA
caaaataataaaaaccatat

SEQ ID NO: 55910 - DNA, 20 bp, synthetic construct
  misc_feature 1..20: note = chemically synthesized
  source 1..20: mol_type = other DNA
aaaaccatataggacaaacc

SEQ ID NO: 55911 - DNA, 20 bp, synthetic construct
  misc_feature 1..20: note = chemically synthesized
  source 1..20: mol_type = other DNA
agtgctaacattatgctgaa

SEQ ID NO: 55912 - DNA, 20 bp, synthetic construct
  misc_feature 1..20: note = chemically synthesized
  source 1..20: mol_type = other DNA
tgctaacattatgctgaaca

SEQ ID NO: 55913 - DNA, 20 bp, synthetic construct
  misc_feature 1..20: note = chemically synthesized
  source 1..20: mol_type = other DNA
tgctgaacagagaaacattg

SEQ ID NO: 55914 - DNA, 20 bp, synthetic construct
  misc_feature 1..20: note = chemically synthesized
  source 1..20: mol_type = other DNA
gctgaacagagaaacattga

SEQ ID NO: 55915 - DNA, 20 bp, synthetic construct
  misc_feature 1..20: note = chemically synthesized
  source 1..20: mol_type = other DNA
acattgaaggcctttcctct

SEQ ID NO: 55916 - DNA, 20 bp, synthetic construct
  misc_feature 1..20: note = chemically synthesized
  source 1..20: mol_type = other DNA
cattgaaggcctttcctcta

SEQ ID NO: 55917 - DNA, 20 bp, synthetic construct
  misc_feature 1..20: note = chemically synthesized
  source 1..20: mol_type = other DNA
tttcctctaaggactgaaat

SEQ ID NO: 55918 - DNA, 20 bp, synthetic construct
  misc_feature 1..20: note = chemically synthesized
  source 1..20: mol_type = other DNA
ttcctctaaggactgaaata

SEQ ID NO: 55919 - DNA, 20 bp, synthetic construct
  misc_feature 1..20: note = chemically synthesized
  source 1..20: mol_type = other DNA
tctaaggactgaaataaggc

SEQ ID NO: 55920 - DNA, 20 bp, synthetic construct
  misc_feature 1..20: note = chemically synthesized
  source 1..20: mol_type = other DNA
gccattatttaacataatat

SEQ ID NO: 55921 - DNA, 20 bp, synthetic construct
  misc_feature 1..20: note = chemically synthesized
  source 1..20: mol_type = other DNA
attatttaacataatattgg

SEQ ID NO: 55922 - DNA, 20 bp, synthetic construct
  misc_feature 1..20: note = chemically synthesized
  source 1..20: mol_type = other DNA
taacataatattggaagtct

SEQ ID NO: 55923 - DNA, 20 bp, synthetic construct
  misc_feature 1..20: note = chemically synthesized
  source 1..20: mol_type = other DNA
ataatattggaagtcttgga

SEQ ID NO: 55924 - DNA, 20 bp, synthetic construct
  misc_feature 1..20: note = chemically synthesized
  source 1..20: mol_type = other DNA
aatattggaagtcttggaaa

SEQ ID NO: 55925 - DNA, 20 bp, synthetic construct
  misc_feature 1..20: note = chemically synthesized
  source 1..20: mol_type = other DNA
aagtcttggaaagagaaatt

SEQ ID NO: 55926 - DNA, 20 bp, synthetic construct
  misc_feature 1..20: note = chemically synthesized
  source 1..20: mol_type = other DNA
agtcttggaaagagaaattc

SEQ ID NO: 55927 - DNA, 20 bp, synthetic construct
  misc_feature 1..20: note = chemically synthesized
  source 1..20: mol_type = other DNA
cttggaaagagaaattcagg

SEQ ID NO: 55928 - DNA, 20 bp, synthetic construct
  misc_feature 1..20: note = chemically synthesized
  source 1..20: mol_type = other DNA
tggaaagagaaattcaggaa

SEQ ID NO: 55929 - DNA, 20 bp, synthetic construct
  misc_feature 1..20: note = chemically synthesized
  source 1..20: mol_type = other DNA
aagagaaattcaggaagaga

SEQ ID NO: 55930 - DNA, 20 bp, synthetic construct
  misc_feature 1..20: note = chemically synthesized
  source 1..20: mol_type = other DNA
gaaattcaggaagagaaaga

SEQ ID NO: 55931 - DNA, 20 bp, synthetic construct
  misc_feature 1..20: note = chemically synthesized
  source 1..20: mol_type = other DNA
gaaagaaagtgcatccaaat

SEQ ID NO: 55932 - DNA, 20 bp, synthetic construct
  misc_feature 1..20: note = chemically synthesized
  source 1..20: mol_type = other DNA
gaaagtgcatccaaattgga

SEQ ID NO: 55933 - DNA, 20 bp, synthetic construct
  misc_feature 1..20: note = chemically synthesized
  source 1..20: mol_type = other DNA
aaagtgcatccaaattggaa

SEQ ID NO: 55934 - DNA, 20 bp, synthetic construct
  misc_feature 1..20: note = chemically synthesized
  source 1..20: mol_type = other DNA
gtgcatccaaattggaaagg

SEQ ID NO: 55935 - DNA, 20 bp, synthetic construct
  misc_feature 1..20: note = chemically synthesized
  source 1..20: mol_type = other DNA
catccaaattggaaaggaag

SEQ ID NO: 55936 - DNA, 20 bp, synthetic construct
  misc_feature 1..20: note = chemically synthesized
  source 1..20: mol_type = other DNA
tggaaaggaagaagttaaat

SEQ ID NO: 55937 - DNA, 20 bp, synthetic construct
  misc_feature 1..20: note = chemically synthesized
  source 1..20: mol_type = other DNA
aggaagaagttaaattagcc

SEQ ID NO: 55938 - DNA, 20 bp, synthetic construct
  misc_feature 1..20: note = chemically synthesized
  source 1..20: mol_type = other DNA
agttaaattagcctagtttg

SEQ ID NO: 55939 - DNA, 20 bp, synthetic construct
  misc_feature 1..20: note = chemically synthesized
  source 1..20: mol_type = other DNA
agatgacatgatcttatact

SEQ ID NO: 55940 - DNA, 20 bp, synthetic construct
  misc_feature 1..20: note = chemically synthesized
  source 1..20: mol_type = other DNA
acgatttaaaaaaatcaata

SEQ ID NO: 55941 - DNA, 20 bp, synthetic construct
  misc_feature 1..20: note = chemically synthesized
  source 1..20: mol_type = other DNA
taaaaaaatcaataaagtta

SEQ ID NO: 55942 - DNA, 20 bp, synthetic construct
  misc_feature 1..20: note = chemically synthesized
  source 1..20: mol_type = other DNA
aaaaaaatcaataaagttac

SEQ ID NO: 55943 - DNA, 20 bp, synthetic construct
  misc_feature 1..20: note = chemically synthesized
  source 1..20: mol_type = other DNA
atgaaataaaaatacaaaat

SEQ ID NO: 55944 - DNA, 20 bp, synthetic construct
  misc_feature 1..20: note = chemically synthesized
  source 1..20: mol_type = other DNA
aaataaaaatacaaaatcag

SEQ ID NO: 55945 - DNA, 20 bp, synthetic construct
  misc_feature 1..20: note = chemically synthesized
  source 1..20: mol_type = other DNA
agtagcatttcatatataaa

SEQ ID NO: 55946 - DNA, 20 bp, synthetic construct
  misc_feature 1..20: note = chemically synthesized
  source 1..20: mol_type = other DNA
taaaacaatcttatttacaa

SEQ ID NO: 55947 - DNA, 20 bp, synthetic construct
  misc_feature 1..20: note = chemically synthesized
  source 1..20: mol_type = other DNA
caataaaaatataaaatacc

SEQ ID NO: 55948 - DNA, 20 bp, synthetic construct
  misc_feature 1..20: note = chemically synthesized
  source 1..20: mol_type = other DNA
aataaaaatataaaataccc

SEQ ID NO: 55949 - DNA, 20 bp, synthetic construct
  misc_feature 1..20: note = chemically synthesized
  source 1..20: mol_type = other DNA
taaaaatataaaatacccag

SEQ ID NO: 55950 - DNA, 20 bp, synthetic construct
  misc_feature 1..20: note = chemically synthesized
  source 1..20: mol_type = other DNA
cccaggagtcaatctaaccc

SEQ ID NO: 55951 - DNA, 20 bp, synthetic construct
  misc_feature 1..20: note = chemically synthesized
  source 1..20: mol_type = other DNA
aggagtcaatctaacccaag

SEQ ID NO: 55952 - DNA, 20 bp, synthetic construct
  misc_feature 1..20: note = chemically synthesized
  source 1..20: mol_type = other DNA
caatctaacccaagaagtaa

SEQ ID NO: 55953 - DNA, 20 bp, synthetic construct
  misc_feature 1..20: note = chemically synthesized
  source 1..20: mol_type = other DNA
aagaagtaaaagatctctat

SEQ ID NO: 55954 - DNA, 20 bp, synthetic construct
  misc_feature 1..20: note = chemically synthesized
  source 1..20: mol_type = other DNA
taagaaaaattataaaactc

SEQ ID NO: 55955 - DNA, 20 bp, synthetic construct
  misc_feature 1..20: note = chemically synthesized
  source 1..20: mol_type = other DNA
aaattataaaactctggtga

SEQ ID NO: 55956 - DNA, 20 bp, synthetic construct
  misc_feature 1..20: note = chemically synthesized
  source 1..20: mol_type = other DNA
taaaactctggtgaaagaaa

SEQ ID NO: 55957 - DNA, 20 bp, synthetic construct
  misc_feature 1..20: note = chemically synthesized
  source 1..20: mol_type = other DNA
aactctggtgaaagaaatag

SEQ ID NO: 55958 - DNA, 20 bp, synthetic construct
  misc_feature 1..20: note = chemically synthesized
  source 1..20: mol_type = other DNA
ctctggtgaaagaaatagaa

SEQ ID NO: 55959 - DNA, 20 bp, synthetic construct
  misc_feature 1..20: note = chemically synthesized
  source 1..20: mol_type = other DNA
tctggtgaaagaaatagaag

SEQ ID NO: 55960 - DNA, 20 bp, synthetic construct
  misc_feature 1..20: note = chemically synthesized
  source 1..20: mol_type = other DNA
ctggtgaaagaaatagaaga

SEQ ID NO: 55961 - DNA, 20 bp, synthetic construct
  misc_feature 1..20: note = chemically synthesized
  source 1..20: mol_type = other DNA
aagagggcacacaaataaaa

SEQ ID NO: 55962 - DNA, 20 bp, synthetic construct
  misc_feature 1..20: note = chemically synthesized
  source 1..20: mol_type = other DNA
gatattccatgctcatgaac

SEQ ID NO: 55963 - DNA, 20 bp, synthetic construct
  misc_feature 1..20: note = chemically synthesized
  source 1..20: mol_type = other DNA
attccatgctcatgaactag

SEQ ID NO: 55964 - DNA, 20 bp, synthetic construct
  misc_feature 1..20: note = chemically synthesized
  source 1..20: mol_type = other DNA
taaaatgacaatactaccca

SEQ ID NO: 55965 - DNA, 20 bp, synthetic construct
  misc_feature 1..20: note = chemically synthesized
  source 1..20: mol_type = other DNA
atactacccaaagcaatgta

SEQ ID NO: 55966 - DNA, 20 bp, synthetic construct
  misc_feature 1..20: note = chemically synthesized
  source 1..20: mol_type = other DNA
cccaaagcaatgtacagatt

SEQ ID NO: 55967 - DNA, 20 bp, synthetic construct
  misc_feature 1..20: note = chemically synthesized
  source 1..20: mol_type = other DNA
aatttctgtcaaaataccaa

SEQ ID NO: 55968 - DNA, 20 bp, synthetic construct
  misc_feature 1..20: note = chemically synthesized
  source 1..20: mol_type = other DNA
caaaataccaatggcattca

SEQ ID NO: 55969 - DNA, 20 bp, synthetic construct
  misc_feature 1..20: note = chemically synthesized
  source 1..20: mol_type = other DNA
accaatggcattcacagaaa

SEQ ID NO: 55970 - DNA, 20 bp, synthetic construct
  misc_feature 1..20: note = chemically synthesized
  source 1..20: mol_type = other DNA
aaacaatcctaatatttata

SEQ ID NO: 55971 - DNA, 20 bp, synthetic construct
  misc_feature 1..20: note = chemically synthesized
  source 1..20: mol_type = other DNA
atatttatatggaaccacaa

SEQ ID NO: 55972 - DNA, 20 bp, synthetic construct
  misc_feature 1..20: note = chemically synthesized
  source 1..20: mol_type = other DNA
gaaccacaaaagatccccaa

SEQ ID NO: 55973 - DNA, 20 bp, synthetic construct
  misc_feature 1..20: note = chemically synthesized
  source 1..20: mol_type = other DNA
caaaagatccccaatagcta

SEQ ID NO: 55974 - DNA, 20 bp, synthetic construct
  misc_feature 1..20: note = chemically synthesized
  source 1..20: mol_type = other DNA
ccaatagctaaagcaatcct

SEQ ID NO: 55975 - DNA, 20 bp, synthetic construct
  misc_feature 1..20: note = chemically synthesized
  source 1..20: mol_type = other DNA
ctaaagcaatcctgagcaaa

SEQ ID NO: 55976 - DNA, 20 bp, synthetic construct
  misc_feature 1..20: note = chemically synthesized
  source 1..20: mol_type = other DNA
gagcaaaaagaacaaaacca

SEQ ID NO: 55977 - DNA, 20 bp, synthetic construct
  misc_feature 1..20: note = chemically synthesized
  source 1..20: mol_type = other DNA
tgacttcaaaatctactaca

SEQ ID NO: 55978 - DNA, 20 bp, synthetic construct
  misc_feature 1..20: note = chemically synthesized
  source 1..20: mol_type = other DNA
caaaatctactacaaagcta

SEQ ID NO: 55979 - DNA, 20 bp, synthetic construct
  misc_feature 1..20: note = chemically synthesized
  source 1..20: mol_type = other DNA
aatctactacaaagctacag

SEQ ID NO: 55980 - DNA, 20 bp, synthetic construct
  misc_feature 1..20: note = chemically synthesized
  source 1..20: mol_type = other DNA
acaaagctacagtagccaaa

SEQ ID NO: 55981 - DNA, 20 bp, synthetic construct
  misc_feature 1..20: note = chemically synthesized
  source 1..20: mol_type = other DNA
gctacagtagccaaacagca

SEQ ID NO: 55982 - DNA, 20 bp, synthetic construct
  misc_feature 1..20: note = chemically synthesized
  source 1..20: mol_type = other DNA
aaacagcacagtactgcata

SEQ ID NO: 55983 - DNA, 20 bp, synthetic construct
  misc_feature 1..20: note = chemically synthesized
  source 1..20: mol_type = other DNA
agcacagtactgcataaaga

SEQ ID NO: 55984 - DNA, 20 bp, synthetic construct
  misc_feature 1..20: note = chemically synthesized
  source 1..20: mol_type = other DNA
actgcataaagacagacata

SEQ ID NO: 55985 - DNA, 20 bp, synthetic construct
  misc_feature 1..20: note = chemically synthesized
  source 1..20: mol_type = other DNA
aagacagacatacagcccaa

SEQ ID NO: 55986 - DNA, 20 bp, synthetic construct
  misc_feature 1..20: note = chemically synthesized
  source 1..20: mol_type = other DNA
agacatacagcccaatggaa

SEQ ID NO: 55987 - DNA, 20 bp, synthetic construct
  misc_feature 1..20: note = chemically synthesized
  source 1..20: mol_type = other DNA
tacagcccaatggaacagca

SEQ ID NO: 55988 - DNA, 20 bp, synthetic construct
  misc_feature 1..20: note = chemically synthesized
  source 1..20: mol_type = other DNA
cagcccaatggaacagcata

SEQ ID NO: 55989 - DNA, 20 bp, synthetic construct
  misc_feature 1..20: note = chemically synthesized
  source 1..20: mol_type = other DNA
atggaacagcatagagaacc

SEQ ID NO: 55990 - DNA, 20 bp, synthetic construct
  misc_feature 1..20: note = chemically synthesized
  source 1..20: mol_type = other DNA
agagaacccagatgcaaatc

SEQ ID NO: 55991 - DNA, 20 bp, synthetic construct
  misc_feature 1..20: note = chemically synthesized
  source 1..20: mol_type = other DNA
gagaacccagatgcaaatcc

SEQ ID NO: 55992 - DNA, 20 bp, synthetic construct
  misc_feature 1..20: note = chemically synthesized
  source 1..20: mol_type = other DNA
aatccaggcacttaacaacc

SEQ ID NO: 55993 - DNA, 20 bp, synthetic construct
  misc_feature 1..20: note = chemically synthesized
  source 1..20: mol_type = other DNA
caaccaagtcatctttaaca

SEQ ID NO: 55994 - DNA, 20 bp, synthetic construct
  misc_feature 1..20: note = chemically synthesized
  source 1..20: mol_type = other DNA
aaccaagtcatctttaacaa

SEQ ID NO: 55995 - DNA, 20 bp, synthetic construct
  misc_feature 1..20: note = chemically synthesized
  source 1..20: mol_type = other DNA
tcatctttaacaaaggcatc

SEQ ID NO: 55996 - DNA, 20 bp, synthetic construct
  misc_feature 1..20: note = chemically synthesized
  source 1..20: mol_type = other DNA
aggcatcaagaacataaaaa

SEQ ID NO: 55997 - DNA, 20 bp, synthetic construct
  misc_feature 1..20: note = chemically synthesized
  source 1..20: mol_type = other DNA
ggcatcaagaacataaaaat

SEQ ID NO: 55998 - DNA, 20 bp, synthetic construct
  misc_feature 1..20: note = chemically synthesized
  source 1..20: mol_type = other DNA
aacataaaaataggaacaaa

SEQ ID NO: 55999 - DNA, 20 bp, synthetic construct
  misc_feature 1..20: note = chemically synthesized
  source 1..20: mol_type = other DNA
acataaaaataggaacaaat

SEQ ID NO: 56000 - DNA, 20 bp, synthetic construct
  misc_feature 1..20: note = chemically synthesized
  source 1..20: mol_type = other DNA
aaaaataggaacaaatgggc

SEQ ID NO: 56001 - DNA, 20 bp, synthetic construct
  misc_feature 1..20: note = chemically synthesized
  source 1..20: mol_type = other DNA
aaaataggaacaaatgggcc

SEQ ID NO: 56002 - DNA, 20 bp, synthetic construct
  misc_feature 1..20: note = chemically synthesized
  source 1..20: mol_type = other DNA
aggaacaaatgggccaggtg

SEQ ID NO: 56003 - DNA, 20 bp, synthetic construct
  misc_feature 1..20: note = chemically synthesized
  source 1..20: mol_type = other DNA
aacaaatgggccaggtgcag

SEQ ID NO: 56004 - DNA, 20 bp, synthetic construct
  misc_feature 1..20: note = chemically synthesized
  source 1..20: mol_type = other DNA
gtggctcacacctgtaatcc

SEQ ID NO: 56005 - DNA, 20 bp, synthetic construct
  misc_feature 1..20: note = chemically synthesized
  source 1..20: mol_type = other DNA
ctgtaatcccagcactttgt

SEQ ID NO: 56006 - DNA, 20 bp, synthetic construct
  misc_feature 1..20: note = chemically synthesized
  source 1..20: mol_type = other DNA
tgtaatcccagcactttgtg

SEQ ID NO: 56007 - DNA, 20 bp, synthetic construct
  misc_feature 1..20: note = chemically synthesized
  source 1..20: mol_type = other DNA
tcccagcactttgtgaggct

SEQ ID NO: 56008 - DNA, 20 bp, synthetic construct
  misc_feature 1..20: note = chemically synthesized
  source 1..20: mol_type = other DNA
cccagcactttgtgaggctg

SEQ ID NO: 56009 - DNA, 20 bp, synthetic construct
  misc_feature 1..20: note = chemically synthesized
  source 1..20: mol_type = other DNA
agcactttgtgaggctgagg

SEQ ID NO: 56010 - DNA, 20 bp, synthetic construct
  misc_feature 1..20: note = chemically synthesized
  source 1..20: mol_type = other DNA
gcactttgtgaggctgaggt

SEQ ID NO: 56011 - DNA, 20 bp, synthetic construct
  misc_feature 1..20: note = chemically synthesized
  source 1..20: mol_type = other DNA
cactttgtgaggctgaggtg

SEQ ID NO: 56012 - DNA, 20 bp, synthetic construct
  misc_feature 1..20: note = chemically synthesized
  source 1..20: mol_type = other DNA
actttgtgaggctgaggtgg

SEQ ID NO: 56013 - DNA, 20 bp, synthetic construct
  misc_feature 1..20: note = chemically synthesized
  source 1..20: mol_type = other DNA
ctttgtgaggctgaggtggg

SEQ ID NO: 56014 - DNA, 20 bp, synthetic construct
  misc_feature 1..20: note = chemically synthesized
  source 1..20: mol_type = other DNA
ggctgaggtggggggatcac

SEQ ID NO: 56015 - DNA, 20 bp, synthetic construct
  misc_feature 1..20: note = chemically synthesized
  source 1..20: mol_type = other DNA
gctgaggtggggggatcacg

SEQ ID NO: 56016 - DNA, 20 bp, synthetic construct
  misc_feature 1..20: note = chemically synthesized
  source 1..20: mol_type = other DNA
aggtggggggatcacgaggt

SEQ ID NO: 56017 - DNA, 20 bp, synthetic construct
  misc_feature 1..20: note = chemically synthesized
  source 1..20: mol_type = other DNA
ggtggggggatcacgaggtc

SEQ ID NO: 56018 - DNA, 20 bp, synthetic construct
  misc_feature 1..20: note = chemically synthesized
  source 1..20: mol_type = other DNA
tggggggatcacgaggtcag

SEQ ID NO: 56019 - DNA, 20 bp, synthetic construct
  misc_feature 1..20: note = chemically synthesized
  source 1..20: mol_type = other DNA
gatcacgaggtcaggagttc

SEQ ID NO: 56020 - DNA, 20 bp, synthetic construct
  misc_feature 1..20: note = chemically synthesized
  source 1..20: mol_type = other DNA
cgaggtcaggagttcaagac

SEQ ID NO: 56021 - DNA, 20 bp, synthetic construct
  misc_feature 1..20: note = chemically synthesized
  source 1..20: mol_type = other DNA
caagaccagcctgaccaacg

SEQ ID NO: 56022 - DNA, 20 bp, synthetic construct
  misc_feature 1..20: note = chemically synthesized
  source 1..20: mol_type = other DNA
tctactaaaaatacaaaaat

SEQ ID NO: 56023 - DNA, 20 bp, synthetic construct
  misc_feature 1..20: note = chemically synthesized
  source 1..20: mol_type = other DNA
ctaaaaatacaaaaattagc

SEQ ID NO: 56024 - DNA, 20 bp, synthetic construct
  misc_feature 1..20: note = chemically synthesized
  source 1..20: mol_type = other DNA
taaaaatacaaaaattagcc

SEQ ID NO: 56025 - DNA, 20 bp, synthetic construct
  misc_feature 1..20: note = chemically synthesized
  source 1..20: mol_type = other DNA
atacaaaaattagccaggca

SEQ ID NO: 56026 - DNA, 20 bp, synthetic construct
  misc_feature 1..20: note = chemically synthesized
  source 1..20: mol_type = other DNA
caaaaattagccaggcatgg

SEQ ID NO: 56027 - DNA, 20 bp, synthetic construct
  misc_feature 1..20: note = chemically synthesized
  source 1..20: mol_type = other DNA
aaaaattagccaggcatggt

SEQ ID NO: 56028 - DNA, 20 bp, synthetic construct
  misc_feature 1..20: note = chemically synthesized
  source 1..20: mol_type = other DNA
aaaattagccaggcatggtg

SEQ ID NO: 56029 - DNA, 20 bp, synthetic construct
  misc_feature 1..20: note = chemically synthesized
  source 1..20: mol_type = other DNA
gtggggcgctcctgtaatcc

SEQ ID NO: 56030 - DNA, 20 bp, synthetic construct
  misc_feature 1..20: note = chemically synthesized
  source 1..20: mol_type = other DNA
ctcctgtaatcccagatact

SEQ ID NO: 56031 - DNA, 20 bp, synthetic construct
  misc_feature 1..20: note = chemically synthesized
  source 1..20: mol_type = other DNA
tcctgtaatcccagatactc

SEQ ID NO: 56032 - DNA, 20 bp, synthetic construct
  misc_feature 1..20: note = chemically synthesized
  source 1..20: mol_type = other DNA
ctgtaatcccagatactcag

SEQ ID NO: 56033 - DNA, 20 bp, synthetic construct
  misc_feature 1..20: note = chemically synthesized
  source 1..20: mol_type = other DNA
tgtaatcccagatactcagg

SEQ ID NO: 56034 - DNA, 20 bp, synthetic construct
  misc_feature 1..20: note = chemically synthesized
  source 1..20: mol_type = other DNA
tcccagatactcaggaggct

SEQ ID NO: 56035 - DNA, 20 bp, synthetic construct
  misc_feature 1..20: note = chemically synthesized
  source 1..20: mol_type = other DNA
cccagatactcaggaggctg

SEQ ID NO: 56036 - DNA, 20 bp, synthetic construct
  misc_feature 1..20: note = chemically synthesized
  source 1..20: mol_type = other DNA
agatactcaggaggctgagg

SEQ ID NO: 56037 - DNA, 20 bp, synthetic construct
  misc_feature 1..20: note = chemically synthesized
  source 1..20: mol_type = other DNA
gatactcaggaggctgaggc

SEQ ID NO: 56038 - DNA, 20 bp, synthetic construct
  misc_feature 1..20: note = chemically synthesized
  source 1..20: mol_type = other DNA
tactcaggaggctgaggcag

SEQ ID NO: 56039 - DNA, 20 bp, synthetic construct
  misc_feature 1..20: note = chemically synthesized
  source 1..20: mol_type = other DNA
gcaggagaatcgcttgaacc

SEQ ID NO: 56040 - DNA, 20 bp, synthetic construct
  misc_feature 1..20: note = chemically synthesized
  source 1..20: mol_type = other DNA
caggagaatcgcttgaacct

SEQ ID NO: 56041 - DNA, 20 bp, synthetic construct
  misc_feature 1..20: note = chemically synthesized
  source 1..20: mol_type = other DNA
ggagaatcgcttgaacctgg

SEQ ID NO: 56042 - DNA, 20 bp, synthetic construct
  misc_feature 1..20: note = chemically synthesized
  source 1..20: mol_type = other DNA
gagaatcgcttgaacctggg

SEQ ID NO: 56043 - DNA, 20 bp, synthetic construct
  misc_feature 1..20: note = chemically synthesized
  source 1..20: mol_type = other DNA
aatcgcttgaacctgggagg

SEQ ID NO: 56044 - DNA, 20 bp, synthetic construct
  misc_feature 1..20: note = chemically synthesized
  source 1..20: mol_type = other DNA
cgcttgaacctgggaggcag

SEQ ID NO: 56045 - DNA, 20 bp, synthetic construct
  misc_feature 1..20: note = chemically synthesized
  source 1..20: mol_type = other DNA
aacctgggaggcagaagttg

SEQ ID NO: 56046 - DNA, 20 bp, synthetic construct
  misc_feature 1..20: note = chemically synthesized
  source 1..20: mol_type = other DNA
ggcagaagttgcagtgatcc

SEQ ID NO: 56047 - DNA, 20 bp, synthetic construct
  misc_feature 1..20: note = chemically synthesized
  source 1..20: mol_type = other DNA
attgtgctgccactgcactc

SEQ ID NO: 56048 - DNA, 20 bp, synthetic construct
  misc_feature 1..20: note = chemically synthesized
  source 1..20: mol_type = other DNA
gctgccactgcactccagcc

SEQ ID NO: 56049 - DNA, 20 bp, synthetic construct
  misc_feature 1..20: note = chemically synthesized
  source 1..20: mol_type = other DNA
ctgccactgcactccagcct

SEQ ID NO: 56050 - DNA, 20 bp, synthetic construct
  misc_feature 1..20: note = chemically synthesized
  source 1..20: mol_type = other DNA
ctgcactccagcctgggcaa

SEQ ID NO: 56051 - DNA, 20 bp, synthetic construct
  misc_feature 1..20: note = chemically synthesized
  source 1..20: mol_type = other DNA
actccagcctgggcaacagt

SEQ ID NO: 56052 - DNA, 20 bp, synthetic construct
  misc_feature 1..20: note = chemically synthesized
  source 1..20: mol_type = other DNA
tctcaaaaaaaaaaaaaaaa

SEQ ID NO: 56053 - DNA, 20 bp, synthetic construct
  misc_feature 1..20: note = chemically synthesized
  source 1..20: mol_type = other DNA
ctcaaaaaaaaaaaaaaaaa

SEQ ID NO: 56054 - DNA, 20 bp, synthetic construct
  misc_feature 1..20: note = chemically synthesized
  source 1..20: mol_type = other DNA
aaaaaaaaaaaaggtacaaa

SEQ ID NO: 56055 - DNA, 20 bp, synthetic construct
  misc_feature 1..20: note = chemically synthesized
  source 1..20: mol_type = other DNA
aaggtacaaacagtcttttc

SEQ ID NO: 56056 - DNA, 20 bp, synthetic construct
  misc_feature 1..20: note = chemically synthesized
  source 1..20: mol_type = other DNA
caaacagtcttttcaagaaa

SEQ ID NO: 56057 - DNA, 20 bp, synthetic construct
  misc_feature 1..20: note = chemically synthesized
  source 1..20: mol_type = other DNA
gtcttttcaagaaacagtgc

SEQ ID NO: 56058 - DNA, 20 bp, synthetic construct
  misc_feature 1..20: note = chemically synthesized
  source 1..20: mol_type = other DNA
tcttttcaagaaacagtgct

SEQ ID NO: 56059 - DNA, 20 bp, synthetic construct
  misc_feature 1..20: note = chemically synthesized
  source 1..20: mol_type = other DNA
agaaacagtgctaggaaaac

SEQ ID NO: 56060 - DNA, 20 bp, synthetic construct
  misc_feature 1..20: note = chemically synthesized
  source 1..20: mol_type = other DNA
aactggatatccatttgcaa

SEQ ID NO: 56061 - DNA, 20 bp, synthetic construct
  misc_feature 1..20: note = chemically synthesized
  source 1..20: mol_type = other DNA
ctggatatccatttgcaaaa

SEQ ID NO: 56062 - DNA, 20 bp, synthetic construct
  misc_feature 1..20: note = chemically synthesized
  source 1..20: mol_type = other DNA
catttgcaaaagagtaaaat

SEQ ID NO: 56063 - DNA, 20 bp, synthetic construct
  misc_feature 1..20: note = chemically synthesized
  source 1..20: mol_type = other DNA
ctatatacaaaaatcaaatc

SEQ ID NO: 56064 - DNA, 20 bp, synthetic construct
  misc_feature 1..20: note = chemically synthesized
  source 1..20: mol_type = other DNA
atacaaaaatcaaatcaaga

SEQ ID NO: 56065 - DNA, 20 bp, synthetic construct
  misc_feature 1..20: note = chemically synthesized
  source 1..20: mol_type = other DNA
aatcaaatcaagatggatta

SEQ ID NO: 56066 - DNA, 20 bp, synthetic construct
  misc_feature 1..20: note = chemically synthesized
  source 1..20: mol_type = other DNA
acctgaaattatgaaactac

SEQ ID NO: 56067 - DNA, 20 bp, synthetic construct
  misc_feature 1..20: note = chemically synthesized
  source 1..20: mol_type = other DNA
tgaaattatgaaactactgg

SEQ ID NO: 56068 - DNA, 20 bp, synthetic construct
  misc_feature 1..20: note = chemically synthesized
  source 1..20: mol_type = other DNA
atgaaactactggaagaaaa

SEQ ID NO: 56069 - DNA, 20 bp, synthetic construct
  misc_feature 1..20: note = chemically synthesized
  source 1..20: mol_type = other DNA
aaactactggaagaaaacag

SEQ ID NO: 56070 - DNA, 20 bp, synthetic construct
  misc_feature 1..20: note = chemically synthesized
  source 1..20: mol_type = other DNA
aactactggaagaaaacagt

SEQ ID NO: 56071 - DNA, 20 bp, synthetic construct
  misc_feature 1..20: note = chemically synthesized
  source 1..20: mol_type = other DNA
actactggaagaaaacagtg

SEQ ID NO: 56072 - DNA, 20 bp, synthetic construct
  misc_feature 1..20: note = chemically synthesized
  source 1..20: mol_type = other DNA
aaaacagtggggaaaccctc

SEQ ID NO: 56073 - DNA, 20 bp, synthetic construct
  misc_feature 1..20: note = chemically synthesized
  source 1..20: mol_type = other DNA
aaacagtggggaaaccctcc

SEQ ID NO: 56074 - DNA, 20 bp, synthetic construct
  misc_feature 1..20: note = chemically synthesized
  source 1..20: mol_type = other DNA
aacagtggggaaaccctcca

SEQ ID NO: 56075 - DNA, 20 bp, synthetic construct
  misc_feature 1..20: note = chemically synthesized
  source 1..20: mol_type = other DNA
ctccagggcattcattgatt

SEQ ID NO: 56076 - DNA, 20 bp, synthetic construct
  misc_feature 1..20: note = chemically synthesized
  source 1..20: mol_type = other DNA
tccagggcattcattgattt

SEQ ID NO: 56077 - DNA, 20 bp, synthetic construct
  misc_feature 1..20: note = chemically synthesized
  source 1..20: mol_type = other DNA
tttgggcaaatactgtctat

SEQ ID NO: 56078 - DNA, 20 bp, synthetic construct
  misc_feature 1..20: note = chemically synthesized
  source 1..20: mol_type = other DNA
tactgtctatgagacttcaa

SEQ ID NO: 56079 - DNA, 20 bp, synthetic construct
  misc_feature 1..20: note = chemically synthesized
  source 1..20: mol_type = other DNA
acaaataaccaaaacaaaaa

SEQ ID NO: 56080 - DNA, 20 bp, synthetic construct
  misc_feature 1..20: note = chemically synthesized
  source 1..20: mol_type = other DNA
ccaaaacaaaaatagacaat

SEQ ID NO: 56081 - DNA, 20 bp, synthetic construct
  misc_feature 1..20: note = chemically synthesized
  source 1..20: mol_type = other DNA
caaaacaaaaatagacaatt

SEQ ID NO: 56082 - DNA, 20 bp, synthetic construct
  misc_feature 1..20: note = chemically synthesized
  source 1..20: mol_type = other DNA
tagacaattgggattgtttg

SEQ ID NO: 56083 - DNA, 20 bp, synthetic construct
  misc_feature 1..20: note = chemically synthesized
  source 1..20: mol_type = other DNA
ggattgtttgaagctctgca

SEQ ID NO: 56084 - DNA, 20 bp, synthetic construct
  misc_feature 1..20: note = chemically synthesized
  source 1..20: mol_type = other DNA
gtttgaagctctgcacagca

SEQ ID NO: 56085 - DNA, 20 bp, synthetic construct
  misc_feature 1..20: note = chemically synthesized
  source 1..20: mol_type = other DNA
gcacagcaaagaaaataata

SEQ ID NO: 56086 - DNA, 20 bp, synthetic construct
  misc_feature 1..20: note = chemically synthesized
  source 1..20: mol_type = other DNA
gcaaagaaaataataaagtg

SEQ ID NO: 56087 - DNA, 20 bp, synthetic construct
  misc_feature 1..20: note = chemically synthesized
  source 1..20: mol_type = other DNA
aaagaaaataataaagtgaa

SEQ ID NO: 56088 - DNA, 20 bp, synthetic construct
  misc_feature 1..20: note = chemically synthesized
  source 1..20: mol_type = other DNA
taaagtgaagagacaaccca

SEQ ID NO: 56089 - DNA, 20 bp, synthetic construct
  misc_feature 1..20: note = chemically synthesized
  source 1..20: mol_type = other DNA
tgaagagacaacccaaagaa

SEQ ID NO: 56090 - DNA, 20 bp, synthetic construct
  misc_feature 1..20: note = chemically synthesized
  source 1..20: mol_type = other DNA
gaagagacaacccaaagaat

SEQ ID NO: 56091 - DNA, 20 bp, synthetic construct
  misc_feature 1..20: note = chemically synthesized
  source 1..20: mol_type = other DNA
agagacaacccaaagaatgg

SEQ ID NO: 56092 - DNA, 20 bp, synthetic construct
  misc_feature 1..20: note = chemically synthesized
  source 1..20: mol_type = other DNA
ttgcaaactatatattttac

SEQ ID NO: 56093 - DNA, 20 bp, synthetic construct
  misc_feature 1..20: note = chemically synthesized
  source 1..20: mol_type = other DNA
tgcaaactatatattttaca

SEQ ID NO: 56094 - DNA, 20 bp, synthetic construct
  misc_feature 1..20: note = chemically synthesized
  source 1..20: mol_type = other DNA
ttttacaaggaattgataac

SEQ ID NO: 56095 - DNA, 20 bp, synthetic construct
  misc_feature 1..20: note = chemically synthesized
  source 1..20: mol_type = other DNA
aattgataaccagaatatgc

SEQ ID NO: 56096 - DNA, 20 bp, synthetic construct
  misc_feature 1..20: note = chemically synthesized
  source 1..20: mol_type = other DNA
ccagaatatgcaagaaactc

SEQ ID NO: 56097 - DNA, 20 bp, synthetic construct
  misc_feature 1..20: note = chemically synthesized
  source 1..20: mol_type = other DNA
aagaaactcaagcaactcaa

SEQ ID NO: 56098 - DNA, 20 bp, synthetic construct
  misc_feature 1..20: note = chemically synthesized
  source 1..20: mol_type = other DNA
ataaataaataaataaataa

SEQ ID NO: 56099 - DNA, 20 bp, synthetic construct
  misc_feature 1..20: note = chemically synthesized
  source 1..20: mol_type = other DNA
aataaataaataatggccaa

SEQ ID NO: 56100 - DNA, 20 bp, synthetic construct
  misc_feature 1..20: note = chemically synthesized
  source 1..20: mol_type = other DNA
taatggccaaaagacctgaa

SEQ ID NO: 56101 - DNA, 20 bp, synthetic construct
  misc_feature 1..20: note = chemically synthesized
  source 1..20: mol_type = other DNA
cctgaatagatatttctcaa

SEQ ID NO: 56102 - DNA, 20 bp, synthetic construct
  misc_feature 1..20: note = chemically synthesized
  source 1..20: mol_type = other DNA
gaatagatatttctcaaaag

SEQ ID NO: 56103 - DNA, 20 bp, synthetic construct
  misc_feature 1..20: note = chemically synthesized
  source 1..20: mol_type = other DNA
ctcaaaagaagccatacaaa

SEQ ID NO: 56104 - DNA, 20 bp, synthetic construct
  misc_feature 1..20: note = chemically synthesized
  source 1..20: mol_type = other DNA
aagaagccatacaaatggcc

SEQ ID NO: 56105 - DNA, 20 bp, synthetic construct
  misc_feature 1..20: note = chemically synthesized
  source 1..20: mol_type = other DNA
gaagccatacaaatggccca

SEQ ID NO: 56106 - DNA, 20 bp, synthetic construct
  misc_feature 1..20: note = chemically synthesized
  source 1..20: mol_type = other DNA
aagccatacaaatggcccag

SEQ ID NO: 56107 - DNA, 20 bp, synthetic construct
  misc_feature 1..20: note = chemically synthesized
  source 1..20: mol_type = other DNA
tgttcaatatcactaatcac

SEQ ID NO: 56108 - DNA, 20 bp, synthetic construct
  misc_feature 1..20: note = chemically synthesized
  source 1..20: mol_type = other DNA
aatgtgatatcatctcacct

SEQ ID NO: 56109 - DNA, 20 bp, synthetic construct
  misc_feature 1..20: note = chemically synthesized
  source 1..20: mol_type = other DNA
tcatctcaccttagttaaaa

SEQ ID NO: 56110 - DNA, 20 bp, synthetic construct
  misc_feature 1..20: note = chemically synthesized
  source 1..20: mol_type = other DNA
aatagcttataacaaaacaa

SEQ ID NO: 56111 - DNA, 20 bp, synthetic construct
  misc_feature 1..20: note = chemically synthesized
  source 1..20: mol_type = other DNA
atagcttataacaaaacaaa

SEQ ID NO: 56112 - DNA, 20 bp, synthetic construct
  misc_feature 1..20: note = chemically synthesized
  source 1..20: mol_type = other DNA
aacaaaacaaaaggaaataa

SEQ ID NO: 56113 - DNA, 20 bp, synthetic construct
  misc_feature 1..20: note = chemically synthesized
  source 1..20: mol_type = other DNA
ggaaataacagatgcttgtg

SEQ ID NO: 56114 - DNA, 20 bp, synthetic construct
  misc_feature 1..20: note = chemically synthesized
  source 1..20: mol_type = other DNA
aacagatgcttgtgtggatg

SEQ ID NO: 56115 - DNA, 20 bp, synthetic construct
  misc_feature 1..20: note = chemically synthesized
  source 1..20: mol_type = other DNA
tgcttgtgtggatgtggaca

SEQ ID NO: 56116 - DNA, 20 bp, synthetic construct
  misc_feature 1..20: note = chemically synthesized
  source 1..20: mol_type = other DNA
gcttgtgtggatgtggacaa

SEQ ID NO: 56117 - DNA, 20 bp, synthetic construct
  misc_feature 1..20: note = chemically synthesized
  source 1..20: mol_type = other DNA
cttgtgtggatgtggacaaa

SEQ ID NO: 56118 - DNA, 20 bp, synthetic construct
  misc_feature 1..20: note = chemically synthesized
  source 1..20: mol_type = other DNA
gggaaaccctcttacactgt

SEQ ID NO: 56119 - DNA, 20 bp, synthetic construct
  misc_feature 1..20: note = chemically synthesized
  source 1..20: mol_type = other DNA
aaaccctcttacactgttgg

SEQ ID NO: 56120 - DNA, 20 bp, synthetic construct
  misc_feature 1..20: note = chemically synthesized
  source 1..20: mol_type = other DNA
aaccctcttacactgttggt

SEQ ID NO: 56121 - DNA, 20 bp, synthetic construct
  misc_feature 1..20: note = chemically synthesized
  source 1..20: mol_type = other DNA
ccctcttacactgttggtgg

SEQ ID NO: 56122 - DNA, 20 bp, synthetic construct
  misc_feature 1..20: note = chemically synthesized
  source 1..20: mol_type = other DNA
ctgttggtgggagtacaaat

SEQ ID NO: 56123 - DNA, 20 bp, synthetic construct
  misc_feature 1..20: note = chemically synthesized
  source 1..20: mol_type = other DNA
ggtgggagtacaaattggta

SEQ ID NO: 56124 - DNA, 20 bp, synthetic construct
  misc_feature 1..20: note = chemically synthesized
  source 1..20: mol_type = other DNA
aaattggtacagcaattatg

SEQ ID NO: 56125 - DNA, 20 bp, synthetic construct
  misc_feature 1..20: note = chemically synthesized
  source 1..20: mol_type = other DNA
aattggtacagcaattatga

SEQ ID NO: 56126 - DNA, 20 bp, synthetic construct
  misc_feature 1..20: note = chemically synthesized
  source 1..20: mol_type = other DNA
ggtacagcaattatgaagga

SEQ ID NO: 56127 - DNA, 20 bp, synthetic construct
  misc_feature 1..20: note = chemically synthesized
  source 1..20: mol_type = other DNA
agcaattatgaaggacagta

SEQ ID NO: 56128 - DNA, 20 bp, synthetic construct
  misc_feature 1..20: note = chemically synthesized
  source 1..20: mol_type = other DNA
caattatgaaggacagtatg

SEQ ID NO: 56129 - DNA, 20 bp, synthetic construct
  misc_feature 1..20: note = chemically synthesized
  source 1..20: mol_type = other DNA
ggagatttgtcaaaaatgta

SEQ ID NO: 56130 - DNA, 20 bp, synthetic construct
  misc_feature 1..20: note = chemically synthesized
  source 1..20: mol_type = other DNA
gatttgtcaaaaatgtaaag

SEQ ID NO: 56131 - DNA, 20 bp, synthetic construct
  misc_feature 1..20: note = chemically synthesized
  source 1..20: mol_type = other DNA
agtagaactaccatatgatc

SEQ ID NO: 56132 - DNA, 20 bp, synthetic construct
  misc_feature 1..20: note = chemically synthesized
  source 1..20: mol_type = other DNA
tgatccagcaatatcactcc

SEQ ID NO: 56133 - DNA, 20 bp, synthetic construct
  misc_feature 1..20: note = chemically synthesized
  source 1..20: mol_type = other DNA
gatccagcaatatcactcct

SEQ ID NO: 56134 - DNA, 20 bp, synthetic construct
  misc_feature 1..20: note = chemically synthesized
  source 1..20: mol_type = other DNA
tcctaggtatatacccttaa

SEQ ID NO: 56135 - DNA, 20 bp, synthetic construct
  misc_feature 1..20: note = chemically synthesized
  source 1..20: mol_type = other DNA
atacccttaaaagaataaat

SEQ ID NO: 56136 - DNA, 20 bp, synthetic construct
  misc_feature 1..20: note = chemically synthesized
  source 1..20: mol_type = other DNA
aagaataaattagtatgtcg

SEQ ID NO: 56137 - DNA, 20 bp, synthetic construct
  misc_feature 1..20: note = chemically synthesized
  source 1..20: mol_type = other DNA
ttagtatgtcgaagatatat

SEQ ID NO: 56138 - DNA, 20 bp, synthetic construct
  misc_feature 1..20: note = chemically synthesized
  source 1..20: mol_type = other DNA
cagtactcccatctttatta

SEQ ID NO: 56139 - DNA, 20 bp, synthetic construct
  misc_feature 1..20: note = chemically synthesized
  source 1..20: mol_type = other DNA
tagcactattcacaaacgcc

SEQ ID NO: 56140 - DNA, 20 bp, synthetic construct
  misc_feature 1..20: note = chemically synthesized
  source 1..20: mol_type = other DNA
tcaactgatgtattcgtcaa

SEQ ID NO: 56141 - DNA, 20 bp, synthetic construct
  misc_feature 1..20: note = chemically synthesized
  source 1..20: mol_type = other DNA
tgtattcgtcaacagataaa

SEQ ID NO: 56142 - DNA, 20 bp, synthetic construct
  misc_feature 1..20: note = chemically synthesized
  source 1..20: mol_type = other DNA
cgtcaacagataaatggata

SEQ ID NO: 56143 - DNA, 20 bp, synthetic construct
  misc_feature 1..20: note = chemically synthesized
  source 1..20: mol_type = other DNA
acacacacacacacacacaa

SEQ ID NO: 56144 - DNA, 20 bp, synthetic construct
  misc_feature 1..20: note = chemically synthesized
  source 1..20: mol_type = other DNA
aatattattcaaccataaaa

SEQ ID NO: 56145 - DNA, 20 bp, synthetic construct
  misc_feature 1..20: note = chemically synthesized
  source 1..20: mol_type = other DNA
gaatgaaatattatcaatta

SEQ ID NO: 56146 - DNA, 20 bp, synthetic construct
  misc_feature 1..20: note = chemically synthesized
  source 1..20: mol_type = other DNA
atcaattacagtaacataaa

SEQ ID NO: 56147 - DNA, 20 bp, synthetic construct
  misc_feature 1..20: note = chemically synthesized
  source 1..20: mol_type = other DNA
agtaacataaatggtactga

SEQ ID NO: 56148 - DNA, 20 bp, synthetic construct
  misc_feature 1..20: note = chemically synthesized
  source 1..20: mol_type = other DNA
gtactgaaagcaattacgtt

SEQ ID NO: 56149 - DNA, 20 bp, synthetic construct
  misc_feature 1..20: note = chemically synthesized
  source 1..20: mol_type = other DNA
gcaattacgttaagtgaaat

SEQ ID NO: 56150 - DNA, 20 bp, synthetic construct
  misc_feature 1..20: note = chemically synthesized
  source 1..20: mol_type = other DNA
tacgttaagtgaaataagcc

SEQ ID NO: 56151 - DNA, 20 bp, synthetic construct
  misc_feature 1..20: note = chemically synthesized
  source 1..20: mol_type = other DNA
taagtgaaataagccaagca

SEQ ID NO: 56152 - DNA, 20 bp, synthetic construct
  misc_feature 1..20: note = chemically synthesized
  source 1..20: mol_type = other DNA
tgaaataagccaagcacaga

SEQ ID NO: 56153 - DNA, 20 bp, synthetic construct
  misc_feature 1..20: note = chemically synthesized
  source 1..20: mol_type = other DNA
atcacatgttctaactcgtg

SEQ ID NO: 56154 - DNA, 20 bp, synthetic construct
  misc_feature 1..20: note = chemically synthesized
  source 1..20: mol_type = other DNA
acatgttctaactcgtgtgg

SEQ ID NO: 56155 - DNA, 20 bp, synthetic construct
  misc_feature 1..20: note = chemically synthesized
  source 1..20: mol_type = other DNA
tcgtgtggaagttaaaaacg

SEQ ID NO: 56156 - DNA, 20 bp, synthetic construct
  misc_feature 1..20: note = chemically synthesized
  source 1..20: mol_type = other DNA
ttaaaaacgtggatcttatg

SEQ ID NO: 56157 - DNA, 20 bp, synthetic construct
  misc_feature 1..20: note = chemically synthesized
  source 1..20: mol_type = other DNA
aaacgtggatcttatgaaga

SEQ ID NO: 56158 - DNA, 20 bp, synthetic construct
  misc_feature 1..20: note = chemically synthesized
  source 1..20: mol_type = other DNA
acgtggatcttatgaagaca

SEQ ID NO: 56159 - DNA, 20 bp, synthetic construct
  misc_feature 1..20: note = chemically synthesized
  source 1..20: mol_type = other DNA
gtggatcttatgaagacaga

SEQ ID NO: 56160 - DNA, 20 bp, synthetic construct
  misc_feature 1..20: note = chemically synthesized
  source 1..20: mol_type = other DNA
gatcttatgaagacagagag

SEQ ID NO: 56161 - DNA, 20 bp, synthetic construct
  misc_feature 1..20: note = chemically synthesized
  source 1..20: mol_type = other DNA
tatgaagacagagagtagat

SEQ ID NO: 56162 - DNA, 20 bp, synthetic construct
  misc_feature 1..20: note = chemically synthesized
  source 1..20: mol_type = other DNA
gaagacagagagtagattgg

SEQ ID NO: 56163 - DNA, 20 bp, synthetic construct
  misc_feature 1..20: note = chemically synthesized
  source 1..20: mol_type = other DNA
gagagtagattggtagttac

SEQ ID NO: 56164 - DNA, 20 bp, synthetic construct
  misc_feature 1..20: note = chemically synthesized
  source 1..20: mol_type = other DNA
agtagattggtagttaccgg

SEQ ID NO: 56165 - DNA, 20 bp, synthetic construct
  misc_feature 1..20: note = chemically synthesized
  source 1..20: mol_type = other DNA
agattggtagttaccggcgg

SEQ ID NO: 56166 - DNA, 20 bp, synthetic construct
  misc_feature 1..20: note = chemically synthesized
  source 1..20: mol_type = other DNA
gattggtagttaccggcggc

SEQ ID NO: 56167 - DNA, 20 bp, synthetic construct
  misc_feature 1..20: note = chemically synthesized
  source 1..20: mol_type = other DNA
ttggtagttaccggcggcgg

SEQ ID NO: 56168 - DNA, 20 bp, synthetic construct
  misc_feature 1..20: note = chemically synthesized
  source 1..20: mol_type = other DNA
tggtagttaccggcggcggg

SEQ ID NO: 56169 - DNA, 20 bp, synthetic construct
  misc_feature 1..20: note = chemically synthesized
  source 1..20: mol_type = other DNA
ggtagttaccggcggcggga

SEQ ID NO: 56170 - DNA, 20 bp, synthetic construct
  misc_feature 1..20: note = chemically synthesized
  source 1..20: mol_type = other DNA
agttaccggcggcgggaggg

SEQ ID NO: 56171 - DNA, 20 bp, synthetic construct
  misc_feature 1..20: note = chemically synthesized
  source 1..20: mol_type = other DNA
accggcggcgggagggaaga

SEQ ID NO: 56172 - DNA, 20 bp, synthetic construct
  misc_feature 1..20: note = chemically synthesized
  source 1..20: mol_type = other DNA
ccggcggcgggagggaagaa

SEQ ID NO: 56173 - DNA, 20 bp, synthetic construct
  misc_feature 1..20: note = chemically synthesized
  source 1..20: mol_type = other DNA
gcgggagggaagaaaggaat

SEQ ID NO: 56174 - DNA, 20 bp, synthetic construct
  misc_feature 1..20: note = chemically synthesized
  source 1..20: mol_type = other DNA
gaagaaaggaatgagaaatc

SEQ ID NO: 56175 - DNA, 20 bp, synthetic construct
  misc_feature 1..20: note = chemically synthesized
  source 1..20: mol_type = other DNA
ctgaaccgtacactcaaaaa

SEQ ID NO: 56176 - DNA, 20 bp, synthetic construct
  misc_feature 1..20: note = chemically synthesized
  source 1..20: mol_type = other DNA
ccgtacactcaaaaatggta

SEQ ID NO: 56177 - DNA, 20 bp, synthetic construct
  misc_feature 1..20: note = chemically synthesized
  source 1..20: mol_type = other DNA
acactcaaaaatggtaaaga

SEQ ID NO: 56178 - DNA, 20 bp, synthetic construct
  misc_feature 1..20: note = chemically synthesized
  source 1..20: mol_type = other DNA
cactcaaaaatggtaaagat

SEQ ID NO: 56179 - DNA, 20 bp, synthetic construct
  misc_feature 1..20: note = chemically synthesized
  source 1..20: mol_type = other DNA
caaaaatggtaaagatgggc

SEQ ID NO: 56180 - DNA, 20 bp, synthetic construct
  misc_feature 1..20: note = chemically synthesized
  source 1..20: mol_type = other DNA
aaaaatggtaaagatgggct

SEQ ID NO: 56181 - DNA, 20 bp, synthetic construct
  misc_feature 1..20: note = chemically synthesized
  source 1..20: mol_type = other DNA
tggtaaagatgggctgggtg

SEQ ID NO: 56182 - DNA, 20 bp, synthetic construct
  misc_feature 1..20: note = chemically synthesized
  source 1..20: mol_type = other DNA
taaagatgggctgggtgcgg

SEQ ID NO: 56183 - DNA, 20 bp, synthetic construct
  misc_feature 1..20: note = chemically synthesized
  source 1..20: mol_type = other DNA
gtggccaatgcctgtaatct

SEQ ID NO: 56184 - DNA, 20 bp, synthetic construct
  misc_feature 1..20: note = chemically synthesized
  source 1..20: mol_type = other DNA
tgcctgtaatctcagcactt

SEQ ID NO: 56185 - DNA, 20 bp, synthetic construct
  misc_feature 1..20: note = chemically synthesized
  source 1..20: mol_type = other DNA
gcctgtaatctcagcacttt

SEQ ID NO: 56186 - DNA, 20 bp, synthetic construct
  misc_feature 1..20: note = chemically synthesized
  source 1..20: mol_type = other DNA
ctgtaatctcagcactttgg

SEQ ID NO: 56187 - DNA, 20 bp, synthetic construct
  misc_feature 1..20: note = chemically synthesized
  source 1..20: mol_type = other DNA
tgtaatctcagcactttggg

SEQ ID NO: 56188 - DNA, 20 bp, synthetic construct
  misc_feature 1..20: note = chemically synthesized
  source 1..20: mol_type = other DNA
tctcagcactttgggaggcc

SEQ ID NO: 56189 - DNA, 20 bp, synthetic construct
  misc_feature 1..20: note = chemically synthesized
  source 1..20: mol_type = other DNA
ctcagcactttgggaggcca

SEQ ID NO: 56190 - DNA, 20 bp, synthetic construct
  misc_feature 1..20: note = chemically synthesized
  source 1..20: mol_type = other DNA
agcactttgggaggccaagg

SEQ ID NO: 56191 - DNA, 20 bp, synthetic construct
  misc_feature 1..20: note = chemically synthesized
  source 1..20: mol_type = other DNA
gcactttgggaggccaaggc

SEQ ID NO: 56192 - DNA, 20 bp, synthetic construct
  misc_feature 1..20: note = chemically synthesized
  source 1..20: mol_type = other DNA
ctttgggaggccaaggcagg

SEQ ID NO: 56193 - DNA, 20 bp, synthetic construct
  misc_feature 1..20: note = chemically synthesized
  source 1..20: mol_type = other DNA
ggccaaggcaggtggatcat

SEQ ID NO: 56194 - DNA, 20 bp, synthetic construct
  misc_feature 1..20: note = chemically synthesized
  source 1..20: mol_type = other DNA
gccaaggcaggtggatcatg

SEQ ID NO: 56195 - DNA, 20 bp, synthetic construct
  misc_feature 1..20: note = chemically synthesized
  source 1..20: mol_type = other DNA
aggcaggtggatcatgaggt

SEQ ID NO: 56196 - DNA, 20 bp, synthetic construct
  misc_feature 1..20: note = chemically synthesized
  source 1..20: mol_type = other DNA
ggcaggtggatcatgaggtc

SEQ ID NO: 56197 - DNA, 20 bp, synthetic construct
  misc_feature 1..20: note = chemically synthesized
  source 1..20: mol_type = other DNA
caggtggatcatgaggtcag

SEQ ID NO: 56198 - DNA, 20 bp, synthetic construct
  misc_feature 1..20: note = chemically synthesized
  source 1..20: mol_type = other DNA
gatcatgaggtcaggagtcc

SEQ ID NO: 56199 - DNA, 20 bp, synthetic construct
  misc_feature 1..20: note = chemically synthesized
  source 1..20: mol_type = other DNA
tgaggtcaggagtccaagac

SEQ ID NO: 56200 - DNA, 20 bp, synthetic construct
  misc_feature 1..20: note = chemically synthesized
  source 1..20: mol_type = other DNA
caagaccagcctgaccaaca

SEQ ID NO: 56201 - DNA, 20 bp, synthetic construct
  misc_feature 1..20: note = chemically synthesized
  source 1..20: mol_type = other DNA
ctactaaaaatacaaaaaat

SEQ ID NO: 56202 - DNA, 20 bp, synthetic construct
  misc_feature 1..20: note = chemically synthesized
  source 1..20: mol_type = other DNA
taaaaatacaaaaaattagc

SEQ ID NO: 56203 - DNA, 20 bp, synthetic construct
  misc_feature 1..20: note = chemically synthesized
  source 1..20: mol_type = other DNA
aaaaatacaaaaaattagcc

SEQ ID NO: 56204 - DNA, 20 bp, synthetic construct
  misc_feature 1..20: note = chemically synthesized
  source 1..20: mol_type = other DNA
tacaaaaaattagccaggcg

SEQ ID NO: 56205 - DNA, 20 bp, synthetic construct
  misc_feature 1..20: note = chemically synthesized
  source 1..20: mol_type = other DNA
aaaaaattagccaggcgtgg

SEQ ID NO: 56206 - DNA, 20 bp, synthetic construct
  misc_feature 1..20: note = chemically synthesized
  source 1..20: mol_type = other DNA
aaattagccaggcgtggtgg

SEQ ID NO: 56207 - DNA, 20 bp, synthetic construct
  misc_feature 1..20: note = chemically synthesized
  source 1..20: mol_type = other DNA
aattagccaggcgtggtggc

SEQ ID NO: 56208 - DNA, 20 bp, synthetic construct
  misc_feature 1..20: note = chemically synthesized
  source 1..20: mol_type = other DNA
cgcctgtaatcccacctact

SEQ ID NO: 56209 - DNA, 20 bp, synthetic construct
  misc_feature 1..20: note = chemically synthesized
  source 1..20: mol_type = other DNA
gcctgtaatcccacctactt

SEQ ID NO: 56210 - DNA, 20 bp, synthetic construct
  misc_feature 1..20: note = chemically synthesized
  source 1..20: mol_type = other DNA
ctgtaatcccacctacttgg

SEQ ID NO: 56211 - DNA, 20 bp, synthetic construct
  misc_feature 1..20: note = chemically synthesized
  source 1..20: mol_type = other DNA
tgtaatcccacctacttggg

SEQ ID NO: 56212 - DNA, 20 bp, synthetic construct
  misc_feature 1..20: note = chemically synthesized
  source 1..20: mol_type = other DNA
tcccacctacttgggaggct

SEQ ID NO: 56213 - DNA, 20 bp, synthetic construct
  misc_feature 1..20: note = chemically synthesized
  source 1..20: mol_type = other DNA
cccacctacttgggaggctt

SEQ ID NO: 56214 - DNA, 20 bp, synthetic construct
  misc_feature 1..20: note = chemically synthesized
  source 1..20: mol_type = other DNA
acctacttgggaggcttggg

SEQ ID NO: 56215 - DNA, 20 bp, synthetic construct
  misc_feature 1..20: note = chemically synthesized
  source 1..20: mol_type = other DNA
cctacttgggaggcttgggc

SEQ ID NO: 56216 - DNA, 20 bp, synthetic construct
  misc_feature 1..20: note = chemically synthesized
  source 1..20: mol_type = other DNA
tacttgggaggcttgggcag

SEQ ID NO: 56217 - DNA, 20 bp, synthetic construct
  misc_feature 1..20: note = chemically synthesized
  source 1..20: mol_type = other DNA
gcaggagaatcgcttgaacc

SEQ ID NO: 56218 - DNA, 20 bp, synthetic construct
  misc_feature 1..20: note = chemically synthesized
  source 1..20: mol_type = other DNA
ggagaatcgcttgaacctgg

SEQ ID NO: 56219 - DNA, 20 bp, synthetic construct
  misc_feature 1..20: note = chemically synthesized
  source 1..20: mol_type = other DNA
gagaatcgcttgaacctggt

SEQ ID NO: 56220 - DNA, 20 bp, synthetic construct
  misc_feature 1..20: note = chemically synthesized
  source 1..20: mol_type = other DNA
agaatcgcttgaacctggtg

SEQ ID NO: 56221 - DNA, 20 bp, synthetic construct
  misc_feature 1..20: note = chemically synthesized
  source 1..20: mol_type = other DNA
gaatcgcttgaacctggtgg

SEQ ID NO: 56222 - DNA, 20 bp, synthetic construct
  misc_feature 1..20: note = chemically synthesized
  source 1..20: mol_type = other DNA
tcgcttgaacctggtggggg

SEQ ID NO: 56223 - DNA, 20 bp, synthetic construct
  misc_feature 1..20: note = chemically synthesized
  source 1..20: mol_type = other DNA
gcttgaacctggtgggggcg

SEQ ID NO: 56224 - DNA, 20 bp, synthetic construct
  misc_feature 1..20: note = chemically synthesized
  source 1..20: mol_type = other DNA
cttgaacctggtgggggcgg

SEQ ID NO: 56225 - DNA, 20 bp, synthetic construct
  misc_feature 1..20: note = chemically synthesized
  source 1..20: mol_type = other DNA
cctggtgggggcggaggttg

SEQ ID NO: 56226 - DNA, 20 bp, synthetic construct
  misc_feature 1..20: note = chemically synthesized
  source 1..20: mol_type = other DNA
gtgggggcggaggttgcagt

SEQ ID NO: 56227 - DNA, 20 bp, synthetic construct
  misc_feature 1..20: note = chemically synthesized
  source 1..20: mol_type = other DNA
ggcggaggttgcagtgagcc

SEQ ID NO: 56228 - DNA, 20 bp, synthetic construct
  misc_feature 1..20: note = chemically synthesized
  source 1..20: mol_type = other DNA
aagatcctaccactgcactc

SEQ ID NO: 56229 - DNA, 20 bp, synthetic construct
  misc_feature 1..20: note = chemically synthesized
  source 1..20: mol_type = other DNA
cctaccactgcactccagcc

SEQ ID NO: 56230 - DNA, 20 bp, synthetic construct
  misc_feature 1..20: note = chemically synthesized
  source 1..20: mol_type = other DNA
ctgcactccagcctggatga

SEQ ID NO: 56231 - DNA, 20 bp, synthetic construct
  misc_feature 1..20: note = chemically synthesized
  source 1..20: mol_type = other DNA
gcactccagcctggatgacg

SEQ ID NO: 56232 - DNA, 20 bp, synthetic construct
  misc_feature 1..20: note = chemically synthesized
  source 1..20: mol_type = other DNA
tccagcctggatgacggagc

SEQ ID NO: 56233 - DNA, 20 bp, synthetic construct
  misc_feature 1..20: note = chemically synthesized
  source 1..20: mol_type = other DNA
acggagcgagactccgtctc

SEQ ID NO: 56234 - DNA, 20 bp, synthetic construct
  misc_feature 1..20: note = chemically synthesized
  source 1..20: mol_type = other DNA
cggagcgagactccgtctca

SEQ ID NO: 56235 - DNA, 20 bp, synthetic construct
  misc_feature 1..20: note = chemically synthesized
  source 1..20: mol_type = other DNA
ccgtctcaaggaaaaaaaaa

SEQ ID NO: 56236 - DNA, 20 bp, synthetic construct
  misc_feature 1..20: note = chemically synthesized
  source 1..20: mol_type = other DNA
tcaaggaaaaaaaaaaagta

SEQ ID NO: 56237 - DNA, 20 bp, synthetic construct
  misc_feature 1..20: note = chemically synthesized
  source 1..20: mol_type = other DNA
ggaaaaaaaaaaagtaaaga

SEQ ID NO: 56238 - DNA, 20 bp, synthetic construct
  misc_feature 1..20: note = chemically synthesized
  source 1..20: mol_type = other DNA
aaataaatttaaaaaatatt

SEQ ID NO: 56239 - DNA, 20 bp, synthetic construct
  misc_feature 1..20: note = chemically synthesized
  source 1..20: mol_type = other DNA
taaatttaaaaaatattcag

SEQ ID NO: 56240 - DNA, 20 bp, synthetic construct
  misc_feature 1..20: note = chemically synthesized
  source 1..20: mol_type = other DNA
aaatttaaaaaatattcagt

SEQ ID NO: 56241 - DNA, 20 bp, synthetic construct
  misc_feature 1..20: note = chemically synthesized
  source 1..20: mol_type = other DNA
ttaaaaaatattcagtaggc

SEQ ID NO: 56242 - DNA, 20 bp, synthetic construct
  misc_feature 1..20: note = chemically synthesized
  source 1..20: mol_type = other DNA
taaaaaatattcagtaggcc

SEQ ID NO: 56243 - DNA, 20 bp, synthetic construct
  misc_feature 1..20: note = chemically synthesized
  source 1..20: mol_type = other DNA
aatattcagtaggccgggtg

SEQ ID NO: 56244 - DNA, 20 bp, synthetic construct
  misc_feature 1..20: note = chemically synthesized
  source 1..20: mol_type = other DNA
attcagtaggccgggtgcag

SEQ ID NO: 56245 - DNA, 20 bp, synthetic construct
  misc_feature 1..20: note = chemically synthesized
  source 1..20: mol_type = other DNA
gtggctcacgcctgtgatcc

SEQ ID NO: 56246 - DNA, 20 bp, synthetic construct
  misc_feature 1..20: note = chemically synthesized
  source 1..20: mol_type = other DNA
cgcctgtgatcccagcactt

SEQ ID NO: 56247 - DNA, 20 bp, synthetic construct
  misc_feature 1..20: note = chemically synthesized
  source 1..20: mol_type = other DNA
gcctgtgatcccagcacttt

SEQ ID NO: 56248 - DNA, 20 bp, synthetic construct
  misc_feature 1..20: note = chemically synthesized
  source 1..20: mol_type = other DNA
ctgtgatcccagcactttgg

SEQ ID NO: 56249 - DNA, 20 bp, synthetic construct
  misc_feature 1..20: note = chemically synthesized
  source 1..20: mol_type = other DNA
tgtgatcccagcactttggg

SEQ ID NO: 56250 - DNA, 20 bp, synthetic construct
  misc_feature 1..20: note = chemically synthesized
  source 1..20: mol_type = other DNA
gatcccagcactttgggagg

SEQ ID NO: 56251 - DNA, 20 bp, synthetic construct
  misc_feature 1..20: note = chemically synthesized
  source 1..20: mol_type = other DNA
tcccagcactttgggaggcg

SEQ ID NO: 56252 - DNA, 20 bp, synthetic construct
  misc_feature 1..20: note = chemically synthesized
  source 1..20: mol_type = other DNA
cccagcactttgggaggcgg

SEQ ID NO: 56253 - DNA, 20 bp, synthetic construct
  misc_feature 1..20: note = chemically synthesized
  source 1..20: mol_type = other DNA
agcactttgggaggcggagg

SEQ ID NO: 56254 - DNA, 20 bp, synthetic construct
  misc_feature 1..20: note = chemically synthesized
  source 1..20: mol_type = other DNA
gcactttgggaggcggaggc

SEQ ID NO: 56255 - DNA, 20 bp, synthetic construct
  misc_feature 1..20: note = chemically synthesized
  source 1..20: mol_type = other DNA
ctttgggaggcggaggcggg

SEQ ID NO: 56256 - DNA, 20 bp, synthetic construct
  misc_feature 1..20: note = chemically synthesized
  source 1..20: mol_type = other DNA
ggcggaggcgggtggatcac

SEQ ID NO: 56257 - DNA, 20 bp, synthetic construct
  misc_feature 1..20: note = chemically synthesized
  source 1..20: mol_type = other DNA
gcggaggcgggtggatcacg

SEQ ID NO: 56258 - DNA, 20 bp, synthetic construct
  misc_feature 1..20: note = chemically synthesized
  source 1..20: mol_type = other DNA
cgggtggatcacgaggtcgc

SEQ ID NO: 56259 - DNA, 20 bp, synthetic construct
  misc_feature 1..20: note = chemically synthesized
  source 1..20: mol_type = other DNA
gatcacgaggtcgcgagatc

SEQ ID NO: 56260 - DNA, 20 bp, synthetic construct
  misc_feature 1..20: note = chemically synthesized
  source 1..20: mol_type = other DNA
tcgcgagatcgagaccatcc

SEQ ID NO: 56261 - DNA, 20 bp, synthetic construct
  misc_feature 1..20: note = chemically synthesized
  source 1..20: mol_type = other DNA
cgagaccatcctggctaaca

SEQ ID NO: 56262 - DNA, 20 bp, synthetic construct
  misc_feature 1..20: note = chemically synthesized
  source 1..20: mol_type = other DNA
actaaaaaaatacaaaaaat

SEQ ID NO: 56263 - DNA, 20 bp, synthetic construct
  misc_feature 1..20: note = chemically synthesized
  source 1..20: mol_type = other DNA
aaaaaatacaaaaaattagc

SEQ ID NO: 56264 - DNA, 20 bp, synthetic construct
  misc_feature 1..20: note = chemically synthesized
  source 1..20: mol_type = other DNA
aaaaatacaaaaaattagcc

SEQ ID NO: 56265 - DNA, 20 bp, synthetic construct
  misc_feature 1..20: note = chemically synthesized
  source 1..20: mol_type = other DNA
tacaaaaaattagccgggct

SEQ ID NO: 56266 - DNA, 20 bp, synthetic construct
  misc_feature 1..20: note = chemically synthesized
  source 1..20: mol_type = other DNA
aaaaaattagccgggcttgg

SEQ ID NO: 56267 - DNA, 20 bp, synthetic construct
  misc_feature 1..20: note = chemically synthesized
  source 1..20: mol_type = other DNA
aaattagccgggcttggtgg

SEQ ID NO: 56268 - DNA, 20 bp, synthetic construct
  misc_feature 1..20: note = chemically synthesized
  source 1..20: mol_type = other DNA
aattagccgggcttggtggc

SEQ ID NO: 56269 - DNA, 20 bp, synthetic construct
  misc_feature 1..20: note = chemically synthesized
  source 1..20: mol_type = other DNA
ggcttggtggcgggtgcctg

SEQ ID NO: 56270 - DNA, 20 bp, synthetic construct
  misc_feature 1..20: note = chemically synthesized
  source 1..20: mol_type = other DNA
gtggcgggtgcctgtagtcc

SEQ ID NO: 56271 - DNA, 20 bp, synthetic construct
  misc_feature 1..20: note = chemically synthesized
  source 1..20: mol_type = other DNA
gcctgtagtcccagctacta

SEQ ID NO: 56272 - DNA, 20 bp, synthetic construct
  misc_feature 1..20: note = chemically synthesized
  source 1..20: mol_type = other DNA
ctgtagtcccagctactatg

SEQ ID NO: 56273 - DNA, 20 bp, synthetic construct
  misc_feature 1..20: note = chemically synthesized
  source 1..20: mol_type = other DNA
tgtagtcccagctactatgg

SEQ ID NO: 56274 - DNA, 20 bp, synthetic construct
  misc_feature 1..20: note = chemically synthesized
  source 1..20: mol_type = other DNA
tcccagctactatggaggct

SEQ ID NO: 56275 - DNA, 20 bp, synthetic construct
  misc_feature 1..20: note = chemically synthesized
  source 1..20: mol_type = other DNA
cccagctactatggaggctg

SEQ ID NO: 56276 - DNA, 20 bp, synthetic construct
  misc_feature 1..20: note = chemically synthesized
  source 1..20: mol_type = other DNA
agctactatggaggctgagg

SEQ ID NO: 56277 - DNA, 20 bp, synthetic construct
  misc_feature 1..20: note = chemically synthesized
  source 1..20: mol_type = other DNA
gctactatggaggctgaggc

SEQ ID NO: 56278 - DNA, 20 bp, synthetic construct
  misc_feature 1..20: note = chemically synthesized
  source 1..20: mol_type = other DNA
tactatggaggctgaggcgg

SEQ ID NO: 56279 - DNA, 20 bp, synthetic construct
  misc_feature 1..20: note = chemically synthesized
  source 1..20: mol_type = other DNA
tggaggctgaggcgggagaa

SEQ ID NO: 56280 - DNA, 20 bp, synthetic construct
  misc_feature 1..20: note = chemically synthesized
  source 1..20: mol_type = other DNA
gcgggagaatggcgtgaacg

SEQ ID NO: 56281 - DNA, 20 bp, synthetic construct
  misc_feature 1..20: note = chemically synthesized
  source 1..20: mol_type = other DNA
cgggagaatggcgtgaacgc

SEQ ID NO: 56282 - DNA, 20 bp, synthetic construct
  misc_feature 1..20: note = chemically synthesized
  source 1..20: mol_type = other DNA
gggagaatggcgtgaacgcg

SEQ ID NO: 56283 - DNA, 20 bp, synthetic construct
  misc_feature 1..20: note = chemically synthesized
  source 1..20: mol_type = other DNA
ggagaatggcgtgaacgcgg

SEQ ID NO: 56284 - DNA, 20 bp, synthetic construct
  misc_feature 1..20: note = chemically synthesized
  source 1..20: mol_type = other DNA
gagaatggcgtgaacgcggg

SEQ ID NO: 56285 - DNA, 20 bp, synthetic construct
  misc_feature 1..20: note = chemically synthesized
  source 1..20: mol_type = other DNA
aatggcgtgaacgcgggggg

SEQ ID NO: 56286 - DNA, 20 bp, synthetic construct
  misc_feature 1..20: note = chemically synthesized
  source 1..20: mol_type = other DNA
tggcgtgaacgcggggggcg

SEQ ID NO: 56287 - DNA, 20 bp, synthetic construct
  misc_feature 1..20: note = chemically synthesized
  source 1..20: mol_type = other DNA
aacgcggggggcggagcttg

SEQ ID NO: 56288 - DNA, 20 bp, synthetic construct
  misc_feature 1..20: note = chemically synthesized
  source 1..20: mol_type = other DNA
cggggggcggagcttgcagt

SEQ ID NO: 56289 - DNA, 20 bp, synthetic construct
  misc_feature 1..20: note = chemically synthesized
  source 1..20: mol_type = other DNA
ggggcggagcttgcagtgag

SEQ ID NO: 56290 - DNA, 20 bp, synthetic construct
  misc_feature 1..20: note = chemically synthesized
  source 1..20: mol_type = other DNA
ggcggagcttgcagtgagca

SEQ ID NO: 56291 - DNA, 20 bp, synthetic construct
  misc_feature 1..20: note = chemically synthesized
  source 1..20: mol_type = other DNA
agcttgcagtgagcagagat

SEQ ID NO: 56292 - DNA, 20 bp, synthetic construct
  misc_feature 1..20: note = chemically synthesized
  source 1..20: mol_type = other DNA
gcttgcagtgagcagagatc

SEQ ID NO: 56293 - DNA, 20 bp, synthetic construct
  misc_feature 1..20: note = chemically synthesized
  source 1..20: mol_type = other DNA
cttgcagtgagcagagatca

SEQ ID NO: 56294 - DNA, 20 bp, synthetic construct
  misc_feature 1..20: note = chemically synthesized
  source 1..20: mol_type = other DNA
ttgcagtgagcagagatcag

SEQ ID NO: 56295 - DNA, 20 bp, synthetic construct
  misc_feature 1..20: note = chemically synthesized
  source 1..20: mol_type = other DNA
gatcaggggccactgcactc

SEQ ID NO: 56296 - DNA, 20 bp, synthetic construct
  misc_feature 1..20: note = chemically synthesized
  source 1..20: mol_type = other DNA
ggggccactgcactccagcc

SEQ ID NO: 56297 - DNA, 20 bp, synthetic construct
  misc_feature 1..20: note = chemically synthesized
  source 1..20: mol_type = other DNA
gggccactgcactccagcct

SEQ ID NO: 56298 - DNA, 20 bp, synthetic construct
  misc_feature 1..20: note = chemically synthesized
  source 1..20: mol_type = other DNA
ctgcactccagcctgggcga

SEQ ID NO: 56299 - DNA, 20 bp, synthetic construct
  misc_feature 1..20: note = chemically synthesized
  source 1..20: mol_type = other DNA
gcactccagcctgggcgaca

SEQ ID NO: 56300 - DNA, 20 bp, synthetic construct
  misc_feature 1..20: note = chemically synthesized
  source 1..20: mol_type = other DNA
actccagcctgggcgacaga

SEQ ID NO: 56301 - DNA, 20 bp, synthetic construct
  misc_feature 1..20: note = chemically synthesized
  source 1..20: mol_type = other DNA
tccagcctgggcgacagaga

SEQ ID NO: 56302 - DNA, 20 bp, synthetic construct
  misc_feature 1..20: note = chemically synthesized
  source 1..20: mol_type = other DNA
agagactctgtctcaaaaaa

SEQ ID NO: 56303 - DNA, 20 bp, synthetic construct
  misc_feature 1..20: note = chemically synthesized
  source 1..20: mol_type = other DNA
aaaaaaagaaaaaaaaaatt

SEQ ID NO: 56304 - DNA, 20 bp, synthetic construct
  misc_feature 1..20: note = chemically synthesized
  source 1..20: mol_type = other DNA
aaaagaaaaaaaaaatttag

SEQ ID NO: 56305 - DNA, 20 bp, synthetic construct
  misc_feature 1..20: note = chemically synthesized
  source 1..20: mol_type = other DNA
aaaaaaaaaatttagtagac

SEQ ID NO: 56306 - DNA, 20 bp, synthetic construct
  misc_feature 1..20: note = chemically synthesized
  source 1..20: mol_type = other DNA
gtagactagctaaaaaaatc

SEQ ID NO: 56307 - DNA, 20 bp, synthetic construct
  misc_feature 1..20: note = chemically synthesized
  source 1..20: mol_type = other DNA
agactagctaaaaaaatcca

SEQ ID NO: 56308 - DNA, 20 bp, synthetic construct
  misc_feature 1..20: note = chemically synthesized
  source 1..20: mol_type = other DNA
tagctaaaaaaatccagaga

SEQ ID NO: 56309 - DNA, 20 bp, synthetic construct
  misc_feature 1..20: note = chemically synthesized
  source 1..20: mol_type = other DNA
agttattgatgcatatgtaa

SEQ ID NO: 56310 - DNA, 20 bp, synthetic construct
  misc_feature 1..20: note = chemically synthesized
  source 1..20: mol_type = other DNA
aaaagtcttccaatatttac

SEQ ID NO: 56311 - DNA, 20 bp, synthetic construct
  misc_feature 1..20: note = chemically synthesized
  source 1..20: mol_type = other DNA
aaaaaaaataaccttgaatt

SEQ ID NO: 56312 - DNA, 20 bp, synthetic construct
  misc_feature 1..20: note = chemically synthesized
  source 1..20: mol_type = other DNA
aaataaccttgaattaagtg

SEQ ID NO: 56313 - DNA, 20 bp, synthetic construct
  misc_feature 1..20: note = chemically synthesized
  source 1..20: mol_type = other DNA
aactcattgacaatgtttca

SEQ ID NO: 56314 - DNA, 20 bp, synthetic construct
  misc_feature 1..20: note = chemically synthesized
  source 1..20: mol_type = other DNA
actcattgacaatgtttcaa

SEQ ID NO: 56315 - DNA, 20 bp, synthetic construct
  misc_feature 1..20: note = chemically synthesized
  source 1..20: mol_type = other DNA
gacaatgtttcaaaggatgt

SEQ ID NO: 56316 - DNA, 20 bp, synthetic construct
  misc_feature 1..20: note = chemically synthesized
  source 1..20: mol_type = other DNA
acaatgtttcaaaggatgtg

SEQ ID NO: 56317 - DNA, 20 bp, synthetic construct
  misc_feature 1..20: note = chemically synthesized
  source 1..20: mol_type = other DNA
caatgtttcaaaggatgtga

SEQ ID NO: 56318 - DNA, 20 bp, synthetic construct
  misc_feature 1..20: note = chemically synthesized
  source 1..20: mol_type = other DNA
gtgagggataaactaaaatt

SEQ ID NO: 56319 - DNA, 20 bp, synthetic construct
  misc_feature 1..20: note = chemically synthesized
  source 1..20: mol_type = other DNA
tgagggataaactaaaattt

SEQ ID NO: 56320 - DNA, 20 bp, synthetic construct
  misc_feature 1..20: note = chemically synthesized
  source 1..20: mol_type = other DNA
gggataaactaaaatttggg

SEQ ID NO: 56321 - DNA, 20 bp, synthetic construct
  misc_feature 1..20: note = chemically synthesized
  source 1..20: mol_type = other DNA
acatgctgttcctgtgtact

SEQ ID NO: 56322 - DNA, 20 bp, synthetic construct
  misc_feature 1..20: note = chemically synthesized
  source 1..20: mol_type = other DNA
ctgttcctgtgtacttggaa

SEQ ID NO: 56323 - DNA, 20 bp, synthetic construct
  misc_feature 1..20: note = chemically synthesized
  source 1..20: mol_type = other DNA
gttcctgtgtacttggaaca

SEQ ID NO: 56324 - DNA, 20 bp, synthetic construct
  misc_feature 1..20: note = chemically synthesized
  source 1..20: mol_type = other DNA
ttcctgtgtacttggaacag

SEQ ID NO: 56325 - DNA, 20 bp, synthetic construct
  misc_feature 1..20: note = chemically synthesized
  source 1..20: mol_type = other DNA
tcctgtgtacttggaacaga

SEQ ID NO: 56326 - DNA, 20 bp, synthetic construct
  misc_feature 1..20: note = chemically synthesized
  source 1..20: mol_type = other DNA
ctgtgtacttggaacagagg

SEQ ID NO: 56327 - DNA, 20 bp, synthetic construct
  misc_feature 1..20: note = chemically synthesized
  source 1..20: mol_type = other DNA
tggaacagagggagaaaatc

SEQ ID NO: 56328 - DNA, 20 bp, synthetic construct
  misc_feature 1..20: note = chemically synthesized
  source 1..20: mol_type = other DNA
ggaacagagggagaaaatct

SEQ ID NO: 56329 - DNA, 20 bp, synthetic construct
  misc_feature 1..20: note = chemically synthesized
  source 1..20: mol_type = other DNA
cagagggagaaaatctgggc

SEQ ID NO: 56330 - DNA, 20 bp, synthetic construct
  misc_feature 1..20: note = chemically synthesized
  source 1..20: mol_type = other DNA
ctgggctggaaatattgtta

SEQ ID NO: 56331 - DNA, 20 bp, synthetic construct
  misc_feature 1..20: note = chemically synthesized
  source 1..20: mol_type = other DNA
tgggctggaaatattgttat

SEQ ID NO: 56332 - DNA, 20 bp, synthetic construct
  misc_feature 1..20: note = chemically synthesized
  source 1..20: mol_type = other DNA
ggctggaaatattgttatag

SEQ ID NO: 56333 - DNA, 20 bp, synthetic construct
  misc_feature 1..20: note = chemically synthesized
  source 1..20: mol_type = other DNA
ggaaatattgttataggagt

SEQ ID NO: 56334 - DNA, 20 bp, synthetic construct
  misc_feature 1..20: note = chemically synthesized
  source 1..20: mol_type = other DNA
gttataggagttagcacatg

SEQ ID NO: 56335 - DNA, 20 bp, synthetic construct
  misc_feature 1..20: note = chemically synthesized
  source 1..20: mol_type = other DNA
ttataggagttagcacatga

SEQ ID NO: 56336 - DNA, 20 bp, synthetic construct
  misc_feature 1..20: note = chemically synthesized
  source 1..20: mol_type = other DNA
aaggtgacaactaaattatt

SEQ ID NO: 56337 - DNA, 20 bp, synthetic construct
  misc_feature 1..20: note = chemically synthesized
  source 1..20: mol_type = other DNA
ggtgacaactaaattatttg

SEQ ID NO: 56338 - DNA, 20 bp, synthetic construct
  misc_feature 1..20: note = chemically synthesized
  source 1..20: mol_type = other DNA
gacaactaaattatttggag

SEQ ID NO: 56339 - DNA, 20 bp, synthetic construct
  misc_feature 1..20: note = chemically synthesized
  source 1..20: mol_type = other DNA
actaaattatttggagtaga

SEQ ID NO: 56340 - DNA, 20 bp, synthetic construct
  misc_feature 1..20: note = chemically synthesized
  source 1..20: mol_type = other DNA
taaattatttggagtagatg

SEQ ID NO: 56341 - DNA, 20 bp, synthetic construct
  misc_feature 1..20: note = chemically synthesized
  source 1..20: mol_type = other DNA
tttggagtagatggagtcac

SEQ ID NO: 56342 - DNA, 20 bp, synthetic construct
  misc_feature 1..20: note = chemically synthesized
  source 1..20: mol_type = other DNA
gagtcaccagcacatgtgaa

SEQ ID NO: 56343 - DNA, 20 bp, synthetic construct
  misc_feature 1..20: note = chemically synthesized
  source 1..20: mol_type = other DNA
ccagcacatgtgaatagttt

SEQ ID NO: 56344 - DNA, 20 bp, synthetic construct
  misc_feature 1..20: note = chemically synthesized
  source 1..20: mol_type = other DNA
gttttagaatgaaatgaccc

SEQ ID NO: 56345 - DNA, 20 bp, synthetic construct
  misc_feature 1..20: note = chemically synthesized
  source 1..20: mol_type = other DNA
tagaatgaaatgacccaaga

SEQ ID NO: 56346 - DNA, 20 bp, synthetic construct
  misc_feature 1..20: note = chemically synthesized
  source 1..20: mol_type = other DNA
aatgacccaagatagaactt

SEQ ID NO: 56347 - DNA, 20 bp, synthetic construct
  misc_feature 1..20: note = chemically synthesized
  source 1..20: mol_type = other DNA
tgacccaagatagaactttg

SEQ ID NO: 56348 - DNA, 20 bp, synthetic construct
  misc_feature 1..20: note = chemically synthesized
  source 1..20: mol_type = other DNA
acccaagatagaactttgga

SEQ ID NO: 56349 - DNA, 20 bp, synthetic construct
  misc_feature 1..20: note = chemically synthesized
  source 1..20: mol_type = other DNA
cccccaaatttaaataaaat

SEQ ID NO: 56350 - DNA, 20 bp, synthetic construct
  misc_feature 1..20: note = chemically synthesized
  source 1..20: mol_type = other DNA
aatttaaataaaatcagtat

SEQ ID NO: 56351 - DNA, 20 bp, synthetic construct
  misc_feature 1..20: note = chemically synthesized
  source 1..20: mol_type = other DNA
tttaaataaaatcagtataa

SEQ ID NO: 56352 - DNA, 20 bp, synthetic construct
  misc_feature 1..20: note = chemically synthesized
  source 1..20: mol_type = other DNA
aaataaaatcagtataagag

SEQ ID NO: 56353 - DNA, 20 bp, synthetic construct
  misc_feature 1..20: note = chemically synthesized
  source 1..20: mol_type = other DNA
ataaaatcagtataagagaa

SEQ ID NO: 56354 - DNA, 20 bp, synthetic construct
  misc_feature 1..20: note = chemically synthesized
  source 1..20: mol_type = other DNA
taaaatcagtataagagaag

SEQ ID NO: 56355 - DNA, 20 bp, synthetic construct
  misc_feature 1..20: note = chemically synthesized
  source 1..20: mol_type = other DNA
aatcagtataagagaagagg

SEQ ID NO: 56356 - DNA, 20 bp, synthetic construct
  misc_feature 1..20: note = chemically synthesized
  source 1..20: mol_type = other DNA
gagaagaggaagaaaccaaa

SEQ ID NO: 56357 - DNA, 20 bp, synthetic construct
  misc_feature 1..20: note = chemically synthesized
  source 1..20: mol_type = other DNA
gaagaaaccaaatggtatac

SEQ ID NO: 56358 - DNA, 20 bp, synthetic construct
  misc_feature 1..20: note = chemically synthesized
  source 1..20: mol_type = other DNA
tactagtctaaattgtttct

SEQ ID NO: 56359 - DNA, 20 bp, synthetic construct
  misc_feature 1..20: note = chemically synthesized
  source 1..20: mol_type = other DNA
aaattgtttcttagtgacaa

SEQ ID NO: 56360 - DNA, 20 bp, synthetic construct
  misc_feature 1..20: note = chemically synthesized
  source 1..20: mol_type = other DNA
caaaagaataacctgaatat

SEQ ID NO: 56361 - DNA, 20 bp, synthetic construct
  misc_feature 1..20: note = chemically synthesized
  source 1..20: mol_type = other DNA
gaataacctgaatattagat

SEQ ID NO: 56362 - DNA, 20 bp, synthetic construct
  misc_feature 1..20: note = chemically synthesized
  source 1..20: mol_type = other DNA
caatttcattcaacatgcaa

SEQ ID NO: 56363 - DNA, 20 bp, synthetic construct
  misc_feature 1..20: note = chemically synthesized
  source 1..20: mol_type = other DNA
tattgttttatgctccttca

SEQ ID NO: 56364 - DNA, 20 bp, synthetic construct
  misc_feature 1..20: note = chemically synthesized
  source 1..20: mol_type = other DNA
ttgttttatgctccttcaca

SEQ ID NO: 56365 - DNA, 20 bp, synthetic construct
  misc_feature 1..20: note = chemically synthesized
  source 1..20: mol_type = other DNA
tgttttatgctccttcacag

SEQ ID NO: 56366 - DNA, 20 bp, synthetic construct
  misc_feature 1..20: note = chemically synthesized
  source 1..20: mol_type = other DNA
ctccttcacagaggaaattc

SEQ ID NO: 56367 - DNA, 20 bp, synthetic construct
  misc_feature 1..20: note = chemically synthesized
  source 1..20: mol_type = other DNA
ttcacagaggaaattctgga

SEQ ID NO: 56368 - DNA, 20 bp, synthetic construct
  misc_feature 1..20: note = chemically synthesized
  source 1..20: mol_type = other DNA
cacagaggaaattctggaaa

SEQ ID NO: 56369 - DNA, 20 bp, synthetic construct
  misc_feature 1..20: note = chemically synthesized
  source 1..20: mol_type = other DNA
gaaattctggaaagagcaca

SEQ ID NO: 56370 - DNA, 20 bp, synthetic construct
  misc_feature 1..20: note = chemically synthesized
  source 1..20: mol_type = other DNA
aaattctggaaagagcacat

SEQ ID NO: 56371 - DNA, 20 bp, synthetic construct
  misc_feature 1..20: note = chemically synthesized
  source 1..20: mol_type = other DNA
aattctggaaagagcacatg

SEQ ID NO: 56372 - DNA, 20 bp, synthetic construct
  misc_feature 1..20: note = chemically synthesized
  source 1..20: mol_type = other DNA
atctgtattccttgttctcc

SEQ ID NO: 56373 - DNA, 20 bp, synthetic construct
  misc_feature 1..20: note = chemically synthesized
  source 1..20: mol_type = other DNA
ttataaatattctccaccat

SEQ ID NO: 56374 - DNA, 20 bp, synthetic construct
  misc_feature 1..20: note = chemically synthesized
  source 1..20: mol_type = other DNA
caatgtctaaacattatatc

SEQ ID NO: 56375 - DNA, 20 bp, synthetic construct
  misc_feature 1..20: note = chemically synthesized
  source 1..20: mol_type = other DNA
acattatatcaagtgtctct

SEQ ID NO: 56376 - DNA, 20 bp, synthetic construct
  misc_feature 1..20: note = chemically synthesized
  source 1..20: mol_type = other DNA
agtgtctcttagctacattc

SEQ ID NO: 56377 - DNA, 20 bp, synthetic construct
  misc_feature 1..20: note = chemically synthesized
  source 1..20: mol_type = other DNA
tctcttagctacattcaaga

SEQ ID NO: 56378 - DNA, 20 bp, synthetic construct
  misc_feature 1..20: note = chemically synthesized
  source 1..20: mol_type = other DNA
tagctacattcaagaaagcc

SEQ ID NO: 56379 - DNA, 20 bp, synthetic construct
  misc_feature 1..20: note = chemically synthesized
  source 1..20: mol_type = other DNA
attcaagaaagcctagaaac

SEQ ID NO: 56380 - DNA, 20 bp, synthetic construct
  misc_feature 1..20: note = chemically synthesized
  source 1..20: mol_type = other DNA
gaaaccagctgtaaaatgtc

SEQ ID NO: 56381 - DNA, 20 bp, synthetic construct
  misc_feature 1..20: note = chemically synthesized
  source 1..20: mol_type = other DNA
aaaccagctgtaaaatgtca

SEQ ID NO: 56382 - DNA, 20 bp, synthetic construct
  misc_feature 1..20: note = chemically synthesized
  source 1..20: mol_type = other DNA
accagctgtaaaatgtcaag

SEQ ID NO: 56383 - DNA, 20 bp, synthetic construct
  misc_feature 1..20: note = chemically synthesized
  source 1..20: mol_type = other DNA
ctgtaaaatgtcaaggagaa

SEQ ID NO: 56384 - DNA, 20 bp, synthetic construct
  misc_feature 1..20: note = chemically synthesized
  source 1..20: mol_type = other DNA
gagaatagtgtcatatgcat

SEQ ID NO: 56385 - DNA, 20 bp, synthetic construct
  misc_feature 1..20: note = chemically synthesized
  source 1..20: mol_type = other DNA
tcatatgcataagtcttgct

SEQ ID NO: 56386 - DNA, 20 bp, synthetic construct
  misc_feature 1..20: note = chemically synthesized
  source 1..20: mol_type = other DNA
aagtcttgcttagaatttat

SEQ ID NO: 56387 - DNA, 20 bp, synthetic construct
  misc_feature 1..20: note = chemically synthesized
  source 1..20: mol_type = other DNA
cccattttactaataattta

SEQ ID NO: 56388 - DNA, 20 bp, synthetic construct
  misc_feature 1..20: note = chemically synthesized
  source 1..20: mol_type = other DNA
ccattttactaataatttaa

SEQ ID NO: 56389 - DNA, 20 bp, synthetic construct
  misc_feature 1..20: note = chemically synthesized
  source 1..20: mol_type = other DNA
tttactaataatttaaaggt

SEQ ID NO: 56390 - DNA, 20 bp, synthetic construct
  misc_feature 1..20: note = chemically synthesized
  source 1..20: mol_type = other DNA
ataatttttttcatttcatt

SEQ ID NO: 56391 - DNA, 20 bp, synthetic construct
  misc_feature 1..20: note = chemically synthesized
  source 1..20: mol_type = other DNA
tataacatctcactcataaa

SEQ ID NO: 56392 - DNA, 20 bp, synthetic construct
  misc_feature 1..20: note = chemically synthesized
  source 1..20: mol_type = other DNA
aacatctcactcataaatag

SEQ ID NO: 56393 - DNA, 20 bp, synthetic construct
  misc_feature 1..20: note = chemically synthesized
  source 1..20: mol_type = other DNA
acatctcactcataaatagt

SEQ ID NO: 56394 - DNA, 20 bp, synthetic construct
  misc_feature 1..20: note = chemically synthesized
  source 1..20: mol_type = other DNA
atataatgactgttttttga

SEQ ID NO: 56395 - DNA, 20 bp, synthetic construct
  misc_feature 1..20: note = chemically synthesized
  source 1..20: mol_type = other DNA
tgactgttttttgaaagaaa

SEQ ID NO: 56396 - DNA, 20 bp, synthetic construct
  misc_feature 1..20: note = chemically synthesized
  source 1..20: mol_type = other DNA
ctgttttttgaaagaaaaag

SEQ ID NO: 56397 - DNA, 20 bp, synthetic construct
  misc_feature 1..20: note = chemically synthesized
  source 1..20: mol_type = other DNA
tgttttttgaaagaaaaaga

SEQ ID NO: 56398 - DNA, 20 bp, synthetic construct
  misc_feature 1..20: note = chemically synthesized
  source 1..20: mol_type = other DNA
tttttgaaagaaaaagaagg

SEQ ID NO: 56399 - DNA, 20 bp, synthetic construct
  misc_feature 1..20: note = chemically synthesized
  source 1..20: mol_type = other DNA
ttttgaaagaaaaagaagga

SEQ ID NO: 56400 - DNA, 20 bp, synthetic construct
  misc_feature 1..20: note = chemically synthesized
  source 1..20: mol_type = other DNA
gaaagaaaaagaaggaagga

SEQ ID NO: 56401 - DNA, 20 bp, synthetic construct
  misc_feature 1..20: note = chemically synthesized
  source 1..20: mol_type = other DNA
aaagaaggaaggaaagtaac

SEQ ID NO: 56402 - DNA, 20 bp, synthetic construct
  misc_feature 1..20: note = chemically synthesized
  source 1..20: mol_type = other DNA
aagaaggaaggaaagtaaca

SEQ ID NO: 56403 - DNA, 20 bp, synthetic construct
  misc_feature 1..20: note = chemically synthesized
  source 1..20: mol_type = other DNA
aaggaaggaaagtaacaagg

SEQ ID NO: 56404 - DNA, 20 bp, synthetic construct
  misc_feature 1..20: note = chemically synthesized
  source 1..20: mol_type = other DNA
aaggaaagtaacaaggaaga

SEQ ID NO: 56405 - DNA, 20 bp, synthetic construct
  misc_feature 1..20: note = chemically synthesized
  source 1..20: mol_type = other DNA
ggaaagtaacaaggaagaaa

SEQ ID NO: 56406 - DNA, 20 bp, synthetic construct
  misc_feature 1..20: note = chemically synthesized
  source 1..20: mol_type = other DNA
aaagtaacaaggaagaaaga

SEQ ID NO: 56407 - DNA, 20 bp, synthetic construct
  misc_feature 1..20: note = chemically synthesized
  source 1..20: mol_type = other DNA
aacaaggaagaaagagagaa

SEQ ID NO: 56408 - DNA, 20 bp, synthetic construct
  misc_feature 1..20: note = chemically synthesized
  source 1..20: mol_type = other DNA
caaggaagaaagagagaaaa

SEQ ID NO: 56409 - DNA, 20 bp, synthetic construct
  misc_feature 1..20: note = chemically synthesized
  source 1..20: mol_type = other DNA
aaggaagaaagagagaaaag

SEQ ID NO: 56410 - DNA, 20 bp, synthetic construct
  misc_feature 1..20: note = chemically synthesized
  source 1..20: mol_type = other DNA
gaaagagagaaaagaggaaa

SEQ ID NO: 56411 - DNA, 20 bp, synthetic construct
  misc_feature 1..20: note = chemically synthesized
  source 1..20: mol_type = other DNA
agaaaagaggaaatggatac

SEQ ID NO: 56412 - DNA, 20 bp, synthetic construct
  misc_feature 1..20: note = chemically synthesized
  source 1..20: mol_type = other DNA
aatgttcaacaacttgcttc

SEQ ID NO: 56413 - DNA, 20 bp, synthetic construct
  misc_feature 1..20: note = chemically synthesized
  source 1..20: mol_type = other DNA
tgcttccagctttacatttg

SEQ ID NO: 56414 - DNA, 20 bp, synthetic construct
  misc_feature 1..20: note = chemically synthesized
  source 1..20: mol_type = other DNA
gcttccagctttacatttgt

SEQ ID NO: 56415 - DNA, 20 bp, synthetic construct
  misc_feature 1..20: note = chemically synthesized
  source 1..20: mol_type = other DNA
agctttacatttgtaggact

SEQ ID NO: 56416 - DNA, 20 bp, synthetic construct
  misc_feature 1..20: note = chemically synthesized
  source 1..20: mol_type = other DNA
ccattataatttgtcactat

SEQ ID NO: 56417 - DNA, 20 bp, synthetic construct
  misc_feature 1..20: note = chemically synthesized
  source 1..20: mol_type = other DNA
aatgttacttaatttactaa

SEQ ID NO: 56418 - DNA, 20 bp, synthetic construct
  misc_feature 1..20: note = chemically synthesized
  source 1..20: mol_type = other DNA
aaaacttcaataaaataaaa

SEQ ID NO: 56419 - DNA, 20 bp, synthetic construct
  misc_feature 1..20: note = chemically synthesized
  source 1..20: mol_type = other DNA
aaacttcaataaaataaaat

SEQ ID NO: 56420 - DNA, 20 bp, synthetic construct
  misc_feature 1..20: note = chemically synthesized
  source 1..20: mol_type = other DNA
cttcaataaaataaaatggg

SEQ ID NO: 56421 - DNA, 20 bp, synthetic construct
  misc_feature 1..20: note = chemically synthesized
  source 1..20: mol_type = other DNA
taaaataaaatgggaagaat

SEQ ID NO: 56422 - DNA, 20 bp, synthetic construct
  misc_feature 1..20: note = chemically synthesized
  source 1..20: mol_type = other DNA
aaatgggaagaatgagactg

SEQ ID NO: 56423 - DNA, 20 bp, synthetic construct
  misc_feature 1..20: note = chemically synthesized
  source 1..20: mol_type = other DNA
tgggaagaatgagactgaag

SEQ ID NO: 56424 - DNA, 20 bp, synthetic construct
  misc_feature 1..20: note = chemically synthesized
  source 1..20: mol_type = other DNA
gaatgagactgaagaagact

SEQ ID NO: 56425 - DNA, 20 bp, synthetic construct
  misc_feature 1..20: note = chemically synthesized
  source 1..20: mol_type = other DNA
aatgagactgaagaagactg

SEQ ID NO: 56426 - DNA, 20 bp, synthetic construct
  misc_feature 1..20: note = chemically synthesized
  source 1..20: mol_type = other DNA
gagactgaagaagactgagg

SEQ ID NO: 56427 - DNA, 20 bp, synthetic construct
  misc_feature 1..20: note = chemically synthesized
  source 1..20: mol_type = other DNA
agactgaggaagtaattgtg

SEQ ID NO: 56428 - DNA, 20 bp, synthetic construct
  misc_feature 1..20: note = chemically synthesized
  source 1..20: mol_type = other DNA
ggaagtaattgtgtggtaaa

SEQ ID NO: 56429 - DNA, 20 bp, synthetic construct
  misc_feature 1..20: note = chemically synthesized
  source 1..20: mol_type = other DNA
agtaattgtgtggtaaaaag

SEQ ID NO: 56430 - DNA, 20 bp, synthetic construct
  misc_feature 1..20: note = chemically synthesized
  source 1..20: mol_type = other DNA
gtaaaaagtagttatgaata

SEQ ID NO: 56431 - DNA, 20 bp, synthetic construct
  misc_feature 1..20: note = chemically synthesized
  source 1..20: mol_type = other DNA
atttttcttttctgaataaa

SEQ ID NO: 56432 - DNA, 20 bp, synthetic construct
  misc_feature 1..20: note = chemically synthesized
  source 1..20: mol_type = other DNA
ttttcttttctgaataaaaa

SEQ ID NO: 56433 - DNA, 20 bp, synthetic construct
  misc_feature 1..20: note = chemically synthesized
  source 1..20: mol_type = other DNA
aaaagagaaaaaccttgcct

SEQ ID NO: 56434 - DNA, 20 bp, synthetic construct
  misc_feature 1..20: note = chemically synthesized
  source 1..20: mol_type = other DNA
gcctcagtgaaaatgtcacc

SEQ ID NO: 56435 - DNA, 20 bp, synthetic construct
  misc_feature 1..20: note = chemically synthesized
  source 1..20: mol_type = other DNA
caccaagatatttatttaaa

SEQ ID NO: 56436 - DNA, 20 bp, synthetic construct
  misc_feature 1..20: note = chemically synthesized
  source 1..20: mol_type = other DNA
accaagatatttatttaaat

SEQ ID NO: 56437 - DNA, 20 bp, synthetic construct
  misc_feature 1..20: note = chemically synthesized
  source 1..20: mol_type = other DNA
atatttatttaaataggaat

SEQ ID NO: 56438 - DNA, 20 bp, synthetic construct
  misc_feature 1..20: note = chemically synthesized
  source 1..20: mol_type = other DNA
tatttaaataggaattggca

SEQ ID NO: 56439 - DNA, 20 bp, synthetic construct
  misc_feature 1..20: note = chemically synthesized
  source 1..20: mol_type = other DNA
agaaacatgtttgcattaaa

SEQ ID NO: 56440 - DNA, 20 bp, synthetic construct
  misc_feature 1..20: note = chemically synthesized
  source 1..20: mol_type = other DNA
gaaacatgtttgcattaaat

SEQ ID NO: 56441 - DNA, 20 bp, synthetic construct
  misc_feature 1..20: note = chemically synthesized
  source 1..20: mol_type = other DNA
tgtttgcattaaatgggctt

SEQ ID NO: 56442 - DNA, 20 bp, synthetic construct
  misc_feature 1..20: note = chemically synthesized
  source 1..20: mol_type = other DNA
gggctttagaattttgcaaa

SEQ ID NO: 56443 - DNA, 20 bp, synthetic construct
  misc_feature 1..20: note = chemically synthesized
  source 1..20: mol_type = other DNA
tagaattttgcaaatagaaa

SEQ ID NO: 56444 - DNA, 20 bp, synthetic construct
  misc_feature 1..20: note = chemically synthesized
  source 1..20: mol_type = other DNA
aattttgcaaatagaaatgg

SEQ ID NO: 56445 - DNA, 20 bp, synthetic construct
  misc_feature 1..20: note = chemically synthesized
  source 1..20: mol_type = other DNA
tgcaaatagaaatggcagaa

SEQ ID NO: 56446 - DNA, 20 bp, synthetic construct
  misc_feature 1..20: note = chemically synthesized
  source 1..20: mol_type = other DNA
gcaaatagaaatggcagaaa

SEQ ID NO: 56447 - DNA, 20 bp, synthetic construct
  misc_feature 1..20: note = chemically synthesized
  source 1..20: mol_type = other DNA
gaaatggcagaaaaggaaca

SEQ ID NO: 56448 - DNA, 20 bp, synthetic construct
  misc_feature 1..20: note = chemically synthesized
  source 1..20: mol_type = other DNA
catatgaattattctgcatt

SEQ ID NO: 56449 - DNA, 20 bp, synthetic construct
  misc_feature 1..20: note = chemically synthesized
  source 1..20: mol_type = other DNA
attattctgcatttagcctg

SEQ ID NO: 56450 - DNA, 20 bp, synthetic construct
  misc_feature 1..20: note = chemically synthesized
  source 1..20: mol_type = other DNA
ttattctgcatttagcctgt

SEQ ID NO: 56451 - DNA, 20 bp, synthetic construct
  misc_feature 1..20: note = chemically synthesized
  source 1..20: mol_type = other DNA
ctgcatttagcctgtgggaa

SEQ ID NO: 56452 - DNA, 20 bp, synthetic construct
  misc_feature 1..20: note = chemically synthesized
  source 1..20: mol_type = other DNA
gcatttagcctgtgggaaaa

SEQ ID NO: 56453 - DNA, 20 bp, synthetic construct
  misc_feature 1..20: note = chemically synthesized
  source 1..20: mol_type = other DNA
agcctgtgggaaaagagaaa

SEQ ID NO: 56454 - DNA, 20 bp, synthetic construct
  misc_feature 1..20: note = chemically synthesized
  source 1..20: mol_type = other DNA
cctgtgggaaaagagaaaaa

SEQ ID NO: 56455 - DNA, 20 bp, synthetic construct
  misc_feature 1..20: note = chemically synthesized
  source 1..20: mol_type = other DNA
tgtgggaaaagagaaaaaga

SEQ ID NO: 56456 - DNA, 20 bp, synthetic construct
  misc_feature 1..20: note = chemically synthesized
  source 1..20: mol_type = other DNA
ggaaaagagaaaaagagaga

SEQ ID NO: 56457 - DNA, 20 bp, synthetic construct
  misc_feature 1..20: note = chemically synthesized
  source 1..20: mol_type = other DNA
gaaaagagaaaaagagagaa

SEQ ID NO: 56458 - DNA, 20 bp, synthetic construct
  misc_feature 1..20: note = chemically synthesized
  source 1..20: mol_type = other DNA
aaagagaaaaagagagaaag

SEQ ID NO: 56459 - DNA, 20 bp, synthetic construct
  misc_feature 1..20: note = chemically synthesized
  source 1..20: mol_type = other DNA
gagagaaaggagatttctgc

SEQ ID NO: 56460 - DNA, 20 bp, synthetic construct
  misc_feature 1..20: note = chemically synthesized
  source 1..20: mol_type = other DNA
aaaggagatttctgcaagtg

SEQ ID NO: 56461 - DNA, 20 bp, synthetic construct
  misc_feature 1..20: note = chemically synthesized
  source 1..20: mol_type = other DNA
tgcaagtgtagaaataatta

SEQ ID NO: 56462 - DNA, 20 bp, synthetic construct
  misc_feature 1..20: note = chemically synthesized
  source 1..20: mol_type = other DNA
gcaagtgtagaaataattac

SEQ ID NO: 56463 - DNA, 20 bp, synthetic construct
  misc_feature 1..20: note = chemically synthesized
  source 1..20: mol_type = other DNA
caagtgtagaaataattacg

SEQ ID NO: 56464 - DNA, 20 bp, synthetic construct
  misc_feature 1..20: note = chemically synthesized
  source 1..20: mol_type = other DNA
agaaataattacggggatat

SEQ ID NO: 56465 - DNA, 20 bp, synthetic construct
  misc_feature 1..20: note = chemically synthesized
  source 1..20: mol_type = other DNA
gaaataattacggggatatt

SEQ ID NO: 56466 - DNA, 20 bp, synthetic construct
  misc_feature 1..20: note = chemically synthesized
  source 1..20: mol_type = other DNA
attacggggatattaggtgc

SEQ ID NO: 56467 - DNA, 20 bp, synthetic construct
  misc_feature 1..20: note = chemically synthesized
  source 1..20: mol_type = other DNA
tattaggtgccagtgaaccc

SEQ ID NO: 56468 - DNA, 20 bp, synthetic construct
  misc_feature 1..20: note = chemically synthesized
  source 1..20: mol_type = other DNA
ttaggtgccagtgaacccaa

SEQ ID NO: 56469 - DNA, 20 bp, synthetic construct
  misc_feature 1..20: note = chemically synthesized
  source 1..20: mol_type = other DNA
taggtgccagtgaacccaag

SEQ ID NO: 56470 - DNA, 20 bp, synthetic construct
  misc_feature 1..20: note = chemically synthesized
  source 1..20: mol_type = other DNA
aggtgccagtgaacccaaga

SEQ ID NO: 56471 - DNA, 20 bp, synthetic construct
  misc_feature 1..20: note = chemically synthesized
  source 1..20: mol_type = other DNA
agggctgacttaaaatttgc

SEQ ID NO: 56472 - DNA, 20 bp, synthetic construct
  misc_feature 1..20: note = chemically synthesized
  source 1..20: mol_type = other DNA
gggctgacttaaaatttgct

SEQ ID NO: 56473 - DNA, 20 bp, synthetic construct
  misc_feature 1..20: note = chemically synthesized
  source 1..20: mol_type = other DNA
aaaatttgctgggtccctcg

SEQ ID NO: 56474 - DNA, 20 bp, synthetic construct
  misc_feature 1..20: note = chemically synthesized
  source 1..20: mol_type = other DNA
tgctgggtccctcgtggttt

SEQ ID NO: 56475 - DNA, 20 bp, synthetic construct
  misc_feature 1..20: note = chemically synthesized
  source 1..20: mol_type = other DNA
tcgtggttttggctatcaac

SEQ ID NO: 56476 - DNA, 20 bp, synthetic construct
  misc_feature 1..20: note = chemically synthesized
  source 1..20: mol_type = other DNA
cgtggttttggctatcaact

SEQ ID NO: 56477 - DNA, 20 bp, synthetic construct
  misc_feature 1..20: note = chemically synthesized
  source 1..20: mol_type = other DNA
tacttctccacacattcata

SEQ ID NO: 56478 - DNA, 20 bp, synthetic construct
  misc_feature 1..20: note = chemically synthesized
  source 1..20: mol_type = other DNA
acttctccacacattcataa

SEQ ID NO: 56479 - DNA, 20 bp, synthetic construct
  misc_feature 1..20: note = chemically synthesized
  source 1..20: mol_type = other DNA
ttcataaaggaatattaaat

SEQ ID NO: 56480 - DNA, 20 bp, synthetic construct
  misc_feature 1..20: note = chemically synthesized
  source 1..20: mol_type = other DNA
ataaaggaatattaaattgg

SEQ ID NO: 56481 - DNA, 20 bp, synthetic construct
  misc_feature 1..20: note = chemically synthesized
  source 1..20: mol_type = other DNA
aggaatattaaattggtgga

SEQ ID NO: 56482 - DNA, 20 bp, synthetic construct
  misc_feature 1..20: note = chemically synthesized
  source 1..20: mol_type = other DNA
gccacttttttctccaattt

SEQ ID NO: 56483 - DNA, 20 bp, synthetic construct
  misc_feature 1..20: note = chemically synthesized
  source 1..20: mol_type = other DNA
aataaattcatcccgtgttt

SEQ ID NO: 56484 - DNA, 20 bp, synthetic construct
  misc_feature 1..20: note = chemically synthesized
  source 1..20: mol_type = other DNA
tcccgtgtttcagaatgcta

SEQ ID NO: 56485 - DNA, 20 bp, synthetic construct
  misc_feature 1..20: note = chemically synthesized
  source 1..20: mol_type = other DNA
aatgctacagacctcactat

SEQ ID NO: 56486 - DNA, 20 bp, synthetic construct
  misc_feature 1..20: note = chemically synthesized
  source 1..20: mol_type = other DNA
gacctcactatgagttttac

SEQ ID NO: 56487 - DNA, 20 bp, synthetic construct
  misc_feature 1..20: note = chemically synthesized
  source 1..20: mol_type = other DNA
acctcactatgagttttact

SEQ ID NO: 56488 - DNA, 20 bp, synthetic construct
  misc_feature 1..20: note = chemically synthesized
  source 1..20: mol_type = other DNA
cctcactatgagttttactg

SEQ ID NO: 56489 - DNA, 20 bp, synthetic construct
  misc_feature 1..20: note = chemically synthesized
  source 1..20: mol_type = other DNA
ctcactatgagttttactgg

SEQ ID NO: 56490 - DNA, 20 bp, synthetic construct
  misc_feature 1..20: note = chemically synthesized
  source 1..20: mol_type = other DNA
tatgagttttactgggggat

SEQ ID NO: 56491 - DNA, 20 bp, synthetic construct
  misc_feature 1..20: note = chemically synthesized
  source 1..20: mol_type = other DNA
tactgggggatgagcacaca

SEQ ID NO: 56492 - DNA, 20 bp, synthetic construct
  misc_feature 1..20: note = chemically synthesized
  source 1..20: mol_type = other DNA
gggggatgagcacacaaaga

SEQ ID NO: 56493 - DNA, 20 bp, synthetic construct
  misc_feature 1..20: note = chemically synthesized
  source 1..20: mol_type = other DNA
tgagcacacaaagatggtct

SEQ ID NO: 56494 - DNA, 20 bp, synthetic construct
  misc_feature 1..20: note = chemically synthesized
  source 1..20: mol_type = other DNA
cacacaaagatggtctgaga

SEQ ID NO: 56495 - DNA, 20 bp, synthetic construct
  misc_feature 1..20: note = chemically synthesized
  source 1..20: mol_type = other DNA
gatggtctgagacagacttc

SEQ ID NO: 56496 - DNA, 20 bp, synthetic construct
  misc_feature 1..20: note = chemically synthesized
  source 1..20: mol_type = other DNA
ggtctgagacagacttccag

SEQ ID NO: 56497 - DNA, 20 bp, synthetic construct
  misc_feature 1..20: note = chemically synthesized
  source 1..20: mol_type = other DNA
ctgagacagacttccagaag

SEQ ID NO: 56498 - DNA, 20 bp, synthetic construct
  misc_feature 1..20: note = chemically synthesized
  source 1..20: mol_type = other DNA
agacagacttccagaagaag

SEQ ID NO: 56499 - DNA, 20 bp, synthetic construct
  misc_feature 1..20: note = chemically synthesized
  source 1..20: mol_type = other DNA
cagacttccagaagaagaag

SEQ ID NO: 56500 - DNA, 20 bp, synthetic construct
  misc_feature 1..20: note = chemically synthesized
  source 1..20: mol_type = other DNA
gaagaagaagatgtccgtgt

SEQ ID NO: 56501 - DNA, 20 bp, synthetic construct
  misc_feature 1..20: note = chemically synthesized
  source 1..20: mol_type = other DNA
agaagaagatgtccgtgtta

SEQ ID NO: 56502 - DNA, 20 bp, synthetic construct
  misc_feature 1..20: note = chemically synthesized
  source 1..20: mol_type = other DNA
ccgtgttagagataaatgaa

SEQ ID NO: 56503 - DNA, 20 bp, synthetic construct
  misc_feature 1..20: note = chemically synthesized
  source 1..20: mol_type = other DNA
agataaatgaaaagtgtaaa

SEQ ID NO: 56504 - DNA, 20 bp, synthetic construct
  misc_feature 1..20: note = chemically synthesized
  source 1..20: mol_type = other DNA
agtcatctgcaaaatgtcca

SEQ ID NO: 56505 - DNA, 20 bp, synthetic construct
  misc_feature 1..20: note = chemically synthesized
  source 1..20: mol_type = other DNA
atgtccacagtatattatat

SEQ ID NO: 56506 - DNA, 20 bp, synthetic construct
  misc_feature 1..20: note = chemically synthesized
  source 1..20: mol_type = other DNA
tattatattggcacatatcc

SEQ ID NO: 56507 - DNA, 20 bp, synthetic construct
  misc_feature 1..20: note = chemically synthesized
  source 1..20: mol_type = other DNA
gcacatatcctggcaccaaa

SEQ ID NO: 56508 - DNA, 20 bp, synthetic construct
  misc_feature 1..20: note = chemically synthesized
  source 1..20: mol_type = other DNA
acatatcctggcaccaaaca

SEQ ID NO: 56509 - DNA, 20 bp, synthetic construct
  misc_feature 1..20: note = chemically synthesized
  source 1..20: mol_type = other DNA
cagagtaaaatttatgacat

SEQ ID NO: 56510 - DNA, 20 bp, synthetic construct
  misc_feature 1..20: note = chemically synthesized
  source 1..20: mol_type = other DNA
gtaaaatttatgacattagc

SEQ ID NO: 56511 - DNA, 20 bp, synthetic construct
  misc_feature 1..20: note = chemically synthesized
  source 1..20: mol_type = other DNA
attagctggatgctgttaca

SEQ ID NO: 56512 - DNA, 20 bp, synthetic construct
  misc_feature 1..20: note = chemically synthesized
  source 1..20: mol_type = other DNA
tagctggatgctgttacaca

SEQ ID NO: 56513 - DNA, 20 bp, synthetic construct
  misc_feature 1..20: note = chemically synthesized
  source 1..20: mol_type = other DNA
ggatgctgttacacagagtg

SEQ ID NO: 56514 - DNA, 20 bp, synthetic construct
  misc_feature 1..20: note = chemically synthesized
  source 1..20: mol_type = other DNA
gctgttacacagagtgcaga

SEQ ID NO: 56515 - DNA, 20 bp, synthetic construct
  misc_feature 1..20: note = chemically synthesized
  source 1..20: mol_type = other DNA
ttacacagagtgcagacaga

SEQ ID NO: 56516 - DNA, 20 bp, synthetic construct
  misc_feature 1..20: note = chemically synthesized
  source 1..20: mol_type = other DNA
cacagagtgcagacagaaag

SEQ ID NO: 56517 - DNA, 20 bp, synthetic construct
  misc_feature 1..20: note = chemically synthesized
  source 1..20: mol_type = other DNA
cagagtgcagacagaaagta

SEQ ID NO: 56518 - DNA, 20 bp, synthetic construct
  misc_feature 1..20: note = chemically synthesized
  source 1..20: mol_type = other DNA
gacagaaagtagagccatca

SEQ ID NO: 56519 - DNA, 20 bp, synthetic construct
  misc_feature 1..20: note = chemically synthesized
  source 1..20: mol_type = other DNA
catcacagaacccacaactt

SEQ ID NO: 56520 - DNA, 20 bp, synthetic construct
  misc_feature 1..20: note = chemically synthesized
  source 1..20: mol_type = other DNA
atcacagaacccacaactta

SEQ ID NO: 56521 - DNA, 20 bp, synthetic construct
  misc_feature 1..20: note = chemically synthesized
  source 1..20: mol_type = other DNA
tcacagaacccacaacttaa

SEQ ID NO: 56522 - DNA, 20 bp, synthetic construct
  misc_feature 1..20: note = chemically synthesized
  source 1..20: mol_type = other DNA
acccacaacttaagggaatg

SEQ ID NO: 56523 - DNA, 20 bp, synthetic construct
  misc_feature 1..20: note = chemically synthesized
  source 1..20: mol_type = other DNA
acaacttaagggaatgaagc

SEQ ID NO: 56524 - DNA, 20 bp, synthetic construct
  misc_feature 1..20: note = chemically synthesized
  source 1..20: mol_type = other DNA
gggaatgaagctggaatcct

SEQ ID NO: 56525 - DNA, 20 bp, synthetic construct
  misc_feature 1..20: note = chemically synthesized
  source 1..20: mol_type = other DNA
gaatgaagctggaatccttg

SEQ ID NO: 56526 - DNA, 20 bp, synthetic construct
  misc_feature 1..20: note = chemically synthesized
  source 1..20: mol_type = other DNA
tgaagctggaatccttggag

SEQ ID NO: 56527 - DNA, 20 bp, synthetic construct
  misc_feature 1..20: note = chemically synthesized
  source 1..20: mol_type = other DNA
aatccttggagaagaaaaat

SEQ ID NO: 56528 - DNA, 20 bp, synthetic construct
  misc_feature 1..20: note = chemically synthesized
  source 1..20: mol_type = other DNA
cttggagaagaaaaattggt

SEQ ID NO: 56529 - DNA, 20 bp, synthetic construct
  misc_feature 1..20: note = chemically synthesized
  source 1..20: mol_type = other DNA
aattggtgagtgatgaatga

SEQ ID NO: 56530 - DNA, 20 bp, synthetic construct
  misc_feature 1..20: note = chemically synthesized
  source 1..20: mol_type = other DNA
aatgaaagtgttatgaaaaa

SEQ ID NO: 56531 - DNA, 20 bp, synthetic construct
  misc_feature 1..20: note = chemically synthesized
  source 1..20: mol_type = other DNA
gaaaaatggacaatattctt

SEQ ID NO: 56532 - DNA, 20 bp, synthetic construct
  misc_feature 1..20: note = chemically synthesized
  source 1..20: mol_type = other DNA
aaaaatggacaatattcttc

SEQ ID NO: 56533 - DNA, 20 bp, synthetic construct
  misc_feature 1..20: note = chemically synthesized
  source 1..20: mol_type = other DNA
gacaatattcttcaggtatc

SEQ ID NO: 56534 - DNA, 20 bp, synthetic construct
  misc_feature 1..20: note = chemically synthesized
  source 1..20: mol_type = other DNA
atattcttcaggtatctggt

SEQ ID NO: 56535 - DNA, 20 bp, synthetic construct
  misc_feature 1..20: note = chemically synthesized
  source 1..20: mol_type = other DNA
attcttcaggtatctggtaa

SEQ ID NO: 56536 - DNA, 20 bp, synthetic construct
  misc_feature 1..20: note = chemically synthesized
  source 1..20: mol_type = other DNA
gtatctggtaagagcaaaac

SEQ ID NO: 56537 - DNA, 20 bp, synthetic construct
  misc_feature 1..20: note = chemically synthesized
  source 1..20: mol_type = other DNA
accagctctcaataataatt

SEQ ID NO: 56538 - DNA, 20 bp, synthetic construct
  misc_feature 1..20: note = chemically synthesized
  source 1..20: mol_type = other DNA
ccagctctcaataataattg

SEQ ID NO: 56539 - DNA, 20 bp, synthetic construct
  misc_feature 1..20: note = chemically synthesized
  source 1..20: mol_type = other DNA
agctctcaataataattgag

SEQ ID NO: 56540 - DNA, 20 bp, synthetic construct
  misc_feature 1..20: note = chemically synthesized
  source 1..20: mol_type = other DNA
ctcaataataattgaggagt

SEQ ID NO: 56541 - DNA, 20 bp, synthetic construct
  misc_feature 1..20: note = chemically synthesized
  source 1..20: mol_type = other DNA
ggagtaagtctcacgattcc

SEQ ID NO: 56542 - DNA, 20 bp, synthetic construct
  misc_feature 1..20: note = chemically synthesized
  source 1..20: mol_type = other DNA
cctctccataatttaattac

SEQ ID NO: 56543 - DNA, 20 bp, synthetic construct
  misc_feature 1..20: note = chemically synthesized
  source 1..20: mol_type = other DNA
aatcactctatccaactaac

SEQ ID NO: 56544 - DNA, 20 bp, synthetic construct
  misc_feature 1..20: note = chemically synthesized
  source 1..20: mol_type = other DNA
atcactctatccaactaacc

SEQ ID NO: 56545 - DNA, 20 bp, synthetic construct
  misc_feature 1..20: note = chemically synthesized
  source 1..20: mol_type = other DNA
accctgctatctgtgcctgt

SEQ ID NO: 56546 - DNA, 20 bp, synthetic construct
  misc_feature 1..20: note = chemically synthesized
  source 1..20: mol_type = other DNA
ccctgctatctgtgcctgtc

SEQ ID NO: 56547 - DNA, 20 bp, synthetic construct
  misc_feature 1..20: note = chemically synthesized
  source 1..20: mol_type = other DNA
tgctatctgtgcctgtcagg

SEQ ID NO: 56548 - DNA, 20 bp, synthetic construct
  misc_feature 1..20: note = chemically synthesized
  source 1..20: mol_type = other DNA
gtcaggtagtactcacatgt

SEQ ID NO: 56549 - DNA, 20 bp, synthetic construct
  misc_feature 1..20: note = chemically synthesized
  source 1..20: mol_type = other DNA
gtactcacatgtcagctctt

SEQ ID NO: 56550 - DNA, 20 bp, synthetic construct
  misc_feature 1..20: note = chemically synthesized
  source 1..20: mol_type = other DNA
tcagctctttggtcttgaat

SEQ ID NO: 56551 - DNA, 20 bp, synthetic construct
  misc_feature 1..20: note = chemically synthesized
  source 1..20: mol_type = other DNA
ctctttggtcttgaataagt

SEQ ID NO: 56552 - DNA, 20 bp, synthetic construct
  misc_feature 1..20: note = chemically synthesized
  source 1..20: mol_type = other DNA
agacattgtgattgccatta

SEQ ID NO: 56553 - DNA, 20 bp, synthetic construct
  misc_feature 1..20: note = chemically synthesized
  source 1..20: mol_type = other DNA
gacattgtgattgccattaa

SEQ ID NO: 56554 - DNA, 20 bp, synthetic construct
  misc_feature 1..20: note = chemically synthesized
  source 1..20: mol_type = other DNA
attctaattgtgattatctt

SEQ ID NO: 56555 - DNA, 20 bp, synthetic construct
  misc_feature 1..20: note = chemically synthesized
  source 1..20: mol_type = other DNA
tctaattgtgattatctttg

SEQ ID NO: 56556 - DNA, 20 bp, synthetic construct
  misc_feature 1..20: note = chemically synthesized
  source 1..20: mol_type = other DNA
aattgtgattatctttggag

SEQ ID NO: 56557 - DNA, 20 bp, synthetic construct
  misc_feature 1..20: note = chemically synthesized
  source 1..20: mol_type = other DNA
aagaaaaaatttgcccctat

SEQ ID NO: 56558 - DNA, 20 bp, synthetic construct
  misc_feature 1..20: note = chemically synthesized
  source 1..20: mol_type = other DNA
aaatttgcccctattagaaa

SEQ ID NO: 56559 - DNA, 20 bp, synthetic construct
  misc_feature 1..20: note = chemically synthesized
  source 1..20: mol_type = other DNA
ttgcccctattagaaaaagc

SEQ ID NO: 56560 - DNA, 20 bp, synthetic construct
  misc_feature 1..20: note = chemically synthesized
  source 1..20: mol_type = other DNA
tagaaaaagccagtgactta

SEQ ID NO: 56561 - DNA, 20 bp, synthetic construct
  misc_feature 1..20: note = chemically synthesized
  source 1..20: mol_type = other DNA
aaaagccagtgacttatgga

SEQ ID NO: 56562 - DNA, 20 bp, synthetic construct
  misc_feature 1..20: note = chemically synthesized
  source 1..20: mol_type = other DNA
aaagccagtgacttatggat

SEQ ID NO: 56563 - DNA, 20 bp, synthetic construct
  misc_feature 1..20: note = chemically synthesized
  source 1..20: mol_type = other DNA
agccagtgacttatggatgg

SEQ ID NO: 56564 - DNA, 20 bp, synthetic construct
  misc_feature 1..20: note = chemically synthesized
  source 1..20: mol_type = other DNA
gatgggagtgtcataaaact

SEQ ID NO: 56565 - DNA, 20 bp, synthetic construct
  misc_feature 1..20: note = chemically synthesized
  source 1..20: mol_type = other DNA
agtgtcataaaactaagcat

SEQ ID NO: 56566 - DNA, 20 bp, synthetic construct
  misc_feature 1..20: note = chemically synthesized
  source 1..20: mol_type = other DNA
gtgtcataaaactaagcatt

SEQ ID NO: 56567 - DNA, 20 bp, synthetic construct
  misc_feature 1..20: note = chemically synthesized
  source 1..20: mol_type = other DNA
tgtcataaaactaagcattg

SEQ ID NO: 56568 - DNA, 20 bp, synthetic construct
  misc_feature 1..20: note = chemically synthesized
  source 1..20: mol_type = other DNA
agcattggggatcaaatctg

SEQ ID NO: 56569 - DNA, 20 bp, synthetic construct
  misc_feature 1..20: note = chemically synthesized
  source 1..20: mol_type = other DNA
gatcaaatctgtggaaatca

SEQ ID NO: 56570 - DNA, 20 bp, synthetic construct
  misc_feature 1..20: note = chemically synthesized
  source 1..20: mol_type = other DNA
aaagtatttaattgacctac

SEQ ID NO: 56571 - DNA, 20 bp, synthetic construct
  misc_feature 1..20: note = chemically synthesized
  source 1..20: mol_type = other DNA
ttaattgacctactagttta

SEQ ID NO: 56572 - DNA, 20 bp, synthetic construct
  misc_feature 1..20: note = chemically synthesized
  source 1..20: mol_type = other DNA
agtttacggtaaatgtatgt

SEQ ID NO: 56573 - DNA, 20 bp, synthetic construct
  misc_feature 1..20: note = chemically synthesized
  source 1..20: mol_type = other DNA
taaatgtatgttagctgata

SEQ ID NO: 56574 - DNA, 20 bp, synthetic construct
  misc_feature 1..20: note = chemically synthesized
  source 1..20: mol_type = other DNA
tgaaatgtcctctgctgatt

SEQ ID NO: 56575 - DNA, 20 bp, synthetic construct
  misc_feature 1..20: note = chemically synthesized
  source 1..20: mol_type = other DNA
tgatttggttctttcatttg

SEQ ID NO: 56576 - DNA, 20 bp, synthetic construct
  misc_feature 1..20: note = chemically synthesized
  source 1..20: mol_type = other DNA
tggttctttcatttgaagtt

SEQ ID NO: 56577 - DNA, 20 bp, synthetic construct
  misc_feature 1..20: note = chemically synthesized
  source 1..20: mol_type = other DNA
ttctttcatttgaagtttag

SEQ ID NO: 56578 - DNA, 20 bp, synthetic construct
  misc_feature 1..20: note = chemically synthesized
  source 1..20: mol_type = other DNA
tttcatttgaagtttagcag

SEQ ID NO: 56579 - DNA, 20 bp, synthetic construct
  misc_feature 1..20: note = chemically synthesized
  source 1..20: mol_type = other DNA
acatttgttgttgaatattt

SEQ ID NO: 56580 - DNA, 20 bp, synthetic construct
  misc_feature 1..20: note = chemically synthesized
  source 1..20: mol_type = other DNA
caaaaaaaaaaaaaaaaaaa

SEQ ID NO: 56581 - DNA, 20 bp, synthetic construct
  misc_feature 1..20: note = chemically synthesized
  source 1..20: mol_type = other DNA
aaaagctgctttttctttca

SEQ ID NO: 56582 - DNA, 20 bp, synthetic construct
  misc_feature 1..20: note = chemically synthesized
  source 1..20: mol_type = other DNA
ctgctttttctttcaaagaa

SEQ ID NO: 56583 - DNA, 20 bp, synthetic construct
  misc_feature 1..20: note = chemically synthesized
  source 1..20: mol_type = other DNA
acagctacttcctgaatttc

SEQ ID NO: 56584 - DNA, 20 bp, synthetic construct
  misc_feature 1..20: note = chemically synthesized
  source 1..20: mol_type = other DNA
ttcctgaatttccagcatat

SEQ ID NO: 56585 - DNA, 20 bp, synthetic construct
  misc_feature 1..20: note = chemically synthesized
  source 1..20: mol_type = other DNA
tccagcatattggtgacatg

SEQ ID NO: 56586 - DNA, 20 bp, synthetic construct
  misc_feature 1..20: note = chemically synthesized
  source 1..20: mol_type = other DNA
tattggtgacatgaagcata

SEQ ID NO: 56587 - DNA, 20 bp, synthetic construct
  misc_feature 1..20: note = chemically synthesized
  source 1..20: mol_type = other DNA
ggtgacatgaagcatacggt

SEQ ID NO: 56588 - DNA, 20 bp, synthetic construct
  misc_feature 1..20: note = chemically synthesized
  source 1..20: mol_type = other DNA
catacggttagctgattcat

SEQ ID NO: 56589 - DNA, 20 bp, synthetic construct
  misc_feature 1..20: note = chemically synthesized
  source 1..20: mol_type = other DNA
agctgattcatgagcttact

SEQ ID NO: 56590 - DNA, 20 bp, synthetic construct
  misc_feature 1..20: note = chemically synthesized
  source 1..20: mol_type = other DNA
gagataaaacaactttattg

SEQ ID NO: 56591 - DNA, 20 bp, synthetic construct
  misc_feature 1..20: note = chemically synthesized
  source 1..20: mol_type = other DNA
aacaactttattgaagtgtc

SEQ ID NO: 56592 - DNA, 20 bp, synthetic construct
  misc_feature 1..20: note = chemically synthesized
  source 1..20: mol_type = other DNA
acaactttattgaagtgtct

SEQ ID NO: 56593 - DNA, 20 bp, synthetic construct
  misc_feature 1..20: note = chemically synthesized
  source 1..20: mol_type = other DNA
ctttattgaagtgtctagga

SEQ ID NO: 56594 - DNA, 20 bp, synthetic construct
  misc_feature 1..20: note = chemically synthesized
  source 1..20: mol_type = other DNA
gaagtgtctaggaaagaatg

SEQ ID NO: 56595 - DNA, 20 bp, synthetic construct
  misc_feature 1..20: note = chemically synthesized
  source 1..20: mol_type = other DNA
acaaacatttctctaatgta

SEQ ID NO: 56596 - DNA, 20 bp, synthetic construct
  misc_feature 1..20: note = chemically synthesized
  source 1..20: mol_type = other DNA
gattcaaaatatgtaatttt

SEQ ID NO: 56597 - DNA, 20 bp, synthetic construct
  misc_feature 1..20: note = chemically synthesized
  source 1..20: mol_type = other DNA
tagaaaataactattttgat

SEQ ID NO: 56598 - DNA, 20 bp, synthetic construct
  misc_feature 1..20: note = chemically synthesized
  source 1..20: mol_type = other DNA
gaaaataactattttgatca

SEQ ID NO: 56599 - DNA, 20 bp, synthetic construct
  misc_feature 1..20: note = chemically synthesized
  source 1..20: mol_type = other DNA
gatcagagaacttttatata

SEQ ID NO: 56600 - DNA, 20 bp, synthetic construct
  misc_feature 1..20: note = chemically synthesized
  source 1..20: mol_type = other DNA
agaacttttatataaagcat

SEQ ID NO: 56601 - DNA, 20 bp, synthetic construct
  misc_feature 1..20: note = chemically synthesized
  source 1..20: mol_type = other DNA
aacttttatataaagcataa

SEQ ID NO: 56602 - DNA, 20 bp, synthetic construct
  misc_feature 1..20: note = chemically synthesized
  source 1..20: mol_type = other DNA
ttatataaagcataagagcc

SEQ ID NO: 56603 - DNA, 20 bp, synthetic construct
  misc_feature 1..20: note = chemically synthesized
  source 1..20: mol_type = other DNA
tatataaagcataagagccc

SEQ ID NO: 56604 - DNA, 20 bp, synthetic construct
  misc_feature 1..20: note = chemically synthesized
  source 1..20: mol_type = other DNA
gcataagagcccaggttttt

SEQ ID NO: 56605 - DNA, 20 bp, synthetic construct
  misc_feature 1..20: note = chemically synthesized
  source 1..20: mol_type = other DNA
ttttcagaaaattcaatcat

SEQ ID NO: 56606 - DNA, 20 bp, synthetic construct
  misc_feature 1..20: note = chemically synthesized
  source 1..20: mol_type = other DNA
caatcatcagtgaaattgaa

SEQ ID NO: 56607 - DNA, 20 bp, synthetic construct
  misc_feature 1..20: note = chemically synthesized
  source 1..20: mol_type = other DNA
aaaagtgactaaattttctt

SEQ ID NO: 56608 - DNA, 20 bp, synthetic construct
  misc_feature 1..20: note = chemically synthesized
  source 1..20: mol_type = other DNA
aaattttctttggttattca

SEQ ID NO: 56609 - DNA, 20 bp, synthetic construct
  misc_feature 1..20: note = chemically synthesized
  source 1..20: mol_type = other DNA
catagtgctttcctcaattt

SEQ ID NO: 56610 - DNA, 20 bp, synthetic construct
  misc_feature 1..20: note = chemically synthesized
  source 1..20: mol_type = other DNA
tcctcaattttagtctcccc

SEQ ID NO: 56611 - DNA, 20 bp, synthetic construct
  misc_feature 1..20: note = chemically synthesized
  source 1..20: mol_type = other DNA
tttgtcctgtcttccctgtc

SEQ ID NO: 56612 - DNA, 20 bp, synthetic construct
  misc_feature 1..20: note = chemically synthesized
  source 1..20: mol_type = other DNA
ttctacatttgacttcttct

SEQ ID NO: 56613 - DNA, 20 bp, synthetic construct
  misc_feature 1..20: note = chemically synthesized
  source 1..20: mol_type = other DNA
cttctaagaaatctgtcctt

SEQ ID NO: 56614 - DNA, 20 bp, synthetic construct
  misc_feature 1..20: note = chemically synthesized
  source 1..20: mol_type = other DNA
tttttactaatttcttatgt

SEQ ID NO: 56615 - DNA, 20 bp, synthetic construct
  misc_feature 1..20: note = chemically synthesized
  source 1..20: mol_type = other DNA
tttactaatttcttatgtca

SEQ ID NO: 56616 - DNA, 20 bp, synthetic construct
  misc_feature 1..20: note = chemically synthesized
  source 1..20: mol_type = other DNA
cagagctcacaaaattatat

SEQ ID NO: 56617 - DNA, 20 bp, synthetic construct
  misc_feature 1..20: note = chemically synthesized
  source 1..20: mol_type = other DNA
catctcacctatatttcatt

SEQ ID NO: 56618 - DNA, 20 bp, synthetic construct
  misc_feature 1..20: note = chemically synthesized
  source 1..20: mol_type = other DNA
atatttcattaagaactaat

SEQ ID NO: 56619 - DNA, 20 bp, synthetic construct
  misc_feature 1..20: note = chemically synthesized
  source 1..20: mol_type = other DNA
aagaactaatgagcctttat

SEQ ID NO: 56620 - DNA, 20 bp, synthetic construct
  misc_feature 1..20: note = chemically synthesized
  source 1..20: mol_type = other DNA
agaactaatgagcctttatt

SEQ ID NO: 56621 - DNA, 20 bp, synthetic construct
  misc_feature 1..20: note = chemically synthesized
  source 1..20: mol_type = other DNA
aactctgaacattttaaaac

SEQ ID NO: 56622 - DNA, 20 bp, synthetic construct
  misc_feature 1..20: note = chemically synthesized
  source 1..20: mol_type = other DNA
actctgaacattttaaaacc

SEQ ID NO: 56623 - DNA, 20 bp, synthetic construct
  misc_feature 1..20: note = chemically synthesized
  source 1..20: mol_type = other DNA
acattttaaaaccaggaaac

SEQ ID NO: 56624 - DNA, 20 bp, synthetic construct
  misc_feature 1..20: note = chemically synthesized
  source 1..20: mol_type = other DNA
caggaaactggactctattc

SEQ ID NO: 56625 - DNA, 20 bp, synthetic construct
  misc_feature 1..20: note = chemically synthesized
  source 1..20: mol_type = other DNA
tgattcatttgcccattatt

SEQ ID NO: 56626 - DNA, 20 bp, synthetic construct
  misc_feature 1..20: note = chemically synthesized
  source 1..20: mol_type = other DNA
tgcccattattcagtatctg

SEQ ID NO: 56627 - DNA, 20 bp, synthetic construct
  misc_feature 1..20: note = chemically synthesized
  source 1..20: mol_type = other DNA
attcagtatctgtggtttat

SEQ ID NO: 56628 - DNA, 20 bp, synthetic construct
  misc_feature 1..20: note = chemically synthesized
  source 1..20: mol_type = other DNA
ttcagtatctgtggtttatc

SEQ ID NO: 56629 - DNA, 20 bp, synthetic construct
  misc_feature 1..20: note = chemically synthesized
  source 1..20: mol_type = other DNA
cagtatctgtggtttatcag

SEQ ID NO: 56630 - DNA, 20 bp, synthetic construct
  misc_feature 1..20: note = chemically synthesized
  source 1..20: mol_type = other DNA
atctgtggtttatcaggagc

SEQ ID NO: 56631 - DNA, 20 bp, synthetic construct
  misc_feature 1..20: note = chemically synthesized
  source 1..20: mol_type = other DNA
aggagcaagttctcttgccg

SEQ ID NO: 56632 - DNA, 20 bp, synthetic construct
  misc_feature 1..20: note = chemically synthesized
  source 1..20: mol_type = other DNA
ggagcaagttctcttgccgt

SEQ ID NO: 56633 - DNA, 20 bp, synthetic construct
  misc_feature 1..20: note = chemically synthesized
  source 1..20: mol_type = other DNA
ctgctgctcatcttgtccct

SEQ ID NO: 56634 - DNA, 20 bp, synthetic construct
  misc_feature 1..20: note = chemically synthesized
  source 1..20: mol_type = other DNA
ctgctcatcttgtcccttag

SEQ ID NO: 56635 - DNA, 20 bp, synthetic construct
  misc_feature 1..20: note = chemically synthesized
  source 1..20: mol_type = other DNA
ccttagcagttccttctctc

SEQ ID NO: 56636 - DNA, 20 bp, synthetic construct
  misc_feature 1..20: note = chemically synthesized
  source 1..20: mol_type = other DNA
ttctctctagatattccata

SEQ ID NO: 56637 - DNA, 20 bp, synthetic construct
  misc_feature 1..20: note = chemically synthesized
  source 1..20: mol_type = other DNA
ttttaaactcacaacatttc

SEQ ID NO: 56638 - DNA, 20 bp, synthetic construct
  misc_feature 1..20: note = chemically synthesized
  source 1..20: mol_type = other DNA
ttaaactcacaacatttcaa

SEQ ID NO: 56639 - DNA, 20 bp, synthetic construct
  misc_feature 1..20: note = chemically synthesized
  source 1..20: mol_type = other DNA
tcacaacatttcaagagttt

SEQ ID NO: 56640 - DNA, 20 bp, synthetic construct
  misc_feature 1..20: note = chemically synthesized
  source 1..20: mol_type = other DNA
tttcagctgtttaaaatata

SEQ ID NO: 56641 - DNA, 20 bp, synthetic construct
  misc_feature 1..20: note = chemically synthesized
  source 1..20: mol_type = other DNA
ttcagctgtttaaaatatat

SEQ ID NO: 56642 - DNA, 20 bp, synthetic construct
  misc_feature 1..20: note = chemically synthesized
  source 1..20: mol_type = other DNA
tataattccctttaacttta

SEQ ID NO: 56643 - DNA, 20 bp, synthetic construct
  misc_feature 1..20: note = chemically synthesized
  source 1..20: mol_type = other DNA
taactttaaagaaatataaa

SEQ ID NO: 56644 - DNA, 20 bp, synthetic construct
  misc_feature 1..20: note = chemically synthesized
  source 1..20: mol_type = other DNA
aaagaaatataaaaagcaac

SEQ ID NO: 56645 - DNA, 20 bp, synthetic construct
  misc_feature 1..20: note = chemically synthesized
  source 1..20: mol_type = other DNA
aagaaatataaaaagcaacc

SEQ ID NO: 56646 - DNA, 20 bp, synthetic construct
  misc_feature 1..20: note = chemically synthesized
  source 1..20: mol_type = other DNA
gaaatataaaaagcaaccag

SEQ ID NO: 56647 - DNA, 20 bp, synthetic construct
  misc_feature 1..20: note = chemically synthesized
  source 1..20: mol_type = other DNA
taaaaagcaaccaggagctt

SEQ ID NO: 56648 - DNA, 20 bp, synthetic construct
  misc_feature 1..20: note = chemically synthesized
  source 1..20: mol_type = other DNA
agcaaccaggagctttggct

SEQ ID NO: 56649 - DNA, 20 bp, synthetic construct
  misc_feature 1..20: note = chemically synthesized
  source 1..20: mol_type = other DNA
ctttggctcagatttgtcaa

SEQ ID NO: 56650 - DNA, 20 bp, synthetic construct
  misc_feature 1..20: note = chemically synthesized
  source 1..20: mol_type = other DNA
tcagatttgtcaaaagtata

SEQ ID NO: 56651 - DNA, 20 bp, synthetic construct
  misc_feature 1..20: note = chemically synthesized
  source 1..20: mol_type = other DNA
aaagatttcaattatttcta

SEQ ID NO: 56652 - DNA, 20 bp, synthetic construct
  misc_feature 1..20: note = chemically synthesized
  source 1..20: mol_type = other DNA
tacattattctgaatataaa

SEQ ID NO: 56653 - DNA, 20 bp, synthetic construct
  misc_feature 1..20: note = chemically synthesized
  source 1..20: mol_type = other DNA
aaagaaatatattatgttct

SEQ ID NO: 56654 - DNA, 20 bp, synthetic construct
  misc_feature 1..20: note = chemically synthesized
  source 1..20: mol_type = other DNA
aagaaatatattatgttctt

SEQ ID NO: 56655 - DNA, 20 bp, synthetic construct
  misc_feature 1..20: note = chemically synthesized
  source 1..20: mol_type = other DNA
ctacctctattctctttcat

SEQ ID NO: 56656 - DNA, 20 bp, synthetic construct
  misc_feature 1..20: note = chemically synthesized
  source 1..20: mol_type = other DNA
tacctctattctctttcatt

SEQ ID NO: 56657 - DNA, 20 bp, synthetic construct
  misc_feature 1..20: note = chemically synthesized
  source 1..20: mol_type = other DNA
aatcttttacaccaatgtac

SEQ ID NO: 56658 - DNA, 20 bp, synthetic construct
  misc_feature 1..20: note = chemically synthesized
  source 1..20: mol_type = other DNA
ttttacaccaatgtactggt

SEQ ID NO: 56659 - DNA, 20 bp, synthetic construct
  misc_feature 1..20: note = chemically synthesized
  source 1..20: mol_type = other DNA
ttacaccaatgtactggtca

SEQ ID NO: 56660 - DNA, 20 bp, synthetic construct
  misc_feature 1..20: note = chemically synthesized
  source 1..20: mol_type = other DNA
gcttgtctaaaatgttctta

SEQ ID NO: 56661 - DNA, 20 bp, synthetic construct
  misc_feature 1..20: note = chemically synthesized
  source 1..20: mol_type = other DNA
aaaatgttcttaaagaaaat

SEQ ID NO: 56662 - DNA, 20 bp, synthetic construct
  misc_feature 1..20: note = chemically synthesized
  source 1..20: mol_type = other DNA
ttcttaaagaaaattggaaa

SEQ ID NO: 56663 - DNA, 20 bp, synthetic construct
  misc_feature 1..20: note = chemically synthesized
  source 1..20: mol_type = other DNA
aattggaaatagttaaatac

SEQ ID NO: 56664 - DNA, 20 bp, synthetic construct
  misc_feature 1..20: note = chemically synthesized
  source 1..20: mol_type = other DNA
ttggaaatagttaaatacta

SEQ ID NO: 56665 - DNA, 20 bp, synthetic construct
  misc_feature 1..20: note = chemically synthesized
  source 1..20: mol_type = other DNA
tggaaatagttaaatactag

SEQ ID NO: 56666 - DNA, 20 bp, synthetic construct
  misc_feature 1..20: note = chemically synthesized
  source 1..20: mol_type = other DNA
atagttaaatactagaggaa

SEQ ID NO: 56667 - DNA, 20 bp, synthetic construct
  misc_feature 1..20: note = chemically synthesized
  source 1..20: mol_type = other DNA
aatagctgaaatgtgaaata

SEQ ID NO: 56668 - DNA, 20 bp, synthetic construct
  misc_feature 1..20: note = chemically synthesized
  source 1..20: mol_type = other DNA
tagctgaaatgtgaaatatg

SEQ ID NO: 56669 - DNA, 20 bp, synthetic construct
  misc_feature 1..20: note = chemically synthesized
  source 1..20: mol_type = other DNA
gctgaaatgtgaaatatgga

SEQ ID NO: 56670 - DNA, 20 bp, synthetic construct
  misc_feature 1..20: note = chemically synthesized
  source 1..20: mol_type = other DNA
ctgaaatgtgaaatatggag

SEQ ID NO: 56671 - DNA, 20 bp, synthetic construct
  misc_feature 1..20: note = chemically synthesized
  source 1..20: mol_type = other DNA
cttctttttttttttgtcca

SEQ ID NO: 56672 - DNA, 20 bp, synthetic construct
  misc_feature 1..20: note = chemically synthesized
  source 1..20: mol_type = other DNA
ttctttttttttttgtccac

SEQ ID NO: 56673 - DNA, 20 bp, synthetic construct
  misc_feature 1..20: note = chemically synthesized
  source 1..20: mol_type = other DNA
tttttttttgtccacaggtc

SEQ ID NO: 56674 - DNA, 20 bp, synthetic construct
  misc_feature 1..20: note = chemically synthesized
  source 1..20: mol_type = other DNA
tttttgtccacaggtctgga

SEQ ID NO: 56675 - DNA, 20 bp, synthetic construct
  misc_feature 1..20: note = chemically synthesized
  source 1..20: mol_type = other DNA
acaggtctggaaagaaataa

SEQ ID NO: 56676 - DNA, 20 bp, synthetic construct
  misc_feature 1..20: note = chemically synthesized
  source 1..20: mol_type = other DNA
tctggaaagaaataacagac

SEQ ID NO: 56677 - DNA, 20 bp, synthetic construct
  misc_feature 1..20: note = chemically synthesized
  source 1..20: mol_type = other DNA
gaaagaaataacagactggc

SEQ ID NO: 56678 - DNA, 20 bp, synthetic construct
  misc_feature 1..20: note = chemically synthesized
  source 1..20: mol_type = other DNA
agaaataacagactggccag

SEQ ID NO: 56679 - DNA, 20 bp, synthetic construct
  misc_feature 1..20: note = chemically synthesized
  source 1..20: mol_type = other DNA
cagtagtccaatcccctgtc

SEQ ID NO: 56680 - DNA, 20 bp, synthetic construct
  misc_feature 1..20: note = chemically synthesized
  source 1..20: mol_type = other DNA
agtagtccaatcccctgtcc

SEQ ID NO: 56681 - DNA, 20 bp, synthetic construct
  misc_feature 1..20: note = chemically synthesized
  source 1..20: mol_type = other DNA
ccctgtccaggtgattttgc

SEQ ID NO: 56682 - DNA, 20 bp, synthetic construct
  misc_feature 1..20: note = chemically synthesized
  source 1..20: mol_type = other DNA
tttgctggttctaatgtatt

SEQ ID NO: 56683 - DNA, 20 bp, synthetic construct
  misc_feature 1..20: note = chemically synthesized
  source 1..20: mol_type = other DNA
atgcacataacatcctatta

SEQ ID NO: 56684 - DNA, 20 bp, synthetic construct
  misc_feature 1..20: note = chemically synthesized
  source 1..20: mol_type = other DNA
cataacatcctattatggca

SEQ ID NO: 56685 - DNA, 20 bp, synthetic construct
  misc_feature 1..20: note = chemically synthesized
  source 1..20: mol_type = other DNA
gtgaatgccccacctgaaaa

SEQ ID NO: 56686 - DNA, 20 bp, synthetic construct
  misc_feature 1..20: note = chemically synthesized
  source 1..20: mol_type = other DNA
ttcctttcaaaactgtgaat

SEQ ID NO: 56687 - DNA, 20 bp, synthetic construct
  misc_feature 1..20: note = chemically synthesized
  source 1..20: mol_type = other DNA
tttcaaaactgtgaataaga

SEQ ID NO: 56688 - DNA, 20 bp, synthetic construct
  misc_feature 1..20: note = chemically synthesized
  source 1..20: mol_type = other DNA
gtgaataagatggatgattt

SEQ ID NO: 56689 - DNA, 20 bp, synthetic construct
  misc_feature 1..20: note = chemically synthesized
  source 1..20: mol_type = other DNA
gaataagatggatgatttta

SEQ ID NO: 56690 - DNA, 20 bp, synthetic construct
  misc_feature 1..20: note = chemically synthesized
  source 1..20: mol_type = other DNA
ttttagagttatacccaaat

SEQ ID NO: 56691 - DNA, 20 bp, synthetic construct
  misc_feature 1..20: note = chemically synthesized
  source 1..20: mol_type = other DNA
agagttatacccaaatcaga

SEQ ID NO: 56692 - DNA, 20 bp, synthetic construct
  misc_feature 1..20: note = chemically synthesized
  source 1..20: mol_type = other DNA
tcagacagactcaatataat

SEQ ID NO: 56693 - DNA, 20 bp, synthetic construct
  misc_feature 1..20: note = chemically synthesized
  source 1..20: mol_type = other DNA
cagactcaatataatgagtt

SEQ ID NO: 56694 - DNA, 20 bp, synthetic construct
  misc_feature 1..20: note = chemically synthesized
  source 1..20: mol_type = other DNA
gactcaatataatgagtttg

SEQ ID NO: 56695 - DNA, 20 bp, synthetic construct
  misc_feature 1..20: note = chemically synthesized
  source 1..20: mol_type = other DNA
ataatgagtttggagaaaat

SEQ ID NO: 56696 - DNA, 20 bp, synthetic construct
  misc_feature 1..20: note = chemically synthesized
  source 1..20: mol_type = other DNA
tgagtttggagaaaatcaga

SEQ ID NO: 56697 - DNA, 20 bp, synthetic construct
  misc_feature 1..20: note = chemically synthesized
  source 1..20: mol_type = other DNA
gtttggagaaaatcagaaag

SEQ ID NO: 56698 - DNA, 20 bp, synthetic construct
  misc_feature 1..20: note = chemically synthesized
  source 1..20: mol_type = other DNA
tggagaaaatcagaaagcag

SEQ ID NO: 56699 - DNA, 20 bp, synthetic construct
  misc_feature 1..20: note = chemically synthesized
  source 1..20: mol_type = other DNA
gagaaaatcagaaagcagaa

SEQ ID NO: 56700 - DNA, 20 bp, synthetic construct
  misc_feature 1..20: note = chemically synthesized
  source 1..20: mol_type = other DNA
agaaaatcagaaagcagaag

SEQ ID NO: 56701 - DNA, 20 bp, synthetic construct
  misc_feature 1..20: note = chemically synthesized
  source 1..20: mol_type = other DNA
atcagaaagcagaagaggaa

SEQ ID NO: 56702 - DNA, 20 bp, synthetic construct
  misc_feature 1..20: note = chemically synthesized
  source 1..20: mol_type = other DNA
gaggaacagtaacactgact

SEQ ID NO: 56703 - DNA, 20 bp, synthetic construct
  misc_feature 1..20: note = chemically synthesized
  source 1..20: mol_type = other DNA
gaaacttcttttgtttgcat

SEQ ID NO: 56704 - DNA, 20 bp, synthetic construct
  misc_feature 1..20: note = chemically synthesized
  source 1..20: mol_type = other DNA
aaacttcttttgtttgcatc

SEQ ID NO: 56705 - DNA, 20 bp, synthetic construct
  misc_feature 1..20: note = chemically synthesized
  source 1..20: mol_type = other DNA
acttcttttgtttgcatcag

SEQ ID NO: 56706 - DNA, 20 bp, synthetic construct
  misc_feature 1..20: note = chemically synthesized
  source 1..20: mol_type = other DNA
tatgtccatttccaacatca

SEQ ID NO: 56707 - DNA, 20 bp, synthetic construct
  misc_feature 1..20: note = chemically synthesized
  source 1..20: mol_type = other DNA
catgccctctgtgttgacac

SEQ ID NO: 56708 - DNA, 20 bp, synthetic construct
  misc_feature 1..20: note = chemically synthesized
  source 1..20: mol_type = other DNA
gccctctgtgttgacactag

SEQ ID NO: 56709 - DNA, 20 bp, synthetic construct
  misc_feature 1..20: note = chemically synthesized
  source 1..20: mol_type = other DNA
ccctctgtgttgacactagt

SEQ ID NO: 56710 - DNA, 20 bp, synthetic construct
  misc_feature 1..20: note = chemically synthesized
  source 1..20: mol_type = other DNA
cctctgtgttgacactagta

SEQ ID NO: 56711 - DNA, 20 bp, synthetic construct
  misc_feature 1..20: note = chemically synthesized
  source 1..20: mol_type = other DNA
gttgacactagtagggatcc

SEQ ID NO: 56712 - DNA, 20 bp, synthetic construct
  misc_feature 1..20: note = chemically synthesized
  source 1..20: mol_type = other DNA
ttgacactagtagggatccc

SEQ ID NO: 56713 - DNA, 20 bp, synthetic construct
  misc_feature 1..20: note = chemically synthesized
  source 1..20: mol_type = other DNA
actagtagggatcccaggcc

SEQ ID NO: 56714 - DNA, 20 bp, synthetic construct
  misc_feature 1..20: note = chemically synthesized
  source 1..20: mol_type = other DNA
tcccaggcctagaatctgtg

SEQ ID NO: 56715 - DNA, 20 bp, synthetic construct
  misc_feature 1..20: note = chemically synthesized
  source 1..20: mol_type = other DNA
gcctagaatctgtgcagtgc

SEQ ID NO: 56716 - DNA, 20 bp, synthetic construct
  misc_feature 1..20: note = chemically synthesized
  source 1..20: mol_type = other DNA
gaatctgtgcagtgctggat

SEQ ID NO: 56717 - DNA, 20 bp, synthetic construct
  misc_feature 1..20: note = chemically synthesized
  source 1..20: mol_type = other DNA
aatctgtgcagtgctggatt

SEQ ID NO: 56718 - DNA, 20 bp, synthetic construct
  misc_feature 1..20: note = chemically synthesized
  source 1..20: mol_type = other DNA
atttatctcattgctatgat

SEQ ID NO: 56719 - DNA, 20 bp, synthetic construct
  misc_feature 1..20: note = chemically synthesized
  source 1..20: mol_type = other DNA
attggaaattccttgcttct

SEQ ID NO: 56720 - DNA, 20 bp, synthetic construct
  misc_feature 1..20: note = chemically synthesized
  source 1..20: mol_type = other DNA
ttctgagcatcatcaaatct

SEQ ID NO: 56721 - DNA, 20 bp, synthetic construct
  misc_feature 1..20: note = chemically synthesized
  source 1..20: mol_type = other DNA
agcatcatcaaatctgagcg

SEQ ID NO: 56722 - DNA, 20 bp, synthetic construct
  misc_feature 1..20: note = chemically synthesized
  source 1..20: mol_type = other DNA
aatctgagcgcagtctccat

SEQ ID NO: 56723 - DNA, 20 bp, synthetic construct
  misc_feature 1..20: note = chemically synthesized
  source 1..20: mol_type = other DNA
tgagcccttgtacattttct

SEQ ID NO: 56724 - DNA, 20 bp, synthetic construct
  misc_feature 1..20: note = chemically synthesized
  source 1..20: mol_type = other DNA
gagcccttgtacattttctt

SEQ ID NO: 56725 - DNA, 20 bp, synthetic construct
  misc_feature 1..20: note = chemically synthesized
  source 1..20: mol_type = other DNA
gtacattttcttaggcatgc

SEQ ID NO: 56726 - DNA, 20 bp, synthetic construct
  misc_feature 1..20: note = chemically synthesized
  source 1..20: mol_type = other DNA
tacattttcttaggcatgct

SEQ ID NO: 56727 - DNA, 20 bp, synthetic construct
  misc_feature 1..20: note = chemically synthesized
  source 1..20: mol_type = other DNA
cattttcttaggcatgctag

SEQ ID NO: 56728 - DNA, 20 bp, synthetic construct
  misc_feature 1..20: note = chemically synthesized
  source 1..20: mol_type = other DNA
cttaggcatgctaggagcca

SEQ ID NO: 56729 - DNA, 20 bp, synthetic construct
  misc_feature 1..20: note = chemically synthesized
  source 1..20: mol_type = other DNA
gccacagacattgcacttgc

SEQ ID NO: 56730 - DNA, 20 bp, synthetic construct
  misc_feature 1..20: note = chemically synthesized
  source 1..20: mol_type = other DNA
acagacattgcacttgctag

SEQ ID NO: 56731 - DNA, 20 bp, synthetic construct
  misc_feature 1..20: note = chemically synthesized
  source 1..20: mol_type = other DNA
ttgctagcagcattatgcca

SEQ ID NO: 56732 - DNA, 20 bp, synthetic construct
  misc_feature 1..20: note = chemically synthesized
  source 1..20: mol_type = other DNA
agcattatgccaaagatgct

SEQ ID NO: 56733 - DNA, 20 bp, synthetic construct
  misc_feature 1..20: note = chemically synthesized
  source 1..20: mol_type = other DNA
caaagatgcttggaatattc

SEQ ID NO: 56734 - DNA, 20 bp, synthetic construct
  misc_feature 1..20: note = chemically synthesized
  source 1..20: mol_type = other DNA
attcctgcttgcttcaaatg

SEQ ID NO: 56735 - DNA, 20 bp, synthetic construct
  misc_feature 1..20: note = chemically synthesized
  source 1..20: mol_type = other DNA
tgtggttcatccacacattg

SEQ ID NO: 56736 - DNA, 20 bp, synthetic construct
  misc_feature 1..20: note = chemically synthesized
  source 1..20: mol_type = other DNA
gtggttcatccacacattgc

SEQ ID NO: 56737 - DNA, 20 bp, synthetic construct
  misc_feature 1..20: note = chemically synthesized
  source 1..20: mol_type = other DNA
tggttcatccacacattgca

SEQ ID NO: 56738 - DNA, 20 bp, synthetic construct
  misc_feature 1..20: note = chemically synthesized
  source 1..20: mol_type = other DNA
catccacacattgcagggta

SEQ ID NO: 56739 - DNA, 20 bp, synthetic construct
  misc_feature 1..20: note = chemically synthesized
  source 1..20: mol_type = other DNA
tccacacattgcagggtata

SEQ ID NO: 56740 - DNA, 20 bp, synthetic construct
  misc_feature 1..20: note = chemically synthesized
  source 1..20: mol_type = other DNA
cacattgcagggtatagagt

SEQ ID NO: 56741 - DNA, 20 bp, synthetic construct
  misc_feature 1..20: note = chemically synthesized
  source 1..20: mol_type = other DNA
acattgcagggtatagagtc

SEQ ID NO: 56742 - DNA, 20 bp, synthetic construct
  misc_feature 1..20: note = chemically synthesized
  source 1..20: mol_type = other DNA
tatagagtcaggcatccttg

SEQ ID NO: 56743 - DNA, 20 bp, synthetic construct
  misc_feature 1..20: note = chemically synthesized
  source 1..20: mol_type = other DNA
gtcaggcatccttgtggcca

SEQ ID NO: 56744 - DNA, 20 bp, synthetic construct
  misc_feature 1..20: note = chemically synthesized
  source 1..20: mol_type = other DNA
catccttgtggccatggccc

SEQ ID NO: 56745 - DNA, 20 bp, synthetic construct
  misc_feature 1..20: note = chemically synthesized
  source 1..20: mol_type = other DNA
catggccctggaccgttatg

SEQ ID NO: 56746 - DNA, 20 bp, synthetic construct
  misc_feature 1..20: note = chemically synthesized
  source 1..20: mol_type = other DNA
gtggccatctgttatccact

SEQ ID NO: 56747 - DNA, 20 bp, synthetic construct
  misc_feature 1..20: note = chemically synthesized
  source 1..20: mol_type = other DNA
atgccaacatcttcacccac

SEQ ID NO: 56748 - DNA, 20 bp, synthetic construct
  misc_feature 1..20: note = chemically synthesized
  source 1..20: mol_type = other DNA
tcacccaccagcttgtcatt

SEQ ID NO: 56749 - DNA, 20 bp, synthetic construct
  misc_feature 1..20: note = chemically synthesized
  source 1..20: mol_type = other DNA
ccaccagcttgtcattcaga

SEQ ID NO: 56750 - DNA, 20 bp, synthetic construct
  misc_feature 1..20: note = chemically synthesized
  source 1..20: mol_type = other DNA
caccagcttgtcattcagat

SEQ ID NO: 56751 - DNA, 20 bp, synthetic construct
  misc_feature 1..20: note = chemically synthesized
  source 1..20: mol_type = other DNA
tgtcattcagataggaacta

SEQ ID NO: 56752 - DNA, 20 bp, synthetic construct
  misc_feature 1..20: note = chemically synthesized
  source 1..20: mol_type = other DNA
ataggaactatggtcgtact

SEQ ID NO: 56753 - DNA, 20 bp, synthetic construct
  misc_feature 1..20: note = chemically synthesized
  source 1..20: mol_type = other DNA
taggaactatggtcgtactc

SEQ ID NO: 56754 - DNA, 20 bp, synthetic construct
  misc_feature 1..20: note = chemically synthesized
  source 1..20: mol_type = other DNA
aggaactatggtcgtactca

SEQ ID NO: 56755 - DNA, 20 bp, synthetic construct
  misc_feature 1..20: note = chemically synthesized
  source 1..20: mol_type = other DNA
actcagggctgctattcttg

SEQ ID NO: 56756 - DNA, 20 bp, synthetic construct
  misc_feature 1..20: note = chemically synthesized
  source 1..20: mol_type = other DNA
tattcttgtagccccatgcc

SEQ ID NO: 56757 - DNA, 20 bp, synthetic construct
  misc_feature 1..20: note = chemically synthesized
  source 1..20: mol_type = other DNA
ccccatgcctagtactgata

SEQ ID NO: 56758 - DNA, 20 bp, synthetic construct
  misc_feature 1..20: note = chemically synthesized
  source 1..20: mol_type = other DNA
gcctagtactgataaagtgc

SEQ ID NO: 56759 - DNA, 20 bp, synthetic construct
  misc_feature 1..20: note = chemically synthesized
  source 1..20: mol_type = other DNA
gtttcaattttatcacacaa

SEQ ID NO: 56760 - DNA, 20 bp, synthetic construct
  misc_feature 1..20: note = chemically synthesized
  source 1..20: mol_type = other DNA
tcatctcccactcctactgt

SEQ ID NO: 56761 - DNA, 20 bp, synthetic construct
  misc_feature 1..20: note = chemically synthesized
  source 1..20: mol_type = other DNA
ccactcctactgtgagcata

SEQ ID NO: 56762 - DNA, 20 bp, synthetic construct
  misc_feature 1..20: note = chemically synthesized
  source 1..20: mol_type = other DNA
gcatatggccattgtgaaac

SEQ ID NO: 56763 - DNA, 20 bp, synthetic construct
  misc_feature 1..20: note = chemically synthesized
  source 1..20: mol_type = other DNA
tatggccattgtgaaactag

SEQ ID NO: 56764 - DNA, 20 bp, synthetic construct
  misc_feature 1..20: note = chemically synthesized
  source 1..20: mol_type = other DNA
ggccattgtgaaactagcag

SEQ ID NO: 56765 - DNA, 20 bp, synthetic construct
  misc_feature 1..20: note = chemically synthesized
  source 1..20: mol_type = other DNA
actagcagcagcaaatgttc

SEQ ID NO: 56766 - DNA, 20 bp, synthetic construct
  misc_feature 1..20: note = chemically synthesized
  source 1..20: mol_type = other DNA
gttcaagtcaacaaaatcta

SEQ ID NO: 56767 - DNA, 20 bp, synthetic construct
  misc_feature 1..20: note = chemically synthesized
  source 1..20: mol_type = other DNA
caaaatctatggtttgtttg

SEQ ID NO: 56768 - DNA, 20 bp, synthetic construct
  misc_feature 1..20: note = chemically synthesized
  source 1..20: mol_type = other DNA
tttgtttgtggccttcactg

SEQ ID NO: 56769 - DNA, 20 bp, synthetic construct
  misc_feature 1..20: note = chemically synthesized
  source 1..20: mol_type = other DNA
gtttgtggccttcactgtag

SEQ ID NO: 56770 - DNA, 20 bp, synthetic construct
  misc_feature 1..20: note = chemically synthesized
  source 1..20: mol_type = other DNA
tttgtggccttcactgtagc

SEQ ID NO: 56771 - DNA, 20 bp, synthetic construct
  misc_feature 1..20: note = chemically synthesized
  source 1..20: mol_type = other DNA
tcatcacattgtcctacatc

SEQ ID NO: 56772 - DNA, 20 bp, synthetic construct
  misc_feature 1..20: note = chemically synthesized
  source 1..20: mol_type = other DNA
ctacatccagatatttatca

SEQ ID NO: 56773 - DNA, 20 bp, synthetic construct
  misc_feature 1..20: note = chemically synthesized
  source 1..20: mol_type = other DNA
tcacagtttttcgtttgccc

SEQ ID NO: 56774 - DNA, 20 bp, synthetic construct
  misc_feature 1..20: note = chemically synthesized
  source 1..20: mol_type = other DNA
cagtttttcgtttgccccag

SEQ ID NO: 56775 - DNA, 20 bp, synthetic construct
  misc_feature 1..20: note = chemically synthesized
  source 1..20: mol_type = other DNA
agtttttcgtttgccccaga

SEQ ID NO: 56776 - DNA, 20 bp, synthetic construct
  misc_feature 1..20: note = chemically synthesized
  source 1..20: mol_type = other DNA
tttttcgtttgccccagaag

SEQ ID NO: 56777 - DNA, 20 bp, synthetic construct
  misc_feature 1..20: note = chemically synthesized
  source 1..20: mol_type = other DNA
ttttcgtttgccccagaagg

SEQ ID NO: 56778 - DNA, 20 bp, synthetic construct
  misc_feature 1..20: note = chemically synthesized
  source 1..20: mol_type = other DNA
cgtttgccccagaaggaggc

SEQ ID NO: 56779 - DNA, 20 bp, synthetic construct
  misc_feature 1..20: note = chemically synthesized
  source 1..20: mol_type = other DNA
gtttgccccagaaggaggct

SEQ ID NO: 56780 - DNA, 20 bp, synthetic construct
  misc_feature 1..20: note = chemically synthesized
  source 1..20: mol_type = other DNA
ccagaaggaggctaggttta

SEQ ID NO: 56781 - DNA, 20 bp, synthetic construct
  misc_feature 1..20: note = chemically synthesized
  source 1..20: mol_type = other DNA
ctcacatctgtgtcttcctc

SEQ ID NO: 56782 - DNA, 20 bp, synthetic construct
  misc_feature 1..20: note = chemically synthesized
  source 1..20: mol_type = other DNA
ttcttctccttcttcacaca

SEQ ID NO: 56783 - DNA, 20 bp, synthetic construct
  misc_feature 1..20: note = chemically synthesized
  source 1..20: mol_type = other DNA
tcttctccttcttcacacat

SEQ ID NO: 56784 - DNA, 20 bp, synthetic construct
  misc_feature 1..20: note = chemically synthesized
  source 1..20: mol_type = other DNA
tccttcttcacacataggtt

SEQ ID NO: 56785 - DNA, 20 bp, synthetic construct
  misc_feature 1..20: note = chemically synthesized
  source 1..20: mol_type = other DNA
ccttcttcacacataggttt

SEQ ID NO: 56786 - DNA, 20 bp, synthetic construct
  misc_feature 1..20: note = chemically synthesized
  source 1..20: mol_type = other DNA
tatatccatattctcttttc

SEQ ID NO: 56787 - DNA, 20 bp, synthetic construct
  misc_feature 1..20: note = chemically synthesized
  source 1..20: mol_type = other DNA
cttttctagcatttacttgc

SEQ ID NO: 56788 - DNA, 20 bp, synthetic construct
  misc_feature 1..20: note = chemically synthesized
  source 1..20: mol_type = other DNA
tttctcaatccacttgtcta

SEQ ID NO: 56789 - DNA, 20 bp, synthetic construct
  misc_feature 1..20: note = chemically synthesized
  source 1..20: mol_type = other DNA
atccacttgtctatggtgca

SEQ ID NO: 56790 - DNA, 20 bp, synthetic construct
  misc_feature 1..20: note = chemically synthesized
  source 1..20: mol_type = other DNA
tctatggtgcaaagaccaca

SEQ ID NO: 56791 - DNA, 20 bp, synthetic construct
  misc_feature 1..20: note = chemically synthesized
  source 1..20: mol_type = other DNA
cacacagattcgcattcatg

SEQ ID NO: 56792 - DNA, 20 bp, synthetic construct
  misc_feature 1..20: note = chemically synthesized
  source 1..20: mol_type = other DNA
ctacatgcttttttcttttg

SEQ ID NO: 56793 - DNA, 20 bp, synthetic construct
  misc_feature 1..20: note = chemically synthesized
  source 1..20: mol_type = other DNA
catgcttttttcttttgcag

SEQ ID NO: 56794 - DNA, 20 bp, synthetic construct
  misc_feature 1..20: note = chemically synthesized
  source 1..20: mol_type = other DNA
aaacaaaaaacatattattt

SEQ ID NO: 56795 - DNA, 20 bp, synthetic construct
  misc_feature 1..20: note = chemically synthesized
  source 1..20: mol_type = other DNA
aaacatattatttgagatgc

SEQ ID NO: 56796 - DNA, 20 bp, synthetic construct
  misc_feature 1..20: note = chemically synthesized
  source 1..20: mol_type = other DNA
aacatattatttgagatgct

SEQ ID NO: 56797 - DNA, 20 bp, synthetic construct
  misc_feature 1..20: note = chemically synthesized
  source 1..20: mol_type = other DNA
gctgggtttgtgaaatctgc

SEQ ID NO: 56798 - DNA, 20 bp, synthetic construct
  misc_feature 1..20: note = chemically synthesized
  source 1..20: mol_type = other DNA
tgtgaaatctgccagcacaa

SEQ ID NO: 56799 - DNA, 20 bp, synthetic construct
  misc_feature 1..20: note = chemically synthesized
  source 1..20: mol_type = other DNA
aaatctgccagcacaatagc

SEQ ID NO: 56800 - DNA, 20 bp, synthetic construct
  misc_feature 1..20: note = chemically synthesized
  source 1..20: mol_type = other DNA
gccagcacaatagctggttt

SEQ ID NO: 56801 - DNA, 20 bp, synthetic construct
  misc_feature 1..20: note = chemically synthesized
  source 1..20: mol_type = other DNA
tagctggttttagatcatca

SEQ ID NO: 56802 - DNA, 20 bp, synthetic construct
  misc_feature 1..20: note = chemically synthesized
  source 1..20: mol_type = other DNA
tcatcatggctcatatcaat

SEQ ID NO: 56803 - DNA, 20 bp, synthetic construct
  misc_feature 1..20: note = chemically synthesized
  source 1..20: mol_type = other DNA
tcatggctcatatcaatcag

SEQ ID NO: 56804 - DNA, 20 bp, synthetic construct
  misc_feature 1..20: note = chemically synthesized
  source 1..20: mol_type = other DNA
catggctcatatcaatcagt

SEQ ID NO: 56805 - DNA, 20 bp, synthetic construct
  misc_feature 1..20: note = chemically synthesized
  source 1..20: mol_type = other DNA
gaattctacgtgactaatga

SEQ ID NO: 56806 - DNA, 20 bp, synthetic construct
  misc_feature 1..20: note = chemically synthesized
  source 1..20: mol_type = other DNA
tctacgtgactaatgaaagt

SEQ ID NO: 56807 - DNA, 20 bp, synthetic construct
  misc_feature 1..20: note = chemically synthesized
  source 1..20: mol_type = other DNA
acgtgactaatgaaagtgag

SEQ ID NO: 56808 - DNA, 20 bp, synthetic construct
  misc_feature 1..20: note = chemically synthesized
  source 1..20: mol_type = other DNA
gaaagtgagaagtgtgaaat

SEQ ID NO: 56809 - DNA, 20 bp, synthetic construct
  misc_feature 1..20: note = chemically synthesized
  source 1..20: mol_type = other DNA
tgagaagtgtgaaatgagtg

SEQ ID NO: 56810 - DNA, 20 bp, synthetic construct
  misc_feature 1..20: note = chemically synthesized
  source 1..20: mol_type = other DNA
gaagtgtgaaatgagtgaag

SEQ ID NO: 56811 - DNA, 20 bp, synthetic construct
  misc_feature 1..20: note = chemically synthesized
  source 1..20: mol_type = other DNA
attttttctcttttattctt

SEQ ID NO: 56812 - DNA, 20 bp, synthetic construct
  misc_feature 1..20: note = chemically synthesized
  source 1..20: mol_type = other DNA
ctcttttattctttagcccc

SEQ ID NO: 56813 - DNA, 20 bp, synthetic construct
  misc_feature 1..20: note = chemically synthesized
  source 1..20: mol_type = other DNA
ttattctttagcccctggtt

SEQ ID NO: 56814 - DNA, 20 bp, synthetic construct
  misc_feature 1..20: note = chemically synthesized
  source 1..20: mol_type = other DNA
cctggttgagttattcttct

SEQ ID NO: 56815 - DNA, 20 bp, synthetic construct
  misc_feature 1..20: note = chemically synthesized
  source 1..20: mol_type = other DNA
ttcttctaagaatatttctc

SEQ ID NO: 56816 - DNA, 20 bp, synthetic construct
  misc_feature 1..20: note = chemically synthesized
  source 1..20: mol_type = other DNA
tcttctaagaatatttctcc

SEQ ID NO: 56817 - DNA, 20 bp, synthetic construct
  misc_feature 1..20: note = chemically synthesized
  source 1..20: mol_type = other DNA
ttctaagaatatttctccag

SEQ ID NO: 56818 - DNA, 20 bp, synthetic construct
  misc_feature 1..20: note = chemically synthesized
  source 1..20: mol_type = other DNA
tctaagaatatttctccagg

SEQ ID NO: 56819 - DNA, 20 bp, synthetic construct
  misc_feature 1..20: note = chemically synthesized
  source 1..20: mol_type = other DNA
cactgaatttaaatgcacct

SEQ ID NO: 56820 - DNA, 20 bp, synthetic construct
  misc_feature 1..20: note = chemically synthesized
  source 1..20: mol_type = other DNA
actgaatttaaatgcaccta

SEQ ID NO: 56821 - DNA, 20 bp, synthetic construct
  misc_feature 1..20: note = chemically synthesized
  source 1..20: mol_type = other DNA
gctcgttgttctgaaacatc

SEQ ID NO: 56822 - DNA, 20 bp, synthetic construct
  misc_feature 1..20: note = chemically synthesized
  source 1..20: mol_type = other DNA
ctcgttgttctgaaacatcc

SEQ ID NO: 56823 - DNA, 20 bp, synthetic construct
  misc_feature 1..20: note = chemically synthesized
  source 1..20: mol_type = other DNA
tcgttgttctgaaacatcca

SEQ ID NO: 56824 - DNA, 20 bp, synthetic construct
  misc_feature 1..20: note = chemically synthesized
  source 1..20: mol_type = other DNA
tccagggactcaatgaaaac

SEQ ID NO: 56825 - DNA, 20 bp, synthetic construct
  misc_feature 1..20: note = chemically synthesized
  source 1..20: mol_type = other DNA
tgccttaaaaaaaaaaatca

SEQ ID NO: 56826 - DNA, 20 bp, synthetic construct
  misc_feature 1..20: note = chemically synthesized
  source 1..20: mol_type = other DNA
gccttaaaaaaaaaaatcaa

SEQ ID NO: 56827 - DNA, 20 bp, synthetic construct
  misc_feature 1..20: note = chemically synthesized
  source 1..20: mol_type = other DNA
ttaaaaaaaaaaatcaaagg

SEQ ID NO: 56828 - DNA, 20 bp, synthetic construct
  misc_feature 1..20: note = chemically synthesized
  source 1..20: mol_type = other DNA
tgttaactgtgttcttgtca

SEQ ID NO: 56829 - DNA, 20 bp, synthetic construct
  misc_feature 1..20: note = chemically synthesized
  source 1..20: mol_type = other DNA
aagaaaatcttatgaatatc

SEQ ID NO: 56830 - DNA, 20 bp, synthetic construct
  misc_feature 1..20: note = chemically synthesized
  source 1..20: mol_type = other DNA
gaaaatcttatgaatatcaa

SEQ ID NO: 56831 - DNA, 20 bp, synthetic construct
  misc_feature 1..20: note = chemically synthesized
  source 1..20: mol_type = other DNA
atgaatatcaagagacaata

SEQ ID NO: 56832 - DNA, 20 bp, synthetic construct
  misc_feature 1..20: note = chemically synthesized
  source 1..20: mol_type = other DNA
taaaaatttaaatacatttt

SEQ ID NO: 56833 - DNA, 20 bp, synthetic construct
  misc_feature 1..20: note = chemically synthesized
  source 1..20: mol_type = other DNA
aaaatttaaatacattttca

SEQ ID NO: 56834 - DNA, 20 bp, synthetic construct
  misc_feature 1..20: note = chemically synthesized
  source 1..20: mol_type = other DNA
atacattttcagagtcatac

SEQ ID NO: 56835 - DNA, 20 bp, synthetic construct
  misc_feature 1..20: note = chemically synthesized
  source 1..20: mol_type = other DNA
tacattttcagagtcataca

SEQ ID NO: 56836 - DNA, 20 bp, synthetic construct
  misc_feature 1..20: note = chemically synthesized
  source 1..20: mol_type = other DNA
cagagtcatacaaggaatta

SEQ ID NO: 56837 - DNA, 20 bp, synthetic construct
  misc_feature 1..20: note = chemically synthesized
  source 1..20: mol_type = other DNA
agagtcatacaaggaattac

SEQ ID NO: 56838 - DNA, 20 bp, synthetic construct
  misc_feature 1..20: note = chemically synthesized
  source 1..20: mol_type = other DNA
ggaattacaggcacaaaaat

SEQ ID NO: 56839 - DNA, 20 bp, synthetic construct
  misc_feature 1..20: note = chemically synthesized
  source 1..20: mol_type = other DNA
acaggcacaaaaattagaac

SEQ ID NO: 56840 - DNA, 20 bp, synthetic construct
  misc_feature 1..20: note = chemically synthesized
  source 1..20: mol_type = other DNA
caggcacaaaaattagaacc

SEQ ID NO: 56841 - DNA, 20 bp, synthetic construct
  misc_feature 1..20: note = chemically synthesized
  source 1..20: mol_type = other DNA
atattaaaaatactatacta

SEQ ID NO: 56842 - DNA, 20 bp, synthetic construct
  misc_feature 1..20: note = chemically synthesized
  source 1..20: mol_type = other DNA
actacagaatcgtgacataa

SEQ ID NO: 56843 - DNA, 20 bp, synthetic construct
  misc_feature 1..20: note = chemically synthesized
  source 1..20: mol_type = other DNA
tcgtgacataatagtaaatc

SEQ ID NO: 56844 - DNA, 20 bp, synthetic construct
  misc_feature 1..20: note = chemically synthesized
  source 1..20: mol_type = other DNA
acataatagtaaatctggca

SEQ ID NO: 56845 - DNA, 20 bp, synthetic construct
  misc_feature 1..20: note = chemically synthesized
  source 1..20: mol_type = other DNA
gcacagtgaataattctcat

SEQ ID NO: 56846 - DNA, 20 bp, synthetic construct
  misc_feature 1..20: note = chemically synthesized
  source 1..20: mol_type = other DNA
agtttgtacctatgtaattc

SEQ ID NO: 56847 - DNA, 20 bp, synthetic construct
  misc_feature 1..20: note = chemically synthesized
  source 1..20: mol_type = other DNA
gtacctatgtaattctggaa

SEQ ID NO: 56848 - DNA, 20 bp, synthetic construct
  misc_feature 1..20: note = chemically synthesized
  source 1..20: mol_type = other DNA
acctatgtaattctggaaaa

SEQ ID NO: 56849 - DNA, 20 bp, synthetic construct
  misc_feature 1..20: note = chemically synthesized
  source 1..20: mol_type = other DNA
ctatgtaattctggaaaaga

SEQ ID NO: 56850 - DNA, 20 bp, synthetic construct
  misc_feature 1..20: note = chemically synthesized
  source 1..20: mol_type = other DNA
ttctggaaaagagagactga

SEQ ID NO: 56851 - DNA, 20 bp, synthetic construct
  misc_feature 1..20: note = chemically synthesized
  source 1..20: mol_type = other DNA
tctggaaaagagagactgaa

SEQ ID NO: 56852 - DNA, 20 bp, synthetic construct
  misc_feature 1..20: note = chemically synthesized
  source 1..20: mol_type = other DNA
ggaaaagagagactgaaagg

SEQ ID NO: 56853 - DNA, 20 bp, synthetic construct
  misc_feature 1..20: note = chemically synthesized
  source 1..20: mol_type = other DNA
aaaagagagactgaaaggaa

SEQ ID NO: 56854 - DNA, 20 bp, synthetic construct
  misc_feature 1..20: note = chemically synthesized
  source 1..20: mol_type = other DNA
aagagagactgaaaggaaga

SEQ ID NO: 56855 - DNA, 20 bp, synthetic construct
  misc_feature 1..20: note = chemically synthesized
  source 1..20: mol_type = other DNA
agagagactgaaaggaagag

SEQ ID NO: 56856 - DNA, 20 bp, synthetic construct
  misc_feature 1..20: note = chemically synthesized
  source 1..20: mol_type = other DNA
gagactgaaaggaagagagg

SEQ ID NO: 56857 - DNA, 20 bp, synthetic construct
  misc_feature 1..20: note = chemically synthesized
  source 1..20: mol_type = other DNA
agactgaaaggaagagaggt

SEQ ID NO: 56858 - DNA, 20 bp, synthetic construct
  misc_feature 1..20: note = chemically synthesized
  source 1..20: mol_type = other DNA
gactgaaaggaagagaggtg

SEQ ID NO: 56859 - DNA, 20 bp, synthetic construct
  misc_feature 1..20: note = chemically synthesized
  source 1..20: mol_type = other DNA
aaaggaagagaggtggggaa

SEQ ID NO: 56860 - DNA, 20 bp, synthetic construct
  misc_feature 1..20: note = chemically synthesized
  source 1..20: mol_type = other DNA
aaggaagagaggtggggaat

SEQ ID NO: 56861 - DNA, 20 bp, synthetic construct
  misc_feature 1..20: note = chemically synthesized
  source 1..20: mol_type = other DNA
gaagagaggtggggaatggg

SEQ ID NO: 56862 - DNA, 20 bp, synthetic construct
  misc_feature 1..20: note = chemically synthesized
  source 1..20: mol_type = other DNA
aagagaggtggggaatgggc

SEQ ID NO: 56863 - DNA, 20 bp, synthetic construct
  misc_feature 1..20: note = chemically synthesized
  source 1..20: mol_type = other DNA
gaggtggggaatgggcaggc

SEQ ID NO: 56864 - DNA, 20 bp, synthetic construct
  misc_feature 1..20: note = chemically synthesized
  source 1..20: mol_type = other DNA
aggtggggaatgggcaggca

SEQ ID NO: 56865 - DNA, 20 bp, synthetic construct
  misc_feature 1..20: note = chemically synthesized
  source 1..20: mol_type = other DNA
ggtggggaatgggcaggcaa

SEQ ID NO: 56866 - DNA, 20 bp, synthetic construct
  misc_feature 1..20: note = chemically synthesized
  source 1..20: mol_type = other DNA
gggaatgggcaggcaaggga

SEQ ID NO: 56867 - DNA, 20 bp, synthetic construct
  misc_feature 1..20: note = chemically synthesized
  source 1..20: mol_type = other DNA
aatgggcaggcaagggaaag

SEQ ID NO: 56868 - DNA, 20 bp, synthetic construct
  misc_feature 1..20: note = chemically synthesized
  source 1..20: mol_type = other DNA
tgggcaggcaagggaaagaa

SEQ ID NO: 56869 - DNA, 20 bp, synthetic construct
  misc_feature 1..20: note = chemically synthesized
  source 1..20: mol_type = other DNA
ggcaggcaagggaaagaaga

SEQ ID NO: 56870 - DNA, 20 bp, synthetic construct
  misc_feature 1..20: note = chemically synthesized
  source 1..20: mol_type = other DNA
ggaaagaagagagaaataac

SEQ ID NO: 56871 - DNA, 20 bp, synthetic construct
  misc_feature 1..20: note = chemically synthesized
  source 1..20: mol_type = other DNA
agaaataacaagtgtacaca

SEQ ID NO: 56872 - DNA, 20 bp, synthetic construct
  misc_feature 1..20: note = chemically synthesized
  source 1..20: mol_type = other DNA
gaaataacaagtgtacacat

SEQ ID NO: 56873 - DNA, 20 bp, synthetic construct
  misc_feature 1..20: note = chemically synthesized
  source 1..20: mol_type = other DNA
acaagtgtacacataggatg

SEQ ID NO: 56874 - DNA, 20 bp, synthetic construct
  misc_feature 1..20: note = chemically synthesized
  source 1..20: mol_type = other DNA
aagtgtacacataggatgtg

SEQ ID NO: 56875 - DNA, 20 bp, synthetic construct
  misc_feature 1..20: note = chemically synthesized
  source 1..20: mol_type = other DNA
tacacataggatgtggagtt

SEQ ID NO: 56876 - DNA, 20 bp, synthetic construct
  misc_feature 1..20: note = chemically synthesized
  source 1..20: mol_type = other DNA
cacataggatgtggagttca

SEQ ID NO: 56877 - DNA, 20 bp, synthetic construct
  misc_feature 1..20: note = chemically synthesized
  source 1..20: mol_type = other DNA
cataggatgtggagttcaga

SEQ ID NO: 56878 - DNA, 20 bp, synthetic construct
  misc_feature 1..20: note = chemically synthesized
  source 1..20: mol_type = other DNA
tgtggagttcagagagaatg

SEQ ID NO: 56879 - DNA, 20 bp, synthetic construct
  misc_feature 1..20: note = chemically synthesized
  source 1..20: mol_type = other DNA
gaagcattgaaatctaacca

SEQ ID NO: 56880 - DNA, 20 bp, synthetic construct
  misc_feature 1..20: note = chemically synthesized
  source 1..20: mol_type = other DNA
gcattgaaatctaaccaaag

SEQ ID NO: 56881 - DNA, 20 bp, synthetic construct
  misc_feature 1..20: note = chemically synthesized
  source 1..20: mol_type = other DNA
cattgaaatctaaccaaagc

SEQ ID NO: 56882 - DNA, 20 bp, synthetic construct
  misc_feature 1..20: note = chemically synthesized
  source 1..20: mol_type = other DNA
attgaaatctaaccaaagca

SEQ ID NO: 56883 - DNA, 20 bp, synthetic construct
  misc_feature 1..20: note = chemically synthesized
  source 1..20: mol_type = other DNA
ttgaaatctaaccaaagcag

SEQ ID NO: 56884 - DNA, 20 bp, synthetic construct
  misc_feature 1..20: note = chemically synthesized
  source 1..20: mol_type = other DNA
gaaatctaaccaaagcaggg

SEQ ID NO: 56885 - DNA, 20 bp, synthetic construct
  misc_feature 1..20: note = chemically synthesized
  source 1..20: mol_type = other DNA
atttattgtattttgttttt

SEQ ID NO: 56886 - DNA, 20 bp, synthetic construct
  misc_feature 1..20: note = chemically synthesized
  source 1..20: mol_type = other DNA
attgtattttgttttttggt

SEQ ID NO: 56887 - DNA, 20 bp, synthetic construct
  misc_feature 1..20: note = chemically synthesized
  source 1..20: mol_type = other DNA
ttgtattttgttttttggtt

SEQ ID NO: 56888 - DNA, 20 bp, synthetic construct
  misc_feature 1..20: note = chemically synthesized
  source 1..20: mol_type = other DNA
tattttgttttttggttagg

SEQ ID NO: 56889 - DNA, 20 bp, synthetic construct
  misc_feature 1..20: note = chemically synthesized
  source 1..20: mol_type = other DNA
ggtagttacctctgattctt

SEQ ID NO: 56890 - DNA, 20 bp, synthetic construct
  misc_feature 1..20: note = chemically synthesized
  source 1..20: mol_type = other DNA
gtagttacctctgattcttg

SEQ ID NO: 56891 - DNA, 20 bp, synthetic construct
  misc_feature 1..20: note = chemically synthesized
  source 1..20: mol_type = other DNA
ctctgattcttgaggaatga

SEQ ID NO: 56892 - DNA, 20 bp, synthetic construct
  misc_feature 1..20: note = chemically synthesized
  source 1..20: mol_type = other DNA
attcttgaggaatgatggat

SEQ ID NO: 56893 - DNA, 20 bp, synthetic construct
  misc_feature 1..20: note = chemically synthesized
  source 1..20: mol_type = other DNA
cttgaggaatgatggatgag

SEQ ID NO: 56894 - DNA, 20 bp, synthetic construct
  misc_feature 1..20: note = chemically synthesized
  source 1..20: mol_type = other DNA
ggaatgatggatgagtagcc

SEQ ID NO: 56895 - DNA, 20 bp, synthetic construct
  misc_feature 1..20: note = chemically synthesized
  source 1..20: mol_type = other DNA
gaatgatggatgagtagcca

SEQ ID NO: 56896 - DNA, 20 bp, synthetic construct
  misc_feature 1..20: note = chemically synthesized
  source 1..20: mol_type = other DNA
tgatggatgagtagccaagg

SEQ ID NO: 56897 - DNA, 20 bp, synthetic construct
  misc_feature 1..20: note = chemically synthesized
  source 1..20: mol_type = other DNA
ggatgagtagccaaggaagt

SEQ ID NO: 56898 - DNA, 20 bp, synthetic construct
  misc_feature 1..20: note = chemically synthesized
  source 1..20: mol_type = other DNA
gaagtaagaacacatcatgc

SEQ ID NO: 56899 - DNA, 20 bp, synthetic construct
  misc_feature 1..20: note = chemically synthesized
  source 1..20: mol_type = other DNA
aagtaagaacacatcatgcc

SEQ ID NO: 56900 - DNA, 20 bp, synthetic construct
  misc_feature 1..20: note = chemically synthesized
  source 1..20: mol_type = other DNA
taagaacacatcatgccagg

SEQ ID NO: 56901 - DNA, 20 bp, synthetic construct
  misc_feature 1..20: note = chemically synthesized
  source 1..20: mol_type = other DNA
aacacatcatgccaggtaga

SEQ ID NO: 56902 - DNA, 20 bp, synthetic construct
  misc_feature 1..20: note = chemically synthesized
  source 1..20: mol_type = other DNA
acatcatgccaggtagatag

SEQ ID NO: 56903 - DNA, 20 bp, synthetic construct
  misc_feature 1..20: note = chemically synthesized
  source 1..20: mol_type = other DNA
atcatgccaggtagatagta

SEQ ID NO: 56904 - DNA, 20 bp, synthetic construct
  misc_feature 1..20: note = chemically synthesized
  source 1..20: mol_type = other DNA
tcatgccaggtagatagtag

SEQ ID NO: 56905 - DNA, 20 bp, synthetic construct
  misc_feature 1..20: note = chemically synthesized
  source 1..20: mol_type = other DNA
atgccaggtagatagtagag

SEQ ID NO: 56906 - DNA, 20 bp, synthetic construct
  misc_feature 1..20: note = chemically synthesized
  source 1..20: mol_type = other DNA
atagtagaggagatttaaac

SEQ ID NO: 56907 - DNA, 20 bp, synthetic construct
  misc_feature 1..20: note = chemically synthesized
  source 1..20: mol_type = other DNA
gagatttaaactagataatg

SEQ ID NO: 56908 - DNA, 20 bp, synthetic construct
  misc_feature 1..20: note = chemically synthesized
  source 1..20: mol_type = other DNA
taaactagataatgtagttt

SEQ ID NO: 56909 - DNA, 20 bp, synthetic construct
  misc_feature 1..20: note = chemically synthesized
  source 1..20: mol_type = other DNA
aaactagataatgtagttta

SEQ ID NO: 56910 - DNA, 20 bp, synthetic construct
  misc_feature 1..20: note = chemically synthesized
  source 1..20: mol_type = other DNA
aatgtagtttaaggtaactc

SEQ ID NO: 56911 - DNA, 20 bp, synthetic construct
  misc_feature 1..20: note = chemically synthesized
  source 1..20: mol_type = other DNA
taactctagttttttcaata

SEQ ID NO: 56912 - DNA, 20 bp, synthetic construct
  misc_feature 1..20: note = chemically synthesized
  source 1..20: mol_type = other DNA
tagttttttcaatatggtat

SEQ ID NO: 56913 - DNA, 20 bp, synthetic construct
  misc_feature 1..20: note = chemically synthesized
  source 1..20: mol_type = other DNA
tttcaatatggtatgagtgc

SEQ ID NO: 56914 - DNA, 20 bp, synthetic construct
  misc_feature 1..20: note = chemically synthesized
  source 1..20: mol_type = other DNA
ttcaatatggtatgagtgca

SEQ ID NO: 56915 - DNA, 20 bp, synthetic construct
  misc_feature 1..20: note = chemically synthesized
  source 1..20: mol_type = other DNA
aatatggtatgagtgcaagg

SEQ ID NO: 56916 - DNA, 20 bp, synthetic construct
  misc_feature 1..20: note = chemically synthesized
  source 1..20: mol_type = other DNA
tatgagtgcaaggtagaact

SEQ ID NO: 56917 - DNA, 20 bp, synthetic construct
  misc_feature 1..20: note = chemically synthesized
  source 1..20: mol_type = other DNA
atgagtgcaaggtagaactt

SEQ ID NO: 56918 - DNA, 20 bp, synthetic construct
  misc_feature 1..20: note = chemically synthesized
  source 1..20: mol_type = other DNA
tgagtgcaaggtagaacttg

SEQ ID NO: 56919 - DNA, 20 bp, synthetic construct
  misc_feature 1..20: note = chemically synthesized
  source 1..20: mol_type = other DNA
agtgcaaggtagaacttggg

SEQ ID NO: 56920 - DNA, 20 bp, synthetic construct
  misc_feature 1..20: note = chemically synthesized
  source 1..20: mol_type = other DNA
aaggtagaacttggggagac

SEQ ID NO: 56921 - DNA, 20 bp, synthetic construct
  misc_feature 1..20: note = chemically synthesized
  source 1..20: mol_type = other DNA
aggtagaacttggggagaca

SEQ ID NO: 56922 - DNA, 20 bp, synthetic construct
  misc_feature 1..20: note = chemically synthesized
  source 1..20: mol_type = other DNA
gaaaatatgaatatcaaaaa

SEQ ID NO: 56923 - DNA, 20 bp, synthetic construct
  misc_feature 1..20: note = chemically synthesized
  source 1..20: mol_type = other DNA
aaatggctattaatgttgtg

SEQ ID NO: 56924 - DNA, 20 bp, synthetic construct
  misc_feature 1..20: note = chemically synthesized
  source 1..20: mol_type = other DNA
atggctattaatgttgtgca

SEQ ID NO: 56925 - DNA, 20 bp, synthetic construct
  misc_feature 1..20: note = chemically synthesized
  source 1..20: mol_type = other DNA
ttaatgttgtgcagagttgc

SEQ ID NO: 56926 - DNA, 20 bp, synthetic construct
  misc_feature 1..20: note = chemically synthesized
  source 1..20: mol_type = other DNA
gttgctggactttattccaa

SEQ ID NO: 56927 - DNA, 20 bp, synthetic construct
  misc_feature 1..20: note = chemically synthesized
  source 1..20: mol_type = other DNA
caaaagctataatgtgccat

SEQ ID NO: 56928 - DNA, 20 bp, synthetic construct
  misc_feature 1..20: note = chemically synthesized
  source 1..20: mol_type = other DNA
aaagctataatgtgccattg

SEQ ID NO: 56929 - DNA, 20 bp, synthetic construct
  misc_feature 1..20: note = chemically synthesized
  source 1..20: mol_type = other DNA
agctataatgtgccattgga

SEQ ID NO: 56930 - DNA, 20 bp, synthetic construct
  misc_feature 1..20: note = chemically synthesized
  source 1..20: mol_type = other DNA
tttgtttgcttgtgttctac

SEQ ID NO: 56931 - DNA, 20 bp, synthetic construct
  misc_feature 1..20: note = chemically synthesized
  source 1..20: mol_type = other DNA
tttgcttgtgttctacaagt

SEQ ID NO: 56932 - DNA, 20 bp, synthetic construct
  misc_feature 1..20: note = chemically synthesized
  source 1..20: mol_type = other DNA
tgtgtgtgtgtgtgtctgct

SEQ ID NO: 56933 - DNA, 20 bp, synthetic construct
  misc_feature 1..20: note = chemically synthesized
  source 1..20: mol_type = other DNA
gtgtgtgtgtgtgtctgctt

SEQ ID NO: 56934 - DNA, 20 bp, synthetic construct
  misc_feature 1..20: note = chemically synthesized
  source 1..20: mol_type = other DNA
tgtgtgtctgcttgggcatg

SEQ ID NO: 56935 - DNA, 20 bp, synthetic construct
  misc_feature 1..20: note = chemically synthesized
  source 1..20: mol_type = other DNA
gtgtctgcttgggcatgtgg

SEQ ID NO: 56936 - DNA, 20 bp, synthetic construct
  misc_feature 1..20: note = chemically synthesized
  source 1..20: mol_type = other DNA
gcatgtggcagcataccaca

SEQ ID NO: 56937 - DNA, 20 bp, synthetic construct
  misc_feature 1..20: note = chemically synthesized
  source 1..20: mol_type = other DNA
accacacagcaaatataaat

SEQ ID NO: 56938 - DNA, 20 bp, synthetic construct
  misc_feature 1..20: note = chemically synthesized
  source 1..20: mol_type = other DNA
acagcaaatataaataagtc

SEQ ID NO: 56939 - DNA, 20 bp, synthetic construct
  misc_feature 1..20: note = chemically synthesized
  source 1..20: mol_type = other DNA
cagcaaatataaataagtct

SEQ ID NO: 56940 - DNA, 20 bp, synthetic construct
  misc_feature 1..20: note = chemically synthesized
  source 1..20: mol_type = other DNA
agcaaatataaataagtcta

SEQ ID NO: 56941 - DNA, 20 bp, synthetic construct
  misc_feature 1..20: note = chemically synthesized
  source 1..20: mol_type = other DNA
taagtctagggctattgtgt

SEQ ID NO: 56942 - DNA, 20 bp, synthetic construct
  misc_feature 1..20: note = chemically synthesized
  source 1..20: mol_type = other DNA
ctagggctattgtgttagtg

SEQ ID NO: 56943 - DNA, 20 bp, synthetic construct
  misc_feature 1..20: note = chemically synthesized
  source 1..20: mol_type = other DNA
agggctattgtgttagtgaa

SEQ ID NO: 56944 - DNA, 20 bp, synthetic construct
  misc_feature 1..20: note = chemically synthesized
  source 1..20: mol_type = other DNA
gggctattgtgttagtgaag

SEQ ID NO: 56945 - DNA, 20 bp, synthetic construct
  misc_feature 1..20: note = chemically synthesized
  source 1..20: mol_type = other DNA
gctattgtgttagtgaagag

SEQ ID NO: 56946 - DNA, 20 bp, synthetic construct
  misc_feature 1..20: note = chemically synthesized
  source 1..20: mol_type = other DNA
ctattgtgttagtgaagagg

SEQ ID NO: 56947 - DNA, 20 bp, synthetic construct
  misc_feature 1..20: note = chemically synthesized
  source 1..20: mol_type = other DNA
aggactatattgtctaaaat

SEQ ID NO: 56948 - DNA, 20 bp, synthetic construct
  misc_feature 1..20: note = chemically synthesized
  source 1..20: mol_type = other DNA
actatattgtctaaaattag

SEQ ID NO: 56949 - DNA, 20 bp, synthetic construct
  misc_feature 1..20: note = chemically synthesized
  source 1..20: mol_type = other DNA
ttgtctaaaattagtggcat

SEQ ID NO: 56950 - DNA, 20 bp, synthetic construct
  misc_feature 1..20: note = chemically synthesized
  source 1..20: mol_type = other DNA
attagtggcataagaattta

SEQ ID NO: 56951 - DNA, 20 bp, synthetic construct
  misc_feature 1..20: note = chemically synthesized
  source 1..20: mol_type = other DNA
gtggcataagaatttacggc

SEQ ID NO: 56952 - DNA, 20 bp, synthetic construct
  misc_feature 1..20: note = chemically synthesized
  source 1..20: mol_type = other DNA
caattgttcttgaaaaacct

SEQ ID NO: 56953 - DNA, 20 bp, synthetic construct
  misc_feature 1..20: note = chemically synthesized
  source 1..20: mol_type = other DNA
aattgttcttgaaaaacctc

SEQ ID NO: 56954 - DNA, 20 bp, synthetic construct
  misc_feature 1..20: note = chemically synthesized
  source 1..20: mol_type = other DNA
tcttgaaaaacctcaggtca

SEQ ID NO: 56955 - DNA, 20 bp, synthetic construct
  misc_feature 1..20: note = chemically synthesized
  source 1..20: mol_type = other DNA
ggtcatagatcatttttttc

SEQ ID NO: 56956 - DNA, 20 bp, synthetic construct
  misc_feature 1..20: note = chemically synthesized
  source 1..20: mol_type = other DNA
gtcatagatcatttttttca

SEQ ID NO: 56957 - DNA, 20 bp, synthetic construct
  misc_feature 1..20: note = chemically synthesized
  source 1..20: mol_type = other DNA
gatcatttttttcaaggtta

SEQ ID NO: 56958 - DNA, 20 bp, synthetic construct
  misc_feature 1..20: note = chemically synthesized
  source 1..20: mol_type = other DNA
ttatggaaaatattcacata

SEQ ID NO: 56959 - DNA, 20 bp, synthetic construct
  misc_feature 1..20: note = chemically synthesized
  source 1..20: mol_type = other DNA
tatggaaaatattcacatat

SEQ ID NO: 56960 - DNA, 20 bp, synthetic construct
  misc_feature 1..20: note = chemically synthesized
  source 1..20: mol_type = other DNA
ggaaaatattcacatatggg

SEQ ID NO: 56961 - DNA, 20 bp, synthetic construct
  misc_feature 1..20: note = chemically synthesized
  source 1..20: mol_type = other DNA
atgtccatactttgatttac

SEQ ID NO: 56962 - DNA, 20 bp, synthetic construct
  misc_feature 1..20: note = chemically synthesized
  source 1..20: mol_type = other DNA
gtatggacatctgcccatat

SEQ ID NO: 56963 - DNA, 20 bp, synthetic construct
  misc_feature 1..20: note = chemically synthesized
  source 1..20: mol_type = other DNA
tgtagaacacaagcaaacaa

SEQ ID NO: 56964 - DNA, 20 bp, synthetic construct
  misc_feature 1..20: note = chemically synthesized
  source 1..20: mol_type = other DNA
caatggcacattatagcttt

SEQ ID NO: 56965 - DNA, 20 bp, synthetic construct
  misc_feature 1..20: note = chemically synthesized
  source 1..20: mol_type = other DNA
tcataccatattgaaaaaac

SEQ ID NO: 56966 - DNA, 20 bp, synthetic construct
  misc_feature 1..20: note = chemically synthesized
  source 1..20: mol_type = other DNA
ctactcatccatcattcctc

SEQ ID NO: 56967 - DNA, 20 bp, synthetic construct
  misc_feature 1..20: note = chemically synthesized
  source 1..20: mol_type = other DNA
tcctttcagtctctcttttc

SEQ ID NO: 56968 - DNA, 20 bp, synthetic construct
  misc_feature 1..20: note = chemically synthesized
  source 1..20: mol_type = other DNA
ttacataggtacaaactcat

SEQ ID NO: 56969 - DNA, 20 bp, synthetic construct
  misc_feature 1..20: note = chemically synthesized
  source 1..20: mol_type = other DNA
tgcaggtttttgataaaatg

SEQ ID NO: 56970 - DNA, 20 bp, synthetic construct
  misc_feature 1..20: note = chemically synthesized
  source 1..20: mol_type = other DNA
ttgatttttttttttaaggc

SEQ ID NO: 56971 - DNA, 20 bp, synthetic construct
  misc_feature 1..20: note = chemically synthesized
  source 1..20: mol_type = other DNA
gcagggatgatcaagaaaat

SEQ ID NO: 56972 - DNA, 20 bp, synthetic construct
  misc_feature 1..20: note = chemically synthesized
  source 1..20: mol_type = other DNA
gagtcaacaacttgttttca

SEQ ID NO: 56973 - DNA, 20 bp, synthetic construct
  misc_feature 1..20: note = chemically synthesized
  source 1..20: mol_type = other DNA
aacttgttttcattgagtcc

SEQ ID NO: 56974 - DNA, 20 bp, synthetic construct
  misc_feature 1..20: note = chemically synthesized
  source 1..20: mol_type = other DNA
tcctggagaaatattcttag

SEQ ID NO: 56975 - DNA, 20 bp, synthetic construct
  misc_feature 1..20: note = chemically synthesized
  source 1..20: mol_type = other DNA
aataactcaaccaggggcta

SEQ ID NO: 56976 - DNA, 20 bp, synthetic construct
  misc_feature 1..20: note = chemically synthesized
  source 1..20: mol_type = other DNA
tctcactttcattagtcacg

SEQ ID NO: 56977 - DNA, 20 bp, synthetic construct
  misc_feature 1..20: note = chemically synthesized
  source 1..20: mol_type = other DNA
gcatgtaggcattaattaag

SEQ ID NO: 56978 - DNA, 20 bp, synthetic construct
  misc_feature 1..20: note = chemically synthesized
  source 1..20: mol_type = other DNA
gaacagaacatttttaccac

SEQ ID NO: 56979 - DNA, 20 bp, synthetic construct
  misc_feature 1..20: note = chemically synthesized
  source 1..20: mol_type = other DNA
aacatttttaccacatgaat

SEQ ID NO: 56980 - DNA, 20 bp, synthetic construct
  misc_feature 1..20: note = chemically synthesized
  source 1..20: mol_type = other DNA
ggtctttgcaccatagacaa

SEQ ID NO: 56981 - DNA, 20 bp, synthetic construct
  misc_feature 1..20: note = chemically synthesized
  source 1..20: mol_type = other DNA
agcaagtaaatgctagaaaa

SEQ ID NO: 56982 - DNA, 20 bp, synthetic construct
  misc_feature 1..20: note = chemically synthesized
  source 1..20: mol_type = other DNA
taaatgctagaaaagagaat

SEQ ID NO: 56983 - DNA, 20 bp, synthetic construct
  misc_feature 1..20: note = chemically synthesized
  source 1..20: mol_type = other DNA
agatgtgagcaatgcaggta

SEQ ID NO: 56984 - DNA, 20 bp, synthetic construct
  misc_feature 1..20: note = chemically synthesized
  source 1..20: mol_type = other DNA
cgaaaaactgtgataaatat

SEQ ID NO: 56985 - DNA, 20 bp, synthetic construct
  misc_feature 1..20: note = chemically synthesized
  source 1..20: mol_type = other DNA
tctggatgtaggacaatgtg

SEQ ID NO: 56986 - DNA, 20 bp, synthetic construct
  misc_feature 1..20: note = chemically synthesized
  source 1..20: mol_type = other DNA
aatggccatatgctcacagt

SEQ ID NO: 56987 - DNA, 20 bp, synthetic construct
  misc_feature 1..20: note = chemically synthesized
  source 1..20: mol_type = other DNA
agtactaggcatggggctac

SEQ ID NO: 56988 - DNA, 20 bp, synthetic construct
  misc_feature 1..20: note = chemically synthesized
  source 1..20: mol_type = other DNA
gggctacaagaatagcagcc

SEQ ID NO: 56989 - DNA, 20 bp, synthetic construct
  misc_feature 1..20: note = chemically synthesized
  source 1..20: mol_type = other DNA
agtacgaccatagttcctat

SEQ ID NO: 56990 - DNA, 20 bp, synthetic construct
  misc_feature 1..20: note = chemically synthesized
  source 1..20: mol_type = other DNA
cctatctgaatgacaagctg

SEQ ID NO: 56991 - DNA, 20 bp, synthetic construct
  misc_feature 1..20: note = chemically synthesized
  source 1..20: mol_type = other DNA
gaagatgttggcatgtctta

SEQ ID NO: 56992 - DNA, 20 bp, synthetic construct
  misc_feature 1..20: note = chemically synthesized
  source 1..20: mol_type = other DNA
cggtccagggccatggccac

SEQ ID NO: 56993 - DNA, 20 bp, synthetic construct
  misc_feature 1..20: note = chemically synthesized
  source 1..20: mol_type = other DNA
gactctataccctgcaatgt

SEQ ID NO: 56994 - DNA, 20 bp, synthetic construct
  misc_feature 1..20: note = chemically synthesized
  source 1..20: mol_type = other DNA
gaaccacatttgaagcaagc

SEQ ID NO: 56995 - DNA, 20 bp, synthetic construct
  misc_feature 1..20: note = chemically synthesized
  source 1..20: mol_type = other DNA
agatttcaggcacattaaac

SEQ ID NO: 56996 - DNA, 20 bp, synthetic construct
  misc_feature 1..20: note = chemically synthesized
  source 1..20: mol_type = other DNA
tttgatgatgctcagaagca

SEQ ID NO: 56997 - DNA, 20 bp, synthetic construct
  misc_feature 1..20: note = chemically synthesized
  source 1..20: mol_type = other DNA
tagcaatgagataaatggca

SEQ ID NO: 56998 - DNA, 20 bp, synthetic construct
  misc_feature 1..20: note = chemically synthesized
  source 1..20: mol_type = other DNA
atgagataaatggcacagaa

SEQ ID NO: 56999 - DNA, 20 bp, synthetic construct
  misc_feature 1..20: note = chemically synthesized
  source 1..20: mol_type = other DNA
cactgcacagattctaggcc

SEQ ID NO: 57000 - DNA, 20 bp, synthetic construct
  misc_feature 1..20: note = chemically synthesized
  source 1..20: mol_type = other DNA
tggaaatggacatagtgtcg

SEQ ID NO: 57001 - DNA, 20 bp, synthetic construct
  misc_feature 1..20: note = chemically synthesized
  source 1..20: mol_type = other DNA
ttttctccaaactcattata

SEQ ID NO: 57002 - DNA, 20 bp, synthetic construct
  misc_feature 1..20: note = chemically synthesized
  source 1..20: mol_type = other DNA
ttatattgagtctgtctgat

SEQ ID NO: 57003 - DNA, 20 bp, synthetic construct
  misc_feature 1..20: note = chemically synthesized
  source 1..20: mol_type = other DNA
cacagttttgaaaggaaaag

SEQ ID NO: 57004 - DNA, 20 bp, synthetic construct
  misc_feature 1..20: note = chemically synthesized
  source 1..20: mol_type = other DNA
tcacaggcactgtgccataa

SEQ ID NO: 57005 - DNA, 20 bp, synthetic construct
  misc_feature 1..20: note = chemically synthesized
  source 1..20: mol_type = other DNA
ccagcaaaatcacctggaca

SEQ ID NO: 57006 - DNA, 20 bp, synthetic construct
  misc_feature 1..20: note = chemically synthesized
  source 1..20: mol_type = other DNA
gtaaaagattcccaatgaaa

SEQ ID NO: 57007 - DNA, 20 bp, synthetic construct
  misc_feature 1..20: note = chemically synthesized
  source 1..20: mol_type = other DNA
aatatatttctttttatatt

SEQ ID NO: 57008 - DNA, 20 bp, synthetic construct
  misc_feature 1..20: note = chemically synthesized
  source 1..20: mol_type = other DNA
tatattcagaataatgtaaa

SEQ ID NO: 57009 - DNA, 20 bp, synthetic construct
  misc_feature 1..20: note = chemically synthesized
  source 1..20: mol_type = other DNA
tatatttctttaaagttaaa

SEQ ID NO: 57010 - DNA, 20 bp, synthetic construct
  misc_feature 1..20: note = chemically synthesized
  source 1..20: mol_type = other DNA
gctgaaactcttgaaatgtt

SEQ ID NO: 57011 - DNA, 20 bp, synthetic construct
  misc_feature 1..20: note = chemically synthesized
  source 1..20: mol_type = other DNA
taaaattttaatacacttta

SEQ ID NO: 57012 - DNA, 20 bp, synthetic construct
  misc_feature 1..20: note = chemically synthesized
  source 1..20: mol_type = other DNA
ctcctgataaaccacagata

SEQ ID NO: 57013 - DNA, 20 bp, synthetic construct
  misc_feature 1..20: note = chemically synthesized
  source 1..20: mol_type = other DNA
agatactgaataatgggcaa

SEQ ID NO: 57014 - DNA, 20 bp, synthetic construct
  misc_feature 1..20: note = chemically synthesized
  source 1..20: mol_type = other DNA
gggcaaatgaatcatttagc

SEQ ID NO: 57015 - DNA, 20 bp, synthetic construct
  misc_feature 1..20: note = chemically synthesized
  source 1..20: mol_type = other DNA
aatgaatcatttagccagaa

SEQ ID NO: 57016 - DNA, 20 bp, synthetic construct
  misc_feature 1..20: note = chemically synthesized
  source 1..20: mol_type = other DNA
tttcctggttttaaaatgtt

SEQ ID NO: 57017 - DNA, 20 bp, synthetic construct
  misc_feature 1..20: note = chemically synthesized
  source 1..20: mol_type = other DNA
ctaaaattgaggaaagcact

SEQ ID NO: 57018 - DNA, 20 bp, synthetic construct
  misc_feature 1..20: note = chemically synthesized
  source 1..20: mol_type = other DNA
cttttcaatttcactgatga

SEQ ID NO: 57019 - DNA, 20 bp, synthetic construct
  misc_feature 1..20: note = chemically synthesized
  source 1..20: mol_type = other DNA
ttttctaaaaattacatatt

SEQ ID NO: 57020 - DNA, 20 bp, synthetic construct
  misc_feature 1..20: note = chemically synthesized
  source 1..20: mol_type = other DNA
tgttttatctcagtaagctc

SEQ ID NO: 57021 - DNA, 20 bp, synthetic construct
  misc_feature 1..20: note = chemically synthesized
  source 1..20: mol_type = other DNA
gaagaaagagaaaagaggaa

SEQ ID NO: 57022 - DNA, 20 bp, synthetic construct
  misc_feature 1..20: note = chemically synthesized
  source 1..20: mol_type = other DNA
tctccaaagataatcacaat

SEQ ID NO: 57023 - DNA, 20 bp, synthetic construct
  misc_feature 1..20: note = chemically synthesized
  source 1..20: mol_type = other DNA
aagataatcacaattagaat

SEQ ID NO: 57024 - DNA, 20 bp, synthetic construct
  misc_feature 1..20: note = chemically synthesized
  source 1..20: mol_type = other DNA
caagaccaaagagctgacat

SEQ ID NO: 57025 - DNA, 20 bp, synthetic construct
  misc_feature 1..20: note = chemically synthesized
  source 1..20: mol_type = other DNA
tacctgacaggcacagatag

SEQ ID NO: 57026 - DNA, 20 bp, synthetic construct
  misc_feature 1..20: note = chemically synthesized
  source 1..20: mol_type = other DNA
gtatgtaagttcctggttag

SEQ ID NO: 57027 - DNA, 20 bp, synthetic construct
  misc_feature 1..20: note = chemically synthesized
  source 1..20: mol_type = other DNA
taagttcctggttagttgga

SEQ ID NO: 57028 - DNA, 20 bp, synthetic construct
  misc_feature 1..20: note = chemically synthesized
  source 1..20: mol_type = other DNA
taaattatggagaggaaact

SEQ ID NO: 57029 - DNA, 20 bp, synthetic construct
  misc_feature 1..20: note = chemically synthesized
  source 1..20: mol_type = other DNA
ttgctcttaccagatacctg

SEQ ID NO: 57030 - DNA, 20 bp, synthetic construct
  misc_feature 1..20: note = chemically synthesized
  source 1..20: mol_type = other DNA
ctcaccaatttttcttctcc

SEQ ID NO: 57031 - DNA, 20 bp, synthetic construct
  misc_feature 1..20: note = chemically synthesized
  source 1..20: mol_type = other DNA
cagcttcattcccttaagtt

SEQ ID NO: 57032 - DNA, 20 bp, synthetic construct
  misc_feature 1..20: note = chemically synthesized
  source 1..20: mol_type = other DNA
aattttactctgtttggtgc

SEQ ID NO: 57033 - DNA, 20 bp, synthetic construct
  misc_feature 1..20: note = chemically synthesized
  source 1..20: mol_type = other DNA
gtctgtagcattctgaaaca

SEQ ID NO: 57034 - DNA, 20 bp, synthetic construct
  misc_feature 1..20: note = chemically synthesized
  source 1..20: mol_type = other DNA
gtagcattctgaaacacggg

SEQ ID NO: 57035 - DNA, 20 bp, synthetic construct
  misc_feature 1..20: note = chemically synthesized
  source 1..20: mol_type = other DNA
caccaatttaatattccttt

SEQ ID NO: 57036 - DNA, 20 bp, synthetic construct
  misc_feature 1..20: note = chemically synthesized
  source 1..20: mol_type = other DNA
tgaatgtgtggagaagtagg

SEQ ID NO: 57037 - DNA, 20 bp, synthetic construct
  misc_feature 1..20: note = chemically synthesized
  source 1..20: mol_type = other DNA
ggagttatgagcatgaaatg

SEQ ID NO: 57038 - DNA, 20 bp, synthetic construct
  misc_feature 1..20: note = chemically synthesized
  source 1..20: mol_type = other DNA
caaattttaagtcagccctc

SEQ ID NO: 57039 - DNA, 20 bp, synthetic construct
  misc_feature 1..20: note = chemically synthesized
  source 1..20: mol_type = other DNA
cttttcccacaggctaaatg

SEQ ID NO: 57040 - DNA, 20 bp, synthetic construct
  misc_feature 1..20: note = chemically synthesized
  source 1..20: mol_type = other DNA
ggaagcaagttgttgaacat

SEQ ID NO: 57041 - DNA, 20 bp, synthetic construct
  misc_feature 1..20: note = chemically synthesized
  source 1..20: mol_type = other DNA
tcattatattcctactattt

SEQ ID NO: 57042 - DNA, 20 bp, synthetic construct
  misc_feature 1..20: note = chemically synthesized
  source 1..20: mol_type = other DNA
cctttaaattattagtaaaa

SEQ ID NO: 57043 - DNA, 20 bp, synthetic construct
  misc_feature 1..20: note = chemically synthesized
  source 1..20: mol_type = other DNA
cagctggtttctaggctttc

SEQ ID NO: 57044 - DNA, 20 bp, synthetic construct
  misc_feature 1..20: note = chemically synthesized
  source 1..20: mol_type = other DNA
taggaagcatactaatggtg

SEQ ID NO: 57045 - DNA, 20 bp, synthetic construct
  misc_feature 1..20: note = chemically synthesized
  source 1..20: mol_type = other DNA
aatggtggagaatatttata

SEQ ID NO: 57046 - DNA, 20 bp, synthetic construct
  misc_feature 1..20: note = chemically synthesized
  source 1..20: mol_type = other DNA
aatggatttccaggagaaca

SEQ ID NO: 57047 - DNA, 20 bp, synthetic construct
  misc_feature 1..20: note = chemically synthesized
  source 1..20: mol_type = other DNA
ggaaccccatgtgctctttc

SEQ ID NO: 57048 - DNA, 20 bp, synthetic construct
  misc_feature 1..20: note = chemically synthesized
  source 1..20: mol_type = other DNA
aacaatagtactgttgcatg

SEQ ID NO: 57049 - DNA, 20 bp, synthetic construct
  misc_feature 1..20: note = chemically synthesized
  source 1..20: mol_type = other DNA
gggctctccaaagttctatc

SEQ ID NO: 57050 - DNA, 20 bp, synthetic construct
  misc_feature 1..20: note = chemically synthesized
  source 1..20: mol_type = other DNA
catcctttgaaacattgtca

SEQ ID NO: 57051 - DNA, 20 bp, synthetic construct
  misc_feature 1..20: note = chemically synthesized
  source 1..20: mol_type = other DNA
atatgcatcaataactatct

SEQ ID NO: 57052 - DNA, 20 bp, synthetic construct
  misc_feature 1..20: note = chemically synthesized
  source 1..20: mol_type = other DNA
tttttttcttttttttgaga

SEQ ID NO: 57053 - DNA, 20 bp, synthetic construct
  misc_feature 1..20: note = chemically synthesized
  source 1..20: mol_type = other DNA
tctctctctgtcgcccaggc

SEQ ID NO: 57054 - DNA, 20 bp, synthetic construct
  misc_feature 1..20: note = chemically synthesized
  source 1..20: mol_type = other DNA
ttgtatttttttagtagaga

SEQ ID NO: 57055 - DNA, 20 bp, synthetic construct
  misc_feature 1..20: note = chemically synthesized
  source 1..20: mol_type = other DNA
cggggtttcactgtgttagc

SEQ ID NO: 57056 - DNA, 20 bp, synthetic construct
  misc_feature 1..20: note = chemically synthesized
  source 1..20: mol_type = other DNA
gcctccgcctcccaaagtgc

SEQ ID NO: 57057 - DNA, 20 bp, synthetic construct
  misc_feature 1..20: note = chemically synthesized
  source 1..20: mol_type = other DNA
gagccactgcacccggccta

SEQ ID NO: 57058 - DNA, 20 bp, synthetic construct
  misc_feature 1..20: note = chemically synthesized
  source 1..20: mol_type = other DNA
ctttttttttttccttgaga

SEQ ID NO: 57059 - DNA, 20 bp, synthetic construct
  misc_feature 1..20: note = chemically synthesized
  source 1..20: mol_type = other DNA
tctcgctccgtcatccaggc

SEQ ID NO: 57060 - DNA, 20 bp, synthetic construct
  misc_feature 1..20: note = chemically synthesized
  source 1..20: mol_type = other DNA
tccaggctggagtgcagtgg

SEQ ID NO: 57061 - DNA, 20 bp, synthetic construct
  misc_feature 1..20: note = chemically synthesized
  source 1..20: mol_type = other DNA
gcccaagcctcccaagtagg

SEQ ID NO: 57062 - DNA, 20 bp, synthetic construct
  misc_feature 1..20: note = chemically synthesized
  source 1..20: mol_type = other DNA
ttttgtatttttagtagaga

SEQ ID NO: 57063 - DNA, 20 bp, synthetic construct
  misc_feature 1..20: note = chemically synthesized
  source 1..20: mol_type = other DNA
ccagcccatctttaccattt

SEQ ID NO: 57064 - DNA, 20 bp, synthetic construct
  misc_feature 1..20: note = chemically synthesized
  source 1..20: mol_type = other DNA
tacacacagagggagagaga

SEQ ID NO: 57065 - DNA, 20 bp, synthetic construct
  misc_feature 1..20: note = chemically synthesized
  source 1..20: mol_type = other DNA
gagggagagagagagagtgg

SEQ ID NO: 57066 - DNA, 20 bp, synthetic construct
  misc_feature 1..20: note = chemically synthesized
  source 1..20: mol_type = other DNA
tccacgtttttaacttccac

SEQ ID NO: 57067 - DNA, 20 bp, synthetic construct
  misc_feature 1..20: note = chemically synthesized
  source 1..20: mol_type = other DNA
tatttcattcttttttatgg

SEQ ID NO: 57068 - DNA, 20 bp, synthetic construct
  misc_feature 1..20: note = chemically synthesized
  source 1..20: mol_type = other DNA
ctttatccatttatctgttg

SEQ ID NO: 57069 - DNA, 20 bp, synthetic construct
  misc_feature 1..20: note = chemically synthesized
  source 1..20: mol_type = other DNA
gatttcaaatcttggcgttt

SEQ ID NO: 57070 - DNA, 20 bp, synthetic construct
  misc_feature 1..20: note = chemically synthesized
  source 1..20: mol_type = other DNA
aatagtgctataataaagat

SEQ ID NO: 57071 - DNA, 20 bp, synthetic construct
  misc_feature 1..20: note = chemically synthesized
  source 1..20: mol_type = other DNA
acatactaatttattctttt

SEQ ID NO: 57072 - DNA, 20 bp, synthetic construct
  misc_feature 1..20: note = chemically synthesized
  source 1..20: mol_type = other DNA
tcttttaagggtatatacct

SEQ ID NO: 57073 - DNA, 20 bp, synthetic construct
  misc_feature 1..20: note = chemically synthesized
  source 1..20: mol_type = other DNA
tatacctaggagtgatattg

SEQ ID NO: 57074 - DNA, 20 bp, synthetic construct
  misc_feature 1..20: note = chemically synthesized
  source 1..20: mol_type = other DNA
tactcccaccaacagtgtaa

SEQ ID NO: 57075 - DNA, 20 bp, synthetic construct
  misc_feature 1..20: note = chemically synthesized
  source 1..20: mol_type = other DNA
atttatttatttattttctg

SEQ ID NO: 57076 - DNA, 20 bp, synthetic construct
  misc_feature 1..20: note = chemically synthesized
  source 1..20: mol_type = other DNA
tttattttctgttgagttgc

SEQ ID NO: 57077 - DNA, 20 bp, synthetic construct
  misc_feature 1..20: note = chemically synthesized
  source 1..20: mol_type = other DNA
caaatattttctcccattct

SEQ ID NO: 57078 - DNA, 20 bp, synthetic construct
  misc_feature 1..20: note = chemically synthesized
  source 1..20: mol_type = other DNA
gacagtatttgcccaaatca

SEQ ID NO: 57079 - DNA, 20 bp, synthetic construct
  misc_feature 1..20: note = chemically synthesized
  source 1..20: mol_type = other DNA
ccaaatcaatgaatgccctg

SEQ ID NO: 57080 - DNA, 20 bp, synthetic construct
  misc_feature 1..20: note = chemically synthesized
  source 1..20: mol_type = other DNA
tagtttcataatttcaggta

SEQ ID NO: 57081 - DNA, 20 bp, synthetic construct
  misc_feature 1..20: note = chemically synthesized
  source 1..20: mol_type = other DNA
ttttgtatatagtgagagat

SEQ ID NO: 57082 - DNA, 20 bp, synthetic construct
  misc_feature 1..20: note = chemically synthesized
  source 1..20: mol_type = other DNA
ccgattttactcttttgcaa

SEQ ID NO: 57083 - DNA, 20 bp, synthetic construct
  misc_feature 1..20: note = chemically synthesized
  source 1..20: mol_type = other DNA
ttttttttttttttttgaga

SEQ ID NO: 57084 - DNA, 20 bp, synthetic construct
  misc_feature 1..20: note = chemically synthesized
  source 1..20: mol_type = other DNA
agtctcactgttgcccaggc

SEQ ID NO: 57085 - DNA, 20 bp, synthetic construct
  misc_feature 1..20: note = chemically synthesized
  source 1..20: mol_type = other DNA
agtgcagtggcagcacaatc

SEQ ID NO: 57086 - DNA, 20 bp, synthetic construct
  misc_feature 1..20: note = chemically synthesized
  source 1..20: mol_type = other DNA
gattctcctgcctcagcctc

SEQ ID NO: 57087 - DNA, 20 bp, synthetic construct
  misc_feature 1..20: note = chemically synthesized
  source 1..20: mol_type = other DNA
gcctcagcctcctgagtatc

SEQ ID NO: 57088 - DNA, 20 bp, synthetic construct
  misc_feature 1..20: note = chemically synthesized
  source 1..20: mol_type = other DNA
ttttgtatttttagtagaga

SEQ ID NO: 57089 - DNA, 20 bp, synthetic construct
  misc_feature 1..20: note = chemically synthesized
  source 1..20: mol_type = other DNA
acctcagcctcacaaagtgc

SEQ ID NO: 57090 - DNA, 20 bp, synthetic construct
  misc_feature 1..20: note = chemically synthesized
  source 1..20: mol_type = other DNA
atgacttggttgttaagtgc

SEQ ID NO: 57091 - DNA, 20 bp, synthetic construct
  misc_feature 1..20: note = chemically synthesized
  source 1..20: mol_type = other DNA
ttaagtgcctggatttgcat

SEQ ID NO: 57092 - DNA, 20 bp, synthetic construct
  misc_feature 1..20: note = chemically synthesized
  source 1..20: mol_type = other DNA
ttggttttgttctttttgct

SEQ ID NO: 57093 - DNA, 20 bp, synthetic construct
  misc_feature 1..20: note = chemically synthesized
  source 1..20: mol_type = other DNA
tcaggattgctttagctatt

SEQ ID NO: 57094 - DNA, 20 bp, synthetic construct
  misc_feature 1..20: note = chemically synthesized
  source 1..20: mol_type = other DNA
ttgtggttccatataaatat

SEQ ID NO: 57095 - DNA, 20 bp, synthetic construct
  misc_feature 1..20: note = chemically synthesized
  source 1..20: mol_type = other DNA
aggattgtttttctatttct

SEQ ID NO: 57096 - DNA, 20 bp, synthetic construct
  misc_feature 1..20: note = chemically synthesized
  source 1..20: mol_type = other DNA
gtattttgacagaaattgca

SEQ ID NO: 57097 - DNA, 20 bp, synthetic construct
  misc_feature 1..20: note = chemically synthesized
  source 1..20: mol_type = other DNA
cactgaatctgtacattgct

SEQ ID NO: 57098 - DNA, 20 bp, synthetic construct
  misc_feature 1..20: note = chemically synthesized
  source 1..20: mol_type = other DNA
attcttctagttcatgagca

SEQ ID NO: 57099 - DNA, 20 bp, synthetic construct
  misc_feature 1..20: note = chemically synthesized
  source 1..20: mol_type = other DNA
ccctcttctatttctttcac

SEQ ID NO: 57100 - DNA, 20 bp, synthetic construct
  misc_feature 1..20: note = chemically synthesized
  source 1..20: mol_type = other DNA
ttatagagatcttttacttc

SEQ ID NO: 57101 - DNA, 20 bp, synthetic construct
  misc_feature 1..20: note = chemically synthesized
  source 1..20: mol_type = other DNA
ttcttgggttagattgactc

SEQ ID NO: 57102 - DNA, 20 bp, synthetic construct
  misc_feature 1..20: note = chemically synthesized
  source 1..20: mol_type = other DNA
ttaacttcttcctttccaat

SEQ ID NO: 57103 - DNA, 20 bp, synthetic construct
  misc_feature 1..20: note = chemically synthesized
  source 1..20: mol_type = other DNA
gatgcactttctttctcttc

SEQ ID NO: 57104 - DNA, 20 bp, synthetic construct
  misc_feature 1..20: note = chemically synthesized
  source 1..20: mol_type = other DNA
ttgttgtgtcctggtctggt

SEQ ID NO: 57105 - DNA, 20 bp, synthetic construct
  misc_feature 1..20: note = chemically synthesized
  source 1..20: mol_type = other DNA
ctggtctggtttgggtatat

SEQ ID NO: 57106 - DNA, 20 bp, synthetic construct
  misc_feature 1..20: note = chemically synthesized
  source 1..20: mol_type = other DNA
ttagagtaatgcttgcctca

SEQ ID NO: 57107 - DNA, 20 bp, synthetic construct
  misc_feature 1..20: note = chemically synthesized
  source 1..20: mol_type = other DNA
tttatttgtttgtttgtttg

SEQ ID NO: 57108 - DNA, 20 bp, synthetic construct
  misc_feature 1..20: note = chemically synthesized
  source 1..20: mol_type = other DNA
tgtttgtttgtttgaggaat

SEQ ID NO: 57109 - DNA, 20 bp, synthetic construct
  misc_feature 1..20: note = chemically synthesized
  source 1..20: mol_type = other DNA
ttgaaatgtttggtagccca

SEQ ID NO: 57110 - DNA, 20 bp, synthetic construct
  misc_feature 1..20: note = chemically synthesized
  source 1..20: mol_type = other DNA
ttgctaggctgtatgtgtcc

SEQ ID NO: 57111 - DNA, 20 bp, synthetic construct
  misc_feature 1..20: note = chemically synthesized
  source 1..20: mol_type = other DNA
ttctagattttccaatttgt

SEQ ID NO: 57112 - DNA, 20 bp, synthetic construct
  misc_feature 1..20: note = chemically synthesized
  source 1..20: mol_type = other DNA
gttgttcataatagtatcta

SEQ ID NO: 57113 - DNA, 20 bp, synthetic construct
  misc_feature 1..20: note = chemically synthesized
  source 1..20: mol_type = other DNA
gttgaagcctttctactttt

SEQ ID NO: 57114 - DNA, 20 bp, synthetic construct
  misc_feature 1..20: note = chemically synthesized
  source 1..20: mol_type = other DNA
gcaataaagctttttatcac

SEQ ID NO: 57115 - DNA, 20 bp, synthetic construct
  misc_feature 1..20: note = chemically synthesized
  source 1..20: mol_type = other DNA
atcacctgggtgcaggcggg

SEQ ID NO: 57116 - DNA, 20 bp, synthetic construct
  misc_feature 1..20: note = chemically synthesized
  source 1..20: mol_type = other DNA
aggcgggctgagtccgaaaa

SEQ ID NO: 57117 - DNA, 20 bp, synthetic construct
  misc_feature 1..20: note = chemically synthesized
  source 1..20: mol_type = other DNA
gagagtcagcaaagggagat

SEQ ID NO: 57118 - DNA, 20 bp, synthetic construct
  misc_feature 1..20: note = chemically synthesized
  source 1..20: mol_type = other DNA
gtggggctgttttataagat

SEQ ID NO: 57119 - DNA, 20 bp, synthetic construct
  misc_feature 1..20: note = chemically synthesized
  source 1..20: mol_type = other DNA
aaggaaaattacagtcaaag

SEQ ID NO: 57120 - DNA, 20 bp, synthetic construct
  misc_feature 1..20: note = chemically synthesized
  source 1..20: mol_type = other DNA
ggggttgttctctggcgggc

SEQ ID NO: 57121 - DNA, 20 bp, synthetic construct
  misc_feature 1..20: note = chemically synthesized
  source 1..20: mol_type = other DNA
ttctctggcgggcaggagtg

SEQ ID NO: 57122 - DNA, 20 bp, synthetic construct
  misc_feature 1..20: note = chemically synthesized
  source 1..20: mol_type = other DNA
cagtaggggagcttttgagc

SEQ ID NO: 57123 - DNA, 20 bp, synthetic construct
  misc_feature 1..20: note = chemically synthesized
  source 1..20: mol_type = other DNA
cattttcacttcttttgtgg

SEQ ID NO: 57124 - DNA, 20 bp, synthetic construct
  misc_feature 1..20: note = chemically synthesized
  source 1..20: mol_type = other DNA
ttggggcagcgaaaattttg

SEQ ID NO: 57125 - DNA, 20 bp, synthetic construct
  misc_feature 1..20: note = chemically synthesized
  source 1..20: mol_type = other DNA
tttctcagggctgcttcgag

SEQ ID NO: 57126 - DNA, 20 bp, synthetic construct
  misc_feature 1..20: note = chemically synthesized
  source 1..20: mol_type = other DNA
ttaggggcggcgtgggaacc

SEQ ID NO: 57127 - DNA, 20 bp, synthetic construct
  misc_feature 1..20: note = chemically synthesized
  source 1..20: mol_type = other DNA
tgaaggaagattttgtggta

SEQ ID NO: 57128 - DNA, 20 bp, synthetic construct
  misc_feature 1..20: note = chemically synthesized
  source 1..20: mol_type = other DNA
tgtggtaaggggtgatattg

SEQ ID NO: 57129 - DNA, 20 bp, synthetic construct
  misc_feature 1..20: note = chemically synthesized
  source 1..20: mol_type = other DNA
tagaagaaacatttgtcatg

SEQ ID NO: 57130 - DNA, 20 bp, synthetic construct
  misc_feature 1..20: note = chemically synthesized
  source 1..20: mol_type = other DNA
gtagaattattggtgatggc

SEQ ID NO: 57131 - DNA, 20 bp, synthetic construct
  misc_feature 1..20: note = chemically synthesized
  source 1..20: mol_type = other DNA
tggcctggatacggttttgt

SEQ ID NO: 57132 - DNA, 20 bp, synthetic construct
  misc_feature 1..20: note = chemically synthesized
  source 1..20: mol_type = other DNA
gtatggattgaaaaaccaaa

SEQ ID NO: 57133 - DNA, 20 bp, synthetic construct
  misc_feature 1..20: note = chemically synthesized
  source 1..20: mol_type = other DNA
ggacctaggacatctgatta

SEQ ID NO: 57134 - DNA, 20 bp, synthetic construct
  misc_feature 1..20: note = chemically synthesized
  source 1..20: mol_type = other DNA
aaagattatttatttacttc

SEQ ID NO: 57135 - DNA, 20 bp, synthetic construct
  misc_feature 1..20: note = chemically synthesized
  source 1..20: mol_type = other DNA
atttatttacttcaagagtt

SEQ ID NO: 57136 - DNA, 20 bp, synthetic construct
  misc_feature 1..20: note = chemically synthesized
  source 1..20: mol_type = other DNA
agagttaagagtggcagttt

SEQ ID NO: 57137 - DNA, 20 bp, synthetic construct
  misc_feature 1..20: note = chemically synthesized
  source 1..20: mol_type = other DNA
taaacaagagcagggcatgt

SEQ ID NO: 57138 - DNA, 20 bp, synthetic construct
  misc_feature 1..20: note = chemically synthesized
  source 1..20: mol_type = other DNA
cagggcatgtatgagtagtt

SEQ ID NO: 57139 - DNA, 20 bp, synthetic construct
  misc_feature 1..20: note = chemically synthesized
  source 1..20: mol_type = other DNA
tgtatgagtagttgagaatg

SEQ ID NO: 57140 - DNA, 20 bp, synthetic construct
  misc_feature 1..20: note = chemically synthesized
  source 1..20: mol_type = other DNA
agtagttgagaatggtgaat

SEQ ID NO: 57141 - DNA, 20 bp, synthetic construct
  misc_feature 1..20: note = chemically synthesized
  source 1..20: mol_type = other DNA
atgactagacagaagatagc

SEQ ID NO: 57142 - DNA, 20 bp, synthetic construct
  misc_feature 1..20: note = chemically synthesized
  source 1..20: mol_type = other DNA
ttctaagttggtctggtgtc

SEQ ID NO: 57143 - DNA, 20 bp, synthetic construct
  misc_feature 1..20: note = chemically synthesized
  source 1..20: mol_type = other DNA
cctgaagacggaggaccgta

SEQ ID NO: 57144 - DNA, 20 bp, synthetic construct
  misc_feature 1..20: note = chemically synthesized
  source 1..20: mol_type = other DNA
taagggatataaaggtttta

SEQ ID NO: 57145 - DNA, 20 bp, synthetic construct
  misc_feature 1..20: note = chemically synthesized
  source 1..20: mol_type = other DNA
gaggtaggaaggctaaactg

SEQ ID NO: 57146 - DNA, 20 bp, synthetic construct
  misc_feature 1..20: note = chemically synthesized
  source 1..20: mol_type = other DNA
gttatctgactcagggcatg

SEQ ID NO: 57147 - DNA, 20 bp, synthetic construct
  misc_feature 1..20: note = chemically synthesized
  source 1..20: mol_type = other DNA
gtaaatctaatttgccagtc

SEQ ID NO: 57148 - DNA, 20 bp, synthetic construct
  misc_feature 1..20: note = chemically synthesized
  source 1..20: mol_type = other DNA
gtgtagggaagggagggggc

SEQ ID NO: 57149 - DNA, 20 bp, synthetic construct
  misc_feature 1..20: note = chemically synthesized
  source 1..20: mol_type = other DNA
gggggcctgaataatccctg

SEQ ID NO: 57150 - DNA, 20 bp, synthetic construct
  misc_feature 1..20: note = chemically synthesized
  source 1..20: mol_type = other DNA
gaataatccctgaggagtag

SEQ ID NO: 57151 - DNA, 20 bp, synthetic construct
  misc_feature 1..20: note = chemically synthesized
  source 1..20: mol_type = other DNA
cactgagaagttatttcttt

SEQ ID NO: 57152 - DNA, 20 bp, synthetic construct
  misc_feature 1..20: note = chemically synthesized
  source 1..20: mol_type = other DNA
atcaataaatcaagtgtgat

SEQ ID NO: 57153 - DNA, 20 bp, synthetic construct
  misc_feature 1..20: note = chemically synthesized
  source 1..20: mol_type = other DNA
aagaaggaaatatggggaaa

SEQ ID NO: 57154 - DNA, 20 bp, synthetic construct
  misc_feature 1..20: note = chemically synthesized
  source 1..20: mol_type = other DNA
aggaaatatggggaaatggg

SEQ ID NO: 57155 - DNA, 20 bp, synthetic construct
  misc_feature 1..20: note = chemically synthesized
  source 1..20: mol_type = other DNA
ggaaatggggtgaatgtcag

SEQ ID NO: 57156 - DNA, 20 bp, synthetic construct
  misc_feature 1..20: note = chemically synthesized
  source 1..20: mol_type = other DNA
gatcagagagatacaatcat

SEQ ID NO: 57157 - DNA, 20 bp, synthetic construct
  misc_feature 1..20: note = chemically synthesized
  source 1..20: mol_type = other DNA
tgggggtcaggtgtggtatc

SEQ ID NO: 57158 - DNA, 20 bp, synthetic construct
  misc_feature 1..20: note = chemically synthesized
  source 1..20: mol_type = other DNA
atcaggaataatgtgggagg

SEQ ID NO: 57159 - DNA, 20 bp, synthetic construct
  misc_feature 1..20: note = chemically synthesized
  source 1..20: mol_type = other DNA
ggtaattgtgggacttaaca

SEQ ID NO: 57160 - DNA, 20 bp, synthetic construct
  misc_feature 1..20: note = chemically synthesized
  source 1..20: mol_type = other DNA
attgtgggacttaacaaaga

SEQ ID NO: 57161 - DNA, 20 bp, synthetic construct
  misc_feature 1..20: note = chemically synthesized
  source 1..20: mol_type = other DNA
tgagtacagctgaaggagcc

SEQ ID NO: 57162 - DNA, 20 bp, synthetic construct
  misc_feature 1..20: note = chemically synthesized
  source 1..20: mol_type = other DNA
tagaagttatgagaaatgtg

SEQ ID NO: 57163 - DNA, 20 bp, synthetic construct
  misc_feature 1..20: note = chemically synthesized
  source 1..20: mol_type = other DNA
ttatttggacagaaaggcta

SEQ ID NO: 57164 - DNA, 20 bp, synthetic construct
  misc_feature 1..20: note = chemically synthesized
  source 1..20: mol_type = other DNA
aaaggctacagggtgcagtc

SEQ ID NO: 57165 - DNA, 20 bp, synthetic construct
  misc_feature 1..20: note = chemically synthesized
  source 1..20: mol_type = other DNA
tgcagtcctggatcttgtgt

SEQ ID NO: 57166 - DNA, 20 bp, synthetic construct
  misc_feature 1..20: note = chemically synthesized
  source 1..20: mol_type = other DNA
taactatgcctaggaaggaa

SEQ ID NO: 57167 - DNA, 20 bp, synthetic construct
  misc_feature 1..20: note = chemically synthesized
  source 1..20: mol_type = other DNA
aggagttgttgttttgtaga

SEQ ID NO: 57168 - DNA, 20 bp, synthetic construct
  misc_feature 1..20: note = chemically synthesized
  source 1..20: mol_type = other DNA
gagagcacgtgtgtttttat

SEQ ID NO: 57169 - DNA, 20 bp, synthetic construct
  misc_feature 1..20: note = chemically synthesized
  source 1..20: mol_type = other DNA
tgccgagataggtaacacat

SEQ ID NO: 57170 - DNA, 20 bp, synthetic construct
  misc_feature 1..20: note = chemically synthesized
  source 1..20: mol_type = other DNA
tttgggcttgactgaagtaa

SEQ ID NO: 57171 - DNA, 20 bp, synthetic construct
  misc_feature 1..20: note = chemically synthesized
  source 1..20: mol_type = other DNA
caggtaatttgctgagccta

SEQ ID NO: 57172 - DNA, 20 bp, synthetic construct
  misc_feature 1..20: note = chemically synthesized
  source 1..20: mol_type = other DNA
aagtgaaagcgaagagaggc

SEQ ID NO: 57173 - DNA, 20 bp, synthetic construct
  misc_feature 1..20: note = chemically synthesized
  source 1..20: mol_type = other DNA
agcgaagagaggctggaatg

SEQ ID NO: 57174 - DNA, 20 bp, synthetic construct
  misc_feature 1..20: note = chemically synthesized
  source 1..20: mol_type = other DNA
ggctggaatgaagggtgcaa

SEQ ID NO: 57175 - DNA, 20 bp, synthetic construct
  misc_feature 1..20: note = chemically synthesized
  source 1..20: mol_type = other DNA
agcatgtttgagatccagaa

SEQ ID NO: 57176 - DNA, 20 bp, synthetic construct
  misc_feature 1..20: note = chemically synthesized
  source 1..20: mol_type = other DNA
ttgagatccagaacagaata

SEQ ID NO: 57177 - DNA, 20 bp, synthetic construct
  misc_feature 1..20: note = chemically synthesized
  source 1..20: mol_type = other DNA
gggttatagatggaggtatt

SEQ ID NO: 57178 - DNA, 20 bp, synthetic construct
  misc_feature 1..20: note = chemically synthesized
  source 1..20: mol_type = other DNA
gatggaggtattgaggatag

SEQ ID NO: 57179 - DNA, 20 bp, synthetic construct
  misc_feature 1..20: note = chemically synthesized
  source 1..20: mol_type = other DNA
tattgaggataggagagtat

SEQ ID NO: 57180 - DNA, 20 bp, synthetic construct
  misc_feature 1..20: note = chemically synthesized
  source 1..20: mol_type = other DNA
agtatatgggtttggcacca

SEQ ID NO: 57181 - DNA, 20 bp, synthetic construct
  misc_feature 1..20: note = chemically synthesized
  source 1..20: mol_type = other DNA
tatgggtttggcaccatggg

SEQ ID NO: 57182 - DNA, 20 bp, synthetic construct
  misc_feature 1..20: note = chemically synthesized
  source 1..20: mol_type = other DNA
ttttaggacaggtaaaatgg

SEQ ID NO: 57183 - DNA, 20 bp, synthetic construct
  misc_feature 1..20: note = chemically synthesized
  source 1..20: mol_type = other DNA
taaaatgggggaatggtaag

SEQ ID NO: 57184 - DNA, 20 bp, synthetic construct
  misc_feature 1..20: note = chemically synthesized
  source 1..20: mol_type = other DNA
aatcctttcaaagcatgctg

SEQ ID NO: 57185 - DNA, 20 bp, synthetic construct
  misc_feature 1..20: note = chemically synthesized
  source 1..20: mol_type = other DNA
tttcaaagcatgctgtggga

SEQ ID NO: 57186 - DNA, 20 bp, synthetic construct
  misc_feature 1..20: note = chemically synthesized
  source 1..20: mol_type = other DNA
gatgggatactggcattgag

SEQ ID NO: 57187 - DNA, 20 bp, synthetic construct
  misc_feature 1..20: note = chemically synthesized
  source 1..20: mol_type = other DNA
atactggcattgagcggggt

SEQ ID NO: 57188 - DNA, 20 bp, synthetic construct
  misc_feature 1..20: note = chemically synthesized
  source 1..20: mol_type = other DNA
taagagtgattaggttttaa

SEQ ID NO: 57189 - DNA, 20 bp, synthetic construct
  misc_feature 1..20: note = chemically synthesized
  source 1..20: mol_type = other DNA
agtagaggtgtcttatactt

SEQ ID NO: 57190 - DNA, 20 bp, synthetic construct
  misc_feature 1..20: note = chemically synthesized
  source 1..20: mol_type = other DNA
aaggtggggagatacaaggg

SEQ ID NO: 57191 - DNA, 20 bp, synthetic construct
  misc_feature 1..20: note = chemically synthesized
  source 1..20: mol_type = other DNA
atgaggtatggctgtagccc

SEQ ID NO: 57192 - DNA, 20 bp, synthetic construct
  misc_feature 1..20: note = chemically synthesized
  source 1..20: mol_type = other DNA
taataagggaactggcaggt

SEQ ID NO: 57193 - DNA, 20 bp, synthetic construct
  misc_feature 1..20: note = chemically synthesized
  source 1..20: mol_type = other DNA
gcaggtggggataatgaaaa

SEQ ID NO: 57194 - DNA, 20 bp, synthetic construct
  misc_feature 1..20: note = chemically synthesized
  source 1..20: mol_type = other DNA
aatgaaaaaggagtgcttaa

SEQ ID NO: 57195 - DNA, 20 bp, synthetic construct
  misc_feature 1..20: note = chemically synthesized
  source 1..20: mol_type = other DNA
agtatcgtctcggttagcac

SEQ ID NO: 57196 - DNA, 20 bp, synthetic construct
  misc_feature 1..20: note = chemically synthesized
  source 1..20: mol_type = other DNA
ctcggttagcaccagagttg

SEQ ID NO: 57197 - DNA, 20 bp, synthetic construct
  misc_feature 1..20: note = chemically synthesized
  source 1..20: mol_type = other DNA
cctttgaaaagaaggtaatg

SEQ ID NO: 57198 - DNA, 20 bp, synthetic construct
  misc_feature 1..20: note = chemically synthesized
  source 1..20: mol_type = other DNA
tgaaaagaaggtaatgtgga

SEQ ID NO: 57199 - DNA, 20 bp, synthetic construct
  misc_feature 1..20: note = chemically synthesized
  source 1..20: mol_type = other DNA
tagcctccatactgattaag

SEQ ID NO: 57200 - DNA, 20 bp, synthetic construct
  misc_feature 1..20: note = chemically synthesized
  source 1..20: mol_type = other DNA
acagacttaccctccactgt

SEQ ID NO: 57201 - DNA, 20 bp, synthetic construct
  misc_feature 1..20: note = chemically synthesized
  source 1..20: mol_type = other DNA
aaagccgagaagatctggga

SEQ ID NO: 57202 - DNA, 20 bp, synthetic construct
  misc_feature 1..20: note = chemically synthesized
  source 1..20: mol_type = other DNA
tcagtcagggagccttgggc

SEQ ID NO: 57203 - DNA, 20 bp, synthetic construct
  misc_feature 1..20: note = chemically synthesized
  source 1..20: mol_type = other DNA
gccagagttccaggggctct

SEQ ID NO: 57204 - DNA, 20 bp, synthetic construct
  misc_feature 1..20: note = chemically synthesized
  source 1..20: mol_type = other DNA
gctctaggagtggctgccag

SEQ ID NO: 57205 - DNA, 20 bp, synthetic construct
  misc_feature 1..20: note = chemically synthesized
  source 1..20: mol_type = other DNA
ttgaacagtccgatttctag

SEQ ID NO: 57206 - DNA, 20 bp, synthetic construct
  misc_feature 1..20: note = chemically synthesized
  source 1..20: mol_type = other DNA
cagatgggacacggcttagg

SEQ ID NO: 57207 - DNA, 20 bp, synthetic construct
  misc_feature 1..20: note = chemically synthesized
  source 1..20: mol_type = other DNA
ttgtgtgctggagatgtggc

SEQ ID NO: 57208 - DNA, 20 bp, synthetic construct
  misc_feature 1..20: note = chemically synthesized
  source 1..20: mol_type = other DNA
tttgtctcacagtggaggca

SEQ ID NO: 57209 - DNA, 20 bp, synthetic construct
  misc_feature 1..20: note = chemically synthesized
  source 1..20: mol_type = other DNA
caccttgaaggtgaggttaa

SEQ ID NO: 57210 - DNA, 20 bp, synthetic construct
  misc_feature 1..20: note = chemically synthesized
  source 1..20: mol_type = other DNA
aggttaattgagtcctgttg

SEQ ID NO: 57211 - DNA, 20 bp, synthetic construct
  misc_feature 1..20: note = chemically synthesized
  source 1..20: mol_type = other DNA
ctgttgtggggtttgaggtc

SEQ ID NO: 57212 - DNA, 20 bp, synthetic construct
  misc_feature 1..20: note = chemically synthesized
  source 1..20: mol_type = other DNA
gaggtccagaatttaatttt

SEQ ID NO: 57213 - DNA, 20 bp, synthetic construct
  misc_feature 1..20: note = chemically synthesized
  source 1..20: mol_type = other DNA
tatttaatgtcaggagcaga

SEQ ID NO: 57214 - DNA, 20 bp, synthetic construct
  misc_feature 1..20: note = chemically synthesized
  source 1..20: mol_type = other DNA
tgggtaataaaatgtatatt

SEQ ID NO: 57215 - DNA, 20 bp, synthetic construct
  misc_feature 1..20: note = chemically synthesized
  source 1..20: mol_type = other DNA
aaagtggccttttgtccttt

SEQ ID NO: 57216 - DNA, 20 bp, synthetic construct
  misc_feature 1..20: note = chemically synthesized
  source 1..20: mol_type = other DNA
tctagggctgtaaagcgtct

SEQ ID NO: 57217 - DNA, 20 bp, synthetic construct
  misc_feature 1..20: note = chemically synthesized
  source 1..20: mol_type = other DNA
cgaacgagccatgaactggg

SEQ ID NO: 57218 - DNA, 20 bp, synthetic construct
  misc_feature 1..20: note = chemically synthesized
  source 1..20: mol_type = other DNA
acgctctgattcgggagagg

SEQ ID NO: 57219 - DNA, 20 bp, synthetic construct
  misc_feature 1..20: note = chemically synthesized
  source 1..20: mol_type = other DNA
aggttggggagggctagtca

SEQ ID NO: 57220 - DNA, 20 bp, synthetic construct
  misc_feature 1..20: note = chemically synthesized
  source 1..20: mol_type = other DNA
gaatgaaactgtaaaccgga

SEQ ID NO: 57221 - DNA, 20 bp, synthetic construct
  misc_feature 1..20: note = chemically synthesized
  source 1..20: mol_type = other DNA
gggaggtgataaaaagatta

SEQ ID NO: 57222 - DNA, 20 bp, synthetic construct
  misc_feature 1..20: note = chemically synthesized
  source 1..20: mol_type = other DNA
gggaggaggggagacgtcag

SEQ ID NO: 57223 - DNA, 20 bp, synthetic construct
  misc_feature 1..20: note = chemically synthesized
  source 1..20: mol_type = other DNA
tagaaagactcagcgacgct

SEQ ID NO: 57224 - DNA, 20 bp, synthetic construct
  misc_feature 1..20: note = chemically synthesized
  source 1..20: mol_type = other DNA
agggagggaccaatgtgtaa

SEQ ID NO: 57225 - DNA, 20 bp, synthetic construct
  misc_feature 1..20: note = chemically synthesized
  source 1..20: mol_type = other DNA
caaaaattatttagatcttg

SEQ ID NO: 57226 - DNA, 20 bp, synthetic construct
  misc_feature 1..20: note = chemically synthesized
  source 1..20: mol_type = other DNA
ctggctatttggaaccactg

SEQ ID NO: 57227 - DNA, 20 bp, synthetic construct
  misc_feature 1..20: note = chemically synthesized
  source 1..20: mol_type = other DNA
aaccactgtcgagtttgtat

SEQ ID NO: 57228 - DNA, 20 bp, synthetic construct
  misc_feature 1..20: note = chemically synthesized
  source 1..20: mol_type = other DNA
atttaggttttaggtcaggt

SEQ ID NO: 57229 - DNA, 20 bp, synthetic construct
  misc_feature 1..20: note = chemically synthesized
  source 1..20: mol_type = other DNA
gcacaggctaagggagaggg

SEQ ID NO: 57230 - DNA, 20 bp, synthetic construct
  misc_feature 1..20: note = chemically synthesized
  source 1..20: mol_type = other DNA
ctaagggagagggaggaatg

SEQ ID NO: 57231 - DNA, 20 bp, synthetic construct
  misc_feature 1..20: note = chemically synthesized
  source 1..20: mol_type = other DNA
aggcaagcccagagaaaaga

SEQ ID NO: 57232 - DNA, 20 bp, synthetic construct
  misc_feature 1..20: note = chemically synthesized
  source 1..20: mol_type = other DNA
agagtacagacacggaggga

SEQ ID NO: 57233 - DNA, 20 bp, synthetic construct
  misc_feature 1..20: note = chemically synthesized
  source 1..20: mol_type = other DNA
gacacggagggaaggggttc

SEQ ID NO: 57234 - DNA, 20 bp, synthetic construct
  misc_feature 1..20: note = chemically synthesized
  source 1..20: mol_type = other DNA
actcaccagaaaaatgggca

SEQ ID NO: 57235 - DNA, 20 bp, synthetic construct
  misc_feature 1..20: note = chemically synthesized
  source 1..20: mol_type = other DNA
ggggttggggcacggaaata

SEQ ID NO: 57236 - DNA, 20 bp, synthetic construct
  misc_feature 1..20: note = chemically synthesized
  source 1..20: mol_type = other DNA
ggggcacggaaataaggggt

SEQ ID NO: 57237 - DNA, 20 bp, synthetic construct
  misc_feature 1..20: note = chemically synthesized
  source 1..20: mol_type = other DNA
gaggtcagggcacagaaata

SEQ ID NO: 57238 - DNA, 20 bp, synthetic construct
  misc_feature 1..20: note = chemically synthesized
  source 1..20: mol_type = other DNA
agggcacagaaataaggggt

SEQ ID NO: 57239 - DNA, 20 bp, synthetic construct
  misc_feature 1..20: note = chemically synthesized
  source 1..20: mol_type = other DNA
gaggttggggcacagaaata

SEQ ID NO: 57240 - DNA, 20 bp, synthetic construct
  misc_feature 1..20: note = chemically synthesized
  source 1..20: mol_type = other DNA
ggggcacagaaataagggat

SEQ ID NO: 57241 - DNA, 20 bp, synthetic construct
  misc_feature 1..20: note = chemically synthesized
  source 1..20: mol_type = other DNA
ggggtgcagagataagaggt

SEQ ID NO: 57242 - DNA, 20 bp, synthetic construct
  misc_feature 1..20: note = chemically synthesized
  source 1..20: mol_type = other DNA
gaggttggggtgcagaaata

SEQ ID NO: 57243 - DNA, 20 bp, synthetic construct
  misc_feature 1..20: note = chemically synthesized
  source 1..20: mol_type = other DNA
ggggtgcagaaataagggat

SEQ ID NO: 57244 - DNA, 20 bp, synthetic construct
  misc_feature 1..20: note = chemically synthesized
  source 1..20: mol_type = other DNA
agggtgcagagataagaggt

SEQ ID NO: 57245 - DNA, 20 bp, synthetic construct
  misc_feature 1..20: note = chemically synthesized
  source 1..20: mol_type = other DNA
gaggtcggggtgcagaaata

SEQ ID NO: 57246 - DNA, 20 bp, synthetic construct
  misc_feature 1..20: note = chemically synthesized
  source 1..20: mol_type = other DNA
ggggtgcagaaataagggat

SEQ ID NO: 57247 - DNA, 20 bp, synthetic construct
  misc_feature 1..20: note = chemically synthesized
  source 1..20: mol_type = other DNA
ggattggggtgcagagataa

SEQ ID NO: 57248 - DNA, 20 bp, synthetic construct
  misc_feature 1..20: note = chemically synthesized
  source 1..20: mol_type = other DNA
gaggatggggcgtggaaata

SEQ ID NO: 57249 - DNA, 20 bp, synthetic construct
  misc_feature 1..20: note = chemically synthesized
  source 1..20: mol_type = other DNA
tggggcgtggaaataaggga

SEQ ID NO: 57250 - DNA, 20 bp, synthetic construct
  misc_feature 1..20: note = chemically synthesized
  source 1..20: mol_type = other DNA
gaggttggggcacagaaata

SEQ ID NO: 57251 - DNA, 20 bp, synthetic construct
  misc_feature 1..20: note = chemically synthesized
  source 1..20: mol_type = other DNA
ggggcacagaaataagggat

SEQ ID NO: 57252 - DNA, 20 bp, synthetic construct
  misc_feature 1..20: note = chemically synthesized
  source 1..20: mol_type = other DNA
ggggcagagacatggagaga

SEQ ID NO: 57253 - DNA, 20 bp, synthetic construct
  misc_feature 1..20: note = chemically synthesized
  source 1..20: mol_type = other DNA
gagacatggagagaaggggt

SEQ ID NO: 57254 - DNA, 20 bp, synthetic construct
  misc_feature 1..20: note = chemically synthesized
  source 1..20: mol_type = other DNA
cttacccccctccagaaaag

SEQ ID NO: 57255 - DNA, 20 bp, synthetic construct
  misc_feature 1..20: note = chemically synthesized
  source 1..20: mol_type = other DNA
gaaaagtgggatttgccgct

SEQ ID NO: 57256 - DNA, 20 bp, synthetic construct
  misc_feature 1..20: note = chemically synthesized
  source 1..20: mol_type = other DNA
tcccagtccgtgactggcac

SEQ ID NO: 57257 - DNA, 20 bp, synthetic construct
  misc_feature 1..20: note = chemically synthesized
  source 1..20: mol_type = other DNA
ccgtgactggcaccggagtt

SEQ ID NO: 57258 - DNA, 20 bp, synthetic construct
  misc_feature 1..20: note = chemically synthesized
  source 1..20: mol_type = other DNA
ggcaccggagttttgggtcc

SEQ ID NO: 57259 - DNA, 20 bp, synthetic construct
  misc_feature 1..20: note = chemically synthesized
  source 1..20: mol_type = other DNA
tgtctctactggaaaatgaa

SEQ ID NO: 57260 - DNA, 20 bp, synthetic construct
  misc_feature 1..20: note = chemically synthesized
  source 1..20: mol_type = other DNA
ttgaaaggagaaagaagttg

SEQ ID NO: 57261 - DNA, 20 bp, synthetic construct
  misc_feature 1..20: note = chemically synthesized
  source 1..20: mol_type = other DNA
cagtaaaaagaggccactta

SEQ ID NO: 57262 - DNA, 20 bp, synthetic construct
  misc_feature 1..20: note = chemically synthesized
  source 1..20: mol_type = other DNA
ttgaggacctgaggtcgtag

SEQ ID NO: 57263 - DNA, 20 bp, synthetic construct
  misc_feature 1..20: note = chemically synthesized
  source 1..20: mol_type = other DNA
gagcaaagagcaggaggaca

SEQ ID NO: 57264 - DNA, 20 bp, synthetic construct
  misc_feature 1..20: note = chemically synthesized
  source 1..20: mol_type = other DNA
cccaagggaggtcccccaat

SEQ ID NO: 57265 - DNA, 20 bp, synthetic construct
  misc_feature 1..20: note = chemically synthesized
  source 1..20: mol_type = other DNA
aacaaggctgtttatttcac

SEQ ID NO: 57266 - DNA, 20 bp, synthetic construct
  misc_feature 1..20: note = chemically synthesized
  source 1..20: mol_type = other DNA
ttcacctgggtgcaggcagg

SEQ ID NO: 57267 - DNA, 20 bp, synthetic construct
  misc_feature 1..20: note = chemically synthesized
  source 1..20: mol_type = other DNA
aggcaggctgagtccaaaaa

SEQ ID NO: 57268 - DNA, 20 bp, synthetic construct
  misc_feature 1..20: note = chemically synthesized
  source 1..20: mol_type = other DNA
gagagtcagcaaagggagat

SEQ ID NO: 57269 - DNA, 20 bp, synthetic construct
  misc_feature 1..20: note = chemically synthesized
  source 1..20: mol_type = other DNA
gtggggctgttttataagat

SEQ ID NO: 57270 - DNA, 20 bp, synthetic construct
  misc_feature 1..20: note = chemically synthesized
  source 1..20: mol_type = other DNA
aaggaaaattacagtcaaag

SEQ ID NO: 57271 - DNA, 20 bp, synthetic construct
  misc_feature 1..20: note = chemically synthesized
  source 1..20: mol_type = other DNA
ggggttgttctctggcgggc

SEQ ID NO: 57272 - DNA, 20 bp, synthetic construct
  misc_feature 1..20: note = chemically synthesized
  source 1..20: mol_type = other DNA
gttctctggcgggcaggagt

SEQ ID NO: 57273 - DNA, 20 bp, synthetic construct
  misc_feature 1..20: note = chemically synthesized
  source 1..20: mol_type = other DNA
cagtaggggagcttttgagc

SEQ ID NO: 57274 - DNA, 20 bp, synthetic construct
  misc_feature 1..20: note = chemically synthesized
  source 1..20: mol_type = other DNA
agccaggatgagccaggaga

SEQ ID NO: 57275 - DNA, 20 bp, synthetic construct
  misc_feature 1..20: note = chemically synthesized
  source 1..20: mol_type = other DNA
cattttcacttcttttgtgg

SEQ ID NO: 57276 - DNA, 20 bp, synthetic construct
  misc_feature 1..20: note = chemically synthesized
  source 1..20: mol_type = other DNA
acaagttctgttaatgtcag

SEQ ID NO: 57277 - DNA, 20 bp, synthetic construct
  misc_feature 1..20: note = chemically synthesized
  source 1..20: mol_type = other DNA
agttgggtctattagatata

SEQ ID NO: 57278 - DNA, 20 bp, synthetic construct
  misc_feature 1..20: note = chemically synthesized
  source 1..20: mol_type = other DNA
tatacttgggaactttgatg

SEQ ID NO: 57279 - DNA, 20 bp, synthetic construct
  misc_feature 1..20: note = chemically synthesized
  source 1..20: mol_type = other DNA
tttataattgtatcctcttg

SEQ ID NO: 57280 - DNA, 20 bp, synthetic construct
  misc_feature 1..20: note = chemically synthesized
  source 1..20: mol_type = other DNA
tctttctggtttccagttca

SEQ ID NO: 57281 - DNA, 20 bp, synthetic construct
  misc_feature 1..20: note = chemically synthesized
  source 1..20: mol_type = other DNA
tgtgtgcctttataggtgaa

SEQ ID NO: 57282 - DNA, 20 bp, synthetic construct
  misc_feature 1..20: note = chemically synthesized
  source 1..20: mol_type = other DNA
ttcttgaagatcgcataaag

SEQ ID NO: 57283 - DNA, 20 bp, synthetic construct
  misc_feature 1..20: note = chemically synthesized
  source 1..20: mol_type = other DNA
actcagtgtagttactaagt

SEQ ID NO: 57284 - DNA, 20 bp, synthetic construct
  misc_feature 1..20: note = chemically synthesized
  source 1..20: mol_type = other DNA
aaatatagcaagttatttta

SEQ ID NO: 57285 - DNA, 20 bp, synthetic construct
  misc_feature 1..20: note = chemically synthesized
  source 1..20: mol_type = other DNA
gcaagttattttaaaggatg

SEQ ID NO: 57286 - DNA, 20 bp, synthetic construct
  misc_feature 1..20: note = chemically synthesized
  source 1..20: mol_type = other DNA
ttatcttagatcgcaaataa

SEQ ID NO: 57287 - DNA, 20 bp, synthetic construct
  misc_feature 1..20: note = chemically synthesized
  source 1..20: mol_type = other DNA
gtttttgaaagatttgtttt

SEQ ID NO: 57288 - DNA, 20 bp, synthetic construct
  misc_feature 1..20: note = chemically synthesized
  source 1..20: mol_type = other DNA
ttgttttttgggtttcatac

SEQ ID NO: 57289 - DNA, 20 bp, synthetic construct
  misc_feature 1..20: note = chemically synthesized
  source 1..20: mol_type = other DNA
gtttcatactggagttctgt

SEQ ID NO: 57290 - DNA, 20 bp, synthetic construct
  misc_feature 1..20: note = chemically synthesized
  source 1..20: mol_type = other DNA
cacaccaaaaaatacagtaa

SEQ ID NO: 57291 - DNA, 20 bp, synthetic construct
  misc_feature 1..20: note = chemically synthesized
  source 1..20: mol_type = other DNA
ctatgtacttaattttacca

SEQ ID NO: 57292 - DNA, 20 bp, synthetic construct
  misc_feature 1..20: note = chemically synthesized
  source 1..20: mol_type = other DNA
tgcaagatggtctggtgttg

SEQ ID NO: 57293 - DNA, 20 bp, synthetic construct
  misc_feature 1..20: note = chemically synthesized
  source 1..20: mol_type = other DNA
actttatatattgcttatat

SEQ ID NO: 57294 - DNA, 20 bp, synthetic construct
  misc_feature 1..20: note = chemically synthesized
  source 1..20: mol_type = other DNA
ttttaccctataaaatattc

SEQ ID NO: 57295 - DNA, 20 bp, synthetic construct
  misc_feature 1..20: note = chemically synthesized
  source 1..20: mol_type = other DNA
tattgagatgtttgttgtca

SEQ ID NO: 57296 - DNA, 20 bp, synthetic construct
  misc_feature 1..20: note = chemically synthesized
  source 1..20: mol_type = other DNA
tttctcatctcttctgcttt

SEQ ID NO: 57297 - DNA, 20 bp, synthetic construct
  misc_feature 1..20: note = chemically synthesized
  source 1..20: mol_type = other DNA
actatatctaggactacact

SEQ ID NO: 57298 - DNA, 20 bp, synthetic construct
  misc_feature 1..20: note = chemically synthesized
  source 1..20: mol_type = other DNA
tatctaggactacacttaga

SEQ ID NO: 57299 - DNA, 20 bp, synthetic construct
  misc_feature 1..20: note = chemically synthesized
  source 1..20: mol_type = other DNA
tgttggttgaggaagtagaa

SEQ ID NO: 57300 - DNA, 20 bp, synthetic construct
  misc_feature 1..20: note = chemically synthesized
  source 1..20: mol_type = other DNA
tataattagaggaaacagag

SEQ ID NO: 57301 - DNA, 20 bp, synthetic construct
  misc_feature 1..20: note = chemically synthesized
  source 1..20: mol_type = other DNA
attagaggaaacagaggtga

SEQ ID NO: 57302 - DNA, 20 bp, synthetic construct
  misc_feature 1..20: note = chemically synthesized
  source 1..20: mol_type = other DNA
ggtgagtgaattttgtcctc

SEQ ID NO: 57303 - DNA, 20 bp, synthetic construct
  misc_feature 1..20: note = chemically synthesized
  source 1..20: mol_type = other DNA
tcaaaggagaaaatggttta

SEQ ID NO: 57304 - DNA, 20 bp, synthetic construct
  misc_feature 1..20: note = chemically synthesized
  source 1..20: mol_type = other DNA
ttccaattttaaagtcaaat

SEQ ID NO: 57305 - DNA, 20 bp, synthetic construct
  misc_feature 1..20: note = chemically synthesized
  source 1..20: mol_type = other DNA
actgataatatggtgggcta

SEQ ID NO: 57306 - DNA, 20 bp, synthetic construct
  misc_feature 1..20: note = chemically synthesized
  source 1..20: mol_type = other DNA
ctaaagaatcaggtttttag

SEQ ID NO: 57307 - DNA, 20 bp, synthetic construct
  misc_feature 1..20: note = chemically synthesized
  source 1..20: mol_type = other DNA
tttagttggattgtctggtt

SEQ ID NO: 57308 - DNA, 20 bp, synthetic construct
  misc_feature 1..20: note = chemically synthesized
  source 1..20: mol_type = other DNA
tttcttcatatatttgttcc

SEQ ID NO: 57309 - DNA, 20 bp, synthetic construct
  misc_feature 1..20: note = chemically synthesized
  source 1..20: mol_type = other DNA
tgactttaatttttatgtac

SEQ ID NO: 57310 - DNA, 20 bp, synthetic construct
  misc_feature 1..20: note = chemically synthesized
  source 1..20: mol_type = other DNA
tagcatttagagagactgtc

SEQ ID NO: 57311 - DNA, 20 bp, synthetic construct
  misc_feature 1..20: note = chemically synthesized
  source 1..20: mol_type = other DNA
aatcttcaagatcataaaag

SEQ ID NO: 57312 - DNA, 20 bp, synthetic construct
  misc_feature 1..20: note = chemically synthesized
  source 1..20: mol_type = other DNA
attttcttattcatttataa

SEQ ID NO: 57313 - DNA, 20 bp, synthetic construct
  misc_feature 1..20: note = chemically synthesized
  source 1..20: mol_type = other DNA
tcacactgaggacttggctc

SEQ ID NO: 57314 - DNA, 20 bp, synthetic construct
  misc_feature 1..20: note = chemically synthesized
  source 1..20: mol_type = other DNA
agttttttcatgtataccat

SEQ ID NO: 57315 - DNA, 20 bp, synthetic construct
  misc_feature 1..20: note = chemically synthesized
  source 1..20: mol_type = other DNA
ctaaattactctgaaatttt

SEQ ID NO: 57316 - DNA, 20 bp, synthetic construct
  misc_feature 1..20: note = chemically synthesized
  source 1..20: mol_type = other DNA
ctcaagactgtgtggtttaa

SEQ ID NO: 57317 - DNA, 20 bp, synthetic construct
  misc_feature 1..20: note = chemically synthesized
  source 1..20: mol_type = other DNA
ggctctgcaatccctgtctg

SEQ ID NO: 57318 - DNA, 20 bp, synthetic construct
  misc_feature 1..20: note = chemically synthesized
  source 1..20: mol_type = other DNA
tccctgtctgagggattttc

SEQ ID NO: 57319 - DNA, 20 bp, synthetic construct
  misc_feature 1..20: note = chemically synthesized
  source 1..20: mol_type = other DNA
tgtcagaagcttgtctacta

SEQ ID NO: 57320 - DNA, 20 bp, synthetic construct
  misc_feature 1..20: note = chemically synthesized
  source 1..20: mol_type = other DNA
atgtcaccaaagactattgc

SEQ ID NO: 57321 - DNA, 20 bp, synthetic construct
  misc_feature 1..20: note = chemically synthesized
  source 1..20: mol_type = other DNA
taagatttaacattagcaca

SEQ ID NO: 57322 - DNA, 20 bp, synthetic construct
  misc_feature 1..20: note = chemically synthesized
  source 1..20: mol_type = other DNA
acactgagtataattttttt

SEQ ID NO: 57323 - DNA, 20 bp, synthetic construct
  misc_feature 1..20: note = chemically synthesized
  source 1..20: mol_type = other DNA
tgtaaactacacaaagtaaa

SEQ ID NO: 57324 - DNA, 20 bp, synthetic construct
  misc_feature 1..20: note = chemically synthesized
  source 1..20: mol_type = other DNA
ttatatccatcagaggtaag

SEQ ID NO: 57325 - DNA, 20 bp, synthetic construct
  misc_feature 1..20: note = chemically synthesized
  source 1..20: mol_type = other DNA
attcccagaaccaaatgtca

SEQ ID NO: 57326 - DNA, 20 bp, synthetic construct
  misc_feature 1..20: note = chemically synthesized
  source 1..20: mol_type = other DNA
cagaaccaaatgtcactgaa

SEQ ID NO: 57327 - DNA, 20 bp, synthetic construct
  misc_feature 1..20: note = chemically synthesized
  source 1..20: mol_type = other DNA
tgtcactgaattgagtattc

SEQ ID NO: 57328 - DNA, 20 bp, synthetic construct
  misc_feature 1..20: note = chemically synthesized
  source 1..20: mol_type = other DNA
ctcctcccacaattttattt

SEQ ID NO: 57329 - DNA, 20 bp, synthetic construct
  misc_feature 1..20: note = chemically synthesized
  source 1..20: mol_type = other DNA
taacaagcaataataagcca

SEQ ID NO: 57330 - DNA, 20 bp, synthetic construct
  misc_feature 1..20: note = chemically synthesized
  source 1..20: mol_type = other DNA
gatctaagtgcctgtgctgt

SEQ ID NO: 57331 - DNA, 20 bp, synthetic construct
  misc_feature 1..20: note = chemically synthesized
  source 1..20: mol_type = other DNA
attagaactcacccctcttc

SEQ ID NO: 57332 - DNA, 20 bp, synthetic construct
  misc_feature 1..20: note = chemically synthesized
  source 1..20: mol_type = other DNA
agtgtaagaacaacgctgtt

SEQ ID NO: 57333 - DNA, 20 bp, synthetic construct
  misc_feature 1..20: note = chemically synthesized
  source 1..20: mol_type = other DNA
gattttgatactatagacaa

SEQ ID NO: 57334 - DNA, 20 bp, synthetic construct
  misc_feature 1..20: note = chemically synthesized
  source 1..20: mol_type = other DNA
atatgtgcgacacacatgtg

SEQ ID NO: 57335 - DNA, 20 bp, synthetic construct
  misc_feature 1..20: note = chemically synthesized
  source 1..20: mol_type = other DNA
gctatttccagtactgtatg

SEQ ID NO: 57336 - DNA, 20 bp, synthetic construct
  misc_feature 1..20: note = chemically synthesized
  source 1..20: mol_type = other DNA
aaggtaatgacaaatagagc

SEQ ID NO: 57337 - DNA, 20 bp, synthetic construct
  misc_feature 1..20: note = chemically synthesized
  source 1..20: mol_type = other DNA
acagggcaatttgatcagat

SEQ ID NO: 57338 - DNA, 20 bp, synthetic construct
  misc_feature 1..20: note = chemically synthesized
  source 1..20: mol_type = other DNA
cagatctgagtggaggcaat

SEQ ID NO: 57339 - DNA, 20 bp, synthetic construct
  misc_feature 1..20: note = chemically synthesized
  source 1..20: mol_type = other DNA
tggaggcaataagagtgtgt

SEQ ID NO: 57340 - DNA, 20 bp, synthetic construct
  misc_feature 1..20: note = chemically synthesized
  source 1..20: mol_type = other DNA
ccagaaatgcaggcaattgt

SEQ ID NO: 57341 - DNA, 20 bp, synthetic construct
  misc_feature 1..20: note = chemically synthesized
  source 1..20: mol_type = other DNA
agaaggacacctgactccat

SEQ ID NO: 57342 - DNA, 20 bp, synthetic construct
  misc_feature 1..20: note = chemically synthesized
  source 1..20: mol_type = other DNA
acctgactccataagagtga

SEQ ID NO: 57343 - DNA, 20 bp, synthetic construct
  misc_feature 1..20: note = chemically synthesized
  source 1..20: mol_type = other DNA
tgacatcgttaatgccaaag

SEQ ID NO: 57344 - DNA, 20 bp, synthetic construct
  misc_feature 1..20: note = chemically synthesized
  source 1..20: mol_type = other DNA
gcatggccagaaaatagtac

SEQ ID NO: 57345 - DNA, 20 bp, synthetic construct
  misc_feature 1..20: note = chemically synthesized
  source 1..20: mol_type = other DNA
gtacatgggttggtgcaagg

SEQ ID NO: 57346 - DNA, 20 bp, synthetic construct
  misc_feature 1..20: note = chemically synthesized
  source 1..20: mol_type = other DNA
tggtgcaaggaagagtcaat

SEQ ID NO: 57347 - DNA, 20 bp, synthetic construct
  misc_feature 1..20: note = chemically synthesized
  source 1..20: mol_type = other DNA
gagtcaattcggatgatgtg

SEQ ID NO: 57348 - DNA, 20 bp, synthetic construct
  misc_feature 1..20: note = chemically synthesized
  source 1..20: mol_type = other DNA
atggtgtatatcaggcagaa

SEQ ID NO: 57349 - DNA, 20 bp, synthetic construct
  misc_feature 1..20: note = chemically synthesized
  source 1..20: mol_type = other DNA
tgtatatcaggcagaagggg

SEQ ID NO: 57350 - DNA, 20 bp, synthetic construct
  misc_feature 1..20: note = chemically synthesized
  source 1..20: mol_type = other DNA
taatgttctgcctccagtcc

SEQ ID NO: 57351 - DNA, 20 bp, synthetic construct
  misc_feature 1..20: note = chemically synthesized
  source 1..20: mol_type = other DNA
tccagtcccgggatgccaac

SEQ ID NO: 57352 - DNA, 20 bp, synthetic construct
  misc_feature 1..20: note = chemically synthesized
  source 1..20: mol_type = other DNA
gtcccgggatgccaacgaga

SEQ ID NO: 57353 - DNA, 20 bp, synthetic construct
  misc_feature 1..20: note = chemically synthesized
  source 1..20: mol_type = other DNA
cgagagtgaatgttgtaggt

SEQ ID NO: 57354 - DNA, 20 bp, synthetic construct
  misc_feature 1..20: note = chemically synthesized
  source 1..20: mol_type = other DNA
attgagaagcacatggagac

SEQ ID NO: 57355 - DNA, 20 bp, synthetic construct
  misc_feature 1..20: note = chemically synthesized
  source 1..20: mol_type = other DNA
taagacatttcctcagaaaa

SEQ ID NO: 57356 - DNA, 20 bp, synthetic construct
  misc_feature 1..20: note = chemically synthesized
  source 1..20: mol_type = other DNA
aagggcacaggtaagccaca

SEQ ID NO: 57357 - DNA, 20 bp, synthetic construct
  misc_feature 1..20: note = chemically synthesized
  source 1..20: mol_type = other DNA
gtgagtggaagagaaaccta

SEQ ID NO: 57358 - DNA, 20 bp, synthetic construct
  misc_feature 1..20: note = chemically synthesized
  source 1..20: mol_type = other DNA
gcattaatagaaatctcaag

SEQ ID NO: 57359 - DNA, 20 bp, synthetic construct
  misc_feature 1..20: note = chemically synthesized
  source 1..20: mol_type = other DNA
taacttgtagtgtttataaa

SEQ ID NO: 57360 - DNA, 20 bp, synthetic construct
  misc_feature 1..20: note = chemically synthesized
  source 1..20: mol_type = other DNA
agtgtttataaagagagtag

SEQ ID NO: 57361 - DNA, 20 bp, synthetic construct
  misc_feature 1..20: note = chemically synthesized
  source 1..20: mol_type = other DNA
aaagtaatataacactaata

SEQ ID NO: 57362 - DNA, 20 bp, synthetic construct
  misc_feature 1..20: note = chemically synthesized
  source 1..20: mol_type = other DNA
atttaattgacgtgtaatct

SEQ ID NO: 57363 - DNA, 20 bp, synthetic construct
  misc_feature 1..20: note = chemically synthesized
  source 1..20: mol_type = other DNA
atattgtttatcattatatg

SEQ ID NO: 57364 - DNA, 20 bp, synthetic construct
  misc_feature 1..20: note = chemically synthesized
  source 1..20: mol_type = other DNA
tatagtaaatattaaatgta

SEQ ID NO: 57365 - DNA, 20 bp, synthetic construct
  misc_feature 1..20: note = chemically synthesized
  source 1..20: mol_type = other DNA
aatttaatatattagaacac

SEQ ID NO: 57366 - DNA, 20 bp, synthetic construct
  misc_feature 1..20: note = chemically synthesized
  source 1..20: mol_type = other DNA
aacacaaggatagtttctcc

SEQ ID NO: 57367 - DNA, 20 bp, synthetic construct
  misc_feature 1..20: note = chemically synthesized
  source 1..20: mol_type = other DNA
agctcctctgtattttgcag

SEQ ID NO: 57368 - DNA, 20 bp, synthetic construct
  misc_feature 1..20: note = chemically synthesized
  source 1..20: mol_type = other DNA
gggtcagtcttctgctggaa

SEQ ID NO: 57369 - DNA, 20 bp, synthetic construct
  misc_feature 1..20: note = chemically synthesized
  source 1..20: mol_type = other DNA
gtcacatgtgatggtggggc

SEQ ID NO: 57370 - DNA, 20 bp, synthetic construct
  misc_feature 1..20: note = chemically synthesized
  source 1..20: mol_type = other DNA
ttaacgttggaggccagaaa

SEQ ID NO: 57371 - DNA, 20 bp, synthetic construct
  misc_feature 1..20: note = chemically synthesized
  source 1..20: mol_type = other DNA
tggaggccagaaatggaatt

SEQ ID NO: 57372 - DNA, 20 bp, synthetic construct
  misc_feature 1..20: note = chemically synthesized
  source 1..20: mol_type = other DNA
tcaggatggggctcagaaat

SEQ ID NO: 57373 - DNA, 20 bp, synthetic construct
  misc_feature 1..20: note = chemically synthesized
  source 1..20: mol_type = other DNA
tcttcgttaggcataatcag

SEQ ID NO: 57374 - DNA, 20 bp, synthetic construct
  misc_feature 1..20: note = chemically synthesized
  source 1..20: mol_type = other DNA
ttgactggaggacatagaga

SEQ ID NO: 57375 - DNA, 20 bp, synthetic construct
  misc_feature 1..20: note = chemically synthesized
  source 1..20: mol_type = other DNA
ccctcaagaagcaattaacc

SEQ ID NO: 57376 - DNA, 20 bp, synthetic construct
  misc_feature 1..20: note = chemically synthesized
  source 1..20: mol_type = other DNA
aataattattcccagaaact

SEQ ID NO: 57377 - DNA, 20 bp, synthetic construct
  misc_feature 1..20: note = chemically synthesized
  source 1..20: mol_type = other DNA
ggtgtattagagagaaaggg

SEQ ID NO: 57378 - DNA, 20 bp, synthetic construct
  misc_feature 1..20: note = chemically synthesized
  source 1..20: mol_type = other DNA
ttcctgagaagcatgctgga

SEQ ID NO: 57379 - DNA, 20 bp, synthetic construct
  misc_feature 1..20: note = chemically synthesized
  source 1..20: mol_type = other DNA
aagtaaaaagtggagagatg

SEQ ID NO: 57380 - DNA, 20 bp, synthetic construct
  misc_feature 1..20: note = chemically synthesized
  source 1..20: mol_type = other DNA
aaaagtggagagatgcagag

SEQ ID NO: 57381 - DNA, 20 bp, synthetic construct
  misc_feature 1..20: note = chemically synthesized
  source 1..20: mol_type = other DNA
ctagagacggaactgcagat

SEQ ID NO: 57382 - DNA, 20 bp, synthetic construct
  misc_feature 1..20: note = chemically synthesized
  source 1..20: mol_type = other DNA
tggtgtagatagtaataaag

SEQ ID NO: 57383 - DNA, 20 bp, synthetic construct
  misc_feature 1..20: note = chemically synthesized
  source 1..20: mol_type = other DNA
ctgaaatttgtttgggggac

SEQ ID NO: 57384 - DNA, 20 bp, synthetic construct
  misc_feature 1..20: note = chemically synthesized
  source 1..20: mol_type = other DNA
gtttgggggacttgggtaat

SEQ ID NO: 57385 - DNA, 20 bp, synthetic construct
  misc_feature 1..20: note = chemically synthesized
  source 1..20: mol_type = other DNA
ctaataccaagtataagatc

SEQ ID NO: 57386 - DNA, 20 bp, synthetic construct
  misc_feature 1..20: note = chemically synthesized
  source 1..20: mol_type = other DNA
gttggtctccaagcatgatg

SEQ ID NO: 57387 - DNA, 20 bp, synthetic construct
  misc_feature 1..20: note = chemically synthesized
  source 1..20: mol_type = other DNA
ttttatatttttatataaat

SEQ ID NO: 57388 - DNA, 20 bp, synthetic construct
  misc_feature 1..20: note = chemically synthesized
  source 1..20: mol_type = other DNA
aactttgtattctttcaaat

SEQ ID NO: 57389 - DNA, 20 bp, synthetic construct
  misc_feature 1..20: note = chemically synthesized
  source 1..20: mol_type = other DNA
taacaccctcggaaggaagc

SEQ ID NO: 57390 - DNA, 20 bp, synthetic construct
  misc_feature 1..20: note = chemically synthesized
  source 1..20: mol_type = other DNA
ttagatatgacacaaaaagt

SEQ ID NO: 57391 - DNA, 20 bp, synthetic construct
  misc_feature 1..20: note = chemically synthesized
  source 1..20: mol_type = other DNA
acaaaaaataaatacataaa

SEQ ID NO: 57392 - DNA, 20 bp, synthetic construct
  misc_feature 1..20: note = chemically synthesized
  source 1..20: mol_type = other DNA
tatttcataagtttaatatc

SEQ ID NO: 57393 - DNA, 20 bp, synthetic construct
  misc_feature 1..20: note = chemically synthesized
  source 1..20: mol_type = other DNA
tttaaaaatatgcaaatgat

SEQ ID NO: 57394 - DNA, 20 bp, synthetic construct
  misc_feature 1..20: note = chemically synthesized
  source 1..20: mol_type = other DNA
aaaatatgcaaatgatggga

SEQ ID NO: 57395 - DNA, 20 bp, synthetic construct
  misc_feature 1..20: note = chemically synthesized
  source 1..20: mol_type = other DNA
agacactacttcaaacttac

SEQ ID NO: 57396 - DNA, 20 bp, synthetic construct
  misc_feature 1..20: note = chemically synthesized
  source 1..20: mol_type = other DNA
tgacaaagatataagaaaat

SEQ ID NO: 57397 - DNA, 20 bp, synthetic construct
  misc_feature 1..20: note = chemically synthesized
  source 1..20: mol_type = other DNA
gttcttcaaaaacttaggca

SEQ ID NO: 57398 - DNA, 20 bp, synthetic construct
  misc_feature 1..20: note = chemically synthesized
  source 1..20: mol_type = other DNA
agccaaaaggtggaaacaac

SEQ ID NO: 57399 - DNA, 20 bp, synthetic construct
  misc_feature 1..20: note = chemically synthesized
  source 1..20: mol_type = other DNA
accagaatgtacataaacag

SEQ ID NO: 57400 - DNA, 20 bp, synthetic construct
  misc_feature 1..20: note = chemically synthesized
  source 1..20: mol_type = other DNA
gaatgtacataaacagatga

SEQ ID NO: 57401 - DNA, 20 bp, synthetic construct
  misc_feature 1..20: note = chemically synthesized
  source 1..20: mol_type = other DNA
aatgtgatatatacacacaa

SEQ ID NO: 57402 - DNA, 20 bp, synthetic construct
  misc_feature 1..20: note = chemically synthesized
  source 1..20: mol_type = other DNA
aatattatgtagcaataaaa

SEQ ID NO: 57403 - DNA, 20 bp, synthetic construct
  misc_feature 1..20: note = chemically synthesized
  source 1..20: mol_type = other DNA
gtaagtccttatttaatgtc

SEQ ID NO: 57404 - DNA, 20 bp, synthetic construct
  misc_feature 1..20: note = chemically synthesized
  source 1..20: mol_type = other DNA
actgttagatgagaaaaaaa

SEQ ID NO: 57405 - DNA, 20 bp, synthetic construct
  misc_feature 1..20: note = chemically synthesized
  source 1..20: mol_type = other DNA
ggcttaaagtttcagtttcc

SEQ ID NO: 57406 - DNA, 20 bp, synthetic construct
  misc_feature 1..20: note = chemically synthesized
  source 1..20: mol_type = other DNA
gtttcagtttccaagaatct

SEQ ID NO: 57407 - DNA, 20 bp, synthetic construct
  misc_feature 1..20: note = chemically synthesized
  source 1..20: mol_type = other DNA
accactatacatgttatggc

SEQ ID NO: 57408 - DNA, 20 bp, synthetic construct
  misc_feature 1..20: note = chemically synthesized
  source 1..20: mol_type = other DNA
atggactttgaaaccttatg

SEQ ID NO: 57409 - DNA, 20 bp, synthetic construct
  misc_feature 1..20: note = chemically synthesized
  source 1..20: mol_type = other DNA
cacaaaacaacaaatattgt

SEQ ID NO: 57410 - DNA, 20 bp, synthetic construct
  misc_feature 1..20: note = chemically synthesized
  source 1..20: mol_type = other DNA
tattgtatgaatctatttat

SEQ ID NO: 57411 - DNA, 20 bp, synthetic construct
  misc_feature 1..20: note = chemically synthesized
  source 1..20: mol_type = other DNA
tagaggttactatgggactg

SEQ ID NO: 57412 - DNA, 20 bp, synthetic construct
  misc_feature 1..20: note = chemically synthesized
  source 1..20: mol_type = other DNA
aacaagtatagcatttctgc

SEQ ID NO: 57413 - DNA, 20 bp, synthetic construct
  misc_feature 1..20: note = chemically synthesized
  source 1..20: mol_type = other DNA
agacaaatttttattttgat

SEQ ID NO: 57414 - DNA, 20 bp, synthetic construct
  misc_feature 1..20: note = chemically synthesized
  source 1..20: mol_type = other DNA
aatttttattttgattaggg

SEQ ID NO: 57415 - DNA, 20 bp, synthetic construct
  misc_feature 1..20: note = chemically synthesized
  source 1..20: mol_type = other DNA
ttattttgattagggttgaa

SEQ ID NO: 57416 - DNA, 20 bp, synthetic construct
  misc_feature 1..20: note = chemically synthesized
  source 1..20: mol_type = other DNA
agggttgaattgaatttatt

SEQ ID NO: 57417 - DNA, 20 bp, synthetic construct
  misc_feature 1..20: note = chemically synthesized
  source 1..20: mol_type = other DNA
ttattatgagttgtttctga

SEQ ID NO: 57418 - DNA, 20 bp, synthetic construct
  misc_feature 1..20: note = chemically synthesized
  source 1..20: mol_type = other DNA
tatacagttctattatcatt

SEQ ID NO: 57419 - DNA, 20 bp, synthetic construct
  misc_feature 1..20: note = chemically synthesized
  source 1..20: mol_type = other DNA
tatttttggtttttttgaga

SEQ ID NO: 57420 - DNA, 20 bp, synthetic construct
  misc_feature 1..20: note = chemically synthesized
  source 1..20: mol_type = other DNA
tctctctctgtggtccaggc

SEQ ID NO: 57421 - DNA, 20 bp, synthetic construct
  misc_feature 1..20: note = chemically synthesized
  source 1..20: mol_type = other DNA
ctcactgcaacctccgcctc

SEQ ID NO: 57422 - DNA, 20 bp, synthetic construct
  misc_feature 1..20: note = chemically synthesized
  source 1..20: mol_type = other DNA
gcctcagcctcccatgtagc

SEQ ID NO: 57423 - DNA, 20 bp, synthetic construct
  misc_feature 1..20: note = chemically synthesized
  source 1..20: mol_type = other DNA
gtctggcctctatcatcatt

SEQ ID NO: 57424 - DNA, 20 bp, synthetic construct
  misc_feature 1..20: note = chemically synthesized
  source 1..20: mol_type = other DNA
agtctgtagtggtactggtc

SEQ ID NO: 57425 - DNA, 20 bp, synthetic construct
  misc_feature 1..20: note = chemically synthesized
  source 1..20: mol_type = other DNA
ttccctttcccttcctgctg

SEQ ID NO: 57426 - DNA, 20 bp, synthetic construct
  misc_feature 1..20: note = chemically synthesized
  source 1..20: mol_type = other DNA
agccatttcctaaatccttt

SEQ ID NO: 57427 - DNA, 20 bp, synthetic construct
  misc_feature 1..20: note = chemically synthesized
  source 1..20: mol_type = other DNA
ttcctaaatcctttcagaat

SEQ ID NO: 57428 - DNA, 20 bp, synthetic construct
  misc_feature 1..20: note = chemically synthesized
  source 1..20: mol_type = other DNA
gatatcatgttgcatgcatt

SEQ ID NO: 57429 - DNA, 20 bp, synthetic construct
  misc_feature 1..20: note = chemically synthesized
  source 1..20: mol_type = other DNA
ttttatggagaaatgcaacg

SEQ ID NO: 57430 - DNA, 20 bp, synthetic construct
  misc_feature 1..20: note = chemically synthesized
  source 1..20: mol_type = other DNA
gctgagtgtaaatttcacat

SEQ ID NO: 57431 - DNA, 20 bp, synthetic construct
  misc_feature 1..20: note = chemically synthesized
  source 1..20: mol_type = other DNA
agaatgtccaaaacattgtg

SEQ ID NO: 57432 - DNA, 20 bp, synthetic construct
  misc_feature 1..20: note = chemically synthesized
  source 1..20: mol_type = other DNA
aacaaattaattagattttt

SEQ ID NO: 57433 - DNA, 20 bp, synthetic construct
  misc_feature 1..20: note = chemically synthesized
  source 1..20: mol_type = other DNA
aagctaagcataagccaagc

SEQ ID NO: 57434 - DNA, 20 bp, synthetic construct
  misc_feature 1..20: note = chemically synthesized
  source 1..20: mol_type = other DNA
aaaaatttgtattgatgtga

SEQ ID NO: 57435 - DNA, 20 bp, synthetic construct
  misc_feature 1..20: note = chemically synthesized
  source 1..20: mol_type = other DNA
tcatagataattacttttgc

SEQ ID NO: 57436 - DNA, 20 bp, synthetic construct
  misc_feature 1..20: note = chemically synthesized
  source 1..20: mol_type = other DNA
catgatgctccattgatgac

SEQ ID NO: 57437 - DNA, 20 bp, synthetic construct
  misc_feature 1..20: note = chemically synthesized
  source 1..20: mol_type = other DNA
aattcactattattcacttg

SEQ ID NO: 57438 - DNA, 20 bp, synthetic construct
  misc_feature 1..20: note = chemically synthesized
  source 1..20: mol_type = other DNA
agagactttgtgagatgtca

SEQ ID NO: 57439 - DNA, 20 bp, synthetic construct
  misc_feature 1..20: note = chemically synthesized
  source 1..20: mol_type = other DNA
agtgagttagaaaatattct

SEQ ID NO: 57440 - DNA, 20 bp, synthetic construct
  misc_feature 1..20: note = chemically synthesized
  source 1..20: mol_type = other DNA
gttattggttcaagtctctg

SEQ ID NO: 57441 - DNA, 20 bp, synthetic construct
  misc_feature 1..20: note = chemically synthesized
  source 1..20: mol_type = other DNA
aagtctctgcagagtacagc

SEQ ID NO: 57442 - DNA, 20 bp, synthetic construct
  misc_feature 1..20: note = chemically synthesized
  source 1..20: mol_type = other DNA
gggagtgttgtacatttcag

SEQ ID NO: 57443 - DNA, 20 bp, synthetic construct
  misc_feature 1..20: note = chemically synthesized
  source 1..20: mol_type = other DNA
tctacgtaggaaaagtcaat

SEQ ID NO: 57444 - DNA, 20 bp, synthetic construct
  misc_feature 1..20: note = chemically synthesized
  source 1..20: mol_type = other DNA
atagtatttctgaaaaaatg

SEQ ID NO: 57445 - DNA, 20 bp, synthetic construct
  misc_feature 1..20: note = chemically synthesized
  source 1..20: mol_type = other DNA
tttttcaaaacctttgatct

SEQ ID NO: 57446 - DNA, 20 bp, synthetic construct
  misc_feature 1..20: note = chemically synthesized
  source 1..20: mol_type = other DNA
ccatcattttaagtgtgttt

SEQ ID NO: 57447 - DNA, 20 bp, synthetic construct
  misc_feature 1..20: note = chemically synthesized
  source 1..20: mol_type = other DNA
aagtgtgtttgaggatttct

SEQ ID NO: 57448 - DNA, 20 bp, synthetic construct
  misc_feature 1..20: note = chemically synthesized
  source 1..20: mol_type = other DNA
ggtcttcaccccataaatga

SEQ ID NO: 57449 - DNA, 20 bp, synthetic construct
  misc_feature 1..20: note = chemically synthesized
  source 1..20: mol_type = other DNA
aacacatagagactgcccac

SEQ ID NO: 57450 - DNA, 20 bp, synthetic construct
  misc_feature 1..20: note = chemically synthesized
  source 1..20: mol_type = other DNA
tagagactgcccactaggat

SEQ ID NO: 57451 - DNA, 20 bp, synthetic construct
  misc_feature 1..20: note = chemically synthesized
  source 1..20: mol_type = other DNA
actaggatgtgaatgtggtg

SEQ ID NO: 57452 - DNA, 20 bp, synthetic construct
  misc_feature 1..20: note = chemically synthesized
  source 1..20: mol_type = other DNA
agcgatgggcaagaaatgaa

SEQ ID NO: 57453 - DNA, 20 bp, synthetic construct
  misc_feature 1..20: note = chemically synthesized
  source 1..20: mol_type = other DNA
gcaagaaatgaaaagaatgc

SEQ ID NO: 57454 - DNA, 20 bp, synthetic construct
  misc_feature 1..20: note = chemically synthesized
  source 1..20: mol_type = other DNA
ccaggaagatatctgaaaca

SEQ ID NO: 57455 - DNA, 20 bp, synthetic construct
  misc_feature 1..20: note = chemically synthesized
  source 1..20: mol_type = other DNA
gatatctgaaacactgagtg

SEQ ID NO: 57456 - DNA, 20 bp, synthetic construct
  misc_feature 1..20: note = chemically synthesized
  source 1..20: mol_type = other DNA
ctgagtgaaggatcattgtg

SEQ ID NO: 57457 - DNA, 20 bp, synthetic construct
  misc_feature 1..20: note = chemically synthesized
  source 1..20: mol_type = other DNA
gcactatatccagtcctgta

SEQ ID NO: 57458 - DNA, 20 bp, synthetic construct
  misc_feature 1..20: note = chemically synthesized
  source 1..20: mol_type = other DNA
tctggcaatgtgctcacagt

SEQ ID NO: 57459 - DNA, 20 bp, synthetic construct
  misc_feature 1..20: note = chemically synthesized
  source 1..20: mol_type = other DNA
atgtgctcacagtaggaatg

SEQ ID NO: 57460 - DNA, 20 bp, synthetic construct
  misc_feature 1..20: note = chemically synthesized
  source 1..20: mol_type = other DNA
ggttaaaatggtgtatctca

SEQ ID NO: 57461 - DNA, 20 bp, synthetic construct
  misc_feature 1..20: note = chemically synthesized
  source 1..20: mol_type = other DNA
cggtcaaatgccattgccag

SEQ ID NO: 57462 - DNA, 20 bp, synthetic construct
  misc_feature 1..20: note = chemically synthesized
  source 1..20: mol_type = other DNA
tctgagacacacaactacca

SEQ ID NO: 57463 - DNA, 20 bp, synthetic construct
  misc_feature 1..20: note = chemically synthesized
  source 1..20: mol_type = other DNA
actaccaaaggatatgtcca

SEQ ID NO: 57464 - DNA, 20 bp, synthetic construct
  misc_feature 1..20: note = chemically synthesized
  source 1..20: mol_type = other DNA
atgtccatggagtggaacca

SEQ ID NO: 57465 - DNA, 20 bp, synthetic construct
  misc_feature 1..20: note = chemically synthesized
  source 1..20: mol_type = other DNA
ggaagtcggctgaggccagc

SEQ ID NO: 57466 - DNA, 20 bp, synthetic construct
  misc_feature 1..20: note = chemically synthesized
  source 1..20: mol_type = other DNA
acaatgtacataaaagaaaa

SEQ ID NO: 57467 - DNA, 20 bp, synthetic construct
  misc_feature 1..20: note = chemically synthesized
  source 1..20: mol_type = other DNA
gtatgcaagccttccagccc

SEQ ID NO: 57468 - DNA, 20 bp, synthetic construct
  misc_feature 1..20: note = chemically synthesized
  source 1..20: mol_type = other DNA
caggacataccacacatcct

SEQ ID NO: 57469 - DNA, 20 bp, synthetic construct
  misc_feature 1..20: note = chemically synthesized
  source 1..20: mol_type = other DNA
tagtgaaagactacaaagtt

SEQ ID NO: 57470 - DNA, 20 bp, synthetic construct
  misc_feature 1..20: note = chemically synthesized
  source 1..20: mol_type = other DNA
tttagaaacactaccttagg

SEQ ID NO: 57471 - DNA, 20 bp, synthetic construct
  misc_feature 1..20: note = chemically synthesized
  source 1..20: mol_type = other DNA
tgttttcttctctgggaaag

SEQ ID NO: 57472 - DNA, 20 bp, synthetic construct
  misc_feature 1..20: note = chemically synthesized
  source 1..20: mol_type = other DNA
ctctgggaaaggagagtaaa

SEQ ID NO: 57473 - DNA, 20 bp, synthetic construct
  misc_feature 1..20: note = chemically synthesized
  source 1..20: mol_type = other DNA
gagtaaaatgggttaataga

SEQ ID NO: 57474 - DNA, 20 bp, synthetic construct
  misc_feature 1..20: note = chemically synthesized
  source 1..20: mol_type = other DNA
gcctcttaccctaggcccta

SEQ ID NO: 57475 - DNA, 20 bp, synthetic construct
  misc_feature 1..20: note = chemically synthesized
  source 1..20: mol_type = other DNA
ctactggatttaaagtaagg

SEQ ID NO: 57476 - DNA, 20 bp, synthetic construct
  misc_feature 1..20: note = chemically synthesized
  source 1..20: mol_type = other DNA
tcatatccctaaggaaaata

SEQ ID NO: 57477 - DNA, 20 bp, synthetic construct
  misc_feature 1..20: note = chemically synthesized
  source 1..20: mol_type = other DNA
tgctgcttacagaaatggga

SEQ ID NO: 57478 - DNA, 20 bp, synthetic construct
  misc_feature 1..20: note = chemically synthesized
  source 1..20: mol_type = other DNA
taatctatttctcaaaaata

SEQ ID NO: 57479 - DNA, 20 bp, synthetic construct
  misc_feature 1..20: note = chemically synthesized
  source 1..20: mol_type = other DNA
atttgcaatggcagacggag

SEQ ID NO: 57480 - DNA, 20 bp, synthetic construct
  misc_feature 1..20: note = chemically synthesized
  source 1..20: mol_type = other DNA
cagcactttgagaggctgag

SEQ ID NO: 57481 - DNA, 20 bp, synthetic construct
  misc_feature 1..20: note = chemically synthesized
  source 1..20: mol_type = other DNA
ggcgggtagatcacaaggtc

SEQ ID NO: 57482 - DNA, 20 bp, synthetic construct
  misc_feature 1..20: note = chemically synthesized
  source 1..20: mol_type = other DNA
tactcaagaggctgaggcag

SEQ ID NO: 57483 - DNA, 20 bp, synthetic construct
  misc_feature 1..20: note = chemically synthesized
  source 1..20: mol_type = other DNA
tatatgcctcataggtggta

SEQ ID NO: 57484 - DNA, 20 bp, synthetic construct
  misc_feature 1..20: note = chemically synthesized
  source 1..20: mol_type = other DNA
gtttattatactttaagttc

SEQ ID NO: 57485 - DNA, 20 bp, synthetic construct
  misc_feature 1..20: note = chemically synthesized
  source 1..20: mol_type = other DNA
tcattgttcaactcccacct

SEQ ID NO: 57486 - DNA, 20 bp, synthetic construct
  misc_feature 1..20: note = chemically synthesized
  source 1..20: mol_type = other DNA
ttcaactcccacctatgagt

SEQ ID NO: 57487 - DNA, 20 bp, synthetic construct
  misc_feature 1..20: note = chemically synthesized
  source 1..20: mol_type = other DNA
cgtccttgcgatactttgct

SEQ ID NO: 57488 - DNA, 20 bp, synthetic construct
  misc_feature 1..20: note = chemically synthesized
  source 1..20: mol_type = other DNA
agtctatcattgttggacat

SEQ ID NO: 57489 - DNA, 20 bp, synthetic construct
  misc_feature 1..20: note = chemically synthesized
  source 1..20: mol_type = other DNA
ggttccaagtctttgctatt

SEQ ID NO: 57490 - DNA, 20 bp, synthetic construct
  misc_feature 1..20: note = chemically synthesized
  source 1..20: mol_type = other DNA
gcagcatgatttacattcct

SEQ ID NO: 57491 - DNA, 20 bp, synthetic construct
  misc_feature 1..20: note = chemically synthesized
  source 1..20: mol_type = other DNA
tttgggtatatacccagtaa

SEQ ID NO: 57492 - DNA, 20 bp, synthetic construct
  misc_feature 1..20: note = chemically synthesized
  source 1..20: mol_type = other DNA
tatacccagtaataggatgg

SEQ ID NO: 57493 - DNA, 20 bp, synthetic construct
  misc_feature 1..20: note = chemically synthesized
  source 1..20: mol_type = other DNA
tttctagttctagatccctg

SEQ ID NO: 57494 - DNA, 20 bp, synthetic construct
  misc_feature 1..20: note = chemically synthesized
  source 1..20: mol_type = other DNA
tttttttcttgtaaatttgt

SEQ ID NO: 57495 - DNA, 20 bp, synthetic construct
  misc_feature 1..20: note = chemically synthesized
  source 1..20: mol_type = other DNA
gtttgagttcattgtagatt

SEQ ID NO: 57496 - DNA, 20 bp, synthetic construct
  misc_feature 1..20: note = chemically synthesized
  source 1..20: mol_type = other DNA
ggatattagccctttgtcag

SEQ ID NO: 57497 - DNA, 20 bp, synthetic construct
  misc_feature 1..20: note = chemically synthesized
  source 1..20: mol_type = other DNA
tccttgcccatgcctatgtc

SEQ ID NO: 57498 - DNA, 20 bp, synthetic construct
  misc_feature 1..20: note = chemically synthesized
  source 1..20: mol_type = other DNA
ttttgtataaggtgtaagga

SEQ ID NO: 57499 - DNA, 20 bp, synthetic construct
  misc_feature 1..20: note = chemically synthesized
  source 1..20: mol_type = other DNA
ccagcatcatttattaaata

SEQ ID NO: 57500 - DNA, 20 bp, synthetic construct
  misc_feature 1..20: note = chemically synthesized
  source 1..20: mol_type = other DNA
ttgtcaaagatcagatagtt

SEQ ID NO: 57501 - DNA, 20 bp, synthetic construct
  misc_feature 1..20: note = chemically synthesized
  source 1..20: mol_type = other DNA
ctagctttgttcttttggct

SEQ ID NO: 57502 - DNA, 20 bp, synthetic construct
  misc_feature 1..20: note = chemically synthesized
  source 1..20: mol_type = other DNA
aaagtcattggtagcttgat

SEQ ID NO: 57503 - DNA, 20 bp, synthetic construct
  misc_feature 1..20: note = chemically synthesized
  source 1..20: mol_type = other DNA
gtagcttgatggggatggca

SEQ ID NO: 57504 - DNA, 20 bp, synthetic construct
  misc_feature 1..20: note = chemically synthesized
  source 1..20: mol_type = other DNA
attcttcctatccatgagca

SEQ ID NO: 57505 - DNA, 20 bp, synthetic construct
  misc_feature 1..20: note = chemically synthesized
  source 1..20: mol_type = other DNA
tccttcacatcccttgtaag

SEQ ID NO: 57506 - DNA, 20 bp, synthetic construct
  misc_feature 1..20: note = chemically synthesized
  source 1..20: mol_type = other DNA
ttattctctttgaggcaatt

SEQ ID NO: 57507 - DNA, 20 bp, synthetic construct
  misc_feature 1..20: note = chemically synthesized
  source 1..20: mol_type = other DNA
tctttgaggcaattgtgaat

SEQ ID NO: 57508 - DNA, 20 bp, synthetic construct
  misc_feature 1..20: note = chemically synthesized
  source 1..20: mol_type = other DNA
tttgtctgttattggtgtat

SEQ ID NO: 57509 - DNA, 20 bp, synthetic construct
  misc_feature 1..20: note = chemically synthesized
  source 1..20: mol_type = other DNA
gagattttgggctgagacga

SEQ ID NO: 57510 - DNA, 20 bp, synthetic construct
  misc_feature 1..20: note = chemically synthesized
  source 1..20: mol_type = other DNA
ttcacttcctcttttcctaa

SEQ ID NO: 57511 - DNA, 20 bp, synthetic construct
  misc_feature 1..20: note = chemically synthesized
  source 1..20: mol_type = other DNA
ccagaacttccaacactatg

SEQ ID NO: 57512 - DNA, 20 bp, synthetic construct
  misc_feature 1..20: note = chemically synthesized
  source 1..20: mol_type = other DNA
cttccaacactatgttgaat

SEQ ID NO: 57513 - DNA, 20 bp, synthetic construct
  misc_feature 1..20: note = chemically synthesized
  source 1..20: mol_type = other DNA
gtcttgtgccagttttcaaa

SEQ ID NO: 57514 - DNA, 20 bp, synthetic construct
  misc_feature 1..20: note = chemically synthesized
  source 1..20: mol_type = other DNA
cattcagtatgatattggct

SEQ ID NO: 57515 - DNA, 20 bp, synthetic construct
  misc_feature 1..20: note = chemically synthesized
  source 1..20: mol_type = other DNA
ccatcgatacctaatttatt

SEQ ID NO: 57516 - DNA, 20 bp, synthetic construct
  misc_feature 1..20: note = chemically synthesized
  source 1..20: mol_type = other DNA
gtttttagtatgaagcattg

SEQ ID NO: 57517 - DNA, 20 bp, synthetic construct
  misc_feature 1..20: note = chemically synthesized
  source 1..20: mol_type = other DNA
tctttggttctgtttatatg

SEQ ID NO: 57518 - DNA, 20 bp, synthetic construct
  misc_feature 1..20: note = chemically synthesized
  source 1..20: mol_type = other DNA
ttgaaccagccctgcatccc

SEQ ID NO: 57519 - DNA, 20 bp, synthetic construct
  misc_feature 1..20: note = chemically synthesized
  source 1..20: mol_type = other DNA
atgaagcccacttgatcatg

SEQ ID NO: 57520 - DNA, 20 bp, synthetic construct
  misc_feature 1..20: note = chemically synthesized
  source 1..20: mol_type = other DNA
ataagctttttgatgtgctc

SEQ ID NO: 57521 - DNA, 20 bp, synthetic construct
  misc_feature 1..20: note = chemically synthesized
  source 1..20: mol_type = other DNA
tggtttgccagtattttact

SEQ ID NO: 57522 - DNA, 20 bp, synthetic construct
  misc_feature 1..20: note = chemically synthesized
  source 1..20: mol_type = other DNA
tttttgcatcgatgttcatc

SEQ ID NO: 57523 - DNA, 20 bp, synthetic construct
  misc_feature 1..20: note = chemically synthesized
  source 1..20: mol_type = other DNA
gatgatgctggcctcataaa

SEQ ID NO: 57524 - DNA, 20 bp, synthetic construct
  misc_feature 1..20: note = chemically synthesized
  source 1..20: mol_type = other DNA
gcctcataaaatgagttagg

SEQ ID NO: 57525 - DNA, 20 bp, synthetic construct
  misc_feature 1..20: note = chemically synthesized
  source 1..20: mol_type = other DNA
ttccctctttttctattgat

SEQ ID NO: 57526 - DNA, 20 bp, synthetic construct
  misc_feature 1..20: note = chemically synthesized
  source 1..20: mol_type = other DNA
ttgattggaatagtttcaga

SEQ ID NO: 57527 - DNA, 20 bp, synthetic construct
  misc_feature 1..20: note = chemically synthesized
  source 1..20: mol_type = other DNA
gctcctccttgtacctctgg

SEQ ID NO: 57528 - DNA, 20 bp, synthetic construct
  misc_feature 1..20: note = chemically synthesized
  source 1..20: mol_type = other DNA
acctctggtagaattcggct

SEQ ID NO: 57529 - DNA, 20 bp, synthetic construct
  misc_feature 1..20: note = chemically synthesized
  source 1..20: mol_type = other DNA
accagctaacatcataatga

SEQ ID NO: 57530 - DNA, 20 bp, synthetic construct
  misc_feature 1..20: note = chemically synthesized
  source 1..20: mol_type = other DNA
aaaagacacagactggcaaa

SEQ ID NO: 57531 - DNA, 20 bp, synthetic construct
  misc_feature 1..20: note = chemically synthesized
  source 1..20: mol_type = other DNA
acagactggcaaattggata

SEQ ID NO: 57532 - DNA, 20 bp, synthetic construct
  misc_feature 1..20: note = chemically synthesized
  source 1..20: mol_type = other DNA
cacacataggctcaaaataa

SEQ ID NO: 57533 - DNA, 20 bp, synthetic construct
  misc_feature 1..20: note = chemically synthesized
  source 1..20: mol_type = other DNA
aatggaaaacaaaaaaaagg

SEQ ID NO: 57534 - DNA, 20 bp, synthetic construct
  misc_feature 1..20: note = chemically synthesized
  source 1..20: mol_type = other DNA
aggccattacatactggtaa

SEQ ID NO: 57535 - DNA, 20 bp, synthetic construct
  misc_feature 1..20: note = chemically synthesized
  source 1..20: mol_type = other DNA
caacgagacagaaagttaac

SEQ ID NO: 57536 - DNA, 20 bp, synthetic construct
  misc_feature 1..20: note = chemically synthesized
  source 1..20: mol_type = other DNA
gaaagttaacaaggatatcc

SEQ ID NO: 57537 - DNA, 20 bp, synthetic construct
  misc_feature 1..20: note = chemically synthesized
  source 1..20: mol_type = other DNA
ttaacaaggatatccaggaa

SEQ ID NO: 57538 - DNA, 20 bp, synthetic construct
  misc_feature 1..20: note = chemically synthesized
  source 1..20: mol_type = other DNA
aactctccatcccaaatcaa

SEQ ID NO: 57539 - DNA, 20 bp, synthetic construct
  misc_feature 1..20: note = chemically synthesized
  source 1..20: mol_type = other DNA
agtgcaatcaaactagaact

SEQ ID NO: 57540 - DNA, 20 bp, synthetic construct
  misc_feature 1..20: note = chemically synthesized
  source 1..20: mol_type = other DNA
ggaaactgaacagcctgctc

SEQ ID NO: 57541 - DNA, 20 bp, synthetic construct
  misc_feature 1..20: note = chemically synthesized
  source 1..20: mol_type = other DNA
agcctgctcctgaatgacta

SEQ ID NO: 57542 - DNA, 20 bp, synthetic construct
  misc_feature 1..20: note = chemically synthesized
  source 1..20: mol_type = other DNA
agatgttctttgaaaccaac

SEQ ID NO: 57543 - DNA, 20 bp, synthetic construct
  misc_feature 1..20: note = chemically synthesized
  source 1..20: mol_type = other DNA
agaataaagatacaacaaaa

SEQ ID NO: 57544 - DNA, 20 bp, synthetic construct
  misc_feature 1..20: note = chemically synthesized
  source 1..20: mol_type = other DNA
aaaaacccttaaaaaaatca

SEQ ID NO: 57545 - DNA, 20 bp, synthetic construct
  misc_feature 1..20: note = chemically synthesized
  source 1..20: mol_type = other DNA
atgcaataagaaatgataaa

SEQ ID NO: 57546 - DNA, 20 bp, synthetic construct
  misc_feature 1..20: note = chemically synthesized
  source 1..20: mol_type = other DNA
agacatacaaactaccatca

SEQ ID NO: 57547 - DNA, 20 bp, synthetic construct
  misc_feature 1..20: note = chemically synthesized
  source 1..20: mol_type = other DNA
aactagaaaatctagtagaa

SEQ ID NO: 57548 - DNA, 20 bp, synthetic construct
  misc_feature 1..20: note = chemically synthesized
  source 1..20: mol_type = other DNA
aagactaaaccagggagaaa

SEQ ID NO: 57549 - DNA, 20 bp, synthetic construct
  misc_feature 1..20: note = chemically synthesized
  source 1..20: mol_type = other DNA
atgttttcacattataaaac

SEQ ID NO: 57550 - DNA, 20 bp, synthetic construct
  misc_feature 1..20: note = chemically synthesized
  source 1..20: mol_type = other DNA
aattactagttctaaaaaat

SEQ ID NO: 57551 - DNA, 20 bp, synthetic construct
  misc_feature 1..20: note = chemically synthesized
  source 1..20: mol_type = other DNA
ggatagaagcaagtttaata

SEQ ID NO: 57552 - DNA, 20 bp, synthetic construct
  misc_feature 1..20: note = chemically synthesized
  source 1..20: mol_type = other DNA
aagattaggagatgcaacac

SEQ ID NO: 57553 - DNA, 20 bp, synthetic construct
  misc_feature 1..20: note = chemically synthesized
  source 1..20: mol_type = other DNA
atagatagatagatagatgc

SEQ ID NO: 57554 - DNA, 20 bp, synthetic construct
  misc_feature 1..20: note = chemically synthesized
  source 1..20: mol_type = other DNA
ataaacatagataataatat

SEQ ID NO: 57555 - DNA, 20 bp, synthetic construct
  misc_feature 1..20: note = chemically synthesized
  source 1..20: mol_type = other DNA
attttatatgatggaaatgt

SEQ ID NO: 57556 - DNA, 20 bp, synthetic construct
  misc_feature 1..20: note = chemically synthesized
  source 1..20: mol_type = other DNA
aaatgtttgggtcccatttt

SEQ ID NO: 57557 - DNA, 20 bp, synthetic construct
  misc_feature 1..20: note = chemically synthesized
  source 1..20: mol_type = other DNA
ccattttttgagttacagtt

SEQ ID NO: 57558 - DNA, 20 bp, synthetic construct
  misc_feature 1..20: note = chemically synthesized
  source 1..20: mol_type = other DNA
aatttacccttgctttaagt

SEQ ID NO: 57559 - DNA, 20 bp, synthetic construct
  misc_feature 1..20: note = chemically synthesized
  source 1..20: mol_type = other DNA
atttgaagttatttaactct

SEQ ID NO: 57560 - DNA, 20 bp, synthetic construct
  misc_feature 1..20: note = chemically synthesized
  source 1..20: mol_type = other DNA
taatatatatctcacattgt

SEQ ID NO: 57561 - DNA, 20 bp, synthetic construct
  misc_feature 1..20: note = chemically synthesized
  source 1..20: mol_type = other DNA
ttgatgtttcagagaaagga

SEQ ID NO: 57562 - DNA, 20 bp, synthetic construct
  misc_feature 1..20: note = chemically synthesized
  source 1..20: mol_type = other DNA
tctaggccagagccatgcat

SEQ ID NO: 57563 - DNA, 20 bp, synthetic construct
  misc_feature 1..20: note = chemically synthesized
  source 1..20: mol_type = other DNA
tgaagcgtagttatagaagt

SEQ ID NO: 57564 - DNA, 20 bp, synthetic construct
  misc_feature 1..20: note = chemically synthesized
  source 1..20: mol_type = other DNA
tggggcttcatcaggacatt

SEQ ID NO: 57565 - DNA, 20 bp, synthetic construct
  misc_feature 1..20: note = chemically synthesized
  source 1..20: mol_type = other DNA
ggacattagggatgggagag

SEQ ID NO: 57566 - DNA, 20 bp, synthetic construct
  misc_feature 1..20: note = chemically synthesized
  source 1..20: mol_type = other DNA
tctaagtgaaaaaaaaatac

SEQ ID NO: 57567 - DNA, 20 bp, synthetic construct
  misc_feature 1..20: note = chemically synthesized
  source 1..20: mol_type = other DNA
tgatgacccaaattataggc

SEQ ID NO: 57568 - DNA, 20 bp, synthetic construct
  misc_feature 1..20: note = chemically synthesized
  source 1..20: mol_type = other DNA
ggttccttgtagcattattc

SEQ ID NO: 57569 - DNA, 20 bp, synthetic construct
  misc_feature 1..20: note = chemically synthesized
  source 1..20: mol_type = other DNA
tttctgacagcatattctga

SEQ ID NO: 57570 - DNA, 20 bp, synthetic construct
  misc_feature 1..20: note = chemically synthesized
  source 1..20: mol_type = other DNA
cagcatattctgactgaatc

SEQ ID NO: 57571 - DNA, 20 bp, synthetic construct
  misc_feature 1..20: note = chemically synthesized
  source 1..20: mol_type = other DNA
aataagcataaatttaaaat

SEQ ID NO: 57572 - DNA, 20 bp, synthetic construct
  misc_feature 1..20: note = chemically synthesized
  source 1..20: mol_type = other DNA
agaccaaaattattgtcaac

SEQ ID NO: 57573 - DNA, 20 bp, synthetic construct
  misc_feature 1..20: note = chemically synthesized
  source 1..20: mol_type = other DNA
tattatccatcaaactgaga

SEQ ID NO: 57574 - DNA, 20 bp, synthetic construct
  misc_feature 1..20: note = chemically synthesized
  source 1..20: mol_type = other DNA
aaactgagattgaattgatt

SEQ ID NO: 57575 - DNA, 20 bp, synthetic construct
  misc_feature 1..20: note = chemically synthesized
  source 1..20: mol_type = other DNA
ttagagtatccataaatact

SEQ ID NO: 57576 - DNA, 20 bp, synthetic construct
  misc_feature 1..20: note = chemically synthesized
  source 1..20: mol_type = other DNA
ttcagcatggtgacagacac

SEQ ID NO: 57577 - DNA, 20 bp, synthetic construct
  misc_feature 1..20: note = chemically synthesized
  source 1..20: mol_type = other DNA
cagacacatgaattttgaaa

SEQ ID NO: 57578 - DNA, 20 bp, synthetic construct
  misc_feature 1..20: note = chemically synthesized
  source 1..20: mol_type = other DNA
tatctttgttacatagggaa

SEQ ID NO: 57579 - DNA, 20 bp, synthetic construct
  misc_feature 1..20: note = chemically synthesized
  source 1..20: mol_type = other DNA
gggaagagagttaaaaattt

SEQ ID NO: 57580 - DNA, 20 bp, synthetic construct
  misc_feature 1..20: note = chemically synthesized
  source 1..20: mol_type = other DNA
tgtgcctagactattacctg

SEQ ID NO: 57581 - DNA, 20 bp, synthetic construct
  misc_feature 1..20: note = chemically synthesized
  source 1..20: mol_type = other DNA
ctgagccttgttttaactac

SEQ ID NO: 57582 - DNA, 20 bp, synthetic construct
  misc_feature 1..20: note = chemically synthesized
  source 1..20: mol_type = other DNA
actactagaatataaattca

SEQ ID NO: 57583 - DNA, 20 bp, synthetic construct
  misc_feature 1..20: note = chemically synthesized
  source 1..20: mol_type = other DNA
aaagccaagtctagtattcc

SEQ ID NO: 57584 - DNA, 20 bp, synthetic construct
  misc_feature 1..20: note = chemically synthesized
  source 1..20: mol_type = other DNA
ttagatgattaagttatcgg

SEQ ID NO: 57585 - DNA, 20 bp, synthetic construct
  misc_feature 1..20: note = chemically synthesized
  source 1..20: mol_type = other DNA
gtttacttacttgcattttc

SEQ ID NO: 57586 - DNA, 20 bp, synthetic construct
  misc_feature 1..20: note = chemically synthesized
  source 1..20: mol_type = other DNA
aaggttttcagcttaagagg

SEQ ID NO: 57587 - DNA, 20 bp, synthetic construct
  misc_feature 1..20: note = chemically synthesized
  source 1..20: mol_type = other DNA
ttttcttggtcacatggtaa

SEQ ID NO: 57588 - DNA, 20 bp, synthetic construct
  misc_feature 1..20: note = chemically synthesized
  source 1..20: mol_type = other DNA
tggtcacatggtaaatgggt

SEQ ID NO: 57589 - DNA, 20 bp, synthetic construct
  misc_feature 1..20: note = chemically synthesized
  source 1..20: mol_type = other DNA
gtagatatcccattctcttg

SEQ ID NO: 57590 - DNA, 20 bp, synthetic construct
  misc_feature 1..20: note = chemically synthesized
  source 1..20: mol_type = other DNA
tcttgaaggatactttaatg

SEQ ID NO: 57591 - DNA, 20 bp, synthetic construct
  misc_feature 1..20: note = chemically synthesized
  source 1..20: mol_type = other DNA
aacaaataccatgatattca

SEQ ID NO: 57592 - DNA, 20 bp, synthetic construct
  misc_feature 1..20: note = chemically synthesized
  source 1..20: mol_type = other DNA
tgattttctgatatttttca

SEQ ID NO: 57593 - DNA, 20 bp, synthetic construct
  misc_feature 1..20: note = chemically synthesized
  source 1..20: mol_type = other DNA
ttgacatcagctgaccctga

SEQ ID NO: 57594 - DNA, 20 bp, synthetic construct
  misc_feature 1..20: note = chemically synthesized
  source 1..20: mol_type = other DNA
ccctgactggatgatcttga

SEQ ID NO: 57595 - DNA, 20 bp, synthetic construct
  misc_feature 1..20: note = chemically synthesized
  source 1..20: mol_type = other DNA
tcatattttattacgtaagt

SEQ ID NO: 57596 - DNA, 20 bp, synthetic construct
  misc_feature 1..20: note = chemically synthesized
  source 1..20: mol_type = other DNA
tgctatatggtgggagatat

SEQ ID NO: 57597 - DNA, 20 bp, synthetic construct
  misc_feature 1..20: note = chemically synthesized
  source 1..20: mol_type = other DNA
aaaggtcttgaaaccatagt

SEQ ID NO: 57598 - DNA, 20 bp, synthetic construct
  misc_feature 1..20: note = chemically synthesized
  source 1..20: mol_type = other DNA
gaaaccatagtgagggtaaa

SEQ ID NO: 57599 - DNA, 20 bp, synthetic construct
  misc_feature 1..20: note = chemically synthesized
  source 1..20: mol_type = other DNA
atccttggaaaagaaattaa

SEQ ID NO: 57600 - DNA, 20 bp, synthetic construct
  misc_feature 1..20: note = chemically synthesized
  source 1..20: mol_type = other DNA
aaaagaaattaaaggaatca

SEQ ID NO: 57601 - DNA, 20 bp, synthetic construct
  misc_feature 1..20: note = chemically synthesized
  source 1..20: mol_type = other DNA
agagatggagaaaggacaag

SEQ ID NO: 57602 - DNA, 20 bp, synthetic construct
  misc_feature 1..20: note = chemically synthesized
  source 1..20: mol_type = other DNA
tgatagtgacaggaagaaca

SEQ ID NO: 57603 - DNA, 20 bp, synthetic construct
  misc_feature 1..20: note = chemically synthesized
  source 1..20: mol_type = other DNA
gtgacaggaagaacaaagaa

SEQ ID NO: 57604 - DNA, 20 bp, synthetic construct
  misc_feature 1..20: note = chemically synthesized
  source 1..20: mol_type = other DNA
tctggggactctaaaacttg

SEQ ID NO: 57605 - DNA, 20 bp, synthetic construct
  misc_feature 1..20: note = chemically synthesized
  source 1..20: mol_type = other DNA
aaaataattttccaattttt

SEQ ID NO: 57606 - DNA, 20 bp, synthetic construct
  misc_feature 1..20: note = chemically synthesized
  source 1..20: mol_type = other DNA
acatcaagtaacaatatcat

SEQ ID NO: 57607 - DNA, 20 bp, synthetic construct
  misc_feature 1..20: note = chemically synthesized
  source 1..20: mol_type = other DNA
gggaacatgtaagtattatg

SEQ ID NO: 57608 - DNA, 20 bp, synthetic construct
  misc_feature 1..20: note = chemically synthesized
  source 1..20: mol_type = other DNA
gactcagtttttaaatttct

SEQ ID NO: 57609 - DNA, 20 bp, synthetic construct
  misc_feature 1..20: note = chemically synthesized
  source 1..20: mol_type = other DNA
tttctatggatttcaaggaa

SEQ ID NO: 57610 - DNA, 20 bp, synthetic construct
  misc_feature 1..20: note = chemically synthesized
  source 1..20: mol_type = other DNA
tgatttagtatctgtaaatt

SEQ ID NO: 57611 - DNA, 20 bp, synthetic construct
  misc_feature 1..20: note = chemically synthesized
  source 1..20: mol_type = other DNA
gtatctgtaaattaaggatg

SEQ ID NO: 57612 - DNA, 20 bp, synthetic construct
  misc_feature 1..20: note = chemically synthesized
  source 1..20: mol_type = other DNA
aatatgtaagatacttctaa

SEQ ID NO: 57613 - DNA, 20 bp, synthetic construct
  misc_feature 1..20: note = chemically synthesized
  source 1..20: mol_type = other DNA
tctataggtaaattagtgtc

SEQ ID NO: 57614 - DNA, 20 bp, synthetic construct
  misc_feature 1..20: note = chemically synthesized
  source 1..20: mol_type = other DNA
cctttatcttactatgggac

SEQ ID NO: 57615 - DNA, 20 bp, synthetic construct
  misc_feature 1..20: note = chemically synthesized
  source 1..20: mol_type = other DNA
gagtggaggaaatccaagaa

SEQ ID NO: 57616 - DNA, 20 bp, synthetic construct
  misc_feature 1..20: note = chemically synthesized
  source 1..20: mol_type = other DNA
atttgtaagttagtaaagct

SEQ ID NO: 57617 - DNA, 20 bp, synthetic construct
  misc_feature 1..20: note = chemically synthesized
  source 1..20: mol_type = other DNA
gagttggtgctagtaaagct

SEQ ID NO: 57618 - DNA, 20 bp, synthetic construct
  misc_feature 1..20: note = chemically synthesized
  source 1..20: mol_type = other DNA
gcatgcatcccaagatggct

SEQ ID NO: 57619 - DNA, 20 bp, synthetic construct
  misc_feature 1..20: note = chemically synthesized
  source 1..20: mol_type = other DNA
aagattggacatccctgctg

SEQ ID NO: 57620 - DNA, 20 bp, synthetic construct
  misc_feature 1..20: note = chemically synthesized
  source 1..20: mol_type = other DNA
ctgtagagtttctcagtggt

SEQ ID NO: 57621 - DNA, 20 bp, synthetic construct
  misc_feature 1..20: note = chemically synthesized
  source 1..20: mol_type = other DNA
gtggttggaatcaatatttg

SEQ ID NO: 57622 - DNA, 20 bp, synthetic construct
  misc_feature 1..20: note = chemically synthesized
  source 1..20: mol_type = other DNA
atttttcccctgccacattg

SEQ ID NO: 57623 - DNA, 20 bp, synthetic construct
  misc_feature 1..20: note = chemically synthesized
  source 1..20: mol_type = other DNA
tagccactcttctttccagg

SEQ ID NO: 57624 - DNA, 20 bp, synthetic construct
  misc_feature 1..20: note = chemically synthesized
  source 1..20: mol_type = other DNA
cttctttccaggtggagttt

SEQ ID NO: 57625 - DNA, 20 bp, synthetic construct
  misc_feature 1..20: note = chemically synthesized
  source 1..20: mol_type = other DNA
agagatgatctttatctggg

SEQ ID NO: 57626 - DNA, 20 bp, synthetic construct
  misc_feature 1..20: note = chemically synthesized
  source 1..20: mol_type = other DNA
ttagatacttttctttaagg

SEQ ID NO: 57627 - DNA, 20 bp, synthetic construct
  misc_feature 1..20: note = chemically synthesized
  source 1..20: mol_type = other DNA
cttacattttatgtattttg

SEQ ID NO: 57628 - DNA, 20 bp, synthetic construct
  misc_feature 1..20: note = chemically synthesized
  source 1..20: mol_type = other DNA
gttgaattgtgtttaatcac

SEQ ID NO: 57629 - DNA, 20 bp, synthetic construct
  misc_feature 1..20: note = chemically synthesized
  source 1..20: mol_type = other DNA
taatgcatgcctgatatggt

SEQ ID NO: 57630 - DNA, 20 bp, synthetic construct
  misc_feature 1..20: note = chemically synthesized
  source 1..20: mol_type = other DNA
tggggcctggtgggaagtga

SEQ ID NO: 57631 - DNA, 20 bp, synthetic construct
  misc_feature 1..20: note = chemically synthesized
  source 1..20: mol_type = other DNA
aagtgattggatcataggag

SEQ ID NO: 57632 - DNA, 20 bp, synthetic construct
  misc_feature 1..20: note = chemically synthesized
  source 1..20: mol_type = other DNA
agtcccttttggtacgtata

SEQ ID NO: 57633 - DNA, 20 bp, synthetic construct
  misc_feature 1..20: note = chemically synthesized
  source 1..20: mol_type = other DNA
ccttttggtacgtatagtgg

SEQ ID NO: 57634 - DNA, 20 bp, synthetic construct
  misc_feature 1..20: note = chemically synthesized
  source 1..20: mol_type = other DNA
gtatttccttatagcaagat

SEQ ID NO: 57635 - DNA, 20 bp, synthetic construct
  misc_feature 1..20: note = chemically synthesized
  source 1..20: mol_type = other DNA
cagaaaattggtaccaaaag

SEQ ID NO: 57636 - DNA, 20 bp, synthetic construct
  misc_feature 1..20: note = chemically synthesized
  source 1..20: mol_type = other DNA
atgtggaagcaactttggca

SEQ ID NO: 57637 - DNA, 20 bp, synthetic construct
  misc_feature 1..20: note = chemically synthesized
  source 1..20: mol_type = other DNA
ggataacaggcagaagttgg

SEQ ID NO: 57638 - DNA, 20 bp, synthetic construct
  misc_feature 1..20: note = chemically synthesized
  source 1..20: mol_type = other DNA
aagaagacagggagatgagg

SEQ ID NO: 57639 - DNA, 20 bp, synthetic construct
  misc_feature 1..20: note = chemically synthesized
  source 1..20: mol_type = other DNA
tggaactttctagagacttg

SEQ ID NO: 57640 - DNA, 20 bp, synthetic construct
  misc_feature 1..20: note = chemically synthesized
  source 1..20: mol_type = other DNA
tgaggtggtctcagatggaa

SEQ ID NO: 57641 - DNA, 20 bp, synthetic construct
  misc_feature 1..20: note = chemically synthesized
  source 1..20: mol_type = other DNA
tgcactgtgcctctacctta

SEQ ID NO: 57642 - DNA, 20 bp, synthetic construct
  misc_feature 1..20: note = chemically synthesized
  source 1..20: mol_type = other DNA
tttgcataaatgaagaggag

SEQ ID NO: 57643 - DNA, 20 bp, synthetic construct
  misc_feature 1..20: note = chemically synthesized
  source 1..20: mol_type = other DNA
ctaatagccaaaataaaggg

SEQ ID NO: 57644 - DNA, 20 bp, synthetic construct
  misc_feature 1..20: note = chemically synthesized
  source 1..20: mol_type = other DNA
catcacaggcctggtggcct

SEQ ID NO: 57645 - DNA, 20 bp, synthetic construct
  misc_feature 1..20: note = chemically synthesized
  source 1..20: mol_type = other DNA
ggcctggtggcctaggagta

SEQ ID NO: 57646 - DNA, 20 bp, synthetic construct
  misc_feature 1..20: note = chemically synthesized
  source 1..20: mol_type = other DNA
taggagtactgaatgatttt

SEQ ID NO: 57647 - DNA, 20 bp, synthetic construct
  misc_feature 1..20: note = chemically synthesized
  source 1..20: mol_type = other DNA
cagctaaggccactgcttca

SEQ ID NO: 57648 - DNA, 20 bp, synthetic construct
  misc_feature 1..20: note = chemically synthesized
  source 1..20: mol_type = other DNA
ttccacatggtgataaatct

SEQ ID NO: 57649 - DNA, 20 bp, synthetic construct
  misc_feature 1..20: note = chemically synthesized
  source 1..20: mol_type = other DNA
aagcctccacctagatttca

SEQ ID NO: 57650 - DNA, 20 bp, synthetic construct
  misc_feature 1..20: note = chemically synthesized
  source 1..20: mol_type = other DNA
cagaggatgtgtagaaaagc

SEQ ID NO: 57651 - DNA, 20 bp, synthetic construct
  misc_feature 1..20: note = chemically synthesized
  source 1..20: mol_type = other DNA
atgaggttggaaccccctca

SEQ ID NO: 57652 - DNA, 20 bp, synthetic construct
  misc_feature 1..20: note = chemically synthesized
  source 1..20: mol_type = other DNA
ggccaccgtcctccagaccc

SEQ ID NO: 57653 - DNA, 20 bp, synthetic construct
  misc_feature 1..20: note = chemically synthesized
  source 1..20: mol_type = other DNA
gctaaactgtgcaaagcaat

SEQ ID NO: 57654 - DNA, 20 bp, synthetic construct
  misc_feature 1..20: note = chemically synthesized
  source 1..20: mol_type = other DNA
tgtgtccctgatatgagaca

SEQ ID NO: 57655 - DNA, 20 bp, synthetic construct
  misc_feature 1..20: note = chemically synthesized
  source 1..20: mol_type = other DNA
ggggtcaaaggagattattt

SEQ ID NO: 57656 - DNA, 20 bp, synthetic construct
  misc_feature 1..20: note = chemically synthesized
  source 1..20: mol_type = other DNA
ctatgaagaaatacccgaga

SEQ ID NO: 57657 - DNA, 20 bp, synthetic construct
  misc_feature 1..20: note = chemically synthesized
  source 1..20: mol_type = other DNA
gtgttccttccatgacaggc

SEQ ID NO: 57658 - DNA, 20 bp, synthetic construct
  misc_feature 1..20: note = chemically synthesized
  source 1..20: mol_type = other DNA
cctactattcaagaagaaat

SEQ ID NO: 57659 - DNA, 20 bp, synthetic construct
  misc_feature 1..20: note = chemically synthesized
  source 1..20: mol_type = other DNA
aaggtgtaatgactgccctg

SEQ ID NO: 57660 - DNA, 20 bp, synthetic construct
  misc_feature 1..20: note = chemically synthesized
  source 1..20: mol_type = other DNA
tgctgggttttctactcgtg

SEQ ID NO: 57661 - DNA, 20 bp, synthetic construct
  misc_feature 1..20: note = chemically synthesized
  source 1..20: mol_type = other DNA
tttggtgcatttctctcttt

SEQ ID NO: 57662 - DNA, 20 bp, synthetic construct
  misc_feature 1..20: note = chemically synthesized
  source 1..20: mol_type = other DNA
gcatttctctcttttggaat

SEQ ID NO: 57663 - DNA, 20 bp, synthetic construct
  misc_feature 1..20: note = chemically synthesized
  source 1..20: mol_type = other DNA
ttgaagggacttgccttgtc

SEQ ID NO: 57664 - DNA, 20 bp, synthetic construct
  misc_feature 1..20: note = chemically synthesized
  source 1..20: mol_type = other DNA
agactttggactttggactt

SEQ ID NO: 57665 - DNA, 20 bp, synthetic construct
  misc_feature 1..20: note = chemically synthesized
  source 1..20: mol_type = other DNA
ttggacttttgagttaatgc

SEQ ID NO: 57666 - DNA, 20 bp, synthetic construct
  misc_feature 1..20: note = chemically synthesized
  source 1..20: mol_type = other DNA
acttttgagttaatgctgga

SEQ ID NO: 57667 - DNA, 20 bp, synthetic construct
  misc_feature 1..20: note = chemically synthesized
  source 1..20: mol_type = other DNA
ttggaaggggccagaggtgg

SEQ ID NO: 57668 - DNA, 20 bp, synthetic construct
  misc_feature 1..20: note = chemically synthesized
  source 1..20: mol_type = other DNA
cagaggtggaaggatatggt

SEQ ID NO: 57669 - DNA, 20 bp, synthetic construct
  misc_feature 1..20: note = chemically synthesized
  source 1..20: mol_type = other DNA
aggtaattcaatcatggtgg

SEQ ID NO: 57670 - DNA, 20 bp, synthetic construct
  misc_feature 1..20: note = chemically synthesized
  source 1..20: mol_type = other DNA
atcccccttggtactgtata

SEQ ID NO: 57671 - DNA, 20 bp, synthetic construct
  misc_feature 1..20: note = chemically synthesized
  source 1..20: mol_type = other DNA
actcaatgtgatcaagattt

SEQ ID NO: 57672 - DNA, 20 bp, synthetic construct
  misc_feature 1..20: note = chemically synthesized
  source 1..20: mol_type = other DNA
agctgtctgaaactaagtca

SEQ ID NO: 57673 - DNA, 20 bp, synthetic construct
  misc_feature 1..20: note = chemically synthesized
  source 1..20: mol_type = other DNA
tattcactatttgtctatta

SEQ ID NO: 57674 - DNA, 20 bp, synthetic construct
  misc_feature 1..20: note = chemically synthesized
  source 1..20: mol_type = other DNA
tgaatatctatatttgtttg

SEQ ID NO: 57675 - DNA, 20 bp, synthetic construct
  misc_feature 1..20: note = chemically synthesized
  source 1..20: mol_type = other DNA
aggaataataatcagaacag

SEQ ID NO: 57676 - DNA, 20 bp, synthetic construct
  misc_feature 1..20: note = chemically synthesized
  source 1..20: mol_type = other DNA
agaaggatatgaaagactat

SEQ ID NO: 57677 - DNA, 20 bp, synthetic construct
  misc_feature 1..20: note = chemically synthesized
  source 1..20: mol_type = other DNA
agcaagataaaataggttaa

SEQ ID NO: 57678 - DNA, 20 bp, synthetic construct
  misc_feature 1..20: note = chemically synthesized
  source 1..20: mol_type = other DNA
ggttaatggagtaatatgta

SEQ ID NO: 57679 - DNA, 20 bp, synthetic construct
  misc_feature 1..20: note = chemically synthesized
  source 1..20: mol_type = other DNA
gatgactataattaaagaaa

SEQ ID NO: 57680 - DNA, 20 bp, synthetic construct
  misc_feature 1..20: note = chemically synthesized
  source 1..20: mol_type = other DNA
atagacctttatttatatca

SEQ ID NO: 57681 - DNA, 20 bp, synthetic construct
  misc_feature 1..20: note = chemically synthesized
  source 1..20: mol_type = other DNA
actgaataatattctatcct

SEQ ID NO: 57682 - DNA, 20 bp, synthetic construct
  misc_feature 1..20: note = chemically synthesized
  source 1..20: mol_type = other DNA
actttcaacttttggcaatt

SEQ ID NO: 57683 - DNA, 20 bp, synthetic construct
  misc_feature 1..20: note = chemically synthesized
  source 1..20: mol_type = other DNA
gacataaatttttgactcat

SEQ ID NO: 57684 - DNA, 20 bp, synthetic construct
  misc_feature 1..20: note = chemically synthesized
  source 1..20: mol_type = other DNA
actcatttgggtaaatacat

SEQ ID NO: 57685 - DNA, 20 bp, synthetic construct
  misc_feature 1..20: note = chemically synthesized
  source 1..20: mol_type = other DNA
aatacataggagtgtgattg

SEQ ID NO: 57686 - DNA, 20 bp, synthetic construct
  misc_feature 1..20: note = chemically synthesized
  source 1..20: mol_type = other DNA
catccctacaagcaataagt

SEQ ID NO: 57687 - DNA, 20 bp, synthetic construct
  misc_feature 1..20: note = chemically synthesized
  source 1..20: mol_type = other DNA
cacttcgttgccagtgtttg

SEQ ID NO: 57688 - DNA, 20 bp, synthetic construct
  misc_feature 1..20: note = chemically synthesized
  source 1..20: mol_type = other DNA
tttggtggatgtcagtattt

SEQ ID NO: 57689 - DNA, 20 bp, synthetic construct
  misc_feature 1..20: note = chemically synthesized
  source 1..20: mol_type = other DNA
tttcttaatgacatgtgtta

SEQ ID NO: 57690 - DNA, 20 bp, synthetic construct
  misc_feature 1..20: note = chemically synthesized
  source 1..20: mol_type = other DNA
atcttttgcccactttgcaa

SEQ ID NO: 57691 - DNA, 20 bp, synthetic construct
  misc_feature 1..20: note = chemically synthesized
  source 1..20: mol_type = other DNA
ggattgtttgttttttattg

SEQ ID NO: 57692 - DNA, 20 bp, synthetic construct
  misc_feature 1..20: note = chemically synthesized
  source 1..20: mol_type = other DNA
tttcattctcttaacttacc

SEQ ID NO: 57693 - DNA, 20 bp, synthetic construct
  misc_feature 1..20: note = chemically synthesized
  source 1..20: mol_type = other DNA
ttattttattttattttgtt

SEQ ID NO: 57694 - DNA, 20 bp, synthetic construct
  misc_feature 1..20: note = chemically synthesized
  source 1..20: mol_type = other DNA
tattttgttctgggtatttt

SEQ ID NO: 57695 - DNA, 20 bp, synthetic construct
  misc_feature 1..20: note = chemically synthesized
  source 1..20: mol_type = other DNA
ctgaactccagttaagattt

SEQ ID NO: 57696 - DNA, 20 bp, synthetic construct
  misc_feature 1..20: note = chemically synthesized
  source 1..20: mol_type = other DNA
tactattctgttcaaatatc

SEQ ID NO: 57697 - DNA, 20 bp, synthetic construct
  misc_feature 1..20: note = chemically synthesized
  source 1..20: mol_type = other DNA
tcaaatatcaaggatctaaa

SEQ ID NO: 57698 - DNA, 20 bp, synthetic construct
  misc_feature 1..20: note = chemically synthesized
  source 1..20: mol_type = other DNA
aaatgagtggttatttaatt

SEQ ID NO: 57699 - DNA, 20 bp, synthetic construct
  misc_feature 1..20: note = chemically synthesized
  source 1..20: mol_type = other DNA
attagcttttattttctgcc

SEQ ID NO: 57700 - DNA, 20 bp, synthetic construct
  misc_feature 1..20: note = chemically synthesized
  source 1..20: mol_type = other DNA
tttgtccatccttctgtgtc

SEQ ID NO: 57701 - DNA, 20 bp, synthetic construct
  misc_feature 1..20: note = chemically synthesized
  source 1..20: mol_type = other DNA
tccttctgtgtccggaattg

SEQ ID NO: 57702 - DNA, 20 bp, synthetic construct
  misc_feature 1..20: note = chemically synthesized
  source 1..20: mol_type = other DNA
ttcttggtctcgctgactta

SEQ ID NO: 57703 - DNA, 20 bp, synthetic construct
  misc_feature 1..20: note = chemically synthesized
  source 1..20: mol_type = other DNA
tgaagccgcgaaccctcgtg

SEQ ID NO: 57704 - DNA, 20 bp, synthetic construct
  misc_feature 1..20: note = chemically synthesized
  source 1..20: mol_type = other DNA
tcttaaagatggtgtgttca

SEQ ID NO: 57705 - DNA, 20 bp, synthetic construct
  misc_feature 1..20: note = chemically synthesized
  source 1..20: mol_type = other DNA
tttgttacttcagatgtgtc

SEQ ID NO: 57706 - DNA, 20 bp, synthetic construct
  misc_feature 1..20: note = chemically synthesized
  source 1..20: mol_type = other DNA
ttcacggtcttgctggctcc

SEQ ID NO: 57707 - DNA, 20 bp, synthetic construct
  misc_feature 1..20: note = chemically synthesized
  source 1..20: mol_type = other DNA
tgaagctgcagacccccacg

SEQ ID NO: 57708 - DNA, 20 bp, synthetic construct
  misc_feature 1..20: note = chemically synthesized
  source 1..20: mol_type = other DNA
gctcttaaaggcggagcgta

SEQ ID NO: 57709 - DNA, 20 bp, synthetic construct
  misc_feature 1..20: note = chemically synthesized
  source 1..20: mol_type = other DNA
agttgctcattcctcctgtc

SEQ ID NO: 57710 - DNA, 20 bp, synthetic construct
  misc_feature 1..20: note = chemically synthesized
  source 1..20: mol_type = other DNA
tgggttgttcatcccccatg

SEQ ID NO: 57711 - DNA, 20 bp, synthetic construct
  misc_feature 1..20: note = chemically synthesized
  source 1..20: mol_type = other DNA
tgaagccgcagaccttcgca

SEQ ID NO: 57712 - DNA, 20 bp, synthetic construct
  misc_feature 1..20: note = chemically synthesized
  source 1..20: mol_type = other DNA
ttacagctcataaaggcagc

SEQ ID NO: 57713 - DNA, 20 bp, synthetic construct
  misc_feature 1..20: note = chemically synthesized
  source 1..20: mol_type = other DNA
ataaaggcagcgcggatcca

SEQ ID NO: 57714 - DNA, 20 bp, synthetic construct
  misc_feature 1..20: note = chemically synthesized
  source 1..20: mol_type = other DNA
cagcagtaagatttattgtg

SEQ ID NO: 57715 - DNA, 20 bp, synthetic construct
  misc_feature 1..20: note = chemically synthesized
  source 1..20: mol_type = other DNA
agctggttggtccgttttgg

SEQ ID NO: 57716 - DNA, 20 bp, synthetic construct
  misc_feature 1..20: note = chemically synthesized
  source 1..20: mol_type = other DNA
tacaaaccttgagctagaca

SEQ ID NO: 57717 - DNA, 20 bp, synthetic construct
  misc_feature 1..20: note = chemically synthesized
  source 1..20: mol_type = other DNA
gattggtgcatttacaaacc

SEQ ID NO: 57718 - DNA, 20 bp, synthetic construct
  misc_feature 1..20: note = chemically synthesized
  source 1..20: mol_type = other DNA
atatttcatggtgaggaaca

SEQ ID NO: 57719 - DNA, 20 bp, synthetic construct
  misc_feature 1..20: note = chemically synthesized
  source 1..20: mol_type = other DNA
tgaggaacaaagaatatagt

SEQ ID NO: 57720 - DNA, 20 bp, synthetic construct
  misc_feature 1..20: note = chemically synthesized
  source 1..20: mol_type = other DNA
aaatgtccaacaatgataga

SEQ ID NO: 57721 - DNA, 20 bp, synthetic construct
  misc_feature 1..20: note = chemically synthesized
  source 1..20: mol_type = other DNA
aatgtggcacatacacacca

SEQ ID NO: 57722 - DNA, 20 bp, synthetic construct
  misc_feature 1..20: note = chemically synthesized
  source 1..20: mol_type = other DNA
aatactatgcagccataaaa

SEQ ID NO: 57723 - DNA, 20 bp, synthetic construct
  misc_feature 1..20: note = chemically synthesized
  source 1..20: mol_type = other DNA
ctatgcagccataaaaaagg

SEQ ID NO: 57724 - DNA, 20 bp, synthetic construct
  misc_feature 1..20: note = chemically synthesized
  source 1..20: mol_type = other DNA
ttcatgtcctttgtagggac

SEQ ID NO: 57725 - DNA, 20 bp, synthetic construct
  misc_feature 1..20: note = chemically synthesized
  source 1..20: mol_type = other DNA
gcatgttctcactcataggt

SEQ ID NO: 57726 - DNA, 20 bp, synthetic construct
  misc_feature 1..20: note = chemically synthesized
  source 1..20: mol_type = other DNA
tcacactctggggactgttg

SEQ ID NO: 57727 - DNA, 20 bp, synthetic construct
  misc_feature 1..20: note = chemically synthesized
  source 1..20: mol_type = other DNA
gtggggtggggggagggagg

SEQ ID NO: 57728 - DNA, 20 bp, synthetic construct
  misc_feature 1..20: note = chemically synthesized
  source 1..20: mol_type = other DNA
gatatacctaatgctaaatg

SEQ ID NO: 57729 - DNA, 20 bp, synthetic construct
  misc_feature 1..20: note = chemically synthesized
  source 1..20: mol_type = other DNA
taatgctaaatgatgagtta

SEQ ID NO: 57730 - DNA, 20 bp, synthetic construct
  misc_feature 1..20: note = chemically synthesized
  source 1..20: mol_type = other DNA
taaaataaaataattttaaa

SEQ ID NO: 57731 - DNA, 20 bp, synthetic construct
  misc_feature 1..20: note = chemically synthesized
  source 1..20: mol_type = other DNA
aattttaaaaagagtatagt

SEQ ID NO: 57732 - DNA, 20 bp, synthetic construct
  misc_feature 1..20: note = chemically synthesized
  source 1..20: mol_type = other DNA
aagcctagctaatccagtaa

SEQ ID NO: 57733 - DNA, 20 bp, synthetic construct
  misc_feature 1..20: note = chemically synthesized
  source 1..20: mol_type = other DNA
tagtcctggcatcctttgca

SEQ ID NO: 57734 - DNA, 20 bp, synthetic construct
  misc_feature 1..20: note = chemically synthesized
  source 1..20: mol_type = other DNA
tgcactgaatttcccagtgt

SEQ ID NO: 57735 - DNA, 20 bp, synthetic construct
  misc_feature 1..20: note = chemically synthesized
  source 1..20: mol_type = other DNA
tttgccagaactaaagagaa

SEQ ID NO: 57736 - DNA, 20 bp, synthetic construct
  misc_feature 1..20: note = chemically synthesized
  source 1..20: mol_type = other DNA
catttttagccctacccctc

SEQ ID NO: 57737 - DNA, 20 bp, synthetic construct
  misc_feature 1..20: note = chemically synthesized
  source 1..20: mol_type = other DNA
tgtgtacatctatagcttta

SEQ ID NO: 57738 - DNA, 20 bp, synthetic construct
  misc_feature 1..20: note = chemically synthesized
  source 1..20: mol_type = other DNA
aggacatcgactcctactgc

SEQ ID NO: 57739 - DNA, 20 bp, synthetic construct
  misc_feature 1..20: note = chemically synthesized
  source 1..20: mol_type = other DNA
taatggtaacaaatatccta

SEQ ID NO: 57740 - DNA, 20 bp, synthetic construct
  misc_feature 1..20: note = chemically synthesized
  source 1..20: mol_type = other DNA
ggaacctggtctcacagcag

SEQ ID NO: 57741 - DNA, 20 bp, synthetic construct
  misc_feature 1..20: note = chemically synthesized
  source 1..20: mol_type = other DNA
gattctcatagaggcatgca

SEQ ID NO: 57742 - DNA, 20 bp, synthetic construct
  misc_feature 1..20: note = chemically synthesized
  source 1..20: mol_type = other DNA
tctaggttgcggcttcttat

SEQ ID NO: 57743 - DNA, 20 bp, synthetic construct
  misc_feature 1..20: note = chemically synthesized
  source 1..20: mol_type = other DNA
tgtacagtgaacatctgcct

SEQ ID NO: 57744 - DNA, 20 bp, synthetic construct
  misc_feature 1..20: note = chemically synthesized
  source 1..20: mol_type = other DNA
ctaaaaacacatttctaatc

SEQ ID NO: 57745 - DNA, 20 bp, synthetic construct
  misc_feature 1..20: note = chemically synthesized
  source 1..20: mol_type = other DNA
aatcatgtcctctcacttct

SEQ ID NO: 57746 - DNA, 20 bp, synthetic construct
  misc_feature 1..20: note = chemically synthesized
  source 1..20: mol_type = other DNA
ggaccttagcttttcggtgt

SEQ ID NO: 57747 - DNA, 20 bp, synthetic construct
  misc_feature 1..20: note = chemically synthesized
  source 1..20: mol_type = other DNA
cttttcggtgtaagagttaa

SEQ ID NO: 57748 - DNA, 20 bp, synthetic construct
  misc_feature 1..20: note = chemically synthesized
  source 1..20: mol_type = other DNA
aagagttaaatgaatagcaa

SEQ ID NO: 57749 - DNA, 20 bp, synthetic construct
  misc_feature 1..20: note = chemically synthesized
  source 1..20: mol_type = other DNA
ggactagactttctgatttt

SEQ ID NO: 57750 - DNA, 20 bp, synthetic construct
  misc_feature 1..20: note = chemically synthesized
  source 1..20: mol_type = other DNA
cgtaacgtttctcagtgacg

SEQ ID NO: 57751 - DNA, 20 bp, synthetic construct
  misc_feature 1..20: note = chemically synthesized
  source 1..20: mol_type = other DNA
tagccttgcaggccttacaa

SEQ ID NO: 57752 - DNA, 20 bp, synthetic construct
  misc_feature 1..20: note = chemically synthesized
  source 1..20: mol_type = other DNA
actgattttcctccctttgg

SEQ ID NO: 57753 - DNA, 20 bp, synthetic construct
  misc_feature 1..20: note = chemically synthesized
  source 1..20: mol_type = other DNA
taaaataagcaatgatttct

SEQ ID NO: 57754 - DNA, 20 bp, synthetic construct
  misc_feature 1..20: note = chemically synthesized
  source 1..20: mol_type = other DNA
attcattctgatgcttccct

SEQ ID NO: 57755 - DNA, 20 bp, synthetic construct
  misc_feature 1..20: note = chemically synthesized
  source 1..20: mol_type = other DNA
aaacatattgtcagttgttg

SEQ ID NO: 57756 - DNA, 20 bp, synthetic construct
  misc_feature 1..20: note = chemically synthesized
  source 1..20: mol_type = other DNA
gtcagctctccggcgtatgg

SEQ ID NO: 57757 - DNA, 20 bp, synthetic construct
  misc_feature 1..20: note = chemically synthesized
  source 1..20: mol_type = other DNA
gctctccggcgtatgggagg

SEQ ID NO: 57758 - DNA, 20 bp, synthetic construct
  misc_feature 1..20: note = chemically synthesized
  source 1..20: mol_type = other DNA
tcattataaaactggggcat

SEQ ID NO: 57759 - DNA, 20 bp, synthetic construct
  misc_feature 1..20: note = chemically synthesized
  source 1..20: mol_type = other DNA
ttttttttttttttttgaga

SEQ ID NO: 57760 - DNA, 20 bp, synthetic construct
  misc_feature 1..20: note = chemically synthesized
  source 1..20: mol_type = other DNA
tctctctctgtcgcccaggc

SEQ ID NO: 57761 - DNA, 20 bp, synthetic construct
  misc_feature 1..20: note = chemically synthesized
  source 1..20: mol_type = other DNA
ctcactgcaagctccacctc

SEQ ID NO: 57762 - DNA, 20 bp, synthetic construct
  misc_feature 1..20: note = chemically synthesized
  source 1..20: mol_type = other DNA
cattctcctgtctcagcctc

SEQ ID NO: 57763 - DNA, 20 bp, synthetic construct
  misc_feature 1..20: note = chemically synthesized
  source 1..20: mol_type = other DNA
acaggtgcccgccaccacgc

SEQ ID NO: 57764 - DNA, 20 bp, synthetic construct
  misc_feature 1..20: note = chemically synthesized
  source 1..20: mol_type = other DNA
ttgtgtttttttagtagaga

SEQ ID NO: 57765 - DNA, 20 bp, synthetic construct
  misc_feature 1..20: note = chemically synthesized
  source 1..20: mol_type = other DNA
ggggtttcaccattgctggc

SEQ ID NO: 57766 - DNA, 20 bp, synthetic construct
  misc_feature 1..20: note = chemically synthesized
  source 1..20: mol_type = other DNA
aagacctaatttattgttct

SEQ ID NO: 57767 - DNA, 20 bp, synthetic construct
  misc_feature 1..20: note = chemically synthesized
  source 1..20: mol_type = other DNA
gcctgtatttttgtttccct

SEQ ID NO: 57768 - DNA, 20 bp, synthetic construct
  misc_feature 1..20: note = chemically synthesized
  source 1..20: mol_type = other DNA
agtagacagaggctatgtta

SEQ ID NO: 57769 - DNA, 20 bp, synthetic construct
  misc_feature 1..20: note = chemically synthesized
  source 1..20: mol_type = other DNA
ttaccttcttagatacctaa

SEQ ID NO: 57770 - DNA, 20 bp, synthetic construct
  misc_feature 1..20: note = chemically synthesized
  source 1..20: mol_type = other DNA
tatcttttttcttttaaact

SEQ ID NO: 57771 - DNA, 20 bp, synthetic construct
  misc_feature 1..20: note = chemically synthesized
  source 1..20: mol_type = other DNA
tgcttccagccttgtagcag

SEQ ID NO: 57772 - DNA, 20 bp, synthetic construct
  misc_feature 1..20: note = chemically synthesized
  source 1..20: mol_type = other DNA
acatataaaatctaaaaaat

SEQ ID NO: 57773 - DNA, 20 bp, synthetic construct
  misc_feature 1..20: note = chemically synthesized
  source 1..20: mol_type = other DNA
taaattagacatggtagaag

SEQ ID NO: 57774 - DNA, 20 bp, synthetic construct
  misc_feature 1..20: note = chemically synthesized
  source 1..20: mol_type = other DNA
acagatatcacaacattcct

SEQ ID NO: 57775 - DNA, 20 bp, synthetic construct
  misc_feature 1..20: note = chemically synthesized
  source 1..20: mol_type = other DNA
ggttaattaagtaaacctca

SEQ ID NO: 57776 - DNA, 20 bp, synthetic construct
  misc_feature 1..20: note = chemically synthesized
  source 1..20: mol_type = other DNA
cttaaatatggtcagactga

SEQ ID NO: 57777 - DNA, 20 bp, synthetic construct
  misc_feature 1..20: note = chemically synthesized
  source 1..20: mol_type = other DNA
aaggtcatttgtcatggact

SEQ ID NO: 57778 - DNA, 20 bp, synthetic construct
  misc_feature 1..20: note = chemically synthesized
  source 1..20: mol_type = other DNA
ctcaatatcttttcagagaa

SEQ ID NO: 57779 - DNA, 20 bp, synthetic construct
  misc_feature 1..20: note = chemically synthesized
  source 1..20: mol_type = other DNA
aagagtctaagcattctggt

SEQ ID NO: 57780 - DNA, 20 bp, synthetic construct
  misc_feature 1..20: note = chemically synthesized
  source 1..20: mol_type = other DNA
agcattctggtatgaatctg

SEQ ID NO: 57781 - DNA, 20 bp, synthetic construct
  misc_feature 1..20: note = chemically synthesized
  source 1..20: mol_type = other DNA
ggtcttgacactgtagatga

SEQ ID NO: 57782 - DNA, 20 bp, synthetic construct
  misc_feature 1..20: note = chemically synthesized
  source 1..20: mol_type = other DNA
ggattcattaaaggtgggaa

SEQ ID NO: 57783 - DNA, 20 bp, synthetic construct
  misc_feature 1..20: note = chemically synthesized
  source 1..20: mol_type = other DNA
accattgtgaggctaatgat

SEQ ID NO: 57784 - DNA, 20 bp, synthetic construct
  misc_feature 1..20: note = chemically synthesized
  source 1..20: mol_type = other DNA
gcaactgccaggactgactt

SEQ ID NO: 57785 - DNA, 20 bp, synthetic construct
  misc_feature 1..20: note = chemically synthesized
  source 1..20: mol_type = other DNA
gccaggactgacttaagaat

SEQ ID NO: 57786 - DNA, 20 bp, synthetic construct
  misc_feature 1..20: note = chemically synthesized
  source 1..20: mol_type = other DNA
agaatcaggatgtaggagaa

SEQ ID NO: 57787 - DNA, 20 bp, synthetic construct
  misc_feature 1..20: note = chemically synthesized
  source 1..20: mol_type = other DNA
tcaggatgtaggagaaaagg

SEQ ID NO: 57788 - DNA, 20 bp, synthetic construct
  misc_feature 1..20: note = chemically synthesized
  source 1..20: mol_type = other DNA
gcatcagggcatagtaacta

SEQ ID NO: 57789 - DNA, 20 bp, synthetic construct
  misc_feature 1..20: note = chemically synthesized
  source 1..20: mol_type = other DNA
agggcatagtaactattgaa

SEQ ID NO: 57790 - DNA, 20 bp, synthetic construct
  misc_feature 1..20: note = chemically synthesized
  source 1..20: mol_type = other DNA
aagatcctggtgcaggcaga

SEQ ID NO: 57791 - DNA, 20 bp, synthetic construct
  misc_feature 1..20: note = chemically synthesized
  source 1..20: mol_type = other DNA
tgcaggcagaaagagtgaga

SEQ ID NO: 57792 - DNA, 20 bp, synthetic construct
  misc_feature 1..20: note = chemically synthesized
  source 1..20: mol_type = other DNA
aaaatttcagacagatgatg

SEQ ID NO: 57793 - DNA, 20 bp, synthetic construct
  misc_feature 1..20: note = chemically synthesized
  source 1..20: mol_type = other DNA
gagcccaattttgataattc

SEQ ID NO: 57794 - DNA, 20 bp, synthetic construct
  misc_feature 1..20: note = chemically synthesized
  source 1..20: mol_type = other DNA
ttgataattctggaattagt

SEQ ID NO: 57795 - DNA, 20 bp, synthetic construct
  misc_feature 1..20: note = chemically synthesized
  source 1..20: mol_type = other DNA
tctggaattagtcaggatgg

SEQ ID NO: 57796 - DNA, 20 bp, synthetic construct
  misc_feature 1..20: note = chemically synthesized
  source 1..20: mol_type = other DNA
caggatggaggaataacgta

SEQ ID NO: 57797 - DNA, 20 bp, synthetic construct
  misc_feature 1..20: note = chemically synthesized
  source 1..20: mol_type = other DNA
gactccatgaaggacagacc

SEQ ID NO: 57798 - DNA, 20 bp, synthetic construct
  misc_feature 1..20: note = chemically synthesized
  source 1..20: mol_type = other DNA
gaaataggactgggcaatgc

SEQ ID NO: 57799 - DNA, 20 bp, synthetic construct
  misc_feature 1..20: note = chemically synthesized
  source 1..20: mol_type = other DNA
caggaatccaagctgatctc

SEQ ID NO: 57800 - DNA, 20 bp, synthetic construct
  misc_feature 1..20: note = chemically synthesized
  source 1..20: mol_type = other DNA
atctctcgaatgatccccca

SEQ ID NO: 57801 - DNA, 20 bp, synthetic construct
  misc_feature 1..20: note = chemically synthesized
  source 1..20: mol_type = other DNA
atggcatagattgaggagaa

SEQ ID NO: 57802 - DNA, 20 bp, synthetic construct
  misc_feature 1..20: note = chemically synthesized
  source 1..20: mol_type = other DNA
ggagaaggggatggaaagcc

SEQ ID NO: 57803 - DNA, 20 bp, synthetic construct
  misc_feature 1..20: note = chemically synthesized
  source 1..20: mol_type = other DNA
aaatccagtgagaagaaagg

SEQ ID NO: 57804 - DNA, 20 bp, synthetic construct
  misc_feature 1..20: note = chemically synthesized
  source 1..20: mol_type = other DNA
tctggaactgagaaacatgt

SEQ ID NO: 57805 - DNA, 20 bp, synthetic construct
  misc_feature 1..20: note = chemically synthesized
  source 1..20: mol_type = other DNA
aggaaatgtttcaatttcac

SEQ ID NO: 57806 - DNA, 20 bp, synthetic construct
  misc_feature 1..20: note = chemically synthesized
  source 1..20: mol_type = other DNA
agtcattattttttcactgt

SEQ ID NO: 57807 - DNA, 20 bp, synthetic construct
  misc_feature 1..20: note = chemically synthesized
  source 1..20: mol_type = other DNA
cgttgcttagacattttccc

SEQ ID NO: 57808 - DNA, 20 bp, synthetic construct
  misc_feature 1..20: note = chemically synthesized
  source 1..20: mol_type = other DNA
ttcattaaacattcgaagtg

SEQ ID NO: 57809 - DNA, 20 bp, synthetic construct
  misc_feature 1..20: note = chemically synthesized
  source 1..20: mol_type = other DNA
ttcattggtgataagcagac

SEQ ID NO: 57810 - DNA, 20 bp, synthetic construct
  misc_feature 1..20: note = chemically synthesized
  source 1..20: mol_type = other DNA
gaatatttatgcatgagacc

SEQ ID NO: 57811 - DNA, 20 bp, synthetic construct
  misc_feature 1..20: note = chemically synthesized
  source 1..20: mol_type = other DNA
atttgtgcctttgtgatgta

SEQ ID NO: 57812 - DNA, 20 bp, synthetic construct
  misc_feature 1..20: note = chemically synthesized
  source 1..20: mol_type = other DNA
tttcaaaagcctcatggtag

SEQ ID NO: 57813 - DNA, 20 bp, synthetic construct
  misc_feature 1..20: note = chemically synthesized
  source 1..20: mol_type = other DNA
ctgctttaagttccagacct

SEQ ID NO: 57814 - DNA, 20 bp, synthetic construct
  misc_feature 1..20: note = chemically synthesized
  source 1..20: mol_type = other DNA
gtccatactttcatgtttga

SEQ ID NO: 57815 - DNA, 20 bp, synthetic construct
  misc_feature 1..20: note = chemically synthesized
  source 1..20: mol_type = other DNA
gccctgactccttctcagca

SEQ ID NO: 57816 - DNA, 20 bp, synthetic construct
  misc_feature 1..20: note = chemically synthesized
  source 1..20: mol_type = other DNA
ttttaatacttttttctcca

SEQ ID NO: 57817 - DNA, 20 bp, synthetic construct
  misc_feature 1..20: note = chemically synthesized
  source 1..20: mol_type = other DNA
aagtttcttcgtttcttgca

SEQ ID NO: 57818 - DNA, 20 bp, synthetic construct
  misc_feature 1..20: note = chemically synthesized
  source 1..20: mol_type = other DNA
gcagaggatttttcagtctt

SEQ ID NO: 57819 - DNA, 20 bp, synthetic construct
  misc_feature 1..20: note = chemically synthesized
  source 1..20: mol_type = other DNA
tcttctttcatttctctaaa

SEQ ID NO: 57820 - DNA, 20 bp, synthetic construct
  misc_feature 1..20: note = chemically synthesized
  source 1..20: mol_type = other DNA
actcctgagagctcaaattc

SEQ ID NO: 57821 - DNA, 20 bp, synthetic construct
  misc_feature 1..20: note = chemically synthesized
  source 1..20: mol_type = other DNA
tggctatttaatatattcat

SEQ ID NO: 57822 - DNA, 20 bp, synthetic construct
  misc_feature 1..20: note = chemically synthesized
  source 1..20: mol_type = other DNA
tgagtgtttaatcttaaaat

SEQ ID NO: 57823 - DNA, 20 bp, synthetic construct
  misc_feature 1..20: note = chemically synthesized
  source 1..20: mol_type = other DNA
acaattgcataagacaagtc

SEQ ID NO: 57824 - DNA, 20 bp, synthetic construct
  misc_feature 1..20: note = chemically synthesized
  source 1..20: mol_type = other DNA
agctaagtacatgcatgtct

SEQ ID NO: 57825 - DNA, 20 bp, synthetic construct
  misc_feature 1..20: note = chemically synthesized
  source 1..20: mol_type = other DNA
cccatggtcttctctgtgct

SEQ ID NO: 57826 - DNA, 20 bp, synthetic construct
  misc_feature 1..20: note = chemically synthesized
  source 1..20: mol_type = other DNA
attcctttcaccattaactt

SEQ ID NO: 57827 - DNA, 20 bp, synthetic construct
  misc_feature 1..20: note = chemically synthesized
  source 1..20: mol_type = other DNA
taaaatgattacttcctcag

SEQ ID NO: 57828 - DNA, 20 bp, synthetic construct
  misc_feature 1..20: note = chemically synthesized
  source 1..20: mol_type = other DNA
tttataccacttattataca

SEQ ID NO: 57829 - DNA, 20 bp, synthetic construct
  misc_feature 1..20: note = chemically synthesized
  source 1..20: mol_type = other DNA
accatatctgttttttgctc

SEQ ID NO: 57830 - DNA, 20 bp, synthetic construct
  misc_feature 1..20: note = chemically synthesized
  source 1..20: mol_type = other DNA
tgctcaagaatatgaaaaat

SEQ ID NO: 57831 - DNA, 20 bp, synthetic construct
  misc_feature 1..20: note = chemically synthesized
  source 1..20: mol_type = other DNA
atgaaaaataagggttagca

SEQ ID NO: 57832 - DNA, 20 bp, synthetic construct
  misc_feature 1..20: note = chemically synthesized
  source 1..20: mol_type = other DNA
cacagagatataaagataat

SEQ ID NO: 57833 - DNA, 20 bp, synthetic construct
  misc_feature 1..20: note = chemically synthesized
  source 1..20: mol_type = other DNA
ttctgacctttggccaccaa

SEQ ID NO: 57834 - DNA, 20 bp, synthetic construct
  misc_feature 1..20: note = chemically synthesized
  source 1..20: mol_type = other DNA
tgagtcatcatataccaagt

SEQ ID NO: 57835 - DNA, 20 bp, synthetic construct
  misc_feature 1..20: note = chemically synthesized
  source 1..20: mol_type = other DNA
tataaaacagatgctgctcc

SEQ ID NO: 57836 - DNA, 20 bp, synthetic construct
  misc_feature 1..20: note = chemically synthesized
  source 1..20: mol_type = other DNA
ctccagggatcttgctgacc

SEQ ID NO: 57837 - DNA, 20 bp, synthetic construct
  misc_feature 1..20: note = chemically synthesized
  source 1..20: mol_type = other DNA
cctgactcagacatatcgtc

SEQ ID NO: 57838 - DNA, 20 bp, synthetic construct
  misc_feature 1..20: note = chemically synthesized
  source 1..20: mol_type = other DNA
cagacatatcgtcaaggatc

SEQ ID NO: 57839 - DNA, 20 bp, synthetic construct
  misc_feature 1..20: note = chemically synthesized
  source 1..20: mol_type = other DNA
cacaaaagatttaatattct

SEQ ID NO: 57840 - DNA, 20 bp, synthetic construct
  misc_feature 1..20: note = chemically synthesized
  source 1..20: mol_type = other DNA
actttgggaggccgaggcag

SEQ ID NO: 57841 - DNA, 20 bp, synthetic construct
  misc_feature 1..20: note = chemically synthesized
  source 1..20: mol_type = other DNA
caggtggattggctgagctc

SEQ ID NO: 57842 - DNA, 20 bp, synthetic construct
  misc_feature 1..20: note = chemically synthesized
  source 1..20: mol_type = other DNA
tacttgggagactgaggcag

SEQ ID NO: 57843 - DNA, 20 bp, synthetic construct
  misc_feature 1..20: note = chemically synthesized
  source 1..20: mol_type = other DNA
catagagactatcagccttt

SEQ ID NO: 57844 - DNA, 20 bp, synthetic construct
  misc_feature 1..20: note = chemically synthesized
  source 1..20: mol_type = other DNA
ccagagcaaaatacatgttg

SEQ ID NO: 57845 - DNA, 20 bp, synthetic construct
  misc_feature 1..20: note = chemically synthesized
  source 1..20: mol_type = other DNA
ttaaaatatgttttgaaagg

SEQ ID NO: 57846 - DNA, 20 bp, synthetic construct
  misc_feature 1..20: note = chemically synthesized
  source 1..20: mol_type = other DNA
catgttgtgttatgctatct

SEQ ID NO: 57847 - DNA, 20 bp, synthetic construct
  misc_feature 1..20: note = chemically synthesized
  source 1..20: mol_type = other DNA
tcagtgtatggtatctcagt

SEQ ID NO: 57848 - DNA, 20 bp, synthetic construct
  misc_feature 1..20: note = chemically synthesized
  source 1..20: mol_type = other DNA
aatagagaagacaaatagca

SEQ ID NO: 57849 - DNA, 20 bp, synthetic construct
  misc_feature 1..20: note = chemically synthesized
  source 1..20: mol_type = other DNA
gaagacaaatagcagtgaat

SEQ ID NO: 57850 - DNA, 20 bp, synthetic construct
  misc_feature 1..20: note = chemically synthesized
  source 1..20: mol_type = other DNA
atttgagtctggagaaataa

SEQ ID NO: 57851 - DNA, 20 bp, synthetic construct
  misc_feature 1..20: note = chemically synthesized
  source 1..20: mol_type = other DNA
tatcccctctgagcactgtc

SEQ ID NO: 57852 - DNA, 20 bp, synthetic construct
  misc_feature 1..20: note = chemically synthesized
  source 1..20: mol_type = other DNA
aataaccaggtcattctttc

SEQ ID NO: 57853 - DNA, 20 bp, synthetic construct
  misc_feature 1..20: note = chemically synthesized
  source 1..20: mol_type = other DNA
tttttttttttctgtctttt

SEQ ID NO: 57854 - DNA, 20 bp, synthetic construct
  misc_feature 1..20: note = chemically synthesized
  source 1..20: mol_type = other DNA
attacttgcttactttaaaa

SEQ ID NO: 57855 - DNA, 20 bp, synthetic construct
  misc_feature 1..20: note = chemically synthesized
  source 1..20: mol_type = other DNA
attcctatttgccaaggcag

SEQ ID NO: 57856 - DNA, 20 bp, synthetic construct
  misc_feature 1..20: note = chemically synthesized
  source 1..20: mol_type = other DNA
ggtcttttctggacaccact

SEQ ID NO: 57857 - DNA, 20 bp, synthetic construct
  misc_feature 1..20: note = chemically synthesized
  source 1..20: mol_type = other DNA
gtaagcgaggtcaggccctc

SEQ ID NO: 57858 - DNA, 20 bp, synthetic construct
  misc_feature 1..20: note = chemically synthesized
  source 1..20: mol_type = other DNA
ggtcaggccctcaagagtct

SEQ ID NO: 57859 - DNA, 20 bp, synthetic construct
  misc_feature 1..20: note = chemically synthesized
  source 1..20: mol_type = other DNA
gaactgactgtttaatgatt

SEQ ID NO: 57860 - DNA, 20 bp, synthetic construct
  misc_feature 1..20: note = chemically synthesized
  source 1..20: mol_type = other DNA
tctgaatatgctagttcaga

SEQ ID NO: 57861 - DNA, 20 bp, synthetic construct
  misc_feature 1..20: note = chemically synthesized
  source 1..20: mol_type = other DNA
ggcttaaatttccagtttac

SEQ ID NO: 57862 - DNA, 20 bp, synthetic construct
  misc_feature 1..20: note = chemically synthesized
  source 1..20: mol_type = other DNA
aatggttatgacctaattag

SEQ ID NO: 57863 - DNA, 20 bp, synthetic construct
  misc_feature 1..20: note = chemically synthesized
  source 1..20: mol_type = other DNA
ctataagaaactggtaaaca

SEQ ID NO: 57864 - DNA, 20 bp, synthetic construct
  misc_feature 1..20: note = chemically synthesized
  source 1..20: mol_type = other DNA
aataataagtgcatatatta

SEQ ID NO: 57865 - DNA, 20 bp, synthetic construct
  misc_feature 1..20: note = chemically synthesized
  source 1..20: mol_type = other DNA
ataatatatataatatgtta

SEQ ID NO: 57866 - DNA, 20 bp, synthetic construct
  misc_feature 1..20: note = chemically synthesized
  source 1..20: mol_type = other DNA
atctatatatacattgtaga

SEQ ID NO: 57867 - DNA, 20 bp, synthetic construct
  misc_feature 1..20: note = chemically synthesized
  source 1..20: mol_type = other DNA
tctatcaagctaattagcat

SEQ ID NO: 57868 - DNA, 20 bp, synthetic construct
  misc_feature 1..20: note = chemically synthesized
  source 1..20: mol_type = other DNA
aaatgaacagttaaatttat

SEQ ID NO: 57869 - DNA, 20 bp, synthetic construct
  misc_feature 1..20: note = chemically synthesized
  source 1..20: mol_type = other DNA
aagttgtcctctgaaaattc

SEQ ID NO: 57870 - DNA, 20 bp, synthetic construct
  misc_feature 1..20: note = chemically synthesized
  source 1..20: mol_type = other DNA
tgtaaaggctttctaagaaa

SEQ ID NO: 57871 - DNA, 20 bp, synthetic construct
  misc_feature 1..20: note = chemically synthesized
  source 1..20: mol_type = other DNA
ccaggtccaatttttctcca

SEQ ID NO: 57872 - DNA, 20 bp, synthetic construct
  misc_feature 1..20: note = chemically synthesized
  source 1..20: mol_type = other DNA
actttctcatcaccacacag

SEQ ID NO: 57873 - DNA, 20 bp, synthetic construct
  misc_feature 1..20: note = chemically synthesized
  source 1..20: mol_type = other DNA
tcatcaccacacagtggaat

SEQ ID NO: 57874 - DNA, 20 bp, synthetic construct
  misc_feature 1..20: note = chemically synthesized
  source 1..20: mol_type = other DNA
gtaaagccttcagaaaaagt

SEQ ID NO: 57875 - DNA, 20 bp, synthetic construct
  misc_feature 1..20: note = chemically synthesized
  source 1..20: mol_type = other DNA
atgttattaaagctaaaatt

SEQ ID NO: 57876 - DNA, 20 bp, synthetic construct
  misc_feature 1..20: note = chemically synthesized
  source 1..20: mol_type = other DNA
tctatctttctgttcaagaa

SEQ ID NO: 57877 - DNA, 20 bp, synthetic construct
  misc_feature 1..20: note = chemically synthesized
  source 1..20: mol_type = other DNA
gacctcagaacataggagag

SEQ ID NO: 57878 - DNA, 20 bp, synthetic construct
  misc_feature 1..20: note = chemically synthesized
  source 1..20: mol_type = other DNA
gagatggatattgtacacca

SEQ ID NO: 57879 - DNA, 20 bp, synthetic construct
  misc_feature 1..20: note = chemically synthesized
  source 1..20: mol_type = other DNA
atattgtacaccacagagtc

SEQ ID NO: 57880 - DNA, 20 bp, synthetic construct
  misc_feature 1..20: note = chemically synthesized
  source 1..20: mol_type = other DNA
gtccaggatgactagcagtg

SEQ ID NO: 57881 - DNA, 20 bp, synthetic construct
  misc_feature 1..20: note = chemically synthesized
  source 1..20: mol_type = other DNA
ccaagtccccaaagacaaga

SEQ ID NO: 57882 - DNA, 20 bp, synthetic construct
  misc_feature 1..20: note = chemically synthesized
  source 1..20: mol_type = other DNA
atgagccctcccattgctat

SEQ ID NO: 57883 - DNA, 20 bp, synthetic construct
  misc_feature 1..20: note = chemically synthesized
  source 1..20: mol_type = other DNA
cctcccattgctataaggat

SEQ ID NO: 57884 - DNA, 20 bp, synthetic construct
  misc_feature 1..20: note = chemically synthesized
  source 1..20: mol_type = other DNA
attccaacctcaaccaaatg

SEQ ID NO: 57885 - DNA, 20 bp, synthetic construct
  misc_feature 1..20: note = chemically synthesized
  source 1..20: mol_type = other DNA
caaccaaatgagggatggct

SEQ ID NO: 57886 - DNA, 20 bp, synthetic construct
  misc_feature 1..20: note = chemically synthesized
  source 1..20: mol_type = other DNA
aagatactgtatcttaggag

SEQ ID NO: 57887 - DNA, 20 bp, synthetic construct
  misc_feature 1..20: note = chemically synthesized
  source 1..20: mol_type = other DNA
ttttttttatagaaactcgt

SEQ ID NO: 57888 - DNA, 20 bp, synthetic construct
  misc_feature 1..20: note = chemically synthesized
  source 1..20: mol_type = other DNA
actcgtcaggatattattgc

SEQ ID NO: 57889 - DNA, 20 bp, synthetic construct
  misc_feature 1..20: note = chemically synthesized
  source 1..20: mol_type = other DNA
gttactgggaaaaaagctga

SEQ ID NO: 57890 - DNA, 20 bp, synthetic construct
  misc_feature 1..20: note = chemically synthesized
  source 1..20: mol_type = other DNA
aaaaagctgatggaatacaa

SEQ ID NO: 57891 - DNA, 20 bp, synthetic construct
  misc_feature 1..20: note = chemically synthesized
  source 1..20: mol_type = other DNA
aaaagagtagacatccccac

SEQ ID NO: 57892 - DNA, 20 bp, synthetic construct
  misc_feature 1..20: note = chemically synthesized
  source 1..20: mol_type = other DNA
agatctaaaattgtaatttc

SEQ ID NO: 57893 - DNA, 20 bp, synthetic construct
  misc_feature 1..20: note = chemically synthesized
  source 1..20: mol_type = other DNA
attgtaatttcttggattcc

SEQ ID NO: 57894 - DNA, 20 bp, synthetic construct
  misc_feature 1..20: note = chemically synthesized
  source 1..20: mol_type = other DNA
ttcctagaatttctaaatct

SEQ ID NO: 57895 - DNA, 20 bp, synthetic construct
  misc_feature 1..20: note = chemically synthesized
  source 1..20: mol_type = other DNA
tttctaaatctgtggatttt

SEQ ID NO: 57896 - DNA, 20 bp, synthetic construct
  misc_feature 1..20: note = chemically synthesized
  source 1..20: mol_type = other DNA
gctaccggagctatgtactt

SEQ ID NO: 57897 - DNA, 20 bp, synthetic construct
  misc_feature 1..20: note = chemically synthesized
  source 1..20: mol_type = other DNA
agctatgtacttttggatat

SEQ ID NO: 57898 - DNA, 20 bp, synthetic construct
  misc_feature 1..20: note = chemically synthesized
  source 1..20: mol_type = other DNA
atcagaaggaaccattgtcc

SEQ ID NO: 57899 - DNA, 20 bp, synthetic construct
  misc_feature 1..20: note = chemically synthesized
  source 1..20: mol_type = other DNA
tttggtttgtcatttttcga

SEQ ID NO: 57900 - DNA, 20 bp, synthetic construct
  misc_feature 1..20: note = chemically synthesized
  source 1..20: mol_type = other DNA
tagctcttaatttattattg

SEQ ID NO: 57901 - DNA, 20 bp, synthetic construct
  misc_feature 1..20: note = chemically synthesized
  source 1..20: mol_type = other DNA
agctattaacttatggacct

SEQ ID NO: 57902 - DNA, 20 bp, synthetic construct
  misc_feature 1..20: note = chemically synthesized
  source 1..20: mol_type = other DNA
aaataatagtggtttgaaat

SEQ ID NO: 57903 - DNA, 20 bp, synthetic construct
  misc_feature 1..20: note = chemically synthesized
  source 1..20: mol_type = other DNA
atagtggtttgaaatttgag

SEQ ID NO: 57904 - DNA, 20 bp, synthetic construct
  misc_feature 1..20: note = chemically synthesized
  source 1..20: mol_type = other DNA
ccaagaaaatgcatatttca

SEQ ID NO: 57905 - DNA, 20 bp, synthetic construct
  misc_feature 1..20: note = chemically synthesized
  source 1..20: mol_type = other DNA
gtaattagctccttagctga

SEQ ID NO: 57906 - DNA, 20 bp, synthetic construct
  misc_feature 1..20: note = chemically synthesized
  source 1..20: mol_type = other DNA
ttgattattaaatatatata

SEQ ID NO: 57907 - DNA, 20 bp, synthetic construct
  misc_feature 1..20: note = chemically synthesized
  source 1..20: mol_type = other DNA
aatatatataagggatagaa

SEQ ID NO: 57908 - DNA, 20 bp, synthetic construct
  misc_feature 1..20: note = chemically synthesized
  source 1..20: mol_type = other DNA
ataagggatagaagagagtg

SEQ ID NO: 57909 - DNA, 20 bp, synthetic construct
  misc_feature 1..20: note = chemically synthesized
  source 1..20: mol_type = other DNA
caaaattttgtcttggaaat

SEQ ID NO: 57910 - DNA, 20 bp, synthetic construct
  misc_feature 1..20: note = chemically synthesized
  source 1..20: mol_type = other DNA
agaggaaactgaaagaagtg

SEQ ID NO: 57911 - DNA, 20 bp, synthetic construct
  misc_feature 1..20: note = chemically synthesized
  source 1..20: mol_type = other DNA
tttactatcttttcaactcg

SEQ ID NO: 57912 - DNA, 20 bp, synthetic construct
  misc_feature 1..20: note = chemically synthesized
  source 1..20: mol_type = other DNA
agcaatgaagttctttttag

SEQ ID NO: 57913 - DNA, 20 bp, synthetic construct
  misc_feature 1..20: note = chemically synthesized
  source 1..20: mol_type = other DNA
agtgaagacactgctgactt

SEQ ID NO: 57914 - DNA, 20 bp, synthetic construct
  misc_feature 1..20: note = chemically synthesized
  source 1..20: mol_type = other DNA
actgctgactttggaattga

SEQ ID NO: 57915 - DNA, 20 bp, synthetic construct
  misc_feature 1..20: note = chemically synthesized
  source 1..20: mol_type = other DNA
ttagctcagctacttactag

SEQ ID NO: 57916 - DNA, 20 bp, synthetic construct
  misc_feature 1..20: note = chemically synthesized
  source 1..20: mol_type = other DNA
caagacagtgtgtgtaaaag

SEQ ID NO: 57917 - DNA, 20 bp, synthetic construct
  misc_feature 1..20: note = chemically synthesized
  source 1..20: mol_type = other DNA
taacaacatctcaggaagca

SEQ ID NO: 57918 - DNA, 20 bp, synthetic construct
  misc_feature 1..20: note = chemically synthesized
  source 1..20: mol_type = other DNA
ctaattgactaaagccattt

SEQ ID NO: 57919 - DNA, 20 bp, synthetic construct
  misc_feature 1..20: note = chemically synthesized
  source 1..20: mol_type = other DNA
cacaaattatacatgcacag

SEQ ID NO: 57920 - DNA, 20 bp, synthetic construct
  misc_feature 1..20: note = chemically synthesized
  source 1..20: mol_type = other DNA
actaataagataggaaatta

SEQ ID NO: 57921 - DNA, 20 bp, synthetic construct
  misc_feature 1..20: note = chemically synthesized
  source 1..20: mol_type = other DNA
tttttaaaagtgtgtataca

SEQ ID NO: 57922 - DNA, 20 bp, synthetic construct
  misc_feature 1..20: note = chemically synthesized
  source 1..20: mol_type = other DNA
ctttattcaatattatgttt

SEQ ID NO: 57923 - DNA, 20 bp, synthetic construct
  misc_feature 1..20: note = chemically synthesized
  source 1..20: mol_type = other DNA
ctgtagttgatttttcattt

SEQ ID NO: 57924 - DNA, 20 bp, synthetic construct
  misc_feature 1..20: note = chemically synthesized
  source 1..20: mol_type = other DNA
actccacagttgatagatat

SEQ ID NO: 57925 - DNA, 20 bp, synthetic construct
  misc_feature 1..20: note = chemically synthesized
  source 1..20: mol_type = other DNA
agcctgcatgtgcccagatt

SEQ ID NO: 57926 - DNA, 20 bp, synthetic construct
  misc_feature 1..20: note = chemically synthesized
  source 1..20: mol_type = other DNA
ctttttgcccctacttgact

SEQ ID NO: 57927 - DNA, 20 bp, synthetic construct
  misc_feature 1..20: note = chemically synthesized
  source 1..20: mol_type = other DNA
caagctggcctcaactggaa

SEQ ID NO: 57928 - DNA, 20 bp, synthetic construct
  misc_feature 1..20: note = chemically synthesized
  source 1..20: mol_type = other DNA
gtactttttccttttcccca

SEQ ID NO: 57929 - DNA, 20 bp, synthetic construct
  misc_feature 1..20: note = chemically synthesized
  source 1..20: mol_type = other DNA
taaagcctaatcctgccatc

SEQ ID NO: 57930 - DNA, 20 bp, synthetic construct
  misc_feature 1..20: note = chemically synthesized
  source 1..20: mol_type = other DNA
ctgccatccagaatgagcaa

SEQ ID NO: 57931 - DNA, 20 bp, synthetic construct
  misc_feature 1..20: note = chemically synthesized
  source 1..20: mol_type = other DNA
aaagggaagggaaaaaggag

SEQ ID NO: 57932 - DNA, 20 bp, synthetic construct
  misc_feature 1..20: note = chemically synthesized
  source 1..20: mol_type = other DNA
tgtttctcccacttgctctg

SEQ ID NO: 57933 - DNA, 20 bp, synthetic construct
  misc_feature 1..20: note = chemically synthesized
  source 1..20: mol_type = other DNA
cctaatctcgttagtacctt

SEQ ID NO: 57934 - DNA, 20 bp, synthetic construct
  misc_feature 1..20: note = chemically synthesized
  source 1..20: mol_type = other DNA
attagttttcaagataggac

SEQ ID NO: 57935 - DNA, 20 bp, synthetic construct
  misc_feature 1..20: note = chemically synthesized
  source 1..20: mol_type = other DNA
gataggacttgagttcctcg

SEQ ID NO: 57936 - DNA, 20 bp, synthetic construct
  misc_feature 1..20: note = chemically synthesized
  source 1..20: mol_type = other DNA
agggagaacgatttgagctc

SEQ ID NO: 57937 - DNA, 20 bp, synthetic construct
  misc_feature 1..20: note = chemically synthesized
  source 1..20: mol_type = other DNA
caaaaaattttaaaaagtag

SEQ ID NO: 57938 - DNA, 20 bp, synthetic construct
  misc_feature 1..20: note = chemically synthesized
  source 1..20: mol_type = other DNA
tacttgggaggctgaggtgg

SEQ ID NO: 57939 - DNA, 20 bp, synthetic construct
  misc_feature 1..20: note = chemically synthesized
  source 1..20: mol_type = other DNA
attcaggttgtcagaagtaa

SEQ ID NO: 57940 - DNA, 20 bp, synthetic construct
  misc_feature 1..20: note = chemically synthesized
  source 1..20: mol_type = other DNA
tcaaattacaaagaaggaca

SEQ ID NO: 57941 - DNA, 20 bp, synthetic construct
  misc_feature 1..20: note = chemically synthesized
  source 1..20: mol_type = other DNA
aggtggaaagaggagcaagg

SEQ ID NO: 57942 - DNA, 20 bp, synthetic construct
  misc_feature 1..20: note = chemically synthesized
  source 1..20: mol_type = other DNA
tacatagctaaacacatgtc

SEQ ID NO: 57943 - DNA, 20 bp, synthetic construct
  misc_feature 1..20: note = chemically synthesized
  source 1..20: mol_type = other DNA
tgttcttacattagtttgtt

SEQ ID NO: 57944 - DNA, 20 bp, synthetic construct
  misc_feature 1..20: note = chemically synthesized
  source 1..20: mol_type = other DNA
gtgtgcatgtgtctttgtga

SEQ ID NO: 57945 - DNA, 20 bp, synthetic construct
  misc_feature 1..20: note = chemically synthesized
  source 1..20: mol_type = other DNA
tttaggtatatactcaataa

SEQ ID NO: 57946 - DNA, 20 bp, synthetic construct
  misc_feature 1..20: note = chemically synthesized
  source 1..20: mol_type = other DNA
tatactcaataataggattg

SEQ ID NO: 57947 - DNA, 20 bp, synthetic construct
  misc_feature 1..20: note = chemically synthesized
  source 1..20: mol_type = other DNA
tttctgtttttaggtcttta

SEQ ID NO: 57948 - DNA, 20 bp, synthetic construct
  misc_feature 1..20: note = chemically synthesized
  source 1..20: mol_type = other DNA
atgtgagatagtatctcatt

SEQ ID NO: 57949 - DNA, 20 bp, synthetic construct
  misc_feature 1..20: note = chemically synthesized
  source 1..20: mol_type = other DNA
ggccacatgtatgtcttctt

SEQ ID NO: 57950 - DNA, 20 bp, synthetic construct
  misc_feature 1..20: note = chemically synthesized
  source 1..20: mol_type = other DNA
atttaagttccttatagatt

SEQ ID NO: 57951 - DNA, 20 bp, synthetic construct
  misc_feature 1..20: note = chemically synthesized
  source 1..20: mol_type = other DNA
ttctgaatattaggcctttg

SEQ ID NO: 57952 - DNA, 20 bp, synthetic construct
  misc_feature 1..20: note = chemically synthesized
  source 1..20: mol_type = other DNA
tctttgcccctgcttatgtc

SEQ ID NO: 57953 - DNA, 20 bp, synthetic construct
  misc_feature 1..20: note = chemically synthesized
  source 1..20: mol_type = other DNA
ctttcaagcatttttatagt

SEQ ID NO: 57954 - DNA, 20 bp, synthetic construct
  misc_feature 1..20: note = chemically synthesized
  source 1..20: mol_type = other DNA
atttaagtctctaatccatc

SEQ ID NO: 57955 - DNA, 20 bp, synthetic construct
  misc_feature 1..20: note = chemically synthesized
  source 1..20: mol_type = other DNA
tttgtgtatatgatatagaa

SEQ ID NO: 57956 - DNA, 20 bp, synthetic construct
  misc_feature 1..20: note = chemically synthesized
  source 1..20: mol_type = other DNA
agttatcccaacaccacttg

SEQ ID NO: 57957 - DNA, 20 bp, synthetic construct
  misc_feature 1..20: note = chemically synthesized
  source 1..20: mol_type = other DNA
tcccaacaccacttgttgaa

SEQ ID NO: 57958 - DNA, 20 bp, synthetic construct
  misc_feature 1..20: note = chemically synthesized
  source 1..20: mol_type = other DNA
tcatttttcaattcccacct

SEQ ID NO: 57959 - DNA, 20 bp, synthetic construct
  misc_feature 1..20: note = chemically synthesized
  source 1..20: mol_type = other DNA
caattcccacctgtgagtat

SEQ ID NO: 57960 - DNA, 20 bp, synthetic construct
  misc_feature 1..20: note = chemically synthesized
  source 1..20: mol_type = other DNA
tgtatttttctagttctgtg

SEQ ID NO: 57961 - DNA, 20 bp, synthetic construct
  misc_feature 1..20: note = chemically synthesized
  source 1..20: mol_type = other DNA
aatgtcattggtagtttgat

SEQ ID NO: 57962 - DNA, 20 bp, synthetic construct
  misc_feature 1..20: note = chemically synthesized
  source 1..20: mol_type = other DNA
ctttttgtggcaacggtaaa

SEQ ID NO: 57963 - DNA, 20 bp, synthetic construct
  misc_feature 1..20: note = chemically synthesized
  source 1..20: mol_type = other DNA
cttggctattgttgatgtat

SEQ ID NO: 57964 - DNA, 20 bp, synthetic construct
  misc_feature 1..20: note = chemically synthesized
  source 1..20: mol_type = other DNA
gttttctagatacagaaaac

SEQ ID NO: 57965 - DNA, 20 bp, synthetic construct
  misc_feature 1..20: note = chemically synthesized
  source 1..20: mol_type = other DNA
ttgactttctctcttcctat

SEQ ID NO: 57966 - DNA, 20 bp, synthetic construct
  misc_feature 1..20: note = chemically synthesized
  source 1..20: mol_type = other DNA
ccaggactgccagtactata

SEQ ID NO: 57967 - DNA, 20 bp, synthetic construct
  misc_feature 1..20: note = chemically synthesized
  source 1..20: mol_type = other DNA
gtcttgtgccagttttcaag

SEQ ID NO: 57968 - DNA, 20 bp, synthetic construct
  misc_feature 1..20: note = chemically synthesized
  source 1..20: mol_type = other DNA
cattctgtatgatgttggct

SEQ ID NO: 57969 - DNA, 20 bp, synthetic construct
  misc_feature 1..20: note = chemically synthesized
  source 1..20: mol_type = other DNA
ggttttaacatgaagtgaag

SEQ ID NO: 57970 - DNA, 20 bp, synthetic construct
  misc_feature 1..20: note = chemically synthesized
  source 1..20: mol_type = other DNA
tttttagtgctgtatatatg

SEQ ID NO: 57971 - DNA, 20 bp, synthetic construct
  misc_feature 1..20: note = chemically synthesized
  source 1..20: mol_type = other DNA
ctgaaccaatcttgcttctc

SEQ ID NO: 57972 - DNA, 20 bp, synthetic construct
  misc_feature 1..20: note = chemically synthesized
  source 1..20: mol_type = other DNA
ataaagcctacttgattgag

SEQ ID NO: 57973 - DNA, 20 bp, synthetic construct
  misc_feature 1..20: note = chemically synthesized
  source 1..20: mol_type = other DNA
attagctttgtgatgtgttg

SEQ ID NO: 57974 - DNA, 20 bp, synthetic construct
  misc_feature 1..20: note = chemically synthesized
  source 1..20: mol_type = other DNA
gtatttttgcatcaatgttc

SEQ ID NO: 57975 - DNA, 20 bp, synthetic construct
  misc_feature 1..20: note = chemically synthesized
  source 1..20: mol_type = other DNA
tgtctatcaggttttggtat

SEQ ID NO: 57976 - DNA, 20 bp, synthetic construct
  misc_feature 1..20: note = chemically synthesized
  source 1..20: mol_type = other DNA
cctcataaaatgagctgagg

SEQ ID NO: 57977 - DNA, 20 bp, synthetic construct
  misc_feature 1..20: note = chemically synthesized
  source 1..20: mol_type = other DNA
atccctccccctcaattttt

SEQ ID NO: 57978 - DNA, 20 bp, synthetic construct
  misc_feature 1..20: note = chemically synthesized
  source 1..20: mol_type = other DNA
ttttttggagtagcttcagt

SEQ ID NO: 57979 - DNA, 20 bp, synthetic construct
  misc_feature 1..20: note = chemically synthesized
  source 1..20: mol_type = other DNA
actcttctttgtgcatctga

SEQ ID NO: 57980 - DNA, 20 bp, synthetic construct
  misc_feature 1..20: note = chemically synthesized
  source 1..20: mol_type = other DNA
gcatctgatagaatttggtt

SEQ ID NO: 57981 - DNA, 20 bp, synthetic construct
  misc_feature 1..20: note = chemically synthesized
  source 1..20: mol_type = other DNA
gtttgataggctatttatta

SEQ ID NO: 57982 - DNA, 20 bp, synthetic construct
  misc_feature 1..20: note = chemically synthesized
  source 1..20: mol_type = other DNA
aatcattttcagagctcatc

SEQ ID NO: 57983 - DNA, 20 bp, synthetic construct
  misc_feature 1..20: note = chemically synthesized
  source 1..20: mol_type = other DNA
caatcactctcagaccacag

SEQ ID NO: 57984 - DNA, 20 bp, synthetic construct
  misc_feature 1..20: note = chemically synthesized
  source 1..20: mol_type = other DNA
aaaaatagatttcaagacta

SEQ ID NO: 57985 - DNA, 20 bp, synthetic construct
  misc_feature 1..20: note = chemically synthesized
  source 1..20: mol_type = other DNA
ggaaattaaacaacctgctc

SEQ ID NO: 57986 - DNA, 20 bp, synthetic construct
  misc_feature 1..20: note = chemically synthesized
  source 1..20: mol_type = other DNA
attaaacaacctgctcctga

SEQ ID NO: 57987 - DNA, 20 bp, synthetic construct
  misc_feature 1..20: note = chemically synthesized
  source 1..20: mol_type = other DNA
aacctgctcctgaatgaatt

SEQ ID NO: 57988 - DNA, 20 bp, synthetic construct
  misc_feature 1..20: note = chemically synthesized
  source 1..20: mol_type = other DNA
agaacaaagatacaatatac

SEQ ID NO: 57989 - DNA, 20 bp, synthetic construct
  misc_feature 1..20: note = chemically synthesized
  source 1..20: mol_type = other DNA
aacaagatcaaagctaactg

SEQ ID NO: 57990 - DNA, 20 bp, synthetic construct
  misc_feature 1..20: note = chemically synthesized
  source 1..20: mol_type = other DNA
aaataccattcaaaagatta

SEQ ID NO: 57991 - DNA, 20 bp, synthetic construct
  misc_feature 1..20: note = chemically synthesized
  source 1..20: mol_type = other DNA
gcacagttagaaatgaaaaa

SEQ ID NO: 57992 - DNA, 20 bp, synthetic construct
  misc_feature 1..20: note = chemically synthesized
  source 1..20: mol_type = other DNA
aactagaaaatctaaaagaa

SEQ ID NO: 57993 - DNA, 20 bp, synthetic construct
  misc_feature 1..20: note = chemically synthesized
  source 1..20: mol_type = other DNA
gtactttatttgagggctct

SEQ ID NO: 57994 - DNA, 20 bp, synthetic construct
  misc_feature 1..20: note = chemically synthesized
  source 1..20: mol_type = other DNA
ttatttgagggctctttgag

SEQ ID NO: 57995 - DNA, 20 bp, synthetic construct
  misc_feature 1..20: note = chemically synthesized
  source 1..20: mol_type = other DNA
caactctatgtccccctccc

SEQ ID NO: 57996 - DNA, 20 bp, synthetic construct
  misc_feature 1..20: note = chemically synthesized
  source 1..20: mol_type = other DNA
tggttatatctgtgttatat

SEQ ID NO: 57997 - DNA, 20 bp, synthetic construct
  misc_feature 1..20: note = chemically synthesized
  source 1..20: mol_type = other DNA
tatctgaatatatggctcta

SEQ ID NO: 57998 - DNA, 20 bp, synthetic construct
  misc_feature 1..20: note = chemically synthesized
  source 1..20: mol_type = other DNA
gctagtccaaaatccaagct

SEQ ID NO: 57999 - DNA, 20 bp, synthetic construct
  misc_feature 1..20: note = chemically synthesized
  source 1..20: mol_type = other DNA
gaataagacaggtgagacct

SEQ ID NO: 58000 - DNA, 20 bp, synthetic construct
  misc_feature 1..20: note = chemically synthesized
  source 1..20: mol_type = other DNA
aagacaggtgagacctttgg

SEQ ID NO: 58001 - DNA, 20 bp, synthetic construct
  misc_feature 1..20: note = chemically synthesized
  source 1..20: mol_type = other DNA
tgagaagatgtgaagaaccc

SEQ ID NO: 58002 - DNA, 20 bp, synthetic construct
  misc_feature 1..20: note = chemically synthesized
  source 1..20: mol_type = other DNA
aacagccccgaggcactgca

SEQ ID NO: 58003 - DNA, 20 bp, synthetic construct
  misc_feature 1..20: note = chemically synthesized
  source 1..20: mol_type = other DNA
aggggttcagacctgtgttg

SEQ ID NO: 58004 - DNA, 20 bp, synthetic construct
  misc_feature 1..20: note = chemically synthesized
  source 1..20: mol_type = other DNA
tgtttgtttttcctcagaga

SEQ ID NO: 58005 - DNA, 20 bp, synthetic construct
  misc_feature 1..20: note = chemically synthesized
  source 1..20: mol_type = other DNA
gatcctatcacttcagcctc

SEQ ID NO: 58006 - DNA, 20 bp, synthetic construct
  misc_feature 1..20: note = chemically synthesized
  source 1..20: mol_type = other DNA
atatatggagagactgaggt

SEQ ID NO: 58007 - DNA, 20 bp, synthetic construct
  misc_feature 1..20: note = chemically synthesized
  source 1..20: mol_type = other DNA
gtcacaactaatctagttga

SEQ ID NO: 58008 - DNA, 20 bp, synthetic construct
  misc_feature 1..20: note = chemically synthesized
  source 1..20: mol_type = other DNA
aaagacttgataatggctct

SEQ ID NO: 58009 - DNA, 20 bp, synthetic construct
  misc_feature 1..20: note = chemically synthesized
  source 1..20: mol_type = other DNA
atgtgtgagatcagttttaa

SEQ ID NO: 58010 - DNA, 20 bp, synthetic construct
  misc_feature 1..20: note = chemically synthesized
  source 1..20: mol_type = other DNA
tattattatacttcaagttt

SEQ ID NO: 58011 - DNA, 20 bp, synthetic construct
  misc_feature 1..20: note = chemically synthesized
  source 1..20: mol_type = other DNA
ccccaccccataacagtccc

SEQ ID NO: 58012 - DNA, 20 bp, synthetic construct
  misc_feature 1..20: note = chemically synthesized
  source 1..20: mol_type = other DNA
tcattgttcaattcccacct

SEQ ID NO: 58013 - DNA, 20 bp, synthetic construct
  misc_feature 1..20: note = chemically synthesized
  source 1..20: mol_type = other DNA
tctccttgtgatagtttgct

SEQ ID NO: 58014 - DNA, 20 bp, synthetic construct
  misc_feature 1..20: note = chemically synthesized
  source 1..20: mol_type = other DNA
agtctatcgttgttggacat

SEQ ID NO: 58015 - DNA, 20 bp, synthetic construct
  misc_feature 1..20: note = chemically synthesized
  source 1..20: mol_type = other DNA
ggttccaagtctttgctatt

SEQ ID NO: 58016 - DNA, 20 bp, synthetic construct
  misc_feature 1..20: note = chemically synthesized
  source 1..20: mol_type = other DNA
gcagcatgatttataatcct

SEQ ID NO: 58017 - DNA, 20 bp, synthetic construct
  misc_feature 1..20: note = chemically synthesized
  source 1..20: mol_type = other DNA
tttgggtatgtacccagtaa

SEQ ID NO: 58018 - DNA, 20 bp, synthetic construct
  misc_feature 1..20: note = chemically synthesized
  source 1..20: mol_type = other DNA
tgtacccagtaatgggatgg

SEQ ID NO: 58019 - DNA, 20 bp, synthetic construct
  misc_feature 1..20: note = chemically synthesized
  source 1..20: mol_type = other DNA
tttctagttctagattcctg

SEQ ID NO: 58020 - DNA, 20 bp, synthetic construct
  misc_feature 1..20: note = chemically synthesized
  source 1..20: mol_type = other DNA
atcctttgcccactttttga

SEQ ID NO: 58021 - DNA, 20 bp, synthetic construct
  misc_feature 1..20: note = chemically synthesized
  source 1..20: mol_type = other DNA
gttttttcttgtaaatttgt

SEQ ID NO: 58022 - DNA, 20 bp, synthetic construct
  misc_feature 1..20: note = chemically synthesized
  source 1..20: mol_type = other DNA
gtttgagttcattgtagatt

SEQ ID NO: 58023 - DNA, 20 bp, synthetic construct
  misc_feature 1..20: note = chemically synthesized
  source 1..20: mol_type = other DNA
ggatattagccctttgtcag

SEQ ID NO: 58024 - DNA, 20 bp, synthetic construct
  misc_feature 1..20: note = chemically synthesized
  source 1..20: mol_type = other DNA
tccttgcccatgcctatgtc

SEQ ID NO: 58025 - DNA, 20 bp, synthetic construct
  misc_feature 1..20: note = chemically synthesized
  source 1..20: mol_type = other DNA
gtattgcctaggtttttttc

SEQ ID NO: 58026 - DNA, 20 bp, synthetic construct
  misc_feature 1..20: note = chemically synthesized
  source 1..20: mol_type = other DNA
atgtaagtctttaatccatc

SEQ ID NO: 58027 - DNA, 20 bp, synthetic construct
  misc_feature 1..20: note = chemically synthesized
  source 1..20: mol_type = other DNA
ttttgtataaggtgtaagga

SEQ ID NO: 58028 - DNA, 20 bp, synthetic construct
  misc_feature 1..20: note = chemically synthesized
  source 1..20: mol_type = other DNA
ccagcaccatttattaaata

SEQ ID NO: 58029 - DNA, 20 bp, synthetic construct
  misc_feature 1..20: note = chemically synthesized
  source 1..20: mol_type = other DNA
ccagctttgttcttttggct

SEQ ID NO: 58030 - DNA, 20 bp, synthetic construct
  misc_feature 1..20: note = chemically synthesized
  source 1..20: mol_type = other DNA
aaagtcattggtagcttgat

SEQ ID NO: 58031 - DNA, 20 bp, synthetic construct
  misc_feature 1..20: note = chemically synthesized
  source 1..20: mol_type = other DNA
gtagcttgatggggatggca

SEQ ID NO: 58032 - DNA, 20 bp, synthetic construct
  misc_feature 1..20: note = chemically synthesized
  source 1..20: mol_type = other DNA
attcttcctacccatgagca

SEQ ID NO: 58033 - DNA, 20 bp, synthetic construct
  misc_feature 1..20: note = chemically synthesized
  source 1..20: mol_type = other DNA
tccttcacatcccttgtaag

SEQ ID NO: 58034 - DNA, 20 bp, synthetic construct
  misc_feature 1..20: note = chemically synthesized
  source 1..20: mol_type = other DNA
ttattctctttgaagcaatt

SEQ ID NO: 58035 - DNA, 20 bp, synthetic construct
  misc_feature 1..20: note = chemically synthesized
  source 1..20: mol_type = other DNA
tctttgaagcaattgtgaat

SEQ ID NO: 58036 - DNA, 20 bp, synthetic construct
  misc_feature 1..20: note = chemically synthesized
  source 1..20: mol_type = other DNA
tttgtctgttattggtgcat

SEQ ID NO: 58037 - DNA, 20 bp, synthetic construct
  misc_feature 1..20: note = chemically synthesized
  source 1..20: mol_type = other DNA
gagattttgggctgagacaa

SEQ ID NO: 58038 - DNA, 20 bp, synthetic construct
  misc_feature 1..20: note = chemically synthesized
  source 1..20: mol_type = other DNA
ttcacttcctcttttcctaa

SEQ ID NO: 58039 - DNA, 20 bp, synthetic construct
  misc_feature 1..20: note = chemically synthesized
  source 1..20: mol_type = other DNA
ccagaacttacaacactatg

SEQ ID NO: 58040 - DNA, 20 bp, synthetic construct
  misc_feature 1..20: note = chemically synthesized
  source 1..20: mol_type = other DNA
cttacaacactatgttgaat

SEQ ID NO: 58041 - DNA, 20 bp, synthetic construct
  misc_feature 1..20: note = chemically synthesized
  source 1..20: mol_type = other DNA
gccttgtgccagttttcaaa

SEQ ID NO: 58042 - DNA, 20 bp, synthetic construct
  misc_feature 1..20: note = chemically synthesized
  source 1..20: mol_type = other DNA
cactcagtatgatattggct

SEQ ID NO: 58043 - DNA, 20 bp, synthetic construct
  misc_feature 1..20: note = chemically synthesized
  source 1..20: mol_type = other DNA
ccatcaatacctaatttatt

SEQ ID NO: 58044 - DNA, 20 bp, synthetic construct
  misc_feature 1..20: note = chemically synthesized
  source 1..20: mol_type = other DNA
gtttttagcatgaagcgttg

SEQ ID NO: 58045 - DNA, 20 bp, synthetic construct
  misc_feature 1..20: note = chemically synthesized
  source 1..20: mol_type = other DNA
tctttggttctgtttatatg

SEQ ID NO: 58046 - DNA, 20 bp, synthetic construct
  misc_feature 1..20: note = chemically synthesized
  source 1..20: mol_type = other DNA
ttgaaccagccttgcatggc

SEQ ID NO: 58047 - DNA, 20 bp, synthetic construct
  misc_feature 1..20: note = chemically synthesized
  source 1..20: mol_type = other DNA
atgaagcccacttgatcatg

SEQ ID NO: 58048 - DNA, 20 bp, synthetic construct
  misc_feature 1..20: note = chemically synthesized
  source 1..20: mol_type = other DNA
cagtttgccagtattttatt

SEQ ID NO: 58049 - DNA, 20 bp, synthetic construct
  misc_feature 1..20: note = chemically synthesized
  source 1..20: mol_type = other DNA
tttttgcatcaatgttcatc

SEQ ID NO: 58050 - DNA, 20 bp, synthetic construct
  misc_feature 1..20: note = chemically synthesized
  source 1..20: mol_type = other DNA
tctctgtcaggctttggtat

SEQ ID NO: 58051 - DNA, 20 bp, synthetic construct
  misc_feature 1..20: note = chemically synthesized
  source 1..20: mol_type = other DNA
gatgatgctggcctcataaa

SEQ ID NO: 58052 - DNA, 20 bp, synthetic construct
  misc_feature 1..20: note = chemically synthesized
  source 1..20: mol_type = other DNA
gcctcataaaatgagttagg

SEQ ID NO: 58053 - DNA, 20 bp, synthetic construct
  misc_feature 1..20: note = chemically synthesized
  source 1..20: mol_type = other DNA
ttccctctttttctattgat

SEQ ID NO: 58054 - DNA, 20 bp, synthetic construct
  misc_feature 1..20: note = chemically synthesized
  source 1..20: mol_type = other DNA
ttgattggaatagtttcaga

SEQ ID NO: 58055 - DNA, 20 bp, synthetic construct
  misc_feature 1..20: note = chemically synthesized
  source 1..20: mol_type = other DNA
gctcctccttgtacctctgg

SEQ ID NO: 58056 - DNA, 20 bp, synthetic construct
  misc_feature 1..20: note = chemically synthesized
  source 1..20: mol_type = other DNA
acctctggtagaattcggct

SEQ ID NO: 58057 - DNA, 20 bp, synthetic construct
  misc_feature 1..20: note = chemically synthesized
  source 1..20: mol_type = other DNA
tcttcctggtttagtcttgg

SEQ ID NO: 58058 - DNA, 20 bp, synthetic construct
  misc_feature 1..20: note = chemically synthesized
  source 1..20: mol_type = other DNA
ttggcagagtgtatgtgtcg

SEQ ID NO: 58059 - DNA, 20 bp, synthetic construct
  misc_feature 1..20: note = chemically synthesized
  source 1..20: mol_type = other DNA
gacggtagtttgtatttctg

SEQ ID NO: 58060 - DNA, 20 bp, synthetic construct
  misc_feature 1..20: note = chemically synthesized
  source 1..20: mol_type = other DNA
tcttttcaaaaaaacagctt

SEQ ID NO: 58061 - DNA, 20 bp, synthetic construct
  misc_feature 1..20: note = chemically synthesized
  source 1..20: mol_type = other DNA
tggattcattgatttttttg

SEQ ID NO: 58062 - DNA, 20 bp, synthetic construct
  misc_feature 1..20: note = chemically synthesized
  source 1..20: mol_type = other DNA
ttcttgtcttctgttagctt

SEQ ID NO: 58063 - DNA, 20 bp, synthetic construct
  misc_feature 1..20: note = chemically synthesized
  source 1..20: mol_type = other DNA
tagttttttaattgtgatgt

SEQ ID NO: 58064 - DNA, 20 bp, synthetic construct
  misc_feature 1..20: note = chemically synthesized
  source 1..20: mol_type = other DNA
atttccctctacacactgct

SEQ ID NO: 58065 - DNA, 20 bp, synthetic construct
  misc_feature 1..20: note = chemically synthesized
  source 1..20: mol_type = other DNA
gctgttcagtttccatgtag

SEQ ID NO: 58066 - DNA, 20 bp, synthetic construct
  misc_feature 1..20: note = chemically synthesized
  source 1..20: mol_type = other DNA
ttccatgtagctgagtggtt

SEQ ID NO: 58067 - DNA, 20 bp, synthetic construct
  misc_feature 1..20: note = chemically synthesized
  source 1..20: mol_type = other DNA
atgtagctgagtggttttga

SEQ ID NO: 58068 - DNA, 20 bp, synthetic construct
  misc_feature 1..20: note = chemically synthesized
  source 1..20: mol_type = other DNA
tttgagtgagtttcttaatc

SEQ ID NO: 58069 - DNA, 20 bp, synthetic construct
  misc_feature 1..20: note = chemically synthesized
  source 1..20: mol_type = other DNA
tccaactatgtggtcagttt

SEQ ID NO: 58070 - DNA, 20 bp, synthetic construct
  misc_feature 1..20: note = chemically synthesized
  source 1..20: mol_type = other DNA
aggtgtggtgtggtgctgaa

SEQ ID NO: 58071 - DNA, 20 bp, synthetic construct
  misc_feature 1..20: note = chemically synthesized
  source 1..20: mol_type = other DNA
gaatgtatattctgttgatt

SEQ ID NO: 58072 - DNA, 20 bp, synthetic construct
  misc_feature 1..20: note = chemically synthesized
  source 1..20: mol_type = other DNA
tattctgttgatttggggtg

SEQ ID NO: 58073 - DNA, 20 bp, synthetic construct
  misc_feature 1..20: note = chemically synthesized
  source 1..20: mol_type = other DNA
taggtctgcttggtgcagag

SEQ ID NO: 58074 - DNA, 20 bp, synthetic construct
  misc_feature 1..20: note = chemically synthesized
  source 1..20: mol_type = other DNA
tgcagagctgagtccaattc

SEQ ID NO: 58075 - DNA, 20 bp, synthetic construct
  misc_feature 1..20: note = chemically synthesized
  source 1..20: mol_type = other DNA
gatctgtctaatgttgacag

SEQ ID NO: 58076 - DNA, 20 bp, synthetic construct
  misc_feature 1..20: note = chemically synthesized
  source 1..20: mol_type = other DNA
ggtcactcaggacttgtttt

SEQ ID NO: 58077 - DNA, 20 bp, synthetic construct
  misc_feature 1..20: note = chemically synthesized
  source 1..20: mol_type = other DNA
tcaggacttgttttatgaat

SEQ ID NO: 58078 - DNA, 20 bp, synthetic construct
  misc_feature 1..20: note = chemically synthesized
  source 1..20: mol_type = other DNA
tgaatctgggtgctcctgta

SEQ ID NO: 58079 - DNA, 20 bp, synthetic construct
  misc_feature 1..20: note = chemically synthesized
  source 1..20: mol_type = other DNA
agtatagttagttcttcttc

SEQ ID NO: 58080 - DNA, 20 bp, synthetic construct
  misc_feature 1..20: note = chemically synthesized
  source 1..20: mol_type = other DNA
aaatctgttttatcagagac

SEQ ID NO: 58081 - DNA, 20 bp, synthetic construct
  misc_feature 1..20: note = chemically synthesized
  source 1..20: mol_type = other DNA
tgtgtgtctctgcacgtgag

SEQ ID NO: 58082 - DNA, 20 bp, synthetic construct
  misc_feature 1..20: note = chemically synthesized
  source 1..20: mol_type = other DNA
ctgcacgtgagatgggtttc

SEQ ID NO: 58083 - DNA, 20 bp, synthetic construct
  misc_feature 1..20: note = chemically synthesized
  source 1..20: mol_type = other DNA
ttcctgaatacagaacacag

SEQ ID NO: 58084 - DNA, 20 bp, synthetic construct
  misc_feature 1..20: note = chemically synthesized
  source 1..20: mol_type = other DNA
ttagcctatttacatttaag

SEQ ID NO: 58085 - DNA, 20 bp, synthetic construct
  misc_feature 1..20: note = chemically synthesized
  source 1..20: mol_type = other DNA
taaggtgagtattgttatgt

SEQ ID NO: 58086 - DNA, 20 bp, synthetic construct
  misc_feature 1..20: note = chemically synthesized
  source 1..20: mol_type = other DNA
tcagcatttgcttgtctgta

SEQ ID NO: 58087 - DNA, 20 bp, synthetic construct
  misc_feature 1..20: note = chemically synthesized
  source 1..20: mol_type = other DNA
acttatgaagcttagtttgg

SEQ ID NO: 58088 - DNA, 20 bp, synthetic construct
  misc_feature 1..20: note = chemically synthesized
  source 1..20: mol_type = other DNA
gtttggctggatatgaaatt

SEQ ID NO: 58089 - DNA, 20 bp, synthetic construct
  misc_feature 1..20: note = chemically synthesized
  source 1..20: mol_type = other DNA
aattcttttctttaacaatg

SEQ ID NO: 58090 - DNA, 20 bp, synthetic construct
  misc_feature 1..20: note = chemically synthesized
  source 1..20: mol_type = other DNA
ccccactttcttctggcttg

SEQ ID NO: 58091 - DNA, 20 bp, synthetic construct
  misc_feature 1..20: note = chemically synthesized
  source 1..20: mol_type = other DNA
agtctgatgggcttcccttt

SEQ ID NO: 58092 - DNA, 20 bp, synthetic construct
  misc_feature 1..20: note = chemically synthesized
  source 1..20: mol_type = other DNA
tttccttcatttcaactttg

SEQ ID NO: 58093 - DNA, 20 bp, synthetic construct
  misc_feature 1..20: note = chemically synthesized
  source 1..20: mol_type = other DNA
aatctgacagttatgtgtct

SEQ ID NO: 58094 - DNA, 20 bp, synthetic construct
  misc_feature 1..20: note = chemically synthesized
  source 1..20: mol_type = other DNA
tcttggagttgcttttctct

SEQ ID NO: 58095 - DNA, 20 bp, synthetic construct
  misc_feature 1..20: note = chemically synthesized
  source 1..20: mol_type = other DNA
tgtggcgttctctgtatttc

SEQ ID NO: 58096 - DNA, 20 bp, synthetic construct
  misc_feature 1..20: note = chemically synthesized
  source 1..20: mol_type = other DNA
gttctctgtatttcctgaat

SEQ ID NO: 58097 - DNA, 20 bp, synthetic construct
  misc_feature 1..20: note = chemically synthesized
  source 1..20: mol_type = other DNA
gctagattggggaagttctc

SEQ ID NO: 58098 - DNA, 20 bp, synthetic construct
  misc_feature 1..20: note = chemically synthesized
  source 1..20: mol_type = other DNA
ttctcctggataatatcctg

SEQ ID NO: 58099 - DNA, 20 bp, synthetic construct
  misc_feature 1..20: note = chemically synthesized
  source 1..20: mol_type = other DNA
tcgaacttcctcctttagct

SEQ ID NO: 58100 - DNA, 20 bp, synthetic construct
  misc_feature 1..20: note = chemically synthesized
  source 1..20: mol_type = other DNA
aggagaggcactctcatttt

SEQ ID NO: 58101 - DNA, 20 bp, synthetic construct
  misc_feature 1..20: note = chemically synthesized
  source 1..20: mol_type = other DNA
ttgatgatggcgatgtacag

SEQ ID NO: 58102 - DNA, 20 bp, synthetic construct
  misc_feature 1..20: note = chemically synthesized
  source 1..20: mol_type = other DNA
tgtacagatgggtttttggt

SEQ ID NO: 58103 - DNA, 20 bp, synthetic construct
  misc_feature 1..20: note = chemically synthesized
  source 1..20: mol_type = other DNA
accctcagctgcaggtctgt

SEQ ID NO: 58104 - DNA, 20 bp, synthetic construct
  misc_feature 1..20: note = chemically synthesized
  source 1..20: mol_type = other DNA
ccactccagaagctgttttc

SEQ ID NO: 58105 - DNA, 20 bp, synthetic construct
  misc_feature 1..20: note = chemically synthesized
  source 1..20: mol_type = other DNA
acagcggtggctgcagaaca

SEQ ID NO: 58106 - DNA, 20 bp, synthetic construct
  misc_feature 1..20: note = chemically synthesized
  source 1..20: mol_type = other DNA
ctctggaagttttgtcttag

SEQ ID NO: 58107 - DNA, 20 bp, synthetic construct
  misc_feature 1..20: note = chemically synthesized
  source 1..20: mol_type = other DNA
gtgtcagtctgcccctactg

SEQ ID NO: 58108 - DNA, 20 bp, synthetic construct
  misc_feature 1..20: note = chemically synthesized
  source 1..20: mol_type = other DNA
gcctcccagttaggctactc

SEQ ID NO: 58109 - DNA, 20 bp, synthetic construct
  misc_feature 1..20: note = chemically synthesized
  source 1..20: mol_type = other DNA
aggaccctctgagccaggca

SEQ ID NO: 58110 - DNA, 20 bp, synthetic construct
  misc_feature 1..20: note = chemically synthesized
  source 1..20: mol_type = other DNA
gaagagcgcagtattagggc

SEQ ID NO: 58111 - DNA, 20 bp, synthetic construct
  misc_feature 1..20: note = chemically synthesized
  source 1..20: mol_type = other DNA
ccttttctttgactaggaaa

SEQ ID NO: 58112 - DNA, 20 bp, synthetic construct
  misc_feature 1..20: note = chemically synthesized
  source 1..20: mol_type = other DNA
tccctgaccccttgtgcttc

SEQ ID NO: 58113 - DNA, 20 bp, synthetic construct
  misc_feature 1..20: note = chemically synthesized
  source 1..20: mol_type = other DNA
tttttcttttttttttgtga

SEQ ID NO: 58114 - DNA, 20 bp, synthetic construct
  misc_feature 1..20: note = chemically synthesized
  source 1..20: mol_type = other DNA
tctcatgctgtcacctgggc

SEQ ID NO: 58115 - DNA, 20 bp, synthetic construct
  misc_feature 1..20: note = chemically synthesized
  source 1..20: mol_type = other DNA
tcactgcaacctctgcctcc

SEQ ID NO: 58116 - DNA, 20 bp, synthetic construct
  misc_feature 1..20: note = chemically synthesized
  source 1..20: mol_type = other DNA
gcctcagcctcccaaattgc

SEQ ID NO: 58117 - DNA, 20 bp, synthetic construct
  misc_feature 1..20: note = chemically synthesized
  source 1..20: mol_type = other DNA
gtgagccaccgctcccagcc

SEQ ID NO: 58118 - DNA, 20 bp, synthetic construct
  misc_feature 1..20: note = chemically synthesized
  source 1..20: mol_type = other DNA
ttaaatgcttttattgttga

SEQ ID NO: 58119 - DNA, 20 bp, synthetic construct
  misc_feature 1..20: note = chemically synthesized
  source 1..20: mol_type = other DNA
ctcccttgatagtttctact

SEQ ID NO: 58120 - DNA, 20 bp, synthetic construct
  misc_feature 1..20: note = chemically synthesized
  source 1..20: mol_type = other DNA
ttattctagttttttcgtga

SEQ ID NO: 58121 - DNA, 20 bp, synthetic construct
  misc_feature 1..20: note = chemically synthesized
  source 1..20: mol_type = other DNA
attttagtgagatttagttt

SEQ ID NO: 58122 - DNA, 20 bp, synthetic construct
  misc_feature 1..20: note = chemically synthesized
  source 1..20: mol_type = other DNA
ttccactatcttacttacac

SEQ ID NO: 58123 - DNA, 20 bp, synthetic construct
  misc_feature 1..20: note = chemically synthesized
  source 1..20: mol_type = other DNA
gtattaatttaacatgattt

SEQ ID NO: 58124 - DNA, 20 bp, synthetic construct
  misc_feature 1..20: note = chemically synthesized
  source 1..20: mol_type = other DNA
cagcagaaagagataatatt

SEQ ID NO: 58125 - DNA, 20 bp, synthetic construct
  misc_feature 1..20: note = chemically synthesized
  source 1..20: mol_type = other DNA
taaggataatcagaaaaaaa

SEQ ID NO: 58126 - DNA, 20 bp, synthetic construct
  misc_feature 1..20: note = chemically synthesized
  source 1..20: mol_type = other DNA
aaaaatagaataaacttaga

SEQ ID NO: 58127 - DNA, 20 bp, synthetic construct
  misc_feature 1..20: note = chemically synthesized
  source 1..20: mol_type = other DNA
taataacactagaaaatcta

SEQ ID NO: 58128 - DNA, 20 bp, synthetic construct
  misc_feature 1..20: note = chemically synthesized
  source 1..20: mol_type = other DNA
tttattgtattgttttggaa

SEQ ID NO: 58129 - DNA, 20 bp, synthetic construct
  misc_feature 1..20: note = chemically synthesized
  source 1..20: mol_type = other DNA
ggaaaagagtaaacagtcaa

SEQ ID NO: 58130 - DNA, 20 bp, synthetic construct
  misc_feature 1..20: note = chemically synthesized
  source 1..20: mol_type = other DNA
atatttgtatctgaaaaatc

SEQ ID NO: 58131 - DNA, 20 bp, synthetic construct
  misc_feature 1..20: note = chemically synthesized
  source 1..20: mol_type = other DNA
acgcctgtaatcccagccct

SEQ ID NO: 58132 - DNA, 20 bp, synthetic construct
  misc_feature 1..20: note = chemically synthesized
  source 1..20: mol_type = other DNA
cctttgggtggccgaggcag

SEQ ID NO: 58133 - DNA, 20 bp, synthetic construct
  misc_feature 1..20: note = chemically synthesized
  source 1..20: mol_type = other DNA
gatgctgtacattagatatc

SEQ ID NO: 58134 - DNA, 20 bp, synthetic construct
  misc_feature 1..20: note = chemically synthesized
  source 1..20: mol_type = other DNA
taactgaaattttataccct

SEQ ID NO: 58135 - DNA, 20 bp, synthetic construct
  misc_feature 1..20: note = chemically synthesized
  source 1..20: mol_type = other DNA
cctctactgtctgtttccat

SEQ ID NO: 58136 - DNA, 20 bp, synthetic construct
  misc_feature 1..20: note = chemically synthesized
  source 1..20: mol_type = other DNA
atcaattctgccataaatgg

SEQ ID NO: 58137 - DNA, 20 bp, synthetic construct
  misc_feature 1..20: note = chemically synthesized
  source 1..20: mol_type = other DNA
ttttaattttttgtttgtta

SEQ ID NO: 58138 - DNA, 20 bp, synthetic construct
  misc_feature 1..20: note = chemically synthesized
  source 1..20: mol_type = other DNA
atctgtgtttcttatatatt

SEQ ID NO: 58139 - DNA, 20 bp, synthetic construct
  misc_feature 1..20: note = chemically synthesized
  source 1..20: mol_type = other DNA
attcaaaaaacggctgcaac

SEQ ID NO: 58140 - DNA, 20 bp, synthetic construct
  misc_feature 1..20: note = chemically synthesized
  source 1..20: mol_type = other DNA
aacggctgcaacgtgaatat

SEQ ID NO: 58141 - DNA, 20 bp, synthetic construct
  misc_feature 1..20: note = chemically synthesized
  source 1..20: mol_type = other DNA
ttttgtttatggtgtaagac

SEQ ID NO: 58142 - DNA, 20 bp, synthetic construct
  misc_feature 1..20: note = chemically synthesized
  source 1..20: mol_type = other DNA
gtctgatttcatttcatttt

SEQ ID NO: 58143 - DNA, 20 bp, synthetic construct
  misc_feature 1..20: note = chemically synthesized
  source 1..20: mol_type = other DNA
ctgattatatgccttgattt

SEQ ID NO: 58144 - DNA, 20 bp, synthetic construct
  misc_feature 1..20: note = chemically synthesized
  source 1..20: mol_type = other DNA
agaatcttgccaactagatt

SEQ ID NO: 58145 - DNA, 20 bp, synthetic construct
  misc_feature 1..20: note = chemically synthesized
  source 1..20: mol_type = other DNA
tgagactcatattttatttc

SEQ ID NO: 58146 - DNA, 20 bp, synthetic construct
  misc_feature 1..20: note = chemically synthesized
  source 1..20: mol_type = other DNA
agcatctacctacctaggta

SEQ ID NO: 58147 - DNA, 20 bp, synthetic construct
  misc_feature 1..20: note = chemically synthesized
  source 1..20: mol_type = other DNA
agcagacctctgatctcttc

SEQ ID NO: 58148 - DNA, 20 bp, synthetic construct
  misc_feature 1..20: note = chemically synthesized
  source 1..20: mol_type = other DNA
taatcttaaacatcctgagg

SEQ ID NO: 58149 - DNA, 20 bp, synthetic construct
  misc_feature 1..20: note = chemically synthesized
  source 1..20: mol_type = other DNA
ggaagaatgggacttccatt

SEQ ID NO: 58150 - DNA, 20 bp, synthetic construct
  misc_feature 1..20: note = chemically synthesized
  source 1..20: mol_type = other DNA
catttggggtgggcctatga

SEQ ID NO: 58151 - DNA, 20 bp, synthetic construct
  misc_feature 1..20: note = chemically synthesized
  source 1..20: mol_type = other DNA
gacagggtaataagacagta

SEQ ID NO: 58152 - DNA, 20 bp, synthetic construct
  misc_feature 1..20: note = chemically synthesized
  source 1..20: mol_type = other DNA
ccttccaaagcagactgtga

SEQ ID NO: 58153 - DNA, 20 bp, synthetic construct
  misc_feature 1..20: note = chemically synthesized
  source 1..20: mol_type = other DNA
ggagactagcactgcagatt

SEQ ID NO: 58154 - DNA, 20 bp, synthetic construct
  misc_feature 1..20: note = chemically synthesized
  source 1..20: mol_type = other DNA
actgcagattccgggtcact

SEQ ID NO: 58155 - DNA, 20 bp, synthetic construct
  misc_feature 1..20: note = chemically synthesized
  source 1..20: mol_type = other DNA
gacaacagagacaactaagg

SEQ ID NO: 58156 - DNA, 20 bp, synthetic construct
  misc_feature 1..20: note = chemically synthesized
  source 1..20: mol_type = other DNA
ggtatctctaagcaagagaa

SEQ ID NO: 58157 - DNA, 20 bp, synthetic construct
  misc_feature 1..20: note = chemically synthesized
  source 1..20: mol_type = other DNA
ctctaagcaagagaactgag

SEQ ID NO: 58158 - DNA, 20 bp, synthetic construct
  misc_feature 1..20: note = chemically synthesized
  source 1..20: mol_type = other DNA
ggagtcaaggctgagagatg

SEQ ID NO: 58159 - DNA, 20 bp, synthetic construct
  misc_feature 1..20: note = chemically synthesized
  source 1..20: mol_type = other DNA
gagagatgcaggataagcaa

SEQ ID NO: 58160 - DNA, 20 bp, synthetic construct
  misc_feature 1..20: note = chemically synthesized
  source 1..20: mol_type = other DNA
cctccaaatcaagcctctac

SEQ ID NO: 58161 - DNA, 20 bp, synthetic construct
  misc_feature 1..20: note = chemically synthesized
  source 1..20: mol_type = other DNA
tctacttgaatccttttctg

SEQ ID NO: 58162 - DNA, 20 bp, synthetic construct
  misc_feature 1..20: note = chemically synthesized
  source 1..20: mol_type = other DNA
cttgaatccttttctgaggg

SEQ ID NO: 58163 - DNA, 20 bp, synthetic construct
  misc_feature 1..20: note = chemically synthesized
  source 1..20: mol_type = other DNA
tgcagcctcaccttctttca

SEQ ID NO: 58164 - DNA, 20 bp, synthetic construct
  misc_feature 1..20: note = chemically synthesized
  source 1..20: mol_type = other DNA
aataaatgttttttattagg

SEQ ID NO: 58165 - DNA, 20 bp, synthetic construct
  misc_feature 1..20: note = chemically synthesized
  source 1..20: mol_type = other DNA
tgataggcagcctgcactgg

SEQ ID NO: 58166 - DNA, 20 bp, synthetic construct
  misc_feature 1..20: note = chemically synthesized
  source 1..20: mol_type = other DNA
aggcagcctgcactggtggg

SEQ ID NO: 58167 - DNA, 20 bp, synthetic construct
  misc_feature 1..20: note = chemically synthesized
  source 1..20: mol_type = other DNA
aaaagggcctagcttggact

SEQ ID NO: 58168 - DNA, 20 bp, synthetic construct
  misc_feature 1..20: note = chemically synthesized
  source 1..20: mol_type = other DNA
tcccaaccataaaataaaag

SEQ ID NO: 58169 - DNA, 20 bp, synthetic construct
  misc_feature 1..20: note = chemically synthesized
  source 1..20: mol_type = other DNA
aaataaaagcagaatggtag

SEQ ID NO: 58170 - DNA, 20 bp, synthetic construct
  misc_feature 1..20: note = chemically synthesized
  source 1..20: mol_type = other DNA
aaattatcactgttattctt

SEQ ID NO: 58171 - DNA, 20 bp, synthetic construct
  misc_feature 1..20: note = chemically synthesized
  source 1..20: mol_type = other DNA
gaaaataaagtagggagatt

SEQ ID NO: 58172 - DNA, 20 bp, synthetic construct
  misc_feature 1..20: note = chemically synthesized
  source 1..20: mol_type = other DNA
agaagaaaaaaaaagaaagc

SEQ ID NO: 58173 - DNA, 20 bp, synthetic construct
  misc_feature 1..20: note = chemically synthesized
  source 1..20: mol_type = other DNA
tagactcaccctgaagttct

SEQ ID NO: 58174 - DNA, 20 bp, synthetic construct
  misc_feature 1..20: note = chemically synthesized
  source 1..20: mol_type = other DNA
cttgccatgagccttcacct

SEQ ID NO: 58175 - DNA, 20 bp, synthetic construct
  misc_feature 1..20: note = chemically synthesized
  source 1..20: mol_type = other DNA
gggttgcccataacagcatc

SEQ ID NO: 58176 - DNA, 20 bp, synthetic construct
  misc_feature 1..20: note = chemically synthesized
  source 1..20: mol_type = other DNA
ccaaaggactcaaagaacct

SEQ ID NO: 58177 - DNA, 20 bp, synthetic construct
  misc_feature 1..20: note = chemically synthesized
  source 1..20: mol_type = other DNA
ctcaaagaacctctgggtcc

SEQ ID NO: 58178 - DNA, 20 bp, synthetic construct
  misc_feature 1..20: note = chemically synthesized
  source 1..20: mol_type = other DNA
gggtagaccaccagcagcct

SEQ ID NO: 58179 - DNA, 20 bp, synthetic construct
  misc_feature 1..20: note = chemically synthesized
  source 1..20: mol_type = other DNA
aaaatagaccaataggcaga

SEQ ID NO: 58180 - DNA, 20 bp, synthetic construct
  misc_feature 1..20: note = chemically synthesized
  source 1..20: mol_type = other DNA
tcagtgcctatcagaaaccc

SEQ ID NO: 58181 - DNA, 20 bp, synthetic construct
  misc_feature 1..20: note = chemically synthesized
  source 1..20: mol_type = other DNA
gtaacggcagacttctcctc

SEQ ID NO: 58182 - DNA, 20 bp, synthetic construct
  misc_feature 1..20: note = chemically synthesized
  source 1..20: mol_type = other DNA
ctcctgccctccctgctcct

SEQ ID NO: 58183 - DNA, 20 bp, synthetic construct
  misc_feature 1..20: note = chemically synthesized
  source 1..20: mol_type = other DNA
gggagtagattggccaaccc

SEQ ID NO: 58184 - DNA, 20 bp, synthetic construct
  misc_feature 1..20: note = chemically synthesized
  source 1..20: mol_type = other DNA
aaccctagggtgtggctcca

SEQ ID NO: 58185 - DNA, 20 bp, synthetic construct
  misc_feature 1..20: note = chemically synthesized
  source 1..20: mol_type = other DNA
ggctcttctggcactggctt

SEQ ID NO: 58186 - DNA, 20 bp, synthetic construct
  misc_feature 1..20: note = chemically synthesized
  source 1..20: mol_type = other DNA
aagtgtatttacgtaatatt

SEQ ID NO: 58187 - DNA, 20 bp, synthetic construct
  misc_feature 1..20: note = chemically synthesized
  source 1..20: mol_type = other DNA
agttgatgcactaaaagtgg

SEQ ID NO: 58188 - DNA, 20 bp, synthetic construct
  misc_feature 1..20: note = chemically synthesized
  source 1..20: mol_type = other DNA
tgtctaccataattcagctt

SEQ ID NO: 58189 - DNA, 20 bp, synthetic construct
  misc_feature 1..20: note = chemically synthesized
  source 1..20: mol_type = other DNA
ttcagctttgggatatgtag

SEQ ID NO: 58190 - DNA, 20 bp, synthetic construct
  misc_feature 1..20: note = chemically synthesized
  source 1..20: mol_type = other DNA
tggatctcttcctgcgtctc

SEQ ID NO: 58191 - DNA, 20 bp, synthetic construct
  misc_feature 1..20: note = chemically synthesized
  source 1..20: mol_type = other DNA
tatgcaaaatacttacagga

SEQ ID NO: 58192 - DNA, 20 bp, synthetic construct
  misc_feature 1..20: note = chemically synthesized
  source 1..20: mol_type = other DNA
caaaatacttacaggacaga

SEQ ID NO: 58193 - DNA, 20 bp, synthetic construct
  misc_feature 1..20: note = chemically synthesized
  source 1..20: mol_type = other DNA
taagcatatcttctccttat

SEQ ID NO: 58194 - DNA, 20 bp, synthetic construct
  misc_feature 1..20: note = chemically synthesized
  source 1..20: mol_type = other DNA
taataaattatgtctaaaaa

SEQ ID NO: 58195 - DNA, 20 bp, synthetic construct
  misc_feature 1..20: note = chemically synthesized
  source 1..20: mol_type = other DNA
acccaaagtgtgactatcaa

SEQ ID NO: 58196 - DNA, 20 bp, synthetic construct
  misc_feature 1..20: note = chemically synthesized
  source 1..20: mol_type = other DNA
ttctgcctggactaatctgc

SEQ ID NO: 58197 - DNA, 20 bp, synthetic construct
  misc_feature 1..20: note = chemically synthesized
  source 1..20: mol_type = other DNA
gcctctgtgacttagaaagt

SEQ ID NO: 58198 - DNA, 20 bp, synthetic construct
  misc_feature 1..20: note = chemically synthesized
  source 1..20: mol_type = other DNA
tttttttcctctagtccact

SEQ ID NO: 58199 - DNA, 20 bp, synthetic construct
  misc_feature 1..20: note = chemically synthesized
  source 1..20: mol_type = other DNA
gaggaaaaacttttgaagtg

SEQ ID NO: 58200 - DNA, 20 bp, synthetic construct
  misc_feature 1..20: note = chemically synthesized
  source 1..20: mol_type = other DNA
aagcatttatgaggtcagcg

SEQ ID NO: 58201 - DNA, 20 bp, synthetic construct
  misc_feature 1..20: note = chemically synthesized
  source 1..20: mol_type = other DNA
taagggccctgtcagtcatc

SEQ ID NO: 58202 - DNA, 20 bp, synthetic construct
  misc_feature 1..20: note = chemically synthesized
  source 1..20: mol_type = other DNA
tttaggttaaccaaaagaaa

SEQ ID NO: 58203 - DNA, 20 bp, synthetic construct
  misc_feature 1..20: note = chemically synthesized
  source 1..20: mol_type = other DNA
tgtatgattatagaggtaag

SEQ ID NO: 58204 - DNA, 20 bp, synthetic construct
  misc_feature 1..20: note = chemically synthesized
  source 1..20: mol_type = other DNA
ctgtaaaaaactaaagcaat

SEQ ID NO: 58205 - DNA, 20 bp, synthetic construct
  misc_feature 1..20: note = chemically synthesized
  source 1..20: mol_type = other DNA
ctgagaaaagatttcacatg

SEQ ID NO: 58206 - DNA, 20 bp, synthetic construct
  misc_feature 1..20: note = chemically synthesized
  source 1..20: mol_type = other DNA
tttgacttggctgttagatt

SEQ ID NO: 58207 - DNA, 20 bp, synthetic construct
  misc_feature 1..20: note = chemically synthesized
  source 1..20: mol_type = other DNA
ataaagtgttctgcggaagt

SEQ ID NO: 58208 - DNA, 20 bp, synthetic construct
  misc_feature 1..20: note = chemically synthesized
  source 1..20: mol_type = other DNA
atatgtcttttgcaaatatc

SEQ ID NO: 58209 - DNA, 20 bp, synthetic construct
  misc_feature 1..20: note = chemically synthesized
  source 1..20: mol_type = other DNA
tcttttttaaatgatgaact

SEQ ID NO: 58210 - DNA, 20 bp, synthetic construct
  misc_feature 1..20: note = chemically synthesized
  source 1..20: mol_type = other DNA
catcatcctggcttcaaggc

SEQ ID NO: 58211 - DNA, 20 bp, synthetic construct
  misc_feature 1..20: note = chemically synthesized
  source 1..20: mol_type = other DNA
tggtagttacttagtgtgac

SEQ ID NO: 58212 - DNA, 20 bp, synthetic construct
  misc_feature 1..20: note = chemically synthesized
  source 1..20: mol_type = other DNA
tgtgagcttgcttctactct

SEQ ID NO: 58213 - DNA, 20 bp, synthetic construct
  misc_feature 1..20: note = chemically synthesized
  source 1..20: mol_type = other DNA
agcttgcttctactctgtga

SEQ ID NO: 58214 - DNA, 20 bp, synthetic construct
  misc_feature 1..20: note = chemically synthesized
  source 1..20: mol_type = other DNA
taagtcctaatgttttatat

SEQ ID NO: 58215 - DNA, 20 bp, synthetic construct
  misc_feature 1..20: note = chemically synthesized
  source 1..20: mol_type = other DNA
tatatcagaatggccctagt

SEQ ID NO: 58216 - DNA, 20 bp, synthetic construct
  misc_feature 1..20: note = chemically synthesized
  source 1..20: mol_type = other DNA
ccctagtctgggtatactta

SEQ ID NO: 58217 - DNA, 20 bp, synthetic construct
  misc_feature 1..20: note = chemically synthesized
  source 1..20: mol_type = other DNA
agtctgggtatacttagagg

SEQ ID NO: 58218 - DNA, 20 bp, synthetic construct
  misc_feature 1..20: note = chemically synthesized
  source 1..20: mol_type = other DNA
aaatcatgacactcatctat

SEQ ID NO: 58219 - DNA, 20 bp, synthetic construct
  misc_feature 1..20: note = chemically synthesized
  source 1..20: mol_type = other DNA
tttcaaaagcagcacttgac

SEQ ID NO: 58220 - DNA, 20 bp, synthetic construct
  misc_feature 1..20: note = chemically synthesized
  source 1..20: mol_type = other DNA
aaacacaactcagcagctct

SEQ ID NO: 58221 - DNA, 20 bp, synthetic construct
  misc_feature 1..20: note = chemically synthesized
  source 1..20: mol_type = other DNA
cacacaaaatagtttggaaa

SEQ ID NO: 58222 - DNA, 20 bp, synthetic construct
  misc_feature 1..20: note = chemically synthesized
  source 1..20: mol_type = other DNA
actgggctcagattttcatt

SEQ ID NO: 58223 - DNA, 20 bp, synthetic construct
  misc_feature 1..20: note = chemically synthesized
  source 1..20: mol_type = other DNA
agattgcatctctttagagg

SEQ ID NO: 58224 - DNA, 20 bp, synthetic construct
  misc_feature 1..20: note = chemically synthesized
  source 1..20: mol_type = other DNA
actgctctgaagctcaagag

SEQ ID NO: 58225 - DNA, 20 bp, synthetic construct
  misc_feature 1..20: note = chemically synthesized
  source 1..20: mol_type = other DNA
aaaattaaagccaaatcttg

SEQ ID NO: 58226 - DNA, 20 bp, synthetic construct
  misc_feature 1..20: note = chemically synthesized
  source 1..20: mol_type = other DNA
ttaactttcattttaaattt

SEQ ID NO: 58227 - DNA, 20 bp, synthetic construct
  misc_feature 1..20: note = chemically synthesized
  source 1..20: mol_type = other DNA
tataggtaaattgcatatca

SEQ ID NO: 58228 - DNA, 20 bp, synthetic construct
  misc_feature 1..20: note = chemically synthesized
  source 1..20: mol_type = other DNA
ccctcaaccctcaagtaggc

SEQ ID NO: 58229 - DNA, 20 bp, synthetic construct
  misc_feature 1..20: note = chemically synthesized
  source 1..20: mol_type = other DNA
cccatccaggtgatgttctc

SEQ ID NO: 58230 - DNA, 20 bp, synthetic construct
  misc_feature 1..20: note = chemically synthesized
  source 1..20: mol_type = other DNA
tctcatgaattctctggtat

SEQ ID NO: 58231 - DNA, 20 bp, synthetic construct
  misc_feature 1..20: note = chemically synthesized
  source 1..20: mol_type = other DNA
ctgactacttctaatggtgt

SEQ ID NO: 58232 - DNA, 20 bp, synthetic construct
  misc_feature 1..20: note = chemically synthesized
  source 1..20: mol_type = other DNA
tttttttgacttttggagaa

SEQ ID NO: 58233 - DNA, 20 bp, synthetic construct
  misc_feature 1..20: note = chemically synthesized
  source 1..20: mol_type = other DNA
acaatctctcttactgtctt

SEQ ID NO: 58234 - DNA, 20 bp, synthetic construct
  misc_feature 1..20: note = chemically synthesized
  source 1..20: mol_type = other DNA
atgagaacttccctatgctc

SEQ ID NO: 58235 - DNA, 20 bp, synthetic construct
  misc_feature 1..20: note = chemically synthesized
  source 1..20: mol_type = other DNA
gtgatcttccccaaaatgcc

SEQ ID NO: 58236 - DNA, 20 bp, synthetic construct
  misc_feature 1..20: note = chemically synthesized
  source 1..20: mol_type = other DNA
aaatatcttattcagatata

SEQ ID NO: 58237 - DNA, 20 bp, synthetic construct
  misc_feature 1..20: note = chemically synthesized
  source 1..20: mol_type = other DNA
taatgacttaaggaaaacac

SEQ ID NO: 58238 - DNA, 20 bp, synthetic construct
  misc_feature 1..20: note = chemically synthesized
  source 1..20: mol_type = other DNA
gtatattctggcagtacaga

SEQ ID NO: 58239 - DNA, 20 bp, synthetic construct
  misc_feature 1..20: note = chemically synthesized
  source 1..20: mol_type = other DNA
attccagaagttctaaagca

SEQ ID NO: 58240 - DNA, 20 bp, synthetic construct
  misc_feature 1..20: note = chemically synthesized
  source 1..20: mol_type = other DNA
ttcattcattcactgttttc

SEQ ID NO: 58241 - DNA, 20 bp, synthetic construct
  misc_feature 1..20: note = chemically synthesized
  source 1..20: mol_type = other DNA
tattttctttctgcccattg

SEQ ID NO: 58242 - DNA, 20 bp, synthetic construct
  misc_feature 1..20: note = chemically synthesized
  source 1..20: mol_type = other DNA
agtaggcatgtaagaaggta

SEQ ID NO: 58243 - DNA, 20 bp, synthetic construct
  misc_feature 1..20: note = chemically synthesized
  source 1..20: mol_type = other DNA
gtaagaaggtagagaatagg

SEQ ID NO: 58244 - DNA, 20 bp, synthetic construct
  misc_feature 1..20: note = chemically synthesized
  source 1..20: mol_type = other DNA
gcagaattgcttataaagca

SEQ ID NO: 58245 - DNA, 20 bp, synthetic construct
  misc_feature 1..20: note = chemically synthesized
  source 1..20: mol_type = other DNA
atataaaaaatggtgtgggg

SEQ ID NO: 58246 - DNA, 20 bp, synthetic construct
  misc_feature 1..20: note = chemically synthesized
  source 1..20: mol_type = other DNA
ggagggtttggaaagatttt

SEQ ID NO: 58247 - DNA, 20 bp, synthetic construct
  misc_feature 1..20: note = chemically synthesized
  source 1..20: mol_type = other DNA
atagagaagtttattgtggc

SEQ ID NO: 58248 - DNA, 20 bp, synthetic construct
  misc_feature 1..20: note = chemically synthesized
  source 1..20: mol_type = other DNA
tcacaagtaatacgtgagca

SEQ ID NO: 58249 - DNA, 20 bp, synthetic construct
  misc_feature 1..20: note = chemically synthesized
  source 1..20: mol_type = other DNA
cttggagcaggaacacttga

SEQ ID NO: 58250 - DNA, 20 bp, synthetic construct
  misc_feature 1..20: note = chemically synthesized
  source 1..20: mol_type = other DNA
aaagacaacataacattgtc

SEQ ID NO: 58251 - DNA, 20 bp, synthetic construct
  misc_feature 1..20: note = chemically synthesized
  source 1..20: mol_type = other DNA
attattttctcagtaattgt

SEQ ID NO: 58252 - DNA, 20 bp, synthetic construct
  misc_feature 1..20: note = chemically synthesized
  source 1..20: mol_type = other DNA
ttacccttgaggctatgtct

SEQ ID NO: 58253 - DNA, 20 bp, synthetic construct
  misc_feature 1..20: note = chemically synthesized
  source 1..20: mol_type = other DNA
gccagtattatctttgtatc

SEQ ID NO: 58254 - DNA, 20 bp, synthetic construct
  misc_feature 1..20: note = chemically synthesized
  source 1..20: mol_type = other DNA
gtgttcccaagttcagaaaa

SEQ ID NO: 58255 - DNA, 20 bp, synthetic construct
  misc_feature 1..20: note = chemically synthesized
  source 1..20: mol_type = other DNA
gaaaatagaatctagggaaa

SEQ ID NO: 58256 - DNA, 20 bp, synthetic construct
  misc_feature 1..20: note = chemically synthesized
  source 1..20: mol_type = other DNA
atggttatcaggaaacagtc

SEQ ID NO: 58257 - DNA, 20 bp, synthetic construct
  misc_feature 1..20: note = chemically synthesized
  source 1..20: mol_type = other DNA
tgataggcagcctgcatttg

SEQ ID NO: 58258 - DNA, 20 bp, synthetic construct
  misc_feature 1..20: note = chemically synthesized
  source 1..20: mol_type = other DNA
aggcagcctgcatttgtggg

SEQ ID NO: 58259 - DNA, 20 bp, synthetic construct
  misc_feature 1..20: note = chemically synthesized
  source 1..20: mol_type = other DNA
cagcataaataagtacatat

SEQ ID NO: 58260 - DNA, 20 bp, synthetic construct
  misc_feature 1..20: note = chemically synthesized
  source 1..20: mol_type = other DNA
cctttccattccatttacta

SEQ ID NO: 58261 - DNA, 20 bp, synthetic construct
  misc_feature 1..20: note = chemically synthesized
  source 1..20: mol_type = other DNA
gtattctatgcctctcatct

SEQ ID NO: 58262 - DNA, 20 bp, synthetic construct
  misc_feature 1..20: note = chemically synthesized
  source 1..20: mol_type = other DNA
atacccatgtggagagacaa

SEQ ID NO: 58263 - DNA, 20 bp, synthetic construct
  misc_feature 1..20: note = chemically synthesized
  source 1..20: mol_type = other DNA
caaaaggattattctaagtg

SEQ ID NO: 58264 - DNA, 20 bp, synthetic construct
  misc_feature 1..20: note = chemically synthesized
  source 1..20: mol_type = other DNA
tgagagctggtatgcataat

SEQ ID NO: 58265 - DNA, 20 bp, synthetic construct
  misc_feature 1..20: note = chemically synthesized
  source 1..20: mol_type = other DNA
gagaaggaaaaatgaaggga

SEQ ID NO: 58266 - DNA, 20 bp, synthetic construct
  misc_feature 1..20: note = chemically synthesized
  source 1..20: mol_type = other DNA
agggggttgggagagaaaga

SEQ ID NO: 58267 - DNA, 20 bp, synthetic construct
  misc_feature 1..20: note = chemically synthesized
  source 1..20: mol_type = other DNA
ttgtgaggaaggaaaaaatg

SEQ ID NO: 58268 - DNA, 20 bp, synthetic construct
  misc_feature 1..20: note = chemically synthesized
  source 1..20: mol_type = other DNA
tggactcaccctgaagttct

SEQ ID NO: 58269 - DNA, 20 bp, synthetic construct
  misc_feature 1..20: note = chemically synthesized
  source 1..20: mol_type = other DNA
cttgccatgagccttcacct

SEQ ID NO: 58270 - DNA, 20 bp, synthetic construct
  misc_feature 1..20: note = chemically synthesized
  source 1..20: mol_type = other DNA
ccaaaggactcaaagaacct

SEQ ID NO: 58271 - DNA, 20 bp, synthetic construct
  misc_feature 1..20: note = chemically synthesized
  source 1..20: mol_type = other DNA
ctcaaagaacctctgggtcc

SEQ ID NO: 58272 - DNA, 20 bp, synthetic construct
  misc_feature 1..20: note = chemically synthesized
  source 1..20: mol_type = other DNA
gggtagaccaccagtaatct

SEQ ID NO: 58273 - DNA, 20 bp, synthetic construct
  misc_feature 1..20: note = chemically synthesized
  source 1..20: mol_type = other DNA
ggaaaacagcccaagggaca

SEQ ID NO: 58274 - DNA, 20 bp, synthetic construct
  misc_feature 1..20: note = chemically synthesized
  source 1..20: mol_type = other DNA
tcagtgcctatcagaaaccc

SEQ ID NO: 58275 - DNA, 20 bp, synthetic construct
  misc_feature 1..20: note = chemically synthesized
  source 1..20: mol_type = other DNA
ttgacagcagtcttctcctc

SEQ ID NO: 58276 - DNA, 20 bp, synthetic construct
  misc_feature 1..20: note = chemically synthesized
  source 1..20: mol_type = other DNA
gcaggttggtttaagataag

SEQ ID NO: 58277 - DNA, 20 bp, synthetic construct
  misc_feature 1..20: note = chemically synthesized
  source 1..20: mol_type = other DNA
gcagggtttcattagtttgt

SEQ ID NO: 58278 - DNA, 20 bp, synthetic construct
  misc_feature 1..20: note = chemically synthesized
  source 1..20: mol_type = other DNA
agtgttttaggctaatatag

SEQ ID NO: 58279 - DNA, 20 bp, synthetic construct
  misc_feature 1..20: note = chemically synthesized
  source 1..20: mol_type = other DNA
taatatagtggaatgtatct

SEQ ID NO: 58280 - DNA, 20 bp, synthetic construct
  misc_feature 1..20: note = chemically synthesized
  source 1..20: mol_type = other DNA
ctagagatttttgtctccaa

SEQ ID NO: 58281 - DNA, 20 bp, synthetic construct
  misc_feature 1..20: note = chemically synthesized
  source 1..20: mol_type = other DNA
ccaagggaattttgagaggt

SEQ ID NO: 58282 - DNA, 20 bp, synthetic construct
  misc_feature 1..20: note = chemically synthesized
  source 1..20: mol_type = other DNA
ttgaaataaatatccattaa

SEQ ID NO: 58283 - DNA, 20 bp, synthetic construct
  misc_feature 1..20: note = chemically synthesized
  source 1..20: mol_type = other DNA
attaaaagaatatttaaaaa

SEQ ID NO: 58284 - DNA, 20 bp, synthetic construct
  misc_feature 1..20: note = chemically synthesized
  source 1..20: mol_type = other DNA
ttgaaataggttctggaaac

SEQ ID NO: 58285 - DNA, 20 bp, synthetic construct
  misc_feature 1..20: note = chemically synthesized
  source 1..20: mol_type = other DNA
aaatattatatacaaatatt

SEQ ID NO: 58286 - DNA, 20 bp, synthetic construct
  misc_feature 1..20: note = chemically synthesized
  source 1..20: mol_type = other DNA
aattatggtatgactaaaga

SEQ ID NO: 58287 - DNA, 20 bp, synthetic construct
  misc_feature 1..20: note = chemically synthesized
  source 1..20: mol_type = other DNA
ttaaatttaacgaagttcct

SEQ ID NO: 58288 - DNA, 20 bp, synthetic construct
  misc_feature 1..20: note = chemically synthesized
  source 1..20: mol_type = other DNA
tgtgttcttaaaaaaaaatg

SEQ ID NO: 58289 - DNA, 20 bp, synthetic construct
  misc_feature 1..20: note = chemically synthesized
  source 1..20: mol_type = other DNA
aaaaatgtggaattagaccc

SEQ ID NO: 58290 - DNA, 20 bp, synthetic construct
  misc_feature 1..20: note = chemically synthesized
  source 1..20: mol_type = other DNA
cagtagtttttcactctttt

SEQ ID NO: 58291 - DNA, 20 bp, synthetic construct
  misc_feature 1..20: note = chemically synthesized
  source 1..20: mol_type = other DNA
ccatgagcatatccaaaagg

SEQ ID NO: 58292 - DNA, 20 bp, synthetic construct
  misc_feature 1..20: note = chemically synthesized
  source 1..20: mol_type = other DNA
ggaaggaagaggggaagaga

SEQ ID NO: 58293 - DNA, 20 bp, synthetic construct
  misc_feature 1..20: note = chemically synthesized
  source 1..20: mol_type = other DNA
aggggaagagagaggatgga

SEQ ID NO: 58294 - DNA, 20 bp, synthetic construct
  misc_feature 1..20: note = chemically synthesized
  source 1..20: mol_type = other DNA
ggaggggagaggagaggaga

SEQ ID NO: 58295 - DNA, 20 bp, synthetic construct
  misc_feature 1..20: note = chemically synthesized
  source 1..20: mol_type = other DNA
gttcaaattttggtggtgat

SEQ ID NO: 58296 - DNA, 20 bp, synthetic construct
  misc_feature 1..20: note = chemically synthesized
  source 1..20: mol_type = other DNA
tttaatagtatccacaaatg

SEQ ID NO: 58297 - DNA, 20 bp, synthetic construct
  misc_feature 1..20: note = chemically synthesized
  source 1..20: mol_type = other DNA
acttaaatgcttaccaacag

SEQ ID NO: 58298 - DNA, 20 bp, synthetic construct
  misc_feature 1..20: note = chemically synthesized
  source 1..20: mol_type = other DNA
gataaattacggtatagtca

SEQ ID NO: 58299 - DNA, 20 bp, synthetic construct
  misc_feature 1..20: note = chemically synthesized
  source 1..20: mol_type = other DNA
attacggtatagtcaaagaa

SEQ ID NO: 58300 - DNA, 20 bp, synthetic construct
  misc_feature 1..20: note = chemically synthesized
  source 1..20: mol_type = other DNA
gaatattacacagaaatgaa

SEQ ID NO: 58301 - DNA, 20 bp, synthetic construct
  misc_feature 1..20: note = chemically synthesized
  source 1..20: mol_type = other DNA
ttgattaaaagtaaccagag

SEQ ID NO: 58302 - DNA, 20 bp, synthetic construct
  misc_feature 1..20: note = chemically synthesized
  source 1..20: mol_type = other DNA
ctttatttgtatatagaaag

SEQ ID NO: 58303 - DNA, 20 bp, synthetic construct
  misc_feature 1..20: note = chemically synthesized
  source 1..20: mol_type = other DNA
caaggggaaatgttataaaa

SEQ ID NO: 58304 - DNA, 20 bp, synthetic construct
  misc_feature 1..20: note = chemically synthesized
  source 1..20: mol_type = other DNA
aaatagggtagagaggagcc

SEQ ID NO: 58305 - DNA, 20 bp, synthetic construct
  misc_feature 1..20: note = chemically synthesized
  source 1..20: mol_type = other DNA
ctggaagccaacgaaagata

SEQ ID NO: 58306 - DNA, 20 bp, synthetic construct
  misc_feature 1..20: note = chemically synthesized
  source 1..20: mol_type = other DNA
gtgatgtcagtcgtgaacac

SEQ ID NO: 58307 - DNA, 20 bp, synthetic construct
  misc_feature 1..20: note = chemically synthesized
  source 1..20: mol_type = other DNA
acaagaatagggccacattt

SEQ ID NO: 58308 - DNA, 20 bp, synthetic construct
  misc_feature 1..20: note = chemically synthesized
  source 1..20: mol_type = other DNA
ataaaatcagaaatacagtc

SEQ ID NO: 58309 - DNA, 20 bp, synthetic construct
  misc_feature 1..20: note = chemically synthesized
  source 1..20: mol_type = other DNA
aaaaagatgtacttagatat

SEQ ID NO: 58310 - DNA, 20 bp, synthetic construct
  misc_feature 1..20: note = chemically synthesized
  source 1..20: mol_type = other DNA
atgtggatctggagctcaga

SEQ ID NO: 58311 - DNA, 20 bp, synthetic construct
  misc_feature 1..20: note = chemically synthesized
  source 1..20: mol_type = other DNA
agaaagaatacaaccaggtc

SEQ ID NO: 58312 - DNA, 20 bp, synthetic construct
  misc_feature 1..20: note = chemically synthesized
  source 1..20: mol_type = other DNA
atacaaccaggtcaagaata

SEQ ID NO: 58313 - DNA, 20 bp, synthetic construct
  misc_feature 1..20: note = chemically synthesized
  source 1..20: mol_type = other DNA
aacagatcataatgtgctgt

SEQ ID NO: 58314 - DNA, 20 bp, synthetic construct
  misc_feature 1..20: note = chemically synthesized
  source 1..20: mol_type = other DNA
tcaatatctccttaaaatct

SEQ ID NO: 58315 - DNA, 20 bp, synthetic construct
  misc_feature 1..20: note = chemically synthesized
  source 1..20: mol_type = other DNA
ttagaatgtgtttgtgaggg

SEQ ID NO: 58316 - DNA, 20 bp, synthetic construct
  misc_feature 1..20: note = chemically synthesized
  source 1..20: mol_type = other DNA
tggttacatgtttattctat

SEQ ID NO: 58317 - DNA, 20 bp, synthetic construct
  misc_feature 1..20: note = chemically synthesized
  source 1..20: mol_type = other DNA
ttctatatggattgcattga

SEQ ID NO: 58318 - DNA, 20 bp, synthetic construct
  misc_feature 1..20: note = chemically synthesized
  source 1..20: mol_type = other DNA
cattgagaggatttgtataa

SEQ ID NO: 58319 - DNA, 20 bp, synthetic construct
  misc_feature 1..20: note = chemically synthesized
  source 1..20: mol_type = other DNA
ttttcttttctcttctgaga

SEQ ID NO: 58320 - DNA, 20 bp, synthetic construct
  misc_feature 1..20: note = chemically synthesized
  source 1..20: mol_type = other DNA
ttcatccctattgcccaagc

SEQ ID NO: 58321 - DNA, 20 bp, synthetic construct
  misc_feature 1..20: note = chemically synthesized
  source 1..20: mol_type = other DNA
ctcaccgcaacctctgcctc

SEQ ID NO: 58322 - DNA, 20 bp, synthetic construct
  misc_feature 1..20: note = chemically synthesized
  source 1..20: mol_type = other DNA
aattctcctgcctcagccac

SEQ ID NO: 58323 - DNA, 20 bp, synthetic construct
  misc_feature 1..20: note = chemically synthesized
  source 1..20: mol_type = other DNA
ttttgtatttttagtagaga

SEQ ID NO: 58324 - DNA, 20 bp, synthetic construct
  misc_feature 1..20: note = chemically synthesized
  source 1..20: mol_type = other DNA
tgccttggcctcccaaagtg

SEQ ID NO: 58325 - DNA, 20 bp, synthetic construct
  misc_feature 1..20: note = chemically synthesized
  source 1..20: mol_type = other DNA
cctgagccaccgcatccagc

SEQ ID NO: 58326 - DNA, 20 bp, synthetic construct
  misc_feature 1..20: note = chemically synthesized
  source 1..20: mol_type = other DNA
ggataaggtctaaaagtgga

SEQ ID NO: 58327 - DNA, 20 bp, synthetic construct
  misc_feature 1..20: note = chemically synthesized
  source 1..20: mol_type = other DNA
tgaggacctgactgggcagt

SEQ ID NO: 58328 - DNA, 20 bp, synthetic construct
  misc_feature 1..20: note = chemically synthesized
  source 1..20: mol_type = other DNA
tagatagggacaaattgaag

SEQ ID NO: 58329 - DNA, 20 bp, synthetic construct
  misc_feature 1..20: note = chemically synthesized
  source 1..20: mol_type = other DNA
gattttaatctgtgaccttg

SEQ ID NO: 58330 - DNA, 20 bp, synthetic construct
  misc_feature 1..20: note = chemically synthesized
  source 1..20: mol_type = other DNA
taacaagtgaaatacccatg

SEQ ID NO: 58331 - DNA, 20 bp, synthetic construct
  misc_feature 1..20: note = chemically synthesized
  source 1..20: mol_type = other DNA
cccagtacattgtttgatat

SEQ ID NO: 58332 - DNA, 20 bp, synthetic construct
  misc_feature 1..20: note = chemically synthesized
  source 1..20: mol_type = other DNA
ggaggtcagaggttagaaat

SEQ ID NO: 58333 - DNA, 20 bp, synthetic construct
  misc_feature 1..20: note = chemically synthesized
  source 1..20: mol_type = other DNA
agaggttagaaatcagagtt

SEQ ID NO: 58334 - DNA, 20 bp, synthetic construct
  misc_feature 1..20: note = chemically synthesized
  source 1..20: mol_type = other DNA
tagaaatcagagttgggaat

SEQ ID NO: 58335 - DNA, 20 bp, synthetic construct
  misc_feature 1..20: note = chemically synthesized
  source 1..20: mol_type = other DNA
ggattatacaggctgtattt

SEQ ID NO: 58336 - DNA, 20 bp, synthetic construct
  misc_feature 1..20: note = chemically synthesized
  source 1..20: mol_type = other DNA
ttaagagtttagatataact

SEQ ID NO: 58337 - DNA, 20 bp, synthetic construct
  misc_feature 1..20: note = chemically synthesized
  source 1..20: mol_type = other DNA
ttagatataactgtgaatcc

SEQ ID NO: 58338 - DNA, 20 bp, synthetic construct
  misc_feature 1..20: note = chemically synthesized
  source 1..20: mol_type = other DNA
actgtgaatccaagagtgtg

SEQ ID NO: 58339 - DNA, 20 bp, synthetic construct
  misc_feature 1..20: note = chemically synthesized
  source 1..20: mol_type = other DNA
ttaattagtgtaatgccaat

SEQ ID NO: 58340 - DNA, 20 bp, synthetic construct
  misc_feature 1..20: note = chemically synthesized
  source 1..20: mol_type = other DNA
agtgtaatgccaatgtgggt

SEQ ID NO: 58341 - DNA, 20 bp, synthetic construct
  misc_feature 1..20: note = chemically synthesized
  source 1..20: mol_type = other DNA
ctgaaacaaaaaggaaaagg

SEQ ID NO: 58342 - DNA, 20 bp, synthetic construct
  misc_feature 1..20: note = chemically synthesized
  source 1..20: mol_type = other DNA
agatgggaaatgtatgtaag

SEQ ID NO: 58343 - DNA, 20 bp, synthetic construct
  misc_feature 1..20: note = chemically synthesized
  source 1..20: mol_type = other DNA
gggaggtatactaaggactc

SEQ ID NO: 58344 - DNA, 20 bp, synthetic construct
  misc_feature 1..20: note = chemically synthesized
  source 1..20: mol_type = other DNA
gactctagggtcagagaaat

SEQ ID NO: 58345 - DNA, 20 bp, synthetic construct
  misc_feature 1..20: note = chemically synthesized
  source 1..20: mol_type = other DNA
tacaaaattcacattcttgg

SEQ ID NO: 58346 - DNA, 20 bp, synthetic construct
  misc_feature 1..20: note = chemically synthesized
  source 1..20: mol_type = other DNA
cagcactttcagaggccgag

SEQ ID NO: 58347 - DNA, 20 bp, synthetic construct
  misc_feature 1..20: note = chemically synthesized
  source 1..20: mol_type = other DNA
actttcagaggccgaggagg

SEQ ID NO: 58348 - DNA, 20 bp, synthetic construct
  misc_feature 1..20: note = chemically synthesized
  source 1..20: mol_type = other DNA
agggtggatcacctgatgtt

SEQ ID NO: 58349 - DNA, 20 bp, synthetic construct
  misc_feature 1..20: note = chemically synthesized
  source 1..20: mol_type = other DNA
tacttgggaggctgaggcag

SEQ ID NO: 58350 - DNA, 20 bp, synthetic construct
  misc_feature 1..20: note = chemically synthesized
  source 1..20: mol_type = other DNA
aggcagatgttgcagtgagc

SEQ ID NO: 58351 - DNA, 20 bp, synthetic construct
  misc_feature 1..20: note = chemically synthesized
  source 1..20: mol_type = other DNA
taattcataattttcagata

SEQ ID NO: 58352 - DNA, 20 bp, synthetic construct
  misc_feature 1..20: note = chemically synthesized
  source 1..20: mol_type = other DNA
taatctcagttcactgctgt

SEQ ID NO: 58353 - DNA, 20 bp, synthetic construct
  misc_feature 1..20: note = chemically synthesized
  source 1..20: mol_type = other DNA
tggtctctctctctctctga

SEQ ID NO: 58354 - DNA, 20 bp, synthetic construct
  misc_feature 1..20: note = chemically synthesized
  source 1..20: mol_type = other DNA
aaggagcacccactagctca

SEQ ID NO: 58355 - DNA, 20 bp, synthetic construct
  misc_feature 1..20: note = chemically synthesized
  source 1..20: mol_type = other DNA
tattttagctcttccaatac

SEQ ID NO: 58356 - DNA, 20 bp, synthetic construct
  misc_feature 1..20: note = chemically synthesized
  source 1..20: mol_type = other DNA
gagctgtatttaattctagg

SEQ ID NO: 58357 - DNA, 20 bp, synthetic construct
  misc_feature 1..20: note = chemically synthesized
  source 1..20: mol_type = other DNA
ttagtgtatgaaattctgat

SEQ ID NO: 58358 - DNA, 20 bp, synthetic construct
  misc_feature 1..20: note = chemically synthesized
  source 1..20: mol_type = other DNA
ggtctcaaacaaacttctct

SEQ ID NO: 58359 - DNA, 20 bp, synthetic construct
  misc_feature 1..20: note = chemically synthesized
  source 1..20: mol_type = other DNA
tagaaaagagagatctaatt

SEQ ID NO: 58360 - DNA, 20 bp, synthetic construct
  misc_feature 1..20: note = chemically synthesized
  source 1..20: mol_type = other DNA
tctccaaatactagggaaat

SEQ ID NO: 58361 - DNA, 20 bp, synthetic construct
  misc_feature 1..20: note = chemically synthesized
  source 1..20: mol_type = other DNA
agaggttaaaatttagtggt

SEQ ID NO: 58362 - DNA, 20 bp, synthetic construct
  misc_feature 1..20: note = chemically synthesized
  source 1..20: mol_type = other DNA
gaaagagcccataattgtag

SEQ ID NO: 58363 - DNA, 20 bp, synthetic construct
  misc_feature 1..20: note = chemically synthesized
  source 1..20: mol_type = other DNA
tataagttaggacttaaagt

SEQ ID NO: 58364 - DNA, 20 bp, synthetic construct
  misc_feature 1..20: note = chemically synthesized
  source 1..20: mol_type = other DNA
aatgagggaaagacatcacc

SEQ ID NO: 58365 - DNA, 20 bp, synthetic construct
  misc_feature 1..20: note = chemically synthesized
  source 1..20: mol_type = other DNA
aacagcatgtacaaagctaa

SEQ ID NO: 58366 - DNA, 20 bp, synthetic construct
  misc_feature 1..20: note = chemically synthesized
  source 1..20: mol_type = other DNA
tccaaattctctagattgac

SEQ ID NO: 58367 - DNA, 20 bp, synthetic construct
  misc_feature 1..20: note = chemically synthesized
  source 1..20: mol_type = other DNA
tgtgtgttcttatgtgtgca

SEQ ID NO: 58368 - DNA, 20 bp, synthetic construct
  misc_feature 1..20: note = chemically synthesized
  source 1..20: mol_type = other DNA
acatctgtatgtgtatatca

SEQ ID NO: 58369 - DNA, 20 bp, synthetic construct
  misc_feature 1..20: note = chemically synthesized
  source 1..20: mol_type = other DNA
ttatgtgttttccactaaag

SEQ ID NO: 58370 - DNA, 20 bp, synthetic construct
  misc_feature 1..20: note = chemically synthesized
  source 1..20: mol_type = other DNA
tcatctcttcatttaaaata

SEQ ID NO: 58371 - DNA, 20 bp, synthetic construct
  misc_feature 1..20: note = chemically synthesized
  source 1..20: mol_type = other DNA
gagtgacattcagaagggca

SEQ ID NO: 58372 - DNA, 20 bp, synthetic construct
  misc_feature 1..20: note = chemically synthesized
  source 1..20: mol_type = other DNA
ttggacacagtaattattca

SEQ ID NO: 58373 - DNA, 20 bp, synthetic construct
  misc_feature 1..20: note = chemically synthesized
  source 1..20: mol_type = other DNA
tgtatgctacaagacagcag

SEQ ID NO: 58374 - DNA, 20 bp, synthetic construct
  misc_feature 1..20: note = chemically synthesized
  source 1..20: mol_type = other DNA
actggtatttattctgcttt

SEQ ID NO: 58375 - DNA, 20 bp, synthetic construct
  misc_feature 1..20: note = chemically synthesized
  source 1..20: mol_type = other DNA
gggactcaaaaatatgacaa

SEQ ID NO: 58376 - DNA, 20 bp, synthetic construct
  misc_feature 1..20: note = chemically synthesized
  source 1..20: mol_type = other DNA
atatggtgaggtgagctctt

SEQ ID NO: 58377 - DNA, 20 bp, synthetic construct
  misc_feature 1..20: note = chemically synthesized
  source 1..20: mol_type = other DNA
atactttgagaaagaggttt

SEQ ID NO: 58378 - DNA, 20 bp, synthetic construct
  misc_feature 1..20: note = chemically synthesized
  source 1..20: mol_type = other DNA
attaatgaaactggagaaga

SEQ ID NO: 58379 - DNA, 20 bp, synthetic construct
  misc_feature 1..20: note = chemically synthesized
  source 1..20: mol_type = other DNA
ttctttgaggttttaggttt

SEQ ID NO: 58380 - DNA, 20 bp, synthetic construct
  misc_feature 1..20: note = chemically synthesized
  source 1..20: mol_type = other DNA
gagggtgctacatacttcct

SEQ ID NO: 58381 - DNA, 20 bp, synthetic construct
  misc_feature 1..20: note = chemically synthesized
  source 1..20: mol_type = other DNA
ctacatacttcctaagggtc

SEQ ID NO: 58382 - DNA, 20 bp, synthetic construct
  misc_feature 1..20: note = chemically synthesized
  source 1..20: mol_type = other DNA
ttcctaagggtcttgggtac

SEQ ID NO: 58383 - DNA, 20 bp, synthetic construct
  misc_feature 1..20: note = chemically synthesized
  source 1..20: mol_type = other DNA
ggagtttgaagtgattgcca

SEQ ID NO: 58384 - DNA, 20 bp, synthetic construct
  misc_feature 1..20: note = chemically synthesized
  source 1..20: mol_type = other DNA
ccttcttttcattcacagac

SEQ ID NO: 58385 - DNA, 20 bp, synthetic construct
  misc_feature 1..20: note = chemically synthesized
  source 1..20: mol_type = other DNA
ttctatatatatatatacat

SEQ ID NO: 58386 - DNA, 20 bp, synthetic construct
  misc_feature 1..20: note = chemically synthesized
  source 1..20: mol_type = other DNA
cataaaaattgtatatattt

SEQ ID NO: 58387 - DNA, 20 bp, synthetic construct
  misc_feature 1..20: note = chemically synthesized
  source 1..20: mol_type = other DNA
tgtgtgtatatatatagaaa

SEQ ID NO: 58388 - DNA, 20 bp, synthetic construct
  misc_feature 1..20: note = chemically synthesized
  source 1..20: mol_type = other DNA
acaaagagatttattattta

SEQ ID NO: 58389 - DNA, 20 bp, synthetic construct
  misc_feature 1..20: note = chemically synthesized
  source 1..20: mol_type = other DNA
ctatcatatgcacagcttaa

SEQ ID NO: 58390 - DNA, 20 bp, synthetic construct
  misc_feature 1..20: note = chemically synthesized
  source 1..20: mol_type = other DNA
gtcaccaaatgagctatatc

SEQ ID NO: 58391 - DNA, 20 bp, synthetic construct
  misc_feature 1..20: note = chemically synthesized
  source 1..20: mol_type = other DNA
gcctatacagaacttctaat

SEQ ID NO: 58392 - DNA, 20 bp, synthetic construct
  misc_feature 1..20: note = chemically synthesized
  source 1..20: mol_type = other DNA
acaatcctcttacacctcca

SEQ ID NO: 58393 - DNA, 20 bp, synthetic construct
  misc_feature 1..20: note = chemically synthesized
  source 1..20: mol_type = other DNA
agagacgatttccccttcct

SEQ ID NO: 58394 - DNA, 20 bp, synthetic construct
  misc_feature 1..20: note = chemically synthesized
  source 1..20: mol_type = other DNA
ctaccccactaaatccaccc

SEQ ID NO: 58395 - DNA, 20 bp, synthetic construct
  misc_feature 1..20: note = chemically synthesized
  source 1..20: mol_type = other DNA
acgagttctctcttttcttg

SEQ ID NO: 58396 - DNA, 20 bp, synthetic construct
  misc_feature 1..20: note = chemically synthesized
  source 1..20: mol_type = other DNA
gaaatagtgcgtccttttgg

SEQ ID NO: 58397 - DNA, 20 bp, synthetic construct
  misc_feature 1..20: note = chemically synthesized
  source 1..20: mol_type = other DNA
gtgcgtccttttggctgaat

SEQ ID NO: 58398 - DNA, 20 bp, synthetic construct
  misc_feature 1..20: note = chemically synthesized
  source 1..20: mol_type = other DNA
gtaaaatataaagacagaaa

SEQ ID NO: 58399 - DNA, 20 bp, synthetic construct
  misc_feature 1..20: note = chemically synthesized
  source 1..20: mol_type = other DNA
ctatttttatcatgcaggaa

SEQ ID NO: 58400 - DNA, 20 bp, synthetic construct
  misc_feature 1..20: note = chemically synthesized
  source 1..20: mol_type = other DNA
gcaggaactgaatcagcagg

SEQ ID NO: 58401 - DNA, 20 bp, synthetic construct
  misc_feature 1..20: note = chemically synthesized
  source 1..20: mol_type = other DNA
tgccaagaagcctgtatctg

SEQ ID NO: 58402 - DNA, 20 bp, synthetic construct
  misc_feature 1..20: note = chemically synthesized
  source 1..20: mol_type = other DNA
agggtaaaatcctcgctgaa

SEQ ID NO: 58403 - DNA, 20 bp, synthetic construct
  misc_feature 1..20: note = chemically synthesized
  source 1..20: mol_type = other DNA
cgttgcctaagagctgggga

SEQ ID NO: 58404 - DNA, 20 bp, synthetic construct
  misc_feature 1..20: note = chemically synthesized
  source 1..20: mol_type = other DNA
aaaaaagaaaatggtacata

SEQ ID NO: 58405 - DNA, 20 bp, synthetic construct
  misc_feature 1..20: note = chemically synthesized
  source 1..20: mol_type = other DNA
acacttacatcctttttcac

SEQ ID NO: 58406 - DNA, 20 bp, synthetic construct
  misc_feature 1..20: note = chemically synthesized
  source 1..20: mol_type = other DNA
gacttcgtccttttaaaaag

SEQ ID NO: 58407 - DNA, 20 bp, synthetic construct
  misc_feature 1..20: note = chemically synthesized
  source 1..20: mol_type = other DNA
tagtacttcaaggaacagta

SEQ ID NO: 58408 - DNA, 20 bp, synthetic construct
  misc_feature 1..20: note = chemically synthesized
  source 1..20: mol_type = other DNA
cttcaaggaacagtaatgga

SEQ ID NO: 58409 - DNA, 20 bp, synthetic construct
  misc_feature 1..20: note = chemically synthesized
  source 1..20: mol_type = other DNA
tttcccaaacactcataaca

SEQ ID NO: 58410 - DNA, 20 bp, synthetic construct
  misc_feature 1..20: note = chemically synthesized
  source 1..20: mol_type = other DNA
acactcagtttgattttggc

SEQ ID NO: 58411 - DNA, 20 bp, synthetic construct
  misc_feature 1..20: note = chemically synthesized
  source 1..20: mol_type = other DNA
tacccatagtgcaaatatct

SEQ ID NO: 58412 - DNA, 20 bp, synthetic construct
  misc_feature 1..20: note = chemically synthesized
  source 1..20: mol_type = other DNA
ctaagggtaaagaagaaagc

SEQ ID NO: 58413 - DNA, 20 bp, synthetic construct
  misc_feature 1..20: note = chemically synthesized
  source 1..20: mol_type = other DNA
actactcaccaggaagttct

SEQ ID NO: 58414 - DNA, 20 bp, synthetic construct
  misc_feature 1..20: note = chemically synthesized
  source 1..20: mol_type = other DNA
cttgccatgtgccttgactt

SEQ ID NO: 58415 - DNA, 20 bp, synthetic construct
  misc_feature 1..20: note = chemically synthesized
  source 1..20: mol_type = other DNA
ttcaaagtacctctaggtcc

SEQ ID NO: 58416 - DNA, 20 bp, synthetic construct
  misc_feature 1..20: note = chemically synthesized
  source 1..20: mol_type = other DNA
ggtagacaaccaggagactg

SEQ ID NO: 58417 - DNA, 20 bp, synthetic construct
  misc_feature 1..20: note = chemically synthesized
  source 1..20: mol_type = other DNA
gcttccagtacctacctgcc

SEQ ID NO: 58418 - DNA, 20 bp, synthetic construct
  misc_feature 1..20: note = chemically synthesized
  source 1..20: mol_type = other DNA
tgcactacagtgtcagatct

SEQ ID NO: 58419 - DNA, 20 bp, synthetic construct
  misc_feature 1..20: note = chemically synthesized
  source 1..20: mol_type = other DNA
cctttgcctctcccagtgaa

SEQ ID NO: 58420 - DNA, 20 bp, synthetic construct
  misc_feature 1..20: note = chemically synthesized
  source 1..20: mol_type = other DNA
cctttgcctccctcagtaaa

SEQ ID NO: 58421 - DNA, 20 bp, synthetic construct
  misc_feature 1..20: note = chemically synthesized
  source 1..20: mol_type = other DNA
gtaaaatgaatctattggtc

SEQ ID NO: 58422 - DNA, 20 bp, synthetic construct
  misc_feature 1..20: note = chemically synthesized
  source 1..20: mol_type = other DNA
aatgaatctattggtcaagg

SEQ ID NO: 58423 - DNA, 20 bp, synthetic construct
  misc_feature 1..20: note = chemically synthesized
  source 1..20: mol_type = other DNA
caagggtgggttgtgactcc

SEQ ID NO: 58424 - DNA, 20 bp, synthetic construct
  misc_feature 1..20: note = chemically synthesized
  source 1..20: mol_type = other DNA
gtgggttgtgactccagggg

SEQ ID NO: 58425 - DNA, 20 bp, synthetic construct
  misc_feature 1..20: note = chemically synthesized
  source 1..20: mol_type = other DNA
aagttttgcaagatggacat

SEQ ID NO: 58426 - DNA, 20 bp, synthetic construct
  misc_feature 1..20: note = chemically synthesized
  source 1..20: mol_type = other DNA
atggacattcgagtttctga

SEQ ID NO: 58427 - DNA, 20 bp, synthetic construct
  misc_feature 1..20: note = chemically synthesized
  source 1..20: mol_type = other DNA
cgccagcagccgctaataac

SEQ ID NO: 58428 - DNA, 20 bp, synthetic construct
  misc_feature 1..20: note = chemically synthesized
  source 1..20: mol_type = other DNA
taacctgaatgctgacaaat

SEQ ID NO: 58429 - DNA, 20 bp, synthetic construct
  misc_feature 1..20: note = chemically synthesized
  source 1..20: mol_type = other DNA
aggaataagttacaactgaa

SEQ ID NO: 58430 - DNA, 20 bp, synthetic construct
  misc_feature 1..20: note = chemically synthesized
  source 1..20: mol_type = other DNA
aagttacaactgaaaaggat

SEQ ID NO: 58431 - DNA, 20 bp, synthetic construct
  misc_feature 1..20: note = chemically synthesized
  source 1..20: mol_type = other DNA
aactgaaaaggataagaatt

SEQ ID NO: 58432 - DNA, 20 bp, synthetic construct
  misc_feature 1..20: note = chemically synthesized
  source 1..20: mol_type = other DNA
aatatcttagccatcaattc

SEQ ID NO: 58433 - DNA, 20 bp, synthetic construct
  misc_feature 1..20: note = chemically synthesized
  source 1..20: mol_type = other DNA
tagccatcaattcctggatc

SEQ ID NO: 58434 - DNA, 20 bp, synthetic construct
  misc_feature 1..20: note = chemically synthesized
  source 1..20: mol_type = other DNA
tcaattctcttgagactaca

SEQ ID NO: 58435 - DNA, 20 bp, synthetic construct
  misc_feature 1..20: note = chemically synthesized
  source 1..20: mol_type = other DNA
ttttttttttttttttgaga

SEQ ID NO: 58436 - DNA, 20 bp, synthetic construct
  misc_feature 1..20: note = chemically synthesized
  source 1..20: mol_type = other DNA
tctcgctttgtcacccaggc

SEQ ID NO: 58437 - DNA, 20 bp, synthetic construct
  misc_feature 1..20: note = chemically synthesized
  source 1..20: mol_type = other DNA
cattctcctgcctcagcctc

SEQ ID NO: 58438 - DNA, 20 bp, synthetic construct
  misc_feature 1..20: note = chemically synthesized
  source 1..20: mol_type = other DNA
ttttgtatttttagtagaga

SEQ ID NO: 58439 - DNA, 20 bp, synthetic construct
  misc_feature 1..20: note = chemically synthesized
  source 1..20: mol_type = other DNA
tggggtttcaccatgttagc

SEQ ID NO: 58440 - DNA, 20 bp, synthetic construct
  misc_feature 1..20: note = chemically synthesized
  source 1..20: mol_type = other DNA
acctcagcctcccaaagtgc

SEQ ID NO: 58441 - DNA, 20 bp, synthetic construct
  misc_feature 1..20: note = chemically synthesized
  source 1..20: mol_type = other DNA
cggccaatttcatcactttt

SEQ ID NO: 58442 - DNA, 20 bp, synthetic construct
  misc_feature 1..20: note = chemically synthesized
  source 1..20: mol_type = other DNA
agcatcaacttggaagaaag

SEQ ID NO: 58443 - DNA, 20 bp, synthetic construct
  misc_feature 1..20: note = chemically synthesized
  source 1..20: mol_type = other DNA
ctagggaagtaaggggaaaa

SEQ ID NO: 58444 - DNA, 20 bp, synthetic construct
  misc_feature 1..20: note = chemically synthesized
  source 1..20: mol_type = other DNA
ctgaacaaaggagatttcct

SEQ ID NO: 58445 - DNA, 20 bp, synthetic construct
  misc_feature 1..20: note = chemically synthesized
  source 1..20: mol_type = other DNA
gtgctgctctgttcaagcaa

SEQ ID NO: 58446 - DNA, 20 bp, synthetic construct
  misc_feature 1..20: note = chemically synthesized
  source 1..20: mol_type = other DNA
cgtctcaaacaagcaatttc

SEQ ID NO: 58447 - DNA, 20 bp, synthetic construct
  misc_feature 1..20: note = chemically synthesized
  source 1..20: mol_type = other DNA
tgtcctcatacttagaggtt

SEQ ID NO: 58448 - DNA, 20 bp, synthetic construct
  misc_feature 1..20: note = chemically synthesized
  source 1..20: mol_type = other DNA
caaggagactctaaatttca

SEQ ID NO: 58449 - DNA, 20 bp, synthetic construct
  misc_feature 1..20: note = chemically synthesized
  source 1..20: mol_type = other DNA
ttaaacccaatatattaaag

SEQ ID NO: 58450 - DNA, 20 bp, synthetic construct
  misc_feature 1..20: note = chemically synthesized
  source 1..20: mol_type = other DNA
atgcaggaaacacatttata

SEQ ID NO: 58451 - DNA, 20 bp, synthetic construct
  misc_feature 1..20: note = chemically synthesized
  source 1..20: mol_type = other DNA
gccctaaaactcattcccaa

SEQ ID NO: 58452 - DNA, 20 bp, synthetic construct
  misc_feature 1..20: note = chemically synthesized
  source 1..20: mol_type = other DNA
catctttccatcagccaacc

SEQ ID NO: 58453 - DNA, 20 bp, synthetic construct
  misc_feature 1..20: note = chemically synthesized
  source 1..20: mol_type = other DNA
catccatttttcttaattct

SEQ ID NO: 58454 - DNA, 20 bp, synthetic construct
  misc_feature 1..20: note = chemically synthesized
  source 1..20: mol_type = other DNA
cagcatacatactaaaagaa

SEQ ID NO: 58455 - DNA, 20 bp, synthetic construct
  misc_feature 1..20: note = chemically synthesized
  source 1..20: mol_type = other DNA
acaaaagcaagcaatgggga

SEQ ID NO: 58456 - DNA, 20 bp, synthetic construct
  misc_feature 1..20: note = chemically synthesized
  source 1..20: mol_type = other DNA
ttatccaaaattaactccag

SEQ ID NO: 58457 - DNA, 20 bp, synthetic construct
  misc_feature 1..20: note = chemically synthesized
  source 1..20: mol_type = other DNA
caaaagcaaaaattgaccaa

SEQ ID NO: 58458 - DNA, 20 bp, synthetic construct
  misc_feature 1..20: note = chemically synthesized
  source 1..20: mol_type = other DNA
tcagagcgaaagacaatcta

SEQ ID NO: 58459 - DNA, 20 bp, synthetic construct
  misc_feature 1..20: note = chemically synthesized
  source 1..20: mol_type = other DNA
tctgacaaaggcctaatatc

SEQ ID NO: 58460 - DNA, 20 bp, synthetic construct
  misc_feature 1..20: note = chemically synthesized
  source 1..20: mol_type = other DNA
catatcctgtacgtgtaccc

SEQ ID NO: 58461 - DNA, 20 bp, synthetic construct
  misc_feature 1..20: note = chemically synthesized
  source 1..20: mol_type = other DNA
aaaaaagaaagaaagaaaaa

SEQ ID NO: 58462 - DNA, 20 bp, synthetic construct
  misc_feature 1..20: note = chemically synthesized
  source 1..20: mol_type = other DNA
atgtaaagacattacaaggc

SEQ ID NO: 58463 - DNA, 20 bp, synthetic construct
  misc_feature 1..20: note = chemically synthesized
  source 1..20: mol_type = other DNA
gaagggcgcaggcttattat

SEQ ID NO: 58464 - DNA, 20 bp, synthetic construct
  misc_feature 1..20: note = chemically synthesized
  source 1..20: mol_type = other DNA
attatttgggtcttatagat

SEQ ID NO: 58465 - DNA, 20 bp, synthetic construct
  misc_feature 1..20: note = chemically synthesized
  source 1..20: mol_type = other DNA
ggtcttatagatgagagtag

SEQ ID NO: 58466 - DNA, 20 bp, synthetic construct
  misc_feature 1..20: note = chemically synthesized
  source 1..20: mol_type = other DNA
ctataacaaaatacaaaaga

SEQ ID NO: 58467 - DNA, 20 bp, synthetic construct
  misc_feature 1..20: note = chemically synthesized
  source 1..20: mol_type = other DNA
agactgggtggcttcaacaa

SEQ ID NO: 58468 - DNA, 20 bp, synthetic construct
  misc_feature 1..20: note = chemically synthesized
  source 1..20: mol_type = other DNA
tctgaaggctgactcgtggt

SEQ ID NO: 58469 - DNA, 20 bp, synthetic construct
  misc_feature 1..20: note = chemically synthesized
  source 1..20: mol_type = other DNA
tcgtggtcagggttctcttc

SEQ ID NO: 58470 - DNA, 20 bp, synthetic construct
  misc_feature 1..20: note = chemically synthesized
  source 1..20: mol_type = other DNA
aaggaaaataattttatgat

SEQ ID NO: 58471 - DNA, 20 bp, synthetic construct
  misc_feature 1..20: note = chemically synthesized
  source 1..20: mol_type = other DNA
ccccacagataaggtcagtt

SEQ ID NO: 58472 - DNA, 20 bp, synthetic construct
  misc_feature 1..20: note = chemically synthesized
  source 1..20: mol_type = other DNA
gataaggtcagttgggagtt

SEQ ID NO: 58473 - DNA, 20 bp, synthetic construct
  misc_feature 1..20: note = chemically synthesized
  source 1..20: mol_type = other DNA
gggagttggggattcagcat

SEQ ID NO: 58474 - DNA, 20 bp, synthetic construct
  misc_feature 1..20: note = chemically synthesized
  source 1..20: mol_type = other DNA
acctaagtccccacctcccc

SEQ ID NO: 58475 - DNA, 20 bp, synthetic construct
  misc_feature 1..20: note = chemically synthesized
  source 1..20: mol_type = other DNA
aatctgcacacttgagggca

SEQ ID NO: 58476 - DNA, 20 bp, synthetic construct
  misc_feature 1..20: note = chemically synthesized
  source 1..20: mol_type = other DNA
tagtattcctcctaataaaa

SEQ ID NO: 58477 - DNA, 20 bp, synthetic construct
  misc_feature 1..20: note = chemically synthesized
  source 1..20: mol_type = other DNA
ttgctacacctgactaaacc

SEQ ID NO: 58478 - DNA, 20 bp, synthetic construct
  misc_feature 1..20: note = chemically synthesized
  source 1..20: mol_type = other DNA
tatagaggtctttcttccca

SEQ ID NO: 58479 - DNA, 20 bp, synthetic construct
  misc_feature 1..20: note = chemically synthesized
  source 1..20: mol_type = other DNA
aatcatgtgtgatctctcag

SEQ ID NO: 58480 - DNA, 20 bp, synthetic construct
  misc_feature 1..20: note = chemically synthesized
  source 1..20: mol_type = other DNA
tttattatttgtattgcttg

SEQ ID NO: 58481 - DNA, 20 bp, synthetic construct
  misc_feature 1..20: note = chemically synthesized
  source 1..20: mol_type = other DNA
aaagcctatccttgaaagct

SEQ ID NO: 58482 - DNA, 20 bp, synthetic construct
  misc_feature 1..20: note = chemically synthesized
  source 1..20: mol_type = other DNA
tgccaggaagcctgcacctc

SEQ ID NO: 58483 - DNA, 20 bp, synthetic construct
  misc_feature 1..20: note = chemically synthesized
  source 1..20: mol_type = other DNA
aggaagcctgcacctcaggg

SEQ ID NO: 58484 - DNA, 20 bp, synthetic construct
  misc_feature 1..20: note = chemically synthesized
  source 1..20: mol_type = other DNA
ggggtgaattctttgccgaa

SEQ ID NO: 58485 - DNA, 20 bp, synthetic construct
  misc_feature 1..20: note = chemically synthesized
  source 1..20: mol_type = other DNA
ctacacaccaagcttccacc

SEQ ID NO: 58486 - DNA, 20 bp, synthetic construct
  misc_feature 1..20: note = chemically synthesized
  source 1..20: mol_type = other DNA
ggacatactttgcccccatc

SEQ ID NO: 58487 - DNA, 20 bp, synthetic construct
  misc_feature 1..20: note = chemically synthesized
  source 1..20: mol_type = other DNA
tttgcccccatctggaatta

SEQ ID NO: 58488 - DNA, 20 bp, synthetic construct
  misc_feature 1..20: note = chemically synthesized
  source 1..20: mol_type = other DNA
tatatgtgtccagctgatat

SEQ ID NO: 58489 - DNA, 20 bp, synthetic construct
  misc_feature 1..20: note = chemically synthesized
  source 1..20: mol_type = other DNA
aagatgaaagttctttctac

SEQ ID NO: 58490 - DNA, 20 bp, synthetic construct
  misc_feature 1..20: note = chemically synthesized
  source 1..20: mol_type = other DNA
taggccctaaaacattacca

SEQ ID NO: 58491 - DNA, 20 bp, synthetic construct
  misc_feature 1..20: note = chemically synthesized
  source 1..20: mol_type = other DNA
tggactcaccttgaagttct

SEQ ID NO: 58492 - DNA, 20 bp, synthetic construct
  misc_feature 1..20: note = chemically synthesized
  source 1..20: mol_type = other DNA
cttgccatgtgccttgactt

SEQ ID NO: 58493 - DNA, 20 bp, synthetic construct
  misc_feature 1..20: note = chemically synthesized
  source 1..20: mol_type = other DNA
ccaaagctgtcaaagaacct

SEQ ID NO: 58494 - DNA, 20 bp, synthetic construct
  misc_feature 1..20: note = chemically synthesized
  source 1..20: mol_type = other DNA
gtcaaagaacctctgggtcc

SEQ ID NO: 58495 - DNA, 20 bp, synthetic construct
  misc_feature 1..20: note = chemically synthesized
  source 1..20: mol_type = other DNA
acctggacttttgccaggca

SEQ ID NO: 58496 - DNA, 20 bp, synthetic construct
  misc_feature 1..20: note = chemically synthesized
  source 1..20: mol_type = other DNA
gtcaccagagcctaccttcc

SEQ ID NO: 58497 - DNA, 20 bp, synthetic construct
  misc_feature 1..20: note = chemically synthesized
  source 1..20: mol_type = other DNA
taacctcagacgttccagaa

SEQ ID NO: 58498 - DNA, 20 bp, synthetic construct
  misc_feature 1..20: note = chemically synthesized
  source 1..20: mol_type = other DNA
gcgagtgtgtggaactgctg

SEQ ID NO: 58499 - DNA, 20 bp, synthetic construct
  misc_feature 1..20: note = chemically synthesized
  source 1..20: mol_type = other DNA
gccgccggcccctggcctca

SEQ ID NO: 58500 - DNA, 20 bp, synthetic construct
  misc_feature 1..20: note = chemically synthesized
  source 1..20: mol_type = other DNA
aaggcaaggctggccaaccc

SEQ ID NO: 58501 - DNA, 20 bp, synthetic construct
  misc_feature 1..20: note = chemically synthesized
  source 1..20: mol_type = other DNA
aaggctggccaacccatggg

SEQ ID NO: 58502 - DNA, 20 bp, synthetic construct
  misc_feature 1..20: note = chemically synthesized
  source 1..20: mol_type = other DNA
tgtggggaaggggcccccaa

SEQ ID NO: 58503 - DNA, 20 bp, synthetic construct
  misc_feature 1..20: note = chemically synthesized
  source 1..20: mol_type = other DNA
agtttccttctcccatcata

SEQ ID NO: 58504 - DNA, 20 bp, synthetic construct
  misc_feature 1..20: note = chemically synthesized
  source 1..20: mol_type = other DNA
taccaatttttgaaaagttc

SEQ ID NO: 58505 - DNA, 20 bp, synthetic construct
  misc_feature 1..20: note = chemically synthesized
  source 1..20: mol_type = other DNA
atgtgttttaggcataggtc

SEQ ID NO: 58506 - DNA, 20 bp, synthetic construct
  misc_feature 1..20: note = chemically synthesized
  source 1..20: mol_type = other DNA
aaaaagtgctatacttcttt

SEQ ID NO: 58507 - DNA, 20 bp, synthetic construct
  misc_feature 1..20: note = chemically synthesized
  source 1..20: mol_type = other DNA
cagatgatgtgtatttacca

SEQ ID NO: 58508 - DNA, 20 bp, synthetic construct
  misc_feature 1..20: note = chemically synthesized
  source 1..20: mol_type = other DNA
gtgtgtgctggctgatgacc

SEQ ID NO: 58509 - DNA, 20 bp, synthetic construct
  misc_feature 1..20: note = chemically synthesized
  source 1..20: mol_type = other DNA
atgctcagtaaagatgatgg

SEQ ID NO: 58510 - DNA, 20 bp, synthetic construct
  misc_feature 1..20: note = chemically synthesized
  source 1..20: mol_type = other DNA
aatgttctttggcaggtact

SEQ ID NO: 58511 - DNA, 20 bp, synthetic construct
  misc_feature 1..20: note = chemically synthesized
  source 1..20: mol_type = other DNA
ctttggcaggtactgtggat

SEQ ID NO: 58512 - DNA, 20 bp, synthetic construct
  misc_feature 1..20: note = chemically synthesized
  source 1..20: mol_type = other DNA
aatgctaggttcacttctca

SEQ ID NO: 58513 - DNA, 20 bp, synthetic construct
  misc_feature 1..20: note = chemically synthesized
  source 1..20: mol_type = other DNA
gaaaacaactctaaagaggc

SEQ ID NO: 58514 - DNA, 20 bp, synthetic construct
  misc_feature 1..20: note = chemically synthesized
  source 1..20: mol_type = other DNA
agtccacacactattataac

SEQ ID NO: 58515 - DNA, 20 bp, synthetic construct
  misc_feature 1..20: note = chemically synthesized
  source 1..20: mol_type = other DNA
ctgacatattggaccattaa

SEQ ID NO: 58516 - DNA, 20 bp, synthetic construct
  misc_feature 1..20: note = chemically synthesized
  source 1..20: mol_type = other DNA
gattataatgccagaagctc

SEQ ID NO: 58517 - DNA, 20 bp, synthetic construct
  misc_feature 1..20: note = chemically synthesized
  source 1..20: mol_type = other DNA
aaaggacaaagaaagaaagt

SEQ ID NO: 58518 - DNA, 20 bp, synthetic construct
  misc_feature 1..20: note = chemically synthesized
  source 1..20: mol_type = other DNA
gtgcgaattgtgaaatggta

SEQ ID NO: 58519 - DNA, 20 bp, synthetic construct
  misc_feature 1..20: note = chemically synthesized
  source 1..20: mol_type = other DNA
agtgagtgatggcatttgaa

SEQ ID NO: 58520 - DNA, 20 bp, synthetic construct
  misc_feature 1..20: note = chemically synthesized
  source 1..20: mol_type = other DNA
aaagtacgttgaagaaaaaa

SEQ ID NO: 58521 - DNA, 20 bp, synthetic construct
  misc_feature 1..20: note = chemically synthesized
  source 1..20: mol_type = other DNA
actatttgcatcttacagat

SEQ ID NO: 58522 - DNA, 20 bp, synthetic construct
  misc_feature 1..20: note = chemically synthesized
  source 1..20: mol_type = other DNA
catcttacagatgagagtag

SEQ ID NO: 58523 - DNA, 20 bp, synthetic construct
  misc_feature 1..20: note = chemically synthesized
  source 1..20: mol_type = other DNA
ctataacaaaatagcataga

SEQ ID NO: 58524 - DNA, 20 bp, synthetic construct
  misc_feature 1..20: note = chemically synthesized
  source 1..20: mol_type = other DNA
agactgggtgacttcaacaa

SEQ ID NO: 58525 - DNA, 20 bp, synthetic construct
  misc_feature 1..20: note = chemically synthesized
  source 1..20: mol_type = other DNA
tcctggtcagggctctcttc

SEQ ID NO: 58526 - DNA, 20 bp, synthetic construct
  misc_feature 1..20: note = chemically synthesized
  source 1..20: mol_type = other DNA
gaggaaaataattctatgat

SEQ ID NO: 58527 - DNA, 20 bp, synthetic construct
  misc_feature 1..20: note = chemically synthesized
  source 1..20: mol_type = other DNA
ccccacaaatggagccaatt

SEQ ID NO: 58528 - DNA, 20 bp, synthetic construct
  misc_feature 1..20: note = chemically synthesized
  source 1..20: mol_type = other DNA
aatggagccaattgggagtt

SEQ ID NO: 58529 - DNA, 20 bp, synthetic construct
  misc_feature 1..20: note = chemically synthesized
  source 1..20: mol_type = other DNA
gggagttggggattcagcat

SEQ ID NO: 58530 - DNA, 20 bp, synthetic construct
  misc_feature 1..20: note = chemically synthesized
  source 1..20: mol_type = other DNA
tcaattatataagaactcca

SEQ ID NO: 58531 - DNA, 20 bp, synthetic construct
  misc_feature 1..20: note = chemically synthesized
  source 1..20: mol_type = other DNA
tgtgaccagtctgtagactt

SEQ ID NO: 58532 - DNA, 20 bp, synthetic construct
  misc_feature 1..20: note = chemically synthesized
  source 1..20: mol_type = other DNA
agtctgtagacttaagggta

SEQ ID NO: 58533 - DNA, 20 bp, synthetic construct
  misc_feature 1..20: note = chemically synthesized
  source 1..20: mol_type = other DNA
gaaaagttccttagtaaagt

SEQ ID NO: 58534 - DNA, 20 bp, synthetic construct
  misc_feature 1..20: note = chemically synthesized
  source 1..20: mol_type = other DNA
tagtattgcccctaataaaa

SEQ ID NO: 58535 - DNA, 20 bp, synthetic construct
  misc_feature 1..20: note = chemically synthesized
  source 1..20: mol_type = other DNA
ctgtgctgcaatccagggaa

SEQ ID NO: 58536 - DNA, 20 bp, synthetic construct
  misc_feature 1..20: note = chemically synthesized
  source 1..20: mol_type = other DNA
ttccaaaacatctgtttctg

SEQ ID NO: 58537 - DNA, 20 bp, synthetic construct
  misc_feature 1..20: note = chemically synthesized
  source 1..20: mol_type = other DNA
ctaacgtaaacaaaaaagtg

SEQ ID NO: 58538 - DNA, 20 bp, synthetic construct
  misc_feature 1..20: note = chemically synthesized
  source 1..20: mol_type = other DNA
aaccatgtgtgatctcttag

SEQ ID NO: 58539 - DNA, 20 bp, synthetic construct
  misc_feature 1..20: note = chemically synthesized
  source 1..20: mol_type = other DNA
atttattatttgattgcttg

SEQ ID NO: 58540 - DNA, 20 bp, synthetic construct
  misc_feature 1..20: note = chemically synthesized
  source 1..20: mol_type = other DNA
tgccaggaagcctgcacctc

SEQ ID NO: 58541 - DNA, 20 bp, synthetic construct
  misc_feature 1..20: note = chemically synthesized
  source 1..20: mol_type = other DNA
aggaagcctgcacctcaggg

SEQ ID NO: 58542 - DNA, 20 bp, synthetic construct
  misc_feature 1..20: note = chemically synthesized
  source 1..20: mol_type = other DNA
ggggtgaattctttgccgaa

SEQ ID NO: 58543 - DNA, 20 bp, synthetic construct
  misc_feature 1..20: note = chemically synthesized
  source 1..20: mol_type = other DNA
ctacacaccaagcttccacc

SEQ ID NO: 58544 - DNA, 20 bp, synthetic construct
  misc_feature 1..20: note = chemically synthesized
  source 1..20: mol_type = other DNA
ggacatactttgcccccatc

SEQ ID NO: 58545 - DNA, 20 bp, synthetic construct
  misc_feature 1..20: note = chemically synthesized
  source 1..20: mol_type = other DNA
tttgcccccatctggaatta

SEQ ID NO: 58546 - DNA, 20 bp, synthetic construct
  misc_feature 1..20: note = chemically synthesized
  source 1..20: mol_type = other DNA
tatatgtgtccagctgatat

SEQ ID NO: 58547 - DNA, 20 bp, synthetic construct
  misc_feature 1..20: note = chemically synthesized
  source 1..20: mol_type = other DNA
ctccagatagatgttttaaa

SEQ ID NO: 58548 - DNA, 20 bp, synthetic construct
  misc_feature 1..20: note = chemically synthesized
  source 1..20: mol_type = other DNA
taggccctaaaacattgcca

SEQ ID NO: 58549 - DNA, 20 bp, synthetic construct
  misc_feature 1..20: note = chemically synthesized
  source 1..20: mol_type = other DNA
tggactcaccttgaagttct

SEQ ID NO: 58550 - DNA, 20 bp, synthetic construct
  misc_feature 1..20: note = chemically synthesized
  source 1..20: mol_type = other DNA
cttgccatgtgccttgactt

SEQ ID NO: 58551 - DNA, 20 bp, synthetic construct
  misc_feature 1..20: note = chemically synthesized
  source 1..20: mol_type = other DNA
ccaaagctgtcaaagaacct

SEQ ID NO: 58552 - DNA, 20 bp, synthetic construct
  misc_feature 1..20: note = chemically synthesized
  source 1..20: mol_type = other DNA
gtcaaagaacctctgggtcc

SEQ ID NO: 58553 - DNA, 20 bp, synthetic construct
  misc_feature 1..20: note = chemically synthesized
  source 1..20: mol_type = other DNA
acctggacttttgccaggca

SEQ ID NO: 58554 - DNA, 20 bp, synthetic construct
  misc_feature 1..20: note = chemically synthesized
  source 1..20: mol_type = other DNA
gtcaccagagcctaccttcc

SEQ ID NO: 58555 - DNA, 20 bp, synthetic construct
  misc_feature 1..20: note = chemically synthesized
  source 1..20: mol_type = other DNA
taacctcagacgttccagaa

SEQ ID NO: 58556 - DNA, 20 bp, synthetic construct
  misc_feature 1..20: note = chemically synthesized
  source 1..20: mol_type = other DNA
gcgagtgtgtggaactgctg

SEQ ID NO: 58557 - DNA, 20 bp, synthetic construct
  misc_feature 1..20: note = chemically synthesized
  source 1..20: mol_type = other DNA
gccgccggcccctggcctca

SEQ ID NO: 58558 - DNA, 20 bp, synthetic construct
  misc_feature 1..20: note = chemically synthesized
  source 1..20: mol_type = other DNA
aaggcaaggctggccaaccc

SEQ ID NO: 58559 - DNA, 20 bp, synthetic construct
  misc_feature 1..20: note = chemically synthesized
  source 1..20: mol_type = other DNA
aaggctggccaacccatggg

SEQ ID NO: 58560 - DNA, 20 bp, synthetic construct
  misc_feature 1..20: note = chemically synthesized
  source 1..20: mol_type = other DNA
tgtggggaaggggcccccaa

SEQ ID NO: 58561 - DNA, 20 bp, synthetic construct
  misc_feature 1..20: note = chemically synthesized
  source 1..20: mol_type = other DNA
taccaatttttgaaaagttc

SEQ ID NO: 58562 - DNA, 20 bp, synthetic construct
  misc_feature 1..20: note = chemically synthesized
  source 1..20: mol_type = other DNA
atgtgttttaggcataggtc

SEQ ID NO: 58563 - DNA, 20 bp, synthetic construct
  misc_feature 1..20: note = chemically synthesized
  source 1..20: mol_type = other DNA
aagaagtgctatacttatct

SEQ ID NO: 58564 - DNA, 20 bp, synthetic construct
  misc_feature 1..20: note = chemically synthesized
  source 1..20: mol_type = other DNA
taaagcaacagtttcagtgc

SEQ ID NO: 58565 - DNA, 20 bp, synthetic construct
  misc_feature 1..20: note = chemically synthesized
  source 1..20: mol_type = other DNA
ttatgtaatataatataaga

SEQ ID NO: 58566 - DNA, 20 bp, synthetic construct
  misc_feature 1..20: note = chemically synthesized
  source 1..20: mol_type = other DNA
ccgatgatgtgtatttatca

SEQ ID NO: 58567 - DNA, 20 bp, synthetic construct
  misc_feature 1..20: note = chemically synthesized
  source 1..20: mol_type = other DNA
gtatgtgctggctgatgacc

SEQ ID NO: 58568 - DNA, 20 bp, synthetic construct
  misc_feature 1..20: note = chemically synthesized
  source 1..20: mol_type = other DNA
atgctcggtaaagatgatgg

SEQ ID NO: 58569 - DNA, 20 bp, synthetic construct
  misc_feature 1..20: note = chemically synthesized
  source 1..20: mol_type = other DNA
aatgctctttaccagatact

SEQ ID NO: 58570 - DNA, 20 bp, synthetic construct
  misc_feature 1..20: note = chemically synthesized
  source 1..20: mol_type = other DNA
ctttaccagatactatggat

SEQ ID NO: 58571 - DNA, 20 bp, synthetic construct
  misc_feature 1..20: note = chemically synthesized
  source 1..20: mol_type = other DNA
aatgctaggttcacttctta

SEQ ID NO: 58572 - DNA, 20 bp, synthetic construct
  misc_feature 1..20: note = chemically synthesized
  source 1..20: mol_type = other DNA
agtccacacactgtgacagc

SEQ ID NO: 58573 - DNA, 20 bp, synthetic construct
  misc_feature 1..20: note = chemically synthesized
  source 1..20: mol_type = other DNA
ttttttctttattttttctt

SEQ ID NO: 58574 - DNA, 20 bp, synthetic construct
  misc_feature 1..20: note = chemically synthesized
  source 1..20: mol_type = other DNA
ccctaacctatcaggttgat

SEQ ID NO: 58575 - DNA, 20 bp, synthetic construct
  misc_feature 1..20: note = chemically synthesized
  source 1..20: mol_type = other DNA
aggaattataataatattgg

SEQ ID NO: 58576 - DNA, 20 bp, synthetic construct
  misc_feature 1..20: note = chemically synthesized
  source 1..20: mol_type = other DNA
tttggaagttaaaataaaag

SEQ ID NO: 58577 - DNA, 20 bp, synthetic construct
  misc_feature 1..20: note = chemically synthesized
  source 1..20: mol_type = other DNA
taagtgacttctctcaatct

SEQ ID NO: 58578 - DNA, 20 bp, synthetic construct
  misc_feature 1..20: note = chemically synthesized
  source 1..20: mol_type = other DNA
tgacttctctcaatctaagg

SEQ ID NO: 58579 - DNA, 20 bp, synthetic construct
  misc_feature 1..20: note = chemically synthesized
  source 1..20: mol_type = other DNA
agactgaggtgaacccaaat

SEQ ID NO: 58580 - DNA, 20 bp, synthetic construct
  misc_feature 1..20: note = chemically synthesized
  source 1..20: mol_type = other DNA
attagggtctctttaagata

SEQ ID NO: 58581 - DNA, 20 bp, synthetic construct
  misc_feature 1..20: note = chemically synthesized
  source 1..20: mol_type = other DNA
taagataggggatctgtgag

SEQ ID NO: 58582 - DNA, 20 bp, synthetic construct
  misc_feature 1..20: note = chemically synthesized
  source 1..20: mol_type = other DNA
atagatctttggccatatct

SEQ ID NO: 58583 - DNA, 20 bp, synthetic construct
  misc_feature 1..20: note = chemically synthesized
  source 1..20: mol_type = other DNA
ggccatatctgagagtctgg

SEQ ID NO: 58584 - DNA, 20 bp, synthetic construct
  misc_feature 1..20: note = chemically synthesized
  source 1..20: mol_type = other DNA
atttgtagagcctgaccttt

SEQ ID NO: 58585 - DNA, 20 bp, synthetic construct
  misc_feature 1..20: note = chemically synthesized
  source 1..20: mol_type = other DNA
gcccgctaaggcctaaacaa

SEQ ID NO: 58586 - DNA, 20 bp, synthetic construct
  misc_feature 1..20: note = chemically synthesized
  source 1..20: mol_type = other DNA
ggcctaaacaagtgaatctt

SEQ ID NO: 58587 - DNA, 20 bp, synthetic construct
  misc_feature 1..20: note = chemically synthesized
  source 1..20: mol_type = other DNA
tctcttttttttttttgaga

SEQ ID NO: 58588 - DNA, 20 bp, synthetic construct
  misc_feature 1..20: note = chemically synthesized
  source 1..20: mol_type = other DNA
tcttgttctgtcacccaggc

SEQ ID NO: 58589 - DNA, 20 bp, synthetic construct
  misc_feature 1..20: note = chemically synthesized
  source 1..20: mol_type = other DNA
tcctcagcctcccaagtagc

SEQ ID NO: 58590 - DNA, 20 bp, synthetic construct
  misc_feature 1..20: note = chemically synthesized
  source 1..20: mol_type = other DNA
tttttgtatttttgtagaga

SEQ ID NO: 58591 - DNA, 20 bp, synthetic construct
  misc_feature 1..20: note = chemically synthesized
  source 1..20: mol_type = other DNA
gccttggcctcccaaaattc

SEQ ID NO: 58592 - DNA, 20 bp, synthetic construct
  misc_feature 1..20: note = chemically synthesized
  source 1..20: mol_type = other DNA
cactcccagcctctaaacaa

SEQ ID NO: 58593 - DNA, 20 bp, synthetic construct
  misc_feature 1..20: note = chemically synthesized
  source 1..20: mol_type = other DNA
aattgctcctcctcagacta

SEQ ID NO: 58594 - DNA, 20 bp, synthetic construct
  misc_feature 1..20: note = chemically synthesized
  source 1..20: mol_type = other DNA
tcctcagactaaggaatatc

SEQ ID NO: 58595 - DNA, 20 bp, synthetic construct
  misc_feature 1..20: note = chemically synthesized
  source 1..20: mol_type = other DNA
cttttgaggcaatatctttt

SEQ ID NO: 58596 - DNA, 20 bp, synthetic construct
  misc_feature 1..20: note = chemically synthesized
  source 1..20: mol_type = other DNA
catttaagttaaataagtca

SEQ ID NO: 58597 - DNA, 20 bp, synthetic construct
  misc_feature 1..20: note = chemically synthesized
  source 1..20: mol_type = other DNA
aatttcagatattattaact

SEQ ID NO: 58598 - DNA, 20 bp, synthetic construct
  misc_feature 1..20: note = chemically synthesized
  source 1..20: mol_type = other DNA
aacagaggcaaaatgacaga

SEQ ID NO: 58599 - DNA, 20 bp, synthetic construct
  misc_feature 1..20: note = chemically synthesized
  source 1..20: mol_type = other DNA
aacaaactcctgctgtgcca

SEQ ID NO: 58600 - DNA, 20 bp, synthetic construct
  misc_feature 1..20: note = chemically synthesized
  source 1..20: mol_type = other DNA
tgccgttgatatgtaaagtg

SEQ ID NO: 58601 - DNA, 20 bp, synthetic construct
  misc_feature 1..20: note = chemically synthesized
  source 1..20: mol_type = other DNA
taaacttgtcctcagtggta

SEQ ID NO: 58602 - DNA, 20 bp, synthetic construct
  misc_feature 1..20: note = chemically synthesized
  source 1..20: mol_type = other DNA
tagggagtgagaagccatta

SEQ ID NO: 58603 - DNA, 20 bp, synthetic construct
  misc_feature 1..20: note = chemically synthesized
  source 1..20: mol_type = other DNA
taagcaacctgtactattgg

SEQ ID NO: 58604 - DNA, 20 bp, synthetic construct
  misc_feature 1..20: note = chemically synthesized
  source 1..20: mol_type = other DNA
attggctggattactattct

SEQ ID NO: 58605 - DNA, 20 bp, synthetic construct
  misc_feature 1..20: note = chemically synthesized
  source 1..20: mol_type = other DNA
tgtgtgtgtgtgtattcatt

SEQ ID NO: 58606 - DNA, 20 bp, synthetic construct
  misc_feature 1..20: note = chemically synthesized
  source 1..20: mol_type = other DNA
ttgctttcaattaagttatc

SEQ ID NO: 58607 - DNA, 20 bp, synthetic construct
  misc_feature 1..20: note = chemically synthesized
  source 1..20: mol_type = other DNA
aatctagatatagctcccta

SEQ ID NO: 58608 - DNA, 20 bp, synthetic construct
  misc_feature 1..20: note = chemically synthesized
  source 1..20: mol_type = other DNA
atatagctccctaaggggta

SEQ ID NO: 58609 - DNA, 20 bp, synthetic construct
  misc_feature 1..20: note = chemically synthesized
  source 1..20: mol_type = other DNA
tgcatattaccgacaaatta

SEQ ID NO: 58610 - DNA, 20 bp, synthetic construct
  misc_feature 1..20: note = chemically synthesized
  source 1..20: mol_type = other DNA
aagtacattgcagctcccac

SEQ ID NO: 58611 - DNA, 20 bp, synthetic construct
  misc_feature 1..20: note = chemically synthesized
  source 1..20: mol_type = other DNA
agcatgtgaagtctcccatc

SEQ ID NO: 58612 - DNA, 20 bp, synthetic construct
  misc_feature 1..20: note = chemically synthesized
  source 1..20: mol_type = other DNA
cgggaaacaccccaaatatt

SEQ ID NO: 58613 - DNA, 20 bp, synthetic construct
  misc_feature 1..20: note = chemically synthesized
  source 1..20: mol_type = other DNA
gattctgaccttacctggag

SEQ ID NO: 58614 - DNA, 20 bp, synthetic construct
  misc_feature 1..20: note = chemically synthesized
  source 1..20: mol_type = other DNA
tagagggccaagcaaaatac

SEQ ID NO: 58615 - DNA, 20 bp, synthetic construct
  misc_feature 1..20: note = chemically synthesized
  source 1..20: mol_type = other DNA
ggaaaagccctgtgggctct

SEQ ID NO: 58616 - DNA, 20 bp, synthetic construct
  misc_feature 1..20: note = chemically synthesized
  source 1..20: mol_type = other DNA
ccatttctgccttgcctcac

SEQ ID NO: 58617 - DNA, 20 bp, synthetic construct
  misc_feature 1..20: note = chemically synthesized
  source 1..20: mol_type = other DNA
atctaggggctgggcagtgg

SEQ ID NO: 58618 - DNA, 20 bp, synthetic construct
  misc_feature 1..20: note = chemically synthesized
  source 1..20: mol_type = other DNA
gggggggttggtggggggac

SEQ ID NO: 58619 - DNA, 20 bp, synthetic construct
  misc_feature 1..20: note = chemically synthesized
  source 1..20: mol_type = other DNA
gattcggtgctgttgcgggg

SEQ ID NO: 58620 - DNA, 20 bp, synthetic construct
  misc_feature 1..20: note = chemically synthesized
  source 1..20: mol_type = other DNA
ctggaagtgagaccaacctt

SEQ ID NO: 58621 - DNA, 20 bp, synthetic construct
  misc_feature 1..20: note = chemically synthesized
  source 1..20: mol_type = other DNA
gacaaagggcatatattctt

SEQ ID NO: 58622 - DNA, 20 bp, synthetic construct
  misc_feature 1..20: note = chemically synthesized
  source 1..20: mol_type = other DNA
gcatatattcttgggagttc

SEQ ID NO: 58623 - DNA, 20 bp, synthetic construct
  misc_feature 1..20: note = chemically synthesized
  source 1..20: mol_type = other DNA
accaaaagtaaggaccctca

SEQ ID NO: 58624 - DNA, 20 bp, synthetic construct
  misc_feature 1..20: note = chemically synthesized
  source 1..20: mol_type = other DNA
gacaaaccccagtaccagcc

SEQ ID NO: 58625 - DNA, 20 bp, synthetic construct
  misc_feature 1..20: note = chemically synthesized
  source 1..20: mol_type = other DNA
cctggagtctggtagacctg

SEQ ID NO: 58626 - DNA, 20 bp, synthetic construct
  misc_feature 1..20: note = chemically synthesized
  source 1..20: mol_type = other DNA
attcaaaacttcaggaaaca

SEQ ID NO: 58627 - DNA, 20 bp, synthetic construct
  misc_feature 1..20: note = chemically synthesized
  source 1..20: mol_type = other DNA
aaaacttcaggaaacaatgg

SEQ ID NO: 58628 - DNA, 20 bp, synthetic construct
  misc_feature 1..20: note = chemically synthesized
  source 1..20: mol_type = other DNA
cttcaggaaacaatggatga

SEQ ID NO: 58629 - DNA, 20 bp, synthetic construct
  misc_feature 1..20: note = chemically synthesized
  source 1..20: mol_type = other DNA
gctctagaaagtctcagcaa

SEQ ID NO: 58630 - DNA, 20 bp, synthetic construct
  misc_feature 1..20: note = chemically synthesized
  source 1..20: mol_type = other DNA
agagcttgaagacaaagttt

SEQ ID NO: 58631 - DNA, 20 bp, synthetic construct
  misc_feature 1..20: note = chemically synthesized
  source 1..20: mol_type = other DNA
tccaacaaagacaaagaaaa

SEQ ID NO: 58632 - DNA, 20 bp, synthetic construct
  misc_feature 1..20: note = chemically synthesized
  source 1..20: mol_type = other DNA
aacaaagcctccaagaaatc

SEQ ID NO: 58633 - DNA, 20 bp, synthetic construct
  misc_feature 1..20: note = chemically synthesized
  source 1..20: mol_type = other DNA
tatgttaaacaatcaaacct

SEQ ID NO: 58634 - DNA, 20 bp, synthetic construct
  misc_feature 1..20: note = chemically synthesized
  source 1..20: mol_type = other DNA
ttgcctaggtacattgtcat

SEQ ID NO: 58635 - DNA, 20 bp, synthetic construct
  misc_feature 1..20: note = chemically synthesized
  source 1..20: mol_type = other DNA
caaagttatctaaagacaaa

SEQ ID NO: 58636 - DNA, 20 bp, synthetic construct
  misc_feature 1..20: note = chemically synthesized
  source 1..20: mol_type = other DNA
agaaaccgtaaaagctagaa

SEQ ID NO: 58637 - DNA, 20 bp, synthetic construct
  misc_feature 1..20: note = chemically synthesized
  source 1..20: mol_type = other DNA
aaacaaaacaattatcagcc

SEQ ID NO: 58638 - DNA, 20 bp, synthetic construct
  misc_feature 1..20: note = chemically synthesized
  source 1..20: mol_type = other DNA
ttcagaaaaacaaatgctga

SEQ ID NO: 58639 - DNA, 20 bp, synthetic construct
  misc_feature 1..20: note = chemically synthesized
  source 1..20: mol_type = other DNA
cacaggcaacaaataccacg

SEQ ID NO: 58640 - DNA, 20 bp, synthetic construct
  misc_feature 1..20: note = chemically synthesized
  source 1..20: mol_type = other DNA
gcaacaaataccacgaagaa

SEQ ID NO: 58641 - DNA, 20 bp, synthetic construct
  misc_feature 1..20: note = chemically synthesized
  source 1..20: mol_type = other DNA
ctcacacctcaatactgatg

SEQ ID NO: 58642 - DNA, 20 bp, synthetic construct
  misc_feature 1..20: note = chemically synthesized
  source 1..20: mol_type = other DNA
aatgctccacttaaaagata

SEQ ID NO: 58643 - DNA, 20 bp, synthetic construct
  misc_feature 1..20: note = chemically synthesized
  source 1..20: mol_type = other DNA
acttaaaagatacagaattg

SEQ ID NO: 58644 - DNA, 20 bp, synthetic construct
  misc_feature 1..20: note = chemically synthesized
  source 1..20: mol_type = other DNA
aaaagatacagaattgcaga

SEQ ID NO: 58645 - DNA, 20 bp, synthetic construct
  misc_feature 1..20: note = chemically synthesized
  source 1..20: mol_type = other DNA
tacagaattgcagaatgaat

SEQ ID NO: 58646 - DNA, 20 bp, synthetic construct
  misc_feature 1..20: note = chemically synthesized
  source 1..20: mol_type = other DNA
ctcacataaacttaaggtaa

SEQ ID NO: 58647 - DNA, 20 bp, synthetic construct
  misc_feature 1..20: note = chemically synthesized
  source 1..20: mol_type = other DNA
taaaagcccttgtccaatgg

SEQ ID NO: 58648 - DNA, 20 bp, synthetic construct
  misc_feature 1..20: note = chemically synthesized
  source 1..20: mol_type = other DNA
agacagtctacaaagaaaca

SEQ ID NO: 58649 - DNA, 20 bp, synthetic construct
  misc_feature 1..20: note = chemically synthesized
  source 1..20: mol_type = other DNA
gacattctacccaacaactg

SEQ ID NO: 58650 - DNA, 20 bp, synthetic construct
  misc_feature 1..20: note = chemically synthesized
  source 1..20: mol_type = other DNA
agcactctctcagaccacag

SEQ ID NO: 58651 - DNA, 20 bp, synthetic construct
  misc_feature 1..20: note = chemically synthesized
  source 1..20: mol_type = other DNA
ggaaattaaataacctgctc

SEQ ID NO: 58652 - DNA, 20 bp, synthetic construct
  misc_feature 1..20: note = chemically synthesized
  source 1..20: mol_type = other DNA
aacctgctcctgaatgatca

SEQ ID NO: 58653 - DNA, 20 bp, synthetic construct
  misc_feature 1..20: note = chemically synthesized
  source 1..20: mol_type = other DNA
tttgaaaaccggcacaagac

SEQ ID NO: 58654 - DNA, 20 bp, synthetic construct
  misc_feature 1..20: note = chemically synthesized
  source 1..20: mol_type = other DNA
gacaagcagagagccaaatc

SEQ ID NO: 58655 - DNA, 20 bp, synthetic construct
  misc_feature 1..20: note = chemically synthesized
  source 1..20: mol_type = other DNA
ccattcacaattgctgcaaa

SEQ ID NO: 58656 - DNA, 20 bp, synthetic construct
  misc_feature 1..20: note = chemically synthesized
  source 1..20: mol_type = other DNA
acctagaaatacaacttcta

SEQ ID NO: 58657 - DNA, 20 bp, synthetic construct
  misc_feature 1..20: note = chemically synthesized
  source 1..20: mol_type = other DNA
attccatgctcatagataga

SEQ ID NO: 58658 - DNA, 20 bp, synthetic construct
  misc_feature 1..20: note = chemically synthesized
  source 1..20: mol_type = other DNA
gctaccactgacttttttca

SEQ ID NO: 58659 - DNA, 20 bp, synthetic construct
  misc_feature 1..20: note = chemically synthesized
  source 1..20: mol_type = other DNA
aaactactttaaatgtcata

SEQ ID NO: 58660 - DNA, 20 bp, synthetic construct
  misc_feature 1..20: note = chemically synthesized
  source 1..20: mol_type = other DNA
catcacaaaagcaatggaga

SEQ ID NO: 58661 - DNA, 20 bp, synthetic construct
  misc_feature 1..20: note = chemically synthesized
  source 1..20: mol_type = other DNA
tatacaaaaattaactcaag

SEQ ID NO: 58662 - DNA, 20 bp, synthetic construct
  misc_feature 1..20: note = chemically synthesized
  source 1..20: mol_type = other DNA
caaaggccaaaattgacata

SEQ ID NO: 58663 - DNA, 20 bp, synthetic construct
  misc_feature 1..20: note = chemically synthesized
  source 1..20: mol_type = other DNA
gcacagcaaaagactatcat

SEQ ID NO: 58664 - DNA, 20 bp, synthetic construct
  misc_feature 1..20: note = chemically synthesized
  source 1..20: mol_type = other DNA
cagagtgaacaggcaaccta

SEQ ID NO: 58665 - DNA, 20 bp, synthetic construct
  misc_feature 1..20: note = chemically synthesized
  source 1..20: mol_type = other DNA
accccatcaaaaagtggaca

SEQ ID NO: 58666 - DNA, 20 bp, synthetic construct
  misc_feature 1..20: note = chemically synthesized
  source 1..20: mol_type = other DNA
agataccatctcatgccagt

SEQ ID NO: 58667 - DNA, 20 bp, synthetic construct
  misc_feature 1..20: note = chemically synthesized
  source 1..20: mol_type = other DNA
aggaaacaaaaggtgctgga

SEQ ID NO: 58668 - DNA, 20 bp, synthetic construct
  misc_feature 1..20: note = chemically synthesized
  source 1..20: mol_type = other DNA
aggtgctggagaggatgtgg

SEQ ID NO: 58669 - DNA, 20 bp, synthetic construct
  misc_feature 1..20: note = chemically synthesized
  source 1..20: mol_type = other DNA
ggaaaaattttacactgttg

SEQ ID NO: 58670 - DNA, 20 bp, synthetic construct
  misc_feature 1..20: note = chemically synthesized
  source 1..20: mol_type = other DNA
agacagtgtggcgattcctc

SEQ ID NO: 58671 - DNA, 20 bp, synthetic construct
  misc_feature 1..20: note = chemically synthesized
  source 1..20: mol_type = other DNA
ttgacccagcaatcccatta

SEQ ID NO: 58672 - DNA, 20 bp, synthetic construct
  misc_feature 1..20: note = chemically synthesized
  source 1..20: mol_type = other DNA
cattactgggtatataccca

SEQ ID NO: 58673 - DNA, 20 bp, synthetic construct
  misc_feature 1..20: note = chemically synthesized
  source 1..20: mol_type = other DNA
aaatggccatcagcgatata

SEQ ID NO: 58674 - DNA, 20 bp, synthetic construct
  misc_feature 1..20: note = chemically synthesized
  source 1..20: mol_type = other DNA
aatgtggcacatatacacca

SEQ ID NO: 58675 - DNA, 20 bp, synthetic construct
  misc_feature 1..20: note = chemically synthesized
  source 1..20: mol_type = other DNA
actatgcagccataaaaatg

SEQ ID NO: 58676 - DNA, 20 bp, synthetic construct
  misc_feature 1..20: note = chemically synthesized
  source 1..20: mol_type = other DNA
gttcatgtctttgcagggac

SEQ ID NO: 58677 - DNA, 20 bp, synthetic construct
  misc_feature 1..20: note = chemically synthesized
  source 1..20: mol_type = other DNA
acacgttctcactcataagt

SEQ ID NO: 58678 - DNA, 20 bp, synthetic construct
  misc_feature 1..20: note = chemically synthesized
  source 1..20: mol_type = other DNA
tcacacaccagggcctgtcg

SEQ ID NO: 58679 - DNA, 20 bp, synthetic construct
  misc_feature 1..20: note = chemically synthesized
  source 1..20: mol_type = other DNA
cagggcctgtcggggggtga

SEQ ID NO: 58680 - DNA, 20 bp, synthetic construct
  misc_feature 1..20: note = chemically synthesized
  source 1..20: mol_type = other DNA
gggggtgagggggttaggag

SEQ ID NO: 58681 - DNA, 20 bp, synthetic construct
  misc_feature 1..20: note = chemically synthesized
  source 1..20: mol_type = other DNA
ctaatgtagatgacaggttg

SEQ ID NO: 58682 - DNA, 20 bp, synthetic construct
  misc_feature 1..20: note = chemically synthesized
  source 1..20: mol_type = other DNA
acacaacctatcaaaacctc

SEQ ID NO: 58683 - DNA, 20 bp, synthetic construct
  misc_feature 1..20: note = chemically synthesized
  source 1..20: mol_type = other DNA
agccctaaatgtcgatgtca

SEQ ID NO: 58684 - DNA, 20 bp, synthetic construct
  misc_feature 1..20: note = chemically synthesized
  source 1..20: mol_type = other DNA
ccaaaacccagcaaaagaaa

SEQ ID NO: 58685 - DNA, 20 bp, synthetic construct
  misc_feature 1..20: note = chemically synthesized
  source 1..20: mol_type = other DNA
agaaaacctaaaggagacgt

SEQ ID NO: 58686 - DNA, 20 bp, synthetic construct
  misc_feature 1..20: note = chemically synthesized
  source 1..20: mol_type = other DNA
gggctctagcttaagtcagg

SEQ ID NO: 58687 - DNA, 20 bp, synthetic construct
  misc_feature 1..20: note = chemically synthesized
  source 1..20: mol_type = other DNA
aggaccagatagattcacag

SEQ ID NO: 58688 - DNA, 20 bp, synthetic construct
  misc_feature 1..20: note = chemically synthesized
  source 1..20: mol_type = other DNA
attctaccagacattcaaag

SEQ ID NO: 58689 - DNA, 20 bp, synthetic construct
  misc_feature 1..20: note = chemically synthesized
  source 1..20: mol_type = other DNA
ttctacaagatagagaaaga

SEQ ID NO: 58690 - DNA, 20 bp, synthetic construct
  misc_feature 1..20: note = chemically synthesized
  source 1..20: mol_type = other DNA
atatcaaaacccatgatcaa

SEQ ID NO: 58691 - DNA, 20 bp, synthetic construct
  misc_feature 1..20: note = chemically synthesized
  source 1..20: mol_type = other DNA
gatcaagtgggtttcatgcg

SEQ ID NO: 58692 - DNA, 20 bp, synthetic construct
  misc_feature 1..20: note = chemically synthesized
  source 1..20: mol_type = other DNA
gggtttcatgcgagggatgc

SEQ ID NO: 58693 - DNA, 20 bp, synthetic construct
  misc_feature 1..20: note = chemically synthesized
  source 1..20: mol_type = other DNA
agtgtgatacacaacataaa

SEQ ID NO: 58694 - DNA, 20 bp, synthetic construct
  misc_feature 1..20: note = chemically synthesized
  source 1..20: mol_type = other DNA
aacacacagccaacattata

SEQ ID NO: 58695 - DNA, 20 bp, synthetic construct
  misc_feature 1..20: note = chemically synthesized
  source 1..20: mol_type = other DNA
aaagcattctgtctgaaaac

SEQ ID NO: 58696 - DNA, 20 bp, synthetic construct
  misc_feature 1..20: note = chemically synthesized
  source 1..20: mol_type = other DNA
tctgaaaactggaatgagac

SEQ ID NO: 58697 - DNA, 20 bp, synthetic construct
  misc_feature 1..20: note = chemically synthesized
  source 1..20: mol_type = other DNA
aaaataattcagcaaagttt

SEQ ID NO: 58698 - DNA, 20 bp, synthetic construct
  misc_feature 1..20: note = chemically synthesized
  source 1..20: mol_type = other DNA
tacaaaattaacgtacacca

SEQ ID NO: 58699 - DNA, 20 bp, synthetic construct
  misc_feature 1..20: note = chemically synthesized
  source 1..20: mol_type = other DNA
ataccagcaatgaccaagct

SEQ ID NO: 58700 - DNA, 20 bp, synthetic construct
  misc_feature 1..20: note = chemically synthesized
  source 1..20: mol_type = other DNA
acaaaacaaaacaaaaactt

SEQ ID NO: 58701 - DNA, 20 bp, synthetic construct
  misc_feature 1..20: note = chemically synthesized
  source 1..20: mol_type = other DNA
aacacatgccattctcatag

SEQ ID NO: 58702 - DNA, 20 bp, synthetic construct
  misc_feature 1..20: note = chemically synthesized
  source 1..20: mol_type = other DNA
atgccattctcatagatggg

SEQ ID NO: 58703 - DNA, 20 bp, synthetic construct
  misc_feature 1..20: note = chemically synthesized
  source 1..20: mol_type = other DNA
aggcacatcgaccaatggaa

SEQ ID NO: 58704 - DNA, 20 bp, synthetic construct
  misc_feature 1..20: note = chemically synthesized
  source 1..20: mol_type = other DNA
ccctattcaacaaatggtgc

SEQ ID NO: 58705 - DNA, 20 bp, synthetic construct
  misc_feature 1..20: note = chemically synthesized
  source 1..20: mol_type = other DNA
agctggcaagctacatgtag

SEQ ID NO: 58706 - DNA, 20 bp, synthetic construct
  misc_feature 1..20: note = chemically synthesized
  source 1..20: mol_type = other DNA
ctacatgtaggagaatgaaa

SEQ ID NO: 58707 - DNA, 20 bp, synthetic construct
  misc_feature 1..20: note = chemically synthesized
  source 1..20: mol_type = other DNA
tatacaaaaatcaactcaag

SEQ ID NO: 58708 - DNA, 20 bp, synthetic construct
  misc_feature 1..20: note = chemically synthesized
  source 1..20: mol_type = other DNA
ttctacacattggcttagga

SEQ ID NO: 58709 - DNA, 20 bp, synthetic construct
  misc_feature 1..20: note = chemically synthesized
  source 1..20: mol_type = other DNA
agcttttgcatggcaaaagg

SEQ ID NO: 58710 - DNA, 20 bp, synthetic construct
  misc_feature 1..20: note = chemically synthesized
  source 1..20: mol_type = other DNA
atggcaaaaggaagagtctg

SEQ ID NO: 58711 - DNA, 20 bp, synthetic construct
  misc_feature 1..20: note = chemically synthesized
  source 1..20: mol_type = other DNA
cagaataaacagacaaccca

SEQ ID NO: 58712 - DNA, 20 bp, synthetic construct
  misc_feature 1..20: note = chemically synthesized
  source 1..20: mol_type = other DNA
acaatctatacatctgacaa

SEQ ID NO: 58713 - DNA, 20 bp, synthetic construct
  misc_feature 1..20: note = chemically synthesized
  source 1..20: mol_type = other DNA
aaaaaataacagatccttgt

SEQ ID NO: 58714 - DNA, 20 bp, synthetic construct
  misc_feature 1..20: note = chemically synthesized
  source 1..20: mol_type = other DNA
ctttcttacacactgttggt

SEQ ID NO: 58715 - DNA, 20 bp, synthetic construct
  misc_feature 1..20: note = chemically synthesized
  source 1..20: mol_type = other DNA
tattcacaatagttaaggtt

SEQ ID NO: 58716 - DNA, 20 bp, synthetic construct
  misc_feature 1..20: note = chemically synthesized
  source 1..20: mol_type = other DNA
aagtgtctatcaacagatga

SEQ ID NO: 58717 - DNA, 20 bp, synthetic construct
  misc_feature 1..20: note = chemically synthesized
  source 1..20: mol_type = other DNA
agtactattttgccatgaaa

SEQ ID NO: 58718 - DNA, 20 bp, synthetic construct
  misc_feature 1..20: note = chemically synthesized
  source 1..20: mol_type = other DNA
atcttgtcatttgtagcaac

SEQ ID NO: 58719 - DNA, 20 bp, synthetic construct
  misc_feature 1..20: note = chemically synthesized
  source 1..20: mol_type = other DNA
catctgtgggagctaaaaaa

SEQ ID NO: 58720 - DNA, 20 bp, synthetic construct
  misc_feature 1..20: note = chemically synthesized
  source 1..20: mol_type = other DNA
aagtgggtctcatggtggta

SEQ ID NO: 58721 - DNA, 20 bp, synthetic construct
  misc_feature 1..20: note = chemically synthesized
  source 1..20: mol_type = other DNA
ggtctcatggtggtagagag

SEQ ID NO: 58722 - DNA, 20 bp, synthetic construct
  misc_feature 1..20: note = chemically synthesized
  source 1..20: mol_type = other DNA
tatcagaggctggaaaaagt

SEQ ID NO: 58723 - DNA, 20 bp, synthetic construct
  misc_feature 1..20: note = chemically synthesized
  source 1..20: mol_type = other DNA
aagtgtgagtgtgtatggga

SEQ ID NO: 58724 - DNA, 20 bp, synthetic construct
  misc_feature 1..20: note = chemically synthesized
  source 1..20: mol_type = other DNA
gttaataggtacaaacacag

SEQ ID NO: 58725 - DNA, 20 bp, synthetic construct
  misc_feature 1..20: note = chemically synthesized
  source 1..20: mol_type = other DNA
gtacaaacacagttggatag

SEQ ID NO: 58726 - DNA, 20 bp, synthetic construct
  misc_feature 1..20: note = chemically synthesized
  source 1..20: mol_type = other DNA
taagccataatgtttgatat

SEQ ID NO: 58727 - DNA, 20 bp, synthetic construct
  misc_feature 1..20: note = chemically synthesized
  source 1..20: mol_type = other DNA
cataatgtttgatatttgag

SEQ ID NO: 58728 - DNA, 20 bp, synthetic construct
  misc_feature 1..20: note = chemically synthesized
  source 1..20: mol_type = other DNA
atttcaaaatggctagaaat

SEQ ID NO: 58729 - DNA, 20 bp, synthetic construct
  misc_feature 1..20: note = chemically synthesized
  source 1..20: mol_type = other DNA
aatgataaatgctcaaagca

SEQ ID NO: 58730 - DNA, 20 bp, synthetic construct
  misc_feature 1..20: note = chemically synthesized
  source 1..20: mol_type = other DNA
aggtgaaaatatttagtgcc

SEQ ID NO: 58731 - DNA, 20 bp, synthetic construct
  misc_feature 1..20: note = chemically synthesized
  source 1..20: mol_type = other DNA
atttgtctctctcccatatt

SEQ ID NO: 58732 - DNA, 20 bp, synthetic construct
  misc_feature 1..20: note = chemically synthesized
  source 1..20: mol_type = other DNA
tccctctacccttcacacat

SEQ ID NO: 58733 - DNA, 20 bp, synthetic construct
  misc_feature 1..20: note = chemically synthesized
  source 1..20: mol_type = other DNA
ttctcatctcccacagtcag

SEQ ID NO: 58734 - DNA, 20 bp, synthetic construct
  misc_feature 1..20: note = chemically synthesized
  source 1..20: mol_type = other DNA
ccacagactcactgctcctc

SEQ ID NO: 58735 - DNA, 20 bp, synthetic construct
  misc_feature 1..20: note = chemically synthesized
  source 1..20: mol_type = other DNA
gaaccattgtatctgtcccc

SEQ ID NO: 58736 - DNA, 20 bp, synthetic construct
  misc_feature 1..20: note = chemically synthesized
  source 1..20: mol_type = other DNA
attttattttatctgcaaac

SEQ ID NO: 58737 - DNA, 20 bp, synthetic construct
  misc_feature 1..20: note = chemically synthesized
  source 1..20: mol_type = other DNA
ttttcccaaaatcttatttc

SEQ ID NO: 58738 - DNA, 20 bp, synthetic construct
  misc_feature 1..20: note = chemically synthesized
  source 1..20: mol_type = other DNA
aagccctagcttgctggttt

SEQ ID NO: 58739 - DNA, 20 bp, synthetic construct
  misc_feature 1..20: note = chemically synthesized
  source 1..20: mol_type = other DNA
tcagctaacccatgaaataa

SEQ ID NO: 58740 - DNA, 20 bp, synthetic construct
  misc_feature 1..20: note = chemically synthesized
  source 1..20: mol_type = other DNA
agctacttcaaaatgtaaat

SEQ ID NO: 58741 - DNA, 20 bp, synthetic construct
  misc_feature 1..20: note = chemically synthesized
  source 1..20: mol_type = other DNA
tagtaattctagcctatatc

SEQ ID NO: 58742 - DNA, 20 bp, synthetic construct
  misc_feature 1..20: note = chemically synthesized
  source 1..20: mol_type = other DNA
cggtgcagtaaaaactgcct

SEQ ID NO: 58743 - DNA, 20 bp, synthetic construct
  misc_feature 1..20: note = chemically synthesized
  source 1..20: mol_type = other DNA
ctccatcatatcatcctcct

SEQ ID NO: 58744 - DNA, 20 bp, synthetic construct
  misc_feature 1..20: note = chemically synthesized
  source 1..20: mol_type = other DNA
tatcatcctccttggaatcc

SEQ ID NO: 58745 - DNA, 20 bp, synthetic construct
  misc_feature 1..20: note = chemically synthesized
  source 1..20: mol_type = other DNA
acactttttccttttaacac

SEQ ID NO: 58746 - DNA, 20 bp, synthetic construct
  misc_feature 1..20: note = chemically synthesized
  source 1..20: mol_type = other DNA
ccagtccccatgtgcagaag

SEQ ID NO: 58747 - DNA, 20 bp, synthetic construct
  misc_feature 1..20: note = chemically synthesized
  source 1..20: mol_type = other DNA
catgtgcagaaggagggtgt

SEQ ID NO: 58748 - DNA, 20 bp, synthetic construct
  misc_feature 1..20: note = chemically synthesized
  source 1..20: mol_type = other DNA
tgccaggcagcctgcacttc

SEQ ID NO: 58749 - DNA, 20 bp, synthetic construct
  misc_feature 1..20: note = chemically synthesized
  source 1..20: mol_type = other DNA
ggggtgaactccttgccaaa

SEQ ID NO: 58750 - DNA, 20 bp, synthetic construct
  misc_feature 1..20: note = chemically synthesized
  source 1..20: mol_type = other DNA
tccttgccaaagtgagtagc

SEQ ID NO: 58751 - DNA, 20 bp, synthetic construct
  misc_feature 1..20: note = chemically synthesized
  source 1..20: mol_type = other DNA
caaaataacacacaggcatg

SEQ ID NO: 58752 - DNA, 20 bp, synthetic construct
  misc_feature 1..20: note = chemically synthesized
  source 1..20: mol_type = other DNA
tccccattttaccagtatta

SEQ ID NO: 58753 - DNA, 20 bp, synthetic construct
  misc_feature 1..20: note = chemically synthesized
  source 1..20: mol_type = other DNA
ttgtctaatttttgtaaatg

SEQ ID NO: 58754 - DNA, 20 bp, synthetic construct
  misc_feature 1..20: note = chemically synthesized
  source 1..20: mol_type = other DNA
aatttttgtaaatgtagaat

SEQ ID NO: 58755 - DNA, 20 bp, synthetic construct
  misc_feature 1..20: note = chemically synthesized
  source 1..20: mol_type = other DNA
atgtagaatgtgagtgctgc

SEQ ID NO: 58756 - DNA, 20 bp, synthetic construct
  misc_feature 1..20: note = chemically synthesized
  source 1..20: mol_type = other DNA
gtgctgcaagagttctcagc

SEQ ID NO: 58757 - DNA, 20 bp, synthetic construct
  misc_feature 1..20: note = chemically synthesized
  source 1..20: mol_type = other DNA
aattctataatacaattctc

SEQ ID NO: 58758 - DNA, 20 bp, synthetic construct
  misc_feature 1..20: note = chemically synthesized
  source 1..20: mol_type = other DNA
gtcctttactgtcactagtt

SEQ ID NO: 58759 - DNA, 20 bp, synthetic construct
  misc_feature 1..20: note = chemically synthesized
  source 1..20: mol_type = other DNA
tgaactcaccttgaagttct

SEQ ID NO: 58760 - DNA, 20 bp, synthetic construct
  misc_feature 1..20: note = chemically synthesized
  source 1..20: mol_type = other DNA
cttgccatgggccttgacct

SEQ ID NO: 58761 - DNA, 20 bp, synthetic construct
  misc_feature 1..20: note = chemically synthesized
  source 1..20: mol_type = other DNA
gccttgaccttggggttgcc

SEQ ID NO: 58762 - DNA, 20 bp, synthetic construct
  misc_feature 1..20: note = chemically synthesized
  source 1..20: mol_type = other DNA
ccaaagctgtcaaaaaatct

SEQ ID NO: 58763 - DNA, 20 bp, synthetic construct
  misc_feature 1..20: note = chemically synthesized
  source 1..20: mol_type = other DNA
gtcaaaaaatctctgggtcc

SEQ ID NO: 58764 - DNA, 20 bp, synthetic construct
  misc_feature 1..20: note = chemically synthesized
  source 1..20: mol_type = other DNA
gggtccaggggtaaacaacg

SEQ ID NO: 58765 - DNA, 20 bp, synthetic construct
  misc_feature 1..20: note = chemically synthesized
  source 1..20: mol_type = other DNA
gactttcccaatcaacttgc

SEQ ID NO: 58766 - DNA, 20 bp, synthetic construct
  misc_feature 1..20: note = chemically synthesized
  source 1..20: mol_type = other DNA
aaggctgacctgtgtccctc

SEQ ID NO: 58767 - DNA, 20 bp, synthetic construct
  misc_feature 1..20: note = chemically synthesized
  source 1..20: mol_type = other DNA
tgacctgtgtccctcagggg

SEQ ID NO: 58768 - DNA, 20 bp, synthetic construct
  misc_feature 1..20: note = chemically synthesized
  source 1..20: mol_type = other DNA
ggggtggagtcaggtccgga

SEQ ID NO: 58769 - DNA, 20 bp, synthetic construct
  misc_feature 1..20: note = chemically synthesized
  source 1..20: mol_type = other DNA
tccggagagggtcagcagtg

SEQ ID NO: 58770 - DNA, 20 bp, synthetic construct
  misc_feature 1..20: note = chemically synthesized
  source 1..20: mol_type = other DNA
taagtttgtgataatgtgtg

SEQ ID NO: 58771 - DNA, 20 bp, synthetic construct
  misc_feature 1..20: note = chemically synthesized
  source 1..20: mol_type = other DNA
agaaaataaagctgttaaaa

SEQ ID NO: 58772 - DNA, 20 bp, synthetic construct
  misc_feature 1..20: note = chemically synthesized
  source 1..20: mol_type = other DNA
acccagttctagctctctta

SEQ ID NO: 58773 - DNA, 20 bp, synthetic construct
  misc_feature 1..20: note = chemically synthesized
  source 1..20: mol_type = other DNA
agttccttctagaaactgaa

SEQ ID NO: 58774 - DNA, 20 bp, synthetic construct
  misc_feature 1..20: note = chemically synthesized
  source 1..20: mol_type = other DNA
aatcccaaagtacagtacct

SEQ ID NO: 58775 - DNA, 20 bp, synthetic construct
  misc_feature 1..20: note = chemically synthesized
  source 1..20: mol_type = other DNA
gattacatccagtgcttcca

SEQ ID NO: 58776 - DNA, 20 bp, synthetic construct
  misc_feature 1..20: note = chemically synthesized
  source 1..20: mol_type = other DNA
caggggacattggctacttt

SEQ ID NO: 58777 - DNA, 20 bp, synthetic construct
  misc_feature 1..20: note = chemically synthesized
  source 1..20: mol_type = other DNA
atcctaaaattatttaaagc

SEQ ID NO: 58778 - DNA, 20 bp, synthetic construct
  misc_feature 1..20: note = chemically synthesized
  source 1..20: mol_type = other DNA
gtcatcaaacagagaaaaaa

SEQ ID NO: 58779 - DNA, 20 bp, synthetic construct
  misc_feature 1..20: note = chemically synthesized
  source 1..20: mol_type = other DNA
atcgatatattaatcaggct

SEQ ID NO: 58780 - DNA, 20 bp, synthetic construct
  misc_feature 1..20: note = chemically synthesized
  source 1..20: mol_type = other DNA
atattaatcaggctaggagt

SEQ ID NO: 58781 - DNA, 20 bp, synthetic construct
  misc_feature 1..20: note = chemically synthesized
  source 1..20: mol_type = other DNA
gtagagctgaaactggaagt

SEQ ID NO: 58782 - DNA, 20 bp, synthetic construct
  misc_feature 1..20: note = chemically synthesized
  source 1..20: mol_type = other DNA
caattcgatccatgtgcctg

SEQ ID NO: 58783 - DNA, 20 bp, synthetic construct
  misc_feature 1..20: note = chemically synthesized
  source 1..20: mol_type = other DNA
ttgtcattatcctcatattt

SEQ ID NO: 58784 - DNA, 20 bp, synthetic construct
  misc_feature 1..20: note = chemically synthesized
  source 1..20: mol_type = other DNA
atcctcatattttagaatca

SEQ ID NO: 58785 - DNA, 20 bp, synthetic construct
  misc_feature 1..20: note = chemically synthesized
  source 1..20: mol_type = other DNA
gtgacagaagtaatgattgg

SEQ ID NO: 58786 - DNA, 20 bp, synthetic construct
  misc_feature 1..20: note = chemically synthesized
  source 1..20: mol_type = other DNA
gattgggggaataatagaag

SEQ ID NO: 58787 - DNA, 20 bp, synthetic construct
  misc_feature 1..20: note = chemically synthesized
  source 1..20: mol_type = other DNA
ttttttttttttttttgaga

SEQ ID NO: 58788 - DNA, 20 bp, synthetic construct
  misc_feature 1..20: note = chemically synthesized
  source 1..20: mol_type = other DNA
gtctcactctgttgccagac

SEQ ID NO: 58789 - DNA, 20 bp, synthetic construct
  misc_feature 1..20: note = chemically synthesized
  source 1..20: mol_type = other DNA
ctcactgcaaccttcgcctc

SEQ ID NO: 58790 - DNA, 20 bp, synthetic construct
  misc_feature 1..20: note = chemically synthesized
  source 1..20: mol_type = other DNA
ttttttatttttagtagaga

SEQ ID NO: 58791 - DNA, 20 bp, synthetic construct
  misc_feature 1..20: note = chemically synthesized
  source 1..20: mol_type = other DNA
cgggatttcaccatgtttgc

SEQ ID NO: 58792 - DNA, 20 bp, synthetic construct
  misc_feature 1..20: note = chemically synthesized
  source 1..20: mol_type = other DNA
ccccttgccccaccagatct

SEQ ID NO: 58793 - DNA, 20 bp, synthetic construct
  misc_feature 1..20: note = chemically synthesized
  source 1..20: mol_type = other DNA
ctcccaagtcaagtgccttt

SEQ ID NO: 58794 - DNA, 20 bp, synthetic construct
  misc_feature 1..20: note = chemically synthesized
  source 1..20: mol_type = other DNA
aaaaaacacttgtggcaagt

SEQ ID NO: 58795 - DNA, 20 bp, synthetic construct
  misc_feature 1..20: note = chemically synthesized
  source 1..20: mol_type = other DNA
attgttattattccaggcca

SEQ ID NO: 58796 - DNA, 20 bp, synthetic construct
  misc_feature 1..20: note = chemically synthesized
  source 1..20: mol_type = other DNA
tggctaacacagacaaaacc

SEQ ID NO: 58797 - DNA, 20 bp, synthetic construct
  misc_feature 1..20: note = chemically synthesized
  source 1..20: mol_type = other DNA
ttgcatcaaataatatacat

SEQ ID NO: 58798 - DNA, 20 bp, synthetic construct
  misc_feature 1..20: note = chemically synthesized
  source 1..20: mol_type = other DNA
ctttatgaaagcattagatc

SEQ ID NO: 58799 - DNA, 20 bp, synthetic construct
  misc_feature 1..20: note = chemically synthesized
  source 1..20: mol_type = other DNA
tgaaagcattagatctagga

SEQ ID NO: 58800 - DNA, 20 bp, synthetic construct
  misc_feature 1..20: note = chemically synthesized
  source 1..20: mol_type = other DNA
aagtagtgatgcagataaat

SEQ ID NO: 58801 - DNA, 20 bp, synthetic construct
  misc_feature 1..20: note = chemically synthesized
  source 1..20: mol_type = other DNA
cgggcagatcatctgaggtc

SEQ ID NO: 58802 - DNA, 20 bp, synthetic construct
  misc_feature 1..20: note = chemically synthesized
  source 1..20: mol_type = other DNA
tactcaggaggccaaggcag

SEQ ID NO: 58803 - DNA, 20 bp, synthetic construct
  misc_feature 1..20: note = chemically synthesized
  source 1..20: mol_type = other DNA
ggccaaggcaggagaattgc

SEQ ID NO: 58804 - DNA, 20 bp, synthetic construct
  misc_feature 1..20: note = chemically synthesized
  source 1..20: mol_type = other DNA
taaccaattaagatacagct

SEQ ID NO: 58805 - DNA, 20 bp, synthetic construct
  misc_feature 1..20: note = chemically synthesized
  source 1..20: mol_type = other DNA
tacagctctgggttttcagg

SEQ ID NO: 58806 - DNA, 20 bp, synthetic construct
  misc_feature 1..20: note = chemically synthesized
  source 1..20: mol_type = other DNA
cagtggcccttcctcagaac

SEQ ID NO: 58807 - DNA, 20 bp, synthetic construct
  misc_feature 1..20: note = chemically synthesized
  source 1..20: mol_type = other DNA
cttcctcagaacttgaatgt

SEQ ID NO: 58808 - DNA, 20 bp, synthetic construct
  misc_feature 1..20: note = chemically synthesized
  source 1..20: mol_type = other DNA
tcagacattgccaaagtcca

SEQ ID NO: 58809 - DNA, 20 bp, synthetic construct
  misc_feature 1..20: note = chemically synthesized
  source 1..20: mol_type = other DNA
ggaccaggtatctcaaggcc

SEQ ID NO: 58810 - DNA, 20 bp, synthetic construct
  misc_feature 1..20: note = chemically synthesized
  source 1..20: mol_type = other DNA
ttctccctaaaacaagccct

SEQ ID NO: 58811 - DNA, 20 bp, synthetic construct
  misc_feature 1..20: note = chemically synthesized
  source 1..20: mol_type = other DNA
atcccatcattcttcccatt

SEQ ID NO: 58812 - DNA, 20 bp, synthetic construct
  misc_feature 1..20: note = chemically synthesized
  source 1..20: mol_type = other DNA
caccagtcttctcttagatt

SEQ ID NO: 58813 - DNA, 20 bp, synthetic construct
  misc_feature 1..20: note = chemically synthesized
  source 1..20: mol_type = other DNA
cttctcttagattcagagta

SEQ ID NO: 58814 - DNA, 20 bp, synthetic construct
  misc_feature 1..20: note = chemically synthesized
  source 1..20: mol_type = other DNA
tccagacctggcttgcatcc

SEQ ID NO: 58815 - DNA, 20 bp, synthetic construct
  misc_feature 1..20: note = chemically synthesized
  source 1..20: mol_type = other DNA
catatgagataccatgaaaa

SEQ ID NO: 58816 - DNA, 20 bp, synthetic construct
  misc_feature 1..20: note = chemically synthesized
  source 1..20: mol_type = other DNA
agataagtgttatggccatc

SEQ ID NO: 58817 - DNA, 20 bp, synthetic construct
  misc_feature 1..20: note = chemically synthesized
  source 1..20: mol_type = other DNA
agtcagaaaaagtaatcagt

SEQ ID NO: 58818 - DNA, 20 bp, synthetic construct
  misc_feature 1..20: note = chemically synthesized
  source 1..20: mol_type = other DNA
gaagattaattcctgcctgt

SEQ ID NO: 58819 - DNA, 20 bp, synthetic construct
  misc_feature 1..20: note = chemically synthesized
  source 1..20: mol_type = other DNA
gtaatttcttaagttctatg

SEQ ID NO: 58820 - DNA, 20 bp, synthetic construct
  misc_feature 1..20: note = chemically synthesized
  source 1..20: mol_type = other DNA
tatgacatatgtttaacctg

SEQ ID NO: 58821 - DNA, 20 bp, synthetic construct
  misc_feature 1..20: note = chemically synthesized
  source 1..20: mol_type = other DNA
aaagtaggcccttcacttca

SEQ ID NO: 58822 - DNA, 20 bp, synthetic construct
  misc_feature 1..20: note = chemically synthesized
  source 1..20: mol_type = other DNA
tctaagaaataaatacttta

SEQ ID NO: 58823 - DNA, 20 bp, synthetic construct
  misc_feature 1..20: note = chemically synthesized
  source 1..20: mol_type = other DNA
ctgataggaaaagagctgct

SEQ ID NO: 58824 - DNA, 20 bp, synthetic construct
  misc_feature 1..20: note = chemically synthesized
  source 1..20: mol_type = other DNA
tgttagattttgcattatcc

SEQ ID NO: 58825 - DNA, 20 bp, synthetic construct
  misc_feature 1..20: note = chemically synthesized
  source 1..20: mol_type = other DNA
ttgcattatccaggaatgac

SEQ ID NO: 58826 - DNA, 20 bp, synthetic construct
  misc_feature 1..20: note = chemically synthesized
  source 1..20: mol_type = other DNA
tattttctagtgtaattgta

SEQ ID NO: 58827 - DNA, 20 bp, synthetic construct
  misc_feature 1..20: note = chemically synthesized
  source 1..20: mol_type = other DNA
agtgtaattgtaaagaatga

SEQ ID NO: 58828 - DNA, 20 bp, synthetic construct
  misc_feature 1..20: note = chemically synthesized
  source 1..20: mol_type = other DNA
tcaacttttattttaagttc

SEQ ID NO: 58829 - DNA, 20 bp, synthetic construct
  misc_feature 1..20: note = chemically synthesized
  source 1..20: mol_type = other DNA
taagttcaggggtacatgta

SEQ ID NO: 58830 - DNA, 20 bp, synthetic construct
  misc_feature 1..20: note = chemically synthesized
  source 1..20: mol_type = other DNA
caggtttgttacatagataa

SEQ ID NO: 58831 - DNA, 20 bp, synthetic construct
  misc_feature 1..20: note = chemically synthesized
  source 1..20: mol_type = other DNA
catagataaatgaatgtcaa

SEQ ID NO: 58832 - DNA, 20 bp, synthetic construct
  misc_feature 1..20: note = chemically synthesized
  source 1..20: mol_type = other DNA
agtatgcgttgtttccctct

SEQ ID NO: 58833 - DNA, 20 bp, synthetic construct
  misc_feature 1..20: note = chemically synthesized
  source 1..20: mol_type = other DNA
atctctcacgaagtttgcag

SEQ ID NO: 58834 - DNA, 20 bp, synthetic construct
  misc_feature 1..20: note = chemically synthesized
  source 1..20: mol_type = other DNA
cagggctgaggctcattctc

SEQ ID NO: 58835 - DNA, 20 bp, synthetic construct
  misc_feature 1..20: note = chemically synthesized
  source 1..20: mol_type = other DNA
cactgtgcctaaagtacaac

SEQ ID NO: 58836 - DNA, 20 bp, synthetic construct
  misc_feature 1..20: note = chemically synthesized
  source 1..20: mol_type = other DNA
aagtacaaccagagttactt

SEQ ID NO: 58837 - DNA, 20 bp, synthetic construct
  misc_feature 1..20: note = chemically synthesized
  source 1..20: mol_type = other DNA
gtgaatgttaattaagcagg

SEQ ID NO: 58838 - DNA, 20 bp, synthetic construct
  misc_feature 1..20: note = chemically synthesized
  source 1..20: mol_type = other DNA
agggatctttaatgggaaaa

SEQ ID NO: 58839 - DNA, 20 bp, synthetic construct
  misc_feature 1..20: note = chemically synthesized
  source 1..20: mol_type = other DNA
gggaaaaaggagtagaaagc

SEQ ID NO: 58840 - DNA, 20 bp, synthetic construct
  misc_feature 1..20: note = chemically synthesized
  source 1..20: mol_type = other DNA
tgggcactgaaggttaaaac

SEQ ID NO: 58841 - DNA, 20 bp, synthetic construct
  misc_feature 1..20: note = chemically synthesized
  source 1..20: mol_type = other DNA
ttctttgaccttttgggacc

SEQ ID NO: 58842 - DNA, 20 bp, synthetic construct
  misc_feature 1..20: note = chemically synthesized
  source 1..20: mol_type = other DNA
attaaaattctaagaaattc

SEQ ID NO: 58843 - DNA, 20 bp, synthetic construct
  misc_feature 1..20: note = chemically synthesized
  source 1..20: mol_type = other DNA
aacaatactctgaagtagtt

SEQ ID NO: 58844 - DNA, 20 bp, synthetic construct
  misc_feature 1..20: note = chemically synthesized
  source 1..20: mol_type = other DNA
atgtgctttcaatttatata

SEQ ID NO: 58845 - DNA, 20 bp, synthetic construct
  misc_feature 1..20: note = chemically synthesized
  source 1..20: mol_type = other DNA
actattttaagtgcagggct

SEQ ID NO: 58846 - DNA, 20 bp, synthetic construct
  misc_feature 1..20: note = chemically synthesized
  source 1..20: mol_type = other DNA
actataacatagtatgtttc

SEQ ID NO: 58847 - DNA, 20 bp, synthetic construct
  misc_feature 1..20: note = chemically synthesized
  source 1..20: mol_type = other DNA
ctctggagaaggttaaaact

SEQ ID NO: 58848 - DNA, 20 bp, synthetic construct
  misc_feature 1..20: note = chemically synthesized
  source 1..20: mol_type = other DNA
cccctctgttttgtgtcact

SEQ ID NO: 58849 - DNA, 20 bp, synthetic construct
  misc_feature 1..20: note = chemically synthesized
  source 1..20: mol_type = other DNA
tgttttgtgtcactaagggt

SEQ ID NO: 58850 - DNA, 20 bp, synthetic construct
  misc_feature 1..20: note = chemically synthesized
  source 1..20: mol_type = other DNA
tgtcactaagggtgaggatg

SEQ ID NO: 58851 - DNA, 20 bp, synthetic construct
  misc_feature 1..20: note = chemically synthesized
  source 1..20: mol_type = other DNA
atcaataattctagccccac

SEQ ID NO: 58852 - DNA, 20 bp, synthetic construct
  misc_feature 1..20: note = chemically synthesized
  source 1..20: mol_type = other DNA
attatttttttctttagact

SEQ ID NO: 58853 - DNA, 20 bp, synthetic construct
  misc_feature 1..20: note = chemically synthesized
  source 1..20: mol_type = other DNA
ggcagcgtcagaaactgtgt

SEQ ID NO: 58854 - DNA, 20 bp, synthetic construct
  misc_feature 1..20: note = chemically synthesized
  source 1..20: mol_type = other DNA
ggggcctagctaaaggcagt

SEQ ID NO: 58855 - DNA, 20 bp, synthetic construct
  misc_feature 1..20: note = chemically synthesized
  source 1..20: mol_type = other DNA
tagctaaaggcagtgagagt

SEQ ID NO: 58856 - DNA, 20 bp, synthetic construct
  misc_feature 1..20: note = chemically synthesized
  source 1..20: mol_type = other DNA
aaggctataggttagtgttt

SEQ ID NO: 58857 - DNA, 20 bp, synthetic construct
  misc_feature 1..20: note = chemically synthesized
  source 1..20: mol_type = other DNA
accagataacttgcaagtcc

SEQ ID NO: 58858 - DNA, 20 bp, synthetic construct
  misc_feature 1..20: note = chemically synthesized
  source 1..20: mol_type = other DNA
atcacacactggggcctgtt

SEQ ID NO: 58859 - DNA, 20 bp, synthetic construct
  misc_feature 1..20: note = chemically synthesized
  source 1..20: mol_type = other DNA
tgggggtggggggctagggg

SEQ ID NO: 58860 - DNA, 20 bp, synthetic construct
  misc_feature 1..20: note = chemically synthesized
  source 1..20: mol_type = other DNA
agaaatacctaatgtagatg

SEQ ID NO: 58861 - DNA, 20 bp, synthetic construct
  misc_feature 1..20: note = chemically synthesized
  source 1..20: mol_type = other DNA
ctaatgtagatgacgggttg

SEQ ID NO: 58862 - DNA, 20 bp, synthetic construct
  misc_feature 1..20: note = chemically synthesized
  source 1..20: mol_type = other DNA
tcaaatttaactataagaga

SEQ ID NO: 58863 - DNA, 20 bp, synthetic construct
  misc_feature 1..20: note = chemically synthesized
  source 1..20: mol_type = other DNA
aattcttaactataatctta

SEQ ID NO: 58864 - DNA, 20 bp, synthetic construct
  misc_feature 1..20: note = chemically synthesized
  source 1..20: mol_type = other DNA
aatcttacagaatattctca

SEQ ID NO: 58865 - DNA, 20 bp, synthetic construct
  misc_feature 1..20: note = chemically synthesized
  source 1..20: mol_type = other DNA
aggccatccttcccatgaag

SEQ ID NO: 58866 - DNA, 20 bp, synthetic construct
  misc_feature 1..20: note = chemically synthesized
  source 1..20: mol_type = other DNA
catccttcccatgaagatgg

SEQ ID NO: 58867 - DNA, 20 bp, synthetic construct
  misc_feature 1..20: note = chemically synthesized
  source 1..20: mol_type = other DNA
aattaattgcttacataaac

SEQ ID NO: 58868 - DNA, 20 bp, synthetic construct
  misc_feature 1..20: note = chemically synthesized
  source 1..20: mol_type = other DNA
aatctcagcctacaaaacaa

SEQ ID NO: 58869 - DNA, 20 bp, synthetic construct
  misc_feature 1..20: note = chemically synthesized
  source 1..20: mol_type = other DNA
ttctttgtgtgtgcatagca

SEQ ID NO: 58870 - DNA, 20 bp, synthetic construct
  misc_feature 1..20: note = chemically synthesized
  source 1..20: mol_type = other DNA
ttcaaaattgtaaaattgct

SEQ ID NO: 58871 - DNA, 20 bp, synthetic construct
  misc_feature 1..20: note = chemically synthesized
  source 1..20: mol_type = other DNA
ctaagaatacagcacaaaaa

SEQ ID NO: 58872 - DNA, 20 bp, synthetic construct
  misc_feature 1..20: note = chemically synthesized
  source 1..20: mol_type = other DNA
acagcacaaaaacagaatag

SEQ ID NO: 58873 - DNA, 20 bp, synthetic construct
  misc_feature 1..20: note = chemically synthesized
  source 1..20: mol_type = other DNA
aaaaaaactgaaatgaaggc

SEQ ID NO: 58874 - DNA, 20 bp, synthetic construct
  misc_feature 1..20: note = chemically synthesized
  source 1..20: mol_type = other DNA
aggccagagtgtgattagga

SEQ ID NO: 58875 - DNA, 20 bp, synthetic construct
  misc_feature 1..20: note = chemically synthesized
  source 1..20: mol_type = other DNA
gtgtgattaggacagggtga

SEQ ID NO: 58876 - DNA, 20 bp, synthetic construct
  misc_feature 1..20: note = chemically synthesized
  source 1..20: mol_type = other DNA
actataaagttaacacctga

SEQ ID NO: 58877 - DNA, 20 bp, synthetic construct
  misc_feature 1..20: note = chemically synthesized
  source 1..20: mol_type = other DNA
gattaaatatttagggcata

SEQ ID NO: 58878 - DNA, 20 bp, synthetic construct
  misc_feature 1..20: note = chemically synthesized
  source 1..20: mol_type = other DNA
ccctaaagatgtaagatgct

SEQ ID NO: 58879 - DNA, 20 bp, synthetic construct
  misc_feature 1..20: note = chemically synthesized
  source 1..20: mol_type = other DNA
taagatgcttagaattttca

SEQ ID NO: 58880 - DNA, 20 bp, synthetic construct
  misc_feature 1..20: note = chemically synthesized
  source 1..20: mol_type = other DNA
gaatatcaataaggccaatg

SEQ ID NO: 58881 - DNA, 20 bp, synthetic construct
  misc_feature 1..20: note = chemically synthesized
  source 1..20: mol_type = other DNA
ggatgagattcggtgaaggg

SEQ ID NO: 58882 - DNA, 20 bp, synthetic construct
  misc_feature 1..20: note = chemically synthesized
  source 1..20: mol_type = other DNA
cactaataatacctacatca

SEQ ID NO: 58883 - DNA, 20 bp, synthetic construct
  misc_feature 1..20: note = chemically synthesized
  source 1..20: mol_type = other DNA
atgcatgaacaactattgta

SEQ ID NO: 58884 - DNA, 20 bp, synthetic construct
  misc_feature 1..20: note = chemically synthesized
  source 1..20: mol_type = other DNA
caactattgtagagaattgt

SEQ ID NO: 58885 - DNA, 20 bp, synthetic construct
  misc_feature 1..20: note = chemically synthesized
  source 1..20: mol_type = other DNA
tacattttgaaaagactaat

SEQ ID NO: 58886 - DNA, 20 bp, synthetic construct
  misc_feature 1..20: note = chemically synthesized
  source 1..20: mol_type = other DNA
gtagaagcaggaagattgtt

SEQ ID NO: 58887 - DNA, 20 bp, synthetic construct
  misc_feature 1..20: note = chemically synthesized
  source 1..20: mol_type = other DNA
gtggtgacagtgacttagac

SEQ ID NO: 58888 - DNA, 20 bp, synthetic construct
  misc_feature 1..20: note = chemically synthesized
  source 1..20: mol_type = other DNA
tagcattggaggtgaaggca

SEQ ID NO: 58889 - DNA, 20 bp, synthetic construct
  misc_feature 1..20: note = chemically synthesized
  source 1..20: mol_type = other DNA
atcctttcacgaaaaaccaa

SEQ ID NO: 58890 - DNA, 20 bp, synthetic construct
  misc_feature 1..20: note = chemically synthesized
  source 1..20: mol_type = other DNA
accaacaggattttctgaca

SEQ ID NO: 58891 - DNA, 20 bp, synthetic construct
  misc_feature 1..20: note = chemically synthesized
  source 1..20: mol_type = other DNA
ggattttctgacagagaata

SEQ ID NO: 58892 - DNA, 20 bp, synthetic construct
  misc_feature 1..20: note = chemically synthesized
  source 1..20: mol_type = other DNA
gtgcatgctaatttctggct

SEQ ID NO: 58893 - DNA, 20 bp, synthetic construct
  misc_feature 1..20: note = chemically synthesized
  source 1..20: mol_type = other DNA
ttctggctgtgagtatatgt

SEQ ID NO: 58894 - DNA, 20 bp, synthetic construct
  misc_feature 1..20: note = chemically synthesized
  source 1..20: mol_type = other DNA
ctgtgagtatatgtcagagt

SEQ ID NO: 58895 - DNA, 20 bp, synthetic construct
  misc_feature 1..20: note = chemically synthesized
  source 1..20: mol_type = other DNA
ggattttgaagctaggcaaa

SEQ ID NO: 58896 - DNA, 20 bp, synthetic construct
  misc_feature 1..20: note = chemically synthesized
  source 1..20: mol_type = other DNA
aagctaggcaaagtgagtct

SEQ ID NO: 58897 - DNA, 20 bp, synthetic construct
  misc_feature 1..20: note = chemically synthesized
  source 1..20: mol_type = other DNA
aggcaaagtgagtctttggg

SEQ ID NO: 58898 - DNA, 20 bp, synthetic construct
  misc_feature 1..20: note = chemically synthesized
  source 1..20: mol_type = other DNA
gttcatcacagtctctacct

SEQ ID NO: 58899 - DNA, 20 bp, synthetic construct
  misc_feature 1..20: note = chemically synthesized
  source 1..20: mol_type = other DNA
ttggctttaaaattggaaag

SEQ ID NO: 58900 - DNA, 20 bp, synthetic construct
  misc_feature 1..20: note = chemically synthesized
  source 1..20: mol_type = other DNA
ctttaaaattggaaagctgg

SEQ ID NO: 58901 - DNA, 20 bp, synthetic construct
  misc_feature 1..20: note = chemically synthesized
  source 1..20: mol_type = other DNA
aaaattggaaagctgggtgg

SEQ ID NO: 58902 - DNA, 20 bp, synthetic construct
  misc_feature 1..20: note = chemically synthesized
  source 1..20: mol_type = other DNA
aaagtgacatcaagtatttc

SEQ ID NO: 58903 - DNA, 20 bp, synthetic construct
  misc_feature 1..20: note = chemically synthesized
  source 1..20: mol_type = other DNA
taagtcagagaacaatcaga

SEQ ID NO: 58904 - DNA, 20 bp, synthetic construct
  misc_feature 1..20: note = chemically synthesized
  source 1..20: mol_type = other DNA
gacagaattctgttcggtca

SEQ ID NO: 58905 - DNA, 20 bp, synthetic construct
  misc_feature 1..20: note = chemically synthesized
  source 1..20: mol_type = other DNA
ctgttcggtcagggaatttg

SEQ ID NO: 58906 - DNA, 20 bp, synthetic construct
  misc_feature 1..20: note = chemically synthesized
  source 1..20: mol_type = other DNA
tgttttcgtttttctttaga

SEQ ID NO: 58907 - DNA, 20 bp, synthetic construct
  misc_feature 1..20: note = chemically synthesized
  source 1..20: mol_type = other DNA
cagagtctcgctctggaggc

SEQ ID NO: 58908 - DNA, 20 bp, synthetic construct
  misc_feature 1..20: note = chemically synthesized
  source 1..20: mol_type = other DNA
tgcctcagcctcccaagtag

SEQ ID NO: 58909 - DNA, 20 bp, synthetic construct
  misc_feature 1..20: note = chemically synthesized
  source 1..20: mol_type = other DNA
tcccaaactgctgtgattac

SEQ ID NO: 58910 - DNA, 20 bp, synthetic construct
  misc_feature 1..20: note = chemically synthesized
  source 1..20: mol_type = other DNA
gagtgagccaccgcacctca

SEQ ID NO: 58911 - DNA, 20 bp, synthetic construct
  misc_feature 1..20: note = chemically synthesized
  source 1..20: mol_type = other DNA
taggctgtgacctctgcact

SEQ ID NO: 58912 - DNA, 20 bp, synthetic construct
  misc_feature 1..20: note = chemically synthesized
  source 1..20: mol_type = other DNA
gaggcgtgcctccatccctg

SEQ ID NO: 58913 - DNA, 20 bp, synthetic construct
  misc_feature 1..20: note = chemically synthesized
  source 1..20: mol_type = other DNA
atgagtttttcctccatgtg

SEQ ID NO: 58914 - DNA, 20 bp, synthetic construct
  misc_feature 1..20: note = chemically synthesized
  source 1..20: mol_type = other DNA
tttttcctccatgtgtagaa

SEQ ID NO: 58915 - DNA, 20 bp, synthetic construct
  misc_feature 1..20: note = chemically synthesized
  source 1..20: mol_type = other DNA
catgtgtagaattgaataag

SEQ ID NO: 58916 - DNA, 20 bp, synthetic construct
  misc_feature 1..20: note = chemically synthesized
  source 1..20: mol_type = other DNA
gtagaattgaataagaagga

SEQ ID NO: 58917 - DNA, 20 bp, synthetic construct
  misc_feature 1..20: note = chemically synthesized
  source 1..20: mol_type = other DNA
agaattcaatttaacaagct

SEQ ID NO: 58918 - DNA, 20 bp, synthetic construct
  misc_feature 1..20: note = chemically synthesized
  source 1..20: mol_type = other DNA
aggcccaatataaaatgaaa

SEQ ID NO: 58919 - DNA, 20 bp, synthetic construct
  misc_feature 1..20: note = chemically synthesized
  source 1..20: mol_type = other DNA
tagcccctttgtcaaaaatt

SEQ ID NO: 58920 - DNA, 20 bp, synthetic construct
  misc_feature 1..20: note = chemically synthesized
  source 1..20: mol_type = other DNA
gatttcatgtcaggaacagc

SEQ ID NO: 58921 - DNA, 20 bp, synthetic construct
  misc_feature 1..20: note = chemically synthesized
  source 1..20: mol_type = other DNA
attcatgatacgaaaaaata

SEQ ID NO: 58922 - DNA, 20 bp, synthetic construct
  misc_feature 1..20: note = chemically synthesized
  source 1..20: mol_type = other DNA
agtctttctagacccatcca

SEQ ID NO: 58923 - DNA, 20 bp, synthetic construct
  misc_feature 1..20: note = chemically synthesized
  source 1..20: mol_type = other DNA
atcattcattcacagcgaaa

SEQ ID NO: 58924 - DNA, 20 bp, synthetic construct
  misc_feature 1..20: note = chemically synthesized
  source 1..20: mol_type = other DNA
aagaggtcattcattcacaa

SEQ ID NO: 58925 - DNA, 20 bp, synthetic construct
  misc_feature 1..20: note = chemically synthesized
  source 1..20: mol_type = other DNA
agtatacgtgaggtcctgta

SEQ ID NO: 58926 - DNA, 20 bp, synthetic construct
  misc_feature 1..20: note = chemically synthesized
  source 1..20: mol_type = other DNA
aacccttttagctctcctgg

SEQ ID NO: 58927 - DNA, 20 bp, synthetic construct
  misc_feature 1..20: note = chemically synthesized
  source 1..20: mol_type = other DNA
gaggaatgtttctttcctct

SEQ ID NO: 58928 - DNA, 20 bp, synthetic construct
  misc_feature 1..20: note = chemically synthesized
  source 1..20: mol_type = other DNA
tgtttctttcctctcaggat

SEQ ID NO: 58929 - DNA, 20 bp, synthetic construct
  misc_feature 1..20: note = chemically synthesized
  source 1..20: mol_type = other DNA
cttttgccacctagctgtcc

SEQ ID NO: 58930 - DNA, 20 bp, synthetic construct
  misc_feature 1..20: note = chemically synthesized
  source 1..20: mol_type = other DNA
attcaggaaataatatattc

SEQ ID NO: 58931 - DNA, 20 bp, synthetic construct
  misc_feature 1..20: note = chemically synthesized
  source 1..20: mol_type = other DNA
ctttatgatgccgtttgagg

SEQ ID NO: 58932 - DNA, 20 bp, synthetic construct
  misc_feature 1..20: note = chemically synthesized
  source 1..20: mol_type = other DNA
atcctgctggggacccagat

SEQ ID NO: 58933 - DNA, 20 bp, synthetic construct
  misc_feature 1..20: note = chemically synthesized
  source 1..20: mol_type = other DNA
gttacacagaaccagaaggc

SEQ ID NO: 58934 - DNA, 20 bp, synthetic construct
  misc_feature 1..20: note = chemically synthesized
  source 1..20: mol_type = other DNA
aagcttatttaatcagagat

SEQ ID NO: 58935 - DNA, 20 bp, synthetic construct
  misc_feature 1..20: note = chemically synthesized
  source 1..20: mol_type = other DNA
tcagagatgaggatgctgga

SEQ ID NO: 58936 - DNA, 20 bp, synthetic construct
  misc_feature 1..20: note = chemically synthesized
  source 1..20: mol_type = other DNA
aaatggttttgaagcacctg

SEQ ID NO: 58937 - DNA, 20 bp, synthetic construct
  misc_feature 1..20: note = chemically synthesized
  source 1..20: mol_type = other DNA
ctaaacactattttcagtgc

SEQ ID NO: 58938 - DNA, 20 bp, synthetic construct
  misc_feature 1..20: note = chemically synthesized
  source 1..20: mol_type = other DNA
tcagtgcttgaatcataaat

SEQ ID NO: 58939 - DNA, 20 bp, synthetic construct
  misc_feature 1..20: note = chemically synthesized
  source 1..20: mol_type = other DNA
acatgtatcttattccccac

SEQ ID NO: 58940 - DNA, 20 bp, synthetic construct
  misc_feature 1..20: note = chemically synthesized
  source 1..20: mol_type = other DNA
atgtgctctgtcccccaggc

SEQ ID NO: 58941 - DNA, 20 bp, synthetic construct
  misc_feature 1..20: note = chemically synthesized
  source 1..20: mol_type = other DNA
ctcactgcaacctccgcctc

SEQ ID NO: 58942 - DNA, 20 bp, synthetic construct
  misc_feature 1..20: note = chemically synthesized
  source 1..20: mol_type = other DNA
gcctcagccaccctaatagc

SEQ ID NO: 58943 - DNA, 20 bp, synthetic construct
  misc_feature 1..20: note = chemically synthesized
  source 1..20: mol_type = other DNA
ttttgtactttttgtagagg

SEQ ID NO: 58944 - DNA, 20 bp, synthetic construct
  misc_feature 1..20: note = chemically synthesized
  source 1..20: mol_type = other DNA
acctcagcctcccaaagtgc

SEQ ID NO: 58945 - DNA, 20 bp, synthetic construct
  misc_feature 1..20: note = chemically synthesized
  source 1..20: mol_type = other DNA
atatttaatagaggtattta

SEQ ID NO: 58946 - DNA, 20 bp, synthetic construct
  misc_feature 1..20: note = chemically synthesized
  source 1..20: mol_type = other DNA
gtatttatgggatgggggaa

SEQ ID NO: 58947 - DNA, 20 bp, synthetic construct
  misc_feature 1..20: note = chemically synthesized
  source 1..20: mol_type = other DNA
aaaagaatgtttctctcact

SEQ ID NO: 58948 - DNA, 20 bp, synthetic construct
  misc_feature 1..20: note = chemically synthesized
  source 1..20: mol_type = other DNA
tctcactgtggattatttta

SEQ ID NO: 58949 - DNA, 20 bp, synthetic construct
  misc_feature 1..20: note = chemically synthesized
  source 1..20: mol_type = other DNA
gtggattattttagagagtg

SEQ ID NO: 58950 - DNA, 20 bp, synthetic construct
  misc_feature 1..20: note = chemically synthesized
  source 1..20: mol_type = other DNA
gaaaatttatttttttgttg

SEQ ID NO: 58951 - DNA, 20 bp, synthetic construct
  misc_feature 1..20: note = chemically synthesized
  source 1..20: mol_type = other DNA
ctggctaagacacagtgaga

SEQ ID NO: 58952 - DNA, 20 bp, synthetic construct
  misc_feature 1..20: note = chemically synthesized
  source 1..20: mol_type = other DNA
cagaaatttcataagtctac

SEQ ID NO: 58953 - DNA, 20 bp, synthetic construct
  misc_feature 1..20: note = chemically synthesized
  source 1..20: mol_type = other DNA
aggcagatcacataagaaaa

SEQ ID NO: 58954 - DNA, 20 bp, synthetic construct
  misc_feature 1..20: note = chemically synthesized
  source 1..20: mol_type = other DNA
gatgccagttaaggtctgca

SEQ ID NO: 58955 - DNA, 20 bp, synthetic construct
  misc_feature 1..20: note = chemically synthesized
  source 1..20: mol_type = other DNA
tgagtatgagcccatccctg

SEQ ID NO: 58956 - DNA, 20 bp, synthetic construct
  misc_feature 1..20: note = chemically synthesized
  source 1..20: mol_type = other DNA
ttcttgaagtctctgaaata

SEQ ID NO: 58957 - DNA, 20 bp, synthetic construct
  misc_feature 1..20: note = chemically synthesized
  source 1..20: mol_type = other DNA
tgataatatgtattagctaa

SEQ ID NO: 58958 - DNA, 20 bp, synthetic construct
  misc_feature 1..20: note = chemically synthesized
  source 1..20: mol_type = other DNA
gtattagctaatagaattat

SEQ ID NO: 58959 - DNA, 20 bp, synthetic construct
  misc_feature 1..20: note = chemically synthesized
  source 1..20: mol_type = other DNA
tacagttgcatgctacctta

SEQ ID NO: 58960 - DNA, 20 bp, synthetic construct
  misc_feature 1..20: note = chemically synthesized
  source 1..20: mol_type = other DNA
agcccatcagggaagacata

SEQ ID NO: 58961 - DNA, 20 bp, synthetic construct
  misc_feature 1..20: note = chemically synthesized
  source 1..20: mol_type = other DNA
gaagacatagggagttctgt

SEQ ID NO: 58962 - DNA, 20 bp, synthetic construct
  misc_feature 1..20: note = chemically synthesized
  source 1..20: mol_type = other DNA
acatagggagttctgtagga

SEQ ID NO: 58963 - DNA, 20 bp, synthetic construct
  misc_feature 1..20: note = chemically synthesized
  source 1..20: mol_type = other DNA
acccggcaaagggagatgca

SEQ ID NO: 58964 - DNA, 20 bp, synthetic construct
  misc_feature 1..20: note = chemically synthesized
  source 1..20: mol_type = other DNA
cctcagttcttgacgctagt

SEQ ID NO: 58965 - DNA, 20 bp, synthetic construct
  misc_feature 1..20: note = chemically synthesized
  source 1..20: mol_type = other DNA
ctgaggcactgaggtcactg

SEQ ID NO: 58966 - DNA, 20 bp, synthetic construct
  misc_feature 1..20: note = chemically synthesized
  source 1..20: mol_type = other DNA
gcaggatgaagacggagcca

SEQ ID NO: 58967 - DNA, 20 bp, synthetic construct
  misc_feature 1..20: note = chemically synthesized
  source 1..20: mol_type = other DNA
gagccaatgggttagaccag

SEQ ID NO: 58968 - DNA, 20 bp, synthetic construct
  misc_feature 1..20: note = chemically synthesized
  source 1..20: mol_type = other DNA
ccaaagttgcagcttgacca

SEQ ID NO: 58969 - DNA, 20 bp, synthetic construct
  misc_feature 1..20: note = chemically synthesized
  source 1..20: mol_type = other DNA
gcagcttgaccaaggggtca

SEQ ID NO: 58970 - DNA, 20 bp, synthetic construct
  misc_feature 1..20: note = chemically synthesized
  source 1..20: mol_type = other DNA
agaagcaagggccacagggc

SEQ ID NO: 58971 - DNA, 20 bp, synthetic construct
  misc_feature 1..20: note = chemically synthesized
  source 1..20: mol_type = other DNA
atttctcgcatccacaatat

SEQ ID NO: 58972 - DNA, 20 bp, synthetic construct
  misc_feature 1..20: note = chemically synthesized
  source 1..20: mol_type = other DNA
tgtcttcagaggtagcagaa

SEQ ID NO: 58973 - DNA, 20 bp, synthetic construct
  misc_feature 1..20: note = chemically synthesized
  source 1..20: mol_type = other DNA
ttatttcatgtctttgattt

SEQ ID NO: 58974 - DNA, 20 bp, synthetic construct
  misc_feature 1..20: note = chemically synthesized
  source 1..20: mol_type = other DNA
aatgaggtaataatctactt

SEQ ID NO: 58975 - DNA, 20 bp, synthetic construct
  misc_feature 1..20: note = chemically synthesized
  source 1..20: mol_type = other DNA
atctacttctgagtattggt

SEQ ID NO: 58976 - DNA, 20 bp, synthetic construct
  misc_feature 1..20: note = chemically synthesized
  source 1..20: mol_type = other DNA
ttctttttttttttttgaga

SEQ ID NO: 58977 - DNA, 20 bp, synthetic construct
  misc_feature 1..20: note = chemically synthesized
  source 1..20: mol_type = other DNA
tctcactctgtcgcctaggc

SEQ ID NO: 58978 - DNA, 20 bp, synthetic construct
  misc_feature 1..20: note = chemically synthesized
  source 1..20: mol_type = other DNA
ctcactgcaacctccacctc

SEQ ID NO: 58979 - DNA, 20 bp, synthetic construct
  misc_feature 1..20: note = chemically synthesized
  source 1..20: mol_type = other DNA
gattctcctgcctcagcctc

SEQ ID NO: 58980 - DNA, 20 bp, synthetic construct
  misc_feature 1..20: note = chemically synthesized
  source 1..20: mol_type = other DNA
gcctcagcctcctgagtagc

SEQ ID NO: 58981 - DNA, 20 bp, synthetic construct
  misc_feature 1..20: note = chemically synthesized
  source 1..20: mol_type = other DNA
tttgtattttttagtagaga

SEQ ID NO: 58982 - DNA, 20 bp, synthetic construct
  misc_feature 1..20: note = chemically synthesized
  source 1..20: mol_type = other DNA
gccttggcctcccaaagtgc

SEQ ID NO: 58983 - DNA, 20 bp, synthetic construct
  misc_feature 1..20: note = chemically synthesized
  source 1..20: mol_type = other DNA
gttcaataatacatatctca

SEQ ID NO: 58984 - DNA, 20 bp, synthetic construct
  misc_feature 1..20: note = chemically synthesized
  source 1..20: mol_type = other DNA
gttagaaggttctactggag

SEQ ID NO: 58985 - DNA, 20 bp, synthetic construct
  misc_feature 1..20: note = chemically synthesized
  source 1..20: mol_type = other DNA
actgttaggccactggtcca

SEQ ID NO: 58986 - DNA, 20 bp, synthetic construct
  misc_feature 1..20: note = chemically synthesized
  source 1..20: mol_type = other DNA
gatgatgatcctgaaaacat

SEQ ID NO: 58987 - DNA, 20 bp, synthetic construct
  misc_feature 1..20: note = chemically synthesized
  source 1..20: mol_type = other DNA
caaggcacttgcccctagct

SEQ ID NO: 58988 - DNA, 20 bp, synthetic construct
  misc_feature 1..20: note = chemically synthesized
  source 1..20: mol_type = other DNA
ggagcagtcccatgtagtag

SEQ ID NO: 58989 - DNA, 20 bp, synthetic construct
  misc_feature 1..20: note = chemically synthesized
  source 1..20: mol_type = other DNA
gtctatctctcctggctcct

SEQ ID NO: 58990 - DNA, 20 bp, synthetic construct
  misc_feature 1..20: note = chemically synthesized
  source 1..20: mol_type = other DNA
ccagctcgcaaagtcaccgt

SEQ ID NO: 58991 - DNA, 20 bp, synthetic construct
  misc_feature 1..20: note = chemically synthesized
  source 1..20: mol_type = other DNA
ccgtgagggtcttgtgtttg

SEQ ID NO: 58992 - DNA, 20 bp, synthetic construct
  misc_feature 1..20: note = chemically synthesized
  source 1..20: mol_type = other DNA
atggctgtctcctttatcca

SEQ ID NO: 58993 - DNA, 20 bp, synthetic construct
  misc_feature 1..20: note = chemically synthesized
  source 1..20: mol_type = other DNA
gggcccatgagcagtagctg

SEQ ID NO: 58994 - DNA, 20 bp, synthetic construct
  misc_feature 1..20: note = chemically synthesized
  source 1..20: mol_type = other DNA
ataataatagtgttttttta

SEQ ID NO: 58995 - DNA, 20 bp, synthetic construct
  misc_feature 1..20: note = chemically synthesized
  source 1..20: mol_type = other DNA
tttttttatggagttagcgt

SEQ ID NO: 58996 - DNA, 20 bp, synthetic construct
  misc_feature 1..20: note = chemically synthesized
  source 1..20: mol_type = other DNA
aattttcccttacctataat

SEQ ID NO: 58997 - DNA, 20 bp, synthetic construct
  misc_feature 1..20: note = chemically synthesized
  source 1..20: mol_type = other DNA
atattcttcttatagtgatt

SEQ ID NO: 58998 - DNA, 20 bp, synthetic construct
  misc_feature 1..20: note = chemically synthesized
  source 1..20: mol_type = other DNA
gtgattctggatattaaagt

SEQ ID NO: 58999 - DNA, 20 bp, synthetic construct
  misc_feature 1..20: note = chemically synthesized
  source 1..20: mol_type = other DNA
ccccacatagatcatctcag

SEQ ID NO: 59000 - DNA, 20 bp, synthetic construct
  misc_feature 1..20: note = chemically synthesized
  source 1..20: mol_type = other DNA
cagggttcaggaagataaag

SEQ ID NO: 59001 - DNA, 20 bp, synthetic construct
  misc_feature 1..20: note = chemically synthesized
  source 1..20: mol_type = other DNA
taaggaagaacactgggcaa

SEQ ID NO: 59002 - DNA, 20 bp, synthetic construct
  misc_feature 1..20: note = chemically synthesized
  source 1..20: mol_type = other DNA
ggttgtccaacgctgaaagt

SEQ ID NO: 59003 - DNA, 20 bp, synthetic construct
  misc_feature 1..20: note = chemically synthesized
  source 1..20: mol_type = other DNA
aggaatctaagcactagtct

SEQ ID NO: 59004 - DNA, 20 bp, synthetic construct
  misc_feature 1..20: note = chemically synthesized
  source 1..20: mol_type = other DNA
gatgctaggagggcctctgc

SEQ ID NO: 59005 - DNA, 20 bp, synthetic construct
  misc_feature 1..20: note = chemically synthesized
  source 1..20: mol_type = other DNA
ccagcaggaaacacttaaga

SEQ ID NO: 59006 - DNA, 20 bp, synthetic construct
  misc_feature 1..20: note = chemically synthesized
  source 1..20: mol_type = other DNA
gatttctacatgctggagcc

SEQ ID NO: 59007 - DNA, 20 bp, synthetic construct
  misc_feature 1..20: note = chemically synthesized
  source 1..20: mol_type = other DNA
ataatctgattcatgcaacc

SEQ ID NO: 59008 - DNA, 20 bp, synthetic construct
  misc_feature 1..20: note = chemically synthesized
  source 1..20: mol_type = other DNA
atttattgttgtgcatatga

SEQ ID NO: 59009 - DNA, 20 bp, synthetic construct
  misc_feature 1..20: note = chemically synthesized
  source 1..20: mol_type = other DNA
atagactttctcagagctat

SEQ ID NO: 59010 - DNA, 20 bp, synthetic construct
  misc_feature 1..20: note = chemically synthesized
  source 1..20: mol_type = other DNA
tctcagagctatatgagttt

SEQ ID NO: 59011 - DNA, 20 bp, synthetic construct
  misc_feature 1..20: note = chemically synthesized
  source 1..20: mol_type = other DNA
atcaagaccagccttttgct

SEQ ID NO: 59012 - DNA, 20 bp, synthetic construct
  misc_feature 1..20: note = chemically synthesized
  source 1..20: mol_type = other DNA
tcagggtagaaatcccctat

SEQ ID NO: 59013 - DNA, 20 bp, synthetic construct
  misc_feature 1..20: note = chemically synthesized
  source 1..20: mol_type = other DNA
ctatagggatttattcaatg

SEQ ID NO: 59014 - DNA, 20 bp, synthetic construct
  misc_feature 1..20: note = chemically synthesized
  source 1..20: mol_type = other DNA
tatgaaattcttacacacag

SEQ ID NO: 59015 - DNA, 20 bp, synthetic construct
  misc_feature 1..20: note = chemically synthesized
  source 1..20: mol_type = other DNA
cacagaagaatcttctaatc

SEQ ID NO: 59016 - DNA, 20 bp, synthetic construct
  misc_feature 1..20: note = chemically synthesized
  source 1..20: mol_type = other DNA
gtgtagtctttcctgatgtc

SEQ ID NO: 59017 - DNA, 20 bp, synthetic construct
  misc_feature 1..20: note = chemically synthesized
  source 1..20: mol_type = other DNA
catcccagagcaggacacag

SEQ ID NO: 59018 - DNA, 20 bp, synthetic construct
  misc_feature 1..20: note = chemically synthesized
  source 1..20: mol_type = other DNA
tagtcacttaggaaaaacag

SEQ ID NO: 59019 - DNA, 20 bp, synthetic construct
  misc_feature 1..20: note = chemically synthesized
  source 1..20: mol_type = other DNA
aggaaaaacagtggaatgca

SEQ ID NO: 59020 - DNA, 20 bp, synthetic construct
  misc_feature 1..20: note = chemically synthesized
  source 1..20: mol_type = other DNA
caaagagtaaaaaatgcttt

SEQ ID NO: 59021 - DNA, 20 bp, synthetic construct
  misc_feature 1..20: note = chemically synthesized
  source 1..20: mol_type = other DNA
gagtaaaaaatgctttctga

SEQ ID NO: 59022 - DNA, 20 bp, synthetic construct
  misc_feature 1..20: note = chemically synthesized
  source 1..20: mol_type = other DNA
tacatgtcaataaatattta

SEQ ID NO: 59023 - DNA, 20 bp, synthetic construct
  misc_feature 1..20: note = chemically synthesized
  source 1..20: mol_type = other DNA
tagtttatgtttgtgtgtgt

SEQ ID NO: 59024 - DNA, 20 bp, synthetic construct
  misc_feature 1..20: note = chemically synthesized
  source 1..20: mol_type = other DNA
ttttttaactgtagtaaaat

SEQ ID NO: 59025 - DNA, 20 bp, synthetic construct
  misc_feature 1..20: note = chemically synthesized
  source 1..20: mol_type = other DNA
taataatagtatctacctga

SEQ ID NO: 59026 - DNA, 20 bp, synthetic construct
  misc_feature 1..20: note = chemically synthesized
  source 1..20: mol_type = other DNA
gtatctacctgaaagaatcc

SEQ ID NO: 59027 - DNA, 20 bp, synthetic construct
  misc_feature 1..20: note = chemically synthesized
  source 1..20: mol_type = other DNA
ttttattattacagttaaag

SEQ ID NO: 59028 - DNA, 20 bp, synthetic construct
  misc_feature 1..20: note = chemically synthesized
  source 1..20: mol_type = other DNA
cactagttttcacctgcagc

SEQ ID NO: 59029 - DNA, 20 bp, synthetic construct
  misc_feature 1..20: note = chemically synthesized
  source 1..20: mol_type = other DNA
aaaatactagcaaacatttc

SEQ ID NO: 59030 - DNA, 20 bp, synthetic construct
  misc_feature 1..20: note = chemically synthesized
  source 1..20: mol_type = other DNA
tgggcagattgcttgagctc

SEQ ID NO: 59031 - DNA, 20 bp, synthetic construct
  misc_feature 1..20: note = chemically synthesized
  source 1..20: mol_type = other DNA
tacctgtggttccagctact

SEQ ID NO: 59032 - DNA, 20 bp, synthetic construct
  misc_feature 1..20: note = chemically synthesized
  source 1..20: mol_type = other DNA
ttttgccactacactcccat

SEQ ID NO: 59033 - DNA, 20 bp, synthetic construct
  misc_feature 1..20: note = chemically synthesized
  source 1..20: mol_type = other DNA
ctacactcccatttgggtga

SEQ ID NO: 59034 - DNA, 20 bp, synthetic construct
  misc_feature 1..20: note = chemically synthesized
  source 1..20: mol_type = other DNA
ccattttacagatgaagaaa

SEQ ID NO: 59035 - DNA, 20 bp, synthetic construct
  misc_feature 1..20: note = chemically synthesized
  source 1..20: mol_type = other DNA
catacaactactaagagaaa

SEQ ID NO: 59036 - DNA, 20 bp, synthetic construct
  misc_feature 1..20: note = chemically synthesized
  source 1..20: mol_type = other DNA
cccaagacttttataaagtc

SEQ ID NO: 59037 - DNA, 20 bp, synthetic construct
  misc_feature 1..20: note = chemically synthesized
  source 1..20: mol_type = other DNA
gacttttataaagtcaaggg

SEQ ID NO: 59038 - DNA, 20 bp, synthetic construct
  misc_feature 1..20: note = chemically synthesized
  source 1..20: mol_type = other DNA
tcaagggttgagtcactgaa

SEQ ID NO: 59039 - DNA, 20 bp, synthetic construct
  misc_feature 1..20: note = chemically synthesized
  source 1..20: mol_type = other DNA
gagtcactgaaatgagttat

SEQ ID NO: 59040 - DNA, 20 bp, synthetic construct
  misc_feature 1..20: note = chemically synthesized
  source 1..20: mol_type = other DNA
tattgggatggctgtgtggg

SEQ ID NO: 59041 - DNA, 20 bp, synthetic construct
  misc_feature 1..20: note = chemically synthesized
  source 1..20: mol_type = other DNA
gttctttcctaaaggtatgt

SEQ ID NO: 59042 - DNA, 20 bp, synthetic construct
  misc_feature 1..20: note = chemically synthesized
  source 1..20: mol_type = other DNA
aaatctgacactcagtgggc

SEQ ID NO: 59043 - DNA, 20 bp, synthetic construct
  misc_feature 1..20: note = chemically synthesized
  source 1..20: mol_type = other DNA
cagtgggcctgggtgaaggt

SEQ ID NO: 59044 - DNA, 20 bp, synthetic construct
  misc_feature 1..20: note = chemically synthesized
  source 1..20: mol_type = other DNA
tgaaggtgagaattttattg

SEQ ID NO: 59045 - DNA, 20 bp, synthetic construct
  misc_feature 1..20: note = chemically synthesized
  source 1..20: mol_type = other DNA
tggggacatcttgccagtca

SEQ ID NO: 59046 - DNA, 20 bp, synthetic construct
  misc_feature 1..20: note = chemically synthesized
  source 1..20: mol_type = other DNA
ttcaatttccttctcagtct

SEQ ID NO: 59047 - DNA, 20 bp, synthetic construct
  misc_feature 1..20: note = chemically synthesized
  source 1..20: mol_type = other DNA
agagaaactgaggctcagag

SEQ ID NO: 59048 - DNA, 20 bp, synthetic construct
  misc_feature 1..20: note = chemically synthesized
  source 1..20: mol_type = other DNA
tgacatggaaatgatcaggc

SEQ ID NO: 59049 - DNA, 20 bp, synthetic construct
  misc_feature 1..20: note = chemically synthesized
  source 1..20: mol_type = other DNA
taaataagcaaaccctgctc

SEQ ID NO: 59050 - DNA, 20 bp, synthetic construct
  misc_feature 1..20: note = chemically synthesized
  source 1..20: mol_type = other DNA
ccctgctcgggaatgggagg

SEQ ID NO: 59051 - DNA, 20 bp, synthetic construct
  misc_feature 1..20: note = chemically synthesized
  source 1..20: mol_type = other DNA
ggaatgggagggagagtctc

SEQ ID NO: 59052 - DNA, 20 bp, synthetic construct
  misc_feature 1..20: note = chemically synthesized
  source 1..20: mol_type = other DNA
ccctgcccattgctgggcct

SEQ ID NO: 59053 - DNA, 20 bp, synthetic construct
  misc_feature 1..20: note = chemically synthesized
  source 1..20: mol_type = other DNA
gcccattgctgggccttgga

SEQ ID NO: 59054 - DNA, 20 bp, synthetic construct
  misc_feature 1..20: note = chemically synthesized
  source 1..20: mol_type = other DNA
ggcaagccatctcatagctg

SEQ ID NO: 59055 - DNA, 20 bp, synthetic construct
  misc_feature 1..20: note = chemically synthesized
  source 1..20: mol_type = other DNA
cttattctcacactaagaaa

SEQ ID NO: 59056 - DNA, 20 bp, synthetic construct
  misc_feature 1..20: note = chemically synthesized
  source 1..20: mol_type = other DNA
ctgcgtcccctcttgtgtac

SEQ ID NO: 59057 - DNA, 20 bp, synthetic construct
  misc_feature 1..20: note = chemically synthesized
  source 1..20: mol_type = other DNA
aatttcacatcaatgtctat

SEQ ID NO: 59058 - DNA, 20 bp, synthetic construct
  misc_feature 1..20: note = chemically synthesized
  source 1..20: mol_type = other DNA
tctaagaaagttacaacatg

SEQ ID NO: 59059 - DNA, 20 bp, synthetic construct
  misc_feature 1..20: note = chemically synthesized
  source 1..20: mol_type = other DNA
tcttgaggcctcagctttct

SEQ ID NO: 59060 - DNA, 20 bp, synthetic construct
  misc_feature 1..20: note = chemically synthesized
  source 1..20: mol_type = other DNA
tttcactctgctgtccaggc

SEQ ID NO: 59061 - DNA, 20 bp, synthetic construct
  misc_feature 1..20: note = chemically synthesized
  source 1..20: mol_type = other DNA
gccttgacctcctgagctca

SEQ ID NO: 59062 - DNA, 20 bp, synthetic construct
  misc_feature 1..20: note = chemically synthesized
  source 1..20: mol_type = other DNA
gatcctcccatttcggcctc

SEQ ID NO: 59063 - DNA, 20 bp, synthetic construct
  misc_feature 1..20: note = chemically synthesized
  source 1..20: mol_type = other DNA
cgaggtcttgctatgttgtc

SEQ ID NO: 59064 - DNA, 20 bp, synthetic construct
  misc_feature 1..20: note = chemically synthesized
  source 1..20: mol_type = other DNA
cacttctacctctcaagtgc

SEQ ID NO: 59065 - DNA, 20 bp, synthetic construct
  misc_feature 1..20: note = chemically synthesized
  source 1..20: mol_type = other DNA
ctaattcctgacactacttg

SEQ ID NO: 59066 - DNA, 20 bp, synthetic construct
  misc_feature 1..20: note = chemically synthesized
  source 1..20: mol_type = other DNA
acacatctttaatataccaa

SEQ ID NO: 59067 - DNA, 20 bp, synthetic construct
  misc_feature 1..20: note = chemically synthesized
  source 1..20: mol_type = other DNA
atataccaaatgggtgactg

SEQ ID NO: 59068 - DNA, 20 bp, synthetic construct
  misc_feature 1..20: note = chemically synthesized
  source 1..20: mol_type = other DNA
tgtagggttgagagggagat

SEQ ID NO: 59069 - DNA, 20 bp, synthetic construct
  misc_feature 1..20: note = chemically synthesized
  source 1..20: mol_type = other DNA
gtgcaaaaagggaactacct

SEQ ID NO: 59070 - DNA, 20 bp, synthetic construct
  misc_feature 1..20: note = chemically synthesized
  source 1..20: mol_type = other DNA
cttccaaggtctgttgcatc

SEQ ID NO: 59071 - DNA, 20 bp, synthetic construct
  misc_feature 1..20: note = chemically synthesized
  source 1..20: mol_type = other DNA
aggtctgttgcatcaagagt

SEQ ID NO: 59072 - DNA, 20 bp, synthetic construct
  misc_feature 1..20: note = chemically synthesized
  source 1..20: mol_type = other DNA
gaattgaaggtcttagaagc

SEQ ID NO: 59073 - DNA, 20 bp, synthetic construct
  misc_feature 1..20: note = chemically synthesized
  source 1..20: mol_type = other DNA
gatctagtcatctacaaagc

SEQ ID NO: 59074 - DNA, 20 bp, synthetic construct
  misc_feature 1..20: note = chemically synthesized
  source 1..20: mol_type = other DNA
tcatctacaaagcatgagtt

SEQ ID NO: 59075 - DNA, 20 bp, synthetic construct
  misc_feature 1..20: note = chemically synthesized
  source 1..20: mol_type = other DNA
cttttgacttcctttgacat

SEQ ID NO: 59076 - DNA, 20 bp, synthetic construct
  misc_feature 1..20: note = chemically synthesized
  source 1..20: mol_type = other DNA
ttgacatcagaatataacct

SEQ ID NO: 59077 - DNA, 20 bp, synthetic construct
  misc_feature 1..20: note = chemically synthesized
  source 1..20: mol_type = other DNA
gtgctcagggctgtgtgtgt

SEQ ID NO: 59078 - DNA, 20 bp, synthetic construct
  misc_feature 1..20: note = chemically synthesized
  source 1..20: mol_type = other DNA
gtttgaaatgaaactaaagt

SEQ ID NO: 59079 - DNA, 20 bp, synthetic construct
  misc_feature 1..20: note = chemically synthesized
  source 1..20: mol_type = other DNA
caacatcctcataataactt

SEQ ID NO: 59080 - DNA, 20 bp, synthetic construct
  misc_feature 1..20: note = chemically synthesized
  source 1..20: mol_type = other DNA
aattttataaaatatcacaa

SEQ ID NO: 59081 - DNA, 20 bp, synthetic construct
  misc_feature 1..20: note = chemically synthesized
  source 1..20: mol_type = other DNA
cacaatagggtcatgttcag

SEQ ID NO: 59082 - DNA, 20 bp, synthetic construct
  misc_feature 1..20: note = chemically synthesized
  source 1..20: mol_type = other DNA
aaaattagacaagccatagt

SEQ ID NO: 59083 - DNA, 20 bp, synthetic construct
  misc_feature 1..20: note = chemically synthesized
  source 1..20: mol_type = other DNA
catagtttgagtttaccctt

SEQ ID NO: 59084 - DNA, 20 bp, synthetic construct
  misc_feature 1..20: note = chemically synthesized
  source 1..20: mol_type = other DNA
aaggcaatttaattatcttt

SEQ ID NO: 59085 - DNA, 20 bp, synthetic construct
  misc_feature 1..20: note = chemically synthesized
  source 1..20: mol_type = other DNA
tatagttcctagcacaaagt

SEQ ID NO: 59086 - DNA, 20 bp, synthetic construct
  misc_feature 1..20: note = chemically synthesized
  source 1..20: mol_type = other DNA
tgtatttatctgttattaat

SEQ ID NO: 59087 - DNA, 20 bp, synthetic construct
  misc_feature 1..20: note = chemically synthesized
  source 1..20: mol_type = other DNA
actatgaagcaggtatttat

SEQ ID NO: 59088 - DNA, 20 bp, synthetic construct
  misc_feature 1..20: note = chemically synthesized
  source 1..20: mol_type = other DNA
tatttatttgagttttccaa

SEQ ID NO: 59089 - DNA, 20 bp, synthetic construct
  misc_feature 1..20: note = chemically synthesized
  source 1..20: mol_type = other DNA
accagccttagctgtctgct

SEQ ID NO: 59090 - DNA, 20 bp, synthetic construct
  misc_feature 1..20: note = chemically synthesized
  source 1..20: mol_type = other DNA
aaatgagagagagaaatggg

SEQ ID NO: 59091 - DNA, 20 bp, synthetic construct
  misc_feature 1..20: note = chemically synthesized
  source 1..20: mol_type = other DNA
gagggtagaaggaaggaaga

SEQ ID NO: 59092 - DNA, 20 bp, synthetic construct
  misc_feature 1..20: note = chemically synthesized
  source 1..20: mol_type = other DNA
aaagagctctttccattaca

SEQ ID NO: 59093 - DNA, 20 bp, synthetic construct
  misc_feature 1..20: note = chemically synthesized
  source 1..20: mol_type = other DNA
ttattattagaaatggggaa

SEQ ID NO: 59094 - DNA, 20 bp, synthetic construct
  misc_feature 1..20: note = chemically synthesized
  source 1..20: mol_type = other DNA
gggaaactggagaaactggg

SEQ ID NO: 59095 - DNA, 20 bp, synthetic construct
  misc_feature 1..20: note = chemically synthesized
  source 1..20: mol_type = other DNA
cagcttcagctacctctcta

SEQ ID NO: 59096 - DNA, 20 bp, synthetic construct
  misc_feature 1..20: note = chemically synthesized
  source 1..20: mol_type = other DNA
ctaaactgaaattgctatag

SEQ ID NO: 59097 - DNA, 20 bp, synthetic construct
  misc_feature 1..20: note = chemically synthesized
  source 1..20: mol_type = other DNA
gtttacagatattttccaca

SEQ ID NO: 59098 - DNA, 20 bp, synthetic construct
  misc_feature 1..20: note = chemically synthesized
  source 1..20: mol_type = other DNA
atattttccacaaagagtaa

SEQ ID NO: 59099 - DNA, 20 bp, synthetic construct
  misc_feature 1..20: note = chemically synthesized
  source 1..20: mol_type = other DNA
catattatgacgaacaacat

SEQ ID NO: 59100 - DNA, 20 bp, synthetic construct
  misc_feature 1..20: note = chemically synthesized
  source 1..20: mol_type = other DNA
gaaagaggagccatttgatc

SEQ ID NO: 59101 - DNA, 20 bp, synthetic construct
  misc_feature 1..20: note = chemically synthesized
  source 1..20: mol_type = other DNA
taaaggagaacctaaagagg

SEQ ID NO: 59102 - DNA, 20 bp, synthetic construct
  misc_feature 1..20: note = chemically synthesized
  source 1..20: mol_type = other DNA
aatatccttttgactgtgga

SEQ ID NO: 59103 - DNA, 20 bp, synthetic construct
  misc_feature 1..20: note = chemically synthesized
  source 1..20: mol_type = other DNA
agaggaacattggcttggtg

SEQ ID NO: 59104 - DNA, 20 bp, synthetic construct
  misc_feature 1..20: note = chemically synthesized
  source 1..20: mol_type = other DNA
atatctgtcctgatgttgtc

SEQ ID NO: 59105 - DNA, 20 bp, synthetic construct
  misc_feature 1..20: note = chemically synthesized
  source 1..20: mol_type = other DNA
ataacgtagagaaaacagga

SEQ ID NO: 59106 - DNA, 20 bp, synthetic construct
  misc_feature 1..20: note = chemically synthesized
  source 1..20: mol_type = other DNA
gacaaagaggcatcaaagat

SEQ ID NO: 59107 - DNA, 20 bp, synthetic construct
  misc_feature 1..20: note = chemically synthesized
  source 1..20: mol_type = other DNA
tcaaagatagggatgtttgt

SEQ ID NO: 59108 - DNA, 20 bp, synthetic construct
  misc_feature 1..20: note = chemically synthesized
  source 1..20: mol_type = other DNA
ttttttgcgttagtcaccgt

SEQ ID NO: 59109 - DNA, 20 bp, synthetic construct
  misc_feature 1..20: note = chemically synthesized
  source 1..20: mol_type = other DNA
ataataattgtgtgtattca

SEQ ID NO: 59110 - DNA, 20 bp, synthetic construct
  misc_feature 1..20: note = chemically synthesized
  source 1..20: mol_type = other DNA
agttaaaatgtcatatgtgt

SEQ ID NO: 59111 - DNA, 20 bp, synthetic construct
  misc_feature 1..20: note = chemically synthesized
  source 1..20: mol_type = other DNA
agtaatagatttagaaaaca

SEQ ID NO: 59112 - DNA, 20 bp, synthetic construct
  misc_feature 1..20: note = chemically synthesized
  source 1..20: mol_type = other DNA
tgaatgattccttgcaaatc

SEQ ID NO: 59113 - DNA, 20 bp, synthetic construct
  misc_feature 1..20: note = chemically synthesized
  source 1..20: mol_type = other DNA
cttgatcacttttggaggtc

SEQ ID NO: 59114 - DNA, 20 bp, synthetic construct
  misc_feature 1..20: note = chemically synthesized
  source 1..20: mol_type = other DNA
aacttgaaattgcattatag

SEQ ID NO: 59115 - DNA, 20 bp, synthetic construct
  misc_feature 1..20: note = chemically synthesized
  source 1..20: mol_type = other DNA
attatagcagaatgtaggcc

SEQ ID NO: 59116 - DNA, 20 bp, synthetic construct
  misc_feature 1..20: note = chemically synthesized
  source 1..20: mol_type = other DNA
tagcagaatgtaggccttga

SEQ ID NO: 59117 - DNA, 20 bp, synthetic construct
  misc_feature 1..20: note = chemically synthesized
  source 1..20: mol_type = other DNA
taagcagtttcatatgaaac

SEQ ID NO: 59118 - DNA, 20 bp, synthetic construct
  misc_feature 1..20: note = chemically synthesized
  source 1..20: mol_type = other DNA
acagtcagatgttcatggtc

SEQ ID NO: 59119 - DNA, 20 bp, synthetic construct
  misc_feature 1..20: note = chemically synthesized
  source 1..20: mol_type = other DNA
tctcctccaagcagtgggcc

SEQ ID NO: 59120 - DNA, 20 bp, synthetic construct
  misc_feature 1..20: note = chemically synthesized
  source 1..20: mol_type = other DNA
tgtgattgactttatcattt

SEQ ID NO: 59121 - DNA, 20 bp, synthetic construct
  misc_feature 1..20: note = chemically synthesized
  source 1..20: mol_type = other DNA
gccacatagaggaagggaaa

SEQ ID NO: 59122 - DNA, 20 bp, synthetic construct
  misc_feature 1..20: note = chemically synthesized
  source 1..20: mol_type = other DNA
tagaagggcactctgcctta

SEQ ID NO: 59123 - DNA, 20 bp, synthetic construct
  misc_feature 1..20: note = chemically synthesized
  source 1..20: mol_type = other DNA
tgtttctgacatactgtgtc

SEQ ID NO: 59124 - DNA, 20 bp, synthetic construct
  misc_feature 1..20: note = chemically synthesized
  source 1..20: mol_type = other DNA
acatactgtgtccggaattg

SEQ ID NO: 59125 - DNA, 20 bp, synthetic construct
  misc_feature 1..20: note = chemically synthesized
  source 1..20: mol_type = other DNA
ttcttggtttcactgacttc

SEQ ID NO: 59126 - DNA, 20 bp, synthetic construct
  misc_feature 1..20: note = chemically synthesized
  source 1..20: mol_type = other DNA
tgaagccggggaccctcgtg

SEQ ID NO: 59127 - DNA, 20 bp, synthetic construct
  misc_feature 1..20: note = chemically synthesized
  source 1..20: mol_type = other DNA
gttcttaaaggctgcgtgtg

SEQ ID NO: 59128 - DNA, 20 bp, synthetic construct
  misc_feature 1..20: note = chemically synthesized
  source 1..20: mol_type = other DNA
gagtttgttcgttctgatgt

SEQ ID NO: 59129 - DNA, 20 bp, synthetic construct
  misc_feature 1..20: note = chemically synthesized
  source 1..20: mol_type = other DNA
ttctgatgtttggatgtgtt

SEQ ID NO: 59130 - DNA, 20 bp, synthetic construct
  misc_feature 1..20: note = chemically synthesized
  source 1..20: mol_type = other DNA
ttcggagtttcttccttctg

SEQ ID NO: 59131 - DNA, 20 bp, synthetic construct
  misc_feature 1..20: note = chemically synthesized
  source 1..20: mol_type = other DNA
gttcgtggtctcgctggctc

SEQ ID NO: 59132 - DNA, 20 bp, synthetic construct
  misc_feature 1..20: note = chemically synthesized
  source 1..20: mol_type = other DNA
agctcttaaggcggcgcctc

SEQ ID NO: 59133 - DNA, 20 bp, synthetic construct
  misc_feature 1..20: note = chemically synthesized
  source 1..20: mol_type = other DNA
ggagttgttcgttcctcccg

SEQ ID NO: 59134 - DNA, 20 bp, synthetic construct
  misc_feature 1..20: note = chemically synthesized
  source 1..20: mol_type = other DNA
ttcgtggtctcgctggcttc

SEQ ID NO: 59135 - DNA, 20 bp, synthetic construct
  misc_feature 1..20: note = chemically synthesized
  source 1..20: mol_type = other DNA
cagtgtggaaggggacccga

SEQ ID NO: 59136 - DNA, 20 bp, synthetic construct
  misc_feature 1..20: note = chemically synthesized
  source 1..20: mol_type = other DNA
cccaccagattagctagata

SEQ ID NO: 59137 - DNA, 20 bp, synthetic construct
  misc_feature 1..20: note = chemically synthesized
  source 1..20: mol_type = other DNA
aaggttctccaagtccccac

SEQ ID NO: 59138 - DNA, 20 bp, synthetic construct
  misc_feature 1..20: note = chemically synthesized
  source 1..20: mol_type = other DNA
cccaccagagtagctagata

SEQ ID NO: 59139 - DNA, 20 bp, synthetic construct
  misc_feature 1..20: note = chemically synthesized
  source 1..20: mol_type = other DNA
cacaaaccctgagctagaca

SEQ ID NO: 59140 - DNA, 20 bp, synthetic construct
  misc_feature 1..20: note = chemically synthesized
  source 1..20: mol_type = other DNA
cttgagctagatacagactg

SEQ ID NO: 59141 - DNA, 20 bp, synthetic construct
  misc_feature 1..20: note = chemically synthesized
  source 1..20: mol_type = other DNA
aaggttctccacgtccccac

SEQ ID NO: 59142 - DNA, 20 bp, synthetic construct
  misc_feature 1..20: note = chemically synthesized
  source 1..20: mol_type = other DNA
cccaccagagtagctagata

SEQ ID NO: 59143 - DNA, 20 bp, synthetic construct
  misc_feature 1..20: note = chemically synthesized
  source 1..20: mol_type = other DNA
cacaaaccctgagctagaca

SEQ ID NO: 59144 - DNA, 20 bp, synthetic construct
  misc_feature 1..20: note = chemically synthesized
  source 1..20: mol_type = other DNA
aaggttctccaaggccccac

SEQ ID NO: 59145 - DNA, 20 bp, synthetic construct
  misc_feature 1..20: note = chemically synthesized
  source 1..20: mol_type = other DNA
gccccaccagagtagctaga

SEQ ID NO: 59146 - DNA, 20 bp, synthetic construct
  misc_feature 1..20: note = chemically synthesized
  source 1..20: mol_type = other DNA
cacaaaccctgagctagaca

SEQ ID NO: 59147 - DNA, 20 bp, synthetic construct
  misc_feature 1..20: note = chemically synthesized
  source 1..20: mol_type = other DNA
tacaaaccttgagctagata

SEQ ID NO: 59148 - DNA, 20 bp, synthetic construct
  misc_feature 1..20: note = chemically synthesized
  source 1..20: mol_type = other DNA
acaatcccttatctagacat

SEQ ID NO: 59149 - DNA, 20 bp, synthetic construct
  misc_feature 1..20: note = chemically synthesized
  source 1..20: mol_type = other DNA
agcctagccggcttcaccca

SEQ ID NO: 59150 - DNA, 20 bp, synthetic construct
  misc_feature 1..20: note = chemically synthesized
  source 1..20: mol_type = other DNA
gcgcccgcactcttcagccc

SEQ ID NO: 59151 - DNA, 20 bp, synthetic construct
  misc_feature 1..20: note = chemically synthesized
  source 1..20: mol_type = other DNA
cccttgggtggtcgatggga

SEQ ID NO: 59152 - DNA, 20 bp, synthetic construct
  misc_feature 1..20: note = chemically synthesized
  source 1..20: mol_type = other DNA
aaggcagctaaggcccggcg

SEQ ID NO: 59153 - DNA, 20 bp, synthetic construct
  misc_feature 1..20: note = chemically synthesized
  source 1..20: mol_type = other DNA
ggtggggccggctggcggct

SEQ ID NO: 59154 - DNA, 20 bp, synthetic construct
  misc_feature 1..20: note = chemically synthesized
  source 1..20: mol_type = other DNA
ccggctggcggctccgagtg

SEQ ID NO: 59155 - DNA, 20 bp, synthetic construct
  misc_feature 1..20: note = chemically synthesized
  source 1..20: mol_type = other DNA
cctgtgcttccaaaaataac

SEQ ID NO: 59156 - DNA, 20 bp, synthetic construct
  misc_feature 1..20: note = chemically synthesized
  source 1..20: mol_type = other DNA
taagcagtaaaaataagacc

SEQ ID NO: 59157 - DNA, 20 bp, synthetic construct
  misc_feature 1..20: note = chemically synthesized
  source 1..20: mol_type = other DNA
ccaaatgctgtaatacttca

SEQ ID NO: 59158 - DNA, 20 bp, synthetic construct
  misc_feature 1..20: note = chemically synthesized
  source 1..20: mol_type = other DNA
gctttaaaaaatgtttcctc

SEQ ID NO: 59159 - DNA, 20 bp, synthetic construct
  misc_feature 1..20: note = chemically synthesized
  source 1..20: mol_type = other DNA
gtattctagagccaaatatc

SEQ ID NO: 59160 - DNA, 20 bp, synthetic construct
  misc_feature 1..20: note = chemically synthesized
  source 1..20: mol_type = other DNA
ctagagccaaatatcatgag

SEQ ID NO: 59161 - DNA, 20 bp, synthetic construct
  misc_feature 1..20: note = chemically synthesized
  source 1..20: mol_type = other DNA
agttagtagccacttcatct

SEQ ID NO: 59162 - DNA, 20 bp, synthetic construct
  misc_feature 1..20: note = chemically synthesized
  source 1..20: mol_type = other DNA
gcctcagtttcctcctctta

SEQ ID NO: 59163 - DNA, 20 bp, synthetic construct
  misc_feature 1..20: note = chemically synthesized
  source 1..20: mol_type = other DNA
ttacaatagtacttgaggca

SEQ ID NO: 59164 - DNA, 20 bp, synthetic construct
  misc_feature 1..20: note = chemically synthesized
  source 1..20: mol_type = other DNA
acttgaggcacagagttact

SEQ ID NO: 59165 - DNA, 20 bp, synthetic construct
  misc_feature 1..20: note = chemically synthesized
  source 1..20: mol_type = other DNA
actatcctagtgtgtagatt

SEQ ID NO: 59166 - DNA, 20 bp, synthetic construct
  misc_feature 1..20: note = chemically synthesized
  source 1..20: mol_type = other DNA
caaagacatgaaggtcacat

SEQ ID NO: 59167 - DNA, 20 bp, synthetic construct
  misc_feature 1..20: note = chemically synthesized
  source 1..20: mol_type = other DNA
ggtcacatatgggtagacat

SEQ ID NO: 59168 - DNA, 20 bp, synthetic construct
  misc_feature 1..20: note = chemically synthesized
  source 1..20: mol_type = other DNA
atagatgagatgacattgtc

SEQ ID NO: 59169 - DNA, 20 bp, synthetic construct
  misc_feature 1..20: note = chemically synthesized
  source 1..20: mol_type = other DNA
atgacattgtcaaggattac

SEQ ID NO: 59170 - DNA, 20 bp, synthetic construct
  misc_feature 1..20: note = chemically synthesized
  source 1..20: mol_type = other DNA
tggcagaaacattttttcaa

SEQ ID NO: 59171 - DNA, 20 bp, synthetic construct
  misc_feature 1..20: note = chemically synthesized
  source 1..20: mol_type = other DNA
tgctgctttttgactcagag

SEQ ID NO: 59172 - DNA, 20 bp, synthetic construct
  misc_feature 1..20: note = chemically synthesized
  source 1..20: mol_type = other DNA
gtatttagaaggctttggag

SEQ ID NO: 59173 - DNA, 20 bp, synthetic construct
  misc_feature 1..20: note = chemically synthesized
  source 1..20: mol_type = other DNA
aatgtacatatatttttgac

SEQ ID NO: 59174 - DNA, 20 bp, synthetic construct
  misc_feature 1..20: note = chemically synthesized
  source 1..20: mol_type = other DNA
agatgtttatagtgataagt

SEQ ID NO: 59175 - DNA, 20 bp, synthetic construct
  misc_feature 1..20: note = chemically synthesized
  source 1..20: mol_type = other DNA
ttattttatgtgaagaaact

SEQ ID NO: 59176 - DNA, 20 bp, synthetic construct
  misc_feature 1..20: note = chemically synthesized
  source 1..20: mol_type = other DNA
atgtgaagaaactcagaata

SEQ ID NO: 59177 - DNA, 20 bp, synthetic construct
  misc_feature 1..20: note = chemically synthesized
  source 1..20: mol_type = other DNA
tctcaaattatcacttttat

SEQ ID NO: 59178 - DNA, 20 bp, synthetic construct
  misc_feature 1..20: note = chemically synthesized
  source 1..20: mol_type = other DNA
atctcttctcattttctatc

SEQ ID NO: 59179 - DNA, 20 bp, synthetic construct
  misc_feature 1..20: note = chemically synthesized
  source 1..20: mol_type = other DNA
tttagattaaaacatctaac

SEQ ID NO: 59180 - DNA, 20 bp, synthetic construct
  misc_feature 1..20: note = chemically synthesized
  source 1..20: mol_type = other DNA
acattagttatctcttacat

SEQ ID NO: 59181 - DNA, 20 bp, synthetic construct
  misc_feature 1..20: note = chemically synthesized
  source 1..20: mol_type = other DNA
catttcaacctacacaaatt

SEQ ID NO: 59182 - DNA, 20 bp, synthetic construct
  misc_feature 1..20: note = chemically synthesized
  source 1..20: mol_type = other DNA
gctacacagctgtttaaatt

SEQ ID NO: 59183 - DNA, 20 bp, synthetic construct
  misc_feature 1..20: note = chemically synthesized
  source 1..20: mol_type = other DNA
taggcatttaataaattttg

SEQ ID NO: 59184 - DNA, 20 bp, synthetic construct
  misc_feature 1..20: note = chemically synthesized
  source 1..20: mol_type = other DNA
cactatgatacctacttatt

SEQ ID NO: 59185 - DNA, 20 bp, synthetic construct
  misc_feature 1..20: note = chemically synthesized
  source 1..20: mol_type = other DNA
cctaggcacatgaaacactt

SEQ ID NO: 59186 - DNA, 20 bp, synthetic construct
  misc_feature 1..20: note = chemically synthesized
  source 1..20: mol_type = other DNA
catgcagaaagaagcttaat

SEQ ID NO: 59187 - DNA, 20 bp, synthetic construct
  misc_feature 1..20: note = chemically synthesized
  source 1..20: mol_type = other DNA
aacatcctttccctttctgt

SEQ ID NO: 59188 - DNA, 20 bp, synthetic construct
  misc_feature 1..20: note = chemically synthesized
  source 1..20: mol_type = other DNA
cacctgccttcatccatccc

SEQ ID NO: 59189 - DNA, 20 bp, synthetic construct
  misc_feature 1..20: note = chemically synthesized
  source 1..20: mol_type = other DNA
catcccttggatatgatacc

SEQ ID NO: 59190 - DNA, 20 bp, synthetic construct
  misc_feature 1..20: note = chemically synthesized
  source 1..20: mol_type = other DNA
cacatattgtgtttctatgg

SEQ ID NO: 59191 - DNA, 20 bp, synthetic construct
  misc_feature 1..20: note = chemically synthesized
  source 1..20: mol_type = other DNA
aggttctacattgtgtggtt

SEQ ID NO: 59192 - DNA, 20 bp, synthetic construct
  misc_feature 1..20: note = chemically synthesized
  source 1..20: mol_type = other DNA
cagtctcttcatgtgtagtc

SEQ ID NO: 59193 - DNA, 20 bp, synthetic construct
  misc_feature 1..20: note = chemically synthesized
  source 1..20: mol_type = other DNA
cctcttaagacactagcaac

SEQ ID NO: 59194 - DNA, 20 bp, synthetic construct
  misc_feature 1..20: note = chemically synthesized
  source 1..20: mol_type = other DNA
attatatactgaactcatgt

SEQ ID NO: 59195 - DNA, 20 bp, synthetic construct
  misc_feature 1..20: note = chemically synthesized
  source 1..20: mol_type = other DNA
gtatatcttccttgtaggta

SEQ ID NO: 59196 - DNA, 20 bp, synthetic construct
  misc_feature 1..20: note = chemically synthesized
  source 1..20: mol_type = other DNA
ttccttattggtcaatactt

SEQ ID NO: 59197 - DNA, 20 bp, synthetic construct
  misc_feature 1..20: note = chemically synthesized
  source 1..20: mol_type = other DNA
tgataataatgccaagaggc

SEQ ID NO: 59198 - DNA, 20 bp, synthetic construct
  misc_feature 1..20: note = chemically synthesized
  source 1..20: mol_type = other DNA
aggctggggtgagctataag

SEQ ID NO: 59199 - DNA, 20 bp, synthetic construct
  misc_feature 1..20: note = chemically synthesized
  source 1..20: mol_type = other DNA
aggctaatcagtacagcaag

SEQ ID NO: 59200 - DNA, 20 bp, synthetic construct
  misc_feature 1..20: note = chemically synthesized
  source 1..20: mol_type = other DNA
taatcagtacagcaagagga

SEQ ID NO: 59201 - DNA, 20 bp, synthetic construct
  misc_feature 1..20: note = chemically synthesized
  source 1..20: mol_type = other DNA
agataaagggaacggcgtgg

SEQ ID NO: 59202 - DNA, 20 bp, synthetic construct
  misc_feature 1..20: note = chemically synthesized
  source 1..20: mol_type = other DNA
cgtgggagggtgtttcctga

SEQ ID NO: 59203 - DNA, 20 bp, synthetic construct
  misc_feature 1..20: note = chemically synthesized
  source 1..20: mol_type = other DNA
gaatattcatgagacaaaca

SEQ ID NO: 59204 - DNA, 20 bp, synthetic construct
  misc_feature 1..20: note = chemically synthesized
  source 1..20: mol_type = other DNA
acagagaataaagaaatgaa

SEQ ID NO: 59205 - DNA, 20 bp, synthetic construct
  misc_feature 1..20: note = chemically synthesized
  source 1..20: mol_type = other DNA
aagtgatttctagaaagtgc

SEQ ID NO: 59206 - DNA, 20 bp, synthetic construct
  misc_feature 1..20: note = chemically synthesized
  source 1..20: mol_type = other DNA
aaagacctggcacttaaaat

SEQ ID NO: 59207 - DNA, 20 bp, synthetic construct
  misc_feature 1..20: note = chemically synthesized
  source 1..20: mol_type = other DNA
ctggctgagagaaatatctc

SEQ ID NO: 59208 - DNA, 20 bp, synthetic construct
  misc_feature 1..20: note = chemically synthesized
  source 1..20: mol_type = other DNA
aatggccatgttccaggctt

SEQ ID NO: 59209 - DNA, 20 bp, synthetic construct
  misc_feature 1..20: note = chemically synthesized
  source 1..20: mol_type = other DNA
tgtccctatcattaggaggc

SEQ ID NO: 59210 - DNA, 20 bp, synthetic construct
  misc_feature 1..20: note = chemically synthesized
  source 1..20: mol_type = other DNA
tcattaggaggccagggtgg

SEQ ID NO: 59211 - DNA, 20 bp, synthetic construct
  misc_feature 1..20: note = chemically synthesized
  source 1..20: mol_type = other DNA
tgggaggattgcttgaggtt

SEQ ID NO: 59212 - DNA, 20 bp, synthetic construct
  misc_feature 1..20: note = chemically synthesized
  source 1..20: mol_type = other DNA
tactcaaaaagctgaggaag

SEQ ID NO: 59213 - DNA, 20 bp, synthetic construct
  misc_feature 1..20: note = chemically synthesized
  source 1..20: mol_type = other DNA
gaagaaggattgcttgagcc

SEQ ID NO: 59214 - DNA, 20 bp, synthetic construct
  misc_feature 1..20: note = chemically synthesized
  source 1..20: mol_type = other DNA
aggactgcattaataaattt

SEQ ID NO: 59215 - DNA, 20 bp, synthetic construct
  misc_feature 1..20: note = chemically synthesized
  source 1..20: mol_type = other DNA
ttaataaatttgggggttta

SEQ ID NO: 59216 - DNA, 20 bp, synthetic construct
  misc_feature 1..20: note = chemically synthesized
  source 1..20: mol_type = other DNA
actaaactcacagtatgaca

SEQ ID NO: 59217 - DNA, 20 bp, synthetic construct
  misc_feature 1..20: note = chemically synthesized
  source 1..20: mol_type = other DNA
agtatggcaaacttgtcagt

SEQ ID NO: 59218 - DNA, 20 bp, synthetic construct
  misc_feature 1..20: note = chemically synthesized
  source 1..20: mol_type = other DNA
ttgtcagtcagggtgagact

SEQ ID NO: 59219 - DNA, 20 bp, synthetic construct
  misc_feature 1..20: note = chemically synthesized
  source 1..20: mol_type = other DNA
ataaatgtccttatatatca

SEQ ID NO: 59220 - DNA, 20 bp, synthetic construct
  misc_feature 1..20: note = chemically synthesized
  source 1..20: mol_type = other DNA
atatatcactggatcagcag

SEQ ID NO: 59221 - DNA, 20 bp, synthetic construct
  misc_feature 1..20: note = chemically synthesized
  source 1..20: mol_type = other DNA
gatgctgacttaataattga

SEQ ID NO: 59222 - DNA, 20 bp, synthetic construct
  misc_feature 1..20: note = chemically synthesized
  source 1..20: mol_type = other DNA
taaaatataatatataggtt

SEQ ID NO: 59223 - DNA, 20 bp, synthetic construct
  misc_feature 1..20: note = chemically synthesized
  source 1..20: mol_type = other DNA
atatacatttacttaagaaa

SEQ ID NO: 59224 - DNA, 20 bp, synthetic construct
  misc_feature 1..20: note = chemically synthesized
  source 1..20: mol_type = other DNA
atgtcatcccttgctaacat

SEQ ID NO: 59225 - DNA, 20 bp, synthetic construct
  misc_feature 1..20: note = chemically synthesized
  source 1..20: mol_type = other DNA
cagaaaacgacgtttctaaa

SEQ ID NO: 59226 - DNA, 20 bp, synthetic construct
  misc_feature 1..20: note = chemically synthesized
  source 1..20: mol_type = other DNA
aaataaataaattttacaca

SEQ ID NO: 59227 - DNA, 20 bp, synthetic construct
  misc_feature 1..20: note = chemically synthesized
  source 1..20: mol_type = other DNA
gaataacaactaaaatgaca

SEQ ID NO: 59228 - DNA, 20 bp, synthetic construct
  misc_feature 1..20: note = chemically synthesized
  source 1..20: mol_type = other DNA
acaaacaattcgcacaataa

SEQ ID NO: 59229 - DNA, 20 bp, synthetic construct
  misc_feature 1..20: note = chemically synthesized
  source 1..20: mol_type = other DNA
gcacaataactgaatccttc

SEQ ID NO: 59230 - DNA, 20 bp, synthetic construct
  misc_feature 1..20: note = chemically synthesized
  source 1..20: mol_type = other DNA
gtattttcttatcaaatctc

SEQ ID NO: 59231 - DNA, 20 bp, synthetic construct
  misc_feature 1..20: note = chemically synthesized
  source 1..20: mol_type = other DNA
tcaaatctctggaatatttt

SEQ ID NO: 59232 - DNA, 20 bp, synthetic construct
  misc_feature 1..20: note = chemically synthesized
  source 1..20: mol_type = other DNA
gatttcttaagtgaagcaga

SEQ ID NO: 59233 - DNA, 20 bp, synthetic construct
  misc_feature 1..20: note = chemically synthesized
  source 1..20: mol_type = other DNA
taagtgaagcagagagaatt

SEQ ID NO: 59234 - DNA, 20 bp, synthetic construct
  misc_feature 1..20: note = chemically synthesized
  source 1..20: mol_type = other DNA
gaagcagagagaatttagaa

SEQ ID NO: 59235 - DNA, 20 bp, synthetic construct
  misc_feature 1..20: note = chemically synthesized
  source 1..20: mol_type = other DNA
tagaatggaataattatata

SEQ ID NO: 59236 - DNA, 20 bp, synthetic construct
  misc_feature 1..20: note = chemically synthesized
  source 1..20: mol_type = other DNA
agaaacagcagtcttcagag

SEQ ID NO: 59237 - DNA, 20 bp, synthetic construct
  misc_feature 1..20: note = chemically synthesized
  source 1..20: mol_type = other DNA
acagcagtcttcagagagga

SEQ ID NO: 59238 - DNA, 20 bp, synthetic construct
  misc_feature 1..20: note = chemically synthesized
  source 1..20: mol_type = other DNA
aagcaagaggggaaatagaa

SEQ ID NO: 59239 - DNA, 20 bp, synthetic construct
  misc_feature 1..20: note = chemically synthesized
  source 1..20: mol_type = other DNA
gggaagaaggaaaacggggc

SEQ ID NO: 59240 - DNA, 20 bp, synthetic construct
  misc_feature 1..20: note = chemically synthesized
  source 1..20: mol_type = other DNA
actaagggaaattacatttc

SEQ ID NO: 59241 - DNA, 20 bp, synthetic construct
  misc_feature 1..20: note = chemically synthesized
  source 1..20: mol_type = other DNA
taatcaagcaagatcctttt

SEQ ID NO: 59242 - DNA, 20 bp, synthetic construct
  misc_feature 1..20: note = chemically synthesized
  source 1..20: mol_type = other DNA
aaatcatagttactcttctt

SEQ ID NO: 59243 - DNA, 20 bp, synthetic construct
  misc_feature 1..20: note = chemically synthesized
  source 1..20: mol_type = other DNA
ttttcatgtgataattaaaa

SEQ ID NO: 59244 - DNA, 20 bp, synthetic construct
  misc_feature 1..20: note = chemically synthesized
  source 1..20: mol_type = other DNA
aactctgaggaaaaaaaagt

SEQ ID NO: 59245 - DNA, 20 bp, synthetic construct
  misc_feature 1..20: note = chemically synthesized
  source 1..20: mol_type = other DNA
aaaaagtgtggatataaaac

SEQ ID NO: 59246 - DNA, 20 bp, synthetic construct
  misc_feature 1..20: note = chemically synthesized
  source 1..20: mol_type = other DNA
ctactctgcccagaaaatag

SEQ ID NO: 59247 - DNA, 20 bp, synthetic construct
  misc_feature 1..20: note = chemically synthesized
  source 1..20: mol_type = other DNA
aataggcgaataatgcttct

SEQ ID NO: 59248 - DNA, 20 bp, synthetic construct
  misc_feature 1..20: note = chemically synthesized
  source 1..20: mol_type = other DNA
ggtcttgatgctataaatga

SEQ ID NO: 59249 - DNA, 20 bp, synthetic construct
  misc_feature 1..20: note = chemically synthesized
  source 1..20: mol_type = other DNA
tgctataaatgataggattc

SEQ ID NO: 59250 - DNA, 20 bp, synthetic construct
  misc_feature 1..20: note = chemically synthesized
  source 1..20: mol_type = other DNA
ggtgcatgtttcccaaacct

SEQ ID NO: 59251 - DNA, 20 bp, synthetic construct
  misc_feature 1..20: note = chemically synthesized
  source 1..20: mol_type = other DNA
catgtttcccaaacctgtga

SEQ ID NO: 59252 - DNA, 20 bp, synthetic construct
  misc_feature 1..20: note = chemically synthesized
  source 1..20: mol_type = other DNA
gcaatgcccatcactgtctt

SEQ ID NO: 59253 - DNA, 20 bp, synthetic construct
  misc_feature 1..20: note = chemically synthesized
  source 1..20: mol_type = other DNA
aaaaagacagtcaaagaagt

SEQ ID NO: 59254 - DNA, 20 bp, synthetic construct
  misc_feature 1..20: note = chemically synthesized
  source 1..20: mol_type = other DNA
agtcaaagaagtctgaataa

SEQ ID NO: 59255 - DNA, 20 bp, synthetic construct
  misc_feature 1..20: note = chemically synthesized
  source 1..20: mol_type = other DNA
taaacgtgatatcagcacag

SEQ ID NO: 59256 - DNA, 20 bp, synthetic construct
  misc_feature 1..20: note = chemically synthesized
  source 1..20: mol_type = other DNA
gagggcacgggaaccacaat

SEQ ID NO: 59257 - DNA, 20 bp, synthetic construct
  misc_feature 1..20: note = chemically synthesized
  source 1..20: mol_type = other DNA
aaccacaatatgggtagcag

SEQ ID NO: 59258 - DNA, 20 bp, synthetic construct
  misc_feature 1..20: note = chemically synthesized
  source 1..20: mol_type = other DNA
tatgggtagcagtagagtga

SEQ ID NO: 59259 - DNA, 20 bp, synthetic construct
  misc_feature 1..20: note = chemically synthesized
  source 1..20: mol_type = other DNA
cagtcctatgttcatcactc

SEQ ID NO: 59260 - DNA, 20 bp, synthetic construct
  misc_feature 1..20: note = chemically synthesized
  source 1..20: mol_type = other DNA
ttcatcactcgggaattggt

SEQ ID NO: 59261 - DNA, 20 bp, synthetic construct
  misc_feature 1..20: note = chemically synthesized
  source 1..20: mol_type = other DNA
cagttgtacctcagtggtgt

SEQ ID NO: 59262 - DNA, 20 bp, synthetic construct
  misc_feature 1..20: note = chemically synthesized
  source 1..20: mol_type = other DNA
acctgattctacaatggcca

SEQ ID NO: 59263 - DNA, 20 bp, synthetic construct
  misc_feature 1..20: note = chemically synthesized
  source 1..20: mol_type = other DNA
gattctacaatggccagtga

SEQ ID NO: 59264 - DNA, 20 bp, synthetic construct
  misc_feature 1..20: note = chemically synthesized
  source 1..20: mol_type = other DNA
caatggccagtgaatgaatg

SEQ ID NO: 59265 - DNA, 20 bp, synthetic construct
  misc_feature 1..20: note = chemically synthesized
  source 1..20: mol_type = other DNA
gccagtgaatgaatgaagga

SEQ ID NO: 59266 - DNA, 20 bp, synthetic construct
  misc_feature 1..20: note = chemically synthesized
  source 1..20: mol_type = other DNA
ccaggactgtgggcattgta

SEQ ID NO: 59267 - DNA, 20 bp, synthetic construct
  misc_feature 1..20: note = chemically synthesized
  source 1..20: mol_type = other DNA
tcattccaaatgaggacaag

SEQ ID NO: 59268 - DNA, 20 bp, synthetic construct
  misc_feature 1..20: note = chemically synthesized
  source 1..20: mol_type = other DNA
aggtggagaagatatttttt

SEQ ID NO: 59269 - DNA, 20 bp, synthetic construct
  misc_feature 1..20: note = chemically synthesized
  source 1..20: mol_type = other DNA
ctcaaaacttaaatattttt

SEQ ID NO: 59270 - DNA, 20 bp, synthetic construct
  misc_feature 1..20: note = chemically synthesized
  source 1..20: mol_type = other DNA
gtactcacaaggcctttccc

SEQ ID NO: 59271 - DNA, 20 bp, synthetic construct
  misc_feature 1..20: note = chemically synthesized
  source 1..20: mol_type = other DNA
caaataacaaaaatcatggt

SEQ ID NO: 59272 - DNA, 20 bp, synthetic construct
  misc_feature 1..20: note = chemically synthesized
  source 1..20: mol_type = other DNA
ttactgtgttactatccaag

SEQ ID NO: 59273 - DNA, 20 bp, synthetic construct
  misc_feature 1..20: note = chemically synthesized
  source 1..20: mol_type = other DNA
actaatgggacagctgtatt

SEQ ID NO: 59274 - DNA, 20 bp, synthetic construct
  misc_feature 1..20: note = chemically synthesized
  source 1..20: mol_type = other DNA
gttgctatctcaagtggact

SEQ ID NO: 59275 - DNA, 20 bp, synthetic construct
  misc_feature 1..20: note = chemically synthesized
  source 1..20: mol_type = other DNA
ctgctctccagcctgggcaa

SEQ ID NO: 59276 - DNA, 20 bp, synthetic construct
  misc_feature 1..20: note = chemically synthesized
  source 1..20: mol_type = other DNA
aagaaaataactcatctatt

SEQ ID NO: 59277 - DNA, 20 bp, synthetic construct
  misc_feature 1..20: note = chemically synthesized
  source 1..20: mol_type = other DNA
aaatctgaacacctgaacaa

SEQ ID NO: 59278 - DNA, 20 bp, synthetic construct
  misc_feature 1..20: note = chemically synthesized
  source 1..20: mol_type = other DNA
ttccctatgctgcaaaaagt

SEQ ID NO: 59279 - DNA, 20 bp, synthetic construct
  misc_feature 1..20: note = chemically synthesized
  source 1..20: mol_type = other DNA
cacaaaagcctaatacttgt

SEQ ID NO: 59280 - DNA, 20 bp, synthetic construct
  misc_feature 1..20: note = chemically synthesized
  source 1..20: mol_type = other DNA
gtaatatcggaagttggtaa

SEQ ID NO: 59281 - DNA, 20 bp, synthetic construct
  misc_feature 1..20: note = chemically synthesized
  source 1..20: mol_type = other DNA
ttacagaccctctaatcatt

SEQ ID NO: 59282 - DNA, 20 bp, synthetic construct
  misc_feature 1..20: note = chemically synthesized
  source 1..20: mol_type = other DNA
tcgtattgagaaaaattcac

SEQ ID NO: 59283 - DNA, 20 bp, synthetic construct
  misc_feature 1..20: note = chemically synthesized
  source 1..20: mol_type = other DNA
caattgattctgtatgtgtc

SEQ ID NO: 59284 - DNA, 20 bp, synthetic construct
  misc_feature 1..20: note = chemically synthesized
  source 1..20: mol_type = other DNA
acaataataattatatgttt

SEQ ID NO: 59285 - DNA, 20 bp, synthetic construct
  misc_feature 1..20: note = chemically synthesized
  source 1..20: mol_type = other DNA
gtagcagagactatgttcat

SEQ ID NO: 59286 - DNA, 20 bp, synthetic construct
  misc_feature 1..20: note = chemically synthesized
  source 1..20: mol_type = other DNA
ctgctaactaacttgatcca

SEQ ID NO: 59287 - DNA, 20 bp, synthetic construct
  misc_feature 1..20: note = chemically synthesized
  source 1..20: mol_type = other DNA
cagaacttatctaccgccac

SEQ ID NO: 59288 - DNA, 20 bp, synthetic construct
  misc_feature 1..20: note = chemically synthesized
  source 1..20: mol_type = other DNA
cttccaatgttgccttataa

SEQ ID NO: 59289 - DNA, 20 bp, synthetic construct
  misc_feature 1..20: note = chemically synthesized
  source 1..20: mol_type = other DNA
caatgttgccttataagaga

SEQ ID NO: 59290 - DNA, 20 bp, synthetic construct
  misc_feature 1..20: note = chemically synthesized
  source 1..20: mol_type = other DNA
taatgccaaaatttgttgta

SEQ ID NO: 59291 - DNA, 20 bp, synthetic construct
  misc_feature 1..20: note = chemically synthesized
  source 1..20: mol_type = other DNA
gataagagctaaccacttat

SEQ ID NO: 59292 - DNA, 20 bp, synthetic construct
  misc_feature 1..20: note = chemically synthesized
  source 1..20: mol_type = other DNA
ctgagctgcgtttgggacat

SEQ ID NO: 59293 - DNA, 20 bp, synthetic construct
  misc_feature 1..20: note = chemically synthesized
  source 1..20: mol_type = other DNA
gtttgggacatgcggatgca

SEQ ID NO: 59294 - DNA, 20 bp, synthetic construct
  misc_feature 1..20: note = chemically synthesized
  source 1..20: mol_type = other DNA
acatacccaaatattccagg

SEQ ID NO: 59295 - DNA, 20 bp, synthetic construct
  misc_feature 1..20: note = chemically synthesized
  source 1..20: mol_type = other DNA
atagttgccctaatagttta

SEQ ID NO: 59296 - DNA, 20 bp, synthetic construct
  misc_feature 1..20: note = chemically synthesized
  source 1..20: mol_type = other DNA
taatagtttagggagtctcc

SEQ ID NO: 59297 - DNA, 20 bp, synthetic construct
  misc_feature 1..20: note = chemically synthesized
  source 1..20: mol_type = other DNA
atgtgatacatgacaaaagt

SEQ ID NO: 59298 - DNA, 20 bp, synthetic construct
  misc_feature 1..20: note = chemically synthesized
  source 1..20: mol_type = other DNA
agtgagagtcataactttag

SEQ ID NO: 59299 - DNA, 20 bp, synthetic construct
  misc_feature 1..20: note = chemically synthesized
  source 1..20: mol_type = other DNA
gcaagcatagaggccccctg

SEQ ID NO: 59300 - DNA, 20 bp, synthetic construct
  misc_feature 1..20: note = chemically synthesized
  source 1..20: mol_type = other DNA
cactgttctcttgccccttt

SEQ ID NO: 59301 - DNA, 20 bp, synthetic construct
  misc_feature 1..20: note = chemically synthesized
  source 1..20: mol_type = other DNA
ttctttgacagcaactatcc

SEQ ID NO: 59302 - DNA, 20 bp, synthetic construct
  misc_feature 1..20: note = chemically synthesized
  source 1..20: mol_type = other DNA
gcaactatcccagagtcctc

SEQ ID NO: 59303 - DNA, 20 bp, synthetic construct
  misc_feature 1..20: note = chemically synthesized
  source 1..20: mol_type = other DNA
ctaaaatgagaagacaaaaa

SEQ ID NO: 59304 - DNA, 20 bp, synthetic construct
  misc_feature 1..20: note = chemically synthesized
  source 1..20: mol_type = other DNA
ccctgtacaatcagtgtccc

SEQ ID NO: 59305 - DNA, 20 bp, synthetic construct
  misc_feature 1..20: note = chemically synthesized
  source 1..20: mol_type = other DNA
tagcactttggaaggctgag

SEQ ID NO: 59306 - DNA, 20 bp, synthetic construct
  misc_feature 1..20: note = chemically synthesized
  source 1..20: mol_type = other DNA
actaaaaatacaaaaattag

SEQ ID NO: 59307 - DNA, 20 bp, synthetic construct
  misc_feature 1..20: note = chemically synthesized
  source 1..20: mol_type = other DNA
tactcgggaggctgaggcag

SEQ ID NO: 59308 - DNA, 20 bp, synthetic construct
  misc_feature 1..20: note = chemically synthesized
  source 1..20: mol_type = other DNA
agaagcaggcacagatgtaa

SEQ ID NO: 59309 - DNA, 20 bp, synthetic construct
  misc_feature 1..20: note = chemically synthesized
  source 1..20: mol_type = other DNA
caatgaaaagggaagtttat

SEQ ID NO: 59310 - DNA, 20 bp, synthetic construct
  misc_feature 1..20: note = chemically synthesized
  source 1..20: mol_type = other DNA
gaaaagggaagtttatagga

SEQ ID NO: 59311 - DNA, 20 bp, synthetic construct
  misc_feature 1..20: note = chemically synthesized
  source 1..20: mol_type = other DNA
taggttaatagtgaaaaata

SEQ ID NO: 59312 - DNA, 20 bp, synthetic construct
  misc_feature 1..20: note = chemically synthesized
  source 1..20: mol_type = other DNA
atttcaacataatggcagaa

SEQ ID NO: 59313 - DNA, 20 bp, synthetic construct
  misc_feature 1..20: note = chemically synthesized
  source 1..20: mol_type = other DNA
taatgactgtgagacaaaaa

SEQ ID NO: 59314 - DNA, 20 bp, synthetic construct
  misc_feature 1..20: note = chemically synthesized
  source 1..20: mol_type = other DNA
cagcactttgggaggccgag

SEQ ID NO: 59315 - DNA, 20 bp, synthetic construct
  misc_feature 1..20: note = chemically synthesized
  source 1..20: mol_type = other DNA
actttgggaggccgaggagg

SEQ ID NO: 59316 - DNA, 20 bp, synthetic construct
  misc_feature 1..20: note = chemically synthesized
  source 1..20: mol_type = other DNA
ggccgaggagggtggatcac

SEQ ID NO: 59317 - DNA, 20 bp, synthetic construct
  misc_feature 1..20: note = chemically synthesized
  source 1..20: mol_type = other DNA
agggtggatcacttgagttc

SEQ ID NO: 59318 - DNA, 20 bp, synthetic construct
  misc_feature 1..20: note = chemically synthesized
  source 1..20: mol_type = other DNA
tactctggaggctgaggcat

SEQ ID NO: 59319 - DNA, 20 bp, synthetic construct
  misc_feature 1..20: note = chemically synthesized
  source 1..20: mol_type = other DNA
gagagagagagaaaagaaaa

SEQ ID NO: 59320 - DNA, 20 bp, synthetic construct
  misc_feature 1..20: note = chemically synthesized
  source 1..20: mol_type = other DNA
gcaactaatatgtgtcataa

SEQ ID NO: 59321 - DNA, 20 bp, synthetic construct
  misc_feature 1..20: note = chemically synthesized
  source 1..20: mol_type = other DNA
gttaaacttgcttcccgtat

SEQ ID NO: 59322 - DNA, 20 bp, synthetic construct
  misc_feature 1..20: note = chemically synthesized
  source 1..20: mol_type = other DNA
ttgcggtttctgagcatgac

SEQ ID NO: 59323 - DNA, 20 bp, synthetic construct
  misc_feature 1..20: note = chemically synthesized
  source 1..20: mol_type = other DNA
tgttacacaaacaactctca

SEQ ID NO: 59324 - DNA, 20 bp, synthetic construct
  misc_feature 1..20: note = chemically synthesized
  source 1..20: mol_type = other DNA
tattctagctcatttccaca

SEQ ID NO: 59325 - DNA, 20 bp, synthetic construct
  misc_feature 1..20: note = chemically synthesized
  source 1..20: mol_type = other DNA
catttccacataggatattt

SEQ ID NO: 59326 - DNA, 20 bp, synthetic construct
  misc_feature 1..20: note = chemically synthesized
  source 1..20: mol_type = other DNA
ctttattttttctttggaag

SEQ ID NO: 59327 - DNA, 20 bp, synthetic construct
  misc_feature 1..20: note = chemically synthesized
  source 1..20: mol_type = other DNA
tcagatgaggcatgaccgaa

SEQ ID NO: 59328 - DNA, 20 bp, synthetic construct
  misc_feature 1..20: note = chemically synthesized
  source 1..20: mol_type = other DNA
ctcaagtgttccattggtct

SEQ ID NO: 59329 - DNA, 20 bp, synthetic construct
  misc_feature 1..20: note = chemically synthesized
  source 1..20: mol_type = other DNA
gctatctcattcatatatat

SEQ ID NO: 59330 - DNA, 20 bp, synthetic construct
  misc_feature 1..20: note = chemically synthesized
  source 1..20: mol_type = other DNA
ttatatttaggtctgatctc

SEQ ID NO: 59331 - DNA, 20 bp, synthetic construct
  misc_feature 1..20: note = chemically synthesized
  source 1..20: mol_type = other DNA
accctaagacttctttcctg

SEQ ID NO: 59332 - DNA, 20 bp, synthetic construct
  misc_feature 1..20: note = chemically synthesized
  source 1..20: mol_type = other DNA
ttctgaaatctcttttttca

SEQ ID NO: 59333 - DNA, 20 bp, synthetic construct
  misc_feature 1..20: note = chemically synthesized
  source 1..20: mol_type = other DNA
ttttttcattggattatgtg

SEQ ID NO: 59334 - DNA, 20 bp, synthetic construct
  misc_feature 1..20: note = chemically synthesized
  source 1..20: mol_type = other DNA
atacagcaataaatgcattc

SEQ ID NO: 59335 - DNA, 20 bp, synthetic construct
  misc_feature 1..20: note = chemically synthesized
  source 1..20: mol_type = other DNA
aaacttctgaaagattttaa

SEQ ID NO: 59336 - DNA, 20 bp, synthetic construct
  misc_feature 1..20: note = chemically synthesized
  source 1..20: mol_type = other DNA
aaaatggagcttaacatata

SEQ ID NO: 59337 - DNA, 20 bp, synthetic construct
  misc_feature 1..20: note = chemically synthesized
  source 1..20: mol_type = other DNA
agtaagtactagttaagcaa

SEQ ID NO: 59338 - DNA, 20 bp, synthetic construct
  misc_feature 1..20: note = chemically synthesized
  source 1..20: mol_type = other DNA
tcttgctctgtcacccagga

SEQ ID NO: 59339 - DNA, 20 bp, synthetic construct
  misc_feature 1..20: note = chemically synthesized
  source 1..20: mol_type = other DNA
tcttagtactttggctgcaa

SEQ ID NO: 59340 - DNA, 20 bp, synthetic construct
  misc_feature 1..20: note = chemically synthesized
  source 1..20: mol_type = other DNA
aagtgtctaaatatgtatag

SEQ ID NO: 59341 - DNA, 20 bp, synthetic construct
  misc_feature 1..20: note = chemically synthesized
  source 1..20: mol_type = other DNA
aattgcactttgggcccctg

SEQ ID NO: 59342 - DNA, 20 bp, synthetic construct
  misc_feature 1..20: note = chemically synthesized
  source 1..20: mol_type = other DNA
acagccctgcatattcaaaa

SEQ ID NO: 59343 - DNA, 20 bp, synthetic construct
  misc_feature 1..20: note = chemically synthesized
  source 1..20: mol_type = other DNA
tggtcatcactgaagataga

SEQ ID NO: 59344 - DNA, 20 bp, synthetic construct
  misc_feature 1..20: note = chemically synthesized
  source 1..20: mol_type = other DNA
ctaagcatgagaaaaactaa

SEQ ID NO: 59345 - DNA, 20 bp, synthetic construct
  misc_feature 1..20: note = chemically synthesized
  source 1..20: mol_type = other DNA
caaatcaagatggaaatgat

SEQ ID NO: 59346 - DNA, 20 bp, synthetic construct
  misc_feature 1..20: note = chemically synthesized
  source 1..20: mol_type = other DNA
gggcacattatgagaaacag

SEQ ID NO: 59347 - DNA, 20 bp, synthetic construct
  misc_feature 1..20: note = chemically synthesized
  source 1..20: mol_type = other DNA
gagaaacagaggagtctttg

SEQ ID NO: 59348 - DNA, 20 bp, synthetic construct
  misc_feature 1..20: note = chemically synthesized
  source 1..20: mol_type = other DNA
aattttgcttacagcatgca

SEQ ID NO: 59349 - DNA, 20 bp, synthetic construct
  misc_feature 1..20: note = chemically synthesized
  source 1..20: mol_type = other DNA
ttttttaagcattccataga

SEQ ID NO: 59350 - DNA, 20 bp, synthetic construct
  misc_feature 1..20: note = chemically synthesized
  source 1..20: mol_type = other DNA
cagcactttgggaggccgag

SEQ ID NO: 59351 - DNA, 20 bp, synthetic construct
  misc_feature 1..20: note = chemically synthesized
  source 1..20: mol_type = other DNA
actttgggaggccgaggcgg

SEQ ID NO: 59352 - DNA, 20 bp, synthetic construct
  misc_feature 1..20: note = chemically synthesized
  source 1..20: mol_type = other DNA
tactcgggaggctgaggcag

SEQ ID NO: 59353 - DNA, 20 bp, synthetic construct
  misc_feature 1..20: note = chemically synthesized
  source 1..20: mol_type = other DNA
tgaaaatgtacctgtaaaat

SEQ ID NO: 59354 - DNA, 20 bp, synthetic construct
  misc_feature 1..20: note = chemically synthesized
  source 1..20: mol_type = other DNA
ccacatatttttaggtctgg

SEQ ID NO: 59355 - DNA, 20 bp, synthetic construct
  misc_feature 1..20: note = chemically synthesized
  source 1..20: mol_type = other DNA
cattatcataaaatctctag

SEQ ID NO: 59356 - DNA, 20 bp, synthetic construct
  misc_feature 1..20: note = chemically synthesized
  source 1..20: mol_type = other DNA
tgtctcattttcttcttcca

SEQ ID NO: 59357 - DNA, 20 bp, synthetic construct
  misc_feature 1..20: note = chemically synthesized
  source 1..20: mol_type = other DNA
ttcttccatggaatattcca

SEQ ID NO: 59358 - DNA, 20 bp, synthetic construct
  misc_feature 1..20: note = chemically synthesized
  source 1..20: mol_type = other DNA
aaggaatattctttgaaaag

SEQ ID NO: 59359 - DNA, 20 bp, synthetic construct
  misc_feature 1..20: note = chemically synthesized
  source 1..20: mol_type = other DNA
tctttgaaaagcagaatatt

SEQ ID NO: 59360 - DNA, 20 bp, synthetic construct
  misc_feature 1..20: note = chemically synthesized
  source 1..20: mol_type = other DNA
agtagagagatatatttagg

SEQ ID NO: 59361 - DNA, 20 bp, synthetic construct
  misc_feature 1..20: note = chemically synthesized
  source 1..20: mol_type = other DNA
tcaataattcacagtagcca

SEQ ID NO: 59362 - DNA, 20 bp, synthetic construct
  misc_feature 1..20: note = chemically synthesized
  source 1..20: mol_type = other DNA
aaaatgtcttatatatgtga

SEQ ID NO: 59363 - DNA, 20 bp, synthetic construct
  misc_feature 1..20: note = chemically synthesized
  source 1..20: mol_type = other DNA
ggtctgacacatgctacaac

SEQ ID NO: 59364 - DNA, 20 bp, synthetic construct
  misc_feature 1..20: note = chemically synthesized
  source 1..20: mol_type = other DNA
tttcacttacatgagctatc

SEQ ID NO: 59365 - DNA, 20 bp, synthetic construct
  misc_feature 1..20: note = chemically synthesized
  source 1..20: mol_type = other DNA
aaaagtagattagaagttac

SEQ ID NO: 59366 - DNA, 20 bp, synthetic construct
  misc_feature 1..20: note = chemically synthesized
  source 1..20: mol_type = other DNA
taccagagtgtaggaagaac

SEQ ID NO: 59367 - DNA, 20 bp, synthetic construct
  misc_feature 1..20: note = chemically synthesized
  source 1..20: mol_type = other DNA
tgtaggaagaacatggattg

SEQ ID NO: 59368 - DNA, 20 bp, synthetic construct
  misc_feature 1..20: note = chemically synthesized
  source 1..20: mol_type = other DNA
gagtaactgattaatcaata

SEQ ID NO: 59369 - DNA, 20 bp, synthetic construct
  misc_feature 1..20: note = chemically synthesized
  source 1..20: mol_type = other DNA
attgtgaaaggtttaaaaac

SEQ ID NO: 59370 - DNA, 20 bp, synthetic construct
  misc_feature 1..20: note = chemically synthesized
  source 1..20: mol_type = other DNA
acaactatatatatacatac

SEQ ID NO: 59371 - DNA, 20 bp, synthetic construct
  misc_feature 1..20: note = chemically synthesized
  source 1..20: mol_type = other DNA
atttatttgattttaataaa

SEQ ID NO: 59372 - DNA, 20 bp, synthetic construct
  misc_feature 1..20: note = chemically synthesized
  source 1..20: mol_type = other DNA
tttgattttaataaatagaa

SEQ ID NO: 59373 - DNA, 20 bp, synthetic construct
  misc_feature 1..20: note = chemically synthesized
  source 1..20: mol_type = other DNA
caacaatttcacttgagaga

SEQ ID NO: 59374 - DNA, 20 bp, synthetic construct
  misc_feature 1..20: note = chemically synthesized
  source 1..20: mol_type = other DNA
gtgaaggcatgccgcaaatc

SEQ ID NO: 59375 - DNA, 20 bp, synthetic construct
  misc_feature 1..20: note = chemically synthesized
  source 1..20: mol_type = other DNA
tatttactcatctggtaatt

SEQ ID NO: 59376 - DNA, 20 bp, synthetic construct
  misc_feature 1..20: note = chemically synthesized
  source 1..20: mol_type = other DNA
tttggactgctattttaaaa

SEQ ID NO: 59377 - DNA, 20 bp, synthetic construct
  misc_feature 1..20: note = chemically synthesized
  source 1..20: mol_type = other DNA
ttaaaactgggtctacttca

SEQ ID NO: 59378 - DNA, 20 bp, synthetic construct
  misc_feature 1..20: note = chemically synthesized
  source 1..20: mol_type = other DNA
gaatgacacccaagaaaaac

SEQ ID NO: 59379 - DNA, 20 bp, synthetic construct
  misc_feature 1..20: note = chemically synthesized
  source 1..20: mol_type = other DNA
ggatctatcctgctttctcc

SEQ ID NO: 59380 - DNA, 20 bp, synthetic construct
  misc_feature 1..20: note = chemically synthesized
  source 1..20: mol_type = other DNA
cacttattctctgaccttct

SEQ ID NO: 59381 - DNA, 20 bp, synthetic construct
  misc_feature 1..20: note = chemically synthesized
  source 1..20: mol_type = other DNA
gaaatacatactgaaatgat

SEQ ID NO: 59382 - DNA, 20 bp, synthetic construct
  misc_feature 1..20: note = chemically synthesized
  source 1..20: mol_type = other DNA
tacatactgaaatgatttga

SEQ ID NO: 59383 - DNA, 20 bp, synthetic construct
  misc_feature 1..20: note = chemically synthesized
  source 1..20: mol_type = other DNA
accatttccactttcctaaa

SEQ ID NO: 59384 - DNA, 20 bp, synthetic construct
  misc_feature 1..20: note = chemically synthesized
  source 1..20: mol_type = other DNA
gaagtaattttaaaacatca

SEQ ID NO: 59385 - DNA, 20 bp, synthetic construct
  misc_feature 1..20: note = chemically synthesized
  source 1..20: mol_type = other DNA
ttcagtagctttccatgact

SEQ ID NO: 59386 - DNA, 20 bp, synthetic construct
  misc_feature 1..20: note = chemically synthesized
  source 1..20: mol_type = other DNA
cacacacactccttcagtct

SEQ ID NO: 59387 - DNA, 20 bp, synthetic construct
  misc_feature 1..20: note = chemically synthesized
  source 1..20: mol_type = other DNA
gctgaagggacactttctca

SEQ ID NO: 59388 - DNA, 20 bp, synthetic construct
  misc_feature 1..20: note = chemically synthesized
  source 1..20: mol_type = other DNA
tcacagcacttgttttaaat

SEQ ID NO: 59389 - DNA, 20 bp, synthetic construct
  misc_feature 1..20: note = chemically synthesized
  source 1..20: mol_type = other DNA
atttggatttcttttattct

SEQ ID NO: 59390 - DNA, 20 bp, synthetic construct
  misc_feature 1..20: note = chemically synthesized
  source 1..20: mol_type = other DNA
gcccttaaaaaattaaccaa

SEQ ID NO: 59391 - DNA, 20 bp, synthetic construct
  misc_feature 1..20: note = chemically synthesized
  source 1..20: mol_type = other DNA
tccacgaaaataggcacatg

SEQ ID NO: 59392 - DNA, 20 bp, synthetic construct
  misc_feature 1..20: note = chemically synthesized
  source 1..20: mol_type = other DNA
aacacaaacccttttaaaca

SEQ ID NO: 59393 - DNA, 20 bp, synthetic construct
  misc_feature 1..20: note = chemically synthesized
  source 1..20: mol_type = other DNA
cttcttaaaatcaattataa

SEQ ID NO: 59394 - DNA, 20 bp, synthetic construct
  misc_feature 1..20: note = chemically synthesized
  source 1..20: mol_type = other DNA
tgagatcacttgtgatttat

SEQ ID NO: 59395 - DNA, 20 bp, synthetic construct
  misc_feature 1..20: note = chemically synthesized
  source 1..20: mol_type = other DNA
ttattagaataaaaaataaa

SEQ ID NO: 59396 - DNA, 20 bp, synthetic construct
  misc_feature 1..20: note = chemically synthesized
  source 1..20: mol_type = other DNA
aatgagcaactaggaaattt

SEQ ID NO: 59397 - DNA, 20 bp, synthetic construct
  misc_feature 1..20: note = chemically synthesized
  source 1..20: mol_type = other DNA
ctaggaaatttatgaattta

SEQ ID NO: 59398 - DNA, 20 bp, synthetic construct
  misc_feature 1..20: note = chemically synthesized
  source 1..20: mol_type = other DNA
tgcaaaaaaaaattgacaaa

SEQ ID NO: 59399 - DNA, 20 bp, synthetic construct
  misc_feature 1..20: note = chemically synthesized
  source 1..20: mol_type = other DNA
cagagataacagacaaccta

SEQ ID NO: 59400 - DNA, 20 bp, synthetic construct
  misc_feature 1..20: note = chemically synthesized
  source 1..20: mol_type = other DNA
tctgacaaaagtctaatatc

SEQ ID NO: 59401 - DNA, 20 bp, synthetic construct
  misc_feature 1..20: note = chemically synthesized
  source 1..20: mol_type = other DNA
aacaaccccattaaaaagtg

SEQ ID NO: 59402 - DNA, 20 bp, synthetic construct
  misc_feature 1..20: note = chemically synthesized
  source 1..20: mol_type = other DNA
attaaaaagtggggaatgac

SEQ ID NO: 59403 - DNA, 20 bp, synthetic construct
  misc_feature 1..20: note = chemically synthesized
  source 1..20: mol_type = other DNA
aatgcaaatcaaaaccacaa

SEQ ID NO: 59404 - DNA, 20 bp, synthetic construct
  misc_feature 1..20: note = chemically synthesized
  source 1..20: mol_type = other DNA
ggataccatctcacaccagt

SEQ ID NO: 59405 - DNA, 20 bp, synthetic construct
  misc_feature 1..20: note = chemically synthesized
  source 1..20: mol_type = other DNA
tggcaaggttgcagagagaa

SEQ ID NO: 59406 - DNA, 20 bp, synthetic construct
  misc_feature 1..20: note = chemically synthesized
  source 1..20: mol_type = other DNA
aggttgcagagagaaaggaa

SEQ ID NO: 59407 - DNA, 20 bp, synthetic construct
  misc_feature 1..20: note = chemically synthesized
  source 1..20: mol_type = other DNA
tgcttttacactgttaacgg

SEQ ID NO: 59408 - DNA, 20 bp, synthetic construct
  misc_feature 1..20: note = chemically synthesized
  source 1..20: mol_type = other DNA
ttagttcaaacattgtggaa

SEQ ID NO: 59409 - DNA, 20 bp, synthetic construct
  misc_feature 1..20: note = chemically synthesized
  source 1..20: mol_type = other DNA
ttgactcagcaatctcatta

SEQ ID NO: 59410 - DNA, 20 bp, synthetic construct
  misc_feature 1..20: note = chemically synthesized
  source 1..20: mol_type = other DNA
attactgggtatatacccaa

SEQ ID NO: 59411 - DNA, 20 bp, synthetic construct
  misc_feature 1..20: note = chemically synthesized
  source 1..20: mol_type = other DNA
tattcataatagccaagatg

SEQ ID NO: 59412 - DNA, 20 bp, synthetic construct
  misc_feature 1..20: note = chemically synthesized
  source 1..20: mol_type = other DNA
acccaaatgtccatcaatga

SEQ ID NO: 59413 - DNA, 20 bp, synthetic construct
  misc_feature 1..20: note = chemically synthesized
  source 1..20: mol_type = other DNA
aaatgtccatcaatgataga

SEQ ID NO: 59414 - DNA, 20 bp, synthetic construct
  misc_feature 1..20: note = chemically synthesized
  source 1..20: mol_type = other DNA
aacgtggtacatatatacca

SEQ ID NO: 59415 - DNA, 20 bp, synthetic construct
  misc_feature 1..20: note = chemically synthesized
  source 1..20: mol_type = other DNA
tatacagccataaaaaggaa

SEQ ID NO: 59416 - DNA, 20 bp, synthetic construct
  misc_feature 1..20: note = chemically synthesized
  source 1..20: mol_type = other DNA
attgtgttccttgcagggac

SEQ ID NO: 59417 - DNA, 20 bp, synthetic construct
  misc_feature 1..20: note = chemically synthesized
  source 1..20: mol_type = other DNA
acacaggggcctgtccggta

SEQ ID NO: 59418 - DNA, 20 bp, synthetic construct
  misc_feature 1..20: note = chemically synthesized
  source 1..20: mol_type = other DNA
aggagagggagagcaccagg

SEQ ID NO: 59419 - DNA, 20 bp, synthetic construct
  misc_feature 1..20: note = chemically synthesized
  source 1..20: mol_type = other DNA
agcaccaggaagaatagcta

SEQ ID NO: 59420 - DNA, 20 bp, synthetic construct
  misc_feature 1..20: note = chemically synthesized
  source 1..20: mol_type = other DNA
aaggaaaatctaccctgaaa

SEQ ID NO: 59421 - DNA, 20 bp, synthetic construct
  misc_feature 1..20: note = chemically synthesized
  source 1..20: mol_type = other DNA
gagtagttttgagattatag

SEQ ID NO: 59422 - DNA, 20 bp, synthetic construct
  misc_feature 1..20: note = chemically synthesized
  source 1..20: mol_type = other DNA
aaatggtactttcagttctt

SEQ ID NO: 59423 - DNA, 20 bp, synthetic construct
  misc_feature 1..20: note = chemically synthesized
  source 1..20: mol_type = other DNA
agttcttatgaatacaggtt

SEQ ID NO: 59424 - DNA, 20 bp, synthetic construct
  misc_feature 1..20: note = chemically synthesized
  source 1..20: mol_type = other DNA
accatattttccctgattat

SEQ ID NO: 59425 - DNA, 20 bp, synthetic construct
  misc_feature 1..20: note = chemically synthesized
  source 1..20: mol_type = other DNA
ataaagctttacatctacat

SEQ ID NO: 59426 - DNA, 20 bp, synthetic construct
  misc_feature 1..20: note = chemically synthesized
  source 1..20: mol_type = other DNA
atttatcaattgatcaattg

SEQ ID NO: 59427 - DNA, 20 bp, synthetic construct
  misc_feature 1..20: note = chemically synthesized
  source 1..20: mol_type = other DNA
taacactgatacaagagata

SEQ ID NO: 59428 - DNA, 20 bp, synthetic construct
  misc_feature 1..20: note = chemically synthesized
  source 1..20: mol_type = other DNA
aataggcgaacaatgcttct

SEQ ID NO: 59429 - DNA, 20 bp, synthetic construct
  misc_feature 1..20: note = chemically synthesized
  source 1..20: mol_type = other DNA
tggtttgatgctgtatataa

SEQ ID NO: 59430 - DNA, 20 bp, synthetic construct
  misc_feature 1..20: note = chemically synthesized
  source 1..20: mol_type = other DNA
tgctgtatataatagggttc

SEQ ID NO: 59431 - DNA, 20 bp, synthetic construct
  misc_feature 1..20: note = chemically synthesized
  source 1..20: mol_type = other DNA
catgaatggaggaaaaagaa

SEQ ID NO: 59432 - DNA, 20 bp, synthetic construct
  misc_feature 1..20: note = chemically synthesized
  source 1..20: mol_type = other DNA
ggtgcatgtttcccaaacct

SEQ ID NO: 59433 - DNA, 20 bp, synthetic construct
  misc_feature 1..20: note = chemically synthesized
  source 1..20: mol_type = other DNA
gcaatacctttaactgtttt

SEQ ID NO: 59434 - DNA, 20 bp, synthetic construct
  misc_feature 1..20: note = chemically synthesized
  source 1..20: mol_type = other DNA
cctttaactgttttaaggat

SEQ ID NO: 59435 - DNA, 20 bp, synthetic construct
  misc_feature 1..20: note = chemically synthesized
  source 1..20: mol_type = other DNA
aggaagaaaatcaaagcaac

SEQ ID NO: 59436 - DNA, 20 bp, synthetic construct
  misc_feature 1..20: note = chemically synthesized
  source 1..20: mol_type = other DNA
aatcaaagcaaccagaatag

SEQ ID NO: 59437 - DNA, 20 bp, synthetic construct
  misc_feature 1..20: note = chemically synthesized
  source 1..20: mol_type = other DNA
gaatagctgggtataagtga

SEQ ID NO: 59438 - DNA, 20 bp, synthetic construct
  misc_feature 1..20: note = chemically synthesized
  source 1..20: mol_type = other DNA
aaaggtgtggaagagaacat

SEQ ID NO: 59439 - DNA, 20 bp, synthetic construct
  misc_feature 1..20: note = chemically synthesized
  source 1..20: mol_type = other DNA
aatgacaatatgggaagcaa

SEQ ID NO: 59440 - DNA, 20 bp, synthetic construct
  misc_feature 1..20: note = chemically synthesized
  source 1..20: mol_type = other DNA
tatgggaagcaatggagtgg

SEQ ID NO: 59441 - DNA, 20 bp, synthetic construct
  misc_feature 1..20: note = chemically synthesized
  source 1..20: mol_type = other DNA
gtggcagaattggaggcacg

SEQ ID NO: 59442 - DNA, 20 bp, synthetic construct
  misc_feature 1..20: note = chemically synthesized
  source 1..20: mol_type = other DNA
tagttatacctgagaagcat

SEQ ID NO: 59443 - DNA, 20 bp, synthetic construct
  misc_feature 1..20: note = chemically synthesized
  source 1..20: mol_type = other DNA
cggtcataggccattgacag

SEQ ID NO: 59444 - DNA, 20 bp, synthetic construct
  misc_feature 1..20: note = chemically synthesized
  source 1..20: mol_type = other DNA
gagaatacctgattctgcaa

SEQ ID NO: 59445 - DNA, 20 bp, synthetic construct
  misc_feature 1..20: note = chemically synthesized
  source 1..20: mol_type = other DNA
tgattctgcaagtggataat

SEQ ID NO: 59446 - DNA, 20 bp, synthetic construct
  misc_feature 1..20: note = chemically synthesized
  source 1..20: mol_type = other DNA
tctgcaagtggataatggga

SEQ ID NO: 59447 - DNA, 20 bp, synthetic construct
  misc_feature 1..20: note = chemically synthesized
  source 1..20: mol_type = other DNA
acctgcaagaagcaggcccc

SEQ ID NO: 59448 - DNA, 20 bp, synthetic construct
  misc_feature 1..20: note = chemically synthesized
  source 1..20: mol_type = other DNA
gtgtggcaaggaaacagtac

SEQ ID NO: 59449 - DNA, 20 bp, synthetic construct
  misc_feature 1..20: note = chemically synthesized
  source 1..20: mol_type = other DNA
cacacataaacagcaaagaa

SEQ ID NO: 59450 - DNA, 20 bp, synthetic construct
  misc_feature 1..20: note = chemically synthesized
  source 1..20: mol_type = other DNA
agcaaagaaggggatggaga

SEQ ID NO: 59451 - DNA, 20 bp, synthetic construct
  misc_feature 1..20: note = chemically synthesized
  source 1..20: mol_type = other DNA
aataatttattggtatatgc

SEQ ID NO: 59452 - DNA, 20 bp, synthetic construct
  misc_feature 1..20: note = chemically synthesized
  source 1..20: mol_type = other DNA
tatagactgtgctagagata

SEQ ID NO: 59453 - DNA, 20 bp, synthetic construct
  misc_feature 1..20: note = chemically synthesized
  source 1..20: mol_type = other DNA
tgatgatcatttcttcagtt

SEQ ID NO: 59454 - DNA, 20 bp, synthetic construct
  misc_feature 1..20: note = chemically synthesized
  source 1..20: mol_type = other DNA
tgcttagcttaattgcatat

SEQ ID NO: 59455 - DNA, 20 bp, synthetic construct
  misc_feature 1..20: note = chemically synthesized
  source 1..20: mol_type = other DNA
ttctttgtttagttttgaaa

SEQ ID NO: 59456 - DNA, 20 bp, synthetic construct
  misc_feature 1..20: note = chemically synthesized
  source 1..20: mol_type = other DNA
aatagaatgttaatgtttta

SEQ ID NO: 59457 - DNA, 20 bp, synthetic construct
  misc_feature 1..20: note = chemically synthesized
  source 1..20: mol_type = other DNA
taggtgttggtcatcccaga

SEQ ID NO: 59458 - DNA, 20 bp, synthetic construct
  misc_feature 1..20: note = chemically synthesized
  source 1..20: mol_type = other DNA
catctaacataagaaggaag

SEQ ID NO: 59459 - DNA, 20 bp, synthetic construct
  misc_feature 1..20: note = chemically synthesized
  source 1..20: mol_type = other DNA
ctatgctgtcattttcttgc

SEQ ID NO: 59460 - DNA, 20 bp, synthetic construct
  misc_feature 1..20: note = chemically synthesized
  source 1..20: mol_type = other DNA
ctattcaagaggccaaatta

SEQ ID NO: 59461 - DNA, 20 bp, synthetic construct
  misc_feature 1..20: note = chemically synthesized
  source 1..20: mol_type = other DNA
gtatgtggaaatcacttccc

SEQ ID NO: 59462 - DNA, 20 bp, synthetic construct
  misc_feature 1..20: note = chemically synthesized
  source 1..20: mol_type = other DNA
gaactttcaggtatttctcc

SEQ ID NO: 59463 - DNA, 20 bp, synthetic construct
  misc_feature 1..20: note = chemically synthesized
  source 1..20: mol_type = other DNA
tttcaggtatttctccaagg

SEQ ID NO: 59464 - DNA, 20 bp, synthetic construct
  misc_feature 1..20: note = chemically synthesized
  source 1..20: mol_type = other DNA
ctccaatgccacctctacat

SEQ ID NO: 59465 - DNA, 20 bp, synthetic construct
  misc_feature 1..20: note = chemically synthesized
  source 1..20: mol_type = other DNA
aaagtattgagagatactag

SEQ ID NO: 59466 - DNA, 20 bp, synthetic construct
  misc_feature 1..20: note = chemically synthesized
  source 1..20: mol_type = other DNA
tgagagatactagttgaatg

SEQ ID NO: 59467 - DNA, 20 bp, synthetic construct
  misc_feature 1..20: note = chemically synthesized
  source 1..20: mol_type = other DNA
ggtcacatgtgtctttgtcc

SEQ ID NO: 59468 - DNA, 20 bp, synthetic construct
  misc_feature 1..20: note = chemically synthesized
  source 1..20: mol_type = other DNA
tctgatccacaggaacctca

SEQ ID NO: 59469 - DNA, 20 bp, synthetic construct
  misc_feature 1..20: note = chemically synthesized
  source 1..20: mol_type = other DNA
tgcccatttcataccaggtt

SEQ ID NO: 59470 - DNA, 20 bp, synthetic construct
  misc_feature 1..20: note = chemically synthesized
  source 1..20: mol_type = other DNA
caacatttactttagataca

SEQ ID NO: 59471 - DNA, 20 bp, synthetic construct
  misc_feature 1..20: note = chemically synthesized
  source 1..20: mol_type = other DNA
tacttgtgcaggttttttac

SEQ ID NO: 59472 - DNA, 20 bp, synthetic construct
  misc_feature 1..20: note = chemically synthesized
  source 1..20: mol_type = other DNA
tttagcttccacttataaat

SEQ ID NO: 59473 - DNA, 20 bp, synthetic construct
  misc_feature 1..20: note = chemically synthesized
  source 1..20: mol_type = other DNA
tgttcttgcgttaatttgct

SEQ ID NO: 59474 - DNA, 20 bp, synthetic construct
  misc_feature 1..20: note = chemically synthesized
  source 1..20: mol_type = other DNA
gtctaatgctctgttttcct

SEQ ID NO: 59475 - DNA, 20 bp, synthetic construct
  misc_feature 1..20: note = chemically synthesized
  source 1..20: mol_type = other DNA
tatggatatatacccagtag

SEQ ID NO: 59476 - DNA, 20 bp, synthetic construct
  misc_feature 1..20: note = chemically synthesized
  source 1..20: mol_type = other DNA
ccttttctccatagcctcat

SEQ ID NO: 59477 - DNA, 20 bp, synthetic construct
  misc_feature 1..20: note = chemically synthesized
  source 1..20: mol_type = other DNA
cctgtatgtcttctcttgag

SEQ ID NO: 59478 - DNA, 20 bp, synthetic construct
  misc_feature 1..20: note = chemically synthesized
  source 1..20: mol_type = other DNA
ctcttgagaagagtctgttc

SEQ ID NO: 59479 - DNA, 20 bp, synthetic construct
  misc_feature 1..20: note = chemically synthesized
  source 1..20: mol_type = other DNA
ggattttgcccatttttaaa

SEQ ID NO: 59480 - DNA, 20 bp, synthetic construct
  misc_feature 1..20: note = chemically synthesized
  source 1..20: mol_type = other DNA
ctttttgcttgctgatatgt

SEQ ID NO: 59481 - DNA, 20 bp, synthetic construct
  misc_feature 1..20: note = chemically synthesized
  source 1..20: mol_type = other DNA
gttcgaattccttatagatt

SEQ ID NO: 59482 - DNA, 20 bp, synthetic construct
  misc_feature 1..20: note = chemically synthesized
  source 1..20: mol_type = other DNA
cttttccagatgcacagttt

SEQ ID NO: 59483 - DNA, 20 bp, synthetic construct
  misc_feature 1..20: note = chemically synthesized
  source 1..20: mol_type = other DNA
tattattatactttaagttc

SEQ ID NO: 59484 - DNA, 20 bp, synthetic construct
  misc_feature 1..20: note = chemically synthesized
  source 1..20: mol_type = other DNA
tgtccttgtgatagtttgct

SEQ ID NO: 59485 - DNA, 20 bp, synthetic construct
  misc_feature 1..20: note = chemically synthesized
  source 1..20: mol_type = other DNA
attctatcattgttggacat

SEQ ID NO: 59486 - DNA, 20 bp, synthetic construct
  misc_feature 1..20: note = chemically synthesized
  source 1..20: mol_type = other DNA
ggttccaagtctttgttatt

SEQ ID NO: 59487 - DNA, 20 bp, synthetic construct
  misc_feature 1..20: note = chemically synthesized
  source 1..20: mol_type = other DNA
agtttaattaggttccactt

SEQ ID NO: 59488 - DNA, 20 bp, synthetic construct
  misc_feature 1..20: note = chemically synthesized
  source 1..20: mol_type = other DNA
tgagatcttacatttaagtt

SEQ ID NO: 59489 - DNA, 20 bp, synthetic construct
  misc_feature 1..20: note = chemically synthesized
  source 1..20: mol_type = other DNA
ttctctaaatggtgtaaggt

SEQ ID NO: 59490 - DNA, 20 bp, synthetic construct
  misc_feature 1..20: note = chemically synthesized
  source 1..20: mol_type = other DNA
acgtattccagcacagttta

SEQ ID NO: 59491 - DNA, 20 bp, synthetic construct
  misc_feature 1..20: note = chemically synthesized
  source 1..20: mol_type = other DNA
gtaactatgtagctttattt

SEQ ID NO: 59492 - DNA, 20 bp, synthetic construct
  misc_feature 1..20: note = chemically synthesized
  source 1..20: mol_type = other DNA
tgtaacaatatcatgctgtt

SEQ ID NO: 59493 - DNA, 20 bp, synthetic construct
  misc_feature 1..20: note = chemically synthesized
  source 1..20: mol_type = other DNA
tctttctttttttatttttt

SEQ ID NO: 59494 - DNA, 20 bp, synthetic construct
  misc_feature 1..20: note = chemically synthesized
  source 1..20: mol_type = other DNA
tttcactctgtcacccaggc

SEQ ID NO: 59495 - DNA, 20 bp, synthetic construct
  misc_feature 1..20: note = chemically synthesized
  source 1..20: mol_type = other DNA
ctcactgcaccgtctgcctc

SEQ ID NO: 59496 - DNA, 20 bp, synthetic construct
  misc_feature 1..20: note = chemically synthesized
  source 1..20: mol_type = other DNA
aattctcctgcctcagcctt

SEQ ID NO: 59497 - DNA, 20 bp, synthetic construct
  misc_feature 1..20: note = chemically synthesized
  source 1..20: mol_type = other DNA
gcctcagccttccgagtagc

SEQ ID NO: 59498 - DNA, 20 bp, synthetic construct
  misc_feature 1..20: note = chemically synthesized
  source 1..20: mol_type = other DNA
acctcagccccctaaagtgc

SEQ ID NO: 59499 - DNA, 20 bp, synthetic construct
  misc_feature 1..20: note = chemically synthesized
  source 1..20: mol_type = other DNA
caggctctttttggttccat

SEQ ID NO: 59500 - DNA, 20 bp, synthetic construct
  misc_feature 1..20: note = chemically synthesized
  source 1..20: mol_type = other DNA
ctagtttttctaatactgtg

SEQ ID NO: 59501 - DNA, 20 bp, synthetic construct
  misc_feature 1..20: note = chemically synthesized
  source 1..20: mol_type = other DNA
gtgaagaatgacattggtaa

SEQ ID NO: 59502 - DNA, 20 bp, synthetic construct
  misc_feature 1..20: note = chemically synthesized
  source 1..20: mol_type = other DNA
gtaattggatagaaattgca

SEQ ID NO: 59503 - DNA, 20 bp, synthetic construct
  misc_feature 1..20: note = chemically synthesized
  source 1..20: mol_type = other DNA
atcaaaggaacatacctcaa

SEQ ID NO: 59504 - DNA, 20 bp, synthetic construct
  misc_feature 1..20: note = chemically synthesized
  source 1..20: mol_type = other DNA
aacccataaccaaaaccata

SEQ ID NO: 59505 - DNA, 20 bp, synthetic construct
  misc_feature 1..20: note = chemically synthesized
  source 1..20: mol_type = other DNA
ctcgaaaactgcaacaagac

SEQ ID NO: 59506 - DNA, 20 bp, synthetic construct
  misc_feature 1..20: note = chemically synthesized
  source 1..20: mol_type = other DNA
aaacaattttagcaaggttt

SEQ ID NO: 59507 - DNA, 20 bp, synthetic construct
  misc_feature 1..20: note = chemically synthesized
  source 1..20: mol_type = other DNA
acaccaataaggcccaggct

SEQ ID NO: 59508 - DNA, 20 bp, synthetic construct
  misc_feature 1..20: note = chemically synthesized
  source 1..20: mol_type = other DNA
ctagaaagaaaatatttacc

SEQ ID NO: 59509 - DNA, 20 bp, synthetic construct
  misc_feature 1..20: note = chemically synthesized
  source 1..20: mol_type = other DNA
tacaacactatcattactac

SEQ ID NO: 59510 - DNA, 20 bp, synthetic construct
  misc_feature 1..20: note = chemically synthesized
  source 1..20: mol_type = other DNA
agacacatcaaataaatttc

SEQ ID NO: 59511 - DNA, 20 bp, synthetic construct
  misc_feature 1..20: note = chemically synthesized
  source 1..20: mol_type = other DNA
gaagaaatgctacttaagct

SEQ ID NO: 59512 - DNA, 20 bp, synthetic construct
  misc_feature 1..20: note = chemically synthesized
  source 1..20: mol_type = other DNA
agtagtgtagtagtatttgg

SEQ ID NO: 59513 - DNA, 20 bp, synthetic construct
  misc_feature 1..20: note = chemically synthesized
  source 1..20: mol_type = other DNA
gaaaaaaagcttgagagaaa

SEQ ID NO: 59514 - DNA, 20 bp, synthetic construct
  misc_feature 1..20: note = chemically synthesized
  source 1..20: mol_type = other DNA
acattttgacattaccataa

SEQ ID NO: 59515 - DNA, 20 bp, synthetic construct
  misc_feature 1..20: note = chemically synthesized
  source 1..20: mol_type = other DNA
tttgacattaccataaggga

SEQ ID NO: 59516 - DNA, 20 bp, synthetic construct
  misc_feature 1..20: note = chemically synthesized
  source 1..20: mol_type = other DNA
aatataaaacaagaggtatg

SEQ ID NO: 59517 - DNA, 20 bp, synthetic construct
  misc_feature 1..20: note = chemically synthesized
  source 1..20: mol_type = other DNA
agaacaggtaaaagaagtat

SEQ ID NO: 59518 - DNA, 20 bp, synthetic construct
  misc_feature 1..20: note = chemically synthesized
  source 1..20: mol_type = other DNA
atcagtagcattagaaaggc

SEQ ID NO: 59519 - DNA, 20 bp, synthetic construct
  misc_feature 1..20: note = chemically synthesized
  source 1..20: mol_type = other DNA
agaagagagattctatgact

SEQ ID NO: 59520 - DNA, 20 bp, synthetic construct
  misc_feature 1..20: note = chemically synthesized
  source 1..20: mol_type = other DNA
ttctatgacttagaatagaa

SEQ ID NO: 59521 - DNA, 20 bp, synthetic construct
  misc_feature 1..20: note = chemically synthesized
  source 1..20: mol_type = other DNA
agaagcgtaagtaatgccac

SEQ ID NO: 59522 - DNA, 20 bp, synthetic construct
  misc_feature 1..20: note = chemically synthesized
  source 1..20: mol_type = other DNA
aagtaatgccacctgaattt

SEQ ID NO: 59523 - DNA, 20 bp, synthetic construct
  misc_feature 1..20: note = chemically synthesized
  source 1..20: mol_type = other DNA
acctgaatttctgagttttg

SEQ ID NO: 59524 - DNA, 20 bp, synthetic construct
  misc_feature 1..20: note = chemically synthesized
  source 1..20: mol_type = other DNA
tttctgagttttgctgaatg

SEQ ID NO: 59525 - DNA, 20 bp, synthetic construct
  misc_feature 1..20: note = chemically synthesized
  source 1..20: mol_type = other DNA
tgattggtcattgtacatta

SEQ ID NO: 59526 - DNA, 20 bp, synthetic construct
  misc_feature 1..20: note = chemically synthesized
  source 1..20: mol_type = other DNA
gactttgtagaaaagatgaa

SEQ ID NO: 59527 - DNA, 20 bp, synthetic construct
  misc_feature 1..20: note = chemically synthesized
  source 1..20: mol_type = other DNA
tcaatgaagtgctttgcaca

SEQ ID NO: 59528 - DNA, 20 bp, synthetic construct
  misc_feature 1..20: note = chemically synthesized
  source 1..20: mol_type = other DNA
cattaacatataggtaaaga

SEQ ID NO: 59529 - DNA, 20 bp, synthetic construct
  misc_feature 1..20: note = chemically synthesized
  source 1..20: mol_type = other DNA
catgtggtaaagtgggaagg

SEQ ID NO: 59530 - DNA, 20 bp, synthetic construct
  misc_feature 1..20: note = chemically synthesized
  source 1..20: mol_type = other DNA
gtaaagtgggaaggctgaat

SEQ ID NO: 59531 - DNA, 20 bp, synthetic construct
  misc_feature 1..20: note = chemically synthesized
  source 1..20: mol_type = other DNA
aggatattattttgttttta

SEQ ID NO: 59532 - DNA, 20 bp, synthetic construct
  misc_feature 1..20: note = chemically synthesized
  source 1..20: mol_type = other DNA
ccttattaaaaatatgacag

SEQ ID NO: 59533 - DNA, 20 bp, synthetic construct
  misc_feature 1..20: note = chemically synthesized
  source 1..20: mol_type = other DNA
ctcaatgaaataaaatgcta

SEQ ID NO: 59534 - DNA, 20 bp, synthetic construct
  misc_feature 1..20: note = chemically synthesized
  source 1..20: mol_type = other DNA
gtggattcagatcaccctct

SEQ ID NO: 59535 - DNA, 20 bp, synthetic construct
  misc_feature 1..20: note = chemically synthesized
  source 1..20: mol_type = other DNA
ccatgaaggcaccaagaaca

SEQ ID NO: 59536 - DNA, 20 bp, synthetic construct
  misc_feature 1..20: note = chemically synthesized
  source 1..20: mol_type = other DNA
tggccttggccagttaaact

SEQ ID NO: 59537 - DNA, 20 bp, synthetic construct
  misc_feature 1..20: note = chemically synthesized
  source 1..20: mol_type = other DNA
tcaaaatttagatatcagat

SEQ ID NO: 59538 - DNA, 20 bp, synthetic construct
  misc_feature 1..20: note = chemically synthesized
  source 1..20: mol_type = other DNA
tcaagatagcaaatcaagat

SEQ ID NO: 59539 - DNA, 20 bp, synthetic construct
  misc_feature 1..20: note = chemically synthesized
  source 1..20: mol_type = other DNA
tttggtagataactgacttt

SEQ ID NO: 59540 - DNA, 20 bp, synthetic construct
  misc_feature 1..20: note = chemically synthesized
  source 1..20: mol_type = other DNA
agataactgacttttaggat

SEQ ID NO: 59541 - DNA, 20 bp, synthetic construct
  misc_feature 1..20: note = chemically synthesized
  source 1..20: mol_type = other DNA
gttttccccttttgaaattt

SEQ ID NO: 59542 - DNA, 20 bp, synthetic construct
  misc_feature 1..20: note = chemically synthesized
  source 1..20: mol_type = other DNA
ccaccacaattttttagtca

SEQ ID NO: 59543 - DNA, 20 bp, synthetic construct
  misc_feature 1..20: note = chemically synthesized
  source 1..20: mol_type = other DNA
cacaattttttagtcattgg

SEQ ID NO: 59544 - DNA, 20 bp, synthetic construct
  misc_feature 1..20: note = chemically synthesized
  source 1..20: mol_type = other DNA
ttgttggtcttcctaatata

SEQ ID NO: 59545 - DNA, 20 bp, synthetic construct
  misc_feature 1..20: note = chemically synthesized
  source 1..20: mol_type = other DNA
agagaaagtatttatggcaa

SEQ ID NO: 59546 - DNA, 20 bp, synthetic construct
  misc_feature 1..20: note = chemically synthesized
  source 1..20: mol_type = other DNA
atgtctcatatttttcattc

SEQ ID NO: 59547 - DNA, 20 bp, synthetic construct
  misc_feature 1..20: note = chemically synthesized
  source 1..20: mol_type = other DNA
aatggctatattttctattt

SEQ ID NO: 59548 - DNA, 20 bp, synthetic construct
  misc_feature 1..20: note = chemically synthesized
  source 1..20: mol_type = other DNA
tctaagatttttttgggcaa

SEQ ID NO: 59549 - DNA, 20 bp, synthetic construct
  misc_feature 1..20: note = chemically synthesized
  source 1..20: mol_type = other DNA
gggcaaaagaatatttatag

SEQ ID NO: 59550 - DNA, 20 bp, synthetic construct
  misc_feature 1..20: note = chemically synthesized
  source 1..20: mol_type = other DNA
taaaatccagacatcctgca

SEQ ID NO: 59551 - DNA, 20 bp, synthetic construct
  misc_feature 1..20: note = chemically synthesized
  source 1..20: mol_type = other DNA
aaatgcaaatcatggcccta

SEQ ID NO: 59552 - DNA, 20 bp, synthetic construct
  misc_feature 1..20: note = chemically synthesized
  source 1..20: mol_type = other DNA
ccctagagagtaccctaact

SEQ ID NO: 59553 - DNA, 20 bp, synthetic construct
  misc_feature 1..20: note = chemically synthesized
  source 1..20: mol_type = other DNA
cttatcactatatttgccat

SEQ ID NO: 59554 - DNA, 20 bp, synthetic construct
  misc_feature 1..20: note = chemically synthesized
  source 1..20: mol_type = other DNA
gaataatgaaaattttaaat

SEQ ID NO: 59555 - DNA, 20 bp, synthetic construct
  misc_feature 1..20: note = chemically synthesized
  source 1..20: mol_type = other DNA
taaataagaatttatttcta

SEQ ID NO: 59556 - DNA, 20 bp, synthetic construct
  misc_feature 1..20: note = chemically synthesized
  source 1..20: mol_type = other DNA
atttcaggtgcatttgaaag

SEQ ID NO: 59557 - DNA, 20 bp, synthetic construct
  misc_feature 1..20: note = chemically synthesized
  source 1..20: mol_type = other DNA
ggtaaagtacttaagtcctt

SEQ ID NO: 59558 - DNA, 20 bp, synthetic construct
  misc_feature 1..20: note = chemically synthesized
  source 1..20: mol_type = other DNA
ctgtgtctgattctccagat

SEQ ID NO: 59559 - DNA, 20 bp, synthetic construct
  misc_feature 1..20: note = chemically synthesized
  source 1..20: mol_type = other DNA
aacctatgtttagataaaag

SEQ ID NO: 59560 - DNA, 20 bp, synthetic construct
  misc_feature 1..20: note = chemically synthesized
  source 1..20: mol_type = other DNA
ggttttgatgctgtagatga

SEQ ID NO: 59561 - DNA, 20 bp, synthetic construct
  misc_feature 1..20: note = chemically synthesized
  source 1..20: mol_type = other DNA
cattcttcccaaatctgtaa

SEQ ID NO: 59562 - DNA, 20 bp, synthetic construct
  misc_feature 1..20: note = chemically synthesized
  source 1..20: mol_type = other DNA
gcaatgcctatgacagtatt

SEQ ID NO: 59563 - DNA, 20 bp, synthetic construct
  misc_feature 1..20: note = chemically synthesized
  source 1..20: mol_type = other DNA
cctatgacagtattaagaat

SEQ ID NO: 59564 - DNA, 20 bp, synthetic construct
  misc_feature 1..20: note = chemically synthesized
  source 1..20: mol_type = other DNA
agaattagaatataggagaa

SEQ ID NO: 59565 - DNA, 20 bp, synthetic construct
  misc_feature 1..20: note = chemically synthesized
  source 1..20: mol_type = other DNA
tgttaaagagatcaaaatta

SEQ ID NO: 59566 - DNA, 20 bp, synthetic construct
  misc_feature 1..20: note = chemically synthesized
  source 1..20: mol_type = other DNA
aaaagacgcaaaattacagg

SEQ ID NO: 59567 - DNA, 20 bp, synthetic construct
  misc_feature 1..20: note = chemically synthesized
  source 1..20: mol_type = other DNA
gacgcaaaattacaggcagg

SEQ ID NO: 59568 - DNA, 20 bp, synthetic construct
  misc_feature 1..20: note = chemically synthesized
  source 1..20: mol_type = other DNA
gctatgactctagtattggt

SEQ ID NO: 59569 - DNA, 20 bp, synthetic construct
  misc_feature 1..20: note = chemically synthesized
  source 1..20: mol_type = other DNA
gagaatggaagcatatctca

SEQ ID NO: 59570 - DNA, 20 bp, synthetic construct
  misc_feature 1..20: note = chemically synthesized
  source 1..20: mol_type = other DNA
gaagcatatctcaaaggatt

SEQ ID NO: 59571 - DNA, 20 bp, synthetic construct
  misc_feature 1..20: note = chemically synthesized
  source 1..20: mol_type = other DNA
acctgattccacaacagaaa

SEQ ID NO: 59572 - DNA, 20 bp, synthetic construct
  misc_feature 1..20: note = chemically synthesized
  source 1..20: mol_type = other DNA
gattccacaacagaaaggga

SEQ ID NO: 59573 - DNA, 20 bp, synthetic construct
  misc_feature 1..20: note = chemically synthesized
  source 1..20: mol_type = other DNA
atctccctgtgattcaccca

SEQ ID NO: 59574 - DNA, 20 bp, synthetic construct
  misc_feature 1..20: note = chemically synthesized
  source 1..20: mol_type = other DNA
aggagcatgccattgcccag

SEQ ID NO: 59575 - DNA, 20 bp, synthetic construct
  misc_feature 1..20: note = chemically synthesized
  source 1..20: mol_type = other DNA
cacacataaacagcaaagaa

SEQ ID NO: 59576 - DNA, 20 bp, synthetic construct
  misc_feature 1..20: note = chemically synthesized
  source 1..20: mol_type = other DNA
ctgcaactattttcctgaag

SEQ ID NO: 59577 - DNA, 20 bp, synthetic construct
  misc_feature 1..20: note = chemically synthesized
  source 1..20: mol_type = other DNA
ttccctaattagaaaaaata

SEQ ID NO: 59578 - DNA, 20 bp, synthetic construct
  misc_feature 1..20: note = chemically synthesized
  source 1..20: mol_type = other DNA
atattatccgcaactatttt

SEQ ID NO: 59579 - DNA, 20 bp, synthetic construct
  misc_feature 1..20: note = chemically synthesized
  source 1..20: mol_type = other DNA
cataacataaatatacataa

SEQ ID NO: 59580 - DNA, 20 bp, synthetic construct
  misc_feature 1..20: note = chemically synthesized
  source 1..20: mol_type = other DNA
tttctcattttttttggaaa

SEQ ID NO: 59581 - DNA, 20 bp, synthetic construct
  misc_feature 1..20: note = chemically synthesized
  source 1..20: mol_type = other DNA
agttacttgagcttggccac

SEQ ID NO: 59582 - DNA, 20 bp, synthetic construct
  misc_feature 1..20: note = chemically synthesized
  source 1..20: mol_type = other DNA
tgagcttggccaccagagtt

SEQ ID NO: 59583 - DNA, 20 bp, synthetic construct
  misc_feature 1..20: note = chemically synthesized
  source 1..20: mol_type = other DNA
attctgccccttccaacatt

SEQ ID NO: 59584 - DNA, 20 bp, synthetic construct
  misc_feature 1..20: note = chemically synthesized
  source 1..20: mol_type = other DNA
ttataatgtttccacagcct

SEQ ID NO: 59585 - DNA, 20 bp, synthetic construct
  misc_feature 1..20: note = chemically synthesized
  source 1..20: mol_type = other DNA
cttggttgccacgatccaag

SEQ ID NO: 59586 - DNA, 20 bp, synthetic construct
  misc_feature 1..20: note = chemically synthesized
  source 1..20: mol_type = other DNA
gtcttatttaacgagaaatt

SEQ ID NO: 59587 - DNA, 20 bp, synthetic construct
  misc_feature 1..20: note = chemically synthesized
  source 1..20: mol_type = other DNA
cctcagtatcaaaaataaat

SEQ ID NO: 59588 - DNA, 20 bp, synthetic construct
  misc_feature 1..20: note = chemically synthesized
  source 1..20: mol_type = other DNA
ctacctctgtatcagctcct

SEQ ID NO: 59589 - DNA, 20 bp, synthetic construct
  misc_feature 1..20: note = chemically synthesized
  source 1..20: mol_type = other DNA
ctgtatcagctcctgtgagt

SEQ ID NO: 59590 - DNA, 20 bp, synthetic construct
  misc_feature 1..20: note = chemically synthesized
  source 1..20: mol_type = other DNA
gattgaaatcaccaacacta

SEQ ID NO: 59591 - DNA, 20 bp, synthetic construct
  misc_feature 1..20: note = chemically synthesized
  source 1..20: mol_type = other DNA
atccctaaaattaaatcaca

SEQ ID NO: 59592 - DNA, 20 bp, synthetic construct
  misc_feature 1..20: note = chemically synthesized
  source 1..20: mol_type = other DNA
cattgaattcatatagaaga

SEQ ID NO: 59593 - DNA, 20 bp, synthetic construct
  misc_feature 1..20: note = chemically synthesized
  source 1..20: mol_type = other DNA
atgcttaaaaacacagattg

SEQ ID NO: 59594 - DNA, 20 bp, synthetic construct
  misc_feature 1..20: note = chemically synthesized
  source 1..20: mol_type = other DNA
aaacacagattgaggaataa

SEQ ID NO: 59595 - DNA, 20 bp, synthetic construct
  misc_feature 1..20: note = chemically synthesized
  source 1..20: mol_type = other DNA
ttgaggaataagaggatgta

SEQ ID NO: 59596 - DNA, 20 bp, synthetic construct
  misc_feature 1..20: note = chemically synthesized
  source 1..20: mol_type = other DNA
ggaatgaggtataggaggaa

SEQ ID NO: 59597 - DNA, 20 bp, synthetic construct
  misc_feature 1..20: note = chemically synthesized
  source 1..20: mol_type = other DNA
aattggtgacacatattctg

SEQ ID NO: 59598 - DNA, 20 bp, synthetic construct
  misc_feature 1..20: note = chemically synthesized
  source 1..20: mol_type = other DNA
aaaaagaaagccataaaatc

SEQ ID NO: 59599 - DNA, 20 bp, synthetic construct
  misc_feature 1..20: note = chemically synthesized
  source 1..20: mol_type = other DNA
tcctttaaaaaaaattgtgt

SEQ ID NO: 59600 - DNA, 20 bp, synthetic construct
  misc_feature 1..20: note = chemically synthesized
  source 1..20: mol_type = other DNA
atctccctccatctctaagc

SEQ ID NO: 59601 - DNA, 20 bp, synthetic construct
  misc_feature 1..20: note = chemically synthesized
  source 1..20: mol_type = other DNA
taaatcatgtctgagatttt

SEQ ID NO: 59602 - DNA, 20 bp, synthetic construct
  misc_feature 1..20: note = chemically synthesized
  source 1..20: mol_type = other DNA
ttacccagaggcaggcgtgt

SEQ ID NO: 59603 - DNA, 20 bp, synthetic construct
  misc_feature 1..20: note = chemically synthesized
  source 1..20: mol_type = other DNA
aagcacaagaactagttttt

SEQ ID NO: 59604 - DNA, 20 bp, synthetic construct
  misc_feature 1..20: note = chemically synthesized
  source 1..20: mol_type = other DNA
taaatgtttagtgatttcct

SEQ ID NO: 59605 - DNA, 20 bp, synthetic construct
  misc_feature 1..20: note = chemically synthesized
  source 1..20: mol_type = other DNA
ttagtgatttcctaaggatc

SEQ ID NO: 59606 - DNA, 20 bp, synthetic construct
  misc_feature 1..20: note = chemically synthesized
  source 1..20: mol_type = other DNA
caagttggaaaatgactatt

SEQ ID NO: 59607 - DNA, 20 bp, synthetic construct
  misc_feature 1..20: note = chemically synthesized
  source 1..20: mol_type = other DNA
atgactattttgagtcagca

SEQ ID NO: 59608 - DNA, 20 bp, synthetic construct
  misc_feature 1..20: note = chemically synthesized
  source 1..20: mol_type = other DNA
agaagctctcaatatggcct

SEQ ID NO: 59609 - DNA, 20 bp, synthetic construct
  misc_feature 1..20: note = chemically synthesized
  source 1..20: mol_type = other DNA
attctcccttcaattttatg

SEQ ID NO: 59610 - DNA, 20 bp, synthetic construct
  misc_feature 1..20: note = chemically synthesized
  source 1..20: mol_type = other DNA
ttttatgcagaatattgccc

SEQ ID NO: 59611 - DNA, 20 bp, synthetic construct
  misc_feature 1..20: note = chemically synthesized
  source 1..20: mol_type = other DNA
attgcccttgaatgtctcaa

SEQ ID NO: 59612 - DNA, 20 bp, synthetic construct
  misc_feature 1..20: note = chemically synthesized
  source 1..20: mol_type = other DNA
attctagatgttctattgac

SEQ ID NO: 59613 - DNA, 20 bp, synthetic construct
  misc_feature 1..20: note = chemically synthesized
  source 1..20: mol_type = other DNA
acatgatgatatatttctag

SEQ ID NO: 59614 - DNA, 20 bp, synthetic construct
  misc_feature 1..20: note = chemically synthesized
  source 1..20: mol_type = other DNA
gctcactttgagaacataat

SEQ ID NO: 59615 - DNA, 20 bp, synthetic construct
  misc_feature 1..20: note = chemically synthesized
  source 1..20: mol_type = other DNA
ttgaatgttaccagatacaa

SEQ ID NO: 59616 - DNA, 20 bp, synthetic construct
  misc_feature 1..20: note = chemically synthesized
  source 1..20: mol_type = other DNA
tcaagaaaatgtagtaaata

SEQ ID NO: 59617 - DNA, 20 bp, synthetic construct
  misc_feature 1..20: note = chemically synthesized
  source 1..20: mol_type = other DNA
tttcctactctgccctcctt

SEQ ID NO: 59618 - DNA, 20 bp, synthetic construct
  misc_feature 1..20: note = chemically synthesized
  source 1..20: mol_type = other DNA
tactctgccctccttctgag

SEQ ID NO: 59619 - DNA, 20 bp, synthetic construct
  misc_feature 1..20: note = chemically synthesized
  source 1..20: mol_type = other DNA
aaggagatgggccctgtctc

SEQ ID NO: 59620 - DNA, 20 bp, synthetic construct
  misc_feature 1..20: note = chemically synthesized
  source 1..20: mol_type = other DNA
ctgtctctagaatttttcta

SEQ ID NO: 59621 - DNA, 20 bp, synthetic construct
  misc_feature 1..20: note = chemically synthesized
  source 1..20: mol_type = other DNA
acatgcatgtgtgtgtttca

SEQ ID NO: 59622 - DNA, 20 bp, synthetic construct
  misc_feature 1..20: note = chemically synthesized
  source 1..20: mol_type = other DNA
tgtgtttcaaggggtgttgt

SEQ ID NO: 59623 - DNA, 20 bp, synthetic construct
  misc_feature 1..20: note = chemically synthesized
  source 1..20: mol_type = other DNA
acttttctttctataaattt

SEQ ID NO: 59624 - DNA, 20 bp, synthetic construct
  misc_feature 1..20: note = chemically synthesized
  source 1..20: mol_type = other DNA
tataaatttcaggatcttag

SEQ ID NO: 59625 - DNA, 20 bp, synthetic construct
  misc_feature 1..20: note = chemically synthesized
  source 1..20: mol_type = other DNA
tgtctttaatcttcaaaaaa

SEQ ID NO: 59626 - DNA, 20 bp, synthetic construct
  misc_feature 1..20: note = chemically synthesized
  source 1..20: mol_type = other DNA
ctaagcctttcaactcgatt

SEQ ID NO: 59627 - DNA, 20 bp, synthetic construct
  misc_feature 1..20: note = chemically synthesized
  source 1..20: mol_type = other DNA
aaacgtaaaataagcccttt

SEQ ID NO: 59628 - DNA, 20 bp, synthetic construct
  misc_feature 1..20: note = chemically synthesized
  source 1..20: mol_type = other DNA
cctttctggataaacaaaaa

SEQ ID NO: 59629 - DNA, 20 bp, synthetic construct
  misc_feature 1..20: note = chemically synthesized
  source 1..20: mol_type = other DNA
aaatgaccaaagatgatcat

SEQ ID NO: 59630 - DNA, 20 bp, synthetic construct
  misc_feature 1..20: note = chemically synthesized
  source 1..20: mol_type = other DNA
tctgcttcttattttcaaaa

SEQ ID NO: 59631 - DNA, 20 bp, synthetic construct
  misc_feature 1..20: note = chemically synthesized
  source 1..20: mol_type = other DNA
gaatgtattacaataaaaaa

SEQ ID NO: 59632 - DNA, 20 bp, synthetic construct
  misc_feature 1..20: note = chemically synthesized
  source 1..20: mol_type = other DNA
ccaataactgaacaaaggag

SEQ ID NO: 59633 - DNA, 20 bp, synthetic construct
  misc_feature 1..20: note = chemically synthesized
  source 1..20: mol_type = other DNA
gagtgataacaaagctgttt

SEQ ID NO: 59634 - DNA, 20 bp, synthetic construct
  misc_feature 1..20: note = chemically synthesized
  source 1..20: mol_type = other DNA
ataaacatctacatagaaaa

SEQ ID NO: 59635 - DNA, 20 bp, synthetic construct
  misc_feature 1..20: note = chemically synthesized
  source 1..20: mol_type = other DNA
atctacatagaaaaatgagt

SEQ ID NO: 59636 - DNA, 20 bp, synthetic construct
  misc_feature 1..20: note = chemically synthesized
  source 1..20: mol_type = other DNA
aattatacttatgccaatcc

SEQ ID NO: 59637 - DNA, 20 bp, synthetic construct
  misc_feature 1..20: note = chemically synthesized
  source 1..20: mol_type = other DNA
aaaaaaaaaaatctgtgctg

SEQ ID NO: 59638 - DNA, 20 bp, synthetic construct
  misc_feature 1..20: note = chemically synthesized
  source 1..20: mol_type = other DNA
aaccttcttatatgctttcc

SEQ ID NO: 59639 - DNA, 20 bp, synthetic construct
  misc_feature 1..20: note = chemically synthesized
  source 1..20: mol_type = other DNA
catctcacatcagaagagag

SEQ ID NO: 59640 - DNA, 20 bp, synthetic construct
  misc_feature 1..20: note = chemically synthesized
  source 1..20: mol_type = other DNA
gcatgtggaaatcacctccc

SEQ ID NO: 59641 - DNA, 20 bp, synthetic construct
  misc_feature 1..20: note = chemically synthesized
  source 1..20: mol_type = other DNA
ggccccacaactgatgtcct

SEQ ID NO: 59642 - DNA, 20 bp, synthetic construct
  misc_feature 1..20: note = chemically synthesized
  source 1..20: mol_type = other DNA
ggattttcaggtgtttcctg

SEQ ID NO: 59643 - DNA, 20 bp, synthetic construct
  misc_feature 1..20: note = chemically synthesized
  source 1..20: mol_type = other DNA
ttcaggtgtttcctgaagaa

SEQ ID NO: 59644 - DNA, 20 bp, synthetic construct
  misc_feature 1..20: note = chemically synthesized
  source 1..20: mol_type = other DNA
aaaaccagctgatgtaagat

SEQ ID NO: 59645 - DNA, 20 bp, synthetic construct
  misc_feature 1..20: note = chemically synthesized
  source 1..20: mol_type = other DNA
tcataacttagtttatttga

SEQ ID NO: 59646 - DNA, 20 bp, synthetic construct
  misc_feature 1..20: note = chemically synthesized
  source 1..20: mol_type = other DNA
tagtttatttgaaagggtta

SEQ ID NO: 59647 - DNA, 20 bp, synthetic construct
  misc_feature 1..20: note = chemically synthesized
  source 1..20: mol_type = other DNA
aggggatatcggttgtcttc

SEQ ID NO: 59648 - DNA, 20 bp, synthetic construct
  misc_feature 1..20: note = chemically synthesized
  source 1..20: mol_type = other DNA
cagggatcatatgtacctct

SEQ ID NO: 59649 - DNA, 20 bp, synthetic construct
  misc_feature 1..20: note = chemically synthesized
  source 1..20: mol_type = other DNA
ctctacgggtcctagagctt

SEQ ID NO: 59650 - DNA, 20 bp, synthetic construct
  misc_feature 1..20: note = chemically synthesized
  source 1..20: mol_type = other DNA
tcttatctactggaacttca

SEQ ID NO: 59651 - DNA, 20 bp, synthetic construct
  misc_feature 1..20: note = chemically synthesized
  source 1..20: mol_type = other DNA
tttttttttttttttttaga

SEQ ID NO: 59652 - DNA, 20 bp, synthetic construct
  misc_feature 1..20: note = chemically synthesized
  source 1..20: mol_type = other DNA
gtctcactctgtcgccaggc

SEQ ID NO: 59653 - DNA, 20 bp, synthetic construct
  misc_feature 1..20: note = chemically synthesized
  source 1..20: mol_type = other DNA
ttttgtatttttagtagaca

SEQ ID NO: 59654 - DNA, 20 bp, synthetic construct
  misc_feature 1..20: note = chemically synthesized
  source 1..20: mol_type = other DNA
cggggtttcaccatattggc

SEQ ID NO: 59655 - DNA, 20 bp, synthetic construct
  misc_feature 1..20: note = chemically synthesized
  source 1..20: mol_type = other DNA
tccttggcctcccaaagtgc

SEQ ID NO: 59656 - DNA, 20 bp, synthetic construct
  misc_feature 1..20: note = chemically synthesized
  source 1..20: mol_type = other DNA
aaagtgctgggattgcaggt

SEQ ID NO: 59657 - DNA, 20 bp, synthetic construct
  misc_feature 1..20: note = chemically synthesized
  source 1..20: mol_type = other DNA
aggagcatagtctttattca

SEQ ID NO: 59658 - DNA, 20 bp, synthetic construct
  misc_feature 1..20: note = chemically synthesized
  source 1..20: mol_type = other DNA
aaatatagtgtttgtataag

SEQ ID NO: 59659 - DNA, 20 bp, synthetic construct
  misc_feature 1..20: note = chemically synthesized
  source 1..20: mol_type = other DNA
atatgacaaactcaaatcaa

SEQ ID NO: 59660 - DNA, 20 bp, synthetic construct
  misc_feature 1..20: note = chemically synthesized
  source 1..20: mol_type = other DNA
caagagaattctagcagagc

SEQ ID NO: 59661 - DNA, 20 bp, synthetic construct
  misc_feature 1..20: note = chemically synthesized
  source 1..20: mol_type = other DNA
gtgagaaaattgaacacaaa

SEQ ID NO: 59662 - DNA, 20 bp, synthetic construct
  misc_feature 1..20: note = chemically synthesized
  source 1..20: mol_type = other DNA
tattattatactttaagttt

SEQ ID NO: 59663 - DNA, 20 bp, synthetic construct
  misc_feature 1..20: note = chemically synthesized
  source 1..20: mol_type = other DNA
ccccacctcacaacagtccc

SEQ ID NO: 59664 - DNA, 20 bp, synthetic construct
  misc_feature 1..20: note = chemically synthesized
  source 1..20: mol_type = other DNA
tcattgttcaattcccacct

SEQ ID NO: 59665 - DNA, 20 bp, synthetic construct
  misc_feature 1..20: note = chemically synthesized
  source 1..20: mol_type = other DNA
tgtccttgcgatagtttgct

SEQ ID NO: 59666 - DNA, 20 bp, synthetic construct
  misc_feature 1..20: note = chemically synthesized
  source 1..20: mol_type = other DNA
agtctatcattgttggacat

SEQ ID NO: 59667 - DNA, 20 bp, synthetic construct
  misc_feature 1..20: note = chemically synthesized
  source 1..20: mol_type = other DNA
ggttccaagtctttgctatt

SEQ ID NO: 59668 - DNA, 20 bp, synthetic construct
  misc_feature 1..20: note = chemically synthesized
  source 1..20: mol_type = other DNA
gcagcatgatttataatccg

SEQ ID NO: 59669 - DNA, 20 bp, synthetic construct
  misc_feature 1..20: note = chemically synthesized
  source 1..20: mol_type = other DNA
gttgggtatatacccagtaa

SEQ ID NO: 59670 - DNA, 20 bp, synthetic construct
  misc_feature 1..20: note = chemically synthesized
  source 1..20: mol_type = other DNA
tatacccagtaatgggatgg

SEQ ID NO: 59671 - DNA, 20 bp, synthetic construct
  misc_feature 1..20: note = chemically synthesized
  source 1..20: mol_type = other DNA
tttctagttctagatccctg

SEQ ID NO: 59672 - DNA, 20 bp, synthetic construct
  misc_feature 1..20: note = chemically synthesized
  source 1..20: mol_type = other DNA
aactagtttacagtcccacc

SEQ ID NO: 59673 - DNA, 20 bp, synthetic construct
  misc_feature 1..20: note = chemically synthesized
  source 1..20: mol_type = other DNA
tgatgaagcacagtgtctga

SEQ ID NO: 59674 - DNA, 20 bp, synthetic construct
  misc_feature 1..20: note = chemically synthesized
  source 1..20: mol_type = other DNA
gcaattcccatgaccttctt

SEQ ID NO: 59675 - DNA, 20 bp, synthetic construct
  misc_feature 1..20: note = chemically synthesized
  source 1..20: mol_type = other DNA
cccatgaccttcttaaggat

SEQ ID NO: 59676 - DNA, 20 bp, synthetic construct
  misc_feature 1..20: note = chemically synthesized
  source 1..20: mol_type = other DNA
aggatcagaatgtaagagat

SEQ ID NO: 59677 - DNA, 20 bp, synthetic construct
  misc_feature 1..20: note = chemically synthesized
  source 1..20: mol_type = other DNA
agttgatgagaccaggacta

SEQ ID NO: 59678 - DNA, 20 bp, synthetic construct
  misc_feature 1..20: note = chemically synthesized
  source 1..20: mol_type = other DNA
agaaagcatgggagaggaca

SEQ ID NO: 59679 - DNA, 20 bp, synthetic construct
  misc_feature 1..20: note = chemically synthesized
  source 1..20: mol_type = other DNA
ggacatgggattgacagtag

SEQ ID NO: 59680 - DNA, 20 bp, synthetic construct
  misc_feature 1..20: note = chemically synthesized
  source 1..20: mol_type = other DNA
tgacagtaggggaatccaga

SEQ ID NO: 59681 - DNA, 20 bp, synthetic construct
  misc_feature 1..20: note = chemically synthesized
  source 1..20: mol_type = other DNA
ttcaccaccttagcattggt

SEQ ID NO: 59682 - DNA, 20 bp, synthetic construct
  misc_feature 1..20: note = chemically synthesized
  source 1..20: mol_type = other DNA
gagaatggaggtgtatctca

SEQ ID NO: 59683 - DNA, 20 bp, synthetic construct
  misc_feature 1..20: note = chemically synthesized
  source 1..20: mol_type = other DNA
gaggtgtatctcaggggatt

SEQ ID NO: 59684 - DNA, 20 bp, synthetic construct
  misc_feature 1..20: note = chemically synthesized
  source 1..20: mol_type = other DNA
tctggactccacgatagaga

SEQ ID NO: 59685 - DNA, 20 bp, synthetic construct
  misc_feature 1..20: note = chemically synthesized
  source 1..20: mol_type = other DNA
gactccacgatagagaggga

SEQ ID NO: 59686 - DNA, 20 bp, synthetic construct
  misc_feature 1..20: note = chemically synthesized
  source 1..20: mol_type = other DNA
tatggctgccagtatagtca

SEQ ID NO: 59687 - DNA, 20 bp, synthetic construct
  misc_feature 1..20: note = chemically synthesized
  source 1..20: mol_type = other DNA
gagtagtacacgggctcatg

SEQ ID NO: 59688 - DNA, 20 bp, synthetic construct
  misc_feature 1..20: note = chemically synthesized
  source 1..20: mol_type = other DNA
aaagaaggagatagaactcc

SEQ ID NO: 59689 - DNA, 20 bp, synthetic construct
  misc_feature 1..20: note = chemically synthesized
  source 1..20: mol_type = other DNA
gaaaaggggcagcagtaatg

SEQ ID NO: 59690 - DNA, 20 bp, synthetic construct
  misc_feature 1..20: note = chemically synthesized
  source 1..20: mol_type = other DNA
cagtaatggtgggtgacatg

SEQ ID NO: 59691 - DNA, 20 bp, synthetic construct
  misc_feature 1..20: note = chemically synthesized
  source 1..20: mol_type = other DNA
gttctggtagtcacattaaa

SEQ ID NO: 59692 - DNA, 20 bp, synthetic construct
  misc_feature 1..20: note = chemically synthesized
  source 1..20: mol_type = other DNA
ttggtacaaattcttcaaaa

SEQ ID NO: 59693 - DNA, 20 bp, synthetic construct
  misc_feature 1..20: note = chemically synthesized
  source 1..20: mol_type = other DNA
tgcttcatcaaaaaaatgtt

SEQ ID NO: 59694 - DNA, 20 bp, synthetic construct
  misc_feature 1..20: note = chemically synthesized
  source 1..20: mol_type = other DNA
ctatcctaatttctaggact

SEQ ID NO: 59695 - DNA, 20 bp, synthetic construct
  misc_feature 1..20: note = chemically synthesized
  source 1..20: mol_type = other DNA
atatgatacaatatcatgct

SEQ ID NO: 59696 - DNA, 20 bp, synthetic construct
  misc_feature 1..20: note = chemically synthesized
  source 1..20: mol_type = other DNA
aagttgctgatctattgact

SEQ ID NO: 59697 - DNA, 20 bp, synthetic construct
  misc_feature 1..20: note = chemically synthesized
  source 1..20: mol_type = other DNA
attccatgagcccctaaaag

SEQ ID NO: 59698 - DNA, 20 bp, synthetic construct
  misc_feature 1..20: note = chemically synthesized
  source 1..20: mol_type = other DNA
gagttttcaccaagtagtag

SEQ ID NO: 59699 - DNA, 20 bp, synthetic construct
  misc_feature 1..20: note = chemically synthesized
  source 1..20: mol_type = other DNA
tcaaaatttgagaaaggttc

SEQ ID NO: 59700 - DNA, 20 bp, synthetic construct
  misc_feature 1..20: note = chemically synthesized
  source 1..20: mol_type = other DNA
tataaggaggtcacaaaaga

SEQ ID NO: 59701 - DNA, 20 bp, synthetic construct
  misc_feature 1..20: note = chemically synthesized
  source 1..20: mol_type = other DNA
acaaaaacaaacagggactt

SEQ ID NO: 59702 - DNA, 20 bp, synthetic construct
  misc_feature 1..20: note = chemically synthesized
  source 1..20: mol_type = other DNA
aggaaactgaactctgacag

SEQ ID NO: 59703 - DNA, 20 bp, synthetic construct
  misc_feature 1..20: note = chemically synthesized
  source 1..20: mol_type = other DNA
actttgggaggccaaggcgg

SEQ ID NO: 59704 - DNA, 20 bp, synthetic construct
  misc_feature 1..20: note = chemically synthesized
  source 1..20: mol_type = other DNA
cgggcggatcacctgaggtc

SEQ ID NO: 59705 - DNA, 20 bp, synthetic construct
  misc_feature 1..20: note = chemically synthesized
  source 1..20: mol_type = other DNA
tacttgggaaactgaggcag

SEQ ID NO: 59706 - DNA, 20 bp, synthetic construct
  misc_feature 1..20: note = chemically synthesized
  source 1..20: mol_type = other DNA
ttgtgccactgcactccagg

SEQ ID NO: 59707 - DNA, 20 bp, synthetic construct
  misc_feature 1..20: note = chemically synthesized
  source 1..20: mol_type = other DNA
aactgagctctgactacaat

SEQ ID NO: 59708 - DNA, 20 bp, synthetic construct
  misc_feature 1..20: note = chemically synthesized
  source 1..20: mol_type = other DNA
caatctgaatgaacgtggaa

SEQ ID NO: 59709 - DNA, 20 bp, synthetic construct
  misc_feature 1..20: note = chemically synthesized
  source 1..20: mol_type = other DNA
cgaattcttccccagagcct

SEQ ID NO: 59710 - DNA, 20 bp, synthetic construct
  misc_feature 1..20: note = chemically synthesized
  source 1..20: mol_type = other DNA
agcccagccctcccgatatt

SEQ ID NO: 59711 - DNA, 20 bp, synthetic construct
  misc_feature 1..20: note = chemically synthesized
  source 1..20: mol_type = other DNA
gagaactcagttaagcctat

SEQ ID NO: 59712 - DNA, 20 bp, synthetic construct
  misc_feature 1..20: note = chemically synthesized
  source 1..20: mol_type = other DNA
actattatccatattttatt

SEQ ID NO: 59713 - DNA, 20 bp, synthetic construct
  misc_feature 1..20: note = chemically synthesized
  source 1..20: mol_type = other DNA
catattttattaagagttta

SEQ ID NO: 59714 - DNA, 20 bp, synthetic construct
  misc_feature 1..20: note = chemically synthesized
  source 1..20: mol_type = other DNA
ctataataaactaatattta

SEQ ID NO: 59715 - DNA, 20 bp, synthetic construct
  misc_feature 1..20: note = chemically synthesized
  source 1..20: mol_type = other DNA
gtatcatttatctattatca

SEQ ID NO: 59716 - DNA, 20 bp, synthetic construct
  misc_feature 1..20: note = chemically synthesized
  source 1..20: mol_type = other DNA
gcaccatctgctcaggtaca

SEQ ID NO: 59717 - DNA, 20 bp, synthetic construct
  misc_feature 1..20: note = chemically synthesized
  source 1..20: mol_type = other DNA
aatggccctggaagcaatga

SEQ ID NO: 59718 - DNA, 20 bp, synthetic construct
  misc_feature 1..20: note = chemically synthesized
  source 1..20: mol_type = other DNA
aaggcagaaagggaacatag

SEQ ID NO: 59719 - DNA, 20 bp, synthetic construct
  misc_feature 1..20: note = chemically synthesized
  source 1..20: mol_type = other DNA
ccaccctgcacattcactcc

SEQ ID NO: 59720 - DNA, 20 bp, synthetic construct
  misc_feature 1..20: note = chemically synthesized
  source 1..20: mol_type = other DNA
taaaactactgtttttattt

SEQ ID NO: 59721 - DNA, 20 bp, synthetic construct
  misc_feature 1..20: note = chemically synthesized
  source 1..20: mol_type = other DNA
ttggaggttgatacacccgg

SEQ ID NO: 59722 - DNA, 20 bp, synthetic construct
  misc_feature 1..20: note = chemically synthesized
  source 1..20: mol_type = other DNA
gcaacaactatgtggtggaa

SEQ ID NO: 59723 - DNA, 20 bp, synthetic construct
  misc_feature 1..20: note = chemically synthesized
  source 1..20: mol_type = other DNA
atagtcactagagcctgacc

SEQ ID NO: 59724 - DNA, 20 bp, synthetic construct
  misc_feature 1..20: note = chemically synthesized
  source 1..20: mol_type = other DNA
attaaggggagaggtaattg

SEQ ID NO: 59725 - DNA, 20 bp, synthetic construct
  misc_feature 1..20: note = chemically synthesized
  source 1..20: mol_type = other DNA
gtatctctgaagactgctaa

SEQ ID NO: 59726 - DNA, 20 bp, synthetic construct
  misc_feature 1..20: note = chemically synthesized
  source 1..20: mol_type = other DNA
ccccagtatctgtcttgatg

SEQ ID NO: 59727 - DNA, 20 bp, synthetic construct
  misc_feature 1..20: note = chemically synthesized
  source 1..20: mol_type = other DNA
atgctggataattaggctac

SEQ ID NO: 59728 - DNA, 20 bp, synthetic construct
  misc_feature 1..20: note = chemically synthesized
  source 1..20: mol_type = other DNA
ttttctttgcaaaaagaaaa

SEQ ID NO: 59729 - DNA, 20 bp, synthetic construct
  misc_feature 1..20: note = chemically synthesized
  source 1..20: mol_type = other DNA
tttgttatatatactcacaa

SEQ ID NO: 59730 - DNA, 20 bp, synthetic construct
  misc_feature 1..20: note = chemically synthesized
  source 1..20: mol_type = other DNA
tctcttggtaagtcttgccc

SEQ ID NO: 59731 - DNA, 20 bp, synthetic construct
  misc_feature 1..20: note = chemically synthesized
  source 1..20: mol_type = other DNA
ggtaagtcttgcccaagaat

SEQ ID NO: 59732 - DNA, 20 bp, synthetic construct
  misc_feature 1..20: note = chemically synthesized
  source 1..20: mol_type = other DNA
ctttgtctgacaatttgtac

SEQ ID NO: 59733 - DNA, 20 bp, synthetic construct
  misc_feature 1..20: note = chemically synthesized
  source 1..20: mol_type = other DNA
tcatagtctgtcagagaaat

SEQ ID NO: 59734 - DNA, 20 bp, synthetic construct
  misc_feature 1..20: note = chemically synthesized
  source 1..20: mol_type = other DNA
tgtcagagaaataaggatct

SEQ ID NO: 59735 - DNA, 20 bp, synthetic construct
  misc_feature 1..20: note = chemically synthesized
  source 1..20: mol_type = other DNA
cccaactatgagattttaaa

SEQ ID NO: 59736 - DNA, 20 bp, synthetic construct
  misc_feature 1..20: note = chemically synthesized
  source 1..20: mol_type = other DNA
tatgagattttaaaatgagt

SEQ ID NO: 59737 - DNA, 20 bp, synthetic construct
  misc_feature 1..20: note = chemically synthesized
  source 1..20: mol_type = other DNA
ggtgcaatgtggtgaaccat

SEQ ID NO: 59738 - DNA, 20 bp, synthetic construct
  misc_feature 1..20: note = chemically synthesized
  source 1..20: mol_type = other DNA
taggtcttcctaaatgtaag

SEQ ID NO: 59739 - DNA, 20 bp, synthetic construct
  misc_feature 1..20: note = chemically synthesized
  source 1..20: mol_type = other DNA
tactaagttaaaatttaggt

SEQ ID NO: 59740 - DNA, 20 bp, synthetic construct
  misc_feature 1..20: note = chemically synthesized
  source 1..20: mol_type = other DNA
gaccctctcactggcagtac

SEQ ID NO: 59741 - DNA, 20 bp, synthetic construct
  misc_feature 1..20: note = chemically synthesized
  source 1..20: mol_type = other DNA
taatttcctgcagactgccc

SEQ ID NO: 59742 - DNA, 20 bp, synthetic construct
  misc_feature 1..20: note = chemically synthesized
  source 1..20: mol_type = other DNA
cctgcagactgccccagagt

SEQ ID NO: 59743 - DNA, 20 bp, synthetic construct
  misc_feature 1..20: note = chemically synthesized
  source 1..20: mol_type = other DNA
gtgaagtgacactgttggtg

SEQ ID NO: 59744 - DNA, 20 bp, synthetic construct
  misc_feature 1..20: note = chemically synthesized
  source 1..20: mol_type = other DNA
tggtggaggataagcctcca

SEQ ID NO: 59745 - DNA, 20 bp, synthetic construct
  misc_feature 1..20: note = chemically synthesized
  source 1..20: mol_type = other DNA
ttgatgcagtgtttcctgac

SEQ ID NO: 59746 - DNA, 20 bp, synthetic construct
  misc_feature 1..20: note = chemically synthesized
  source 1..20: mol_type = other DNA
ttcctgacaagggtcatccg

SEQ ID NO: 59747 - DNA, 20 bp, synthetic construct
  misc_feature 1..20: note = chemically synthesized
  source 1..20: mol_type = other DNA
tcacataacacaatatttat

SEQ ID NO: 59748 - DNA, 20 bp, synthetic construct
  misc_feature 1..20: note = chemically synthesized
  source 1..20: mol_type = other DNA
attcaggaaggtctctatcc

SEQ ID NO: 59749 - DNA, 20 bp, synthetic construct
  misc_feature 1..20: note = chemically synthesized
  source 1..20: mol_type = other DNA
cctaggatttttgctgtttg

SEQ ID NO: 59750 - DNA, 20 bp, synthetic construct
  misc_feature 1..20: note = chemically synthesized
  source 1..20: mol_type = other DNA
ttctattatctgtcagcctt

SEQ ID NO: 59751 - DNA, 20 bp, synthetic construct
  misc_feature 1..20: note = chemically synthesized
  source 1..20: mol_type = other DNA
atgccaatttgactgggcca

SEQ ID NO: 59752 - DNA, 20 bp, synthetic construct
  misc_feature 1..20: note = chemically synthesized
  source 1..20: mol_type = other DNA
attattctagatgtttttgt

SEQ ID NO: 59753 - DNA, 20 bp, synthetic construct
  misc_feature 1..20: note = chemically synthesized
  source 1..20: mol_type = other DNA
tcctccaatcagttgaaaac

SEQ ID NO: 59754 - DNA, 20 bp, synthetic construct
  misc_feature 1..20: note = chemically synthesized
  source 1..20: mol_type = other DNA
tgacccttccccaaatcaga

SEQ ID NO: 59755 - DNA, 20 bp, synthetic construct
  misc_feature 1..20: note = chemically synthesized
  source 1..20: mol_type = other DNA
cttattgatggccttcaaac

SEQ ID NO: 59756 - DNA, 20 bp, synthetic construct
  misc_feature 1..20: note = chemically synthesized
  source 1..20: mol_type = other DNA
aactgaaacatcaaaacttc

SEQ ID NO: 59757 - DNA, 20 bp, synthetic construct
  misc_feature 1..20: note = chemically synthesized
  source 1..20: mol_type = other DNA
ggtctgaagcctgatggctt

SEQ ID NO: 59758 - DNA, 20 bp, synthetic construct
  misc_feature 1..20: note = chemically synthesized
  source 1..20: mol_type = other DNA
gactaaactaccaggctctc

SEQ ID NO: 59759 - DNA, 20 bp, synthetic construct
  misc_feature 1..20: note = chemically synthesized
  source 1..20: mol_type = other DNA
cattatttttttttaatgca

SEQ ID NO: 59760 - DNA, 20 bp, synthetic construct
  misc_feature 1..20: note = chemically synthesized
  source 1..20: mol_type = other DNA
taagttctgaggtacatgtg

SEQ ID NO: 59761 - DNA, 20 bp, synthetic construct
  misc_feature 1..20: note = chemically synthesized
  source 1..20: mol_type = other DNA
tgtctatcattgatggccat

SEQ ID NO: 59762 - DNA, 20 bp, synthetic construct
  misc_feature 1..20: note = chemically synthesized
  source 1..20: mol_type = other DNA
gattctatgtctttgctatt

SEQ ID NO: 59763 - DNA, 20 bp, synthetic construct
  misc_feature 1..20: note = chemically synthesized
  source 1..20: mol_type = other DNA
atgtgcatgtatcttagtaa

SEQ ID NO: 59764 - DNA, 20 bp, synthetic construct
  misc_feature 1..20: note = chemically synthesized
  source 1..20: mol_type = other DNA
tttaggtatatacccagtaa

SEQ ID NO: 59765 - DNA, 20 bp, synthetic construct
  misc_feature 1..20: note = chemically synthesized
  source 1..20: mol_type = other DNA
tttctggttctaaatctttg

SEQ ID NO: 59766 - DNA, 20 bp, synthetic construct
  misc_feature 1..20: note = chemically synthesized
  source 1..20: mol_type = other DNA
cacactgtcttccacaatgg

SEQ ID NO: 59767 - DNA, 20 bp, synthetic construct
  misc_feature 1..20: note = chemically synthesized
  source 1..20: mol_type = other DNA
gtcctttgcccactttttaa

SEQ ID NO: 59768 - DNA, 20 bp, synthetic construct
  misc_feature 1..20: note = chemically synthesized
  source 1..20: mol_type = other DNA
gtctaagttcctcatagatt

SEQ ID NO: 59769 - DNA, 20 bp, synthetic construct
  misc_feature 1..20: note = chemically synthesized
  source 1..20: mol_type = other DNA
ggatattagacctttgtcag

SEQ ID NO: 59770 - DNA, 20 bp, synthetic construct
  misc_feature 1..20: note = chemically synthesized
  source 1..20: mol_type = other DNA
tctcactctttcacccatgc

SEQ ID NO: 59771 - DNA, 20 bp, synthetic construct
  misc_feature 1..20: note = chemically synthesized
  source 1..20: mol_type = other DNA
ctcactgcaacctctgcctc

SEQ ID NO: 59772 - DNA, 20 bp, synthetic construct
  misc_feature 1..20: note = chemically synthesized
  source 1..20: mol_type = other DNA
aattctcctgcctcagcctc

SEQ ID NO: 59773 - DNA, 20 bp, synthetic construct
  misc_feature 1..20: note = chemically synthesized
  source 1..20: mol_type = other DNA
ttttgtatttttagtagaga

SEQ ID NO: 59774 - DNA, 20 bp, synthetic construct
  misc_feature 1..20: note = chemically synthesized
  source 1..20: mol_type = other DNA
accttggcctcccaaagtgc

SEQ ID NO: 59775 - DNA, 20 bp, synthetic construct
  misc_feature 1..20: note = chemically synthesized
  source 1..20: mol_type = other DNA
tctttgcctgtgtctatgtc

SEQ ID NO: 59776 - DNA, 20 bp, synthetic construct
  misc_feature 1..20: note = chemically synthesized
  source 1..20: mol_type = other DNA
cttctaaagtttttatagtt

SEQ ID NO: 59777 - DNA, 20 bp, synthetic construct
  misc_feature 1..20: note = chemically synthesized
  source 1..20: mol_type = other DNA
acttaagtctttaatgcatc

SEQ ID NO: 59778 - DNA, 20 bp, synthetic construct
  misc_feature 1..20: note = chemically synthesized
  source 1..20: mol_type = other DNA
ttatgtataagatgtaagga

SEQ ID NO: 59779 - DNA, 20 bp, synthetic construct
  misc_feature 1..20: note = chemically synthesized
  source 1..20: mol_type = other DNA
ccagcacaatttataaaata

SEQ ID NO: 59780 - DNA, 20 bp, synthetic construct
  misc_feature 1..20: note = chemically synthesized
  source 1..20: mol_type = other DNA
tcagatgcgcggtcttactt

SEQ ID NO: 59781 - DNA, 20 bp, synthetic construct
  misc_feature 1..20: note = chemically synthesized
  source 1..20: mol_type = other DNA
ccttgtagtataatttgaag

SEQ ID NO: 59782 - DNA, 20 bp, synthetic construct
  misc_feature 1..20: note = chemically synthesized
  source 1..20: mol_type = other DNA
ccataaaataaattttgtct

SEQ ID NO: 59783 - DNA, 20 bp, synthetic construct
  misc_feature 1..20: note = chemically synthesized
  source 1..20: mol_type = other DNA
taataacaatgactgtgtct

SEQ ID NO: 59784 - DNA, 20 bp, synthetic construct
  misc_feature 1..20: note = chemically synthesized
  source 1..20: mol_type = other DNA
ttaattggacatggagacct

SEQ ID NO: 59785 - DNA, 20 bp, synthetic construct
  misc_feature 1..20: note = chemically synthesized
  source 1..20: mol_type = other DNA
agcaattatttgttaatgag

SEQ ID NO: 59786 - DNA, 20 bp, synthetic construct
  misc_feature 1..20: note = chemically synthesized
  source 1..20: mol_type = other DNA
atattattatttgaaaaaga

SEQ ID NO: 59787 - DNA, 20 bp, synthetic construct
  misc_feature 1..20: note = chemically synthesized
  source 1..20: mol_type = other DNA
gttatattcttctttcagtc

SEQ ID NO: 59788 - DNA, 20 bp, synthetic construct
  misc_feature 1..20: note = chemically synthesized
  source 1..20: mol_type = other DNA
cagtcttgaatgatgaaaag

SEQ ID NO: 59789 - DNA, 20 bp, synthetic construct
  misc_feature 1..20: note = chemically synthesized
  source 1..20: mol_type = other DNA
tgttagtccactggaccact

SEQ ID NO: 59790 - DNA, 20 bp, synthetic construct
  misc_feature 1..20: note = chemically synthesized
  source 1..20: mol_type = other DNA
ctctgaattctactcttctt

SEQ ID NO: 59791 - DNA, 20 bp, synthetic construct
  misc_feature 1..20: note = chemically synthesized
  source 1..20: mol_type = other DNA
ctaacttttattttaggttc

SEQ ID NO: 59792 - DNA, 20 bp, synthetic construct
  misc_feature 1..20: note = chemically synthesized
  source 1..20: mol_type = other DNA
catatttaaacttgtgtcac

SEQ ID NO: 59793 - DNA, 20 bp, synthetic construct
  misc_feature 1..20: note = chemically synthesized
  source 1..20: mol_type = other DNA
tgtttatgttgattgttaca

SEQ ID NO: 59794 - DNA, 20 bp, synthetic construct
  misc_feature 1..20: note = chemically synthesized
  source 1..20: mol_type = other DNA
gttgattgttacaatgggtt

SEQ ID NO: 59795 - DNA, 20 bp, synthetic construct
  misc_feature 1..20: note = chemically synthesized
  source 1..20: mol_type = other DNA
ttttgaatagaaaaacatgt

SEQ ID NO: 59796 - DNA, 20 bp, synthetic construct
  misc_feature 1..20: note = chemically synthesized
  source 1..20: mol_type = other DNA
gaatagaaaaacatgtctga

SEQ ID NO: 59797 - DNA, 20 bp, synthetic construct
  misc_feature 1..20: note = chemically synthesized
  source 1..20: mol_type = other DNA
catcctacagcatcttctca

SEQ ID NO: 59798 - DNA, 20 bp, synthetic construct
  misc_feature 1..20: note = chemically synthesized
  source 1..20: mol_type = other DNA
acaaaacaaattacaagaag

SEQ ID NO: 59799 - DNA, 20 bp, synthetic construct
  misc_feature 1..20: note = chemically synthesized
  source 1..20: mol_type = other DNA
aagaggagtttattaggctg

SEQ ID NO: 59800 - DNA, 20 bp, synthetic construct
  misc_feature 1..20: note = chemically synthesized
  source 1..20: mol_type = other DNA
tcaaactgtcctccttgtca

SEQ ID NO: 59801 - DNA, 20 bp, synthetic construct
  misc_feature 1..20: note = chemically synthesized
  source 1..20: mol_type = other DNA
cactgagtctcaggaaaaca

SEQ ID NO: 59802 - DNA, 20 bp, synthetic construct
  misc_feature 1..20: note = chemically synthesized
  source 1..20: mol_type = other DNA
aaagttcttctactgcggtt

SEQ ID NO: 59803 - DNA, 20 bp, synthetic construct
  misc_feature 1..20: note = chemically synthesized
  source 1..20: mol_type = other DNA
ttcatagggaacaatatttt

SEQ ID NO: 59804 - DNA, 20 bp, synthetic construct
  misc_feature 1..20: note = chemically synthesized
  source 1..20: mol_type = other DNA
agtaggtactacaagcatga

SEQ ID NO: 59805 - DNA, 20 bp, synthetic construct
  misc_feature 1..20: note = chemically synthesized
  source 1..20: mol_type = other DNA
ggcaaaaagtagaagccact

SEQ ID NO: 59806 - DNA, 20 bp, synthetic construct
  misc_feature 1..20: note = chemically synthesized
  source 1..20: mol_type = other DNA
ctaaggatagtctactgtag

SEQ ID NO: 59807 - DNA, 20 bp, synthetic construct
  misc_feature 1..20: note = chemically synthesized
  source 1..20: mol_type = other DNA
tatagttagaagatataaat

SEQ ID NO: 59808 - DNA, 20 bp, synthetic construct
  misc_feature 1..20: note = chemically synthesized
  source 1..20: mol_type = other DNA
aaaaatgttatgcccttgga

SEQ ID NO: 59809 - DNA, 20 bp, synthetic construct
  misc_feature 1..20: note = chemically synthesized
  source 1..20: mol_type = other DNA
atctaccccacaatattttt

SEQ ID NO: 59810 - DNA, 20 bp, synthetic construct
  misc_feature 1..20: note = chemically synthesized
  source 1..20: mol_type = other DNA
ttttatgaataaaataagtt

SEQ ID NO: 59811 - DNA, 20 bp, synthetic construct
  misc_feature 1..20: note = chemically synthesized
  source 1..20: mol_type = other DNA
agggacacatgtttggtttt

SEQ ID NO: 59812 - DNA, 20 bp, synthetic construct
  misc_feature 1..20: note = chemically synthesized
  source 1..20: mol_type = other DNA
ctcaggtgacatggcgtgac

SEQ ID NO: 59813 - DNA, 20 bp, synthetic construct
  misc_feature 1..20: note = chemically synthesized
  source 1..20: mol_type = other DNA
aattacatctcttaatgaaa

SEQ ID NO: 59814 - DNA, 20 bp, synthetic construct
  misc_feature 1..20: note = chemically synthesized
  source 1..20: mol_type = other DNA
taatgaaacagaatataaat

SEQ ID NO: 59815 - DNA, 20 bp, synthetic construct
  misc_feature 1..20: note = chemically synthesized
  source 1..20: mol_type = other DNA
ctatgagcaatacctgagat

SEQ ID NO: 59816 - DNA, 20 bp, synthetic construct
  misc_feature 1..20: note = chemically synthesized
  source 1..20: mol_type = other DNA
caaatgtgtgcaatttatta

SEQ ID NO: 59817 - DNA, 20 bp, synthetic construct
  misc_feature 1..20: note = chemically synthesized
  source 1..20: mol_type = other DNA
agcttagcttcagaaggcaa

SEQ ID NO: 59818 - DNA, 20 bp, synthetic construct
  misc_feature 1..20: note = chemically synthesized
  source 1..20: mol_type = other DNA
tcttcataagacatttcctg

SEQ ID NO: 59819 - DNA, 20 bp, synthetic construct
  misc_feature 1..20: note = chemically synthesized
  source 1..20: mol_type = other DNA
gcacaattctgtaaaatgat

SEQ ID NO: 59820 - DNA, 20 bp, synthetic construct
  misc_feature 1..20: note = chemically synthesized
  source 1..20: mol_type = other DNA
agacataacctccctctttt

SEQ ID NO: 59821 - DNA, 20 bp, synthetic construct
  misc_feature 1..20: note = chemically synthesized
  source 1..20: mol_type = other DNA
tctttttaggatattttaaa

SEQ ID NO: 59822 - DNA, 20 bp, synthetic construct
  misc_feature 1..20: note = chemically synthesized
  source 1..20: mol_type = other DNA
aggatattttaaattgagtt

SEQ ID NO: 59823 - DNA, 20 bp, synthetic construct
  misc_feature 1..20: note = chemically synthesized
  source 1..20: mol_type = other DNA
tcagacaattttaatcaaat

SEQ ID NO: 59824 - DNA, 20 bp, synthetic construct
  misc_feature 1..20: note = chemically synthesized
  source 1..20: mol_type = other DNA
ggaaatttacacttattaca

SEQ ID NO: 59825 - DNA, 20 bp, synthetic construct
  misc_feature 1..20: note = chemically synthesized
  source 1..20: mol_type = other DNA
ttacacttattacatggaat

SEQ ID NO: 59826 - DNA, 20 bp, synthetic construct
  misc_feature 1..20: note = chemically synthesized
  source 1..20: mol_type = other DNA
gacctttttcatagcaaaag

SEQ ID NO: 59827 - DNA, 20 bp, synthetic construct
  misc_feature 1..20: note = chemically synthesized
  source 1..20: mol_type = other DNA
gtcagccagcgtagatatct

SEQ ID NO: 59828 - DNA, 20 bp, synthetic construct
  misc_feature 1..20: note = chemically synthesized
  source 1..20: mol_type = other DNA
tcaacattggagctagcaac

SEQ ID NO: 59829 - DNA, 20 bp, synthetic construct
  misc_feature 1..20: note = chemically synthesized
  source 1..20: mol_type = other DNA
ggagctagcaactagggtag

SEQ ID NO: 59830 - DNA, 20 bp, synthetic construct
  misc_feature 1..20: note = chemically synthesized
  source 1..20: mol_type = other DNA
agcaactagggtagtagaat

SEQ ID NO: 59831 - DNA, 20 bp, synthetic construct
  misc_feature 1..20: note = chemically synthesized
  source 1..20: mol_type = other DNA
tgtcagaaggtactgccttg

SEQ ID NO: 59832 - DNA, 20 bp, synthetic construct
  misc_feature 1..20: note = chemically synthesized
  source 1..20: mol_type = other DNA
tactgccttggggaataaat

SEQ ID NO: 59833 - DNA, 20 bp, synthetic construct
  misc_feature 1..20: note = chemically synthesized
  source 1..20: mol_type = other DNA
acacctgcagagaaattcat

SEQ ID NO: 59834 - DNA, 20 bp, synthetic construct
  misc_feature 1..20: note = chemically synthesized
  source 1..20: mol_type = other DNA
tagagaaatattccgtttac

SEQ ID NO: 59835 - DNA, 20 bp, synthetic construct
  misc_feature 1..20: note = chemically synthesized
  source 1..20: mol_type = other DNA
gtacaaactacatttagcta

SEQ ID NO: 59836 - DNA, 20 bp, synthetic construct
  misc_feature 1..20: note = chemically synthesized
  source 1..20: mol_type = other DNA
tttgctctcctgctaaatat

SEQ ID NO: 59837 - DNA, 20 bp, synthetic construct
  misc_feature 1..20: note = chemically synthesized
  source 1..20: mol_type = other DNA
ttagagtttttacattctgt

SEQ ID NO: 59838 - DNA, 20 bp, synthetic construct
  misc_feature 1..20: note = chemically synthesized
  source 1..20: mol_type = other DNA
ggagatcaggttccaattct

SEQ ID NO: 59839 - DNA, 20 bp, synthetic construct
  misc_feature 1..20: note = chemically synthesized
  source 1..20: mol_type = other DNA
ctatgggtagtaaaaaggtg

SEQ ID NO: 59840 - DNA, 20 bp, synthetic construct
  misc_feature 1..20: note = chemically synthesized
  source 1..20: mol_type = other DNA
aaaaggtgaagaatggcatt

SEQ ID NO: 59841 - DNA, 20 bp, synthetic construct
  misc_feature 1..20: note = chemically synthesized
  source 1..20: mol_type = other DNA
ggtcttgacactatatgtta

SEQ ID NO: 59842 - DNA, 20 bp, synthetic construct
  misc_feature 1..20: note = chemically synthesized
  source 1..20: mol_type = other DNA
ggaacctgctttccaaaacg

SEQ ID NO: 59843 - DNA, 20 bp, synthetic construct
  misc_feature 1..20: note = chemically synthesized
  source 1..20: mol_type = other DNA
aggcaatgctcaggacagtc

SEQ ID NO: 59844 - DNA, 20 bp, synthetic construct
  misc_feature 1..20: note = chemically synthesized
  source 1..20: mol_type = other DNA
tataaagactacaagcacag

SEQ ID NO: 59845 - DNA, 20 bp, synthetic construct
  misc_feature 1..20: note = chemically synthesized
  source 1..20: mol_type = other DNA
tgaaggtggtatcagcacag

SEQ ID NO: 59846 - DNA, 20 bp, synthetic construct
  misc_feature 1..20: note = chemically synthesized
  source 1..20: mol_type = other DNA
taatgacatcctggtgaagg

SEQ ID NO: 59847 - DNA, 20 bp, synthetic construct
  misc_feature 1..20: note = chemically synthesized
  source 1..20: mol_type = other DNA
gaatgcatgtgaaagaacat

SEQ ID NO: 59848 - DNA, 20 bp, synthetic construct
  misc_feature 1..20: note = chemically synthesized
  source 1..20: mol_type = other DNA
ggggcctgattgggggaaca

SEQ ID NO: 59849 - DNA, 20 bp, synthetic construct
  misc_feature 1..20: note = chemically synthesized
  source 1..20: mol_type = other DNA
cccagcccaatcttcactac

SEQ ID NO: 59850 - DNA, 20 bp, synthetic construct
  misc_feature 1..20: note = chemically synthesized
  source 1..20: mol_type = other DNA
aagtacagaggtatatctaa

SEQ ID NO: 59851 - DNA, 20 bp, synthetic construct
  misc_feature 1..20: note = chemically synthesized
  source 1..20: mol_type = other DNA
cggtcataggccatggcaag

SEQ ID NO: 59852 - DNA, 20 bp, synthetic construct
  misc_feature 1..20: note = chemically synthesized
  source 1..20: mol_type = other DNA
gccagactcgagaaaggaaa

SEQ ID NO: 59853 - DNA, 20 bp, synthetic construct
  misc_feature 1..20: note = chemically synthesized
  source 1..20: mol_type = other DNA
tcttccttaatgagaagaag

SEQ ID NO: 59854 - DNA, 20 bp, synthetic construct
  misc_feature 1..20: note = chemically synthesized
  source 1..20: mol_type = other DNA
aggagggtgccattgccaaa

SEQ ID NO: 59855 - DNA, 20 bp, synthetic construct
  misc_feature 1..20: note = chemically synthesized
  source 1..20: mol_type = other DNA
gggtgccattgccaaaaagg

SEQ ID NO: 59856 - DNA, 20 bp, synthetic construct
  misc_feature 1..20: note = chemically synthesized
  source 1..20: mol_type = other DNA
tggaaaaccagtcaatagga

SEQ ID NO: 59857 - DNA, 20 bp, synthetic construct
  misc_feature 1..20: note = chemically synthesized
  source 1..20: mol_type = other DNA
agctgccgctggacgacatc

SEQ ID NO: 59858 - DNA, 20 bp, synthetic construct
  misc_feature 1..20: note = chemically synthesized
  source 1..20: mol_type = other DNA
cacttcgactatatcattct

SEQ ID NO: 59859 - DNA, 20 bp, synthetic construct
  misc_feature 1..20: note = chemically synthesized
  source 1..20: mol_type = other DNA
tgtttctcaaaatacattct

SEQ ID NO: 59860 - DNA, 20 bp, synthetic construct
  misc_feature 1..20: note = chemically synthesized
  source 1..20: mol_type = other DNA
gtattcttaactgcacattc

SEQ ID NO: 59861 - DNA, 20 bp, synthetic construct
  misc_feature 1..20: note = chemically synthesized
  source 1..20: mol_type = other DNA
tacctacgtaatcaaattct

SEQ ID NO: 59862 - DNA, 20 bp, synthetic construct
  misc_feature 1..20: note = chemically synthesized
  source 1..20: mol_type = other DNA
ccttaactatgcagatttta

SEQ ID NO: 59863 - DNA, 20 bp, synthetic construct
  misc_feature 1..20: note = chemically synthesized
  source 1..20: mol_type = other DNA
gtattctatggggcattcaa

SEQ ID NO: 59864 - DNA, 20 bp, synthetic construct
  misc_feature 1..20: note = chemically synthesized
  source 1..20: mol_type = other DNA
tcctgcatgtaaagacttac

SEQ ID NO: 59865 - DNA, 20 bp, synthetic construct
  misc_feature 1..20: note = chemically synthesized
  source 1..20: mol_type = other DNA
aacagacattcacgattagt

SEQ ID NO: 59866 - DNA, 20 bp, synthetic construct
  misc_feature 1..20: note = chemically synthesized
  source 1..20: mol_type = other DNA
tagtgtgaattaccctcttg

SEQ ID NO: 59867 - DNA, 20 bp, synthetic construct
  misc_feature 1..20: note = chemically synthesized
  source 1..20: mol_type = other DNA
tataagttagactttggggc

SEQ ID NO: 59868 - DNA, 20 bp, synthetic construct
  misc_feature 1..20: note = chemically synthesized
  source 1..20: mol_type = other DNA
ggcctactgaagtaattccc

SEQ ID NO: 59869 - DNA, 20 bp, synthetic construct
  misc_feature 1..20: note = chemically synthesized
  source 1..20: mol_type = other DNA
ttatccccagccataggctt

SEQ ID NO: 59870 - DNA, 20 bp, synthetic construct
  misc_feature 1..20: note = chemically synthesized
  source 1..20: mol_type = other DNA
tgaatctgttctccccaata

SEQ ID NO: 59871 - DNA, 20 bp, synthetic construct
  misc_feature 1..20: note = chemically synthesized
  source 1..20: mol_type = other DNA
ccatgatatttaaagctctc

SEQ ID NO: 59872 - DNA, 20 bp, synthetic construct
  misc_feature 1..20: note = chemically synthesized
  source 1..20: mol_type = other DNA
tactacttgatgtagattaa

SEQ ID NO: 59873 - DNA, 20 bp, synthetic construct
  misc_feature 1..20: note = chemically synthesized
  source 1..20: mol_type = other DNA
tagggccttacagaccacca

SEQ ID NO: 59874 - DNA, 20 bp, synthetic construct
  misc_feature 1..20: note = chemically synthesized
  source 1..20: mol_type = other DNA
agcaagagacaagaaaagag

SEQ ID NO: 59875 - DNA, 20 bp, synthetic construct
  misc_feature 1..20: note = chemically synthesized
  source 1..20: mol_type = other DNA
ctattttaaaaatccatatg

SEQ ID NO: 59876 - DNA, 20 bp, synthetic construct
  misc_feature 1..20: note = chemically synthesized
  source 1..20: mol_type = other DNA
tttgctgatatattaaaaat

SEQ ID NO: 59877 - DNA, 20 bp, synthetic construct
  misc_feature 1..20: note = chemically synthesized
  source 1..20: mol_type = other DNA
atttctgtttgaacaaatga

SEQ ID NO: 59878 - DNA, 20 bp, synthetic construct
  misc_feature 1..20: note = chemically synthesized
  source 1..20: mol_type = other DNA
actcaaaatggaagtctgag

SEQ ID NO: 59879 - DNA, 20 bp, synthetic construct
  misc_feature 1..20: note = chemically synthesized
  source 1..20: mol_type = other DNA
tattcacttgtgaggaaatc

SEQ ID NO: 59880 - DNA, 20 bp, synthetic construct
  misc_feature 1..20: note = chemically synthesized
  source 1..20: mol_type = other DNA
agagtcattagtaaatatag

SEQ ID NO: 59881 - DNA, 20 bp, synthetic construct
  misc_feature 1..20: note = chemically synthesized
  source 1..20: mol_type = other DNA
cgtatccaaatatacccctt

SEQ ID NO: 59882 - DNA, 20 bp, synthetic construct
  misc_feature 1..20: note = chemically synthesized
  source 1..20: mol_type = other DNA
gcaacaactcagcactttga

SEQ ID NO: 59883 - DNA, 20 bp, synthetic construct
  misc_feature 1..20: note = chemically synthesized
  source 1..20: mol_type = other DNA
taggactgagagacataaac

SEQ ID NO: 59884 - DNA, 20 bp, synthetic construct
  misc_feature 1..20: note = chemically synthesized
  source 1..20: mol_type = other DNA
cagtgcctactgaacataca

SEQ ID NO: 59885 - DNA, 20 bp, synthetic construct
  misc_feature 1..20: note = chemically synthesized
  source 1..20: mol_type = other DNA
tgaaaaattccttcttatca

SEQ ID NO: 59886 - DNA, 20 bp, synthetic construct
  misc_feature 1..20: note = chemically synthesized
  source 1..20: mol_type = other DNA
gagaatatgcagcacaagtg

SEQ ID NO: 59887 - DNA, 20 bp, synthetic construct
  misc_feature 1..20: note = chemically synthesized
  source 1..20: mol_type = other DNA
tttcctccttctccattccc

SEQ ID NO: 59888 - DNA, 20 bp, synthetic construct
  misc_feature 1..20: note = chemically synthesized
  source 1..20: mol_type = other DNA
gcagctataatagtgatcta

SEQ ID NO: 59889 - DNA, 20 bp, synthetic construct
  misc_feature 1..20: note = chemically synthesized
  source 1..20: mol_type = other DNA
ggaaagagatcataaagact

SEQ ID NO: 59890 - DNA, 20 bp, synthetic construct
  misc_feature 1..20: note = chemically synthesized
  source 1..20: mol_type = other DNA
gtttaaaaagtaaaatgtag

SEQ ID NO: 59891 - DNA, 20 bp, synthetic construct
  misc_feature 1..20: note = chemically synthesized
  source 1..20: mol_type = other DNA
aaaggaaagaagacatatga

SEQ ID NO: 59892 - DNA, 20 bp, synthetic construct
  misc_feature 1..20: note = chemically synthesized
  source 1..20: mol_type = other DNA
ggtcaatcatattcacatca

SEQ ID NO: 59893 - DNA, 20 bp, synthetic construct
  misc_feature 1..20: note = chemically synthesized
  source 1..20: mol_type = other DNA
ggtagttggttggtagcact

SEQ ID NO: 59894 - DNA, 20 bp, synthetic construct
  misc_feature 1..20: note = chemically synthesized
  source 1..20: mol_type = other DNA
tttctctggagagcttatag

SEQ ID NO: 59895 - DNA, 20 bp, synthetic construct
  misc_feature 1..20: note = chemically synthesized
  source 1..20: mol_type = other DNA
agtacactctttatatatct

SEQ ID NO: 59896 - DNA, 20 bp, synthetic construct
  misc_feature 1..20: note = chemically synthesized
  source 1..20: mol_type = other DNA
tgtttgatggtgaggaagag

SEQ ID NO: 59897 - DNA, 20 bp, synthetic construct
  misc_feature 1..20: note = chemically synthesized
  source 1..20: mol_type = other DNA
gtctcccttttatagccaac

SEQ ID NO: 59898 - DNA, 20 bp, synthetic construct
  misc_feature 1..20: note = chemically synthesized
  source 1..20: mol_type = other DNA
tttttcaaataagttactgg

SEQ ID NO: 59899 - DNA, 20 bp, synthetic construct
  misc_feature 1..20: note = chemically synthesized
  source 1..20: mol_type = other DNA
tggtaggacctttatgtgtg

SEQ ID NO: 59900 - DNA, 20 bp, synthetic construct
  misc_feature 1..20: note = chemically synthesized
  source 1..20: mol_type = other DNA
atcttcttggcctatgtaac

SEQ ID NO: 59901 - DNA, 20 bp, synthetic construct
  misc_feature 1..20: note = chemically synthesized
  source 1..20: mol_type = other DNA
aagcagagagctagatagac

SEQ ID NO: 59902 - DNA, 20 bp, synthetic construct
  misc_feature 1..20: note = chemically synthesized
  source 1..20: mol_type = other DNA
tatcactaactattcccttc

SEQ ID NO: 59903 - DNA, 20 bp, synthetic construct
  misc_feature 1..20: note = chemically synthesized
  source 1..20: mol_type = other DNA
cagaagttttctcttttcca

SEQ ID NO: 59904 - DNA, 20 bp, synthetic construct
  misc_feature 1..20: note = chemically synthesized
  source 1..20: mol_type = other DNA
ccaggacagagacagagatc

SEQ ID NO: 59905 - DNA, 20 bp, synthetic construct
  misc_feature 1..20: note = chemically synthesized
  source 1..20: mol_type = other DNA
gaacaataattatctaaatc

SEQ ID NO: 59906 - DNA, 20 bp, synthetic construct
  misc_feature 1..20: note = chemically synthesized
  source 1..20: mol_type = other DNA
gatacatgactatggaactg

SEQ ID NO: 59907 - DNA, 20 bp, synthetic construct
  misc_feature 1..20: note = chemically synthesized
  source 1..20: mol_type = other DNA
gaacaaagtttcaggtcagt

SEQ ID NO: 59908 - DNA, 20 bp, synthetic construct
  misc_feature 1..20: note = chemically synthesized
  source 1..20: mol_type = other DNA
caggtcagtgagggtattta

SEQ ID NO: 59909 - DNA, 20 bp, synthetic construct
  misc_feature 1..20: note = chemically synthesized
  source 1..20: mol_type = other DNA
aagtaatagtgttgtctgct

SEQ ID NO: 59910 - DNA, 20 bp, synthetic construct
  misc_feature 1..20: note = chemically synthesized
  source 1..20: mol_type = other DNA
agtagatatatgtagtaggc

SEQ ID NO: 59911 - DNA, 20 bp, synthetic construct
  misc_feature 1..20: note = chemically synthesized
  source 1..20: mol_type = other DNA
ctctaaaacttggtttcttt

SEQ ID NO: 59912 - DNA, 20 bp, synthetic construct
  misc_feature 1..20: note = chemically synthesized
  source 1..20: mol_type = other DNA
tcttcaaatataaaaaagtg

SEQ ID NO: 59913 - DNA, 20 bp, synthetic construct
  misc_feature 1..20: note = chemically synthesized
  source 1..20: mol_type = other DNA
ttctacgaacaaaccagagc

SEQ ID NO: 59914 - DNA, 20 bp, synthetic construct
  misc_feature 1..20: note = chemically synthesized
  source 1..20: mol_type = other DNA
gcatgggtgttgactcaggc

SEQ ID NO: 59915 - DNA, 20 bp, synthetic construct
  misc_feature 1..20: note = chemically synthesized
  source 1..20: mol_type = other DNA
gttgactcaggcatgaatta

SEQ ID NO: 59916 - DNA, 20 bp, synthetic construct
  misc_feature 1..20: note = chemically synthesized
  source 1..20: mol_type = other DNA
ctggcttccattctaaccct

SEQ ID NO: 59917 - DNA, 20 bp, synthetic construct
  misc_feature 1..20: note = chemically synthesized
  source 1..20: mol_type = other DNA
gtccagataagtgccaaata

SEQ ID NO: 59918 - DNA, 20 bp, synthetic construct
  misc_feature 1..20: note = chemically synthesized
  source 1..20: mol_type = other DNA
aaattaagcttggacggagc

SEQ ID NO: 59919 - DNA, 20 bp, synthetic construct
  misc_feature 1..20: note = chemically synthesized
  source 1..20: mol_type = other DNA
agcttgggttatgtgtgcct

SEQ ID NO: 59920 - DNA, 20 bp, synthetic construct
  misc_feature 1..20: note = chemically synthesized
  source 1..20: mol_type = other DNA
gttatgtgtgcctctggatc

SEQ ID NO: 59921 - DNA, 20 bp, synthetic construct
  misc_feature 1..20: note = chemically synthesized
  source 1..20: mol_type = other DNA
agatagtacccacccagacg

SEQ ID NO: 59922 - DNA, 20 bp, synthetic construct
  misc_feature 1..20: note = chemically synthesized
  source 1..20: mol_type = other DNA
agtacccacccagacggagg

SEQ ID NO: 59923 - DNA, 20 bp, synthetic construct
  misc_feature 1..20: note = chemically synthesized
  source 1..20: mol_type = other DNA
cccacccagacggagggtgg

SEQ ID NO: 59924 - DNA, 20 bp, synthetic construct
  misc_feature 1..20: note = chemically synthesized
  source 1..20: mol_type = other DNA
tcaatattaaccatcacaga

SEQ ID NO: 59925 - DNA, 20 bp, synthetic construct
  misc_feature 1..20: note = chemically synthesized
  source 1..20: mol_type = other DNA
aggataatagccaaaggtaa

SEQ ID NO: 59926 - DNA, 20 bp, synthetic construct
  misc_feature 1..20: note = chemically synthesized
  source 1..20: mol_type = other DNA
caaaggtaagggggtaaaaa

SEQ ID NO: 59927 - DNA, 20 bp, synthetic construct
  misc_feature 1..20: note = chemically synthesized
  source 1..20: mol_type = other DNA
actaagtgcttgagacagaa

SEQ ID NO: 59928 - DNA, 20 bp, synthetic construct
  misc_feature 1..20: note = chemically synthesized
  source 1..20: mol_type = other DNA
aaaagccaaagggaaggtga

SEQ ID NO: 59929 - DNA, 20 bp, synthetic construct
  misc_feature 1..20: note = chemically synthesized
  source 1..20: mol_type = other DNA
gaatatatgaaagttaacat

SEQ ID NO: 59930 - DNA, 20 bp, synthetic construct
  misc_feature 1..20: note = chemically synthesized
  source 1..20: mol_type = other DNA
agagccatcagtttatgcgg

SEQ ID NO: 59931 - DNA, 20 bp, synthetic construct
  misc_feature 1..20: note = chemically synthesized
  source 1..20: mol_type = other DNA
gcggcagagtttgagacttt

SEQ ID NO: 59932 - DNA, 20 bp, synthetic construct
  misc_feature 1..20: note = chemically synthesized
  source 1..20: mol_type = other DNA
ctatgacagagaccctggaa

SEQ ID NO: 59933 - DNA, 20 bp, synthetic construct
  misc_feature 1..20: note = chemically synthesized
  source 1..20: mol_type = other DNA
gacagagaccctggaagagg

SEQ ID NO: 59934 - DNA, 20 bp, synthetic construct
  misc_feature 1..20: note = chemically synthesized
  source 1..20: mol_type = other DNA
ggaagagggtgaatggctgc

SEQ ID NO: 59935 - DNA, 20 bp, synthetic construct
  misc_feature 1..20: note = chemically synthesized
  source 1..20: mol_type = other DNA
ctcatataccacaaaagcaa

SEQ ID NO: 59936 - DNA, 20 bp, synthetic construct
  misc_feature 1..20: note = chemically synthesized
  source 1..20: mol_type = other DNA
tataccacaaaagcaactga

SEQ ID NO: 59937 - DNA, 20 bp, synthetic construct
  misc_feature 1..20: note = chemically synthesized
  source 1..20: mol_type = other DNA
acaagacaaacagctatttt

SEQ ID NO: 59938 - DNA, 20 bp, synthetic construct
  misc_feature 1..20: note = chemically synthesized
  source 1..20: mol_type = other DNA
attatggtaatcatttaaca

SEQ ID NO: 59939 - DNA, 20 bp, synthetic construct
  misc_feature 1..20: note = chemically synthesized
  source 1..20: mol_type = other DNA
cttctttaatcctgcataag

SEQ ID NO: 59940 - DNA, 20 bp, synthetic construct
  misc_feature 1..20: note = chemically synthesized
  source 1..20: mol_type = other DNA
cttttctcactttttgagga

SEQ ID NO: 59941 - DNA, 20 bp, synthetic construct
  misc_feature 1..20: note = chemically synthesized
  source 1..20: mol_type = other DNA
ggaaatcatttgacacacct

SEQ ID NO: 59942 - DNA, 20 bp, synthetic construct
  misc_feature 1..20: note = chemically synthesized
  source 1..20: mol_type = other DNA
atcatttgacacacctctgg

SEQ ID NO: 59943 - DNA, 20 bp, synthetic construct
  misc_feature 1..20: note = chemically synthesized
  source 1..20: mol_type = other DNA
ttccccttactttgtgtcaa

SEQ ID NO: 59944 - DNA, 20 bp, synthetic construct
  misc_feature 1..20: note = chemically synthesized
  source 1..20: mol_type = other DNA
aaaatgaaagtccagtaatc

SEQ ID NO: 59945 - DNA, 20 bp, synthetic construct
  misc_feature 1..20: note = chemically synthesized
  source 1..20: mol_type = other DNA
gcctgcaccagctgaaatct

SEQ ID NO: 59946 - DNA, 20 bp, synthetic construct
  misc_feature 1..20: note = chemically synthesized
  source 1..20: mol_type = other DNA
gctgaaatcttagaattcta

SEQ ID NO: 59947 - DNA, 20 bp, synthetic construct
  misc_feature 1..20: note = chemically synthesized
  source 1..20: mol_type = other DNA
tcaatttatattatgaaaat

SEQ ID NO: 59948 - DNA, 20 bp, synthetic construct
  misc_feature 1..20: note = chemically synthesized
  source 1..20: mol_type = other DNA
tgaagcagtgtatcaataac

SEQ ID NO: 59949 - DNA, 20 bp, synthetic construct
  misc_feature 1..20: note = chemically synthesized
  source 1..20: mol_type = other DNA
ggttataaagctgggcaact

SEQ ID NO: 59950 - DNA, 20 bp, synthetic construct
  misc_feature 1..20: note = chemically synthesized
  source 1..20: mol_type = other DNA
agtctctggagcttcatcaa

SEQ ID NO: 59951 - DNA, 20 bp, synthetic construct
  misc_feature 1..20: note = chemically synthesized
  source 1..20: mol_type = other DNA
atcaattgaattttccctcc

SEQ ID NO: 59952 - DNA, 20 bp, synthetic construct
  misc_feature 1..20: note = chemically synthesized
  source 1..20: mol_type = other DNA
caccctataataccaccagt

SEQ ID NO: 59953 - DNA, 20 bp, synthetic construct
  misc_feature 1..20: note = chemically synthesized
  source 1..20: mol_type = other DNA
tttcattttgtttttatttt

SEQ ID NO: 59954 - DNA, 20 bp, synthetic construct
  misc_feature 1..20: note = chemically synthesized
  source 1..20: mol_type = other DNA
tctgggttatatgatttaca

SEQ ID NO: 59955 - DNA, 20 bp, synthetic construct
  misc_feature 1..20: note = chemically synthesized
  source 1..20: mol_type = other DNA
ttcaacaatgtttattctgc

SEQ ID NO: 59956 - DNA, 20 bp, synthetic construct
  misc_feature 1..20: note = chemically synthesized
  source 1..20: mol_type = other DNA
tagtatccaataatcttaca

SEQ ID NO: 59957 - DNA, 20 bp, synthetic construct
  misc_feature 1..20: note = chemically synthesized
  source 1..20: mol_type = other DNA
acattctattttcccatacc

SEQ ID NO: 59958 - DNA, 20 bp, synthetic construct
  misc_feature 1..20: note = chemically synthesized
  source 1..20: mol_type = other DNA
tcccatacctaggatctccc

SEQ ID NO: 59959 - DNA, 20 bp, synthetic construct
  misc_feature 1..20: note = chemically synthesized
  source 1..20: mol_type = other DNA
gtgaacatcttatgaacagg

SEQ ID NO: 59960 - DNA, 20 bp, synthetic construct
  misc_feature 1..20: note = chemically synthesized
  source 1..20: mol_type = other DNA
ctgattactattgctttacc

SEQ ID NO: 59961 - DNA, 20 bp, synthetic construct
  misc_feature 1..20: note = chemically synthesized
  source 1..20: mol_type = other DNA
ggcatggagaaggcacatca

SEQ ID NO: 59962 - DNA, 20 bp, synthetic construct
  misc_feature 1..20: note = chemically synthesized
  source 1..20: mol_type = other DNA
gcactcttctctttctcatc

SEQ ID NO: 59963 - DNA, 20 bp, synthetic construct
  misc_feature 1..20: note = chemically synthesized
  source 1..20: mol_type = other DNA
atgttggcagctacagacct

SEQ ID NO: 59964 - DNA, 20 bp, synthetic construct
  misc_feature 1..20: note = chemically synthesized
  source 1..20: mol_type = other DNA
tatccatactctttctgtca

SEQ ID NO: 59965 - DNA, 20 bp, synthetic construct
  misc_feature 1..20: note = chemically synthesized
  source 1..20: mol_type = other DNA
caggtaatgaagattggtgt

SEQ ID NO: 59966 - DNA, 20 bp, synthetic construct
  misc_feature 1..20: note = chemically synthesized
  source 1..20: mol_type = other DNA
gcattaaaactaagcagatt

SEQ ID NO: 59967 - DNA, 20 bp, synthetic construct
  misc_feature 1..20: note = chemically synthesized
  source 1..20: mol_type = other DNA
cattgtttcactggtctctg

SEQ ID NO: 59968 - DNA, 20 bp, synthetic construct
  misc_feature 1..20: note = chemically synthesized
  source 1..20: mol_type = other DNA
aataattcaggggacctgga

SEQ ID NO: 59969 - DNA, 20 bp, synthetic construct
  misc_feature 1..20: note = chemically synthesized
  source 1..20: mol_type = other DNA
accaattatatatataattc

SEQ ID NO: 59970 - DNA, 20 bp, synthetic construct
  misc_feature 1..20: note = chemically synthesized
  source 1..20: mol_type = other DNA
ataattcttgggtctatgat

SEQ ID NO: 59971 - DNA, 20 bp, synthetic construct
  misc_feature 1..20: note = chemically synthesized
  source 1..20: mol_type = other DNA
atattagtcctgttatacat

SEQ ID NO: 59972 - DNA, 20 bp, synthetic construct
  misc_feature 1..20: note = chemically synthesized
  source 1..20: mol_type = other DNA
gaaatgagactttcttcaat

SEQ ID NO: 59973 - DNA, 20 bp, synthetic construct
  misc_feature 1..20: note = chemically synthesized
  source 1..20: mol_type = other DNA
cctcaattactttcttcaat

SEQ ID NO: 59974 - DNA, 20 bp, synthetic construct
  misc_feature 1..20: note = chemically synthesized
  source 1..20: mol_type = other DNA
atttccctcaattcaaaatg

SEQ ID NO: 59975 - DNA, 20 bp, synthetic construct
  misc_feature 1..20: note = chemically synthesized
  source 1..20: mol_type = other DNA
catcagagataagactagat

SEQ ID NO: 59976 - DNA, 20 bp, synthetic construct
  misc_feature 1..20: note = chemically synthesized
  source 1..20: mol_type = other DNA
gtctggcatgtgcaaaatag

SEQ ID NO: 59977 - DNA, 20 bp, synthetic construct
  misc_feature 1..20: note = chemically synthesized
  source 1..20: mol_type = other DNA
caaacagttggtcatatgtg

SEQ ID NO: 59978 - DNA, 20 bp, synthetic construct
  misc_feature 1..20: note = chemically synthesized
  source 1..20: mol_type = other DNA
ggagagtggggaggaaggga

SEQ ID NO: 59979 - DNA, 20 bp, synthetic construct
  misc_feature 1..20: note = chemically synthesized
  source 1..20: mol_type = other DNA
caaatacttttgattctttt

SEQ ID NO: 59980 - DNA, 20 bp, synthetic construct
  misc_feature 1..20: note = chemically synthesized
  source 1..20: mol_type = other DNA
agagtctaggcatgagaaga

SEQ ID NO: 59981 - DNA, 20 bp, synthetic construct
  misc_feature 1..20: note = chemically synthesized
  source 1..20: mol_type = other DNA
atattcttttgaccaaaata

SEQ ID NO: 59982 - DNA, 20 bp, synthetic construct
  misc_feature 1..20: note = chemically synthesized
  source 1..20: mol_type = other DNA
gccacccagtgaccagtcag

SEQ ID NO: 59983 - DNA, 20 bp, synthetic construct
  misc_feature 1..20: note = chemically synthesized
  source 1..20: mol_type = other DNA
actcttcatcacagaaaggt

SEQ ID NO: 59984 - DNA, 20 bp, synthetic construct
  misc_feature 1..20: note = chemically synthesized
  source 1..20: mol_type = other DNA
acagaaaggtggggattttt

SEQ ID NO: 59985 - DNA, 20 bp, synthetic construct
  misc_feature 1..20: note = chemically synthesized
  source 1..20: mol_type = other DNA
tggggattttttaggattct

SEQ ID NO: 59986 - DNA, 20 bp, synthetic construct
  misc_feature 1..20: note = chemically synthesized
  source 1..20: mol_type = other DNA
agcttcttgactgtgtgctc

SEQ ID NO: 59987 - DNA, 20 bp, synthetic construct
  misc_feature 1..20: note = chemically synthesized
  source 1..20: mol_type = other DNA
aaatataatttttcattaaa

SEQ ID NO: 59988 - DNA, 20 bp, synthetic construct
  misc_feature 1..20: note = chemically synthesized
  source 1..20: mol_type = other DNA
ctttcttcccttgggctttt

SEQ ID NO: 59989 - DNA, 20 bp, synthetic construct
  misc_feature 1..20: note = chemically synthesized
  source 1..20: mol_type = other DNA
cttcccttgggcttttggga

SEQ ID NO: 59990 - DNA, 20 bp, synthetic construct
  misc_feature 1..20: note = chemically synthesized
  source 1..20: mol_type = other DNA
gcttttgggaatgaattcag

SEQ ID NO: 59991 - DNA, 20 bp, synthetic construct
  misc_feature 1..20: note = chemically synthesized
  source 1..20: mol_type = other DNA
caggctagtataaagataac

SEQ ID NO: 59992 - DNA, 20 bp, synthetic construct
  misc_feature 1..20: note = chemically synthesized
  source 1..20: mol_type = other DNA
gacacatttgactgacaacc

SEQ ID NO: 59993 - DNA, 20 bp, synthetic construct
  misc_feature 1..20: note = chemically synthesized
  source 1..20: mol_type = other DNA
gggacttgcagttctctttg

SEQ ID NO: 59994 - DNA, 20 bp, synthetic construct
  misc_feature 1..20: note = chemically synthesized
  source 1..20: mol_type = other DNA
cctgaacaacatatcaacag

SEQ ID NO: 59995 - DNA, 20 bp, synthetic construct
  misc_feature 1..20: note = chemically synthesized
  source 1..20: mol_type = other DNA
atcaagagggcatctttgcc

SEQ ID NO: 59996 - DNA, 20 bp, synthetic construct
  misc_feature 1..20: note = chemically synthesized
  source 1..20: mol_type = other DNA
gacaaaagacaaacagtttg

SEQ ID NO: 59997 - DNA, 20 bp, synthetic construct
  misc_feature 1..20: note = chemically synthesized
  source 1..20: mol_type = other DNA
acttcaagccacaagaagca

SEQ ID NO: 59998 - DNA, 20 bp, synthetic construct
  misc_feature 1..20: note = chemically synthesized
  source 1..20: mol_type = other DNA
accagacctgagagaactct

SEQ ID NO: 59999 - DNA, 20 bp, synthetic construct
  misc_feature 1..20: note = chemically synthesized
  source 1..20: mol_type = other DNA
ttcaagagaccttgacgaag

SEQ ID NO: 60000 - DNA, 20 bp, synthetic construct
  misc_feature 1..20: note = chemically synthesized
  source 1..20: mol_type = other DNA
cactgtgtgaagtctgtgcg

SEQ ID NO: 60001 - DNA, 20 bp, synthetic construct
  misc_feature 1..20: note = chemically synthesized
  source 1..20: mol_type = other DNA
agaaaggtgatgtgctctgg

SEQ ID NO: 60002 - DNA, 20 bp, synthetic construct
  misc_feature 1..20: note = chemically synthesized
  source 1..20: mol_type = other DNA
aggatatccacaaaaaactc

SEQ ID NO: 60003 - DNA, 20 bp, synthetic construct
  misc_feature 1..20: note = chemically synthesized
  source 1..20: mol_type = other DNA
tggaccaatttcctgacttg

SEQ ID NO: 60004 - DNA, 20 bp, synthetic construct
  misc_feature 1..20: note = chemically synthesized
  source 1..20: mol_type = other DNA
ctcaacagagcttcaggagg

SEQ ID NO: 60005 - DNA, 20 bp, synthetic construct
  misc_feature 1..20: note = chemically synthesized
  source 1..20: mol_type = other DNA
gcctctgtctaaggcagaag

SEQ ID NO: 60006 - DNA, 20 bp, synthetic construct
  misc_feature 1..20: note = chemically synthesized
  source 1..20: mol_type = other DNA
gaaagcatagagaaagtttg

SEQ ID NO: 60007 - DNA, 20 bp, synthetic construct
  misc_feature 1..20: note = chemically synthesized
  source 1..20: mol_type = other DNA
ttaccattattatagtcaag

SEQ ID NO: 60008 - DNA, 20 bp, synthetic construct
  misc_feature 1..20: note = chemically synthesized
  source 1..20: mol_type = other DNA
attattatagtcaagacgaa

SEQ ID NO: 60009 - DNA, 20 bp, synthetic construct
  misc_feature 1..20: note = chemically synthesized
  source 1..20: mol_type = other DNA
agtatgaagtgatgatgaaa

SEQ ID NO: 60010 - DNA, 20 bp, synthetic construct
  misc_feature 1..20: note = chemically synthesized
  source 1..20: mol_type = other DNA
aaagagcaacacccactgat

SEQ ID NO: 60011 - DNA, 20 bp, synthetic construct
  misc_feature 1..20: note = chemically synthesized
  source 1..20: mol_type = other DNA
ttctcctatgccagcatgac

SEQ ID NO: 60012 - DNA, 20 bp, synthetic construct
  misc_feature 1..20: note = chemically synthesized
  source 1..20: mol_type = other DNA
taaaaattaaaaaaaaaaaa

SEQ ID NO: 60013 - DNA, 20 bp, synthetic construct
  misc_feature 1..20: note = chemically synthesized
  source 1..20: mol_type = other DNA
attaaaaaaaaaaaaaagag

SEQ ID NO: 60014 - DNA, 20 bp, synthetic construct
  misc_feature 1..20: note = chemically synthesized
  source 1..20: mol_type = other DNA
aaaaaaaaagagtagggtca

SEQ ID NO: 60015 - DNA, 20 bp, synthetic construct
  misc_feature 1..20: note = chemically synthesized
  source 1..20: mol_type = other DNA
aagagtagggtcaaggggta

SEQ ID NO: 60016 - DNA, 20 bp, synthetic construct
  misc_feature 1..20: note = chemically synthesized
  source 1..20: mol_type = other DNA
agggtagcaaaattttctta

SEQ ID NO: 60017 - DNA, 20 bp, synthetic construct
  misc_feature 1..20: note = chemically synthesized
  source 1..20: mol_type = other DNA
ttaaaaatctgctgcaagct

SEQ ID NO: 60018 - DNA, 20 bp, synthetic construct
  misc_feature 1..20: note = chemically synthesized
  source 1..20: mol_type = other DNA
aaactggaaactctaaaaat

SEQ ID NO: 60019 - DNA, 20 bp, synthetic construct
  misc_feature 1..20: note = chemically synthesized
  source 1..20: mol_type = other DNA
gagtgcctctcctcctccaa

SEQ ID NO: 60020 - DNA, 20 bp, synthetic construct
  misc_feature 1..20: note = chemically synthesized
  source 1..20: mol_type = other DNA
caacggtacaaagctggaca

SEQ ID NO: 60021 - DNA, 20 bp, synthetic construct
  misc_feature 1..20: note = chemically synthesized
  source 1..20: mol_type = other DNA
aaattagactaatggctaac

SEQ ID NO: 60022 - DNA, 20 bp, synthetic construct
  misc_feature 1..20: note = chemically synthesized
  source 1..20: mol_type = other DNA
caaggcatgagaactacatg

SEQ ID NO: 60023 - DNA, 20 bp, synthetic construct
  misc_feature 1..20: note = chemically synthesized
  source 1..20: mol_type = other DNA
tgattcgatcaactggaaga

SEQ ID NO: 60024 - DNA, 20 bp, synthetic construct
  misc_feature 1..20: note = chemically synthesized
  source 1..20: mol_type = other DNA
tatcagtgatggaagatcaa

SEQ ID NO: 60025 - DNA, 20 bp, synthetic construct
  misc_feature 1..20: note = chemically synthesized
  source 1..20: mol_type = other DNA
gaagagaagtttagagaaaa

SEQ ID NO: 60026 - DNA, 20 bp, synthetic construct
  misc_feature 1..20: note = chemically synthesized
  source 1..20: mol_type = other DNA
gtgtacctgaaagtgacggg

SEQ ID NO: 60027 - DNA, 20 bp, synthetic construct
  misc_feature 1..20: note = chemically synthesized
  source 1..20: mol_type = other DNA
ccaagttggaaaacactctg

SEQ ID NO: 60028 - DNA, 20 bp, synthetic construct
  misc_feature 1..20: note = chemically synthesized
  source 1..20: mol_type = other DNA
gaaatgaagggaaaaatgtt

SEQ ID NO: 60029 - DNA, 20 bp, synthetic construct
  misc_feature 1..20: note = chemically synthesized
  source 1..20: mol_type = other DNA
agggtagccagagagaaagg

SEQ ID NO: 60030 - DNA, 20 bp, synthetic construct
  misc_feature 1..20: note = chemically synthesized
  source 1..20: mol_type = other DNA
acccacaaagggaagcccat

SEQ ID NO: 60031 - DNA, 20 bp, synthetic construct
  misc_feature 1..20: note = chemically synthesized
  source 1..20: mol_type = other DNA
agaaactctacaagccagaa

SEQ ID NO: 60032 - DNA, 20 bp, synthetic construct
  misc_feature 1..20: note = chemically synthesized
  source 1..20: mol_type = other DNA
tattcaacatccttaaagga

SEQ ID NO: 60033 - DNA, 20 bp, synthetic construct
  misc_feature 1..20: note = chemically synthesized
  source 1..20: mol_type = other DNA
aaaggaaagaattttcaaca

SEQ ID NO: 60034 - DNA, 20 bp, synthetic construct
  misc_feature 1..20: note = chemically synthesized
  source 1..20: mol_type = other DNA
accagctaacatcataatga

SEQ ID NO: 60035 - DNA, 20 bp, synthetic construct
  misc_feature 1..20: note = chemically synthesized
  source 1..20: mol_type = other DNA
acagacgggcaaattagata

SEQ ID NO: 60036 - DNA, 20 bp, synthetic construct
  misc_feature 1..20: note = chemically synthesized
  source 1..20: mol_type = other DNA
cacacataggctcaaaataa

SEQ ID NO: 60037 - DNA, 20 bp, synthetic construct
  misc_feature 1..20: note = chemically synthesized
  source 1..20: mol_type = other DNA
aatggaaaacaaaaaaaggc

SEQ ID NO: 60038 - DNA, 20 bp, synthetic construct
  misc_feature 1..20: note = chemically synthesized
  source 1..20: mol_type = other DNA
aggccattacataatggtaa

SEQ ID NO: 60039 - DNA, 20 bp, synthetic construct
  misc_feature 1..20: note = chemically synthesized
  source 1..20: mol_type = other DNA
caacgagacagaaagttaac

SEQ ID NO: 60040 - DNA, 20 bp, synthetic construct
  misc_feature 1..20: note = chemically synthesized
  source 1..20: mol_type = other DNA
gaaagttaacaaggatatcc

SEQ ID NO: 60041 - DNA, 20 bp, synthetic construct
  misc_feature 1..20: note = chemically synthesized
  source 1..20: mol_type = other DNA
aactctccaccccaaatcaa

SEQ ID NO: 60042 - DNA, 20 bp, synthetic construct
  misc_feature 1..20: note = chemically synthesized
  source 1..20: mol_type = other DNA
agtgcaatcaaactagaact

SEQ ID NO: 60043 - DNA, 20 bp, synthetic construct
  misc_feature 1..20: note = chemically synthesized
  source 1..20: mol_type = other DNA
ggaaaccgaacaaattgctc

SEQ ID NO: 60044 - DNA, 20 bp, synthetic construct
  misc_feature 1..20: note = chemically synthesized
  source 1..20: mol_type = other DNA
aaattgctcctgaatgacta

SEQ ID NO: 60045 - DNA, 20 bp, synthetic construct
  misc_feature 1..20: note = chemically synthesized
  source 1..20: mol_type = other DNA
agaacaaagacacaacatac

SEQ ID NO: 60046 - DNA, 20 bp, synthetic construct
  misc_feature 1..20: note = chemically synthesized
  source 1..20: mol_type = other DNA
aaaaacccttcaaaaaatca

SEQ ID NO: 60047 - DNA, 20 bp, synthetic construct
  misc_feature 1..20: note = chemically synthesized
  source 1..20: mol_type = other DNA
taataaagaagaaaagagag

SEQ ID NO: 60048 - DNA, 20 bp, synthetic construct
  misc_feature 1..20: note = chemically synthesized
  source 1..20: mol_type = other DNA
agatgcaataaaaaatgata

SEQ ID NO: 60049 - DNA, 20 bp, synthetic construct
  misc_feature 1..20: note = chemically synthesized
  source 1..20: mol_type = other DNA
agaaatacaaaccaccatca

SEQ ID NO: 60050 - DNA, 20 bp, synthetic construct
  misc_feature 1..20: note = chemically synthesized
  source 1..20: mol_type = other DNA
aactagaaaatctagaagaa

SEQ ID NO: 60051 - DNA, 20 bp, synthetic construct
  misc_feature 1..20: note = chemically synthesized
  source 1..20: mol_type = other DNA
aagactaaaccaggaagaag

SEQ ID NO: 60052 - DNA, 20 bp, synthetic construct
  misc_feature 1..20: note = chemically synthesized
  source 1..20: mol_type = other DNA
accaggaagaagttgaatct

SEQ ID NO: 60053 - DNA, 20 bp, synthetic construct
  misc_feature 1..20: note = chemically synthesized
  source 1..20: mol_type = other DNA
atctctgaatagaccaataa

SEQ ID NO: 60054 - DNA, 20 bp, synthetic construct
  misc_feature 1..20: note = chemically synthesized
  source 1..20: mol_type = other DNA
aaaaacagtccaggaccaga

SEQ ID NO: 60055 - DNA, 20 bp, synthetic construct
  misc_feature 1..20: note = chemically synthesized
  source 1..20: mol_type = other DNA
accattccctctgaaactat

SEQ ID NO: 60056 - DNA, 20 bp, synthetic construct
  misc_feature 1..20: note = chemically synthesized
  source 1..20: mol_type = other DNA
ttcgaatcaatagtaaaaga

SEQ ID NO: 60057 - DNA, 20 bp, synthetic construct
  misc_feature 1..20: note = chemically synthesized
  source 1..20: mol_type = other DNA
gcagagacacaacaaaaaaa

SEQ ID NO: 60058 - DNA, 20 bp, synthetic construct
  misc_feature 1..20: note = chemically synthesized
  source 1..20: mol_type = other DNA
gatcaagtgggcttcatccc

SEQ ID NO: 60059 - DNA, 20 bp, synthetic construct
  misc_feature 1..20: note = chemically synthesized
  source 1..20: mol_type = other DNA
aacccacagccaatatcata

SEQ ID NO: 60060 - DNA, 20 bp, synthetic construct
  misc_feature 1..20: note = chemically synthesized
  source 1..20: mol_type = other DNA
tttgaaaactggcacaagac

SEQ ID NO: 60061 - DNA, 20 bp, synthetic construct
  misc_feature 1..20: note = chemically synthesized
  source 1..20: mol_type = other DNA
actcctattcaacatagtgt

SEQ ID NO: 60062 - DNA, 20 bp, synthetic construct
  misc_feature 1..20: note = chemically synthesized
  source 1..20: mol_type = other DNA
aggcaacttcagcaaagtct

SEQ ID NO: 60063 - DNA, 20 bp, synthetic construct
  misc_feature 1..20: note = chemically synthesized
  source 1..20: mol_type = other DNA
ccattcacaattgcttcaaa

SEQ ID NO: 60064 - DNA, 20 bp, synthetic construct
  misc_feature 1..20: note = chemically synthesized
  source 1..20: mol_type = other DNA
tcaaagagaataaaatacct

SEQ ID NO: 60065 - DNA, 20 bp, synthetic construct
  misc_feature 1..20: note = chemically synthesized
  source 1..20: mol_type = other DNA
aggagaactacaaaccactg

SEQ ID NO: 60066 - DNA, 20 bp, synthetic construct
  misc_feature 1..20: note = chemically synthesized
  source 1..20: mol_type = other DNA
tggaagaacattccatgctc

SEQ ID NO: 60067 - DNA, 20 bp, synthetic construct
  misc_feature 1..20: note = chemically synthesized
  source 1..20: mol_type = other DNA
attccatgctcatgggtagg

SEQ ID NO: 60068 - DNA, 20 bp, synthetic construct
  misc_feature 1..20: note = chemically synthesized
  source 1..20: mol_type = other DNA
gctaccaatgactttcttca

SEQ ID NO: 60069 - DNA, 20 bp, synthetic construct
  misc_feature 1..20: note = chemically synthesized
  source 1..20: mol_type = other DNA
acaaaaaaaacaaatgggga

SEQ ID NO: 60070 - DNA, 20 bp, synthetic construct
  misc_feature 1..20: note = chemically synthesized
  source 1..20: mol_type = other DNA
ccatacgcagaaagctgaaa

SEQ ID NO: 60071 - DNA, 20 bp, synthetic construct
  misc_feature 1..20: note = chemically synthesized
  source 1..20: mol_type = other DNA
tatacaaaaattaattcaag

SEQ ID NO: 60072 - DNA, 20 bp, synthetic construct
  misc_feature 1..20: note = chemically synthesized
  source 1..20: mol_type = other DNA
caaaagccaaaatggacaaa

SEQ ID NO: 60073 - DNA, 20 bp, synthetic construct
  misc_feature 1..20: note = chemically synthesized
  source 1..20: mol_type = other DNA
acagcaaaagaaactaccat

SEQ ID NO: 60074 - DNA, 20 bp, synthetic construct
  misc_feature 1..20: note = chemically synthesized
  source 1..20: mol_type = other DNA
cagagtgaacaggcaacata

SEQ ID NO: 60075 - DNA, 20 bp, synthetic construct
  misc_feature 1..20: note = chemically synthesized
  source 1..20: mol_type = other DNA
tccgacaaagggctaatatc

SEQ ID NO: 60076 - DNA, 20 bp, synthetic construct
  misc_feature 1..20: note = chemically synthesized
  source 1..20: mol_type = other DNA
accccatcaaaaagtgggca

SEQ ID NO: 60077 - DNA, 20 bp, synthetic construct
  misc_feature 1..20: note = chemically synthesized
  source 1..20: mol_type = other DNA
agataccatctcacaccagt

SEQ ID NO: 60078 - DNA, 20 bp, synthetic construct
  misc_feature 1..20: note = chemically synthesized
  source 1..20: mol_type = other DNA
aggaaacaacaggtgctgga

SEQ ID NO: 60079 - DNA, 20 bp, synthetic construct
  misc_feature 1..20: note = chemically synthesized
  source 1..20: mol_type = other DNA
agtcagtgtggcgattcctc

SEQ ID NO: 60080 - DNA, 20 bp, synthetic construct
  misc_feature 1..20: note = chemically synthesized
  source 1..20: mol_type = other DNA
ttgacccagccatcccatta

SEQ ID NO: 60081 - DNA, 20 bp, synthetic construct
  misc_feature 1..20: note = chemically synthesized
  source 1..20: mol_type = other DNA
cattactgggtacatactca

SEQ ID NO: 60082 - DNA, 20 bp, synthetic construct
  misc_feature 1..20: note = chemically synthesized
  source 1..20: mol_type = other DNA
aaatgtccaacaatgataga

SEQ ID NO: 60083 - DNA, 20 bp, synthetic construct
  misc_feature 1..20: note = chemically synthesized
  source 1..20: mol_type = other DNA
aacgtggcacatatacacca

SEQ ID NO: 60084 - DNA, 20 bp, synthetic construct
  misc_feature 1..20: note = chemically synthesized
  source 1..20: mol_type = other DNA
ctatgcagccataaaaaatg

SEQ ID NO: 60085 - DNA, 20 bp, synthetic construct
  misc_feature 1..20: note = chemically synthesized
  source 1..20: mol_type = other DNA
ttcatgtcctttgtagggac

SEQ ID NO: 60086 - DNA, 20 bp, synthetic construct
  misc_feature 1..20: note = chemically synthesized
  source 1..20: mol_type = other DNA
gcatgttctcactcataggt

SEQ ID NO: 60087 - DNA, 20 bp, synthetic construct
  misc_feature 1..20: note = chemically synthesized
  source 1..20: mol_type = other DNA
tcacacaccagggcctgcag

SEQ ID NO: 60088 - DNA, 20 bp, synthetic construct
  misc_feature 1..20: note = chemically synthesized
  source 1..20: mol_type = other DNA
accagggcctgcagtggggt

SEQ ID NO: 60089 - DNA, 20 bp, synthetic construct
  misc_feature 1..20: note = chemically synthesized
  source 1..20: mol_type = other DNA
gtggggtgggggtcgggggg

SEQ ID NO: 60090 - DNA, 20 bp, synthetic construct
  misc_feature 1..20: note = chemically synthesized
  source 1..20: mol_type = other DNA
gatatacctaatgctaagtg

SEQ ID NO: 60091 - DNA, 20 bp, synthetic construct
  misc_feature 1..20: note = chemically synthesized
  source 1..20: mol_type = other DNA
taatgctaagtgacgagtta

SEQ ID NO: 60092 - DNA, 20 bp, synthetic construct
  misc_feature 1..20: note = chemically synthesized
  source 1..20: mol_type = other DNA
ttctaaatccctcaggctgg

SEQ ID NO: 60093 - DNA, 20 bp, synthetic construct
  misc_feature 1..20: note = chemically synthesized
  source 1..20: mol_type = other DNA
taaagaaggagggaggagag

SEQ ID NO: 60094 - DNA, 20 bp, synthetic construct
  misc_feature 1..20: note = chemically synthesized
  source 1..20: mol_type = other DNA
gagaggagtgggccgtaggg

SEQ ID NO: 60095 - DNA, 20 bp, synthetic construct
  misc_feature 1..20: note = chemically synthesized
  source 1..20: mol_type = other DNA
ttttctttgcagcttggctt

SEQ ID NO: 60096 - DNA, 20 bp, synthetic construct
  misc_feature 1..20: note = chemically synthesized
  source 1..20: mol_type = other DNA
tatagtctaaaaagttggtg

SEQ ID NO: 60097 - DNA, 20 bp, synthetic construct
  misc_feature 1..20: note = chemically synthesized
  source 1..20: mol_type = other DNA
ccaatatcttgaccaggctt

SEQ ID NO: 60098 - DNA, 20 bp, synthetic construct
  misc_feature 1..20: note = chemically synthesized
  source 1..20: mol_type = other DNA
ttggcctagaggctccgcat

SEQ ID NO: 60099 - DNA, 20 bp, synthetic construct
  misc_feature 1..20: note = chemically synthesized
  source 1..20: mol_type = other DNA
atgtatcagtcaagatgtga

SEQ ID NO: 60100 - DNA, 20 bp, synthetic construct
  misc_feature 1..20: note = chemically synthesized
  source 1..20: mol_type = other DNA
gtcaagatgtgatggggtat

SEQ ID NO: 60101 - DNA, 20 bp, synthetic construct
  misc_feature 1..20: note = chemically synthesized
  source 1..20: mol_type = other DNA
aaatctttagaacttggctt

SEQ ID NO: 60102 - DNA, 20 bp, synthetic construct
  misc_feature 1..20: note = chemically synthesized
  source 1..20: mol_type = other DNA
tctcctttttcattccctag

SEQ ID NO: 60103 - DNA, 20 bp, synthetic construct
  misc_feature 1..20: note = chemically synthesized
  source 1..20: mol_type = other DNA
aaatcaagttgaaaatccac

SEQ ID NO: 60104 - DNA, 20 bp, synthetic construct
  misc_feature 1..20: note = chemically synthesized
  source 1..20: mol_type = other DNA
gttgaaaatccacgggaata

SEQ ID NO: 60105 - DNA, 20 bp, synthetic construct
  misc_feature 1..20: note = chemically synthesized
  source 1..20: mol_type = other DNA
gtgtagttccagactctggt

SEQ ID NO: 60106 - DNA, 20 bp, synthetic construct
  misc_feature 1..20: note = chemically synthesized
  source 1..20: mol_type = other DNA
actcccaaaaaagatgaagt

SEQ ID NO: 60107 - DNA, 20 bp, synthetic construct
  misc_feature 1..20: note = chemically synthesized
  source 1..20: mol_type = other DNA
aaaaaagatgaagttagagt

SEQ ID NO: 60108 - DNA, 20 bp, synthetic construct
  misc_feature 1..20: note = chemically synthesized
  source 1..20: mol_type = other DNA
ataggggacactgtaatgac

SEQ ID NO: 60109 - DNA, 20 bp, synthetic construct
  misc_feature 1..20: note = chemically synthesized
  source 1..20: mol_type = other DNA
ccaaatagattagtgtcaga

SEQ ID NO: 60110 - DNA, 20 bp, synthetic construct
  misc_feature 1..20: note = chemically synthesized
  source 1..20: mol_type = other DNA
atctcaaccacacccagata

SEQ ID NO: 60111 - DNA, 20 bp, synthetic construct
  misc_feature 1..20: note = chemically synthesized
  source 1..20: mol_type = other DNA
cacccagatagagagtgata

SEQ ID NO: 60112 - DNA, 20 bp, synthetic construct
  misc_feature 1..20: note = chemically synthesized
  source 1..20: mol_type = other DNA
tggatcccgtgtttctgtcg

SEQ ID NO: 60113 - DNA, 20 bp, synthetic construct
  misc_feature 1..20: note = chemically synthesized
  source 1..20: mol_type = other DNA
ccgtgtttctgtcgggggat

SEQ ID NO: 60114 - DNA, 20 bp, synthetic construct
  misc_feature 1..20: note = chemically synthesized
  source 1..20: mol_type = other DNA
ctacccagatgaaaatggtg

SEQ ID NO: 60115 - DNA, 20 bp, synthetic construct
  misc_feature 1..20: note = chemically synthesized
  source 1..20: mol_type = other DNA
aatcaactacgaagatggtc

SEQ ID NO: 60116 - DNA, 20 bp, synthetic construct
  misc_feature 1..20: note = chemically synthesized
  source 1..20: mol_type = other DNA
tagttgttgagccttataat

SEQ ID NO: 60117 - DNA, 20 bp, synthetic construct
  misc_feature 1..20: note = chemically synthesized
  source 1..20: mol_type = other DNA
tgatgattaaatcaggtcta

SEQ ID NO: 60118 - DNA, 20 bp, synthetic construct
  misc_feature 1..20: note = chemically synthesized
  source 1..20: mol_type = other DNA
aatcaggtctactggatact

SEQ ID NO: 60119 - DNA, 20 bp, synthetic construct
  misc_feature 1..20: note = chemically synthesized
  source 1..20: mol_type = other DNA
gtctactggatactatgaat

SEQ ID NO: 60120 - DNA, 20 bp, synthetic construct
  misc_feature 1..20: note = chemically synthesized
  source 1..20: mol_type = other DNA
taacagaagtcttctggtgg

SEQ ID NO: 60121 - DNA, 20 bp, synthetic construct
  misc_feature 1..20: note = chemically synthesized
  source 1..20: mol_type = other DNA
gtacacttgtgatatctata

SEQ ID NO: 60122 - DNA, 20 bp, synthetic construct
  misc_feature 1..20: note = chemically synthesized
  source 1..20: mol_type = other DNA
gaagtcctcttcctgatgct

SEQ ID NO: 60123 - DNA, 20 bp, synthetic construct
  misc_feature 1..20: note = chemically synthesized
  source 1..20: mol_type = other DNA
ctctgggttggcatctacat

SEQ ID NO: 60124 - DNA, 20 bp, synthetic construct
  misc_feature 1..20: note = chemically synthesized
  source 1..20: mol_type = other DNA
gcatctacatgtgagtgccc

SEQ ID NO: 60125 - DNA, 20 bp, synthetic construct
  misc_feature 1..20: note = chemically synthesized
  source 1..20: mol_type = other DNA
gtaacaaccaggtggcttca

SEQ ID NO: 60126 - DNA, 20 bp, synthetic construct
  misc_feature 1..20: note = chemically synthesized
  source 1..20: mol_type = other DNA
agaaataatagaagttaggc

SEQ ID NO: 60127 - DNA, 20 bp, synthetic construct
  misc_feature 1..20: note = chemically synthesized
  source 1..20: mol_type = other DNA
aaaatgtgctaagtagatgt

SEQ ID NO: 60128 - DNA, 20 bp, synthetic construct
  misc_feature 1..20: note = chemically synthesized
  source 1..20: mol_type = other DNA
cttaagggaagaaagagacc

SEQ ID NO: 60129 - DNA, 20 bp, synthetic construct
  misc_feature 1..20: note = chemically synthesized
  source 1..20: mol_type = other DNA
aaaactcaaagttttacgaa

SEQ ID NO: 60130 - DNA, 20 bp, synthetic construct
  misc_feature 1..20: note = chemically synthesized
  source 1..20: mol_type = other DNA
gaaatcatttttcatcaata

SEQ ID NO: 60131 - DNA, 20 bp, synthetic construct
  misc_feature 1..20: note = chemically synthesized
  source 1..20: mol_type = other DNA
acacacacacacacacaccg

SEQ ID NO: 60132 - DNA, 20 bp, synthetic construct
  misc_feature 1..20: note = chemically synthesized
  source 1..20: mol_type = other DNA
aagtcatgatgcagcagtat

SEQ ID NO: 60133 - DNA, 20 bp, synthetic construct
  misc_feature 1..20: note = chemically synthesized
  source 1..20: mol_type = other DNA
ttttacttcaagctatggtg

SEQ ID NO: 60134 - DNA, 20 bp, synthetic construct
  misc_feature 1..20: note = chemically synthesized
  source 1..20: mol_type = other DNA
caagcacagataccaagttt

SEQ ID NO: 60135 - DNA, 20 bp, synthetic construct
  misc_feature 1..20: note = chemically synthesized
  source 1..20: mol_type = other DNA
cagataccaagtttttgagt

SEQ ID NO: 60136 - DNA, 20 bp, synthetic construct
  misc_feature 1..20: note = chemically synthesized
  source 1..20: mol_type = other DNA
actactaagattatattgtc

SEQ ID NO: 60137 - DNA, 20 bp, synthetic construct
  misc_feature 1..20: note = chemically synthesized
  source 1..20: mol_type = other DNA
cgggaaagtagcattttcat

SEQ ID NO: 60138 - DNA, 20 bp, synthetic construct
  misc_feature 1..20: note = chemically synthesized
  source 1..20: mol_type = other DNA
aaggaggagaagcttgtgtt

SEQ ID NO: 60139 - DNA, 20 bp, synthetic construct
  misc_feature 1..20: note = chemically synthesized
  source 1..20: mol_type = other DNA
gaagcttgtgttaggaatgg

SEQ ID NO: 60140 - DNA, 20 bp, synthetic construct
  misc_feature 1..20: note = chemically synthesized
  source 1..20: mol_type = other DNA
aggtatctcaacactaaaga

SEQ ID NO: 60141 - DNA, 20 bp, synthetic construct
  misc_feature 1..20: note = chemically synthesized
  source 1..20: mol_type = other DNA
taaagaaagagtaaaatttt

SEQ ID NO: 60142 - DNA, 20 bp, synthetic construct
  misc_feature 1..20: note = chemically synthesized
  source 1..20: mol_type = other DNA
tcttgacttcacaaaaccat

SEQ ID NO: 60143 - DNA, 20 bp, synthetic construct
  misc_feature 1..20: note = chemically synthesized
  source 1..20: mol_type = other DNA
ttcacaaaaccattggaatt

SEQ ID NO: 60144 - DNA, 20 bp, synthetic construct
  misc_feature 1..20: note = chemically synthesized
  source 1..20: mol_type = other DNA
gtgatgtgtcatttctgtga

SEQ ID NO: 60145 - DNA, 20 bp, synthetic construct
  misc_feature 1..20: note = chemically synthesized
  source 1..20: mol_type = other DNA
tttaagcacagtgctttgaa

SEQ ID NO: 60146 - DNA, 20 bp, synthetic construct
  misc_feature 1..20: note = chemically synthesized
  source 1..20: mol_type = other DNA
ctccatcctcatgtgcatct

SEQ ID NO: 60147 - DNA, 20 bp, synthetic construct
  misc_feature 1..20: note = chemically synthesized
  source 1..20: mol_type = other DNA
atgacagaagactcttcaaa

SEQ ID NO: 60148 - DNA, 20 bp, synthetic construct
  misc_feature 1..20: note = chemically synthesized
  source 1..20: mol_type = other DNA
tgatcaaagtcccttgttta

SEQ ID NO: 60149 - DNA, 20 bp, synthetic construct
  misc_feature 1..20: note = chemically synthesized
  source 1..20: mol_type = other DNA
ttccttcctgagcatgtgtt

SEQ ID NO: 60150 - DNA, 20 bp, synthetic construct
  misc_feature 1..20: note = chemically synthesized
  source 1..20: mol_type = other DNA
cctttcctaagtttctattg

SEQ ID NO: 60151 - DNA, 20 bp, synthetic construct
  misc_feature 1..20: note = chemically synthesized
  source 1..20: mol_type = other DNA
taatcattgtagcttctatg

SEQ ID NO: 60152 - DNA, 20 bp, synthetic construct
  misc_feature 1..20: note = chemically synthesized
  source 1..20: mol_type = other DNA
gaagtaacagaaggctacaa

SEQ ID NO: 60153 - DNA, 20 bp, synthetic construct
  misc_feature 1..20: note = chemically synthesized
  source 1..20: mol_type = other DNA
ttgtcattcttgtcacagca

SEQ ID NO: 60154 - DNA, 20 bp, synthetic construct
  misc_feature 1..20: note = chemically synthesized
  source 1..20: mol_type = other DNA
taatcatgcttgtaataacc

SEQ ID NO: 60155 - DNA, 20 bp, synthetic construct
  misc_feature 1..20: note = chemically synthesized
  source 1..20: mol_type = other DNA
taacttttcttctttgtctg

SEQ ID NO: 60156 - DNA, 20 bp, synthetic construct
  misc_feature 1..20: note = chemically synthesized
  source 1..20: mol_type = other DNA
tggtgagttctgtagacatt

SEQ ID NO: 60157 - DNA, 20 bp, synthetic construct
  misc_feature 1..20: note = chemically synthesized
  source 1..20: mol_type = other DNA
ggtggtgagaacagtgttat

SEQ ID NO: 60158 - DNA, 20 bp, synthetic construct
  misc_feature 1..20: note = chemically synthesized
  source 1..20: mol_type = other DNA
gtttgccagctgtggaaaac

SEQ ID NO: 60159 - DNA, 20 bp, synthetic construct
  misc_feature 1..20: note = chemically synthesized
  source 1..20: mol_type = other DNA
tggcaacaagtaaccaaata

SEQ ID NO: 60160 - DNA, 20 bp, synthetic construct
  misc_feature 1..20: note = chemically synthesized
  source 1..20: mol_type = other DNA
accattttcctgtctatgca

SEQ ID NO: 60161 - DNA, 20 bp, synthetic construct
  misc_feature 1..20: note = chemically synthesized
  source 1..20: mol_type = other DNA
tttcctgtctatgcacagga

SEQ ID NO: 60162 - DNA, 20 bp, synthetic construct
  misc_feature 1..20: note = chemically synthesized
  source 1..20: mol_type = other DNA
gccatgacagggctcttggt

SEQ ID NO: 60163 - DNA, 20 bp, synthetic construct
  misc_feature 1..20: note = chemically synthesized
  source 1..20: mol_type = other DNA
agtatgtgctggcttgatga

SEQ ID NO: 60164 - DNA, 20 bp, synthetic construct
  misc_feature 1..20: note = chemically synthesized
  source 1..20: mol_type = other DNA
agaggaactctgcttacctc

SEQ ID NO: 60165 - DNA, 20 bp, synthetic construct
  misc_feature 1..20: note = chemically synthesized
  source 1..20: mol_type = other DNA
tgcttacctcttgggttctg

SEQ ID NO: 60166 - DNA, 20 bp, synthetic construct
  misc_feature 1..20: note = chemically synthesized
  source 1..20: mol_type = other DNA
tgtttgggggctgttaatgg

SEQ ID NO: 60167 - DNA, 20 bp, synthetic construct
  misc_feature 1..20: note = chemically synthesized
  source 1..20: mol_type = other DNA
tgttaatggaagagttgctg

SEQ ID NO: 60168 - DNA, 20 bp, synthetic construct
  misc_feature 1..20: note = chemically synthesized
  source 1..20: mol_type = other DNA
aataagaaacagtatgtgaa

SEQ ID NO: 60169 - DNA, 20 bp, synthetic construct
  misc_feature 1..20: note = chemically synthesized
  source 1..20: mol_type = other DNA
caagccttaagtaggaagtt

SEQ ID NO: 60170 - DNA, 20 bp, synthetic construct
  misc_feature 1..20: note = chemically synthesized
  source 1..20: mol_type = other DNA
agggccagagaaacagaagg

SEQ ID NO: 60171 - DNA, 20 bp, synthetic construct
  misc_feature 1..20: note = chemically synthesized
  source 1..20: mol_type = other DNA
gctcaagggaaggttcctct

SEQ ID NO: 60172 - DNA, 20 bp, synthetic construct
  misc_feature 1..20: note = chemically synthesized
  source 1..20: mol_type = other DNA
atgcctgtaatcccagcact

SEQ ID NO: 60173 - DNA, 20 bp, synthetic construct
  misc_feature 1..20: note = chemically synthesized
  source 1..20: mol_type = other DNA
actttgggtggctgaggcag

SEQ ID NO: 60174 - DNA, 20 bp, synthetic construct
  misc_feature 1..20: note = chemically synthesized
  source 1..20: mol_type = other DNA
caggaggatcacctgagggc

SEQ ID NO: 60175 - DNA, 20 bp, synthetic construct
  misc_feature 1..20: note = chemically synthesized
  source 1..20: mol_type = other DNA
tacacaggaggctgaggtag

SEQ ID NO: 60176 - DNA, 20 bp, synthetic construct
  misc_feature 1..20: note = chemically synthesized
  source 1..20: mol_type = other DNA
aaagaaggaaggaaggaaat

SEQ ID NO: 60177 - DNA, 20 bp, synthetic construct
  misc_feature 1..20: note = chemically synthesized
  source 1..20: mol_type = other DNA
cacttgagattcaaagtctt

SEQ ID NO: 60178 - DNA, 20 bp, synthetic construct
  misc_feature 1..20: note = chemically synthesized
  source 1..20: mol_type = other DNA
gactaattccaatcccaagc

SEQ ID NO: 60179 - DNA, 20 bp, synthetic construct
  misc_feature 1..20: note = chemically synthesized
  source 1..20: mol_type = other DNA
aggactgggaaggtttaggc

SEQ ID NO: 60180 - DNA, 20 bp, synthetic construct
  misc_feature 1..20: note = chemically synthesized
  source 1..20: mol_type = other DNA
tcccgctgcagtccatgaac

SEQ ID NO: 60181 - DNA, 20 bp, synthetic construct
  misc_feature 1..20: note = chemically synthesized
  source 1..20: mol_type = other DNA
aagacattctctcaagtctc

SEQ ID NO: 60182 - DNA, 20 bp, synthetic construct
  misc_feature 1..20: note = chemically synthesized
  source 1..20: mol_type = other DNA
tgcaaagccacttagtgaca

SEQ ID NO: 60183 - DNA, 20 bp, synthetic construct
  misc_feature 1..20: note = chemically synthesized
  source 1..20: mol_type = other DNA
ttagttatttcattgtgaac

SEQ ID NO: 60184 - DNA, 20 bp, synthetic construct
  misc_feature 1..20: note = chemically synthesized
  source 1..20: mol_type = other DNA
agttaaaagcattgccagaa

SEQ ID NO: 60185 - DNA, 20 bp, synthetic construct
  misc_feature 1..20: note = chemically synthesized
  source 1..20: mol_type = other DNA
tcacaatccagaccctaaga

SEQ ID NO: 60186 - DNA, 20 bp, synthetic construct
  misc_feature 1..20: note = chemically synthesized
  source 1..20: mol_type = other DNA
cagaccctaagagagggttc

SEQ ID NO: 60187 - DNA, 20 bp, synthetic construct
  misc_feature 1..20: note = chemically synthesized
  source 1..20: mol_type = other DNA
cttggatttcgtgcccaaga

SEQ ID NO: 60188 - DNA, 20 bp, synthetic construct
  misc_feature 1..20: note = chemically synthesized
  source 1..20: mol_type = other DNA
caagttaattaagaaagtaa

SEQ ID NO: 60189 - DNA, 20 bp, synthetic construct
  misc_feature 1..20: note = chemically synthesized
  source 1..20: mol_type = other DNA
tattgatgatatgctaaaca

SEQ ID NO: 60190 - DNA, 20 bp, synthetic construct
  misc_feature 1..20: note = chemically synthesized
  source 1..20: mol_type = other DNA
gatgatatgctaaacaaggg

SEQ ID NO: 60191 - DNA, 20 bp, synthetic construct
  misc_feature 1..20: note = chemically synthesized
  source 1..20: mol_type = other DNA
aacagtcatagtgctggtgg

SEQ ID NO: 60192 - DNA, 20 bp, synthetic construct
  misc_feature 1..20: note = chemically synthesized
  source 1..20: mol_type = other DNA
ctcatcacaatcttggtttg

SEQ ID NO: 60193 - DNA, 20 bp, synthetic construct
  misc_feature 1..20: note = chemically synthesized
  source 1..20: mol_type = other DNA
tcttatctcatcctgtgact

SEQ ID NO: 60194 - DNA, 20 bp, synthetic construct
  misc_feature 1..20: note = chemically synthesized
  source 1..20: mol_type = other DNA
ctgagaatgcctaactttct

SEQ ID NO: 60195 - DNA, 20 bp, synthetic construct
  misc_feature 1..20: note = chemically synthesized
  source 1..20: mol_type = other DNA
tacccagctcctatttaaga

SEQ ID NO: 60196 - DNA, 20 bp, synthetic construct
  misc_feature 1..20: note = chemically synthesized
  source 1..20: mol_type = other DNA
gtttctggtatgctagcacc

SEQ ID NO: 60197 - DNA, 20 bp, synthetic construct
  misc_feature 1..20: note = chemically synthesized
  source 1..20: mol_type = other DNA
tccttactcagcagtttgtg

SEQ ID NO: 60198 - DNA, 20 bp, synthetic construct
  misc_feature 1..20: note = chemically synthesized
  source 1..20: mol_type = other DNA
cttcaaagtttcacttctac

SEQ ID NO: 60199 - DNA, 20 bp, synthetic construct
  misc_feature 1..20: note = chemically synthesized
  source 1..20: mol_type = other DNA
cagtcttatgcagtagtttt

SEQ ID NO: 60200 - DNA, 20 bp, synthetic construct
  misc_feature 1..20: note = chemically synthesized
  source 1..20: mol_type = other DNA
tggtccactcatctttaagt

SEQ ID NO: 60201 - DNA, 20 bp, synthetic construct
  misc_feature 1..20: note = chemically synthesized
  source 1..20: mol_type = other DNA
taccaatagtacccacatgg

SEQ ID NO: 60202 - DNA, 20 bp, synthetic construct
  misc_feature 1..20: note = chemically synthesized
  source 1..20: mol_type = other DNA
aaatttgaggtttctaaaca

SEQ ID NO: 60203 - DNA, 20 bp, synthetic construct
  misc_feature 1..20: note = chemically synthesized
  source 1..20: mol_type = other DNA
tgttcttaggagcaagatgt

SEQ ID NO: 60204 - DNA, 20 bp, synthetic construct
  misc_feature 1..20: note = chemically synthesized
  source 1..20: mol_type = other DNA
ggaatttacaccattcttat

SEQ ID NO: 60205 - DNA, 20 bp, synthetic construct
  misc_feature 1..20: note = chemically synthesized
  source 1..20: mol_type = other DNA
attaagagaggtttccttct

SEQ ID NO: 60206 - DNA, 20 bp, synthetic construct
  misc_feature 1..20: note = chemically synthesized
  source 1..20: mol_type = other DNA
tgttcaggaactttttcttt

SEQ ID NO: 60207 - DNA, 20 bp, synthetic construct
  misc_feature 1..20: note = chemically synthesized
  source 1..20: mol_type = other DNA
ctagatattcattcaccaag

SEQ ID NO: 60208 - DNA, 20 bp, synthetic construct
  misc_feature 1..20: note = chemically synthesized
  source 1..20: mol_type = other DNA
caagatgagtgcctttgaag

SEQ ID NO: 60209 - DNA, 20 bp, synthetic construct
  misc_feature 1..20: note = chemically synthesized
  source 1..20: mol_type = other DNA
ctttgaagcagaatctgtga

SEQ ID NO: 60210 - DNA, 20 bp, synthetic construct
  misc_feature 1..20: note = chemically synthesized
  source 1..20: mol_type = other DNA
tagagacatatggccatgac

SEQ ID NO: 60211 - DNA, 20 bp, synthetic construct
  misc_feature 1..20: note = chemically synthesized
  source 1..20: mol_type = other DNA
tctaaggttagacatacaga

SEQ ID NO: 60212 - DNA, 20 bp, synthetic construct
  misc_feature 1..20: note = chemically synthesized
  source 1..20: mol_type = other DNA
catccattcacacatataac

SEQ ID NO: 60213 - DNA, 20 bp, synthetic construct
  misc_feature 1..20: note = chemically synthesized
  source 1..20: mol_type = other DNA
actgattttctagtactgta

SEQ ID NO: 60214 - DNA, 20 bp, synthetic construct
  misc_feature 1..20: note = chemically synthesized
  source 1..20: mol_type = other DNA
gatatgtatgcccatgtgtg

SEQ ID NO: 60215 - DNA, 20 bp, synthetic construct
  misc_feature 1..20: note = chemically synthesized
  source 1..20: mol_type = other DNA
aagttattattactagttag

SEQ ID NO: 60216 - DNA, 20 bp, synthetic construct
  misc_feature 1..20: note = chemically synthesized
  source 1..20: mol_type = other DNA
gcaaaatataacacttttag

SEQ ID NO: 60217 - DNA, 20 bp, synthetic construct
  misc_feature 1..20: note = chemically synthesized
  source 1..20: mol_type = other DNA
agactttttatatatttttt

SEQ ID NO: 60218 - DNA, 20 bp, synthetic construct
  misc_feature 1..20: note = chemically synthesized
  source 1..20: mol_type = other DNA
gtctgcatttttgtgttaca

SEQ ID NO: 60219 - DNA, 20 bp, synthetic construct
  misc_feature 1..20: note = chemically synthesized
  source 1..20: mol_type = other DNA
agaaagggaagacattttct

SEQ ID NO: 60220 - DNA, 20 bp, synthetic construct
  misc_feature 1..20: note = chemically synthesized
  source 1..20: mol_type = other DNA
ctccctctgcatggccccag

SEQ ID NO: 60221 - DNA, 20 bp, synthetic construct
  misc_feature 1..20: note = chemically synthesized
  source 1..20: mol_type = other DNA
taaatcctaaagttgaaggt

SEQ ID NO: 60222 - DNA, 20 bp, synthetic construct
  misc_feature 1..20: note = chemically synthesized
  source 1..20: mol_type = other DNA
tatcttttatgctgactgtc

SEQ ID NO: 60223 - DNA, 20 bp, synthetic construct
  misc_feature 1..20: note = chemically synthesized
  source 1..20: mol_type = other DNA
caaagactaaactaaaatag

SEQ ID NO: 60224 - DNA, 20 bp, synthetic construct
  misc_feature 1..20: note = chemically synthesized
  source 1..20: mol_type = other DNA
aaattaaattcaaatcttca

SEQ ID NO: 60225 - DNA, 20 bp, synthetic construct
  misc_feature 1..20: note = chemically synthesized
  source 1..20: mol_type = other DNA
cactctttctgtgtttagaa

SEQ ID NO: 60226 - DNA, 20 bp, synthetic construct
  misc_feature 1..20: note = chemically synthesized
  source 1..20: mol_type = other DNA
ctgtgtttagaaatgaataa

SEQ ID NO: 60227 - DNA, 20 bp, synthetic construct
  misc_feature 1..20: note = chemically synthesized
  source 1..20: mol_type = other DNA
cttctctattttagcaacta

SEQ ID NO: 60228 - DNA, 20 bp, synthetic construct
  misc_feature 1..20: note = chemically synthesized
  source 1..20: mol_type = other DNA
agaaaaaatttgatgcaata

SEQ ID NO: 60229 - DNA, 20 bp, synthetic construct
  misc_feature 1..20: note = chemically synthesized
  source 1..20: mol_type = other DNA
tgtaagctagtgtgacaaat

SEQ ID NO: 60230 - DNA, 20 bp, synthetic construct
  misc_feature 1..20: note = chemically synthesized
  source 1..20: mol_type = other DNA
taatatttcagctgtgacct

SEQ ID NO: 60231 - DNA, 20 bp, synthetic construct
  misc_feature 1..20: note = chemically synthesized
  source 1..20: mol_type = other DNA
tttttccaagagcagataat

SEQ ID NO: 60232 - DNA, 20 bp, synthetic construct
  misc_feature 1..20: note = chemically synthesized
  source 1..20: mol_type = other DNA
agccctagctatggaccacc

SEQ ID NO: 60233 - DNA, 20 bp, synthetic construct
  misc_feature 1..20: note = chemically synthesized
  source 1..20: mol_type = other DNA
ttgaagtaagggctttgttt

SEQ ID NO: 60234 - DNA, 20 bp, synthetic construct
  misc_feature 1..20: note = chemically synthesized
  source 1..20: mol_type = other DNA
aattactctccacacattct

SEQ ID NO: 60235 - DNA, 20 bp, synthetic construct
  misc_feature 1..20: note = chemically synthesized
  source 1..20: mol_type = other DNA
aagccacacagcacctttcc

SEQ ID NO: 60236 - DNA, 20 bp, synthetic construct
  misc_feature 1..20: note = chemically synthesized
  source 1..20: mol_type = other DNA
acagcacctttccccggatc

SEQ ID NO: 60237 - DNA, 20 bp, synthetic construct
  misc_feature 1..20: note = chemically synthesized
  source 1..20: mol_type = other DNA
attgatgaaactgtaaaacc

SEQ ID NO: 60238 - DNA, 20 bp, synthetic construct
  misc_feature 1..20: note = chemically synthesized
  source 1..20: mol_type = other DNA
agatataaaatttcaacata

SEQ ID NO: 60239 - DNA, 20 bp, synthetic construct
  misc_feature 1..20: note = chemically synthesized
  source 1..20: mol_type = other DNA
gacagtgatagctgtatcta

SEQ ID NO: 60240 - DNA, 20 bp, synthetic construct
  misc_feature 1..20: note = chemically synthesized
  source 1..20: mol_type = other DNA
catatatctcattatatcca

SEQ ID NO: 60241 - DNA, 20 bp, synthetic construct
  misc_feature 1..20: note = chemically synthesized
  source 1..20: mol_type = other DNA
caaagggttacataagtttt

SEQ ID NO: 60242 - DNA, 20 bp, synthetic construct
  misc_feature 1..20: note = chemically synthesized
  source 1..20: mol_type = other DNA
gtaagcttgttcaaaaaata

SEQ ID NO: 60243 - DNA, 20 bp, synthetic construct
  misc_feature 1..20: note = chemically synthesized
  source 1..20: mol_type = other DNA
ccccatctccttttttaagg

SEQ ID NO: 60244 - DNA, 20 bp, synthetic construct
  misc_feature 1..20: note = chemically synthesized
  source 1..20: mol_type = other DNA
gtttccatgtcttggctatt

SEQ ID NO: 60245 - DNA, 20 bp, synthetic construct
  misc_feature 1..20: note = chemically synthesized
  source 1..20: mol_type = other DNA
aataatgctgcaattaacat

SEQ ID NO: 60246 - DNA, 20 bp, synthetic construct
  misc_feature 1..20: note = chemically synthesized
  source 1..20: mol_type = other DNA
tgcagatagctctagaaaat

SEQ ID NO: 60247 - DNA, 20 bp, synthetic construct
  misc_feature 1..20: note = chemically synthesized
  source 1..20: mol_type = other DNA
aaatgcggattttatttatt

SEQ ID NO: 60248 - DNA, 20 bp, synthetic construct
  misc_feature 1..20: note = chemically synthesized
  source 1..20: mol_type = other DNA
cattcccaccagctatgcac

SEQ ID NO: 60249 - DNA, 20 bp, synthetic construct
  misc_feature 1..20: note = chemically synthesized
  source 1..20: mol_type = other DNA
taatagccatctcaacaggt

SEQ ID NO: 60250 - DNA, 20 bp, synthetic construct
  misc_feature 1..20: note = chemically synthesized
  source 1..20: mol_type = other DNA
attttttcatatttagttga

SEQ ID NO: 60251 - DNA, 20 bp, synthetic construct
  misc_feature 1..20: note = chemically synthesized
  source 1..20: mol_type = other DNA
gattgagttccttatatatt

SEQ ID NO: 60252 - DNA, 20 bp, synthetic construct
  misc_feature 1..20: note = chemically synthesized
  source 1..20: mol_type = other DNA
gacacatagaccaaattgaa

SEQ ID NO: 60253 - DNA, 20 bp, synthetic construct
  misc_feature 1..20: note = chemically synthesized
  source 1..20: mol_type = other DNA
ggccaccaacacaatagggg

SEQ ID NO: 60254 - DNA, 20 bp, synthetic construct
  misc_feature 1..20: note = chemically synthesized
  source 1..20: mol_type = other DNA
aacaaatagtgttgggaaaa

SEQ ID NO: 60255 - DNA, 20 bp, synthetic construct
  misc_feature 1..20: note = chemically synthesized
  source 1..20: mol_type = other DNA
aactggatatccaaatgcaa

SEQ ID NO: 60256 - DNA, 20 bp, synthetic construct
  misc_feature 1..20: note = chemically synthesized
  source 1..20: mol_type = other DNA
cagcgtgaacaacacagaag

SEQ ID NO: 60257 - DNA, 20 bp, synthetic construct
  misc_feature 1..20: note = chemically synthesized
  source 1..20: mol_type = other DNA
ctgcatttccatctgaggta

SEQ ID NO: 60258 - DNA, 20 bp, synthetic construct
  misc_feature 1..20: note = chemically synthesized
  source 1..20: mol_type = other DNA
gtatggggttcatctcgcta

SEQ ID NO: 60259 - DNA, 20 bp, synthetic construct
  misc_feature 1..20: note = chemically synthesized
  source 1..20: mol_type = other DNA
cagacagtgggcacaggtca

SEQ ID NO: 60260 - DNA, 20 bp, synthetic construct
  misc_feature 1..20: note = chemically synthesized
  source 1..20: mol_type = other DNA
acaccatgcaccagccgaag

SEQ ID NO: 60261 - DNA, 20 bp, synthetic construct
  misc_feature 1..20: note = chemically synthesized
  source 1..20: mol_type = other DNA
tgcctcacttgggaagcaca

SEQ ID NO: 60262 - DNA, 20 bp, synthetic construct
  misc_feature 1..20: note = chemically synthesized
  source 1..20: mol_type = other DNA
ttgggaagcacaaggggtca

SEQ ID NO: 60263 - DNA, 20 bp, synthetic construct
  misc_feature 1..20: note = chemically synthesized
  source 1..20: mol_type = other DNA
tccctttcctggtcaaggaa

SEQ ID NO: 60264 - DNA, 20 bp, synthetic construct
  misc_feature 1..20: note = chemically synthesized
  source 1..20: mol_type = other DNA
gaaaattgggccactcccac

SEQ ID NO: 60265 - DNA, 20 bp, synthetic construct
  misc_feature 1..20: note = chemically synthesized
  source 1..20: mol_type = other DNA
tatatcctgcacatggctcc

SEQ ID NO: 60266 - DNA, 20 bp, synthetic construct
  misc_feature 1..20: note = chemically synthesized
  source 1..20: mol_type = other DNA
ctccgagggtcctacgccca

SEQ ID NO: 60267 - DNA, 20 bp, synthetic construct
  misc_feature 1..20: note = chemically synthesized
  source 1..20: mol_type = other DNA
aagcagccaggaagctcaaa

SEQ ID NO: 60268 - DNA, 20 bp, synthetic construct
  misc_feature 1..20: note = chemically synthesized
  source 1..20: mol_type = other DNA
cgggcagactgcctcctcaa

SEQ ID NO: 60269 - DNA, 20 bp, synthetic construct
  misc_feature 1..20: note = chemically synthesized
  source 1..20: mol_type = other DNA
acgatcagacagcagcattc

SEQ ID NO: 60270 - DNA, 20 bp, synthetic construct
  misc_feature 1..20: note = chemically synthesized
  source 1..20: mol_type = other DNA
gctgctgatacccaggcaaa

SEQ ID NO: 60271 - DNA, 20 bp, synthetic construct
  misc_feature 1..20: note = chemically synthesized
  source 1..20: mol_type = other DNA
atacccaggcaaacagggtc

SEQ ID NO: 60272 - DNA, 20 bp, synthetic construct
  misc_feature 1..20: note = chemically synthesized
  source 1..20: mol_type = other DNA
actccaacagacctgcagct

SEQ ID NO: 60273 - DNA, 20 bp, synthetic construct
  misc_feature 1..20: note = chemically synthesized
  source 1..20: mol_type = other DNA
tcaccagcaacggaacaaag

SEQ ID NO: 60274 - DNA, 20 bp, synthetic construct
  misc_feature 1..20: note = chemically synthesized
  source 1..20: mol_type = other DNA
caacggaacaaagctggatg

SEQ ID NO: 60275 - DNA, 20 bp, synthetic construct
  misc_feature 1..20: note = chemically synthesized
  source 1..20: mol_type = other DNA
aactttgaaaaaaaatttag

SEQ ID NO: 60276 - DNA, 20 bp, synthetic construct
  misc_feature 1..20: note = chemically synthesized
  source 1..20: mol_type = other DNA
aatttagatgaatgtataac

SEQ ID NO: 60277 - DNA, 20 bp, synthetic construct
  misc_feature 1..20: note = chemically synthesized
  source 1..20: mol_type = other DNA
ggagctgaaagccaaggctc

SEQ ID NO: 60278 - DNA, 20 bp, synthetic construct
  misc_feature 1..20: note = chemically synthesized
  source 1..20: mol_type = other DNA
caaggctcgagaatgacgtg

SEQ ID NO: 60279 - DNA, 20 bp, synthetic construct
  misc_feature 1..20: note = chemically synthesized
  source 1..20: mol_type = other DNA
tgatgcgatcaactggaaga

SEQ ID NO: 60280 - DNA, 20 bp, synthetic construct
  misc_feature 1..20: note = chemically synthesized
  source 1..20: mol_type = other DNA
gaagggaagtttagagaaaa

SEQ ID NO: 60281 - DNA, 20 bp, synthetic construct
  misc_feature 1..20: note = chemically synthesized
  source 1..20: mol_type = other DNA
gtgtacctgaaagtgacggg

SEQ ID NO: 60282 - DNA, 20 bp, synthetic construct
  misc_feature 1..20: note = chemically synthesized
  source 1..20: mol_type = other DNA
ccaagttggaaaacactctg

SEQ ID NO: 60283 - DNA, 20 bp, synthetic construct
  misc_feature 1..20: note = chemically synthesized
  source 1..20: mol_type = other DNA
agggcagccagagagaaagg

SEQ ID NO: 60284 - DNA, 20 bp, synthetic construct
  misc_feature 1..20: note = chemically synthesized
  source 1..20: mol_type = other DNA
agaaactctacaagccagaa

SEQ ID NO: 60285 - DNA, 20 bp, synthetic construct
  misc_feature 1..20: note = chemically synthesized
  source 1..20: mol_type = other DNA
tattcaacatccttaaagga

SEQ ID NO: 60286 - DNA, 20 bp, synthetic construct
  misc_feature 1..20: note = chemically synthesized
  source 1..20: mol_type = other DNA
aaaggaaagaattttcaaca

SEQ ID NO: 60287 - DNA, 20 bp, synthetic construct
  misc_feature 1..20: note = chemically synthesized
  source 1..20: mol_type = other DNA
ataaccagctatcataatga

SEQ ID NO: 60288 - DNA, 20 bp, synthetic construct
  misc_feature 1..20: note = chemically synthesized
  source 1..20: mol_type = other DNA
gaaagacacagactggcaaa

SEQ ID NO: 60289 - DNA, 20 bp, synthetic construct
  misc_feature 1..20: note = chemically synthesized
  source 1..20: mol_type = other DNA
acagactggcaaattggata

SEQ ID NO: 60290 - DNA, 20 bp, synthetic construct
  misc_feature 1..20: note = chemically synthesized
  source 1..20: mol_type = other DNA
cacacataggctcaaaataa

SEQ ID NO: 60291 - DNA, 20 bp, synthetic construct
  misc_feature 1..20: note = chemically synthesized
  source 1..20: mol_type = other DNA
aatggaaaacaaaaaaaggc

SEQ ID NO: 60292 - DNA, 20 bp, synthetic construct
  misc_feature 1..20: note = chemically synthesized
  source 1..20: mol_type = other DNA
aggccattacataatggtaa

SEQ ID NO: 60293 - DNA, 20 bp, synthetic construct
  misc_feature 1..20: note = chemically synthesized
  source 1..20: mol_type = other DNA
caacgagacagaaagttaac

SEQ ID NO: 60294 - DNA, 20 bp, synthetic construct
  misc_feature 1..20: note = chemically synthesized
  source 1..20: mol_type = other DNA
gaaagttaacaaggatatcc

SEQ ID NO: 60295 - DNA, 20 bp, synthetic construct
  misc_feature 1..20: note = chemically synthesized
  source 1..20: mol_type = other DNA
aactctccaccccaaatcaa

SEQ ID NO: 60296 - DNA, 20 bp, synthetic construct
  misc_feature 1..20: note = chemically synthesized
  source 1..20: mol_type = other DNA
agtgcaatcaaactagaact

SEQ ID NO: 60297 - DNA, 20 bp, synthetic construct
  misc_feature 1..20: note = chemically synthesized
  source 1..20: mol_type = other DNA
ggaaactgaacaacctgctc

SEQ ID NO: 60298 - DNA, 20 bp, synthetic construct
  misc_feature 1..20: note = chemically synthesized
  source 1..20: mol_type = other DNA
aacctgctcctgaatgacta

SEQ ID NO: 60299 - DNA, 20 bp, synthetic construct
  misc_feature 1..20: note = chemically synthesized
  source 1..20: mol_type = other DNA
agaacaaagacacaacatac

SEQ ID NO: 60300 - DNA, 20 bp, synthetic construct
  misc_feature 1..20: note = chemically synthesized
  source 1..20: mol_type = other DNA
ccagaatctctgggacacat

SEQ ID NO: 60301 - DNA, 20 bp, synthetic construct
  misc_feature 1..20: note = chemically synthesized
  source 1..20: mol_type = other DNA
aaaaacccttcaaaaaatta

SEQ ID NO: 60302 - DNA, 20 bp, synthetic construct
  misc_feature 1..20: note = chemically synthesized
  source 1..20: mol_type = other DNA
tctgggagctggttttttga

SEQ ID NO: 60303 - DNA, 20 bp, synthetic construct
  misc_feature 1..20: note = chemically synthesized
  source 1..20: mol_type = other DNA
agactaataagaaaagagag

SEQ ID NO: 60304 - DNA, 20 bp, synthetic construct
  misc_feature 1..20: note = chemically synthesized
  source 1..20: mol_type = other DNA
cacaataaaaaaatgataaa

SEQ ID NO: 60305 - DNA, 20 bp, synthetic construct
  misc_feature 1..20: note = chemically synthesized
  source 1..20: mol_type = other DNA
agaaatacaaactgccatca

SEQ ID NO: 60306 - DNA, 20 bp, synthetic construct
  misc_feature 1..20: note = chemically synthesized
  source 1..20: mol_type = other DNA
aactagaaaatctagaagaa

SEQ ID NO: 60307 - DNA, 20 bp, synthetic construct
  misc_feature 1..20: note = chemically synthesized
  source 1..20: mol_type = other DNA
aagactaaaccaggaagaag

SEQ ID NO: 60308 - DNA, 20 bp, synthetic construct
  misc_feature 1..20: note = chemically synthesized
  source 1..20: mol_type = other DNA
accaggaagaagttgaatct

SEQ ID NO: 60309 - DNA, 20 bp, synthetic construct
  misc_feature 1..20: note = chemically synthesized
  source 1..20: mol_type = other DNA
atctctgaatagaccaataa

SEQ ID NO: 60310 - DNA, 20 bp, synthetic construct
  misc_feature 1..20: note = chemically synthesized
  source 1..20: mol_type = other DNA
tcaatagcttaccaaccaaa

SEQ ID NO: 60311 - DNA, 20 bp, synthetic construct
  misc_feature 1..20: note = chemically synthesized
  source 1..20: mol_type = other DNA
caaaaagagtccaggaccag

SEQ ID NO: 60312 - DNA, 20 bp, synthetic construct
  misc_feature 1..20: note = chemically synthesized
  source 1..20: mol_type = other DNA
attctaacagaggtacaagg

SEQ ID NO: 60313 - DNA, 20 bp, synthetic construct
  misc_feature 1..20: note = chemically synthesized
  source 1..20: mol_type = other DNA
ttccaatcaacagaaaaaga

SEQ ID NO: 60314 - DNA, 20 bp, synthetic construct
  misc_feature 1..20: note = chemically synthesized
  source 1..20: mol_type = other DNA
aaagagacacaaccaaaaaa

SEQ ID NO: 60315 - DNA, 20 bp, synthetic construct
  misc_feature 1..20: note = chemically synthesized
  source 1..20: mol_type = other DNA
accaaaaaagagaattttag

SEQ ID NO: 60316 - DNA, 20 bp, synthetic construct
  misc_feature 1..20: note = chemically synthesized
  source 1..20: mol_type = other DNA
ctcaataaaatactggcaaa

SEQ ID NO: 60317 - DNA, 20 bp, synthetic construct
  misc_feature 1..20: note = chemically synthesized
  source 1..20: mol_type = other DNA
gatcaagtggacttcatccc

SEQ ID NO: 60318 - DNA, 20 bp, synthetic construct
  misc_feature 1..20: note = chemically synthesized
  source 1..20: mol_type = other DNA
aacccacagccaatatcata

SEQ ID NO: 60319 - DNA, 20 bp, synthetic construct
  misc_feature 1..20: note = chemically synthesized
  source 1..20: mol_type = other DNA
tttgtaaactggcacaagac

SEQ ID NO: 60320 - DNA, 20 bp, synthetic construct
  misc_feature 1..20: note = chemically synthesized
  source 1..20: mol_type = other DNA
ttaggcagaagacaggaaaa

SEQ ID NO: 60321 - DNA, 20 bp, synthetic construct
  misc_feature 1..20: note = chemically synthesized
  source 1..20: mol_type = other DNA
aagcaacttcagcaaagcct

SEQ ID NO: 60322 - DNA, 20 bp, synthetic construct
  misc_feature 1..20: note = chemically synthesized
  source 1..20: mol_type = other DNA
ccattcacaattgcttcaaa

SEQ ID NO: 60323 - DNA, 20 bp, synthetic construct
  misc_feature 1..20: note = chemically synthesized
  source 1..20: mol_type = other DNA
tcaaagagaataaaatacct

SEQ ID NO: 60324 - DNA, 20 bp, synthetic construct
  misc_feature 1..20: note = chemically synthesized
  source 1..20: mol_type = other DNA
acctaggaatccaacttaca

SEQ ID NO: 60325 - DNA, 20 bp, synthetic construct
  misc_feature 1..20: note = chemically synthesized
  source 1..20: mol_type = other DNA
tggaagaacattccatgctt

SEQ ID NO: 60326 - DNA, 20 bp, synthetic construct
  misc_feature 1..20: note = chemically synthesized
  source 1..20: mol_type = other DNA
attccatgcttatgggtagg

SEQ ID NO: 60327 - DNA, 20 bp, synthetic construct
  misc_feature 1..20: note = chemically synthesized
  source 1..20: mol_type = other DNA
gctaccaatgattttcttca

SEQ ID NO: 60328 - DNA, 20 bp, synthetic construct
  misc_feature 1..20: note = chemically synthesized
  source 1..20: mol_type = other DNA
agaaaaacaagaaatgggga

SEQ ID NO: 60329 - DNA, 20 bp, synthetic construct
  misc_feature 1..20: note = chemically synthesized
  source 1..20: mol_type = other DNA
gagaactggctagccatatg

SEQ ID NO: 60330 - DNA, 20 bp, synthetic construct
  misc_feature 1..20: note = chemically synthesized
  source 1..20: mol_type = other DNA
ccatatgtagaatgctgaaa

SEQ ID NO: 60331 - DNA, 20 bp, synthetic construct
  misc_feature 1..20: note = chemically synthesized
  source 1..20: mol_type = other DNA
tatacaaaaattaattcaag

SEQ ID NO: 60332 - DNA, 20 bp, synthetic construct
  misc_feature 1..20: note = chemically synthesized
  source 1..20: mol_type = other DNA
caaaagccaaaattcactaa

SEQ ID NO: 60333 - DNA, 20 bp, synthetic construct
  misc_feature 1..20: note = chemically synthesized
  source 1..20: mol_type = other DNA
acagctaaagaaactaccat

SEQ ID NO: 60334 - DNA, 20 bp, synthetic construct
  misc_feature 1..20: note = chemically synthesized
  source 1..20: mol_type = other DNA
tctgacaaagggctaatatc

SEQ ID NO: 60335 - DNA, 20 bp, synthetic construct
  misc_feature 1..20: note = chemically synthesized
  source 1..20: mol_type = other DNA
gccccatcaacaagtgggca

SEQ ID NO: 60336 - DNA, 20 bp, synthetic construct
  misc_feature 1..20: note = chemically synthesized
  source 1..20: mol_type = other DNA
agataccatctcataccagt

SEQ ID NO: 60337 - DNA, 20 bp, synthetic construct
  misc_feature 1..20: note = chemically synthesized
  source 1..20: mol_type = other DNA
aggaaacaacaggtgctgga

SEQ ID NO: 60338 - DNA, 20 bp, synthetic construct
  misc_feature 1..20: note = chemically synthesized
  source 1..20: mol_type = other DNA
agtcagtgtggcgattcctc

SEQ ID NO: 60339 - DNA, 20 bp, synthetic construct
  misc_feature 1..20: note = chemically synthesized
  source 1..20: mol_type = other DNA
ttgacccagccatcccatta

SEQ ID NO: 60340 - DNA, 20 bp, synthetic construct
  misc_feature 1..20: note = chemically synthesized
  source 1..20: mol_type = other DNA
attactgggtatatacccaa

SEQ ID NO: 60341 - DNA, 20 bp, synthetic construct
  misc_feature 1..20: note = chemically synthesized
  source 1..20: mol_type = other DNA
aaatgtccaacaatgataga

SEQ ID NO: 60342 - DNA, 20 bp, synthetic construct
  misc_feature 1..20: note = chemically synthesized
  source 1..20: mol_type = other DNA
aatgtggcacatatacacca

SEQ ID NO: 60343 - DNA, 20 bp, synthetic construct
  misc_feature 1..20: note = chemically synthesized
  source 1..20: mol_type = other DNA
actatgcagccataaaaatg

SEQ ID NO: 60344 - DNA, 20 bp, synthetic construct
  misc_feature 1..20: note = chemically synthesized
  source 1..20: mol_type = other DNA
ttcatgtcctttgtagggac

SEQ ID NO: 60345 - DNA, 20 bp, synthetic construct
  misc_feature 1..20: note = chemically synthesized
  source 1..20: mol_type = other DNA
tcacactctggggactgttg

SEQ ID NO: 60346 - DNA, 20 bp, synthetic construct
  misc_feature 1..20: note = chemically synthesized
  source 1..20: mol_type = other DNA
tctggggactgttgtggggt

SEQ ID NO: 60347 - DNA, 20 bp, synthetic construct
  misc_feature 1..20: note = chemically synthesized
  source 1..20: mol_type = other DNA
tgtggggtgggggtgcaggg

SEQ ID NO: 60348 - DNA, 20 bp, synthetic construct
  misc_feature 1..20: note = chemically synthesized
  source 1..20: mol_type = other DNA
gatatacctaatgctaaatt

SEQ ID NO: 60349 - DNA, 20 bp, synthetic construct
  misc_feature 1..20: note = chemically synthesized
  source 1..20: mol_type = other DNA
taatgctaaattacgagtta

SEQ ID NO: 60350 - DNA, 20 bp, synthetic construct
  misc_feature 1..20: note = chemically synthesized
  source 1..20: mol_type = other DNA
gctcaaggttagctaaagat

SEQ ID NO: 60351 - DNA, 20 bp, synthetic construct
  misc_feature 1..20: note = chemically synthesized
  source 1..20: mol_type = other DNA
atccattttttgtttccttt

SEQ ID NO: 60352 - DNA, 20 bp, synthetic construct
  misc_feature 1..20: note = chemically synthesized
  source 1..20: mol_type = other DNA
ggacagcttgatactttccc

SEQ ID NO: 60353 - DNA, 20 bp, synthetic construct
  misc_feature 1..20: note = chemically synthesized
  source 1..20: mol_type = other DNA
tttcccatgagtctggcttt

SEQ ID NO: 60354 - DNA, 20 bp, synthetic construct
  misc_feature 1..20: note = chemically synthesized
  source 1..20: mol_type = other DNA
atcttggacttttaagtcac

SEQ ID NO: 60355 - DNA, 20 bp, synthetic construct
  misc_feature 1..20: note = chemically synthesized
  source 1..20: mol_type = other DNA
actaaaactttagcccaact

SEQ ID NO: 60356 - DNA, 20 bp, synthetic construct
  misc_feature 1..20: note = chemically synthesized
  source 1..20: mol_type = other DNA
agaagagatggtttcccaaa

SEQ ID NO: 60357 - DNA, 20 bp, synthetic construct
  misc_feature 1..20: note = chemically synthesized
  source 1..20: mol_type = other DNA
tcataatgactgaagagagg

SEQ ID NO: 60358 - DNA, 20 bp, synthetic construct
  misc_feature 1..20: note = chemically synthesized
  source 1..20: mol_type = other DNA
acgaaagaaggcgtttctga

SEQ ID NO: 60359 - DNA, 20 bp, synthetic construct
  misc_feature 1..20: note = chemically synthesized
  source 1..20: mol_type = other DNA
gcaggtgtccagggaggcag

SEQ ID NO: 60360 - DNA, 20 bp, synthetic construct
  misc_feature 1..20: note = chemically synthesized
  source 1..20: mol_type = other DNA
gaggcagggggatggacaaa

SEQ ID NO: 60361 - DNA, 20 bp, synthetic construct
  misc_feature 1..20: note = chemically synthesized
  source 1..20: mol_type = other DNA
ttttggcaatcctaacttct

SEQ ID NO: 60362 - DNA, 20 bp, synthetic construct
  misc_feature 1..20: note = chemically synthesized
  source 1..20: mol_type = other DNA
atcgatctcacaccacaaaa

SEQ ID NO: 60363 - DNA, 20 bp, synthetic construct
  misc_feature 1..20: note = chemically synthesized
  source 1..20: mol_type = other DNA
ggacttgttctaacaggcct

SEQ ID NO: 60364 - DNA, 20 bp, synthetic construct
  misc_feature 1..20: note = chemically synthesized
  source 1..20: mol_type = other DNA
ctgtgacagagacacctaaa

SEQ ID NO: 60365 - DNA, 20 bp, synthetic construct
  misc_feature 1..20: note = chemically synthesized
  source 1..20: mol_type = other DNA
acacctaaaaagagtctgtt

SEQ ID NO: 60366 - DNA, 20 bp, synthetic construct
  misc_feature 1..20: note = chemically synthesized
  source 1..20: mol_type = other DNA
ctggagacattgagaaccct

SEQ ID NO: 60367 - DNA, 20 bp, synthetic construct
  misc_feature 1..20: note = chemically synthesized
  source 1..20: mol_type = other DNA
acattgagaaccctgtgagt

SEQ ID NO: 60368 - DNA, 20 bp, synthetic construct
  misc_feature 1..20: note = chemically synthesized
  source 1..20: mol_type = other DNA
tatttaggtctgtttctggt

SEQ ID NO: 60369 - DNA, 20 bp, synthetic construct
  misc_feature 1..20: note = chemically synthesized
  source 1..20: mol_type = other DNA
ggtctgtttctggtcagagt

SEQ ID NO: 60370 - DNA, 20 bp, synthetic construct
  misc_feature 1..20: note = chemically synthesized
  source 1..20: mol_type = other DNA
aggaagatcatcctcaaagg

SEQ ID NO: 60371 - DNA, 20 bp, synthetic construct
  misc_feature 1..20: note = chemically synthesized
  source 1..20: mol_type = other DNA
tggcagctttcagctgtgta

SEQ ID NO: 60372 - DNA, 20 bp, synthetic construct
  misc_feature 1..20: note = chemically synthesized
  source 1..20: mol_type = other DNA
gccacattttcttgtgccct

SEQ ID NO: 60373 - DNA, 20 bp, synthetic construct
  misc_feature 1..20: note = chemically synthesized
  source 1..20: mol_type = other DNA
agtagggccttggtgctggt

SEQ ID NO: 60374 - DNA, 20 bp, synthetic construct
  misc_feature 1..20: note = chemically synthesized
  source 1..20: mol_type = other DNA
aatttaagcctatccttggg

SEQ ID NO: 60375 - DNA, 20 bp, synthetic construct
  misc_feature 1..20: note = chemically synthesized
  source 1..20: mol_type = other DNA
acagcatgtgtacagacctt

SEQ ID NO: 60376 - DNA, 20 bp, synthetic construct
  misc_feature 1..20: note = chemically synthesized
  source 1..20: mol_type = other DNA
tggggattcagttctcctga

SEQ ID NO: 60377 - DNA, 20 bp, synthetic construct
  misc_feature 1..20: note = chemically synthesized
  source 1..20: mol_type = other DNA
gggctggctaggtatcaatt

SEQ ID NO: 60378 - DNA, 20 bp, synthetic construct
  misc_feature 1..20: note = chemically synthesized
  source 1..20: mol_type = other DNA
gacacttttcacttttagta

SEQ ID NO: 60379 - DNA, 20 bp, synthetic construct
  misc_feature 1..20: note = chemically synthesized
  source 1..20: mol_type = other DNA
tggatttagattctttaata

SEQ ID NO: 60380 - DNA, 20 bp, synthetic construct
  misc_feature 1..20: note = chemically synthesized
  source 1..20: mol_type = other DNA
aataccttaaaggttaaggc

SEQ ID NO: 60381 - DNA, 20 bp, synthetic construct
  misc_feature 1..20: note = chemically synthesized
  source 1..20: mol_type = other DNA
tctatcttcaagttcttgat

SEQ ID NO: 60382 - DNA, 20 bp, synthetic construct
  misc_feature 1..20: note = chemically synthesized
  source 1..20: mol_type = other DNA
gcacgtcaatgaaaattgat

SEQ ID NO: 60383 - DNA, 20 bp, synthetic construct
  misc_feature 1..20: note = chemically synthesized
  source 1..20: mol_type = other DNA
aaaggtcatttagagcaata

SEQ ID NO: 60384 - DNA, 20 bp, synthetic construct
  misc_feature 1..20: note = chemically synthesized
  source 1..20: mol_type = other DNA
gcaataaagaatcaaaaatg

SEQ ID NO: 60385 - DNA, 20 bp, synthetic construct
  misc_feature 1..20: note = chemically synthesized
  source 1..20: mol_type = other DNA
aattatataattcagagaaa

SEQ ID NO: 60386 - DNA, 20 bp, synthetic construct
  misc_feature 1..20: note = chemically synthesized
  source 1..20: mol_type = other DNA
acatgtcatataaactcatt

SEQ ID NO: 60387 - DNA, 20 bp, synthetic construct
  misc_feature 1..20: note = chemically synthesized
  source 1..20: mol_type = other DNA
cttatgtgtgatagatgccc

SEQ ID NO: 60388 - DNA, 20 bp, synthetic construct
  misc_feature 1..20: note = chemically synthesized
  source 1..20: mol_type = other DNA
gctgttatactgtccttggc

SEQ ID NO: 60389 - DNA, 20 bp, synthetic construct
  misc_feature 1..20: note = chemically synthesized
  source 1..20: mol_type = other DNA
aatcatgttcttaataaatg

SEQ ID NO: 60390 - DNA, 20 bp, synthetic construct
  misc_feature 1..20: note = chemically synthesized
  source 1..20: mol_type = other DNA
taaggtggtgccacttctgt

SEQ ID NO: 60391 - DNA, 20 bp, synthetic construct
  misc_feature 1..20: note = chemically synthesized
  source 1..20: mol_type = other DNA
aatggcatgtcataaacttc

SEQ ID NO: 60392 - DNA, 20 bp, synthetic construct
  misc_feature 1..20: note = chemically synthesized
  source 1..20: mol_type = other DNA
aatcaaccatgccctattta

SEQ ID NO: 60393 - DNA, 20 bp, synthetic construct
  misc_feature 1..20: note = chemically synthesized
  source 1..20: mol_type = other DNA
cttgcttcatgccagtctcc

SEQ ID NO: 60394 - DNA, 20 bp, synthetic construct
  misc_feature 1..20: note = chemically synthesized
  source 1..20: mol_type = other DNA
ttgtggtggagaggttgtgt

SEQ ID NO: 60395 - DNA, 20 bp, synthetic construct
  misc_feature 1..20: note = chemically synthesized
  source 1..20: mol_type = other DNA
cactgacctggacatttgtt

SEQ ID NO: 60396 - DNA, 20 bp, synthetic construct
  misc_feature 1..20: note = chemically synthesized
  source 1..20: mol_type = other DNA
acctggacatttgtttgggg

SEQ ID NO: 60397 - DNA, 20 bp, synthetic construct
  misc_feature 1..20: note = chemically synthesized
  source 1..20: mol_type = other DNA
gacatttgtttggggtagga

SEQ ID NO: 60398 - DNA, 20 bp, synthetic construct
  misc_feature 1..20: note = chemically synthesized
  source 1..20: mol_type = other DNA
atataaaaatagacaggaaa

SEQ ID NO: 60399 - DNA, 20 bp, synthetic construct
  misc_feature 1..20: note = chemically synthesized
  source 1..20: mol_type = other DNA
atagacaggaaaatgagtgc

SEQ ID NO: 60400 - DNA, 20 bp, synthetic construct
  misc_feature 1..20: note = chemically synthesized
  source 1..20: mol_type = other DNA
gaaaatgagtgcaggagtga

SEQ ID NO: 60401 - DNA, 20 bp, synthetic construct
  misc_feature 1..20: note = chemically synthesized
  source 1..20: mol_type = other DNA
aaagccactgtgaacatcac

SEQ ID NO: 60402 - DNA, 20 bp, synthetic construct
  misc_feature 1..20: note = chemically synthesized
  source 1..20: mol_type = other DNA
tccgacctctctggaaaacg

SEQ ID NO: 60403 - DNA, 20 bp, synthetic construct
  misc_feature 1..20: note = chemically synthesized
  source 1..20: mol_type = other DNA
aaacgacgggtccattacta

SEQ ID NO: 60404 - DNA, 20 bp, synthetic construct
  misc_feature 1..20: note = chemically synthesized
  source 1..20: mol_type = other DNA
taaataaaatgataagtgat

SEQ ID NO: 60405 - DNA, 20 bp, synthetic construct
  misc_feature 1..20: note = chemically synthesized
  source 1..20: mol_type = other DNA
gtgtagccaaaacctgggga

SEQ ID NO: 60406 - DNA, 20 bp, synthetic construct
  misc_feature 1..20: note = chemically synthesized
  source 1..20: mol_type = other DNA
gctcttcagcttcaggagac

SEQ ID NO: 60407 - DNA, 20 bp, synthetic construct
  misc_feature 1..20: note = chemically synthesized
  source 1..20: mol_type = other DNA
taaagaaagtttcctgccca

SEQ ID NO: 60408 - DNA, 20 bp, synthetic construct
  misc_feature 1..20: note = chemically synthesized
  source 1..20: mol_type = other DNA
gctggagccatggtctttag

SEQ ID NO: 60409 - DNA, 20 bp, synthetic construct
  misc_feature 1..20: note = chemically synthesized
  source 1..20: mol_type = other DNA
atttttgttattacctgctg

SEQ ID NO: 60410 - DNA, 20 bp, synthetic construct
  misc_feature 1..20: note = chemically synthesized
  source 1..20: mol_type = other DNA
gtctcactactgtcttgtgc

SEQ ID NO: 60411 - DNA, 20 bp, synthetic construct
  misc_feature 1..20: note = chemically synthesized
  source 1..20: mol_type = other DNA
ctgtcttgtgccggggtttc

SEQ ID NO: 60412 - DNA, 20 bp, synthetic construct
  misc_feature 1..20: note = chemically synthesized
  source 1..20: mol_type = other DNA
cttgtgccggggtttcagga

SEQ ID NO: 60413 - DNA, 20 bp, synthetic construct
  misc_feature 1..20: note = chemically synthesized
  source 1..20: mol_type = other DNA
gggagaaaatgagggaaaat

SEQ ID NO: 60414 - DNA, 20 bp, synthetic construct
  misc_feature 1..20: note = chemically synthesized
  source 1..20: mol_type = other DNA
aaggcttttcccccaaatgt

SEQ ID NO: 60415 - DNA, 20 bp, synthetic construct
  misc_feature 1..20: note = chemically synthesized
  source 1..20: mol_type = other DNA
gtttgaatgtccttagccaa

SEQ ID NO: 60416 - DNA, 20 bp, synthetic construct
  misc_feature 1..20: note = chemically synthesized
  source 1..20: mol_type = other DNA
attccctgcactaagcctaa

SEQ ID NO: 60417 - DNA, 20 bp, synthetic construct
  misc_feature 1..20: note = chemically synthesized
  source 1..20: mol_type = other DNA
tagctcactgtaaactcaaa

SEQ ID NO: 60418 - DNA, 20 bp, synthetic construct
  misc_feature 1..20: note = chemically synthesized
  source 1..20: mol_type = other DNA
accttattcttccaagttgc

SEQ ID NO: 60419 - DNA, 20 bp, synthetic construct
  misc_feature 1..20: note = chemically synthesized
  source 1..20: mol_type = other DNA
gaaaatgaagtcttagaaac

SEQ ID NO: 60420 - DNA, 20 bp, synthetic construct
  misc_feature 1..20: note = chemically synthesized
  source 1..20: mol_type = other DNA
cttagaaaccagggttctca

SEQ ID NO: 60421 - DNA, 20 bp, synthetic construct
  misc_feature 1..20: note = chemically synthesized
  source 1..20: mol_type = other DNA
agaatctcttctgatattct

SEQ ID NO: 60422 - DNA, 20 bp, synthetic construct
  misc_feature 1..20: note = chemically synthesized
  source 1..20: mol_type = other DNA
agggctgcctcactcccctg

SEQ ID NO: 60423 - DNA, 20 bp, synthetic construct
  misc_feature 1..20: note = chemically synthesized
  source 1..20: mol_type = other DNA
atggccaggccagcccctcc

SEQ ID NO: 60424 - DNA, 20 bp, synthetic construct
  misc_feature 1..20: note = chemically synthesized
  source 1..20: mol_type = other DNA
cctggatcatgtctagaagt

SEQ ID NO: 60425 - DNA, 20 bp, synthetic construct
  misc_feature 1..20: note = chemically synthesized
  source 1..20: mol_type = other DNA
cttgtaacttccccagtatc

SEQ ID NO: 60426 - DNA, 20 bp, synthetic construct
  misc_feature 1..20: note = chemically synthesized
  source 1..20: mol_type = other DNA
aaaaacaggcatgtttacag

SEQ ID NO: 60427 - DNA, 20 bp, synthetic construct
  misc_feature 1..20: note = chemically synthesized
  source 1..20: mol_type = other DNA
ccactgtggaaatgttctct

SEQ ID NO: 60428 - DNA, 20 bp, synthetic construct
  misc_feature 1..20: note = chemically synthesized
  source 1..20: mol_type = other DNA
tgttctctaggggttcaaaa

SEQ ID NO: 60429 - DNA, 20 bp, synthetic construct
  misc_feature 1..20: note = chemically synthesized
  source 1..20: mol_type = other DNA
ctaatattaaattcaaacaa

SEQ ID NO: 60430 - DNA, 20 bp, synthetic construct
  misc_feature 1..20: note = chemically synthesized
  source 1..20: mol_type = other DNA
tatactgaaaatctcttttc

SEQ ID NO: 60431 - DNA, 20 bp, synthetic construct
  misc_feature 1..20: note = chemically synthesized
  source 1..20: mol_type = other DNA
attttctcctgtgatctaag

SEQ ID NO: 60432 - DNA, 20 bp, synthetic construct
  misc_feature 1..20: note = chemically synthesized
  source 1..20: mol_type = other DNA
taagatgaatctactctgcc

SEQ ID NO: 60433 - DNA, 20 bp, synthetic construct
  misc_feature 1..20: note = chemically synthesized
  source 1..20: mol_type = other DNA
attagatgtaactgactgct

SEQ ID NO: 60434 - DNA, 20 bp, synthetic construct
  misc_feature 1..20: note = chemically synthesized
  source 1..20: mol_type = other DNA
atgactgttgctctcctatc

SEQ ID NO: 60435 - DNA, 20 bp, synthetic construct
  misc_feature 1..20: note = chemically synthesized
  source 1..20: mol_type = other DNA
acaacagaaccccaggcaca

SEQ ID NO: 60436 - DNA, 20 bp, synthetic construct
  misc_feature 1..20: note = chemically synthesized
  source 1..20: mol_type = other DNA
gaaccccaggcacaaagaat

SEQ ID NO: 60437 - DNA, 20 bp, synthetic construct
  misc_feature 1..20: note = chemically synthesized
  source 1..20: mol_type = other DNA
acaaagaatcaggataagag

SEQ ID NO: 60438 - DNA, 20 bp, synthetic construct
  misc_feature 1..20: note = chemically synthesized
  source 1..20: mol_type = other DNA
tcaggctccaggggccttta

SEQ ID NO: 60439 - DNA, 20 bp, synthetic construct
  misc_feature 1..20: note = chemically synthesized
  source 1..20: mol_type = other DNA
cagtctaatcaacttaaaaa

SEQ ID NO: 60440 - DNA, 20 bp, synthetic construct
  misc_feature 1..20: note = chemically synthesized
  source 1..20: mol_type = other DNA
tgttctaaacatgtataata

SEQ ID NO: 60441 - DNA, 20 bp, synthetic construct
  misc_feature 1..20: note = chemically synthesized
  source 1..20: mol_type = other DNA
aaaaatctataaagtatata

SEQ ID NO: 60442 - DNA, 20 bp, synthetic construct
  misc_feature 1..20: note = chemically synthesized
  source 1..20: mol_type = other DNA
gtatattctataaagtattt

SEQ ID NO: 60443 - DNA, 20 bp, synthetic construct
  misc_feature 1..20: note = chemically synthesized
  source 1..20: mol_type = other DNA
ttatacatatgtgtacttat

SEQ ID NO: 60444 - DNA, 20 bp, synthetic construct
  misc_feature 1..20: note = chemically synthesized
  source 1..20: mol_type = other DNA
tatataaatataaaaatata

SEQ ID NO: 60445 - DNA, 20 bp, synthetic construct
  misc_feature 1..20: note = chemically synthesized
  source 1..20: mol_type = other DNA
gatatttgtactaagtctta

SEQ ID NO: 60446 - DNA, 20 bp, synthetic construct
  misc_feature 1..20: note = chemically synthesized
  source 1..20: mol_type = other DNA
tgtttactggttggaaaaac

SEQ ID NO: 60447 - DNA, 20 bp, synthetic construct
  misc_feature 1..20: note = chemically synthesized
  source 1..20: mol_type = other DNA
caagaaagcaataaatatag

SEQ ID NO: 60448 - DNA, 20 bp, synthetic construct
  misc_feature 1..20: note = chemically synthesized
  source 1..20: mol_type = other DNA
aaacaagaaaagtatgtgta

SEQ ID NO: 60449 - DNA, 20 bp, synthetic construct
  misc_feature 1..20: note = chemically synthesized
  source 1..20: mol_type = other DNA
gaattgaagaaaaaaatgat

SEQ ID NO: 60450 - DNA, 20 bp, synthetic construct
  misc_feature 1..20: note = chemically synthesized
  source 1..20: mol_type = other DNA
ggtgtgttgactgggaaaag

SEQ ID NO: 60451 - DNA, 20 bp, synthetic construct
  misc_feature 1..20: note = chemically synthesized
  source 1..20: mol_type = other DNA
ccgggctaaagatggtgtta

SEQ ID NO: 60452 - DNA, 20 bp, synthetic construct
  misc_feature 1..20: note = chemically synthesized
  source 1..20: mol_type = other DNA
tttcgctcactaccaggcct

SEQ ID NO: 60453 - DNA, 20 bp, synthetic construct
  misc_feature 1..20: note = chemically synthesized
  source 1..20: mol_type = other DNA
gaaaacagtgcagtgattca

SEQ ID NO: 60454 - DNA, 20 bp, synthetic construct
  misc_feature 1..20: note = chemically synthesized
  source 1..20: mol_type = other DNA
taatctcggtggctgcagta

SEQ ID NO: 60455 - DNA, 20 bp, synthetic construct
  misc_feature 1..20: note = chemically synthesized
  source 1..20: mol_type = other DNA
gaggagcctggctttgcatg

SEQ ID NO: 60456 - DNA, 20 bp, synthetic construct
  misc_feature 1..20: note = chemically synthesized
  source 1..20: mol_type = other DNA
cattggctacagagatgaag

SEQ ID NO: 60457 - DNA, 20 bp, synthetic construct
  misc_feature 1..20: note = chemically synthesized
  source 1..20: mol_type = other DNA
gatgaagatgaatagattac

SEQ ID NO: 60458 - DNA, 20 bp, synthetic construct
  misc_feature 1..20: note = chemically synthesized
  source 1..20: mol_type = other DNA
attagatacagaaagaggga

SEQ ID NO: 60459 - DNA, 20 bp, synthetic construct
  misc_feature 1..20: note = chemically synthesized
  source 1..20: mol_type = other DNA
atacagaaagagggagaggg

SEQ ID NO: 60460 - DNA, 20 bp, synthetic construct
  misc_feature 1..20: note = chemically synthesized
  source 1..20: mol_type = other DNA
atcagctcaaaaatgttgtc

SEQ ID NO: 60461 - DNA, 20 bp, synthetic construct
  misc_feature 1..20: note = chemically synthesized
  source 1..20: mol_type = other DNA
gtcttgaatggcaggaaatg

SEQ ID NO: 60462 - DNA, 20 bp, synthetic construct
  misc_feature 1..20: note = chemically synthesized
  source 1..20: mol_type = other DNA
aaaaaatgcataaatatgag

SEQ ID NO: 60463 - DNA, 20 bp, synthetic construct
  misc_feature 1..20: note = chemically synthesized
  source 1..20: mol_type = other DNA
gaagaatcaggtgtgaaaag

SEQ ID NO: 60464 - DNA, 20 bp, synthetic construct
  misc_feature 1..20: note = chemically synthesized
  source 1..20: mol_type = other DNA
tgggctcaatattagacgtg

SEQ ID NO: 60465 - DNA, 20 bp, synthetic construct
  misc_feature 1..20: note = chemically synthesized
  source 1..20: mol_type = other DNA
aactcaggcctgatatgtaa

SEQ ID NO: 60466 - DNA, 20 bp, synthetic construct
  misc_feature 1..20: note = chemically synthesized
  source 1..20: mol_type = other DNA
taataataatagataatata

SEQ ID NO: 60467 - DNA, 20 bp, synthetic construct
  misc_feature 1..20: note = chemically synthesized
  source 1..20: mol_type = other DNA
aggtgttcaaggacagtaaa

SEQ ID NO: 60468 - DNA, 20 bp, synthetic construct
  misc_feature 1..20: note = chemically synthesized
  source 1..20: mol_type = other DNA
tatttgagcaatggaaataa

SEQ ID NO: 60469 - DNA, 20 bp, synthetic construct
  misc_feature 1..20: note = chemically synthesized
  source 1..20: mol_type = other DNA
aaccagcagatcttggcatt

SEQ ID NO: 60470 - DNA, 20 bp, synthetic construct
  misc_feature 1..20: note = chemically synthesized
  source 1..20: mol_type = other DNA
ttggcccctagaagtcactg

SEQ ID NO: 60471 - DNA, 20 bp, synthetic construct
  misc_feature 1..20: note = chemically synthesized
  source 1..20: mol_type = other DNA
aggagcattgctttagctaa

SEQ ID NO: 60472 - DNA, 20 bp, synthetic construct
  misc_feature 1..20: note = chemically synthesized
  source 1..20: mol_type = other DNA
gggttttaaaaaaaacatta

SEQ ID NO: 60473 - DNA, 20 bp, synthetic construct
  misc_feature 1..20: note = chemically synthesized
  source 1..20: mol_type = other DNA
aaacattatagggtggttgg

SEQ ID NO: 60474 - DNA, 20 bp, synthetic construct
  misc_feature 1..20: note = chemically synthesized
  source 1..20: mol_type = other DNA
gcatttagctgctacttcaa

SEQ ID NO: 60475 - DNA, 20 bp, synthetic construct
  misc_feature 1..20: note = chemically synthesized
  source 1..20: mol_type = other DNA
tccccaccttgcttcctcca

SEQ ID NO: 60476 - DNA, 20 bp, synthetic construct
  misc_feature 1..20: note = chemically synthesized
  source 1..20: mol_type = other DNA
cacttgttcttcctccttcc

SEQ ID NO: 60477 - DNA, 20 bp, synthetic construct
  misc_feature 1..20: note = chemically synthesized
  source 1..20: mol_type = other DNA
ttacttttgcaccaacctaa

SEQ ID NO: 60478 - DNA, 20 bp, synthetic construct
  misc_feature 1..20: note = chemically synthesized
  source 1..20: mol_type = other DNA
acaatttcaatatgtattta

SEQ ID NO: 60479 - DNA, 20 bp, synthetic construct
  misc_feature 1..20: note = chemically synthesized
  source 1..20: mol_type = other DNA
tgtatttattgaatcaatta

SEQ ID NO: 60480 - DNA, 20 bp, synthetic construct
  misc_feature 1..20: note = chemically synthesized
  source 1..20: mol_type = other DNA
atgaataattattgaaataa

SEQ ID NO: 60481 - DNA, 20 bp, synthetic construct
  misc_feature 1..20: note = chemically synthesized
  source 1..20: mol_type = other DNA
atttattcaaataatattta

SEQ ID NO: 60482 - DNA, 20 bp, synthetic construct
  misc_feature 1..20: note = chemically synthesized
  source 1..20: mol_type = other DNA
agtcatggtttatgtccaca

SEQ ID NO: 60483 - DNA, 20 bp, synthetic construct
  misc_feature 1..20: note = chemically synthesized
  source 1..20: mol_type = other DNA
aactacaggaacacatagga

SEQ ID NO: 60484 - DNA, 20 bp, synthetic construct
  misc_feature 1..20: note = chemically synthesized
  source 1..20: mol_type = other DNA
gggtattcaaactaaacttg

SEQ ID NO: 60485 - DNA, 20 bp, synthetic construct
  misc_feature 1..20: note = chemically synthesized
  source 1..20: mol_type = other DNA
gacatcatatctaagctaag

SEQ ID NO: 60486 - DNA, 20 bp, synthetic construct
  misc_feature 1..20: note = chemically synthesized
  source 1..20: mol_type = other DNA
aaaaatgtttttattccagg

SEQ ID NO: 60487 - DNA, 20 bp, synthetic construct
  misc_feature 1..20: note = chemically synthesized
  source 1..20: mol_type = other DNA
aagcatactagataaactgg

SEQ ID NO: 60488 - DNA, 20 bp, synthetic construct
  misc_feature 1..20: note = chemically synthesized
  source 1..20: mol_type = other DNA
tgtttagtgtcattaacacc

SEQ ID NO: 60489 - DNA, 20 bp, synthetic construct
  misc_feature 1..20: note = chemically synthesized
  source 1..20: mol_type = other DNA
cgtgaatatacagaggaaat

SEQ ID NO: 60490 - DNA, 20 bp, synthetic construct
  misc_feature 1..20: note = chemically synthesized
  source 1..20: mol_type = other DNA
aattaggatagataagaaaa

SEQ ID NO: 60491 - DNA, 20 bp, synthetic construct
  misc_feature 1..20: note = chemically synthesized
  source 1..20: mol_type = other DNA
tacacggagagaaaataagg

SEQ ID NO: 60492 - DNA, 20 bp, synthetic construct
  misc_feature 1..20: note = chemically synthesized
  source 1..20: mol_type = other DNA
agagaaaataaggtagggtc

SEQ ID NO: 60493 - DNA, 20 bp, synthetic construct
  misc_feature 1..20: note = chemically synthesized
  source 1..20: mol_type = other DNA
tcttgctatatagtagtcaa

SEQ ID NO: 60494 - DNA, 20 bp, synthetic construct
  misc_feature 1..20: note = chemically synthesized
  source 1..20: mol_type = other DNA
tgaatacagtagtacaaaag

SEQ ID NO: 60495 - DNA, 20 bp, synthetic construct
  misc_feature 1..20: note = chemically synthesized
  source 1..20: mol_type = other DNA
tagtacaaaagatgagtcac

SEQ ID NO: 60496 - DNA, 20 bp, synthetic construct
  misc_feature 1..20: note = chemically synthesized
  source 1..20: mol_type = other DNA
agtcactggaatagtcctga

SEQ ID NO: 60497 - DNA, 20 bp, synthetic construct
  misc_feature 1..20: note = chemically synthesized
  source 1..20: mol_type = other DNA
aatagtcctgaaagagtgat

SEQ ID NO: 60498 - DNA, 20 bp, synthetic construct
  misc_feature 1..20: note = chemically synthesized
  source 1..20: mol_type = other DNA
cctgaaagagtgatctgaat

SEQ ID NO: 60499 - DNA, 20 bp, synthetic construct
  misc_feature 1..20: note = chemically synthesized
  source 1..20: mol_type = other DNA
tagcatcaatgaaggtgacg

SEQ ID NO: 60500 - DNA, 20 bp, synthetic construct
  misc_feature 1..20: note = chemically synthesized
  source 1..20: mol_type = other DNA
atgaaaagtacagatgttgc

SEQ ID NO: 60501 - DNA, 20 bp, synthetic construct
  misc_feature 1..20: note = chemically synthesized
  source 1..20: mol_type = other DNA
aaagagagaaagacaagttc

SEQ ID NO: 60502 - DNA, 20 bp, synthetic construct
  misc_feature 1..20: note = chemically synthesized
  source 1..20: mol_type = other DNA
tatttgttatttatcaatat

SEQ ID NO: 60503 - DNA, 20 bp, synthetic construct
  misc_feature 1..20: note = chemically synthesized
  source 1..20: mol_type = other DNA
tggtaaatgaaatcatggta

SEQ ID NO: 60504 - DNA, 20 bp, synthetic construct
  misc_feature 1..20: note = chemically synthesized
  source 1..20: mol_type = other DNA
atgacattaagaagaaataa

SEQ ID NO: 60505 - DNA, 20 bp, synthetic construct
  misc_feature 1..20: note = chemically synthesized
  source 1..20: mol_type = other DNA
aatatggccaggaaattgcc

SEQ ID NO: 60506 - DNA, 20 bp, synthetic construct
  misc_feature 1..20: note = chemically synthesized
  source 1..20: mol_type = other DNA
ggatgggaagaactatactt

SEQ ID NO: 60507 - DNA, 20 bp, synthetic construct
  misc_feature 1..20: note = chemically synthesized
  source 1..20: mol_type = other DNA
caataaagtagtgagattgg

SEQ ID NO: 60508 - DNA, 20 bp, synthetic construct
  misc_feature 1..20: note = chemically synthesized
  source 1..20: mol_type = other DNA
gtgagattggcagaattcat

SEQ ID NO: 60509 - DNA, 20 bp, synthetic construct
  misc_feature 1..20: note = chemically synthesized
  source 1..20: mol_type = other DNA
attggcagaattcataaggg

SEQ ID NO: 60510 - DNA, 20 bp, synthetic construct
  misc_feature 1..20: note = chemically synthesized
  source 1..20: mol_type = other DNA
atggtactgcttgtgatgtt

SEQ ID NO: 60511 - DNA, 20 bp, synthetic construct
  misc_feature 1..20: note = chemically synthesized
  source 1..20: mol_type = other DNA
tgtgaatgttagtgaagctg

SEQ ID NO: 60512 - DNA, 20 bp, synthetic construct
  misc_feature 1..20: note = chemically synthesized
  source 1..20: mol_type = other DNA
tattttcagctcaatccccg

SEQ ID NO: 60513 - DNA, 20 bp, synthetic construct
  misc_feature 1..20: note = chemically synthesized
  source 1..20: mol_type = other DNA
attctatctcaccagctttc

SEQ ID NO: 60514 - DNA, 20 bp, synthetic construct
  misc_feature 1..20: note = chemically synthesized
  source 1..20: mol_type = other DNA
ggattggaaggcatcaaaca

SEQ ID NO: 60515 - DNA, 20 bp, synthetic construct
  misc_feature 1..20: note = chemically synthesized
  source 1..20: mol_type = other DNA
tccacgttgcccaccactat

SEQ ID NO: 60516 - DNA, 20 bp, synthetic construct
  misc_feature 1..20: note = chemically synthesized
  source 1..20: mol_type = other DNA
catccactctttttccttca

SEQ ID NO: 60517 - DNA, 20 bp, synthetic construct
  misc_feature 1..20: note = chemically synthesized
  source 1..20: mol_type = other DNA
cctgaaggcttttccctact

SEQ ID NO: 60518 - DNA, 20 bp, synthetic construct
  misc_feature 1..20: note = chemically synthesized
  source 1..20: mol_type = other DNA
ggtcttaaaaaggccagtaa

SEQ ID NO: 60519 - DNA, 20 bp, synthetic construct
  misc_feature 1..20: note = chemically synthesized
  source 1..20: mol_type = other DNA
cccaaattggactgaaaatt

SEQ ID NO: 60520 - DNA, 20 bp, synthetic construct
  misc_feature 1..20: note = chemically synthesized
  source 1..20: mol_type = other DNA
tggactgaaaatttggagta

SEQ ID NO: 60521 - DNA, 20 bp, synthetic construct
  misc_feature 1..20: note = chemically synthesized
  source 1..20: mol_type = other DNA
aatatgggcaaatttatgtc

SEQ ID NO: 60522 - DNA, 20 bp, synthetic construct
  misc_feature 1..20: note = chemically synthesized
  source 1..20: mol_type = other DNA
tggctgatcagcctgtccct

SEQ ID NO: 60523 - DNA, 20 bp, synthetic construct
  misc_feature 1..20: note = chemically synthesized
  source 1..20: mol_type = other DNA
tgactaaatgcaatccttgc

SEQ ID NO: 60524 - DNA, 20 bp, synthetic construct
  misc_feature 1..20: note = chemically synthesized
  source 1..20: mol_type = other DNA
aggtgtgtgcatgtgtccat

SEQ ID NO: 60525 - DNA, 20 bp, synthetic construct
  misc_feature 1..20: note = chemically synthesized
  source 1..20: mol_type = other DNA
gactaaatcaagatccctgg

SEQ ID NO: 60526 - DNA, 20 bp, synthetic construct
  misc_feature 1..20: note = chemically synthesized
  source 1..20: mol_type = other DNA
ggacatatagatacataaag

SEQ ID NO: 60527 - DNA, 20 bp, synthetic construct
  misc_feature 1..20: note = chemically synthesized
  source 1..20: mol_type = other DNA
ttctactttactcaggccct

SEQ ID NO: 60528 - DNA, 20 bp, synthetic construct
  misc_feature 1..20: note = chemically synthesized
  source 1..20: mol_type = other DNA
actttgggagaccaaggtgg

SEQ ID NO: 60529 - DNA, 20 bp, synthetic construct
  misc_feature 1..20: note = chemically synthesized
  source 1..20: mol_type = other DNA
tgggaggattgctgaaggcc

SEQ ID NO: 60530 - DNA, 20 bp, synthetic construct
  misc_feature 1..20: note = chemically synthesized
  source 1..20: mol_type = other DNA
acttcaggcaagaagattac

SEQ ID NO: 60531 - DNA, 20 bp, synthetic construct
  misc_feature 1..20: note = chemically synthesized
  source 1..20: mol_type = other DNA
caagaagattacttgagtcc

SEQ ID NO: 60532 - DNA, 20 bp, synthetic construct
  misc_feature 1..20: note = chemically synthesized
  source 1..20: mol_type = other DNA
acctgggaggctgaggtggg

SEQ ID NO: 60533 - DNA, 20 bp, synthetic construct
  misc_feature 1..20: note = chemically synthesized
  source 1..20: mol_type = other DNA
agccataatcacactactgc

SEQ ID NO: 60534 - DNA, 20 bp, synthetic construct
  misc_feature 1..20: note = chemically synthesized
  source 1..20: mol_type = other DNA
ggtatctcatgtttgtatgt

SEQ ID NO: 60535 - DNA, 20 bp, synthetic construct
  misc_feature 1..20: note = chemically synthesized
  source 1..20: mol_type = other DNA
tcaatagcagttccgagact

SEQ ID NO: 60536 - DNA, 20 bp, synthetic construct
  misc_feature 1..20: note = chemically synthesized
  source 1..20: mol_type = other DNA
attctatagatctcatttgg

SEQ ID NO: 60537 - DNA, 20 bp, synthetic construct
  misc_feature 1..20: note = chemically synthesized
  source 1..20: mol_type = other DNA
atagatctcatttggtagaa

SEQ ID NO: 60538 - DNA, 20 bp, synthetic construct
  misc_feature 1..20: note = chemically synthesized
  source 1..20: mol_type = other DNA
agaatggggtacaaaaaatt

SEQ ID NO: 60539 - DNA, 20 bp, synthetic construct
  misc_feature 1..20: note = chemically synthesized
  source 1..20: mol_type = other DNA
gggtacaaaaaatttaggat

SEQ ID NO: 60540 - DNA, 20 bp, synthetic construct
  misc_feature 1..20: note = chemically synthesized
  source 1..20: mol_type = other DNA
atatcttaatttgttactaa

SEQ ID NO: 60541 - DNA, 20 bp, synthetic construct
  misc_feature 1..20: note = chemically synthesized
  source 1..20: mol_type = other DNA
ttgttactaaacgaatattg

SEQ ID NO: 60542 - DNA, 20 bp, synthetic construct
  misc_feature 1..20: note = chemically synthesized
  source 1..20: mol_type = other DNA
actaaacgaatattgaagaa

SEQ ID NO: 60543 - DNA, 20 bp, synthetic construct
  misc_feature 1..20: note = chemically synthesized
  source 1..20: mol_type = other DNA
cagcactctgggaggccgag

SEQ ID NO: 60544 - DNA, 20 bp, synthetic construct
  misc_feature 1..20: note = chemically synthesized
  source 1..20: mol_type = other DNA
actctgggaggccgaggcgg

SEQ ID NO: 60545 - DNA, 20 bp, synthetic construct
  misc_feature 1..20: note = chemically synthesized
  source 1..20: mol_type = other DNA
tactcaggaggctggggcag

SEQ ID NO: 60546 - DNA, 20 bp, synthetic construct
  misc_feature 1..20: note = chemically synthesized
  source 1..20: mol_type = other DNA
aaagaggtattttcacatac

SEQ ID NO: 60547 - DNA, 20 bp, synthetic construct
  misc_feature 1..20: note = chemically synthesized
  source 1..20: mol_type = other DNA
taaatgataaattaaaaatt

SEQ ID NO: 60548 - DNA, 20 bp, synthetic construct
  misc_feature 1..20: note = chemically synthesized
  source 1..20: mol_type = other DNA
tgtgttgaactatttaataa

SEQ ID NO: 60549 - DNA, 20 bp, synthetic construct
  misc_feature 1..20: note = chemically synthesized
  source 1..20: mol_type = other DNA
gtgttattgttcataatttt

SEQ ID NO: 60550 - DNA, 20 bp, synthetic construct
  misc_feature 1..20: note = chemically synthesized
  source 1..20: mol_type = other DNA
atgtaagcatacaaaatgtc

SEQ ID NO: 60551 - DNA, 20 bp, synthetic construct
  misc_feature 1..20: note = chemically synthesized
  source 1..20: mol_type = other DNA
ttaactcacggtagagaggg

SEQ ID NO: 60552 - DNA, 20 bp, synthetic construct
  misc_feature 1..20: note = chemically synthesized
  source 1..20: mol_type = other DNA
taactttttgttccctttcc

SEQ ID NO: 60553 - DNA, 20 bp, synthetic construct
  misc_feature 1..20: note = chemically synthesized
  source 1..20: mol_type = other DNA
tttttaatagacttgatttt

SEQ ID NO: 60554 - DNA, 20 bp, synthetic construct
  misc_feature 1..20: note = chemically synthesized
  source 1..20: mol_type = other DNA
gaaaaactcagtagaaggta

SEQ ID NO: 60555 - DNA, 20 bp, synthetic construct
  misc_feature 1..20: note = chemically synthesized
  source 1..20: mol_type = other DNA
cttgacaataaccttatgag

SEQ ID NO: 60556 - DNA, 20 bp, synthetic construct
  misc_feature 1..20: note = chemically synthesized
  source 1..20: mol_type = other DNA
gctcatgtaattgaagttca

SEQ ID NO: 60557 - DNA, 20 bp, synthetic construct
  misc_feature 1..20: note = chemically synthesized
  source 1..20: mol_type = other DNA
tatctaaaatgttacctatt

SEQ ID NO: 60558 - DNA, 20 bp, synthetic construct
  misc_feature 1..20: note = chemically synthesized
  source 1..20: mol_type = other DNA
agacaatgctttctgaaaga

SEQ ID NO: 60559 - DNA, 20 bp, synthetic construct
  misc_feature 1..20: note = chemically synthesized
  source 1..20: mol_type = other DNA
gatctttacatacttgctca

SEQ ID NO: 60560 - DNA, 20 bp, synthetic construct
  misc_feature 1..20: note = chemically synthesized
  source 1..20: mol_type = other DNA
tacttgctcagtgaatgaca

SEQ ID NO: 60561 - DNA, 20 bp, synthetic construct
  misc_feature 1..20: note = chemically synthesized
  source 1..20: mol_type = other DNA
aagaaaagaaagacaaaaaa

SEQ ID NO: 60562 - DNA, 20 bp, synthetic construct
  misc_feature 1..20: note = chemically synthesized
  source 1..20: mol_type = other DNA
gctggggagagaagacagtc

SEQ ID NO: 60563 - DNA, 20 bp, synthetic construct
  misc_feature 1..20: note = chemically synthesized
  source 1..20: mol_type = other DNA
tctcaaatgctttggtctag

SEQ ID NO: 60564 - DNA, 20 bp, synthetic construct
  misc_feature 1..20: note = chemically synthesized
  source 1..20: mol_type = other DNA
agcccacgtagaacagcatc

SEQ ID NO: 60565 - DNA, 20 bp, synthetic construct
  misc_feature 1..20: note = chemically synthesized
  source 1..20: mol_type = other DNA
tcaaatggaagatgctggca

SEQ ID NO: 60566 - DNA, 20 bp, synthetic construct
  misc_feature 1..20: note = chemically synthesized
  source 1..20: mol_type = other DNA
tgctgaaggtcctttgtttt

SEQ ID NO: 60567 - DNA, 20 bp, synthetic construct
  misc_feature 1..20: note = chemically synthesized
  source 1..20: mol_type = other DNA
ttgtggataaaggaagtcat

SEQ ID NO: 60568 - DNA, 20 bp, synthetic construct
  misc_feature 1..20: note = chemically synthesized
  source 1..20: mol_type = other DNA
ttatctagcatgactatatg

SEQ ID NO: 60569 - DNA, 20 bp, synthetic construct
  misc_feature 1..20: note = chemically synthesized
  source 1..20: mol_type = other DNA
catgactatatgcagggtta

SEQ ID NO: 60570 - DNA, 20 bp, synthetic construct
  misc_feature 1..20: note = chemically synthesized
  source 1..20: mol_type = other DNA
ttactgggctatgccttgta

SEQ ID NO: 60571 - DNA, 20 bp, synthetic construct
  misc_feature 1..20: note = chemically synthesized
  source 1..20: mol_type = other DNA
atgccttgtagagaatgata

SEQ ID NO: 60572 - DNA, 20 bp, synthetic construct
  misc_feature 1..20: note = chemically synthesized
  source 1..20: mol_type = other DNA
tgatgaagcttctaacattt

SEQ ID NO: 60573 - DNA, 20 bp, synthetic construct
  misc_feature 1..20: note = chemically synthesized
  source 1..20: mol_type = other DNA
actttgccaaagccatatgg

SEQ ID NO: 60574 - DNA, 20 bp, synthetic construct
  misc_feature 1..20: note = chemically synthesized
  source 1..20: mol_type = other DNA
ctcactgcaacattgctcac

SEQ ID NO: 60575 - DNA, 20 bp, synthetic construct
  misc_feature 1..20: note = chemically synthesized
  source 1..20: mol_type = other DNA
caactaataaaatgtgtcta

SEQ ID NO: 60576 - DNA, 20 bp, synthetic construct
  misc_feature 1..20: note = chemically synthesized
  source 1..20: mol_type = other DNA
tactccatttaaaattgcat

SEQ ID NO: 60577 - DNA, 20 bp, synthetic construct
  misc_feature 1..20: note = chemically synthesized
  source 1..20: mol_type = other DNA
atgaatggctctctaatcta

SEQ ID NO: 60578 - DNA, 20 bp, synthetic construct
  misc_feature 1..20: note = chemically synthesized
  source 1..20: mol_type = other DNA
tctctaatctatggagtagg

SEQ ID NO: 60579 - DNA, 20 bp, synthetic construct
  misc_feature 1..20: note = chemically synthesized
  source 1..20: mol_type = other DNA
tcagatactttgcacaatca

SEQ ID NO: 60580 - DNA, 20 bp, synthetic construct
  misc_feature 1..20: note = chemically synthesized
  source 1..20: mol_type = other DNA
atgtgcctaggctgcaagac

SEQ ID NO: 60581 - DNA, 20 bp, synthetic construct
  misc_feature 1..20: note = chemically synthesized
  source 1..20: mol_type = other DNA
aagcaacttcagcaaagtct

SEQ ID NO: 60582 - DNA, 20 bp, synthetic construct
  misc_feature 1..20: note = chemically synthesized
  source 1..20: mol_type = other DNA
acaccaataacagacaaaca

SEQ ID NO: 60583 - DNA, 20 bp, synthetic construct
  misc_feature 1..20: note = chemically synthesized
  source 1..20: mol_type = other DNA
ccattcacaattgcttcaga

SEQ ID NO: 60584 - DNA, 20 bp, synthetic construct
  misc_feature 1..20: note = chemically synthesized
  source 1..20: mol_type = other DNA
tcagagagaatataatacct

SEQ ID NO: 60585 - DNA, 20 bp, synthetic construct
  misc_feature 1..20: note = chemically synthesized
  source 1..20: mol_type = other DNA
acctaggaatccaacttaca

SEQ ID NO: 60586 - DNA, 20 bp, synthetic construct
  misc_feature 1..20: note = chemically synthesized
  source 1..20: mol_type = other DNA
tggaagaacattccatgctc

SEQ ID NO: 60587 - DNA, 20 bp, synthetic construct
  misc_feature 1..20: note = chemically synthesized
  source 1..20: mol_type = other DNA
gctaccaatgactttcttca

SEQ ID NO: 60588 - DNA, 20 bp, synthetic construct
  misc_feature 1..20: note = chemically synthesized
  source 1..20: mol_type = other DNA
agaaaaacaagaaatgggga

SEQ ID NO: 60589 - DNA, 20 bp, synthetic construct
  misc_feature 1..20: note = chemically synthesized
  source 1..20: mol_type = other DNA
ccaaatgtaggaagctgaaa

SEQ ID NO: 60590 - DNA, 20 bp, synthetic construct
  misc_feature 1..20: note = chemically synthesized
  source 1..20: mol_type = other DNA
tatacaaaaattaactcaag

SEQ ID NO: 60591 - DNA, 20 bp, synthetic construct
  misc_feature 1..20: note = chemically synthesized
  source 1..20: mol_type = other DNA
caaaagccaaaattcactaa

SEQ ID NO: 60592 - DNA, 20 bp, synthetic construct
  misc_feature 1..20: note = chemically synthesized
  source 1..20: mol_type = other DNA
acagcaaaagaaactaccat

SEQ ID NO: 60593 - DNA, 20 bp, synthetic construct
  misc_feature 1..20: note = chemically synthesized
  source 1..20: mol_type = other DNA
tctgacaaagggctaatatc

SEQ ID NO: 60594 - DNA, 20 bp, synthetic construct
  misc_feature 1..20: note = chemically synthesized
  source 1..20: mol_type = other DNA
accccatcaaaaagtgggca

SEQ ID NO: 60595 - DNA, 20 bp, synthetic construct
  misc_feature 1..20: note = chemically synthesized
  source 1..20: mol_type = other DNA
agataccatctcacaccagt

SEQ ID NO: 60596 - DNA, 20 bp, synthetic construct
  misc_feature 1..20: note = chemically synthesized
  source 1..20: mol_type = other DNA
aggaaacaacaggtgctgga

SEQ ID NO: 60597 - DNA, 20 bp, synthetic construct
  misc_feature 1..20: note = chemically synthesized
  source 1..20: mol_type = other DNA
agtcagtgtggtgattcctc

SEQ ID NO: 60598 - DNA, 20 bp, synthetic construct
  misc_feature 1..20: note = chemically synthesized
  source 1..20: mol_type = other DNA
ttgacccagccatcccatta

SEQ ID NO: 60599 - DNA, 20 bp, synthetic construct
  misc_feature 1..20: note = chemically synthesized
  source 1..20: mol_type = other DNA
cattactgggtatacaccca

SEQ ID NO: 60600 - DNA, 20 bp, synthetic construct
  misc_feature 1..20: note = chemically synthesized
  source 1..20: mol_type = other DNA
aaatgtccaacaatgataga

SEQ ID NO: 60601 - DNA, 20 bp, synthetic construct
  misc_feature 1..20: note = chemically synthesized
  source 1..20: mol_type = other DNA
aatgtggcacatatacacca

SEQ ID NO: 60602 - DNA, 20 bp, synthetic construct
  misc_feature 1..20: note = chemically synthesized
  source 1..20: mol_type = other DNA
ctatgcagccataaaaaatg

SEQ ID NO: 60603 - DNA, 20 bp, synthetic construct
  misc_feature 1..20: note = chemically synthesized
  source 1..20: mol_type = other DNA
ttcatgtcctttgtagggac

SEQ ID NO: 60604 - DNA, 20 bp, synthetic construct
  misc_feature 1..20: note = chemically synthesized
  source 1..20: mol_type = other DNA
tcacacaccggggcctgttg

SEQ ID NO: 60605 - DNA, 20 bp, synthetic construct
  misc_feature 1..20: note = chemically synthesized
  source 1..20: mol_type = other DNA
gtggggtgggaggagggggc

SEQ ID NO: 60606 - DNA, 20 bp, synthetic construct
  misc_feature 1..20: note = chemically synthesized
  source 1..20: mol_type = other DNA
gatatacctaatgttaaatg

SEQ ID NO: 60607 - DNA, 20 bp, synthetic construct
  misc_feature 1..20: note = chemically synthesized
  source 1..20: mol_type = other DNA
taatgttaaatggtgagtta

SEQ ID NO: 60608 - DNA, 20 bp, synthetic construct
  misc_feature 1..20: note = chemically synthesized
  source 1..20: mol_type = other DNA
atattagttatttaaatatg

SEQ ID NO: 60609 - DNA, 20 bp, synthetic construct
  misc_feature 1..20: note = chemically synthesized
  source 1..20: mol_type = other DNA
gcttgtttcccttaggttct

SEQ ID NO: 60610 - DNA, 20 bp, synthetic construct
  misc_feature 1..20: note = chemically synthesized
  source 1..20: mol_type = other DNA
agagaggctaatgtaattac

SEQ ID NO: 60611 - DNA, 20 bp, synthetic construct
  misc_feature 1..20: note = chemically synthesized
  source 1..20: mol_type = other DNA
agccccaggactaagaagat

SEQ ID NO: 60612 - DNA, 20 bp, synthetic construct
  misc_feature 1..20: note = chemically synthesized
  source 1..20: mol_type = other DNA
agaggccagtttcacttgtg

SEQ ID NO: 60613 - DNA, 20 bp, synthetic construct
  misc_feature 1..20: note = chemically synthesized
  source 1..20: mol_type = other DNA
gtctccacccaaatttcata

SEQ ID NO: 60614 - DNA, 20 bp, synthetic construct
  misc_feature 1..20: note = chemically synthesized
  source 1..20: mol_type = other DNA
agggaccaggtgggagatta

SEQ ID NO: 60615 - DNA, 20 bp, synthetic construct
  misc_feature 1..20: note = chemically synthesized
  source 1..20: mol_type = other DNA
cccatgcagttctcgtgata

SEQ ID NO: 60616 - DNA, 20 bp, synthetic construct
  misc_feature 1..20: note = chemically synthesized
  source 1..20: mol_type = other DNA
tgcagttctcgtgatactga

SEQ ID NO: 60617 - DNA, 20 bp, synthetic construct
  misc_feature 1..20: note = chemically synthesized
  source 1..20: mol_type = other DNA
ctccccagctatgtggaaat

SEQ ID NO: 60618 - DNA, 20 bp, synthetic construct
  misc_feature 1..20: note = chemically synthesized
  source 1..20: mol_type = other DNA
tagtatctttagagcagtgt

SEQ ID NO: 60619 - DNA, 20 bp, synthetic construct
  misc_feature 1..20: note = chemically synthesized
  source 1..20: mol_type = other DNA
aacctgtctggcagaaggag

SEQ ID NO: 60620 - DNA, 20 bp, synthetic construct
  misc_feature 1..20: note = chemically synthesized
  source 1..20: mol_type = other DNA
caaaaacaccagagcacatc

SEQ ID NO: 60621 - DNA, 20 bp, synthetic construct
  misc_feature 1..20: note = chemically synthesized
  source 1..20: mol_type = other DNA
agttttgccatcatattatc

SEQ ID NO: 60622 - DNA, 20 bp, synthetic construct
  misc_feature 1..20: note = chemically synthesized
  source 1..20: mol_type = other DNA
gtttacctcacagatgtggt

SEQ ID NO: 60623 - DNA, 20 bp, synthetic construct
  misc_feature 1..20: note = chemically synthesized
  source 1..20: mol_type = other DNA
gctgactgtgattgactcct

SEQ ID NO: 60624 - DNA, 20 bp, synthetic construct
  misc_feature 1..20: note = chemically synthesized
  source 1..20: mol_type = other DNA
gagaattcctgaaagagata

SEQ ID NO: 60625 - DNA, 20 bp, synthetic construct
  misc_feature 1..20: note = chemically synthesized
  source 1..20: mol_type = other DNA
tgaaagagatatagagtgga

SEQ ID NO: 60626 - DNA, 20 bp, synthetic construct
  misc_feature 1..20: note = chemically synthesized
  source 1..20: mol_type = other DNA
ctccaattctgtccagctcc

SEQ ID NO: 60627 - DNA, 20 bp, synthetic construct
  misc_feature 1..20: note = chemically synthesized
  source 1..20: mol_type = other DNA
caaacaaatcctaaactcag

SEQ ID NO: 60628 - DNA, 20 bp, synthetic construct
  misc_feature 1..20: note = chemically synthesized
  source 1..20: mol_type = other DNA
ctctggagatggaaactgag

SEQ ID NO: 60629 - DNA, 20 bp, synthetic construct
  misc_feature 1..20: note = chemically synthesized
  source 1..20: mol_type = other DNA
gaggtgtggcaggcaagata

SEQ ID NO: 60630 - DNA, 20 bp, synthetic construct
  misc_feature 1..20: note = chemically synthesized
  source 1..20: mol_type = other DNA
aggcaagatacagggtgcag

SEQ ID NO: 60631 - DNA, 20 bp, synthetic construct
  misc_feature 1..20: note = chemically synthesized
  source 1..20: mol_type = other DNA
atacagggtgcagtgggatc

SEQ ID NO: 60632 - DNA, 20 bp, synthetic construct
  misc_feature 1..20: note = chemically synthesized
  source 1..20: mol_type = other DNA
tcttcccgtgtgctgcctta

SEQ ID NO: 60633 - DNA, 20 bp, synthetic construct
  misc_feature 1..20: note = chemically synthesized
  source 1..20: mol_type = other DNA
gcctgccacacctcaaataa

SEQ ID NO: 60634 - DNA, 20 bp, synthetic construct
  misc_feature 1..20: note = chemically synthesized
  source 1..20: mol_type = other DNA
tcttgactgatacttgaaac

SEQ ID NO: 60635 - DNA, 20 bp, synthetic construct
  misc_feature 1..20: note = chemically synthesized
  source 1..20: mol_type = other DNA
tccttctcagtttccatctc

SEQ ID NO: 60636 - DNA, 20 bp, synthetic construct
  misc_feature 1..20: note = chemically synthesized
  source 1..20: mol_type = other DNA
cagagtctctaccgccagat

SEQ ID NO: 60637 - DNA, 20 bp, synthetic construct
  misc_feature 1..20: note = chemically synthesized
  source 1..20: mol_type = other DNA
cttaaaacacaatcattctc

SEQ ID NO: 60638 - DNA, 20 bp, synthetic construct
  misc_feature 1..20: note = chemically synthesized
  source 1..20: mol_type = other DNA
cacaatcattctcctgagtt

SEQ ID NO: 60639 - DNA, 20 bp, synthetic construct
  misc_feature 1..20: note = chemically synthesized
  source 1..20: mol_type = other DNA
ttagcttgaaaggttacaaa

SEQ ID NO: 60640 - DNA, 20 bp, synthetic construct
  misc_feature 1..20: note = chemically synthesized
  source 1..20: mol_type = other DNA
acaacaaatcagaaaaaaag

SEQ ID NO: 60641 - DNA, 20 bp, synthetic construct
  misc_feature 1..20: note = chemically synthesized
  source 1..20: mol_type = other DNA
actgtacccctggagctgga

SEQ ID NO: 60642 - DNA, 20 bp, synthetic construct
  misc_feature 1..20: note = chemically synthesized
  source 1..20: mol_type = other DNA
ggagctggacagaattggag

SEQ ID NO: 60643 - DNA, 20 bp, synthetic construct
  misc_feature 1..20: note = chemically synthesized
  source 1..20: mol_type = other DNA
atgtgagcctttagcaacca

SEQ ID NO: 60644 - DNA, 20 bp, synthetic construct
  misc_feature 1..20: note = chemically synthesized
  source 1..20: mol_type = other DNA
ctccactctatatctctttc

SEQ ID NO: 60645 - DNA, 20 bp, synthetic construct
  misc_feature 1..20: note = chemically synthesized
  source 1..20: mol_type = other DNA
tatctctttcaggaattctc

SEQ ID NO: 60646 - DNA, 20 bp, synthetic construct
  misc_feature 1..20: note = chemically synthesized
  source 1..20: mol_type = other DNA
tgtgaggtaaacaaggagac

SEQ ID NO: 60647 - DNA, 20 bp, synthetic construct
  misc_feature 1..20: note = chemically synthesized
  source 1..20: mol_type = other DNA
aaaccagacataagcatttt

SEQ ID NO: 60648 - DNA, 20 bp, synthetic construct
  misc_feature 1..20: note = chemically synthesized
  source 1..20: mol_type = other DNA
tatgatggcaaaactatttc

SEQ ID NO: 60649 - DNA, 20 bp, synthetic construct
  misc_feature 1..20: note = chemically synthesized
  source 1..20: mol_type = other DNA
ttttccatctgccaccaatt

SEQ ID NO: 60650 - DNA, 20 bp, synthetic construct
  misc_feature 1..20: note = chemically synthesized
  source 1..20: mol_type = other DNA
aagggcttcacactgtgaca

SEQ ID NO: 60651 - DNA, 20 bp, synthetic construct
  misc_feature 1..20: note = chemically synthesized
  source 1..20: mol_type = other DNA
tcacactgtgacatggggtt

SEQ ID NO: 60652 - DNA, 20 bp, synthetic construct
  misc_feature 1..20: note = chemically synthesized
  source 1..20: mol_type = other DNA
gtgacatggggttgggagtc

SEQ ID NO: 60653 - DNA, 20 bp, synthetic construct
  misc_feature 1..20: note = chemically synthesized
  source 1..20: mol_type = other DNA
tgcttcagaaggcagggctt

SEQ ID NO: 60654 - DNA, 20 bp, synthetic construct
  misc_feature 1..20: note = chemically synthesized
  source 1..20: mol_type = other DNA
tctaaagatactacctgaga

SEQ ID NO: 60655 - DNA, 20 bp, synthetic construct
  misc_feature 1..20: note = chemically synthesized
  source 1..20: mol_type = other DNA
ttacttggtggcaggcaaga

SEQ ID NO: 60656 - DNA, 20 bp, synthetic construct
  misc_feature 1..20: note = chemically synthesized
  source 1..20: mol_type = other DNA
tggtccctcccccgacatat

SEQ ID NO: 60657 - DNA, 20 bp, synthetic construct
  misc_feature 1..20: note = chemically synthesized
  source 1..20: mol_type = other DNA
ccccgacatatagggattat

SEQ ID NO: 60658 - DNA, 20 bp, synthetic construct
  misc_feature 1..20: note = chemically synthesized
  source 1..20: mol_type = other DNA
attacaattcaatatgaaat

SEQ ID NO: 60659 - DNA, 20 bp, synthetic construct
  misc_feature 1..20: note = chemically synthesized
  source 1..20: mol_type = other DNA
acacagagccaagccatatc

SEQ ID NO: 60660 - DNA, 20 bp, synthetic construct
  misc_feature 1..20: note = chemically synthesized
  source 1..20: mol_type = other DNA
actggcctctgagcctcagg

SEQ ID NO: 60661 - DNA, 20 bp, synthetic construct
  misc_feature 1..20: note = chemically synthesized
  source 1..20: mol_type = other DNA
tatcttcttagtcctggggc

SEQ ID NO: 60662 - DNA, 20 bp, synthetic construct
  misc_feature 1..20: note = chemically synthesized
  source 1..20: mol_type = other DNA
cattttttgaaaaagctgat

SEQ ID NO: 60663 - DNA, 20 bp, synthetic construct
  misc_feature 1..20: note = chemically synthesized
  source 1..20: mol_type = other DNA
aaaagctgatcagagtctct

SEQ ID NO: 60664 - DNA, 20 bp, synthetic construct
  misc_feature 1..20: note = chemically synthesized
  source 1..20: mol_type = other DNA
ctgatcagagtctctaggag

SEQ ID NO: 60665 - DNA, 20 bp, synthetic construct
  misc_feature 1..20: note = chemically synthesized
  source 1..20: mol_type = other DNA
aagggaaacaagcaaagata

SEQ ID NO: 60666 - DNA, 20 bp, synthetic construct
  misc_feature 1..20: note = chemically synthesized
  source 1..20: mol_type = other DNA
agagtcagtatctttgtgaa

SEQ ID NO: 60667 - DNA, 20 bp, synthetic construct
  misc_feature 1..20: note = chemically synthesized
  source 1..20: mol_type = other DNA
tttgttatacttttaagttt

SEQ ID NO: 60668 - DNA, 20 bp, synthetic construct
  misc_feature 1..20: note = chemically synthesized
  source 1..20: mol_type = other DNA
tcattgttcagttcccacct

SEQ ID NO: 60669 - DNA, 20 bp, synthetic construct
  misc_feature 1..20: note = chemically synthesized
  source 1..20: mol_type = other DNA
tgtccttgtgatagtttgct

SEQ ID NO: 60670 - DNA, 20 bp, synthetic construct
  misc_feature 1..20: note = chemically synthesized
  source 1..20: mol_type = other DNA
agtctatcattgttggacat

SEQ ID NO: 60671 - DNA, 20 bp, synthetic construct
  misc_feature 1..20: note = chemically synthesized
  source 1..20: mol_type = other DNA
ggttccaagtctttgctatt

SEQ ID NO: 60672 - DNA, 20 bp, synthetic construct
  misc_feature 1..20: note = chemically synthesized
  source 1..20: mol_type = other DNA
gcagcatgatttataatcct

SEQ ID NO: 60673 - DNA, 20 bp, synthetic construct
  misc_feature 1..20: note = chemically synthesized
  source 1..20: mol_type = other DNA
tttgggtgtatacccagtaa

SEQ ID NO: 60674 - DNA, 20 bp, synthetic construct
  misc_feature 1..20: note = chemically synthesized
  source 1..20: mol_type = other DNA
tatacccagtaatgggatgg

SEQ ID NO: 60675 - DNA, 20 bp, synthetic construct
  misc_feature 1..20: note = chemically synthesized
  source 1..20: mol_type = other DNA
tttctagttctagatccctg

SEQ ID NO: 60676 - DNA, 20 bp, synthetic construct
  misc_feature 1..20: note = chemically synthesized
  source 1..20: mol_type = other DNA
atcctttgcccactttttga

SEQ ID NO: 60677 - DNA, 20 bp, synthetic construct
  misc_feature 1..20: note = chemically synthesized
  source 1..20: mol_type = other DNA
tttttctcttgtaaatttgt

SEQ ID NO: 60678 - DNA, 20 bp, synthetic construct
  misc_feature 1..20: note = chemically synthesized
  source 1..20: mol_type = other DNA
gtttgagttcattgtagatt

SEQ ID NO: 60679 - DNA, 20 bp, synthetic construct
  misc_feature 1..20: note = chemically synthesized
  source 1..20: mol_type = other DNA
ggatattagccctttgtcag

SEQ ID NO: 60680 - DNA, 20 bp, synthetic construct
  misc_feature 1..20: note = chemically synthesized
  source 1..20: mol_type = other DNA
agtttaattagatcccatta

SEQ ID NO: 60681 - DNA, 20 bp, synthetic construct
  misc_feature 1..20: note = chemically synthesized
  source 1..20: mol_type = other DNA
tccatgcccatgcctatgtc

SEQ ID NO: 60682 - DNA, 20 bp, synthetic construct
  misc_feature 1..20: note = chemically synthesized
  source 1..20: mol_type = other DNA
gtattgcttaggttttcttc

SEQ ID NO: 60683 - DNA, 20 bp, synthetic construct
  misc_feature 1..20: note = chemically synthesized
  source 1..20: mol_type = other DNA
atttaagtctttaatccatc

SEQ ID NO: 60684 - DNA, 20 bp, synthetic construct
  misc_feature 1..20: note = chemically synthesized
  source 1..20: mol_type = other DNA
ttttgtataaggtgtaagga

SEQ ID NO: 60685 - DNA, 20 bp, synthetic construct
  misc_feature 1..20: note = chemically synthesized
  source 1..20: mol_type = other DNA
ccagcaccatttattaaaca

SEQ ID NO: 60686 - DNA, 20 bp, synthetic construct
  misc_feature 1..20: note = chemically synthesized
  source 1..20: mol_type = other DNA
ccagctttgttcttttggct

SEQ ID NO: 60687 - DNA, 20 bp, synthetic construct
  misc_feature 1..20: note = chemically synthesized
  source 1..20: mol_type = other DNA
aaagtcattggtagcttgat

SEQ ID NO: 60688 - DNA, 20 bp, synthetic construct
  misc_feature 1..20: note = chemically synthesized
  source 1..20: mol_type = other DNA
gtagcttgatggggatggca

SEQ ID NO: 60689 - DNA, 20 bp, synthetic construct
  misc_feature 1..20: note = chemically synthesized
  source 1..20: mol_type = other DNA
tttcttcctatccatgagca

SEQ ID NO: 60690 - DNA, 20 bp, synthetic construct
  misc_feature 1..20: note = chemically synthesized
  source 1..20: mol_type = other DNA
tccttcacatcccttgtaag

SEQ ID NO: 60691 - DNA, 20 bp, synthetic construct
  misc_feature 1..20: note = chemically synthesized
  source 1..20: mol_type = other DNA
atattctctctgaagcaatt

SEQ ID NO: 60692 - DNA, 20 bp, synthetic construct
  misc_feature 1..20: note = chemically synthesized
  source 1..20: mol_type = other DNA
tctctgaagcaattgtgaat

SEQ ID NO: 60693 - DNA, 20 bp, synthetic construct
  misc_feature 1..20: note = chemically synthesized
  source 1..20: mol_type = other DNA
tttgtctgttattggtgtat

SEQ ID NO: 60694 - DNA, 20 bp, synthetic construct
  misc_feature 1..20: note = chemically synthesized
  source 1..20: mol_type = other DNA
gaagttgcttatcagcttaa

SEQ ID NO: 60695 - DNA, 20 bp, synthetic construct
  misc_feature 1..20: note = chemically synthesized
  source 1..20: mol_type = other DNA
gggattttgggctgagacaa

SEQ ID NO: 60696 - DNA, 20 bp, synthetic construct
  misc_feature 1..20: note = chemically synthesized
  source 1..20: mol_type = other DNA
ttgactttctctttacataa

SEQ ID NO: 60697 - DNA, 20 bp, synthetic construct
  misc_feature 1..20: note = chemically synthesized
  source 1..20: mol_type = other DNA
ccagaacttccaacactatg

SEQ ID NO: 60698 - DNA, 20 bp, synthetic construct
  misc_feature 1..20: note = chemically synthesized
  source 1..20: mol_type = other DNA
cttccaacactatgttgaat

SEQ ID NO: 60699 - DNA, 20 bp, synthetic construct
  misc_feature 1..20: note = chemically synthesized
  source 1..20: mol_type = other DNA
cattcatatgcaattttaaa

SEQ ID NO: 60700 - DNA, 20 bp, synthetic construct
  misc_feature 1..20: note = chemically synthesized
  source 1..20: mol_type = other DNA
acaatgaagcgtaaggtatt

SEQ ID NO: 60701 - DNA, 20 bp, synthetic construct
  misc_feature 1..20: note = chemically synthesized
  source 1..20: mol_type = other DNA
atatggctttggcaaagtta

SEQ ID NO: 60702 - DNA, 20 bp, synthetic construct
  misc_feature 1..20: note = chemically synthesized
  source 1..20: mol_type = other DNA
gcatatagtcatgctagata

SEQ ID NO: 60703 - DNA, 20 bp, synthetic construct
  misc_feature 1..20: note = chemically synthesized
  source 1..20: mol_type = other DNA
ccagcatcttccatttgact

SEQ ID NO: 60704 - DNA, 20 bp, synthetic construct
  misc_feature 1..20: note = chemically synthesized
  source 1..20: mol_type = other DNA
tataaagctgtctctcttcc

SEQ ID NO: 60705 - DNA, 20 bp, synthetic construct
  misc_feature 1..20: note = chemically synthesized
  source 1..20: mol_type = other DNA
cttgggtctttggccctcaa

SEQ ID NO: 60706 - DNA, 20 bp, synthetic construct
  misc_feature 1..20: note = chemically synthesized
  source 1..20: mol_type = other DNA
cctagatggacgcagacttg

SEQ ID NO: 60707 - DNA, 20 bp, synthetic construct
  misc_feature 1..20: note = chemically synthesized
  source 1..20: mol_type = other DNA
agacttgatgaatgtcaaag

SEQ ID NO: 60708 - DNA, 20 bp, synthetic construct
  misc_feature 1..20: note = chemically synthesized
  source 1..20: mol_type = other DNA
aaatggaaatttagtgaacc

SEQ ID NO: 60709 - DNA, 20 bp, synthetic construct
  misc_feature 1..20: note = chemically synthesized
  source 1..20: mol_type = other DNA
ggaggtatttcagtgagcca

SEQ ID NO: 60710 - DNA, 20 bp, synthetic construct
  misc_feature 1..20: note = chemically synthesized
  source 1..20: mol_type = other DNA
caacttcataagaaaattta

SEQ ID NO: 60711 - DNA, 20 bp, synthetic construct
  misc_feature 1..20: note = chemically synthesized
  source 1..20: mol_type = other DNA
gtatgtaaagatcacaagct

SEQ ID NO: 60712 - DNA, 20 bp, synthetic construct
  misc_feature 1..20: note = chemically synthesized
  source 1..20: mol_type = other DNA
acaagctttgggtcagatat

SEQ ID NO: 60713 - DNA, 20 bp, synthetic construct
  misc_feature 1..20: note = chemically synthesized
  source 1..20: mol_type = other DNA
ggaaaacatgtacaaaggct

SEQ ID NO: 60714 - DNA, 20 bp, synthetic construct
  misc_feature 1..20: note = chemically synthesized
  source 1..20: mol_type = other DNA
tcaaaggcttagagaggctt

SEQ ID NO: 60715 - DNA, 20 bp, synthetic construct
  misc_feature 1..20: note = chemically synthesized
  source 1..20: mol_type = other DNA
ggcttgtggatattaaataa

SEQ ID NO: 60716 - DNA, 20 bp, synthetic construct
  misc_feature 1..20: note = chemically synthesized
  source 1..20: mol_type = other DNA
ttgtaaagatttttgcctgc

SEQ ID NO: 60717 - DNA, 20 bp, synthetic construct
  misc_feature 1..20: note = chemically synthesized
  source 1..20: mol_type = other DNA
aggaatataggcttgtgctg

SEQ ID NO: 60718 - DNA, 20 bp, synthetic construct
  misc_feature 1..20: note = chemically synthesized
  source 1..20: mol_type = other DNA
aagcagatactgtcattagc

SEQ ID NO: 60719 - DNA, 20 bp, synthetic construct
  misc_feature 1..20: note = chemically synthesized
  source 1..20: mol_type = other DNA
tttttggtttgttgttgttg

SEQ ID NO: 60720 - DNA, 20 bp, synthetic construct
  misc_feature 1..20: note = chemically synthesized
  source 1..20: mol_type = other DNA
tcagtgtacttatctgtaaa

SEQ ID NO: 60721 - DNA, 20 bp, synthetic construct
  misc_feature 1..20: note = chemically synthesized
  source 1..20: mol_type = other DNA
cttatagtgtattatgccct

SEQ ID NO: 60722 - DNA, 20 bp, synthetic construct
  misc_feature 1..20: note = chemically synthesized
  source 1..20: mol_type = other DNA
aaggtactcagtaccttcta

SEQ ID NO: 60723 - DNA, 20 bp, synthetic construct
  misc_feature 1..20: note = chemically synthesized
  source 1..20: mol_type = other DNA
accttctactgagtttttct

SEQ ID NO: 60724 - DNA, 20 bp, synthetic construct
  misc_feature 1..20: note = chemically synthesized
  source 1..20: mol_type = other DNA
atggaaaacatggccctgaa

SEQ ID NO: 60725 - DNA, 20 bp, synthetic construct
  misc_feature 1..20: note = chemically synthesized
  source 1..20: mol_type = other DNA
acgagtggtcctgtttggag

SEQ ID NO: 60726 - DNA, 20 bp, synthetic construct
  misc_feature 1..20: note = chemically synthesized
  source 1..20: mol_type = other DNA
aaaatcagatgcgcttgata

SEQ ID NO: 60727 - DNA, 20 bp, synthetic construct
  misc_feature 1..20: note = chemically synthesized
  source 1..20: mol_type = other DNA
agtactcagccctctctacc

SEQ ID NO: 60728 - DNA, 20 bp, synthetic construct
  misc_feature 1..20: note = chemically synthesized
  source 1..20: mol_type = other DNA
ttttaataatagtgtatcaa

SEQ ID NO: 60729 - DNA, 20 bp, synthetic construct
  misc_feature 1..20: note = chemically synthesized
  source 1..20: mol_type = other DNA
attgatcactgacctaggag

SEQ ID NO: 60730 - DNA, 20 bp, synthetic construct
  misc_feature 1..20: note = chemically synthesized
  source 1..20: mol_type = other DNA
gcatttctgagacacagagc

SEQ ID NO: 60731 - DNA, 20 bp, synthetic construct
  misc_feature 1..20: note = chemically synthesized
  source 1..20: mol_type = other DNA
ctttttttttgtttttgaga

SEQ ID NO: 60732 - DNA, 20 bp, synthetic construct
  misc_feature 1..20: note = chemically synthesized
  source 1..20: mol_type = other DNA
tcttgctctgttgcccaggc

SEQ ID NO: 60733 - DNA, 20 bp, synthetic construct
  misc_feature 1..20: note = chemically synthesized
  source 1..20: mol_type = other DNA
ctcactgcaagctccacctc

SEQ ID NO: 60734 - DNA, 20 bp, synthetic construct
  misc_feature 1..20: note = chemically synthesized
  source 1..20: mol_type = other DNA
cattctgctgccccagcctc

SEQ ID NO: 60735 - DNA, 20 bp, synthetic construct
  misc_feature 1..20: note = chemically synthesized
  source 1..20: mol_type = other DNA
ttttgtatttttagtagaga

SEQ ID NO: 60736 - DNA, 20 bp, synthetic construct
  misc_feature 1..20: note = chemically synthesized
  source 1..20: mol_type = other DNA
ctgggttccaccgtgttagc

SEQ ID NO: 60737 - DNA, 20 bp, synthetic construct
  misc_feature 1..20: note = chemically synthesized
  source 1..20: mol_type = other DNA
atccacccgcctcggcctcc

SEQ ID NO: 60738 - DNA, 20 bp, synthetic construct
  misc_feature 1..20: note = chemically synthesized
  source 1..20: mol_type = other DNA
gcctcggcctcccagagtgc

SEQ ID NO: 60739 - DNA, 20 bp, synthetic construct
  misc_feature 1..20: note = chemically synthesized
  source 1..20: mol_type = other DNA
tgttaatttgcattttaaat

SEQ ID NO: 60740 - DNA, 20 bp, synthetic construct
  misc_feature 1..20: note = chemically synthesized
  source 1..20: mol_type = other DNA
attctaccaaatgagatcta

SEQ ID NO: 60741 - DNA, 20 bp, synthetic construct
  misc_feature 1..20: note = chemically synthesized
  source 1..20: mol_type = other DNA
ccaaatgagatctatagaat

SEQ ID NO: 60742 - DNA, 20 bp, synthetic construct
  misc_feature 1..20: note = chemically synthesized
  source 1..20: mol_type = other DNA
aatttcctctcaacatggag

SEQ ID NO: 60743 - DNA, 20 bp, synthetic construct
  misc_feature 1..20: note = chemically synthesized
  source 1..20: mol_type = other DNA
tctaagtctcggaactgcta

SEQ ID NO: 60744 - DNA, 20 bp, synthetic construct
  misc_feature 1..20: note = chemically synthesized
  source 1..20: mol_type = other DNA
tgagtaatgtggcctactat

SEQ ID NO: 60745 - DNA, 20 bp, synthetic construct
  misc_feature 1..20: note = chemically synthesized
  source 1..20: mol_type = other DNA
tgtggatgtaaattaaagtt

SEQ ID NO: 60746 - DNA, 20 bp, synthetic construct
  misc_feature 1..20: note = chemically synthesized
  source 1..20: mol_type = other DNA
tagaatggaacctatgttta

SEQ ID NO: 60747 - DNA, 20 bp, synthetic construct
  misc_feature 1..20: note = chemically synthesized
  source 1..20: mol_type = other DNA
ctgtaaggctgcagaaactg

SEQ ID NO: 60748 - DNA, 20 bp, synthetic construct
  misc_feature 1..20: note = chemically synthesized
  source 1..20: mol_type = other DNA
ccagaggggctcccaagcct

SEQ ID NO: 60749 - DNA, 20 bp, synthetic construct
  misc_feature 1..20: note = chemically synthesized
  source 1..20: mol_type = other DNA
caaacatacatacatatttt

SEQ ID NO: 60750 - DNA, 20 bp, synthetic construct
  misc_feature 1..20: note = chemically synthesized
  source 1..20: mol_type = other DNA
gtttgttttcctttttattt

SEQ ID NO: 60751 - DNA, 20 bp, synthetic construct
  misc_feature 1..20: note = chemically synthesized
  source 1..20: mol_type = other DNA
tttcctttttatttttgaat

SEQ ID NO: 60752 - DNA, 20 bp, synthetic construct
  misc_feature 1..20: note = chemically synthesized
  source 1..20: mol_type = other DNA
tttaattttttttgtagaga

SEQ ID NO: 60753 - DNA, 20 bp, synthetic construct
  misc_feature 1..20: note = chemically synthesized
  source 1..20: mol_type = other DNA
accttggtctcccaaagtgc

SEQ ID NO: 60754 - DNA, 20 bp, synthetic construct
  misc_feature 1..20: note = chemically synthesized
  source 1..20: mol_type = other DNA
atggtaattttaacctgtag

SEQ ID NO: 60755 - DNA, 20 bp, synthetic construct
  misc_feature 1..20: note = chemically synthesized
  source 1..20: mol_type = other DNA
taattttaacctgtaggaga

SEQ ID NO: 60756 - DNA, 20 bp, synthetic construct
  misc_feature 1..20: note = chemically synthesized
  source 1..20: mol_type = other DNA
acctgtaggagaatgggtgg

SEQ ID NO: 60757 - DNA, 20 bp, synthetic construct
  misc_feature 1..20: note = chemically synthesized
  source 1..20: mol_type = other DNA
ggtgggaggatccagagggc

SEQ ID NO: 60758 - DNA, 20 bp, synthetic construct
  misc_feature 1..20: note = chemically synthesized
  source 1..20: mol_type = other DNA
aatgaagatataccaccttg

SEQ ID NO: 60759 - DNA, 20 bp, synthetic construct
  misc_feature 1..20: note = chemically synthesized
  source 1..20: mol_type = other DNA
aaaggtgtcttcttgggctt

SEQ ID NO: 60760 - DNA, 20 bp, synthetic construct
  misc_feature 1..20: note = chemically synthesized
  source 1..20: mol_type = other DNA
ggcttctgaatgtgaagagg

SEQ ID NO: 60761 - DNA, 20 bp, synthetic construct
  misc_feature 1..20: note = chemically synthesized
  source 1..20: mol_type = other DNA
gaagagaacttctgttagct

SEQ ID NO: 60762 - DNA, 20 bp, synthetic construct
  misc_feature 1..20: note = chemically synthesized
  source 1..20: mol_type = other DNA
acgcatacatttaatattta

SEQ ID NO: 60763 - DNA, 20 bp, synthetic construct
  misc_feature 1..20: note = chemically synthesized
  source 1..20: mol_type = other DNA
aagacatgcctaattcctcc

SEQ ID NO: 60764 - DNA, 20 bp, synthetic construct
  misc_feature 1..20: note = chemically synthesized
  source 1..20: mol_type = other DNA
ttcaaagctgagacccctgc

SEQ ID NO: 60765 - DNA, 20 bp, synthetic construct
  misc_feature 1..20: note = chemically synthesized
  source 1..20: mol_type = other DNA
gtttatttcctcctgagcaa

SEQ ID NO: 60766 - DNA, 20 bp, synthetic construct
  misc_feature 1..20: note = chemically synthesized
  source 1..20: mol_type = other DNA
tgtgacttcaatatgtttgt

SEQ ID NO: 60767 - DNA, 20 bp, synthetic construct
  misc_feature 1..20: note = chemically synthesized
  source 1..20: mol_type = other DNA
aaggtaaaatcagagatgag

SEQ ID NO: 60768 - DNA, 20 bp, synthetic construct
  misc_feature 1..20: note = chemically synthesized
  source 1..20: mol_type = other DNA
aatcagagatgagaggagtc

SEQ ID NO: 60769 - DNA, 20 bp, synthetic construct
  misc_feature 1..20: note = chemically synthesized
  source 1..20: mol_type = other DNA
gagatgagaggagtcaagga

SEQ ID NO: 60770 - DNA, 20 bp, synthetic construct
  misc_feature 1..20: note = chemically synthesized
  source 1..20: mol_type = other DNA
atcaaagtctcttcttctag

SEQ ID NO: 60771 - DNA, 20 bp, synthetic construct
  misc_feature 1..20: note = chemically synthesized
  source 1..20: mol_type = other DNA
gcacaaccttagaaatttgg

SEQ ID NO: 60772 - DNA, 20 bp, synthetic construct
  misc_feature 1..20: note = chemically synthesized
  source 1..20: mol_type = other DNA
gcttgaaacaggtgttgagg

SEQ ID NO: 60773 - DNA, 20 bp, synthetic construct
  misc_feature 1..20: note = chemically synthesized
  source 1..20: mol_type = other DNA
caggtgttgaggaagaatgc

SEQ ID NO: 60774 - DNA, 20 bp, synthetic construct
  misc_feature 1..20: note = chemically synthesized
  source 1..20: mol_type = other DNA
tgaggtttctgatgtgactt

SEQ ID NO: 60775 - DNA, 20 bp, synthetic construct
  misc_feature 1..20: note = chemically synthesized
  source 1..20: mol_type = other DNA
gtctgaaagttactgctgac

SEQ ID NO: 60776 - DNA, 20 bp, synthetic construct
  misc_feature 1..20: note = chemically synthesized
  source 1..20: mol_type = other DNA
aaggaggtgtatttccggag

SEQ ID NO: 60777 - DNA, 20 bp, synthetic construct
  misc_feature 1..20: note = chemically synthesized
  source 1..20: mol_type = other DNA
ggtctctgccaggctctcct

SEQ ID NO: 60778 - DNA, 20 bp, synthetic construct
  misc_feature 1..20: note = chemically synthesized
  source 1..20: mol_type = other DNA
accttcaataaagttgcctt

SEQ ID NO: 60779 - DNA, 20 bp, synthetic construct
  misc_feature 1..20: note = chemically synthesized
  source 1..20: mol_type = other DNA
ccttcttataggcctctagg

SEQ ID NO: 60780 - DNA, 20 bp, synthetic construct
  misc_feature 1..20: note = chemically synthesized
  source 1..20: mol_type = other DNA
aggaacttgataatggcacg

SEQ ID NO: 60781 - DNA, 20 bp, synthetic construct
  misc_feature 1..20: note = chemically synthesized
  source 1..20: mol_type = other DNA
ggtcttaatgctgtatatga

SEQ ID NO: 60782 - DNA, 20 bp, synthetic construct
  misc_feature 1..20: note = chemically synthesized
  source 1..20: mol_type = other DNA
tagacattggccataagaag

SEQ ID NO: 60783 - DNA, 20 bp, synthetic construct
  misc_feature 1..20: note = chemically synthesized
  source 1..20: mol_type = other DNA
acagccccatcatgggcaca

SEQ ID NO: 60784 - DNA, 20 bp, synthetic construct
  misc_feature 1..20: note = chemically synthesized
  source 1..20: mol_type = other DNA
gccaggcctgctactgtgtg

SEQ ID NO: 60785 - DNA, 20 bp, synthetic construct
  misc_feature 1..20: note = chemically synthesized
  source 1..20: mol_type = other DNA
ggcctgctactgtgtgcagg

SEQ ID NO: 60786 - DNA, 20 bp, synthetic construct
  misc_feature 1..20: note = chemically synthesized
  source 1..20: mol_type = other DNA
cacttcctggtgcaggcaaa

SEQ ID NO: 60787 - DNA, 20 bp, synthetic construct
  misc_feature 1..20: note = chemically synthesized
  source 1..20: mol_type = other DNA
gccttcaggaggaggacaat

SEQ ID NO: 60788 - DNA, 20 bp, synthetic construct
  misc_feature 1..20: note = chemically synthesized
  source 1..20: mol_type = other DNA
ttgctggccagtgataatga

SEQ ID NO: 60789 - DNA, 20 bp, synthetic construct
  misc_feature 1..20: note = chemically synthesized
  source 1..20: mol_type = other DNA
gataatgaccgaatacctca

SEQ ID NO: 60790 - DNA, 20 bp, synthetic construct
  misc_feature 1..20: note = chemically synthesized
  source 1..20: mol_type = other DNA
tgaggactccatgaaggaaa

SEQ ID NO: 60791 - DNA, 20 bp, synthetic construct
  misc_feature 1..20: note = chemically synthesized
  source 1..20: mol_type = other DNA
gactccatgaaggaaaaaga

SEQ ID NO: 60792 - DNA, 20 bp, synthetic construct
  misc_feature 1..20: note = chemically synthesized
  source 1..20: mol_type = other DNA
aaagagtggatgcagaacat

SEQ ID NO: 60793 - DNA, 20 bp, synthetic construct
  misc_feature 1..20: note = chemically synthesized
  source 1..20: mol_type = other DNA
cgctccaaagtagatactat

SEQ ID NO: 60794 - DNA, 20 bp, synthetic construct
  misc_feature 1..20: note = chemically synthesized
  source 1..20: mol_type = other DNA
ccaggtcagtgagggccagc

SEQ ID NO: 60795 - DNA, 20 bp, synthetic construct
  misc_feature 1..20: note = chemically synthesized
  source 1..20: mol_type = other DNA
gcaaggatagtagatagtac

SEQ ID NO: 60796 - DNA, 20 bp, synthetic construct
  misc_feature 1..20: note = chemically synthesized
  source 1..20: mol_type = other DNA
gtacatgggtgtgtgcagac

SEQ ID NO: 60797 - DNA, 20 bp, synthetic construct
  misc_feature 1..20: note = chemically synthesized
  source 1..20: mol_type = other DNA
gggttggtcttaataatgat

SEQ ID NO: 60798 - DNA, 20 bp, synthetic construct
  misc_feature 1..20: note = chemically synthesized
  source 1..20: mol_type = other DNA
accatgtacataaagaaaaa

SEQ ID NO: 60799 - DNA, 20 bp, synthetic construct
  misc_feature 1..20: note = chemically synthesized
  source 1..20: mol_type = other DNA
atccaggaaagctggtgaga

SEQ ID NO: 60800 - DNA, 20 bp, synthetic construct
  misc_feature 1..20: note = chemically synthesized
  source 1..20: mol_type = other DNA
agatagaatatggggctaaa

SEQ ID NO: 60801 - DNA, 20 bp, synthetic construct
  misc_feature 1..20: note = chemically synthesized
  source 1..20: mol_type = other DNA
tggggctaaactgagtaatg

SEQ ID NO: 60802 - DNA, 20 bp, synthetic construct
  misc_feature 1..20: note = chemically synthesized
  source 1..20: mol_type = other DNA
gagtaatgttggatagcagc

SEQ ID NO: 60803 - DNA, 20 bp, synthetic construct
  misc_feature 1..20: note = chemically synthesized
  source 1..20: mol_type = other DNA
cagcatgaattgaggactga

SEQ ID NO: 60804 - DNA, 20 bp, synthetic construct
  misc_feature 1..20: note = chemically synthesized
  source 1..20: mol_type = other DNA
atattggactgacattcctc

SEQ ID NO: 60805 - DNA, 20 bp, synthetic construct
  misc_feature 1..20: note = chemically synthesized
  source 1..20: mol_type = other DNA
ggggattgagctgaaaataa

SEQ ID NO: 60806 - DNA, 20 bp, synthetic construct
  misc_feature 1..20: note = chemically synthesized
  source 1..20: mol_type = other DNA
gtattatctactccaccctt

SEQ ID NO: 60807 - DNA, 20 bp, synthetic construct
  misc_feature 1..20: note = chemically synthesized
  source 1..20: mol_type = other DNA
atcaaccaatcaccaagtcc

SEQ ID NO: 60808 - DNA, 20 bp, synthetic construct
  misc_feature 1..20: note = chemically synthesized
  source 1..20: mol_type = other DNA
agtcctagggtttctgttta

SEQ ID NO: 60809 - DNA, 20 bp, synthetic construct
  misc_feature 1..20: note = chemically synthesized
  source 1..20: mol_type = other DNA
atttgtattttcattcttcc

SEQ ID NO: 60810 - DNA, 20 bp, synthetic construct
  misc_feature 1..20: note = chemically synthesized
  source 1..20: mol_type = other DNA
ttaaattccccaagtttagt

SEQ ID NO: 60811 - DNA, 20 bp, synthetic construct
  misc_feature 1..20: note = chemically synthesized
  source 1..20: mol_type = other DNA
ttctgtattgcttctataat

SEQ ID NO: 60812 - DNA, 20 bp, synthetic construct
  misc_feature 1..20: note = chemically synthesized
  source 1..20: mol_type = other DNA
ttaattttaatattagctct

SEQ ID NO: 60813 - DNA, 20 bp, synthetic construct
  misc_feature 1..20: note = chemically synthesized
  source 1..20: mol_type = other DNA
ttttttagccaccatatcat

SEQ ID NO: 60814 - DNA, 20 bp, synthetic construct
  misc_feature 1..20: note = chemically synthesized
  source 1..20: mol_type = other DNA
tggaatcctttaaatattat

SEQ ID NO: 60815 - DNA, 20 bp, synthetic construct
  misc_feature 1..20: note = chemically synthesized
  source 1..20: mol_type = other DNA
agggagcaaaggaggaaggt

SEQ ID NO: 60816 - DNA, 20 bp, synthetic construct
  misc_feature 1..20: note = chemically synthesized
  source 1..20: mol_type = other DNA
taagagtgatgcattttata

SEQ ID NO: 60817 - DNA, 20 bp, synthetic construct
  misc_feature 1..20: note = chemically synthesized
  source 1..20: mol_type = other DNA
ggtagtcagagaagacctct

SEQ ID NO: 60818 - DNA, 20 bp, synthetic construct
  misc_feature 1..20: note = chemically synthesized
  source 1..20: mol_type = other DNA
tcaatggaggaagcaaggtg

SEQ ID NO: 60819 - DNA, 20 bp, synthetic construct
  misc_feature 1..20: note = chemically synthesized
  source 1..20: mol_type = other DNA
tgcaggtcacgcaagctact

SEQ ID NO: 60820 - DNA, 20 bp, synthetic construct
  misc_feature 1..20: note = chemically synthesized
  source 1..20: mol_type = other DNA
ttttattatacttgtgagct

SEQ ID NO: 60821 - DNA, 20 bp, synthetic construct
  misc_feature 1..20: note = chemically synthesized
  source 1..20: mol_type = other DNA
gttgagagcagaggtgctgc

SEQ ID NO: 60822 - DNA, 20 bp, synthetic construct
  misc_feature 1..20: note = chemically synthesized
  source 1..20: mol_type = other DNA
aggcttacatcactttggca

SEQ ID NO: 60823 - DNA, 20 bp, synthetic construct
  misc_feature 1..20: note = chemically synthesized
  source 1..20: mol_type = other DNA
tctaggggccaaatgcaatg

SEQ ID NO: 60824 - DNA, 20 bp, synthetic construct
  misc_feature 1..20: note = chemically synthesized
  source 1..20: mol_type = other DNA
aactccgttacatatcaggc

SEQ ID NO: 60825 - DNA, 20 bp, synthetic construct
  misc_feature 1..20: note = chemically synthesized
  source 1..20: mol_type = other DNA
ttctcactaggtgtttccaa

SEQ ID NO: 60826 - DNA, 20 bp, synthetic construct
  misc_feature 1..20: note = chemically synthesized
  source 1..20: mol_type = other DNA
atgcagaaagtactaactct

SEQ ID NO: 60827 - DNA, 20 bp, synthetic construct
  misc_feature 1..20: note = chemically synthesized
  source 1..20: mol_type = other DNA
acttcagtagctcctatcat

SEQ ID NO: 60828 - DNA, 20 bp, synthetic construct
  misc_feature 1..20: note = chemically synthesized
  source 1..20: mol_type = other DNA
gtgaaaagcttgacataatc

SEQ ID NO: 60829 - DNA, 20 bp, synthetic construct
  misc_feature 1..20: note = chemically synthesized
  source 1..20: mol_type = other DNA
gcctggtagtgagcgaaaat

SEQ ID NO: 60830 - DNA, 20 bp, synthetic construct
  misc_feature 1..20: note = chemically synthesized
  source 1..20: mol_type = other DNA
tttccaaccagtaaacactt

SEQ ID NO: 60831 - DNA, 20 bp, synthetic construct
  misc_feature 1..20: note = chemically synthesized
  source 1..20: mol_type = other DNA
atttactcataaatacttta

SEQ ID NO: 60832 - DNA, 20 bp, synthetic construct
  misc_feature 1..20: note = chemically synthesized
  source 1..20: mol_type = other DNA
agattttttatatataagta

SEQ ID NO: 60833 - DNA, 20 bp, synthetic construct
  misc_feature 1..20: note = chemically synthesized
  source 1..20: mol_type = other DNA
attttttaagttgattagac

SEQ ID NO: 60834 - DNA, 20 bp, synthetic construct
  misc_feature 1..20: note = chemically synthesized
  source 1..20: mol_type = other DNA
ttttttgcatgaaaaactaa

SEQ ID NO: 60835 - DNA, 20 bp, synthetic construct
  misc_feature 1..20: note = chemically synthesized
  source 1..20: mol_type = other DNA
ttgcatgaaaaactaaatgg

SEQ ID NO: 60836 - DNA, 20 bp, synthetic construct
  misc_feature 1..20: note = chemically synthesized
  source 1..20: mol_type = other DNA
ttatcctgattctttgtgcc

SEQ ID NO: 60837 - DNA, 20 bp, synthetic construct
  misc_feature 1..20: note = chemically synthesized
  source 1..20: mol_type = other DNA
agctctgtgttcaccaactt

SEQ ID NO: 60838 - DNA, 20 bp, synthetic construct
  misc_feature 1..20: note = chemically synthesized
  source 1..20: mol_type = other DNA
gtgatgagatggacagggag

SEQ ID NO: 60839 - DNA, 20 bp, synthetic construct
  misc_feature 1..20: note = chemically synthesized
  source 1..20: mol_type = other DNA
tacagagacaatgacagggc

SEQ ID NO: 60840 - DNA, 20 bp, synthetic construct
  misc_feature 1..20: note = chemically synthesized
  source 1..20: mol_type = other DNA
ctcttgggaagaaagcttta

SEQ ID NO: 60841 - DNA, 20 bp, synthetic construct
  misc_feature 1..20: note = chemically synthesized
  source 1..20: mol_type = other DNA
tcatgtctactaagcaatgg

SEQ ID NO: 60842 - DNA, 20 bp, synthetic construct
  misc_feature 1..20: note = chemically synthesized
  source 1..20: mol_type = other DNA
cataattaaaatattcaagg

SEQ ID NO: 60843 - DNA, 20 bp, synthetic construct
  misc_feature 1..20: note = chemically synthesized
  source 1..20: mol_type = other DNA
aaagagattttcagtataca

SEQ ID NO: 60844 - DNA, 20 bp, synthetic construct
  misc_feature 1..20: note = chemically synthesized
  source 1..20: mol_type = other DNA
gtgtctaaatattcttttgt

SEQ ID NO: 60845 - DNA, 20 bp, synthetic construct
  misc_feature 1..20: note = chemically synthesized
  source 1..20: mol_type = other DNA
tttaatgaactacattggtg

SEQ ID NO: 60846 - DNA, 20 bp, synthetic construct
  misc_feature 1..20: note = chemically synthesized
  source 1..20: mol_type = other DNA
atactgtttcttgtaaatag

SEQ ID NO: 60847 - DNA, 20 bp, synthetic construct
  misc_feature 1..20: note = chemically synthesized
  source 1..20: mol_type = other DNA
gtaaacatgcctgtttttag

SEQ ID NO: 60848 - DNA, 20 bp, synthetic construct
  misc_feature 1..20: note = chemically synthesized
  source 1..20: mol_type = other DNA
ctgtttttagtaggatagag

SEQ ID NO: 60849 - DNA, 20 bp, synthetic construct
  misc_feature 1..20: note = chemically synthesized
  source 1..20: mol_type = other DNA
tggaaggcgaaggccatatc

SEQ ID NO: 60850 - DNA, 20 bp, synthetic construct
  misc_feature 1..20: note = chemically synthesized
  source 1..20: mol_type = other DNA
gggaagttacaaggtgttgt

SEQ ID NO: 60851 - DNA, 20 bp, synthetic construct
  misc_feature 1..20: note = chemically synthesized
  source 1..20: mol_type = other DNA
tggattaaaataagcagatt

SEQ ID NO: 60852 - DNA, 20 bp, synthetic construct
  misc_feature 1..20: note = chemically synthesized
  source 1..20: mol_type = other DNA
taaaataagcagattgagga

SEQ ID NO: 60853 - DNA, 20 bp, synthetic construct
  misc_feature 1..20: note = chemically synthesized
  source 1..20: mol_type = other DNA
aaaatgcatttaataatttg

SEQ ID NO: 60854 - DNA, 20 bp, synthetic construct
  misc_feature 1..20: note = chemically synthesized
  source 1..20: mol_type = other DNA
tttaataatttgttgaataa

SEQ ID NO: 60855 - DNA, 20 bp, synthetic construct
  misc_feature 1..20: note = chemically synthesized
  source 1..20: mol_type = other DNA
tgaatgactgtttttctgat

SEQ ID NO: 60856 - DNA, 20 bp, synthetic construct
  misc_feature 1..20: note = chemically synthesized
  source 1..20: mol_type = other DNA
ttttctgatgagagtaagga

SEQ ID NO: 60857 - DNA, 20 bp, synthetic construct
  misc_feature 1..20: note = chemically synthesized
  source 1..20: mol_type = other DNA
taccagatggctcggcagga

SEQ ID NO: 60858 - DNA, 20 bp, synthetic construct
  misc_feature 1..20: note = chemically synthesized
  source 1..20: mol_type = other DNA
gccatgcaggcactcatcag

SEQ ID NO: 60859 - DNA, 20 bp, synthetic construct
  misc_feature 1..20: note = chemically synthesized
  source 1..20: mol_type = other DNA
ctgcctcctggccttcctaa

SEQ ID NO: 60860 - DNA, 20 bp, synthetic construct
  misc_feature 1..20: note = chemically synthesized
  source 1..20: mol_type = other DNA
tggttctgtgcatagactct

SEQ ID NO: 60861 - DNA, 20 bp, synthetic construct
  misc_feature 1..20: note = chemically synthesized
  source 1..20: mol_type = other DNA
ttataatcctggcaacttgg

SEQ ID NO: 60862 - DNA, 20 bp, synthetic construct
  misc_feature 1..20: note = chemically synthesized
  source 1..20: mol_type = other DNA
aacttggaagaataaggtgg

SEQ ID NO: 60863 - DNA, 20 bp, synthetic construct
  misc_feature 1..20: note = chemically synthesized
  source 1..20: mol_type = other DNA
gaataaggtgggaggattgc

SEQ ID NO: 60864 - DNA, 20 bp, synthetic construct
  misc_feature 1..20: note = chemically synthesized
  source 1..20: mol_type = other DNA
gaggattgcttgaatccggt

SEQ ID NO: 60865 - DNA, 20 bp, synthetic construct
  misc_feature 1..20: note = chemically synthesized
  source 1..20: mol_type = other DNA
ttacaccactgcactgtagc

SEQ ID NO: 60866 - DNA, 20 bp, synthetic construct
  misc_feature 1..20: note = chemically synthesized
  source 1..20: mol_type = other DNA
atcccattaggcttagtgca

SEQ ID NO: 60867 - DNA, 20 bp, synthetic construct
  misc_feature 1..20: note = chemically synthesized
  source 1..20: mol_type = other DNA
ggcttagtgcagggaatgtg

SEQ ID NO: 60868 - DNA, 20 bp, synthetic construct
  misc_feature 1..20: note = chemically synthesized
  source 1..20: mol_type = other DNA
ataacaaaaatgtgaagcca

SEQ ID NO: 60869 - DNA, 20 bp, synthetic construct
  misc_feature 1..20: note = chemically synthesized
  source 1..20: mol_type = other DNA
taggttccaaaggaagaaag

SEQ ID NO: 60870 - DNA, 20 bp, synthetic construct
  misc_feature 1..20: note = chemically synthesized
  source 1..20: mol_type = other DNA
gaagaaagaagagtatagat

SEQ ID NO: 60871 - DNA, 20 bp, synthetic construct
  misc_feature 1..20: note = chemically synthesized
  source 1..20: mol_type = other DNA
agtatagataaggatgacac

SEQ ID NO: 60872 - DNA, 20 bp, synthetic construct
  misc_feature 1..20: note = chemically synthesized
  source 1..20: mol_type = other DNA
caaggctgtggctgtcacag

SEQ ID NO: 60873 - DNA, 20 bp, synthetic construct
  misc_feature 1..20: note = chemically synthesized
  source 1..20: mol_type = other DNA
ggagaacttaatggtaaaca

SEQ ID NO: 60874 - DNA, 20 bp, synthetic construct
  misc_feature 1..20: note = chemically synthesized
  source 1..20: mol_type = other DNA
aacaaagggtccccagggct

SEQ ID NO: 60875 - DNA, 20 bp, synthetic construct
  misc_feature 1..20: note = chemically synthesized
  source 1..20: mol_type = other DNA
cccgtcgttttccagagagg

SEQ ID NO: 60876 - DNA, 20 bp, synthetic construct
  misc_feature 1..20: note = chemically synthesized
  source 1..20: mol_type = other DNA
ggtcggatgtagtatatgaa

SEQ ID NO: 60877 - DNA, 20 bp, synthetic construct
  misc_feature 1..20: note = chemically synthesized
  source 1..20: mol_type = other DNA
caaagctctctacttcatct

SEQ ID NO: 60878 - DNA, 20 bp, synthetic construct
  misc_feature 1..20: note = chemically synthesized
  source 1..20: mol_type = other DNA
cccagactatgctacagaac

SEQ ID NO: 60879 - DNA, 20 bp, synthetic construct
  misc_feature 1..20: note = chemically synthesized
  source 1..20: mol_type = other DNA
ttaaatagggcatggttgat

SEQ ID NO: 60880 - DNA, 20 bp, synthetic construct
  misc_feature 1..20: note = chemically synthesized
  source 1..20: mol_type = other DNA
atggttgattagagttgtgt

SEQ ID NO: 60881 - DNA, 20 bp, synthetic construct
  misc_feature 1..20: note = chemically synthesized
  source 1..20: mol_type = other DNA
agaagtggcaccaccttaca

SEQ ID NO: 60882 - DNA, 20 bp, synthetic construct
  misc_feature 1..20: note = chemically synthesized
  source 1..20: mol_type = other DNA
aagtaactggttgttagggc

SEQ ID NO: 60883 - DNA, 20 bp, synthetic construct
  misc_feature 1..20: note = chemically synthesized
  source 1..20: mol_type = other DNA
ttgttagggccagagtgtag

SEQ ID NO: 60884 - DNA, 20 bp, synthetic construct
  misc_feature 1..20: note = chemically synthesized
  source 1..20: mol_type = other DNA
gggccagagtgtaggagagt

SEQ ID NO: 60885 - DNA, 20 bp, synthetic construct
  misc_feature 1..20: note = chemically synthesized
  source 1..20: mol_type = other DNA
ataggacaagatgcagagag

SEQ ID NO: 60886 - DNA, 20 bp, synthetic construct
  misc_feature 1..20: note = chemically synthesized
  source 1..20: mol_type = other DNA
atgattttagcctatttcac

SEQ ID NO: 60887 - DNA, 20 bp, synthetic construct
  misc_feature 1..20: note = chemically synthesized
  source 1..20: mol_type = other DNA
tggcaattatattaatattt

SEQ ID NO: 60888 - DNA, 20 bp, synthetic construct
  misc_feature 1..20: note = chemically synthesized
  source 1..20: mol_type = other DNA
ctgagctatgaagactaatt

SEQ ID NO: 60889 - DNA, 20 bp, synthetic construct
  misc_feature 1..20: note = chemically synthesized
  source 1..20: mol_type = other DNA
gaaaggtatttccaaaaagg

SEQ ID NO: 60890 - DNA, 20 bp, synthetic construct
  misc_feature 1..20: note = chemically synthesized
  source 1..20: mol_type = other DNA
tgatcaaatataacatttaa

SEQ ID NO: 60891 - DNA, 20 bp, synthetic construct
  misc_feature 1..20: note = chemically synthesized
  source 1..20: mol_type = other DNA
atttaagagagttaatacct

SEQ ID NO: 60892 - DNA, 20 bp, synthetic construct
  misc_feature 1..20: note = chemically synthesized
  source 1..20: mol_type = other DNA
aggtaggcaggggcaagacc

SEQ ID NO: 60893 - DNA, 20 bp, synthetic construct
  misc_feature 1..20: note = chemically synthesized
  source 1..20: mol_type = other DNA
aggcaggggcaagaccctga

SEQ ID NO: 60894 - DNA, 20 bp, synthetic construct
  misc_feature 1..20: note = chemically synthesized
  source 1..20: mol_type = other DNA
catggtacacattttgatgg

SEQ ID NO: 60895 - DNA, 20 bp, synthetic construct
  misc_feature 1..20: note = chemically synthesized
  source 1..20: mol_type = other DNA
gagataacaatcatattttc

SEQ ID NO: 60896 - DNA, 20 bp, synthetic construct
  misc_feature 1..20: note = chemically synthesized
  source 1..20: mol_type = other DNA
cattgttaacaatatgcagg

SEQ ID NO: 60897 - DNA, 20 bp, synthetic construct
  misc_feature 1..20: note = chemically synthesized
  source 1..20: mol_type = other DNA
tgttattttggtgtatggag

SEQ ID NO: 60898 - DNA, 20 bp, synthetic construct
  misc_feature 1..20: note = chemically synthesized
  source 1..20: mol_type = other DNA
tagataaacaatactgttta

SEQ ID NO: 60899 - DNA, 20 bp, synthetic construct
  misc_feature 1..20: note = chemically synthesized
  source 1..20: mol_type = other DNA
tagctttatattctatttct

SEQ ID NO: 60900 - DNA, 20 bp, synthetic construct
  misc_feature 1..20: note = chemically synthesized
  source 1..20: mol_type = other DNA
ttgcctttatgaagctcaca

SEQ ID NO: 60901 - DNA, 20 bp, synthetic construct
  misc_feature 1..20: note = chemically synthesized
  source 1..20: mol_type = other DNA
gttcaacgaagtttccaaaa

SEQ ID NO: 60902 - DNA, 20 bp, synthetic construct
  misc_feature 1..20: note = chemically synthesized
  source 1..20: mol_type = other DNA
tgaagcctggaggccaagag

SEQ ID NO: 60903 - DNA, 20 bp, synthetic construct
  misc_feature 1..20: note = chemically synthesized
  source 1..20: mol_type = other DNA
tcggacctatctctatcact

SEQ ID NO: 60904 - DNA, 20 bp, synthetic construct
  misc_feature 1..20: note = chemically synthesized
  source 1..20: mol_type = other DNA
ctatcactgtgggtaatcat

SEQ ID NO: 60905 - DNA, 20 bp, synthetic construct
  misc_feature 1..20: note = chemically synthesized
  source 1..20: mol_type = other DNA
tcatgcgaatattaggtgaa

SEQ ID NO: 60906 - DNA, 20 bp, synthetic construct
  misc_feature 1..20: note = chemically synthesized
  source 1..20: mol_type = other DNA
gaatattaggtgaagtgaat

SEQ ID NO: 60907 - DNA, 20 bp, synthetic construct
  misc_feature 1..20: note = chemically synthesized
  source 1..20: mol_type = other DNA
ggccttaacctttaaggtat

SEQ ID NO: 60908 - DNA, 20 bp, synthetic construct
  misc_feature 1..20: note = chemically synthesized
  source 1..20: mol_type = other DNA
ggtattagaattcattatta

SEQ ID NO: 60909 - DNA, 20 bp, synthetic construct
  misc_feature 1..20: note = chemically synthesized
  source 1..20: mol_type = other DNA
gagcgacagagagagagagg

SEQ ID NO: 60910 - DNA, 20 bp, synthetic construct
  misc_feature 1..20: note = chemically synthesized
  source 1..20: mol_type = other DNA
cagagagagagaggtggggt

SEQ ID NO: 60911 - DNA, 20 bp, synthetic construct
  misc_feature 1..20: note = chemically synthesized
  source 1..20: mol_type = other DNA
gaggtggggtgggggtatgg

SEQ ID NO: 60912 - DNA, 20 bp, synthetic construct
  misc_feature 1..20: note = chemically synthesized
  source 1..20: mol_type = other DNA
ttatttaaggaacctctatc

SEQ ID NO: 60913 - DNA, 20 bp, synthetic construct
  misc_feature 1..20: note = chemically synthesized
  source 1..20: mol_type = other DNA
aggagattccttcaggagaa

SEQ ID NO: 60914 - DNA, 20 bp, synthetic construct
  misc_feature 1..20: note = chemically synthesized
  source 1..20: mol_type = other DNA
ccagggggagcattcagccc

SEQ ID NO: 60915 - DNA, 20 bp, synthetic construct
  misc_feature 1..20: note = chemically synthesized
  source 1..20: mol_type = other DNA
aaccagttcattcttccttt

SEQ ID NO: 60916 - DNA, 20 bp, synthetic construct
  misc_feature 1..20: note = chemically synthesized
  source 1..20: mol_type = other DNA
ctaaataaaatccttactca

SEQ ID NO: 60917 - DNA, 20 bp, synthetic construct
  misc_feature 1..20: note = chemically synthesized
  source 1..20: mol_type = other DNA
ttttgtggtgtgagatcgat

SEQ ID NO: 60918 - DNA, 20 bp, synthetic construct
  misc_feature 1..20: note = chemically synthesized
  source 1..20: mol_type = other DNA
ctggagagacccacagaagt

SEQ ID NO: 60919 - DNA, 20 bp, synthetic construct
  misc_feature 1..20: note = chemically synthesized
  source 1..20: mol_type = other DNA
acagaagttaggattgccaa

SEQ ID NO: 60920 - DNA, 20 bp, synthetic construct
  misc_feature 1..20: note = chemically synthesized
  source 1..20: mol_type = other DNA
cctgcatctgtgtgtgcaca

SEQ ID NO: 60921 - DNA, 20 bp, synthetic construct
  misc_feature 1..20: note = chemically synthesized
  source 1..20: mol_type = other DNA
catattttgatttgctataa

SEQ ID NO: 60922 - DNA, 20 bp, synthetic construct
  misc_feature 1..20: note = chemically synthesized
  source 1..20: mol_type = other DNA
gatttgctataacagagtac

SEQ ID NO: 60923 - DNA, 20 bp, synthetic construct
  misc_feature 1..20: note = chemically synthesized
  source 1..20: mol_type = other DNA
ctataacagagtacctgagt

SEQ ID NO: 60924 - DNA, 20 bp, synthetic construct
  misc_feature 1..20: note = chemically synthesized
  source 1..20: mol_type = other DNA
ctgtccaccatatgtgaaat

SEQ ID NO: 60925 - DNA, 20 bp, synthetic construct
  misc_feature 1..20: note = chemically synthesized
  source 1..20: mol_type = other DNA
attctaaaaggaaacaaaaa

SEQ ID NO: 60926 - DNA, 20 bp, synthetic construct
  misc_feature 1..20: note = chemically synthesized
  source 1..20: mol_type = other DNA
aatggattaaacgttttttg

SEQ ID NO: 60927 - DNA, 20 bp, synthetic construct
  misc_feature 1..20: note = chemically synthesized
  source 1..20: mol_type = other DNA
gttttttgaggaattattga

SEQ ID NO: 60928 - DNA, 20 bp, synthetic construct
  misc_feature 1..20: note = chemically synthesized
  source 1..20: mol_type = other DNA
tattattatactttaagatt

SEQ ID NO: 60929 - DNA, 20 bp, synthetic construct
  misc_feature 1..20: note = chemically synthesized
  source 1..20: mol_type = other DNA
ccccaccccacaacagtccc

SEQ ID NO: 60930 - DNA, 20 bp, synthetic construct
  misc_feature 1..20: note = chemically synthesized
  source 1..20: mol_type = other DNA
tcattgttcagttcccatct

SEQ ID NO: 60931 - DNA, 20 bp, synthetic construct
  misc_feature 1..20: note = chemically synthesized
  source 1..20: mol_type = other DNA
ttcagttcccatctatgagt

SEQ ID NO: 60932 - DNA, 20 bp, synthetic construct
  misc_feature 1..20: note = chemically synthesized
  source 1..20: mol_type = other DNA
tgtccttgcgatagtttact

SEQ ID NO: 60933 - DNA, 20 bp, synthetic construct
  misc_feature 1..20: note = chemically synthesized
  source 1..20: mol_type = other DNA
agtctatcattgttggacat

SEQ ID NO: 60934 - DNA, 20 bp, synthetic construct
  misc_feature 1..20: note = chemically synthesized
  source 1..20: mol_type = other DNA
ggttccaagtctttgctatt

SEQ ID NO: 60935 - DNA, 20 bp, synthetic construct
  misc_feature 1..20: note = chemically synthesized
  source 1..20: mol_type = other DNA
gcagcatgatttatattcct

SEQ ID NO: 60936 - DNA, 20 bp, synthetic construct
  misc_feature 1..20: note = chemically synthesized
  source 1..20: mol_type = other DNA
tttgggtatatacccagtaa

SEQ ID NO: 60937 - DNA, 20 bp, synthetic construct
  misc_feature 1..20: note = chemically synthesized
  source 1..20: mol_type = other DNA
tatacccagtaatgggatgg

SEQ ID NO: 60938 - DNA, 20 bp, synthetic construct
  misc_feature 1..20: note = chemically synthesized
  source 1..20: mol_type = other DNA
tttctagttctagatccctg

SEQ ID NO: 60939 - DNA, 20 bp, synthetic construct
  misc_feature 1..20: note = chemically synthesized
  source 1..20: mol_type = other DNA
aactagtttacagtcccacc

SEQ ID NO: 60940 - DNA, 20 bp, synthetic construct
  misc_feature 1..20: note = chemically synthesized
  source 1..20: mol_type = other DNA
tttttttcttgtaaatttgt

SEQ ID NO: 60941 - DNA, 20 bp, synthetic construct
  misc_feature 1..20: note = chemically synthesized
  source 1..20: mol_type = other DNA
gtttgagttcattatagatt

SEQ ID NO: 60942 - DNA, 20 bp, synthetic construct
  misc_feature 1..20: note = chemically synthesized
  source 1..20: mol_type = other DNA
ggatattagccctttgtcag

SEQ ID NO: 60943 - DNA, 20 bp, synthetic construct
  misc_feature 1..20: note = chemically synthesized
  source 1..20: mol_type = other DNA
agtttcattagatcccatta

SEQ ID NO: 60944 - DNA, 20 bp, synthetic construct
  misc_feature 1..20: note = chemically synthesized
  source 1..20: mol_type = other DNA
tccttgcccatgcctatgtc

SEQ ID NO: 60945 - DNA, 20 bp, synthetic construct
  misc_feature 1..20: note = chemically synthesized
  source 1..20: mol_type = other DNA
gtaatgcctgcgttttcttc

SEQ ID NO: 60946 - DNA, 20 bp, synthetic construct
  misc_feature 1..20: note = chemically synthesized
  source 1..20: mol_type = other DNA
gtttaagtctttaatccatc

SEQ ID NO: 60947 - DNA, 20 bp, synthetic construct
  misc_feature 1..20: note = chemically synthesized
  source 1..20: mol_type = other DNA
ttttgtataaggtgtaagga

SEQ ID NO: 60948 - DNA, 20 bp, synthetic construct
  misc_feature 1..20: note = chemically synthesized
  source 1..20: mol_type = other DNA
ccagcaccatttattaaata

SEQ ID NO: 60949 - DNA, 20 bp, synthetic construct
  misc_feature 1..20: note = chemically synthesized
  source 1..20: mol_type = other DNA
ccagctttgttcttttggct

SEQ ID NO: 60950 - DNA, 20 bp, synthetic construct
  misc_feature 1..20: note = chemically synthesized
  source 1..20: mol_type = other DNA
aaaatcattggtagcttgat

SEQ ID NO: 60951 - DNA, 20 bp, synthetic construct
  misc_feature 1..20: note = chemically synthesized
  source 1..20: mol_type = other DNA
gtagcttgatggggatggca

SEQ ID NO: 60952 - DNA, 20 bp, synthetic construct
  misc_feature 1..20: note = chemically synthesized
  source 1..20: mol_type = other DNA
attcttcctacccataagca

SEQ ID NO: 60953 - DNA, 20 bp, synthetic construct
  misc_feature 1..20: note = chemically synthesized
  source 1..20: mol_type = other DNA
tccttcacatcccttgtaag

SEQ ID NO: 60954 - DNA, 20 bp, synthetic construct
  misc_feature 1..20: note = chemically synthesized
  source 1..20: mol_type = other DNA
ttattctctttgaagcaatt

SEQ ID NO: 60955 - DNA, 20 bp, synthetic construct
  misc_feature 1..20: note = chemically synthesized
  source 1..20: mol_type = other DNA
tctttgaagcaattgtgaat

SEQ ID NO: 60956 - DNA, 20 bp, synthetic construct
  misc_feature 1..20: note = chemically synthesized
  source 1..20: mol_type = other DNA
tttgtctgttattggtgtat

SEQ ID NO: 60957 - DNA, 20 bp, synthetic construct
  misc_feature 1..20: note = chemically synthesized
  source 1..20: mol_type = other DNA
gagattttgggctgagacaa

SEQ ID NO: 60958 - DNA, 20 bp, synthetic construct
  misc_feature 1..20: note = chemically synthesized
  source 1..20: mol_type = other DNA
ttgacttcctcttttcttaa

SEQ ID NO: 60959 - DNA, 20 bp, synthetic construct
  misc_feature 1..20: note = chemically synthesized
  source 1..20: mol_type = other DNA
ccagaacttccaacactatg

SEQ ID NO: 60960 - DNA, 20 bp, synthetic construct
  misc_feature 1..20: note = chemically synthesized
  source 1..20: mol_type = other DNA
cttccaacactatgttgaat

SEQ ID NO: 60961 - DNA, 20 bp, synthetic construct
  misc_feature 1..20: note = chemically synthesized
  source 1..20: mol_type = other DNA
gtcttgtgccagtttacaaa

SEQ ID NO: 60962 - DNA, 20 bp, synthetic construct
  misc_feature 1..20: note = chemically synthesized
  source 1..20: mol_type = other DNA
cattcagtatgatattggct

SEQ ID NO: 60963 - DNA, 20 bp, synthetic construct
  misc_feature 1..20: note = chemically synthesized
  source 1..20: mol_type = other DNA
tattgaaagtttttagcatg

SEQ ID NO: 60964 - DNA, 20 bp, synthetic construct
  misc_feature 1..20: note = chemically synthesized
  source 1..20: mol_type = other DNA
gtttttagcatgaagggttg

SEQ ID NO: 60965 - DNA, 20 bp, synthetic construct
  misc_feature 1..20: note = chemically synthesized
  source 1..20: mol_type = other DNA
tctttggttctgtttatatg

SEQ ID NO: 60966 - DNA, 20 bp, synthetic construct
  misc_feature 1..20: note = chemically synthesized
  source 1..20: mol_type = other DNA
ttgaaccagccttgcatccc

SEQ ID NO: 60967 - DNA, 20 bp, synthetic construct
  misc_feature 1..20: note = chemically synthesized
  source 1..20: mol_type = other DNA
atgaagtccacttgatcatc

SEQ ID NO: 60968 - DNA, 20 bp, synthetic construct
  misc_feature 1..20: note = chemically synthesized
  source 1..20: mol_type = other DNA
ataagctttttgatgtgctg

SEQ ID NO: 60969 - DNA, 20 bp, synthetic construct
  misc_feature 1..20: note = chemically synthesized
  source 1..20: mol_type = other DNA
cggtttgccagtattttatt

SEQ ID NO: 60970 - DNA, 20 bp, synthetic construct
  misc_feature 1..20: note = chemically synthesized
  source 1..20: mol_type = other DNA
tttttgcatcgatgttcatc

SEQ ID NO: 60971 - DNA, 20 bp, synthetic construct
  misc_feature 1..20: note = chemically synthesized
  source 1..20: mol_type = other DNA
tctctttctggctttggtat

SEQ ID NO: 60972 - DNA, 20 bp, synthetic construct
  misc_feature 1..20: note = chemically synthesized
  source 1..20: mol_type = other DNA
gatgatgctggcctcataaa

SEQ ID NO: 60973 - DNA, 20 bp, synthetic construct
  misc_feature 1..20: note = chemically synthesized
  source 1..20: mol_type = other DNA
gcctcataaaatgagttagg

SEQ ID NO: 60974 - DNA, 20 bp, synthetic construct
  misc_feature 1..20: note = chemically synthesized
  source 1..20: mol_type = other DNA
ttccttctttttctgttgat

SEQ ID NO: 60975 - DNA, 20 bp, synthetic construct
  misc_feature 1..20: note = chemically synthesized
  source 1..20: mol_type = other DNA
ttgattggaatagtttcaga

SEQ ID NO: 60976 - DNA, 20 bp, synthetic construct
  misc_feature 1..20: note = chemically synthesized
  source 1..20: mol_type = other DNA
attcctccttgtacctctgt

SEQ ID NO: 60977 - DNA, 20 bp, synthetic construct
  misc_feature 1..20: note = chemically synthesized
  source 1..20: mol_type = other DNA
acctctgttagaatttggct

SEQ ID NO: 60978 - DNA, 20 bp, synthetic construct
  misc_feature 1..20: note = chemically synthesized
  source 1..20: mol_type = other DNA
acttcttcctggtttagtct

SEQ ID NO: 60979 - DNA, 20 bp, synthetic construct
  misc_feature 1..20: note = chemically synthesized
  source 1..20: mol_type = other DNA
ttgggatagtgtatgtgtcc

SEQ ID NO: 60980 - DNA, 20 bp, synthetic construct
  misc_feature 1..20: note = chemically synthesized
  source 1..20: mol_type = other DNA
gatggcagtttgtatttctg

SEQ ID NO: 60981 - DNA, 20 bp, synthetic construct
  misc_feature 1..20: note = chemically synthesized
  source 1..20: mol_type = other DNA
ccagattcattaattttttg

SEQ ID NO: 60982 - DNA, 20 bp, synthetic construct
  misc_feature 1..20: note = chemically synthesized
  source 1..20: mol_type = other DNA
ttcttgacttctgctagctt

SEQ ID NO: 60983 - DNA, 20 bp, synthetic construct
  misc_feature 1..20: note = chemically synthesized
  source 1..20: mol_type = other DNA
agttcttttaattgtgatgt

SEQ ID NO: 60984 - DNA, 20 bp, synthetic construct
  misc_feature 1..20: note = chemically synthesized
  source 1..20: mol_type = other DNA
gtgatgttagggtgtcaatt

SEQ ID NO: 60985 - DNA, 20 bp, synthetic construct
  misc_feature 1..20: note = chemically synthesized
  source 1..20: mol_type = other DNA
atttccccctacacactgat

SEQ ID NO: 60986 - DNA, 20 bp, synthetic construct
  misc_feature 1..20: note = chemically synthesized
  source 1..20: mol_type = other DNA
gttgttcagtttccatgtag

SEQ ID NO: 60987 - DNA, 20 bp, synthetic construct
  misc_feature 1..20: note = chemically synthesized
  source 1..20: mol_type = other DNA
ttccatgtagttgagtggtt

SEQ ID NO: 60988 - DNA, 20 bp, synthetic construct
  misc_feature 1..20: note = chemically synthesized
  source 1..20: mol_type = other DNA
atgtagttgagtggttttga

SEQ ID NO: 60989 - DNA, 20 bp, synthetic construct
  misc_feature 1..20: note = chemically synthesized
  source 1..20: mol_type = other DNA
tttgagtgagtttcttaatc

SEQ ID NO: 60990 - DNA, 20 bp, synthetic construct
  misc_feature 1..20: note = chemically synthesized
  source 1..20: mol_type = other DNA
tccaagtatgtggtcaattt

SEQ ID NO: 60991 - DNA, 20 bp, synthetic construct
  misc_feature 1..20: note = chemically synthesized
  source 1..20: mol_type = other DNA
aaatgtatattctgttgatt

SEQ ID NO: 60992 - DNA, 20 bp, synthetic construct
  misc_feature 1..20: note = chemically synthesized
  source 1..20: mol_type = other DNA
tattctgttgatttggggtg

SEQ ID NO: 60993 - DNA, 20 bp, synthetic construct
  misc_feature 1..20: note = chemically synthesized
  source 1..20: mol_type = other DNA
tgcagagctgtgttcaattc

SEQ ID NO: 60994 - DNA, 20 bp, synthetic construct
  misc_feature 1..20: note = chemically synthesized
  source 1..20: mol_type = other DNA
gatctgtctaatgttgacag

SEQ ID NO: 60995 - DNA, 20 bp, synthetic construct
  misc_feature 1..20: note = chemically synthesized
  source 1..20: mol_type = other DNA
gtctcccattattaaagtgt

SEQ ID NO: 60996 - DNA, 20 bp, synthetic construct
  misc_feature 1..20: note = chemically synthesized
  source 1..20: mol_type = other DNA
ggtctctaaggacttgcttt

SEQ ID NO: 60997 - DNA, 20 bp, synthetic construct
  misc_feature 1..20: note = chemically synthesized
  source 1..20: mol_type = other DNA
taaggacttgctttatgaat

SEQ ID NO: 60998 - DNA, 20 bp, synthetic construct
  misc_feature 1..20: note = chemically synthesized
  source 1..20: mol_type = other DNA
tgaatctgggtgctcctgta

SEQ ID NO: 60999 - DNA, 20 bp, synthetic construct
  misc_feature 1..20: note = chemically synthesized
  source 1..20: mol_type = other DNA
gtattgggtgcatatatatt

SEQ ID NO: 61000 - DNA, 20 bp, synthetic construct
  misc_feature 1..20: note = chemically synthesized
  source 1..20: mol_type = other DNA
aggatagttagctcttcttg

SEQ ID NO: 61001 - DNA, 20 bp, synthetic construct
  misc_feature 1..20: note = chemically synthesized
  source 1..20: mol_type = other DNA
aagcctgttttatcagagac

SEQ ID NO: 61002 - DNA, 20 bp, synthetic construct
  misc_feature 1..20: note = chemically synthesized
  source 1..20: mol_type = other DNA
tgtgtgtgtgtgcacatgag

SEQ ID NO: 61003 - DNA, 20 bp, synthetic construct
  misc_feature 1..20: note = chemically synthesized
  source 1..20: mol_type = other DNA
gtgcacatgagatgggtttc

SEQ ID NO: 61004 - DNA, 20 bp, synthetic construct
  misc_feature 1..20: note = chemically synthesized
  source 1..20: mol_type = other DNA
ttaaagttaatattgtatgt

SEQ ID NO: 61005 - DNA, 20 bp, synthetic construct
  misc_feature 1..20: note = chemically synthesized
  source 1..20: mol_type = other DNA
acttatgaagcttagtttgg

SEQ ID NO: 61006 - DNA, 20 bp, synthetic construct
  misc_feature 1..20: note = chemically synthesized
  source 1..20: mol_type = other DNA
tgttgaaaattctttccttt

SEQ ID NO: 61007 - DNA, 20 bp, synthetic construct
  misc_feature 1..20: note = chemically synthesized
  source 1..20: mol_type = other DNA
aattctttcctttaaggatg

SEQ ID NO: 61008 - DNA, 20 bp, synthetic construct
  misc_feature 1..20: note = chemically synthesized
  source 1..20: mol_type = other DNA
ccccactctcttctggcttg

SEQ ID NO: 61009 - DNA, 20 bp, synthetic construct
  misc_feature 1..20: note = chemically synthesized
  source 1..20: mol_type = other DNA
agtctgatgggcttcccttt

SEQ ID NO: 61010 - DNA, 20 bp, synthetic construct
  misc_feature 1..20: note = chemically synthesized
  source 1..20: mol_type = other DNA
tttccttcatttcaactttg

SEQ ID NO: 61011 - DNA, 20 bp, synthetic construct
  misc_feature 1..20: note = chemically synthesized
  source 1..20: mol_type = other DNA
aatctgacaattatgtgtct

SEQ ID NO: 61012 - DNA, 20 bp, synthetic construct
  misc_feature 1..20: note = chemically synthesized
  source 1..20: mol_type = other DNA
tcttggagttgctcttctcg

SEQ ID NO: 61013 - DNA, 20 bp, synthetic construct
  misc_feature 1..20: note = chemically synthesized
  source 1..20: mol_type = other DNA
tgtggcgttctctgtatttc

SEQ ID NO: 61014 - DNA, 20 bp, synthetic construct
  misc_feature 1..20: note = chemically synthesized
  source 1..20: mol_type = other DNA
gttctctgtatttcctgaat

SEQ ID NO: 61015 - DNA, 20 bp, synthetic construct
  misc_feature 1..20: note = chemically synthesized
  source 1..20: mol_type = other DNA
gctagattggggaagttctc

SEQ ID NO: 61016 - DNA, 20 bp, synthetic construct
  misc_feature 1..20: note = chemically synthesized
  source 1..20: mol_type = other DNA
ttctcctggataatatcctg

SEQ ID NO: 61017 - DNA, 20 bp, synthetic construct
  misc_feature 1..20: note = chemically synthesized
  source 1..20: mol_type = other DNA
ttatcttctttgcctttggt

SEQ ID NO: 61018 - DNA, 20 bp, synthetic construct
  misc_feature 1..20: note = chemically synthesized
  source 1..20: mol_type = other DNA
ttgaatttcctcctgtagct

SEQ ID NO: 61019 - DNA, 20 bp, synthetic construct
  misc_feature 1..20: note = chemically synthesized
  source 1..20: mol_type = other DNA
aggaaaggtgctctgctttt

SEQ ID NO: 61020 - DNA, 20 bp, synthetic construct
  misc_feature 1..20: note = chemically synthesized
  source 1..20: mol_type = other DNA
ttgatgatagtgatgtaccg

SEQ ID NO: 61021 - DNA, 20 bp, synthetic construct
  misc_feature 1..20: note = chemically synthesized
  source 1..20: mol_type = other DNA
tgtaccgatgggtttttggt

SEQ ID NO: 61022 - DNA, 20 bp, synthetic construct
  misc_feature 1..20: note = chemically synthesized
  source 1..20: mol_type = other DNA
accctcagctgcaggtctgt

SEQ ID NO: 61023 - DNA, 20 bp, synthetic construct
  misc_feature 1..20: note = chemically synthesized
  source 1..20: mol_type = other DNA
ccactccagaccctgtttgc

SEQ ID NO: 61024 - DNA, 20 bp, synthetic construct
  misc_feature 1..20: note = chemically synthesized
  source 1..20: mol_type = other DNA
accgcagattttcgtgatcc

SEQ ID NO: 61025 - DNA, 20 bp, synthetic construct
  misc_feature 1..20: note = chemically synthesized
  source 1..20: mol_type = other DNA
ctctggaagttttgtctcag

SEQ ID NO: 61026 - DNA, 20 bp, synthetic construct
  misc_feature 1..20: note = chemically synthesized
  source 1..20: mol_type = other DNA
gtgtcagtctgcccttactt

SEQ ID NO: 61027 - DNA, 20 bp, synthetic construct
  misc_feature 1..20: note = chemically synthesized
  source 1..20: mol_type = other DNA
gcctcccagttaggctgctc

SEQ ID NO: 61028 - DNA, 20 bp, synthetic construct
  misc_feature 1..20: note = chemically synthesized
  source 1..20: mol_type = other DNA
agttaggctgctcgggggtc

SEQ ID NO: 61029 - DNA, 20 bp, synthetic construct
  misc_feature 1..20: note = chemically synthesized
  source 1..20: mol_type = other DNA
caggcctccttgagctgtgg

SEQ ID NO: 61030 - DNA, 20 bp, synthetic construct
  misc_feature 1..20: note = chemically synthesized
  source 1..20: mol_type = other DNA
aggaccctcggagccatgtg

SEQ ID NO: 61031 - DNA, 20 bp, synthetic construct
  misc_feature 1..20: note = chemically synthesized
  source 1..20: mol_type = other DNA
ctgtcagaaaagcacagtat

SEQ ID NO: 61032 - DNA, 20 bp, synthetic construct
  misc_feature 1..20: note = chemically synthesized
  source 1..20: mol_type = other DNA
gaaaagcacagtattcgggt

SEQ ID NO: 61033 - DNA, 20 bp, synthetic construct
  misc_feature 1..20: note = chemically synthesized
  source 1..20: mol_type = other DNA
atctctatacatgttcttcc

SEQ ID NO: 61034 - DNA, 20 bp, synthetic construct
  misc_feature 1..20: note = chemically synthesized
  source 1..20: mol_type = other DNA
atttatgtctttaatctatt

SEQ ID NO: 61035 - DNA, 20 bp, synthetic construct
  misc_feature 1..20: note = chemically synthesized
  source 1..20: mol_type = other DNA
ccaattttattcttttgcat

SEQ ID NO: 61036 - DNA, 20 bp, synthetic construct
  misc_feature 1..20: note = chemically synthesized
  source 1..20: mol_type = other DNA
attgtgttggtggccttgtt

SEQ ID NO: 61037 - DNA, 20 bp, synthetic construct
  misc_feature 1..20: note = chemically synthesized
  source 1..20: mol_type = other DNA
caagattgttttggccattt

SEQ ID NO: 61038 - DNA, 20 bp, synthetic construct
  misc_feature 1..20: note = chemically synthesized
  source 1..20: mol_type = other DNA
aacctaagtaaaaatgggca

SEQ ID NO: 61039 - DNA, 20 bp, synthetic construct
  misc_feature 1..20: note = chemically synthesized
  source 1..20: mol_type = other DNA
agtaaaaatgggcaaaggat

SEQ ID NO: 61040 - DNA, 20 bp, synthetic construct
  misc_feature 1..20: note = chemically synthesized
  source 1..20: mol_type = other DNA
tatcaaaaaagacaagagat

SEQ ID NO: 61041 - DNA, 20 bp, synthetic construct
  misc_feature 1..20: note = chemically synthesized
  source 1..20: mol_type = other DNA
aactcttgtgcatagctggt

SEQ ID NO: 61042 - DNA, 20 bp, synthetic construct
  misc_feature 1..20: note = chemically synthesized
  source 1..20: mol_type = other DNA
gtttctcaaacaactaaaaa

SEQ ID NO: 61043 - DNA, 20 bp, synthetic construct
  misc_feature 1..20: note = chemically synthesized
  source 1..20: mol_type = other DNA
gccttaaaaaaggagatggg

SEQ ID NO: 61044 - DNA, 20 bp, synthetic construct
  misc_feature 1..20: note = chemically synthesized
  source 1..20: mol_type = other DNA
atggggggaatgtataaacc

SEQ ID NO: 61045 - DNA, 20 bp, synthetic construct
  misc_feature 1..20: note = chemically synthesized
  source 1..20: mol_type = other DNA
ggcatgatattacttatatg

SEQ ID NO: 61046 - DNA, 20 bp, synthetic construct
  misc_feature 1..20: note = chemically synthesized
  source 1..20: mol_type = other DNA
gttataaacttgcagctgta

SEQ ID NO: 61047 - DNA, 20 bp, synthetic construct
  misc_feature 1..20: note = chemically synthesized
  source 1..20: mol_type = other DNA
ctatggaaggtgttgtattg

SEQ ID NO: 61048 - DNA, 20 bp, synthetic construct
  misc_feature 1..20: note = chemically synthesized
  source 1..20: mol_type = other DNA
atttctgtttcctaattgtt

SEQ ID NO: 61049 - DNA, 20 bp, synthetic construct
  misc_feature 1..20: note = chemically synthesized
  source 1..20: mol_type = other DNA
cttaaaacttatgtaaccct

SEQ ID NO: 61050 - DNA, 20 bp, synthetic construct
  misc_feature 1..20: note = chemically synthesized
  source 1..20: mol_type = other DNA
atacagctatcactgtctct

SEQ ID NO: 61051 - DNA, 20 bp, synthetic construct
  misc_feature 1..20: note = chemically synthesized
  source 1..20: mol_type = other DNA
tatatctccggcctacaact

SEQ ID NO: 61052 - DNA, 20 bp, synthetic construct
  misc_feature 1..20: note = chemically synthesized
  source 1..20: mol_type = other DNA
ttaaatgtttatgagccaca

SEQ ID NO: 61053 - DNA, 20 bp, synthetic construct
  misc_feature 1..20: note = chemically synthesized
  source 1..20: mol_type = other DNA
gtttatgagccacagagaat

SEQ ID NO: 61054 - DNA, 20 bp, synthetic construct
  misc_feature 1..20: note = chemically synthesized
  source 1..20: mol_type = other DNA
atttttttgaacttctgtgt

SEQ ID NO: 61055 - DNA, 20 bp, synthetic construct
  misc_feature 1..20: note = chemically synthesized
  source 1..20: mol_type = other DNA
gggaaaggtgctgtgtggct

SEQ ID NO: 61056 - DNA, 20 bp, synthetic construct
  misc_feature 1..20: note = chemically synthesized
  source 1..20: mol_type = other DNA
gtggcttagagtataaacat

SEQ ID NO: 61057 - DNA, 20 bp, synthetic construct
  misc_feature 1..20: note = chemically synthesized
  source 1..20: mol_type = other DNA
agaatgtgctatggactttc

SEQ ID NO: 61058 - DNA, 20 bp, synthetic construct
  misc_feature 1..20: note = chemically synthesized
  source 1..20: mol_type = other DNA
tcagtgcccttgtatatcct

SEQ ID NO: 61059 - DNA, 20 bp, synthetic construct
  misc_feature 1..20: note = chemically synthesized
  source 1..20: mol_type = other DNA
gtatatcctcagaatgtgtg

SEQ ID NO: 61060 - DNA, 20 bp, synthetic construct
  misc_feature 1..20: note = chemically synthesized
  source 1..20: mol_type = other DNA
tagctagggctagcagaagg

SEQ ID NO: 61061 - DNA, 20 bp, synthetic construct
  misc_feature 1..20: note = chemically synthesized
  source 1..20: mol_type = other DNA
tcttggaaaaaccagtccct

SEQ ID NO: 61062 - DNA, 20 bp, synthetic construct
  misc_feature 1..20: note = chemically synthesized
  source 1..20: mol_type = other DNA
atacaagcttcataggaaca

SEQ ID NO: 61063 - DNA, 20 bp, synthetic construct
  misc_feature 1..20: note = chemically synthesized
  source 1..20: mol_type = other DNA
tattcatttctaaacacaga

SEQ ID NO: 61064 - DNA, 20 bp, synthetic construct
  misc_feature 1..20: note = chemically synthesized
  source 1..20: mol_type = other DNA
aagggagaaagacagaaagt

SEQ ID NO: 61065 - DNA, 20 bp, synthetic construct
  misc_feature 1..20: note = chemically synthesized
  source 1..20: mol_type = other DNA
gaaagtaagaatgaaagaaa

SEQ ID NO: 61066 - DNA, 20 bp, synthetic construct
  misc_feature 1..20: note = chemically synthesized
  source 1..20: mol_type = other DNA
gaaagaaagagagtgagata

SEQ ID NO: 61067 - DNA, 20 bp, synthetic construct
  misc_feature 1..20: note = chemically synthesized
  source 1..20: mol_type = other DNA
acaaatgatcctctgaagat

SEQ ID NO: 61068 - DNA, 20 bp, synthetic construct
  misc_feature 1..20: note = chemically synthesized
  source 1..20: mol_type = other DNA
aacattcaaaccttcaactt

SEQ ID NO: 61069 - DNA, 20 bp, synthetic construct
  misc_feature 1..20: note = chemically synthesized
  source 1..20: mol_type = other DNA
cttgttgatacagattgaca

SEQ ID NO: 61070 - DNA, 20 bp, synthetic construct
  misc_feature 1..20: note = chemically synthesized
  source 1..20: mol_type = other DNA
tctttccccactgcctttcc

SEQ ID NO: 61071 - DNA, 20 bp, synthetic construct
  misc_feature 1..20: note = chemically synthesized
  source 1..20: mol_type = other DNA
ttaacaactgttgacttatt

SEQ ID NO: 61072 - DNA, 20 bp, synthetic construct
  misc_feature 1..20: note = chemically synthesized
  source 1..20: mol_type = other DNA
cagccaataggactatttat

SEQ ID NO: 61073 - DNA, 20 bp, synthetic construct
  misc_feature 1..20: note = chemically synthesized
  source 1..20: mol_type = other DNA
aaagggaaattatctccagg

SEQ ID NO: 61074 - DNA, 20 bp, synthetic construct
  misc_feature 1..20: note = chemically synthesized
  source 1..20: mol_type = other DNA
tccagggaggatagaaaggt

SEQ ID NO: 61075 - DNA, 20 bp, synthetic construct
  misc_feature 1..20: note = chemically synthesized
  source 1..20: mol_type = other DNA
tactttatatttaatataca

SEQ ID NO: 61076 - DNA, 20 bp, synthetic construct
  misc_feature 1..20: note = chemically synthesized
  source 1..20: mol_type = other DNA
aattatatcatagacatatt

SEQ ID NO: 61077 - DNA, 20 bp, synthetic construct
  misc_feature 1..20: note = chemically synthesized
  source 1..20: mol_type = other DNA
tcatagacatatttaggata

SEQ ID NO: 61078 - DNA, 20 bp, synthetic construct
  misc_feature 1..20: note = chemically synthesized
  source 1..20: mol_type = other DNA
tatataaaaagtctgtttca

SEQ ID NO: 61079 - DNA, 20 bp, synthetic construct
  misc_feature 1..20: note = chemically synthesized
  source 1..20: mol_type = other DNA
tagggactcaggttatatgt

SEQ ID NO: 61080 - DNA, 20 bp, synthetic construct
  misc_feature 1..20: note = chemically synthesized
  source 1..20: mol_type = other DNA
gactcaggttatatgtgtga

SEQ ID NO: 61081 - DNA, 20 bp, synthetic construct
  misc_feature 1..20: note = chemically synthesized
  source 1..20: mol_type = other DNA
caggttatatgtgtgaatgg

SEQ ID NO: 61082 - DNA, 20 bp, synthetic construct
  misc_feature 1..20: note = chemically synthesized
  source 1..20: mol_type = other DNA
atgtgtgaatggatgaataa

SEQ ID NO: 61083 - DNA, 20 bp, synthetic construct
  misc_feature 1..20: note = chemically synthesized
  source 1..20: mol_type = other DNA
gtgaatggatgaataaatga

SEQ ID NO: 61084 - DNA, 20 bp, synthetic construct
  misc_feature 1..20: note = chemically synthesized
  source 1..20: mol_type = other DNA
cttcaaaggcactcatcttg

SEQ ID NO: 61085 - DNA, 20 bp, synthetic construct
  misc_feature 1..20: note = chemically synthesized
  source 1..20: mol_type = other DNA
aaaggcactcatcttggtga

SEQ ID NO: 61086 - DNA, 20 bp, synthetic construct
  misc_feature 1..20: note = chemically synthesized
  source 1..20: mol_type = other DNA
tgacacacaatttaggcttc

SEQ ID NO: 61087 - DNA, 20 bp, synthetic construct
  misc_feature 1..20: note = chemically synthesized
  source 1..20: mol_type = other DNA
aaacctctcttaatccacat

SEQ ID NO: 61088 - DNA, 20 bp, synthetic construct
  misc_feature 1..20: note = chemically synthesized
  source 1..20: mol_type = other DNA
cagttttaaagcataatatt

SEQ ID NO: 61089 - DNA, 20 bp, synthetic construct
  misc_feature 1..20: note = chemically synthesized
  source 1..20: mol_type = other DNA
tactatgctctgctttctca

SEQ ID NO: 61090 - DNA, 20 bp, synthetic construct
  misc_feature 1..20: note = chemically synthesized
  source 1..20: mol_type = other DNA
ctttctcacaggatgcatgt

SEQ ID NO: 61091 - DNA, 20 bp, synthetic construct
  misc_feature 1..20: note = chemically synthesized
  source 1..20: mol_type = other DNA
aaaacacaaagtctttatgt

SEQ ID NO: 61092 - DNA, 20 bp, synthetic construct
  misc_feature 1..20: note = chemically synthesized
  source 1..20: mol_type = other DNA
ttttctttgtcagagctaga

SEQ ID NO: 61093 - DNA, 20 bp, synthetic construct
  misc_feature 1..20: note = chemically synthesized
  source 1..20: mol_type = other DNA
cattaaaataattcaaccat

SEQ ID NO: 61094 - DNA, 20 bp, synthetic construct
  misc_feature 1..20: note = chemically synthesized
  source 1..20: mol_type = other DNA
attggtatccccacttaaag

SEQ ID NO: 61095 - DNA, 20 bp, synthetic construct
  misc_feature 1..20: note = chemically synthesized
  source 1..20: mol_type = other DNA
aaagataaattgctttgcta

SEQ ID NO: 61096 - DNA, 20 bp, synthetic construct
  misc_feature 1..20: note = chemically synthesized
  source 1..20: mol_type = other DNA
cgcagccaataagtggaagg

SEQ ID NO: 61097 - DNA, 20 bp, synthetic construct
  misc_feature 1..20: note = chemically synthesized
  source 1..20: mol_type = other DNA
gaagcctacagaacacttaa

SEQ ID NO: 61098 - DNA, 20 bp, synthetic construct
  misc_feature 1..20: note = chemically synthesized
  source 1..20: mol_type = other DNA
tggttgaagatgcaacaaat

SEQ ID NO: 61099 - DNA, 20 bp, synthetic construct
  misc_feature 1..20: note = chemically synthesized
  source 1..20: mol_type = other DNA
cagaggaaaaaacaaagaaa

SEQ ID NO: 61100 - DNA, 20 bp, synthetic construct
  misc_feature 1..20: note = chemically synthesized
  source 1..20: mol_type = other DNA
aaaaacaaagaaagagagtt

SEQ ID NO: 61101 - DNA, 20 bp, synthetic construct
  misc_feature 1..20: note = chemically synthesized
  source 1..20: mol_type = other DNA
aaagagagttctgagtgagc

SEQ ID NO: 61102 - DNA, 20 bp, synthetic construct
  misc_feature 1..20: note = chemically synthesized
  source 1..20: mol_type = other DNA
agcaaagaaccaagtgaagc

SEQ ID NO: 61103 - DNA, 20 bp, synthetic construct
  misc_feature 1..20: note = chemically synthesized
  source 1..20: mol_type = other DNA
agtgaagcttgggttagttg

SEQ ID NO: 61104 - DNA, 20 bp, synthetic construct
  misc_feature 1..20: note = chemically synthesized
  source 1..20: mol_type = other DNA
ctggtagaagtgaaactttg

SEQ ID NO: 61105 - DNA, 20 bp, synthetic construct
  misc_feature 1..20: note = chemically synthesized
  source 1..20: mol_type = other DNA
gtctgattcctcacaaactg

SEQ ID NO: 61106 - DNA, 20 bp, synthetic construct
  misc_feature 1..20: note = chemically synthesized
  source 1..20: mol_type = other DNA
ttcctcacaaactgctgagt

SEQ ID NO: 61107 - DNA, 20 bp, synthetic construct
  misc_feature 1..20: note = chemically synthesized
  source 1..20: mol_type = other DNA
aagtgaaaaaaaatacattt

SEQ ID NO: 61108 - DNA, 20 bp, synthetic construct
  misc_feature 1..20: note = chemically synthesized
  source 1..20: mol_type = other DNA
attgtgcaagtgcctctatt

SEQ ID NO: 61109 - DNA, 20 bp, synthetic construct
  misc_feature 1..20: note = chemically synthesized
  source 1..20: mol_type = other DNA
aactccatcttaaataggag

SEQ ID NO: 61110 - DNA, 20 bp, synthetic construct
  misc_feature 1..20: note = chemically synthesized
  source 1..20: mol_type = other DNA
aagttaggcattctcagtca

SEQ ID NO: 61111 - DNA, 20 bp, synthetic construct
  misc_feature 1..20: note = chemically synthesized
  source 1..20: mol_type = other DNA
caccaaaccaagattgtgat

SEQ ID NO: 61112 - DNA, 20 bp, synthetic construct
  misc_feature 1..20: note = chemically synthesized
  source 1..20: mol_type = other DNA
gcggtctgaaaaggggaggc

SEQ ID NO: 61113 - DNA, 20 bp, synthetic construct
  misc_feature 1..20: note = chemically synthesized
  source 1..20: mol_type = other DNA
cctcaggactgttctgccta

SEQ ID NO: 61114 - DNA, 20 bp, synthetic construct
  misc_feature 1..20: note = chemically synthesized
  source 1..20: mol_type = other DNA
acttgctttcacttttctgt

SEQ ID NO: 61115 - DNA, 20 bp, synthetic construct
  misc_feature 1..20: note = chemically synthesized
  source 1..20: mol_type = other DNA
gaaatccaagaaccctctct

SEQ ID NO: 61116 - DNA, 20 bp, synthetic construct
  misc_feature 1..20: note = chemically synthesized
  source 1..20: mol_type = other DNA
caagaaccctctcttagggt

SEQ ID NO: 61117 - DNA, 20 bp, synthetic construct
  misc_feature 1..20: note = chemically synthesized
  source 1..20: mol_type = other DNA
accacattcctgagacttga

SEQ ID NO: 61118 - DNA, 20 bp, synthetic construct
  misc_feature 1..20: note = chemically synthesized
  source 1..20: mol_type = other DNA
gtctttggtctctgctgcta

SEQ ID NO: 61119 - DNA, 20 bp, synthetic construct
  misc_feature 1..20: note = chemically synthesized
  source 1..20: mol_type = other DNA
gcattttcaaactttgggag

SEQ ID NO: 61120 - DNA, 20 bp, synthetic construct
  misc_feature 1..20: note = chemically synthesized
  source 1..20: mol_type = other DNA
aactttgtgcctgttgtctc

SEQ ID NO: 61121 - DNA, 20 bp, synthetic construct
  misc_feature 1..20: note = chemically synthesized
  source 1..20: mol_type = other DNA
attgcacagagacccgtgct

SEQ ID NO: 61122 - DNA, 20 bp, synthetic construct
  misc_feature 1..20: note = chemically synthesized
  source 1..20: mol_type = other DNA
cagagacccgtgcttgggat

SEQ ID NO: 61123 - DNA, 20 bp, synthetic construct
  misc_feature 1..20: note = chemically synthesized
  source 1..20: mol_type = other DNA
taatttttattctaaagact

SEQ ID NO: 61124 - DNA, 20 bp, synthetic construct
  misc_feature 1..20: note = chemically synthesized
  source 1..20: mol_type = other DNA
ctaaagactttgaatctcaa

SEQ ID NO: 61125 - DNA, 20 bp, synthetic construct
  misc_feature 1..20: note = chemically synthesized
  source 1..20: mol_type = other DNA
gcttttgccttccaggctgc

SEQ ID NO: 61126 - DNA, 20 bp, synthetic construct
  misc_feature 1..20: note = chemically synthesized
  source 1..20: mol_type = other DNA
ttttgtatttttattagaga

SEQ ID NO: 61127 - DNA, 20 bp, synthetic construct
  misc_feature 1..20: note = chemically synthesized
  source 1..20: mol_type = other DNA
gcctcagccacccaaagtgc

SEQ ID NO: 61128 - DNA, 20 bp, synthetic construct
  misc_feature 1..20: note = chemically synthesized
  source 1..20: mol_type = other DNA
aaagtgctgggattacaggc

SEQ ID NO: 61129 - DNA, 20 bp, synthetic construct
  misc_feature 1..20: note = chemically synthesized
  source 1..20: mol_type = other DNA
actgtttcttattttgccca

SEQ ID NO: 61130 - DNA, 20 bp, synthetic construct
  misc_feature 1..20: note = chemically synthesized
  source 1..20: mol_type = other DNA
ctgattacctggctgctcca

SEQ ID NO: 61131 - DNA, 20 bp, synthetic construct
  misc_feature 1..20: note = chemically synthesized
  source 1..20: mol_type = other DNA
ttcagaacccaagaggtaag

SEQ ID NO: 61132 - DNA, 20 bp, synthetic construct
  misc_feature 1..20: note = chemically synthesized
  source 1..20: mol_type = other DNA
gaggtaagcagagttcctct

SEQ ID NO: 61133 - DNA, 20 bp, synthetic construct
  misc_feature 1..20: note = chemically synthesized
  source 1..20: mol_type = other DNA
tctataatgtgctagacaat

SEQ ID NO: 61134 - DNA, 20 bp, synthetic construct
  misc_feature 1..20: note = chemically synthesized
  source 1..20: mol_type = other DNA
gtgggtaatggaggtgatgc

SEQ ID NO: 61135 - DNA, 20 bp, synthetic construct
  misc_feature 1..20: note = chemically synthesized
  source 1..20: mol_type = other DNA
gacaatttaaatgtatcagt

SEQ ID NO: 61136 - DNA, 20 bp, synthetic construct
  misc_feature 1..20: note = chemically synthesized
  source 1..20: mol_type = other DNA
tttaaatgtatcagtttggg

SEQ ID NO: 61137 - DNA, 20 bp, synthetic construct
  misc_feature 1..20: note = chemically synthesized
  source 1..20: mol_type = other DNA
agtttgggttgaataaaatc

SEQ ID NO: 61138 - DNA, 20 bp, synthetic construct
  misc_feature 1..20: note = chemically synthesized
  source 1..20: mol_type = other DNA
atggttgctgactggcagac

SEQ ID NO: 61139 - DNA, 20 bp, synthetic construct
  misc_feature 1..20: note = chemically synthesized
  source 1..20: mol_type = other DNA
tgctgactggcagaccagaa

SEQ ID NO: 61140 - DNA, 20 bp, synthetic construct
  misc_feature 1..20: note = chemically synthesized
  source 1..20: mol_type = other DNA
tggttcactagatgtttcca

SEQ ID NO: 61141 - DNA, 20 bp, synthetic construct
  misc_feature 1..20: note = chemically synthesized
  source 1..20: mol_type = other DNA
cagttgtgataagctaccac

SEQ ID NO: 61142 - DNA, 20 bp, synthetic construct
  misc_feature 1..20: note = chemically synthesized
  source 1..20: mol_type = other DNA
tattgacacatttggtttta

SEQ ID NO: 61143 - DNA, 20 bp, synthetic construct
  misc_feature 1..20: note = chemically synthesized
  source 1..20: mol_type = other DNA
ccaagattcattgctgtgac

SEQ ID NO: 61144 - DNA, 20 bp, synthetic construct
  misc_feature 1..20: note = chemically synthesized
  source 1..20: mol_type = other DNA
aacacatgctcaggaaggaa

SEQ ID NO: 61145 - DNA, 20 bp, synthetic construct
  misc_feature 1..20: note = chemically synthesized
  source 1..20: mol_type = other DNA
gactttgatcattcactttg

SEQ ID NO: 61146 - DNA, 20 bp, synthetic construct
  misc_feature 1..20: note = chemically synthesized
  source 1..20: mol_type = other DNA
gaagagtcttctgtcatatg

SEQ ID NO: 61147 - DNA, 20 bp, synthetic construct
  misc_feature 1..20: note = chemically synthesized
  source 1..20: mol_type = other DNA
aacagcttagagggctgcct

SEQ ID NO: 61148 - DNA, 20 bp, synthetic construct
  misc_feature 1..20: note = chemically synthesized
  source 1..20: mol_type = other DNA
agatattcagagatgcacat

SEQ ID NO: 61149 - DNA, 20 bp, synthetic construct
  misc_feature 1..20: note = chemically synthesized
  source 1..20: mol_type = other DNA
ttcagagatgcacatgagga

SEQ ID NO: 61150 - DNA, 20 bp, synthetic construct
  misc_feature 1..20: note = chemically synthesized
  source 1..20: mol_type = other DNA
gtttattttttcatttaata

SEQ ID NO: 61151 - DNA, 20 bp, synthetic construct
  misc_feature 1..20: note = chemically synthesized
  source 1..20: mol_type = other DNA
tgcttaaagctggcatgtag

SEQ ID NO: 61152 - DNA, 20 bp, synthetic construct
  misc_feature 1..20: note = chemically synthesized
  source 1..20: mol_type = other DNA
cagcaaggagactgaccatt

SEQ ID NO: 61153 - DNA, 20 bp, synthetic construct
  misc_feature 1..20: note = chemically synthesized
  source 1..20: mol_type = other DNA
ttgagaattacaaatatggc

SEQ ID NO: 61154 - DNA, 20 bp, synthetic construct
  misc_feature 1..20: note = chemically synthesized
  source 1..20: mol_type = other DNA
ttgagatacctcttccttta

SEQ ID NO: 61155 - DNA, 20 bp, synthetic construct
  misc_feature 1..20: note = chemically synthesized
  source 1..20: mol_type = other DNA
tcgaccttattgcaaccatg

SEQ ID NO: 61156 - DNA, 20 bp, synthetic construct
  misc_feature 1..20: note = chemically synthesized
  source 1..20: mol_type = other DNA
aggtccacatcacataatat

SEQ ID NO: 61157 - DNA, 20 bp, synthetic construct
  misc_feature 1..20: note = chemically synthesized
  source 1..20: mol_type = other DNA
ccacatcacataatatgtgg

SEQ ID NO: 61158 - DNA, 20 bp, synthetic construct
  misc_feature 1..20: note = chemically synthesized
  source 1..20: mol_type = other DNA
gcttctcctcctttacagaa

SEQ ID NO: 61159 - DNA, 20 bp, synthetic construct
  misc_feature 1..20: note = chemically synthesized
  source 1..20: mol_type = other DNA
cctcctttacagaaatgggt

SEQ ID NO: 61160 - DNA, 20 bp, synthetic construct
  misc_feature 1..20: note = chemically synthesized
  source 1..20: mol_type = other DNA
tttatacctgccatgtcatg

SEQ ID NO: 61161 - DNA, 20 bp, synthetic construct
  misc_feature 1..20: note = chemically synthesized
  source 1..20: mol_type = other DNA
atgtcatgctgagtgggggc

SEQ ID NO: 61162 - DNA, 20 bp, synthetic construct
  misc_feature 1..20: note = chemically synthesized
  source 1..20: mol_type = other DNA
tattgtacactaaatatagt

SEQ ID NO: 61163 - DNA, 20 bp, synthetic construct
  misc_feature 1..20: note = chemically synthesized
  source 1..20: mol_type = other DNA
atatggtccctagtttttaa

SEQ ID NO: 61164 - DNA, 20 bp, synthetic construct
  misc_feature 1..20: note = chemically synthesized
  source 1..20: mol_type = other DNA
actttcccgctttccaataa

SEQ ID NO: 61165 - DNA, 20 bp, synthetic construct
  misc_feature 1..20: note = chemically synthesized
  source 1..20: mol_type = other DNA
acaagcaaatggccaaatgg

SEQ ID NO: 61166 - DNA, 20 bp, synthetic construct
  misc_feature 1..20: note = chemically synthesized
  source 1..20: mol_type = other DNA
tgcttggtttaataaaagta

SEQ ID NO: 61167 - DNA, 20 bp, synthetic construct
  misc_feature 1..20: note = chemically synthesized
  source 1..20: mol_type = other DNA
agtgagtgtacctcatggag

SEQ ID NO: 61168 - DNA, 20 bp, synthetic construct
  misc_feature 1..20: note = chemically synthesized
  source 1..20: mol_type = other DNA
tggcgcttttgtgtgagaga

SEQ ID NO: 61169 - DNA, 20 bp, synthetic construct
  misc_feature 1..20: note = chemically synthesized
  source 1..20: mol_type = other DNA
aggaacaattaattggtgat

SEQ ID NO: 61170 - DNA, 20 bp, synthetic construct
  misc_feature 1..20: note = chemically synthesized
  source 1..20: mol_type = other DNA
tgtgtgtgtgtgtgtgtgtg

SEQ ID NO: 61171 - DNA, 20 bp, synthetic construct
  misc_feature 1..20: note = chemically synthesized
  source 1..20: mol_type = other DNA
gtgtgtgtgtgtgtgagggg

SEQ ID NO: 61172 - DNA, 20 bp, synthetic construct
  misc_feature 1..20: note = chemically synthesized
  source 1..20: mol_type = other DNA
atcattctgttcgtaaaact

SEQ ID NO: 61173 - DNA, 20 bp, synthetic construct
  misc_feature 1..20: note = chemically synthesized
  source 1..20: mol_type = other DNA
ctttgagttttgaagacact

SEQ ID NO: 61174 - DNA, 20 bp, synthetic construct
  misc_feature 1..20: note = chemically synthesized
  source 1..20: mol_type = other DNA
ccttaagctttctctcatgg

SEQ ID NO: 61175 - DNA, 20 bp, synthetic construct
  misc_feature 1..20: note = chemically synthesized
  source 1..20: mol_type = other DNA
aaaacttaatttacaaaagc

SEQ ID NO: 61176 - DNA, 20 bp, synthetic construct
  misc_feature 1..20: note = chemically synthesized
  source 1..20: mol_type = other DNA
agaggacttcaaagcccatg

SEQ ID NO: 61177 - DNA, 20 bp, synthetic construct
  misc_feature 1..20: note = chemically synthesized
  source 1..20: mol_type = other DNA
aatcagatgggggaagacag

SEQ ID NO: 61178 - DNA, 20 bp, synthetic construct
  misc_feature 1..20: note = chemically synthesized
  source 1..20: mol_type = other DNA
cttcgtagttgattatggct

SEQ ID NO: 61179 - DNA, 20 bp, synthetic construct
  misc_feature 1..20: note = chemically synthesized
  source 1..20: mol_type = other DNA
gcatccagcaccattttcat

SEQ ID NO: 61180 - DNA, 20 bp, synthetic construct
  misc_feature 1..20: note = chemically synthesized
  source 1..20: mol_type = other DNA
cccatcccccgacagaaaca

SEQ ID NO: 61181 - DNA, 20 bp, synthetic construct
  misc_feature 1..20: note = chemically synthesized
  source 1..20: mol_type = other DNA
gatccactatcactctctat

SEQ ID NO: 61182 - DNA, 20 bp, synthetic construct
  misc_feature 1..20: note = chemically synthesized
  source 1..20: mol_type = other DNA
gcagtgctgatagctcagca

SEQ ID NO: 61183 - DNA, 20 bp, synthetic construct
  misc_feature 1..20: note = chemically synthesized
  source 1..20: mol_type = other DNA
tctctctgactttggtttat

SEQ ID NO: 61184 - DNA, 20 bp, synthetic construct
  misc_feature 1..20: note = chemically synthesized
  source 1..20: mol_type = other DNA
ggatttgcatacattttctg

SEQ ID NO: 61185 - DNA, 20 bp, synthetic construct
  misc_feature 1..20: note = chemically synthesized
  source 1..20: mol_type = other DNA
tggatactaggctcatttct

SEQ ID NO: 61186 - DNA, 20 bp, synthetic construct
  misc_feature 1..20: note = chemically synthesized
  source 1..20: mol_type = other DNA
actctaacttcatctttttt

SEQ ID NO: 61187 - DNA, 20 bp, synthetic construct
  misc_feature 1..20: note = chemically synthesized
  source 1..20: mol_type = other DNA
aggaaatagataatccaaac

SEQ ID NO: 61188 - DNA, 20 bp, synthetic construct
  misc_feature 1..20: note = chemically synthesized
  source 1..20: mol_type = other DNA
agatatcattctgtattccc

SEQ ID NO: 61189 - DNA, 20 bp, synthetic construct
  misc_feature 1..20: note = chemically synthesized
  source 1..20: mol_type = other DNA
ctaactagatcactctgcta

SEQ ID NO: 61190 - DNA, 20 bp, synthetic construct
  misc_feature 1..20: note = chemically synthesized
  source 1..20: mol_type = other DNA
agggaatgaaaaaggagatc

SEQ ID NO: 61191 - DNA, 20 bp, synthetic construct
  misc_feature 1..20: note = chemically synthesized
  source 1..20: mol_type = other DNA
tctaggattttccctcttct

SEQ ID NO: 61192 - DNA, 20 bp, synthetic construct
  misc_feature 1..20: note = chemically synthesized
  source 1..20: mol_type = other DNA
gccaagttctaaagatttta

SEQ ID NO: 61193 - DNA, 20 bp, synthetic construct
  misc_feature 1..20: note = chemically synthesized
  source 1..20: mol_type = other DNA
taaagattttagggagtctt

SEQ ID NO: 61194 - DNA, 20 bp, synthetic construct
  misc_feature 1..20: note = chemically synthesized
  source 1..20: mol_type = other DNA
gcctctaggccaagacacac

SEQ ID NO: 61195 - DNA, 20 bp, synthetic construct
  misc_feature 1..20: note = chemically synthesized
  source 1..20: mol_type = other DNA
ccctaagcctggtcaagata

SEQ ID NO: 61196 - DNA, 20 bp, synthetic construct
  misc_feature 1..20: note = chemically synthesized
  source 1..20: mol_type = other DNA
ttctttattctcccagcctg

SEQ ID NO: 61197 - DNA, 20 bp, synthetic construct
  misc_feature 1..20: note = chemically synthesized
  source 1..20: mol_type = other DNA
gggatttagaactttggaac

SEQ ID NO: 61198 - DNA, 20 bp, synthetic construct
  misc_feature 1..20: note = chemically synthesized
  source 1..20: mol_type = other DNA
ttcttcctgcatctaggtta

SEQ ID NO: 61199 - DNA, 20 bp, synthetic construct
  misc_feature 1..20: note = chemically synthesized
  source 1..20: mol_type = other DNA
atttattttaagcatcacat

SEQ ID NO: 61200 - DNA, 20 bp, synthetic construct
  misc_feature 1..20: note = chemically synthesized
  source 1..20: mol_type = other DNA
ggtagaaaagaaaatgtagg

SEQ ID NO: 61201 - DNA, 20 bp, synthetic construct
  misc_feature 1..20: note = chemically synthesized
  source 1..20: mol_type = other DNA
tattattatactttaagttt

SEQ ID NO: 61202 - DNA, 20 bp, synthetic construct
  misc_feature 1..20: note = chemically synthesized
  source 1..20: mol_type = other DNA
tcattgttcaattcccacct

SEQ ID NO: 61203 - DNA, 20 bp, synthetic construct
  misc_feature 1..20: note = chemically synthesized
  source 1..20: mol_type = other DNA
tgtccttgcgatagtttgct

SEQ ID NO: 61204 - DNA, 20 bp, synthetic construct
  misc_feature 1..20: note = chemically synthesized
  source 1..20: mol_type = other DNA
agtctatcattgttggacat

SEQ ID NO: 61205 - DNA, 20 bp, synthetic construct
  misc_feature 1..20: note = chemically synthesized
  source 1..20: mol_type = other DNA
ggttccaagtctttgctatt

SEQ ID NO: 61206 - DNA, 20 bp, synthetic construct
  misc_feature 1..20: note = chemically synthesized
  source 1..20: mol_type = other DNA
gcagcatgatttataatcct

SEQ ID NO: 61207 - DNA, 20 bp, synthetic construct
  misc_feature 1..20: note = chemically synthesized
  source 1..20: mol_type = other DNA
tttgagtatgtacccagtaa

SEQ ID NO: 61208 - DNA, 20 bp, synthetic construct
  misc_feature 1..20: note = chemically synthesized
  source 1..20: mol_type = other DNA
tgtacccagtaatgggatgg

SEQ ID NO: 61209 - DNA, 20 bp, synthetic construct
  misc_feature 1..20: note = chemically synthesized
  source 1..20: mol_type = other DNA
tttctagttctagatccctg

SEQ ID NO: 61210 - DNA, 20 bp, synthetic construct
  misc_feature 1..20: note = chemically synthesized
  source 1..20: mol_type = other DNA
atcctttgcccactttttga

SEQ ID NO: 61211 - DNA, 20 bp, synthetic construct
  misc_feature 1..20: note = chemically synthesized
  source 1..20: mol_type = other DNA
tttttttcttgtaaatttgt

SEQ ID NO: 61212 - DNA, 20 bp, synthetic construct
  misc_feature 1..20: note = chemically synthesized
  source 1..20: mol_type = other DNA
gtttgagttcatcatagatt

SEQ ID NO: 61213 - DNA, 20 bp, synthetic construct
  misc_feature 1..20: note = chemically synthesized
  source 1..20: mol_type = other DNA
ttctggatattagccctttg

SEQ ID NO: 61214 - DNA, 20 bp, synthetic construct
  misc_feature 1..20: note = chemically synthesized
  source 1..20: mol_type = other DNA
ggatattagccctttgtcgg

SEQ ID NO: 61215 - DNA, 20 bp, synthetic construct
  misc_feature 1..20: note = chemically synthesized
  source 1..20: mol_type = other DNA
tccttgcccatgcctatgtc

SEQ ID NO: 61216 - DNA, 20 bp, synthetic construct
  misc_feature 1..20: note = chemically synthesized
  source 1..20: mol_type = other DNA
gtattgcctaggttttcttc

SEQ ID NO: 61217 - DNA, 20 bp, synthetic construct
  misc_feature 1..20: note = chemically synthesized
  source 1..20: mol_type = other DNA
atttaagtctgtaatccatc

SEQ ID NO: 61218 - DNA, 20 bp, synthetic construct
  misc_feature 1..20: note = chemically synthesized
  source 1..20: mol_type = other DNA
ttttgtataaggtgtaagaa

SEQ ID NO: 61219 - DNA, 20 bp, synthetic construct
  misc_feature 1..20: note = chemically synthesized
  source 1..20: mol_type = other DNA
ccagcaccatttattaaata

SEQ ID NO: 61220 - DNA, 20 bp, synthetic construct
  misc_feature 1..20: note = chemically synthesized
  source 1..20: mol_type = other DNA
ccagctttgttcttttggct

SEQ ID NO: 61221 - DNA, 20 bp, synthetic construct
  misc_feature 1..20: note = chemically synthesized
  source 1..20: mol_type = other DNA
aaagtcattggtagcttgat

SEQ ID NO: 61222 - DNA, 20 bp, synthetic construct
  misc_feature 1..20: note = chemically synthesized
  source 1..20: mol_type = other DNA
gtagcttgatggggatggca

SEQ ID NO: 61223 - DNA, 20 bp, synthetic construct
  misc_feature 1..20: note = chemically synthesized
  source 1..20: mol_type = other DNA
attcttcctacccatgagca

SEQ ID NO: 61224 - DNA, 20 bp, synthetic construct
  misc_feature 1..20: note = chemically synthesized
  source 1..20: mol_type = other DNA
tccttcacctctcttgtaag

SEQ ID NO: 61225 - DNA, 20 bp, synthetic construct
  misc_feature 1..20: note = chemically synthesized
  source 1..20: mol_type = other DNA
ttattctctttgaagcaatt

SEQ ID NO: 61226 - DNA, 20 bp, synthetic construct
  misc_feature 1..20: note = chemically synthesized
  source 1..20: mol_type = other DNA
tctttgaagcaattgtgaat

SEQ ID NO: 61227 - DNA, 20 bp, synthetic construct
  misc_feature 1..20: note = chemically synthesized
  source 1..20: mol_type = other DNA
tttgtctgttattggtgtat

SEQ ID NO: 61228 - DNA, 20 bp, synthetic construct
  misc_feature 1..20: note = chemically synthesized
  source 1..20: mol_type = other DNA
gacattttgggctgagacag

SEQ ID NO: 61229 - DNA, 20 bp, synthetic construct
  misc_feature 1..20: note = chemically synthesized
  source 1..20: mol_type = other DNA
ttgacttcctcttttcctaa

SEQ ID NO: 61230 - DNA, 20 bp, synthetic construct
  misc_feature 1..20: note = chemically synthesized
  source 1..20: mol_type = other DNA
ccagaaattccaacactatg

SEQ ID NO: 61231 - DNA, 20 bp, synthetic construct
  misc_feature 1..20: note = chemically synthesized
  source 1..20: mol_type = other DNA
attccaacactatgttgaat

SEQ ID NO: 61232 - DNA, 20 bp, synthetic construct
  misc_feature 1..20: note = chemically synthesized
  source 1..20: mol_type = other DNA
gtcttgtgccagttttcaaa

SEQ ID NO: 61233 - DNA, 20 bp, synthetic construct
  misc_feature 1..20: note = chemically synthesized
  source 1..20: mol_type = other DNA
cattcagtatgatattggct

SEQ ID NO: 61234 - DNA, 20 bp, synthetic construct
  misc_feature 1..20: note = chemically synthesized
  source 1..20: mol_type = other DNA
ccatcaatacctaatttatt

SEQ ID NO: 61235 - DNA, 20 bp, synthetic construct
  misc_feature 1..20: note = chemically synthesized
  source 1..20: mol_type = other DNA
tattgagagtttttagcatg

SEQ ID NO: 61236 - DNA, 20 bp, synthetic construct
  misc_feature 1..20: note = chemically synthesized
  source 1..20: mol_type = other DNA
gtttttagcatgaagggttg

SEQ ID NO: 61237 - DNA, 20 bp, synthetic construct
  misc_feature 1..20: note = chemically synthesized
  source 1..20: mol_type = other DNA
tctttggttctgtttatatg

SEQ ID NO: 61238 - DNA, 20 bp, synthetic construct
  misc_feature 1..20: note = chemically synthesized
  source 1..20: mol_type = other DNA
ttgaaccagccttgcatccc

SEQ ID NO: 61239 - DNA, 20 bp, synthetic construct
  misc_feature 1..20: note = chemically synthesized
  source 1..20: mol_type = other DNA
atgaagcccacttgatcatg

SEQ ID NO: 61240 - DNA, 20 bp, synthetic construct
  misc_feature 1..20: note = chemically synthesized
  source 1..20: mol_type = other DNA
tgatcatggtggataagctt

SEQ ID NO: 61241 - DNA, 20 bp, synthetic construct
  misc_feature 1..20: note = chemically synthesized
  source 1..20: mol_type = other DNA
ataagcttttggatgtgctg

SEQ ID NO: 61242 - DNA, 20 bp, synthetic construct
  misc_feature 1..20: note = chemically synthesized
  source 1..20: mol_type = other DNA
tttttgcatcgatgtccatc

SEQ ID NO: 61243 - DNA, 20 bp, synthetic construct
  misc_feature 1..20: note = chemically synthesized
  source 1..20: mol_type = other DNA
tctctgcccggctttggtat

SEQ ID NO: 61244 - DNA, 20 bp, synthetic construct
  misc_feature 1..20: note = chemically synthesized
  source 1..20: mol_type = other DNA
gatgatgctggcctcataaa

SEQ ID NO: 61245 - DNA, 20 bp, synthetic construct
  misc_feature 1..20: note = chemically synthesized
  source 1..20: mol_type = other DNA
gcctcataaaatgagttagg

SEQ ID NO: 61246 - DNA, 20 bp, synthetic construct
  misc_feature 1..20: note = chemically synthesized
  source 1..20: mol_type = other DNA
ttccctcttttactattgat

SEQ ID NO: 61247 - DNA, 20 bp, synthetic construct
  misc_feature 1..20: note = chemically synthesized
  source 1..20: mol_type = other DNA
ttgattcgaatagtttcaga

SEQ ID NO: 61248 - DNA, 20 bp, synthetic construct
  misc_feature 1..20: note = chemically synthesized
  source 1..20: mol_type = other DNA
gctcctccttgtacctctgg

SEQ ID NO: 61249 - DNA, 20 bp, synthetic construct
  misc_feature 1..20: note = chemically synthesized
  source 1..20: mol_type = other DNA
tcttcctggtttagtcttgg

SEQ ID NO: 61250 - DNA, 20 bp, synthetic construct
  misc_feature 1..20: note = chemically synthesized
  source 1..20: mol_type = other DNA
ttgggagggtgtatgtgtca

SEQ ID NO: 61251 - DNA, 20 bp, synthetic construct
  misc_feature 1..20: note = chemically synthesized
  source 1..20: mol_type = other DNA
gatggtggtttgtatttctg

SEQ ID NO: 61252 - DNA, 20 bp, synthetic construct
  misc_feature 1..20: note = chemically synthesized
  source 1..20: mol_type = other DNA
tctttttgaaaaaccagctt

SEQ ID NO: 61253 - DNA, 20 bp, synthetic construct
  misc_feature 1..20: note = chemically synthesized
  source 1..20: mol_type = other DNA
ctggattcattgattttttg

SEQ ID NO: 61254 - DNA, 20 bp, synthetic construct
  misc_feature 1..20: note = chemically synthesized
  source 1..20: mol_type = other DNA
ttcttgccttctgctagcat

SEQ ID NO: 61255 - DNA, 20 bp, synthetic construct
  misc_feature 1..20: note = chemically synthesized
  source 1..20: mol_type = other DNA
agttcttttaattgtgatgt

SEQ ID NO: 61256 - DNA, 20 bp, synthetic construct
  misc_feature 1..20: note = chemically synthesized
  source 1..20: mol_type = other DNA
atttccctctacacactgct

SEQ ID NO: 61257 - DNA, 20 bp, synthetic construct
  misc_feature 1..20: note = chemically synthesized
  source 1..20: mol_type = other DNA
ttccatgtagttgagcggtt

SEQ ID NO: 61258 - DNA, 20 bp, synthetic construct
  misc_feature 1..20: note = chemically synthesized
  source 1..20: mol_type = other DNA
atgtagttgagcggttttga

SEQ ID NO: 61259 - DNA, 20 bp, synthetic construct
  misc_feature 1..20: note = chemically synthesized
  source 1..20: mol_type = other DNA
tttgagtgagtttcttaatc

SEQ ID NO: 61260 - DNA, 20 bp, synthetic construct
  misc_feature 1..20: note = chemically synthesized
  source 1..20: mol_type = other DNA
ctgttcttttacatttgctg

SEQ ID NO: 61261 - DNA, 20 bp, synthetic construct
  misc_feature 1..20: note = chemically synthesized
  source 1..20: mol_type = other DNA
tccaactatgtggtcaattt

SEQ ID NO: 61262 - DNA, 20 bp, synthetic construct
  misc_feature 1..20: note = chemically synthesized
  source 1..20: mol_type = other DNA
aggtgtggtgtggtgctgaa

SEQ ID NO: 61263 - DNA, 20 bp, synthetic construct
  misc_feature 1..20: note = chemically synthesized
  source 1..20: mol_type = other DNA
gaatgtatattctgttgatt

SEQ ID NO: 61264 - DNA, 20 bp, synthetic construct
  misc_feature 1..20: note = chemically synthesized
  source 1..20: mol_type = other DNA
tattctgttgatttggggtg

SEQ ID NO: 61265 - DNA, 20 bp, synthetic construct
  misc_feature 1..20: note = chemically synthesized
  source 1..20: mol_type = other DNA
taggtccgcttggtgcagag

SEQ ID NO: 61266 - DNA, 20 bp, synthetic construct
  misc_feature 1..20: note = chemically synthesized
  source 1..20: mol_type = other DNA
tgcagagctgagttcaattc

SEQ ID NO: 61267 - DNA, 20 bp, synthetic construct
  misc_feature 1..20: note = chemically synthesized
  source 1..20: mol_type = other DNA
gatctgtctaatgttgacag

SEQ ID NO: 61268 - DNA, 20 bp, synthetic construct
  misc_feature 1..20: note = chemically synthesized
  source 1..20: mol_type = other DNA
gtctcccattgttattgtgt

SEQ ID NO: 61269 - DNA, 20 bp, synthetic construct
  misc_feature 1..20: note = chemically synthesized
  source 1..20: mol_type = other DNA
taaggacttgctttatgaac

SEQ ID NO: 61270 - DNA, 20 bp, synthetic construct
  misc_feature 1..20: note = chemically synthesized
  source 1..20: mol_type = other DNA
tgaacctgggtgttcctgta

SEQ ID NO: 61271 - DNA, 20 bp, synthetic construct
  misc_feature 1..20: note = chemically synthesized
  source 1..20: mol_type = other DNA
gtattgggtgcatatatgtt

SEQ ID NO: 61272 - DNA, 20 bp, synthetic construct
  misc_feature 1..20: note = chemically synthesized
  source 1..20: mol_type = other DNA
aggatagttagctcttcttg

SEQ ID NO: 61273 - DNA, 20 bp, synthetic construct
  misc_feature 1..20: note = chemically synthesized
  source 1..20: mol_type = other DNA
aagcctgttttatcagagat

SEQ ID NO: 61274 - DNA, 20 bp, synthetic construct
  misc_feature 1..20: note = chemically synthesized
  source 1..20: mol_type = other DNA
tgtgtgtgtgtgcacatgag

SEQ ID NO: 61275 - DNA, 20 bp, synthetic construct
  misc_feature 1..20: note = chemically synthesized
  source 1..20: mol_type = other DNA
gtgcacatgagatgggtttc

SEQ ID NO: 61276 - DNA, 20 bp, synthetic construct
  misc_feature 1..20: note = chemically synthesized
  source 1..20: mol_type = other DNA
ttcctgaatacagcacactg

SEQ ID NO: 61277 - DNA, 20 bp, synthetic construct
  misc_feature 1..20: note = chemically synthesized
  source 1..20: mol_type = other DNA
taaggttaatattgttatgt

SEQ ID NO: 61278 - DNA, 20 bp, synthetic construct
  misc_feature 1..20: note = chemically synthesized
  source 1..20: mol_type = other DNA
acttatgaagcttagtttgg

SEQ ID NO: 61279 - DNA, 20 bp, synthetic construct
  misc_feature 1..20: note = chemically synthesized
  source 1..20: mol_type = other DNA
tgttgaaaattctttccttt

SEQ ID NO: 61280 - DNA, 20 bp, synthetic construct
  misc_feature 1..20: note = chemically synthesized
  source 1..20: mol_type = other DNA
aattctttcctttaaggatg

SEQ ID NO: 61281 - DNA, 20 bp, synthetic construct
  misc_feature 1..20: note = chemically synthesized
  source 1..20: mol_type = other DNA
ccccactctcttctggcttg

SEQ ID NO: 61282 - DNA, 20 bp, synthetic construct
  misc_feature 1..20: note = chemically synthesized
  source 1..20: mol_type = other DNA
attctgatgggcttcccttt

SEQ ID NO: 61283 - DNA, 20 bp, synthetic construct
  misc_feature 1..20: note = chemically synthesized
  source 1..20: mol_type = other DNA
ttcccttcatttcaactttg

SEQ ID NO: 61284 - DNA, 20 bp, synthetic construct
  misc_feature 1..20: note = chemically synthesized
  source 1..20: mol_type = other DNA
ccttgtagttgctcttctca

SEQ ID NO: 61285 - DNA, 20 bp, synthetic construct
  misc_feature 1..20: note = chemically synthesized
  source 1..20: mol_type = other DNA
tgtggcgttctctgtatttc

SEQ ID NO: 61286 - DNA, 20 bp, synthetic construct
  misc_feature 1..20: note = chemically synthesized
  source 1..20: mol_type = other DNA
gttctctgtatttcctgaat

SEQ ID NO: 61287 - DNA, 20 bp, synthetic construct
  misc_feature 1..20: note = chemically synthesized
  source 1..20: mol_type = other DNA
gctagattggggaagttctc

SEQ ID NO: 61288 - DNA, 20 bp, synthetic construct
  misc_feature 1..20: note = chemically synthesized
  source 1..20: mol_type = other DNA
ttctcctggataatatcctg

SEQ ID NO: 61289 - DNA, 20 bp, synthetic construct
  misc_feature 1..20: note = chemically synthesized
  source 1..20: mol_type = other DNA
ataccctttcttccagttga

SEQ ID NO: 61290 - DNA, 20 bp, synthetic construct
  misc_feature 1..20: note = chemically synthesized
  source 1..20: mol_type = other DNA
ccagttgatcgaatcagcta

SEQ ID NO: 61291 - DNA, 20 bp, synthetic construct
  misc_feature 1..20: note = chemically synthesized
  source 1..20: mol_type = other DNA
aggtttttaacttttttgcc

SEQ ID NO: 61292 - DNA, 20 bp, synthetic construct
  misc_feature 1..20: note = chemically synthesized
  source 1..20: mol_type = other DNA
tcgagcttcctcctttagct

SEQ ID NO: 61293 - DNA, 20 bp, synthetic construct
  misc_feature 1..20: note = chemically synthesized
  source 1..20: mol_type = other DNA
aggagaggcactctgatttt

SEQ ID NO: 61294 - DNA, 20 bp, synthetic construct
  misc_feature 1..20: note = chemically synthesized
  source 1..20: mol_type = other DNA
ttgatgatggtgacgtacag

SEQ ID NO: 61295 - DNA, 20 bp, synthetic construct
  misc_feature 1..20: note = chemically synthesized
  source 1..20: mol_type = other DNA
cgtacagatgggtttttggt

SEQ ID NO: 61296 - DNA, 20 bp, synthetic construct
  misc_feature 1..20: note = chemically synthesized
  source 1..20: mol_type = other DNA
attgacgcctatgtcactac

SEQ ID NO: 61297 - DNA, 20 bp, synthetic construct
  misc_feature 1..20: note = chemically synthesized
  source 1..20: mol_type = other DNA
ataacttttacagatgattt

SEQ ID NO: 61298 - DNA, 20 bp, synthetic construct
  misc_feature 1..20: note = chemically synthesized
  source 1..20: mol_type = other DNA
ttagacagatacaggactgc

SEQ ID NO: 61299 - DNA, 20 bp, synthetic construct
  misc_feature 1..20: note = chemically synthesized
  source 1..20: mol_type = other DNA
acttgaactagttgttgggc

SEQ ID NO: 61300 - DNA, 20 bp, synthetic construct
  misc_feature 1..20: note = chemically synthesized
  source 1..20: mol_type = other DNA
aactagttgttgggctgggg

SEQ ID NO: 61301 - DNA, 20 bp, synthetic construct
  misc_feature 1..20: note = chemically synthesized
  source 1..20: mol_type = other DNA
tgtggagaggacccaaatca

SEQ ID NO: 61302 - DNA, 20 bp, synthetic construct
  misc_feature 1..20: note = chemically synthesized
  source 1..20: mol_type = other DNA
aaatcagtgggtgttgctct

SEQ ID NO: 61303 - DNA, 20 bp, synthetic construct
  misc_feature 1..20: note = chemically synthesized
  source 1..20: mol_type = other DNA
ggtagttttccagtgttagc

SEQ ID NO: 61304 - DNA, 20 bp, synthetic construct
  misc_feature 1..20: note = chemically synthesized
  source 1..20: mol_type = other DNA
gtgttagcaaggatgcatcc

SEQ ID NO: 61305 - DNA, 20 bp, synthetic construct
  misc_feature 1..20: note = chemically synthesized
  source 1..20: mol_type = other DNA
gatgcatccatgagtttttt

SEQ ID NO: 61306 - DNA, 20 bp, synthetic construct
  misc_feature 1..20: note = chemically synthesized
  source 1..20: mol_type = other DNA
ctcagcttcgtcaaggtctc

SEQ ID NO: 61307 - DNA, 20 bp, synthetic construct
  misc_feature 1..20: note = chemically synthesized
  source 1..20: mol_type = other DNA
tgattgcttctaaacatcct

SEQ ID NO: 61308 - DNA, 20 bp, synthetic construct
  misc_feature 1..20: note = chemically synthesized
  source 1..20: mol_type = other DNA
cttctggaggacgttttcct

SEQ ID NO: 61309 - DNA, 20 bp, synthetic construct
  misc_feature 1..20: note = chemically synthesized
  source 1..20: mol_type = other DNA
ggacgttttcctgtgagtgg

SEQ ID NO: 61310 - DNA, 20 bp, synthetic construct
  misc_feature 1..20: note = chemically synthesized
  source 1..20: mol_type = other DNA
gaggggcgggaggaagtggg

SEQ ID NO: 61311 - DNA, 20 bp, synthetic construct
  misc_feature 1..20: note = chemically synthesized
  source 1..20: mol_type = other DNA
aagtggggaggatcatgagg

SEQ ID NO: 61312 - DNA, 20 bp, synthetic construct
  misc_feature 1..20: note = chemically synthesized
  source 1..20: mol_type = other DNA
agaaagggaggagagaaact

SEQ ID NO: 61313 - DNA, 20 bp, synthetic construct
  misc_feature 1..20: note = chemically synthesized
  source 1..20: mol_type = other DNA
cagtcaaatgtgtccattta

SEQ ID NO: 61314 - DNA, 20 bp, synthetic construct
  misc_feature 1..20: note = chemically synthesized
  source 1..20: mol_type = other DNA
tagcctgctatggcaggttt

SEQ ID NO: 61315 - DNA, 20 bp, synthetic construct
  misc_feature 1..20: note = chemically synthesized
  source 1..20: mol_type = other DNA
tttcaggatcactggaccta

SEQ ID NO: 61316 - DNA, 20 bp, synthetic construct
  misc_feature 1..20: note = chemically synthesized
  source 1..20: mol_type = other DNA
aggatcactggacctagagg

SEQ ID NO: 61317 - DNA, 20 bp, synthetic construct
  misc_feature 1..20: note = chemically synthesized
  source 1..20: mol_type = other DNA
ttgatgtggcttagatcccc

SEQ ID NO: 61318 - DNA, 20 bp, synthetic construct
  misc_feature 1..20: note = chemically synthesized
  source 1..20: mol_type = other DNA
aagcccaagggaagaaagaa

SEQ ID NO: 61319 - DNA, 20 bp, synthetic construct
  misc_feature 1..20: note = chemically synthesized
  source 1..20: mol_type = other DNA
tagcagacacacagaaagac

SEQ ID NO: 61320 - DNA, 20 bp, synthetic construct
  misc_feature 1..20: note = chemically synthesized
  source 1..20: mol_type = other DNA
agaagttctgtaatacagta

SEQ ID NO: 61321 - DNA, 20 bp, synthetic construct
  misc_feature 1..20: note = chemically synthesized
  source 1..20: mol_type = other DNA
aaatttcacacacagccaag

SEQ ID NO: 61322 - DNA, 20 bp, synthetic construct
  misc_feature 1..20: note = chemically synthesized
  source 1..20: mol_type = other DNA
ctgtgttatttatacatccc

SEQ ID NO: 61323 - DNA, 20 bp, synthetic construct
  misc_feature 1..20: note = chemically synthesized
  source 1..20: mol_type = other DNA
atccccacctttctgtgatg

SEQ ID NO: 61324 - DNA, 20 bp, synthetic construct
  misc_feature 1..20: note = chemically synthesized
  source 1..20: mol_type = other DNA
aggtgggcagccatagatca

SEQ ID NO: 61325 - DNA, 20 bp, synthetic construct
  misc_feature 1..20: note = chemically synthesized
  source 1..20: mol_type = other DNA
ggcatccagctgactggtca

SEQ ID NO: 61326 - DNA, 20 bp, synthetic construct
  misc_feature 1..20: note = chemically synthesized
  source 1..20: mol_type = other DNA
ataccctgtattttggtcaa

SEQ ID NO: 61327 - DNA, 20 bp, synthetic construct
  misc_feature 1..20: note = chemically synthesized
  source 1..20: mol_type = other DNA
attaatttaaaacttatcat

SEQ ID NO: 61328 - DNA, 20 bp, synthetic construct
  misc_feature 1..20: note = chemically synthesized
  source 1..20: mol_type = other DNA
taaaacttatcatttgagtc

SEQ ID NO: 61329 - DNA, 20 bp, synthetic construct
  misc_feature 1..20: note = chemically synthesized
  source 1..20: mol_type = other DNA
tctcatgcctagactctgaa

SEQ ID NO: 61330 - DNA, 20 bp, synthetic construct
  misc_feature 1..20: note = chemically synthesized
  source 1..20: mol_type = other DNA
tctctctgttcagtagtaac

SEQ ID NO: 61331 - DNA, 20 bp, synthetic construct
  misc_feature 1..20: note = chemically synthesized
  source 1..20: mol_type = other DNA
actatcaagacaatggtcat

SEQ ID NO: 61332 - DNA, 20 bp, synthetic construct
  misc_feature 1..20: note = chemically synthesized
  source 1..20: mol_type = other DNA
ctttccctagactcatcatt

SEQ ID NO: 61333 - DNA, 20 bp, synthetic construct
  misc_feature 1..20: note = chemically synthesized
  source 1..20: mol_type = other DNA
gctccatatatgcaagagaa

SEQ ID NO: 61334 - DNA, 20 bp, synthetic construct
  misc_feature 1..20: note = chemically synthesized
  source 1..20: mol_type = other DNA
gtgacccaaatcatagaccc

SEQ ID NO: 61335 - DNA, 20 bp, synthetic construct
  misc_feature 1..20: note = chemically synthesized
  source 1..20: mol_type = other DNA
ttaaatatatataatagtgt

SEQ ID NO: 61336 - DNA, 20 bp, synthetic construct
  misc_feature 1..20: note = chemically synthesized
  source 1..20: mol_type = other DNA
ccataagctaatcaaacaat

SEQ ID NO: 61337 - DNA, 20 bp, synthetic construct
  misc_feature 1..20: note = chemically synthesized
  source 1..20: mol_type = other DNA
acaaatcagcaatagacagg

SEQ ID NO: 61338 - DNA, 20 bp, synthetic construct
  misc_feature 1..20: note = chemically synthesized
  source 1..20: mol_type = other DNA
aataatgttctaagtagcag

SEQ ID NO: 61339 - DNA, 20 bp, synthetic construct
  misc_feature 1..20: note = chemically synthesized
  source 1..20: mol_type = other DNA
tgatttccactgaaatgctc

SEQ ID NO: 61340 - DNA, 20 bp, synthetic construct
  misc_feature 1..20: note = chemically synthesized
  source 1..20: mol_type = other DNA
tgtcatcctgtccaggtccc

SEQ ID NO: 61341 - DNA, 20 bp, synthetic construct
  misc_feature 1..20: note = chemically synthesized
  source 1..20: mol_type = other DNA
agtgaaacaatgtcatgctc

SEQ ID NO: 61342 - DNA, 20 bp, synthetic construct
  misc_feature 1..20: note = chemically synthesized
  source 1..20: mol_type = other DNA
atgctctagagtgaggcaga

SEQ ID NO: 61343 - DNA, 20 bp, synthetic construct
  misc_feature 1..20: note = chemically synthesized
  source 1..20: mol_type = other DNA
aataaacgaagtatgccact

SEQ ID NO: 61344 - DNA, 20 bp, synthetic construct
  misc_feature 1..20: note = chemically synthesized
  source 1..20: mol_type = other DNA
agttttaatgctatagataa

SEQ ID NO: 61345 - DNA, 20 bp, synthetic construct
  misc_feature 1..20: note = chemically synthesized
  source 1..20: mol_type = other DNA
ataaaaggtgggaaaaggaa

SEQ ID NO: 61346 - DNA, 20 bp, synthetic construct
  misc_feature 1..20: note = chemically synthesized
  source 1..20: mol_type = other DNA
ggaacatgctttccaaacct

SEQ ID NO: 61347 - DNA, 20 bp, synthetic construct
  misc_feature 1..20: note = chemically synthesized
  source 1..20: mol_type = other DNA
actacagtgacatagaagac

SEQ ID NO: 61348 - DNA, 20 bp, synthetic construct
  misc_feature 1..20: note = chemically synthesized
  source 1..20: mol_type = other DNA
ccaatgcccatgacagtctt

SEQ ID NO: 61349 - DNA, 20 bp, synthetic construct
  misc_feature 1..20: note = chemically synthesized
  source 1..20: mol_type = other DNA
cattgcaaataaaactacaa

SEQ ID NO: 61350 - DNA, 20 bp, synthetic construct
  misc_feature 1..20: note = chemically synthesized
  source 1..20: mol_type = other DNA
ggtgtagacagaaagcatgg

SEQ ID NO: 61351 - DNA, 20 bp, synthetic construct
  misc_feature 1..20: note = chemically synthesized
  source 1..20: mol_type = other DNA
agaaagcatgggagagtaca

SEQ ID NO: 61352 - DNA, 20 bp, synthetic construct
  misc_feature 1..20: note = chemically synthesized
  source 1..20: mol_type = other DNA
cgcacaccaatcttcattac

SEQ ID NO: 61353 - DNA, 20 bp, synthetic construct
  misc_feature 1..20: note = chemically synthesized
  source 1..20: mol_type = other DNA
ttcattacctgggtgttggt

SEQ ID NO: 61354 - DNA, 20 bp, synthetic construct
  misc_feature 1..20: note = chemically synthesized
  source 1..20: mol_type = other DNA
gaggtatatcttaaggggct

SEQ ID NO: 61355 - DNA, 20 bp, synthetic construct
  misc_feature 1..20: note = chemically synthesized
  source 1..20: mol_type = other DNA
acacctgactccatgacaga

SEQ ID NO: 61356 - DNA, 20 bp, synthetic construct
  misc_feature 1..20: note = chemically synthesized
  source 1..20: mol_type = other DNA
gactccatgacagaaagagt

SEQ ID NO: 61357 - DNA, 20 bp, synthetic construct
  misc_feature 1..20: note = chemically synthesized
  source 1..20: mol_type = other DNA
tcattcctgatgagaaagag

SEQ ID NO: 61358 - DNA, 20 bp, synthetic construct
  misc_feature 1..20: note = chemically synthesized
  source 1..20: mol_type = other DNA
gagatgtaggctgccaataa

SEQ ID NO: 61359 - DNA, 20 bp, synthetic construct
  misc_feature 1..20: note = chemically synthesized
  source 1..20: mol_type = other DNA
tgtaggctgccaataatggg

SEQ ID NO: 61360 - DNA, 20 bp, synthetic construct
  misc_feature 1..20: note = chemically synthesized
  source 1..20: mol_type = other DNA
ttgtataaaagttgctcctt

SEQ ID NO: 61361 - DNA, 20 bp, synthetic construct
  misc_feature 1..20: note = chemically synthesized
  source 1..20: mol_type = other DNA
tcctgactttcagtgacagc

SEQ ID NO: 61362 - DNA, 20 bp, synthetic construct
  misc_feature 1..20: note = chemically synthesized
  source 1..20: mol_type = other DNA
agatcctaggtatgggaaaa

SEQ ID NO: 61363 - DNA, 20 bp, synthetic construct
  misc_feature 1..20: note = chemically synthesized
  source 1..20: mol_type = other DNA
tgtataaagaagatattatt

SEQ ID NO: 61364 - DNA, 20 bp, synthetic construct
  misc_feature 1..20: note = chemically synthesized
  source 1..20: mol_type = other DNA
gtttactctatgtaagatta

SEQ ID NO: 61365 - DNA, 20 bp, synthetic construct
  misc_feature 1..20: note = chemically synthesized
  source 1..20: mol_type = other DNA
agattattggatactacgtt

SEQ ID NO: 61366 - DNA, 20 bp, synthetic construct
  misc_feature 1..20: note = chemically synthesized
  source 1..20: mol_type = other DNA
tggggatacagctattcatg

SEQ ID NO: 61367 - DNA, 20 bp, synthetic construct
  misc_feature 1..20: note = chemically synthesized
  source 1..20: mol_type = other DNA
ttcatgcagaataaacattg

SEQ ID NO: 61368 - DNA, 20 bp, synthetic construct
  misc_feature 1..20: note = chemically synthesized
  source 1..20: mol_type = other DNA
gaaagaagaaatcactatat

SEQ ID NO: 61369 - DNA, 20 bp, synthetic construct
  misc_feature 1..20: note = chemically synthesized
  source 1..20: mol_type = other DNA
catcctgactggtggtatta

SEQ ID NO: 61370 - DNA, 20 bp, synthetic construct
  misc_feature 1..20: note = chemically synthesized
  source 1..20: mol_type = other DNA
ctgactggtggtattatagg

SEQ ID NO: 61371 - DNA, 20 bp, synthetic construct
  misc_feature 1..20: note = chemically synthesized
  source 1..20: mol_type = other DNA
tgatgaagctccagagactt

SEQ ID NO: 61372 - DNA, 20 bp, synthetic construct
  misc_feature 1..20: note = chemically synthesized
  source 1..20: mol_type = other DNA
gggtagttagaaaatgacgt

SEQ ID NO: 61373 - DNA, 20 bp, synthetic construct
  misc_feature 1..20: note = chemically synthesized
  source 1..20: mol_type = other DNA
gttattgatacactgcttca

SEQ ID NO: 61374 - DNA, 20 bp, synthetic construct
  misc_feature 1..20: note = chemically synthesized
  source 1..20: mol_type = other DNA
aattttcataatataaattg

SEQ ID NO: 61375 - DNA, 20 bp, synthetic construct
  misc_feature 1..20: note = chemically synthesized
  source 1..20: mol_type = other DNA
tgaagaataaacagtaaaat

SEQ ID NO: 61376 - DNA, 20 bp, synthetic construct
  misc_feature 1..20: note = chemically synthesized
  source 1..20: mol_type = other DNA
gtaatttaggcaagatcaag

SEQ ID NO: 61377 - DNA, 20 bp, synthetic construct
  misc_feature 1..20: note = chemically synthesized
  source 1..20: mol_type = other DNA
gaattttttttttaaaacta

SEQ ID NO: 61378 - DNA, 20 bp, synthetic construct
  misc_feature 1..20: note = chemically synthesized
  source 1..20: mol_type = other DNA
tttaaaactatggaatctga

SEQ ID NO: 61379 - DNA, 20 bp, synthetic construct
  misc_feature 1..20: note = chemically synthesized
  source 1..20: mol_type = other DNA
gagaaggctctgtgactcat

SEQ ID NO: 61380 - DNA, 20 bp, synthetic construct
  misc_feature 1..20: note = chemically synthesized
  source 1..20: mol_type = other DNA
ggtgcaggcagccaacctct

SEQ ID NO: 61381 - DNA, 20 bp, synthetic construct
  misc_feature 1..20: note = chemically synthesized
  source 1..20: mol_type = other DNA
gacctctttctgtccatgaa

SEQ ID NO: 61382 - DNA, 20 bp, synthetic construct
  misc_feature 1..20: note = chemically synthesized
  source 1..20: mol_type = other DNA
tactggactttcattttcag

SEQ ID NO: 61383 - DNA, 20 bp, synthetic construct
  misc_feature 1..20: note = chemically synthesized
  source 1..20: mol_type = other DNA
gtaaggggaaatgttttgta

SEQ ID NO: 61384 - DNA, 20 bp, synthetic construct
  misc_feature 1..20: note = chemically synthesized
  source 1..20: mol_type = other DNA
ggggaaatgttttgtaaaga

SEQ ID NO: 61385 - DNA, 20 bp, synthetic construct
  misc_feature 1..20: note = chemically synthesized
  source 1..20: mol_type = other DNA
acctcctttctctttctcta

SEQ ID NO: 61386 - DNA, 20 bp, synthetic construct
  misc_feature 1..20: note = chemically synthesized
  source 1..20: mol_type = other DNA
tttctctagtgagtacatgt

SEQ ID NO: 61387 - DNA, 20 bp, synthetic construct
  misc_feature 1..20: note = chemically synthesized
  source 1..20: mol_type = other DNA
gaacagatataagatgatga

SEQ ID NO: 61388 - DNA, 20 bp, synthetic construct
  misc_feature 1..20: note = chemically synthesized
  source 1..20: mol_type = other DNA
gcagataaaatgtgatatgt

SEQ ID NO: 61389 - DNA, 20 bp, synthetic construct
  misc_feature 1..20: note = chemically synthesized
  source 1..20: mol_type = other DNA
cagacaatactcagcttatg

SEQ ID NO: 61390 - DNA, 20 bp, synthetic construct
  misc_feature 1..20: note = chemically synthesized
  source 1..20: mol_type = other DNA
ttgataaattaaaaaaaaac

SEQ ID NO: 61391 - DNA, 20 bp, synthetic construct
  misc_feature 1..20: note = chemically synthesized
  source 1..20: mol_type = other DNA
aattaaaaaaaaacaggagt

SEQ ID NO: 61392 - DNA, 20 bp, synthetic construct
  misc_feature 1..20: note = chemically synthesized
  source 1..20: mol_type = other DNA
atgtatggaacaaataattg

SEQ ID NO: 61393 - DNA, 20 bp, synthetic construct
  misc_feature 1..20: note = chemically synthesized
  source 1..20: mol_type = other DNA
tatacacctcattttttggg

SEQ ID NO: 61394 - DNA, 20 bp, synthetic construct
  misc_feature 1..20: note = chemically synthesized
  source 1..20: mol_type = other DNA
gtctgttttcatattgaaaa

SEQ ID NO: 61395 - DNA, 20 bp, synthetic construct
  misc_feature 1..20: note = chemically synthesized
  source 1..20: mol_type = other DNA
tgtggtatatgagatgatct

SEQ ID NO: 61396 - DNA, 20 bp, synthetic construct
  misc_feature 1..20: note = chemically synthesized
  source 1..20: mol_type = other DNA
gatgatctgtgagtttcaga

SEQ ID NO: 61397 - DNA, 20 bp, synthetic construct
  misc_feature 1..20: note = chemically synthesized
  source 1..20: mol_type = other DNA
tgcagccattcaccctcttc

SEQ ID NO: 61398 - DNA, 20 bp, synthetic construct
  misc_feature 1..20: note = chemically synthesized
  source 1..20: mol_type = other DNA
ctcttccagggtctctgtca

SEQ ID NO: 61399 - DNA, 20 bp, synthetic construct
  misc_feature 1..20: note = chemically synthesized
  source 1..20: mol_type = other DNA
gtctctgtcatagaatagac

SEQ ID NO: 61400 - DNA, 20 bp, synthetic construct
  misc_feature 1..20: note = chemically synthesized
  source 1..20: mol_type = other DNA
cctttctgtgatggttaata

SEQ ID NO: 61401 - DNA, 20 bp, synthetic construct
  misc_feature 1..20: note = chemically synthesized
  source 1..20: mol_type = other DNA
aatattgagtgcaaacttga

SEQ ID NO: 61402 - DNA, 20 bp, synthetic construct
  misc_feature 1..20: note = chemically synthesized
  source 1..20: mol_type = other DNA
gtgcaaacttgattggattg

SEQ ID NO: 61403 - DNA, 20 bp, synthetic construct
  misc_feature 1..20: note = chemically synthesized
  source 1..20: mol_type = other DNA
aaggatgcaaagtattgttc

SEQ ID NO: 61404 - DNA, 20 bp, synthetic construct
  misc_feature 1..20: note = chemically synthesized
  source 1..20: mol_type = other DNA
attgttcctgggtgtgctgt

SEQ ID NO: 61405 - DNA, 20 bp, synthetic construct
  misc_feature 1..20: note = chemically synthesized
  source 1..20: mol_type = other DNA
ttgccaaaggagattaacat

SEQ ID NO: 61406 - DNA, 20 bp, synthetic construct
  misc_feature 1..20: note = chemically synthesized
  source 1..20: mol_type = other DNA
cagacccacccaccctccgt

SEQ ID NO: 61407 - DNA, 20 bp, synthetic construct
  misc_feature 1..20: note = chemically synthesized
  source 1..20: mol_type = other DNA
cccacccaccctccgtctgg

SEQ ID NO: 61408 - DNA, 20 bp, synthetic construct
  misc_feature 1..20: note = chemically synthesized
  source 1..20: mol_type = other DNA
aagcaggcaaaagaagatgg

SEQ ID NO: 61409 - DNA, 20 bp, synthetic construct
  misc_feature 1..20: note = chemically synthesized
  source 1..20: mol_type = other DNA
caaaagaagatggaagagta

SEQ ID NO: 61410 - DNA, 20 bp, synthetic construct
  misc_feature 1..20: note = chemically synthesized
  source 1..20: mol_type = other DNA
gctaaagtcacacaggctat

SEQ ID NO: 61411 - DNA, 20 bp, synthetic construct
  misc_feature 1..20: note = chemically synthesized
  source 1..20: mol_type = other DNA
agctccgtccaagcttaatt

SEQ ID NO: 61412 - DNA, 20 bp, synthetic construct
  misc_feature 1..20: note = chemically synthesized
  source 1..20: mol_type = other DNA
ttacagaggtatacctcctc

SEQ ID NO: 61413 - DNA, 20 bp, synthetic construct
  misc_feature 1..20: note = chemically synthesized
  source 1..20: mol_type = other DNA
atacctcctcaagaatttgg

SEQ ID NO: 61414 - DNA, 20 bp, synthetic construct
  misc_feature 1..20: note = chemically synthesized
  source 1..20: mol_type = other DNA
gacttctaaggtaaaagaca

SEQ ID NO: 61415 - DNA, 20 bp, synthetic construct
  misc_feature 1..20: note = chemically synthesized
  source 1..20: mol_type = other DNA
gttgggggcagggggactct

SEQ ID NO: 61416 - DNA, 20 bp, synthetic construct
  misc_feature 1..20: note = chemically synthesized
  source 1..20: mol_type = other DNA
ggcagggggactctcagggt

SEQ ID NO: 61417 - DNA, 20 bp, synthetic construct
  misc_feature 1..20: note = chemically synthesized
  source 1..20: mol_type = other DNA
aatggaagccagagagatta

SEQ ID NO: 61418 - DNA, 20 bp, synthetic construct
  misc_feature 1..20: note = chemically synthesized
  source 1..20: mol_type = other DNA
tacaaccccataattcatgc

SEQ ID NO: 61419 - DNA, 20 bp, synthetic construct
  misc_feature 1..20: note = chemically synthesized
  source 1..20: mol_type = other DNA
cccatgctctggtttgttcg

SEQ ID NO: 61420 - DNA, 20 bp, synthetic construct
  misc_feature 1..20: note = chemically synthesized
  source 1..20: mol_type = other DNA
attgtttgccttatgtgttc

SEQ ID NO: 61421 - DNA, 20 bp, synthetic construct
  misc_feature 1..20: note = chemically synthesized
  source 1..20: mol_type = other DNA
accaagttttagagatgtca

SEQ ID NO: 61422 - DNA, 20 bp, synthetic construct
  misc_feature 1..20: note = chemically synthesized
  source 1..20: mol_type = other DNA
agatttgggcatcatctttt

SEQ ID NO: 61423 - DNA, 20 bp, synthetic construct
  misc_feature 1..20: note = chemically synthesized
  source 1..20: mol_type = other DNA
ttatttgtgccctcagcctt

SEQ ID NO: 61424 - DNA, 20 bp, synthetic construct
  misc_feature 1..20: note = chemically synthesized
  source 1..20: mol_type = other DNA
aggttttcctctgttggagg

SEQ ID NO: 61425 - DNA, 20 bp, synthetic construct
  misc_feature 1..20: note = chemically synthesized
  source 1..20: mol_type = other DNA
tggctcttgctgtgctactt

SEQ ID NO: 61426 - DNA, 20 bp, synthetic construct
  misc_feature 1..20: note = chemically synthesized
  source 1..20: mol_type = other DNA
cttggctgaagcaccatgtg

SEQ ID NO: 61427 - DNA, 20 bp, synthetic construct
  misc_feature 1..20: note = chemically synthesized
  source 1..20: mol_type = other DNA
tggtaggctaaactcaagaa

SEQ ID NO: 61428 - DNA, 20 bp, synthetic construct
  misc_feature 1..20: note = chemically synthesized
  source 1..20: mol_type = other DNA
ggaatagttagtgataactg

SEQ ID NO: 61429 - DNA, 20 bp, synthetic construct
  misc_feature 1..20: note = chemically synthesized
  source 1..20: mol_type = other DNA
ctgcagaatgtgcgttcacg

SEQ ID NO: 61430 - DNA, 20 bp, synthetic construct
  misc_feature 1..20: note = chemically synthesized
  source 1..20: mol_type = other DNA
tgggtactagagaaggctgc

SEQ ID NO: 61431 - DNA, 20 bp, synthetic construct
  misc_feature 1..20: note = chemically synthesized
  source 1..20: mol_type = other DNA
tgactgttgaagtaaatgta

SEQ ID NO: 61432 - DNA, 20 bp, synthetic construct
  misc_feature 1..20: note = chemically synthesized
  source 1..20: mol_type = other DNA
ttacctcccagaggtgatac

SEQ ID NO: 61433 - DNA, 20 bp, synthetic construct
  misc_feature 1..20: note = chemically synthesized
  source 1..20: mol_type = other DNA
tgttccagctccctctaagg

SEQ ID NO: 61434 - DNA, 20 bp, synthetic construct
  misc_feature 1..20: note = chemically synthesized
  source 1..20: mol_type = other DNA
cctctaaggaggagttaata

SEQ ID NO: 61435 - DNA, 20 bp, synthetic construct
  misc_feature 1..20: note = chemically synthesized
  source 1..20: mol_type = other DNA
tcaaacaagttatggtacct

SEQ ID NO: 61436 - DNA, 20 bp, synthetic construct
  misc_feature 1..20: note = chemically synthesized
  source 1..20: mol_type = other DNA
gaaatactcctagatatata

SEQ ID NO: 61437 - DNA, 20 bp, synthetic construct
  misc_feature 1..20: note = chemically synthesized
  source 1..20: mol_type = other DNA
aaagatacggagaagaagtg

SEQ ID NO: 61438 - DNA, 20 bp, synthetic construct
  misc_feature 1..20: note = chemically synthesized
  source 1..20: mol_type = other DNA
gatctcaatagtccacagct

SEQ ID NO: 61439 - DNA, 20 bp, synthetic construct
  misc_feature 1..20: note = chemically synthesized
  source 1..20: mol_type = other DNA
gaccttctgtactcagtgat

SEQ ID NO: 61440 - DNA, 20 bp, synthetic construct
  misc_feature 1..20: note = chemically synthesized
  source 1..20: mol_type = other DNA
attttctaggtgttccatta

SEQ ID NO: 61441 - DNA, 20 bp, synthetic construct
  misc_feature 1..20: note = chemically synthesized
  source 1..20: mol_type = other DNA
ccacgactagctgaggacac

SEQ ID NO: 61442 - DNA, 20 bp, synthetic construct
  misc_feature 1..20: note = chemically synthesized
  source 1..20: mol_type = other DNA
agaattttcacaaaacaaag

SEQ ID NO: 61443 - DNA, 20 bp, synthetic construct
  misc_feature 1..20: note = chemically synthesized
  source 1..20: mol_type = other DNA
cattaccaggtatgtctgca

SEQ ID NO: 61444 - DNA, 20 bp, synthetic construct
  misc_feature 1..20: note = chemically synthesized
  source 1..20: mol_type = other DNA
tatgtctgcatggaattctt

SEQ ID NO: 61445 - DNA, 20 bp, synthetic construct
  misc_feature 1..20: note = chemically synthesized
  source 1..20: mol_type = other DNA
ctgcatattctctgataaga

SEQ ID NO: 61446 - DNA, 20 bp, synthetic construct
  misc_feature 1..20: note = chemically synthesized
  source 1..20: mol_type = other DNA
tgctgaaacgtcagagaagt

SEQ ID NO: 61447 - DNA, 20 bp, synthetic construct
  misc_feature 1..20: note = chemically synthesized
  source 1..20: mol_type = other DNA
acagaaggggaggagctaag

SEQ ID NO: 61448 - DNA, 20 bp, synthetic construct
  misc_feature 1..20: note = chemically synthesized
  source 1..20: mol_type = other DNA
atctttgcgtctagtaactg

SEQ ID NO: 61449 - DNA, 20 bp, synthetic construct
  misc_feature 1..20: note = chemically synthesized
  source 1..20: mol_type = other DNA
cattgtatgttcagtaggca

SEQ ID NO: 61450 - DNA, 20 bp, synthetic construct
  misc_feature 1..20: note = chemically synthesized
  source 1..20: mol_type = other DNA
tatgtctctcagtcctagga

SEQ ID NO: 61451 - DNA, 20 bp, synthetic construct
  misc_feature 1..20: note = chemically synthesized
  source 1..20: mol_type = other DNA
tctcagtcctaggacagaat

SEQ ID NO: 61452 - DNA, 20 bp, synthetic construct
  misc_feature 1..20: note = chemically synthesized
  source 1..20: mol_type = other DNA
aaaatgattctttcaaagtg

SEQ ID NO: 61453 - DNA, 20 bp, synthetic construct
  misc_feature 1..20: note = chemically synthesized
  source 1..20: mol_type = other DNA
tacagttagatctcatctct

SEQ ID NO: 61454 - DNA, 20 bp, synthetic construct
  misc_feature 1..20: note = chemically synthesized
  source 1..20: mol_type = other DNA
tctctatgggtggaaggtaa

SEQ ID NO: 61455 - DNA, 20 bp, synthetic construct
  misc_feature 1..20: note = chemically synthesized
  source 1..20: mol_type = other DNA
gtttcctttggtggcatctt

SEQ ID NO: 61456 - DNA, 20 bp, synthetic construct
  misc_feature 1..20: note = chemically synthesized
  source 1..20: mol_type = other DNA
cactgacaaagtaactctga

SEQ ID NO: 61457 - DNA, 20 bp, synthetic construct
  misc_feature 1..20: note = chemically synthesized
  source 1..20: mol_type = other DNA
gtaactctgaaggggtatat

SEQ ID NO: 61458 - DNA, 20 bp, synthetic construct
  misc_feature 1..20: note = chemically synthesized
  source 1..20: mol_type = other DNA
atacgaccatctttttaact

SEQ ID NO: 61459 - DNA, 20 bp, synthetic construct
  misc_feature 1..20: note = chemically synthesized
  source 1..20: mol_type = other DNA
tgtgacaagaaaaaaaagca

SEQ ID NO: 61460 - DNA, 20 bp, synthetic construct
  misc_feature 1..20: note = chemically synthesized
  source 1..20: mol_type = other DNA
gactcttgatttcctcacaa

SEQ ID NO: 61461 - DNA, 20 bp, synthetic construct
  misc_feature 1..20: note = chemically synthesized
  source 1..20: mol_type = other DNA
atccccctcagacttccatt

SEQ ID NO: 61462 - DNA, 20 bp, synthetic construct
  misc_feature 1..20: note = chemically synthesized
  source 1..20: mol_type = other DNA
aggtcaccatgactcttcat

SEQ ID NO: 61463 - DNA, 20 bp, synthetic construct
  misc_feature 1..20: note = chemically synthesized
  source 1..20: mol_type = other DNA
ttcttcacatagcagtctaa

SEQ ID NO: 61464 - DNA, 20 bp, synthetic construct
  misc_feature 1..20: note = chemically synthesized
  source 1..20: mol_type = other DNA
agtaatttaaaaatacaaat

SEQ ID NO: 61465 - DNA, 20 bp, synthetic construct
  misc_feature 1..20: note = chemically synthesized
  source 1..20: mol_type = other DNA
gcccctagtctagtggcaga

SEQ ID NO: 61466 - DNA, 20 bp, synthetic construct
  misc_feature 1..20: note = chemically synthesized
  source 1..20: mol_type = other DNA
agattcagaagcctatggct

SEQ ID NO: 61467 - DNA, 20 bp, synthetic construct
  misc_feature 1..20: note = chemically synthesized
  source 1..20: mol_type = other DNA
aagggaaggaaaccaggaag

SEQ ID NO: 61468 - DNA, 20 bp, synthetic construct
  misc_feature 1..20: note = chemically synthesized
  source 1..20: mol_type = other DNA
atgagagaggtcagattcta

SEQ ID NO: 61469 - DNA, 20 bp, synthetic construct
  misc_feature 1..20: note = chemically synthesized
  source 1..20: mol_type = other DNA
ctgagctattgtcacaagta

SEQ ID NO: 61470 - DNA, 20 bp, synthetic construct
  misc_feature 1..20: note = chemically synthesized
  source 1..20: mol_type = other DNA
acaagtagtgagtagtactg

SEQ ID NO: 61471 - DNA, 20 bp, synthetic construct
  misc_feature 1..20: note = chemically synthesized
  source 1..20: mol_type = other DNA
agtactgaaggattctacaa

SEQ ID NO: 61472 - DNA, 20 bp, synthetic construct
  misc_feature 1..20: note = chemically synthesized
  source 1..20: mol_type = other DNA
gagggtaattcacactaatc

SEQ ID NO: 61473 - DNA, 20 bp, synthetic construct
  misc_feature 1..20: note = chemically synthesized
  source 1..20: mol_type = other DNA
cttagctacagtggtagtgg

SEQ ID NO: 61474 - DNA, 20 bp, synthetic construct
  misc_feature 1..20: note = chemically synthesized
  source 1..20: mol_type = other DNA
gtctttacatgcaggaaaat

SEQ ID NO: 61475 - DNA, 20 bp, synthetic construct
  misc_feature 1..20: note = chemically synthesized
  source 1..20: mol_type = other DNA
catgcaggaaaatgtggatt

SEQ ID NO: 61476 - DNA, 20 bp, synthetic construct
  misc_feature 1..20: note = chemically synthesized
  source 1..20: mol_type = other DNA
ttagctttctggaaatcccc

SEQ ID NO: 61477 - DNA, 20 bp, synthetic construct
  misc_feature 1..20: note = chemically synthesized
  source 1..20: mol_type = other DNA
aaatccccttgaatgcccca

SEQ ID NO: 61478 - DNA, 20 bp, synthetic construct
  misc_feature 1..20: note = chemically synthesized
  source 1..20: mol_type = other DNA
ccttgaatgccccatagaat

SEQ ID NO: 61479 - DNA, 20 bp, synthetic construct
  misc_feature 1..20: note = chemically synthesized
  source 1..20: mol_type = other DNA
tctttaaaatctgcatagtt

SEQ ID NO: 61480 - DNA, 20 bp, synthetic construct
  misc_feature 1..20: note = chemically synthesized
  source 1..20: mol_type = other DNA
tacataattttttttctgaa

SEQ ID NO: 61481 - DNA, 20 bp, synthetic construct
  misc_feature 1..20: note = chemically synthesized
  source 1..20: mol_type = other DNA
atataaacagttgaaactcc

SEQ ID NO: 61482 - DNA, 20 bp, synthetic construct
  misc_feature 1..20: note = chemically synthesized
  source 1..20: mol_type = other DNA
cgtaggtaggagatagatcc

SEQ ID NO: 61483 - DNA, 20 bp, synthetic construct
  misc_feature 1..20: note = chemically synthesized
  source 1..20: mol_type = other DNA
agatcctggaatgtgcagtt

SEQ ID NO: 61484 - DNA, 20 bp, synthetic construct
  misc_feature 1..20: note = chemically synthesized
  source 1..20: mol_type = other DNA
cagttaagaatacaaatagt

SEQ ID NO: 61485 - DNA, 20 bp, synthetic construct
  misc_feature 1..20: note = chemically synthesized
  source 1..20: mol_type = other DNA
caaatagtatgagtaaccct

SEQ ID NO: 61486 - DNA, 20 bp, synthetic construct
  misc_feature 1..20: note = chemically synthesized
  source 1..20: mol_type = other DNA
tatctttaggaaaaaattct

SEQ ID NO: 61487 - DNA, 20 bp, synthetic construct
  misc_feature 1..20: note = chemically synthesized
  source 1..20: mol_type = other DNA
acatttcttctatataaacc

SEQ ID NO: 61488 - DNA, 20 bp, synthetic construct
  misc_feature 1..20: note = chemically synthesized
  source 1..20: mol_type = other DNA
ggcttggaggaagctcatca

SEQ ID NO: 61489 - DNA, 20 bp, synthetic construct
  misc_feature 1..20: note = chemically synthesized
  source 1..20: mol_type = other DNA
accacaatgcccacggtgct

SEQ ID NO: 61490 - DNA, 20 bp, synthetic construct
  misc_feature 1..20: note = chemically synthesized
  source 1..20: mol_type = other DNA
cggtgctgggagtcctctgg

SEQ ID NO: 61491 - DNA, 20 bp, synthetic construct
  misc_feature 1..20: note = chemically synthesized
  source 1..20: mol_type = other DNA
tatacactcactttcctttc

SEQ ID NO: 61492 - DNA, 20 bp, synthetic construct
  misc_feature 1..20: note = chemically synthesized
  source 1..20: mol_type = other DNA
acctctgtacttactaatac

SEQ ID NO: 61493 - DNA, 20 bp, synthetic construct
  misc_feature 1..20: note = chemically synthesized
  source 1..20: mol_type = other DNA
cgagtagtgaagattgggct

SEQ ID NO: 61494 - DNA, 20 bp, synthetic construct
  misc_feature 1..20: note = chemically synthesized
  source 1..20: mol_type = other DNA
tgggctgggagttctgatga

SEQ ID NO: 61495 - DNA, 20 bp, synthetic construct
  misc_feature 1..20: note = chemically synthesized
  source 1..20: mol_type = other DNA
cacatgcattctgccttcac

SEQ ID NO: 61496 - DNA, 20 bp, synthetic construct
  misc_feature 1..20: note = chemically synthesized
  source 1..20: mol_type = other DNA
ttgtagtctttatatttgtg

SEQ ID NO: 61497 - DNA, 20 bp, synthetic construct
  misc_feature 1..20: note = chemically synthesized
  source 1..20: mol_type = other DNA
ggttttttatgtcacagtga

SEQ ID NO: 61498 - DNA, 20 bp, synthetic construct
  misc_feature 1..20: note = chemically synthesized
  source 1..20: mol_type = other DNA
attttctgttccctccacta

SEQ ID NO: 61499 - DNA, 20 bp, synthetic construct
  misc_feature 1..20: note = chemically synthesized
  source 1..20: mol_type = other DNA
gtgtcaagaccaagcagatt

SEQ ID NO: 61500 - DNA, 20 bp, synthetic construct
  misc_feature 1..20: note = chemically synthesized
  source 1..20: mol_type = other DNA
cttcacctttttactaccca

SEQ ID NO: 61501 - DNA, 20 bp, synthetic construct
  misc_feature 1..20: note = chemically synthesized
  source 1..20: mol_type = other DNA
aatcatcacagtcactctca

SEQ ID NO: 61502 - DNA, 20 bp, synthetic construct
  misc_feature 1..20: note = chemically synthesized
  source 1..20: mol_type = other DNA
ttttgttgcattcctgtaaa

SEQ ID NO: 61503 - DNA, 20 bp, synthetic construct
  misc_feature 1..20: note = chemically synthesized
  source 1..20: mol_type = other DNA
ataaagttagcagataggaa

SEQ ID NO: 61504 - DNA, 20 bp, synthetic construct
  misc_feature 1..20: note = chemically synthesized
  source 1..20: mol_type = other DNA
atataaaattattagttggt

SEQ ID NO: 61505 - DNA, 20 bp, synthetic construct
  misc_feature 1..20: note = chemically synthesized
  source 1..20: mol_type = other DNA
attagttggttcgagtgaaa

SEQ ID NO: 61506 - DNA, 20 bp, synthetic construct
  misc_feature 1..20: note = chemically synthesized
  source 1..20: mol_type = other DNA
ttggttcgagtgaaatggaa

SEQ ID NO: 61507 - DNA, 20 bp, synthetic construct
  misc_feature 1..20: note = chemically synthesized
  source 1..20: mol_type = other DNA
aaatctaatttccaactctt

SEQ ID NO: 61508 - DNA, 20 bp, synthetic construct
  misc_feature 1..20: note = chemically synthesized
  source 1..20: mol_type = other DNA
aaatttggtcactgaagtcc

SEQ ID NO: 61509 - DNA, 20 bp, synthetic construct
  misc_feature 1..20: note = chemically synthesized
  source 1..20: mol_type = other DNA
ccaggaattttcctgcaaaa

SEQ ID NO: 61510 - DNA, 20 bp, synthetic construct
  misc_feature 1..20: note = chemically synthesized
  source 1..20: mol_type = other DNA
cctccctccatcaaattata

SEQ ID NO: 61511 - DNA, 20 bp, synthetic construct
  misc_feature 1..20: note = chemically synthesized
  source 1..20: mol_type = other DNA
taacaaaaaaatgtgagaag

SEQ ID NO: 61512 - DNA, 20 bp, synthetic construct
  misc_feature 1..20: note = chemically synthesized
  source 1..20: mol_type = other DNA
aaaatgtgagaagaggaatc

SEQ ID NO: 61513 - DNA, 20 bp, synthetic construct
  misc_feature 1..20: note = chemically synthesized
  source 1..20: mol_type = other DNA
taggtttctgcatttttttg

SEQ ID NO: 61514 - DNA, 20 bp, synthetic construct
  misc_feature 1..20: note = chemically synthesized
  source 1..20: mol_type = other DNA
taataagtgtaaatttccca

SEQ ID NO: 61515 - DNA, 20 bp, synthetic construct
  misc_feature 1..20: note = chemically synthesized
  source 1..20: mol_type = other DNA
catttgattaaaattgtctg

SEQ ID NO: 61516 - DNA, 20 bp, synthetic construct
  misc_feature 1..20: note = chemically synthesized
  source 1..20: mol_type = other DNA
gttttaccccgatcatttta

SEQ ID NO: 61517 - DNA, 20 bp, synthetic construct
  misc_feature 1..20: note = chemically synthesized
  source 1..20: mol_type = other DNA
ttttacagaattgtgcacct

SEQ ID NO: 61518 - DNA, 20 bp, synthetic construct
  misc_feature 1..20: note = chemically synthesized
  source 1..20: mol_type = other DNA
cattaataaattgcacacat

SEQ ID NO: 61519 - DNA, 20 bp, synthetic construct
  misc_feature 1..20: note = chemically synthesized
  source 1..20: mol_type = other DNA
tatctcaggtattgctcata

SEQ ID NO: 61520 - DNA, 20 bp, synthetic construct
  misc_feature 1..20: note = chemically synthesized
  source 1..20: mol_type = other DNA
tgtcacctgagcaacacagt

SEQ ID NO: 61521 - DNA, 20 bp, synthetic construct
  misc_feature 1..20: note = chemically synthesized
  source 1..20: mol_type = other DNA
cacagtctgaatactaaatt

SEQ ID NO: 61522 - DNA, 20 bp, synthetic construct
  misc_feature 1..20: note = chemically synthesized
  source 1..20: mol_type = other DNA
ctgaatactaaattgtgagt

SEQ ID NO: 61523 - DNA, 20 bp, synthetic construct
  misc_feature 1..20: note = chemically synthesized
  source 1..20: mol_type = other DNA
ttttattcataaaaatattg

SEQ ID NO: 61524 - DNA, 20 bp, synthetic construct
  misc_feature 1..20: note = chemically synthesized
  source 1..20: mol_type = other DNA
cttctaactataaggccagt

SEQ ID NO: 61525 - DNA, 20 bp, synthetic construct
  misc_feature 1..20: note = chemically synthesized
  source 1..20: mol_type = other DNA
agtagaagaacttttttaaa

SEQ ID NO: 61526 - DNA, 20 bp, synthetic construct
  misc_feature 1..20: note = chemically synthesized
  source 1..20: mol_type = other DNA
tatgacattgcaaaaaaaaa

SEQ ID NO: 61527 - DNA, 20 bp, synthetic construct
  misc_feature 1..20: note = chemically synthesized
  source 1..20: mol_type = other DNA
aaagagtaatgcttttgttg

SEQ ID NO: 61528 - DNA, 20 bp, synthetic construct
  misc_feature 1..20: note = chemically synthesized
  source 1..20: mol_type = other DNA
aattactaaaatgcaatgct

SEQ ID NO: 61529 - DNA, 20 bp, synthetic construct
  misc_feature 1..20: note = chemically synthesized
  source 1..20: mol_type = other DNA
ttcaaactataataaatatt

SEQ ID NO: 61530 - DNA, 20 bp, synthetic construct
  misc_feature 1..20: note = chemically synthesized
  source 1..20: mol_type = other DNA
aagaaatgataataaataaa

SEQ ID NO: 61531 - DNA, 20 bp, synthetic construct
  misc_feature 1..20: note = chemically synthesized
  source 1..20: mol_type = other DNA
tcagtgacaaggaggacagt

SEQ ID NO: 61532 - DNA, 20 bp, synthetic construct
  misc_feature 1..20: note = chemically synthesized
  source 1..20: mol_type = other DNA
tttgttcagcctagtttcag

SEQ ID NO: 61533 - DNA, 20 bp, synthetic construct
  misc_feature 1..20: note = chemically synthesized
  source 1..20: mol_type = other DNA
atcatctcagttatagatat

SEQ ID NO: 61534 - DNA, 20 bp, synthetic construct
  misc_feature 1..20: note = chemically synthesized
  source 1..20: mol_type = other DNA
gcaggaaagttgaccatttg

SEQ ID NO: 61535 - DNA, 20 bp, synthetic construct
  misc_feature 1..20: note = chemically synthesized
  source 1..20: mol_type = other DNA
aattcactgagaagatgctg

SEQ ID NO: 61536 - DNA, 20 bp, synthetic construct
  misc_feature 1..20: note = chemically synthesized
  source 1..20: mol_type = other DNA
cactgagaagatgctgtagg

SEQ ID NO: 61537 - DNA, 20 bp, synthetic construct
  misc_feature 1..20: note = chemically synthesized
  source 1..20: mol_type = other DNA
aataccacgtgttctcactt

SEQ ID NO: 61538 - DNA, 20 bp, synthetic construct
  misc_feature 1..20: note = chemically synthesized
  source 1..20: mol_type = other DNA
tcacacactggggcctattg

SEQ ID NO: 61539 - DNA, 20 bp, synthetic construct
  misc_feature 1..20: note = chemically synthesized
  source 1..20: mol_type = other DNA
ctggggcctattggaggatg

SEQ ID NO: 61540 - DNA, 20 bp, synthetic construct
  misc_feature 1..20: note = chemically synthesized
  source 1..20: mol_type = other DNA
atggagggtgaaaggaggga

SEQ ID NO: 61541 - DNA, 20 bp, synthetic construct
  misc_feature 1..20: note = chemically synthesized
  source 1..20: mol_type = other DNA
aggatcaggaaaagtaacaa

SEQ ID NO: 61542 - DNA, 20 bp, synthetic construct
  misc_feature 1..20: note = chemically synthesized
  source 1..20: mol_type = other DNA
aagggtactaggcttaatac

SEQ ID NO: 61543 - DNA, 20 bp, synthetic construct
  misc_feature 1..20: note = chemically synthesized
  source 1..20: mol_type = other DNA
gtactaggcttaatacctga

SEQ ID NO: 61544 - DNA, 20 bp, synthetic construct
  misc_feature 1..20: note = chemically synthesized
  source 1..20: mol_type = other DNA
tctcctaggaaacactgcac

SEQ ID NO: 61545 - DNA, 20 bp, synthetic construct
  misc_feature 1..20: note = chemically synthesized
  source 1..20: mol_type = other DNA
catgaatttgtattcataag

SEQ ID NO: 61546 - DNA, 20 bp, synthetic construct
  misc_feature 1..20: note = chemically synthesized
  source 1..20: mol_type = other DNA
atttgtattcataagaagag

SEQ ID NO: 61547 - DNA, 20 bp, synthetic construct
  misc_feature 1..20: note = chemically synthesized
  source 1..20: mol_type = other DNA
ttcataagaagagtagaatt

SEQ ID NO: 61548 - DNA, 20 bp, synthetic construct
  misc_feature 1..20: note = chemically synthesized
  source 1..20: mol_type = other DNA
tcatcattcaagactgaaag

SEQ ID NO: 61549 - DNA, 20 bp, synthetic construct
  misc_feature 1..20: note = chemically synthesized
  source 1..20: mol_type = other DNA
atatagagaaggacctcatg

SEQ ID NO: 61550 - DNA, 20 bp, synthetic construct
  misc_feature 1..20: note = chemically synthesized
  source 1..20: mol_type = other DNA
atgggaaatctaaggtgtaa

SEQ ID NO: 61551 - DNA, 20 bp, synthetic construct
  misc_feature 1..20: note = chemically synthesized
  source 1..20: mol_type = other DNA
cttgtgtagtatgggcttga

SEQ ID NO: 61552 - DNA, 20 bp, synthetic construct
  misc_feature 1..20: note = chemically synthesized
  source 1..20: mol_type = other DNA
ttgaagggataacataccat

SEQ ID NO: 61553 - DNA, 20 bp, synthetic construct
  misc_feature 1..20: note = chemically synthesized
  source 1..20: mol_type = other DNA
ataccataagaatatttaat

SEQ ID NO: 61554 - DNA, 20 bp, synthetic construct
  misc_feature 1..20: note = chemically synthesized
  source 1..20: mol_type = other DNA
aaatgattaagaagacgtgg

SEQ ID NO: 61555 - DNA, 20 bp, synthetic construct
  misc_feature 1..20: note = chemically synthesized
  source 1..20: mol_type = other DNA
gaaaaaatatgtatggtcta

SEQ ID NO: 61556 - DNA, 20 bp, synthetic construct
  misc_feature 1..20: note = chemically synthesized
  source 1..20: mol_type = other DNA
cacttttcctcccatataaa

SEQ ID NO: 61557 - DNA, 20 bp, synthetic construct
  misc_feature 1..20: note = chemically synthesized
  source 1..20: mol_type = other DNA
ctctcattaacaaataattg

SEQ ID NO: 61558 - DNA, 20 bp, synthetic construct
  misc_feature 1..20: note = chemically synthesized
  source 1..20: mol_type = other DNA
accagagatgcagattttta

SEQ ID NO: 61559 - DNA, 20 bp, synthetic construct
  misc_feature 1..20: note = chemically synthesized
  source 1..20: mol_type = other DNA
aaagatacttactagattat

SEQ ID NO: 61560 - DNA, 20 bp, synthetic construct
  misc_feature 1..20: note = chemically synthesized
  source 1..20: mol_type = other DNA
tgagtattaaattgggcagc

SEQ ID NO: 61561 - DNA, 20 bp, synthetic construct
  misc_feature 1..20: note = chemically synthesized
  source 1..20: mol_type = other DNA
gaggtctccatgtccaatta

SEQ ID NO: 61562 - DNA, 20 bp, synthetic construct
  misc_feature 1..20: note = chemically synthesized
  source 1..20: mol_type = other DNA
atttattttatgggaaattt

SEQ ID NO: 61563 - DNA, 20 bp, synthetic construct
  misc_feature 1..20: note = chemically synthesized
  source 1..20: mol_type = other DNA
gtcatggttctccagaaaaa

SEQ ID NO: 61564 - DNA, 20 bp, synthetic construct
  misc_feature 1..20: note = chemically synthesized
  source 1..20: mol_type = other DNA
ctccagaaaaatagaatcaa

SEQ ID NO: 61565 - DNA, 20 bp, synthetic construct
  misc_feature 1..20: note = chemically synthesized
  source 1..20: mol_type = other DNA
agacacactgactaatggaa

SEQ ID NO: 61566 - DNA, 20 bp, synthetic construct
  misc_feature 1..20: note = chemically synthesized
  source 1..20: mol_type = other DNA
gtaaaaacaagtaatgggga

SEQ ID NO: 61567 - DNA, 20 bp, synthetic construct
  misc_feature 1..20: note = chemically synthesized
  source 1..20: mol_type = other DNA
cagcactttgggaggccaag

SEQ ID NO: 61568 - DNA, 20 bp, synthetic construct
  misc_feature 1..20: note = chemically synthesized
  source 1..20: mol_type = other DNA
actttgggaggccaaggtgg

SEQ ID NO: 61569 - DNA, 20 bp, synthetic construct
  misc_feature 1..20: note = chemically synthesized
  source 1..20: mol_type = other DNA
tgggtggatcacttgaggtg

SEQ ID NO: 61570 - DNA, 20 bp, synthetic construct
  misc_feature 1..20: note = chemically synthesized
  source 1..20: mol_type = other DNA
ctaaaaatacaaaaaatgtg

SEQ ID NO: 61571 - DNA, 20 bp, synthetic construct
  misc_feature 1..20: note = chemically synthesized
  source 1..20: mol_type = other DNA
tactcaggaggctgaggcag

SEQ ID NO: 61572 - DNA, 20 bp, synthetic construct
  misc_feature 1..20: note = chemically synthesized
  source 1..20: mol_type = other DNA
tcgcaccactgcactctagc

SEQ ID NO: 61573 - DNA, 20 bp, synthetic construct
  misc_feature 1..20: note = chemically synthesized
  source 1..20: mol_type = other DNA
ctgcactctagcatgggtga

SEQ ID NO: 61574 - DNA, 20 bp, synthetic construct
  misc_feature 1..20: note = chemically synthesized
  source 1..20: mol_type = other DNA
cagagcgaacaggcaaccta

SEQ ID NO: 61575 - DNA, 20 bp, synthetic construct
  misc_feature 1..20: note = chemically synthesized
  source 1..20: mol_type = other DNA
tctgacaaaggtctaatatc

SEQ ID NO: 61576 - DNA, 20 bp, synthetic construct
  misc_feature 1..20: note = chemically synthesized
  source 1..20: mol_type = other DNA
aaataccatctgacaccagt

SEQ ID NO: 61577 - DNA, 20 bp, synthetic construct
  misc_feature 1..20: note = chemically synthesized
  source 1..20: mol_type = other DNA
ttgacctcacaatcccatta

SEQ ID NO: 61578 - DNA, 20 bp, synthetic construct
  misc_feature 1..20: note = chemically synthesized
  source 1..20: mol_type = other DNA
attactgggtatatacctaa

SEQ ID NO: 61579 - DNA, 20 bp, synthetic construct
  misc_feature 1..20: note = chemically synthesized
  source 1..20: mol_type = other DNA
tattcacaatagcaaagaca

SEQ ID NO: 61580 - DNA, 20 bp, synthetic construct
  misc_feature 1..20: note = chemically synthesized
  source 1..20: mol_type = other DNA
aatactatctaaccataaaa

SEQ ID NO: 61581 - DNA, 20 bp, synthetic construct
  misc_feature 1..20: note = chemically synthesized
  source 1..20: mol_type = other DNA
atcatgccctttgctgggac

SEQ ID NO: 61582 - DNA, 20 bp, synthetic construct
  misc_feature 1..20: note = chemically synthesized
  source 1..20: mol_type = other DNA
agaagtgggagctgaacaat

SEQ ID NO: 61583 - DNA, 20 bp, synthetic construct
  misc_feature 1..20: note = chemically synthesized
  source 1..20: mol_type = other DNA
cactggagcctgtcagggca

SEQ ID NO: 61584 - DNA, 20 bp, synthetic construct
  misc_feature 1..20: note = chemically synthesized
  source 1..20: mol_type = other DNA
ctgggcttaacacctaggtg

SEQ ID NO: 61585 - DNA, 20 bp, synthetic construct
  misc_feature 1..20: note = chemically synthesized
  source 1..20: mol_type = other DNA
gaacttaaaaattaaaaaaa

SEQ ID NO: 61586 - DNA, 20 bp, synthetic construct
  misc_feature 1..20: note = chemically synthesized
  source 1..20: mol_type = other DNA
aaggcaagtcccaagatatg

SEQ ID NO: 61587 - DNA, 20 bp, synthetic construct
  misc_feature 1..20: note = chemically synthesized
  source 1..20: mol_type = other DNA
caagtcccaagatatgcaga

SEQ ID NO: 61588 - DNA, 20 bp, synthetic construct
  misc_feature 1..20: note = chemically synthesized
  source 1..20: mol_type = other DNA
tctgaaggcctgggaaacag

SEQ ID NO: 61589 - DNA, 20 bp, synthetic construct
  misc_feature 1..20: note = chemically synthesized
  source 1..20: mol_type = other DNA
cagtttgaaggccatcaata

SEQ ID NO: 61590 - DNA, 20 bp, synthetic construct
  misc_feature 1..20: note = chemically synthesized
  source 1..20: mol_type = other DNA
taattctctctgatttgggg

SEQ ID NO: 61591 - DNA, 20 bp, synthetic construct
  misc_feature 1..20: note = chemically synthesized
  source 1..20: mol_type = other DNA
aacaccctcacaaaaacatc

SEQ ID NO: 61592 - DNA, 20 bp, synthetic construct
  misc_feature 1..20: note = chemically synthesized
  source 1..20: mol_type = other DNA
attaaccatcagagcctgta

SEQ ID NO: 61593 - DNA, 20 bp, synthetic construct
  misc_feature 1..20: note = chemically synthesized
  source 1..20: mol_type = other DNA
accatcagagcctgtagagg

SEQ ID NO: 61594 - DNA, 20 bp, synthetic construct
  misc_feature 1..20: note = chemically synthesized
  source 1..20: mol_type = other DNA
agcctgtagaggatgagtta

SEQ ID NO: 61595 - DNA, 20 bp, synthetic construct
  misc_feature 1..20: note = chemically synthesized
  source 1..20: mol_type = other DNA
gtagaggatgagttaaagga

SEQ ID NO: 61596 - DNA, 20 bp, synthetic construct
  misc_feature 1..20: note = chemically synthesized
  source 1..20: mol_type = other DNA
ggaatcttcggagataattg

SEQ ID NO: 61597 - DNA, 20 bp, synthetic construct
  misc_feature 1..20: note = chemically synthesized
  source 1..20: mol_type = other DNA
tccagaaggctgacagataa

SEQ ID NO: 61598 - DNA, 20 bp, synthetic construct
  misc_feature 1..20: note = chemically synthesized
  source 1..20: mol_type = other DNA
tcaacaaacagcaaaaatcc

SEQ ID NO: 61599 - DNA, 20 bp, synthetic construct
  misc_feature 1..20: note = chemically synthesized
  source 1..20: mol_type = other DNA
atcctaggatagagaccttc

SEQ ID NO: 61600 - DNA, 20 bp, synthetic construct
  misc_feature 1..20: note = chemically synthesized
  source 1..20: mol_type = other DNA
gcgatataagcttattatac

SEQ ID NO: 61601 - DNA, 20 bp, synthetic construct
  misc_feature 1..20: note = chemically synthesized
  source 1..20: mol_type = other DNA
agagctcagaccaagagcca

SEQ ID NO: 61602 - DNA, 20 bp, synthetic construct
  misc_feature 1..20: note = chemically synthesized
  source 1..20: mol_type = other DNA
atttctaataatgtggctgc

SEQ ID NO: 61603 - DNA, 20 bp, synthetic construct
  misc_feature 1..20: note = chemically synthesized
  source 1..20: mol_type = other DNA
tagaaagagacaggcactca

SEQ ID NO: 61604 - DNA, 20 bp, synthetic construct
  misc_feature 1..20: note = chemically synthesized
  source 1..20: mol_type = other DNA
aatacagcaggaaatatgaa

SEQ ID NO: 61605 - DNA, 20 bp, synthetic construct
  misc_feature 1..20: note = chemically synthesized
  source 1..20: mol_type = other DNA
aacaaggtcttagaaaatac

SEQ ID NO: 61606 - DNA, 20 bp, synthetic construct
  misc_feature 1..20: note = chemically synthesized
  source 1..20: mol_type = other DNA
ttaaggaaatagaagatatt

SEQ ID NO: 61607 - DNA, 20 bp, synthetic construct
  misc_feature 1..20: note = chemically synthesized
  source 1..20: mol_type = other DNA
tgcccctaagcttggtgact

SEQ ID NO: 61608 - DNA, 20 bp, synthetic construct
  misc_feature 1..20: note = chemically synthesized
  source 1..20: mol_type = other DNA
ctaagataagtgatgtttcc

SEQ ID NO: 61609 - DNA, 20 bp, synthetic construct
  misc_feature 1..20: note = chemically synthesized
  source 1..20: mol_type = other DNA
ataagtgatgtttccaggaa

SEQ ID NO: 61610 - DNA, 20 bp, synthetic construct
  misc_feature 1..20: note = chemically synthesized
  source 1..20: mol_type = other DNA
gattcgtgtactgccagtga

SEQ ID NO: 61611 - DNA, 20 bp, synthetic construct
  misc_feature 1..20: note = chemically synthesized
  source 1..20: mol_type = other DNA
tgaaattaaatcagttatct

SEQ ID NO: 61612 - DNA, 20 bp, synthetic construct
  misc_feature 1..20: note = chemically synthesized
  source 1..20: mol_type = other DNA
catttaggaagacctatgag

SEQ ID NO: 61613 - DNA, 20 bp, synthetic construct
  misc_feature 1..20: note = chemically synthesized
  source 1..20: mol_type = other DNA
ctcatagttgggctaagttc

SEQ ID NO: 61614 - DNA, 20 bp, synthetic construct
  misc_feature 1..20: note = chemically synthesized
  source 1..20: mol_type = other DNA
gctaagttccaggataaatt

SEQ ID NO: 61615 - DNA, 20 bp, synthetic construct
  misc_feature 1..20: note = chemically synthesized
  source 1..20: mol_type = other DNA
acaaattgtcagacaaagcc

SEQ ID NO: 61616 - DNA, 20 bp, synthetic construct
  misc_feature 1..20: note = chemically synthesized
  source 1..20: mol_type = other DNA
tcagacaaagccagggatta

SEQ ID NO: 61617 - DNA, 20 bp, synthetic construct
  misc_feature 1..20: note = chemically synthesized
  source 1..20: mol_type = other DNA
cttatcagcagcactcattt

SEQ ID NO: 61618 - DNA, 20 bp, synthetic construct
  misc_feature 1..20: note = chemically synthesized
  source 1..20: mol_type = other DNA
ccaagaaaagattaagtgtg

SEQ ID NO: 61619 - DNA, 20 bp, synthetic construct
  misc_feature 1..20: note = chemically synthesized
  source 1..20: mol_type = other DNA
attattaagctttgtctaag

SEQ ID NO: 61620 - DNA, 20 bp, synthetic construct
  misc_feature 1..20: note = chemically synthesized
  source 1..20: mol_type = other DNA
ttgagtgagcttattggcta

SEQ ID NO: 61621 - DNA, 20 bp, synthetic construct
  misc_feature 1..20: note = chemically synthesized
  source 1..20: mol_type = other DNA
gcttattggctacagggtta

SEQ ID NO: 61622 - DNA, 20 bp, synthetic construct
  misc_feature 1..20: note = chemically synthesized
  source 1..20: mol_type = other DNA
ggtatcttctttttgaggtg

SEQ ID NO: 61623 - DNA, 20 bp, synthetic construct
  misc_feature 1..20: note = chemically synthesized
  source 1..20: mol_type = other DNA
gatagcatgacttccatgtg

SEQ ID NO: 61624 - DNA, 20 bp, synthetic construct
  misc_feature 1..20: note = chemically synthesized
  source 1..20: mol_type = other DNA
acagatactggggaacaatt

SEQ ID NO: 61625 - DNA, 20 bp, synthetic construct
  misc_feature 1..20: note = chemically synthesized
  source 1..20: mol_type = other DNA
tcaggctctagtgactatgg

SEQ ID NO: 61626 - DNA, 20 bp, synthetic construct
  misc_feature 1..20: note = chemically synthesized
  source 1..20: mol_type = other DNA
ctctagtgactatgggagaa

SEQ ID NO: 61627 - DNA, 20 bp, synthetic construct
  misc_feature 1..20: note = chemically synthesized
  source 1..20: mol_type = other DNA
gaaaataaagactaatcttc

SEQ ID NO: 61628 - DNA, 20 bp, synthetic construct
  misc_feature 1..20: note = chemically synthesized
  source 1..20: mol_type = other DNA
ccaccacatagttgttgcaa

SEQ ID NO: 61629 - DNA, 20 bp, synthetic construct
  misc_feature 1..20: note = chemically synthesized
  source 1..20: mol_type = other DNA
atctgtatctacagattctg

SEQ ID NO: 61630 - DNA, 20 bp, synthetic construct
  misc_feature 1..20: note = chemically synthesized
  source 1..20: mol_type = other DNA
aaaaacagtagttttatgtg

SEQ ID NO: 61631 - DNA, 20 bp, synthetic construct
  misc_feature 1..20: note = chemically synthesized
  source 1..20: mol_type = other DNA
tttatgtgatgggtgcttac

SEQ ID NO: 61632 - DNA, 20 bp, synthetic construct
  misc_feature 1..20: note = chemically synthesized
  source 1..20: mol_type = other DNA
gggtgcttacatgaataatt

SEQ ID NO: 61633 - DNA, 20 bp, synthetic construct
  misc_feature 1..20: note = chemically synthesized
  source 1..20: mol_type = other DNA
tacatgaataattaagagtt

SEQ ID NO: 61634 - DNA, 20 bp, synthetic construct
  misc_feature 1..20: note = chemically synthesized
  source 1..20: mol_type = other DNA
agaggaaagagactgactct

SEQ ID NO: 61635 - DNA, 20 bp, synthetic construct
  misc_feature 1..20: note = chemically synthesized
  source 1..20: mol_type = other DNA
gaaagagactgactctggga

SEQ ID NO: 61636 - DNA, 20 bp, synthetic construct
  misc_feature 1..20: note = chemically synthesized
  source 1..20: mol_type = other DNA
tgactctgggagtgaatgtg

SEQ ID NO: 61637 - DNA, 20 bp, synthetic construct
  misc_feature 1..20: note = chemically synthesized
  source 1..20: mol_type = other DNA
ctgggagtgaatgtgcaggg

SEQ ID NO: 61638 - DNA, 20 bp, synthetic construct
  misc_feature 1..20: note = chemically synthesized
  source 1..20: mol_type = other DNA
aaagtaagcaatgttagtgt

SEQ ID NO: 61639 - DNA, 20 bp, synthetic construct
  misc_feature 1..20: note = chemically synthesized
  source 1..20: mol_type = other DNA
agcaatgttagtgttggagt

SEQ ID NO: 61640 - DNA, 20 bp, synthetic construct
  misc_feature 1..20: note = chemically synthesized
  source 1..20: mol_type = other DNA
gaaccgtgttttttactaca

SEQ ID NO: 61641 - DNA, 20 bp, synthetic construct
  misc_feature 1..20: note = chemically synthesized
  source 1..20: mol_type = other DNA
taggtctgagagactagtaa

SEQ ID NO: 61642 - DNA, 20 bp, synthetic construct
  misc_feature 1..20: note = chemically synthesized
  source 1..20: mol_type = other DNA
gctaagttttatgctaaagt

SEQ ID NO: 61643 - DNA, 20 bp, synthetic construct
  misc_feature 1..20: note = chemically synthesized
  source 1..20: mol_type = other DNA
ggtgatgcaaaagagacatc

SEQ ID NO: 61644 - DNA, 20 bp, synthetic construct
  misc_feature 1..20: note = chemically synthesized
  source 1..20: mol_type = other DNA
tatagaaatagatacaacaa

SEQ ID NO: 61645 - DNA, 20 bp, synthetic construct
  misc_feature 1..20: note = chemically synthesized
  source 1..20: mol_type = other DNA
atagatacaacaaaagggtg

SEQ ID NO: 61646 - DNA, 20 bp, synthetic construct
  misc_feature 1..20: note = chemically synthesized
  source 1..20: mol_type = other DNA
agaacgacacaggaaaacaa

SEQ ID NO: 61647 - DNA, 20 bp, synthetic construct
  misc_feature 1..20: note = chemically synthesized
  source 1..20: mol_type = other DNA
acacaggaaaacaataggat

SEQ ID NO: 61648 - DNA, 20 bp, synthetic construct
  misc_feature 1..20: note = chemically synthesized
  source 1..20: mol_type = other DNA
aaataagttgaaccatgcat

SEQ ID NO: 61649 - DNA, 20 bp, synthetic construct
  misc_feature 1..20: note = chemically synthesized
  source 1..20: mol_type = other DNA
ctataaactcttaataaaat

SEQ ID NO: 61650 - DNA, 20 bp, synthetic construct
  misc_feature 1..20: note = chemically synthesized
  source 1..20: mol_type = other DNA
ctgcactctcataggcttaa

SEQ ID NO: 61651 - DNA, 20 bp, synthetic construct
  misc_feature 1..20: note = chemically synthesized
  source 1..20: mol_type = other DNA
gcttaactgagttctctgct

SEQ ID NO: 61652 - DNA, 20 bp, synthetic construct
  misc_feature 1..20: note = chemically synthesized
  source 1..20: mol_type = other DNA
cttatccaaaggctctgggg

SEQ ID NO: 61653 - DNA, 20 bp, synthetic construct
  misc_feature 1..20: note = chemically synthesized
  source 1..20: mol_type = other DNA
ttttttttttttttttgaga

SEQ ID NO: 61654 - DNA, 20 bp, synthetic construct
  misc_feature 1..20: note = chemically synthesized
  source 1..20: mol_type = other DNA
tctcgctctgtcacccagcc

SEQ ID NO: 61655 - DNA, 20 bp, synthetic construct
  misc_feature 1..20: note = chemically synthesized
  source 1..20: mol_type = other DNA
ctccctgcaacctgtgcctc

SEQ ID NO: 61656 - DNA, 20 bp, synthetic construct
  misc_feature 1..20: note = chemically synthesized
  source 1..20: mol_type = other DNA
taatttttatattttttggt

SEQ ID NO: 61657 - DNA, 20 bp, synthetic construct
  misc_feature 1..20: note = chemically synthesized
  source 1..20: mol_type = other DNA
tttatattttttggtaggga

SEQ ID NO: 61658 - DNA, 20 bp, synthetic construct
  misc_feature 1..20: note = chemically synthesized
  source 1..20: mol_type = other DNA
gccttggcctcccaaagtgc

SEQ ID NO: 61659 - DNA, 20 bp, synthetic construct
  misc_feature 1..20: note = chemically synthesized
  source 1..20: mol_type = other DNA
aaagtgctgggattacaggc

SEQ ID NO: 61660 - DNA, 20 bp, synthetic construct
  misc_feature 1..20: note = chemically synthesized
  source 1..20: mol_type = other DNA
gagccattgcacccggctgt

SEQ ID NO: 61661 - DNA, 20 bp, synthetic construct
  misc_feature 1..20: note = chemically synthesized
  source 1..20: mol_type = other DNA
tttgtttgcaggctgttagc

SEQ ID NO: 61662 - DNA, 20 bp, synthetic construct
  misc_feature 1..20: note = chemically synthesized
  source 1..20: mol_type = other DNA
ccatgaacctttctcaaatt

SEQ ID NO: 61663 - DNA, 20 bp, synthetic construct
  misc_feature 1..20: note = chemically synthesized
  source 1..20: mol_type = other DNA
actctgcttttaggggctca

SEQ ID NO: 61664 - DNA, 20 bp, synthetic construct
  misc_feature 1..20: note = chemically synthesized
  source 1..20: mol_type = other DNA
tggaattagactaggttccc

SEQ ID NO: 61665 - DNA, 20 bp, synthetic construct
  misc_feature 1..20: note = chemically synthesized
  source 1..20: mol_type = other DNA
atattcacagtcctagaaat

SEQ ID NO: 61666 - DNA, 20 bp, synthetic construct
  misc_feature 1..20: note = chemically synthesized
  source 1..20: mol_type = other DNA
tgatgaagcacaatgtctga

SEQ ID NO: 61667 - DNA, 20 bp, synthetic construct
  misc_feature 1..20: note = chemically synthesized
  source 1..20: mol_type = other DNA
aaagggtggtagaaagcagc

SEQ ID NO: 61668 - DNA, 20 bp, synthetic construct
  misc_feature 1..20: note = chemically synthesized
  source 1..20: mol_type = other DNA
aagcagctggagtcgaaact

SEQ ID NO: 61669 - DNA, 20 bp, synthetic construct
  misc_feature 1..20: note = chemically synthesized
  source 1..20: mol_type = other DNA
aacagtagcatctggttagc

SEQ ID NO: 61670 - DNA, 20 bp, synthetic construct
  misc_feature 1..20: note = chemically synthesized
  source 1..20: mol_type = other DNA
agcatctggttagcttgagt

SEQ ID NO: 61671 - DNA, 20 bp, synthetic construct
  misc_feature 1..20: note = chemically synthesized
  source 1..20: mol_type = other DNA
agtgtaaacactcgattttg

SEQ ID NO: 61672 - DNA, 20 bp, synthetic construct
  misc_feature 1..20: note = chemically synthesized
  source 1..20: mol_type = other DNA
gtctggagagatttcatcct

SEQ ID NO: 61673 - DNA, 20 bp, synthetic construct
  misc_feature 1..20: note = chemically synthesized
  source 1..20: mol_type = other DNA
aatccactccctctctatcg

SEQ ID NO: 61674 - DNA, 20 bp, synthetic construct
  misc_feature 1..20: note = chemically synthesized
  source 1..20: mol_type = other DNA
tccctctctatcgtggagtc

SEQ ID NO: 61675 - DNA, 20 bp, synthetic construct
  misc_feature 1..20: note = chemically synthesized
  source 1..20: mol_type = other DNA
aaggtggtgaagatagatct

SEQ ID NO: 61676 - DNA, 20 bp, synthetic construct
  misc_feature 1..20: note = chemically synthesized
  source 1..20: mol_type = other DNA
agatctgggggttcaaatga

SEQ ID NO: 61677 - DNA, 20 bp, synthetic construct
  misc_feature 1..20: note = chemically synthesized
  source 1..20: mol_type = other DNA
gcccataatcatcaccctct

SEQ ID NO: 61678 - DNA, 20 bp, synthetic construct
  misc_feature 1..20: note = chemically synthesized
  source 1..20: mol_type = other DNA
ctgatccttaagaaggtcat

SEQ ID NO: 61679 - DNA, 20 bp, synthetic construct
  misc_feature 1..20: note = chemically synthesized
  source 1..20: mol_type = other DNA
tgcttcatcaaaaaaatgtt

SEQ ID NO: 61680 - DNA, 20 bp, synthetic construct
  misc_feature 1..20: note = chemically synthesized
  source 1..20: mol_type = other DNA
agataccatctcacaccagt

SEQ ID NO: 61681 - DNA, 20 bp, synthetic construct
  misc_feature 1..20: note = chemically synthesized
  source 1..20: mol_type = other DNA
agggaacaacaggtgctgga

SEQ ID NO: 61682 - DNA, 20 bp, synthetic construct
  misc_feature 1..20: note = chemically synthesized
  source 1..20: mol_type = other DNA
agtcagtgtggcgattcctc

SEQ ID NO: 61683 - DNA, 20 bp, synthetic construct
  misc_feature 1..20: note = chemically synthesized
  source 1..20: mol_type = other DNA
ttgacccagccatcccatta

SEQ ID NO: 61684 - DNA, 20 bp, synthetic construct
  misc_feature 1..20: note = chemically synthesized
  source 1..20: mol_type = other DNA
cattactgggtatataccca

SEQ ID NO: 61685 - DNA, 20 bp, synthetic construct
  misc_feature 1..20: note = chemically synthesized
  source 1..20: mol_type = other DNA
aaatgtccaacaatgataga

SEQ ID NO: 61686 - DNA, 20 bp, synthetic construct
  misc_feature 1..20: note = chemically synthesized
  source 1..20: mol_type = other DNA
aatgtggcacatatacacca

SEQ ID NO: 61687 - DNA, 20 bp, synthetic construct
  misc_feature 1..20: note = chemically synthesized
  source 1..20: mol_type = other DNA
ctatgcagccataaaaaatg

SEQ ID NO: 61688 - DNA, 20 bp, synthetic construct
  misc_feature 1..20: note = chemically synthesized
  source 1..20: mol_type = other DNA
ttcatgtcatttgtagggac

SEQ ID NO: 61689 - DNA, 20 bp, synthetic construct
  misc_feature 1..20: note = chemically synthesized
  source 1..20: mol_type = other DNA
gcatgttctcactcataggt

SEQ ID NO: 61690 - DNA, 20 bp, synthetic construct
  misc_feature 1..20: note = chemically synthesized
  source 1..20: mol_type = other DNA
taatgctaagtgacaagtta

SEQ ID NO: 61691 - DNA, 20 bp, synthetic construct
  misc_feature 1..20: note = chemically synthesized
  source 1..20: mol_type = other DNA
aataataaaaatacattatt

SEQ ID NO: 61692 - DNA, 20 bp, synthetic construct
  misc_feature 1..20: note = chemically synthesized
  source 1..20: mol_type = other DNA
ttttgttattctggctctgc

SEQ ID NO: 61693 - DNA, 20 bp, synthetic construct
  misc_feature 1..20: note = chemically synthesized
  source 1..20: mol_type = other DNA
tctgctagaattctcttgat

SEQ ID NO: 61694 - DNA, 20 bp, synthetic construct
  misc_feature 1..20: note = chemically synthesized
  source 1..20: mol_type = other DNA
ttacacactatttacattct

SEQ ID NO: 61695 - DNA, 20 bp, synthetic construct
  misc_feature 1..20: note = chemically synthesized
  source 1..20: mol_type = other DNA
tataattttaagataaaaag

SEQ ID NO: 61696 - DNA, 20 bp, synthetic construct
  misc_feature 1..20: note = chemically synthesized
  source 1..20: mol_type = other DNA
cagcactttgggaggccaag

SEQ ID NO: 61697 - DNA, 20 bp, synthetic construct
  misc_feature 1..20: note = chemically synthesized
  source 1..20: mol_type = other DNA
actttgggaggccaaggagg

SEQ ID NO: 61698 - DNA, 20 bp, synthetic construct
  misc_feature 1..20: note = chemically synthesized
  source 1..20: mol_type = other DNA
actaaaaatacaaaaattag

SEQ ID NO: 61699 - DNA, 20 bp, synthetic construct
  misc_feature 1..20: note = chemically synthesized
  source 1..20: mol_type = other DNA
ttctcaggaggctgtggcag

SEQ ID NO: 61700 - DNA, 20 bp, synthetic construct
  misc_feature 1..20: note = chemically synthesized
  source 1..20: mol_type = other DNA
aatcacttgaacctgggagg

SEQ ID NO: 61701 - DNA, 20 bp, synthetic construct
  misc_feature 1..20: note = chemically synthesized
  source 1..20: mol_type = other DNA
actgcactccagcctggcga

SEQ ID NO: 61702 - DNA, 20 bp, synthetic construct
  misc_feature 1..20: note = chemically synthesized
  source 1..20: mol_type = other DNA
aaaaaaaaaaaaaaaaaaag

SEQ ID NO: 61703 - DNA, 20 bp, synthetic construct
  misc_feature 1..20: note = chemically synthesized
  source 1..20: mol_type = other DNA
aaaaaaaaaagctgaatgtc

SEQ ID NO: 61704 - DNA, 20 bp, synthetic construct
  misc_feature 1..20: note = chemically synthesized
  source 1..20: mol_type = other DNA
aggaaagacaaaaacgcaat

SEQ ID NO: 61705 - DNA, 20 bp, synthetic construct
  misc_feature 1..20: note = chemically synthesized
  source 1..20: mol_type = other DNA
agttatgatgctgagcctcc

SEQ ID NO: 61706 - DNA, 20 bp, synthetic construct
  misc_feature 1..20: note = chemically synthesized
  source 1..20: mol_type = other DNA
tatcttacatcagctggttt

SEQ ID NO: 61707 - DNA, 20 bp, synthetic construct
  misc_feature 1..20: note = chemically synthesized
  source 1..20: mol_type = other DNA
aagagagggaagggagatca

SEQ ID NO: 61708 - DNA, 20 bp, synthetic construct
  misc_feature 1..20: note = chemically synthesized
  source 1..20: mol_type = other DNA
tgaggcctcatgagaggtct

SEQ ID NO: 61709 - DNA, 20 bp, synthetic construct
  misc_feature 1..20: note = chemically synthesized
  source 1..20: mol_type = other DNA
gcctcatgagaggtctgtga

SEQ ID NO: 61710 - DNA, 20 bp, synthetic construct
  misc_feature 1..20: note = chemically synthesized
  source 1..20: mol_type = other DNA
ctgtgagtgaatgatctgaa

SEQ ID NO: 61711 - DNA, 20 bp, synthetic construct
  misc_feature 1..20: note = chemically synthesized
  source 1..20: mol_type = other DNA
actgagtcctcaaagaggac

SEQ ID NO: 61712 - DNA, 20 bp, synthetic construct
  misc_feature 1..20: note = chemically synthesized
  source 1..20: mol_type = other DNA
cctattttagccacaatact

SEQ ID NO: 61713 - DNA, 20 bp, synthetic construct
  misc_feature 1..20: note = chemically synthesized
  source 1..20: mol_type = other DNA
ttttagccacaatactgtga

SEQ ID NO: 61714 - DNA, 20 bp, synthetic construct
  misc_feature 1..20: note = chemically synthesized
  source 1..20: mol_type = other DNA
agccacaatactgtgagtgg

SEQ ID NO: 61715 - DNA, 20 bp, synthetic construct
  misc_feature 1..20: note = chemically synthesized
  source 1..20: mol_type = other DNA
agtgggtgagtgccaggaac

SEQ ID NO: 61716 - DNA, 20 bp, synthetic construct
  misc_feature 1..20: note = chemically synthesized
  source 1..20: mol_type = other DNA
gagtgccaggaacttgaata

SEQ ID NO: 61717 - DNA, 20 bp, synthetic construct
  misc_feature 1..20: note = chemically synthesized
  source 1..20: mol_type = other DNA
ggtaaagatcacagctgagg

SEQ ID NO: 61718 - DNA, 20 bp, synthetic construct
  misc_feature 1..20: note = chemically synthesized
  source 1..20: mol_type = other DNA
tttttttttttcttttttga

SEQ ID NO: 61719 - DNA, 20 bp, synthetic construct
  misc_feature 1..20: note = chemically synthesized
  source 1..20: mol_type = other DNA
ggttttctaatctgggaccc

SEQ ID NO: 61720 - DNA, 20 bp, synthetic construct
  misc_feature 1..20: note = chemically synthesized
  source 1..20: mol_type = other DNA
tgtttatagcttttttttca

SEQ ID NO: 61721 - DNA, 20 bp, synthetic construct
  misc_feature 1..20: note = chemically synthesized
  source 1..20: mol_type = other DNA
tttgaaaataagaagcagaa

SEQ ID NO: 61722 - DNA, 20 bp, synthetic construct
  misc_feature 1..20: note = chemically synthesized
  source 1..20: mol_type = other DNA
attgataactttcctgttca

SEQ ID NO: 61723 - DNA, 20 bp, synthetic construct
  misc_feature 1..20: note = chemically synthesized
  source 1..20: mol_type = other DNA
ttgttgatagtttttctctg

SEQ ID NO: 61724 - DNA, 20 bp, synthetic construct
  misc_feature 1..20: note = chemically synthesized
  source 1..20: mol_type = other DNA
tgaagagtagacaaaaaatt

SEQ ID NO: 61725 - DNA, 20 bp, synthetic construct
  misc_feature 1..20: note = chemically synthesized
  source 1..20: mol_type = other DNA
agtagacaaaaaattctgaa

SEQ ID NO: 61726 - DNA, 20 bp, synthetic construct
  misc_feature 1..20: note = chemically synthesized
  source 1..20: mol_type = other DNA
ttaagatctaagaaagcaaa

SEQ ID NO: 61727 - DNA, 20 bp, synthetic construct
  misc_feature 1..20: note = chemically synthesized
  source 1..20: mol_type = other DNA
gcagatgataatatattgga

SEQ ID NO: 61728 - DNA, 20 bp, synthetic construct
  misc_feature 1..20: note = chemically synthesized
  source 1..20: mol_type = other DNA
actgggttggagaaggcagg

SEQ ID NO: 61729 - DNA, 20 bp, synthetic construct
  misc_feature 1..20: note = chemically synthesized
  source 1..20: mol_type = other DNA
cttgtggacaatagaaatct

SEQ ID NO: 61730 - DNA, 20 bp, synthetic construct
  misc_feature 1..20: note = chemically synthesized
  source 1..20: mol_type = other DNA
ggacaatagaaatctgagag

SEQ ID NO: 61731 - DNA, 20 bp, synthetic construct
  misc_feature 1..20: note = chemically synthesized
  source 1..20: mol_type = other DNA
aaagacaatgcgtgagagca

SEQ ID NO: 61732 - DNA, 20 bp, synthetic construct
  misc_feature 1..20: note = chemically synthesized
  source 1..20: mol_type = other DNA
gaactgctctaagagatggc

SEQ ID NO: 61733 - DNA, 20 bp, synthetic construct
  misc_feature 1..20: note = chemically synthesized
  source 1..20: mol_type = other DNA
catccaactcagaaggaggg

SEQ ID NO: 61734 - DNA, 20 bp, synthetic construct
  misc_feature 1..20: note = chemically synthesized
  source 1..20: mol_type = other DNA
atgagaagatgagggaaagg

SEQ ID NO: 61735 - DNA, 20 bp, synthetic construct
  misc_feature 1..20: note = chemically synthesized
  source 1..20: mol_type = other DNA
atgtatttatgcatcttggt

SEQ ID NO: 61736 - DNA, 20 bp, synthetic construct
  misc_feature 1..20: note = chemically synthesized
  source 1..20: mol_type = other DNA
gagagtgttgctacaagtat

SEQ ID NO: 61737 - DNA, 20 bp, synthetic construct
  misc_feature 1..20: note = chemically synthesized
  source 1..20: mol_type = other DNA
attcaggtcaatagaacatc

SEQ ID NO: 61738 - DNA, 20 bp, synthetic construct
  misc_feature 1..20: note = chemically synthesized
  source 1..20: mol_type = other DNA
tagaacatctagaatgaagc

SEQ ID NO: 61739 - DNA, 20 bp, synthetic construct
  misc_feature 1..20: note = chemically synthesized
  source 1..20: mol_type = other DNA
tttctcaagttttcagcatt

SEQ ID NO: 61740 - DNA, 20 bp, synthetic construct
  misc_feature 1..20: note = chemically synthesized
  source 1..20: mol_type = other DNA
attctgcataaaattgaagg

SEQ ID NO: 61741 - DNA, 20 bp, synthetic construct
  misc_feature 1..20: note = chemically synthesized
  source 1..20: mol_type = other DNA
acttgtcccagatggtattg

SEQ ID NO: 61742 - DNA, 20 bp, synthetic construct
  misc_feature 1..20: note = chemically synthesized
  source 1..20: mol_type = other DNA
aatcactaaacatttatgtt

SEQ ID NO: 61743 - DNA, 20 bp, synthetic construct
  misc_feature 1..20: note = chemically synthesized
  source 1..20: mol_type = other DNA
cttgttaatagctaagccat

SEQ ID NO: 61744 - DNA, 20 bp, synthetic construct
  misc_feature 1..20: note = chemically synthesized
  source 1..20: mol_type = other DNA
taatagctaagccatctgaa

SEQ ID NO: 61745 - DNA, 20 bp, synthetic construct
  misc_feature 1..20: note = chemically synthesized
  source 1..20: mol_type = other DNA
atgacagtatctagctctcc

SEQ ID NO: 61746 - DNA, 20 bp, synthetic construct
  misc_feature 1..20: note = chemically synthesized
  source 1..20: mol_type = other DNA
gaatccccacacgcctgcct

SEQ ID NO: 61747 - DNA, 20 bp, synthetic construct
  misc_feature 1..20: note = chemically synthesized
  source 1..20: mol_type = other DNA
ccttacacaattttttttaa

SEQ ID NO: 61748 - DNA, 20 bp, synthetic construct
  misc_feature 1..20: note = chemically synthesized
  source 1..20: mol_type = other DNA
tttcttctatgtttaccctt

SEQ ID NO: 61749 - DNA, 20 bp, synthetic construct
  misc_feature 1..20: note = chemically synthesized
  source 1..20: mol_type = other DNA
aatctgtgtttttaagcatg

SEQ ID NO: 61750 - DNA, 20 bp, synthetic construct
  misc_feature 1..20: note = chemically synthesized
  source 1..20: mol_type = other DNA
attataattcagtcttctat

SEQ ID NO: 61751 - DNA, 20 bp, synthetic construct
  misc_feature 1..20: note = chemically synthesized
  source 1..20: mol_type = other DNA
attcaatgtgatttaatttt

SEQ ID NO: 61752 - DNA, 20 bp, synthetic construct
  misc_feature 1..20: note = chemically synthesized
  source 1..20: mol_type = other DNA
aggtgctaaagacttgcctc

SEQ ID NO: 61753 - DNA, 20 bp, synthetic construct
  misc_feature 1..20: note = chemically synthesized
  source 1..20: mol_type = other DNA
aaagacttgcctccaggatt

SEQ ID NO: 61754 - DNA, 20 bp, synthetic construct
  misc_feature 1..20: note = chemically synthesized
  source 1..20: mol_type = other DNA
ttctttctcccatacccctc

SEQ ID NO: 61755 - DNA, 20 bp, synthetic construct
  misc_feature 1..20: note = chemically synthesized
  source 1..20: mol_type = other DNA
cagaactgcaacagttcctc

SEQ ID NO: 61756 - DNA, 20 bp, synthetic construct
  misc_feature 1..20: note = chemically synthesized
  source 1..20: mol_type = other DNA
gcaacagttcctcaggagtt

SEQ ID NO: 61757 - DNA, 20 bp, synthetic construct
  misc_feature 1..20: note = chemically synthesized
  source 1..20: mol_type = other DNA
ggagaaaatgagaaaatcaa

SEQ ID NO: 61758 - DNA, 20 bp, synthetic construct
  misc_feature 1..20: note = chemically synthesized
  source 1..20: mol_type = other DNA
aaaggtttctatctcgaaag

SEQ ID NO: 61759 - DNA, 20 bp, synthetic construct
  misc_feature 1..20: note = chemically synthesized
  source 1..20: mol_type = other DNA
gcccagacattgttttgcac

SEQ ID NO: 61760 - DNA, 20 bp, synthetic construct
  misc_feature 1..20: note = chemically synthesized
  source 1..20: mol_type = other DNA
cacctgaggacctgaaaaaa

SEQ ID NO: 61761 - DNA, 20 bp, synthetic construct
  misc_feature 1..20: note = chemically synthesized
  source 1..20: mol_type = other DNA
tgaaaaaagcgaatttgatt

SEQ ID NO: 61762 - DNA, 20 bp, synthetic construct
  misc_feature 1..20: note = chemically synthesized
  source 1..20: mol_type = other DNA
attcagaatgttggaagggg

SEQ ID NO: 61763 - DNA, 20 bp, synthetic construct
  misc_feature 1..20: note = chemically synthesized
  source 1..20: mol_type = other DNA
ggccaagctcaagtaactgt

SEQ ID NO: 61764 - DNA, 20 bp, synthetic construct
  misc_feature 1..20: note = chemically synthesized
  source 1..20: mol_type = other DNA
taagtaccctcaaaatagtt

SEQ ID NO: 61765 - DNA, 20 bp, synthetic construct
  misc_feature 1..20: note = chemically synthesized
  source 1..20: mol_type = other DNA
ttaaaattaatgaaaaattt

SEQ ID NO: 61766 - DNA, 20 bp, synthetic construct
  misc_feature 1..20: note = chemically synthesized
  source 1..20: mol_type = other DNA
cttcttcaggaaaatagttg

SEQ ID NO: 61767 - DNA, 20 bp, synthetic construct
  misc_feature 1..20: note = chemically synthesized
  source 1..20: mol_type = other DNA
aagaaatctgatctttaccg

SEQ ID NO: 61768 - DNA, 20 bp, synthetic construct
  misc_feature 1..20: note = chemically synthesized
  source 1..20: mol_type = other DNA
gggctggaggcagctcatca

SEQ ID NO: 61769 - DNA, 20 bp, synthetic construct
  misc_feature 1..20: note = chemically synthesized
  source 1..20: mol_type = other DNA
cctactgtaatgggcatcct

SEQ ID NO: 61770 - DNA, 20 bp, synthetic construct
  misc_feature 1..20: note = chemically synthesized
  source 1..20: mol_type = other DNA
ctgtaatgggcatcctatgg

SEQ ID NO: 61771 - DNA, 20 bp, synthetic construct
  misc_feature 1..20: note = chemically synthesized
  source 1..20: mol_type = other DNA
tattcactccctttctgttg

SEQ ID NO: 61772 - DNA, 20 bp, synthetic construct
  misc_feature 1..20: note = chemically synthesized
  source 1..20: mol_type = other DNA
gcttccattctcaccaatac

SEQ ID NO: 61773 - DNA, 20 bp, synthetic construct
  misc_feature 1..20: note = chemically synthesized
  source 1..20: mol_type = other DNA
aatactagagtcatagcgtt

SEQ ID NO: 61774 - DNA, 20 bp, synthetic construct
  misc_feature 1..20: note = chemically synthesized
  source 1..20: mol_type = other DNA
agagtcatagcgttaggagt

SEQ ID NO: 61775 - DNA, 20 bp, synthetic construct
  misc_feature 1..20: note = chemically synthesized
  source 1..20: mol_type = other DNA
taggagtgggagtgtttcta

SEQ ID NO: 61776 - DNA, 20 bp, synthetic construct
  misc_feature 1..20: note = chemically synthesized
  source 1..20: mol_type = other DNA
ttatcttctatgttacagtg

SEQ ID NO: 61777 - DNA, 20 bp, synthetic construct
  misc_feature 1..20: note = chemically synthesized
  source 1..20: mol_type = other DNA
cattcatttacagatttggg

SEQ ID NO: 61778 - DNA, 20 bp, synthetic construct
  misc_feature 1..20: note = chemically synthesized
  source 1..20: mol_type = other DNA
cagaggttgtccacattatc

SEQ ID NO: 61779 - DNA, 20 bp, synthetic construct
  misc_feature 1..20: note = chemically synthesized
  source 1..20: mol_type = other DNA
cataggtttagtagttaaac

SEQ ID NO: 61780 - DNA, 20 bp, synthetic construct
  misc_feature 1..20: note = chemically synthesized
  source 1..20: mol_type = other DNA
agtagttaaactcggatctg

SEQ ID NO: 61781 - DNA, 20 bp, synthetic construct
  misc_feature 1..20: note = chemically synthesized
  source 1..20: mol_type = other DNA
cacagacataaaaatgaagc

SEQ ID NO: 61782 - DNA, 20 bp, synthetic construct
  misc_feature 1..20: note = chemically synthesized
  source 1..20: mol_type = other DNA
cagaatgaaaaatgaaagcc

SEQ ID NO: 61783 - DNA, 20 bp, synthetic construct
  misc_feature 1..20: note = chemically synthesized
  source 1..20: mol_type = other DNA
gttctttcttagcaaagagc

SEQ ID NO: 61784 - DNA, 20 bp, synthetic construct
  misc_feature 1..20: note = chemically synthesized
  source 1..20: mol_type = other DNA
aggacttaagtactttacca

SEQ ID NO: 61785 - DNA, 20 bp, synthetic construct
  misc_feature 1..20: note = chemically synthesized
  source 1..20: mol_type = other DNA
agaagtctggtgacagaaca

SEQ ID NO: 61786 - DNA, 20 bp, synthetic construct
  misc_feature 1..20: note = chemically synthesized
  source 1..20: mol_type = other DNA
tcttttaactgtcctctacc

SEQ ID NO: 61787 - DNA, 20 bp, synthetic construct
  misc_feature 1..20: note = chemically synthesized
  source 1..20: mol_type = other DNA
aactgtcctctaccctgagt

SEQ ID NO: 61788 - DNA, 20 bp, synthetic construct
  misc_feature 1..20: note = chemically synthesized
  source 1..20: mol_type = other DNA
atacagtcgtaagtcactta

SEQ ID NO: 61789 - DNA, 20 bp, synthetic construct
  misc_feature 1..20: note = chemically synthesized
  source 1..20: mol_type = other DNA
aattttcaatacattccttg

SEQ ID NO: 61790 - DNA, 20 bp, synthetic construct
  misc_feature 1..20: note = chemically synthesized
  source 1..20: mol_type = other DNA
atacattccttgcaggatgt

SEQ ID NO: 61791 - DNA, 20 bp, synthetic construct
  misc_feature 1..20: note = chemically synthesized
  source 1..20: mol_type = other DNA
agctcgtaaaaaagtaaaaa

SEQ ID NO: 61792 - DNA, 20 bp, synthetic construct
  misc_feature 1..20: note = chemically synthesized
  source 1..20: mol_type = other DNA
aaagtaaaaagtgagttttt

SEQ ID NO: 61793 - DNA, 20 bp, synthetic construct
  misc_feature 1..20: note = chemically synthesized
  source 1..20: mol_type = other DNA
tcccttggcctaataatagg

SEQ ID NO: 61794 - DNA, 20 bp, synthetic construct
  misc_feature 1..20: note = chemically synthesized
  source 1..20: mol_type = other DNA
aatagaaaatatagccattc

SEQ ID NO: 61795 - DNA, 20 bp, synthetic construct
  misc_feature 1..20: note = chemically synthesized
  source 1..20: mol_type = other DNA
gaccaacaatgttgagagaa

SEQ ID NO: 61796 - DNA, 20 bp, synthetic construct
  misc_feature 1..20: note = chemically synthesized
  source 1..20: mol_type = other DNA
gactaaaaaattgtggtggg

SEQ ID NO: 61797 - DNA, 20 bp, synthetic construct
  misc_feature 1..20: note = chemically synthesized
  source 1..20: mol_type = other DNA
agactgatttaattgtgaaa

SEQ ID NO: 61798 - DNA, 20 bp, synthetic construct
  misc_feature 1..20: note = chemically synthesized
  source 1..20: mol_type = other DNA
caaaaggggaaaacctatct

SEQ ID NO: 61799 - DNA, 20 bp, synthetic construct
  misc_feature 1..20: note = chemically synthesized
  source 1..20: mol_type = other DNA
taatgttcaagttattgatg

SEQ ID NO: 61800 - DNA, 20 bp, synthetic construct
  misc_feature 1..20: note = chemically synthesized
  source 1..20: mol_type = other DNA
cttaatggaaaaatctcatt

SEQ ID NO: 61801 - DNA, 20 bp, synthetic construct
  misc_feature 1..20: note = chemically synthesized
  source 1..20: mol_type = other DNA
ccatctgatatctaaatttt

SEQ ID NO: 61802 - DNA, 20 bp, synthetic construct
  misc_feature 1..20: note = chemically synthesized
  source 1..20: mol_type = other DNA
gcatgccttttgtgtatatg

SEQ ID NO: 61803 - DNA, 20 bp, synthetic construct
  misc_feature 1..20: note = chemically synthesized
  source 1..20: mol_type = other DNA
ttttgtgtatatggtgggtt

SEQ ID NO: 61804 - DNA, 20 bp, synthetic construct
  misc_feature 1..20: note = chemically synthesized
  source 1..20: mol_type = other DNA
atggcaatattgcagcctca

SEQ ID NO: 61805 - DNA, 20 bp, synthetic construct
  misc_feature 1..20: note = chemically synthesized
  source 1..20: mol_type = other DNA
ggtataaggaggtgcttact

SEQ ID NO: 61806 - DNA, 20 bp, synthetic construct
  misc_feature 1..20: note = chemically synthesized
  source 1..20: mol_type = other DNA
tccttaaactggtttagacg

SEQ ID NO: 61807 - DNA, 20 bp, synthetic construct
  misc_feature 1..20: note = chemically synthesized
  source 1..20: mol_type = other DNA
atttttcaaattgattctaa

SEQ ID NO: 61808 - DNA, 20 bp, synthetic construct
  misc_feature 1..20: note = chemically synthesized
  source 1..20: mol_type = other DNA
attgattctaagagggtgat

SEQ ID NO: 61809 - DNA, 20 bp, synthetic construct
  misc_feature 1..20: note = chemically synthesized
  source 1..20: mol_type = other DNA
ctgttagaaaagaaaatgat

SEQ ID NO: 61810 - DNA, 20 bp, synthetic construct
  misc_feature 1..20: note = chemically synthesized
  source 1..20: mol_type = other DNA
atgatatgagtaattttctc

SEQ ID NO: 61811 - DNA, 20 bp, synthetic construct
  misc_feature 1..20: note = chemically synthesized
  source 1..20: mol_type = other DNA
caataaataactgttgatta

SEQ ID NO: 61812 - DNA, 20 bp, synthetic construct
  misc_feature 1..20: note = chemically synthesized
  source 1..20: mol_type = other DNA
ctcagttctattctaagtca

SEQ ID NO: 61813 - DNA, 20 bp, synthetic construct
  misc_feature 1..20: note = chemically synthesized
  source 1..20: mol_type = other DNA
atacttccttaatgtatatt

SEQ ID NO: 61814 - DNA, 20 bp, synthetic construct
  misc_feature 1..20: note = chemically synthesized
  source 1..20: mol_type = other DNA
ttgaataaaattatttttat

SEQ ID NO: 61815 - DNA, 20 bp, synthetic construct
  misc_feature 1..20: note = chemically synthesized
  source 1..20: mol_type = other DNA
cgtagtaatgatagtgttgt

SEQ ID NO: 61816 - DNA, 20 bp, synthetic construct
  misc_feature 1..20: note = chemically synthesized
  source 1..20: mol_type = other DNA
attttctttctagtgcctgc

SEQ ID NO: 61817 - DNA, 20 bp, synthetic construct
  misc_feature 1..20: note = chemically synthesized
  source 1..20: mol_type = other DNA
ttctttgtggctgttcttaa

SEQ ID NO: 61818 - DNA, 20 bp, synthetic construct
  misc_feature 1..20: note = chemically synthesized
  source 1..20: mol_type = other DNA
cagttctagcagccttttgg

SEQ ID NO: 61819 - DNA, 20 bp, synthetic construct
  misc_feature 1..20: note = chemically synthesized
  source 1..20: mol_type = other DNA
cagccttttggaagaatctg

SEQ ID NO: 61820 - DNA, 20 bp, synthetic construct
  misc_feature 1..20: note = chemically synthesized
  source 1..20: mol_type = other DNA
tctgtaggattttctaagta

SEQ ID NO: 61821 - DNA, 20 bp, synthetic construct
  misc_feature 1..20: note = chemically synthesized
  source 1..20: mol_type = other DNA
cttccaattttatgttcact

SEQ ID NO: 61822 - DNA, 20 bp, synthetic construct
  misc_feature 1..20: note = chemically synthesized
  source 1..20: mol_type = other DNA
ttatgttcactaggagtggt

SEQ ID NO: 61823 - DNA, 20 bp, synthetic construct
  misc_feature 1..20: note = chemically synthesized
  source 1..20: mol_type = other DNA
tcactaggagtggtgagaat

SEQ ID NO: 61824 - DNA, 20 bp, synthetic construct
  misc_feature 1..20: note = chemically synthesized
  source 1..20: mol_type = other DNA
gtcttgttgcagttttcgag

SEQ ID NO: 61825 - DNA, 20 bp, synthetic construct
  misc_feature 1..20: note = chemically synthesized
  source 1..20: mol_type = other DNA
cattcagtatggttttggtt

SEQ ID NO: 61826 - DNA, 20 bp, synthetic construct
  misc_feature 1..20: note = chemically synthesized
  source 1..20: mol_type = other DNA
gttggaggtttttatcatga

SEQ ID NO: 61827 - DNA, 20 bp, synthetic construct
  misc_feature 1..20: note = chemically synthesized
  source 1..20: mol_type = other DNA
gtttttatcatgaagggatg

SEQ ID NO: 61828 - DNA, 20 bp, synthetic construct
  misc_feature 1..20: note = chemically synthesized
  source 1..20: mol_type = other DNA
aataaaagctttccaggctc

SEQ ID NO: 61829 - DNA, 20 bp, synthetic construct
  misc_feature 1..20: note = chemically synthesized
  source 1..20: mol_type = other DNA
tttccaggctcatggattgg

SEQ ID NO: 61830 - DNA, 20 bp, synthetic construct
  misc_feature 1..20: note = chemically synthesized
  source 1..20: mol_type = other DNA
catggattggaagaatcaat

SEQ ID NO: 61831 - DNA, 20 bp, synthetic construct
  misc_feature 1..20: note = chemically synthesized
  source 1..20: mol_type = other DNA
tagcactttagggggctgag

SEQ ID NO: 61832 - DNA, 20 bp, synthetic construct
  misc_feature 1..20: note = chemically synthesized
  source 1..20: mol_type = other DNA
tgggtgtatcacctgaggtc

SEQ ID NO: 61833 - DNA, 20 bp, synthetic construct
  misc_feature 1..20: note = chemically synthesized
  source 1..20: mol_type = other DNA
tactcggaaggctgaggcag

SEQ ID NO: 61834 - DNA, 20 bp, synthetic construct
  misc_feature 1..20: note = chemically synthesized
  source 1..20: mol_type = other DNA
tcgcaccactgcactccagc

SEQ ID NO: 61835 - DNA, 20 bp, synthetic construct
  misc_feature 1..20: note = chemically synthesized
  source 1..20: mol_type = other DNA
ctgcactccagcctgggtga

SEQ ID NO: 61836 - DNA, 20 bp, synthetic construct
  misc_feature 1..20: note = chemically synthesized
  source 1..20: mol_type = other DNA
acctatccaataaactgtgc

SEQ ID NO: 61837 - DNA, 20 bp, synthetic construct
  misc_feature 1..20: note = chemically synthesized
  source 1..20: mol_type = other DNA
acgtggctagccatatgcag

SEQ ID NO: 61838 - DNA, 20 bp, synthetic construct
  misc_feature 1..20: note = chemically synthesized
  source 1..20: mol_type = other DNA
tttagagaaatcaactgaaa

SEQ ID NO: 61839 - DNA, 20 bp, synthetic construct
  misc_feature 1..20: note = chemically synthesized
  source 1..20: mol_type = other DNA
acccaaatgtccaacaatga

SEQ ID NO: 61840 - DNA, 20 bp, synthetic construct
  misc_feature 1..20: note = chemically synthesized
  source 1..20: mol_type = other DNA
aaatgtccaacaatgataga

SEQ ID NO: 61841 - DNA, 20 bp, synthetic construct
  misc_feature 1..20: note = chemically synthesized
  source 1..20: mol_type = other DNA
aatgtggcacatatacacca

SEQ ID NO: 61842 - DNA, 20 bp, synthetic construct
  misc_feature 1..20: note = chemically synthesized
  source 1..20: mol_type = other DNA
ctatgcagccataaaaaatg

SEQ ID NO: 61843 - DNA, 20 bp, synthetic construct
  misc_feature 1..20: note = chemically synthesized
  source 1..20: mol_type = other DNA
ttcatgtcctttgtagggac

SEQ ID NO: 61844 - DNA, 20 bp, synthetic construct
  misc_feature 1..20: note = chemically synthesized
  source 1..20: mol_type = other DNA
acatgttctcacttataggt

SEQ ID NO: 61845 - DNA, 20 bp, synthetic construct
  misc_feature 1..20: note = chemically synthesized
  source 1..20: mol_type = other DNA
tcacacaccagggcctgttg

SEQ ID NO: 61846 - DNA, 20 bp, synthetic construct
  misc_feature 1..20: note = chemically synthesized
  source 1..20: mol_type = other DNA
accagggcctgttgtggggt

SEQ ID NO: 61847 - DNA, 20 bp, synthetic construct
  misc_feature 1..20: note = chemically synthesized
  source 1..20: mol_type = other DNA
cctgttgtggggtgggggtg

SEQ ID NO: 61848 - DNA, 20 bp, synthetic construct
  misc_feature 1..20: note = chemically synthesized
  source 1..20: mol_type = other DNA
ggtgggggtggggggtggag

SEQ ID NO: 61849 - DNA, 20 bp, synthetic construct
  misc_feature 1..20: note = chemically synthesized
  source 1..20: mol_type = other DNA
agatatacctaatgtaaatg

SEQ ID NO: 61850 - DNA, 20 bp, synthetic construct
  misc_feature 1..20: note = chemically synthesized
  source 1..20: mol_type = other DNA
ctaatgtaaatgatgagtta

SEQ ID NO: 61851 - DNA, 20 bp, synthetic construct
  misc_feature 1..20: note = chemically synthesized
  source 1..20: mol_type = other DNA
gcagcagaagaaactatcaa

SEQ ID NO: 61852 - DNA, 20 bp, synthetic construct
  misc_feature 1..20: note = chemically synthesized
  source 1..20: mol_type = other DNA
cagagtaaactgacaatcta

SEQ ID NO: 61853 - DNA, 20 bp, synthetic construct
  misc_feature 1..20: note = chemically synthesized
  source 1..20: mol_type = other DNA
tctggaaaaggtctaatatt

SEQ ID NO: 61854 - DNA, 20 bp, synthetic construct
  misc_feature 1..20: note = chemically synthesized
  source 1..20: mol_type = other DNA
tctaatattcagaatctata

SEQ ID NO: 61855 - DNA, 20 bp, synthetic construct
  misc_feature 1..20: note = chemically synthesized
  source 1..20: mol_type = other DNA
agatactatctcataccagt

SEQ ID NO: 61856 - DNA, 20 bp, synthetic construct
  misc_feature 1..20: note = chemically synthesized
  source 1..20: mol_type = other DNA
aacacttatacaatgatgat

SEQ ID NO: 61857 - DNA, 20 bp, synthetic construct
  misc_feature 1..20: note = chemically synthesized
  source 1..20: mol_type = other DNA
ccactgcagaaaacagtttg

SEQ ID NO: 61858 - DNA, 20 bp, synthetic construct
  misc_feature 1..20: note = chemically synthesized
  source 1..20: mol_type = other DNA
ttgacacagcaatcccgcta

SEQ ID NO: 61859 - DNA, 20 bp, synthetic construct
  misc_feature 1..20: note = chemically synthesized
  source 1..20: mol_type = other DNA
atgttcactgtaatgctgtt

SEQ ID NO: 61860 - DNA, 20 bp, synthetic construct
  misc_feature 1..20: note = chemically synthesized
  source 1..20: mol_type = other DNA
aggtgtctatcaaaggcgga

SEQ ID NO: 61861 - DNA, 20 bp, synthetic construct
  misc_feature 1..20: note = chemically synthesized
  source 1..20: mol_type = other DNA
atcatgtccttttcagcaac

SEQ ID NO: 61862 - DNA, 20 bp, synthetic construct
  misc_feature 1..20: note = chemically synthesized
  source 1..20: mol_type = other DNA
ttataagtggaagctaaaca

SEQ ID NO: 61863 - DNA, 20 bp, synthetic construct
  misc_feature 1..20: note = chemically synthesized
  source 1..20: mol_type = other DNA
aagctaaacattgagtacac

SEQ ID NO: 61864 - DNA, 20 bp, synthetic construct
  misc_feature 1..20: note = chemically synthesized
  source 1..20: mol_type = other DNA
gggcagggagagatgcggga

SEQ ID NO: 61865 - DNA, 20 bp, synthetic construct
  misc_feature 1..20: note = chemically synthesized
  source 1..20: mol_type = other DNA
ggagagggttaaaaaatcta

SEQ ID NO: 61866 - DNA, 20 bp, synthetic construct
  misc_feature 1..20: note = chemically synthesized
  source 1..20: mol_type = other DNA
atagatccattgaggttcct

SEQ ID NO: 61867 - DNA, 20 bp, synthetic construct
  misc_feature 1..20: note = chemically synthesized
  source 1..20: mol_type = other DNA
agacaatgcaaagtacacac

SEQ ID NO: 61868 - DNA, 20 bp, synthetic construct
  misc_feature 1..20: note = chemically synthesized
  source 1..20: mol_type = other DNA
atatactgtgtactgatgct

SEQ ID NO: 61869 - DNA, 20 bp, synthetic construct
  misc_feature 1..20: note = chemically synthesized
  source 1..20: mol_type = other DNA
tactgatgcttagggtcctg

SEQ ID NO: 61870 - DNA, 20 bp, synthetic construct
  misc_feature 1..20: note = chemically synthesized
  source 1..20: mol_type = other DNA
tcccaatgtagaggtggcat

SEQ ID NO: 61871 - DNA, 20 bp, synthetic construct
  misc_feature 1..20: note = chemically synthesized
  source 1..20: mol_type = other DNA
cagaggagggaggggagatc

SEQ ID NO: 61872 - DNA, 20 bp, synthetic construct
  misc_feature 1..20: note = chemically synthesized
  source 1..20: mol_type = other DNA
aggggagatcaagggttctt

SEQ ID NO: 61873 - DNA, 20 bp, synthetic construct
  misc_feature 1..20: note = chemically synthesized
  source 1..20: mol_type = other DNA
aaactctctaatttggcctc

SEQ ID NO: 61874 - DNA, 20 bp, synthetic construct
  misc_feature 1..20: note = chemically synthesized
  source 1..20: mol_type = other DNA
tcttgaatagtctttgagaa

SEQ ID NO: 61875 - DNA, 20 bp, synthetic construct
  misc_feature 1..20: note = chemically synthesized
  source 1..20: mol_type = other DNA
ttgagaagtgagtgtctgaa

SEQ ID NO: 61876 - DNA, 20 bp, synthetic construct
  misc_feature 1..20: note = chemically synthesized
  source 1..20: mol_type = other DNA
actgagtcttcaaatagagc

SEQ ID NO: 61877 - DNA, 20 bp, synthetic construct
  misc_feature 1..20: note = chemically synthesized
  source 1..20: mol_type = other DNA
agtcttcaaatagagcagga

SEQ ID NO: 61878 - DNA, 20 bp, synthetic construct
  misc_feature 1..20: note = chemically synthesized
  source 1..20: mol_type = other DNA
gcaagaaaatgacagcatag

SEQ ID NO: 61879 - DNA, 20 bp, synthetic construct
  misc_feature 1..20: note = chemically synthesized
  source 1..20: mol_type = other DNA
cataggtgagtgccaggaac

SEQ ID NO: 61880 - DNA, 20 bp, synthetic construct
  misc_feature 1..20: note = chemically synthesized
  source 1..20: mol_type = other DNA
gagtgccaggaacaggaata

SEQ ID NO: 61881 - DNA, 20 bp, synthetic construct
  misc_feature 1..20: note = chemically synthesized
  source 1..20: mol_type = other DNA
ataggagaacatactccatc

SEQ ID NO: 61882 - DNA, 20 bp, synthetic construct
  misc_feature 1..20: note = chemically synthesized
  source 1..20: mol_type = other DNA
aagtttcaaatgtggtgctc

SEQ ID NO: 61883 - DNA, 20 bp, synthetic construct
  misc_feature 1..20: note = chemically synthesized
  source 1..20: mol_type = other DNA
gattagcttcaggaaaacgt

SEQ ID NO: 61884 - DNA, 20 bp, synthetic construct
  misc_feature 1..20: note = chemically synthesized
  source 1..20: mol_type = other DNA
agagggctcatggcttttgt

SEQ ID NO: 61885 - DNA, 20 bp, synthetic construct
  misc_feature 1..20: note = chemically synthesized
  source 1..20: mol_type = other DNA
taaaatgtgttttttagatt

SEQ ID NO: 61886 - DNA, 20 bp, synthetic construct
  misc_feature 1..20: note = chemically synthesized
  source 1..20: mol_type = other DNA
ccaataaattattgctaaat

SEQ ID NO: 61887 - DNA, 20 bp, synthetic construct
  misc_feature 1..20: note = chemically synthesized
  source 1..20: mol_type = other DNA
ttattgctaaatatgaatat

SEQ ID NO: 61888 - DNA, 20 bp, synthetic construct
  misc_feature 1..20: note = chemically synthesized
  source 1..20: mol_type = other DNA
gtagtaaaaactgataaggc

SEQ ID NO: 61889 - DNA, 20 bp, synthetic construct
  misc_feature 1..20: note = chemically synthesized
  source 1..20: mol_type = other DNA
cccactgtaatgggcgtctt

SEQ ID NO: 61890 - DNA, 20 bp, synthetic construct
  misc_feature 1..20: note = chemically synthesized
  source 1..20: mol_type = other DNA
ctgtaatgggcgtcttgtgg

SEQ ID NO: 61891 - DNA, 20 bp, synthetic construct
  misc_feature 1..20: note = chemically synthesized
  source 1..20: mol_type = other DNA
ccactcccattatccacttg

SEQ ID NO: 61892 - DNA, 20 bp, synthetic construct
  misc_feature 1..20: note = chemically synthesized
  source 1..20: mol_type = other DNA
ataactatttctactaaatc

SEQ ID NO: 61893 - DNA, 20 bp, synthetic construct
  misc_feature 1..20: note = chemically synthesized
  source 1..20: mol_type = other DNA
gttcgcctattttctgggca

SEQ ID NO: 61894 - DNA, 20 bp, synthetic construct
  misc_feature 1..20: note = chemically synthesized
  source 1..20: mol_type = other DNA
aatggcttgagccctttttt

SEQ ID NO: 61895 - DNA, 20 bp, synthetic construct
  misc_feature 1..20: note = chemically synthesized
  source 1..20: mol_type = other DNA
cttcatgatttctgggcctt

SEQ ID NO: 61896 - DNA, 20 bp, synthetic construct
  misc_feature 1..20: note = chemically synthesized
  source 1..20: mol_type = other DNA
ctacatggaacaataataca

SEQ ID NO: 61897 - DNA, 20 bp, synthetic construct
  misc_feature 1..20: note = chemically synthesized
  source 1..20: mol_type = other DNA
attgagagatactaggaaag

SEQ ID NO: 61898 - DNA, 20 bp, synthetic construct
  misc_feature 1..20: note = chemically synthesized
  source 1..20: mol_type = other DNA
actaggaaagtggaatacta

SEQ ID NO: 61899 - DNA, 20 bp, synthetic construct
  misc_feature 1..20: note = chemically synthesized
  source 1..20: mol_type = other DNA
actgaaagtaccattttagg

SEQ ID NO: 61900 - DNA, 20 bp, synthetic construct
  misc_feature 1..20: note = chemically synthesized
  source 1..20: mol_type = other DNA
ctagttttggccatataaag

SEQ ID NO: 61901 - DNA, 20 bp, synthetic construct
  misc_feature 1..20: note = chemically synthesized
  source 1..20: mol_type = other DNA
ataaagatgaattatagcat

SEQ ID NO: 61902 - DNA, 20 bp, synthetic construct
  misc_feature 1..20: note = chemically synthesized
  source 1..20: mol_type = other DNA
atctcaaaactactctattt

SEQ ID NO: 61903 - DNA, 20 bp, synthetic construct
  misc_feature 1..20: note = chemically synthesized
  source 1..20: mol_type = other DNA
taagttccagggcacatgtg

SEQ ID NO: 61904 - DNA, 20 bp, synthetic construct
  misc_feature 1..20: note = chemically synthesized
  source 1..20: mol_type = other DNA
tgttcctgtgttagtttgat

SEQ ID NO: 61905 - DNA, 20 bp, synthetic construct
  misc_feature 1..20: note = chemically synthesized
  source 1..20: mol_type = other DNA
actctatcattgatggacat

SEQ ID NO: 61906 - DNA, 20 bp, synthetic construct
  misc_feature 1..20: note = chemically synthesized
  source 1..20: mol_type = other DNA
gattccacatcttggctatt

SEQ ID NO: 61907 - DNA, 20 bp, synthetic construct
  misc_feature 1..20: note = chemically synthesized
  source 1..20: mol_type = other DNA
atagattgatttatattcct

SEQ ID NO: 61908 - DNA, 20 bp, synthetic construct
  misc_feature 1..20: note = chemically synthesized
  source 1..20: mol_type = other DNA
tatacccagtaatgagattg

SEQ ID NO: 61909 - DNA, 20 bp, synthetic construct
  misc_feature 1..20: note = chemically synthesized
  source 1..20: mol_type = other DNA
ttcatatgtttattagaagc

SEQ ID NO: 61910 - DNA, 20 bp, synthetic construct
  misc_feature 1..20: note = chemically synthesized
  source 1..20: mol_type = other DNA
tgtcattccccactttttaa

SEQ ID NO: 61911 - DNA, 20 bp, synthetic construct
  misc_feature 1..20: note = chemically synthesized
  source 1..20: mol_type = other DNA
ttgcagttgcttttggtgtc

SEQ ID NO: 61912 - DNA, 20 bp, synthetic construct
  misc_feature 1..20: note = chemically synthesized
  source 1..20: mol_type = other DNA
atttcctagttgctcatttc

SEQ ID NO: 61913 - DNA, 20 bp, synthetic construct
  misc_feature 1..20: note = chemically synthesized
  source 1..20: mol_type = other DNA
tcttgtgttctctctaaatg

SEQ ID NO: 61914 - DNA, 20 bp, synthetic construct
  misc_feature 1..20: note = chemically synthesized
  source 1..20: mol_type = other DNA
cagcaacttggaaatctcac

SEQ ID NO: 61915 - DNA, 20 bp, synthetic construct
  misc_feature 1..20: note = chemically synthesized
  source 1..20: mol_type = other DNA
tgtacatatcctatgtttaa

SEQ ID NO: 61916 - DNA, 20 bp, synthetic construct
  misc_feature 1..20: note = chemically synthesized
  source 1..20: mol_type = other DNA
aaaagggtttgtgtttggag

SEQ ID NO: 61917 - DNA, 20 bp, synthetic construct
  misc_feature 1..20: note = chemically synthesized
  source 1..20: mol_type = other DNA
aattttttaagggcactatt

SEQ ID NO: 61918 - DNA, 20 bp, synthetic construct
  misc_feature 1..20: note = chemically synthesized
  source 1..20: mol_type = other DNA
ttcaaataagtggggactca

SEQ ID NO: 61919 - DNA, 20 bp, synthetic construct
  misc_feature 1..20: note = chemically synthesized
  source 1..20: mol_type = other DNA
cataaagcagaaagaagaca

SEQ ID NO: 61920 - DNA, 20 bp, synthetic construct
  misc_feature 1..20: note = chemically synthesized
  source 1..20: mol_type = other DNA
cagaaagaagacactgaatg

SEQ ID NO: 61921 - DNA, 20 bp, synthetic construct
  misc_feature 1..20: note = chemically synthesized
  source 1..20: mol_type = other DNA
gaagacactgaatggagagt

SEQ ID NO: 61922 - DNA, 20 bp, synthetic construct
  misc_feature 1..20: note = chemically synthesized
  source 1..20: mol_type = other DNA
ttgaggttatggcttgaaat

SEQ ID NO: 61923 - DNA, 20 bp, synthetic construct
  misc_feature 1..20: note = chemically synthesized
  source 1..20: mol_type = other DNA
ccttcagctgagacctgaaa

SEQ ID NO: 61924 - DNA, 20 bp, synthetic construct
  misc_feature 1..20: note = chemically synthesized
  source 1..20: mol_type = other DNA
taactggtgaaaatacagac

SEQ ID NO: 61925 - DNA, 20 bp, synthetic construct
  misc_feature 1..20: note = chemically synthesized
  source 1..20: mol_type = other DNA
caagaatattctaagactga

SEQ ID NO: 61926 - DNA, 20 bp, synthetic construct
  misc_feature 1..20: note = chemically synthesized
  source 1..20: mol_type = other DNA
agggaaggtggctactggaa

SEQ ID NO: 61927 - DNA, 20 bp, synthetic construct
  misc_feature 1..20: note = chemically synthesized
  source 1..20: mol_type = other DNA
gagaagaggctgaagaggga

SEQ ID NO: 61928 - DNA, 20 bp, synthetic construct
  misc_feature 1..20: note = chemically synthesized
  source 1..20: mol_type = other DNA
atggccttattggtcatcat

SEQ ID NO: 61929 - DNA, 20 bp, synthetic construct
  misc_feature 1..20: note = chemically synthesized
  source 1..20: mol_type = other DNA
ttattggtcatcataagagt

SEQ ID NO: 61930 - DNA, 20 bp, synthetic construct
  misc_feature 1..20: note = chemically synthesized
  source 1..20: mol_type = other DNA
taagagtttgagtctctact

SEQ ID NO: 61931 - DNA, 20 bp, synthetic construct
  misc_feature 1..20: note = chemically synthesized
  source 1..20: mol_type = other DNA
cttcaatattatttataaaa

SEQ ID NO: 61932 - DNA, 20 bp, synthetic construct
  misc_feature 1..20: note = chemically synthesized
  source 1..20: mol_type = other DNA
tgagggaggcagggaaaggg

SEQ ID NO: 61933 - DNA, 20 bp, synthetic construct
  misc_feature 1..20: note = chemically synthesized
  source 1..20: mol_type = other DNA
gcagggaaagggcagaatat

SEQ ID NO: 61934 - DNA, 20 bp, synthetic construct
  misc_feature 1..20: note = chemically synthesized
  source 1..20: mol_type = other DNA
ttagaaaagcagaggaaaga

SEQ ID NO: 61935 - DNA, 20 bp, synthetic construct
  misc_feature 1..20: note = chemically synthesized
  source 1..20: mol_type = other DNA
atgtattgtctataaataag

SEQ ID NO: 61936 - DNA, 20 bp, synthetic construct
  misc_feature 1..20: note = chemically synthesized
  source 1..20: mol_type = other DNA
ttttaaagttgtgggacact

SEQ ID NO: 61937 - DNA, 20 bp, synthetic construct
  misc_feature 1..20: note = chemically synthesized
  source 1..20: mol_type = other DNA
aaagttgtgggacactgaga

SEQ ID NO: 61938 - DNA, 20 bp, synthetic construct
  misc_feature 1..20: note = chemically synthesized
  source 1..20: mol_type = other DNA
tttctttttgcctgatcatg

SEQ ID NO: 61939 - DNA, 20 bp, synthetic construct
  misc_feature 1..20: note = chemically synthesized
  source 1..20: mol_type = other DNA
gacatatgtcagaaaatgat

SEQ ID NO: 61940 - DNA, 20 bp, synthetic construct
  misc_feature 1..20: note = chemically synthesized
  source 1..20: mol_type = other DNA
atgacacccaaagaaggtca

SEQ ID NO: 61941 - DNA, 20 bp, synthetic construct
  misc_feature 1..20: note = chemically synthesized
  source 1..20: mol_type = other DNA
ctcactatcctaggagaaag

SEQ ID NO: 61942 - DNA, 20 bp, synthetic construct
  misc_feature 1..20: note = chemically synthesized
  source 1..20: mol_type = other DNA
taggagaaagcaggatagat

SEQ ID NO: 61943 - DNA, 20 bp, synthetic construct
  misc_feature 1..20: note = chemically synthesized
  source 1..20: mol_type = other DNA
aggatagatccgggtttttc

SEQ ID NO: 61944 - DNA, 20 bp, synthetic construct
  misc_feature 1..20: note = chemically synthesized
  source 1..20: mol_type = other DNA
atacaaacataaataggaag

SEQ ID NO: 61945 - DNA, 20 bp, synthetic construct
  misc_feature 1..20: note = chemically synthesized
  source 1..20: mol_type = other DNA
gaagatggattaactaaatt

SEQ ID NO: 61946 - DNA, 20 bp, synthetic construct
  misc_feature 1..20: note = chemically synthesized
  source 1..20: mol_type = other DNA
actaaattctgaattaccag

SEQ ID NO: 61947 - DNA, 20 bp, synthetic construct
  misc_feature 1..20: note = chemically synthesized
  source 1..20: mol_type = other DNA
ttaccagatgagtaaataac

SEQ ID NO: 61948 - DNA, 20 bp, synthetic construct
  misc_feature 1..20: note = chemically synthesized
  source 1..20: mol_type = other DNA
ttgaaaaatgaagttttttc

SEQ ID NO: 61949 - DNA, 20 bp, synthetic construct
  misc_feature 1..20: note = chemically synthesized
  source 1..20: mol_type = other DNA
ctttctctcaagtgaaattg

SEQ ID NO: 61950 - DNA, 20 bp, synthetic construct
  misc_feature 1..20: note = chemically synthesized
  source 1..20: mol_type = other DNA
tgtgtggacacctgcacatg

SEQ ID NO: 61951 - DNA, 20 bp, synthetic construct
  misc_feature 1..20: note = chemically synthesized
  source 1..20: mol_type = other DNA
aacctttcacaataaattta

SEQ ID NO: 61952 - DNA, 20 bp, synthetic construct
  misc_feature 1..20: note = chemically synthesized
  source 1..20: mol_type = other DNA
ctaatctactttttgtctct

SEQ ID NO: 61953 - DNA, 20 bp, synthetic construct
  misc_feature 1..20: note = chemically synthesized
  source 1..20: mol_type = other DNA
tgcgtatgacttattgcact

SEQ ID NO: 61954 - DNA, 20 bp, synthetic construct
  misc_feature 1..20: note = chemically synthesized
  source 1..20: mol_type = other DNA
gtttctattccttggctact

SEQ ID NO: 61955 - DNA, 20 bp, synthetic construct
  misc_feature 1..20: note = chemically synthesized
  source 1..20: mol_type = other DNA
tctctctacttcctctcact

SEQ ID NO: 61956 - DNA, 20 bp, synthetic construct
  misc_feature 1..20: note = chemically synthesized
  source 1..20: mol_type = other DNA
tctgaatattctgcttttca

SEQ ID NO: 61957 - DNA, 20 bp, synthetic construct
  misc_feature 1..20: note = chemically synthesized
  source 1..20: mol_type = other DNA
gcttttcaaagaatattcct

SEQ ID NO: 61958 - DNA, 20 bp, synthetic construct
  misc_feature 1..20: note = chemically synthesized
  source 1..20: mol_type = other DNA
ctgactgcaacctctgcctc

SEQ ID NO: 61959 - DNA, 20 bp, synthetic construct
  misc_feature 1..20: note = chemically synthesized
  source 1..20: mol_type = other DNA
aatctttgctctggacttca

SEQ ID NO: 61960 - DNA, 20 bp, synthetic construct
  misc_feature 1..20: note = chemically synthesized
  source 1..20: mol_type = other DNA
gttttgttttgtttttgaga

SEQ ID NO: 61961 - DNA, 20 bp, synthetic construct
  misc_feature 1..20: note = chemically synthesized
  source 1..20: mol_type = other DNA
tctcgctctgtcgcccaggc

SEQ ID NO: 61962 - DNA, 20 bp, synthetic construct
  misc_feature 1..20: note = chemically synthesized
  source 1..20: mol_type = other DNA
ctcactgcaagctctgcctc

SEQ ID NO: 61963 - DNA, 20 bp, synthetic construct
  misc_feature 1..20: note = chemically synthesized
  source 1..20: mol_type = other DNA
cattctcctgcctcagcctc

SEQ ID NO: 61964 - DNA, 20 bp, synthetic construct
  misc_feature 1..20: note = chemically synthesized
  source 1..20: mol_type = other DNA
ttttgtctttttagtagaga

SEQ ID NO: 61965 - DNA, 20 bp, synthetic construct
  misc_feature 1..20: note = chemically synthesized
  source 1..20: mol_type = other DNA
cggggtttcactgtgttagc

SEQ ID NO: 61966 - DNA, 20 bp, synthetic construct
  misc_feature 1..20: note = chemically synthesized
  source 1..20: mol_type = other DNA
gcctcggcctcccaaagtgc

SEQ ID NO: 61967 - DNA, 20 bp, synthetic construct
  misc_feature 1..20: note = chemically synthesized
  source 1..20: mol_type = other DNA
cgtgagccaccgcgcccggc

SEQ ID NO: 61968 - DNA, 20 bp, synthetic construct
  misc_feature 1..20: note = chemically synthesized
  source 1..20: mol_type = other DNA
gagaaatgagatccaatcta

SEQ ID NO: 61969 - DNA, 20 bp, synthetic construct
  misc_feature 1..20: note = chemically synthesized
  source 1..20: mol_type = other DNA
tgtattaaaactttttcata

SEQ ID NO: 61970 - DNA, 20 bp, synthetic construct
  misc_feature 1..20: note = chemically synthesized
  source 1..20: mol_type = other DNA
gtaagcaaaattatatgcta

SEQ ID NO: 61971 - DNA, 20 bp, synthetic construct
  misc_feature 1..20: note = chemically synthesized
  source 1..20: mol_type = other DNA
caatgtttaagctattgata

SEQ ID NO: 61972 - DNA, 20 bp, synthetic construct
  misc_feature 1..20: note = chemically synthesized
  source 1..20: mol_type = other DNA
ttccatcttgatttgctgac

SEQ ID NO: 61973 - DNA, 20 bp, synthetic construct
  misc_feature 1..20: note = chemically synthesized
  source 1..20: mol_type = other DNA
gtctttgtaagttattttgg

SEQ ID NO: 61974 - DNA, 20 bp, synthetic construct
  misc_feature 1..20: note = chemically synthesized
  source 1..20: mol_type = other DNA
aacggttatctgggcctgtt

SEQ ID NO: 61975 - DNA, 20 bp, synthetic construct
  misc_feature 1..20: note = chemically synthesized
  source 1..20: mol_type = other DNA
atctgggcctgttgtggatt

SEQ ID NO: 61976 - DNA, 20 bp, synthetic construct
  misc_feature 1..20: note = chemically synthesized
  source 1..20: mol_type = other DNA
gattgtgaatatgacaatat

SEQ ID NO: 61977 - DNA, 20 bp, synthetic construct
  misc_feature 1..20: note = chemically synthesized
  source 1..20: mol_type = other DNA
taagagagggacactcactt

SEQ ID NO: 61978 - DNA, 20 bp, synthetic construct
  misc_feature 1..20: note = chemically synthesized
  source 1..20: mol_type = other DNA
tgatggaggaaagagattgg

SEQ ID NO: 61979 - DNA, 20 bp, synthetic construct
  misc_feature 1..20: note = chemically synthesized
  source 1..20: mol_type = other DNA
gattggaggaatgtagattt

SEQ ID NO: 61980 - DNA, 20 bp, synthetic construct
  misc_feature 1..20: note = chemically synthesized
  source 1..20: mol_type = other DNA
gaagttgtttggcttggaag

SEQ ID NO: 61981 - DNA, 20 bp, synthetic construct
  misc_feature 1..20: note = chemically synthesized
  source 1..20: mol_type = other DNA
aatgtctgatatattattgt

SEQ ID NO: 61982 - DNA, 20 bp, synthetic construct
  misc_feature 1..20: note = chemically synthesized
  source 1..20: mol_type = other DNA
ttggggtacagttctttatt

SEQ ID NO: 61983 - DNA, 20 bp, synthetic construct
  misc_feature 1..20: note = chemically synthesized
  source 1..20: mol_type = other DNA
tacagttctttattgagaat

SEQ ID NO: 61984 - DNA, 20 bp, synthetic construct
  misc_feature 1..20: note = chemically synthesized
  source 1..20: mol_type = other DNA
tttcaaagtagtcttttcat

SEQ ID NO: 61985 - DNA, 20 bp, synthetic construct
  misc_feature 1..20: note = chemically synthesized
  source 1..20: mol_type = other DNA
tagtcttttcattggaatgg

SEQ ID NO: 61986 - DNA, 20 bp, synthetic construct
  misc_feature 1..20: note = chemically synthesized
  source 1..20: mol_type = other DNA
tctcaccactgcactccctc

SEQ ID NO: 61987 - DNA, 20 bp, synthetic construct
  misc_feature 1..20: note = chemically synthesized
  source 1..20: mol_type = other DNA
agagaggaaagaaaagaaaa

SEQ ID NO: 61988 - DNA, 20 bp, synthetic construct
  misc_feature 1..20: note = chemically synthesized
  source 1..20: mol_type = other DNA
aagaaagaaaaaagaaagga

SEQ ID NO: 61989 - DNA, 20 bp, synthetic construct
  misc_feature 1..20: note = chemically synthesized
  source 1..20: mol_type = other DNA
tctttcttcttgatgttgtt

SEQ ID NO: 61990 - DNA, 20 bp, synthetic construct
  misc_feature 1..20: note = chemically synthesized
  source 1..20: mol_type = other DNA
aaaaccaatggcttgatcac

SEQ ID NO: 61991 - DNA, 20 bp, synthetic construct
  misc_feature 1..20: note = chemically synthesized
  source 1..20: mol_type = other DNA
ttcagaagttttgttttact

SEQ ID NO: 61992 - DNA, 20 bp, synthetic construct
  misc_feature 1..20: note = chemically synthesized
  source 1..20: mol_type = other DNA
tcacttcttagctacaagtc

SEQ ID NO: 61993 - DNA, 20 bp, synthetic construct
  misc_feature 1..20: note = chemically synthesized
  source 1..20: mol_type = other DNA
gaatcaacaggttctgcaaa

SEQ ID NO: 61994 - DNA, 20 bp, synthetic construct
  misc_feature 1..20: note = chemically synthesized
  source 1..20: mol_type = other DNA
aggttctgcaaaatgaattc

SEQ ID NO: 61995 - DNA, 20 bp, synthetic construct
  misc_feature 1..20: note = chemically synthesized
  source 1..20: mol_type = other DNA
acgttttggcaaaatcttac

SEQ ID NO: 61996 - DNA, 20 bp, synthetic construct
  misc_feature 1..20: note = chemically synthesized
  source 1..20: mol_type = other DNA
aatcttacctgaatatatga

SEQ ID NO: 61997 - DNA, 20 bp, synthetic construct
  misc_feature 1..20: note = chemically synthesized
  source 1..20: mol_type = other DNA
tataaacaggtgatagtaaa

SEQ ID NO: 61998 - DNA, 20 bp, synthetic construct
  misc_feature 1..20: note = chemically synthesized
  source 1..20: mol_type = other DNA
agtaaatagagtaacttgct

SEQ ID NO: 61999 - DNA, 20 bp, synthetic construct
  misc_feature 1..20: note = chemically synthesized
  source 1..20: mol_type = other DNA
cgagtgtcacatatattatg

SEQ ID NO: 62000 - DNA, 20 bp, synthetic construct
  misc_feature 1..20: note = chemically synthesized
  source 1..20: mol_type = other DNA
actattttaaatctgaaaga

SEQ ID NO: 62001 - DNA, 20 bp, synthetic construct
  misc_feature 1..20: note = chemically synthesized
  source 1..20: mol_type = other DNA
aatttgacatgttttgagat

SEQ ID NO: 62002 - DNA, 20 bp, synthetic construct
  misc_feature 1..20: note = chemically synthesized
  source 1..20: mol_type = other DNA
catgttttgagataagagtt

SEQ ID NO: 62003 - DNA, 20 bp, synthetic construct
  misc_feature 1..20: note = chemically synthesized
  source 1..20: mol_type = other DNA
tttgagataagagtttaggg

SEQ ID NO: 62004 - DNA, 20 bp, synthetic construct
  misc_feature 1..20: note = chemically synthesized
  source 1..20: mol_type = other DNA
tccaatgaaaaaagagattt

SEQ ID NO: 62005 - DNA, 20 bp, synthetic construct
  misc_feature 1..20: note = chemically synthesized
  source 1..20: mol_type = other DNA
tgggactaatatgacaacat

SEQ ID NO: 62006 - DNA, 20 bp, synthetic construct
  misc_feature 1..20: note = chemically synthesized
  source 1..20: mol_type = other DNA
gagcatcataggaaataaat

SEQ ID NO: 62007 - DNA, 20 bp, synthetic construct
  misc_feature 1..20: note = chemically synthesized
  source 1..20: mol_type = other DNA
ataggaaataaatcaggatt

SEQ ID NO: 62008 - DNA, 20 bp, synthetic construct
  misc_feature 1..20: note = chemically synthesized
  source 1..20: mol_type = other DNA
acccatcaggaaagaagtct

SEQ ID NO: 62009 - DNA, 20 bp, synthetic construct
  misc_feature 1..20: note = chemically synthesized
  source 1..20: mol_type = other DNA
catctagaaaaaaattatgt

SEQ ID NO: 62010 - DNA, 20 bp, synthetic construct
  misc_feature 1..20: note = chemically synthesized
  source 1..20: mol_type = other DNA
ggagatcagacctaaatata

SEQ ID NO: 62011 - DNA, 20 bp, synthetic construct
  misc_feature 1..20: note = chemically synthesized
  source 1..20: mol_type = other DNA
ctctctcactgtctctgtct

SEQ ID NO: 62012 - DNA, 20 bp, synthetic construct
  misc_feature 1..20: note = chemically synthesized
  source 1..20: mol_type = other DNA
taaatgaaacccacatatat

SEQ ID NO: 62013 - DNA, 20 bp, synthetic construct
  misc_feature 1..20: note = chemically synthesized
  source 1..20: mol_type = other DNA
tatatatgaatgagatagct

SEQ ID NO: 62014 - DNA, 20 bp, synthetic construct
  misc_feature 1..20: note = chemically synthesized
  source 1..20: mol_type = other DNA
atgaatgagatagctcaggg

SEQ ID NO: 62015 - DNA, 20 bp, synthetic construct
  misc_feature 1..20: note = chemically synthesized
  source 1..20: mol_type = other DNA
agatagctcagggtagggta

SEQ ID NO: 62016 - DNA, 20 bp, synthetic construct
  misc_feature 1..20: note = chemically synthesized
  source 1..20: mol_type = other DNA
tcagggtagggtagtgagtt

SEQ ID NO: 62017 - DNA, 20 bp, synthetic construct
  misc_feature 1..20: note = chemically synthesized
  source 1..20: mol_type = other DNA
gtgagttttgaatcaataga

SEQ ID NO: 62018 - DNA, 20 bp, synthetic construct
  misc_feature 1..20: note = chemically synthesized
  source 1..20: mol_type = other DNA
aaagaataaataaatgtctg

SEQ ID NO: 62019 - DNA, 20 bp, synthetic construct
  misc_feature 1..20: note = chemically synthesized
  source 1..20: mol_type = other DNA
aaaaggtttggtggtggctc

SEQ ID NO: 62020 - DNA, 20 bp, synthetic construct
  misc_feature 1..20: note = chemically synthesized
  source 1..20: mol_type = other DNA
ggtggctcaaggattttgta

SEQ ID NO: 62021 - DNA, 20 bp, synthetic construct
  misc_feature 1..20: note = chemically synthesized
  source 1..20: mol_type = other DNA
ctcaaggattttgtaaaggg

SEQ ID NO: 62022 - DNA, 20 bp, synthetic construct
  misc_feature 1..20: note = chemically synthesized
  source 1..20: mol_type = other DNA
ttttgtaaagggttgaatta

SEQ ID NO: 62023 - DNA, 20 bp, synthetic construct
  misc_feature 1..20: note = chemically synthesized
  source 1..20: mol_type = other DNA
ctaagaccaatggaacactt

SEQ ID NO: 62024 - DNA, 20 bp, synthetic construct
  misc_feature 1..20: note = chemically synthesized
  source 1..20: mol_type = other DNA
tcccaggttggggaggaaaa

SEQ ID NO: 62025 - DNA, 20 bp, synthetic construct
  misc_feature 1..20: note = chemically synthesized
  source 1..20: mol_type = other DNA
tatcctatgtggaaatgagc

SEQ ID NO: 62026 - DNA, 20 bp, synthetic construct
  misc_feature 1..20: note = chemically synthesized
  source 1..20: mol_type = other DNA
atgagctagaataacccctt

SEQ ID NO: 62027 - DNA, 20 bp, synthetic construct
  misc_feature 1..20: note = chemically synthesized
  source 1..20: mol_type = other DNA
gtaacaaatatatctctcat

SEQ ID NO: 62028 - DNA, 20 bp, synthetic construct
  misc_feature 1..20: note = chemically synthesized
  source 1..20: mol_type = other DNA
atatatctctcatcagaatt

SEQ ID NO: 62029 - DNA, 20 bp, synthetic construct
  misc_feature 1..20: note = chemically synthesized
  source 1..20: mol_type = other DNA
cagaattaagagtaaatact

SEQ ID NO: 62030 - DNA, 20 bp, synthetic construct
  misc_feature 1..20: note = chemically synthesized
  source 1..20: mol_type = other DNA
tggctcaggtaagaaaagcc

SEQ ID NO: 62031 - DNA, 20 bp, synthetic construct
  misc_feature 1..20: note = chemically synthesized
  source 1..20: mol_type = other DNA
ccatttgatggacattggtt

SEQ ID NO: 62032 - DNA, 20 bp, synthetic construct
  misc_feature 1..20: note = chemically synthesized
  source 1..20: mol_type = other DNA
cattggttgagaatatgagc

SEQ ID NO: 62033 - DNA, 20 bp, synthetic construct
  misc_feature 1..20: note = chemically synthesized
  source 1..20: mol_type = other DNA
tgagaatatgagcttgggtt

SEQ ID NO: 62034 - DNA, 20 bp, synthetic construct
  misc_feature 1..20: note = chemically synthesized
  source 1..20: mol_type = other DNA
tgggttagataaacctgtgt

SEQ ID NO: 62035 - DNA, 20 bp, synthetic construct
  misc_feature 1..20: note = chemically synthesized
  source 1..20: mol_type = other DNA
tttttctctgttgcccaggc

SEQ ID NO: 62036 - DNA, 20 bp, synthetic construct
  misc_feature 1..20: note = chemically synthesized
  source 1..20: mol_type = other DNA
ctcactgcgacctcctccac

SEQ ID NO: 62037 - DNA, 20 bp, synthetic construct
  misc_feature 1..20: note = chemically synthesized
  source 1..20: mol_type = other DNA
acctcctccaccagggttca

SEQ ID NO: 62038 - DNA, 20 bp, synthetic construct
  misc_feature 1..20: note = chemically synthesized
  source 1..20: mol_type = other DNA
gattctcatgcctcagcctc

SEQ ID NO: 62039 - DNA, 20 bp, synthetic construct
  misc_feature 1..20: note = chemically synthesized
  source 1..20: mol_type = other DNA
gcctcagcctccagagtagc

SEQ ID NO: 62040 - DNA, 20 bp, synthetic construct
  misc_feature 1..20: note = chemically synthesized
  source 1..20: mol_type = other DNA
tcctcggcctcccaaagtgc

SEQ ID NO: 62041 - DNA, 20 bp, synthetic construct
  misc_feature 1..20: note = chemically synthesized
  source 1..20: mol_type = other DNA
aattctcctgcctcagcctc

SEQ ID NO: 62042 - DNA, 20 bp, synthetic construct
  misc_feature 1..20: note = chemically synthesized
  source 1..20: mol_type = other DNA
gcctcagcctcccgagtagc

SEQ ID NO: 62043 - DNA, 20 bp, synthetic construct
  misc_feature 1..20: note = chemically synthesized
  source 1..20: mol_type = other DNA
ttttgtatttttagtagaga

SEQ ID NO: 62044 - DNA, 20 bp, synthetic construct
  misc_feature 1..20: note = chemically synthesized
  source 1..20: mol_type = other DNA
acctcagccttccaaagtgc

SEQ ID NO: 62045 - DNA, 20 bp, synthetic construct
  misc_feature 1..20: note = chemically synthesized
  source 1..20: mol_type = other DNA
caatatgtggagatgaaaaa

SEQ ID NO: 62046 - DNA, 20 bp, synthetic construct
  misc_feature 1..20: note = chemically synthesized
  source 1..20: mol_type = other DNA
catggcaagttgaagaagct

SEQ ID NO: 62047 - DNA, 20 bp, synthetic construct
  misc_feature 1..20: note = chemically synthesized
  source 1..20: mol_type = other DNA
agttgaagaagctctggatg

SEQ ID NO: 62048 - DNA, 20 bp, synthetic construct
  misc_feature 1..20: note = chemically synthesized
  source 1..20: mol_type = other DNA
tcagaaactcttgaggactc

SEQ ID NO: 62049 - DNA, 20 bp, synthetic construct
  misc_feature 1..20: note = chemically synthesized
  source 1..20: mol_type = other DNA
ctctgggatagttgctgtca

SEQ ID NO: 62050 - DNA, 20 bp, synthetic construct
  misc_feature 1..20: note = chemically synthesized
  source 1..20: mol_type = other DNA
gggggcctctatgcttgcct

SEQ ID NO: 62051 - DNA, 20 bp, synthetic construct
  misc_feature 1..20: note = chemically synthesized
  source 1..20: mol_type = other DNA
attagggcaactattctccc

SEQ ID NO: 62052 - DNA, 20 bp, synthetic construct
  misc_feature 1..20: note = chemically synthesized
  source 1..20: mol_type = other DNA
aactattctccctggaatat

SEQ ID NO: 62053 - DNA, 20 bp, synthetic construct
  misc_feature 1..20: note = chemically synthesized
  source 1..20: mol_type = other DNA
tgaaaacacgactatagttt

SEQ ID NO: 62054 - DNA, 20 bp, synthetic construct
  misc_feature 1..20: note = chemically synthesized
  source 1..20: mol_type = other DNA
tcctccatctggtccattat

SEQ ID NO: 62055 - DNA, 20 bp, synthetic construct
  misc_feature 1..20: note = chemically synthesized
  source 1..20: mol_type = other DNA
actatgcaggtcataattca

SEQ ID NO: 62056 - DNA, 20 bp, synthetic construct
  misc_feature 1..20: note = chemically synthesized
  source 1..20: mol_type = other DNA
ttgttatcacttcattttta

SEQ ID NO: 62057 - DNA, 20 bp, synthetic construct
  misc_feature 1..20: note = chemically synthesized
  source 1..20: mol_type = other DNA
cggtagtaatatttataata

SEQ ID NO: 62058 - DNA, 20 bp, synthetic construct
  misc_feature 1..20: note = chemically synthesized
  source 1..20: mol_type = other DNA
taaaagactctggacacata

SEQ ID NO: 62059 - DNA, 20 bp, synthetic construct
  misc_feature 1..20: note = chemically synthesized
  source 1..20: mol_type = other DNA
ctggacacatacagaatcaa

SEQ ID NO: 62060 - DNA, 20 bp, synthetic construct
  misc_feature 1..20: note = chemically synthesized
  source 1..20: mol_type = other DNA
tcaattgaatttgggagaaa

SEQ ID NO: 62061 - DNA, 20 bp, synthetic construct
  misc_feature 1..20: note = chemically synthesized
  source 1..20: mol_type = other DNA
tagacttcatagttccctat

SEQ ID NO: 62062 - DNA, 20 bp, synthetic construct
  misc_feature 1..20: note = chemically synthesized
  source 1..20: mol_type = other DNA
agttccctatgaggatcctt

SEQ ID NO: 62063 - DNA, 20 bp, synthetic construct
  misc_feature 1..20: note = chemically synthesized
  source 1..20: mol_type = other DNA
ccttgtgaatttttctcaat

SEQ ID NO: 62064 - DNA, 20 bp, synthetic construct
  misc_feature 1..20: note = chemically synthesized
  source 1..20: mol_type = other DNA
ttacagattcataatgatta

SEQ ID NO: 62065 - DNA, 20 bp, synthetic construct
  misc_feature 1..20: note = chemically synthesized
  source 1..20: mol_type = other DNA
agttgccgtattttctctct

SEQ ID NO: 62066 - DNA, 20 bp, synthetic construct
  misc_feature 1..20: note = chemically synthesized
  source 1..20: mol_type = other DNA
cccttcagatcaacatactt

SEQ ID NO: 62067 - DNA, 20 bp, synthetic construct
  misc_feature 1..20: note = chemically synthesized
  source 1..20: mol_type = other DNA
ttccgttatgagcttccaac

SEQ ID NO: 62068 - DNA, 20 bp, synthetic construct
  misc_feature 1..20: note = chemically synthesized
  source 1..20: mol_type = other DNA
tttgcagcatagggaacttg

SEQ ID NO: 62069 - DNA, 20 bp, synthetic construct
  misc_feature 1..20: note = chemically synthesized
  source 1..20: mol_type = other DNA
cttgctgagtcccaagtcca

SEQ ID NO: 62070 - DNA, 20 bp, synthetic construct
  misc_feature 1..20: note = chemically synthesized
  source 1..20: mol_type = other DNA
agtaattacacctttctaaa

SEQ ID NO: 62071 - DNA, 20 bp, synthetic construct
  misc_feature 1..20: note = chemically synthesized
  source 1..20: mol_type = other DNA
tctgtggaaactcacaatag

SEQ ID NO: 62072 - DNA, 20 bp, synthetic construct
  misc_feature 1..20: note = chemically synthesized
  source 1..20: mol_type = other DNA
tattttattttttatagaga

SEQ ID NO: 62073 - DNA, 20 bp, synthetic construct
  misc_feature 1..20: note = chemically synthesized
  source 1..20: mol_type = other DNA
tcttttttttttggtggagg

SEQ ID NO: 62074 - DNA, 20 bp, synthetic construct
  misc_feature 1..20: note = chemically synthesized
  source 1..20: mol_type = other DNA
gtctagctatgttgcccagg

SEQ ID NO: 62075 - DNA, 20 bp, synthetic construct
  misc_feature 1..20: note = chemically synthesized
  source 1..20: mol_type = other DNA
atatttctcagtcatttcta

SEQ ID NO: 62076 - DNA, 20 bp, synthetic construct
  misc_feature 1..20: note = chemically synthesized
  source 1..20: mol_type = other DNA
aaaatttgaactgactcaac

SEQ ID NO: 62077 - DNA, 20 bp, synthetic construct
  misc_feature 1..20: note = chemically synthesized
  source 1..20: mol_type = other DNA
atatgataaataataggagg

SEQ ID NO: 62078 - DNA, 20 bp, synthetic construct
  misc_feature 1..20: note = chemically synthesized
  source 1..20: mol_type = other DNA
aataataggaggaggaataa

SEQ ID NO: 62079 - DNA, 20 bp, synthetic construct
  misc_feature 1..20: note = chemically synthesized
  source 1..20: mol_type = other DNA
aggaggaataaaagagtaaa

SEQ ID NO: 62080 - DNA, 20 bp, synthetic construct
  misc_feature 1..20: note = chemically synthesized
  source 1..20: mol_type = other DNA
aagagaataaaagggaacaa

SEQ ID NO: 62081 - DNA, 20 bp, synthetic construct
  misc_feature 1..20: note = chemically synthesized
  source 1..20: mol_type = other DNA
aaggagtcctatttgggacc

SEQ ID NO: 62082 - DNA, 20 bp, synthetic construct
  misc_feature 1..20: note = chemically synthesized
  source 1..20: mol_type = other DNA
gctatgagcacagacgtaag

SEQ ID NO: 62083 - DNA, 20 bp, synthetic construct
  misc_feature 1..20: note = chemically synthesized
  source 1..20: mol_type = other DNA
taaaggttgtatgcttcata

SEQ ID NO: 62084 - DNA, 20 bp, synthetic construct
  misc_feature 1..20: note = chemically synthesized
  source 1..20: mol_type = other DNA
ttgtatgcttcatagtgaat

SEQ ID NO: 62085 - DNA, 20 bp, synthetic construct
  misc_feature 1..20: note = chemically synthesized
  source 1..20: mol_type = other DNA
ttattctagggaaaggcctt

SEQ ID NO: 62086 - DNA, 20 bp, synthetic construct
  misc_feature 1..20: note = chemically synthesized
  source 1..20: mol_type = other DNA
ggctcagaggcagttcacta

SEQ ID NO: 62087 - DNA, 20 bp, synthetic construct
  misc_feature 1..20: note = chemically synthesized
  source 1..20: mol_type = other DNA
gcactcttcttgtcctcatt

SEQ ID NO: 62088 - DNA, 20 bp, synthetic construct
  misc_feature 1..20: note = chemically synthesized
  source 1..20: mol_type = other DNA
atgctggcagacacggacct

SEQ ID NO: 62089 - DNA, 20 bp, synthetic construct
  misc_feature 1..20: note = chemically synthesized
  source 1..20: mol_type = other DNA
tcactacaatgcccacagtc

SEQ ID NO: 62090 - DNA, 20 bp, synthetic construct
  misc_feature 1..20: note = chemically synthesized
  source 1..20: mol_type = other DNA
cattcattcactggccattg

SEQ ID NO: 62091 - DNA, 20 bp, synthetic construct
  misc_feature 1..20: note = chemically synthesized
  source 1..20: mol_type = other DNA
aactgcattcttaccaattc

SEQ ID NO: 62092 - DNA, 20 bp, synthetic construct
  misc_feature 1..20: note = chemically synthesized
  source 1..20: mol_type = other DNA
cgagtgatgaacataggact

SEQ ID NO: 62093 - DNA, 20 bp, synthetic construct
  misc_feature 1..20: note = chemically synthesized
  source 1..20: mol_type = other DNA
attttctctttcctccattc

SEQ ID NO: 62094 - DNA, 20 bp, synthetic construct
  misc_feature 1..20: note = chemically synthesized
  source 1..20: mol_type = other DNA
ttattcgcctattttctggg

SEQ ID NO: 62095 - DNA, 20 bp, synthetic construct
  misc_feature 1..20: note = chemically synthesized
  source 1..20: mol_type = other DNA
tagggcttgagcccttattt

SEQ ID NO: 62096 - DNA, 20 bp, synthetic construct
  misc_feature 1..20: note = chemically synthesized
  source 1..20: mol_type = other DNA
tttcagaatctcaagatctc

SEQ ID NO: 62097 - DNA, 20 bp, synthetic construct
  misc_feature 1..20: note = chemically synthesized
  source 1..20: mol_type = other DNA
tatccacacttttttttcct

SEQ ID NO: 62098 - DNA, 20 bp, synthetic construct
  misc_feature 1..20: note = chemically synthesized
  source 1..20: mol_type = other DNA
tatatatcacctaataaaga

SEQ ID NO: 62099 - DNA, 20 bp, synthetic construct
  misc_feature 1..20: note = chemically synthesized
  source 1..20: mol_type = other DNA
tgccagtgatgctgaagaaa

SEQ ID NO: 62100 - DNA, 20 bp, synthetic construct
  misc_feature 1..20: note = chemically synthesized
  source 1..20: mol_type = other DNA
gagatataacaatccaaaag

SEQ ID NO: 62101 - DNA, 20 bp, synthetic construct
  misc_feature 1..20: note = chemically synthesized
  source 1..20: mol_type = other DNA
gataagtggactaaagcagc

SEQ ID NO: 62102 - DNA, 20 bp, synthetic construct
  misc_feature 1..20: note = chemically synthesized
  source 1..20: mol_type = other DNA
attttatgtgtcttataaag

SEQ ID NO: 62103 - DNA, 20 bp, synthetic construct
  misc_feature 1..20: note = chemically synthesized
  source 1..20: mol_type = other DNA
tgtgtcttataaaggtgaat

SEQ ID NO: 62104 - DNA, 20 bp, synthetic construct
  misc_feature 1..20: note = chemically synthesized
  source 1..20: mol_type = other DNA
ttgaaactagttactctgaa

SEQ ID NO: 62105 - DNA, 20 bp, synthetic construct
  misc_feature 1..20: note = chemically synthesized
  source 1..20: mol_type = other DNA
ttttagaaatttttcactga

SEQ ID NO: 62106 - DNA, 20 bp, synthetic construct
  misc_feature 1..20: note = chemically synthesized
  source 1..20: mol_type = other DNA
gtaagtctttatgctgttca

SEQ ID NO: 62107 - DNA, 20 bp, synthetic construct
  misc_feature 1..20: note = chemically synthesized
  source 1..20: mol_type = other DNA
cacttgctattagtgtaaca

SEQ ID NO: 62108 - DNA, 20 bp, synthetic construct
  misc_feature 1..20: note = chemically synthesized
  source 1..20: mol_type = other DNA
ctccaaattagaaggcccat

SEQ ID NO: 62109 - DNA, 20 bp, synthetic construct
  misc_feature 1..20: note = chemically synthesized
  source 1..20: mol_type = other DNA
ctaataaatgactactcctg

SEQ ID NO: 62110 - DNA, 20 bp, synthetic construct
  misc_feature 1..20: note = chemically synthesized
  source 1..20: mol_type = other DNA
ctgaaggattcagttattgt

SEQ ID NO: 62111 - DNA, 20 bp, synthetic construct
  misc_feature 1..20: note = chemically synthesized
  source 1..20: mol_type = other DNA
ttattgtgcgaattgtttgt

SEQ ID NO: 62112 - DNA, 20 bp, synthetic construct
  misc_feature 1..20: note = chemically synthesized
  source 1..20: mol_type = other DNA
ttctttgaaagtaggacgtg

SEQ ID NO: 62113 - DNA, 20 bp, synthetic construct
  misc_feature 1..20: note = chemically synthesized
  source 1..20: mol_type = other DNA
gtttttccaaagttggcata

SEQ ID NO: 62114 - DNA, 20 bp, synthetic construct
  misc_feature 1..20: note = chemically synthesized
  source 1..20: mol_type = other DNA
gcatctctattgaccactga

SEQ ID NO: 62115 - DNA, 20 bp, synthetic construct
  misc_feature 1..20: note = chemically synthesized
  source 1..20: mol_type = other DNA
accactgaaaggatgtctgt

SEQ ID NO: 62116 - DNA, 20 bp, synthetic construct
  misc_feature 1..20: note = chemically synthesized
  source 1..20: mol_type = other DNA
agcggtattaaaattttcag

SEQ ID NO: 62117 - DNA, 20 bp, synthetic construct
  misc_feature 1..20: note = chemically synthesized
  source 1..20: mol_type = other DNA
attaaaattttcaggcgaat

SEQ ID NO: 62118 - DNA, 20 bp, synthetic construct
  misc_feature 1..20: note = chemically synthesized
  source 1..20: mol_type = other DNA
ggcaaatgtatttgtcagta

SEQ ID NO: 62119 - DNA, 20 bp, synthetic construct
  misc_feature 1..20: note = chemically synthesized
  source 1..20: mol_type = other DNA
agtttactcatatgttagca

SEQ ID NO: 62120 - DNA, 20 bp, synthetic construct
  misc_feature 1..20: note = chemically synthesized
  source 1..20: mol_type = other DNA
atagtcaaaaatcaattaaa

SEQ ID NO: 62121 - DNA, 20 bp, synthetic construct
  misc_feature 1..20: note = chemically synthesized
  source 1..20: mol_type = other DNA
tctcttagagatctgctctg

SEQ ID NO: 62122 - DNA, 20 bp, synthetic construct
  misc_feature 1..20: note = chemically synthesized
  source 1..20: mol_type = other DNA
agttaattctctgtcatact

SEQ ID NO: 62123 - DNA, 20 bp, synthetic construct
  misc_feature 1..20: note = chemically synthesized
  source 1..20: mol_type = other DNA
catcagcatattgtcttccc

SEQ ID NO: 62124 - DNA, 20 bp, synthetic construct
  misc_feature 1..20: note = chemically synthesized
  source 1..20: mol_type = other DNA
tcttgctctgttgcccaggc

SEQ ID NO: 62125 - DNA, 20 bp, synthetic construct
  misc_feature 1..20: note = chemically synthesized
  source 1..20: mol_type = other DNA
aatccttcttcctcagcttt

SEQ ID NO: 62126 - DNA, 20 bp, synthetic construct
  misc_feature 1..20: note = chemically synthesized
  source 1..20: mol_type = other DNA
gtttttattttttgtaaata

SEQ ID NO: 62127 - DNA, 20 bp, synthetic construct
  misc_feature 1..20: note = chemically synthesized
  source 1..20: mol_type = other DNA
aaattttaggcagaaaaggg

SEQ ID NO: 62128 - DNA, 20 bp, synthetic construct
  misc_feature 1..20: note = chemically synthesized
  source 1..20: mol_type = other DNA
aaaagggcggggtccctggc

SEQ ID NO: 62129 - DNA, 20 bp, synthetic construct
  misc_feature 1..20: note = chemically synthesized
  source 1..20: mol_type = other DNA
ctttattctctgtttgtctc

SEQ ID NO: 62130 - DNA, 20 bp, synthetic construct
  misc_feature 1..20: note = chemically synthesized
  source 1..20: mol_type = other DNA
gtgttaccacagttgaacag

SEQ ID NO: 62131 - DNA, 20 bp, synthetic construct
  misc_feature 1..20: note = chemically synthesized
  source 1..20: mol_type = other DNA
cttgcaatgtaaattataat

SEQ ID NO: 62132 - DNA, 20 bp, synthetic construct
  misc_feature 1..20: note = chemically synthesized
  source 1..20: mol_type = other DNA
gaaaagcctagatatagaaa

SEQ ID NO: 62133 - DNA, 20 bp, synthetic construct
  misc_feature 1..20: note = chemically synthesized
  source 1..20: mol_type = other DNA
tatagaaactggatcctcac

SEQ ID NO: 62134 - DNA, 20 bp, synthetic construct
  misc_feature 1..20: note = chemically synthesized
  source 1..20: mol_type = other DNA
agttcagtatataattgtaa

SEQ ID NO: 62135 - DNA, 20 bp, synthetic construct
  misc_feature 1..20: note = chemically synthesized
  source 1..20: mol_type = other DNA
ctgattatcacaaaaatact

SEQ ID NO: 62136 - DNA, 20 bp, synthetic construct
  misc_feature 1..20: note = chemically synthesized
  source 1..20: mol_type = other DNA
atgtggtataaatgagacag

SEQ ID NO: 62137 - DNA, 20 bp, synthetic construct
  misc_feature 1..20: note = chemically synthesized
  source 1..20: mol_type = other DNA
tctccttcctatgctgtcag

SEQ ID NO: 62138 - DNA, 20 bp, synthetic construct
  misc_feature 1..20: note = chemically synthesized
  source 1..20: mol_type = other DNA
ctgtcagatgaatactgaga

SEQ ID NO: 62139 - DNA, 20 bp, synthetic construct
  misc_feature 1..20: note = chemically synthesized
  source 1..20: mol_type = other DNA
catttctgtctgttgaagat

SEQ ID NO: 62140 - DNA, 20 bp, synthetic construct
  misc_feature 1..20: note = chemically synthesized
  source 1..20: mol_type = other DNA
tctgttgaagatttgggtgt

SEQ ID NO: 62141 - DNA, 20 bp, synthetic construct
  misc_feature 1..20: note = chemically synthesized
  source 1..20: mol_type = other DNA
aactcaaggtatcatatcca

SEQ ID NO: 62142 - DNA, 20 bp, synthetic construct
  misc_feature 1..20: note = chemically synthesized
  source 1..20: mol_type = other DNA
caaggtatcatatccaaggg

SEQ ID NO: 62143 - DNA, 20 bp, synthetic construct
  misc_feature 1..20: note = chemically synthesized
  source 1..20: mol_type = other DNA
gtgactctaacagaaaggga

SEQ ID NO: 62144 - DNA, 20 bp, synthetic construct
  misc_feature 1..20: note = chemically synthesized
  source 1..20: mol_type = other DNA
tgcatgcattggcaatgttt

SEQ ID NO: 62145 - DNA, 20 bp, synthetic construct
  misc_feature 1..20: note = chemically synthesized
  source 1..20: mol_type = other DNA
caaaagtgtttcatgtgcct

SEQ ID NO: 62146 - DNA, 20 bp, synthetic construct
  misc_feature 1..20: note = chemically synthesized
  source 1..20: mol_type = other DNA
gcctaggggtgtcaaatact

SEQ ID NO: 62147 - DNA, 20 bp, synthetic construct
  misc_feature 1..20: note = chemically synthesized
  source 1..20: mol_type = other DNA
tatacttctctgtaatgtgt

SEQ ID NO: 62148 - DNA, 20 bp, synthetic construct
  misc_feature 1..20: note = chemically synthesized
  source 1..20: mol_type = other DNA
aacagctgtgtagcctaatt

SEQ ID NO: 62149 - DNA, 20 bp, synthetic construct
  misc_feature 1..20: note = chemically synthesized
  source 1..20: mol_type = other DNA
gtatatttatcagaagtctt

SEQ ID NO: 62150 - DNA, 20 bp, synthetic construct
  misc_feature 1..20: note = chemically synthesized
  source 1..20: mol_type = other DNA
aagtctttagggtcatgaaa

SEQ ID NO: 62151 - DNA, 20 bp, synthetic construct
  misc_feature 1..20: note = chemically synthesized
  source 1..20: mol_type = other DNA
gttttaatctaaatctatct

SEQ ID NO: 62152 - DNA, 20 bp, synthetic construct
  misc_feature 1..20: note = chemically synthesized
  source 1..20: mol_type = other DNA
gtttacataaagaaaataag

SEQ ID NO: 62153 - DNA, 20 bp, synthetic construct
  misc_feature 1..20: note = chemically synthesized
  source 1..20: mol_type = other DNA
gaaaaaaaatactccatatt

SEQ ID NO: 62154 - DNA, 20 bp, synthetic construct
  misc_feature 1..20: note = chemically synthesized
  source 1..20: mol_type = other DNA
tatataaaagatattttaaa

SEQ ID NO: 62155 - DNA, 20 bp, synthetic construct
  misc_feature 1..20: note = chemically synthesized
  source 1..20: mol_type = other DNA
tcatagcattttaaatagtt

SEQ ID NO: 62156 - DNA, 20 bp, synthetic construct
  misc_feature 1..20: note = chemically synthesized
  source 1..20: mol_type = other DNA
ttctaagtttcccacaaact

SEQ ID NO: 62157 - DNA, 20 bp, synthetic construct
  misc_feature 1..20: note = chemically synthesized
  source 1..20: mol_type = other DNA
gtcaaaaatatatgtacatt

SEQ ID NO: 62158 - DNA, 20 bp, synthetic construct
  misc_feature 1..20: note = chemically synthesized
  source 1..20: mol_type = other DNA
tttagtacatctaagaagaa

SEQ ID NO: 62159 - DNA, 20 bp, synthetic construct
  misc_feature 1..20: note = chemically synthesized
  source 1..20: mol_type = other DNA
gttttgtctcttatccacct

SEQ ID NO: 62160 - DNA, 20 bp, synthetic construct
  misc_feature 1..20: note = chemically synthesized
  source 1..20: mol_type = other DNA
tcccacagccccacttagct

SEQ ID NO: 62161 - DNA, 20 bp, synthetic construct
  misc_feature 1..20: note = chemically synthesized
  source 1..20: mol_type = other DNA
agccccacttagctctggat

SEQ ID NO: 62162 - DNA, 20 bp, synthetic construct
  misc_feature 1..20: note = chemically synthesized
  source 1..20: mol_type = other DNA
actacatggacgtaaaatgc

SEQ ID NO: 62163 - DNA, 20 bp, synthetic construct
  misc_feature 1..20: note = chemically synthesized
  source 1..20: mol_type = other DNA
tacatcctcaatctacacac

SEQ ID NO: 62164 - DNA, 20 bp, synthetic construct
  misc_feature 1..20: note = chemically synthesized
  source 1..20: mol_type = other DNA
caactcatgatatttggctc

SEQ ID NO: 62165 - DNA, 20 bp, synthetic construct
  misc_feature 1..20: note = chemically synthesized
  source 1..20: mol_type = other DNA
ttggctctagaatacatgct

SEQ ID NO: 62166 - DNA, 20 bp, synthetic construct
  misc_feature 1..20: note = chemically synthesized
  source 1..20: mol_type = other DNA
ctctgaaataagacataatt

SEQ ID NO: 62167 - DNA, 20 bp, synthetic construct
  misc_feature 1..20: note = chemically synthesized
  source 1..20: mol_type = other DNA
tcctgttatttttggaagca

SEQ ID NO: 62168 - DNA, 20 bp, synthetic construct
  misc_feature 1..20: note = chemically synthesized
  source 1..20: mol_type = other DNA
atttttggaagcacagggtg

SEQ ID NO: 62169 - DNA, 20 bp, synthetic construct
  misc_feature 1..20: note = chemically synthesized
  source 1..20: mol_type = other DNA
gggctgtgcgccgtgcttga

SEQ ID NO: 62170 - DNA, 20 bp, synthetic construct
  misc_feature 1..20: note = chemically synthesized
  source 1..20: mol_type = other DNA
gcgccgtgcttgagggagtt

SEQ ID NO: 62171 - DNA, 20 bp, synthetic construct
  misc_feature 1..20: note = chemically synthesized
  source 1..20: mol_type = other DNA
catcgaccacccaagggctg

SEQ ID NO: 62172 - DNA, 20 bp, synthetic construct
  misc_feature 1..20: note = chemically synthesized
  source 1..20: mol_type = other DNA
ctccccctgcagcccaggtg

SEQ ID NO: 62173 - DNA, 20 bp, synthetic construct
  misc_feature 1..20: note = chemically synthesized
  source 1..20: mol_type = other DNA
cagcccaggtgcgggatcca

SEQ ID NO: 62174 - DNA, 20 bp, synthetic construct
  misc_feature 1..20: note = chemically synthesized
  source 1..20: mol_type = other DNA
gggtgaagccggctaggctc

SEQ ID NO: 62175 - DNA, 20 bp, synthetic construct
  misc_feature 1..20: note = chemically synthesized
  source 1..20: mol_type = other DNA
gctaggctcctgagtttgct

SEQ ID NO: 62176 - DNA, 20 bp, synthetic construct
  misc_feature 1..20: note = chemically synthesized
  source 1..20: mol_type = other DNA
agaacccttatgtctagata

SEQ ID NO: 62177 - DNA, 20 bp, synthetic construct
  misc_feature 1..20: note = chemically synthesized
  source 1..20: mol_type = other DNA
tcagcaccctgtgtctagct

SEQ ID NO: 62178 - DNA, 20 bp, synthetic construct
  misc_feature 1..20: note = chemically synthesized
  source 1..20: mol_type = other DNA
ctgtgtctagctcagggttt

SEQ ID NO: 62179 - DNA, 20 bp, synthetic construct
  misc_feature 1..20: note = chemically synthesized
  source 1..20: mol_type = other DNA
agaacctttatgtctagctc

SEQ ID NO: 62180 - DNA, 20 bp, synthetic construct
  misc_feature 1..20: note = chemically synthesized
  source 1..20: mol_type = other DNA
tcagcaccctgtgtctagct

SEQ ID NO: 62181 - DNA, 20 bp, synthetic construct
  misc_feature 1..20: note = chemically synthesized
  source 1..20: mol_type = other DNA
ctgtgtctagctcagggttt

SEQ ID NO: 62182 - DNA, 20 bp, synthetic construct
  misc_feature 1..20: note = chemically synthesized
  source 1..20: mol_type = other DNA
agaacctttatgtctagctc

SEQ ID NO: 62183 - DNA, 20 bp, synthetic construct
  misc_feature 1..20: note = chemically synthesized
  source 1..20: mol_type = other DNA
tcagcaccctgtgtctagct

SEQ ID NO: 62184 - DNA, 20 bp, synthetic construct
  misc_feature 1..20: note = chemically synthesized
  source 1..20: mol_type = other DNA
ctgtgtctagctcagggttt

SEQ ID NO: 62185 - DNA, 20 bp, synthetic construct
  misc_feature 1..20: note = chemically synthesized
  source 1..20: mol_type = other DNA
agaacctttgtgtctagctc

SEQ ID NO: 62186 - DNA, 20 bp, synthetic construct
  misc_feature 1..20: note = chemically synthesized
  source 1..20: mol_type = other DNA
cactgggctctaccaatcag

SEQ ID NO: 62187 - DNA, 20 bp, synthetic construct
  misc_feature 1..20: note = chemically synthesized
  source 1..20: mol_type = other DNA
gctctaccaatcagcaggat

SEQ ID NO: 62188 - DNA, 20 bp, synthetic construct
  misc_feature 1..20: note = chemically synthesized
  source 1..20: mol_type = other DNA
atgtgggtggggccagataa

SEQ ID NO: 62189 - DNA, 20 bp, synthetic construct
  misc_feature 1..20: note = chemically synthesized
  source 1..20: mol_type = other DNA
agccagcagtggcaacccgc

SEQ ID NO: 62190 - DNA, 20 bp, synthetic construct
  misc_feature 1..20: note = chemically synthesized
  source 1..20: mol_type = other DNA
atcttgctgctgctcactgt

SEQ ID NO: 62191 - DNA, 20 bp, synthetic construct
  misc_feature 1..20: note = chemically synthesized
  source 1..20: mol_type = other DNA
agaactgtaacactcaccac

SEQ ID NO: 62192 - DNA, 20 bp, synthetic construct
  misc_feature 1..20: note = chemically synthesized
  source 1..20: mol_type = other DNA
cacagtatgtcagaaacaat

SEQ ID NO: 62193 - DNA, 20 bp, synthetic construct
  misc_feature 1..20: note = chemically synthesized
  source 1..20: mol_type = other DNA
taatgtgttactccctaagg

SEQ ID NO: 62194 - DNA, 20 bp, synthetic construct
  misc_feature 1..20: note = chemically synthesized
  source 1..20: mol_type = other DNA
ttctttacaggccgagaaaa

SEQ ID NO: 62195 - DNA, 20 bp, synthetic construct
  misc_feature 1..20: note = chemically synthesized
  source 1..20: mol_type = other DNA
acaggccgagaaaaatgaat

SEQ ID NO: 62196 - DNA, 20 bp, synthetic construct
  misc_feature 1..20: note = chemically synthesized
  source 1..20: mol_type = other DNA
atcattattcatgatttgca

SEQ ID NO: 62197 - DNA, 20 bp, synthetic construct
  misc_feature 1..20: note = chemically synthesized
  source 1..20: mol_type = other DNA
tttaactatgttccagattt

SEQ ID NO: 62198 - DNA, 20 bp, synthetic construct
  misc_feature 1..20: note = chemically synthesized
  source 1..20: mol_type = other DNA
atgttccagatttttgaatg

SEQ ID NO: 62199 - DNA, 20 bp, synthetic construct
  misc_feature 1..20: note = chemically synthesized
  source 1..20: mol_type = other DNA
aaaaataagtatgtgaagtg

SEQ ID NO: 62200 - DNA, 20 bp, synthetic construct
  misc_feature 1..20: note = chemically synthesized
  source 1..20: mol_type = other DNA
aaagcatcatgttgtacccc

SEQ ID NO: 62201 - DNA, 20 bp, synthetic construct
  misc_feature 1..20: note = chemically synthesized
  source 1..20: mol_type = other DNA
gttttctctacgttatttat

SEQ ID NO: 62202 - DNA, 20 bp, synthetic construct
  misc_feature 1..20: note = chemically synthesized
  source 1..20: mol_type = other DNA
accaccctttccacagtcaa

SEQ ID NO: 62203 - DNA, 20 bp, synthetic construct
  misc_feature 1..20: note = chemically synthesized
  source 1..20: mol_type = other DNA
gatattgtagtttaatgcct

SEQ ID NO: 62204 - DNA, 20 bp, synthetic construct
  misc_feature 1..20: note = chemically synthesized
  source 1..20: mol_type = other DNA
cctctttaggttctccttta

SEQ ID NO: 62205 - DNA, 20 bp, synthetic construct
  misc_feature 1..20: note = chemically synthesized
  source 1..20: mol_type = other DNA
tatgcctctacctttattag

SEQ ID NO: 62206 - DNA, 20 bp, synthetic construct
  misc_feature 1..20: note = chemically synthesized
  source 1..20: mol_type = other DNA
cacgtagtctgtgcttatga

SEQ ID NO: 62207 - DNA, 20 bp, synthetic construct
  misc_feature 1..20: note = chemically synthesized
  source 1..20: mol_type = other DNA
ctaatgttgttcgtcataat

SEQ ID NO: 62208 - DNA, 20 bp, synthetic construct
  misc_feature 1..20: note = chemically synthesized
  source 1..20: mol_type = other DNA
cagtttaggctagtaagcat

SEQ ID NO: 62209 - DNA, 20 bp, synthetic construct
  misc_feature 1..20: note = chemically synthesized
  source 1..20: mol_type = other DNA
ttcccacagtctgttggtca

SEQ ID NO: 62210 - DNA, 20 bp, synthetic construct
  misc_feature 1..20: note = chemically synthesized
  source 1..20: mol_type = other DNA
tctgttggtcacagaataac

SEQ ID NO: 62211 - DNA, 20 bp, synthetic construct
  misc_feature 1..20: note = chemically synthesized
  source 1..20: mol_type = other DNA
acctgagtgattactgatga

SEQ ID NO: 62212 - DNA, 20 bp, synthetic construct
  misc_feature 1..20: note = chemically synthesized
  source 1..20: mol_type = other DNA
gtgattactgatgaaagagt

SEQ ID NO: 62213 - DNA, 20 bp, synthetic construct
  misc_feature 1..20: note = chemically synthesized
  source 1..20: mol_type = other DNA
aaatgtttctctttttatta

SEQ ID NO: 62214 - DNA, 20 bp, synthetic construct
  misc_feature 1..20: note = chemically synthesized
  source 1..20: mol_type = other DNA
aggagcccttttgattgaag

SEQ ID NO: 62215 - DNA, 20 bp, synthetic construct
  misc_feature 1..20: note = chemically synthesized
  source 1..20: mol_type = other DNA
accttacagggacaggacat

SEQ ID NO: 62216 - DNA, 20 bp, synthetic construct
  misc_feature 1..20: note = chemically synthesized
  source 1..20: mol_type = other DNA
catcggtctttctttatttc

SEQ ID NO: 62217 - DNA, 20 bp, synthetic construct
  misc_feature 1..20: note = chemically synthesized
  source 1..20: mol_type = other DNA
ctctttcaagagacagagaa

SEQ ID NO: 62218 - DNA, 20 bp, synthetic construct
  misc_feature 1..20: note = chemically synthesized
  source 1..20: mol_type = other DNA
ttctcagaagtatattttga

SEQ ID NO: 62219 - DNA, 20 bp, synthetic construct
  misc_feature 1..20: note = chemically synthesized
  source 1..20: mol_type = other DNA
aagaagtgatattgagaagg

SEQ ID NO: 62220 - DNA, 20 bp, synthetic construct
  misc_feature 1..20: note = chemically synthesized
  source 1..20: mol_type = other DNA
tttatatacatctgtattgt

SEQ ID NO: 62221 - DNA, 20 bp, synthetic construct
  misc_feature 1..20: note = chemically synthesized
  source 1..20: mol_type = other DNA
atatactagctatgtaacct

SEQ ID NO: 62222 - DNA, 20 bp, synthetic construct
  misc_feature 1..20: note = chemically synthesized
  source 1..20: mol_type = other DNA
cctgcttcatagttattaat

SEQ ID NO: 62223 - DNA, 20 bp, synthetic construct
  misc_feature 1..20: note = chemically synthesized
  source 1..20: mol_type = other DNA
tacacacacacacacattga

SEQ ID NO: 62224 - DNA, 20 bp, synthetic construct
  misc_feature 1..20: note = chemically synthesized
  source 1..20: mol_type = other DNA
ggtattatctaaatttcata

SEQ ID NO: 62225 - DNA, 20 bp, synthetic construct
  misc_feature 1..20: note = chemically synthesized
  source 1..20: mol_type = other DNA
tttgtcatatatttattcaa

SEQ ID NO: 62226 - DNA, 20 bp, synthetic construct
  misc_feature 1..20: note = chemically synthesized
  source 1..20: mol_type = other DNA
aattattctcaagttattat

SEQ ID NO: 62227 - DNA, 20 bp, synthetic construct
  misc_feature 1..20: note = chemically synthesized
  source 1..20: mol_type = other DNA
tgaggatgttgaaagacaga

SEQ ID NO: 62228 - DNA, 20 bp, synthetic construct
  misc_feature 1..20: note = chemically synthesized
  source 1..20: mol_type = other DNA
atgttgaaagacagagagga

SEQ ID NO: 62229 - DNA, 20 bp, synthetic construct
  misc_feature 1..20: note = chemically synthesized
  source 1..20: mol_type = other DNA
cacaattaagctaagcagct

SEQ ID NO: 62230 - DNA, 20 bp, synthetic construct
  misc_feature 1..20: note = chemically synthesized
  source 1..20: mol_type = other DNA
ctaagcagctaagagtcttg

SEQ ID NO: 62231 - DNA, 20 bp, synthetic construct
  misc_feature 1..20: note = chemically synthesized
  source 1..20: mol_type = other DNA
gcagggtagtgtagggacca

SEQ ID NO: 62232 - DNA, 20 bp, synthetic construct
  misc_feature 1..20: note = chemically synthesized
  source 1..20: mol_type = other DNA
ccacagggttaagggggcag

SEQ ID NO: 62233 - DNA, 20 bp, synthetic construct
  misc_feature 1..20: note = chemically synthesized
  source 1..20: mol_type = other DNA
ttgtttaaatgtataaataa

SEQ ID NO: 62234 - DNA, 20 bp, synthetic construct
  misc_feature 1..20: note = chemically synthesized
  source 1..20: mol_type = other DNA
atgtataaataagtggatga

SEQ ID NO: 62235 - DNA, 20 bp, synthetic construct
  misc_feature 1..20: note = chemically synthesized
  source 1..20: mol_type = other DNA
atagacagatagatgataga

SEQ ID NO: 62236 - DNA, 20 bp, synthetic construct
  misc_feature 1..20: note = chemically synthesized
  source 1..20: mol_type = other DNA
atttcagccatatcttaaca

SEQ ID NO: 62237 - DNA, 20 bp, synthetic construct
  misc_feature 1..20: note = chemically synthesized
  source 1..20: mol_type = other DNA
ctctaatcttaaaggtaaac

SEQ ID NO: 62238 - DNA, 20 bp, synthetic construct
  misc_feature 1..20: note = chemically synthesized
  source 1..20: mol_type = other DNA
gcctttttggtcataaaaca

SEQ ID NO: 62239 - DNA, 20 bp, synthetic construct
  misc_feature 1..20: note = chemically synthesized
  source 1..20: mol_type = other DNA
agtatccctcaagtagtgtc

SEQ ID NO: 62240 - DNA, 20 bp, synthetic construct
  misc_feature 1..20: note = chemically synthesized
  source 1..20: mol_type = other DNA
atttaaatagtctgcaagcc

SEQ ID NO: 62241 - DNA, 20 bp, synthetic construct
  misc_feature 1..20: note = chemically synthesized
  source 1..20: mol_type = other DNA
tgggaggactgcttgagctc

SEQ ID NO: 62242 - DNA, 20 bp, synthetic construct
  misc_feature 1..20: note = chemically synthesized
  source 1..20: mol_type = other DNA
tactcaggaggccgaaatgg

SEQ ID NO: 62243 - DNA, 20 bp, synthetic construct
  misc_feature 1..20: note = chemically synthesized
  source 1..20: mol_type = other DNA
ctgcactccagcctggacag

SEQ ID NO: 62244 - DNA, 20 bp, synthetic construct
  misc_feature 1..20: note = chemically synthesized
  source 1..20: mol_type = other DNA
tgaaaccttgcctcacgaaa

SEQ ID NO: 62245 - DNA, 20 bp, synthetic construct
  misc_feature 1..20: note = chemically synthesized
  source 1..20: mol_type = other DNA
tgatgctctaccacataggt

SEQ ID NO: 62246 - DNA, 20 bp, synthetic construct
  misc_feature 1..20: note = chemically synthesized
  source 1..20: mol_type = other DNA
tcaccatgttgtaactttct

SEQ ID NO: 62247 - DNA, 20 bp, synthetic construct
  misc_feature 1..20: note = chemically synthesized
  source 1..20: mol_type = other DNA
agtaacaatataaagttatt

SEQ ID NO: 62248 - DNA, 20 bp, synthetic construct
  misc_feature 1..20: note = chemically synthesized
  source 1..20: mol_type = other DNA
ttctactaagccattgaaac

SEQ ID NO: 62249 - DNA, 20 bp, synthetic construct
  misc_feature 1..20: note = chemically synthesized
  source 1..20: mol_type = other DNA
gaataacagaacaagattga

SEQ ID NO: 62250 - DNA, 20 bp, synthetic construct
  misc_feature 1..20: note = chemically synthesized
  source 1..20: mol_type = other DNA
aatacattttccgaaattac

SEQ ID NO: 62251 - DNA, 20 bp, synthetic construct
  misc_feature 1..20: note = chemically synthesized
  source 1..20: mol_type = other DNA
caagcacgtggacctgggag

SEQ ID NO: 62252 - DNA, 20 bp, synthetic construct
  misc_feature 1..20: note = chemically synthesized
  source 1..20: mol_type = other DNA
aaatgcaggtttataataga

SEQ ID NO: 62253 - DNA, 20 bp, synthetic construct
  misc_feature 1..20: note = chemically synthesized
  source 1..20: mol_type = other DNA
ccagtacacaagaggggacg

SEQ ID NO: 62254 - DNA, 20 bp, synthetic construct
  misc_feature 1..20: note = chemically synthesized
  source 1..20: mol_type = other DNA
ctcattctttttcttagtgt

SEQ ID NO: 62255 - DNA, 20 bp, synthetic construct
  misc_feature 1..20: note = chemically synthesized
  source 1..20: mol_type = other DNA
ctttttcttagtgtgagaat

SEQ ID NO: 62256 - DNA, 20 bp, synthetic construct
  misc_feature 1..20: note = chemically synthesized
  source 1..20: mol_type = other DNA
agaataagaatagccatgac

SEQ ID NO: 62257 - DNA, 20 bp, synthetic construct
  misc_feature 1..20: note = chemically synthesized
  source 1..20: mol_type = other DNA
ctgcagagccagggccgaga

SEQ ID NO: 62258 - DNA, 20 bp, synthetic construct
  misc_feature 1..20: note = chemically synthesized
  source 1..20: mol_type = other DNA
ctctccctcccattcccgag

SEQ ID NO: 62259 - DNA, 20 bp, synthetic construct
  misc_feature 1..20: note = chemically synthesized
  source 1..20: mol_type = other DNA
gctgtgacatggaaactatg

SEQ ID NO: 62260 - DNA, 20 bp, synthetic construct
  misc_feature 1..20: note = chemically synthesized
  source 1..20: mol_type = other DNA
tggaaactatgtagaatatt

SEQ ID NO: 62261 - DNA, 20 bp, synthetic construct
  misc_feature 1..20: note = chemically synthesized
  source 1..20: mol_type = other DNA
tagacagaaagtcaggagct

SEQ ID NO: 62262 - DNA, 20 bp, synthetic construct
  misc_feature 1..20: note = chemically synthesized
  source 1..20: mol_type = other DNA
cagtttctctttttataagt

SEQ ID NO: 62263 - DNA, 20 bp, synthetic construct
  misc_feature 1..20: note = chemically synthesized
  source 1..20: mol_type = other DNA
tctttttataagtaggagtc

SEQ ID NO: 62264 - DNA, 20 bp, synthetic construct
  misc_feature 1..20: note = chemically synthesized
  source 1..20: mol_type = other DNA
ctcaccttcacccaggccca

SEQ ID NO: 62265 - DNA, 20 bp, synthetic construct
  misc_feature 1..20: note = chemically synthesized
  source 1..20: mol_type = other DNA
tagttcacgtgtgtaaaaag

SEQ ID NO: 62266 - DNA, 20 bp, synthetic construct
  misc_feature 1..20: note = chemically synthesized
  source 1..20: mol_type = other DNA
ggcagtatagagcagagatt

SEQ ID NO: 62267 - DNA, 20 bp, synthetic construct
  misc_feature 1..20: note = chemically synthesized
  source 1..20: mol_type = other DNA
agatgctggagccagaccac

SEQ ID NO: 62268 - DNA, 20 bp, synthetic construct
  misc_feature 1..20: note = chemically synthesized
  source 1..20: mol_type = other DNA
gtttcttcatctgtaaaatg

SEQ ID NO: 62269 - DNA, 20 bp, synthetic construct
  misc_feature 1..20: note = chemically synthesized
  source 1..20: mol_type = other DNA
taattagtttgtttttgaga

SEQ ID NO: 62270 - DNA, 20 bp, synthetic construct
  misc_feature 1..20: note = chemically synthesized
  source 1..20: mol_type = other DNA
tctcactctgtcacccaaat

SEQ ID NO: 62271 - DNA, 20 bp, synthetic construct
  misc_feature 1..20: note = chemically synthesized
  source 1..20: mol_type = other DNA
ggtcctcccacctcaacatc

SEQ ID NO: 62272 - DNA, 20 bp, synthetic construct
  misc_feature 1..20: note = chemically synthesized
  source 1..20: mol_type = other DNA
ttttgtatttttggtagaga

SEQ ID NO: 62273 - DNA, 20 bp, synthetic construct
  misc_feature 1..20: note = chemically synthesized
  source 1..20: mol_type = other DNA
atggggtttcacatgttaca

SEQ ID NO: 62274 - DNA, 20 bp, synthetic construct
  misc_feature 1..20: note = chemically synthesized
  source 1..20: mol_type = other DNA
acctcagccttccaaagtgc

SEQ ID NO: 62275 - DNA, 20 bp, synthetic construct
  misc_feature 1..20: note = chemically synthesized
  source 1..20: mol_type = other DNA
gggattataagcatgattac

SEQ ID NO: 62276 - DNA, 20 bp, synthetic construct
  misc_feature 1..20: note = chemically synthesized
  source 1..20: mol_type = other DNA
tcataagattgttctgcagc

SEQ ID NO: 62277 - DNA, 20 bp, synthetic construct
  misc_feature 1..20: note = chemically synthesized
  source 1..20: mol_type = other DNA
aagattgttctgcagcccga

SEQ ID NO: 62278 - DNA, 20 bp, synthetic construct
  misc_feature 1..20: note = chemically synthesized
  source 1..20: mol_type = other DNA
cgagtgagttaatacatgca

SEQ ID NO: 62279 - DNA, 20 bp, synthetic construct
  misc_feature 1..20: note = chemically synthesized
  source 1..20: mol_type = other DNA
attaatcatatttaatactc

SEQ ID NO: 62280 - DNA, 20 bp, synthetic construct
  misc_feature 1..20: note = chemically synthesized
  source 1..20: mol_type = other DNA
cataaactactagcaaatag

SEQ ID NO: 62281 - DNA, 20 bp, synthetic construct
  misc_feature 1..20: note = chemically synthesized
  source 1..20: mol_type = other DNA
acttcttggcagtctgtatg

SEQ ID NO: 62282 - DNA, 20 bp, synthetic construct
  misc_feature 1..20: note = chemically synthesized
  source 1..20: mol_type = other DNA
cagtctgtatgctggatgct

SEQ ID NO: 62283 - DNA, 20 bp, synthetic construct
  misc_feature 1..20: note = chemically synthesized
  source 1..20: mol_type = other DNA
tattcgtctgtgtcctgctc

SEQ ID NO: 62284 - DNA, 20 bp, synthetic construct
  misc_feature 1..20: note = chemically synthesized
  source 1..20: mol_type = other DNA
aagactacaccatgtggaga

SEQ ID NO: 62285 - DNA, 20 bp, synthetic construct
  misc_feature 1..20: note = chemically synthesized
  source 1..20: mol_type = other DNA
gtggctctctggttgactgt

SEQ ID NO: 62286 - DNA, 20 bp, synthetic construct
  misc_feature 1..20: note = chemically synthesized
  source 1..20: mol_type = other DNA
gcctattatttaacaaatgc

SEQ ID NO: 62287 - DNA, 20 bp, synthetic construct
  misc_feature 1..20: note = chemically synthesized
  source 1..20: mol_type = other DNA
taacaaatgcatgaatgctt

SEQ ID NO: 62288 - DNA, 20 bp, synthetic construct
  misc_feature 1..20: note = chemically synthesized
  source 1..20: mol_type = other DNA
gcatgaatgcttcagaatat

SEQ ID NO: 62289 - DNA, 20 bp, synthetic construct
  misc_feature 1..20: note = chemically synthesized
  source 1..20: mol_type = other DNA
aatatgggaatattatcttc

SEQ ID NO: 62290 - DNA, 20 bp, synthetic construct
  misc_feature 1..20: note = chemically synthesized
  source 1..20: mol_type = other DNA
gaatattatcttctggaata

SEQ ID NO: 62291 - DNA, 20 bp, synthetic construct
  misc_feature 1..20: note = chemically synthesized
  source 1..20: mol_type = other DNA
tcaagttatattatgtaacc

SEQ ID NO: 62292 - DNA, 20 bp, synthetic construct
  misc_feature 1..20: note = chemically synthesized
  source 1..20: mol_type = other DNA
tagaagattcttctgtgtgt

SEQ ID NO: 62293 - DNA, 20 bp, synthetic construct
  misc_feature 1..20: note = chemically synthesized
  source 1..20: mol_type = other DNA
agaaagcttttaacccatca

SEQ ID NO: 62294 - DNA, 20 bp, synthetic construct
  misc_feature 1..20: note = chemically synthesized
  source 1..20: mol_type = other DNA
tcattgaataaatccctata

SEQ ID NO: 62295 - DNA, 20 bp, synthetic construct
  misc_feature 1..20: note = chemically synthesized
  source 1..20: mol_type = other DNA
ctctcataattcttggttgc

SEQ ID NO: 62296 - DNA, 20 bp, synthetic construct
  misc_feature 1..20: note = chemically synthesized
  source 1..20: mol_type = other DNA
tgagacaaactatggggaag

SEQ ID NO: 62297 - DNA, 20 bp, synthetic construct
  misc_feature 1..20: note = chemically synthesized
  source 1..20: mol_type = other DNA
aagcagggtatgaaagagct

SEQ ID NO: 62298 - DNA, 20 bp, synthetic construct
  misc_feature 1..20: note = chemically synthesized
  source 1..20: mol_type = other DNA
gcttaaaatcagaagcccca

SEQ ID NO: 62299 - DNA, 20 bp, synthetic construct
  misc_feature 1..20: note = chemically synthesized
  source 1..20: mol_type = other DNA
aatcagaagccccattggat

SEQ ID NO: 62300 - DNA, 20 bp, synthetic construct
  misc_feature 1..20: note = chemically synthesized
  source 1..20: mol_type = other DNA
gcctcctgccccgaacttcc

SEQ ID NO: 62301 - DNA, 20 bp, synthetic construct
  misc_feature 1..20: note = chemically synthesized
  source 1..20: mol_type = other DNA
ctctcttaagtgtttcctgc

SEQ ID NO: 62302 - DNA, 20 bp, synthetic construct
  misc_feature 1..20: note = chemically synthesized
  source 1..20: mol_type = other DNA
tccagcccctggctagttga

SEQ ID NO: 62303 - DNA, 20 bp, synthetic construct
  misc_feature 1..20: note = chemically synthesized
  source 1..20: mol_type = other DNA
tactttcagcgttggacaac

SEQ ID NO: 62304 - DNA, 20 bp, synthetic construct
  misc_feature 1..20: note = chemically synthesized
  source 1..20: mol_type = other DNA
gctgagatgatctatgtggg

SEQ ID NO: 62305 - DNA, 20 bp, synthetic construct
  misc_feature 1..20: note = chemically synthesized
  source 1..20: mol_type = other DNA
ctcattcccactttaatatc

SEQ ID NO: 62306 - DNA, 20 bp, synthetic construct
  misc_feature 1..20: note = chemically synthesized
  source 1..20: mol_type = other DNA
atatccagaatcactataag

SEQ ID NO: 62307 - DNA, 20 bp, synthetic construct
  misc_feature 1..20: note = chemically synthesized
  source 1..20: mol_type = other DNA
tataagaagaatataataag

SEQ ID NO: 62308 - DNA, 20 bp, synthetic construct
  misc_feature 1..20: note = chemically synthesized
  source 1..20: mol_type = other DNA
aaattaagaggcatacgtga

SEQ ID NO: 62309 - DNA, 20 bp, synthetic construct
  misc_feature 1..20: note = chemically synthesized
  source 1..20: mol_type = other DNA
taagaggcatacgtgatggg

SEQ ID NO: 62310 - DNA, 20 bp, synthetic construct
  misc_feature 1..20: note = chemically synthesized
  source 1..20: mol_type = other DNA
atgagtaagagaggagaggg

SEQ ID NO: 62311 - DNA, 20 bp, synthetic construct
  misc_feature 1..20: note = chemically synthesized
  source 1..20: mol_type = other DNA
catgacaagactgagctcag

SEQ ID NO: 62312 - DNA, 20 bp, synthetic construct
  misc_feature 1..20: note = chemically synthesized
  source 1..20: mol_type = other DNA
ccctgtgctgcactgatgag

SEQ ID NO: 62313 - DNA, 20 bp, synthetic construct
  misc_feature 1..20: note = chemically synthesized
  source 1..20: mol_type = other DNA
gcactgatgaggaggatcag

SEQ ID NO: 62314 - DNA, 20 bp, synthetic construct
  misc_feature 1..20: note = chemically synthesized
  source 1..20: mol_type = other DNA
tggatggggcaatgaagcaa

SEQ ID NO: 62315 - DNA, 20 bp, synthetic construct
  misc_feature 1..20: note = chemically synthesized
  source 1..20: mol_type = other DNA
tgaagcaaaggaatcattct

SEQ ID NO: 62316 - DNA, 20 bp, synthetic construct
  misc_feature 1..20: note = chemically synthesized
  source 1..20: mol_type = other DNA
atgactgtaaatttgggagc

SEQ ID NO: 62317 - DNA, 20 bp, synthetic construct
  misc_feature 1..20: note = chemically synthesized
  source 1..20: mol_type = other DNA
gagcaggagtctctaaggac

SEQ ID NO: 62318 - DNA, 20 bp, synthetic construct
  misc_feature 1..20: note = chemically synthesized
  source 1..20: mol_type = other DNA
ctctaaggacttggatttca

SEQ ID NO: 62319 - DNA, 20 bp, synthetic construct
  misc_feature 1..20: note = chemically synthesized
  source 1..20: mol_type = other DNA
tgtctatcagaggttccagg

SEQ ID NO: 62320 - DNA, 20 bp, synthetic construct
  misc_feature 1..20: note = chemically synthesized
  source 1..20: mol_type = other DNA
atcagaggttccagggaggg

SEQ ID NO: 62321 - DNA, 20 bp, synthetic construct
  misc_feature 1..20: note = chemically synthesized
  source 1..20: mol_type = other DNA
aggttccagggagggtgggg

SEQ ID NO: 62322 - DNA, 20 bp, synthetic construct
  misc_feature 1..20: note = chemically synthesized
  source 1..20: mol_type = other DNA
caccagctatcagggcccag

SEQ ID NO: 62323 - DNA, 20 bp, synthetic construct
  misc_feature 1..20: note = chemically synthesized
  source 1..20: mol_type = other DNA
gttaggtcaggttggtggtg

SEQ ID NO: 62324 - DNA, 20 bp, synthetic construct
  misc_feature 1..20: note = chemically synthesized
  source 1..20: mol_type = other DNA
gtcaggttggtggtgctggg

SEQ ID NO: 62325 - DNA, 20 bp, synthetic construct
  misc_feature 1..20: note = chemically synthesized
  source 1..20: mol_type = other DNA
ggagccaggagagatagacc

SEQ ID NO: 62326 - DNA, 20 bp, synthetic construct
  misc_feature 1..20: note = chemically synthesized
  source 1..20: mol_type = other DNA
tgccttgactcctatgtttt

SEQ ID NO: 62327 - DNA, 20 bp, synthetic construct
  misc_feature 1..20: note = chemically synthesized
  source 1..20: mol_type = other DNA
aggatcatcatctataaagt

SEQ ID NO: 62328 - DNA, 20 bp, synthetic construct
  misc_feature 1..20: note = chemically synthesized
  source 1..20: mol_type = other DNA
taataattgtgtctatctca

SEQ ID NO: 62329 - DNA, 20 bp, synthetic construct
  misc_feature 1..20: note = chemically synthesized
  source 1..20: mol_type = other DNA
ctatctcatagggttattat

SEQ ID NO: 62330 - DNA, 20 bp, synthetic construct
  misc_feature 1..20: note = chemically synthesized
  source 1..20: mol_type = other DNA
gagctatgggcttcctatgt

SEQ ID NO: 62331 - DNA, 20 bp, synthetic construct
  misc_feature 1..20: note = chemically synthesized
  source 1..20: mol_type = other DNA
accagctgctgcagtcaaag

SEQ ID NO: 62332 - DNA, 20 bp, synthetic construct
  misc_feature 1..20: note = chemically synthesized
  source 1..20: mol_type = other DNA
tctgaacatgagaaattttt

SEQ ID NO: 62333 - DNA, 20 bp, synthetic construct
  misc_feature 1..20: note = chemically synthesized
  source 1..20: mol_type = other DNA
aaatttttaggaatctgcac

SEQ ID NO: 62334 - DNA, 20 bp, synthetic construct
  misc_feature 1..20: note = chemically synthesized
  source 1..20: mol_type = other DNA
gaggtaaatgaaagagaagt

SEQ ID NO: 62335 - DNA, 20 bp, synthetic construct
  misc_feature 1..20: note = chemically synthesized
  source 1..20: mol_type = other DNA
ctaatgataagtaacacctc

SEQ ID NO: 62336 - DNA, 20 bp, synthetic construct
  misc_feature 1..20: note = chemically synthesized
  source 1..20: mol_type = other DNA
cttgagtacttagtatatgc

SEQ ID NO: 62337 - DNA, 20 bp, synthetic construct
  misc_feature 1..20: note = chemically synthesized
  source 1..20: mol_type = other DNA
cgggcacggtggctcatata

SEQ ID NO: 62338 - DNA, 20 bp, synthetic construct
  misc_feature 1..20: note = chemically synthesized
  source 1..20: mol_type = other DNA
actttgggaggccaaggcaa

SEQ ID NO: 62339 - DNA, 20 bp, synthetic construct
  misc_feature 1..20: note = chemically synthesized
  source 1..20: mol_type = other DNA
caattggatcacctgaggtc

SEQ ID NO: 62340 - DNA, 20 bp, synthetic construct
  misc_feature 1..20: note = chemically synthesized
  source 1..20: mol_type = other DNA
tactcaggaggctgaggcag

SEQ ID NO: 62341 - DNA, 20 bp, synthetic construct
  misc_feature 1..20: note = chemically synthesized
  source 1..20: mol_type = other DNA
ctgcactccagcctaggcga

SEQ ID NO: 62342 - DNA, 20 bp, synthetic construct
  misc_feature 1..20: note = chemically synthesized
  source 1..20: mol_type = other DNA
aaaaaaaagaagtttattat

SEQ ID NO: 62343 - DNA, 20 bp, synthetic construct
  misc_feature 1..20: note = chemically synthesized
  source 1..20: mol_type = other DNA
gaaccaccaagtagtaaggc

SEQ ID NO: 62344 - DNA, 20 bp, synthetic construct
  misc_feature 1..20: note = chemically synthesized
  source 1..20: mol_type = other DNA
aaaacacaaactcagatatt

SEQ ID NO: 62345 - DNA, 20 bp, synthetic construct
  misc_feature 1..20: note = chemically synthesized
  source 1..20: mol_type = other DNA
gaaaaatttagaaacaactt

SEQ ID NO: 62346 - DNA, 20 bp, synthetic construct
  misc_feature 1..20: note = chemically synthesized
  source 1..20: mol_type = other DNA
cagaataaagagattttctc

SEQ ID NO: 62347 - DNA, 20 bp, synthetic construct
  misc_feature 1..20: note = chemically synthesized
  source 1..20: mol_type = other DNA
aagctgcaactttggttaaa

SEQ ID NO: 62348 - DNA, 20 bp, synthetic construct
  misc_feature 1..20: note = chemically synthesized
  source 1..20: mol_type = other DNA
tgagggccctaaactatgct

SEQ ID NO: 62349 - DNA, 20 bp, synthetic construct
  misc_feature 1..20: note = chemically synthesized
  source 1..20: mol_type = other DNA
attctctgcatctccctttg

SEQ ID NO: 62350 - DNA, 20 bp, synthetic construct
  misc_feature 1..20: note = chemically synthesized
  source 1..20: mol_type = other DNA
ttgtctttctcatctgtaaa

SEQ ID NO: 62351 - DNA, 20 bp, synthetic construct
  misc_feature 1..20: note = chemically synthesized
  source 1..20: mol_type = other DNA
ctatgtcttccctgatgggc

SEQ ID NO: 62352 - DNA, 20 bp, synthetic construct
  misc_feature 1..20: note = chemically synthesized
  source 1..20: mol_type = other DNA
gtcaaaagtaggctaagtag

SEQ ID NO: 62353 - DNA, 20 bp, synthetic construct
  misc_feature 1..20: note = chemically synthesized
  source 1..20: mol_type = other DNA
aggaacagagagcaaaagag

SEQ ID NO: 62354 - DNA, 20 bp, synthetic construct
  misc_feature 1..20: note = chemically synthesized
  source 1..20: mol_type = other DNA
acagagagcaaaagaggtgg

SEQ ID NO: 62355 - DNA, 20 bp, synthetic construct
  misc_feature 1..20: note = chemically synthesized
  source 1..20: mol_type = other DNA
caaaagaggtgggtgaatga

SEQ ID NO: 62356 - DNA, 20 bp, synthetic construct
  misc_feature 1..20: note = chemically synthesized
  source 1..20: mol_type = other DNA
tgttgtctaaatatctccta

SEQ ID NO: 62357 - DNA, 20 bp, synthetic construct
  misc_feature 1..20: note = chemically synthesized
  source 1..20: mol_type = other DNA
agggaattattgtgagaggt

SEQ ID NO: 62358 - DNA, 20 bp, synthetic construct
  misc_feature 1..20: note = chemically synthesized
  source 1..20: mol_type = other DNA
gaatagtgttgtaaaataag

SEQ ID NO: 62359 - DNA, 20 bp, synthetic construct
  misc_feature 1..20: note = chemically synthesized
  source 1..20: mol_type = other DNA
ttaacagtcaagaaatacct

SEQ ID NO: 62360 - DNA, 20 bp, synthetic construct
  misc_feature 1..20: note = chemically synthesized
  source 1..20: mol_type = other DNA
actgtaacagaaaacactta

SEQ ID NO: 62361 - DNA, 20 bp, synthetic construct
  misc_feature 1..20: note = chemically synthesized
  source 1..20: mol_type = other DNA
gttgattgccttaattcatc

SEQ ID NO: 62362 - DNA, 20 bp, synthetic construct
  misc_feature 1..20: note = chemically synthesized
  source 1..20: mol_type = other DNA
gaaaggcagagctgactgtg

SEQ ID NO: 62363 - DNA, 20 bp, synthetic construct
  misc_feature 1..20: note = chemically synthesized
  source 1..20: mol_type = other DNA
tgatgaaggtgccttctcat

SEQ ID NO: 62364 - DNA, 20 bp, synthetic construct
  misc_feature 1..20: note = chemically synthesized
  source 1..20: mol_type = other DNA
gcttgccctgatgggagata

SEQ ID NO: 62365 - DNA, 20 bp, synthetic construct
  misc_feature 1..20: note = chemically synthesized
  source 1..20: mol_type = other DNA
gccctgatgggagatagaga

SEQ ID NO: 62366 - DNA, 20 bp, synthetic construct
  misc_feature 1..20: note = chemically synthesized
  source 1..20: mol_type = other DNA
cagcactttgggaggctgag

SEQ ID NO: 62367 - DNA, 20 bp, synthetic construct
  misc_feature 1..20: note = chemically synthesized
  source 1..20: mol_type = other DNA
gggtggactgcttggagctc

SEQ ID NO: 62368 - DNA, 20 bp, synthetic construct
  misc_feature 1..20: note = chemically synthesized
  source 1..20: mol_type = other DNA
gcacctgtaatcccagctat

SEQ ID NO: 62369 - DNA, 20 bp, synthetic construct
  misc_feature 1..20: note = chemically synthesized
  source 1..20: mol_type = other DNA
tattagggtggctgaggcag

SEQ ID NO: 62370 - DNA, 20 bp, synthetic construct
  misc_feature 1..20: note = chemically synthesized
  source 1..20: mol_type = other DNA
tttttacttggactcttgtg

SEQ ID NO: 62371 - DNA, 20 bp, synthetic construct
  misc_feature 1..20: note = chemically synthesized
  source 1..20: mol_type = other DNA
aggtgcttcaaaaccatttg

SEQ ID NO: 62372 - DNA, 20 bp, synthetic construct
  misc_feature 1..20: note = chemically synthesized
  source 1..20: mol_type = other DNA
agttctggccaggcccctgt

SEQ ID NO: 62373 - DNA, 20 bp, synthetic construct
  misc_feature 1..20: note = chemically synthesized
  source 1..20: mol_type = other DNA
ctggctcaagcacagcaatg

SEQ ID NO: 62374 - DNA, 20 bp, synthetic construct
  misc_feature 1..20: note = chemically synthesized
  source 1..20: mol_type = other DNA
cacagcaatgctgagtcatg

SEQ ID NO: 62375 - DNA, 20 bp, synthetic construct
  misc_feature 1..20: note = chemically synthesized
  source 1..20: mol_type = other DNA
tgatgagtcatgctgaggct

SEQ ID NO: 62376 - DNA, 20 bp, synthetic construct
  misc_feature 1..20: note = chemically synthesized
  source 1..20: mol_type = other DNA
gtgcccagatgttctcagcc

SEQ ID NO: 62377 - DNA, 20 bp, synthetic construct
  misc_feature 1..20: note = chemically synthesized
  source 1..20: mol_type = other DNA
cctagagtgatgactcctat

SEQ ID NO: 62378 - DNA, 20 bp, synthetic construct
  misc_feature 1..20: note = chemically synthesized
  source 1..20: mol_type = other DNA
actcctatctgggtccccag

SEQ ID NO: 62379 - DNA, 20 bp, synthetic construct
  misc_feature 1..20: note = chemically synthesized
  source 1..20: mol_type = other DNA
caaacggcatcataaagaaa

SEQ ID NO: 62380 - DNA, 20 bp, synthetic construct
  misc_feature 1..20: note = chemically synthesized
  source 1..20: mol_type = other DNA
aagaaaatggatgcctgaga

SEQ ID NO: 62381 - DNA, 20 bp, synthetic construct
  misc_feature 1..20: note = chemically synthesized
  source 1..20: mol_type = other DNA
agacagaatgtgacatattc

SEQ ID NO: 62382 - DNA, 20 bp, synthetic construct
  misc_feature 1..20: note = chemically synthesized
  source 1..20: mol_type = other DNA
attctagaatatattatttc

SEQ ID NO: 62383 - DNA, 20 bp, synthetic construct
  misc_feature 1..20: note = chemically synthesized
  source 1..20: mol_type = other DNA
tttgttgttatcaattgcca

SEQ ID NO: 62384 - DNA, 20 bp, synthetic construct
  misc_feature 1..20: note = chemically synthesized
  source 1..20: mol_type = other DNA
ccatagaatgattagttatt

SEQ ID NO: 62385 - DNA, 20 bp, synthetic construct
  misc_feature 1..20: note = chemically synthesized
  source 1..20: mol_type = other DNA
gcctctatacctagaagcgg

SEQ ID NO: 62386 - DNA, 20 bp, synthetic construct
  misc_feature 1..20: note = chemically synthesized
  source 1..20: mol_type = other DNA
aatacatgtgtatagatttt

SEQ ID NO: 62387 - DNA, 20 bp, synthetic construct
  misc_feature 1..20: note = chemically synthesized
  source 1..20: mol_type = other DNA
cacatgtattaatatgaaac

SEQ ID NO: 62388 - DNA, 20 bp, synthetic construct
  misc_feature 1..20: note = chemically synthesized
  source 1..20: mol_type = other DNA
agaggacacatgctcacata

SEQ ID NO: 62389 - DNA, 20 bp, synthetic construct
  misc_feature 1..20: note = chemically synthesized
  source 1..20: mol_type = other DNA
atacggggtcagatctgact

SEQ ID NO: 62390 - DNA, 20 bp, synthetic construct
  misc_feature 1..20: note = chemically synthesized
  source 1..20: mol_type = other DNA
tactgggaagctctcatctt

SEQ ID NO: 62391 - DNA, 20 bp, synthetic construct
  misc_feature 1..20: note = chemically synthesized
  source 1..20: mol_type = other DNA
cattcctccaggagagctaa

SEQ ID NO: 62392 - DNA, 20 bp, synthetic construct
  misc_feature 1..20: note = chemically synthesized
  source 1..20: mol_type = other DNA
agctaaaagggttcacctgt

SEQ ID NO: 62393 - DNA, 20 bp, synthetic construct
  misc_feature 1..20: note = chemically synthesized
  source 1..20: mol_type = other DNA
gtaactgtgaaggactacaa

SEQ ID NO: 62394 - DNA, 20 bp, synthetic construct
  misc_feature 1..20: note = chemically synthesized
  source 1..20: mol_type = other DNA
gagaaaaaacaggaggtcaa

SEQ ID NO: 62395 - DNA, 20 bp, synthetic construct
  misc_feature 1..20: note = chemically synthesized
  source 1..20: mol_type = other DNA
gggatagagaaggcttccag

SEQ ID NO: 62396 - DNA, 20 bp, synthetic construct
  misc_feature 1..20: note = chemically synthesized
  source 1..20: mol_type = other DNA
gctttgaagctggcttctgt

SEQ ID NO: 62397 - DNA, 20 bp, synthetic construct
  misc_feature 1..20: note = chemically synthesized
  source 1..20: mol_type = other DNA
attagttcaacagacatgca

SEQ ID NO: 62398 - DNA, 20 bp, synthetic construct
  misc_feature 1..20: note = chemically synthesized
  source 1..20: mol_type = other DNA
gacatgcaaggaattttcag

SEQ ID NO: 62399 - DNA, 20 bp, synthetic construct
  misc_feature 1..20: note = chemically synthesized
  source 1..20: mol_type = other DNA
ttcttgaggttagcagctgt

SEQ ID NO: 62400 - DNA, 20 bp, synthetic construct
  misc_feature 1..20: note = chemically synthesized
  source 1..20: mol_type = other DNA
actgttttttgtattcattt

SEQ ID NO: 62401 - DNA, 20 bp, synthetic construct
  misc_feature 1..20: note = chemically synthesized
  source 1..20: mol_type = other DNA
ttttttgtattcatttgtga

SEQ ID NO: 62402 - DNA, 20 bp, synthetic construct
  misc_feature 1..20: note = chemically synthesized
  source 1..20: mol_type = other DNA
tcagtctactcggtttcgct

SEQ ID NO: 62403 - DNA, 20 bp, synthetic construct
  misc_feature 1..20: note = chemically synthesized
  source 1..20: mol_type = other DNA
tctactcggtttcgctgtga

SEQ ID NO: 62404 - DNA, 20 bp, synthetic construct
  misc_feature 1..20: note = chemically synthesized
  source 1..20: mol_type = other DNA
taagaaaggaaatcaacctg

SEQ ID NO: 62405 - DNA, 20 bp, synthetic construct
  misc_feature 1..20: note = chemically synthesized
  source 1..20: mol_type = other DNA
tatacagataacaaaataca

SEQ ID NO: 62406 - DNA, 20 bp, synthetic construct
  misc_feature 1..20: note = chemically synthesized
  source 1..20: mol_type = other DNA
cagataacaaaatacagaga

SEQ ID NO: 62407 - DNA, 20 bp, synthetic construct
  misc_feature 1..20: note = chemically synthesized
  source 1..20: mol_type = other DNA
gtaataactgtggcacaggc

SEQ ID NO: 62408 - DNA, 20 bp, synthetic construct
  misc_feature 1..20: note = chemically synthesized
  source 1..20: mol_type = other DNA
aacagtggggaaaaaattcc

SEQ ID NO: 62409 - DNA, 20 bp, synthetic construct
  misc_feature 1..20: note = chemically synthesized
  source 1..20: mol_type = other DNA
gtggggaaaaaattccatgg

SEQ ID NO: 62410 - DNA, 20 bp, synthetic construct
  misc_feature 1..20: note = chemically synthesized
  source 1..20: mol_type = other DNA
aagactagcattgttttagg

SEQ ID NO: 62411 - DNA, 20 bp, synthetic construct
  misc_feature 1..20: note = chemically synthesized
  source 1..20: mol_type = other DNA
aggttgagtggcagtgttta

SEQ ID NO: 62412 - DNA, 20 bp, synthetic construct
  misc_feature 1..20: note = chemically synthesized
  source 1..20: mol_type = other DNA
gaaatatgtggctaaataac

SEQ ID NO: 62413 - DNA, 20 bp, synthetic construct
  misc_feature 1..20: note = chemically synthesized
  source 1..20: mol_type = other DNA
actctttattttttcgtatc

SEQ ID NO: 62414 - DNA, 20 bp, synthetic construct
  misc_feature 1..20: note = chemically synthesized
  source 1..20: mol_type = other DNA
agtactcaaagcttgttaaa

SEQ ID NO: 62415 - DNA, 20 bp, synthetic construct
  misc_feature 1..20: note = chemically synthesized
  source 1..20: mol_type = other DNA
acatggaggaaaaactcatc

SEQ ID NO: 62416 - DNA, 20 bp, synthetic construct
  misc_feature 1..20: note = chemically synthesized
  source 1..20: mol_type = other DNA
ggtgtggctctgcagtgtga

SEQ ID NO: 62417 - DNA, 20 bp, synthetic construct
  misc_feature 1..20: note = chemically synthesized
  source 1..20: mol_type = other DNA
gattgggtacttgcaggacg

SEQ ID NO: 62418 - DNA, 20 bp, synthetic construct
  misc_feature 1..20: note = chemically synthesized
  source 1..20: mol_type = other DNA
ggtacttgcaggacgaaggg

SEQ ID NO: 62419 - DNA, 20 bp, synthetic construct
  misc_feature 1..20: note = chemically synthesized
  source 1..20: mol_type = other DNA
tgcaggacgaagggtggggt

SEQ ID NO: 62420 - DNA, 20 bp, synthetic construct
  misc_feature 1..20: note = chemically synthesized
  source 1..20: mol_type = other DNA
tgggcagatcacttgaggtc

SEQ ID NO: 62421 - DNA, 20 bp, synthetic construct
  misc_feature 1..20: note = chemically synthesized
  source 1..20: mol_type = other DNA
tacttgggaggctgaggcag

SEQ ID NO: 62422 - DNA, 20 bp, synthetic construct
  misc_feature 1..20: note = chemically synthesized
  source 1..20: mol_type = other DNA
aatcgcttgaaccggggagg

SEQ ID NO: 62423 - DNA, 20 bp, synthetic construct
  misc_feature 1..20: note = chemically synthesized
  source 1..20: mol_type = other DNA
catcaaattccctgaccgaa

SEQ ID NO: 62424 - DNA, 20 bp, synthetic construct
  misc_feature 1..20: note = chemically synthesized
  source 1..20: mol_type = other DNA
agccagaaattagcatgcac

SEQ ID NO: 62425 - DNA, 20 bp, synthetic construct
  misc_feature 1..20: note = chemically synthesized
  source 1..20: mol_type = other DNA
tagcatgcactagagtgtgc

SEQ ID NO: 62426 - DNA, 20 bp, synthetic construct
  misc_feature 1..20: note = chemically synthesized
  source 1..20: mol_type = other DNA
atcctgttggtttttcgtga

SEQ ID NO: 62427 - DNA, 20 bp, synthetic construct
  misc_feature 1..20: note = chemically synthesized
  source 1..20: mol_type = other DNA
tatatttatgtgtatgtgtg

SEQ ID NO: 62428 - DNA, 20 bp, synthetic construct
  misc_feature 1..20: note = chemically synthesized
  source 1..20: mol_type = other DNA
atcttttattctccccttca

SEQ ID NO: 62429 - DNA, 20 bp, synthetic construct
  misc_feature 1..20: note = chemically synthesized
  source 1..20: mol_type = other DNA
ttctaagcatcttacatctt

SEQ ID NO: 62430 - DNA, 20 bp, synthetic construct
  misc_feature 1..20: note = chemically synthesized
  source 1..20: mol_type = other DNA
ttaatcatagtttcatataa

SEQ ID NO: 62431 - DNA, 20 bp, synthetic construct
  misc_feature 1..20: note = chemically synthesized
  source 1..20: mol_type = other DNA
aaatgggttcctcatcatct

SEQ ID NO: 62432 - DNA, 20 bp, synthetic construct
  misc_feature 1..20: note = chemically synthesized
  source 1..20: mol_type = other DNA
ttcttagcaattttacaatt

SEQ ID NO: 62433 - DNA, 20 bp, synthetic construct
  misc_feature 1..20: note = chemically synthesized
  source 1..20: mol_type = other DNA
tagcaattttacaattttga

SEQ ID NO: 62434 - DNA, 20 bp, synthetic construct
  misc_feature 1..20: note = chemically synthesized
  source 1..20: mol_type = other DNA
aattttacaattttgaatga

SEQ ID NO: 62435 - DNA, 20 bp, synthetic construct
  misc_feature 1..20: note = chemically synthesized
  source 1..20: mol_type = other DNA
acatatacaactataattaa

SEQ ID NO: 62436 - DNA, 20 bp, synthetic construct
  misc_feature 1..20: note = chemically synthesized
  source 1..20: mol_type = other DNA
tgcacacacaaagaaatcag

SEQ ID NO: 62437 - DNA, 20 bp, synthetic construct
  misc_feature 1..20: note = chemically synthesized
  source 1..20: mol_type = other DNA
ctccgcaggcagagccttga

SEQ ID NO: 62438 - DNA, 20 bp, synthetic construct
  misc_feature 1..20: note = chemically synthesized
  source 1..20: mol_type = other DNA
gcagagccttgatgggatta

SEQ ID NO: 62439 - DNA, 20 bp, synthetic construct
  misc_feature 1..20: note = chemically synthesized
  source 1..20: mol_type = other DNA
ttgatgggattactgagttc

SEQ ID NO: 62440 - DNA, 20 bp, synthetic construct
  misc_feature 1..20: note = chemically synthesized
  source 1..20: mol_type = other DNA
caaaataaaaggctcaaaag

SEQ ID NO: 62441 - DNA, 20 bp, synthetic construct
  misc_feature 1..20: note = chemically synthesized
  source 1..20: mol_type = other DNA
caaaagatgaatatcgaaac

SEQ ID NO: 62442 - DNA, 20 bp, synthetic construct
  misc_feature 1..20: note = chemically synthesized
  source 1..20: mol_type = other DNA
aaccagggtgttttttacac

SEQ ID NO: 62443 - DNA, 20 bp, synthetic construct
  misc_feature 1..20: note = chemically synthesized
  source 1..20: mol_type = other DNA
tattcatccatcttcatggg

SEQ ID NO: 62444 - DNA, 20 bp, synthetic construct
  misc_feature 1..20: note = chemically synthesized
  source 1..20: mol_type = other DNA
taagcatacttctattcaat

SEQ ID NO: 62445 - DNA, 20 bp, synthetic construct
  misc_feature 1..20: note = chemically synthesized
  source 1..20: mol_type = other DNA
tattctgtaagattatagtt

SEQ ID NO: 62446 - DNA, 20 bp, synthetic construct
  misc_feature 1..20: note = chemically synthesized
  source 1..20: mol_type = other DNA
ttttaatatgctttaagttc

SEQ ID NO: 62447 - DNA, 20 bp, synthetic construct
  misc_feature 1..20: note = chemically synthesized
  source 1..20: mol_type = other DNA
atgttcccctccctgtgtcc

SEQ ID NO: 62448 - DNA, 20 bp, synthetic construct
  misc_feature 1..20: note = chemically synthesized
  source 1..20: mol_type = other DNA
taaagtctcagttaaatttt

SEQ ID NO: 62449 - DNA, 20 bp, synthetic construct
  misc_feature 1..20: note = chemically synthesized
  source 1..20: mol_type = other DNA
caagtctaaagaaaaaaata

SEQ ID NO: 62450 - DNA, 20 bp, synthetic construct
  misc_feature 1..20: note = chemically synthesized
  source 1..20: mol_type = other DNA
gagactggtgacactagtgt

SEQ ID NO: 62451 - DNA, 20 bp, synthetic construct
  misc_feature 1..20: note = chemically synthesized
  source 1..20: mol_type = other DNA
cactagtgtctgaatgaggc

SEQ ID NO: 62452 - DNA, 20 bp, synthetic construct
  misc_feature 1..20: note = chemically synthesized
  source 1..20: mol_type = other DNA
agaacaaactcctgtggggc

SEQ ID NO: 62453 - DNA, 20 bp, synthetic construct
  misc_feature 1..20: note = chemically synthesized
  source 1..20: mol_type = other DNA
gttttccatatttcctcatg

SEQ ID NO: 62454 - DNA, 20 bp, synthetic construct
  misc_feature 1..20: note = chemically synthesized
  source 1..20: mol_type = other DNA
gctttatgttgctgttgttt

SEQ ID NO: 62455 - DNA, 20 bp, synthetic construct
  misc_feature 1..20: note = chemically synthesized
  source 1..20: mol_type = other DNA
ctcagttctagcactagagg

SEQ ID NO: 62456 - DNA, 20 bp, synthetic construct
  misc_feature 1..20: note = chemically synthesized
  source 1..20: mol_type = other DNA
tgcacttaaaatagtctcat

SEQ ID NO: 62457 - DNA, 20 bp, synthetic construct
  misc_feature 1..20: note = chemically synthesized
  source 1..20: mol_type = other DNA
aagcacattctgaactactt

SEQ ID NO: 62458 - DNA, 20 bp, synthetic construct
  misc_feature 1..20: note = chemically synthesized
  source 1..20: mol_type = other DNA
caatttaattaaaaaaaccc

SEQ ID NO: 62459 - DNA, 20 bp, synthetic construct
  misc_feature 1..20: note = chemically synthesized
  source 1..20: mol_type = other DNA
aaaaaaacccaagaatttct

SEQ ID NO: 62460 - DNA, 20 bp, synthetic construct
  misc_feature 1..20: note = chemically synthesized
  source 1..20: mol_type = other DNA
agctatatttcagcggaaaa

SEQ ID NO: 62461 - DNA, 20 bp, synthetic construct
  misc_feature 1..20: note = chemically synthesized
  source 1..20: mol_type = other DNA
cagcggaaaatgggatattt

SEQ ID NO: 62462 - DNA, 20 bp, synthetic construct
  misc_feature 1..20: note = chemically synthesized
  source 1..20: mol_type = other DNA
tcccgaggtcagtcacacaa

SEQ ID NO: 62463 - DNA, 20 bp, synthetic construct
  misc_feature 1..20: note = chemically synthesized
  source 1..20: mol_type = other DNA
cagagagagagattactctt

SEQ ID NO: 62464 - DNA, 20 bp, synthetic construct
  misc_feature 1..20: note = chemically synthesized
  source 1..20: mol_type = other DNA
acgcatactggggcctatca

SEQ ID NO: 62465 - DNA, 20 bp, synthetic construct
  misc_feature 1..20: note = chemically synthesized
  source 1..20: mol_type = other DNA
ctggggcctatcagagggtg

SEQ ID NO: 62466 - DNA, 20 bp, synthetic construct
  misc_feature 1..20: note = chemically synthesized
  source 1..20: mol_type = other DNA
ggtggagggtgagagaagga

SEQ ID NO: 62467 - DNA, 20 bp, synthetic construct
  misc_feature 1..20: note = chemically synthesized
  source 1..20: mol_type = other DNA
aggatcaggaaaaatcacta

SEQ ID NO: 62468 - DNA, 20 bp, synthetic construct
  misc_feature 1..20: note = chemically synthesized
  source 1..20: mol_type = other DNA
atggatgctaagcgtaatac

SEQ ID NO: 62469 - DNA, 20 bp, synthetic construct
  misc_feature 1..20: note = chemically synthesized
  source 1..20: mol_type = other DNA
ggcttcctgcaaggcagcca

SEQ ID NO: 62470 - DNA, 20 bp, synthetic construct
  misc_feature 1..20: note = chemically synthesized
  source 1..20: mol_type = other DNA
ttgtgatatccaagtcattc

SEQ ID NO: 62471 - DNA, 20 bp, synthetic construct
  misc_feature 1..20: note = chemically synthesized
  source 1..20: mol_type = other DNA
aaatctaacacaaaatctag

SEQ ID NO: 62472 - DNA, 20 bp, synthetic construct
  misc_feature 1..20: note = chemically synthesized
  source 1..20: mol_type = other DNA
cttacatctatttttgttct

SEQ ID NO: 62473 - DNA, 20 bp, synthetic construct
  misc_feature 1..20: note = chemically synthesized
  source 1..20: mol_type = other DNA
atttagatacataatggaag

SEQ ID NO: 62474 - DNA, 20 bp, synthetic construct
  misc_feature 1..20: note = chemically synthesized
  source 1..20: mol_type = other DNA
aatttaaaatctggctaatt

SEQ ID NO: 62475 - DNA, 20 bp, synthetic construct
  misc_feature 1..20: note = chemically synthesized
  source 1..20: mol_type = other DNA
aaagtaagttatttgtggta

SEQ ID NO: 62476 - DNA, 20 bp, synthetic construct
  misc_feature 1..20: note = chemically synthesized
  source 1..20: mol_type = other DNA
aagggcctactttacttaac

SEQ ID NO: 62477 - DNA, 20 bp, synthetic construct
  misc_feature 1..20: note = chemically synthesized
  source 1..20: mol_type = other DNA
cagaaagatttaagaaaata

SEQ ID NO: 62478 - DNA, 20 bp, synthetic construct
  misc_feature 1..20: note = chemically synthesized
  source 1..20: mol_type = other DNA
attaggcatcttacagtttt

SEQ ID NO: 62479 - DNA, 20 bp, synthetic construct
  misc_feature 1..20: note = chemically synthesized
  source 1..20: mol_type = other DNA
taaagcaaacccaaacaggc

SEQ ID NO: 62480 - DNA, 20 bp, synthetic construct
  misc_feature 1..20: note = chemically synthesized
  source 1..20: mol_type = other DNA
caggcaggaattaatcttca

SEQ ID NO: 62481 - DNA, 20 bp, synthetic construct
  misc_feature 1..20: note = chemically synthesized
  source 1..20: mol_type = other DNA
ggaattaatcttcatcgaat

SEQ ID NO: 62482 - DNA, 20 bp, synthetic construct
  misc_feature 1..20: note = chemically synthesized
  source 1..20: mol_type = other DNA
tttaattatatagacaataa

SEQ ID NO: 62483 - DNA, 20 bp, synthetic construct
  misc_feature 1..20: note = chemically synthesized
  source 1..20: mol_type = other DNA
tctaatctttctgatctatc

SEQ ID NO: 62484 - DNA, 20 bp, synthetic construct
  misc_feature 1..20: note = chemically synthesized
  source 1..20: mol_type = other DNA
gcccgcagcctacctgactt

SEQ ID NO: 62485 - DNA, 20 bp, synthetic construct
  misc_feature 1..20: note = chemically synthesized
  source 1..20: mol_type = other DNA
agcctacctgacttctgagt

SEQ ID NO: 62486 - DNA, 20 bp, synthetic construct
  misc_feature 1..20: note = chemically synthesized
  source 1..20: mol_type = other DNA
cctttagccataaggaaaca

SEQ ID NO: 62487 - DNA, 20 bp, synthetic construct
  misc_feature 1..20: note = chemically synthesized
  source 1..20: mol_type = other DNA
tagccataaggaaacatgga

SEQ ID NO: 62488 - DNA, 20 bp, synthetic construct
  misc_feature 1..20: note = chemically synthesized
  source 1..20: mol_type = other DNA
acatggaatgggtcagatcc

SEQ ID NO: 62489 - DNA, 20 bp, synthetic construct
  misc_feature 1..20: note = chemically synthesized
  source 1..20: mol_type = other DNA
ctggctccgagggagcagga

SEQ ID NO: 62490 - DNA, 20 bp, synthetic construct
  misc_feature 1..20: note = chemically synthesized
  source 1..20: mol_type = other DNA
gagaggatcaaccccatact

SEQ ID NO: 62491 - DNA, 20 bp, synthetic construct
  misc_feature 1..20: note = chemically synthesized
  source 1..20: mol_type = other DNA
agaagactggtgtccatact

SEQ ID NO: 62492 - DNA, 20 bp, synthetic construct
  misc_feature 1..20: note = chemically synthesized
  source 1..20: mol_type = other DNA
gtgtccatactctgaatggg

SEQ ID NO: 62493 - DNA, 20 bp, synthetic construct
  misc_feature 1..20: note = chemically synthesized
  source 1..20: mol_type = other DNA
actctgaatgggaagaatga

SEQ ID NO: 62494 - DNA, 20 bp, synthetic construct
  misc_feature 1..20: note = chemically synthesized
  source 1..20: mol_type = other DNA
agggccactgccttcatact

SEQ ID NO: 62495 - DNA, 20 bp, synthetic construct
  misc_feature 1..20: note = chemically synthesized
  source 1..20: mol_type = other DNA
atctcaacgactgttcttct

SEQ ID NO: 62496 - DNA, 20 bp, synthetic construct
  misc_feature 1..20: note = chemically synthesized
  source 1..20: mol_type = other DNA
gtcattgttcttttatttca

SEQ ID NO: 62497 - DNA, 20 bp, synthetic construct
  misc_feature 1..20: note = chemically synthesized
  source 1..20: mol_type = other DNA
aaatacgttctttccaaacc

SEQ ID NO: 62498 - DNA, 20 bp, synthetic construct
  misc_feature 1..20: note = chemically synthesized
  source 1..20: mol_type = other DNA
tgtcccaggaagtcttaatc

SEQ ID NO: 62499 - DNA, 20 bp, synthetic construct
  misc_feature 1..20: note = chemically synthesized
  source 1..20: mol_type = other DNA
atttagcattttcttctact

SEQ ID NO: 62500 - DNA, 20 bp, synthetic construct
  misc_feature 1..20: note = chemically synthesized
  source 1..20: mol_type = other DNA
tttgaatgcaaaggacaaac

SEQ ID NO: 62501 - DNA, 20 bp, synthetic construct
  misc_feature 1..20: note = chemically synthesized
  source 1..20: mol_type = other DNA
gtttttgtttttgtttgaga

SEQ ID NO: 62502 - DNA, 20 bp, synthetic construct
  misc_feature 1..20: note = chemically synthesized
  source 1..20: mol_type = other DNA
ttcgctcttattgcccaggc

SEQ ID NO: 62503 - DNA, 20 bp, synthetic construct
  misc_feature 1..20: note = chemically synthesized
  source 1..20: mol_type = other DNA
aattctcctgccttggcctc

SEQ ID NO: 62504 - DNA, 20 bp, synthetic construct
  misc_feature 1..20: note = chemically synthesized
  source 1..20: mol_type = other DNA
ccttggcctcctgagtagct

SEQ ID NO: 62505 - DNA, 20 bp, synthetic construct
  misc_feature 1..20: note = chemically synthesized
  source 1..20: mol_type = other DNA
ttttgtatttttagtagaga

SEQ ID NO: 62506 - DNA, 20 bp, synthetic construct
  misc_feature 1..20: note = chemically synthesized
  source 1..20: mol_type = other DNA
gccttggcctcctgaagtgc

SEQ ID NO: 62507 - DNA, 20 bp, synthetic construct
  misc_feature 1..20: note = chemically synthesized
  source 1..20: mol_type = other DNA
acatttatctgcatcactac

SEQ ID NO: 62508 - DNA, 20 bp, synthetic construct
  misc_feature 1..20: note = chemically synthesized
  source 1..20: mol_type = other DNA
ctgtgacacaaaaaaagttt

SEQ ID NO: 62509 - DNA, 20 bp, synthetic construct
  misc_feature 1..20: note = chemically synthesized
  source 1..20: mol_type = other DNA
tgtctgtgttagccaatggt

SEQ ID NO: 62510 - DNA, 20 bp, synthetic construct
  misc_feature 1..20: note = chemically synthesized
  source 1..20: mol_type = other DNA
ggttaatagctaaaagaaaa

SEQ ID NO: 62511 - DNA, 20 bp, synthetic construct
  misc_feature 1..20: note = chemically synthesized
  source 1..20: mol_type = other DNA
ggagtagaaattcagtggcc

SEQ ID NO: 62512 - DNA, 20 bp, synthetic construct
  misc_feature 1..20: note = chemically synthesized
  source 1..20: mol_type = other DNA
ttaagtcaggtgaagacttc

SEQ ID NO: 62513 - DNA, 20 bp, synthetic construct
  misc_feature 1..20: note = chemically synthesized
  source 1..20: mol_type = other DNA
agaaacgctcttagtaaact

SEQ ID NO: 62514 - DNA, 20 bp, synthetic construct
  misc_feature 1..20: note = chemically synthesized
  source 1..20: mol_type = other DNA
ctcttagtaaacttggaata

SEQ ID NO: 62515 - DNA, 20 bp, synthetic construct
  misc_feature 1..20: note = chemically synthesized
  source 1..20: mol_type = other DNA
aggagaaagaaatggtagaa

SEQ ID NO: 62516 - DNA, 20 bp, synthetic construct
  misc_feature 1..20: note = chemically synthesized
  source 1..20: mol_type = other DNA
tgctcgggaggctgaggcag

SEQ ID NO: 62517 - DNA, 20 bp, synthetic construct
  misc_feature 1..20: note = chemically synthesized
  source 1..20: mol_type = other DNA
attgcactccagtctggcaa

SEQ ID NO: 62518 - DNA, 20 bp, synthetic construct
  misc_feature 1..20: note = chemically synthesized
  source 1..20: mol_type = other DNA
aaagaaaaaagaaaaaataa

SEQ ID NO: 62519 - DNA, 20 bp, synthetic construct
  misc_feature 1..20: note = chemically synthesized
  source 1..20: mol_type = other DNA
ggtgatgtaagggactttta

SEQ ID NO: 62520 - DNA, 20 bp, synthetic construct
  misc_feature 1..20: note = chemically synthesized
  source 1..20: mol_type = other DNA
ttttatagaattaacaatgc

SEQ ID NO: 62521 - DNA, 20 bp, synthetic construct
  misc_feature 1..20: note = chemically synthesized
  source 1..20: mol_type = other DNA
ttgatagttaaataatttct

SEQ ID NO: 62522 - DNA, 20 bp, synthetic construct
  misc_feature 1..20: note = chemically synthesized
  source 1..20: mol_type = other DNA
attccttgattctaaaatat

SEQ ID NO: 62523 - DNA, 20 bp, synthetic construct
  misc_feature 1..20: note = chemically synthesized
  source 1..20: mol_type = other DNA
gagcaatattcttcaggcac

SEQ ID NO: 62524 - DNA, 20 bp, synthetic construct
  misc_feature 1..20: note = chemically synthesized
  source 1..20: mol_type = other DNA
atattcttcaggcacatgga

SEQ ID NO: 62525 - DNA, 20 bp, synthetic construct
  misc_feature 1..20: note = chemically synthesized
  source 1..20: mol_type = other DNA
cttcaggcacatggatcgaa

SEQ ID NO: 62526 - DNA, 20 bp, synthetic construct
  misc_feature 1..20: note = chemically synthesized
  source 1..20: mol_type = other DNA
gaaaaaaaaaaggacactag

SEQ ID NO: 62527 - DNA, 20 bp, synthetic construct
  misc_feature 1..20: note = chemically synthesized
  source 1..20: mol_type = other DNA
attctggctttaaataattt

SEQ ID NO: 62528 - DNA, 20 bp, synthetic construct
  misc_feature 1..20: note = chemically synthesized
  source 1..20: mol_type = other DNA
catagagaaatgaaaagaga

SEQ ID NO: 62529 - DNA, 20 bp, synthetic construct
  misc_feature 1..20: note = chemically synthesized
  source 1..20: mol_type = other DNA
gagaggattctctggaagca

SEQ ID NO: 62530 - DNA, 20 bp, synthetic construct
  misc_feature 1..20: note = chemically synthesized
  source 1..20: mol_type = other DNA
ttttctgtctgtcctctcta

SEQ ID NO: 62531 - DNA, 20 bp, synthetic construct
  misc_feature 1..20: note = chemically synthesized
  source 1..20: mol_type = other DNA
caccccaaggtactgtactt

SEQ ID NO: 62532 - DNA, 20 bp, synthetic construct
  misc_feature 1..20: note = chemically synthesized
  source 1..20: mol_type = other DNA
actccttaagagagctagaa

SEQ ID NO: 62533 - DNA, 20 bp, synthetic construct
  misc_feature 1..20: note = chemically synthesized
  source 1..20: mol_type = other DNA
atgaggctttcttggaaaag

SEQ ID NO: 62534 - DNA, 20 bp, synthetic construct
  misc_feature 1..20: note = chemically synthesized
  source 1..20: mol_type = other DNA
ggaaaaggagaatgggagag

SEQ ID NO: 62535 - DNA, 20 bp, synthetic construct
  misc_feature 1..20: note = chemically synthesized
  source 1..20: mol_type = other DNA
tcattttggaagatgatgaa

SEQ ID NO: 62536 - DNA, 20 bp, synthetic construct
  misc_feature 1..20: note = chemically synthesized
  source 1..20: mol_type = other DNA
gagccaacaaaaaagagcct

SEQ ID NO: 62537 - DNA, 20 bp, synthetic construct
  misc_feature 1..20: note = chemically synthesized
  source 1..20: mol_type = other DNA
gggccagaacttcggcagta

SEQ ID NO: 62538 - DNA, 20 bp, synthetic construct
  misc_feature 1..20: note = chemically synthesized
  source 1..20: mol_type = other DNA
tcactagcctgtggagcaag

SEQ ID NO: 62539 - DNA, 20 bp, synthetic construct
  misc_feature 1..20: note = chemically synthesized
  source 1..20: mol_type = other DNA
agcattggttctcaatgcat

SEQ ID NO: 62540 - DNA, 20 bp, synthetic construct
  misc_feature 1..20: note = chemically synthesized
  source 1..20: mol_type = other DNA
gttctcaatgcatgggaatg

SEQ ID NO: 62541 - DNA, 20 bp, synthetic construct
  misc_feature 1..20: note = chemically synthesized
  source 1..20: mol_type = other DNA
tcaatgcatgggaatgaagg

SEQ ID NO: 62542 - DNA, 20 bp, synthetic construct
  misc_feature 1..20: note = chemically synthesized
  source 1..20: mol_type = other DNA
tcaagcccgcctttgctaag

SEQ ID NO: 62543 - DNA, 20 bp, synthetic construct
  misc_feature 1..20: note = chemically synthesized
  source 1..20: mol_type = other DNA
tgcactgtgacaagctgcat

SEQ ID NO: 62544 - DNA, 20 bp, synthetic construct
  misc_feature 1..20: note = chemically synthesized
  source 1..20: mol_type = other DNA
tggatcctgagaacttcaag

SEQ ID NO: 62545 - DNA, 20 bp, synthetic construct
  misc_feature 1..20: note = chemically synthesized
  source 1..20: mol_type = other DNA
caacaaagatctcagaaatc

SEQ ID NO: 62546 - DNA, 20 bp, synthetic construct
  misc_feature 1..20: note = chemically synthesized
  source 1..20: mol_type = other DNA
agtaaaggactactaacagc

SEQ ID NO: 62547 - DNA, 20 bp, synthetic construct
  misc_feature 1..20: note = chemically synthesized
  source 1..20: mol_type = other DNA
aacttgatgtgtttatccca

SEQ ID NO: 62548 - DNA, 20 bp, synthetic construct
  misc_feature 1..20: note = chemically synthesized
  source 1..20: mol_type = other DNA
tatcccagagaattgtatta

SEQ ID NO: 62549 - DNA, 20 bp, synthetic construct
  misc_feature 1..20: note = chemically synthesized
  source 1..20: mol_type = other DNA
gaattgtagacttgtgaaag

SEQ ID NO: 62550 - DNA, 20 bp, synthetic construct
  misc_feature 1..20: note = chemically synthesized
  source 1..20: mol_type = other DNA
atagaaatgccttattttat

SEQ ID NO: 62551 - DNA, 20 bp, synthetic construct
  misc_feature 1..20: note = chemically synthesized
  source 1..20: mol_type = other DNA
gaccaagtgaaggcttgttt

SEQ ID NO: 62552 - DNA, 20 bp, synthetic construct
  misc_feature 1..20: note = chemically synthesized
  source 1..20: mol_type = other DNA
ggcttgtttccgaatttgtt

SEQ ID NO: 62553 - DNA, 20 bp, synthetic construct
  misc_feature 1..20: note = chemically synthesized
  source 1..20: mol_type = other DNA
aatactggtaaaatggggaa

SEQ ID NO: 62554 - DNA, 20 bp, synthetic construct
  misc_feature 1..20: note = chemically synthesized
  source 1..20: mol_type = other DNA
ggtaaaatggggaagggggt

SEQ ID NO: 62555 - DNA, 20 bp, synthetic construct
  misc_feature 1..20: note = chemically synthesized
  source 1..20: mol_type = other DNA
ggggtgagggtgtaggtagg

SEQ ID NO: 62556 - DNA, 20 bp, synthetic construct
  misc_feature 1..20: note = chemically synthesized
  source 1..20: mol_type = other DNA
gggtgtaggtaggtagaatg

SEQ ID NO: 62557 - DNA, 20 bp, synthetic construct
  misc_feature 1..20: note = chemically synthesized
  source 1..20: mol_type = other DNA
aatgttgaatgtagggctca

SEQ ID NO: 62558 - DNA, 20 bp, synthetic construct
  misc_feature 1..20: note = chemically synthesized
  source 1..20: mol_type = other DNA
aaaattgaacctaagctcat

SEQ ID NO: 62559 - DNA, 20 bp, synthetic construct
  misc_feature 1..20: note = chemically synthesized
  source 1..20: mol_type = other DNA
cctaagctcatctgaatttt

SEQ ID NO: 62560 - DNA, 20 bp, synthetic construct
  misc_feature 1..20: note = chemically synthesized
  source 1..20: mol_type = other DNA
accttggaacagtttgaggt

SEQ ID NO: 62561 - DNA, 20 bp, synthetic construct
  misc_feature 1..20: note = chemically synthesized
  source 1..20: mol_type = other DNA
gtttgaggtcagggttgtct

SEQ ID NO: 62562 - DNA, 20 bp, synthetic construct
  misc_feature 1..20: note = chemically synthesized
  source 1..20: mol_type = other DNA
tgtcttttgcctaacagctc

SEQ ID NO: 62563 - DNA, 20 bp, synthetic construct
  misc_feature 1..20: note = chemically synthesized
  source 1..20: mol_type = other DNA
tctggctactcactttggca

SEQ ID NO: 62564 - DNA, 20 bp, synthetic construct
  misc_feature 1..20: note = chemically synthesized
  source 1..20: mol_type = other DNA
gccctggcccataagtacca

SEQ ID NO: 62565 - DNA, 20 bp, synthetic construct
  misc_feature 1..20: note = chemically synthesized
  source 1..20: mol_type = other DNA
gaaaaagtgttcatgggctg

SEQ ID NO: 62566 - DNA, 20 bp, synthetic construct
  misc_feature 1..20: note = chemically synthesized
  source 1..20: mol_type = other DNA
tgggggcttgtaaaattaat

SEQ ID NO: 62567 - DNA, 20 bp, synthetic construct
  misc_feature 1..20: note = chemically synthesized
  source 1..20: mol_type = other DNA
aattaatgtggatgttatgg

SEQ ID NO: 62568 - DNA, 20 bp, synthetic construct
  misc_feature 1..20: note = chemically synthesized
  source 1..20: mol_type = other DNA
tggatgttatgggagaattc

SEQ ID NO: 62569 - DNA, 20 bp, synthetic construct
  misc_feature 1..20: note = chemically synthesized
  source 1..20: mol_type = other DNA
gagaattccaggattccaag

SEQ ID NO: 62570 - DNA, 20 bp, synthetic construct
  misc_feature 1..20: note = chemically synthesized
  source 1..20: mol_type = other DNA
tgatggagaaaaatctttat

SEQ ID NO: 62571 - DNA, 20 bp, synthetic construct
  misc_feature 1..20: note = chemically synthesized
  source 1..20: mol_type = other DNA
tagatatccaagatataggc

SEQ ID NO: 62572 - DNA, 20 bp, synthetic construct
  misc_feature 1..20: note = chemically synthesized
  source 1..20: mol_type = other DNA
gaaattgatttggagataag

SEQ ID NO: 62573 - DNA, 20 bp, synthetic construct
  misc_feature 1..20: note = chemically synthesized
  source 1..20: mol_type = other DNA
aatagcctgctctttccatg

SEQ ID NO: 62574 - DNA, 20 bp, synthetic construct
  misc_feature 1..20: note = chemically synthesized
  source 1..20: mol_type = other DNA
atgaaggattccattatttc

SEQ ID NO: 62575 - DNA, 20 bp, synthetic construct
  misc_feature 1..20: note = chemically synthesized
  source 1..20: mol_type = other DNA
cattgtgcattatcttctga

SEQ ID NO: 62576 - DNA, 20 bp, synthetic construct
  misc_feature 1..20: note = chemically synthesized
  source 1..20: mol_type = other DNA
aacatgcactaaaataaagt

SEQ ID NO: 62577 - DNA, 20 bp, synthetic construct
  misc_feature 1..20: note = chemically synthesized
  source 1..20: mol_type = other DNA
aataaagttagagttaggac

SEQ ID NO: 62578 - DNA, 20 bp, synthetic construct
  misc_feature 1..20: note = chemically synthesized
  source 1..20: mol_type = other DNA
cctgagtgggaaagtttttg

SEQ ID NO: 62579 - DNA, 20 bp, synthetic construct
  misc_feature 1..20: note = chemically synthesized
  source 1..20: mol_type = other DNA
tgaagactttccgtgggaga

SEQ ID NO: 62580 - DNA, 20 bp, synthetic construct
  misc_feature 1..20: note = chemically synthesized
  source 1..20: mol_type = other DNA
ggctctctggaagtagaagg

SEQ ID NO: 62581 - DNA, 20 bp, synthetic construct
  misc_feature 1..20: note = chemically synthesized
  source 1..20: mol_type = other DNA
caatactaaacgataagcat

SEQ ID NO: 62582 - DNA, 20 bp, synthetic construct
  misc_feature 1..20: note = chemically synthesized
  source 1..20: mol_type = other DNA
aatctgcttatgtgcacaaa

SEQ ID NO: 62583 - DNA, 20 bp, synthetic construct
  misc_feature 1..20: note = chemically synthesized
  source 1..20: mol_type = other DNA
gtttgcagataaaataaaat

SEQ ID NO: 62584 - DNA, 20 bp, synthetic construct
  misc_feature 1..20: note = chemically synthesized
  source 1..20: mol_type = other DNA
gttcaaacccaagaggagca

SEQ ID NO: 62585 - DNA, 20 bp, synthetic construct
  misc_feature 1..20: note = chemically synthesized
  source 1..20: mol_type = other DNA
caagaggagcagtgagtctg

SEQ ID NO: 62586 - DNA, 20 bp, synthetic construct
  misc_feature 1..20: note = chemically synthesized
  source 1..20: mol_type = other DNA
cagtgagtctgtggaatttg

SEQ ID NO: 62587 - DNA, 20 bp, synthetic construct
  misc_feature 1..20: note = chemically synthesized
  source 1..20: mol_type = other DNA
atttgaaggatggacaaagg

SEQ ID NO: 62588 - DNA, 20 bp, synthetic construct
  misc_feature 1..20: note = chemically synthesized
  source 1..20: mol_type = other DNA
cctggtgactctcatgtgtg

SEQ ID NO: 62589 - DNA, 20 bp, synthetic construct
  misc_feature 1..20: note = chemically synthesized
  source 1..20: mol_type = other DNA
ctctcatgtgtgaagggtag

SEQ ID NO: 62590 - DNA, 20 bp, synthetic construct
  misc_feature 1..20: note = chemically synthesized
  source 1..20: mol_type = other DNA
aggaagtgctagattggtca

SEQ ID NO: 62591 - DNA, 20 bp, synthetic construct
  misc_feature 1..20: note = chemically synthesized
  source 1..20: mol_type = other DNA
aacctttgcattttccaagt

SEQ ID NO: 62592 - DNA, 20 bp, synthetic construct
  misc_feature 1..20: note = chemically synthesized
  source 1..20: mol_type = other DNA
cattgatcagactttttcct

SEQ ID NO: 62593 - DNA, 20 bp, synthetic construct
  misc_feature 1..20: note = chemically synthesized
  source 1..20: mol_type = other DNA
ctttttcctgtgaattactt

SEQ ID NO: 62594 - DNA, 20 bp, synthetic construct
  misc_feature 1..20: note = chemically synthesized
  source 1..20: mol_type = other DNA
tgaatttggctgtatatatc

SEQ ID NO: 62595 - DNA, 20 bp, synthetic construct
  misc_feature 1..20: note = chemically synthesized
  source 1..20: mol_type = other DNA
cctttcaatatgcccataaa

SEQ ID NO: 62596 - DNA, 20 bp, synthetic construct
  misc_feature 1..20: note = chemically synthesized
  source 1..20: mol_type = other DNA
tgcccataaacagagtaaac

SEQ ID NO: 62597 - DNA, 20 bp, synthetic construct
  misc_feature 1..20: note = chemically synthesized
  source 1..20: mol_type = other DNA
tacatatttttatatattta

SEQ ID NO: 62598 - DNA, 20 bp, synthetic construct
  misc_feature 1..20: note = chemically synthesized
  source 1..20: mol_type = other DNA
gatgattaagtctagatatt

SEQ ID NO: 62599 - DNA, 20 bp, synthetic construct
  misc_feature 1..20: note = chemically synthesized
  source 1..20: mol_type = other DNA
cacttttttagctcccacag

SEQ ID NO: 62600 - DNA, 20 bp, synthetic construct
  misc_feature 1..20: note = chemically synthesized
  source 1..20: mol_type = other DNA
atctatctctttggcatacc

SEQ ID NO: 62601 - DNA, 20 bp, synthetic construct
  misc_feature 1..20: note = chemically synthesized
  source 1..20: mol_type = other DNA
gatcccaaaccttaactatt

SEQ ID NO: 62602 - DNA, 20 bp, synthetic construct
  misc_feature 1..20: note = chemically synthesized
  source 1..20: mol_type = other DNA
tgaatagtgcttcaataaac

SEQ ID NO: 62603 - DNA, 20 bp, synthetic construct
  misc_feature 1..20: note = chemically synthesized
  source 1..20: mol_type = other DNA
acatgagtgtaatgtgtcca

SEQ ID NO: 62604 - DNA, 20 bp, synthetic construct
  misc_feature 1..20: note = chemically synthesized
  source 1..20: mol_type = other DNA
atatactgatttcctttctt

SEQ ID NO: 62605 - DNA, 20 bp, synthetic construct
  misc_feature 1..20: note = chemically synthesized
  source 1..20: mol_type = other DNA
aataaccactagtgagattg

SEQ ID NO: 62606 - DNA, 20 bp, synthetic construct
  misc_feature 1..20: note = chemically synthesized
  source 1..20: mol_type = other DNA
cccaccaacagtgtgtaaga

SEQ ID NO: 62607 - DNA, 20 bp, synthetic construct
  misc_feature 1..20: note = chemically synthesized
  source 1..20: mol_type = other DNA
ccttttctccatatcctcac

SEQ ID NO: 62608 - DNA, 20 bp, synthetic construct
  misc_feature 1..20: note = chemically synthesized
  source 1..20: mol_type = other DNA
ttgttaatagccgttttaac

SEQ ID NO: 62609 - DNA, 20 bp, synthetic construct
  misc_feature 1..20: note = chemically synthesized
  source 1..20: mol_type = other DNA
ccctgatcattagtgatgtt

SEQ ID NO: 62610 - DNA, 20 bp, synthetic construct
  misc_feature 1..20: note = chemically synthesized
  source 1..20: mol_type = other DNA
tcatttgtatatctttttct

SEQ ID NO: 62611 - DNA, 20 bp, synthetic construct
  misc_feature 1..20: note = chemically synthesized
  source 1..20: mol_type = other DNA
gtccttagcctactttttat

SEQ ID NO: 62612 - DNA, 20 bp, synthetic construct
  misc_feature 1..20: note = chemically synthesized
  source 1..20: mol_type = other DNA
atttgtgttcattttagagc

SEQ ID NO: 62613 - DNA, 20 bp, synthetic construct
  misc_feature 1..20: note = chemically synthesized
  source 1..20: mol_type = other DNA
tgaagattttctcccactct

SEQ ID NO: 62614 - DNA, 20 bp, synthetic construct
  misc_feature 1..20: note = chemically synthesized
  source 1..20: mol_type = other DNA
tttcctaagccaatgtgtag

SEQ ID NO: 62615 - DNA, 20 bp, synthetic construct
  misc_feature 1..20: note = chemically synthesized
  source 1..20: mol_type = other DNA
gtttttccgatgttattttc

SEQ ID NO: 62616 - DNA, 20 bp, synthetic construct
  misc_feature 1..20: note = chemically synthesized
  source 1..20: mol_type = other DNA
atttaagtccttgatccatc

SEQ ID NO: 62617 - DNA, 20 bp, synthetic construct
  misc_feature 1..20: note = chemically synthesized
  source 1..20: mol_type = other DNA
agctatccccgcaccatttg

SEQ ID NO: 62618 - DNA, 20 bp, synthetic construct
  misc_feature 1..20: note = chemically synthesized
  source 1..20: mol_type = other DNA
tccccgcaccatttgttgaa

SEQ ID NO: 62619 - DNA, 20 bp, synthetic construct
  misc_feature 1..20: note = chemically synthesized
  source 1..20: mol_type = other DNA
tttgctttgtcaaagatcag

SEQ ID NO: 62620 - DNA, 20 bp, synthetic construct
  misc_feature 1..20: note = chemically synthesized
  source 1..20: mol_type = other DNA
gatcagttggatgtaagtat

SEQ ID NO: 62621 - DNA, 20 bp, synthetic construct
  misc_feature 1..20: note = chemically synthesized
  source 1..20: mol_type = other DNA
gtaagtatttgagtttattt

SEQ ID NO: 62622 - DNA, 20 bp, synthetic construct
  misc_feature 1..20: note = chemically synthesized
  source 1..20: mol_type = other DNA
gggctcttttttggttccat

SEQ ID NO: 62623 - DNA, 20 bp, synthetic construct
  misc_feature 1..20: note = chemically synthesized
  source 1..20: mol_type = other DNA
ttttggttccataagaattt

SEQ ID NO: 62624 - DNA, 20 bp, synthetic construct
  misc_feature 1..20: note = chemically synthesized
  source 1..20: mol_type = other DNA
actaatggtggtattttgat

SEQ ID NO: 62625 - DNA, 20 bp, synthetic construct
  misc_feature 1..20: note = chemically synthesized
  source 1..20: mol_type = other DNA
gtattttgatgggaattgca

SEQ ID NO: 62626 - DNA, 20 bp, synthetic construct
  misc_feature 1..20: note = chemically synthesized
  source 1..20: mol_type = other DNA
tattgattctacccatctat

SEQ ID NO: 62627 - DNA, 20 bp, synthetic construct
  misc_feature 1..20: note = chemically synthesized
  source 1..20: mol_type = other DNA
ttttttgcagctattgtaaa

SEQ ID NO: 62628 - DNA, 20 bp, synthetic construct
  misc_feature 1..20: note = chemically synthesized
  source 1..20: mol_type = other DNA
tgcagctattgtaaaagggg

SEQ ID NO: 62629 - DNA, 20 bp, synthetic construct
  misc_feature 1..20: note = chemically synthesized
  source 1..20: mol_type = other DNA
ttttgtatccagaaactttg

SEQ ID NO: 62630 - DNA, 20 bp, synthetic construct
  misc_feature 1..20: note = chemically synthesized
  source 1..20: mol_type = other DNA
gaattattttatcagttcta

SEQ ID NO: 62631 - DNA, 20 bp, synthetic construct
  misc_feature 1..20: note = chemically synthesized
  source 1..20: mol_type = other DNA
tcagttctagggggttttgg

SEQ ID NO: 62632 - DNA, 20 bp, synthetic construct
  misc_feature 1..20: note = chemically synthesized
  source 1..20: mol_type = other DNA
gggggttttggaggagtctt

SEQ ID NO: 62633 - DNA, 20 bp, synthetic construct
  misc_feature 1..20: note = chemically synthesized
  source 1..20: mol_type = other DNA
ttgactttctctttaacaat

SEQ ID NO: 62634 - DNA, 20 bp, synthetic construct
  misc_feature 1..20: note = chemically synthesized
  source 1..20: mol_type = other DNA
atatgttaaagagaagtggt

SEQ ID NO: 62635 - DNA, 20 bp, synthetic construct
  misc_feature 1..20: note = chemically synthesized
  source 1..20: mol_type = other DNA
gttaaagagaagtggtgaga

SEQ ID NO: 62636 - DNA, 20 bp, synthetic construct
  misc_feature 1..20: note = chemically synthesized
  source 1..20: mol_type = other DNA
gtctcattccagttttcaga

SEQ ID NO: 62637 - DNA, 20 bp, synthetic construct
  misc_feature 1..20: note = chemically synthesized
  source 1..20: mol_type = other DNA
tcctttgtaaaccgattttg

SEQ ID NO: 62638 - DNA, 20 bp, synthetic construct
  misc_feature 1..20: note = chemically synthesized
  source 1..20: mol_type = other DNA
gttttagtcataaagtgatg

SEQ ID NO: 62639 - DNA, 20 bp, synthetic construct
  misc_feature 1..20: note = chemically synthesized
  source 1..20: mol_type = other DNA
taaagtgatgttgaattttg

SEQ ID NO: 62640 - DNA, 20 bp, synthetic construct
  misc_feature 1..20: note = chemically synthesized
  source 1..20: mol_type = other DNA
cgcatgaaacccacttgatc

SEQ ID NO: 62641 - DNA, 20 bp, synthetic construct
  misc_feature 1..20: note = chemically synthesized
  source 1..20: mol_type = other DNA
tcatgggttttgatatgctg

SEQ ID NO: 62642 - DNA, 20 bp, synthetic construct
  misc_feature 1..20: note = chemically synthesized
  source 1..20: mol_type = other DNA
ctattagctagtattttgtc

SEQ ID NO: 62643 - DNA, 20 bp, synthetic construct
  misc_feature 1..20: note = chemically synthesized
  source 1..20: mol_type = other DNA
tgttggcatctatgttcatc

SEQ ID NO: 62644 - DNA, 20 bp, synthetic construct
  misc_feature 1..20: note = chemically synthesized
  source 1..20: mol_type = other DNA
ttaaggtgatactggcttca

SEQ ID NO: 62645 - DNA, 20 bp, synthetic construct
  misc_feature 1..20: note = chemically synthesized
  source 1..20: mol_type = other DNA
gcttcatagaatgatttagg

SEQ ID NO: 62646 - DNA, 20 bp, synthetic construct
  misc_feature 1..20: note = chemically synthesized
  source 1..20: mol_type = other DNA
ttctctctttctctatcttg

SEQ ID NO: 62647 - DNA, 20 bp, synthetic construct
  misc_feature 1..20: note = chemically synthesized
  source 1..20: mol_type = other DNA
atcttgtagaatactgtcaa

SEQ ID NO: 62648 - DNA, 20 bp, synthetic construct
  misc_feature 1..20: note = chemically synthesized
  source 1..20: mol_type = other DNA
ggattggtatcaattcttct

SEQ ID NO: 62649 - DNA, 20 bp, synthetic construct
  misc_feature 1..20: note = chemically synthesized
  source 1..20: mol_type = other DNA
attcttctttgaatgtctgg

SEQ ID NO: 62650 - DNA, 20 bp, synthetic construct
  misc_feature 1..20: note = chemically synthesized
  source 1..20: mol_type = other DNA
atgtctggtagaattcagct

SEQ ID NO: 62651 - DNA, 20 bp, synthetic construct
  misc_feature 1..20: note = chemically synthesized
  source 1..20: mol_type = other DNA
ctgcttattactggtctgtt

SEQ ID NO: 62652 - DNA, 20 bp, synthetic construct
  misc_feature 1..20: note = chemically synthesized
  source 1..20: mol_type = other DNA
ctagagccctgtatctttcc

SEQ ID NO: 62653 - DNA, 20 bp, synthetic construct
  misc_feature 1..20: note = chemically synthesized
  source 1..20: mol_type = other DNA
taaaggtgttcatagtagcc

SEQ ID NO: 62654 - DNA, 20 bp, synthetic construct
  misc_feature 1..20: note = chemically synthesized
  source 1..20: mol_type = other DNA
atctcctgttttgtttctaa

SEQ ID NO: 62655 - DNA, 20 bp, synthetic construct
  misc_feature 1..20: note = chemically synthesized
  source 1..20: mol_type = other DNA
tagttattccctttcttttg

SEQ ID NO: 62656 - DNA, 20 bp, synthetic construct
  misc_feature 1..20: note = chemically synthesized
  source 1..20: mol_type = other DNA
tcttattatactttaagttc

SEQ ID NO: 62657 - DNA, 20 bp, synthetic construct
  misc_feature 1..20: note = chemically synthesized
  source 1..20: mol_type = other DNA
taagttctgggatacatgtg

SEQ ID NO: 62658 - DNA, 20 bp, synthetic construct
  misc_feature 1..20: note = chemically synthesized
  source 1..20: mol_type = other DNA
tcattgttcaactcccactt

SEQ ID NO: 62659 - DNA, 20 bp, synthetic construct
  misc_feature 1..20: note = chemically synthesized
  source 1..20: mol_type = other DNA
tgttcctgtgttagtttgct

SEQ ID NO: 62660 - DNA, 20 bp, synthetic construct
  misc_feature 1..20: note = chemically synthesized
  source 1..20: mol_type = other DNA
attatatcgctgatggccat

SEQ ID NO: 62661 - DNA, 20 bp, synthetic construct
  misc_feature 1..20: note = chemically synthesized
  source 1..20: mol_type = other DNA
ggttccaagtctttgctatt

SEQ ID NO: 62662 - DNA, 20 bp, synthetic construct
  misc_feature 1..20: note = chemically synthesized
  source 1..20: mol_type = other DNA
gtgtgcacgtgtctttatag

SEQ ID NO: 62663 - DNA, 20 bp, synthetic construct
  misc_feature 1..20: note = chemically synthesized
  source 1..20: mol_type = other DNA
gtagaatgatttctaattct

SEQ ID NO: 62664 - DNA, 20 bp, synthetic construct
  misc_feature 1..20: note = chemically synthesized
  source 1..20: mol_type = other DNA
tttgggtatatacccagtaa

SEQ ID NO: 62665 - DNA, 20 bp, synthetic construct
  misc_feature 1..20: note = chemically synthesized
  source 1..20: mol_type = other DNA
tatacccagtaatgggattg

SEQ ID NO: 62666 - DNA, 20 bp, synthetic construct
  misc_feature 1..20: note = chemically synthesized
  source 1..20: mol_type = other DNA
tttctggttctagatccttg

SEQ ID NO: 62667 - DNA, 20 bp, synthetic construct
  misc_feature 1..20: note = chemically synthesized
  source 1..20: mol_type = other DNA
atcctttgtccactttttga

SEQ ID NO: 62668 - DNA, 20 bp, synthetic construct
  misc_feature 1..20: note = chemically synthesized
  source 1..20: mol_type = other DNA
gttgaagttctttgtagatt

SEQ ID NO: 62669 - DNA, 20 bp, synthetic construct
  misc_feature 1..20: note = chemically synthesized
  source 1..20: mol_type = other DNA
ggatgttagccctttgtcag

SEQ ID NO: 62670 - DNA, 20 bp, synthetic construct
  misc_feature 1..20: note = chemically synthesized
  source 1..20: mol_type = other DNA
ttgcttttgatgttttagtc

SEQ ID NO: 62671 - DNA, 20 bp, synthetic construct
  misc_feature 1..20: note = chemically synthesized
  source 1..20: mol_type = other DNA
tttttgcccatgcctatgtc

SEQ ID NO: 62672 - DNA, 20 bp, synthetic construct
  misc_feature 1..20: note = chemically synthesized
  source 1..20: mol_type = other DNA
gtattgcctaggttatcttc

SEQ ID NO: 62673 - DNA, 20 bp, synthetic construct
  misc_feature 1..20: note = chemically synthesized
  source 1..20: mol_type = other DNA
atttaagtctttaatccacc

SEQ ID NO: 62674 - DNA, 20 bp, synthetic construct
  misc_feature 1..20: note = chemically synthesized
  source 1..20: mol_type = other DNA
ttttgtataaggtgtaagga

SEQ ID NO: 62675 - DNA, 20 bp, synthetic construct
  misc_feature 1..20: note = chemically synthesized
  source 1..20: mol_type = other DNA
ccagcaccatttattaaata

SEQ ID NO: 62676 - DNA, 20 bp, synthetic construct
  misc_feature 1..20: note = chemically synthesized
  source 1..20: mol_type = other DNA
ccagctttgttctttttgtt

SEQ ID NO: 62677 - DNA, 20 bp, synthetic construct
  misc_feature 1..20: note = chemically synthesized
  source 1..20: mol_type = other DNA
aaagtcagtggtagcttgat

SEQ ID NO: 62678 - DNA, 20 bp, synthetic construct
  misc_feature 1..20: note = chemically synthesized
  source 1..20: mol_type = other DNA
gtagcttgatggggatagca

SEQ ID NO: 62679 - DNA, 20 bp, synthetic construct
  misc_feature 1..20: note = chemically synthesized
  source 1..20: mol_type = other DNA
attctttctatctatgagca

SEQ ID NO: 62680 - DNA, 20 bp, synthetic construct
  misc_feature 1..20: note = chemically synthesized
  source 1..20: mol_type = other DNA
ctctcttatttccttgagca

SEQ ID NO: 62681 - DNA, 20 bp, synthetic construct
  misc_feature 1..20: note = chemically synthesized
  source 1..20: mol_type = other DNA
ttattctctttgcagcaatt

SEQ ID NO: 62682 - DNA, 20 bp, synthetic construct
  misc_feature 1..20: note = chemically synthesized
  source 1..20: mol_type = other DNA
tctttgcagcaattgtgaat

SEQ ID NO: 62683 - DNA, 20 bp, synthetic construct
  misc_feature 1..20: note = chemically synthesized
  source 1..20: mol_type = other DNA
aagattttgggctgagatga

SEQ ID NO: 62684 - DNA, 20 bp, synthetic construct
  misc_feature 1..20: note = chemically synthesized
  source 1..20: mol_type = other DNA
ttgacttcctctcttcctat

SEQ ID NO: 62685 - DNA, 20 bp, synthetic construct
  misc_feature 1..20: note = chemically synthesized
  source 1..20: mol_type = other DNA
cgagaacttccaatactatg

SEQ ID NO: 62686 - DNA, 20 bp, synthetic construct
  misc_feature 1..20: note = chemically synthesized
  source 1..20: mol_type = other DNA
cttccaatactatgttgagt

SEQ ID NO: 62687 - DNA, 20 bp, synthetic construct
  misc_feature 1..20: note = chemically synthesized
  source 1..20: mol_type = other DNA
tttattctactgtggtctga

SEQ ID NO: 62688 - DNA, 20 bp, synthetic construct
  misc_feature 1..20: note = chemically synthesized
  source 1..20: mol_type = other DNA
ggagaaagttccatgtgctg

SEQ ID NO: 62689 - DNA, 20 bp, synthetic construct
  misc_feature 1..20: note = chemically synthesized
  source 1..20: mol_type = other DNA
aagttccatgtgctgatgaa

SEQ ID NO: 62690 - DNA, 20 bp, synthetic construct
  misc_feature 1..20: note = chemically synthesized
  source 1..20: mol_type = other DNA
gaatgtgtattctgcagttg

SEQ ID NO: 62691 - DNA, 20 bp, synthetic construct
  misc_feature 1..20: note = chemically synthesized
  source 1..20: mol_type = other DNA
tgtattctgcagttgttggg

SEQ ID NO: 62692 - DNA, 20 bp, synthetic construct
  misc_feature 1..20: note = chemically synthesized
  source 1..20: mol_type = other DNA
gacctgcctagtgcagtcag

SEQ ID NO: 62693 - DNA, 20 bp, synthetic construct
  misc_feature 1..20: note = chemically synthesized
  source 1..20: mol_type = other DNA
tagtaattgttttataaatt

SEQ ID NO: 62694 - DNA, 20 bp, synthetic construct
  misc_feature 1..20: note = chemically synthesized
  source 1..20: mol_type = other DNA
gtattagatgcatatatatt

SEQ ID NO: 62695 - DNA, 20 bp, synthetic construct
  misc_feature 1..20: note = chemically synthesized
  source 1..20: mol_type = other DNA
aagtttgttttgtctgacat

SEQ ID NO: 62696 - DNA, 20 bp, synthetic construct
  misc_feature 1..20: note = chemically synthesized
  source 1..20: mol_type = other DNA
gcttttggtgtccatttgtg

SEQ ID NO: 62697 - DNA, 20 bp, synthetic construct
  misc_feature 1..20: note = chemically synthesized
  source 1..20: mol_type = other DNA
cccctttaccttaagtttat

SEQ ID NO: 62698 - DNA, 20 bp, synthetic construct
  misc_feature 1..20: note = chemically synthesized
  source 1..20: mol_type = other DNA
tgtgagtccttatgtgttag

SEQ ID NO: 62699 - DNA, 20 bp, synthetic construct
  misc_feature 1..20: note = chemically synthesized
  source 1..20: mol_type = other DNA
aggcggcagataactggttg

SEQ ID NO: 62700 - DNA, 20 bp, synthetic construct
  misc_feature 1..20: note = chemically synthesized
  source 1..20: mol_type = other DNA
tttttgttgtatatgtccta

SEQ ID NO: 62701 - DNA, 20 bp, synthetic construct
  misc_feature 1..20: note = chemically synthesized
  source 1..20: mol_type = other DNA
gttctgttttgatgtgcttc

SEQ ID NO: 62702 - DNA, 20 bp, synthetic construct
  misc_feature 1..20: note = chemically synthesized
  source 1..20: mol_type = other DNA
gtagtgttggcttggtagtg

SEQ ID NO: 62703 - DNA, 20 bp, synthetic construct
  misc_feature 1..20: note = chemically synthesized
  source 1..20: mol_type = other DNA
atttgtgaagcttagtttca

SEQ ID NO: 62704 - DNA, 20 bp, synthetic construct
  misc_feature 1..20: note = chemically synthesized
  source 1..20: mol_type = other DNA
ctctttgtctttagataact

SEQ ID NO: 62705 - DNA, 20 bp, synthetic construct
  misc_feature 1..20: note = chemically synthesized
  source 1..20: mol_type = other DNA
taggcaatgatatttttgca

SEQ ID NO: 62706 - DNA, 20 bp, synthetic construct
  misc_feature 1..20: note = chemically synthesized
  source 1..20: mol_type = other DNA
gtttattgagcttcttgtat

SEQ ID NO: 62707 - DNA, 20 bp, synthetic construct
  misc_feature 1..20: note = chemically synthesized
  source 1..20: mol_type = other DNA
agttttccttgattatttcc

SEQ ID NO: 62708 - DNA, 20 bp, synthetic construct
  misc_feature 1..20: note = chemically synthesized
  source 1..20: mol_type = other DNA
ttagatttctcttctttctc

SEQ ID NO: 62709 - DNA, 20 bp, synthetic construct
  misc_feature 1..20: note = chemically synthesized
  source 1..20: mol_type = other DNA
ttcttttttctttgtctttg

SEQ ID NO: 62710 - DNA, 20 bp, synthetic construct
  misc_feature 1..20: note = chemically synthesized
  source 1..20: mol_type = other DNA
ttttctttgtctttgttgga

SEQ ID NO: 62711 - DNA, 20 bp, synthetic construct
  misc_feature 1..20: note = chemically synthesized
  source 1..20: mol_type = other DNA
aaaaactttgtcttcaagct

SEQ ID NO: 62712 - DNA, 20 bp, synthetic construct
  misc_feature 1..20: note = chemically synthesized
  source 1..20: mol_type = other DNA
aagctctgaatttcttctgc

SEQ ID NO: 62713 - DNA, 20 bp, synthetic construct
  misc_feature 1..20: note = chemically synthesized
  source 1..20: mol_type = other DNA
atccattgtttcctgaagtt

SEQ ID NO: 62714 - DNA, 20 bp, synthetic construct
  misc_feature 1..20: note = chemically synthesized
  source 1..20: mol_type = other DNA
aaaattggacttcaccttcc

SEQ ID NO: 62715 - DNA, 20 bp, synthetic construct
  misc_feature 1..20: note = chemically synthesized
  source 1..20: mol_type = other DNA
ttagcttaataactgacctt

SEQ ID NO: 62716 - DNA, 20 bp, synthetic construct
  misc_feature 1..20: note = chemically synthesized
  source 1..20: mol_type = other DNA
aattatttttcaggtaaatc

SEQ ID NO: 62717 - DNA, 20 bp, synthetic construct
  misc_feature 1..20: note = chemically synthesized
  source 1..20: mol_type = other DNA
atcagggatttcttcttggt

SEQ ID NO: 62718 - DNA, 20 bp, synthetic construct
  misc_feature 1..20: note = chemically synthesized
  source 1..20: mol_type = other DNA
tgagctagtatgattttttg

SEQ ID NO: 62719 - DNA, 20 bp, synthetic construct
  misc_feature 1..20: note = chemically synthesized
  source 1..20: mol_type = other DNA
aaccttgtttttcatattac

SEQ ID NO: 62720 - DNA, 20 bp, synthetic construct
  misc_feature 1..20: note = chemically synthesized
  source 1..20: mol_type = other DNA
gttttctggttccttctcac

SEQ ID NO: 62721 - DNA, 20 bp, synthetic construct
  misc_feature 1..20: note = chemically synthesized
  source 1..20: mol_type = other DNA
tagtgattgttatctctctt

SEQ ID NO: 62722 - DNA, 20 bp, synthetic construct
  misc_feature 1..20: note = chemically synthesized
  source 1..20: mol_type = other DNA
accagactccaggctggtac

SEQ ID NO: 62723 - DNA, 20 bp, synthetic construct
  misc_feature 1..20: note = chemically synthesized
  source 1..20: mol_type = other DNA
ggtactggggtttgtctgca

SEQ ID NO: 62724 - DNA, 20 bp, synthetic construct
  misc_feature 1..20: note = chemically synthesized
  source 1..20: mol_type = other DNA
tcttgtgacgtgaaccatct

SEQ ID NO: 62725 - DNA, 20 bp, synthetic construct
  misc_feature 1..20: note = chemically synthesized
  source 1..20: mol_type = other DNA
ctgctccaatggaggtggca

SEQ ID NO: 62726 - DNA, 20 bp, synthetic construct
  misc_feature 1..20: note = chemically synthesized
  source 1..20: mol_type = other DNA
gaggatgaaatggactctgt

SEQ ID NO: 62727 - DNA, 20 bp, synthetic construct
  misc_feature 1..20: note = chemically synthesized
  source 1..20: mol_type = other DNA
tggggcaccctagaactccc

SEQ ID NO: 62728 - DNA, 20 bp, synthetic construct
  misc_feature 1..20: note = chemically synthesized
  source 1..20: mol_type = other DNA
tgccctttgtcttcagctac

SEQ ID NO: 62729 - DNA, 20 bp, synthetic construct
  misc_feature 1..20: note = chemically synthesized
  source 1..20: mol_type = other DNA
ctttgtcttcagctaccagg

SEQ ID NO: 62730 - DNA, 20 bp, synthetic construct
  misc_feature 1..20: note = chemically synthesized
  source 1..20: mol_type = other DNA
ggactagtcgtgtctgagct

SEQ ID NO: 62731 - DNA, 20 bp, synthetic construct
  misc_feature 1..20: note = chemically synthesized
  source 1..20: mol_type = other DNA
tctttctgtggctactgtgg

SEQ ID NO: 62732 - DNA, 20 bp, synthetic construct
  misc_feature 1..20: note = chemically synthesized
  source 1..20: mol_type = other DNA
tgtggctactgtgggaggat

SEQ ID NO: 62733 - DNA, 20 bp, synthetic construct
  misc_feature 1..20: note = chemically synthesized
  source 1..20: mol_type = other DNA
ggggtgtagtttccaggtca

SEQ ID NO: 62734 - DNA, 20 bp, synthetic construct
  misc_feature 1..20: note = chemically synthesized
  source 1..20: mol_type = other DNA
caccctcccccgcaacagca

SEQ ID NO: 62735 - DNA, 20 bp, synthetic construct
  misc_feature 1..20: note = chemically synthesized
  source 1..20: mol_type = other DNA
ctgtcctacttccctgccag

SEQ ID NO: 62736 - DNA, 20 bp, synthetic construct
  misc_feature 1..20: note = chemically synthesized
  source 1..20: mol_type = other DNA
gactcagctccaggtaaggt

SEQ ID NO: 62737 - DNA, 20 bp, synthetic construct
  misc_feature 1..20: note = chemically synthesized
  source 1..20: mol_type = other DNA
agatcttcaggttccccagt

SEQ ID NO: 62738 - DNA, 20 bp, synthetic construct
  misc_feature 1..20: note = chemically synthesized
  source 1..20: mol_type = other DNA
cccagtgaggatgtgtgttt

SEQ ID NO: 62739 - DNA, 20 bp, synthetic construct
  misc_feature 1..20: note = chemically synthesized
  source 1..20: mol_type = other DNA
gtttgggcactcacaatatt

SEQ ID NO: 62740 - DNA, 20 bp, synthetic construct
  misc_feature 1..20: note = chemically synthesized
  source 1..20: mol_type = other DNA
cacaatatttggggtgtttc

SEQ ID NO: 62741 - DNA, 20 bp, synthetic construct
  misc_feature 1..20: note = chemically synthesized
  source 1..20: mol_type = other DNA
ggagcaatctgcttctttca

SEQ ID NO: 62742 - DNA, 20 bp, synthetic construct
  misc_feature 1..20: note = chemically synthesized
  source 1..20: mol_type = other DNA
tcacatgctgctctgtgcat

SEQ ID NO: 62743 - DNA, 20 bp, synthetic construct
  misc_feature 1..20: note = chemically synthesized
  source 1..20: mol_type = other DNA
tatactgccctttgatatca

SEQ ID NO: 62744 - DNA, 20 bp, synthetic construct
  misc_feature 1..20: note = chemically synthesized
  source 1..20: mol_type = other DNA
gaatcaaggacgtgatgttg

SEQ ID NO: 62745 - DNA, 20 bp, synthetic construct
  misc_feature 1..20: note = chemically synthesized
  source 1..20: mol_type = other DNA
gtgatgttgaggggtgggca

SEQ ID NO: 62746 - DNA, 20 bp, synthetic construct
  misc_feature 1..20: note = chemically synthesized
  source 1..20: mol_type = other DNA
taattgaaagcaaattcata

SEQ ID NO: 62747 - DNA, 20 bp, synthetic construct
  misc_feature 1..20: note = chemically synthesized
  source 1..20: mol_type = other DNA
acaagatttttaatagttga

SEQ ID NO: 62748 - DNA, 20 bp, synthetic construct
  misc_feature 1..20: note = chemically synthesized
  source 1..20: mol_type = other DNA
tgtgataaacaggtcattct

SEQ ID NO: 62749 - DNA, 20 bp, synthetic construct
  misc_feature 1..20: note = chemically synthesized
  source 1..20: mol_type = other DNA
cttagagattatgtcattac

SEQ ID NO: 62750 - DNA, 20 bp, synthetic construct
  misc_feature 1..20: note = chemically synthesized
  source 1..20: mol_type = other DNA
atctaactctctggcacagc

SEQ ID NO: 62751 - DNA, 20 bp, synthetic construct
  misc_feature 1..20: note = chemically synthesized
  source 1..20: mol_type = other DNA
ttttcttctgcttcagagct

SEQ ID NO: 62752 - DNA, 20 bp, synthetic construct
  misc_feature 1..20: note = chemically synthesized
  source 1..20: mol_type = other DNA
ttctgtcattttgcctctgt

SEQ ID NO: 62753 - DNA, 20 bp, synthetic construct
  misc_feature 1..20: note = chemically synthesized
  source 1..20: mol_type = other DNA
atgtttgaaaatacatggga

SEQ ID NO: 62754 - DNA, 20 bp, synthetic construct
  misc_feature 1..20: note = chemically synthesized
  source 1..20: mol_type = other DNA
aaagaaacagttttatcagt

SEQ ID NO: 62755 - DNA, 20 bp, synthetic construct
  misc_feature 1..20: note = chemically synthesized
  source 1..20: mol_type = other DNA
caatgatataggaaaaatcg

SEQ ID NO: 62756 - DNA, 20 bp, synthetic construct
  misc_feature 1..20: note = chemically synthesized
  source 1..20: mol_type = other DNA
aatcgaggaataagacagtt

SEQ ID NO: 62757 - DNA, 20 bp, synthetic construct
  misc_feature 1..20: note = chemically synthesized
  source 1..20: mol_type = other DNA
tcaaaagcataagaggaaat

SEQ ID NO: 62758 - DNA, 20 bp, synthetic construct
  misc_feature 1..20: note = chemically synthesized
  source 1..20: mol_type = other DNA
ttagaacactgccttggttt

SEQ ID NO: 62759 - DNA, 20 bp, synthetic construct
  misc_feature 1..20: note = chemically synthesized
  source 1..20: mol_type = other DNA
ggaagttgtttgaaaacagg

SEQ ID NO: 62760 - DNA, 20 bp, synthetic construct
  misc_feature 1..20: note = chemically synthesized
  source 1..20: mol_type = other DNA
gattcacttgtttagaggct

SEQ ID NO: 62761 - DNA, 20 bp, synthetic construct
  misc_feature 1..20: note = chemically synthesized
  source 1..20: mol_type = other DNA
gtggctcacgcctgtaatcc

SEQ ID NO: 62762 - DNA, 20 bp, synthetic construct
  misc_feature 1..20: note = chemically synthesized
  source 1..20: mol_type = other DNA
caggcagatcacctgaggtc

SEQ ID NO: 62763 - DNA, 20 bp, synthetic construct
  misc_feature 1..20: note = chemically synthesized
  source 1..20: mol_type = other DNA
tacttgggaggctgaggaag

SEQ ID NO: 62764 - DNA, 20 bp, synthetic construct
  misc_feature 1..20: note = chemically synthesized
  source 1..20: mol_type = other DNA
attgcttgaacctggaaggc

SEQ ID NO: 62765 - DNA, 20 bp, synthetic construct
  misc_feature 1..20: note = chemically synthesized
  source 1..20: mol_type = other DNA
tcataccactgcactccagc

SEQ ID NO: 62766 - DNA, 20 bp, synthetic construct
  misc_feature 1..20: note = chemically synthesized
  source 1..20: mol_type = other DNA
tatcttaaagagaccctaat

SEQ ID NO: 62767 - DNA, 20 bp, synthetic construct
  misc_feature 1..20: note = chemically synthesized
  source 1..20: mol_type = other DNA
gagaagtcacttattattat

SEQ ID NO: 62768 - DNA, 20 bp, synthetic construct
  misc_feature 1..20: note = chemically synthesized
  source 1..20: mol_type = other DNA
gagcagatataagccttaca

SEQ ID NO: 62769 - DNA, 20 bp, synthetic construct
  misc_feature 1..20: note = chemically synthesized
  source 1..20: mol_type = other DNA
cacaggattatgaagtctga

SEQ ID NO: 62770 - DNA, 20 bp, synthetic construct
  misc_feature 1..20: note = chemically synthesized
  source 1..20: mol_type = other DNA
cctccaataagccagatttc

SEQ ID NO: 62771 - DNA, 20 bp, synthetic construct
  misc_feature 1..20: note = chemically synthesized
  source 1..20: mol_type = other DNA
cgtcataatctaccaaggtc

SEQ ID NO: 62772 - DNA, 20 bp, synthetic construct
  misc_feature 1..20: note = chemically synthesized
  source 1..20: mol_type = other DNA
taatctaccaaggtcatgga

SEQ ID NO: 62773 - DNA, 20 bp, synthetic construct
  misc_feature 1..20: note = chemically synthesized
  source 1..20: mol_type = other DNA
aaaataaagaaaaaaacagc

SEQ ID NO: 62774 - DNA, 20 bp, synthetic construct
  misc_feature 1..20: note = chemically synthesized
  source 1..20: mol_type = other DNA
ccaatatgtcagaaacagca

SEQ ID NO: 62775 - DNA, 20 bp, synthetic construct
  misc_feature 1..20: note = chemically synthesized
  source 1..20: mol_type = other DNA
taaaacagtccctgcctctt

SEQ ID NO: 62776 - DNA, 20 bp, synthetic construct
  misc_feature 1..20: note = chemically synthesized
  source 1..20: mol_type = other DNA
caaatacatgtcttatgtct

SEQ ID NO: 62777 - DNA, 20 bp, synthetic construct
  misc_feature 1..20: note = chemically synthesized
  source 1..20: mol_type = other DNA
agaagagctacaccaaaacc

SEQ ID NO: 62778 - DNA, 20 bp, synthetic construct
  misc_feature 1..20: note = chemically synthesized
  source 1..20: mol_type = other DNA
ccagtgataaatacacatca

SEQ ID NO: 62779 - DNA, 20 bp, synthetic construct
  misc_feature 1..20: note = chemically synthesized
  source 1..20: mol_type = other DNA
tcgggtgcctacatacatac

SEQ ID NO: 62780 - DNA, 20 bp, synthetic construct
  misc_feature 1..20: note = chemically synthesized
  source 1..20: mol_type = other DNA
gtgatttatttcaaataggt

SEQ ID NO: 62781 - DNA, 20 bp, synthetic construct
  misc_feature 1..20: note = chemically synthesized
  source 1..20: mol_type = other DNA
ggataagtagatattgaagt

SEQ ID NO: 62782 - DNA, 20 bp, synthetic construct
  misc_feature 1..20: note = chemically synthesized
  source 1..20: mol_type = other DNA
gcactgaaactgttgcttta

SEQ ID NO: 62783 - DNA, 20 bp, synthetic construct
  misc_feature 1..20: note = chemically synthesized
  source 1..20: mol_type = other DNA
gataatggcctaaaaccaca

SEQ ID NO: 62784 - DNA, 20 bp, synthetic construct
  misc_feature 1..20: note = chemically synthesized
  source 1..20: mol_type = other DNA
gaagaaaactagctaaaggg

SEQ ID NO: 62785 - DNA, 20 bp, synthetic construct
  misc_feature 1..20: note = chemically synthesized
  source 1..20: mol_type = other DNA
agaataaattagagaaaaat

SEQ ID NO: 62786 - DNA, 20 bp, synthetic construct
  misc_feature 1..20: note = chemically synthesized
  source 1..20: mol_type = other DNA
ttagagaaaaattggaatga

SEQ ID NO: 62787 - DNA, 20 bp, synthetic construct
  misc_feature 1..20: note = chemically synthesized
  source 1..20: mol_type = other DNA
tccctggctaaactccaccc

SEQ ID NO: 62788 - DNA, 20 bp, synthetic construct
  misc_feature 1..20: note = chemically synthesized
  source 1..20: mol_type = other DNA
gcaaacttgaccaatagtct

SEQ ID NO: 62789 - DNA, 20 bp, synthetic construct
  misc_feature 1..20: note = chemically synthesized
  source 1..20: mol_type = other DNA
ccaggggccggcggctggct

SEQ ID NO: 62790 - DNA, 20 bp, synthetic construct
  misc_feature 1..20: note = chemically synthesized
  source 1..20: mol_type = other DNA
ccggcggctggctagggatg

SEQ ID NO: 62791 - DNA, 20 bp, synthetic construct
  misc_feature 1..20: note = chemically synthesized
  source 1..20: mol_type = other DNA
aagctcctagtccagacgcc

SEQ ID NO: 62792 - DNA, 20 bp, synthetic construct
  misc_feature 1..20: note = chemically synthesized
  source 1..20: mol_type = other DNA
tcacaagcctgtggggcaag

SEQ ID NO: 62793 - DNA, 20 bp, synthetic construct
  misc_feature 1..20: note = chemically synthesized
  source 1..20: mol_type = other DNA
caaaagtccaggtcgcttct

SEQ ID NO: 62794 - DNA, 20 bp, synthetic construct
  misc_feature 1..20: note = chemically synthesized
  source 1..20: mol_type = other DNA
tgggagatgccataaagcac

SEQ ID NO: 62795 - DNA, 20 bp, synthetic construct
  misc_feature 1..20: note = chemically synthesized
  source 1..20: mol_type = other DNA
tcaagggcacctttgcccag

SEQ ID NO: 62796 - DNA, 20 bp, synthetic construct
  misc_feature 1..20: note = chemically synthesized
  source 1..20: mol_type = other DNA
tgcactgtgacaagctgcat

SEQ ID NO: 62797 - DNA, 20 bp, synthetic construct
  misc_feature 1..20: note = chemically synthesized
  source 1..20: mol_type = other DNA
tggatcctgagaacttcaag

SEQ ID NO: 62798 - DNA, 20 bp, synthetic construct
  misc_feature 1..20: note = chemically synthesized
  source 1..20: mol_type = other DNA
tctcgaggcaacttagacaa

SEQ ID NO: 62799 - DNA, 20 bp, synthetic construct
  misc_feature 1..20: note = chemically synthesized
  source 1..20: mol_type = other DNA
gagtattgatctgagcacag

SEQ ID NO: 62800 - DNA, 20 bp, synthetic construct
  misc_feature 1..20: note = chemically synthesized
  source 1..20: mol_type = other DNA
tgtgagctgtttgaagatac

SEQ ID NO: 62801 - DNA, 20 bp, synthetic construct
  misc_feature 1..20: note = chemically synthesized
  source 1..20: mol_type = other DNA
tgtttgaagatactggggtt

SEQ ID NO: 62802 - DNA, 20 bp, synthetic construct
  misc_feature 1..20: note = chemically synthesized
  source 1..20: mol_type = other DNA
tggcaatgttttagggccta

SEQ ID NO: 62803 - DNA, 20 bp, synthetic construct
  misc_feature 1..20: note = chemically synthesized
  source 1..20: mol_type = other DNA
gatgggggcaaagtatgtcc

SEQ ID NO: 62804 - DNA, 20 bp, synthetic construct
  misc_feature 1..20: note = chemically synthesized
  source 1..20: mol_type = other DNA
aacaattgaaacatttgggc

SEQ ID NO: 62805 - DNA, 20 bp, synthetic construct
  misc_feature 1..20: note = chemically synthesized
  source 1..20: mol_type = other DNA
cgttttcagcctacagcata

SEQ ID NO: 62806 - DNA, 20 bp, synthetic construct
  misc_feature 1..20: note = chemically synthesized
  source 1..20: mol_type = other DNA
aagttaacataggcttgatt

SEQ ID NO: 62807 - DNA, 20 bp, synthetic construct
  misc_feature 1..20: note = chemically synthesized
  source 1..20: mol_type = other DNA
gctggagctctcagctcact

SEQ ID NO: 62808 - DNA, 20 bp, synthetic construct
  misc_feature 1..20: note = chemically synthesized
  source 1..20: mol_type = other DNA
tttggcaatccatttcggca

SEQ ID NO: 62809 - DNA, 20 bp, synthetic construct
  misc_feature 1..20: note = chemically synthesized
  source 1..20: mol_type = other DNA
tcctggcagaagatggtgac

SEQ ID NO: 62810 - DNA, 20 bp, synthetic construct
  misc_feature 1..20: note = chemically synthesized
  source 1..20: mol_type = other DNA
gcccatgatgcagagctttc

SEQ ID NO: 62811 - DNA, 20 bp, synthetic construct
  misc_feature 1..20: note = chemically synthesized
  source 1..20: mol_type = other DNA
ttttaaatatatgagccaca

SEQ ID NO: 62812 - DNA, 20 bp, synthetic construct
  misc_feature 1..20: note = chemically synthesized
  source 1..20: mol_type = other DNA
ccacaaagggttttatgttg

SEQ ID NO: 62813 - DNA, 20 bp, synthetic construct
  misc_feature 1..20: note = chemically synthesized
  source 1..20: mol_type = other DNA
cttttttgtttacgttagat

SEQ ID NO: 62814 - DNA, 20 bp, synthetic construct
  misc_feature 1..20: note = chemically synthesized
  source 1..20: mol_type = other DNA
caataaagaaacttgtacat

SEQ ID NO: 62815 - DNA, 20 bp, synthetic construct
  misc_feature 1..20: note = chemically synthesized
  source 1..20: mol_type = other DNA
tacatgggagttctgcaagt

SEQ ID NO: 62816 - DNA, 20 bp, synthetic construct
  misc_feature 1..20: note = chemically synthesized
  source 1..20: mol_type = other DNA
agggggctgaacccccttcc

SEQ ID NO: 62817 - DNA, 20 bp, synthetic construct
  misc_feature 1..20: note = chemically synthesized
  source 1..20: mol_type = other DNA
taggaagtcaaggtttaggc

SEQ ID NO: 62818 - DNA, 20 bp, synthetic construct
  misc_feature 1..20: note = chemically synthesized
  source 1..20: mol_type = other DNA
tcagatgaaaatatagtgtg

SEQ ID NO: 62819 - DNA, 20 bp, synthetic construct
  misc_feature 1..20: note = chemically synthesized
  source 1..20: mol_type = other DNA
aattgagaaggcagattcac

SEQ ID NO: 62820 - DNA, 20 bp, synthetic construct
  misc_feature 1..20: note = chemically synthesized
  source 1..20: mol_type = other DNA
gttaatgcacgttaataagc

SEQ ID NO: 62821 - DNA, 20 bp, synthetic construct
  misc_feature 1..20: note = chemically synthesized
  source 1..20: mol_type = other DNA
gtctccagaaaattcacatg

SEQ ID NO: 62822 - DNA, 20 bp, synthetic construct
  misc_feature 1..20: note = chemically synthesized
  source 1..20: mol_type = other DNA
atgagagcagatccccatca

SEQ ID NO: 62823 - DNA, 20 bp, synthetic construct
  misc_feature 1..20: note = chemically synthesized
  source 1..20: mol_type = other DNA
aaaataagcttcggtgttca

SEQ ID NO: 62824 - DNA, 20 bp, synthetic construct
  misc_feature 1..20: note = chemically synthesized
  source 1..20: mol_type = other DNA
tccacttgtcctctgtgttt

SEQ ID NO: 62825 - DNA, 20 bp, synthetic construct
  misc_feature 1..20: note = chemically synthesized
  source 1..20: mol_type = other DNA
ctgagcccttctgtctaact

SEQ ID NO: 62826 - DNA, 20 bp, synthetic construct
  misc_feature 1..20: note = chemically synthesized
  source 1..20: mol_type = other DNA
ttcttttttttcctcagcct

SEQ ID NO: 62827 - DNA, 20 bp, synthetic construct
  misc_feature 1..20: note = chemically synthesized
  source 1..20: mol_type = other DNA
acaagtttataaaaaattga

SEQ ID NO: 62828 - DNA, 20 bp, synthetic construct
  misc_feature 1..20: note = chemically synthesized
  source 1..20: mol_type = other DNA
ataaaaaattgaaggaataa

SEQ ID NO: 62829 - DNA, 20 bp, synthetic construct
  misc_feature 1..20: note = chemically synthesized
  source 1..20: mol_type = other DNA
atgaatggctacttcatagg

SEQ ID NO: 62830 - DNA, 20 bp, synthetic construct
  misc_feature 1..20: note = chemically synthesized
  source 1..20: mol_type = other DNA
tttcaatagtatgctaaaca

SEQ ID NO: 62831 - DNA, 20 bp, synthetic construct
  misc_feature 1..20: note = chemically synthesized
  source 1..20: mol_type = other DNA
taatttcgaaggtacatgtg

SEQ ID NO: 62832 - DNA, 20 bp, synthetic construct
  misc_feature 1..20: note = chemically synthesized
  source 1..20: mol_type = other DNA
aggatgtgcaggcttgttac

SEQ ID NO: 62833 - DNA, 20 bp, synthetic construct
  misc_feature 1..20: note = chemically synthesized
  source 1..20: mol_type = other DNA
gagcagatataagctttaca

SEQ ID NO: 62834 - DNA, 20 bp, synthetic construct
  misc_feature 1..20: note = chemically synthesized
  source 1..20: mol_type = other DNA
aagctttacacaggatcatg

SEQ ID NO: 62835 - DNA, 20 bp, synthetic construct
  misc_feature 1..20: note = chemically synthesized
  source 1..20: mol_type = other DNA
cacaggatcatgaaggatga

SEQ ID NO: 62836 - DNA, 20 bp, synthetic construct
  misc_feature 1..20: note = chemically synthesized
  source 1..20: mol_type = other DNA
tcaatcaacctgatagctta

SEQ ID NO: 62837 - DNA, 20 bp, synthetic construct
  misc_feature 1..20: note = chemically synthesized
  source 1..20: mol_type = other DNA
acagcttgcctccgataagc

SEQ ID NO: 62838 - DNA, 20 bp, synthetic construct
  misc_feature 1..20: note = chemically synthesized
  source 1..20: mol_type = other DNA
atctagcaaggttagagatc

SEQ ID NO: 62839 - DNA, 20 bp, synthetic construct
  misc_feature 1..20: note = chemically synthesized
  source 1..20: mol_type = other DNA
tgtctaaagtacactaatat

SEQ ID NO: 62840 - DNA, 20 bp, synthetic construct
  misc_feature 1..20: note = chemically synthesized
  source 1..20: mol_type = other DNA
aaaaacaacccttgcctctt

SEQ ID NO: 62841 - DNA, 20 bp, synthetic construct
  misc_feature 1..20: note = chemically synthesized
  source 1..20: mol_type = other DNA
tacacgcacatcttatgtct

SEQ ID NO: 62842 - DNA, 20 bp, synthetic construct
  misc_feature 1..20: note = chemically synthesized
  source 1..20: mol_type = other DNA
agaagagctacgccaaaacc

SEQ ID NO: 62843 - DNA, 20 bp, synthetic construct
  misc_feature 1..20: note = chemically synthesized
  source 1..20: mol_type = other DNA
tctggtgtatacatacatac

SEQ ID NO: 62844 - DNA, 20 bp, synthetic construct
  misc_feature 1..20: note = chemically synthesized
  source 1..20: mol_type = other DNA
tatacatacatacctgaata

SEQ ID NO: 62845 - DNA, 20 bp, synthetic construct
  misc_feature 1..20: note = chemically synthesized
  source 1..20: mol_type = other DNA
atgatttatttcaaataggt

SEQ ID NO: 62846 - DNA, 20 bp, synthetic construct
  misc_feature 1..20: note = chemically synthesized
  source 1..20: mol_type = other DNA
agataatggcaaaagtcaca

SEQ ID NO: 62847 - DNA, 20 bp, synthetic construct
  misc_feature 1..20: note = chemically synthesized
  source 1..20: mol_type = other DNA
gaaggaaactagctaaaggg

SEQ ID NO: 62848 - DNA, 20 bp, synthetic construct
  misc_feature 1..20: note = chemically synthesized
  source 1..20: mol_type = other DNA
agaataaattagagaaaaac

SEQ ID NO: 62849 - DNA, 20 bp, synthetic construct
  misc_feature 1..20: note = chemically synthesized
  source 1..20: mol_type = other DNA
ttagagaaaaactggaatga

SEQ ID NO: 62850 - DNA, 20 bp, synthetic construct
  misc_feature 1..20: note = chemically synthesized
  source 1..20: mol_type = other DNA
tccctggctaaactccaccc

SEQ ID NO: 62851 - DNA, 20 bp, synthetic construct
  misc_feature 1..20: note = chemically synthesized
  source 1..20: mol_type = other DNA
gcaaacttgaccaatagtct

SEQ ID NO: 62852 - DNA, 20 bp, synthetic construct
  misc_feature 1..20: note = chemically synthesized
  source 1..20: mol_type = other DNA
ccaggggccggcggctggct

SEQ ID NO: 62853 - DNA, 20 bp, synthetic construct
  misc_feature 1..20: note = chemically synthesized
  source 1..20: mol_type = other DNA
ccggcggctggctagggatg

SEQ ID NO: 62854 - DNA, 20 bp, synthetic construct
  misc_feature 1..20: note = chemically synthesized
  source 1..20: mol_type = other DNA
aagctcctagtccagacgcc

SEQ ID NO: 62855 - DNA, 20 bp, synthetic construct
  misc_feature 1..20: note = chemically synthesized
  source 1..20: mol_type = other DNA
tcacaagcctgtggggcaag

SEQ ID NO: 62856 - DNA, 20 bp, synthetic construct
  misc_feature 1..20: note = chemically synthesized
  source 1..20: mol_type = other DNA
caaaagtccaggtcgcttct

SEQ ID NO: 62857 - DNA, 20 bp, synthetic construct
  misc_feature 1..20: note = chemically synthesized
  source 1..20: mol_type = other DNA
tgggagatgccacaaagcac

SEQ ID NO: 62858 - DNA, 20 bp, synthetic construct
  misc_feature 1..20: note = chemically synthesized
  source 1..20: mol_type = other DNA
tcaagggcacctttgcccag

SEQ ID NO: 62859 - DNA, 20 bp, synthetic construct
  misc_feature 1..20: note = chemically synthesized
  source 1..20: mol_type = other DNA
tgcactgtgacaagctgcat

SEQ ID NO: 62860 - DNA, 20 bp, synthetic construct
  misc_feature 1..20: note = chemically synthesized
  source 1..20: mol_type = other DNA
tggatcctgagaacttcaag

SEQ ID NO: 62861 - DNA, 20 bp, synthetic construct
  misc_feature 1..20: note = chemically synthesized
  source 1..20: mol_type = other DNA
tctcgaggcaacttagacaa

SEQ ID NO: 62862 - DNA, 20 bp, synthetic construct
  misc_feature 1..20: note = chemically synthesized
  source 1..20: mol_type = other DNA
gagtattgatctgagcacag

SEQ ID NO: 62863 - DNA, 20 bp, synthetic construct
  misc_feature 1..20: note = chemically synthesized
  source 1..20: mol_type = other DNA
tgtgagctgtttgaagatac

SEQ ID NO: 62864 - DNA, 20 bp, synthetic construct
  misc_feature 1..20: note = chemically synthesized
  source 1..20: mol_type = other DNA
tgtttgaagatactggggtt

SEQ ID NO: 62865 - DNA, 20 bp, synthetic construct
  misc_feature 1..20: note = chemically synthesized
  source 1..20: mol_type = other DNA
tggtaatgttttagggccta

SEQ ID NO: 62866 - DNA, 20 bp, synthetic construct
  misc_feature 1..20: note = chemically synthesized
  source 1..20: mol_type = other DNA
gatgggggcaaagtatgtcc

SEQ ID NO: 62867 - DNA, 20 bp, synthetic construct
  misc_feature 1..20: note = chemically synthesized
  source 1..20: mol_type = other DNA
aacaattgaaacatttgggc

SEQ ID NO: 62868 - DNA, 20 bp, synthetic construct
  misc_feature 1..20: note = chemically synthesized
  source 1..20: mol_type = other DNA
cgtcttcagcctacaacata

SEQ ID NO: 62869 - DNA, 20 bp, synthetic construct
  misc_feature 1..20: note = chemically synthesized
  source 1..20: mol_type = other DNA
aagttaacataggcttgatt

SEQ ID NO: 62870 - DNA, 20 bp, synthetic construct
  misc_feature 1..20: note = chemically synthesized
  source 1..20: mol_type = other DNA
gctggagctctcagctcact

SEQ ID NO: 62871 - DNA, 20 bp, synthetic construct
  misc_feature 1..20: note = chemically synthesized
  source 1..20: mol_type = other DNA
tttggcaatccatttcggca

SEQ ID NO: 62872 - DNA, 20 bp, synthetic construct
  misc_feature 1..20: note = chemically synthesized
  source 1..20: mol_type = other DNA
gcccatgattcagagctttc

SEQ ID NO: 62873 - DNA, 20 bp, synthetic construct
  misc_feature 1..20: note = chemically synthesized
  source 1..20: mol_type = other DNA
ttttaaatatatgagccaca

SEQ ID NO: 62874 - DNA, 20 bp, synthetic construct
  misc_feature 1..20: note = chemically synthesized
  source 1..20: mol_type = other DNA
cagtaaagacacttgtacac

SEQ ID NO: 62875 - DNA, 20 bp, synthetic construct
  misc_feature 1..20: note = chemically synthesized
  source 1..20: mol_type = other DNA
tacacgggagttctgcaagt

SEQ ID NO: 62876 - DNA, 20 bp, synthetic construct
  misc_feature 1..20: note = chemically synthesized
  source 1..20: mol_type = other DNA
gttcagtgaagacctggggg

SEQ ID NO: 62877 - DNA, 20 bp, synthetic construct
  misc_feature 1..20: note = chemically synthesized
  source 1..20: mol_type = other DNA
gggggctggattgattgcag

SEQ ID NO: 62878 - DNA, 20 bp, synthetic construct
  misc_feature 1..20: note = chemically synthesized
  source 1..20: mol_type = other DNA
attgattgcagctgagtagc

SEQ ID NO: 62879 - DNA, 20 bp, synthetic construct
  misc_feature 1..20: note = chemically synthesized
  source 1..20: mol_type = other DNA
gggaaagtgttccaagcttt

SEQ ID NO: 62880 - DNA, 20 bp, synthetic construct
  misc_feature 1..20: note = chemically synthesized
  source 1..20: mol_type = other DNA
agcaattctattttattagg

SEQ ID NO: 62881 - DNA, 20 bp, synthetic construct
  misc_feature 1..20: note = chemically synthesized
  source 1..20: mol_type = other DNA
cttagcttttcacagccctt

SEQ ID NO: 62882 - DNA, 20 bp, synthetic construct
  misc_feature 1..20: note = chemically synthesized
  source 1..20: mol_type = other DNA
tggggacttaggtgtaagaa

SEQ ID NO: 62883 - DNA, 20 bp, synthetic construct
  misc_feature 1..20: note = chemically synthesized
  source 1..20: mol_type = other DNA
tgagatcaaaatgtagtggg

SEQ ID NO: 62884 - DNA, 20 bp, synthetic construct
  misc_feature 1..20: note = chemically synthesized
  source 1..20: mol_type = other DNA
taattggaaggcttacttaa

SEQ ID NO: 62885 - DNA, 20 bp, synthetic construct
  misc_feature 1..20: note = chemically synthesized
  source 1..20: mol_type = other DNA
ttaatggaatttttgtatag

SEQ ID NO: 62886 - DNA, 20 bp, synthetic construct
  misc_feature 1..20: note = chemically synthesized
  source 1..20: mol_type = other DNA
gttagtgcatctctataagt

SEQ ID NO: 62887 - DNA, 20 bp, synthetic construct
  misc_feature 1..20: note = chemically synthesized
  source 1..20: mol_type = other DNA
gtctcctcaaaattcacatg

SEQ ID NO: 62888 - DNA, 20 bp, synthetic construct
  misc_feature 1..20: note = chemically synthesized
  source 1..20: mol_type = other DNA
ccaggaagagaaccctgacc

SEQ ID NO: 62889 - DNA, 20 bp, synthetic construct
  misc_feature 1..20: note = chemically synthesized
  source 1..20: mol_type = other DNA
ttttgttatagcaccttgca

SEQ ID NO: 62890 - DNA, 20 bp, synthetic construct
  misc_feature 1..20: note = chemically synthesized
  source 1..20: mol_type = other DNA
agaaggagaaaaaaataagc

SEQ ID NO: 62891 - DNA, 20 bp, synthetic construct
  misc_feature 1..20: note = chemically synthesized
  source 1..20: mol_type = other DNA
gaaaaaaataagcttgggtt

SEQ ID NO: 62892 - DNA, 20 bp, synthetic construct
  misc_feature 1..20: note = chemically synthesized
  source 1..20: mol_type = other DNA
ttcttttttctcctcagcct

SEQ ID NO: 62893 - DNA, 20 bp, synthetic construct
  misc_feature 1..20: note = chemically synthesized
  source 1..20: mol_type = other DNA
aaatgcagtcactaccgttt

SEQ ID NO: 62894 - DNA, 20 bp, synthetic construct
  misc_feature 1..20: note = chemically synthesized
  source 1..20: mol_type = other DNA
agtcaaagcaaatttcttga

SEQ ID NO: 62895 - DNA, 20 bp, synthetic construct
  misc_feature 1..20: note = chemically synthesized
  source 1..20: mol_type = other DNA
ttgagagagtaaagaaataa

SEQ ID NO: 62896 - DNA, 20 bp, synthetic construct
  misc_feature 1..20: note = chemically synthesized
  source 1..20: mol_type = other DNA
gatgatatgttaaacaagtt

SEQ ID NO: 62897 - DNA, 20 bp, synthetic construct
  misc_feature 1..20: note = chemically synthesized
  source 1..20: mol_type = other DNA
ccttctctttttaggccata

SEQ ID NO: 62898 - DNA, 20 bp, synthetic construct
  misc_feature 1..20: note = chemically synthesized
  source 1..20: mol_type = other DNA
tttactgttaccttaaattc

SEQ ID NO: 62899 - DNA, 20 bp, synthetic construct
  misc_feature 1..20: note = chemically synthesized
  source 1..20: mol_type = other DNA
taaattcaggggtacacgta

SEQ ID NO: 62900 - DNA, 20 bp, synthetic construct
  misc_feature 1..20: note = chemically synthesized
  source 1..20: mol_type = other DNA
aaaagtgtgccatggtttta

SEQ ID NO: 62901 - DNA, 20 bp, synthetic construct
  misc_feature 1..20: note = chemically synthesized
  source 1..20: mol_type = other DNA
gtttaagtttcttgtttact

SEQ ID NO: 62902 - DNA, 20 bp, synthetic construct
  misc_feature 1..20: note = chemically synthesized
  source 1..20: mol_type = other DNA
ggatattaggcctttgtcag

SEQ ID NO: 62903 - DNA, 20 bp, synthetic construct
  misc_feature 1..20: note = chemically synthesized
  source 1..20: mol_type = other DNA
tctgtgcccgtgtttatatc

SEQ ID NO: 62904 - DNA, 20 bp, synthetic construct
  misc_feature 1..20: note = chemically synthesized
  source 1..20: mol_type = other DNA
tttctaggctttttatagtt

SEQ ID NO: 62905 - DNA, 20 bp, synthetic construct
  misc_feature 1..20: note = chemically synthesized
  source 1..20: mol_type = other DNA
atttaagtctctaatccatc

SEQ ID NO: 62906 - DNA, 20 bp, synthetic construct
  misc_feature 1..20: note = chemically synthesized
  source 1..20: mol_type = other DNA
taatccatctggagttaatt

SEQ ID NO: 62907 - DNA, 20 bp, synthetic construct
  misc_feature 1..20: note = chemically synthesized
  source 1..20: mol_type = other DNA
ttttggataaggtataagga

SEQ ID NO: 62908 - DNA, 20 bp, synthetic construct
  misc_feature 1..20: note = chemically synthesized
  source 1..20: mol_type = other DNA
agtgagggcaccattagcca

SEQ ID NO: 62909 - DNA, 20 bp, synthetic construct
  misc_feature 1..20: note = chemically synthesized
  source 1..20: mol_type = other DNA
tctagttcatgtaagattct

SEQ ID NO: 62910 - DNA, 20 bp, synthetic construct
  misc_feature 1..20: note = chemically synthesized
  source 1..20: mol_type = other DNA
gattctcagaattaagaaaa

SEQ ID NO: 62911 - DNA, 20 bp, synthetic construct
  misc_feature 1..20: note = chemically synthesized
  source 1..20: mol_type = other DNA
ttaagaaaaatggatggcat

SEQ ID NO: 62912 - DNA, 20 bp, synthetic construct
  misc_feature 1..20: note = chemically synthesized
  source 1..20: mol_type = other DNA
tggcatatgaatgaaacttc

SEQ ID NO: 62913 - DNA, 20 bp, synthetic construct
  misc_feature 1..20: note = chemically synthesized
  source 1..20: mol_type = other DNA
gaaacttcatggatgacata

SEQ ID NO: 62914 - DNA, 20 bp, synthetic construct
  misc_feature 1..20: note = chemically synthesized
  source 1..20: mol_type = other DNA
tggaatctaatatgtatttg

SEQ ID NO: 62915 - DNA, 20 bp, synthetic construct
  misc_feature 1..20: note = chemically synthesized
  source 1..20: mol_type = other DNA
taacctggtattgatgatat

SEQ ID NO: 62916 - DNA, 20 bp, synthetic construct
  misc_feature 1..20: note = chemically synthesized
  source 1..20: mol_type = other DNA
gggaacagccacaaacaaga

SEQ ID NO: 62917 - DNA, 20 bp, synthetic construct
  misc_feature 1..20: note = chemically synthesized
  source 1..20: mol_type = other DNA
tgcaggtcacttttcctgga

SEQ ID NO: 62918 - DNA, 20 bp, synthetic construct
  misc_feature 1..20: note = chemically synthesized
  source 1..20: mol_type = other DNA
gtggaagttagcagtaactg

SEQ ID NO: 62919 - DNA, 20 bp, synthetic construct
  misc_feature 1..20: note = chemically synthesized
  source 1..20: mol_type = other DNA
ggcagctgttcactggtacg

SEQ ID NO: 62920 - DNA, 20 bp, synthetic construct
  misc_feature 1..20: note = chemically synthesized
  source 1..20: mol_type = other DNA
ggttttagatgtatgtacct

SEQ ID NO: 62921 - DNA, 20 bp, synthetic construct
  misc_feature 1..20: note = chemically synthesized
  source 1..20: mol_type = other DNA
caatgaacagaaattctttt

SEQ ID NO: 62922 - DNA, 20 bp, synthetic construct
  misc_feature 1..20: note = chemically synthesized
  source 1..20: mol_type = other DNA
gaacagaaattcttttggga

SEQ ID NO: 62923 - DNA, 20 bp, synthetic construct
  misc_feature 1..20: note = chemically synthesized
  source 1..20: mol_type = other DNA
agaaattcagctttaatata

SEQ ID NO: 62924 - DNA, 20 bp, synthetic construct
  misc_feature 1..20: note = chemically synthesized
  source 1..20: mol_type = other DNA
gggtttaactctttgaaatt

SEQ ID NO: 62925 - DNA, 20 bp, synthetic construct
  misc_feature 1..20: note = chemically synthesized
  source 1..20: mol_type = other DNA
agtctccttgaaatacacat

SEQ ID NO: 62926 - DNA, 20 bp, synthetic construct
  misc_feature 1..20: note = chemically synthesized
  source 1..20: mol_type = other DNA
tcctaaactttatttcttgt

SEQ ID NO: 62927 - DNA, 20 bp, synthetic construct
  misc_feature 1..20: note = chemically synthesized
  source 1..20: mol_type = other DNA
ttcttgtaaggatttatctc

SEQ ID NO: 62928 - DNA, 20 bp, synthetic construct
  misc_feature 1..20: note = chemically synthesized
  source 1..20: mol_type = other DNA
gtatgaggacagtaagcctt

SEQ ID NO: 62929 - DNA, 20 bp, synthetic construct
  misc_feature 1..20: note = chemically synthesized
  source 1..20: mol_type = other DNA
gagacacgtgcagcagcctg

SEQ ID NO: 62930 - DNA, 20 bp, synthetic construct
  misc_feature 1..20: note = chemically synthesized
  source 1..20: mol_type = other DNA
cctgtggaatattgtcagtg

SEQ ID NO: 62931 - DNA, 20 bp, synthetic construct
  misc_feature 1..20: note = chemically synthesized
  source 1..20: mol_type = other DNA
ctaatgcccagcacgggcca

SEQ ID NO: 62932 - DNA, 20 bp, synthetic construct
  misc_feature 1..20: note = chemically synthesized
  source 1..20: mol_type = other DNA
ggcataattttgtagatatg

SEQ ID NO: 62933 - DNA, 20 bp, synthetic construct
  misc_feature 1..20: note = chemically synthesized
  source 1..20: mol_type = other DNA
ataagtacactgactactaa

SEQ ID NO: 62934 - DNA, 20 bp, synthetic construct
  misc_feature 1..20: note = chemically synthesized
  source 1..20: mol_type = other DNA
tgctttcttccaagttgatg

SEQ ID NO: 62935 - DNA, 20 bp, synthetic construct
  misc_feature 1..20: note = chemically synthesized
  source 1..20: mol_type = other DNA
actttgggaggctgaggtgg

SEQ ID NO: 62936 - DNA, 20 bp, synthetic construct
  misc_feature 1..20: note = chemically synthesized
  source 1..20: mol_type = other DNA
aaaattagccagagacagtg

SEQ ID NO: 62937 - DNA, 20 bp, synthetic construct
  misc_feature 1..20: note = chemically synthesized
  source 1..20: mol_type = other DNA
tactcgggaggctgaggcag

SEQ ID NO: 62938 - DNA, 20 bp, synthetic construct
  misc_feature 1..20: note = chemically synthesized
  source 1..20: mol_type = other DNA
gcgccactgcacactccagc

SEQ ID NO: 62939 - DNA, 20 bp, synthetic construct
  misc_feature 1..20: note = chemically synthesized
  source 1..20: mol_type = other DNA
tgtattcaatgtagtctcaa

SEQ ID NO: 62940 - DNA, 20 bp, synthetic construct
  misc_feature 1..20: note = chemically synthesized
  source 1..20: mol_type = other DNA
tggcttcttccacataaagc

SEQ ID NO: 62941 - DNA, 20 bp, synthetic construct
  misc_feature 1..20: note = chemically synthesized
  source 1..20: mol_type = other DNA
ttcttccacataaagcctgg

SEQ ID NO: 62942 - DNA, 20 bp, synthetic construct
  misc_feature 1..20: note = chemically synthesized
  source 1..20: mol_type = other DNA
cataaagcctggatgaataa

SEQ ID NO: 62943 - DNA, 20 bp, synthetic construct
  misc_feature 1..20: note = chemically synthesized
  source 1..20: mol_type = other DNA
attgtcacaactcctgatcc

SEQ ID NO: 62944 - DNA, 20 bp, synthetic construct
  misc_feature 1..20: note = chemically synthesized
  source 1..20: mol_type = other DNA
cttgagaaataaactgcaca

SEQ ID NO: 62945 - DNA, 20 bp, synthetic construct
  misc_feature 1..20: note = chemically synthesized
  source 1..20: mol_type = other DNA
taaactgcacactggatggt

SEQ ID NO: 62946 - DNA, 20 bp, synthetic construct
  misc_feature 1..20: note = chemically synthesized
  source 1..20: mol_type = other DNA
agttcccctgagaaggccac

SEQ ID NO: 62947 - DNA, 20 bp, synthetic construct
  misc_feature 1..20: note = chemically synthesized
  source 1..20: mol_type = other DNA
acctggattctatcagaaac

SEQ ID NO: 62948 - DNA, 20 bp, synthetic construct
  misc_feature 1..20: note = chemically synthesized
  source 1..20: mol_type = other DNA
ccttgcccaaaccccacccc

SEQ ID NO: 62949 - DNA, 20 bp, synthetic construct
  misc_feature 1..20: note = chemically synthesized
  source 1..20: mol_type = other DNA
gcagaaagtgtttctgaaag

SEQ ID NO: 62950 - DNA, 20 bp, synthetic construct
  misc_feature 1..20: note = chemically synthesized
  source 1..20: mol_type = other DNA
ctagaggtactttgaaagtt

SEQ ID NO: 62951 - DNA, 20 bp, synthetic construct
  misc_feature 1..20: note = chemically synthesized
  source 1..20: mol_type = other DNA
tcggaaaagctgttatgctc

SEQ ID NO: 62952 - DNA, 20 bp, synthetic construct
  misc_feature 1..20: note = chemically synthesized
  source 1..20: mol_type = other DNA
tcaaaggcacctttgctaca

SEQ ID NO: 62953 - DNA, 20 bp, synthetic construct
  misc_feature 1..20: note = chemically synthesized
  source 1..20: mol_type = other DNA
tggaccctgagaacttcctg

SEQ ID NO: 62954 - DNA, 20 bp, synthetic construct
  misc_feature 1..20: note = chemically synthesized
  source 1..20: mol_type = other DNA
tacccttagatatttgcact

SEQ ID NO: 62955 - DNA, 20 bp, synthetic construct
  misc_feature 1..20: note = chemically synthesized
  source 1..20: mol_type = other DNA
aggtggctttctcttgtgtt

SEQ ID NO: 62956 - DNA, 20 bp, synthetic construct
  misc_feature 1..20: note = chemically synthesized
  source 1..20: mol_type = other DNA
cttgtgttatgagtcagcta

SEQ ID NO: 62957 - DNA, 20 bp, synthetic construct
  misc_feature 1..20: note = chemically synthesized
  source 1..20: mol_type = other DNA
gggatatgatatttcagcag

SEQ ID NO: 62958 - DNA, 20 bp, synthetic construct
  misc_feature 1..20: note = chemically synthesized
  source 1..20: mol_type = other DNA
tatttcagcagtgggatttt

SEQ ID NO: 62959 - DNA, 20 bp, synthetic construct
  misc_feature 1..20: note = chemically synthesized
  source 1..20: mol_type = other DNA
aatttggtagagcaaggact

SEQ ID NO: 62960 - DNA, 20 bp, synthetic construct
  misc_feature 1..20: note = chemically synthesized
  source 1..20: mol_type = other DNA
aaattctggccaaaatcaaa

SEQ ID NO: 62961 - DNA, 20 bp, synthetic construct
  misc_feature 1..20: note = chemically synthesized
  source 1..20: mol_type = other DNA
caaaatcaaactgagtgttt

SEQ ID NO: 62962 - DNA, 20 bp, synthetic construct
  misc_feature 1..20: note = chemically synthesized
  source 1..20: mol_type = other DNA
tagtgggaagctgttaaaaa

SEQ ID NO: 62963 - DNA, 20 bp, synthetic construct
  misc_feature 1..20: note = chemically synthesized
  source 1..20: mol_type = other DNA
aaaaagaggattgtttccct

SEQ ID NO: 62964 - DNA, 20 bp, synthetic construct
  misc_feature 1..20: note = chemically synthesized
  source 1..20: mol_type = other DNA
atacttttgtacgcatggta

SEQ ID NO: 62965 - DNA, 20 bp, synthetic construct
  misc_feature 1..20: note = chemically synthesized
  source 1..20: mol_type = other DNA
atggtacaggattctttgtt

SEQ ID NO: 62966 - DNA, 20 bp, synthetic construct
  misc_feature 1..20: note = chemically synthesized
  source 1..20: mol_type = other DNA
atgaaacaatcacaatatgt

SEQ ID NO: 62967 - DNA, 20 bp, synthetic construct
  misc_feature 1..20: note = chemically synthesized
  source 1..20: mol_type = other DNA
aatcacaatatgttggggta

SEQ ID NO: 62968 - DNA, 20 bp, synthetic construct
  misc_feature 1..20: note = chemically synthesized
  source 1..20: mol_type = other DNA
gttggcatagcaagtaagag

SEQ ID NO: 62969 - DNA, 20 bp, synthetic construct
  misc_feature 1..20: note = chemically synthesized
  source 1..20: mol_type = other DNA
gatatctagcccataatggt

SEQ ID NO: 62970 - DNA, 20 bp, synthetic construct
  misc_feature 1..20: note = chemically synthesized
  source 1..20: mol_type = other DNA
ttgctcaaactctggtgaaa

SEQ ID NO: 62971 - DNA, 20 bp, synthetic construct
  misc_feature 1..20: note = chemically synthesized
  source 1..20: mol_type = other DNA
ttttggcaacccacttcagc

SEQ ID NO: 62972 - DNA, 20 bp, synthetic construct
  misc_feature 1..20: note = chemically synthesized
  source 1..20: mol_type = other DNA
tgctgtagcccacaagacca

SEQ ID NO: 62973 - DNA, 20 bp, synthetic construct
  misc_feature 1..20: note = chemically synthesized
  source 1..20: mol_type = other DNA
cagttcctgcatgataaaaa

SEQ ID NO: 62974 - DNA, 20 bp, synthetic construct
  misc_feature 1..20: note = chemically synthesized
  source 1..20: mol_type = other DNA
gcactatttctgatggaaat

SEQ ID NO: 62975 - DNA, 20 bp, synthetic construct
  misc_feature 1..20: note = chemically synthesized
  source 1..20: mol_type = other DNA
tgatggaaatgagaatgttg

SEQ ID NO: 62976 - DNA, 20 bp, synthetic construct
  misc_feature 1..20: note = chemically synthesized
  source 1..20: mol_type = other DNA
aaatgagaatgttggagaat

SEQ ID NO: 62977 - DNA, 20 bp, synthetic construct
  misc_feature 1..20: note = chemically synthesized
  source 1..20: mol_type = other DNA
tgcaagaaaagagagaactc

SEQ ID NO: 62978 - DNA, 20 bp, synthetic construct
  misc_feature 1..20: note = chemically synthesized
  source 1..20: mol_type = other DNA
agaaaagagagaactcgtgg

SEQ ID NO: 62979 - DNA, 20 bp, synthetic construct
  misc_feature 1..20: note = chemically synthesized
  source 1..20: mol_type = other DNA
gaactcgtgggtggatttag

SEQ ID NO: 62980 - DNA, 20 bp, synthetic construct
  misc_feature 1..20: note = chemically synthesized
  source 1..20: mol_type = other DNA
taggaaggggaaatcgtctc

SEQ ID NO: 62981 - DNA, 20 bp, synthetic construct
  misc_feature 1..20: note = chemically synthesized
  source 1..20: mol_type = other DNA
ggtactctttggaggtgtaa

SEQ ID NO: 62982 - DNA, 20 bp, synthetic construct
  misc_feature 1..20: note = chemically synthesized
  source 1..20: mol_type = other DNA
gctattatttgtatgaaact

SEQ ID NO: 62983 - DNA, 20 bp, synthetic construct
  misc_feature 1..20: note = chemically synthesized
  source 1..20: mol_type = other DNA
tttattatttataatgaagt

SEQ ID NO: 62984 - DNA, 20 bp, synthetic construct
  misc_feature 1..20: note = chemically synthesized
  source 1..20: mol_type = other DNA
cgtcttcaatggtattaata

SEQ ID NO: 62985 - DNA, 20 bp, synthetic construct
  misc_feature 1..20: note = chemically synthesized
  source 1..20: mol_type = other DNA
tatcatatgtattttcctta

SEQ ID NO: 62986 - DNA, 20 bp, synthetic construct
  misc_feature 1..20: note = chemically synthesized
  source 1..20: mol_type = other DNA
aggatttttgtaagaactaa

SEQ ID NO: 62987 - DNA, 20 bp, synthetic construct
  misc_feature 1..20: note = chemically synthesized
  source 1..20: mol_type = other DNA
cataaatatatacaattttt

SEQ ID NO: 62988 - DNA, 20 bp, synthetic construct
  misc_feature 1..20: note = chemically synthesized
  source 1..20: mol_type = other DNA
gttaagtcaagttgatagag

SEQ ID NO: 62989 - DNA, 20 bp, synthetic construct
  misc_feature 1..20: note = chemically synthesized
  source 1..20: mol_type = other DNA
atatggacatttaaaagagg

SEQ ID NO: 62990 - DNA, 20 bp, synthetic construct
  misc_feature 1..20: note = chemically synthesized
  source 1..20: mol_type = other DNA
atgatataaaattagggaaa

SEQ ID NO: 62991 - DNA, 20 bp, synthetic construct
  misc_feature 1..20: note = chemically synthesized
  source 1..20: mol_type = other DNA
cactgaagtttcttgcatat

SEQ ID NO: 62992 - DNA, 20 bp, synthetic construct
  misc_feature 1..20: note = chemically synthesized
  source 1..20: mol_type = other DNA
ctgattagacaaagtctaac

SEQ ID NO: 62993 - DNA, 20 bp, synthetic construct
  misc_feature 1..20: note = chemically synthesized
  source 1..20: mol_type = other DNA
gctgtaattatattgaggtg

SEQ ID NO: 62994 - DNA, 20 bp, synthetic construct
  misc_feature 1..20: note = chemically synthesized
  source 1..20: mol_type = other DNA
aatgaagttaagaaaaaaaa

SEQ ID NO: 62995 - DNA, 20 bp, synthetic construct
  misc_feature 1..20: note = chemically synthesized
  source 1..20: mol_type = other DNA
ctggaaaacattgtgaaaca

SEQ ID NO: 62996 - DNA, 20 bp, synthetic construct
  misc_feature 1..20: note = chemically synthesized
  source 1..20: mol_type = other DNA
gacagctaaaatccctgtct

SEQ ID NO: 62997 - DNA, 20 bp, synthetic construct
  misc_feature 1..20: note = chemically synthesized
  source 1..20: mol_type = other DNA
aatgcctacaagccccctgt

SEQ ID NO: 62998 - DNA, 20 bp, synthetic construct
  misc_feature 1..20: note = chemically synthesized
  source 1..20: mol_type = other DNA
agctcacctcaccatatctc

SEQ ID NO: 62999 - DNA, 20 bp, synthetic construct
  misc_feature 1..20: note = chemically synthesized
  source 1..20: mol_type = other DNA
gaaattcctttgtcatattt

SEQ ID NO: 63000 - DNA, 20 bp, synthetic construct
  misc_feature 1..20: note = chemically synthesized
  source 1..20: mol_type = other DNA
cccactaataacccacaaag

SEQ ID NO: 63001 - DNA, 20 bp, synthetic construct
  misc_feature 1..20: note = chemically synthesized
  source 1..20: mol_type = other DNA
acattaattaagcacattct

SEQ ID NO: 63002 - DNA, 20 bp, synthetic construct
  misc_feature 1..20: note = chemically synthesized
  source 1..20: mol_type = other DNA
ttgtgctatcccttgccctt

SEQ ID NO: 63003 - DNA, 20 bp, synthetic construct
  misc_feature 1..20: note = chemically synthesized
  source 1..20: mol_type = other DNA
tgtattttaaatgaagagat

SEQ ID NO: 63004 - DNA, 20 bp, synthetic construct
  misc_feature 1..20: note = chemically synthesized
  source 1..20: mol_type = other DNA
tttaaatgaagagatgaggg

SEQ ID NO: 63005 - DNA, 20 bp, synthetic construct
  misc_feature 1..20: note = chemically synthesized
  source 1..20: mol_type = other DNA
ttattgttcatttctcgatg

SEQ ID NO: 63006 - DNA, 20 bp, synthetic construct
  misc_feature 1..20: note = chemically synthesized
  source 1..20: mol_type = other DNA
ataccaaactgacatgtagc

SEQ ID NO: 63007 - DNA, 20 bp, synthetic construct
  misc_feature 1..20: note = chemically synthesized
  source 1..20: mol_type = other DNA
acactgttacagatgcatac

SEQ ID NO: 63008 - DNA, 20 bp, synthetic construct
  misc_feature 1..20: note = chemically synthesized
  source 1..20: mol_type = other DNA
aaattaccccagtcaatcta

SEQ ID NO: 63009 - DNA, 20 bp, synthetic construct
  misc_feature 1..20: note = chemically synthesized
  source 1..20: mol_type = other DNA
ccccagtcaatctagagaat

SEQ ID NO: 63010 - DNA, 20 bp, synthetic construct
  misc_feature 1..20: note = chemically synthesized
  source 1..20: mol_type = other DNA
gtacatgctgttcatttact

SEQ ID NO: 63011 - DNA, 20 bp, synthetic construct
  misc_feature 1..20: note = chemically synthesized
  source 1..20: mol_type = other DNA
agatctctcttttctacatt

SEQ ID NO: 63012 - DNA, 20 bp, synthetic construct
  misc_feature 1..20: note = chemically synthesized
  source 1..20: mol_type = other DNA
tgtcatgcatttattcacat

SEQ ID NO: 63013 - DNA, 20 bp, synthetic construct
  misc_feature 1..20: note = chemically synthesized
  source 1..20: mol_type = other DNA
agtttattagttatatcagt

SEQ ID NO: 63014 - DNA, 20 bp, synthetic construct
  misc_feature 1..20: note = chemically synthesized
  source 1..20: mol_type = other DNA
ccattatcagttactcaacc

SEQ ID NO: 63015 - DNA, 20 bp, synthetic construct
  misc_feature 1..20: note = chemically synthesized
  source 1..20: mol_type = other DNA
ggagaaaatgtttataccac

SEQ ID NO: 63016 - DNA, 20 bp, synthetic construct
  misc_feature 1..20: note = chemically synthesized
  source 1..20: mol_type = other DNA
agcccataaccagaggtcca

SEQ ID NO: 63017 - DNA, 20 bp, synthetic construct
  misc_feature 1..20: note = chemically synthesized
  source 1..20: mol_type = other DNA
ccactggattcagtgagcta

SEQ ID NO: 63018 - DNA, 20 bp, synthetic construct
  misc_feature 1..20: note = chemically synthesized
  source 1..20: mol_type = other DNA
tcagccagtgtttaccattg

SEQ ID NO: 63019 - DNA, 20 bp, synthetic construct
  misc_feature 1..20: note = chemically synthesized
  source 1..20: mol_type = other DNA
cagaatgtacatgcgactga

SEQ ID NO: 63020 - DNA, 20 bp, synthetic construct
  misc_feature 1..20: note = chemically synthesized
  source 1..20: mol_type = other DNA
aatacagagaacactgaggg

SEQ ID NO: 63021 - DNA, 20 bp, synthetic construct
  misc_feature 1..20: note = chemically synthesized
  source 1..20: mol_type = other DNA
aaataaatgtgaaagcagac

SEQ ID NO: 63022 - DNA, 20 bp, synthetic construct
  misc_feature 1..20: note = chemically synthesized
  source 1..20: mol_type = other DNA
ggtaattgacagaaggaaac

SEQ ID NO: 63023 - DNA, 20 bp, synthetic construct
  misc_feature 1..20: note = chemically synthesized
  source 1..20: mol_type = other DNA
aactaggatgtgtccagtaa

SEQ ID NO: 63024 - DNA, 20 bp, synthetic construct
  misc_feature 1..20: note = chemically synthesized
  source 1..20: mol_type = other DNA
gataagataatatgaaaaca

SEQ ID NO: 63025 - DNA, 20 bp, synthetic construct
  misc_feature 1..20: note = chemically synthesized
  source 1..20: mol_type = other DNA
aaacagcagtgaactgagat

SEQ ID NO: 63026 - DNA, 20 bp, synthetic construct
  misc_feature 1..20: note = chemically synthesized
  source 1..20: mol_type = other DNA
tgtggagagcactggcattt

SEQ ID NO: 63027 - DNA, 20 bp, synthetic construct
  misc_feature 1..20: note = chemically synthesized
  source 1..20: mol_type = other DNA
gcatttaagaatgtcacact

SEQ ID NO: 63028 - DNA, 20 bp, synthetic construct
  misc_feature 1..20: note = chemically synthesized
  source 1..20: mol_type = other DNA
atattcattatctgaaaatt

SEQ ID NO: 63029 - DNA, 20 bp, synthetic construct
  misc_feature 1..20: note = chemically synthesized
  source 1..20: mol_type = other DNA
attgctatggttgcccaggc

SEQ ID NO: 63030 - DNA, 20 bp, synthetic construct
  misc_feature 1..20: note = chemically synthesized
  source 1..20: mol_type = other DNA
ttttctatttttagtagata

SEQ ID NO: 63031 - DNA, 20 bp, synthetic construct
  misc_feature 1..20: note = chemically synthesized
  source 1..20: mol_type = other DNA
tcctcggcctctgaaagtgc

SEQ ID NO: 63032 - DNA, 20 bp, synthetic construct
  misc_feature 1..20: note = chemically synthesized
  source 1..20: mol_type = other DNA
gtgagccaccacacccagcc

SEQ ID NO: 63033 - DNA, 20 bp, synthetic construct
  misc_feature 1..20: note = chemically synthesized
  source 1..20: mol_type = other DNA
caccacacccagccaagaat

SEQ ID NO: 63034 - DNA, 20 bp, synthetic construct
  misc_feature 1..20: note = chemically synthesized
  source 1..20: mol_type = other DNA
caagaatgtgaattttgtag

SEQ ID NO: 63035 - DNA, 20 bp, synthetic construct
  misc_feature 1..20: note = chemically synthesized
  source 1..20: mol_type = other DNA
aacccatatttctctgaccc

SEQ ID NO: 63036 - DNA, 20 bp, synthetic construct
  misc_feature 1..20: note = chemically synthesized
  source 1..20: mol_type = other DNA
tacactaattaaaatcgata

SEQ ID NO: 63037 - DNA, 20 bp, synthetic construct
  misc_feature 1..20: note = chemically synthesized
  source 1..20: mol_type = other DNA
tactgagttctaaaatcatc

SEQ ID NO: 63038 - DNA, 20 bp, synthetic construct
  misc_feature 1..20: note = chemically synthesized
  source 1..20: mol_type = other DNA
actttgtattcatcacactc

SEQ ID NO: 63039 - DNA, 20 bp, synthetic construct
  misc_feature 1..20: note = chemically synthesized
  source 1..20: mol_type = other DNA
ataggcacctcagactcagc

SEQ ID NO: 63040 - DNA, 20 bp, synthetic construct
  misc_feature 1..20: note = chemically synthesized
  source 1..20: mol_type = other DNA
gtcctcattgtttcctgaac

SEQ ID NO: 63041 - DNA, 20 bp, synthetic construct
  misc_feature 1..20: note = chemically synthesized
  source 1..20: mol_type = other DNA
acttttagaccttatcctgg

SEQ ID NO: 63042 - DNA, 20 bp, synthetic construct
  misc_feature 1..20: note = chemically synthesized
  source 1..20: mol_type = other DNA
caggcagatcacttgaggtc

SEQ ID NO: 63043 - DNA, 20 bp, synthetic construct
  misc_feature 1..20: note = chemically synthesized
  source 1..20: mol_type = other DNA
tattcaggtggctgaggcag

SEQ ID NO: 63044 - DNA, 20 bp, synthetic construct
  misc_feature 1..20: note = chemically synthesized
  source 1..20: mol_type = other DNA
tgcactctagcttgggcaat

SEQ ID NO: 63045 - DNA, 20 bp, synthetic construct
  misc_feature 1..20: note = chemically synthesized
  source 1..20: mol_type = other DNA
tcctctcaatgcaatccata

SEQ ID NO: 63046 - DNA, 20 bp, synthetic construct
  misc_feature 1..20: note = chemically synthesized
  source 1..20: mol_type = other DNA
taaaatcatttcaggtagaa

SEQ ID NO: 63047 - DNA, 20 bp, synthetic construct
  misc_feature 1..20: note = chemically synthesized
  source 1..20: mol_type = other DNA
aaagtgaaaagccaagtctt

SEQ ID NO: 63048 - DNA, 20 bp, synthetic construct
  misc_feature 1..20: note = chemically synthesized
  source 1..20: mol_type = other DNA
ataacagtcctcatggcctt

SEQ ID NO: 63049 - DNA, 20 bp, synthetic construct
  misc_feature 1..20: note = chemically synthesized
  source 1..20: mol_type = other DNA
aatttacctaacattttttt

SEQ ID NO: 63050 - DNA, 20 bp, synthetic construct
  misc_feature 1..20: note = chemically synthesized
  source 1..20: mol_type = other DNA
tagaatcaattttcttatat

SEQ ID NO: 63051 - DNA, 20 bp, synthetic construct
  misc_feature 1..20: note = chemically synthesized
  source 1..20: mol_type = other DNA
tacatctttttgcattttac

SEQ ID NO: 63052 - DNA, 20 bp, synthetic construct
  misc_feature 1..20: note = chemically synthesized
  source 1..20: mol_type = other DNA
aatacatttcttcactaagt

SEQ ID NO: 63053 - DNA, 20 bp, synthetic construct
  misc_feature 1..20: note = chemically synthesized
  source 1..20: mol_type = other DNA
aaaccatgccaccacctttc

SEQ ID NO: 63054 - DNA, 20 bp, synthetic construct
  misc_feature 1..20: note = chemically synthesized
  source 1..20: mol_type = other DNA
ataacatttccccttgtgat

SEQ ID NO: 63055 - DNA, 20 bp, synthetic construct
  misc_feature 1..20: note = chemically synthesized
  source 1..20: mol_type = other DNA
aagcatttctatacatgtct

SEQ ID NO: 63056 - DNA, 20 bp, synthetic construct
  misc_feature 1..20: note = chemically synthesized
  source 1..20: mol_type = other DNA
atacacacatgcatgtgttt

SEQ ID NO: 63057 - DNA, 20 bp, synthetic construct
  misc_feature 1..20: note = chemically synthesized
  source 1..20: mol_type = other DNA
ttatcaagcatccagcattt

SEQ ID NO: 63058 - DNA, 20 bp, synthetic construct
  misc_feature 1..20: note = chemically synthesized
  source 1..20: mol_type = other DNA
tactattaaaggttttccaa

SEQ ID NO: 63059 - DNA, 20 bp, synthetic construct
  misc_feature 1..20: note = chemically synthesized
  source 1..20: mol_type = other DNA
ctattgtacagtgtcaccaa

SEQ ID NO: 63060 - DNA, 20 bp, synthetic construct
  misc_feature 1..20: note = chemically synthesized
  source 1..20: mol_type = other DNA
tacagtgtcaccaacagagt

SEQ ID NO: 63061 - DNA, 20 bp, synthetic construct
  misc_feature 1..20: note = chemically synthesized
  source 1..20: mol_type = other DNA
ctttccttcaatccttcctt

SEQ ID NO: 63062 - DNA, 20 bp, synthetic construct
  misc_feature 1..20: note = chemically synthesized
  source 1..20: mol_type = other DNA
ccttccttttggatatgctc

SEQ ID NO: 63063 - DNA, 20 bp, synthetic construct
  misc_feature 1..20: note = chemically synthesized
  source 1..20: mol_type = other DNA
gtctgccattgtggcattat

SEQ ID NO: 63064 - DNA, 20 bp, synthetic construct
  misc_feature 1..20: note = chemically synthesized
  source 1..20: mol_type = other DNA
ggcattatttgaattcagaa

SEQ ID NO: 63065 - DNA, 20 bp, synthetic construct
  misc_feature 1..20: note = chemically synthesized
  source 1..20: mol_type = other DNA
agaaaagagtgaaaaactac

SEQ ID NO: 63066 - DNA, 20 bp, synthetic construct
  misc_feature 1..20: note = chemically synthesized
  source 1..20: mol_type = other DNA
aactactgggatcttcattc

SEQ ID NO: 63067 - DNA, 20 bp, synthetic construct
  misc_feature 1..20: note = chemically synthesized
  source 1..20: mol_type = other DNA
cttcgttaaatttaatctgg

SEQ ID NO: 63068 - DNA, 20 bp, synthetic construct
  misc_feature 1..20: note = chemically synthesized
  source 1..20: mol_type = other DNA
attttttaaatattctttta

SEQ ID NO: 63069 - DNA, 20 bp, synthetic construct
  misc_feature 1..20: note = chemically synthesized
  source 1..20: mol_type = other DNA
atttcaatataataaaaaat

SEQ ID NO: 63070 - DNA, 20 bp, synthetic construct
  misc_feature 1..20: note = chemically synthesized
  source 1..20: mol_type = other DNA
aattagagttttattatagg

SEQ ID NO: 63071 - DNA, 20 bp, synthetic construct
  misc_feature 1..20: note = chemically synthesized
  source 1..20: mol_type = other DNA
aggcaaagaagaactttata

SEQ ID NO: 63072 - DNA, 20 bp, synthetic construct
  misc_feature 1..20: note = chemically synthesized
  source 1..20: mol_type = other DNA
ttctgcaaaaatgaaactag

SEQ ID NO: 63073 - DNA, 20 bp, synthetic construct
  misc_feature 1..20: note = chemically synthesized
  source 1..20: mol_type = other DNA
gggagatatgtagaggagaa

SEQ ID NO: 63074 - DNA, 20 bp, synthetic construct
  misc_feature 1..20: note = chemically synthesized
  source 1..20: mol_type = other DNA
tgtagaggagaacagggttt

SEQ ID NO: 63075 - DNA, 20 bp, synthetic construct
  misc_feature 1..20: note = chemically synthesized
  source 1..20: mol_type = other DNA
ccaatctcagggcaagttaa

SEQ ID NO: 63076 - DNA, 20 bp, synthetic construct
  misc_feature 1..20: note = chemically synthesized
  source 1..20: mol_type = other DNA
agggcaagttaagggaatag

SEQ ID NO: 63077 - DNA, 20 bp, synthetic construct
  misc_feature 1..20: note = chemically synthesized
  source 1..20: mol_type = other DNA
gaccagcataaaaggcaggg

SEQ ID NO: 63078 - DNA, 20 bp, synthetic construct
  misc_feature 1..20: note = chemically synthesized
  source 1..20: mol_type = other DNA
ccctgtggggcaaagtgaac

SEQ ID NO: 63079 - DNA, 20 bp, synthetic construct
  misc_feature 1..20: note = chemically synthesized
  source 1..20: mol_type = other DNA
tgtgtagacagagaagactc

SEQ ID NO: 63080 - DNA, 20 bp, synthetic construct
  misc_feature 1..20: note = chemically synthesized
  source 1..20: mol_type = other DNA
cccttggacccagaggttct

SEQ ID NO: 63081 - DNA, 20 bp, synthetic construct
  misc_feature 1..20: note = chemically synthesized
  source 1..20: mol_type = other DNA
agaggttctttgagtccttt

SEQ ID NO: 63082 - DNA, 20 bp, synthetic construct
  misc_feature 1..20: note = chemically synthesized
  source 1..20: mol_type = other DNA
tcaagggcactttttctcag

SEQ ID NO: 63083 - DNA, 20 bp, synthetic construct
  misc_feature 1..20: note = chemically synthesized
  source 1..20: mol_type = other DNA
tgcactgtgacaagctgcac

SEQ ID NO: 63084 - DNA, 20 bp, synthetic construct
  misc_feature 1..20: note = chemically synthesized
  source 1..20: mol_type = other DNA
cacgtggatcctgagaactt

SEQ ID NO: 63085 - DNA, 20 bp, synthetic construct
  misc_feature 1..20: note = chemically synthesized
  source 1..20: mol_type = other DNA
tggatcctgagaacttcagg

SEQ ID NO: 63086 - DNA, 20 bp, synthetic construct
  misc_feature 1..20: note = chemically synthesized
  source 1..20: mol_type = other DNA
tcacctgctaattctgcact

SEQ ID NO: 63087 - DNA, 20 bp, synthetic construct
  misc_feature 1..20: note = chemically synthesized
  source 1..20: mol_type = other DNA
taatccttttgtctctccac

SEQ ID NO: 63088 - DNA, 20 bp, synthetic construct
  misc_feature 1..20: note = chemically synthesized
  source 1..20: mol_type = other DNA
caactcaaagatgagaggca

SEQ ID NO: 63089 - DNA, 20 bp, synthetic construct
  misc_feature 1..20: note = chemically synthesized
  source 1..20: mol_type = other DNA
ctataaatcattttacaata

SEQ ID NO: 63090 - DNA, 20 bp, synthetic construct
  misc_feature 1..20: note = chemically synthesized
  source 1..20: mol_type = other DNA
attttacaataaggaataat

SEQ ID NO: 63091 - DNA, 20 bp, synthetic construct
  misc_feature 1..20: note = chemically synthesized
  source 1..20: mol_type = other DNA
tttataaattctgtagtaaa

SEQ ID NO: 63092 - DNA, 20 bp, synthetic construct
  misc_feature 1..20: note = chemically synthesized
  source 1..20: mol_type = other DNA
taaatggaatggaaaggaaa

SEQ ID NO: 63093 - DNA, 20 bp, synthetic construct
  misc_feature 1..20: note = chemically synthesized
  source 1..20: mol_type = other DNA
atacaaaattaaaactaatt

SEQ ID NO: 63094 - DNA, 20 bp, synthetic construct
  misc_feature 1..20: note = chemically synthesized
  source 1..20: mol_type = other DNA
acatgctagttaagtacata

SEQ ID NO: 63095 - DNA, 20 bp, synthetic construct
  misc_feature 1..20: note = chemically synthesized
  source 1..20: mol_type = other DNA
atgtacttatttatgctgat

SEQ ID NO: 63096 - DNA, 20 bp, synthetic construct
  misc_feature 1..20: note = chemically synthesized
  source 1..20: mol_type = other DNA
tatgctgatgggaataacct

SEQ ID NO: 63097 - DNA, 20 bp, synthetic construct
  misc_feature 1..20: note = chemically synthesized
  source 1..20: mol_type = other DNA
taagatttgggcagaaaaaa

SEQ ID NO: 63098 - DNA, 20 bp, synthetic construct
  misc_feature 1..20: note = chemically synthesized
  source 1..20: mol_type = other DNA
gctggcccgcaactttggca

SEQ ID NO: 63099 - DNA, 20 bp, synthetic construct
  misc_feature 1..20: note = chemically synthesized
  source 1..20: mol_type = other DNA
gggaacacaatgcctacttc

SEQ ID NO: 63100 - DNA, 20 bp, synthetic construct
  misc_feature 1..20: note = chemically synthesized
  source 1..20: mol_type = other DNA
ggtatggcttctgcctaata

SEQ ID NO: 63101 - DNA, 20 bp, synthetic construct
  misc_feature 1..20: note = chemically synthesized
  source 1..20: mol_type = other DNA
gagcacttgtttattttaca

SEQ ID NO: 63102 - DNA, 20 bp, synthetic construct
  misc_feature 1..20: note = chemically synthesized
  source 1..20: mol_type = other DNA
gggaaccgtacaaggcatta

SEQ ID NO: 63103 - DNA, 20 bp, synthetic construct
  misc_feature 1..20: note = chemically synthesized
  source 1..20: mol_type = other DNA
caaccctaagacatagcctc

SEQ ID NO: 63104 - DNA, 20 bp, synthetic construct
  misc_feature 1..20: note = chemically synthesized
  source 1..20: mol_type = other DNA
tgccccagaacatctctgta

SEQ ID NO: 63105 - DNA, 20 bp, synthetic construct
  misc_feature 1..20: note = chemically synthesized
  source 1..20: mol_type = other DNA
aatatttattcaagaaaaca

SEQ ID NO: 63106 - DNA, 20 bp, synthetic construct
  misc_feature 1..20: note = chemically synthesized
  source 1..20: mol_type = other DNA
tttattcaagaaaacagtga

SEQ ID NO: 63107 - DNA, 20 bp, synthetic construct
  misc_feature 1..20: note = chemically synthesized
  source 1..20: mol_type = other DNA
agaaaacagtgaatgaatga

SEQ ID NO: 63108 - DNA, 20 bp, synthetic construct
  misc_feature 1..20: note = chemically synthesized
  source 1..20: mol_type = other DNA
aacagtgaatgaatgaacga

SEQ ID NO: 63109 - DNA, 20 bp, synthetic construct
  misc_feature 1..20: note = chemically synthesized
  source 1..20: mol_type = other DNA
atgaatgaacgaatgagtaa

SEQ ID NO: 63110 - DNA, 20 bp, synthetic construct
  misc_feature 1..20: note = chemically synthesized
  source 1..20: mol_type = other DNA
atgagtaaatgagtaaatga

SEQ ID NO: 63111 - DNA, 20 bp, synthetic construct
  misc_feature 1..20: note = chemically synthesized
  source 1..20: mol_type = other DNA
attccttgctttagaacttc

SEQ ID NO: 63112 - DNA, 20 bp, synthetic construct
  misc_feature 1..20: note = chemically synthesized
  source 1..20: mol_type = other DNA
gttatttcctttctgatcat

SEQ ID NO: 63113 - DNA, 20 bp, synthetic construct
  misc_feature 1..20: note = chemically synthesized
  source 1..20: mol_type = other DNA
tttgccataggtaaaattag

SEQ ID NO: 63114 - DNA, 20 bp, synthetic construct
  misc_feature 1..20: note = chemically synthesized
  source 1..20: mol_type = other DNA
ttgattaattttaaacttac

SEQ ID NO: 63115 - DNA, 20 bp, synthetic construct
  misc_feature 1..20: note = chemically synthesized
  source 1..20: mol_type = other DNA
aacttacttgaatacctaaa

SEQ ID NO: 63116 - DNA, 20 bp, synthetic construct
  misc_feature 1..20: note = chemically synthesized
  source 1..20: mol_type = other DNA
agtaactctgtctgtactgc

SEQ ID NO: 63117 - DNA, 20 bp, synthetic construct
  misc_feature 1..20: note = chemically synthesized
  source 1..20: mol_type = other DNA
actgttttgatcacaacatt

SEQ ID NO: 63118 - DNA, 20 bp, synthetic construct
  misc_feature 1..20: note = chemically synthesized
  source 1..20: mol_type = other DNA
gcactgagaactctttatat

SEQ ID NO: 63119 - DNA, 20 bp, synthetic construct
  misc_feature 1..20: note = chemically synthesized
  source 1..20: mol_type = other DNA
gagcatagggaagttctcat

SEQ ID NO: 63120 - DNA, 20 bp, synthetic construct
  misc_feature 1..20: note = chemically synthesized
  source 1..20: mol_type = other DNA
tacaccattagaagtagtca

SEQ ID NO: 63121 - DNA, 20 bp, synthetic construct
  misc_feature 1..20: note = chemically synthesized
  source 1..20: mol_type = other DNA
ccctaaaaatccaaatacca

SEQ ID NO: 63122 - DNA, 20 bp, synthetic construct
  misc_feature 1..20: note = chemically synthesized
  source 1..20: mol_type = other DNA
agaattcatgagaacatcac

SEQ ID NO: 63123 - DNA, 20 bp, synthetic construct
  misc_feature 1..20: note = chemically synthesized
  source 1..20: mol_type = other DNA
gttatattaaaattatttgt

SEQ ID NO: 63124 - DNA, 20 bp, synthetic construct
  misc_feature 1..20: note = chemically synthesized
  source 1..20: mol_type = other DNA
tgttagagtagagcttttgt

SEQ ID NO: 63125 - DNA, 20 bp, synthetic construct
  misc_feature 1..20: note = chemically synthesized
  source 1..20: mol_type = other DNA
tagagcttttgtaagagtct

SEQ ID NO: 63126 - DNA, 20 bp, synthetic construct
  misc_feature 1..20: note = chemically synthesized
  source 1..20: mol_type = other DNA
acagacacccaggcctactt

SEQ ID NO: 63127 - DNA, 20 bp, synthetic construct
  misc_feature 1..20: note = chemically synthesized
  source 1..20: mol_type = other DNA
cccaggcctacttgagggtt

SEQ ID NO: 63128 - DNA, 20 bp, synthetic construct
  misc_feature 1..20: note = chemically synthesized
  source 1..20: mol_type = other DNA
agacgatgaaaaagaaccta

SEQ ID NO: 63129 - DNA, 20 bp, synthetic construct
  misc_feature 1..20: note = chemically synthesized
  source 1..20: mol_type = other DNA
attgggtattaagttcatca

SEQ ID NO: 63130 - DNA, 20 bp, synthetic construct
  misc_feature 1..20: note = chemically synthesized
  source 1..20: mol_type = other DNA
tgaaagttaaaacaaagtat

SEQ ID NO: 63131 - DNA, 20 bp, synthetic construct
  misc_feature 1..20: note = chemically synthesized
  source 1..20: mol_type = other DNA
gttaaaacaaagtataggaa

SEQ ID NO: 63132 - DNA, 20 bp, synthetic construct
  misc_feature 1..20: note = chemically synthesized
  source 1..20: mol_type = other DNA
ataaactatgttcagtatgt

SEQ ID NO: 63133 - DNA, 20 bp, synthetic construct
  misc_feature 1..20: note = chemically synthesized
  source 1..20: mol_type = other DNA
tgttcagtatgtctgaatga

SEQ ID NO: 63134 - DNA, 20 bp, synthetic construct
  misc_feature 1..20: note = chemically synthesized
  source 1..20: mol_type = other DNA
ggaagagaggacgtaataat

SEQ ID NO: 63135 - DNA, 20 bp, synthetic construct
  misc_feature 1..20: note = chemically synthesized
  source 1..20: mol_type = other DNA
gaggacgtaataatgtgaat

SEQ ID NO: 63136 - DNA, 20 bp, synthetic construct
  misc_feature 1..20: note = chemically synthesized
  source 1..20: mol_type = other DNA
ataaaataatttaatgtcag

SEQ ID NO: 63137 - DNA, 20 bp, synthetic construct
  misc_feature 1..20: note = chemically synthesized
  source 1..20: mol_type = other DNA
ttgagcttcagagcagtcct

SEQ ID NO: 63138 - DNA, 20 bp, synthetic construct
  misc_feature 1..20: note = chemically synthesized
  source 1..20: mol_type = other DNA
ttaatgcctacatgtttgta

SEQ ID NO: 63139 - DNA, 20 bp, synthetic construct
  misc_feature 1..20: note = chemically synthesized
  source 1..20: mol_type = other DNA
aggttaaaaaaaagctaatt

SEQ ID NO: 63140 - DNA, 20 bp, synthetic construct
  misc_feature 1..20: note = chemically synthesized
  source 1..20: mol_type = other DNA
tgtgtgtgcggtttgtttct

SEQ ID NO: 63141 - DNA, 20 bp, synthetic construct
  misc_feature 1..20: note = chemically synthesized
  source 1..20: mol_type = other DNA
ttaattaattctgagagctg

SEQ ID NO: 63142 - DNA, 20 bp, synthetic construct
  misc_feature 1..20: note = chemically synthesized
  source 1..20: mol_type = other DNA
ttgctaaaatgtctcacttg

SEQ ID NO: 63143 - DNA, 20 bp, synthetic construct
  misc_feature 1..20: note = chemically synthesized
  source 1..20: mol_type = other DNA
ataaaaccacactcccatag

SEQ ID NO: 63144 - DNA, 20 bp, synthetic construct
  misc_feature 1..20: note = chemically synthesized
  source 1..20: mol_type = other DNA
cttaagaaagattaatagac

SEQ ID NO: 63145 - DNA, 20 bp, synthetic construct
  misc_feature 1..20: note = chemically synthesized
  source 1..20: mol_type = other DNA
tgtgttgtggtcagtggggc

SEQ ID NO: 63146 - DNA, 20 bp, synthetic construct
  misc_feature 1..20: note = chemically synthesized
  source 1..20: mol_type = other DNA
cagtggggctggaataaaag

SEQ ID NO: 63147 - DNA, 20 bp, synthetic construct
  misc_feature 1..20: note = chemically synthesized
  source 1..20: mol_type = other DNA
cctgctgtggcatccattca

SEQ ID NO: 63148 - DNA, 20 bp, synthetic construct
  misc_feature 1..20: note = chemically synthesized
  source 1..20: mol_type = other DNA
tagtgaagatgtcagtaagc

SEQ ID NO: 63149 - DNA, 20 bp, synthetic construct
  misc_feature 1..20: note = chemically synthesized
  source 1..20: mol_type = other DNA
tgaatagtttttcaggaact

SEQ ID NO: 63150 - DNA, 20 bp, synthetic construct
  misc_feature 1..20: note = chemically synthesized
  source 1..20: mol_type = other DNA
agcttgcagccttgtccctg

SEQ ID NO: 63151 - DNA, 20 bp, synthetic construct
  misc_feature 1..20: note = chemically synthesized
  source 1..20: mol_type = other DNA
ccttgtccctgcagggtatt

SEQ ID NO: 63152 - DNA, 20 bp, synthetic construct
  misc_feature 1..20: note = chemically synthesized
  source 1..20: mol_type = other DNA
agcaacccctgccttgaagc

SEQ ID NO: 63153 - DNA, 20 bp, synthetic construct
  misc_feature 1..20: note = chemically synthesized
  source 1..20: mol_type = other DNA
agcagttgccaacacaagag

SEQ ID NO: 63154 - DNA, 20 bp, synthetic construct
  misc_feature 1..20: note = chemically synthesized
  source 1..20: mol_type = other DNA
tttctgagcataagaagttg

SEQ ID NO: 63155 - DNA, 20 bp, synthetic construct
  misc_feature 1..20: note = chemically synthesized
  source 1..20: mol_type = other DNA
aggtgacaatttctgccaat

SEQ ID NO: 63156 - DNA, 20 bp, synthetic construct
  misc_feature 1..20: note = chemically synthesized
  source 1..20: mol_type = other DNA
ctttgacaattttggtcttt

SEQ ID NO: 63157 - DNA, 20 bp, synthetic construct
  misc_feature 1..20: note = chemically synthesized
  source 1..20: mol_type = other DNA
tctgtgcattttctttgacc

SEQ ID NO: 63158 - DNA, 20 bp, synthetic construct
  misc_feature 1..20: note = chemically synthesized
  source 1..20: mol_type = other DNA
atatacatgcctcttatatc

SEQ ID NO: 63159 - DNA, 20 bp, synthetic construct
  misc_feature 1..20: note = chemically synthesized
  source 1..20: mol_type = other DNA
cttatatcagggatgtgaaa

SEQ ID NO: 63160 - DNA, 20 bp, synthetic construct
  misc_feature 1..20: note = chemically synthesized
  source 1..20: mol_type = other DNA
attttaaagacgtcttttcc

SEQ ID NO: 63161 - DNA, 20 bp, synthetic construct
  misc_feature 1..20: note = chemically synthesized
  source 1..20: mol_type = other DNA
aacatgtgaaatcttttctc

SEQ ID NO: 63162 - DNA, 20 bp, synthetic construct
  misc_feature 1..20: note = chemically synthesized
  source 1..20: mol_type = other DNA
attgctttagttttttacag

SEQ ID NO: 63163 - DNA, 20 bp, synthetic construct
  misc_feature 1..20: note = chemically synthesized
  source 1..20: mol_type = other DNA
ctttagttttttacagagga

SEQ ID NO: 63164 - DNA, 20 bp, synthetic construct
  misc_feature 1..20: note = chemically synthesized
  source 1..20: mol_type = other DNA
caaacactttctgcgtgtgt

SEQ ID NO: 63165 - DNA, 20 bp, synthetic construct
  misc_feature 1..20: note = chemically synthesized
  source 1..20: mol_type = other DNA
tctgcgtgtgtgagaataat

SEQ ID NO: 63166 - DNA, 20 bp, synthetic construct
  misc_feature 1..20: note = chemically synthesized
  source 1..20: mol_type = other DNA
ttttttcacaagtacctgat

SEQ ID NO: 63167 - DNA, 20 bp, synthetic construct
  misc_feature 1..20: note = chemically synthesized
  source 1..20: mol_type = other DNA
ataatagagaaagcatttaa

SEQ ID NO: 63168 - DNA, 20 bp, synthetic construct
  misc_feature 1..20: note = chemically synthesized
  source 1..20: mol_type = other DNA
ccttctgataactagaaata

SEQ ID NO: 63169 - DNA, 20 bp, synthetic construct
  misc_feature 1..20: note = chemically synthesized
  source 1..20: mol_type = other DNA
attttgtgtaatcgtagttt

SEQ ID NO: 63170 - DNA, 20 bp, synthetic construct
  misc_feature 1..20: note = chemically synthesized
  source 1..20: mol_type = other DNA
actttccttactaaaccgac

SEQ ID NO: 63171 - DNA, 20 bp, synthetic construct
  misc_feature 1..20: note = chemically synthesized
  source 1..20: mol_type = other DNA
catgggtttccaggtagggg

SEQ ID NO: 63172 - DNA, 20 bp, synthetic construct
  misc_feature 1..20: note = chemically synthesized
  source 1..20: mol_type = other DNA
ttccaggtaggggcaggatt

SEQ ID NO: 63173 - DNA, 20 bp, synthetic construct
  misc_feature 1..20: note = chemically synthesized
  source 1..20: mol_type = other DNA
caaaagtttttcctcacctg

SEQ ID NO: 63174 - DNA, 20 bp, synthetic construct
  misc_feature 1..20: note = chemically synthesized
  source 1..20: mol_type = other DNA
tacaaggggaaaaagtacag

SEQ ID NO: 63175 - DNA, 20 bp, synthetic construct
  misc_feature 1..20: note = chemically synthesized
  source 1..20: mol_type = other DNA
ttgggaagctatagagaaag

SEQ ID NO: 63176 - DNA, 20 bp, synthetic construct
  misc_feature 1..20: note = chemically synthesized
  source 1..20: mol_type = other DNA
atataaagagaaataggaac

SEQ ID NO: 63177 - DNA, 20 bp, synthetic construct
  misc_feature 1..20: note = chemically synthesized
  source 1..20: mol_type = other DNA
accccattgatagtcacact

SEQ ID NO: 63178 - DNA, 20 bp, synthetic construct
  misc_feature 1..20: note = chemically synthesized
  source 1..20: mol_type = other DNA
attaagaaaaacaacaacaa

SEQ ID NO: 63179 - DNA, 20 bp, synthetic construct
  misc_feature 1..20: note = chemically synthesized
  source 1..20: mol_type = other DNA
agatatgcttagaaccgagg

SEQ ID NO: 63180 - DNA, 20 bp, synthetic construct
  misc_feature 1..20: note = chemically synthesized
  source 1..20: mol_type = other DNA
tccatctacatatcccaaag

SEQ ID NO: 63181 - DNA, 20 bp, synthetic construct
  misc_feature 1..20: note = chemically synthesized
  source 1..20: mol_type = other DNA
acgtaaatacacttgcaaag

SEQ ID NO: 63182 - DNA, 20 bp, synthetic construct
  misc_feature 1..20: note = chemically synthesized
  source 1..20: mol_type = other DNA
tatatcttagagggagggct

SEQ ID NO: 63183 - DNA, 20 bp, synthetic construct
  misc_feature 1..20: note = chemically synthesized
  source 1..20: mol_type = other DNA
caccctgtggagccacaccc

SEQ ID NO: 63184 - DNA, 20 bp, synthetic construct
  misc_feature 1..20: note = chemically synthesized
  source 1..20: mol_type = other DNA
ccctgtggggcaaggtgaac

SEQ ID NO: 63185 - DNA, 20 bp, synthetic construct
  misc_feature 1..20: note = chemically synthesized
  source 1..20: mol_type = other DNA
tgtggagacagagaagactc

SEQ ID NO: 63186 - DNA, 20 bp, synthetic construct
  misc_feature 1..20: note = chemically synthesized
  source 1..20: mol_type = other DNA
cccttggacccagaggttct

SEQ ID NO: 63187 - DNA, 20 bp, synthetic construct
  misc_feature 1..20: note = chemically synthesized
  source 1..20: mol_type = other DNA
agaggttctttgagtccttt

SEQ ID NO: 63188 - DNA, 20 bp, synthetic construct
  misc_feature 1..20: note = chemically synthesized
  source 1..20: mol_type = other DNA
tcaagggcacctttgccaca

SEQ ID NO: 63189 - DNA, 20 bp, synthetic construct
  misc_feature 1..20: note = chemically synthesized
  source 1..20: mol_type = other DNA
tgcactgtgacaagctgcac

SEQ ID NO: 63190 - DNA, 20 bp, synthetic construct
  misc_feature 1..20: note = chemically synthesized
  source 1..20: mol_type = other DNA
cacgtggatcctgagaactt

SEQ ID NO: 63191 - DNA, 20 bp, synthetic construct
  misc_feature 1..20: note = chemically synthesized
  source 1..20: mol_type = other DNA
tggatcctgagaacttcagg

SEQ ID NO: 63192 - DNA, 20 bp, synthetic construct
  misc_feature 1..20: note = chemically synthesized
  source 1..20: mol_type = other DNA
ttaagttcatgtcataggaa

SEQ ID NO: 63193 - DNA, 20 bp, synthetic construct
  misc_feature 1..20: note = chemically synthesized
  source 1..20: mol_type = other DNA
cataggaaggggataagtaa

SEQ ID NO: 63194 - DNA, 20 bp, synthetic construct
  misc_feature 1..20: note = chemically synthesized
  source 1..20: mol_type = other DNA
ataagtaacagggtacagtt

SEQ ID NO: 63195 - DNA, 20 bp, synthetic construct
  misc_feature 1..20: note = chemically synthesized
  source 1..20: mol_type = other DNA
cagtttagaatgggaaacag

SEQ ID NO: 63196 - DNA, 20 bp, synthetic construct
  misc_feature 1..20: note = chemically synthesized
  source 1..20: mol_type = other DNA
ttgcatcagtgtggaagtct

SEQ ID NO: 63197 - DNA, 20 bp, synthetic construct
  misc_feature 1..20: note = chemically synthesized
  source 1..20: mol_type = other DNA
ctgcctagtacattactatt

SEQ ID NO: 63198 - DNA, 20 bp, synthetic construct
  misc_feature 1..20: note = chemically synthesized
  source 1..20: mol_type = other DNA
cataatcattatacatattt

SEQ ID NO: 63199 - DNA, 20 bp, synthetic construct
  misc_feature 1..20: note = chemically synthesized
  source 1..20: mol_type = other DNA
tgtacacatattgaccaaat

SEQ ID NO: 63200 - DNA, 20 bp, synthetic construct
  misc_feature 1..20: note = chemically synthesized
  source 1..20: mol_type = other DNA
tgcctctttgcaccattcta

SEQ ID NO: 63201 - DNA, 20 bp, synthetic construct
  misc_feature 1..20: note = chemically synthesized
  source 1..20: mol_type = other DNA
aagaataacagtgataattt

SEQ ID NO: 63202 - DNA, 20 bp, synthetic construct
  misc_feature 1..20: note = chemically synthesized
  source 1..20: mol_type = other DNA
ttctgcttttattttatggt

SEQ ID NO: 63203 - DNA, 20 bp, synthetic construct
  misc_feature 1..20: note = chemically synthesized
  source 1..20: mol_type = other DNA
attttatggttgggataagg

SEQ ID NO: 63204 - DNA, 20 bp, synthetic construct
  misc_feature 1..20: note = chemically synthesized
  source 1..20: mol_type = other DNA
tgggataaggctggattatt

SEQ ID NO: 63205 - DNA, 20 bp, synthetic construct
  misc_feature 1..20: note = chemically synthesized
  source 1..20: mol_type = other DNA
gctggcccatcactttggca

SEQ ID NO: 63206 - DNA, 20 bp, synthetic construct
  misc_feature 1..20: note = chemically synthesized
  source 1..20: mol_type = other DNA
taagtccaactactaaactg

SEQ ID NO: 63207 - DNA, 20 bp, synthetic construct
  misc_feature 1..20: note = chemically synthesized
  source 1..20: mol_type = other DNA
ttatgaagggccttgagcat

SEQ ID NO: 63208 - DNA, 20 bp, synthetic construct
  misc_feature 1..20: note = chemically synthesized
  source 1..20: mol_type = other DNA
atgatgtatttaaattattt

SEQ ID NO: 63209 - DNA, 20 bp, synthetic construct
  misc_feature 1..20: note = chemically synthesized
  source 1..20: mol_type = other DNA
tctgaatattttactaaaaa

SEQ ID NO: 63210 - DNA, 20 bp, synthetic construct
  misc_feature 1..20: note = chemically synthesized
  source 1..20: mol_type = other DNA
gccttattcatccctcagaa

SEQ ID NO: 63211 - DNA, 20 bp, synthetic construct
  misc_feature 1..20: note = chemically synthesized
  source 1..20: mol_type = other DNA
ttattgttttagctgtcctc

SEQ ID NO: 63212 - DNA, 20 bp, synthetic construct
  misc_feature 1..20: note = chemically synthesized
  source 1..20: mol_type = other DNA
ctacttgaagaaggaaaaac

SEQ ID NO: 63213 - DNA, 20 bp, synthetic construct
  misc_feature 1..20: note = chemically synthesized
  source 1..20: mol_type = other DNA
ctcccccactcacagtgacc

SEQ ID NO: 63214 - DNA, 20 bp, synthetic construct
  misc_feature 1..20: note = chemically synthesized
  source 1..20: mol_type = other DNA
tatgaaaagttaggactgag

SEQ ID NO: 63215 - DNA, 20 bp, synthetic construct
  misc_feature 1..20: note = chemically synthesized
  source 1..20: mol_type = other DNA
atggaagtcccattcttcct

SEQ ID NO: 63216 - DNA, 20 bp, synthetic construct
  misc_feature 1..20: note = chemically synthesized
  source 1..20: mol_type = other DNA
ctagattctggaaataaaat

SEQ ID NO: 63217 - DNA, 20 bp, synthetic construct
  misc_feature 1..20: note = chemically synthesized
  source 1..20: mol_type = other DNA
tcctctctcccagtcaaatt

SEQ ID NO: 63218 - DNA, 20 bp, synthetic construct
  misc_feature 1..20: note = chemically synthesized
  source 1..20: mol_type = other DNA
tcagtaataagtgatgatag

SEQ ID NO: 63219 - DNA, 20 bp, synthetic construct
  misc_feature 1..20: note = chemically synthesized
  source 1..20: mol_type = other DNA
gatgatagaagggtatatag

SEQ ID NO: 63220 - DNA, 20 bp, synthetic construct
  misc_feature 1..20: note = chemically synthesized
  source 1..20: mol_type = other DNA
agaagaattttattatatga

SEQ ID NO: 63221 - DNA, 20 bp, synthetic construct
  misc_feature 1..20: note = chemically synthesized
  source 1..20: mol_type = other DNA
caccataaacaaaaataaat

SEQ ID NO: 63222 - DNA, 20 bp, synthetic construct
  misc_feature 1..20: note = chemically synthesized
  source 1..20: mol_type = other DNA
ataaacaaaaataaatttga

SEQ ID NO: 63223 - DNA, 20 bp, synthetic construct
  misc_feature 1..20: note = chemically synthesized
  source 1..20: mol_type = other DNA
aaataaatttgaatgggtta

SEQ ID NO: 63224 - DNA, 20 bp, synthetic construct
  misc_feature 1..20: note = chemically synthesized
  source 1..20: mol_type = other DNA
attcacgttgcagccgtttt

SEQ ID NO: 63225 - DNA, 20 bp, synthetic construct
  misc_feature 1..20: note = chemically synthesized
  source 1..20: mol_type = other DNA
gaaaatcctgccatttatgg

SEQ ID NO: 63226 - DNA, 20 bp, synthetic construct
  misc_feature 1..20: note = chemically synthesized
  source 1..20: mol_type = other DNA
tggcagaattgatgaacctg

SEQ ID NO: 63227 - DNA, 20 bp, synthetic construct
  misc_feature 1..20: note = chemically synthesized
  source 1..20: mol_type = other DNA
acagtagaggtatggtttcc

SEQ ID NO: 63228 - DNA, 20 bp, synthetic construct
  misc_feature 1..20: note = chemically synthesized
  source 1..20: mol_type = other DNA
aggtatggtttccaggggtt

SEQ ID NO: 63229 - DNA, 20 bp, synthetic construct
  misc_feature 1..20: note = chemically synthesized
  source 1..20: mol_type = other DNA
tttccaggggttgggggtgg

SEQ ID NO: 63230 - DNA, 20 bp, synthetic construct
  misc_feature 1..20: note = chemically synthesized
  source 1..20: mol_type = other DNA
aatcaggaaactattactca

SEQ ID NO: 63231 - DNA, 20 bp, synthetic construct
  misc_feature 1..20: note = chemically synthesized
  source 1..20: mol_type = other DNA
ggtataaaatttcagttatg

SEQ ID NO: 63232 - DNA, 20 bp, synthetic construct
  misc_feature 1..20: note = chemically synthesized
  source 1..20: mol_type = other DNA
taaaatttcagttatgtggg

SEQ ID NO: 63233 - DNA, 20 bp, synthetic construct
  misc_feature 1..20: note = chemically synthesized
  source 1..20: mol_type = other DNA
gtatatttaaaatttgcaaa

SEQ ID NO: 63234 - DNA, 20 bp, synthetic construct
  misc_feature 1..20: note = chemically synthesized
  source 1..20: mol_type = other DNA
gatttttttttttttttaga

SEQ ID NO: 63235 - DNA, 20 bp, synthetic construct
  misc_feature 1..20: note = chemically synthesized
  source 1..20: mol_type = other DNA
tttgctcttgttgtccaggc

SEQ ID NO: 63236 - DNA, 20 bp, synthetic construct
  misc_feature 1..20: note = chemically synthesized
  source 1..20: mol_type = other DNA
ctcactgcaacctccgcctc

SEQ ID NO: 63237 - DNA, 20 bp, synthetic construct
  misc_feature 1..20: note = chemically synthesized
  source 1..20: mol_type = other DNA
aaatctcctgcctcagcctc

SEQ ID NO: 63238 - DNA, 20 bp, synthetic construct
  misc_feature 1..20: note = chemically synthesized
  source 1..20: mol_type = other DNA
gcctcagcctcccgagtagc

SEQ ID NO: 63239 - DNA, 20 bp, synthetic construct
  misc_feature 1..20: note = chemically synthesized
  source 1..20: mol_type = other DNA
ttttgtatttttagtagaga

SEQ ID NO: 63240 - DNA, 20 bp, synthetic construct
  misc_feature 1..20: note = chemically synthesized
  source 1..20: mol_type = other DNA
gcctcggccacccaaagggc

SEQ ID NO: 63241 - DNA, 20 bp, synthetic construct
  misc_feature 1..20: note = chemically synthesized
  source 1..20: mol_type = other DNA
gtgagccaccgggcctggcc

SEQ ID NO: 63242 - DNA, 20 bp, synthetic construct
  misc_feature 1..20: note = chemically synthesized
  source 1..20: mol_type = other DNA
aaaggtaactatgtgagata

SEQ ID NO: 63243 - DNA, 20 bp, synthetic construct
  misc_feature 1..20: note = chemically synthesized
  source 1..20: mol_type = other DNA
aatatatacaatttttattt

SEQ ID NO: 63244 - DNA, 20 bp, synthetic construct
  misc_feature 1..20: note = chemically synthesized
  source 1..20: mol_type = other DNA
atgatacctcaataaagttg

SEQ ID NO: 63245 - DNA, 20 bp, synthetic construct
  misc_feature 1..20: note = chemically synthesized
  source 1..20: mol_type = other DNA
aaagttgaagaataataaaa

SEQ ID NO: 63246 - DNA, 20 bp, synthetic construct
  misc_feature 1..20: note = chemically synthesized
  source 1..20: mol_type = other DNA
taaaaaagaatagacatcac

SEQ ID NO: 63247 - DNA, 20 bp, synthetic construct
  misc_feature 1..20: note = chemically synthesized
  source 1..20: mol_type = other DNA
aaaaaatgcatcttgatgat

SEQ ID NO: 63248 - DNA, 20 bp, synthetic construct
  misc_feature 1..20: note = chemically synthesized
  source 1..20: mol_type = other DNA
ctcatgtgtaagtaagatag

SEQ ID NO: 63249 - DNA, 20 bp, synthetic construct
  misc_feature 1..20: note = chemically synthesized
  source 1..20: mol_type = other DNA
gaacaactatactttttgaa

SEQ ID NO: 63250 - DNA, 20 bp, synthetic construct
  misc_feature 1..20: note = chemically synthesized
  source 1..20: mol_type = other DNA
aaattcagtcacgaaaaaac

SEQ ID NO: 63251 - DNA, 20 bp, synthetic construct
  misc_feature 1..20: note = chemically synthesized
  source 1..20: mol_type = other DNA
actttgggaggcctagacag

SEQ ID NO: 63252 - DNA, 20 bp, synthetic construct
  misc_feature 1..20: note = chemically synthesized
  source 1..20: mol_type = other DNA
gacaggcggatcacgacgtc

SEQ ID NO: 63253 - DNA, 20 bp, synthetic construct
  misc_feature 1..20: note = chemically synthesized
  source 1..20: mol_type = other DNA
aatttgggaggctgaggcag

SEQ ID NO: 63254 - DNA, 20 bp, synthetic construct
  misc_feature 1..20: note = chemically synthesized
  source 1..20: mol_type = other DNA
gagcggtggagccaagatga

SEQ ID NO: 63255 - DNA, 20 bp, synthetic construct
  misc_feature 1..20: note = chemically synthesized
  source 1..20: mol_type = other DNA
tccagtctatagctcccatc

SEQ ID NO: 63256 - DNA, 20 bp, synthetic construct
  misc_feature 1..20: note = chemically synthesized
  source 1..20: mol_type = other DNA
catcgtgagtgacgcagaag

SEQ ID NO: 63257 - DNA, 20 bp, synthetic construct
  misc_feature 1..20: note = chemically synthesized
  source 1..20: mol_type = other DNA
tcacagggaagtgccaggca

SEQ ID NO: 63258 - DNA, 20 bp, synthetic construct
  misc_feature 1..20: note = chemically synthesized
  source 1..20: mol_type = other DNA
cacctcacccgggaagcaca

SEQ ID NO: 63259 - DNA, 20 bp, synthetic construct
  misc_feature 1..20: note = chemically synthesized
  source 1..20: mol_type = other DNA
ccgggaagcacaaggggtca

SEQ ID NO: 63260 - DNA, 20 bp, synthetic construct
  misc_feature 1..20: note = chemically synthesized
  source 1..20: mol_type = other DNA
tccctttcctagtcaaagaa

SEQ ID NO: 63261 - DNA, 20 bp, synthetic construct
  misc_feature 1..20: note = chemically synthesized
  source 1..20: mol_type = other DNA
gacagatggcacctggaaaa

SEQ ID NO: 63262 - DNA, 20 bp, synthetic construct
  misc_feature 1..20: note = chemically synthesized
  source 1..20: mol_type = other DNA
tatatcccatgcctggctca

SEQ ID NO: 63263 - DNA, 20 bp, synthetic construct
  misc_feature 1..20: note = chemically synthesized
  source 1..20: mol_type = other DNA
ggtggcagtgaggctggggg

SEQ ID NO: 63264 - DNA, 20 bp, synthetic construct
  misc_feature 1..20: note = chemically synthesized
  source 1..20: mol_type = other DNA
aagccgcctggaagctcgaa

SEQ ID NO: 63265 - DNA, 20 bp, synthetic construct
  misc_feature 1..20: note = chemically synthesized
  source 1..20: mol_type = other DNA
ccctgtctgacagctttgaa

SEQ ID NO: 63266 - DNA, 20 bp, synthetic construct
  misc_feature 1..20: note = chemically synthesized
  source 1..20: mol_type = other DNA
caggcagactgcctcctcaa

SEQ ID NO: 63267 - DNA, 20 bp, synthetic construct
  misc_feature 1..20: note = chemically synthesized
  source 1..20: mol_type = other DNA
ctcaagtgggtccctgaccc

SEQ ID NO: 63268 - DNA, 20 bp, synthetic construct
  misc_feature 1..20: note = chemically synthesized
  source 1..20: mol_type = other DNA
ctctaagacaaaacttccag

SEQ ID NO: 63269 - DNA, 20 bp, synthetic construct
  misc_feature 1..20: note = chemically synthesized
  source 1..20: mol_type = other DNA
atacccaggaaaacagcttc

SEQ ID NO: 63270 - DNA, 20 bp, synthetic construct
  misc_feature 1..20: note = chemically synthesized
  source 1..20: mol_type = other DNA
actccaacagacctgcagct

SEQ ID NO: 63271 - DNA, 20 bp, synthetic construct
  misc_feature 1..20: note = chemically synthesized
  source 1..20: mol_type = other DNA
aaactggacactctaaaaat

SEQ ID NO: 63272 - DNA, 20 bp, synthetic construct
  misc_feature 1..20: note = chemically synthesized
  source 1..20: mol_type = other DNA
caatggaacaaagctgggca

SEQ ID NO: 63273 - DNA, 20 bp, synthetic construct
  misc_feature 1..20: note = chemically synthesized
  source 1..20: mol_type = other DNA
ctgggcagagaatgactttg

SEQ ID NO: 63274 - DNA, 20 bp, synthetic construct
  misc_feature 1..20: note = chemically synthesized
  source 1..20: mol_type = other DNA
aaactttgaaaaaaaattag

SEQ ID NO: 63275 - DNA, 20 bp, synthetic construct
  misc_feature 1..20: note = chemically synthesized
  source 1..20: mol_type = other DNA
tttgaaaaaaaattagatga

SEQ ID NO: 63276 - DNA, 20 bp, synthetic construct
  misc_feature 1..20: note = chemically synthesized
  source 1..20: mol_type = other DNA
aaattagatgaatggataac

SEQ ID NO: 63277 - DNA, 20 bp, synthetic construct
  misc_feature 1..20: note = chemically synthesized
  source 1..20: mol_type = other DNA
cgatgagatcaactggaaga

SEQ ID NO: 63278 - DNA, 20 bp, synthetic construct
  misc_feature 1..20: note = chemically synthesized
  source 1..20: mol_type = other DNA
tatcaatgacgaaagatgaa

SEQ ID NO: 63279 - DNA, 20 bp, synthetic construct
  misc_feature 1..20: note = chemically synthesized
  source 1..20: mol_type = other DNA
gaagagaagtttagagaaaa

SEQ ID NO: 63280 - DNA, 20 bp, synthetic construct
  misc_feature 1..20: note = chemically synthesized
  source 1..20: mol_type = other DNA
gtgtagctgaaagtgatggg

SEQ ID NO: 63281 - DNA, 20 bp, synthetic construct
  misc_feature 1..20: note = chemically synthesized
  source 1..20: mol_type = other DNA
ccaagttggaaaacactctg

SEQ ID NO: 63282 - DNA, 20 bp, synthetic construct
  misc_feature 1..20: note = chemically synthesized
  source 1..20: mol_type = other DNA
agggcagccagagagaaagg

SEQ ID NO: 63283 - DNA, 20 bp, synthetic construct
  misc_feature 1..20: note = chemically synthesized
  source 1..20: mol_type = other DNA
tattcaacattgttaaagaa

SEQ ID NO: 63284 - DNA, 20 bp, synthetic construct
  misc_feature 1..20: note = chemically synthesized
  source 1..20: mol_type = other DNA
aaagaaaagaattttcaacc

SEQ ID NO: 63285 - DNA, 20 bp, synthetic construct
  misc_feature 1..20: note = chemically synthesized
  source 1..20: mol_type = other DNA
accagctaacatcataatga

SEQ ID NO: 63286 - DNA, 20 bp, synthetic construct
  misc_feature 1..20: note = chemically synthesized
  source 1..20: mol_type = other DNA
aaaagacacagactggcaaa

SEQ ID NO: 63287 - DNA, 20 bp, synthetic construct
  misc_feature 1..20: note = chemically synthesized
  source 1..20: mol_type = other DNA
acagactggcaaattggata

SEQ ID NO: 63288 - DNA, 20 bp, synthetic construct
  misc_feature 1..20: note = chemically synthesized
  source 1..20: mol_type = other DNA
cacacataggctcgaaataa

SEQ ID NO: 63289 - DNA, 20 bp, synthetic construct
  misc_feature 1..20: note = chemically synthesized
  source 1..20: mol_type = other DNA
ggctcgaaataaaaggatgg

SEQ ID NO: 63290 - DNA, 20 bp, synthetic construct
  misc_feature 1..20: note = chemically synthesized
  source 1..20: mol_type = other DNA
aatggaaaacaaaaaaaggc

SEQ ID NO: 63291 - DNA, 20 bp, synthetic construct
  misc_feature 1..20: note = chemically synthesized
  source 1..20: mol_type = other DNA
aggccattacataatggcaa

SEQ ID NO: 63292 - DNA, 20 bp, synthetic construct
  misc_feature 1..20: note = chemically synthesized
  source 1..20: mol_type = other DNA
ccagattcataaaacaagtc

SEQ ID NO: 63293 - DNA, 20 bp, synthetic construct
  misc_feature 1..20: note = chemically synthesized
  source 1..20: mol_type = other DNA
caacgagacagaaagttaac

SEQ ID NO: 63294 - DNA, 20 bp, synthetic construct
  misc_feature 1..20: note = chemically synthesized
  source 1..20: mol_type = other DNA
gaaagttaacaaggatatcc

SEQ ID NO: 63295 - DNA, 20 bp, synthetic construct
  misc_feature 1..20: note = chemically synthesized
  source 1..20: mol_type = other DNA
aactctccaccccaaatcaa

SEQ ID NO: 63296 - DNA, 20 bp, synthetic construct
  misc_feature 1..20: note = chemically synthesized
  source 1..20: mol_type = other DNA
agtgcaatcaaactagaact

SEQ ID NO: 63297 - DNA, 20 bp, synthetic construct
  misc_feature 1..20: note = chemically synthesized
  source 1..20: mol_type = other DNA
ggaaactgaacagcctgctc

SEQ ID NO: 63298 - DNA, 20 bp, synthetic construct
  misc_feature 1..20: note = chemically synthesized
  source 1..20: mol_type = other DNA
agcctgctcctgaatgacta

SEQ ID NO: 63299 - DNA, 20 bp, synthetic construct
  misc_feature 1..20: note = chemically synthesized
  source 1..20: mol_type = other DNA
agaacaaagacacaacacac

SEQ ID NO: 63300 - DNA, 20 bp, synthetic construct
  misc_feature 1..20: note = chemically synthesized
  source 1..20: mol_type = other DNA
aaaacccttcaaaaaaatca

SEQ ID NO: 63301 - DNA, 20 bp, synthetic construct
  misc_feature 1..20: note = chemically synthesized
  source 1..20: mol_type = other DNA
taataaagaagaaaagagag

SEQ ID NO: 63302 - DNA, 20 bp, synthetic construct
  misc_feature 1..20: note = chemically synthesized
  source 1..20: mol_type = other DNA
agacgcaataaaaaatgaca

SEQ ID NO: 63303 - DNA, 20 bp, synthetic construct
  misc_feature 1..20: note = chemically synthesized
  source 1..20: mol_type = other DNA
agaaatacaaactaccgtca

SEQ ID NO: 63304 - DNA, 20 bp, synthetic construct
  misc_feature 1..20: note = chemically synthesized
  source 1..20: mol_type = other DNA
aactagaaaatctagaagaa

SEQ ID NO: 63305 - DNA, 20 bp, synthetic construct
  misc_feature 1..20: note = chemically synthesized
  source 1..20: mol_type = other DNA
accaggaagaagttgtatct

SEQ ID NO: 63306 - DNA, 20 bp, synthetic construct
  misc_feature 1..20: note = chemically synthesized
  source 1..20: mol_type = other DNA
caaaaaaagtccgggaccag

SEQ ID NO: 63307 - DNA, 20 bp, synthetic construct
  misc_feature 1..20: note = chemically synthesized
  source 1..20: mol_type = other DNA
gggaccagtaggattcatag

SEQ ID NO: 63308 - DNA, 20 bp, synthetic construct
  misc_feature 1..20: note = chemically synthesized
  source 1..20: mol_type = other DNA
ttccaatcaatagaaaaaga

SEQ ID NO: 63309 - DNA, 20 bp, synthetic construct
  misc_feature 1..20: note = chemically synthesized
  source 1..20: mol_type = other DNA
acagagacacaacaaaaaaa

SEQ ID NO: 63310 - DNA, 20 bp, synthetic construct
  misc_feature 1..20: note = chemically synthesized
  source 1..20: mol_type = other DNA
aacccacagccaatatcata

SEQ ID NO: 63311 - DNA, 20 bp, synthetic construct
  misc_feature 1..20: note = chemically synthesized
  source 1..20: mol_type = other DNA
tttgaaaactggcacaaggc

SEQ ID NO: 63312 - DNA, 20 bp, synthetic construct
  misc_feature 1..20: note = chemically synthesized
  source 1..20: mol_type = other DNA
aagcaacttcagcaaagtct

SEQ ID NO: 63313 - DNA, 20 bp, synthetic construct
  misc_feature 1..20: note = chemically synthesized
  source 1..20: mol_type = other DNA
gacaaacagagagccaaatc

SEQ ID NO: 63314 - DNA, 20 bp, synthetic construct
  misc_feature 1..20: note = chemically synthesized
  source 1..20: mol_type = other DNA
ccattcacaattgcttcaaa

SEQ ID NO: 63315 - DNA, 20 bp, synthetic construct
  misc_feature 1..20: note = chemically synthesized
  source 1..20: mol_type = other DNA
tcaaagagaataaaatacct

SEQ ID NO: 63316 - DNA, 20 bp, synthetic construct
  misc_feature 1..20: note = chemically synthesized
  source 1..20: mol_type = other DNA
acctaggaatccaacttaca

SEQ ID NO: 63317 - DNA, 20 bp, synthetic construct
  misc_feature 1..20: note = chemically synthesized
  source 1..20: mol_type = other DNA
cactgctcaatgaaataaaa

SEQ ID NO: 63318 - DNA, 20 bp, synthetic construct
  misc_feature 1..20: note = chemically synthesized
  source 1..20: mol_type = other DNA
tggaagaacattccatgctc

SEQ ID NO: 63319 - DNA, 20 bp, synthetic construct
  misc_feature 1..20: note = chemically synthesized
  source 1..20: mol_type = other DNA
attccatgctcatgggtagg

SEQ ID NO: 63320 - DNA, 20 bp, synthetic construct
  misc_feature 1..20: note = chemically synthesized
  source 1..20: mol_type = other DNA
agagaaacaagcaatgggga

SEQ ID NO: 63321 - DNA, 20 bp, synthetic construct
  misc_feature 1..20: note = chemically synthesized
  source 1..20: mol_type = other DNA
ccatatgtagaaagctgaaa

SEQ ID NO: 63322 - DNA, 20 bp, synthetic construct
  misc_feature 1..20: note = chemically synthesized
  source 1..20: mol_type = other DNA
tatacaaaaattaattcaag

SEQ ID NO: 63323 - DNA, 20 bp, synthetic construct
  misc_feature 1..20: note = chemically synthesized
  source 1..20: mol_type = other DNA
caaaagacaaaatggacaaa

SEQ ID NO: 63324 - DNA, 20 bp, synthetic construct
  misc_feature 1..20: note = chemically synthesized
  source 1..20: mol_type = other DNA
acagctaaagaaactaccat

SEQ ID NO: 63325 - DNA, 20 bp, synthetic construct
  misc_feature 1..20: note = chemically synthesized
  source 1..20: mol_type = other DNA
tctgacaaagggctaatatc

SEQ ID NO: 63326 - DNA, 20 bp, synthetic construct
  misc_feature 1..20: note = chemically synthesized
  source 1..20: mol_type = other DNA
accccatcaaaaagtgggca

SEQ ID NO: 63327 - DNA, 20 bp, synthetic construct
  misc_feature 1..20: note = chemically synthesized
  source 1..20: mol_type = other DNA
agataccatctcacaccagt

SEQ ID NO: 63328 - DNA, 20 bp, synthetic construct
  misc_feature 1..20: note = chemically synthesized
  source 1..20: mol_type = other DNA
aggaaacaacaggtgctgga

SEQ ID NO: 63329 - DNA, 20 bp, synthetic construct
  misc_feature 1..20: note = chemically synthesized
  source 1..20: mol_type = other DNA
agtcagtgtggcaattcctc

SEQ ID NO: 63330 - DNA, 20 bp, synthetic construct
  misc_feature 1..20: note = chemically synthesized
  source 1..20: mol_type = other DNA
ttgacccagccatcccatta

SEQ ID NO: 63331 - DNA, 20 bp, synthetic construct
  misc_feature 1..20: note = chemically synthesized
  source 1..20: mol_type = other DNA
cattactgggtacataccca

SEQ ID NO: 63332 - DNA, 20 bp, synthetic construct
  misc_feature 1..20: note = chemically synthesized
  source 1..20: mol_type = other DNA
aaatgtccaacaacgataga

SEQ ID NO: 63333 - DNA, 20 bp, synthetic construct
  misc_feature 1..20: note = chemically synthesized
  source 1..20: mol_type = other DNA
aatgtggcacatatacacca

SEQ ID NO: 63334 - DNA, 20 bp, synthetic construct
  misc_feature 1..20: note = chemically synthesized
  source 1..20: mol_type = other DNA
ctatgcagccataaaaaatg

SEQ ID NO: 63335 - DNA, 20 bp, synthetic construct
  misc_feature 1..20: note = chemically synthesized
  source 1..20: mol_type = other DNA
ttcatgtcctttgtagggac

SEQ ID NO: 63336 - DNA, 20 bp, synthetic construct
  misc_feature 1..20: note = chemically synthesized
  source 1..20: mol_type = other DNA
tctcagcaaactatcacaag

SEQ ID NO: 63337 - DNA, 20 bp, synthetic construct
  misc_feature 1..20: note = chemically synthesized
  source 1..20: mol_type = other DNA
gcatgttctcactcataggt

SEQ ID NO: 63338 - DNA, 20 bp, synthetic construct
  misc_feature 1..20: note = chemically synthesized
  source 1..20: mol_type = other DNA
tcacactctggggactgtta

SEQ ID NO: 63339 - DNA, 20 bp, synthetic construct
  misc_feature 1..20: note = chemically synthesized
  source 1..20: mol_type = other DNA
atggggtggggggcaggggc

SEQ ID NO: 63340 - DNA, 20 bp, synthetic construct
  misc_feature 1..20: note = chemically synthesized
  source 1..20: mol_type = other DNA
gatatacctaatgctaaatg

SEQ ID NO: 63341 - DNA, 20 bp, synthetic construct
  misc_feature 1..20: note = chemically synthesized
  source 1..20: mol_type = other DNA
taatgctaaatgacgagtta

SEQ ID NO: 63342 - DNA, 20 bp, synthetic construct
  misc_feature 1..20: note = chemically synthesized
  source 1..20: mol_type = other DNA
cagtctctccatatatttct

SEQ ID NO: 63343 - DNA, 20 bp, synthetic construct
  misc_feature 1..20: note = chemically synthesized
  source 1..20: mol_type = other DNA
cttccttcttatttgtttat

SEQ ID NO: 63344 - DNA, 20 bp, synthetic construct
  misc_feature 1..20: note = chemically synthesized
  source 1..20: mol_type = other DNA
tactaaacaggagccaagcc

SEQ ID NO: 63345 - DNA, 20 bp, synthetic construct
  misc_feature 1..20: note = chemically synthesized
  source 1..20: mol_type = other DNA
gagccaagcctagaataaag

SEQ ID NO: 63346 - DNA, 20 bp, synthetic construct
  misc_feature 1..20: note = chemically synthesized
  source 1..20: mol_type = other DNA
ctagaataaagttgaatttc

SEQ ID NO: 63347 - DNA, 20 bp, synthetic construct
  misc_feature 1..20: note = chemically synthesized
  source 1..20: mol_type = other DNA
aacccaggaggctgaagtga

SEQ ID NO: 63348 - DNA, 20 bp, synthetic construct
  misc_feature 1..20: note = chemically synthesized
  source 1..20: mol_type = other DNA
gtgataggatcacttgagcc

SEQ ID NO: 63349 - DNA, 20 bp, synthetic construct
  misc_feature 1..20: note = chemically synthesized
  source 1..20: mol_type = other DNA
atcacttgagcccaggattt

SEQ ID NO: 63350 - DNA, 20 bp, synthetic construct
  misc_feature 1..20: note = chemically synthesized
  source 1..20: mol_type = other DNA
gcctcggggctgtttctcca

SEQ ID NO: 63351 - DNA, 20 bp, synthetic construct
  misc_feature 1..20: note = chemically synthesized
  source 1..20: mol_type = other DNA
gctgtttctccagtggattc

SEQ ID NO: 63352 - DNA, 20 bp, synthetic construct
  misc_feature 1..20: note = chemically synthesized
  source 1..20: mol_type = other DNA
tcacctgtcttattcagagc

SEQ ID NO: 63353 - DNA, 20 bp, synthetic construct
  misc_feature 1..20: note = chemically synthesized
  source 1..20: mol_type = other DNA
gactagctttttctatttct

SEQ ID NO: 63354 - DNA, 20 bp, synthetic construct
  misc_feature 1..20: note = chemically synthesized
  source 1..20: mol_type = other DNA
gtattctggggagggggaca

SEQ ID NO: 63355 - DNA, 20 bp, synthetic construct
  misc_feature 1..20: note = chemically synthesized
  source 1..20: mol_type = other DNA
catagagttgagagaaatac

SEQ ID NO: 63356 - DNA, 20 bp, synthetic construct
  misc_feature 1..20: note = chemically synthesized
  source 1..20: mol_type = other DNA
gatgattatttgtatttctg

SEQ ID NO: 63357 - DNA, 20 bp, synthetic construct
  misc_feature 1..20: note = chemically synthesized
  source 1..20: mol_type = other DNA
attatttgtatttctgtggg

SEQ ID NO: 63358 - DNA, 20 bp, synthetic construct
  misc_feature 1..20: note = chemically synthesized
  source 1..20: mol_type = other DNA
tcatttctaactgtgcttat

SEQ ID NO: 63359 - DNA, 20 bp, synthetic construct
  misc_feature 1..20: note = chemically synthesized
  source 1..20: mol_type = other DNA
ctcttggactcattaatctt

SEQ ID NO: 63360 - DNA, 20 bp, synthetic construct
  misc_feature 1..20: note = chemically synthesized
  source 1..20: mol_type = other DNA
ttcttgtcttctgctagatt

SEQ ID NO: 63361 - DNA, 20 bp, synthetic construct
  misc_feature 1..20: note = chemically synthesized
  source 1..20: mol_type = other DNA
tttttattcctctgtggtct

SEQ ID NO: 63362 - DNA, 20 bp, synthetic construct
  misc_feature 1..20: note = chemically synthesized
  source 1..20: mol_type = other DNA
attttttttttgcatttgct

SEQ ID NO: 63363 - DNA, 20 bp, synthetic construct
  misc_feature 1..20: note = chemically synthesized
  source 1..20: mol_type = other DNA
attctatcagatgcacaaag

SEQ ID NO: 63364 - DNA, 20 bp, synthetic construct
  misc_feature 1..20: note = chemically synthesized
  source 1..20: mol_type = other DNA
actccaaaaaattgaggggg

SEQ ID NO: 63365 - DNA, 20 bp, synthetic construct
  misc_feature 1..20: note = chemically synthesized
  source 1..20: mol_type = other DNA
aacccacagccaacatcata

SEQ ID NO: 63366 - DNA, 20 bp, synthetic construct
  misc_feature 1..20: note = chemically synthesized
  source 1..20: mol_type = other DNA
cttgaaaactggcacaagac

SEQ ID NO: 63367 - DNA, 20 bp, synthetic construct
  misc_feature 1..20: note = chemically synthesized
  source 1..20: mol_type = other DNA
agagcaatcaggcaagagaa

SEQ ID NO: 63368 - DNA, 20 bp, synthetic construct
  misc_feature 1..20: note = chemically synthesized
  source 1..20: mol_type = other DNA
tgataacttcagcaaagttt

SEQ ID NO: 63369 - DNA, 20 bp, synthetic construct
  misc_feature 1..20: note = chemically synthesized
  source 1..20: mol_type = other DNA
ccatttaccgttgccacaaa

SEQ ID NO: 63370 - DNA, 20 bp, synthetic construct
  misc_feature 1..20: note = chemically synthesized
  source 1..20: mol_type = other DNA
acaaaaagaataaaatacct

SEQ ID NO: 63371 - DNA, 20 bp, synthetic construct
  misc_feature 1..20: note = chemically synthesized
  source 1..20: mol_type = other DNA
tggaaaaactttccatgctc

SEQ ID NO: 63372 - DNA, 20 bp, synthetic construct
  misc_feature 1..20: note = chemically synthesized
  source 1..20: mol_type = other DNA
tttccatgctcatggataaa

SEQ ID NO: 63373 - DNA, 20 bp, synthetic construct
  misc_feature 1..20: note = chemically synthesized
  source 1..20: mol_type = other DNA
aaatcctaatactcacaggt

SEQ ID NO: 63374 - DNA, 20 bp, synthetic construct
  misc_feature 1..20: note = chemically synthesized
  source 1..20: mol_type = other DNA
aaaatgagaacacttggaca

SEQ ID NO: 63375 - DNA, 20 bp, synthetic construct
  misc_feature 1..20: note = chemically synthesized
  source 1..20: mol_type = other DNA
tcacacaccggggcctgtcg

SEQ ID NO: 63376 - DNA, 20 bp, synthetic construct
  misc_feature 1..20: note = chemically synthesized
  source 1..20: mol_type = other DNA
gtggggtggtaggagagagg

SEQ ID NO: 63377 - DNA, 20 bp, synthetic construct
  misc_feature 1..20: note = chemically synthesized
  source 1..20: mol_type = other DNA
agatatatctaatgtaaatg

SEQ ID NO: 63378 - DNA, 20 bp, synthetic construct
  misc_feature 1..20: note = chemically synthesized
  source 1..20: mol_type = other DNA
ctaatgtaaatgacgagtta

SEQ ID NO: 63379 - DNA, 20 bp, synthetic construct
  misc_feature 1..20: note = chemically synthesized
  source 1..20: mol_type = other DNA
tgcacaggtaccgtagaact

SEQ ID NO: 63380 - DNA, 20 bp, synthetic construct
  misc_feature 1..20: note = chemically synthesized
  source 1..20: mol_type = other DNA
agacacacagacaaatggaa

SEQ ID NO: 63381 - DNA, 20 bp, synthetic construct
  misc_feature 1..20: note = chemically synthesized
  source 1..20: mol_type = other DNA
ccctattcaacaagtggtgt

SEQ ID NO: 63382 - DNA, 20 bp, synthetic construct
  misc_feature 1..20: note = chemically synthesized
  source 1..20: mol_type = other DNA
tatacacaaataaactcaag

SEQ ID NO: 63383 - DNA, 20 bp, synthetic construct
  misc_feature 1..20: note = chemically synthesized
  source 1..20: mol_type = other DNA
caaaagcaaaaattgacaaa

SEQ ID NO: 63384 - DNA, 20 bp, synthetic construct
  misc_feature 1..20: note = chemically synthesized
  source 1..20: mol_type = other DNA
acagcaaaagaaactatcaa

SEQ ID NO: 63385 - DNA, 20 bp, synthetic construct
  misc_feature 1..20: note = chemically synthesized
  source 1..20: mol_type = other DNA
tcaactgagtaaacaaccta

SEQ ID NO: 63386 - DNA, 20 bp, synthetic construct
  misc_feature 1..20: note = chemically synthesized
  source 1..20: mol_type = other DNA
tccaacaaaggcctaatatt

SEQ ID NO: 63387 - DNA, 20 bp, synthetic construct
  misc_feature 1..20: note = chemically synthesized
  source 1..20: mol_type = other DNA
agaatctataaggaacttaa

SEQ ID NO: 63388 - DNA, 20 bp, synthetic construct
  misc_feature 1..20: note = chemically synthesized
  source 1..20: mol_type = other DNA
aacaaacaatgccacaaaaa

SEQ ID NO: 63389 - DNA, 20 bp, synthetic construct
  misc_feature 1..20: note = chemically synthesized
  source 1..20: mol_type = other DNA
atagtcaaaaaataacagat

SEQ ID NO: 63390 - DNA, 20 bp, synthetic construct
  misc_feature 1..20: note = chemically synthesized
  source 1..20: mol_type = other DNA
gggtaaggttgtggagaaaa

SEQ ID NO: 63391 - DNA, 20 bp, synthetic construct
  misc_feature 1..20: note = chemically synthesized
  source 1..20: mol_type = other DNA
ttaacccaacaatcctatta

SEQ ID NO: 63392 - DNA, 20 bp, synthetic construct
  misc_feature 1..20: note = chemically synthesized
  source 1..20: mol_type = other DNA
taatcacaatagcaaagaca

SEQ ID NO: 63393 - DNA, 20 bp, synthetic construct
  misc_feature 1..20: note = chemically synthesized
  source 1..20: mol_type = other DNA
gaacatgtacatatacacca

SEQ ID NO: 63394 - DNA, 20 bp, synthetic construct
  misc_feature 1..20: note = chemically synthesized
  source 1..20: mol_type = other DNA
aatactatgtggccataaaa

SEQ ID NO: 63395 - DNA, 20 bp, synthetic construct
  misc_feature 1..20: note = chemically synthesized
  source 1..20: mol_type = other DNA
atcatgtcctttgcaggaac

SEQ ID NO: 63396 - DNA, 20 bp, synthetic construct
  misc_feature 1..20: note = chemically synthesized
  source 1..20: mol_type = other DNA
caaaagacactgcagcctaa

SEQ ID NO: 63397 - DNA, 20 bp, synthetic construct
  misc_feature 1..20: note = chemically synthesized
  source 1..20: mol_type = other DNA
ctgcagcctaattgagtttg

SEQ ID NO: 63398 - DNA, 20 bp, synthetic construct
  misc_feature 1..20: note = chemically synthesized
  source 1..20: mol_type = other DNA
aagagcagaaaaagtaacta

SEQ ID NO: 63399 - DNA, 20 bp, synthetic construct
  misc_feature 1..20: note = chemically synthesized
  source 1..20: mol_type = other DNA
tagctatgtaacaaaccatc

SEQ ID NO: 63400 - DNA, 20 bp, synthetic construct
  misc_feature 1..20: note = chemically synthesized
  source 1..20: mol_type = other DNA
attcagttacttctgacaac

SEQ ID NO: 63401 - DNA, 20 bp, synthetic construct
  misc_feature 1..20: note = chemically synthesized
  source 1..20: mol_type = other DNA
tctcttttttttttttttga

SEQ ID NO: 63402 - DNA, 20 bp, synthetic construct
  misc_feature 1..20: note = chemically synthesized
  source 1..20: mol_type = other DNA
tctcgctgtgttgcccaggt

SEQ ID NO: 63403 - DNA, 20 bp, synthetic construct
  misc_feature 1..20: note = chemically synthesized
  source 1..20: mol_type = other DNA
ttttaaaattttttgtagag

SEQ ID NO: 63404 - DNA, 20 bp, synthetic construct
  misc_feature 1..20: note = chemically synthesized
  source 1..20: mol_type = other DNA
gagattaggaagtgccccga

SEQ ID NO: 63405 - DNA, 20 bp, synthetic construct
  misc_feature 1..20: note = chemically synthesized
  source 1..20: mol_type = other DNA
ccgagagagtgcatagagga

SEQ ID NO: 63406 - DNA, 20 bp, synthetic construct
  misc_feature 1..20: note = chemically synthesized
  source 1..20: mol_type = other DNA
aggagagggtagaagtaaag

SEQ ID NO: 63407 - DNA, 20 bp, synthetic construct
  misc_feature 1..20: note = chemically synthesized
  source 1..20: mol_type = other DNA
tgggtttgctttgttagtga

SEQ ID NO: 63408 - DNA, 20 bp, synthetic construct
  misc_feature 1..20: note = chemically synthesized
  source 1..20: mol_type = other DNA
tccccatccacttgctcatt

SEQ ID NO: 63409 - DNA, 20 bp, synthetic construct
  misc_feature 1..20: note = chemically synthesized
  source 1..20: mol_type = other DNA
cacttgctcattctggatgg

SEQ ID NO: 63410 - DNA, 20 bp, synthetic construct
  misc_feature 1..20: note = chemically synthesized
  source 1..20: mol_type = other DNA
aaaggaaaaagtacatttag

SEQ ID NO: 63411 - DNA, 20 bp, synthetic construct
  misc_feature 1..20: note = chemically synthesized
  source 1..20: mol_type = other DNA
tttagtggggtgtgggactg

SEQ ID NO: 63412 - DNA, 20 bp, synthetic construct
  misc_feature 1..20: note = chemically synthesized
  source 1..20: mol_type = other DNA
gccagcttgcttcccactag

SEQ ID NO: 63413 - DNA, 20 bp, synthetic construct
  misc_feature 1..20: note = chemically synthesized
  source 1..20: mol_type = other DNA
ttcatttattattgtttttc

SEQ ID NO: 63414 - DNA, 20 bp, synthetic construct
  misc_feature 1..20: note = chemically synthesized
  source 1..20: mol_type = other DNA
caggagcaatttaaacttgc

SEQ ID NO: 63415 - DNA, 20 bp, synthetic construct
  misc_feature 1..20: note = chemically synthesized
  source 1..20: mol_type = other DNA
caatttcttcaactacaaat

SEQ ID NO: 63416 - DNA, 20 bp, synthetic construct
  misc_feature 1..20: note = chemically synthesized
  source 1..20: mol_type = other DNA
gaactaaatgtaaatataca

SEQ ID NO: 63417 - DNA, 20 bp, synthetic construct
  misc_feature 1..20: note = chemically synthesized
  source 1..20: mol_type = other DNA
ttttatgacctagcaattta

SEQ ID NO: 63418 - DNA, 20 bp, synthetic construct
  misc_feature 1..20: note = chemically synthesized
  source 1..20: mol_type = other DNA
atatatatacaaaaatatat

SEQ ID NO: 63419 - DNA, 20 bp, synthetic construct
  misc_feature 1..20: note = chemically synthesized
  source 1..20: mol_type = other DNA
actcaaatatctatcaactg

SEQ ID NO: 63420 - DNA, 20 bp, synthetic construct
  misc_feature 1..20: note = chemically synthesized
  source 1..20: mol_type = other DNA
attgtggtatatacataaaa

SEQ ID NO: 63421 - DNA, 20 bp, synthetic construct
  misc_feature 1..20: note = chemically synthesized
  source 1..20: mol_type = other DNA
aactacagtcatacactagt

SEQ ID NO: 63422 - DNA, 20 bp, synthetic construct
  misc_feature 1..20: note = chemically synthesized
  source 1..20: mol_type = other DNA
tgcaattcacaaacataata

SEQ ID NO: 63423 - DNA, 20 bp, synthetic construct
  misc_feature 1..20: note = chemically synthesized
  source 1..20: mol_type = other DNA
acacttttaaaaaaagggac

SEQ ID NO: 63424 - DNA, 20 bp, synthetic construct
  misc_feature 1..20: note = chemically synthesized
  source 1..20: mol_type = other DNA
atgagtcaatcgtgataaaa

SEQ ID NO: 63425 - DNA, 20 bp, synthetic construct
  misc_feature 1..20: note = chemically synthesized
  source 1..20: mol_type = other DNA
gtgataaaaatgaattatat

SEQ ID NO: 63426 - DNA, 20 bp, synthetic construct
  misc_feature 1..20: note = chemically synthesized
  source 1..20: mol_type = other DNA
ttaactttggagacaattag

SEQ ID NO: 63427 - DNA, 20 bp, synthetic construct
  misc_feature 1..20: note = chemically synthesized
  source 1..20: mol_type = other DNA
agacaattagtggaatgata

SEQ ID NO: 63428 - DNA, 20 bp, synthetic construct
  misc_feature 1..20: note = chemically synthesized
  source 1..20: mol_type = other DNA
cctatcttattagttgttac

SEQ ID NO: 63429 - DNA, 20 bp, synthetic construct
  misc_feature 1..20: note = chemically synthesized
  source 1..20: mol_type = other DNA
gtcttttacacacactgtct

SEQ ID NO: 63430 - DNA, 20 bp, synthetic construct
  misc_feature 1..20: note = chemically synthesized
  source 1..20: mol_type = other DNA
gaacttcattgctctctgtt

SEQ ID NO: 63431 - DNA, 20 bp, synthetic construct
  misc_feature 1..20: note = chemically synthesized
  source 1..20: mol_type = other DNA
ctatggacctcttaaactca

SEQ ID NO: 63432 - DNA, 20 bp, synthetic construct
  misc_feature 1..20: note = chemically synthesized
  source 1..20: mol_type = other DNA
ctctaatgcttccaaacttg

SEQ ID NO: 63433 - DNA, 20 bp, synthetic construct
  misc_feature 1..20: note = chemically synthesized
  source 1..20: mol_type = other DNA
aataatcaatttctcacaac

SEQ ID NO: 63434 - DNA, 20 bp, synthetic construct
  misc_feature 1..20: note = chemically synthesized
  source 1..20: mol_type = other DNA
atcataaatactgatagctt

SEQ ID NO: 63435 - DNA, 20 bp, synthetic construct
  misc_feature 1..20: note = chemically synthesized
  source 1..20: mol_type = other DNA
cctatttgtgtcttgcaaca

SEQ ID NO: 63436 - DNA, 20 bp, synthetic construct
  misc_feature 1..20: note = chemically synthesized
  source 1..20: mol_type = other DNA
taagttaatagctttgtttt

SEQ ID NO: 63437 - DNA, 20 bp, synthetic construct
  misc_feature 1..20: note = chemically synthesized
  source 1..20: mol_type = other DNA
taataaattaagagctataa

SEQ ID NO: 63438 - DNA, 20 bp, synthetic construct
  misc_feature 1..20: note = chemically synthesized
  source 1..20: mol_type = other DNA
tactttataaatttcttata

SEQ ID NO: 63439 - DNA, 20 bp, synthetic construct
  misc_feature 1..20: note = chemically synthesized
  source 1..20: mol_type = other DNA
aacagaaaaaaaacgataca

SEQ ID NO: 63440 - DNA, 20 bp, synthetic construct
  misc_feature 1..20: note = chemically synthesized
  source 1..20: mol_type = other DNA
aaaacgatacaaagggtatg

SEQ ID NO: 63441 - DNA, 20 bp, synthetic construct
  misc_feature 1..20: note = chemically synthesized
  source 1..20: mol_type = other DNA
gatacaaagggtatgaagga

SEQ ID NO: 63442 - DNA, 20 bp, synthetic construct
  misc_feature 1..20: note = chemically synthesized
  source 1..20: mol_type = other DNA
caaagggtatgaaggattga

SEQ ID NO: 63443 - DNA, 20 bp, synthetic construct
  misc_feature 1..20: note = chemically synthesized
  source 1..20: mol_type = other DNA
ctacggcaccagtggtcttt

SEQ ID NO: 63444 - DNA, 20 bp, synthetic construct
  misc_feature 1..20: note = chemically synthesized
  source 1..20: mol_type = other DNA
ataaacctttgtcacctcta

SEQ ID NO: 63445 - DNA, 20 bp, synthetic construct
  misc_feature 1..20: note = chemically synthesized
  source 1..20: mol_type = other DNA
tccacagatttagaaattct

SEQ ID NO: 63446 - DNA, 20 bp, synthetic construct
  misc_feature 1..20: note = chemically synthesized
  source 1..20: mol_type = other DNA
tttatttacataaataaaag

SEQ ID NO: 63447 - DNA, 20 bp, synthetic construct
  misc_feature 1..20: note = chemically synthesized
  source 1..20: mol_type = other DNA
tgtcacacaatttaaaaatc

SEQ ID NO: 63448 - DNA, 20 bp, synthetic construct
  misc_feature 1..20: note = chemically synthesized
  source 1..20: mol_type = other DNA
ttgcctcaaataatccctgt

SEQ ID NO: 63449 - DNA, 20 bp, synthetic construct
  misc_feature 1..20: note = chemically synthesized
  source 1..20: mol_type = other DNA
atcctagcaataatatcctg

SEQ ID NO: 63450 - DNA, 20 bp, synthetic construct
  misc_feature 1..20: note = chemically synthesized
  source 1..20: mol_type = other DNA
atccctcatttggttgaggt

SEQ ID NO: 63451 - DNA, 20 bp, synthetic construct
  misc_feature 1..20: note = chemically synthesized
  source 1..20: mol_type = other DNA
tggttgaggttggaatttca

SEQ ID NO: 63452 - DNA, 20 bp, synthetic construct
  misc_feature 1..20: note = chemically synthesized
  source 1..20: mol_type = other DNA
tgaggttggaatttcaatgg

SEQ ID NO: 63453 - DNA, 20 bp, synthetic construct
  misc_feature 1..20: note = chemically synthesized
  source 1..20: mol_type = other DNA
ttggaatttcaatgggtggg

SEQ ID NO: 63454 - DNA, 20 bp, synthetic construct
  misc_feature 1..20: note = chemically synthesized
  source 1..20: mol_type = other DNA
cccttcttgtctttggggac

SEQ ID NO: 63455 - DNA, 20 bp, synthetic construct
  misc_feature 1..20: note = chemically synthesized
  source 1..20: mol_type = other DNA
taggagatttcgccaggcat

SEQ ID NO: 63456 - DNA, 20 bp, synthetic construct
  misc_feature 1..20: note = chemically synthesized
  source 1..20: mol_type = other DNA
tctctcctatgttctgaggt

SEQ ID NO: 63457 - DNA, 20 bp, synthetic construct
  misc_feature 1..20: note = chemically synthesized
  source 1..20: mol_type = other DNA
tagtcatgatctcctctgtt

SEQ ID NO: 63458 - DNA, 20 bp, synthetic construct
  misc_feature 1..20: note = chemically synthesized
  source 1..20: mol_type = other DNA
acataaataattatggtaat

SEQ ID NO: 63459 - DNA, 20 bp, synthetic construct
  misc_feature 1..20: note = chemically synthesized
  source 1..20: mol_type = other DNA
ccctggagaaaaattggacc

SEQ ID NO: 63460 - DNA, 20 bp, synthetic construct
  misc_feature 1..20: note = chemically synthesized
  source 1..20: mol_type = other DNA
tggagtctagcagcctaggt

SEQ ID NO: 63461 - DNA, 20 bp, synthetic construct
  misc_feature 1..20: note = chemically synthesized
  source 1..20: mol_type = other DNA
atttcctttatcttaaaaat

SEQ ID NO: 63462 - DNA, 20 bp, synthetic construct
  misc_feature 1..20: note = chemically synthesized
  source 1..20: mol_type = other DNA
taaaaataagggtattgaag

SEQ ID NO: 63463 - DNA, 20 bp, synthetic construct
  misc_feature 1..20: note = chemically synthesized
  source 1..20: mol_type = other DNA
agggtattgaagtagaattc

SEQ ID NO: 63464 - DNA, 20 bp, synthetic construct
  misc_feature 1..20: note = chemically synthesized
  source 1..20: mol_type = other DNA
ctgttcattttaatatattt

SEQ ID NO: 63465 - DNA, 20 bp, synthetic construct
  misc_feature 1..20: note = chemically synthesized
  source 1..20: mol_type = other DNA
tcattttaatatatttaagg

SEQ ID NO: 63466 - DNA, 20 bp, synthetic construct
  misc_feature 1..20: note = chemically synthesized
  source 1..20: mol_type = other DNA
aaagttgatttcataaaaac

SEQ ID NO: 63467 - DNA, 20 bp, synthetic construct
  misc_feature 1..20: note = chemically synthesized
  source 1..20: mol_type = other DNA
gatggttccataggctgact

SEQ ID NO: 63468 - DNA, 20 bp, synthetic construct
  misc_feature 1..20: note = chemically synthesized
  source 1..20: mol_type = other DNA
gctgactgagagtgtagagg

SEQ ID NO: 63469 - DNA, 20 bp, synthetic construct
  misc_feature 1..20: note = chemically synthesized
  source 1..20: mol_type = other DNA
ttgatcttcagttagactag

SEQ ID NO: 63470 - DNA, 20 bp, synthetic construct
  misc_feature 1..20: note = chemically synthesized
  source 1..20: mol_type = other DNA
aaaaatattttagtaatgat

SEQ ID NO: 63471 - DNA, 20 bp, synthetic construct
  misc_feature 1..20: note = chemically synthesized
  source 1..20: mol_type = other DNA
tctctctgaactagcatatt

SEQ ID NO: 63472 - DNA, 20 bp, synthetic construct
  misc_feature 1..20: note = chemically synthesized
  source 1..20: mol_type = other DNA
agttctttggacaagtctta

SEQ ID NO: 63473 - DNA, 20 bp, synthetic construct
  misc_feature 1..20: note = chemically synthesized
  source 1..20: mol_type = other DNA
tgtccagaaaagaccattaa

SEQ ID NO: 63474 - DNA, 20 bp, synthetic construct
  misc_feature 1..20: note = chemically synthesized
  source 1..20: mol_type = other DNA
cattaaaggaatgaccttta

SEQ ID NO: 63475 - DNA, 20 bp, synthetic construct
  misc_feature 1..20: note = chemically synthesized
  source 1..20: mol_type = other DNA
ttgtccaaggcaggacatgt

SEQ ID NO: 63476 - DNA, 20 bp, synthetic construct
  misc_feature 1..20: note = chemically synthesized
  source 1..20: mol_type = other DNA
actccactgccttggcaaat

SEQ ID NO: 63477 - DNA, 20 bp, synthetic construct
  misc_feature 1..20: note = chemically synthesized
  source 1..20: mol_type = other DNA
ataggaatgttttagttcta

SEQ ID NO: 63478 - DNA, 20 bp, synthetic construct
  misc_feature 1..20: note = chemically synthesized
  source 1..20: mol_type = other DNA
agtaagcaagtaatcacaca

SEQ ID NO: 63479 - DNA, 20 bp, synthetic construct
  misc_feature 1..20: note = chemically synthesized
  source 1..20: mol_type = other DNA
gcatcagaaaagactcctga

SEQ ID NO: 63480 - DNA, 20 bp, synthetic construct
  misc_feature 1..20: note = chemically synthesized
  source 1..20: mol_type = other DNA
cattccagacagtgctcaga

SEQ ID NO: 63481 - DNA, 20 bp, synthetic construct
  misc_feature 1..20: note = chemically synthesized
  source 1..20: mol_type = other DNA
atagtctctatggtggcaac

SEQ ID NO: 63482 - DNA, 20 bp, synthetic construct
  misc_feature 1..20: note = chemically synthesized
  source 1..20: mol_type = other DNA
tgtatctagtctgaagaagc

SEQ ID NO: 63483 - DNA, 20 bp, synthetic construct
  misc_feature 1..20: note = chemically synthesized
  source 1..20: mol_type = other DNA
attttttttttcctttggga

SEQ ID NO: 63484 - DNA, 20 bp, synthetic construct
  misc_feature 1..20: note = chemically synthesized
  source 1..20: mol_type = other DNA
tcttgctctgtcgcccagac

SEQ ID NO: 63485 - DNA, 20 bp, synthetic construct
  misc_feature 1..20: note = chemically synthesized
  source 1..20: mol_type = other DNA
tcactgcaacttccacctcc

SEQ ID NO: 63486 - DNA, 20 bp, synthetic construct
  misc_feature 1..20: note = chemically synthesized
  source 1..20: mol_type = other DNA
gcctcagtctcccaagtaac

SEQ ID NO: 63487 - DNA, 20 bp, synthetic construct
  misc_feature 1..20: note = chemically synthesized
  source 1..20: mol_type = other DNA
tttttgtgttttagtagaga

SEQ ID NO: 63488 - DNA, 20 bp, synthetic construct
  misc_feature 1..20: note = chemically synthesized
  source 1..20: mol_type = other DNA
gcctcggcctcccaaagtgc

SEQ ID NO: 63489 - DNA, 20 bp, synthetic construct
  misc_feature 1..20: note = chemically synthesized
  source 1..20: mol_type = other DNA
ttaacacatacctacattca

SEQ ID NO: 63490 - DNA, 20 bp, synthetic construct
  misc_feature 1..20: note = chemically synthesized
  source 1..20: mol_type = other DNA
ccagatccttgacgatatgt

SEQ ID NO: 63491 - DNA, 20 bp, synthetic construct
  misc_feature 1..20: note = chemically synthesized
  source 1..20: mol_type = other DNA
agagaaatcatgtttgaaat

SEQ ID NO: 63492 - DNA, 20 bp, synthetic construct
  misc_feature 1..20: note = chemically synthesized
  source 1..20: mol_type = other DNA
gattttacacacactttgat

SEQ ID NO: 63493 - DNA, 20 bp, synthetic construct
  misc_feature 1..20: note = chemically synthesized
  source 1..20: mol_type = other DNA
attgtctagctcttatttca

SEQ ID NO: 63494 - DNA, 20 bp, synthetic construct
  misc_feature 1..20: note = chemically synthesized
  source 1..20: mol_type = other DNA
ctaatcttctacagcctcta

SEQ ID NO: 63495 - DNA, 20 bp, synthetic construct
  misc_feature 1..20: note = chemically synthesized
  source 1..20: mol_type = other DNA
ataaactagtatactgtgat

SEQ ID NO: 63496 - DNA, 20 bp, synthetic construct
  misc_feature 1..20: note = chemically synthesized
  source 1..20: mol_type = other DNA
gatgagagtaagttagttaa

SEQ ID NO: 63497 - DNA, 20 bp, synthetic construct
  misc_feature 1..20: note = chemically synthesized
  source 1..20: mol_type = other DNA
actcaaaagttaatggtgaa

SEQ ID NO: 63498 - DNA, 20 bp, synthetic construct
  misc_feature 1..20: note = chemically synthesized
  source 1..20: mol_type = other DNA
ggaattgctgtgcaaatact

SEQ ID NO: 63499 - DNA, 20 bp, synthetic construct
  misc_feature 1..20: note = chemically synthesized
  source 1..20: mol_type = other DNA
ataaagatacctaaatatta

SEQ ID NO: 63500 - DNA, 20 bp, synthetic construct
  misc_feature 1..20: note = chemically synthesized
  source 1..20: mol_type = other DNA
aaggctttttgactatgata

SEQ ID NO: 63501 - DNA, 20 bp, synthetic construct
  misc_feature 1..20: note = chemically synthesized
  source 1..20: mol_type = other DNA
tgtattttacattacgagca

SEQ ID NO: 63502 - DNA, 20 bp, synthetic construct
  misc_feature 1..20: note = chemically synthesized
  source 1..20: mol_type = other DNA
caatgggtaagtgaccatca

SEQ ID NO: 63503 - DNA, 20 bp, synthetic construct
  misc_feature 1..20: note = chemically synthesized
  source 1..20: mol_type = other DNA
tgtgtaaaagtgggcctatc

SEQ ID NO: 63504 - DNA, 20 bp, synthetic construct
  misc_feature 1..20: note = chemically synthesized
  source 1..20: mol_type = other DNA
ttatgcaattgtgttattgg

SEQ ID NO: 63505 - DNA, 20 bp, synthetic construct
  misc_feature 1..20: note = chemically synthesized
  source 1..20: mol_type = other DNA
ttttaagattaaacactcag

SEQ ID NO: 63506 - DNA, 20 bp, synthetic construct
  misc_feature 1..20: note = chemically synthesized
  source 1..20: mol_type = other DNA
ttaaatagccagttgtattc

SEQ ID NO: 63507 - DNA, 20 bp, synthetic construct
  misc_feature 1..20: note = chemically synthesized
  source 1..20: mol_type = other DNA
attcatgaatttgagctctc

SEQ ID NO: 63508 - DNA, 20 bp, synthetic construct
  misc_feature 1..20: note = chemically synthesized
  source 1..20: mol_type = other DNA
ttgagctctcaggagtggtc

SEQ ID NO: 63509 - DNA, 20 bp, synthetic construct
  misc_feature 1..20: note = chemically synthesized
  source 1..20: mol_type = other DNA
agtctgcacattaaggaact

SEQ ID NO: 63510 - DNA, 20 bp, synthetic construct
  misc_feature 1..20: note = chemically synthesized
  source 1..20: mol_type = other DNA
gataccaaaataatagatat

SEQ ID NO: 63511 - DNA, 20 bp, synthetic construct
  misc_feature 1..20: note = chemically synthesized
  source 1..20: mol_type = other DNA
aacttcttgaaaagtgattg

SEQ ID NO: 63512 - DNA, 20 bp, synthetic construct
  misc_feature 1..20: note = chemically synthesized
  source 1..20: mol_type = other DNA
agttgcaagatcgttttaaa

SEQ ID NO: 63513 - DNA, 20 bp, synthetic construct
  misc_feature 1..20: note = chemically synthesized
  source 1..20: mol_type = other DNA
aagaaattgaggaaaagatg

SEQ ID NO: 63514 - DNA, 20 bp, synthetic construct
  misc_feature 1..20: note = chemically synthesized
  source 1..20: mol_type = other DNA
taagttattcaatgctgaga

SEQ ID NO: 63515 - DNA, 20 bp, synthetic construct
  misc_feature 1..20: note = chemically synthesized
  source 1..20: mol_type = other DNA
gaagacgtcagtgtagtata

SEQ ID NO: 63516 - DNA, 20 bp, synthetic construct
  misc_feature 1..20: note = chemically synthesized
  source 1..20: mol_type = other DNA
aaacacaattggccaataca

SEQ ID NO: 63517 - DNA, 20 bp, synthetic construct
  misc_feature 1..20: note = chemically synthesized
  source 1..20: mol_type = other DNA
atacattgaataaatgtata

SEQ ID NO: 63518 - DNA, 20 bp, synthetic construct
  misc_feature 1..20: note = chemically synthesized
  source 1..20: mol_type = other DNA
atagttaatcagctcattaa

SEQ ID NO: 63519 - DNA, 20 bp, synthetic construct
  misc_feature 1..20: note = chemically synthesized
  source 1..20: mol_type = other DNA
ctcattaactgaataaataa

SEQ ID NO: 63520 - DNA, 20 bp, synthetic construct
  misc_feature 1..20: note = chemically synthesized
  source 1..20: mol_type = other DNA
tctacatcacaaaggcacaa

SEQ ID NO: 63521 - DNA, 20 bp, synthetic construct
  misc_feature 1..20: note = chemically synthesized
  source 1..20: mol_type = other DNA
catctggagggggagaaaac

SEQ ID NO: 63522 - DNA, 20 bp, synthetic construct
  misc_feature 1..20: note = chemically synthesized
  source 1..20: mol_type = other DNA
cccaaagattactcttcact

SEQ ID NO: 63523 - DNA, 20 bp, synthetic construct
  misc_feature 1..20: note = chemically synthesized
  source 1..20: mol_type = other DNA
ctcttcacttcgaatgttta

SEQ ID NO: 63524 - DNA, 20 bp, synthetic construct
  misc_feature 1..20: note = chemically synthesized
  source 1..20: mol_type = other DNA
tgtttttgcttatggcttct

SEQ ID NO: 63525 - DNA, 20 bp, synthetic construct
  misc_feature 1..20: note = chemically synthesized
  source 1..20: mol_type = other DNA
agaccattttctcaaaggca

SEQ ID NO: 63526 - DNA, 20 bp, synthetic construct
  misc_feature 1..20: note = chemically synthesized
  source 1..20: mol_type = other DNA
gatactatgtctcaaagaaa

SEQ ID NO: 63527 - DNA, 20 bp, synthetic construct
  misc_feature 1..20: note = chemically synthesized
  source 1..20: mol_type = other DNA
ttttttaagtcagtaagttt

SEQ ID NO: 63528 - DNA, 20 bp, synthetic construct
  misc_feature 1..20: note = chemically synthesized
  source 1..20: mol_type = other DNA
tctcacatgtttctcagttc

SEQ ID NO: 63529 - DNA, 20 bp, synthetic construct
  misc_feature 1..20: note = chemically synthesized
  source 1..20: mol_type = other DNA
cagtaagccctagcaccagc

SEQ ID NO: 63530 - DNA, 20 bp, synthetic construct
  misc_feature 1..20: note = chemically synthesized
  source 1..20: mol_type = other DNA
gaattcttcctttcttctca

SEQ ID NO: 63531 - DNA, 20 bp, synthetic construct
  misc_feature 1..20: note = chemically synthesized
  source 1..20: mol_type = other DNA
tccactgtgtacacagtgct

SEQ ID NO: 63532 - DNA, 20 bp, synthetic construct
  misc_feature 1..20: note = chemically synthesized
  source 1..20: mol_type = other DNA
acagtgctggggatcctgtg

SEQ ID NO: 63533 - DNA, 20 bp, synthetic construct
  misc_feature 1..20: note = chemically synthesized
  source 1..20: mol_type = other DNA
ggatcattcgagagatcagc

SEQ ID NO: 63534 - DNA, 20 bp, synthetic construct
  misc_feature 1..20: note = chemically synthesized
  source 1..20: mol_type = other DNA
catccatggtctgtccttca

SEQ ID NO: 63535 - DNA, 20 bp, synthetic construct
  misc_feature 1..20: note = chemically synthesized
  source 1..20: mol_type = other DNA
tcctccatcctgactaattc

SEQ ID NO: 63536 - DNA, 20 bp, synthetic construct
  misc_feature 1..20: note = chemically synthesized
  source 1..20: mol_type = other DNA
ttgggctcactataataggt

SEQ ID NO: 63537 - DNA, 20 bp, synthetic construct
  misc_feature 1..20: note = chemically synthesized
  source 1..20: mol_type = other DNA
ctcactctttctgcctgcac

SEQ ID NO: 63538 - DNA, 20 bp, synthetic construct
  misc_feature 1..20: note = chemically synthesized
  source 1..20: mol_type = other DNA
tggttatttgcatactgttg

SEQ ID NO: 63539 - DNA, 20 bp, synthetic construct
  misc_feature 1..20: note = chemically synthesized
  source 1..20: mol_type = other DNA
acatccttttcccaccttta

SEQ ID NO: 63540 - DNA, 20 bp, synthetic construct
  misc_feature 1..20: note = chemically synthesized
  source 1..20: mol_type = other DNA
aagacccaacagattcatac

SEQ ID NO: 63541 - DNA, 20 bp, synthetic construct
  misc_feature 1..20: note = chemically synthesized
  source 1..20: mol_type = other DNA
attaaaattgtagatttact

SEQ ID NO: 63542 - DNA, 20 bp, synthetic construct
  misc_feature 1..20: note = chemically synthesized
  source 1..20: mol_type = other DNA
aaaatatttaaatatagtca

SEQ ID NO: 63543 - DNA, 20 bp, synthetic construct
  misc_feature 1..20: note = chemically synthesized
  source 1..20: mol_type = other DNA
tcctttgctgtaaaacaaag

SEQ ID NO: 63544 - DNA, 20 bp, synthetic construct
  misc_feature 1..20: note = chemically synthesized
  source 1..20: mol_type = other DNA
ggagactatagccaactcac

SEQ ID NO: 63545 - DNA, 20 bp, synthetic construct
  misc_feature 1..20: note = chemically synthesized
  source 1..20: mol_type = other DNA
gttgtgatatctgtatggac

SEQ ID NO: 63546 - DNA, 20 bp, synthetic construct
  misc_feature 1..20: note = chemically synthesized
  source 1..20: mol_type = other DNA
ataccataaaatggctaaag

SEQ ID NO: 63547 - DNA, 20 bp, synthetic construct
  misc_feature 1..20: note = chemically synthesized
  source 1..20: mol_type = other DNA
ggacacaaagaaatatgact

SEQ ID NO: 63548 - DNA, 20 bp, synthetic construct
  misc_feature 1..20: note = chemically synthesized
  source 1..20: mol_type = other DNA
ctaccatgtctaatttaaat

SEQ ID NO: 63549 - DNA, 20 bp, synthetic construct
  misc_feature 1..20: note = chemically synthesized
  source 1..20: mol_type = other DNA
tttgcttttatatctaagtg

SEQ ID NO: 63550 - DNA, 20 bp, synthetic construct
  misc_feature 1..20: note = chemically synthesized
  source 1..20: mol_type = other DNA
ctgtccgctaccgacttatt

SEQ ID NO: 63551 - DNA, 20 bp, synthetic construct
  misc_feature 1..20: note = chemically synthesized
  source 1..20: mol_type = other DNA
aatcaggtacaaaactatgc

SEQ ID NO: 63552 - DNA, 20 bp, synthetic construct
  misc_feature 1..20: note = chemically synthesized
  source 1..20: mol_type = other DNA
aattggacaaattaatgcat

SEQ ID NO: 63553 - DNA, 20 bp, synthetic construct
  misc_feature 1..20: note = chemically synthesized
  source 1..20: mol_type = other DNA
gtgaggaaattgtttctgga

SEQ ID NO: 63554 - DNA, 20 bp, synthetic construct
  misc_feature 1..20: note = chemically synthesized
  source 1..20: mol_type = other DNA
agaacaataaattaggtctt

SEQ ID NO: 63555 - DNA, 20 bp, synthetic construct
  misc_feature 1..20: note = chemically synthesized
  source 1..20: mol_type = other DNA
tacagtataaggttaatttg

SEQ ID NO: 63556 - DNA, 20 bp, synthetic construct
  misc_feature 1..20: note = chemically synthesized
  source 1..20: mol_type = other DNA
aaggttaatttgaaggataa

SEQ ID NO: 63557 - DNA, 20 bp, synthetic construct
  misc_feature 1..20: note = chemically synthesized
  source 1..20: mol_type = other DNA
ttaatttgaaggataaagga

SEQ ID NO: 63558 - DNA, 20 bp, synthetic construct
  misc_feature 1..20: note = chemically synthesized
  source 1..20: mol_type = other DNA
gtgaatttcctgatgtcaaa

SEQ ID NO: 63559 - DNA, 20 bp, synthetic construct
  misc_feature 1..20: note = chemically synthesized
  source 1..20: mol_type = other DNA
catagtagctgccgaggcgg

SEQ ID NO: 63560 - DNA, 20 bp, synthetic construct
  misc_feature 1..20: note = chemically synthesized
  source 1..20: mol_type = other DNA
tactcgggaggctgagacag

SEQ ID NO: 63561 - DNA, 20 bp, synthetic construct
  misc_feature 1..20: note = chemically synthesized
  source 1..20: mol_type = other DNA
cccgggaggtggagcttgca

SEQ ID NO: 63562 - DNA, 20 bp, synthetic construct
  misc_feature 1..20: note = chemically synthesized
  source 1..20: mol_type = other DNA
aaaaaaaaagaaaagttgat

SEQ ID NO: 63563 - DNA, 20 bp, synthetic construct
  misc_feature 1..20: note = chemically synthesized
  source 1..20: mol_type = other DNA
catggtccctcctggccgac

SEQ ID NO: 63564 - DNA, 20 bp, synthetic construct
  misc_feature 1..20: note = chemically synthesized
  source 1..20: mol_type = other DNA
atgaaaagagaagttagctg

SEQ ID NO: 63565 - DNA, 20 bp, synthetic construct
  misc_feature 1..20: note = chemically synthesized
  source 1..20: mol_type = other DNA
gctgaatctgtagaggtcat

SEQ ID NO: 63566 - DNA, 20 bp, synthetic construct
  misc_feature 1..20: note = chemically synthesized
  source 1..20: mol_type = other DNA
ttccttctaatgctttgaaa

SEQ ID NO: 63567 - DNA, 20 bp, synthetic construct
  misc_feature 1..20: note = chemically synthesized
  source 1..20: mol_type = other DNA
gacacaacactggggaagca

SEQ ID NO: 63568 - DNA, 20 bp, synthetic construct
  misc_feature 1..20: note = chemically synthesized
  source 1..20: mol_type = other DNA
agccactcatagggaagcat

SEQ ID NO: 63569 - DNA, 20 bp, synthetic construct
  misc_feature 1..20: note = chemically synthesized
  source 1..20: mol_type = other DNA
actcatagggaagcatcaga

SEQ ID NO: 63570 - DNA, 20 bp, synthetic construct
  misc_feature 1..20: note = chemically synthesized
  source 1..20: mol_type = other DNA
atattacatgtctgacacaa

SEQ ID NO: 63571 - DNA, 20 bp, synthetic construct
  misc_feature 1..20: note = chemically synthesized
  source 1..20: mol_type = other DNA
cacaactgagttgttggttt

SEQ ID NO: 63572 - DNA, 20 bp, synthetic construct
  misc_feature 1..20: note = chemically synthesized
  source 1..20: mol_type = other DNA
tgagagttatgtttaacagg

SEQ ID NO: 63573 - DNA, 20 bp, synthetic construct
  misc_feature 1..20: note = chemically synthesized
  source 1..20: mol_type = other DNA
tcatctgaagacttcatact

SEQ ID NO: 63574 - DNA, 20 bp, synthetic construct
  misc_feature 1..20: note = chemically synthesized
  source 1..20: mol_type = other DNA
gcttcagattaggcaaccta

SEQ ID NO: 63575 - DNA, 20 bp, synthetic construct
  misc_feature 1..20: note = chemically synthesized
  source 1..20: mol_type = other DNA
acagttaataaaaaatacct

SEQ ID NO: 63576 - DNA, 20 bp, synthetic construct
  misc_feature 1..20: note = chemically synthesized
  source 1..20: mol_type = other DNA
ataagatttatgaagaactt

SEQ ID NO: 63577 - DNA, 20 bp, synthetic construct
  misc_feature 1..20: note = chemically synthesized
  source 1..20: mol_type = other DNA
tctaaggaaacttgttttcc

SEQ ID NO: 63578 - DNA, 20 bp, synthetic construct
  misc_feature 1..20: note = chemically synthesized
  source 1..20: mol_type = other DNA
agaagtgagaggacatgatt

SEQ ID NO: 63579 - DNA, 20 bp, synthetic construct
  misc_feature 1..20: note = chemically synthesized
  source 1..20: mol_type = other DNA
ggtgcaggagggcatggttt

SEQ ID NO: 63580 - DNA, 20 bp, synthetic construct
  misc_feature 1..20: note = chemically synthesized
  source 1..20: mol_type = other DNA
gatcccttgcatgcctctat

SEQ ID NO: 63581 - DNA, 20 bp, synthetic construct
  misc_feature 1..20: note = chemically synthesized
  source 1..20: mol_type = other DNA
gaggttgtgtctccattccc

SEQ ID NO: 63582 - DNA, 20 bp, synthetic construct
  misc_feature 1..20: note = chemically synthesized
  source 1..20: mol_type = other DNA
tacttgcagaagataattgc

SEQ ID NO: 63583 - DNA, 20 bp, synthetic construct
  misc_feature 1..20: note = chemically synthesized
  source 1..20: mol_type = other DNA
agaagataattgctagagta

SEQ ID NO: 63584 - DNA, 20 bp, synthetic construct
  misc_feature 1..20: note = chemically synthesized
  source 1..20: mol_type = other DNA
gccaagaacacccctgcagt

SEQ ID NO: 63585 - DNA, 20 bp, synthetic construct
  misc_feature 1..20: note = chemically synthesized
  source 1..20: mol_type = other DNA
tcaggttgcagccagaactg

SEQ ID NO: 63586 - DNA, 20 bp, synthetic construct
  misc_feature 1..20: note = chemically synthesized
  source 1..20: mol_type = other DNA
gtaatgttctctttcttggt

SEQ ID NO: 63587 - DNA, 20 bp, synthetic construct
  misc_feature 1..20: note = chemically synthesized
  source 1..20: mol_type = other DNA
tatttatgtatttttctgta

SEQ ID NO: 63588 - DNA, 20 bp, synthetic construct
  misc_feature 1..20: note = chemically synthesized
  source 1..20: mol_type = other DNA
aaaatataaatttaagaaat

SEQ ID NO: 63589 - DNA, 20 bp, synthetic construct
  misc_feature 1..20: note = chemically synthesized
  source 1..20: mol_type = other DNA
ttacatataaacctggcaga

SEQ ID NO: 63590 - DNA, 20 bp, synthetic construct
  misc_feature 1..20: note = chemically synthesized
  source 1..20: mol_type = other DNA
tgattttttaaaaaacagaa

SEQ ID NO: 63591 - DNA, 20 bp, synthetic construct
  misc_feature 1..20: note = chemically synthesized
  source 1..20: mol_type = other DNA
aaatctatatgtctacagaa

SEQ ID NO: 63592 - DNA, 20 bp, synthetic construct
  misc_feature 1..20: note = chemically synthesized
  source 1..20: mol_type = other DNA
ttacttataaagcattcgtg

SEQ ID NO: 63593 - DNA, 20 bp, synthetic construct
  misc_feature 1..20: note = chemically synthesized
  source 1..20: mol_type = other DNA
ggctaaaaatggtagaaaag

SEQ ID NO: 63594 - DNA, 20 bp, synthetic construct
  misc_feature 1..20: note = chemically synthesized
  source 1..20: mol_type = other DNA
acactgggaaattcagtgca

SEQ ID NO: 63595 - DNA, 20 bp, synthetic construct
  misc_feature 1..20: note = chemically synthesized
  source 1..20: mol_type = other DNA
gaaacagagagattatgcaa

SEQ ID NO: 63596 - DNA, 20 bp, synthetic construct
  misc_feature 1..20: note = chemically synthesized
  source 1..20: mol_type = other DNA
attatgcaaaagaatacata

SEQ ID NO: 63597 - DNA, 20 bp, synthetic construct
  misc_feature 1..20: note = chemically synthesized
  source 1..20: mol_type = other DNA
ggactaatagatattggcat

SEQ ID NO: 63598 - DNA, 20 bp, synthetic construct
  misc_feature 1..20: note = chemically synthesized
  source 1..20: mol_type = other DNA
ggcatttgagtattcgctta

SEQ ID NO: 63599 - DNA, 20 bp, synthetic construct
  misc_feature 1..20: note = chemically synthesized
  source 1..20: mol_type = other DNA
tattattatactttaagttt

SEQ ID NO: 63600 - DNA, 20 bp, synthetic construct
  misc_feature 1..20: note = chemically synthesized
  source 1..20: mol_type = other DNA
ccccaccccacaacagtccc

SEQ ID NO: 63601 - DNA, 20 bp, synthetic construct
  misc_feature 1..20: note = chemically synthesized
  source 1..20: mol_type = other DNA
tcattgttcaattcccacct

SEQ ID NO: 63602 - DNA, 20 bp, synthetic construct
  misc_feature 1..20: note = chemically synthesized
  source 1..20: mol_type = other DNA
cgtccttgcgatagtttact

SEQ ID NO: 63603 - DNA, 20 bp, synthetic construct
  misc_feature 1..20: note = chemically synthesized
  source 1..20: mol_type = other DNA
agtctatcattgttggacat

SEQ ID NO: 63604 - DNA, 20 bp, synthetic construct
  misc_feature 1..20: note = chemically synthesized
  source 1..20: mol_type = other DNA
ggttccaagtctttgctatt

SEQ ID NO: 63605 - DNA, 20 bp, synthetic construct
  misc_feature 1..20: note = chemically synthesized
  source 1..20: mol_type = other DNA
atatttcatggtgaggaaca

SEQ ID NO: 63606 - DNA, 20 bp, synthetic construct
  misc_feature 1..20: note = chemically synthesized
  source 1..20: mol_type = other DNA
tgaggaacaaagaatatggt

SEQ ID NO: 63607 - DNA, 20 bp, synthetic construct
  misc_feature 1..20: note = chemically synthesized
  source 1..20: mol_type = other DNA
agaacttttgtgtctagcta

SEQ ID NO: 63608 - DNA, 20 bp, synthetic construct
  misc_feature 1..20: note = chemically synthesized
  source 1..20: mol_type = other DNA
ctgtaaaatggaccaatcag

SEQ ID NO: 63609 - DNA, 20 bp, synthetic construct
  misc_feature 1..20: note = chemically synthesized
  source 1..20: mol_type = other DNA
aatggaccaatcagcaggat

SEQ ID NO: 63610 - DNA, 20 bp, synthetic construct
  misc_feature 1..20: note = chemically synthesized
  source 1..20: mol_type = other DNA
accaatcagcaggatgtggg

SEQ ID NO: 63611 - DNA, 20 bp, synthetic construct
  misc_feature 1..20: note = chemically synthesized
  source 1..20: mol_type = other DNA
agccagctgtgacaactgac

SEQ ID NO: 63612 - DNA, 20 bp, synthetic construct
  misc_feature 1..20: note = chemically synthesized
  source 1..20: mol_type = other DNA
atcttactgctgctcactct

SEQ ID NO: 63613 - DNA, 20 bp, synthetic construct
  misc_feature 1..20: note = chemically synthesized
  source 1..20: mol_type = other DNA
aagaccacgaacccagcatg

SEQ ID NO: 63614 - DNA, 20 bp, synthetic construct
  misc_feature 1..20: note = chemically synthesized
  source 1..20: mol_type = other DNA
gatgaacaacccaagacagg

SEQ ID NO: 63615 - DNA, 20 bp, synthetic construct
  misc_feature 1..20: note = chemically synthesized
  source 1..20: mol_type = other DNA
agagctgtaacactccccgt

SEQ ID NO: 63616 - DNA, 20 bp, synthetic construct
  misc_feature 1..20: note = chemically synthesized
  source 1..20: mol_type = other DNA
cctttgaacacaccatcttt

SEQ ID NO: 63617 - DNA, 20 bp, synthetic construct
  misc_feature 1..20: note = chemically synthesized
  source 1..20: mol_type = other DNA
agaattgtaacactcaccac

SEQ ID NO: 63618 - DNA, 20 bp, synthetic construct
  misc_feature 1..20: note = chemically synthesized
  source 1..20: mol_type = other DNA
cccaccaattccggacacag

SEQ ID NO: 63619 - DNA, 20 bp, synthetic construct
  misc_feature 1..20: note = chemically synthesized
  source 1..20: mol_type = other DNA
aaggatggacaaagattatc

SEQ ID NO: 63620 - DNA, 20 bp, synthetic construct
  misc_feature 1..20: note = chemically synthesized
  source 1..20: mol_type = other DNA
caacacaaaaattacatacc

SEQ ID NO: 63621 - DNA, 20 bp, synthetic construct
  misc_feature 1..20: note = chemically synthesized
  source 1..20: mol_type = other DNA
ttagatccttgatatttgaa

SEQ ID NO: 63622 - DNA, 20 bp, synthetic construct
  misc_feature 1..20: note = chemically synthesized
  source 1..20: mol_type = other DNA
gggggacaggaagtagattt

SEQ ID NO: 63623 - DNA, 20 bp, synthetic construct
  misc_feature 1..20: note = chemically synthesized
  source 1..20: mol_type = other DNA
agtgcagaaaaaaaggacaa

SEQ ID NO: 63624 - DNA, 20 bp, synthetic construct
  misc_feature 1..20: note = chemically synthesized
  source 1..20: mol_type = other DNA
ggggggcatggaggaaaaaa

SEQ ID NO: 63625 - DNA, 20 bp, synthetic construct
  misc_feature 1..20: note = chemically synthesized
  source 1..20: mol_type = other DNA
aggaactccaaaatcttaac

SEQ ID NO: 63626 - DNA, 20 bp, synthetic construct
  misc_feature 1..20: note = chemically synthesized
  source 1..20: mol_type = other DNA
atcttaactggagttcagga

SEQ ID NO: 63627 - DNA, 20 bp, synthetic construct
  misc_feature 1..20: note = chemically synthesized
  source 1..20: mol_type = other DNA
agaacacagcagttgaaatt

SEQ ID NO: 63628 - DNA, 20 bp, synthetic construct
  misc_feature 1..20: note = chemically synthesized
  source 1..20: mol_type = other DNA
aaaaattcatggtaagttaa

SEQ ID NO: 63629 - DNA, 20 bp, synthetic construct
  misc_feature 1..20: note = chemically synthesized
  source 1..20: mol_type = other DNA
aactctcacttattgcttgt

SEQ ID NO: 63630 - DNA, 20 bp, synthetic construct
  misc_feature 1..20: note = chemically synthesized
  source 1..20: mol_type = other DNA
actcctatgtatttacccaa

SEQ ID NO: 63631 - DNA, 20 bp, synthetic construct
  misc_feature 1..20: note = chemically synthesized
  source 1..20: mol_type = other DNA
aaaagttgaaagtaaccaag

SEQ ID NO: 63632 - DNA, 20 bp, synthetic construct
  misc_feature 1..20: note = chemically synthesized
  source 1..20: mol_type = other DNA
gttgaaagtaaccaagatga

SEQ ID NO: 63633 - DNA, 20 bp, synthetic construct
  misc_feature 1..20: note = chemically synthesized
  source 1..20: mol_type = other DNA
gataaactgtggaacatcca

SEQ ID NO: 63634 - DNA, 20 bp, synthetic construct
  misc_feature 1..20: note = chemically synthesized
  source 1..20: mol_type = other DNA
actgtggaacatccatagga

SEQ ID NO: 63635 - DNA, 20 bp, synthetic construct
  misc_feature 1..20: note = chemically synthesized
  source 1..20: mol_type = other DNA
tattcaataatagacaaata

SEQ ID NO: 63636 - DNA, 20 bp, synthetic construct
  misc_feature 1..20: note = chemically synthesized
  source 1..20: mol_type = other DNA
agtttcagacagctattgca

SEQ ID NO: 63637 - DNA, 20 bp, synthetic construct
  misc_feature 1..20: note = chemically synthesized
  source 1..20: mol_type = other DNA
ggtttcatgtcactttggac

SEQ ID NO: 63638 - DNA, 20 bp, synthetic construct
  misc_feature 1..20: note = chemically synthesized
  source 1..20: mol_type = other DNA
cactttggacatgagtaaag

SEQ ID NO: 63639 - DNA, 20 bp, synthetic construct
  misc_feature 1..20: note = chemically synthesized
  source 1..20: mol_type = other DNA
actcccaaatcttgatcaca

SEQ ID NO: 63640 - DNA, 20 bp, synthetic construct
  misc_feature 1..20: note = chemically synthesized
  source 1..20: mol_type = other DNA
gcattaaatatcatttatta

SEQ ID NO: 63641 - DNA, 20 bp, synthetic construct
  misc_feature 1..20: note = chemically synthesized
  source 1..20: mol_type = other DNA
ctgtaaaaaaatacctgaga

SEQ ID NO: 63642 - DNA, 20 bp, synthetic construct
  misc_feature 1..20: note = chemically synthesized
  source 1..20: mol_type = other DNA
atggccaggacagggagaag

SEQ ID NO: 63643 - DNA, 20 bp, synthetic construct
  misc_feature 1..20: note = chemically synthesized
  source 1..20: mol_type = other DNA
actcactatacagtaccaag

SEQ ID NO: 63644 - DNA, 20 bp, synthetic construct
  misc_feature 1..20: note = chemically synthesized
  source 1..20: mol_type = other DNA
tgagaactctgccaccatga

SEQ ID NO: 63645 - DNA, 20 bp, synthetic construct
  misc_feature 1..20: note = chemically synthesized
  source 1..20: mol_type = other DNA
attataatttaacatgatat

SEQ ID NO: 63646 - DNA, 20 bp, synthetic construct
  misc_feature 1..20: note = chemically synthesized
  source 1..20: mol_type = other DNA
acataatggaggtactggca

SEQ ID NO: 63647 - DNA, 20 bp, synthetic construct
  misc_feature 1..20: note = chemically synthesized
  source 1..20: mol_type = other DNA
aaaggggctaaagatcccac

SEQ ID NO: 63648 - DNA, 20 bp, synthetic construct
  misc_feature 1..20: note = chemically synthesized
  source 1..20: mol_type = other DNA
tttcccacccaaatttcttc

SEQ ID NO: 63649 - DNA, 20 bp, synthetic construct
  misc_feature 1..20: note = chemically synthesized
  source 1..20: mol_type = other DNA
ctgtcatggaaggaacacac

SEQ ID NO: 63650 - DNA, 20 bp, synthetic construct
  misc_feature 1..20: note = chemically synthesized
  source 1..20: mol_type = other DNA
aggaacacactgggatgtaa

SEQ ID NO: 63651 - DNA, 20 bp, synthetic construct
  misc_feature 1..20: note = chemically synthesized
  source 1..20: mol_type = other DNA
ctgggatgtaattgaatcat

SEQ ID NO: 63652 - DNA, 20 bp, synthetic construct
  misc_feature 1..20: note = chemically synthesized
  source 1..20: mol_type = other DNA
cacatgctgttctcatgata

SEQ ID NO: 63653 - DNA, 20 bp, synthetic construct
  misc_feature 1..20: note = chemically synthesized
  source 1..20: mol_type = other DNA
tgtaaggcctccccagcaat

SEQ ID NO: 63654 - DNA, 20 bp, synthetic construct
  misc_feature 1..20: note = chemically synthesized
  source 1..20: mol_type = other DNA
ctccccagcaatgtggatct

SEQ ID NO: 63655 - DNA, 20 bp, synthetic construct
  misc_feature 1..20: note = chemically synthesized
  source 1..20: mol_type = other DNA
tctttataaattacccagtc

SEQ ID NO: 63656 - DNA, 20 bp, synthetic construct
  misc_feature 1..20: note = chemically synthesized
  source 1..20: mol_type = other DNA
gctgctcttaagagattgta

SEQ ID NO: 63657 - DNA, 20 bp, synthetic construct
  misc_feature 1..20: note = chemically synthesized
  source 1..20: mol_type = other DNA
gtgcacggtgcaaactgtca

SEQ ID NO: 63658 - DNA, 20 bp, synthetic construct
  misc_feature 1..20: note = chemically synthesized
  source 1..20: mol_type = other DNA
tgtcagtggatctaccattc

SEQ ID NO: 63659 - DNA, 20 bp, synthetic construct
  misc_feature 1..20: note = chemically synthesized
  source 1..20: mol_type = other DNA
ccccagtggagactctgtga

SEQ ID NO: 63660 - DNA, 20 bp, synthetic construct
  misc_feature 1..20: note = chemically synthesized
  source 1..20: mol_type = other DNA
ccctattagaggttcttcat

SEQ ID NO: 63661 - DNA, 20 bp, synthetic construct
  misc_feature 1..20: note = chemically synthesized
  source 1..20: mol_type = other DNA
acagctggtgctggagcagc

SEQ ID NO: 63662 - DNA, 20 bp, synthetic construct
  misc_feature 1..20: note = chemically synthesized
  source 1..20: mol_type = other DNA
cctgaagctgctcaaggcag

SEQ ID NO: 63663 - DNA, 20 bp, synthetic construct
  misc_feature 1..20: note = chemically synthesized
  source 1..20: mol_type = other DNA
ctgctcaaggcagcagggtc

SEQ ID NO: 63664 - DNA, 20 bp, synthetic construct
  misc_feature 1..20: note = chemically synthesized
  source 1..20: mol_type = other DNA
gtgatgtgaggggctgctac

SEQ ID NO: 63665 - DNA, 20 bp, synthetic construct
  misc_feature 1..20: note = chemically synthesized
  source 1..20: mol_type = other DNA
tgcaaatttctacagcctgc

SEQ ID NO: 63666 - DNA, 20 bp, synthetic construct
  misc_feature 1..20: note = chemically synthesized
  source 1..20: mol_type = other DNA
cttaaataatattatcaact

SEQ ID NO: 63667 - DNA, 20 bp, synthetic construct
  misc_feature 1..20: note = chemically synthesized
  source 1..20: mol_type = other DNA
ttcattgtccatatcactat

SEQ ID NO: 63668 - DNA, 20 bp, synthetic construct
  misc_feature 1..20: note = chemically synthesized
  source 1..20: mol_type = other DNA
ctataaggaaatacctgaga

SEQ ID NO: 63669 - DNA, 20 bp, synthetic construct
  misc_feature 1..20: note = chemically synthesized
  source 1..20: mol_type = other DNA
caggccccatcttcaacact

SEQ ID NO: 63670 - DNA, 20 bp, synthetic construct
  misc_feature 1..20: note = chemically synthesized
  source 1..20: mol_type = other DNA
attacagctgaacatgagat

SEQ ID NO: 63671 - DNA, 20 bp, synthetic construct
  misc_feature 1..20: note = chemically synthesized
  source 1..20: mol_type = other DNA
caaaacacaacaacaaaacg

SEQ ID NO: 63672 - DNA, 20 bp, synthetic construct
  misc_feature 1..20: note = chemically synthesized
  source 1..20: mol_type = other DNA
cacaaactccacctggaaag

SEQ ID NO: 63673 - DNA, 20 bp, synthetic construct
  misc_feature 1..20: note = chemically synthesized
  source 1..20: mol_type = other DNA
ccactgagaaactctacagc

SEQ ID NO: 63674 - DNA, 20 bp, synthetic construct
  misc_feature 1..20: note = chemically synthesized
  source 1..20: mol_type = other DNA
aatgttttaagaaagttgtg

SEQ ID NO: 63675 - DNA, 20 bp, synthetic construct
  misc_feature 1..20: note = chemically synthesized
  source 1..20: mol_type = other DNA
gatagcattcaaagccatct

SEQ ID NO: 63676 - DNA, 20 bp, synthetic construct
  misc_feature 1..20: note = chemically synthesized
  source 1..20: mol_type = other DNA
ccaaattacttgttcgaaga

SEQ ID NO: 63677 - DNA, 20 bp, synthetic construct
  misc_feature 1..20: note = chemically synthesized
  source 1..20: mol_type = other DNA
tgttcgaagaaaggatcatc

SEQ ID NO: 63678 - DNA, 20 bp, synthetic construct
  misc_feature 1..20: note = chemically synthesized
  source 1..20: mol_type = other DNA
gatcatctggaattcttttc

SEQ ID NO: 63679 - DNA, 20 bp, synthetic construct
  misc_feature 1..20: note = chemically synthesized
  source 1..20: mol_type = other DNA
aagtatcttacatattgaag

SEQ ID NO: 63680 - DNA, 20 bp, synthetic construct
  misc_feature 1..20: note = chemically synthesized
  source 1..20: mol_type = other DNA
aatccatagaaatttaaaaa

SEQ ID NO: 63681 - DNA, 20 bp, synthetic construct
  misc_feature 1..20: note = chemically synthesized
  source 1..20: mol_type = other DNA
tttctgacatgaacttatgt

SEQ ID NO: 63682 - DNA, 20 bp, synthetic construct
  misc_feature 1..20: note = chemically synthesized
  source 1..20: mol_type = other DNA
taactattatttcatctgca

SEQ ID NO: 63683 - DNA, 20 bp, synthetic construct
  misc_feature 1..20: note = chemically synthesized
  source 1..20: mol_type = other DNA
tgtatcacagcagccgtagt

SEQ ID NO: 63684 - DNA, 20 bp, synthetic construct
  misc_feature 1..20: note = chemically synthesized
  source 1..20: mol_type = other DNA
aaaaaaaattcttcaagttt

SEQ ID NO: 63685 - DNA, 20 bp, synthetic construct
  misc_feature 1..20: note = chemically synthesized
  source 1..20: mol_type = other DNA
acattataataagttatcag

SEQ ID NO: 63686 - DNA, 20 bp, synthetic construct
  misc_feature 1..20: note = chemically synthesized
  source 1..20: mol_type = other DNA
ttatcagcagagtatacctc

SEQ ID NO: 63687 - DNA, 20 bp, synthetic construct
  misc_feature 1..20: note = chemically synthesized
  source 1..20: mol_type = other DNA
attcctttaatttcttttcc

SEQ ID NO: 63688 - DNA, 20 bp, synthetic construct
  misc_feature 1..20: note = chemically synthesized
  source 1..20: mol_type = other DNA
tcactatggtttcaagacct

SEQ ID NO: 63689 - DNA, 20 bp, synthetic construct
  misc_feature 1..20: note = chemically synthesized
  source 1..20: mol_type = other DNA
tccaatcaagatcatccagt

SEQ ID NO: 63690 - DNA, 20 bp, synthetic construct
  misc_feature 1..20: note = chemically synthesized
  source 1..20: mol_type = other DNA
tataggtgaaaaaagcttct

SEQ ID NO: 63691 - DNA, 20 bp, synthetic construct
  misc_feature 1..20: note = chemically synthesized
  source 1..20: mol_type = other DNA
atatggaaggctccacttga

SEQ ID NO: 63692 - DNA, 20 bp, synthetic construct
  misc_feature 1..20: note = chemically synthesized
  source 1..20: mol_type = other DNA
tgaagccagtttttaattcc

SEQ ID NO: 63693 - DNA, 20 bp, synthetic construct
  misc_feature 1..20: note = chemically synthesized
  source 1..20: mol_type = other DNA
ctcattaaagtatccttcaa

SEQ ID NO: 63694 - DNA, 20 bp, synthetic construct
  misc_feature 1..20: note = chemically synthesized
  source 1..20: mol_type = other DNA
taaagtatccttcaagagaa

SEQ ID NO: 63695 - DNA, 20 bp, synthetic construct
  misc_feature 1..20: note = chemically synthesized
  source 1..20: mol_type = other DNA
attaaagggaaataaaatga

SEQ ID NO: 63696 - DNA, 20 bp, synthetic construct
  misc_feature 1..20: note = chemically synthesized
  source 1..20: mol_type = other DNA
atgtattaacttaggtgtca

SEQ ID NO: 63697 - DNA, 20 bp, synthetic construct
  misc_feature 1..20: note = chemically synthesized
  source 1..20: mol_type = other DNA
atgcacaaattataatgaaa

SEQ ID NO: 63698 - DNA, 20 bp, synthetic construct
  misc_feature 1..20: note = chemically synthesized
  source 1..20: mol_type = other DNA
gtgtcatctccttccatggg

SEQ ID NO: 63699 - DNA, 20 bp, synthetic construct
  misc_feature 1..20: note = chemically synthesized
  source 1..20: mol_type = other DNA
ctcaacctgctaaatatctt

SEQ ID NO: 63700 - DNA, 20 bp, synthetic construct
  misc_feature 1..20: note = chemically synthesized
  source 1..20: mol_type = other DNA
agaaaatgcaagtaagtaaa

SEQ ID NO: 63701 - DNA, 20 bp, synthetic construct
  misc_feature 1..20: note = chemically synthesized
  source 1..20: mol_type = other DNA
tttccttgatttttgaccca

SEQ ID NO: 63702 - DNA, 20 bp, synthetic construct
  misc_feature 1..20: note = chemically synthesized
  source 1..20: mol_type = other DNA
atactagacttggctttagc

SEQ ID NO: 63703 - DNA, 20 bp, synthetic construct
  misc_feature 1..20: note = chemically synthesized
  source 1..20: mol_type = other DNA
ttaagtaagtcattttcaaa

SEQ ID NO: 63704 - DNA, 20 bp, synthetic construct
  misc_feature 1..20: note = chemically synthesized
  source 1..20: mol_type = other DNA
agaatattttagttttctct

SEQ ID NO: 63705 - DNA, 20 bp, synthetic construct
  misc_feature 1..20: note = chemically synthesized
  source 1..20: mol_type = other DNA
attttctttgatatgcagat

SEQ ID NO: 63706 - DNA, 20 bp, synthetic construct
  misc_feature 1..20: note = chemically synthesized
  source 1..20: mol_type = other DNA
gaatgttgtacaaagattca

SEQ ID NO: 63707 - DNA, 20 bp, synthetic construct
  misc_feature 1..20: note = chemically synthesized
  source 1..20: mol_type = other DNA
ataaaagtaaatgacagata

SEQ ID NO: 63708 - DNA, 20 bp, synthetic construct
  misc_feature 1..20: note = chemically synthesized
  source 1..20: mol_type = other DNA
aaaatttattcctagtattt

SEQ ID NO: 63709 - DNA, 20 bp, synthetic construct
  misc_feature 1..20: note = chemically synthesized
  source 1..20: mol_type = other DNA
atcaattcaatctcagtttg

SEQ ID NO: 63710 - DNA, 20 bp, synthetic construct
  misc_feature 1..20: note = chemically synthesized
  source 1..20: mol_type = other DNA
gtcctgatgtcatctattgt

SEQ ID NO: 63711 - DNA, 20 bp, synthetic construct
  misc_feature 1..20: note = chemically synthesized
  source 1..20: mol_type = other DNA
tttaaattaaatgacgtgtc

SEQ ID NO: 63712 - DNA, 20 bp, synthetic construct
  misc_feature 1..20: note = chemically synthesized
  source 1..20: mol_type = other DNA
aaatgacgtgtccagggtca

SEQ ID NO: 63713 - DNA, 20 bp, synthetic construct
  misc_feature 1..20: note = chemically synthesized
  source 1..20: mol_type = other DNA
cgtgtccagggtcatagagt

SEQ ID NO: 63714 - DNA, 20 bp, synthetic construct
  misc_feature 1..20: note = chemically synthesized
  source 1..20: mol_type = other DNA
caccacactatctttgctcc

SEQ ID NO: 63715 - DNA, 20 bp, synthetic construct
  misc_feature 1..20: note = chemically synthesized
  source 1..20: mol_type = other DNA
ggatacattcatgattcagt

SEQ ID NO: 63716 - DNA, 20 bp, synthetic construct
  misc_feature 1..20: note = chemically synthesized
  source 1..20: mol_type = other DNA
atatgctgtcagaaatatcc

SEQ ID NO: 63717 - DNA, 20 bp, synthetic construct
  misc_feature 1..20: note = chemically synthesized
  source 1..20: mol_type = other DNA
aaggaacccaggcctataat

SEQ ID NO: 63718 - DNA, 20 bp, synthetic construct
  misc_feature 1..20: note = chemically synthesized
  source 1..20: mol_type = other DNA
ctctggcctagaactgtgtc

SEQ ID NO: 63719 - DNA, 20 bp, synthetic construct
  misc_feature 1..20: note = chemically synthesized
  source 1..20: mol_type = other DNA
atgtaaataaagtagatcca

SEQ ID NO: 63720 - DNA, 20 bp, synthetic construct
  misc_feature 1..20: note = chemically synthesized
  source 1..20: mol_type = other DNA
acctcattccaacttaaagc

SEQ ID NO: 63721 - DNA, 20 bp, synthetic construct
  misc_feature 1..20: note = chemically synthesized
  source 1..20: mol_type = other DNA
agggtaaattgctcagctgt

SEQ ID NO: 63722 - DNA, 20 bp, synthetic construct
  misc_feature 1..20: note = chemically synthesized
  source 1..20: mol_type = other DNA
catcatataaaatttgagac

SEQ ID NO: 63723 - DNA, 20 bp, synthetic construct
  misc_feature 1..20: note = chemically synthesized
  source 1..20: mol_type = other DNA
atcagtatattgaactgtaa

SEQ ID NO: 63724 - DNA, 20 bp, synthetic construct
  misc_feature 1..20: note = chemically synthesized
  source 1..20: mol_type = other DNA
tacttgagaaagggaactta

SEQ ID NO: 63725 - DNA, 20 bp, synthetic construct
  misc_feature 1..20: note = chemically synthesized
  source 1..20: mol_type = other DNA
tctccctggtttagtcttgg

SEQ ID NO: 63726 - DNA, 20 bp, synthetic construct
  misc_feature 1..20: note = chemically synthesized
  source 1..20: mol_type = other DNA
ttgggagggtgtatgtgtcg

SEQ ID NO: 63727 - DNA, 20 bp, synthetic construct
  misc_feature 1..20: note = chemically synthesized
  source 1..20: mol_type = other DNA
gatggtagtttgtatgtctg

SEQ ID NO: 63728 - DNA, 20 bp, synthetic construct
  misc_feature 1..20: note = chemically synthesized
  source 1..20: mol_type = other DNA
tcatttcttattgcatctat

SEQ ID NO: 63729 - DNA, 20 bp, synthetic construct
  misc_feature 1..20: note = chemically synthesized
  source 1..20: mol_type = other DNA
tcttttcaaaaaaccagctc

SEQ ID NO: 63730 - DNA, 20 bp, synthetic construct
  misc_feature 1..20: note = chemically synthesized
  source 1..20: mol_type = other DNA
ctggattcattgattttttt

SEQ ID NO: 63731 - DNA, 20 bp, synthetic construct
  misc_feature 1..20: note = chemically synthesized
  source 1..20: mol_type = other DNA
agttcttttaattgtgatgt

SEQ ID NO: 63732 - DNA, 20 bp, synthetic construct
  misc_feature 1..20: note = chemically synthesized
  source 1..20: mol_type = other DNA
gctgttcagtttccatgtag

SEQ ID NO: 63733 - DNA, 20 bp, synthetic construct
  misc_feature 1..20: note = chemically synthesized
  source 1..20: mol_type = other DNA
ttccatgtagttgagtggtt

SEQ ID NO: 63734 - DNA, 20 bp, synthetic construct
  misc_feature 1..20: note = chemically synthesized
  source 1..20: mol_type = other DNA
atgtagttgagtggttttga

SEQ ID NO: 63735 - DNA, 20 bp, synthetic construct
  misc_feature 1..20: note = chemically synthesized
  source 1..20: mol_type = other DNA
tttgagtgagtttcttaatc

SEQ ID NO: 63736 - DNA, 20 bp, synthetic construct
  misc_feature 1..20: note = chemically synthesized
  source 1..20: mol_type = other DNA
ctgttcttttacgtttgctg

SEQ ID NO: 63737 - DNA, 20 bp, synthetic construct
  misc_feature 1..20: note = chemically synthesized
  source 1..20: mol_type = other DNA
cttccaactatgtggtcaac

SEQ ID NO: 63738 - DNA, 20 bp, synthetic construct
  misc_feature 1..20: note = chemically synthesized
  source 1..20: mol_type = other DNA
aggtgtggtgtggtgctgag

SEQ ID NO: 63739 - DNA, 20 bp, synthetic construct
  misc_feature 1..20: note = chemically synthesized
  source 1..20: mol_type = other DNA
gaatgtatattctattgatt

SEQ ID NO: 63740 - DNA, 20 bp, synthetic construct
  misc_feature 1..20: note = chemically synthesized
  source 1..20: mol_type = other DNA
tattctattgatttgggatg

SEQ ID NO: 63741 - DNA, 20 bp, synthetic construct
  misc_feature 1..20: note = chemically synthesized
  source 1..20: mol_type = other DNA
taggtctgcttggtgcagag

SEQ ID NO: 63742 - DNA, 20 bp, synthetic construct
  misc_feature 1..20: note = chemically synthesized
  source 1..20: mol_type = other DNA
tgcagagctgaattcaattc

SEQ ID NO: 63743 - DNA, 20 bp, synthetic construct
  misc_feature 1..20: note = chemically synthesized
  source 1..20: mol_type = other DNA
gatctgtctaatgttgacag

SEQ ID NO: 63744 - DNA, 20 bp, synthetic construct
  misc_feature 1..20: note = chemically synthesized
  source 1..20: mol_type = other DNA
gtctcccattattattgtgt

SEQ ID NO: 63745 - DNA, 20 bp, synthetic construct
  misc_feature 1..20: note = chemically synthesized
  source 1..20: mol_type = other DNA
ggtctctaaggacttgcttt

SEQ ID NO: 63746 - DNA, 20 bp, synthetic construct
  misc_feature 1..20: note = chemically synthesized
  source 1..20: mol_type = other DNA
taaggacttgctttatgaat

SEQ ID NO: 63747 - DNA, 20 bp, synthetic construct
  misc_feature 1..20: note = chemically synthesized
  source 1..20: mol_type = other DNA
tgaatctgggtgctgctgta

SEQ ID NO: 63748 - DNA, 20 bp, synthetic construct
  misc_feature 1..20: note = chemically synthesized
  source 1..20: mol_type = other DNA
gtattgggtgcatatatatt

SEQ ID NO: 63749 - DNA, 20 bp, synthetic construct
  misc_feature 1..20: note = chemically synthesized
  source 1..20: mol_type = other DNA
aggatagttagctcttcttg

SEQ ID NO: 63750 - DNA, 20 bp, synthetic construct
  misc_feature 1..20: note = chemically synthesized
  source 1..20: mol_type = other DNA
ctccacatgagattggtttc

SEQ ID NO: 63751 - DNA, 20 bp, synthetic construct
  misc_feature 1..20: note = chemically synthesized
  source 1..20: mol_type = other DNA
taaggttaatattgttatgt

SEQ ID NO: 63752 - DNA, 20 bp, synthetic construct
  misc_feature 1..20: note = chemically synthesized
  source 1..20: mol_type = other DNA
caaaaaaagtccaggaccag

SEQ ID NO: 63753 - DNA, 20 bp, synthetic construct
  misc_feature 1..20: note = chemically synthesized
  source 1..20: mol_type = other DNA
aggaccagatggattcacag

SEQ ID NO: 63754 - DNA, 20 bp, synthetic construct
  misc_feature 1..20: note = chemically synthesized
  source 1..20: mol_type = other DNA
ttccaatcaatagaaaaaga

SEQ ID NO: 63755 - DNA, 20 bp, synthetic construct
  misc_feature 1..20: note = chemically synthesized
  source 1..20: mol_type = other DNA
gcagacacacaacaaaaaaa

SEQ ID NO: 63756 - DNA, 20 bp, synthetic construct
  misc_feature 1..20: note = chemically synthesized
  source 1..20: mol_type = other DNA
gatcaagtgggcttcatccc

SEQ ID NO: 63757 - DNA, 20 bp, synthetic construct
  misc_feature 1..20: note = chemically synthesized
  source 1..20: mol_type = other DNA
aacccacagccaatatcata

SEQ ID NO: 63758 - DNA, 20 bp, synthetic construct
  misc_feature 1..20: note = chemically synthesized
  source 1..20: mol_type = other DNA
tttgaaaactggcacaagac

SEQ ID NO: 63759 - DNA, 20 bp, synthetic construct
  misc_feature 1..20: note = chemically synthesized
  source 1..20: mol_type = other DNA
gacaaacagagagccaaatc

SEQ ID NO: 63760 - DNA, 20 bp, synthetic construct
  misc_feature 1..20: note = chemically synthesized
  source 1..20: mol_type = other DNA
ccattcacaattgcctcaaa

SEQ ID NO: 63761 - DNA, 20 bp, synthetic construct
  misc_feature 1..20: note = chemically synthesized
  source 1..20: mol_type = other DNA
tcaaagagaataaaatacct

SEQ ID NO: 63762 - DNA, 20 bp, synthetic construct
  misc_feature 1..20: note = chemically synthesized
  source 1..20: mol_type = other DNA
acctaggaatccaacttaca

SEQ ID NO: 63763 - DNA, 20 bp, synthetic construct
  misc_feature 1..20: note = chemically synthesized
  source 1..20: mol_type = other DNA
cactgctcaacgaaataaaa

SEQ ID NO: 63764 - DNA, 20 bp, synthetic construct
  misc_feature 1..20: note = chemically synthesized
  source 1..20: mol_type = other DNA
tggaagaacattccatgctc

SEQ ID NO: 63765 - DNA, 20 bp, synthetic construct
  misc_feature 1..20: note = chemically synthesized
  source 1..20: mol_type = other DNA
attccatgctcatggatagg

SEQ ID NO: 63766 - DNA, 20 bp, synthetic construct
  misc_feature 1..20: note = chemically synthesized
  source 1..20: mol_type = other DNA
gctaccaatgactttcttca

SEQ ID NO: 63767 - DNA, 20 bp, synthetic construct
  misc_feature 1..20: note = chemically synthesized
  source 1..20: mol_type = other DNA
acaaaaacaagcaatgggga

SEQ ID NO: 63768 - DNA, 20 bp, synthetic construct
  misc_feature 1..20: note = chemically synthesized
  source 1..20: mol_type = other DNA
ccatatgtagaaagctgaaa

SEQ ID NO: 63769 - DNA, 20 bp, synthetic construct
  misc_feature 1..20: note = chemically synthesized
  source 1..20: mol_type = other DNA
tatacaaaaattatttcaag

SEQ ID NO: 63770 - DNA, 20 bp, synthetic construct
  misc_feature 1..20: note = chemically synthesized
  source 1..20: mol_type = other DNA
caaaagacaaaatggacaaa

SEQ ID NO: 63771 - DNA, 20 bp, synthetic construct
  misc_feature 1..20: note = chemically synthesized
  source 1..20: mol_type = other DNA
acagcaaaagaaactaccat

SEQ ID NO: 63772 - DNA, 20 bp, synthetic construct
  misc_feature 1..20: note = chemically synthesized
  source 1..20: mol_type = other DNA
tctgacaaagggctaatatc

SEQ ID NO: 63773 - DNA, 20 bp, synthetic construct
  misc_feature 1..20: note = chemically synthesized
  source 1..20: mol_type = other DNA
acaaacaactgcatcaacaa

SEQ ID NO: 63774 - DNA, 20 bp, synthetic construct
  misc_feature 1..20: note = chemically synthesized
  source 1..20: mol_type = other DNA
actgcatcaacaagggggtg

SEQ ID NO: 63775 - DNA, 20 bp, synthetic construct
  misc_feature 1..20: note = chemically synthesized
  source 1..20: mol_type = other DNA
agatatcatctcacaccagt

SEQ ID NO: 63776 - DNA, 20 bp, synthetic construct
  misc_feature 1..20: note = chemically synthesized
  source 1..20: mol_type = other DNA
aggaaaccacaggtgctgga

SEQ ID NO: 63777 - DNA, 20 bp, synthetic construct
  misc_feature 1..20: note = chemically synthesized
  source 1..20: mol_type = other DNA
agtcagtgtggcaattcctc

SEQ ID NO: 63778 - DNA, 20 bp, synthetic construct
  misc_feature 1..20: note = chemically synthesized
  source 1..20: mol_type = other DNA
ttgacccagccatcctatta

SEQ ID NO: 63779 - DNA, 20 bp, synthetic construct
  misc_feature 1..20: note = chemically synthesized
  source 1..20: mol_type = other DNA
attactgggtatatacccaa

SEQ ID NO: 63780 - DNA, 20 bp, synthetic construct
  misc_feature 1..20: note = chemically synthesized
  source 1..20: mol_type = other DNA
aaatgtccaacaatgataga

SEQ ID NO: 63781 - DNA, 20 bp, synthetic construct
  misc_feature 1..20: note = chemically synthesized
  source 1..20: mol_type = other DNA
aatgtggcacatatacatca

SEQ ID NO: 63782 - DNA, 20 bp, synthetic construct
  misc_feature 1..20: note = chemically synthesized
  source 1..20: mol_type = other DNA
ctatgcagccataaaaaatg

SEQ ID NO: 63783 - DNA, 20 bp, synthetic construct
  misc_feature 1..20: note = chemically synthesized
  source 1..20: mol_type = other DNA
ttcatgtcctttgtagggac

SEQ ID NO: 63784 - DNA, 20 bp, synthetic construct
  misc_feature 1..20: note = chemically synthesized
  source 1..20: mol_type = other DNA
acatattctcactcataggt

SEQ ID NO: 63785 - DNA, 20 bp, synthetic construct
  misc_feature 1..20: note = chemically synthesized
  source 1..20: mol_type = other DNA
tcacacaccggggcctgttg

SEQ ID NO: 63786 - DNA, 20 bp, synthetic construct
  misc_feature 1..20: note = chemically synthesized
  source 1..20: mol_type = other DNA
gtggggtgggggccgggggg

SEQ ID NO: 63787 - DNA, 20 bp, synthetic construct
  misc_feature 1..20: note = chemically synthesized
  source 1..20: mol_type = other DNA
agatatacctaatgtaaatg

SEQ ID NO: 63788 - DNA, 20 bp, synthetic construct
  misc_feature 1..20: note = chemically synthesized
  source 1..20: mol_type = other DNA
ctaatgtaaatgacgagtta

SEQ ID NO: 63789 - DNA, 20 bp, synthetic construct
  misc_feature 1..20: note = chemically synthesized
  source 1..20: mol_type = other DNA
atatacttttttttttgaga

SEQ ID NO: 63790 - DNA, 20 bp, synthetic construct
  misc_feature 1..20: note = chemically synthesized
  source 1..20: mol_type = other DNA
tctcgctctgtcacctaggc

SEQ ID NO: 63791 - DNA, 20 bp, synthetic construct
  misc_feature 1..20: note = chemically synthesized
  source 1..20: mol_type = other DNA
gattctcctgcctcagcctc

SEQ ID NO: 63792 - DNA, 20 bp, synthetic construct
  misc_feature 1..20: note = chemically synthesized
  source 1..20: mol_type = other DNA
gcctcagcctcttgagtagc

SEQ ID NO: 63793 - DNA, 20 bp, synthetic construct
  misc_feature 1..20: note = chemically synthesized
  source 1..20: mol_type = other DNA
ttttgtatttttagtagaga

SEQ ID NO: 63794 - DNA, 20 bp, synthetic construct
  misc_feature 1..20: note = chemically synthesized
  source 1..20: mol_type = other DNA
gcctcagcctctcaaagtgc

SEQ ID NO: 63795 - DNA, 20 bp, synthetic construct
  misc_feature 1..20: note = chemically synthesized
  source 1..20: mol_type = other DNA
cataactctctattttcctt

SEQ ID NO: 63796 - DNA, 20 bp, synthetic construct
  misc_feature 1..20: note = chemically synthesized
  source 1..20: mol_type = other DNA
ttttaccttgataggcagca

SEQ ID NO: 63797 - DNA, 20 bp, synthetic construct
  misc_feature 1..20: note = chemically synthesized
  source 1..20: mol_type = other DNA
actttaaatccagtagggcc

SEQ ID NO: 63798 - DNA, 20 bp, synthetic construct
  misc_feature 1..20: note = chemically synthesized
  source 1..20: mol_type = other DNA
gggtaagaggctgaaagtct

SEQ ID NO: 63799 - DNA, 20 bp, synthetic construct
  misc_feature 1..20: note = chemically synthesized
  source 1..20: mol_type = other DNA
ttcactaatggcactaggcc

SEQ ID NO: 63800 - DNA, 20 bp, synthetic construct
  misc_feature 1..20: note = chemically synthesized
  source 1..20: mol_type = other DNA
ttcgcaatcacactaattcc

SEQ ID NO: 63801 - DNA, 20 bp, synthetic construct
  misc_feature 1..20: note = chemically synthesized
  source 1..20: mol_type = other DNA
gatgtgtggtatgtcctgat

SEQ ID NO: 63802 - DNA, 20 bp, synthetic construct
  misc_feature 1..20: note = chemically synthesized
  source 1..20: mol_type = other DNA
gggctggaaggcttgcatac

SEQ ID NO: 63803 - DNA, 20 bp, synthetic construct
  misc_feature 1..20: note = chemically synthesized
  source 1..20: mol_type = other DNA
catacatttcatctttgtgg

SEQ ID NO: 63804 - DNA, 20 bp, synthetic construct
  misc_feature 1..20: note = chemically synthesized
  source 1..20: mol_type = other DNA
tggccctactctctacagga

SEQ ID NO: 63805 - DNA, 20 bp, synthetic construct
  misc_feature 1..20: note = chemically synthesized
  source 1..20: mol_type = other DNA
atgctaaaccccatcattta

SEQ ID NO: 63806 - DNA, 20 bp, synthetic construct
  misc_feature 1..20: note = chemically synthesized
  source 1..20: mol_type = other DNA
aagaccaaacaaattaaaga

SEQ ID NO: 63807 - DNA, 20 bp, synthetic construct
  misc_feature 1..20: note = chemically synthesized
  source 1..20: mol_type = other DNA
agattaaaaagtctgtttta

SEQ ID NO: 63808 - DNA, 20 bp, synthetic construct
  misc_feature 1..20: note = chemically synthesized
  source 1..20: mol_type = other DNA
aaaaagtctgttttagggaa

SEQ ID NO: 63809 - DNA, 20 bp, synthetic construct
  misc_feature 1..20: note = chemically synthesized
  source 1..20: mol_type = other DNA
ggtgtctatcaaagtgtcca

SEQ ID NO: 63810 - DNA, 20 bp, synthetic construct
  misc_feature 1..20: note = chemically synthesized
  source 1..20: mol_type = other DNA
ttttcagaaatactattttc

SEQ ID NO: 63811 - DNA, 20 bp, synthetic construct
  misc_feature 1..20: note = chemically synthesized
  source 1..20: mol_type = other DNA
gagaaaagagaaatatattt

SEQ ID NO: 63812 - DNA, 20 bp, synthetic construct
  misc_feature 1..20: note = chemically synthesized
  source 1..20: mol_type = other DNA
tcctacgtagagctaggaag

SEQ ID NO: 63813 - DNA, 20 bp, synthetic construct
  misc_feature 1..20: note = chemically synthesized
  source 1..20: mol_type = other DNA
tagagctaggaagtggggtt

SEQ ID NO: 63814 - DNA, 20 bp, synthetic construct
  misc_feature 1..20: note = chemically synthesized
  source 1..20: mol_type = other DNA
ttaagttaaaatgttatccc

SEQ ID NO: 63815 - DNA, 20 bp, synthetic construct
  misc_feature 1..20: note = chemically synthesized
  source 1..20: mol_type = other DNA
atctcacaaagtctcttgta

SEQ ID NO: 63816 - DNA, 20 bp, synthetic construct
  misc_feature 1..20: note = chemically synthesized
  source 1..20: mol_type = other DNA
aatacatatgtattcaacaa

SEQ ID NO: 63817 - DNA, 20 bp, synthetic construct
  misc_feature 1..20: note = chemically synthesized
  source 1..20: mol_type = other DNA
tattcaacaagtgaataata

SEQ ID NO: 63818 - DNA, 20 bp, synthetic construct
  misc_feature 1..20: note = chemically synthesized
  source 1..20: mol_type = other DNA
attaacaaatatgagattgc

SEQ ID NO: 63819 - DNA, 20 bp, synthetic construct
  misc_feature 1..20: note = chemically synthesized
  source 1..20: mol_type = other DNA
atgattgaaaatttctatac

SEQ ID NO: 63820 - DNA, 20 bp, synthetic construct
  misc_feature 1..20: note = chemically synthesized
  source 1..20: mol_type = other DNA
aaaagctagagaagattaag

SEQ ID NO: 63821 - DNA, 20 bp, synthetic construct
  misc_feature 1..20: note = chemically synthesized
  source 1..20: mol_type = other DNA
tccaagaaacttaaataaaa

SEQ ID NO: 63822 - DNA, 20 bp, synthetic construct
  misc_feature 1..20: note = chemically synthesized
  source 1..20: mol_type = other DNA
aaagcctagaacaatgccat

SEQ ID NO: 63823 - DNA, 20 bp, synthetic construct
  misc_feature 1..20: note = chemically synthesized
  source 1..20: mol_type = other DNA
taatttatctacatttatat

SEQ ID NO: 63824 - DNA, 20 bp, synthetic construct
  misc_feature 1..20: note = chemically synthesized
  source 1..20: mol_type = other DNA
acacacacgtttgtgcacca

SEQ ID NO: 63825 - DNA, 20 bp, synthetic construct
  misc_feature 1..20: note = chemically synthesized
  source 1..20: mol_type = other DNA
tatttccattattgggaagg

SEQ ID NO: 63826 - DNA, 20 bp, synthetic construct
  misc_feature 1..20: note = chemically synthesized
  source 1..20: mol_type = other DNA
ctaaatatttaagtgctatt

SEQ ID NO: 63827 - DNA, 20 bp, synthetic construct
  misc_feature 1..20: note = chemically synthesized
  source 1..20: mol_type = other DNA
aataatatgatggaaaatga

SEQ ID NO: 63828 - DNA, 20 bp, synthetic construct
  misc_feature 1..20: note = chemically synthesized
  source 1..20: mol_type = other DNA
tagattgcagtatgatgaca

SEQ ID NO: 63829 - DNA, 20 bp, synthetic construct
  misc_feature 1..20: note = chemically synthesized
  source 1..20: mol_type = other DNA
atgatatcttaaataggtat

SEQ ID NO: 63830 - DNA, 20 bp, synthetic construct
  misc_feature 1..20: note = chemically synthesized
  source 1..20: mol_type = other DNA
aatggtagaagtaaaaatga

SEQ ID NO: 63831 - DNA, 20 bp, synthetic construct
  misc_feature 1..20: note = chemically synthesized
  source 1..20: mol_type = other DNA
gttgagcactcagattctga

SEQ ID NO: 63832 - DNA, 20 bp, synthetic construct
  misc_feature 1..20: note = chemically synthesized
  source 1..20: mol_type = other DNA
tggctgttgctatgcagctg

SEQ ID NO: 63833 - DNA, 20 bp, synthetic construct
  misc_feature 1..20: note = chemically synthesized
  source 1..20: mol_type = other DNA
aaccaaacaattttaaagca

SEQ ID NO: 63834 - DNA, 20 bp, synthetic construct
  misc_feature 1..20: note = chemically synthesized
  source 1..20: mol_type = other DNA
aactgatatggtgttctaga

SEQ ID NO: 63835 - DNA, 20 bp, synthetic construct
  misc_feature 1..20: note = chemically synthesized
  source 1..20: mol_type = other DNA
aaaacaaaaaacaaaaggta

SEQ ID NO: 63836 - DNA, 20 bp, synthetic construct
  misc_feature 1..20: note = chemically synthesized
  source 1..20: mol_type = other DNA
tgctaagtgattgataaggt

SEQ ID NO: 63837 - DNA, 20 bp, synthetic construct
  misc_feature 1..20: note = chemically synthesized
  source 1..20: mol_type = other DNA
aaaaagaccaaattgtaatc

SEQ ID NO: 63838 - DNA, 20 bp, synthetic construct
  misc_feature 1..20: note = chemically synthesized
  source 1..20: mol_type = other DNA
ataagtcacctgaaagtaaa

SEQ ID NO: 63839 - DNA, 20 bp, synthetic construct
  misc_feature 1..20: note = chemically synthesized
  source 1..20: mol_type = other DNA
tgcaagaaccaataggaaaa

SEQ ID NO: 63840 - DNA, 20 bp, synthetic construct
  misc_feature 1..20: note = chemically synthesized
  source 1..20: mol_type = other DNA
tacatgggaggctgaggcag

SEQ ID NO: 63841 - DNA, 20 bp, synthetic construct
  misc_feature 1..20: note = chemically synthesized
  source 1..20: mol_type = other DNA
ggctgaggcaggagaatgat

SEQ ID NO: 63842 - DNA, 20 bp, synthetic construct
  misc_feature 1..20: note = chemically synthesized
  source 1..20: mol_type = other DNA
tggctaaaacagtgttattt

SEQ ID NO: 63843 - DNA, 20 bp, synthetic construct
  misc_feature 1..20: note = chemically synthesized
  source 1..20: mol_type = other DNA
gtttccaccttttggctatt

SEQ ID NO: 63844 - DNA, 20 bp, synthetic construct
  misc_feature 1..20: note = chemically synthesized
  source 1..20: mol_type = other DNA
ttttaatatatacctaggag

SEQ ID NO: 63845 - DNA, 20 bp, synthetic construct
  misc_feature 1..20: note = chemically synthesized
  source 1..20: mol_type = other DNA
tatacctaggagaggaattt

SEQ ID NO: 63846 - DNA, 20 bp, synthetic construct
  misc_feature 1..20: note = chemically synthesized
  source 1..20: mol_type = other DNA
catttttagcagcaatatat

SEQ ID NO: 63847 - DNA, 20 bp, synthetic construct
  misc_feature 1..20: note = chemically synthesized
  source 1..20: mol_type = other DNA
atcatttgcatatttttaaa

SEQ ID NO: 63848 - DNA, 20 bp, synthetic construct
  misc_feature 1..20: note = chemically synthesized
  source 1..20: mol_type = other DNA
agttgtttgtctttttgttt

SEQ ID NO: 63849 - DNA, 20 bp, synthetic construct
  misc_feature 1..20: note = chemically synthesized
  source 1..20: mol_type = other DNA
gtaggactttttcatacatt

SEQ ID NO: 63850 - DNA, 20 bp, synthetic construct
  misc_feature 1..20: note = chemically synthesized
  source 1..20: mol_type = other DNA
atactttttgtgtcatatct

SEQ ID NO: 63851 - DNA, 20 bp, synthetic construct
  misc_feature 1..20: note = chemically synthesized
  source 1..20: mol_type = other DNA
atttacccatgcttccttcc

SEQ ID NO: 63852 - DNA, 20 bp, synthetic construct
  misc_feature 1..20: note = chemically synthesized
  source 1..20: mol_type = other DNA
ggcttttaatccttatttga

SEQ ID NO: 63853 - DNA, 20 bp, synthetic construct
  misc_feature 1..20: note = chemically synthesized
  source 1..20: mol_type = other DNA
caaaaatatagcttgaccaa

SEQ ID NO: 63854 - DNA, 20 bp, synthetic construct
  misc_feature 1..20: note = chemically synthesized
  source 1..20: mol_type = other DNA
tatgaagttgtatataaaaa

SEQ ID NO: 63855 - DNA, 20 bp, synthetic construct
  misc_feature 1..20: note = chemically synthesized
  source 1..20: mol_type = other DNA
tcaaacaacagaaaacagtc

SEQ ID NO: 63856 - DNA, 20 bp, synthetic construct
  misc_feature 1..20: note = chemically synthesized
  source 1..20: mol_type = other DNA
gaaaaattgtttatatgttt

SEQ ID NO: 63857 - DNA, 20 bp, synthetic construct
  misc_feature 1..20: note = chemically synthesized
  source 1..20: mol_type = other DNA
tcccccaaacaaatttcagg

SEQ ID NO: 63858 - DNA, 20 bp, synthetic construct
  misc_feature 1..20: note = chemically synthesized
  source 1..20: mol_type = other DNA
aacaaatttcaggtggaatc

SEQ ID NO: 63859 - DNA, 20 bp, synthetic construct
  misc_feature 1..20: note = chemically synthesized
  source 1..20: mol_type = other DNA
tccactttttactttgtata

SEQ ID NO: 63860 - DNA, 20 bp, synthetic construct
  misc_feature 1..20: note = chemically synthesized
  source 1..20: mol_type = other DNA
tgtatatggaatagcttctt

SEQ ID NO: 63861 - DNA, 20 bp, synthetic construct
  misc_feature 1..20: note = chemically synthesized
  source 1..20: mol_type = other DNA
tgtaactattttatgtttat

SEQ ID NO: 63862 - DNA, 20 bp, synthetic construct
  misc_feature 1..20: note = chemically synthesized
  source 1..20: mol_type = other DNA
ctaatacacccgaagtttct

SEQ ID NO: 63863 - DNA, 20 bp, synthetic construct
  misc_feature 1..20: note = chemically synthesized
  source 1..20: mol_type = other DNA
tcttggttaattgcttcttg

SEQ ID NO: 63864 - DNA, 20 bp, synthetic construct
  misc_feature 1..20: note = chemically synthesized
  source 1..20: mol_type = other DNA
taattgcttcttgagggata

SEQ ID NO: 63865 - DNA, 20 bp, synthetic construct
  misc_feature 1..20: note = chemically synthesized
  source 1..20: mol_type = other DNA
aacagtaacaaatagtatgc

SEQ ID NO: 63866 - DNA, 20 bp, synthetic construct
  misc_feature 1..20: note = chemically synthesized
  source 1..20: mol_type = other DNA
ctaggtaagtatctgaggtc

SEQ ID NO: 63867 - DNA, 20 bp, synthetic construct
  misc_feature 1..20: note = chemically synthesized
  source 1..20: mol_type = other DNA
agtctgaaattgatcatggt

SEQ ID NO: 63868 - DNA, 20 bp, synthetic construct
  misc_feature 1..20: note = chemically synthesized
  source 1..20: mol_type = other DNA
ccctggcccaacacgggaag

SEQ ID NO: 63869 - DNA, 20 bp, synthetic construct
  misc_feature 1..20: note = chemically synthesized
  source 1..20: mol_type = other DNA
tcttatttctgagccccatc

SEQ ID NO: 63870 - DNA, 20 bp, synthetic construct
  misc_feature 1..20: note = chemically synthesized
  source 1..20: mol_type = other DNA
cagaggagcttttctaatct

SEQ ID NO: 63871 - DNA, 20 bp, synthetic construct
  misc_feature 1..20: note = chemically synthesized
  source 1..20: mol_type = other DNA
ctatggatagcaggtggaga

SEQ ID NO: 63872 - DNA, 20 bp, synthetic construct
  misc_feature 1..20: note = chemically synthesized
  source 1..20: mol_type = other DNA
attgtctttatagcaaatat

SEQ ID NO: 63873 - DNA, 20 bp, synthetic construct
  misc_feature 1..20: note = chemically synthesized
  source 1..20: mol_type = other DNA
tcttcagtcataatttccat

SEQ ID NO: 63874 - DNA, 20 bp, synthetic construct
  misc_feature 1..20: note = chemically synthesized
  source 1..20: mol_type = other DNA
atctggcatataggctatgt

SEQ ID NO: 63875 - DNA, 20 bp, synthetic construct
  misc_feature 1..20: note = chemically synthesized
  source 1..20: mol_type = other DNA
cagaacttgatgtgcaataa

SEQ ID NO: 63876 - DNA, 20 bp, synthetic construct
  misc_feature 1..20: note = chemically synthesized
  source 1..20: mol_type = other DNA
gactggaggcagaacattat

SEQ ID NO: 63877 - DNA, 20 bp, synthetic construct
  misc_feature 1..20: note = chemically synthesized
  source 1..20: mol_type = other DNA
ggcatcattcttcacatcat

SEQ ID NO: 63878 - DNA, 20 bp, synthetic construct
  misc_feature 1..20: note = chemically synthesized
  source 1..20: mol_type = other DNA
tatgcactctttcactctta

SEQ ID NO: 63879 - DNA, 20 bp, synthetic construct
  misc_feature 1..20: note = chemically synthesized
  source 1..20: mol_type = other DNA
caattgcctgcatttctggg

SEQ ID NO: 63880 - DNA, 20 bp, synthetic construct
  misc_feature 1..20: note = chemically synthesized
  source 1..20: mol_type = other DNA
ttcttacactatccaggaag

SEQ ID NO: 63881 - DNA, 20 bp, synthetic construct
  misc_feature 1..20: note = chemically synthesized
  source 1..20: mol_type = other DNA
tacactatccaggaagaggg

SEQ ID NO: 63882 - DNA, 20 bp, synthetic construct
  misc_feature 1..20: note = chemically synthesized
  source 1..20: mol_type = other DNA
cttagatcaggctttattac

SEQ ID NO: 63883 - DNA, 20 bp, synthetic construct
  misc_feature 1..20: note = chemically synthesized
  source 1..20: mol_type = other DNA
acagttttatatatttccct

SEQ ID NO: 63884 - DNA, 20 bp, synthetic construct
  misc_feature 1..20: note = chemically synthesized
  source 1..20: mol_type = other DNA
gtgatgacacactttgtgtg

SEQ ID NO: 63885 - DNA, 20 bp, synthetic construct
  misc_feature 1..20: note = chemically synthesized
  source 1..20: mol_type = other DNA
acactttgtgtgctgaatcc

SEQ ID NO: 63886 - DNA, 20 bp, synthetic construct
  misc_feature 1..20: note = chemically synthesized
  source 1..20: mol_type = other DNA
attcagtgacatttggttct

SEQ ID NO: 63887 - DNA, 20 bp, synthetic construct
  misc_feature 1..20: note = chemically synthesized
  source 1..20: mol_type = other DNA
tggttctgggaatatgtaga

SEQ ID NO: 63888 - DNA, 20 bp, synthetic construct
  misc_feature 1..20: note = chemically synthesized
  source 1..20: mol_type = other DNA
ggaaaataatcaggacacaa

SEQ ID NO: 63889 - DNA, 20 bp, synthetic construct
  misc_feature 1..20: note = chemically synthesized
  source 1..20: mol_type = other DNA
cagaaccctgcttacctctg

SEQ ID NO: 63890 - DNA, 20 bp, synthetic construct
  misc_feature 1..20: note = chemically synthesized
  source 1..20: mol_type = other DNA
tctgatggatataaagatgg

SEQ ID NO: 63891 - DNA, 20 bp, synthetic construct
  misc_feature 1..20: note = chemically synthesized
  source 1..20: mol_type = other DNA
tggaaatattttgttgtgtt

SEQ ID NO: 63892 - DNA, 20 bp, synthetic construct
  misc_feature 1..20: note = chemically synthesized
  source 1..20: mol_type = other DNA
tcaattttacatcaaaactt

SEQ ID NO: 63893 - DNA, 20 bp, synthetic construct
  misc_feature 1..20: note = chemically synthesized
  source 1..20: mol_type = other DNA
acagatgattagatttcata

SEQ ID NO: 63894 - DNA, 20 bp, synthetic construct
  misc_feature 1..20: note = chemically synthesized
  source 1..20: mol_type = other DNA
aatacaagtgtggaaaatac

SEQ ID NO: 63895 - DNA, 20 bp, synthetic construct
  misc_feature 1..20: note = chemically synthesized
  source 1..20: mol_type = other DNA
ataattgttgaagttgtgtc

SEQ ID NO: 63896 - DNA, 20 bp, synthetic construct
  misc_feature 1..20: note = chemically synthesized
  source 1..20: mol_type = other DNA
gtgctaatgttaaatcttaa

SEQ ID NO: 63897 - DNA, 20 bp, synthetic construct
  misc_feature 1..20: note = chemically synthesized
  source 1..20: mol_type = other DNA
agaaagctattttattttta

SEQ ID NO: 63898 - DNA, 20 bp, synthetic construct
  misc_feature 1..20: note = chemically synthesized
  source 1..20: mol_type = other DNA
aaaaaggtagggaggaccag

SEQ ID NO: 63899 - DNA, 20 bp, synthetic construct
  misc_feature 1..20: note = chemically synthesized
  source 1..20: mol_type = other DNA
ttctagaaaatccctcagac

SEQ ID NO: 63900 - DNA, 20 bp, synthetic construct
  misc_feature 1..20: note = chemically synthesized
  source 1..20: mol_type = other DNA
tttgttttcttcagataatt

SEQ ID NO: 63901 - DNA, 20 bp, synthetic construct
  misc_feature 1..20: note = chemically synthesized
  source 1..20: mol_type = other DNA
ttgaatttccatgaaccaca

SEQ ID NO: 63902 - DNA, 20 bp, synthetic construct
  misc_feature 1..20: note = chemically synthesized
  source 1..20: mol_type = other DNA
tcctattaaaccacacagtc

SEQ ID NO: 63903 - DNA, 20 bp, synthetic construct
  misc_feature 1..20: note = chemically synthesized
  source 1..20: mol_type = other DNA
ataaaaatatgtatcaagta

SEQ ID NO: 63904 - DNA, 20 bp, synthetic construct
  misc_feature 1..20: note = chemically synthesized
  source 1..20: mol_type = other DNA
gtgaagtcataaaaacaaca

SEQ ID NO: 63905 - DNA, 20 bp, synthetic construct
  misc_feature 1..20: note = chemically synthesized
  source 1..20: mol_type = other DNA
aaaaaaaattctcaaaattt

SEQ ID NO: 63906 - DNA, 20 bp, synthetic construct
  misc_feature 1..20: note = chemically synthesized
  source 1..20: mol_type = other DNA
tatcttgctattagtaattg

SEQ ID NO: 63907 - DNA, 20 bp, synthetic construct
  misc_feature 1..20: note = chemically synthesized
  source 1..20: mol_type = other DNA
ttgctagtagtatgacctgt

SEQ ID NO: 63908 - DNA, 20 bp, synthetic construct
  misc_feature 1..20: note = chemically synthesized
  source 1..20: mol_type = other DNA
tataatttattcatttataa

SEQ ID NO: 63909 - DNA, 20 bp, synthetic construct
  misc_feature 1..20: note = chemically synthesized
  source 1..20: mol_type = other DNA
accaaatctgactacaatac

SEQ ID NO: 63910 - DNA, 20 bp, synthetic construct
  misc_feature 1..20: note = chemically synthesized
  source 1..20: mol_type = other DNA
agtcatcatgccccaagtca

SEQ ID NO: 63911 - DNA, 20 bp, synthetic construct
  misc_feature 1..20: note = chemically synthesized
  source 1..20: mol_type = other DNA
gtcaaagagttaataagtgg

SEQ ID NO: 63912 - DNA, 20 bp, synthetic construct
  misc_feature 1..20: note = chemically synthesized
  source 1..20: mol_type = other DNA
ttcagatttgactttaaaat

SEQ ID NO: 63913 - DNA, 20 bp, synthetic construct
  misc_feature 1..20: note = chemically synthesized
  source 1..20: mol_type = other DNA
atgtataaaggttttctcaa

SEQ ID NO: 63914 - DNA, 20 bp, synthetic construct
  misc_feature 1..20: note = chemically synthesized
  source 1..20: mol_type = other DNA
aagtgtagtcctagatatag

SEQ ID NO: 63915 - DNA, 20 bp, synthetic construct
  misc_feature 1..20: note = chemically synthesized
  source 1..20: mol_type = other DNA
agaaatcacacagtccaaga

SEQ ID NO: 63916 - DNA, 20 bp, synthetic construct
  misc_feature 1..20: note = chemically synthesized
  source 1..20: mol_type = other DNA
tcacacagtccaagagagag

SEQ ID NO: 63917 - DNA, 20 bp, synthetic construct
  misc_feature 1..20: note = chemically synthesized
  source 1..20: mol_type = other DNA
atgaaattttcaaagcgctc

SEQ ID NO: 63918 - DNA, 20 bp, synthetic construct
  misc_feature 1..20: note = chemically synthesized
  source 1..20: mol_type = other DNA
ataaaagaaaactgatattc

SEQ ID NO: 63919 - DNA, 20 bp, synthetic construct
  misc_feature 1..20: note = chemically synthesized
  source 1..20: mol_type = other DNA
tgatattcaagaatatttta

SEQ ID NO: 63920 - DNA, 20 bp, synthetic construct
  misc_feature 1..20: note = chemically synthesized
  source 1..20: mol_type = other DNA
cccagacaaacaaaagttga

SEQ ID NO: 63921 - DNA, 20 bp, synthetic construct
  misc_feature 1..20: note = chemically synthesized
  source 1..20: mol_type = other DNA
atcttgcaaaaaatgctaaa

SEQ ID NO: 63922 - DNA, 20 bp, synthetic construct
  misc_feature 1..20: note = chemically synthesized
  source 1..20: mol_type = other DNA
attaagtacatagacaaacc

SEQ ID NO: 63923 - DNA, 20 bp, synthetic construct
  misc_feature 1..20: note = chemically synthesized
  source 1..20: mol_type = other DNA
tgagacaaaagtcaaaatgt

SEQ ID NO: 63924 - DNA, 20 bp, synthetic construct
  misc_feature 1..20: note = chemically synthesized
  source 1..20: mol_type = other DNA
caaaagtcaaaatgtggggg

SEQ ID NO: 63925 - DNA, 20 bp, synthetic construct
  misc_feature 1..20: note = chemically synthesized
  source 1..20: mol_type = other DNA
gtcaaaatgtgggggtggag

SEQ ID NO: 63926 - DNA, 20 bp, synthetic construct
  misc_feature 1..20: note = chemically synthesized
  source 1..20: mol_type = other DNA
ggtggagtggagttaaagtg

SEQ ID NO: 63927 - DNA, 20 bp, synthetic construct
  misc_feature 1..20: note = chemically synthesized
  source 1..20: mol_type = other DNA
gaaggaaaaaaaaggaagag

SEQ ID NO: 63928 - DNA, 20 bp, synthetic construct
  misc_feature 1..20: note = chemically synthesized
  source 1..20: mol_type = other DNA
atccttacttagtaactaca

SEQ ID NO: 63929 - DNA, 20 bp, synthetic construct
  misc_feature 1..20: note = chemically synthesized
  source 1..20: mol_type = other DNA
agttccccaattaaaagtaa

SEQ ID NO: 63930 - DNA, 20 bp, synthetic construct
  misc_feature 1..20: note = chemically synthesized
  source 1..20: mol_type = other DNA
taaaagtaatagaatggtaa

SEQ ID NO: 63931 - DNA, 20 bp, synthetic construct
  misc_feature 1..20: note = chemically synthesized
  source 1..20: mol_type = other DNA
ggcacacataaatgaaagtg

SEQ ID NO: 63932 - DNA, 20 bp, synthetic construct
  misc_feature 1..20: note = chemically synthesized
  source 1..20: mol_type = other DNA
aaactgtaagaaaagataag

SEQ ID NO: 63933 - DNA, 20 bp, synthetic construct
  misc_feature 1..20: note = chemically synthesized
  source 1..20: mol_type = other DNA
gggtcactgtataataataa

SEQ ID NO: 63934 - DNA, 20 bp, synthetic construct
  misc_feature 1..20: note = chemically synthesized
  source 1..20: mol_type = other DNA
taaaggggtcaattcagcaa

SEQ ID NO: 63935 - DNA, 20 bp, synthetic construct
  misc_feature 1..20: note = chemically synthesized
  source 1..20: mol_type = other DNA
agtatattttctgaccacag

SEQ ID NO: 63936 - DNA, 20 bp, synthetic construct
  misc_feature 1..20: note = chemically synthesized
  source 1..20: mol_type = other DNA
acagtggaataaaactagaa

SEQ ID NO: 63937 - DNA, 20 bp, synthetic construct
  misc_feature 1..20: note = chemically synthesized
  source 1..20: mol_type = other DNA
ggaaatcaaacagtatgctc

SEQ ID NO: 63938 - DNA, 20 bp, synthetic construct
  misc_feature 1..20: note = chemically synthesized
  source 1..20: mol_type = other DNA
tcagaggtgtcagaccacgc

SEQ ID NO: 63939 - DNA, 20 bp, synthetic construct
  misc_feature 1..20: note = chemically synthesized
  source 1..20: mol_type = other DNA
caaatcccacttttctggag

SEQ ID NO: 63940 - DNA, 20 bp, synthetic construct
  misc_feature 1..20: note = chemically synthesized
  source 1..20: mol_type = other DNA
accccttgcccatttttctg

SEQ ID NO: 63941 - DNA, 20 bp, synthetic construct
  misc_feature 1..20: note = chemically synthesized
  source 1..20: mol_type = other DNA
agtcccaactccaagcgtcg

SEQ ID NO: 63942 - DNA, 20 bp, synthetic construct
  misc_feature 1..20: note = chemically synthesized
  source 1..20: mol_type = other DNA
ttttctttatccgacctctc

SEQ ID NO: 63943 - DNA, 20 bp, synthetic construct
  misc_feature 1..20: note = chemically synthesized
  source 1..20: mol_type = other DNA
accttcaaggtgtacaataa

SEQ ID NO: 63944 - DNA, 20 bp, synthetic construct
  misc_feature 1..20: note = chemically synthesized
  source 1..20: mol_type = other DNA
agccaagtagcaacatattt

SEQ ID NO: 63945 - DNA, 20 bp, synthetic construct
  misc_feature 1..20: note = chemically synthesized
  source 1..20: mol_type = other DNA
gaaatctggccaccaggcca

SEQ ID NO: 63946 - DNA, 20 bp, synthetic construct
  misc_feature 1..20: note = chemically synthesized
  source 1..20: mol_type = other DNA
gccaaggaatgcccgcagcc

SEQ ID NO: 63947 - DNA, 20 bp, synthetic construct
  misc_feature 1..20: note = chemically synthesized
  source 1..20: mol_type = other DNA
tttaggtaattctcacagtg

SEQ ID NO: 63948 - DNA, 20 bp, synthetic construct
  misc_feature 1..20: note = chemically synthesized
  source 1..20: mol_type = other DNA
catcccacagcatgctttga

SEQ ID NO: 63949 - DNA, 20 bp, synthetic construct
  misc_feature 1..20: note = chemically synthesized
  source 1..20: mol_type = other DNA
acaagccttacaggttagtt

SEQ ID NO: 63950 - DNA, 20 bp, synthetic construct
  misc_feature 1..20: note = chemically synthesized
  source 1..20: mol_type = other DNA
ctataacccattattctgtt

SEQ ID NO: 63951 - DNA, 20 bp, synthetic construct
  misc_feature 1..20: note = chemically synthesized
  source 1..20: mol_type = other DNA
ctaggcatagttagtgcggt

SEQ ID NO: 63952 - DNA, 20 bp, synthetic construct
  misc_feature 1..20: note = chemically synthesized
  source 1..20: mol_type = other DNA
ctgctattctgctactcctc

SEQ ID NO: 63953 - DNA, 20 bp, synthetic construct
  misc_feature 1..20: note = chemically synthesized
  source 1..20: mol_type = other DNA
cttccctacacatcaagctc

SEQ ID NO: 63954 - DNA, 20 bp, synthetic construct
  misc_feature 1..20: note = chemically synthesized
  source 1..20: mol_type = other DNA
ttagatttactcaacatgcc

SEQ ID NO: 63955 - DNA, 20 bp, synthetic construct
  misc_feature 1..20: note = chemically synthesized
  source 1..20: mol_type = other DNA
agtctaggtagacactttca

SEQ ID NO: 63956 - DNA, 20 bp, synthetic construct
  misc_feature 1..20: note = chemically synthesized
  source 1..20: mol_type = other DNA
ataagtagaggtctttccta

SEQ ID NO: 63957 - DNA, 20 bp, synthetic construct
  misc_feature 1..20: note = chemically synthesized
  source 1..20: mol_type = other DNA
tcagaagtcagacctgtcct

SEQ ID NO: 63958 - DNA, 20 bp, synthetic construct
  misc_feature 1..20: note = chemically synthesized
  source 1..20: mol_type = other DNA
gacctgtcctcagaatgcta

SEQ ID NO: 63959 - DNA, 20 bp, synthetic construct
  misc_feature 1..20: note = chemically synthesized
  source 1..20: mol_type = other DNA
ttccagacaccagaccaact

SEQ ID NO: 63960 - DNA, 20 bp, synthetic construct
  misc_feature 1..20: note = chemically synthesized
  source 1..20: mol_type = other DNA
tctttgctggcaggactatg

SEQ ID NO: 63961 - DNA, 20 bp, synthetic construct
  misc_feature 1..20: note = chemically synthesized
  source 1..20: mol_type = other DNA
tcttattaatataagaagac

SEQ ID NO: 63962 - DNA, 20 bp, synthetic construct
  misc_feature 1..20: note = chemically synthesized
  source 1..20: mol_type = other DNA
ctgtttggtagtctcctcac

SEQ ID NO: 63963 - DNA, 20 bp, synthetic construct
  misc_feature 1..20: note = chemically synthesized
  source 1..20: mol_type = other DNA
tcacagggatgcgcatgaaa

SEQ ID NO: 63964 - DNA, 20 bp, synthetic construct
  misc_feature 1..20: note = chemically synthesized
  source 1..20: mol_type = other DNA
cgcatgaaactgaataacca

SEQ ID NO: 63965 - DNA, 20 bp, synthetic construct
  misc_feature 1..20: note = chemically synthesized
  source 1..20: mol_type = other DNA
atacaacataccaaaaccta

SEQ ID NO: 63966 - DNA, 20 bp, synthetic construct
  misc_feature 1..20: note = chemically synthesized
  source 1..20: mol_type = other DNA
tcaacaaaactttaagaaaa

SEQ ID NO: 63967 - DNA, 20 bp, synthetic construct
  misc_feature 1..20: note = chemically synthesized
  source 1..20: mol_type = other DNA
taaaattagaaaatgaaaaa

SEQ ID NO: 63968 - DNA, 20 bp, synthetic construct
  misc_feature 1..20: note = chemically synthesized
  source 1..20: mol_type = other DNA
ttccaacaaattggaaaatc

SEQ ID NO: 63969 - DNA, 20 bp, synthetic construct
  misc_feature 1..20: note = chemically synthesized
  source 1..20: mol_type = other DNA
aattggaaaatctagaataa

SEQ ID NO: 63970 - DNA, 20 bp, synthetic construct
  misc_feature 1..20: note = chemically synthesized
  source 1..20: mol_type = other DNA
aaaacctcaatagaacaata

SEQ ID NO: 63971 - DNA, 20 bp, synthetic construct
  misc_feature 1..20: note = chemically synthesized
  source 1..20: mol_type = other DNA
tctaaggactgaaataaggc

SEQ ID NO: 63972 - DNA, 20 bp, synthetic construct
  misc_feature 1..20: note = chemically synthesized
  source 1..20: mol_type = other DNA
taaaaaaatcaataaagtta

SEQ ID NO: 63973 - DNA, 20 bp, synthetic construct
  misc_feature 1..20: note = chemically synthesized
  source 1..20: mol_type = other DNA
aataaaaatataaaataccc

SEQ ID NO: 63974 - DNA, 20 bp, synthetic construct
  misc_feature 1..20: note = chemically synthesized
  source 1..20: mol_type = other DNA
attccatgctcatgaactag

SEQ ID NO: 63975 - DNA, 20 bp, synthetic construct
  misc_feature 1..20: note = chemically synthesized
  source 1..20: mol_type = other DNA
actttgtgaggctgaggtgg

SEQ ID NO: 63976 - DNA, 20 bp, synthetic construct
  misc_feature 1..20: note = chemically synthesized
  source 1..20: mol_type = other DNA
ggtggggggatcacgaggtc

SEQ ID NO: 63977 - DNA, 20 bp, synthetic construct
  misc_feature 1..20: note = chemically synthesized
  source 1..20: mol_type = other DNA
tactcaggaggctgaggcag

SEQ ID NO: 63978 - DNA, 20 bp, synthetic construct
  misc_feature 1..20: note = chemically synthesized
  source 1..20: mol_type = other DNA
aagaaacagtgctaggaaaa

SEQ ID NO: 63979 - DNA, 20 bp, synthetic construct
  misc_feature 1..20: note = chemically synthesized
  source 1..20: mol_type = other DNA
aactggatatccatttgcaa

SEQ ID NO: 63980 - DNA, 20 bp, synthetic construct
  misc_feature 1..20: note = chemically synthesized
  source 1..20: mol_type = other DNA
tatacaaaaatcaaatcaag

SEQ ID NO: 63981 - DNA, 20 bp, synthetic construct
  misc_feature 1..20: note = chemically synthesized
  source 1..20: mol_type = other DNA
aatcaagatggattaaagac

SEQ ID NO: 63982 - DNA, 20 bp, synthetic construct
  misc_feature 1..20: note = chemically synthesized
  source 1..20: mol_type = other DNA
ccaaaacaaaaatagacaat

SEQ ID NO: 63983 - DNA, 20 bp, synthetic construct
  misc_feature 1..20: note = chemically synthesized
  source 1..20: mol_type = other DNA
taaagtgaagagacaaccca

SEQ ID NO: 63984 - DNA, 20 bp, synthetic construct
  misc_feature 1..20: note = chemically synthesized
  source 1..20: mol_type = other DNA
tgcaaactatatattttaca

SEQ ID NO: 63985 - DNA, 20 bp, synthetic construct
  misc_feature 1..20: note = chemically synthesized
  source 1..20: mol_type = other DNA
ttttacaaggaattgataac

SEQ ID NO: 63986 - DNA, 20 bp, synthetic construct
  misc_feature 1..20: note = chemically synthesized
  source 1..20: mol_type = other DNA
ataaataatggccaaaagac

SEQ ID NO: 63987 - DNA, 20 bp, synthetic construct
  misc_feature 1..20: note = chemically synthesized
  source 1..20: mol_type = other DNA
aggaaataacagatgcttgt

SEQ ID NO: 63988 - DNA, 20 bp, synthetic construct
  misc_feature 1..20: note = chemically synthesized
  source 1..20: mol_type = other DNA
aaccctcttacactgttggt

SEQ ID NO: 63989 - DNA, 20 bp, synthetic construct
  misc_feature 1..20: note = chemically synthesized
  source 1..20: mol_type = other DNA
tcctaggtatatacccttaa

SEQ ID NO: 63990 - DNA, 20 bp, synthetic construct
  misc_feature 1..20: note = chemically synthesized
  source 1..20: mol_type = other DNA
atgtattcgtcaacagataa

SEQ ID NO: 63991 - DNA, 20 bp, synthetic construct
  misc_feature 1..20: note = chemically synthesized
  source 1..20: mol_type = other DNA
acacacacacacacacacaa

SEQ ID NO: 63992 - DNA, 20 bp, synthetic construct
  misc_feature 1..20: note = chemically synthesized
  source 1..20: mol_type = other DNA
aatattattcaaccataaaa

SEQ ID NO: 63993 - DNA, 20 bp, synthetic construct
  misc_feature 1..20: note = chemically synthesized
  source 1..20: mol_type = other DNA
ctcgtgtggaagttaaaaac

SEQ ID NO: 63994 - DNA, 20 bp, synthetic construct
  misc_feature 1..20: note = chemically synthesized
  source 1..20: mol_type = other DNA
acgtggatcttatgaagaca

SEQ ID NO: 63995 - DNA, 20 bp, synthetic construct
  misc_feature 1..20: note = chemically synthesized
  source 1..20: mol_type = other DNA
ccggcggcgggagggaagaa

SEQ ID NO: 63996 - DNA, 20 bp, synthetic construct
  misc_feature 1..20: note = chemically synthesized
  source 1..20: mol_type = other DNA
gtgtatatatatataaaaat

SEQ ID NO: 63997 - DNA, 20 bp, synthetic construct
  misc_feature 1..20: note = chemically synthesized
  source 1..20: mol_type = other DNA
tcaaaaatggtaaagatggg

SEQ ID NO: 63998 - DNA, 20 bp, synthetic construct
  misc_feature 1..20: note = chemically synthesized
  source 1..20: mol_type = other DNA
actttgggaggccaaggcag

SEQ ID NO: 63999 - DNA, 20 bp, synthetic construct
  misc_feature 1..20: note = chemically synthesized
  source 1..20: mol_type = other DNA
ggcaggtggatcatgaggtc

SEQ ID NO: 64000 - DNA, 20 bp, synthetic construct
  misc_feature 1..20: note = chemically synthesized
  source 1..20: mol_type = other DNA
tacttgggaggcttgggcag

SEQ ID NO: 64001 - DNA, 20 bp, synthetic construct
  misc_feature 1..20: note = chemically synthesized
  source 1..20: mol_type = other DNA
tcctaccactgcactccagc

SEQ ID NO: 64002 - DNA, 20 bp, synthetic construct
  misc_feature 1..20: note = chemically synthesized
  source 1..20: mol_type = other DNA
tttaaaaaatattcagtagg

SEQ ID NO: 64003 - DNA, 20 bp, synthetic construct
  misc_feature 1..20: note = chemically synthesized
  source 1..20: mol_type = other DNA
cagcactttgggaggcggag

SEQ ID NO: 64004 - DNA, 20 bp, synthetic construct
  misc_feature 1..20: note = chemically synthesized
  source 1..20: mol_type = other DNA
actttgggaggcggaggcgg

SEQ ID NO: 64005 - DNA, 20 bp, synthetic construct
  misc_feature 1..20: note = chemically synthesized
  source 1..20: mol_type = other DNA
aaaattagccgggcttggtg

SEQ ID NO: 64006 - DNA, 20 bp, synthetic construct
  misc_feature 1..20: note = chemically synthesized
  source 1..20: mol_type = other DNA
tactatggaggctgaggcgg

SEQ ID NO: 64007 - DNA, 20 bp, synthetic construct
  misc_feature 1..20: note = chemically synthesized
  source 1..20: mol_type = other DNA
acaatgaaaaaaaaataacc

SEQ ID NO: 64008 - DNA, 20 bp, synthetic construct
  misc_feature 1..20: note = chemically synthesized
  source 1..20: mol_type = other DNA
aactcattgacaatgtttca

SEQ ID NO: 64009 - DNA, 20 bp, synthetic construct
  misc_feature 1..20: note = chemically synthesized
  source 1..20: mol_type = other DNA
acaatgtttcaaaggatgtg

SEQ ID NO: 64010 - DNA, 20 bp, synthetic construct
  misc_feature 1..20: note = chemically synthesized
  source 1..20: mol_type = other DNA
tgggctggaaatattgttat

SEQ ID NO: 64011 - DNA, 20 bp, synthetic construct
  misc_feature 1..20: note = chemically synthesized
  source 1..20: mol_type = other DNA
aaggtgacaactaaattatt

SEQ ID NO: 64012 - DNA, 20 bp, synthetic construct
  misc_feature 1..20: note = chemically synthesized
  source 1..20: mol_type = other DNA
actaaattatttggagtaga

SEQ ID NO: 64013 - DNA, 20 bp, synthetic construct
  misc_feature 1..20: note = chemically synthesized
  source 1..20: mol_type = other DNA
agatggagtcaccagcacat

SEQ ID NO: 64014 - DNA, 20 bp, synthetic construct
  misc_feature 1..20: note = chemically synthesized
  source 1..20: mol_type = other DNA
ccagcacatgtgaatagttt

SEQ ID NO: 64015 - DNA, 20 bp, synthetic construct
  misc_feature 1..20: note = chemically synthesized
  source 1..20: mol_type = other DNA
aaattgtttcttagtgacaa

SEQ ID NO: 64016 - DNA, 20 bp, synthetic construct
  misc_feature 1..20: note = chemically synthesized
  source 1..20: mol_type = other DNA
cttagtgacaaaagaataac

SEQ ID NO: 64017 - DNA, 20 bp, synthetic construct
  misc_feature 1..20: note = chemically synthesized
  source 1..20: mol_type = other DNA
attagctgcctatatgctct

SEQ ID NO: 64018 - DNA, 20 bp, synthetic construct
  misc_feature 1..20: note = chemically synthesized
  source 1..20: mol_type = other DNA
gaaattctggaaagagcaca

SEQ ID NO: 64019 - DNA, 20 bp, synthetic construct
  misc_feature 1..20: note = chemically synthesized
  source 1..20: mol_type = other DNA
accagctgtaaaatgtcaag

SEQ ID NO: 64020 - DNA, 20 bp, synthetic construct
  misc_feature 1..20: note = chemically synthesized
  source 1..20: mol_type = other DNA
tcatatgcataagtcttgct

SEQ ID NO: 64021 - DNA, 20 bp, synthetic construct
  misc_feature 1..20: note = chemically synthesized
  source 1..20: mol_type = other DNA
ataatttttttcatttcatt

SEQ ID NO: 64022 - DNA, 20 bp, synthetic construct
  misc_feature 1..20: note = chemically synthesized
  source 1..20: mol_type = other DNA
acatctcactcataaatagt

SEQ ID NO: 64023 - DNA, 20 bp, synthetic construct
  misc_feature 1..20: note = chemically synthesized
  source 1..20: mol_type = other DNA
agaaagagagaaaagaggaa

SEQ ID NO: 64024 - DNA, 20 bp, synthetic construct
  misc_feature 1..20: note = chemically synthesized
  source 1..20: mol_type = other DNA
ccattataatttgtcactat

SEQ ID NO: 64025 - DNA, 20 bp, synthetic construct
  misc_feature 1..20: note = chemically synthesized
  source 1..20: mol_type = other DNA
cttcaataaaataaaatggg

SEQ ID NO: 64026 - DNA, 20 bp, synthetic construct
  misc_feature 1..20: note = chemically synthesized
  source 1..20: mol_type = other DNA
ttgtgtggtaaaaagtagtt

SEQ ID NO: 64027 - DNA, 20 bp, synthetic construct
  misc_feature 1..20: note = chemically synthesized
  source 1..20: mol_type = other DNA
tgaatacagatttttctttt

SEQ ID NO: 64028 - DNA, 20 bp, synthetic construct
  misc_feature 1..20: note = chemically synthesized
  source 1..20: mol_type = other DNA
accaagatatttatttaaat

SEQ ID NO: 64029 - DNA, 20 bp, synthetic construct
  misc_feature 1..20: note = chemically synthesized
  source 1..20: mol_type = other DNA
tgtttgcattaaatgggctt

SEQ ID NO: 64030 - DNA, 20 bp, synthetic construct
  misc_feature 1..20: note = chemically synthesized
  source 1..20: mol_type = other DNA
tgtaaaaaaattttttgcat

SEQ ID NO: 64031 - DNA, 20 bp, synthetic construct
  misc_feature 1..20: note = chemically synthesized
  source 1..20: mol_type = other DNA
gcaagtgtagaaataattac

SEQ ID NO: 64032 - DNA, 20 bp, synthetic construct
  misc_feature 1..20: note = chemically synthesized
  source 1..20: mol_type = other DNA
gagggctgacttaaaatttg

SEQ ID NO: 64033 - DNA, 20 bp, synthetic construct
  misc_feature 1..20: note = chemically synthesized
  source 1..20: mol_type = other DNA
acttctccacacattcataa

SEQ ID NO: 64034 - DNA, 20 bp, synthetic construct
  misc_feature 1..20: note = chemically synthesized
  source 1..20: mol_type = other DNA
cataaaggaatattaaattg

SEQ ID NO: 64035 - DNA, 20 bp, synthetic construct
  misc_feature 1..20: note = chemically synthesized
  source 1..20: mol_type = other DNA
aataaattcatcccgtgttt

SEQ ID NO: 64036 - DNA, 20 bp, synthetic construct
  misc_feature 1..20: note = chemically synthesized
  source 1..20: mol_type = other DNA
agaatgctacagacctcact

SEQ ID NO: 64037 - DNA, 20 bp, synthetic construct
  misc_feature 1..20: note = chemically synthesized
  source 1..20: mol_type = other DNA
cctcactatgagttttactg

SEQ ID NO: 64038 - DNA, 20 bp, synthetic construct
  misc_feature 1..20: note = chemically synthesized
  source 1..20: mol_type = other DNA
gcacatatcctggcaccaaa

SEQ ID NO: 64039 - DNA, 20 bp, synthetic construct
  misc_feature 1..20: note = chemically synthesized
  source 1..20: mol_type = other DNA
agtaaaatttatgacattag

SEQ ID NO: 64040 - DNA, 20 bp, synthetic construct
  misc_feature 1..20: note = chemically synthesized
  source 1..20: mol_type = other DNA
attagctggatgctgttaca

SEQ ID NO: 64041 - DNA, 20 bp, synthetic construct
  misc_feature 1..20: note = chemically synthesized
  source 1..20: mol_type = other DNA
tcacagaacccacaacttaa

SEQ ID NO: 64042 - DNA, 20 bp, synthetic construct
  misc_feature 1..20: note = chemically synthesized
  source 1..20: mol_type = other DNA
acaacttaagggaatgaagc

SEQ ID NO: 64043 - DNA, 20 bp, synthetic construct
  misc_feature 1..20: note = chemically synthesized
  source 1..20: mol_type = other DNA
tccttggagaagaaaaattg

SEQ ID NO: 64044 - DNA, 20 bp, synthetic construct
  misc_feature 1..20: note = chemically synthesized
  source 1..20: mol_type = other DNA
agaagaaaaattggtgagtg

SEQ ID NO: 64045 - DNA, 20 bp, synthetic construct
  misc_feature 1..20: note = chemically synthesized
  source 1..20: mol_type = other DNA
ccagctctcaataataattg

SEQ ID NO: 64046 - DNA, 20 bp, synthetic construct
  misc_feature 1..20: note = chemically synthesized
  source 1..20: mol_type = other DNA
cacatgtcagctctttggtc

SEQ ID NO: 64047 - DNA, 20 bp, synthetic construct
  misc_feature 1..20: note = chemically synthesized
  source 1..20: mol_type = other DNA
agacattgtgattgccatta

SEQ ID NO: 64048 - DNA, 20 bp, synthetic construct
  misc_feature 1..20: note = chemically synthesized
  source 1..20: mol_type = other DNA
ttagaaaaagccagtgactt

SEQ ID NO: 64049 - DNA, 20 bp, synthetic construct
  misc_feature 1..20: note = chemically synthesized
  source 1..20: mol_type = other DNA
aaagccagtgacttatggat

SEQ ID NO: 64050 - DNA, 20 bp, synthetic construct
  misc_feature 1..20: note = chemically synthesized
  source 1..20: mol_type = other DNA
gtgtcataaaactaagcatt

SEQ ID NO: 64051 - DNA, 20 bp, synthetic construct
  misc_feature 1..20: note = chemically synthesized
  source 1..20: mol_type = other DNA
cagcagttgaacatttgttg

SEQ ID NO: 64052 - DNA, 20 bp, synthetic construct
  misc_feature 1..20: note = chemically synthesized
  source 1..20: mol_type = other DNA
gaacatttgttgttgaatat

SEQ ID NO: 64053 - DNA, 20 bp, synthetic construct
  misc_feature 1..20: note = chemically synthesized
  source 1..20: mol_type = other DNA
tttcaaagaacagctacttc

SEQ ID NO: 64054 - DNA, 20 bp, synthetic construct
  misc_feature 1..20: note = chemically synthesized
  source 1..20: mol_type = other DNA
ctttattgaagtgtctagga

SEQ ID NO: 64055 - DNA, 20 bp, synthetic construct
  misc_feature 1..20: note = chemically synthesized
  source 1..20: mol_type = other DNA
ttttaaactcacaacatttc

SEQ ID NO: 64056 - DNA, 20 bp, synthetic construct
  misc_feature 1..20: note = chemically synthesized
  source 1..20: mol_type = other DNA
agcattctctttacattatt

SEQ ID NO: 64057 - DNA, 20 bp, synthetic construct
  misc_feature 1..20: note = chemically synthesized
  source 1..20: mol_type = other DNA
aaaagaaatatattatgttc

SEQ ID NO: 64058 - DNA, 20 bp, synthetic construct
  misc_feature 1..20: note = chemically synthesized
  source 1..20: mol_type = other DNA
tacctctattctctttcatt

SEQ ID NO: 64059 - DNA, 20 bp, synthetic construct
  misc_feature 1..20: note = chemically synthesized
  source 1..20: mol_type = other DNA
ttttacaccaatgtactggt

SEQ ID NO: 64060 - DNA, 20 bp, synthetic construct
  misc_feature 1..20: note = chemically synthesized
  source 1..20: mol_type = other DNA
tggaaatagttaaatactag

SEQ ID NO: 64061 - DNA, 20 bp, synthetic construct
  misc_feature 1..20: note = chemically synthesized
  source 1..20: mol_type = other DNA
ttttgctggttctaatgtat

SEQ ID NO: 64062 - DNA, 20 bp, synthetic construct
  misc_feature 1..20: note = chemically synthesized
  source 1..20: mol_type = other DNA
cctattatggcacagtgcct

SEQ ID NO: 64063 - DNA, 20 bp, synthetic construct
  misc_feature 1..20: note = chemically synthesized
  source 1..20: mol_type = other DNA
gaaaacagtgatgtatctcc

SEQ ID NO: 64064 - DNA, 20 bp, synthetic construct
  misc_feature 1..20: note = chemically synthesized
  source 1..20: mol_type = other DNA
catcttttcctttcaaaact

SEQ ID NO: 64065 - DNA, 20 bp, synthetic construct
  misc_feature 1..20: note = chemically synthesized
  source 1..20: mol_type = other DNA
ctttcaaaactgtgaataag

SEQ ID NO: 64066 - DNA, 20 bp, synthetic construct
  misc_feature 1..20: note = chemically synthesized
  source 1..20: mol_type = other DNA
gtgaataagatggatgattt

SEQ ID NO: 64067 - DNA, 20 bp, synthetic construct
  misc_feature 1..20: note = chemically synthesized
  source 1..20: mol_type = other DNA
aatcagacagactcaatata

SEQ ID NO: 64068 - DNA, 20 bp, synthetic construct
  misc_feature 1..20: note = chemically synthesized
  source 1..20: mol_type = other DNA
ccctctgtgttgacactagt

SEQ ID NO: 64069 - DNA, 20 bp, synthetic construct
  misc_feature 1..20: note = chemically synthesized
  source 1..20: mol_type = other DNA
actagtagggatcccaggcc

SEQ ID NO: 64070 - DNA, 20 bp, synthetic construct
  misc_feature 1..20: note = chemically synthesized
  source 1..20: mol_type = other DNA
ggcctagaatctgtgcagtg

SEQ ID NO: 64071 - DNA, 20 bp, synthetic construct
  misc_feature 1..20: note = chemically synthesized
  source 1..20: mol_type = other DNA
gaatctgtgcagtgctggat

SEQ ID NO: 64072 - DNA, 20 bp, synthetic construct
  misc_feature 1..20: note = chemically synthesized
  source 1..20: mol_type = other DNA
agcattatgccaaagatgct

SEQ ID NO: 64073 - DNA, 20 bp, synthetic construct
  misc_feature 1..20: note = chemically synthesized
  source 1..20: mol_type = other DNA
tgtggttcatccacacattg

SEQ ID NO: 64074 - DNA, 20 bp, synthetic construct
  misc_feature 1..20: note = chemically synthesized
  source 1..20: mol_type = other DNA
catccacacattgcagggta

SEQ ID NO: 64075 - DNA, 20 bp, synthetic construct
  misc_feature 1..20: note = chemically synthesized
  source 1..20: mol_type = other DNA
gtttgtggccttcactgtag

SEQ ID NO: 64076 - DNA, 20 bp, synthetic construct
  misc_feature 1..20: note = chemically synthesized
  source 1..20: mol_type = other DNA
ctccttcttcacacataggt

SEQ ID NO: 64077 - DNA, 20 bp, synthetic construct
  misc_feature 1..20: note = chemically synthesized
  source 1..20: mol_type = other DNA
aaaacatattatttgagatg

SEQ ID NO: 64078 - DNA, 20 bp, synthetic construct
  misc_feature 1..20: note = chemically synthesized
  source 1..20: mol_type = other DNA
tcatggctcatatcaatcag

SEQ ID NO: 64079 - DNA, 20 bp, synthetic construct
  misc_feature 1..20: note = chemically synthesized
  source 1..20: mol_type = other DNA
tcatatcaatcagtgggatt

SEQ ID NO: 64080 - DNA, 20 bp, synthetic construct
  misc_feature 1..20: note = chemically synthesized
  source 1..20: mol_type = other DNA
atgaaagtgagaagtgtgaa

SEQ ID NO: 64081 - DNA, 20 bp, synthetic construct
  misc_feature 1..20: note = chemically synthesized
  source 1..20: mol_type = other DNA
agtgtgaaatgagtgaagta

SEQ ID NO: 64082 - DNA, 20 bp, synthetic construct
  misc_feature 1..20: note = chemically synthesized
  source 1..20: mol_type = other DNA
ttttattctttagcccctgg

SEQ ID NO: 64083 - DNA, 20 bp, synthetic construct
  misc_feature 1..20: note = chemically synthesized
  source 1..20: mol_type = other DNA
cctggttgagttattcttct

SEQ ID NO: 64084 - DNA, 20 bp, synthetic construct
  misc_feature 1..20: note = chemically synthesized
  source 1..20: mol_type = other DNA
ttctaagaatatttctccag

SEQ ID NO: 64085 - DNA, 20 bp, synthetic construct
  misc_feature 1..20: note = chemically synthesized
  source 1..20: mol_type = other DNA
tataaattatgcctttgtca

SEQ ID NO: 64086 - DNA, 20 bp, synthetic construct
  misc_feature 1..20: note = chemically synthesized
  source 1..20: mol_type = other DNA
ttcttgtcaaagaaaatctt

SEQ ID NO: 64087 - DNA, 20 bp, synthetic construct
  misc_feature 1..20: note = chemically synthesized
  source 1..20: mol_type = other DNA
taaaaatttaaatacatttt

SEQ ID NO: 64088 - DNA, 20 bp, synthetic construct
  misc_feature 1..20: note = chemically synthesized
  source 1..20: mol_type = other DNA
tacattttcagagtcataca

SEQ ID NO: 64089 - DNA, 20 bp, synthetic construct
  misc_feature 1..20: note = chemically synthesized
  source 1..20: mol_type = other DNA
atattaaaaatactatacta

SEQ ID NO: 64090 - DNA, 20 bp, synthetic construct
  misc_feature 1..20: note = chemically synthesized
  source 1..20: mol_type = other DNA
ataatagtaaatctggcaca

SEQ ID NO: 64091 - DNA, 20 bp, synthetic construct
  misc_feature 1..20: note = chemically synthesized
  source 1..20: mol_type = other DNA
tggcacagtgaataattctc

SEQ ID NO: 64092 - DNA, 20 bp, synthetic construct
  misc_feature 1..20: note = chemically synthesized
  source 1..20: mol_type = other DNA
gactgaaaggaagagaggtg

SEQ ID NO: 64093 - DNA, 20 bp, synthetic construct
  misc_feature 1..20: note = chemically synthesized
  source 1..20: mol_type = other DNA
agaaataacaagtgtacaca

SEQ ID NO: 64094 - DNA, 20 bp, synthetic construct
  misc_feature 1..20: note = chemically synthesized
  source 1..20: mol_type = other DNA
acaagtgtacacataggatg

SEQ ID NO: 64095 - DNA, 20 bp, synthetic construct
  misc_feature 1..20: note = chemically synthesized
  source 1..20: mol_type = other DNA
cataggatgtggagttcaga

SEQ ID NO: 64096 - DNA, 20 bp, synthetic construct
  misc_feature 1..20: note = chemically synthesized
  source 1..20: mol_type = other DNA
ttgaaatctaaccaaagcag

SEQ ID NO: 64097 - DNA, 20 bp, synthetic construct
  misc_feature 1..20: note = chemically synthesized
  source 1..20: mol_type = other DNA
gtagttacctctgattcttg

SEQ ID NO: 64098 - DNA, 20 bp, synthetic construct
  misc_feature 1..20: note = chemically synthesized
  source 1..20: mol_type = other DNA
cctctgattcttgaggaatg

SEQ ID NO: 64099 - DNA, 20 bp, synthetic construct
  misc_feature 1..20: note = chemically synthesized
  source 1..20: mol_type = other DNA
tgattcttgaggaatgatgg

SEQ ID NO: 64100 - DNA, 20 bp, synthetic construct
  misc_feature 1..20: note = chemically synthesized
  source 1..20: mol_type = other DNA
tctagttttttcaatatggt

SEQ ID NO: 64101 - DNA, 20 bp, synthetic construct
  misc_feature 1..20: note = chemically synthesized
  source 1..20: mol_type = other DNA
cttggggagacaaggaaaat

SEQ ID NO: 64102 - DNA, 20 bp, synthetic construct
  misc_feature 1..20: note = chemically synthesized
  source 1..20: mol_type = other DNA
aaatggctattaatgttgtg

SEQ ID NO: 64103 - DNA, 20 bp, synthetic construct
  misc_feature 1..20: note = chemically synthesized
  source 1..20: mol_type = other DNA
aaagctataatgtgccattg

SEQ ID NO: 64104 - DNA, 20 bp, synthetic construct
  misc_feature 1..20: note = chemically synthesized
  source 1..20: mol_type = other DNA
ttgtctaaaattagtggcat

SEQ ID NO: 64105 - DNA, 20 bp, synthetic construct
  misc_feature 1..20: note = chemically synthesized
  source 1..20: mol_type = other DNA
gctactcatccatcattcct

SEQ ID NO: 64106 - DNA, 20 bp, synthetic construct
  misc_feature 1..20: note = chemically synthesized
  source 1..20: mol_type = other DNA
ttcctttcagtctctctttt

SEQ ID NO: 64107 - DNA, 20 bp, synthetic construct
  misc_feature 1..20: note = chemically synthesized
  source 1..20: mol_type = other DNA
attacataggtacaaactca

SEQ ID NO: 64108 - DNA, 20 bp, synthetic construct
  misc_feature 1..20: note = chemically synthesized
  source 1..20: mol_type = other DNA
ttttttaaggcagggatgat

SEQ ID NO: 64109 - DNA, 20 bp, synthetic construct
  misc_feature 1..20: note = chemically synthesized
  source 1..20: mol_type = other DNA
cataatttataaatcctcct

SEQ ID NO: 64110 - DNA, 20 bp, synthetic construct
  misc_feature 1..20: note = chemically synthesized
  source 1..20: mol_type = other DNA
ctcctggagaaatattctta

SEQ ID NO: 64111 - DNA, 20 bp, synthetic construct
  misc_feature 1..20: note = chemically synthesized
  source 1..20: mol_type = other DNA
gaataactcaaccaggggct

SEQ ID NO: 64112 - DNA, 20 bp, synthetic construct
  misc_feature 1..20: note = chemically synthesized
  source 1..20: mol_type = other DNA
accaggggctaaagaataaa

SEQ ID NO: 64113 - DNA, 20 bp, synthetic construct
  misc_feature 1..20: note = chemically synthesized
  source 1..20: mol_type = other DNA
ttctcactttcattagtcac

SEQ ID NO: 64114 - DNA, 20 bp, synthetic construct
  misc_feature 1..20: note = chemically synthesized
  source 1..20: mol_type = other DNA
ttgatatggttactactgca

SEQ ID NO: 64115 - DNA, 20 bp, synthetic construct
  misc_feature 1..20: note = chemically synthesized
  source 1..20: mol_type = other DNA
tgcaccatagacaagtggat

SEQ ID NO: 64116 - DNA, 20 bp, synthetic construct
  misc_feature 1..20: note = chemically synthesized
  source 1..20: mol_type = other DNA
gagggaccagcaagtaaatg

SEQ ID NO: 64117 - DNA, 20 bp, synthetic construct
  misc_feature 1..20: note = chemically synthesized
  source 1..20: mol_type = other DNA
cagcaagtaaatgctagaaa

SEQ ID NO: 64118 - DNA, 20 bp, synthetic construct
  misc_feature 1..20: note = chemically synthesized
  source 1..20: mol_type = other DNA
cagtactaggcatggggcta

SEQ ID NO: 64119 - DNA, 20 bp, synthetic construct
  misc_feature 1..20: note = chemically synthesized
  source 1..20: mol_type = other DNA
tagatttcaggcacattaaa

SEQ ID NO: 64120 - DNA, 20 bp, synthetic construct
  misc_feature 1..20: note = chemically synthesized
  source 1..20: mol_type = other DNA
tctgtggctcctagcatgcc

SEQ ID NO: 64121 - DNA, 20 bp, synthetic construct
  misc_feature 1..20: note = chemically synthesized
  source 1..20: mol_type = other DNA
atagcaatgagataaatggc

SEQ ID NO: 64122 - DNA, 20 bp, synthetic construct
  misc_feature 1..20: note = chemically synthesized
  source 1..20: mol_type = other DNA
tgtaaaagattcccaatgaa

SEQ ID NO: 64123 - DNA, 20 bp, synthetic construct
  misc_feature 1..20: note = chemically synthesized
  source 1..20: mol_type = other DNA
cccaatgaaagagaatagag

SEQ ID NO: 64124 - DNA, 20 bp, synthetic construct
  misc_feature 1..20: note = chemically synthesized
  source 1..20: mol_type = other DNA
taatatatttctttttatat

SEQ ID NO: 64125 - DNA, 20 bp, synthetic construct
  misc_feature 1..20: note = chemically synthesized
  source 1..20: mol_type = other DNA
ttatattcagaataatgtaa

SEQ ID NO: 64126 - DNA, 20 bp, synthetic construct
  misc_feature 1..20: note = chemically synthesized
  source 1..20: mol_type = other DNA
aataatgtaaagagaatgct

SEQ ID NO: 64127 - DNA, 20 bp, synthetic construct
  misc_feature 1..20: note = chemically synthesized
  source 1..20: mol_type = other DNA
tgggcaaatgaatcatttag

SEQ ID NO: 64128 - DNA, 20 bp, synthetic construct
  misc_feature 1..20: note = chemically synthesized
  source 1..20: mol_type = other DNA
taattttgtgagctctgaca

SEQ ID NO: 64129 - DNA, 20 bp, synthetic construct
  misc_feature 1..20: note = chemically synthesized
  source 1..20: mol_type = other DNA
ggaaagcactatgaataacc

SEQ ID NO: 64130 - DNA, 20 bp, synthetic construct
  misc_feature 1..20: note = chemically synthesized
  source 1..20: mol_type = other DNA
tacattttaagctatacatt

SEQ ID NO: 64131 - DNA, 20 bp, synthetic construct
  misc_feature 1..20: note = chemically synthesized
  source 1..20: mol_type = other DNA
caggaagtagctgttctttg

SEQ ID NO: 64132 - DNA, 20 bp, synthetic construct
  misc_feature 1..20: note = chemically synthesized
  source 1..20: mol_type = other DNA
tttttttttttttttttttg

SEQ ID NO: 64133 - DNA, 20 bp, synthetic construct
  misc_feature 1..20: note = chemically synthesized
  source 1..20: mol_type = other DNA
aaaggaaggtaagtaacaag

SEQ ID NO: 64134 - DNA, 20 bp, synthetic construct
  misc_feature 1..20: note = chemically synthesized
  source 1..20: mol_type = other DNA
aggtaagtaacaaggaagaa

SEQ ID NO: 64135 - DNA, 20 bp, synthetic construct
  misc_feature 1..20: note = chemically synthesized
  source 1..20: mol_type = other DNA
ttctccaaagataatcacaa

SEQ ID NO: 64136 - DNA, 20 bp, synthetic construct
  misc_feature 1..20: note = chemically synthesized
  source 1..20: mol_type = other DNA
aaagataatcacaattagaa

SEQ ID NO: 64137 - DNA, 20 bp, synthetic construct
  misc_feature 1..20: note = chemically synthesized
  source 1..20: mol_type = other DNA
tttgctcttaccagatacct

SEQ ID NO: 64138 - DNA, 20 bp, synthetic construct
  misc_feature 1..20: note = chemically synthesized
  source 1..20: mol_type = other DNA
gaatttattgagctcaaatt

SEQ ID NO: 64139 - DNA, 20 bp, synthetic construct
  misc_feature 1..20: note = chemically synthesized
  source 1..20: mol_type = other DNA
ccgtaattatttctacactt

SEQ ID NO: 64140 - DNA, 20 bp, synthetic construct
  misc_feature 1..20: note = chemically synthesized
  source 1..20: mol_type = other DNA
tcttttcccacaggctaaat

SEQ ID NO: 64141 - DNA, 20 bp, synthetic construct
  misc_feature 1..20: note = chemically synthesized
  source 1..20: mol_type = other DNA
caaggtttttctctttttat

SEQ ID NO: 64142 - DNA, 20 bp, synthetic construct
  misc_feature 1..20: note = chemically synthesized
  source 1..20: mol_type = other DNA
tttttctctttttattcaga

SEQ ID NO: 64143 - DNA, 20 bp, synthetic construct
  misc_feature 1..20: note = chemically synthesized
  source 1..20: mol_type = other DNA
ttaggaagcatactaatggt

SEQ ID NO: 64144 - DNA, 20 bp, synthetic construct
  misc_feature 1..20: note = chemically synthesized
  source 1..20: mol_type = other DNA
aggaaccccatgtgctcttt

SEQ ID NO: 64145 - DNA, 20 bp, synthetic construct
  misc_feature 1..20: note = chemically synthesized
  source 1..20: mol_type = other DNA
tcaggttattcttttgtcac

SEQ ID NO: 64146 - DNA, 20 bp, synthetic construct
  misc_feature 1..20: note = chemically synthesized
  source 1..20: mol_type = other DNA
gccatttgtatggcttcttt

SEQ ID NO: 64147 - DNA, 20 bp, synthetic construct
  misc_feature 1..20: note = chemically synthesized
  source 1..20: mol_type = other DNA
tgaatgccattggtattttg

SEQ ID NO: 64148 - DNA, 20 bp, synthetic construct
  misc_feature 1..20: note = chemically synthesized
  source 1..20: mol_type = other DNA
attagagtaatgcttgcctc

SEQ ID NO: 64149 - DNA, 20 bp, synthetic construct
  misc_feature 1..20: note = chemically synthesized
  source 1..20: mol_type = other DNA
gttgattttgtttacctttc

SEQ ID NO: 64150 - DNA, 20 bp, synthetic construct
  misc_feature 1..20: note = chemically synthesized
  source 1..20: mol_type = other DNA
ttcctgtcttcttatattaa

SEQ ID NO: 64151 - DNA, 20 bp, synthetic construct
  misc_feature 1..20: note = chemically synthesized
  source 1..20: mol_type = other DNA
gtgatattgtggggttgtta

SEQ ID NO: 64152 - DNA, 20 bp, synthetic construct
  misc_feature 1..20: note = chemically synthesized
  source 1..20: mol_type = other DNA
ttagaagaaacatttgtcat

SEQ ID NO: 64153 - DNA, 20 bp, synthetic construct
  misc_feature 1..20: note = chemically synthesized
  source 1..20: mol_type = other DNA
aaccaaatggaataagagaa

SEQ ID NO: 64154 - DNA, 20 bp, synthetic construct
  misc_feature 1..20: note = chemically synthesized
  source 1..20: mol_type = other DNA
gcagggcatgtatgagtagt

SEQ ID NO: 64155 - DNA, 20 bp, synthetic construct
  misc_feature 1..20: note = chemically synthesized
  source 1..20: mol_type = other DNA
ctgaggacaggtctgacttc

SEQ ID NO: 64156 - DNA, 20 bp, synthetic construct
  misc_feature 1..20: note = chemically synthesized
  source 1..20: mol_type = other DNA
ggacaggtctgacttctgag

SEQ ID NO: 64157 - DNA, 20 bp, synthetic construct
  misc_feature 1..20: note = chemically synthesized
  source 1..20: mol_type = other DNA
gaattatgtctgacagaagg

SEQ ID NO: 64158 - DNA, 20 bp, synthetic construct
  misc_feature 1..20: note = chemically synthesized
  source 1..20: mol_type = other DNA
tgaataatccctgaggagta

SEQ ID NO: 64159 - DNA, 20 bp, synthetic construct
  misc_feature 1..20: note = chemically synthesized
  source 1..20: mol_type = other DNA
acagctgaaggagccgggga

SEQ ID NO: 64160 - DNA, 20 bp, synthetic construct
  misc_feature 1..20: note = chemically synthesized
  source 1..20: mol_type = other DNA
gtatatgcatcaggtatgag

SEQ ID NO: 64161 - DNA, 20 bp, synthetic construct
  misc_feature 1..20: note = chemically synthesized
  source 1..20: mol_type = other DNA
aaaatagattttagaagtta

SEQ ID NO: 64162 - DNA, 20 bp, synthetic construct
  misc_feature 1..20: note = chemically synthesized
  source 1..20: mol_type = other DNA
agtaaggtcaagttatttgg

SEQ ID NO: 64163 - DNA, 20 bp, synthetic construct
  misc_feature 1..20: note = chemically synthesized
  source 1..20: mol_type = other DNA
gtgcagtcctggatcttgtg

SEQ ID NO: 64164 - DNA, 20 bp, synthetic construct
  misc_feature 1..20: note = chemically synthesized
  source 1..20: mol_type = other DNA
ggagagcacgtgtgttttta

SEQ ID NO: 64165 - DNA, 20 bp, synthetic construct
  misc_feature 1..20: note = chemically synthesized
  source 1..20: mol_type = other DNA
gaagggtgcaaaggaatagt

SEQ ID NO: 64166 - DNA, 20 bp, synthetic construct
  misc_feature 1..20: note = chemically synthesized
  source 1..20: mol_type = other DNA
aagcatgtttgagatccaga

SEQ ID NO: 64167 - DNA, 20 bp, synthetic construct
  misc_feature 1..20: note = chemically synthesized
  source 1..20: mol_type = other DNA
tacagacttaccctccactg

SEQ ID NO: 64168 - DNA, 20 bp, synthetic construct
  misc_feature 1..20: note = chemically synthesized
  source 1..20: mol_type = other DNA
cctgttgtggggtttgaggt

SEQ ID NO: 64169 - DNA, 20 bp, synthetic construct
  misc_feature 1..20: note = chemically synthesized
  source 1..20: mol_type = other DNA
ttgggtaataaaatgtatat

SEQ ID NO: 64170 - DNA, 20 bp, synthetic construct
  misc_feature 1..20: note = chemically synthesized
  source 1..20: mol_type = other DNA
tgattcgggagaggtcggat

SEQ ID NO: 64171 - DNA, 20 bp, synthetic construct
  misc_feature 1..20: note = chemically synthesized
  source 1..20: mol_type = other DNA
gggagacgtcagatgggtct

SEQ ID NO: 64172 - DNA, 20 bp, synthetic construct
  misc_feature 1..20: note = chemically synthesized
  source 1..20: mol_type = other DNA
gggtctgtagaaaaggaaga

SEQ ID NO: 64173 - DNA, 20 bp, synthetic construct
  misc_feature 1..20: note = chemically synthesized
  source 1..20: mol_type = other DNA
tagggagggaccaatgtgta

SEQ ID NO: 64174 - DNA, 20 bp, synthetic construct
  misc_feature 1..20: note = chemically synthesized
  source 1..20: mol_type = other DNA
acaaaaattatttagatctt

SEQ ID NO: 64175 - DNA, 20 bp, synthetic construct
  misc_feature 1..20: note = chemically synthesized
  source 1..20: mol_type = other DNA
tggagtcaagcggccttgca

SEQ ID NO: 64176 - DNA, 20 bp, synthetic construct
  misc_feature 1..20: note = chemically synthesized
  source 1..20: mol_type = other DNA
ctagtgaaggaggcaagccc

SEQ ID NO: 64177 - DNA, 20 bp, synthetic construct
  misc_feature 1..20: note = chemically synthesized
  source 1..20: mol_type = other DNA
gaaggaggcaagcccagaga

SEQ ID NO: 64178 - DNA, 20 bp, synthetic construct
  misc_feature 1..20: note = chemically synthesized
  source 1..20: mol_type = other DNA
ggttcgggggttcttactca

SEQ ID NO: 64179 - DNA, 20 bp, synthetic construct
  misc_feature 1..20: note = chemically synthesized
  source 1..20: mol_type = other DNA
cagagataagaggtcagggc

SEQ ID NO: 64180 - DNA, 20 bp, synthetic construct
  misc_feature 1..20: note = chemically synthesized
  source 1..20: mol_type = other DNA
cagagataagaggttggggc

SEQ ID NO: 64181 - DNA, 20 bp, synthetic construct
  misc_feature 1..20: note = chemically synthesized
  source 1..20: mol_type = other DNA
cagagataagaggttggggt

SEQ ID NO: 64182 - DNA, 20 bp, synthetic construct
  misc_feature 1..20: note = chemically synthesized
  source 1..20: mol_type = other DNA
cagagataagaggtcggggt

SEQ ID NO: 64183 - DNA, 20 bp, synthetic construct
  misc_feature 1..20: note = chemically synthesized
  source 1..20: mol_type = other DNA
ctgagataagaggttggggc

SEQ ID NO: 64184 - DNA, 20 bp, synthetic construct
  misc_feature 1..20: note = chemically synthesized
  source 1..20: mol_type = other DNA
agggattggggttcttgccc

SEQ ID NO: 64185 - DNA, 20 bp, synthetic construct
  misc_feature 1..20: note = chemically synthesized
  source 1..20: mol_type = other DNA
gttggggtacttacccccct

SEQ ID NO: 64186 - DNA, 20 bp, synthetic construct
  misc_feature 1..20: note = chemically synthesized
  source 1..20: mol_type = other DNA
ggaattgaaattaagagaag

SEQ ID NO: 64187 - DNA, 20 bp, synthetic construct
  misc_feature 1..20: note = chemically synthesized
  source 1..20: mol_type = other DNA
gtgtggtgccaagattgaaa

SEQ ID NO: 64188 - DNA, 20 bp, synthetic construct
  misc_feature 1..20: note = chemically synthesized
  source 1..20: mol_type = other DNA
gtggaatgtcatcagttaag

SEQ ID NO: 64189 - DNA, 20 bp, synthetic construct
  misc_feature 1..20: note = chemically synthesized
  source 1..20: mol_type = other DNA
ctagttttattccactgtgg

SEQ ID NO: 64190 - DNA, 20 bp, synthetic construct
  misc_feature 1..20: note = chemically synthesized
  source 1..20: mol_type = other DNA
aatgttgtacatgctgcttt

SEQ ID NO: 64191 - DNA, 20 bp, synthetic construct
  misc_feature 1..20: note = chemically synthesized
  source 1..20: mol_type = other DNA
tgtggttaccatggggctta

SEQ ID NO: 64192 - DNA, 20 bp, synthetic construct
  misc_feature 1..20: note = chemically synthesized
  source 1..20: mol_type = other DNA
tactatatctaggactacac

SEQ ID NO: 64193 - DNA, 20 bp, synthetic construct
  misc_feature 1..20: note = chemically synthesized
  source 1..20: mol_type = other DNA
gtatttatttattgtaagca

SEQ ID NO: 64194 - DNA, 20 bp, synthetic construct
  misc_feature 1..20: note = chemically synthesized
  source 1..20: mol_type = other DNA
gtgttggttgaggaagtaga

SEQ ID NO: 64195 - DNA, 20 bp, synthetic construct
  misc_feature 1..20: note = chemically synthesized
  source 1..20: mol_type = other DNA
cccttttataaagatcctct

SEQ ID NO: 64196 - DNA, 20 bp, synthetic construct
  misc_feature 1..20: note = chemically synthesized
  source 1..20: mol_type = other DNA
ttgtcctcatgaatctcaaa

SEQ ID NO: 64197 - DNA, 20 bp, synthetic construct
  misc_feature 1..20: note = chemically synthesized
  source 1..20: mol_type = other DNA
ctcaaaggagaaaatggttt

SEQ ID NO: 64198 - DNA, 20 bp, synthetic construct
  misc_feature 1..20: note = chemically synthesized
  source 1..20: mol_type = other DNA
cactgataatatggtgggct

SEQ ID NO: 64199 - DNA, 20 bp, synthetic construct
  misc_feature 1..20: note = chemically synthesized
  source 1..20: mol_type = other DNA
ggtacactatagctcgtgac

SEQ ID NO: 64200 - DNA, 20 bp, synthetic construct
  misc_feature 1..20: note = chemically synthesized
  source 1..20: mol_type = other DNA
tagttttttcatgtatacca

SEQ ID NO: 64201 - DNA, 20 bp, synthetic construct
  misc_feature 1..20: note = chemically synthesized
  source 1..20: mol_type = other DNA
tctaaattactctgaaattt

SEQ ID NO: 64202 - DNA, 20 bp, synthetic construct
  misc_feature 1..20: note = chemically synthesized
  source 1..20: mol_type = other DNA
ataaattaatttcgaggaaa

SEQ ID NO: 64203 - DNA, 20 bp, synthetic construct
  misc_feature 1..20: note = chemically synthesized
  source 1..20: mol_type = other DNA
atggaaattcaaaattatct

SEQ ID NO: 64204 - DNA, 20 bp, synthetic construct
  misc_feature 1..20: note = chemically synthesized
  source 1..20: mol_type = other DNA
atccctgtctgagggatttt

SEQ ID NO: 64205 - DNA, 20 bp, synthetic construct
  misc_feature 1..20: note = chemically synthesized
  source 1..20: mol_type = other DNA
cacactgagtataatttttt

SEQ ID NO: 64206 - DNA, 20 bp, synthetic construct
  misc_feature 1..20: note = chemically synthesized
  source 1..20: mol_type = other DNA
tttttaagaatctttttatt

SEQ ID NO: 64207 - DNA, 20 bp, synthetic construct
  misc_feature 1..20: note = chemically synthesized
  source 1..20: mol_type = other DNA
ttgtaaactacacaaagtaa

SEQ ID NO: 64208 - DNA, 20 bp, synthetic construct
  misc_feature 1..20: note = chemically synthesized
  source 1..20: mol_type = other DNA
ttgatgtaaaattgatgtac

SEQ ID NO: 64209 - DNA, 20 bp, synthetic construct
  misc_feature 1..20: note = chemically synthesized
  source 1..20: mol_type = other DNA
aacaaaatatttccatctcc

SEQ ID NO: 64210 - DNA, 20 bp, synthetic construct
  misc_feature 1..20: note = chemically synthesized
  source 1..20: mol_type = other DNA
tatcactaattttaatataa

SEQ ID NO: 64211 - DNA, 20 bp, synthetic construct
  misc_feature 1..20: note = chemically synthesized
  source 1..20: mol_type = other DNA
agctatttccagtactgtat

SEQ ID NO: 64212 - DNA, 20 bp, synthetic construct
  misc_feature 1..20: note = chemically synthesized
  source 1..20: mol_type = other DNA
ctgtatgaagaatcagcaca

SEQ ID NO: 64213 - DNA, 20 bp, synthetic construct
  misc_feature 1..20: note = chemically synthesized
  source 1..20: mol_type = other DNA
tgtgtgagggtattgtggcc

SEQ ID NO: 64214 - DNA, 20 bp, synthetic construct
  misc_feature 1..20: note = chemically synthesized
  source 1..20: mol_type = other DNA
acagaaaggcagacgcctca

SEQ ID NO: 64215 - DNA, 20 bp, synthetic construct
  misc_feature 1..20: note = chemically synthesized
  source 1..20: mol_type = other DNA
aggcaatggcggcacccgtc

SEQ ID NO: 64216 - DNA, 20 bp, synthetic construct
  misc_feature 1..20: note = chemically synthesized
  source 1..20: mol_type = other DNA
cccagaaatgcaggcaattg

SEQ ID NO: 64217 - DNA, 20 bp, synthetic construct
  misc_feature 1..20: note = chemically synthesized
  source 1..20: mol_type = other DNA
ccataagagtgaaagagtgc

SEQ ID NO: 64218 - DNA, 20 bp, synthetic construct
  misc_feature 1..20: note = chemically synthesized
  source 1..20: mol_type = other DNA
ttcaacaaaggccggcatgg

SEQ ID NO: 64219 - DNA, 20 bp, synthetic construct
  misc_feature 1..20: note = chemically synthesized
  source 1..20: mol_type = other DNA
agagtcaattcggatgatgt

SEQ ID NO: 64220 - DNA, 20 bp, synthetic construct
  misc_feature 1..20: note = chemically synthesized
  source 1..20: mol_type = other DNA
gtcatatctaagacatttcc

SEQ ID NO: 64221 - DNA, 20 bp, synthetic construct
  misc_feature 1..20: note = chemically synthesized
  source 1..20: mol_type = other DNA
ggtaagccacagtgagtgga

SEQ ID NO: 64222 - DNA, 20 bp, synthetic construct
  misc_feature 1..20: note = chemically synthesized
  source 1..20: mol_type = other DNA
agagaaacctaatgggtcat

SEQ ID NO: 64223 - DNA, 20 bp, synthetic construct
  misc_feature 1..20: note = chemically synthesized
  source 1..20: mol_type = other DNA
atatgccagataaggcatta

SEQ ID NO: 64224 - DNA, 20 bp, synthetic construct
  misc_feature 1..20: note = chemically synthesized
  source 1..20: mol_type = other DNA
ttcacatggaaattatgact

SEQ ID NO: 64225 - DNA, 20 bp, synthetic construct
  misc_feature 1..20: note = chemically synthesized
  source 1..20: mol_type = other DNA
atatagtaaatattaaatgt

SEQ ID NO: 64226 - DNA, 20 bp, synthetic construct
  misc_feature 1..20: note = chemically synthesized
  source 1..20: mol_type = other DNA
gaacacaaggatagtttctc

SEQ ID NO: 64227 - DNA, 20 bp, synthetic construct
  misc_feature 1..20: note = chemically synthesized
  source 1..20: mol_type = other DNA
ctccacctgctatccataga

SEQ ID NO: 64228 - DNA, 20 bp, synthetic construct
  misc_feature 1..20: note = chemically synthesized
  source 1..20: mol_type = other DNA
ttaggtattaacgttggagg

SEQ ID NO: 64229 - DNA, 20 bp, synthetic construct
  misc_feature 1..20: note = chemically synthesized
  source 1..20: mol_type = other DNA
aatggaattcaggatggggc

SEQ ID NO: 64230 - DNA, 20 bp, synthetic construct
  misc_feature 1..20: note = chemically synthesized
  source 1..20: mol_type = other DNA
ttcaggatggggctcagaaa

SEQ ID NO: 64231 - DNA, 20 bp, synthetic construct
  misc_feature 1..20: note = chemically synthesized
  source 1..20: mol_type = other DNA
gttgactggaggacatagag

SEQ ID NO: 64232 - DNA, 20 bp, synthetic construct
  misc_feature 1..20: note = chemically synthesized
  source 1..20: mol_type = other DNA
tccctcaagaagcaattaac

SEQ ID NO: 64233 - DNA, 20 bp, synthetic construct
  misc_feature 1..20: note = chemically synthesized
  source 1..20: mol_type = other DNA
ttaaccaagaataattattc

SEQ ID NO: 64234 - DNA, 20 bp, synthetic construct
  misc_feature 1..20: note = chemically synthesized
  source 1..20: mol_type = other DNA
agaaacttcgggtgtattag

SEQ ID NO: 64235 - DNA, 20 bp, synthetic construct
  misc_feature 1..20: note = chemically synthesized
  source 1..20: mol_type = other DNA
tgtttgggggacttgggtaa

SEQ ID NO: 64236 - DNA, 20 bp, synthetic construct
  misc_feature 1..20: note = chemically synthesized
  source 1..20: mol_type = other DNA
gttcatgcaacaaacgactt

SEQ ID NO: 64237 - DNA, 20 bp, synthetic construct
  misc_feature 1..20: note = chemically synthesized
  source 1..20: mol_type = other DNA
gtatttcataagtttaatat

SEQ ID NO: 64238 - DNA, 20 bp, synthetic construct
  misc_feature 1..20: note = chemically synthesized
  source 1..20: mol_type = other DNA
atgatgggaatgagtaattt

SEQ ID NO: 64239 - DNA, 20 bp, synthetic construct
  misc_feature 1..20: note = chemically synthesized
  source 1..20: mol_type = other DNA
aagacactacttcaaactta

SEQ ID NO: 64240 - DNA, 20 bp, synthetic construct
  misc_feature 1..20: note = chemically synthesized
  source 1..20: mol_type = other DNA
actagaatgtctatacttta

SEQ ID NO: 64241 - DNA, 20 bp, synthetic construct
  misc_feature 1..20: note = chemically synthesized
  source 1..20: mol_type = other DNA
aacaagtgttgacaaagata

SEQ ID NO: 64242 - DNA, 20 bp, synthetic construct
  misc_feature 1..20: note = chemically synthesized
  source 1..20: mol_type = other DNA
tgttaagtggtgcaacttct

SEQ ID NO: 64243 - DNA, 20 bp, synthetic construct
  misc_feature 1..20: note = chemically synthesized
  source 1..20: mol_type = other DNA
tagccaaaaggtggaaacaa

SEQ ID NO: 64244 - DNA, 20 bp, synthetic construct
  misc_feature 1..20: note = chemically synthesized
  source 1..20: mol_type = other DNA
gaatattatgtagcaataaa

SEQ ID NO: 64245 - DNA, 20 bp, synthetic construct
  misc_feature 1..20: note = chemically synthesized
  source 1..20: mol_type = other DNA
ttttagccaacactgttaga

SEQ ID NO: 64246 - DNA, 20 bp, synthetic construct
  misc_feature 1..20: note = chemically synthesized
  source 1..20: mol_type = other DNA
tggcttaaagtttcagtttc

SEQ ID NO: 64247 - DNA, 20 bp, synthetic construct
  misc_feature 1..20: note = chemically synthesized
  source 1..20: mol_type = other DNA
tatctaaaatagactgattt

SEQ ID NO: 64248 - DNA, 20 bp, synthetic construct
  misc_feature 1..20: note = chemically synthesized
  source 1..20: mol_type = other DNA
ctttatcacaataaaaatgg

SEQ ID NO: 64249 - DNA, 20 bp, synthetic construct
  misc_feature 1..20: note = chemically synthesized
  source 1..20: mol_type = other DNA
tttattatgagttgtttctg

SEQ ID NO: 64250 - DNA, 20 bp, synthetic construct
  misc_feature 1..20: note = chemically synthesized
  source 1..20: mol_type = other DNA
gctcactgcaacctccgcct

SEQ ID NO: 64251 - DNA, 20 bp, synthetic construct
  misc_feature 1..20: note = chemically synthesized
  source 1..20: mol_type = other DNA
aaatgatcatatcatataca

SEQ ID NO: 64252 - DNA, 20 bp, synthetic construct
  misc_feature 1..20: note = chemically synthesized
  source 1..20: mol_type = other DNA
ataaaggcaaagatgtaaat

SEQ ID NO: 64253 - DNA, 20 bp, synthetic construct
  misc_feature 1..20: note = chemically synthesized
  source 1..20: mol_type = other DNA
cagccatttcctaaatcctt

SEQ ID NO: 64254 - DNA, 20 bp, synthetic construct
  misc_feature 1..20: note = chemically synthesized
  source 1..20: mol_type = other DNA
catcatattattacttttat

SEQ ID NO: 64255 - DNA, 20 bp, synthetic construct
  misc_feature 1..20: note = chemically synthesized
  source 1..20: mol_type = other DNA
cgctgagtgtaaatttcaca

SEQ ID NO: 64256 - DNA, 20 bp, synthetic construct
  misc_feature 1..20: note = chemically synthesized
  source 1..20: mol_type = other DNA
tgtccaaaacattgtgtaga

SEQ ID NO: 64257 - DNA, 20 bp, synthetic construct
  misc_feature 1..20: note = chemically synthesized
  source 1..20: mol_type = other DNA
atgaagtttaacagatgtac

SEQ ID NO: 64258 - DNA, 20 bp, synthetic construct
  misc_feature 1..20: note = chemically synthesized
  source 1..20: mol_type = other DNA
aaatatttagtgtagtacta

SEQ ID NO: 64259 - DNA, 20 bp, synthetic construct
  misc_feature 1..20: note = chemically synthesized
  source 1..20: mol_type = other DNA
aaacaaattaattagatttt

SEQ ID NO: 64260 - DNA, 20 bp, synthetic construct
  misc_feature 1..20: note = chemically synthesized
  source 1..20: mol_type = other DNA
tataaatttctataaaaatc

SEQ ID NO: 64261 - DNA, 20 bp, synthetic construct
  misc_feature 1..20: note = chemically synthesized
  source 1..20: mol_type = other DNA
aatttatttatcacccaggt

SEQ ID NO: 64262 - DNA, 20 bp, synthetic construct
  misc_feature 1..20: note = chemically synthesized
  source 1..20: mol_type = other DNA
ctttgtgagatgtcagtgag

SEQ ID NO: 64263 - DNA, 20 bp, synthetic construct
  misc_feature 1..20: note = chemically synthesized
  source 1..20: mol_type = other DNA
cgggagtgttgtacatttca

SEQ ID NO: 64264 - DNA, 20 bp, synthetic construct
  misc_feature 1..20: note = chemically synthesized
  source 1..20: mol_type = other DNA
aatagtatttctgaaaaaat

SEQ ID NO: 64265 - DNA, 20 bp, synthetic construct
  misc_feature 1..20: note = chemically synthesized
  source 1..20: mol_type = other DNA
taacagcatacactgatagg

SEQ ID NO: 64266 - DNA, 20 bp, synthetic construct
  misc_feature 1..20: note = chemically synthesized
  source 1..20: mol_type = other DNA
tttacctccaaagcgatggg

SEQ ID NO: 64267 - DNA, 20 bp, synthetic construct
  misc_feature 1..20: note = chemically synthesized
  source 1..20: mol_type = other DNA
aagcgatgggcaagaaatga

SEQ ID NO: 64268 - DNA, 20 bp, synthetic construct
  misc_feature 1..20: note = chemically synthesized
  source 1..20: mol_type = other DNA
gcggtcaaatgccattgcca

SEQ ID NO: 64269 - DNA, 20 bp, synthetic construct
  misc_feature 1..20: note = chemically synthesized
  source 1..20: mol_type = other DNA
caacagccacaatgtacata

SEQ ID NO: 64270 - DNA, 20 bp, synthetic construct
  misc_feature 1..20: note = chemically synthesized
  source 1..20: mol_type = other DNA
tgggaattagtgtgattgcg

SEQ ID NO: 64271 - DNA, 20 bp, synthetic construct
  misc_feature 1..20: note = chemically synthesized
  source 1..20: mol_type = other DNA
aagactacaaagttgaggat

SEQ ID NO: 64272 - DNA, 20 bp, synthetic construct
  misc_feature 1..20: note = chemically synthesized
  source 1..20: mol_type = other DNA
gaaatttagttgtgctgctt

SEQ ID NO: 64273 - DNA, 20 bp, synthetic construct
  misc_feature 1..20: note = chemically synthesized
  source 1..20: mol_type = other DNA
ctactcaagaggctgaggca

SEQ ID NO: 64274 - DNA, 20 bp, synthetic construct
  misc_feature 1..20: note = chemically synthesized
  source 1..20: mol_type = other DNA
gtatatgcctcataggtggt

SEQ ID NO: 64275 - DNA, 20 bp, synthetic construct
  misc_feature 1..20: note = chemically synthesized
  source 1..20: mol_type = other DNA
gttcaactcccacctatgag

SEQ ID NO: 64276 - DNA, 20 bp, synthetic construct
  misc_feature 1..20: note = chemically synthesized
  source 1..20: mol_type = other DNA
tcgtccttgcgatactttgc

SEQ ID NO: 64277 - DNA, 20 bp, synthetic construct
  misc_feature 1..20: note = chemically synthesized
  source 1..20: mol_type = other DNA
gtagttttttccaattctgt

SEQ ID NO: 64278 - DNA, 20 bp, synthetic construct
  misc_feature 1..20: note = chemically synthesized
  source 1..20: mol_type = other DNA
agctcctccttgtacctctg

SEQ ID NO: 64279 - DNA, 20 bp, synthetic construct
  misc_feature 1..20: note = chemically synthesized
  source 1..20: mol_type = other DNA
tggtaagcttcataagtgaa

SEQ ID NO: 64280 - DNA, 20 bp, synthetic construct
  misc_feature 1..20: note = chemically synthesized
  source 1..20: mol_type = other DNA
gaaggaagcagtaaacatgg

SEQ ID NO: 64281 - DNA, 20 bp, synthetic construct
  misc_feature 1..20: note = chemically synthesized
  source 1..20: mol_type = other DNA
gtaaagaccatcaaggctag

SEQ ID NO: 64282 - DNA, 20 bp, synthetic construct
  misc_feature 1..20: note = chemically synthesized
  source 1..20: mol_type = other DNA
acattagacagatcaacgag

SEQ ID NO: 64283 - DNA, 20 bp, synthetic construct
  misc_feature 1..20: note = chemically synthesized
  source 1..20: mol_type = other DNA
gaactctccatcccaaatca

SEQ ID NO: 64284 - DNA, 20 bp, synthetic construct
  misc_feature 1..20: note = chemically synthesized
  source 1..20: mol_type = other DNA
tcctcagcaaacgtaaaaga

SEQ ID NO: 64285 - DNA, 20 bp, synthetic construct
  misc_feature 1..20: note = chemically synthesized
  source 1..20: mol_type = other DNA
atcaaactagaactcaggat

SEQ ID NO: 64286 - DNA, 20 bp, synthetic construct
  misc_feature 1..20: note = chemically synthesized
  source 1..20: mol_type = other DNA
gggtacataacaaaatgaag

SEQ ID NO: 64287 - DNA, 20 bp, synthetic construct
  misc_feature 1..20: note = chemically synthesized
  source 1..20: mol_type = other DNA
aagatgttctttgaaaccaa

SEQ ID NO: 64288 - DNA, 20 bp, synthetic construct
  misc_feature 1..20: note = chemically synthesized
  source 1..20: mol_type = other DNA
gagaataaagatacaacaaa

SEQ ID NO: 64289 - DNA, 20 bp, synthetic construct
  misc_feature 1..20: note = chemically synthesized
  source 1..20: mol_type = other DNA
tatagcactaaatgcccaca

SEQ ID NO: 64290 - DNA, 20 bp, synthetic construct
  misc_feature 1..20: note = chemically synthesized
  source 1..20: mol_type = other DNA
tttcaaaagctagcggaagg

SEQ ID NO: 64291 - DNA, 20 bp, synthetic construct
  misc_feature 1..20: note = chemically synthesized
  source 1..20: mol_type = other DNA
ctgctagcaagactaataaa

SEQ ID NO: 64292 - DNA, 20 bp, synthetic construct
  misc_feature 1..20: note = chemically synthesized
  source 1..20: mol_type = other DNA
gaagactcaaatagatgcaa

SEQ ID NO: 64293 - DNA, 20 bp, synthetic construct
  misc_feature 1..20: note = chemically synthesized
  source 1..20: mol_type = other DNA
cagacatacaaactaccatc

SEQ ID NO: 64294 - DNA, 20 bp, synthetic construct
  misc_feature 1..20: note = chemically synthesized
  source 1..20: mol_type = other DNA
aacacctctacgcaaataaa

SEQ ID NO: 64295 - DNA, 20 bp, synthetic construct
  misc_feature 1..20: note = chemically synthesized
  source 1..20: mol_type = other DNA
caaataaactagaaaatcta

SEQ ID NO: 64296 - DNA, 20 bp, synthetic construct
  misc_feature 1..20: note = chemically synthesized
  source 1..20: mol_type = other DNA
ccctcccaagactaaaccag

SEQ ID NO: 64297 - DNA, 20 bp, synthetic construct
  misc_feature 1..20: note = chemically synthesized
  source 1..20: mol_type = other DNA
ctagctagctagctagctag

SEQ ID NO: 64298 - DNA, 20 bp, synthetic construct
  misc_feature 1..20: note = chemically synthesized
  source 1..20: mol_type = other DNA
tttgaggtggcacaggggct

SEQ ID NO: 64299 - DNA, 20 bp, synthetic construct
  misc_feature 1..20: note = chemically synthesized
  source 1..20: mol_type = other DNA
cccattttttgagttacagt

SEQ ID NO: 64300 - DNA, 20 bp, synthetic construct
  misc_feature 1..20: note = chemically synthesized
  source 1..20: mol_type = other DNA
ttaatatatatctcacattg

SEQ ID NO: 64301 - DNA, 20 bp, synthetic construct
  misc_feature 1..20: note = chemically synthesized
  source 1..20: mol_type = other DNA
aagtaaactgttgatgtttc

SEQ ID NO: 64302 - DNA, 20 bp, synthetic construct
  misc_feature 1..20: note = chemically synthesized
  source 1..20: mol_type = other DNA
gttgatgtttcagagaaagg

SEQ ID NO: 64303 - DNA, 20 bp, synthetic construct
  misc_feature 1..20: note = chemically synthesized
  source 1..20: mol_type = other DNA
aggacattagggatgggaga

SEQ ID NO: 64304 - DNA, 20 bp, synthetic construct
  misc_feature 1..20: note = chemically synthesized
  source 1..20: mol_type = other DNA
caggaatgaagataaggggg

SEQ ID NO: 64305 - DNA, 20 bp, synthetic construct
  misc_feature 1..20: note = chemically synthesized
  source 1..20: mol_type = other DNA
agcaaagatagtgtggtgta

SEQ ID NO: 64306 - DNA, 20 bp, synthetic construct
  misc_feature 1..20: note = chemically synthesized
  source 1..20: mol_type = other DNA
actgagccttgttttaacta

SEQ ID NO: 64307 - DNA, 20 bp, synthetic construct
  misc_feature 1..20: note = chemically synthesized
  source 1..20: mol_type = other DNA
aacattcaaatctgcatatc

SEQ ID NO: 64308 - DNA, 20 bp, synthetic construct
  misc_feature 1..20: note = chemically synthesized
  source 1..20: mol_type = other DNA
cattatttaaacatattcta

SEQ ID NO: 64309 - DNA, 20 bp, synthetic construct
  misc_feature 1..20: note = chemically synthesized
  source 1..20: mol_type = other DNA
gttagatgattaagttatcg

SEQ ID NO: 64310 - DNA, 20 bp, synthetic construct
  misc_feature 1..20: note = chemically synthesized
  source 1..20: mol_type = other DNA
agtttacttacttgcatttt

SEQ ID NO: 64311 - DNA, 20 bp, synthetic construct
  misc_feature 1..20: note = chemically synthesized
  source 1..20: mol_type = other DNA
ttctggtacatagtccacag

SEQ ID NO: 64312 - DNA, 20 bp, synthetic construct
  misc_feature 1..20: note = chemically synthesized
  source 1..20: mol_type = other DNA
ttggtcacatggtaaatggg

SEQ ID NO: 64313 - DNA, 20 bp, synthetic construct
  misc_feature 1..20: note = chemically synthesized
  source 1..20: mol_type = other DNA
tgggtcagaatctgaagggc

SEQ ID NO: 64314 - DNA, 20 bp, synthetic construct
  misc_feature 1..20: note = chemically synthesized
  source 1..20: mol_type = other DNA
atacagatgaagataaaaag

SEQ ID NO: 64315 - DNA, 20 bp, synthetic construct
  misc_feature 1..20: note = chemically synthesized
  source 1..20: mol_type = other DNA
gtgattttctgatatttttc

SEQ ID NO: 64316 - DNA, 20 bp, synthetic construct
  misc_feature 1..20: note = chemically synthesized
  source 1..20: mol_type = other DNA
gtgctatatggtgggagata

SEQ ID NO: 64317 - DNA, 20 bp, synthetic construct
  misc_feature 1..20: note = chemically synthesized
  source 1..20: mol_type = other DNA
accttgcttttttagacatt

SEQ ID NO: 64318 - DNA, 20 bp, synthetic construct
  misc_feature 1..20: note = chemically synthesized
  source 1..20: mol_type = other DNA
tcttcccacctatccttgga

SEQ ID NO: 64319 - DNA, 20 bp, synthetic construct
  misc_feature 1..20: note = chemically synthesized
  source 1..20: mol_type = other DNA
taaaggaatcaaaggatatt

SEQ ID NO: 64320 - DNA, 20 bp, synthetic construct
  misc_feature 1..20: note = chemically synthesized
  source 1..20: mol_type = other DNA
gatattatagaaaaagagat

SEQ ID NO: 64321 - DNA, 20 bp, synthetic construct
  misc_feature 1..20: note = chemically synthesized
  source 1..20: mol_type = other DNA
aagagatggagaaaggacaa

SEQ ID NO: 64322 - DNA, 20 bp, synthetic construct
  misc_feature 1..20: note = chemically synthesized
  source 1..20: mol_type = other DNA
caaggagaatttaggggaca

SEQ ID NO: 64323 - DNA, 20 bp, synthetic construct
  misc_feature 1..20: note = chemically synthesized
  source 1..20: mol_type = other DNA
ctgatagtgacaggaagaac

SEQ ID NO: 64324 - DNA, 20 bp, synthetic construct
  misc_feature 1..20: note = chemically synthesized
  source 1..20: mol_type = other DNA
agtgacaggaagaacaaaga

SEQ ID NO: 64325 - DNA, 20 bp, synthetic construct
  misc_feature 1..20: note = chemically synthesized
  source 1..20: mol_type = other DNA
atctggggactctaaaactt

SEQ ID NO: 64326 - DNA, 20 bp, synthetic construct
  misc_feature 1..20: note = chemically synthesized
  source 1..20: mol_type = other DNA
cagtctttgagccacatgct

SEQ ID NO: 64327 - DNA, 20 bp, synthetic construct
  misc_feature 1..20: note = chemically synthesized
  source 1..20: mol_type = other DNA
agggaacatgtaagtattat

SEQ ID NO: 64328 - DNA, 20 bp, synthetic construct
  misc_feature 1..20: note = chemically synthesized
  source 1..20: mol_type = other DNA
aattctcacataagttcatg

SEQ ID NO: 64329 - DNA, 20 bp, synthetic construct
  misc_feature 1..20: note = chemically synthesized
  source 1..20: mol_type = other DNA
ggacttgagtggaggaaatc

SEQ ID NO: 64330 - DNA, 20 bp, synthetic construct
  misc_feature 1..20: note = chemically synthesized
  source 1..20: mol_type = other DNA
tgagtggaggaaatccaaga

SEQ ID NO: 64331 - DNA, 20 bp, synthetic construct
  misc_feature 1..20: note = chemically synthesized
  source 1..20: mol_type = other DNA
agtaaagctgggagttggtg

SEQ ID NO: 64332 - DNA, 20 bp, synthetic construct
  misc_feature 1..20: note = chemically synthesized
  source 1..20: mol_type = other DNA
agttggtgccagaaaagaga

SEQ ID NO: 64333 - DNA, 20 bp, synthetic construct
  misc_feature 1..20: note = chemically synthesized
  source 1..20: mol_type = other DNA
gatttttcccctgccacatt

SEQ ID NO: 64334 - DNA, 20 bp, synthetic construct
  misc_feature 1..20: note = chemically synthesized
  source 1..20: mol_type = other DNA
tagagatgatctttatctgg

SEQ ID NO: 64335 - DNA, 20 bp, synthetic construct
  misc_feature 1..20: note = chemically synthesized
  source 1..20: mol_type = other DNA
ccaatacgactgcttgtatt

SEQ ID NO: 64336 - DNA, 20 bp, synthetic construct
  misc_feature 1..20: note = chemically synthesized
  source 1..20: mol_type = other DNA
ggtatttccttatagcaaga

SEQ ID NO: 64337 - DNA, 20 bp, synthetic construct
  misc_feature 1..20: note = chemically synthesized
  source 1..20: mol_type = other DNA
caagatgagaatggaccagt

SEQ ID NO: 64338 - DNA, 20 bp, synthetic construct
  misc_feature 1..20: note = chemically synthesized
  source 1..20: mol_type = other DNA
gaagaagacagggagatgag

SEQ ID NO: 64339 - DNA, 20 bp, synthetic construct
  misc_feature 1..20: note = chemically synthesized
  source 1..20: mol_type = other DNA
ctgcactgtgcctctacctt

SEQ ID NO: 64340 - DNA, 20 bp, synthetic construct
  misc_feature 1..20: note = chemically synthesized
  source 1..20: mol_type = other DNA
ctatgctcatatgtgtgagc

SEQ ID NO: 64341 - DNA, 20 bp, synthetic construct
  misc_feature 1..20: note = chemically synthesized
  source 1..20: mol_type = other DNA
attatctgctcggccatgtg

SEQ ID NO: 64342 - DNA, 20 bp, synthetic construct
  misc_feature 1..20: note = chemically synthesized
  source 1..20: mol_type = other DNA
aggagcaattcaagcaggct

SEQ ID NO: 64343 - DNA, 20 bp, synthetic construct
  misc_feature 1..20: note = chemically synthesized
  source 1..20: mol_type = other DNA
tctaatagccaaaataaagg

SEQ ID NO: 64344 - DNA, 20 bp, synthetic construct
  misc_feature 1..20: note = chemically synthesized
  source 1..20: mol_type = other DNA
acctagatttcagaggatgt

SEQ ID NO: 64345 - DNA, 20 bp, synthetic construct
  misc_feature 1..20: note = chemically synthesized
  source 1..20: mol_type = other DNA
ggcactgcctagcagagcta

SEQ ID NO: 64346 - DNA, 20 bp, synthetic construct
  misc_feature 1..20: note = chemically synthesized
  source 1..20: mol_type = other DNA
gggccaccgtcctccagacc

SEQ ID NO: 64347 - DNA, 20 bp, synthetic construct
  misc_feature 1..20: note = chemically synthesized
  source 1..20: mol_type = other DNA
tgacagtttgcaccgtgcac

SEQ ID NO: 64348 - DNA, 20 bp, synthetic construct
  misc_feature 1..20: note = chemically synthesized
  source 1..20: mol_type = other DNA
tgtccgttttaaactgctat

SEQ ID NO: 64349 - DNA, 20 bp, synthetic construct
  misc_feature 1..20: note = chemically synthesized
  source 1..20: mol_type = other DNA
cccgagactgggtaatttat

SEQ ID NO: 64350 - DNA, 20 bp, synthetic construct
  misc_feature 1..20: note = chemically synthesized
  source 1..20: mol_type = other DNA
ttatgggacctactattcaa

SEQ ID NO: 64351 - DNA, 20 bp, synthetic construct
  misc_feature 1..20: note = chemically synthesized
  source 1..20: mol_type = other DNA
tagctgtctgaaactaagtc

SEQ ID NO: 64352 - DNA, 20 bp, synthetic construct
  misc_feature 1..20: note = chemically synthesized
  source 1..20: mol_type = other DNA
aggttaatggagtaatatgt

SEQ ID NO: 64353 - DNA, 20 bp, synthetic construct
  misc_feature 1..20: note = chemically synthesized
  source 1..20: mol_type = other DNA
agagaatgatgactataatt

SEQ ID NO: 64354 - DNA, 20 bp, synthetic construct
  misc_feature 1..20: note = chemically synthesized
  source 1..20: mol_type = other DNA
acatgaaaagactagttttg

SEQ ID NO: 64355 - DNA, 20 bp, synthetic construct
  misc_feature 1..20: note = chemically synthesized
  source 1..20: mol_type = other DNA
tggattgtttgttttttatt

SEQ ID NO: 64356 - DNA, 20 bp, synthetic construct
  misc_feature 1..20: note = chemically synthesized
  source 1..20: mol_type = other DNA
caactgctgtgttcttttgt

SEQ ID NO: 64357 - DNA, 20 bp, synthetic construct
  misc_feature 1..20: note = chemically synthesized
  source 1..20: mol_type = other DNA
aaaatgagtggttatttaat

SEQ ID NO: 64358 - DNA, 20 bp, synthetic construct
  misc_feature 1..20: note = chemically synthesized
  source 1..20: mol_type = other DNA
gttcttggtctcgctgactt

SEQ ID NO: 64359 - DNA, 20 bp, synthetic construct
  misc_feature 1..20: note = chemically synthesized
  source 1..20: mol_type = other DNA
gcagcagtaagatttattgt

SEQ ID NO: 64360 - DNA, 20 bp, synthetic construct
  misc_feature 1..20: note = chemically synthesized
  source 1..20: mol_type = other DNA
catatttcatggtgaggaac

SEQ ID NO: 64361 - DNA, 20 bp, synthetic construct
  misc_feature 1..20: note = chemically synthesized
  source 1..20: mol_type = other DNA
ccaacaatgatagactggat

SEQ ID NO: 64362 - DNA, 20 bp, synthetic construct
  misc_feature 1..20: note = chemically synthesized
  source 1..20: mol_type = other DNA
ccagttactttgaaggctga

SEQ ID NO: 64363 - DNA, 20 bp, synthetic construct
  misc_feature 1..20: note = chemically synthesized
  source 1..20: mol_type = other DNA
aatcattttgccagaactaa

SEQ ID NO: 64364 - DNA, 20 bp, synthetic construct
  misc_feature 1..20: note = chemically synthesized
  source 1..20: mol_type = other DNA
taagtaatttctgtgttttt

SEQ ID NO: 64365 - DNA, 20 bp, synthetic construct
  misc_feature 1..20: note = chemically synthesized
  source 1..20: mol_type = other DNA
atctatagctttagtggatt

SEQ ID NO: 64366 - DNA, 20 bp, synthetic construct
  misc_feature 1..20: note = chemically synthesized
  source 1..20: mol_type = other DNA
ttagtggattagagaaagta

SEQ ID NO: 64367 - DNA, 20 bp, synthetic construct
  misc_feature 1..20: note = chemically synthesized
  source 1..20: mol_type = other DNA
tttatattttattattcagt

SEQ ID NO: 64368 - DNA, 20 bp, synthetic construct
  misc_feature 1..20: note = chemically synthesized
  source 1..20: mol_type = other DNA
cttttaacaaacactcagac

SEQ ID NO: 64369 - DNA, 20 bp, synthetic construct
  misc_feature 1..20: note = chemically synthesized
  source 1..20: mol_type = other DNA
atggtgccaagactgcaggg

SEQ ID NO: 64370 - DNA, 20 bp, synthetic construct
  misc_feature 1..20: note = chemically synthesized
  source 1..20: mol_type = other DNA
atctaggttgcggcttctta

SEQ ID NO: 64371 - DNA, 20 bp, synthetic construct
  misc_feature 1..20: note = chemically synthesized
  source 1..20: mol_type = other DNA
gaatcatgtcctctcacttc

SEQ ID NO: 64372 - DNA, 20 bp, synthetic construct
  misc_feature 1..20: note = chemically synthesized
  source 1..20: mol_type = other DNA
aaaacatattgtcagttgtt

SEQ ID NO: 64373 - DNA, 20 bp, synthetic construct
  misc_feature 1..20: note = chemically synthesized
  source 1..20: mol_type = other DNA
aaggaagcttctttggccat

SEQ ID NO: 64374 - DNA, 20 bp, synthetic construct
  misc_feature 1..20: note = chemically synthesized
  source 1..20: mol_type = other DNA
aaccagatactttactctgt

SEQ ID NO: 64375 - DNA, 20 bp, synthetic construct
  misc_feature 1..20: note = chemically synthesized
  source 1..20: mol_type = other DNA
tcactttgaggcttaagcta

SEQ ID NO: 64376 - DNA, 20 bp, synthetic construct
  misc_feature 1..20: note = chemically synthesized
  source 1..20: mol_type = other DNA
cttaccttcttagataccta

SEQ ID NO: 64377 - DNA, 20 bp, synthetic construct
  misc_feature 1..20: note = chemically synthesized
  source 1..20: mol_type = other DNA
ggaaagctgcactagcttac

SEQ ID NO: 64378 - DNA, 20 bp, synthetic construct
  misc_feature 1..20: note = chemically synthesized
  source 1..20: mol_type = other DNA
ttatcttttttcttttaaac

SEQ ID NO: 64379 - DNA, 20 bp, synthetic construct
  misc_feature 1..20: note = chemically synthesized
  source 1..20: mol_type = other DNA
tatagaacatcgccatcagt

SEQ ID NO: 64380 - DNA, 20 bp, synthetic construct
  misc_feature 1..20: note = chemically synthesized
  source 1..20: mol_type = other DNA
aggttaattaagtaaacctc

SEQ ID NO: 64381 - DNA, 20 bp, synthetic construct
  misc_feature 1..20: note = chemically synthesized
  source 1..20: mol_type = other DNA
taagtaaacctcagagaatg

SEQ ID NO: 64382 - DNA, 20 bp, synthetic construct
  misc_feature 1..20: note = chemically synthesized
  source 1..20: mol_type = other DNA
atatctctcaatatcttttc

SEQ ID NO: 64383 - DNA, 20 bp, synthetic construct
  misc_feature 1..20: note = chemically synthesized
  source 1..20: mol_type = other DNA
ggcaactgccaggactgact

SEQ ID NO: 64384 - DNA, 20 bp, synthetic construct
  misc_feature 1..20: note = chemically synthesized
  source 1..20: mol_type = other DNA
gacttaagaatcaggatgta

SEQ ID NO: 64385 - DNA, 20 bp, synthetic construct
  misc_feature 1..20: note = chemically synthesized
  source 1..20: mol_type = other DNA
cggagaagatcctggtgcag

SEQ ID NO: 64386 - DNA, 20 bp, synthetic construct
  misc_feature 1..20: note = chemically synthesized
  source 1..20: mol_type = other DNA
cctggtgcaggcagaaagag

SEQ ID NO: 64387 - DNA, 20 bp, synthetic construct
  misc_feature 1..20: note = chemically synthesized
  source 1..20: mol_type = other DNA
cagatgatggggggtgtaat

SEQ ID NO: 64388 - DNA, 20 bp, synthetic construct
  misc_feature 1..20: note = chemically synthesized
  source 1..20: mol_type = other DNA
aggggtattgctgctccatg

SEQ ID NO: 64389 - DNA, 20 bp, synthetic construct
  misc_feature 1..20: note = chemically synthesized
  source 1..20: mol_type = other DNA
catgccagaaaatccagtga

SEQ ID NO: 64390 - DNA, 20 bp, synthetic construct
  misc_feature 1..20: note = chemically synthesized
  source 1..20: mol_type = other DNA
aaaatccagtgagaagaaag

SEQ ID NO: 64391 - DNA, 20 bp, synthetic construct
  misc_feature 1..20: note = chemically synthesized
  source 1..20: mol_type = other DNA
tgaagtaatcattctggaac

SEQ ID NO: 64392 - DNA, 20 bp, synthetic construct
  misc_feature 1..20: note = chemically synthesized
  source 1..20: mol_type = other DNA
actgacttaaaaaaaacagc

SEQ ID NO: 64393 - DNA, 20 bp, synthetic construct
  misc_feature 1..20: note = chemically synthesized
  source 1..20: mol_type = other DNA
gacatagtatccattgcctt

SEQ ID NO: 64394 - DNA, 20 bp, synthetic construct
  misc_feature 1..20: note = chemically synthesized
  source 1..20: mol_type = other DNA
catttgtgcctttgtgatgt

SEQ ID NO: 64395 - DNA, 20 bp, synthetic construct
  misc_feature 1..20: note = chemically synthesized
  source 1..20: mol_type = other DNA
atttcaaaagcctcatggta

SEQ ID NO: 64396 - DNA, 20 bp, synthetic construct
  misc_feature 1..20: note = chemically synthesized
  source 1..20: mol_type = other DNA
cctgctttaagttccagacc

SEQ ID NO: 64397 - DNA, 20 bp, synthetic construct
  misc_feature 1..20: note = chemically synthesized
  source 1..20: mol_type = other DNA
tttttaatacttttttctcc

SEQ ID NO: 64398 - DNA, 20 bp, synthetic construct
  misc_feature 1..20: note = chemically synthesized
  source 1..20: mol_type = other DNA
ctgagtgtttaatcttaaaa

SEQ ID NO: 64399 - DNA, 20 bp, synthetic construct
  misc_feature 1..20: note = chemically synthesized
  source 1..20: mol_type = other DNA
atcaatttctaccatttcta

SEQ ID NO: 64400 - DNA, 20 bp, synthetic construct
  misc_feature 1..20: note = chemically synthesized
  source 1..20: mol_type = other DNA
aaccatatctgttttttgct

SEQ ID NO: 64401 - DNA, 20 bp, synthetic construct
  misc_feature 1..20: note = chemically synthesized
  source 1..20: mol_type = other DNA
tatgaaaaataagggttagc

SEQ ID NO: 64402 - DNA, 20 bp, synthetic construct
  misc_feature 1..20: note = chemically synthesized
  source 1..20: mol_type = other DNA
ttacttgggagactgaggca

SEQ ID NO: 64403 - DNA, 20 bp, synthetic construct
  misc_feature 1..20: note = chemically synthesized
  source 1..20: mol_type = other DNA
gcttcttcagactagataca

SEQ ID NO: 64404 - DNA, 20 bp, synthetic construct
  misc_feature 1..20: note = chemically synthesized
  source 1..20: mol_type = other DNA
aggtaaataaatgaagattt

SEQ ID NO: 64405 - DNA, 20 bp, synthetic construct
  misc_feature 1..20: note = chemically synthesized
  source 1..20: mol_type = other DNA
atagcagtgaatttgagtct

SEQ ID NO: 64406 - DNA, 20 bp, synthetic construct
  misc_feature 1..20: note = chemically synthesized
  source 1..20: mol_type = other DNA
attaaaactgacctacatat

SEQ ID NO: 64407 - DNA, 20 bp, synthetic construct
  misc_feature 1..20: note = chemically synthesized
  source 1..20: mol_type = other DNA
ttttttttttttctgtcttt

SEQ ID NO: 64408 - DNA, 20 bp, synthetic construct
  misc_feature 1..20: note = chemically synthesized
  source 1..20: mol_type = other DNA
agtcattgttccaaagacat

SEQ ID NO: 64409 - DNA, 20 bp, synthetic construct
  misc_feature 1..20: note = chemically synthesized
  source 1..20: mol_type = other DNA
ttctgaatatgctagttcag

SEQ ID NO: 64410 - DNA, 20 bp, synthetic construct
  misc_feature 1..20: note = chemically synthesized
  source 1..20: mol_type = other DNA
tttaatatgttcccttttct

SEQ ID NO: 64411 - DNA, 20 bp, synthetic construct
  misc_feature 1..20: note = chemically synthesized
  source 1..20: mol_type = other DNA
gcttaaaataaaattaacta

SEQ ID NO: 64412 - DNA, 20 bp, synthetic construct
  misc_feature 1..20: note = chemically synthesized
  source 1..20: mol_type = other DNA
ctggtaaacactgaatgaaa

SEQ ID NO: 64413 - DNA, 20 bp, synthetic construct
  misc_feature 1..20: note = chemically synthesized
  source 1..20: mol_type = other DNA
gaatgaaagaagaaaaccaa

SEQ ID NO: 64414 - DNA, 20 bp, synthetic construct
  misc_feature 1..20: note = chemically synthesized
  source 1..20: mol_type = other DNA
taagttgtcctctgaaaatt

SEQ ID NO: 64415 - DNA, 20 bp, synthetic construct
  misc_feature 1..20: note = chemically synthesized
  source 1..20: mol_type = other DNA
aggaaattgtaaaggctttc

SEQ ID NO: 64416 - DNA, 20 bp, synthetic construct
  misc_feature 1..20: note = chemically synthesized
  source 1..20: mol_type = other DNA
ctcatcaccacacagtggaa

SEQ ID NO: 64417 - DNA, 20 bp, synthetic construct
  misc_feature 1..20: note = chemically synthesized
  source 1..20: mol_type = other DNA
atatcaaattagtaaagcct

SEQ ID NO: 64418 - DNA, 20 bp, synthetic construct
  misc_feature 1..20: note = chemically synthesized
  source 1..20: mol_type = other DNA
tccagttctatctttctgtt

SEQ ID NO: 64419 - DNA, 20 bp, synthetic construct
  misc_feature 1..20: note = chemically synthesized
  source 1..20: mol_type = other DNA
ttctatctttctgttcaaga

SEQ ID NO: 64420 - DNA, 20 bp, synthetic construct
  misc_feature 1..20: note = chemically synthesized
  source 1..20: mol_type = other DNA
gaggggagtttttttttttt

SEQ ID NO: 64421 - DNA, 20 bp, synthetic construct
  misc_feature 1..20: note = chemically synthesized
  source 1..20: mol_type = other DNA
aattgtaatttcttggattc

SEQ ID NO: 64422 - DNA, 20 bp, synthetic construct
  misc_feature 1..20: note = chemically synthesized
  source 1..20: mol_type = other DNA
atttctaaatctgtggattt

SEQ ID NO: 64423 - DNA, 20 bp, synthetic construct
  misc_feature 1..20: note = chemically synthesized
  source 1..20: mol_type = other DNA
aatcagaaggaaccattgtc

SEQ ID NO: 64424 - DNA, 20 bp, synthetic construct
  misc_feature 1..20: note = chemically synthesized
  source 1..20: mol_type = other DNA
atggggcaagtgtacaatac

SEQ ID NO: 64425 - DNA, 20 bp, synthetic construct
  misc_feature 1..20: note = chemically synthesized
  source 1..20: mol_type = other DNA
tctgtggtaaacgtcagcgt

SEQ ID NO: 64426 - DNA, 20 bp, synthetic construct
  misc_feature 1..20: note = chemically synthesized
  source 1..20: mol_type = other DNA
agctgactgtggctataggt

SEQ ID NO: 64427 - DNA, 20 bp, synthetic construct
  misc_feature 1..20: note = chemically synthesized
  source 1..20: mol_type = other DNA
ttatgttaatttactcacta

SEQ ID NO: 64428 - DNA, 20 bp, synthetic construct
  misc_feature 1..20: note = chemically synthesized
  source 1..20: mol_type = other DNA
aaatttgagtagagtaggac

SEQ ID NO: 64429 - DNA, 20 bp, synthetic construct
  misc_feature 1..20: note = chemically synthesized
  source 1..20: mol_type = other DNA
agtaattagctccttagctg

SEQ ID NO: 64430 - DNA, 20 bp, synthetic construct
  misc_feature 1..20: note = chemically synthesized
  source 1..20: mol_type = other DNA
tatgataataattctagttg

SEQ ID NO: 64431 - DNA, 20 bp, synthetic construct
  misc_feature 1..20: note = chemically synthesized
  source 1..20: mol_type = other DNA
cactgctgactttggaattg

SEQ ID NO: 64432 - DNA, 20 bp, synthetic construct
  misc_feature 1..20: note = chemically synthesized
  source 1..20: mol_type = other DNA
cctaattgactaaagccatt

SEQ ID NO: 64433 - DNA, 20 bp, synthetic construct
  misc_feature 1..20: note = chemically synthesized
  source 1..20: mol_type = other DNA
gtatgcacttcttgaaatgc

SEQ ID NO: 64434 - DNA, 20 bp, synthetic construct
  misc_feature 1..20: note = chemically synthesized
  source 1..20: mol_type = other DNA
tattattctcatttgtagtt

SEQ ID NO: 64435 - DNA, 20 bp, synthetic construct
  misc_feature 1..20: note = chemically synthesized
  source 1..20: mol_type = other DNA
aaattgctcctggctacatc

SEQ ID NO: 64436 - DNA, 20 bp, synthetic construct
  misc_feature 1..20: note = chemically synthesized
  source 1..20: mol_type = other DNA
gcaagctggcctcaactgga

SEQ ID NO: 64437 - DNA, 20 bp, synthetic construct
  misc_feature 1..20: note = chemically synthesized
  source 1..20: mol_type = other DNA
gcctcaactggaacagaatg

SEQ ID NO: 64438 - DNA, 20 bp, synthetic construct
  misc_feature 1..20: note = chemically synthesized
  source 1..20: mol_type = other DNA
ataaagcctaatcctgccat

SEQ ID NO: 64439 - DNA, 20 bp, synthetic construct
  misc_feature 1..20: note = chemically synthesized
  source 1..20: mol_type = other DNA
aaaagggaagggaaaaagga

SEQ ID NO: 64440 - DNA, 20 bp, synthetic construct
  misc_feature 1..20: note = chemically synthesized
  source 1..20: mol_type = other DNA
gacttgagttcctcgaagga

SEQ ID NO: 64441 - DNA, 20 bp, synthetic construct
  misc_feature 1..20: note = chemically synthesized
  source 1..20: mol_type = other DNA
gagaccagcttgggcaacat

SEQ ID NO: 64442 - DNA, 20 bp, synthetic construct
  misc_feature 1..20: note = chemically synthesized
  source 1..20: mol_type = other DNA
caaaaaaaaaaaaaagagag

SEQ ID NO: 64443 - DNA, 20 bp, synthetic construct
  misc_feature 1..20: note = chemically synthesized
  source 1..20: mol_type = other DNA
aaaaaaaaaaagagagctag

SEQ ID NO: 64444 - DNA, 20 bp, synthetic construct
  misc_feature 1..20: note = chemically synthesized
  source 1..20: mol_type = other DNA
aaaaaaagagagctagaaag

SEQ ID NO: 64445 - DNA, 20 bp, synthetic construct
  misc_feature 1..20: note = chemically synthesized
  source 1..20: mol_type = other DNA
atcaaattacaaagaaggac

SEQ ID NO: 64446 - DNA, 20 bp, synthetic construct
  misc_feature 1..20: note = chemically synthesized
  source 1..20: mol_type = other DNA
taggtggaaagaggagcaag

SEQ ID NO: 64447 - DNA, 20 bp, synthetic construct
  misc_feature 1..20: note = chemically synthesized
  source 1..20: mol_type = other DNA
ggtgtgcatgtgtctttgtg

SEQ ID NO: 64448 - DNA, 20 bp, synthetic construct
  misc_feature 1..20: note = chemically synthesized
  source 1..20: mol_type = other DNA
ttgatagtttcttttgctgt

SEQ ID NO: 64449 - DNA, 20 bp, synthetic construct
  misc_feature 1..20: note = chemically synthesized
  source 1..20: mol_type = other DNA
gtgtatttttctagttctgt

SEQ ID NO: 64450 - DNA, 20 bp, synthetic construct
  misc_feature 1..20: note = chemically synthesized
  source 1..20: mol_type = other DNA
gactatggtgttttctagat

SEQ ID NO: 64451 - DNA, 20 bp, synthetic construct
  misc_feature 1..20: note = chemically synthesized
  source 1..20: mol_type = other DNA
tgtcttgtgccagttttcaa

SEQ ID NO: 64452 - DNA, 20 bp, synthetic construct
  misc_feature 1..20: note = chemically synthesized
  source 1..20: mol_type = other DNA
aactcttctttgtgcatctg

SEQ ID NO: 64453 - DNA, 20 bp, synthetic construct
  misc_feature 1..20: note = chemically synthesized
  source 1..20: mol_type = other DNA
acagcttagacagtgttaag

SEQ ID NO: 64454 - DNA, 20 bp, synthetic construct
  misc_feature 1..20: note = chemically synthesized
  source 1..20: mol_type = other DNA
accctaaatctagcagaaga

SEQ ID NO: 64455 - DNA, 20 bp, synthetic construct
  misc_feature 1..20: note = chemically synthesized
  source 1..20: mol_type = other DNA
gaagatccaaataagcacag

SEQ ID NO: 64456 - DNA, 20 bp, synthetic construct
  misc_feature 1..20: note = chemically synthesized
  source 1..20: mol_type = other DNA
ggaatattatcactcacccc

SEQ ID NO: 64457 - DNA, 20 bp, synthetic construct
  misc_feature 1..20: note = chemically synthesized
  source 1..20: mol_type = other DNA
aacatctctatgtacataaa

SEQ ID NO: 64458 - DNA, 20 bp, synthetic construct
  misc_feature 1..20: note = chemically synthesized
  source 1..20: mol_type = other DNA
tacataaactagaaaatcta

SEQ ID NO: 64459 - DNA, 20 bp, synthetic construct
  misc_feature 1..20: note = chemically synthesized
  source 1..20: mol_type = other DNA
tcaactctatgtccccctcc

SEQ ID NO: 64460 - DNA, 20 bp, synthetic construct
  misc_feature 1..20: note = chemically synthesized
  source 1..20: mol_type = other DNA
atatctgaatatatggctct

SEQ ID NO: 64461 - DNA, 20 bp, synthetic construct
  misc_feature 1..20: note = chemically synthesized
  source 1..20: mol_type = other DNA
tatatggctctagagaatcc

SEQ ID NO: 64462 - DNA, 20 bp, synthetic construct
  misc_feature 1..20: note = chemically synthesized
  source 1..20: mol_type = other DNA
gctctagagaatcccaagaa

SEQ ID NO: 64463 - DNA, 20 bp, synthetic construct
  misc_feature 1..20: note = chemically synthesized
  source 1..20: mol_type = other DNA
ttgagaagatgtgaagaacc

SEQ ID NO: 64464 - DNA, 20 bp, synthetic construct
  misc_feature 1..20: note = chemically synthesized
  source 1..20: mol_type = other DNA
gaagaacccaagaatccact

SEQ ID NO: 64465 - DNA, 20 bp, synthetic construct
  misc_feature 1..20: note = chemically synthesized
  source 1..20: mol_type = other DNA
aaggggttcagacctgtgtt

SEQ ID NO: 64466 - DNA, 20 bp, synthetic construct
  misc_feature 1..20: note = chemically synthesized
  source 1..20: mol_type = other DNA
tttcccctagcttgttgatt

SEQ ID NO: 64467 - DNA, 20 bp, synthetic construct
  misc_feature 1..20: note = chemically synthesized
  source 1..20: mol_type = other DNA
acaaataagaaggaagactc

SEQ ID NO: 64468 - DNA, 20 bp, synthetic construct
  misc_feature 1..20: note = chemically synthesized
  source 1..20: mol_type = other DNA
ttgaaggaatgttaactgac

SEQ ID NO: 64469 - DNA, 20 bp, synthetic construct
  misc_feature 1..20: note = chemically synthesized
  source 1..20: mol_type = other DNA
taaatttctgtctatttcaa

SEQ ID NO: 64470 - DNA, 20 bp, synthetic construct
  misc_feature 1..20: note = chemically synthesized
  source 1..20: mol_type = other DNA
ttctccttgtgatagtttgc

SEQ ID NO: 64471 - DNA, 20 bp, synthetic construct
  misc_feature 1..20: note = chemically synthesized
  source 1..20: mol_type = other DNA
gtagttttttccagttctgt

SEQ ID NO: 64472 - DNA, 20 bp, synthetic construct
  misc_feature 1..20: note = chemically synthesized
  source 1..20: mol_type = other DNA
agctcctccttgtacctctg

SEQ ID NO: 64473 - DNA, 20 bp, synthetic construct
  misc_feature 1..20: note = chemically synthesized
  source 1..20: mol_type = other DNA
taggtgtggtgtggtgctga

SEQ ID NO: 64474 - DNA, 20 bp, synthetic construct
  misc_feature 1..20: note = chemically synthesized
  source 1..20: mol_type = other DNA
ctggtacctcagttggaaat

SEQ ID NO: 64475 - DNA, 20 bp, synthetic construct
  misc_feature 1..20: note = chemically synthesized
  source 1..20: mol_type = other DNA
tgtgagccaccgctcccagc

SEQ ID NO: 64476 - DNA, 20 bp, synthetic construct
  misc_feature 1..20: note = chemically synthesized
  source 1..20: mol_type = other DNA
ggtattaatttaacatgatt

SEQ ID NO: 64477 - DNA, 20 bp, synthetic construct
  misc_feature 1..20: note = chemically synthesized
  source 1..20: mol_type = other DNA
atttaacatgattttagaat

SEQ ID NO: 64478 - DNA, 20 bp, synthetic construct
  misc_feature 1..20: note = chemically synthesized
  source 1..20: mol_type = other DNA
aaagtaacaatgtatttcca

SEQ ID NO: 64479 - DNA, 20 bp, synthetic construct
  misc_feature 1..20: note = chemically synthesized
  source 1..20: mol_type = other DNA
agagataatattaaggataa

SEQ ID NO: 64480 - DNA, 20 bp, synthetic construct
  misc_feature 1..20: note = chemically synthesized
  source 1..20: mol_type = other DNA
ttaaggataatcagaaaaaa

SEQ ID NO: 64481 - DNA, 20 bp, synthetic construct
  misc_feature 1..20: note = chemically synthesized
  source 1..20: mol_type = other DNA
aaaaaatagaataaacttag

SEQ ID NO: 64482 - DNA, 20 bp, synthetic construct
  misc_feature 1..20: note = chemically synthesized
  source 1..20: mol_type = other DNA
gaataaacttagagagaatg

SEQ ID NO: 64483 - DNA, 20 bp, synthetic construct
  misc_feature 1..20: note = chemically synthesized
  source 1..20: mol_type = other DNA
ttagagagaatgttagaaat

SEQ ID NO: 64484 - DNA, 20 bp, synthetic construct
  misc_feature 1..20: note = chemically synthesized
  source 1..20: mol_type = other DNA
ttcactatttaataataaca

SEQ ID NO: 64485 - DNA, 20 bp, synthetic construct
  misc_feature 1..20: note = chemically synthesized
  source 1..20: mol_type = other DNA
gatatttgtatctgaaaaat

SEQ ID NO: 64486 - DNA, 20 bp, synthetic construct
  misc_feature 1..20: note = chemically synthesized
  source 1..20: mol_type = other DNA
cggatcagcctgaccaacat

SEQ ID NO: 64487 - DNA, 20 bp, synthetic construct
  misc_feature 1..20: note = chemically synthesized
  source 1..20: mol_type = other DNA
cgatgctgtacattagatat

SEQ ID NO: 64488 - DNA, 20 bp, synthetic construct
  misc_feature 1..20: note = chemically synthesized
  source 1..20: mol_type = other DNA
tggatattaaccaaaatatt

SEQ ID NO: 64489 - DNA, 20 bp, synthetic construct
  misc_feature 1..20: note = chemically synthesized
  source 1..20: mol_type = other DNA
aaacggctgcaacgtgaata

SEQ ID NO: 64490 - DNA, 20 bp, synthetic construct
  misc_feature 1..20: note = chemically synthesized
  source 1..20: mol_type = other DNA
actgattatatgccttgatt

SEQ ID NO: 64491 - DNA, 20 bp, synthetic construct
  misc_feature 1..20: note = chemically synthesized
  source 1..20: mol_type = other DNA
cagaatcttgccaactagat

SEQ ID NO: 64492 - DNA, 20 bp, synthetic construct
  misc_feature 1..20: note = chemically synthesized
  source 1..20: mol_type = other DNA
ttgagactcatattttattt

SEQ ID NO: 64493 - DNA, 20 bp, synthetic construct
  misc_feature 1..20: note = chemically synthesized
  source 1..20: mol_type = other DNA
ctacctacctaggtattgaa

SEQ ID NO: 64494 - DNA, 20 bp, synthetic construct
  misc_feature 1..20: note = chemically synthesized
  source 1..20: mol_type = other DNA
ctaatcttaaacatcctgag

SEQ ID NO: 64495 - DNA, 20 bp, synthetic construct
  misc_feature 1..20: note = chemically synthesized
  source 1..20: mol_type = other DNA
aaggctgagtggccaggcga

SEQ ID NO: 64496 - DNA, 20 bp, synthetic construct
  misc_feature 1..20: note = chemically synthesized
  source 1..20: mol_type = other DNA
ttccctttttagtaaaatat

SEQ ID NO: 64497 - DNA, 20 bp, synthetic construct
  misc_feature 1..20: note = chemically synthesized
  source 1..20: mol_type = other DNA
aaataaatgttttttattag

SEQ ID NO: 64498 - DNA, 20 bp, synthetic construct
  misc_feature 1..20: note = chemically synthesized
  source 1..20: mol_type = other DNA
agggaacaaaggaaccttta

SEQ ID NO: 64499 - DNA, 20 bp, synthetic construct
  misc_feature 1..20: note = chemically synthesized
  source 1..20: mol_type = other DNA
ctttaatagaaattggacag

SEQ ID NO: 64500 - DNA, 20 bp, synthetic construct
  misc_feature 1..20: note = chemically synthesized
  source 1..20: mol_type = other DNA
caaaagggcctagcttggac

SEQ ID NO: 64501 - DNA, 20 bp, synthetic construct
  misc_feature 1..20: note = chemically synthesized
  source 1..20: mol_type = other DNA
atcccaaccataaaataaaa

SEQ ID NO: 64502 - DNA, 20 bp, synthetic construct
  misc_feature 1..20: note = chemically synthesized
  source 1..20: mol_type = other DNA
acatcagttacaatttatat

SEQ ID NO: 64503 - DNA, 20 bp, synthetic construct
  misc_feature 1..20: note = chemically synthesized
  source 1..20: mol_type = other DNA
gatattgctattgccttaac

SEQ ID NO: 64504 - DNA, 20 bp, synthetic construct
  misc_feature 1..20: note = chemically synthesized
  source 1..20: mol_type = other DNA
gaaattatcactgttattct

SEQ ID NO: 64505 - DNA, 20 bp, synthetic construct
  misc_feature 1..20: note = chemically synthesized
  source 1..20: mol_type = other DNA
attgtatcattattgccctg

SEQ ID NO: 64506 - DNA, 20 bp, synthetic construct
  misc_feature 1..20: note = chemically synthesized
  source 1..20: mol_type = other DNA
gaaagagattagggaaagta

SEQ ID NO: 64507 - DNA, 20 bp, synthetic construct
  misc_feature 1..20: note = chemically synthesized
  source 1..20: mol_type = other DNA
aacaaaaaagtatattaaaa

SEQ ID NO: 64508 - DNA, 20 bp, synthetic construct
  misc_feature 1..20: note = chemically synthesized
  source 1..20: mol_type = other DNA
ttatgtatcaattaaaaata

SEQ ID NO: 64509 - DNA, 20 bp, synthetic construct
  misc_feature 1..20: note = chemically synthesized
  source 1..20: mol_type = other DNA
ataatagtaaaaattgcgga

SEQ ID NO: 64510 - DNA, 20 bp, synthetic construct
  misc_feature 1..20: note = chemically synthesized
  source 1..20: mol_type = other DNA
aaattgcggagaagaaaaaa

SEQ ID NO: 64511 - DNA, 20 bp, synthetic construct
  misc_feature 1..20: note = chemically synthesized
  source 1..20: mol_type = other DNA
gagaagaaaaaaaaagaaag

SEQ ID NO: 64512 - DNA, 20 bp, synthetic construct
  misc_feature 1..20: note = chemically synthesized
  source 1..20: mol_type = other DNA
aagaaagcaagaattaaaca

SEQ ID NO: 64513 - DNA, 20 bp, synthetic construct
  misc_feature 1..20: note = chemically synthesized
  source 1..20: mol_type = other DNA
attgttatgaacagcaaata

SEQ ID NO: 64514 - DNA, 20 bp, synthetic construct
  misc_feature 1..20: note = chemically synthesized
  source 1..20: mol_type = other DNA
cctatgacatgaacttaacc

SEQ ID NO: 64515 - DNA, 20 bp, synthetic construct
  misc_feature 1..20: note = chemically synthesized
  source 1..20: mol_type = other DNA
taaccatagaaaagaagggg

SEQ ID NO: 64516 - DNA, 20 bp, synthetic construct
  misc_feature 1..20: note = chemically synthesized
  source 1..20: mol_type = other DNA
gcagagagagtcagtgccta

SEQ ID NO: 64517 - DNA, 20 bp, synthetic construct
  misc_feature 1..20: note = chemically synthesized
  source 1..20: mol_type = other DNA
atggatctcttcctgcgtct

SEQ ID NO: 64518 - DNA, 20 bp, synthetic construct
  misc_feature 1..20: note = chemically synthesized
  source 1..20: mol_type = other DNA
atatgcaaaatacttacagg

SEQ ID NO: 64519 - DNA, 20 bp, synthetic construct
  misc_feature 1..20: note = chemically synthesized
  source 1..20: mol_type = other DNA
tttggattaaaaccttctgg

SEQ ID NO: 64520 - DNA, 20 bp, synthetic construct
  misc_feature 1..20: note = chemically synthesized
  source 1..20: mol_type = other DNA
attaaaaccttctggtaaga

SEQ ID NO: 64521 - DNA, 20 bp, synthetic construct
  misc_feature 1..20: note = chemically synthesized
  source 1..20: mol_type = other DNA
ctaataaattatgtctaaaa

SEQ ID NO: 64522 - DNA, 20 bp, synthetic construct
  misc_feature 1..20: note = chemically synthesized
  source 1..20: mol_type = other DNA
gaacaaaaagcctctgtgac

SEQ ID NO: 64523 - DNA, 20 bp, synthetic construct
  misc_feature 1..20: note = chemically synthesized
  source 1..20: mol_type = other DNA
atttttttcctctagtccac

SEQ ID NO: 64524 - DNA, 20 bp, synthetic construct
  misc_feature 1..20: note = chemically synthesized
  source 1..20: mol_type = other DNA
aataaaatttaggttaacca

SEQ ID NO: 64525 - DNA, 20 bp, synthetic construct
  misc_feature 1..20: note = chemically synthesized
  source 1..20: mol_type = other DNA
ctctgattattctcacacac

SEQ ID NO: 64526 - DNA, 20 bp, synthetic construct
  misc_feature 1..20: note = chemically synthesized
  source 1..20: mol_type = other DNA
tctaggcacacgtgtatccc

SEQ ID NO: 64527 - DNA, 20 bp, synthetic construct
  misc_feature 1..20: note = chemically synthesized
  source 1..20: mol_type = other DNA
ttttgcaaatatcctgggtc

SEQ ID NO: 64528 - DNA, 20 bp, synthetic construct
  misc_feature 1..20: note = chemically synthesized
  source 1..20: mol_type = other DNA
gagctttgaaatcctgattg

SEQ ID NO: 64529 - DNA, 20 bp, synthetic construct
  misc_feature 1..20: note = chemically synthesized
  source 1..20: mol_type = other DNA
taccctacaacttcttatgc

SEQ ID NO: 64530 - DNA, 20 bp, synthetic construct
  misc_feature 1..20: note = chemically synthesized
  source 1..20: mol_type = other DNA
ttaagtcctaatgttttata

SEQ ID NO: 64531 - DNA, 20 bp, synthetic construct
  misc_feature 1..20: note = chemically synthesized
  source 1..20: mol_type = other DNA
taaacacaactcagcagctc

SEQ ID NO: 64532 - DNA, 20 bp, synthetic construct
  misc_feature 1..20: note = chemically synthesized
  source 1..20: mol_type = other DNA
aaaatgaaataaaaatgctc

SEQ ID NO: 64533 - DNA, 20 bp, synthetic construct
  misc_feature 1..20: note = chemically synthesized
  source 1..20: mol_type = other DNA
ctccaagaaaaccagaaccc

SEQ ID NO: 64534 - DNA, 20 bp, synthetic construct
  misc_feature 1..20: note = chemically synthesized
  source 1..20: mol_type = other DNA
aaagtatatgcataattatt

SEQ ID NO: 64535 - DNA, 20 bp, synthetic construct
  misc_feature 1..20: note = chemically synthesized
  source 1..20: mol_type = other DNA
cactgggctcagattttcat

SEQ ID NO: 64536 - DNA, 20 bp, synthetic construct
  misc_feature 1..20: note = chemically synthesized
  source 1..20: mol_type = other DNA
gagattgcatctctttagag

SEQ ID NO: 64537 - DNA, 20 bp, synthetic construct
  misc_feature 1..20: note = chemically synthesized
  source 1..20: mol_type = other DNA
tttataaagcaacgccatag

SEQ ID NO: 64538 - DNA, 20 bp, synthetic construct
  misc_feature 1..20: note = chemically synthesized
  source 1..20: mol_type = other DNA
aaagcaacgccatagtgaga

SEQ ID NO: 64539 - DNA, 20 bp, synthetic construct
  misc_feature 1..20: note = chemically synthesized
  source 1..20: mol_type = other DNA
gctctttttttttgactttt

SEQ ID NO: 64540 - DNA, 20 bp, synthetic construct
  misc_feature 1..20: note = chemically synthesized
  source 1..20: mol_type = other DNA
tttttaaaaatgtatacaac

SEQ ID NO: 64541 - DNA, 20 bp, synthetic construct
  misc_feature 1..20: note = chemically synthesized
  source 1..20: mol_type = other DNA
aaaaaatattactcctatga

SEQ ID NO: 64542 - DNA, 20 bp, synthetic construct
  misc_feature 1..20: note = chemically synthesized
  source 1..20: mol_type = other DNA
tatgttgtagcattaacaac

SEQ ID NO: 64543 - DNA, 20 bp, synthetic construct
  misc_feature 1..20: note = chemically synthesized
  source 1..20: mol_type = other DNA
cagtaggcatgtaagaaggt

SEQ ID NO: 64544 - DNA, 20 bp, synthetic construct
  misc_feature 1..20: note = chemically synthesized
  source 1..20: mol_type = other DNA
tgtaagaaggtagagaatag

SEQ ID NO: 64545 - DNA, 20 bp, synthetic construct
  misc_feature 1..20: note = chemically synthesized
  source 1..20: mol_type = other DNA
gtgtgtgtgcatgaaataaa

SEQ ID NO: 64546 - DNA, 20 bp, synthetic construct
  misc_feature 1..20: note = chemically synthesized
  source 1..20: mol_type = other DNA
tgtgcaggcaaaggaaggag

SEQ ID NO: 64547 - DNA, 20 bp, synthetic construct
  misc_feature 1..20: note = chemically synthesized
  source 1..20: mol_type = other DNA
taggcattgtgttcccaagt

SEQ ID NO: 64548 - DNA, 20 bp, synthetic construct
  misc_feature 1..20: note = chemically synthesized
  source 1..20: mol_type = other DNA
tgtgttcccaagttcagaaa

SEQ ID NO: 64549 - DNA, 20 bp, synthetic construct
  misc_feature 1..20: note = chemically synthesized
  source 1..20: mol_type = other DNA
gatacatgcatatggttaac

SEQ ID NO: 64550 - DNA, 20 bp, synthetic construct
  misc_feature 1..20: note = chemically synthesized
  source 1..20: mol_type = other DNA
gagaaataaagactggcttc

SEQ ID NO: 64551 - DNA, 20 bp, synthetic construct
  misc_feature 1..20: note = chemically synthesized
  source 1..20: mol_type = other DNA
tcctttccattccatttact

SEQ ID NO: 64552 - DNA, 20 bp, synthetic construct
  misc_feature 1..20: note = chemically synthesized
  source 1..20: mol_type = other DNA
acaaaaggattattctaagt

SEQ ID NO: 64553 - DNA, 20 bp, synthetic construct
  misc_feature 1..20: note = chemically synthesized
  source 1..20: mol_type = other DNA
aatgaagggagggggttggg

SEQ ID NO: 64554 - DNA, 20 bp, synthetic construct
  misc_feature 1..20: note = chemically synthesized
  source 1..20: mol_type = other DNA
attgtgaggaaggaaaaaat

SEQ ID NO: 64555 - DNA, 20 bp, synthetic construct
  misc_feature 1..20: note = chemically synthesized
  source 1..20: mol_type = other DNA
aaaagaaccaaaatgtaaga

SEQ ID NO: 64556 - DNA, 20 bp, synthetic construct
  misc_feature 1..20: note = chemically synthesized
  source 1..20: mol_type = other DNA
tgtaagattagaaagtaaaa

SEQ ID NO: 64557 - DNA, 20 bp, synthetic construct
  misc_feature 1..20: note = chemically synthesized
  source 1..20: mol_type = other DNA
cacagtgcagctcactcagc

SEQ ID NO: 64558 - DNA, 20 bp, synthetic construct
  misc_feature 1..20: note = chemically synthesized
  source 1..20: mol_type = other DNA
ggacagagagtcagtgccta

SEQ ID NO: 64559 - DNA, 20 bp, synthetic construct
  misc_feature 1..20: note = chemically synthesized
  source 1..20: mol_type = other DNA
tagtgaacactgttatgtca

SEQ ID NO: 64560 - DNA, 20 bp, synthetic construct
  misc_feature 1..20: note = chemically synthesized
  source 1..20: mol_type = other DNA
agcagggtttcattagtttg

SEQ ID NO: 64561 - DNA, 20 bp, synthetic construct
  misc_feature 1..20: note = chemically synthesized
  source 1..20: mol_type = other DNA
tctgtcatgtgtgtcttgac

SEQ ID NO: 64562 - DNA, 20 bp, synthetic construct
  misc_feature 1..20: note = chemically synthesized
  source 1..20: mol_type = other DNA
ttgtttctgtcactttatac

SEQ ID NO: 64563 - DNA, 20 bp, synthetic construct
  misc_feature 1..20: note = chemically synthesized
  source 1..20: mol_type = other DNA
attgaaataaatatccatta

SEQ ID NO: 64564 - DNA, 20 bp, synthetic construct
  misc_feature 1..20: note = chemically synthesized
  source 1..20: mol_type = other DNA
tttaaaattatggtatgact

SEQ ID NO: 64565 - DNA, 20 bp, synthetic construct
  misc_feature 1..20: note = chemically synthesized
  source 1..20: mol_type = other DNA
aaattatggtatgactaaag

SEQ ID NO: 64566 - DNA, 20 bp, synthetic construct
  misc_feature 1..20: note = chemically synthesized
  source 1..20: mol_type = other DNA
aggattgaaggaaagaggag

SEQ ID NO: 64567 - DNA, 20 bp, synthetic construct
  misc_feature 1..20: note = chemically synthesized
  source 1..20: mol_type = other DNA
aggaaagaggaggaagaaat

SEQ ID NO: 64568 - DNA, 20 bp, synthetic construct
  misc_feature 1..20: note = chemically synthesized
  source 1..20: mol_type = other DNA
aataaataatggagaggaga

SEQ ID NO: 64569 - DNA, 20 bp, synthetic construct
  misc_feature 1..20: note = chemically synthesized
  source 1..20: mol_type = other DNA
gagaggagaagggataggga

SEQ ID NO: 64570 - DNA, 20 bp, synthetic construct
  misc_feature 1..20: note = chemically synthesized
  source 1..20: mol_type = other DNA
agaagggatagggaagagaa

SEQ ID NO: 64571 - DNA, 20 bp, synthetic construct
  misc_feature 1..20: note = chemically synthesized
  source 1..20: mol_type = other DNA
agaggaaagaagagaagagg

SEQ ID NO: 64572 - DNA, 20 bp, synthetic construct
  misc_feature 1..20: note = chemically synthesized
  source 1..20: mol_type = other DNA
aaagaagagaagaggagaga

SEQ ID NO: 64573 - DNA, 20 bp, synthetic construct
  misc_feature 1..20: note = chemically synthesized
  source 1..20: mol_type = other DNA
tttggtggtgatatggatca

SEQ ID NO: 64574 - DNA, 20 bp, synthetic construct
  misc_feature 1..20: note = chemically synthesized
  source 1..20: mol_type = other DNA
gcaattacatttttagatat

SEQ ID NO: 64575 - DNA, 20 bp, synthetic construct
  misc_feature 1..20: note = chemically synthesized
  source 1..20: mol_type = other DNA
gtgtgtatccaaagacatgt

SEQ ID NO: 64576 - DNA, 20 bp, synthetic construct
  misc_feature 1..20: note = chemically synthesized
  source 1..20: mol_type = other DNA
cacttaaatgcttaccaaca

SEQ ID NO: 64577 - DNA, 20 bp, synthetic construct
  misc_feature 1..20: note = chemically synthesized
  source 1..20: mol_type = other DNA
tgataaattacggtatagtc

SEQ ID NO: 64578 - DNA, 20 bp, synthetic construct
  misc_feature 1..20: note = chemically synthesized
  source 1..20: mol_type = other DNA
aattacggtatagtcaaaga

SEQ ID NO: 64579 - DNA, 20 bp, synthetic construct
  misc_feature 1..20: note = chemically synthesized
  source 1..20: mol_type = other DNA
gtcaaagaatagaatattac

SEQ ID NO: 64580 - DNA, 20 bp, synthetic construct
  misc_feature 1..20: note = chemically synthesized
  source 1..20: mol_type = other DNA
agaatattacacagaaatga

SEQ ID NO: 64581 - DNA, 20 bp, synthetic construct
  misc_feature 1..20: note = chemically synthesized
  source 1..20: mol_type = other DNA
ctatatgactttatttgtat

SEQ ID NO: 64582 - DNA, 20 bp, synthetic construct
  misc_feature 1..20: note = chemically synthesized
  source 1..20: mol_type = other DNA
acgaaagatattgaataatt

SEQ ID NO: 64583 - DNA, 20 bp, synthetic construct
  misc_feature 1..20: note = chemically synthesized
  source 1..20: mol_type = other DNA
aaagattattctcacttagt

SEQ ID NO: 64584 - DNA, 20 bp, synthetic construct
  misc_feature 1..20: note = chemically synthesized
  source 1..20: mol_type = other DNA
aagaaatgtattttagaagt

SEQ ID NO: 64585 - DNA, 20 bp, synthetic construct
  misc_feature 1..20: note = chemically synthesized
  source 1..20: mol_type = other DNA
tgggcttctgttgcagtagg

SEQ ID NO: 64586 - DNA, 20 bp, synthetic construct
  misc_feature 1..20: note = chemically synthesized
  source 1..20: mol_type = other DNA
ggtgatgtcagtcgtgaaca

SEQ ID NO: 64587 - DNA, 20 bp, synthetic construct
  misc_feature 1..20: note = chemically synthesized
  source 1..20: mol_type = other DNA
agtttagtggtacgataaaa

SEQ ID NO: 64588 - DNA, 20 bp, synthetic construct
  misc_feature 1..20: note = chemically synthesized
  source 1..20: mol_type = other DNA
tagatatgtggatctggagc

SEQ ID NO: 64589 - DNA, 20 bp, synthetic construct
  misc_feature 1..20: note = chemically synthesized
  source 1..20: mol_type = other DNA
tatgtggatctggagctcag

SEQ ID NO: 64590 - DNA, 20 bp, synthetic construct
  misc_feature 1..20: note = chemically synthesized
  source 1..20: mol_type = other DNA
cagaaagaatacaaccaggt

SEQ ID NO: 64591 - DNA, 20 bp, synthetic construct
  misc_feature 1..20: note = chemically synthesized
  source 1..20: mol_type = other DNA
aatacaaccaggtcaagaat

SEQ ID NO: 64592 - DNA, 20 bp, synthetic construct
  misc_feature 1..20: note = chemically synthesized
  source 1..20: mol_type = other DNA
atcaatatctccttaaaatc

SEQ ID NO: 64593 - DNA, 20 bp, synthetic construct
  misc_feature 1..20: note = chemically synthesized
  source 1..20: mol_type = other DNA
ttatgtttccaattcatata

SEQ ID NO: 64594 - DNA, 20 bp, synthetic construct
  misc_feature 1..20: note = chemically synthesized
  source 1..20: mol_type = other DNA
gcattgagaggatttgtata

SEQ ID NO: 64595 - DNA, 20 bp, synthetic construct
  misc_feature 1..20: note = chemically synthesized
  source 1..20: mol_type = other DNA
aggataaggtctaaaagtgg

SEQ ID NO: 64596 - DNA, 20 bp, synthetic construct
  misc_feature 1..20: note = chemically synthesized
  source 1..20: mol_type = other DNA
atagatagggacaaattgaa

SEQ ID NO: 64597 - DNA, 20 bp, synthetic construct
  misc_feature 1..20: note = chemically synthesized
  source 1..20: mol_type = other DNA
ctaaaatggaaaacactgga

SEQ ID NO: 64598 - DNA, 20 bp, synthetic construct
  misc_feature 1..20: note = chemically synthesized
  source 1..20: mol_type = other DNA
ctgaggttggaggtcagagg

SEQ ID NO: 64599 - DNA, 20 bp, synthetic construct
  misc_feature 1..20: note = chemically synthesized
  source 1..20: mol_type = other DNA
tagtgtaatgccaatgtggg

SEQ ID NO: 64600 - DNA, 20 bp, synthetic construct
  misc_feature 1..20: note = chemically synthesized
  source 1..20: mol_type = other DNA
atactaaggactctagggtc

SEQ ID NO: 64601 - DNA, 20 bp, synthetic construct
  misc_feature 1..20: note = chemically synthesized
  source 1..20: mol_type = other DNA
aaaccccctatctactaaaa

SEQ ID NO: 64602 - DNA, 20 bp, synthetic construct
  misc_feature 1..20: note = chemically synthesized
  source 1..20: mol_type = other DNA
ctacttgggaggctgaggca

SEQ ID NO: 64603 - DNA, 20 bp, synthetic construct
  misc_feature 1..20: note = chemically synthesized
  source 1..20: mol_type = other DNA
aaccatagcaatgctctatc

SEQ ID NO: 64604 - DNA, 20 bp, synthetic construct
  misc_feature 1..20: note = chemically synthesized
  source 1..20: mol_type = other DNA
gatagtgtaatactcataat

SEQ ID NO: 64605 - DNA, 20 bp, synthetic construct
  misc_feature 1..20: note = chemically synthesized
  source 1..20: mol_type = other DNA
aggaaaaacactaaatatta

SEQ ID NO: 64606 - DNA, 20 bp, synthetic construct
  misc_feature 1..20: note = chemically synthesized
  source 1..20: mol_type = other DNA
caaagctaacagagtcaaat

SEQ ID NO: 64607 - DNA, 20 bp, synthetic construct
  misc_feature 1..20: note = chemically synthesized
  source 1..20: mol_type = other DNA
gaatgtttgttcatggagca

SEQ ID NO: 64608 - DNA, 20 bp, synthetic construct
  misc_feature 1..20: note = chemically synthesized
  source 1..20: mol_type = other DNA
cacatctgtatgtgtatatc

SEQ ID NO: 64609 - DNA, 20 bp, synthetic construct
  misc_feature 1..20: note = chemically synthesized
  source 1..20: mol_type = other DNA
tgaatgtgaaaactcctcat

SEQ ID NO: 64610 - DNA, 20 bp, synthetic construct
  misc_feature 1..20: note = chemically synthesized
  source 1..20: mol_type = other DNA
tttggacacagtaattattc

SEQ ID NO: 64611 - DNA, 20 bp, synthetic construct
  misc_feature 1..20: note = chemically synthesized
  source 1..20: mol_type = other DNA
gacacatagaggaaatactt

SEQ ID NO: 64612 - DNA, 20 bp, synthetic construct
  misc_feature 1..20: note = chemically synthesized
  source 1..20: mol_type = other DNA
ttgggattaatgaaactgga

SEQ ID NO: 64613 - DNA, 20 bp, synthetic construct
  misc_feature 1..20: note = chemically synthesized
  source 1..20: mol_type = other DNA
aggagtttgaagtgattgcc

SEQ ID NO: 64614 - DNA, 20 bp, synthetic construct
  misc_feature 1..20: note = chemically synthesized
  source 1..20: mol_type = other DNA
tattatgtcactctcatatg

SEQ ID NO: 64615 - DNA, 20 bp, synthetic construct
  misc_feature 1..20: note = chemically synthesized
  source 1..20: mol_type = other DNA
acacatgtgtgtgtatatat

SEQ ID NO: 64616 - DNA, 20 bp, synthetic construct
  misc_feature 1..20: note = chemically synthesized
  source 1..20: mol_type = other DNA
gtgtgtgtatatatatagaa

SEQ ID NO: 64617 - DNA, 20 bp, synthetic construct
  misc_feature 1..20: note = chemically synthesized
  source 1..20: mol_type = other DNA
aataaaacttgtacatattt

SEQ ID NO: 64618 - DNA, 20 bp, synthetic construct
  misc_feature 1..20: note = chemically synthesized
  source 1..20: mol_type = other DNA
taataccattgaagacgtta

SEQ ID NO: 64619 - DNA, 20 bp, synthetic construct
  misc_feature 1..20: note = chemically synthesized
  source 1..20: mol_type = other DNA
tctcttttcttgcaggattg

SEQ ID NO: 64620 - DNA, 20 bp, synthetic construct
  misc_feature 1..20: note = chemically synthesized
  source 1..20: mol_type = other DNA
ctccaacattctcatttcca

SEQ ID NO: 64621 - DNA, 20 bp, synthetic construct
  misc_feature 1..20: note = chemically synthesized
  source 1..20: mol_type = other DNA
aatcagggtaaaatataaag

SEQ ID NO: 64622 - DNA, 20 bp, synthetic construct
  misc_feature 1..20: note = chemically synthesized
  source 1..20: mol_type = other DNA
ggggagggagtgaagataaa

SEQ ID NO: 64623 - DNA, 20 bp, synthetic construct
  misc_feature 1..20: note = chemically synthesized
  source 1..20: mol_type = other DNA
ttttcccaaacactcataac

SEQ ID NO: 64624 - DNA, 20 bp, synthetic construct
  misc_feature 1..20: note = chemically synthesized
  source 1..20: mol_type = other DNA
tttctaacctccaggactat

SEQ ID NO: 64625 - DNA, 20 bp, synthetic construct
  misc_feature 1..20: note = chemically synthesized
  source 1..20: mol_type = other DNA
aaaagtgactattaattttt

SEQ ID NO: 64626 - DNA, 20 bp, synthetic construct
  misc_feature 1..20: note = chemically synthesized
  source 1..20: mol_type = other DNA
aacactcagtttgattttgg

SEQ ID NO: 64627 - DNA, 20 bp, synthetic construct
  misc_feature 1..20: note = chemically synthesized
  source 1..20: mol_type = other DNA
catagctgactcataacaca

SEQ ID NO: 64628 - DNA, 20 bp, synthetic construct
  misc_feature 1..20: note = chemically synthesized
  source 1..20: mol_type = other DNA
tgcaaatatctaagggtaaa

SEQ ID NO: 64629 - DNA, 20 bp, synthetic construct
  misc_feature 1..20: note = chemically synthesized
  source 1..20: mol_type = other DNA
acaacgggctaatccctctt

SEQ ID NO: 64630 - DNA, 20 bp, synthetic construct
  misc_feature 1..20: note = chemically synthesized
  source 1..20: mol_type = other DNA
ggcttccagtacctacctgc

SEQ ID NO: 64631 - DNA, 20 bp, synthetic construct
  misc_feature 1..20: note = chemically synthesized
  source 1..20: mol_type = other DNA
gatggacattcgagtttctg

SEQ ID NO: 64632 - DNA, 20 bp, synthetic construct
  misc_feature 1..20: note = chemically synthesized
  source 1..20: mol_type = other DNA
taagttacaactgaaaagga

SEQ ID NO: 64633 - DNA, 20 bp, synthetic construct
  misc_feature 1..20: note = chemically synthesized
  source 1..20: mol_type = other DNA
ccggccaatttcatcacttt

SEQ ID NO: 64634 - DNA, 20 bp, synthetic construct
  misc_feature 1..20: note = chemically synthesized
  source 1..20: mol_type = other DNA
caatttcatcactttttaga

SEQ ID NO: 64635 - DNA, 20 bp, synthetic construct
  misc_feature 1..20: note = chemically synthesized
  source 1..20: mol_type = other DNA
ctctatccagcatcaacttg

SEQ ID NO: 64636 - DNA, 20 bp, synthetic construct
  misc_feature 1..20: note = chemically synthesized
  source 1..20: mol_type = other DNA
cagcatcaacttggaagaaa

SEQ ID NO: 64637 - DNA, 20 bp, synthetic construct
  misc_feature 1..20: note = chemically synthesized
  source 1..20: mol_type = other DNA
caacttggaagaaagcagaa

SEQ ID NO: 64638 - DNA, 20 bp, synthetic construct
  misc_feature 1..20: note = chemically synthesized
  source 1..20: mol_type = other DNA
acccctgagataaatcctta

SEQ ID NO: 64639 - DNA, 20 bp, synthetic construct
  misc_feature 1..20: note = chemically synthesized
  source 1..20: mol_type = other DNA
agagcagagatcgatgatat

SEQ ID NO: 64640 - DNA, 20 bp, synthetic construct
  misc_feature 1..20: note = chemically synthesized
  source 1..20: mol_type = other DNA
ggccctaaaactcattccca

SEQ ID NO: 64641 - DNA, 20 bp, synthetic construct
  misc_feature 1..20: note = chemically synthesized
  source 1..20: mol_type = other DNA
ccatccatttttcttaattc

SEQ ID NO: 64642 - DNA, 20 bp, synthetic construct
  misc_feature 1..20: note = chemically synthesized
  source 1..20: mol_type = other DNA
ggagaccagcatacatacta

SEQ ID NO: 64643 - DNA, 20 bp, synthetic construct
  misc_feature 1..20: note = chemically synthesized
  source 1..20: mol_type = other DNA
cagatggtattatatgactt

SEQ ID NO: 64644 - DNA, 20 bp, synthetic construct
  misc_feature 1..20: note = chemically synthesized
  source 1..20: mol_type = other DNA
acctacaaccatctggtctt

SEQ ID NO: 64645 - DNA, 20 bp, synthetic construct
  misc_feature 1..20: note = chemically synthesized
  source 1..20: mol_type = other DNA
aaccccaaactataaaaagc

SEQ ID NO: 64646 - DNA, 20 bp, synthetic construct
  misc_feature 1..20: note = chemically synthesized
  source 1..20: mol_type = other DNA
taaagagctcctgctcagca

SEQ ID NO: 64647 - DNA, 20 bp, synthetic construct
  misc_feature 1..20: note = chemically synthesized
  source 1..20: mol_type = other DNA
atcagagcgaaagacaatct

SEQ ID NO: 64648 - DNA, 20 bp, synthetic construct
  misc_feature 1..20: note = chemically synthesized
  source 1..20: mol_type = other DNA
ggcctaatatccagagtaaa

SEQ ID NO: 64649 - DNA, 20 bp, synthetic construct
  misc_feature 1..20: note = chemically synthesized
  source 1..20: mol_type = other DNA
aagaaacttaaacaacttta

SEQ ID NO: 64650 - DNA, 20 bp, synthetic construct
  misc_feature 1..20: note = chemically synthesized
  source 1..20: mol_type = other DNA
ggtaacagtaaattaaatta

SEQ ID NO: 64651 - DNA, 20 bp, synthetic construct
  misc_feature 1..20: note = chemically synthesized
  source 1..20: mol_type = other DNA
agaaaaatgccatggcaatg

SEQ ID NO: 64652 - DNA, 20 bp, synthetic construct
  misc_feature 1..20: note = chemically synthesized
  source 1..20: mol_type = other DNA
aaacttgtttaacatatcat

SEQ ID NO: 64653 - DNA, 20 bp, synthetic construct
  misc_feature 1..20: note = chemically synthesized
  source 1..20: mol_type = other DNA
cgtttatttctttactctct

SEQ ID NO: 64654 - DNA, 20 bp, synthetic construct
  misc_feature 1..20: note = chemically synthesized
  source 1..20: mol_type = other DNA
taaaaaaaacaaaaaacaaa

SEQ ID NO: 64655 - DNA, 20 bp, synthetic construct
  misc_feature 1..20: note = chemically synthesized
  source 1..20: mol_type = other DNA
aaaaacaaaaaacaaaaaag

SEQ ID NO: 64656 - DNA, 20 bp, synthetic construct
  misc_feature 1..20: note = chemically synthesized
  source 1..20: mol_type = other DNA
gtgccaaattctgaggctga

SEQ ID NO: 64657 - DNA, 20 bp, synthetic construct
  misc_feature 1..20: note = chemically synthesized
  source 1..20: mol_type = other DNA
attctgaggctgaggagaaa

SEQ ID NO: 64658 - DNA, 20 bp, synthetic construct
  misc_feature 1..20: note = chemically synthesized
  source 1..20: mol_type = other DNA
tgaggctgaggagaaaaaag

SEQ ID NO: 64659 - DNA, 20 bp, synthetic construct
  misc_feature 1..20: note = chemically synthesized
  source 1..20: mol_type = other DNA
gctgaggagaaaaaagaaag

SEQ ID NO: 64660 - DNA, 20 bp, synthetic construct
  misc_feature 1..20: note = chemically synthesized
  source 1..20: mol_type = other DNA
gaaaaaagaaagaaagaaaa

SEQ ID NO: 64661 - DNA, 20 bp, synthetic construct
  misc_feature 1..20: note = chemically synthesized
  source 1..20: mol_type = other DNA
agcatgttgaagtaaaaata

SEQ ID NO: 64662 - DNA, 20 bp, synthetic construct
  misc_feature 1..20: note = chemically synthesized
  source 1..20: mol_type = other DNA
tgtgtcctcaccgggaggaa

SEQ ID NO: 64663 - DNA, 20 bp, synthetic construct
  misc_feature 1..20: note = chemically synthesized
  source 1..20: mol_type = other DNA
ctgtgaaaagctaagtgcca

SEQ ID NO: 64664 - DNA, 20 bp, synthetic construct
  misc_feature 1..20: note = chemically synthesized
  source 1..20: mol_type = other DNA
atagtattcctcctaataaa

SEQ ID NO: 64665 - DNA, 20 bp, synthetic construct
  misc_feature 1..20: note = chemically synthesized
  source 1..20: mol_type = other DNA
ccacaaacacaaacaggcat

SEQ ID NO: 64666 - DNA, 20 bp, synthetic construct
  misc_feature 1..20: note = chemically synthesized
  source 1..20: mol_type = other DNA
aagatgtaaaaaaaagagct

SEQ ID NO: 64667 - DNA, 20 bp, synthetic construct
  misc_feature 1..20: note = chemically synthesized
  source 1..20: mol_type = other DNA
aaatcatgtgtgatctctca

SEQ ID NO: 64668 - DNA, 20 bp, synthetic construct
  misc_feature 1..20: note = chemically synthesized
  source 1..20: mol_type = other DNA
atttattatttgtattgctt

SEQ ID NO: 64669 - DNA, 20 bp, synthetic construct
  misc_feature 1..20: note = chemically synthesized
  source 1..20: mol_type = other DNA
actacacaccaagcttccac

SEQ ID NO: 64670 - DNA, 20 bp, synthetic construct
  misc_feature 1..20: note = chemically synthesized
  source 1..20: mol_type = other DNA
gttgtaggctgaagacgtta

SEQ ID NO: 64671 - DNA, 20 bp, synthetic construct
  misc_feature 1..20: note = chemically synthesized
  source 1..20: mol_type = other DNA
tctttctactggaatctaat

SEQ ID NO: 64672 - DNA, 20 bp, synthetic construct
  misc_feature 1..20: note = chemically synthesized
  source 1..20: mol_type = other DNA
taaatcatgactgtttcatc

SEQ ID NO: 64673 - DNA, 20 bp, synthetic construct
  misc_feature 1..20: note = chemically synthesized
  source 1..20: mol_type = other DNA
tatgctcagtaaagatgatg

SEQ ID NO: 64674 - DNA, 20 bp, synthetic construct
  misc_feature 1..20: note = chemically synthesized
  source 1..20: mol_type = other DNA
tctttggcaggtactgtgga

SEQ ID NO: 64675 - DNA, 20 bp, synthetic construct
  misc_feature 1..20: note = chemically synthesized
  source 1..20: mol_type = other DNA
tgatacagatggctaaaagg

SEQ ID NO: 64676 - DNA, 20 bp, synthetic construct
  misc_feature 1..20: note = chemically synthesized
  source 1..20: mol_type = other DNA
ttactaaaaaaaaaaaggac

SEQ ID NO: 64677 - DNA, 20 bp, synthetic construct
  misc_feature 1..20: note = chemically synthesized
  source 1..20: mol_type = other DNA
taaaaaaaaaaaggacaaag

SEQ ID NO: 64678 - DNA, 20 bp, synthetic construct
  misc_feature 1..20: note = chemically synthesized
  source 1..20: mol_type = other DNA
gagccaggcagaagacgttt

SEQ ID NO: 64679 - DNA, 20 bp, synthetic construct
  misc_feature 1..20: note = chemically synthesized
  source 1..20: mol_type = other DNA
actctgaggctgaggaaaaa

SEQ ID NO: 64680 - DNA, 20 bp, synthetic construct
  misc_feature 1..20: note = chemically synthesized
  source 1..20: mol_type = other DNA
tgaggctgaggaaaaaaaag

SEQ ID NO: 64681 - DNA, 20 bp, synthetic construct
  misc_feature 1..20: note = chemically synthesized
  source 1..20: mol_type = other DNA
gctgaggaaaaaaaagaaag

SEQ ID NO: 64682 - DNA, 20 bp, synthetic construct
  misc_feature 1..20: note = chemically synthesized
  source 1..20: mol_type = other DNA
aaaaagaaagaaagaaatat

SEQ ID NO: 64683 - DNA, 20 bp, synthetic construct
  misc_feature 1..20: note = chemically synthesized
  source 1..20: mol_type = other DNA
ttacaagcctaaagtacgtt

SEQ ID NO: 64684 - DNA, 20 bp, synthetic construct
  misc_feature 1..20: note = chemically synthesized
  source 1..20: mol_type = other DNA
taaagtacgttgaagaaaaa

SEQ ID NO: 64685 - DNA, 20 bp, synthetic construct
  misc_feature 1..20: note = chemically synthesized
  source 1..20: mol_type = other DNA
ctgtgtcctcaccagaagga

SEQ ID NO: 64686 - DNA, 20 bp, synthetic construct
  misc_feature 1..20: note = chemically synthesized
  source 1..20: mol_type = other DNA
cttcattgtagttaccgtgg

SEQ ID NO: 64687 - DNA, 20 bp, synthetic construct
  misc_feature 1..20: note = chemically synthesized
  source 1..20: mol_type = other DNA
ctgtagagcctcacaagggc

SEQ ID NO: 64688 - DNA, 20 bp, synthetic construct
  misc_feature 1..20: note = chemically synthesized
  source 1..20: mol_type = other DNA
atagtattgcccctaataaa

SEQ ID NO: 64689 - DNA, 20 bp, synthetic construct
  misc_feature 1..20: note = chemically synthesized
  source 1..20: mol_type = other DNA
caaccatgtgtgatctctta

SEQ ID NO: 64690 - DNA, 20 bp, synthetic construct
  misc_feature 1..20: note = chemically synthesized
  source 1..20: mol_type = other DNA
gatttattatttgattgctt

SEQ ID NO: 64691 - DNA, 20 bp, synthetic construct
  misc_feature 1..20: note = chemically synthesized
  source 1..20: mol_type = other DNA
actacacaccaagcttccac

SEQ ID NO: 64692 - DNA, 20 bp, synthetic construct
  misc_feature 1..20: note = chemically synthesized
  source 1..20: mol_type = other DNA
gctgtaggctgaaaacgtta

SEQ ID NO: 64693 - DNA, 20 bp, synthetic construct
  misc_feature 1..20: note = chemically synthesized
  source 1..20: mol_type = other DNA
tctttctaccgaaatctaat

SEQ ID NO: 64694 - DNA, 20 bp, synthetic construct
  misc_feature 1..20: note = chemically synthesized
  source 1..20: mol_type = other DNA
tatgctcggtaaagatgatg

SEQ ID NO: 64695 - DNA, 20 bp, synthetic construct
  misc_feature 1..20: note = chemically synthesized
  source 1..20: mol_type = other DNA
tctttaccagatactatgga

SEQ ID NO: 64696 - DNA, 20 bp, synthetic construct
  misc_feature 1..20: note = chemically synthesized
  source 1..20: mol_type = other DNA
gaccttggtagattatgacg

SEQ ID NO: 64697 - DNA, 20 bp, synthetic construct
  misc_feature 1..20: note = chemically synthesized
  source 1..20: mol_type = other DNA
agtgttaggcggctaaaaga

SEQ ID NO: 64698 - DNA, 20 bp, synthetic construct
  misc_feature 1..20: note = chemically synthesized
  source 1..20: mol_type = other DNA
aagttaaaataaaagttgaa

SEQ ID NO: 64699 - DNA, 20 bp, synthetic construct
  misc_feature 1..20: note = chemically synthesized
  source 1..20: mol_type = other DNA
taaaagttgaataagaaagg

SEQ ID NO: 64700 - DNA, 20 bp, synthetic construct
  misc_feature 1..20: note = chemically synthesized
  source 1..20: mol_type = other DNA
tctctcaatctaaggatggg

SEQ ID NO: 64701 - DNA, 20 bp, synthetic construct
  misc_feature 1..20: note = chemically synthesized
  source 1..20: mol_type = other DNA
catttgtagagcctgacctt

SEQ ID NO: 64702 - DNA, 20 bp, synthetic construct
  misc_feature 1..20: note = chemically synthesized
  source 1..20: mol_type = other DNA
gcatttaagttaaataagtc

SEQ ID NO: 64703 - DNA, 20 bp, synthetic construct
  misc_feature 1..20: note = chemically synthesized
  source 1..20: mol_type = other DNA
taatttcagatattattaac

SEQ ID NO: 64704 - DNA, 20 bp, synthetic construct
  misc_feature 1..20: note = chemically synthesized
  source 1..20: mol_type = other DNA
ttaactaagaatgaaattaa

SEQ ID NO: 64705 - DNA, 20 bp, synthetic construct
  misc_feature 1..20: note = chemically synthesized
  source 1..20: mol_type = other DNA
aaattcaaagctctgaagca

SEQ ID NO: 64706 - DNA, 20 bp, synthetic construct
  misc_feature 1..20: note = chemically synthesized
  source 1..20: mol_type = other DNA
gtgccgttgatatgtaaagt

SEQ ID NO: 64707 - DNA, 20 bp, synthetic construct
  misc_feature 1..20: note = chemically synthesized
  source 1..20: mol_type = other DNA
gtagggagtgagaagccatt

SEQ ID NO: 64708 - DNA, 20 bp, synthetic construct
  misc_feature 1..20: note = chemically synthesized
  source 1..20: mol_type = other DNA
tattggctggattactattc

SEQ ID NO: 64709 - DNA, 20 bp, synthetic construct
  misc_feature 1..20: note = chemically synthesized
  source 1..20: mol_type = other DNA
ggcagtatagttttggggga

SEQ ID NO: 64710 - DNA, 20 bp, synthetic construct
  misc_feature 1..20: note = chemically synthesized
  source 1..20: mol_type = other DNA
gggagaagaaaaagagagag

SEQ ID NO: 64711 - DNA, 20 bp, synthetic construct
  misc_feature 1..20: note = chemically synthesized
  source 1..20: mol_type = other DNA
ttttttttgcagaaccacct

SEQ ID NO: 64712 - DNA, 20 bp, synthetic construct
  misc_feature 1..20: note = chemically synthesized
  source 1..20: mol_type = other DNA
aaccacctgcagaaataaat

SEQ ID NO: 64713 - DNA, 20 bp, synthetic construct
  misc_feature 1..20: note = chemically synthesized
  source 1..20: mol_type = other DNA
ctgggaaaagatgacaggaa

SEQ ID NO: 64714 - DNA, 20 bp, synthetic construct
  misc_feature 1..20: note = chemically synthesized
  source 1..20: mol_type = other DNA
cccatcctcccacagtagcc

SEQ ID NO: 64715 - DNA, 20 bp, synthetic construct
  misc_feature 1..20: note = chemically synthesized
  source 1..20: mol_type = other DNA
actgcctctgctgatgcttt

SEQ ID NO: 64716 - DNA, 20 bp, synthetic construct
  misc_feature 1..20: note = chemically synthesized
  source 1..20: mol_type = other DNA
cctacccaagtgagaaggaa

SEQ ID NO: 64717 - DNA, 20 bp, synthetic construct
  misc_feature 1..20: note = chemically synthesized
  source 1..20: mol_type = other DNA
cagcaatgcatccaaaccaa

SEQ ID NO: 64718 - DNA, 20 bp, synthetic construct
  misc_feature 1..20: note = chemically synthesized
  source 1..20: mol_type = other DNA
aaaaaaccaaaaatatgata

SEQ ID NO: 64719 - DNA, 20 bp, synthetic construct
  misc_feature 1..20: note = chemically synthesized
  source 1..20: mol_type = other DNA
atatgatacaagaaatgagg

SEQ ID NO: 64720 - DNA, 20 bp, synthetic construct
  misc_feature 1..20: note = chemically synthesized
  source 1..20: mol_type = other DNA
atggatgaatggatgcactt

SEQ ID NO: 64721 - DNA, 20 bp, synthetic construct
  misc_feature 1..20: note = chemically synthesized
  source 1..20: mol_type = other DNA
ttatagaaatgcaaaatgct

SEQ ID NO: 64722 - DNA, 20 bp, synthetic construct
  misc_feature 1..20: note = chemically synthesized
  source 1..20: mol_type = other DNA
tgctctagaaagtctcagca

SEQ ID NO: 64723 - DNA, 20 bp, synthetic construct
  misc_feature 1..20: note = chemically synthesized
  source 1..20: mol_type = other DNA
tcagcaatagaatccaagca

SEQ ID NO: 64724 - DNA, 20 bp, synthetic construct
  misc_feature 1..20: note = chemically synthesized
  source 1..20: mol_type = other DNA
taacccaatccaacaaagac

SEQ ID NO: 64725 - DNA, 20 bp, synthetic construct
  misc_feature 1..20: note = chemically synthesized
  source 1..20: mol_type = other DNA
atccaacaaagacaaagaaa

SEQ ID NO: 64726 - DNA, 20 bp, synthetic construct
  misc_feature 1..20: note = chemically synthesized
  source 1..20: mol_type = other DNA
caaagacaaagaaaaaagaa

SEQ ID NO: 64727 - DNA, 20 bp, synthetic construct
  misc_feature 1..20: note = chemically synthesized
  source 1..20: mol_type = other DNA
gaaaatatgaacaaagcctc

SEQ ID NO: 64728 - DNA, 20 bp, synthetic construct
  misc_feature 1..20: note = chemically synthesized
  source 1..20: mol_type = other DNA
ttatgttaaacaatcaaacc

SEQ ID NO: 64729 - DNA, 20 bp, synthetic construct
  misc_feature 1..20: note = chemically synthesized
  source 1..20: mol_type = other DNA
ctaagaataatcagcattcc

SEQ ID NO: 64730 - DNA, 20 bp, synthetic construct
  misc_feature 1..20: note = chemically synthesized
  source 1..20: mol_type = other DNA
atcagcattcctgagaaaga

SEQ ID NO: 64731 - DNA, 20 bp, synthetic construct
  misc_feature 1..20: note = chemically synthesized
  source 1..20: mol_type = other DNA
ccaaagttatctaaagacaa

SEQ ID NO: 64732 - DNA, 20 bp, synthetic construct
  misc_feature 1..20: note = chemically synthesized
  source 1..20: mol_type = other DNA
aaactaccaggtaacctatg

SEQ ID NO: 64733 - DNA, 20 bp, synthetic construct
  misc_feature 1..20: note = chemically synthesized
  source 1..20: mol_type = other DNA
gattaacagcagatttctca

SEQ ID NO: 64734 - DNA, 20 bp, synthetic construct
  misc_feature 1..20: note = chemically synthesized
  source 1..20: mol_type = other DNA
taaacaaaacaattatcagc

SEQ ID NO: 64735 - DNA, 20 bp, synthetic construct
  misc_feature 1..20: note = chemically synthesized
  source 1..20: mol_type = other DNA
tgaaactaagcttcacaaat

SEQ ID NO: 64736 - DNA, 20 bp, synthetic construct
  misc_feature 1..20: note = chemically synthesized
  source 1..20: mol_type = other DNA
aagaaaatacacagtgtttt

SEQ ID NO: 64737 - DNA, 20 bp, synthetic construct
  misc_feature 1..20: note = chemically synthesized
  source 1..20: mol_type = other DNA
tttcagaaaaacaaatgctg

SEQ ID NO: 64738 - DNA, 20 bp, synthetic construct
  misc_feature 1..20: note = chemically synthesized
  source 1..20: mol_type = other DNA
acacaggcaacaaataccac

SEQ ID NO: 64739 - DNA, 20 bp, synthetic construct
  misc_feature 1..20: note = chemically synthesized
  source 1..20: mol_type = other DNA
aaatgctccacttaaaagat

SEQ ID NO: 64740 - DNA, 20 bp, synthetic construct
  misc_feature 1..20: note = chemically synthesized
  source 1..20: mol_type = other DNA
cacttaaaagatacagaatt

SEQ ID NO: 64741 - DNA, 20 bp, synthetic construct
  misc_feature 1..20: note = chemically synthesized
  source 1..20: mol_type = other DNA
atacagaattgcagaatgaa

SEQ ID NO: 64742 - DNA, 20 bp, synthetic construct
  misc_feature 1..20: note = chemically synthesized
  source 1..20: mol_type = other DNA
tgtcagacaaaacaaacttt

SEQ ID NO: 64743 - DNA, 20 bp, synthetic construct
  misc_feature 1..20: note = chemically synthesized
  source 1..20: mol_type = other DNA
ataaaagcccttgtccaatg

SEQ ID NO: 64744 - DNA, 20 bp, synthetic construct
  misc_feature 1..20: note = chemically synthesized
  source 1..20: mol_type = other DNA
aggtcatcaagacagtctac

SEQ ID NO: 64745 - DNA, 20 bp, synthetic construct
  misc_feature 1..20: note = chemically synthesized
  source 1..20: mol_type = other DNA
ggacattctacccaacaact

SEQ ID NO: 64746 - DNA, 20 bp, synthetic construct
  misc_feature 1..20: note = chemically synthesized
  source 1..20: mol_type = other DNA
aagcactctctcagaccaca

SEQ ID NO: 64747 - DNA, 20 bp, synthetic construct
  misc_feature 1..20: note = chemically synthesized
  source 1..20: mol_type = other DNA
ctcgccaggacaatcaggca

SEQ ID NO: 64748 - DNA, 20 bp, synthetic construct
  misc_feature 1..20: note = chemically synthesized
  source 1..20: mol_type = other DNA
ccaggacaatcaggcaagag

SEQ ID NO: 64749 - DNA, 20 bp, synthetic construct
  misc_feature 1..20: note = chemically synthesized
  source 1..20: mol_type = other DNA
tcaagatacaaaatcagtgt

SEQ ID NO: 64750 - DNA, 20 bp, synthetic construct
  misc_feature 1..20: note = chemically synthesized
  source 1..20: mol_type = other DNA
cccattcacaattgctgcaa

SEQ ID NO: 64751 - DNA, 20 bp, synthetic construct
  misc_feature 1..20: note = chemically synthesized
  source 1..20: mol_type = other DNA
aagagaataaaataaaatac

SEQ ID NO: 64752 - DNA, 20 bp, synthetic construct
  misc_feature 1..20: note = chemically synthesized
  source 1..20: mol_type = other DNA
aaaacattccatgctcatag

SEQ ID NO: 64753 - DNA, 20 bp, synthetic construct
  misc_feature 1..20: note = chemically synthesized
  source 1..20: mol_type = other DNA
cattccatgctcatagatag

SEQ ID NO: 64754 - DNA, 20 bp, synthetic construct
  misc_feature 1..20: note = chemically synthesized
  source 1..20: mol_type = other DNA
agctaccactgacttttttc

SEQ ID NO: 64755 - DNA, 20 bp, synthetic construct
  misc_feature 1..20: note = chemically synthesized
  source 1..20: mol_type = other DNA
cactgacttttttcaaagaa

SEQ ID NO: 64756 - DNA, 20 bp, synthetic construct
  misc_feature 1..20: note = chemically synthesized
  source 1..20: mol_type = other DNA
agtggaacagaacagaagcc

SEQ ID NO: 64757 - DNA, 20 bp, synthetic construct
  misc_feature 1..20: note = chemically synthesized
  source 1..20: mol_type = other DNA
acaaacatcacaaaagcaat

SEQ ID NO: 64758 - DNA, 20 bp, synthetic construct
  misc_feature 1..20: note = chemically synthesized
  source 1..20: mol_type = other DNA
acatcacaaaagcaatggag

SEQ ID NO: 64759 - DNA, 20 bp, synthetic construct
  misc_feature 1..20: note = chemically synthesized
  source 1..20: mol_type = other DNA
tcagagtgaacaggcaacct

SEQ ID NO: 64760 - DNA, 20 bp, synthetic construct
  misc_feature 1..20: note = chemically synthesized
  source 1..20: mol_type = other DNA
aacaggcaacctacagaatg

SEQ ID NO: 64761 - DNA, 20 bp, synthetic construct
  misc_feature 1..20: note = chemically synthesized
  source 1..20: mol_type = other DNA
aaagaacttcaacaaattta

SEQ ID NO: 64762 - DNA, 20 bp, synthetic construct
  misc_feature 1..20: note = chemically synthesized
  source 1..20: mol_type = other DNA
aaagaagtcatttatgtggc

SEQ ID NO: 64763 - DNA, 20 bp, synthetic construct
  misc_feature 1..20: note = chemically synthesized
  source 1..20: mol_type = other DNA
gctcatcatcactggtcatt

SEQ ID NO: 64764 - DNA, 20 bp, synthetic construct
  misc_feature 1..20: note = chemically synthesized
  source 1..20: mol_type = other DNA
gagataccatctcatgccag

SEQ ID NO: 64765 - DNA, 20 bp, synthetic construct
  misc_feature 1..20: note = chemically synthesized
  source 1..20: mol_type = other DNA
aaggtgctggagaggatgtg

SEQ ID NO: 64766 - DNA, 20 bp, synthetic construct
  misc_feature 1..20: note = chemically synthesized
  source 1..20: mol_type = other DNA
gattcctcaaggatctagaa

SEQ ID NO: 64767 - DNA, 20 bp, synthetic construct
  misc_feature 1..20: note = chemically synthesized
  source 1..20: mol_type = other DNA
ccattactgggtatataccc

SEQ ID NO: 64768 - DNA, 20 bp, synthetic construct
  misc_feature 1..20: note = chemically synthesized
  source 1..20: mol_type = other DNA
ctgggtatatacccaaagaa

SEQ ID NO: 64769 - DNA, 20 bp, synthetic construct
  misc_feature 1..20: note = chemically synthesized
  source 1..20: mol_type = other DNA
ccatcagcgatataatggat

SEQ ID NO: 64770 - DNA, 20 bp, synthetic construct
  misc_feature 1..20: note = chemically synthesized
  source 1..20: mol_type = other DNA
gagcaaactaacacaggaac

SEQ ID NO: 64771 - DNA, 20 bp, synthetic construct
  misc_feature 1..20: note = chemically synthesized
  source 1..20: mol_type = other DNA
ttaggagagggataacatta

SEQ ID NO: 64772 - DNA, 20 bp, synthetic construct
  misc_feature 1..20: note = chemically synthesized
  source 1..20: mol_type = other DNA
gacaatataaggtcacacca

SEQ ID NO: 64773 - DNA, 20 bp, synthetic construct
  misc_feature 1..20: note = chemically synthesized
  source 1..20: mol_type = other DNA
aggtcacaccacaagaaact

SEQ ID NO: 64774 - DNA, 20 bp, synthetic construct
  misc_feature 1..20: note = chemically synthesized
  source 1..20: mol_type = other DNA
aacagaaccaaaacccagca

SEQ ID NO: 64775 - DNA, 20 bp, synthetic construct
  misc_feature 1..20: note = chemically synthesized
  source 1..20: mol_type = other DNA
agaccattagcaagattaac

SEQ ID NO: 64776 - DNA, 20 bp, synthetic construct
  misc_feature 1..20: note = chemically synthesized
  source 1..20: mol_type = other DNA
agaagtgcaaataaactcaa

SEQ ID NO: 64777 - DNA, 20 bp, synthetic construct
  misc_feature 1..20: note = chemically synthesized
  source 1..20: mol_type = other DNA
gagatactattactgatacc

SEQ ID NO: 64778 - DNA, 20 bp, synthetic construct
  misc_feature 1..20: note = chemically synthesized
  source 1..20: mol_type = other DNA
aacacctttacatgcataaa

SEQ ID NO: 64779 - DNA, 20 bp, synthetic construct
  misc_feature 1..20: note = chemically synthesized
  source 1..20: mol_type = other DNA
agggctctagcttaagtcag

SEQ ID NO: 64780 - DNA, 20 bp, synthetic construct
  misc_feature 1..20: note = chemically synthesized
  source 1..20: mol_type = other DNA
aattctaccagacattcaaa

SEQ ID NO: 64781 - DNA, 20 bp, synthetic construct
  misc_feature 1..20: note = chemically synthesized
  source 1..20: mol_type = other DNA
ttgacagtattctacaagat

SEQ ID NO: 64782 - DNA, 20 bp, synthetic construct
  misc_feature 1..20: note = chemically synthesized
  source 1..20: mol_type = other DNA
attctacaagatagagaaag

SEQ ID NO: 64783 - DNA, 20 bp, synthetic construct
  misc_feature 1..20: note = chemically synthesized
  source 1..20: mol_type = other DNA
aagtgtgatacacaacataa

SEQ ID NO: 64784 - DNA, 20 bp, synthetic construct
  misc_feature 1..20: note = chemically synthesized
  source 1..20: mol_type = other DNA
atgtgattatctcaatagcc

SEQ ID NO: 64785 - DNA, 20 bp, synthetic construct
  misc_feature 1..20: note = chemically synthesized
  source 1..20: mol_type = other DNA
ctagcaagagcaatcagaca

SEQ ID NO: 64786 - DNA, 20 bp, synthetic construct
  misc_feature 1..20: note = chemically synthesized
  source 1..20: mol_type = other DNA
aagcacatccaaattgttaa

SEQ ID NO: 64787 - DNA, 20 bp, synthetic construct
  misc_feature 1..20: note = chemically synthesized
  source 1..20: mol_type = other DNA
ctgatgatatgattgtgtat

SEQ ID NO: 64788 - DNA, 20 bp, synthetic construct
  misc_feature 1..20: note = chemically synthesized
  source 1..20: mol_type = other DNA
cataccagcaatgaccaagc

SEQ ID NO: 64789 - DNA, 20 bp, synthetic construct
  misc_feature 1..20: note = chemically synthesized
  source 1..20: mol_type = other DNA
catgccattctcatagatgg

SEQ ID NO: 64790 - DNA, 20 bp, synthetic construct
  misc_feature 1..20: note = chemically synthesized
  source 1..20: mol_type = other DNA
caccattagtcttcacagaa

SEQ ID NO: 64791 - DNA, 20 bp, synthetic construct
  misc_feature 1..20: note = chemically synthesized
  source 1..20: mol_type = other DNA
taggcacatcgaccaatgga

SEQ ID NO: 64792 - DNA, 20 bp, synthetic construct
  misc_feature 1..20: note = chemically synthesized
  source 1..20: mol_type = other DNA
aatggaacagaatagagaac

SEQ ID NO: 64793 - DNA, 20 bp, synthetic construct
  misc_feature 1..20: note = chemically synthesized
  source 1..20: mol_type = other DNA
tagctggcaagctacatgta

SEQ ID NO: 64794 - DNA, 20 bp, synthetic construct
  misc_feature 1..20: note = chemically synthesized
  source 1..20: mol_type = other DNA
gccctgaaactgtaacaatt

SEQ ID NO: 64795 - DNA, 20 bp, synthetic construct
  misc_feature 1..20: note = chemically synthesized
  source 1..20: mol_type = other DNA
aaatgcaaatacataaaaac

SEQ ID NO: 64796 - DNA, 20 bp, synthetic construct
  misc_feature 1..20: note = chemically synthesized
  source 1..20: mol_type = other DNA
catggcaaaaggaagagtct

SEQ ID NO: 64797 - DNA, 20 bp, synthetic construct
  misc_feature 1..20: note = chemically synthesized
  source 1..20: mol_type = other DNA
aacagacaacccacagagtg

SEQ ID NO: 64798 - DNA, 20 bp, synthetic construct
  misc_feature 1..20: note = chemically synthesized
  source 1..20: mol_type = other DNA
cacaatctatacatctgaca

SEQ ID NO: 64799 - DNA, 20 bp, synthetic construct
  misc_feature 1..20: note = chemically synthesized
  source 1..20: mol_type = other DNA
aatgaacacaaatagattat

SEQ ID NO: 64800 - DNA, 20 bp, synthetic construct
  misc_feature 1..20: note = chemically synthesized
  source 1..20: mol_type = other DNA
aggacatgaacagacaattc

SEQ ID NO: 64801 - DNA, 20 bp, synthetic construct
  misc_feature 1..20: note = chemically synthesized
  source 1..20: mol_type = other DNA
acagatccttgtgaggatat

SEQ ID NO: 64802 - DNA, 20 bp, synthetic construct
  misc_feature 1..20: note = chemically synthesized
  source 1..20: mol_type = other DNA
cactagtggttatttatcca

SEQ ID NO: 64803 - DNA, 20 bp, synthetic construct
  misc_feature 1..20: note = chemically synthesized
  source 1..20: mol_type = other DNA
cagtactattttgccatgaa

SEQ ID NO: 64804 - DNA, 20 bp, synthetic construct
  misc_feature 1..20: note = chemically synthesized
  source 1..20: mol_type = other DNA
gataataaaataagccagat

SEQ ID NO: 64805 - DNA, 20 bp, synthetic construct
  misc_feature 1..20: note = chemically synthesized
  source 1..20: mol_type = other DNA
gggtctcatggtggtagaga

SEQ ID NO: 64806 - DNA, 20 bp, synthetic construct
  misc_feature 1..20: note = chemically synthesized
  source 1..20: mol_type = other DNA
tattatatatttcaaaatgg

SEQ ID NO: 64807 - DNA, 20 bp, synthetic construct
  misc_feature 1..20: note = chemically synthesized
  source 1..20: mol_type = other DNA
atttgaaattttctcaatac

SEQ ID NO: 64808 - DNA, 20 bp, synthetic construct
  misc_feature 1..20: note = chemically synthesized
  source 1..20: mol_type = other DNA
gaagccctagcttgctggtt

SEQ ID NO: 64809 - DNA, 20 bp, synthetic construct
  misc_feature 1..20: note = chemically synthesized
  source 1..20: mol_type = other DNA
aattgcaatttttgattact

SEQ ID NO: 64810 - DNA, 20 bp, synthetic construct
  misc_feature 1..20: note = chemically synthesized
  source 1..20: mol_type = other DNA
ctccttgccaaagtgagtag

SEQ ID NO: 64811 - DNA, 20 bp, synthetic construct
  misc_feature 1..20: note = chemically synthesized
  source 1..20: mol_type = other DNA
attgtctaatttttgtaaat

SEQ ID NO: 64812 - DNA, 20 bp, synthetic construct
  misc_feature 1..20: note = chemically synthesized
  source 1..20: mol_type = other DNA
gatgggaaatttaacatatt

SEQ ID NO: 64813 - DNA, 20 bp, synthetic construct
  misc_feature 1..20: note = chemically synthesized
  source 1..20: mol_type = other DNA
tctctcccattctccttttc

SEQ ID NO: 64814 - DNA, 20 bp, synthetic construct
  misc_feature 1..20: note = chemically synthesized
  source 1..20: mol_type = other DNA
gacaaaaacagggccaagga

SEQ ID NO: 64815 - DNA, 20 bp, synthetic construct
  misc_feature 1..20: note = chemically synthesized
  source 1..20: mol_type = other DNA
aagaaaataaagctgttaaa

SEQ ID NO: 64816 - DNA, 20 bp, synthetic construct
  misc_feature 1..20: note = chemically synthesized
  source 1..20: mol_type = other DNA
aaaaccgtacatagttcctt

SEQ ID NO: 64817 - DNA, 20 bp, synthetic construct
  misc_feature 1..20: note = chemically synthesized
  source 1..20: mol_type = other DNA
tagttccttctagaaactga

SEQ ID NO: 64818 - DNA, 20 bp, synthetic construct
  misc_feature 1..20: note = chemically synthesized
  source 1..20: mol_type = other DNA
tgattccctagagaggacag

SEQ ID NO: 64819 - DNA, 20 bp, synthetic construct
  misc_feature 1..20: note = chemically synthesized
  source 1..20: mol_type = other DNA
agattacatccagtgcttcc

SEQ ID NO: 64820 - DNA, 20 bp, synthetic construct
  misc_feature 1..20: note = chemically synthesized
  source 1..20: mol_type = other DNA
aatcctaaaattatttaaag

SEQ ID NO: 64821 - DNA, 20 bp, synthetic construct
  misc_feature 1..20: note = chemically synthesized
  source 1..20: mol_type = other DNA
gccagaatttgtcatcaaac

SEQ ID NO: 64822 - DNA, 20 bp, synthetic construct
  misc_feature 1..20: note = chemically synthesized
  source 1..20: mol_type = other DNA
tcaattcgatccatgtgcct

SEQ ID NO: 64823 - DNA, 20 bp, synthetic construct
  misc_feature 1..20: note = chemically synthesized
  source 1..20: mol_type = other DNA
attgtcattatcctcatatt

SEQ ID NO: 64824 - DNA, 20 bp, synthetic construct
  misc_feature 1..20: note = chemically synthesized
  source 1..20: mol_type = other DNA
tagaatcaaggaataaattc

SEQ ID NO: 64825 - DNA, 20 bp, synthetic construct
  misc_feature 1..20: note = chemically synthesized
  source 1..20: mol_type = other DNA
aaaaaaacacttgtggcaag

SEQ ID NO: 64826 - DNA, 20 bp, synthetic construct
  misc_feature 1..20: note = chemically synthesized
  source 1..20: mol_type = other DNA
ctactcaggaggccaaggca

SEQ ID NO: 64827 - DNA, 20 bp, synthetic construct
  misc_feature 1..20: note = chemically synthesized
  source 1..20: mol_type = other DNA
tgtcctttgcattcaaagta

SEQ ID NO: 64828 - DNA, 20 bp, synthetic construct
  misc_feature 1..20: note = chemically synthesized
  source 1..20: mol_type = other DNA
aaggtggtagggaggagctt

SEQ ID NO: 64829 - DNA, 20 bp, synthetic construct
  misc_feature 1..20: note = chemically synthesized
  source 1..20: mol_type = other DNA
ttatggccatccaggataga

SEQ ID NO: 64830 - DNA, 20 bp, synthetic construct
  misc_feature 1..20: note = chemically synthesized
  source 1..20: mol_type = other DNA
agatcagaaagattagacag

SEQ ID NO: 64831 - DNA, 20 bp, synthetic construct
  misc_feature 1..20: note = chemically synthesized
  source 1..20: mol_type = other DNA
cagtcagaaaaagtaatcag

SEQ ID NO: 64832 - DNA, 20 bp, synthetic construct
  misc_feature 1..20: note = chemically synthesized
  source 1..20: mol_type = other DNA
catttaagtataaaggactt

SEQ ID NO: 64833 - DNA, 20 bp, synthetic construct
  misc_feature 1..20: note = chemically synthesized
  source 1..20: mol_type = other DNA
taagtataaaggacttttag

SEQ ID NO: 64834 - DNA, 20 bp, synthetic construct
  misc_feature 1..20: note = chemically synthesized
  source 1..20: mol_type = other DNA
atgtttttcatggtattatc

SEQ ID NO: 64835 - DNA, 20 bp, synthetic construct
  misc_feature 1..20: note = chemically synthesized
  source 1..20: mol_type = other DNA
ctattttctagtgtaattgt

SEQ ID NO: 64836 - DNA, 20 bp, synthetic construct
  misc_feature 1..20: note = chemically synthesized
  source 1..20: mol_type = other DNA
tagtgtaattgtaaagaatg

SEQ ID NO: 64837 - DNA, 20 bp, synthetic construct
  misc_feature 1..20: note = chemically synthesized
  source 1..20: mol_type = other DNA
atctttaatgggaaaaagga

SEQ ID NO: 64838 - DNA, 20 bp, synthetic construct
  misc_feature 1..20: note = chemically synthesized
  source 1..20: mol_type = other DNA
tgggaaaaaggagtagaaag

SEQ ID NO: 64839 - DNA, 20 bp, synthetic construct
  misc_feature 1..20: note = chemically synthesized
  source 1..20: mol_type = other DNA
taaaacttgagtctgtcaac

SEQ ID NO: 64840 - DNA, 20 bp, synthetic construct
  misc_feature 1..20: note = chemically synthesized
  source 1..20: mol_type = other DNA
tattttcatgattaaaattc

SEQ ID NO: 64841 - DNA, 20 bp, synthetic construct
  misc_feature 1..20: note = chemically synthesized
  source 1..20: mol_type = other DNA
tgtatttatgaactaagaac

SEQ ID NO: 64842 - DNA, 20 bp, synthetic construct
  misc_feature 1..20: note = chemically synthesized
  source 1..20: mol_type = other DNA
aaacaatactctgaagtagt

SEQ ID NO: 64843 - DNA, 20 bp, synthetic construct
  misc_feature 1..20: note = chemically synthesized
  source 1..20: mol_type = other DNA
cagggctttgaatcttatgt

SEQ ID NO: 64844 - DNA, 20 bp, synthetic construct
  misc_feature 1..20: note = chemically synthesized
  source 1..20: mol_type = other DNA
ggctaaggcatctgtgaagg

SEQ ID NO: 64845 - DNA, 20 bp, synthetic construct
  misc_feature 1..20: note = chemically synthesized
  source 1..20: mol_type = other DNA
atggtgatagctgggcagcg

SEQ ID NO: 64846 - DNA, 20 bp, synthetic construct
  misc_feature 1..20: note = chemically synthesized
  source 1..20: mol_type = other DNA
ctagctaaaggcagtgagag

SEQ ID NO: 64847 - DNA, 20 bp, synthetic construct
  misc_feature 1..20: note = chemically synthesized
  source 1..20: mol_type = other DNA
gtttctacacaagtagatac

SEQ ID NO: 64848 - DNA, 20 bp, synthetic construct
  misc_feature 1..20: note = chemically synthesized
  source 1..20: mol_type = other DNA
agtcctgcatgattagttgc

SEQ ID NO: 64849 - DNA, 20 bp, synthetic construct
  misc_feature 1..20: note = chemically synthesized
  source 1..20: mol_type = other DNA
ctaggggaaggatagcatta

SEQ ID NO: 64850 - DNA, 20 bp, synthetic construct
  misc_feature 1..20: note = chemically synthesized
  source 1..20: mol_type = other DNA
caattcttaactataatctt

SEQ ID NO: 64851 - DNA, 20 bp, synthetic construct
  misc_feature 1..20: note = chemically synthesized
  source 1..20: mol_type = other DNA
atttggacagccaggaaagc

SEQ ID NO: 64852 - DNA, 20 bp, synthetic construct
  misc_feature 1..20: note = chemically synthesized
  source 1..20: mol_type = other DNA
attcaaaattgtaaaattgc

SEQ ID NO: 64853 - DNA, 20 bp, synthetic construct
  misc_feature 1..20: note = chemically synthesized
  source 1..20: mol_type = other DNA
gctaagaatacagcacaaaa

SEQ ID NO: 64854 - DNA, 20 bp, synthetic construct
  misc_feature 1..20: note = chemically synthesized
  source 1..20: mol_type = other DNA
ccaatgagattaggtgctat

SEQ ID NO: 64855 - DNA, 20 bp, synthetic construct
  misc_feature 1..20: note = chemically synthesized
  source 1..20: mol_type = other DNA
accctaaagatgtaagatgc

SEQ ID NO: 64856 - DNA, 20 bp, synthetic construct
  misc_feature 1..20: note = chemically synthesized
  source 1..20: mol_type = other DNA
aggatgagattcggtgaagg

SEQ ID NO: 64857 - DNA, 20 bp, synthetic construct
  misc_feature 1..20: note = chemically synthesized
  source 1..20: mol_type = other DNA
atacctacatcatagagttg

SEQ ID NO: 64858 - DNA, 20 bp, synthetic construct
  misc_feature 1..20: note = chemically synthesized
  source 1..20: mol_type = other DNA
tatgcatgaacaactattgt

SEQ ID NO: 64859 - DNA, 20 bp, synthetic construct
  misc_feature 1..20: note = chemically synthesized
  source 1..20: mol_type = other DNA
taatttggatagtatattgg

SEQ ID NO: 64860 - DNA, 20 bp, synthetic construct
  misc_feature 1..20: note = chemically synthesized
  source 1..20: mol_type = other DNA
aaccaacaggattttctgac

SEQ ID NO: 64861 - DNA, 20 bp, synthetic construct
  misc_feature 1..20: note = chemically synthesized
  source 1..20: mol_type = other DNA
tgttcatcacagtctctacc

SEQ ID NO: 64862 - DNA, 20 bp, synthetic construct
  misc_feature 1..20: note = chemically synthesized
  source 1..20: mol_type = other DNA
tgggtgggtggatatggaaa

SEQ ID NO: 64863 - DNA, 20 bp, synthetic construct
  misc_feature 1..20: note = chemically synthesized
  source 1..20: mol_type = other DNA
ataagtcagagaacaatcag

SEQ ID NO: 64864 - DNA, 20 bp, synthetic construct
  misc_feature 1..20: note = chemically synthesized
  source 1..20: mol_type = other DNA
gatgagtttttcctccatgt

SEQ ID NO: 64865 - DNA, 20 bp, synthetic construct
  misc_feature 1..20: note = chemically synthesized
  source 1..20: mol_type = other DNA
tgtagaattgaataagaagg

SEQ ID NO: 64866 - DNA, 20 bp, synthetic construct
  misc_feature 1..20: note = chemically synthesized
  source 1..20: mol_type = other DNA
tgctgacaactatgttagag

SEQ ID NO: 64867 - DNA, 20 bp, synthetic construct
  misc_feature 1..20: note = chemically synthesized
  source 1..20: mol_type = other DNA
tattcaggaaataatatatt

SEQ ID NO: 64868 - DNA, 20 bp, synthetic construct
  misc_feature 1..20: note = chemically synthesized
  source 1..20: mol_type = other DNA
gaggtcactaatggagacac

SEQ ID NO: 64869 - DNA, 20 bp, synthetic construct
  misc_feature 1..20: note = chemically synthesized
  source 1..20: mol_type = other DNA
ttcagtgcttgaatcataaa

SEQ ID NO: 64870 - DNA, 20 bp, synthetic construct
  misc_feature 1..20: note = chemically synthesized
  source 1..20: mol_type = other DNA
ggtatttatgggatggggga

SEQ ID NO: 64871 - DNA, 20 bp, synthetic construct
  misc_feature 1..20: note = chemically synthesized
  source 1..20: mol_type = other DNA
tgtggattattttagagagt

SEQ ID NO: 64872 - DNA, 20 bp, synthetic construct
  misc_feature 1..20: note = chemically synthesized
  source 1..20: mol_type = other DNA
gtcaagatttttttaaaaat

SEQ ID NO: 64873 - DNA, 20 bp, synthetic construct
  misc_feature 1..20: note = chemically synthesized
  source 1..20: mol_type = other DNA
agaaaacataagttggacct

SEQ ID NO: 64874 - DNA, 20 bp, synthetic construct
  misc_feature 1..20: note = chemically synthesized
  source 1..20: mol_type = other DNA
ttctcctctctcctttctca

SEQ ID NO: 64875 - DNA, 20 bp, synthetic construct
  misc_feature 1..20: note = chemically synthesized
  source 1..20: mol_type = other DNA
ctagggtcaggcagatcaca

SEQ ID NO: 64876 - DNA, 20 bp, synthetic construct
  misc_feature 1..20: note = chemically synthesized
  source 1..20: mol_type = other DNA
ttaggaggggccaaatgagc

SEQ ID NO: 64877 - DNA, 20 bp, synthetic construct
  misc_feature 1..20: note = chemically synthesized
  source 1..20: mol_type = other DNA
atgataatatgtattagcta

SEQ ID NO: 64878 - DNA, 20 bp, synthetic construct
  misc_feature 1..20: note = chemically synthesized
  source 1..20: mol_type = other DNA
ttacagttgcatgctacctt

SEQ ID NO: 64879 - DNA, 20 bp, synthetic construct
  misc_feature 1..20: note = chemically synthesized
  source 1..20: mol_type = other DNA
atacaataatggctaatttt

SEQ ID NO: 64880 - DNA, 20 bp, synthetic construct
  misc_feature 1..20: note = chemically synthesized
  source 1..20: mol_type = other DNA
tcttccattctttttacaga

SEQ ID NO: 64881 - DNA, 20 bp, synthetic construct
  misc_feature 1..20: note = chemically synthesized
  source 1..20: mol_type = other DNA
ttttaaagtagttagcatat

SEQ ID NO: 64882 - DNA, 20 bp, synthetic construct
  misc_feature 1..20: note = chemically synthesized
  source 1..20: mol_type = other DNA
gacccggcaaagggagatgc

SEQ ID NO: 64883 - DNA, 20 bp, synthetic construct
  misc_feature 1..20: note = chemically synthesized
  source 1..20: mol_type = other DNA
ccctcagttcttgacgctag

SEQ ID NO: 64884 - DNA, 20 bp, synthetic construct
  misc_feature 1..20: note = chemically synthesized
  source 1..20: mol_type = other DNA
atgacaatctctgtaaccca

SEQ ID NO: 64885 - DNA, 20 bp, synthetic construct
  misc_feature 1..20: note = chemically synthesized
  source 1..20: mol_type = other DNA
tttctccctcaaactttcct

SEQ ID NO: 64886 - DNA, 20 bp, synthetic construct
  misc_feature 1..20: note = chemically synthesized
  source 1..20: mol_type = other DNA
tgttcaataatacatatctc

SEQ ID NO: 64887 - DNA, 20 bp, synthetic construct
  misc_feature 1..20: note = chemically synthesized
  source 1..20: mol_type = other DNA
cataaaatggcacctgacat

SEQ ID NO: 64888 - DNA, 20 bp, synthetic construct
  misc_feature 1..20: note = chemically synthesized
  source 1..20: mol_type = other DNA
gggagcagtcccatgtagta

SEQ ID NO: 64889 - DNA, 20 bp, synthetic construct
  misc_feature 1..20: note = chemically synthesized
  source 1..20: mol_type = other DNA
catggctgtctcctttatcc

SEQ ID NO: 64890 - DNA, 20 bp, synthetic construct
  misc_feature 1..20: note = chemically synthesized
  source 1..20: mol_type = other DNA
ctagccaggggctggactgt

SEQ ID NO: 64891 - DNA, 20 bp, synthetic construct
  misc_feature 1..20: note = chemically synthesized
  source 1..20: mol_type = other DNA
gataatctgattcatgcaac

SEQ ID NO: 64892 - DNA, 20 bp, synthetic construct
  misc_feature 1..20: note = chemically synthesized
  source 1..20: mol_type = other DNA
gcatatgatggggtagcaga

SEQ ID NO: 64893 - DNA, 20 bp, synthetic construct
  misc_feature 1..20: note = chemically synthesized
  source 1..20: mol_type = other DNA
agaccagccttttgctcagg

SEQ ID NO: 64894 - DNA, 20 bp, synthetic construct
  misc_feature 1..20: note = chemically synthesized
  source 1..20: mol_type = other DNA
ttatgaaattcttacacaca

SEQ ID NO: 64895 - DNA, 20 bp, synthetic construct
  misc_feature 1..20: note = chemically synthesized
  source 1..20: mol_type = other DNA
ataataatagtatctacctg

SEQ ID NO: 64896 - DNA, 20 bp, synthetic construct
  misc_feature 1..20: note = chemically synthesized
  source 1..20: mol_type = other DNA
acactagttttcacctgcag

SEQ ID NO: 64897 - DNA, 20 bp, synthetic construct
  misc_feature 1..20: note = chemically synthesized
  source 1..20: mol_type = other DNA
aaaccctccattttacagat

SEQ ID NO: 64898 - DNA, 20 bp, synthetic construct
  misc_feature 1..20: note = chemically synthesized
  source 1..20: mol_type = other DNA
actgagtcatacaactacta

SEQ ID NO: 64899 - DNA, 20 bp, synthetic construct
  misc_feature 1..20: note = chemically synthesized
  source 1..20: mol_type = other DNA
agttctttcctaaaggtatg

SEQ ID NO: 64900 - DNA, 20 bp, synthetic construct
  misc_feature 1..20: note = chemically synthesized
  source 1..20: mol_type = other DNA
tcagtgggcctgggtgaagg

SEQ ID NO: 64901 - DNA, 20 bp, synthetic construct
  misc_feature 1..20: note = chemically synthesized
  source 1..20: mol_type = other DNA
ccagactcctacttataaaa

SEQ ID NO: 64902 - DNA, 20 bp, synthetic construct
  misc_feature 1..20: note = chemically synthesized
  source 1..20: mol_type = other DNA
tcatagctgctgagtgggag

SEQ ID NO: 64903 - DNA, 20 bp, synthetic construct
  misc_feature 1..20: note = chemically synthesized
  source 1..20: mol_type = other DNA
ggctattcttattctcacac

SEQ ID NO: 64904 - DNA, 20 bp, synthetic construct
  misc_feature 1..20: note = chemically synthesized
  source 1..20: mol_type = other DNA
tcttattctcacactaagaa

SEQ ID NO: 64905 - DNA, 20 bp, synthetic construct
  misc_feature 1..20: note = chemically synthesized
  source 1..20: mol_type = other DNA
attcctgtttcaatggctta

SEQ ID NO: 64906 - DNA, 20 bp, synthetic construct
  misc_feature 1..20: note = chemically synthesized
  source 1..20: mol_type = other DNA
actttatattgttactactc

SEQ ID NO: 64907 - DNA, 20 bp, synthetic construct
  misc_feature 1..20: note = chemically synthesized
  source 1..20: mol_type = other DNA
gttacaacatggtgaataca

SEQ ID NO: 64908 - DNA, 20 bp, synthetic construct
  misc_feature 1..20: note = chemically synthesized
  source 1..20: mol_type = other DNA
aagagaaagctattacaagt

SEQ ID NO: 64909 - DNA, 20 bp, synthetic construct
  misc_feature 1..20: note = chemically synthesized
  source 1..20: mol_type = other DNA
ctgtagggttgagagggaga

SEQ ID NO: 64910 - DNA, 20 bp, synthetic construct
  misc_feature 1..20: note = chemically synthesized
  source 1..20: mol_type = other DNA
cctggggataaatatttcct

SEQ ID NO: 64911 - DNA, 20 bp, synthetic construct
  misc_feature 1..20: note = chemically synthesized
  source 1..20: mol_type = other DNA
ctattttccctgaagttctc

SEQ ID NO: 64912 - DNA, 20 bp, synthetic construct
  misc_feature 1..20: note = chemically synthesized
  source 1..20: mol_type = other DNA
aaggtctgttgcatcaagag

SEQ ID NO: 64913 - DNA, 20 bp, synthetic construct
  misc_feature 1..20: note = chemically synthesized
  source 1..20: mol_type = other DNA
tacaaagcatgagttgtggg

SEQ ID NO: 64914 - DNA, 20 bp, synthetic construct
  misc_feature 1..20: note = chemically synthesized
  source 1..20: mol_type = other DNA
tcttttgacttcctttgaca

SEQ ID NO: 64915 - DNA, 20 bp, synthetic construct
  misc_feature 1..20: note = chemically synthesized
  source 1..20: mol_type = other DNA
tcaacatcctcataataact

SEQ ID NO: 64916 - DNA, 20 bp, synthetic construct
  misc_feature 1..20: note = chemically synthesized
  source 1..20: mol_type = other DNA
ttatagttcctagcacaaag

SEQ ID NO: 64917 - DNA, 20 bp, synthetic construct
  misc_feature 1..20: note = chemically synthesized
  source 1..20: mol_type = other DNA
ttacatagctagtatataac

SEQ ID NO: 64918 - DNA, 20 bp, synthetic construct
  misc_feature 1..20: note = chemically synthesized
  source 1..20: mol_type = other DNA
tctcaatatcacttcttcac

SEQ ID NO: 64919 - DNA, 20 bp, synthetic construct
  misc_feature 1..20: note = chemically synthesized
  source 1..20: mol_type = other DNA
atcctttcaaaatatacttc

SEQ ID NO: 64920 - DNA, 20 bp, synthetic construct
  misc_feature 1..20: note = chemically synthesized
  source 1..20: mol_type = other DNA
atacttctgagaaatgagag

SEQ ID NO: 64921 - DNA, 20 bp, synthetic construct
  misc_feature 1..20: note = chemically synthesized
  source 1..20: mol_type = other DNA
acagggaaggaggtgtgggg

SEQ ID NO: 64922 - DNA, 20 bp, synthetic construct
  misc_feature 1..20: note = chemically synthesized
  source 1..20: mol_type = other DNA
catttctggactcttgaaat

SEQ ID NO: 64923 - DNA, 20 bp, synthetic construct
  misc_feature 1..20: note = chemically synthesized
  source 1..20: mol_type = other DNA
aactagcctttgctttatta

SEQ ID NO: 64924 - DNA, 20 bp, synthetic construct
  misc_feature 1..20: note = chemically synthesized
  source 1..20: mol_type = other DNA
tattaggaaaaagggaaact

SEQ ID NO: 64925 - DNA, 20 bp, synthetic construct
  misc_feature 1..20: note = chemically synthesized
  source 1..20: mol_type = other DNA
aatataatccactaataaaa

SEQ ID NO: 64926 - DNA, 20 bp, synthetic construct
  misc_feature 1..20: note = chemically synthesized
  source 1..20: mol_type = other DNA
agcacgtccaagtgaaggca

SEQ ID NO: 64927 - DNA, 20 bp, synthetic construct
  misc_feature 1..20: note = chemically synthesized
  source 1..20: mol_type = other DNA
ggcaggagaaatgagaggag

SEQ ID NO: 64928 - DNA, 20 bp, synthetic construct
  misc_feature 1..20: note = chemically synthesized
  source 1..20: mol_type = other DNA
agaaagaggagccatttgat

SEQ ID NO: 64929 - DNA, 20 bp, synthetic construct
  misc_feature 1..20: note = chemically synthesized
  source 1..20: mol_type = other DNA
gagccatttgatcaagaata

SEQ ID NO: 64930 - DNA, 20 bp, synthetic construct
  misc_feature 1..20: note = chemically synthesized
  source 1..20: mol_type = other DNA
ataaaggagaacctaaagag

SEQ ID NO: 64931 - DNA, 20 bp, synthetic construct
  misc_feature 1..20: note = chemically synthesized
  source 1..20: mol_type = other DNA
gatacccatataaataacgt

SEQ ID NO: 64932 - DNA, 20 bp, synthetic construct
  misc_feature 1..20: note = chemically synthesized
  source 1..20: mol_type = other DNA
gtcaggatgcagtaatagat

SEQ ID NO: 64933 - DNA, 20 bp, synthetic construct
  misc_feature 1..20: note = chemically synthesized
  source 1..20: mol_type = other DNA
tcgaggaaaacctatgaaaa

SEQ ID NO: 64934 - DNA, 20 bp, synthetic construct
  misc_feature 1..20: note = chemically synthesized
  source 1..20: mol_type = other DNA
gaacttgaaattgcattata

SEQ ID NO: 64935 - DNA, 20 bp, synthetic construct
  misc_feature 1..20: note = chemically synthesized
  source 1..20: mol_type = other DNA
ctgtgattgactttatcatt

SEQ ID NO: 64936 - DNA, 20 bp, synthetic construct
  misc_feature 1..20: note = chemically synthesized
  source 1..20: mol_type = other DNA
tgccacatagaggaagggaa

SEQ ID NO: 64937 - DNA, 20 bp, synthetic construct
  misc_feature 1..20: note = chemically synthesized
  source 1..20: mol_type = other DNA
gttcttggtttcactgactt

SEQ ID NO: 64938 - DNA, 20 bp, synthetic construct
  misc_feature 1..20: note = chemically synthesized
  source 1..20: mol_type = other DNA
cggctctggccttggccagc

SEQ ID NO: 64939 - DNA, 20 bp, synthetic construct
  misc_feature 1..20: note = chemically synthesized
  source 1..20: mol_type = other DNA
ctctttcagagaacatcatg

SEQ ID NO: 64940 - DNA, 20 bp, synthetic construct
  misc_feature 1..20: note = chemically synthesized
  source 1..20: mol_type = other DNA
atggcagaaacattttttca

SEQ ID NO: 64941 - DNA, 20 bp, synthetic construct
  misc_feature 1..20: note = chemically synthesized
  source 1..20: mol_type = other DNA
caactagaaccaagttacac

SEQ ID NO: 64942 - DNA, 20 bp, synthetic construct
  misc_feature 1..20: note = chemically synthesized
  source 1..20: mol_type = other DNA
gagatgtttatagtgataag

SEQ ID NO: 64943 - DNA, 20 bp, synthetic construct
  misc_feature 1..20: note = chemically synthesized
  source 1..20: mol_type = other DNA
agatttgtattattttatgt

SEQ ID NO: 64944 - DNA, 20 bp, synthetic construct
  misc_feature 1..20: note = chemically synthesized
  source 1..20: mol_type = other DNA
attattttatgtgaagaaac

SEQ ID NO: 64945 - DNA, 20 bp, synthetic construct
  misc_feature 1..20: note = chemically synthesized
  source 1..20: mol_type = other DNA
aacatgatgaggagacatgg

SEQ ID NO: 64946 - DNA, 20 bp, synthetic construct
  misc_feature 1..20: note = chemically synthesized
  source 1..20: mol_type = other DNA
tcactatgatacctacttat

SEQ ID NO: 64947 - DNA, 20 bp, synthetic construct
  misc_feature 1..20: note = chemically synthesized
  source 1..20: mol_type = other DNA
cataaacattgccaatgcat

SEQ ID NO: 64948 - DNA, 20 bp, synthetic construct
  misc_feature 1..20: note = chemically synthesized
  source 1..20: mol_type = other DNA
cacacccaaatcttcaacag

SEQ ID NO: 64949 - DNA, 20 bp, synthetic construct
  misc_feature 1..20: note = chemically synthesized
  source 1..20: mol_type = other DNA
catctgacagcataggaagg

SEQ ID NO: 64950 - DNA, 20 bp, synthetic construct
  misc_feature 1..20: note = chemically synthesized
  source 1..20: mol_type = other DNA
taggcttttcaaactacctt

SEQ ID NO: 64951 - DNA, 20 bp, synthetic construct
  misc_feature 1..20: note = chemically synthesized
  source 1..20: mol_type = other DNA
ggaatattcatgagacaaac

SEQ ID NO: 64952 - DNA, 20 bp, synthetic construct
  misc_feature 1..20: note = chemically synthesized
  source 1..20: mol_type = other DNA
tcatgagacaaacagagaat

SEQ ID NO: 64953 - DNA, 20 bp, synthetic construct
  misc_feature 1..20: note = chemically synthesized
  source 1..20: mol_type = other DNA
tgttaatatacaagtgattt

SEQ ID NO: 64954 - DNA, 20 bp, synthetic construct
  misc_feature 1..20: note = chemically synthesized
  source 1..20: mol_type = other DNA
aaagtgcatgaataagacag

SEQ ID NO: 64955 - DNA, 20 bp, synthetic construct
  misc_feature 1..20: note = chemically synthesized
  source 1..20: mol_type = other DNA
tgaataagacagctagaaag

SEQ ID NO: 64956 - DNA, 20 bp, synthetic construct
  misc_feature 1..20: note = chemically synthesized
  source 1..20: mol_type = other DNA
atgtgaaacagttctggctg

SEQ ID NO: 64957 - DNA, 20 bp, synthetic construct
  misc_feature 1..20: note = chemically synthesized
  source 1..20: mol_type = other DNA
attaataaatttgggggttt

SEQ ID NO: 64958 - DNA, 20 bp, synthetic construct
  misc_feature 1..20: note = chemically synthesized
  source 1..20: mol_type = other DNA
gactaaactcacagtatgac

SEQ ID NO: 64959 - DNA, 20 bp, synthetic construct
  misc_feature 1..20: note = chemically synthesized
  source 1..20: mol_type = other DNA
cgcataaatatacatttact

SEQ ID NO: 64960 - DNA, 20 bp, synthetic construct
  misc_feature 1..20: note = chemically synthesized
  source 1..20: mol_type = other DNA
ggctgtcttcttataacaat

SEQ ID NO: 64961 - DNA, 20 bp, synthetic construct
  misc_feature 1..20: note = chemically synthesized
  source 1..20: mol_type = other DNA
agaccaaacaacaaaggcaa

SEQ ID NO: 64962 - DNA, 20 bp, synthetic construct
  misc_feature 1..20: note = chemically synthesized
  source 1..20: mol_type = other DNA
ccagaaaacgacgtttctaa

SEQ ID NO: 64963 - DNA, 20 bp, synthetic construct
  misc_feature 1..20: note = chemically synthesized
  source 1..20: mol_type = other DNA
caaataaataaattttacac

SEQ ID NO: 64964 - DNA, 20 bp, synthetic construct
  misc_feature 1..20: note = chemically synthesized
  source 1..20: mol_type = other DNA
ccaaatgggccttctaattt

SEQ ID NO: 64965 - DNA, 20 bp, synthetic construct
  misc_feature 1..20: note = chemically synthesized
  source 1..20: mol_type = other DNA
agatttcttaagtgaagcag

SEQ ID NO: 64966 - DNA, 20 bp, synthetic construct
  misc_feature 1..20: note = chemically synthesized
  source 1..20: mol_type = other DNA
ttaagtgaagcagagagaat

SEQ ID NO: 64967 - DNA, 20 bp, synthetic construct
  misc_feature 1..20: note = chemically synthesized
  source 1..20: mol_type = other DNA
ttctgaacatggactttcaa

SEQ ID NO: 64968 - DNA, 20 bp, synthetic construct
  misc_feature 1..20: note = chemically synthesized
  source 1..20: mol_type = other DNA
aacatggactttcaatcaga

SEQ ID NO: 64969 - DNA, 20 bp, synthetic construct
  misc_feature 1..20: note = chemically synthesized
  source 1..20: mol_type = other DNA
caacgagaacttaaaaattg

SEQ ID NO: 64970 - DNA, 20 bp, synthetic construct
  misc_feature 1..20: note = chemically synthesized
  source 1..20: mol_type = other DNA
gcgcagaactagcagtagat

SEQ ID NO: 64971 - DNA, 20 bp, synthetic construct
  misc_feature 1..20: note = chemically synthesized
  source 1..20: mol_type = other DNA
cactttgaagaagattgaag

SEQ ID NO: 64972 - DNA, 20 bp, synthetic construct
  misc_feature 1..20: note = chemically synthesized
  source 1..20: mol_type = other DNA
tgtgagaagcaagaggggaa

SEQ ID NO: 64973 - DNA, 20 bp, synthetic construct
  misc_feature 1..20: note = chemically synthesized
  source 1..20: mol_type = other DNA
atagttggttatttttttca

SEQ ID NO: 64974 - DNA, 20 bp, synthetic construct
  misc_feature 1..20: note = chemically synthesized
  source 1..20: mol_type = other DNA
gaaaaatgtcaggagacaaa

SEQ ID NO: 64975 - DNA, 20 bp, synthetic construct
  misc_feature 1..20: note = chemically synthesized
  source 1..20: mol_type = other DNA
acaaaatagaaagctggaaa

SEQ ID NO: 64976 - DNA, 20 bp, synthetic construct
  misc_feature 1..20: note = chemically synthesized
  source 1..20: mol_type = other DNA
atctggcttccacgagatga

SEQ ID NO: 64977 - DNA, 20 bp, synthetic construct
  misc_feature 1..20: note = chemically synthesized
  source 1..20: mol_type = other DNA
ttttcagtaatgggagaggc

SEQ ID NO: 64978 - DNA, 20 bp, synthetic construct
  misc_feature 1..20: note = chemically synthesized
  source 1..20: mol_type = other DNA
gggctcaagccctactctgc

SEQ ID NO: 64979 - DNA, 20 bp, synthetic construct
  misc_feature 1..20: note = chemically synthesized
  source 1..20: mol_type = other DNA
aggattcacgaatggaggaa

SEQ ID NO: 64980 - DNA, 20 bp, synthetic construct
  misc_feature 1..20: note = chemically synthesized
  source 1..20: mol_type = other DNA
ctgtcttgaggattagtata

SEQ ID NO: 64981 - DNA, 20 bp, synthetic construct
  misc_feature 1..20: note = chemically synthesized
  source 1..20: mol_type = other DNA
atatgggtagcagtagagtg

SEQ ID NO: 64982 - DNA, 20 bp, synthetic construct
  misc_feature 1..20: note = chemically synthesized
  source 1..20: mol_type = other DNA
gttcatcactcgggaattgg

SEQ ID NO: 64983 - DNA, 20 bp, synthetic construct
  misc_feature 1..20: note = chemically synthesized
  source 1..20: mol_type = other DNA
tgtactcacaaggcctttcc

SEQ ID NO: 64984 - DNA, 20 bp, synthetic construct
  misc_feature 1..20: note = chemically synthesized
  source 1..20: mol_type = other DNA
acaaataacaaaaatcatgg

SEQ ID NO: 64985 - DNA, 20 bp, synthetic construct
  misc_feature 1..20: note = chemically synthesized
  source 1..20: mol_type = other DNA
ctgaggaaaatgcttattca

SEQ ID NO: 64986 - DNA, 20 bp, synthetic construct
  misc_feature 1..20: note = chemically synthesized
  source 1..20: mol_type = other DNA
gcttattcaatagaaatgac

SEQ ID NO: 64987 - DNA, 20 bp, synthetic construct
  misc_feature 1..20: note = chemically synthesized
  source 1..20: mol_type = other DNA
ccctgcctccaccaaaaaaa

SEQ ID NO: 64988 - DNA, 20 bp, synthetic construct
  misc_feature 1..20: note = chemically synthesized
  source 1..20: mol_type = other DNA
aaataaaataaaataaaacg

SEQ ID NO: 64989 - DNA, 20 bp, synthetic construct
  misc_feature 1..20: note = chemically synthesized
  source 1..20: mol_type = other DNA
ctcatctattgtgagtttcc

SEQ ID NO: 64990 - DNA, 20 bp, synthetic construct
  misc_feature 1..20: note = chemically synthesized
  source 1..20: mol_type = other DNA
gtaaagttagtaaactcatt

SEQ ID NO: 64991 - DNA, 20 bp, synthetic construct
  misc_feature 1..20: note = chemically synthesized
  source 1..20: mol_type = other DNA
gaaaagataagcactcccag

SEQ ID NO: 64992 - DNA, 20 bp, synthetic construct
  misc_feature 1..20: note = chemically synthesized
  source 1..20: mol_type = other DNA
tgaatctgtaagactcgtat

SEQ ID NO: 64993 - DNA, 20 bp, synthetic construct
  misc_feature 1..20: note = chemically synthesized
  source 1..20: mol_type = other DNA
gatttttgttgttgtgatac

SEQ ID NO: 64994 - DNA, 20 bp, synthetic construct
  misc_feature 1..20: note = chemically synthesized
  source 1..20: mol_type = other DNA
tttttattttataaaaacct

SEQ ID NO: 64995 - DNA, 20 bp, synthetic construct
  misc_feature 1..20: note = chemically synthesized
  source 1..20: mol_type = other DNA
aacaataataattatatgtt

SEQ ID NO: 64996 - DNA, 20 bp, synthetic construct
  misc_feature 1..20: note = chemically synthesized
  source 1..20: mol_type = other DNA
ccttccaatgttgccttata

SEQ ID NO: 64997 - DNA, 20 bp, synthetic construct
  misc_feature 1..20: note = chemically synthesized
  source 1..20: mol_type = other DNA
ttgtggcaaatttggtagta

SEQ ID NO: 64998 - DNA, 20 bp, synthetic construct
  misc_feature 1..20: note = chemically synthesized
  source 1..20: mol_type = other DNA
cacatacccaaatattccag

SEQ ID NO: 64999 - DNA, 20 bp, synthetic construct
  misc_feature 1..20: note = chemically synthesized
  source 1..20: mol_type = other DNA
ctaatagtttagggagtctc

SEQ ID NO: 65000 - DNA, 20 bp, synthetic construct
  misc_feature 1..20: note = chemically synthesized
  source 1..20: mol_type = other DNA
actaaaatgagaagacaaaa

SEQ ID NO: 65001 - DNA, 20 bp, synthetic construct
  misc_feature 1..20: note = chemically synthesized
  source 1..20: mol_type = other DNA
cccaaaattgtgttcctata

SEQ ID NO: 65002 - DNA, 20 bp, synthetic construct
  misc_feature 1..20: note = chemically synthesized
  source 1..20: mol_type = other DNA
ctactcgggaggctgaggca

SEQ ID NO: 65003 - DNA, 20 bp, synthetic construct
  misc_feature 1..20: note = chemically synthesized
  source 1..20: mol_type = other DNA
aaaaaaaaaaaaaggtttgg

SEQ ID NO: 65004 - DNA, 20 bp, synthetic construct
  misc_feature 1..20: note = chemically synthesized
  source 1..20: mol_type = other DNA
acaaattttgctctcagtaa

SEQ ID NO: 65005 - DNA, 20 bp, synthetic construct
  misc_feature 1..20: note = chemically synthesized
  source 1..20: mol_type = other DNA
gtaggttaatagtgaaaaat

SEQ ID NO: 65006 - DNA, 20 bp, synthetic construct
  misc_feature 1..20: note = chemically synthesized
  source 1..20: mol_type = other DNA
ttgacaatttcaacataatg

SEQ ID NO: 65007 - DNA, 20 bp, synthetic construct
  misc_feature 1..20: note = chemically synthesized
  source 1..20: mol_type = other DNA
ctactctggaggctgaggca

SEQ ID NO: 65008 - DNA, 20 bp, synthetic construct
  misc_feature 1..20: note = chemically synthesized
  source 1..20: mol_type = other DNA
tgcactctagcctgggcaac

SEQ ID NO: 65009 - DNA, 20 bp, synthetic construct
  misc_feature 1..20: note = chemically synthesized
  source 1..20: mol_type = other DNA
aaaatctgttaaagagagag

SEQ ID NO: 65010 - DNA, 20 bp, synthetic construct
  misc_feature 1..20: note = chemically synthesized
  source 1..20: mol_type = other DNA
ctgttaaagagagagagaga

SEQ ID NO: 65011 - DNA, 20 bp, synthetic construct
  misc_feature 1..20: note = chemically synthesized
  source 1..20: mol_type = other DNA
aaagaaaagtgagtaaaaaa

SEQ ID NO: 65012 - DNA, 20 bp, synthetic construct
  misc_feature 1..20: note = chemically synthesized
  source 1..20: mol_type = other DNA
cttatatttaggtctgatct

SEQ ID NO: 65013 - DNA, 20 bp, synthetic construct
  misc_feature 1..20: note = chemically synthesized
  source 1..20: mol_type = other DNA
catacagcaataaatgcatt

SEQ ID NO: 65014 - DNA, 20 bp, synthetic construct
  misc_feature 1..20: note = chemically synthesized
  source 1..20: mol_type = other DNA
ttttacatcaatcatggttc

SEQ ID NO: 65015 - DNA, 20 bp, synthetic construct
  misc_feature 1..20: note = chemically synthesized
  source 1..20: mol_type = other DNA
aaaatccataacaacatcaa

SEQ ID NO: 65016 - DNA, 20 bp, synthetic construct
  misc_feature 1..20: note = chemically synthesized
  source 1..20: mol_type = other DNA
atagctagaccaatacatga

SEQ ID NO: 65017 - DNA, 20 bp, synthetic construct
  misc_feature 1..20: note = chemically synthesized
  source 1..20: mol_type = other DNA
agttatgttaccatatagga

SEQ ID NO: 65018 - DNA, 20 bp, synthetic construct
  misc_feature 1..20: note = chemically synthesized
  source 1..20: mol_type = other DNA
atgttaccatataggaagag

SEQ ID NO: 65019 - DNA, 20 bp, synthetic construct
  misc_feature 1..20: note = chemically synthesized
  source 1..20: mol_type = other DNA
ctataacttgaagtttcata

SEQ ID NO: 65020 - DNA, 20 bp, synthetic construct
  misc_feature 1..20: note = chemically synthesized
  source 1..20: mol_type = other DNA
ggcatctttctcactaagca

SEQ ID NO: 65021 - DNA, 20 bp, synthetic construct
  misc_feature 1..20: note = chemically synthesized
  source 1..20: mol_type = other DNA
ggaacttactgggcacatta

SEQ ID NO: 65022 - DNA, 20 bp, synthetic construct
  misc_feature 1..20: note = chemically synthesized
  source 1..20: mol_type = other DNA
aagttttaatacaaggacat

SEQ ID NO: 65023 - DNA, 20 bp, synthetic construct
  misc_feature 1..20: note = chemically synthesized
  source 1..20: mol_type = other DNA
ctactcgggaggctgaggca

SEQ ID NO: 65024 - DNA, 20 bp, synthetic construct
  misc_feature 1..20: note = chemically synthesized
  source 1..20: mol_type = other DNA
gcactgaaaacttcctttct

SEQ ID NO: 65025 - DNA, 20 bp, synthetic construct
  misc_feature 1..20: note = chemically synthesized
  source 1..20: mol_type = other DNA
caaggaatattctttgaaaa

SEQ ID NO: 65026 - DNA, 20 bp, synthetic construct
  misc_feature 1..20: note = chemically synthesized
  source 1..20: mol_type = other DNA
aagtagagagatatatttag

SEQ ID NO: 65027 - DNA, 20 bp, synthetic construct
  misc_feature 1..20: note = chemically synthesized
  source 1..20: mol_type = other DNA
taattcacagtagccaagga

SEQ ID NO: 65028 - DNA, 20 bp, synthetic construct
  misc_feature 1..20: note = chemically synthesized
  source 1..20: mol_type = other DNA
caaaatgtcttatatatgtg

SEQ ID NO: 65029 - DNA, 20 bp, synthetic construct
  misc_feature 1..20: note = chemically synthesized
  source 1..20: mol_type = other DNA
atttcacttacatgagctat

SEQ ID NO: 65030 - DNA, 20 bp, synthetic construct
  misc_feature 1..20: note = chemically synthesized
  source 1..20: mol_type = other DNA
atttggtgtaatacaaaatt

SEQ ID NO: 65031 - DNA, 20 bp, synthetic construct
  misc_feature 1..20: note = chemically synthesized
  source 1..20: mol_type = other DNA
catttatttgattttaataa

SEQ ID NO: 65032 - DNA, 20 bp, synthetic construct
  misc_feature 1..20: note = chemically synthesized
  source 1..20: mol_type = other DNA
tgactcaacaatttcacttg

SEQ ID NO: 65033 - DNA, 20 bp, synthetic construct
  misc_feature 1..20: note = chemically synthesized
  source 1..20: mol_type = other DNA
tcaacaatttcacttgagag

SEQ ID NO: 65034 - DNA, 20 bp, synthetic construct
  misc_feature 1..20: note = chemically synthesized
  source 1..20: mol_type = other DNA
ttatttactcatctggtaat

SEQ ID NO: 65035 - DNA, 20 bp, synthetic construct
  misc_feature 1..20: note = chemically synthesized
  source 1..20: mol_type = other DNA
ctacttcagtgaatgacacc

SEQ ID NO: 65036 - DNA, 20 bp, synthetic construct
  misc_feature 1..20: note = chemically synthesized
  source 1..20: mol_type = other DNA
gactcttcatgatcaggcaa

SEQ ID NO: 65037 - DNA, 20 bp, synthetic construct
  misc_feature 1..20: note = chemically synthesized
  source 1..20: mol_type = other DNA
gcctttcttccaagaacatg

SEQ ID NO: 65038 - DNA, 20 bp, synthetic construct
  misc_feature 1..20: note = chemically synthesized
  source 1..20: mol_type = other DNA
ccacacacactccttcagtc

SEQ ID NO: 65039 - DNA, 20 bp, synthetic construct
  misc_feature 1..20: note = chemically synthesized
  source 1..20: mol_type = other DNA
cacttatttgaagactttaa

SEQ ID NO: 65040 - DNA, 20 bp, synthetic construct
  misc_feature 1..20: note = chemically synthesized
  source 1..20: mol_type = other DNA
aaataaattaggcaaaagta

SEQ ID NO: 65041 - DNA, 20 bp, synthetic construct
  misc_feature 1..20: note = chemically synthesized
  source 1..20: mol_type = other DNA
ttgtgtatatagcaagacaa

SEQ ID NO: 65042 - DNA, 20 bp, synthetic construct
  misc_feature 1..20: note = chemically synthesized
  source 1..20: mol_type = other DNA
ttgagatcacttgtgattta

SEQ ID NO: 65043 - DNA, 20 bp, synthetic construct
  misc_feature 1..20: note = chemically synthesized
  source 1..20: mol_type = other DNA
tatttcatctattggacata

SEQ ID NO: 65044 - DNA, 20 bp, synthetic construct
  misc_feature 1..20: note = chemically synthesized
  source 1..20: mol_type = other DNA
ttagagagaacacaagatca

SEQ ID NO: 65045 - DNA, 20 bp, synthetic construct
  misc_feature 1..20: note = chemically synthesized
  source 1..20: mol_type = other DNA
gatgacattgtatcattttg

SEQ ID NO: 65046 - DNA, 20 bp, synthetic construct
  misc_feature 1..20: note = chemically synthesized
  source 1..20: mol_type = other DNA
taaagagcttctgcacagca

SEQ ID NO: 65047 - DNA, 20 bp, synthetic construct
  misc_feature 1..20: note = chemically synthesized
  source 1..20: mol_type = other DNA
tcagagataacagacaacct

SEQ ID NO: 65048 - DNA, 20 bp, synthetic construct
  misc_feature 1..20: note = chemically synthesized
  source 1..20: mol_type = other DNA
aacagacaacctacagaata

SEQ ID NO: 65049 - DNA, 20 bp, synthetic construct
  misc_feature 1..20: note = chemically synthesized
  source 1..20: mol_type = other DNA
gaggaactaaaacaaattta

SEQ ID NO: 65050 - DNA, 20 bp, synthetic construct
  misc_feature 1..20: note = chemically synthesized
  source 1..20: mol_type = other DNA
aagctcaaccttactggtca

SEQ ID NO: 65051 - DNA, 20 bp, synthetic construct
  misc_feature 1..20: note = chemically synthesized
  source 1..20: mol_type = other DNA
gggataccatctcacaccag

SEQ ID NO: 65052 - DNA, 20 bp, synthetic construct
  misc_feature 1..20: note = chemically synthesized
  source 1..20: mol_type = other DNA
aatggcaattattaaaaagt

SEQ ID NO: 65053 - DNA, 20 bp, synthetic construct
  misc_feature 1..20: note = chemically synthesized
  source 1..20: mol_type = other DNA
agttgctggcaaggttgcag

SEQ ID NO: 65054 - DNA, 20 bp, synthetic construct
  misc_feature 1..20: note = chemically synthesized
  source 1..20: mol_type = other DNA
ctttcctcaaagatgtagaa

SEQ ID NO: 65055 - DNA, 20 bp, synthetic construct
  misc_feature 1..20: note = chemically synthesized
  source 1..20: mol_type = other DNA
ccatcaatgatagagtggat

SEQ ID NO: 65056 - DNA, 20 bp, synthetic construct
  misc_feature 1..20: note = chemically synthesized
  source 1..20: mol_type = other DNA
ctcatcaaactaacacagga

SEQ ID NO: 65057 - DNA, 20 bp, synthetic construct
  misc_feature 1..20: note = chemically synthesized
  source 1..20: mol_type = other DNA
ccaaacacacatgttctcac

SEQ ID NO: 65058 - DNA, 20 bp, synthetic construct
  misc_feature 1..20: note = chemically synthesized
  source 1..20: mol_type = other DNA
gaggagagggagagcaccag

SEQ ID NO: 65059 - DNA, 20 bp, synthetic construct
  misc_feature 1..20: note = chemically synthesized
  source 1..20: mol_type = other DNA
tttccaattactcaaaaggc

SEQ ID NO: 65060 - DNA, 20 bp, synthetic construct
  misc_feature 1..20: note = chemically synthesized
  source 1..20: mol_type = other DNA
gggctcaagccattctgtgc

SEQ ID NO: 65061 - DNA, 20 bp, synthetic construct
  misc_feature 1..20: note = chemically synthesized
  source 1..20: mol_type = other DNA
agggttcatgaatggaggaa

SEQ ID NO: 65062 - DNA, 20 bp, synthetic construct
  misc_feature 1..20: note = chemically synthesized
  source 1..20: mol_type = other DNA
ctgttttaaggatcaggata

SEQ ID NO: 65063 - DNA, 20 bp, synthetic construct
  misc_feature 1..20: note = chemically synthesized
  source 1..20: mol_type = other DNA
acaatgatcagagcgtctag

SEQ ID NO: 65064 - DNA, 20 bp, synthetic construct
  misc_feature 1..20: note = chemically synthesized
  source 1..20: mol_type = other DNA
taggaagaaaatcaaagcaa

SEQ ID NO: 65065 - DNA, 20 bp, synthetic construct
  misc_feature 1..20: note = chemically synthesized
  source 1..20: mol_type = other DNA
aagtttcaggacatcttgat

SEQ ID NO: 65066 - DNA, 20 bp, synthetic construct
  misc_feature 1..20: note = chemically synthesized
  source 1..20: mol_type = other DNA
atatgggaagcaatggagtg

SEQ ID NO: 65067 - DNA, 20 bp, synthetic construct
  misc_feature 1..20: note = chemically synthesized
  source 1..20: mol_type = other DNA
ctatcttcacccaagattta

SEQ ID NO: 65068 - DNA, 20 bp, synthetic construct
  misc_feature 1..20: note = chemically synthesized
  source 1..20: mol_type = other DNA
acggtcataggccattgaca

SEQ ID NO: 65069 - DNA, 20 bp, synthetic construct
  misc_feature 1..20: note = chemically synthesized
  source 1..20: mol_type = other DNA
cacaagtggcaagtagcttt

SEQ ID NO: 65070 - DNA, 20 bp, synthetic construct
  misc_feature 1..20: note = chemically synthesized
  source 1..20: mol_type = other DNA
gatatagacatagtgttttg

SEQ ID NO: 65071 - DNA, 20 bp, synthetic construct
  misc_feature 1..20: note = chemically synthesized
  source 1..20: mol_type = other DNA
tttctttgtttagttttgaa

SEQ ID NO: 65072 - DNA, 20 bp, synthetic construct
  misc_feature 1..20: note = chemically synthesized
  source 1..20: mol_type = other DNA
aaaagccatgagccctctgt

SEQ ID NO: 65073 - DNA, 20 bp, synthetic construct
  misc_feature 1..20: note = chemically synthesized
  source 1..20: mol_type = other DNA
ggtatttctccaaggatgga

SEQ ID NO: 65074 - DNA, 20 bp, synthetic construct
  misc_feature 1..20: note = chemically synthesized
  source 1..20: mol_type = other DNA
gtttagcttccacttataaa

SEQ ID NO: 65075 - DNA, 20 bp, synthetic construct
  misc_feature 1..20: note = chemically synthesized
  source 1..20: mol_type = other DNA
cccttttctccatagcctca

SEQ ID NO: 65076 - DNA, 20 bp, synthetic construct
  misc_feature 1..20: note = chemically synthesized
  source 1..20: mol_type = other DNA
ttgtccttgtgatagtttgc

SEQ ID NO: 65077 - DNA, 20 bp, synthetic construct
  misc_feature 1..20: note = chemically synthesized
  source 1..20: mol_type = other DNA
actagtttttctaatactgt

SEQ ID NO: 65078 - DNA, 20 bp, synthetic construct
  misc_feature 1..20: note = chemically synthesized
  source 1..20: mol_type = other DNA
agaatgacattggtaattgg

SEQ ID NO: 65079 - DNA, 20 bp, synthetic construct
  misc_feature 1..20: note = chemically synthesized
  source 1..20: mol_type = other DNA
atatgatcatctcaatagac

SEQ ID NO: 65080 - DNA, 20 bp, synthetic construct
  misc_feature 1..20: note = chemically synthesized
  source 1..20: mol_type = other DNA
catcaaaggaacatacctca

SEQ ID NO: 65081 - DNA, 20 bp, synthetic construct
  misc_feature 1..20: note = chemically synthesized
  source 1..20: mol_type = other DNA
ctaaccagggcaatcaggcg

SEQ ID NO: 65082 - DNA, 20 bp, synthetic construct
  misc_feature 1..20: note = chemically synthesized
  source 1..20: mol_type = other DNA
ccagggcaatcaggcgagag

SEQ ID NO: 65083 - DNA, 20 bp, synthetic construct
  misc_feature 1..20: note = chemically synthesized
  source 1..20: mol_type = other DNA
ggcaatcaggcgagagaaag

SEQ ID NO: 65084 - DNA, 20 bp, synthetic construct
  misc_feature 1..20: note = chemically synthesized
  source 1..20: mol_type = other DNA
ctgatgatatgactctatac

SEQ ID NO: 65085 - DNA, 20 bp, synthetic construct
  misc_feature 1..20: note = chemically synthesized
  source 1..20: mol_type = other DNA
atcccattaagaacagccac

SEQ ID NO: 65086 - DNA, 20 bp, synthetic construct
  misc_feature 1..20: note = chemically synthesized
  source 1..20: mol_type = other DNA
atttaaaacccaagcaggca

SEQ ID NO: 65087 - DNA, 20 bp, synthetic construct
  misc_feature 1..20: note = chemically synthesized
  source 1..20: mol_type = other DNA
aaaacccaagcaggcactag

SEQ ID NO: 65088 - DNA, 20 bp, synthetic construct
  misc_feature 1..20: note = chemically synthesized
  source 1..20: mol_type = other DNA
ggatcagggaacattttcca

SEQ ID NO: 65089 - DNA, 20 bp, synthetic construct
  misc_feature 1..20: note = chemically synthesized
  source 1..20: mol_type = other DNA
agaagaaatgctacttaagc

SEQ ID NO: 65090 - DNA, 20 bp, synthetic construct
  misc_feature 1..20: note = chemically synthesized
  source 1..20: mol_type = other DNA
aatacatgaaaaaaagcttg

SEQ ID NO: 65091 - DNA, 20 bp, synthetic construct
  misc_feature 1..20: note = chemically synthesized
  source 1..20: mol_type = other DNA
aagttactatggctacagta

SEQ ID NO: 65092 - DNA, 20 bp, synthetic construct
  misc_feature 1..20: note = chemically synthesized
  source 1..20: mol_type = other DNA
actagttgttatcagtagca

SEQ ID NO: 65093 - DNA, 20 bp, synthetic construct
  misc_feature 1..20: note = chemically synthesized
  source 1..20: mol_type = other DNA
tagaagagagattctatgac

SEQ ID NO: 65094 - DNA, 20 bp, synthetic construct
  misc_feature 1..20: note = chemically synthesized
  source 1..20: mol_type = other DNA
gattgaaggtagtagattaa

SEQ ID NO: 65095 - DNA, 20 bp, synthetic construct
  misc_feature 1..20: note = chemically synthesized
  source 1..20: mol_type = other DNA
gtgttttacatgctgacttt

SEQ ID NO: 65096 - DNA, 20 bp, synthetic construct
  misc_feature 1..20: note = chemically synthesized
  source 1..20: mol_type = other DNA
tgactttgtagaaaagatga

SEQ ID NO: 65097 - DNA, 20 bp, synthetic construct
  misc_feature 1..20: note = chemically synthesized
  source 1..20: mol_type = other DNA
ctttgcacaaaggataccct

SEQ ID NO: 65098 - DNA, 20 bp, synthetic construct
  misc_feature 1..20: note = chemically synthesized
  source 1..20: mol_type = other DNA
aaggatattattttgttttt

SEQ ID NO: 65099 - DNA, 20 bp, synthetic construct
  misc_feature 1..20: note = chemically synthesized
  source 1..20: mol_type = other DNA
agtggattcagatcaccctc

SEQ ID NO: 65100 - DNA, 20 bp, synthetic construct
  misc_feature 1..20: note = chemically synthesized
  source 1..20: mol_type = other DNA
accatgaaggcaccaagaac

SEQ ID NO: 65101 - DNA, 20 bp, synthetic construct
  misc_feature 1..20: note = chemically synthesized
  source 1..20: mol_type = other DNA
catggtcacatataaggaac

SEQ ID NO: 65102 - DNA, 20 bp, synthetic construct
  misc_feature 1..20: note = chemically synthesized
  source 1..20: mol_type = other DNA
gagagtttacagtagatgtc

SEQ ID NO: 65103 - DNA, 20 bp, synthetic construct
  misc_feature 1..20: note = chemically synthesized
  source 1..20: mol_type = other DNA
cagagaaagtatttatggca

SEQ ID NO: 65104 - DNA, 20 bp, synthetic construct
  misc_feature 1..20: note = chemically synthesized
  source 1..20: mol_type = other DNA
gatgtctcatatttttcatt

SEQ ID NO: 65105 - DNA, 20 bp, synthetic construct
  misc_feature 1..20: note = chemically synthesized
  source 1..20: mol_type = other DNA
ttctaagatttttttgggca

SEQ ID NO: 65106 - DNA, 20 bp, synthetic construct
  misc_feature 1..20: note = chemically synthesized
  source 1..20: mol_type = other DNA
tgggcaaaagaatatttata

SEQ ID NO: 65107 - DNA, 20 bp, synthetic construct
  misc_feature 1..20: note = chemically synthesized
  source 1..20: mol_type = other DNA
tatttatagaagaatgaggt

SEQ ID NO: 65108 - DNA, 20 bp, synthetic construct
  misc_feature 1..20: note = chemically synthesized
  source 1..20: mol_type = other DNA
taagtgacttacgactgtat

SEQ ID NO: 65109 - DNA, 20 bp, synthetic construct
  misc_feature 1..20: note = chemically synthesized
  source 1..20: mol_type = other DNA
tcttatcactatatttgcca

SEQ ID NO: 65110 - DNA, 20 bp, synthetic construct
  misc_feature 1..20: note = chemically synthesized
  source 1..20: mol_type = other DNA
agaataatgaaaattttaaa

SEQ ID NO: 65111 - DNA, 20 bp, synthetic construct
  misc_feature 1..20: note = chemically synthesized
  source 1..20: mol_type = other DNA
ttaaataagaatttatttct

SEQ ID NO: 65112 - DNA, 20 bp, synthetic construct
  misc_feature 1..20: note = chemically synthesized
  source 1..20: mol_type = other DNA
aatttcaggtgcatttgaaa

SEQ ID NO: 65113 - DNA, 20 bp, synthetic construct
  misc_feature 1..20: note = chemically synthesized
  source 1..20: mol_type = other DNA
agtatacccttgctctttgc

SEQ ID NO: 65114 - DNA, 20 bp, synthetic construct
  misc_feature 1..20: note = chemically synthesized
  source 1..20: mol_type = other DNA
agcaatgcctatgacagtat

SEQ ID NO: 65115 - DNA, 20 bp, synthetic construct
  misc_feature 1..20: note = chemically synthesized
  source 1..20: mol_type = other DNA
gcctatgacagtattaagaa

SEQ ID NO: 65116 - DNA, 20 bp, synthetic construct
  misc_feature 1..20: note = chemically synthesized
  source 1..20: mol_type = other DNA
ctcatgatttcttggtggag

SEQ ID NO: 65117 - DNA, 20 bp, synthetic construct
  misc_feature 1..20: note = chemically synthesized
  source 1..20: mol_type = other DNA
caggatggatacaaaacccc

SEQ ID NO: 65118 - DNA, 20 bp, synthetic construct
  misc_feature 1..20: note = chemically synthesized
  source 1..20: mol_type = other DNA
cgctatgactctagtattgg

SEQ ID NO: 65119 - DNA, 20 bp, synthetic construct
  misc_feature 1..20: note = chemically synthesized
  source 1..20: mol_type = other DNA
ggagggaacctgattccaca

SEQ ID NO: 65120 - DNA, 20 bp, synthetic construct
  misc_feature 1..20: note = chemically synthesized
  source 1..20: mol_type = other DNA
tctgcaactattttcctgaa

SEQ ID NO: 65121 - DNA, 20 bp, synthetic construct
  misc_feature 1..20: note = chemically synthesized
  source 1..20: mol_type = other DNA
gactatggttttttccctaa

SEQ ID NO: 65122 - DNA, 20 bp, synthetic construct
  misc_feature 1..20: note = chemically synthesized
  source 1..20: mol_type = other DNA
tacctaatccatctttcgag

SEQ ID NO: 65123 - DNA, 20 bp, synthetic construct
  misc_feature 1..20: note = chemically synthesized
  source 1..20: mol_type = other DNA
cacgatccaagaggggtatg

SEQ ID NO: 65124 - DNA, 20 bp, synthetic construct
  misc_feature 1..20: note = chemically synthesized
  source 1..20: mol_type = other DNA
tctgctgcagtcttatttaa

SEQ ID NO: 65125 - DNA, 20 bp, synthetic construct
  misc_feature 1..20: note = chemically synthesized
  source 1..20: mol_type = other DNA
agtcttatttaacgagaaat

SEQ ID NO: 65126 - DNA, 20 bp, synthetic construct
  misc_feature 1..20: note = chemically synthesized
  source 1..20: mol_type = other DNA
gcctcagtatcaaaaataaa

SEQ ID NO: 65127 - DNA, 20 bp, synthetic construct
  misc_feature 1..20: note = chemically synthesized
  source 1..20: mol_type = other DNA
tcaaaaataaatcagaatca

SEQ ID NO: 65128 - DNA, 20 bp, synthetic construct
  misc_feature 1..20: note = chemically synthesized
  source 1..20: mol_type = other DNA
cggaatgaggtataggagga

SEQ ID NO: 65129 - DNA, 20 bp, synthetic construct
  misc_feature 1..20: note = chemically synthesized
  source 1..20: mol_type = other DNA
gaggaagagaatggcagatt

SEQ ID NO: 65130 - DNA, 20 bp, synthetic construct
  misc_feature 1..20: note = chemically synthesized
  source 1..20: mol_type = other DNA
tattctgaagggtaaacata

SEQ ID NO: 65131 - DNA, 20 bp, synthetic construct
  misc_feature 1..20: note = chemically synthesized
  source 1..20: mol_type = other DNA
taaaaataaaaaatttttaa

SEQ ID NO: 65132 - DNA, 20 bp, synthetic construct
  misc_feature 1..20: note = chemically synthesized
  source 1..20: mol_type = other DNA
taaaaaacaataacgtcttt

SEQ ID NO: 65133 - DNA, 20 bp, synthetic construct
  misc_feature 1..20: note = chemically synthesized
  source 1..20: mol_type = other DNA
ataaaacacttgaaaccaaa

SEQ ID NO: 65134 - DNA, 20 bp, synthetic construct
  misc_feature 1..20: note = chemically synthesized
  source 1..20: mol_type = other DNA
gttttttattatatttatga

SEQ ID NO: 65135 - DNA, 20 bp, synthetic construct
  misc_feature 1..20: note = chemically synthesized
  source 1..20: mol_type = other DNA
agggaaggttatggtacctc

SEQ ID NO: 65136 - DNA, 20 bp, synthetic construct
  misc_feature 1..20: note = chemically synthesized
  source 1..20: mol_type = other DNA
gtctgagattttgggaataa

SEQ ID NO: 65137 - DNA, 20 bp, synthetic construct
  misc_feature 1..20: note = chemically synthesized
  source 1..20: mol_type = other DNA
gcttagctattaacaagtgt

SEQ ID NO: 65138 - DNA, 20 bp, synthetic construct
  misc_feature 1..20: note = chemically synthesized
  source 1..20: mol_type = other DNA
aatgactattttgagtcagc

SEQ ID NO: 65139 - DNA, 20 bp, synthetic construct
  misc_feature 1..20: note = chemically synthesized
  source 1..20: mol_type = other DNA
tattctcccttcaattttat

SEQ ID NO: 65140 - DNA, 20 bp, synthetic construct
  misc_feature 1..20: note = chemically synthesized
  source 1..20: mol_type = other DNA
gatccataatgctgaaaact

SEQ ID NO: 65141 - DNA, 20 bp, synthetic construct
  misc_feature 1..20: note = chemically synthesized
  source 1..20: mol_type = other DNA
caggaaagatctgttagcct

SEQ ID NO: 65142 - DNA, 20 bp, synthetic construct
  misc_feature 1..20: note = chemically synthesized
  source 1..20: mol_type = other DNA
taaggagatgggccctgtct

SEQ ID NO: 65143 - DNA, 20 bp, synthetic construct
  misc_feature 1..20: note = chemically synthesized
  source 1..20: mol_type = other DNA
tctaagcctttcaactcgat

SEQ ID NO: 65144 - DNA, 20 bp, synthetic construct
  misc_feature 1..20: note = chemically synthesized
  source 1..20: mol_type = other DNA
gaattttttgtctactcttc

SEQ ID NO: 65145 - DNA, 20 bp, synthetic construct
  misc_feature 1..20: note = chemically synthesized
  source 1..20: mol_type = other DNA
tgaatgtattacaataaaaa

SEQ ID NO: 65146 - DNA, 20 bp, synthetic construct
  misc_feature 1..20: note = chemically synthesized
  source 1..20: mol_type = other DNA
taacaaagctgttttggaat

SEQ ID NO: 65147 - DNA, 20 bp, synthetic construct
  misc_feature 1..20: note = chemically synthesized
  source 1..20: mol_type = other DNA
aaaaagctataaacatctac

SEQ ID NO: 65148 - DNA, 20 bp, synthetic construct
  misc_feature 1..20: note = chemically synthesized
  source 1..20: mol_type = other DNA
catctacatagaaaaatgag

SEQ ID NO: 65149 - DNA, 20 bp, synthetic construct
  misc_feature 1..20: note = chemically synthesized
  source 1..20: mol_type = other DNA
gccaatccaagggtcccaga

SEQ ID NO: 65150 - DNA, 20 bp, synthetic construct
  misc_feature 1..20: note = chemically synthesized
  source 1..20: mol_type = other DNA
tccttaaatactctttcaaa

SEQ ID NO: 65151 - DNA, 20 bp, synthetic construct
  misc_feature 1..20: note = chemically synthesized
  source 1..20: mol_type = other DNA
gggattttcaggtgtttcct

SEQ ID NO: 65152 - DNA, 20 bp, synthetic construct
  misc_feature 1..20: note = chemically synthesized
  source 1..20: mol_type = other DNA
gaggagcatagtctttattc

SEQ ID NO: 65153 - DNA, 20 bp, synthetic construct
  misc_feature 1..20: note = chemically synthesized
  source 1..20: mol_type = other DNA
atgtaaatagtgtgtaatat

SEQ ID NO: 65154 - DNA, 20 bp, synthetic construct
  misc_feature 1..20: note = chemically synthesized
  source 1..20: mol_type = other DNA
tagcatgctaaagggagccc

SEQ ID NO: 65155 - DNA, 20 bp, synthetic construct
  misc_feature 1..20: note = chemically synthesized
  source 1..20: mol_type = other DNA
gggcaggggaaaatttctca

SEQ ID NO: 65156 - DNA, 20 bp, synthetic construct
  misc_feature 1..20: note = chemically synthesized
  source 1..20: mol_type = other DNA
gtggggtacagtttataaag

SEQ ID NO: 65157 - DNA, 20 bp, synthetic construct
  misc_feature 1..20: note = chemically synthesized
  source 1..20: mol_type = other DNA
aatacacaggctatggggaa

SEQ ID NO: 65158 - DNA, 20 bp, synthetic construct
  misc_feature 1..20: note = chemically synthesized
  source 1..20: mol_type = other DNA
aatatgacaaactcaaatca

SEQ ID NO: 65159 - DNA, 20 bp, synthetic construct
  misc_feature 1..20: note = chemically synthesized
  source 1..20: mol_type = other DNA
tcaagagaattctagcagag

SEQ ID NO: 65160 - DNA, 20 bp, synthetic construct
  misc_feature 1..20: note = chemically synthesized
  source 1..20: mol_type = other DNA
agccagaataacaaaacatg

SEQ ID NO: 65161 - DNA, 20 bp, synthetic construct
  misc_feature 1..20: note = chemically synthesized
  source 1..20: mol_type = other DNA
tgtgagaaaattgaacacaa

SEQ ID NO: 65162 - DNA, 20 bp, synthetic construct
  misc_feature 1..20: note = chemically synthesized
  source 1..20: mol_type = other DNA
ttgtccttgcgatagtttgc

SEQ ID NO: 65163 - DNA, 20 bp, synthetic construct
  misc_feature 1..20: note = chemically synthesized
  source 1..20: mol_type = other DNA
aaaccagaacacagctaatg

SEQ ID NO: 65164 - DNA, 20 bp, synthetic construct
  misc_feature 1..20: note = chemically synthesized
  source 1..20: mol_type = other DNA
tcccatgaccttcttaagga

SEQ ID NO: 65165 - DNA, 20 bp, synthetic construct
  misc_feature 1..20: note = chemically synthesized
  source 1..20: mol_type = other DNA
ataaggataagcacaaagtc

SEQ ID NO: 65166 - DNA, 20 bp, synthetic construct
  misc_feature 1..20: note = chemically synthesized
  source 1..20: mol_type = other DNA
tttgatcacatctggtgcag

SEQ ID NO: 65167 - DNA, 20 bp, synthetic construct
  misc_feature 1..20: note = chemically synthesized
  source 1..20: mol_type = other DNA
cttcaccaccttagcattgg

SEQ ID NO: 65168 - DNA, 20 bp, synthetic construct
  misc_feature 1..20: note = chemically synthesized
  source 1..20: mol_type = other DNA
cagacctggaaagccagtga

SEQ ID NO: 65169 - DNA, 20 bp, synthetic construct
  misc_feature 1..20: note = chemically synthesized
  source 1..20: mol_type = other DNA
gtgacatggtggatacctga

SEQ ID NO: 65170 - DNA, 20 bp, synthetic construct
  misc_feature 1..20: note = chemically synthesized
  source 1..20: mol_type = other DNA
agtcacattaaaaggagtaa

SEQ ID NO: 65171 - DNA, 20 bp, synthetic construct
  misc_feature 1..20: note = chemically synthesized
  source 1..20: mol_type = other DNA
aaaatcgagtgtttacactt

SEQ ID NO: 65172 - DNA, 20 bp, synthetic construct
  misc_feature 1..20: note = chemically synthesized
  source 1..20: mol_type = other DNA
gtgcttcatcaaaaaaatgt

SEQ ID NO: 65173 - DNA, 20 bp, synthetic construct
  misc_feature 1..20: note = chemically synthesized
  source 1..20: mol_type = other DNA
aaactaacacatatattgga

SEQ ID NO: 65174 - DNA, 20 bp, synthetic construct
  misc_feature 1..20: note = chemically synthesized
  source 1..20: mol_type = other DNA
agagttttcaccaagtagta

SEQ ID NO: 65175 - DNA, 20 bp, synthetic construct
  misc_feature 1..20: note = chemically synthesized
  source 1..20: mol_type = other DNA
agccagacatattcaaaatt

SEQ ID NO: 65176 - DNA, 20 bp, synthetic construct
  misc_feature 1..20: note = chemically synthesized
  source 1..20: mol_type = other DNA
ctacttgggaaactgaggca

SEQ ID NO: 65177 - DNA, 20 bp, synthetic construct
  misc_feature 1..20: note = chemically synthesized
  source 1..20: mol_type = other DNA
ctcaaaaaaaaaaaaaaaaa

SEQ ID NO: 65178 - DNA, 20 bp, synthetic construct
  misc_feature 1..20: note = chemically synthesized
  source 1..20: mol_type = other DNA
aaaaaaaaaaaaagaaaaaa

SEQ ID NO: 65179 - DNA, 20 bp, synthetic construct
  misc_feature 1..20: note = chemically synthesized
  source 1..20: mol_type = other DNA
gcctatgagagtgcagacct

SEQ ID NO: 65180 - DNA, 20 bp, synthetic construct
  misc_feature 1..20: note = chemically synthesized
  source 1..20: mol_type = other DNA
gcagtaatttatgtataaca

SEQ ID NO: 65181 - DNA, 20 bp, synthetic construct
  misc_feature 1..20: note = chemically synthesized
  source 1..20: mol_type = other DNA
tgtatcatttatctattatc

SEQ ID NO: 65182 - DNA, 20 bp, synthetic construct
  misc_feature 1..20: note = chemically synthesized
  source 1..20: mol_type = other DNA
caaagtagaggaggaagaag

SEQ ID NO: 65183 - DNA, 20 bp, synthetic construct
  misc_feature 1..20: note = chemically synthesized
  source 1..20: mol_type = other DNA
aacataggtggatgtaagat

SEQ ID NO: 65184 - DNA, 20 bp, synthetic construct
  misc_feature 1..20: note = chemically synthesized
  source 1..20: mol_type = other DNA
tttcctctcctgcctcttcc

SEQ ID NO: 65185 - DNA, 20 bp, synthetic construct
  misc_feature 1..20: note = chemically synthesized
  source 1..20: mol_type = other DNA
gttggaggttgatacacccg

SEQ ID NO: 65186 - DNA, 20 bp, synthetic construct
  misc_feature 1..20: note = chemically synthesized
  source 1..20: mol_type = other DNA
tgcaacaactatgtggtgga

SEQ ID NO: 65187 - DNA, 20 bp, synthetic construct
  misc_feature 1..20: note = chemically synthesized
  source 1..20: mol_type = other DNA
ctagagcctgacctggggta

SEQ ID NO: 65188 - DNA, 20 bp, synthetic construct
  misc_feature 1..20: note = chemically synthesized
  source 1..20: mol_type = other DNA
ggtaattgctgagtcctggt

SEQ ID NO: 65189 - DNA, 20 bp, synthetic construct
  misc_feature 1..20: note = chemically synthesized
  source 1..20: mol_type = other DNA
gccccatattttctttgcaa

SEQ ID NO: 65190 - DNA, 20 bp, synthetic construct
  misc_feature 1..20: note = chemically synthesized
  source 1..20: mol_type = other DNA
attttctttgcaaaaagaaa

SEQ ID NO: 65191 - DNA, 20 bp, synthetic construct
  misc_feature 1..20: note = chemically synthesized
  source 1..20: mol_type = other DNA
gtctcttggtaagtcttgcc

SEQ ID NO: 65192 - DNA, 20 bp, synthetic construct
  misc_feature 1..20: note = chemically synthesized
  source 1..20: mol_type = other DNA
caatcatctcatagtctgtc

SEQ ID NO: 65193 - DNA, 20 bp, synthetic construct
  misc_feature 1..20: note = chemically synthesized
  source 1..20: mol_type = other DNA
ctgtcagagaaataaggatc

SEQ ID NO: 65194 - DNA, 20 bp, synthetic construct
  misc_feature 1..20: note = chemically synthesized
  source 1..20: mol_type = other DNA
ataggtcttcctaaatgtaa

SEQ ID NO: 65195 - DNA, 20 bp, synthetic construct
  misc_feature 1..20: note = chemically synthesized
  source 1..20: mol_type = other DNA
ttggtggaggataagcctcc

SEQ ID NO: 65196 - DNA, 20 bp, synthetic construct
  misc_feature 1..20: note = chemically synthesized
  source 1..20: mol_type = other DNA
atcacataacacaatattta

SEQ ID NO: 65197 - DNA, 20 bp, synthetic construct
  misc_feature 1..20: note = chemically synthesized
  source 1..20: mol_type = other DNA
atactcaggcagccacatta

SEQ ID NO: 65198 - DNA, 20 bp, synthetic construct
  misc_feature 1..20: note = chemically synthesized
  source 1..20: mol_type = other DNA
ctgacccttccccaaatcag

SEQ ID NO: 65199 - DNA, 20 bp, synthetic construct
  misc_feature 1..20: note = chemically synthesized
  source 1..20: mol_type = other DNA
catgtgcatgtatcttagta

SEQ ID NO: 65200 - DNA, 20 bp, synthetic construct
  misc_feature 1..20: note = chemically synthesized
  source 1..20: mol_type = other DNA
ctttgtcagatgggtagatt

SEQ ID NO: 65201 - DNA, 20 bp, synthetic construct
  misc_feature 1..20: note = chemically synthesized
  source 1..20: mol_type = other DNA
ttctaagattggcttagtct

SEQ ID NO: 65202 - DNA, 20 bp, synthetic construct
  misc_feature 1..20: note = chemically synthesized
  source 1..20: mol_type = other DNA
caagtatattattatttgaa

SEQ ID NO: 65203 - DNA, 20 bp, synthetic construct
  misc_feature 1..20: note = chemically synthesized
  source 1..20: mol_type = other DNA
aggaagacttgtaggagatc

SEQ ID NO: 65204 - DNA, 20 bp, synthetic construct
  misc_feature 1..20: note = chemically synthesized
  source 1..20: mol_type = other DNA
attgttacaatgggttttga

SEQ ID NO: 65205 - DNA, 20 bp, synthetic construct
  misc_feature 1..20: note = chemically synthesized
  source 1..20: mol_type = other DNA
gtttcacacttactttcaag

SEQ ID NO: 65206 - DNA, 20 bp, synthetic construct
  misc_feature 1..20: note = chemically synthesized
  source 1..20: mol_type = other DNA
taggttccatttcctgtatt

SEQ ID NO: 65207 - DNA, 20 bp, synthetic construct
  misc_feature 1..20: note = chemically synthesized
  source 1..20: mol_type = other DNA
atatttttggagtagaagga

SEQ ID NO: 65208 - DNA, 20 bp, synthetic construct
  misc_feature 1..20: note = chemically synthesized
  source 1..20: mol_type = other DNA
agtagaaggaggagaaattt

SEQ ID NO: 65209 - DNA, 20 bp, synthetic construct
  misc_feature 1..20: note = chemically synthesized
  source 1..20: mol_type = other DNA
aggaggagaaattttcagaa

SEQ ID NO: 65210 - DNA, 20 bp, synthetic construct
  misc_feature 1..20: note = chemically synthesized
  source 1..20: mol_type = other DNA
tttatattaaatttccccat

SEQ ID NO: 65211 - DNA, 20 bp, synthetic construct
  misc_feature 1..20: note = chemically synthesized
  source 1..20: mol_type = other DNA
caattacatctcttaatgaa

SEQ ID NO: 65212 - DNA, 20 bp, synthetic construct
  misc_feature 1..20: note = chemically synthesized
  source 1..20: mol_type = other DNA
tgagttgagaacaacaacct

SEQ ID NO: 65213 - DNA, 20 bp, synthetic construct
  misc_feature 1..20: note = chemically synthesized
  source 1..20: mol_type = other DNA
agaacaacaacctgcagaaa

SEQ ID NO: 65214 - DNA, 20 bp, synthetic construct
  misc_feature 1..20: note = chemically synthesized
  source 1..20: mol_type = other DNA
atcagacaattttaatcaaa

SEQ ID NO: 65215 - DNA, 20 bp, synthetic construct
  misc_feature 1..20: note = chemically synthesized
  source 1..20: mol_type = other DNA
tttacacttattacatggaa

SEQ ID NO: 65216 - DNA, 20 bp, synthetic construct
  misc_feature 1..20: note = chemically synthesized
  source 1..20: mol_type = other DNA
catggaatcagaatgtatgt

SEQ ID NO: 65217 - DNA, 20 bp, synthetic construct
  misc_feature 1..20: note = chemically synthesized
  source 1..20: mol_type = other DNA
caatcattcttcaaaaaaat

SEQ ID NO: 65218 - DNA, 20 bp, synthetic construct
  misc_feature 1..20: note = chemically synthesized
  source 1..20: mol_type = other DNA
tggagctagcaactagggta

SEQ ID NO: 65219 - DNA, 20 bp, synthetic construct
  misc_feature 1..20: note = chemically synthesized
  source 1..20: mol_type = other DNA
tagcaactagggtagtagaa

SEQ ID NO: 65220 - DNA, 20 bp, synthetic construct
  misc_feature 1..20: note = chemically synthesized
  source 1..20: mol_type = other DNA
ttgtttgtatggacacctgc

SEQ ID NO: 65221 - DNA, 20 bp, synthetic construct
  misc_feature 1..20: note = chemically synthesized
  source 1..20: mol_type = other DNA
aataatttagtggaaagctt

SEQ ID NO: 65222 - DNA, 20 bp, synthetic construct
  misc_feature 1..20: note = chemically synthesized
  source 1..20: mol_type = other DNA
tctatgggtagtaaaaaggt

SEQ ID NO: 65223 - DNA, 20 bp, synthetic construct
  misc_feature 1..20: note = chemically synthesized
  source 1..20: mol_type = other DNA
aggattcattagtggaggga

SEQ ID NO: 65224 - DNA, 20 bp, synthetic construct
  misc_feature 1..20: note = chemically synthesized
  source 1..20: mol_type = other DNA
ttaatgacatcctggtgaag

SEQ ID NO: 65225 - DNA, 20 bp, synthetic construct
  misc_feature 1..20: note = chemically synthesized
  source 1..20: mol_type = other DNA
aagaacatgggagtgacaat

SEQ ID NO: 65226 - DNA, 20 bp, synthetic construct
  misc_feature 1..20: note = chemically synthesized
  source 1..20: mol_type = other DNA
acggtcataggccatggcaa

SEQ ID NO: 65227 - DNA, 20 bp, synthetic construct
  misc_feature 1..20: note = chemically synthesized
  source 1..20: mol_type = other DNA
ggcaagcagaatgccagact

SEQ ID NO: 65228 - DNA, 20 bp, synthetic construct
  misc_feature 1..20: note = chemically synthesized
  source 1..20: mol_type = other DNA
gtctgtggcagccagcatgg

SEQ ID NO: 65229 - DNA, 20 bp, synthetic construct
  misc_feature 1..20: note = chemically synthesized
  source 1..20: mol_type = other DNA
aggatggatatatacatgaa

SEQ ID NO: 65230 - DNA, 20 bp, synthetic construct
  misc_feature 1..20: note = chemically synthesized
  source 1..20: mol_type = other DNA
cgacatcctgggtttatata

SEQ ID NO: 65231 - DNA, 20 bp, synthetic construct
  misc_feature 1..20: note = chemically synthesized
  source 1..20: mol_type = other DNA
tcacttcgactatatcattc

SEQ ID NO: 65232 - DNA, 20 bp, synthetic construct
  misc_feature 1..20: note = chemically synthesized
  source 1..20: mol_type = other DNA
tatgcatttaagcattctct

SEQ ID NO: 65233 - DNA, 20 bp, synthetic construct
  misc_feature 1..20: note = chemically synthesized
  source 1..20: mol_type = other DNA
cccttaactatgcagatttt

SEQ ID NO: 65234 - DNA, 20 bp, synthetic construct
  misc_feature 1..20: note = chemically synthesized
  source 1..20: mol_type = other DNA
tggggcattcaaggggattt

SEQ ID NO: 65235 - DNA, 20 bp, synthetic construct
  misc_feature 1..20: note = chemically synthesized
  source 1..20: mol_type = other DNA
cagctaaagtctcaacagcc

SEQ ID NO: 65236 - DNA, 20 bp, synthetic construct
  misc_feature 1..20: note = chemically synthesized
  source 1..20: mol_type = other DNA
taaagtctcaacagcctaag

SEQ ID NO: 65237 - DNA, 20 bp, synthetic construct
  misc_feature 1..20: note = chemically synthesized
  source 1..20: mol_type = other DNA
taagaaagaaaagtgtggga

SEQ ID NO: 65238 - DNA, 20 bp, synthetic construct
  misc_feature 1..20: note = chemically synthesized
  source 1..20: mol_type = other DNA
tagctaaggagcagtcagat

SEQ ID NO: 65239 - DNA, 20 bp, synthetic construct
  misc_feature 1..20: note = chemically synthesized
  source 1..20: mol_type = other DNA
ttagtgtgaattaccctctt

SEQ ID NO: 65240 - DNA, 20 bp, synthetic construct
  misc_feature 1..20: note = chemically synthesized
  source 1..20: mol_type = other DNA
aggcctactgaagtaattcc

SEQ ID NO: 65241 - DNA, 20 bp, synthetic construct
  misc_feature 1..20: note = chemically synthesized
  source 1..20: mol_type = other DNA
tgaactgagacctcaataca

SEQ ID NO: 65242 - DNA, 20 bp, synthetic construct
  misc_feature 1..20: note = chemically synthesized
  source 1..20: mol_type = other DNA
tcagcatgactggcatttga

SEQ ID NO: 65243 - DNA, 20 bp, synthetic construct
  misc_feature 1..20: note = chemically synthesized
  source 1..20: mol_type = other DNA
gaagaagactaagcaagaga

SEQ ID NO: 65244 - DNA, 20 bp, synthetic construct
  misc_feature 1..20: note = chemically synthesized
  source 1..20: mol_type = other DNA
gagacaagaaaagagatgag

SEQ ID NO: 65245 - DNA, 20 bp, synthetic construct
  misc_feature 1..20: note = chemically synthesized
  source 1..20: mol_type = other DNA
aagcaggggaaatgaaaaaa

SEQ ID NO: 65246 - DNA, 20 bp, synthetic construct
  misc_feature 1..20: note = chemically synthesized
  source 1..20: mol_type = other DNA
gaaatgaaaaaaagagaaaa

SEQ ID NO: 65247 - DNA, 20 bp, synthetic construct
  misc_feature 1..20: note = chemically synthesized
  source 1..20: mol_type = other DNA
gatttctgtttgaacaaatg

SEQ ID NO: 65248 - DNA, 20 bp, synthetic construct
  misc_feature 1..20: note = chemically synthesized
  source 1..20: mol_type = other DNA
ggcaacaactcagcactttg

SEQ ID NO: 65249 - DNA, 20 bp, synthetic construct
  misc_feature 1..20: note = chemically synthesized
  source 1..20: mol_type = other DNA
ctaggactgagagacataaa

SEQ ID NO: 65250 - DNA, 20 bp, synthetic construct
  misc_feature 1..20: note = chemically synthesized
  source 1..20: mol_type = other DNA
gtgaaaaattccttcttatc

SEQ ID NO: 65251 - DNA, 20 bp, synthetic construct
  misc_feature 1..20: note = chemically synthesized
  source 1..20: mol_type = other DNA
gtttcctccttctccattcc

SEQ ID NO: 65252 - DNA, 20 bp, synthetic construct
  misc_feature 1..20: note = chemically synthesized
  source 1..20: mol_type = other DNA
tcgtggctcttggtttctga

SEQ ID NO: 65253 - DNA, 20 bp, synthetic construct
  misc_feature 1..20: note = chemically synthesized
  source 1..20: mol_type = other DNA
aagattctataatggaacac

SEQ ID NO: 65254 - DNA, 20 bp, synthetic construct
  misc_feature 1..20: note = chemically synthesized
  source 1..20: mol_type = other DNA
tgtttaaaaagtaaaatgta

SEQ ID NO: 65255 - DNA, 20 bp, synthetic construct
  misc_feature 1..20: note = chemically synthesized
  source 1..20: mol_type = other DNA
ggtgccttcctgttcatctt

SEQ ID NO: 65256 - DNA, 20 bp, synthetic construct
  misc_feature 1..20: note = chemically synthesized
  source 1..20: mol_type = other DNA
tttatagccaacttggatct

SEQ ID NO: 65257 - DNA, 20 bp, synthetic construct
  misc_feature 1..20: note = chemically synthesized
  source 1..20: mol_type = other DNA
atctttcccagtttatctca

SEQ ID NO: 65258 - DNA, 20 bp, synthetic construct
  misc_feature 1..20: note = chemically synthesized
  source 1..20: mol_type = other DNA
tttcctgcttggtttagatc

SEQ ID NO: 65259 - DNA, 20 bp, synthetic construct
  misc_feature 1..20: note = chemically synthesized
  source 1..20: mol_type = other DNA
aggctgagggcacaaataat

SEQ ID NO: 65260 - DNA, 20 bp, synthetic construct
  misc_feature 1..20: note = chemically synthesized
  source 1..20: mol_type = other DNA
agatacatgactatggaact

SEQ ID NO: 65261 - DNA, 20 bp, synthetic construct
  misc_feature 1..20: note = chemically synthesized
  source 1..20: mol_type = other DNA
tcgaagctgatttcttagca

SEQ ID NO: 65262 - DNA, 20 bp, synthetic construct
  misc_feature 1..20: note = chemically synthesized
  source 1..20: mol_type = other DNA
agtccagataagtgccaaat

SEQ ID NO: 65263 - DNA, 20 bp, synthetic construct
  misc_feature 1..20: note = chemically synthesized
  source 1..20: mol_type = other DNA
atcagaggttcaaatacttt

SEQ ID NO: 65264 - DNA, 20 bp, synthetic construct
  misc_feature 1..20: note = chemically synthesized
  source 1..20: mol_type = other DNA
tgcactcaatattaaccatc

SEQ ID NO: 65265 - DNA, 20 bp, synthetic construct
  misc_feature 1..20: note = chemically synthesized
  source 1..20: mol_type = other DNA
ggagatactaagtgcttgag

SEQ ID NO: 65266 - DNA, 20 bp, synthetic construct
  misc_feature 1..20: note = chemically synthesized
  source 1..20: mol_type = other DNA
aaaaagccaaagggaaggtg

SEQ ID NO: 65267 - DNA, 20 bp, synthetic construct
  misc_feature 1..20: note = chemically synthesized
  source 1..20: mol_type = other DNA
tgcggcagagtttgagactt

SEQ ID NO: 65268 - DNA, 20 bp, synthetic construct
  misc_feature 1..20: note = chemically synthesized
  source 1..20: mol_type = other DNA
agtccaatacttgacacacg

SEQ ID NO: 65269 - DNA, 20 bp, synthetic construct
  misc_feature 1..20: note = chemically synthesized
  source 1..20: mol_type = other DNA
taggtatatttaaaatttgc

SEQ ID NO: 65270 - DNA, 20 bp, synthetic construct
  misc_feature 1..20: note = chemically synthesized
  source 1..20: mol_type = other DNA
tcacattttatctgctgatt

SEQ ID NO: 65271 - DNA, 20 bp, synthetic construct
  misc_feature 1..20: note = chemically synthesized
  source 1..20: mol_type = other DNA
tatctgttcccaaggcttcc

SEQ ID NO: 65272 - DNA, 20 bp, synthetic construct
  misc_feature 1..20: note = chemically synthesized
  source 1..20: mol_type = other DNA
aatcctgacatgtactcact

SEQ ID NO: 65273 - DNA, 20 bp, synthetic construct
  misc_feature 1..20: note = chemically synthesized
  source 1..20: mol_type = other DNA
gacatgtactcactagagaa

SEQ ID NO: 65274 - DNA, 20 bp, synthetic construct
  misc_feature 1..20: note = chemically synthesized
  source 1..20: mol_type = other DNA
tttccccttactttgtgtca

SEQ ID NO: 65275 - DNA, 20 bp, synthetic construct
  misc_feature 1..20: note = chemically synthesized
  source 1..20: mol_type = other DNA
tcaagagaatgactgagaag

SEQ ID NO: 65276 - DNA, 20 bp, synthetic construct
  misc_feature 1..20: note = chemically synthesized
  source 1..20: mol_type = other DNA
ctttcccaagatcattattg

SEQ ID NO: 65277 - DNA, 20 bp, synthetic construct
  misc_feature 1..20: note = chemically synthesized
  source 1..20: mol_type = other DNA
tggatgcattcttttcatgg

SEQ ID NO: 65278 - DNA, 20 bp, synthetic construct
  misc_feature 1..20: note = chemically synthesized
  source 1..20: mol_type = other DNA
tgcctgcaccagctgaaatc

SEQ ID NO: 65279 - DNA, 20 bp, synthetic construct
  misc_feature 1..20: note = chemically synthesized
  source 1..20: mol_type = other DNA
attttccctccaggaatatt

SEQ ID NO: 65280 - DNA, 20 bp, synthetic construct
  misc_feature 1..20: note = chemically synthesized
  source 1..20: mol_type = other DNA
ggtgaacatcttatgaacag

SEQ ID NO: 65281 - DNA, 20 bp, synthetic construct
  misc_feature 1..20: note = chemically synthesized
  source 1..20: mol_type = other DNA
tcatgggcattggttctgga

SEQ ID NO: 65282 - DNA, 20 bp, synthetic construct
  misc_feature 1..20: note = chemically synthesized
  source 1..20: mol_type = other DNA
tatggagctggctgctgttt

SEQ ID NO: 65283 - DNA, 20 bp, synthetic construct
  misc_feature 1..20: note = chemically synthesized
  source 1..20: mol_type = other DNA
gtttctagaaaattgcacgt

SEQ ID NO: 65284 - DNA, 20 bp, synthetic construct
  misc_feature 1..20: note = chemically synthesized
  source 1..20: mol_type = other DNA
gtctagggaaagtatctcta

SEQ ID NO: 65285 - DNA, 20 bp, synthetic construct
  misc_feature 1..20: note = chemically synthesized
  source 1..20: mol_type = other DNA
taagttttaaattaatttta

SEQ ID NO: 65286 - DNA, 20 bp, synthetic construct
  misc_feature 1..20: note = chemically synthesized
  source 1..20: mol_type = other DNA
ctgcccacctactcttcatc

SEQ ID NO: 65287 - DNA, 20 bp, synthetic construct
  misc_feature 1..20: note = chemically synthesized
  source 1..20: mol_type = other DNA
ttgggatgtataaataacac

SEQ ID NO: 65288 - DNA, 20 bp, synthetic construct
  misc_feature 1..20: note = chemically synthesized
  source 1..20: mol_type = other DNA
agggggatctaagccacatc

SEQ ID NO: 65289 - DNA, 20 bp, synthetic construct
  misc_feature 1..20: note = chemically synthesized
  source 1..20: mol_type = other DNA
catcaagagggcatctttgc

SEQ ID NO: 65290 - DNA, 20 bp, synthetic construct
  misc_feature 1..20: note = chemically synthesized
  source 1..20: mol_type = other DNA
agacaaaagacaaacagttt

SEQ ID NO: 65291 - DNA, 20 bp, synthetic construct
  misc_feature 1..20: note = chemically synthesized
  source 1..20: mol_type = other DNA
gaaggtgtgaaaatggttgg

SEQ ID NO: 65292 - DNA, 20 bp, synthetic construct
  misc_feature 1..20: note = chemically synthesized
  source 1..20: mol_type = other DNA
ctggaccaatttcctgactt

SEQ ID NO: 65293 - DNA, 20 bp, synthetic construct
  misc_feature 1..20: note = chemically synthesized
  source 1..20: mol_type = other DNA
agcctctgtctaaggcagaa

SEQ ID NO: 65294 - DNA, 20 bp, synthetic construct
  misc_feature 1..20: note = chemically synthesized
  source 1..20: mol_type = other DNA
tctaaggcagaagtagaatt

SEQ ID NO: 65295 - DNA, 20 bp, synthetic construct
  misc_feature 1..20: note = chemically synthesized
  source 1..20: mol_type = other DNA
agtagaatttcagaaagcat

SEQ ID NO: 65296 - DNA, 20 bp, synthetic construct
  misc_feature 1..20: note = chemically synthesized
  source 1..20: mol_type = other DNA
aagagtttaatggtgactta

SEQ ID NO: 65297 - DNA, 20 bp, synthetic construct
  misc_feature 1..20: note = chemically synthesized
  source 1..20: mol_type = other DNA
gttagaaggaaaactaacaa

SEQ ID NO: 65298 - DNA, 20 bp, synthetic construct
  misc_feature 1..20: note = chemically synthesized
  source 1..20: mol_type = other DNA
caaagatggggaaaaacaga

SEQ ID NO: 65299 - DNA, 20 bp, synthetic construct
  misc_feature 1..20: note = chemically synthesized
  source 1..20: mol_type = other DNA
gcaacggtacaaagctggac

SEQ ID NO: 65300 - DNA, 20 bp, synthetic construct
  misc_feature 1..20: note = chemically synthesized
  source 1..20: mol_type = other DNA
taaattagactaatggctaa

SEQ ID NO: 65301 - DNA, 20 bp, synthetic construct
  misc_feature 1..20: note = chemically synthesized
  source 1..20: mol_type = other DNA
gtagctgattcgatcaactg

SEQ ID NO: 65302 - DNA, 20 bp, synthetic construct
  misc_feature 1..20: note = chemically synthesized
  source 1..20: mol_type = other DNA
tgaagcaagaagagaagttt

SEQ ID NO: 65303 - DNA, 20 bp, synthetic construct
  misc_feature 1..20: note = chemically synthesized
  source 1..20: mol_type = other DNA
agaagagaagtttagagaaa

SEQ ID NO: 65304 - DNA, 20 bp, synthetic construct
  misc_feature 1..20: note = chemically synthesized
  source 1..20: mol_type = other DNA
gtttagagaaaaaagaataa

SEQ ID NO: 65305 - DNA, 20 bp, synthetic construct
  misc_feature 1..20: note = chemically synthesized
  source 1..20: mol_type = other DNA
aaagaaatgaacaaagcctc

SEQ ID NO: 65306 - DNA, 20 bp, synthetic construct
  misc_feature 1..20: note = chemically synthesized
  source 1..20: mol_type = other DNA
ggtgtacctgaaagtgacgg

SEQ ID NO: 65307 - DNA, 20 bp, synthetic construct
  misc_feature 1..20: note = chemically synthesized
  source 1..20: mol_type = other DNA
aaaatgttaagggtagccag

SEQ ID NO: 65308 - DNA, 20 bp, synthetic construct
  misc_feature 1..20: note = chemically synthesized
  source 1..20: mol_type = other DNA
tacccacaaagggaagccca

SEQ ID NO: 65309 - DNA, 20 bp, synthetic construct
  misc_feature 1..20: note = chemically synthesized
  source 1..20: mol_type = other DNA
gaataacagcagatctctca

SEQ ID NO: 65310 - DNA, 20 bp, synthetic construct
  misc_feature 1..20: note = chemically synthesized
  source 1..20: mol_type = other DNA
atattcaacatccttaaagg

SEQ ID NO: 65311 - DNA, 20 bp, synthetic construct
  misc_feature 1..20: note = chemically synthesized
  source 1..20: mol_type = other DNA
taaaggaaagaattttcaac

SEQ ID NO: 65312 - DNA, 20 bp, synthetic construct
  misc_feature 1..20: note = chemically synthesized
  source 1..20: mol_type = other DNA
aactaagcttcataagtgaa

SEQ ID NO: 65313 - DNA, 20 bp, synthetic construct
  misc_feature 1..20: note = chemically synthesized
  source 1..20: mol_type = other DNA
gtaaagaccattgaggctag

SEQ ID NO: 65314 - DNA, 20 bp, synthetic construct
  misc_feature 1..20: note = chemically synthesized
  source 1..20: mol_type = other DNA
agggatggaggaagatctac

SEQ ID NO: 65315 - DNA, 20 bp, synthetic construct
  misc_feature 1..20: note = chemically synthesized
  source 1..20: mol_type = other DNA
acattagacagatcaacgag

SEQ ID NO: 65316 - DNA, 20 bp, synthetic construct
  misc_feature 1..20: note = chemically synthesized
  source 1..20: mol_type = other DNA
gaactctccaccccaaatca

SEQ ID NO: 65317 - DNA, 20 bp, synthetic construct
  misc_feature 1..20: note = chemically synthesized
  source 1..20: mol_type = other DNA
tcctcagcaaatgtaaaaga

SEQ ID NO: 65318 - DNA, 20 bp, synthetic construct
  misc_feature 1..20: note = chemically synthesized
  source 1..20: mol_type = other DNA
atcaaactagaactcaggat

SEQ ID NO: 65319 - DNA, 20 bp, synthetic construct
  misc_feature 1..20: note = chemically synthesized
  source 1..20: mol_type = other DNA
gggttcataacaaaatgaag

SEQ ID NO: 65320 - DNA, 20 bp, synthetic construct
  misc_feature 1..20: note = chemically synthesized
  source 1..20: mol_type = other DNA
gagaacaaagacacaacata

SEQ ID NO: 65321 - DNA, 20 bp, synthetic construct
  misc_feature 1..20: note = chemically synthesized
  source 1..20: mol_type = other DNA
tatagcactaaacgcccaga

SEQ ID NO: 65322 - DNA, 20 bp, synthetic construct
  misc_feature 1..20: note = chemically synthesized
  source 1..20: mol_type = other DNA
attcaaatgctagcagaagg

SEQ ID NO: 65323 - DNA, 20 bp, synthetic construct
  misc_feature 1..20: note = chemically synthesized
  source 1..20: mol_type = other DNA
ctgctagcaagactaataaa

SEQ ID NO: 65324 - DNA, 20 bp, synthetic construct
  misc_feature 1..20: note = chemically synthesized
  source 1..20: mol_type = other DNA
ctaataaagaagaaaagaga

SEQ ID NO: 65325 - DNA, 20 bp, synthetic construct
  misc_feature 1..20: note = chemically synthesized
  source 1..20: mol_type = other DNA
ggtatatcaccaccgatccc

SEQ ID NO: 65326 - DNA, 20 bp, synthetic construct
  misc_feature 1..20: note = chemically synthesized
  source 1..20: mol_type = other DNA
cagaaatacaaaccaccatc

SEQ ID NO: 65327 - DNA, 20 bp, synthetic construct
  misc_feature 1..20: note = chemically synthesized
  source 1..20: mol_type = other DNA
aacacctctacacaaataaa

SEQ ID NO: 65328 - DNA, 20 bp, synthetic construct
  misc_feature 1..20: note = chemically synthesized
  source 1..20: mol_type = other DNA
caaataaactagaaaatcta

SEQ ID NO: 65329 - DNA, 20 bp, synthetic construct
  misc_feature 1..20: note = chemically synthesized
  source 1..20: mol_type = other DNA
ggcagagacacaacaaaaaa

SEQ ID NO: 65330 - DNA, 20 bp, synthetic construct
  misc_feature 1..20: note = chemically synthesized
  source 1..20: mol_type = other DNA
acatgattatctcaatagat

SEQ ID NO: 65331 - DNA, 20 bp, synthetic construct
  misc_feature 1..20: note = chemically synthesized
  source 1..20: mol_type = other DNA
cagatgacacgattgtatat

SEQ ID NO: 65332 - DNA, 20 bp, synthetic construct
  misc_feature 1..20: note = chemically synthesized
  source 1..20: mol_type = other DNA
cccattcacaattgcttcaa

SEQ ID NO: 65333 - DNA, 20 bp, synthetic construct
  misc_feature 1..20: note = chemically synthesized
  source 1..20: mol_type = other DNA
cattccatgctcatgggtag

SEQ ID NO: 65334 - DNA, 20 bp, synthetic construct
  misc_feature 1..20: note = chemically synthesized
  source 1..20: mol_type = other DNA
agctaccaatgactttcttc

SEQ ID NO: 65335 - DNA, 20 bp, synthetic construct
  misc_feature 1..20: note = chemically synthesized
  source 1..20: mol_type = other DNA
aatggaacagaacagaggcc

SEQ ID NO: 65336 - DNA, 20 bp, synthetic construct
  misc_feature 1..20: note = chemically synthesized
  source 1..20: mol_type = other DNA
ggaaaactggctaaccatac

SEQ ID NO: 65337 - DNA, 20 bp, synthetic construct
  misc_feature 1..20: note = chemically synthesized
  source 1..20: mol_type = other DNA
tgaaaaccataaaaactctg

SEQ ID NO: 65338 - DNA, 20 bp, synthetic construct
  misc_feature 1..20: note = chemically synthesized
  source 1..20: mol_type = other DNA
taaagagcttctgcacagca

SEQ ID NO: 65339 - DNA, 20 bp, synthetic construct
  misc_feature 1..20: note = chemically synthesized
  source 1..20: mol_type = other DNA
tcagagtgaacaggcaacat

SEQ ID NO: 65340 - DNA, 20 bp, synthetic construct
  misc_feature 1..20: note = chemically synthesized
  source 1..20: mol_type = other DNA
aacaggcaacatacagaatg

SEQ ID NO: 65341 - DNA, 20 bp, synthetic construct
  misc_feature 1..20: note = chemically synthesized
  source 1..20: mol_type = other DNA
atccgacaaagggctaatat

SEQ ID NO: 65342 - DNA, 20 bp, synthetic construct
  misc_feature 1..20: note = chemically synthesized
  source 1..20: mol_type = other DNA
gatgaactcaaacaaattta

SEQ ID NO: 65343 - DNA, 20 bp, synthetic construct
  misc_feature 1..20: note = chemically synthesized
  source 1..20: mol_type = other DNA
gctcatcatcactggccatc

SEQ ID NO: 65344 - DNA, 20 bp, synthetic construct
  misc_feature 1..20: note = chemically synthesized
  source 1..20: mol_type = other DNA
gagataccatctcacaccag

SEQ ID NO: 65345 - DNA, 20 bp, synthetic construct
  misc_feature 1..20: note = chemically synthesized
  source 1..20: mol_type = other DNA
gattcctcagggatctagaa

SEQ ID NO: 65346 - DNA, 20 bp, synthetic construct
  misc_feature 1..20: note = chemically synthesized
  source 1..20: mol_type = other DNA
ccaacaatgatagactggat

SEQ ID NO: 65347 - DNA, 20 bp, synthetic construct
  misc_feature 1..20: note = chemically synthesized
  source 1..20: mol_type = other DNA
aaacttaaagtataataata

SEQ ID NO: 65348 - DNA, 20 bp, synthetic construct
  misc_feature 1..20: note = chemically synthesized
  source 1..20: mol_type = other DNA
ttaaagtataataataaaag

SEQ ID NO: 65349 - DNA, 20 bp, synthetic construct
  misc_feature 1..20: note = chemically synthesized
  source 1..20: mol_type = other DNA
agtataataataaaagaaag

SEQ ID NO: 65350 - DNA, 20 bp, synthetic construct
  misc_feature 1..20: note = chemically synthesized
  source 1..20: mol_type = other DNA
taataataaaagaaagaaag

SEQ ID NO: 65351 - DNA, 20 bp, synthetic construct
  misc_feature 1..20: note = chemically synthesized
  source 1..20: mol_type = other DNA
attccctaacctagatgcag

SEQ ID NO: 65352 - DNA, 20 bp, synthetic construct
  misc_feature 1..20: note = chemically synthesized
  source 1..20: mol_type = other DNA
gttctaaatccctcaggctg

SEQ ID NO: 65353 - DNA, 20 bp, synthetic construct
  misc_feature 1..20: note = chemically synthesized
  source 1..20: mol_type = other DNA
agtcaagatgtgatggggta

SEQ ID NO: 65354 - DNA, 20 bp, synthetic construct
  misc_feature 1..20: note = chemically synthesized
  source 1..20: mol_type = other DNA
agttgaaaatccacgggaat

SEQ ID NO: 65355 - DNA, 20 bp, synthetic construct
  misc_feature 1..20: note = chemically synthesized
  source 1..20: mol_type = other DNA
aatgacaagggtatagacta

SEQ ID NO: 65356 - DNA, 20 bp, synthetic construct
  misc_feature 1..20: note = chemically synthesized
  source 1..20: mol_type = other DNA
acaagggtatagactaacag

SEQ ID NO: 65357 - DNA, 20 bp, synthetic construct
  misc_feature 1..20: note = chemically synthesized
  source 1..20: mol_type = other DNA
ctttaaattgctgcatattc

SEQ ID NO: 65358 - DNA, 20 bp, synthetic construct
  misc_feature 1..20: note = chemically synthesized
  source 1..20: mol_type = other DNA
agaaatgagcctagtatcca

SEQ ID NO: 65359 - DNA, 20 bp, synthetic construct
  misc_feature 1..20: note = chemically synthesized
  source 1..20: mol_type = other DNA
ttagttgttgagccttataa

SEQ ID NO: 65360 - DNA, 20 bp, synthetic construct
  misc_feature 1..20: note = chemically synthesized
  source 1..20: mol_type = other DNA
ggtctactggatactatgaa

SEQ ID NO: 65361 - DNA, 20 bp, synthetic construct
  misc_feature 1..20: note = chemically synthesized
  source 1..20: mol_type = other DNA
gaagtcaggaaagcaaaaga

SEQ ID NO: 65362 - DNA, 20 bp, synthetic construct
  misc_feature 1..20: note = chemically synthesized
  source 1..20: mol_type = other DNA
tgtatggcattaaaaaaaaa

SEQ ID NO: 65363 - DNA, 20 bp, synthetic construct
  misc_feature 1..20: note = chemically synthesized
  source 1..20: mol_type = other DNA
ctgagtggcattcctccatg

SEQ ID NO: 65364 - DNA, 20 bp, synthetic construct
  misc_feature 1..20: note = chemically synthesized
  source 1..20: mol_type = other DNA
ccatgagagaaagcttaagg

SEQ ID NO: 65365 - DNA, 20 bp, synthetic construct
  misc_feature 1..20: note = chemically synthesized
  source 1..20: mol_type = other DNA
caaaactcaaagttttacga

SEQ ID NO: 65366 - DNA, 20 bp, synthetic construct
  misc_feature 1..20: note = chemically synthesized
  source 1..20: mol_type = other DNA
acgaacagaatgattagtct

SEQ ID NO: 65367 - DNA, 20 bp, synthetic construct
  misc_feature 1..20: note = chemically synthesized
  source 1..20: mol_type = other DNA
ccaagtttttgagtgtgaat

SEQ ID NO: 65368 - DNA, 20 bp, synthetic construct
  misc_feature 1..20: note = chemically synthesized
  source 1..20: mol_type = other DNA
tgtctggaatcttatgtgac

SEQ ID NO: 65369 - DNA, 20 bp, synthetic construct
  misc_feature 1..20: note = chemically synthesized
  source 1..20: mol_type = other DNA
cagactatatttagtgtaca

SEQ ID NO: 65370 - DNA, 20 bp, synthetic construct
  misc_feature 1..20: note = chemically synthesized
  source 1..20: mol_type = other DNA
agaagcttgtgttaggaatg

SEQ ID NO: 65371 - DNA, 20 bp, synthetic construct
  misc_feature 1..20: note = chemically synthesized
  source 1..20: mol_type = other DNA
ggaagaggtatctcaacact

SEQ ID NO: 65372 - DNA, 20 bp, synthetic construct
  misc_feature 1..20: note = chemically synthesized
  source 1..20: mol_type = other DNA
gatatggaggcaagccaaat

SEQ ID NO: 65373 - DNA, 20 bp, synthetic construct
  misc_feature 1..20: note = chemically synthesized
  source 1..20: mol_type = other DNA
agagctgcacatctttctgt

SEQ ID NO: 65374 - DNA, 20 bp, synthetic construct
  misc_feature 1..20: note = chemically synthesized
  source 1..20: mol_type = other DNA
tggtggtgagaacagtgtta

SEQ ID NO: 65375 - DNA, 20 bp, synthetic construct
  misc_feature 1..20: note = chemically synthesized
  source 1..20: mol_type = other DNA
gagacaagatcaagcatact

SEQ ID NO: 65376 - DNA, 20 bp, synthetic construct
  misc_feature 1..20: note = chemically synthesized
  source 1..20: mol_type = other DNA
caaatgtgttgaggccctaa

SEQ ID NO: 65377 - DNA, 20 bp, synthetic construct
  misc_feature 1..20: note = chemically synthesized
  source 1..20: mol_type = other DNA
ggtgaacccagtgggcaaaa

SEQ ID NO: 65378 - DNA, 20 bp, synthetic construct
  misc_feature 1..20: note = chemically synthesized
  source 1..20: mol_type = other DNA
aggaaagtatagaagacaaa

SEQ ID NO: 65379 - DNA, 20 bp, synthetic construct
  misc_feature 1..20: note = chemically synthesized
  source 1..20: mol_type = other DNA
aagacaaaggagaaagggcc

SEQ ID NO: 65380 - DNA, 20 bp, synthetic construct
  misc_feature 1..20: note = chemically synthesized
  source 1..20: mol_type = other DNA
aagggccagagaaacagaag

SEQ ID NO: 65381 - DNA, 20 bp, synthetic construct
  misc_feature 1..20: note = chemically synthesized
  source 1..20: mol_type = other DNA
tcctctgtgggtagcctgtt

SEQ ID NO: 65382 - DNA, 20 bp, synthetic construct
  misc_feature 1..20: note = chemically synthesized
  source 1..20: mol_type = other DNA
ctacacaggaggctgaggta

SEQ ID NO: 65383 - DNA, 20 bp, synthetic construct
  misc_feature 1..20: note = chemically synthesized
  source 1..20: mol_type = other DNA
cctggaaggcaaaagcaaga

SEQ ID NO: 65384 - DNA, 20 bp, synthetic construct
  misc_feature 1..20: note = chemically synthesized
  source 1..20: mol_type = other DNA
gaaggcaaaagcaagatgag

SEQ ID NO: 65385 - DNA, 20 bp, synthetic construct
  misc_feature 1..20: note = chemically synthesized
  source 1..20: mol_type = other DNA
aagcaagatgagaaagaaat

SEQ ID NO: 65386 - DNA, 20 bp, synthetic construct
  misc_feature 1..20: note = chemically synthesized
  source 1..20: mol_type = other DNA
aagaagaagaaggagaagga

SEQ ID NO: 65387 - DNA, 20 bp, synthetic construct
  misc_feature 1..20: note = chemically synthesized
  source 1..20: mol_type = other DNA
tcacttgagattcaaagtct

SEQ ID NO: 65388 - DNA, 20 bp, synthetic construct
  misc_feature 1..20: note = chemically synthesized
  source 1..20: mol_type = other DNA
ttttgaagttaaaagcattg

SEQ ID NO: 65389 - DNA, 20 bp, synthetic construct
  misc_feature 1..20: note = chemically synthesized
  source 1..20: mol_type = other DNA
gggttcttggatttcgtgcc

SEQ ID NO: 65390 - DNA, 20 bp, synthetic construct
  misc_feature 1..20: note = chemically synthesized
  source 1..20: mol_type = other DNA
tcttggatttcgtgcccaag

SEQ ID NO: 65391 - DNA, 20 bp, synthetic construct
  misc_feature 1..20: note = chemically synthesized
  source 1..20: mol_type = other DNA
agaatttggggcaaatccat

SEQ ID NO: 65392 - DNA, 20 bp, synthetic construct
  misc_feature 1..20: note = chemically synthesized
  source 1..20: mol_type = other DNA
aaaagtgaaagcaagttaat

SEQ ID NO: 65393 - DNA, 20 bp, synthetic construct
  misc_feature 1..20: note = chemically synthesized
  source 1..20: mol_type = other DNA
ctcttatctcatcctgtgac

SEQ ID NO: 65394 - DNA, 20 bp, synthetic construct
  misc_feature 1..20: note = chemically synthesized
  source 1..20: mol_type = other DNA
tgtttctggtatgctagcac

SEQ ID NO: 65395 - DNA, 20 bp, synthetic construct
  misc_feature 1..20: note = chemically synthesized
  source 1..20: mol_type = other DNA
cctggtccattgtaagtatt

SEQ ID NO: 65396 - DNA, 20 bp, synthetic construct
  misc_feature 1..20: note = chemically synthesized
  source 1..20: mol_type = other DNA
atactctgtctagctctgac

SEQ ID NO: 65397 - DNA, 20 bp, synthetic construct
  misc_feature 1..20: note = chemically synthesized
  source 1..20: mol_type = other DNA
ttattctcacatgcatcctg

SEQ ID NO: 65398 - DNA, 20 bp, synthetic construct
  misc_feature 1..20: note = chemically synthesized
  source 1..20: mol_type = other DNA
ccaagatgagtgcctttgaa

SEQ ID NO: 65399 - DNA, 20 bp, synthetic construct
  misc_feature 1..20: note = chemically synthesized
  source 1..20: mol_type = other DNA
ctagagacatatggccatga

SEQ ID NO: 65400 - DNA, 20 bp, synthetic construct
  misc_feature 1..20: note = chemically synthesized
  source 1..20: mol_type = other DNA
tagaatctaaggttagacat

SEQ ID NO: 65401 - DNA, 20 bp, synthetic construct
  misc_feature 1..20: note = chemically synthesized
  source 1..20: mol_type = other DNA
atgcccatgtgtgtggggta

SEQ ID NO: 65402 - DNA, 20 bp, synthetic construct
  misc_feature 1..20: note = chemically synthesized
  source 1..20: mol_type = other DNA
tgcaaaatataacactttta

SEQ ID NO: 65403 - DNA, 20 bp, synthetic construct
  misc_feature 1..20: note = chemically synthesized
  source 1..20: mol_type = other DNA
tcattggttttgctatcaac

SEQ ID NO: 65404 - DNA, 20 bp, synthetic construct
  misc_feature 1..20: note = chemically synthesized
  source 1..20: mol_type = other DNA
tggttttgctatcaacatag

SEQ ID NO: 65405 - DNA, 20 bp, synthetic construct
  misc_feature 1..20: note = chemically synthesized
  source 1..20: mol_type = other DNA
agcatgtgcaagctgcttct

SEQ ID NO: 65406 - DNA, 20 bp, synthetic construct
  misc_feature 1..20: note = chemically synthesized
  source 1..20: mol_type = other DNA
ctgcttctatagaaatgcat

SEQ ID NO: 65407 - DNA, 20 bp, synthetic construct
  misc_feature 1..20: note = chemically synthesized
  source 1..20: mol_type = other DNA
ttgagggcaataatttaatg

SEQ ID NO: 65408 - DNA, 20 bp, synthetic construct
  misc_feature 1..20: note = chemically synthesized
  source 1..20: mol_type = other DNA
ctttctcactctttctgtgt

SEQ ID NO: 65409 - DNA, 20 bp, synthetic construct
  misc_feature 1..20: note = chemically synthesized
  source 1..20: mol_type = other DNA
tctgtgtttagaaatgaata

SEQ ID NO: 65410 - DNA, 20 bp, synthetic construct
  misc_feature 1..20: note = chemically synthesized
  source 1..20: mol_type = other DNA
aacctcatatagctgctatg

SEQ ID NO: 65411 - DNA, 20 bp, synthetic construct
  misc_feature 1..20: note = chemically synthesized
  source 1..20: mol_type = other DNA
tcatatagctgctatgaaag

SEQ ID NO: 65412 - DNA, 20 bp, synthetic construct
  misc_feature 1..20: note = chemically synthesized
  source 1..20: mol_type = other DNA
aagaaaaaatttgatgcaat

SEQ ID NO: 65413 - DNA, 20 bp, synthetic construct
  misc_feature 1..20: note = chemically synthesized
  source 1..20: mol_type = other DNA
tacaagggcactgaaatatt

SEQ ID NO: 65414 - DNA, 20 bp, synthetic construct
  misc_feature 1..20: note = chemically synthesized
  source 1..20: mol_type = other DNA
gagatataaaatttcaacat

SEQ ID NO: 65415 - DNA, 20 bp, synthetic construct
  misc_feature 1..20: note = chemically synthesized
  source 1..20: mol_type = other DNA
agagtactgatattaaaaat

SEQ ID NO: 65416 - DNA, 20 bp, synthetic construct
  misc_feature 1..20: note = chemically synthesized
  source 1..20: mol_type = other DNA
ggaccctaaacaattaggaa

SEQ ID NO: 65417 - DNA, 20 bp, synthetic construct
  misc_feature 1..20: note = chemically synthesized
  source 1..20: mol_type = other DNA
acatgagagtgcagatagct

SEQ ID NO: 65418 - DNA, 20 bp, synthetic construct
  misc_feature 1..20: note = chemically synthesized
  source 1..20: mol_type = other DNA
attttggatacatatacagc

SEQ ID NO: 65419 - DNA, 20 bp, synthetic construct
  misc_feature 1..20: note = chemically synthesized
  source 1..20: mol_type = other DNA
taactctatttttagttgtt

SEQ ID NO: 65420 - DNA, 20 bp, synthetic construct
  misc_feature 1..20: note = chemically synthesized
  source 1..20: mol_type = other DNA
ctgaccatttgcatgtcttc

SEQ ID NO: 65421 - DNA, 20 bp, synthetic construct
  misc_feature 1..20: note = chemically synthesized
  source 1..20: mol_type = other DNA
atgattgttttctttgctgt

SEQ ID NO: 65422 - DNA, 20 bp, synthetic construct
  misc_feature 1..20: note = chemically synthesized
  source 1..20: mol_type = other DNA
cctgagctctggcacatttt

SEQ ID NO: 65423 - DNA, 20 bp, synthetic construct
  misc_feature 1..20: note = chemically synthesized
  source 1..20: mol_type = other DNA
ccaaatggccaaaacaatct

SEQ ID NO: 65424 - DNA, 20 bp, synthetic construct
  misc_feature 1..20: note = chemically synthesized
  source 1..20: mol_type = other DNA
atggccaaaacaatcttgag

SEQ ID NO: 65425 - DNA, 20 bp, synthetic construct
  misc_feature 1..20: note = chemically synthesized
  source 1..20: mol_type = other DNA
agacacatagaccaaattga

SEQ ID NO: 65426 - DNA, 20 bp, synthetic construct
  misc_feature 1..20: note = chemically synthesized
  source 1..20: mol_type = other DNA
aattgaacagaataaagagc

SEQ ID NO: 65427 - DNA, 20 bp, synthetic construct
  misc_feature 1..20: note = chemically synthesized
  source 1..20: mol_type = other DNA
aaactggatatccaaatgca

SEQ ID NO: 65428 - DNA, 20 bp, synthetic construct
  misc_feature 1..20: note = chemically synthesized
  source 1..20: mol_type = other DNA
tttagatattgtcttgattt

SEQ ID NO: 65429 - DNA, 20 bp, synthetic construct
  misc_feature 1..20: note = chemically synthesized
  source 1..20: mol_type = other DNA
gttagaaggaaaactaacaa

SEQ ID NO: 65430 - DNA, 20 bp, synthetic construct
  misc_feature 1..20: note = chemically synthesized
  source 1..20: mol_type = other DNA
aaagttggggaaaaaacaga

SEQ ID NO: 65431 - DNA, 20 bp, synthetic construct
  misc_feature 1..20: note = chemically synthesized
  source 1..20: mol_type = other DNA
gcaacggaacaaagctggat

SEQ ID NO: 65432 - DNA, 20 bp, synthetic construct
  misc_feature 1..20: note = chemically synthesized
  source 1..20: mol_type = other DNA
aaatttagatgaatgtataa

SEQ ID NO: 65433 - DNA, 20 bp, synthetic construct
  misc_feature 1..20: note = chemically synthesized
  source 1..20: mol_type = other DNA
tggagctgaaagccaaggct

SEQ ID NO: 65434 - DNA, 20 bp, synthetic construct
  misc_feature 1..20: note = chemically synthesized
  source 1..20: mol_type = other DNA
ccaaggctcgagaatgacgt

SEQ ID NO: 65435 - DNA, 20 bp, synthetic construct
  misc_feature 1..20: note = chemically synthesized
  source 1..20: mol_type = other DNA
ggagctgatgcgatcaactg

SEQ ID NO: 65436 - DNA, 20 bp, synthetic construct
  misc_feature 1..20: note = chemically synthesized
  source 1..20: mol_type = other DNA
tgaagcgagaagggaagttt

SEQ ID NO: 65437 - DNA, 20 bp, synthetic construct
  misc_feature 1..20: note = chemically synthesized
  source 1..20: mol_type = other DNA
agaagggaagtttagagaaa

SEQ ID NO: 65438 - DNA, 20 bp, synthetic construct
  misc_feature 1..20: note = chemically synthesized
  source 1..20: mol_type = other DNA
gtttagagaaaaaagaataa

SEQ ID NO: 65439 - DNA, 20 bp, synthetic construct
  misc_feature 1..20: note = chemically synthesized
  source 1..20: mol_type = other DNA
aaagaaatgaacaaagcctc

SEQ ID NO: 65440 - DNA, 20 bp, synthetic construct
  misc_feature 1..20: note = chemically synthesized
  source 1..20: mol_type = other DNA
ggtgtacctgaaagtgacgg

SEQ ID NO: 65441 - DNA, 20 bp, synthetic construct
  misc_feature 1..20: note = chemically synthesized
  source 1..20: mol_type = other DNA
aaaatgttaagggcagccag

SEQ ID NO: 65442 - DNA, 20 bp, synthetic construct
  misc_feature 1..20: note = chemically synthesized
  source 1..20: mol_type = other DNA
gactaacagcagctctcttg

SEQ ID NO: 65443 - DNA, 20 bp, synthetic construct
  misc_feature 1..20: note = chemically synthesized
  source 1..20: mol_type = other DNA
atattcaacatccttaaagg

SEQ ID NO: 65444 - DNA, 20 bp, synthetic construct
  misc_feature 1..20: note = chemically synthesized
  source 1..20: mol_type = other DNA
taaaggaaagaattttcaac

SEQ ID NO: 65445 - DNA, 20 bp, synthetic construct
  misc_feature 1..20: note = chemically synthesized
  source 1..20: mol_type = other DNA
aactaagcttcataagtgaa

SEQ ID NO: 65446 - DNA, 20 bp, synthetic construct
  misc_feature 1..20: note = chemically synthesized
  source 1..20: mol_type = other DNA
gtgaagaccatcaagactag

SEQ ID NO: 65447 - DNA, 20 bp, synthetic construct
  misc_feature 1..20: note = chemically synthesized
  source 1..20: mol_type = other DNA
acattagacagatcaacgag

SEQ ID NO: 65448 - DNA, 20 bp, synthetic construct
  misc_feature 1..20: note = chemically synthesized
  source 1..20: mol_type = other DNA
gaactctccaccccaaatca

SEQ ID NO: 65449 - DNA, 20 bp, synthetic construct
  misc_feature 1..20: note = chemically synthesized
  source 1..20: mol_type = other DNA
tcctcagcaaatataaaaga

SEQ ID NO: 65450 - DNA, 20 bp, synthetic construct
  misc_feature 1..20: note = chemically synthesized
  source 1..20: mol_type = other DNA
atcaaactagaactcaggat

SEQ ID NO: 65451 - DNA, 20 bp, synthetic construct
  misc_feature 1..20: note = chemically synthesized
  source 1..20: mol_type = other DNA
gggtacataacgaaatgaag

SEQ ID NO: 65452 - DNA, 20 bp, synthetic construct
  misc_feature 1..20: note = chemically synthesized
  source 1..20: mol_type = other DNA
gagaacaaagacacaacata

SEQ ID NO: 65453 - DNA, 20 bp, synthetic construct
  misc_feature 1..20: note = chemically synthesized
  source 1..20: mol_type = other DNA
tatagcactaaacgcccaca

SEQ ID NO: 65454 - DNA, 20 bp, synthetic construct
  misc_feature 1..20: note = chemically synthesized
  source 1..20: mol_type = other DNA
taaacgcccacaagagaaag

SEQ ID NO: 65455 - DNA, 20 bp, synthetic construct
  misc_feature 1..20: note = chemically synthesized
  source 1..20: mol_type = other DNA
attcaaaagctagcagaagt

SEQ ID NO: 65456 - DNA, 20 bp, synthetic construct
  misc_feature 1..20: note = chemically synthesized
  source 1..20: mol_type = other DNA
tagaccgctagcaagactaa

SEQ ID NO: 65457 - DNA, 20 bp, synthetic construct
  misc_feature 1..20: note = chemically synthesized
  source 1..20: mol_type = other DNA
aagactaataagaaaagaga

SEQ ID NO: 65458 - DNA, 20 bp, synthetic construct
  misc_feature 1..20: note = chemically synthesized
  source 1..20: mol_type = other DNA
gggatatcaccaccgatccc

SEQ ID NO: 65459 - DNA, 20 bp, synthetic construct
  misc_feature 1..20: note = chemically synthesized
  source 1..20: mol_type = other DNA
cagaaatacaaactgccatc

SEQ ID NO: 65460 - DNA, 20 bp, synthetic construct
  misc_feature 1..20: note = chemically synthesized
  source 1..20: mol_type = other DNA
aacacctctacgcaaataaa

SEQ ID NO: 65461 - DNA, 20 bp, synthetic construct
  misc_feature 1..20: note = chemically synthesized
  source 1..20: mol_type = other DNA
caaataaactagaaaatcta

SEQ ID NO: 65462 - DNA, 20 bp, synthetic construct
  misc_feature 1..20: note = chemically synthesized
  source 1..20: mol_type = other DNA
ttctgaaactattccaatca

SEQ ID NO: 65463 - DNA, 20 bp, synthetic construct
  misc_feature 1..20: note = chemically synthesized
  source 1..20: mol_type = other DNA
gcatcatcctaataccaaag

SEQ ID NO: 65464 - DNA, 20 bp, synthetic construct
  misc_feature 1..20: note = chemically synthesized
  source 1..20: mol_type = other DNA
gaaagagacacaaccaaaaa

SEQ ID NO: 65465 - DNA, 20 bp, synthetic construct
  misc_feature 1..20: note = chemically synthesized
  source 1..20: mol_type = other DNA
acatgattatctcaatagat

SEQ ID NO: 65466 - DNA, 20 bp, synthetic construct
  misc_feature 1..20: note = chemically synthesized
  source 1..20: mol_type = other DNA
aggaaaaaagggtattcaat

SEQ ID NO: 65467 - DNA, 20 bp, synthetic construct
  misc_feature 1..20: note = chemically synthesized
  source 1..20: mol_type = other DNA
cagacgacatgattgtatat

SEQ ID NO: 65468 - DNA, 20 bp, synthetic construct
  misc_feature 1..20: note = chemically synthesized
  source 1..20: mol_type = other DNA
cccattcacaattgcttcaa

SEQ ID NO: 65469 - DNA, 20 bp, synthetic construct
  misc_feature 1..20: note = chemically synthesized
  source 1..20: mol_type = other DNA
cattccatgcttatgggtag

SEQ ID NO: 65470 - DNA, 20 bp, synthetic construct
  misc_feature 1..20: note = chemically synthesized
  source 1..20: mol_type = other DNA
agctaccaatgattttcttc

SEQ ID NO: 65471 - DNA, 20 bp, synthetic construct
  misc_feature 1..20: note = chemically synthesized
  source 1..20: mol_type = other DNA
aatggaacagaacagagccc

SEQ ID NO: 65472 - DNA, 20 bp, synthetic construct
  misc_feature 1..20: note = chemically synthesized
  source 1..20: mol_type = other DNA
tatctgatctttgaaaaacc

SEQ ID NO: 65473 - DNA, 20 bp, synthetic construct
  misc_feature 1..20: note = chemically synthesized
  source 1..20: mol_type = other DNA
tttgaaaaacctgagaaaaa

SEQ ID NO: 65474 - DNA, 20 bp, synthetic construct
  misc_feature 1..20: note = chemically synthesized
  source 1..20: mol_type = other DNA
ggagaactggctagccatat

SEQ ID NO: 65475 - DNA, 20 bp, synthetic construct
  misc_feature 1..20: note = chemically synthesized
  source 1..20: mol_type = other DNA
ctaaaaccataaaaacccta

SEQ ID NO: 65476 - DNA, 20 bp, synthetic construct
  misc_feature 1..20: note = chemically synthesized
  source 1..20: mol_type = other DNA
taaagagcttctgcacagct

SEQ ID NO: 65477 - DNA, 20 bp, synthetic construct
  misc_feature 1..20: note = chemically synthesized
  source 1..20: mol_type = other DNA
aacaggcaacctacacaatg

SEQ ID NO: 65478 - DNA, 20 bp, synthetic construct
  misc_feature 1..20: note = chemically synthesized
  source 1..20: mol_type = other DNA
atctgacaaagggctaatat

SEQ ID NO: 65479 - DNA, 20 bp, synthetic construct
  misc_feature 1..20: note = chemically synthesized
  source 1..20: mol_type = other DNA
aatgaactcaaacaaattta

SEQ ID NO: 65480 - DNA, 20 bp, synthetic construct
  misc_feature 1..20: note = chemically synthesized
  source 1..20: mol_type = other DNA
atatgaacagacacttctca

SEQ ID NO: 65481 - DNA, 20 bp, synthetic construct
  misc_feature 1..20: note = chemically synthesized
  source 1..20: mol_type = other DNA
gctcatcatcactggccatc

SEQ ID NO: 65482 - DNA, 20 bp, synthetic construct
  misc_feature 1..20: note = chemically synthesized
  source 1..20: mol_type = other DNA
gagataccatctcataccag

SEQ ID NO: 65483 - DNA, 20 bp, synthetic construct
  misc_feature 1..20: note = chemically synthesized
  source 1..20: mol_type = other DNA
acaggtgctggagaggatgt

SEQ ID NO: 65484 - DNA, 20 bp, synthetic construct
  misc_feature 1..20: note = chemically synthesized
  source 1..20: mol_type = other DNA
gattcctcagggatctagaa

SEQ ID NO: 65485 - DNA, 20 bp, synthetic construct
  misc_feature 1..20: note = chemically synthesized
  source 1..20: mol_type = other DNA
ccaacaatgatagactggat

SEQ ID NO: 65486 - DNA, 20 bp, synthetic construct
  misc_feature 1..20: note = chemically synthesized
  source 1..20: mol_type = other DNA
aatccattttttgtttcctt

SEQ ID NO: 65487 - DNA, 20 bp, synthetic construct
  misc_feature 1..20: note = chemically synthesized
  source 1..20: mol_type = other DNA
gatcttggacttttaagtca

SEQ ID NO: 65488 - DNA, 20 bp, synthetic construct
  misc_feature 1..20: note = chemically synthesized
  source 1..20: mol_type = other DNA
ctgtaaaaatctgaaaaagc

SEQ ID NO: 65489 - DNA, 20 bp, synthetic construct
  misc_feature 1..20: note = chemically synthesized
  source 1..20: mol_type = other DNA
gaggaagatcatcctcaaag

SEQ ID NO: 65490 - DNA, 20 bp, synthetic construct
  misc_feature 1..20: note = chemically synthesized
  source 1..20: mol_type = other DNA
gacacgggaaggtggtgctg

SEQ ID NO: 65491 - DNA, 20 bp, synthetic construct
  misc_feature 1..20: note = chemically synthesized
  source 1..20: mol_type = other DNA
tagtagggccttggtgctgg

SEQ ID NO: 65492 - DNA, 20 bp, synthetic construct
  misc_feature 1..20: note = chemically synthesized
  source 1..20: mol_type = other DNA
ctcctcttggcctccaggct

SEQ ID NO: 65493 - DNA, 20 bp, synthetic construct
  misc_feature 1..20: note = chemically synthesized
  source 1..20: mol_type = other DNA
tgcacgtcaatgaaaattga

SEQ ID NO: 65494 - DNA, 20 bp, synthetic construct
  misc_feature 1..20: note = chemically synthesized
  source 1..20: mol_type = other DNA
taaaggtcatttagagcaat

SEQ ID NO: 65495 - DNA, 20 bp, synthetic construct
  misc_feature 1..20: note = chemically synthesized
  source 1..20: mol_type = other DNA
gtccttcaattatataattc

SEQ ID NO: 65496 - DNA, 20 bp, synthetic construct
  misc_feature 1..20: note = chemically synthesized
  source 1..20: mol_type = other DNA
caattatataattcagagaa

SEQ ID NO: 65497 - DNA, 20 bp, synthetic construct
  misc_feature 1..20: note = chemically synthesized
  source 1..20: mol_type = other DNA
gaggttgtgtgtgagttttg

SEQ ID NO: 65498 - DNA, 20 bp, synthetic construct
  misc_feature 1..20: note = chemically synthesized
  source 1..20: mol_type = other DNA
tgtgtgagttttgaaagaaa

SEQ ID NO: 65499 - DNA, 20 bp, synthetic construct
  misc_feature 1..20: note = chemically synthesized
  source 1..20: mol_type = other DNA
aatgttgatggcatttgcta

SEQ ID NO: 65500 - DNA, 20 bp, synthetic construct
  misc_feature 1..20: note = chemically synthesized
  source 1..20: mol_type = other DNA
ggaaaatgagtgcaggagtg

SEQ ID NO: 65501 - DNA, 20 bp, synthetic construct
  misc_feature 1..20: note = chemically synthesized
  source 1..20: mol_type = other DNA
caggagacaggggtggagat

SEQ ID NO: 65502 - DNA, 20 bp, synthetic construct
  misc_feature 1..20: note = chemically synthesized
  source 1..20: mol_type = other DNA
ggggacatgggagagaggag

SEQ ID NO: 65503 - DNA, 20 bp, synthetic construct
  misc_feature 1..20: note = chemically synthesized
  source 1..20: mol_type = other DNA
tgtttctttgtttgttgttt

SEQ ID NO: 65504 - DNA, 20 bp, synthetic construct
  misc_feature 1..20: note = chemically synthesized
  source 1..20: mol_type = other DNA
ttcacttggaaaatgaagtc

SEQ ID NO: 65505 - DNA, 20 bp, synthetic construct
  misc_feature 1..20: note = chemically synthesized
  source 1..20: mol_type = other DNA
tcttagaaaccagggttctc

SEQ ID NO: 65506 - DNA, 20 bp, synthetic construct
  misc_feature 1..20: note = chemically synthesized
  source 1..20: mol_type = other DNA
ctatgcacagaaccagagcc

SEQ ID NO: 65507 - DNA, 20 bp, synthetic construct
  misc_feature 1..20: note = chemically synthesized
  source 1..20: mol_type = other DNA
gaaccagagccagagaaaga

SEQ ID NO: 65508 - DNA, 20 bp, synthetic construct
  misc_feature 1..20: note = chemically synthesized
  source 1..20: mol_type = other DNA
acaccctctccttactctca

SEQ ID NO: 65509 - DNA, 20 bp, synthetic construct
  misc_feature 1..20: note = chemically synthesized
  source 1..20: mol_type = other DNA
tatatgctggtccagttaac

SEQ ID NO: 65510 - DNA, 20 bp, synthetic construct
  misc_feature 1..20: note = chemically synthesized
  source 1..20: mol_type = other DNA
tttgcatattctcctattta

SEQ ID NO: 65511 - DNA, 20 bp, synthetic construct
  misc_feature 1..20: note = chemically synthesized
  source 1..20: mol_type = other DNA
actaatattaaattcaaaca

SEQ ID NO: 65512 - DNA, 20 bp, synthetic construct
  misc_feature 1..20: note = chemically synthesized
  source 1..20: mol_type = other DNA
gataattatctctcttgcta

SEQ ID NO: 65513 - DNA, 20 bp, synthetic construct
  misc_feature 1..20: note = chemically synthesized
  source 1..20: mol_type = other DNA
aagaggaagtatactttcca

SEQ ID NO: 65514 - DNA, 20 bp, synthetic construct
  misc_feature 1..20: note = chemically synthesized
  source 1..20: mol_type = other DNA
gacaacagaaccccaggcac

SEQ ID NO: 65515 - DNA, 20 bp, synthetic construct
  misc_feature 1..20: note = chemically synthesized
  source 1..20: mol_type = other DNA
gtcaggctccaggggccttt

SEQ ID NO: 65516 - DNA, 20 bp, synthetic construct
  misc_feature 1..20: note = chemically synthesized
  source 1..20: mol_type = other DNA
atgttctaaacatgtataat

SEQ ID NO: 65517 - DNA, 20 bp, synthetic construct
  misc_feature 1..20: note = chemically synthesized
  source 1..20: mol_type = other DNA
aaaaaatctataaagtatat

SEQ ID NO: 65518 - DNA, 20 bp, synthetic construct
  misc_feature 1..20: note = chemically synthesized
  source 1..20: mol_type = other DNA
atatataaatataaaaatat

SEQ ID NO: 65519 - DNA, 20 bp, synthetic construct
  misc_feature 1..20: note = chemically synthesized
  source 1..20: mol_type = other DNA
tacaggtactacgtgagaac

SEQ ID NO: 65520 - DNA, 20 bp, synthetic construct
  misc_feature 1..20: note = chemically synthesized
  source 1..20: mol_type = other DNA
aaaacaggggtggtttttgc

SEQ ID NO: 65521 - DNA, 20 bp, synthetic construct
  misc_feature 1..20: note = chemically synthesized
  source 1..20: mol_type = other DNA
ccaagaaagcaataaatata

SEQ ID NO: 65522 - DNA, 20 bp, synthetic construct
  misc_feature 1..20: note = chemically synthesized
  source 1..20: mol_type = other DNA
taaatatagaagaataaaaa

SEQ ID NO: 65523 - DNA, 20 bp, synthetic construct
  misc_feature 1..20: note = chemically synthesized
  source 1..20: mol_type = other DNA
aaaagtatgtgtagggaatt

SEQ ID NO: 65524 - DNA, 20 bp, synthetic construct
  misc_feature 1..20: note = chemically synthesized
  source 1..20: mol_type = other DNA
aacttagttaaaaattagat

SEQ ID NO: 65525 - DNA, 20 bp, synthetic construct
  misc_feature 1..20: note = chemically synthesized
  source 1..20: mol_type = other DNA
taaaaaatgcataaatatga

SEQ ID NO: 65526 - DNA, 20 bp, synthetic construct
  misc_feature 1..20: note = chemically synthesized
  source 1..20: mol_type = other DNA
tggaaacacctagtgagaag

SEQ ID NO: 65527 - DNA, 20 bp, synthetic construct
  misc_feature 1..20: note = chemically synthesized
  source 1..20: mol_type = other DNA
gaaccagcagatcttggcat

SEQ ID NO: 65528 - DNA, 20 bp, synthetic construct
  misc_feature 1..20: note = chemically synthesized
  source 1..20: mol_type = other DNA
tgagtagtaaactgagaagt

SEQ ID NO: 65529 - DNA, 20 bp, synthetic construct
  misc_feature 1..20: note = chemically synthesized
  source 1..20: mol_type = other DNA
attacttttgcaccaaccta

SEQ ID NO: 65530 - DNA, 20 bp, synthetic construct
  misc_feature 1..20: note = chemically synthesized
  source 1..20: mol_type = other DNA
attcacattatagaagcaat

SEQ ID NO: 65531 - DNA, 20 bp, synthetic construct
  misc_feature 1..20: note = chemically synthesized
  source 1..20: mol_type = other DNA
aaaaaatgtttttattccag

SEQ ID NO: 65532 - DNA, 20 bp, synthetic construct
  misc_feature 1..20: note = chemically synthesized
  source 1..20: mol_type = other DNA
caagcatactagataaactg

SEQ ID NO: 65533 - DNA, 20 bp, synthetic construct
  misc_feature 1..20: note = chemically synthesized
  source 1..20: mol_type = other DNA
acagaggaaattaggataga

SEQ ID NO: 65534 - DNA, 20 bp, synthetic construct
  misc_feature 1..20: note = chemically synthesized
  source 1..20: mol_type = other DNA
agaaaataggatatacacgg

SEQ ID NO: 65535 - DNA, 20 bp, synthetic construct
  misc_feature 1..20: note = chemically synthesized
  source 1..20: mol_type = other DNA
tcctgaaagagtgatctgaa

SEQ ID NO: 65536 - DNA, 20 bp, synthetic construct
  misc_feature 1..20: note = chemically synthesized
  source 1..20: mol_type = other DNA
agacttgaggtattcagtaa

SEQ ID NO: 65537 - DNA, 20 bp, synthetic construct
  misc_feature 1..20: note = chemically synthesized
  source 1..20: mol_type = other DNA
tagagtctggaaatcaaaag

SEQ ID NO: 65538 - DNA, 20 bp, synthetic construct
  misc_feature 1..20: note = chemically synthesized
  source 1..20: mol_type = other DNA
atggtagtggatgacattaa

SEQ ID NO: 65539 - DNA, 20 bp, synthetic construct
  misc_feature 1..20: note = chemically synthesized
  source 1..20: mol_type = other DNA
gatgacattaagaagaaata

SEQ ID NO: 65540 - DNA, 20 bp, synthetic construct
  misc_feature 1..20: note = chemically synthesized
  source 1..20: mol_type = other DNA
ctggtgagggcgaggttatc

SEQ ID NO: 65541 - DNA, 20 bp, synthetic construct
  misc_feature 1..20: note = chemically synthesized
  source 1..20: mol_type = other DNA
tcaataaagtagtgagattg

SEQ ID NO: 65542 - DNA, 20 bp, synthetic construct
  misc_feature 1..20: note = chemically synthesized
  source 1..20: mol_type = other DNA
ttgtgaatgttagtgaagct

SEQ ID NO: 65543 - DNA, 20 bp, synthetic construct
  misc_feature 1..20: note = chemically synthesized
  source 1..20: mol_type = other DNA
tgaagctgaagaattaataa

SEQ ID NO: 65544 - DNA, 20 bp, synthetic construct
  misc_feature 1..20: note = chemically synthesized
  source 1..20: mol_type = other DNA
tttcagacccccaagtcaca

SEQ ID NO: 65545 - DNA, 20 bp, synthetic construct
  misc_feature 1..20: note = chemically synthesized
  source 1..20: mol_type = other DNA
ttgaacaatgacatgtaacg

SEQ ID NO: 65546 - DNA, 20 bp, synthetic construct
  misc_feature 1..20: note = chemically synthesized
  source 1..20: mol_type = other DNA
aaggtgtgtgcatgtgtcca

SEQ ID NO: 65547 - DNA, 20 bp, synthetic construct
  misc_feature 1..20: note = chemically synthesized
  source 1..20: mol_type = other DNA
tacctgggaggctgaggtgg

SEQ ID NO: 65548 - DNA, 20 bp, synthetic construct
  misc_feature 1..20: note = chemically synthesized
  source 1..20: mol_type = other DNA
ctcaatagcagttccgagac

SEQ ID NO: 65549 - DNA, 20 bp, synthetic construct
  misc_feature 1..20: note = chemically synthesized
  source 1..20: mol_type = other DNA
tattctatagatctcatttg

SEQ ID NO: 65550 - DNA, 20 bp, synthetic construct
  misc_feature 1..20: note = chemically synthesized
  source 1..20: mol_type = other DNA
tttgttactaaacgaatatt

SEQ ID NO: 65551 - DNA, 20 bp, synthetic construct
  misc_feature 1..20: note = chemically synthesized
  source 1..20: mol_type = other DNA
ctactcaggaggctggggca

SEQ ID NO: 65552 - DNA, 20 bp, synthetic construct
  misc_feature 1..20: note = chemically synthesized
  source 1..20: mol_type = other DNA
tccttctcaaaaacaaaaaa

SEQ ID NO: 65553 - DNA, 20 bp, synthetic construct
  misc_feature 1..20: note = chemically synthesized
  source 1..20: mol_type = other DNA
aaaagaggtattttcacata

SEQ ID NO: 65554 - DNA, 20 bp, synthetic construct
  misc_feature 1..20: note = chemically synthesized
  source 1..20: mol_type = other DNA
aaatattcatgctctgtgtc

SEQ ID NO: 65555 - DNA, 20 bp, synthetic construct
  misc_feature 1..20: note = chemically synthesized
  source 1..20: mol_type = other DNA
tgtgttattgttcataattt

SEQ ID NO: 65556 - DNA, 20 bp, synthetic construct
  misc_feature 1..20: note = chemically synthesized
  source 1..20: mol_type = other DNA
aatgtaagcatacaaaatgt

SEQ ID NO: 65557 - DNA, 20 bp, synthetic construct
  misc_feature 1..20: note = chemically synthesized
  source 1..20: mol_type = other DNA
ggctataaatatttgtatca

SEQ ID NO: 65558 - DNA, 20 bp, synthetic construct
  misc_feature 1..20: note = chemically synthesized
  source 1..20: mol_type = other DNA
ctaactttttgttccctttc

SEQ ID NO: 65559 - DNA, 20 bp, synthetic construct
  misc_feature 1..20: note = chemically synthesized
  source 1..20: mol_type = other DNA
agtatcaggaaaagatagca

SEQ ID NO: 65560 - DNA, 20 bp, synthetic construct
  misc_feature 1..20: note = chemically synthesized
  source 1..20: mol_type = other DNA
attttaagagttatagattc

SEQ ID NO: 65561 - DNA, 20 bp, synthetic construct
  misc_feature 1..20: note = chemically synthesized
  source 1..20: mol_type = other DNA
ggctcatgtaattgaagttc

SEQ ID NO: 65562 - DNA, 20 bp, synthetic construct
  misc_feature 1..20: note = chemically synthesized
  source 1..20: mol_type = other DNA
aaggggacttttgtctggga

SEQ ID NO: 65563 - DNA, 20 bp, synthetic construct
  misc_feature 1..20: note = chemically synthesized
  source 1..20: mol_type = other DNA
gacttttgtctgggaaaaga

SEQ ID NO: 65564 - DNA, 20 bp, synthetic construct
  misc_feature 1..20: note = chemically synthesized
  source 1..20: mol_type = other DNA
catggagtggaagggctgca

SEQ ID NO: 65565 - DNA, 20 bp, synthetic construct
  misc_feature 1..20: note = chemically synthesized
  source 1..20: mol_type = other DNA
catgagaaagaagctacaga

SEQ ID NO: 65566 - DNA, 20 bp, synthetic construct
  misc_feature 1..20: note = chemically synthesized
  source 1..20: mol_type = other DNA
gttactgggctatgccttgt

SEQ ID NO: 65567 - DNA, 20 bp, synthetic construct
  misc_feature 1..20: note = chemically synthesized
  source 1..20: mol_type = other DNA
catagtaaaaaagctaaggt

SEQ ID NO: 65568 - DNA, 20 bp, synthetic construct
  misc_feature 1..20: note = chemically synthesized
  source 1..20: mol_type = other DNA
ctctctaatctatggagtag

SEQ ID NO: 65569 - DNA, 20 bp, synthetic construct
  misc_feature 1..20: note = chemically synthesized
  source 1..20: mol_type = other DNA
attgtctcaatttttcagat

SEQ ID NO: 65570 - DNA, 20 bp, synthetic construct
  misc_feature 1..20: note = chemically synthesized
  source 1..20: mol_type = other DNA
aaaggcattcaattatgtaa

SEQ ID NO: 65571 - DNA, 20 bp, synthetic construct
  misc_feature 1..20: note = chemically synthesized
  source 1..20: mol_type = other DNA
cagatgacgtgattgcatat

SEQ ID NO: 65572 - DNA, 20 bp, synthetic construct
  misc_feature 1..20: note = chemically synthesized
  source 1..20: mol_type = other DNA
cccattcacaattgcttcag

SEQ ID NO: 65573 - DNA, 20 bp, synthetic construct
  misc_feature 1..20: note = chemically synthesized
  source 1..20: mol_type = other DNA
cattccatgctcatggatag

SEQ ID NO: 65574 - DNA, 20 bp, synthetic construct
  misc_feature 1..20: note = chemically synthesized
  source 1..20: mol_type = other DNA
agctaccaatgactttcttc

SEQ ID NO: 65575 - DNA, 20 bp, synthetic construct
  misc_feature 1..20: note = chemically synthesized
  source 1..20: mol_type = other DNA
aatggaacaaaacagagccc

SEQ ID NO: 65576 - DNA, 20 bp, synthetic construct
  misc_feature 1..20: note = chemically synthesized
  source 1..20: mol_type = other DNA
tatctgatctttgacaaacc

SEQ ID NO: 65577 - DNA, 20 bp, synthetic construct
  misc_feature 1..20: note = chemically synthesized
  source 1..20: mol_type = other DNA
tttgacaaacctgagaaaaa

SEQ ID NO: 65578 - DNA, 20 bp, synthetic construct
  misc_feature 1..20: note = chemically synthesized
  source 1..20: mol_type = other DNA
ctaaaaccataaaaactcta

SEQ ID NO: 65579 - DNA, 20 bp, synthetic construct
  misc_feature 1..20: note = chemically synthesized
  source 1..20: mol_type = other DNA
taaagatcttctgcacagca

SEQ ID NO: 65580 - DNA, 20 bp, synthetic construct
  misc_feature 1..20: note = chemically synthesized
  source 1..20: mol_type = other DNA
aacaggcaacctacacaatg

SEQ ID NO: 65581 - DNA, 20 bp, synthetic construct
  misc_feature 1..20: note = chemically synthesized
  source 1..20: mol_type = other DNA
atctgacaaagggctaatat

SEQ ID NO: 65582 - DNA, 20 bp, synthetic construct
  misc_feature 1..20: note = chemically synthesized
  source 1..20: mol_type = other DNA
tgaactcaaacaaatttaca

SEQ ID NO: 65583 - DNA, 20 bp, synthetic construct
  misc_feature 1..20: note = chemically synthesized
  source 1..20: mol_type = other DNA
gctcatcatcactggccatc

SEQ ID NO: 65584 - DNA, 20 bp, synthetic construct
  misc_feature 1..20: note = chemically synthesized
  source 1..20: mol_type = other DNA
gagataccatctcacaccag

SEQ ID NO: 65585 - DNA, 20 bp, synthetic construct
  misc_feature 1..20: note = chemically synthesized
  source 1..20: mol_type = other DNA
acaggtgctggagaggatgt

SEQ ID NO: 65586 - DNA, 20 bp, synthetic construct
  misc_feature 1..20: note = chemically synthesized
  source 1..20: mol_type = other DNA
gattcctcagggatctagaa

SEQ ID NO: 65587 - DNA, 20 bp, synthetic construct
  misc_feature 1..20: note = chemically synthesized
  source 1..20: mol_type = other DNA
ccaacaatgatagactggat

SEQ ID NO: 65588 - DNA, 20 bp, synthetic construct
  misc_feature 1..20: note = chemically synthesized
  source 1..20: mol_type = other DNA
aaagtataacaaaaaataag

SEQ ID NO: 65589 - DNA, 20 bp, synthetic construct
  misc_feature 1..20: note = chemically synthesized
  source 1..20: mol_type = other DNA
aacaaaaaataagttagaaa

SEQ ID NO: 65590 - DNA, 20 bp, synthetic construct
  misc_feature 1..20: note = chemically synthesized
  source 1..20: mol_type = other DNA
gtagtatctttagagcagtg

SEQ ID NO: 65591 - DNA, 20 bp, synthetic construct
  misc_feature 1..20: note = chemically synthesized
  source 1..20: mol_type = other DNA
agctgactgtgattgactcc

SEQ ID NO: 65592 - DNA, 20 bp, synthetic construct
  misc_feature 1..20: note = chemically synthesized
  source 1..20: mol_type = other DNA
ctgaaagagatatagagtgg

SEQ ID NO: 65593 - DNA, 20 bp, synthetic construct
  misc_feature 1..20: note = chemically synthesized
  source 1..20: mol_type = other DNA
tcaaacaaatcctaaactca

SEQ ID NO: 65594 - DNA, 20 bp, synthetic construct
  misc_feature 1..20: note = chemically synthesized
  source 1..20: mol_type = other DNA
gatgcaaaaaaaaaaaaatg

SEQ ID NO: 65595 - DNA, 20 bp, synthetic construct
  misc_feature 1..20: note = chemically synthesized
  source 1..20: mol_type = other DNA
caaaaaaaaaaaaatgcaag

SEQ ID NO: 65596 - DNA, 20 bp, synthetic construct
  misc_feature 1..20: note = chemically synthesized
  source 1..20: mol_type = other DNA
tgcaagaaagaaaaaaaaag

SEQ ID NO: 65597 - DNA, 20 bp, synthetic construct
  misc_feature 1..20: note = chemically synthesized
  source 1..20: mol_type = other DNA
cctcaaataaccggatattg

SEQ ID NO: 65598 - DNA, 20 bp, synthetic construct
  misc_feature 1..20: note = chemically synthesized
  source 1..20: mol_type = other DNA
gtataataggacacaacaaa

SEQ ID NO: 65599 - DNA, 20 bp, synthetic construct
  misc_feature 1..20: note = chemically synthesized
  source 1..20: mol_type = other DNA
cacaacaaatcagaaaaaaa

SEQ ID NO: 65600 - DNA, 20 bp, synthetic construct
  misc_feature 1..20: note = chemically synthesized
  source 1..20: mol_type = other DNA
gactgtacccctggagctgg

SEQ ID NO: 65601 - DNA, 20 bp, synthetic construct
  misc_feature 1..20: note = chemically synthesized
  source 1..20: mol_type = other DNA
ctgtgaggtaaacaaggaga

SEQ ID NO: 65602 - DNA, 20 bp, synthetic construct
  misc_feature 1..20: note = chemically synthesized
  source 1..20: mol_type = other DNA
atatgatggcaaaactattt

SEQ ID NO: 65603 - DNA, 20 bp, synthetic construct
  misc_feature 1..20: note = chemically synthesized
  source 1..20: mol_type = other DNA
ctctaggagtagagtaatgg

SEQ ID NO: 65604 - DNA, 20 bp, synthetic construct
  misc_feature 1..20: note = chemically synthesized
  source 1..20: mol_type = other DNA
ttgtccttgtgatagtttgc

SEQ ID NO: 65605 - DNA, 20 bp, synthetic construct
  misc_feature 1..20: note = chemically synthesized
  source 1..20: mol_type = other DNA
gtagttttttccaattctgt

SEQ ID NO: 65606 - DNA, 20 bp, synthetic construct
  misc_feature 1..20: note = chemically synthesized
  source 1..20: mol_type = other DNA
gtttgtctgttattggtgta

SEQ ID NO: 65607 - DNA, 20 bp, synthetic construct
  misc_feature 1..20: note = chemically synthesized
  source 1..20: mol_type = other DNA
agcaatgttgcagtgagctc

SEQ ID NO: 65608 - DNA, 20 bp, synthetic construct
  misc_feature 1..20: note = chemically synthesized
  source 1..20: mol_type = other DNA
atgggccctgcctcttttcg

SEQ ID NO: 65609 - DNA, 20 bp, synthetic construct
  misc_feature 1..20: note = chemically synthesized
  source 1..20: mol_type = other DNA
ctccccagctgccaacttca

SEQ ID NO: 65610 - DNA, 20 bp, synthetic construct
  misc_feature 1..20: note = chemically synthesized
  source 1..20: mol_type = other DNA
taagacacaaactctgtctt

SEQ ID NO: 65611 - DNA, 20 bp, synthetic construct
  misc_feature 1..20: note = chemically synthesized
  source 1..20: mol_type = other DNA
acttatagtgtattatgccc

SEQ ID NO: 65612 - DNA, 20 bp, synthetic construct
  misc_feature 1..20: note = chemically synthesized
  source 1..20: mol_type = other DNA
aggagtccagcataatggtt

SEQ ID NO: 65613 - DNA, 20 bp, synthetic construct
  misc_feature 1..20: note = chemically synthesized
  source 1..20: mol_type = other DNA
tccctacttcacaggtttgg

SEQ ID NO: 65614 - DNA, 20 bp, synthetic construct
  misc_feature 1..20: note = chemically synthesized
  source 1..20: mol_type = other DNA
ataaaaccgaaatgtcttct

SEQ ID NO: 65615 - DNA, 20 bp, synthetic construct
  misc_feature 1..20: note = chemically synthesized
  source 1..20: mol_type = other DNA
aatttgtatacggcaaagat

SEQ ID NO: 65616 - DNA, 20 bp, synthetic construct
  misc_feature 1..20: note = chemically synthesized
  source 1..20: mol_type = other DNA
gcaaagatagagaaatctat

SEQ ID NO: 65617 - DNA, 20 bp, synthetic construct
  misc_feature 1..20: note = chemically synthesized
  source 1..20: mol_type = other DNA
cattctaccaaatgagatct

SEQ ID NO: 65618 - DNA, 20 bp, synthetic construct
  misc_feature 1..20: note = chemically synthesized
  source 1..20: mol_type = other DNA
gaatttcctctcaacatgga

SEQ ID NO: 65619 - DNA, 20 bp, synthetic construct
  misc_feature 1..20: note = chemically synthesized
  source 1..20: mol_type = other DNA
atgtggatgtaaattaaagt

SEQ ID NO: 65620 - DNA, 20 bp, synthetic construct
  misc_feature 1..20: note = chemically synthesized
  source 1..20: mol_type = other DNA
gagtgccagcctgtaaggct

SEQ ID NO: 65621 - DNA, 20 bp, synthetic construct
  misc_feature 1..20: note = chemically synthesized
  source 1..20: mol_type = other DNA
agataccacacaaacataca

SEQ ID NO: 65622 - DNA, 20 bp, synthetic construct
  misc_feature 1..20: note = chemically synthesized
  source 1..20: mol_type = other DNA
catggtaattttaacctgta

SEQ ID NO: 65623 - DNA, 20 bp, synthetic construct
  misc_feature 1..20: note = chemically synthesized
  source 1..20: mol_type = other DNA
taccaccttgatggatgcca

SEQ ID NO: 65624 - DNA, 20 bp, synthetic construct
  misc_feature 1..20: note = chemically synthesized
  source 1..20: mol_type = other DNA
ggtcaggagagagcacaacc

SEQ ID NO: 65625 - DNA, 20 bp, synthetic construct
  misc_feature 1..20: note = chemically synthesized
  source 1..20: mol_type = other DNA
tgcttgaaacaggtgttgag

SEQ ID NO: 65626 - DNA, 20 bp, synthetic construct
  misc_feature 1..20: note = chemically synthesized
  source 1..20: mol_type = other DNA
gaaagttactgctgaccagg

SEQ ID NO: 65627 - DNA, 20 bp, synthetic construct
  misc_feature 1..20: note = chemically synthesized
  source 1..20: mol_type = other DNA
accaggatagaaaaagatga

SEQ ID NO: 65628 - DNA, 20 bp, synthetic construct
  misc_feature 1..20: note = chemically synthesized
  source 1..20: mol_type = other DNA
gacagccccatcatgggcac

SEQ ID NO: 65629 - DNA, 20 bp, synthetic construct
  misc_feature 1..20: note = chemically synthesized
  source 1..20: mol_type = other DNA
agggttggtcttaataatga

SEQ ID NO: 65630 - DNA, 20 bp, synthetic construct
  misc_feature 1..20: note = chemically synthesized
  source 1..20: mol_type = other DNA
gagatggcaaccatgtacat

SEQ ID NO: 65631 - DNA, 20 bp, synthetic construct
  misc_feature 1..20: note = chemically synthesized
  source 1..20: mol_type = other DNA
aatccaggaaagctggtgag

SEQ ID NO: 65632 - DNA, 20 bp, synthetic construct
  misc_feature 1..20: note = chemically synthesized
  source 1..20: mol_type = other DNA
aggtactgaaaatacaatga

SEQ ID NO: 65633 - DNA, 20 bp, synthetic construct
  misc_feature 1..20: note = chemically synthesized
  source 1..20: mol_type = other DNA
tctgagtaggtaattttaga

SEQ ID NO: 65634 - DNA, 20 bp, synthetic construct
  misc_feature 1..20: note = chemically synthesized
  source 1..20: mol_type = other DNA
cttcctttttagagctctct

SEQ ID NO: 65635 - DNA, 20 bp, synthetic construct
  misc_feature 1..20: note = chemically synthesized
  source 1..20: mol_type = other DNA
actgcagccaccgagattat

SEQ ID NO: 65636 - DNA, 20 bp, synthetic construct
  misc_feature 1..20: note = chemically synthesized
  source 1..20: mol_type = other DNA
tacttcagtagctcctatca

SEQ ID NO: 65637 - DNA, 20 bp, synthetic construct
  misc_feature 1..20: note = chemically synthesized
  source 1..20: mol_type = other DNA
attttattactacttcacaa

SEQ ID NO: 65638 - DNA, 20 bp, synthetic construct
  misc_feature 1..20: note = chemically synthesized
  source 1..20: mol_type = other DNA
gatttactcataaatacttt

SEQ ID NO: 65639 - DNA, 20 bp, synthetic construct
  misc_feature 1..20: note = chemically synthesized
  source 1..20: mol_type = other DNA
tggacagggagaaggatctg

SEQ ID NO: 65640 - DNA, 20 bp, synthetic construct
  misc_feature 1..20: note = chemically synthesized
  source 1..20: mol_type = other DNA
gaaagtatacttcctcttgg

SEQ ID NO: 65641 - DNA, 20 bp, synthetic construct
  misc_feature 1..20: note = chemically synthesized
  source 1..20: mol_type = other DNA
tagattcatcttagatcaca

SEQ ID NO: 65642 - DNA, 20 bp, synthetic construct
  misc_feature 1..20: note = chemically synthesized
  source 1..20: mol_type = other DNA
gatactgtttcttgtaaata

SEQ ID NO: 65643 - DNA, 20 bp, synthetic construct
  misc_feature 1..20: note = chemically synthesized
  source 1..20: mol_type = other DNA
cctgcctcctggccttccta

SEQ ID NO: 65644 - DNA, 20 bp, synthetic construct
  misc_feature 1..20: note = chemically synthesized
  source 1..20: mol_type = other DNA
ctggttctgtgcatagactc

SEQ ID NO: 65645 - DNA, 20 bp, synthetic construct
  misc_feature 1..20: note = chemically synthesized
  source 1..20: mol_type = other DNA
cttataatcctggcaacttg

SEQ ID NO: 65646 - DNA, 20 bp, synthetic construct
  misc_feature 1..20: note = chemically synthesized
  source 1..20: mol_type = other DNA
catttctaaaaacaacaaac

SEQ ID NO: 65647 - DNA, 20 bp, synthetic construct
  misc_feature 1..20: note = chemically synthesized
  source 1..20: mol_type = other DNA
caaacaaagaaacaacaaca

SEQ ID NO: 65648 - DNA, 20 bp, synthetic construct
  misc_feature 1..20: note = chemically synthesized
  source 1..20: mol_type = other DNA
aaacaacaacaaaagaaaac

SEQ ID NO: 65649 - DNA, 20 bp, synthetic construct
  misc_feature 1..20: note = chemically synthesized
  source 1..20: mol_type = other DNA
ccaatgagtaggttccaaag

SEQ ID NO: 65650 - DNA, 20 bp, synthetic construct
  misc_feature 1..20: note = chemically synthesized
  source 1..20: mol_type = other DNA
gtagcaaatgccatcaacat

SEQ ID NO: 65651 - DNA, 20 bp, synthetic construct
  misc_feature 1..20: note = chemically synthesized
  source 1..20: mol_type = other DNA
tgtaggagagggcaccacta

SEQ ID NO: 65652 - DNA, 20 bp, synthetic construct
  misc_feature 1..20: note = chemically synthesized
  source 1..20: mol_type = other DNA
gcaccactaccagaaaaatt

SEQ ID NO: 65653 - DNA, 20 bp, synthetic construct
  misc_feature 1..20: note = chemically synthesized
  source 1..20: mol_type = other DNA
cctgagctatgaagactaat

SEQ ID NO: 65654 - DNA, 20 bp, synthetic construct
  misc_feature 1..20: note = chemically synthesized
  source 1..20: mol_type = other DNA
tcaaccacagatagggcttt

SEQ ID NO: 65655 - DNA, 20 bp, synthetic construct
  misc_feature 1..20: note = chemically synthesized
  source 1..20: mol_type = other DNA
cgtgcattaagtgcgtcctg

SEQ ID NO: 65656 - DNA, 20 bp, synthetic construct
  misc_feature 1..20: note = chemically synthesized
  source 1..20: mol_type = other DNA
aggccttaacctttaaggta

SEQ ID NO: 65657 - DNA, 20 bp, synthetic construct
  misc_feature 1..20: note = chemically synthesized
  source 1..20: mol_type = other DNA
aggtattagaattcattatt

SEQ ID NO: 65658 - DNA, 20 bp, synthetic construct
  misc_feature 1..20: note = chemically synthesized
  source 1..20: mol_type = other DNA
tgtgtgtgtgagagagagag

SEQ ID NO: 65659 - DNA, 20 bp, synthetic construct
  misc_feature 1..20: note = chemically synthesized
  source 1..20: mol_type = other DNA
tttatttaaggaacctctat

SEQ ID NO: 65660 - DNA, 20 bp, synthetic construct
  misc_feature 1..20: note = chemically synthesized
  source 1..20: mol_type = other DNA
gccctactatccccagggca

SEQ ID NO: 65661 - DNA, 20 bp, synthetic construct
  misc_feature 1..20: note = chemically synthesized
  source 1..20: mol_type = other DNA
gccttaaatccccactctga

SEQ ID NO: 65662 - DNA, 20 bp, synthetic construct
  misc_feature 1..20: note = chemically synthesized
  source 1..20: mol_type = other DNA
tctttttaggtgtctctgtc

SEQ ID NO: 65663 - DNA, 20 bp, synthetic construct
  misc_feature 1..20: note = chemically synthesized
  source 1..20: mol_type = other DNA
ctggactggtccacagcccc

SEQ ID NO: 65664 - DNA, 20 bp, synthetic construct
  misc_feature 1..20: note = chemically synthesized
  source 1..20: mol_type = other DNA
atcttcccacagcaactctt

SEQ ID NO: 65665 - DNA, 20 bp, synthetic construct
  misc_feature 1..20: note = chemically synthesized
  source 1..20: mol_type = other DNA
tcatgctggttccaaacatg

SEQ ID NO: 65666 - DNA, 20 bp, synthetic construct
  misc_feature 1..20: note = chemically synthesized
  source 1..20: mol_type = other DNA
gatgagagaggacgccaggg

SEQ ID NO: 65667 - DNA, 20 bp, synthetic construct
  misc_feature 1..20: note = chemically synthesized
  source 1..20: mol_type = other DNA
aggacgccagggagagaaac

SEQ ID NO: 65668 - DNA, 20 bp, synthetic construct
  misc_feature 1..20: note = chemically synthesized
  source 1..20: mol_type = other DNA
gctgtccaccatatgtgaaa

SEQ ID NO: 65669 - DNA, 20 bp, synthetic construct
  misc_feature 1..20: note = chemically synthesized
  source 1..20: mol_type = other DNA
tgccaatcttaaaagcagac

SEQ ID NO: 65670 - DNA, 20 bp, synthetic construct
  misc_feature 1..20: note = chemically synthesized
  source 1..20: mol_type = other DNA
agaaaaagacacattgcata

SEQ ID NO: 65671 - DNA, 20 bp, synthetic construct
  misc_feature 1..20: note = chemically synthesized
  source 1..20: mol_type = other DNA
gttcagttcccatctatgag

SEQ ID NO: 65672 - DNA, 20 bp, synthetic construct
  misc_feature 1..20: note = chemically synthesized
  source 1..20: mol_type = other DNA
ttgtccttgcgatagtttac

SEQ ID NO: 65673 - DNA, 20 bp, synthetic construct
  misc_feature 1..20: note = chemically synthesized
  source 1..20: mol_type = other DNA
agtcgtttttccaattctgt

SEQ ID NO: 65674 - DNA, 20 bp, synthetic construct
  misc_feature 1..20: note = chemically synthesized
  source 1..20: mol_type = other DNA
gtttgtctgttattggtgta

SEQ ID NO: 65675 - DNA, 20 bp, synthetic construct
  misc_feature 1..20: note = chemically synthesized
  source 1..20: mol_type = other DNA
aattcctccttgtacctctg

SEQ ID NO: 65676 - DNA, 20 bp, synthetic construct
  misc_feature 1..20: note = chemically synthesized
  source 1..20: mol_type = other DNA
tgcgccatttcctaagcctg

SEQ ID NO: 65677 - DNA, 20 bp, synthetic construct
  misc_feature 1..20: note = chemically synthesized
  source 1..20: mol_type = other DNA
cccatacctcagatggaaat

SEQ ID NO: 65678 - DNA, 20 bp, synthetic construct
  misc_feature 1..20: note = chemically synthesized
  source 1..20: mol_type = other DNA
aaactggaactttatttgtg

SEQ ID NO: 65679 - DNA, 20 bp, synthetic construct
  misc_feature 1..20: note = chemically synthesized
  source 1..20: mol_type = other DNA
tattgtgttggtggccttgt

SEQ ID NO: 65680 - DNA, 20 bp, synthetic construct
  misc_feature 1..20: note = chemically synthesized
  source 1..20: mol_type = other DNA
ctaaatattttctgcacagc

SEQ ID NO: 65681 - DNA, 20 bp, synthetic construct
  misc_feature 1..20: note = chemically synthesized
  source 1..20: mol_type = other DNA
tcatcaaaaggaacagtttg

SEQ ID NO: 65682 - DNA, 20 bp, synthetic construct
  misc_feature 1..20: note = chemically synthesized
  source 1..20: mol_type = other DNA
ataggggttggagaggctgt

SEQ ID NO: 65683 - DNA, 20 bp, synthetic construct
  misc_feature 1..20: note = chemically synthesized
  source 1..20: mol_type = other DNA
tgtaagttaacatagccatt

SEQ ID NO: 65684 - DNA, 20 bp, synthetic construct
  misc_feature 1..20: note = chemically synthesized
  source 1..20: mol_type = other DNA
aaatagagttattgtatgat

SEQ ID NO: 65685 - DNA, 20 bp, synthetic construct
  misc_feature 1..20: note = chemically synthesized
  source 1..20: mol_type = other DNA
ctaagtgaaataaaccagac

SEQ ID NO: 65686 - DNA, 20 bp, synthetic construct
  misc_feature 1..20: note = chemically synthesized
  source 1..20: mol_type = other DNA
tacttatatgtggaatctca

SEQ ID NO: 65687 - DNA, 20 bp, synthetic construct
  misc_feature 1..20: note = chemically synthesized
  source 1..20: mol_type = other DNA
agaaaaataaggtcaaatgc

SEQ ID NO: 65688 - DNA, 20 bp, synthetic construct
  misc_feature 1..20: note = chemically synthesized
  source 1..20: mol_type = other DNA
tagaaacagtgtaaaaaggg

SEQ ID NO: 65689 - DNA, 20 bp, synthetic construct
  misc_feature 1..20: note = chemically synthesized
  source 1..20: mol_type = other DNA
aacagtgtaaaaaggggaag

SEQ ID NO: 65690 - DNA, 20 bp, synthetic construct
  misc_feature 1..20: note = chemically synthesized
  source 1..20: mol_type = other DNA
gtaaaaaggggaagaaagaa

SEQ ID NO: 65691 - DNA, 20 bp, synthetic construct
  misc_feature 1..20: note = chemically synthesized
  source 1..20: mol_type = other DNA
gatgttagatgcccttacac

SEQ ID NO: 65692 - DNA, 20 bp, synthetic construct
  misc_feature 1..20: note = chemically synthesized
  source 1..20: mol_type = other DNA
attaaatgtttatgagccac

SEQ ID NO: 65693 - DNA, 20 bp, synthetic construct
  misc_feature 1..20: note = chemically synthesized
  source 1..20: mol_type = other DNA
tgtttatgagccacagagaa

SEQ ID NO: 65694 - DNA, 20 bp, synthetic construct
  misc_feature 1..20: note = chemically synthesized
  source 1..20: mol_type = other DNA
tgtggcttagagtataaaca

SEQ ID NO: 65695 - DNA, 20 bp, synthetic construct
  misc_feature 1..20: note = chemically synthesized
  source 1..20: mol_type = other DNA
cagaatgtgctatggacttt

SEQ ID NO: 65696 - DNA, 20 bp, synthetic construct
  misc_feature 1..20: note = chemically synthesized
  source 1..20: mol_type = other DNA
ttcagtgcccttgtatatcc

SEQ ID NO: 65697 - DNA, 20 bp, synthetic construct
  misc_feature 1..20: note = chemically synthesized
  source 1..20: mol_type = other DNA
aatacaagcttcataggaac

SEQ ID NO: 65698 - DNA, 20 bp, synthetic construct
  misc_feature 1..20: note = chemically synthesized
  source 1..20: mol_type = other DNA
tctattattcatttctaaac

SEQ ID NO: 65699 - DNA, 20 bp, synthetic construct
  misc_feature 1..20: note = chemically synthesized
  source 1..20: mol_type = other DNA
atttctaaacacagaaagag

SEQ ID NO: 65700 - DNA, 20 bp, synthetic construct
  misc_feature 1..20: note = chemically synthesized
  source 1..20: mol_type = other DNA
acacagaaagagtgagaaag

SEQ ID NO: 65701 - DNA, 20 bp, synthetic construct
  misc_feature 1..20: note = chemically synthesized
  source 1..20: mol_type = other DNA
agagtgagaaagggagaaag

SEQ ID NO: 65702 - DNA, 20 bp, synthetic construct
  misc_feature 1..20: note = chemically synthesized
  source 1..20: mol_type = other DNA
aaagggagaaagacagaaag

SEQ ID NO: 65703 - DNA, 20 bp, synthetic construct
  misc_feature 1..20: note = chemically synthesized
  source 1..20: mol_type = other DNA
aaagacagaaagtaagaatg

SEQ ID NO: 65704 - DNA, 20 bp, synthetic construct
  misc_feature 1..20: note = chemically synthesized
  source 1..20: mol_type = other DNA
tgaaagaaagagagtgagat

SEQ ID NO: 65705 - DNA, 20 bp, synthetic construct
  misc_feature 1..20: note = chemically synthesized
  source 1..20: mol_type = other DNA
tcttgttgatacagattgac

SEQ ID NO: 65706 - DNA, 20 bp, synthetic construct
  misc_feature 1..20: note = chemically synthesized
  source 1..20: mol_type = other DNA
ctttccttgagtaaaaatcc

SEQ ID NO: 65707 - DNA, 20 bp, synthetic construct
  misc_feature 1..20: note = chemically synthesized
  source 1..20: mol_type = other DNA
atatatgtatatataaatgt

SEQ ID NO: 65708 - DNA, 20 bp, synthetic construct
  misc_feature 1..20: note = chemically synthesized
  source 1..20: mol_type = other DNA
taaatgtgtagaaaagttgc

SEQ ID NO: 65709 - DNA, 20 bp, synthetic construct
  misc_feature 1..20: note = chemically synthesized
  source 1..20: mol_type = other DNA
ggaaattatctccagggagg

SEQ ID NO: 65710 - DNA, 20 bp, synthetic construct
  misc_feature 1..20: note = chemically synthesized
  source 1..20: mol_type = other DNA
tatcagattttattttttat

SEQ ID NO: 65711 - DNA, 20 bp, synthetic construct
  misc_feature 1..20: note = chemically synthesized
  source 1..20: mol_type = other DNA
tggcctcattcagtacagta

SEQ ID NO: 65712 - DNA, 20 bp, synthetic construct
  misc_feature 1..20: note = chemically synthesized
  source 1..20: mol_type = other DNA
gatctgtaagcatgatccgg

SEQ ID NO: 65713 - DNA, 20 bp, synthetic construct
  misc_feature 1..20: note = chemically synthesized
  source 1..20: mol_type = other DNA
gaaacctctcttaatccaca

SEQ ID NO: 65714 - DNA, 20 bp, synthetic construct
  misc_feature 1..20: note = chemically synthesized
  source 1..20: mol_type = other DNA
cactttgccctgggggaaaa

SEQ ID NO: 65715 - DNA, 20 bp, synthetic construct
  misc_feature 1..20: note = chemically synthesized
  source 1..20: mol_type = other DNA
tattttgagtaactcaatgt

SEQ ID NO: 65716 - DNA, 20 bp, synthetic construct
  misc_feature 1..20: note = chemically synthesized
  source 1..20: mol_type = other DNA
gctttctcacaggatgcatg

SEQ ID NO: 65717 - DNA, 20 bp, synthetic construct
  misc_feature 1..20: note = chemically synthesized
  source 1..20: mol_type = other DNA
taaaacacaaagtctttatg

SEQ ID NO: 65718 - DNA, 20 bp, synthetic construct
  misc_feature 1..20: note = chemically synthesized
  source 1..20: mol_type = other DNA
aaagatgagtggaccaaaac

SEQ ID NO: 65719 - DNA, 20 bp, synthetic construct
  misc_feature 1..20: note = chemically synthesized
  source 1..20: mol_type = other DNA
tgaatggcagaggaaaaaac

SEQ ID NO: 65720 - DNA, 20 bp, synthetic construct
  misc_feature 1..20: note = chemically synthesized
  source 1..20: mol_type = other DNA
tctggtagaagtgaaacttt

SEQ ID NO: 65721 - DNA, 20 bp, synthetic construct
  misc_feature 1..20: note = chemically synthesized
  source 1..20: mol_type = other DNA
ggacataaaaatagatatag

SEQ ID NO: 65722 - DNA, 20 bp, synthetic construct
  misc_feature 1..20: note = chemically synthesized
  source 1..20: mol_type = other DNA
ctattctgggtgctagcata

SEQ ID NO: 65723 - DNA, 20 bp, synthetic construct
  misc_feature 1..20: note = chemically synthesized
  source 1..20: mol_type = other DNA
agacctactgggctgtattc

SEQ ID NO: 65724 - DNA, 20 bp, synthetic construct
  misc_feature 1..20: note = chemically synthesized
  source 1..20: mol_type = other DNA
cccaccagcactatgactgt

SEQ ID NO: 65725 - DNA, 20 bp, synthetic construct
  misc_feature 1..20: note = chemically synthesized
  source 1..20: mol_type = other DNA
aaccacattcctgagacttg

SEQ ID NO: 65726 - DNA, 20 bp, synthetic construct
  misc_feature 1..20: note = chemically synthesized
  source 1..20: mol_type = other DNA
tgtctttggtctctgctgct

SEQ ID NO: 65727 - DNA, 20 bp, synthetic construct
  misc_feature 1..20: note = chemically synthesized
  source 1..20: mol_type = other DNA
agaggtaagcagagttcctc

SEQ ID NO: 65728 - DNA, 20 bp, synthetic construct
  misc_feature 1..20: note = chemically synthesized
  source 1..20: mol_type = other DNA
aatggttgctgactggcaga

SEQ ID NO: 65729 - DNA, 20 bp, synthetic construct
  misc_feature 1..20: note = chemically synthesized
  source 1..20: mol_type = other DNA
tacagaactcaccagacaaa

SEQ ID NO: 65730 - DNA, 20 bp, synthetic construct
  misc_feature 1..20: note = chemically synthesized
  source 1..20: mol_type = other DNA
cccaagattcattgctgtga

SEQ ID NO: 65731 - DNA, 20 bp, synthetic construct
  misc_feature 1..20: note = chemically synthesized
  source 1..20: mol_type = other DNA
gacaagaagaagcagttact

SEQ ID NO: 65732 - DNA, 20 bp, synthetic construct
  misc_feature 1..20: note = chemically synthesized
  source 1..20: mol_type = other DNA
tattaaatggaaattcacca

SEQ ID NO: 65733 - DNA, 20 bp, synthetic construct
  misc_feature 1..20: note = chemically synthesized
  source 1..20: mol_type = other DNA
agtttattttttcatttaat

SEQ ID NO: 65734 - DNA, 20 bp, synthetic construct
  misc_feature 1..20: note = chemically synthesized
  source 1..20: mol_type = other DNA
ccagcaaggagactgaccat

SEQ ID NO: 65735 - DNA, 20 bp, synthetic construct
  misc_feature 1..20: note = chemically synthesized
  source 1..20: mol_type = other DNA
aatatggcaggaatttctaa

SEQ ID NO: 65736 - DNA, 20 bp, synthetic construct
  misc_feature 1..20: note = chemically synthesized
  source 1..20: mol_type = other DNA
tgcagctctcatatcctgtc

SEQ ID NO: 65737 - DNA, 20 bp, synthetic construct
  misc_feature 1..20: note = chemically synthesized
  source 1..20: mol_type = other DNA
atcgaccttattgcaaccat

SEQ ID NO: 65738 - DNA, 20 bp, synthetic construct
  misc_feature 1..20: note = chemically synthesized
  source 1..20: mol_type = other DNA
acacaagcttctcctccttt

SEQ ID NO: 65739 - DNA, 20 bp, synthetic construct
  misc_feature 1..20: note = chemically synthesized
  source 1..20: mol_type = other DNA
catatggtccctagttttta

SEQ ID NO: 65740 - DNA, 20 bp, synthetic construct
  misc_feature 1..20: note = chemically synthesized
  source 1..20: mol_type = other DNA
tactttcccgctttccaata

SEQ ID NO: 65741 - DNA, 20 bp, synthetic construct
  misc_feature 1..20: note = chemically synthesized
  source 1..20: mol_type = other DNA
tataatcttagtagtatcta

SEQ ID NO: 65742 - DNA, 20 bp, synthetic construct
  misc_feature 1..20: note = chemically synthesized
  source 1..20: mol_type = other DNA
caggcgggacacttccagca

SEQ ID NO: 65743 - DNA, 20 bp, synthetic construct
  misc_feature 1..20: note = chemically synthesized
  source 1..20: mol_type = other DNA
cgggacacttccagcaatag

SEQ ID NO: 65744 - DNA, 20 bp, synthetic construct
  misc_feature 1..20: note = chemically synthesized
  source 1..20: mol_type = other DNA
ttatctactcccatcccccg

SEQ ID NO: 65745 - DNA, 20 bp, synthetic construct
  misc_feature 1..20: note = chemically synthesized
  source 1..20: mol_type = other DNA
atactcagaagccaagctgc

SEQ ID NO: 65746 - DNA, 20 bp, synthetic construct
  misc_feature 1..20: note = chemically synthesized
  source 1..20: mol_type = other DNA
agctgcaaagaaaattagtt

SEQ ID NO: 65747 - DNA, 20 bp, synthetic construct
  misc_feature 1..20: note = chemically synthesized
  source 1..20: mol_type = other DNA
ttagggaattagccacatct

SEQ ID NO: 65748 - DNA, 20 bp, synthetic construct
  misc_feature 1..20: note = chemically synthesized
  source 1..20: mol_type = other DNA
attttaagcatcacataggg

SEQ ID NO: 65749 - DNA, 20 bp, synthetic construct
  misc_feature 1..20: note = chemically synthesized
  source 1..20: mol_type = other DNA
aagcatcacataggggtaga

SEQ ID NO: 65750 - DNA, 20 bp, synthetic construct
  misc_feature 1..20: note = chemically synthesized
  source 1..20: mol_type = other DNA
ttgtccttgcgatagtttgc

SEQ ID NO: 65751 - DNA, 20 bp, synthetic construct
  misc_feature 1..20: note = chemically synthesized
  source 1..20: mol_type = other DNA
attaatttttgtataaggtg

SEQ ID NO: 65752 - DNA, 20 bp, synthetic construct
  misc_feature 1..20: note = chemically synthesized
  source 1..20: mol_type = other DNA
gtagttttttccaattctgt

SEQ ID NO: 65753 - DNA, 20 bp, synthetic construct
  misc_feature 1..20: note = chemically synthesized
  source 1..20: mol_type = other DNA
gtttgtctgttattggtgta

SEQ ID NO: 65754 - DNA, 20 bp, synthetic construct
  misc_feature 1..20: note = chemically synthesized
  source 1..20: mol_type = other DNA
ctcctgcctaattgccctgg

SEQ ID NO: 65755 - DNA, 20 bp, synthetic construct
  misc_feature 1..20: note = chemically synthesized
  source 1..20: mol_type = other DNA
agctcctccttgtacctctg

SEQ ID NO: 65756 - DNA, 20 bp, synthetic construct
  misc_feature 1..20: note = chemically synthesized
  source 1..20: mol_type = other DNA
taggtgtggtgtggtgctga

SEQ ID NO: 65757 - DNA, 20 bp, synthetic construct
  misc_feature 1..20: note = chemically synthesized
  source 1..20: mol_type = other DNA
agggcattacattgatcctt

SEQ ID NO: 65758 - DNA, 20 bp, synthetic construct
  misc_feature 1..20: note = chemically synthesized
  source 1..20: mol_type = other DNA
ttaatttttaaaggtaattg

SEQ ID NO: 65759 - DNA, 20 bp, synthetic construct
  misc_feature 1..20: note = chemically synthesized
  source 1..20: mol_type = other DNA
tctcttcagtataaggaaga

SEQ ID NO: 65760 - DNA, 20 bp, synthetic construct
  misc_feature 1..20: note = chemically synthesized
  source 1..20: mol_type = other DNA
aggaagaacagaaagggagg

SEQ ID NO: 65761 - DNA, 20 bp, synthetic construct
  misc_feature 1..20: note = chemically synthesized
  source 1..20: mol_type = other DNA
tcagtcaaatgtgtccattt

SEQ ID NO: 65762 - DNA, 20 bp, synthetic construct
  misc_feature 1..20: note = chemically synthesized
  source 1..20: mol_type = other DNA
actggacctagagggtgagt

SEQ ID NO: 65763 - DNA, 20 bp, synthetic construct
  misc_feature 1..20: note = chemically synthesized
  source 1..20: mol_type = other DNA
tcattcccaaaagcccaagg

SEQ ID NO: 65764 - DNA, 20 bp, synthetic construct
  misc_feature 1..20: note = chemically synthesized
  source 1..20: mol_type = other DNA
acagaagaactagcagacac

SEQ ID NO: 65765 - DNA, 20 bp, synthetic construct
  misc_feature 1..20: note = chemically synthesized
  source 1..20: mol_type = other DNA
cacagtcaagaagctacaaa

SEQ ID NO: 65766 - DNA, 20 bp, synthetic construct
  misc_feature 1..20: note = chemically synthesized
  source 1..20: mol_type = other DNA
tctgtgttatttatacatcc

SEQ ID NO: 65767 - DNA, 20 bp, synthetic construct
  misc_feature 1..20: note = chemically synthesized
  source 1..20: mol_type = other DNA
cataccctgtattttggtca

SEQ ID NO: 65768 - DNA, 20 bp, synthetic construct
  misc_feature 1..20: note = chemically synthesized
  source 1..20: mol_type = other DNA
ttctcatgcctagactctga

SEQ ID NO: 65769 - DNA, 20 bp, synthetic construct
  misc_feature 1..20: note = chemically synthesized
  source 1..20: mol_type = other DNA
agaatcaaaagtatttggag

SEQ ID NO: 65770 - DNA, 20 bp, synthetic construct
  misc_feature 1..20: note = chemically synthesized
  source 1..20: mol_type = other DNA
caagacaatggtcatctgaa

SEQ ID NO: 65771 - DNA, 20 bp, synthetic construct
  misc_feature 1..20: note = chemically synthesized
  source 1..20: mol_type = other DNA
ggaaatggtttaccctcatt

SEQ ID NO: 65772 - DNA, 20 bp, synthetic construct
  misc_feature 1..20: note = chemically synthesized
  source 1..20: mol_type = other DNA
ggaaatggcttactctcatt

SEQ ID NO: 65773 - DNA, 20 bp, synthetic construct
  misc_feature 1..20: note = chemically synthesized
  source 1..20: mol_type = other DNA
atttcttcacgtgcaatttt

SEQ ID NO: 65774 - DNA, 20 bp, synthetic construct
  misc_feature 1..20: note = chemically synthesized
  source 1..20: mol_type = other DNA
ggtgacccaaatcatagacc

SEQ ID NO: 65775 - DNA, 20 bp, synthetic construct
  misc_feature 1..20: note = chemically synthesized
  source 1..20: mol_type = other DNA
acaatgtgagttaaattacc

SEQ ID NO: 65776 - DNA, 20 bp, synthetic construct
  misc_feature 1..20: note = chemically synthesized
  source 1..20: mol_type = other DNA
catgctctagagtgaggcag

SEQ ID NO: 65777 - DNA, 20 bp, synthetic construct
  misc_feature 1..20: note = chemically synthesized
  source 1..20: mol_type = other DNA
accaatgcccatgacagtct

SEQ ID NO: 65778 - DNA, 20 bp, synthetic construct
  misc_feature 1..20: note = chemically synthesized
  source 1..20: mol_type = other DNA
gtcttgagaatcaaaatgta

SEQ ID NO: 65779 - DNA, 20 bp, synthetic construct
  misc_feature 1..20: note = chemically synthesized
  source 1..20: mol_type = other DNA
aatgtaggagaaaaagatga

SEQ ID NO: 65780 - DNA, 20 bp, synthetic construct
  misc_feature 1..20: note = chemically synthesized
  source 1..20: mol_type = other DNA
ttgatgacatcttggtgtag

SEQ ID NO: 65781 - DNA, 20 bp, synthetic construct
  misc_feature 1..20: note = chemically synthesized
  source 1..20: mol_type = other DNA
gcaagacacctgactccatg

SEQ ID NO: 65782 - DNA, 20 bp, synthetic construct
  misc_feature 1..20: note = chemically synthesized
  source 1..20: mol_type = other DNA
tctgtagctgccaacatagc

SEQ ID NO: 65783 - DNA, 20 bp, synthetic construct
  misc_feature 1..20: note = chemically synthesized
  source 1..20: mol_type = other DNA
gaggttatgatcattcctga

SEQ ID NO: 65784 - DNA, 20 bp, synthetic construct
  misc_feature 1..20: note = chemically synthesized
  source 1..20: mol_type = other DNA
gttgtataaaagttgctcct

SEQ ID NO: 65785 - DNA, 20 bp, synthetic construct
  misc_feature 1..20: note = chemically synthesized
  source 1..20: mol_type = other DNA
gagatcctaggtatgggaaa

SEQ ID NO: 65786 - DNA, 20 bp, synthetic construct
  misc_feature 1..20: note = chemically synthesized
  source 1..20: mol_type = other DNA
ttggggatacagctattcat

SEQ ID NO: 65787 - DNA, 20 bp, synthetic construct
  misc_feature 1..20: note = chemically synthesized
  source 1..20: mol_type = other DNA
ttcattgtaaatcatataac

SEQ ID NO: 65788 - DNA, 20 bp, synthetic construct
  misc_feature 1..20: note = chemically synthesized
  source 1..20: mol_type = other DNA
aaaataaaaacaaaatgaaa

SEQ ID NO: 65789 - DNA, 20 bp, synthetic construct
  misc_feature 1..20: note = chemically synthesized
  source 1..20: mol_type = other DNA
atgtgagacctaaaagatca

SEQ ID NO: 65790 - DNA, 20 bp, synthetic construct
  misc_feature 1..20: note = chemically synthesized
  source 1..20: mol_type = other DNA
tggaaaaacaaatacacaag

SEQ ID NO: 65791 - DNA, 20 bp, synthetic construct
  misc_feature 1..20: note = chemically synthesized
  source 1..20: mol_type = other DNA
ctccagagacttttgggtag

SEQ ID NO: 65792 - DNA, 20 bp, synthetic construct
  misc_feature 1..20: note = chemically synthesized
  source 1..20: mol_type = other DNA
agttattgatacactgcttc

SEQ ID NO: 65793 - DNA, 20 bp, synthetic construct
  misc_feature 1..20: note = chemically synthesized
  source 1..20: mol_type = other DNA
aaattttcataatataaatt

SEQ ID NO: 65794 - DNA, 20 bp, synthetic construct
  misc_feature 1..20: note = chemically synthesized
  source 1..20: mol_type = other DNA
ggtaatttaggcaagatcaa

SEQ ID NO: 65795 - DNA, 20 bp, synthetic construct
  misc_feature 1..20: note = chemically synthesized
  source 1..20: mol_type = other DNA
tgagaaggctctgtgactca

SEQ ID NO: 65796 - DNA, 20 bp, synthetic construct
  misc_feature 1..20: note = chemically synthesized
  source 1..20: mol_type = other DNA
tggtgcaggcagccaacctc

SEQ ID NO: 65797 - DNA, 20 bp, synthetic construct
  misc_feature 1..20: note = chemically synthesized
  source 1..20: mol_type = other DNA
gtgtgttggtggcatgagcc

SEQ ID NO: 65798 - DNA, 20 bp, synthetic construct
  misc_feature 1..20: note = chemically synthesized
  source 1..20: mol_type = other DNA
agacctctttctgtccatga

SEQ ID NO: 65799 - DNA, 20 bp, synthetic construct
  misc_feature 1..20: note = chemically synthesized
  source 1..20: mol_type = other DNA
ttactggactttcattttca

SEQ ID NO: 65800 - DNA, 20 bp, synthetic construct
  misc_feature 1..20: note = chemically synthesized
  source 1..20: mol_type = other DNA
gtctgggtgggaaagggaaa

SEQ ID NO: 65801 - DNA, 20 bp, synthetic construct
  misc_feature 1..20: note = chemically synthesized
  source 1..20: mol_type = other DNA
gcaactctgtcctcaaaaag

SEQ ID NO: 65802 - DNA, 20 bp, synthetic construct
  misc_feature 1..20: note = chemically synthesized
  source 1..20: mol_type = other DNA
ccagatagggaaaataaagc

SEQ ID NO: 65803 - DNA, 20 bp, synthetic construct
  misc_feature 1..20: note = chemically synthesized
  source 1..20: mol_type = other DNA
atatacacctcattttttgg

SEQ ID NO: 65804 - DNA, 20 bp, synthetic construct
  misc_feature 1..20: note = chemically synthesized
  source 1..20: mol_type = other DNA
cctcttccagggtctctgtc

SEQ ID NO: 65805 - DNA, 20 bp, synthetic construct
  misc_feature 1..20: note = chemically synthesized
  source 1..20: mol_type = other DNA
tagacttgagtttttattaa

SEQ ID NO: 65806 - DNA, 20 bp, synthetic construct
  misc_feature 1..20: note = chemically synthesized
  source 1..20: mol_type = other DNA
atcagctgccagggcggcta

SEQ ID NO: 65807 - DNA, 20 bp, synthetic construct
  misc_feature 1..20: note = chemically synthesized
  source 1..20: mol_type = other DNA
gtcagatagtgacttttttt

SEQ ID NO: 65808 - DNA, 20 bp, synthetic construct
  misc_feature 1..20: note = chemically synthesized
  source 1..20: mol_type = other DNA
attacagaggtatacctcct

SEQ ID NO: 65809 - DNA, 20 bp, synthetic construct
  misc_feature 1..20: note = chemically synthesized
  source 1..20: mol_type = other DNA
gggcagggggactctcaggg

SEQ ID NO: 65810 - DNA, 20 bp, synthetic construct
  misc_feature 1..20: note = chemically synthesized
  source 1..20: mol_type = other DNA
gaatggaagccagagagatt

SEQ ID NO: 65811 - DNA, 20 bp, synthetic construct
  misc_feature 1..20: note = chemically synthesized
  source 1..20: mol_type = other DNA
ttaaagaatcagtcaggtgg

SEQ ID NO: 65812 - DNA, 20 bp, synthetic construct
  misc_feature 1..20: note = chemically synthesized
  source 1..20: mol_type = other DNA
acccatgctctggtttgttc

SEQ ID NO: 65813 - DNA, 20 bp, synthetic construct
  misc_feature 1..20: note = chemically synthesized
  source 1..20: mol_type = other DNA
aattgtttgccttatgtgtt

SEQ ID NO: 65814 - DNA, 20 bp, synthetic construct
  misc_feature 1..20: note = chemically synthesized
  source 1..20: mol_type = other DNA
tatttgaagaggtaactctc

SEQ ID NO: 65815 - DNA, 20 bp, synthetic construct
  misc_feature 1..20: note = chemically synthesized
  source 1..20: mol_type = other DNA
cactattacttttctcttgc

SEQ ID NO: 65816 - DNA, 20 bp, synthetic construct
  misc_feature 1..20: note = chemically synthesized
  source 1..20: mol_type = other DNA
aagatttgggcatcatcttt

SEQ ID NO: 65817 - DNA, 20 bp, synthetic construct
  misc_feature 1..20: note = chemically synthesized
  source 1..20: mol_type = other DNA
cctgctgcatcccctggaaa

SEQ ID NO: 65818 - DNA, 20 bp, synthetic construct
  misc_feature 1..20: note = chemically synthesized
  source 1..20: mol_type = other DNA
gggaatagttagtgataact

SEQ ID NO: 65819 - DNA, 20 bp, synthetic construct
  misc_feature 1..20: note = chemically synthesized
  source 1..20: mol_type = other DNA
taaaccaagcaggaaatata

SEQ ID NO: 65820 - DNA, 20 bp, synthetic construct
  misc_feature 1..20: note = chemically synthesized
  source 1..20: mol_type = other DNA
agccagtaacttatttgaaa

SEQ ID NO: 65821 - DNA, 20 bp, synthetic construct
  misc_feature 1..20: note = chemically synthesized
  source 1..20: mol_type = other DNA
gactcctctataagctctcc

SEQ ID NO: 65822 - DNA, 20 bp, synthetic construct
  misc_feature 1..20: note = chemically synthesized
  source 1..20: mol_type = other DNA
ttttactttttaaacaaagc

SEQ ID NO: 65823 - DNA, 20 bp, synthetic construct
  misc_feature 1..20: note = chemically synthesized
  source 1..20: mol_type = other DNA
gattttctaggtgttccatt

SEQ ID NO: 65824 - DNA, 20 bp, synthetic construct
  misc_feature 1..20: note = chemically synthesized
  source 1..20: mol_type = other DNA
ttctctcattgtctttcttc

SEQ ID NO: 65825 - DNA, 20 bp, synthetic construct
  misc_feature 1..20: note = chemically synthesized
  source 1..20: mol_type = other DNA
gccacgactagctgaggaca

SEQ ID NO: 65826 - DNA, 20 bp, synthetic construct
  misc_feature 1..20: note = chemically synthesized
  source 1..20: mol_type = other DNA
agagaagtaagagtgttgac

SEQ ID NO: 65827 - DNA, 20 bp, synthetic construct
  misc_feature 1..20: note = chemically synthesized
  source 1..20: mol_type = other DNA
tatctttgcgtctagtaact

SEQ ID NO: 65828 - DNA, 20 bp, synthetic construct
  misc_feature 1..20: note = chemically synthesized
  source 1..20: mol_type = other DNA
ttatgtctctcagtcctagg

SEQ ID NO: 65829 - DNA, 20 bp, synthetic construct
  misc_feature 1..20: note = chemically synthesized
  source 1..20: mol_type = other DNA
gaagttgttctggcatgtga

SEQ ID NO: 65830 - DNA, 20 bp, synthetic construct
  misc_feature 1..20: note = chemically synthesized
  source 1..20: mol_type = other DNA
ccattctttcatttgttcaa

SEQ ID NO: 65831 - DNA, 20 bp, synthetic construct
  misc_feature 1..20: note = chemically synthesized
  source 1..20: mol_type = other DNA
gagtaatttaaaaatacaaa

SEQ ID NO: 65832 - DNA, 20 bp, synthetic construct
  misc_feature 1..20: note = chemically synthesized
  source 1..20: mol_type = other DNA
ctttactacatttatagtaa

SEQ ID NO: 65833 - DNA, 20 bp, synthetic construct
  misc_feature 1..20: note = chemically synthesized
  source 1..20: mol_type = other DNA
ttcacaaatattaggtgaac

SEQ ID NO: 65834 - DNA, 20 bp, synthetic construct
  misc_feature 1..20: note = chemically synthesized
  source 1..20: mol_type = other DNA
ggaattacttcagtaggcct

SEQ ID NO: 65835 - DNA, 20 bp, synthetic construct
  misc_feature 1..20: note = chemically synthesized
  source 1..20: mol_type = other DNA
cctatagaaaaataatttaa

SEQ ID NO: 65836 - DNA, 20 bp, synthetic construct
  misc_feature 1..20: note = chemically synthesized
  source 1..20: mol_type = other DNA
aaaaagacactacttgtaaa

SEQ ID NO: 65837 - DNA, 20 bp, synthetic construct
  misc_feature 1..20: note = chemically synthesized
  source 1..20: mol_type = other DNA
ttacaggtttaggtggtaga

SEQ ID NO: 65838 - DNA, 20 bp, synthetic construct
  misc_feature 1..20: note = chemically synthesized
  source 1..20: mol_type = other DNA
gaaatccccttgaatgcccc

SEQ ID NO: 65839 - DNA, 20 bp, synthetic construct
  misc_feature 1..20: note = chemically synthesized
  source 1..20: mol_type = other DNA
ttacataattttttttctga

SEQ ID NO: 65840 - DNA, 20 bp, synthetic construct
  misc_feature 1..20: note = chemically synthesized
  source 1..20: mol_type = other DNA
catataaacagttgaaactc

SEQ ID NO: 65841 - DNA, 20 bp, synthetic construct
  misc_feature 1..20: note = chemically synthesized
  source 1..20: mol_type = other DNA
tagatcctggaatgtgcagt

SEQ ID NO: 65842 - DNA, 20 bp, synthetic construct
  misc_feature 1..20: note = chemically synthesized
  source 1..20: mol_type = other DNA
acaaatagtatgagtaaccc

SEQ ID NO: 65843 - DNA, 20 bp, synthetic construct
  misc_feature 1..20: note = chemically synthesized
  source 1..20: mol_type = other DNA
gtaaccctgagaatgtattt

SEQ ID NO: 65844 - DNA, 20 bp, synthetic construct
  misc_feature 1..20: note = chemically synthesized
  source 1..20: mol_type = other DNA
ttatctttaggaaaaaattc

SEQ ID NO: 65845 - DNA, 20 bp, synthetic construct
  misc_feature 1..20: note = chemically synthesized
  source 1..20: mol_type = other DNA
aactgtgcactgtggtaata

SEQ ID NO: 65846 - DNA, 20 bp, synthetic construct
  misc_feature 1..20: note = chemically synthesized
  source 1..20: mol_type = other DNA
gcactgtggtaataacagaa

SEQ ID NO: 65847 - DNA, 20 bp, synthetic construct
  misc_feature 1..20: note = chemically synthesized
  source 1..20: mol_type = other DNA
agtgtcaagaccaagcagat

SEQ ID NO: 65848 - DNA, 20 bp, synthetic construct
  misc_feature 1..20: note = chemically synthesized
  source 1..20: mol_type = other DNA
tcttcacctttttactaccc

SEQ ID NO: 65849 - DNA, 20 bp, synthetic construct
  misc_feature 1..20: note = chemically synthesized
  source 1..20: mol_type = other DNA
caatcatcacagtcactctc

SEQ ID NO: 65850 - DNA, 20 bp, synthetic construct
  misc_feature 1..20: note = chemically synthesized
  source 1..20: mol_type = other DNA
tataaagttagcagatagga

SEQ ID NO: 65851 - DNA, 20 bp, synthetic construct
  misc_feature 1..20: note = chemically synthesized
  source 1..20: mol_type = other DNA
tccaggaattttcctgcaaa

SEQ ID NO: 65852 - DNA, 20 bp, synthetic construct
  misc_feature 1..20: note = chemically synthesized
  source 1..20: mol_type = other DNA
ataggtttctgcattttttt

SEQ ID NO: 65853 - DNA, 20 bp, synthetic construct
  misc_feature 1..20: note = chemically synthesized
  source 1..20: mol_type = other DNA
gtaataagtgtaaatttccc

SEQ ID NO: 65854 - DNA, 20 bp, synthetic construct
  misc_feature 1..20: note = chemically synthesized
  source 1..20: mol_type = other DNA
tgttttaccccgatcatttt

SEQ ID NO: 65855 - DNA, 20 bp, synthetic construct
  misc_feature 1..20: note = chemically synthesized
  source 1..20: mol_type = other DNA
ctcagcaggaaatgtcttat

SEQ ID NO: 65856 - DNA, 20 bp, synthetic construct
  misc_feature 1..20: note = chemically synthesized
  source 1..20: mol_type = other DNA
tgctcatagagagtccaact

SEQ ID NO: 65857 - DNA, 20 bp, synthetic construct
  misc_feature 1..20: note = chemically synthesized
  source 1..20: mol_type = other DNA
cagtagaagaacttttttaa

SEQ ID NO: 65858 - DNA, 20 bp, synthetic construct
  misc_feature 1..20: note = chemically synthesized
  source 1..20: mol_type = other DNA
aaaagagtaatgcttttgtt

SEQ ID NO: 65859 - DNA, 20 bp, synthetic construct
  misc_feature 1..20: note = chemically synthesized
  source 1..20: mol_type = other DNA
gaattactaaaatgcaatgc

SEQ ID NO: 65860 - DNA, 20 bp, synthetic construct
  misc_feature 1..20: note = chemically synthesized
  source 1..20: mol_type = other DNA
atttagagtaaattatagat

SEQ ID NO: 65861 - DNA, 20 bp, synthetic construct
  misc_feature 1..20: note = chemically synthesized
  source 1..20: mol_type = other DNA
aaagaaatgataataaataa

SEQ ID NO: 65862 - DNA, 20 bp, synthetic construct
  misc_feature 1..20: note = chemically synthesized
  source 1..20: mol_type = other DNA
cttagcaaattaatacagga

SEQ ID NO: 65863 - DNA, 20 bp, synthetic construct
  misc_feature 1..20: note = chemically synthesized
  source 1..20: mol_type = other DNA
aatttgtattcataagaaga

SEQ ID NO: 65864 - DNA, 20 bp, synthetic construct
  misc_feature 1..20: note = chemically synthesized
  source 1..20: mol_type = other DNA
ttcatcattcaagactgaaa

SEQ ID NO: 65865 - DNA, 20 bp, synthetic construct
  misc_feature 1..20: note = chemically synthesized
  source 1..20: mol_type = other DNA
tatgggaaatctaaggtgta

SEQ ID NO: 65866 - DNA, 20 bp, synthetic construct
  misc_feature 1..20: note = chemically synthesized
  source 1..20: mol_type = other DNA
cttgaagggataacatacca

SEQ ID NO: 65867 - DNA, 20 bp, synthetic construct
  misc_feature 1..20: note = chemically synthesized
  source 1..20: mol_type = other DNA
ttctgtagactaagccaatc

SEQ ID NO: 65868 - DNA, 20 bp, synthetic construct
  misc_feature 1..20: note = chemically synthesized
  source 1..20: mol_type = other DNA
gaaatgattaagaagacgtg

SEQ ID NO: 65869 - DNA, 20 bp, synthetic construct
  misc_feature 1..20: note = chemically synthesized
  source 1..20: mol_type = other DNA
aaattgggcagcaaggatga

SEQ ID NO: 65870 - DNA, 20 bp, synthetic construct
  misc_feature 1..20: note = chemically synthesized
  source 1..20: mol_type = other DNA
agaggtctccatgtccaatt

SEQ ID NO: 65871 - DNA, 20 bp, synthetic construct
  misc_feature 1..20: note = chemically synthesized
  source 1..20: mol_type = other DNA
cctatgttagtcatggttct

SEQ ID NO: 65872 - DNA, 20 bp, synthetic construct
  misc_feature 1..20: note = chemically synthesized
  source 1..20: mol_type = other DNA
agtcatggttctccagaaaa

SEQ ID NO: 65873 - DNA, 20 bp, synthetic construct
  misc_feature 1..20: note = chemically synthesized
  source 1..20: mol_type = other DNA
cagacacactgactaatgga

SEQ ID NO: 65874 - DNA, 20 bp, synthetic construct
  misc_feature 1..20: note = chemically synthesized
  source 1..20: mol_type = other DNA
ggagaactggctagccatat

SEQ ID NO: 65875 - DNA, 20 bp, synthetic construct
  misc_feature 1..20: note = chemically synthesized
  source 1..20: mol_type = other DNA
ccaaaactataaaaacttta

SEQ ID NO: 65876 - DNA, 20 bp, synthetic construct
  misc_feature 1..20: note = chemically synthesized
  source 1..20: mol_type = other DNA
ctactcaggaggctgaggca

SEQ ID NO: 65877 - DNA, 20 bp, synthetic construct
  misc_feature 1..20: note = chemically synthesized
  source 1..20: mol_type = other DNA
gtgagacttcatctcaaaat

SEQ ID NO: 65878 - DNA, 20 bp, synthetic construct
  misc_feature 1..20: note = chemically synthesized
  source 1..20: mol_type = other DNA
tcagagcgaacaggcaacct

SEQ ID NO: 65879 - DNA, 20 bp, synthetic construct
  misc_feature 1..20: note = chemically synthesized
  source 1..20: mol_type = other DNA
aacaggcaacctacagaatg

SEQ ID NO: 65880 - DNA, 20 bp, synthetic construct
  misc_feature 1..20: note = chemically synthesized
  source 1..20: mol_type = other DNA
atctgacaaaggtctaatat

SEQ ID NO: 65881 - DNA, 20 bp, synthetic construct
  misc_feature 1..20: note = chemically synthesized
  source 1..20: mol_type = other DNA
ggaacttagacatatttaca

SEQ ID NO: 65882 - DNA, 20 bp, synthetic construct
  misc_feature 1..20: note = chemically synthesized
  source 1..20: mol_type = other DNA
aaagaagacatttatgtggc

SEQ ID NO: 65883 - DNA, 20 bp, synthetic construct
  misc_feature 1..20: note = chemically synthesized
  source 1..20: mol_type = other DNA
tctcaatgtcactgatcatt

SEQ ID NO: 65884 - DNA, 20 bp, synthetic construct
  misc_feature 1..20: note = chemically synthesized
  source 1..20: mol_type = other DNA
gaaataccatctgacaccag

SEQ ID NO: 65885 - DNA, 20 bp, synthetic construct
  misc_feature 1..20: note = chemically synthesized
  source 1..20: mol_type = other DNA
agaatggtggtttttaaagt

SEQ ID NO: 65886 - DNA, 20 bp, synthetic construct
  misc_feature 1..20: note = chemically synthesized
  source 1..20: mol_type = other DNA
acagatgctagcaaggttgc

SEQ ID NO: 65887 - DNA, 20 bp, synthetic construct
  misc_feature 1..20: note = chemically synthesized
  source 1..20: mol_type = other DNA
aattcctcaaagatttagaa

SEQ ID NO: 65888 - DNA, 20 bp, synthetic construct
  misc_feature 1..20: note = chemically synthesized
  source 1..20: mol_type = other DNA
ctattcacaatagcaaagac

SEQ ID NO: 65889 - DNA, 20 bp, synthetic construct
  misc_feature 1..20: note = chemically synthesized
  source 1..20: mol_type = other DNA
ttcagtaaactaatgcagga

SEQ ID NO: 65890 - DNA, 20 bp, synthetic construct
  misc_feature 1..20: note = chemically synthesized
  source 1..20: mol_type = other DNA
tagaagtgggagctgaacaa

SEQ ID NO: 65891 - DNA, 20 bp, synthetic construct
  misc_feature 1..20: note = chemically synthesized
  source 1..20: mol_type = other DNA
gggtgtggtgaaggggagca

SEQ ID NO: 65892 - DNA, 20 bp, synthetic construct
  misc_feature 1..20: note = chemically synthesized
  source 1..20: mol_type = other DNA
tgtttcagttcaatctaaag

SEQ ID NO: 65893 - DNA, 20 bp, synthetic construct
  misc_feature 1..20: note = chemically synthesized
  source 1..20: mol_type = other DNA
aaacaccctcacaaaaacat

SEQ ID NO: 65894 - DNA, 20 bp, synthetic construct
  misc_feature 1..20: note = chemically synthesized
  source 1..20: mol_type = other DNA
atccagaaggctgacagata

SEQ ID NO: 65895 - DNA, 20 bp, synthetic construct
  misc_feature 1..20: note = chemically synthesized
  source 1..20: mol_type = other DNA
agataatagaatcaaactac

SEQ ID NO: 65896 - DNA, 20 bp, synthetic construct
  misc_feature 1..20: note = chemically synthesized
  source 1..20: mol_type = other DNA
agagccaaggaataggaaga

SEQ ID NO: 65897 - DNA, 20 bp, synthetic construct
  misc_feature 1..20: note = chemically synthesized
  source 1..20: mol_type = other DNA
taaatattgtgttatgtgat

SEQ ID NO: 65898 - DNA, 20 bp, synthetic construct
  misc_feature 1..20: note = chemically synthesized
  source 1..20: mol_type = other DNA
caatacagcaggaaatatga

SEQ ID NO: 65899 - DNA, 20 bp, synthetic construct
  misc_feature 1..20: note = chemically synthesized
  source 1..20: mol_type = other DNA
tgaaaagaatgaacaaggtc

SEQ ID NO: 65900 - DNA, 20 bp, synthetic construct
  misc_feature 1..20: note = chemically synthesized
  source 1..20: mol_type = other DNA
acatttaggaagacctatga

SEQ ID NO: 65901 - DNA, 20 bp, synthetic construct
  misc_feature 1..20: note = chemically synthesized
  source 1..20: mol_type = other DNA
gatttaagactgatgagaca

SEQ ID NO: 65902 - DNA, 20 bp, synthetic construct
  misc_feature 1..20: note = chemically synthesized
  source 1..20: mol_type = other DNA
gtcagacaaagccagggatt

SEQ ID NO: 65903 - DNA, 20 bp, synthetic construct
  misc_feature 1..20: note = chemically synthesized
  source 1..20: mol_type = other DNA
tgggcaagacttaccaagag

SEQ ID NO: 65904 - DNA, 20 bp, synthetic construct
  misc_feature 1..20: note = chemically synthesized
  source 1..20: mol_type = other DNA
caaacaatcttatttgaaac

SEQ ID NO: 65905 - DNA, 20 bp, synthetic construct
  misc_feature 1..20: note = chemically synthesized
  source 1..20: mol_type = other DNA
caattctgttttctttttgc

SEQ ID NO: 65906 - DNA, 20 bp, synthetic construct
  misc_feature 1..20: note = chemically synthesized
  source 1..20: mol_type = other DNA
gtcaggctctagtgactatg

SEQ ID NO: 65907 - DNA, 20 bp, synthetic construct
  misc_feature 1..20: note = chemically synthesized
  source 1..20: mol_type = other DNA
gttgttgcaagagggtaaat

SEQ ID NO: 65908 - DNA, 20 bp, synthetic construct
  misc_feature 1..20: note = chemically synthesized
  source 1..20: mol_type = other DNA
ttaagaacacttttcctaca

SEQ ID NO: 65909 - DNA, 20 bp, synthetic construct
  misc_feature 1..20: note = chemically synthesized
  source 1..20: mol_type = other DNA
ctaggtctgagagactagta

SEQ ID NO: 65910 - DNA, 20 bp, synthetic construct
  misc_feature 1..20: note = chemically synthesized
  source 1..20: mol_type = other DNA
agggcaaaataagagacaat

SEQ ID NO: 65911 - DNA, 20 bp, synthetic construct
  misc_feature 1..20: note = chemically synthesized
  source 1..20: mol_type = other DNA
tatgtacctgagcagatggt

SEQ ID NO: 65912 - DNA, 20 bp, synthetic construct
  misc_feature 1..20: note = chemically synthesized
  source 1..20: mol_type = other DNA
tcttatccaaaggctctggg

SEQ ID NO: 65913 - DNA, 20 bp, synthetic construct
  misc_feature 1..20: note = chemically synthesized
  source 1..20: mol_type = other DNA
attgtatcatattcacagtc

SEQ ID NO: 65914 - DNA, 20 bp, synthetic construct
  misc_feature 1..20: note = chemically synthesized
  source 1..20: mol_type = other DNA
ttaggataggaaatcttgtg

SEQ ID NO: 65915 - DNA, 20 bp, synthetic construct
  misc_feature 1..20: note = chemically synthesized
  source 1..20: mol_type = other DNA
gcacaatgtctgaaagggtg

SEQ ID NO: 65916 - DNA, 20 bp, synthetic construct
  misc_feature 1..20: note = chemically synthesized
  source 1..20: mol_type = other DNA
tagcatctggttagcttgag

SEQ ID NO: 65917 - DNA, 20 bp, synthetic construct
  misc_feature 1..20: note = chemically synthesized
  source 1..20: mol_type = other DNA
aagtgtaaacactcgatttt

SEQ ID NO: 65918 - DNA, 20 bp, synthetic construct
  misc_feature 1..20: note = chemically synthesized
  source 1..20: mol_type = other DNA
gtgcttcatcaaaaaaatgt

SEQ ID NO: 65919 - DNA, 20 bp, synthetic construct
  misc_feature 1..20: note = chemically synthesized
  source 1..20: mol_type = other DNA
gagataccatctcacaccag

SEQ ID NO: 65920 - DNA, 20 bp, synthetic construct
  misc_feature 1..20: note = chemically synthesized
  source 1..20: mol_type = other DNA
acaggtgctggagaggatgt

SEQ ID NO: 65921 - DNA, 20 bp, synthetic construct
  misc_feature 1..20: note = chemically synthesized
  source 1..20: mol_type = other DNA
gattcctcagggatctagaa

SEQ ID NO: 65922 - DNA, 20 bp, synthetic construct
  misc_feature 1..20: note = chemically synthesized
  source 1..20: mol_type = other DNA
ccaacaatgatagactgaat

SEQ ID NO: 65923 - DNA, 20 bp, synthetic construct
  misc_feature 1..20: note = chemically synthesized
  source 1..20: mol_type = other DNA
gttttgttattctggctctg

SEQ ID NO: 65924 - DNA, 20 bp, synthetic construct
  misc_feature 1..20: note = chemically synthesized
  source 1..20: mol_type = other DNA
agcttaaataatatttcttt

SEQ ID NO: 65925 - DNA, 20 bp, synthetic construct
  misc_feature 1..20: note = chemically synthesized
  source 1..20: mol_type = other DNA
cttctcaggaggctgtggca

SEQ ID NO: 65926 - DNA, 20 bp, synthetic construct
  misc_feature 1..20: note = chemically synthesized
  source 1..20: mol_type = other DNA
tcaaggggtctcctgagatg

SEQ ID NO: 65927 - DNA, 20 bp, synthetic construct
  misc_feature 1..20: note = chemically synthesized
  source 1..20: mol_type = other DNA
atgtttatagcttttttttc

SEQ ID NO: 65928 - DNA, 20 bp, synthetic construct
  misc_feature 1..20: note = chemically synthesized
  source 1..20: mol_type = other DNA
ttcatttttgaaaataagaa

SEQ ID NO: 65929 - DNA, 20 bp, synthetic construct
  misc_feature 1..20: note = chemically synthesized
  source 1..20: mol_type = other DNA
tcaactcagtttttgtttat

SEQ ID NO: 65930 - DNA, 20 bp, synthetic construct
  misc_feature 1..20: note = chemically synthesized
  source 1..20: mol_type = other DNA
tctgaatcgagttgaaaggc

SEQ ID NO: 65931 - DNA, 20 bp, synthetic construct
  misc_feature 1..20: note = chemically synthesized
  source 1..20: mol_type = other DNA
agggcagccaaattaagatc

SEQ ID NO: 65932 - DNA, 20 bp, synthetic construct
  misc_feature 1..20: note = chemically synthesized
  source 1..20: mol_type = other DNA
aggaatttaacttgtggaca

SEQ ID NO: 65933 - DNA, 20 bp, synthetic construct
  misc_feature 1..20: note = chemically synthesized
  source 1..20: mol_type = other DNA
ctgctaagatcctgaaattt

SEQ ID NO: 65934 - DNA, 20 bp, synthetic construct
  misc_feature 1..20: note = chemically synthesized
  source 1..20: mol_type = other DNA
taagatcctgaaatttatag

SEQ ID NO: 65935 - DNA, 20 bp, synthetic construct
  misc_feature 1..20: note = chemically synthesized
  source 1..20: mol_type = other DNA
tgagtagtcagtgggactca

SEQ ID NO: 65936 - DNA, 20 bp, synthetic construct
  misc_feature 1..20: note = chemically synthesized
  source 1..20: mol_type = other DNA
agtataggaatcttattcat

SEQ ID NO: 65937 - DNA, 20 bp, synthetic construct
  misc_feature 1..20: note = chemically synthesized
  source 1..20: mol_type = other DNA
aattcaggtcaatagaacat

SEQ ID NO: 65938 - DNA, 20 bp, synthetic construct
  misc_feature 1..20: note = chemically synthesized
  source 1..20: mol_type = other DNA
atagaacatctagaatgaag

SEQ ID NO: 65939 - DNA, 20 bp, synthetic construct
  misc_feature 1..20: note = chemically synthesized
  source 1..20: mol_type = other DNA
tattctgcataaaattgaag

SEQ ID NO: 65940 - DNA, 20 bp, synthetic construct
  misc_feature 1..20: note = chemically synthesized
  source 1..20: mol_type = other DNA
catagctgctccacctttat

SEQ ID NO: 65941 - DNA, 20 bp, synthetic construct
  misc_feature 1..20: note = chemically synthesized
  source 1..20: mol_type = other DNA
gatgacagtatctagctctc

SEQ ID NO: 65942 - DNA, 20 bp, synthetic construct
  misc_feature 1..20: note = chemically synthesized
  source 1..20: mol_type = other DNA
ctttcttctatgtttaccct

SEQ ID NO: 65943 - DNA, 20 bp, synthetic construct
  misc_feature 1..20: note = chemically synthesized
  source 1..20: mol_type = other DNA
tgatactgaggccattttat

SEQ ID NO: 65944 - DNA, 20 bp, synthetic construct
  misc_feature 1..20: note = chemically synthesized
  source 1..20: mol_type = other DNA
ccctcttggatcgtggcaac

SEQ ID NO: 65945 - DNA, 20 bp, synthetic construct
  misc_feature 1..20: note = chemically synthesized
  source 1..20: mol_type = other DNA
ggatcgtggcaaccaagaaa

SEQ ID NO: 65946 - DNA, 20 bp, synthetic construct
  misc_feature 1..20: note = chemically synthesized
  source 1..20: mol_type = other DNA
agcagagagaggtaagaagg

SEQ ID NO: 65947 - DNA, 20 bp, synthetic construct
  misc_feature 1..20: note = chemically synthesized
  source 1..20: mol_type = other DNA
aatgttggaaagggcaagtg

SEQ ID NO: 65948 - DNA, 20 bp, synthetic construct
  misc_feature 1..20: note = chemically synthesized
  source 1..20: mol_type = other DNA
ttggaaagggcaagtggcag

SEQ ID NO: 65949 - DNA, 20 bp, synthetic construct
  misc_feature 1..20: note = chemically synthesized
  source 1..20: mol_type = other DNA
aagaaagccagtaaatggtg

SEQ ID NO: 65950 - DNA, 20 bp, synthetic construct
  misc_feature 1..20: note = chemically synthesized
  source 1..20: mol_type = other DNA
ataattgtatgaagatattt

SEQ ID NO: 65951 - DNA, 20 bp, synthetic construct
  misc_feature 1..20: note = chemically synthesized
  source 1..20: mol_type = other DNA
atgaagatatttggagaaaa

SEQ ID NO: 65952 - DNA, 20 bp, synthetic construct
  misc_feature 1..20: note = chemically synthesized
  source 1..20: mol_type = other DNA
ctgaaaaaagcgaatttgat

SEQ ID NO: 65953 - DNA, 20 bp, synthetic construct
  misc_feature 1..20: note = chemically synthesized
  source 1..20: mol_type = other DNA
gattcagaatgttggaaggg

SEQ ID NO: 65954 - DNA, 20 bp, synthetic construct
  misc_feature 1..20: note = chemically synthesized
  source 1..20: mol_type = other DNA
cattcaatttccaaaaaaaa

SEQ ID NO: 65955 - DNA, 20 bp, synthetic construct
  misc_feature 1..20: note = chemically synthesized
  source 1..20: mol_type = other DNA
taatgaaaaatttttgaatt

SEQ ID NO: 65956 - DNA, 20 bp, synthetic construct
  misc_feature 1..20: note = chemically synthesized
  source 1..20: mol_type = other DNA
ggctcctggtttcaaggttt

SEQ ID NO: 65957 - DNA, 20 bp, synthetic construct
  misc_feature 1..20: note = chemically synthesized
  source 1..20: mol_type = other DNA
cacgtgctttctgcctccac

SEQ ID NO: 65958 - DNA, 20 bp, synthetic construct
  misc_feature 1..20: note = chemically synthesized
  source 1..20: mol_type = other DNA
acattcatttacagatttgg

SEQ ID NO: 65959 - DNA, 20 bp, synthetic construct
  misc_feature 1..20: note = chemically synthesized
  source 1..20: mol_type = other DNA
tagtagttaaactcggatct

SEQ ID NO: 65960 - DNA, 20 bp, synthetic construct
  misc_feature 1..20: note = chemically synthesized
  source 1..20: mol_type = other DNA
acacagacataaaaatgaag

SEQ ID NO: 65961 - DNA, 20 bp, synthetic construct
  misc_feature 1..20: note = chemically synthesized
  source 1..20: mol_type = other DNA
aaaaagttgatcatcattct

SEQ ID NO: 65962 - DNA, 20 bp, synthetic construct
  misc_feature 1..20: note = chemically synthesized
  source 1..20: mol_type = other DNA
tctcatggcaaatatagtga

SEQ ID NO: 65963 - DNA, 20 bp, synthetic construct
  misc_feature 1..20: note = chemically synthesized
  source 1..20: mol_type = other DNA
ggtcaaggctctattcaaaa

SEQ ID NO: 65964 - DNA, 20 bp, synthetic construct
  misc_feature 1..20: note = chemically synthesized
  source 1..20: mol_type = other DNA
aaatagaaaatatagccatt

SEQ ID NO: 65965 - DNA, 20 bp, synthetic construct
  misc_feature 1..20: note = chemically synthesized
  source 1..20: mol_type = other DNA
tatatgttcagagggaaaaa

SEQ ID NO: 65966 - DNA, 20 bp, synthetic construct
  misc_feature 1..20: note = chemically synthesized
  source 1..20: mol_type = other DNA
taggaagaccaacaatgttg

SEQ ID NO: 65967 - DNA, 20 bp, synthetic construct
  misc_feature 1..20: note = chemically synthesized
  source 1..20: mol_type = other DNA
ttaattacctgccacatgtg

SEQ ID NO: 65968 - DNA, 20 bp, synthetic construct
  misc_feature 1..20: note = chemically synthesized
  source 1..20: mol_type = other DNA
tggtgccttcatggttgttt

SEQ ID NO: 65969 - DNA, 20 bp, synthetic construct
  misc_feature 1..20: note = chemically synthesized
  source 1..20: mol_type = other DNA
cctatatgttaatgaaactg

SEQ ID NO: 65970 - DNA, 20 bp, synthetic construct
  misc_feature 1..20: note = chemically synthesized
  source 1..20: mol_type = other DNA
atgttaatgaaactgttaga

SEQ ID NO: 65971 - DNA, 20 bp, synthetic construct
  misc_feature 1..20: note = chemically synthesized
  source 1..20: mol_type = other DNA
tactctccattcagcaaaac

SEQ ID NO: 65972 - DNA, 20 bp, synthetic construct
  misc_feature 1..20: note = chemically synthesized
  source 1..20: mol_type = other DNA
actcagttctattctaagtc

SEQ ID NO: 65973 - DNA, 20 bp, synthetic construct
  misc_feature 1..20: note = chemically synthesized
  source 1..20: mol_type = other DNA
ctggaaaatgttccctgatc

SEQ ID NO: 65974 - DNA, 20 bp, synthetic construct
  misc_feature 1..20: note = chemically synthesized
  source 1..20: mol_type = other DNA
tcagttctagcagccttttg

SEQ ID NO: 65975 - DNA, 20 bp, synthetic construct
  misc_feature 1..20: note = chemically synthesized
  source 1..20: mol_type = other DNA
tttatgttcactaggagtgg

SEQ ID NO: 65976 - DNA, 20 bp, synthetic construct
  misc_feature 1..20: note = chemically synthesized
  source 1..20: mol_type = other DNA
tgtcttgttgcagttttcga

SEQ ID NO: 65977 - DNA, 20 bp, synthetic construct
  misc_feature 1..20: note = chemically synthesized
  source 1..20: mol_type = other DNA
agaactacaaaacactgctg

SEQ ID NO: 65978 - DNA, 20 bp, synthetic construct
  misc_feature 1..20: note = chemically synthesized
  source 1..20: mol_type = other DNA
caaaacactgctgaaagaaa

SEQ ID NO: 65979 - DNA, 20 bp, synthetic construct
  misc_feature 1..20: note = chemically synthesized
  source 1..20: mol_type = other DNA
ctttccaggctcatggattg

SEQ ID NO: 65980 - DNA, 20 bp, synthetic construct
  misc_feature 1..20: note = chemically synthesized
  source 1..20: mol_type = other DNA
caatgtcattcttcacagta

SEQ ID NO: 65981 - DNA, 20 bp, synthetic construct
  misc_feature 1..20: note = chemically synthesized
  source 1..20: mol_type = other DNA
aacaggcaaagcaatcttaa

SEQ ID NO: 65982 - DNA, 20 bp, synthetic construct
  misc_feature 1..20: note = chemically synthesized
  source 1..20: mol_type = other DNA
ctactcggaaggctgaggca

SEQ ID NO: 65983 - DNA, 20 bp, synthetic construct
  misc_feature 1..20: note = chemically synthesized
  source 1..20: mol_type = other DNA
gaaactctgaaaaaataaaa

SEQ ID NO: 65984 - DNA, 20 bp, synthetic construct
  misc_feature 1..20: note = chemically synthesized
  source 1..20: mol_type = other DNA
ctctgaaaaaataaaaaaag

SEQ ID NO: 65985 - DNA, 20 bp, synthetic construct
  misc_feature 1..20: note = chemically synthesized
  source 1..20: mol_type = other DNA
aaaaaataaaaaaagaaaga

SEQ ID NO: 65986 - DNA, 20 bp, synthetic construct
  misc_feature 1..20: note = chemically synthesized
  source 1..20: mol_type = other DNA
aataaaaaaagaaagaaaag

SEQ ID NO: 65987 - DNA, 20 bp, synthetic construct
  misc_feature 1..20: note = chemically synthesized
  source 1..20: mol_type = other DNA
agaaaagaaagaaagagagg

SEQ ID NO: 65988 - DNA, 20 bp, synthetic construct
  misc_feature 1..20: note = chemically synthesized
  source 1..20: mol_type = other DNA
agaaagagagggaagaaagg

SEQ ID NO: 65989 - DNA, 20 bp, synthetic construct
  misc_feature 1..20: note = chemically synthesized
  source 1..20: mol_type = other DNA
acattgactaaggaaacaca

SEQ ID NO: 65990 - DNA, 20 bp, synthetic construct
  misc_feature 1..20: note = chemically synthesized
  source 1..20: mol_type = other DNA
tacgtggctagccatatgca

SEQ ID NO: 65991 - DNA, 20 bp, synthetic construct
  misc_feature 1..20: note = chemically synthesized
  source 1..20: mol_type = other DNA
acccttaccttacaccattt

SEQ ID NO: 65992 - DNA, 20 bp, synthetic construct
  misc_feature 1..20: note = chemically synthesized
  source 1..20: mol_type = other DNA
cccaaaagcaattgcaatgc

SEQ ID NO: 65993 - DNA, 20 bp, synthetic construct
  misc_feature 1..20: note = chemically synthesized
  source 1..20: mol_type = other DNA
aacccaaatgtccaacaatg

SEQ ID NO: 65994 - DNA, 20 bp, synthetic construct
  misc_feature 1..20: note = chemically synthesized
  source 1..20: mol_type = other DNA
ccaacaatgatagaatggat

SEQ ID NO: 65995 - DNA, 20 bp, synthetic construct
  misc_feature 1..20: note = chemically synthesized
  source 1..20: mol_type = other DNA
aaaagagcttctgtgcagca

SEQ ID NO: 65996 - DNA, 20 bp, synthetic construct
  misc_feature 1..20: note = chemically synthesized
  source 1..20: mol_type = other DNA
aactgacaatctacaggata

SEQ ID NO: 65997 - DNA, 20 bp, synthetic construct
  misc_feature 1..20: note = chemically synthesized
  source 1..20: mol_type = other DNA
atctggaaaaggtctaatat

SEQ ID NO: 65998 - DNA, 20 bp, synthetic construct
  misc_feature 1..20: note = chemically synthesized
  source 1..20: mol_type = other DNA
aatgatcatcatcactaatg

SEQ ID NO: 65999 - DNA, 20 bp, synthetic construct
  misc_feature 1..20: note = chemically synthesized
  source 1..20: mol_type = other DNA
gagatactatctcataccag

SEQ ID NO: 66000 - DNA, 20 bp, synthetic construct
  misc_feature 1..20: note = chemically synthesized
  source 1..20: mol_type = other DNA
acagattctcatgaggctat

SEQ ID NO: 66001 - DNA, 20 bp, synthetic construct
  misc_feature 1..20: note = chemically synthesized
  source 1..20: mol_type = other DNA
tgtaaattagttcaaccact

SEQ ID NO: 66002 - DNA, 20 bp, synthetic construct
  misc_feature 1..20: note = chemically synthesized
  source 1..20: mol_type = other DNA
catgttcactgtaatgctgt

SEQ ID NO: 66003 - DNA, 20 bp, synthetic construct
  misc_feature 1..20: note = chemically synthesized
  source 1..20: mol_type = other DNA
ctatcaaaggcggacgggat

SEQ ID NO: 66004 - DNA, 20 bp, synthetic construct
  misc_feature 1..20: note = chemically synthesized
  source 1..20: mol_type = other DNA
aagtaaatgttgaaaattta

SEQ ID NO: 66005 - DNA, 20 bp, synthetic construct
  misc_feature 1..20: note = chemically synthesized
  source 1..20: mol_type = other DNA
gaactgattttcccaaagta

SEQ ID NO: 66006 - DNA, 20 bp, synthetic construct
  misc_feature 1..20: note = chemically synthesized
  source 1..20: mol_type = other DNA
agcttttctcatccatcctt

SEQ ID NO: 66007 - DNA, 20 bp, synthetic construct
  misc_feature 1..20: note = chemically synthesized
  source 1..20: mol_type = other DNA
ggaatgggtccttattccag

SEQ ID NO: 66008 - DNA, 20 bp, synthetic construct
  misc_feature 1..20: note = chemically synthesized
  source 1..20: mol_type = other DNA
cagagggctcatggcttttg

SEQ ID NO: 66009 - DNA, 20 bp, synthetic construct
  misc_feature 1..20: note = chemically synthesized
  source 1..20: mol_type = other DNA
attctatttcaaaactaaac

SEQ ID NO: 66010 - DNA, 20 bp, synthetic construct
  misc_feature 1..20: note = chemically synthesized
  source 1..20: mol_type = other DNA
ttaaaatgtgttttttagat

SEQ ID NO: 66011 - DNA, 20 bp, synthetic construct
  misc_feature 1..20: note = chemically synthesized
  source 1..20: mol_type = other DNA
ctacttaattattcataact

SEQ ID NO: 66012 - DNA, 20 bp, synthetic construct
  misc_feature 1..20: note = chemically synthesized
  source 1..20: mol_type = other DNA
ataaatgtattgctcttcta

SEQ ID NO: 66013 - DNA, 20 bp, synthetic construct
  misc_feature 1..20: note = chemically synthesized
  source 1..20: mol_type = other DNA
tgaatattaggattgaggct

SEQ ID NO: 66014 - DNA, 20 bp, synthetic construct
  misc_feature 1..20: note = chemically synthesized
  source 1..20: mol_type = other DNA
tccactcccattatccactt

SEQ ID NO: 66015 - DNA, 20 bp, synthetic construct
  misc_feature 1..20: note = chemically synthesized
  source 1..20: mol_type = other DNA
aacagttaaaggtattgcct

SEQ ID NO: 66016 - DNA, 20 bp, synthetic construct
  misc_feature 1..20: note = chemically synthesized
  source 1..20: mol_type = other DNA
tgttcgcctattttctgggc

SEQ ID NO: 66017 - DNA, 20 bp, synthetic construct
  misc_feature 1..20: note = chemically synthesized
  source 1..20: mol_type = other DNA
gaatggcttgagcccttttt

SEQ ID NO: 66018 - DNA, 20 bp, synthetic construct
  misc_feature 1..20: note = chemically synthesized
  source 1..20: mol_type = other DNA
tgcaaaggtaattgcagttc

SEQ ID NO: 66019 - DNA, 20 bp, synthetic construct
  misc_feature 1..20: note = chemically synthesized
  source 1..20: mol_type = other DNA
atattagacttttgtcagat

SEQ ID NO: 66020 - DNA, 20 bp, synthetic construct
  misc_feature 1..20: note = chemically synthesized
  source 1..20: mol_type = other DNA
gtgttctctctaaatgctgg

SEQ ID NO: 66021 - DNA, 20 bp, synthetic construct
  misc_feature 1..20: note = chemically synthesized
  source 1..20: mol_type = other DNA
cttcaaataagtggggactc

SEQ ID NO: 66022 - DNA, 20 bp, synthetic construct
  misc_feature 1..20: note = chemically synthesized
  source 1..20: mol_type = other DNA
aagtggggactcaaagaata

SEQ ID NO: 66023 - DNA, 20 bp, synthetic construct
  misc_feature 1..20: note = chemically synthesized
  source 1..20: mol_type = other DNA
gtgctgtgattaatcataaa

SEQ ID NO: 66024 - DNA, 20 bp, synthetic construct
  misc_feature 1..20: note = chemically synthesized
  source 1..20: mol_type = other DNA
gaaataagggtaagattccc

SEQ ID NO: 66025 - DNA, 20 bp, synthetic construct
  misc_feature 1..20: note = chemically synthesized
  source 1..20: mol_type = other DNA
agctgagacctgaaaatgga

SEQ ID NO: 66026 - DNA, 20 bp, synthetic construct
  misc_feature 1..20: note = chemically synthesized
  source 1..20: mol_type = other DNA
ctaactggtgaaaatacaga

SEQ ID NO: 66027 - DNA, 20 bp, synthetic construct
  misc_feature 1..20: note = chemically synthesized
  source 1..20: mol_type = other DNA
ttgagggaggcagggaaagg

SEQ ID NO: 66028 - DNA, 20 bp, synthetic construct
  misc_feature 1..20: note = chemically synthesized
  source 1..20: mol_type = other DNA
gcagaatattagagtaattt

SEQ ID NO: 66029 - DNA, 20 bp, synthetic construct
  misc_feature 1..20: note = chemically synthesized
  source 1..20: mol_type = other DNA
taataaggtttacaggttat

SEQ ID NO: 66030 - DNA, 20 bp, synthetic construct
  misc_feature 1..20: note = chemically synthesized
  source 1..20: mol_type = other DNA
gttatttagaaaagcagagg

SEQ ID NO: 66031 - DNA, 20 bp, synthetic construct
  misc_feature 1..20: note = chemically synthesized
  source 1..20: mol_type = other DNA
caatttctgacatgttcttg

SEQ ID NO: 66032 - DNA, 20 bp, synthetic construct
  misc_feature 1..20: note = chemically synthesized
  source 1..20: mol_type = other DNA
ttggaagaaaggcagtgcca

SEQ ID NO: 66033 - DNA, 20 bp, synthetic construct
  misc_feature 1..20: note = chemically synthesized
  source 1..20: mol_type = other DNA
tatgtattgtctataaataa

SEQ ID NO: 66034 - DNA, 20 bp, synthetic construct
  misc_feature 1..20: note = chemically synthesized
  source 1..20: mol_type = other DNA
tttttaaagttgtgggacac

SEQ ID NO: 66035 - DNA, 20 bp, synthetic construct
  misc_feature 1..20: note = chemically synthesized
  source 1..20: mol_type = other DNA
aaaataataaacatgtgatt

SEQ ID NO: 66036 - DNA, 20 bp, synthetic construct
  misc_feature 1..20: note = chemically synthesized
  source 1..20: mol_type = other DNA
tagtaaaggcaagacatatg

SEQ ID NO: 66037 - DNA, 20 bp, synthetic construct
  misc_feature 1..20: note = chemically synthesized
  source 1..20: mol_type = other DNA
agacatatgtcagaaaatga

SEQ ID NO: 66038 - DNA, 20 bp, synthetic construct
  misc_feature 1..20: note = chemically synthesized
  source 1..20: mol_type = other DNA
gaatttacagatgcaagaca

SEQ ID NO: 66039 - DNA, 20 bp, synthetic construct
  misc_feature 1..20: note = chemically synthesized
  source 1..20: mol_type = other DNA
gatgacacccaaagaaggtc

SEQ ID NO: 66040 - DNA, 20 bp, synthetic construct
  misc_feature 1..20: note = chemically synthesized
  source 1..20: mol_type = other DNA
aacagtggctcactatccta

SEQ ID NO: 66041 - DNA, 20 bp, synthetic construct
  misc_feature 1..20: note = chemically synthesized
  source 1..20: mol_type = other DNA
attaccagatgagtaaataa

SEQ ID NO: 66042 - DNA, 20 bp, synthetic construct
  misc_feature 1..20: note = chemically synthesized
  source 1..20: mol_type = other DNA
ctctgaatattctgcttttc

SEQ ID NO: 66043 - DNA, 20 bp, synthetic construct
  misc_feature 1..20: note = chemically synthesized
  source 1..20: mol_type = other DNA
ccttggaatattccatggaa

SEQ ID NO: 66044 - DNA, 20 bp, synthetic construct
  misc_feature 1..20: note = chemically synthesized
  source 1..20: mol_type = other DNA
gaaaatgagacaagctttct

SEQ ID NO: 66045 - DNA, 20 bp, synthetic construct
  misc_feature 1..20: note = chemically synthesized
  source 1..20: mol_type = other DNA
cctgggttcagttttcagtt

SEQ ID NO: 66046 - DNA, 20 bp, synthetic construct
  misc_feature 1..20: note = chemically synthesized
  source 1..20: mol_type = other DNA
ttttacaggtacattttcac

SEQ ID NO: 66047 - DNA, 20 bp, synthetic construct
  misc_feature 1..20: note = chemically synthesized
  source 1..20: mol_type = other DNA
gggaagacataaaaatgtgg

SEQ ID NO: 66048 - DNA, 20 bp, synthetic construct
  misc_feature 1..20: note = chemically synthesized
  source 1..20: mol_type = other DNA
tgtctttgtaagttattttg

SEQ ID NO: 66049 - DNA, 20 bp, synthetic construct
  misc_feature 1..20: note = chemically synthesized
  source 1..20: mol_type = other DNA
ttgtaagttattttggaaga

SEQ ID NO: 66050 - DNA, 20 bp, synthetic construct
  misc_feature 1..20: note = chemically synthesized
  source 1..20: mol_type = other DNA
ttagtttttctcatgcttag

SEQ ID NO: 66051 - DNA, 20 bp, synthetic construct
  misc_feature 1..20: note = chemically synthesized
  source 1..20: mol_type = other DNA
aacctgcaatttacgtccaa

SEQ ID NO: 66052 - DNA, 20 bp, synthetic construct
  misc_feature 1..20: note = chemically synthesized
  source 1..20: mol_type = other DNA
aacttctttcaacgtaatct

SEQ ID NO: 66053 - DNA, 20 bp, synthetic construct
  misc_feature 1..20: note = chemically synthesized
  source 1..20: mol_type = other DNA
gttggggtacagttctttat

SEQ ID NO: 66054 - DNA, 20 bp, synthetic construct
  misc_feature 1..20: note = chemically synthesized
  source 1..20: mol_type = other DNA
gtagtcttttcattggaatg

SEQ ID NO: 66055 - DNA, 20 bp, synthetic construct
  misc_feature 1..20: note = chemically synthesized
  source 1..20: mol_type = other DNA
acactgtctcaaaagagagg

SEQ ID NO: 66056 - DNA, 20 bp, synthetic construct
  misc_feature 1..20: note = chemically synthesized
  source 1..20: mol_type = other DNA
gtctcaaaagagaggaaaga

SEQ ID NO: 66057 - DNA, 20 bp, synthetic construct
  misc_feature 1..20: note = chemically synthesized
  source 1..20: mol_type = other DNA
aagagaggaaagaaaagaaa

SEQ ID NO: 66058 - DNA, 20 bp, synthetic construct
  misc_feature 1..20: note = chemically synthesized
  source 1..20: mol_type = other DNA
aaaaggaaaggaaaggaaag

SEQ ID NO: 66059 - DNA, 20 bp, synthetic construct
  misc_feature 1..20: note = chemically synthesized
  source 1..20: mol_type = other DNA
ggaaaggaaaggaaagggag

SEQ ID NO: 66060 - DNA, 20 bp, synthetic construct
  misc_feature 1..20: note = chemically synthesized
  source 1..20: mol_type = other DNA
ggagaaagaaaggaaggaag

SEQ ID NO: 66061 - DNA, 20 bp, synthetic construct
  misc_feature 1..20: note = chemically synthesized
  source 1..20: mol_type = other DNA
aggaaggaagaaaaagagag

SEQ ID NO: 66062 - DNA, 20 bp, synthetic construct
  misc_feature 1..20: note = chemically synthesized
  source 1..20: mol_type = other DNA
aaagagagagagaaataagg

SEQ ID NO: 66063 - DNA, 20 bp, synthetic construct
  misc_feature 1..20: note = chemically synthesized
  source 1..20: mol_type = other DNA
agagagagaaataaggaaag

SEQ ID NO: 66064 - DNA, 20 bp, synthetic construct
  misc_feature 1..20: note = chemically synthesized
  source 1..20: mol_type = other DNA
gaaataaggaaagaaagaaa

SEQ ID NO: 66065 - DNA, 20 bp, synthetic construct
  misc_feature 1..20: note = chemically synthesized
  source 1..20: mol_type = other DNA
acatcgaagtactaaacaat

SEQ ID NO: 66066 - DNA, 20 bp, synthetic construct
  misc_feature 1..20: note = chemically synthesized
  source 1..20: mol_type = other DNA
caaaaccaatggcttgatca

SEQ ID NO: 66067 - DNA, 20 bp, synthetic construct
  misc_feature 1..20: note = chemically synthesized
  source 1..20: mol_type = other DNA
gtcacttcttagctacaagt

SEQ ID NO: 66068 - DNA, 20 bp, synthetic construct
  misc_feature 1..20: note = chemically synthesized
  source 1..20: mol_type = other DNA
gcgagtgtcacatatattat

SEQ ID NO: 66069 - DNA, 20 bp, synthetic construct
  misc_feature 1..20: note = chemically synthesized
  source 1..20: mol_type = other DNA
cacgatcttagactacttaa

SEQ ID NO: 66070 - DNA, 20 bp, synthetic construct
  misc_feature 1..20: note = chemically synthesized
  source 1..20: mol_type = other DNA
atccaatgaaaaaagagatt

SEQ ID NO: 66071 - DNA, 20 bp, synthetic construct
  misc_feature 1..20: note = chemically synthesized
  source 1..20: mol_type = other DNA
atgcagatatctttatacat

SEQ ID NO: 66072 - DNA, 20 bp, synthetic construct
  misc_feature 1..20: note = chemically synthesized
  source 1..20: mol_type = other DNA
gggtagtgagttttgaatca

SEQ ID NO: 66073 - DNA, 20 bp, synthetic construct
  misc_feature 1..20: note = chemically synthesized
  source 1..20: mol_type = other DNA
agtgagttttgaatcaatag

SEQ ID NO: 66074 - DNA, 20 bp, synthetic construct
  misc_feature 1..20: note = chemically synthesized
  source 1..20: mol_type = other DNA
attttgtaaagggttgaatt

SEQ ID NO: 66075 - DNA, 20 bp, synthetic construct
  misc_feature 1..20: note = chemically synthesized
  source 1..20: mol_type = other DNA
ctcttagagactctccttcc

SEQ ID NO: 66076 - DNA, 20 bp, synthetic construct
  misc_feature 1..20: note = chemically synthesized
  source 1..20: mol_type = other DNA
ttcccaggttggggaggaaa

SEQ ID NO: 66077 - DNA, 20 bp, synthetic construct
  misc_feature 1..20: note = chemically synthesized
  source 1..20: mol_type = other DNA
atatcctatgtggaaatgag

SEQ ID NO: 66078 - DNA, 20 bp, synthetic construct
  misc_feature 1..20: note = chemically synthesized
  source 1..20: mol_type = other DNA
tgtaacaaatatatctctca

SEQ ID NO: 66079 - DNA, 20 bp, synthetic construct
  misc_feature 1..20: note = chemically synthesized
  source 1..20: mol_type = other DNA
aaccaatattcaggtcatgc

SEQ ID NO: 66080 - DNA, 20 bp, synthetic construct
  misc_feature 1..20: note = chemically synthesized
  source 1..20: mol_type = other DNA
gtcatgctcagaaaccgcaa

SEQ ID NO: 66081 - DNA, 20 bp, synthetic construct
  misc_feature 1..20: note = chemically synthesized
  source 1..20: mol_type = other DNA
agagaaaactgtggctcagg

SEQ ID NO: 66082 - DNA, 20 bp, synthetic construct
  misc_feature 1..20: note = chemically synthesized
  source 1..20: mol_type = other DNA
tccatttgatggacattggt

SEQ ID NO: 66083 - DNA, 20 bp, synthetic construct
  misc_feature 1..20: note = chemically synthesized
  source 1..20: mol_type = other DNA
atgatggatctatgttacct

SEQ ID NO: 66084 - DNA, 20 bp, synthetic construct
  misc_feature 1..20: note = chemically synthesized
  source 1..20: mol_type = other DNA
actctgggatagttgctgtc

SEQ ID NO: 66085 - DNA, 20 bp, synthetic construct
  misc_feature 1..20: note = chemically synthesized
  source 1..20: mol_type = other DNA
aagaatcagtccaaaggcac

SEQ ID NO: 66086 - DNA, 20 bp, synthetic construct
  misc_feature 1..20: note = chemically synthesized
  source 1..20: mol_type = other DNA
ttgaaaacacgactatagtt

SEQ ID NO: 66087 - DNA, 20 bp, synthetic construct
  misc_feature 1..20: note = chemically synthesized
  source 1..20: mol_type = other DNA
ttaaaagactctggacacat

SEQ ID NO: 66088 - DNA, 20 bp, synthetic construct
  misc_feature 1..20: note = chemically synthesized
  source 1..20: mol_type = other DNA
tacagaatcaattgaatttg

SEQ ID NO: 66089 - DNA, 20 bp, synthetic construct
  misc_feature 1..20: note = chemically synthesized
  source 1..20: mol_type = other DNA
cagctgtcccattagtttca

SEQ ID NO: 66090 - DNA, 20 bp, synthetic construct
  misc_feature 1..20: note = chemically synthesized
  source 1..20: mol_type = other DNA
gaggaggaataaaagagtaa

SEQ ID NO: 66091 - DNA, 20 bp, synthetic construct
  misc_feature 1..20: note = chemically synthesized
  source 1..20: mol_type = other DNA
ttaattaagtatgagacaat

SEQ ID NO: 66092 - DNA, 20 bp, synthetic construct
  misc_feature 1..20: note = chemically synthesized
  source 1..20: mol_type = other DNA
tgtgctacaagaagattgtg

SEQ ID NO: 66093 - DNA, 20 bp, synthetic construct
  misc_feature 1..20: note = chemically synthesized
  source 1..20: mol_type = other DNA
caagaagattgtgagagaaa

SEQ ID NO: 66094 - DNA, 20 bp, synthetic construct
  misc_feature 1..20: note = chemically synthesized
  source 1..20: mol_type = other DNA
tcattcattcactggccatt

SEQ ID NO: 66095 - DNA, 20 bp, synthetic construct
  misc_feature 1..20: note = chemically synthesized
  source 1..20: mol_type = other DNA
gtagggcttgagcccttatt

SEQ ID NO: 66096 - DNA, 20 bp, synthetic construct
  misc_feature 1..20: note = chemically synthesized
  source 1..20: mol_type = other DNA
catgaaaaagctgatgtgag

SEQ ID NO: 66097 - DNA, 20 bp, synthetic construct
  misc_feature 1..20: note = chemically synthesized
  source 1..20: mol_type = other DNA
gagggaatgccagtgatgct

SEQ ID NO: 66098 - DNA, 20 bp, synthetic construct
  misc_feature 1..20: note = chemically synthesized
  source 1..20: mol_type = other DNA
atgccagtgatgctgaagaa

SEQ ID NO: 66099 - DNA, 20 bp, synthetic construct
  misc_feature 1..20: note = chemically synthesized
  source 1..20: mol_type = other DNA
aaagaagagtaactatgatt

SEQ ID NO: 66100 - DNA, 20 bp, synthetic construct
  misc_feature 1..20: note = chemically synthesized
  source 1..20: mol_type = other DNA
gggtcaaatacagttcatct

SEQ ID NO: 66101 - DNA, 20 bp, synthetic construct
  misc_feature 1..20: note = chemically synthesized
  source 1..20: mol_type = other DNA
ggcaaaggtaatgttatatt

SEQ ID NO: 66102 - DNA, 20 bp, synthetic construct
  misc_feature 1..20: note = chemically synthesized
  source 1..20: mol_type = other DNA
taaattctctctgcttcact

SEQ ID NO: 66103 - DNA, 20 bp, synthetic construct
  misc_feature 1..20: note = chemically synthesized
  source 1..20: mol_type = other DNA
aaaatattccagagatttga

SEQ ID NO: 66104 - DNA, 20 bp, synthetic construct
  misc_feature 1..20: note = chemically synthesized
  source 1..20: mol_type = other DNA
gcatacagagtttattctat

SEQ ID NO: 66105 - DNA, 20 bp, synthetic construct
  misc_feature 1..20: note = chemically synthesized
  source 1..20: mol_type = other DNA
taaggtatgatagcgaagtc

SEQ ID NO: 66106 - DNA, 20 bp, synthetic construct
  misc_feature 1..20: note = chemically synthesized
  source 1..20: mol_type = other DNA
taatgatagggacaggaggc

SEQ ID NO: 66107 - DNA, 20 bp, synthetic construct
  misc_feature 1..20: note = chemically synthesized
  source 1..20: mol_type = other DNA
aggaggcagagaaattttag

SEQ ID NO: 66108 - DNA, 20 bp, synthetic construct
  misc_feature 1..20: note = chemically synthesized
  source 1..20: mol_type = other DNA
ctgtcttattcatgcacttt

SEQ ID NO: 66109 - DNA, 20 bp, synthetic construct
  misc_feature 1..20: note = chemically synthesized
  source 1..20: mol_type = other DNA
aaagtattgaccaataagga

SEQ ID NO: 66110 - DNA, 20 bp, synthetic construct
  misc_feature 1..20: note = chemically synthesized
  source 1..20: mol_type = other DNA
gtagtttgaaaagcctagat

SEQ ID NO: 66111 - DNA, 20 bp, synthetic construct
  misc_feature 1..20: note = chemically synthesized
  source 1..20: mol_type = other DNA
gagttcagtatataattgta

SEQ ID NO: 66112 - DNA, 20 bp, synthetic construct
  misc_feature 1..20: note = chemically synthesized
  source 1..20: mol_type = other DNA
gaacctaagctgattcggcc

SEQ ID NO: 66113 - DNA, 20 bp, synthetic construct
  misc_feature 1..20: note = chemically synthesized
  source 1..20: mol_type = other DNA
gctgtcagatgaatactgag

SEQ ID NO: 66114 - DNA, 20 bp, synthetic construct
  misc_feature 1..20: note = chemically synthesized
  source 1..20: mol_type = other DNA
gatgaaggcaggtgactcta

SEQ ID NO: 66115 - DNA, 20 bp, synthetic construct
  misc_feature 1..20: note = chemically synthesized
  source 1..20: mol_type = other DNA
tgtgtaggttgaaatgagct

SEQ ID NO: 66116 - DNA, 20 bp, synthetic construct
  misc_feature 1..20: note = chemically synthesized
  source 1..20: mol_type = other DNA
taatgtgaagtgactttaaa

SEQ ID NO: 66117 - DNA, 20 bp, synthetic construct
  misc_feature 1..20: note = chemically synthesized
  source 1..20: mol_type = other DNA
acctgtagatacaaaaagtt

SEQ ID NO: 66118 - DNA, 20 bp, synthetic construct
  misc_feature 1..20: note = chemically synthesized
  source 1..20: mol_type = other DNA
caaaaatctattaatccttg

SEQ ID NO: 66119 - DNA, 20 bp, synthetic construct
  misc_feature 1..20: note = chemically synthesized
  source 1..20: mol_type = other DNA
gataaaacactggtttacat

SEQ ID NO: 66120 - DNA, 20 bp, synthetic construct
  misc_feature 1..20: note = chemically synthesized
  source 1..20: mol_type = other DNA
tccttataaaagtgataatt

SEQ ID NO: 66121 - DNA, 20 bp, synthetic construct
  misc_feature 1..20: note = chemically synthesized
  source 1..20: mol_type = other DNA
cacttatcactataaacatc

SEQ ID NO: 66122 - DNA, 20 bp, synthetic construct
  misc_feature 1..20: note = chemically synthesized
  source 1..20: mol_type = other DNA
tttaaatagttaggaataat

SEQ ID NO: 66123 - DNA, 20 bp, synthetic construct
  misc_feature 1..20: note = chemically synthesized
  source 1..20: mol_type = other DNA
cttggttctagttgcttctt

SEQ ID NO: 66124 - DNA, 20 bp, synthetic construct
  misc_feature 1..20: note = chemically synthesized
  source 1..20: mol_type = other DNA
ctactttttagtacatctaa

SEQ ID NO: 66125 - DNA, 20 bp, synthetic construct
  misc_feature 1..20: note = chemically synthesized
  source 1..20: mol_type = other DNA
ctaaccttccctcgctttgc

SEQ ID NO: 66126 - DNA, 20 bp, synthetic construct
  misc_feature 1..20: note = chemically synthesized
  source 1..20: mol_type = other DNA
tcaactcatgatatttggct

SEQ ID NO: 66127 - DNA, 20 bp, synthetic construct
  misc_feature 1..20: note = chemically synthesized
  source 1..20: mol_type = other DNA
aaataagacataatttgggg

SEQ ID NO: 66128 - DNA, 20 bp, synthetic construct
  misc_feature 1..20: note = chemically synthesized
  source 1..20: mol_type = other DNA
gatgtgggtggggccagata

SEQ ID NO: 66129 - DNA, 20 bp, synthetic construct
  misc_feature 1..20: note = chemically synthesized
  source 1..20: mol_type = other DNA
gaccacgaacccatcagaag

SEQ ID NO: 66130 - DNA, 20 bp, synthetic construct
  misc_feature 1..20: note = chemically synthesized
  source 1..20: mol_type = other DNA
ccaattccggacacagtatg

SEQ ID NO: 66131 - DNA, 20 bp, synthetic construct
  misc_feature 1..20: note = chemically synthesized
  source 1..20: mol_type = other DNA
tctttcccttcctctatgtg

SEQ ID NO: 66132 - DNA, 20 bp, synthetic construct
  misc_feature 1..20: note = chemically synthesized
  source 1..20: mol_type = other DNA
tctgactgtgacgtagcaat

SEQ ID NO: 66133 - DNA, 20 bp, synthetic construct
  misc_feature 1..20: note = chemically synthesized
  source 1..20: mol_type = other DNA
atttcaagttctttacaggc

SEQ ID NO: 66134 - DNA, 20 bp, synthetic construct
  misc_feature 1..20: note = chemically synthesized
  source 1..20: mol_type = other DNA
tttcccacagtctgttggtc

SEQ ID NO: 66135 - DNA, 20 bp, synthetic construct
  misc_feature 1..20: note = chemically synthesized
  source 1..20: mol_type = other DNA
agtgattactgatgaaagag

SEQ ID NO: 66136 - DNA, 20 bp, synthetic construct
  misc_feature 1..20: note = chemically synthesized
  source 1..20: mol_type = other DNA
tctttctttatttcaagagt

SEQ ID NO: 66137 - DNA, 20 bp, synthetic construct
  misc_feature 1..20: note = chemically synthesized
  source 1..20: mol_type = other DNA
aaagagctctttcaagagac

SEQ ID NO: 66138 - DNA, 20 bp, synthetic construct
  misc_feature 1..20: note = chemically synthesized
  source 1..20: mol_type = other DNA
gctctttcaagagacagaga

SEQ ID NO: 66139 - DNA, 20 bp, synthetic construct
  misc_feature 1..20: note = chemically synthesized
  source 1..20: mol_type = other DNA
gtttatatacatctgtattg

SEQ ID NO: 66140 - DNA, 20 bp, synthetic construct
  misc_feature 1..20: note = chemically synthesized
  source 1..20: mol_type = other DNA
accacagggttaagggggca

SEQ ID NO: 66141 - DNA, 20 bp, synthetic construct
  misc_feature 1..20: note = chemically synthesized
  source 1..20: mol_type = other DNA
aatgtataaataagtggatg

SEQ ID NO: 66142 - DNA, 20 bp, synthetic construct
  misc_feature 1..20: note = chemically synthesized
  source 1..20: mol_type = other DNA
gatagacagatagatgatag

SEQ ID NO: 66143 - DNA, 20 bp, synthetic construct
  misc_feature 1..20: note = chemically synthesized
  source 1..20: mol_type = other DNA
agctgaacttggtcaacaaa

SEQ ID NO: 66144 - DNA, 20 bp, synthetic construct
  misc_feature 1..20: note = chemically synthesized
  source 1..20: mol_type = other DNA
gtgaaaccttgcctcacgaa

SEQ ID NO: 66145 - DNA, 20 bp, synthetic construct
  misc_feature 1..20: note = chemically synthesized
  source 1..20: mol_type = other DNA
ttgtaatattgatattattc

SEQ ID NO: 66146 - DNA, 20 bp, synthetic construct
  misc_feature 1..20: note = chemically synthesized
  source 1..20: mol_type = other DNA
ggaataacagaacaagattg

SEQ ID NO: 66147 - DNA, 20 bp, synthetic construct
  misc_feature 1..20: note = chemically synthesized
  source 1..20: mol_type = other DNA
tctcattctttttcttagtg

SEQ ID NO: 66148 - DNA, 20 bp, synthetic construct
  misc_feature 1..20: note = chemically synthesized
  source 1..20: mol_type = other DNA
tctttttcttagtgtgagaa

SEQ ID NO: 66149 - DNA, 20 bp, synthetic construct
  misc_feature 1..20: note = chemically synthesized
  source 1..20: mol_type = other DNA
taaatgatatatttatttta

SEQ ID NO: 66150 - DNA, 20 bp, synthetic construct
  misc_feature 1..20: note = chemically synthesized
  source 1..20: mol_type = other DNA
ggctgtgacatggaaactat

SEQ ID NO: 66151 - DNA, 20 bp, synthetic construct
  misc_feature 1..20: note = chemically synthesized
  source 1..20: mol_type = other DNA
gctcactgcacatacactag

SEQ ID NO: 66152 - DNA, 20 bp, synthetic construct
  misc_feature 1..20: note = chemically synthesized
  source 1..20: mol_type = other DNA
tgatcatttccatgtcatac

SEQ ID NO: 66153 - DNA, 20 bp, synthetic construct
  misc_feature 1..20: note = chemically synthesized
  source 1..20: mol_type = other DNA
ttttttaattagtttgtttt

SEQ ID NO: 66154 - DNA, 20 bp, synthetic construct
  misc_feature 1..20: note = chemically synthesized
  source 1..20: mol_type = other DNA
acttataaatgctaactact

SEQ ID NO: 66155 - DNA, 20 bp, synthetic construct
  misc_feature 1..20: note = chemically synthesized
  source 1..20: mol_type = other DNA
acataaactactagcaaata

SEQ ID NO: 66156 - DNA, 20 bp, synthetic construct
  misc_feature 1..20: note = chemically synthesized
  source 1..20: mol_type = other DNA
tcccaggccaagttatccat

SEQ ID NO: 66157 - DNA, 20 bp, synthetic construct
  misc_feature 1..20: note = chemically synthesized
  source 1..20: mol_type = other DNA
ttaacaaatgcatgaatgct

SEQ ID NO: 66158 - DNA, 20 bp, synthetic construct
  misc_feature 1..20: note = chemically synthesized
  source 1..20: mol_type = other DNA
ttagaagattcttctgtgtg

SEQ ID NO: 66159 - DNA, 20 bp, synthetic construct
  misc_feature 1..20: note = chemically synthesized
  source 1..20: mol_type = other DNA
atctgtgagctcctcaccat

SEQ ID NO: 66160 - DNA, 20 bp, synthetic construct
  misc_feature 1..20: note = chemically synthesized
  source 1..20: mol_type = other DNA
ttcccaaactcatatagctc

SEQ ID NO: 66161 - DNA, 20 bp, synthetic construct
  misc_feature 1..20: note = chemically synthesized
  source 1..20: mol_type = other DNA
ttgcatgaatcagattatca

SEQ ID NO: 66162 - DNA, 20 bp, synthetic construct
  misc_feature 1..20: note = chemically synthesized
  source 1..20: mol_type = other DNA
cccattcagggctccagcat

SEQ ID NO: 66163 - DNA, 20 bp, synthetic construct
  misc_feature 1..20: note = chemically synthesized
  source 1..20: mol_type = other DNA
tgctgagatgatctatgtgg

SEQ ID NO: 66164 - DNA, 20 bp, synthetic construct
  misc_feature 1..20: note = chemically synthesized
  source 1..20: mol_type = other DNA
tgtggggagaatggcttctt

SEQ ID NO: 66165 - DNA, 20 bp, synthetic construct
  misc_feature 1..20: note = chemically synthesized
  source 1..20: mol_type = other DNA
cctcattcccactttaatat

SEQ ID NO: 66166 - DNA, 20 bp, synthetic construct
  misc_feature 1..20: note = chemically synthesized
  source 1..20: mol_type = other DNA
aatatccagaatcactataa

SEQ ID NO: 66167 - DNA, 20 bp, synthetic construct
  misc_feature 1..20: note = chemically synthesized
  source 1..20: mol_type = other DNA
gaagcccaaggttctgaaca

SEQ ID NO: 66168 - DNA, 20 bp, synthetic construct
  misc_feature 1..20: note = chemically synthesized
  source 1..20: mol_type = other DNA
gaaacaagatggtgaaggga

SEQ ID NO: 66169 - DNA, 20 bp, synthetic construct
  misc_feature 1..20: note = chemically synthesized
  source 1..20: mol_type = other DNA
tcttgagtacttagtatatg

SEQ ID NO: 66170 - DNA, 20 bp, synthetic construct
  misc_feature 1..20: note = chemically synthesized
  source 1..20: mol_type = other DNA
ctactcaggaggctgaggca

SEQ ID NO: 66171 - DNA, 20 bp, synthetic construct
  misc_feature 1..20: note = chemically synthesized
  source 1..20: mol_type = other DNA
aaactcagatattgtggatg

SEQ ID NO: 66172 - DNA, 20 bp, synthetic construct
  misc_feature 1..20: note = chemically synthesized
  source 1..20: mol_type = other DNA
tttcttcaggaaagtttgag

SEQ ID NO: 66173 - DNA, 20 bp, synthetic construct
  misc_feature 1..20: note = chemically synthesized
  source 1..20: mol_type = other DNA
agtttgagggagaaaaaggt

SEQ ID NO: 66174 - DNA, 20 bp, synthetic construct
  misc_feature 1..20: note = chemically synthesized
  source 1..20: mol_type = other DNA
agaaaaaggtaaagaaaaat

SEQ ID NO: 66175 - DNA, 20 bp, synthetic construct
  misc_feature 1..20: note = chemically synthesized
  source 1..20: mol_type = other DNA
agaaaaatttagaaacaact

SEQ ID NO: 66176 - DNA, 20 bp, synthetic construct
  misc_feature 1..20: note = chemically synthesized
  source 1..20: mol_type = other DNA
acaaattataagcagacact

SEQ ID NO: 66177 - DNA, 20 bp, synthetic construct
  misc_feature 1..20: note = chemically synthesized
  source 1..20: mol_type = other DNA
cctgcagtgacctcagtgcc

SEQ ID NO: 66178 - DNA, 20 bp, synthetic construct
  misc_feature 1..20: note = chemically synthesized
  source 1..20: mol_type = other DNA
gtggtgctgtgataggtaca

SEQ ID NO: 66179 - DNA, 20 bp, synthetic construct
  misc_feature 1..20: note = chemically synthesized
  source 1..20: mol_type = other DNA
gataggtacacaagaaatga

SEQ ID NO: 66180 - DNA, 20 bp, synthetic construct
  misc_feature 1..20: note = chemically synthesized
  source 1..20: mol_type = other DNA
attgtctttctcatctgtaa

SEQ ID NO: 66181 - DNA, 20 bp, synthetic construct
  misc_feature 1..20: note = chemically synthesized
  source 1..20: mol_type = other DNA
tgggtgaatgagagggtaag

SEQ ID NO: 66182 - DNA, 20 bp, synthetic construct
  misc_feature 1..20: note = chemically synthesized
  source 1..20: mol_type = other DNA
ctgctgccaacattaacagt

SEQ ID NO: 66183 - DNA, 20 bp, synthetic construct
  misc_feature 1..20: note = chemically synthesized
  source 1..20: mol_type = other DNA
atatttatcataatactgta

SEQ ID NO: 66184 - DNA, 20 bp, synthetic construct
  misc_feature 1..20: note = chemically synthesized
  source 1..20: mol_type = other DNA
tagacttatgaaatttctga

SEQ ID NO: 66185 - DNA, 20 bp, synthetic construct
  misc_feature 1..20: note = chemically synthesized
  source 1..20: mol_type = other DNA
ttctgatgagaaaggagaga

SEQ ID NO: 66186 - DNA, 20 bp, synthetic construct
  misc_feature 1..20: note = chemically synthesized
  source 1..20: mol_type = other DNA
agcttgccctgatgggagat

SEQ ID NO: 66187 - DNA, 20 bp, synthetic construct
  misc_feature 1..20: note = chemically synthesized
  source 1..20: mol_type = other DNA
ctctaaaataatccacagtg

SEQ ID NO: 66188 - DNA, 20 bp, synthetic construct
  misc_feature 1..20: note = chemically synthesized
  source 1..20: mol_type = other DNA
ctattagggtggctgaggca

SEQ ID NO: 66189 - DNA, 20 bp, synthetic construct
  misc_feature 1..20: note = chemically synthesized
  source 1..20: mol_type = other DNA
tccacctcaaacggcatcat

SEQ ID NO: 66190 - DNA, 20 bp, synthetic construct
  misc_feature 1..20: note = chemically synthesized
  source 1..20: mol_type = other DNA
aaagaaaatggatgcctgag

SEQ ID NO: 66191 - DNA, 20 bp, synthetic construct
  misc_feature 1..20: note = chemically synthesized
  source 1..20: mol_type = other DNA
gagacagaatgtgacatatt

SEQ ID NO: 66192 - DNA, 20 bp, synthetic construct
  misc_feature 1..20: note = chemically synthesized
  source 1..20: mol_type = other DNA
atttgttgttatcaattgcc

SEQ ID NO: 66193 - DNA, 20 bp, synthetic construct
  misc_feature 1..20: note = chemically synthesized
  source 1..20: mol_type = other DNA
ggcctctatacctagaagcg

SEQ ID NO: 66194 - DNA, 20 bp, synthetic construct
  misc_feature 1..20: note = chemically synthesized
  source 1..20: mol_type = other DNA
aggaaggcatgaaaacagga

SEQ ID NO: 66195 - DNA, 20 bp, synthetic construct
  misc_feature 1..20: note = chemically synthesized
  source 1..20: mol_type = other DNA
gcaactctgatcctgagagg

SEQ ID NO: 66196 - DNA, 20 bp, synthetic construct
  misc_feature 1..20: note = chemically synthesized
  source 1..20: mol_type = other DNA
agacagacataatgcttgtg

SEQ ID NO: 66197 - DNA, 20 bp, synthetic construct
  misc_feature 1..20: note = chemically synthesized
  source 1..20: mol_type = other DNA
ggggatagagaaggcttcca

SEQ ID NO: 66198 - DNA, 20 bp, synthetic construct
  misc_feature 1..20: note = chemically synthesized
  source 1..20: mol_type = other DNA
ttcacagtggcaaagatgtt

SEQ ID NO: 66199 - DNA, 20 bp, synthetic construct
  misc_feature 1..20: note = chemically synthesized
  source 1..20: mol_type = other DNA
ggttcaagtgtatgtttgtg

SEQ ID NO: 66200 - DNA, 20 bp, synthetic construct
  misc_feature 1..20: note = chemically synthesized
  source 1..20: mol_type = other DNA
tctaacataaacacaaacat

SEQ ID NO: 66201 - DNA, 20 bp, synthetic construct
  misc_feature 1..20: note = chemically synthesized
  source 1..20: mol_type = other DNA
ccatttaaatcacaaattaa

SEQ ID NO: 66202 - DNA, 20 bp, synthetic construct
  misc_feature 1..20: note = chemically synthesized
  source 1..20: mol_type = other DNA
aaaaaattccatggatgggt

SEQ ID NO: 66203 - DNA, 20 bp, synthetic construct
  misc_feature 1..20: note = chemically synthesized
  source 1..20: mol_type = other DNA
tgaaatatgtggctaaataa

SEQ ID NO: 66204 - DNA, 20 bp, synthetic construct
  misc_feature 1..20: note = chemically synthesized
  source 1..20: mol_type = other DNA
attttcattttatattgggc

SEQ ID NO: 66205 - DNA, 20 bp, synthetic construct
  misc_feature 1..20: note = chemically synthesized
  source 1..20: mol_type = other DNA
ctacttgggaggctgaggca

SEQ ID NO: 66206 - DNA, 20 bp, synthetic construct
  misc_feature 1..20: note = chemically synthesized
  source 1..20: mol_type = other DNA
tccagagcgagactctgtct

SEQ ID NO: 66207 - DNA, 20 bp, synthetic construct
  misc_feature 1..20: note = chemically synthesized
  source 1..20: mol_type = other DNA
ccatcaaattccctgaccga

SEQ ID NO: 66208 - DNA, 20 bp, synthetic construct
  misc_feature 1..20: note = chemically synthesized
  source 1..20: mol_type = other DNA
atctaccattttccctcctt

SEQ ID NO: 66209 - DNA, 20 bp, synthetic construct
  misc_feature 1..20: note = chemically synthesized
  source 1..20: mol_type = other DNA
agaagcctctggtcagcatc

SEQ ID NO: 66210 - DNA, 20 bp, synthetic construct
  misc_feature 1..20: note = chemically synthesized
  source 1..20: mol_type = other DNA
actctgacatatactcacag

SEQ ID NO: 66211 - DNA, 20 bp, synthetic construct
  misc_feature 1..20: note = chemically synthesized
  source 1..20: mol_type = other DNA
caccaattccatattctctg

SEQ ID NO: 66212 - DNA, 20 bp, synthetic construct
  misc_feature 1..20: note = chemically synthesized
  source 1..20: mol_type = other DNA
atccactgctatgcacacac

SEQ ID NO: 66213 - DNA, 20 bp, synthetic construct
  misc_feature 1..20: note = chemically synthesized
  source 1..20: mol_type = other DNA
cttgatgggattactgagtt

SEQ ID NO: 66214 - DNA, 20 bp, synthetic construct
  misc_feature 1..20: note = chemically synthesized
  source 1..20: mol_type = other DNA
ttcatcagtcaggtaaaagt

SEQ ID NO: 66215 - DNA, 20 bp, synthetic construct
  misc_feature 1..20: note = chemically synthesized
  source 1..20: mol_type = other DNA
ataagcatacttctattcaa

SEQ ID NO: 66216 - DNA, 20 bp, synthetic construct
  misc_feature 1..20: note = chemically synthesized
  source 1..20: mol_type = other DNA
atattctgtaagattatagt

SEQ ID NO: 66217 - DNA, 20 bp, synthetic construct
  misc_feature 1..20: note = chemically synthesized
  source 1..20: mol_type = other DNA
ttttctatgtatctacttgt

SEQ ID NO: 66218 - DNA, 20 bp, synthetic construct
  misc_feature 1..20: note = chemically synthesized
  source 1..20: mol_type = other DNA
gctatcaccatcccaagtct

SEQ ID NO: 66219 - DNA, 20 bp, synthetic construct
  misc_feature 1..20: note = chemically synthesized
  source 1..20: mol_type = other DNA
ggtttgcccatctctgttga

SEQ ID NO: 66220 - DNA, 20 bp, synthetic construct
  misc_feature 1..20: note = chemically synthesized
  source 1..20: mol_type = other DNA
taaaataagcccctaagctc

SEQ ID NO: 66221 - DNA, 20 bp, synthetic construct
  misc_feature 1..20: note = chemically synthesized
  source 1..20: mol_type = other DNA
catgactaaaccagcaagaa

SEQ ID NO: 66222 - DNA, 20 bp, synthetic construct
  misc_feature 1..20: note = chemically synthesized
  source 1..20: mol_type = other DNA
tgtctgaatgaggcttgagt

SEQ ID NO: 66223 - DNA, 20 bp, synthetic construct
  misc_feature 1..20: note = chemically synthesized
  source 1..20: mol_type = other DNA
cagaacaaactcctgtgggg

SEQ ID NO: 66224 - DNA, 20 bp, synthetic construct
  misc_feature 1..20: note = chemically synthesized
  source 1..20: mol_type = other DNA
cctcagttttaaccttctcc

SEQ ID NO: 66225 - DNA, 20 bp, synthetic construct
  misc_feature 1..20: note = chemically synthesized
  source 1..20: mol_type = other DNA
ctgaagatagcatgcatagg

SEQ ID NO: 66226 - DNA, 20 bp, synthetic construct
  misc_feature 1..20: note = chemically synthesized
  source 1..20: mol_type = other DNA
agctttatgttgctgttgtt

SEQ ID NO: 66227 - DNA, 20 bp, synthetic construct
  misc_feature 1..20: note = chemically synthesized
  source 1..20: mol_type = other DNA
gcaatttaattaaaaaaacc

SEQ ID NO: 66228 - DNA, 20 bp, synthetic construct
  misc_feature 1..20: note = chemically synthesized
  source 1..20: mol_type = other DNA
taaaaaaacccaagaatttc

SEQ ID NO: 66229 - DNA, 20 bp, synthetic construct
  misc_feature 1..20: note = chemically synthesized
  source 1..20: mol_type = other DNA
actcaaggtcccaaaaggtc

SEQ ID NO: 66230 - DNA, 20 bp, synthetic construct
  misc_feature 1..20: note = chemically synthesized
  source 1..20: mol_type = other DNA
ccagagagagagattactct

SEQ ID NO: 66231 - DNA, 20 bp, synthetic construct
  misc_feature 1..20: note = chemically synthesized
  source 1..20: mol_type = other DNA
cttaaaataaaagttgaaaa

SEQ ID NO: 66232 - DNA, 20 bp, synthetic construct
  misc_feature 1..20: note = chemically synthesized
  source 1..20: mol_type = other DNA
tctcattctttacaattaca

SEQ ID NO: 66233 - DNA, 20 bp, synthetic construct
  misc_feature 1..20: note = chemically synthesized
  source 1..20: mol_type = other DNA
aggcttcctgcaaggcagcc

SEQ ID NO: 66234 - DNA, 20 bp, synthetic construct
  misc_feature 1..20: note = chemically synthesized
  source 1..20: mol_type = other DNA
aaaatctaacacaaaatcta

SEQ ID NO: 66235 - DNA, 20 bp, synthetic construct
  misc_feature 1..20: note = chemically synthesized
  source 1..20: mol_type = other DNA
gcttacatctatttttgttc

SEQ ID NO: 66236 - DNA, 20 bp, synthetic construct
  misc_feature 1..20: note = chemically synthesized
  source 1..20: mol_type = other DNA
gatttagatacataatggaa

SEQ ID NO: 66237 - DNA, 20 bp, synthetic construct
  misc_feature 1..20: note = chemically synthesized
  source 1..20: mol_type = other DNA
taatttaaaatctggctaat

SEQ ID NO: 66238 - DNA, 20 bp, synthetic construct
  misc_feature 1..20: note = chemically synthesized
  source 1..20: mol_type = other DNA
taaagtaagttatttgtggt

SEQ ID NO: 66239 - DNA, 20 bp, synthetic construct
  misc_feature 1..20: note = chemically synthesized
  source 1..20: mol_type = other DNA
gaagggcctactttacttaa

SEQ ID NO: 66240 - DNA, 20 bp, synthetic construct
  misc_feature 1..20: note = chemically synthesized
  source 1..20: mol_type = other DNA
aaacatatgtcataaattag

SEQ ID NO: 66241 - DNA, 20 bp, synthetic construct
  misc_feature 1..20: note = chemically synthesized
  source 1..20: mol_type = other DNA
ataaattagccagaaagatt

SEQ ID NO: 66242 - DNA, 20 bp, synthetic construct
  misc_feature 1..20: note = chemically synthesized
  source 1..20: mol_type = other DNA
aattaggcatcttacagttt

SEQ ID NO: 66243 - DNA, 20 bp, synthetic construct
  misc_feature 1..20: note = chemically synthesized
  source 1..20: mol_type = other DNA
ttagaatcctgcatagaact

SEQ ID NO: 66244 - DNA, 20 bp, synthetic construct
  misc_feature 1..20: note = chemically synthesized
  source 1..20: mol_type = other DNA
ctttgggcttttaatatagg

SEQ ID NO: 66245 - DNA, 20 bp, synthetic construct
  misc_feature 1..20: note = chemically synthesized
  source 1..20: mol_type = other DNA
aaccataggcagtaaggaga

SEQ ID NO: 66246 - DNA, 20 bp, synthetic construct
  misc_feature 1..20: note = chemically synthesized
  source 1..20: mol_type = other DNA
ggtgtccatactctgaatgg

SEQ ID NO: 66247 - DNA, 20 bp, synthetic construct
  misc_feature 1..20: note = chemically synthesized
  source 1..20: mol_type = other DNA
acccatagggcttgttttag

SEQ ID NO: 66248 - DNA, 20 bp, synthetic construct
  misc_feature 1..20: note = chemically synthesized
  source 1..20: mol_type = other DNA
ctagggggctggtgaagttt

SEQ ID NO: 66249 - DNA, 20 bp, synthetic construct
  misc_feature 1..20: note = chemically synthesized
  source 1..20: mol_type = other DNA
ctttgaatgcaaaggacaaa

SEQ ID NO: 66250 - DNA, 20 bp, synthetic construct
  misc_feature 1..20: note = chemically synthesized
  source 1..20: mol_type = other DNA
tacctattgcatagttataa

SEQ ID NO: 66251 - DNA, 20 bp, synthetic construct
  misc_feature 1..20: note = chemically synthesized
  source 1..20: mol_type = other DNA
ttgtctgtgttagccaatgg

SEQ ID NO: 66252 - DNA, 20 bp, synthetic construct
  misc_feature 1..20: note = chemically synthesized
  source 1..20: mol_type = other DNA
ccaatggttagaatatatgc

SEQ ID NO: 66253 - DNA, 20 bp, synthetic construct
  misc_feature 1..20: note = chemically synthesized
  source 1..20: mol_type = other DNA
ataccattggttaatagcta

SEQ ID NO: 66254 - DNA, 20 bp, synthetic construct
  misc_feature 1..20: note = chemically synthesized
  source 1..20: mol_type = other DNA
aatagctaaaagaaaatgga

SEQ ID NO: 66255 - DNA, 20 bp, synthetic construct
  misc_feature 1..20: note = chemically synthesized
  source 1..20: mol_type = other DNA
tgaagacttctggaatcatg

SEQ ID NO: 66256 - DNA, 20 bp, synthetic construct
  misc_feature 1..20: note = chemically synthesized
  source 1..20: mol_type = other DNA
ttttttttttatcacaaaca

SEQ ID NO: 66257 - DNA, 20 bp, synthetic construct
  misc_feature 1..20: note = chemically synthesized
  source 1..20: mol_type = other DNA
acaaagtcaggttatagaag

SEQ ID NO: 66258 - DNA, 20 bp, synthetic construct
  misc_feature 1..20: note = chemically synthesized
  source 1..20: mol_type = other DNA
acatacaggaaattgtagga

SEQ ID NO: 66259 - DNA, 20 bp, synthetic construct
  misc_feature 1..20: note = chemically synthesized
  source 1..20: mol_type = other DNA
gtggggcaaggggagccata

SEQ ID NO: 66260 - DNA, 20 bp, synthetic construct
  misc_feature 1..20: note = chemically synthesized
  source 1..20: mol_type = other DNA
ggcaaggggagccataggag

SEQ ID NO: 66261 - DNA, 20 bp, synthetic construct
  misc_feature 1..20: note = chemically synthesized
  source 1..20: mol_type = other DNA
agccataggagaaagaaatg

SEQ ID NO: 66262 - DNA, 20 bp, synthetic construct
  misc_feature 1..20: note = chemically synthesized
  source 1..20: mol_type = other DNA
ctgctcgggaggctgaggca

SEQ ID NO: 66263 - DNA, 20 bp, synthetic construct
  misc_feature 1..20: note = chemically synthesized
  source 1..20: mol_type = other DNA
ccgtctcaaaaaaaaaaaaa

SEQ ID NO: 66264 - DNA, 20 bp, synthetic construct
  misc_feature 1..20: note = chemically synthesized
  source 1..20: mol_type = other DNA
ctcaaaaaaaaaaaaaaaag

SEQ ID NO: 66265 - DNA, 20 bp, synthetic construct
  misc_feature 1..20: note = chemically synthesized
  source 1..20: mol_type = other DNA
aaaaaaaaaaaaaaagaaag

SEQ ID NO: 66266 - DNA, 20 bp, synthetic construct
  misc_feature 1..20: note = chemically synthesized
  source 1..20: mol_type = other DNA
aaaaaaaaaagaaagaaaga

SEQ ID NO: 66267 - DNA, 20 bp, synthetic construct
  misc_feature 1..20: note = chemically synthesized
  source 1..20: mol_type = other DNA
aaaagaaagaaagaaaagaa

SEQ ID NO: 66268 - DNA, 20 bp, synthetic construct
  misc_feature 1..20: note = chemically synthesized
  source 1..20: mol_type = other DNA
agaaagaaaagaaaaagaaa

SEQ ID NO: 66269 - DNA, 20 bp, synthetic construct
  misc_feature 1..20: note = chemically synthesized
  source 1..20: mol_type = other DNA
tggtgatgtaagggactttt

SEQ ID NO: 66270 - DNA, 20 bp, synthetic construct
  misc_feature 1..20: note = chemically synthesized
  source 1..20: mol_type = other DNA
agtcatcaaaatggggacat

SEQ ID NO: 66271 - DNA, 20 bp, synthetic construct
  misc_feature 1..20: note = chemically synthesized
  source 1..20: mol_type = other DNA
ccaatgtcccctgtggtcat

SEQ ID NO: 66272 - DNA, 20 bp, synthetic construct
  misc_feature 1..20: note = chemically synthesized
  source 1..20: mol_type = other DNA
tgtacggtttttgtctccct

SEQ ID NO: 66273 - DNA, 20 bp, synthetic construct
  misc_feature 1..20: note = chemically synthesized
  source 1..20: mol_type = other DNA
tatgaggctttcttggaaaa

SEQ ID NO: 66274 - DNA, 20 bp, synthetic construct
  misc_feature 1..20: note = chemically synthesized
  source 1..20: mol_type = other DNA
ggggccagaacttcggcagt

SEQ ID NO: 66275 - DNA, 20 bp, synthetic construct
  misc_feature 1..20: note = chemically synthesized
  source 1..20: mol_type = other DNA
tggaaagaccaacaaagatc

SEQ ID NO: 66276 - DNA, 20 bp, synthetic construct
  misc_feature 1..20: note = chemically synthesized
  source 1..20: mol_type = other DNA
gaacttgatgtgtttatccc

SEQ ID NO: 66277 - DNA, 20 bp, synthetic construct
  misc_feature 1..20: note = chemically synthesized
  source 1..20: mol_type = other DNA
ttatcccagagaattgtatt

SEQ ID NO: 66278 - DNA, 20 bp, synthetic construct
  misc_feature 1..20: note = chemically synthesized
  source 1..20: mol_type = other DNA
agaattgtagacttgtgaaa

SEQ ID NO: 66279 - DNA, 20 bp, synthetic construct
  misc_feature 1..20: note = chemically synthesized
  source 1..20: mol_type = other DNA
tgaaagtccatttcaaggaa

SEQ ID NO: 66280 - DNA, 20 bp, synthetic construct
  misc_feature 1..20: note = chemically synthesized
  source 1..20: mol_type = other DNA
tgggtcatgataattgaggt

SEQ ID NO: 66281 - DNA, 20 bp, synthetic construct
  misc_feature 1..20: note = chemically synthesized
  source 1..20: mol_type = other DNA
aaaaaataaaagatttgctc

SEQ ID NO: 66282 - DNA, 20 bp, synthetic construct
  misc_feature 1..20: note = chemically synthesized
  source 1..20: mol_type = other DNA
caaaaattagacaattgctt

SEQ ID NO: 66283 - DNA, 20 bp, synthetic construct
  misc_feature 1..20: note = chemically synthesized
  source 1..20: mol_type = other DNA
gggggtgagggtgtaggtag

SEQ ID NO: 66284 - DNA, 20 bp, synthetic construct
  misc_feature 1..20: note = chemically synthesized
  source 1..20: mol_type = other DNA
gaatgttgaatgtagggctc

SEQ ID NO: 66285 - DNA, 20 bp, synthetic construct
  misc_feature 1..20: note = chemically synthesized
  source 1..20: mol_type = other DNA
ggggactgggcttggccttg

SEQ ID NO: 66286 - DNA, 20 bp, synthetic construct
  misc_feature 1..20: note = chemically synthesized
  source 1..20: mol_type = other DNA
gttcatgggctgagggatgg

SEQ ID NO: 66287 - DNA, 20 bp, synthetic construct
  misc_feature 1..20: note = chemically synthesized
  source 1..20: mol_type = other DNA
ggaagaaccaagagcttcct

SEQ ID NO: 66288 - DNA, 20 bp, synthetic construct
  misc_feature 1..20: note = chemically synthesized
  source 1..20: mol_type = other DNA
aaattaatgtggatgttatg

SEQ ID NO: 66289 - DNA, 20 bp, synthetic construct
  misc_feature 1..20: note = chemically synthesized
  source 1..20: mol_type = other DNA
tccaaggaggatgatatgat

SEQ ID NO: 66290 - DNA, 20 bp, synthetic construct
  misc_feature 1..20: note = chemically synthesized
  source 1..20: mol_type = other DNA
aaggagctgttagtggtacc

SEQ ID NO: 66291 - DNA, 20 bp, synthetic construct
  misc_feature 1..20: note = chemically synthesized
  source 1..20: mol_type = other DNA
atagatatccaagatatagg

SEQ ID NO: 66292 - DNA, 20 bp, synthetic construct
  misc_feature 1..20: note = chemically synthesized
  source 1..20: mol_type = other DNA
tcattgtgcattatcttctg

SEQ ID NO: 66293 - DNA, 20 bp, synthetic construct
  misc_feature 1..20: note = chemically synthesized
  source 1..20: mol_type = other DNA
atgaagactttccgtgggag

SEQ ID NO: 66294 - DNA, 20 bp, synthetic construct
  misc_feature 1..20: note = chemically synthesized
  source 1..20: mol_type = other DNA
aaggatggacaaaggtgggg

SEQ ID NO: 66295 - DNA, 20 bp, synthetic construct
  misc_feature 1..20: note = chemically synthesized
  source 1..20: mol_type = other DNA
ttgaatttggctgtatatat

SEQ ID NO: 66296 - DNA, 20 bp, synthetic construct
  misc_feature 1..20: note = chemically synthesized
  source 1..20: mol_type = other DNA
catttatcatttctatgtat

SEQ ID NO: 66297 - DNA, 20 bp, synthetic construct
  misc_feature 1..20: note = chemically synthesized
  source 1..20: mol_type = other DNA
tagttctgtttttagtttac

SEQ ID NO: 66298 - DNA, 20 bp, synthetic construct
  misc_feature 1..20: note = chemically synthesized
  source 1..20: mol_type = other DNA
acattcccaccaacagtgtg

SEQ ID NO: 66299 - DNA, 20 bp, synthetic construct
  misc_feature 1..20: note = chemically synthesized
  source 1..20: mol_type = other DNA
tccctgatcattagtgatgt

SEQ ID NO: 66300 - DNA, 20 bp, synthetic construct
  misc_feature 1..20: note = chemically synthesized
  source 1..20: mol_type = other DNA
gtcatttgtatatctttttc

SEQ ID NO: 66301 - DNA, 20 bp, synthetic construct
  misc_feature 1..20: note = chemically synthesized
  source 1..20: mol_type = other DNA
ggtttttccgatgttatttt

SEQ ID NO: 66302 - DNA, 20 bp, synthetic construct
  misc_feature 1..20: note = chemically synthesized
  source 1..20: mol_type = other DNA
tgggctcttttttggttcca

SEQ ID NO: 66303 - DNA, 20 bp, synthetic construct
  misc_feature 1..20: note = chemically synthesized
  source 1..20: mol_type = other DNA
atattgattctacccatcta

SEQ ID NO: 66304 - DNA, 20 bp, synthetic construct
  misc_feature 1..20: note = chemically synthesized
  source 1..20: mol_type = other DNA
gcttggtcattgctggtatg

SEQ ID NO: 66305 - DNA, 20 bp, synthetic construct
  misc_feature 1..20: note = chemically synthesized
  source 1..20: mol_type = other DNA
ggtgtacgttaattttgtat

SEQ ID NO: 66306 - DNA, 20 bp, synthetic construct
  misc_feature 1..20: note = chemically synthesized
  source 1..20: mol_type = other DNA
tgtctcattccagttttcag

SEQ ID NO: 66307 - DNA, 20 bp, synthetic construct
  misc_feature 1..20: note = chemically synthesized
  source 1..20: mol_type = other DNA
attaaggtgatactggcttc

SEQ ID NO: 66308 - DNA, 20 bp, synthetic construct
  misc_feature 1..20: note = chemically synthesized
  source 1..20: mol_type = other DNA
attctctctttctctatctt

SEQ ID NO: 66309 - DNA, 20 bp, synthetic construct
  misc_feature 1..20: note = chemically synthesized
  source 1..20: mol_type = other DNA
aattcttctttgaatgtctg

SEQ ID NO: 66310 - DNA, 20 bp, synthetic construct
  misc_feature 1..20: note = chemically synthesized
  source 1..20: mol_type = other DNA
ttaagttctgggatacatgt

SEQ ID NO: 66311 - DNA, 20 bp, synthetic construct
  misc_feature 1..20: note = chemically synthesized
  source 1..20: mol_type = other DNA
ctgttcctgtgttagtttgc

SEQ ID NO: 66312 - DNA, 20 bp, synthetic construct
  misc_feature 1..20: note = chemically synthesized
  source 1..20: mol_type = other DNA
cgtgtgcacgtgtctttata

SEQ ID NO: 66313 - DNA, 20 bp, synthetic construct
  misc_feature 1..20: note = chemically synthesized
  source 1..20: mol_type = other DNA
catatcatatggcctatctt

SEQ ID NO: 66314 - DNA, 20 bp, synthetic construct
  misc_feature 1..20: note = chemically synthesized
  source 1..20: mol_type = other DNA
aaagttccatgtgctgatga

SEQ ID NO: 66315 - DNA, 20 bp, synthetic construct
  misc_feature 1..20: note = chemically synthesized
  source 1..20: mol_type = other DNA
gtgtattctgcagttgttgg

SEQ ID NO: 66316 - DNA, 20 bp, synthetic construct
  misc_feature 1..20: note = chemically synthesized
  source 1..20: mol_type = other DNA
agtattagatgcatatatat

SEQ ID NO: 66317 - DNA, 20 bp, synthetic construct
  misc_feature 1..20: note = chemically synthesized
  source 1..20: mol_type = other DNA
aaagtttgttttgtctgaca

SEQ ID NO: 66318 - DNA, 20 bp, synthetic construct
  misc_feature 1..20: note = chemically synthesized
  source 1..20: mol_type = other DNA
ctagcttttacggtttctgc

SEQ ID NO: 66319 - DNA, 20 bp, synthetic construct
  misc_feature 1..20: note = chemically synthesized
  source 1..20: mol_type = other DNA
ctgccaggaggtggcacttt

SEQ ID NO: 66320 - DNA, 20 bp, synthetic construct
  misc_feature 1..20: note = chemically synthesized
  source 1..20: mol_type = other DNA
ctggggcaccctagaactcc

SEQ ID NO: 66321 - DNA, 20 bp, synthetic construct
  misc_feature 1..20: note = chemically synthesized
  source 1..20: mol_type = other DNA
aatgacccctgtgaggcaag

SEQ ID NO: 66322 - DNA, 20 bp, synthetic construct
  misc_feature 1..20: note = chemically synthesized
  source 1..20: mol_type = other DNA
tgactcagctccaggtaagg

SEQ ID NO: 66323 - DNA, 20 bp, synthetic construct
  misc_feature 1..20: note = chemically synthesized
  source 1..20: mol_type = other DNA
gacaagatttttaatagttg

SEQ ID NO: 66324 - DNA, 20 bp, synthetic construct
  misc_feature 1..20: note = chemically synthesized
  source 1..20: mol_type = other DNA
ttgtgataaacaggtcattc

SEQ ID NO: 66325 - DNA, 20 bp, synthetic construct
  misc_feature 1..20: note = chemically synthesized
  source 1..20: mol_type = other DNA
aatgtttgaaaatacatggg

SEQ ID NO: 66326 - DNA, 20 bp, synthetic construct
  misc_feature 1..20: note = chemically synthesized
  source 1..20: mol_type = other DNA
acacttgaaattgcttgtgt

SEQ ID NO: 66327 - DNA, 20 bp, synthetic construct
  misc_feature 1..20: note = chemically synthesized
  source 1..20: mol_type = other DNA
aataagacagttatggataa

SEQ ID NO: 66328 - DNA, 20 bp, synthetic construct
  misc_feature 1..20: note = chemically synthesized
  source 1..20: mol_type = other DNA
ggtggctcacgcctgtaatc

SEQ ID NO: 66329 - DNA, 20 bp, synthetic construct
  misc_feature 1..20: note = chemically synthesized
  source 1..20: mol_type = other DNA
ctacttgggaggctgaggaa

SEQ ID NO: 66330 - DNA, 20 bp, synthetic construct
  misc_feature 1..20: note = chemically synthesized
  source 1..20: mol_type = other DNA
caaggtcatggatcgagttc

SEQ ID NO: 66331 - DNA, 20 bp, synthetic construct
  misc_feature 1..20: note = chemically synthesized
  source 1..20: mol_type = other DNA
taccaaaaaataaaaatccc

SEQ ID NO: 66332 - DNA, 20 bp, synthetic construct
  misc_feature 1..20: note = chemically synthesized
  source 1..20: mol_type = other DNA
aaaaatcccaaagaaaaaat

SEQ ID NO: 66333 - DNA, 20 bp, synthetic construct
  misc_feature 1..20: note = chemically synthesized
  source 1..20: mol_type = other DNA
catgttaagtggccaatatg

SEQ ID NO: 66334 - DNA, 20 bp, synthetic construct
  misc_feature 1..20: note = chemically synthesized
  source 1..20: mol_type = other DNA
gcaaatacatgtcttatgtc

SEQ ID NO: 66335 - DNA, 20 bp, synthetic construct
  misc_feature 1..20: note = chemically synthesized
  source 1..20: mol_type = other DNA
tggtatcttctatggtggga

SEQ ID NO: 66336 - DNA, 20 bp, synthetic construct
  misc_feature 1..20: note = chemically synthesized
  source 1..20: mol_type = other DNA
agaagaaaactagctaaagg

SEQ ID NO: 66337 - DNA, 20 bp, synthetic construct
  misc_feature 1..20: note = chemically synthesized
  source 1..20: mol_type = other DNA
gctaaagggaagaataaatt

SEQ ID NO: 66338 - DNA, 20 bp, synthetic construct
  misc_feature 1..20: note = chemically synthesized
  source 1..20: mol_type = other DNA
gccggcggctggctagggat

SEQ ID NO: 66339 - DNA, 20 bp, synthetic construct
  misc_feature 1..20: note = chemically synthesized
  source 1..20: mol_type = other DNA
tgaatgtggaagatgctgga

SEQ ID NO: 66340 - DNA, 20 bp, synthetic construct
  misc_feature 1..20: note = chemically synthesized
  source 1..20: mol_type = other DNA
aagatactggggttgggagt

SEQ ID NO: 66341 - DNA, 20 bp, synthetic construct
  misc_feature 1..20: note = chemically synthesized
  source 1..20: mol_type = other DNA
tagatggacaactttgactt

SEQ ID NO: 66342 - DNA, 20 bp, synthetic construct
  misc_feature 1..20: note = chemically synthesized
  source 1..20: mol_type = other DNA
cttttctttattagatttcg

SEQ ID NO: 66343 - DNA, 20 bp, synthetic construct
  misc_feature 1..20: note = chemically synthesized
  source 1..20: mol_type = other DNA
ttttggcaatccatttcggc

SEQ ID NO: 66344 - DNA, 20 bp, synthetic construct
  misc_feature 1..20: note = chemically synthesized
  source 1..20: mol_type = other DNA
aaataaaagaactaggcaat

SEQ ID NO: 66345 - DNA, 20 bp, synthetic construct
  misc_feature 1..20: note = chemically synthesized
  source 1..20: mol_type = other DNA
aagtgggagtaaaaggtgca

SEQ ID NO: 66346 - DNA, 20 bp, synthetic construct
  misc_feature 1..20: note = chemically synthesized
  source 1..20: mol_type = other DNA
gtgcaggagaaatctggttg

SEQ ID NO: 66347 - DNA, 20 bp, synthetic construct
  misc_feature 1..20: note = chemically synthesized
  source 1..20: mol_type = other DNA
cctctataggacaggactcc

SEQ ID NO: 66348 - DNA, 20 bp, synthetic construct
  misc_feature 1..20: note = chemically synthesized
  source 1..20: mol_type = other DNA
cagcgaggaaggggctcaac

SEQ ID NO: 66349 - DNA, 20 bp, synthetic construct
  misc_feature 1..20: note = chemically synthesized
  source 1..20: mol_type = other DNA
gtcagatgaaaatatagtgt

SEQ ID NO: 66350 - DNA, 20 bp, synthetic construct
  misc_feature 1..20: note = chemically synthesized
  source 1..20: mol_type = other DNA
tgaacttaacgcttgtgtct

SEQ ID NO: 66351 - DNA, 20 bp, synthetic construct
  misc_feature 1..20: note = chemically synthesized
  source 1..20: mol_type = other DNA
catgagagcagatccccatc

SEQ ID NO: 66352 - DNA, 20 bp, synthetic construct
  misc_feature 1..20: note = chemically synthesized
  source 1..20: mol_type = other DNA
agagccctgaccaggaacca

SEQ ID NO: 66353 - DNA, 20 bp, synthetic construct
  misc_feature 1..20: note = chemically synthesized
  source 1..20: mol_type = other DNA
accaggaaccagcagaaaag

SEQ ID NO: 66354 - DNA, 20 bp, synthetic construct
  misc_feature 1..20: note = chemically synthesized
  source 1..20: mol_type = other DNA
ttgcactaagtaaggcagat

SEQ ID NO: 66355 - DNA, 20 bp, synthetic construct
  misc_feature 1..20: note = chemically synthesized
  source 1..20: mol_type = other DNA
taagtaaggcagatgaagaa

SEQ ID NO: 66356 - DNA, 20 bp, synthetic construct
  misc_feature 1..20: note = chemically synthesized
  source 1..20: mol_type = other DNA
aagcttcggtgttcagtgga

SEQ ID NO: 66357 - DNA, 20 bp, synthetic construct
  misc_feature 1..20: note = chemically synthesized
  source 1..20: mol_type = other DNA
ctccacttgtcctctgtgtt

SEQ ID NO: 66358 - DNA, 20 bp, synthetic construct
  misc_feature 1..20: note = chemically synthesized
  source 1..20: mol_type = other DNA
acacaggatcatgaaggatg

SEQ ID NO: 66359 - DNA, 20 bp, synthetic construct
  misc_feature 1..20: note = chemically synthesized
  source 1..20: mol_type = other DNA
tacagcttgcctccgataag

SEQ ID NO: 66360 - DNA, 20 bp, synthetic construct
  misc_feature 1..20: note = chemically synthesized
  source 1..20: mol_type = other DNA
agagatcatggatcactttc

SEQ ID NO: 66361 - DNA, 20 bp, synthetic construct
  misc_feature 1..20: note = chemically synthesized
  source 1..20: mol_type = other DNA
cctgttaatggtccaatatg

SEQ ID NO: 66362 - DNA, 20 bp, synthetic construct
  misc_feature 1..20: note = chemically synthesized
  source 1..20: mol_type = other DNA
atgtcagaaacagcactgtg

SEQ ID NO: 66363 - DNA, 20 bp, synthetic construct
  misc_feature 1..20: note = chemically synthesized
  source 1..20: mol_type = other DNA
tgcgctgaaactgtggcttt

SEQ ID NO: 66364 - DNA, 20 bp, synthetic construct
  misc_feature 1..20: note = chemically synthesized
  source 1..20: mol_type = other DNA
aattgttttcactgcactat

SEQ ID NO: 66365 - DNA, 20 bp, synthetic construct
  misc_feature 1..20: note = chemically synthesized
  source 1..20: mol_type = other DNA
agaagtatagcactttttcc

SEQ ID NO: 66366 - DNA, 20 bp, synthetic construct
  misc_feature 1..20: note = chemically synthesized
  source 1..20: mol_type = other DNA
agaaggaaactagctaaagg

SEQ ID NO: 66367 - DNA, 20 bp, synthetic construct
  misc_feature 1..20: note = chemically synthesized
  source 1..20: mol_type = other DNA
gctaaagggaagaataaatt

SEQ ID NO: 66368 - DNA, 20 bp, synthetic construct
  misc_feature 1..20: note = chemically synthesized
  source 1..20: mol_type = other DNA
gccggcggctggctagggat

SEQ ID NO: 66369 - DNA, 20 bp, synthetic construct
  misc_feature 1..20: note = chemically synthesized
  source 1..20: mol_type = other DNA
tgaatgtggaagatgctgga

SEQ ID NO: 66370 - DNA, 20 bp, synthetic construct
  misc_feature 1..20: note = chemically synthesized
  source 1..20: mol_type = other DNA
aagatactggggttgggggt

SEQ ID NO: 66371 - DNA, 20 bp, synthetic construct
  misc_feature 1..20: note = chemically synthesized
  source 1..20: mol_type = other DNA
tagatggacaattttgactt

SEQ ID NO: 66372 - DNA, 20 bp, synthetic construct
  misc_feature 1..20: note = chemically synthesized
  source 1..20: mol_type = other DNA
cttttctttattagattcca

SEQ ID NO: 66373 - DNA, 20 bp, synthetic construct
  misc_feature 1..20: note = chemically synthesized
  source 1..20: mol_type = other DNA
ttttggcaatccatttcggc

SEQ ID NO: 66374 - DNA, 20 bp, synthetic construct
  misc_feature 1..20: note = chemically synthesized
  source 1..20: mol_type = other DNA
aagtgggagtaaatggtgta

SEQ ID NO: 66375 - DNA, 20 bp, synthetic construct
  misc_feature 1..20: note = chemically synthesized
  source 1..20: mol_type = other DNA
gtgtaggagaaatccggtgg

SEQ ID NO: 66376 - DNA, 20 bp, synthetic construct
  misc_feature 1..20: note = chemically synthesized
  source 1..20: mol_type = other DNA
cctctataggacaggacttc

SEQ ID NO: 66377 - DNA, 20 bp, synthetic construct
  misc_feature 1..20: note = chemically synthesized
  source 1..20: mol_type = other DNA
tcacagcccttgtggatgcc

SEQ ID NO: 66378 - DNA, 20 bp, synthetic construct
  misc_feature 1..20: note = chemically synthesized
  source 1..20: mol_type = other DNA
gggaggtggggacttaggtg

SEQ ID NO: 66379 - DNA, 20 bp, synthetic construct
  misc_feature 1..20: note = chemically synthesized
  source 1..20: mol_type = other DNA
cagcatgagcatgttatgtc

SEQ ID NO: 66380 - DNA, 20 bp, synthetic construct
  misc_feature 1..20: note = chemically synthesized
  source 1..20: mol_type = other DNA
gtgagatcaaaatgtagtgg

SEQ ID NO: 66381 - DNA, 20 bp, synthetic construct
  misc_feature 1..20: note = chemically synthesized
  source 1..20: mol_type = other DNA
ccctgaccacgagtcagcct

SEQ ID NO: 66382 - DNA, 20 bp, synthetic construct
  misc_feature 1..20: note = chemically synthesized
  source 1..20: mol_type = other DNA
cgagtcagccttcagaaatg

SEQ ID NO: 66383 - DNA, 20 bp, synthetic construct
  misc_feature 1..20: note = chemically synthesized
  source 1..20: mol_type = other DNA
tgagtaaggcagatgaagaa

SEQ ID NO: 66384 - DNA, 20 bp, synthetic construct
  misc_feature 1..20: note = chemically synthesized
  source 1..20: mol_type = other DNA
tttcttttttctcctcagcc

SEQ ID NO: 66385 - DNA, 20 bp, synthetic construct
  misc_feature 1..20: note = chemically synthesized
  source 1..20: mol_type = other DNA
caaatgcagtcactaccgtt

SEQ ID NO: 66386 - DNA, 20 bp, synthetic construct
  misc_feature 1..20: note = chemically synthesized
  source 1..20: mol_type = other DNA
agcaaatttcttgagagagt

SEQ ID NO: 66387 - DNA, 20 bp, synthetic construct
  misc_feature 1..20: note = chemically synthesized
  source 1..20: mol_type = other DNA
tggatattaggcctttgtca

SEQ ID NO: 66388 - DNA, 20 bp, synthetic construct
  misc_feature 1..20: note = chemically synthesized
  source 1..20: mol_type = other DNA
tagtgagggcaccattagcc

SEQ ID NO: 66389 - DNA, 20 bp, synthetic construct
  misc_feature 1..20: note = chemically synthesized
  source 1..20: mol_type = other DNA
gtctagttcatgtaagattc

SEQ ID NO: 66390 - DNA, 20 bp, synthetic construct
  misc_feature 1..20: note = chemically synthesized
  source 1..20: mol_type = other DNA
tcatgtaagattctcagaat

SEQ ID NO: 66391 - DNA, 20 bp, synthetic construct
  misc_feature 1..20: note = chemically synthesized
  source 1..20: mol_type = other DNA
aaatggggaacagccacaaa

SEQ ID NO: 66392 - DNA, 20 bp, synthetic construct
  misc_feature 1..20: note = chemically synthesized
  source 1..20: mol_type = other DNA
ggggaacagccacaaacaag

SEQ ID NO: 66393 - DNA, 20 bp, synthetic construct
  misc_feature 1..20: note = chemically synthesized
  source 1..20: mol_type = other DNA
cacttttcctggagcgggtg

SEQ ID NO: 66394 - DNA, 20 bp, synthetic construct
  misc_feature 1..20: note = chemically synthesized
  source 1..20: mol_type = other DNA
gatatgaggtatggcaatga

SEQ ID NO: 66395 - DNA, 20 bp, synthetic construct
  misc_feature 1..20: note = chemically synthesized
  source 1..20: mol_type = other DNA
aaaatattgtgtctctaata

SEQ ID NO: 66396 - DNA, 20 bp, synthetic construct
  misc_feature 1..20: note = chemically synthesized
  source 1..20: mol_type = other DNA
agtatgaggacagtaagcct

SEQ ID NO: 66397 - DNA, 20 bp, synthetic construct
  misc_feature 1..20: note = chemically synthesized
  source 1..20: mol_type = other DNA
gcctgtggaatattgtcagt

SEQ ID NO: 66398 - DNA, 20 bp, synthetic construct
  misc_feature 1..20: note = chemically synthesized
  source 1..20: mol_type = other DNA
ctactcgggaggctgaggca

SEQ ID NO: 66399 - DNA, 20 bp, synthetic construct
  misc_feature 1..20: note = chemically synthesized
  source 1..20: mol_type = other DNA
ctcaaaaaaaaaaaaaaaaa

SEQ ID NO: 66400 - DNA, 20 bp, synthetic construct
  misc_feature 1..20: note = chemically synthesized
  source 1..20: mol_type = other DNA
aaaaaaaaaaaaaaaaagaa

SEQ ID NO: 66401 - DNA, 20 bp, synthetic construct
  misc_feature 1..20: note = chemically synthesized
  source 1..20: mol_type = other DNA
aaaaaaaaaaaaagaaaaag

SEQ ID NO: 66402 - DNA, 20 bp, synthetic construct
  misc_feature 1..20: note = chemically synthesized
  source 1..20: mol_type = other DNA
aaaaaaaaagaaaaagaaag

SEQ ID NO: 66403 - DNA, 20 bp, synthetic construct
  misc_feature 1..20: note = chemically synthesized
  source 1..20: mol_type = other DNA
aaaaagaaaaagaaagaaag

SEQ ID NO: 66404 - DNA, 20 bp, synthetic construct
  misc_feature 1..20: note = chemically synthesized
  source 1..20: mol_type = other DNA
gtgtattcaatgtagtctca

SEQ ID NO: 66405 - DNA, 20 bp, synthetic construct
  misc_feature 1..20: note = chemically synthesized
  source 1..20: mol_type = other DNA
gtctcaagagaattgaaaac

SEQ ID NO: 66406 - DNA, 20 bp, synthetic construct
  misc_feature 1..20: note = chemically synthesized
  source 1..20: mol_type = other DNA
gcggctgctggcgaagtcct

SEQ ID NO: 66407 - DNA, 20 bp, synthetic construct
  misc_feature 1..20: note = chemically synthesized
  source 1..20: mol_type = other DNA
agaaggccacctggattcta

SEQ ID NO: 66408 - DNA, 20 bp, synthetic construct
  misc_feature 1..20: note = chemically synthesized
  source 1..20: mol_type = other DNA
actggaagccgggacaaggt

SEQ ID NO: 66409 - DNA, 20 bp, synthetic construct
  misc_feature 1..20: note = chemically synthesized
  source 1..20: mol_type = other DNA
ccgggacaaggtgcagaaag

SEQ ID NO: 66410 - DNA, 20 bp, synthetic construct
  misc_feature 1..20: note = chemically synthesized
  source 1..20: mol_type = other DNA
gagggaacagaagttgagat

SEQ ID NO: 66411 - DNA, 20 bp, synthetic construct
  misc_feature 1..20: note = chemically synthesized
  source 1..20: mol_type = other DNA
tttctgcatagtcctggagg

SEQ ID NO: 66412 - DNA, 20 bp, synthetic construct
  misc_feature 1..20: note = chemically synthesized
  source 1..20: mol_type = other DNA
tcagttcctgcatgataaaa

SEQ ID NO: 66413 - DNA, 20 bp, synthetic construct
  misc_feature 1..20: note = chemically synthesized
  source 1..20: mol_type = other DNA
ctgcatgataaaaatagaat

SEQ ID NO: 66414 - DNA, 20 bp, synthetic construct
  misc_feature 1..20: note = chemically synthesized
  source 1..20: mol_type = other DNA
gaataaagaaatatgctctc

SEQ ID NO: 66415 - DNA, 20 bp, synthetic construct
  misc_feature 1..20: note = chemically synthesized
  source 1..20: mol_type = other DNA
cgcactatttctgatggaaa

SEQ ID NO: 66416 - DNA, 20 bp, synthetic construct
  misc_feature 1..20: note = chemically synthesized
  source 1..20: mol_type = other DNA
ctgatggaaatgagaatgtt

SEQ ID NO: 66417 - DNA, 20 bp, synthetic construct
  misc_feature 1..20: note = chemically synthesized
  source 1..20: mol_type = other DNA
gatactttcttgcaatcctg

SEQ ID NO: 66418 - DNA, 20 bp, synthetic construct
  misc_feature 1..20: note = chemically synthesized
  source 1..20: mol_type = other DNA
ctaggaaggggaaatcgtct

SEQ ID NO: 66419 - DNA, 20 bp, synthetic construct
  misc_feature 1..20: note = chemically synthesized
  source 1..20: mol_type = other DNA
tagaataagacaatgttttt

SEQ ID NO: 66420 - DNA, 20 bp, synthetic construct
  misc_feature 1..20: note = chemically synthesized
  source 1..20: mol_type = other DNA
acgtcttcaatggtattaat

SEQ ID NO: 66421 - DNA, 20 bp, synthetic construct
  misc_feature 1..20: note = chemically synthesized
  source 1..20: mol_type = other DNA
cgttaagtcaagttgataga

SEQ ID NO: 66422 - DNA, 20 bp, synthetic construct
  misc_feature 1..20: note = chemically synthesized
  source 1..20: mol_type = other DNA
gatgcagagaccagatgaag

SEQ ID NO: 66423 - DNA, 20 bp, synthetic construct
  misc_feature 1..20: note = chemically synthesized
  source 1..20: mol_type = other DNA
gacataataaatagggaaac

SEQ ID NO: 66424 - DNA, 20 bp, synthetic construct
  misc_feature 1..20: note = chemically synthesized
  source 1..20: mol_type = other DNA
gttgatggaaacaatgaagt

SEQ ID NO: 66425 - DNA, 20 bp, synthetic construct
  misc_feature 1..20: note = chemically synthesized
  source 1..20: mol_type = other DNA
accctcaaacctaaaacctc

SEQ ID NO: 66426 - DNA, 20 bp, synthetic construct
  misc_feature 1..20: note = chemically synthesized
  source 1..20: mol_type = other DNA
ccccactaataacccacaaa

SEQ ID NO: 66427 - DNA, 20 bp, synthetic construct
  misc_feature 1..20: note = chemically synthesized
  source 1..20: mol_type = other DNA
aaaattaccccagtcaatct

SEQ ID NO: 66428 - DNA, 20 bp, synthetic construct
  misc_feature 1..20: note = chemically synthesized
  source 1..20: mol_type = other DNA
gtgtcatgcatttattcaca

SEQ ID NO: 66429 - DNA, 20 bp, synthetic construct
  misc_feature 1..20: note = chemically synthesized
  source 1..20: mol_type = other DNA
accattatcagttactcaac

SEQ ID NO: 66430 - DNA, 20 bp, synthetic construct
  misc_feature 1..20: note = chemically synthesized
  source 1..20: mol_type = other DNA
aatatcaaataaaggacagt

SEQ ID NO: 66431 - DNA, 20 bp, synthetic construct
  misc_feature 1..20: note = chemically synthesized
  source 1..20: mol_type = other DNA
aaatctagatgttagtaaca

SEQ ID NO: 66432 - DNA, 20 bp, synthetic construct
  misc_feature 1..20: note = chemically synthesized
  source 1..20: mol_type = other DNA
ttaggcctagaagggcagaa

SEQ ID NO: 66433 - DNA, 20 bp, synthetic construct
  misc_feature 1..20: note = chemically synthesized
  source 1..20: mol_type = other DNA
cgttcagagagagagagaga

SEQ ID NO: 66434 - DNA, 20 bp, synthetic construct
  misc_feature 1..20: note = chemically synthesized
  source 1..20: mol_type = other DNA
ctcagccagtgtttaccatt

SEQ ID NO: 66435 - DNA, 20 bp, synthetic construct
  misc_feature 1..20: note = chemically synthesized
  source 1..20: mol_type = other DNA
agagaacactgagggaagga

SEQ ID NO: 66436 - DNA, 20 bp, synthetic construct
  misc_feature 1..20: note = chemically synthesized
  source 1..20: mol_type = other DNA
tgataagataatatgaaaac

SEQ ID NO: 66437 - DNA, 20 bp, synthetic construct
  misc_feature 1..20: note = chemically synthesized
  source 1..20: mol_type = other DNA
caaacagcagtgaactgaga

SEQ ID NO: 66438 - DNA, 20 bp, synthetic construct
  misc_feature 1..20: note = chemically synthesized
  source 1..20: mol_type = other DNA
ttgtggagagcactggcatt

SEQ ID NO: 66439 - DNA, 20 bp, synthetic construct
  misc_feature 1..20: note = chemically synthesized
  source 1..20: mol_type = other DNA
ggcatttaagaatgtcacac

SEQ ID NO: 66440 - DNA, 20 bp, synthetic construct
  misc_feature 1..20: note = chemically synthesized
  source 1..20: mol_type = other DNA
cgtgagccaccacacccagc

SEQ ID NO: 66441 - DNA, 20 bp, synthetic construct
  misc_feature 1..20: note = chemically synthesized
  source 1..20: mol_type = other DNA
ctattcaggtggctgaggca

SEQ ID NO: 66442 - DNA, 20 bp, synthetic construct
  misc_feature 1..20: note = chemically synthesized
  source 1..20: mol_type = other DNA
ggatgaaactccatctcaga

SEQ ID NO: 66443 - DNA, 20 bp, synthetic construct
  misc_feature 1..20: note = chemically synthesized
  source 1..20: mol_type = other DNA
aaactccatctcagaagaga

SEQ ID NO: 66444 - DNA, 20 bp, synthetic construct
  misc_feature 1..20: note = chemically synthesized
  source 1..20: mol_type = other DNA
atcctctcaatgcaatccat

SEQ ID NO: 66445 - DNA, 20 bp, synthetic construct
  misc_feature 1..20: note = chemically synthesized
  source 1..20: mol_type = other DNA
gtaaaatcatttcaggtaga

SEQ ID NO: 66446 - DNA, 20 bp, synthetic construct
  misc_feature 1..20: note = chemically synthesized
  source 1..20: mol_type = other DNA
aataacagtcctcatggcct

SEQ ID NO: 66447 - DNA, 20 bp, synthetic construct
  misc_feature 1..20: note = chemically synthesized
  source 1..20: mol_type = other DNA
gaatttacctaacatttttt

SEQ ID NO: 66448 - DNA, 20 bp, synthetic construct
  misc_feature 1..20: note = chemically synthesized
  source 1..20: mol_type = other DNA
gtcatggtccaagtctgata

SEQ ID NO: 66449 - DNA, 20 bp, synthetic construct
  misc_feature 1..20: note = chemically synthesized
  source 1..20: mol_type = other DNA
aaatacatttcttcactaag

SEQ ID NO: 66450 - DNA, 20 bp, synthetic construct
  misc_feature 1..20: note = chemically synthesized
  source 1..20: mol_type = other DNA
ctttcgttggcttccaggtt

SEQ ID NO: 66451 - DNA, 20 bp, synthetic construct
  misc_feature 1..20: note = chemically synthesized
  source 1..20: mol_type = other DNA
tataacatttccccttgtga

SEQ ID NO: 66452 - DNA, 20 bp, synthetic construct
  misc_feature 1..20: note = chemically synthesized
  source 1..20: mol_type = other DNA
cattgtggcattatttgaat

SEQ ID NO: 66453 - DNA, 20 bp, synthetic construct
  misc_feature 1..20: note = chemically synthesized
  source 1..20: mol_type = other DNA
aaattagagttttattatag

SEQ ID NO: 66454 - DNA, 20 bp, synthetic construct
  misc_feature 1..20: note = chemically synthesized
  source 1..20: mol_type = other DNA
agttttcttagtataaagtg

SEQ ID NO: 66455 - DNA, 20 bp, synthetic construct
  misc_feature 1..20: note = chemically synthesized
  source 1..20: mol_type = other DNA
atgaaactaggaggatattt

SEQ ID NO: 66456 - DNA, 20 bp, synthetic construct
  misc_feature 1..20: note = chemically synthesized
  source 1..20: mol_type = other DNA
ctcacctgctaattctgcac

SEQ ID NO: 66457 - DNA, 20 bp, synthetic construct
  misc_feature 1..20: note = chemically synthesized
  source 1..20: mol_type = other DNA
ccaactcaaagatgagaggc

SEQ ID NO: 66458 - DNA, 20 bp, synthetic construct
  misc_feature 1..20: note = chemically synthesized
  source 1..20: mol_type = other DNA
cagttttgtctaagatttgg

SEQ ID NO: 66459 - DNA, 20 bp, synthetic construct
  misc_feature 1..20: note = chemically synthesized
  source 1..20: mol_type = other DNA
gggtatggcttctgcctaat

SEQ ID NO: 66460 - DNA, 20 bp, synthetic construct
  misc_feature 1..20: note = chemically synthesized
  source 1..20: mol_type = other DNA
tacaaagagtacatgggaaa

SEQ ID NO: 66461 - DNA, 20 bp, synthetic construct
  misc_feature 1..20: note = chemically synthesized
  source 1..20: mol_type = other DNA
gacacttctacctccaaaga

SEQ ID NO: 66462 - DNA, 20 bp, synthetic construct
  misc_feature 1..20: note = chemically synthesized
  source 1..20: mol_type = other DNA
gattaaactccaacaattac

SEQ ID NO: 66463 - DNA, 20 bp, synthetic construct
  misc_feature 1..20: note = chemically synthesized
  source 1..20: mol_type = other DNA
cccatcaagtgttcctgctc

SEQ ID NO: 66464 - DNA, 20 bp, synthetic construct
  misc_feature 1..20: note = chemically synthesized
  source 1..20: mol_type = other DNA
ttgccccagaacatctctgt

SEQ ID NO: 66465 - DNA, 20 bp, synthetic construct
  misc_feature 1..20: note = chemically synthesized
  source 1..20: mol_type = other DNA
catattaaattcatcaatgg

SEQ ID NO: 66466 - DNA, 20 bp, synthetic construct
  misc_feature 1..20: note = chemically synthesized
  source 1..20: mol_type = other DNA
ttaaattcatcaatgggcag

SEQ ID NO: 66467 - DNA, 20 bp, synthetic construct
  misc_feature 1..20: note = chemically synthesized
  source 1..20: mol_type = other DNA
gcagaaagaaaatatttatt

SEQ ID NO: 66468 - DNA, 20 bp, synthetic construct
  misc_feature 1..20: note = chemically synthesized
  source 1..20: mol_type = other DNA
aaacttacttgaatacctaa

SEQ ID NO: 66469 - DNA, 20 bp, synthetic construct
  misc_feature 1..20: note = chemically synthesized
  source 1..20: mol_type = other DNA
cagtaactctgtctgtactg

SEQ ID NO: 66470 - DNA, 20 bp, synthetic construct
  misc_feature 1..20: note = chemically synthesized
  source 1..20: mol_type = other DNA
gccctaaaaatccaaatacc

SEQ ID NO: 66471 - DNA, 20 bp, synthetic construct
  misc_feature 1..20: note = chemically synthesized
  source 1..20: mol_type = other DNA
aataaaataatttaatgtca

SEQ ID NO: 66472 - DNA, 20 bp, synthetic construct
  misc_feature 1..20: note = chemically synthesized
  source 1..20: mol_type = other DNA
ttgactttattgctttttgg

SEQ ID NO: 66473 - DNA, 20 bp, synthetic construct
  misc_feature 1..20: note = chemically synthesized
  source 1..20: mol_type = other DNA
tgatataaaacattaggact

SEQ ID NO: 66474 - DNA, 20 bp, synthetic construct
  misc_feature 1..20: note = chemically synthesized
  source 1..20: mol_type = other DNA
tcagtggggctggaataaaa

SEQ ID NO: 66475 - DNA, 20 bp, synthetic construct
  misc_feature 1..20: note = chemically synthesized
  source 1..20: mol_type = other DNA
cctgcagggtattatgggta

SEQ ID NO: 66476 - DNA, 20 bp, synthetic construct
  misc_feature 1..20: note = chemically synthesized
  source 1..20: mol_type = other DNA
cagggtattatgggtaatag

SEQ ID NO: 66477 - DNA, 20 bp, synthetic construct
  misc_feature 1..20: note = chemically synthesized
  source 1..20: mol_type = other DNA
tccatagttcatcatttaaa

SEQ ID NO: 66478 - DNA, 20 bp, synthetic construct
  misc_feature 1..20: note = chemically synthesized
  source 1..20: mol_type = other DNA
catttaaaaaagaaaacaaa

SEQ ID NO: 66479 - DNA, 20 bp, synthetic construct
  misc_feature 1..20: note = chemically synthesized
  source 1..20: mol_type = other DNA
gctttgacaattttggtctt

SEQ ID NO: 66480 - DNA, 20 bp, synthetic construct
  misc_feature 1..20: note = chemically synthesized
  source 1..20: mol_type = other DNA
ttacagaggaatgaatataa

SEQ ID NO: 66481 - DNA, 20 bp, synthetic construct
  misc_feature 1..20: note = chemically synthesized
  source 1..20: mol_type = other DNA
ccaaacactttctgcgtgtg

SEQ ID NO: 66482 - DNA, 20 bp, synthetic construct
  misc_feature 1..20: note = chemically synthesized
  source 1..20: mol_type = other DNA
cctgatgagggttgagacag

SEQ ID NO: 66483 - DNA, 20 bp, synthetic construct
  misc_feature 1..20: note = chemically synthesized
  source 1..20: mol_type = other DNA
tctatttatttagcaataat

SEQ ID NO: 66484 - DNA, 20 bp, synthetic construct
  misc_feature 1..20: note = chemically synthesized
  source 1..20: mol_type = other DNA
aataatagagaaagcattta

SEQ ID NO: 66485 - DNA, 20 bp, synthetic construct
  misc_feature 1..20: note = chemically synthesized
  source 1..20: mol_type = other DNA
agagaataaagcaatggaaa

SEQ ID NO: 66486 - DNA, 20 bp, synthetic construct
  misc_feature 1..20: note = chemically synthesized
  source 1..20: mol_type = other DNA
tgtaaatttccttctgataa

SEQ ID NO: 66487 - DNA, 20 bp, synthetic construct
  misc_feature 1..20: note = chemically synthesized
  source 1..20: mol_type = other DNA
agagctgaaaggaagaagta

SEQ ID NO: 66488 - DNA, 20 bp, synthetic construct
  misc_feature 1..20: note = chemically synthesized
  source 1..20: mol_type = other DNA
ggaaaaagtacagggggatg

SEQ ID NO: 66489 - DNA, 20 bp, synthetic construct
  misc_feature 1..20: note = chemically synthesized
  source 1..20: mol_type = other DNA
cgatcacgttgggaagctat

SEQ ID NO: 66490 - DNA, 20 bp, synthetic construct
  misc_feature 1..20: note = chemically synthesized
  source 1..20: mol_type = other DNA
tttaaacaaacaaaatataa

SEQ ID NO: 66491 - DNA, 20 bp, synthetic construct
  misc_feature 1..20: note = chemically synthesized
  source 1..20: mol_type = other DNA
actcttgcagattagtccag

SEQ ID NO: 66492 - DNA, 20 bp, synthetic construct
  misc_feature 1..20: note = chemically synthesized
  source 1..20: mol_type = other DNA
attagcatgcatgagcaaat

SEQ ID NO: 66493 - DNA, 20 bp, synthetic construct
  misc_feature 1..20: note = chemically synthesized
  source 1..20: mol_type = other DNA
tcaacttcttatttgtgtaa

SEQ ID NO: 66494 - DNA, 20 bp, synthetic construct
  misc_feature 1..20: note = chemically synthesized
  source 1..20: mol_type = other DNA
agacaggtttaaggagacca

SEQ ID NO: 66495 - DNA, 20 bp, synthetic construct
  misc_feature 1..20: note = chemically synthesized
  source 1..20: mol_type = other DNA
cctaaggtgaaggctcatgg

SEQ ID NO: 66496 - DNA, 20 bp, synthetic construct
  misc_feature 1..20: note = chemically synthesized
  source 1..20: mol_type = other DNA
gataagtaacagggtacagt

SEQ ID NO: 66497 - DNA, 20 bp, synthetic construct
  misc_feature 1..20: note = chemically synthesized
  source 1..20: mol_type = other DNA
atgcctctttgcaccattct

SEQ ID NO: 66498 - DNA, 20 bp, synthetic construct
  misc_feature 1..20: note = chemically synthesized
  source 1..20: mol_type = other DNA
tgctggcccatcactttggc

SEQ ID NO: 66499 - DNA, 20 bp, synthetic construct
  misc_feature 1..20: note = chemically synthesized
  source 1..20: mol_type = other DNA
ccaccagtgcaggctgccta

SEQ ID NO: 66500 - DNA, 20 bp, synthetic construct
  misc_feature 1..20: note = chemically synthesized
  source 1..20: mol_type = other DNA
ggtcagtgcatttaaaacat

SEQ ID NO: 66501 - DNA, 20 bp, synthetic construct
  misc_feature 1..20: note = chemically synthesized
  source 1..20: mol_type = other DNA
gcatatgccttattcatccc

SEQ ID NO: 66502 - DNA, 20 bp, synthetic construct
  misc_feature 1..20: note = chemically synthesized
  source 1..20: mol_type = other DNA
gtatgaaaagttaggactga

SEQ ID NO: 66503 - DNA, 20 bp, synthetic construct
  misc_feature 1..20: note = chemically synthesized
  source 1..20: mol_type = other DNA
tgatgatagaagggtatata

SEQ ID NO: 66504 - DNA, 20 bp, synthetic construct
  misc_feature 1..20: note = chemically synthesized
  source 1..20: mol_type = other DNA
aaaataaatttgaatgggtt

SEQ ID NO: 66505 - DNA, 20 bp, synthetic construct
  misc_feature 1..20: note = chemically synthesized
  source 1..20: mol_type = other DNA
ctaaaaccataaaaattttt

SEQ ID NO: 66506 - DNA, 20 bp, synthetic construct
  misc_feature 1..20: note = chemically synthesized
  source 1..20: mol_type = other DNA
aatttttaaagaaatcaaaa

SEQ ID NO: 66507 - DNA, 20 bp, synthetic construct
  misc_feature 1..20: note = chemically synthesized
  source 1..20: mol_type = other DNA
tggttaatatccaaaatata

SEQ ID NO: 66508 - DNA, 20 bp, synthetic construct
  misc_feature 1..20: note = chemically synthesized
  source 1..20: mol_type = other DNA
gaaaataaaaaaattaaaaa

SEQ ID NO: 66509 - DNA, 20 bp, synthetic construct
  misc_feature 1..20: note = chemically synthesized
  source 1..20: mol_type = other DNA
agaaaatcctgccatttatg

SEQ ID NO: 66510 - DNA, 20 bp, synthetic construct
  misc_feature 1..20: note = chemically synthesized
  source 1..20: mol_type = other DNA
gaacctggaggatgtaaaac

SEQ ID NO: 66511 - DNA, 20 bp, synthetic construct
  misc_feature 1..20: note = chemically synthesized
  source 1..20: mol_type = other DNA
gtttccaggggttgggggtg

SEQ ID NO: 66512 - DNA, 20 bp, synthetic construct
  misc_feature 1..20: note = chemically synthesized
  source 1..20: mol_type = other DNA
gatcttaaaagcatttacca

SEQ ID NO: 66513 - DNA, 20 bp, synthetic construct
  misc_feature 1..20: note = chemically synthesized
  source 1..20: mol_type = other DNA
aatgatacctcaataaagtt

SEQ ID NO: 66514 - DNA, 20 bp, synthetic construct
  misc_feature 1..20: note = chemically synthesized
  source 1..20: mol_type = other DNA
taaagttgaagaataataaa

SEQ ID NO: 66515 - DNA, 20 bp, synthetic construct
  misc_feature 1..20: note = chemically synthesized
  source 1..20: mol_type = other DNA
aaaaaaatgcatcttgatga

SEQ ID NO: 66516 - DNA, 20 bp, synthetic construct
  misc_feature 1..20: note = chemically synthesized
  source 1..20: mol_type = other DNA
tagtgttattattaaatagt

SEQ ID NO: 66517 - DNA, 20 bp, synthetic construct
  misc_feature 1..20: note = chemically synthesized
  source 1..20: mol_type = other DNA
taagtaagatagtggaataa

SEQ ID NO: 66518 - DNA, 20 bp, synthetic construct
  misc_feature 1..20: note = chemically synthesized
  source 1..20: mol_type = other DNA
aaaattcagtcacgaaaaaa

SEQ ID NO: 66519 - DNA, 20 bp, synthetic construct
  misc_feature 1..20: note = chemically synthesized
  source 1..20: mol_type = other DNA
tatttaattatcaacccaaa

SEQ ID NO: 66520 - DNA, 20 bp, synthetic construct
  misc_feature 1..20: note = chemically synthesized
  source 1..20: mol_type = other DNA
ccaaagtagaaactatcaag

SEQ ID NO: 66521 - DNA, 20 bp, synthetic construct
  misc_feature 1..20: note = chemically synthesized
  source 1..20: mol_type = other DNA
caatttgggaggctgaggca

SEQ ID NO: 66522 - DNA, 20 bp, synthetic construct
  misc_feature 1..20: note = chemically synthesized
  source 1..20: mol_type = other DNA
gagactccgtcacaaaaaaa

SEQ ID NO: 66523 - DNA, 20 bp, synthetic construct
  misc_feature 1..20: note = chemically synthesized
  source 1..20: mol_type = other DNA
gggaattccctttcctagtc

SEQ ID NO: 66524 - DNA, 20 bp, synthetic construct
  misc_feature 1..20: note = chemically synthesized
  source 1..20: mol_type = other DNA
gttagaaggaaaactaacaa

SEQ ID NO: 66525 - DNA, 20 bp, synthetic construct
  misc_feature 1..20: note = chemically synthesized
  source 1..20: mol_type = other DNA
aaagatggggaaaaagcaga

SEQ ID NO: 66526 - DNA, 20 bp, synthetic construct
  misc_feature 1..20: note = chemically synthesized
  source 1..20: mol_type = other DNA
gcaatggaacaaagctgggc

SEQ ID NO: 66527 - DNA, 20 bp, synthetic construct
  misc_feature 1..20: note = chemically synthesized
  source 1..20: mol_type = other DNA
aaaattagatgaatggataa

SEQ ID NO: 66528 - DNA, 20 bp, synthetic construct
  misc_feature 1..20: note = chemically synthesized
  source 1..20: mol_type = other DNA
gtaaccgatgagatcaactg

SEQ ID NO: 66529 - DNA, 20 bp, synthetic construct
  misc_feature 1..20: note = chemically synthesized
  source 1..20: mol_type = other DNA
tgaagcatgaagagaagttt

SEQ ID NO: 66530 - DNA, 20 bp, synthetic construct
  misc_feature 1..20: note = chemically synthesized
  source 1..20: mol_type = other DNA
tgaagagaagtttagagaaa

SEQ ID NO: 66531 - DNA, 20 bp, synthetic construct
  misc_feature 1..20: note = chemically synthesized
  source 1..20: mol_type = other DNA
gtttagagaaaaaagaataa

SEQ ID NO: 66532 - DNA, 20 bp, synthetic construct
  misc_feature 1..20: note = chemically synthesized
  source 1..20: mol_type = other DNA
aaagaaacgaacaaagcctc

SEQ ID NO: 66533 - DNA, 20 bp, synthetic construct
  misc_feature 1..20: note = chemically synthesized
  source 1..20: mol_type = other DNA
ggtgtagctgaaagtgatgg

SEQ ID NO: 66534 - DNA, 20 bp, synthetic construct
  misc_feature 1..20: note = chemically synthesized
  source 1..20: mol_type = other DNA
aacgccacaaagatactcct

SEQ ID NO: 66535 - DNA, 20 bp, synthetic construct
  misc_feature 1..20: note = chemically synthesized
  source 1..20: mol_type = other DNA
aaaatgttaagggcagccag

SEQ ID NO: 66536 - DNA, 20 bp, synthetic construct
  misc_feature 1..20: note = chemically synthesized
  source 1..20: mol_type = other DNA
gactaacagctgatctatcg

SEQ ID NO: 66537 - DNA, 20 bp, synthetic construct
  misc_feature 1..20: note = chemically synthesized
  source 1..20: mol_type = other DNA
ggcagaaactctacaagcca

SEQ ID NO: 66538 - DNA, 20 bp, synthetic construct
  misc_feature 1..20: note = chemically synthesized
  source 1..20: mol_type = other DNA
ggccaatattcaacattgtt

SEQ ID NO: 66539 - DNA, 20 bp, synthetic construct
  misc_feature 1..20: note = chemically synthesized
  source 1..20: mol_type = other DNA
atattcaacattgttaaaga

SEQ ID NO: 66540 - DNA, 20 bp, synthetic construct
  misc_feature 1..20: note = chemically synthesized
  source 1..20: mol_type = other DNA
taaagaaaagaattttcaac

SEQ ID NO: 66541 - DNA, 20 bp, synthetic construct
  misc_feature 1..20: note = chemically synthesized
  source 1..20: mol_type = other DNA
aactaagcttcataagtgaa

SEQ ID NO: 66542 - DNA, 20 bp, synthetic construct
  misc_feature 1..20: note = chemically synthesized
  source 1..20: mol_type = other DNA
gtaaagaccatcaaggctag

SEQ ID NO: 66543 - DNA, 20 bp, synthetic construct
  misc_feature 1..20: note = chemically synthesized
  source 1..20: mol_type = other DNA
acattagacagatcaacgag

SEQ ID NO: 66544 - DNA, 20 bp, synthetic construct
  misc_feature 1..20: note = chemically synthesized
  source 1..20: mol_type = other DNA
gaactctccaccccaaatca

SEQ ID NO: 66545 - DNA, 20 bp, synthetic construct
  misc_feature 1..20: note = chemically synthesized
  source 1..20: mol_type = other DNA
tcctcagcaaatgtaaaaga

SEQ ID NO: 66546 - DNA, 20 bp, synthetic construct
  misc_feature 1..20: note = chemically synthesized
  source 1..20: mol_type = other DNA
atcaaactagaactcaggat

SEQ ID NO: 66547 - DNA, 20 bp, synthetic construct
  misc_feature 1..20: note = chemically synthesized
  source 1..20: mol_type = other DNA
gggtacataacaaaatgaag

SEQ ID NO: 66548 - DNA, 20 bp, synthetic construct
  misc_feature 1..20: note = chemically synthesized
  source 1..20: mol_type = other DNA
gagaacaaagacacaacaca

SEQ ID NO: 66549 - DNA, 20 bp, synthetic construct
  misc_feature 1..20: note = chemically synthesized
  source 1..20: mol_type = other DNA
attcaaaagctaacagaaga

SEQ ID NO: 66550 - DNA, 20 bp, synthetic construct
  misc_feature 1..20: note = chemically synthesized
  source 1..20: mol_type = other DNA
ctgctagcaagactaataaa

SEQ ID NO: 66551 - DNA, 20 bp, synthetic construct
  misc_feature 1..20: note = chemically synthesized
  source 1..20: mol_type = other DNA
ctaataaagaagaaaagaga

SEQ ID NO: 66552 - DNA, 20 bp, synthetic construct
  misc_feature 1..20: note = chemically synthesized
  source 1..20: mol_type = other DNA
ggggtatcaccactgatccc

SEQ ID NO: 66553 - DNA, 20 bp, synthetic construct
  misc_feature 1..20: note = chemically synthesized
  source 1..20: mol_type = other DNA
cagaaatacaaactaccgtc

SEQ ID NO: 66554 - DNA, 20 bp, synthetic construct
  misc_feature 1..20: note = chemically synthesized
  source 1..20: mol_type = other DNA
aacacctctacgcaaataaa

SEQ ID NO: 66555 - DNA, 20 bp, synthetic construct
  misc_feature 1..20: note = chemically synthesized
  source 1..20: mol_type = other DNA
caaataaactagaaaatcta

SEQ ID NO: 66556 - DNA, 20 bp, synthetic construct
  misc_feature 1..20: note = chemically synthesized
  source 1..20: mol_type = other DNA
ttctgaaactattccaatca

SEQ ID NO: 66557 - DNA, 20 bp, synthetic construct
  misc_feature 1..20: note = chemically synthesized
  source 1..20: mol_type = other DNA
gacagagacacaacaaaaaa

SEQ ID NO: 66558 - DNA, 20 bp, synthetic construct
  misc_feature 1..20: note = chemically synthesized
  source 1..20: mol_type = other DNA
atatgattatctcaatagat

SEQ ID NO: 66559 - DNA, 20 bp, synthetic construct
  misc_feature 1..20: note = chemically synthesized
  source 1..20: mol_type = other DNA
cagatgacatgattgtatat

SEQ ID NO: 66560 - DNA, 20 bp, synthetic construct
  misc_feature 1..20: note = chemically synthesized
  source 1..20: mol_type = other DNA
cccattcacaattgcttcaa

SEQ ID NO: 66561 - DNA, 20 bp, synthetic construct
  misc_feature 1..20: note = chemically synthesized
  source 1..20: mol_type = other DNA
cattccatgctcatgggtag

SEQ ID NO: 66562 - DNA, 20 bp, synthetic construct
  misc_feature 1..20: note = chemically synthesized
  source 1..20: mol_type = other DNA
aatggaacagaacagagccc

SEQ ID NO: 66563 - DNA, 20 bp, synthetic construct
  misc_feature 1..20: note = chemically synthesized
  source 1..20: mol_type = other DNA
tctgatctttgacaaacctg

SEQ ID NO: 66564 - DNA, 20 bp, synthetic construct
  misc_feature 1..20: note = chemically synthesized
  source 1..20: mol_type = other DNA
ggaaaactggctagccatat

SEQ ID NO: 66565 - DNA, 20 bp, synthetic construct
  misc_feature 1..20: note = chemically synthesized
  source 1..20: mol_type = other DNA
gacctaaaaccataaaaacc

SEQ ID NO: 66566 - DNA, 20 bp, synthetic construct
  misc_feature 1..20: note = chemically synthesized
  source 1..20: mol_type = other DNA
taaagagcttctgcacagct

SEQ ID NO: 66567 - DNA, 20 bp, synthetic construct
  misc_feature 1..20: note = chemically synthesized
  source 1..20: mol_type = other DNA
aacaggcaacctacaaaatg

SEQ ID NO: 66568 - DNA, 20 bp, synthetic construct
  misc_feature 1..20: note = chemically synthesized
  source 1..20: mol_type = other DNA
atctgacaaagggctaatat

SEQ ID NO: 66569 - DNA, 20 bp, synthetic construct
  misc_feature 1..20: note = chemically synthesized
  source 1..20: mol_type = other DNA
aatgaactcaaacaaattta

SEQ ID NO: 66570 - DNA, 20 bp, synthetic construct
  misc_feature 1..20: note = chemically synthesized
  source 1..20: mol_type = other DNA
gctcatcatcactagccatc

SEQ ID NO: 66571 - DNA, 20 bp, synthetic construct
  misc_feature 1..20: note = chemically synthesized
  source 1..20: mol_type = other DNA
gagataccatctcacaccag

SEQ ID NO: 66572 - DNA, 20 bp, synthetic construct
  misc_feature 1..20: note = chemically synthesized
  source 1..20: mol_type = other DNA
acaggtgctggagaggatgt

SEQ ID NO: 66573 - DNA, 20 bp, synthetic construct
  misc_feature 1..20: note = chemically synthesized
  source 1..20: mol_type = other DNA
aattcctcaggaatctagaa

SEQ ID NO: 66574 - DNA, 20 bp, synthetic construct
  misc_feature 1..20: note = chemically synthesized
  source 1..20: mol_type = other DNA
ccaacaacgatagactggat

SEQ ID NO: 66575 - DNA, 20 bp, synthetic construct
  misc_feature 1..20: note = chemically synthesized
  source 1..20: mol_type = other DNA
ttctcagcaaactatcacaa

SEQ ID NO: 66576 - DNA, 20 bp, synthetic construct
  misc_feature 1..20: note = chemically synthesized
  source 1..20: mol_type = other DNA
agtctttctctttgaaatag

SEQ ID NO: 66577 - DNA, 20 bp, synthetic construct
  misc_feature 1..20: note = chemically synthesized
  source 1..20: mol_type = other DNA
tcttccttcttatttgttta

SEQ ID NO: 66578 - DNA, 20 bp, synthetic construct
  misc_feature 1..20: note = chemically synthesized
  source 1..20: mol_type = other DNA
gtaaatggcaatattgagaa

SEQ ID NO: 66579 - DNA, 20 bp, synthetic construct
  misc_feature 1..20: note = chemically synthesized
  source 1..20: mol_type = other DNA
atactaaacaggagccaagc

SEQ ID NO: 66580 - DNA, 20 bp, synthetic construct
  misc_feature 1..20: note = chemically synthesized
  source 1..20: mol_type = other DNA
aaagtgaccaattaaaataa

SEQ ID NO: 66581 - DNA, 20 bp, synthetic construct
  misc_feature 1..20: note = chemically synthesized
  source 1..20: mol_type = other DNA
gggagggggacatagagttg

SEQ ID NO: 66582 - DNA, 20 bp, synthetic construct
  misc_feature 1..20: note = chemically synthesized
  source 1..20: mol_type = other DNA
tcctcccaaggctgaaccag

SEQ ID NO: 66583 - DNA, 20 bp, synthetic construct
  misc_feature 1..20: note = chemically synthesized
  source 1..20: mol_type = other DNA
atagacacacaacaacaaaa

SEQ ID NO: 66584 - DNA, 20 bp, synthetic construct
  misc_feature 1..20: note = chemically synthesized
  source 1..20: mol_type = other DNA
tcatatatacagcactaaaa

SEQ ID NO: 66585 - DNA, 20 bp, synthetic construct
  misc_feature 1..20: note = chemically synthesized
  source 1..20: mol_type = other DNA
aaacccacagccaacatcat

SEQ ID NO: 66586 - DNA, 20 bp, synthetic construct
  misc_feature 1..20: note = chemically synthesized
  source 1..20: mol_type = other DNA
aagggcatccaaataggaag

SEQ ID NO: 66587 - DNA, 20 bp, synthetic construct
  misc_feature 1..20: note = chemically synthesized
  source 1..20: mol_type = other DNA
agtatccctgttttctgtat

SEQ ID NO: 66588 - DNA, 20 bp, synthetic construct
  misc_feature 1..20: note = chemically synthesized
  source 1..20: mol_type = other DNA
cccatttaccgttgccacaa

SEQ ID NO: 66589 - DNA, 20 bp, synthetic construct
  misc_feature 1..20: note = chemically synthesized
  source 1..20: mol_type = other DNA
agatttacaaaacactgctc

SEQ ID NO: 66590 - DNA, 20 bp, synthetic construct
  misc_feature 1..20: note = chemically synthesized
  source 1..20: mol_type = other DNA
gctcaaagaaatcagagctg

SEQ ID NO: 66591 - DNA, 20 bp, synthetic construct
  misc_feature 1..20: note = chemically synthesized
  source 1..20: mol_type = other DNA
ctttccatgctcatggataa

SEQ ID NO: 66592 - DNA, 20 bp, synthetic construct
  misc_feature 1..20: note = chemically synthesized
  source 1..20: mol_type = other DNA
caatgacattcttcacagaa

SEQ ID NO: 66593 - DNA, 20 bp, synthetic construct
  misc_feature 1..20: note = chemically synthesized
  source 1..20: mol_type = other DNA
tagagtacaaaaaaaaaaaa

SEQ ID NO: 66594 - DNA, 20 bp, synthetic construct
  misc_feature 1..20: note = chemically synthesized
  source 1..20: mol_type = other DNA
acaaaaaaaaaaaaagagaa

SEQ ID NO: 66595 - DNA, 20 bp, synthetic construct
  misc_feature 1..20: note = chemically synthesized
  source 1..20: mol_type = other DNA
caaaacagtgtggtactgtt

SEQ ID NO: 66596 - DNA, 20 bp, synthetic construct
  misc_feature 1..20: note = chemically synthesized
  source 1..20: mol_type = other DNA
aagacacacagacaaatgga

SEQ ID NO: 66597 - DNA, 20 bp, synthetic construct
  misc_feature 1..20: note = chemically synthesized
  source 1..20: mol_type = other DNA
aatggaacagaatagagagc

SEQ ID NO: 66598 - DNA, 20 bp, synthetic construct
  misc_feature 1..20: note = chemically synthesized
  source 1..20: mol_type = other DNA
aataaagtttctgcacagca

SEQ ID NO: 66599 - DNA, 20 bp, synthetic construct
  misc_feature 1..20: note = chemically synthesized
  source 1..20: mol_type = other DNA
atcaactgagtaaacaacct

SEQ ID NO: 66600 - DNA, 20 bp, synthetic construct
  misc_feature 1..20: note = chemically synthesized
  source 1..20: mol_type = other DNA
agtaaacaacctatagaatg

SEQ ID NO: 66601 - DNA, 20 bp, synthetic construct
  misc_feature 1..20: note = chemically synthesized
  source 1..20: mol_type = other DNA
atccaacaaaggcctaatat

SEQ ID NO: 66602 - DNA, 20 bp, synthetic construct
  misc_feature 1..20: note = chemically synthesized
  source 1..20: mol_type = other DNA
gctcagtgtcactgatcatt

SEQ ID NO: 66603 - DNA, 20 bp, synthetic construct
  misc_feature 1..20: note = chemically synthesized
  source 1..20: mol_type = other DNA
acagatgtgggtaaggttgt

SEQ ID NO: 66604 - DNA, 20 bp, synthetic construct
  misc_feature 1..20: note = chemically synthesized
  source 1..20: mol_type = other DNA
aattccctaaagacctaaaa

SEQ ID NO: 66605 - DNA, 20 bp, synthetic construct
  misc_feature 1..20: note = chemically synthesized
  source 1..20: mol_type = other DNA
ataatcacaatagcaaagac

SEQ ID NO: 66606 - DNA, 20 bp, synthetic construct
  misc_feature 1..20: note = chemically synthesized
  source 1..20: mol_type = other DNA
gaatactatgtggccataaa

SEQ ID NO: 66607 - DNA, 20 bp, synthetic construct
  misc_feature 1..20: note = chemically synthesized
  source 1..20: mol_type = other DNA
cttaacaaactaatgtaaga

SEQ ID NO: 66608 - DNA, 20 bp, synthetic construct
  misc_feature 1..20: note = chemically synthesized
  source 1..20: mol_type = other DNA
tacaagtaggaactaaatga

SEQ ID NO: 66609 - DNA, 20 bp, synthetic construct
  misc_feature 1..20: note = chemically synthesized
  source 1..20: mol_type = other DNA
gggtgggaacggggagaaga

SEQ ID NO: 66610 - DNA, 20 bp, synthetic construct
  misc_feature 1..20: note = chemically synthesized
  source 1..20: mol_type = other DNA
gccatcctgcagagcaagtg

SEQ ID NO: 66611 - DNA, 20 bp, synthetic construct
  misc_feature 1..20: note = chemically synthesized
  source 1..20: mol_type = other DNA
ggccagcttgcttcccacta

SEQ ID NO: 66612 - DNA, 20 bp, synthetic construct
  misc_feature 1..20: note = chemically synthesized
  source 1..20: mol_type = other DNA
gcaatttcttcaactacaaa

SEQ ID NO: 66613 - DNA, 20 bp, synthetic construct
  misc_feature 1..20: note = chemically synthesized
  source 1..20: mol_type = other DNA
ggcacatgcaggctgctata

SEQ ID NO: 66614 - DNA, 20 bp, synthetic construct
  misc_feature 1..20: note = chemically synthesized
  source 1..20: mol_type = other DNA
attttatgacctagcaattt

SEQ ID NO: 66615 - DNA, 20 bp, synthetic construct
  misc_feature 1..20: note = chemically synthesized
  source 1..20: mol_type = other DNA
aatatatatacaaaaatata

SEQ ID NO: 66616 - DNA, 20 bp, synthetic construct
  misc_feature 1..20: note = chemically synthesized
  source 1..20: mol_type = other DNA
tattgtggtatatacataaa

SEQ ID NO: 66617 - DNA, 20 bp, synthetic construct
  misc_feature 1..20: note = chemically synthesized
  source 1..20: mol_type = other DNA
tacataaaatagaatgacat

SEQ ID NO: 66618 - DNA, 20 bp, synthetic construct
  misc_feature 1..20: note = chemically synthesized
  source 1..20: mol_type = other DNA
tattaaaataaaaactaaat

SEQ ID NO: 66619 - DNA, 20 bp, synthetic construct
  misc_feature 1..20: note = chemically synthesized
  source 1..20: mol_type = other DNA
ttaacttcctgaagaagagg

SEQ ID NO: 66620 - DNA, 20 bp, synthetic construct
  misc_feature 1..20: note = chemically synthesized
  source 1..20: mol_type = other DNA
ataatgaaaaaaggaaaata

SEQ ID NO: 66621 - DNA, 20 bp, synthetic construct
  misc_feature 1..20: note = chemically synthesized
  source 1..20: mol_type = other DNA
ttcactacatggtactatgt

SEQ ID NO: 66622 - DNA, 20 bp, synthetic construct
  misc_feature 1..20: note = chemically synthesized
  source 1..20: mol_type = other DNA
acatggtactatgtcaagaa

SEQ ID NO: 66623 - DNA, 20 bp, synthetic construct
  misc_feature 1..20: note = chemically synthesized
  source 1..20: mol_type = other DNA
taataatcaatttctcacaa

SEQ ID NO: 66624 - DNA, 20 bp, synthetic construct
  misc_feature 1..20: note = chemically synthesized
  source 1..20: mol_type = other DNA
tgagctaaaaattatatacc

SEQ ID NO: 66625 - DNA, 20 bp, synthetic construct
  misc_feature 1..20: note = chemically synthesized
  source 1..20: mol_type = other DNA
aaataaataaaataaataaa

SEQ ID NO: 66626 - DNA, 20 bp, synthetic construct
  misc_feature 1..20: note = chemically synthesized
  source 1..20: mol_type = other DNA
aataaacctttgtcacctct

SEQ ID NO: 66627 - DNA, 20 bp, synthetic construct
  misc_feature 1..20: note = chemically synthesized
  source 1..20: mol_type = other DNA
aattctaaaaatccacagat

SEQ ID NO: 66628 - DNA, 20 bp, synthetic construct
  misc_feature 1..20: note = chemically synthesized
  source 1..20: mol_type = other DNA
atttagaaattctaggaatc

SEQ ID NO: 66629 - DNA, 20 bp, synthetic construct
  misc_feature 1..20: note = chemically synthesized
  source 1..20: mol_type = other DNA
acaatagatgacacctgcat

SEQ ID NO: 66630 - DNA, 20 bp, synthetic construct
  misc_feature 1..20: note = chemically synthesized
  source 1..20: mol_type = other DNA
atctctcctatgttctgagg

SEQ ID NO: 66631 - DNA, 20 bp, synthetic construct
  misc_feature 1..20: note = chemically synthesized
  source 1..20: mol_type = other DNA
ttctcacattcttttcttga

SEQ ID NO: 66632 - DNA, 20 bp, synthetic construct
  misc_feature 1..20: note = chemically synthesized
  source 1..20: mol_type = other DNA
cttattccactgtgtggtga

SEQ ID NO: 66633 - DNA, 20 bp, synthetic construct
  misc_feature 1..20: note = chemically synthesized
  source 1..20: mol_type = other DNA
tgaagccatagtaaccccct

SEQ ID NO: 66634 - DNA, 20 bp, synthetic construct
  misc_feature 1..20: note = chemically synthesized
  source 1..20: mol_type = other DNA
aggtatgggtactcgatttc

SEQ ID NO: 66635 - DNA, 20 bp, synthetic construct
  misc_feature 1..20: note = chemically synthesized
  source 1..20: mol_type = other DNA
ttaaaaataagggtattgaa

SEQ ID NO: 66636 - DNA, 20 bp, synthetic construct
  misc_feature 1..20: note = chemically synthesized
  source 1..20: mol_type = other DNA
aagggtattgaagtagaatt

SEQ ID NO: 66637 - DNA, 20 bp, synthetic construct
  misc_feature 1..20: note = chemically synthesized
  source 1..20: mol_type = other DNA
ttgatttcataaaaacggga

SEQ ID NO: 66638 - DNA, 20 bp, synthetic construct
  misc_feature 1..20: note = chemically synthesized
  source 1..20: mol_type = other DNA
taagctgtctcacattttct

SEQ ID NO: 66639 - DNA, 20 bp, synthetic construct
  misc_feature 1..20: note = chemically synthesized
  source 1..20: mol_type = other DNA
taatgatgggaatattattt

SEQ ID NO: 66640 - DNA, 20 bp, synthetic construct
  misc_feature 1..20: note = chemically synthesized
  source 1..20: mol_type = other DNA
ttctctctgaactagcatat

SEQ ID NO: 66641 - DNA, 20 bp, synthetic construct
  misc_feature 1..20: note = chemically synthesized
  source 1..20: mol_type = other DNA
cagttctttggacaagtctt

SEQ ID NO: 66642 - DNA, 20 bp, synthetic construct
  misc_feature 1..20: note = chemically synthesized
  source 1..20: mol_type = other DNA
gcatcactgaagtagggagg

SEQ ID NO: 66643 - DNA, 20 bp, synthetic construct
  misc_feature 1..20: note = chemically synthesized
  source 1..20: mol_type = other DNA
cttctgacccctagtggtgt

SEQ ID NO: 66644 - DNA, 20 bp, synthetic construct
  misc_feature 1..20: note = chemically synthesized
  source 1..20: mol_type = other DNA
aataggaatgttttagttct

SEQ ID NO: 66645 - DNA, 20 bp, synthetic construct
  misc_feature 1..20: note = chemically synthesized
  source 1..20: mol_type = other DNA
cagggaattattctgaaaag

SEQ ID NO: 66646 - DNA, 20 bp, synthetic construct
  misc_feature 1..20: note = chemically synthesized
  source 1..20: mol_type = other DNA
tcagttttaatcagagggca

SEQ ID NO: 66647 - DNA, 20 bp, synthetic construct
  misc_feature 1..20: note = chemically synthesized
  source 1..20: mol_type = other DNA
ggcatcagaaaagactcctg

SEQ ID NO: 66648 - DNA, 20 bp, synthetic construct
  misc_feature 1..20: note = chemically synthesized
  source 1..20: mol_type = other DNA
gaagcctttgtagtcagtct

SEQ ID NO: 66649 - DNA, 20 bp, synthetic construct
  misc_feature 1..20: note = chemically synthesized
  source 1..20: mol_type = other DNA
tttaacacatacctacattc

SEQ ID NO: 66650 - DNA, 20 bp, synthetic construct
  misc_feature 1..20: note = chemically synthesized
  source 1..20: mol_type = other DNA
tctgagtcaggctggaaatg

SEQ ID NO: 66651 - DNA, 20 bp, synthetic construct
  misc_feature 1..20: note = chemically synthesized
  source 1..20: mol_type = other DNA
actcaattggtggccaaagg

SEQ ID NO: 66652 - DNA, 20 bp, synthetic construct
  misc_feature 1..20: note = chemically synthesized
  source 1..20: mol_type = other DNA
gattgtctagctcttatttc

SEQ ID NO: 66653 - DNA, 20 bp, synthetic construct
  misc_feature 1..20: note = chemically synthesized
  source 1..20: mol_type = other DNA
gtaagttagttaagggggtt

SEQ ID NO: 66654 - DNA, 20 bp, synthetic construct
  misc_feature 1..20: note = chemically synthesized
  source 1..20: mol_type = other DNA
aatctaggtggggagcagta

SEQ ID NO: 66655 - DNA, 20 bp, synthetic construct
  misc_feature 1..20: note = chemically synthesized
  source 1..20: mol_type = other DNA
caaggctttttgactatgat

SEQ ID NO: 66656 - DNA, 20 bp, synthetic construct
  misc_feature 1..20: note = chemically synthesized
  source 1..20: mol_type = other DNA
gtgtgatttagtagatgttt

SEQ ID NO: 66657 - DNA, 20 bp, synthetic construct
  misc_feature 1..20: note = chemically synthesized
  source 1..20: mol_type = other DNA
ctatctgggatgtgtttctg

SEQ ID NO: 66658 - DNA, 20 bp, synthetic construct
  misc_feature 1..20: note = chemically synthesized
  source 1..20: mol_type = other DNA
atgtgtttctggtagaaatg

SEQ ID NO: 66659 - DNA, 20 bp, synthetic construct
  misc_feature 1..20: note = chemically synthesized
  source 1..20: mol_type = other DNA
gagaggaaagggaaggaaag

SEQ ID NO: 66660 - DNA, 20 bp, synthetic construct
  misc_feature 1..20: note = chemically synthesized
  source 1..20: mol_type = other DNA
ggagtcactttataatatta

SEQ ID NO: 66661 - DNA, 20 bp, synthetic construct
  misc_feature 1..20: note = chemically synthesized
  source 1..20: mol_type = other DNA
ataatattaggagaaaaggg

SEQ ID NO: 66662 - DNA, 20 bp, synthetic construct
  misc_feature 1..20: note = chemically synthesized
  source 1..20: mol_type = other DNA
caaatgttagtttcaaataa

SEQ ID NO: 66663 - DNA, 20 bp, synthetic construct
  misc_feature 1..20: note = chemically synthesized
  source 1..20: mol_type = other DNA
tagtctgcacattaaggaac

SEQ ID NO: 66664 - DNA, 20 bp, synthetic construct
  misc_feature 1..20: note = chemically synthesized
  source 1..20: mol_type = other DNA
atatatggataaatttgtct

SEQ ID NO: 66665 - DNA, 20 bp, synthetic construct
  misc_feature 1..20: note = chemically synthesized
  source 1..20: mol_type = other DNA
gatcgttttaaaaagggtag

SEQ ID NO: 66666 - DNA, 20 bp, synthetic construct
  misc_feature 1..20: note = chemically synthesized
  source 1..20: mol_type = other DNA
tttaggcagatagaacattt

SEQ ID NO: 66667 - DNA, 20 bp, synthetic construct
  misc_feature 1..20: note = chemically synthesized
  source 1..20: mol_type = other DNA
gagaaaaattttacgaaaga

SEQ ID NO: 66668 - DNA, 20 bp, synthetic construct
  misc_feature 1..20: note = chemically synthesized
  source 1..20: mol_type = other DNA
aaagaagagaaattcgattt

SEQ ID NO: 66669 - DNA, 20 bp, synthetic construct
  misc_feature 1..20: note = chemically synthesized
  source 1..20: mol_type = other DNA
aaagactgaaaaatcctctg

SEQ ID NO: 66670 - DNA, 20 bp, synthetic construct
  misc_feature 1..20: note = chemically synthesized
  source 1..20: mol_type = other DNA
aaaaatcctctgcaagaaac

SEQ ID NO: 66671 - DNA, 20 bp, synthetic construct
  misc_feature 1..20: note = chemically synthesized
  source 1..20: mol_type = other DNA
agaaacttcaagcattctat

SEQ ID NO: 66672 - DNA, 20 bp, synthetic construct
  misc_feature 1..20: note = chemically synthesized
  source 1..20: mol_type = other DNA
atgctgagaaggagtcaggg

SEQ ID NO: 66673 - DNA, 20 bp, synthetic construct
  misc_feature 1..20: note = chemically synthesized
  source 1..20: mol_type = other DNA
tagtatagagagtacattga

SEQ ID NO: 66674 - DNA, 20 bp, synthetic construct
  misc_feature 1..20: note = chemically synthesized
  source 1..20: mol_type = other DNA
atctgtagaactgcaggttc

SEQ ID NO: 66675 - DNA, 20 bp, synthetic construct
  misc_feature 1..20: note = chemically synthesized
  source 1..20: mol_type = other DNA
gtagaactgcaggttctaag

SEQ ID NO: 66676 - DNA, 20 bp, synthetic construct
  misc_feature 1..20: note = chemically synthesized
  source 1..20: mol_type = other DNA
tcaagaggccagagctccag

SEQ ID NO: 66677 - DNA, 20 bp, synthetic construct
  misc_feature 1..20: note = chemically synthesized
  source 1..20: mol_type = other DNA
cctgtctgcttatcaccaat

SEQ ID NO: 66678 - DNA, 20 bp, synthetic construct
  misc_feature 1..20: note = chemically synthesized
  source 1..20: mol_type = other DNA
tggctacgtcatctggaggg

SEQ ID NO: 66679 - DNA, 20 bp, synthetic construct
  misc_feature 1..20: note = chemically synthesized
  source 1..20: mol_type = other DNA
atcttcattaaatagtattt

SEQ ID NO: 66680 - DNA, 20 bp, synthetic construct
  misc_feature 1..20: note = chemically synthesized
  source 1..20: mol_type = other DNA
aatgtttaatgaattggaga

SEQ ID NO: 66681 - DNA, 20 bp, synthetic construct
  misc_feature 1..20: note = chemically synthesized
  source 1..20: mol_type = other DNA
ggcaatggatactatgtctc

SEQ ID NO: 66682 - DNA, 20 bp, synthetic construct
  misc_feature 1..20: note = chemically synthesized
  source 1..20: mol_type = other DNA
ggatactatgtctcaaagaa

SEQ ID NO: 66683 - DNA, 20 bp, synthetic construct
  misc_feature 1..20: note = chemically synthesized
  source 1..20: mol_type = other DNA
ttttagggtatttcatttac

SEQ ID NO: 66684 - DNA, 20 bp, synthetic construct
  misc_feature 1..20: note = chemically synthesized
  source 1..20: mol_type = other DNA
ctctcacatgtttctcagtt

SEQ ID NO: 66685 - DNA, 20 bp, synthetic construct
  misc_feature 1..20: note = chemically synthesized
  source 1..20: mol_type = other DNA
ttcctccatcctgactaatt

SEQ ID NO: 66686 - DNA, 20 bp, synthetic construct
  misc_feature 1..20: note = chemically synthesized
  source 1..20: mol_type = other DNA
caagacccaacagattcata

SEQ ID NO: 66687 - DNA, 20 bp, synthetic construct
  misc_feature 1..20: note = chemically synthesized
  source 1..20: mol_type = other DNA
tgagatgtattgcctaaaaa

SEQ ID NO: 66688 - DNA, 20 bp, synthetic construct
  misc_feature 1..20: note = chemically synthesized
  source 1..20: mol_type = other DNA
atgtattgcctaaaaaaaag

SEQ ID NO: 66689 - DNA, 20 bp, synthetic construct
  misc_feature 1..20: note = chemically synthesized
  source 1..20: mol_type = other DNA
acaaaaatcagtgccataaa

SEQ ID NO: 66690 - DNA, 20 bp, synthetic construct
  misc_feature 1..20: note = chemically synthesized
  source 1..20: mol_type = other DNA
aaaaatatttaaatatagtc

SEQ ID NO: 66691 - DNA, 20 bp, synthetic construct
  misc_feature 1..20: note = chemically synthesized
  source 1..20: mol_type = other DNA
tctatcagtctgaccatatt

SEQ ID NO: 66692 - DNA, 20 bp, synthetic construct
  misc_feature 1..20: note = chemically synthesized
  source 1..20: mol_type = other DNA
ctaggttttcaagtttcaaa

SEQ ID NO: 66693 - DNA, 20 bp, synthetic construct
  misc_feature 1..20: note = chemically synthesized
  source 1..20: mol_type = other DNA
tgttgtgatatctgtatgga

SEQ ID NO: 66694 - DNA, 20 bp, synthetic construct
  misc_feature 1..20: note = chemically synthesized
  source 1..20: mol_type = other DNA
acagttcataaagaggacac

SEQ ID NO: 66695 - DNA, 20 bp, synthetic construct
  misc_feature 1..20: note = chemically synthesized
  source 1..20: mol_type = other DNA
tctaccatgtctaatttaaa

SEQ ID NO: 66696 - DNA, 20 bp, synthetic construct
  misc_feature 1..20: note = chemically synthesized
  source 1..20: mol_type = other DNA
accgacttattctgagttta

SEQ ID NO: 66697 - DNA, 20 bp, synthetic construct
  misc_feature 1..20: note = chemically synthesized
  source 1..20: mol_type = other DNA
gtgcagctttccaaagaagg

SEQ ID NO: 66698 - DNA, 20 bp, synthetic construct
  misc_feature 1..20: note = chemically synthesized
  source 1..20: mol_type = other DNA
acaaaactatgcatggataa

SEQ ID NO: 66699 - DNA, 20 bp, synthetic construct
  misc_feature 1..20: note = chemically synthesized
  source 1..20: mol_type = other DNA
ggacagagtaaagtatctgg

SEQ ID NO: 66700 - DNA, 20 bp, synthetic construct
  misc_feature 1..20: note = chemically synthesized
  source 1..20: mol_type = other DNA
ccgtctctactaaaaaaaca

SEQ ID NO: 66701 - DNA, 20 bp, synthetic construct
  misc_feature 1..20: note = chemically synthesized
  source 1..20: mol_type = other DNA
gtactcgggaggctgagaca

SEQ ID NO: 66702 - DNA, 20 bp, synthetic construct
  misc_feature 1..20: note = chemically synthesized
  source 1..20: mol_type = other DNA
tctcaaaaaaaaaaaaaaaa

SEQ ID NO: 66703 - DNA, 20 bp, synthetic construct
  misc_feature 1..20: note = chemically synthesized
  source 1..20: mol_type = other DNA
aaaaaaaaaaagagaaaaaa

SEQ ID NO: 66704 - DNA, 20 bp, synthetic construct
  misc_feature 1..20: note = chemically synthesized
  source 1..20: mol_type = other DNA
tgacacaacactggggaagc

SEQ ID NO: 66705 - DNA, 20 bp, synthetic construct
  misc_feature 1..20: note = chemically synthesized
  source 1..20: mol_type = other DNA
cagccactcatagggaagca

SEQ ID NO: 66706 - DNA, 20 bp, synthetic construct
  misc_feature 1..20: note = chemically synthesized
  source 1..20: mol_type = other DNA
tgcttcagattaggcaacct

SEQ ID NO: 66707 - DNA, 20 bp, synthetic construct
  misc_feature 1..20: note = chemically synthesized
  source 1..20: mol_type = other DNA
aaaaatacctaagagtatcc

SEQ ID NO: 66708 - DNA, 20 bp, synthetic construct
  misc_feature 1..20: note = chemically synthesized
  source 1..20: mol_type = other DNA
gataagatttatgaagaact

SEQ ID NO: 66709 - DNA, 20 bp, synthetic construct
  misc_feature 1..20: note = chemically synthesized
  source 1..20: mol_type = other DNA
atatgattactgggctttat

SEQ ID NO: 66710 - DNA, 20 bp, synthetic construct
  misc_feature 1..20: note = chemically synthesized
  source 1..20: mol_type = other DNA
gattactgggctttatacag

SEQ ID NO: 66711 - DNA, 20 bp, synthetic construct
  misc_feature 1..20: note = chemically synthesized
  source 1..20: mol_type = other DNA
ataactaaacctctcctgag

SEQ ID NO: 66712 - DNA, 20 bp, synthetic construct
  misc_feature 1..20: note = chemically synthesized
  source 1..20: mol_type = other DNA
aggctactatccagcgtcac

SEQ ID NO: 66713 - DNA, 20 bp, synthetic construct
  misc_feature 1..20: note = chemically synthesized
  source 1..20: mol_type = other DNA
agtcacggttattataataa

SEQ ID NO: 66714 - DNA, 20 bp, synthetic construct
  misc_feature 1..20: note = chemically synthesized
  source 1..20: mol_type = other DNA
caaggtgacaaaagtaagat

SEQ ID NO: 66715 - DNA, 20 bp, synthetic construct
  misc_feature 1..20: note = chemically synthesized
  source 1..20: mol_type = other DNA
caaaagtaagattcagaaaa

SEQ ID NO: 66716 - DNA, 20 bp, synthetic construct
  misc_feature 1..20: note = chemically synthesized
  source 1..20: mol_type = other DNA
cgaaaagctaaggtccagtg

SEQ ID NO: 66717 - DNA, 20 bp, synthetic construct
  misc_feature 1..20: note = chemically synthesized
  source 1..20: mol_type = other DNA
tgagaggacatgattcagga

SEQ ID NO: 66718 - DNA, 20 bp, synthetic construct
  misc_feature 1..20: note = chemically synthesized
  source 1..20: mol_type = other DNA
agatcccttgcatgcctcta

SEQ ID NO: 66719 - DNA, 20 bp, synthetic construct
  misc_feature 1..20: note = chemically synthesized
  source 1..20: mol_type = other DNA
cattttcccagaagtctctt

SEQ ID NO: 66720 - DNA, 20 bp, synthetic construct
  misc_feature 1..20: note = chemically synthesized
  source 1..20: mol_type = other DNA
ttggcaccatgtaatggcac

SEQ ID NO: 66721 - DNA, 20 bp, synthetic construct
  misc_feature 1..20: note = chemically synthesized
  source 1..20: mol_type = other DNA
tgaataataaaatataaatt

SEQ ID NO: 66722 - DNA, 20 bp, synthetic construct
  misc_feature 1..20: note = chemically synthesized
  source 1..20: mol_type = other DNA
gatgtacacagagacactgt

SEQ ID NO: 66723 - DNA, 20 bp, synthetic construct
  misc_feature 1..20: note = chemically synthesized
  source 1..20: mol_type = other DNA
aatctgaaatctatatgtct

SEQ ID NO: 66724 - DNA, 20 bp, synthetic construct
  misc_feature 1..20: note = chemically synthesized
  source 1..20: mol_type = other DNA
tctacagaaaaggataccaa

SEQ ID NO: 66725 - DNA, 20 bp, synthetic construct
  misc_feature 1..20: note = chemically synthesized
  source 1..20: mol_type = other DNA
agagcattttctggaaaaac

SEQ ID NO: 66726 - DNA, 20 bp, synthetic construct
  misc_feature 1..20: note = chemically synthesized
  source 1..20: mol_type = other DNA
gaggggtagggctaaaaatg

SEQ ID NO: 66727 - DNA, 20 bp, synthetic construct
  misc_feature 1..20: note = chemically synthesized
  source 1..20: mol_type = other DNA
tgaaacagagagattatgca

SEQ ID NO: 66728 - DNA, 20 bp, synthetic construct
  misc_feature 1..20: note = chemically synthesized
  source 1..20: mol_type = other DNA
aatgatgataaactgtctca

SEQ ID NO: 66729 - DNA, 20 bp, synthetic construct
  misc_feature 1..20: note = chemically synthesized
  source 1..20: mol_type = other DNA
taactaattgtaccgtgttc

SEQ ID NO: 66730 - DNA, 20 bp, synthetic construct
  misc_feature 1..20: note = chemically synthesized
  source 1..20: mol_type = other DNA
tcgtccttgcgatagtttac

SEQ ID NO: 66731 - DNA, 20 bp, synthetic construct
  misc_feature 1..20: note = chemically synthesized
  source 1..20: mol_type = other DNA
catatttcatggtgaggaac

SEQ ID NO: 66732 - DNA, 20 bp, synthetic construct
  misc_feature 1..20: note = chemically synthesized
  source 1..20: mol_type = other DNA
gaccgtgaacacaccagaag

SEQ ID NO: 66733 - DNA, 20 bp, synthetic construct
  misc_feature 1..20: note = chemically synthesized
  source 1..20: mol_type = other DNA
tcctttgaacacaccatctt

SEQ ID NO: 66734 - DNA, 20 bp, synthetic construct
  misc_feature 1..20: note = chemically synthesized
  source 1..20: mol_type = other DNA
ccaacacaaaaattacatac

SEQ ID NO: 66735 - DNA, 20 bp, synthetic construct
  misc_feature 1..20: note = chemically synthesized
  source 1..20: mol_type = other DNA
tacctagaatcaattttaat

SEQ ID NO: 66736 - DNA, 20 bp, synthetic construct
  misc_feature 1..20: note = chemically synthesized
  source 1..20: mol_type = other DNA
tggagcacagcttattcagg

SEQ ID NO: 66737 - DNA, 20 bp, synthetic construct
  misc_feature 1..20: note = chemically synthesized
  source 1..20: mol_type = other DNA
tttagatccttgatatttga

SEQ ID NO: 66738 - DNA, 20 bp, synthetic construct
  misc_feature 1..20: note = chemically synthesized
  source 1..20: mol_type = other DNA
caggaagtagatttaagagt

SEQ ID NO: 66739 - DNA, 20 bp, synthetic construct
  misc_feature 1..20: note = chemically synthesized
  source 1..20: mol_type = other DNA
taaaaattcatggtaagtta

SEQ ID NO: 66740 - DNA, 20 bp, synthetic construct
  misc_feature 1..20: note = chemically synthesized
  source 1..20: mol_type = other DNA
tactcagtaacacatgtcat

SEQ ID NO: 66741 - DNA, 20 bp, synthetic construct
  misc_feature 1..20: note = chemically synthesized
  source 1..20: mol_type = other DNA
tcacttattgcttgtaggga

SEQ ID NO: 66742 - DNA, 20 bp, synthetic construct
  misc_feature 1..20: note = chemically synthesized
  source 1..20: mol_type = other DNA
aactgtggaacatccatagg

SEQ ID NO: 66743 - DNA, 20 bp, synthetic construct
  misc_feature 1..20: note = chemically synthesized
  source 1..20: mol_type = other DNA
aacctattttatcttgctgt

SEQ ID NO: 66744 - DNA, 20 bp, synthetic construct
  misc_feature 1..20: note = chemically synthesized
  source 1..20: mol_type = other DNA
tagtttcagacagctattgc

SEQ ID NO: 66745 - DNA, 20 bp, synthetic construct
  misc_feature 1..20: note = chemically synthesized
  source 1..20: mol_type = other DNA
ttgagtatcaaaggaaggaa

SEQ ID NO: 66746 - DNA, 20 bp, synthetic construct
  misc_feature 1..20: note = chemically synthesized
  source 1..20: mol_type = other DNA
ctcagcttctagggagacct

SEQ ID NO: 66747 - DNA, 20 bp, synthetic construct
  misc_feature 1..20: note = chemically synthesized
  source 1..20: mol_type = other DNA
acaaattcccattccaaaag

SEQ ID NO: 66748 - DNA, 20 bp, synthetic construct
  misc_feature 1..20: note = chemically synthesized
  source 1..20: mol_type = other DNA
caaaagagagaaatgcacca

SEQ ID NO: 66749 - DNA, 20 bp, synthetic construct
  misc_feature 1..20: note = chemically synthesized
  source 1..20: mol_type = other DNA
gggctaaagatcccacacga

SEQ ID NO: 66750 - DNA, 20 bp, synthetic construct
  misc_feature 1..20: note = chemically synthesized
  source 1..20: mol_type = other DNA
catcttgaacaccttgctgc

SEQ ID NO: 66751 - DNA, 20 bp, synthetic construct
  misc_feature 1..20: note = chemically synthesized
  source 1..20: mol_type = other DNA
cttcattgtccatatcacta

SEQ ID NO: 66752 - DNA, 20 bp, synthetic construct
  misc_feature 1..20: note = chemically synthesized
  source 1..20: mol_type = other DNA
cacaaccattccacaagtct

SEQ ID NO: 66753 - DNA, 20 bp, synthetic construct
  misc_feature 1..20: note = chemically synthesized
  source 1..20: mol_type = other DNA
gaaacttataatcatggcag

SEQ ID NO: 66754 - DNA, 20 bp, synthetic construct
  misc_feature 1..20: note = chemically synthesized
  source 1..20: mol_type = other DNA
gtcctggtgtatccttcctt

SEQ ID NO: 66755 - DNA, 20 bp, synthetic construct
  misc_feature 1..20: note = chemically synthesized
  source 1..20: mol_type = other DNA
caaatattgattccaaccac

SEQ ID NO: 66756 - DNA, 20 bp, synthetic construct
  misc_feature 1..20: note = chemically synthesized
  source 1..20: mol_type = other DNA
cataaaatctcataatgttt

SEQ ID NO: 66757 - DNA, 20 bp, synthetic construct
  misc_feature 1..20: note = chemically synthesized
  source 1..20: mol_type = other DNA
ctctacagcctacaaacaag

SEQ ID NO: 66758 - DNA, 20 bp, synthetic construct
  misc_feature 1..20: note = chemically synthesized
  source 1..20: mol_type = other DNA
ctttactaacttacaaatga

SEQ ID NO: 66759 - DNA, 20 bp, synthetic construct
  misc_feature 1..20: note = chemically synthesized
  source 1..20: mol_type = other DNA
ttatgccaaattacttgttc

SEQ ID NO: 66760 - DNA, 20 bp, synthetic construct
  misc_feature 1..20: note = chemically synthesized
  source 1..20: mol_type = other DNA
tatccatttccttgaaatcc

SEQ ID NO: 66761 - DNA, 20 bp, synthetic construct
  misc_feature 1..20: note = chemically synthesized
  source 1..20: mol_type = other DNA
atttctgacatgaacttatg

SEQ ID NO: 66762 - DNA, 20 bp, synthetic construct
  misc_feature 1..20: note = chemically synthesized
  source 1..20: mol_type = other DNA
tcaaagactgtagacttcta

SEQ ID NO: 66763 - DNA, 20 bp, synthetic construct
  misc_feature 1..20: note = chemically synthesized
  source 1..20: mol_type = other DNA
ataactattatttcatctgc

SEQ ID NO: 66764 - DNA, 20 bp, synthetic construct
  misc_feature 1..20: note = chemically synthesized
  source 1..20: mol_type = other DNA
cctcttgcatattatattta

SEQ ID NO: 66765 - DNA, 20 bp, synthetic construct
  misc_feature 1..20: note = chemically synthesized
  source 1..20: mol_type = other DNA
tagggattctttgaaaaata

SEQ ID NO: 66766 - DNA, 20 bp, synthetic construct
  misc_feature 1..20: note = chemically synthesized
  source 1..20: mol_type = other DNA
tatatggaaggctccacttg

SEQ ID NO: 66767 - DNA, 20 bp, synthetic construct
  misc_feature 1..20: note = chemically synthesized
  source 1..20: mol_type = other DNA
cctcattaaagtatccttca

SEQ ID NO: 66768 - DNA, 20 bp, synthetic construct
  misc_feature 1..20: note = chemically synthesized
  source 1..20: mol_type = other DNA
tgacccatttaccatgtgac

SEQ ID NO: 66769 - DNA, 20 bp, synthetic construct
  misc_feature 1..20: note = chemically synthesized
  source 1..20: mol_type = other DNA
aattaaagggaaataaaatg

SEQ ID NO: 66770 - DNA, 20 bp, synthetic construct
  misc_feature 1..20: note = chemically synthesized
  source 1..20: mol_type = other DNA
ggtgtcagagagtggtggct

SEQ ID NO: 66771 - DNA, 20 bp, synthetic construct
  misc_feature 1..20: note = chemically synthesized
  source 1..20: mol_type = other DNA
aatgcacaaattataatgaa

SEQ ID NO: 66772 - DNA, 20 bp, synthetic construct
  misc_feature 1..20: note = chemically synthesized
  source 1..20: mol_type = other DNA
tgctaaatatcttcaggatt

SEQ ID NO: 66773 - DNA, 20 bp, synthetic construct
  misc_feature 1..20: note = chemically synthesized
  source 1..20: mol_type = other DNA
gttatgctcaatgaaaactt

SEQ ID NO: 66774 - DNA, 20 bp, synthetic construct
  misc_feature 1..20: note = chemically synthesized
  source 1..20: mol_type = other DNA
aaaacttgtagaaaataaca

SEQ ID NO: 66775 - DNA, 20 bp, synthetic construct
  misc_feature 1..20: note = chemically synthesized
  source 1..20: mol_type = other DNA
aacaccagaaaaaaaaaagg

SEQ ID NO: 66776 - DNA, 20 bp, synthetic construct
  misc_feature 1..20: note = chemically synthesized
  source 1..20: mol_type = other DNA
attaagtaagtcattttcaa

SEQ ID NO: 66777 - DNA, 20 bp, synthetic construct
  misc_feature 1..20: note = chemically synthesized
  source 1..20: mol_type = other DNA
aagaatattttagttttctc

SEQ ID NO: 66778 - DNA, 20 bp, synthetic construct
  misc_feature 1..20: note = chemically synthesized
  source 1..20: mol_type = other DNA
ttgataccatgtgcccagta

SEQ ID NO: 66779 - DNA, 20 bp, synthetic construct
  misc_feature 1..20: note = chemically synthesized
  source 1..20: mol_type = other DNA
accttcctaagacactgact

SEQ ID NO: 66780 - DNA, 20 bp, synthetic construct
  misc_feature 1..20: note = chemically synthesized
  source 1..20: mol_type = other DNA
acgtgtccagggtcatagag

SEQ ID NO: 66781 - DNA, 20 bp, synthetic construct
  misc_feature 1..20: note = chemically synthesized
  source 1..20: mol_type = other DNA
tggatacattcatgattcag

SEQ ID NO: 66782 - DNA, 20 bp, synthetic construct
  misc_feature 1..20: note = chemically synthesized
  source 1..20: mol_type = other DNA
gattcagtcagaatatgctg

SEQ ID NO: 66783 - DNA, 20 bp, synthetic construct
  misc_feature 1..20: note = chemically synthesized
  source 1..20: mol_type = other DNA
aatatgctgtcagaaatatc

SEQ ID NO: 66784 - DNA, 20 bp, synthetic construct
  misc_feature 1..20: note = chemically synthesized
  source 1..20: mol_type = other DNA
ataggtatcacaaaagatca

SEQ ID NO: 66785 - DNA, 20 bp, synthetic construct
  misc_feature 1..20: note = chemically synthesized
  source 1..20: mol_type = other DNA
caccagaaaaaatttaaagg

SEQ ID NO: 66786 - DNA, 20 bp, synthetic construct
  misc_feature 1..20: note = chemically synthesized
  source 1..20: mol_type = other DNA
ccatcatataaaatttgaga

SEQ ID NO: 66787 - DNA, 20 bp, synthetic construct
  misc_feature 1..20: note = chemically synthesized
  source 1..20: mol_type = other DNA
aactttagccagcttttact

SEQ ID NO: 66788 - DNA, 20 bp, synthetic construct
  misc_feature 1..20: note = chemically synthesized
  source 1..20: mol_type = other DNA
taggtgtggtgtggtgctga

SEQ ID NO: 66789 - DNA, 20 bp, synthetic construct
  misc_feature 1..20: note = chemically synthesized
  source 1..20: mol_type = other DNA
ttaaggttaatattgttatg

SEQ ID NO: 66790 - DNA, 20 bp, synthetic construct
  misc_feature 1..20: note = chemically synthesized
  source 1..20: mol_type = other DNA
ttctgaaactattccaatca

SEQ ID NO: 66791 - DNA, 20 bp, synthetic construct
  misc_feature 1..20: note = chemically synthesized
  source 1..20: mol_type = other DNA
agcagacacacaacaaaaaa

SEQ ID NO: 66792 - DNA, 20 bp, synthetic construct
  misc_feature 1..20: note = chemically synthesized
  source 1..20: mol_type = other DNA
acatgattatctcaatagat

SEQ ID NO: 66793 - DNA, 20 bp, synthetic construct
  misc_feature 1..20: note = chemically synthesized
  source 1..20: mol_type = other DNA
ctggccagggcaatcaggca

SEQ ID NO: 66794 - DNA, 20 bp, synthetic construct
  misc_feature 1..20: note = chemically synthesized
  source 1..20: mol_type = other DNA
ccagggcaatcaggcaagag

SEQ ID NO: 66795 - DNA, 20 bp, synthetic construct
  misc_feature 1..20: note = chemically synthesized
  source 1..20: mol_type = other DNA
cagatgacgtgattgtatat

SEQ ID NO: 66796 - DNA, 20 bp, synthetic construct
  misc_feature 1..20: note = chemically synthesized
  source 1..20: mol_type = other DNA
ccttaagctgataagcaact

SEQ ID NO: 66797 - DNA, 20 bp, synthetic construct
  misc_feature 1..20: note = chemically synthesized
  source 1..20: mol_type = other DNA
cccattcacaattgcctcaa

SEQ ID NO: 66798 - DNA, 20 bp, synthetic construct
  misc_feature 1..20: note = chemically synthesized
  source 1..20: mol_type = other DNA
cattccatgctcatggatag

SEQ ID NO: 66799 - DNA, 20 bp, synthetic construct
  misc_feature 1..20: note = chemically synthesized
  source 1..20: mol_type = other DNA
agctaccaatgactttcttc

SEQ ID NO: 66800 - DNA, 20 bp, synthetic construct
  misc_feature 1..20: note = chemically synthesized
  source 1..20: mol_type = other DNA
aatggagcagaacagagctc

SEQ ID NO: 66801 - DNA, 20 bp, synthetic construct
  misc_feature 1..20: note = chemically synthesized
  source 1..20: mol_type = other DNA
ggaaaactggctagccatat

SEQ ID NO: 66802 - DNA, 20 bp, synthetic construct
  misc_feature 1..20: note = chemically synthesized
  source 1..20: mol_type = other DNA
ctaaaaccataaaaacctta

SEQ ID NO: 66803 - DNA, 20 bp, synthetic construct
  misc_feature 1..20: note = chemically synthesized
  source 1..20: mol_type = other DNA
taaagagcttctgcacagca

SEQ ID NO: 66804 - DNA, 20 bp, synthetic construct
  misc_feature 1..20: note = chemically synthesized
  source 1..20: mol_type = other DNA
aacaggcaacctacacaatg

SEQ ID NO: 66805 - DNA, 20 bp, synthetic construct
  misc_feature 1..20: note = chemically synthesized
  source 1..20: mol_type = other DNA
atctgacaaagggctaatat

SEQ ID NO: 66806 - DNA, 20 bp, synthetic construct
  misc_feature 1..20: note = chemically synthesized
  source 1..20: mol_type = other DNA
aatgaactcaaacaaattta

SEQ ID NO: 66807 - DNA, 20 bp, synthetic construct
  misc_feature 1..20: note = chemically synthesized
  source 1..20: mol_type = other DNA
gctcatcatcactggccatc

SEQ ID NO: 66808 - DNA, 20 bp, synthetic construct
  misc_feature 1..20: note = chemically synthesized
  source 1..20: mol_type = other DNA
gagatatcatctcacaccag

SEQ ID NO: 66809 - DNA, 20 bp, synthetic construct
  misc_feature 1..20: note = chemically synthesized
  source 1..20: mol_type = other DNA
acaggtgctggagaggatgt

SEQ ID NO: 66810 - DNA, 20 bp, synthetic construct
  misc_feature 1..20: note = chemically synthesized
  source 1..20: mol_type = other DNA
aattcctcagggatctagaa

SEQ ID NO: 66811 - DNA, 20 bp, synthetic construct
  misc_feature 1..20: note = chemically synthesized
  source 1..20: mol_type = other DNA
ccaacaatgatagactggat

SEQ ID NO: 66812 - DNA, 20 bp, synthetic construct
  misc_feature 1..20: note = chemically synthesized
  source 1..20: mol_type = other DNA
tcaatcagtgactgaagtgg

SEQ ID NO: 66813 - DNA, 20 bp, synthetic construct
  misc_feature 1..20: note = chemically synthesized
  source 1..20: mol_type = other DNA
aatgttttatcctatatttt

SEQ ID NO: 66814 - DNA, 20 bp, synthetic construct
  misc_feature 1..20: note = chemically synthesized
  source 1..20: mol_type = other DNA
tgtgggttttttttacatct

SEQ ID NO: 66815 - DNA, 20 bp, synthetic construct
  misc_feature 1..20: note = chemically synthesized
  source 1..20: mol_type = other DNA
ttttactctcctttcccaga

SEQ ID NO: 66816 - DNA, 20 bp, synthetic construct
  misc_feature 1..20: note = chemically synthesized
  source 1..20: mol_type = other DNA
cccagagaagaaaacattgg

SEQ ID NO: 66817 - DNA, 20 bp, synthetic construct
  misc_feature 1..20: note = chemically synthesized
  source 1..20: mol_type = other DNA
tcatacatttcatctttgtg

SEQ ID NO: 66818 - DNA, 20 bp, synthetic construct
  misc_feature 1..20: note = chemically synthesized
  source 1..20: mol_type = other DNA
ataccgacttacatattgtg

SEQ ID NO: 66819 - DNA, 20 bp, synthetic construct
  misc_feature 1..20: note = chemically synthesized
  source 1..20: mol_type = other DNA
taaaaagtctgttttaggga

SEQ ID NO: 66820 - DNA, 20 bp, synthetic construct
  misc_feature 1..20: note = chemically synthesized
  source 1..20: mol_type = other DNA
gaatagaataaatacaatcc

SEQ ID NO: 66821 - DNA, 20 bp, synthetic construct
  misc_feature 1..20: note = chemically synthesized
  source 1..20: mol_type = other DNA
taatgaaattctccattttt

SEQ ID NO: 66822 - DNA, 20 bp, synthetic construct
  misc_feature 1..20: note = chemically synthesized
  source 1..20: mol_type = other DNA
taaaaatatataaagataat

SEQ ID NO: 66823 - DNA, 20 bp, synthetic construct
  misc_feature 1..20: note = chemically synthesized
  source 1..20: mol_type = other DNA
atataaagataatcgagaaa

SEQ ID NO: 66824 - DNA, 20 bp, synthetic construct
  misc_feature 1..20: note = chemically synthesized
  source 1..20: mol_type = other DNA
cttaagttaaaatgttatcc

SEQ ID NO: 66825 - DNA, 20 bp, synthetic construct
  misc_feature 1..20: note = chemically synthesized
  source 1..20: mol_type = other DNA
aatggagcatcatggcatca

SEQ ID NO: 66826 - DNA, 20 bp, synthetic construct
  misc_feature 1..20: note = chemically synthesized
  source 1..20: mol_type = other DNA
aaaaagctagagaagattaa

SEQ ID NO: 66827 - DNA, 20 bp, synthetic construct
  misc_feature 1..20: note = chemically synthesized
  source 1..20: mol_type = other DNA
agattaaggagaatattttc

SEQ ID NO: 66828 - DNA, 20 bp, synthetic construct
  misc_feature 1..20: note = chemically synthesized
  source 1..20: mol_type = other DNA
ttccaagaaacttaaataaa

SEQ ID NO: 66829 - DNA, 20 bp, synthetic construct
  misc_feature 1..20: note = chemically synthesized
  source 1..20: mol_type = other DNA
aaaagcctagaacaatgcca

SEQ ID NO: 66830 - DNA, 20 bp, synthetic construct
  misc_feature 1..20: note = chemically synthesized
  source 1..20: mol_type = other DNA
aaatgaccttatttacacct

SEQ ID NO: 66831 - DNA, 20 bp, synthetic construct
  misc_feature 1..20: note = chemically synthesized
  source 1..20: mol_type = other DNA
gaaagacaaaaaaaaaactt

SEQ ID NO: 66832 - DNA, 20 bp, synthetic construct
  misc_feature 1..20: note = chemically synthesized
  source 1..20: mol_type = other DNA
tagctttttctgtgattttt

SEQ ID NO: 66833 - DNA, 20 bp, synthetic construct
  misc_feature 1..20: note = chemically synthesized
  source 1..20: mol_type = other DNA
cacacacacgtttgtgcacc

SEQ ID NO: 66834 - DNA, 20 bp, synthetic construct
  misc_feature 1..20: note = chemically synthesized
  source 1..20: mol_type = other DNA
cacgtttgtgcaccaaagaa

SEQ ID NO: 66835 - DNA, 20 bp, synthetic construct
  misc_feature 1..20: note = chemically synthesized
  source 1..20: mol_type = other DNA
tgcaccaaagaataagaaag

SEQ ID NO: 66836 - DNA, 20 bp, synthetic construct
  misc_feature 1..20: note = chemically synthesized
  source 1..20: mol_type = other DNA
gtatttccattattgggaag

SEQ ID NO: 66837 - DNA, 20 bp, synthetic construct
  misc_feature 1..20: note = chemically synthesized
  source 1..20: mol_type = other DNA
tgattttagcagtggggagc

SEQ ID NO: 66838 - DNA, 20 bp, synthetic construct
  misc_feature 1..20: note = chemically synthesized
  source 1..20: mol_type = other DNA
aaggaaaggtccaaaaaagg

SEQ ID NO: 66839 - DNA, 20 bp, synthetic construct
  misc_feature 1..20: note = chemically synthesized
  source 1..20: mol_type = other DNA
aaactgatatggtgttctag

SEQ ID NO: 66840 - DNA, 20 bp, synthetic construct
  misc_feature 1..20: note = chemically synthesized
  source 1..20: mol_type = other DNA
gtgctaagtgattgataagg

SEQ ID NO: 66841 - DNA, 20 bp, synthetic construct
  misc_feature 1..20: note = chemically synthesized
  source 1..20: mol_type = other DNA
gcaaaattttgatttcgggg

SEQ ID NO: 66842 - DNA, 20 bp, synthetic construct
  misc_feature 1..20: note = chemically synthesized
  source 1..20: mol_type = other DNA
ctgcaagaaccaataggaaa

SEQ ID NO: 66843 - DNA, 20 bp, synthetic construct
  misc_feature 1..20: note = chemically synthesized
  source 1..20: mol_type = other DNA
ctacatgggaggctgaggca

SEQ ID NO: 66844 - DNA, 20 bp, synthetic construct
  misc_feature 1..20: note = chemically synthesized
  source 1..20: mol_type = other DNA
aatacgtaaaacaaaaacaa

SEQ ID NO: 66845 - DNA, 20 bp, synthetic construct
  misc_feature 1..20: note = chemically synthesized
  source 1..20: mol_type = other DNA
tgtttattgtaacaattctc

SEQ ID NO: 66846 - DNA, 20 bp, synthetic construct
  misc_feature 1..20: note = chemically synthesized
  source 1..20: mol_type = other DNA
aaaactttttcatcatccaa

SEQ ID NO: 66847 - DNA, 20 bp, synthetic construct
  misc_feature 1..20: note = chemically synthesized
  source 1..20: mol_type = other DNA
ttcatttgtatatcttcttt

SEQ ID NO: 66848 - DNA, 20 bp, synthetic construct
  misc_feature 1..20: note = chemically synthesized
  source 1..20: mol_type = other DNA
catactttttgtgtcatatc

SEQ ID NO: 66849 - DNA, 20 bp, synthetic construct
  misc_feature 1..20: note = chemically synthesized
  source 1..20: mol_type = other DNA
tggcttttaatccttatttg

SEQ ID NO: 66850 - DNA, 20 bp, synthetic construct
  misc_feature 1..20: note = chemically synthesized
  source 1..20: mol_type = other DNA
atatgaagttgtatataaaa

SEQ ID NO: 66851 - DNA, 20 bp, synthetic construct
  misc_feature 1..20: note = chemically synthesized
  source 1..20: mol_type = other DNA
aaaaggacacagatcaaaca

SEQ ID NO: 66852 - DNA, 20 bp, synthetic construct
  misc_feature 1..20: note = chemically synthesized
  source 1..20: mol_type = other DNA
atcaaacaacagaaaacagt

SEQ ID NO: 66853 - DNA, 20 bp, synthetic construct
  misc_feature 1..20: note = chemically synthesized
  source 1..20: mol_type = other DNA
ccttgatcttatacttggta

SEQ ID NO: 66854 - DNA, 20 bp, synthetic construct
  misc_feature 1..20: note = chemically synthesized
  source 1..20: mol_type = other DNA
agaaaaattgtttatatgtt

SEQ ID NO: 66855 - DNA, 20 bp, synthetic construct
  misc_feature 1..20: note = chemically synthesized
  source 1..20: mol_type = other DNA
aaacaaatttcaggtggaat

SEQ ID NO: 66856 - DNA, 20 bp, synthetic construct
  misc_feature 1..20: note = chemically synthesized
  source 1..20: mol_type = other DNA
ttgtatatggaatagcttct

SEQ ID NO: 66857 - DNA, 20 bp, synthetic construct
  misc_feature 1..20: note = chemically synthesized
  source 1..20: mol_type = other DNA
taagatgcgggggaagtata

SEQ ID NO: 66858 - DNA, 20 bp, synthetic construct
  misc_feature 1..20: note = chemically synthesized
  source 1..20: mol_type = other DNA
ctaatctatggatagcaggt

SEQ ID NO: 66859 - DNA, 20 bp, synthetic construct
  misc_feature 1..20: note = chemically synthesized
  source 1..20: mol_type = other DNA
aaagagtgaactggtaagtt

SEQ ID NO: 66860 - DNA, 20 bp, synthetic construct
  misc_feature 1..20: note = chemically synthesized
  source 1..20: mol_type = other DNA
atggaaaatactttattcta

SEQ ID NO: 66861 - DNA, 20 bp, synthetic construct
  misc_feature 1..20: note = chemically synthesized
  source 1..20: mol_type = other DNA
ggcttacctgtgcccttgtt

SEQ ID NO: 66862 - DNA, 20 bp, synthetic construct
  misc_feature 1..20: note = chemically synthesized
  source 1..20: mol_type = other DNA
acttgatgtgcaataactga

SEQ ID NO: 66863 - DNA, 20 bp, synthetic construct
  misc_feature 1..20: note = chemically synthesized
  source 1..20: mol_type = other DNA
ttgtctatagtatcaaaatc

SEQ ID NO: 66864 - DNA, 20 bp, synthetic construct
  misc_feature 1..20: note = chemically synthesized
  source 1..20: mol_type = other DNA
agctttaacattttgtagat

SEQ ID NO: 66865 - DNA, 20 bp, synthetic construct
  misc_feature 1..20: note = chemically synthesized
  source 1..20: mol_type = other DNA
aacagttttatatatttccc

SEQ ID NO: 66866 - DNA, 20 bp, synthetic construct
  misc_feature 1..20: note = chemically synthesized
  source 1..20: mol_type = other DNA
acatttggttctgggaatat

SEQ ID NO: 66867 - DNA, 20 bp, synthetic construct
  misc_feature 1..20: note = chemically synthesized
  source 1..20: mol_type = other DNA
ctctgatggatataaagatg

SEQ ID NO: 66868 - DNA, 20 bp, synthetic construct
  misc_feature 1..20: note = chemically synthesized
  source 1..20: mol_type = other DNA
gaatacaagtgtggaaaata

SEQ ID NO: 66869 - DNA, 20 bp, synthetic construct
  misc_feature 1..20: note = chemically synthesized
  source 1..20: mol_type = other DNA
caggaggaaactgtttggct

SEQ ID NO: 66870 - DNA, 20 bp, synthetic construct
  misc_feature 1..20: note = chemically synthesized
  source 1..20: mol_type = other DNA
tatttttaatgagttcaata

SEQ ID NO: 66871 - DNA, 20 bp, synthetic construct
  misc_feature 1..20: note = chemically synthesized
  source 1..20: mol_type = other DNA
tttaatgagttcaatactag

SEQ ID NO: 66872 - DNA, 20 bp, synthetic construct
  misc_feature 1..20: note = chemically synthesized
  source 1..20: mol_type = other DNA
tacttgaaaatactgtttta

SEQ ID NO: 66873 - DNA, 20 bp, synthetic construct
  misc_feature 1..20: note = chemically synthesized
  source 1..20: mol_type = other DNA
tagaagaaaataactaaaaa

SEQ ID NO: 66874 - DNA, 20 bp, synthetic construct
  misc_feature 1..20: note = chemically synthesized
  source 1..20: mol_type = other DNA
caaaaaggtagggaggacca

SEQ ID NO: 66875 - DNA, 20 bp, synthetic construct
  misc_feature 1..20: note = chemically synthesized
  source 1..20: mol_type = other DNA
tagggaggaccagaagaatt

SEQ ID NO: 66876 - DNA, 20 bp, synthetic construct
  misc_feature 1..20: note = chemically synthesized
  source 1..20: mol_type = other DNA
tttattcatttataaatgaa

SEQ ID NO: 66877 - DNA, 20 bp, synthetic construct
  misc_feature 1..20: note = chemically synthesized
  source 1..20: mol_type = other DNA
aatccacggaacaaatatat

SEQ ID NO: 66878 - DNA, 20 bp, synthetic construct
  misc_feature 1..20: note = chemically synthesized
  source 1..20: mol_type = other DNA
tttgtctacatgttacaaat

SEQ ID NO: 66879 - DNA, 20 bp, synthetic construct
  misc_feature 1..20: note = chemically synthesized
  source 1..20: mol_type = other DNA
tacatgttacaaatgtagaa

SEQ ID NO: 66880 - DNA, 20 bp, synthetic construct
  misc_feature 1..20: note = chemically synthesized
  source 1..20: mol_type = other DNA
agtcaaagagttaataagtg

SEQ ID NO: 66881 - DNA, 20 bp, synthetic construct
  misc_feature 1..20: note = chemically synthesized
  source 1..20: mol_type = other DNA
gatcctaaaagcagaagaga

SEQ ID NO: 66882 - DNA, 20 bp, synthetic construct
  misc_feature 1..20: note = chemically synthesized
  source 1..20: mol_type = other DNA
ctgtgacaacaaacatctca

SEQ ID NO: 66883 - DNA, 20 bp, synthetic construct
  misc_feature 1..20: note = chemically synthesized
  source 1..20: mol_type = other DNA
tttcaaagcgctcagggata

SEQ ID NO: 66884 - DNA, 20 bp, synthetic construct
  misc_feature 1..20: note = chemically synthesized
  source 1..20: mol_type = other DNA
gataaaagaaaactgatatt

SEQ ID NO: 66885 - DNA, 20 bp, synthetic construct
  misc_feature 1..20: note = chemically synthesized
  source 1..20: mol_type = other DNA
tcccagacaaacaaaagttg

SEQ ID NO: 66886 - DNA, 20 bp, synthetic construct
  misc_feature 1..20: note = chemically synthesized
  source 1..20: mol_type = other DNA
aaagggagttatgcaatctg

SEQ ID NO: 66887 - DNA, 20 bp, synthetic construct
  misc_feature 1..20: note = chemically synthesized
  source 1..20: mol_type = other DNA
aaaaaagacattaacatgca

SEQ ID NO: 66888 - DNA, 20 bp, synthetic construct
  misc_feature 1..20: note = chemically synthesized
  source 1..20: mol_type = other DNA
aattaagtacatagacaaac

SEQ ID NO: 66889 - DNA, 20 bp, synthetic construct
  misc_feature 1..20: note = chemically synthesized
  source 1..20: mol_type = other DNA
gggtggagtggagttaaagt

SEQ ID NO: 66890 - DNA, 20 bp, synthetic construct
  misc_feature 1..20: note = chemically synthesized
  source 1..20: mol_type = other DNA
cagttccccaattaaaagta

SEQ ID NO: 66891 - DNA, 20 bp, synthetic construct
  misc_feature 1..20: note = chemically synthesized
  source 1..20: mol_type = other DNA
taatagaatggtaaatggat

SEQ ID NO: 66892 - DNA, 20 bp, synthetic construct
  misc_feature 1..20: note = chemically synthesized
  source 1..20: mol_type = other DNA
atccaactttatgcgatctt

SEQ ID NO: 66893 - DNA, 20 bp, synthetic construct
  misc_feature 1..20: note = chemically synthesized
  source 1..20: mol_type = other DNA
aaaattccatgaactggaaa

SEQ ID NO: 66894 - DNA, 20 bp, synthetic construct
  misc_feature 1..20: note = chemically synthesized
  source 1..20: mol_type = other DNA
gactacaaatttaaaaactg

SEQ ID NO: 66895 - DNA, 20 bp, synthetic construct
  misc_feature 1..20: note = chemically synthesized
  source 1..20: mol_type = other DNA
tttgtacaaatttttcagaa

SEQ ID NO: 66896 - DNA, 20 bp, synthetic construct
  misc_feature 1..20: note = chemically synthesized
  source 1..20: mol_type = other DNA
ctgaccacagtggaataaaa

SEQ ID NO: 66897 - DNA, 20 bp, synthetic construct
  misc_feature 1..20: note = chemically synthesized
  source 1..20: mol_type = other DNA
aatgaataacaagaagatca

SEQ ID NO: 66898 - DNA, 20 bp, synthetic construct
  misc_feature 1..20: note = chemically synthesized
  source 1..20: mol_type = other DNA
caagaagatcatcagaaaat

SEQ ID NO: 66899 - DNA, 20 bp, synthetic construct
  misc_feature 1..20: note = chemically synthesized
  source 1..20: mol_type = other DNA
tcctcctgctctttgctccg

SEQ ID NO: 66900 - DNA, 20 bp, synthetic construct
  misc_feature 1..20: note = chemically synthesized
  source 1..20: mol_type = other DNA
ggtcctcaaactgaccagcc

SEQ ID NO: 66901 - DNA, 20 bp, synthetic construct
  misc_feature 1..20: note = chemically synthesized
  source 1..20: mol_type = other DNA
tcgacagtggttccaaatag

SEQ ID NO: 66902 - DNA, 20 bp, synthetic construct
  misc_feature 1..20: note = chemically synthesized
  source 1..20: mol_type = other DNA
ccaggagcttgctacaagtg

SEQ ID NO: 66903 - DNA, 20 bp, synthetic construct
  misc_feature 1..20: note = chemically synthesized
  source 1..20: mol_type = other DNA
cccatctgtgcaggacccca

SEQ ID NO: 66904 - DNA, 20 bp, synthetic construct
  misc_feature 1..20: note = chemically synthesized
  source 1..20: mol_type = other DNA
gacaagccttacaggttagt

SEQ ID NO: 66905 - DNA, 20 bp, synthetic construct
  misc_feature 1..20: note = chemically synthesized
  source 1..20: mol_type = other DNA
cctaggcatagttagtgcgg

SEQ ID NO: 66906 - DNA, 20 bp, synthetic construct
  misc_feature 1..20: note = chemically synthesized
  source 1..20: mol_type = other DNA
cctctcatttcctttccatc

SEQ ID NO: 66907 - DNA, 20 bp, synthetic construct
  misc_feature 1..20: note = chemically synthesized
  source 1..20: mol_type = other DNA
catcgtagaaatctatcctc

SEQ ID NO: 66908 - DNA, 20 bp, synthetic construct
  misc_feature 1..20: note = chemically synthesized
  source 1..20: mol_type = other DNA
ctcagaagtcagacctgtcc

SEQ ID NO: 66909 - DNA, 20 bp, synthetic construct
  misc_feature 1..20: note = chemically synthesized
  source 1..20: mol_type = other DNA
attccagacaccagaccaac

SEQ ID NO: 66910 - DNA, 20 bp, synthetic construct
  misc_feature 1..20: note = chemically synthesized
  source 1..20: mol_type = other DNA
aatcccgctcgaagcagccc

SEQ ID NO: 66911 - DNA, 20 bp, synthetic construct
  misc_feature 1..20: note = chemically synthesized
  source 1..20: mol_type = other DNA
tgaataaccaatgagtcact

SEQ ID NO: 66912 - DNA, 20 bp, synthetic construct
  misc_feature 1..20: note = chemically synthesized
  source 1..20: mol_type = other DNA
aaacacctatatccaaaaaa

SEQ ID NO: 66913 - DNA, 20 bp, synthetic construct
  misc_feature 1..20: note = chemically synthesized
  source 1..20: mol_type = other DNA
aatgcaaaattaatagaagg

SEQ ID NO: 66914 - DNA, 20 bp, synthetic construct
  misc_feature 1..20: note = chemically synthesized
  source 1..20: mol_type = other DNA
aattaatagaaggggagaaa

SEQ ID NO: 66915 - DNA, 20 bp, synthetic construct
  misc_feature 1..20: note = chemically synthesized
  source 1..20: mol_type = other DNA
gagaaataagaaagatcaga

SEQ ID NO: 66916 - DNA, 20 bp, synthetic construct
  misc_feature 1..20: note = chemically synthesized
  source 1..20: mol_type = other DNA
tgaaattgagaccaaaaaat

SEQ ID NO: 66917 - DNA, 20 bp, synthetic construct
  misc_feature 1..20: note = chemically synthesized
  source 1..20: mol_type = other DNA
aaacaaaatcaacaaaactt

SEQ ID NO: 66918 - DNA, 20 bp, synthetic construct
  misc_feature 1..20: note = chemically synthesized
  source 1..20: mol_type = other DNA
gaaaaaagagtcaaataaaa

SEQ ID NO: 66919 - DNA, 20 bp, synthetic construct
  misc_feature 1..20: note = chemically synthesized
  source 1..20: mol_type = other DNA
attccaacaaattggaaaat

SEQ ID NO: 66920 - DNA, 20 bp, synthetic construct
  misc_feature 1..20: note = chemically synthesized
  source 1..20: mol_type = other DNA
gcctagcaagactgaagcat

SEQ ID NO: 66921 - DNA, 20 bp, synthetic construct
  misc_feature 1..20: note = chemically synthesized
  source 1..20: mol_type = other DNA
caagactgaagcatgtagaa

SEQ ID NO: 66922 - DNA, 20 bp, synthetic construct
  misc_feature 1..20: note = chemically synthesized
  source 1..20: mol_type = other DNA
gtaatataaagtttcctatt

SEQ ID NO: 66923 - DNA, 20 bp, synthetic construct
  misc_feature 1..20: note = chemically synthesized
  source 1..20: mol_type = other DNA
gtgctaacattatgctgaac

SEQ ID NO: 66924 - DNA, 20 bp, synthetic construct
  misc_feature 1..20: note = chemically synthesized
  source 1..20: mol_type = other DNA
ctctaaggactgaaataagg

SEQ ID NO: 66925 - DNA, 20 bp, synthetic construct
  misc_feature 1..20: note = chemically synthesized
  source 1..20: mol_type = other DNA
taatattggaagtcttggaa

SEQ ID NO: 66926 - DNA, 20 bp, synthetic construct
  misc_feature 1..20: note = chemically synthesized
  source 1..20: mol_type = other DNA
ttggaaagagaaattcagga

SEQ ID NO: 66927 - DNA, 20 bp, synthetic construct
  misc_feature 1..20: note = chemically synthesized
  source 1..20: mol_type = other DNA
aaagagaaattcaggaagag

SEQ ID NO: 66928 - DNA, 20 bp, synthetic construct
  misc_feature 1..20: note = chemically synthesized
  source 1..20: mol_type = other DNA
tagatgacatgatcttatac

SEQ ID NO: 66929 - DNA, 20 bp, synthetic construct
  misc_feature 1..20: note = chemically synthesized
  source 1..20: mol_type = other DNA
caagaagtaaaagatctcta

SEQ ID NO: 66930 - DNA, 20 bp, synthetic construct
  misc_feature 1..20: note = chemically synthesized
  source 1..20: mol_type = other DNA
aaaattataaaactctggtg

SEQ ID NO: 66931 - DNA, 20 bp, synthetic construct
  misc_feature 1..20: note = chemically synthesized
  source 1..20: mol_type = other DNA
tattccatgctcatgaacta

SEQ ID NO: 66932 - DNA, 20 bp, synthetic construct
  misc_feature 1..20: note = chemically synthesized
  source 1..20: mol_type = other DNA
tcaaaataccaatggcattc

SEQ ID NO: 66933 - DNA, 20 bp, synthetic construct
  misc_feature 1..20: note = chemically synthesized
  source 1..20: mol_type = other DNA
taccaatggcattcacagaa

SEQ ID NO: 66934 - DNA, 20 bp, synthetic construct
  misc_feature 1..20: note = chemically synthesized
  source 1..20: mol_type = other DNA
atactcaggaggctgaggca

SEQ ID NO: 66935 - DNA, 20 bp, synthetic construct
  misc_feature 1..20: note = chemically synthesized
  source 1..20: mol_type = other DNA
aaaggtacaaacagtctttt

SEQ ID NO: 66936 - DNA, 20 bp, synthetic construct
  misc_feature 1..20: note = chemically synthesized
  source 1..20: mol_type = other DNA
ctgaaattatgaaactactg

SEQ ID NO: 66937 - DNA, 20 bp, synthetic construct
  misc_feature 1..20: note = chemically synthesized
  source 1..20: mol_type = other DNA
tgtttgaagctctgcacagc

SEQ ID NO: 66938 - DNA, 20 bp, synthetic construct
  misc_feature 1..20: note = chemically synthesized
  source 1..20: mol_type = other DNA
ataaagtgaagagacaaccc

SEQ ID NO: 66939 - DNA, 20 bp, synthetic construct
  misc_feature 1..20: note = chemically synthesized
  source 1..20: mol_type = other DNA
aagagacaacccaaagaatg

SEQ ID NO: 66940 - DNA, 20 bp, synthetic construct
  misc_feature 1..20: note = chemically synthesized
  source 1..20: mol_type = other DNA
attttacaaggaattgataa

SEQ ID NO: 66941 - DNA, 20 bp, synthetic construct
  misc_feature 1..20: note = chemically synthesized
  source 1..20: mol_type = other DNA
gaattgataaccagaatatg

SEQ ID NO: 66942 - DNA, 20 bp, synthetic construct
  misc_feature 1..20: note = chemically synthesized
  source 1..20: mol_type = other DNA
caagaaactcaagcaactca

SEQ ID NO: 66943 - DNA, 20 bp, synthetic construct
  misc_feature 1..20: note = chemically synthesized
  source 1..20: mol_type = other DNA
ctcctaggtatataccctta

SEQ ID NO: 66944 - DNA, 20 bp, synthetic construct
  misc_feature 1..20: note = chemically synthesized
  source 1..20: mol_type = other DNA
tcgtcaacagataaatggat

SEQ ID NO: 66945 - DNA, 20 bp, synthetic construct
  misc_feature 1..20: note = chemically synthesized
  source 1..20: mol_type = other DNA
gaatattattcaaccataaa

SEQ ID NO: 66946 - DNA, 20 bp, synthetic construct
  misc_feature 1..20: note = chemically synthesized
  source 1..20: mol_type = other DNA
ttaagtgaaataagccaagc

SEQ ID NO: 66947 - DNA, 20 bp, synthetic construct
  misc_feature 1..20: note = chemically synthesized
  source 1..20: mol_type = other DNA
gtgaaataagccaagcacag

SEQ ID NO: 66948 - DNA, 20 bp, synthetic construct
  misc_feature 1..20: note = chemically synthesized
  source 1..20: mol_type = other DNA
tagttaccggcggcgggagg

SEQ ID NO: 66949 - DNA, 20 bp, synthetic construct
  misc_feature 1..20: note = chemically synthesized
  source 1..20: mol_type = other DNA
ggcgggagggaagaaaggaa

SEQ ID NO: 66950 - DNA, 20 bp, synthetic construct
  misc_feature 1..20: note = chemically synthesized
  source 1..20: mol_type = other DNA
ctacttgggaggcttgggca

SEQ ID NO: 66951 - DNA, 20 bp, synthetic construct
  misc_feature 1..20: note = chemically synthesized
  source 1..20: mol_type = other DNA
ctactatggaggctgaggcg

SEQ ID NO: 66952 - DNA, 20 bp, synthetic construct
  misc_feature 1..20: note = chemically synthesized
  source 1..20: mol_type = other DNA
gagagactctgtctcaaaaa

SEQ ID NO: 66953 - DNA, 20 bp, synthetic construct
  misc_feature 1..20: note = chemically synthesized
  source 1..20: mol_type = other DNA
cctgtgtacttggaacagag

SEQ ID NO: 66954 - DNA, 20 bp, synthetic construct
  misc_feature 1..20: note = chemically synthesized
  source 1..20: mol_type = other DNA
accagcacatgtgaatagtt

SEQ ID NO: 66955 - DNA, 20 bp, synthetic construct
  misc_feature 1..20: note = chemically synthesized
  source 1..20: mol_type = other DNA
aaatcagtataagagaagag

SEQ ID NO: 66956 - DNA, 20 bp, synthetic construct
  misc_feature 1..20: note = chemically synthesized
  source 1..20: mol_type = other DNA
taaattgtttcttagtgaca

SEQ ID NO: 66957 - DNA, 20 bp, synthetic construct
  misc_feature 1..20: note = chemically synthesized
  source 1..20: mol_type = other DNA
aagtgtctcttagctacatt

SEQ ID NO: 66958 - DNA, 20 bp, synthetic construct
  misc_feature 1..20: note = chemically synthesized
  source 1..20: mol_type = other DNA
ttagctacattcaagaaagc

SEQ ID NO: 66959 - DNA, 20 bp, synthetic construct
  misc_feature 1..20: note = chemically synthesized
  source 1..20: mol_type = other DNA
aaccagctgtaaaatgtcaa

SEQ ID NO: 66960 - DNA, 20 bp, synthetic construct
  misc_feature 1..20: note = chemically synthesized
  source 1..20: mol_type = other DNA
gtcatatgcataagtcttgc

SEQ ID NO: 66961 - DNA, 20 bp, synthetic construct
  misc_feature 1..20: note = chemically synthesized
  source 1..20: mol_type = other DNA
tataatttttttcatttcat

SEQ ID NO: 66962 - DNA, 20 bp, synthetic construct
  misc_feature 1..20: note = chemically synthesized
  source 1..20: mol_type = other DNA
aatataatgactgttttttg

SEQ ID NO: 66963 - DNA, 20 bp, synthetic construct
  misc_feature 1..20: note = chemically synthesized
  source 1..20: mol_type = other DNA
gaaggaaggaaagtaacaag

SEQ ID NO: 66964 - DNA, 20 bp, synthetic construct
  misc_feature 1..20: note = chemically synthesized
  source 1..20: mol_type = other DNA
gaaagtaacaaggaagaaag

SEQ ID NO: 66965 - DNA, 20 bp, synthetic construct
  misc_feature 1..20: note = chemically synthesized
  source 1..20: mol_type = other DNA
cagctttacatttgtaggac

SEQ ID NO: 66966 - DNA, 20 bp, synthetic construct
  misc_feature 1..20: note = chemically synthesized
  source 1..20: mol_type = other DNA
tccattataatttgtcacta

SEQ ID NO: 66967 - DNA, 20 bp, synthetic construct
  misc_feature 1..20: note = chemically synthesized
  source 1..20: mol_type = other DNA
acttcaataaaataaaatgg

SEQ ID NO: 66968 - DNA, 20 bp, synthetic construct
  misc_feature 1..20: note = chemically synthesized
  source 1..20: mol_type = other DNA
tttttcttttctgaataaaa

SEQ ID NO: 66969 - DNA, 20 bp, synthetic construct
  misc_feature 1..20: note = chemically synthesized
  source 1..20: mol_type = other DNA
ttatttaaataggaattggc

SEQ ID NO: 66970 - DNA, 20 bp, synthetic construct
  misc_feature 1..20: note = chemically synthesized
  source 1..20: mol_type = other DNA
atgtttgcattaaatgggct

SEQ ID NO: 66971 - DNA, 20 bp, synthetic construct
  misc_feature 1..20: note = chemically synthesized
  source 1..20: mol_type = other DNA
tgggctttagaattttgcaa

SEQ ID NO: 66972 - DNA, 20 bp, synthetic construct
  misc_feature 1..20: note = chemically synthesized
  source 1..20: mol_type = other DNA
gaattttgcaaatagaaatg

SEQ ID NO: 66973 - DNA, 20 bp, synthetic construct
  misc_feature 1..20: note = chemically synthesized
  source 1..20: mol_type = other DNA
tgcatttagcctgtgggaaa

SEQ ID NO: 66974 - DNA, 20 bp, synthetic construct
  misc_feature 1..20: note = chemically synthesized
  source 1..20: mol_type = other DNA
ctgtgggaaaagagaaaaag

SEQ ID NO: 66975 - DNA, 20 bp, synthetic construct
  misc_feature 1..20: note = chemically synthesized
  source 1..20: mol_type = other DNA
gaaaggagatttctgcaagt

SEQ ID NO: 66976 - DNA, 20 bp, synthetic construct
  misc_feature 1..20: note = chemically synthesized
  source 1..20: mol_type = other DNA
caataaattcatcccgtgtt

SEQ ID NO: 66977 - DNA, 20 bp, synthetic construct
  misc_feature 1..20: note = chemically synthesized
  source 1..20: mol_type = other DNA
tgctgttacacagagtgcag

SEQ ID NO: 66978 - DNA, 20 bp, synthetic construct
  misc_feature 1..20: note = chemically synthesized
  source 1..20: mol_type = other DNA
atgaagctggaatccttgga

SEQ ID NO: 66979 - DNA, 20 bp, synthetic construct
  misc_feature 1..20: note = chemically synthesized
  source 1..20: mol_type = other DNA
taattgtgattatctttgga

SEQ ID NO: 66980 - DNA, 20 bp, synthetic construct
  misc_feature 1..20: note = chemically synthesized
  source 1..20: mol_type = other DNA
gaagaaaaaatttgccccta

SEQ ID NO: 66981 - DNA, 20 bp, synthetic construct
  misc_feature 1..20: note = chemically synthesized
  source 1..20: mol_type = other DNA
actttattgaagtgtctagg

SEQ ID NO: 66982 - DNA, 20 bp, synthetic construct
  misc_feature 1..20: note = chemically synthesized
  source 1..20: mol_type = other DNA
tgattcaaaatatgtaattt

SEQ ID NO: 66983 - DNA, 20 bp, synthetic construct
  misc_feature 1..20: note = chemically synthesized
  source 1..20: mol_type = other DNA
agcataagagcccaggtttt

SEQ ID NO: 66984 - DNA, 20 bp, synthetic construct
  misc_feature 1..20: note = chemically synthesized
  source 1..20: mol_type = other DNA
gttctacatttgacttcttc

SEQ ID NO: 66985 - DNA, 20 bp, synthetic construct
  misc_feature 1..20: note = chemically synthesized
  source 1..20: mol_type = other DNA
atataattccctttaacttt

SEQ ID NO: 66986 - DNA, 20 bp, synthetic construct
  misc_feature 1..20: note = chemically synthesized
  source 1..20: mol_type = other DNA
ttacattattctgaatataa

SEQ ID NO: 66987 - DNA, 20 bp, synthetic construct
  misc_feature 1..20: note = chemically synthesized
  source 1..20: mol_type = other DNA
tgcttgtctaaaatgttctt

SEQ ID NO: 66988 - DNA, 20 bp, synthetic construct
  misc_feature 1..20: note = chemically synthesized
  source 1..20: mol_type = other DNA
ttttttgtccacaggtctgg

SEQ ID NO: 66989 - DNA, 20 bp, synthetic construct
  misc_feature 1..20: note = chemically synthesized
  source 1..20: mol_type = other DNA
agactcaatataatgagttt

SEQ ID NO: 66990 - DNA, 20 bp, synthetic construct
  misc_feature 1..20: note = chemically synthesized
  source 1..20: mol_type = other DNA
tataatgagtttggagaaaa

SEQ ID NO: 66991 - DNA, 20 bp, synthetic construct
  misc_feature 1..20: note = chemically synthesized
  source 1..20: mol_type = other DNA
agaggaacagtaacactgac

SEQ ID NO: 66992 - DNA, 20 bp, synthetic construct
  misc_feature 1..20: note = chemically synthesized
  source 1..20: mol_type = other DNA
cactagtagggatcccaggc

SEQ ID NO: 66993 - DNA, 20 bp, synthetic construct
  misc_feature 1..20: note = chemically synthesized
  source 1..20: mol_type = other DNA
ccctggttgagttattcttc

SEQ ID NO: 66994 - DNA, 20 bp, synthetic construct
  misc_feature 1..20: note = chemically synthesized
  source 1..20: mol_type = other DNA
atgttaactgtgttcttgtc

SEQ ID NO: 66995 - DNA, 20 bp, synthetic construct
  misc_feature 1..20: note = chemically synthesized
  source 1..20: mol_type = other DNA
aatattaaaaatactatact

SEQ ID NO: 66996 - DNA, 20 bp, synthetic construct
  misc_feature 1..20: note = chemically synthesized
  source 1..20: mol_type = other DNA
gggcaggcaagggaaagaag

SEQ ID NO: 66997 - DNA, 20 bp, synthetic construct
  misc_feature 1..20: note = chemically synthesized
  source 1..20: mol_type = other DNA
acataggatgtggagttcag

SEQ ID NO: 66998 - DNA, 20 bp, synthetic construct
  misc_feature 1..20: note = chemically synthesized
  source 1..20: mol_type = other DNA
attgtctaaaattagtggca

SEQ ID NO: 66999 - DNA, 20 bp, synthetic construct
  misc_feature 1..20: note = chemically synthesized
  source 1..20: mol_type = other DNA
ttgcactcataccatattga

SEQ ID NO: 67000 - DNA, 20 bp, synthetic construct
  misc_feature 1..20: note = chemically synthesized
  source 1..20: mol_type = other DNA
cagaggtaactacctaacca

SEQ ID NO: 67001 - DNA, 20 bp, synthetic construct
  misc_feature 1..20: note = chemically synthesized
  source 1..20: mol_type = other DNA
attttgaggttagcaaaaaa

SEQ ID NO: 67002 - DNA, 20 bp, synthetic construct
  misc_feature 1..20: note = chemically synthesized
  source 1..20: mol_type = other DNA
tgatatgagccatgatgatc

SEQ ID NO: 67003 - DNA, 20 bp, synthetic construct
  misc_feature 1..20: note = chemically synthesized
  source 1..20: mol_type = other DNA
gcctccttctggggcaaacg

SEQ ID NO: 67004 - DNA, 20 bp, synthetic construct
  misc_feature 1..20: note = chemically synthesized
  source 1..20: mol_type = other DNA
actgatgattgaattttctg

SEQ ID NO: 67005 - DNA, 20 bp, synthetic construct
  misc_feature 1..20: note = chemically synthesized
  source 1..20: mol_type = other DNA
tttgtgtgctcatcccccag

SEQ ID NO: 67006 - DNA, 20 bp, synthetic construct
  misc_feature 1..20: note = chemically synthesized
  source 1..20: mol_type = other DNA
gggatttcctagttgatagc

SEQ ID NO: 67007 - DNA, 20 bp, synthetic construct
  misc_feature 1..20: note = chemically synthesized
  source 1..20: mol_type = other DNA
ccttccttctttttctttca

SEQ ID NO: 67008 - DNA, 20 bp, synthetic construct
  misc_feature 1..20: note = chemically synthesized
  source 1..20: mol_type = other DNA
atttcctctgtgaaggagca

SEQ ID NO: 67009 - DNA, 20 bp, synthetic construct
  misc_feature 1..20: note = chemically synthesized
  source 1..20: mol_type = other DNA
tatcttgggtcatttcattc

SEQ ID NO: 67010 - DNA, 20 bp, synthetic construct
  misc_feature 1..20: note = chemically synthesized
  source 1..20: mol_type = other DNA
tcttatattaataagaaaaa

SEQ ID NO: 67011 - DNA, 20 bp, synthetic construct
  misc_feature 1..20: note = chemically synthesized
  source 1..20: mol_type = other DNA
atacggttttgtatggattg

SEQ ID NO: 67012 - DNA, 20 bp, synthetic construct
  misc_feature 1..20: note = chemically synthesized
  source 1..20: mol_type = other DNA
aaatggaataagagaaggag

SEQ ID NO: 67013 - DNA, 20 bp, synthetic construct
  misc_feature 1..20: note = chemically synthesized
  source 1..20: mol_type = other DNA
tatcagctgtgatggcttgg

SEQ ID NO: 67014 - DNA, 20 bp, synthetic construct
  misc_feature 1..20: note = chemically synthesized
  source 1..20: mol_type = other DNA
tactgaatactaagagcctg

SEQ ID NO: 67015 - DNA, 20 bp, synthetic construct
  misc_feature 1..20: note = chemically synthesized
  source 1..20: mol_type = other DNA
tgcagacctgagggctaggc

SEQ ID NO: 67016 - DNA, 20 bp, synthetic construct
  misc_feature 1..20: note = chemically synthesized
  source 1..20: mol_type = other DNA
ggcaccatggggtggatagg

SEQ ID NO: 67017 - DNA, 20 bp, synthetic construct
  misc_feature 1..20: note = chemically synthesized
  source 1..20: mol_type = other DNA
aaggaggctttgaactgggg

SEQ ID NO: 67018 - DNA, 20 bp, synthetic construct
  misc_feature 1..20: note = chemically synthesized
  source 1..20: mol_type = other DNA
cggagttttgggtccacgga

SEQ ID NO: 67019 - DNA, 20 bp, synthetic construct
  misc_feature 1..20: note = chemically synthesized
  source 1..20: mol_type = other DNA
aaaggaatataaacaagggc

SEQ ID NO: 67020 - DNA, 20 bp, synthetic construct
  misc_feature 1..20: note = chemically synthesized
  source 1..20: mol_type = other DNA
ttagaatgaataatatgtaa

SEQ ID NO: 67021 - DNA, 20 bp, synthetic construct
  misc_feature 1..20: note = chemically synthesized
  source 1..20: mol_type = other DNA
ttttataaagatcctcttga

SEQ ID NO: 67022 - DNA, 20 bp, synthetic construct
  misc_feature 1..20: note = chemically synthesized
  source 1..20: mol_type = other DNA
gtccataaattaatttcgag

SEQ ID NO: 67023 - DNA, 20 bp, synthetic construct
  misc_feature 1..20: note = chemically synthesized
  source 1..20: mol_type = other DNA
gaaattcaaaattatctgaa

SEQ ID NO: 67024 - DNA, 20 bp, synthetic construct
  misc_feature 1..20: note = chemically synthesized
  source 1..20: mol_type = other DNA
gttttttagttattttcttc

SEQ ID NO: 67025 - DNA, 20 bp, synthetic construct
  misc_feature 1..20: note = chemically synthesized
  source 1..20: mol_type = other DNA
gtaccgttttgacaaattga

SEQ ID NO: 67026 - DNA, 20 bp, synthetic construct
  misc_feature 1..20: note = chemically synthesized
  source 1..20: mol_type = other DNA
cctattctcagggaaatata

SEQ ID NO: 67027 - DNA, 20 bp, synthetic construct
  misc_feature 1..20: note = chemically synthesized
  source 1..20: mol_type = other DNA
taagagtgaaagagtgcata

SEQ ID NO: 67028 - DNA, 20 bp, synthetic construct
  misc_feature 1..20: note = chemically synthesized
  source 1..20: mol_type = other DNA
catctggagcaggcaaccac

SEQ ID NO: 67029 - DNA, 20 bp, synthetic construct
  misc_feature 1..20: note = chemically synthesized
  source 1..20: mol_type = other DNA
gtgaatgttatggaacgttt

SEQ ID NO: 67030 - DNA, 20 bp, synthetic construct
  misc_feature 1..20: note = chemically synthesized
  source 1..20: mol_type = other DNA
ttgggtcatctatggcagtg

SEQ ID NO: 67031 - DNA, 20 bp, synthetic construct
  misc_feature 1..20: note = chemically synthesized
  source 1..20: mol_type = other DNA
agaacatgccaatgtcaatg

SEQ ID NO: 67032 - DNA, 20 bp, synthetic construct
  misc_feature 1..20: note = chemically synthesized
  source 1..20: mol_type = other DNA
ttttcatacacaatcattta

SEQ ID NO: 67033 - DNA, 20 bp, synthetic construct
  misc_feature 1..20: note = chemically synthesized
  source 1..20: mol_type = other DNA
atgaaaaagtcctacaactc

SEQ ID NO: 67034 - DNA, 20 bp, synthetic construct
  misc_feature 1..20: note = chemically synthesized
  source 1..20: mol_type = other DNA
ttggcacataaaatgcaaac

SEQ ID NO: 67035 - DNA, 20 bp, synthetic construct
  misc_feature 1..20: note = chemically synthesized
  source 1..20: mol_type = other DNA
tgtctatactttaagagaaa

SEQ ID NO: 67036 - DNA, 20 bp, synthetic construct
  misc_feature 1..20: note = chemically synthesized
  source 1..20: mol_type = other DNA
aaatattttgacagttcttc

SEQ ID NO: 67037 - DNA, 20 bp, synthetic construct
  misc_feature 1..20: note = chemically synthesized
  source 1..20: mol_type = other DNA
caactttaagtgaaatgatg

SEQ ID NO: 67038 - DNA, 20 bp, synthetic construct
  misc_feature 1..20: note = chemically synthesized
  source 1..20: mol_type = other DNA
tgggtaaaataagccagaca

SEQ ID NO: 67039 - DNA, 20 bp, synthetic construct
  misc_feature 1..20: note = chemically synthesized
  source 1..20: mol_type = other DNA
aataaaaatggaaagaaatt

SEQ ID NO: 67040 - DNA, 20 bp, synthetic construct
  misc_feature 1..20: note = chemically synthesized
  source 1..20: mol_type = other DNA
tattggttcttgcagttgca

SEQ ID NO: 67041 - DNA, 20 bp, synthetic construct
  misc_feature 1..20: note = chemically synthesized
  source 1..20: mol_type = other DNA
attaactaagacctcagtta

SEQ ID NO: 67042 - DNA, 20 bp, synthetic construct
  misc_feature 1..20: note = chemically synthesized
  source 1..20: mol_type = other DNA
cagttttagctaagtgcttc

SEQ ID NO: 67043 - DNA, 20 bp, synthetic construct
  misc_feature 1..20: note = chemically synthesized
  source 1..20: mol_type = other DNA
ttaaggagacagtagaacat

SEQ ID NO: 67044 - DNA, 20 bp, synthetic construct
  misc_feature 1..20: note = chemically synthesized
  source 1..20: mol_type = other DNA
aaatttcacattagaatgtc

SEQ ID NO: 67045 - DNA, 20 bp, synthetic construct
  misc_feature 1..20: note = chemically synthesized
  source 1..20: mol_type = other DNA
acattgtgtagagtagaaaa

SEQ ID NO: 67046 - DNA, 20 bp, synthetic construct
  misc_feature 1..20: note = chemically synthesized
  source 1..20: mol_type = other DNA
aaaaagcccagtgactgact

SEQ ID NO: 67047 - DNA, 20 bp, synthetic construct
  misc_feature 1..20: note = chemically synthesized
  source 1..20: mol_type = other DNA
cattaaagtatttttttttt

SEQ ID NO: 67048 - DNA, 20 bp, synthetic construct
  misc_feature 1..20: note = chemically synthesized
  source 1..20: mol_type = other DNA
attgtatttattctattccc

SEQ ID NO: 67049 - DNA, 20 bp, synthetic construct
  misc_feature 1..20: note = chemically synthesized
  source 1..20: mol_type = other DNA
attatttctacagatgtaaa

SEQ ID NO: 67050 - DNA, 20 bp, synthetic construct
  misc_feature 1..20: note = chemically synthesized
  source 1..20: mol_type = other DNA
tccaatgctgcctatcaagg

SEQ ID NO: 67051 - DNA, 20 bp, synthetic construct
  misc_feature 1..20: note = chemically synthesized
  source 1..20: mol_type = other DNA
tatcaaggtaaaactagata

SEQ ID NO: 67052 - DNA, 20 bp, synthetic construct
  misc_feature 1..20: note = chemically synthesized
  source 1..20: mol_type = other DNA
tatttctcaaaaatatagga

SEQ ID NO: 67053 - DNA, 20 bp, synthetic construct
  misc_feature 1..20: note = chemically synthesized
  source 1..20: mol_type = other DNA
gagttccagaccagcttgac

SEQ ID NO: 67054 - DNA, 20 bp, synthetic construct
  misc_feature 1..20: note = chemically synthesized
  source 1..20: mol_type = other DNA
caaccagtaccagccactgc

SEQ ID NO: 67055 - DNA, 20 bp, synthetic construct
  misc_feature 1..20: note = chemically synthesized
  source 1..20: mol_type = other DNA
gaagatctaccaagcaaatg

SEQ ID NO: 67056 - DNA, 20 bp, synthetic construct
  misc_feature 1..20: note = chemically synthesized
  source 1..20: mol_type = other DNA
tttgcaatcttagtctctga

SEQ ID NO: 67057 - DNA, 20 bp, synthetic construct
  misc_feature 1..20: note = chemically synthesized
  source 1..20: mol_type = other DNA
tcaggattaagaaactcact

SEQ ID NO: 67058 - DNA, 20 bp, synthetic construct
  misc_feature 1..20: note = chemically synthesized
  source 1..20: mol_type = other DNA
caacgagaataaagatacaa

SEQ ID NO: 67059 - DNA, 20 bp, synthetic construct
  misc_feature 1..20: note = chemically synthesized
  source 1..20: mol_type = other DNA
gtgaaggagattgagacaca

SEQ ID NO: 67060 - DNA, 20 bp, synthetic construct
  misc_feature 1..20: note = chemically synthesized
  source 1..20: mol_type = other DNA
aatttaatgttttcacatta

SEQ ID NO: 67061 - DNA, 20 bp, synthetic construct
  misc_feature 1..20: note = chemically synthesized
  source 1..20: mol_type = other DNA
gaatgaagataagggggaaa

SEQ ID NO: 67062 - DNA, 20 bp, synthetic construct
  misc_feature 1..20: note = chemically synthesized
  source 1..20: mol_type = other DNA
gtttgtttttttgtttttcc

SEQ ID NO: 67063 - DNA, 20 bp, synthetic construct
  misc_feature 1..20: note = chemically synthesized
  source 1..20: mol_type = other DNA
tatttaaacatattctaaga

SEQ ID NO: 67064 - DNA, 20 bp, synthetic construct
  misc_feature 1..20: note = chemically synthesized
  source 1..20: mol_type = other DNA
accatgatattcatggaatt

SEQ ID NO: 67065 - DNA, 20 bp, synthetic construct
  misc_feature 1..20: note = chemically synthesized
  source 1..20: mol_type = other DNA
gcttttttcacctatagtag

SEQ ID NO: 67066 - DNA, 20 bp, synthetic construct
  misc_feature 1..20: note = chemically synthesized
  source 1..20: mol_type = other DNA
aacttagtaaaaaaaaatag

SEQ ID NO: 67067 - DNA, 20 bp, synthetic construct
  misc_feature 1..20: note = chemically synthesized
  source 1..20: mol_type = other DNA
gtttttaaatctggggactc

SEQ ID NO: 67068 - DNA, 20 bp, synthetic construct
  misc_feature 1..20: note = chemically synthesized
  source 1..20: mol_type = other DNA
caagtaccatgttactactt

SEQ ID NO: 67069 - DNA, 20 bp, synthetic construct
  misc_feature 1..20: note = chemically synthesized
  source 1..20: mol_type = other DNA
gctatccaacacaactttct

SEQ ID NO: 67070 - DNA, 20 bp, synthetic construct
  misc_feature 1..20: note = chemically synthesized
  source 1..20: mol_type = other DNA
atctgctcggccatgtggta

SEQ ID NO: 67071 - DNA, 20 bp, synthetic construct
  misc_feature 1..20: note = chemically synthesized
  source 1..20: mol_type = other DNA
tgcaagggaaatgcccttta

SEQ ID NO: 67072 - DNA, 20 bp, synthetic construct
  misc_feature 1..20: note = chemically synthesized
  source 1..20: mol_type = other DNA
tatcatgagaacagcatgtg

SEQ ID NO: 67073 - DNA, 20 bp, synthetic construct
  misc_feature 1..20: note = chemically synthesized
  source 1..20: mol_type = other DNA
tcaagaagaaatttgggtgg

SEQ ID NO: 67074 - DNA, 20 bp, synthetic construct
  misc_feature 1..20: note = chemically synthesized
  source 1..20: mol_type = other DNA
gtatttttttacagcagtgt

SEQ ID NO: 67075 - DNA, 20 bp, synthetic construct
  misc_feature 1..20: note = chemically synthesized
  source 1..20: mol_type = other DNA
agtaaactatcgcaaggacg

SEQ ID NO: 67076 - DNA, 20 bp, synthetic construct
  misc_feature 1..20: note = chemically synthesized
  source 1..20: mol_type = other DNA
cacattgtgcacatgtaccc

SEQ ID NO: 67077 - DNA, 20 bp, synthetic construct
  misc_feature 1..20: note = chemically synthesized
  source 1..20: mol_type = other DNA
caaaagcagtccctggtacc

SEQ ID NO: 67078 - DNA, 20 bp, synthetic construct
  misc_feature 1..20: note = chemically synthesized
  source 1..20: mol_type = other DNA
attagcagatcatttttact

SEQ ID NO: 67079 - DNA, 20 bp, synthetic construct
  misc_feature 1..20: note = chemically synthesized
  source 1..20: mol_type = other DNA
ctgttgttgcctaattcatg

SEQ ID NO: 67080 - DNA, 20 bp, synthetic construct
  misc_feature 1..20: note = chemically synthesized
  source 1..20: mol_type = other DNA
ctggctactatgtagctttt

SEQ ID NO: 67081 - DNA, 20 bp, synthetic construct
  misc_feature 1..20: note = chemically synthesized
  source 1..20: mol_type = other DNA
cttccagatagaggcctttg

SEQ ID NO: 67082 - DNA, 20 bp, synthetic construct
  misc_feature 1..20: note = chemically synthesized
  source 1..20: mol_type = other DNA
ttccctatgagtggctggtg

SEQ ID NO: 67083 - DNA, 20 bp, synthetic construct
  misc_feature 1..20: note = chemically synthesized
  source 1..20: mol_type = other DNA
gctaacttctcttttcatta

SEQ ID NO: 67084 - DNA, 20 bp, synthetic construct
  misc_feature 1..20: note = chemically synthesized
  source 1..20: mol_type = other DNA
ctaatagaatataggaagat

SEQ ID NO: 67085 - DNA, 20 bp, synthetic construct
  misc_feature 1..20: note = chemically synthesized
  source 1..20: mol_type = other DNA
agttttctactttgaaactt

SEQ ID NO: 67086 - DNA, 20 bp, synthetic construct
  misc_feature 1..20: note = chemically synthesized
  source 1..20: mol_type = other DNA
cacgggggaaaggtgcttgc

SEQ ID NO: 67087 - DNA, 20 bp, synthetic construct
  misc_feature 1..20: note = chemically synthesized
  source 1..20: mol_type = other DNA
gatggggggtgtaataaaga

SEQ ID NO: 67088 - DNA, 20 bp, synthetic construct
  misc_feature 1..20: note = chemically synthesized
  source 1..20: mol_type = other DNA
gggccagcatggacaggaag

SEQ ID NO: 67089 - DNA, 20 bp, synthetic construct
  misc_feature 1..20: note = chemically synthesized
  source 1..20: mol_type = other DNA
tctaagtaaatgaaataccc

SEQ ID NO: 67090 - DNA, 20 bp, synthetic construct
  misc_feature 1..20: note = chemically synthesized
  source 1..20: mol_type = other DNA
ctaaaacttactgacttaaa

SEQ ID NO: 67091 - DNA, 20 bp, synthetic construct
  misc_feature 1..20: note = chemically synthesized
  source 1..20: mol_type = other DNA
tatccttagaagccataagc

SEQ ID NO: 67092 - DNA, 20 bp, synthetic construct
  misc_feature 1..20: note = chemically synthesized
  source 1..20: mol_type = other DNA
caatttcttcctaccctttt

SEQ ID NO: 67093 - DNA, 20 bp, synthetic construct
  misc_feature 1..20: note = chemically synthesized
  source 1..20: mol_type = other DNA
tatcatgtttcaattttaaa

SEQ ID NO: 67094 - DNA, 20 bp, synthetic construct
  misc_feature 1..20: note = chemically synthesized
  source 1..20: mol_type = other DNA
atcacacaaacctttgttga

SEQ ID NO: 67095 - DNA, 20 bp, synthetic construct
  misc_feature 1..20: note = chemically synthesized
  source 1..20: mol_type = other DNA
ttaggtatctttatcttcct

SEQ ID NO: 67096 - DNA, 20 bp, synthetic construct
  misc_feature 1..20: note = chemically synthesized
  source 1..20: mol_type = other DNA
taccaagtttgaatggttta

SEQ ID NO: 67097 - DNA, 20 bp, synthetic construct
  misc_feature 1..20: note = chemically synthesized
  source 1..20: mol_type = other DNA
tggtgaaaccctgtctctac

SEQ ID NO: 67098 - DNA, 20 bp, synthetic construct
  misc_feature 1..20: note = chemically synthesized
  source 1..20: mol_type = other DNA
aaataaatgaagatttaaag

SEQ ID NO: 67099 - DNA, 20 bp, synthetic construct
  misc_feature 1..20: note = chemically synthesized
  source 1..20: mol_type = other DNA
agatgctccacctgtattta

SEQ ID NO: 67100 - DNA, 20 bp, synthetic construct
  misc_feature 1..20: note = chemically synthesized
  source 1..20: mol_type = other DNA
cttttctgatgccctctgat

SEQ ID NO: 67101 - DNA, 20 bp, synthetic construct
  misc_feature 1..20: note = chemically synthesized
  source 1..20: mol_type = other DNA
tctttataattctatagaac

SEQ ID NO: 67102 - DNA, 20 bp, synthetic construct
  misc_feature 1..20: note = chemically synthesized
  source 1..20: mol_type = other DNA
gtaaacactgaatgaaagaa

SEQ ID NO: 67103 - DNA, 20 bp, synthetic construct
  misc_feature 1..20: note = chemically synthesized
  source 1..20: mol_type = other DNA
tacaaataaatttatatttt

SEQ ID NO: 67104 - DNA, 20 bp, synthetic construct
  misc_feature 1..20: note = chemically synthesized
  source 1..20: mol_type = other DNA
tatgcagtgtgagagatcac

SEQ ID NO: 67105 - DNA, 20 bp, synthetic construct
  misc_feature 1..20: note = chemically synthesized
  source 1..20: mol_type = other DNA
aatttatgaggataaataat

SEQ ID NO: 67106 - DNA, 20 bp, synthetic construct
  misc_feature 1..20: note = chemically synthesized
  source 1..20: mol_type = other DNA
atagagaagtaacttatcct

SEQ ID NO: 67107 - DNA, 20 bp, synthetic construct
  misc_feature 1..20: note = chemically synthesized
  source 1..20: mol_type = other DNA
gaatacctgagaggaaaaaa

SEQ ID NO: 67108 - DNA, 20 bp, synthetic construct
  misc_feature 1..20: note = chemically synthesized
  source 1..20: mol_type = other DNA
ttggtatgatgataatatat

SEQ ID NO: 67109 - DNA, 20 bp, synthetic construct
  misc_feature 1..20: note = chemically synthesized
  source 1..20: mol_type = other DNA
tgctcctggctacatcccag

SEQ ID NO: 67110 - DNA, 20 bp, synthetic construct
  misc_feature 1..20: note = chemically synthesized
  source 1..20: mol_type = other DNA
aattactttcataatgcgca

SEQ ID NO: 67111 - DNA, 20 bp, synthetic construct
  misc_feature 1..20: note = chemically synthesized
  source 1..20: mol_type = other DNA
aacaacattttgttagactt

SEQ ID NO: 67112 - DNA, 20 bp, synthetic construct
  misc_feature 1..20: note = chemically synthesized
  source 1..20: mol_type = other DNA
tatggtgttttctagataca

SEQ ID NO: 67113 - DNA, 20 bp, synthetic construct
  misc_feature 1..20: note = chemically synthesized
  source 1..20: mol_type = other DNA
ggttcagccttgggaggacc

SEQ ID NO: 67114 - DNA, 20 bp, synthetic construct
  misc_feature 1..20: note = chemically synthesized
  source 1..20: mol_type = other DNA
ttcaagactaatgaatagct

SEQ ID NO: 67115 - DNA, 20 bp, synthetic construct
  misc_feature 1..20: note = chemically synthesized
  source 1..20: mol_type = other DNA
atgaattttgggtaaataat

SEQ ID NO: 67116 - DNA, 20 bp, synthetic construct
  misc_feature 1..20: note = chemically synthesized
  source 1..20: mol_type = other DNA
caaagctaactgaaggatat

SEQ ID NO: 67117 - DNA, 20 bp, synthetic construct
  misc_feature 1..20: note = chemically synthesized
  source 1..20: mol_type = other DNA
cagaaatacaaataatcatc

SEQ ID NO: 67118 - DNA, 20 bp, synthetic construct
  misc_feature 1..20: note = chemically synthesized
  source 1..20: mol_type = other DNA
ggagaatatcatcaccgtaa

SEQ ID NO: 67119 - DNA, 20 bp, synthetic construct
  misc_feature 1..20: note = chemically synthesized
  source 1..20: mol_type = other DNA
tgagattgttctggttcatg

SEQ ID NO: 67120 - DNA, 20 bp, synthetic construct
  misc_feature 1..20: note = chemically synthesized
  source 1..20: mol_type = other DNA
aaggaatgttaactgactga

SEQ ID NO: 67121 - DNA, 20 bp, synthetic construct
  misc_feature 1..20: note = chemically synthesized
  source 1..20: mol_type = other DNA
aattttgttgatcttttcaa

SEQ ID NO: 67122 - DNA, 20 bp, synthetic construct
  misc_feature 1..20: note = chemically synthesized
  source 1..20: mol_type = other DNA
tagaaatgaagaaaagcatg

SEQ ID NO: 67123 - DNA, 20 bp, synthetic construct
  misc_feature 1..20: note = chemically synthesized
  source 1..20: mol_type = other DNA
acactagaaaatctagggag

SEQ ID NO: 67124 - DNA, 20 bp, synthetic construct
  misc_feature 1..20: note = chemically synthesized
  source 1..20: mol_type = other DNA
tccagcctggacaacaagag

SEQ ID NO: 67125 - DNA, 20 bp, synthetic construct
  misc_feature 1..20: note = chemically synthesized
  source 1..20: mol_type = other DNA
tgcttctcatatcaaattca

SEQ ID NO: 67126 - DNA, 20 bp, synthetic construct
  misc_feature 1..20: note = chemically synthesized
  source 1..20: mol_type = other DNA
gaggagaaaccatctcgccg

SEQ ID NO: 67127 - DNA, 20 bp, synthetic construct
  misc_feature 1..20: note = chemically synthesized
  source 1..20: mol_type = other DNA
aagacattcatgaggacagc

SEQ ID NO: 67128 - DNA, 20 bp, synthetic construct
  misc_feature 1..20: note = chemically synthesized
  source 1..20: mol_type = other DNA
taatgtaaaatacagcatag

SEQ ID NO: 67129 - DNA, 20 bp, synthetic construct
  misc_feature 1..20: note = chemically synthesized
  source 1..20: mol_type = other DNA
gtcaatatgtgtacacatat

SEQ ID NO: 67130 - DNA, 20 bp, synthetic construct
  misc_feature 1..20: note = chemically synthesized
  source 1..20: mol_type = other DNA
aaagcaagaattaaacaaaa

SEQ ID NO: 67131 - DNA, 20 bp, synthetic construct
  misc_feature 1..20: note = chemically synthesized
  source 1..20: mol_type = other DNA
gaacagcaaataaaagaaac

SEQ ID NO: 67132 - DNA, 20 bp, synthetic construct
  misc_feature 1..20: note = chemically synthesized
  source 1..20: mol_type = other DNA
ccatagaaaagaaggggaaa

SEQ ID NO: 67133 - DNA, 20 bp, synthetic construct
  misc_feature 1..20: note = chemically synthesized
  source 1..20: mol_type = other DNA
catcagtacaaattgctact

SEQ ID NO: 67134 - DNA, 20 bp, synthetic construct
  misc_feature 1..20: note = chemically synthesized
  source 1..20: mol_type = other DNA
acttacaggacagaatggat

SEQ ID NO: 67135 - DNA, 20 bp, synthetic construct
  misc_feature 1..20: note = chemically synthesized
  source 1..20: mol_type = other DNA
tatcttctccttatttggat

SEQ ID NO: 67136 - DNA, 20 bp, synthetic construct
  misc_feature 1..20: note = chemically synthesized
  source 1..20: mol_type = other DNA
gttttgggaaacaagagata

SEQ ID NO: 67137 - DNA, 20 bp, synthetic construct
  misc_feature 1..20: note = chemically synthesized
  source 1..20: mol_type = other DNA
aattaactcctcaggtgagg

SEQ ID NO: 67138 - DNA, 20 bp, synthetic construct
  misc_feature 1..20: note = chemically synthesized
  source 1..20: mol_type = other DNA
ctgctattaaaagatgtaat

SEQ ID NO: 67139 - DNA, 20 bp, synthetic construct
  misc_feature 1..20: note = chemically synthesized
  source 1..20: mol_type = other DNA
taaaataaaataaaataaaa

SEQ ID NO: 67140 - DNA, 20 bp, synthetic construct
  misc_feature 1..20: note = chemically synthesized
  source 1..20: mol_type = other DNA
tttatattcattcctctgta

SEQ ID NO: 67141 - DNA, 20 bp, synthetic construct
  misc_feature 1..20: note = chemically synthesized
  source 1..20: mol_type = other DNA
ctttaaaatattttaaatgt

SEQ ID NO: 67142 - DNA, 20 bp, synthetic construct
  misc_feature 1..20: note = chemically synthesized
  source 1..20: mol_type = other DNA
atcagcattcaaagttcctg

SEQ ID NO: 67143 - DNA, 20 bp, synthetic construct
  misc_feature 1..20: note = chemically synthesized
  source 1..20: mol_type = other DNA
atgaaataaaaatgctccaa

SEQ ID NO: 67144 - DNA, 20 bp, synthetic construct
  misc_feature 1..20: note = chemically synthesized
  source 1..20: mol_type = other DNA
caacgccatagtgagaaaag

SEQ ID NO: 67145 - DNA, 20 bp, synthetic construct
  misc_feature 1..20: note = chemically synthesized
  source 1..20: mol_type = other DNA
actatgtataatgacttaag

SEQ ID NO: 67146 - DNA, 20 bp, synthetic construct
  misc_feature 1..20: note = chemically synthesized
  source 1..20: mol_type = other DNA
tcaattcaaaatgttgtgat

SEQ ID NO: 67147 - DNA, 20 bp, synthetic construct
  misc_feature 1..20: note = chemically synthesized
  source 1..20: mol_type = other DNA
ttttctgcccaaatcttaga

SEQ ID NO: 67148 - DNA, 20 bp, synthetic construct
  misc_feature 1..20: note = chemically synthesized
  source 1..20: mol_type = other DNA
gtaaaatgatttatagcctc

SEQ ID NO: 67149 - DNA, 20 bp, synthetic construct
  misc_feature 1..20: note = chemically synthesized
  source 1..20: mol_type = other DNA
caccagtaatctgagggtag

SEQ ID NO: 67150 - DNA, 20 bp, synthetic construct
  misc_feature 1..20: note = chemically synthesized
  source 1..20: mol_type = other DNA
tttctgtcactttatactaa

SEQ ID NO: 67151 - DNA, 20 bp, synthetic construct
  misc_feature 1..20: note = chemically synthesized
  source 1..20: mol_type = other DNA
ttggtaaattcttcctataa

SEQ ID NO: 67152 - DNA, 20 bp, synthetic construct
  misc_feature 1..20: note = chemically synthesized
  source 1..20: mol_type = other DNA
acaatagtataacccctttg

SEQ ID NO: 67153 - DNA, 20 bp, synthetic construct
  misc_feature 1..20: note = chemically synthesized
  source 1..20: mol_type = other DNA
cttatgacagcaataatcat

SEQ ID NO: 67154 - DNA, 20 bp, synthetic construct
  misc_feature 1..20: note = chemically synthesized
  source 1..20: mol_type = other DNA
gctatctaatgactaaaatg

SEQ ID NO: 67155 - DNA, 20 bp, synthetic construct
  misc_feature 1..20: note = chemically synthesized
  source 1..20: mol_type = other DNA
agattaagtacattagtagg

SEQ ID NO: 67156 - DNA, 20 bp, synthetic construct
  misc_feature 1..20: note = chemically synthesized
  source 1..20: mol_type = other DNA
tttccactaaaggtgaatgt

SEQ ID NO: 67157 - DNA, 20 bp, synthetic construct
  misc_feature 1..20: note = chemically synthesized
  source 1..20: mol_type = other DNA
agaaagggtattatatcttc

SEQ ID NO: 67158 - DNA, 20 bp, synthetic construct
  misc_feature 1..20: note = chemically synthesized
  source 1..20: mol_type = other DNA
aaacttcagtgatttttgct

SEQ ID NO: 67159 - DNA, 20 bp, synthetic construct
  misc_feature 1..20: note = chemically synthesized
  source 1..20: mol_type = other DNA
agaataaaatcactaccact

SEQ ID NO: 67160 - DNA, 20 bp, synthetic construct
  misc_feature 1..20: note = chemically synthesized
  source 1..20: mol_type = other DNA
atcactaccactaaaaacaa

SEQ ID NO: 67161 - DNA, 20 bp, synthetic construct
  misc_feature 1..20: note = chemically synthesized
  source 1..20: mol_type = other DNA
gtagcagatgaagtacagat

SEQ ID NO: 67162 - DNA, 20 bp, synthetic construct
  misc_feature 1..20: note = chemically synthesized
  source 1..20: mol_type = other DNA
ccattgacctccctttctgt

SEQ ID NO: 67163 - DNA, 20 bp, synthetic construct
  misc_feature 1..20: note = chemically synthesized
  source 1..20: mol_type = other DNA
tcctcgctgaagtgggttgc

SEQ ID NO: 67164 - DNA, 20 bp, synthetic construct
  misc_feature 1..20: note = chemically synthesized
  source 1..20: mol_type = other DNA
caacttctgttccctcatcc

SEQ ID NO: 67165 - DNA, 20 bp, synthetic construct
  misc_feature 1..20: note = chemically synthesized
  source 1..20: mol_type = other DNA
acagtcagagcccagatatc

SEQ ID NO: 67166 - DNA, 20 bp, synthetic construct
  misc_feature 1..20: note = chemically synthesized
  source 1..20: mol_type = other DNA
acaaactagggaagtaaggg

SEQ ID NO: 67167 - DNA, 20 bp, synthetic construct
  misc_feature 1..20: note = chemically synthesized
  source 1..20: mol_type = other DNA
tagtgacaaacagtttgagg

SEQ ID NO: 67168 - DNA, 20 bp, synthetic construct
  misc_feature 1..20: note = chemically synthesized
  source 1..20: mol_type = other DNA
gtcatgtcctttaatggccc

SEQ ID NO: 67169 - DNA, 20 bp, synthetic construct
  misc_feature 1..20: note = chemically synthesized
  source 1..20: mol_type = other DNA
tatccttaggtacatacatc

SEQ ID NO: 67170 - DNA, 20 bp, synthetic construct
  misc_feature 1..20: note = chemically synthesized
  source 1..20: mol_type = other DNA
atggattagagacttaaatg

SEQ ID NO: 67171 - DNA, 20 bp, synthetic construct
  misc_feature 1..20: note = chemically synthesized
  source 1..20: mol_type = other DNA
aaacaactttacaagaaaaa

SEQ ID NO: 67172 - DNA, 20 bp, synthetic construct
  misc_feature 1..20: note = chemically synthesized
  source 1..20: mol_type = other DNA
acaagaaaaaaaaaacccat

SEQ ID NO: 67173 - DNA, 20 bp, synthetic construct
  misc_feature 1..20: note = chemically synthesized
  source 1..20: mol_type = other DNA
ccatggcacacttttaccta

SEQ ID NO: 67174 - DNA, 20 bp, synthetic construct
  misc_feature 1..20: note = chemically synthesized
  source 1..20: mol_type = other DNA
aagagaaggcataaataatc

SEQ ID NO: 67175 - DNA, 20 bp, synthetic construct
  misc_feature 1..20: note = chemically synthesized
  source 1..20: mol_type = other DNA
gaaatttgctttgacttaaa

SEQ ID NO: 67176 - DNA, 20 bp, synthetic construct
  misc_feature 1..20: note = chemically synthesized
  source 1..20: mol_type = other DNA
gctttgacttaaaaaaaaca

SEQ ID NO: 67177 - DNA, 20 bp, synthetic construct
  misc_feature 1..20: note = chemically synthesized
  source 1..20: mol_type = other DNA
aacatggtctgtagtccact

SEQ ID NO: 67178 - DNA, 20 bp, synthetic construct
  misc_feature 1..20: note = chemically synthesized
  source 1..20: mol_type = other DNA
gaaccttttcccatctcttc

SEQ ID NO: 67179 - DNA, 20 bp, synthetic construct
  misc_feature 1..20: note = chemically synthesized
  source 1..20: mol_type = other DNA
tctttgccgaaatggattgc

SEQ ID NO: 67180 - DNA, 20 bp, synthetic construct
  misc_feature 1..20: note = chemically synthesized
  source 1..20: mol_type = other DNA
ctgcctccagatagatgttt

SEQ ID NO: 67181 - DNA, 20 bp, synthetic construct
  misc_feature 1..20: note = chemically synthesized
  source 1..20: mol_type = other DNA
tagaggcactccttaggccc

SEQ ID NO: 67182 - DNA, 20 bp, synthetic construct
  misc_feature 1..20: note = chemically synthesized
  source 1..20: mol_type = other DNA
taatttctcaatagtgcagt

SEQ ID NO: 67183 - DNA, 20 bp, synthetic construct
  misc_feature 1..20: note = chemically synthesized
  source 1..20: mol_type = other DNA
ataagatgtgcgtgtacatg

SEQ ID NO: 67184 - DNA, 20 bp, synthetic construct
  misc_feature 1..20: note = chemically synthesized
  source 1..20: mol_type = other DNA
gaaagtaggaagggcatgtg

SEQ ID NO: 67185 - DNA, 20 bp, synthetic construct
  misc_feature 1..20: note = chemically synthesized
  source 1..20: mol_type = other DNA
attgtagttaccgtggaaag

SEQ ID NO: 67186 - DNA, 20 bp, synthetic construct
  misc_feature 1..20: note = chemically synthesized
  source 1..20: mol_type = other DNA
gaacctttccccatctcttc

SEQ ID NO: 67187 - DNA, 20 bp, synthetic construct
  misc_feature 1..20: note = chemically synthesized
  source 1..20: mol_type = other DNA
tagttcttttatttgctcat

SEQ ID NO: 67188 - DNA, 20 bp, synthetic construct
  misc_feature 1..20: note = chemically synthesized
  source 1..20: mol_type = other DNA
cataaacacatccctcaaca

SEQ ID NO: 67189 - DNA, 20 bp, synthetic construct
  misc_feature 1..20: note = chemically synthesized
  source 1..20: mol_type = other DNA
tctttgccgaaatggattgc

SEQ ID NO: 67190 - DNA, 20 bp, synthetic construct
  misc_feature 1..20: note = chemically synthesized
  source 1..20: mol_type = other DNA
aaccctgtatgctgtaggct

SEQ ID NO: 67191 - DNA, 20 bp, synthetic construct
  misc_feature 1..20: note = chemically synthesized
  source 1..20: mol_type = other DNA
ctgcctccagatagatgttt

SEQ ID NO: 67192 - DNA, 20 bp, synthetic construct
  misc_feature 1..20: note = chemically synthesized
  source 1..20: mol_type = other DNA
cagaggcactccttaggccc

SEQ ID NO: 67193 - DNA, 20 bp, synthetic construct
  misc_feature 1..20: note = chemically synthesized
  source 1..20: mol_type = other DNA
ataagacatgtatttgcatg

SEQ ID NO: 67194 - DNA, 20 bp, synthetic construct
  misc_feature 1..20: note = chemically synthesized
  source 1..20: mol_type = other DNA
aacaacttccccatttatcc

SEQ ID NO: 67195 - DNA, 20 bp, synthetic construct
  misc_feature 1..20: note = chemically synthesized
  source 1..20: mol_type = other DNA
attgattaaatcctaactga

SEQ ID NO: 67196 - DNA, 20 bp, synthetic construct
  misc_feature 1..20: note = chemically synthesized
  source 1..20: mol_type = other DNA
aagttaaataagtcagagaa

SEQ ID NO: 67197 - DNA, 20 bp, synthetic construct
  misc_feature 1..20: note = chemically synthesized
  source 1..20: mol_type = other DNA
ttcaaagctctgaagcagaa

SEQ ID NO: 67198 - DNA, 20 bp, synthetic construct
  misc_feature 1..20: note = chemically synthesized
  source 1..20: mol_type = other DNA
acccaagtgagaaggaacca

SEQ ID NO: 67199 - DNA, 20 bp, synthetic construct
  misc_feature 1..20: note = chemically synthesized
  source 1..20: mol_type = other DNA
aaactaactctggtaatatg

SEQ ID NO: 67200 - DNA, 20 bp, synthetic construct
  misc_feature 1..20: note = chemically synthesized
  source 1..20: mol_type = other DNA
aaggtgaagtccaattttaa

SEQ ID NO: 67201 - DNA, 20 bp, synthetic construct
  misc_feature 1..20: note = chemically synthesized
  source 1..20: mol_type = other DNA
ttaaagagatagcataaata

SEQ ID NO: 67202 - DNA, 20 bp, synthetic construct
  misc_feature 1..20: note = chemically synthesized
  source 1..20: mol_type = other DNA
tagcataaataaaaaacatt

SEQ ID NO: 67203 - DNA, 20 bp, synthetic construct
  misc_feature 1..20: note = chemically synthesized
  source 1..20: mol_type = other DNA
aagagaaatctaaaagtttg

SEQ ID NO: 67204 - DNA, 20 bp, synthetic construct
  misc_feature 1..20: note = chemically synthesized
  source 1..20: mol_type = other DNA
tatccagggaaataatcaag

SEQ ID NO: 67205 - DNA, 20 bp, synthetic construct
  misc_feature 1..20: note = chemically synthesized
  source 1..20: mol_type = other DNA
ctaccaggtaacctatgaaa

SEQ ID NO: 67206 - DNA, 20 bp, synthetic construct
  misc_feature 1..20: note = chemically synthesized
  source 1..20: mol_type = other DNA
ctatcttcagccttcttaaa

SEQ ID NO: 67207 - DNA, 20 bp, synthetic construct
  misc_feature 1..20: note = chemically synthesized
  source 1..20: mol_type = other DNA
aaatacacagtgtttttcag

SEQ ID NO: 67208 - DNA, 20 bp, synthetic construct
  misc_feature 1..20: note = chemically synthesized
  source 1..20: mol_type = other DNA
aataaaccctggaagcacat

SEQ ID NO: 67209 - DNA, 20 bp, synthetic construct
  misc_feature 1..20: note = chemically synthesized
  source 1..20: mol_type = other DNA
gcagctattcttatgtcaga

SEQ ID NO: 67210 - DNA, 20 bp, synthetic construct
  misc_feature 1..20: note = chemically synthesized
  source 1..20: mol_type = other DNA
tactggagatcccaaattta

SEQ ID NO: 67211 - DNA, 20 bp, synthetic construct
  misc_feature 1..20: note = chemically synthesized
  source 1..20: mol_type = other DNA
ataggccatatgatatgcca

SEQ ID NO: 67212 - DNA, 20 bp, synthetic construct
  misc_feature 1..20: note = chemically synthesized
  source 1..20: mol_type = other DNA
tcaactacaaaaggaacctt

SEQ ID NO: 67213 - DNA, 20 bp, synthetic construct
  misc_feature 1..20: note = chemically synthesized
  source 1..20: mol_type = other DNA
atttaaaaatcatttgcttt

SEQ ID NO: 67214 - DNA, 20 bp, synthetic construct
  misc_feature 1..20: note = chemically synthesized
  source 1..20: mol_type = other DNA
gagaggacacaaacaaatgg

SEQ ID NO: 67215 - DNA, 20 bp, synthetic construct
  misc_feature 1..20: note = chemically synthesized
  source 1..20: mol_type = other DNA
acttttttcaaagaattaga

SEQ ID NO: 67216 - DNA, 20 bp, synthetic construct
  misc_feature 1..20: note = chemically synthesized
  source 1..20: mol_type = other DNA
tactacaaggctacagtaac

SEQ ID NO: 67217 - DNA, 20 bp, synthetic construct
  misc_feature 1..20: note = chemically synthesized
  source 1..20: mol_type = other DNA
aaacagcatggtactggtac

SEQ ID NO: 67218 - DNA, 20 bp, synthetic construct
  misc_feature 1..20: note = chemically synthesized
  source 1..20: mol_type = other DNA
tatttaataaatggtgctgg

SEQ ID NO: 67219 - DNA, 20 bp, synthetic construct
  misc_feature 1..20: note = chemically synthesized
  source 1..20: mol_type = other DNA
aaactggctagcaatatgca

SEQ ID NO: 67220 - DNA, 20 bp, synthetic construct
  misc_feature 1..20: note = chemically synthesized
  source 1..20: mol_type = other DNA
aaagacttaaatgtgcaacc

SEQ ID NO: 67221 - DNA, 20 bp, synthetic construct
  misc_feature 1..20: note = chemically synthesized
  source 1..20: mol_type = other DNA
catgggcaaaaattcacgac

SEQ ID NO: 67222 - DNA, 20 bp, synthetic construct
  misc_feature 1..20: note = chemically synthesized
  source 1..20: mol_type = other DNA
acttcaacaaatttacaaga

SEQ ID NO: 67223 - DNA, 20 bp, synthetic construct
  misc_feature 1..20: note = chemically synthesized
  source 1..20: mol_type = other DNA
gtcattagagaaatgcaaat

SEQ ID NO: 67224 - DNA, 20 bp, synthetic construct
  misc_feature 1..20: note = chemically synthesized
  source 1..20: mol_type = other DNA
acaatagtgacacaacctat

SEQ ID NO: 67225 - DNA, 20 bp, synthetic construct
  misc_feature 1..20: note = chemically synthesized
  source 1..20: mol_type = other DNA
ccacaagaaactagagaaac

SEQ ID NO: 67226 - DNA, 20 bp, synthetic construct
  misc_feature 1..20: note = chemically synthesized
  source 1..20: mol_type = other DNA
gaaacaaaaacaaacagaac

SEQ ID NO: 67227 - DNA, 20 bp, synthetic construct
  misc_feature 1..20: note = chemically synthesized
  source 1..20: mol_type = other DNA
agaggagaactaaatgaaat

SEQ ID NO: 67228 - DNA, 20 bp, synthetic construct
  misc_feature 1..20: note = chemically synthesized
  source 1..20: mol_type = other DNA
tggttctttgaaaagataaa

SEQ ID NO: 67229 - DNA, 20 bp, synthetic construct
  misc_feature 1..20: note = chemically synthesized
  source 1..20: mol_type = other DNA
caaataaactcaattagaaa

SEQ ID NO: 67230 - DNA, 20 bp, synthetic construct
  misc_feature 1..20: note = chemically synthesized
  source 1..20: mol_type = other DNA
acctttacatgcataaacta

SEQ ID NO: 67231 - DNA, 20 bp, synthetic construct
  misc_feature 1..20: note = chemically synthesized
  source 1..20: mol_type = other DNA
agccagtatcaccttaatac

SEQ ID NO: 67232 - DNA, 20 bp, synthetic construct
  misc_feature 1..20: note = chemically synthesized
  source 1..20: mol_type = other DNA
aaagaacataaccaaaaaaa

SEQ ID NO: 67233 - DNA, 20 bp, synthetic construct
  misc_feature 1..20: note = chemically synthesized
  source 1..20: mol_type = other DNA
aatagcatccgacagcatat

SEQ ID NO: 67234 - DNA, 20 bp, synthetic construct
  misc_feature 1..20: note = chemically synthesized
  source 1..20: mol_type = other DNA
attcaacatcactttatgac

SEQ ID NO: 67235 - DNA, 20 bp, synthetic construct
  misc_feature 1..20: note = chemically synthesized
  source 1..20: mol_type = other DNA
aagttaaaagcattctgtct

SEQ ID NO: 67236 - DNA, 20 bp, synthetic construct
  misc_feature 1..20: note = chemically synthesized
  source 1..20: mol_type = other DNA
atgatatgattgtgtatgta

SEQ ID NO: 67237 - DNA, 20 bp, synthetic construct
  misc_feature 1..20: note = chemically synthesized
  source 1..20: mol_type = other DNA
gaaaactctaaagactcctc

SEQ ID NO: 67238 - DNA, 20 bp, synthetic construct
  misc_feature 1..20: note = chemically synthesized
  source 1..20: mol_type = other DNA
ccccttttacaatagctgca

SEQ ID NO: 67239 - DNA, 20 bp, synthetic construct
  misc_feature 1..20: note = chemically synthesized
  source 1..20: mol_type = other DNA
tttacaatagctgcaaaaaa

SEQ ID NO: 67240 - DNA, 20 bp, synthetic construct
  misc_feature 1..20: note = chemically synthesized
  source 1..20: mol_type = other DNA
aatagctgcaaaaaacaaaa

SEQ ID NO: 67241 - DNA, 20 bp, synthetic construct
  misc_feature 1..20: note = chemically synthesized
  source 1..20: mol_type = other DNA
ctgcaaaaaacaaaacaaaa

SEQ ID NO: 67242 - DNA, 20 bp, synthetic construct
  misc_feature 1..20: note = chemically synthesized
  source 1..20: mol_type = other DNA
aaaacaaaacaaaacaaaac

SEQ ID NO: 67243 - DNA, 20 bp, synthetic construct
  misc_feature 1..20: note = chemically synthesized
  source 1..20: mol_type = other DNA
aggtgaaagacatctacaag

SEQ ID NO: 67244 - DNA, 20 bp, synthetic construct
  misc_feature 1..20: note = chemically synthesized
  source 1..20: mol_type = other DNA
gacatctacaaggaaaacta

SEQ ID NO: 67245 - DNA, 20 bp, synthetic construct
  misc_feature 1..20: note = chemically synthesized
  source 1..20: mol_type = other DNA
ttagtcttcacagaactaga

SEQ ID NO: 67246 - DNA, 20 bp, synthetic construct
  misc_feature 1..20: note = chemically synthesized
  source 1..20: mol_type = other DNA
tacaataaggccatagtcac

SEQ ID NO: 67247 - DNA, 20 bp, synthetic construct
  misc_feature 1..20: note = chemically synthesized
  source 1..20: mol_type = other DNA
tgatctttgacaaagcaaac

SEQ ID NO: 67248 - DNA, 20 bp, synthetic construct
  misc_feature 1..20: note = chemically synthesized
  source 1..20: mol_type = other DNA
attctagaaaataacatcgg

SEQ ID NO: 67249 - DNA, 20 bp, synthetic construct
  misc_feature 1..20: note = chemically synthesized
  source 1..20: mol_type = other DNA
gaacacaaatgcaaatacat

SEQ ID NO: 67250 - DNA, 20 bp, synthetic construct
  misc_feature 1..20: note = chemically synthesized
  source 1..20: mol_type = other DNA
atgatcagggaaatgcaaat

SEQ ID NO: 67251 - DNA, 20 bp, synthetic construct
  misc_feature 1..20: note = chemically synthesized
  source 1..20: mol_type = other DNA
agatatctacttactctagt

SEQ ID NO: 67252 - DNA, 20 bp, synthetic construct
  misc_feature 1..20: note = chemically synthesized
  source 1..20: mol_type = other DNA
aaaatagtacaaccattatg

SEQ ID NO: 67253 - DNA, 20 bp, synthetic construct
  misc_feature 1..20: note = chemically synthesized
  source 1..20: mol_type = other DNA
tgaagatttctcagtaaact

SEQ ID NO: 67254 - DNA, 20 bp, synthetic construct
  misc_feature 1..20: note = chemically synthesized
  source 1..20: mol_type = other DNA
tgaaagccctgaagcagaac

SEQ ID NO: 67255 - DNA, 20 bp, synthetic construct
  misc_feature 1..20: note = chemically synthesized
  source 1..20: mol_type = other DNA
aagacacaagacctgaaggt

SEQ ID NO: 67256 - DNA, 20 bp, synthetic construct
  misc_feature 1..20: note = chemically synthesized
  source 1..20: mol_type = other DNA
aagtcttcatcacactctcc

SEQ ID NO: 67257 - DNA, 20 bp, synthetic construct
  misc_feature 1..20: note = chemically synthesized
  source 1..20: mol_type = other DNA
ttatctccaaatcaatttca

SEQ ID NO: 67258 - DNA, 20 bp, synthetic construct
  misc_feature 1..20: note = chemically synthesized
  source 1..20: mol_type = other DNA
ccttctttccccggtgcagt

SEQ ID NO: 67259 - DNA, 20 bp, synthetic construct
  misc_feature 1..20: note = chemically synthesized
  source 1..20: mol_type = other DNA
catgttgagtagaagtttcc

SEQ ID NO: 67260 - DNA, 20 bp, synthetic construct
  misc_feature 1..20: note = chemically synthesized
  source 1..20: mol_type = other DNA
ttccgaaaacaacttgatga

SEQ ID NO: 67261 - DNA, 20 bp, synthetic construct
  misc_feature 1..20: note = chemically synthesized
  source 1..20: mol_type = other DNA
gaaaaaacaaacaaacaaac

SEQ ID NO: 67262 - DNA, 20 bp, synthetic construct
  misc_feature 1..20: note = chemically synthesized
  source 1..20: mol_type = other DNA
ttaaaggtggtgacagtgac

SEQ ID NO: 67263 - DNA, 20 bp, synthetic construct
  misc_feature 1..20: note = chemically synthesized
  source 1..20: mol_type = other DNA
ggaaaagaaaataaagctgt

SEQ ID NO: 67264 - DNA, 20 bp, synthetic construct
  misc_feature 1..20: note = chemically synthesized
  source 1..20: mol_type = other DNA
cttaaggagtgcattgtaaa

SEQ ID NO: 67265 - DNA, 20 bp, synthetic construct
  misc_feature 1..20: note = chemically synthesized
  source 1..20: mol_type = other DNA
cttagtttctctagggagac

SEQ ID NO: 67266 - DNA, 20 bp, synthetic construct
  misc_feature 1..20: note = chemically synthesized
  source 1..20: mol_type = other DNA
tgataaaaaaaaaaaaaaaa

SEQ ID NO: 67267 - DNA, 20 bp, synthetic construct
  misc_feature 1..20: note = chemically synthesized
  source 1..20: mol_type = other DNA
taaccattggctaacacaga

SEQ ID NO: 67268 - DNA, 20 bp, synthetic construct
  misc_feature 1..20: note = chemically synthesized
  source 1..20: mol_type = other DNA
agcgaaactccatctcaaac

SEQ ID NO: 67269 - DNA, 20 bp, synthetic construct
  misc_feature 1..20: note = chemically synthesized
  source 1..20: mol_type = other DNA
actccatctcaaacaaaaac

SEQ ID NO: 67270 - DNA, 20 bp, synthetic construct
  misc_feature 1..20: note = chemically synthesized
  source 1..20: mol_type = other DNA
ttggagaacaggtttctccc

SEQ ID NO: 67271 - DNA, 20 bp, synthetic construct
  misc_feature 1..20: note = chemically synthesized
  source 1..20: mol_type = other DNA
taagttctatgcaggattct

SEQ ID NO: 67272 - DNA, 20 bp, synthetic construct
  misc_feature 1..20: note = chemically synthesized
  source 1..20: mol_type = other DNA
acatgatgggcactgaaggt

SEQ ID NO: 67273 - DNA, 20 bp, synthetic construct
  misc_feature 1..20: note = chemically synthesized
  source 1..20: mol_type = other DNA
aacttgagtctgtcaactta

SEQ ID NO: 67274 - DNA, 20 bp, synthetic construct
  misc_feature 1..20: note = chemically synthesized
  source 1..20: mol_type = other DNA
atgaactaagaacatagaaa

SEQ ID NO: 67275 - DNA, 20 bp, synthetic construct
  misc_feature 1..20: note = chemically synthesized
  source 1..20: mol_type = other DNA
tcttatgtctagaaattttg

SEQ ID NO: 67276 - DNA, 20 bp, synthetic construct
  misc_feature 1..20: note = chemically synthesized
  source 1..20: mol_type = other DNA
tgtatttctctggagaaggt

SEQ ID NO: 67277 - DNA, 20 bp, synthetic construct
  misc_feature 1..20: note = chemically synthesized
  source 1..20: mol_type = other DNA
atccatcatgaggaaatatg

SEQ ID NO: 67278 - DNA, 20 bp, synthetic construct
  misc_feature 1..20: note = chemically synthesized
  source 1..20: mol_type = other DNA
tacaaatatgtgattatcat

SEQ ID NO: 67279 - DNA, 20 bp, synthetic construct
  misc_feature 1..20: note = chemically synthesized
  source 1..20: mol_type = other DNA
tgagactttaaaaaaaaaaa

SEQ ID NO: 67280 - DNA, 20 bp, synthetic construct
  misc_feature 1..20: note = chemically synthesized
  source 1..20: mol_type = other DNA
aaaaaaaaaaaaaaacaaaa

SEQ ID NO: 67281 - DNA, 20 bp, synthetic construct
  misc_feature 1..20: note = chemically synthesized
  source 1..20: mol_type = other DNA
cagaacttaaagcatattaa

SEQ ID NO: 67282 - DNA, 20 bp, synthetic construct
  misc_feature 1..20: note = chemically synthesized
  source 1..20: mol_type = other DNA
tagttataaattccagtgta

SEQ ID NO: 67283 - DNA, 20 bp, synthetic construct
  misc_feature 1..20: note = chemically synthesized
  source 1..20: mol_type = other DNA
caagagcaaatctcagccta

SEQ ID NO: 67284 - DNA, 20 bp, synthetic construct
  misc_feature 1..20: note = chemically synthesized
  source 1..20: mol_type = other DNA
aattgctaagaatacagcac

SEQ ID NO: 67285 - DNA, 20 bp, synthetic construct
  misc_feature 1..20: note = chemically synthesized
  source 1..20: mol_type = other DNA
aggtgctatggagaaaaaaa

SEQ ID NO: 67286 - DNA, 20 bp, synthetic construct
  misc_feature 1..20: note = chemically synthesized
  source 1..20: mol_type = other DNA
tacatcatagagttgtaaga

SEQ ID NO: 67287 - DNA, 20 bp, synthetic construct
  misc_feature 1..20: note = chemically synthesized
  source 1..20: mol_type = other DNA
aaggcaaggggtcagcctct

SEQ ID NO: 67288 - DNA, 20 bp, synthetic construct
  misc_feature 1..20: note = chemically synthesized
  source 1..20: mol_type = other DNA
tctgaaaacatcctttcacg

SEQ ID NO: 67289 - DNA, 20 bp, synthetic construct
  misc_feature 1..20: note = chemically synthesized
  source 1..20: mol_type = other DNA
ttaaacactgccactcaacc

SEQ ID NO: 67290 - DNA, 20 bp, synthetic construct
  misc_feature 1..20: note = chemically synthesized
  source 1..20: mol_type = other DNA
ttcattcacaaatgaataca

SEQ ID NO: 67291 - DNA, 20 bp, synthetic construct
  misc_feature 1..20: note = chemically synthesized
  source 1..20: mol_type = other DNA
tgtaatgggtcctgggcctg

SEQ ID NO: 67292 - DNA, 20 bp, synthetic construct
  misc_feature 1..20: note = chemically synthesized
  source 1..20: mol_type = other DNA
aaatgtaacaggaactaagg

SEQ ID NO: 67293 - DNA, 20 bp, synthetic construct
  misc_feature 1..20: note = chemically synthesized
  source 1..20: mol_type = other DNA
gcttgaatcataaataagaa

SEQ ID NO: 67294 - DNA, 20 bp, synthetic construct
  misc_feature 1..20: note = chemically synthesized
  source 1..20: mol_type = other DNA
aagatttttttaaaaattaa

SEQ ID NO: 67295 - DNA, 20 bp, synthetic construct
  misc_feature 1..20: note = chemically synthesized
  source 1..20: mol_type = other DNA
agtttgtgttttgctgtgga

SEQ ID NO: 67296 - DNA, 20 bp, synthetic construct
  misc_feature 1..20: note = chemically synthesized
  source 1..20: mol_type = other DNA
cttctgagtattggtgtgag

SEQ ID NO: 67297 - DNA, 20 bp, synthetic construct
  misc_feature 1..20: note = chemically synthesized
  source 1..20: mol_type = other DNA
actttatagatgatgatcct

SEQ ID NO: 67298 - DNA, 20 bp, synthetic construct
  misc_feature 1..20: note = chemically synthesized
  source 1..20: mol_type = other DNA
atggagttagcgtgaggatg

SEQ ID NO: 67299 - DNA, 20 bp, synthetic construct
  misc_feature 1..20: note = chemically synthesized
  source 1..20: mol_type = other DNA
tatgatggggtagcagacaa

SEQ ID NO: 67300 - DNA, 20 bp, synthetic construct
  misc_feature 1..20: note = chemically synthesized
  source 1..20: mol_type = other DNA
taactgaagacagcagcaat

SEQ ID NO: 67301 - DNA, 20 bp, synthetic construct
  misc_feature 1..20: note = chemically synthesized
  source 1..20: mol_type = other DNA
taattttttagtcacttagg

SEQ ID NO: 67302 - DNA, 20 bp, synthetic construct
  misc_feature 1..20: note = chemically synthesized
  source 1..20: mol_type = other DNA
gaacaatcttatgagcctgt

SEQ ID NO: 67303 - DNA, 20 bp, synthetic construct
  misc_feature 1..20: note = chemically synthesized
  source 1..20: mol_type = other DNA
acagagtgagaccctttctc

SEQ ID NO: 67304 - DNA, 20 bp, synthetic construct
  misc_feature 1..20: note = chemically synthesized
  source 1..20: mol_type = other DNA
tctcaaaaacaaactaatta

SEQ ID NO: 67305 - DNA, 20 bp, synthetic construct
  misc_feature 1..20: note = chemically synthesized
  source 1..20: mol_type = other DNA
gttgtgtttgctgtgtttgc

SEQ ID NO: 67306 - DNA, 20 bp, synthetic construct
  misc_feature 1..20: note = chemically synthesized
  source 1..20: mol_type = other DNA
aaataattttatttatatta

SEQ ID NO: 67307 - DNA, 20 bp, synthetic construct
  misc_feature 1..20: note = chemically synthesized
  source 1..20: mol_type = other DNA
atacagatgtatataaacta

SEQ ID NO: 67308 - DNA, 20 bp, synthetic construct
  misc_feature 1..20: note = chemically synthesized
  source 1..20: mol_type = other DNA
atatcacttcttcacttaga

SEQ ID NO: 67309 - DNA, 20 bp, synthetic construct
  misc_feature 1..20: note = chemically synthesized
  source 1..20: mol_type = other DNA
taggaaataataatggacca

SEQ ID NO: 67310 - DNA, 20 bp, synthetic construct
  misc_feature 1..20: note = chemically synthesized
  source 1..20: mol_type = other DNA
acccatataaataacgtaga

SEQ ID NO: 67311 - DNA, 20 bp, synthetic construct
  misc_feature 1..20: note = chemically synthesized
  source 1..20: mol_type = other DNA
acatacttattttttgtggt

SEQ ID NO: 67312 - DNA, 20 bp, synthetic construct
  misc_feature 1..20: note = chemically synthesized
  source 1..20: mol_type = other DNA
aggatgcagtaatagattta

SEQ ID NO: 67313 - DNA, 20 bp, synthetic construct
  misc_feature 1..20: note = chemically synthesized
  source 1..20: mol_type = other DNA
atgaataatgatcaatcgag

SEQ ID NO: 67314 - DNA, 20 bp, synthetic construct
  misc_feature 1..20: note = chemically synthesized
  source 1..20: mol_type = other DNA
tgagtggattgatgtggaag

SEQ ID NO: 67315 - DNA, 20 bp, synthetic construct
  misc_feature 1..20: note = chemically synthesized
  source 1..20: mol_type = other DNA
aaagacaaatgtgcaacatc

SEQ ID NO: 67316 - DNA, 20 bp, synthetic construct
  misc_feature 1..20: note = chemically synthesized
  source 1..20: mol_type = other DNA
actcagaggtggataagaga

SEQ ID NO: 67317 - DNA, 20 bp, synthetic construct
  misc_feature 1..20: note = chemically synthesized
  source 1..20: mol_type = other DNA
actccaagatagatttagat

SEQ ID NO: 67318 - DNA, 20 bp, synthetic construct
  misc_feature 1..20: note = chemically synthesized
  source 1..20: mol_type = other DNA
atgatgaggagacatggaaa

SEQ ID NO: 67319 - DNA, 20 bp, synthetic construct
  misc_feature 1..20: note = chemically synthesized
  source 1..20: mol_type = other DNA
atcccatatttacaaaaaat

SEQ ID NO: 67320 - DNA, 20 bp, synthetic construct
  misc_feature 1..20: note = chemically synthesized
  source 1..20: mol_type = other DNA
gttatgaatataattaaaat

SEQ ID NO: 67321 - DNA, 20 bp, synthetic construct
  misc_feature 1..20: note = chemically synthesized
  source 1..20: mol_type = other DNA
tgtcttcttataacaatcaa

SEQ ID NO: 67322 - DNA, 20 bp, synthetic construct
  misc_feature 1..20: note = chemically synthesized
  source 1..20: mol_type = other DNA
atacatttgccatttttaca

SEQ ID NO: 67323 - DNA, 20 bp, synthetic construct
  misc_feature 1..20: note = chemically synthesized
  source 1..20: mol_type = other DNA
ccaaacaacaaaggcaacca

SEQ ID NO: 67324 - DNA, 20 bp, synthetic construct
  misc_feature 1..20: note = chemically synthesized
  source 1..20: mol_type = other DNA
actctgtatgccaactttgg

SEQ ID NO: 67325 - DNA, 20 bp, synthetic construct
  misc_feature 1..20: note = chemically synthesized
  source 1..20: mol_type = other DNA
caagtttttgcattaattat

SEQ ID NO: 67326 - DNA, 20 bp, synthetic construct
  misc_feature 1..20: note = chemically synthesized
  source 1..20: mol_type = other DNA
cagcagacaatgggaagaag

SEQ ID NO: 67327 - DNA, 20 bp, synthetic construct
  misc_feature 1..20: note = chemically synthesized
  source 1..20: mol_type = other DNA
aggaaaaaaaagtgtggata

SEQ ID NO: 67328 - DNA, 20 bp, synthetic construct
  misc_feature 1..20: note = chemically synthesized
  source 1..20: mol_type = other DNA
aattatgggcaaaatggaca

SEQ ID NO: 67329 - DNA, 20 bp, synthetic construct
  misc_feature 1..20: note = chemically synthesized
  source 1..20: mol_type = other DNA
gcaatgaaacagtcataggc

SEQ ID NO: 67330 - DNA, 20 bp, synthetic construct
  misc_feature 1..20: note = chemically synthesized
  source 1..20: mol_type = other DNA
catcaggccattttttacct

SEQ ID NO: 67331 - DNA, 20 bp, synthetic construct
  misc_feature 1..20: note = chemically synthesized
  source 1..20: mol_type = other DNA
ctataaaaaataaaataaaa

SEQ ID NO: 67332 - DNA, 20 bp, synthetic construct
  misc_feature 1..20: note = chemically synthesized
  source 1..20: mol_type = other DNA
ttttgtagcaggtttattgg

SEQ ID NO: 67333 - DNA, 20 bp, synthetic construct
  misc_feature 1..20: note = chemically synthesized
  source 1..20: mol_type = other DNA
ttgcaccttttttattttat

SEQ ID NO: 67334 - DNA, 20 bp, synthetic construct
  misc_feature 1..20: note = chemically synthesized
  source 1..20: mol_type = other DNA
actatgttcatatggatact

SEQ ID NO: 67335 - DNA, 20 bp, synthetic construct
  misc_feature 1..20: note = chemically synthesized
  source 1..20: mol_type = other DNA
ttaaactatagtcgtgtttt

SEQ ID NO: 67336 - DNA, 20 bp, synthetic construct
  misc_feature 1..20: note = chemically synthesized
  source 1..20: mol_type = other DNA
gcggatgcacagggttttat

SEQ ID NO: 67337 - DNA, 20 bp, synthetic construct
  misc_feature 1..20: note = chemically synthesized
  source 1..20: mol_type = other DNA
ttaacatctgcagtctctag

SEQ ID NO: 67338 - DNA, 20 bp, synthetic construct
  misc_feature 1..20: note = chemically synthesized
  source 1..20: mol_type = other DNA
aggcaggagaattgctttaa

SEQ ID NO: 67339 - DNA, 20 bp, synthetic construct
  misc_feature 1..20: note = chemically synthesized
  source 1..20: mol_type = other DNA
aagttgatctgtatttacaa

SEQ ID NO: 67340 - DNA, 20 bp, synthetic construct
  misc_feature 1..20: note = chemically synthesized
  source 1..20: mol_type = other DNA
tgtgagacaaaaagtgagta

SEQ ID NO: 67341 - DNA, 20 bp, synthetic construct
  misc_feature 1..20: note = chemically synthesized
  source 1..20: mol_type = other DNA
gaccagctgggccaacatgg

SEQ ID NO: 67342 - DNA, 20 bp, synthetic construct
  misc_feature 1..20: note = chemically synthesized
  source 1..20: mol_type = other DNA
agagaaaagaaaagtgagta

SEQ ID NO: 67343 - DNA, 20 bp, synthetic construct
  misc_feature 1..20: note = chemically synthesized
  source 1..20: mol_type = other DNA
aaacacaggtttatctaacc

SEQ ID NO: 67344 - DNA, 20 bp, synthetic construct
  misc_feature 1..20: note = chemically synthesized
  source 1..20: mol_type = other DNA
atttattctttctattgatt

SEQ ID NO: 67345 - DNA, 20 bp, synthetic construct
  misc_feature 1..20: note = chemically synthesized
  source 1..20: mol_type = other DNA
tgtataaagatatctgcatt

SEQ ID NO: 67346 - DNA, 20 bp, synthetic construct
  misc_feature 1..20: note = chemically synthesized
  source 1..20: mol_type = other DNA
tctaccctaaactcttatct

SEQ ID NO: 67347 - DNA, 20 bp, synthetic construct
  misc_feature 1..20: note = chemically synthesized
  source 1..20: mol_type = other DNA
cctgtttatacttaggggaa

SEQ ID NO: 67348 - DNA, 20 bp, synthetic construct
  misc_feature 1..20: note = chemically synthesized
  source 1..20: mol_type = other DNA
atattcaggtaagattttgc

SEQ ID NO: 67349 - DNA, 20 bp, synthetic construct
  misc_feature 1..20: note = chemically synthesized
  source 1..20: mol_type = other DNA
agttctctttgtactcacag

SEQ ID NO: 67350 - DNA, 20 bp, synthetic construct
  misc_feature 1..20: note = chemically synthesized
  source 1..20: mol_type = other DNA
tctttgtactcacagtaaaa

SEQ ID NO: 67351 - DNA, 20 bp, synthetic construct
  misc_feature 1..20: note = chemically synthesized
  source 1..20: mol_type = other DNA
ttaaggttgaaggtatgcag

SEQ ID NO: 67352 - DNA, 20 bp, synthetic construct
  misc_feature 1..20: note = chemically synthesized
  source 1..20: mol_type = other DNA
aagattttgtgtcaactaaa

SEQ ID NO: 67353 - DNA, 20 bp, synthetic construct
  misc_feature 1..20: note = chemically synthesized
  source 1..20: mol_type = other DNA
cgtaaattgcaggttattga

SEQ ID NO: 67354 - DNA, 20 bp, synthetic construct
  misc_feature 1..20: note = chemically synthesized
  source 1..20: mol_type = other DNA
tctttctcactaagcatgag

SEQ ID NO: 67355 - DNA, 20 bp, synthetic construct
  misc_feature 1..20: note = chemically synthesized
  source 1..20: mol_type = other DNA
ttttaatacaaggacataca

SEQ ID NO: 67356 - DNA, 20 bp, synthetic construct
  misc_feature 1..20: note = chemically synthesized
  source 1..20: mol_type = other DNA
atttttatgtcttcccaata

SEQ ID NO: 67357 - DNA, 20 bp, synthetic construct
  misc_feature 1..20: note = chemically synthesized
  source 1..20: mol_type = other DNA
acagagcgagactccatctc

SEQ ID NO: 67358 - DNA, 20 bp, synthetic construct
  misc_feature 1..20: note = chemically synthesized
  source 1..20: mol_type = other DNA
gcgagactccatctcaaaaa

SEQ ID NO: 67359 - DNA, 20 bp, synthetic construct
  misc_feature 1..20: note = chemically synthesized
  source 1..20: mol_type = other DNA
actccatctcaaaaacaaaa

SEQ ID NO: 67360 - DNA, 20 bp, synthetic construct
  misc_feature 1..20: note = chemically synthesized
  source 1..20: mol_type = other DNA
acaaaacaaaacaaagcaaa

SEQ ID NO: 67361 - DNA, 20 bp, synthetic construct
  misc_feature 1..20: note = chemically synthesized
  source 1..20: mol_type = other DNA
gttaaatcatttctttaact

SEQ ID NO: 67362 - DNA, 20 bp, synthetic construct
  misc_feature 1..20: note = chemically synthesized
  source 1..20: mol_type = other DNA
tcagccgagatcaaggcact

SEQ ID NO: 67363 - DNA, 20 bp, synthetic construct
  misc_feature 1..20: note = chemically synthesized
  source 1..20: mol_type = other DNA
tacaacatgaataaacctta

SEQ ID NO: 67364 - DNA, 20 bp, synthetic construct
  misc_feature 1..20: note = chemically synthesized
  source 1..20: mol_type = other DNA
atatattaccactataaaaa

SEQ ID NO: 67365 - DNA, 20 bp, synthetic construct
  misc_feature 1..20: note = chemically synthesized
  source 1..20: mol_type = other DNA
aaatttattgtgaaaggttt

SEQ ID NO: 67366 - DNA, 20 bp, synthetic construct
  misc_feature 1..20: note = chemically synthesized
  source 1..20: mol_type = other DNA
actaacataagcactcatga

SEQ ID NO: 67367 - DNA, 20 bp, synthetic construct
  misc_feature 1..20: note = chemically synthesized
  source 1..20: mol_type = other DNA
tattttttggactgctattt

SEQ ID NO: 67368 - DNA, 20 bp, synthetic construct
  misc_feature 1..20: note = chemically synthesized
  source 1..20: mol_type = other DNA
ttcagtgaatgacacccaag

SEQ ID NO: 67369 - DNA, 20 bp, synthetic construct
  misc_feature 1..20: note = chemically synthesized
  source 1..20: mol_type = other DNA
aaataatattgaagtaattt

SEQ ID NO: 67370 - DNA, 20 bp, synthetic construct
  misc_feature 1..20: note = chemically synthesized
  source 1..20: mol_type = other DNA
tgtatatagcaagacaaaca

SEQ ID NO: 67371 - DNA, 20 bp, synthetic construct
  misc_feature 1..20: note = chemically synthesized
  source 1..20: mol_type = other DNA
gaaaatacgtacactaaaaa

SEQ ID NO: 67372 - DNA, 20 bp, synthetic construct
  misc_feature 1..20: note = chemically synthesized
  source 1..20: mol_type = other DNA
aatttagagagtctctactg

SEQ ID NO: 67373 - DNA, 20 bp, synthetic construct
  misc_feature 1..20: note = chemically synthesized
  source 1..20: mol_type = other DNA
gacattgtatcattttgaaa

SEQ ID NO: 67374 - DNA, 20 bp, synthetic construct
  misc_feature 1..20: note = chemically synthesized
  source 1..20: mol_type = other DNA
atctggagtctatgaggaac

SEQ ID NO: 67375 - DNA, 20 bp, synthetic construct
  misc_feature 1..20: note = chemically synthesized
  source 1..20: mol_type = other DNA
ctaaaacaaatttacaagaa

SEQ ID NO: 67376 - DNA, 20 bp, synthetic construct
  misc_feature 1..20: note = chemically synthesized
  source 1..20: mol_type = other DNA
gtcattagaaaaatgcaaat

SEQ ID NO: 67377 - DNA, 20 bp, synthetic construct
  misc_feature 1..20: note = chemically synthesized
  source 1..20: mol_type = other DNA
tcaatgatagagtggataaa

SEQ ID NO: 67378 - DNA, 20 bp, synthetic construct
  misc_feature 1..20: note = chemically synthesized
  source 1..20: mol_type = other DNA
atcaaactaacacaggaaca

SEQ ID NO: 67379 - DNA, 20 bp, synthetic construct
  misc_feature 1..20: note = chemically synthesized
  source 1..20: mol_type = other DNA
ataattcatctttatatggc

SEQ ID NO: 67380 - DNA, 20 bp, synthetic construct
  misc_feature 1..20: note = chemically synthesized
  source 1..20: mol_type = other DNA
agttaagcattcttaatcta

SEQ ID NO: 67381 - DNA, 20 bp, synthetic construct
  misc_feature 1..20: note = chemically synthesized
  source 1..20: mol_type = other DNA
atagacatagtgttttgtta

SEQ ID NO: 67382 - DNA, 20 bp, synthetic construct
  misc_feature 1..20: note = chemically synthesized
  source 1..20: mol_type = other DNA
gatcatctcaatagactgag

SEQ ID NO: 67383 - DNA, 20 bp, synthetic construct
  misc_feature 1..20: note = chemically synthesized
  source 1..20: mol_type = other DNA
attcaacatcccttcatgat

SEQ ID NO: 67384 - DNA, 20 bp, synthetic construct
  misc_feature 1..20: note = chemically synthesized
  source 1..20: mol_type = other DNA
aagaataaaagccacgtatg

SEQ ID NO: 67385 - DNA, 20 bp, synthetic construct
  misc_feature 1..20: note = chemically synthesized
  source 1..20: mol_type = other DNA
acgtatgaaaaacccataac

SEQ ID NO: 67386 - DNA, 20 bp, synthetic construct
  misc_feature 1..20: note = chemically synthesized
  source 1..20: mol_type = other DNA
aagctggaactattctcctc

SEQ ID NO: 67387 - DNA, 20 bp, synthetic construct
  misc_feature 1..20: note = chemically synthesized
  source 1..20: mol_type = other DNA
ttgttctttttattgaaatt

SEQ ID NO: 67388 - DNA, 20 bp, synthetic construct
  misc_feature 1..20: note = chemically synthesized
  source 1..20: mol_type = other DNA
acaggtgaaaagaacaaaca

SEQ ID NO: 67389 - DNA, 20 bp, synthetic construct
  misc_feature 1..20: note = chemically synthesized
  source 1..20: mol_type = other DNA
aatatatcttgcaaatcatg

SEQ ID NO: 67390 - DNA, 20 bp, synthetic construct
  misc_feature 1..20: note = chemically synthesized
  source 1..20: mol_type = other DNA
ttaccataagggaatgaata

SEQ ID NO: 67391 - DNA, 20 bp, synthetic construct
  misc_feature 1..20: note = chemically synthesized
  source 1..20: mol_type = other DNA
ttccatcaaatgtatcactg

SEQ ID NO: 67392 - DNA, 20 bp, synthetic construct
  misc_feature 1..20: note = chemically synthesized
  source 1..20: mol_type = other DNA
cttttagtacacagtcacac

SEQ ID NO: 67393 - DNA, 20 bp, synthetic construct
  misc_feature 1..20: note = chemically synthesized
  source 1..20: mol_type = other DNA
tgaagagcaaacatactctt

SEQ ID NO: 67394 - DNA, 20 bp, synthetic construct
  misc_feature 1..20: note = chemically synthesized
  source 1..20: mol_type = other DNA
aattacaggcaggatggata

SEQ ID NO: 67395 - DNA, 20 bp, synthetic construct
  misc_feature 1..20: note = chemically synthesized
  source 1..20: mol_type = other DNA
tttgcaacaacagtgataac

SEQ ID NO: 67396 - DNA, 20 bp, synthetic construct
  misc_feature 1..20: note = chemically synthesized
  source 1..20: mol_type = other DNA
gtcctcaggtgattccagtg

SEQ ID NO: 67397 - DNA, 20 bp, synthetic construct
  misc_feature 1..20: note = chemically synthesized
  source 1..20: mol_type = other DNA
tcgaaagatccttcatgctt

SEQ ID NO: 67398 - DNA, 20 bp, synthetic construct
  misc_feature 1..20: note = chemically synthesized
  source 1..20: mol_type = other DNA
tgtttgtgagcttttcctta

SEQ ID NO: 67399 - DNA, 20 bp, synthetic construct
  misc_feature 1..20: note = chemically synthesized
  source 1..20: mol_type = other DNA
gtctttagagaaattggcca

SEQ ID NO: 67400 - DNA, 20 bp, synthetic construct
  misc_feature 1..20: note = chemically synthesized
  source 1..20: mol_type = other DNA
tcaacaggatccataatgct

SEQ ID NO: 67401 - DNA, 20 bp, synthetic construct
  misc_feature 1..20: note = chemically synthesized
  source 1..20: mol_type = other DNA
tttttgtctactcttcagag

SEQ ID NO: 67402 - DNA, 20 bp, synthetic construct
  misc_feature 1..20: note = chemically synthesized
  source 1..20: mol_type = other DNA
taagccctttctggataaac

SEQ ID NO: 67403 - DNA, 20 bp, synthetic construct
  misc_feature 1..20: note = chemically synthesized
  source 1..20: mol_type = other DNA
aatccaagggtcccagatta

SEQ ID NO: 67404 - DNA, 20 bp, synthetic construct
  misc_feature 1..20: note = chemically synthesized
  source 1..20: mol_type = other DNA
tacctctaggcagacctctg

SEQ ID NO: 67405 - DNA, 20 bp, synthetic construct
  misc_feature 1..20: note = chemically synthesized
  source 1..20: mol_type = other DNA
gtgaggaaaatttgaaattc

SEQ ID NO: 67406 - DNA, 20 bp, synthetic construct
  misc_feature 1..20: note = chemically synthesized
  source 1..20: mol_type = other DNA
attatttaagctaataattg

SEQ ID NO: 67407 - DNA, 20 bp, synthetic construct
  misc_feature 1..20: note = chemically synthesized
  source 1..20: mol_type = other DNA
ttctagcagagccagaataa

SEQ ID NO: 67408 - DNA, 20 bp, synthetic construct
  misc_feature 1..20: note = chemically synthesized
  source 1..20: mol_type = other DNA
tagcccaatcaagtgacatt

SEQ ID NO: 67409 - DNA, 20 bp, synthetic construct
  misc_feature 1..20: note = chemically synthesized
  source 1..20: mol_type = other DNA
caggggattatggatgccaa

SEQ ID NO: 67410 - DNA, 20 bp, synthetic construct
  misc_feature 1..20: note = chemically synthesized
  source 1..20: mol_type = other DNA
cctgaggagaaacaaacaaa

SEQ ID NO: 67411 - DNA, 20 bp, synthetic construct
  misc_feature 1..20: note = chemically synthesized
  source 1..20: mol_type = other DNA
aaattatttcacacatactt

SEQ ID NO: 67412 - DNA, 20 bp, synthetic construct
  misc_feature 1..20: note = chemically synthesized
  source 1..20: mol_type = other DNA
ggtgtgataggcataatttt

SEQ ID NO: 67413 - DNA, 20 bp, synthetic construct
  misc_feature 1..20: note = chemically synthesized
  source 1..20: mol_type = other DNA
agcctgcaaacaaacaaaca

SEQ ID NO: 67414 - DNA, 20 bp, synthetic construct
  misc_feature 1..20: note = chemically synthesized
  source 1..20: mol_type = other DNA
caaacaaacaaacaaaaaac

SEQ ID NO: 67415 - DNA, 20 bp, synthetic construct
  misc_feature 1..20: note = chemically synthesized
  source 1..20: mol_type = other DNA
aacaaacaaaaaacaaaaac

SEQ ID NO: 67416 - DNA, 20 bp, synthetic construct
  misc_feature 1..20: note = chemically synthesized
  source 1..20: mol_type = other DNA
gtaatttatgtataacaata

SEQ ID NO: 67417 - DNA, 20 bp, synthetic construct
  misc_feature 1..20: note = chemically synthesized
  source 1..20: mol_type = other DNA
gcatcacccagactttagca

SEQ ID NO: 67418 - DNA, 20 bp, synthetic construct
  misc_feature 1..20: note = chemically synthesized
  source 1..20: mol_type = other DNA
ggctctaactcattgtagta

SEQ ID NO: 67419 - DNA, 20 bp, synthetic construct
  misc_feature 1..20: note = chemically synthesized
  source 1..20: mol_type = other DNA
ataggtggatgtaagataga

SEQ ID NO: 67420 - DNA, 20 bp, synthetic construct
  misc_feature 1..20: note = chemically synthesized
  source 1..20: mol_type = other DNA
tcatgtaagcacccatcaca

SEQ ID NO: 67421 - DNA, 20 bp, synthetic construct
  misc_feature 1..20: note = chemically synthesized
  source 1..20: mol_type = other DNA
ccatattttctttgcaaaaa

SEQ ID NO: 67422 - DNA, 20 bp, synthetic construct
  misc_feature 1..20: note = chemically synthesized
  source 1..20: mol_type = other DNA
gcggcttcctccaatcagtt

SEQ ID NO: 67423 - DNA, 20 bp, synthetic construct
  misc_feature 1..20: note = chemically synthesized
  source 1..20: mol_type = other DNA
tttagattgaactgaaacat

SEQ ID NO: 67424 - DNA, 20 bp, synthetic construct
  misc_feature 1..20: note = chemically synthesized
  source 1..20: mol_type = other DNA
atctgttgtttcttgacttt

SEQ ID NO: 67425 - DNA, 20 bp, synthetic construct
  misc_feature 1..20: note = chemically synthesized
  source 1..20: mol_type = other DNA
aggatttaggctataaaatc

SEQ ID NO: 67426 - DNA, 20 bp, synthetic construct
  misc_feature 1..20: note = chemically synthesized
  source 1..20: mol_type = other DNA
ttacaatgggttttgaatag

SEQ ID NO: 67427 - DNA, 20 bp, synthetic construct
  misc_feature 1..20: note = chemically synthesized
  source 1..20: mol_type = other DNA
tcaactgaaactaggctgaa

SEQ ID NO: 67428 - DNA, 20 bp, synthetic construct
  misc_feature 1..20: note = chemically synthesized
  source 1..20: mol_type = other DNA
tccttgtcactgagtctcag

SEQ ID NO: 67429 - DNA, 20 bp, synthetic construct
  misc_feature 1..20: note = chemically synthesized
  source 1..20: mol_type = other DNA
ttgaagtcacttgcctgatg

SEQ ID NO: 67430 - DNA, 20 bp, synthetic construct
  misc_feature 1..20: note = chemically synthesized
  source 1..20: mol_type = other DNA
atattaaatttccccatcaa

SEQ ID NO: 67431 - DNA, 20 bp, synthetic construct
  misc_feature 1..20: note = chemically synthesized
  source 1..20: mol_type = other DNA
gtttggttttatgaatgatt

SEQ ID NO: 67432 - DNA, 20 bp, synthetic construct
  misc_feature 1..20: note = chemically synthesized
  source 1..20: mol_type = other DNA
tgaatgattgaaaacaggac

SEQ ID NO: 67433 - DNA, 20 bp, synthetic construct
  misc_feature 1..20: note = chemically synthesized
  source 1..20: mol_type = other DNA
gacatggcgtgacaaggata

SEQ ID NO: 67434 - DNA, 20 bp, synthetic construct
  misc_feature 1..20: note = chemically synthesized
  source 1..20: mol_type = other DNA
attctgtaaaatgatcgggg

SEQ ID NO: 67435 - DNA, 20 bp, synthetic construct
  misc_feature 1..20: note = chemically synthesized
  source 1..20: mol_type = other DNA
aatatgtggaacctgctttc

SEQ ID NO: 67436 - DNA, 20 bp, synthetic construct
  misc_feature 1..20: note = chemically synthesized
  source 1..20: mol_type = other DNA
aatccaatcactgtgacata

SEQ ID NO: 67437 - DNA, 20 bp, synthetic construct
  misc_feature 1..20: note = chemically synthesized
  source 1..20: mol_type = other DNA
aagagggttgcagatggcaa

SEQ ID NO: 67438 - DNA, 20 bp, synthetic construct
  misc_feature 1..20: note = chemically synthesized
  source 1..20: mol_type = other DNA
atgagcttcctccaagcctg

SEQ ID NO: 67439 - DNA, 20 bp, synthetic construct
  misc_feature 1..20: note = chemically synthesized
  source 1..20: mol_type = other DNA
atataaatgcaagtttaaca

SEQ ID NO: 67440 - DNA, 20 bp, synthetic construct
  misc_feature 1..20: note = chemically synthesized
  source 1..20: mol_type = other DNA
actgagacctcaatacaaaa

SEQ ID NO: 67441 - DNA, 20 bp, synthetic construct
  misc_feature 1..20: note = chemically synthesized
  source 1..20: mol_type = other DNA
gaccgtatacagacctagag

SEQ ID NO: 67442 - DNA, 20 bp, synthetic construct
  misc_feature 1..20: note = chemically synthesized
  source 1..20: mol_type = other DNA
gcatgactggcatttgataa

SEQ ID NO: 67443 - DNA, 20 bp, synthetic construct
  misc_feature 1..20: note = chemically synthesized
  source 1..20: mol_type = other DNA
tgaaaaaaagagaaaaatag

SEQ ID NO: 67444 - DNA, 20 bp, synthetic construct
  misc_feature 1..20: note = chemically synthesized
  source 1..20: mol_type = other DNA
atattcaacctccaacagag

SEQ ID NO: 67445 - DNA, 20 bp, synthetic construct
  misc_feature 1..20: note = chemically synthesized
  source 1..20: mol_type = other DNA
tgcaggaaccaaggcaaaaa

SEQ ID NO: 67446 - DNA, 20 bp, synthetic construct
  misc_feature 1..20: note = chemically synthesized
  source 1..20: mol_type = other DNA
taaagactccctgacatctc

SEQ ID NO: 67447 - DNA, 20 bp, synthetic construct
  misc_feature 1..20: note = chemically synthesized
  source 1..20: mol_type = other DNA
agaattagtttctcattaat

SEQ ID NO: 67448 - DNA, 20 bp, synthetic construct
  misc_feature 1..20: note = chemically synthesized
  source 1..20: mol_type = other DNA
aagcactcagttttcaatat

SEQ ID NO: 67449 - DNA, 20 bp, synthetic construct
  misc_feature 1..20: note = chemically synthesized
  source 1..20: mol_type = other DNA
ttaacaatgaatacctataa

SEQ ID NO: 67450 - DNA, 20 bp, synthetic construct
  misc_feature 1..20: note = chemically synthesized
  source 1..20: mol_type = other DNA
aaagtcaaacacaggctcct

SEQ ID NO: 67451 - DNA, 20 bp, synthetic construct
  misc_feature 1..20: note = chemically synthesized
  source 1..20: mol_type = other DNA
tacttctctgaaacaataac

SEQ ID NO: 67452 - DNA, 20 bp, synthetic construct
  misc_feature 1..20: note = chemically synthesized
  source 1..20: mol_type = other DNA
aaaaaattatccactcttta

SEQ ID NO: 67453 - DNA, 20 bp, synthetic construct
  misc_feature 1..20: note = chemically synthesized
  source 1..20: mol_type = other DNA
aacccatttatctatagcat

SEQ ID NO: 67454 - DNA, 20 bp, synthetic construct
  misc_feature 1..20: note = chemically synthesized
  source 1..20: mol_type = other DNA
ctatgagaaatgtgttcagt

SEQ ID NO: 67455 - DNA, 20 bp, synthetic construct
  misc_feature 1..20: note = chemically synthesized
  source 1..20: mol_type = other DNA
aataatattgataataattt

SEQ ID NO: 67456 - DNA, 20 bp, synthetic construct
  misc_feature 1..20: note = chemically synthesized
  source 1..20: mol_type = other DNA
tgtgcaaaatagcagagttg

SEQ ID NO: 67457 - DNA, 20 bp, synthetic construct
  misc_feature 1..20: note = chemically synthesized
  source 1..20: mol_type = other DNA
ggatgtataaataacacaga

SEQ ID NO: 67458 - DNA, 20 bp, synthetic construct
  misc_feature 1..20: note = chemically synthesized
  source 1..20: mol_type = other DNA
agagactcagccactcacag

SEQ ID NO: 67459 - DNA, 20 bp, synthetic construct
  misc_feature 1..20: note = chemically synthesized
  source 1..20: mol_type = other DNA
gctctgggaggatatccaca

SEQ ID NO: 67460 - DNA, 20 bp, synthetic construct
  misc_feature 1..20: note = chemically synthesized
  source 1..20: mol_type = other DNA
atgcatccttgctaacactg

SEQ ID NO: 67461 - DNA, 20 bp, synthetic construct
  misc_feature 1..20: note = chemically synthesized
  source 1..20: mol_type = other DNA
gattttatattaatactttc

SEQ ID NO: 67462 - DNA, 20 bp, synthetic construct
  misc_feature 1..20: note = chemically synthesized
  source 1..20: mol_type = other DNA
gctgagggtcctgttagaag

SEQ ID NO: 67463 - DNA, 20 bp, synthetic construct
  misc_feature 1..20: note = chemically synthesized
  source 1..20: mol_type = other DNA
acagaaaggacatccacacc

SEQ ID NO: 67464 - DNA, 20 bp, synthetic construct
  misc_feature 1..20: note = chemically synthesized
  source 1..20: mol_type = other DNA
catcaaagaccaaaggtaga

SEQ ID NO: 67465 - DNA, 20 bp, synthetic construct
  misc_feature 1..20: note = chemically synthesized
  source 1..20: mol_type = other DNA
ataaaaccacaaagatgggg

SEQ ID NO: 67466 - DNA, 20 bp, synthetic construct
  misc_feature 1..20: note = chemically synthesized
  source 1..20: mol_type = other DNA
gatggggaaaaacagagcag

SEQ ID NO: 67467 - DNA, 20 bp, synthetic construct
  misc_feature 1..20: note = chemically synthesized
  source 1..20: mol_type = other DNA
gaacccatggcaaaaaagtt

SEQ ID NO: 67468 - DNA, 20 bp, synthetic construct
  misc_feature 1..20: note = chemically synthesized
  source 1..20: mol_type = other DNA
ttaaaggacctgatggagct

SEQ ID NO: 67469 - DNA, 20 bp, synthetic construct
  misc_feature 1..20: note = chemically synthesized
  source 1..20: mol_type = other DNA
ggcagaatggaaccaagttg

SEQ ID NO: 67470 - DNA, 20 bp, synthetic construct
  misc_feature 1..20: note = chemically synthesized
  source 1..20: mol_type = other DNA
caaccggtaccagccactgc

SEQ ID NO: 67471 - DNA, 20 bp, synthetic construct
  misc_feature 1..20: note = chemically synthesized
  source 1..20: mol_type = other DNA
gaagatctaccaagaaaatg

SEQ ID NO: 67472 - DNA, 20 bp, synthetic construct
  misc_feature 1..20: note = chemically synthesized
  source 1..20: mol_type = other DNA
gttgcaatcctcatctctga

SEQ ID NO: 67473 - DNA, 20 bp, synthetic construct
  misc_feature 1..20: note = chemically synthesized
  source 1..20: mol_type = other DNA
tcaggattaagaaactcact

SEQ ID NO: 67474 - DNA, 20 bp, synthetic construct
  misc_feature 1..20: note = chemically synthesized
  source 1..20: mol_type = other DNA
tgaaggaaatagagacacaa

SEQ ID NO: 67475 - DNA, 20 bp, synthetic construct
  misc_feature 1..20: note = chemically synthesized
  source 1..20: mol_type = other DNA
taattaatagcttaccaacc

SEQ ID NO: 67476 - DNA, 20 bp, synthetic construct
  misc_feature 1..20: note = chemically synthesized
  source 1..20: mol_type = other DNA
ccctgatggacatcgatgca

SEQ ID NO: 67477 - DNA, 20 bp, synthetic construct
  misc_feature 1..20: note = chemically synthesized
  source 1..20: mol_type = other DNA
atataaacagaaccaaagac

SEQ ID NO: 67478 - DNA, 20 bp, synthetic construct
  misc_feature 1..20: note = chemically synthesized
  source 1..20: mol_type = other DNA
attcaacaacccttcatgct

SEQ ID NO: 67479 - DNA, 20 bp, synthetic construct
  misc_feature 1..20: note = chemically synthesized
  source 1..20: mol_type = other DNA
caatatcatactgaatggac

SEQ ID NO: 67480 - DNA, 20 bp, synthetic construct
  misc_feature 1..20: note = chemically synthesized
  source 1..20: mol_type = other DNA
aaactggaagcattcccttt

SEQ ID NO: 67481 - DNA, 20 bp, synthetic construct
  misc_feature 1..20: note = chemically synthesized
  source 1..20: mol_type = other DNA
atgacacgattgtatatcta

SEQ ID NO: 67482 - DNA, 20 bp, synthetic construct
  misc_feature 1..20: note = chemically synthesized
  source 1..20: mol_type = other DNA
actttcttcacagaattgga

SEQ ID NO: 67483 - DNA, 20 bp, synthetic construct
  misc_feature 1..20: note = chemically synthesized
  source 1..20: mol_type = other DNA
tactacaaggctacagtaac

SEQ ID NO: 67484 - DNA, 20 bp, synthetic construct
  misc_feature 1..20: note = chemically synthesized
  source 1..20: mol_type = other DNA
aaacagcatggtactggtac

SEQ ID NO: 67485 - DNA, 20 bp, synthetic construct
  misc_feature 1..20: note = chemically synthesized
  source 1..20: mol_type = other DNA
tctttgacaaacctgacaaa

SEQ ID NO: 67486 - DNA, 20 bp, synthetic construct
  misc_feature 1..20: note = chemically synthesized
  source 1..20: mol_type = other DNA
tatttaataaatggtgctgg

SEQ ID NO: 67487 - DNA, 20 bp, synthetic construct
  misc_feature 1..20: note = chemically synthesized
  source 1..20: mol_type = other DNA
acagacttaaatgttagact

SEQ ID NO: 67488 - DNA, 20 bp, synthetic construct
  misc_feature 1..20: note = chemically synthesized
  source 1..20: mol_type = other DNA
aatgttagactgaaaaccat

SEQ ID NO: 67489 - DNA, 20 bp, synthetic construct
  misc_feature 1..20: note = chemically synthesized
  source 1..20: mol_type = other DNA
aaaccataaaaactctggaa

SEQ ID NO: 67490 - DNA, 20 bp, synthetic construct
  misc_feature 1..20: note = chemically synthesized
  source 1..20: mol_type = other DNA
atgggcaaggacttcatgtc

SEQ ID NO: 67491 - DNA, 20 bp, synthetic construct
  misc_feature 1..20: note = chemically synthesized
  source 1..20: mol_type = other DNA
ctcaaacaaatttacaagaa

SEQ ID NO: 67492 - DNA, 20 bp, synthetic construct
  misc_feature 1..20: note = chemically synthesized
  source 1..20: mol_type = other DNA
gccatcagagaaatacaaat

SEQ ID NO: 67493 - DNA, 20 bp, synthetic construct
  misc_feature 1..20: note = chemically synthesized
  source 1..20: mol_type = other DNA
acaatgatagactggattaa

SEQ ID NO: 67494 - DNA, 20 bp, synthetic construct
  misc_feature 1..20: note = chemically synthesized
  source 1..20: mol_type = other DNA
cagcaaactatcgcaaggac

SEQ ID NO: 67495 - DNA, 20 bp, synthetic construct
  misc_feature 1..20: note = chemically synthesized
  source 1..20: mol_type = other DNA
cacgttgtgcaaatgtaccc

SEQ ID NO: 67496 - DNA, 20 bp, synthetic construct
  misc_feature 1..20: note = chemically synthesized
  source 1..20: mol_type = other DNA
gggtatagactaacagaaag

SEQ ID NO: 67497 - DNA, 20 bp, synthetic construct
  misc_feature 1..20: note = chemically synthesized
  source 1..20: mol_type = other DNA
gggattggggcatgaaggtt

SEQ ID NO: 67498 - DNA, 20 bp, synthetic construct
  misc_feature 1..20: note = chemically synthesized
  source 1..20: mol_type = other DNA
aaagagaccctgagtgtctt

SEQ ID NO: 67499 - DNA, 20 bp, synthetic construct
  misc_feature 1..20: note = chemically synthesized
  source 1..20: mol_type = other DNA
attttcatgaggattctatt

SEQ ID NO: 67500 - DNA, 20 bp, synthetic construct
  misc_feature 1..20: note = chemically synthesized
  source 1..20: mol_type = other DNA
gaccaccaatcttgacttca

SEQ ID NO: 67501 - DNA, 20 bp, synthetic construct
  misc_feature 1..20: note = chemically synthesized
  source 1..20: mol_type = other DNA
ggcaaataagggacactcaa

SEQ ID NO: 67502 - DNA, 20 bp, synthetic construct
  misc_feature 1..20: note = chemically synthesized
  source 1..20: mol_type = other DNA
actggtgtttgccagctgtg

SEQ ID NO: 67503 - DNA, 20 bp, synthetic construct
  misc_feature 1..20: note = chemically synthesized
  source 1..20: mol_type = other DNA
cacaaagcatattgatacac

SEQ ID NO: 67504 - DNA, 20 bp, synthetic construct
  misc_feature 1..20: note = chemically synthesized
  source 1..20: mol_type = other DNA
ctagctctgacaaagaaaat

SEQ ID NO: 67505 - DNA, 20 bp, synthetic construct
  misc_feature 1..20: note = chemically synthesized
  source 1..20: mol_type = other DNA
ttactcaaaatattatgctt

SEQ ID NO: 67506 - DNA, 20 bp, synthetic construct
  misc_feature 1..20: note = chemically synthesized
  source 1..20: mol_type = other DNA
tgctttaaaactgaaggaag

SEQ ID NO: 67507 - DNA, 20 bp, synthetic construct
  misc_feature 1..20: note = chemically synthesized
  source 1..20: mol_type = other DNA
ttacatctattatacctcag

SEQ ID NO: 67508 - DNA, 20 bp, synthetic construct
  misc_feature 1..20: note = chemically synthesized
  source 1..20: mol_type = other DNA
tcacattaggttaatttttt

SEQ ID NO: 67509 - DNA, 20 bp, synthetic construct
  misc_feature 1..20: note = chemically synthesized
  source 1..20: mol_type = other DNA
tagagacattgatgaaactg

SEQ ID NO: 67510 - DNA, 20 bp, synthetic construct
  misc_feature 1..20: note = chemically synthesized
  source 1..20: mol_type = other DNA
tactgatattaaaaatagag

SEQ ID NO: 67511 - DNA, 20 bp, synthetic construct
  misc_feature 1..20: note = chemically synthesized
  source 1..20: mol_type = other DNA
gagctctggcacattttaca

SEQ ID NO: 67512 - DNA, 20 bp, synthetic construct
  misc_feature 1..20: note = chemically synthesized
  source 1..20: mol_type = other DNA
acagaacacccccaaatggc

SEQ ID NO: 67513 - DNA, 20 bp, synthetic construct
  misc_feature 1..20: note = chemically synthesized
  source 1..20: mol_type = other DNA
ccaaaacaatcttgagaaag

SEQ ID NO: 67514 - DNA, 20 bp, synthetic construct
  misc_feature 1..20: note = chemically synthesized
  source 1..20: mol_type = other DNA
tcctcaacaaatagtgttgg

SEQ ID NO: 67515 - DNA, 20 bp, synthetic construct
  misc_feature 1..20: note = chemically synthesized
  source 1..20: mol_type = other DNA
aaatgtaagacctgaaatca

SEQ ID NO: 67516 - DNA, 20 bp, synthetic construct
  misc_feature 1..20: note = chemically synthesized
  source 1..20: mol_type = other DNA
ggccaggtactcctctgaga

SEQ ID NO: 67517 - DNA, 20 bp, synthetic construct
  misc_feature 1..20: note = chemically synthesized
  source 1..20: mol_type = other DNA
agggtcctgtctgttagaag

SEQ ID NO: 67518 - DNA, 20 bp, synthetic construct
  misc_feature 1..20: note = chemically synthesized
  source 1..20: mol_type = other DNA
acagaaaggacatccacacc

SEQ ID NO: 67519 - DNA, 20 bp, synthetic construct
  misc_feature 1..20: note = chemically synthesized
  source 1..20: mol_type = other DNA
tacaaccacaaagttgggga

SEQ ID NO: 67520 - DNA, 20 bp, synthetic construct
  misc_feature 1..20: note = chemically synthesized
  source 1..20: mol_type = other DNA
ttggggaaaaaacagagcag

SEQ ID NO: 67521 - DNA, 20 bp, synthetic construct
  misc_feature 1..20: note = chemically synthesized
  source 1..20: mol_type = other DNA
aaaccaaaggcaaagaagat

SEQ ID NO: 67522 - DNA, 20 bp, synthetic construct
  misc_feature 1..20: note = chemically synthesized
  source 1..20: mol_type = other DNA
gggagaatcgaaccaagttg

SEQ ID NO: 67523 - DNA, 20 bp, synthetic construct
  misc_feature 1..20: note = chemically synthesized
  source 1..20: mol_type = other DNA
gaagatctaccaagcaaatg

SEQ ID NO: 67524 - DNA, 20 bp, synthetic construct
  misc_feature 1..20: note = chemically synthesized
  source 1..20: mol_type = other DNA
gttgcaatcctagtctctga

SEQ ID NO: 67525 - DNA, 20 bp, synthetic construct
  misc_feature 1..20: note = chemically synthesized
  source 1..20: mol_type = other DNA
tcaggattaagaaactcact

SEQ ID NO: 67526 - DNA, 20 bp, synthetic construct
  misc_feature 1..20: note = chemically synthesized
  source 1..20: mol_type = other DNA
ctgaaggaaacagagacaca

SEQ ID NO: 67527 - DNA, 20 bp, synthetic construct
  misc_feature 1..20: note = chemically synthesized
  source 1..20: mol_type = other DNA
tggttttttgaaaggatcaa

SEQ ID NO: 67528 - DNA, 20 bp, synthetic construct
  misc_feature 1..20: note = chemically synthesized
  source 1..20: mol_type = other DNA
atataaacagaaccaaagac

SEQ ID NO: 67529 - DNA, 20 bp, synthetic construct
  misc_feature 1..20: note = chemically synthesized
  source 1..20: mol_type = other DNA
attcaacaacccttcatgct

SEQ ID NO: 67530 - DNA, 20 bp, synthetic construct
  misc_feature 1..20: note = chemically synthesized
  source 1..20: mol_type = other DNA
caatatcatactgaatgggc

SEQ ID NO: 67531 - DNA, 20 bp, synthetic construct
  misc_feature 1..20: note = chemically synthesized
  source 1..20: mol_type = other DNA
acgacatgattgtatatcta

SEQ ID NO: 67532 - DNA, 20 bp, synthetic construct
  misc_feature 1..20: note = chemically synthesized
  source 1..20: mol_type = other DNA
ttcagcaaagcctcaggata

SEQ ID NO: 67533 - DNA, 20 bp, synthetic construct
  misc_feature 1..20: note = chemically synthesized
  source 1..20: mol_type = other DNA
gattttcttcacagaattgg

SEQ ID NO: 67534 - DNA, 20 bp, synthetic construct
  misc_feature 1..20: note = chemically synthesized
  source 1..20: mol_type = other DNA
tactacaaggctacagtaac

SEQ ID NO: 67535 - DNA, 20 bp, synthetic construct
  misc_feature 1..20: note = chemically synthesized
  source 1..20: mol_type = other DNA
aaacagcatgttactggtac

SEQ ID NO: 67536 - DNA, 20 bp, synthetic construct
  misc_feature 1..20: note = chemically synthesized
  source 1..20: mol_type = other DNA
ctacaactatctgatctttg

SEQ ID NO: 67537 - DNA, 20 bp, synthetic construct
  misc_feature 1..20: note = chemically synthesized
  source 1..20: mol_type = other DNA
tgatctttgaaaaacctgag

SEQ ID NO: 67538 - DNA, 20 bp, synthetic construct
  misc_feature 1..20: note = chemically synthesized
  source 1..20: mol_type = other DNA
aaagacttaaacattagacc

SEQ ID NO: 67539 - DNA, 20 bp, synthetic construct
  misc_feature 1..20: note = chemically synthesized
  source 1..20: mol_type = other DNA
aacattagacctaaaaccat

SEQ ID NO: 67540 - DNA, 20 bp, synthetic construct
  misc_feature 1..20: note = chemically synthesized
  source 1..20: mol_type = other DNA
aaaccataaaaaccctagaa

SEQ ID NO: 67541 - DNA, 20 bp, synthetic construct
  misc_feature 1..20: note = chemically synthesized
  source 1..20: mol_type = other DNA
atgggcaaggacttcatgtc

SEQ ID NO: 67542 - DNA, 20 bp, synthetic construct
  misc_feature 1..20: note = chemically synthesized
  source 1..20: mol_type = other DNA
ctcaaacaaatttacaagaa

SEQ ID NO: 67543 - DNA, 20 bp, synthetic construct
  misc_feature 1..20: note = chemically synthesized
  source 1..20: mol_type = other DNA
tgaacagacacttctcaaaa

SEQ ID NO: 67544 - DNA, 20 bp, synthetic construct
  misc_feature 1..20: note = chemically synthesized
  source 1..20: mol_type = other DNA
gccatcagagaaatgcaaat

SEQ ID NO: 67545 - DNA, 20 bp, synthetic construct
  misc_feature 1..20: note = chemically synthesized
  source 1..20: mol_type = other DNA
agtaaactatcgcaaggaca

SEQ ID NO: 67546 - DNA, 20 bp, synthetic construct
  misc_feature 1..20: note = chemically synthesized
  source 1..20: mol_type = other DNA
attcagtcaataattcctca

SEQ ID NO: 67547 - DNA, 20 bp, synthetic construct
  misc_feature 1..20: note = chemically synthesized
  source 1..20: mol_type = other DNA
caccagaatcatgaaccaaa

SEQ ID NO: 67548 - DNA, 20 bp, synthetic construct
  misc_feature 1..20: note = chemically synthesized
  source 1..20: mol_type = other DNA
tcaaaatatgcaaaatacac

SEQ ID NO: 67549 - DNA, 20 bp, synthetic construct
  misc_feature 1..20: note = chemically synthesized
  source 1..20: mol_type = other DNA
taaaaatctgaaaaagctaa

SEQ ID NO: 67550 - DNA, 20 bp, synthetic construct
  misc_feature 1..20: note = chemically synthesized
  source 1..20: mol_type = other DNA
tccccctggtggctacattg

SEQ ID NO: 67551 - DNA, 20 bp, synthetic construct
  misc_feature 1..20: note = chemically synthesized
  source 1..20: mol_type = other DNA
ctggatagaggttccttaaa

SEQ ID NO: 67552 - DNA, 20 bp, synthetic construct
  misc_feature 1..20: note = chemically synthesized
  source 1..20: mol_type = other DNA
caaacaatattacatgcaat

SEQ ID NO: 67553 - DNA, 20 bp, synthetic construct
  misc_feature 1..20: note = chemically synthesized
  source 1..20: mol_type = other DNA
aggactattttgtgatatga

SEQ ID NO: 67554 - DNA, 20 bp, synthetic construct
  misc_feature 1..20: note = chemically synthesized
  source 1..20: mol_type = other DNA
ccggaaaatcttatagttct

SEQ ID NO: 67555 - DNA, 20 bp, synthetic construct
  misc_feature 1..20: note = chemically synthesized
  source 1..20: mol_type = other DNA
tactacatccgacctctctg

SEQ ID NO: 67556 - DNA, 20 bp, synthetic construct
  misc_feature 1..20: note = chemically synthesized
  source 1..20: mol_type = other DNA
gcagcagatgtctgtgtagc

SEQ ID NO: 67557 - DNA, 20 bp, synthetic construct
  misc_feature 1..20: note = chemically synthesized
  source 1..20: mol_type = other DNA
ccagagccagagaaagaaca

SEQ ID NO: 67558 - DNA, 20 bp, synthetic construct
  misc_feature 1..20: note = chemically synthesized
  source 1..20: mol_type = other DNA
cctctccttactctcatcag

SEQ ID NO: 67559 - DNA, 20 bp, synthetic construct
  misc_feature 1..20: note = chemically synthesized
  source 1..20: mol_type = other DNA
aaatcctcctctatcctact

SEQ ID NO: 67560 - DNA, 20 bp, synthetic construct
  misc_feature 1..20: note = chemically synthesized
  source 1..20: mol_type = other DNA
cgcaagtgtttactggttgg

SEQ ID NO: 67561 - DNA, 20 bp, synthetic construct
  misc_feature 1..20: note = chemically synthesized
  source 1..20: mol_type = other DNA
agcaataaatatagaagaat

SEQ ID NO: 67562 - DNA, 20 bp, synthetic construct
  misc_feature 1..20: note = chemically synthesized
  source 1..20: mol_type = other DNA
agatgggtttggaaaggtgc

SEQ ID NO: 67563 - DNA, 20 bp, synthetic construct
  misc_feature 1..20: note = chemically synthesized
  source 1..20: mol_type = other DNA
ataggagctactgaagtact

SEQ ID NO: 67564 - DNA, 20 bp, synthetic construct
  misc_feature 1..20: note = chemically synthesized
  source 1..20: mol_type = other DNA
ttagctaagtgggttttaaa

SEQ ID NO: 67565 - DNA, 20 bp, synthetic construct
  misc_feature 1..20: note = chemically synthesized
  source 1..20: mol_type = other DNA
ttgccattgaaagtaatggt

SEQ ID NO: 67566 - DNA, 20 bp, synthetic construct
  misc_feature 1..20: note = chemically synthesized
  source 1..20: mol_type = other DNA
taaaccttttttacttcatt

SEQ ID NO: 67567 - DNA, 20 bp, synthetic construct
  misc_feature 1..20: note = chemically synthesized
  source 1..20: mol_type = other DNA
tgatatggagaagtctaaca

SEQ ID NO: 67568 - DNA, 20 bp, synthetic construct
  misc_feature 1..20: note = chemically synthesized
  source 1..20: mol_type = other DNA
gaaataattgaaatacagag

SEQ ID NO: 67569 - DNA, 20 bp, synthetic construct
  misc_feature 1..20: note = chemically synthesized
  source 1..20: mol_type = other DNA
cagtaaatgagtcctggggc

SEQ ID NO: 67570 - DNA, 20 bp, synthetic construct
  misc_feature 1..20: note = chemically synthesized
  source 1..20: mol_type = other DNA
tgtctggagttgtggcttta

SEQ ID NO: 67571 - DNA, 20 bp, synthetic construct
  misc_feature 1..20: note = chemically synthesized
  source 1..20: mol_type = other DNA
aaggtcatcatcaatgtaac

SEQ ID NO: 67572 - DNA, 20 bp, synthetic construct
  misc_feature 1..20: note = chemically synthesized
  source 1..20: mol_type = other DNA
aaactaaaatgaaactaaat

SEQ ID NO: 67573 - DNA, 20 bp, synthetic construct
  misc_feature 1..20: note = chemically synthesized
  source 1..20: mol_type = other DNA
cccgattcaaaaataaaaag

SEQ ID NO: 67574 - DNA, 20 bp, synthetic construct
  misc_feature 1..20: note = chemically synthesized
  source 1..20: mol_type = other DNA
gtacaggtaataacatattt

SEQ ID NO: 67575 - DNA, 20 bp, synthetic construct
  misc_feature 1..20: note = chemically synthesized
  source 1..20: mol_type = other DNA
acagagcaagactccttctc

SEQ ID NO: 67576 - DNA, 20 bp, synthetic construct
  misc_feature 1..20: note = chemically synthesized
  source 1..20: mol_type = other DNA
gtattttcacataccagaat

SEQ ID NO: 67577 - DNA, 20 bp, synthetic construct
  misc_feature 1..20: note = chemically synthesized
  source 1..20: mol_type = other DNA
aatttaatttgccttttata

SEQ ID NO: 67578 - DNA, 20 bp, synthetic construct
  misc_feature 1..20: note = chemically synthesized
  source 1..20: mol_type = other DNA
ataaatatttgtatcaaaag

SEQ ID NO: 67579 - DNA, 20 bp, synthetic construct
  misc_feature 1..20: note = chemically synthesized
  source 1..20: mol_type = other DNA
atcaggaaaagatagcaaca

SEQ ID NO: 67580 - DNA, 20 bp, synthetic construct
  misc_feature 1..20: note = chemically synthesized
  source 1..20: mol_type = other DNA
taagagttatagattcacag

SEQ ID NO: 67581 - DNA, 20 bp, synthetic construct
  misc_feature 1..20: note = chemically synthesized
  source 1..20: mol_type = other DNA
aacaacaacaacaaaccaaa

SEQ ID NO: 67582 - DNA, 20 bp, synthetic construct
  misc_feature 1..20: note = chemically synthesized
  source 1..20: mol_type = other DNA
tgaaattgatactgtatttg

SEQ ID NO: 67583 - DNA, 20 bp, synthetic construct
  misc_feature 1..20: note = chemically synthesized
  source 1..20: mol_type = other DNA
gccatatggaaggattgtcc

SEQ ID NO: 67584 - DNA, 20 bp, synthetic construct
  misc_feature 1..20: note = chemically synthesized
  source 1..20: mol_type = other DNA
atgacgtgattgcatatcta

SEQ ID NO: 67585 - DNA, 20 bp, synthetic construct
  misc_feature 1..20: note = chemically synthesized
  source 1..20: mol_type = other DNA
actttcttcacagaattgga

SEQ ID NO: 67586 - DNA, 20 bp, synthetic construct
  misc_feature 1..20: note = chemically synthesized
  source 1..20: mol_type = other DNA
tactacaaggctacagtaac

SEQ ID NO: 67587 - DNA, 20 bp, synthetic construct
  misc_feature 1..20: note = chemically synthesized
  source 1..20: mol_type = other DNA
aaacagcatagtactggtac

SEQ ID NO: 67588 - DNA, 20 bp, synthetic construct
  misc_feature 1..20: note = chemically synthesized
  source 1..20: mol_type = other DNA
agagatatagaccaatggaa

SEQ ID NO: 67589 - DNA, 20 bp, synthetic construct
  misc_feature 1..20: note = chemically synthesized
  source 1..20: mol_type = other DNA
tgatctttgacaaacctgag

SEQ ID NO: 67590 - DNA, 20 bp, synthetic construct
  misc_feature 1..20: note = chemically synthesized
  source 1..20: mol_type = other DNA
tgtttaataaatggtgctgg

SEQ ID NO: 67591 - DNA, 20 bp, synthetic construct
  misc_feature 1..20: note = chemically synthesized
  source 1..20: mol_type = other DNA
aaagacttaaatgttagacc

SEQ ID NO: 67592 - DNA, 20 bp, synthetic construct
  misc_feature 1..20: note = chemically synthesized
  source 1..20: mol_type = other DNA
aatgttagacctaaaaccat

SEQ ID NO: 67593 - DNA, 20 bp, synthetic construct
  misc_feature 1..20: note = chemically synthesized
  source 1..20: mol_type = other DNA
aaaccataaaaactctagaa

SEQ ID NO: 67594 - DNA, 20 bp, synthetic construct
  misc_feature 1..20: note = chemically synthesized
  source 1..20: mol_type = other DNA
atgggcatggacttcatgtc

SEQ ID NO: 67595 - DNA, 20 bp, synthetic construct
  misc_feature 1..20: note = chemically synthesized
  source 1..20: mol_type = other DNA
aaacaaatttacaagagaaa

SEQ ID NO: 67596 - DNA, 20 bp, synthetic construct
  misc_feature 1..20: note = chemically synthesized
  source 1..20: mol_type = other DNA
gccatcagagaaatgcaaat

SEQ ID NO: 67597 - DNA, 20 bp, synthetic construct
  misc_feature 1..20: note = chemically synthesized
  source 1..20: mol_type = other DNA
caccttgtgcacatgtaccc

SEQ ID NO: 67598 - DNA, 20 bp, synthetic construct
  misc_feature 1..20: note = chemically synthesized
  source 1..20: mol_type = other DNA
tcctaaattggtggcagatg

SEQ ID NO: 67599 - DNA, 20 bp, synthetic construct
  misc_feature 1..20: note = chemically synthesized
  source 1..20: mol_type = other DNA
aattggtggcagatggaaaa

SEQ ID NO: 67600 - DNA, 20 bp, synthetic construct
  misc_feature 1..20: note = chemically synthesized
  source 1..20: mol_type = other DNA
tggcagatggaaaacaaaac

SEQ ID NO: 67601 - DNA, 20 bp, synthetic construct
  misc_feature 1..20: note = chemically synthesized
  source 1..20: mol_type = other DNA
gtattaacatctttatcttt

SEQ ID NO: 67602 - DNA, 20 bp, synthetic construct
  misc_feature 1..20: note = chemically synthesized
  source 1..20: mol_type = other DNA
aagaaagaaaaaaaaaggaa

SEQ ID NO: 67603 - DNA, 20 bp, synthetic construct
  misc_feature 1..20: note = chemically synthesized
  source 1..20: mol_type = other DNA
gatctccttgaaagagatct

SEQ ID NO: 67604 - DNA, 20 bp, synthetic construct
  misc_feature 1..20: note = chemically synthesized
  source 1..20: mol_type = other DNA
aacccaagataatatgatgg

SEQ ID NO: 67605 - DNA, 20 bp, synthetic construct
  misc_feature 1..20: note = chemically synthesized
  source 1..20: mol_type = other DNA
agagagtgagcaagaagagg

SEQ ID NO: 67606 - DNA, 20 bp, synthetic construct
  misc_feature 1..20: note = chemically synthesized
  source 1..20: mol_type = other DNA
gaagagggaaaactgcctta

SEQ ID NO: 67607 - DNA, 20 bp, synthetic construct
  misc_feature 1..20: note = chemically synthesized
  source 1..20: mol_type = other DNA
ataaaaccatcagatctcat

SEQ ID NO: 67608 - DNA, 20 bp, synthetic construct
  misc_feature 1..20: note = chemically synthesized
  source 1..20: mol_type = other DNA
ccagatctgtcttccccatc

SEQ ID NO: 67609 - DNA, 20 bp, synthetic construct
  misc_feature 1..20: note = chemically synthesized
  source 1..20: mol_type = other DNA
ccaatgacttcctttatcca

SEQ ID NO: 67610 - DNA, 20 bp, synthetic construct
  misc_feature 1..20: note = chemically synthesized
  source 1..20: mol_type = other DNA
ctgcaggaggttgatgtgaa

SEQ ID NO: 67611 - DNA, 20 bp, synthetic construct
  misc_feature 1..20: note = chemically synthesized
  source 1..20: mol_type = other DNA
ctaacgtcccctgatgaagc

SEQ ID NO: 67612 - DNA, 20 bp, synthetic construct
  misc_feature 1..20: note = chemically synthesized
  source 1..20: mol_type = other DNA
gtaacattttagatagaggg

SEQ ID NO: 67613 - DNA, 20 bp, synthetic construct
  misc_feature 1..20: note = chemically synthesized
  source 1..20: mol_type = other DNA
ggctcagagttgtcacaaag

SEQ ID NO: 67614 - DNA, 20 bp, synthetic construct
  misc_feature 1..20: note = chemically synthesized
  source 1..20: mol_type = other DNA
ttgaatcagtggagcatagt

SEQ ID NO: 67615 - DNA, 20 bp, synthetic construct
  misc_feature 1..20: note = chemically synthesized
  source 1..20: mol_type = other DNA
taggttataatatgtgctta

SEQ ID NO: 67616 - DNA, 20 bp, synthetic construct
  misc_feature 1..20: note = chemically synthesized
  source 1..20: mol_type = other DNA
acttccttcagtataacatg

SEQ ID NO: 67617 - DNA, 20 bp, synthetic construct
  misc_feature 1..20: note = chemically synthesized
  source 1..20: mol_type = other DNA
gagcctcagtttcctaattt

SEQ ID NO: 67618 - DNA, 20 bp, synthetic construct
  misc_feature 1..20: note = chemically synthesized
  source 1..20: mol_type = other DNA
aaaatgctctttttagatta

SEQ ID NO: 67619 - DNA, 20 bp, synthetic construct
  misc_feature 1..20: note = chemically synthesized
  source 1..20: mol_type = other DNA
attgttcaatatcacacaac

SEQ ID NO: 67620 - DNA, 20 bp, synthetic construct
  misc_feature 1..20: note = chemically synthesized
  source 1..20: mol_type = other DNA
agcaggtggggcatgcttcc

SEQ ID NO: 67621 - DNA, 20 bp, synthetic construct
  misc_feature 1..20: note = chemically synthesized
  source 1..20: mol_type = other DNA
accaggtccagcatcacagt

SEQ ID NO: 67622 - DNA, 20 bp, synthetic construct
  misc_feature 1..20: note = chemically synthesized
  source 1..20: mol_type = other DNA
attttcattcttcctggaat

SEQ ID NO: 67623 - DNA, 20 bp, synthetic construct
  misc_feature 1..20: note = chemically synthesized
  source 1..20: mol_type = other DNA
agtgtgtggctatcttaggg

SEQ ID NO: 67624 - DNA, 20 bp, synthetic construct
  misc_feature 1..20: note = chemically synthesized
  source 1..20: mol_type = other DNA
ccaccctataatgttttttt

SEQ ID NO: 67625 - DNA, 20 bp, synthetic construct
  misc_feature 1..20: note = chemically synthesized
  source 1..20: mol_type = other DNA
ttattactacttcacaagga

SEQ ID NO: 67626 - DNA, 20 bp, synthetic construct
  misc_feature 1..20: note = chemically synthesized
  source 1..20: mol_type = other DNA
atatttattgctttcttggc

SEQ ID NO: 67627 - DNA, 20 bp, synthetic construct
  misc_feature 1..20: note = chemically synthesized
  source 1..20: mol_type = other DNA
gaacataaatttatattggc

SEQ ID NO: 67628 - DNA, 20 bp, synthetic construct
  misc_feature 1..20: note = chemically synthesized
  source 1..20: mol_type = other DNA
tatatatatttttttgcatg

SEQ ID NO: 67629 - DNA, 20 bp, synthetic construct
  misc_feature 1..20: note = chemically synthesized
  source 1..20: mol_type = other DNA
cagagctagacctcatttct

SEQ ID NO: 67630 - DNA, 20 bp, synthetic construct
  misc_feature 1..20: note = chemically synthesized
  source 1..20: mol_type = other DNA
acaaagaaacaacaacaaaa

SEQ ID NO: 67631 - DNA, 20 bp, synthetic construct
  misc_feature 1..20: note = chemically synthesized
  source 1..20: mol_type = other DNA
cctacaacaagtagccttta

SEQ ID NO: 67632 - DNA, 20 bp, synthetic construct
  misc_feature 1..20: note = chemically synthesized
  source 1..20: mol_type = other DNA
tgtacatttctcttttcttt

SEQ ID NO: 67633 - DNA, 20 bp, synthetic construct
  misc_feature 1..20: note = chemically synthesized
  source 1..20: mol_type = other DNA
agttgtgtggggatgagctc

SEQ ID NO: 67634 - DNA, 20 bp, synthetic construct
  misc_feature 1..20: note = chemically synthesized
  source 1..20: mol_type = other DNA
caaaacggggcatacagatc

SEQ ID NO: 67635 - DNA, 20 bp, synthetic construct
  misc_feature 1..20: note = chemically synthesized
  source 1..20: mol_type = other DNA
atctatcacacataagatag

SEQ ID NO: 67636 - DNA, 20 bp, synthetic construct
  misc_feature 1..20: note = chemically synthesized
  source 1..20: mol_type = other DNA
agagagttaataccttggaa

SEQ ID NO: 67637 - DNA, 20 bp, synthetic construct
  misc_feature 1..20: note = chemically synthesized
  source 1..20: mol_type = other DNA
tccaagcaatagatttattt

SEQ ID NO: 67638 - DNA, 20 bp, synthetic construct
  misc_feature 1..20: note = chemically synthesized
  source 1..20: mol_type = other DNA
tctacatcttacaaacacat

SEQ ID NO: 67639 - DNA, 20 bp, synthetic construct
  misc_feature 1..20: note = chemically synthesized
  source 1..20: mol_type = other DNA
ccgattttcattttcattgt

SEQ ID NO: 67640 - DNA, 20 bp, synthetic construct
  misc_feature 1..20: note = chemically synthesized
  source 1..20: mol_type = other DNA
gagcaatgtcaattaaaaaa

SEQ ID NO: 67641 - DNA, 20 bp, synthetic construct
  misc_feature 1..20: note = chemically synthesized
  source 1..20: mol_type = other DNA
cagttttgttgatcctttca

SEQ ID NO: 67642 - DNA, 20 bp, synthetic construct
  misc_feature 1..20: note = chemically synthesized
  source 1..20: mol_type = other DNA
ctatttggccatcttggctc

SEQ ID NO: 67643 - DNA, 20 bp, synthetic construct
  misc_feature 1..20: note = chemically synthesized
  source 1..20: mol_type = other DNA
aatattttctgcacagcaaa

SEQ ID NO: 67644 - DNA, 20 bp, synthetic construct
  misc_feature 1..20: note = chemically synthesized
  source 1..20: mol_type = other DNA
atcatcaggaaaatgcaaat

SEQ ID NO: 67645 - DNA, 20 bp, synthetic construct
  misc_feature 1..20: note = chemically synthesized
  source 1..20: mol_type = other DNA
aagttaacatagccattata

SEQ ID NO: 67646 - DNA, 20 bp, synthetic construct
  misc_feature 1..20: note = chemically synthesized
  source 1..20: mol_type = other DNA
cttcatgttatttccactct

SEQ ID NO: 67647 - DNA, 20 bp, synthetic construct
  misc_feature 1..20: note = chemically synthesized
  source 1..20: mol_type = other DNA
gaatgtgtggagagtaattc

SEQ ID NO: 67648 - DNA, 20 bp, synthetic construct
  misc_feature 1..20: note = chemically synthesized
  source 1..20: mol_type = other DNA
ctcaaattatctgctcttgg

SEQ ID NO: 67649 - DNA, 20 bp, synthetic construct
  misc_feature 1..20: note = chemically synthesized
  source 1..20: mol_type = other DNA
ctttctttctatgttgatag

SEQ ID NO: 67650 - DNA, 20 bp, synthetic construct
  misc_feature 1..20: note = chemically synthesized
  source 1..20: mol_type = other DNA
tctagtcccagaaggaggct

SEQ ID NO: 67651 - DNA, 20 bp, synthetic construct
  misc_feature 1..20: note = chemically synthesized
  source 1..20: mol_type = other DNA
caaattttgctcttgacaga

SEQ ID NO: 67652 - DNA, 20 bp, synthetic construct
  misc_feature 1..20: note = chemically synthesized
  source 1..20: mol_type = other DNA
tcacaggatgcatgtgagaa

SEQ ID NO: 67653 - DNA, 20 bp, synthetic construct
  misc_feature 1..20: note = chemically synthesized
  source 1..20: mol_type = other DNA
ccacttaaagatgagtggac

SEQ ID NO: 67654 - DNA, 20 bp, synthetic construct
  misc_feature 1..20: note = chemically synthesized
  source 1..20: mol_type = other DNA
aaaccaaactgtttaattcc

SEQ ID NO: 67655 - DNA, 20 bp, synthetic construct
  misc_feature 1..20: note = chemically synthesized
  source 1..20: mol_type = other DNA
caaatctgaatggcagagga

SEQ ID NO: 67656 - DNA, 20 bp, synthetic construct
  misc_feature 1..20: note = chemically synthesized
  source 1..20: mol_type = other DNA
ggtcataaagaccttgctga

SEQ ID NO: 67657 - DNA, 20 bp, synthetic construct
  misc_feature 1..20: note = chemically synthesized
  source 1..20: mol_type = other DNA
ccagttcacaatgaaataac

SEQ ID NO: 67658 - DNA, 20 bp, synthetic construct
  misc_feature 1..20: note = chemically synthesized
  source 1..20: mol_type = other DNA
caccaagtccaggcagggac

SEQ ID NO: 67659 - DNA, 20 bp, synthetic construct
  misc_feature 1..20: note = chemically synthesized
  source 1..20: mol_type = other DNA
tgtatcaatatgctttgtga

SEQ ID NO: 67660 - DNA, 20 bp, synthetic construct
  misc_feature 1..20: note = chemically synthesized
  source 1..20: mol_type = other DNA
tatttactaaaatcatttaa

SEQ ID NO: 67661 - DNA, 20 bp, synthetic construct
  misc_feature 1..20: note = chemically synthesized
  source 1..20: mol_type = other DNA
ttctttctgcattcacactc

SEQ ID NO: 67662 - DNA, 20 bp, synthetic construct
  misc_feature 1..20: note = chemically synthesized
  source 1..20: mol_type = other DNA
caccatagcttgaagtaaaa

SEQ ID NO: 67663 - DNA, 20 bp, synthetic construct
  misc_feature 1..20: note = chemically synthesized
  source 1..20: mol_type = other DNA
agcttgaagtaaaaaaaaac

SEQ ID NO: 67664 - DNA, 20 bp, synthetic construct
  misc_feature 1..20: note = chemically synthesized
  source 1..20: mol_type = other DNA
aaaaaaaaacaaaaaccaaa

SEQ ID NO: 67665 - DNA, 20 bp, synthetic construct
  misc_feature 1..20: note = chemically synthesized
  source 1..20: mol_type = other DNA
tactgctgcatcatgacttg

SEQ ID NO: 67666 - DNA, 20 bp, synthetic construct
  misc_feature 1..20: note = chemically synthesized
  source 1..20: mol_type = other DNA
cagactaatcattctgttcg

SEQ ID NO: 67667 - DNA, 20 bp, synthetic construct
  misc_feature 1..20: note = chemically synthesized
  source 1..20: mol_type = other DNA
gacacttccagcaatagaaa

SEQ ID NO: 67668 - DNA, 20 bp, synthetic construct
  misc_feature 1..20: note = chemically synthesized
  source 1..20: mol_type = other DNA
caattttgttgatctttttg

SEQ ID NO: 67669 - DNA, 20 bp, synthetic construct
  misc_feature 1..20: note = chemically synthesized
  source 1..20: mol_type = other DNA
atttgaaatgacacaccact

SEQ ID NO: 67670 - DNA, 20 bp, synthetic construct
  misc_feature 1..20: note = chemically synthesized
  source 1..20: mol_type = other DNA
tcacacacagccaagttgag

SEQ ID NO: 67671 - DNA, 20 bp, synthetic construct
  misc_feature 1..20: note = chemically synthesized
  source 1..20: mol_type = other DNA
tctttcttttaaaattaatt

SEQ ID NO: 67672 - DNA, 20 bp, synthetic construct
  misc_feature 1..20: note = chemically synthesized
  source 1..20: mol_type = other DNA
atgtgagttaaattacctga

SEQ ID NO: 67673 - DNA, 20 bp, synthetic construct
  misc_feature 1..20: note = chemically synthesized
  source 1..20: mol_type = other DNA
tccaacaagaccattgcaaa

SEQ ID NO: 67674 - DNA, 20 bp, synthetic construct
  misc_feature 1..20: note = chemically synthesized
  source 1..20: mol_type = other DNA
aatcatataacccagaaaat

SEQ ID NO: 67675 - DNA, 20 bp, synthetic construct
  misc_feature 1..20: note = chemically synthesized
  source 1..20: mol_type = other DNA
cagatataaagattatatgg

SEQ ID NO: 67676 - DNA, 20 bp, synthetic construct
  misc_feature 1..20: note = chemically synthesized
  source 1..20: mol_type = other DNA
atcaaggagaattttttttt

SEQ ID NO: 67677 - DNA, 20 bp, synthetic construct
  misc_feature 1..20: note = chemically synthesized
  source 1..20: mol_type = other DNA
atataattgataaattaaaa

SEQ ID NO: 67678 - DNA, 20 bp, synthetic construct
  misc_feature 1..20: note = chemically synthesized
  source 1..20: mol_type = other DNA
gtcttgtctgttttcatatt

SEQ ID NO: 67679 - DNA, 20 bp, synthetic construct
  misc_feature 1..20: note = chemically synthesized
  source 1..20: mol_type = other DNA
tttcagaggggataaaaatc

SEQ ID NO: 67680 - DNA, 20 bp, synthetic construct
  misc_feature 1..20: note = chemically synthesized
  source 1..20: mol_type = other DNA
gcatttcatagtccttactg

SEQ ID NO: 67681 - DNA, 20 bp, synthetic construct
  misc_feature 1..20: note = chemically synthesized
  source 1..20: mol_type = other DNA
gctgcatcccctggaaaaga

SEQ ID NO: 67682 - DNA, 20 bp, synthetic construct
  misc_feature 1..20: note = chemically synthesized
  source 1..20: mol_type = other DNA
tgaggacacaagaattttca

SEQ ID NO: 67683 - DNA, 20 bp, synthetic construct
  misc_feature 1..20: note = chemically synthesized
  source 1..20: mol_type = other DNA
ccatctttttaacttaggat

SEQ ID NO: 67684 - DNA, 20 bp, synthetic construct
  misc_feature 1..20: note = chemically synthesized
  source 1..20: mol_type = other DNA
tactacatttatagtaagaa

SEQ ID NO: 67685 - DNA, 20 bp, synthetic construct
  misc_feature 1..20: note = chemically synthesized
  source 1..20: mol_type = other DNA
catttatagtaagaagaaaa

SEQ ID NO: 67686 - DNA, 20 bp, synthetic construct
  misc_feature 1..20: note = chemically synthesized
  source 1..20: mol_type = other DNA
atagtaagaagaaaacaaaa

SEQ ID NO: 67687 - DNA, 20 bp, synthetic construct
  misc_feature 1..20: note = chemically synthesized
  source 1..20: mol_type = other DNA
tctagtggcagaaggaatat

SEQ ID NO: 67688 - DNA, 20 bp, synthetic construct
  misc_feature 1..20: note = chemically synthesized
  source 1..20: mol_type = other DNA
cagtcactctcacagaatgt

SEQ ID NO: 67689 - DNA, 20 bp, synthetic construct
  misc_feature 1..20: note = chemically synthesized
  source 1..20: mol_type = other DNA
aattataatgaatttgtctc

SEQ ID NO: 67690 - DNA, 20 bp, synthetic construct
  misc_feature 1..20: note = chemically synthesized
  source 1..20: mol_type = other DNA
catagagagtccaacttaag

SEQ ID NO: 67691 - DNA, 20 bp, synthetic construct
  misc_feature 1..20: note = chemically synthesized
  source 1..20: mol_type = other DNA
gtcctgttttcaatcattca

SEQ ID NO: 67692 - DNA, 20 bp, synthetic construct
  misc_feature 1..20: note = chemically synthesized
  source 1..20: mol_type = other DNA
ccaaaaatattgttccctat

SEQ ID NO: 67693 - DNA, 20 bp, synthetic construct
  misc_feature 1..20: note = chemically synthesized
  source 1..20: mol_type = other DNA
aatcttctctaactaatatt

SEQ ID NO: 67694 - DNA, 20 bp, synthetic construct
  misc_feature 1..20: note = chemically synthesized
  source 1..20: mol_type = other DNA
ctcagacatgtttttctatt

SEQ ID NO: 67695 - DNA, 20 bp, synthetic construct
  misc_feature 1..20: note = chemically synthesized
  source 1..20: mol_type = other DNA
agcaaattaatacaggaaca

SEQ ID NO: 67696 - DNA, 20 bp, synthetic construct
  misc_feature 1..20: note = chemically synthesized
  source 1..20: mol_type = other DNA
tgatcttcaacaaacctggt

SEQ ID NO: 67697 - DNA, 20 bp, synthetic construct
  misc_feature 1..20: note = chemically synthesized
  source 1..20: mol_type = other DNA
atgcattaaagacttaagtg

SEQ ID NO: 67698 - DNA, 20 bp, synthetic construct
  misc_feature 1..20: note = chemically synthesized
  source 1..20: mol_type = other DNA
aaagacttaagtgtaaaacc

SEQ ID NO: 67699 - DNA, 20 bp, synthetic construct
  misc_feature 1..20: note = chemically synthesized
  source 1..20: mol_type = other DNA
agtgtaaaacccaaaactat

SEQ ID NO: 67700 - DNA, 20 bp, synthetic construct
  misc_feature 1..20: note = chemically synthesized
  source 1..20: mol_type = other DNA
aaactataaaaactttagaa

SEQ ID NO: 67701 - DNA, 20 bp, synthetic construct
  misc_feature 1..20: note = chemically synthesized
  source 1..20: mol_type = other DNA
gatttcatgatgaaaatgtc

SEQ ID NO: 67702 - DNA, 20 bp, synthetic construct
  misc_feature 1..20: note = chemically synthesized
  source 1..20: mol_type = other DNA
atcattagagaaatgcaaat

SEQ ID NO: 67703 - DNA, 20 bp, synthetic construct
  misc_feature 1..20: note = chemically synthesized
  source 1..20: mol_type = other DNA
agtaaactaatgcaggaaca

SEQ ID NO: 67704 - DNA, 20 bp, synthetic construct
  misc_feature 1..20: note = chemically synthesized
  source 1..20: mol_type = other DNA
cattaaaaaaaaataatggc

SEQ ID NO: 67705 - DNA, 20 bp, synthetic construct
  misc_feature 1..20: note = chemically synthesized
  source 1..20: mol_type = other DNA
gcagagtgagtcatcaagtt

SEQ ID NO: 67706 - DNA, 20 bp, synthetic construct
  misc_feature 1..20: note = chemically synthesized
  source 1..20: mol_type = other DNA
tttaaatgttaatcttgcct

SEQ ID NO: 67707 - DNA, 20 bp, synthetic construct
  misc_feature 1..20: note = chemically synthesized
  source 1..20: mol_type = other DNA
ttgcctaaaaacaccctcac

SEQ ID NO: 67708 - DNA, 20 bp, synthetic construct
  misc_feature 1..20: note = chemically synthesized
  source 1..20: mol_type = other DNA
gcaagacttaccaagagaca

SEQ ID NO: 67709 - DNA, 20 bp, synthetic construct
  misc_feature 1..20: note = chemically synthesized
  source 1..20: mol_type = other DNA
gcaaatgttaactctgaaat

SEQ ID NO: 67710 - DNA, 20 bp, synthetic construct
  misc_feature 1..20: note = chemically synthesized
  source 1..20: mol_type = other DNA
atataggaagaacgacacag

SEQ ID NO: 67711 - DNA, 20 bp, synthetic construct
  misc_feature 1..20: note = chemically synthesized
  source 1..20: mol_type = other DNA
ctattctcctactacttggt

SEQ ID NO: 67712 - DNA, 20 bp, synthetic construct
  misc_feature 1..20: note = chemically synthesized
  source 1..20: mol_type = other DNA
tagtctagagctgtgctgtc

SEQ ID NO: 67713 - DNA, 20 bp, synthetic construct
  misc_feature 1..20: note = chemically synthesized
  source 1..20: mol_type = other DNA
aaattatttcacacatactt

SEQ ID NO: 67714 - DNA, 20 bp, synthetic construct
  misc_feature 1..20: note = chemically synthesized
  source 1..20: mol_type = other DNA
taacacgtcacaatgcaaat

SEQ ID NO: 67715 - DNA, 20 bp, synthetic construct
  misc_feature 1..20: note = chemically synthesized
  source 1..20: mol_type = other DNA
agcaaactatcgcaaggaca

SEQ ID NO: 67716 - DNA, 20 bp, synthetic construct
  misc_feature 1..20: note = chemically synthesized
  source 1..20: mol_type = other DNA
cacattgtgcacatgtaccc

SEQ ID NO: 67717 - DNA, 20 bp, synthetic construct
  misc_feature 1..20: note = chemically synthesized
  source 1..20: mol_type = other DNA
atacattattttggattaac

SEQ ID NO: 67718 - DNA, 20 bp, synthetic construct
  misc_feature 1..20: note = chemically synthesized
  source 1..20: mol_type = other DNA
accaaagtaacaggaaagac

SEQ ID NO: 67719 - DNA, 20 bp, synthetic construct
  misc_feature 1..20: note = chemically synthesized
  source 1..20: mol_type = other DNA
cagagaatatttcttcattc

SEQ ID NO: 67720 - DNA, 20 bp, synthetic construct
  misc_feature 1..20: note = chemically synthesized
  source 1..20: mol_type = other DNA
gctgctccacctttatccag

SEQ ID NO: 67721 - DNA, 20 bp, synthetic construct
  misc_feature 1..20: note = chemically synthesized
  source 1..20: mol_type = other DNA
ttctgctcataaatataata

SEQ ID NO: 67722 - DNA, 20 bp, synthetic construct
  misc_feature 1..20: note = chemically synthesized
  source 1..20: mol_type = other DNA
tttttatttttaaaattttt

SEQ ID NO: 67723 - DNA, 20 bp, synthetic construct
  misc_feature 1..20: note = chemically synthesized
  source 1..20: mol_type = other DNA
tactgaggccattttatgaa

SEQ ID NO: 67724 - DNA, 20 bp, synthetic construct
  misc_feature 1..20: note = chemically synthesized
  source 1..20: mol_type = other DNA
tcttggatcgtggcaaccaa

SEQ ID NO: 67725 - DNA, 20 bp, synthetic construct
  misc_feature 1..20: note = chemically synthesized
  source 1..20: mol_type = other DNA
agagagaggtaagaaggaca

SEQ ID NO: 67726 - DNA, 20 bp, synthetic construct
  misc_feature 1..20: note = chemically synthesized
  source 1..20: mol_type = other DNA
gtgatgcacgctatagtgca

SEQ ID NO: 67727 - DNA, 20 bp, synthetic construct
  misc_feature 1..20: note = chemically synthesized
  source 1..20: mol_type = other DNA
caatttccaaaaaaaatgag

SEQ ID NO: 67728 - DNA, 20 bp, synthetic construct
  misc_feature 1..20: note = chemically synthesized
  source 1..20: mol_type = other DNA
agaaaaactgcattaactga

SEQ ID NO: 67729 - DNA, 20 bp, synthetic construct
  misc_feature 1..20: note = chemically synthesized
  source 1..20: mol_type = other DNA
gtattttttctaattaggga

SEQ ID NO: 67730 - DNA, 20 bp, synthetic construct
  misc_feature 1..20: note = chemically synthesized
  source 1..20: mol_type = other DNA
aaccctgtcatctacagcat

SEQ ID NO: 67731 - DNA, 20 bp, synthetic construct
  misc_feature 1..20: note = chemically synthesized
  source 1..20: mol_type = other DNA
cagaacatataatctctatg

SEQ ID NO: 67732 - DNA, 20 bp, synthetic construct
  misc_feature 1..20: note = chemically synthesized
  source 1..20: mol_type = other DNA
cccaaaaaaatcttagaagg

SEQ ID NO: 67733 - DNA, 20 bp, synthetic construct
  misc_feature 1..20: note = chemically synthesized
  source 1..20: mol_type = other DNA
atccacaaatttcaaaaggg

SEQ ID NO: 67734 - DNA, 20 bp, synthetic construct
  misc_feature 1..20: note = chemically synthesized
  source 1..20: mol_type = other DNA
cagcttcctttaaattctct

SEQ ID NO: 67735 - DNA, 20 bp, synthetic construct
  misc_feature 1..20: note = chemically synthesized
  source 1..20: mol_type = other DNA
ttttctacaaagtcagcatg

SEQ ID NO: 67736 - DNA, 20 bp, synthetic construct
  misc_feature 1..20: note = chemically synthesized
  source 1..20: mol_type = other DNA
tggaactactctccattcag

SEQ ID NO: 67737 - DNA, 20 bp, synthetic construct
  misc_feature 1..20: note = chemically synthesized
  source 1..20: mol_type = other DNA
tgctactgataacaactagt

SEQ ID NO: 67738 - DNA, 20 bp, synthetic construct
  misc_feature 1..20: note = chemically synthesized
  source 1..20: mol_type = other DNA
gatctctacaaggagaacta

SEQ ID NO: 67739 - DNA, 20 bp, synthetic construct
  misc_feature 1..20: note = chemically synthesized
  source 1..20: mol_type = other DNA
gtcattcttcacagtattag

SEQ ID NO: 67740 - DNA, 20 bp, synthetic construct
  misc_feature 1..20: note = chemically synthesized
  source 1..20: mol_type = other DNA
ttgactaaggaaacacaata

SEQ ID NO: 67741 - DNA, 20 bp, synthetic construct
  misc_feature 1..20: note = chemically synthesized
  source 1..20: mol_type = other DNA
tgatcttcaacaacactgac

SEQ ID NO: 67742 - DNA, 20 bp, synthetic construct
  misc_feature 1..20: note = chemically synthesized
  source 1..20: mol_type = other DNA
aaatcaactgaaaatgaatt

SEQ ID NO: 67743 - DNA, 20 bp, synthetic construct
  misc_feature 1..20: note = chemically synthesized
  source 1..20: mol_type = other DNA
agcaaactatcacaaggaca

SEQ ID NO: 67744 - DNA, 20 bp, synthetic construct
  misc_feature 1..20: note = chemically synthesized
  source 1..20: mol_type = other DNA
ctaatgagagaaatgcaaat

SEQ ID NO: 67745 - DNA, 20 bp, synthetic construct
  misc_feature 1..20: note = chemically synthesized
  source 1..20: mol_type = other DNA
tagctatttttaaaaagcca

SEQ ID NO: 67746 - DNA, 20 bp, synthetic construct
  misc_feature 1..20: note = chemically synthesized
  source 1..20: mol_type = other DNA
aaattagttcaaccactgca

SEQ ID NO: 67747 - DNA, 20 bp, synthetic construct
  misc_feature 1..20: note = chemically synthesized
  source 1..20: mol_type = other DNA
tactgggtatatatccatag

SEQ ID NO: 67748 - DNA, 20 bp, synthetic construct
  misc_feature 1..20: note = chemically synthesized
  source 1..20: mol_type = other DNA
gcatgcaatatatccatgta

SEQ ID NO: 67749 - DNA, 20 bp, synthetic construct
  misc_feature 1..20: note = chemically synthesized
  source 1..20: mol_type = other DNA
aatgttgaaaatttaaaaga

SEQ ID NO: 67750 - DNA, 20 bp, synthetic construct
  misc_feature 1..20: note = chemically synthesized
  source 1..20: mol_type = other DNA
aaaagaaaaaacaaataaat

SEQ ID NO: 67751 - DNA, 20 bp, synthetic construct
  misc_feature 1..20: note = chemically synthesized
  source 1..20: mol_type = other DNA
tgctcatggattagcttcag

SEQ ID NO: 67752 - DNA, 20 bp, synthetic construct
  misc_feature 1..20: note = chemically synthesized
  source 1..20: mol_type = other DNA
tggcttttgttagaattcca

SEQ ID NO: 67753 - DNA, 20 bp, synthetic construct
  misc_feature 1..20: note = chemically synthesized
  source 1..20: mol_type = other DNA
aaaacattaacattctattt

SEQ ID NO: 67754 - DNA, 20 bp, synthetic construct
  misc_feature 1..20: note = chemically synthesized
  source 1..20: mol_type = other DNA
aacaaagaaaagttttctaa

SEQ ID NO: 67755 - DNA, 20 bp, synthetic construct
  misc_feature 1..20: note = chemically synthesized
  source 1..20: mol_type = other DNA
cagtttcacaagaaggtagt

SEQ ID NO: 67756 - DNA, 20 bp, synthetic construct
  misc_feature 1..20: note = chemically synthesized
  source 1..20: mol_type = other DNA
ttttcttatatcctgatcct

SEQ ID NO: 67757 - DNA, 20 bp, synthetic construct
  misc_feature 1..20: note = chemically synthesized
  source 1..20: mol_type = other DNA
aatactattgaatatggaga

SEQ ID NO: 67758 - DNA, 20 bp, synthetic construct
  misc_feature 1..20: note = chemically synthesized
  source 1..20: mol_type = other DNA
atggaactctactataatct

SEQ ID NO: 67759 - DNA, 20 bp, synthetic construct
  misc_feature 1..20: note = chemically synthesized
  source 1..20: mol_type = other DNA
gaataaaagaaatccaaatt

SEQ ID NO: 67760 - DNA, 20 bp, synthetic construct
  misc_feature 1..20: note = chemically synthesized
  source 1..20: mol_type = other DNA
aactgtagaactagactttt

SEQ ID NO: 67761 - DNA, 20 bp, synthetic construct
  misc_feature 1..20: note = chemically synthesized
  source 1..20: mol_type = other DNA
aattttgtattacaccaaat

SEQ ID NO: 67762 - DNA, 20 bp, synthetic construct
  misc_feature 1..20: note = chemically synthesized
  source 1..20: mol_type = other DNA
ttttctgtatgtccttgtat

SEQ ID NO: 67763 - DNA, 20 bp, synthetic construct
  misc_feature 1..20: note = chemically synthesized
  source 1..20: mol_type = other DNA
ttttcatactgaatcaattg

SEQ ID NO: 67764 - DNA, 20 bp, synthetic construct
  misc_feature 1..20: note = chemically synthesized
  source 1..20: mol_type = other DNA
ttggctaaggcccttcaaat

SEQ ID NO: 67765 - DNA, 20 bp, synthetic construct
  misc_feature 1..20: note = chemically synthesized
  source 1..20: mol_type = other DNA
ttctttcaacgtaatctcca

SEQ ID NO: 67766 - DNA, 20 bp, synthetic construct
  misc_feature 1..20: note = chemically synthesized
  source 1..20: mol_type = other DNA
tggtgtatttagacatcaac

SEQ ID NO: 67767 - DNA, 20 bp, synthetic construct
  misc_feature 1..20: note = chemically synthesized
  source 1..20: mol_type = other DNA
atataagttccataagtggt

SEQ ID NO: 67768 - DNA, 20 bp, synthetic construct
  misc_feature 1..20: note = chemically synthesized
  source 1..20: mol_type = other DNA
gccaaagtactaagaaggaa

SEQ ID NO: 67769 - DNA, 20 bp, synthetic construct
  misc_feature 1..20: note = chemically synthesized
  source 1..20: mol_type = other DNA
aaaggtctacaatttggcta

SEQ ID NO: 67770 - DNA, 20 bp, synthetic construct
  misc_feature 1..20: note = chemically synthesized
  source 1..20: mol_type = other DNA
atgctcagaaaccgcaaaga

SEQ ID NO: 67771 - DNA, 20 bp, synthetic construct
  misc_feature 1..20: note = chemically synthesized
  source 1..20: mol_type = other DNA
taattaccacacagttttaa

SEQ ID NO: 67772 - DNA, 20 bp, synthetic construct
  misc_feature 1..20: note = chemically synthesized
  source 1..20: mol_type = other DNA
ccaaacgcagctcaggtttt

SEQ ID NO: 67773 - DNA, 20 bp, synthetic construct
  misc_feature 1..20: note = chemically synthesized
  source 1..20: mol_type = other DNA
catgtttgtccctaatgtgc

SEQ ID NO: 67774 - DNA, 20 bp, synthetic construct
  misc_feature 1..20: note = chemically synthesized
  source 1..20: mol_type = other DNA
gaagattgtgagagaaaaaa

SEQ ID NO: 67775 - DNA, 20 bp, synthetic construct
  misc_feature 1..20: note = chemically synthesized
  source 1..20: mol_type = other DNA
aaaaatatcttctccacctg

SEQ ID NO: 67776 - DNA, 20 bp, synthetic construct
  misc_feature 1..20: note = chemically synthesized
  source 1..20: mol_type = other DNA
ttgcctccatcaagatgtca

SEQ ID NO: 67777 - DNA, 20 bp, synthetic construct
  misc_feature 1..20: note = chemically synthesized
  source 1..20: mol_type = other DNA
atagttttgataattaatgc

SEQ ID NO: 67778 - DNA, 20 bp, synthetic construct
  misc_feature 1..20: note = chemically synthesized
  source 1..20: mol_type = other DNA
ttgataagaaaatacttact

SEQ ID NO: 67779 - DNA, 20 bp, synthetic construct
  misc_feature 1..20: note = chemically synthesized
  source 1..20: mol_type = other DNA
catttggatgcaggaaaaat

SEQ ID NO: 67780 - DNA, 20 bp, synthetic construct
  misc_feature 1..20: note = chemically synthesized
  source 1..20: mol_type = other DNA
aaaggatgtctgtaagagta

SEQ ID NO: 67781 - DNA, 20 bp, synthetic construct
  misc_feature 1..20: note = chemically synthesized
  source 1..20: mol_type = other DNA
gaccaataaggaacagaaaa

SEQ ID NO: 67782 - DNA, 20 bp, synthetic construct
  misc_feature 1..20: note = chemically synthesized
  source 1..20: mol_type = other DNA
ggtaggttaagtaatttatc

SEQ ID NO: 67783 - DNA, 20 bp, synthetic construct
  misc_feature 1..20: note = chemically synthesized
  source 1..20: mol_type = other DNA
gttacaataacggaagagat

SEQ ID NO: 67784 - DNA, 20 bp, synthetic construct
  misc_feature 1..20: note = chemically synthesized
  source 1..20: mol_type = other DNA
tgatagaaaatgagaagaga

SEQ ID NO: 67785 - DNA, 20 bp, synthetic construct
  misc_feature 1..20: note = chemically synthesized
  source 1..20: mol_type = other DNA
aaatagttaggaataatgta

SEQ ID NO: 67786 - DNA, 20 bp, synthetic construct
  misc_feature 1..20: note = chemically synthesized
  source 1..20: mol_type = other DNA
tttttactgcttaaacataa

SEQ ID NO: 67787 - DNA, 20 bp, synthetic construct
  misc_feature 1..20: note = chemically synthesized
  source 1..20: mol_type = other DNA
tgcaccaatcagtgccctgt

SEQ ID NO: 67788 - DNA, 20 bp, synthetic construct
  misc_feature 1..20: note = chemically synthesized
  source 1..20: mol_type = other DNA
tcctcacggtgactaacgca

SEQ ID NO: 67789 - DNA, 20 bp, synthetic construct
  misc_feature 1..20: note = chemically synthesized
  source 1..20: mol_type = other DNA
tattgatagtcacaatgaca

SEQ ID NO: 67790 - DNA, 20 bp, synthetic construct
  misc_feature 1..20: note = chemically synthesized
  source 1..20: mol_type = other DNA
agctatacttaactcacttg

SEQ ID NO: 67791 - DNA, 20 bp, synthetic construct
  misc_feature 1..20: note = chemically synthesized
  source 1..20: mol_type = other DNA
aaaggaagtcaaaagatgtg

SEQ ID NO: 67792 - DNA, 20 bp, synthetic construct
  misc_feature 1..20: note = chemically synthesized
  source 1..20: mol_type = other DNA
gatttaagcctttttggtca

SEQ ID NO: 67793 - DNA, 20 bp, synthetic construct
  misc_feature 1..20: note = chemically synthesized
  source 1..20: mol_type = other DNA
tgcctcacgaaacagaatac

SEQ ID NO: 67794 - DNA, 20 bp, synthetic construct
  misc_feature 1..20: note = chemically synthesized
  source 1..20: mol_type = other DNA
aatacaaaaacaaacaaaca

SEQ ID NO: 67795 - DNA, 20 bp, synthetic construct
  misc_feature 1..20: note = chemically synthesized
  source 1..20: mol_type = other DNA
tgtctattgtcaatttatgg

SEQ ID NO: 67796 - DNA, 20 bp, synthetic construct
  misc_feature 1..20: note = chemically synthesized
  source 1..20: mol_type = other DNA
caatcattcttgctgcaggt

SEQ ID NO: 67797 - DNA, 20 bp, synthetic construct
  misc_feature 1..20: note = chemically synthesized
  source 1..20: mol_type = other DNA
ccccattttactacagttaa

SEQ ID NO: 67798 - DNA, 20 bp, synthetic construct
  misc_feature 1..20: note = chemically synthesized
  source 1..20: mol_type = other DNA
atggttaactttgtgaagtt

SEQ ID NO: 67799 - DNA, 20 bp, synthetic construct
  misc_feature 1..20: note = chemically synthesized
  source 1..20: mol_type = other DNA
tcctcacgctaactccataa

SEQ ID NO: 67800 - DNA, 20 bp, synthetic construct
  misc_feature 1..20: note = chemically synthesized
  source 1..20: mol_type = other DNA
agacagtgttttttccacag

SEQ ID NO: 67801 - DNA, 20 bp, synthetic construct
  misc_feature 1..20: note = chemically synthesized
  source 1..20: mol_type = other DNA
aattataagcagacacttga

SEQ ID NO: 67802 - DNA, 20 bp, synthetic construct
  misc_feature 1..20: note = chemically synthesized
  source 1..20: mol_type = other DNA
tttatcataatactgtaaca

SEQ ID NO: 67803 - DNA, 20 bp, synthetic construct
  misc_feature 1..20: note = chemically synthesized
  source 1..20: mol_type = other DNA
ttagcatccagcaggtgctt

SEQ ID NO: 67804 - DNA, 20 bp, synthetic construct
  misc_feature 1..20: note = chemically synthesized
  source 1..20: mol_type = other DNA
ggagaagctgaccacctgac

SEQ ID NO: 67805 - DNA, 20 bp, synthetic construct
  misc_feature 1..20: note = chemically synthesized
  source 1..20: mol_type = other DNA
gatatggaagaggaaggcat

SEQ ID NO: 67806 - DNA, 20 bp, synthetic construct
  misc_feature 1..20: note = chemically synthesized
  source 1..20: mol_type = other DNA
aaggcatgaaaacaggaaaa

SEQ ID NO: 67807 - DNA, 20 bp, synthetic construct
  misc_feature 1..20: note = chemically synthesized
  source 1..20: mol_type = other DNA
tgaaggactacaagaggatg

SEQ ID NO: 67808 - DNA, 20 bp, synthetic construct
  misc_feature 1..20: note = chemically synthesized
  source 1..20: mol_type = other DNA
gacataatgcttgtgggaga

SEQ ID NO: 67809 - DNA, 20 bp, synthetic construct
  misc_feature 1..20: note = chemically synthesized
  source 1..20: mol_type = other DNA
aagatttagtgatgctatgt

SEQ ID NO: 67810 - DNA, 20 bp, synthetic construct
  misc_feature 1..20: note = chemically synthesized
  source 1..20: mol_type = other DNA
aatcacaaattaattagaaa

SEQ ID NO: 67811 - DNA, 20 bp, synthetic construct
  misc_feature 1..20: note = chemically synthesized
  source 1..20: mol_type = other DNA
ttcaattctacacatggagg

SEQ ID NO: 67812 - DNA, 20 bp, synthetic construct
  misc_feature 1..20: note = chemically synthesized
  source 1..20: mol_type = other DNA
gagcgagactctgtctaaag

SEQ ID NO: 67813 - DNA, 20 bp, synthetic construct
  misc_feature 1..20: note = chemically synthesized
  source 1..20: mol_type = other DNA
gactctgtctaaagaaaaac

SEQ ID NO: 67814 - DNA, 20 bp, synthetic construct
  misc_feature 1..20: note = chemically synthesized
  source 1..20: mol_type = other DNA
caaacaaacaaacaaacaaa

SEQ ID NO: 67815 - DNA, 20 bp, synthetic construct
  misc_feature 1..20: note = chemically synthesized
  source 1..20: mol_type = other DNA
gtttcctatatcatttataa

SEQ ID NO: 67816 - DNA, 20 bp, synthetic construct
  misc_feature 1..20: note = chemically synthesized
  source 1..20: mol_type = other DNA
ctttccactatcaagtccat

SEQ ID NO: 67817 - DNA, 20 bp, synthetic construct
  misc_feature 1..20: note = chemically synthesized
  source 1..20: mol_type = other DNA
gtaggctgagatttgctctt

SEQ ID NO: 67818 - DNA, 20 bp, synthetic construct
  misc_feature 1..20: note = chemically synthesized
  source 1..20: mol_type = other DNA
tcagtcaggtaaaagtaaag

SEQ ID NO: 67819 - DNA, 20 bp, synthetic construct
  misc_feature 1..20: note = chemically synthesized
  source 1..20: mol_type = other DNA
catcagtgttatgtgaggtt

SEQ ID NO: 67820 - DNA, 20 bp, synthetic construct
  misc_feature 1..20: note = chemically synthesized
  source 1..20: mol_type = other DNA
cacacacatatatatatata

SEQ ID NO: 67821 - DNA, 20 bp, synthetic construct
  misc_feature 1..20: note = chemically synthesized
  source 1..20: mol_type = other DNA
ttgcccatctctgttgatta

SEQ ID NO: 67822 - DNA, 20 bp, synthetic construct
  misc_feature 1..20: note = chemically synthesized
  source 1..20: mol_type = other DNA
catctctgttgattagaaaa

SEQ ID NO: 67823 - DNA, 20 bp, synthetic construct
  misc_feature 1..20: note = chemically synthesized
  source 1..20: mol_type = other DNA
aataagcccctaagctccca

SEQ ID NO: 67824 - DNA, 20 bp, synthetic construct
  misc_feature 1..20: note = chemically synthesized
  source 1..20: mol_type = other DNA
catcctcacccttagtgaca

SEQ ID NO: 67825 - DNA, 20 bp, synthetic construct
  misc_feature 1..20: note = chemically synthesized
  source 1..20: mol_type = other DNA
aggcaatgcaatttaattaa

SEQ ID NO: 67826 - DNA, 20 bp, synthetic construct
  misc_feature 1..20: note = chemically synthesized
  source 1..20: mol_type = other DNA
ctgaacttaaaataaaagtt

SEQ ID NO: 67827 - DNA, 20 bp, synthetic construct
  misc_feature 1..20: note = chemically synthesized
  source 1..20: mol_type = other DNA
atttcttagataataccatg

SEQ ID NO: 67828 - DNA, 20 bp, synthetic construct
  misc_feature 1..20: note = chemically synthesized
  source 1..20: mol_type = other DNA
atctgtagcaaattccccct

SEQ ID NO: 67829 - DNA, 20 bp, synthetic construct
  misc_feature 1..20: note = chemically synthesized
  source 1..20: mol_type = other DNA
tgtatattatttgatgcaat

SEQ ID NO: 67830 - DNA, 20 bp, synthetic construct
  misc_feature 1..20: note = chemically synthesized
  source 1..20: mol_type = other DNA
cttcctttggagatgctatt

SEQ ID NO: 67831 - DNA, 20 bp, synthetic construct
  misc_feature 1..20: note = chemically synthesized
  source 1..20: mol_type = other DNA
agacttctagtgagcataac

SEQ ID NO: 67832 - DNA, 20 bp, synthetic construct
  misc_feature 1..20: note = chemically synthesized
  source 1..20: mol_type = other DNA
aattagacaattgcttaaag

SEQ ID NO: 67833 - DNA, 20 bp, synthetic construct
  misc_feature 1..20: note = chemically synthesized
  source 1..20: mol_type = other DNA
ggtacatgtcacttttcatt

SEQ ID NO: 67834 - DNA, 20 bp, synthetic construct
  misc_feature 1..20: note = chemically synthesized
  source 1..20: mol_type = other DNA
tgtcacttttcattaaaaac

SEQ ID NO: 67835 - DNA, 20 bp, synthetic construct
  misc_feature 1..20: note = chemically synthesized
  source 1..20: mol_type = other DNA
cttttcattaaaaacaaaaa

SEQ ID NO: 67836 - DNA, 20 bp, synthetic construct
  misc_feature 1..20: note = chemically synthesized
  source 1..20: mol_type = other DNA
cattaaaaacaaaaacaaaa

SEQ ID NO: 67837 - DNA, 20 bp, synthetic construct
  misc_feature 1..20: note = chemically synthesized
  source 1..20: mol_type = other DNA
aaaacaaaaacaaaacaaaa

SEQ ID NO: 67838 - DNA, 20 bp, synthetic construct
  misc_feature 1..20: note = chemically synthesized
  source 1..20: mol_type = other DNA
actaataaaggcttaaattc

SEQ ID NO: 67839 - DNA, 20 bp, synthetic construct
  misc_feature 1..20: note = chemically synthesized
  source 1..20: mol_type = other DNA
tttagctcccacagatgaat

SEQ ID NO: 67840 - DNA, 20 bp, synthetic construct
  misc_feature 1..20: note = chemically synthesized
  source 1..20: mol_type = other DNA
tctcagcatttgtttttctg

SEQ ID NO: 67841 - DNA, 20 bp, synthetic construct
  misc_feature 1..20: note = chemically synthesized
  source 1..20: mol_type = other DNA
ttgttggattgggttaattc

SEQ ID NO: 67842 - DNA, 20 bp, synthetic construct
  misc_feature 1..20: note = chemically synthesized
  source 1..20: mol_type = other DNA
tctctctttttcttctcccc

SEQ ID NO: 67843 - DNA, 20 bp, synthetic construct
  misc_feature 1..20: note = chemically synthesized
  source 1..20: mol_type = other DNA
ggcaataagggctttttaag

SEQ ID NO: 67844 - DNA, 20 bp, synthetic construct
  misc_feature 1..20: note = chemically synthesized
  source 1..20: mol_type = other DNA
atacatgggaaagaatgctt

SEQ ID NO: 67845 - DNA, 20 bp, synthetic construct
  misc_feature 1..20: note = chemically synthesized
  source 1..20: mol_type = other DNA
gataaatggggaagttgttt

SEQ ID NO: 67846 - DNA, 20 bp, synthetic construct
  misc_feature 1..20: note = chemically synthesized
  source 1..20: mol_type = other DNA
tcatggatcgagttcagaga

SEQ ID NO: 67847 - DNA, 20 bp, synthetic construct
  misc_feature 1..20: note = chemically synthesized
  source 1..20: mol_type = other DNA
gttcagagaaaaaacaaaag

SEQ ID NO: 67848 - DNA, 20 bp, synthetic construct
  misc_feature 1..20: note = chemically synthesized
  source 1..20: mol_type = other DNA
cccaaagaaaaaataaagaa

SEQ ID NO: 67849 - DNA, 20 bp, synthetic construct
  misc_feature 1..20: note = chemically synthesized
  source 1..20: mol_type = other DNA
gtgtgtggactattagtcaa

SEQ ID NO: 67850 - DNA, 20 bp, synthetic construct
  misc_feature 1..20: note = chemically synthesized
  source 1..20: mol_type = other DNA
cgagcatagaagagctacac

SEQ ID NO: 67851 - DNA, 20 bp, synthetic construct
  misc_feature 1..20: note = chemically synthesized
  source 1..20: mol_type = other DNA
gaacttaagagataatggcc

SEQ ID NO: 67852 - DNA, 20 bp, synthetic construct
  misc_feature 1..20: note = chemically synthesized
  source 1..20: mol_type = other DNA
aaaaatcctggacctatgcc

SEQ ID NO: 67853 - DNA, 20 bp, synthetic construct
  misc_feature 1..20: note = chemically synthesized
  source 1..20: mol_type = other DNA
gagctacagacaagaaggtg

SEQ ID NO: 67854 - DNA, 20 bp, synthetic construct
  misc_feature 1..20: note = chemically synthesized
  source 1..20: mol_type = other DNA
tatcttctatggtgggagaa

SEQ ID NO: 67855 - DNA, 20 bp, synthetic construct
  misc_feature 1..20: note = chemically synthesized
  source 1..20: mol_type = other DNA
cctatttttgttattcgttt

SEQ ID NO: 67856 - DNA, 20 bp, synthetic construct
  misc_feature 1..20: note = chemically synthesized
  source 1..20: mol_type = other DNA
tttgtcctttttttttttag

SEQ ID NO: 67857 - DNA, 20 bp, synthetic construct
  misc_feature 1..20: note = chemically synthesized
  source 1..20: mol_type = other DNA
atcatggatcactttcagag

SEQ ID NO: 67858 - DNA, 20 bp, synthetic construct
  misc_feature 1..20: note = chemically synthesized
  source 1..20: mol_type = other DNA
gatcactttcagagaaaaac

SEQ ID NO: 67859 - DNA, 20 bp, synthetic construct
  misc_feature 1..20: note = chemically synthesized
  source 1..20: mol_type = other DNA
aaaaacaaactaaccaaaag

SEQ ID NO: 67860 - DNA, 20 bp, synthetic construct
  misc_feature 1..20: note = chemically synthesized
  source 1..20: mol_type = other DNA
ccaaaagcaaaacagaacca

SEQ ID NO: 67861 - DNA, 20 bp, synthetic construct
  misc_feature 1..20: note = chemically synthesized
  source 1..20: mol_type = other DNA
tgtgtggactattagtcaat

SEQ ID NO: 67862 - DNA, 20 bp, synthetic construct
  misc_feature 1..20: note = chemically synthesized
  source 1..20: mol_type = other DNA
tgagcatagaagagctacgc

SEQ ID NO: 67863 - DNA, 20 bp, synthetic construct
  misc_feature 1..20: note = chemically synthesized
  source 1..20: mol_type = other DNA
aaaaatcctggacctatgcc

SEQ ID NO: 67864 - DNA, 20 bp, synthetic construct
  misc_feature 1..20: note = chemically synthesized
  source 1..20: mol_type = other DNA
gagctagagacaagaaggta

SEQ ID NO: 67865 - DNA, 20 bp, synthetic construct
  misc_feature 1..20: note = chemically synthesized
  source 1..20: mol_type = other DNA
aagggaagaataaattagag

SEQ ID NO: 67866 - DNA, 20 bp, synthetic construct
  misc_feature 1..20: note = chemically synthesized
  source 1..20: mol_type = other DNA
ttccctcatttttgttgttt

SEQ ID NO: 67867 - DNA, 20 bp, synthetic construct
  misc_feature 1..20: note = chemically synthesized
  source 1..20: mol_type = other DNA
cagccttcagaaatgtgaga

SEQ ID NO: 67868 - DNA, 20 bp, synthetic construct
  misc_feature 1..20: note = chemically synthesized
  source 1..20: mol_type = other DNA
cagtagaagcaataatcatg

SEQ ID NO: 67869 - DNA, 20 bp, synthetic construct
  misc_feature 1..20: note = chemically synthesized
  source 1..20: mol_type = other DNA
actttccccatgttcctaag

SEQ ID NO: 67870 - DNA, 20 bp, synthetic construct
  misc_feature 1..20: note = chemically synthesized
  source 1..20: mol_type = other DNA
actgactactaaatggatta

SEQ ID NO: 67871 - DNA, 20 bp, synthetic construct
  misc_feature 1..20: note = chemically synthesized
  source 1..20: mol_type = other DNA
tggattaaaaaacacagtaa

SEQ ID NO: 67872 - DNA, 20 bp, synthetic construct
  misc_feature 1..20: note = chemically synthesized
  source 1..20: mol_type = other DNA
aaagaaagaaagaaagaaaa

SEQ ID NO: 67873 - DNA, 20 bp, synthetic construct
  misc_feature 1..20: note = chemically synthesized
  source 1..20: mol_type = other DNA
aatgtagtctcaagagaatt

SEQ ID NO: 67874 - DNA, 20 bp, synthetic construct
  misc_feature 1..20: note = chemically synthesized
  source 1..20: mol_type = other DNA
aaactcgaatgtccatcttg

SEQ ID NO: 67875 - DNA, 20 bp, synthetic construct
  misc_feature 1..20: note = chemically synthesized
  source 1..20: mol_type = other DNA
cttaccatttgatagctctg

SEQ ID NO: 67876 - DNA, 20 bp, synthetic construct
  misc_feature 1..20: note = chemically synthesized
  source 1..20: mol_type = other DNA
aattattagcaatcaatatt

SEQ ID NO: 67877 - DNA, 20 bp, synthetic construct
  misc_feature 1..20: note = chemically synthesized
  source 1..20: mol_type = other DNA
gcagtgattgcacagaactg

SEQ ID NO: 67878 - DNA, 20 bp, synthetic construct
  misc_feature 1..20: note = chemically synthesized
  source 1..20: mol_type = other DNA
gtatgtagcaccctcaaacc

SEQ ID NO: 67879 - DNA, 20 bp, synthetic construct
  misc_feature 1..20: note = chemically synthesized
  source 1..20: mol_type = other DNA
ttctccagtttcattaatcc

SEQ ID NO: 67880 - DNA, 20 bp, synthetic construct
  misc_feature 1..20: note = chemically synthesized
  source 1..20: mol_type = other DNA
tttcacattcacctttagtg

SEQ ID NO: 67881 - DNA, 20 bp, synthetic construct
  misc_feature 1..20: note = chemically synthesized
  source 1..20: mol_type = other DNA
tctagatgttagtaacatca

SEQ ID NO: 67882 - DNA, 20 bp, synthetic construct
  misc_feature 1..20: note = chemically synthesized
  source 1..20: mol_type = other DNA
gcatcaaagtatcagccata

SEQ ID NO: 67883 - DNA, 20 bp, synthetic construct
  misc_feature 1..20: note = chemically synthesized
  source 1..20: mol_type = other DNA
atgtattgataagataatat

SEQ ID NO: 67884 - DNA, 20 bp, synthetic construct
  misc_feature 1..20: note = chemically synthesized
  source 1..20: mol_type = other DNA
gggtatttcacttgttatac

SEQ ID NO: 67885 - DNA, 20 bp, synthetic construct
  misc_feature 1..20: note = chemically synthesized
  source 1..20: mol_type = other DNA
tttgaattcagaaaagagtg

SEQ ID NO: 67886 - DNA, 20 bp, synthetic construct
  misc_feature 1..20: note = chemically synthesized
  source 1..20: mol_type = other DNA
tttatattgagtcaacttgt

SEQ ID NO: 67887 - DNA, 20 bp, synthetic construct
  misc_feature 1..20: note = chemically synthesized
  source 1..20: mol_type = other DNA
tacattccactatattagcc

SEQ ID NO: 67888 - DNA, 20 bp, synthetic construct
  misc_feature 1..20: note = chemically synthesized
  source 1..20: mol_type = other DNA
gctatatacacatacaaaat

SEQ ID NO: 67889 - DNA, 20 bp, synthetic construct
  misc_feature 1..20: note = chemically synthesized
  source 1..20: mol_type = other DNA
gaaagaaaatatttattcaa

SEQ ID NO: 67890 - DNA, 20 bp, synthetic construct
  misc_feature 1..20: note = chemically synthesized
  source 1..20: mol_type = other DNA
gaccttatgatcttgatagg

SEQ ID NO: 67891 - DNA, 20 bp, synthetic construct
  misc_feature 1..20: note = chemically synthesized
  source 1..20: mol_type = other DNA
cccaaatttaaaatgaaagt

SEQ ID NO: 67892 - DNA, 20 bp, synthetic construct
  misc_feature 1..20: note = chemically synthesized
  source 1..20: mol_type = other DNA
gctgcttttgaaacaaatga

SEQ ID NO: 67893 - DNA, 20 bp, synthetic construct
  misc_feature 1..20: note = chemically synthesized
  source 1..20: mol_type = other DNA
agactagggccattctgata

SEQ ID NO: 67894 - DNA, 20 bp, synthetic construct
  misc_feature 1..20: note = chemically synthesized
  source 1..20: mol_type = other DNA
atagttcatcatttaaaaaa

SEQ ID NO: 67895 - DNA, 20 bp, synthetic construct
  misc_feature 1..20: note = chemically synthesized
  source 1..20: mol_type = other DNA
agaaaacaaaatagaaaaag

SEQ ID NO: 67896 - DNA, 20 bp, synthetic construct
  misc_feature 1..20: note = chemically synthesized
  source 1..20: mol_type = other DNA
gggatgtgaaacagggtctt

SEQ ID NO: 67897 - DNA, 20 bp, synthetic construct
  misc_feature 1..20: note = chemically synthesized
  source 1..20: mol_type = other DNA
tcttgaaaactgtctaaatc

SEQ ID NO: 67898 - DNA, 20 bp, synthetic construct
  misc_feature 1..20: note = chemically synthesized
  source 1..20: mol_type = other DNA
ttgaatcaaggaaatgattt

SEQ ID NO: 67899 - DNA, 20 bp, synthetic construct
  misc_feature 1..20: note = chemically synthesized
  source 1..20: mol_type = other DNA
gttttttatctcttgtttcc

SEQ ID NO: 67900 - DNA, 20 bp, synthetic construct
  misc_feature 1..20: note = chemically synthesized
  source 1..20: mol_type = other DNA
gcatgcatgagcaaattaag

SEQ ID NO: 67901 - DNA, 20 bp, synthetic construct
  misc_feature 1..20: note = chemically synthesized
  source 1..20: mol_type = other DNA
caaagctgaattatggtaga

SEQ ID NO: 67902 - DNA, 20 bp, synthetic construct
  misc_feature 1..20: note = chemically synthesized
  source 1..20: mol_type = other DNA
ttgtgtaataagaaaattgg

SEQ ID NO: 67903 - DNA, 20 bp, synthetic construct
  misc_feature 1..20: note = chemically synthesized
  source 1..20: mol_type = other DNA
atacattaagtaacttaaaa

SEQ ID NO: 67904 - DNA, 20 bp, synthetic construct
  misc_feature 1..20: note = chemically synthesized
  source 1..20: mol_type = other DNA
catctggattctgcctaata

SEQ ID NO: 67905 - DNA, 20 bp, synthetic construct
  misc_feature 1..20: note = chemically synthesized
  source 1..20: mol_type = other DNA
atgtgggaggtcagtgcatt

SEQ ID NO: 67906 - DNA, 20 bp, synthetic construct
  misc_feature 1..20: note = chemically synthesized
  source 1..20: mol_type = other DNA
agaggtctacttgaagaagg

SEQ ID NO: 67907 - DNA, 20 bp, synthetic construct
  misc_feature 1..20: note = chemically synthesized
  source 1..20: mol_type = other DNA
taaagaattaaactaagacc

SEQ ID NO: 67908 - DNA, 20 bp, synthetic construct
  misc_feature 1..20: note = chemically synthesized
  source 1..20: mol_type = other DNA
aactaaaaaatttccacaca

SEQ ID NO: 67909 - DNA, 20 bp, synthetic construct
  misc_feature 1..20: note = chemically synthesized
  source 1..20: mol_type = other DNA
aaaaatttccacacaaaaaa

SEQ ID NO: 67910 - DNA, 20 bp, synthetic construct
  misc_feature 1..20: note = chemically synthesized
  source 1..20: mol_type = other DNA
attgatgaacctggaggatg

SEQ ID NO: 67911 - DNA, 20 bp, synthetic construct
  misc_feature 1..20: note = chemically synthesized
  source 1..20: mol_type = other DNA
ttcacaaggtatacatatat

SEQ ID NO: 67912 - DNA, 20 bp, synthetic construct
  misc_feature 1..20: note = chemically synthesized
  source 1..20: mol_type = other DNA
aatagacatcacatgaatta

SEQ ID NO: 67913 - DNA, 20 bp, synthetic construct
  misc_feature 1..20: note = chemically synthesized
  source 1..20: mol_type = other DNA
tttgactgtttactcttttc

SEQ ID NO: 67914 - DNA, 20 bp, synthetic construct
  misc_feature 1..20: note = chemically synthesized
  source 1..20: mol_type = other DNA
agtggaataaatagaaatcc

SEQ ID NO: 67915 - DNA, 20 bp, synthetic construct
  misc_feature 1..20: note = chemically synthesized
  source 1..20: mol_type = other DNA
ttaaatttagcttggaaata

SEQ ID NO: 67916 - DNA, 20 bp, synthetic construct
  misc_feature 1..20: note = chemically synthesized
  source 1..20: mol_type = other DNA
aaggtaaaattcagtcacga

SEQ ID NO: 67917 - DNA, 20 bp, synthetic construct
  misc_feature 1..20: note = chemically synthesized
  source 1..20: mol_type = other DNA
ctcatcgctactaaaaatat

SEQ ID NO: 67918 - DNA, 20 bp, synthetic construct
  misc_feature 1..20: note = chemically synthesized
  source 1..20: mol_type = other DNA
tggctggtactcctctaaga

SEQ ID NO: 67919 - DNA, 20 bp, synthetic construct
  misc_feature 1..20: note = chemically synthesized
  source 1..20: mol_type = other DNA
ccaccgctgttgatacccag

SEQ ID NO: 67920 - DNA, 20 bp, synthetic construct
  misc_feature 1..20: note = chemically synthesized
  source 1..20: mol_type = other DNA
agggtcctgactgttagaag

SEQ ID NO: 67921 - DNA, 20 bp, synthetic construct
  misc_feature 1..20: note = chemically synthesized
  source 1..20: mol_type = other DNA
acagaaaggacatccacacc

SEQ ID NO: 67922 - DNA, 20 bp, synthetic construct
  misc_feature 1..20: note = chemically synthesized
  source 1..20: mol_type = other DNA
catcaaagaccaaaggtaga

SEQ ID NO: 67923 - DNA, 20 bp, synthetic construct
  misc_feature 1..20: note = chemically synthesized
  source 1..20: mol_type = other DNA
atggggaaaaagcagagcag

SEQ ID NO: 67924 - DNA, 20 bp, synthetic construct
  misc_feature 1..20: note = chemically synthesized
  source 1..20: mol_type = other DNA
gaacaaacggcaaagaagta

SEQ ID NO: 67925 - DNA, 20 bp, synthetic construct
  misc_feature 1..20: note = chemically synthesized
  source 1..20: mol_type = other DNA
ttaaaggacctgatggagct

SEQ ID NO: 67926 - DNA, 20 bp, synthetic construct
  misc_feature 1..20: note = chemically synthesized
  source 1..20: mol_type = other DNA
gggagaatggaaccaagttg

SEQ ID NO: 67927 - DNA, 20 bp, synthetic construct
  misc_feature 1..20: note = chemically synthesized
  source 1..20: mol_type = other DNA
caactagtatcagccactgc

SEQ ID NO: 67928 - DNA, 20 bp, synthetic construct
  misc_feature 1..20: note = chemically synthesized
  source 1..20: mol_type = other DNA
gaatatctaccaagcaaatg

SEQ ID NO: 67929 - DNA, 20 bp, synthetic construct
  misc_feature 1..20: note = chemically synthesized
  source 1..20: mol_type = other DNA
gttgcaatcctagtctctga

SEQ ID NO: 67930 - DNA, 20 bp, synthetic construct
  misc_feature 1..20: note = chemically synthesized
  source 1..20: mol_type = other DNA
tacaggagcacccagattca

SEQ ID NO: 67931 - DNA, 20 bp, synthetic construct
  misc_feature 1..20: note = chemically synthesized
  source 1..20: mol_type = other DNA
gcaccacaccacacctattc

SEQ ID NO: 67932 - DNA, 20 bp, synthetic construct
  misc_feature 1..20: note = chemically synthesized
  source 1..20: mol_type = other DNA
tcaggattaagaaactcact

SEQ ID NO: 67933 - DNA, 20 bp, synthetic construct
  misc_feature 1..20: note = chemically synthesized
  source 1..20: mol_type = other DNA
acaccctaacatcacaatta

SEQ ID NO: 67934 - DNA, 20 bp, synthetic construct
  misc_feature 1..20: note = chemically synthesized
  source 1..20: mol_type = other DNA
tgaaggacatagagacacaa

SEQ ID NO: 67935 - DNA, 20 bp, synthetic construct
  misc_feature 1..20: note = chemically synthesized
  source 1..20: mol_type = other DNA
attcaacaacgcttcatgct

SEQ ID NO: 67936 - DNA, 20 bp, synthetic construct
  misc_feature 1..20: note = chemically synthesized
  source 1..20: mol_type = other DNA
caatatcatactgagtggac

SEQ ID NO: 67937 - DNA, 20 bp, synthetic construct
  misc_feature 1..20: note = chemically synthesized
  source 1..20: mol_type = other DNA
aaactggaagcattcccttt

SEQ ID NO: 67938 - DNA, 20 bp, synthetic construct
  misc_feature 1..20: note = chemically synthesized
  source 1..20: mol_type = other DNA
atgacatgattgtatatcta

SEQ ID NO: 67939 - DNA, 20 bp, synthetic construct
  misc_feature 1..20: note = chemically synthesized
  source 1..20: mol_type = other DNA
actttcttcacagaactgga

SEQ ID NO: 67940 - DNA, 20 bp, synthetic construct
  misc_feature 1..20: note = chemically synthesized
  source 1..20: mol_type = other DNA
tactacaatgctacggtaac

SEQ ID NO: 67941 - DNA, 20 bp, synthetic construct
  misc_feature 1..20: note = chemically synthesized
  source 1..20: mol_type = other DNA
aaacagcatggtactggtac

SEQ ID NO: 67942 - DNA, 20 bp, synthetic construct
  misc_feature 1..20: note = chemically synthesized
  source 1..20: mol_type = other DNA
tatttaataaatggtgctgg

SEQ ID NO: 67943 - DNA, 20 bp, synthetic construct
  misc_feature 1..20: note = chemically synthesized
  source 1..20: mol_type = other DNA
aaagacttacatgttagacc

SEQ ID NO: 67944 - DNA, 20 bp, synthetic construct
  misc_feature 1..20: note = chemically synthesized
  source 1..20: mol_type = other DNA
catgttagacctaaaaccat

SEQ ID NO: 67945 - DNA, 20 bp, synthetic construct
  misc_feature 1..20: note = chemically synthesized
  source 1..20: mol_type = other DNA
aaaccataaaaaccctagaa

SEQ ID NO: 67946 - DNA, 20 bp, synthetic construct
  misc_feature 1..20: note = chemically synthesized
  source 1..20: mol_type = other DNA
atgggcaaggacttcatgtc

SEQ ID NO: 67947 - DNA, 20 bp, synthetic construct
  misc_feature 1..20: note = chemically synthesized
  source 1..20: mol_type = other DNA
actcaaacaaatttacaaga

SEQ ID NO: 67948 - DNA, 20 bp, synthetic construct
  misc_feature 1..20: note = chemically synthesized
  source 1..20: mol_type = other DNA
agaagacatttatgtaatca

SEQ ID NO: 67949 - DNA, 20 bp, synthetic construct
  misc_feature 1..20: note = chemically synthesized
  source 1..20: mol_type = other DNA
gccatcagagaaatgcaaat

SEQ ID NO: 67950 - DNA, 20 bp, synthetic construct
  misc_feature 1..20: note = chemically synthesized
  source 1..20: mol_type = other DNA
catgttgtgcacatgtaccc

SEQ ID NO: 67951 - DNA, 20 bp, synthetic construct
  misc_feature 1..20: note = chemically synthesized
  source 1..20: mol_type = other DNA
ataaaaaaaagttatcctat

SEQ ID NO: 67952 - DNA, 20 bp, synthetic construct
  misc_feature 1..20: note = chemically synthesized
  source 1..20: mol_type = other DNA
ttaaagataacaagaggtct

SEQ ID NO: 67953 - DNA, 20 bp, synthetic construct
  misc_feature 1..20: note = chemically synthesized
  source 1..20: mol_type = other DNA
ctgagatcctgtctctgagg

SEQ ID NO: 67954 - DNA, 20 bp, synthetic construct
  misc_feature 1..20: note = chemically synthesized
  source 1..20: mol_type = other DNA
gaaaaacaaacaaacaagca

SEQ ID NO: 67955 - DNA, 20 bp, synthetic construct
  misc_feature 1..20: note = chemically synthesized
  source 1..20: mol_type = other DNA
ctaccttattaattttttca

SEQ ID NO: 67956 - DNA, 20 bp, synthetic construct
  misc_feature 1..20: note = chemically synthesized
  source 1..20: mol_type = other DNA
ggccagcatcatcctgatac

SEQ ID NO: 67957 - DNA, 20 bp, synthetic construct
  misc_feature 1..20: note = chemically synthesized
  source 1..20: mol_type = other DNA
gacacacaacaacaaaaaaa

SEQ ID NO: 67958 - DNA, 20 bp, synthetic construct
  misc_feature 1..20: note = chemically synthesized
  source 1..20: mol_type = other DNA
ttcatcatatatacagcact

SEQ ID NO: 67959 - DNA, 20 bp, synthetic construct
  misc_feature 1..20: note = chemically synthesized
  source 1..20: mol_type = other DNA
aattcaacttcacttcatgt

SEQ ID NO: 67960 - DNA, 20 bp, synthetic construct
  misc_feature 1..20: note = chemically synthesized
  source 1..20: mol_type = other DNA
ccaacatcatacagaatggg

SEQ ID NO: 67961 - DNA, 20 bp, synthetic construct
  misc_feature 1..20: note = chemically synthesized
  source 1..20: mol_type = other DNA
aacctggaagcattcttctt

SEQ ID NO: 67962 - DNA, 20 bp, synthetic construct
  misc_feature 1..20: note = chemically synthesized
  source 1..20: mol_type = other DNA
atccctgttttctgtatcta

SEQ ID NO: 67963 - DNA, 20 bp, synthetic construct
  misc_feature 1..20: note = chemically synthesized
  source 1..20: mol_type = other DNA
gatctctacaatgagattta

SEQ ID NO: 67964 - DNA, 20 bp, synthetic construct
  misc_feature 1..20: note = chemically synthesized
  source 1..20: mol_type = other DNA
gagctgatagaaacaaatgg

SEQ ID NO: 67965 - DNA, 20 bp, synthetic construct
  misc_feature 1..20: note = chemically synthesized
  source 1..20: mol_type = other DNA
taccacagggctacagtaac

SEQ ID NO: 67966 - DNA, 20 bp, synthetic construct
  misc_feature 1..20: note = chemically synthesized
  source 1..20: mol_type = other DNA
tgatctttgacaaagctgat

SEQ ID NO: 67967 - DNA, 20 bp, synthetic construct
  misc_feature 1..20: note = chemically synthesized
  source 1..20: mol_type = other DNA
atggattagagacttaaatg

SEQ ID NO: 67968 - DNA, 20 bp, synthetic construct
  misc_feature 1..20: note = chemically synthesized
  source 1..20: mol_type = other DNA
cttaaatgaatctacaagaa

SEQ ID NO: 67969 - DNA, 20 bp, synthetic construct
  misc_feature 1..20: note = chemically synthesized
  source 1..20: mol_type = other DNA
tggcaattccctaaagacct

SEQ ID NO: 67970 - DNA, 20 bp, synthetic construct
  misc_feature 1..20: note = chemically synthesized
  source 1..20: mol_type = other DNA
aacaaactaatgtaagaaca

SEQ ID NO: 67971 - DNA, 20 bp, synthetic construct
  misc_feature 1..20: note = chemically synthesized
  source 1..20: mol_type = other DNA
aagtaggaactaaatgatga

SEQ ID NO: 67972 - DNA, 20 bp, synthetic construct
  misc_feature 1..20: note = chemically synthesized
  source 1..20: mol_type = other DNA
tgttcctatatagtaaatat

SEQ ID NO: 67973 - DNA, 20 bp, synthetic construct
  misc_feature 1..20: note = chemically synthesized
  source 1..20: mol_type = other DNA
aggaactcaagtcctatctt

SEQ ID NO: 67974 - DNA, 20 bp, synthetic construct
  misc_feature 1..20: note = chemically synthesized
  source 1..20: mol_type = other DNA
acatgcaggctgctataaga

SEQ ID NO: 67975 - DNA, 20 bp, synthetic construct
  misc_feature 1..20: note = chemically synthesized
  source 1..20: mol_type = other DNA
tgtacttaaaatattaaaat

SEQ ID NO: 67976 - DNA, 20 bp, synthetic construct
  misc_feature 1..20: note = chemically synthesized
  source 1..20: mol_type = other DNA
attatatacctaagaaatga

SEQ ID NO: 67977 - DNA, 20 bp, synthetic construct
  misc_feature 1..20: note = chemically synthesized
  source 1..20: mol_type = other DNA
gatcatggtgatattaataa

SEQ ID NO: 67978 - DNA, 20 bp, synthetic construct
  misc_feature 1..20: note = chemically synthesized
  source 1..20: mol_type = other DNA
taataaataaataaaataaa

SEQ ID NO: 67979 - DNA, 20 bp, synthetic construct
  misc_feature 1..20: note = chemically synthesized
  source 1..20: mol_type = other DNA
taaaataaataaaacagaaa

SEQ ID NO: 67980 - DNA, 20 bp, synthetic construct
  misc_feature 1..20: note = chemically synthesized
  source 1..20: mol_type = other DNA
gacgagtttctataaaaaaa

SEQ ID NO: 67981 - DNA, 20 bp, synthetic construct
  misc_feature 1..20: note = chemically synthesized
  source 1..20: mol_type = other DNA
cattacttttttattgctgc

SEQ ID NO: 67982 - DNA, 20 bp, synthetic construct
  misc_feature 1..20: note = chemically synthesized
  source 1..20: mol_type = other DNA
ttttaaaaagttgatttcat

SEQ ID NO: 67983 - DNA, 20 bp, synthetic construct
  misc_feature 1..20: note = chemically synthesized
  source 1..20: mol_type = other DNA
agggaacatattaaagccaa

SEQ ID NO: 67984 - DNA, 20 bp, synthetic construct
  misc_feature 1..20: note = chemically synthesized
  source 1..20: mol_type = other DNA
tcaaatgctataaatcttat

SEQ ID NO: 67985 - DNA, 20 bp, synthetic construct
  misc_feature 1..20: note = chemically synthesized
  source 1..20: mol_type = other DNA
aattatgttctaagaacagc

SEQ ID NO: 67986 - DNA, 20 bp, synthetic construct
  misc_feature 1..20: note = chemically synthesized
  source 1..20: mol_type = other DNA
tgaaaagacagaaaaaaaaa

SEQ ID NO: 67987 - DNA, 20 bp, synthetic construct
  misc_feature 1..20: note = chemically synthesized
  source 1..20: mol_type = other DNA
acagtgctcagaggggatac

SEQ ID NO: 67988 - DNA, 20 bp, synthetic construct
  misc_feature 1..20: note = chemically synthesized
  source 1..20: mol_type = other DNA
taacacaacatgatgtcttg

SEQ ID NO: 67989 - DNA, 20 bp, synthetic construct
  misc_feature 1..20: note = chemically synthesized
  source 1..20: mol_type = other DNA
tcttcatttatttaccttat

SEQ ID NO: 67990 - DNA, 20 bp, synthetic construct
  misc_feature 1..20: note = chemically synthesized
  source 1..20: mol_type = other DNA
tgctctttcatcctaccttt

SEQ ID NO: 67991 - DNA, 20 bp, synthetic construct
  misc_feature 1..20: note = chemically synthesized
  source 1..20: mol_type = other DNA
atttttcatattcttgagca

SEQ ID NO: 67992 - DNA, 20 bp, synthetic construct
  misc_feature 1..20: note = chemically synthesized
  source 1..20: mol_type = other DNA
tgagaaggagtcagggcaag

SEQ ID NO: 67993 - DNA, 20 bp, synthetic construct
  misc_feature 1..20: note = chemically synthesized
  source 1..20: mol_type = other DNA
ttacattattagagctttaa

SEQ ID NO: 67994 - DNA, 20 bp, synthetic construct
  misc_feature 1..20: note = chemically synthesized
  source 1..20: mol_type = other DNA
gaactgcaggttctaagaaa

SEQ ID NO: 67995 - DNA, 20 bp, synthetic construct
  misc_feature 1..20: note = chemically synthesized
  source 1..20: mol_type = other DNA
ctacgtcatctggaggggga

SEQ ID NO: 67996 - DNA, 20 bp, synthetic construct
  misc_feature 1..20: note = chemically synthesized
  source 1..20: mol_type = other DNA
gtctaagcaacgtatttttt

SEQ ID NO: 67997 - DNA, 20 bp, synthetic construct
  misc_feature 1..20: note = chemically synthesized
  source 1..20: mol_type = other DNA
tttgagcatttcctttgctg

SEQ ID NO: 67998 - DNA, 20 bp, synthetic construct
  misc_feature 1..20: note = chemically synthesized
  source 1..20: mol_type = other DNA
ctgtaaaacaaagctggatt

SEQ ID NO: 67999 - DNA, 20 bp, synthetic construct
  misc_feature 1..20: note = chemically synthesized
  source 1..20: mol_type = other DNA
ggttttcaagtttcaaagta

SEQ ID NO: 68000 - DNA, 20 bp, synthetic construct
  misc_feature 1..20: note = chemically synthesized
  source 1..20: mol_type = other DNA
gaaaggaaggaaatcaggta

SEQ ID NO: 68001 - DNA, 20 bp, synthetic construct
  misc_feature 1..20: note = chemically synthesized
  source 1..20: mol_type = other DNA
ttttatttttagatatcaac

SEQ ID NO: 68002 - DNA, 20 bp, synthetic construct
  misc_feature 1..20: note = chemically synthesized
  source 1..20: mol_type = other DNA
ctggtatagctatcagaagt

SEQ ID NO: 68003 - DNA, 20 bp, synthetic construct
  misc_feature 1..20: note = chemically synthesized
  source 1..20: mol_type = other DNA
tgaaaccccgtctctactaa

SEQ ID NO: 68004 - DNA, 20 bp, synthetic construct
  misc_feature 1..20: note = chemically synthesized
  source 1..20: mol_type = other DNA
gtttgaaataatggccgtga

SEQ ID NO: 68005 - DNA, 20 bp, synthetic construct
  misc_feature 1..20: note = chemically synthesized
  source 1..20: mol_type = other DNA
atggagacatcacaggtgtt

SEQ ID NO: 68006 - DNA, 20 bp, synthetic construct
  misc_feature 1..20: note = chemically synthesized
  source 1..20: mol_type = other DNA
gcgtcactgagaaacgttac

SEQ ID NO: 68007 - DNA, 20 bp, synthetic construct
  misc_feature 1..20: note = chemically synthesized
  source 1..20: mol_type = other DNA
cacggttattataataagga

SEQ ID NO: 68008 - DNA, 20 bp, synthetic construct
  misc_feature 1..20: note = chemically synthesized
  source 1..20: mol_type = other DNA
catttaaatatgatttttta

SEQ ID NO: 68009 - DNA, 20 bp, synthetic construct
  misc_feature 1..20: note = chemically synthesized
  source 1..20: mol_type = other DNA
agaaaaggataccaatgaga

SEQ ID NO: 68010 - DNA, 20 bp, synthetic construct
  misc_feature 1..20: note = chemically synthesized
  source 1..20: mol_type = other DNA
ctgcaaagagcattttctgg

SEQ ID NO: 68011 - DNA, 20 bp, synthetic construct
  misc_feature 1..20: note = chemically synthesized
  source 1..20: mol_type = other DNA
tgcaccaatcagcactctgc

SEQ ID NO: 68012 - DNA, 20 bp, synthetic construct
  misc_feature 1..20: note = chemically synthesized
  source 1..20: mol_type = other DNA
ctagaatcaattttaataaa

SEQ ID NO: 68013 - DNA, 20 bp, synthetic construct
  misc_feature 1..20: note = chemically synthesized
  source 1..20: mol_type = other DNA
tggtaagttaagagaatgaa

SEQ ID NO: 68014 - DNA, 20 bp, synthetic construct
  misc_feature 1..20: note = chemically synthesized
  source 1..20: mol_type = other DNA
agccacagagaacatatttg

SEQ ID NO: 68015 - DNA, 20 bp, synthetic construct
  misc_feature 1..20: note = chemically synthesized
  source 1..20: mol_type = other DNA
acttttaaaattctacaata

SEQ ID NO: 68016 - DNA, 20 bp, synthetic construct
  misc_feature 1..20: note = chemically synthesized
  source 1..20: mol_type = other DNA
gtcattaagaaactgcacat

SEQ ID NO: 68017 - DNA, 20 bp, synthetic construct
  misc_feature 1..20: note = chemically synthesized
  source 1..20: mol_type = other DNA
agacagtttacagtttctta

SEQ ID NO: 68018 - DNA, 20 bp, synthetic construct
  misc_feature 1..20: note = chemically synthesized
  source 1..20: mol_type = other DNA
acctatgagcctgtaaaatc

SEQ ID NO: 68019 - DNA, 20 bp, synthetic construct
  misc_feature 1..20: note = chemically synthesized
  source 1..20: mol_type = other DNA
ctaaagatcccacacgagta

SEQ ID NO: 68020 - DNA, 20 bp, synthetic construct
  misc_feature 1..20: note = chemically synthesized
  source 1..20: mol_type = other DNA
ggtatttcttcatagcagtt

SEQ ID NO: 68021 - DNA, 20 bp, synthetic construct
  misc_feature 1..20: note = chemically synthesized
  source 1..20: mol_type = other DNA
cttataatcatggcagagag

SEQ ID NO: 68022 - DNA, 20 bp, synthetic construct
  misc_feature 1..20: note = chemically synthesized
  source 1..20: mol_type = other DNA
caaaatacataaaatgtaag

SEQ ID NO: 68023 - DNA, 20 bp, synthetic construct
  misc_feature 1..20: note = chemically synthesized
  source 1..20: mol_type = other DNA
atgtaagcaaaacacaacaa

SEQ ID NO: 68024 - DNA, 20 bp, synthetic construct
  misc_feature 1..20: note = chemically synthesized
  source 1..20: mol_type = other DNA
cttgaaatccatagaaattt

SEQ ID NO: 68025 - DNA, 20 bp, synthetic construct
  misc_feature 1..20: note = chemically synthesized
  source 1..20: mol_type = other DNA
aagactgtagacttctataa

SEQ ID NO: 68026 - DNA, 20 bp, synthetic construct
  misc_feature 1..20: note = chemically synthesized
  source 1..20: mol_type = other DNA
atcagaaatcattatttact

SEQ ID NO: 68027 - DNA, 20 bp, synthetic construct
  misc_feature 1..20: note = chemically synthesized
  source 1..20: mol_type = other DNA
gttttagagtccccagattt

SEQ ID NO: 68028 - DNA, 20 bp, synthetic construct
  misc_feature 1..20: note = chemically synthesized
  source 1..20: mol_type = other DNA
aaaattcgtcctcttaagct

SEQ ID NO: 68029 - DNA, 20 bp, synthetic construct
  misc_feature 1..20: note = chemically synthesized
  source 1..20: mol_type = other DNA
taaactgagttatgctcaat

SEQ ID NO: 68030 - DNA, 20 bp, synthetic construct
  misc_feature 1..20: note = chemically synthesized
  source 1..20: mol_type = other DNA
tgaatttatattctagtagt

SEQ ID NO: 68031 - DNA, 20 bp, synthetic construct
  misc_feature 1..20: note = chemically synthesized
  source 1..20: mol_type = other DNA
tactggtgatggggcaaaaa

SEQ ID NO: 68032 - DNA, 20 bp, synthetic construct
  misc_feature 1..20: note = chemically synthesized
  source 1..20: mol_type = other DNA
acatatgacaatgttttagg

SEQ ID NO: 68033 - DNA, 20 bp, synthetic construct
  misc_feature 1..20: note = chemically synthesized
  source 1..20: mol_type = other DNA
caatgttttaggaaaaacaa

SEQ ID NO: 68034 - DNA, 20 bp, synthetic construct
  misc_feature 1..20: note = chemically synthesized
  source 1..20: mol_type = other DNA
aaaaaaacaaacaaatattt

SEQ ID NO: 68035 - DNA, 20 bp, synthetic construct
  misc_feature 1..20: note = chemically synthesized
  source 1..20: mol_type = other DNA
gtgagatatatattaaatag

SEQ ID NO: 68036 - DNA, 20 bp, synthetic construct
  misc_feature 1..20: note = chemically synthesized
  source 1..20: mol_type = other DNA
cagaatatttagcacttagc

SEQ ID NO: 68037 - DNA, 20 bp, synthetic construct
  misc_feature 1..20: note = chemically synthesized
  source 1..20: mol_type = other DNA
taagcccctgtgccacctca

SEQ ID NO: 68038 - DNA, 20 bp, synthetic construct
  misc_feature 1..20: note = chemically synthesized
  source 1..20: mol_type = other DNA
agactcctgttttataatgt

SEQ ID NO: 68039 - DNA, 20 bp, synthetic construct
  misc_feature 1..20: note = chemically synthesized
  source 1..20: mol_type = other DNA
caattttgttgatcttttca

SEQ ID NO: 68040 - DNA, 20 bp, synthetic construct
  misc_feature 1..20: note = chemically synthesized
  source 1..20: mol_type = other DNA
attcaacaatgcttcatact

SEQ ID NO: 68041 - DNA, 20 bp, synthetic construct
  misc_feature 1..20: note = chemically synthesized
  source 1..20: mol_type = other DNA
caatatcatactgaatggac

SEQ ID NO: 68042 - DNA, 20 bp, synthetic construct
  misc_feature 1..20: note = chemically synthesized
  source 1..20: mol_type = other DNA
aaactggaagcattcccttt

SEQ ID NO: 68043 - DNA, 20 bp, synthetic construct
  misc_feature 1..20: note = chemically synthesized
  source 1..20: mol_type = other DNA
atgacgtgattgtatatcta

SEQ ID NO: 68044 - DNA, 20 bp, synthetic construct
  misc_feature 1..20: note = chemically synthesized
  source 1..20: mol_type = other DNA
gacctcttcaaggagaacaa

SEQ ID NO: 68045 - DNA, 20 bp, synthetic construct
  misc_feature 1..20: note = chemically synthesized
  source 1..20: mol_type = other DNA
actttcttcacagaattgga

SEQ ID NO: 68046 - DNA, 20 bp, synthetic construct
  misc_feature 1..20: note = chemically synthesized
  source 1..20: mol_type = other DNA
atactacaaggtacagtaac

SEQ ID NO: 68047 - DNA, 20 bp, synthetic construct
  misc_feature 1..20: note = chemically synthesized
  source 1..20: mol_type = other DNA
aaacaacatggtactggtac

SEQ ID NO: 68048 - DNA, 20 bp, synthetic construct
  misc_feature 1..20: note = chemically synthesized
  source 1..20: mol_type = other DNA
tgatctttgacaaacctgac

SEQ ID NO: 68049 - DNA, 20 bp, synthetic construct
  misc_feature 1..20: note = chemically synthesized
  source 1..20: mol_type = other DNA
tatttaataaatgatgctgg

SEQ ID NO: 68050 - DNA, 20 bp, synthetic construct
  misc_feature 1..20: note = chemically synthesized
  source 1..20: mol_type = other DNA
aaagacttacatgttagacc

SEQ ID NO: 68051 - DNA, 20 bp, synthetic construct
  misc_feature 1..20: note = chemically synthesized
  source 1..20: mol_type = other DNA
catgttagacctaaaaccat

SEQ ID NO: 68052 - DNA, 20 bp, synthetic construct
  misc_feature 1..20: note = chemically synthesized
  source 1..20: mol_type = other DNA
aaaccataaaaaccttagaa

SEQ ID NO: 68053 - DNA, 20 bp, synthetic construct
  misc_feature 1..20: note = chemically synthesized
  source 1..20: mol_type = other DNA
atgggcaaggacttcatgtc

SEQ ID NO: 68054 - DNA, 20 bp, synthetic construct
  misc_feature 1..20: note = chemically synthesized
  source 1..20: mol_type = other DNA
ctcaaacaaatttacaagaa

SEQ ID NO: 68055 - DNA, 20 bp, synthetic construct
  misc_feature 1..20: note = chemically synthesized
  source 1..20: mol_type = other DNA
agaagacatttatgcagcca

SEQ ID NO: 68056 - DNA, 20 bp, synthetic construct
  misc_feature 1..20: note = chemically synthesized
  source 1..20: mol_type = other DNA
gccatcagagaaatgcaaat

SEQ ID NO: 68057 - DNA, 20 bp, synthetic construct
  misc_feature 1..20: note = chemically synthesized
  source 1..20: mol_type = other DNA
agcaaagtatcgcaaggacg

SEQ ID NO: 68058 - DNA, 20 bp, synthetic construct
  misc_feature 1..20: note = chemically synthesized
  source 1..20: mol_type = other DNA
ccaggctggcatatagattt

SEQ ID NO: 68059 - DNA, 20 bp, synthetic construct
  misc_feature 1..20: note = chemically synthesized
  source 1..20: mol_type = other DNA
tactctcctttcccagagaa

SEQ ID NO: 68060 - DNA, 20 bp, synthetic construct
  misc_feature 1..20: note = chemically synthesized
  source 1..20: mol_type = other DNA
agagaagaaaacattggaaa

SEQ ID NO: 68061 - DNA, 20 bp, synthetic construct
  misc_feature 1..20: note = chemically synthesized
  source 1..20: mol_type = other DNA
cttgcccatcgctttggagg

SEQ ID NO: 68062 - DNA, 20 bp, synthetic construct
  misc_feature 1..20: note = chemically synthesized
  source 1..20: mol_type = other DNA
cacctaaagaaagacaaaaa

SEQ ID NO: 68063 - DNA, 20 bp, synthetic construct
  misc_feature 1..20: note = chemically synthesized
  source 1..20: mol_type = other DNA
tattgggaagggagaataca

SEQ ID NO: 68064 - DNA, 20 bp, synthetic construct
  misc_feature 1..20: note = chemically synthesized
  source 1..20: mol_type = other DNA
gagttttggaagcacttagc

SEQ ID NO: 68065 - DNA, 20 bp, synthetic construct
  misc_feature 1..20: note = chemically synthesized
  source 1..20: mol_type = other DNA
gtgttctagacagaattagc

SEQ ID NO: 68066 - DNA, 20 bp, synthetic construct
  misc_feature 1..20: note = chemically synthesized
  source 1..20: mol_type = other DNA
agacagaattagcaaaaaca

SEQ ID NO: 68067 - DNA, 20 bp, synthetic construct
  misc_feature 1..20: note = chemically synthesized
  source 1..20: mol_type = other DNA
agagagagactccatctcaa

SEQ ID NO: 68068 - DNA, 20 bp, synthetic construct
  misc_feature 1..20: note = chemically synthesized
  source 1..20: mol_type = other DNA
tcaaaaaaaccaaaaatacg

SEQ ID NO: 68069 - DNA, 20 bp, synthetic construct
  misc_feature 1..20: note = chemically synthesized
  source 1..20: mol_type = other DNA
aaaccaaaaatacgtaaaac

SEQ ID NO: 68070 - DNA, 20 bp, synthetic construct
  misc_feature 1..20: note = chemically synthesized
  source 1..20: mol_type = other DNA
cgtaaaacaaaaacaaaaag

SEQ ID NO: 68071 - DNA, 20 bp, synthetic construct
  misc_feature 1..20: note = chemically synthesized
  source 1..20: mol_type = other DNA
acaaaaagaaaaacaaaaaa

SEQ ID NO: 68072 - DNA, 20 bp, synthetic construct
  misc_feature 1..20: note = chemically synthesized
  source 1..20: mol_type = other DNA
ctatcaccatgatctcatgc

SEQ ID NO: 68073 - DNA, 20 bp, synthetic construct
  misc_feature 1..20: note = chemically synthesized
  source 1..20: mol_type = other DNA
tctcatctaacagtgttggc

SEQ ID NO: 68074 - DNA, 20 bp, synthetic construct
  misc_feature 1..20: note = chemically synthesized
  source 1..20: mol_type = other DNA
cacttaaagttgccatttcc

SEQ ID NO: 68075 - DNA, 20 bp, synthetic construct
  misc_feature 1..20: note = chemically synthesized
  source 1..20: mol_type = other DNA
ttgaatatgaagttgtatat

SEQ ID NO: 68076 - DNA, 20 bp, synthetic construct
  misc_feature 1..20: note = chemically synthesized
  source 1..20: mol_type = other DNA
aggacacagatcaaacaaca

SEQ ID NO: 68077 - DNA, 20 bp, synthetic construct
  misc_feature 1..20: note = chemically synthesized
  source 1..20: mol_type = other DNA
ttgatcatggtaggagtcat

SEQ ID NO: 68078 - DNA, 20 bp, synthetic construct
  misc_feature 1..20: note = chemically synthesized
  source 1..20: mol_type = other DNA
acattttgtagatgaagaaa

SEQ ID NO: 68079 - DNA, 20 bp, synthetic construct
  misc_feature 1..20: note = chemically synthesized
  source 1..20: mol_type = other DNA
acattgttttgtcaatttgt

SEQ ID NO: 68080 - DNA, 20 bp, synthetic construct
  misc_feature 1..20: note = chemically synthesized
  source 1..20: mol_type = other DNA
taggtacatcaattttacat

SEQ ID NO: 68081 - DNA, 20 bp, synthetic construct
  misc_feature 1..20: note = chemically synthesized
  source 1..20: mol_type = other DNA
agttcaatactagaaagaaa

SEQ ID NO: 68082 - DNA, 20 bp, synthetic construct
  misc_feature 1..20: note = chemically synthesized
  source 1..20: mol_type = other DNA
gttttagaagaaaataacta

SEQ ID NO: 68083 - DNA, 20 bp, synthetic construct
  misc_feature 1..20: note = chemically synthesized
  source 1..20: mol_type = other DNA
gttcaatgtagtgaagtcat

SEQ ID NO: 68084 - DNA, 20 bp, synthetic construct
  misc_feature 1..20: note = chemically synthesized
  source 1..20: mol_type = other DNA
tattcttatggtatacatga

SEQ ID NO: 68085 - DNA, 20 bp, synthetic construct
  misc_feature 1..20: note = chemically synthesized
  source 1..20: mol_type = other DNA
tttatcaagttcacacaatg

SEQ ID NO: 68086 - DNA, 20 bp, synthetic construct
  misc_feature 1..20: note = chemically synthesized
  source 1..20: mol_type = other DNA
taagtggcagaatcacaact

SEQ ID NO: 68087 - DNA, 20 bp, synthetic construct
  misc_feature 1..20: note = chemically synthesized
  source 1..20: mol_type = other DNA
caaaaccagacaatccaact

SEQ ID NO: 68088 - DNA, 20 bp, synthetic construct
  misc_feature 1..20: note = chemically synthesized
  source 1..20: mol_type = other DNA
caaagcgctcagggataaaa

SEQ ID NO: 68089 - DNA, 20 bp, synthetic construct
  misc_feature 1..20: note = chemically synthesized
  source 1..20: mol_type = other DNA
ttcaagaatattttataggg

SEQ ID NO: 68090 - DNA, 20 bp, synthetic construct
  misc_feature 1..20: note = chemically synthesized
  source 1..20: mol_type = other DNA
aaagacattaacatgcaaaa

SEQ ID NO: 68091 - DNA, 20 bp, synthetic construct
  misc_feature 1..20: note = chemically synthesized
  source 1..20: mol_type = other DNA
gaactccagtatgaaaccca

SEQ ID NO: 68092 - DNA, 20 bp, synthetic construct
  misc_feature 1..20: note = chemically synthesized
  source 1..20: mol_type = other DNA
acccaaaaaacaaatctttc

SEQ ID NO: 68093 - DNA, 20 bp, synthetic construct
  misc_feature 1..20: note = chemically synthesized
  source 1..20: mol_type = other DNA
ataaaatagactacaaattt

SEQ ID NO: 68094 - DNA, 20 bp, synthetic construct
  misc_feature 1..20: note = chemically synthesized
  source 1..20: mol_type = other DNA
aaagttcccaagtatataag

SEQ ID NO: 68095 - DNA, 20 bp, synthetic construct
  misc_feature 1..20: note = chemically synthesized
  source 1..20: mol_type = other DNA
attttctgaccacagtggaa

SEQ ID NO: 68096 - DNA, 20 bp, synthetic construct
  misc_feature 1..20: note = chemically synthesized
  source 1..20: mol_type = other DNA
ctttacctacccaaatctta

SEQ ID NO: 68097 - DNA, 20 bp, synthetic construct
  misc_feature 1..20: note = chemically synthesized
  source 1..20: mol_type = other DNA
acatgttttatccgtggacc

SEQ ID NO: 68098 - DNA, 20 bp, synthetic construct
  misc_feature 1..20: note = chemically synthesized
  source 1..20: mol_type = other DNA
agcctgtgctctcaagaact

SEQ ID NO: 68099 - DNA, 20 bp, synthetic construct
  misc_feature 1..20: note = chemically synthesized
  source 1..20: mol_type = other DNA
tcttcaactcacacctgacc

SEQ ID NO: 68100 - DNA, 20 bp, synthetic construct
  misc_feature 1..20: note = chemically synthesized
  source 1..20: mol_type = other DNA
gatctaaataatttttgtcg

SEQ ID NO: 68101 - DNA, 20 bp, synthetic construct
  misc_feature 1..20: note = chemically synthesized
  source 1..20: mol_type = other DNA
aggctctttcatcaaatatg

SEQ ID NO: 68102 - DNA, 20 bp, synthetic construct
  misc_feature 1..20: note = chemically synthesized
  source 1..20: mol_type = other DNA
aatctgctcctgacattaaa

SEQ ID NO: 68103 - DNA, 20 bp, synthetic construct
  misc_feature 1..20: note = chemically synthesized
  source 1..20: mol_type = other DNA
tgcgccccttaccatcccat

SEQ ID NO: 68104 - DNA, 20 bp, synthetic construct
  misc_feature 1..20: note = chemically synthesized
  source 1..20: mol_type = other DNA
ttcccccattttacctgtcc

SEQ ID NO: 68105 - DNA, 20 bp, synthetic construct
  misc_feature 1..20: note = chemically synthesized
  source 1..20: mol_type = other DNA
tatctcggcataattctcat

SEQ ID NO: 68106 - DNA, 20 bp, synthetic construct
  misc_feature 1..20: note = chemically synthesized
  source 1..20: mol_type = other DNA
ccaaacctcaatcccttcta

SEQ ID NO: 68107 - DNA, 20 bp, synthetic construct
  misc_feature 1..20: note = chemically synthesized
  source 1..20: mol_type = other DNA
ttcaggctcttagtattcag

SEQ ID NO: 68108 - DNA, 20 bp, synthetic construct
  misc_feature 1..20: note = chemically synthesized
  source 1..20: mol_type = other DNA
gaacggactaaatgtctttt

SEQ ID NO: 68109 - DNA, 20 bp, synthetic construct
  misc_feature 1..20: note = chemically synthesized
  source 1..20: mol_type = other DNA
caacttagaatgtgccccaa

SEQ ID NO: 68110 - DNA, 20 bp, synthetic construct
  misc_feature 1..20: note = chemically synthesized
  source 1..20: mol_type = other DNA
atttggtttttcaatccata

SEQ ID NO: 68111 - DNA, 20 bp, synthetic construct
  misc_feature 1..20: note = chemically synthesized
  source 1..20: mol_type = other DNA
ctttacctacccaaatctta

SEQ ID NO: 68112 - DNA, 20 bp, synthetic construct
  misc_feature 1..20: note = chemically synthesized
  source 1..20: mol_type = other DNA
agaaattaagaaggaaattt

SEQ ID NO: 68113 - DNA, 20 bp, synthetic construct
  misc_feature 1..20: note = chemically synthesized
  source 1..20: mol_type = other DNA
aaaatggaaatacaacatac

SEQ ID NO: 68114 - DNA, 20 bp, synthetic construct
  misc_feature 1..20: note = chemically synthesized
  source 1..20: mol_type = other DNA
aaaaaatacagaaaatcatt

SEQ ID NO: 68115 - DNA, 20 bp, synthetic construct
  misc_feature 1..20: note = chemically synthesized
  source 1..20: mol_type = other DNA
ggaaaggtaaacaaaatcaa

SEQ ID NO: 68116 - DNA, 20 bp, synthetic construct
  misc_feature 1..20: note = chemically synthesized
  source 1..20: mol_type = other DNA
gactgaagcatgtagaaaca

SEQ ID NO: 68117 - DNA, 20 bp, synthetic construct
  misc_feature 1..20: note = chemically synthesized
  source 1..20: mol_type = other DNA
cctcaaacaaacaaacaaat

SEQ ID NO: 68118 - DNA, 20 bp, synthetic construct
  misc_feature 1..20: note = chemically synthesized
  source 1..20: mol_type = other DNA
ggaacatacctcaaaataat

SEQ ID NO: 68119 - DNA, 20 bp, synthetic construct
  misc_feature 1..20: note = chemically synthesized
  source 1..20: mol_type = other DNA
gacatgatcttatacttaga

SEQ ID NO: 68120 - DNA, 20 bp, synthetic construct
  misc_feature 1..20: note = chemically synthesized
  source 1..20: mol_type = other DNA
cttatacttagaaaaaacct

SEQ ID NO: 68121 - DNA, 20 bp, synthetic construct
  misc_feature 1..20: note = chemically synthesized
  source 1..20: mol_type = other DNA
aaaacttcactaaatactat

SEQ ID NO: 68122 - DNA, 20 bp, synthetic construct
  misc_feature 1..20: note = chemically synthesized
  source 1..20: mol_type = other DNA
caatctgcaaaaaaaatcaa

SEQ ID NO: 68123 - DNA, 20 bp, synthetic construct
  misc_feature 1..20: note = chemically synthesized
  source 1..20: mol_type = other DNA
gatctctataagaaaaatta

SEQ ID NO: 68124 - DNA, 20 bp, synthetic construct
  misc_feature 1..20: note = chemically synthesized
  source 1..20: mol_type = other DNA
aatggcattcacagaaatag

SEQ ID NO: 68125 - DNA, 20 bp, synthetic construct
  misc_feature 1..20: note = chemically synthesized
  source 1..20: mol_type = other DNA
gcaatcctgagcaaaaagaa

SEQ ID NO: 68126 - DNA, 20 bp, synthetic construct
  misc_feature 1..20: note = chemically synthesized
  source 1..20: mol_type = other DNA
ttttcaagaaacagtgctag

SEQ ID NO: 68127 - DNA, 20 bp, synthetic construct
  misc_feature 1..20: note = chemically synthesized
  source 1..20: mol_type = other DNA
aaattatgaaactactggaa

SEQ ID NO: 68128 - DNA, 20 bp, synthetic construct
  misc_feature 1..20: note = chemically synthesized
  source 1..20: mol_type = other DNA
acttcaaaagcacaaataac

SEQ ID NO: 68129 - DNA, 20 bp, synthetic construct
  misc_feature 1..20: note = chemically synthesized
  source 1..20: mol_type = other DNA
tcactaatcaccagataaat

SEQ ID NO: 68130 - DNA, 20 bp, synthetic construct
  misc_feature 1..20: note = chemically synthesized
  source 1..20: mol_type = other DNA
ttagttaaaatagcttataa

SEQ ID NO: 68131 - DNA, 20 bp, synthetic construct
  misc_feature 1..20: note = chemically synthesized
  source 1..20: mol_type = other DNA
ttctaactcgtgtggaagtt

SEQ ID NO: 68132 - DNA, 20 bp, synthetic construct
  misc_feature 1..20: note = chemically synthesized
  source 1..20: mol_type = other DNA
aggaatgagaaatcaagcaa

SEQ ID NO: 68133 - DNA, 20 bp, synthetic construct
  misc_feature 1..20: note = chemically synthesized
  source 1..20: mol_type = other DNA
ttaatttactaaaagataaa

SEQ ID NO: 68134 - DNA, 20 bp, synthetic construct
  misc_feature 1..20: note = chemically synthesized
  source 1..20: mol_type = other DNA
tcttttctgaataaaaagag

SEQ ID NO: 68135 - DNA, 20 bp, synthetic construct
  misc_feature 1..20: note = chemically synthesized
  source 1..20: mol_type = other DNA
cttcaggtatctggtaagag

SEQ ID NO: 68136 - DNA, 20 bp, synthetic construct
  misc_feature 1..20: note = chemically synthesized
  source 1..20: mol_type = other DNA
acttatggatgggagtgtca

SEQ ID NO: 68137 - DNA, 20 bp, synthetic construct
  misc_feature 1..20: note = chemically synthesized
  source 1..20: mol_type = other DNA
gattcatgagcttactgaga

SEQ ID NO: 68138 - DNA, 20 bp, synthetic construct
  misc_feature 1..20: note = chemically synthesized
  source 1..20: mol_type = other DNA
aattataactctgaacattt

SEQ ID NO: 68139 - DNA, 20 bp, synthetic construct
  misc_feature 1..20: note = chemically synthesized
  source 1..20: mol_type = other DNA
tgcctgtgaatgccccacct

SEQ ID NO: 68140 - DNA, 20 bp, synthetic construct
  misc_feature 1..20: note = chemically synthesized
  source 1..20: mol_type = other DNA
atgaatccatcttttccttt

SEQ ID NO: 68141 - DNA, 20 bp, synthetic construct
  misc_feature 1..20: note = chemically synthesized
  source 1..20: mol_type = other DNA
ttttgcagtagtaaccatat

SEQ ID NO: 68142 - DNA, 20 bp, synthetic construct
  misc_feature 1..20: note = chemically synthesized
  source 1..20: mol_type = other DNA
cagtagtaaccatatcaaaa

SEQ ID NO: 68143 - DNA, 20 bp, synthetic construct
  misc_feature 1..20: note = chemically synthesized
  source 1..20: mol_type = other DNA
aaccatatcaaaacaaaaca

SEQ ID NO: 68144 - DNA, 20 bp, synthetic construct
  misc_feature 1..20: note = chemically synthesized
  source 1..20: mol_type = other DNA
gaaacatccagggactcaat

SEQ ID NO: 68145 - DNA, 20 bp, synthetic construct
  misc_feature 1..20: note = chemically synthesized
  source 1..20: mol_type = other DNA
tattaattcatcattttatc

SEQ ID NO: 68146 - DNA, 20 bp, synthetic construct
  misc_feature 1..20: note = chemically synthesized
  source 1..20: mol_type = other DNA
cggctagtcaattgttcttg

SEQ ID NO: 68147 - DNA, 20 bp, synthetic construct
  misc_feature 1..20: note = chemically synthesized
  source 1..20: mol_type = other DNA
gaaaaaaatgatctatgacc

SEQ ID NO: 68148 - DNA, 20 bp, synthetic construct
  misc_feature 1..20: note = chemically synthesized
  source 1..20: mol_type = other DNA
aatactctccaatggcacat

SEQ ID NO: 68149 - DNA, 20 bp, synthetic construct
  misc_feature 1..20: note = chemically synthesized
  source 1..20: mol_type = other DNA
agttaccttaaactacatta

SEQ ID NO: 68150 - DNA, 20 bp, synthetic construct
  misc_feature 1..20: note = chemically synthesized
  source 1..20: mol_type = other DNA
aaatacaataaatgcaactc

SEQ ID NO: 68151 - DNA, 20 bp, synthetic construct
  misc_feature 1..20: note = chemically synthesized
  source 1..20: mol_type = other DNA
aatgcaactcccctgctttg

SEQ ID NO: 68152 - DNA, 20 bp, synthetic construct
  misc_feature 1..20: note = chemically synthesized
  source 1..20: mol_type = other DNA
cccctgctttggttagattt

SEQ ID NO: 68153 - DNA, 20 bp, synthetic construct
  misc_feature 1..20: note = chemically synthesized
  source 1..20: mol_type = other DNA
tcatgagaattattcactgt

SEQ ID NO: 68154 - DNA, 20 bp, synthetic construct
  misc_feature 1..20: note = chemically synthesized
  source 1..20: mol_type = other DNA
gtgccagatttactattatg

SEQ ID NO: 68155 - DNA, 20 bp, synthetic construct
  misc_feature 1..20: note = chemically synthesized
  source 1..20: mol_type = other DNA
agtatagtatttttaatatt

SEQ ID NO: 68156 - DNA, 20 bp, synthetic construct
  misc_feature 1..20: note = chemically synthesized
  source 1..20: mol_type = other DNA
ctgaaaatgtatttaaattt

SEQ ID NO: 68157 - DNA, 20 bp, synthetic construct
  misc_feature 1..20: note = chemically synthesized
  source 1..20: mol_type = other DNA
tttattgtctcttgatattc

SEQ ID NO: 68158 - DNA, 20 bp, synthetic construct
  misc_feature 1..20: note = chemically synthesized
  source 1..20: mol_type = other DNA
acacagttaacatgtacttc

SEQ ID NO: 68159 - DNA, 20 bp, synthetic construct
  misc_feature 1..20: note = chemically synthesized
  source 1..20: mol_type = other DNA
caagaaaatgagagtcaaca

SEQ ID NO: 68160 - DNA, 20 bp, synthetic construct
  misc_feature 1..20: note = chemically synthesized
  source 1..20: mol_type = other DNA
cttgttttcattgagtccct

SEQ ID NO: 68161 - DNA, 20 bp, synthetic construct
  misc_feature 1..20: note = chemically synthesized
  source 1..20: mol_type = other DNA
tcacgtagaattcacaatcc

SEQ ID NO: 68162 - DNA, 20 bp, synthetic construct
  misc_feature 1..20: note = chemically synthesized
  source 1..20: mol_type = other DNA
ctaaaaccagctattgtgct

SEQ ID NO: 68163 - DNA, 20 bp, synthetic construct
  misc_feature 1..20: note = chemically synthesized
  source 1..20: mol_type = other DNA
caaacccagcatctcaaata

SEQ ID NO: 68164 - DNA, 20 bp, synthetic construct
  misc_feature 1..20: note = chemically synthesized
  source 1..20: mol_type = other DNA
agcatctcaaataatatgtt

SEQ ID NO: 68165 - DNA, 20 bp, synthetic construct
  misc_feature 1..20: note = chemically synthesized
  source 1..20: mol_type = other DNA
ctcaaataatatgttttttg

SEQ ID NO: 68166 - DNA, 20 bp, synthetic construct
  misc_feature 1..20: note = chemically synthesized
  source 1..20: mol_type = other DNA
agcatgtaggcattaattaa

SEQ ID NO: 68167 - DNA, 20 bp, synthetic construct
  misc_feature 1..20: note = chemically synthesized
  source 1..20: mol_type = other DNA
tggtctttgcaccatagaca

SEQ ID NO: 68168 - DNA, 20 bp, synthetic construct
  misc_feature 1..20: note = chemically synthesized
  source 1..20: mol_type = other DNA
atgtgagcaatgcaggtatt

SEQ ID NO: 68169 - DNA, 20 bp, synthetic construct
  misc_feature 1..20: note = chemically synthesized
  source 1..20: mol_type = other DNA
agtgaaggccacaaacaaac

SEQ ID NO: 68170 - DNA, 20 bp, synthetic construct
  misc_feature 1..20: note = chemically synthesized
  source 1..20: mol_type = other DNA
tgacttgaacatttgctgct

SEQ ID NO: 68171 - DNA, 20 bp, synthetic construct
  misc_feature 1..20: note = chemically synthesized
  source 1..20: mol_type = other DNA
ttgaagcaagcaggaatcaa

SEQ ID NO: 68172 - DNA, 20 bp, synthetic construct
  misc_feature 1..20: note = chemically synthesized
  source 1..20: mol_type = other DNA
aagggctcatggagactgcg

SEQ ID NO: 68173 - DNA, 20 bp, synthetic construct
  misc_feature 1..20: note = chemically synthesized
  source 1..20: mol_type = other DNA
ggaatcccaatccagcactg

SEQ ID NO: 68174 - DNA, 20 bp, synthetic construct
  misc_feature 1..20: note = chemically synthesized
  source 1..20: mol_type = other DNA
ggtctcctgatgcaaacaaa

SEQ ID NO: 68175 - DNA, 20 bp, synthetic construct
  misc_feature 1..20: note = chemically synthesized
  source 1..20: mol_type = other DNA
agtcagtgttactgttcctc

SEQ ID NO: 68176 - DNA, 20 bp, synthetic construct
  misc_feature 1..20: note = chemically synthesized
  source 1..20: mol_type = other DNA
gttactgttcctcttctgct

SEQ ID NO: 68177 - DNA, 20 bp, synthetic construct
  misc_feature 1..20: note = chemically synthesized
  source 1..20: mol_type = other DNA
aaactcattatattgagtct

SEQ ID NO: 68178 - DNA, 20 bp, synthetic construct
  misc_feature 1..20: note = chemically synthesized
  source 1..20: mol_type = other DNA
ctaaaatcatccatcttatt

SEQ ID NO: 68179 - DNA, 20 bp, synthetic construct
  misc_feature 1..20: note = chemically synthesized
  source 1..20: mol_type = other DNA
tcacagttttgaaaggaaaa

SEQ ID NO: 68180 - DNA, 20 bp, synthetic construct
  misc_feature 1..20: note = chemically synthesized
  source 1..20: mol_type = other DNA
atggattcatggagatacat

SEQ ID NO: 68181 - DNA, 20 bp, synthetic construct
  misc_feature 1..20: note = chemically synthesized
  source 1..20: mol_type = other DNA
accagcaaaatcacctggac

SEQ ID NO: 68182 - DNA, 20 bp, synthetic construct
  misc_feature 1..20: note = chemically synthesized
  source 1..20: mol_type = other DNA
acctgtggacaaaaaaaaaa

SEQ ID NO: 68183 - DNA, 20 bp, synthetic construct
  misc_feature 1..20: note = chemically synthesized
  source 1..20: mol_type = other DNA
tctgaccagtacattggtgt

SEQ ID NO: 68184 - DNA, 20 bp, synthetic construct
  misc_feature 1..20: note = chemically synthesized
  source 1..20: mol_type = other DNA
tattcagaataatgtaaaga

SEQ ID NO: 68185 - DNA, 20 bp, synthetic construct
  misc_feature 1..20: note = chemically synthesized
  source 1..20: mol_type = other DNA
aaatctgagccaaagctcct

SEQ ID NO: 68186 - DNA, 20 bp, synthetic construct
  misc_feature 1..20: note = chemically synthesized
  source 1..20: mol_type = other DNA
gctgaaactcttgaaatgtt

SEQ ID NO: 68187 - DNA, 20 bp, synthetic construct
  misc_feature 1..20: note = chemically synthesized
  source 1..20: mol_type = other DNA
atcatttagccagaatagag

SEQ ID NO: 68188 - DNA, 20 bp, synthetic construct
  misc_feature 1..20: note = chemically synthesized
  source 1..20: mol_type = other DNA
gccagaatagagtccagttt

SEQ ID NO: 68189 - DNA, 20 bp, synthetic construct
  misc_feature 1..20: note = chemically synthesized
  source 1..20: mol_type = other DNA
ttcttaatgaaatataggtg

SEQ ID NO: 68190 - DNA, 20 bp, synthetic construct
  misc_feature 1..20: note = chemically synthesized
  source 1..20: mol_type = other DNA
taaaaataaaaaagctaaag

SEQ ID NO: 68191 - DNA, 20 bp, synthetic construct
  misc_feature 1..20: note = chemically synthesized
  source 1..20: mol_type = other DNA
tagtcacttttcaatttcac

SEQ ID NO: 68192 - DNA, 20 bp, synthetic construct
  misc_feature 1..20: note = chemically synthesized
  source 1..20: mol_type = other DNA
tttctgaaaaacctgggctc

SEQ ID NO: 68193 - DNA, 20 bp, synthetic construct
  misc_feature 1..20: note = chemically synthesized
  source 1..20: mol_type = other DNA
ttttaagctatacattagag

SEQ ID NO: 68194 - DNA, 20 bp, synthetic construct
  misc_feature 1..20: note = chemically synthesized
  source 1..20: mol_type = other DNA
tttcctagacacttcaataa

SEQ ID NO: 68195 - DNA, 20 bp, synthetic construct
  misc_feature 1..20: note = chemically synthesized
  source 1..20: mol_type = other DNA
agctcatgaatcagctaacc

SEQ ID NO: 68196 - DNA, 20 bp, synthetic construct
  misc_feature 1..20: note = chemically synthesized
  source 1..20: mol_type = other DNA
agctgttctttgaaagaaaa

SEQ ID NO: 68197 - DNA, 20 bp, synthetic construct
  misc_feature 1..20: note = chemically synthesized
  source 1..20: mol_type = other DNA
agagaaaagaggaaatggat

SEQ ID NO: 68198 - DNA, 20 bp, synthetic construct
  misc_feature 1..20: note = chemically synthesized
  source 1..20: mol_type = other DNA
actagtaggtcaattaaata

SEQ ID NO: 68199 - DNA, 20 bp, synthetic construct
  misc_feature 1..20: note = chemically synthesized
  source 1..20: mol_type = other DNA
caattaaatactttgatttc

SEQ ID NO: 68200 - DNA, 20 bp, synthetic construct
  misc_feature 1..20: note = chemically synthesized
  source 1..20: mol_type = other DNA
atttccacagatttgatccc

SEQ ID NO: 68201 - DNA, 20 bp, synthetic construct
  misc_feature 1..20: note = chemically synthesized
  source 1..20: mol_type = other DNA
cacagatttgatccccaatg

SEQ ID NO: 68202 - DNA, 20 bp, synthetic construct
  misc_feature 1..20: note = chemically synthesized
  source 1..20: mol_type = other DNA
gacactcccatccataagtc

SEQ ID NO: 68203 - DNA, 20 bp, synthetic construct
  misc_feature 1..20: note = chemically synthesized
  source 1..20: mol_type = other DNA
agttcctggttagttggata

SEQ ID NO: 68204 - DNA, 20 bp, synthetic construct
  misc_feature 1..20: note = chemically synthesized
  source 1..20: mol_type = other DNA
ctcctcaattattattgaga

SEQ ID NO: 68205 - DNA, 20 bp, synthetic construct
  misc_feature 1..20: note = chemically synthesized
  source 1..20: mol_type = other DNA
actcaccaatttttcttctc

SEQ ID NO: 68206 - DNA, 20 bp, synthetic construct
  misc_feature 1..20: note = chemically synthesized
  source 1..20: mol_type = other DNA
aatttttcttctccaaggat

SEQ ID NO: 68207 - DNA, 20 bp, synthetic construct
  misc_feature 1..20: note = chemically synthesized
  source 1..20: mol_type = other DNA
agctaatgtcataaatttta

SEQ ID NO: 68208 - DNA, 20 bp, synthetic construct
  misc_feature 1..20: note = chemically synthesized
  source 1..20: mol_type = other DNA
aggagttatgagcatgaaat

SEQ ID NO: 68209 - DNA, 20 bp, synthetic construct
  misc_feature 1..20: note = chemically synthesized
  source 1..20: mol_type = other DNA
ctaaagcccatttaatgcaa

SEQ ID NO: 68210 - DNA, 20 bp, synthetic construct
  misc_feature 1..20: note = chemically synthesized
  source 1..20: mol_type = other DNA
tggtgacattttcactgagg

SEQ ID NO: 68211 - DNA, 20 bp, synthetic construct
  misc_feature 1..20: note = chemically synthesized
  source 1..20: mol_type = other DNA
ttcttcccattttattttat

SEQ ID NO: 68212 - DNA, 20 bp, synthetic construct
  misc_feature 1..20: note = chemically synthesized
  source 1..20: mol_type = other DNA
acctttaaattattagtaaa

SEQ ID NO: 68213 - DNA, 20 bp, synthetic construct
  misc_feature 1..20: note = chemically synthesized
  source 1..20: mol_type = other DNA
attctccttgacattttaca

SEQ ID NO: 68214 - DNA, 20 bp, synthetic construct
  misc_feature 1..20: note = chemically synthesized
  source 1..20: mol_type = other DNA
tgacattttacagctggttt

SEQ ID NO: 68215 - DNA, 20 bp, synthetic construct
  misc_feature 1..20: note = chemically synthesized
  source 1..20: mol_type = other DNA
tagctaagagacacttgata

SEQ ID NO: 68216 - DNA, 20 bp, synthetic construct
  misc_feature 1..20: note = chemically synthesized
  source 1..20: mol_type = other DNA
taatggtggagaatatttat

SEQ ID NO: 68217 - DNA, 20 bp, synthetic construct
  misc_feature 1..20: note = chemically synthesized
  source 1..20: mol_type = other DNA
tactgttgcatgttgaatga

SEQ ID NO: 68218 - DNA, 20 bp, synthetic construct
  misc_feature 1..20: note = chemically synthesized
  source 1..20: mol_type = other DNA
caatttagactagtatacca

SEQ ID NO: 68219 - DNA, 20 bp, synthetic construct
  misc_feature 1..20: note = chemically synthesized
  source 1..20: mol_type = other DNA
ggtttcttcctcttctctta

SEQ ID NO: 68220 - DNA, 20 bp, synthetic construct
  misc_feature 1..20: note = chemically synthesized
  source 1..20: mol_type = other DNA
tcctataacaatatttccag

SEQ ID NO: 68221 - DNA, 20 bp, synthetic construct
  misc_feature 1..20: note = chemically synthesized
  source 1..20: mol_type = other DNA
acagcatgtactgcccaaat

SEQ ID NO: 68222 - DNA, 20 bp, synthetic construct
  misc_feature 1..20: note = chemically synthesized
  source 1..20: mol_type = other DNA
catatgcatcaataactatc

SEQ ID NO: 68223 - DNA, 20 bp, synthetic construct
  misc_feature 1..20: note = chemically synthesized
  source 1..20: mol_type = other DNA
ttgtatttttttagtagaga

SEQ ID NO: 68224 - DNA, 20 bp, synthetic construct
  misc_feature 1..20: note = chemically synthesized
  source 1..20: mol_type = other DNA
cctccgcccccaccaggttc

SEQ ID NO: 68225 - DNA, 20 bp, synthetic construct
  misc_feature 1..20: note = chemically synthesized
  source 1..20: mol_type = other DNA
tgcccaagcctcccaagtag

SEQ ID NO: 68226 - DNA, 20 bp, synthetic construct
  misc_feature 1..20: note = chemically synthesized
  source 1..20: mol_type = other DNA
ttttgtatttttagtagaga

SEQ ID NO: 68227 - DNA, 20 bp, synthetic construct
  misc_feature 1..20: note = chemically synthesized
  source 1..20: mol_type = other DNA
tgccttggcctcccaaagtg

SEQ ID NO: 68228 - DNA, 20 bp, synthetic construct
  misc_feature 1..20: note = chemically synthesized
  source 1..20: mol_type = other DNA
gagggagagagagagagtgg

SEQ ID NO: 68229 - DNA, 20 bp, synthetic construct
  misc_feature 1..20: note = chemically synthesized
  source 1..20: mol_type = other DNA
gagagagagtgggagggttt

SEQ ID NO: 68230 - DNA, 20 bp, synthetic construct
  misc_feature 1..20: note = chemically synthesized
  source 1..20: mol_type = other DNA
gagagtgggagggttttttt

SEQ ID NO: 68231 - DNA, 20 bp, synthetic construct
  misc_feature 1..20: note = chemically synthesized
  source 1..20: mol_type = other DNA
actctctgtcttcataagat

SEQ ID NO: 68232 - DNA, 20 bp, synthetic construct
  misc_feature 1..20: note = chemically synthesized
  source 1..20: mol_type = other DNA
aacatgtgatatttttcttt

SEQ ID NO: 68233 - DNA, 20 bp, synthetic construct
  misc_feature 1..20: note = chemically synthesized
  source 1..20: mol_type = other DNA
gtgatatttttctttctgtg

SEQ ID NO: 68234 - DNA, 20 bp, synthetic construct
  misc_feature 1..20: note = chemically synthesized
  source 1..20: mol_type = other DNA
tggcttatttcacttaacgt

SEQ ID NO: 68235 - DNA, 20 bp, synthetic construct
  misc_feature 1..20: note = chemically synthesized
  source 1..20: mol_type = other DNA
tatctgttgacgaatacatc

SEQ ID NO: 68236 - DNA, 20 bp, synthetic construct
  misc_feature 1..20: note = chemically synthesized
  source 1..20: mol_type = other DNA
catcagttgatttcaaatct

SEQ ID NO: 68237 - DNA, 20 bp, synthetic construct
  misc_feature 1..20: note = chemically synthesized
  source 1..20: mol_type = other DNA
tactcccaccaacagtgtaa

SEQ ID NO: 68238 - DNA, 20 bp, synthetic construct
  misc_feature 1..20: note = chemically synthesized
  source 1..20: mol_type = other DNA
cacaagcatctgttatttcc

SEQ ID NO: 68239 - DNA, 20 bp, synthetic construct
  misc_feature 1..20: note = chemically synthesized
  source 1..20: mol_type = other DNA
aaggtgagatgatatcacat

SEQ ID NO: 68240 - DNA, 20 bp, synthetic construct
  misc_feature 1..20: note = chemically synthesized
  source 1..20: mol_type = other DNA
gagatgatatcacattgtgg

SEQ ID NO: 68241 - DNA, 20 bp, synthetic construct
  misc_feature 1..20: note = chemically synthesized
  source 1..20: mol_type = other DNA
cattgtggttttgatttatc

SEQ ID NO: 68242 - DNA, 20 bp, synthetic construct
  misc_feature 1..20: note = chemically synthesized
  source 1..20: mol_type = other DNA
aaatacctctgggccatttg

SEQ ID NO: 68243 - DNA, 20 bp, synthetic construct
  misc_feature 1..20: note = chemically synthesized
  source 1..20: mol_type = other DNA
tatttatttattttctgttg

SEQ ID NO: 68244 - DNA, 20 bp, synthetic construct
  misc_feature 1..20: note = chemically synthesized
  source 1..20: mol_type = other DNA
tttattttctgttgagttgc

SEQ ID NO: 68245 - DNA, 20 bp, synthetic construct
  misc_feature 1..20: note = chemically synthesized
  source 1..20: mol_type = other DNA
tatcaattccttgtaaaata

SEQ ID NO: 68246 - DNA, 20 bp, synthetic construct
  misc_feature 1..20: note = chemically synthesized
  source 1..20: mol_type = other DNA
ttattattttctttgctgtg

SEQ ID NO: 68247 - DNA, 20 bp, synthetic construct
  misc_feature 1..20: note = chemically synthesized
  source 1..20: mol_type = other DNA
aaacaatcccaattgtctat

SEQ ID NO: 68248 - DNA, 20 bp, synthetic construct
  misc_feature 1..20: note = chemically synthesized
  source 1..20: mol_type = other DNA
tctatttttgttttggttat

SEQ ID NO: 68249 - DNA, 20 bp, synthetic construct
  misc_feature 1..20: note = chemically synthesized
  source 1..20: mol_type = other DNA
ccaaatcaatgaatgccctg

SEQ ID NO: 68250 - DNA, 20 bp, synthetic construct
  misc_feature 1..20: note = chemically synthesized
  source 1..20: mol_type = other DNA
aatgccctggagggtttccc

SEQ ID NO: 68251 - DNA, 20 bp, synthetic construct
  misc_feature 1..20: note = chemically synthesized
  source 1..20: mol_type = other DNA
tttccccactgttttcttcc

SEQ ID NO: 68252 - DNA, 20 bp, synthetic construct
  misc_feature 1..20: note = chemically synthesized
  source 1..20: mol_type = other DNA
gtagtttcataatttcaggt

SEQ ID NO: 68253 - DNA, 20 bp, synthetic construct
  misc_feature 1..20: note = chemically synthesized
  source 1..20: mol_type = other DNA
ggattcaagtctttaatcca

SEQ ID NO: 68254 - DNA, 20 bp, synthetic construct
  misc_feature 1..20: note = chemically synthesized
  source 1..20: mol_type = other DNA
caagtctttaatccatcttg

SEQ ID NO: 68255 - DNA, 20 bp, synthetic construct
  misc_feature 1..20: note = chemically synthesized
  source 1..20: mol_type = other DNA
gtatatagtgagagataggg

SEQ ID NO: 68256 - DNA, 20 bp, synthetic construct
  misc_feature 1..20: note = chemically synthesized
  source 1..20: mol_type = other DNA
tactcttttgcaaatggata

SEQ ID NO: 68257 - DNA, 20 bp, synthetic construct
  misc_feature 1..20: note = chemically synthesized
  source 1..20: mol_type = other DNA
tggatatccagttttcctag

SEQ ID NO: 68258 - DNA, 20 bp, synthetic construct
  misc_feature 1..20: note = chemically synthesized
  source 1..20: mol_type = other DNA
ctagcactgtttcttgaaaa

SEQ ID NO: 68259 - DNA, 20 bp, synthetic construct
  misc_feature 1..20: note = chemically synthesized
  source 1..20: mol_type = other DNA
aacttctgcctcccaggttc

SEQ ID NO: 68260 - DNA, 20 bp, synthetic construct
  misc_feature 1..20: note = chemically synthesized
  source 1..20: mol_type = other DNA
tgcctcagcctcctgagtat

SEQ ID NO: 68261 - DNA, 20 bp, synthetic construct
  misc_feature 1..20: note = chemically synthesized
  source 1..20: mol_type = other DNA
cacctcagcctcacaaagtg

SEQ ID NO: 68262 - DNA, 20 bp, synthetic construct
  misc_feature 1..20: note = chemically synthesized
  source 1..20: mol_type = other DNA
gatgacttggttgttaagtg

SEQ ID NO: 68263 - DNA, 20 bp, synthetic construct
  misc_feature 1..20: note = chemically synthesized
  source 1..20: mol_type = other DNA
tctgtctttatgcagtactg

SEQ ID NO: 68264 - DNA, 20 bp, synthetic construct
  misc_feature 1..20: note = chemically synthesized
  source 1..20: mol_type = other DNA
gtactgtgctgtttggctac

SEQ ID NO: 68265 - DNA, 20 bp, synthetic construct
  misc_feature 1..20: note = chemically synthesized
  source 1..20: mol_type = other DNA
tttggctactgtagctttgt

SEQ ID NO: 68266 - DNA, 20 bp, synthetic construct
  misc_feature 1..20: note = chemically synthesized
  source 1..20: mol_type = other DNA
attttgaagtcatatagtgt

SEQ ID NO: 68267 - DNA, 20 bp, synthetic construct
  misc_feature 1..20: note = chemically synthesized
  source 1..20: mol_type = other DNA
aagtcatatagtgtgatagc

SEQ ID NO: 68268 - DNA, 20 bp, synthetic construct
  misc_feature 1..20: note = chemically synthesized
  source 1..20: mol_type = other DNA
tttggttttgttctttttgc

SEQ ID NO: 68269 - DNA, 20 bp, synthetic construct
  misc_feature 1..20: note = chemically synthesized
  source 1..20: mol_type = other DNA
gttttgttctttttgctcag

SEQ ID NO: 68270 - DNA, 20 bp, synthetic construct
  misc_feature 1..20: note = chemically synthesized
  source 1..20: mol_type = other DNA
tttgtggttccatataaata

SEQ ID NO: 68271 - DNA, 20 bp, synthetic construct
  misc_feature 1..20: note = chemically synthesized
  source 1..20: mol_type = other DNA
tggttccatataaatattag

SEQ ID NO: 68272 - DNA, 20 bp, synthetic construct
  misc_feature 1..20: note = chemically synthesized
  source 1..20: mol_type = other DNA
gaaattgcactgaatctgta

SEQ ID NO: 68273 - DNA, 20 bp, synthetic construct
  misc_feature 1..20: note = chemically synthesized
  source 1..20: mol_type = other DNA
ccctcttctatttctttcac

SEQ ID NO: 68274 - DNA, 20 bp, synthetic construct
  misc_feature 1..20: note = chemically synthesized
  source 1..20: mol_type = other DNA
agagatcttttacttcttgg

SEQ ID NO: 68275 - DNA, 20 bp, synthetic construct
  misc_feature 1..20: note = chemically synthesized
  source 1..20: mol_type = other DNA
tatttttattgctattgtaa

SEQ ID NO: 68276 - DNA, 20 bp, synthetic construct
  misc_feature 1..20: note = chemically synthesized
  source 1..20: mol_type = other DNA
tttattgctattgtaaataa

SEQ ID NO: 68277 - DNA, 20 bp, synthetic construct
  misc_feature 1..20: note = chemically synthesized
  source 1..20: mol_type = other DNA
tattgtaaataagattgttt

SEQ ID NO: 68278 - DNA, 20 bp, synthetic construct
  misc_feature 1..20: note = chemically synthesized
  source 1..20: mol_type = other DNA
attgttttattgattttttt

SEQ ID NO: 68279 - DNA, 20 bp, synthetic construct
  misc_feature 1..20: note = chemically synthesized
  source 1..20: mol_type = other DNA
actttttatatatgaaatgc

SEQ ID NO: 68280 - DNA, 20 bp, synthetic construct
  misc_feature 1..20: note = chemically synthesized
  source 1..20: mol_type = other DNA
tatttcatatcctgtaactt

SEQ ID NO: 68281 - DNA, 20 bp, synthetic construct
  misc_feature 1..20: note = chemically synthesized
  source 1..20: mol_type = other DNA
taactttattgattttttta

SEQ ID NO: 68282 - DNA, 20 bp, synthetic construct
  misc_feature 1..20: note = chemically synthesized
  source 1..20: mol_type = other DNA
atcgttttaatagtatttag

SEQ ID NO: 68283 - DNA, 20 bp, synthetic construct
  misc_feature 1..20: note = chemically synthesized
  source 1..20: mol_type = other DNA
aatagtatttagtgaagttt

SEQ ID NO: 68284 - DNA, 20 bp, synthetic construct
  misc_feature 1..20: note = chemically synthesized
  source 1..20: mol_type = other DNA
gtccttagaggaaaggcctt

SEQ ID NO: 68285 - DNA, 20 bp, synthetic construct
  misc_feature 1..20: note = chemically synthesized
  source 1..20: mol_type = other DNA
tgttcagcataatgttagca

SEQ ID NO: 68286 - DNA, 20 bp, synthetic construct
  misc_feature 1..20: note = chemically synthesized
  source 1..20: mol_type = other DNA
ttagcacttggtttgtccta

SEQ ID NO: 68287 - DNA, 20 bp, synthetic construct
  misc_feature 1..20: note = chemically synthesized
  source 1..20: mol_type = other DNA
catttgttgttgtgtcctgg

SEQ ID NO: 68288 - DNA, 20 bp, synthetic construct
  misc_feature 1..20: note = chemically synthesized
  source 1..20: mol_type = other DNA
ctggtttgggtatattagag

SEQ ID NO: 68289 - DNA, 20 bp, synthetic construct
  misc_feature 1..20: note = chemically synthesized
  source 1..20: mol_type = other DNA
agtaatgcttgcctcataga

SEQ ID NO: 68290 - DNA, 20 bp, synthetic construct
  misc_feature 1..20: note = chemically synthesized
  source 1..20: mol_type = other DNA
tttagaagtaggcccttctt

SEQ ID NO: 68291 - DNA, 20 bp, synthetic construct
  misc_feature 1..20: note = chemically synthesized
  source 1..20: mol_type = other DNA
ggcccttcttttcagttttt

SEQ ID NO: 68292 - DNA, 20 bp, synthetic construct
  misc_feature 1..20: note = chemically synthesized
  source 1..20: mol_type = other DNA
cttcttttcagtttttattt

SEQ ID NO: 68293 - DNA, 20 bp, synthetic construct
  misc_feature 1..20: note = chemically synthesized
  source 1..20: mol_type = other DNA
ttttcagtttttatttgttt

SEQ ID NO: 68294 - DNA, 20 bp, synthetic construct
  misc_feature 1..20: note = chemically synthesized
  source 1..20: mol_type = other DNA
tgtttgtttgaggaatttga

SEQ ID NO: 68295 - DNA, 20 bp, synthetic construct
  misc_feature 1..20: note = chemically synthesized
  source 1..20: mol_type = other DNA
attagtattagttctacttg

SEQ ID NO: 68296 - DNA, 20 bp, synthetic construct
  misc_feature 1..20: note = chemically synthesized
  source 1..20: mol_type = other DNA
gtttggtagcccatcgagtc

SEQ ID NO: 68297 - DNA, 20 bp, synthetic construct
  misc_feature 1..20: note = chemically synthesized
  source 1..20: mol_type = other DNA
gttattcattattgttctat

SEQ ID NO: 68298 - DNA, 20 bp, synthetic construct
  misc_feature 1..20: note = chemically synthesized
  source 1..20: mol_type = other DNA
attattgttctattgaggtt

SEQ ID NO: 68299 - DNA, 20 bp, synthetic construct
  misc_feature 1..20: note = chemically synthesized
  source 1..20: mol_type = other DNA
tattgaggttttctgtttct

SEQ ID NO: 68300 - DNA, 20 bp, synthetic construct
  misc_feature 1..20: note = chemically synthesized
  source 1..20: mol_type = other DNA
ccaggaatttatccatttat

SEQ ID NO: 68301 - DNA, 20 bp, synthetic construct
  misc_feature 1..20: note = chemically synthesized
  source 1..20: mol_type = other DNA
tttatttgactcttttttct

SEQ ID NO: 68302 - DNA, 20 bp, synthetic construct
  misc_feature 1..20: note = chemically synthesized
  source 1..20: mol_type = other DNA
actcttttttcttaaagttt

SEQ ID NO: 68303 - DNA, 20 bp, synthetic construct
  misc_feature 1..20: note = chemically synthesized
  source 1..20: mol_type = other DNA
ttttcttaaagttttgttga

SEQ ID NO: 68304 - DNA, 20 bp, synthetic construct
  misc_feature 1..20: note = chemically synthesized
  source 1..20: mol_type = other DNA
gtttacctttccaagaaagc

SEQ ID NO: 68305 - DNA, 20 bp, synthetic construct
  misc_feature 1..20: note = chemically synthesized
  source 1..20: mol_type = other DNA
acctttccaagaaagcaact

SEQ ID NO: 68306 - DNA, 20 bp, synthetic construct
  misc_feature 1..20: note = chemically synthesized
  source 1..20: mol_type = other DNA
agaaagcaactgtttgtttt

SEQ ID NO: 68307 - DNA, 20 bp, synthetic construct
  misc_feature 1..20: note = chemically synthesized
  source 1..20: mol_type = other DNA
tattttttggtctcaatttc

SEQ ID NO: 68308 - DNA, 20 bp, synthetic construct
  misc_feature 1..20: note = chemically synthesized
  source 1..20: mol_type = other DNA
ccccttctattaattttgca

SEQ ID NO: 68309 - DNA, 20 bp, synthetic construct
  misc_feature 1..20: note = chemically synthesized
  source 1..20: mol_type = other DNA
taattttgcatttggtttgt

SEQ ID NO: 68310 - DNA, 20 bp, synthetic construct
  misc_feature 1..20: note = chemically synthesized
  source 1..20: mol_type = other DNA
tttcctatttccttgaggta

SEQ ID NO: 68311 - DNA, 20 bp, synthetic construct
  misc_feature 1..20: note = chemically synthesized
  source 1..20: mol_type = other DNA
ttccttgaggtacattgttt

SEQ ID NO: 68312 - DNA, 20 bp, synthetic construct
  misc_feature 1..20: note = chemically synthesized
  source 1..20: mol_type = other DNA
ctttctacttttttggatat

SEQ ID NO: 68313 - DNA, 20 bp, synthetic construct
  misc_feature 1..20: note = chemically synthesized
  source 1..20: mol_type = other DNA
gctatgaacttccctctaag

SEQ ID NO: 68314 - DNA, 20 bp, synthetic construct
  misc_feature 1..20: note = chemically synthesized
  source 1..20: mol_type = other DNA
tactgcttttgccatatcct

SEQ ID NO: 68315 - DNA, 20 bp, synthetic construct
  misc_feature 1..20: note = chemically synthesized
  source 1..20: mol_type = other DNA
tatgttgtatttccattttc

SEQ ID NO: 68316 - DNA, 20 bp, synthetic construct
  misc_feature 1..20: note = chemically synthesized
  source 1..20: mol_type = other DNA
ttccattttcacttgtttca

SEQ ID NO: 68317 - DNA, 20 bp, synthetic construct
  misc_feature 1..20: note = chemically synthesized
  source 1..20: mol_type = other DNA
ctttagtgactcattggtta

SEQ ID NO: 68318 - DNA, 20 bp, synthetic construct
  misc_feature 1..20: note = chemically synthesized
  source 1..20: mol_type = other DNA
ccctgtgaggagactaccaa

SEQ ID NO: 68319 - DNA, 20 bp, synthetic construct
  misc_feature 1..20: note = chemically synthesized
  source 1..20: mol_type = other DNA
aacaggctttgtgtgagcaa

SEQ ID NO: 68320 - DNA, 20 bp, synthetic construct
  misc_feature 1..20: note = chemically synthesized
  source 1..20: mol_type = other DNA
gcaaagggagataggagtgg

SEQ ID NO: 68321 - DNA, 20 bp, synthetic construct
  misc_feature 1..20: note = chemically synthesized
  source 1..20: mol_type = other DNA
gataggagtggggctgtttt

SEQ ID NO: 68322 - DNA, 20 bp, synthetic construct
  misc_feature 1..20: note = chemically synthesized
  source 1..20: mol_type = other DNA
ggtcacaaggtgctcagtag

SEQ ID NO: 68323 - DNA, 20 bp, synthetic construct
  misc_feature 1..20: note = chemically synthesized
  source 1..20: mol_type = other DNA
ctgcaggtcacaggggacat

SEQ ID NO: 68324 - DNA, 20 bp, synthetic construct
  misc_feature 1..20: note = chemically synthesized
  source 1..20: mol_type = other DNA
ggtcacaggggacatgatgg

SEQ ID NO: 68325 - DNA, 20 bp, synthetic construct
  misc_feature 1..20: note = chemically synthesized
  source 1..20: mol_type = other DNA
taatgggcgatatttctcag

SEQ ID NO: 68326 - DNA, 20 bp, synthetic construct
  misc_feature 1..20: note = chemically synthesized
  source 1..20: mol_type = other DNA
atttctcagggctgcttcga

SEQ ID NO: 68327 - DNA, 20 bp, synthetic construct
  misc_feature 1..20: note = chemically synthesized
  source 1..20: mol_type = other DNA
ggcgtgggaacctagagtgg

SEQ ID NO: 68328 - DNA, 20 bp, synthetic construct
  misc_feature 1..20: note = chemically synthesized
  source 1..20: mol_type = other DNA
gtgggagagattaagctgaa

SEQ ID NO: 68329 - DNA, 20 bp, synthetic construct
  misc_feature 1..20: note = chemically synthesized
  source 1..20: mol_type = other DNA
attattggtgatggcctgga

SEQ ID NO: 68330 - DNA, 20 bp, synthetic construct
  misc_feature 1..20: note = chemically synthesized
  source 1..20: mol_type = other DNA
atggcctggatacggttttg

SEQ ID NO: 68331 - DNA, 20 bp, synthetic construct
  misc_feature 1..20: note = chemically synthesized
  source 1..20: mol_type = other DNA
gaagtgggaggacctaggac

SEQ ID NO: 68332 - DNA, 20 bp, synthetic construct
  misc_feature 1..20: note = chemically synthesized
  source 1..20: mol_type = other DNA
atctgattaaagagtgccta

SEQ ID NO: 68333 - DNA, 20 bp, synthetic construct
  misc_feature 1..20: note = chemically synthesized
  source 1..20: mol_type = other DNA
attcaacatagtcctgccag

SEQ ID NO: 68334 - DNA, 20 bp, synthetic construct
  misc_feature 1..20: note = chemically synthesized
  source 1..20: mol_type = other DNA
ttacttcaagagttaagagt

SEQ ID NO: 68335 - DNA, 20 bp, synthetic construct
  misc_feature 1..20: note = chemically synthesized
  source 1..20: mol_type = other DNA
caccaggagatatcagctgt

SEQ ID NO: 68336 - DNA, 20 bp, synthetic construct
  misc_feature 1..20: note = chemically synthesized
  source 1..20: mol_type = other DNA
gacagaagatagcagggatg

SEQ ID NO: 68337 - DNA, 20 bp, synthetic construct
  misc_feature 1..20: note = chemically synthesized
  source 1..20: mol_type = other DNA
agtcctttttaagttggtgg

SEQ ID NO: 68338 - DNA, 20 bp, synthetic construct
  misc_feature 1..20: note = chemically synthesized
  source 1..20: mol_type = other DNA
tggtggctgagcttggtgag

SEQ ID NO: 68339 - DNA, 20 bp, synthetic construct
  misc_feature 1..20: note = chemically synthesized
  source 1..20: mol_type = other DNA
cggaggaccgtaagggatat

SEQ ID NO: 68340 - DNA, 20 bp, synthetic construct
  misc_feature 1..20: note = chemically synthesized
  source 1..20: mol_type = other DNA
tgaatactaagagcctgaaa

SEQ ID NO: 68341 - DNA, 20 bp, synthetic construct
  misc_feature 1..20: note = chemically synthesized
  source 1..20: mol_type = other DNA
aagagcctgaaaaactgctt

SEQ ID NO: 68342 - DNA, 20 bp, synthetic construct
  misc_feature 1..20: note = chemically synthesized
  source 1..20: mol_type = other DNA
tcctgggtgggggcaaatcc

SEQ ID NO: 68343 - DNA, 20 bp, synthetic construct
  misc_feature 1..20: note = chemically synthesized
  source 1..20: mol_type = other DNA
tgagaagttatttctttgag

SEQ ID NO: 68344 - DNA, 20 bp, synthetic construct
  misc_feature 1..20: note = chemically synthesized
  source 1..20: mol_type = other DNA
gaggttcgaagaggcaggct

SEQ ID NO: 68345 - DNA, 20 bp, synthetic construct
  misc_feature 1..20: note = chemically synthesized
  source 1..20: mol_type = other DNA
tatcaggaataatgtgggag

SEQ ID NO: 68346 - DNA, 20 bp, synthetic construct
  misc_feature 1..20: note = chemically synthesized
  source 1..20: mol_type = other DNA
gcatcaggtatgaggaagaa

SEQ ID NO: 68347 - DNA, 20 bp, synthetic construct
  misc_feature 1..20: note = chemically synthesized
  source 1..20: mol_type = other DNA
aatgtgaagagtgagctaag

SEQ ID NO: 68348 - DNA, 20 bp, synthetic construct
  misc_feature 1..20: note = chemically synthesized
  source 1..20: mol_type = other DNA
aagagtgagctaagcatagt

SEQ ID NO: 68349 - DNA, 20 bp, synthetic construct
  misc_feature 1..20: note = chemically synthesized
  source 1..20: mol_type = other DNA
tgcctaggaaggaaaggagt

SEQ ID NO: 68350 - DNA, 20 bp, synthetic construct
  misc_feature 1..20: note = chemically synthesized
  source 1..20: mol_type = other DNA
aaggagttgttgttttgtag

SEQ ID NO: 68351 - DNA, 20 bp, synthetic construct
  misc_feature 1..20: note = chemically synthesized
  source 1..20: mol_type = other DNA
tgttgttttgtagaagggat

SEQ ID NO: 68352 - DNA, 20 bp, synthetic construct
  misc_feature 1..20: note = chemically synthesized
  source 1..20: mol_type = other DNA
tgtagaagggattgaggttt

SEQ ID NO: 68353 - DNA, 20 bp, synthetic construct
  misc_feature 1..20: note = chemically synthesized
  source 1..20: mol_type = other DNA
acaatcagcagggagagcac

SEQ ID NO: 68354 - DNA, 20 bp, synthetic construct
  misc_feature 1..20: note = chemically synthesized
  source 1..20: mol_type = other DNA
gtaacacatgaggatgaaat

SEQ ID NO: 68355 - DNA, 20 bp, synthetic construct
  misc_feature 1..20: note = chemically synthesized
  source 1..20: mol_type = other DNA
gcaaaggaatagtaaagaaa

SEQ ID NO: 68356 - DNA, 20 bp, synthetic construct
  misc_feature 1..20: note = chemically synthesized
  source 1..20: mol_type = other DNA
tattgaggataggagagtat

SEQ ID NO: 68357 - DNA, 20 bp, synthetic construct
  misc_feature 1..20: note = chemically synthesized
  source 1..20: mol_type = other DNA
aaacaatttggttgataaga

SEQ ID NO: 68358 - DNA, 20 bp, synthetic construct
  misc_feature 1..20: note = chemically synthesized
  source 1..20: mol_type = other DNA
gcagattctgaactaacctg

SEQ ID NO: 68359 - DNA, 20 bp, synthetic construct
  misc_feature 1..20: note = chemically synthesized
  source 1..20: mol_type = other DNA
gaactaacctgtaaggcttg

SEQ ID NO: 68360 - DNA, 20 bp, synthetic construct
  misc_feature 1..20: note = chemically synthesized
  source 1..20: mol_type = other DNA
taaaatgggggaatggtaag

SEQ ID NO: 68361 - DNA, 20 bp, synthetic construct
  misc_feature 1..20: note = chemically synthesized
  source 1..20: mol_type = other DNA
gggaatggtaaggagagttt

SEQ ID NO: 68362 - DNA, 20 bp, synthetic construct
  misc_feature 1..20: note = chemically synthesized
  source 1..20: mol_type = other DNA
gctgtaacaggcaagtaata

SEQ ID NO: 68363 - DNA, 20 bp, synthetic construct
  misc_feature 1..20: note = chemically synthesized
  source 1..20: mol_type = other DNA
actggcattgagcggggtaa

SEQ ID NO: 68364 - DNA, 20 bp, synthetic construct
  misc_feature 1..20: note = chemically synthesized
  source 1..20: mol_type = other DNA
attgagcggggtaagagtga

SEQ ID NO: 68365 - DNA, 20 bp, synthetic construct
  misc_feature 1..20: note = chemically synthesized
  source 1..20: mol_type = other DNA
aagtagaggtgtcttatact

SEQ ID NO: 68366 - DNA, 20 bp, synthetic construct
  misc_feature 1..20: note = chemically synthesized
  source 1..20: mol_type = other DNA
atacaaggggaggatgtgaa

SEQ ID NO: 68367 - DNA, 20 bp, synthetic construct
  misc_feature 1..20: note = chemically synthesized
  source 1..20: mol_type = other DNA
aggtggggataatgaaaaag

SEQ ID NO: 68368 - DNA, 20 bp, synthetic construct
  misc_feature 1..20: note = chemically synthesized
  source 1..20: mol_type = other DNA
accagagttggggaatttta

SEQ ID NO: 68369 - DNA, 20 bp, synthetic construct
  misc_feature 1..20: note = chemically synthesized
  source 1..20: mol_type = other DNA
tgtggagtgggtagcctcca

SEQ ID NO: 68370 - DNA, 20 bp, synthetic construct
  misc_feature 1..20: note = chemically synthesized
  source 1..20: mol_type = other DNA
tcggtgtctgtgatggtcta

SEQ ID NO: 68371 - DNA, 20 bp, synthetic construct
  misc_feature 1..20: note = chemically synthesized
  source 1..20: mol_type = other DNA
gctgccaggtgagttgaaca

SEQ ID NO: 68372 - DNA, 20 bp, synthetic construct
  misc_feature 1..20: note = chemically synthesized
  source 1..20: mol_type = other DNA
ggggtcctgcacagatggga

SEQ ID NO: 68373 - DNA, 20 bp, synthetic construct
  misc_feature 1..20: note = chemically synthesized
  source 1..20: mol_type = other DNA
gggcattccttggcctggtg

SEQ ID NO: 68374 - DNA, 20 bp, synthetic construct
  misc_feature 1..20: note = chemically synthesized
  source 1..20: mol_type = other DNA
ccggaggaacgcctggccac

SEQ ID NO: 68375 - DNA, 20 bp, synthetic construct
  misc_feature 1..20: note = chemically synthesized
  source 1..20: mol_type = other DNA
ttgtgtgctggagatgtggc

SEQ ID NO: 68376 - DNA, 20 bp, synthetic construct
  misc_feature 1..20: note = chemically synthesized
  source 1..20: mol_type = other DNA
aggttaattgagtcctgttg

SEQ ID NO: 68377 - DNA, 20 bp, synthetic construct
  misc_feature 1..20: note = chemically synthesized
  source 1..20: mol_type = other DNA
gaggtccagaatttaatttt

SEQ ID NO: 68378 - DNA, 20 bp, synthetic construct
  misc_feature 1..20: note = chemically synthesized
  source 1..20: mol_type = other DNA
gagttttatttaatgtcagg

SEQ ID NO: 68379 - DNA, 20 bp, synthetic construct
  misc_feature 1..20: note = chemically synthesized
  source 1..20: mol_type = other DNA
cgaacgagccatgaactggg

SEQ ID NO: 68380 - DNA, 20 bp, synthetic construct
  misc_feature 1..20: note = chemically synthesized
  source 1..20: mol_type = other DNA
ttgatgaaagagcctaaacg

SEQ ID NO: 68381 - DNA, 20 bp, synthetic construct
  misc_feature 1..20: note = chemically synthesized
  source 1..20: mol_type = other DNA
gcattaaccttgactacgcc

SEQ ID NO: 68382 - DNA, 20 bp, synthetic construct
  misc_feature 1..20: note = chemically synthesized
  source 1..20: mol_type = other DNA
tgtgaggaggggaggtgata

SEQ ID NO: 68383 - DNA, 20 bp, synthetic construct
  misc_feature 1..20: note = chemically synthesized
  source 1..20: mol_type = other DNA
ggtggaggagctgaggctga

SEQ ID NO: 68384 - DNA, 20 bp, synthetic construct
  misc_feature 1..20: note = chemically synthesized
  source 1..20: mol_type = other DNA
tcagatgggtctgtagaaaa

SEQ ID NO: 68385 - DNA, 20 bp, synthetic construct
  misc_feature 1..20: note = chemically synthesized
  source 1..20: mol_type = other DNA
ggaagattagaaagactcag

SEQ ID NO: 68386 - DNA, 20 bp, synthetic construct
  misc_feature 1..20: note = chemically synthesized
  source 1..20: mol_type = other DNA
gacaggcgggagggaaagaa

SEQ ID NO: 68387 - DNA, 20 bp, synthetic construct
  misc_feature 1..20: note = chemically synthesized
  source 1..20: mol_type = other DNA
cctggacgtcaggcacctca

SEQ ID NO: 68388 - DNA, 20 bp, synthetic construct
  misc_feature 1..20: note = chemically synthesized
  source 1..20: mol_type = other DNA
tcaggcacctcagactgttt

SEQ ID NO: 68389 - DNA, 20 bp, synthetic construct
  misc_feature 1..20: note = chemically synthesized
  source 1..20: mol_type = other DNA
ctggctatttggaaccactg

SEQ ID NO: 68390 - DNA, 20 bp, synthetic construct
  misc_feature 1..20: note = chemically synthesized
  source 1..20: mol_type = other DNA
tgcagaagaaaataaggcat

SEQ ID NO: 68391 - DNA, 20 bp, synthetic construct
  misc_feature 1..20: note = chemically synthesized
  source 1..20: mol_type = other DNA
ttaggtcaggtgtgagttga

SEQ ID NO: 68392 - DNA, 20 bp, synthetic construct
  misc_feature 1..20: note = chemically synthesized
  source 1..20: mol_type = other DNA
agaggtcggggtgcagaaat

SEQ ID NO: 68393 - DNA, 20 bp, synthetic construct
  misc_feature 1..20: note = chemically synthesized
  source 1..20: mol_type = other DNA
agaggttggggcacagaaat

SEQ ID NO: 68394 - DNA, 20 bp, synthetic construct
  misc_feature 1..20: note = chemically synthesized
  source 1..20: mol_type = other DNA
acttacccccctccagaaaa

SEQ ID NO: 68395 - DNA, 20 bp, synthetic construct
  misc_feature 1..20: note = chemically synthesized
  source 1..20: mol_type = other DNA
gtggtctgacacctctgaaa

SEQ ID NO: 68396 - DNA, 20 bp, synthetic construct
  misc_feature 1..20: note = chemically synthesized
  source 1..20: mol_type = other DNA
taatcagagaggtgtccctg

SEQ ID NO: 68397 - DNA, 20 bp, synthetic construct
  misc_feature 1..20: note = chemically synthesized
  source 1..20: mol_type = other DNA
tcccagtccgtgactggcac

SEQ ID NO: 68398 - DNA, 20 bp, synthetic construct
  misc_feature 1..20: note = chemically synthesized
  source 1..20: mol_type = other DNA
ggagaaattgaagtgtggtg

SEQ ID NO: 68399 - DNA, 20 bp, synthetic construct
  misc_feature 1..20: note = chemically synthesized
  source 1..20: mol_type = other DNA
acagtaaaaagaggccactt

SEQ ID NO: 68400 - DNA, 20 bp, synthetic construct
  misc_feature 1..20: note = chemically synthesized
  source 1..20: mol_type = other DNA
taccggatttgaaattggtg

SEQ ID NO: 68401 - DNA, 20 bp, synthetic construct
  misc_feature 1..20: note = chemically synthesized
  source 1..20: mol_type = other DNA
gtgaaatgtttcttgggctg

SEQ ID NO: 68402 - DNA, 20 bp, synthetic construct
  misc_feature 1..20: note = chemically synthesized
  source 1..20: mol_type = other DNA
ggagcaaagagcaggaggac

SEQ ID NO: 68403 - DNA, 20 bp, synthetic construct
  misc_feature 1..20: note = chemically synthesized
  source 1..20: mol_type = other DNA
ccatatgaagagactaccaa

SEQ ID NO: 68404 - DNA, 20 bp, synthetic construct
  misc_feature 1..20: note = chemically synthesized
  source 1..20: mol_type = other DNA
aggctttgtgtaagcaacaa

SEQ ID NO: 68405 - DNA, 20 bp, synthetic construct
  misc_feature 1..20: note = chemically synthesized
  source 1..20: mol_type = other DNA
gcaaagggagataggagtgg

SEQ ID NO: 68406 - DNA, 20 bp, synthetic construct
  misc_feature 1..20: note = chemically synthesized
  source 1..20: mol_type = other DNA
gataggagtggggctgtttt

SEQ ID NO: 68407 - DNA, 20 bp, synthetic construct
  misc_feature 1..20: note = chemically synthesized
  source 1..20: mol_type = other DNA
ggtcacaaggtgctcagtag

SEQ ID NO: 68408 - DNA, 20 bp, synthetic construct
  misc_feature 1..20: note = chemically synthesized
  source 1..20: mol_type = other DNA
atgcaggtcacaggggacat

SEQ ID NO: 68409 - DNA, 20 bp, synthetic construct
  misc_feature 1..20: note = chemically synthesized
  source 1..20: mol_type = other DNA
ggtcacaggggacatgatgg

SEQ ID NO: 68410 - DNA, 20 bp, synthetic construct
  misc_feature 1..20: note = chemically synthesized
  source 1..20: mol_type = other DNA
aggcctgacattcaggagca

SEQ ID NO: 68411 - DNA, 20 bp, synthetic construct
  misc_feature 1..20: note = chemically synthesized
  source 1..20: mol_type = other DNA
ctgacattcaggagcatact

SEQ ID NO: 68412 - DNA, 20 bp, synthetic construct
  misc_feature 1..20: note = chemically synthesized
  source 1..20: mol_type = other DNA
gagcatactgtttgatttcc

SEQ ID NO: 68413 - DNA, 20 bp, synthetic construct
  misc_feature 1..20: note = chemically synthesized
  source 1..20: mol_type = other DNA
tgatcttcttgttattcatt

SEQ ID NO: 68414 - DNA, 20 bp, synthetic construct
  misc_feature 1..20: note = chemically synthesized
  source 1..20: mol_type = other DNA
atttaggaaaatgttgtaca

SEQ ID NO: 68415 - DNA, 20 bp, synthetic construct
  misc_feature 1..20: note = chemically synthesized
  source 1..20: mol_type = other DNA
cattaactgtgttgttcatt

SEQ ID NO: 68416 - DNA, 20 bp, synthetic construct
  misc_feature 1..20: note = chemically synthesized
  source 1..20: mol_type = other DNA
tctgttcattactgagactg

SEQ ID NO: 68417 - DNA, 20 bp, synthetic construct
  misc_feature 1..20: note = chemically synthesized
  source 1..20: mol_type = other DNA
gtctcgccctttaggactat

SEQ ID NO: 68418 - DNA, 20 bp, synthetic construct
  misc_feature 1..20: note = chemically synthesized
  source 1..20: mol_type = other DNA
tgaccctccttatcttttct

SEQ ID NO: 68419 - DNA, 20 bp, synthetic construct
  misc_feature 1..20: note = chemically synthesized
  source 1..20: mol_type = other DNA
ttaaatttgtagtctatttt

SEQ ID NO: 68420 - DNA, 20 bp, synthetic construct
  misc_feature 1..20: note = chemically synthesized
  source 1..20: mol_type = other DNA
gtacaattactactgctctt

SEQ ID NO: 68421 - DNA, 20 bp, synthetic construct
  misc_feature 1..20: note = chemically synthesized
  source 1..20: mol_type = other DNA
tgtgtgcctttataggtgaa

SEQ ID NO: 68422 - DNA, 20 bp, synthetic construct
  misc_feature 1..20: note = chemically synthesized
  source 1..20: mol_type = other DNA
gaagatcgcataaagttgga

SEQ ID NO: 68423 - DNA, 20 bp, synthetic construct
  misc_feature 1..20: note = chemically synthesized
  source 1..20: mol_type = other DNA
cactcagtgtagttactaag

SEQ ID NO: 68424 - DNA, 20 bp, synthetic construct
  misc_feature 1..20: note = chemically synthesized
  source 1..20: mol_type = other DNA
tttttttttttttttttttt

SEQ ID NO: 68425 - DNA, 20 bp, synthetic construct
  misc_feature 1..20: note = chemically synthesized
  source 1..20: mol_type = other DNA
cttttttttccttcatggtt

SEQ ID NO: 68426 - DNA, 20 bp, synthetic construct
  misc_feature 1..20: note = chemically synthesized
  source 1..20: mol_type = other DNA
tttatttttagtaaatctat

SEQ ID NO: 68427 - DNA, 20 bp, synthetic construct
  misc_feature 1..20: note = chemically synthesized
  source 1..20: mol_type = other DNA
tttttgtgctgtggttacca

SEQ ID NO: 68428 - DNA, 20 bp, synthetic construct
  misc_feature 1..20: note = chemically synthesized
  source 1..20: mol_type = other DNA
taaaaggttgctatagctat

SEQ ID NO: 68429 - DNA, 20 bp, synthetic construct
  misc_feature 1..20: note = chemically synthesized
  source 1..20: mol_type = other DNA
ctatagctattactgttttt

SEQ ID NO: 68430 - DNA, 20 bp, synthetic construct
  misc_feature 1..20: note = chemically synthesized
  source 1..20: mol_type = other DNA
gctattactgtttttgaaag

SEQ ID NO: 68431 - DNA, 20 bp, synthetic construct
  misc_feature 1..20: note = chemically synthesized
  source 1..20: mol_type = other DNA
gtttttgaaagatttgtttt

SEQ ID NO: 68432 - DNA, 20 bp, synthetic construct
  misc_feature 1..20: note = chemically synthesized
  source 1..20: mol_type = other DNA
ggtttcatactggagttctg

SEQ ID NO: 68433 - DNA, 20 bp, synthetic construct
  misc_feature 1..20: note = chemically synthesized
  source 1..20: mol_type = other DNA
aaatacagtaatggggtatt

SEQ ID NO: 68434 - DNA, 20 bp, synthetic construct
  misc_feature 1..20: note = chemically synthesized
  source 1..20: mol_type = other DNA
ctatgtacttaattttacca

SEQ ID NO: 68435 - DNA, 20 bp, synthetic construct
  misc_feature 1..20: note = chemically synthesized
  source 1..20: mol_type = other DNA
ccagtgggtttcatactttg

SEQ ID NO: 68436 - DNA, 20 bp, synthetic construct
  misc_feature 1..20: note = chemically synthesized
  source 1..20: mol_type = other DNA
catgttaatgtcttttttct

SEQ ID NO: 68437 - DNA, 20 bp, synthetic construct
  misc_feature 1..20: note = chemically synthesized
  source 1..20: mol_type = other DNA
tgttggtgaattctctcaac

SEQ ID NO: 68438 - DNA, 20 bp, synthetic construct
  misc_feature 1..20: note = chemically synthesized
  source 1..20: mol_type = other DNA
tgtctgggaaagactttata

SEQ ID NO: 68439 - DNA, 20 bp, synthetic construct
  misc_feature 1..20: note = chemically synthesized
  source 1..20: mol_type = other DNA
tatattgcttatatttgaat

SEQ ID NO: 68440 - DNA, 20 bp, synthetic construct
  misc_feature 1..20: note = chemically synthesized
  source 1..20: mol_type = other DNA
cctataaaatattcttgaat

SEQ ID NO: 68441 - DNA, 20 bp, synthetic construct
  misc_feature 1..20: note = chemically synthesized
  source 1..20: mol_type = other DNA
atcagttttcttttatccct

SEQ ID NO: 68442 - DNA, 20 bp, synthetic construct
  misc_feature 1..20: note = chemically synthesized
  source 1..20: mol_type = other DNA
attcgactctctcttggact

SEQ ID NO: 68443 - DNA, 20 bp, synthetic construct
  misc_feature 1..20: note = chemically synthesized
  source 1..20: mol_type = other DNA
ggactgtgtgatttctattg

SEQ ID NO: 68444 - DNA, 20 bp, synthetic construct
  misc_feature 1..20: note = chemically synthesized
  source 1..20: mol_type = other DNA
ctattgagatgtttgttgtc

SEQ ID NO: 68445 - DNA, 20 bp, synthetic construct
  misc_feature 1..20: note = chemically synthesized
  source 1..20: mol_type = other DNA
ttggagctcctttatatgct

SEQ ID NO: 68446 - DNA, 20 bp, synthetic construct
  misc_feature 1..20: note = chemically synthesized
  source 1..20: mol_type = other DNA
tgctatttgtttctcatctc

SEQ ID NO: 68447 - DNA, 20 bp, synthetic construct
  misc_feature 1..20: note = chemically synthesized
  source 1..20: mol_type = other DNA
atagtaagtgaagtgaagtt

SEQ ID NO: 68448 - DNA, 20 bp, synthetic construct
  misc_feature 1..20: note = chemically synthesized
  source 1..20: mol_type = other DNA
tcatgaatctcaaaggagaa

SEQ ID NO: 68449 - DNA, 20 bp, synthetic construct
  misc_feature 1..20: note = chemically synthesized
  source 1..20: mol_type = other DNA
aaggagaaaatggtttacag

SEQ ID NO: 68450 - DNA, 20 bp, synthetic construct
  misc_feature 1..20: note = chemically synthesized
  source 1..20: mol_type = other DNA
tacagaattgcttggtgttc

SEQ ID NO: 68451 - DNA, 20 bp, synthetic construct
  misc_feature 1..20: note = chemically synthesized
  source 1..20: mol_type = other DNA
taatatggtgggctaaagaa

SEQ ID NO: 68452 - DNA, 20 bp, synthetic construct
  misc_feature 1..20: note = chemically synthesized
  source 1..20: mol_type = other DNA
gctaaagaatcaggttttta

SEQ ID NO: 68453 - DNA, 20 bp, synthetic construct
  misc_feature 1..20: note = chemically synthesized
  source 1..20: mol_type = other DNA
tcaggtttttagttggattg

SEQ ID NO: 68454 - DNA, 20 bp, synthetic construct
  misc_feature 1..20: note = chemically synthesized
  source 1..20: mol_type = other DNA
ttggattgtctggttttgag

SEQ ID NO: 68455 - DNA, 20 bp, synthetic construct
  misc_feature 1..20: note = chemically synthesized
  source 1..20: mol_type = other DNA
ggcatgatgacttgacttct

SEQ ID NO: 68456 - DNA, 20 bp, synthetic construct
  misc_feature 1..20: note = chemically synthesized
  source 1..20: mol_type = other DNA
atgacttgacttctctatgt

SEQ ID NO: 68457 - DNA, 20 bp, synthetic construct
  misc_feature 1..20: note = chemically synthesized
  source 1..20: mol_type = other DNA
atttcttcatatatttgttc

SEQ ID NO: 68458 - DNA, 20 bp, synthetic construct
  misc_feature 1..20: note = chemically synthesized
  source 1..20: mol_type = other DNA
tgactttaatttttatgtac

SEQ ID NO: 68459 - DNA, 20 bp, synthetic construct
  misc_feature 1..20: note = chemically synthesized
  source 1..20: mol_type = other DNA
ctgtgtattcacgtattgta

SEQ ID NO: 68460 - DNA, 20 bp, synthetic construct
  misc_feature 1..20: note = chemically synthesized
  source 1..20: mol_type = other DNA
attttactaggaactttgct

SEQ ID NO: 68461 - DNA, 20 bp, synthetic construct
  misc_feature 1..20: note = chemically synthesized
  source 1..20: mol_type = other DNA
taatcttcaagatcataaaa

SEQ ID NO: 68462 - DNA, 20 bp, synthetic construct
  misc_feature 1..20: note = chemically synthesized
  source 1..20: mol_type = other DNA
aattactaatagcaagatag

SEQ ID NO: 68463 - DNA, 20 bp, synthetic construct
  misc_feature 1..20: note = chemically synthesized
  source 1..20: mol_type = other DNA
aggacttggctcttgggtgt

SEQ ID NO: 68464 - DNA, 20 bp, synthetic construct
  misc_feature 1..20: note = chemically synthesized
  source 1..20: mol_type = other DNA
taaagttacaaaaattatct

SEQ ID NO: 68465 - DNA, 20 bp, synthetic construct
  misc_feature 1..20: note = chemically synthesized
  source 1..20: mol_type = other DNA
accaataattattgttaagg

SEQ ID NO: 68466 - DNA, 20 bp, synthetic construct
  misc_feature 1..20: note = chemically synthesized
  source 1..20: mol_type = other DNA
gaatttttttttaaatccca

SEQ ID NO: 68467 - DNA, 20 bp, synthetic construct
  misc_feature 1..20: note = chemically synthesized
  source 1..20: mol_type = other DNA
actacattgaacactttcaa

SEQ ID NO: 68468 - DNA, 20 bp, synthetic construct
  misc_feature 1..20: note = chemically synthesized
  source 1..20: mol_type = other DNA
ctgataatcactcaagactg

SEQ ID NO: 68469 - DNA, 20 bp, synthetic construct
  misc_feature 1..20: note = chemically synthesized
  source 1..20: mol_type = other DNA
gggctctgcaatccctgtct

SEQ ID NO: 68470 - DNA, 20 bp, synthetic construct
  misc_feature 1..20: note = chemically synthesized
  source 1..20: mol_type = other DNA
tcttctggtcctccctacct

SEQ ID NO: 68471 - DNA, 20 bp, synthetic construct
  misc_feature 1..20: note = chemically synthesized
  source 1..20: mol_type = other DNA
tccctacctttttgtttgtc

SEQ ID NO: 68472 - DNA, 20 bp, synthetic construct
  misc_feature 1..20: note = chemically synthesized
  source 1..20: mol_type = other DNA
tcagaagcttgtctactacc

SEQ ID NO: 68473 - DNA, 20 bp, synthetic construct
  misc_feature 1..20: note = chemically synthesized
  source 1..20: mol_type = other DNA
aagactattgcaggagtagg

SEQ ID NO: 68474 - DNA, 20 bp, synthetic construct
  misc_feature 1..20: note = chemically synthesized
  source 1..20: mol_type = other DNA
gcaggagtaggccttgcttt

SEQ ID NO: 68475 - DNA, 20 bp, synthetic construct
  misc_feature 1..20: note = chemically synthesized
  source 1..20: mol_type = other DNA
aaacagtattttcaagtagt

SEQ ID NO: 68476 - DNA, 20 bp, synthetic construct
  misc_feature 1..20: note = chemically synthesized
  source 1..20: mol_type = other DNA
attgaactcattaaaaataa

SEQ ID NO: 68477 - DNA, 20 bp, synthetic construct
  misc_feature 1..20: note = chemically synthesized
  source 1..20: mol_type = other DNA
aaaatagctttctaaagcca

SEQ ID NO: 68478 - DNA, 20 bp, synthetic construct
  misc_feature 1..20: note = chemically synthesized
  source 1..20: mol_type = other DNA
cctgaccagttaaaagttat

SEQ ID NO: 68479 - DNA, 20 bp, synthetic construct
  misc_feature 1..20: note = chemically synthesized
  source 1..20: mol_type = other DNA
gcttcatggtgcatattcaa

SEQ ID NO: 68480 - DNA, 20 bp, synthetic construct
  misc_feature 1..20: note = chemically synthesized
  source 1..20: mol_type = other DNA
ttttgttattattatcattc

SEQ ID NO: 68481 - DNA, 20 bp, synthetic construct
  misc_feature 1..20: note = chemically synthesized
  source 1..20: mol_type = other DNA
aaatgtgcaaatcttagctg

SEQ ID NO: 68482 - DNA, 20 bp, synthetic construct
  misc_feature 1..20: note = chemically synthesized
  source 1..20: mol_type = other DNA
tccatcagaggtaagcaggg

SEQ ID NO: 68483 - DNA, 20 bp, synthetic construct
  misc_feature 1..20: note = chemically synthesized
  source 1..20: mol_type = other DNA
acaatatgtactcttttgtg

SEQ ID NO: 68484 - DNA, 20 bp, synthetic construct
  misc_feature 1..20: note = chemically synthesized
  source 1..20: mol_type = other DNA
atgtcactgaattgagtatt

SEQ ID NO: 68485 - DNA, 20 bp, synthetic construct
  misc_feature 1..20: note = chemically synthesized
  source 1..20: mol_type = other DNA
attctcagggaaatatataa

SEQ ID NO: 68486 - DNA, 20 bp, synthetic construct
  misc_feature 1..20: note = chemically synthesized
  source 1..20: mol_type = other DNA
aacaacgctgttgcgaattt

SEQ ID NO: 68487 - DNA, 20 bp, synthetic construct
  misc_feature 1..20: note = chemically synthesized
  source 1..20: mol_type = other DNA
atcgttaatgccaaagagga

SEQ ID NO: 68488 - DNA, 20 bp, synthetic construct
  misc_feature 1..20: note = chemically synthesized
  source 1..20: mol_type = other DNA
ttgtaggtgtgaatgttatg

SEQ ID NO: 68489 - DNA, 20 bp, synthetic construct
  misc_feature 1..20: note = chemically synthesized
  source 1..20: mol_type = other DNA
gcacatggagactggaatat

SEQ ID NO: 68490 - DNA, 20 bp, synthetic construct
  misc_feature 1..20: note = chemically synthesized
  source 1..20: mol_type = other DNA
gttaaaataagcatagagat

SEQ ID NO: 68491 - DNA, 20 bp, synthetic construct
  misc_feature 1..20: note = chemically synthesized
  source 1..20: mol_type = other DNA
ctgaagaaactgctaacttg

SEQ ID NO: 68492 - DNA, 20 bp, synthetic construct
  misc_feature 1..20: note = chemically synthesized
  source 1..20: mol_type = other DNA
catttaattgacgtgtaatc

SEQ ID NO: 68493 - DNA, 20 bp, synthetic construct
  misc_feature 1..20: note = chemically synthesized
  source 1..20: mol_type = other DNA
taatcttgggattatattaa

SEQ ID NO: 68494 - DNA, 20 bp, synthetic construct
  misc_feature 1..20: note = chemically synthesized
  source 1..20: mol_type = other DNA
attttaaagtaatatttata

SEQ ID NO: 68495 - DNA, 20 bp, synthetic construct
  misc_feature 1..20: note = chemically synthesized
  source 1..20: mol_type = other DNA
ttaatatattagaacacaag

SEQ ID NO: 68496 - DNA, 20 bp, synthetic construct
  misc_feature 1..20: note = chemically synthesized
  source 1..20: mol_type = other DNA
ctctttctccacctgctatc

SEQ ID NO: 68497 - DNA, 20 bp, synthetic construct
  misc_feature 1..20: note = chemically synthesized
  source 1..20: mol_type = other DNA
tgtgatggtggggctagggt

SEQ ID NO: 68498 - DNA, 20 bp, synthetic construct
  misc_feature 1..20: note = chemically synthesized
  source 1..20: mol_type = other DNA
ttagagatatttatctggga

SEQ ID NO: 68499 - DNA, 20 bp, synthetic construct
  misc_feature 1..20: note = chemically synthesized
  source 1..20: mol_type = other DNA
aatatttccaaataaaaatg

SEQ ID NO: 68500 - DNA, 20 bp, synthetic construct
  misc_feature 1..20: note = chemically synthesized
  source 1..20: mol_type = other DNA
atgccctgatttttaccagt

SEQ ID NO: 68501 - DNA, 20 bp, synthetic construct
  misc_feature 1..20: note = chemically synthesized
  source 1..20: mol_type = other DNA
ttttaccagttaccgatttt

SEQ ID NO: 68502 - DNA, 20 bp, synthetic construct
  misc_feature 1..20: note = chemically synthesized
  source 1..20: mol_type = other DNA
gcagagctgagatgagcata

SEQ ID NO: 68503 - DNA, 20 bp, synthetic construct
  misc_feature 1..20: note = chemically synthesized
  source 1..20: mol_type = other DNA
aatccatgcatactatttgt

SEQ ID NO: 68504 - DNA, 20 bp, synthetic construct
  misc_feature 1..20: note = chemically synthesized
  source 1..20: mol_type = other DNA
tagttactacctccctgtat

SEQ ID NO: 68505 - DNA, 20 bp, synthetic construct
  misc_feature 1..20: note = chemically synthesized
  source 1..20: mol_type = other DNA
gactggaggacatagagaca

SEQ ID NO: 68506 - DNA, 20 bp, synthetic construct
  misc_feature 1..20: note = chemically synthesized
  source 1..20: mol_type = other DNA
ttataatttaaatataagac

SEQ ID NO: 68507 - DNA, 20 bp, synthetic construct
  misc_feature 1..20: note = chemically synthesized
  source 1..20: mol_type = other DNA
aagacaggtaataatagtgt

SEQ ID NO: 68508 - DNA, 20 bp, synthetic construct
  misc_feature 1..20: note = chemically synthesized
  source 1..20: mol_type = other DNA
gtaataatagtgttagagat

SEQ ID NO: 68509 - DNA, 20 bp, synthetic construct
  misc_feature 1..20: note = chemically synthesized
  source 1..20: mol_type = other DNA
gattcttgattccacctgaa

SEQ ID NO: 68510 - DNA, 20 bp, synthetic construct
  misc_feature 1..20: note = chemically synthesized
  source 1..20: mol_type = other DNA
ggttggtctccaagcatgat

SEQ ID NO: 68511 - DNA, 20 bp, synthetic construct
  misc_feature 1..20: note = chemically synthesized
  source 1..20: mol_type = other DNA
taaatatggatctaattcta

SEQ ID NO: 68512 - DNA, 20 bp, synthetic construct
  misc_feature 1..20: note = chemically synthesized
  source 1..20: mol_type = other DNA
tctaattctagactgttttc

SEQ ID NO: 68513 - DNA, 20 bp, synthetic construct
  misc_feature 1..20: note = chemically synthesized
  source 1..20: mol_type = other DNA
tgcacatactgccgttctta

SEQ ID NO: 68514 - DNA, 20 bp, synthetic construct
  misc_feature 1..20: note = chemically synthesized
  source 1..20: mol_type = other DNA
taactttgtattctttcaaa

SEQ ID NO: 68515 - DNA, 20 bp, synthetic construct
  misc_feature 1..20: note = chemically synthesized
  source 1..20: mol_type = other DNA
catgggtaaatcttcatgaa

SEQ ID NO: 68516 - DNA, 20 bp, synthetic construct
  misc_feature 1..20: note = chemically synthesized
  source 1..20: mol_type = other DNA
ttcatgaactttgattttac

SEQ ID NO: 68517 - DNA, 20 bp, synthetic construct
  misc_feature 1..20: note = chemically synthesized
  source 1..20: mol_type = other DNA
aacaaaaaataaatacataa

SEQ ID NO: 68518 - DNA, 20 bp, synthetic construct
  misc_feature 1..20: note = chemically synthesized
  source 1..20: mol_type = other DNA
ctttgcaaattatgtatttc

SEQ ID NO: 68519 - DNA, 20 bp, synthetic construct
  misc_feature 1..20: note = chemically synthesized
  source 1..20: mol_type = other DNA
gtatatattaaaaatatata

SEQ ID NO: 68520 - DNA, 20 bp, synthetic construct
  misc_feature 1..20: note = chemically synthesized
  source 1..20: mol_type = other DNA
gtccttatttaatgtcatga

SEQ ID NO: 68521 - DNA, 20 bp, synthetic construct
  misc_feature 1..20: note = chemically synthesized
  source 1..20: mol_type = other DNA
taaaacagatcctcaaataa

SEQ ID NO: 68522 - DNA, 20 bp, synthetic construct
  misc_feature 1..20: note = chemically synthesized
  source 1..20: mol_type = other DNA
atggatatcattatatgtca

SEQ ID NO: 68523 - DNA, 20 bp, synthetic construct
  misc_feature 1..20: note = chemically synthesized
  source 1..20: mol_type = other DNA
tcattatatgtcacttggct

SEQ ID NO: 68524 - DNA, 20 bp, synthetic construct
  misc_feature 1..20: note = chemically synthesized
  source 1..20: mol_type = other DNA
tatgtcacttggcttaaagt

SEQ ID NO: 68525 - DNA, 20 bp, synthetic construct
  misc_feature 1..20: note = chemically synthesized
  source 1..20: mol_type = other DNA
tatatgaattatctaaaata

SEQ ID NO: 68526 - DNA, 20 bp, synthetic construct
  misc_feature 1..20: note = chemically synthesized
  source 1..20: mol_type = other DNA
actgatttagagaaacatat

SEQ ID NO: 68527 - DNA, 20 bp, synthetic construct
  misc_feature 1..20: note = chemically synthesized
  source 1..20: mol_type = other DNA
ctgcctaacaagtatagcat

SEQ ID NO: 68528 - DNA, 20 bp, synthetic construct
  misc_feature 1..20: note = chemically synthesized
  source 1..20: mol_type = other DNA
catttctgcttggatgatga

SEQ ID NO: 68529 - DNA, 20 bp, synthetic construct
  misc_feature 1..20: note = chemically synthesized
  source 1..20: mol_type = other DNA
acttaaaaatggttaatatg

SEQ ID NO: 68530 - DNA, 20 bp, synthetic construct
  misc_feature 1..20: note = chemically synthesized
  source 1..20: mol_type = other DNA
taaaacaagacaaattttta

SEQ ID NO: 68531 - DNA, 20 bp, synthetic construct
  misc_feature 1..20: note = chemically synthesized
  source 1..20: mol_type = other DNA
gttgaattgaatttattatg

SEQ ID NO: 68532 - DNA, 20 bp, synthetic construct
  misc_feature 1..20: note = chemically synthesized
  source 1..20: mol_type = other DNA
tatacagttctattatcatt

SEQ ID NO: 68533 - DNA, 20 bp, synthetic construct
  misc_feature 1..20: note = chemically synthesized
  source 1..20: mol_type = other DNA
ttatcattttgggttttatt

SEQ ID NO: 68534 - DNA, 20 bp, synthetic construct
  misc_feature 1..20: note = chemically synthesized
  source 1..20: mol_type = other DNA
gttttattttttgtttttct

SEQ ID NO: 68535 - DNA, 20 bp, synthetic construct
  misc_feature 1..20: note = chemically synthesized
  source 1..20: mol_type = other DNA
ttttttgtttttctttttgt

SEQ ID NO: 68536 - DNA, 20 bp, synthetic construct
  misc_feature 1..20: note = chemically synthesized
  source 1..20: mol_type = other DNA
ttgtttttgttttacgtatt

SEQ ID NO: 68537 - DNA, 20 bp, synthetic construct
  misc_feature 1..20: note = chemically synthesized
  source 1..20: mol_type = other DNA
tgcctcagcctcccatgtag

SEQ ID NO: 68538 - DNA, 20 bp, synthetic construct
  misc_feature 1..20: note = chemically synthesized
  source 1..20: mol_type = other DNA
cttgcagttgcataaaacat

SEQ ID NO: 68539 - DNA, 20 bp, synthetic construct
  misc_feature 1..20: note = chemically synthesized
  source 1..20: mol_type = other DNA
atgtaaataaagaaatacac

SEQ ID NO: 68540 - DNA, 20 bp, synthetic construct
  misc_feature 1..20: note = chemically synthesized
  source 1..20: mol_type = other DNA
ttctccccccgaaatcaaaa

SEQ ID NO: 68541 - DNA, 20 bp, synthetic construct
  misc_feature 1..20: note = chemically synthesized
  source 1..20: mol_type = other DNA
ccccccgaaatcaaaatttt

SEQ ID NO: 68542 - DNA, 20 bp, synthetic construct
  misc_feature 1..20: note = chemically synthesized
  source 1..20: mol_type = other DNA
atcacttagcaccctgtacc

SEQ ID NO: 68543 - DNA, 20 bp, synthetic construct
  misc_feature 1..20: note = chemically synthesized
  source 1..20: mol_type = other DNA
agcaccctgtaccttttgtt

SEQ ID NO: 68544 - DNA, 20 bp, synthetic construct
  misc_feature 1..20: note = chemically synthesized
  source 1..20: mol_type = other DNA
aattctgtctagaacaccat

SEQ ID NO: 68545 - DNA, 20 bp, synthetic construct
  misc_feature 1..20: note = chemically synthesized
  source 1..20: mol_type = other DNA
acaccatatcagttttagct

SEQ ID NO: 68546 - DNA, 20 bp, synthetic construct
  misc_feature 1..20: note = chemically synthesized
  source 1..20: mol_type = other DNA
agctaagtgcttccaaaact

SEQ ID NO: 68547 - DNA, 20 bp, synthetic construct
  misc_feature 1..20: note = chemically synthesized
  source 1..20: mol_type = other DNA
tccaaaactccctgctttaa

SEQ ID NO: 68548 - DNA, 20 bp, synthetic construct
  misc_feature 1..20: note = chemically synthesized
  source 1..20: mol_type = other DNA
aactccctgctttaaaattg

SEQ ID NO: 68549 - DNA, 20 bp, synthetic construct
  misc_feature 1..20: note = chemically synthesized
  source 1..20: mol_type = other DNA
tttccctttcccttcctgct

SEQ ID NO: 68550 - DNA, 20 bp, synthetic construct
  misc_feature 1..20: note = chemically synthesized
  source 1..20: mol_type = other DNA
cagaatctgagtgctcaact

SEQ ID NO: 68551 - DNA, 20 bp, synthetic construct
  misc_feature 1..20: note = chemically synthesized
  source 1..20: mol_type = other DNA
tgctcaactgaaagtttatt

SEQ ID NO: 68552 - DNA, 20 bp, synthetic construct
  misc_feature 1..20: note = chemically synthesized
  source 1..20: mol_type = other DNA
ctgtgtagctatatatgtat

SEQ ID NO: 68553 - DNA, 20 bp, synthetic construct
  misc_feature 1..20: note = chemically synthesized
  source 1..20: mol_type = other DNA
gagtagaaaaaaaaactata

SEQ ID NO: 68554 - DNA, 20 bp, synthetic construct
  misc_feature 1..20: note = chemically synthesized
  source 1..20: mol_type = other DNA
gtactagcagaaacaaatta

SEQ ID NO: 68555 - DNA, 20 bp, synthetic construct
  misc_feature 1..20: note = chemically synthesized
  source 1..20: mol_type = other DNA
caaattaattagatttttta

SEQ ID NO: 68556 - DNA, 20 bp, synthetic construct
  misc_feature 1..20: note = chemically synthesized
  source 1..20: mol_type = other DNA
ctaagcataagccaagcatg

SEQ ID NO: 68557 - DNA, 20 bp, synthetic construct
  misc_feature 1..20: note = chemically synthesized
  source 1..20: mol_type = other DNA
gccaagcatgagtagatttc

SEQ ID NO: 68558 - DNA, 20 bp, synthetic construct
  misc_feature 1..20: note = chemically synthesized
  source 1..20: mol_type = other DNA
tcaagtgtttaagatagtac

SEQ ID NO: 68559 - DNA, 20 bp, synthetic construct
  misc_feature 1..20: note = chemically synthesized
  source 1..20: mol_type = other DNA
agatagtacctcagatttct

SEQ ID NO: 68560 - DNA, 20 bp, synthetic construct
  misc_feature 1..20: note = chemically synthesized
  source 1..20: mol_type = other DNA
aacattctcatggcattgtt

SEQ ID NO: 68561 - DNA, 20 bp, synthetic construct
  misc_feature 1..20: note = chemically synthesized
  source 1..20: mol_type = other DNA
tgttctaggcttttaagaag

SEQ ID NO: 68562 - DNA, 20 bp, synthetic construct
  misc_feature 1..20: note = chemically synthesized
  source 1..20: mol_type = other DNA
taaaaatttgtattgatgtg

SEQ ID NO: 68563 - DNA, 20 bp, synthetic construct
  misc_feature 1..20: note = chemically synthesized
  source 1..20: mol_type = other DNA
atcatagataattacttttg

SEQ ID NO: 68564 - DNA, 20 bp, synthetic construct
  misc_feature 1..20: note = chemically synthesized
  source 1..20: mol_type = other DNA
gggattacattcttttttat

SEQ ID NO: 68565 - DNA, 20 bp, synthetic construct
  misc_feature 1..20: note = chemically synthesized
  source 1..20: mol_type = other DNA
aaatattctccttaatcttc

SEQ ID NO: 68566 - DNA, 20 bp, synthetic construct
  misc_feature 1..20: note = chemically synthesized
  source 1..20: mol_type = other DNA
atcttctctagctttttaaa

SEQ ID NO: 68567 - DNA, 20 bp, synthetic construct
  misc_feature 1..20: note = chemically synthesized
  source 1..20: mol_type = other DNA
caatcattttacttcttcag

SEQ ID NO: 68568 - DNA, 20 bp, synthetic construct
  misc_feature 1..20: note = chemically synthesized
  source 1..20: mol_type = other DNA
cactatagggggaaatgtgt

SEQ ID NO: 68569 - DNA, 20 bp, synthetic construct
  misc_feature 1..20: note = chemically synthesized
  source 1..20: mol_type = other DNA
ttaatttaatattggttatt

SEQ ID NO: 68570 - DNA, 20 bp, synthetic construct
  misc_feature 1..20: note = chemically synthesized
  source 1..20: mol_type = other DNA
ggtgttgacaaaaataatat

SEQ ID NO: 68571 - DNA, 20 bp, synthetic construct
  misc_feature 1..20: note = chemically synthesized
  source 1..20: mol_type = other DNA
ctctacgtaggaaaagtcaa

SEQ ID NO: 68572 - DNA, 20 bp, synthetic construct
  misc_feature 1..20: note = chemically synthesized
  source 1..20: mol_type = other DNA
cctaaaatatatttctcttt

SEQ ID NO: 68573 - DNA, 20 bp, synthetic construct
  misc_feature 1..20: note = chemically synthesized
  source 1..20: mol_type = other DNA
gatagacaccatcattttaa

SEQ ID NO: 68574 - DNA, 20 bp, synthetic construct
  misc_feature 1..20: note = chemically synthesized
  source 1..20: mol_type = other DNA
accatcattttaagtgtgtt

SEQ ID NO: 68575 - DNA, 20 bp, synthetic construct
  misc_feature 1..20: note = chemically synthesized
  source 1..20: mol_type = other DNA
taagtgtgtttgaggatttc

SEQ ID NO: 68576 - DNA, 20 bp, synthetic construct
  misc_feature 1..20: note = chemically synthesized
  source 1..20: mol_type = other DNA
gcaaaatcactcgatcttta

SEQ ID NO: 68577 - DNA, 20 bp, synthetic construct
  misc_feature 1..20: note = chemically synthesized
  source 1..20: mol_type = other DNA
ggtcttcaccccataaatga

SEQ ID NO: 68578 - DNA, 20 bp, synthetic construct
  misc_feature 1..20: note = chemically synthesized
  source 1..20: mol_type = other DNA
aggatgtgaatgtggtgagg

SEQ ID NO: 68579 - DNA, 20 bp, synthetic construct
  misc_feature 1..20: note = chemically synthesized
  source 1..20: mol_type = other DNA
ctcacagtaggaatgaggaa

SEQ ID NO: 68580 - DNA, 20 bp, synthetic construct
  misc_feature 1..20: note = chemically synthesized
  source 1..20: mol_type = other DNA
aatgccattgccaggagaat

SEQ ID NO: 68581 - DNA, 20 bp, synthetic construct
  misc_feature 1..20: note = chemically synthesized
  source 1..20: mol_type = other DNA
ggtatgcaagccttccagcc

SEQ ID NO: 68582 - DNA, 20 bp, synthetic construct
  misc_feature 1..20: note = chemically synthesized
  source 1..20: mol_type = other DNA
accacacatcctgggaatta

SEQ ID NO: 68583 - DNA, 20 bp, synthetic construct
  misc_feature 1..20: note = chemically synthesized
  source 1..20: mol_type = other DNA
cgaaagaaaggagccgtatg

SEQ ID NO: 68584 - DNA, 20 bp, synthetic construct
  misc_feature 1..20: note = chemically synthesized
  source 1..20: mol_type = other DNA
ttagtgaaagactacaaagt

SEQ ID NO: 68585 - DNA, 20 bp, synthetic construct
  misc_feature 1..20: note = chemically synthesized
  source 1..20: mol_type = other DNA
cttaggctgaatgaggtctc

SEQ ID NO: 68586 - DNA, 20 bp, synthetic construct
  misc_feature 1..20: note = chemically synthesized
  source 1..20: mol_type = other DNA
gctgaatgaggtctcatcag

SEQ ID NO: 68587 - DNA, 20 bp, synthetic construct
  misc_feature 1..20: note = chemically synthesized
  source 1..20: mol_type = other DNA
catcagatttgttttctttc

SEQ ID NO: 68588 - DNA, 20 bp, synthetic construct
  misc_feature 1..20: note = chemically synthesized
  source 1..20: mol_type = other DNA
attagtagatattatttaat

SEQ ID NO: 68589 - DNA, 20 bp, synthetic construct
  misc_feature 1..20: note = chemically synthesized
  source 1..20: mol_type = other DNA
agcctcttaccctaggccct

SEQ ID NO: 68590 - DNA, 20 bp, synthetic construct
  misc_feature 1..20: note = chemically synthesized
  source 1..20: mol_type = other DNA
aagtaaggcaggataaatct

SEQ ID NO: 68591 - DNA, 20 bp, synthetic construct
  misc_feature 1..20: note = chemically synthesized
  source 1..20: mol_type = other DNA
agagttatgaaatttagttg

SEQ ID NO: 68592 - DNA, 20 bp, synthetic construct
  misc_feature 1..20: note = chemically synthesized
  source 1..20: mol_type = other DNA
gagggaattaagtctgacaa

SEQ ID NO: 68593 - DNA, 20 bp, synthetic construct
  misc_feature 1..20: note = chemically synthesized
  source 1..20: mol_type = other DNA
agcatgtatgccttcttcca

SEQ ID NO: 68594 - DNA, 20 bp, synthetic construct
  misc_feature 1..20: note = chemically synthesized
  source 1..20: mol_type = other DNA
atttgcaatggcagacggag

SEQ ID NO: 68595 - DNA, 20 bp, synthetic construct
  misc_feature 1..20: note = chemically synthesized
  source 1..20: mol_type = other DNA
cacaaggtcaggagttccag

SEQ ID NO: 68596 - DNA, 20 bp, synthetic construct
  misc_feature 1..20: note = chemically synthesized
  source 1..20: mol_type = other DNA
tcaagaggctgaggcaggag

SEQ ID NO: 68597 - DNA, 20 bp, synthetic construct
  misc_feature 1..20: note = chemically synthesized
  source 1..20: mol_type = other DNA
atcgcttgaacctgggaggc

SEQ ID NO: 68598 - DNA, 20 bp, synthetic construct
  misc_feature 1..20: note = chemically synthesized
  source 1..20: mol_type = other DNA
aggtggtaaagaataaaata

SEQ ID NO: 68599 - DNA, 20 bp, synthetic construct
  misc_feature 1..20: note = chemically synthesized
  source 1..20: mol_type = other DNA
ttgtttctttccacttcagt

SEQ ID NO: 68600 - DNA, 20 bp, synthetic construct
  misc_feature 1..20: note = chemically synthesized
  source 1..20: mol_type = other DNA
tacacattgtatatatatat

SEQ ID NO: 68601 - DNA, 20 bp, synthetic construct
  misc_feature 1..20: note = chemically synthesized
  source 1..20: mol_type = other DNA
agggtacatgtgcacaacat

SEQ ID NO: 68602 - DNA, 20 bp, synthetic construct
  misc_feature 1..20: note = chemically synthesized
  source 1..20: mol_type = other DNA
cacctatgagtgagaatatg

SEQ ID NO: 68603 - DNA, 20 bp, synthetic construct
  misc_feature 1..20: note = chemically synthesized
  source 1..20: mol_type = other DNA
atgagtgagaatatgtggtg

SEQ ID NO: 68604 - DNA, 20 bp, synthetic construct
  misc_feature 1..20: note = chemically synthesized
  source 1..20: mol_type = other DNA
tgcgatactttgctcagaat

SEQ ID NO: 68605 - DNA, 20 bp, synthetic construct
  misc_feature 1..20: note = chemically synthesized
  source 1..20: mol_type = other DNA
ctttgctcagaatgatggtt

SEQ ID NO: 68606 - DNA, 20 bp, synthetic construct
  misc_feature 1..20: note = chemically synthesized
  source 1..20: mol_type = other DNA
gtgcatgtgtctttatagca

SEQ ID NO: 68607 - DNA, 20 bp, synthetic construct
  misc_feature 1..20: note = chemically synthesized
  source 1..20: mol_type = other DNA
ctgacttccacaatggttga

SEQ ID NO: 68608 - DNA, 20 bp, synthetic construct
  misc_feature 1..20: note = chemically synthesized
  source 1..20: mol_type = other DNA
tccacatcctctccagcacc

SEQ ID NO: 68609 - DNA, 20 bp, synthetic construct
  misc_feature 1..20: note = chemically synthesized
  source 1..20: mol_type = other DNA
ggtgtgagatgatatctcat

SEQ ID NO: 68610 - DNA, 20 bp, synthetic construct
  misc_feature 1..20: note = chemically synthesized
  source 1..20: mol_type = other DNA
gagatgatatctcattgtgg

SEQ ID NO: 68611 - DNA, 20 bp, synthetic construct
  misc_feature 1..20: note = chemically synthesized
  source 1..20: mol_type = other DNA
gtgatgatgagcattttttc

SEQ ID NO: 68612 - DNA, 20 bp, synthetic construct
  misc_feature 1..20: note = chemically synthesized
  source 1..20: mol_type = other DNA
cttcacccccttgttgatgc

SEQ ID NO: 68613 - DNA, 20 bp, synthetic construct
  misc_feature 1..20: note = chemically synthesized
  source 1..20: mol_type = other DNA
acccccttgttgatgcagtt

SEQ ID NO: 68614 - DNA, 20 bp, synthetic construct
  misc_feature 1..20: note = chemically synthesized
  source 1..20: mol_type = other DNA
tgtttgtttttttcttgtaa

SEQ ID NO: 68615 - DNA, 20 bp, synthetic construct
  misc_feature 1..20: note = chemically synthesized
  source 1..20: mol_type = other DNA
gtaaatttgtttgagttcat

SEQ ID NO: 68616 - DNA, 20 bp, synthetic construct
  misc_feature 1..20: note = chemically synthesized
  source 1..20: mol_type = other DNA
tattagccctttgtcagatg

SEQ ID NO: 68617 - DNA, 20 bp, synthetic construct
  misc_feature 1..20: note = chemically synthesized
  source 1..20: mol_type = other DNA
ggttgcctgttcactctgat

SEQ ID NO: 68618 - DNA, 20 bp, synthetic construct
  misc_feature 1..20: note = chemically synthesized
  source 1..20: mol_type = other DNA
cttttgctgtgcagaagctc

SEQ ID NO: 68619 - DNA, 20 bp, synthetic construct
  misc_feature 1..20: note = chemically synthesized
  source 1..20: mol_type = other DNA
tccattttgtcttttgttgc

SEQ ID NO: 68620 - DNA, 20 bp, synthetic construct
  misc_feature 1..20: note = chemically synthesized
  source 1..20: mol_type = other DNA
tcttttgttgccattgcttt

SEQ ID NO: 68621 - DNA, 20 bp, synthetic construct
  misc_feature 1..20: note = chemically synthesized
  source 1..20: mol_type = other DNA
catgcctatgtcctgaatgg

SEQ ID NO: 68622 - DNA, 20 bp, synthetic construct
  misc_feature 1..20: note = chemically synthesized
  source 1..20: mol_type = other DNA
tatgtcctgaatggtattgc

SEQ ID NO: 68623 - DNA, 20 bp, synthetic construct
  misc_feature 1..20: note = chemically synthesized
  source 1..20: mol_type = other DNA
gtattgcttaggttttcttc

SEQ ID NO: 68624 - DNA, 20 bp, synthetic construct
  misc_feature 1..20: note = chemically synthesized
  source 1..20: mol_type = other DNA
aggttttcttctaaggtttt

SEQ ID NO: 68625 - DNA, 20 bp, synthetic construct
  misc_feature 1..20: note = chemically synthesized
  source 1..20: mol_type = other DNA
tataaggtgtaaggaaggga

SEQ ID NO: 68626 - DNA, 20 bp, synthetic construct
  misc_feature 1..20: note = chemically synthesized
  source 1..20: mol_type = other DNA
gtgtaaggaagggatccagt

SEQ ID NO: 68627 - DNA, 20 bp, synthetic construct
  misc_feature 1..20: note = chemically synthesized
  source 1..20: mol_type = other DNA
cagctttctacatatggcta

SEQ ID NO: 68628 - DNA, 20 bp, synthetic construct
  misc_feature 1..20: note = chemically synthesized
  source 1..20: mol_type = other DNA
taaatagggaatcctttccc

SEQ ID NO: 68629 - DNA, 20 bp, synthetic construct
  misc_feature 1..20: note = chemically synthesized
  source 1..20: mol_type = other DNA
tagggaatcctttccccatt

SEQ ID NO: 68630 - DNA, 20 bp, synthetic construct
  misc_feature 1..20: note = chemically synthesized
  source 1..20: mol_type = other DNA
ttccccattgcttgtttttg

SEQ ID NO: 68631 - DNA, 20 bp, synthetic construct
  misc_feature 1..20: note = chemically synthesized
  source 1..20: mol_type = other DNA
tctgctccattggtctacat

SEQ ID NO: 68632 - DNA, 20 bp, synthetic construct
  misc_feature 1..20: note = chemically synthesized
  source 1..20: mol_type = other DNA
ctgttttggtaccagtacca

SEQ ID NO: 68633 - DNA, 20 bp, synthetic construct
  misc_feature 1..20: note = chemically synthesized
  source 1..20: mol_type = other DNA
ttggttactgtaccttgtag

SEQ ID NO: 68634 - DNA, 20 bp, synthetic construct
  misc_feature 1..20: note = chemically synthesized
  source 1..20: mol_type = other DNA
aagtcaggtagcatgatgcc

SEQ ID NO: 68635 - DNA, 20 bp, synthetic construct
  misc_feature 1..20: note = chemically synthesized
  source 1..20: mol_type = other DNA
gatgcctctagctttgttct

SEQ ID NO: 68636 - DNA, 20 bp, synthetic construct
  misc_feature 1..20: note = chemically synthesized
  source 1..20: mol_type = other DNA
tctagctttgttcttttggc

SEQ ID NO: 68637 - DNA, 20 bp, synthetic construct
  misc_feature 1..20: note = chemically synthesized
  source 1..20: mol_type = other DNA
tggttccatatgaactttaa

SEQ ID NO: 68638 - DNA, 20 bp, synthetic construct
  misc_feature 1..20: note = chemically synthesized
  source 1..20: mol_type = other DNA
attctgtgaagaaagtcatt

SEQ ID NO: 68639 - DNA, 20 bp, synthetic construct
  misc_feature 1..20: note = chemically synthesized
  source 1..20: mol_type = other DNA
cagtaaggccattttcacga

SEQ ID NO: 68640 - DNA, 20 bp, synthetic construct
  misc_feature 1..20: note = chemically synthesized
  source 1..20: mol_type = other DNA
tgagcatggaatgttcttcc

SEQ ID NO: 68641 - DNA, 20 bp, synthetic construct
  misc_feature 1..20: note = chemically synthesized
  source 1..20: mol_type = other DNA
tcctcttttatttcgttgag

SEQ ID NO: 68642 - DNA, 20 bp, synthetic construct
  misc_feature 1..20: note = chemically synthesized
  source 1..20: mol_type = other DNA
gtccttcacatcccttgtaa

SEQ ID NO: 68643 - DNA, 20 bp, synthetic construct
  misc_feature 1..20: note = chemically synthesized
  source 1..20: mol_type = other DNA
aattgtgaatgggagttcac

SEQ ID NO: 68644 - DNA, 20 bp, synthetic construct
  misc_feature 1..20: note = chemically synthesized
  source 1..20: mol_type = other DNA
agttcactcatgatttggct

SEQ ID NO: 68645 - DNA, 20 bp, synthetic construct
  misc_feature 1..20: note = chemically synthesized
  source 1..20: mol_type = other DNA
tgtctgttattggtgtatag

SEQ ID NO: 68646 - DNA, 20 bp, synthetic construct
  misc_feature 1..20: note = chemically synthesized
  source 1..20: mol_type = other DNA
ttattggtgtataggaatgc

SEQ ID NO: 68647 - DNA, 20 bp, synthetic construct
  misc_feature 1..20: note = chemically synthesized
  source 1..20: mol_type = other DNA
gaatgcttgtgatttttgca

SEQ ID NO: 68648 - DNA, 20 bp, synthetic construct
  misc_feature 1..20: note = chemically synthesized
  source 1..20: mol_type = other DNA
gtatgctgagacttttctga

SEQ ID NO: 68649 - DNA, 20 bp, synthetic construct
  misc_feature 1..20: note = chemically synthesized
  source 1..20: mol_type = other DNA
agacttttctgaagttgctt

SEQ ID NO: 68650 - DNA, 20 bp, synthetic construct
  misc_feature 1..20: note = chemically synthesized
  source 1..20: mol_type = other DNA
tgaagttgcttatcagctta

SEQ ID NO: 68651 - DNA, 20 bp, synthetic construct
  misc_feature 1..20: note = chemically synthesized
  source 1..20: mol_type = other DNA
gagattttgggctgagacga

SEQ ID NO: 68652 - DNA, 20 bp, synthetic construct
  misc_feature 1..20: note = chemically synthesized
  source 1..20: mol_type = other DNA
gccctttatttctttctctt

SEQ ID NO: 68653 - DNA, 20 bp, synthetic construct
  misc_feature 1..20: note = chemically synthesized
  source 1..20: mol_type = other DNA
agagggcatccctgtcttgt

SEQ ID NO: 68654 - DNA, 20 bp, synthetic construct
  misc_feature 1..20: note = chemically synthesized
  source 1..20: mol_type = other DNA
cttgtgccagttttcaaagg

SEQ ID NO: 68655 - DNA, 20 bp, synthetic construct
  misc_feature 1..20: note = chemically synthesized
  source 1..20: mol_type = other DNA
cagttttcaaagggaatgct

SEQ ID NO: 68656 - DNA, 20 bp, synthetic construct
  misc_feature 1..20: note = chemically synthesized
  source 1..20: mol_type = other DNA
cattcagtatgatattggct

SEQ ID NO: 68657 - DNA, 20 bp, synthetic construct
  misc_feature 1..20: note = chemically synthesized
  source 1..20: mol_type = other DNA
ccatcgatacctaatttatt

SEQ ID NO: 68658 - DNA, 20 bp, synthetic construct
  misc_feature 1..20: note = chemically synthesized
  source 1..20: mol_type = other DNA
tgcatctattgagataatca

SEQ ID NO: 68659 - DNA, 20 bp, synthetic construct
  misc_feature 1..20: note = chemically synthesized
  source 1..20: mol_type = other DNA
catgtggtttgtgtctttgg

SEQ ID NO: 68660 - DNA, 20 bp, synthetic construct
  misc_feature 1..20: note = chemically synthesized
  source 1..20: mol_type = other DNA
gtctttggttctgtttatat

SEQ ID NO: 68661 - DNA, 20 bp, synthetic construct
  misc_feature 1..20: note = chemically synthesized
  source 1..20: mol_type = other DNA
ggttctgtttatatgctgga

SEQ ID NO: 68662 - DNA, 20 bp, synthetic construct
  misc_feature 1..20: note = chemically synthesized
  source 1..20: mol_type = other DNA
tttatatgctggattatgtt

SEQ ID NO: 68663 - DNA, 20 bp, synthetic construct
  misc_feature 1..20: note = chemically synthesized
  source 1..20: mol_type = other DNA
agcccacttgatcatggtgg

SEQ ID NO: 68664 - DNA, 20 bp, synthetic construct
  misc_feature 1..20: note = chemically synthesized
  source 1..20: mol_type = other DNA
gataagctttttgatgtgct

SEQ ID NO: 68665 - DNA, 20 bp, synthetic construct
  misc_feature 1..20: note = chemically synthesized
  source 1..20: mol_type = other DNA
ctttttgatgtgctcctgga

SEQ ID NO: 68666 - DNA, 20 bp, synthetic construct
  misc_feature 1..20: note = chemically synthesized
  source 1..20: mol_type = other DNA
ttggtttgccagtattttac

SEQ ID NO: 68667 - DNA, 20 bp, synthetic construct
  misc_feature 1..20: note = chemically synthesized
  source 1..20: mol_type = other DNA
ctttttttgttgtgtgtctg

SEQ ID NO: 68668 - DNA, 20 bp, synthetic construct
  misc_feature 1..20: note = chemically synthesized
  source 1..20: mol_type = other DNA
ggcctcataaaatgagttag

SEQ ID NO: 68669 - DNA, 20 bp, synthetic construct
  misc_feature 1..20: note = chemically synthesized
  source 1..20: mol_type = other DNA
gggaggattccctctttttc

SEQ ID NO: 68670 - DNA, 20 bp, synthetic construct
  misc_feature 1..20: note = chemically synthesized
  source 1..20: mol_type = other DNA
cctctttttctattgattgg

SEQ ID NO: 68671 - DNA, 20 bp, synthetic construct
  misc_feature 1..20: note = chemically synthesized
  source 1..20: mol_type = other DNA
tcctggactttttttggttg

SEQ ID NO: 68672 - DNA, 20 bp, synthetic construct
  misc_feature 1..20: note = chemically synthesized
  source 1..20: mol_type = other DNA
atactttacagacaagcaat

SEQ ID NO: 68673 - DNA, 20 bp, synthetic construct
  misc_feature 1..20: note = chemically synthesized
  source 1..20: mol_type = other DNA
aatggaaaacaaaaaaaagg

SEQ ID NO: 68674 - DNA, 20 bp, synthetic construct
  misc_feature 1..20: note = chemically synthesized
  source 1..20: mol_type = other DNA
atgcacccaatacagcagca

SEQ ID NO: 68675 - DNA, 20 bp, synthetic construct
  misc_feature 1..20: note = chemically synthesized
  source 1..20: mol_type = other DNA
cagtgcaatcaaactagaac

SEQ ID NO: 68676 - DNA, 20 bp, synthetic construct
  misc_feature 1..20: note = chemically synthesized
  source 1..20: mol_type = other DNA
taagatcagagcagaagtga

SEQ ID NO: 68677 - DNA, 20 bp, synthetic construct
  misc_feature 1..20: note = chemically synthesized
  source 1..20: mol_type = other DNA
aaaaatcaatgaatccagga

SEQ ID NO: 68678 - DNA, 20 bp, synthetic construct
  misc_feature 1..20: note = chemically synthesized
  source 1..20: mol_type = other DNA
ctgaaattgagacaataatt

SEQ ID NO: 68679 - DNA, 20 bp, synthetic construct
  misc_feature 1..20: note = chemically synthesized
  source 1..20: mol_type = other DNA
caccacagcagcaagtaatt

SEQ ID NO: 68680 - DNA, 20 bp, synthetic construct
  misc_feature 1..20: note = chemically synthesized
  source 1..20: mol_type = other DNA
tctaaaaaatgtggatagaa

SEQ ID NO: 68681 - DNA, 20 bp, synthetic construct
  misc_feature 1..20: note = chemically synthesized
  source 1..20: mol_type = other DNA
agtttaatattgagtggaaa

SEQ ID NO: 68682 - DNA, 20 bp, synthetic construct
  misc_feature 1..20: note = chemically synthesized
  source 1..20: mol_type = other DNA
gggtaggtgacatatacaga

SEQ ID NO: 68683 - DNA, 20 bp, synthetic construct
  misc_feature 1..20: note = chemically synthesized
  source 1..20: mol_type = other DNA
ataataatatgtgaatgaca

SEQ ID NO: 68684 - DNA, 20 bp, synthetic construct
  misc_feature 1..20: note = chemically synthesized
  source 1..20: mol_type = other DNA
aagtaaaagctggctaaagt

SEQ ID NO: 68685 - DNA, 20 bp, synthetic construct
  misc_feature 1..20: note = chemically synthesized
  source 1..20: mol_type = other DNA
cttgttttttgaggtggcac

SEQ ID NO: 68686 - DNA, 20 bp, synthetic construct
  misc_feature 1..20: note = chemically synthesized
  source 1..20: mol_type = other DNA
gaaatgactgctcccccatc

SEQ ID NO: 68687 - DNA, 20 bp, synthetic construct
  misc_feature 1..20: note = chemically synthesized
  source 1..20: mol_type = other DNA
gcatagtctgctacctttac

SEQ ID NO: 68688 - DNA, 20 bp, synthetic construct
  misc_feature 1..20: note = chemically synthesized
  source 1..20: mol_type = other DNA
tctcaaattttatatgatgg

SEQ ID NO: 68689 - DNA, 20 bp, synthetic construct
  misc_feature 1..20: note = chemically synthesized
  source 1..20: mol_type = other DNA
ttgggtcccattttttgagt

SEQ ID NO: 68690 - DNA, 20 bp, synthetic construct
  misc_feature 1..20: note = chemically synthesized
  source 1..20: mol_type = other DNA
cacacagctgagcaatttac

SEQ ID NO: 68691 - DNA, 20 bp, synthetic construct
  misc_feature 1..20: note = chemically synthesized
  source 1..20: mol_type = other DNA
ctactttatttacataaact

SEQ ID NO: 68692 - DNA, 20 bp, synthetic construct
  misc_feature 1..20: note = chemically synthesized
  source 1..20: mol_type = other DNA
gaatattttaagtaaactgt

SEQ ID NO: 68693 - DNA, 20 bp, synthetic construct
  misc_feature 1..20: note = chemically synthesized
  source 1..20: mol_type = other DNA
gaagtgagggttacagtgac

SEQ ID NO: 68694 - DNA, 20 bp, synthetic construct
  misc_feature 1..20: note = chemically synthesized
  source 1..20: mol_type = other DNA
tgaagataagggggaaagaa

SEQ ID NO: 68695 - DNA, 20 bp, synthetic construct
  misc_feature 1..20: note = chemically synthesized
  source 1..20: mol_type = other DNA
tggtgatcttttgtgatacc

SEQ ID NO: 68696 - DNA, 20 bp, synthetic construct
  misc_feature 1..20: note = chemically synthesized
  source 1..20: mol_type = other DNA
gatacctatggtttttaaat

SEQ ID NO: 68697 - DNA, 20 bp, synthetic construct
  misc_feature 1..20: note = chemically synthesized
  source 1..20: mol_type = other DNA
cctatggtttttaaatattt

SEQ ID NO: 68698 - DNA, 20 bp, synthetic construct
  misc_feature 1..20: note = chemically synthesized
  source 1..20: mol_type = other DNA
ttttaaatatttgtttgttt

SEQ ID NO: 68699 - DNA, 20 bp, synthetic construct
  misc_feature 1..20: note = chemically synthesized
  source 1..20: mol_type = other DNA
tttaatttaaactttagttc

SEQ ID NO: 68700 - DNA, 20 bp, synthetic construct
  misc_feature 1..20: note = chemically synthesized
  source 1..20: mol_type = other DNA
caaaattattgtcaactgga

SEQ ID NO: 68701 - DNA, 20 bp, synthetic construct
  misc_feature 1..20: note = chemically synthesized
  source 1..20: mol_type = other DNA
taagtttaactttcaggact

SEQ ID NO: 68702 - DNA, 20 bp, synthetic construct
  misc_feature 1..20: note = chemically synthesized
  source 1..20: mol_type = other DNA
caggcttattatccatcaaa

SEQ ID NO: 68703 - DNA, 20 bp, synthetic construct
  misc_feature 1..20: note = chemically synthesized
  source 1..20: mol_type = other DNA
tatccatcaaactgagattg

SEQ ID NO: 68704 - DNA, 20 bp, synthetic construct
  misc_feature 1..20: note = chemically synthesized
  source 1..20: mol_type = other DNA
cagacacatgaattttgaaa

SEQ ID NO: 68705 - DNA, 20 bp, synthetic construct
  misc_feature 1..20: note = chemically synthesized
  source 1..20: mol_type = other DNA
agagttaaaaattttggagt

SEQ ID NO: 68706 - DNA, 20 bp, synthetic construct
  misc_feature 1..20: note = chemically synthesized
  source 1..20: mol_type = other DNA
taaaattttttattactgag

SEQ ID NO: 68707 - DNA, 20 bp, synthetic construct
  misc_feature 1..20: note = chemically synthesized
  source 1..20: mol_type = other DNA
caaaaatcaaggaaaatgtt

SEQ ID NO: 68708 - DNA, 20 bp, synthetic construct
  misc_feature 1..20: note = chemically synthesized
  source 1..20: mol_type = other DNA
attaagttatcggaagaatg

SEQ ID NO: 68709 - DNA, 20 bp, synthetic construct
  misc_feature 1..20: note = chemically synthesized
  source 1..20: mol_type = other DNA
tcggaagaatgagctgcttc

SEQ ID NO: 68710 - DNA, 20 bp, synthetic construct
  misc_feature 1..20: note = chemically synthesized
  source 1..20: mol_type = other DNA
tttttctggtgttattttct

SEQ ID NO: 68711 - DNA, 20 bp, synthetic construct
  misc_feature 1..20: note = chemically synthesized
  source 1..20: mol_type = other DNA
caagttttcattgagcataa

SEQ ID NO: 68712 - DNA, 20 bp, synthetic construct
  misc_feature 1..20: note = chemically synthesized
  source 1..20: mol_type = other DNA
gaggagacaaaataaatgca

SEQ ID NO: 68713 - DNA, 20 bp, synthetic construct
  misc_feature 1..20: note = chemically synthesized
  source 1..20: mol_type = other DNA
tttaaagcatgtcttgggcc

SEQ ID NO: 68714 - DNA, 20 bp, synthetic construct
  misc_feature 1..20: note = chemically synthesized
  source 1..20: mol_type = other DNA
catgtcttgggcccaaggtt

SEQ ID NO: 68715 - DNA, 20 bp, synthetic construct
  misc_feature 1..20: note = chemically synthesized
  source 1..20: mol_type = other DNA
catggaaggagatgacacag

SEQ ID NO: 68716 - DNA, 20 bp, synthetic construct
  misc_feature 1..20: note = chemically synthesized
  source 1..20: mol_type = other DNA
ggtcttttgtccctgtcata

SEQ ID NO: 68717 - DNA, 20 bp, synthetic construct
  misc_feature 1..20: note = chemically synthesized
  source 1..20: mol_type = other DNA
ccctttaatttttaaggttc

SEQ ID NO: 68718 - DNA, 20 bp, synthetic construct
  misc_feature 1..20: note = chemically synthesized
  source 1..20: mol_type = other DNA
ttttaaggttctattgcttt

SEQ ID NO: 68719 - DNA, 20 bp, synthetic construct
  misc_feature 1..20: note = chemically synthesized
  source 1..20: mol_type = other DNA
tgatattcatggaattaaaa

SEQ ID NO: 68720 - DNA, 20 bp, synthetic construct
  misc_feature 1..20: note = chemically synthesized
  source 1..20: mol_type = other DNA
aactggcttcacactgataa

SEQ ID NO: 68721 - DNA, 20 bp, synthetic construct
  misc_feature 1..20: note = chemically synthesized
  source 1..20: mol_type = other DNA
taagccagatttatggagag

SEQ ID NO: 68722 - DNA, 20 bp, synthetic construct
  misc_feature 1..20: note = chemically synthesized
  source 1..20: mol_type = other DNA
aagtggagccttccatatat

SEQ ID NO: 68723 - DNA, 20 bp, synthetic construct
  misc_feature 1..20: note = chemically synthesized
  source 1..20: mol_type = other DNA
atatttttcaaagaatccct

SEQ ID NO: 68724 - DNA, 20 bp, synthetic construct
  misc_feature 1..20: note = chemically synthesized
  source 1..20: mol_type = other DNA
gtaaaacttccctataaata

SEQ ID NO: 68725 - DNA, 20 bp, synthetic construct
  misc_feature 1..20: note = chemically synthesized
  source 1..20: mol_type = other DNA
agctgaccctgactggatga

SEQ ID NO: 68726 - DNA, 20 bp, synthetic construct
  misc_feature 1..20: note = chemically synthesized
  source 1..20: mol_type = other DNA
agaattatcacatgcatttc

SEQ ID NO: 68727 - DNA, 20 bp, synthetic construct
  misc_feature 1..20: note = chemically synthesized
  source 1..20: mol_type = other DNA
accatagtgagggtaaattg

SEQ ID NO: 68728 - DNA, 20 bp, synthetic construct
  misc_feature 1..20: note = chemically synthesized
  source 1..20: mol_type = other DNA
gggtaaattggatggcttca

SEQ ID NO: 68729 - DNA, 20 bp, synthetic construct
  misc_feature 1..20: note = chemically synthesized
  source 1..20: mol_type = other DNA
actctgctgataacttatta

SEQ ID NO: 68730 - DNA, 20 bp, synthetic construct
  misc_feature 1..20: note = chemically synthesized
  source 1..20: mol_type = other DNA
tgaagaatttttttttgagc

SEQ ID NO: 68731 - DNA, 20 bp, synthetic construct
  misc_feature 1..20: note = chemically synthesized
  source 1..20: mol_type = other DNA
gagcaaatgttttcagtaaa

SEQ ID NO: 68732 - DNA, 20 bp, synthetic construct
  misc_feature 1..20: note = chemically synthesized
  source 1..20: mol_type = other DNA
agatgaaataatagttattg

SEQ ID NO: 68733 - DNA, 20 bp, synthetic construct
  misc_feature 1..20: note = chemically synthesized
  source 1..20: mol_type = other DNA
ttattgatatgtttaattta

SEQ ID NO: 68734 - DNA, 20 bp, synthetic construct
  misc_feature 1..20: note = chemically synthesized
  source 1..20: mol_type = other DNA
gatatgtttaatttaatatg

SEQ ID NO: 68735 - DNA, 20 bp, synthetic construct
  misc_feature 1..20: note = chemically synthesized
  source 1..20: mol_type = other DNA
aagtctacagtctttgagcc

SEQ ID NO: 68736 - DNA, 20 bp, synthetic construct
  misc_feature 1..20: note = chemically synthesized
  source 1..20: mol_type = other DNA
cccttaataatcatatatct

SEQ ID NO: 68737 - DNA, 20 bp, synthetic construct
  misc_feature 1..20: note = chemically synthesized
  source 1..20: mol_type = other DNA
taagtattatgtagaataaa

SEQ ID NO: 68738 - DNA, 20 bp, synthetic construct
  misc_feature 1..20: note = chemically synthesized
  source 1..20: mol_type = other DNA
agaaattgccatcactttag

SEQ ID NO: 68739 - DNA, 20 bp, synthetic construct
  misc_feature 1..20: note = chemically synthesized
  source 1..20: mol_type = other DNA
cagattgtgctgttaaaaga

SEQ ID NO: 68740 - DNA, 20 bp, synthetic construct
  misc_feature 1..20: note = chemically synthesized
  source 1..20: mol_type = other DNA
agactcagtttttaaatttc

SEQ ID NO: 68741 - DNA, 20 bp, synthetic construct
  misc_feature 1..20: note = chemically synthesized
  source 1..20: mol_type = other DNA
tggatttcaaggaaatggat

SEQ ID NO: 68742 - DNA, 20 bp, synthetic construct
  misc_feature 1..20: note = chemically synthesized
  source 1..20: mol_type = other DNA
ttaaccaaaatagcagtaaa

SEQ ID NO: 68743 - DNA, 20 bp, synthetic construct
  misc_feature 1..20: note = chemically synthesized
  source 1..20: mol_type = other DNA
gcagtaaaaatggctttggc

SEQ ID NO: 68744 - DNA, 20 bp, synthetic construct
  misc_feature 1..20: note = chemically synthesized
  source 1..20: mol_type = other DNA
agtatctgtaaattaaggat

SEQ ID NO: 68745 - DNA, 20 bp, synthetic construct
  misc_feature 1..20: note = chemically synthesized
  source 1..20: mol_type = other DNA
tctgtaaattaaggatgttg

SEQ ID NO: 68746 - DNA, 20 bp, synthetic construct
  misc_feature 1..20: note = chemically synthesized
  source 1..20: mol_type = other DNA
aattaaggatgttggattgc

SEQ ID NO: 68747 - DNA, 20 bp, synthetic construct
  misc_feature 1..20: note = chemically synthesized
  source 1..20: mol_type = other DNA
gcttgagattttagctctaa

SEQ ID NO: 68748 - DNA, 20 bp, synthetic construct
  misc_feature 1..20: note = chemically synthesized
  source 1..20: mol_type = other DNA
taaattagtgtcctggatgc

SEQ ID NO: 68749 - DNA, 20 bp, synthetic construct
  misc_feature 1..20: note = chemically synthesized
  source 1..20: mol_type = other DNA
taatttggcataattggaca

SEQ ID NO: 68750 - DNA, 20 bp, synthetic construct
  misc_feature 1..20: note = chemically synthesized
  source 1..20: mol_type = other DNA
gaaatattaatttatttctt

SEQ ID NO: 68751 - DNA, 20 bp, synthetic construct
  misc_feature 1..20: note = chemically synthesized
  source 1..20: mol_type = other DNA
ccttgtttgtaggctgtaga

SEQ ID NO: 68752 - DNA, 20 bp, synthetic construct
  misc_feature 1..20: note = chemically synthesized
  source 1..20: mol_type = other DNA
gtgggctgcatgcatcccaa

SEQ ID NO: 68753 - DNA, 20 bp, synthetic construct
  misc_feature 1..20: note = chemically synthesized
  source 1..20: mol_type = other DNA
cacaactttcttaaaacatt

SEQ ID NO: 68754 - DNA, 20 bp, synthetic construct
  misc_feature 1..20: note = chemically synthesized
  source 1..20: mol_type = other DNA
atgagattttatgggacatt

SEQ ID NO: 68755 - DNA, 20 bp, synthetic construct
  misc_feature 1..20: note = chemically synthesized
  source 1..20: mol_type = other DNA
atgtgtggcccagggaagcc

SEQ ID NO: 68756 - DNA, 20 bp, synthetic construct
  misc_feature 1..20: note = chemically synthesized
  source 1..20: mol_type = other DNA
aagattggacatccctgctg

SEQ ID NO: 68757 - DNA, 20 bp, synthetic construct
  misc_feature 1..20: note = chemically synthesized
  source 1..20: mol_type = other DNA
aatcaatatttgcagagtct

SEQ ID NO: 68758 - DNA, 20 bp, synthetic construct
  misc_feature 1..20: note = chemically synthesized
  source 1..20: mol_type = other DNA
gcagagtcttgtagcttttt

SEQ ID NO: 68759 - DNA, 20 bp, synthetic construct
  misc_feature 1..20: note = chemically synthesized
  source 1..20: mol_type = other DNA
tttcccctgccacattgaag

SEQ ID NO: 68760 - DNA, 20 bp, synthetic construct
  misc_feature 1..20: note = chemically synthesized
  source 1..20: mol_type = other DNA
tagccactcttctttccagg

SEQ ID NO: 68761 - DNA, 20 bp, synthetic construct
  misc_feature 1..20: note = chemically synthesized
  source 1..20: mol_type = other DNA
gaattactaatatattatct

SEQ ID NO: 68762 - DNA, 20 bp, synthetic construct
  misc_feature 1..20: note = chemically synthesized
  source 1..20: mol_type = other DNA
tacaccaggacctgccttaa

SEQ ID NO: 68763 - DNA, 20 bp, synthetic construct
  misc_feature 1..20: note = chemically synthesized
  source 1..20: mol_type = other DNA
acttgtatagaagccaatac

SEQ ID NO: 68764 - DNA, 20 bp, synthetic construct
  misc_feature 1..20: note = chemically synthesized
  source 1..20: mol_type = other DNA
gactgcttgtattaaagaaa

SEQ ID NO: 68765 - DNA, 20 bp, synthetic construct
  misc_feature 1..20: note = chemically synthesized
  source 1..20: mol_type = other DNA
taaagaaacaaagtttaatt

SEQ ID NO: 68766 - DNA, 20 bp, synthetic construct
  misc_feature 1..20: note = chemically synthesized
  source 1..20: mol_type = other DNA
tttaattcatcgttttgttg

SEQ ID NO: 68767 - DNA, 20 bp, synthetic construct
  misc_feature 1..20: note = chemically synthesized
  source 1..20: mol_type = other DNA
ttcatcgttttgttgttgtg

SEQ ID NO: 68768 - DNA, 20 bp, synthetic construct
  misc_feature 1..20: note = chemically synthesized
  source 1..20: mol_type = other DNA
attttatgtattttgttgaa

SEQ ID NO: 68769 - DNA, 20 bp, synthetic construct
  misc_feature 1..20: note = chemically synthesized
  source 1..20: mol_type = other DNA
caagagtaatgcatgcctga

SEQ ID NO: 68770 - DNA, 20 bp, synthetic construct
  misc_feature 1..20: note = chemically synthesized
  source 1..20: mol_type = other DNA
tgaagatggggcctggtggg

SEQ ID NO: 68771 - DNA, 20 bp, synthetic construct
  misc_feature 1..20: note = chemically synthesized
  source 1..20: mol_type = other DNA
ataggagcagagttatcata

SEQ ID NO: 68772 - DNA, 20 bp, synthetic construct
  misc_feature 1..20: note = chemically synthesized
  source 1..20: mol_type = other DNA
ggtgagttctcatgagatat

SEQ ID NO: 68773 - DNA, 20 bp, synthetic construct
  misc_feature 1..20: note = chemically synthesized
  source 1..20: mol_type = other DNA
agccatgtgaagacacatgc

SEQ ID NO: 68774 - DNA, 20 bp, synthetic construct
  misc_feature 1..20: note = chemically synthesized
  source 1..20: mol_type = other DNA
tgctcctgtttttctctctg

SEQ ID NO: 68775 - DNA, 20 bp, synthetic construct
  misc_feature 1..20: note = chemically synthesized
  source 1..20: mol_type = other DNA
tttttctctctgccatgatt

SEQ ID NO: 68776 - DNA, 20 bp, synthetic construct
  misc_feature 1..20: note = chemically synthesized
  source 1..20: mol_type = other DNA
tagaagctgagcagacgttg

SEQ ID NO: 68777 - DNA, 20 bp, synthetic construct
  misc_feature 1..20: note = chemically synthesized
  source 1..20: mol_type = other DNA
tattatttaagttatgtgac

SEQ ID NO: 68778 - DNA, 20 bp, synthetic construct
  misc_feature 1..20: note = chemically synthesized
  source 1..20: mol_type = other DNA
aggtgttcaagatgtgtcct

SEQ ID NO: 68779 - DNA, 20 bp, synthetic construct
  misc_feature 1..20: note = chemically synthesized
  source 1..20: mol_type = other DNA
ttaaaagggaagcagagcat

SEQ ID NO: 68780 - DNA, 20 bp, synthetic construct
  misc_feature 1..20: note = chemically synthesized
  source 1..20: mol_type = other DNA
cctggtggcctaggagtact

SEQ ID NO: 68781 - DNA, 20 bp, synthetic construct
  misc_feature 1..20: note = chemically synthesized
  source 1..20: mol_type = other DNA
agtactgaatgattttgtgg

SEQ ID NO: 68782 - DNA, 20 bp, synthetic construct
  misc_feature 1..20: note = chemically synthesized
  source 1..20: mol_type = other DNA
ttcaggaccctgctgccttg

SEQ ID NO: 68783 - DNA, 20 bp, synthetic construct
  misc_feature 1..20: note = chemically synthesized
  source 1..20: mol_type = other DNA
ggcccaagaacagctaaggc

SEQ ID NO: 68784 - DNA, 20 bp, synthetic construct
  misc_feature 1..20: note = chemically synthesized
  source 1..20: mol_type = other DNA
gggtgcaagacataagcctt

SEQ ID NO: 68785 - DNA, 20 bp, synthetic construct
  misc_feature 1..20: note = chemically synthesized
  source 1..20: mol_type = other DNA
gtgtgcaaaggtcaaaaagt

SEQ ID NO: 68786 - DNA, 20 bp, synthetic construct
  misc_feature 1..20: note = chemically synthesized
  source 1..20: mol_type = other DNA
ttgaggcttgtaagcctcca

SEQ ID NO: 68787 - DNA, 20 bp, synthetic construct
  misc_feature 1..20: note = chemically synthesized
  source 1..20: mol_type = other DNA
cccagaatggtagatccact

SEQ ID NO: 68788 - DNA, 20 bp, synthetic construct
  misc_feature 1..20: note = chemically synthesized
  source 1..20: mol_type = other DNA
gatatgagacatggggtcaa

SEQ ID NO: 68789 - DNA, 20 bp, synthetic construct
  misc_feature 1..20: note = chemically synthesized
  source 1..20: mol_type = other DNA
gagtgttaaggtgtgtattt

SEQ ID NO: 68790 - DNA, 20 bp, synthetic construct
  misc_feature 1..20: note = chemically synthesized
  source 1..20: mol_type = other DNA
ctgggtaatttataaagaaa

SEQ ID NO: 68791 - DNA, 20 bp, synthetic construct
  misc_feature 1..20: note = chemically synthesized
  source 1..20: mol_type = other DNA
agcatgtgaaaaacctaccc

SEQ ID NO: 68792 - DNA, 20 bp, synthetic construct
  misc_feature 1..20: note = chemically synthesized
  source 1..20: mol_type = other DNA
tgtgttccttccatgacagg

SEQ ID NO: 68793 - DNA, 20 bp, synthetic construct
  misc_feature 1..20: note = chemically synthesized
  source 1..20: mol_type = other DNA
aaggtgtaatgactgccctg

SEQ ID NO: 68794 - DNA, 20 bp, synthetic construct
  misc_feature 1..20: note = chemically synthesized
  source 1..20: mol_type = other DNA
ttatgtcttggaagtaacta

SEQ ID NO: 68795 - DNA, 20 bp, synthetic construct
  misc_feature 1..20: note = chemically synthesized
  source 1..20: mol_type = other DNA
cttggaagtaactaacttgt

SEQ ID NO: 68796 - DNA, 20 bp, synthetic construct
  misc_feature 1..20: note = chemically synthesized
  source 1..20: mol_type = other DNA
tttgtaggactgttgggaag

SEQ ID NO: 68797 - DNA, 20 bp, synthetic construct
  misc_feature 1..20: note = chemically synthesized
  source 1..20: mol_type = other DNA
ttttgtgatgtgagaagaac

SEQ ID NO: 68798 - DNA, 20 bp, synthetic construct
  misc_feature 1..20: note = chemically synthesized
  source 1..20: mol_type = other DNA
aggggccagaggtggaagga

SEQ ID NO: 68799 - DNA, 20 bp, synthetic construct
  misc_feature 1..20: note = chemically synthesized
  source 1..20: mol_type = other DNA
catggtggcagagttctcat
